United States Patent Application Publication US 2005/0244851 A1 - sequence listing, part 32

SEQ ID NO: 1233874 - DNA, 25 bp, Homo sapien
caaatacatgatttacataagggac

SEQ ID NO: 1233875 - DNA, 25 bp, Homo sapien
tggatttcattgagcgctcctcaga

SEQ ID NO: 1233876 - DNA, 25 bp, Homo sapien
tgtctgtggctttcgcatccataga

SEQ ID NO: 1233877 - DNA, 25 bp, Homo sapien
tagatcacttggtattatcccacag

SEQ ID NO: 1233878 - DNA, 25 bp, Homo sapien
ttcagtgggatcacattccagctgc

SEQ ID NO: 1233879 - DNA, 25 bp, Homo sapien
ttctgaaatatggatctggtgatgc

SEQ ID NO: 1233880 - DNA, 25 bp, Homo sapien
tgtagaccactgatacatgcttcca

SEQ ID NO: 1233881 - DNA, 25 bp, Homo sapien
gatgctttgcaacagaatatagctg

SEQ ID NO: 1233882 - DNA, 25 bp, Homo sapien
tgttgacacttgagtaccagcacat

SEQ ID NO: 1233883 - DNA, 25 bp, Homo sapien
cctgagagagtctggatcatttcca

SEQ ID NO: 1233884 - DNA, 25 bp, Homo sapien
aacaatcctgataatgtgaatatgc

SEQ ID NO: 1233885 - DNA, 25 bp, Homo sapien
cagcacataacagaagaggagttct

SEQ ID NO: 1233886 - DNA, 25 bp, Homo sapien
gattctacatcaatactttgaagag

SEQ ID NO: 1233887 - DNA, 25 bp, Homo sapien
tcttgtgcttcccatagttttttcc

SEQ ID NO: 1233888 - DNA, 25 bp, Homo sapien
accgagattatgtgcatcagttttg

SEQ ID NO: 1233889 - DNA, 25 bp, Homo sapien
ctttttctagtaccgagattatgtg

SEQ ID NO: 1233890 - DNA, 25 bp, Homo sapien
gatgtgttaccatatcgcttttagg

SEQ ID NO: 1233891 - DNA, 25 bp, Homo sapien
ttttatcaagcggaactgacttccc

SEQ ID NO: 1233892 - DNA, 25 bp, Homo sapien
tcccagagctataatgataggcagc

SEQ ID NO: 1233893 - DNA, 25 bp, Homo sapien
tggcttgagacagggatttcccaga

SEQ ID NO: 1233894 - DNA, 25 bp, Homo sapien
gaaccctttgagttattacaggcca

SEQ ID NO: 1233895 - DNA, 25 bp, Homo sapien
tgggaacctctaaaaaatgcatggg

SEQ ID NO: 1233896 - DNA, 25 bp, Homo sapien
catgtcaaactgtcctaattgggaa

SEQ ID NO: 1233897 - DNA, 25 bp, Homo sapien
tgtaatagctcattggaaccctttg

SEQ ID NO: 1233898 - DNA, 25 bp, Homo sapien
gctgaggttgacatatcatttattt

SEQ ID NO: 1233899 - DNA, 25 bp, Homo sapien
gagcagcttcattagttgctgaggt

SEQ ID NO: 1233900 - DNA, 25 bp, Homo sapien
ctgtgtggtgaagaattaaaggcaa

SEQ ID NO: 1233901 - DNA, 25 bp, Homo sapien
caaaggagtagtgttccaaaaatca

SEQ ID NO: 1233902 - DNA, 25 bp, Homo sapien
tagatggaattatgaagatagagta

SEQ ID NO: 1233903 - DNA, 25 bp, Homo sapien
ggaattatgaagatagagtaaatct

SEQ ID NO: 1233904 - DNA, 25 bp, Homo sapien
tggaattatgaagatagagtaaatc

SEQ ID NO: 1233905 - DNA, 25 bp, Homo sapien
gatggaattatgaagatagagtaaa

SEQ ID NO: 1233906 - DNA, 25 bp, Homo sapien
acttgagactcttctaactgagctg

SEQ ID NO: 1233907 - DNA, 25 bp, Homo sapien
attgttgcaagtatgacttgagact

SEQ ID NO: 1233908 - DNA, 25 bp, Homo sapien
gttgcaagtatgacttgagactctt

SEQ ID NO: 1233909 - DNA, 25 bp, Homo sapien
caatgtggggagatcctttaattgt

SEQ ID NO: 1233910 - DNA, 25 bp, Homo sapien
cttctgccctgtttaatctgtgtta

SEQ ID NO: 1233911 - DNA, 25 bp, Homo sapien
tttgtctagtaggttgtctgaagct

SEQ ID NO: 1233912 - DNA, 25 bp, Homo sapien
tgaaaaagttggtgcataactggta

SEQ ID NO: 1233913 - DNA, 25 bp, Homo sapien
caagccatctgggtcaagactattc

SEQ ID NO: 1233914 - DNA, 25 bp, Homo sapien
tgtaagagaagagagtcaagttttg

SEQ ID NO: 1233915 - DNA, 25 bp, Homo sapien
gtcaagttttgatcccattcattca

SEQ ID NO: 1233916 - DNA, 25 bp, Homo sapien
agactggttcaagataaagccaatt

SEQ ID NO: 1233917 - DNA, 25 bp, Homo sapien
aagactggttcaagataaagccaat

SEQ ID NO: 1233918 - DNA, 25 bp, Homo sapien
attttgaacctgtatatggtatatt

SEQ ID NO: 1233919 - DNA, 25 bp, Homo sapien
gcattttgaacctgtatatggtata

SEQ ID NO: 1233920 - DNA, 25 bp, Homo sapien
aatgcattttgaacctgtatatggt

SEQ ID NO: 1233921 - DNA, 25 bp, Homo sapien
tgaacctgtatatggtatattttag

SEQ ID NO: 1233922 - DNA, 25 bp, Homo sapien
ggcttattgcagccatggccttctg

SEQ ID NO: 1233923 - DNA, 25 bp, Homo sapien
gcatgtgctactaaacctggcggtt

SEQ ID NO: 1233924 - DNA, 25 bp, Homo sapien
gagtgccatcgtgcagtcacggctt

SEQ ID NO: 1233925 - DNA, 25 bp, Homo sapien
tttaagacatgaggtttccctgtgt

SEQ ID NO: 1233926 - DNA, 25 bp, Homo sapien
tttctgtagctcagcaaaaatcctg

SEQ ID NO: 1233927 - DNA, 25 bp, Homo sapien
ggaggagacttcagtctcaccttct

SEQ ID NO: 1233928 - DNA, 25 bp, Homo sapien
caagaccacttccactattatctca

SEQ ID NO: 1233929 - DNA, 25 bp, Homo sapien
ttgcgtgatggacctaaaagttttc

SEQ ID NO: 1233930 - DNA, 25 bp, Homo sapien
tatacttagtatacagtggaagaca

SEQ ID NO: 1233931 - DNA, 25 bp, Homo sapien
aattttcttgataaatcatcaaaga

SEQ ID NO: 1233932 - DNA, 25 bp, Homo sapien
atcatcaaagatactttttaagtgc

SEQ ID NO: 1233933 - DNA, 25 bp, Homo sapien
ggaatactgtttgagttataaaaca

SEQ ID NO: 1233934 - DNA, 25 bp, Homo sapien
aacatttgatgttaaattttcttga

SEQ ID NO: 1233935 - DNA, 25 bp, Homo sapien
cacttgagagaaaagttctgtttct

SEQ ID NO: 1233936 - DNA, 25 bp, Homo sapien
tcacttgagagaaaagttctgtttc

SEQ ID NO: 1233937 - DNA, 25 bp, Homo sapien
acttgagagaaaagttctgtttctg

SEQ ID NO: 1233938 - DNA, 25 bp, Homo sapien
atctgcaaagcattctgtttgtttt

SEQ ID NO: 1233939 - DNA, 25 bp, Homo sapien
tttatatgttcaagatgtatattac

SEQ ID NO: 1233940 - DNA, 25 bp, Homo sapien
tatgttcaagatgtatattacaatt

SEQ ID NO: 1233941 - DNA, 25 bp, Homo sapien
tatatgttcaagatgtatattacaa

SEQ ID NO: 1233942 - DNA, 25 bp, Homo sapien
tctttatatgttcaagatgtatatt

SEQ ID NO: 1233943 - DNA, 25 bp, Homo sapien
tgcttaattatgatatgaattacat

SEQ ID NO: 1233944 - DNA, 25 bp, Homo sapien
tatgatatgaattacatcctcattt

SEQ ID NO: 1233945 - DNA, 25 bp, Homo sapien
tgaattacatcctcattttgaccta

SEQ ID NO: 1233946 - DNA, 25 bp, Homo sapien
gaattacatcctcattttgacctat

SEQ ID NO: 1233947 - DNA, 25 bp, Homo sapien
caaaagaaatgcaattcagaatata

SEQ ID NO: 1233948 - DNA, 25 bp, Homo sapien
tcaaaagaaatgcaattcagaatat

SEQ ID NO: 1233949 - DNA, 25 bp, Homo sapien
gaatcaaaagaaatgcaattcagaa

SEQ ID NO: 1233950 - DNA, 25 bp, Homo sapien
ctgtccagaatcaaaagaaatgcaa

SEQ ID NO: 1233951 - DNA, 25 bp, Homo sapien
gctcggcattgctaagaaagtaaaa

SEQ ID NO: 1233952 - DNA, 25 bp, Homo sapien
ctgtacagactcaggatttctgcta

SEQ ID NO: 1233953 - DNA, 25 bp, Homo sapien
cagactcaggatttctgctatcagc

SEQ ID NO: 1233954 - DNA, 25 bp, Homo sapien
gctatcagctagaatatcaagaagc

SEQ ID NO: 1233955 - DNA, 25 bp, Homo sapien
cttccccttcagcagatattagcat

SEQ ID NO: 1233956 - DNA, 25 bp, Homo sapien
tccccttcagcagatattagcattt

SEQ ID NO: 1233957 - DNA, 25 bp, Homo sapien
ccttccccttcagcagatattagca

SEQ ID NO: 1233958 - DNA, 25 bp, Homo sapien
accttccccttcagcagatattagc

SEQ ID NO: 1233959 - DNA, 25 bp, Homo sapien
gattttaaataatgacgttgtacag

SEQ ID NO: 1233960 - DNA, 25 bp, Homo sapien
gaatctaaacagtttgtaacattta

SEQ ID NO: 1233961 - DNA, 25 bp, Homo sapien
gagattttaaataatgacgttgtac

SEQ ID NO: 1233962 - DNA, 25 bp, Homo sapien
ttttaaataatgacgttgtacagaa

SEQ ID NO: 1233963 - DNA, 25 bp, Homo sapien
agtatatttacgtaaggatataatc

SEQ ID NO: 1233964 - DNA, 25 bp, Homo sapien
taatctttgaagaaacagtttgctt

SEQ ID NO: 1233965 - DNA, 25 bp, Homo sapien
caaaggtgagattatgtattgtagg

SEQ ID NO: 1233966 - DNA, 25 bp, Homo sapien
aacttttaattagagcaaaggtgag

SEQ ID NO: 1233967 - DNA, 25 bp, Homo sapien
tacagcacttcttacacgaattttc

SEQ ID NO: 1233968 - DNA, 25 bp, Homo sapien
cagccactgttctacagcacttctt

SEQ ID NO: 1233969 - DNA, 25 bp, Homo sapien
actgttctacagcacttcttacacg

SEQ ID NO: 1233970 - DNA, 25 bp, Homo sapien
tgttctacagcacttcttacacgaa

SEQ ID NO: 1233971 - DNA, 25 bp, Homo sapien
catcgaacatgcttttttctacatt

SEQ ID NO: 1233972 - DNA, 25 bp, Homo sapien
ttagcacatcgaacatgcttttttc

SEQ ID NO: 1233973 - DNA, 25 bp, Homo sapien
gcacatcgaacatgcttttttctac

SEQ ID NO: 1233974 - DNA, 25 bp, Homo sapien
ttttagcacatcgaacatgcttttt

SEQ ID NO: 1233975 - DNA, 25 bp, Homo sapien
aaggttgtgcatgtaaacactctca

SEQ ID NO: 1233976 - DNA, 25 bp, Homo sapien
caaaagccatctgaaggttgtgcat

SEQ ID NO: 1233977 - DNA, 25 bp, Homo sapien
acagctgaatctcaacgtacacaaa

SEQ ID NO: 1233978 - DNA, 25 bp, Homo sapien
tctcaacgtacacaaaagccatctg

SEQ ID NO: 1233979 - DNA, 25 bp, Homo sapien
gtaagtaccacttgtcctggatgag

SEQ ID NO: 1233980 - DNA, 25 bp, Homo sapien
tgtcctggatgagataacacccatt

SEQ ID NO: 1233981 - DNA, 25 bp, Homo sapien
gagataacacccattgggaaaacat

SEQ ID NO: 1233982 - DNA, 25 bp, Homo sapien
taccacttgtcctggatgagataac

SEQ ID NO: 1233983 - DNA, 25 bp, Homo sapien
tttcttcctctttagcttcttccat

SEQ ID NO: 1233984 - DNA, 25 bp, Homo sapien
ctttcttcctctttagcttcttcca

SEQ ID NO: 1233985 - DNA, 25 bp, Homo sapien
accagcaaccttaagtaataacctg

SEQ ID NO: 1233986 - DNA, 25 bp, Homo sapien
cagcaaccttaagtaataacctggg

SEQ ID NO: 1233987 - DNA, 25 bp, Homo sapien
tccaagatgatatattagtgctgct

SEQ ID NO: 1233988 - DNA, 25 bp, Homo sapien
ggaaaactccaagatgatatattag

SEQ ID NO: 1233989 - DNA, 25 bp, Homo sapien
caaaacttttaacacaatcattata

SEQ ID NO: 1233990 - DNA, 25 bp, Homo sapien
cacaaaacttttaacacaatcatta

SEQ ID NO: 1233991 - DNA, 25 bp, Homo sapien
cttttaacacaatcattataaaaca

SEQ ID NO: 1233992 - DNA, 25 bp, Homo sapien
ctcacaaaacttttaacacaatcat

SEQ ID NO: 1233993 - DNA, 25 bp, Homo sapien
cagaccagcgtggactttttccaat

SEQ ID NO: 1233994 - DNA, 25 bp, Homo sapien
agaccagcgtggactttttccaatt

SEQ ID NO: 1233995 - DNA, 25 bp, Homo sapien
agtatccagcactaccaggtctgca

SEQ ID NO: 1233996 - DNA, 25 bp, Homo sapien
cccctagtatagcttttgttcgaga

SEQ ID NO: 1233997 - DNA, 25 bp, Homo sapien
tgttcgagagttactagtatccagc

SEQ ID NO: 1233998 - DNA, 25 bp, Homo sapien
ggtctgcaacctcttctagatgaca

SEQ ID NO: 1233999 - DNA, 25 bp, Homo sapien
tcggtctgtgagaggcgtaataacc

SEQ ID NO: 1234000 - DNA, 25 bp, Homo sapien
caagtgtagtgcttccatgagagtc

SEQ ID NO: 1234001 - DNA, 25 bp, Homo sapien
taaccaatcttgaggtacagcccaa

SEQ ID NO: 1234002 - DNA, 25 bp, Homo sapien
tgagagtcagccagcatcggtctgt

SEQ ID NO: 1234003 - DNA, 25 bp, Homo sapien
aagaccacacaatgtttgcctaagg

SEQ ID NO: 1234004 - DNA, 25 bp, Homo sapien
agaccacacaatgtttgcctaagga

SEQ ID NO: 1234005 - DNA, 25 bp, Homo sapien
tcatcaaaacaactccatgctcctg

SEQ ID NO: 1234006 - DNA, 25 bp, Homo sapien
cttaattgttaggatctgtgaggca

SEQ ID NO: 1234007 - DNA, 25 bp, Homo sapien
taggatctgtgaggcaatgacagag

SEQ ID NO: 1234008 - DNA, 25 bp, Homo sapien
ttgcagccttaattgttaggatctg

SEQ ID NO: 1234009 - DNA, 25 bp, Homo sapien
taaaagacattacagtattcatcac

SEQ ID NO: 1234010 - DNA, 25 bp, Homo sapien
gacattacagtattcatcactagca

SEQ ID NO: 1234011 - DNA, 25 bp, Homo sapien
ttttctctagtccaaagcatgttaa

SEQ ID NO: 1234012 - DNA, 25 bp, Homo sapien
ccaaagcatgttaaaactataagtg

SEQ ID NO: 1234013 - DNA, 25 bp, Homo sapien
catggtgataaataccgcacaagac

SEQ ID NO: 1234014 - DNA, 25 bp, Homo sapien
taaataccgcacaagacatattgat

SEQ ID NO: 1234015 - DNA, 25 bp, Homo sapien
gacatattgatacgaatttcttttc

SEQ ID NO: 1234016 - DNA, 25 bp, Homo sapien
cacaagacatattgatacgaatttc

SEQ ID NO: 1234017 - DNA, 25 bp, Homo sapien
attttaagttatctgggagctctac

SEQ ID NO: 1234018 - DNA, 25 bp, Homo sapien
taagttatctgggagctctactcca

SEQ ID NO: 1234019 - DNA, 25 bp, Homo sapien
ttatctgggagctctactccacctc

SEQ ID NO: 1234020 - DNA, 25 bp, Homo sapien
tgggagctctactccacctccgtat

SEQ ID NO: 1234021 - DNA, 25 bp, Homo sapien
tgcgcgctaattcataaaggttagt

SEQ ID NO: 1234022 - DNA, 25 bp, Homo sapien
ggttagttagctttccagagagtga

SEQ ID NO: 1234023 - DNA, 25 bp, Homo sapien
ctgttgtgagagctgtttgcgcgct

SEQ ID NO: 1234024 - DNA, 25 bp, Homo sapien
gcaatcatttgataatggggcacca

SEQ ID NO: 1234025 - DNA, 25 bp, Homo sapien
aaactatcttcagagatctcaagcc

SEQ ID NO: 1234026 - DNA, 25 bp, Homo sapien
atctcaagccaaaattataatgatc

SEQ ID NO: 1234027 - DNA, 25 bp, Homo sapien
tcccgtttcttcgttccagccatta

SEQ ID NO: 1234028 - DNA, 25 bp, Homo sapien
ttcttcgttccagccattattaaaa

SEQ ID NO: 1234029 - DNA, 25 bp, Homo sapien
tagcttctcttatagcctcgataac

SEQ ID NO: 1234030 - DNA, 25 bp, Homo sapien
gcctcgataacaatcaaggtttcat

SEQ ID NO: 1234031 - DNA, 25 bp, Homo sapien
tagcctcgataacaatcaaggtttc

SEQ ID NO: 1234032 - DNA, 25 bp, Homo sapien
tcttatagcctcgataacaatcaag

SEQ ID NO: 1234033 - DNA, 25 bp, Homo sapien
tccaaggcaagttgatttactttca

SEQ ID NO: 1234034 - DNA, 25 bp, Homo sapien
ccaaggcaagttgatttactttcaa

SEQ ID NO: 1234035 - DNA, 25 bp, Homo sapien
ctccaaggcaagttgatttactttc

SEQ ID NO: 1234036 - DNA, 25 bp, Homo sapien
tggtgatgattttcaaaggtctttt

SEQ ID NO: 1234037 - DNA, 25 bp, Homo sapien
ccaaataattggtgatgattttcaa

SEQ ID NO: 1234038 - DNA, 25 bp, Homo sapien
atccaaataattggtgatgattttc

SEQ ID NO: 1234039 - DNA, 25 bp, Homo sapien
attggtgatgattttcaaaggtctt

SEQ ID NO: 1234040 - DNA, 25 bp, Homo sapien
aatcccatttatagtagctacacat

SEQ ID NO: 1234041 - DNA, 25 bp, Homo sapien
tctatatgccaacagagaacgacct

SEQ ID NO: 1234042 - DNA, 25 bp, Homo sapien
acagagaacgacctgaaaaagaaat

SEQ ID NO: 1234043 - DNA, 25 bp, Homo sapien
tcccatttatagtagctacacataa

SEQ ID NO: 1234044 - DNA, 25 bp, Homo sapien
gagaagagcggaaagtttgtaggcc

SEQ ID NO: 1234045 - DNA, 25 bp, Homo sapien
tggagaagagcggaaagtttgtagg

SEQ ID NO: 1234046 - DNA, 25 bp, Homo sapien
actggagaagagcggaaagtttgta

SEQ ID NO: 1234047 - DNA, 25 bp, Homo sapien
aactggagaagagcggaaagtttgt

SEQ ID NO: 1234048 - DNA, 25 bp, Homo sapien
taaacccaattgctgagttgcagta

SEQ ID NO: 1234049 - DNA, 25 bp, Homo sapien
tgtaaacccaattgctgagttgcag

SEQ ID NO: 1234050 - DNA, 25 bp, Homo sapien
ccagttttgtaaacccaattgctga

SEQ ID NO: 1234051 - DNA, 25 bp, Homo sapien
ttttgtaaacccaattgctgagttg

SEQ ID NO: 1234052 - DNA, 25 bp, Homo sapien
ctgaagttgattataaaactgtata

SEQ ID NO: 1234053 - DNA, 25 bp, Homo sapien
tataaaactgtataatcttctcttt

SEQ ID NO: 1234054 - DNA, 25 bp, Homo sapien
gattataaaactgtataatcttctc

SEQ ID NO: 1234055 - DNA, 25 bp, Homo sapien
tgaagttgattataaaactgtataa

SEQ ID NO: 1234056 - DNA, 25 bp, Homo sapien
gatcagcacagaattggcatcaccc

SEQ ID NO: 1234057 - DNA, 25 bp, Homo sapien
gaaggagtctcttcacaccgcactg

SEQ ID NO: 1234058 - DNA, 25 bp, Homo sapien
gtgacatgggctctgcatagctgct

SEQ ID NO: 1234059 - DNA, 25 bp, Homo sapien
gcagctgatctcatgcagggccaca

SEQ ID NO: 1234060 - DNA, 25 bp, Homo sapien
caattttggaacgtgttgtgggtct

SEQ ID NO: 1234061 - DNA, 25 bp, Homo sapien
ccatggcctctagacctttgcagca

SEQ ID NO: 1234062 - DNA, 25 bp, Homo sapien
taatgagtttgggagtaatccctac

SEQ ID NO: 1234063 - DNA, 25 bp, Homo sapien
gtttttgtcacatcctagagcaggt

SEQ ID NO: 1234064 - DNA, 25 bp, Homo sapien
actataatgcataagagtggtgtga

SEQ ID NO: 1234065 - DNA, 25 bp, Homo sapien
cgtactataatgcataagagtggtg

SEQ ID NO: 1234066 - DNA, 25 bp, Homo sapien
gacttcccgtactataatgcataag

SEQ ID NO: 1234067 - DNA, 25 bp, Homo sapien
attccaattcttaaggggaatgctt

SEQ ID NO: 1234068 - DNA, 25 bp, Homo sapien
aagaagtctgcaattggtaatagcg

SEQ ID NO: 1234069 - DNA, 25 bp, Homo sapien
tctttctgcaactgataagaagtct

SEQ ID NO: 1234070 - DNA, 25 bp, Homo sapien
tgttgggcccactaacatcacacca

SEQ ID NO: 1234071 - DNA, 25 bp, Homo sapien
ggtaatagcgttaatgctttttcca

SEQ ID NO: 1234072 - DNA, 25 bp, Homo sapien
tggatttaaaacacaaatatctact

SEQ ID NO: 1234073 - DNA, 25 bp, Homo sapien
ctttggatttaaaacacaaatatct

SEQ ID NO: 1234074 - DNA, 25 bp, Homo sapien
tttggatttaaaacacaaatatcta

SEQ ID NO: 1234075 - DNA, 25 bp, Homo sapien
ttggatttaaaacacaaatatctac

SEQ ID NO: 1234076 - DNA, 25 bp, Homo sapien
tccattccatagtattaggatccag

SEQ ID NO: 1234077 - DNA, 25 bp, Homo sapien
ggatccagttgtccatatagttcac

SEQ ID NO: 1234078 - DNA, 25 bp, Homo sapien
tcgaattgttgctgataataatcca

SEQ ID NO: 1234079 - DNA, 25 bp, Homo sapien
gataataatccatcagtccattcca

SEQ ID NO: 1234080 - DNA, 25 bp, Homo sapien
atctgagattcttgactttagtctg

SEQ ID NO: 1234081 - DNA, 25 bp, Homo sapien
tctttgtgttctttggtgtgttaaa

SEQ ID NO: 1234082 - DNA, 25 bp, Homo sapien
tgttctttggtgtgttaaaatatac

SEQ ID NO: 1234083 - DNA, 25 bp, Homo sapien
tcttgactttagtctgagatcaatg

SEQ ID NO: 1234084 - DNA, 25 bp, Homo sapien
tctctgttgtatcagaggaatcaag

SEQ ID NO: 1234085 - DNA, 25 bp, Homo sapien
aatattatcatcagtctctgttgta

SEQ ID NO: 1234086 - DNA, 25 bp, Homo sapien
ttgtatcagaggaatcaagtttgaa

SEQ ID NO: 1234087 - DNA, 25 bp, Homo sapien
tcatcagtctctgttgtatcagagg

SEQ ID NO: 1234088 - DNA, 25 bp, Homo sapien
gatcatggcactagcagattccttg

SEQ ID NO: 1234089 - DNA, 25 bp, Homo sapien
tggagggacacaaacctttagacca

SEQ ID NO: 1234090 - DNA, 25 bp, Homo sapien
tcttcgtggttgacagatgggcaca

SEQ ID NO: 1234091 - DNA, 25 bp, Homo sapien
tccacagggtgttagtccatttggg

SEQ ID NO: 1234092 - DNA, 25 bp, Homo sapien
ataatatgatttgtaagtttgccct

SEQ ID NO: 1234093 - DNA, 25 bp, Homo sapien
tgcataataatatgatttgtaagtt

SEQ ID NO: 1234094 - DNA, 25 bp, Homo sapien
taatatgatttgtaagtttgccctt

SEQ ID NO: 1234095 - DNA, 25 bp, Homo sapien
gacattcttagattgttgaattaga

SEQ ID NO: 1234096 - DNA, 25 bp, Homo sapien
tttgcttaggagaaacagctataat

SEQ ID NO: 1234097 - DNA, 25 bp, Homo sapien
taagcattgtttagacattcttaga

SEQ ID NO: 1234098 - DNA, 25 bp, Homo sapien
ttgaattagataattaacccttaca

SEQ ID NO: 1234099 - DNA, 25 bp, Homo sapien
ctggagagaaaaatatttttaatgt

SEQ ID NO: 1234100 - DNA, 25 bp, Homo sapien
tgggccatctaggataatccactgc

SEQ ID NO: 1234101 - DNA, 25 bp, Homo sapien
cctgagagagattgtccacttcaaa

SEQ ID NO: 1234102 - DNA, 25 bp, Homo sapien
tcggctgacagtagcaggactggcc

SEQ ID NO: 1234103 - DNA, 25 bp, Homo sapien
tatagaccatggcacatcggctgac

SEQ ID NO: 1234104 - DNA, 25 bp, Homo sapien
catgacttaacataaggttcccatc

SEQ ID NO: 1234105 - DNA, 25 bp, Homo sapien
ccatgacttaacataaggttcccat

SEQ ID NO: 1234106 - DNA, 25 bp, Homo sapien
acttaacataaggttcccatcccag

SEQ ID NO: 1234107 - DNA, 25 bp, Homo sapien
tgacttaacataaggttcccatccc

SEQ ID NO: 1234108 - DNA, 25 bp, Homo sapien
gaattctgcagagggttatgacgac

SEQ ID NO: 1234109 - DNA, 25 bp, Homo sapien
taggatatggctgaaatttctgacg

SEQ ID NO: 1234110 - DNA, 25 bp, Homo sapien
atgaattcaagacaatccactcctg

SEQ ID NO: 1234111 - DNA, 25 bp, Homo sapien
ccttataaattgtagtccgtctgtg

SEQ ID NO: 1234112 - DNA, 25 bp, Homo sapien
cctgggttacacttctgatgaattc

SEQ ID NO: 1234113 - DNA, 25 bp, Homo sapien
ctttcctgggttacacttctgatga

SEQ ID NO: 1234114 - DNA, 25 bp, Homo sapien
aactttcctgggttacacttctgat

SEQ ID NO: 1234115 - DNA, 25 bp, Homo sapien
tcctgggttacacttctgatgaatt

SEQ ID NO: 1234116 - DNA, 25 bp, Homo sapien
tgtatgatgttccccccttgtgccc

SEQ ID NO: 1234117 - DNA, 25 bp, Homo sapien
actagtgctacaataaacatacata

SEQ ID NO: 1234118 - DNA, 25 bp, Homo sapien
tgatgttccccccttgtgcccatat

SEQ ID NO: 1234119 - DNA, 25 bp, Homo sapien
catccatcaacccatcattgacatt

SEQ ID NO: 1234120 - DNA, 25 bp, Homo sapien
tgttaggcagattgtagtcatcccc

SEQ ID NO: 1234121 - DNA, 25 bp, Homo sapien
tataacaactagtaatatgttgatg

SEQ ID NO: 1234122 - DNA, 25 bp, Homo sapien
aaaaatgcttcttttagtgtacaga

SEQ ID NO: 1234123 - DNA, 25 bp, Homo sapien
aagaaaacagtcacccataattcca

SEQ ID NO: 1234124 - DNA, 25 bp, Homo sapien
tgcctccttagatgacgtgtcattc

SEQ ID NO: 1234125 - DNA, 25 bp, Homo sapien
gaatgtgacagactctctttgggaa

SEQ ID NO: 1234126 - DNA, 25 bp, Homo sapien
tctctttgggaatttgcctccttag

SEQ ID NO: 1234127 - DNA, 25 bp, Homo sapien
gatgacgtgtcattcaaatcatcac

SEQ ID NO: 1234128 - DNA, 25 bp, Homo sapien
tcatcttcacggtttaaagctcctc

SEQ ID NO: 1234129 - DNA, 25 bp, Homo sapien
tgtgttcatcttcacggtttaaagc

SEQ ID NO: 1234130 - DNA, 25 bp, Homo sapien
gatttttctctggataccatgtatt

SEQ ID NO: 1234131 - DNA, 25 bp, Homo sapien
caagtttgtcaaaatcgtatgttac

SEQ ID NO: 1234132 - DNA, 25 bp, Homo sapien
gaacattcaccagttggtaggttga

SEQ ID NO: 1234133 - DNA, 25 bp, Homo sapien
tgaccaaggtatgaattcacattgc

SEQ ID NO: 1234134 - DNA, 25 bp, Homo sapien
attagtgtctgatcattaggaacta

SEQ ID NO: 1234135 - DNA, 25 bp, Homo sapien
tgctctatatccacaaaatatccaa

SEQ ID NO: 1234136 - DNA, 25 bp, Homo sapien
tgaagattagttagtaatgaagttc

SEQ ID NO: 1234137 - DNA, 25 bp, Homo sapien
tttccgccagatctttgaagattag

SEQ ID NO: 1234138 - DNA, 25 bp, Homo sapien
tccgccagatctttgaagattagtt

SEQ ID NO: 1234139 - DNA, 25 bp, Homo sapien
cgccagatctttgaagattagttag

SEQ ID NO: 1234140 - DNA, 25 bp, Homo sapien
aaaggcatgttgtgtctctggtagc

SEQ ID NO: 1234141 - DNA, 25 bp, Homo sapien
gtgtctctggtagcggtataattaa

SEQ ID NO: 1234142 - DNA, 25 bp, Homo sapien
tgttgtgtctctggtagcggtataa

SEQ ID NO: 1234143 - DNA, 25 bp, Homo sapien
gcatgttgtgtctctggtagcggta

SEQ ID NO: 1234144 - DNA, 25 bp, Homo sapien
ttttcaagcatttgattaatggcag

SEQ ID NO: 1234145 - DNA, 25 bp, Homo sapien
gcttttcaagcatttgattaatggc

SEQ ID NO: 1234146 - DNA, 25 bp, Homo sapien
cttttcaagcatttgattaatggca

SEQ ID NO: 1234147 - DNA, 25 bp, Homo sapien
atgttttatgtcaaatgctcctgga

SEQ ID NO: 1234148 - DNA, 25 bp, Homo sapien
tatataatagggtgtctcctaaaat

SEQ ID NO: 1234149 - DNA, 25 bp, Homo sapien
tataatagggtgtctcctaaaattg

SEQ ID NO: 1234150 - DNA, 25 bp, Homo sapien
taatagggtgtctcctaaaattgaa

SEQ ID NO: 1234151 - DNA, 25 bp, Homo sapien
ataatagggtgtctcctaaaattga

SEQ ID NO: 1234152 - DNA, 25 bp, Homo sapien
gacaaatcaaatttagaagttagta

SEQ ID NO: 1234153 - DNA, 25 bp, Homo sapien
caaatcaaatttagaagttagtata

SEQ ID NO: 1234154 - DNA, 25 bp, Homo sapien
tttatatattaaagcacacttttta

SEQ ID NO: 1234155 - DNA, 25 bp, Homo sapien
caaatttagaagttagtatatacaa

SEQ ID NO: 1234156 - DNA, 25 bp, Homo sapien
gtttcaggaatcaagatggtgatat

SEQ ID NO: 1234157 - DNA, 25 bp, Homo sapien
tccagttgctgtcttatgagtttca

SEQ ID NO: 1234158 - DNA, 25 bp, Homo sapien
tatgagtttcaggaatcaagatggt

SEQ ID NO: 1234159 - DNA, 25 bp, Homo sapien
tgctgtcttatgagtttcaggaatc

SEQ ID NO: 1234160 - DNA, 25 bp, Homo sapien
ggctatagctacagcaacttaaaag

SEQ ID NO: 1234161 - DNA, 25 bp, Homo sapien
gcaagatttggtggtgtggcatcct

SEQ ID NO: 1234162 - DNA, 25 bp, Homo sapien
tacagctatctctaggccattccat

SEQ ID NO: 1234163 - DNA, 25 bp, Homo sapien
ttagggtatattccctgagtgagga

SEQ ID NO: 1234164 - DNA, 25 bp, Homo sapien
acaactcctttatgatcattatttt

SEQ ID NO: 1234165 - DNA, 25 bp, Homo sapien
agttctaacttctggctttttagtg

SEQ ID NO: 1234166 - DNA, 25 bp, Homo sapien
ctacaactcctttatgatcattatt

SEQ ID NO: 1234167 - DNA, 25 bp, Homo sapien
ctaacttctggctttttagtgggat

SEQ ID NO: 1234168 - DNA, 25 bp, Homo sapien
ttttttggtgctccaagagtatctt

SEQ ID NO: 1234169 - DNA, 25 bp, Homo sapien
tgttttttggtgctccaagagtatc

SEQ ID NO: 1234170 - DNA, 25 bp, Homo sapien
ggtgctccaagagtatctttagttc

SEQ ID NO: 1234171 - DNA, 25 bp, Homo sapien
tttggtgctccaagagtatctttag

SEQ ID NO: 1234172 - DNA, 25 bp, Homo sapien
tcagtatcataaactcctcccaaat

SEQ ID NO: 1234173 - DNA, 25 bp, Homo sapien
tacatatctgatactggcatattca

SEQ ID NO: 1234174 - DNA, 25 bp, Homo sapien
cctcccaaatctaacaattgtctta

SEQ ID NO: 1234175 - DNA, 25 bp, Homo sapien
aggggtggctgtgctccatacatat

SEQ ID NO: 1234176 - DNA, 25 bp, Homo sapien
ctggaaaatagtacataagatgtct

SEQ ID NO: 1234177 - DNA, 25 bp, Homo sapien
caactatagacagatcttgaatatt

SEQ ID NO: 1234178 - DNA, 25 bp, Homo sapien
tgaggtaataccagcatggaaaagt

SEQ ID NO: 1234179 - DNA, 25 bp, Homo sapien
tttgagaagacgtgggctgatatca

SEQ ID NO: 1234180 - DNA, 25 bp, Homo sapien
tctcgaagattaaacatgtagtgac

SEQ ID NO: 1234181 - DNA, 25 bp, Homo sapien
tctgacgtacttgatggtatatagc

SEQ ID NO: 1234182 - DNA, 25 bp, Homo sapien
gagttggtaacatattctgacgtac

SEQ ID NO: 1234183 - DNA, 25 bp, Homo sapien
tagctagggaacaagatattatctg

SEQ ID NO: 1234184 - DNA, 25 bp, Homo sapien
aaatactcgggtggcttcatgaaca

SEQ ID NO: 1234185 - DNA, 25 bp, Homo sapien
gtcctgtcagcttgcagcaatccta

SEQ ID NO: 1234186 - DNA, 25 bp, Homo sapien
tcagtgaaatcaattaagcgatcgt

SEQ ID NO: 1234187 - DNA, 25 bp, Homo sapien
ctctttggagttaacaacagtcctg

SEQ ID NO: 1234188 - DNA, 25 bp, Homo sapien
gttctcaagttcccttgaaagcaac

SEQ ID NO: 1234189 - DNA, 25 bp, Homo sapien
agttctcaagttcccttgaaagcaa

SEQ ID NO: 1234190 - DNA, 25 bp, Homo sapien
tctcttgaaaggagacggcaaaaaa

SEQ ID NO: 1234191 - DNA, 25 bp, Homo sapien
attctcttgaaaggagacggcaaaa

SEQ ID NO: 1234192 - DNA, 25 bp, Homo sapien
ctcttgaaaggagacggcaaaaaat

SEQ ID NO: 1234193 - DNA, 25 bp, Homo sapien
ttctcttgaaaggagacggcaaaaa

SEQ ID NO: 1234194 - DNA, 25 bp, Homo sapien
aattgaacccaacttcatttggaat

SEQ ID NO: 1234195 - DNA, 25 bp, Homo sapien
aaaatacagttgagtgattcatcag

SEQ ID NO: 1234196 - DNA, 25 bp, Homo sapien
cactggcaagtttattatagtcact

SEQ ID NO: 1234197 - DNA, 25 bp, Homo sapien
ggaattcatcaagtacactggcaag

SEQ ID NO: 1234198 - DNA, 25 bp, Homo sapien
catttagggaaagtaaatttgtgca

SEQ ID NO: 1234199 - DNA, 25 bp, Homo sapien
gagctctagatctagtaagctggtt

SEQ ID NO: 1234200 - DNA, 25 bp, Homo sapien
tctagtaagctggttatcattaaca

SEQ ID NO: 1234201 - DNA, 25 bp, Homo sapien
tctagatctagtaagctggttatca

SEQ ID NO: 1234202 - DNA, 25 bp, Homo sapien
gaaaaatcaaacgtgcattgtggtt

SEQ ID NO: 1234203 - DNA, 25 bp, Homo sapien
tacatacaatttacttacagaaagg

SEQ ID NO: 1234204 - DNA, 25 bp, Homo sapien
taaatggattataggtacagaaaaa

SEQ ID NO: 1234205 - DNA, 25 bp, Homo sapien
acagaaaaatcaaacgtgcattgtg

SEQ ID NO: 1234206 - DNA, 25 bp, Homo sapien
cttgaagaacaccatggaatgagaa

SEQ ID NO: 1234207 - DNA, 25 bp, Homo sapien
ttgaagaacaccatggaatgagaaa

SEQ ID NO: 1234208 - DNA, 25 bp, Homo sapien
tgaagaacaccatggaatgagaaag

SEQ ID NO: 1234209 - DNA, 25 bp, Homo sapien
cagtaacatgtgactccctggttgt

SEQ ID NO: 1234210 - DNA, 25 bp, Homo sapien
gaacccttgttgctcttatgatgtg

SEQ ID NO: 1234211 - DNA, 25 bp, Homo sapien
ctcttatgatgtgttctatggcttc

SEQ ID NO: 1234212 - DNA, 25 bp, Homo sapien
tgactccctggttgtcgaagaaccc

SEQ ID NO: 1234213 - DNA, 25 bp, Homo sapien
taatcctgcgtgaataaacaccttt

SEQ ID NO: 1234214 - DNA, 25 bp, Homo sapien
caaataacaggccaaggttgcacat

SEQ ID NO: 1234215 - DNA, 25 bp, Homo sapien
cacatttgtgagatataggcactcg

SEQ ID NO: 1234216 - DNA, 25 bp, Homo sapien
aattgggaaccatcagaacagtggg

SEQ ID NO: 1234217 - DNA, 25 bp, Homo sapien
ccaaatagctaggatgaaaggtgca

SEQ ID NO: 1234218 - DNA, 25 bp, Homo sapien
tttaatgaggaagagtaaattattc

SEQ ID NO: 1234219 - DNA, 25 bp, Homo sapien
tctaccctaaccacatcaatttgag

SEQ ID NO: 1234220 - DNA, 25 bp, Homo sapien
tcatatattctaccctaaccacatc

SEQ ID NO: 1234221 - DNA, 25 bp, Homo sapien
attattcatatattctaccctaacc

SEQ ID NO: 1234222 - DNA, 25 bp, Homo sapien
tgcaatagaatccagctcaacattt

SEQ ID NO: 1234223 - DNA, 25 bp, Homo sapien
tcaaacaggtcaggtattcttcctg

SEQ ID NO: 1234224 - DNA, 25 bp, Homo sapien
gattgcctattatccatatgaccag

SEQ ID NO: 1234225 - DNA, 25 bp, Homo sapien
tgaccagattgttcagtaagatatc

SEQ ID NO: 1234226 - DNA, 25 bp, Homo sapien
tggcggaagctaggtccttcaggac

SEQ ID NO: 1234227 - DNA, 25 bp, Homo sapien
caatcgatcgtgcaggagctaatca

SEQ ID NO: 1234228 - DNA, 25 bp, Homo sapien
ccttcaggactcatgatcacaaaaa

SEQ ID NO: 1234229 - DNA, 25 bp, Homo sapien
tcatagaaggatacactctacaatt

SEQ ID NO: 1234230 - DNA, 25 bp, Homo sapien
ttcttttaagaatgagttagctaca

SEQ ID NO: 1234231 - DNA, 25 bp, Homo sapien
ttagctacaataaggagagcttctt

SEQ ID NO: 1234232 - DNA, 25 bp, Homo sapien
tcttttaagaatgagttagctacaa

SEQ ID NO: 1234233 - DNA, 25 bp, Homo sapien
tgagttagctacaataaggagagct

SEQ ID NO: 1234234 - DNA, 25 bp, Homo sapien
aaatctgctgttccaccatgtggac

SEQ ID NO: 1234235 - DNA, 25 bp, Homo sapien
aatctgctgttccaccatgtggaca

SEQ ID NO: 1234236 - DNA, 25 bp, Homo sapien
gactgttttccttcacggaaatctg

SEQ ID NO: 1234237 - DNA, 25 bp, Homo sapien
ttccttcacggaaatctgctgttcc

SEQ ID NO: 1234238 - DNA, 25 bp, Homo sapien
tttggacacatgttggggcaagttt

SEQ ID NO: 1234239 - DNA, 25 bp, Homo sapien
tcctctcgtgccctcaaaatgtgtg

SEQ ID NO: 1234240 - DNA, 25 bp, Homo sapien
aatgtttccataaattgcaagtagc

SEQ ID NO: 1234241 - DNA, 25 bp, Homo sapien
attgcaagtagctattgggagtggt

SEQ ID NO: 1234242 - DNA, 25 bp, Homo sapien
ttctgtaactagagtggttgcttcc

SEQ ID NO: 1234243 - DNA, 25 bp, Homo sapien
gagggccaagaatcaagagctcttc

SEQ ID NO: 1234244 - DNA, 25 bp, Homo sapien
tggatagacccatatggaagcgatc

SEQ ID NO: 1234245 - DNA, 25 bp, Homo sapien
gcttccaggattgtggatagaccca

SEQ ID NO: 1234246 - DNA, 25 bp, Homo sapien
ctgaactttctcaactacttgtgaa

SEQ ID NO: 1234247 - DNA, 25 bp, Homo sapien
gaactttctcaactacttgtgaatc

SEQ ID NO: 1234248 - DNA, 25 bp, Homo sapien
cttcatcctgtttaacaagcatctg

SEQ ID NO: 1234249 - DNA, 25 bp, Homo sapien
gtttaacaagcatctgaactttctc

SEQ ID NO: 1234250 - DNA, 25 bp, Homo sapien
ggctggcagcacactttttagttca

SEQ ID NO: 1234251 - DNA, 25 bp, Homo sapien
ccagggcattcagagccacaattgc

SEQ ID NO: 1234252 - DNA, 25 bp, Homo sapien
aattcagcgacatcagctttatcca

SEQ ID NO: 1234253 - DNA, 25 bp, Homo sapien
caattgccttgtcaaaggctggcag

SEQ ID NO: 1234254 - DNA, 25 bp, Homo sapien
cagatttttaacacacatttggata

SEQ ID NO: 1234255 - DNA, 25 bp, Homo sapien
agatttttaacacacatttggataa

SEQ ID NO: 1234256 - DNA, 25 bp, Homo sapien
cacactgcattcatgacagtcagta

SEQ ID NO: 1234257 - DNA, 25 bp, Homo sapien
aagaagtaactttgccgttgcccag

SEQ ID NO: 1234258 - DNA, 25 bp, Homo sapien
cattcatgacagtcagtacaaggaa

SEQ ID NO: 1234259 - DNA, 25 bp, Homo sapien
caggtatgctgtccttgtcaaggtt

SEQ ID NO: 1234260 - DNA, 25 bp, Homo sapien
accagcgaaatcttgtgtgggttga

SEQ ID NO: 1234261 - DNA, 25 bp, Homo sapien
gaaaccagcgaaatcttgtgtgggt

SEQ ID NO: 1234262 - DNA, 25 bp, Homo sapien
cagaaaccagcgaaatcttgtgtgg

SEQ ID NO: 1234263 - DNA, 25 bp, Homo sapien
agcaacagaaaccagcgaaatcttg

SEQ ID NO: 1234264 - DNA, 25 bp, Homo sapien
cgcaattttaaggacgttttgagct

SEQ ID NO: 1234265 - DNA, 25 bp, Homo sapien
ctcagcaagtctttgtcgcgcaatt

SEQ ID NO: 1234266 - DNA, 25 bp, Homo sapien
tctttgtcgcgcaattttaaggacg

SEQ ID NO: 1234267 - DNA, 25 bp, Homo sapien
gcaagtctttgtcgcgcaattttaa

SEQ ID NO: 1234268 - DNA, 25 bp, Homo sapien
tgtaaaaacagcaaatgttcttcaa

SEQ ID NO: 1234269 - DNA, 25 bp, Homo sapien
ctgtaaaaacagcaaatgttcttca

SEQ ID NO: 1234270 - DNA, 25 bp, Homo sapien
gtaaaaacagcaaatgttcttcaac

SEQ ID NO: 1234271 - DNA, 25 bp, Homo sapien
tgtttttcagcaacggtatctttgt

SEQ ID NO: 1234272 - DNA, 25 bp, Homo sapien
ccgatttgctaatagttgtttttca

SEQ ID NO: 1234273 - DNA, 25 bp, Homo sapien
gactgacgcacactgaaagcgcctg

SEQ ID NO: 1234274 - DNA, 25 bp, Homo sapien
aaagcgcctgctggccattgttttc

SEQ ID NO: 1234275 - DNA, 25 bp, Homo sapien
tgagacgactcaaacaggatttctt

SEQ ID NO: 1234276 - DNA, 25 bp, Homo sapien
gaacaggagataacgtcagatactt

SEQ ID NO: 1234277 - DNA, 25 bp, Homo sapien
gaaaagcgtgctgatgtcttcagaa

SEQ ID NO: 1234278 - DNA, 25 bp, Homo sapien
gatacttgtagtctgttacttctgt

SEQ ID NO: 1234279 - DNA, 25 bp, Homo sapien
gctgctgaaagaagtatgtcaccca

SEQ ID NO: 1234280 - DNA, 25 bp, Homo sapien
ttccactgtagacaatgcacgctgc

SEQ ID NO: 1234281 - DNA, 25 bp, Homo sapien
gtatgtcacccaaaattccttctaa

SEQ ID NO: 1234282 - DNA, 25 bp, Homo sapien
tcacaatcaactggcgaaattctgg

SEQ ID NO: 1234283 - DNA, 25 bp, Homo sapien
gcaatgaaattattagtactttcac

SEQ ID NO: 1234284 - DNA, 25 bp, Homo sapien
ctgcaatgaaattattagtactttc

SEQ ID NO: 1234285 - DNA, 25 bp, Homo sapien
tcactattttgtaaatgtcttcaca

SEQ ID NO: 1234286 - DNA, 25 bp, Homo sapien
gtactttcactattttgtaaatgtc

SEQ ID NO: 1234287 - DNA, 25 bp, Homo sapien
cattcttgatcaagatggcattctc

SEQ ID NO: 1234288 - DNA, 25 bp, Homo sapien
tatgtgggtcaatcagcagtggcca

SEQ ID NO: 1234289 - DNA, 25 bp, Homo sapien
agtccctgattatgccatcggctga

SEQ ID NO: 1234290 - DNA, 25 bp, Homo sapien
catctgacggatccatttgtgagct

SEQ ID NO: 1234291 - DNA, 25 bp, Homo sapien
gcctggagctaatgtctcaaggaga

SEQ ID NO: 1234292 - DNA, 25 bp, Homo sapien
aattgtattcgaactcagcatcacc

SEQ ID NO: 1234293 - DNA, 25 bp, Homo sapien
tgtccttttttctgatagatatcct

SEQ ID NO: 1234294 - DNA, 25 bp, Homo sapien
gcatcaccaacccttatgaaatagt

SEQ ID NO: 1234295 - DNA, 25 bp, Homo sapien
ttcctccatgtagaagcttgacagg

SEQ ID NO: 1234296 - DNA, 25 bp, Homo sapien
tttttcctccatgtagaagcttgac

SEQ ID NO: 1234297 - DNA, 25 bp, Homo sapien
tcctccatgtagaagcttgacagga

SEQ ID NO: 1234298 - DNA, 25 bp, Homo sapien
tttcctccatgtagaagcttgacag

SEQ ID NO: 1234299 - DNA, 25 bp, Homo sapien
agaaaatgggggttgtctatttctg

SEQ ID NO: 1234300 - DNA, 25 bp, Homo sapien
ggaacgttgatcttctaaatgagga

SEQ ID NO: 1234301 - DNA, 25 bp, Homo sapien
ttaccacagtagacaagagttgatc

SEQ ID NO: 1234302 - DNA, 25 bp, Homo sapien
ttatggcatcaagggaaatactctc

SEQ ID NO: 1234303 - DNA, 25 bp, Homo sapien
agagttgatcttgcaaaccttggaa

SEQ ID NO: 1234304 - DNA, 25 bp, Homo sapien
tactaggaagtagagcagggcgcct

SEQ ID NO: 1234305 - DNA, 25 bp, Homo sapien
aacctgatgaaaccagtctagggag

SEQ ID NO: 1234306 - DNA, 25 bp, Homo sapien
tgcttcgatgcgctttgaaatttcg

SEQ ID NO: 1234307 - DNA, 25 bp, Homo sapien
tctagggagaactggtacatgtagt

SEQ ID NO: 1234308 - DNA, 25 bp, Homo sapien
catgaacttcttttggagacacttt

SEQ ID NO: 1234309 - DNA, 25 bp, Homo sapien
ctcatgaacttcttttggagacact

SEQ ID NO: 1234310 - DNA, 25 bp, Homo sapien
gaacttcttttggagacactttctc

SEQ ID NO: 1234311 - DNA, 25 bp, Homo sapien
tataaactcatgaacttcttttgga

SEQ ID NO: 1234312 - DNA, 25 bp, Homo sapien
agatttttctcattttccaggttgg

SEQ ID NO: 1234313 - DNA, 25 bp, Homo sapien
gagatttttctcattttccaggttg

SEQ ID NO: 1234314 - DNA, 25 bp, Homo sapien
ctaagagatttttctcattttccag

SEQ ID NO: 1234315 - DNA, 25 bp, Homo sapien
aagagatttttctcattttccaggt

SEQ ID NO: 1234316 - DNA, 25 bp, Homo sapien
tgtctattgcacttttaatatgctt

SEQ ID NO: 1234317 - DNA, 25 bp, Homo sapien
gtctattgcacttttaatatgctta

SEQ ID NO: 1234318 - DNA, 25 bp, Homo sapien
atgtctattgcacttttaatatgct

SEQ ID NO: 1234319 - DNA, 25 bp, Homo sapien
tctattgcacttttaatatgcttat

SEQ ID NO: 1234320 - DNA, 25 bp, Homo sapien
aatccagtgagattaaataagcatg

SEQ ID NO: 1234321 - DNA, 25 bp, Homo sapien
gcatgtaaaattcacactaaagaat

SEQ ID NO: 1234322 - DNA, 25 bp, Homo sapien
attaatccagtgagattaaataagc

SEQ ID NO: 1234323 - DNA, 25 bp, Homo sapien
taatccagtgagattaaataagcat

SEQ ID NO: 1234324 - DNA, 25 bp, Homo sapien
cattagcattgttttgcatgattac

SEQ ID NO: 1234325 - DNA, 25 bp, Homo sapien
ctggtaggaatccaatgtcatcctg

SEQ ID NO: 1234326 - DNA, 25 bp, Homo sapien
catgattacagtgcaaagccgaaaa

SEQ ID NO: 1234327 - DNA, 25 bp, Homo sapien
caatgtcatcctgtattagatttcc

SEQ ID NO: 1234328 - DNA, 25 bp, Homo sapien
gtaagtctagactgggataatgcac

SEQ ID NO: 1234329 - DNA, 25 bp, Homo sapien
agtaagtctagactgggataatgca

SEQ ID NO: 1234330 - DNA, 25 bp, Homo sapien
tagtaagtctagactgggataatgc

SEQ ID NO: 1234331 - DNA, 25 bp, Homo sapien
ttaatggacttttactgaatccgga

SEQ ID NO: 1234332 - DNA, 25 bp, Homo sapien
aatggacttttactgaatccggaat

SEQ ID NO: 1234333 - DNA, 25 bp, Homo sapien
tggacttttactgaatccggaatag

SEQ ID NO: 1234334 - DNA, 25 bp, Homo sapien
gacttttactgaatccggaatagta

SEQ ID NO: 1234335 - DNA, 25 bp, Homo sapien
gatgatcacattagaagagataaac

SEQ ID NO: 1234336 - DNA, 25 bp, Homo sapien
aagaaagatgatcacattagaagag

SEQ ID NO: 1234337 - DNA, 25 bp, Homo sapien
gaaagatgatcacattagaagagat

SEQ ID NO: 1234338 - DNA, 25 bp, Homo sapien
aagatgatcacattagaagagataa

SEQ ID NO: 1234339 - DNA, 25 bp, Homo sapien
tgataaaagggatttgcacagaagt

SEQ ID NO: 1234340 - DNA, 25 bp, Homo sapien
gaaaatggttccaggtgagtgctga

SEQ ID NO: 1234341 - DNA, 25 bp, Homo sapien
gagtgctgacatattggcactgcct

SEQ ID NO: 1234342 - DNA, 25 bp, Homo sapien
tggaatctgacagccactgaagatg

SEQ ID NO: 1234343 - DNA, 25 bp, Homo sapien
aaaggtgtgctgatcagagaataaa

SEQ ID NO: 1234344 - DNA, 25 bp, Homo sapien
tactgttcttaaaagtatcccattg

SEQ ID NO: 1234345 - DNA, 25 bp, Homo sapien
aaggtgtgctgatcagagaataaac

SEQ ID NO: 1234346 - DNA, 25 bp, Homo sapien
tgttcttaaaagtatcccattgtga

SEQ ID NO: 1234347 - DNA, 25 bp, Homo sapien
ttgaaatgaagtgagtttctcccag

SEQ ID NO: 1234348 - DNA, 25 bp, Homo sapien
gaaatgaagtgagtttctcccaggg

SEQ ID NO: 1234349 - DNA, 25 bp, Homo sapien
aatgaagtgagtttctcccagggaa

SEQ ID NO: 1234350 - DNA, 25 bp, Homo sapien
cagggaaaatttataggattacacg

SEQ ID NO: 1234351 - DNA, 25 bp, Homo sapien
tatggtttatggcacggagaagcag

SEQ ID NO: 1234352 - DNA, 25 bp, Homo sapien
ctgtatggtttatggcacggagaag

SEQ ID NO: 1234353 - DNA, 25 bp, Homo sapien
tggtttatggcacggagaagcaggc

SEQ ID NO: 1234354 - DNA, 25 bp, Homo sapien
tgtatggtttatggcacggagaagc

SEQ ID NO: 1234355 - DNA, 25 bp, Homo sapien
gtcacaagcagtgctggtcagccat

SEQ ID NO: 1234356 - DNA, 25 bp, Homo sapien
ctgtcacaagcagtgctggtcagcc

SEQ ID NO: 1234357 - DNA, 25 bp, Homo sapien
ctctccctacaggaccaaggtctgt

SEQ ID NO: 1234358 - DNA, 25 bp, Homo sapien
ctccctacaggaccaaggtctgttc

SEQ ID NO: 1234359 - DNA, 25 bp, Homo sapien
aaactgaagctacacacgtcagtgt

SEQ ID NO: 1234360 - DNA, 25 bp, Homo sapien
aagcaaaactgaagctacacacgtc

SEQ ID NO: 1234361 - DNA, 25 bp, Homo sapien
ttgtctacacaatgaccataaaata

SEQ ID NO: 1234362 - DNA, 25 bp, Homo sapien
gcaaaactgaagctacacacgtcag

SEQ ID NO: 1234363 - DNA, 25 bp, Homo sapien
tcaaattaactccagttctttgaag

SEQ ID NO: 1234364 - DNA, 25 bp, Homo sapien
gaataagtatcagcggagttctggc

SEQ ID NO: 1234365 - DNA, 25 bp, Homo sapien
ctttctcactgaattgtttaaactt

SEQ ID NO: 1234366 - DNA, 25 bp, Homo sapien
gagttctggcattggatcctttata

SEQ ID NO: 1234367 - DNA, 25 bp, Homo sapien
tagacatagacataagggcgagtcc

SEQ ID NO: 1234368 - DNA, 25 bp, Homo sapien
gcaacagtatgtgtttgcaaggtat

SEQ ID NO: 1234369 - DNA, 25 bp, Homo sapien
tgtttattaaacacgtgcatagaca

SEQ ID NO: 1234370 - DNA, 25 bp, Homo sapien
cataagggcgagtccaacttccaga

SEQ ID NO: 1234371 - DNA, 25 bp, Homo sapien
tcttgtgcaaatctcaggaggatat

SEQ ID NO: 1234372 - DNA, 25 bp, Homo sapien
cagttctggaggaagacccattgtt

SEQ ID NO: 1234373 - DNA, 25 bp, Homo sapien
cttcagctttagctgcttggtcacg

SEQ ID NO: 1234374 - DNA, 25 bp, Homo sapien
aatgatgttgcaagatggcagttct

SEQ ID NO: 1234375 - DNA, 25 bp, Homo sapien
ctcagggtctattgtcacgtttgga

SEQ ID NO: 1234376 - DNA, 25 bp, Homo sapien
gaaactcagggtctattgtcacgtt

SEQ ID NO: 1234377 - DNA, 25 bp, Homo sapien
ttaaccatagccgaaactcagggtc

SEQ ID NO: 1234378 - DNA, 25 bp, Homo sapien
tagccgaaactcagggtctattgtc

SEQ ID NO: 1234379 - DNA, 25 bp, Homo sapien
tgtctgccccaggaaccgggatgtt

SEQ ID NO: 1234380 - DNA, 25 bp, Homo sapien
cgagtctcagactaagagttgtggg

SEQ ID NO: 1234381 - DNA, 25 bp, Homo sapien
gctgtctgagagcatggtctgctgc

SEQ ID NO: 1234382 - DNA, 25 bp, Homo sapien
gacaagtggaatctttcgagtctca

SEQ ID NO: 1234383 - DNA, 25 bp, Homo sapien
ccaaatgtctgaagtaagttacttt

SEQ ID NO: 1234384 - DNA, 25 bp, Homo sapien
tctccactcccagtacatccaaatg

SEQ ID NO: 1234385 - DNA, 25 bp, Homo sapien
cttttcaatccctggggagattcca

SEQ ID NO: 1234386 - DNA, 25 bp, Homo sapien
atccctggggagattccacggcaat

SEQ ID NO: 1234387 - DNA, 25 bp, Homo sapien
attccagcccaatattccgtaattt

SEQ ID NO: 1234388 - DNA, 25 bp, Homo sapien
aagttttttccaccattgtccacag

SEQ ID NO: 1234389 - DNA, 25 bp, Homo sapien
tattccagcccaatattccgtaatt

SEQ ID NO: 1234390 - DNA, 25 bp, Homo sapien
atattccagcccaatattccgtaat

SEQ ID NO: 1234391 - DNA, 25 bp, Homo sapien
aattatcaatcacccggccaccgta

SEQ ID NO: 1234392 - DNA, 25 bp, Homo sapien
cagtgcttgccacgaaatgctgggc

SEQ ID NO: 1234393 - DNA, 25 bp, Homo sapien
tctccaatcaggtagcgcagtgctt

SEQ ID NO: 1234394 - DNA, 25 bp, Homo sapien
tagagtagggtcttcaagcatcgct

SEQ ID NO: 1234395 - DNA, 25 bp, Homo sapien
aatgcttgaagacaatattttccca

SEQ ID NO: 1234396 - DNA, 25 bp, Homo sapien
ctgctacttctgaacactttgttgg

SEQ ID NO: 1234397 - DNA, 25 bp, Homo sapien
agtaatgcttgaagacaatattttc

SEQ ID NO: 1234398 - DNA, 25 bp, Homo sapien
tggtttttgccagagtaagatacct

SEQ ID NO: 1234399 - DNA, 25 bp, Homo sapien
gtttttggttgcatggcaatcagat

SEQ ID NO: 1234400 - DNA, 25 bp, Homo sapien
ctgggtgtattcctaagacctcggg

SEQ ID NO: 1234401 - DNA, 25 bp, Homo sapien
ggtcatcatcaggtaaggactggat

SEQ ID NO: 1234402 - DNA, 25 bp, Homo sapien
gactggataatgtgtatgtagtcct

SEQ ID NO: 1234403 - DNA, 25 bp, Homo sapien
gcagccgctttagcaagtcggatag

SEQ ID NO: 1234404 - DNA, 25 bp, Homo sapien
atgctcttcaatgtgcttggagttc

SEQ ID NO: 1234405 - DNA, 25 bp, Homo sapien
ggagttccaacagcaatttcttctt

SEQ ID NO: 1234406 - DNA, 25 bp, Homo sapien
atcaccagttcatccttactctgct

SEQ ID NO: 1234407 - DNA, 25 bp, Homo sapien
ttcacttctacagaatttttgtctt

SEQ ID NO: 1234408 - DNA, 25 bp, Homo sapien
tcacttctacagaatttttgtctta

SEQ ID NO: 1234409 - DNA, 25 bp, Homo sapien
ttttccatcttatctcagtattttc

SEQ ID NO: 1234410 - DNA, 25 bp, Homo sapien
cacttctacagaatttttgtcttat

SEQ ID NO: 1234411 - DNA, 25 bp, Homo sapien
ctgcaaagggataaaatatgggtat

SEQ ID NO: 1234412 - DNA, 25 bp, Homo sapien
tatcatagtctagcaatttagccac

SEQ ID NO: 1234413 - DNA, 25 bp, Homo sapien
ggagtcatctctgggcaatcaggct

SEQ ID NO: 1234414 - DNA, 25 bp, Homo sapien
gccacttagagctgggtttggagtc

SEQ ID NO: 1234415 - DNA, 25 bp, Homo sapien
tgtgtcacaaactatattccttctt

SEQ ID NO: 1234416 - DNA, 25 bp, Homo sapien
gagtttcatataacatttatgtgtc

SEQ ID NO: 1234417 - DNA, 25 bp, Homo sapien
tggatttggcctgcgagccctaatt

SEQ ID NO: 1234418 - DNA, 25 bp, Homo sapien
tttacttatggcactcaaattggag

SEQ ID NO: 1234419 - DNA, 25 bp, Homo sapien
aaaggttagcaagacacaatggata

SEQ ID NO: 1234420 - DNA, 25 bp, Homo sapien
aaaaggttagcaagacacaatggat

SEQ ID NO: 1234421 - DNA, 25 bp, Homo sapien
ggttagcaagacacaatggataagg

SEQ ID NO: 1234422 - DNA, 25 bp, Homo sapien
aggttagcaagacacaatggataag

SEQ ID NO: 1234423 - DNA, 25 bp, Homo sapien
ttcttgggtgaggatgatctctcct

SEQ ID NO: 1234424 - DNA, 25 bp, Homo sapien
tcttgggtgaggatgatctctcctt

SEQ ID NO: 1234425 - DNA, 25 bp, Homo sapien
ctgccacaatgtaggcactctcata

SEQ ID NO: 1234426 - DNA, 25 bp, Homo sapien
cttgggtgaggatgatctctccttt

SEQ ID NO: 1234427 - DNA, 25 bp, Homo sapien
gcttacaagatctgtaggcgtgttt

SEQ ID NO: 1234428 - DNA, 25 bp, Homo sapien
aactcagtggcttacaagatctgta

SEQ ID NO: 1234429 - DNA, 25 bp, Homo sapien
tattgcagtataagccactttggcc

SEQ ID NO: 1234430 - DNA, 25 bp, Homo sapien
aattcagtcgctggatgagatcatc

SEQ ID NO: 1234431 - DNA, 25 bp, Homo sapien
ggtgtttgcatttttggctagttga

SEQ ID NO: 1234432 - DNA, 25 bp, Homo sapien
tggctagttgatggaatagactgct

SEQ ID NO: 1234433 - DNA, 25 bp, Homo sapien
gatggaatagactgcttccaaactg

SEQ ID NO: 1234434 - DNA, 25 bp, Homo sapien
aatagactgcttccaaactgtgaca

SEQ ID NO: 1234435 - DNA, 25 bp, Homo sapien
aaagaagaaagctgggagccagtat

SEQ ID NO: 1234436 - DNA, 25 bp, Homo sapien
cttgtggaaagaagaaagctgggag

SEQ ID NO: 1234437 - DNA, 25 bp, Homo sapien
tggaaagaagaaagctgggagccag

SEQ ID NO: 1234438 - DNA, 25 bp, Homo sapien
tgtggaaagaagaaagctgggagcc

SEQ ID NO: 1234439 - DNA, 25 bp, Homo sapien
ctgtggaggcgcaggtgttgtcatc

SEQ ID NO: 1234440 - DNA, 25 bp, Homo sapien
gaacacacaccatcaagttccttgt

SEQ ID NO: 1234441 - DNA, 25 bp, Homo sapien
aagaacacacaccatcaagttcctt

SEQ ID NO: 1234442 - DNA, 25 bp, Homo sapien
agttccttgtgagtctcagggcctc

SEQ ID NO: 1234443 - DNA, 25 bp, Homo sapien
atcaagttccttgtgagtctcaggg

SEQ ID NO: 1234444 - DNA, 25 bp, Homo sapien
gagggcatccacagcgattcctcgg

SEQ ID NO: 1234445 - DNA, 25 bp, Homo sapien
ggcatccacagcgattcctcgggac

SEQ ID NO: 1234446 - DNA, 25 bp, Homo sapien
gcgattcctcgggacctcccatagt

SEQ ID NO: 1234447 - DNA, 25 bp, Homo sapien
acagcgattcctcgggacctcccat

SEQ ID NO: 1234448 - DNA, 25 bp, Homo sapien
tctcctgactatgttgagtttcttt

SEQ ID NO: 1234449 - DNA, 25 bp, Homo sapien
ctgactatgttgagtttctttggca

SEQ ID NO: 1234450 - DNA, 25 bp, Homo sapien
cgctctcctgactatgttgagtttc

SEQ ID NO: 1234451 - DNA, 25 bp, Homo sapien
aacgctctcctgactatgttgagtt

SEQ ID NO: 1234452 - DNA, 25 bp, Homo sapien
atgcccggccgggttccatatattt

SEQ ID NO: 1234453 - DNA, 25 bp, Homo sapien
ttgaatgatataggttaaatagagg

SEQ ID NO: 1234454 - DNA, 25 bp, Homo sapien
ctgatgaggtctgtgaagtagaaaa

SEQ ID NO: 1234455 - DNA, 25 bp, Homo sapien
tataggttaaatagaggattacatt

SEQ ID NO: 1234456 - DNA, 25 bp, Homo sapien
ccaccgcctgggttccatcggttct

SEQ ID NO: 1234457 - DNA, 25 bp, Homo sapien
cgcctgggttccatcggttctccca

SEQ ID NO: 1234458 - DNA, 25 bp, Homo sapien
tgggttccatcggttctcccacttc

SEQ ID NO: 1234459 - DNA, 25 bp, Homo sapien
caccgcctgggttccatcggttctc

SEQ ID NO: 1234460 - DNA, 25 bp, Homo sapien
ttctgttcacgattccatcttgccc

SEQ ID NO: 1234461 - DNA, 25 bp, Homo sapien
acatctccagaggcagcgagtcttc

SEQ ID NO: 1234462 - DNA, 25 bp, Homo sapien
gtatatgtcgggaaaatcacagcac

SEQ ID NO: 1234463 - DNA, 25 bp, Homo sapien
tcttgccccctcgatgaataaacca

SEQ ID NO: 1234464 - DNA, 25 bp, Homo sapien
gttggaagcatttggtgttttggta

SEQ ID NO: 1234465 - DNA, 25 bp, Homo sapien
ctggttggaagcatttggtgttttg

SEQ ID NO: 1234466 - DNA, 25 bp, Homo sapien
tggaagcatttggtgttttggtaga

SEQ ID NO: 1234467 - DNA, 25 bp, Homo sapien
gaagcatttggtgttttggtagaaa

SEQ ID NO: 1234468 - DNA, 25 bp, Homo sapien
tctcaggtgtctggtaaactgggca

SEQ ID NO: 1234469 - DNA, 25 bp, Homo sapien
ccagtgactaggaggtttcttcgtt

SEQ ID NO: 1234470 - DNA, 25 bp, Homo sapien
gccaaaattcttgacctctcaggtg

SEQ ID NO: 1234471 - DNA, 25 bp, Homo sapien
aaagcaatgcaacccgcattgtgat

SEQ ID NO: 1234472 - DNA, 25 bp, Homo sapien
gacatttatttttcattcttctcac

SEQ ID NO: 1234473 - DNA, 25 bp, Homo sapien
aaatggtttgatatggacatttatt

SEQ ID NO: 1234474 - DNA, 25 bp, Homo sapien
ggacatttatttttcattcttctca

SEQ ID NO: 1234475 - DNA, 25 bp, Homo sapien
ttaaaatggtttgatatggacattt

SEQ ID NO: 1234476 - DNA, 25 bp, Homo sapien
gaagttggtttgctccagcatccgg

SEQ ID NO: 1234477 - DNA, 25 bp, Homo sapien
ggcgttttctgtactggattgcacc

SEQ ID NO: 1234478 - DNA, 25 bp, Homo sapien
tagcagacactgcttaaaggagacc

SEQ ID NO: 1234479 - DNA, 25 bp, Homo sapien
aaggagaccatttgtagcagttggc

SEQ ID NO: 1234480 - DNA, 25 bp, Homo sapien
cttccagggcgtagagtttcattac

SEQ ID NO: 1234481 - DNA, 25 bp, Homo sapien
tagccatttgactttgtgcctgaga

SEQ ID NO: 1234482 - DNA, 25 bp, Homo sapien
tggcattgcacgtgaatgtccccgc

SEQ ID NO: 1234483 - DNA, 25 bp, Homo sapien
ttgtaactaccaacctggctcggtg

SEQ ID NO: 1234484 - DNA, 25 bp, Homo sapien
gggttgttgactttgccgccaggtc

SEQ ID NO: 1234485 - DNA, 25 bp, Homo sapien
gctccagagtctgacccctggtggg

SEQ ID NO: 1234486 - DNA, 25 bp, Homo sapien
ctggtgggtgcttaatacttatcat

SEQ ID NO: 1234487 - DNA, 25 bp, Homo sapien
ggtgtggtacattcagagactgagc

SEQ ID NO: 1234488 - DNA, 25 bp, Homo sapien
aaagatagtttagacaccttctgcc

SEQ ID NO: 1234489 - DNA, 25 bp, Homo sapien
tcactccactgggttctaaagggga

SEQ ID NO: 1234490 - DNA, 25 bp, Homo sapien
gagacttacgcagcatctactctgt

SEQ ID NO: 1234491 - DNA, 25 bp, Homo sapien
actttgtttagagacttacgcagca

SEQ ID NO: 1234492 - DNA, 25 bp, Homo sapien
caagtaagcatatgagtatgcgtca

SEQ ID NO: 1234493 - DNA, 25 bp, Homo sapien
ggataaacagggtagagcccaattg

SEQ ID NO: 1234494 - DNA, 25 bp, Homo sapien
tatgcgtcatcaaatagcacttggg

SEQ ID NO: 1234495 - DNA, 25 bp, Homo sapien
ggttaaataactggatgggcaatat

SEQ ID NO: 1234496 - DNA, 25 bp, Homo sapien
ggtgatcacttcaagaatgtattag

SEQ ID NO: 1234497 - DNA, 25 bp, Homo sapien
ccaaacactgctgcgagcgctggga

SEQ ID NO: 1234498 - DNA, 25 bp, Homo sapien
cgagctcggatctttggtgatcact

SEQ ID NO: 1234499 - DNA, 25 bp, Homo sapien
tttaccgagaaacgctttcgagctc

SEQ ID NO: 1234500 - DNA, 25 bp, Homo sapien
ttttaacacgctaaggagggcactc

SEQ ID NO: 1234501 - DNA, 25 bp, Homo sapien
tcgcagcgtaagtcgtaggagccct

SEQ ID NO: 1234502 - DNA, 25 bp, Homo sapien
aaaacttcttgttccacgctccgcg

SEQ ID NO: 1234503 - DNA, 25 bp, Homo sapien
tactgcatctcgacagcatctcggg

SEQ ID NO: 1234504 - DNA, 25 bp, Homo sapien
cagtcagtgccagcggaggctttat

SEQ ID NO: 1234505 - DNA, 25 bp, Homo sapien
tccagcctgtggcagctcagtaact

SEQ ID NO: 1234506 - DNA, 25 bp, Homo sapien
tactaccttctgacctttaggagaa

SEQ ID NO: 1234507 - DNA, 25 bp, Homo sapien
tcagtaactggaacaagagcgttta

SEQ ID NO: 1234508 - DNA, 25 bp, Homo sapien
tgcaatctgtcagtcacgtcttctg

SEQ ID NO: 1234509 - DNA, 25 bp, Homo sapien
gaattccttggccaatacactccag

SEQ ID NO: 1234510 - DNA, 25 bp, Homo sapien
aacacagcccaaaacgggcctgtgg

SEQ ID NO: 1234511 - DNA, 25 bp, Homo sapien
caggaggaatactgcccctgggaag

SEQ ID NO: 1234512 - DNA, 25 bp, Homo sapien
tccatgagcacttagcgagcacctg

SEQ ID NO: 1234513 - DNA, 25 bp, Homo sapien
tgtcccgcaggagctattcttctag

SEQ ID NO: 1234514 - DNA, 25 bp, Homo sapien
gaagtgttccagtcatgagggcagc

SEQ ID NO: 1234515 - DNA, 25 bp, Homo sapien
acaagcattgctctaggactgggaa

SEQ ID NO: 1234516 - DNA, 25 bp, Homo sapien
ttgctgcttttacggtagattagat

SEQ ID NO: 1234517 - DNA, 25 bp, Homo sapien
tgcttttacggtagattagattttc

SEQ ID NO: 1234518 - DNA, 25 bp, Homo sapien
gctgcttttacggtagattagattt

SEQ ID NO: 1234519 - DNA, 25 bp, Homo sapien
tggttgctgcttttacggtagatta

SEQ ID NO: 1234520 - DNA, 25 bp, Homo sapien
tggagcctcaggaagtcggatctca

SEQ ID NO: 1234521 - DNA, 25 bp, Homo sapien
cagtcactccgtaacaacgggtggt

SEQ ID NO: 1234522 - DNA, 25 bp, Homo sapien
ctgctaggtctgcccatgccgggag

SEQ ID NO: 1234523 - DNA, 25 bp, Homo sapien
cgccttccttggagagccacggtgg

SEQ ID NO: 1234524 - DNA, 25 bp, Homo sapien
ctggtcaccggaccccaggtgattc

SEQ ID NO: 1234525 - DNA, 25 bp, Homo sapien
tgagaagcccttggtgtacagcgga

SEQ ID NO: 1234526 - DNA, 25 bp, Homo sapien
gagaagcccttggtgtacagcggaa

SEQ ID NO: 1234527 - DNA, 25 bp, Homo sapien
gaagcccttggtgtacagcggaaag

SEQ ID NO: 1234528 - DNA, 25 bp, Homo sapien
aactgagaagcccttggtgtacagc

SEQ ID NO: 1234529 - DNA, 25 bp, Homo sapien
ccaaaaggatggatagtcacagtcc

SEQ ID NO: 1234530 - DNA, 25 bp, Homo sapien
gaactagaagtgtgcatgtatgtca

SEQ ID NO: 1234531 - DNA, 25 bp, Homo sapien
taaacatttgcaccccatgaatggg

SEQ ID NO: 1234532 - DNA, 25 bp, Homo sapien
taaggttgcgtatactgaagtcatg

SEQ ID NO: 1234533 - DNA, 25 bp, Homo sapien
gatgcacacaaccttctaaacggaa

SEQ ID NO: 1234534 - DNA, 25 bp, Homo sapien
catagtaggccttgagtatttgcag

SEQ ID NO: 1234535 - DNA, 25 bp, Homo sapien
taaatagctcggtaaactggtcaga

SEQ ID NO: 1234536 - DNA, 25 bp, Homo sapien
tagacgcttctggtgtaggacacag

SEQ ID NO: 1234537 - DNA, 25 bp, Homo sapien
tgaagtcagtaacccctcaagaaag

SEQ ID NO: 1234538 - DNA, 25 bp, Homo sapien
taaattctaccgattataagcagcg

SEQ ID NO: 1234539 - DNA, 25 bp, Homo sapien
gaaagtccgtttatagaagccaaga

SEQ ID NO: 1234540 - DNA, 25 bp, Homo sapien
tattaccctatgaagcacagtgtgc

SEQ ID NO: 1234541 - DNA, 25 bp, Homo sapien
gcacgtgctgtctatatggaagcca

SEQ ID NO: 1234542 - DNA, 25 bp, Homo sapien
tttctaatgacaggaaggcactgct

SEQ ID NO: 1234543 - DNA, 25 bp, Homo sapien
tagagtactgggtacaagtggtcca

SEQ ID NO: 1234544 - DNA, 25 bp, Homo sapien
tatgtcccctataaatctggtcagc

SEQ ID NO: 1234545 - DNA, 25 bp, Homo sapien
aaacccatcaggcaagatcaccacg

SEQ ID NO: 1234546 - DNA, 25 bp, Homo sapien
aagagttcctgtaacagttatgcag

SEQ ID NO: 1234547 - DNA, 25 bp, Homo sapien
tgactctggtgataagctctttccc

SEQ ID NO: 1234548 - DNA, 25 bp, Homo sapien
tactgcatagaggaacagactaagg

SEQ ID NO: 1234549 - DNA, 25 bp, Homo sapien
tcagactgttcccagaggactagat

SEQ ID NO: 1234550 - DNA, 25 bp, Homo sapien
gctgcatatgattcgtgcctgccgt

SEQ ID NO: 1234551 - DNA, 25 bp, Homo sapien
catacgtttcactggatgacagagt

SEQ ID NO: 1234552 - DNA, 25 bp, Homo sapien
tgcctgccgtattggacagcatggg

SEQ ID NO: 1234553 - DNA, 25 bp, Homo sapien
tttagtagtcttccctagcaaagta

SEQ ID NO: 1234554 - DNA, 25 bp, Homo sapien
tctagagaacaggaataggtagcat

SEQ ID NO: 1234555 - DNA, 25 bp, Homo sapien
gctaaatgggccacttaaatgggaa

SEQ ID NO: 1234556 - DNA, 25 bp, Homo sapien
taagaaggtgtagcctcacaagagg

SEQ ID NO: 1234557 - DNA, 25 bp, Homo sapien
gtgtttcaccccctcatgactgtct

SEQ ID NO: 1234558 - DNA, 25 bp, Homo sapien
tgtgtttgtgtgtagcattcacctc

SEQ ID NO: 1234559 - DNA, 25 bp, Homo sapien
tacaccatactcatctttcgctctg

SEQ ID NO: 1234560 - DNA, 25 bp, Homo sapien
tctctgtgtacaccatactcatctt

SEQ ID NO: 1234561 - DNA, 25 bp, Homo sapien
tatattcctgaacatacagcggcag

SEQ ID NO: 1234562 - DNA, 25 bp, Homo sapien
ttcctgaacatacagcggcagctga

SEQ ID NO: 1234563 - DNA, 25 bp, Homo sapien
gcggcagctgacagactttgcctga

SEQ ID NO: 1234564 - DNA, 25 bp, Homo sapien
tgcctgatcctagttgctgcttcat

SEQ ID NO: 1234565 - DNA, 25 bp, Homo sapien
agatggccccgttgtccttcgaagc

SEQ ID NO: 1234566 - DNA, 25 bp, Homo sapien
caaggttactgctacccaggacagc

SEQ ID NO: 1234567 - DNA, 25 bp, Homo sapien
gacagcactaatttgcgatgtattt

SEQ ID NO: 1234568 - DNA, 25 bp, Homo sapien
caaggtgtctgttgcagcccagagc

SEQ ID NO: 1234569 - DNA, 25 bp, Homo sapien
gaagattcaggaccatcaggtaagg

SEQ ID NO: 1234570 - DNA, 25 bp, Homo sapien
cagagtatctgtcaggcaagagctg

SEQ ID NO: 1234571 - DNA, 25 bp, Homo sapien
gctcaactggattcagcagagttca

SEQ ID NO: 1234572 - DNA, 25 bp, Homo sapien
acaacacattcagagtggtgggcag

SEQ ID NO: 1234573 - DNA, 25 bp, Homo sapien
tatttgtggaatcgagttgaaacct

SEQ ID NO: 1234574 - DNA, 25 bp, Homo sapien
gtgtttactctgagcctctttaatc

SEQ ID NO: 1234575 - DNA, 25 bp, Homo sapien
tgccaggacctgtgttataaatgtg

SEQ ID NO: 1234576 - DNA, 25 bp, Homo sapien
ttatataactgagctggtctcgccc

SEQ ID NO: 1234577 - DNA, 25 bp, Homo sapien
tcacaaagactctttggtacttctg

SEQ ID NO: 1234578 - DNA, 25 bp, Homo sapien
tcttgtcacaaagactctttggtac

SEQ ID NO: 1234579 - DNA, 25 bp, Homo sapien
tgtcacaaagactctttggtacttc

SEQ ID NO: 1234580 - DNA, 25 bp, Homo sapien
cttgtcacaaagactctttggtact

SEQ ID NO: 1234581 - DNA, 25 bp, Homo sapien
aaagttgattgctagtaaggctgat

SEQ ID NO: 1234582 - DNA, 25 bp, Homo sapien
agaatggagaccagtttggcaaggg

SEQ ID NO: 1234583 - DNA, 25 bp, Homo sapien
tttcctccgggggatgtttggatga

SEQ ID NO: 1234584 - DNA, 25 bp, Homo sapien
tttcagggaattgtcattttcctcc

SEQ ID NO: 1234585 - DNA, 25 bp, Homo sapien
tgagaaggttctgtaaactgggcca

SEQ ID NO: 1234586 - DNA, 25 bp, Homo sapien
tctgtttcaagttgagaaggttctg

SEQ ID NO: 1234587 - DNA, 25 bp, Homo sapien
ttgagaaggttctgtaaactgggcc

SEQ ID NO: 1234588 - DNA, 25 bp, Homo sapien
gcaagtttttctgtttcaagttgag

SEQ ID NO: 1234589 - DNA, 25 bp, Homo sapien
gaattccgaacatctgacatcccca

SEQ ID NO: 1234590 - DNA, 25 bp, Homo sapien
gacatccccattgttgaccacagtt

SEQ ID NO: 1234591 - DNA, 25 bp, Homo sapien
acaggttatgtgtgagaatagggac

SEQ ID NO: 1234592 - DNA, 25 bp, Homo sapien
agggacactggaattccgaacatct

SEQ ID NO: 1234593 - DNA, 25 bp, Homo sapien
ctttttcagtttgtttctggaccat

SEQ ID NO: 1234594 - DNA, 25 bp, Homo sapien
tctggtttgtctttagtgattgttc

SEQ ID NO: 1234595 - DNA, 25 bp, Homo sapien
ctcttttcatagtttttgtcgacta

SEQ ID NO: 1234596 - DNA, 25 bp, Homo sapien
gactagctcttttggtgtgtcatac

SEQ ID NO: 1234597 - DNA, 25 bp, Homo sapien
tctttagtgattgttccaggctgag

SEQ ID NO: 1234598 - DNA, 25 bp, Homo sapien
ttcccttcataatgtgtggttcccg

SEQ ID NO: 1234599 - DNA, 25 bp, Homo sapien
ttcataatgtgtggttcccgtgtgg

SEQ ID NO: 1234600 - DNA, 25 bp, Homo sapien
ccttcataatgtgtggttcccgtgt

SEQ ID NO: 1234601 - DNA, 25 bp, Homo sapien
cataatgtgtggttcccgtgtggtc

SEQ ID NO: 1234602 - DNA, 25 bp, Homo sapien
gtgacttcataaaggcctacatctt

SEQ ID NO: 1234603 - DNA, 25 bp, Homo sapien
tcagtgacttcataaaggcctacat

SEQ ID NO: 1234604 - DNA, 25 bp, Homo sapien
cactttgtagatgatatgcattgtg

SEQ ID NO: 1234605 - DNA, 25 bp, Homo sapien
taaaggcctacatcttttggaatgt

SEQ ID NO: 1234606 - DNA, 25 bp, Homo sapien
gagtgtgtgcagtcatgcgatttcg

SEQ ID NO: 1234607 - DNA, 25 bp, Homo sapien
gtgtgtgcagtcatgcgatttcggc

SEQ ID NO: 1234608 - DNA, 25 bp, Homo sapien
ggagtgtgtgcagtcatgcgatttc

SEQ ID NO: 1234609 - DNA, 25 bp, Homo sapien
gtgtgcagtcatgcgatttcggctc

SEQ ID NO: 1234610 - DNA, 25 bp, Homo sapien
cggtgcctggccgaaagtgggttat

SEQ ID NO: 1234611 - DNA, 25 bp, Homo sapien
gaagtttaatcactgtcatgtatag

SEQ ID NO: 1234612 - DNA, 25 bp, Homo sapien
tgctctgttccttatgaagtgtaga

SEQ ID NO: 1234613 - DNA, 25 bp, Homo sapien
tcatgtatagatgtcagtctgtcac

SEQ ID NO: 1234614 - DNA, 25 bp, Homo sapien
gcaagacttcgtgtgaaatgggact

SEQ ID NO: 1234615 - DNA, 25 bp, Homo sapien
gggacttggtagactgaaggctgat

SEQ ID NO: 1234616 - DNA, 25 bp, Homo sapien
taaccttctcttttcggattggtgc

SEQ ID NO: 1234617 - DNA, 25 bp, Homo sapien
gaaggctgatccattctgcgttatc

SEQ ID NO: 1234618 - DNA, 25 bp, Homo sapien
ttgtgcgaggagatggtgtagcccc

SEQ ID NO: 1234619 - DNA, 25 bp, Homo sapien
gaggagccggacacttgtctcccgt

SEQ ID NO: 1234620 - DNA, 25 bp, Homo sapien
ctgcgccgccggcaccatgaggtga

SEQ ID NO: 1234621 - DNA, 25 bp, Homo sapien
gggcgggccattgtgccgcgggagc

SEQ ID NO: 1234622 - DNA, 25 bp, Homo sapien
tgtgcacatcaactcgttccatcgg

SEQ ID NO: 1234623 - DNA, 25 bp, Homo sapien
tgaaatgaaattgcctcgccagtat

SEQ ID NO: 1234624 - DNA, 25 bp, Homo sapien
tgaagtcatccctatacctagtgtg

SEQ ID NO: 1234625 - DNA, 25 bp, Homo sapien
cacgctgggattcctcgggaagaaa

SEQ ID NO: 1234626 - DNA, 25 bp, Homo sapien
taactatcttttgaatggtacctgc

SEQ ID NO: 1234627 - DNA, 25 bp, Homo sapien
gacaaatcaggcattgaccacggat

SEQ ID NO: 1234628 - DNA, 25 bp, Homo sapien
tggaagtgtacattatcccaacctt

SEQ ID NO: 1234629 - DNA, 25 bp, Homo sapien
tatggttaaaaatgggctacacagt

SEQ ID NO: 1234630 - DNA, 25 bp, Homo sapien
ttgagcatggacaaagacttttcct

SEQ ID NO: 1234631 - DNA, 25 bp, Homo sapien
taccttgtggaccagctgagagcaa

SEQ ID NO: 1234632 - DNA, 25 bp, Homo sapien
cattccaacaagactttaccaaaga

SEQ ID NO: 1234633 - DNA, 25 bp, Homo sapien
gaacttgagcatggacaaagacttt

SEQ ID NO: 1234634 - DNA, 25 bp, Homo sapien
gactgtgctgggtagcacggatttt

SEQ ID NO: 1234635 - DNA, 25 bp, Homo sapien
tttggactgtgctgcatagcacgga

SEQ ID NO: 1234636 - DNA, 25 bp, Homo sapien
gtgctgcatagcacggattttggac

SEQ ID NO: 1234637 - DNA, 25 bp, Homo sapien
ttttggactgtgctgggtagcacgg

SEQ ID NO: 1234638 - DNA, 25 bp, Homo sapien
aatgctgatatactacaccacatca

SEQ ID NO: 1234639 - DNA, 25 bp, Homo sapien
atgctgatatactacaccacatcag

SEQ ID NO: 1234640 - DNA, 25 bp, Homo sapien
aaatgctgatatactacaccacatc

SEQ ID NO: 1234641 - DNA, 25 bp, Homo sapien
gagctgtaacgggataagtaggctc

SEQ ID NO: 1234642 - DNA, 25 bp, Homo sapien
gataagtaggctctgtcacgggtcc

SEQ ID NO: 1234643 - DNA, 25 bp, Homo sapien
taggctctgtcacgggtcctttgtt

SEQ ID NO: 1234644 - DNA, 25 bp, Homo sapien
taacgggataagtaggctctgtcac

SEQ ID NO: 1234645 - DNA, 25 bp, Homo sapien
catctttgaacgtttagatatttca

SEQ ID NO: 1234646 - DNA, 25 bp, Homo sapien
ttctgacatggcttcgcccttctca

SEQ ID NO: 1234647 - DNA, 25 bp, Homo sapien
ctattatttctgacatggcttcgcc

SEQ ID NO: 1234648 - DNA, 25 bp, Homo sapien
acttgcatagcacagtattctcccc

SEQ ID NO: 1234649 - DNA, 25 bp, Homo sapien
aatcagtcgtgagtcccagaggtgc

SEQ ID NO: 1234650 - DNA, 25 bp, Homo sapien
cccaattggaaatggatggtccaca

SEQ ID NO: 1234651 - DNA, 25 bp, Homo sapien
aataaacccctataggctgaagctg

SEQ ID NO: 1234652 - DNA, 25 bp, Homo sapien
aaactgagtccttgagaactcggcc

SEQ ID NO: 1234653 - DNA, 25 bp, Homo sapien
ttccccatcgttcaacacgggttca

SEQ ID NO: 1234654 - DNA, 25 bp, Homo sapien
caacacgggttcattgagcacctgt

SEQ ID NO: 1234655 - DNA, 25 bp, Homo sapien
catcgttcaacacgggttcattgag

SEQ ID NO: 1234656 - DNA, 25 bp, Homo sapien
cgttcaacacgggttcattgagcac

SEQ ID NO: 1234657 - DNA, 25 bp, Homo sapien
caagaacaagctttgacttaggctc

SEQ ID NO: 1234658 - DNA, 25 bp, Homo sapien
tggaaggatttgacatatttcctgg

SEQ ID NO: 1234659 - DNA, 25 bp, Homo sapien
gatttgacatatttcctgggtccaa

SEQ ID NO: 1234660 - DNA, 25 bp, Homo sapien
gggtccaagaacaagctttgactta

SEQ ID NO: 1234661 - DNA, 25 bp, Homo sapien
tggttggaccacagtgaagtctaaa

SEQ ID NO: 1234662 - DNA, 25 bp, Homo sapien
gaagtttgatattaacacagaagaa

SEQ ID NO: 1234663 - DNA, 25 bp, Homo sapien
agtcaggaccgtgtataggaagaga

SEQ ID NO: 1234664 - DNA, 25 bp, Homo sapien
tctcaaccatgggaagctctgaagc

SEQ ID NO: 1234665 - DNA, 25 bp, Homo sapien
cccagggctggtaatgatgcaggaa

SEQ ID NO: 1234666 - DNA, 25 bp, Homo sapien
gaggcatccaaagctatacgcatgt

SEQ ID NO: 1234667 - DNA, 25 bp, Homo sapien
ggagagaaagataagacccagggct

SEQ ID NO: 1234668 - DNA, 25 bp, Homo sapien
cattctcactatgcagtgggacgcg

SEQ ID NO: 1234669 - DNA, 25 bp, Homo sapien
ggtgaaggcgatcaggtctgagagt

SEQ ID NO: 1234670 - DNA, 25 bp, Homo sapien
ggtctgagagtgataaacaccagca

SEQ ID NO: 1234671 - DNA, 25 bp, Homo sapien
gctggaagatagacctgtacatcat

SEQ ID NO: 1234672 - DNA, 25 bp, Homo sapien
aaactgggtctgttgcagcaagaga

SEQ ID NO: 1234673 - DNA, 25 bp, Homo sapien
ttaaaattcaacctagctctgtgca

SEQ ID NO: 1234674 - DNA, 25 bp, Homo sapien
attcaacctagctctgtgcagttta

SEQ ID NO: 1234675 - DNA, 25 bp, Homo sapien
cacccaagatctaatttcttaccct

SEQ ID NO: 1234676 - DNA, 25 bp, Homo sapien
gaaaaatcacccaagatctaatttc

SEQ ID NO: 1234677 - DNA, 25 bp, Homo sapien
atgcctttgatcacggcagcattac

SEQ ID NO: 1234678 - DNA, 25 bp, Homo sapien
ctttgatcacggcagcattacaacc

SEQ ID NO: 1234679 - DNA, 25 bp, Homo sapien
gatcacggcagcattacaacctgtc

SEQ ID NO: 1234680 - DNA, 25 bp, Homo sapien
ttgatcacggcagcattacaacctg

SEQ ID NO: 1234681 - DNA, 25 bp, Homo sapien
ggatatacgttacaccatagagctc

SEQ ID NO: 1234682 - DNA, 25 bp, Homo sapien
ccaggatatacgttacaccatagag

SEQ ID NO: 1234683 - DNA, 25 bp, Homo sapien
caggatatacgttacaccatagagc

SEQ ID NO: 1234684 - DNA, 25 bp, Homo sapien
attccaggatatacgttacaccata

SEQ ID NO: 1234685 - DNA, 25 bp, Homo sapien
aaggctcttcagcatgtgggcgtct

SEQ ID NO: 1234686 - DNA, 25 bp, Homo sapien
atgtgggcgtctctcacaaggccgg

SEQ ID NO: 1234687 - DNA, 25 bp, Homo sapien
cactcattactagatggggccacat

SEQ ID NO: 1234688 - DNA, 25 bp, Homo sapien
ggcgtctctcacaaggccggatgat

SEQ ID NO: 1234689 - DNA, 25 bp, Homo sapien
gacttggcatctggtaagtgttcca

SEQ ID NO: 1234690 - DNA, 25 bp, Homo sapien
taacagctagccagaaatcacaggg

SEQ ID NO: 1234691 - DNA, 25 bp, Homo sapien
ggatctgggtaagtcagggcctaca

SEQ ID NO: 1234692 - DNA, 25 bp, Homo sapien
gtatgaaagctaggcctggcaaggc

SEQ ID NO: 1234693 - DNA, 25 bp, Homo sapien
gaaaaactcactcagggtggtggga

SEQ ID NO: 1234694 - DNA, 25 bp, Homo sapien
tgcttgtgacaccactgctttggga

SEQ ID NO: 1234695 - DNA, 25 bp, Homo sapien
tacccctgggtcagcatgactgcaa

SEQ ID NO: 1234696 - DNA, 25 bp, Homo sapien
gaatccgatgaagaccaagtacccc

SEQ ID NO: 1234697 - DNA, 25 bp, Homo sapien
gcaaatacttggcagccgcatcttt

SEQ ID NO: 1234698 - DNA, 25 bp, Homo sapien
tgcaaatacttggcagccgcatctt

SEQ ID NO: 1234699 - DNA, 25 bp, Homo sapien
atgcaaatacttggcagccgcatct

SEQ ID NO: 1234700 - DNA, 25 bp, Homo sapien
tctttggcatctcggatgcatctgc

SEQ ID NO: 1234701 - DNA, 25 bp, Homo sapien
gcatctcggatgcatctgcgttgcc

SEQ ID NO: 1234702 - DNA, 25 bp, Homo sapien
atctgcgttgccctccttggcatct

SEQ ID NO: 1234703 - DNA, 25 bp, Homo sapien
ctgcagtagtaggaacgtagggatg

SEQ ID NO: 1234704 - DNA, 25 bp, Homo sapien
ccaaggcagagcctaggagctggtg

SEQ ID NO: 1234705 - DNA, 25 bp, Homo sapien
tgtccaaggcagagcctaggagctg

SEQ ID NO: 1234706 - DNA, 25 bp, Homo sapien
ctgtccaaggcagagcctaggagct

SEQ ID NO: 1234707 - DNA, 25 bp, Homo sapien
tggaagctgtaaataggactgtggc

SEQ ID NO: 1234708 - DNA, 25 bp, Homo sapien
taaataggactgtggccaatgtggt

SEQ ID NO: 1234709 - DNA, 25 bp, Homo sapien
gggccgactgcagagaacttgttcc

SEQ ID NO: 1234710 - DNA, 25 bp, Homo sapien
tggccaatgtggtccctggatgctg

SEQ ID NO: 1234711 - DNA, 25 bp, Homo sapien
taggtcttctcagacgctttgttac

SEQ ID NO: 1234712 - DNA, 25 bp, Homo sapien
gataggtcttctcagacgctttgtt

SEQ ID NO: 1234713 - DNA, 25 bp, Homo sapien
caggataggtcttctcagacgcttt

SEQ ID NO: 1234714 - DNA, 25 bp, Homo sapien
ggataggtcttctcagacgctttgt

SEQ ID NO: 1234715 - DNA, 25 bp, Homo sapien
tgagtgcagtatgttactccataaa

SEQ ID NO: 1234716 - DNA, 25 bp, Homo sapien
tgcagtatgttactccataaataat

SEQ ID NO: 1234717 - DNA, 25 bp, Homo sapien
agtgcagtatgttactccataaata

SEQ ID NO: 1234718 - DNA, 25 bp, Homo sapien
ctgagtgcagtatgttactccataa

SEQ ID NO: 1234719 - DNA, 25 bp, Homo sapien
ttgccaccttatgccccatttgccc

SEQ ID NO: 1234720 - DNA, 25 bp, Homo sapien
tgcccattctctccgaatgacttag

SEQ ID NO: 1234721 - DNA, 25 bp, Homo sapien
cccagggcggtcacaatctgcgtga

SEQ ID NO: 1234722 - DNA, 25 bp, Homo sapien
tgacttaggcagtaaattccccagg

SEQ ID NO: 1234723 - DNA, 25 bp, Homo sapien
tgaatcctgctgacctaaaccctga

SEQ ID NO: 1234724 - DNA, 25 bp, Homo sapien
tgacctaaaccctgacacagaagtg

SEQ ID NO: 1234725 - DNA, 25 bp, Homo sapien
ctgctgacctaaaccctgacacaga

SEQ ID NO: 1234726 - DNA, 25 bp, Homo sapien
gtgaatcctgctgacctaaaccctg

SEQ ID NO: 1234727 - DNA, 25 bp, Homo sapien
gtttgattccacttcaccgtagatg

SEQ ID NO: 1234728 - DNA, 25 bp, Homo sapien
tttgattccacttcaccgtagatgc

SEQ ID NO: 1234729 - DNA, 25 bp, Homo sapien
cgtttgattccacttcaccgtagat

SEQ ID NO: 1234730 - DNA, 25 bp, Homo sapien
tgaaaagctgtcctccaggaccaag

SEQ ID NO: 1234731 - DNA, 25 bp, Homo sapien
caggaccaaggctaaactgtcccca

SEQ ID NO: 1234732 - DNA, 25 bp, Homo sapien
ggaccaaggctaaactgtccccatg

SEQ ID NO: 1234733 - DNA, 25 bp, Homo sapien
ctccaggaccaaggctaaactgtcc

SEQ ID NO: 1234734 - DNA, 25 bp, Homo sapien
attggttgctttttagcgactgtgg

SEQ ID NO: 1234735 - DNA, 25 bp, Homo sapien
taattagacctggtaattggttgct

SEQ ID NO: 1234736 - DNA, 25 bp, Homo sapien
gaaggaagataattagacctggtaa

SEQ ID NO: 1234737 - DNA, 25 bp, Homo sapien
cctggtaattggttgctttttagcg

SEQ ID NO: 1234738 - DNA, 25 bp, Homo sapien
gaagcagagttttggcaagagcctt

SEQ ID NO: 1234739 - DNA, 25 bp, Homo sapien
agagccttctcctcgttgacttggg

SEQ ID NO: 1234740 - DNA, 25 bp, Homo sapien
gctttttggatcaggatgttggtga

SEQ ID NO: 1234741 - DNA, 25 bp, Homo sapien
tgacttggggctttttggatcagga

SEQ ID NO: 1234742 - DNA, 25 bp, Homo sapien
tcttgtgccccgtcttggtgttggg

SEQ ID NO: 1234743 - DNA, 25 bp, Homo sapien
ctcttgtgccccgtcttggtgttgg

SEQ ID NO: 1234744 - DNA, 25 bp, Homo sapien
cttgtgccccgtcttggtgttggga

SEQ ID NO: 1234745 - DNA, 25 bp, Homo sapien
tcaagggggcaagttgctttgaagc

SEQ ID NO: 1234746 - DNA, 25 bp, Homo sapien
ttgctttgaagctcccggcgctgac

SEQ ID NO: 1234747 - DNA, 25 bp, Homo sapien
ggcaagttgctttgaagctcccggc

SEQ ID NO: 1234748 - DNA, 25 bp, Homo sapien
ctcaagggggcaagttgctttgaag

SEQ ID NO: 1234749 - DNA, 25 bp, Homo sapien
tccaggtggctggcgccactgcttc

SEQ ID NO: 1234750 - DNA, 25 bp, Homo sapien
tgattgccgttgtgtcattttctgg

SEQ ID NO: 1234751 - DNA, 25 bp, Homo sapien
cagtgtgttgattgccgttgtgtca

SEQ ID NO: 1234752 - DNA, 25 bp, Homo sapien
gggccagtgtgttgattgccgttgt

SEQ ID NO: 1234753 - DNA, 25 bp, Homo sapien
gcagaatggccccattgtagaccag

SEQ ID NO: 1234754 - DNA, 25 bp, Homo sapien
agccccgcactgaacagaaactccg

SEQ ID NO: 1234755 - DNA, 25 bp, Homo sapien
agaaactccgcagaatggccccatt

SEQ ID NO: 1234756 - DNA, 25 bp, Homo sapien
gaccagacaaaccaaaatagcagca

SEQ ID NO: 1234757 - DNA, 25 bp, Homo sapien
catttatgtcgggttagtggagcgc

SEQ ID NO: 1234758 - DNA, 25 bp, Homo sapien
ctgcatatacgaggaaggaggcgac

SEQ ID NO: 1234759 - DNA, 25 bp, Homo sapien
cagaagcggtgcaagctcaacaggt

SEQ ID NO: 1234760 - DNA, 25 bp, Homo sapien
cacgtaggcccattttagatctgca

SEQ ID NO: 1234761 - DNA, 25 bp, Homo sapien
accaacgcctcgctccattggacag

SEQ ID NO: 1234762 - DNA, 25 bp, Homo sapien
tcctcgcaccaacgcctcgctccat

SEQ ID NO: 1234763 - DNA, 25 bp, Homo sapien
gcgcctcctcgcaccaacgcctcgc

SEQ ID NO: 1234764 - DNA, 25 bp, Homo sapien
aacgcctcgctccattggacagccc

SEQ ID NO: 1234765 - DNA, 25 bp, Homo sapien
caaggcctcagaacccggcccaaca

SEQ ID NO: 1234766 - DNA, 25 bp, Homo sapien
ctagagtggaaaagtaaagagaagc

SEQ ID NO: 1234767 - DNA, 25 bp, Homo sapien
gcaaggcctcagaacccggcccaac

SEQ ID NO: 1234768 - DNA, 25 bp, Homo sapien
aagtaaagagaagcaaggcctcaga

SEQ ID NO: 1234769 - DNA, 25 bp, Homo sapien
cttcatagggtcagcgaggtaaagc

SEQ ID NO: 1234770 - DNA, 25 bp, Homo sapien
ggtaaagcttctcggcagcgcggct

SEQ ID NO: 1234771 - DNA, 25 bp, Homo sapien
tcagcgaggtaaagcttctcggcag

SEQ ID NO: 1234772 - DNA, 25 bp, Homo sapien
gcgcggctgaactcctcccaggtct

SEQ ID NO: 1234773 - DNA, 25 bp, Homo sapien
tgccagcttcagggcctcactgggc

SEQ ID NO: 1234774 - DNA, 25 bp, Homo sapien
ctggctgttgccagcttcagggcct

SEQ ID NO: 1234775 - DNA, 25 bp, Homo sapien
ccagcttcagggcctcactgggccg

SEQ ID NO: 1234776 - DNA, 25 bp, Homo sapien
gttgccagcttcagggcctcactgg

SEQ ID NO: 1234777 - DNA, 25 bp, Homo sapien
tggcttcagggactcgtaaaacaac

SEQ ID NO: 1234778 - DNA, 25 bp, Homo sapien
cgcctaggcggtacaggaaaagtga

SEQ ID NO: 1234779 - DNA, 25 bp, Homo sapien
gcgggaagatcgattgcagaaatgt

SEQ ID NO: 1234780 - DNA, 25 bp, Homo sapien
tgaaccaagacaaaggacaggaagc

SEQ ID NO: 1234781 - DNA, 25 bp, Homo sapien
gaagcatcatacataaccaggtctg

SEQ ID NO: 1234782 - DNA, 25 bp, Homo sapien
tccaataataccagctccttaaggg

SEQ ID NO: 1234783 - DNA, 25 bp, Homo sapien
ctcaagagacgaaaagtaagacccg

SEQ ID NO: 1234784 - DNA, 25 bp, Homo sapien
ccttaagggttgaacggaatctcat

SEQ ID NO: 1234785 - DNA, 25 bp, Homo sapien
gaataactcctatactgaagttcca

SEQ ID NO: 1234786 - DNA, 25 bp, Homo sapien
gccaaggcatttagatattagcata

SEQ ID NO: 1234787 - DNA, 25 bp, Homo sapien
cacagtgtatcgcagtttttcccta

SEQ ID NO: 1234788 - DNA, 25 bp, Homo sapien
aactgctaagtatcggccaggcgcg

SEQ ID NO: 1234789 - DNA, 25 bp, Homo sapien
ctttaacacacaagttcccatcaga

SEQ ID NO: 1234790 - DNA, 25 bp, Homo sapien
tgttactttaacacacaagttccca

SEQ ID NO: 1234791 - DNA, 25 bp, Homo sapien
tactttaacacacaagttcccatca

SEQ ID NO: 1234792 - DNA, 25 bp, Homo sapien
aacacacaagttcccatcagaatgc

SEQ ID NO: 1234793 - DNA, 25 bp, Homo sapien
caggaggctgaagcaagaggaccgc

SEQ ID NO: 1234794 - DNA, 25 bp, Homo sapien
ccaggaggtcgaggatgcagtgagc

SEQ ID NO: 1234795 - DNA, 25 bp, Homo sapien
tatgatcatgccactgcactgcagc

SEQ ID NO: 1234796 - DNA, 25 bp, Homo sapien
gctgaagcaagaggaccgcttgagc

SEQ ID NO: 1234797 - DNA, 25 bp, Homo sapien
agcaagtatacctaaccactctgtg

SEQ ID NO: 1234798 - DNA, 25 bp, Homo sapien
tctgtgtggaatgtcaagatttaag

SEQ ID NO: 1234799 - DNA, 25 bp, Homo sapien
ttttcttcagcaagtatacctaacc

SEQ ID NO: 1234800 - DNA, 25 bp, Homo sapien
actctgtgacaatcacaattaaaat

SEQ ID NO: 1234801 - DNA, 25 bp, Homo sapien
gagccatcaattggagataaggcct

SEQ ID NO: 1234802 - DNA, 25 bp, Homo sapien
tttgtattaaaattcgttctgcatt

SEQ ID NO: 1234803 - DNA, 25 bp, Homo sapien
ggcaaaaagagccatcaattggaga

SEQ ID NO: 1234804 - DNA, 25 bp, Homo sapien
tgtattaaaattcgttctgcattta

SEQ ID NO: 1234805 - DNA, 25 bp, Homo sapien
tctcccagccataagtaactgagtt

SEQ ID NO: 1234806 - DNA, 25 bp, Homo sapien
tcagcccatcttaaaggttcacatg

SEQ ID NO: 1234807 - DNA, 25 bp, Homo sapien
tagaattctctgtgtatagctggtc

SEQ ID NO: 1234808 - DNA, 25 bp, Homo sapien
tggttggtcataaagccatctgttg

SEQ ID NO: 1234809 - DNA, 25 bp, Homo sapien
actgaatgaagtctattagaagctt

SEQ ID NO: 1234810 - DNA, 25 bp, Homo sapien
aactgaatgaagtctattagaagct

SEQ ID NO: 1234811 - DNA, 25 bp, Homo sapien
ggaggtcgtactagggaaattgcac

SEQ ID NO: 1234812 - DNA, 25 bp, Homo sapien
tactagggaaattgcactcaagttt

SEQ ID NO: 1234813 - DNA, 25 bp, Homo sapien
tgctctattctccttggaggtcgta

SEQ ID NO: 1234814 - DNA, 25 bp, Homo sapien
tctccttggaggtcgtactagggaa

SEQ ID NO: 1234815 - DNA, 25 bp, Homo sapien
actagatactgacaatgtagaaaac

SEQ ID NO: 1234816 - DNA, 25 bp, Homo sapien
catggtaacattgcgggcttccttg

SEQ ID NO: 1234817 - DNA, 25 bp, Homo sapien
ccttggctaccataagtcgcattag

SEQ ID NO: 1234818 - DNA, 25 bp, Homo sapien
gtttccatggtaacattgcgggctt

SEQ ID NO: 1234819 - DNA, 25 bp, Homo sapien
tcgcattagttgactgtggaatttc

SEQ ID NO: 1234820 - DNA, 25 bp, Homo sapien
ttcctaagtacacgacaaagtcttc

SEQ ID NO: 1234821 - DNA, 25 bp, Homo sapien
tactgatacaaatttgccagagaaa

SEQ ID NO: 1234822 - DNA, 25 bp, Homo sapien
tggatctgacaaaatggttacattt

SEQ ID NO: 1234823 - DNA, 25 bp, Homo sapien
tatttattggtcacaacagcataca

SEQ ID NO: 1234824 - DNA, 25 bp, Homo sapien
gaatcaacattacatttaggtggtg

SEQ ID NO: 1234825 - DNA, 25 bp, Homo sapien
gattcaaagtcattgctcaacaagc

SEQ ID NO: 1234826 - DNA, 25 bp, Homo sapien
ggcaaagcatacttgttagtcacaa

SEQ ID NO: 1234827 - DNA, 25 bp, Homo sapien
ggtgtcacagaagtatgcaaggatt

SEQ ID NO: 1234828 - DNA, 25 bp, Homo sapien
ctgaaacatgccaaaattcatatag

SEQ ID NO: 1234829 - DNA, 25 bp, Homo sapien
atttactgatctctctgaaacatgc

SEQ ID NO: 1234830 - DNA, 25 bp, Homo sapien
tactgatctctctgaaacatgccaa

SEQ ID NO: 1234831 - DNA, 25 bp, Homo sapien
ttactgatctctctgaaacatgcca

SEQ ID NO: 1234832 - DNA, 25 bp, Homo sapien
tatgtctttaaatagaccgtgggcg

SEQ ID NO: 1234833 - DNA, 25 bp, Homo sapien
tctgctagcaataggaaatgttact

SEQ ID NO: 1234834 - DNA, 25 bp, Homo sapien
catgccccgcatgtcatttgtttac

SEQ ID NO: 1234835 - DNA, 25 bp, Homo sapien
gattcaaagttgtgtccggccacct

SEQ ID NO: 1234836 - DNA, 25 bp, Homo sapien
tggcgcagatggcaaaggacaactt

SEQ ID NO: 1234837 - DNA, 25 bp, Homo sapien
ctcaaagggcggataattacatggg

SEQ ID NO: 1234838 - DNA, 25 bp, Homo sapien
aaatcccggtatgagtgatggcaca

SEQ ID NO: 1234839 - DNA, 25 bp, Homo sapien
actagtaacctgatggtggccatgc

SEQ ID NO: 1234840 - DNA, 25 bp, Homo sapien
tgcagcacggttcccatttccttac

SEQ ID NO: 1234841 - DNA, 25 bp, Homo sapien
ctttgcagcacggttcccatttcct

SEQ ID NO: 1234842 - DNA, 25 bp, Homo sapien
caacaggcagtgctgccgtagatct

SEQ ID NO: 1234843 - DNA, 25 bp, Homo sapien
agccaccaaaggtccccataggagt

SEQ ID NO: 1234844 - DNA, 25 bp, Homo sapien
gaggcagtctctgaggcgatgcagt

SEQ ID NO: 1234845 - DNA, 25 bp, Homo sapien
ctgaggcgatgcagtgtcgcggccc

SEQ ID NO: 1234846 - DNA, 25 bp, Homo sapien
agtctctgaggcgatgcagtgtcgc

SEQ ID NO: 1234847 - DNA, 25 bp, Homo sapien
gcagtctctgaggcgatgcagtgtc

SEQ ID NO: 1234848 - DNA, 25 bp, Homo sapien
aggcgcgcgatctctccggctccct

SEQ ID NO: 1234849 - DNA, 25 bp, Homo sapien
gcaggcgcgcgatctctccggctcc

SEQ ID NO: 1234850 - DNA, 25 bp, Homo sapien
gcgcgcgatctctccggctccctgg

SEQ ID NO: 1234851 - DNA, 25 bp, Homo sapien
cggcaggcgcgcgatctctccggct

SEQ ID NO: 1234852 - DNA, 25 bp, Homo sapien
tcagtgttccgacttgggtgacaaa

SEQ ID NO: 1234853 - DNA, 25 bp, Homo sapien
ttaagtgcatttcaccgccgagcga

SEQ ID NO: 1234854 - DNA, 25 bp, Homo sapien
cacagtctgggacgcggaattccct

SEQ ID NO: 1234855 - DNA, 25 bp, Homo sapien
gaattccctgcgagaagtccgcggt

SEQ ID NO: 1234856 - DNA, 25 bp, Homo sapien
agagggctggccttcaatcccgaga

SEQ ID NO: 1234857 - DNA, 25 bp, Homo sapien
gagatgaaagcgcatttcaactaaa

SEQ ID NO: 1234858 - DNA, 25 bp, Homo sapien
gagagggctggccttcaatcccgag

SEQ ID NO: 1234859 - DNA, 25 bp, Homo sapien
caactaaaaggtgtgatcagtgtca

SEQ ID NO: 1234860 - DNA, 25 bp, Homo sapien
ctacaaggtgaactcccgggcaagt

SEQ ID NO: 1234861 - DNA, 25 bp, Homo sapien
ggcgcttttgctcaggttgaccaca

SEQ ID NO: 1234862 - DNA, 25 bp, Homo sapien
gaacttccaggacaacgagtgttgc

SEQ ID NO: 1234863 - DNA, 25 bp, Homo sapien
ggcggatccaggctttgcggaacct

SEQ ID NO: 1234864 - DNA, 25 bp, Homo sapien
gaggctgcacagtggtaccgaaaca

SEQ ID NO: 1234865 - DNA, 25 bp, Homo sapien
gccagctagtgtgcttcaggcacag

SEQ ID NO: 1234866 - DNA, 25 bp, Homo sapien
gaagatgttcccagccgcgtaagtc

SEQ ID NO: 1234867 - DNA, 25 bp, Homo sapien
gccgcgtaagtccatgccagctagt

SEQ ID NO: 1234868 - DNA, 25 bp, Homo sapien
tccatgccagctagtgtgcttcagg

SEQ ID NO: 1234869 - DNA, 25 bp, Homo sapien
gcttggtcctcccttatttggtaca

SEQ ID NO: 1234870 - DNA, 25 bp, Homo sapien
tctcggtagcccctgctttcacatg

SEQ ID NO: 1234871 - DNA, 25 bp, Homo sapien
tggcgtaagaactgagaaatgaatc

SEQ ID NO: 1234872 - DNA, 25 bp, Homo sapien
tccatgtggttgaacctcttggcgt

SEQ ID NO: 1234873 - DNA, 25 bp, Homo sapien
gctgcagccgtgtgcacataaacag

SEQ ID NO: 1234874 - DNA, 25 bp, Homo sapien
cccgctgcagccgtgtgcacataaa

SEQ ID NO: 1234875 - DNA, 25 bp, Homo sapien
gcagccgtgtgcacataaacaggct

SEQ ID NO: 1234876 - DNA, 25 bp, Homo sapien
tgcagccgtgtgcacataaacaggc

SEQ ID NO: 1234877 - DNA, 25 bp, Homo sapien
tcttgctgcaggcaatattcacttc

SEQ ID NO: 1234878 - DNA, 25 bp, Homo sapien
ttcttgctgcaggcaatattcactt

SEQ ID NO: 1234879 - DNA, 25 bp, Homo sapien
cttgctgcaggcaatattcacttcc

SEQ ID NO: 1234880 - DNA, 25 bp, Homo sapien
ttgctgcaggcaatattcacttcca

SEQ ID NO: 1234881 - DNA, 25 bp, Homo sapien
gaagggaatctgggacaaggggcat

SEQ ID NO: 1234882 - DNA, 25 bp, Homo sapien
ctaaaagaagggaatctgggacaag

SEQ ID NO: 1234883 - DNA, 25 bp, Homo sapien
agaagggaatctgggacaaggggca

SEQ ID NO: 1234884 - DNA, 25 bp, Homo sapien
ctgagagatacagggctgaaatgat

SEQ ID NO: 1234885 - DNA, 25 bp, Homo sapien
gggctgaaatgatcagtgctcgagt

SEQ ID NO: 1234886 - DNA, 25 bp, Homo sapien
gatacagggctgaaatgatcagtgc

SEQ ID NO: 1234887 - DNA, 25 bp, Homo sapien
gaaatgatcagtgctcgagtcccat

SEQ ID NO: 1234888 - DNA, 25 bp, Homo sapien
acggccttctgacaattgcacagtc

SEQ ID NO: 1234889 - DNA, 25 bp, Homo sapien
ctggcgatgctctaagggcctgtga

SEQ ID NO: 1234890 - DNA, 25 bp, Homo sapien
ttctgacaattgcacagtcctgcca

SEQ ID NO: 1234891 - DNA, 25 bp, Homo sapien
gccttctgacaattgcacagtcctg

SEQ ID NO: 1234892 - DNA, 25 bp, Homo sapien
cctctaggatataaatgtgcaactt

SEQ ID NO: 1234893 - DNA, 25 bp, Homo sapien
gcagaaagatcccagtgctttcacc

SEQ ID NO: 1234894 - DNA, 25 bp, Homo sapien
gttctcaccctctgattactccttg

SEQ ID NO: 1234895 - DNA, 25 bp, Homo sapien
cactgctgtcgcttccctctaggat

SEQ ID NO: 1234896 - DNA, 25 bp, Homo sapien
tagtcttggcaaagcactatcaggc

SEQ ID NO: 1234897 - DNA, 25 bp, Homo sapien
tatcaggcagataccagcccagcat

SEQ ID NO: 1234898 - DNA, 25 bp, Homo sapien
ccatttaaagtgaaccctccagtgg

SEQ ID NO: 1234899 - DNA, 25 bp, Homo sapien
tagaacattttcatcggcacggaga

SEQ ID NO: 1234900 - DNA, 25 bp, Homo sapien
ttgaaagggcggatgctgtcgtcct

SEQ ID NO: 1234901 - DNA, 25 bp, Homo sapien
agtttcctctttgtcccgggagatg

SEQ ID NO: 1234902 - DNA, 25 bp, Homo sapien
cgggagatgaaccagtagatggcaa

SEQ ID NO: 1234903 - DNA, 25 bp, Homo sapien
tctgacgtttccaccttgaaagggc

SEQ ID NO: 1234904 - DNA, 25 bp, Homo sapien
tctttaagtgtatacacgatactca

SEQ ID NO: 1234905 - DNA, 25 bp, Homo sapien
tttaatttacccaggcgtctctaca

SEQ ID NO: 1234906 - DNA, 25 bp, Homo sapien
ccaggcgtctctacagcgggagtcg

SEQ ID NO: 1234907 - DNA, 25 bp, Homo sapien
ctacagcgggagtcggcaaactttt

SEQ ID NO: 1234908 - DNA, 25 bp, Homo sapien
caagccagtcatgcctcagctccca

SEQ ID NO: 1234909 - DNA, 25 bp, Homo sapien
ttcaagccagtcatgcctcagctcc

SEQ ID NO: 1234910 - DNA, 25 bp, Homo sapien
tcagctcccagagtagctgggatta

SEQ ID NO: 1234911 - DNA, 25 bp, Homo sapien
caggtgtgagccaccatgtccggct

SEQ ID NO: 1234912 - DNA, 25 bp, Homo sapien
gaaacggaacttatcgatcctctgg

SEQ ID NO: 1234913 - DNA, 25 bp, Homo sapien
aattcattccgccagtaggagatga

SEQ ID NO: 1234914 - DNA, 25 bp, Homo sapien
tggagttgaagccatagtggaagca

SEQ ID NO: 1234915 - DNA, 25 bp, Homo sapien
caatcttagtcttgaagtgagggta

SEQ ID NO: 1234916 - DNA, 25 bp, Homo sapien
gactgtaagtcacattgtggaagaa

SEQ ID NO: 1234917 - DNA, 25 bp, Homo sapien
ccaactttatctgactgtaagtcac

SEQ ID NO: 1234918 - DNA, 25 bp, Homo sapien
aaggctgttctcatgacatacatcc

SEQ ID NO: 1234919 - DNA, 25 bp, Homo sapien
tctggctggcgttttgcaaacatac

SEQ ID NO: 1234920 - DNA, 25 bp, Homo sapien
taaggttacaacgtataagtacatc

SEQ ID NO: 1234921 - DNA, 25 bp, Homo sapien
gcatttagtaaggttacaacgtata

SEQ ID NO: 1234922 - DNA, 25 bp, Homo sapien
tgcatttagtaaggttacaacgtat

SEQ ID NO: 1234923 - DNA, 25 bp, Homo sapien
ttgcatttagtaaggttacaacgta

SEQ ID NO: 1234924 - DNA, 25 bp, Homo sapien
agccacggcgcccagcctgtttttt

SEQ ID NO: 1234925 - DNA, 25 bp, Homo sapien
ttcaccaagttagaccaggatggtc

SEQ ID NO: 1234926 - DNA, 25 bp, Homo sapien
cagctcaccacaagctccatctcct

SEQ ID NO: 1234927 - DNA, 25 bp, Homo sapien
ggtttcaccaagttagaccaggatg

SEQ ID NO: 1234928 - DNA, 25 bp, Homo sapien
acaatgtatcctgggtgtcctccta

SEQ ID NO: 1234929 - DNA, 25 bp, Homo sapien
gaattcaatgctggaaactggctct

SEQ ID NO: 1234930 - DNA, 25 bp, Homo sapien
cacacatgggtaagtccacgatgaa

SEQ ID NO: 1234931 - DNA, 25 bp, Homo sapien
cctattctaaaggaccaaggccaag

SEQ ID NO: 1234932 - DNA, 25 bp, Homo sapien
gggccttacggcattcacagtgagg

SEQ ID NO: 1234933 - DNA, 25 bp, Homo sapien
tacggcattcacagtgagggcggct

SEQ ID NO: 1234934 - DNA, 25 bp, Homo sapien
tgccatgcttggaactctctgccac

SEQ ID NO: 1234935 - DNA, 25 bp, Homo sapien
gctgccatgcttggaactctctgcc

SEQ ID NO: 1234936 - DNA, 25 bp, Homo sapien
catatccattgtgtgacccagtttt

SEQ ID NO: 1234937 - DNA, 25 bp, Homo sapien
gctgggaggtaaaagcaaatgatca

SEQ ID NO: 1234938 - DNA, 25 bp, Homo sapien
tctacaatgaacaggtattaaatgc

SEQ ID NO: 1234939 - DNA, 25 bp, Homo sapien
tcctgagcagtagattccagtgctt

SEQ ID NO: 1234940 - DNA, 25 bp, Homo sapien
cttataaaactcgtagaaagagccg

SEQ ID NO: 1234941 - DNA, 25 bp, Homo sapien
aaactcgtagaaagagccgggccag

SEQ ID NO: 1234942 - DNA, 25 bp, Homo sapien
gggcagatgacttcaaaaacgtgct

SEQ ID NO: 1234943 - DNA, 25 bp, Homo sapien
cgtgctcatcgctcaggccatggtt

SEQ ID NO: 1234944 - DNA, 25 bp, Homo sapien
gcccagccgcagcatcagcttgtaa

SEQ ID NO: 1234945 - DNA, 25 bp, Homo sapien
gtaaaagatcctggcggtggccacc

SEQ ID NO: 1234946 - DNA, 25 bp, Homo sapien
ttagtgcagatcagggacccccagt

SEQ ID NO: 1234947 - DNA, 25 bp, Homo sapien
cagctgggccatattagtgcagatc

SEQ ID NO: 1234948 - DNA, 25 bp, Homo sapien
tcaggcttggtgcactggatgtgca

SEQ ID NO: 1234949 - DNA, 25 bp, Homo sapien
ctcccgaaacgctgtcccaggagga

SEQ ID NO: 1234950 - DNA, 25 bp, Homo sapien
tgttcaagtgcaggcctttcacgtg

SEQ ID NO: 1234951 - DNA, 25 bp, Homo sapien
ttgcttaaaaccaaagccatgttca

SEQ ID NO: 1234952 - DNA, 25 bp, Homo sapien
tgagtcggctaaacagagttgctaa

SEQ ID NO: 1234953 - DNA, 25 bp, Homo sapien
ggtgaaagccactatgaatactgag

SEQ ID NO: 1234954 - DNA, 25 bp, Homo sapien
taaagatctaaagagctgggaggtc

SEQ ID NO: 1234955 - DNA, 25 bp, Homo sapien
gagttgctaaattggcctgggaatc

SEQ ID NO: 1234956 - DNA, 25 bp, Homo sapien
ggagttacctagcagaccttccgga

SEQ ID NO: 1234957 - DNA, 25 bp, Homo sapien
tccggactgacgtgatgctacaggg

SEQ ID NO: 1234958 - DNA, 25 bp, Homo sapien
tctggacaagatctagggagttacc

SEQ ID NO: 1234959 - DNA, 25 bp, Homo sapien
tattatgattatgagctgcctcgtg

SEQ ID NO: 1234960 - DNA, 25 bp, Homo sapien
aaaaaaggctgggacagtgggacag

SEQ ID NO: 1234961 - DNA, 25 bp, Homo sapien
ggacagtgggacaggctgggtgcgg

SEQ ID NO: 1234962 - DNA, 25 bp, Homo sapien
aaaggctgggacagtgggacaggct

SEQ ID NO: 1234963 - DNA, 25 bp, Homo sapien
tgggacagtgggacaggctgggtgc

SEQ ID NO: 1234964 - DNA, 25 bp, Homo sapien
agcggggagcaagggagagactcag

SEQ ID NO: 1234965 - DNA, 25 bp, Homo sapien
gggagcggggagcaagggagagact

SEQ ID NO: 1234966 - DNA, 25 bp, Homo sapien
cggggagcggggagcaagggagaga

SEQ ID NO: 1234967 - DNA, 25 bp, Homo sapien
gagcggggagcaagggagagactca

SEQ ID NO: 1234968 - DNA, 25 bp, Homo sapien
tctctagaatataggcagccagacc

SEQ ID NO: 1234969 - DNA, 25 bp, Homo sapien
ctctagaatataggcagccagaccc

SEQ ID NO: 1234970 - DNA, 25 bp, Homo sapien
cttctctagaatataggcagccaga

SEQ ID NO: 1234971 - DNA, 25 bp, Homo sapien
tctagaatataggcagccagaccca

SEQ ID NO: 1234972 - DNA, 25 bp, Homo sapien
ggaaaagcccaggtgctcttgacaa

SEQ ID NO: 1234973 - DNA, 25 bp, Homo sapien
aaatgcagctacgttggtcacaggg

SEQ ID NO: 1234974 - DNA, 25 bp, Homo sapien
tcacgtgaccctgatgccaggctct

SEQ ID NO: 1234975 - DNA, 25 bp, Homo sapien
tgagcctgcatcctagtcttgacca

SEQ ID NO: 1234976 - DNA, 25 bp, Homo sapien
tggcctagtgggatagtctggtggg

SEQ ID NO: 1234977 - DNA, 25 bp, Homo sapien
aaacagatcccagacgaaggccctg

SEQ ID NO: 1234978 - DNA, 25 bp, Homo sapien
cccctgccaaggtggtcttgcagaa

SEQ ID NO: 1234979 - DNA, 25 bp, Homo sapien
gtatccgtgtgcaaggagcaggcca

SEQ ID NO: 1234980 - DNA, 25 bp, Homo sapien
tgtagaagcgctgggaggagatgat

SEQ ID NO: 1234981 - DNA, 25 bp, Homo sapien
tgacgttggtcagcaggtcgtccag

SEQ ID NO: 1234982 - DNA, 25 bp, Homo sapien
cgctcatgcttctgggtcatccagc

SEQ ID NO: 1234983 - DNA, 25 bp, Homo sapien
agcatgacgttggtcagcaggtcgt

SEQ ID NO: 1234984 - DNA, 25 bp, Homo sapien
tcaggcgtgtgcaatagctcaaaag

SEQ ID NO: 1234985 - DNA, 25 bp, Homo sapien
gaacctcacccacttttcaggcgtg

SEQ ID NO: 1234986 - DNA, 25 bp, Homo sapien
gagatgagctttgggtacttgaacc

SEQ ID NO: 1234987 - DNA, 25 bp, Homo sapien
cccacgaaccatgtaggaataggag

SEQ ID NO: 1234988 - DNA, 25 bp, Homo sapien
cattcctcagaaaaggggtatcttc

SEQ ID NO: 1234989 - DNA, 25 bp, Homo sapien
ggcaggggacggaggcaaactcatt

SEQ ID NO: 1234990 - DNA, 25 bp, Homo sapien
agccatgttgcttaccacacggagt

SEQ ID NO: 1234991 - DNA, 25 bp, Homo sapien
tcatcaaagccatgttgcttaccac

SEQ ID NO: 1234992 - DNA, 25 bp, Homo sapien
taggtgagcgccttctgtctctcgc

SEQ ID NO: 1234993 - DNA, 25 bp, Homo sapien
acccgcagggcgagcaccttaggtg

SEQ ID NO: 1234994 - DNA, 25 bp, Homo sapien
ccttctgtctctcgcttgggtatcc

SEQ ID NO: 1234995 - DNA, 25 bp, Homo sapien
gagcaccttaggtgagcgccttctg

SEQ ID NO: 1234996 - DNA, 25 bp, Homo sapien
tgtgtcttggccagtgatgaccaga

SEQ ID NO: 1234997 - DNA, 25 bp, Homo sapien
tatgagacacttcatgcagagcccc

SEQ ID NO: 1234998 - DNA, 25 bp, Homo sapien
atcatcttcctgttggtggtggtca

SEQ ID NO: 1234999 - DNA, 25 bp, Homo sapien
gggatagcgatcgaaccatctcata

SEQ ID NO: 1235000 - DNA, 25 bp, Homo sapien
gttctctccgtttccagggatgctg

SEQ ID NO: 1235001 - DNA, 25 bp, Homo sapien
gacaatggttacatctgcctctcaa

SEQ ID NO: 1235002 - DNA, 25 bp, Homo sapien
gttggaagctaatccctgttctctc

SEQ ID NO: 1235003 - DNA, 25 bp, Homo sapien
gaatatgggataaaagcactgtttt

SEQ ID NO: 1235004 - DNA, 25 bp, Homo sapien
catcgacgaaggcacctgaacttgg

SEQ ID NO: 1235005 - DNA, 25 bp, Homo sapien
tcttgagcggcaagtgctggagaaa

SEQ ID NO: 1235006 - DNA, 25 bp, Homo sapien
gaaagtgcttttctgcatcgacgaa

SEQ ID NO: 1235007 - DNA, 25 bp, Homo sapien
aatgagctggttggtatctaaggcc

SEQ ID NO: 1235008 - DNA, 25 bp, Homo sapien
ctgacgtgggccatctgaatcgaaa

SEQ ID NO: 1235009 - DNA, 25 bp, Homo sapien
cctgacgtgggccatctgaatcgaa

SEQ ID NO: 1235010 - DNA, 25 bp, Homo sapien
gcctgacgtgggccatctgaatcga

SEQ ID NO: 1235011 - DNA, 25 bp, Homo sapien
gtcactcgtcgcatccagcaggagt

SEQ ID NO: 1235012 - DNA, 25 bp, Homo sapien
tccttcctgggccattggtccttgg

SEQ ID NO: 1235013 - DNA, 25 bp, Homo sapien
ctttgctctatagtagcgcttctgg

SEQ ID NO: 1235014 - DNA, 25 bp, Homo sapien
gactgtcagttattttctcatgaac

SEQ ID NO: 1235015 - DNA, 25 bp, Homo sapien
tccagttacgagactcagtgagcag

SEQ ID NO: 1235016 - DNA, 25 bp, Homo sapien
tgttgattgcagtaagccggcatga

SEQ ID NO: 1235017 - DNA, 25 bp, Homo sapien
gatttctgctcctgataataggcaa

SEQ ID NO: 1235018 - DNA, 25 bp, Homo sapien
aacagatgccacttgcgcacaggaa

SEQ ID NO: 1235019 - DNA, 25 bp, Homo sapien
aaaagactgtccttgttcagagttg

SEQ ID NO: 1235020 - DNA, 25 bp, Homo sapien
gctgagaacagatgtggacaccgca

SEQ ID NO: 1235021 - DNA, 25 bp, Homo sapien
cagagttgtacaagggctgagaaca

SEQ ID NO: 1235022 - DNA, 25 bp, Homo sapien
caaatacgggaagcgagagaaggca

SEQ ID NO: 1235023 - DNA, 25 bp, Homo sapien
tcttgggcagctcaatgtggtggga

SEQ ID NO: 1235024 - DNA, 25 bp, Homo sapien
gacctttactccaggaacgtgacaa

SEQ ID NO: 1235025 - DNA, 25 bp, Homo sapien
ggtgggaacacccagggagacataa

SEQ ID NO: 1235026 - DNA, 25 bp, Homo sapien
tgacctttactccaggaacgtgaca

SEQ ID NO: 1235027 - DNA, 25 bp, Homo sapien
cctgtcggctcacaagataatagcc

SEQ ID NO: 1235028 - DNA, 25 bp, Homo sapien
taatagccagctccccagaaatgaa

SEQ ID NO: 1235029 - DNA, 25 bp, Homo sapien
tcggctcacaagataatagccagct

SEQ ID NO: 1235030 - DNA, 25 bp, Homo sapien
ataatagccagctccccagaaatga

SEQ ID NO: 1235031 - DNA, 25 bp, Homo sapien
cggaccatgagcgtgggcttcatcg

SEQ ID NO: 1235032 - DNA, 25 bp, Homo sapien
ggttcgtgcggctcccaggaggcgt

SEQ ID NO: 1235033 - DNA, 25 bp, Homo sapien
ccaggaggcgtgaaccgcggaccat

SEQ ID NO: 1235034 - DNA, 25 bp, Homo sapien
tagcgttacttccggtccctcgctg

SEQ ID NO: 1235035 - DNA, 25 bp, Homo sapien
ggccacaagctaggatctctaacaa

SEQ ID NO: 1235036 - DNA, 25 bp, Homo sapien
cagtggacagggaattgggatacct

SEQ ID NO: 1235037 - DNA, 25 bp, Homo sapien
ggattctggttctgacagggccaca

SEQ ID NO: 1235038 - DNA, 25 bp, Homo sapien
gttcccctgagagggtgctaagagg

SEQ ID NO: 1235039 - DNA, 25 bp, Homo sapien
gggccaccctgagcactacgtccca

SEQ ID NO: 1235040 - DNA, 25 bp, Homo sapien
accctgagcactacgtcccagacac

SEQ ID NO: 1235041 - DNA, 25 bp, Homo sapien
gccaccctgagcactacgtcccaga

SEQ ID NO: 1235042 - DNA, 25 bp, Homo sapien
tgagcactacgtcccagacacccat

SEQ ID NO: 1235043 - DNA, 25 bp, Homo sapien
ggggcagcttgcctcgtggctccat

SEQ ID NO: 1235044 - DNA, 25 bp, Homo sapien
ctcaggggcagcttgcctcgtggct

SEQ ID NO: 1235045 - DNA, 25 bp, Homo sapien
tggaaaagctgtctggggctaagag

SEQ ID NO: 1235046 - DNA, 25 bp, Homo sapien
gaaaagctgtctggggctaagagga

SEQ ID NO: 1235047 - DNA, 25 bp, Homo sapien
atacgccagtagcttctcacaagtg

SEQ ID NO: 1235048 - DNA, 25 bp, Homo sapien
ggcaaaagctcgtttcctctccacg

SEQ ID NO: 1235049 - DNA, 25 bp, Homo sapien
aacatgcaggaagggggtcaaatac

SEQ ID NO: 1235050 - DNA, 25 bp, Homo sapien
ggtcaaatacgccagtagcttctca

SEQ ID NO: 1235051 - DNA, 25 bp, Homo sapien
ctcctggatggctagtggctttatc

SEQ ID NO: 1235052 - DNA, 25 bp, Homo sapien
cctggatggctagtggctttatccc

SEQ ID NO: 1235053 - DNA, 25 bp, Homo sapien
tggctagtggctttatcccatttgc

SEQ ID NO: 1235054 - DNA, 25 bp, Homo sapien
tagtggctttatcccatttgctact

SEQ ID NO: 1235055 - DNA, 25 bp, Homo sapien
catcatcgtggacgggcactggata

SEQ ID NO: 1235056 - DNA, 25 bp, Homo sapien
ctcccgatgacgaaggagaccacca

SEQ ID NO: 1235057 - DNA, 25 bp, Homo sapien
tgaggctcccgatgacgaaggagac

SEQ ID NO: 1235058 - DNA, 25 bp, Homo sapien
ttacagtgaggctcccgatgacgaa

SEQ ID NO: 1235059 - DNA, 25 bp, Homo sapien
tcttcagccactccaagctggggcc

SEQ ID NO: 1235060 - DNA, 25 bp, Homo sapien
cactttcttcagccactccaagctg

SEQ ID NO: 1235061 - DNA, 25 bp, Homo sapien
tttcttcagccactccaagctgggg

SEQ ID NO: 1235062 - DNA, 25 bp, Homo sapien
tcacactttcttcagccactccaag

SEQ ID NO: 1235063 - DNA, 25 bp, Homo sapien
gctccattcacgtgggtgtagttag

SEQ ID NO: 1235064 - DNA, 25 bp, Homo sapien
ccccagctccattcacgtgggtgta

SEQ ID NO: 1235065 - DNA, 25 bp, Homo sapien
tgttcaggcagacggggtccaggag

SEQ ID NO: 1235066 - DNA, 25 bp, Homo sapien
ccattcacgtgggtgtagttagtgg

SEQ ID NO: 1235067 - DNA, 25 bp, Homo sapien
ccacccactttggcctcccaaagtg

SEQ ID NO: 1235068 - DNA, 25 bp, Homo sapien
tacaggctccagccaccatacctgg

SEQ ID NO: 1235069 - DNA, 25 bp, Homo sapien
gtagagatggggtttcaccacattg

SEQ ID NO: 1235070 - DNA, 25 bp, Homo sapien
tacctggctgatttttgtattttta

SEQ ID NO: 1235071 - DNA, 25 bp, Homo sapien
ggactagagactgcagaagggtcca

SEQ ID NO: 1235072 - DNA, 25 bp, Homo sapien
tgggcatggagggactagagactgc

SEQ ID NO: 1235073 - DNA, 25 bp, Homo sapien
ctagagactgcagaagggtccaact

SEQ ID NO: 1235074 - DNA, 25 bp, Homo sapien
catggagggactagagactgcagaa

SEQ ID NO: 1235075 - DNA, 25 bp, Homo sapien
tgtaatgcgggggaagaaagcttta

SEQ ID NO: 1235076 - DNA, 25 bp, Homo sapien
gactttagaaaggagatcctcttgg

SEQ ID NO: 1235077 - DNA, 25 bp, Homo sapien
tttagaaaggagatcctcttggatc

SEQ ID NO: 1235078 - DNA, 25 bp, Homo sapien
tccaaccgtcgaaggtaatgtaatg

SEQ ID NO: 1235079 - DNA, 25 bp, Homo sapien
ttaaatctggagctgtagattgcag

SEQ ID NO: 1235080 - DNA, 25 bp, Homo sapien
gctgggtatgaacttgtcagtctca

SEQ ID NO: 1235081 - DNA, 25 bp, Homo sapien
gaaatcagtgagaatcggaaacggc

SEQ ID NO: 1235082 - DNA, 25 bp, Homo sapien
ccctatagtagaaactgagttgtta

SEQ ID NO: 1235083 - DNA, 25 bp, Homo sapien
gggattttatccaccggcactgcca

SEQ ID NO: 1235084 - DNA, 25 bp, Homo sapien
cttgaggttcgggtagtcggtgaca

SEQ ID NO: 1235085 - DNA, 25 bp, Homo sapien
gcactgccaagatcaggtgaggatt

SEQ ID NO: 1235086 - DNA, 25 bp, Homo sapien
attcgcggccctggcttcgggtgca

SEQ ID NO: 1235087 - DNA, 25 bp, Homo sapien
gatgtgaggaaaagggccaaagcct

SEQ ID NO: 1235088 - DNA, 25 bp, Homo sapien
gataacgcagtgcacaaacaggcgg

SEQ ID NO: 1235089 - DNA, 25 bp, Homo sapien
tacgttatgcaaatctgtccgagtg

SEQ ID NO: 1235090 - DNA, 25 bp, Homo sapien
taagaataaaccgtgcgtggcaggc

SEQ ID NO: 1235091 - DNA, 25 bp, Homo sapien
tgtactctaagtgagtcatacatat

SEQ ID NO: 1235092 - DNA, 25 bp, Homo sapien
tactctaagtgagtcatacatattc

SEQ ID NO: 1235093 - DNA, 25 bp, Homo sapien
ttgtactctaagtgagtcatacata

SEQ ID NO: 1235094 - DNA, 25 bp, Homo sapien
gtactctaagtgagtcatacatatt

SEQ ID NO: 1235095 - DNA, 25 bp, Homo sapien
tggtggcatcataagcatctaacac

SEQ ID NO: 1235096 - DNA, 25 bp, Homo sapien
ctggtggcatcataagcatctaaca

SEQ ID NO: 1235097 - DNA, 25 bp, Homo sapien
ggtggcatcataagcatctaacacc

SEQ ID NO: 1235098 - DNA, 25 bp, Homo sapien
agcagcaagaacaaccagctcatct

SEQ ID NO: 1235099 - DNA, 25 bp, Homo sapien
tcatcgtggagaaacagcagcaaga

SEQ ID NO: 1235100 - DNA, 25 bp, Homo sapien
atcgtggagaaacagcagcaagaac

SEQ ID NO: 1235101 - DNA, 25 bp, Homo sapien
acagcagcaagaacaaccagctcat

SEQ ID NO: 1235102 - DNA, 25 bp, Homo sapien
tgaagggctgctgtccacttgcatt

SEQ ID NO: 1235103 - DNA, 25 bp, Homo sapien
ctggcttccttccgtgggcctgaag

SEQ ID NO: 1235104 - DNA, 25 bp, Homo sapien
gggcctgaagggctgctgtccactt

SEQ ID NO: 1235105 - DNA, 25 bp, Homo sapien
gcttccttccgtgggcctgaagggc

SEQ ID NO: 1235106 - DNA, 25 bp, Homo sapien
ccgagtccgccgtagacaacttgat

SEQ ID NO: 1235107 - DNA, 25 bp, Homo sapien
agcccctcgccggtgttggcctccg

SEQ ID NO: 1235108 - DNA, 25 bp, Homo sapien
caacttgatccgctaagactcctgg

SEQ ID NO: 1235109 - DNA, 25 bp, Homo sapien
gctcggccaagtgcggccgggtcct

SEQ ID NO: 1235110 - DNA, 25 bp, Homo sapien
tgcgaacacaattgaaagatggctg

SEQ ID NO: 1235111 - DNA, 25 bp, Homo sapien
acaattgaaagatggctgacaccga

SEQ ID NO: 1235112 - DNA, 25 bp, Homo sapien
aacacaattgaaagatggctgacac

SEQ ID NO: 1235113 - DNA, 25 bp, Homo sapien
ctgcgaacacaattgaaagatggct

SEQ ID NO: 1235114 - DNA, 25 bp, Homo sapien
ctggcgttggagagcgacggcggcg

SEQ ID NO: 1235115 - DNA, 25 bp, Homo sapien
gcgttggagagcgacggcggcgcgg

SEQ ID NO: 1235116 - DNA, 25 bp, Homo sapien
gcgctggcgttggagagcgacggcg

SEQ ID NO: 1235117 - DNA, 25 bp, Homo sapien
cgctggcgttggagagcgacggcgg

SEQ ID NO: 1235118 - DNA, 25 bp, Homo sapien
gcggcgggcgggatttcaccgaaga

SEQ ID NO: 1235119 - DNA, 25 bp, Homo sapien
ggatttcaccgaagaaagaggagcc

SEQ ID NO: 1235120 - DNA, 25 bp, Homo sapien
aggctcggcgccgcggcggttgctg

SEQ ID NO: 1235121 - DNA, 25 bp, Homo sapien
gcgggatttcaccgaagaaagagga

SEQ ID NO: 1235122 - DNA, 25 bp, Homo sapien
acaaaatggaaacaatcgcaaaacg

SEQ ID NO: 1235123 - DNA, 25 bp, Homo sapien
gctccccgaccagaacaaaatggaa

SEQ ID NO: 1235124 - DNA, 25 bp, Homo sapien
tcggctccccgaccagaacaaaatg

SEQ ID NO: 1235125 - DNA, 25 bp, Homo sapien
gaaccaactcggctccccgaccaga

SEQ ID NO: 1235126 - DNA, 25 bp, Homo sapien
tgcctccttcgggtccctcggcaca

SEQ ID NO: 1235127 - DNA, 25 bp, Homo sapien
cccaagcaccacataaacttttggt

SEQ ID NO: 1235128 - DNA, 25 bp, Homo sapien
gacatccgccgaccggtccacccca

SEQ ID NO: 1235129 - DNA, 25 bp, Homo sapien
gtccaccccaagcaccacataaact

SEQ ID NO: 1235130 - DNA, 25 bp, Homo sapien
ggcacaaaccactggaaggtcgagt

SEQ ID NO: 1235131 - DNA, 25 bp, Homo sapien
tatgttgacaaaaaggcgtctcgaa

SEQ ID NO: 1235132 - DNA, 25 bp, Homo sapien
taccaccagcgagcattctacaaag

SEQ ID NO: 1235133 - DNA, 25 bp, Homo sapien
ccaattctgagcgacaaacggcaaa

SEQ ID NO: 1235134 - DNA, 25 bp, Homo sapien
caccggtcgatttgcgggcagtctg

SEQ ID NO: 1235135 - DNA, 25 bp, Homo sapien
cctgggtgctttaccaccggtcgat

SEQ ID NO: 1235136 - DNA, 25 bp, Homo sapien
ctgggtgctttaccaccggtcgatt

SEQ ID NO: 1235137 - DNA, 25 bp, Homo sapien
cgggcagtctgctttgtacgagcca

SEQ ID NO: 1235138 - DNA, 25 bp, Homo sapien
caccgatagctgcgctctggaagcg

SEQ ID NO: 1235139 - DNA, 25 bp, Homo sapien
taacgtctaatttcacggagcgcca

SEQ ID NO: 1235140 - DNA, 25 bp, Homo sapien
cgtctaatttcacggagcgccacag

SEQ ID NO: 1235141 - DNA, 25 bp, Homo sapien
ctgataacgtctaatttcacggagc

SEQ ID NO: 1235142 - DNA, 25 bp, Homo sapien
taatactgcctattcccatcctagg

SEQ ID NO: 1235143 - DNA, 25 bp, Homo sapien
taatggaatgtgcactaagccttgg

SEQ ID NO: 1235144 - DNA, 25 bp, Homo sapien
gcagcatccataaaccaaaccagag

SEQ ID NO: 1235145 - DNA, 25 bp, Homo sapien
cattttctacgtgtatgaccttgag

SEQ ID NO: 1235146 - DNA, 25 bp, Homo sapien
tattctatgcaagtagtccctcgca

SEQ ID NO: 1235147 - DNA, 25 bp, Homo sapien
taacctggcacctcgggattacaga

SEQ ID NO: 1235148 - DNA, 25 bp, Homo sapien
gggctcacaacgcatatcagctatt

SEQ ID NO: 1235149 - DNA, 25 bp, Homo sapien
gctcaagactattccatgaaggaga

SEQ ID NO: 1235150 - DNA, 25 bp, Homo sapien
gattccagaacatatcacaagttag

SEQ ID NO: 1235151 - DNA, 25 bp, Homo sapien
ccttgtccagtagtataacatggtg

SEQ ID NO: 1235152 - DNA, 25 bp, Homo sapien
tacaacctgtgggacaaagctcaaa

SEQ ID NO: 1235153 - DNA, 25 bp, Homo sapien
taaacgcaatcatgtccaatccaaa

SEQ ID NO: 1235154 - DNA, 25 bp, Homo sapien
aaggccaaccagataggcctcactt

SEQ ID NO: 1235155 - DNA, 25 bp, Homo sapien
ggtgtcttcaaaaaggccaaccaga

SEQ ID NO: 1235156 - DNA, 25 bp, Homo sapien
gccaaccagataggcctcacttgcc

SEQ ID NO: 1235157 - DNA, 25 bp, Homo sapien
ttggtgtcttcaaaaaggccaacca

SEQ ID NO: 1235158 - DNA, 25 bp, Homo sapien
ttggcataattgttacacgtttggc

SEQ ID NO: 1235159 - DNA, 25 bp, Homo sapien
taattgttacacgtttggcatggat

SEQ ID NO: 1235160 - DNA, 25 bp, Homo sapien
gttacacgtttggcatggatagcac

SEQ ID NO: 1235161 - DNA, 25 bp, Homo sapien
tacacgtttggcatggatagcacac

SEQ ID NO: 1235162 - DNA, 25 bp, Homo sapien
gttctccacgtatgcggcgtgctag

SEQ ID NO: 1235163 - DNA, 25 bp, Homo sapien
tccacgtatgcggcgtgctagctgg

SEQ ID NO: 1235164 - DNA, 25 bp, Homo sapien
cgtatgcggcgtgctagctggatgt

SEQ ID NO: 1235165 - DNA, 25 bp, Homo sapien
cacgtatgcggcgtgctagctggat

SEQ ID NO: 1235166 - DNA, 25 bp, Homo sapien
tcccctatttttccactcgcaatca

SEQ ID NO: 1235167 - DNA, 25 bp, Homo sapien
cccctatttttccactcgcaatcat

SEQ ID NO: 1235168 - DNA, 25 bp, Homo sapien
ccctatttttccactcgcaatcata

SEQ ID NO: 1235169 - DNA, 25 bp, Homo sapien
ctactgtatgataaaaatgctacaa

SEQ ID NO: 1235170 - DNA, 25 bp, Homo sapien
tctactgtatgataaaaatgctaca

SEQ ID NO: 1235171 - DNA, 25 bp, Homo sapien
ttttaatagcaaacttacaggaaca

SEQ ID NO: 1235172 - DNA, 25 bp, Homo sapien
gcaaacttacaggaacagcacagaa

SEQ ID NO: 1235173 - DNA, 25 bp, Homo sapien
gtattttaatagcaaacttacagga

SEQ ID NO: 1235174 - DNA, 25 bp, Homo sapien
taatagcaaacttacaggaacagca

SEQ ID NO: 1235175 - DNA, 25 bp, Homo sapien
gggccggctacttcctccactaaga

SEQ ID NO: 1235176 - DNA, 25 bp, Homo sapien
cagcgctcctcaggagtgtgtccgg

SEQ ID NO: 1235177 - DNA, 25 bp, Homo sapien
actaagagacgagtcgcccgggccg

SEQ ID NO: 1235178 - DNA, 25 bp, Homo sapien
gtttcccgagactgcgggcagcgct

SEQ ID NO: 1235179 - DNA, 25 bp, Homo sapien
cgggtcgtgggggtgacccagccag

SEQ ID NO: 1235180 - DNA, 25 bp, Homo sapien
gcggcgacggcgggagagggcccta

SEQ ID NO: 1235181 - DNA, 25 bp, Homo sapien
cctacccccggcgaggctgaggcct

SEQ ID NO: 1235182 - DNA, 25 bp, Homo sapien
tacccccggcgaggctgaggcctca

SEQ ID NO: 1235183 - DNA, 25 bp, Homo sapien
ctgcggcgacggcgggagagggccc

SEQ ID NO: 1235184 - DNA, 25 bp, Homo sapien
actcggcaggatatgcggcaccttc

SEQ ID NO: 1235185 - DNA, 25 bp, Homo sapien
gggctccaggcgttcgcatggctgg

SEQ ID NO: 1235186 - DNA, 25 bp, Homo sapien
tatgcggcaccttcagggccgcagc

SEQ ID NO: 1235187 - DNA, 25 bp, Homo sapien
cgcttcacccactcggcaggatatg

SEQ ID NO: 1235188 - DNA, 25 bp, Homo sapien
agaaagttccttgtgtcagccgggc

SEQ ID NO: 1235189 - DNA, 25 bp, Homo sapien
tgcagcagcaatctctaatcacgcg

SEQ ID NO: 1235190 - DNA, 25 bp, Homo sapien
ggcatatgtacactgggctccagca

SEQ ID NO: 1235191 - DNA, 25 bp, Homo sapien
taatcacgcggagacggcatatgta

SEQ ID NO: 1235192 - DNA, 25 bp, Homo sapien
gataagtaagctgcttggctccacg

SEQ ID NO: 1235193 - DNA, 25 bp, Homo sapien
atggttgcagctggaacaccacccc

SEQ ID NO: 1235194 - DNA, 25 bp, Homo sapien
ttggctccacgtggttattcaggaa

SEQ ID NO: 1235195 - DNA, 25 bp, Homo sapien
tcctccatctcctagggtatagtct

SEQ ID NO: 1235196 - DNA, 25 bp, Homo sapien
tgggcttcagacacttaaatccaat

SEQ ID NO: 1235197 - DNA, 25 bp, Homo sapien
ctttgcctcaggaaaggttaagtca

SEQ ID NO: 1235198 - DNA, 25 bp, Homo sapien
tgcagtcatgcaaaaaggatagaag

SEQ ID NO: 1235199 - DNA, 25 bp, Homo sapien
tgctataacacagaccccaaaatgc

SEQ ID NO: 1235200 - DNA, 25 bp, Homo sapien
ttaaacttctcatcaagtaaagatt

SEQ ID NO: 1235201 - DNA, 25 bp, Homo sapien
agtaaagatttgtttgcagacagtt

SEQ ID NO: 1235202 - DNA, 25 bp, Homo sapien
caagtaaagatttgtttgcagacag

SEQ ID NO: 1235203 - DNA, 25 bp, Homo sapien
atcaagtaaagatttgtttgcagac

SEQ ID NO: 1235204 - DNA, 25 bp, Homo sapien
caagcccttgcagggtggtctagca

SEQ ID NO: 1235205 - DNA, 25 bp, Homo sapien
gcatctcgacgcttggaaaagtgca

SEQ ID NO: 1235206 - DNA, 25 bp, Homo sapien
tattgctgaatgaactgtggctctt

SEQ ID NO: 1235207 - DNA, 25 bp, Homo sapien
gccggagttggaacacaggctccct

SEQ ID NO: 1235208 - DNA, 25 bp, Homo sapien
agtgggctgataatcctgcgcagga

SEQ ID NO: 1235209 - DNA, 25 bp, Homo sapien
ggtgccagtgacttccatgcagagc

SEQ ID NO: 1235210 - DNA, 25 bp, Homo sapien
gctgataatcctgcgcaggaaggcg

SEQ ID NO: 1235211 - DNA, 25 bp, Homo sapien
ctggtgccagtgacttccatgcaga

SEQ ID NO: 1235212 - DNA, 25 bp, Homo sapien
tcctccctacgggcccattggccac

SEQ ID NO: 1235213 - DNA, 25 bp, Homo sapien
tcatatcctccctacgggcccattg

SEQ ID NO: 1235214 - DNA, 25 bp, Homo sapien
gtcatatcctccctacgggcccatt

SEQ ID NO: 1235215 - DNA, 25 bp, Homo sapien
atatcctccctacgggcccattggc

SEQ ID NO: 1235216 - DNA, 25 bp, Homo sapien
gaatcagtccaagccagccactaaa

SEQ ID NO: 1235217 - DNA, 25 bp, Homo sapien
aacaagacggcaacaacaatgctgg

SEQ ID NO: 1235218 - DNA, 25 bp, Homo sapien
caaacaagacggcaacaacaatgct

SEQ ID NO: 1235219 - DNA, 25 bp, Homo sapien
gagaaggcagactccaaagaatcag

SEQ ID NO: 1235220 - DNA, 25 bp, Homo sapien
aaaacttttagctgacagctgccac

SEQ ID NO: 1235221 - DNA, 25 bp, Homo sapien
tctctgttagtgtcaggggcttctt

SEQ ID NO: 1235222 - DNA, 25 bp, Homo sapien
ataaaacttttagctgacagctgcc

SEQ ID NO: 1235223 - DNA, 25 bp, Homo sapien
aacttttagctgacagctgccactg

SEQ ID NO: 1235224 - DNA, 25 bp, Homo sapien
aatattgagggtcactgaggactcc

SEQ ID NO: 1235225 - DNA, 25 bp, Homo sapien
gaatattgagggtcactgaggactc

SEQ ID NO: 1235226 - DNA, 25 bp, Homo sapien
tgcctgtggcttggctgattgaata

SEQ ID NO: 1235227 - DNA, 25 bp, Homo sapien
ctggcacacagtgagggtggaatcc

SEQ ID NO: 1235228 - DNA, 25 bp, Homo sapien
tggcacacagtgagggtggaatcct

SEQ ID NO: 1235229 - DNA, 25 bp, Homo sapien
cagtgagggtggaatcctgagaagc

SEQ ID NO: 1235230 - DNA, 25 bp, Homo sapien
cacacagtgagggtggaatcctgag

SEQ ID NO: 1235231 - DNA, 25 bp, Homo sapien
agaggcggaagccagtgctggtttg

SEQ ID NO: 1235232 - DNA, 25 bp, Homo sapien
ccagtgctggtttgatggtgccctc

SEQ ID NO: 1235233 - DNA, 25 bp, Homo sapien
tcccattgaggttggaaagctgccc

SEQ ID NO: 1235234 - DNA, 25 bp, Homo sapien
cccattgaggttggaaagctgcccc

SEQ ID NO: 1235235 - DNA, 25 bp, Homo sapien
tcaaccacagcattgccaaactcag

SEQ ID NO: 1235236 - DNA, 25 bp, Homo sapien
cacagcattgccaaactcagtaggg

SEQ ID NO: 1235237 - DNA, 25 bp, Homo sapien
ttgccaaactcagtagggcatctct

SEQ ID NO: 1235238 - DNA, 25 bp, Homo sapien
cctcgctcaaccacagcattgccaa

SEQ ID NO: 1235239 - DNA, 25 bp, Homo sapien
ccatctagtggacgcatctgggtct

SEQ ID NO: 1235240 - DNA, 25 bp, Homo sapien
cgccatctagtggacgcatctgggt

SEQ ID NO: 1235241 - DNA, 25 bp, Homo sapien
tctagtggacgcatctgggtctgcg

SEQ ID NO: 1235242 - DNA, 25 bp, Homo sapien
ggcgccatctagtggacgcatctgg

SEQ ID NO: 1235243 - DNA, 25 bp, Homo sapien
gggcctcgaactcccgcgcgcagaa

SEQ ID NO: 1235244 - DNA, 25 bp, Homo sapien
gcggcgaagcagctccgcagggcct

SEQ ID NO: 1235245 - DNA, 25 bp, Homo sapien
agggcctcgaactcccgcgcgcaga

SEQ ID NO: 1235246 - DNA, 25 bp, Homo sapien
gcagggcctcgaactcccgcgcgca

SEQ ID NO: 1235247 - DNA, 25 bp, Homo sapien
ctgccctaggcattcaatgtatgcc

SEQ ID NO: 1235248 - DNA, 25 bp, Homo sapien
acagtatctaacaccgaggcacgtc

SEQ ID NO: 1235249 - DNA, 25 bp, Homo sapien
taggcattcaatgtatgccaccggg

SEQ ID NO: 1235250 - DNA, 25 bp, Homo sapien
tatctaacaccgaggcacgtcacat

SEQ ID NO: 1235251 - DNA, 25 bp, Homo sapien
tgagaaacccaaagtgttgtagccc

SEQ ID NO: 1235252 - DNA, 25 bp, Homo sapien
aaagcactgtgggcgttccaggctg

SEQ ID NO: 1235253 - DNA, 25 bp, Homo sapien
gaggtggtatgtgggctcatagctt

SEQ ID NO: 1235254 - DNA, 25 bp, Homo sapien
gctgcttagtgttgacagtgtctga

SEQ ID NO: 1235255 - DNA, 25 bp, Homo sapien
tcactgcatgaggatacgttgggag

SEQ ID NO: 1235256 - DNA, 25 bp, Homo sapien
actgcatgaggatacgttgggagta

SEQ ID NO: 1235257 - DNA, 25 bp, Homo sapien
gatacgttgggagtaggggccaagc

SEQ ID NO: 1235258 - DNA, 25 bp, Homo sapien
tacgttgggagtaggggccaagcag

SEQ ID NO: 1235259 - DNA, 25 bp, Homo sapien
aggatctagcgagccctggaaggca

SEQ ID NO: 1235260 - DNA, 25 bp, Homo sapien
ctctcttccacgacaggaaccaagg

SEQ ID NO: 1235261 - DNA, 25 bp, Homo sapien
gcagggccgtctttcgtgtgtgtct

SEQ ID NO: 1235262 - DNA, 25 bp, Homo sapien
acaggaaccaaggatctagcgagcc

SEQ ID NO: 1235263 - DNA, 25 bp, Homo sapien
tcaccctgtacgctgagtgggtttg

SEQ ID NO: 1235264 - DNA, 25 bp, Homo sapien
caccctgtacgctgagtgggtttgg

SEQ ID NO: 1235265 - DNA, 25 bp, Homo sapien
accctgtacgctgagtgggtttggt

SEQ ID NO: 1235266 - DNA, 25 bp, Homo sapien
ccctgtacgctgagtgggtttggtg

SEQ ID NO: 1235267 - DNA, 25 bp, Homo sapien
ttaccaaggcttgttttatgtccca

SEQ ID NO: 1235268 - DNA, 25 bp, Homo sapien
aatggtgtcttttagtggatgttcc

SEQ ID NO: 1235269 - DNA, 25 bp, Homo sapien
acttaagttattgatttgagcctcc

SEQ ID NO: 1235270 - DNA, 25 bp, Homo sapien
gtattaggctccatgtatttgagga

SEQ ID NO: 1235271 - DNA, 25 bp, Homo sapien
tacatccagaacatttgtcaggctc

SEQ ID NO: 1235272 - DNA, 25 bp, Homo sapien
tttgattcagaagtagtcccagctc

SEQ ID NO: 1235273 - DNA, 25 bp, Homo sapien
gaaaccatggagttaggcacttcct

SEQ ID NO: 1235274 - DNA, 25 bp, Homo sapien
tgttactttacatagcagcggttcc

SEQ ID NO: 1235275 - DNA, 25 bp, Homo sapien
cagtgtgttgccagaattcactctg

SEQ ID NO: 1235276 - DNA, 25 bp, Homo sapien
tctgccatgttataaacctgaaaat

SEQ ID NO: 1235277 - DNA, 25 bp, Homo sapien
gttataaacctgaaaatccatgcct

SEQ ID NO: 1235278 - DNA, 25 bp, Homo sapien
tcagtgtgttgccagaattcactct

SEQ ID NO: 1235279 - DNA, 25 bp, Homo sapien
agcccgagcgacagagctaggccct

SEQ ID NO: 1235280 - DNA, 25 bp, Homo sapien
cccgagcgacagagctaggccctcc

SEQ ID NO: 1235281 - DNA, 25 bp, Homo sapien
cgagcgacagagctaggccctccct

SEQ ID NO: 1235282 - DNA, 25 bp, Homo sapien
ccagcccgagcgacagagctaggcc

SEQ ID NO: 1235283 - DNA, 25 bp, Homo sapien
tatttgctagccttcctggtcagtg

SEQ ID NO: 1235284 - DNA, 25 bp, Homo sapien
catggtatcagatgtactccagggc

SEQ ID NO: 1235285 - DNA, 25 bp, Homo sapien
tgagcatagcactttggtagggcaa

SEQ ID NO: 1235286 - DNA, 25 bp, Homo sapien
taggcagcattacagaaacaacagg

SEQ ID NO: 1235287 - DNA, 25 bp, Homo sapien
agggtggtcgctgagccagggcaac

SEQ ID NO: 1235288 - DNA, 25 bp, Homo sapien
ggggagcctgaagggtggtcgctga

SEQ ID NO: 1235289 - DNA, 25 bp, Homo sapien
gaagggtggtcgctgagccagggca

SEQ ID NO: 1235290 - DNA, 25 bp, Homo sapien
tggagcaactgggatccgaaaggat

SEQ ID NO: 1235291 - DNA, 25 bp, Homo sapien
tgtgtgctatatgtgtttgtgacag

SEQ ID NO: 1235292 - DNA, 25 bp, Homo sapien
gttccatgtgtgctatatgtgtttg

SEQ ID NO: 1235293 - DNA, 25 bp, Homo sapien
tatgtgtttgtgacaggatcaagca

SEQ ID NO: 1235294 - DNA, 25 bp, Homo sapien
gctatatgtgtttgtgacaggatca

SEQ ID NO: 1235295 - DNA, 25 bp, Homo sapien
taagacccgaagtcttatgagattg

SEQ ID NO: 1235296 - DNA, 25 bp, Homo sapien
tataagacccgaagtcttatgagat

SEQ ID NO: 1235297 - DNA, 25 bp, Homo sapien
agacccgaagtcttatgagattgtc

SEQ ID NO: 1235298 - DNA, 25 bp, Homo sapien
ctataagacccgaagtcttatgaga

SEQ ID NO: 1235299 - DNA, 25 bp, Homo sapien
aaatctactgtggtgtgtacccacg

SEQ ID NO: 1235300 - DNA, 25 bp, Homo sapien
aaaatctactgtggtgtgtacccac

SEQ ID NO: 1235301 - DNA, 25 bp, Homo sapien
ctaccgtctccggccagcaggtggg

SEQ ID NO: 1235302 - DNA, 25 bp, Homo sapien
gccccataagcactgagcggctggg

SEQ ID NO: 1235303 - DNA, 25 bp, Homo sapien
ccctgaagcttaagcctcggtctca

SEQ ID NO: 1235304 - DNA, 25 bp, Homo sapien
cggtctcagcatcttttgaacgagt

SEQ ID NO: 1235305 - DNA, 25 bp, Homo sapien
gccgaggaagcccgcaaaggtcgct

SEQ ID NO: 1235306 - DNA, 25 bp, Homo sapien
ctggaaacgcggcgccctcggcaaa

SEQ ID NO: 1235307 - DNA, 25 bp, Homo sapien
ggcgccctcggcaaactggagcgca

SEQ ID NO: 1235308 - DNA, 25 bp, Homo sapien
aagcccgcaaaggtcgctgggccgg

SEQ ID NO: 1235309 - DNA, 25 bp, Homo sapien
tgcgacgccgacggggcggccgcgc

SEQ ID NO: 1235310 - DNA, 25 bp, Homo sapien
agctgttcggcgctgaaagacgtgc

SEQ ID NO: 1235311 - DNA, 25 bp, Homo sapien
caggcgctcgcgcaagtggatgtcg

SEQ ID NO: 1235312 - DNA, 25 bp, Homo sapien
cggcggaagacgagctccagcagct

SEQ ID NO: 1235313 - DNA, 25 bp, Homo sapien
tcggcgctgaaagacgtgcgcttgc

SEQ ID NO: 1235314 - DNA, 25 bp, Homo sapien
cgagacttggcacgcctgttctgga

SEQ ID NO: 1235315 - DNA, 25 bp, Homo sapien
gggcttcagacatttcgtttcagtt

SEQ ID NO: 1235316 - DNA, 25 bp, Homo sapien
aaggatttcccactctgacgccgag

SEQ ID NO: 1235317 - DNA, 25 bp, Homo sapien
ttgaggataatctccggcctagcca

SEQ ID NO: 1235318 - DNA, 25 bp, Homo sapien
ccgtttggttcgggcaggcagttca

SEQ ID NO: 1235319 - DNA, 25 bp, Homo sapien
ttggttcgggcaggcagttcacatc

SEQ ID NO: 1235320 - DNA, 25 bp, Homo sapien
gctagagtcagagatgccccctcca

SEQ ID NO: 1235321 - DNA, 25 bp, Homo sapien
gttcgggcaggcagttcacatctac

SEQ ID NO: 1235322 - DNA, 25 bp, Homo sapien
cagagagaggggaacaggtttcaaa

SEQ ID NO: 1235323 - DNA, 25 bp, Homo sapien
tcagagagaggggaacaggtttcaa

SEQ ID NO: 1235324 - DNA, 25 bp, Homo sapien
ttcagagagaggggaacaggtttca

SEQ ID NO: 1235325 - DNA, 25 bp, Homo sapien
cttcagagagaggggaacaggtttc

SEQ ID NO: 1235326 - DNA, 25 bp, Homo sapien
gttcctcccatgagtccagctttga

SEQ ID NO: 1235327 - DNA, 25 bp, Homo sapien
tgttcctcccatgagtccagctttg

SEQ ID NO: 1235328 - DNA, 25 bp, Homo sapien
ttcctcccatgagtccagctttgaa

SEQ ID NO: 1235329 - DNA, 25 bp, Homo sapien
ggcagaaaagatgtgttcctcccat

SEQ ID NO: 1235330 - DNA, 25 bp, Homo sapien
gaatgtgcaggcttggagagaacac

SEQ ID NO: 1235331 - DNA, 25 bp, Homo sapien
gattataagccttggagggaccagg

SEQ ID NO: 1235332 - DNA, 25 bp, Homo sapien
taaaacgtcattgacaaagtggcgg

SEQ ID NO: 1235333 - DNA, 25 bp, Homo sapien
agtatgctgatgtgtctctcccagg

SEQ ID NO: 1235334 - DNA, 25 bp, Homo sapien
agatgacaggcccaattttaaaaag

SEQ ID NO: 1235335 - DNA, 25 bp, Homo sapien
cattggagctatgattgaacgtgaa

SEQ ID NO: 1235336 - DNA, 25 bp, Homo sapien
tgaacgtgaagatgacaggcccaat

SEQ ID NO: 1235337 - DNA, 25 bp, Homo sapien
gggctgtcgaaataatctgcatgca

SEQ ID NO: 1235338 - DNA, 25 bp, Homo sapien
cacaggaagtacaataacaagtgct

SEQ ID NO: 1235339 - DNA, 25 bp, Homo sapien
tcgaagtaacaggtgcaaaatcagg

SEQ ID NO: 1235340 - DNA, 25 bp, Homo sapien
gatttgcatagctgtcctgcaggct

SEQ ID NO: 1235341 - DNA, 25 bp, Homo sapien
gggagtcctcgagtgttttgaaagc

SEQ ID NO: 1235342 - DNA, 25 bp, Homo sapien
taatgtgcatgaattcaccgcaaca

SEQ ID NO: 1235343 - DNA, 25 bp, Homo sapien
tagttgatcaccatctcagtcttca

SEQ ID NO: 1235344 - DNA, 25 bp, Homo sapien
aatttcgtggaagaatacattgacc

SEQ ID NO: 1235345 - DNA, 25 bp, Homo sapien
caatgtgacatggttctgtagatca

SEQ ID NO: 1235346 - DNA, 25 bp, Homo sapien
gcccgacctaggcacgttatcttaa

SEQ ID NO: 1235347 - DNA, 25 bp, Homo sapien
aaaatgttagagtacccagggcagg

SEQ ID NO: 1235348 - DNA, 25 bp, Homo sapien
tgtctgagagctaccatctccacag

SEQ ID NO: 1235349 - DNA, 25 bp, Homo sapien
tggaatgacatcttcacagggctga

SEQ ID NO: 1235350 - DNA, 25 bp, Homo sapien
tcgatactacaagtttcccactaag

SEQ ID NO: 1235351 - DNA, 25 bp, Homo sapien
cattcgatactacaagtttcccact

SEQ ID NO: 1235352 - DNA, 25 bp, Homo sapien
ttggctgcatcacacaaattttgac

SEQ ID NO: 1235353 - DNA, 25 bp, Homo sapien
gatactacaagtttcccactaagca

SEQ ID NO: 1235354 - DNA, 25 bp, Homo sapien
tcatttcacctaaagaccatagttc

SEQ ID NO: 1235355 - DNA, 25 bp, Homo sapien
tgcagactgtcatatatttgaagtc

SEQ ID NO: 1235356 - DNA, 25 bp, Homo sapien
tgtatcatatagagtagttttgctg

SEQ ID NO: 1235357 - DNA, 25 bp, Homo sapien
cagtcagtgaactttcattaacaca

SEQ ID NO: 1235358 - DNA, 25 bp, Homo sapien
gagataatcggattcagtgtttcat

SEQ ID NO: 1235359 - DNA, 25 bp, Homo sapien
gattgattgagataatcggattcag

SEQ ID NO: 1235360 - DNA, 25 bp, Homo sapien
tggtattgtgccatgtgtcattctg

SEQ ID NO: 1235361 - DNA, 25 bp, Homo sapien
ttttcatggtattgtgccatgtgtc

SEQ ID NO: 1235362 - DNA, 25 bp, Homo sapien
accctggcttgcttcgaccttcgcc

SEQ ID NO: 1235363 - DNA, 25 bp, Homo sapien
atctcggcttgcttcgaccctggct

SEQ ID NO: 1235364 - DNA, 25 bp, Homo sapien
tgctatctcggcttgcttcgaccct

SEQ ID NO: 1235365 - DNA, 25 bp, Homo sapien
tgcttcgaccctggctcgctttgac

SEQ ID NO: 1235366 - DNA, 25 bp, Homo sapien
ggtcatgtgctgacttttcacaaag

SEQ ID NO: 1235367 - DNA, 25 bp, Homo sapien
gggtcatgtgctgacttttcacaaa

SEQ ID NO: 1235368 - DNA, 25 bp, Homo sapien
gcccactgcacgatctagtgtcgaa

SEQ ID NO: 1235369 - DNA, 25 bp, Homo sapien
caagcaacgtgggtttcgggaactg

SEQ ID NO: 1235370 - DNA, 25 bp, Homo sapien
tccaacattcgggaaaggcgtgccc

SEQ ID NO: 1235371 - DNA, 25 bp, Homo sapien
gaacagttctttagctgtcggccta

SEQ ID NO: 1235372 - DNA, 25 bp, Homo sapien
atgttggtcgtcagtgttgcctgga

SEQ ID NO: 1235373 - DNA, 25 bp, Homo sapien
ttatgttggtcgtcagtgttgcctg

SEQ ID NO: 1235374 - DNA, 25 bp, Homo sapien
cttatgttggtcgtcagtgttgcct

SEQ ID NO: 1235375 - DNA, 25 bp, Homo sapien
tatgttggtcgtcagtgttgcctgg

SEQ ID NO: 1235376 - DNA, 25 bp, Homo sapien
gacacacagaggtttcgttgcccat

SEQ ID NO: 1235377 - DNA, 25 bp, Homo sapien
gacagacccacaggtcgtatctgct

SEQ ID NO: 1235378 - DNA, 25 bp, Homo sapien
ccaaggagtaggctcgttgttcctc

SEQ ID NO: 1235379 - DNA, 25 bp, Homo sapien
gtgccttcacgccacaaagcactgt

SEQ ID NO: 1235380 - DNA, 25 bp, Homo sapien
gggcgcggagactcacttctgtaat

SEQ ID NO: 1235381 - DNA, 25 bp, Homo sapien
ggcatgatggtacaggcctttaagt

SEQ ID NO: 1235382 - DNA, 25 bp, Homo sapien
catgatggtacaggcctttaagttc

SEQ ID NO: 1235383 - DNA, 25 bp, Homo sapien
cgggcatgatggtacaggcctttaa

SEQ ID NO: 1235384 - DNA, 25 bp, Homo sapien
ctttacttgagtcagcccagctggg

SEQ ID NO: 1235385 - DNA, 25 bp, Homo sapien
tttcttttggatacccagagtcttc

SEQ ID NO: 1235386 - DNA, 25 bp, Homo sapien
gtttcctctttacttgagtcagccc

SEQ ID NO: 1235387 - DNA, 25 bp, Homo sapien
gagtcttcgtcactttctcataaag

SEQ ID NO: 1235388 - DNA, 25 bp, Homo sapien
tcagccaggctttgatgacactgcg

SEQ ID NO: 1235389 - DNA, 25 bp, Homo sapien
gggctacagtcttttgcctgagcag

SEQ ID NO: 1235390 - DNA, 25 bp, Homo sapien
tgcggaggtcattgtcaaccaaacg

SEQ ID NO: 1235391 - DNA, 25 bp, Homo sapien
gtggcagttccattccctcttagga

SEQ ID NO: 1235392 - DNA, 25 bp, Homo sapien
actgtggtccggaagaagtcagcca

SEQ ID NO: 1235393 - DNA, 25 bp, Homo sapien
tcatgctgtggaacaactgtggtcc

SEQ ID NO: 1235394 - DNA, 25 bp, Homo sapien
cactttcatgtgcagtccctcgaga

SEQ ID NO: 1235395 - DNA, 25 bp, Homo sapien
ggatcatcctctgaaccactcgtgg

SEQ ID NO: 1235396 - DNA, 25 bp, Homo sapien
tccaggaatactgaacatgggagct

SEQ ID NO: 1235397 - DNA, 25 bp, Homo sapien
aggaaggaacgctaacaatttctca

SEQ ID NO: 1235398 - DNA, 25 bp, Homo sapien
ggaacgctaacaatttctcatactt

SEQ ID NO: 1235399 - DNA, 25 bp, Homo sapien
ggaatactgaacatgggagctcttg

SEQ ID NO: 1235400 - DNA, 25 bp, Homo sapien
accaagcttcgttagaatgtctgcc

SEQ ID NO: 1235401 - DNA, 25 bp, Homo sapien
gtggctctggtatgaattcacccga

SEQ ID NO: 1235402 - DNA, 25 bp, Homo sapien
ggtagccgagtcacacccggtggct

SEQ ID NO: 1235403 - DNA, 25 bp, Homo sapien
gattctgttgcatagactagtccta

SEQ ID NO: 1235404 - DNA, 25 bp, Homo sapien
cacatggacccaacatcaaatagag

SEQ ID NO: 1235405 - DNA, 25 bp, Homo sapien
gatccttcagctaacattagtctgg

SEQ ID NO: 1235406 - DNA, 25 bp, Homo sapien
gtactcacagttcatgtcacttgtg

SEQ ID NO: 1235407 - DNA, 25 bp, Homo sapien
acatcaaatagagctcatctccctg

SEQ ID NO: 1235408 - DNA, 25 bp, Homo sapien
tttcttcctggccccctgtttgcca

SEQ ID NO: 1235409 - DNA, 25 bp, Homo sapien
tgccacctttcttaaggtgcttatt

SEQ ID NO: 1235410 - DNA, 25 bp, Homo sapien
cttaaggtgcttattcttgccaact

SEQ ID NO: 1235411 - DNA, 25 bp, Homo sapien
cctgtttgccacctttcttaaggtg

SEQ ID NO: 1235412 - DNA, 25 bp, Homo sapien
catctgatacatttgggttccttca

SEQ ID NO: 1235413 - DNA, 25 bp, Homo sapien
ggccatctgatacatttgggttcct

SEQ ID NO: 1235414 - DNA, 25 bp, Homo sapien
tgatacatttgggttccttcagtcc

SEQ ID NO: 1235415 - DNA, 25 bp, Homo sapien
ttgaggccatctgatacatttgggt

SEQ ID NO: 1235416 - DNA, 25 bp, Homo sapien
agaacagacgaagcacgtaaccgtt

SEQ ID NO: 1235417 - DNA, 25 bp, Homo sapien
aacagacgaagcacgtaaccgttgg

SEQ ID NO: 1235418 - DNA, 25 bp, Homo sapien
agacgaagcacgtaaccgttggtag

SEQ ID NO: 1235419 - DNA, 25 bp, Homo sapien
cgaagcacgtaaccgttggtagtct

SEQ ID NO: 1235420 - DNA, 25 bp, Homo sapien
caaaatcttcttccggatttggcgg

SEQ ID NO: 1235421 - DNA, 25 bp, Homo sapien
tcaggtcatgatttccaaaatcttc

SEQ ID NO: 1235422 - DNA, 25 bp, Homo sapien
caggtcatgatttccaaaatcttct

SEQ ID NO: 1235423 - DNA, 25 bp, Homo sapien
tgatttccaaaatcttcttccggat

SEQ ID NO: 1235424 - DNA, 25 bp, Homo sapien
gccactattgtaagtcctaacttca

SEQ ID NO: 1235425 - DNA, 25 bp, Homo sapien
cagattcaaggaccgtggttcatat

SEQ ID NO: 1235426 - DNA, 25 bp, Homo sapien
tatttgccactattgtaagtcctaa

SEQ ID NO: 1235427 - DNA, 25 bp, Homo sapien
gtcctaacttcaaacagattcaagg

SEQ ID NO: 1235428 - DNA, 25 bp, Homo sapien
catacatccttgaccaaagctgggt

SEQ ID NO: 1235429 - DNA, 25 bp, Homo sapien
tttgggagggacgtacttggagaga

SEQ ID NO: 1235430 - DNA, 25 bp, Homo sapien
gggagcatggctactcatacatcct

SEQ ID NO: 1235431 - DNA, 25 bp, Homo sapien
gcatggctactcatacatccttgac

SEQ ID NO: 1235432 - DNA, 25 bp, Homo sapien
tgaacttgctcatttggctttccct

SEQ ID NO: 1235433 - DNA, 25 bp, Homo sapien
caacaccttctacttgaacttgctc

SEQ ID NO: 1235434 - DNA, 25 bp, Homo sapien
tccatcgatttcttcaacaccttct

SEQ ID NO: 1235435 - DNA, 25 bp, Homo sapien
ttgaacttgctcatttggctttccc

SEQ ID NO: 1235436 - DNA, 25 bp, Homo sapien
ctgcactgagcataccacagctgct

SEQ ID NO: 1235437 - DNA, 25 bp, Homo sapien
cctgcactgagcataccacagctgc

SEQ ID NO: 1235438 - DNA, 25 bp, Homo sapien
gcctgcactgagcataccacagctg

SEQ ID NO: 1235439 - DNA, 25 bp, Homo sapien
tccaggaggcactggttttgtccaa

SEQ ID NO: 1235440 - DNA, 25 bp, Homo sapien
gaggcactggttttgtccaaaagat

SEQ ID NO: 1235441 - DNA, 25 bp, Homo sapien
caggaggcactggttttgtccaaaa

SEQ ID NO: 1235442 - DNA, 25 bp, Homo sapien
ggaggcactggttttgtccaaaaga

SEQ ID NO: 1235443 - DNA, 25 bp, Homo sapien
agaaacagtgaggaatgttgcagct

SEQ ID NO: 1235444 - DNA, 25 bp, Homo sapien
tgtgctggaggtgctgcgacaacat

SEQ ID NO: 1235445 - DNA, 25 bp, Homo sapien
aacagtgaggaatgttgcagctgtg

SEQ ID NO: 1235446 - DNA, 25 bp, Homo sapien
gtgaggaatgttgcagctgtgatgt

SEQ ID NO: 1235447 - DNA, 25 bp, Homo sapien
ttggtagaagcaacagccggcagct

SEQ ID NO: 1235448 - DNA, 25 bp, Homo sapien
caggcttgttgggaagcgttcacca

SEQ ID NO: 1235449 - DNA, 25 bp, Homo sapien
tctgtgagcccgacgtggtggttaa

SEQ ID NO: 1235450 - DNA, 25 bp, Homo sapien
tgaataaggctgcttcgcctccgca

SEQ ID NO: 1235451 - DNA, 25 bp, Homo sapien
gcaggagactgtcggctgcgggctc

SEQ ID NO: 1235452 - DNA, 25 bp, Homo sapien
caaaaccaccgctcacaaggaatgg

SEQ ID NO: 1235453 - DNA, 25 bp, Homo sapien
gagctggcgcccagcgtacgggagc

SEQ ID NO: 1235454 - DNA, 25 bp, Homo sapien
gaatggaaaatcagggcggagggaa

SEQ ID NO: 1235455 - DNA, 25 bp, Homo sapien
gtctcggcgtctttgtgcgagggct

SEQ ID NO: 1235456 - DNA, 25 bp, Homo sapien
cgccgtctcggcgtctttgtgcgag

SEQ ID NO: 1235457 - DNA, 25 bp, Homo sapien
gccgccgtctcggcgtctttgtgcg

SEQ ID NO: 1235458 - DNA, 25 bp, Homo sapien
ctcggcgtctttgtgcgagggctcc

SEQ ID NO: 1235459 - DNA, 25 bp, Homo sapien
cacgaaagtgttgaggaagaggcag

SEQ ID NO: 1235460 - DNA, 25 bp, Homo sapien
ttcttctcgcggacctgcaccacca

SEQ ID NO: 1235461 - DNA, 25 bp, Homo sapien
ggaagaggcagatgacggccacggg

SEQ ID NO: 1235462 - DNA, 25 bp, Homo sapien
gggcccttcttctcgcggacctgca

SEQ ID NO: 1235463 - DNA, 25 bp, Homo sapien
tggccgcaaagtttccggctctttg

SEQ ID NO: 1235464 - DNA, 25 bp, Homo sapien
tgcgggctccaacattggccgcaaa

SEQ ID NO: 1235465 - DNA, 25 bp, Homo sapien
acacgacggagagaaggagcagaaa

SEQ ID NO: 1235466 - DNA, 25 bp, Homo sapien
tagagctcattctgatccgacccca

SEQ ID NO: 1235467 - DNA, 25 bp, Homo sapien
aaagtgaacgggtcctgcgtgggtg

SEQ ID NO: 1235468 - DNA, 25 bp, Homo sapien
ccgcagcagccccttagggtagaaa

SEQ ID NO: 1235469 - DNA, 25 bp, Homo sapien
tgaacgggtcctgcgtgggtggctg

SEQ ID NO: 1235470 - DNA, 25 bp, Homo sapien
tagaaagacaagtaagctcggaggg

SEQ ID NO: 1235471 - DNA, 25 bp, Homo sapien
aggccagagatgcaatgttcatatc

SEQ ID NO: 1235472 - DNA, 25 bp, Homo sapien
atgcaatgttcatatcacaaaattc

SEQ ID NO: 1235473 - DNA, 25 bp, Homo sapien
gagatgcaatgttcatatcacaaaa

SEQ ID NO: 1235474 - DNA, 25 bp, Homo sapien
agagatgcaatgttcatatcacaaa

SEQ ID NO: 1235475 - DNA, 25 bp, Homo sapien
ttcatctcctccctcgatctctttg

SEQ ID NO: 1235476 - DNA, 25 bp, Homo sapien
tcatctcctccctcgatctctttgt

SEQ ID NO: 1235477 - DNA, 25 bp, Homo sapien
gctgtccctgccaaattcctctgga

SEQ ID NO: 1235478 - DNA, 25 bp, Homo sapien
ctggttccaattcccactctggatg

SEQ ID NO: 1235479 - DNA, 25 bp, Homo sapien
tggggcgatgaaccacattcctgaa

SEQ ID NO: 1235480 - DNA, 25 bp, Homo sapien
ggcagcgttctggttccaattccca

SEQ ID NO: 1235481 - DNA, 25 bp, Homo sapien
ctgcagggtgactaagtgagggaga

SEQ ID NO: 1235482 - DNA, 25 bp, Homo sapien
gcagcgtctgcctccgtatcagtgg

SEQ ID NO: 1235483 - DNA, 25 bp, Homo sapien
tccgtatcagtggagctgtggtcag

SEQ ID NO: 1235484 - DNA, 25 bp, Homo sapien
gctccctgggaccagggcttccagg

SEQ ID NO: 1235485 - DNA, 25 bp, Homo sapien
ggctaccatctccttagaatttgca

SEQ ID NO: 1235486 - DNA, 25 bp, Homo sapien
tataggagacaacacggctaccatc

SEQ ID NO: 1235487 - DNA, 25 bp, Homo sapien
gaatttgcaacctcacaagatgaca

SEQ ID NO: 1235488 - DNA, 25 bp, Homo sapien
ccatggatgggtagacacggagatt

SEQ ID NO: 1235489 - DNA, 25 bp, Homo sapien
gacacagaatcagcgtagccttgaa

SEQ ID NO: 1235490 - DNA, 25 bp, Homo sapien
tgcaccgagtcattcccctagaaag

SEQ ID NO: 1235491 - DNA, 25 bp, Homo sapien
ggtcctgggccactcaaatgctctt

SEQ ID NO: 1235492 - DNA, 25 bp, Homo sapien
caaagggcatatcagcgcagggttc

SEQ ID NO: 1235493 - DNA, 25 bp, Homo sapien
acactctggcaaggacactgggtca

SEQ ID NO: 1235494 - DNA, 25 bp, Homo sapien
ggcctggccgttcacatggagatta

SEQ ID NO: 1235495 - DNA, 25 bp, Homo sapien
taatttattctattgagcgccagcc

SEQ ID NO: 1235496 - DNA, 25 bp, Homo sapien
tttggccgtagcaggaaagacttca

SEQ ID NO: 1235497 - DNA, 25 bp, Homo sapien
tttgtgcttcagatccaaggctgaa

SEQ ID NO: 1235498 - DNA, 25 bp, Homo sapien
tgtgcttcagatccaaggctgaagc

SEQ ID NO: 1235499 - DNA, 25 bp, Homo sapien
ctttgtgcttcagatccaaggctga

SEQ ID NO: 1235500 - DNA, 25 bp, Homo sapien
tgcttcagatccaaggctgaagcct

SEQ ID NO: 1235501 - DNA, 25 bp, Homo sapien
tgtccatgccccagaagatgctcat

SEQ ID NO: 1235502 - DNA, 25 bp, Homo sapien
tggcaaggatgaccatgtccatgcc

SEQ ID NO: 1235503 - DNA, 25 bp, Homo sapien
tcatgatccagcccaccatgacgat

SEQ ID NO: 1235504 - DNA, 25 bp, Homo sapien
acacatgcctgtccgggaggtcggt

SEQ ID NO: 1235505 - DNA, 25 bp, Homo sapien
ttacctctgacactgacgatcccag

SEQ ID NO: 1235506 - DNA, 25 bp, Homo sapien
cttacctctgacactgacgatccca

SEQ ID NO: 1235507 - DNA, 25 bp, Homo sapien
aacagagccacagggaacgcttggc

SEQ ID NO: 1235508 - DNA, 25 bp, Homo sapien
aaacagagccacagggaacgcttgg

SEQ ID NO: 1235509 - DNA, 25 bp, Homo sapien
agagccacagggaacgcttggcaca

SEQ ID NO: 1235510 - DNA, 25 bp, Homo sapien
acagggaacgcttggcacaggaaac

SEQ ID NO: 1235511 - DNA, 25 bp, Homo sapien
gagagatggttagacacctgcttac

SEQ ID NO: 1235512 - DNA, 25 bp, Homo sapien
ggttagacacctgcttacttcagga

SEQ ID NO: 1235513 - DNA, 25 bp, Homo sapien
gatggttagacacctgcttacttca

SEQ ID NO: 1235514 - DNA, 25 bp, Homo sapien
aggagagatggttagacacctgctt

SEQ ID NO: 1235515 - DNA, 25 bp, Homo sapien
ccccagcggctcccgtgggctcaca

SEQ ID NO: 1235516 - DNA, 25 bp, Homo sapien
gcggctcccgtgggctcacagctgc

SEQ ID NO: 1235517 - DNA, 25 bp, Homo sapien
ccagcggctcccgtgggctcacagc

SEQ ID NO: 1235518 - DNA, 25 bp, Homo sapien
agcggctcccgtgggctcacagctg

SEQ ID NO: 1235519 - DNA, 25 bp, Homo sapien
aaaagcagatgcgttttcaaaataa

SEQ ID NO: 1235520 - DNA, 25 bp, Homo sapien
agaacatgtaaaggtccttgtgccc

SEQ ID NO: 1235521 - DNA, 25 bp, Homo sapien
tgagaaaagcagatgcgttttcaaa

SEQ ID NO: 1235522 - DNA, 25 bp, Homo sapien
ccttgtgcccaaagctgcctggtgc

SEQ ID NO: 1235523 - DNA, 25 bp, Homo sapien
tgtgggcgttctcatctccacccca

SEQ ID NO: 1235524 - DNA, 25 bp, Homo sapien
atgctctggtgcctgcgcccacagt

SEQ ID NO: 1235525 - DNA, 25 bp, Homo sapien
gcccagcagacgtggcgtgcctttg

SEQ ID NO: 1235526 - DNA, 25 bp, Homo sapien
tacagcaaggccagttggagcctgc

SEQ ID NO: 1235527 - DNA, 25 bp, Homo sapien
cagtgggcctttccacgctagggtg

SEQ ID NO: 1235528 - DNA, 25 bp, Homo sapien
cactcggggcaccagattttgaggc

SEQ ID NO: 1235529 - DNA, 25 bp, Homo sapien
agacgcctgtgggactggtcttctc

SEQ ID NO: 1235530 - DNA, 25 bp, Homo sapien
ggacgggtctaccacagtcctgtcc

SEQ ID NO: 1235531 - DNA, 25 bp, Homo sapien
tcaattcggagacacatctggcccc

SEQ ID NO: 1235532 - DNA, 25 bp, Homo sapien
tattcacgtgcctgatggtaggcga

SEQ ID NO: 1235533 - DNA, 25 bp, Homo sapien
ggtgaaagcctgctagtctgcccac

SEQ ID NO: 1235534 - DNA, 25 bp, Homo sapien
ggactagtcacatgtttctctgcag

SEQ ID NO: 1235535 - DNA, 25 bp, Homo sapien
tgatagacaaacaagcccttcagag

SEQ ID NO: 1235536 - DNA, 25 bp, Homo sapien
gacggacagtagctaagggatccat

SEQ ID NO: 1235537 - DNA, 25 bp, Homo sapien
gactgtgattagaaagcccggtgga

SEQ ID NO: 1235538 - DNA, 25 bp, Homo sapien
gacactgccaggtgttcaaaaacgg

SEQ ID NO: 1235539 - DNA, 25 bp, Homo sapien
gaggcttccaaacaggagagaagaa

SEQ ID NO: 1235540 - DNA, 25 bp, Homo sapien
cttgaagatacagaggcttccaaac

SEQ ID NO: 1235541 - DNA, 25 bp, Homo sapien
ggagagaagaaggcaaaggcctggg

SEQ ID NO: 1235542 - DNA, 25 bp, Homo sapien
gagaagaaggcaaaggcctgggttg

SEQ ID NO: 1235543 - DNA, 25 bp, Homo sapien
cctgcatctggattgtgtcactaaa

SEQ ID NO: 1235544 - DNA, 25 bp, Homo sapien
gggcagctccactctgacgcagctt

SEQ ID NO: 1235545 - DNA, 25 bp, Homo sapien
cactaaacatgcgacataaattgct

SEQ ID NO: 1235546 - DNA, 25 bp, Homo sapien
ataagcttccgcctcccatttgtgg

SEQ ID NO: 1235547 - DNA, 25 bp, Homo sapien
gagtggccagctggaactatttgga

SEQ ID NO: 1235548 - DNA, 25 bp, Homo sapien
ccacacatcagttacccggaaaggg

SEQ ID NO: 1235549 - DNA, 25 bp, Homo sapien
gagaaccctaattttcagctggctg

SEQ ID NO: 1235550 - DNA, 25 bp, Homo sapien
gagaagttaactctggccctggtct

SEQ ID NO: 1235551 - DNA, 25 bp, Homo sapien
gacacaggtgggattgtatcactaa

SEQ ID NO: 1235552 - DNA, 25 bp, Homo sapien
gggcacatgacttactctctcggag

SEQ ID NO: 1235553 - DNA, 25 bp, Homo sapien
tgctctgggctgcatgcgattctgc

SEQ ID NO: 1235554 - DNA, 25 bp, Homo sapien
cataatcaccctattactcctgagg

SEQ ID NO: 1235555 - DNA, 25 bp, Homo sapien
tgacggcatcatttccaagcacagg

SEQ ID NO: 1235556 - DNA, 25 bp, Homo sapien
tgggcccacgttagctctcgatgag

SEQ ID NO: 1235557 - DNA, 25 bp, Homo sapien
tgtattttaaagagccacgctggtg

SEQ ID NO: 1235558 - DNA, 25 bp, Homo sapien
cacatacaaggtcatggtctctggg

SEQ ID NO: 1235559 - DNA, 25 bp, Homo sapien
tgctgagcccattcaccctaggagt

SEQ ID NO: 1235560 - DNA, 25 bp, Homo sapien
ggaaataccctcatggctggactgg

SEQ ID NO: 1235561 - DNA, 25 bp, Homo sapien
ggcaagtctggaagcgtccctacgt

SEQ ID NO: 1235562 - DNA, 25 bp, Homo sapien
cagtccttgaagagtgtgtccccac

SEQ ID NO: 1235563 - DNA, 25 bp, Homo sapien
ggaaggcgcgttgtcccagagatct

SEQ ID NO: 1235564 - DNA, 25 bp, Homo sapien
tgaaagaactcaagacccgccttgg

SEQ ID NO: 1235565 - DNA, 25 bp, Homo sapien
tccgattaggaacacgggaggacac

SEQ ID NO: 1235566 - DNA, 25 bp, Homo sapien
gaggacagccttcataacggaaagc

SEQ ID NO: 1235567 - DNA, 25 bp, Homo sapien
ctgagaagccccatgggacataaga

SEQ ID NO: 1235568 - DNA, 25 bp, Homo sapien
gacataagagactggatgctaggag

SEQ ID NO: 1235569 - DNA, 25 bp, Homo sapien
gagtcgtggctccaccattacccag

SEQ ID NO: 1235570 - DNA, 25 bp, Homo sapien
aagcatctttggtcagggattcaag

SEQ ID NO: 1235571 - DNA, 25 bp, Homo sapien
cttgatcatgggcatgaaggaatat

SEQ ID NO: 1235572 - DNA, 25 bp, Homo sapien
ctggttcttgatcatgggcatgaag

SEQ ID NO: 1235573 - DNA, 25 bp, Homo sapien
catgggcatgaaggaatatccaggc

SEQ ID NO: 1235574 - DNA, 25 bp, Homo sapien
gagacagtctatctcctcttgtccc

SEQ ID NO: 1235575 - DNA, 25 bp, Homo sapien
tatcatctcttcctatacggaccag

SEQ ID NO: 1235576 - DNA, 25 bp, Homo sapien
gaaggtctgcatgacccagctgaca

SEQ ID NO: 1235577 - DNA, 25 bp, Homo sapien
gggcataattcagctcctagcagcc

SEQ ID NO: 1235578 - DNA, 25 bp, Homo sapien
atgacccagctgacagcaaacctct

SEQ ID NO: 1235579 - DNA, 25 bp, Homo sapien
agccctggccctgtaagatggactc

SEQ ID NO: 1235580 - DNA, 25 bp, Homo sapien
catgggaccttggagaaaactgaac

SEQ ID NO: 1235581 - DNA, 25 bp, Homo sapien
cagtgcatgtgccagcaggcaggac

SEQ ID NO: 1235582 - DNA, 25 bp, Homo sapien
tgcacagaacactaagaccgaaagg

SEQ ID NO: 1235583 - DNA, 25 bp, Homo sapien
gatgatcgactttgggaaaaccacg

SEQ ID NO: 1235584 - DNA, 25 bp, Homo sapien
gaccctcctgaactgcactacaaga

SEQ ID NO: 1235585 - DNA, 25 bp, Homo sapien
tgcagcatgacgtcccctggcagga

SEQ ID NO: 1235586 - DNA, 25 bp, Homo sapien
aataacctcgtcgacatcctgaccg

SEQ ID NO: 1235587 - DNA, 25 bp, Homo sapien
ggtcctgccagtcctgtcgaaggca

SEQ ID NO: 1235588 - DNA, 25 bp, Homo sapien
cactgttgggactcctggtggagca

SEQ ID NO: 1235589 - DNA, 25 bp, Homo sapien
ctgccccgcccttagctaagaggct

SEQ ID NO: 1235590 - DNA, 25 bp, Homo sapien
cctgtcgaaggcagccacagtgagg

SEQ ID NO: 1235591 - DNA, 25 bp, Homo sapien
gaaagacgtgccttgactcagggca

SEQ ID NO: 1235592 - DNA, 25 bp, Homo sapien
cagcctgcggaaggacatgtaccag

SEQ ID NO: 1235593 - DNA, 25 bp, Homo sapien
tgtgaccaagccacggtacatgcag

SEQ ID NO: 1235594 - DNA, 25 bp, Homo sapien
ccagaagatgatcgaggtggacccc

SEQ ID NO: 1235595 - DNA, 25 bp, Homo sapien
tgcagctgggcgcttcggggcaagg

SEQ ID NO: 1235596 - DNA, 25 bp, Homo sapien
cagctgggcgcttcggggcaaggag

SEQ ID NO: 1235597 - DNA, 25 bp, Homo sapien
gcgcttcggggcaaggagtgggaac

SEQ ID NO: 1235598 - DNA, 25 bp, Homo sapien
tcggggcaaggagtgggaaccacat

SEQ ID NO: 1235599 - DNA, 25 bp, Homo sapien
ggagatcattctgtgtaggccttgg

SEQ ID NO: 1235600 - DNA, 25 bp, Homo sapien
gaggagatcattctgtgtaggcctt

SEQ ID NO: 1235601 - DNA, 25 bp, Homo sapien
tggcccccagggagtagattcccat

SEQ ID NO: 1235602 - DNA, 25 bp, Homo sapien
caggaggagatcattctgtgtaggc

SEQ ID NO: 1235603 - DNA, 25 bp, Homo sapien
ccagtgtacgccgaggtttgcccat

SEQ ID NO: 1235604 - DNA, 25 bp, Homo sapien
tgccgtgcccagtgtacgccgaggt

SEQ ID NO: 1235605 - DNA, 25 bp, Homo sapien
gtgcccagtgtacgccgaggtttgc

SEQ ID NO: 1235606 - DNA, 25 bp, Homo sapien
ccgtgcccagtgtacgccgaggttt

SEQ ID NO: 1235607 - DNA, 25 bp, Homo sapien
tgggcttgtacccagctgccgccaa

SEQ ID NO: 1235608 - DNA, 25 bp, Homo sapien
ctgcctgggcttgtacccagctgcc

SEQ ID NO: 1235609 - DNA, 25 bp, Homo sapien
tgcctgggcttgtacccagctgccg

SEQ ID NO: 1235610 - DNA, 25 bp, Homo sapien
cctgggcttgtacccagctgccgcc

SEQ ID NO: 1235611 - DNA, 25 bp, Homo sapien
tggaggatgttcggtgccatccagc

SEQ ID NO: 1235612 - DNA, 25 bp, Homo sapien
gaagaacctcgtgcctggtgagcag

SEQ ID NO: 1235613 - DNA, 25 bp, Homo sapien
cgctcatgggttccataaagggcgg

SEQ ID NO: 1235614 - DNA, 25 bp, Homo sapien
tggtgagcagcgctgtggaggatgt

SEQ ID NO: 1235615 - DNA, 25 bp, Homo sapien
cgcagggtcctcttatcagccagat

SEQ ID NO: 1235616 - DNA, 25 bp, Homo sapien
cctgggcccttagcatgtgctgggt

SEQ ID NO: 1235617 - DNA, 25 bp, Homo sapien
gaacataaagcagtgtgagccttgg

SEQ ID NO: 1235618 - DNA, 25 bp, Homo sapien
tattggattcctgccggctgtgcag

SEQ ID NO: 1235619 - DNA, 25 bp, Homo sapien
ctgatgagtcttgctcatacttggg

SEQ ID NO: 1235620 - DNA, 25 bp, Homo sapien
tgcatgactgctgaaccgagacaca

SEQ ID NO: 1235621 - DNA, 25 bp, Homo sapien
tgtgcttccagaggtctgcacgtga

SEQ ID NO: 1235622 - DNA, 25 bp, Homo sapien
cctgagagctgatgagtcttgctca

SEQ ID NO: 1235623 - DNA, 25 bp, Homo sapien
cagcctctacggatgtcgatgctct

SEQ ID NO: 1235624 - DNA, 25 bp, Homo sapien
tctacggatgtcgatgctctgtttc

SEQ ID NO: 1235625 - DNA, 25 bp, Homo sapien
gcctctacggatgtcgatgctctgt

SEQ ID NO: 1235626 - DNA, 25 bp, Homo sapien
cggatgtcgatgctctgtttcttgg

SEQ ID NO: 1235627 - DNA, 25 bp, Homo sapien
actcaggtttacagggagcctctgc

SEQ ID NO: 1235628 - DNA, 25 bp, Homo sapien
ggcctttcctcctgactcaggttta

SEQ ID NO: 1235629 - DNA, 25 bp, Homo sapien
ccacggcctttcctcctgactcagg

SEQ ID NO: 1235630 - DNA, 25 bp, Homo sapien
tcctgactcaggtttacagggagcc

SEQ ID NO: 1235631 - DNA, 25 bp, Homo sapien
caaccatcccgggttctaaattgtg

SEQ ID NO: 1235632 - DNA, 25 bp, Homo sapien
gtggctgcaagtcccaaacgccaac

SEQ ID NO: 1235633 - DNA, 25 bp, Homo sapien
catcccgggttctaaattgtgttgt

SEQ ID NO: 1235634 - DNA, 25 bp, Homo sapien
tgggccgtggctgcaagtcccaaac

SEQ ID NO: 1235635 - DNA, 25 bp, Homo sapien
tccacatgtggccttaaggagggct

SEQ ID NO: 1235636 - DNA, 25 bp, Homo sapien
tgagaagcccattggtagccctctg

SEQ ID NO: 1235637 - DNA, 25 bp, Homo sapien
tctgcggtcatgtctgtcatttctt

SEQ ID NO: 1235638 - DNA, 25 bp, Homo sapien
ggcagatataggactgatgccttta

SEQ ID NO: 1235639 - DNA, 25 bp, Homo sapien
tgagtgccactgataccgaatcctg

SEQ ID NO: 1235640 - DNA, 25 bp, Homo sapien
ttaaatcagaatcgccagctcatgg

SEQ ID NO: 1235641 - DNA, 25 bp, Homo sapien
taaatagaaactcccaagtggtctg

SEQ ID NO: 1235642 - DNA, 25 bp, Homo sapien
gcttaggaacacatcgtaccacagg

SEQ ID NO: 1235643 - DNA, 25 bp, Homo sapien
gttggtctatcttccctcaaagctg

SEQ ID NO: 1235644 - DNA, 25 bp, Homo sapien
tcatcatgatcaatagacaaagccg

SEQ ID NO: 1235645 - DNA, 25 bp, Homo sapien
gaattttgtgtatatgatgccagca

SEQ ID NO: 1235646 - DNA, 25 bp, Homo sapien
gacaaagccgcatttgttggtctat

SEQ ID NO: 1235647 - DNA, 25 bp, Homo sapien
aaaggcatcatacagcagccagatg

SEQ ID NO: 1235648 - DNA, 25 bp, Homo sapien
caaaaggcatcatacagcagccaga

SEQ ID NO: 1235649 - DNA, 25 bp, Homo sapien
cacaaaaggcatcatacagcagcca

SEQ ID NO: 1235650 - DNA, 25 bp, Homo sapien
aggcatcatacagcagccagatgtt

SEQ ID NO: 1235651 - DNA, 25 bp, Homo sapien
ggatccctttgaacgcttggattaa

SEQ ID NO: 1235652 - DNA, 25 bp, Homo sapien
catgcaagattgacactaagatggc

SEQ ID NO: 1235653 - DNA, 25 bp, Homo sapien
aaccctgtttttgcaccgtgctgta

SEQ ID NO: 1235654 - DNA, 25 bp, Homo sapien
gacctgctggtagtggcttttcttc

SEQ ID NO: 1235655 - DNA, 25 bp, Homo sapien
acggctcctgcctctgtcatctgaa

SEQ ID NO: 1235656 - DNA, 25 bp, Homo sapien
ctgcctctgtcatctgaagcctcat

SEQ ID NO: 1235657 - DNA, 25 bp, Homo sapien
aggccccaccccagcacggctcctg

SEQ ID NO: 1235658 - DNA, 25 bp, Homo sapien
tgtgcatgcagagtccccccagcca

SEQ ID NO: 1235659 - DNA, 25 bp, Homo sapien
taggagccagatgttgagattttgt

SEQ ID NO: 1235660 - DNA, 25 bp, Homo sapien
tattaccatcacacttgaagcagct

SEQ ID NO: 1235661 - DNA, 25 bp, Homo sapien
ctgaaagctgtggacttaggagcca

SEQ ID NO: 1235662 - DNA, 25 bp, Homo sapien
tttgaggcaaaagttcccaggccca

SEQ ID NO: 1235663 - DNA, 25 bp, Homo sapien
tgccttgctccctgagcagccgaac

SEQ ID NO: 1235664 - DNA, 25 bp, Homo sapien
gcctgccttgctccctgagcagccg

SEQ ID NO: 1235665 - DNA, 25 bp, Homo sapien
ctgccttgctccctgagcagccgaa

SEQ ID NO: 1235666 - DNA, 25 bp, Homo sapien
atgcctgccttgctccctgagcagc

SEQ ID NO: 1235667 - DNA, 25 bp, Homo sapien
tggaggacagagcacccaagccacg

SEQ ID NO: 1235668 - DNA, 25 bp, Homo sapien
gaggacagagcacccaagccacggc

SEQ ID NO: 1235669 - DNA, 25 bp, Homo sapien
acagagcacccaagccacggctcac

SEQ ID NO: 1235670 - DNA, 25 bp, Homo sapien
ggacagagcacccaagccacggctc

SEQ ID NO: 1235671 - DNA, 25 bp, Homo sapien
ggctcttgtaatgtgctaccttcaa

SEQ ID NO: 1235672 - DNA, 25 bp, Homo sapien
agttgaccagaagtggctcttgtaa

SEQ ID NO: 1235673 - DNA, 25 bp, Homo sapien
ttgaccagaagtggctcttgtaatg

SEQ ID NO: 1235674 - DNA, 25 bp, Homo sapien
cgaagttgaccagaagtggctcttg

SEQ ID NO: 1235675 - DNA, 25 bp, Homo sapien
actattcccaacagaaactgcagtc

SEQ ID NO: 1235676 - DNA, 25 bp, Homo sapien
tgcccatcatcgctcgacagcagtt

SEQ ID NO: 1235677 - DNA, 25 bp, Homo sapien
taggcaggggttttcctaatatctg

SEQ ID NO: 1235678 - DNA, 25 bp, Homo sapien
agagctgcccatcatcgctcgacag

SEQ ID NO: 1235679 - DNA, 25 bp, Homo sapien
atcgctcgacagcagtttagaccag

SEQ ID NO: 1235680 - DNA, 25 bp, Homo sapien
ctgacctctgacacccatctctcca

SEQ ID NO: 1235681 - DNA, 25 bp, Homo sapien
cttgctgatgccagggctgtgtctg

SEQ ID NO: 1235682 - DNA, 25 bp, Homo sapien
catctctccagggatgatgagaagg

SEQ ID NO: 1235683 - DNA, 25 bp, Homo sapien
ggaaccagggccttccttgctgatg

SEQ ID NO: 1235684 - DNA, 25 bp, Homo sapien
ccagagatggtttagttggtttagt

SEQ ID NO: 1235685 - DNA, 25 bp, Homo sapien
ttccagagatggtttagttggttta

SEQ ID NO: 1235686 - DNA, 25 bp, Homo sapien
tccagagatggtttagttggtttag

SEQ ID NO: 1235687 - DNA, 25 bp, Homo sapien
tttccctcgatagggtcagtgtgga

SEQ ID NO: 1235688 - DNA, 25 bp, Homo sapien
gattttccctcgatagggtcagtgt

SEQ ID NO: 1235689 - DNA, 25 bp, Homo sapien
ctcagattttccctcgatagggtca

SEQ ID NO: 1235690 - DNA, 25 bp, Homo sapien
tccctcgatagggtcagtgtggatt

SEQ ID NO: 1235691 - DNA, 25 bp, Homo sapien
acaaatcgagtgagaaatggaggca

SEQ ID NO: 1235692 - DNA, 25 bp, Homo sapien
ggtgcaggctttcacaccccgggtg

SEQ ID NO: 1235693 - DNA, 25 bp, Homo sapien
cggcgccgtccgttcattgtaaaca

SEQ ID NO: 1235694 - DNA, 25 bp, Homo sapien
ccccgggtgctagcactcggtcttt

SEQ ID NO: 1235695 - DNA, 25 bp, Homo sapien
cactgggccagacacacccacggca

SEQ ID NO: 1235696 - DNA, 25 bp, Homo sapien
ccacggcagcccagacaggcagccc

SEQ ID NO: 1235697 - DNA, 25 bp, Homo sapien
actgggccagacacacccacggcag

SEQ ID NO: 1235698 - DNA, 25 bp, Homo sapien
agcccagacaggcagcccagggcag

SEQ ID NO: 1235699 - DNA, 25 bp, Homo sapien
ccaccggggagaacatttcctgaag

SEQ ID NO: 1235700 - DNA, 25 bp, Homo sapien
cggggagaacatttcctgaagccct

SEQ ID NO: 1235701 - DNA, 25 bp, Homo sapien
caccggggagaacatttcctgaagc

SEQ ID NO: 1235702 - DNA, 25 bp, Homo sapien
tggacctcacgagggcctgccagtt

SEQ ID NO: 1235703 - DNA, 25 bp, Homo sapien
ggagccagatggctatggacctcac

SEQ ID NO: 1235704 - DNA, 25 bp, Homo sapien
cagatggctatggacctcacgaggg

SEQ ID NO: 1235705 - DNA, 25 bp, Homo sapien
tggctatggacctcacgagggcctg

SEQ ID NO: 1235706 - DNA, 25 bp, Homo sapien
cacgtatcctaggatcaggactgtg

SEQ ID NO: 1235707 - DNA, 25 bp, Homo sapien
tatcctaggatcaggactgtgcctg

SEQ ID NO: 1235708 - DNA, 25 bp, Homo sapien
ccttcacgtatcctaggatcaggac

SEQ ID NO: 1235709 - DNA, 25 bp, Homo sapien
cgtatcctaggatcaggactgtgcc

SEQ ID NO: 1235710 - DNA, 25 bp, Homo sapien
tgcctggccgtagtggatctaaaac

SEQ ID NO: 1235711 - DNA, 25 bp, Homo sapien
gaaattcctccagaccacgactctg

SEQ ID NO: 1235712 - DNA, 25 bp, Homo sapien
gagcattctccttgttagaaattcc

SEQ ID NO: 1235713 - DNA, 25 bp, Homo sapien
gatctaaaacgggatgacaccggaa

SEQ ID NO: 1235714 - DNA, 25 bp, Homo sapien
gggtagttgttcaggacactgattg

SEQ ID NO: 1235715 - DNA, 25 bp, Homo sapien
tagttgttcaggacactgattgtta

SEQ ID NO: 1235716 - DNA, 25 bp, Homo sapien
tgttcaggacactgattgttatctg

SEQ ID NO: 1235717 - DNA, 25 bp, Homo sapien
tcaggacactgattgttatctgaac

SEQ ID NO: 1235718 - DNA, 25 bp, Homo sapien
taatgatgaagggtaacggccggcc

SEQ ID NO: 1235719 - DNA, 25 bp, Homo sapien
tcagcctgccgcgagaaggatttgg

SEQ ID NO: 1235720 - DNA, 25 bp, Homo sapien
tgggcaattacaagggaggtcactg

SEQ ID NO: 1235721 - DNA, 25 bp, Homo sapien
gaactacagggagcgttcagcctgc

SEQ ID NO: 1235722 - DNA, 25 bp, Homo sapien
atcaagattatttccgttgacctgg

SEQ ID NO: 1235723 - DNA, 25 bp, Homo sapien
ggcatcaagattatttccgttgacc

SEQ ID NO: 1235724 - DNA, 25 bp, Homo sapien
catcaagattatttccgttgacctg

SEQ ID NO: 1235725 - DNA, 25 bp, Homo sapien
gcatcaagattatttccgttgacct

SEQ ID NO: 1235726 - DNA, 25 bp, Homo sapien
ggtatctcttcaggccactagtcaa

SEQ ID NO: 1235727 - DNA, 25 bp, Homo sapien
gaaattccagtctacacatggctag

SEQ ID NO: 1235728 - DNA, 25 bp, Homo sapien
caaggtcaaccacgacacgtttgca

SEQ ID NO: 1235729 - DNA, 25 bp, Homo sapien
taagctccttactcgcctttgcaga

SEQ ID NO: 1235730 - DNA, 25 bp, Homo sapien
caaggacacactcatgggctctgct

SEQ ID NO: 1235731 - DNA, 25 bp, Homo sapien
gtgggtttccggcactgaggccaaa

SEQ ID NO: 1235732 - DNA, 25 bp, Homo sapien
tctaaagcatgttgtgatcgcagcc

SEQ ID NO: 1235733 - DNA, 25 bp, Homo sapien
gactagctaaagttctgccagacag

SEQ ID NO: 1235734 - DNA, 25 bp, Homo sapien
aaagtgggcatgtttgaggcgcaca

SEQ ID NO: 1235735 - DNA, 25 bp, Homo sapien
tatgctcctcgcaggtgaagaaagg

SEQ ID NO: 1235736 - DNA, 25 bp, Homo sapien
gcgagagttacatccactgggccac

SEQ ID NO: 1235737 - DNA, 25 bp, Homo sapien
gagctagcttaacgatggccacgga

SEQ ID NO: 1235738 - DNA, 25 bp, Homo sapien
gggacccagtactatggctgtgtac

SEQ ID NO: 1235739 - DNA, 25 bp, Homo sapien
ttgtatctccacagccgcacggttg

SEQ ID NO: 1235740 - DNA, 25 bp, Homo sapien
cgggcagcgcgggacccagtactat

SEQ ID NO: 1235741 - DNA, 25 bp, Homo sapien
cagccgcacggttgtttatggagct

SEQ ID NO: 1235742 - DNA, 25 bp, Homo sapien
gaagggacctcataaagcgcatcgc

SEQ ID NO: 1235743 - DNA, 25 bp, Homo sapien
agaacgtgtagaacctcggtgcgcc

SEQ ID NO: 1235744 - DNA, 25 bp, Homo sapien
cgcacacagcatacttaggagccaa

SEQ ID NO: 1235745 - DNA, 25 bp, Homo sapien
ctgaaaaatgcttcggctgcggccc

SEQ ID NO: 1235746 - DNA, 25 bp, Homo sapien
catgtagtctacacaggacctgaga

SEQ ID NO: 1235747 - DNA, 25 bp, Homo sapien
caaacactgaagtagcccggagcag

SEQ ID NO: 1235748 - DNA, 25 bp, Homo sapien
tatctccacggtcgaaaagggcgtg

SEQ ID NO: 1235749 - DNA, 25 bp, Homo sapien
gaaactgcaggtaagtttggcggcc

SEQ ID NO: 1235750 - DNA, 25 bp, Homo sapien
caccgcaacccggcctattccattt

SEQ ID NO: 1235751 - DNA, 25 bp, Homo sapien
aaggtgtccctgactatacccctga

SEQ ID NO: 1235752 - DNA, 25 bp, Homo sapien
atagcaatgagcagacgggggctct

SEQ ID NO: 1235753 - DNA, 25 bp, Homo sapien
gactatacccctgatgatgatagca

SEQ ID NO: 1235754 - DNA, 25 bp, Homo sapien
ctgcccaaggtgtccctgactatac

SEQ ID NO: 1235755 - DNA, 25 bp, Homo sapien
gagcaggttctggactcttccatct

SEQ ID NO: 1235756 - DNA, 25 bp, Homo sapien
gacagatgcctgtgggtccatgaag

SEQ ID NO: 1235757 - DNA, 25 bp, Homo sapien
tccatgaagatgacgtgggttgtga

SEQ ID NO: 1235758 - DNA, 25 bp, Homo sapien
gagcatggatcagggctgtggtgac

SEQ ID NO: 1235759 - DNA, 25 bp, Homo sapien
tgaactactacaatgacctgcatcc

SEQ ID NO: 1235760 - DNA, 25 bp, Homo sapien
gacctgcatcctagtgtataataaa

SEQ ID NO: 1235761 - DNA, 25 bp, Homo sapien
gcttcataccaaagttaatgatctg

SEQ ID NO: 1235762 - DNA, 25 bp, Homo sapien
cggatatattcctagatgctgagat

SEQ ID NO: 1235763 - DNA, 25 bp, Homo sapien
agactttagttccaggcagacctga

SEQ ID NO: 1235764 - DNA, 25 bp, Homo sapien
ccacattggaatgagtatagacttt

SEQ ID NO: 1235765 - DNA, 25 bp, Homo sapien
gctgcagaccttgtcttacgttctg

SEQ ID NO: 1235766 - DNA, 25 bp, Homo sapien
tgtgaactccacctaccacattgga

SEQ ID NO: 1235767 - DNA, 25 bp, Homo sapien
tcactgaaatgcatgggatgagtca

SEQ ID NO: 1235768 - DNA, 25 bp, Homo sapien
aaattcagcagaacctacataggca

SEQ ID NO: 1235769 - DNA, 25 bp, Homo sapien
tgtcagacagtagcccgaaggaaga

SEQ ID NO: 1235770 - DNA, 25 bp, Homo sapien
aggttaccctctgtgatgacgcagg

SEQ ID NO: 1235771 - DNA, 25 bp, Homo sapien
gtttcaggaaacatataatcacggc

SEQ ID NO: 1235772 - DNA, 25 bp, Homo sapien
ttcaggaaacatataatcacggcag

SEQ ID NO: 1235773 - DNA, 25 bp, Homo sapien
ggagaagcaagtatgtcttcacatg

SEQ ID NO: 1235774 - DNA, 25 bp, Homo sapien
aagtttcaggaaacatataatcacg

SEQ ID NO: 1235775 - DNA, 25 bp, Homo sapien
tgtcccttggggtctaattcctgga

SEQ ID NO: 1235776 - DNA, 25 bp, Homo sapien
cttcccagctcagcgagaccacatc

SEQ ID NO: 1235777 - DNA, 25 bp, Homo sapien
acctgtgggtttcccggctctcaag

SEQ ID NO: 1235778 - DNA, 25 bp, Homo sapien
ggctctcaaggatcagccctgtgtc

SEQ ID NO: 1235779 - DNA, 25 bp, Homo sapien
tccagctgggcattagggtacaagt

SEQ ID NO: 1235780 - DNA, 25 bp, Homo sapien
tagttccgactttagactgttcctg

SEQ ID NO: 1235781 - DNA, 25 bp, Homo sapien
taattgccctacacgataatcttga

SEQ ID NO: 1235782 - DNA, 25 bp, Homo sapien
actccacgtcatgggaaggccagca

SEQ ID NO: 1235783 - DNA, 25 bp, Homo sapien
caatgaccaggaatgtgcggtgagc

SEQ ID NO: 1235784 - DNA, 25 bp, Homo sapien
gcccaagggcctatctagatcataa

SEQ ID NO: 1235785 - DNA, 25 bp, Homo sapien
acaacaattccatgtgctcggcaca

SEQ ID NO: 1235786 - DNA, 25 bp, Homo sapien
caaggtcacgtagctggcaatggca

SEQ ID NO: 1235787 - DNA, 25 bp, Homo sapien
ccttgttagtgttcccatccatgaa

SEQ ID NO: 1235788 - DNA, 25 bp, Homo sapien
ccagtaccccatctttgtagctgca

SEQ ID NO: 1235789 - DNA, 25 bp, Homo sapien
tccatgaaatctagagaagcttttg

SEQ ID NO: 1235790 - DNA, 25 bp, Homo sapien
acgaggcttcgctcagttccagcaa

SEQ ID NO: 1235791 - DNA, 25 bp, Homo sapien
gcaggagatcttttgcaaggggcat

SEQ ID NO: 1235792 - DNA, 25 bp, Homo sapien
gaaagggatgcaggagatcttttgc

SEQ ID NO: 1235793 - DNA, 25 bp, Homo sapien
ctggaaagggatgcaggagatcttt

SEQ ID NO: 1235794 - DNA, 25 bp, Homo sapien
aagggatgcaggagatcttttgcaa

SEQ ID NO: 1235795 - DNA, 25 bp, Homo sapien
ttcacatcatgaagtgggaactggg

SEQ ID NO: 1235796 - DNA, 25 bp, Homo sapien
tgtgattttatagcattctgggcgt

SEQ ID NO: 1235797 - DNA, 25 bp, Homo sapien
gcattctgggcgtttcacatcatga

SEQ ID NO: 1235798 - DNA, 25 bp, Homo sapien
aatgtgattttatagcattctgggc

SEQ ID NO: 1235799 - DNA, 25 bp, Homo sapien
aggacccattacctcctcgtgaaga

SEQ ID NO: 1235800 - DNA, 25 bp, Homo sapien
tcaggagagacaggacccattacct

SEQ ID NO: 1235801 - DNA, 25 bp, Homo sapien
cattacctccttgtgaagatcagga

SEQ ID NO: 1235802 - DNA, 25 bp, Homo sapien
cattacctcctcgtgaagatcagga

SEQ ID NO: 1235803 - DNA, 25 bp, Homo sapien
cctccttgtgaagatcaggagagac

SEQ ID NO: 1235804 - DNA, 25 bp, Homo sapien
aagatcaggagagacaggacccatt

SEQ ID NO: 1235805 - DNA, 25 bp, Homo sapien
gatcaggagagacaggacccattac

SEQ ID NO: 1235806 - DNA, 25 bp, Homo sapien
tgaagatcaggagagacaggaccca

SEQ ID NO: 1235807 - DNA, 25 bp, Homo sapien
tcacttgtgaagatcaggagagaca

SEQ ID NO: 1235808 - DNA, 25 bp, Homo sapien
gaaatggcccccttggaagattcag

SEQ ID NO: 1235809 - DNA, 25 bp, Homo sapien
ttgacgagccgcagagcagccatca

SEQ ID NO: 1235810 - DNA, 25 bp, Homo sapien
catcctgtccagttacgggcccttt

SEQ ID NO: 1235811 - DNA, 25 bp, Homo sapien
tacgggccctttgtatagatgagga

SEQ ID NO: 1235812 - DNA, 25 bp, Homo sapien
tttccaccttcaggttcaaagcgtg

SEQ ID NO: 1235813 - DNA, 25 bp, Homo sapien
ggtgatgagaaccaggacacagctg

SEQ ID NO: 1235814 - DNA, 25 bp, Homo sapien
caaagcgtgtctgggtgatgagaac

SEQ ID NO: 1235815 - DNA, 25 bp, Homo sapien
cctttcttctaatgatgaggcagag

SEQ ID NO: 1235816 - DNA, 25 bp, Homo sapien
agcccccatgacgcagggcgtccag

SEQ ID NO: 1235817 - DNA, 25 bp, Homo sapien
ccagcccccatgacgcagggcgtcc

SEQ ID NO: 1235818 - DNA, 25 bp, Homo sapien
cagcccccatgacgcagggcgtcca

SEQ ID NO: 1235819 - DNA, 25 bp, Homo sapien
gcccccatgacgcagggcgtccaga

SEQ ID NO: 1235820 - DNA, 25 bp, Homo sapien
aactccctcatccttctgcactgct

SEQ ID NO: 1235821 - DNA, 25 bp, Homo sapien
tccctcatccttctgcactgctgtg

SEQ ID NO: 1235822 - DNA, 25 bp, Homo sapien
ctagccatgacaactccctcatcct

SEQ ID NO: 1235823 - DNA, 25 bp, Homo sapien
tagccatgacaactccctcatcctt

SEQ ID NO: 1235824 - DNA, 25 bp, Homo sapien
tgccgaaaaccacagccgagtcctc

SEQ ID NO: 1235825 - DNA, 25 bp, Homo sapien
ctgccgaaaaccacagccgagtcct

SEQ ID NO: 1235826 - DNA, 25 bp, Homo sapien
catgggcaggtctgacatttcctca

SEQ ID NO: 1235827 - DNA, 25 bp, Homo sapien
tccaaggttgaaagccccacagcca

SEQ ID NO: 1235828 - DNA, 25 bp, Homo sapien
tctgacatttcctcagaccccagaa

SEQ ID NO: 1235829 - DNA, 25 bp, Homo sapien
tctctcaggtgcttgactgcccact

SEQ ID NO: 1235830 - DNA, 25 bp, Homo sapien
tcagccttcggagccctgtggaagc

SEQ ID NO: 1235831 - DNA, 25 bp, Homo sapien
gaccctcatgcgctgcacagaggca

SEQ ID NO: 1235832 - DNA, 25 bp, Homo sapien
gagggcatcagccttcggagccctg

SEQ ID NO: 1235833 - DNA, 25 bp, Homo sapien
cagaggaccctcatgcgctgcacag

SEQ ID NO: 1235834 - DNA, 25 bp, Homo sapien
tgaggccatcgactgttgatgtgaa

SEQ ID NO: 1235835 - DNA, 25 bp, Homo sapien
aaaaaggctgattagatttctctct

SEQ ID NO: 1235836 - DNA, 25 bp, Homo sapien
ctgaggccatcgactgttgatgtga

SEQ ID NO: 1235837 - DNA, 25 bp, Homo sapien
gtgaaaaaggctgattagatttctc

SEQ ID NO: 1235838 - DNA, 25 bp, Homo sapien
ccctgtgcatgcattgagatgagtt

SEQ ID NO: 1235839 - DNA, 25 bp, Homo sapien
tgcatgcattgagatgagtttcctt

SEQ ID NO: 1235840 - DNA, 25 bp, Homo sapien
tgttccctgtgcatgcattgagatg

SEQ ID NO: 1235841 - DNA, 25 bp, Homo sapien
attgttccctgtgcatgcattgaga

SEQ ID NO: 1235842 - DNA, 25 bp, Homo sapien
ttggcaacacccaccgccaagttca

SEQ ID NO: 1235843 - DNA, 25 bp, Homo sapien
aacacccaccgccaagttcatgttc

SEQ ID NO: 1235844 - DNA, 25 bp, Homo sapien
tgggtgaaacaccccttggcaacac

SEQ ID NO: 1235845 - DNA, 25 bp, Homo sapien
ccaccgccaagttcatgttcatgtt

SEQ ID NO: 1235846 - DNA, 25 bp, Homo sapien
tctctgtattatgggatgatttcat

SEQ ID NO: 1235847 - DNA, 25 bp, Homo sapien
cagcggagtttacgcagctggctga

SEQ ID NO: 1235848 - DNA, 25 bp, Homo sapien
cgcgctccagcggagtttacgcagc

SEQ ID NO: 1235849 - DNA, 25 bp, Homo sapien
gtttacgcagctggctgagcgcccg

SEQ ID NO: 1235850 - DNA, 25 bp, Homo sapien
gagtttacgcagctggctgagcgcc

SEQ ID NO: 1235851 - DNA, 25 bp, Homo sapien
cccggtgctagaggccgaatggact

SEQ ID NO: 1235852 - DNA, 25 bp, Homo sapien
atggactcggcgcaacggaggtctc

SEQ ID NO: 1235853 - DNA, 25 bp, Homo sapien
tgcaccgctcctttaaatgcaccgg

SEQ ID NO: 1235854 - DNA, 25 bp, Homo sapien
tgctaacagaaaccggctctaggct

SEQ ID NO: 1235855 - DNA, 25 bp, Homo sapien
aaagtcactttagctctgtggcctc

SEQ ID NO: 1235856 - DNA, 25 bp, Homo sapien
tcagtaaaattcagaggggggacta

SEQ ID NO: 1235857 - DNA, 25 bp, Homo sapien
agcttctgtctcaggttccttcagc

SEQ ID NO: 1235858 - DNA, 25 bp, Homo sapien
ctgggcgaccttgggaaaagtcact

SEQ ID NO: 1235859 - DNA, 25 bp, Homo sapien
ccaactaaacagtgtccgaaagtca

SEQ ID NO: 1235860 - DNA, 25 bp, Homo sapien
gggaatacttgcagaaatatttgct

SEQ ID NO: 1235861 - DNA, 25 bp, Homo sapien
tgggaatagaacaggtgggaatact

SEQ ID NO: 1235862 - DNA, 25 bp, Homo sapien
caactaaacagtgtccgaaagtcaa

SEQ ID NO: 1235863 - DNA, 25 bp, Homo sapien
agcgctggtttttaacacgtcactt

SEQ ID NO: 1235864 - DNA, 25 bp, Homo sapien
tgaatcccggacacttggtttcttc

SEQ ID NO: 1235865 - DNA, 25 bp, Homo sapien
gccgcagagaggtctgaatcccgga

SEQ ID NO: 1235866 - DNA, 25 bp, Homo sapien
acgtcactttctatggtcacacagc

SEQ ID NO: 1235867 - DNA, 25 bp, Homo sapien
caacatctcagacggggacagaggc

SEQ ID NO: 1235868 - DNA, 25 bp, Homo sapien
tgccaacatctcagacggggacaga

SEQ ID NO: 1235869 - DNA, 25 bp, Homo sapien
caaatctgacagtccctgccaacat

SEQ ID NO: 1235870 - DNA, 25 bp, Homo sapien
gaggctgagtgatcgctgtctgtcc

SEQ ID NO: 1235871 - DNA, 25 bp, Homo sapien
tcaaacgactgccataaaacaagag

SEQ ID NO: 1235872 - DNA, 25 bp, Homo sapien
aatcaaacgactgccataaaacaag

SEQ ID NO: 1235873 - DNA, 25 bp, Homo sapien
caatcaaacgactgccataaaacaa

SEQ ID NO: 1235874 - DNA, 25 bp, Homo sapien
caaacgactgccataaaacaagagg

SEQ ID NO: 1235875 - DNA, 25 bp, Homo sapien
agcacaaggaccttgttccactttc

SEQ ID NO: 1235876 - DNA, 25 bp, Homo sapien
gggctctcagccgacattagggacg

SEQ ID NO: 1235877 - DNA, 25 bp, Homo sapien
cttcttcctcgctgtcagaggccat

SEQ ID NO: 1235878 - DNA, 25 bp, Homo sapien
gccgacattagggacgtccgctcat

SEQ ID NO: 1235879 - DNA, 25 bp, Homo sapien
tcttcctcgctgtcagaggccatga

SEQ ID NO: 1235880 - DNA, 25 bp, Homo sapien
tctgcaggcccaagacttaatggtt

SEQ ID NO: 1235881 - DNA, 25 bp, Homo sapien
aaaccacatcgtgagggccgcagaa

SEQ ID NO: 1235882 - DNA, 25 bp, Homo sapien
taatgcacggatttttggaaccaga

SEQ ID NO: 1235883 - DNA, 25 bp, Homo sapien
gagcagtctatgagctactagggca

SEQ ID NO: 1235884 - DNA, 25 bp, Homo sapien
gggaaccccactacagacatagcgg

SEQ ID NO: 1235885 - DNA, 25 bp, Homo sapien
tgtagaagcgcacagacttgatggt

SEQ ID NO: 1235886 - DNA, 25 bp, Homo sapien
tcgctccgtatttgagggtcagctc

SEQ ID NO: 1235887 - DNA, 25 bp, Homo sapien
cgatcatgcacagagtgacaggcac

SEQ ID NO: 1235888 - DNA, 25 bp, Homo sapien
cacgatgacgctgatcatgatgagg

SEQ ID NO: 1235889 - DNA, 25 bp, Homo sapien
catgatgagggtgttcagcacggag

SEQ ID NO: 1235890 - DNA, 25 bp, Homo sapien
tgtcctcagtgaatggcgtgtagat

SEQ ID NO: 1235891 - DNA, 25 bp, Homo sapien
tagcagcggtacttgtagagcacca

SEQ ID NO: 1235892 - DNA, 25 bp, Homo sapien
gacatgatcaaccagccatggatga

SEQ ID NO: 1235893 - DNA, 25 bp, Homo sapien
gaagacatgatcaaccagccatgga

SEQ ID NO: 1235894 - DNA, 25 bp, Homo sapien
catcagtgaagacatgatcaaccag

SEQ ID NO: 1235895 - DNA, 25 bp, Homo sapien
cagtgaagacatgatcaaccagcca

SEQ ID NO: 1235896 - DNA, 25 bp, Homo sapien
gatcatgatgaggtaggcctgctgc

SEQ ID NO: 1235897 - DNA, 25 bp, Homo sapien
gaagttccagacagtcagcaagagg

SEQ ID NO: 1235898 - DNA, 25 bp, Homo sapien
tgatgaacactagggccatgagcgc

SEQ ID NO: 1235899 - DNA, 25 bp, Homo sapien
ccactctgggaggtacttgatgaac

SEQ ID NO: 1235900 - DNA, 25 bp, Homo sapien
gggcagggaatatgggctcatttct

SEQ ID NO: 1235901 - DNA, 25 bp, Homo sapien
catggtctccgctcatcctcggaat

SEQ ID NO: 1235902 - DNA, 25 bp, Homo sapien
ctcggaatgcgcctggaatgtgctt

SEQ ID NO: 1235903 - DNA, 25 bp, Homo sapien
tacgggctcgaatcctcaactgcat

SEQ ID NO: 1235904 - DNA, 25 bp, Homo sapien
tgcaggcgattctcctctacgggct

SEQ ID NO: 1235905 - DNA, 25 bp, Homo sapien
gagaggaggggtccagcttcgccat

SEQ ID NO: 1235906 - DNA, 25 bp, Homo sapien
ccagcttcgccatgccaaccgtcca

SEQ ID NO: 1235907 - DNA, 25 bp, Homo sapien
gccatgccaaccgtccacaccatgg

SEQ ID NO: 1235908 - DNA, 25 bp, Homo sapien
agaggaggggtccagcttcgccatg

SEQ ID NO: 1235909 - DNA, 25 bp, Homo sapien
tcaagggaggctcaaagacttcggg

SEQ ID NO: 1235910 - DNA, 25 bp, Homo sapien
ggtatgaaggctccccaaaactgtc

SEQ ID NO: 1235911 - DNA, 25 bp, Homo sapien
gacttcggggtatgaaggctcccca

SEQ ID NO: 1235912 - DNA, 25 bp, Homo sapien
tcctcccctgggtagccagtcaagg

SEQ ID NO: 1235913 - DNA, 25 bp, Homo sapien
catttggctggtcctgagttgcatc

SEQ ID NO: 1235914 - DNA, 25 bp, Homo sapien
aaagcgggcagttctgaaactcagg

SEQ ID NO: 1235915 - DNA, 25 bp, Homo sapien
ggactgggtgacttacaacctgggc

SEQ ID NO: 1235916 - DNA, 25 bp, Homo sapien
taaaaccagtgttgggcacttagag

SEQ ID NO: 1235917 - DNA, 25 bp, Homo sapien
agcaggccagcgtggtattccagtc

SEQ ID NO: 1235918 - DNA, 25 bp, Homo sapien
ccaccagcacactgtagaagatgaa

SEQ ID NO: 1235919 - DNA, 25 bp, Homo sapien
cccaccagcacactgtagaagatga

SEQ ID NO: 1235920 - DNA, 25 bp, Homo sapien
agcgtggtattccagtccccgctgc

SEQ ID NO: 1235921 - DNA, 25 bp, Homo sapien
taaaagatgagcccgaacgtgatgg

SEQ ID NO: 1235922 - DNA, 25 bp, Homo sapien
aaagatgagcccgaacgtgatggag

SEQ ID NO: 1235923 - DNA, 25 bp, Homo sapien
gtaaaagatgagcccgaacgtgatg

SEQ ID NO: 1235924 - DNA, 25 bp, Homo sapien
agatgagcccgaacgtgatggagat

SEQ ID NO: 1235925 - DNA, 25 bp, Homo sapien
cagggtgtccatgaacggccgcacc

SEQ ID NO: 1235926 - DNA, 25 bp, Homo sapien
gatgtagagctgatgggaggccagg

SEQ ID NO: 1235927 - DNA, 25 bp, Homo sapien
tcagatgtagagctgatgggaggcc

SEQ ID NO: 1235928 - DNA, 25 bp, Homo sapien
ggtgtccatgaacggccgcaccagg

SEQ ID NO: 1235929 - DNA, 25 bp, Homo sapien
gaggcgctccccaaagcgggagcca

SEQ ID NO: 1235930 - DNA, 25 bp, Homo sapien
ggagccaaagtctggtgatgaaaca

SEQ ID NO: 1235931 - DNA, 25 bp, Homo sapien
aactgcatccaatgaaaattccctg

SEQ ID NO: 1235932 - DNA, 25 bp, Homo sapien
ctagagtgtaaaactatacaactgc

SEQ ID NO: 1235933 - DNA, 25 bp, Homo sapien
tcagttcatctggataaacctgctg

SEQ ID NO: 1235934 - DNA, 25 bp, Homo sapien
catctggataaacctgctgtgcttc

SEQ ID NO: 1235935 - DNA, 25 bp, Homo sapien
tctggataaacctgctgtgcttcct

SEQ ID NO: 1235936 - DNA, 25 bp, Homo sapien
ttcatctggataaacctgctgtgct

SEQ ID NO: 1235937 - DNA, 25 bp, Homo sapien
tgtgactgccgtaacaagaacagga

SEQ ID NO: 1235938 - DNA, 25 bp, Homo sapien
tggacaaagcattgggaacactcct

SEQ ID NO: 1235939 - DNA, 25 bp, Homo sapien
gaacactcctcgtagggaactggct

SEQ ID NO: 1235940 - DNA, 25 bp, Homo sapien
gagcacactctttgcgcatctcagc

SEQ ID NO: 1235941 - DNA, 25 bp, Homo sapien
ggcgagatcattaaaagttccttca

SEQ ID NO: 1235942 - DNA, 25 bp, Homo sapien
tcaacatttacaacggaccaaactc

SEQ ID NO: 1235943 - DNA, 25 bp, Homo sapien
acagggcaaactgcctccatcctgg

SEQ ID NO: 1235944 - DNA, 25 bp, Homo sapien
gctcacagcacaagttatcccaggg

SEQ ID NO: 1235945 - DNA, 25 bp, Homo sapien
cccgctgtggcttccatgacggcaa

SEQ ID NO: 1235946 - DNA, 25 bp, Homo sapien
agcaagctcctgtcaaatgtcaaga

SEQ ID NO: 1235947 - DNA, 25 bp, Homo sapien
taataaagatgcattgtcccggcac

SEQ ID NO: 1235948 - DNA, 25 bp, Homo sapien
tcttgcgagttgtcaccatcaggga

SEQ ID NO: 1235949 - DNA, 25 bp, Homo sapien
tacaaacaggacttcagaacgtggg

SEQ ID NO: 1235950 - DNA, 25 bp, Homo sapien
aatcacctggtgaggcattggcctg

SEQ ID NO: 1235951 - DNA, 25 bp, Homo sapien
tacagaccagcgagaaaggagagac

SEQ ID NO: 1235952 - DNA, 25 bp, Homo sapien
cagtaaacagtgctgggacacctgg

SEQ ID NO: 1235953 - DNA, 25 bp, Homo sapien
tctcagacaggtatggccgtgggac

SEQ ID NO: 1235954 - DNA, 25 bp, Homo sapien
gaaagccacttactgatctcaaagg

SEQ ID NO: 1235955 - DNA, 25 bp, Homo sapien
cagcctaggtcatgaggtgaaagcc

SEQ ID NO: 1235956 - DNA, 25 bp, Homo sapien
tgtgcctgtgaaaggattctagccc

SEQ ID NO: 1235957 - DNA, 25 bp, Homo sapien
tcactctaagccactcgcaggcatt

SEQ ID NO: 1235958 - DNA, 25 bp, Homo sapien
tggatctgcacctcatccttggtca

SEQ ID NO: 1235959 - DNA, 25 bp, Homo sapien
gggtgcacatggatctgcacctcat

SEQ ID NO: 1235960 - DNA, 25 bp, Homo sapien
gcacctcatccttggtcactctaag

SEQ ID NO: 1235961 - DNA, 25 bp, Homo sapien
tctgccgactcaggaaagtttaggg

SEQ ID NO: 1235962 - DNA, 25 bp, Homo sapien
tcaagatctaggcaaacacgttttc

SEQ ID NO: 1235963 - DNA, 25 bp, Homo sapien
gagtaaacacgaccagaaagaacag

SEQ ID NO: 1235964 - DNA, 25 bp, Homo sapien
gaacctctgactgttaagatcttcc

SEQ ID NO: 1235965 - DNA, 25 bp, Homo sapien
aaccagaccctgtgcttagtagaag

SEQ ID NO: 1235966 - DNA, 25 bp, Homo sapien
caggcagatttggtaccagcagtgg

SEQ ID NO: 1235967 - DNA, 25 bp, Homo sapien
ttccctaaggcagtctaagtggctt

SEQ ID NO: 1235968 - DNA, 25 bp, Homo sapien
tatatcaagtggaggccaaatccct

SEQ ID NO: 1235969 - DNA, 25 bp, Homo sapien
tgtcgccatctggagtcgggtgctc

SEQ ID NO: 1235970 - DNA, 25 bp, Homo sapien
tcttggagtcgccacgcacagatgc

SEQ ID NO: 1235971 - DNA, 25 bp, Homo sapien
gccatctggagtcgggtgctctctt

SEQ ID NO: 1235972 - DNA, 25 bp, Homo sapien
gggtgctctcttggagtcgccacgc

SEQ ID NO: 1235973 - DNA, 25 bp, Homo sapien
aggagttcaaatctagcctgggcaa

SEQ ID NO: 1235974 - DNA, 25 bp, Homo sapien
gttcaaatctagcctgggcaataca

SEQ ID NO: 1235975 - DNA, 25 bp, Homo sapien
tcaggccaggagttcaaatctagcc

SEQ ID NO: 1235976 - DNA, 25 bp, Homo sapien
agttcaaatctagcctgggcaatac

SEQ ID NO: 1235977 - DNA, 25 bp, Homo sapien
gctcaagagcgaagatggccaggca

SEQ ID NO: 1235978 - DNA, 25 bp, Homo sapien
caagattgcaccacacatttctcca

SEQ ID NO: 1235979 - DNA, 25 bp, Homo sapien
gacacaggtgctcaagagcgaagat

SEQ ID NO: 1235980 - DNA, 25 bp, Homo sapien
caggtgctcaagagcgaagatggcc

SEQ ID NO: 1235981 - DNA, 25 bp, Homo sapien
tgcgccagaccaccaagaggtcgat

SEQ ID NO: 1235982 - DNA, 25 bp, Homo sapien
tctggacaactcctgtgtacacttg

SEQ ID NO: 1235983 - DNA, 25 bp, Homo sapien
ggagtcaatcccttgtgatatcaca

SEQ ID NO: 1235984 - DNA, 25 bp, Homo sapien
catatcgtatcatgcagcttctgga

SEQ ID NO: 1235985 - DNA, 25 bp, Homo sapien
ggaactggaattggatttcagctca

SEQ ID NO: 1235986 - DNA, 25 bp, Homo sapien
atatttatgtgcaccctggagaaac

SEQ ID NO: 1235987 - DNA, 25 bp, Homo sapien
tacaaggaaggactgtccaacagtc

SEQ ID NO: 1235988 - DNA, 25 bp, Homo sapien
tgggttttgataatgtgtcacttcc

SEQ ID NO: 1235989 - DNA, 25 bp, Homo sapien
actagagctataaaagacaactttg

SEQ ID NO: 1235990 - DNA, 25 bp, Homo sapien
gctttacagcaatactactagagct

SEQ ID NO: 1235991 - DNA, 25 bp, Homo sapien
ttttatagctttacagcaatactac

SEQ ID NO: 1235992 - DNA, 25 bp, Homo sapien
gcaatactactagagctataaaaga

SEQ ID NO: 1235993 - DNA, 25 bp, Homo sapien
ccaggaggagggatcctttcagatg

SEQ ID NO: 1235994 - DNA, 25 bp, Homo sapien
caggtgaagccttcaggttgcaagc

SEQ ID NO: 1235995 - DNA, 25 bp, Homo sapien
attgctgagtaggttttaagtgtcc

SEQ ID NO: 1235996 - DNA, 25 bp, Homo sapien
tcttagcggacttaaggtcctgtgt

SEQ ID NO: 1235997 - DNA, 25 bp, Homo sapien
ggaatctgaaaaagttgaactggta

SEQ ID NO: 1235998 - DNA, 25 bp, Homo sapien
tgaaaaagttgaactggtatgggag

SEQ ID NO: 1235999 - DNA, 25 bp, Homo sapien
tctgaaaaagttgaactggtatggg

SEQ ID NO: 1236000 - DNA, 25 bp, Homo sapien
aaaagttgaactggtatgggaggct

SEQ ID NO: 1236001 - DNA, 25 bp, Homo sapien
gacagacactgcatgatcttactta

SEQ ID NO: 1236002 - DNA, 25 bp, Homo sapien
gaatcaacttaggtgttcatcagtg

SEQ ID NO: 1236003 - DNA, 25 bp, Homo sapien
tccaagagatatcggcactcccaca

SEQ ID NO: 1236004 - DNA, 25 bp, Homo sapien
tgaacctggaggcattatattaagt

SEQ ID NO: 1236005 - DNA, 25 bp, Homo sapien
atgataaagagaagcaccattttgg

SEQ ID NO: 1236006 - DNA, 25 bp, Homo sapien
tgccaaaatgacaattccatttctc

SEQ ID NO: 1236007 - DNA, 25 bp, Homo sapien
tggatctaattatgtaccgctaggg

SEQ ID NO: 1236008 - DNA, 25 bp, Homo sapien
gcaccattttggatctaattatgta

SEQ ID NO: 1236009 - DNA, 25 bp, Homo sapien
tcagatccacaaactctttctccat

SEQ ID NO: 1236010 - DNA, 25 bp, Homo sapien
tggacaagaggagaacagtgggtca

SEQ ID NO: 1236011 - DNA, 25 bp, Homo sapien
cacacaaacacacgtccttatctgg

SEQ ID NO: 1236012 - DNA, 25 bp, Homo sapien
acaaacacacgtccttatctggaca

SEQ ID NO: 1236013 - DNA, 25 bp, Homo sapien
agctggtgtacagcccatggaaatt

SEQ ID NO: 1236014 - DNA, 25 bp, Homo sapien
tggtgtacagcccatggaaatttcc

SEQ ID NO: 1236015 - DNA, 25 bp, Homo sapien
ggtgtacagcccatggaaatttcca

SEQ ID NO: 1236016 - DNA, 25 bp, Homo sapien
caagagctggtgtacagcccatgga

SEQ ID NO: 1236017 - DNA, 25 bp, Homo sapien
acatggcacgccctcaatgactggt

SEQ ID NO: 1236018 - DNA, 25 bp, Homo sapien
gaagctcaggacttctatgcaacgg

SEQ ID NO: 1236019 - DNA, 25 bp, Homo sapien
tccttagacgagttgttgttggctg

SEQ ID NO: 1236020 - DNA, 25 bp, Homo sapien
ggctgtaggaaacaatagctcctct

SEQ ID NO: 1236021 - DNA, 25 bp, Homo sapien
tgtggtcaatttcagtagcccgatt

SEQ ID NO: 1236022 - DNA, 25 bp, Homo sapien
tcaatttcagtagcccgattcgatc

SEQ ID NO: 1236023 - DNA, 25 bp, Homo sapien
ggtcaatttcagtagcccgattcga

SEQ ID NO: 1236024 - DNA, 25 bp, Homo sapien
tggtcaatttcagtagcccgattcg

SEQ ID NO: 1236025 - DNA, 25 bp, Homo sapien
ccctttatcgcaacatgtggcttca

SEQ ID NO: 1236026 - DNA, 25 bp, Homo sapien
tgagcgccaaatacataactgttgc

SEQ ID NO: 1236027 - DNA, 25 bp, Homo sapien
aaagtgccgatttactgagcgccaa

SEQ ID NO: 1236028 - DNA, 25 bp, Homo sapien
gatacaggtacttttcggttcacaa

SEQ ID NO: 1236029 - DNA, 25 bp, Homo sapien
atggagctcgggtgcagccctcggc

SEQ ID NO: 1236030 - DNA, 25 bp, Homo sapien
tgcaggtgcccgcagtcgctgacag

SEQ ID NO: 1236031 - DNA, 25 bp, Homo sapien
agcagcacgcagatttgccccgtca

SEQ ID NO: 1236032 - DNA, 25 bp, Homo sapien
gcgcagccaacacgggatggagctc

SEQ ID NO: 1236033 - DNA, 25 bp, Homo sapien
ctggccaccgcgctgacgcccgcca

SEQ ID NO: 1236034 - DNA, 25 bp, Homo sapien
ggaagctgggatccgcggtcacctt

SEQ ID NO: 1236035 - DNA, 25 bp, Homo sapien
caggaagctgggatccgcggtcacc

SEQ ID NO: 1236036 - DNA, 25 bp, Homo sapien
gggatccgcggtcaccttctagccg

SEQ ID NO: 1236037 - DNA, 25 bp, Homo sapien
ctgggcacgcggcgggccggcgggt

SEQ ID NO: 1236038 - DNA, 25 bp, Homo sapien
gcgggccggcgggtggcagccttac

SEQ ID NO: 1236039 - DNA, 25 bp, Homo sapien
cggcgggccggcgggtggcagcctt

SEQ ID NO: 1236040 - DNA, 25 bp, Homo sapien
ggcacgcggcgggccggcgggtggc

SEQ ID NO: 1236041 - DNA, 25 bp, Homo sapien
agctctggccgcagccagacggcgc

SEQ ID NO: 1236042 - DNA, 25 bp, Homo sapien
cacatgaagagaatgcaagaagggc

SEQ ID NO: 1236043 - DNA, 25 bp, Homo sapien
gaagctgcgctgtcacatgaagaga

SEQ ID NO: 1236044 - DNA, 25 bp, Homo sapien
aggctcgcggccagcgaaactcgcg

SEQ ID NO: 1236045 - DNA, 25 bp, Homo sapien
tgcaactgaggcgcccccactgcgt

SEQ ID NO: 1236046 - DNA, 25 bp, Homo sapien
gcaactgaggcgcccccactgcgtc

SEQ ID NO: 1236047 - DNA, 25 bp, Homo sapien
caactgaggcgcccccactgcgtcc

SEQ ID NO: 1236048 - DNA, 25 bp, Homo sapien
tattggcgaccaaagggcatgggca

SEQ ID NO: 1236049 - DNA, 25 bp, Homo sapien
aaggctctgcacgtggccctcgtct

SEQ ID NO: 1236050 - DNA, 25 bp, Homo sapien
tggctccagccaaggaagtcaaagt

SEQ ID NO: 1236051 - DNA, 25 bp, Homo sapien
ggtctgggagtgaagaacaacatta

SEQ ID NO: 1236052 - DNA, 25 bp, Homo sapien
ccagccgcctgagtcttacagatgc

SEQ ID NO: 1236053 - DNA, 25 bp, Homo sapien
cccagccgcctgagtcttacagatg

SEQ ID NO: 1236054 - DNA, 25 bp, Homo sapien
cagccgcctgagtcttacagatgct

SEQ ID NO: 1236055 - DNA, 25 bp, Homo sapien
tgcataaatttctttgaatccatgc

SEQ ID NO: 1236056 - DNA, 25 bp, Homo sapien
ctgcataaatttctttgaatccatg

SEQ ID NO: 1236057 - DNA, 25 bp, Homo sapien
ccagcttcataatcccgctcatggt

SEQ ID NO: 1236058 - DNA, 25 bp, Homo sapien
agtgatttttacaggagcaaaagcc

SEQ ID NO: 1236059 - DNA, 25 bp, Homo sapien
gctcatggtgggcacacagacccag

SEQ ID NO: 1236060 - DNA, 25 bp, Homo sapien
gagcaggggacgcagtcactgctac

SEQ ID NO: 1236061 - DNA, 25 bp, Homo sapien
tcacacaggtctgtacccacagcct

SEQ ID NO: 1236062 - DNA, 25 bp, Homo sapien
tgctgctccatgagcacgttttggg

SEQ ID NO: 1236063 - DNA, 25 bp, Homo sapien
gaagtgtttgggctctgtgcctcct

SEQ ID NO: 1236064 - DNA, 25 bp, Homo sapien
cctcctgaaggcctccgtgtgcctg

SEQ ID NO: 1236065 - DNA, 25 bp, Homo sapien
gggtctcgcctgtgagtaactgaaa

SEQ ID NO: 1236066 - DNA, 25 bp, Homo sapien
gatggtgtctcccaatatggcagcc

SEQ ID NO: 1236067 - DNA, 25 bp, Homo sapien
atggtgtctcccaatatggcagcca

SEQ ID NO: 1236068 - DNA, 25 bp, Homo sapien
cctgggtcagcttgacaaggccttt

SEQ ID NO: 1236069 - DNA, 25 bp, Homo sapien
tgggtttccacggccgcctgggtca

SEQ ID NO: 1236070 - DNA, 25 bp, Homo sapien
gcttgacaaggcctttagccaccat

SEQ ID NO: 1236071 - DNA, 25 bp, Homo sapien
ccgcctgggtcagcttgacaaggcc

SEQ ID NO: 1236072 - DNA, 25 bp, Homo sapien
tgatcagctcccctccgatgcccaa

SEQ ID NO: 1236073 - DNA, 25 bp, Homo sapien
atcagctcccctccgatgcccaagt

SEQ ID NO: 1236074 - DNA, 25 bp, Homo sapien
gccatgatcagctcccctccgatgc

SEQ ID NO: 1236075 - DNA, 25 bp, Homo sapien
catgatcagctcccctccgatgccc

SEQ ID NO: 1236076 - DNA, 25 bp, Homo sapien
atctgctccacagccgtggactgca

SEQ ID NO: 1236077 - DNA, 25 bp, Homo sapien
ctgcaccttccccaagaacatgcca

SEQ ID NO: 1236078 - DNA, 25 bp, Homo sapien
tgccaatctgctccacagccgtgga

SEQ ID NO: 1236079 - DNA, 25 bp, Homo sapien
gcaccttccccaagaacatgccaat

SEQ ID NO: 1236080 - DNA, 25 bp, Homo sapien
tgggccgccgaagttctcagcaaaa

SEQ ID NO: 1236081 - DNA, 25 bp, Homo sapien
tgagaagtggaactccccttctggg

SEQ ID NO: 1236082 - DNA, 25 bp, Homo sapien
ttctgggccgccgaagttctcagca

SEQ ID NO: 1236083 - DNA, 25 bp, Homo sapien
ctccggctgcatgcgggactgagaa

SEQ ID NO: 1236084 - DNA, 25 bp, Homo sapien
catgacccagggatgggggcgctga

SEQ ID NO: 1236085 - DNA, 25 bp, Homo sapien
cgctgtgggcatgacccagggatgg

SEQ ID NO: 1236086 - DNA, 25 bp, Homo sapien
ggcatgacccagggatgggggcgct

SEQ ID NO: 1236087 - DNA, 25 bp, Homo sapien
ctcgctgtgggcatgacccagggat

SEQ ID NO: 1236088 - DNA, 25 bp, Homo sapien
gaaccttcgctgaaagcccatggca

SEQ ID NO: 1236089 - DNA, 25 bp, Homo sapien
aaagggtccactggccacgtaggca

SEQ ID NO: 1236090 - DNA, 25 bp, Homo sapien
tgccgggccttctcaatgtcctcgg

SEQ ID NO: 1236091 - DNA, 25 bp, Homo sapien
cccggcttctctaaagggtccactg

SEQ ID NO: 1236092 - DNA, 25 bp, Homo sapien
agccggccaatcctcgtcacaggca

SEQ ID NO: 1236093 - DNA, 25 bp, Homo sapien
tggccagccggccaatcctcgtcac

SEQ ID NO: 1236094 - DNA, 25 bp, Homo sapien
gtcacaggcaccttccgctcccggg

SEQ ID NO: 1236095 - DNA, 25 bp, Homo sapien
aggcaccttccgctcccgggcatgc

SEQ ID NO: 1236096 - DNA, 25 bp, Homo sapien
tagggcttcaactccactaacccag

SEQ ID NO: 1236097 - DNA, 25 bp, Homo sapien
caaagcacccaagactagggcttca

SEQ ID NO: 1236098 - DNA, 25 bp, Homo sapien
aatcatagctgtgggcaatcctcca

SEQ ID NO: 1236099 - DNA, 25 bp, Homo sapien
ggctccgtacatcaggcaggtgtca

SEQ ID NO: 1236100 - DNA, 25 bp, Homo sapien
ctgagaccagagcggccgcacgatg

SEQ ID NO: 1236101 - DNA, 25 bp, Homo sapien
gatgagccggcctcggagagccccg

SEQ ID NO: 1236102 - DNA, 25 bp, Homo sapien
accagagcggccgcacgatgagccg

SEQ ID NO: 1236103 - DNA, 25 bp, Homo sapien
ggccgcacgatgagccggcctcgga

SEQ ID NO: 1236104 - DNA, 25 bp, Homo sapien
tttccgggtaggcatgggtgagcag

SEQ ID NO: 1236105 - DNA, 25 bp, Homo sapien
tgtagctggctttccgggtaggcat

SEQ ID NO: 1236106 - DNA, 25 bp, Homo sapien
tggctttccgggtaggcatgggtga

SEQ ID NO: 1236107 - DNA, 25 bp, Homo sapien
ccagctgtagctggctttccgggta

SEQ ID NO: 1236108 - DNA, 25 bp, Homo sapien
cagggccagtattctcttcctttat

SEQ ID NO: 1236109 - DNA, 25 bp, Homo sapien
gggccagtattctcttcctttatac

SEQ ID NO: 1236110 - DNA, 25 bp, Homo sapien
ccagggccagtattctcttccttta

SEQ ID NO: 1236111 - DNA, 25 bp, Homo sapien
agggccagtattctcttcctttata

SEQ ID NO: 1236112 - DNA, 25 bp, Homo sapien
ccctttctgcggggctggcaaacac

SEQ ID NO: 1236113 - DNA, 25 bp, Homo sapien
ttctgcggggctggcaaacactgac

SEQ ID NO: 1236114 - DNA, 25 bp, Homo sapien
ctttctgcggggctggcaaacactg

SEQ ID NO: 1236115 - DNA, 25 bp, Homo sapien
cttgccctttctgcggggctggcaa

SEQ ID NO: 1236116 - DNA, 25 bp, Homo sapien
aacgtcaccccgaccacacagggca

SEQ ID NO: 1236117 - DNA, 25 bp, Homo sapien
cacaaatgggaagacggaccaggga

SEQ ID NO: 1236118 - DNA, 25 bp, Homo sapien
gggaaggacccagcacaaatgggaa

SEQ ID NO: 1236119 - DNA, 25 bp, Homo sapien
agggatggtccacagaccaacgtca

SEQ ID NO: 1236120 - DNA, 25 bp, Homo sapien
aggagggggcgggcactcagtgctc

SEQ ID NO: 1236121 - DNA, 25 bp, Homo sapien
ggaggagggggcgggcactcagtgc

SEQ ID NO: 1236122 - DNA, 25 bp, Homo sapien
aaggaggagggggcgggcactcagt

SEQ ID NO: 1236123 - DNA, 25 bp, Homo sapien
gagggggcgggcactcagtgctcac

SEQ ID NO: 1236124 - DNA, 25 bp, Homo sapien
gggtcctcggagcgcaggctcttct

SEQ ID NO: 1236125 - DNA, 25 bp, Homo sapien
tgccccctaggcctgtggtacttgt

SEQ ID NO: 1236126 - DNA, 25 bp, Homo sapien
tgggcagagcgagtccaagagggct

SEQ ID NO: 1236127 - DNA, 25 bp, Homo sapien
ggccacccccttgccttaggcagca

SEQ ID NO: 1236128 - DNA, 25 bp, Homo sapien
gaggctgagctatgacccatgggca

SEQ ID NO: 1236129 - DNA, 25 bp, Homo sapien
cgggcaagaggggtcaccacggcac

SEQ ID NO: 1236130 - DNA, 25 bp, Homo sapien
gcgggcaagaggggtcaccacggca

SEQ ID NO: 1236131 - DNA, 25 bp, Homo sapien
ggcgggcaagaggggtcaccacggc

SEQ ID NO: 1236132 - DNA, 25 bp, Homo sapien
ctggcccagcttgagtgccgcacca

SEQ ID NO: 1236133 - DNA, 25 bp, Homo sapien
cattggcctcggacaggaaaggact

SEQ ID NO: 1236134 - DNA, 25 bp, Homo sapien
acgcaccttgcagagcgtgcgcacg

SEQ ID NO: 1236135 - DNA, 25 bp, Homo sapien
gcgtgcgcacgatccgctctgcatt

SEQ ID NO: 1236136 - DNA, 25 bp, Homo sapien
ggattaaagtgtgcgcccaggacct

SEQ ID NO: 1236137 - DNA, 25 bp, Homo sapien
gggctttttacactcaacatgcaga

SEQ ID NO: 1236138 - DNA, 25 bp, Homo sapien
ggagaccaggcctattatcttctaa

SEQ ID NO: 1236139 - DNA, 25 bp, Homo sapien
caggagaatgacacagggcgaacct

SEQ ID NO: 1236140 - DNA, 25 bp, Homo sapien
agtggcatgaagtccgcgctctgcc

SEQ ID NO: 1236141 - DNA, 25 bp, Homo sapien
tcttagccaggtgggggttgataaa

SEQ ID NO: 1236142 - DNA, 25 bp, Homo sapien
cgctctgccgcacccgctcgaagat

SEQ ID NO: 1236143 - DNA, 25 bp, Homo sapien
gcacccgctcgaagatcttagccag

SEQ ID NO: 1236144 - DNA, 25 bp, Homo sapien
gggccgaggccacagagagtgggca

SEQ ID NO: 1236145 - DNA, 25 bp, Homo sapien
ggctctgagcatgccctgcctgggc

SEQ ID NO: 1236146 - DNA, 25 bp, Homo sapien
tccacccagtgggggccgaggccac

SEQ ID NO: 1236147 - DNA, 25 bp, Homo sapien
gccaccgggagaagccccaagtctg

SEQ ID NO: 1236148 - DNA, 25 bp, Homo sapien
agtgcacctgcccaatggatgcggc

SEQ ID NO: 1236149 - DNA, 25 bp, Homo sapien
agggccgctcctcgaagtattccaa

SEQ ID NO: 1236150 - DNA, 25 bp, Homo sapien
agtattccaacttgtcccgccagtt

SEQ ID NO: 1236151 - DNA, 25 bp, Homo sapien
ctggatcttcatggccacctcgcgg

SEQ ID NO: 1236152 - DNA, 25 bp, Homo sapien
gggccagaagacaccacatatggcc

SEQ ID NO: 1236153 - DNA, 25 bp, Homo sapien
tcccaagcttctggtgccgtccagg

SEQ ID NO: 1236154 - DNA, 25 bp, Homo sapien
tggagaaccagagctaagacccagc

SEQ ID NO: 1236155 - DNA, 25 bp, Homo sapien
agcaatcacttgtcccctgtccttg

SEQ ID NO: 1236156 - DNA, 25 bp, Homo sapien
gaagcatgttgctcatgttcaacac

SEQ ID NO: 1236157 - DNA, 25 bp, Homo sapien
ggaagcatgttgctcatgttcaaca

SEQ ID NO: 1236158 - DNA, 25 bp, Homo sapien
catgttgctcatgttcaacacggcc

SEQ ID NO: 1236159 - DNA, 25 bp, Homo sapien
agcatgttgctcatgttcaacacgg

SEQ ID NO: 1236160 - DNA, 25 bp, Homo sapien
tcctgcccttgacccaaccacctag

SEQ ID NO: 1236161 - DNA, 25 bp, Homo sapien
tgcccttgacccaaccacctagcct

SEQ ID NO: 1236162 - DNA, 25 bp, Homo sapien
cttgacccaaccacctagcctcaga

SEQ ID NO: 1236163 - DNA, 25 bp, Homo sapien
cccttgacccaaccacctagcctca

SEQ ID NO: 1236164 - DNA, 25 bp, Homo sapien
ctctggtccccagaacccaacacag

SEQ ID NO: 1236165 - DNA, 25 bp, Homo sapien
cagaacccaacacagatgcctgcca

SEQ ID NO: 1236166 - DNA, 25 bp, Homo sapien
cagggaggagggcatcagcgaggaa

SEQ ID NO: 1236167 - DNA, 25 bp, Homo sapien
tctgcagggaggaccccctctggtc

SEQ ID NO: 1236168 - DNA, 25 bp, Homo sapien
tcgctggtagtcacactccagggcc

SEQ ID NO: 1236169 - DNA, 25 bp, Homo sapien
tgaacttgcgggcacaggcggcctc

SEQ ID NO: 1236170 - DNA, 25 bp, Homo sapien
cgcctcagcacgtcgatcaggtgct

SEQ ID NO: 1236171 - DNA, 25 bp, Homo sapien
tcagcacgtcgatcaggtgctcggg

SEQ ID NO: 1236172 - DNA, 25 bp, Homo sapien
ctgctgaacatggtcccttctgcct

SEQ ID NO: 1236173 - DNA, 25 bp, Homo sapien
gctgctgaacatggtcccttctgcc

SEQ ID NO: 1236174 - DNA, 25 bp, Homo sapien
ctgcctccctggtgcaaacacgcaa

SEQ ID NO: 1236175 - DNA, 25 bp, Homo sapien
cctccctggtgcaaacacgcaaggg

SEQ ID NO: 1236176 - DNA, 25 bp, Homo sapien
ggggagggaggtcacgccctagcca

SEQ ID NO: 1236177 - DNA, 25 bp, Homo sapien
gccacaggccctccacaccgtcccc

SEQ ID NO: 1236178 - DNA, 25 bp, Homo sapien
ggagggaggtcacgccctagccaca

SEQ ID NO: 1236179 - DNA, 25 bp, Homo sapien
agggaggtcacgccctagccacagg

SEQ ID NO: 1236180 - DNA, 25 bp, Homo sapien
tcgttccgaatctcctggctgagcc

SEQ ID NO: 1236181 - DNA, 25 bp, Homo sapien
ctcgttccgaatctcctggctgagc

SEQ ID NO: 1236182 - DNA, 25 bp, Homo sapien
tgcatgaagtggaactcgaacagct

SEQ ID NO: 1236183 - DNA, 25 bp, Homo sapien
gtggaactcgaacagctccctcagg

SEQ ID NO: 1236184 - DNA, 25 bp, Homo sapien
tcatagaagaagttggaccagttgg

SEQ ID NO: 1236185 - DNA, 25 bp, Homo sapien
gtctgtttgcatgaagtggaactcg

SEQ ID NO: 1236186 - DNA, 25 bp, Homo sapien
gatctgtcatattcccgcgttgccc

SEQ ID NO: 1236187 - DNA, 25 bp, Homo sapien
ctgaatgtagaggtcggtgaaggat

SEQ ID NO: 1236188 - DNA, 25 bp, Homo sapien
tcggtgaaggatctgtcatattccc

SEQ ID NO: 1236189 - DNA, 25 bp, Homo sapien
tcatattcccgcgttgccccaaaat

SEQ ID NO: 1236190 - DNA, 25 bp, Homo sapien
ctctatggatttcgcccgcacagtc

SEQ ID NO: 1236191 - DNA, 25 bp, Homo sapien
tcgtagccggtgaggaacttcatct

SEQ ID NO: 1236192 - DNA, 25 bp, Homo sapien
cttgacctcgtagccggtgaggaac

SEQ ID NO: 1236193 - DNA, 25 bp, Homo sapien
catctctatggatttcgcccgcaca

SEQ ID NO: 1236194 - DNA, 25 bp, Homo sapien
ataaatggcggcgagacaccagagc

SEQ ID NO: 1236195 - DNA, 25 bp, Homo sapien
caagagaggaaggataaatggcggc

SEQ ID NO: 1236196 - DNA, 25 bp, Homo sapien
atggcggcgagacaccagagccctc

SEQ ID NO: 1236197 - DNA, 25 bp, Homo sapien
gaaggataaatggcggcgagacacc

SEQ ID NO: 1236198 - DNA, 25 bp, Homo sapien
cagtagttgctgtaggcctcctcga

SEQ ID NO: 1236199 - DNA, 25 bp, Homo sapien
agacggtgcctcagcatgacgggaa

SEQ ID NO: 1236200 - DNA, 25 bp, Homo sapien
gatggcatccaagtgggcgtcttcc

SEQ ID NO: 1236201 - DNA, 25 bp, Homo sapien
aagcgggccttcagcttggagcaga

SEQ ID NO: 1236202 - DNA, 25 bp, Homo sapien
cagaaaccgtggaaagcgctggcta

SEQ ID NO: 1236203 - DNA, 25 bp, Homo sapien
gagttaaaaagagcatcaccacgac

SEQ ID NO: 1236204 - DNA, 25 bp, Homo sapien
gcctcgcaggcttaaggagcacttg

SEQ ID NO: 1236205 - DNA, 25 bp, Homo sapien
ttcagctgtcaaaggtgagaaccag

SEQ ID NO: 1236206 - DNA, 25 bp, Homo sapien
catttgccgcctttggccgggatca

SEQ ID NO: 1236207 - DNA, 25 bp, Homo sapien
tgagcagaggtcaaaaccacagacg

SEQ ID NO: 1236208 - DNA, 25 bp, Homo sapien
tcctagggagcacagctttaaggct

SEQ ID NO: 1236209 - DNA, 25 bp, Homo sapien
gactttgccgtagcccatgtctggt

SEQ ID NO: 1236210 - DNA, 25 bp, Homo sapien
ttggccctttagttggatcattgtc

SEQ ID NO: 1236211 - DNA, 25 bp, Homo sapien
gccctttagttggatcattgtcata

SEQ ID NO: 1236212 - DNA, 25 bp, Homo sapien
gatcattgtcatatgacttggtaga

SEQ ID NO: 1236213 - DNA, 25 bp, Homo sapien
gttggatcattgtcatatgacttgg

SEQ ID NO: 1236214 - DNA, 25 bp, Homo sapien
ctgagttgcagtgtttaaggccatc

SEQ ID NO: 1236215 - DNA, 25 bp, Homo sapien
cctgctggggattccattgtaagca

SEQ ID NO: 1236216 - DNA, 25 bp, Homo sapien
tcactgaggtggccaccatgctggc

SEQ ID NO: 1236217 - DNA, 25 bp, Homo sapien
tgctgtctgtgactccacgtctgtg

SEQ ID NO: 1236218 - DNA, 25 bp, Homo sapien
tccctaagtcacagcgaggtgtctg

SEQ ID NO: 1236219 - DNA, 25 bp, Homo sapien
tttattcctgggctaatcctgtccc

SEQ ID NO: 1236220 - DNA, 25 bp, Homo sapien
tctgttttgttgagagtgggcgtgg

SEQ ID NO: 1236221 - DNA, 25 bp, Homo sapien
ccaaggaggagtctgttttgttgag

SEQ ID NO: 1236222 - DNA, 25 bp, Homo sapien
tgcagatcttgggaattaactattt

SEQ ID NO: 1236223 - DNA, 25 bp, Homo sapien
gaaaaatatggtcttaggtgggcac

SEQ ID NO: 1236224 - DNA, 25 bp, Homo sapien
tcctgggatgaacgacttaactatt

SEQ ID NO: 1236225 - DNA, 25 bp, Homo sapien
cactctcatactcatcagtggaata

SEQ ID NO: 1236226 - DNA, 25 bp, Homo sapien
gacccgcaggagttcgcagtatgaa

SEQ ID NO: 1236227 - DNA, 25 bp, Homo sapien
ggcagtcagtagaaacagacccgca

SEQ ID NO: 1236228 - DNA, 25 bp, Homo sapien
gaaaggaggatctaagacatagagg

SEQ ID NO: 1236229 - DNA, 25 bp, Homo sapien
tgaagagtgtttatggcccagaatt

SEQ ID NO: 1236230 - DNA, 25 bp, Homo sapien
gtggcactatctctgctcgttgcaa

SEQ ID NO: 1236231 - DNA, 25 bp, Homo sapien
cagtggcactatctctgctcgttgc

SEQ ID NO: 1236232 - DNA, 25 bp, Homo sapien
gcagtggcactatctctgctcgttg

SEQ ID NO: 1236233 - DNA, 25 bp, Homo sapien
ggcactatctctgctcgttgcaacc

SEQ ID NO: 1236234 - DNA, 25 bp, Homo sapien
gactatatcaggacaccatgccgtt

SEQ ID NO: 1236235 - DNA, 25 bp, Homo sapien
taatgatagctattctgatggccaa

SEQ ID NO: 1236236 - DNA, 25 bp, Homo sapien
catgccgttaatatctgttcagaag

SEQ ID NO: 1236237 - DNA, 25 bp, Homo sapien
tactataaggttaaatcagcagctc

SEQ ID NO: 1236238 - DNA, 25 bp, Homo sapien
gttttcttgtaatgtgaatgtgttg

SEQ ID NO: 1236239 - DNA, 25 bp, Homo sapien
tacttgtgctgggttagaattctag

SEQ ID NO: 1236240 - DNA, 25 bp, Homo sapien
gtgttgtgacaaattcttgatagga

SEQ ID NO: 1236241 - DNA, 25 bp, Homo sapien
tctataataacttccataatatttc

SEQ ID NO: 1236242 - DNA, 25 bp, Homo sapien
aagtctaggagtagcaagtcccatc

SEQ ID NO: 1236243 - DNA, 25 bp, Homo sapien
aagggtcattgctggttggcgtatt

SEQ ID NO: 1236244 - DNA, 25 bp, Homo sapien
ttgccttcaaactggaaggacccta

SEQ ID NO: 1236245 - DNA, 25 bp, Homo sapien
aggaccctattagaagccattttga

SEQ ID NO: 1236246 - DNA, 25 bp, Homo sapien
ggtatagtttcctacaatatcacca

SEQ ID NO: 1236247 - DNA, 25 bp, Homo sapien
taaaatggcatgtactaggcttctc

SEQ ID NO: 1236248 - DNA, 25 bp, Homo sapien
taatggctcagtccgagtttgaaag

SEQ ID NO: 1236249 - DNA, 25 bp, Homo sapien
cggaaaaccagggaagccgacatgg

SEQ ID NO: 1236250 - DNA, 25 bp, Homo sapien
tgcaagtccaaaggctggtgaacct

SEQ ID NO: 1236251 - DNA, 25 bp, Homo sapien
aaacaggagagaaactagtgcttca

SEQ ID NO: 1236252 - DNA, 25 bp, Homo sapien
catgctacccaaaaagtatatgcca

SEQ ID NO: 1236253 - DNA, 25 bp, Homo sapien
tgtgggctaccctgaggcacttcag

SEQ ID NO: 1236254 - DNA, 25 bp, Homo sapien
tatctgcatgtgtttggccaagaga

SEQ ID NO: 1236255 - DNA, 25 bp, Homo sapien
actggtgtgggcatactgtatttta

SEQ ID NO: 1236256 - DNA, 25 bp, Homo sapien
tttgatggtgctagtcttcagtctg

SEQ ID NO: 1236257 - DNA, 25 bp, Homo sapien
tggtgctagtcttcagtctgtaggg

SEQ ID NO: 1236258 - DNA, 25 bp, Homo sapien
aactggtgtgggcatactgtatttt

SEQ ID NO: 1236259 - DNA, 25 bp, Homo sapien
cttttactttggccctcctggcatt

SEQ ID NO: 1236260 - DNA, 25 bp, Homo sapien
tcttttactttggccctcctggcat

SEQ ID NO: 1236261 - DNA, 25 bp, Homo sapien
cctcctggcattcatgggagagtaa

SEQ ID NO: 1236262 - DNA, 25 bp, Homo sapien
cctggcattcatgggagagtaagaa

SEQ ID NO: 1236263 - DNA, 25 bp, Homo sapien
tcaacatttgcctcttgaatcaaga

SEQ ID NO: 1236264 - DNA, 25 bp, Homo sapien
tgcctcttgaatcaagagagagggt

SEQ ID NO: 1236265 - DNA, 25 bp, Homo sapien
catttgcctcttgaatcaagagaga

SEQ ID NO: 1236266 - DNA, 25 bp, Homo sapien
tttccacatactcgtaacttgaact

SEQ ID NO: 1236267 - DNA, 25 bp, Homo sapien
ggtgtcatgttggacccttcagact

SEQ ID NO: 1236268 - DNA, 25 bp, Homo sapien
tggaaatcagcatacacagagaagg

SEQ ID NO: 1236269 - DNA, 25 bp, Homo sapien
tttgattgctggaaatcagcataca

SEQ ID NO: 1236270 - DNA, 25 bp, Homo sapien
ttggtgtcatgttggacccttcaga

SEQ ID NO: 1236271 - DNA, 25 bp, Homo sapien
gacgccctgccacccctgggcgtcc

SEQ ID NO: 1236272 - DNA, 25 bp, Homo sapien
ggacgcccaggggtggcagggcgtc

SEQ ID NO: 1236273 - DNA, 25 bp, Homo sapien
ttgaggaagtgtcatcagtatttca

SEQ ID NO: 1236274 - DNA, 25 bp, Homo sapien
tccaagagctttgggttatttgtgt

SEQ ID NO: 1236275 - DNA, 25 bp, Homo sapien
tatctgagaattcctacggaacttt

SEQ ID NO: 1236276 - DNA, 25 bp, Homo sapien
ttcctttggtgcttatctgagaatt

SEQ ID NO: 1236277 - DNA, 25 bp, Homo sapien
ctggcaagcgtgggggctctgagct

SEQ ID NO: 1236278 - DNA, 25 bp, Homo sapien
ggacaactgcttttgagggcctcat

SEQ ID NO: 1236279 - DNA, 25 bp, Homo sapien
ttccaggggccctgggacaactgct

SEQ ID NO: 1236280 - DNA, 25 bp, Homo sapien
agctggagactggcaagcgtggggg

SEQ ID NO: 1236281 - DNA, 25 bp, Homo sapien
tgtgcagaggttcaggactcctgag

SEQ ID NO: 1236282 - DNA, 25 bp, Homo sapien
ggacatgtgcagaggttcaggactc

SEQ ID NO: 1236283 - DNA, 25 bp, Homo sapien
gaggttcaggactcctgagtctttg

SEQ ID NO: 1236284 - DNA, 25 bp, Homo sapien
ttcctgattgactgctctggtttta

SEQ ID NO: 1236285 - DNA, 25 bp, Homo sapien
cgctggagaaattgccgctgatgca

SEQ ID NO: 1236286 - DNA, 25 bp, Homo sapien
cacgagcgaccaccgacatggagtg

SEQ ID NO: 1236287 - DNA, 25 bp, Homo sapien
ccggaatccgttgaaaataggactg

SEQ ID NO: 1236288 - DNA, 25 bp, Homo sapien
tccgggcaagacttggcgtgctccg

SEQ ID NO: 1236289 - DNA, 25 bp, Homo sapien
agaaaaagaaccagtcagaatcttg

SEQ ID NO: 1236290 - DNA, 25 bp, Homo sapien
gaaaaagaaccagtcagaatcttgg

SEQ ID NO: 1236291 - DNA, 25 bp, Homo sapien
ccagaaaaagaaccagtcagaatct

SEQ ID NO: 1236292 - DNA, 25 bp, Homo sapien
cagaaaaagaaccagtcagaatctt

SEQ ID NO: 1236293 - DNA, 25 bp, Homo sapien
caaagatgagggtctaggtcacccc

SEQ ID NO: 1236294 - DNA, 25 bp, Homo sapien
tgatagccaagggtgaagggactct

SEQ ID NO: 1236295 - DNA, 25 bp, Homo sapien
tataatatttggcacccgggacatc

SEQ ID NO: 1236296 - DNA, 25 bp, Homo sapien
taagccaccgaaaccaacagagatg

SEQ ID NO: 1236297 - DNA, 25 bp, Homo sapien
tccaagcctgtctttacatgatgtt

SEQ ID NO: 1236298 - DNA, 25 bp, Homo sapien
cactccaagcctgtctttacatgat

SEQ ID NO: 1236299 - DNA, 25 bp, Homo sapien
actccaagcctgtctttacatgatg

SEQ ID NO: 1236300 - DNA, 25 bp, Homo sapien
accactccaagcctgtctttacatg

SEQ ID NO: 1236301 - DNA, 25 bp, Homo sapien
aaatctgatgccgaccaacaggaaa

SEQ ID NO: 1236302 - DNA, 25 bp, Homo sapien
cacaaatctgatgccgaccaacagg

SEQ ID NO: 1236303 - DNA, 25 bp, Homo sapien
cttcacaaatctgatgccgaccaac

SEQ ID NO: 1236304 - DNA, 25 bp, Homo sapien
tcacaaatctgatgccgaccaacag

SEQ ID NO: 1236305 - DNA, 25 bp, Homo sapien
gatccgccctccgtataggcaggca

SEQ ID NO: 1236306 - DNA, 25 bp, Homo sapien
aggcaccatccaatcttccaggggc

SEQ ID NO: 1236307 - DNA, 25 bp, Homo sapien
tttctagaggagacttgcatgtgag

SEQ ID NO: 1236308 - DNA, 25 bp, Homo sapien
ggaagatccgccctccgtataggca

SEQ ID NO: 1236309 - DNA, 25 bp, Homo sapien
tcaagtccaccaaactcagttgttc

SEQ ID NO: 1236310 - DNA, 25 bp, Homo sapien
gcaggaaatggcctcatcaagtcca

SEQ ID NO: 1236311 - DNA, 25 bp, Homo sapien
ttagcacatagtgggaggatcggta

SEQ ID NO: 1236312 - DNA, 25 bp, Homo sapien
atcggtaagagtgcaggaaatggcc

SEQ ID NO: 1236313 - DNA, 25 bp, Homo sapien
ggttctatggcacacatctactgag

SEQ ID NO: 1236314 - DNA, 25 bp, Homo sapien
cacagatcttccacaatgaatatga

SEQ ID NO: 1236315 - DNA, 25 bp, Homo sapien
tctgagcttgcttgtggttctatgg

SEQ ID NO: 1236316 - DNA, 25 bp, Homo sapien
tatttggtcttcatgcagagaagcc

SEQ ID NO: 1236317 - DNA, 25 bp, Homo sapien
agatccagggggaccccctccagca

SEQ ID NO: 1236318 - DNA, 25 bp, Homo sapien
gatccagggggaccccctccagcat

SEQ ID NO: 1236319 - DNA, 25 bp, Homo sapien
tggagatccagggggaccccctcca

SEQ ID NO: 1236320 - DNA, 25 bp, Homo sapien
gagatccagggggaccccctccagc

SEQ ID NO: 1236321 - DNA, 25 bp, Homo sapien
gctggacaccagcatagatggactg

SEQ ID NO: 1236322 - DNA, 25 bp, Homo sapien
aatctatttttgtgtcggcccaagg

SEQ ID NO: 1236323 - DNA, 25 bp, Homo sapien
tgggaagccctaggaccagctaaga

SEQ ID NO: 1236324 - DNA, 25 bp, Homo sapien
cctagtatccgtgagagtagaaacc

SEQ ID NO: 1236325 - DNA, 25 bp, Homo sapien
actcttcagggatcactagagacat

SEQ ID NO: 1236326 - DNA, 25 bp, Homo sapien
tcgcagaatatgctggaactcttca

SEQ ID NO: 1236327 - DNA, 25 bp, Homo sapien
cgcagaatatgctggaactcttcag

SEQ ID NO: 1236328 - DNA, 25 bp, Homo sapien
ggaactcttcagggatcactagaga

SEQ ID NO: 1236329 - DNA, 25 bp, Homo sapien
ttttttccaccgcccaccgatgctg

SEQ ID NO: 1236330 - DNA, 25 bp, Homo sapien
tttttccaccgcccaccgatgctgg

SEQ ID NO: 1236331 - DNA, 25 bp, Homo sapien
ctggcatggatcctgtataatggtg

SEQ ID NO: 1236332 - DNA, 25 bp, Homo sapien
ctcctgccctcttggtgtggtcaaa

SEQ ID NO: 1236333 - DNA, 25 bp, Homo sapien
tgtggtcaaagtctgctttcctcaa

SEQ ID NO: 1236334 - DNA, 25 bp, Homo sapien
gcatggatcctgtataatggtgatc

SEQ ID NO: 1236335 - DNA, 25 bp, Homo sapien
tcacagaacttgttgtccattggct

SEQ ID NO: 1236336 - DNA, 25 bp, Homo sapien
cacagaacttgttgtccattggctg

SEQ ID NO: 1236337 - DNA, 25 bp, Homo sapien
tgaaacttcttcaatcactccaggt

SEQ ID NO: 1236338 - DNA, 25 bp, Homo sapien
gaaacttcttcaatcactccaggtg

SEQ ID NO: 1236339 - DNA, 25 bp, Homo sapien
tggacacacccgtagtacagccatg

SEQ ID NO: 1236340 - DNA, 25 bp, Homo sapien
acacacccgtagtacagccatggca

SEQ ID NO: 1236341 - DNA, 25 bp, Homo sapien
agatggcagctaaagcctttctttt

SEQ ID NO: 1236342 - DNA, 25 bp, Homo sapien
agactaggcgcacacacgtggtgat

SEQ ID NO: 1236343 - DNA, 25 bp, Homo sapien
ctgagactaggcgcacacacgtggt

SEQ ID NO: 1236344 - DNA, 25 bp, Homo sapien
tcaggggctcttgggtggaccagct

SEQ ID NO: 1236345 - DNA, 25 bp, Homo sapien
attctccatgatacctggaacttca

SEQ ID NO: 1236346 - DNA, 25 bp, Homo sapien
aattctccatgatacctggaacttc

SEQ ID NO: 1236347 - DNA, 25 bp, Homo sapien
aaaattctccatgatacctggaact

SEQ ID NO: 1236348 - DNA, 25 bp, Homo sapien
aaattctccatgatacctggaactt

SEQ ID NO: 1236349 - DNA, 25 bp, Homo sapien
cctaattaactgtaaagaatgaact

SEQ ID NO: 1236350 - DNA, 25 bp, Homo sapien
tagcccctaatctagccttccttcc

SEQ ID NO: 1236351 - DNA, 25 bp, Homo sapien
cacacctagcccctaatctagcctt

SEQ ID NO: 1236352 - DNA, 25 bp, Homo sapien
ggcttcttcggcctaattaactgta

SEQ ID NO: 1236353 - DNA, 25 bp, Homo sapien
cagtgtcttgcccatgcggtgcttc

SEQ ID NO: 1236354 - DNA, 25 bp, Homo sapien
gggacatgcaagaggtcagtgtctt

SEQ ID NO: 1236355 - DNA, 25 bp, Homo sapien
gagctcctgcagcaatactgcttgg

SEQ ID NO: 1236356 - DNA, 25 bp, Homo sapien
tgcagcctgcttatagatctcaaac

SEQ ID NO: 1236357 - DNA, 25 bp, Homo sapien
ctatggggctccttctctcctcgcc

SEQ ID NO: 1236358 - DNA, 25 bp, Homo sapien
gggctccttctctcctcgcctctac

SEQ ID NO: 1236359 - DNA, 25 bp, Homo sapien
atggggctccttctctcctcgcctc

SEQ ID NO: 1236360 - DNA, 25 bp, Homo sapien
ggggctccttctctcctcgcctcta

SEQ ID NO: 1236361 - DNA, 25 bp, Homo sapien
ggcattaggggacatgaaagaggtc

SEQ ID NO: 1236362 - DNA, 25 bp, Homo sapien
cctgcaccggcccttttggggctgg

SEQ ID NO: 1236363 - DNA, 25 bp, Homo sapien
ctggcattaggggacatgaaagagg

SEQ ID NO: 1236364 - DNA, 25 bp, Homo sapien
caccggcccttttggggctggcatt

SEQ ID NO: 1236365 - DNA, 25 bp, Homo sapien
gcgcttctgctcatcgtcactactg

SEQ ID NO: 1236366 - DNA, 25 bp, Homo sapien
atcgtcactactgcctgagtcctca

SEQ ID NO: 1236367 - DNA, 25 bp, Homo sapien
ttctgctcatcgtcactactgcctg

SEQ ID NO: 1236368 - DNA, 25 bp, Homo sapien
tgctcatcgtcactactgcctgagt

SEQ ID NO: 1236369 - DNA, 25 bp, Homo sapien
tgccaacttcctgtgcttgtgctgc

SEQ ID NO: 1236370 - DNA, 25 bp, Homo sapien
tgaaggacacggaagaggtcagcat

SEQ ID NO: 1236371 - DNA, 25 bp, Homo sapien
catctgcaccattctttgtttctgc

SEQ ID NO: 1236372 - DNA, 25 bp, Homo sapien
tcagcatgttacctttggtgtgcct

SEQ ID NO: 1236373 - DNA, 25 bp, Homo sapien
tgcaagaggttagcctgtgacccat

SEQ ID NO: 1236374 - DNA, 25 bp, Homo sapien
cacagtagtgttcccgccgaagtct

SEQ ID NO: 1236375 - DNA, 25 bp, Homo sapien
ccgaagtcttgggtcagcctggttg

SEQ ID NO: 1236376 - DNA, 25 bp, Homo sapien
tgcttggagaatgcagcctcacagt

SEQ ID NO: 1236377 - DNA, 25 bp, Homo sapien
gaattctgtcgatctcctgcactga

SEQ ID NO: 1236378 - DNA, 25 bp, Homo sapien
tttgggacatacaagaggccagcct

SEQ ID NO: 1236379 - DNA, 25 bp, Homo sapien
gcctgttacccatagagcagctctg

SEQ ID NO: 1236380 - DNA, 25 bp, Homo sapien
tgatctcagatttgcagtagtcccc

SEQ ID NO: 1236381 - DNA, 25 bp, Homo sapien
tgccgcttgctcatacatctgaaac

SEQ ID NO: 1236382 - DNA, 25 bp, Homo sapien
tgcaccagctctggttgtgactggt

SEQ ID NO: 1236383 - DNA, 25 bp, Homo sapien
aagacgccaatgcattacccaaggg

SEQ ID NO: 1236384 - DNA, 25 bp, Homo sapien
atctgaaactcacagtagggctcca

SEQ ID NO: 1236385 - DNA, 25 bp, Homo sapien
tcagatctgaggtagagttccactg

SEQ ID NO: 1236386 - DNA, 25 bp, Homo sapien
cagatctgaggtagagttccactga

SEQ ID NO: 1236387 - DNA, 25 bp, Homo sapien
tctcagatctgaggtagagttccac

SEQ ID NO: 1236388 - DNA, 25 bp, Homo sapien
agatctgaggtagagttccactgac

SEQ ID NO: 1236389 - DNA, 25 bp, Homo sapien
taaatgatcagcatattactcttgg

SEQ ID NO: 1236390 - DNA, 25 bp, Homo sapien
cagcatattactcttggggcacttc

SEQ ID NO: 1236391 - DNA, 25 bp, Homo sapien
gatcagcatattactcttggggcac

SEQ ID NO: 1236392 - DNA, 25 bp, Homo sapien
aaatgatcagcatattactcttggg

SEQ ID NO: 1236393 - DNA, 25 bp, Homo sapien
tcaaactcataatagggctccactg

SEQ ID NO: 1236394 - DNA, 25 bp, Homo sapien
tgggtagggctccactgatctcctg

SEQ ID NO: 1236395 - DNA, 25 bp, Homo sapien
caatgctgcatgctcatagatctca

SEQ ID NO: 1236396 - DNA, 25 bp, Homo sapien
tcatagatctcagccctacaatcgg

SEQ ID NO: 1236397 - DNA, 25 bp, Homo sapien
ccttgaagatctgacagttttccac

SEQ ID NO: 1236398 - DNA, 25 bp, Homo sapien
ttactgggatatccttgaagatctg

SEQ ID NO: 1236399 - DNA, 25 bp, Homo sapien
gggatatccttgaagatctgacagt

SEQ ID NO: 1236400 - DNA, 25 bp, Homo sapien
atgtcttttactgggatatccttga

SEQ ID NO: 1236401 - DNA, 25 bp, Homo sapien
tggtgtgcccatagatgttccccac

SEQ ID NO: 1236402 - DNA, 25 bp, Homo sapien
catgctgcggtttttgagcagctgt

SEQ ID NO: 1236403 - DNA, 25 bp, Homo sapien
agcacagccgtggttagaagctggt

SEQ ID NO: 1236404 - DNA, 25 bp, Homo sapien
ctacatgctgcggtttttgagcagc

SEQ ID NO: 1236405 - DNA, 25 bp, Homo sapien
cagtgttctgcctttgcccaaggtg

SEQ ID NO: 1236406 - DNA, 25 bp, Homo sapien
agtgttctgcctttgcccaaggtgt

SEQ ID NO: 1236407 - DNA, 25 bp, Homo sapien
cactgcccggtctgccatagcacga

SEQ ID NO: 1236408 - DNA, 25 bp, Homo sapien
cccggtctgccatagcacgatctcc

SEQ ID NO: 1236409 - DNA, 25 bp, Homo sapien
ccggtctgccatagcacgatctccc

SEQ ID NO: 1236410 - DNA, 25 bp, Homo sapien
gcccggtctgccatagcacgatctc

SEQ ID NO: 1236411 - DNA, 25 bp, Homo sapien
gacggggggccgcaatacagcccca

SEQ ID NO: 1236412 - DNA, 25 bp, Homo sapien
ggccgcaatacagccccagccgctg

SEQ ID NO: 1236413 - DNA, 25 bp, Homo sapien
ccaggcgcggagacggggggccgca

SEQ ID NO: 1236414 - DNA, 25 bp, Homo sapien
caggcgcggagacggggggccgcaa

SEQ ID NO: 1236415 - DNA, 25 bp, Homo sapien
gttgtagtacatgttgatgcgctcc

SEQ ID NO: 1236416 - DNA, 25 bp, Homo sapien
gcaggtccctgtccccgtggcaggt

SEQ ID NO: 1236417 - DNA, 25 bp, Homo sapien
tgcaggtccctgtccccgtggcagg

SEQ ID NO: 1236418 - DNA, 25 bp, Homo sapien
cctcgttgtagtacatgttgatgcg

SEQ ID NO: 1236419 - DNA, 25 bp, Homo sapien
cccgaatggcgctgagcacacagag

SEQ ID NO: 1236420 - DNA, 25 bp, Homo sapien
acacagagccgatggtgcccggctc

SEQ ID NO: 1236421 - DNA, 25 bp, Homo sapien
gcacacagagccgatggtgcccggc

SEQ ID NO: 1236422 - DNA, 25 bp, Homo sapien
gcctgaagatcctcccgaatggcgc

SEQ ID NO: 1236423 - DNA, 25 bp, Homo sapien
tccttcagctctgcaccttctgtgt

SEQ ID NO: 1236424 - DNA, 25 bp, Homo sapien
tcagctctgcaccttctgtgtagtg

SEQ ID NO: 1236425 - DNA, 25 bp, Homo sapien
aacatccatcagcgtctccttcagc

SEQ ID NO: 1236426 - DNA, 25 bp, Homo sapien
cttcagctctgcaccttctgtgtag

SEQ ID NO: 1236427 - DNA, 25 bp, Homo sapien
tgggtaagctggaaaccctgcaggc

SEQ ID NO: 1236428 - DNA, 25 bp, Homo sapien
gtaagctggaaaccctgcaggcagt

SEQ ID NO: 1236429 - DNA, 25 bp, Homo sapien
gagtgggtaagctggaaaccctgca

SEQ ID NO: 1236430 - DNA, 25 bp, Homo sapien
gggtaagctggaaaccctgcaggca

SEQ ID NO: 1236431 - DNA, 25 bp, Homo sapien
aagagtatccatcagagacccggta

SEQ ID NO: 1236432 - DNA, 25 bp, Homo sapien
gaagagtatccatcagagacccggt

SEQ ID NO: 1236433 - DNA, 25 bp, Homo sapien
agagtatccatcagagacccggtac

SEQ ID NO: 1236434 - DNA, 25 bp, Homo sapien
agaagagtatccatcagagacccgg

SEQ ID NO: 1236435 - DNA, 25 bp, Homo sapien
tgagagggtggcattgtagggctcc

SEQ ID NO: 1236436 - DNA, 25 bp, Homo sapien
gagggtggcattgtagggctccacc

SEQ ID NO: 1236437 - DNA, 25 bp, Homo sapien
tagggctccaccacggtgtctgaca

SEQ ID NO: 1236438 - DNA, 25 bp, Homo sapien
agggctccaccacggtgtctgacac

SEQ ID NO: 1236439 - DNA, 25 bp, Homo sapien
ctgcattttccatgagctggtggac

SEQ ID NO: 1236440 - DNA, 25 bp, Homo sapien
agagcttcactatcaatgcaaaagg

SEQ ID NO: 1236441 - DNA, 25 bp, Homo sapien
cttcactatcaatgcaaaaggtctc

SEQ ID NO: 1236442 - DNA, 25 bp, Homo sapien
gagcttcactatcaatgcaaaaggt

SEQ ID NO: 1236443 - DNA, 25 bp, Homo sapien
tggaacagatgtcacacagaactac

SEQ ID NO: 1236444 - DNA, 25 bp, Homo sapien
ctggaacagatgtcacacagaacta

SEQ ID NO: 1236445 - DNA, 25 bp, Homo sapien
ctggacagtggagcaaagcgaagca

SEQ ID NO: 1236446 - DNA, 25 bp, Homo sapien
cttgtggtagcagaaaccaggtgat

SEQ ID NO: 1236447 - DNA, 25 bp, Homo sapien
tgtagccaggcaactaggatcacgt

SEQ ID NO: 1236448 - DNA, 25 bp, Homo sapien
ccagcctttgcagatcagtattcag

SEQ ID NO: 1236449 - DNA, 25 bp, Homo sapien
cagccatggtcagggccgagtacta

SEQ ID NO: 1236450 - DNA, 25 bp, Homo sapien
aactcagccatggtcagggccgagt

SEQ ID NO: 1236451 - DNA, 25 bp, Homo sapien
ctgctgggtgaactcagccatggtc

SEQ ID NO: 1236452 - DNA, 25 bp, Homo sapien
ctgggtgaactcagccatggtcagg

SEQ ID NO: 1236453 - DNA, 25 bp, Homo sapien
gcaacctctgaaaacggcagccact

SEQ ID NO: 1236454 - DNA, 25 bp, Homo sapien
tcatgggcatgcaacctctgaaaac

SEQ ID NO: 1236455 - DNA, 25 bp, Homo sapien
cactgtcaggtagtggccatgacgg

SEQ ID NO: 1236456 - DNA, 25 bp, Homo sapien
gcagccactgtcaggtagtggccat

SEQ ID NO: 1236457 - DNA, 25 bp, Homo sapien
ctgctgatactcagacagcaggtcg

SEQ ID NO: 1236458 - DNA, 25 bp, Homo sapien
ctcctcctcggctgtggcgtcctgg

SEQ ID NO: 1236459 - DNA, 25 bp, Homo sapien
tactgctgatactcagacagcaggt

SEQ ID NO: 1236460 - DNA, 25 bp, Homo sapien
tggtactgctgatactcagacagca

SEQ ID NO: 1236461 - DNA, 25 bp, Homo sapien
tggcaaccagattgtccttgggctg

SEQ ID NO: 1236462 - DNA, 25 bp, Homo sapien
tctcaccaggaaatgtggcaaccag

SEQ ID NO: 1236463 - DNA, 25 bp, Homo sapien
cttgaaaacataaatcaggatgtac

SEQ ID NO: 1236464 - DNA, 25 bp, Homo sapien
tcaggatgtacatctgagctctcac

SEQ ID NO: 1236465 - DNA, 25 bp, Homo sapien
tgggttgagctttgggttcggttga

SEQ ID NO: 1236466 - DNA, 25 bp, Homo sapien
cctgctgagtgcaccgcgaggtcga

SEQ ID NO: 1236467 - DNA, 25 bp, Homo sapien
cacagtgcgcggcttttgctgggac

SEQ ID NO: 1236468 - DNA, 25 bp, Homo sapien
aggtcgagcgcaggcctctgttgca

SEQ ID NO: 1236469 - DNA, 25 bp, Homo sapien
ctcagagggtggtatcagtgccaga

SEQ ID NO: 1236470 - DNA, 25 bp, Homo sapien
tgtggcccacaaatccaatagagac

SEQ ID NO: 1236471 - DNA, 25 bp, Homo sapien
gttctgagtacacaagcccctgtcc

SEQ ID NO: 1236472 - DNA, 25 bp, Homo sapien
gtaactgttggtaggcctgtggccc

SEQ ID NO: 1236473 - DNA, 25 bp, Homo sapien
gagcttcaagctgataccaggtatg

SEQ ID NO: 1236474 - DNA, 25 bp, Homo sapien
ctgaccctacttagcctcgagagat

SEQ ID NO: 1236475 - DNA, 25 bp, Homo sapien
ccaggcggtctcccagttaagtact

SEQ ID NO: 1236476 - DNA, 25 bp, Homo sapien
ctacttagcctcgagagatcagacg

SEQ ID NO: 1236477 - DNA, 25 bp, Homo sapien
ttagcctcgagagatcagacgagat

SEQ ID NO: 1236478 - DNA, 25 bp, Homo sapien
cagagtcagggtgcggttgggaggc

SEQ ID NO: 1236479 - DNA, 25 bp, Homo sapien
gagtcagggtgcggttgggaggcat

SEQ ID NO: 1236480 - DNA, 25 bp, Homo sapien
agagtcagggtgcggttgggaggca

SEQ ID NO: 1236481 - DNA, 25 bp, Homo sapien
tcacagggaaaccagacactgcagc

SEQ ID NO: 1236482 - DNA, 25 bp, Homo sapien
gagaatacgggaccaaagctccagc

SEQ ID NO: 1236483 - DNA, 25 bp, Homo sapien
tccagctggagcacaagacaaaggc

SEQ ID NO: 1236484 - DNA, 25 bp, Homo sapien
ttagctatgtaactcccagtacctg

SEQ ID NO: 1236485 - DNA, 25 bp, Homo sapien
cctatgaccatgcacaagcctgtct

SEQ ID NO: 1236486 - DNA, 25 bp, Homo sapien
ccagcgagatgacccctatgaccat

SEQ ID NO: 1236487 - DNA, 25 bp, Homo sapien
cttttgcactgatgcactatgcccg

SEQ ID NO: 1236488 - DNA, 25 bp, Homo sapien
gactggtgaagacctccagcgagat

SEQ ID NO: 1236489 - DNA, 25 bp, Homo sapien
taagaactttgggaggattaggcag

SEQ ID NO: 1236490 - DNA, 25 bp, Homo sapien
ctaagaactttgggaggattaggca

SEQ ID NO: 1236491 - DNA, 25 bp, Homo sapien
ttagctagcagaatagtgtgccttt

SEQ ID NO: 1236492 - DNA, 25 bp, Homo sapien
tttagctagcagaatagtgtgcctt

SEQ ID NO: 1236493 - DNA, 25 bp, Homo sapien
ctttagctagcagaatagtgtgcct

SEQ ID NO: 1236494 - DNA, 25 bp, Homo sapien
cactcatgtgcccaaaagagatgaa

SEQ ID NO: 1236495 - DNA, 25 bp, Homo sapien
catagaaccctcacaaactgctgat

SEQ ID NO: 1236496 - DNA, 25 bp, Homo sapien
gggagatatcccttcttatgcagta

SEQ ID NO: 1236497 - DNA, 25 bp, Homo sapien
gttggttcacacaaagactcactgg

SEQ ID NO: 1236498 - DNA, 25 bp, Homo sapien
ctttgcggctgaaataagaggaagg

SEQ ID NO: 1236499 - DNA, 25 bp, Homo sapien
tttgcggctgaaataagaggaaggc

SEQ ID NO: 1236500 - DNA, 25 bp, Homo sapien
tccttcaactctaccgggcatttta

SEQ ID NO: 1236501 - DNA, 25 bp, Homo sapien
tctaccgggcattttaagtgctctt

SEQ ID NO: 1236502 - DNA, 25 bp, Homo sapien
cggttgttgccttagaagaaacttg

SEQ ID NO: 1236503 - DNA, 25 bp, Homo sapien
taagtgctcttataacatcctgagc

SEQ ID NO: 1236504 - DNA, 25 bp, Homo sapien
atcacaagatcatcaactgtcctga

SEQ ID NO: 1236505 - DNA, 25 bp, Homo sapien
ggcagtaactgcatctctgtttgat

SEQ ID NO: 1236506 - DNA, 25 bp, Homo sapien
tgagggcagtaactgcatctctgtt

SEQ ID NO: 1236507 - DNA, 25 bp, Homo sapien
cctgagggcagtaactgcatctctg

SEQ ID NO: 1236508 - DNA, 25 bp, Homo sapien
catccagatgtgacttgggcacctc

SEQ ID NO: 1236509 - DNA, 25 bp, Homo sapien
ccagatgatagatgttgcccatcca

SEQ ID NO: 1236510 - DNA, 25 bp, Homo sapien
ggaagggtttatctgatgccagatg

SEQ ID NO: 1236511 - DNA, 25 bp, Homo sapien
cagctggaagggtttatctgatgcc

SEQ ID NO: 1236512 - DNA, 25 bp, Homo sapien
tatcacgtcatctgctaagagactg

SEQ ID NO: 1236513 - DNA, 25 bp, Homo sapien
caattgtgagatgtgactggacgcc

SEQ ID NO: 1236514 - DNA, 25 bp, Homo sapien
tagattccaaatagagagacctttc

SEQ ID NO: 1236515 - DNA, 25 bp, Homo sapien
gacctttctatctaaaaattgtgca

SEQ ID NO: 1236516 - DNA, 25 bp, Homo sapien
cctatacaaatttcgctgggcaggg

SEQ ID NO: 1236517 - DNA, 25 bp, Homo sapien
atccctatacaaatttcgctgggca

SEQ ID NO: 1236518 - DNA, 25 bp, Homo sapien
tccctatacaaatttcgctgggcag

SEQ ID NO: 1236519 - DNA, 25 bp, Homo sapien
ccctatacaaatttcgctgggcagg

SEQ ID NO: 1236520 - DNA, 25 bp, Homo sapien
tatggaatccgtagtatgaaataca

SEQ ID NO: 1236521 - DNA, 25 bp, Homo sapien
aatatggaatccgtagtatgaaata

SEQ ID NO: 1236522 - DNA, 25 bp, Homo sapien
gaaaaatatggaatccgtagtatga

SEQ ID NO: 1236523 - DNA, 25 bp, Homo sapien
tggaatccgtagtatgaaatacata

SEQ ID NO: 1236524 - DNA, 25 bp, Homo sapien
gctactatcacctgtctctttaaac

SEQ ID NO: 1236525 - DNA, 25 bp, Homo sapien
ctactatcacctgtctctttaaact

SEQ ID NO: 1236526 - DNA, 25 bp, Homo sapien
ggctactatcacctgtctctttaaa

SEQ ID NO: 1236527 - DNA, 25 bp, Homo sapien
caatgcttctattttaacatagtcc

SEQ ID NO: 1236528 - DNA, 25 bp, Homo sapien
gcttctattttaacatagtcctgga

SEQ ID NO: 1236529 - DNA, 25 bp, Homo sapien
ctattttaacatagtcctggaagtc

SEQ ID NO: 1236530 - DNA, 25 bp, Homo sapien
tatcaatgcttctattttaacatag

SEQ ID NO: 1236531 - DNA, 25 bp, Homo sapien
tataaaaactggtagaggtgtttgc

SEQ ID NO: 1236532 - DNA, 25 bp, Homo sapien
aactggtagaggtgtttgctccttc

SEQ ID NO: 1236533 - DNA, 25 bp, Homo sapien
aatgcacagacaccaatgcaaagtg

SEQ ID NO: 1236534 - DNA, 25 bp, Homo sapien
caatgcaaagtgatattgtgcccat

SEQ ID NO: 1236535 - DNA, 25 bp, Homo sapien
tatggctacttaggtgtgaacaccg

SEQ ID NO: 1236536 - DNA, 25 bp, Homo sapien
tgacgagtaaggcttgcaaactgtg

SEQ ID NO: 1236537 - DNA, 25 bp, Homo sapien
gaacatcgattgaaaactttgccac

SEQ ID NO: 1236538 - DNA, 25 bp, Homo sapien
tgtgagcactcattaaaaacgttgc

SEQ ID NO: 1236539 - DNA, 25 bp, Homo sapien
ttaaagactgccacattttttacat

SEQ ID NO: 1236540 - DNA, 25 bp, Homo sapien
ccagtataaattctcttatacttac

SEQ ID NO: 1236541 - DNA, 25 bp, Homo sapien
ttttacatttgtcaggttcctctcc

SEQ ID NO: 1236542 - DNA, 25 bp, Homo sapien
cacattttttacatttgtcaggttc

SEQ ID NO: 1236543 - DNA, 25 bp, Homo sapien
tagtgaagccatgtataatgaagca

SEQ ID NO: 1236544 - DNA, 25 bp, Homo sapien
taaacagtcattatgctcataccac

SEQ ID NO: 1236545 - DNA, 25 bp, Homo sapien
gaattattctcgacaatcaacactg

SEQ ID NO: 1236546 - DNA, 25 bp, Homo sapien
cattcagtatagtgttgtgcactct

SEQ ID NO: 1236547 - DNA, 25 bp, Homo sapien
agaggtgtcctttcactgttaccca

SEQ ID NO: 1236548 - DNA, 25 bp, Homo sapien
tcaacatgaggtaaggcacaaaaaa

SEQ ID NO: 1236549 - DNA, 25 bp, Homo sapien
tacccagtagtgtattgttactatc

SEQ ID NO: 1236550 - DNA, 25 bp, Homo sapien
actatctgttacctacaactttggg

SEQ ID NO: 1236551 - DNA, 25 bp, Homo sapien
gcaagaggaatatcagttttttgtt

SEQ ID NO: 1236552 - DNA, 25 bp, Homo sapien
caaaggggtatcatggcaaaagaca

SEQ ID NO: 1236553 - DNA, 25 bp, Homo sapien
gcctcagttctgttggctatacaag

SEQ ID NO: 1236554 - DNA, 25 bp, Homo sapien
taacagagaacacactaactgcagt

SEQ ID NO: 1236555 - DNA, 25 bp, Homo sapien
tttaagtgccaagaccatgttgacc

SEQ ID NO: 1236556 - DNA, 25 bp, Homo sapien
gagccagcagccataagattttaca

SEQ ID NO: 1236557 - DNA, 25 bp, Homo sapien
gctaacagtcccatctctggccatg

SEQ ID NO: 1236558 - DNA, 25 bp, Homo sapien
cactttaagtttgggacacctggag

SEQ ID NO: 1236559 - DNA, 25 bp, Homo sapien
gatgcatcctcctagattctgagaa

SEQ ID NO: 1236560 - DNA, 25 bp, Homo sapien
tgtgtcctcctctaggtacagatgc

SEQ ID NO: 1236561 - DNA, 25 bp, Homo sapien
gctactgaatttccaggccagagaa

SEQ ID NO: 1236562 - DNA, 25 bp, Homo sapien
ggcattattcaacgaacaaagcagt

SEQ ID NO: 1236563 - DNA, 25 bp, Homo sapien
tctctgtaacatgccccaatgactc

SEQ ID NO: 1236564 - DNA, 25 bp, Homo sapien
aatgactcatgtcccttattgttgg

SEQ ID NO: 1236565 - DNA, 25 bp, Homo sapien
ggctccataaaaaggcttctgggca

SEQ ID NO: 1236566 - DNA, 25 bp, Homo sapien
aaatgcggcttgacatttcttttgc

SEQ ID NO: 1236567 - DNA, 25 bp, Homo sapien
gagatgtccccaatgttcctgcagc

SEQ ID NO: 1236568 - DNA, 25 bp, Homo sapien
tctggagtagctgttcagaagctca

SEQ ID NO: 1236569 - DNA, 25 bp, Homo sapien
cacactgatgactgccacctattgg

SEQ ID NO: 1236570 - DNA, 25 bp, Homo sapien
cacctattggctgtgacttggagat

SEQ ID NO: 1236571 - DNA, 25 bp, Homo sapien
cacctgaggctcatgctgctgttac

SEQ ID NO: 1236572 - DNA, 25 bp, Homo sapien
aacagaacttcaggtagcttacagg

SEQ ID NO: 1236573 - DNA, 25 bp, Homo sapien
gacattggatgtgcaaaagcctgtg

SEQ ID NO: 1236574 - DNA, 25 bp, Homo sapien
taaatctgcatgatgtggaccacca

SEQ ID NO: 1236575 - DNA, 25 bp, Homo sapien
aatccagcattgtcgggcacctaga

SEQ ID NO: 1236576 - DNA, 25 bp, Homo sapien
ggtagtctttcaacacatgcccgtc

SEQ ID NO: 1236577 - DNA, 25 bp, Homo sapien
tactctcctaggaatccacagtgcc

SEQ ID NO: 1236578 - DNA, 25 bp, Homo sapien
ttttgggtatagtaagcatggcacc

SEQ ID NO: 1236579 - DNA, 25 bp, Homo sapien
caattatatatacttgtggtgtaca

SEQ ID NO: 1236580 - DNA, 25 bp, Homo sapien
attatatatacttgtggtgtacaat

SEQ ID NO: 1236581 - DNA, 25 bp, Homo sapien
atatatacttgtggtgtacaatgtg

SEQ ID NO: 1236582 - DNA, 25 bp, Homo sapien
ttatatatacttgtggtgtacaatg

SEQ ID NO: 1236583 - DNA, 25 bp, Homo sapien
tatacttgattcctatccttgtgga

SEQ ID NO: 1236584 - DNA, 25 bp, Homo sapien
gaatctgtcagtggttggtcctgtc

SEQ ID NO: 1236585 - DNA, 25 bp, Homo sapien
tacttacgtatcaattaccatttgg

SEQ ID NO: 1236586 - DNA, 25 bp, Homo sapien
ttgttctctgccaaacccttgcctg

SEQ ID NO: 1236587 - DNA, 25 bp, Homo sapien
cttgagtgtagtgagtccacctttg

SEQ ID NO: 1236588 - DNA, 25 bp, Homo sapien
acttgagtgtagtgagtccaccttt

SEQ ID NO: 1236589 - DNA, 25 bp, Homo sapien
tgacttgagtgtagtgagtccacct

SEQ ID NO: 1236590 - DNA, 25 bp, Homo sapien
gacttgagtgtagtgagtccacctt

SEQ ID NO: 1236591 - DNA, 25 bp, Homo sapien
gaagagtcctaaaacccagcagcta

SEQ ID NO: 1236592 - DNA, 25 bp, Homo sapien
cctctagggactccaattgagttaa

SEQ ID NO: 1236593 - DNA, 25 bp, Homo sapien
ccagttaggccagggtcgatctttt

SEQ ID NO: 1236594 - DNA, 25 bp, Homo sapien
aattcattaggcacacctctaggga

SEQ ID NO: 1236595 - DNA, 25 bp, Homo sapien
aggtttcctgtcgggcactaggttg

SEQ ID NO: 1236596 - DNA, 25 bp, Homo sapien
ttcctgtcgggcactaggttggggc

SEQ ID NO: 1236597 - DNA, 25 bp, Homo sapien
tgtcgggcactaggttggggcggga

SEQ ID NO: 1236598 - DNA, 25 bp, Homo sapien
cctgtcgggcactaggttggggcgg

SEQ ID NO: 1236599 - DNA, 25 bp, Homo sapien
tcttcccgccacagcgaaggagaat

SEQ ID NO: 1236600 - DNA, 25 bp, Homo sapien
ttcaaatccggccatcttcccgcca

SEQ ID NO: 1236601 - DNA, 25 bp, Homo sapien
aaggagaatcagacagcccgtgcca

SEQ ID NO: 1236602 - DNA, 25 bp, Homo sapien
atcagacagcccgtgccagggacgt

SEQ ID NO: 1236603 - DNA, 25 bp, Homo sapien
gggctgttacagatgcagcaaaaac

SEQ ID NO: 1236604 - DNA, 25 bp, Homo sapien
aactgcagccggcatcgatgactcc

SEQ ID NO: 1236605 - DNA, 25 bp, Homo sapien
cctccacagggcaacggctgaactg

SEQ ID NO: 1236606 - DNA, 25 bp, Homo sapien
tcaggctggggctgttacagatgca

SEQ ID NO: 1236607 - DNA, 25 bp, Homo sapien
ggcacttgtctaggatggaagcccc

SEQ ID NO: 1236608 - DNA, 25 bp, Homo sapien
ggctatgcacattgcctgcccgtgg

SEQ ID NO: 1236609 - DNA, 25 bp, Homo sapien
gccctgtccttgaccgagagtccag

SEQ ID NO: 1236610 - DNA, 25 bp, Homo sapien
gactctcgtgggatcctcttgcaga

SEQ ID NO: 1236611 - DNA, 25 bp, Homo sapien
cacactgggtatgatggaggtgtgg

SEQ ID NO: 1236612 - DNA, 25 bp, Homo sapien
tatgatggaggtgtgggcgggctcg

SEQ ID NO: 1236613 - DNA, 25 bp, Homo sapien
cgggctcgtccaggccgatcaaggc

SEQ ID NO: 1236614 - DNA, 25 bp, Homo sapien
tgttctcaggagtggtgggtcccca

SEQ ID NO: 1236615 - DNA, 25 bp, Homo sapien
gagggactgtgcctgctgtgcactc

SEQ ID NO: 1236616 - DNA, 25 bp, Homo sapien
ctgagggactgtgcctgctgtgcac

SEQ ID NO: 1236617 - DNA, 25 bp, Homo sapien
ctgggcctgagggactgtgcctgct

SEQ ID NO: 1236618 - DNA, 25 bp, Homo sapien
gggactgtgcctgctgtgcactcac

SEQ ID NO: 1236619 - DNA, 25 bp, Homo sapien
ggccacagatggggtggaatcccat

SEQ ID NO: 1236620 - DNA, 25 bp, Homo sapien
gccacagatggggtggaatcccatc

SEQ ID NO: 1236621 - DNA, 25 bp, Homo sapien
atggggtggaatcccatctgctgct

SEQ ID NO: 1236622 - DNA, 25 bp, Homo sapien
cagatggggtggaatcccatctgct

SEQ ID NO: 1236623 - DNA, 25 bp, Homo sapien
caaggtcatcgctgagaagaggctc

SEQ ID NO: 1236624 - DNA, 25 bp, Homo sapien
cctgctcgggcatcaactttgaaga

SEQ ID NO: 1236625 - DNA, 25 bp, Homo sapien
tcttgcagcaggagctatgcgccgt

SEQ ID NO: 1236626 - DNA, 25 bp, Homo sapien
ttcacaaggtggtgtcgctgaggcc

SEQ ID NO: 1236627 - DNA, 25 bp, Homo sapien
gggtgccaagcaaagcccataccag

SEQ ID NO: 1236628 - DNA, 25 bp, Homo sapien
cacggatgtgggagtggaacccgaa

SEQ ID NO: 1236629 - DNA, 25 bp, Homo sapien
ctccttcagttggaccaggcctctg

SEQ ID NO: 1236630 - DNA, 25 bp, Homo sapien
acaggcatgaaccaggcgctcttgc

SEQ ID NO: 1236631 - DNA, 25 bp, Homo sapien
acttctcgtccgactggctgaatga

SEQ ID NO: 1236632 - DNA, 25 bp, Homo sapien
cctgtgtacttctcgtccgactggc

SEQ ID NO: 1236633 - DNA, 25 bp, Homo sapien
tgtacttctcgtccgactggctgaa

SEQ ID NO: 1236634 - DNA, 25 bp, Homo sapien
tcgtccgactggctgaatgagttct

SEQ ID NO: 1236635 - DNA, 25 bp, Homo sapien
ggattacaggaaggcgtctccactc

SEQ ID NO: 1236636 - DNA, 25 bp, Homo sapien
tcacagggactttccggtggaggac

SEQ ID NO: 1236637 - DNA, 25 bp, Homo sapien
gagccgattggtctcagttgcccca

SEQ ID NO: 1236638 - DNA, 25 bp, Homo sapien
gaaccattgtagtcagactgccccg

SEQ ID NO: 1236639 - DNA, 25 bp, Homo sapien
ggagctatttttccccgtgaggcac

SEQ ID NO: 1236640 - DNA, 25 bp, Homo sapien
gaaagagtacatacaggcgggctac

SEQ ID NO: 1236641 - DNA, 25 bp, Homo sapien
ccctgggtgcacaacggagctattt

SEQ ID NO: 1236642 - DNA, 25 bp, Homo sapien
catttcaggagacgtggttgtacca

SEQ ID NO: 1236643 - DNA, 25 bp, Homo sapien
ttctcctacgccgactttgtgcggg

SEQ ID NO: 1236644 - DNA, 25 bp, Homo sapien
ttttccagcgccttcacgcagggct

SEQ ID NO: 1236645 - DNA, 25 bp, Homo sapien
ccttcgacccgtgctgagctggatg

SEQ ID NO: 1236646 - DNA, 25 bp, Homo sapien
cgtcttctggttccgaggctggtcc

SEQ ID NO: 1236647 - DNA, 25 bp, Homo sapien
ctgagggacgccagacgagtcccag

SEQ ID NO: 1236648 - DNA, 25 bp, Homo sapien
agacgagtcccagagccgaccgcgg

SEQ ID NO: 1236649 - DNA, 25 bp, Homo sapien
ggcgcctgcgcagtgaagaccgcgg

SEQ ID NO: 1236650 - DNA, 25 bp, Homo sapien
tgcgcagtgaagaccgcggcgagcc

SEQ ID NO: 1236651 - DNA, 25 bp, Homo sapien
actcctcatgtcactactccgatgt

SEQ ID NO: 1236652 - DNA, 25 bp, Homo sapien
tggtcccacctgaggatagtgtggg

SEQ ID NO: 1236653 - DNA, 25 bp, Homo sapien
tgctcatgtgtacacagccccaaat

SEQ ID NO: 1236654 - DNA, 25 bp, Homo sapien
ttctttggtatcccaactggtccca

SEQ ID NO: 1236655 - DNA, 25 bp, Homo sapien
cagggccatggcgagggtcggcagg

SEQ ID NO: 1236656 - DNA, 25 bp, Homo sapien
gccatggcgagggtcggcaggccac

SEQ ID NO: 1236657 - DNA, 25 bp, Homo sapien
atggcgagggtcggcaggccacaca

SEQ ID NO: 1236658 - DNA, 25 bp, Homo sapien
gcgagggtcggcaggccacacacag

SEQ ID NO: 1236659 - DNA, 25 bp, Homo sapien
agaagagggcgccaagaccttcagt

SEQ ID NO: 1236660 - DNA, 25 bp, Homo sapien
agggcgccaagaccttcagtaccat

SEQ ID NO: 1236661 - DNA, 25 bp, Homo sapien
acacagaagagggcgccaagacctt

SEQ ID NO: 1236662 - DNA, 25 bp, Homo sapien
agagggcgccaagaccttcagtacc

SEQ ID NO: 1236663 - DNA, 25 bp, Homo sapien
ccttaattgtatgaggacacagcca

SEQ ID NO: 1236664 - DNA, 25 bp, Homo sapien
gaagagcttgcatcaaatgggacct

SEQ ID NO: 1236665 - DNA, 25 bp, Homo sapien
gacacagccatctgagaacgcacaa

SEQ ID NO: 1236666 - DNA, 25 bp, Homo sapien
gaacgcacaatatgtcgtcacacgc

SEQ ID NO: 1236667 - DNA, 25 bp, Homo sapien
aggagaagagacagtaacgttctgc

SEQ ID NO: 1236668 - DNA, 25 bp, Homo sapien
cagtaacgttctgccgtcacccatg

SEQ ID NO: 1236669 - DNA, 25 bp, Homo sapien
gttctgccgtcacccatggactgga

SEQ ID NO: 1236670 - DNA, 25 bp, Homo sapien
agcacgtggctgactctcgatccac

SEQ ID NO: 1236671 - DNA, 25 bp, Homo sapien
tctgtgtgcgccaaggtccaggcct

SEQ ID NO: 1236672 - DNA, 25 bp, Homo sapien
tcatgaacctgagcgacagcgatgt

SEQ ID NO: 1236673 - DNA, 25 bp, Homo sapien
gaaatgctcgatgatgctgaagacc

SEQ ID NO: 1236674 - DNA, 25 bp, Homo sapien
tccttgggacagatgcgtctgccac

SEQ ID NO: 1236675 - DNA, 25 bp, Homo sapien
ggacagctgtccagtaacccatcgc

SEQ ID NO: 1236676 - DNA, 25 bp, Homo sapien
ctgggctttgtttccggtggtgtct

SEQ ID NO: 1236677 - DNA, 25 bp, Homo sapien
ccggtggtgtcttccaaagcttgga

SEQ ID NO: 1236678 - DNA, 25 bp, Homo sapien
tggtgtcttccaaagcttggagcta

SEQ ID NO: 1236679 - DNA, 25 bp, Homo sapien
gagacatcttccctgggctttgttt

SEQ ID NO: 1236680 - DNA, 25 bp, Homo sapien
ataacagcaggaatttttatcagta

SEQ ID NO: 1236681 - DNA, 25 bp, Homo sapien
ttcccaaagggttcacaactggtca

SEQ ID NO: 1236682 - DNA, 25 bp, Homo sapien
caacccagacacaaggacggtgagc

SEQ ID NO: 1236683 - DNA, 25 bp, Homo sapien
cctggtttaacgtgagactctgttc

SEQ ID NO: 1236684 - DNA, 25 bp, Homo sapien
gaccttgatgtcgtccacgtcttct

SEQ ID NO: 1236685 - DNA, 25 bp, Homo sapien
ccgctggcggatgctaatttcgtaa

SEQ ID NO: 1236686 - DNA, 25 bp, Homo sapien
tatcaaacgataggccatgtctggc

SEQ ID NO: 1236687 - DNA, 25 bp, Homo sapien
tggctttccaataaaccgctggcgg

SEQ ID NO: 1236688 - DNA, 25 bp, Homo sapien
ctgcatgccagactgagcagctctt

SEQ ID NO: 1236689 - DNA, 25 bp, Homo sapien
gaagaggttcttgcgcttctgagca

SEQ ID NO: 1236690 - DNA, 25 bp, Homo sapien
tctgcgggggaagaggttcttgcgc

SEQ ID NO: 1236691 - DNA, 25 bp, Homo sapien
cagctcttctctgcgggggaagagg

SEQ ID NO: 1236692 - DNA, 25 bp, Homo sapien
cgctcactgccttgtcggtcactaa

SEQ ID NO: 1236693 - DNA, 25 bp, Homo sapien
gctgtctctagcaagctggaggcca

SEQ ID NO: 1236694 - DNA, 25 bp, Homo sapien
ctctaggtgacgcatctgttaggca

SEQ ID NO: 1236695 - DNA, 25 bp, Homo sapien
tgttaggcatttcccacaggcgtgc

SEQ ID NO: 1236696 - DNA, 25 bp, Homo sapien
tggctatagcctctaaagccagcca

SEQ ID NO: 1236697 - DNA, 25 bp, Homo sapien
gctgatggactaggatagtaggaaa

SEQ ID NO: 1236698 - DNA, 25 bp, Homo sapien
tctagaggaagtggctatagcctct

SEQ ID NO: 1236699 - DNA, 25 bp, Homo sapien
taggatagtaggaaagtcgtgcaca

SEQ ID NO: 1236700 - DNA, 25 bp, Homo sapien
aaatcggtggattttaccatggcaa

SEQ ID NO: 1236701 - DNA, 25 bp, Homo sapien
tttaccatggcaagataaaagattt

SEQ ID NO: 1236702 - DNA, 25 bp, Homo sapien
aagacaaactgcaggggaaaatcgg

SEQ ID NO: 1236703 - DNA, 25 bp, Homo sapien
caaactgcaggggaaaatcggtgga

SEQ ID NO: 1236704 - DNA, 25 bp, Homo sapien
taaaacgtgcacttggcacgcagcc

SEQ ID NO: 1236705 - DNA, 25 bp, Homo sapien
acaagtgccccacagactactgagc

SEQ ID NO: 1236706 - DNA, 25 bp, Homo sapien
tgtgcctacgcatggacaacagcag

SEQ ID NO: 1236707 - DNA, 25 bp, Homo sapien
tccgtcatggtttccacctccaggg

SEQ ID NO: 1236708 - DNA, 25 bp, Homo sapien
tcctggtctcctgcgggtggctcac

SEQ ID NO: 1236709 - DNA, 25 bp, Homo sapien
tcacggtgcagggtacggcccatca

SEQ ID NO: 1236710 - DNA, 25 bp, Homo sapien
ctcctggtctcctgcgggtggctca

SEQ ID NO: 1236711 - DNA, 25 bp, Homo sapien
cggtgcagggtacggcccatcagcc

SEQ ID NO: 1236712 - DNA, 25 bp, Homo sapien
caatacggatggatgacccagagct

SEQ ID NO: 1236713 - DNA, 25 bp, Homo sapien
tgtttgtgatcagaaaggcaagagg

SEQ ID NO: 1236714 - DNA, 25 bp, Homo sapien
tccttggtgcgaggccaatacggat

SEQ ID NO: 1236715 - DNA, 25 bp, Homo sapien
cctgcagctgccgagtggaggccag

SEQ ID NO: 1236716 - DNA, 25 bp, Homo sapien
tgaagcctgttcctcccggtgttga

SEQ ID NO: 1236717 - DNA, 25 bp, Homo sapien
cagtcgtgaatgtgaagcctgttcc

SEQ ID NO: 1236718 - DNA, 25 bp, Homo sapien
cttgatgccacagtcgtgaatgtga

SEQ ID NO: 1236719 - DNA, 25 bp, Homo sapien
ctcccggtgttgagccactgggctt

SEQ ID NO: 1236720 - DNA, 25 bp, Homo sapien
ccagtgtctgtcgacactgagtgtc

SEQ ID NO: 1236721 - DNA, 25 bp, Homo sapien
cagacccagtgtctgtcgacactga

SEQ ID NO: 1236722 - DNA, 25 bp, Homo sapien
gtgtctgtcgacactgagtgtccac

SEQ ID NO: 1236723 - DNA, 25 bp, Homo sapien
gacccagtgtctgtcgacactgagt

SEQ ID NO: 1236724 - DNA, 25 bp, Homo sapien
caggaaccacggcaggagtgcagca

SEQ ID NO: 1236725 - DNA, 25 bp, Homo sapien
acatctgttcctatcaggaaccacg

SEQ ID NO: 1236726 - DNA, 25 bp, Homo sapien
tgttcctatcaggaaccacggcagg

SEQ ID NO: 1236727 - DNA, 25 bp, Homo sapien
tcctatcaggaaccacggcaggagt

SEQ ID NO: 1236728 - DNA, 25 bp, Homo sapien
gaaagaaagggatgttaccttctga

SEQ ID NO: 1236729 - DNA, 25 bp, Homo sapien
atgttttttcccctgactaggagag

SEQ ID NO: 1236730 - DNA, 25 bp, Homo sapien
aggaaagtttagattagagacatca

SEQ ID NO: 1236731 - DNA, 25 bp, Homo sapien
agagacatcagggatagggaagtga

SEQ ID NO: 1236732 - DNA, 25 bp, Homo sapien
gaggaagatgcaatgcattctccag

SEQ ID NO: 1236733 - DNA, 25 bp, Homo sapien
acttgccccgcacacttggccttca

SEQ ID NO: 1236734 - DNA, 25 bp, Homo sapien
cccagcacttgccccgcacacttgg

SEQ ID NO: 1236735 - DNA, 25 bp, Homo sapien
cttgccccgcacacttggccttcat

SEQ ID NO: 1236736 - DNA, 25 bp, Homo sapien
agcacttgccccgcacacttggcct

SEQ ID NO: 1236737 - DNA, 25 bp, Homo sapien
tgcagactcggagcaaagcatcacc

SEQ ID NO: 1236738 - DNA, 25 bp, Homo sapien
gttgacagcgacataggccggaagc

SEQ ID NO: 1236739 - DNA, 25 bp, Homo sapien
aagctcctgcagactcggagcaaag

SEQ ID NO: 1236740 - DNA, 25 bp, Homo sapien
gtctgggttgacagcgacataggcc

SEQ ID NO: 1236741 - DNA, 25 bp, Homo sapien
gaaacagttgttcctctgcggcctg

SEQ ID NO: 1236742 - DNA, 25 bp, Homo sapien
tgcctgcgagccagacctgatagaa

SEQ ID NO: 1236743 - DNA, 25 bp, Homo sapien
caaactgctagtgtcctggagtgca

SEQ ID NO: 1236744 - DNA, 25 bp, Homo sapien
gaatgtgaagtctggccaaacccta

SEQ ID NO: 1236745 - DNA, 25 bp, Homo sapien
tatttgtgactaagaccagctgatc

SEQ ID NO: 1236746 - DNA, 25 bp, Homo sapien
caatttatttgtgactaagaccagc

SEQ ID NO: 1236747 - DNA, 25 bp, Homo sapien
cctattaagcacagtaataatatgc

SEQ ID NO: 1236748 - DNA, 25 bp, Homo sapien
ttttctagtgcataagaaagcagtg

SEQ ID NO: 1236749 - DNA, 25 bp, Homo sapien
atcagctctgccctctccatgacca

SEQ ID NO: 1236750 - DNA, 25 bp, Homo sapien
ctagcccctgcatcagctctgccct

SEQ ID NO: 1236751 - DNA, 25 bp, Homo sapien
ccaatgcctcccactagcccctgca

SEQ ID NO: 1236752 - DNA, 25 bp, Homo sapien
agctccaatgcctcccactagcccc

SEQ ID NO: 1236753 - DNA, 25 bp, Homo sapien
tacccaccagttggacagcagtgac

SEQ ID NO: 1236754 - DNA, 25 bp, Homo sapien
tgaggaatctaggaaggtgaaccac

SEQ ID NO: 1236755 - DNA, 25 bp, Homo sapien
tcaggagaaggaaccctcagtgctg

SEQ ID NO: 1236756 - DNA, 25 bp, Homo sapien
gagatgtgtcccctggttgcagcag

SEQ ID NO: 1236757 - DNA, 25 bp, Homo sapien
agtgtgagatgtttcatgcacaatg

SEQ ID NO: 1236758 - DNA, 25 bp, Homo sapien
gtgagatgtttcatgcacaatgcaa

SEQ ID NO: 1236759 - DNA, 25 bp, Homo sapien
tgtgagatgtttcatgcacaatgca

SEQ ID NO: 1236760 - DNA, 25 bp, Homo sapien
tgagatgtttcatgcacaatgcaaa

SEQ ID NO: 1236761 - DNA, 25 bp, Homo sapien
tctcacccagccactatgctgggtg

SEQ ID NO: 1236762 - DNA, 25 bp, Homo sapien
cgcagctcggatttgagtcccagct

SEQ ID NO: 1236763 - DNA, 25 bp, Homo sapien
cctgggcacgcagctcggatttgag

SEQ ID NO: 1236764 - DNA, 25 bp, Homo sapien
ctatgctgggtgagacctgtctgca

SEQ ID NO: 1236765 - DNA, 25 bp, Homo sapien
gcctctgccagtacaggcctgatga

SEQ ID NO: 1236766 - DNA, 25 bp, Homo sapien
ctccaggctgcggagtgctctgttt

SEQ ID NO: 1236767 - DNA, 25 bp, Homo sapien
ctgatgagatgaggtgcctgcccca

SEQ ID NO: 1236768 - DNA, 25 bp, Homo sapien
gctgcggagtgctctgtttggctga

SEQ ID NO: 1236769 - DNA, 25 bp, Homo sapien
gagcctttgcgttaccacctgggtg

SEQ ID NO: 1236770 - DNA, 25 bp, Homo sapien
tttgcgttaccacctgggtgatgcc

SEQ ID NO: 1236771 - DNA, 25 bp, Homo sapien
ccaagagcctttgcgttaccacctg

SEQ ID NO: 1236772 - DNA, 25 bp, Homo sapien
catctctgcaaactctagcacagac

SEQ ID NO: 1236773 - DNA, 25 bp, Homo sapien
catccagggcttcgtcttgtctctc

SEQ ID NO: 1236774 - DNA, 25 bp, Homo sapien
cgccatccagggcttcgtcttgtct

SEQ ID NO: 1236775 - DNA, 25 bp, Homo sapien
cagggcttcgtcttgtctctccagc

SEQ ID NO: 1236776 - DNA, 25 bp, Homo sapien
acagctgctgcaacgccatccaggg

SEQ ID NO: 1236777 - DNA, 25 bp, Homo sapien
ttcatccgcctgttgtgcttgtcga

SEQ ID NO: 1236778 - DNA, 25 bp, Homo sapien
tcatccgcctgttgtgcttgtcgat

SEQ ID NO: 1236779 - DNA, 25 bp, Homo sapien
acaggaatgcagggacgttctgccc

SEQ ID NO: 1236780 - DNA, 25 bp, Homo sapien
ccagaggaagaccactccggagggc

SEQ ID NO: 1236781 - DNA, 25 bp, Homo sapien
aagaccactccggagggccacaggc

SEQ ID NO: 1236782 - DNA, 25 bp, Homo sapien
tccatctcagcgggatgtgcagggt

SEQ ID NO: 1236783 - DNA, 25 bp, Homo sapien
tatagtacagctaagaaggccagtc

SEQ ID NO: 1236784 - DNA, 25 bp, Homo sapien
cacttttggctaaaaccgagacgat

SEQ ID NO: 1236785 - DNA, 25 bp, Homo sapien
ccctcaaagtgagctggctaagtga

SEQ ID NO: 1236786 - DNA, 25 bp, Homo sapien
tctgtccatgaaagggagccgagac

SEQ ID NO: 1236787 - DNA, 25 bp, Homo sapien
cccacactgtgaagtcctgagaaca

SEQ ID NO: 1236788 - DNA, 25 bp, Homo sapien
gtcctgaggacagggtgcagcctct

SEQ ID NO: 1236789 - DNA, 25 bp, Homo sapien
caggcatggtgagcccttgctgccg

SEQ ID NO: 1236790 - DNA, 25 bp, Homo sapien
tgccggctcccagcactgacaggag

SEQ ID NO: 1236791 - DNA, 25 bp, Homo sapien
tagttttgaggtccagtggacaagg

SEQ ID NO: 1236792 - DNA, 25 bp, Homo sapien
ttttgaggtccagtggacaaggaat

SEQ ID NO: 1236793 - DNA, 25 bp, Homo sapien
tttgaggtccagtggacaaggaatg

SEQ ID NO: 1236794 - DNA, 25 bp, Homo sapien
agttttgaggtccagtggacaagga

SEQ ID NO: 1236795 - DNA, 25 bp, Homo sapien
aatcttgaatagttgttcattattc

SEQ ID NO: 1236796 - DNA, 25 bp, Homo sapien
tttgaaatcttgaatagttgttcat

SEQ ID NO: 1236797 - DNA, 25 bp, Homo sapien
ttaacttcaaatccactcatccatt

SEQ ID NO: 1236798 - DNA, 25 bp, Homo sapien
ttttaacttcaaatccactcatcca

SEQ ID NO: 1236799 - DNA, 25 bp, Homo sapien
cacatgcggacatctagttgtccca

SEQ ID NO: 1236800 - DNA, 25 bp, Homo sapien
cagcaccattgtgggaccattttct

SEQ ID NO: 1236801 - DNA, 25 bp, Homo sapien
ttcttttgcacatgcggacatctag

SEQ ID NO: 1236802 - DNA, 25 bp, Homo sapien
tagggtgtagggtctgtttgatttc

SEQ ID NO: 1236803 - DNA, 25 bp, Homo sapien
caatcaaattcatggagatacagag

SEQ ID NO: 1236804 - DNA, 25 bp, Homo sapien
aatatgccctttgatttgacagtac

SEQ ID NO: 1236805 - DNA, 25 bp, Homo sapien
ttagccaccaattaaccactaggga

SEQ ID NO: 1236806 - DNA, 25 bp, Homo sapien
taagctatcatcgtacctaaggtaa

SEQ ID NO: 1236807 - DNA, 25 bp, Homo sapien
gagggcagcagtggcgggtggtgac

SEQ ID NO: 1236808 - DNA, 25 bp, Homo sapien
gggcagcagtggcgggtggtgacat

SEQ ID NO: 1236809 - DNA, 25 bp, Homo sapien
gcagcagtggcgggtggtgacatgt

SEQ ID NO: 1236810 - DNA, 25 bp, Homo sapien
cagcagtggcgggtggtgacatgtg

SEQ ID NO: 1236811 - DNA, 25 bp, Homo sapien
gtgaccatcaggagaggcatcagta

SEQ ID NO: 1236812 - DNA, 25 bp, Homo sapien
aggagaggcatcagtacatctccat

SEQ ID NO: 1236813 - DNA, 25 bp, Homo sapien
agtgaccatcaggagaggcatcagt

SEQ ID NO: 1236814 - DNA, 25 bp, Homo sapien
ctgtgggacgtctgaacacaagtga

SEQ ID NO: 1236815 - DNA, 25 bp, Homo sapien
gggcctatgacaggtgccacgtgct

SEQ ID NO: 1236816 - DNA, 25 bp, Homo sapien
gtctctccacagtgcgctgcgtgcc

SEQ ID NO: 1236817 - DNA, 25 bp, Homo sapien
acaggtgccacgtgcttctcagcag

SEQ ID NO: 1236818 - DNA, 25 bp, Homo sapien
catgcccgggaacttgtagcagcca

SEQ ID NO: 1236819 - DNA, 25 bp, Homo sapien
cttgcagttgctgtgggccgccaca

SEQ ID NO: 1236820 - DNA, 25 bp, Homo sapien
ctcttcctgataccactggggacca

SEQ ID NO: 1236821 - DNA, 25 bp, Homo sapien
gtcgcctccgtccagggcggccttg

SEQ ID NO: 1236822 - DNA, 25 bp, Homo sapien
gggactccgagtcgcctccgtccag

SEQ ID NO: 1236823 - DNA, 25 bp, Homo sapien
gggaccacgttctccctcctccgca

SEQ ID NO: 1236824 - DNA, 25 bp, Homo sapien
ttggatcggaatccggcggcctcag

SEQ ID NO: 1236825 - DNA, 25 bp, Homo sapien
gctctgtcgcggacactctgggcct

SEQ ID NO: 1236826 - DNA, 25 bp, Homo sapien
ccgctgagcgtgtgctttcggtgaa

SEQ ID NO: 1236827 - DNA, 25 bp, Homo sapien
ctctgggccttggatcggaatccgg

SEQ ID NO: 1236828 - DNA, 25 bp, Homo sapien
ctgtcgaccacgtggatcccagatg

SEQ ID NO: 1236829 - DNA, 25 bp, Homo sapien
cagggctccttcccggtcaggtttg

SEQ ID NO: 1236830 - DNA, 25 bp, Homo sapien
gtttgggaagctcggtcctggtctg

SEQ ID NO: 1236831 - DNA, 25 bp, Homo sapien
gtggtgagctgcgagctgattctct

SEQ ID NO: 1236832 - DNA, 25 bp, Homo sapien
cttctggtaactccatatttacttt

SEQ ID NO: 1236833 - DNA, 25 bp, Homo sapien
ggtaactccatatttactttctgag

SEQ ID NO: 1236834 - DNA, 25 bp, Homo sapien
ttactttctgagatgttctgtgcat

SEQ ID NO: 1236835 - DNA, 25 bp, Homo sapien
tctggtaactccatatttactttct

SEQ ID NO: 1236836 - DNA, 25 bp, Homo sapien
tccaccagatgctggacactcacgc

SEQ ID NO: 1236837 - DNA, 25 bp, Homo sapien
atgctggacactcacgcacaagggc

SEQ ID NO: 1236838 - DNA, 25 bp, Homo sapien
ggagaggtcgaggacacagccctga

SEQ ID NO: 1236839 - DNA, 25 bp, Homo sapien
tcagcattcacagtgggagaggtcg

SEQ ID NO: 1236840 - DNA, 25 bp, Homo sapien
tcggctccctgactggaggccagcc

SEQ ID NO: 1236841 - DNA, 25 bp, Homo sapien
ctcggctccctgactggaggccagc

SEQ ID NO: 1236842 - DNA, 25 bp, Homo sapien
tctttccctcgaggctctcacagcc

SEQ ID NO: 1236843 - DNA, 25 bp, Homo sapien
tttccctcgaggctctcacagcccc

SEQ ID NO: 1236844 - DNA, 25 bp, Homo sapien
gtcctctttccctcgaggctctcac

SEQ ID NO: 1236845 - DNA, 25 bp, Homo sapien
ctctttccctcgaggctctcacagc

SEQ ID NO: 1236846 - DNA, 25 bp, Homo sapien
agcggccccagtcctgtagcagggc

SEQ ID NO: 1236847 - DNA, 25 bp, Homo sapien
aggtggtccctgagccatcaccgca

SEQ ID NO: 1236848 - DNA, 25 bp, Homo sapien
gtgagcattcaggagcaaagcggcc

SEQ ID NO: 1236849 - DNA, 25 bp, Homo sapien
gcaaagcggccccagtcctgtagca

SEQ ID NO: 1236850 - DNA, 25 bp, Homo sapien
gagagaaagcaacgcagccacatgg

SEQ ID NO: 1236851 - DNA, 25 bp, Homo sapien
agagagaaagcaacgcagccacatg

SEQ ID NO: 1236852 - DNA, 25 bp, Homo sapien
agaaagcaacgcagccacatggccc

SEQ ID NO: 1236853 - DNA, 25 bp, Homo sapien
gagaaagcaacgcagccacatggcc

SEQ ID NO: 1236854 - DNA, 25 bp, Homo sapien
agatgcctcccaagcttcaaagcgg

SEQ ID NO: 1236855 - DNA, 25 bp, Homo sapien
tgccagaaacggaagacaccctgct

SEQ ID NO: 1236856 - DNA, 25 bp, Homo sapien
gaagtgaatgggatccacagagcct

SEQ ID NO: 1236857 - DNA, 25 bp, Homo sapien
caggcctagagcatcacgcatggct

SEQ ID NO: 1236858 - DNA, 25 bp, Homo sapien
cccacacggtgttaggacagatgcc

SEQ ID NO: 1236859 - DNA, 25 bp, Homo sapien
ttccacatgatcagcaggcacacgg

SEQ ID NO: 1236860 - DNA, 25 bp, Homo sapien
cacgtgttgggcgtcttccacatga

SEQ ID NO: 1236861 - DNA, 25 bp, Homo sapien
ggcaagaaagctgcctacacggacc

SEQ ID NO: 1236862 - DNA, 25 bp, Homo sapien
cagttagggagattccctggttctc

SEQ ID NO: 1236863 - DNA, 25 bp, Homo sapien
ccacgctgccagttagggagattcc

SEQ ID NO: 1236864 - DNA, 25 bp, Homo sapien
cccgagtgggcccatgacggaagca

SEQ ID NO: 1236865 - DNA, 25 bp, Homo sapien
gtctgtggaccaatgctgcgacccg

SEQ ID NO: 1236866 - DNA, 25 bp, Homo sapien
cgccgcagacgtggaggcctgcgta

SEQ ID NO: 1236867 - DNA, 25 bp, Homo sapien
acggccacttcctctcgggcgcagg

SEQ ID NO: 1236868 - DNA, 25 bp, Homo sapien
tgtgaaagcagtgcgcagctgacag

SEQ ID NO: 1236869 - DNA, 25 bp, Homo sapien
cgtagtgcacgctgacctgccacgg

SEQ ID NO: 1236870 - DNA, 25 bp, Homo sapien
gtcatagattttgatattcttgtcc

SEQ ID NO: 1236871 - DNA, 25 bp, Homo sapien
gccaccctgaggtttacgaggccta

SEQ ID NO: 1236872 - DNA, 25 bp, Homo sapien
ctgggtgtggttgccggccaccctg

SEQ ID NO: 1236873 - DNA, 25 bp, Homo sapien
tacgaggcctacgtacatgtcatag

SEQ ID NO: 1236874 - DNA, 25 bp, Homo sapien
agaaaacacaatgcgggtcttcagc

SEQ ID NO: 1236875 - DNA, 25 bp, Homo sapien
tttgagactagtccccatcccgtag

SEQ ID NO: 1236876 - DNA, 25 bp, Homo sapien
gcactggtaaggttcacttctggag

SEQ ID NO: 1236877 - DNA, 25 bp, Homo sapien
cgggagcacggactcagaaaacaca

SEQ ID NO: 1236878 - DNA, 25 bp, Homo sapien
cagcatgtcgggcatgatgtaggac

SEQ ID NO: 1236879 - DNA, 25 bp, Homo sapien
gcatgatgtaggacatgtgtccgta

SEQ ID NO: 1236880 - DNA, 25 bp, Homo sapien
catgtgtccgtagagcaggtggcac

SEQ ID NO: 1236881 - DNA, 25 bp, Homo sapien
ctcctgcagctcgtctgaggtctca

SEQ ID NO: 1236882 - DNA, 25 bp, Homo sapien
tacactccagggtacagagggttgg

SEQ ID NO: 1236883 - DNA, 25 bp, Homo sapien
ctgcaaccagctgcggttgaattca

SEQ ID NO: 1236884 - DNA, 25 bp, Homo sapien
agctcacaattccaatctgcaacca

SEQ ID NO: 1236885 - DNA, 25 bp, Homo sapien
tgcggttgaattcacagacaagtgg

SEQ ID NO: 1236886 - DNA, 25 bp, Homo sapien
gagtgggcgtgatttctatgttatc

SEQ ID NO: 1236887 - DNA, 25 bp, Homo sapien
ctgagcaggagtgggcgtgatttct

SEQ ID NO: 1236888 - DNA, 25 bp, Homo sapien
tgggcgtgatttctatgttatcaca

SEQ ID NO: 1236889 - DNA, 25 bp, Homo sapien
caggagtgggcgtgatttctatgtt

SEQ ID NO: 1236890 - DNA, 25 bp, Homo sapien
tttaatgatcttatcaaatctcagg

SEQ ID NO: 1236891 - DNA, 25 bp, Homo sapien
aaatctcaggtgcactctgcccaag

SEQ ID NO: 1236892 - DNA, 25 bp, Homo sapien
ttttgtacacttgctcatcacctcc

SEQ ID NO: 1236893 - DNA, 25 bp, Homo sapien
gaatcctagagtgggtatcctgacc

SEQ ID NO: 1236894 - DNA, 25 bp, Homo sapien
ccaaatagtagaagacgagatgtct

SEQ ID NO: 1236895 - DNA, 25 bp, Homo sapien
actgctggagactaagcgtgggcta

SEQ ID NO: 1236896 - DNA, 25 bp, Homo sapien
gacatctagcttccgttttggcatg

SEQ ID NO: 1236897 - DNA, 25 bp, Homo sapien
aaatacctccctgaacactggagag

SEQ ID NO: 1236898 - DNA, 25 bp, Homo sapien
catgccacttgaccagcagagggac

SEQ ID NO: 1236899 - DNA, 25 bp, Homo sapien
acaagccatgccacttgaccagcag

SEQ ID NO: 1236900 - DNA, 25 bp, Homo sapien
aagccatgccacttgaccagcagag

SEQ ID NO: 1236901 - DNA, 25 bp, Homo sapien
acaggagcctcacaagccatgccac

SEQ ID NO: 1236902 - DNA, 25 bp, Homo sapien
gcatggtcattggaggtctttgcat

SEQ ID NO: 1236903 - DNA, 25 bp, Homo sapien
tgagcatttgcatggtcattggagg

SEQ ID NO: 1236904 - DNA, 25 bp, Homo sapien
catttgcatggtcattggaggtctt

SEQ ID NO: 1236905 - DNA, 25 bp, Homo sapien
aatgagcatttgcatggtcattgga

SEQ ID NO: 1236906 - DNA, 25 bp, Homo sapien
tagcatatagatgaaccataagctt

SEQ ID NO: 1236907 - DNA, 25 bp, Homo sapien
tagatgaaccataagctttgttttg

SEQ ID NO: 1236908 - DNA, 25 bp, Homo sapien
ttactgccttctgcttagtttgagg

SEQ ID NO: 1236909 - DNA, 25 bp, Homo sapien
gaaggagtctcttctagatagcata

SEQ ID NO: 1236910 - DNA, 25 bp, Homo sapien
aaggtgccggaaactggagcgagca

SEQ ID NO: 1236911 - DNA, 25 bp, Homo sapien
gggccccgggtgctgcctggctcat

SEQ ID NO: 1236912 - DNA, 25 bp, Homo sapien
ggaaaggtgccggaaactggagcga

SEQ ID NO: 1236913 - DNA, 25 bp, Homo sapien
gtgccggaaactggagcgagcagag

SEQ ID NO: 1236914 - DNA, 25 bp, Homo sapien
tttgcccagtgagactcccagcggg

SEQ ID NO: 1236915 - DNA, 25 bp, Homo sapien
tgcctttgcccagtgagactcccag

SEQ ID NO: 1236916 - DNA, 25 bp, Homo sapien
ctggtgctgagtggccgccccgggc

SEQ ID NO: 1236917 - DNA, 25 bp, Homo sapien
ggtgcctttgcccagtgagactccc

SEQ ID NO: 1236918 - DNA, 25 bp, Homo sapien
cagctctttgtgctcttccaaggcc

SEQ ID NO: 1236919 - DNA, 25 bp, Homo sapien
gagcctgaagacaaacagctctttg

SEQ ID NO: 1236920 - DNA, 25 bp, Homo sapien
gcagcccaggccatgctcctggggt

SEQ ID NO: 1236921 - DNA, 25 bp, Homo sapien
gtgctcttccaaggccacctggcag

SEQ ID NO: 1236922 - DNA, 25 bp, Homo sapien
ccacggctgcctgcccgcgttccct

SEQ ID NO: 1236923 - DNA, 25 bp, Homo sapien
cggctgcctgcccgcgttccctcct

SEQ ID NO: 1236924 - DNA, 25 bp, Homo sapien
ctgcccgcgttccctcctgactgtg

SEQ ID NO: 1236925 - DNA, 25 bp, Homo sapien
acggctgcctgcccgcgttccctcc

SEQ ID NO: 1236926 - DNA, 25 bp, Homo sapien
ttgctggggaggctacaagaatgtc

SEQ ID NO: 1236927 - DNA, 25 bp, Homo sapien
gctccccattgctggggaggctaca

SEQ ID NO: 1236928 - DNA, 25 bp, Homo sapien
cattgctggggaggctacaagaatg

SEQ ID NO: 1236929 - DNA, 25 bp, Homo sapien
cccattgctggggaggctacaagaa

SEQ ID NO: 1236930 - DNA, 25 bp, Homo sapien
ctatccctggaaacagccaggtcca

SEQ ID NO: 1236931 - DNA, 25 bp, Homo sapien
agccaggtccagagccattcagcct

SEQ ID NO: 1236932 - DNA, 25 bp, Homo sapien
aggtccagagccattcagcctggag

SEQ ID NO: 1236933 - DNA, 25 bp, Homo sapien
caggtccagagccattcagcctgga

SEQ ID NO: 1236934 - DNA, 25 bp, Homo sapien
gactgtgacggagtcatgtgtttca

SEQ ID NO: 1236935 - DNA, 25 bp, Homo sapien
tgtttcaaggccattttcaggtggg

SEQ ID NO: 1236936 - DNA, 25 bp, Homo sapien
tggcactaggctggtgccctgcctg

SEQ ID NO: 1236937 - DNA, 25 bp, Homo sapien
gcgttccggggtctggtcccagcat

SEQ ID NO: 1236938 - DNA, 25 bp, Homo sapien
tttccggacaacagggcatccccat

SEQ ID NO: 1236939 - DNA, 25 bp, Homo sapien
gtttccggacaacagggcatcccca

SEQ ID NO: 1236940 - DNA, 25 bp, Homo sapien
ctgtccaacgacatccaccaggtgg

SEQ ID NO: 1236941 - DNA, 25 bp, Homo sapien
agacaccttggaatccacgaggtgc

SEQ ID NO: 1236942 - DNA, 25 bp, Homo sapien
gtgggtggagacaccttggaatcca

SEQ ID NO: 1236943 - DNA, 25 bp, Homo sapien
tccaacgacatccaccaggtgggtg

SEQ ID NO: 1236944 - DNA, 25 bp, Homo sapien
gcttggtccggtgcagccacaaacg

SEQ ID NO: 1236945 - DNA, 25 bp, Homo sapien
gggaagaacgtgcttcctccatctt

SEQ ID NO: 1236946 - DNA, 25 bp, Homo sapien
ttgcttggtccggtgcagccacaaa

SEQ ID NO: 1236947 - DNA, 25 bp, Homo sapien
ttggtccggtgcagccacaaacgcg

SEQ ID NO: 1236948 - DNA, 25 bp, Homo sapien
tatgggtgttgagacgtcttccttc

SEQ ID NO: 1236949 - DNA, 25 bp, Homo sapien
gcagccgcagccacgtatgggtgtt

SEQ ID NO: 1236950 - DNA, 25 bp, Homo sapien
tgtgccctgtggcatggcagccgca

SEQ ID NO: 1236951 - DNA, 25 bp, Homo sapien
catctgcagcgtggaactgttctgt

SEQ ID NO: 1236952 - DNA, 25 bp, Homo sapien
tgcagctgggccctggtggcgttgc

SEQ ID NO: 1236953 - DNA, 25 bp, Homo sapien
agctgggccctggtggcgttgcagc

SEQ ID NO: 1236954 - DNA, 25 bp, Homo sapien
tgggtgcagctgggccctggtggcg

SEQ ID NO: 1236955 - DNA, 25 bp, Homo sapien
ggtgcagctgggccctggtggcgtt

SEQ ID NO: 1236956 - DNA, 25 bp, Homo sapien
ggtcctgcgtgcagccttggttgcc

SEQ ID NO: 1236957 - DNA, 25 bp, Homo sapien
cgtgcagccttggttgcctgtcttg

SEQ ID NO: 1236958 - DNA, 25 bp, Homo sapien
ggttgcctgtcttgcagcccacaga

SEQ ID NO: 1236959 - DNA, 25 bp, Homo sapien
agccttggttgcctgtcttgcagcc

SEQ ID NO: 1236960 - DNA, 25 bp, Homo sapien
ccggccccgtgacctgcagcctggg

SEQ ID NO: 1236961 - DNA, 25 bp, Homo sapien
ctgggtggcactgggccgccccggc

SEQ ID NO: 1236962 - DNA, 25 bp, Homo sapien
tcccaggagcctgttgccctcccgg

SEQ ID NO: 1236963 - DNA, 25 bp, Homo sapien
caggagcctgttgccctcccggcat

SEQ ID NO: 1236964 - DNA, 25 bp, Homo sapien
aaagagcacacaggcacggatacct

SEQ ID NO: 1236965 - DNA, 25 bp, Homo sapien
ctaggaaagagcacacaggcacgga

SEQ ID NO: 1236966 - DNA, 25 bp, Homo sapien
caggcacggatacctcctggaggct

SEQ ID NO: 1236967 - DNA, 25 bp, Homo sapien
acaggcacggatacctcctggaggc

SEQ ID NO: 1236968 - DNA, 25 bp, Homo sapien
tgtgtggtaaggacggagcagcagt

SEQ ID NO: 1236969 - DNA, 25 bp, Homo sapien
cctggcctgggaccttccgccggct

SEQ ID NO: 1236970 - DNA, 25 bp, Homo sapien
tggcctcatcttgctcccgccctgc

SEQ ID NO: 1236971 - DNA, 25 bp, Homo sapien
gggtttggccatcaaagaagcgtgt

SEQ ID NO: 1236972 - DNA, 25 bp, Homo sapien
tctgcctctctgtgcatcaggcctg

SEQ ID NO: 1236973 - DNA, 25 bp, Homo sapien
catggctctgcctctctgtgcatca

SEQ ID NO: 1236974 - DNA, 25 bp, Homo sapien
cctgcctggtcccatggctctgcct

SEQ ID NO: 1236975 - DNA, 25 bp, Homo sapien
ggctctgcctctctgtgcatcaggc

SEQ ID NO: 1236976 - DNA, 25 bp, Homo sapien
gaagaggcataaccaaggctggcac

SEQ ID NO: 1236977 - DNA, 25 bp, Homo sapien
cactgagggattgttgaggtgcccc

SEQ ID NO: 1236978 - DNA, 25 bp, Homo sapien
ctggcactgagggattgttgaggtg

SEQ ID NO: 1236979 - DNA, 25 bp, Homo sapien
gtgcttggaactggtccagaagcca

SEQ ID NO: 1236980 - DNA, 25 bp, Homo sapien
aaatccagatgttcctcgcgctgag

SEQ ID NO: 1236981 - DNA, 25 bp, Homo sapien
gcctcgcgcttagggactgggatca

SEQ ID NO: 1236982 - DNA, 25 bp, Homo sapien
ttgcctggcgctgtttgtttgcggc

SEQ ID NO: 1236983 - DNA, 25 bp, Homo sapien
ggtcctccgtgaccgcagagtcgtc

SEQ ID NO: 1236984 - DNA, 25 bp, Homo sapien
ttctccatcttagaaaccacctcag

SEQ ID NO: 1236985 - DNA, 25 bp, Homo sapien
tcttagaaaccacctcagctttctc

SEQ ID NO: 1236986 - DNA, 25 bp, Homo sapien
cttattctccatcttagaaaccacc

SEQ ID NO: 1236987 - DNA, 25 bp, Homo sapien
atcttagaaaccacctcagctttct

SEQ ID NO: 1236988 - DNA, 25 bp, Homo sapien
cctcgacaggctgcaaaaggcaaaa

SEQ ID NO: 1236989 - DNA, 25 bp, Homo sapien
gaaaagtcgccatggggcatgagct

SEQ ID NO: 1236990 - DNA, 25 bp, Homo sapien
gacattctgggcctcgacaggctgc

SEQ ID NO: 1236991 - DNA, 25 bp, Homo sapien
agttaaggacattctgggcctcgac

SEQ ID NO: 1236992 - DNA, 25 bp, Homo sapien
tgtagacgcactgggaggatgagct

SEQ ID NO: 1236993 - DNA, 25 bp, Homo sapien
cttaagaattctgtggcctacagag

SEQ ID NO: 1236994 - DNA, 25 bp, Homo sapien
caggagacgggcctgtagacgcact

SEQ ID NO: 1236995 - DNA, 25 bp, Homo sapien
gcagctcagcaggagttgggccaaa

SEQ ID NO: 1236996 - DNA, 25 bp, Homo sapien
tggccgcagtgagggaatagtttga

SEQ ID NO: 1236997 - DNA, 25 bp, Homo sapien
aacttggctttcggtggccgcagtg

SEQ ID NO: 1236998 - DNA, 25 bp, Homo sapien
acttggctttcggtggccgcagtga

SEQ ID NO: 1236999 - DNA, 25 bp, Homo sapien
aggatgcaaagcagcaaacgctagg

SEQ ID NO: 1237000 - DNA, 25 bp, Homo sapien
gcaaagcagcaaacgctaggcctgg

SEQ ID NO: 1237001 - DNA, 25 bp, Homo sapien
tgcaaagcagcaaacgctaggcctg

SEQ ID NO: 1237002 - DNA, 25 bp, Homo sapien
gatgcaaagcagcaaacgctaggcc

SEQ ID NO: 1237003 - DNA, 25 bp, Homo sapien
aggccgccgagaggccgttgctggg

SEQ ID NO: 1237004 - DNA, 25 bp, Homo sapien
ggaaaggccgccgagaggccgttgc

SEQ ID NO: 1237005 - DNA, 25 bp, Homo sapien
cgccgagaggccgttgctgggcctg

SEQ ID NO: 1237006 - DNA, 25 bp, Homo sapien
gccgagaggccgttgctgggcctgg

SEQ ID NO: 1237007 - DNA, 25 bp, Homo sapien
gcctggccttgtcgaggcctgcaga

SEQ ID NO: 1237008 - DNA, 25 bp, Homo sapien
ttgggaggcaggaggcctggccttg

SEQ ID NO: 1237009 - DNA, 25 bp, Homo sapien
aggaggcctggccttgtcgaggcct

SEQ ID NO: 1237010 - DNA, 25 bp, Homo sapien
tggccttgtcgaggcctgcagaggc

SEQ ID NO: 1237011 - DNA, 25 bp, Homo sapien
ccaaaaaggttgttgagaggcagga

SEQ ID NO: 1237012 - DNA, 25 bp, Homo sapien
aaggttgttgagaggcaggagtcgg

SEQ ID NO: 1237013 - DNA, 25 bp, Homo sapien
atgggtaggcactgagtccaaaaag

SEQ ID NO: 1237014 - DNA, 25 bp, Homo sapien
tgggtaggcactgagtccaaaaagg

SEQ ID NO: 1237015 - DNA, 25 bp, Homo sapien
gaggcaggaccgggagaggccgact

SEQ ID NO: 1237016 - DNA, 25 bp, Homo sapien
tgggaggcaggaccgggagaggccg

SEQ ID NO: 1237017 - DNA, 25 bp, Homo sapien
tgctgggaggcaggaccgggagagg

SEQ ID NO: 1237018 - DNA, 25 bp, Homo sapien
ggcaggaccgggagaggccgacttc

SEQ ID NO: 1237019 - DNA, 25 bp, Homo sapien
ccgaattgaggaggcccggcctctg

SEQ ID NO: 1237020 - DNA, 25 bp, Homo sapien
agaggccgaattgaggaggcccggc

SEQ ID NO: 1237021 - DNA, 25 bp, Homo sapien
ccggcctctgtctcccccatggcgg

SEQ ID NO: 1237022 - DNA, 25 bp, Homo sapien
ctctgtctcccccatggcggcctct

SEQ ID NO: 1237023 - DNA, 25 bp, Homo sapien
gacgttgttgggaggccagagtcgg

SEQ ID NO: 1237024 - DNA, 25 bp, Homo sapien
aagacgttgttgggaggccagagtc

SEQ ID NO: 1237025 - DNA, 25 bp, Homo sapien
cttcgggaagttgtgggcctaccag

SEQ ID NO: 1237026 - DNA, 25 bp, Homo sapien
cttggcttcgggaagttgtgggcct

SEQ ID NO: 1237027 - DNA, 25 bp, Homo sapien
agcctggagaggccaccgtgaggcc

SEQ ID NO: 1237028 - DNA, 25 bp, Homo sapien
tggagaggccaccgtgaggcctgac

SEQ ID NO: 1237029 - DNA, 25 bp, Homo sapien
ctgagcctggagaggccaccgtgag

SEQ ID NO: 1237030 - DNA, 25 bp, Homo sapien
ctgcagatgccatcggagggcagga

SEQ ID NO: 1237031 - DNA, 25 bp, Homo sapien
agaggccgacttcgggacgatttgg

SEQ ID NO: 1237032 - DNA, 25 bp, Homo sapien
gggcctggagaggccgacttcggga

SEQ ID NO: 1237033 - DNA, 25 bp, Homo sapien
tggagaggccgacttcgggacgatt

SEQ ID NO: 1237034 - DNA, 25 bp, Homo sapien
ccgacttcgggacgatttgggcctg

SEQ ID NO: 1237035 - DNA, 25 bp, Homo sapien
gggaggccgacttgctgctcttcca

SEQ ID NO: 1237036 - DNA, 25 bp, Homo sapien
cgccgagaggacggagttgggcccg

SEQ ID NO: 1237037 - DNA, 25 bp, Homo sapien
ggcccaattccaggccgatttgagg

SEQ ID NO: 1237038 - DNA, 25 bp, Homo sapien
caattccaggccgatttgaggatga

SEQ ID NO: 1237039 - DNA, 25 bp, Homo sapien
ccatgagctgggctgggccgaaaga

SEQ ID NO: 1237040 - DNA, 25 bp, Homo sapien
ctgggaaggccgccgagagccatga

SEQ ID NO: 1237041 - DNA, 25 bp, Homo sapien
ggcctggagaggctgactcgaggaa

SEQ ID NO: 1237042 - DNA, 25 bp, Homo sapien
gaggctgactcgaggaagttttgca

SEQ ID NO: 1237043 - DNA, 25 bp, Homo sapien
tgcaaaggcccactggaggtcaagt

SEQ ID NO: 1237044 - DNA, 25 bp, Homo sapien
ccactggaggtcaagttctgggcct

SEQ ID NO: 1237045 - DNA, 25 bp, Homo sapien
aggcccactggaggtcaagttctgg

SEQ ID NO: 1237046 - DNA, 25 bp, Homo sapien
gcccactggaggtcaagttctgggc

SEQ ID NO: 1237047 - DNA, 25 bp, Homo sapien
tcattgtgccaaaaagttgccatga

SEQ ID NO: 1237048 - DNA, 25 bp, Homo sapien
catgggcgatatttttcattgtgcc

SEQ ID NO: 1237049 - DNA, 25 bp, Homo sapien
ttgtgccaaaaagttgccatgaccg

SEQ ID NO: 1237050 - DNA, 25 bp, Homo sapien
tcatgggcgatatttttcattgtgc

SEQ ID NO: 1237051 - DNA, 25 bp, Homo sapien
acgcccagatgcaagatgagaaggt

SEQ ID NO: 1237052 - DNA, 25 bp, Homo sapien
cagcccaaagcccaacacccccaag

SEQ ID NO: 1237053 - DNA, 25 bp, Homo sapien
accacgcccagatgcaagatgagaa

SEQ ID NO: 1237054 - DNA, 25 bp, Homo sapien
atgagaaggtgctccagctgcagcc

SEQ ID NO: 1237055 - DNA, 25 bp, Homo sapien
aaaccaatgtgcagttgtgacacca

SEQ ID NO: 1237056 - DNA, 25 bp, Homo sapien
aaccaatgtgcagttgtgacaccaa

SEQ ID NO: 1237057 - DNA, 25 bp, Homo sapien
ctgcagctgtgaaaccaatgtgcag

SEQ ID NO: 1237058 - DNA, 25 bp, Homo sapien
tgattttaagatgctcgaacttgtc

SEQ ID NO: 1237059 - DNA, 25 bp, Homo sapien
ctcctcctgttgaatgattttaaga

SEQ ID NO: 1237060 - DNA, 25 bp, Homo sapien
tctatgatttctcctaccagttgtt

SEQ ID NO: 1237061 - DNA, 25 bp, Homo sapien
aaaaatctatgatttctcctaccag

SEQ ID NO: 1237062 - DNA, 25 bp, Homo sapien
cgccgcgcgagagggcgcggagggc

SEQ ID NO: 1237063 - DNA, 25 bp, Homo sapien
cgggagtccgccccgagagcgtgag

SEQ ID NO: 1237064 - DNA, 25 bp, Homo sapien
gccgggagtccgccccgagagcgtg

SEQ ID NO: 1237065 - DNA, 25 bp, Homo sapien
gagtccgccccgagagcgtgagcgc

SEQ ID NO: 1237066 - DNA, 25 bp, Homo sapien
gaggagtaagaagtatccgagtggg

SEQ ID NO: 1237067 - DNA, 25 bp, Homo sapien
agtaagaagtatccgagtggggcca

SEQ ID NO: 1237068 - DNA, 25 bp, Homo sapien
caccagatcgggtagctgcccagag

SEQ ID NO: 1237069 - DNA, 25 bp, Homo sapien
cagaggagtaagaagtatccgagtg

SEQ ID NO: 1237070 - DNA, 25 bp, Homo sapien
ccctcctcccctggtgatgcttaat

SEQ ID NO: 1237071 - DNA, 25 bp, Homo sapien
caggagcccacctggcaggggccaa

SEQ ID NO: 1237072 - DNA, 25 bp, Homo sapien
aaggtcccctcctcccctggtgatg

SEQ ID NO: 1237073 - DNA, 25 bp, Homo sapien
tggcaggggccaaggtcccctcctc

SEQ ID NO: 1237074 - DNA, 25 bp, Homo sapien
ggcggcagcggcacgttttgccggg

SEQ ID NO: 1237075 - DNA, 25 bp, Homo sapien
ttgccagtttccctgggcggcagcg

SEQ ID NO: 1237076 - DNA, 25 bp, Homo sapien
aatgtggaagcagcaacgtgagaga

SEQ ID NO: 1237077 - DNA, 25 bp, Homo sapien
gacacctccagggtgtcacctgggg

SEQ ID NO: 1237078 - DNA, 25 bp, Homo sapien
gaacgagtcccagcaggcacagcgg

SEQ ID NO: 1237079 - DNA, 25 bp, Homo sapien
agcggctcctgtgcccgcggccacg

SEQ ID NO: 1237080 - DNA, 25 bp, Homo sapien
tttgaacgagtcccagcaggcacag

SEQ ID NO: 1237081 - DNA, 25 bp, Homo sapien
cacagcggctcctgtgcccgcggcc

SEQ ID NO: 1237082 - DNA, 25 bp, Homo sapien
tggaggtgctacctaatccctgtgg

SEQ ID NO: 1237083 - DNA, 25 bp, Homo sapien
gcactggaggtgctacctaatccct

SEQ ID NO: 1237084 - DNA, 25 bp, Homo sapien
tggcggcactggaggtgctacctaa

SEQ ID NO: 1237085 - DNA, 25 bp, Homo sapien
ggtgctacctaatccctgtggatgg

SEQ ID NO: 1237086 - DNA, 25 bp, Homo sapien
tgcagagggcaagatccggtggtga

SEQ ID NO: 1237087 - DNA, 25 bp, Homo sapien
ctgcagagggcaagatccggtggtg

SEQ ID NO: 1237088 - DNA, 25 bp, Homo sapien
agagggcaagatccggtggtgagtg

SEQ ID NO: 1237089 - DNA, 25 bp, Homo sapien
gggcaagatccggtggtgagtgtgg

SEQ ID NO: 1237090 - DNA, 25 bp, Homo sapien
cccagggaggaatactgtggcccaa

SEQ ID NO: 1237091 - DNA, 25 bp, Homo sapien
tggatgccaatcttgatgccctcgg

SEQ ID NO: 1237092 - DNA, 25 bp, Homo sapien
ctttgtccagcacgggcccgaagat

SEQ ID NO: 1237093 - DNA, 25 bp, Homo sapien
gctgggcatgatctccacgtagttc

SEQ ID NO: 1237094 - DNA, 25 bp, Homo sapien
tgtcacacaccagacccatgggaga

SEQ ID NO: 1237095 - DNA, 25 bp, Homo sapien
atatgctatagggatgctgtcacac

SEQ ID NO: 1237096 - DNA, 25 bp, Homo sapien
atgctgtcacacaccagacccatgg

SEQ ID NO: 1237097 - DNA, 25 bp, Homo sapien
ctgtgtggcatatgctatagggatg

SEQ ID NO: 1237098 - DNA, 25 bp, Homo sapien
ctgcatccactgcagccgtccctgc

SEQ ID NO: 1237099 - DNA, 25 bp, Homo sapien
tccactgcagccgtccctgcccttt

SEQ ID NO: 1237100 - DNA, 25 bp, Homo sapien
agagccacgtgctgcctgagatcca

SEQ ID NO: 1237101 - DNA, 25 bp, Homo sapien
tttctctgtacctgtgtccttgcca

SEQ ID NO: 1237102 - DNA, 25 bp, Homo sapien
ccaagaagcatttcggcagggacag

SEQ ID NO: 1237103 - DNA, 25 bp, Homo sapien
aggtgacccaagaagcatttcggca

SEQ ID NO: 1237104 - DNA, 25 bp, Homo sapien
catttcggcagggacaggtgtttgc

SEQ ID NO: 1237105 - DNA, 25 bp, Homo sapien
ttcggcagggacaggtgtttgctca

SEQ ID NO: 1237106 - DNA, 25 bp, Homo sapien
tggactgtcggagttcccactggaa

SEQ ID NO: 1237107 - DNA, 25 bp, Homo sapien
cacagcaatcagttgttggagaaag

SEQ ID NO: 1237108 - DNA, 25 bp, Homo sapien
tgaactttttgagccacctaaggcc

SEQ ID NO: 1237109 - DNA, 25 bp, Homo sapien
ggcagggtgcttagacacaaatgct

SEQ ID NO: 1237110 - DNA, 25 bp, Homo sapien
ctccaccccaagcaccgacacttgc

SEQ ID NO: 1237111 - DNA, 25 bp, Homo sapien
tctgctgtgccacttgccattgcct

SEQ ID NO: 1237112 - DNA, 25 bp, Homo sapien
gtgccacttgccattgccttcctcc

SEQ ID NO: 1237113 - DNA, 25 bp, Homo sapien
ccaccccaagcaccgacacttgcat

SEQ ID NO: 1237114 - DNA, 25 bp, Homo sapien
aaactcgatgtcctcgctacagcca

SEQ ID NO: 1237115 - DNA, 25 bp, Homo sapien
tgctgcagccacagatggcggccgt

SEQ ID NO: 1237116 - DNA, 25 bp, Homo sapien
acatgagcgtgtcactgcaaaggcc

SEQ ID NO: 1237117 - DNA, 25 bp, Homo sapien
caatggcgtggacaaaggccgactc

SEQ ID NO: 1237118 - DNA, 25 bp, Homo sapien
agcacccttgcgggcggcgaaccta

SEQ ID NO: 1237119 - DNA, 25 bp, Homo sapien
tcaccgggccatatgccccaaggaa

SEQ ID NO: 1237120 - DNA, 25 bp, Homo sapien
ggccatatgccccaaggaaccaggg

SEQ ID NO: 1237121 - DNA, 25 bp, Homo sapien
ttcccaagcacccttgcgggcggcg

SEQ ID NO: 1237122 - DNA, 25 bp, Homo sapien
ggaagagtccaacagtttccaagac

SEQ ID NO: 1237123 - DNA, 25 bp, Homo sapien
gagccagcgtcagggcggccccctg

SEQ ID NO: 1237124 - DNA, 25 bp, Homo sapien
gcgtcagggcggccccctggtgcgt

SEQ ID NO: 1237125 - DNA, 25 bp, Homo sapien
tgcggggcacgcgcaggagccagcg

SEQ ID NO: 1237126 - DNA, 25 bp, Homo sapien
cggggcacgcgcaggagccagcgtc

SEQ ID NO: 1237127 - DNA, 25 bp, Homo sapien
tcgatgccgtgcgagctgacgttgc

SEQ ID NO: 1237128 - DNA, 25 bp, Homo sapien
ccgtctcagggttgggctcgcagaa

SEQ ID NO: 1237129 - DNA, 25 bp, Homo sapien
cgggttgcgaccaccagcatgtctt

SEQ ID NO: 1237130 - DNA, 25 bp, Homo sapien
accttgaagtaggtgtagcgcggcc

SEQ ID NO: 1237131 - DNA, 25 bp, Homo sapien
tggagcattccaaagccaggcgctt

SEQ ID NO: 1237132 - DNA, 25 bp, Homo sapien
tgccctggtcaggagaagctctgcc

SEQ ID NO: 1237133 - DNA, 25 bp, Homo sapien
gccttaatcaggagggcggttccca

SEQ ID NO: 1237134 - DNA, 25 bp, Homo sapien
catgaggcaaccagggatatgggcc

SEQ ID NO: 1237135 - DNA, 25 bp, Homo sapien
gggtgtcacggccccagccaatgag

SEQ ID NO: 1237136 - DNA, 25 bp, Homo sapien
ctgggatgggtgtcacggccccagc

SEQ ID NO: 1237137 - DNA, 25 bp, Homo sapien
gtgtcacggccccagccaatgaggc

SEQ ID NO: 1237138 - DNA, 25 bp, Homo sapien
ggatgggtgtcacggccccagccaa

SEQ ID NO: 1237139 - DNA, 25 bp, Homo sapien
gtgcatggccctgattgtaattcct

SEQ ID NO: 1237140 - DNA, 25 bp, Homo sapien
catggccctgattgtaattcctggt

SEQ ID NO: 1237141 - DNA, 25 bp, Homo sapien
gagtgcatggccctgattgtaattc

SEQ ID NO: 1237142 - DNA, 25 bp, Homo sapien
gctctgagtgcatggccctgattgt

SEQ ID NO: 1237143 - DNA, 25 bp, Homo sapien
agcccagggtgctccaacgtcttct

SEQ ID NO: 1237144 - DNA, 25 bp, Homo sapien
gcccagggtgctccaacgtcttcta

SEQ ID NO: 1237145 - DNA, 25 bp, Homo sapien
ccagatgatcccgaaggcagccact

SEQ ID NO: 1237146 - DNA, 25 bp, Homo sapien
gatgatcccgaaggcagccactgac

SEQ ID NO: 1237147 - DNA, 25 bp, Homo sapien
gccctcccagatgatcccgaaggca

SEQ ID NO: 1237148 - DNA, 25 bp, Homo sapien
tcccagatgatcccgaaggcagcca

SEQ ID NO: 1237149 - DNA, 25 bp, Homo sapien
gattcatgccataaaggtggaggct

SEQ ID NO: 1237150 - DNA, 25 bp, Homo sapien
tgtggaagcccgaggaagccccttg

SEQ ID NO: 1237151 - DNA, 25 bp, Homo sapien
cacggcaggccacgatgtccaaggg

SEQ ID NO: 1237152 - DNA, 25 bp, Homo sapien
aagccccttgtgctacacggcaggc

SEQ ID NO: 1237153 - DNA, 25 bp, Homo sapien
gggagcaaaaccaacgcctggctcg

SEQ ID NO: 1237154 - DNA, 25 bp, Homo sapien
aaaaccaacgcctggctcggagcag

SEQ ID NO: 1237155 - DNA, 25 bp, Homo sapien
gagcaaaaccaacgcctggctcgga

SEQ ID NO: 1237156 - DNA, 25 bp, Homo sapien
aggcgctgacgtggccgccgtcaga

SEQ ID NO: 1237157 - DNA, 25 bp, Homo sapien
tgggagcaaaaccaacgcctggctc

SEQ ID NO: 1237158 - DNA, 25 bp, Homo sapien
accaacgcctggctcggagcagcag

SEQ ID NO: 1237159 - DNA, 25 bp, Homo sapien
tccgagccaggcgttggttttgctc

SEQ ID NO: 1237160 - DNA, 25 bp, Homo sapien
gctgctccgagccaggcgttggttt

SEQ ID NO: 1237161 - DNA, 25 bp, Homo sapien
tgctccgagccaggcgttggttttg

SEQ ID NO: 1237162 - DNA, 25 bp, Homo sapien
gagccaggcgttggttttgctccca

SEQ ID NO: 1237163 - DNA, 25 bp, Homo sapien
tctgacggcggccacgtcagcgcct

SEQ ID NO: 1237164 - DNA, 25 bp, Homo sapien
ctgctgctccgagccaggcgttggt

SEQ ID NO: 1237165 - DNA, 25 bp, Homo sapien
gccgcagagacgttggagccggcgg

SEQ ID NO: 1237166 - DNA, 25 bp, Homo sapien
tgggccgcagagacgttggagccgg

SEQ ID NO: 1237167 - DNA, 25 bp, Homo sapien
tgtgggccgcagagacgttggagcc

SEQ ID NO: 1237168 - DNA, 25 bp, Homo sapien
gtgtgggccgcagagacgttggagc

SEQ ID NO: 1237169 - DNA, 25 bp, Homo sapien
cagagacgttggagccggcgggggc

SEQ ID NO: 1237170 - DNA, 25 bp, Homo sapien
ccgcagagacgttggagccggcggg

SEQ ID NO: 1237171 - DNA, 25 bp, Homo sapien
cccgccggctccaacgtctctgcgg

SEQ ID NO: 1237172 - DNA, 25 bp, Homo sapien
ccggctccaacgtctctgcggccca

SEQ ID NO: 1237173 - DNA, 25 bp, Homo sapien
cgccggctccaacgtctctgcggcc

SEQ ID NO: 1237174 - DNA, 25 bp, Homo sapien
ccgccggctccaacgtctctgcggc

SEQ ID NO: 1237175 - DNA, 25 bp, Homo sapien
ggctccaacgtctctgcggcccaca

SEQ ID NO: 1237176 - DNA, 25 bp, Homo sapien
ccccgccggctccaacgtctctgcg

SEQ ID NO: 1237177 - DNA, 25 bp, Homo sapien
gggcgcgggccggtgtgggccgcag

SEQ ID NO: 1237178 - DNA, 25 bp, Homo sapien
tgggccgcagagacgttggagccgg

SEQ ID NO: 1237179 - DNA, 25 bp, Homo sapien
tgtgggccgcagagacgttggagcc

SEQ ID NO: 1237180 - DNA, 25 bp, Homo sapien
tggggactggcctcggggcgacttg

SEQ ID NO: 1237181 - DNA, 25 bp, Homo sapien
gtgtgggccgcagagacgttggagc

SEQ ID NO: 1237182 - DNA, 25 bp, Homo sapien
ccgcagagacgttggagccggcggg

SEQ ID NO: 1237183 - DNA, 25 bp, Homo sapien
ccggctccaacgtctctgcggccca

SEQ ID NO: 1237184 - DNA, 25 bp, Homo sapien
cgccggctccaacgtctctgcggcc

SEQ ID NO: 1237185 - DNA, 25 bp, Homo sapien
tcaagtcgccccgaggccagtcccc

SEQ ID NO: 1237186 - DNA, 25 bp, Homo sapien
ggctccaacgtctctgcggcccaca

SEQ ID NO: 1237187 - DNA, 25 bp, Homo sapien
ccccgccggctccaacgtctctgcg

SEQ ID NO: 1237188 - DNA, 25 bp, Homo sapien
cccgccggctccaacgtctctgcgg

SEQ ID NO: 1237189 - DNA, 25 bp, Homo sapien
ggcggacgcagacgggccgggctga

SEQ ID NO: 1237190 - DNA, 25 bp, Homo sapien
ggacgggcgggtcggtgagctcctc

SEQ ID NO: 1237191 - DNA, 25 bp, Homo sapien
gcggacgggcgggtcggtgagctcc

SEQ ID NO: 1237192 - DNA, 25 bp, Homo sapien
cgggtcggtgagctcctcgcacccc

SEQ ID NO: 1237193 - DNA, 25 bp, Homo sapien
tcgcgaagggcacgtcgacccccgc

SEQ ID NO: 1237194 - DNA, 25 bp, Homo sapien
gggcgggtcggtgagctcctcgcac

SEQ ID NO: 1237195 - DNA, 25 bp, Homo sapien
ggtgcgaggagctcaccgacccgcc

SEQ ID NO: 1237196 - DNA, 25 bp, Homo sapien
tcagcccggcccgtctgcgtccgcc

SEQ ID NO: 1237197 - DNA, 25 bp, Homo sapien
gcgaggagctcaccgacccgcccgt

SEQ ID NO: 1237198 - DNA, 25 bp, Homo sapien
gcgggggtcgacgtgcccttcgcga

SEQ ID NO: 1237199 - DNA, 25 bp, Homo sapien
aggagctcaccgacccgcccgtccg

SEQ ID NO: 1237200 - DNA, 25 bp, Homo sapien
gggtgcgaggagctcaccgacccgc

SEQ ID NO: 1237201 - DNA, 25 bp, Homo sapien
cggacgggcgggtcggtgagctcct

SEQ ID NO: 1237202 - DNA, 25 bp, Homo sapien
ggcggacgcagacgggccgggctga

SEQ ID NO: 1237203 - DNA, 25 bp, Homo sapien
cgggcgggtcggtgagctcctcgca

SEQ ID NO: 1237204 - DNA, 25 bp, Homo sapien
gagctcctcgcacccctcacaggtt

SEQ ID NO: 1237205 - DNA, 25 bp, Homo sapien
gcgggtcggtgagctcctcgcaccc

SEQ ID NO: 1237206 - DNA, 25 bp, Homo sapien
tcgcgaagggcacgtcgacccccgc

SEQ ID NO: 1237207 - DNA, 25 bp, Homo sapien
tcagcccggcccgtctgcgtccgcc

SEQ ID NO: 1237208 - DNA, 25 bp, Homo sapien
gcgggggtcgacgtgcccttcgcga

SEQ ID NO: 1237209 - DNA, 25 bp, Homo sapien
aggagctcaccgacccgcccgtccg

SEQ ID NO: 1237210 - DNA, 25 bp, Homo sapien
aacctgtgaggggtgcgaggagctc

SEQ ID NO: 1237211 - DNA, 25 bp, Homo sapien
gggtgcgaggagctcaccgacccgc

SEQ ID NO: 1237212 - DNA, 25 bp, Homo sapien
tgaggggtgcgaggagctcaccgac

SEQ ID NO: 1237213 - DNA, 25 bp, Homo sapien
ccgcccgcgcgtggacggttgggat

SEQ ID NO: 1237214 - DNA, 25 bp, Homo sapien
ctcgggcggcctgagacgccgtcaa

SEQ ID NO: 1237215 - DNA, 25 bp, Homo sapien
tgcctttctcgtttcccgaggccgc

SEQ ID NO: 1237216 - DNA, 25 bp, Homo sapien
gcgagcgagcggcatccgggcggac

SEQ ID NO: 1237217 - DNA, 25 bp, Homo sapien
ccacccgagtacaggcgagcgagcg

SEQ ID NO: 1237218 - DNA, 25 bp, Homo sapien
tggacggttgggattagcggccgcg

SEQ ID NO: 1237219 - DNA, 25 bp, Homo sapien
gggtccgcccggatgccgctcgctc

SEQ ID NO: 1237220 - DNA, 25 bp, Homo sapien
gcggcctcgggaaacgagaaaggca

SEQ ID NO: 1237221 - DNA, 25 bp, Homo sapien
cgctcgctcgcctgtactcgggtgg

SEQ ID NO: 1237222 - DNA, 25 bp, Homo sapien
atgaccttgacggcgtctcaggccg

SEQ ID NO: 1237223 - DNA, 25 bp, Homo sapien
ctaatcccaaccgtccacgcgcggg

SEQ ID NO: 1237224 - DNA, 25 bp, Homo sapien
ttgacggcgtctcaggccgcccgag

SEQ ID NO: 1237225 - DNA, 25 bp, Homo sapien
catcttcgcctcccgactccatcca

SEQ ID NO: 1237226 - DNA, 25 bp, Homo sapien
tggatggagtcgggaggcgaagatg

SEQ ID NO: 1237227 - DNA, 25 bp, Homo sapien
tgggggcttgcatcttcgcctcccg

SEQ ID NO: 1237228 - DNA, 25 bp, Homo sapien
ttgcatcttcgcctcccgactccat

SEQ ID NO: 1237229 - DNA, 25 bp, Homo sapien
catcttcgcctcccgactccatcca

SEQ ID NO: 1237230 - DNA, 25 bp, Homo sapien
gggcttgcatcttcgcctcccgact

SEQ ID NO: 1237231 - DNA, 25 bp, Homo sapien
gggggcttgcatcttcgcctcccga

SEQ ID NO: 1237232 - DNA, 25 bp, Homo sapien
ggcttgcatcttcgcctcccgactc

SEQ ID NO: 1237233 - DNA, 25 bp, Homo sapien
gatggagtcgggaggcgaagatgca

SEQ ID NO: 1237234 - DNA, 25 bp, Homo sapien
gagtcgggaggcgaagatgcaagcc

SEQ ID NO: 1237235 - DNA, 25 bp, Homo sapien
tggatggagtcgggaggcgaagatg

SEQ ID NO: 1237236 - DNA, 25 bp, Homo sapien
gtcgggaggcgaagatgcaagcccc

SEQ ID NO: 1237237 - DNA, 25 bp, Homo sapien
cgggaggcgaagatgcaagccccca

SEQ ID NO: 1237238 - DNA, 25 bp, Homo sapien
agtcgggaggcgaagatgcaagccc

SEQ ID NO: 1237239 - DNA, 25 bp, Homo sapien
tcacaccagtgagacgcaatttggg

SEQ ID NO: 1237240 - DNA, 25 bp, Homo sapien
tcccttcacaccagtgagacgcaat

SEQ ID NO: 1237241 - DNA, 25 bp, Homo sapien
caggtggacaggaaccccgtgccct

SEQ ID NO: 1237242 - DNA, 25 bp, Homo sapien
tccctgtctgctgaacggaatgcgt

SEQ ID NO: 1237243 - DNA, 25 bp, Homo sapien
gctgaacggaatgcgtggacctccg

SEQ ID NO: 1237244 - DNA, 25 bp, Homo sapien
tctgctgaacggaatgcgtggacct

SEQ ID NO: 1237245 - DNA, 25 bp, Homo sapien
agggcacggggttcctgtccacctg

SEQ ID NO: 1237246 - DNA, 25 bp, Homo sapien
aattgcgtctcactggtgtgaaggg

SEQ ID NO: 1237247 - DNA, 25 bp, Homo sapien
gaggtccacgcattccgttcagcag

SEQ ID NO: 1237248 - DNA, 25 bp, Homo sapien
cccaaattgcgtctcactggtgtga

SEQ ID NO: 1237249 - DNA, 25 bp, Homo sapien
acgcattccgttcagcagacaggga

SEQ ID NO: 1237250 - DNA, 25 bp, Homo sapien
cggaggtccacgcattccgttcagc

SEQ ID NO: 1237251 - DNA, 25 bp, Homo sapien
cacgtgtgaccgcatggatggtgtc

SEQ ID NO: 1237252 - DNA, 25 bp, Homo sapien
agcactgcctaggtagccagaacca

SEQ ID NO: 1237253 - DNA, 25 bp, Homo sapien
cataaggtcctgaaatgccgtacta

SEQ ID NO: 1237254 - DNA, 25 bp, Homo sapien
gccgtactattagctgggtccaaaa

SEQ ID NO: 1237255 - DNA, 25 bp, Homo sapien
tagccattgtctaacacgtgtgacc

SEQ ID NO: 1237256 - DNA, 25 bp, Homo sapien
gctggtggttctggcgttttccgca

SEQ ID NO: 1237257 - DNA, 25 bp, Homo sapien
aatgcactcggaatcgcgggcagga

SEQ ID NO: 1237258 - DNA, 25 bp, Homo sapien
gaagtcgccgcctagttgagagctg

SEQ ID NO: 1237259 - DNA, 25 bp, Homo sapien
ttgagagctgtagagttggtgccac

SEQ ID NO: 1237260 - DNA, 25 bp, Homo sapien
gcagaaatgcactcggaatcgcggg

SEQ ID NO: 1237261 - DNA, 25 bp, Homo sapien
gctttggatggtccccgaagtcgcc

SEQ ID NO: 1237262 - DNA, 25 bp, Homo sapien
ctttgcaggaattgagcagaaatgc

SEQ ID NO: 1237263 - DNA, 25 bp, Homo sapien
gcgattccgagtgcatttctgctca

SEQ ID NO: 1237264 - DNA, 25 bp, Homo sapien
gtggcaccaactctacagctctcaa

SEQ ID NO: 1237265 - DNA, 25 bp, Homo sapien
aactctacagctctcaactaggcgg

SEQ ID NO: 1237266 - DNA, 25 bp, Homo sapien
tcctgcccgcgattccgagtgcatt

SEQ ID NO: 1237267 - DNA, 25 bp, Homo sapien
acagctctcaactaggcggcgactt

SEQ ID NO: 1237268 - DNA, 25 bp, Homo sapien
gcatttctgctcaattcctgcaaag

SEQ ID NO: 1237269 - DNA, 25 bp, Homo sapien
caacacactgcggaaaacgccagaa

SEQ ID NO: 1237270 - DNA, 25 bp, Homo sapien
ccatccatgcggtcacacgtgttag

SEQ ID NO: 1237271 - DNA, 25 bp, Homo sapien
tggttctggctacctaggcagtgct

SEQ ID NO: 1237272 - DNA, 25 bp, Homo sapien
caatggctaacgcaacagcagaggg

SEQ ID NO: 1237273 - DNA, 25 bp, Homo sapien
tagtacggcatttcaggaccttatg

SEQ ID NO: 1237274 - DNA, 25 bp, Homo sapien
ttttggacccagctaatagtacggc

SEQ ID NO: 1237275 - DNA, 25 bp, Homo sapien
cacattctcaggtgggtcagatgac

SEQ ID NO: 1237276 - DNA, 25 bp, Homo sapien
ccgctgcggtgatcatggaagtaga

SEQ ID NO: 1237277 - DNA, 25 bp, Homo sapien
tacggaccagacaggcttgaaacta

SEQ ID NO: 1237278 - DNA, 25 bp, Homo sapien
gaaacacgaaaaggcctcgcagtgg

SEQ ID NO: 1237279 - DNA, 25 bp, Homo sapien
gatgaccttgttagcgacttgacag

SEQ ID NO: 1237280 - DNA, 25 bp, Homo sapien
ttaatatggactgtcagccgctgcg

SEQ ID NO: 1237281 - DNA, 25 bp, Homo sapien
tgagtcacacaatgactgtgagtga

SEQ ID NO: 1237282 - DNA, 25 bp, Homo sapien
gagtcacacaatgactgtgagtgaa

SEQ ID NO: 1237283 - DNA, 25 bp, Homo sapien
cacacaatgactgtgagtgaaaagc

SEQ ID NO: 1237284 - DNA, 25 bp, Homo sapien
ttttcactcacagtcattgtgtgac

SEQ ID NO: 1237285 - DNA, 25 bp, Homo sapien
ttcactcacagtcattgtgtgactc

SEQ ID NO: 1237286 - DNA, 25 bp, Homo sapien
gcttttcactcacagtcattgtgtg

SEQ ID NO: 1237287 - DNA, 25 bp, Homo sapien
cttcagacgctacgggcagaatgcc

SEQ ID NO: 1237288 - DNA, 25 bp, Homo sapien
ataatttaagatccccactgcgagg

SEQ ID NO: 1237289 - DNA, 25 bp, Homo sapien
cctatgagagacagtatgggcccgc

SEQ ID NO: 1237290 - DNA, 25 bp, Homo sapien
tagtttcaagcctgtctggtccgta

SEQ ID NO: 1237291 - DNA, 25 bp, Homo sapien
catattgtgcaagaggtacagccca

SEQ ID NO: 1237292 - DNA, 25 bp, Homo sapien
aactacctatctggacggtgcggca

SEQ ID NO: 1237293 - DNA, 25 bp, Homo sapien
aggaatgttcagactgaaccacact

SEQ ID NO: 1237294 - DNA, 25 bp, Homo sapien
tccacatttgtacaaaggaatgttc

SEQ ID NO: 1237295 - DNA, 25 bp, Homo sapien
aaaggaatgttcagactgaaccaca

SEQ ID NO: 1237296 - DNA, 25 bp, Homo sapien
aaggaatgttcagactgaaccacac

SEQ ID NO: 1237297 - DNA, 25 bp, Homo sapien
cacacttaagtacaattttgaaaca

SEQ ID NO: 1237298 - DNA, 25 bp, Homo sapien
ccacatttgtacaaaggaatgttca

SEQ ID NO: 1237299 - DNA, 25 bp, Homo sapien
tgtggttcagtctgaacattccttt

SEQ ID NO: 1237300 - DNA, 25 bp, Homo sapien
agtgtggttcagtctgaacattcct

SEQ ID NO: 1237301 - DNA, 25 bp, Homo sapien
gtgtggttcagtctgaacattcctt

SEQ ID NO: 1237302 - DNA, 25 bp, Homo sapien
gaacattcctttgtacaaatgtgga

SEQ ID NO: 1237303 - DNA, 25 bp, Homo sapien
tgtttcaaaattgtacttaagtgtg

SEQ ID NO: 1237304 - DNA, 25 bp, Homo sapien
tgaacattcctttgtacaaatgtgg

SEQ ID NO: 1237305 - DNA, 25 bp, Homo sapien
tgaggctccacgggggcagtggctg

SEQ ID NO: 1237306 - DNA, 25 bp, Homo sapien
gaggctccacgggggcagtggctgt

SEQ ID NO: 1237307 - DNA, 25 bp, Homo sapien
ctccacgggggcagtggctgtgacg

SEQ ID NO: 1237308 - DNA, 25 bp, Homo sapien
aggctccacgggggcagtggctgtg

SEQ ID NO: 1237309 - DNA, 25 bp, Homo sapien
atgaggctccacgggggcagtggct

SEQ ID NO: 1237310 - DNA, 25 bp, Homo sapien
gctccacgggggcagtggctgtgac

SEQ ID NO: 1237311 - DNA, 25 bp, Homo sapien
cgtcacagccactgcccccgtggag

SEQ ID NO: 1237312 - DNA, 25 bp, Homo sapien
agccactgcccccgtggagcctcat

SEQ ID NO: 1237313 - DNA, 25 bp, Homo sapien
acagccactgcccccgtggagcctc

SEQ ID NO: 1237314 - DNA, 25 bp, Homo sapien
cacagccactgcccccgtggagcct

SEQ ID NO: 1237315 - DNA, 25 bp, Homo sapien
cagccactgcccccgtggagcctca

SEQ ID NO: 1237316 - DNA, 25 bp, Homo sapien
gtcacagccactgcccccgtggagc

SEQ ID NO: 1237317 - DNA, 25 bp, Homo sapien
tgacaggtgccatgtgagcagagat

SEQ ID NO: 1237318 - DNA, 25 bp, Homo sapien
tcatttgacaggtgccatgtgagca

SEQ ID NO: 1237319 - DNA, 25 bp, Homo sapien
taccaggaccatccggaaggggctg

SEQ ID NO: 1237320 - DNA, 25 bp, Homo sapien
gcccgggacaatcagggcagaatcc

SEQ ID NO: 1237321 - DNA, 25 bp, Homo sapien
gatgtgaaggagtggcccgggacaa

SEQ ID NO: 1237322 - DNA, 25 bp, Homo sapien
acaggtgccatgtgagcagagatgt

SEQ ID NO: 1237323 - DNA, 25 bp, Homo sapien
gctcacatggcacctgtcaaatgac

SEQ ID NO: 1237324 - DNA, 25 bp, Homo sapien
ggattctgccctgattgtcccgggc

SEQ ID NO: 1237325 - DNA, 25 bp, Homo sapien
gccccttccggatggtcctggtatc

SEQ ID NO: 1237326 - DNA, 25 bp, Homo sapien
cagccccttccggatggtcctggta

SEQ ID NO: 1237327 - DNA, 25 bp, Homo sapien
attgtcccgggccactccttcacat

SEQ ID NO: 1237328 - DNA, 25 bp, Homo sapien
acatctctgctcacatggcacctgt

SEQ ID NO: 1237329 - DNA, 25 bp, Homo sapien
cagtgtgggcattatgttgtggacc

SEQ ID NO: 1237330 - DNA, 25 bp, Homo sapien
gcagcctattgcaaggacctgatcg

SEQ ID NO: 1237331 - DNA, 25 bp, Homo sapien
ggcagcctattgcaaggacctgatc

SEQ ID NO: 1237332 - DNA, 25 bp, Homo sapien
ggcattatgttgtggaccaaggcag

SEQ ID NO: 1237333 - DNA, 25 bp, Homo sapien
tgggcattatgttgtggaccaaggc

SEQ ID NO: 1237334 - DNA, 25 bp, Homo sapien
caaggacctgatcgggcggcagccg

SEQ ID NO: 1237335 - DNA, 25 bp, Homo sapien
gatcaggtccttgcaataggctgcc

SEQ ID NO: 1237336 - DNA, 25 bp, Homo sapien
ggtccacaacataatgcccacactg

SEQ ID NO: 1237337 - DNA, 25 bp, Homo sapien
ctgccttggtccacaacataatgcc

SEQ ID NO: 1237338 - DNA, 25 bp, Homo sapien
cggctgccgcccgatcaggtccttg

SEQ ID NO: 1237339 - DNA, 25 bp, Homo sapien
cgatcaggtccttgcaataggctgc

SEQ ID NO: 1237340 - DNA, 25 bp, Homo sapien
gccttggtccacaacataatgccca

SEQ ID NO: 1237341 - DNA, 25 bp, Homo sapien
tacgtgtgcgctgaccatgctgaga

SEQ ID NO: 1237342 - DNA, 25 bp, Homo sapien
gcattgtcacatcagatagctccgc

SEQ ID NO: 1237343 - DNA, 25 bp, Homo sapien
gaaaaccagggtagcattgtcacat

SEQ ID NO: 1237344 - DNA, 25 bp, Homo sapien
tcattgctggaaccagcggcctcca

SEQ ID NO: 1237345 - DNA, 25 bp, Homo sapien
gatagctccgctacgtgtgcgctga

SEQ ID NO: 1237346 - DNA, 25 bp, Homo sapien
cactcccctgaaaaccagggtagca

SEQ ID NO: 1237347 - DNA, 25 bp, Homo sapien
tctgatgtgacaatgctaccctggt

SEQ ID NO: 1237348 - DNA, 25 bp, Homo sapien
tggtcagcgcacacgtagcggagct

SEQ ID NO: 1237349 - DNA, 25 bp, Homo sapien
atctcagcatggtcagcgcacacgt

SEQ ID NO: 1237350 - DNA, 25 bp, Homo sapien
acatggaggccgctggttccagcaa

SEQ ID NO: 1237351 - DNA, 25 bp, Homo sapien
gacaatgctaccctggttttcaggg

SEQ ID NO: 1237352 - DNA, 25 bp, Homo sapien
cgtagcggagctatctgatgtgaca

SEQ ID NO: 1237353 - DNA, 25 bp, Homo sapien
cactgctagcagatggttgggatgt

SEQ ID NO: 1237354 - DNA, 25 bp, Homo sapien
gactgggccatgatccagggcattg

SEQ ID NO: 1237355 - DNA, 25 bp, Homo sapien
tgcctgccctcaagttggaagagcc

SEQ ID NO: 1237356 - DNA, 25 bp, Homo sapien
tgggcaccaaactgacctcaaactg

SEQ ID NO: 1237357 - DNA, 25 bp, Homo sapien
gcataggcgcctggcagaattggac

SEQ ID NO: 1237358 - DNA, 25 bp, Homo sapien
cattcgctgtttagcatgcatggga

SEQ ID NO: 1237359 - DNA, 25 bp, Homo sapien
taaacagcgaatgactgtgcgatgg

SEQ ID NO: 1237360 - DNA, 25 bp, Homo sapien
caatgccctggatcatggcccagtc

SEQ ID NO: 1237361 - DNA, 25 bp, Homo sapien
cagtccaattctgccaggcgcctat

SEQ ID NO: 1237362 - DNA, 25 bp, Homo sapien
ggctcttccaacttgagggcaggca

SEQ ID NO: 1237363 - DNA, 25 bp, Homo sapien
cagtttgaggtcagtttggtgccca

SEQ ID NO: 1237364 - DNA, 25 bp, Homo sapien
ggcgcctatgctgtgcccaagggct

SEQ ID NO: 1237365 - DNA, 25 bp, Homo sapien
cagtgcaagtccttcattgtagctg

SEQ ID NO: 1237366 - DNA, 25 bp, Homo sapien
tggttagagctgtgcatctgcagat

SEQ ID NO: 1237367 - DNA, 25 bp, Homo sapien
gaggtcatgagacactgccttcagc

SEQ ID NO: 1237368 - DNA, 25 bp, Homo sapien
tgctgccccttccatgtccttgtgt

SEQ ID NO: 1237369 - DNA, 25 bp, Homo sapien
tgtgctcagtgacagaccagagtcc

SEQ ID NO: 1237370 - DNA, 25 bp, Homo sapien
tggtcttggttttcccagtggccag

SEQ ID NO: 1237371 - DNA, 25 bp, Homo sapien
tctcagcttgtgttgtgagtttcag

SEQ ID NO: 1237372 - DNA, 25 bp, Homo sapien
tcagcttgtgttgtgagtttcagtg

SEQ ID NO: 1237373 - DNA, 25 bp, Homo sapien
cttgtgttgtgagtttcagtgttgg

SEQ ID NO: 1237374 - DNA, 25 bp, Homo sapien
cagcttgtgttgtgagtttcagtgt

SEQ ID NO: 1237375 - DNA, 25 bp, Homo sapien
ctcagcttgtgttgtgagtttcagt

SEQ ID NO: 1237376 - DNA, 25 bp, Homo sapien
gcttgtgttgtgagtttcagtgttg

SEQ ID NO: 1237377 - DNA, 25 bp, Homo sapien
caacactgaaactcacaacacaagc

SEQ ID NO: 1237378 - DNA, 25 bp, Homo sapien
tgaaactcacaacacaagctgagaa

SEQ ID NO: 1237379 - DNA, 25 bp, Homo sapien
acactgaaactcacaacacaagctg

SEQ ID NO: 1237380 - DNA, 25 bp, Homo sapien
cactgaaactcacaacacaagctga

SEQ ID NO: 1237381 - DNA, 25 bp, Homo sapien
ccaacactgaaactcacaacacaag

SEQ ID NO: 1237382 - DNA, 25 bp, Homo sapien
actgaaactcacaacacaagctgag

SEQ ID NO: 1237383 - DNA, 25 bp, Homo sapien
gaaatctgcagatgcacagctctaa

SEQ ID NO: 1237384 - DNA, 25 bp, Homo sapien
gactctggtctgtcactgagcacaa

SEQ ID NO: 1237385 - DNA, 25 bp, Homo sapien
tgctgaaggcagtgtctcatgacct

SEQ ID NO: 1237386 - DNA, 25 bp, Homo sapien
tacaatgaaggacttgcactggctg

SEQ ID NO: 1237387 - DNA, 25 bp, Homo sapien
tggccactgggaaaaccaagaccaa

SEQ ID NO: 1237388 - DNA, 25 bp, Homo sapien
tgtgcacaccccgtgagtcagcttt

SEQ ID NO: 1237389 - DNA, 25 bp, Homo sapien
gaatttcactgattgccccacctga

SEQ ID NO: 1237390 - DNA, 25 bp, Homo sapien
gacctgatagataatgccctccctt

SEQ ID NO: 1237391 - DNA, 25 bp, Homo sapien
tacattagctagtgggcaacggttc

SEQ ID NO: 1237392 - DNA, 25 bp, Homo sapien
agtggaactcgccttcagatgcagc

SEQ ID NO: 1237393 - DNA, 25 bp, Homo sapien
gagtgtctcggtcatgtgtcttccc

SEQ ID NO: 1237394 - DNA, 25 bp, Homo sapien
tcgtgtgggacatgaacacaggctt

SEQ ID NO: 1237395 - DNA, 25 bp, Homo sapien
gaaccgttgcccactagctaatgta

SEQ ID NO: 1237396 - DNA, 25 bp, Homo sapien
catctgaaggcgagttccactggga

SEQ ID NO: 1237397 - DNA, 25 bp, Homo sapien
gggaagacacatgaccgagacactc

SEQ ID NO: 1237398 - DNA, 25 bp, Homo sapien
gacaggcagacacatctcacaggct

SEQ ID NO: 1237399 - DNA, 25 bp, Homo sapien
cacaggtgcgaatcaaaaggcatgc

SEQ ID NO: 1237400 - DNA, 25 bp, Homo sapien
taaatgtgccgatactggtgacagg

SEQ ID NO: 1237401 - DNA, 25 bp, Homo sapien
aattccgatgaacctgaaaagcggg

SEQ ID NO: 1237402 - DNA, 25 bp, Homo sapien
cctgggcatgacacaagttaggacc

SEQ ID NO: 1237403 - DNA, 25 bp, Homo sapien
aaaagcgggttttggcttgtgtgca

SEQ ID NO: 1237404 - DNA, 25 bp, Homo sapien
cttgtgtacaagcaggaaggctctg

SEQ ID NO: 1237405 - DNA, 25 bp, Homo sapien
cacaagttaggacccgtaccaagag

SEQ ID NO: 1237406 - DNA, 25 bp, Homo sapien
gaaagtcaggtttgctcctaccaca

SEQ ID NO: 1237407 - DNA, 25 bp, Homo sapien
tatcctgtggtaggagcaaacctga

SEQ ID NO: 1237408 - DNA, 25 bp, Homo sapien
tacgggtcctaacttgtgtcatgcc

SEQ ID NO: 1237409 - DNA, 25 bp, Homo sapien
tgcacacaagccaaaacccgctttt

SEQ ID NO: 1237410 - DNA, 25 bp, Homo sapien
cagagccttcctgcttgtacacaag

SEQ ID NO: 1237411 - DNA, 25 bp, Homo sapien
cccgcttttcaggttcatcggaatt

SEQ ID NO: 1237412 - DNA, 25 bp, Homo sapien
gagcaaacctgactttctcagagcc

SEQ ID NO: 1237413 - DNA, 25 bp, Homo sapien
gcagtaaatgatgtaggggctgcca

SEQ ID NO: 1237414 - DNA, 25 bp, Homo sapien
cagtaaatgatgtaggggctgccag

SEQ ID NO: 1237415 - DNA, 25 bp, Homo sapien
aagcagtaaatgatgtaggggctgc

SEQ ID NO: 1237416 - DNA, 25 bp, Homo sapien
agcagtaaatgatgtaggggctgcc

SEQ ID NO: 1237417 - DNA, 25 bp, Homo sapien
gaagcagtaaatgatgtaggggctg

SEQ ID NO: 1237418 - DNA, 25 bp, Homo sapien
cagcccctacatcatttactgcttc

SEQ ID NO: 1237419 - DNA, 25 bp, Homo sapien
ctggcagcccctacatcatttactg

SEQ ID NO: 1237420 - DNA, 25 bp, Homo sapien
ggcagcccctacatcatttactgct

SEQ ID NO: 1237421 - DNA, 25 bp, Homo sapien
tggcagcccctacatcatttactgc

SEQ ID NO: 1237422 - DNA, 25 bp, Homo sapien
gcagcccctacatcatttactgctt

SEQ ID NO: 1237423 - DNA, 25 bp, Homo sapien
cagtaaatgatgtaggggctgccag

SEQ ID NO: 1237424 - DNA, 25 bp, Homo sapien
attgggtctccatctgtcacagaag

SEQ ID NO: 1237425 - DNA, 25 bp, Homo sapien
aaactctattgggtctccatctgtc

SEQ ID NO: 1237426 - DNA, 25 bp, Homo sapien
tctattgggtctccatctgtcacag

SEQ ID NO: 1237427 - DNA, 25 bp, Homo sapien
cacagaagcagtaaatgatgtaggg

SEQ ID NO: 1237428 - DNA, 25 bp, Homo sapien
catctgtcacagaagcagtaaatga

SEQ ID NO: 1237429 - DNA, 25 bp, Homo sapien
catttactgcttctgtgacagatgg

SEQ ID NO: 1237430 - DNA, 25 bp, Homo sapien
gacagatggagacccaatagagttt

SEQ ID NO: 1237431 - DNA, 25 bp, Homo sapien
ctggcagcccctacatcatttactg

SEQ ID NO: 1237432 - DNA, 25 bp, Homo sapien
gcttctgtgacagatggagacccaa

SEQ ID NO: 1237433 - DNA, 25 bp, Homo sapien
ctgtgacagatggagacccaataga

SEQ ID NO: 1237434 - DNA, 25 bp, Homo sapien
catcatttactgcttctgtgacaga

SEQ ID NO: 1237435 - DNA, 25 bp, Homo sapien
aggttcacccatcctggttctgcca

SEQ ID NO: 1237436 - DNA, 25 bp, Homo sapien
gatgtcttgacacctgagacttcag

SEQ ID NO: 1237437 - DNA, 25 bp, Homo sapien
atgctggaacatgccgaggcaggac

SEQ ID NO: 1237438 - DNA, 25 bp, Homo sapien
cacagatgtgcttgtcggtaggaga

SEQ ID NO: 1237439 - DNA, 25 bp, Homo sapien
tggttctgccattccattgcagggt

SEQ ID NO: 1237440 - DNA, 25 bp, Homo sapien
accaagctgtctgtgtgccgatgtc

SEQ ID NO: 1237441 - DNA, 25 bp, Homo sapien
tctcctaccgacaagcacatctgtg

SEQ ID NO: 1237442 - DNA, 25 bp, Homo sapien
gacatcggcacacagacagcttggt

SEQ ID NO: 1237443 - DNA, 25 bp, Homo sapien
cagaccaaagcgttaagagtcccca

SEQ ID NO: 1237444 - DNA, 25 bp, Homo sapien
ggagggaagccaccctgcaatggaa

SEQ ID NO: 1237445 - DNA, 25 bp, Homo sapien
aagtctcaggtgtcaagacatcggc

SEQ ID NO: 1237446 - DNA, 25 bp, Homo sapien
tggcagaaccaggatgggtgaacct

SEQ ID NO: 1237447 - DNA, 25 bp, Homo sapien
catttccttgccgtagcgtgctggg

SEQ ID NO: 1237448 - DNA, 25 bp, Homo sapien
gattcgtgaaattgcccactggcca

SEQ ID NO: 1237449 - DNA, 25 bp, Homo sapien
ttaaatcagacacgggcggccagtt

SEQ ID NO: 1237450 - DNA, 25 bp, Homo sapien
gatgagagagtcaccagcggacagt

SEQ ID NO: 1237451 - DNA, 25 bp, Homo sapien
ccccgcttgcgggtgcagtgaagaa

SEQ ID NO: 1237452 - DNA, 25 bp, Homo sapien
tgggttctgagcaaccactgctggg

SEQ ID NO: 1237453 - DNA, 25 bp, Homo sapien
gaaactgttgccctcatcttgggaa

SEQ ID NO: 1237454 - DNA, 25 bp, Homo sapien
ttcagtgggtgtgaactggccgccc

SEQ ID NO: 1237455 - DNA, 25 bp, Homo sapien
aaaatgacacacacgccttgaaggg

SEQ ID NO: 1237456 - DNA, 25 bp, Homo sapien
cttcaagaggacatgccaggagcct

SEQ ID NO: 1237457 - DNA, 25 bp, Homo sapien
gatgtgatgattgaccaggcagaga

SEQ ID NO: 1237458 - DNA, 25 bp, Homo sapien
caggtgattttatcccgaacaggga

SEQ ID NO: 1237459 - DNA, 25 bp, Homo sapien
ccctggccagtgtccttccacctgt

SEQ ID NO: 1237460 - DNA, 25 bp, Homo sapien
agtgtccttccacctgtccacaagc

SEQ ID NO: 1237461 - DNA, 25 bp, Homo sapien
tgtccctggccagtgtccttccacc

SEQ ID NO: 1237462 - DNA, 25 bp, Homo sapien
cctggccagtgtccttccacctgtc

SEQ ID NO: 1237463 - DNA, 25 bp, Homo sapien
gtccctggccagtgtccttccacct

SEQ ID NO: 1237464 - DNA, 25 bp, Homo sapien
gtgtccctggccagtgtccttccac

SEQ ID NO: 1237465 - DNA, 25 bp, Homo sapien
gtggaaggacactggccagggacac

SEQ ID NO: 1237466 - DNA, 25 bp, Homo sapien
gcttgtggacaggtggaaggacact

SEQ ID NO: 1237467 - DNA, 25 bp, Homo sapien
ggtggaaggacactggccagggaca

SEQ ID NO: 1237468 - DNA, 25 bp, Homo sapien
aggtggaaggacactggccagggac

SEQ ID NO: 1237469 - DNA, 25 bp, Homo sapien
gacaggtggaaggacactggccagg

SEQ ID NO: 1237470 - DNA, 25 bp, Homo sapien
acaggtggaaggacactggccaggg

SEQ ID NO: 1237471 - DNA, 25 bp, Homo sapien
gaagaccacgatcctctacaagctt

SEQ ID NO: 1237472 - DNA, 25 bp, Homo sapien
gggaagaccacgatcctctacaagc

SEQ ID NO: 1237473 - DNA, 25 bp, Homo sapien
tgcagggaagaccacgatcctctac

SEQ ID NO: 1237474 - DNA, 25 bp, Homo sapien
cagggaagaccacgatcctctacaa

SEQ ID NO: 1237475 - DNA, 25 bp, Homo sapien
tggggaacatcttcgccaacctctt

SEQ ID NO: 1237476 - DNA, 25 bp, Homo sapien
agaccacgatcctctacaagcttaa

SEQ ID NO: 1237477 - DNA, 25 bp, Homo sapien
ttgtagaggatcgtggtcttccctg

SEQ ID NO: 1237478 - DNA, 25 bp, Homo sapien
aagaggttggcgaagatgttcccca

SEQ ID NO: 1237479 - DNA, 25 bp, Homo sapien
gcttgtagaggatcgtggtcttccc

SEQ ID NO: 1237480 - DNA, 25 bp, Homo sapien
ttaagcttgtagaggatcgtggtct

SEQ ID NO: 1237481 - DNA, 25 bp, Homo sapien
aagcttgtagaggatcgtggtcttc

SEQ ID NO: 1237482 - DNA, 25 bp, Homo sapien
gtagaggatcgtggtcttccctgca

SEQ ID NO: 1237483 - DNA, 25 bp, Homo sapien
gtgagatcgtgaccaccattcccac

SEQ ID NO: 1237484 - DNA, 25 bp, Homo sapien
atcgtgaccaccattcccaccatag

SEQ ID NO: 1237485 - DNA, 25 bp, Homo sapien
agatcgtgaccaccattcccaccat

SEQ ID NO: 1237486 - DNA, 25 bp, Homo sapien
gagatcgtgaccaccattcccacca

SEQ ID NO: 1237487 - DNA, 25 bp, Homo sapien
tgagatcgtgaccaccattcccacc

SEQ ID NO: 1237488 - DNA, 25 bp, Homo sapien
gatcgtgaccaccattcccaccata

SEQ ID NO: 1237489 - DNA, 25 bp, Homo sapien
tatggtgggaatggtggtcacgatc

SEQ ID NO: 1237490 - DNA, 25 bp, Homo sapien
tggtgggaatggtggtcacgatctc

SEQ ID NO: 1237491 - DNA, 25 bp, Homo sapien
ggtgggaatggtggtcacgatctca

SEQ ID NO: 1237492 - DNA, 25 bp, Homo sapien
atggtgggaatggtggtcacgatct

SEQ ID NO: 1237493 - DNA, 25 bp, Homo sapien
gtgggaatggtggtcacgatctcac

SEQ ID NO: 1237494 - DNA, 25 bp, Homo sapien
ctatggtgggaatggtggtcacgat

SEQ ID NO: 1237495 - DNA, 25 bp, Homo sapien
ggccaaggtacaaggcctcaccctg

SEQ ID NO: 1237496 - DNA, 25 bp, Homo sapien
caaggtacaaggcctcaccctgcat

SEQ ID NO: 1237497 - DNA, 25 bp, Homo sapien
tgggccaaggtacaaggcctcaccc

SEQ ID NO: 1237498 - DNA, 25 bp, Homo sapien
gccaaggtacaaggcctcaccctgc

SEQ ID NO: 1237499 - DNA, 25 bp, Homo sapien
ctgggccaaggtacaaggcctcacc

SEQ ID NO: 1237500 - DNA, 25 bp, Homo sapien
ccaaggtacaaggcctcaccctgca

SEQ ID NO: 1237501 - DNA, 25 bp, Homo sapien
atgcagggtgaggccttgtaccttg

SEQ ID NO: 1237502 - DNA, 25 bp, Homo sapien
ggtgaggccttgtaccttggcccag

SEQ ID NO: 1237503 - DNA, 25 bp, Homo sapien
tgcagggtgaggccttgtaccttgg

SEQ ID NO: 1237504 - DNA, 25 bp, Homo sapien
gggtgaggccttgtaccttggccca

SEQ ID NO: 1237505 - DNA, 25 bp, Homo sapien
cagggtgaggccttgtaccttggcc

SEQ ID NO: 1237506 - DNA, 25 bp, Homo sapien
gcagggtgaggccttgtaccttggc

SEQ ID NO: 1237507 - DNA, 25 bp, Homo sapien
ggccaaggtacaaggcctcaccctg

SEQ ID NO: 1237508 - DNA, 25 bp, Homo sapien
tgggccaaggtacaaggcctcaccc

SEQ ID NO: 1237509 - DNA, 25 bp, Homo sapien
ctgggccaaggtacaaggcctcacc

SEQ ID NO: 1237510 - DNA, 25 bp, Homo sapien
gtacaaggcctcaccctgcatcccg

SEQ ID NO: 1237511 - DNA, 25 bp, Homo sapien
aaggtacaaggcctcaccctgcatc

SEQ ID NO: 1237512 - DNA, 25 bp, Homo sapien
cagcagggagtgggctgggctgggc

SEQ ID NO: 1237513 - DNA, 25 bp, Homo sapien
gaaaccgtggagtacaagaacatca

SEQ ID NO: 1237514 - DNA, 25 bp, Homo sapien
tggccaggacaagatccggcccctg

SEQ ID NO: 1237515 - DNA, 25 bp, Homo sapien
tcaacgtggaaaccgtggagtacaa

SEQ ID NO: 1237516 - DNA, 25 bp, Homo sapien
tcactgtgtgggacgtgggtggcca

SEQ ID NO: 1237517 - DNA, 25 bp, Homo sapien
aacatcagcttcactgtgtgggacg

SEQ ID NO: 1237518 - DNA, 25 bp, Homo sapien
ccaggacaagatccggcccctgtgg

SEQ ID NO: 1237519 - DNA, 25 bp, Homo sapien
cgtcccacacagtgaagctgatgtt

SEQ ID NO: 1237520 - DNA, 25 bp, Homo sapien
tactccacggtttccacgttgaagc

SEQ ID NO: 1237521 - DNA, 25 bp, Homo sapien
ccacgtcccacacagtgaagctgat

SEQ ID NO: 1237522 - DNA, 25 bp, Homo sapien
gttctggaagtagtggcgccacagg

SEQ ID NO: 1237523 - DNA, 25 bp, Homo sapien
caggggccggatcttgtcctggcca

SEQ ID NO: 1237524 - DNA, 25 bp, Homo sapien
gatgttcttgtactccacggtttcc

SEQ ID NO: 1237525 - DNA, 25 bp, Homo sapien
cagcaatgacagagagcgtgtgaac

SEQ ID NO: 1237526 - DNA, 25 bp, Homo sapien
caatgacagagagcgtgtgaacgag

SEQ ID NO: 1237527 - DNA, 25 bp, Homo sapien
gcgtgtgaacgaggcccgtgaggag

SEQ ID NO: 1237528 - DNA, 25 bp, Homo sapien
agagagcgtgtgaacgaggcccgtg

SEQ ID NO: 1237529 - DNA, 25 bp, Homo sapien
tgacagagagcgtgtgaacgaggcc

SEQ ID NO: 1237530 - DNA, 25 bp, Homo sapien
gcaatgacagagagcgtgtgaacga

SEQ ID NO: 1237531 - DNA, 25 bp, Homo sapien
catgaggatgctggccgaggacgag

SEQ ID NO: 1237532 - DNA, 25 bp, Homo sapien
ctcgtcctcggccagcatcctcatg

SEQ ID NO: 1237533 - DNA, 25 bp, Homo sapien
tcgttcacacgctctctgtcattgc

SEQ ID NO: 1237534 - DNA, 25 bp, Homo sapien
ggcctcgttcacacgctctctgtca

SEQ ID NO: 1237535 - DNA, 25 bp, Homo sapien
cgttcacacgctctctgtcattgct

SEQ ID NO: 1237536 - DNA, 25 bp, Homo sapien
ctcgttcacacgctctctgtcattg

SEQ ID NO: 1237537 - DNA, 25 bp, Homo sapien
gttcacacgctctctgtcattgctg

SEQ ID NO: 1237538 - DNA, 25 bp, Homo sapien
tcctcacgggcctcgttcacacgct

SEQ ID NO: 1237539 - DNA, 25 bp, Homo sapien
ctggtggtaggggttactggaggct

SEQ ID NO: 1237540 - DNA, 25 bp, Homo sapien
gaggagccagtgtgggttccgcctg

SEQ ID NO: 1237541 - DNA, 25 bp, Homo sapien
tgtgaggagccagtgtgggttccgc

SEQ ID NO: 1237542 - DNA, 25 bp, Homo sapien
gagccagtgtgggttccgcctggtg

SEQ ID NO: 1237543 - DNA, 25 bp, Homo sapien
ccagtgtgggttccgcctggtggta

SEQ ID NO: 1237544 - DNA, 25 bp, Homo sapien
tgaggagccagtgtgggttccgcct

SEQ ID NO: 1237545 - DNA, 25 bp, Homo sapien
caccagcctccagtaacccctacca

SEQ ID NO: 1237546 - DNA, 25 bp, Homo sapien
taccaccaggcggaacccacactgg

SEQ ID NO: 1237547 - DNA, 25 bp, Homo sapien
ctccagtaacccctaccaccaggcg

SEQ ID NO: 1237548 - DNA, 25 bp, Homo sapien
ccaggcggaacccacactggctcct

SEQ ID NO: 1237549 - DNA, 25 bp, Homo sapien
cggaacccacactggctcctcacat

SEQ ID NO: 1237550 - DNA, 25 bp, Homo sapien
aggcggaacccacactggctcctca

SEQ ID NO: 1237551 - DNA, 25 bp, Homo sapien
ggcccctttctctgtcctgtggaca

SEQ ID NO: 1237552 - DNA, 25 bp, Homo sapien
gggcccctttctctgtcctgtggac

SEQ ID NO: 1237553 - DNA, 25 bp, Homo sapien
gaggagccagtgtgggttccgcctg

SEQ ID NO: 1237554 - DNA, 25 bp, Homo sapien
tgtgaggagccagtgtgggttccgc

SEQ ID NO: 1237555 - DNA, 25 bp, Homo sapien
ccagtgtgggttccgcctggtggta

SEQ ID NO: 1237556 - DNA, 25 bp, Homo sapien
ttctctgtcctgtggacagcccttc

SEQ ID NO: 1237557 - DNA, 25 bp, Homo sapien
taccaccaggcggaacccacactgg

SEQ ID NO: 1237558 - DNA, 25 bp, Homo sapien
gaagggctgtccacaggacagagaa

SEQ ID NO: 1237559 - DNA, 25 bp, Homo sapien
tggctcctcacattccccaggctgg

SEQ ID NO: 1237560 - DNA, 25 bp, Homo sapien
tccacaggacagagaaaggggcccc

SEQ ID NO: 1237561 - DNA, 25 bp, Homo sapien
aggcggaacccacactggctcctca

SEQ ID NO: 1237562 - DNA, 25 bp, Homo sapien
agcctccagtaacccctaccaccag

SEQ ID NO: 1237563 - DNA, 25 bp, Homo sapien
aacgccatgaatgcggccgagatca

SEQ ID NO: 1237564 - DNA, 25 bp, Homo sapien
ccaacgccatgaatgcggccgagat

SEQ ID NO: 1237565 - DNA, 25 bp, Homo sapien
gcactcactacgccacaggaactgg

SEQ ID NO: 1237566 - DNA, 25 bp, Homo sapien
caacgccatgaatgcggccgagatc

SEQ ID NO: 1237567 - DNA, 25 bp, Homo sapien
gggctgcactcactacgccacagga

SEQ ID NO: 1237568 - DNA, 25 bp, Homo sapien
ggctgcactcactacgccacaggaa

SEQ ID NO: 1237569 - DNA, 25 bp, Homo sapien
ccagttcctgtggcgtagtgagtgc

SEQ ID NO: 1237570 - DNA, 25 bp, Homo sapien
tgatctcggccgcattcatggcgtt

SEQ ID NO: 1237571 - DNA, 25 bp, Homo sapien
tctcggccgcattcatggcgttggg

SEQ ID NO: 1237572 - DNA, 25 bp, Homo sapien
ttcctgtggcgtagtgagtgcagcc

SEQ ID NO: 1237573 - DNA, 25 bp, Homo sapien
tcctgtggcgtagtgagtgcagccc

SEQ ID NO: 1237574 - DNA, 25 bp, Homo sapien
ctgtggcgtagtgagtgcagcccca

SEQ ID NO: 1237575 - DNA, 25 bp, Homo sapien
tttactctcatgtggcaaacgtgcg

SEQ ID NO: 1237576 - DNA, 25 bp, Homo sapien
tgcatcgcaccgtgctgtaaatgtg

SEQ ID NO: 1237577 - DNA, 25 bp, Homo sapien
tgtaaatgtggcagacgcagcctgc

SEQ ID NO: 1237578 - DNA, 25 bp, Homo sapien
tgccctctgctttactctcatgtgg

SEQ ID NO: 1237579 - DNA, 25 bp, Homo sapien
tgcctccgtggtttggtcaccgtgt

SEQ ID NO: 1237580 - DNA, 25 bp, Homo sapien
tcatgtggcaaacgtgcggctcgtg

SEQ ID NO: 1237581 - DNA, 25 bp, Homo sapien
acgagccgcacgtttgccacatgag

SEQ ID NO: 1237582 - DNA, 25 bp, Homo sapien
cacatgagagtaaagcagagggcaa

SEQ ID NO: 1237583 - DNA, 25 bp, Homo sapien
cacatttacagcacggtgcgatgca

SEQ ID NO: 1237584 - DNA, 25 bp, Homo sapien
acacggtgaccaaaccacggaggca

SEQ ID NO: 1237585 - DNA, 25 bp, Homo sapien
caggctgcgtctgccacatttacag

SEQ ID NO: 1237586 - DNA, 25 bp, Homo sapien
cgcacgtttgccacatgagagtaaa

SEQ ID NO: 1237587 - DNA, 25 bp, Homo sapien
gaggcagtttctggtactcctatgc

SEQ ID NO: 1237588 - DNA, 25 bp, Homo sapien
tagttaagaatccaagtcgagaaca

SEQ ID NO: 1237589 - DNA, 25 bp, Homo sapien
gaatccaagtcgagaacacttgaac

SEQ ID NO: 1237590 - DNA, 25 bp, Homo sapien
cacgcccttggctttagagctgtgt

SEQ ID NO: 1237591 - DNA, 25 bp, Homo sapien
actcctatgcaatattactcagctt

SEQ ID NO: 1237592 - DNA, 25 bp, Homo sapien
aatcaactcactgttcagtgctgag

SEQ ID NO: 1237593 - DNA, 25 bp, Homo sapien
aagctgagtaatattgcataggagt

SEQ ID NO: 1237594 - DNA, 25 bp, Homo sapien
acacagctctaaagccaagggcgtg

SEQ ID NO: 1237595 - DNA, 25 bp, Homo sapien
ctcagcactgaacagtgagttgatt

SEQ ID NO: 1237596 - DNA, 25 bp, Homo sapien
tgcataggagtaccagaaactgcct

SEQ ID NO: 1237597 - DNA, 25 bp, Homo sapien
ctctaaagccaagggcgtggccggc

SEQ ID NO: 1237598 - DNA, 25 bp, Homo sapien
agtgttctcgacttggattcttaac

SEQ ID NO: 1237599 - DNA, 25 bp, Homo sapien
catagatttgcagttacggcctgga

SEQ ID NO: 1237600 - DNA, 25 bp, Homo sapien
agctgttcccctcgggaacatgagg

SEQ ID NO: 1237601 - DNA, 25 bp, Homo sapien
tggtggcgcagcagactgcgatcaa

SEQ ID NO: 1237602 - DNA, 25 bp, Homo sapien
gcagactgcgatcaattctgcatgg

SEQ ID NO: 1237603 - DNA, 25 bp, Homo sapien
tgcatggtcacagtagagatccccg

SEQ ID NO: 1237604 - DNA, 25 bp, Homo sapien
ttacggcctggatgccagtcgccag

SEQ ID NO: 1237605 - DNA, 25 bp, Homo sapien
ggatctctactgtgaccatgcagaa

SEQ ID NO: 1237606 - DNA, 25 bp, Homo sapien
gaattgatcgcagtctgctgcgcca

SEQ ID NO: 1237607 - DNA, 25 bp, Homo sapien
caggccgtaactgcaaatctatgct

SEQ ID NO: 1237608 - DNA, 25 bp, Homo sapien
ccatgcagaattgatcgcagtctgc

SEQ ID NO: 1237609 - DNA, 25 bp, Homo sapien
gctggcgactggcatccaggccgta

SEQ ID NO: 1237610 - DNA, 25 bp, Homo sapien
gactggcatccaggccgtaactgca

SEQ ID NO: 1237611 - DNA, 25 bp, Homo sapien
cctgcattccatagccatgtgcttg

SEQ ID NO: 1237612 - DNA, 25 bp, Homo sapien
ggtcaccctgcattccatagccatg

SEQ ID NO: 1237613 - DNA, 25 bp, Homo sapien
ctgcattccatagccatgtgcttgt

SEQ ID NO: 1237614 - DNA, 25 bp, Homo sapien
tcaccctgcattccatagccatgtg

SEQ ID NO: 1237615 - DNA, 25 bp, Homo sapien
ttgggtcaccctgcattccatagcc

SEQ ID NO: 1237616 - DNA, 25 bp, Homo sapien
aactcgcttgtccttgggtcaccct

SEQ ID NO: 1237617 - DNA, 25 bp, Homo sapien
acaagcacatggctatggaatgcag

SEQ ID NO: 1237618 - DNA, 25 bp, Homo sapien
catggctatggaatgcagggtgacc

SEQ ID NO: 1237619 - DNA, 25 bp, Homo sapien
gctatggaatgcagggtgacccaag

SEQ ID NO: 1237620 - DNA, 25 bp, Homo sapien
agggtgacccaaggacaagcgagtt

SEQ ID NO: 1237621 - DNA, 25 bp, Homo sapien
aagcacatggctatggaatgcaggg

SEQ ID NO: 1237622 - DNA, 25 bp, Homo sapien
cacatggctatggaatgcagggtga

SEQ ID NO: 1237623 - DNA, 25 bp, Homo sapien
cactatgccgcaggccgccctaccc

SEQ ID NO: 1237624 - DNA, 25 bp, Homo sapien
agccaccccactatgccgcaggccg

SEQ ID NO: 1237625 - DNA, 25 bp, Homo sapien
cccactatgccgcaggccgccctac

SEQ ID NO: 1237626 - DNA, 25 bp, Homo sapien
gccaccccactatgccgcaggccgc

SEQ ID NO: 1237627 - DNA, 25 bp, Homo sapien
acagccaccccactatgccgcaggc

SEQ ID NO: 1237628 - DNA, 25 bp, Homo sapien
cgcaggccgccctacccaccttcag

SEQ ID NO: 1237629 - DNA, 25 bp, Homo sapien
ggtagggcggcctgcggcatagtgg

SEQ ID NO: 1237630 - DNA, 25 bp, Homo sapien
gggtagggcggcctgcggcatagtg

SEQ ID NO: 1237631 - DNA, 25 bp, Homo sapien
ctgaaggtgggtagggcggcctgcg

SEQ ID NO: 1237632 - DNA, 25 bp, Homo sapien
tgggtagggcggcctgcggcatagt

SEQ ID NO: 1237633 - DNA, 25 bp, Homo sapien
tgaaggtgggtagggcggcctgcgg

SEQ ID NO: 1237634 - DNA, 25 bp, Homo sapien
gtagggcggcctgcggcatagtggg

SEQ ID NO: 1237635 - DNA, 25 bp, Homo sapien
ggtagggcggcctgcggcatagtgg

SEQ ID NO: 1237636 - DNA, 25 bp, Homo sapien
ctgaaggtgggtagggcggcctgcg

SEQ ID NO: 1237637 - DNA, 25 bp, Homo sapien
gggtagggcggcctgcggcatagtg

SEQ ID NO: 1237638 - DNA, 25 bp, Homo sapien
gtagggcggcctgcggcatagtggg

SEQ ID NO: 1237639 - DNA, 25 bp, Homo sapien
tgaaggtgggtagggcggcctgcgg

SEQ ID NO: 1237640 - DNA, 25 bp, Homo sapien
tagtggggtggctgtgggctcccag

SEQ ID NO: 1237641 - DNA, 25 bp, Homo sapien
cagagtgggtccgtcgtccccaaca

SEQ ID NO: 1237642 - DNA, 25 bp, Homo sapien
tggccagagtgggtccgtcgtcccc

SEQ ID NO: 1237643 - DNA, 25 bp, Homo sapien
cctcggtcgccgtgtggccagagtg

SEQ ID NO: 1237644 - DNA, 25 bp, Homo sapien
gcctatgggacgcagggccccatct

SEQ ID NO: 1237645 - DNA, 25 bp, Homo sapien
gctcagacactttggcaggatgtct

SEQ ID NO: 1237646 - DNA, 25 bp, Homo sapien
gctcgctcagacactttggcaggat

SEQ ID NO: 1237647 - DNA, 25 bp, Homo sapien
tgttggggacgacggacccactctg

SEQ ID NO: 1237648 - DNA, 25 bp, Homo sapien
catcctgccaaagtgtctgagcgag

SEQ ID NO: 1237649 - DNA, 25 bp, Homo sapien
cactctggccacacggcgaccgagg

SEQ ID NO: 1237650 - DNA, 25 bp, Homo sapien
cagacatcctgccaaagtgtctgag

SEQ ID NO: 1237651 - DNA, 25 bp, Homo sapien
tggggccctgcgtcccataggctgc

SEQ ID NO: 1237652 - DNA, 25 bp, Homo sapien
tgtctgagcgagcacgagtgttggg

SEQ ID NO: 1237653 - DNA, 25 bp, Homo sapien
tccctcagcctgcaagggtccgatt

SEQ ID NO: 1237654 - DNA, 25 bp, Homo sapien
tgcaagccgggcaggcggtccacct

SEQ ID NO: 1237655 - DNA, 25 bp, Homo sapien
tatttggtgtcgtggaacctcttac

SEQ ID NO: 1237656 - DNA, 25 bp, Homo sapien
cagcctgcaagggtccgatttgcca

SEQ ID NO: 1237657 - DNA, 25 bp, Homo sapien
ccgatttgccatcgaaaaagacaac

SEQ ID NO: 1237658 - DNA, 25 bp, Homo sapien
gcaagggtccgatttgccatcgaaa

SEQ ID NO: 1237659 - DNA, 25 bp, Homo sapien
ttttcgatggcaaatcggacccttg

SEQ ID NO: 1237660 - DNA, 25 bp, Homo sapien
taggtggaccgcctgcccggcttgc

SEQ ID NO: 1237661 - DNA, 25 bp, Homo sapien
aatcggacccttgcaggctgaggga

SEQ ID NO: 1237662 - DNA, 25 bp, Homo sapien
taagaggttccacgacaccaaatag

SEQ ID NO: 1237663 - DNA, 25 bp, Homo sapien
tggcaaatcggacccttgcaggctg

SEQ ID NO: 1237664 - DNA, 25 bp, Homo sapien
gttgtctttttcgatggcaaatcgg

SEQ ID NO: 1237665 - DNA, 25 bp, Homo sapien
catttcgacaaacaagcactgtaat

SEQ ID NO: 1237666 - DNA, 25 bp, Homo sapien
tttcgacaaacaagcactgtaatta

SEQ ID NO: 1237667 - DNA, 25 bp, Homo sapien
ttttcatttcgacaaacaagcactg

SEQ ID NO: 1237668 - DNA, 25 bp, Homo sapien
ttcgacaaacaagcactgtaattat

SEQ ID NO: 1237669 - DNA, 25 bp, Homo sapien
atttcgacaaacaagcactgtaatt

SEQ ID NO: 1237670 - DNA, 25 bp, Homo sapien
tcatttcgacaaacaagcactgtaa

SEQ ID NO: 1237671 - DNA, 25 bp, Homo sapien
ttacagtgcttgtttgtcgaaatga

SEQ ID NO: 1237672 - DNA, 25 bp, Homo sapien
aattacagtgcttgtttgtcgaaat

SEQ ID NO: 1237673 - DNA, 25 bp, Homo sapien
attacagtgcttgtttgtcgaaatg

SEQ ID NO: 1237674 - DNA, 25 bp, Homo sapien
ataattacagtgcttgtttgtcgaa

SEQ ID NO: 1237675 - DNA, 25 bp, Homo sapien
cagtgcttgtttgtcgaaatgaaaa

SEQ ID NO: 1237676 - DNA, 25 bp, Homo sapien
taattacagtgcttgtttgtcgaaa

SEQ ID NO: 1237677 - DNA, 25 bp, Homo sapien
tgctgttgtgggaccctgaaccctc

SEQ ID NO: 1237678 - DNA, 25 bp, Homo sapien
tccaggtttcgcataccagggatgg

SEQ ID NO: 1237679 - DNA, 25 bp, Homo sapien
tttatcagtagaggctggactccct

SEQ ID NO: 1237680 - DNA, 25 bp, Homo sapien
aagacttgacagctagctctggagc

SEQ ID NO: 1237681 - DNA, 25 bp, Homo sapien
cacctcctctcccacatctcctgag

SEQ ID NO: 1237682 - DNA, 25 bp, Homo sapien
ggccagctgaggccacctcctctcc

SEQ ID NO: 1237683 - DNA, 25 bp, Homo sapien
cctcctctcccacatctcctgagag

SEQ ID NO: 1237684 - DNA, 25 bp, Homo sapien
gccacctcctctcccacatctcctg

SEQ ID NO: 1237685 - DNA, 25 bp, Homo sapien
cttggcttgcaagactagggtctga

SEQ ID NO: 1237686 - DNA, 25 bp, Homo sapien
tagggtctgaggcacaccttgtatc

SEQ ID NO: 1237687 - DNA, 25 bp, Homo sapien
tggccacgtgactacgtaactgagg

SEQ ID NO: 1237688 - DNA, 25 bp, Homo sapien
tgtttctaacccacgtagccactgg

SEQ ID NO: 1237689 - DNA, 25 bp, Homo sapien
cgaagtcacagagtggccaagggac

SEQ ID NO: 1237690 - DNA, 25 bp, Homo sapien
tatggctcgggttcaagtctgcaga

SEQ ID NO: 1237691 - DNA, 25 bp, Homo sapien
taccttgttaagctcccgatatgga

SEQ ID NO: 1237692 - DNA, 25 bp, Homo sapien
gtttaacacggcagggataggacca

SEQ ID NO: 1237693 - DNA, 25 bp, Homo sapien
gccaccccgggacattgctaagatg

SEQ ID NO: 1237694 - DNA, 25 bp, Homo sapien
gatgacttgcatgtggagcgctacc

SEQ ID NO: 1237695 - DNA, 25 bp, Homo sapien
gctaccgacagttctggaccaggac

SEQ ID NO: 1237696 - DNA, 25 bp, Homo sapien
ggaccaggaccaagaagtgaccgtg

SEQ ID NO: 1237697 - DNA, 25 bp, Homo sapien
acatccgctacagggagccacggcg

SEQ ID NO: 1237698 - DNA, 25 bp, Homo sapien
ggcttatgcacgactctaccccgtg

SEQ ID NO: 1237699 - DNA, 25 bp, Homo sapien
tctaccccgtgctgctggtgaagca

SEQ ID NO: 1237700 - DNA, 25 bp, Homo sapien
tgcaccgccaggcttatgcacgact

SEQ ID NO: 1237701 - DNA, 25 bp, Homo sapien
gatttccattttagaggcagccgga

SEQ ID NO: 1237702 - DNA, 25 bp, Homo sapien
taacggccagaacagacagcctggg

SEQ ID NO: 1237703 - DNA, 25 bp, Homo sapien
gtttcgcagactcggtaacggccag

SEQ ID NO: 1237704 - DNA, 25 bp, Homo sapien
cagtccattcagagaggtttcgcag

SEQ ID NO: 1237705 - DNA, 25 bp, Homo sapien
tatcagcgaaaagggagcggttcac

SEQ ID NO: 1237706 - DNA, 25 bp, Homo sapien
aaagttgtcctcagttcattggtgg

SEQ ID NO: 1237707 - DNA, 25 bp, Homo sapien
caaagtaggagacccgtgaatgaca

SEQ ID NO: 1237708 - DNA, 25 bp, Homo sapien
tactgcagtcctaaagatggtctaa

SEQ ID NO: 1237709 - DNA, 25 bp, Homo sapien
gaaaacctaacaggagtatgcaact

SEQ ID NO: 1237710 - DNA, 25 bp, Homo sapien
ttttgtctacgaatcttccaccacg

SEQ ID NO: 1237711 - DNA, 25 bp, Homo sapien
tcccactggatttcaggagcaaata

SEQ ID NO: 1237712 - DNA, 25 bp, Homo sapien
caactattcatatactgctgagcgt

SEQ ID NO: 1237713 - DNA, 25 bp, Homo sapien
tacgaaagtcatagcccacctgagg

SEQ ID NO: 1237714 - DNA, 25 bp, Homo sapien
taggtagacaagatcgaaaacttag

SEQ ID NO: 1237715 - DNA, 25 bp, Homo sapien
cctgagggctctatacttctatatt

SEQ ID NO: 1237716 - DNA, 25 bp, Homo sapien
taatccactcagcatctacgaaagt

SEQ ID NO: 1237717 - DNA, 25 bp, Homo sapien
tcagtactgttacagaggctcttca

SEQ ID NO: 1237718 - DNA, 25 bp, Homo sapien
agttctgatagggaaagtcacctgc

SEQ ID NO: 1237719 - DNA, 25 bp, Homo sapien
aaacgtgggcattctcaggtgggca

SEQ ID NO: 1237720 - DNA, 25 bp, Homo sapien
ggtcaggccggccaattcattccca

SEQ ID NO: 1237721 - DNA, 25 bp, Homo sapien
cagtgaactagggttcaaagatcac

SEQ ID NO: 1237722 - DNA, 25 bp, Homo sapien
tttgcttggtggatggcctttgccc

SEQ ID NO: 1237723 - DNA, 25 bp, Homo sapien
ttgtctgacctgtgaccacggagcc

SEQ ID NO: 1237724 - DNA, 25 bp, Homo sapien
ccagtggctcttaagtgttcaaccg

SEQ ID NO: 1237725 - DNA, 25 bp, Homo sapien
tactcaccatgtgcaggctaaagca

SEQ ID NO: 1237726 - DNA, 25 bp, Homo sapien
gggtcatcagtgctcataggaaggg

SEQ ID NO: 1237727 - DNA, 25 bp, Homo sapien
gacttgggatttagctgggtcatca

SEQ ID NO: 1237728 - DNA, 25 bp, Homo sapien
agtccaagccttggtcaaaggaaca

SEQ ID NO: 1237729 - DNA, 25 bp, Homo sapien
tccgagttcagccttagtccaagcc

SEQ ID NO: 1237730 - DNA, 25 bp, Homo sapien
tattggggcgtttgtctagttcagg

SEQ ID NO: 1237731 - DNA, 25 bp, Homo sapien
tttagccatccaatgttgggcttgg

SEQ ID NO: 1237732 - DNA, 25 bp, Homo sapien
cttcatcaacaagtgtatgaagcag

SEQ ID NO: 1237733 - DNA, 25 bp, Homo sapien
caggtggggtccagttagctttagc

SEQ ID NO: 1237734 - DNA, 25 bp, Homo sapien
cagctggtggttgaggattttgata

SEQ ID NO: 1237735 - DNA, 25 bp, Homo sapien
taactctctttaacttatagcaacc

SEQ ID NO: 1237736 - DNA, 25 bp, Homo sapien
tgggtatttatagcaattcaagaat

SEQ ID NO: 1237737 - DNA, 25 bp, Homo sapien
ggaatatacaccttgagggttttga

SEQ ID NO: 1237738 - DNA, 25 bp, Homo sapien
agacgggctgggagggcgctgtgct

SEQ ID NO: 1237739 - DNA, 25 bp, Homo sapien
gcgctgtgctgaacgcccctgcggt

SEQ ID NO: 1237740 - DNA, 25 bp, Homo sapien
tgttagttcgcgctgtgtggaggcg

SEQ ID NO: 1237741 - DNA, 25 bp, Homo sapien
tcgtgatgttagttcgcgctgtgtg

SEQ ID NO: 1237742 - DNA, 25 bp, Homo sapien
ggccggcgggtcgtgatgttagttc

SEQ ID NO: 1237743 - DNA, 25 bp, Homo sapien
ctgcggtcgcgacaggccagcgcag

SEQ ID NO: 1237744 - DNA, 25 bp, Homo sapien
tgcgctggcctgtcgcgaccgcagg

SEQ ID NO: 1237745 - DNA, 25 bp, Homo sapien
cacacagcgcgaactaacatcacga

SEQ ID NO: 1237746 - DNA, 25 bp, Homo sapien
cgcctccacacagcgcgaactaaca

SEQ ID NO: 1237747 - DNA, 25 bp, Homo sapien
accgcaggggcgttcagcacagcgc

SEQ ID NO: 1237748 - DNA, 25 bp, Homo sapien
gggcgttcagcacagcgccctccca

SEQ ID NO: 1237749 - DNA, 25 bp, Homo sapien
acacagcgcgaactaacatcacgac

SEQ ID NO: 1237750 - DNA, 25 bp, Homo sapien
tcacgtaggttcagtgggcggaaga

SEQ ID NO: 1237751 - DNA, 25 bp, Homo sapien
tcatgacgtcagtctcgcgcgcggg

SEQ ID NO: 1237752 - DNA, 25 bp, Homo sapien
tgcggcgctgtcacgtaggttcagt

SEQ ID NO: 1237753 - DNA, 25 bp, Homo sapien
gtcgcctcatgacgtcagtctcgcg

SEQ ID NO: 1237754 - DNA, 25 bp, Homo sapien
gaagaacgagtgagacatgggcggg

SEQ ID NO: 1237755 - DNA, 25 bp, Homo sapien
gggcagtcgcctcatgacgtcagtc

SEQ ID NO: 1237756 - DNA, 25 bp, Homo sapien
gcccgcgcgcgagactgacgtcatg

SEQ ID NO: 1237757 - DNA, 25 bp, Homo sapien
agactgacgtcatgaggcgactgcc

SEQ ID NO: 1237758 - DNA, 25 bp, Homo sapien
tcttccgcccactgaacctacgtga

SEQ ID NO: 1237759 - DNA, 25 bp, Homo sapien
cgcgagactgacgtcatgaggcgac

SEQ ID NO: 1237760 - DNA, 25 bp, Homo sapien
gcccatgtctcactcgttcttcccc

SEQ ID NO: 1237761 - DNA, 25 bp, Homo sapien
actgaacctacgtgacagcgccgca

SEQ ID NO: 1237762 - DNA, 25 bp, Homo sapien
gccgggctggctgcggccgccctgg

SEQ ID NO: 1237763 - DNA, 25 bp, Homo sapien
tgcggccgccctgggccgggcccca

SEQ ID NO: 1237764 - DNA, 25 bp, Homo sapien
cgggctggctgcggccgccctgggc

SEQ ID NO: 1237765 - DNA, 25 bp, Homo sapien
tggctgcggccgccctgggccgggc

SEQ ID NO: 1237766 - DNA, 25 bp, Homo sapien
ctgcggcgcccgctggccgggctgg

SEQ ID NO: 1237767 - DNA, 25 bp, Homo sapien
gctgcggccgccctgggccgggccc

SEQ ID NO: 1237768 - DNA, 25 bp, Homo sapien
ccagcccggccagcgggcgccgcag

SEQ ID NO: 1237769 - DNA, 25 bp, Homo sapien
gcccggccagcgggcgccgcagcat

SEQ ID NO: 1237770 - DNA, 25 bp, Homo sapien
tggggcccggcccagggcggccgca

SEQ ID NO: 1237771 - DNA, 25 bp, Homo sapien
agcccggccagcgggcgccgcagca

SEQ ID NO: 1237772 - DNA, 25 bp, Homo sapien
gggcccggcccagggcggccgcagc

SEQ ID NO: 1237773 - DNA, 25 bp, Homo sapien
ccagggcggccgcagccagcccggc

SEQ ID NO: 1237774 - DNA, 25 bp, Homo sapien
tataggagcgctcggtgtcttcccg

SEQ ID NO: 1237775 - DNA, 25 bp, Homo sapien
tgagtacgacaagcgcgatcgcgag

SEQ ID NO: 1237776 - DNA, 25 bp, Homo sapien
tgagcgtcgccttagaagtatgccc

SEQ ID NO: 1237777 - DNA, 25 bp, Homo sapien
ccgcattcaactgtgggccctgaga

SEQ ID NO: 1237778 - DNA, 25 bp, Homo sapien
catgaaagaggtcggtcctgaggcc

SEQ ID NO: 1237779 - DNA, 25 bp, Homo sapien
aggccggcagttatcgcagtgtcga

SEQ ID NO: 1237780 - DNA, 25 bp, Homo sapien
tctcagggcccacagttgaatgcgg

SEQ ID NO: 1237781 - DNA, 25 bp, Homo sapien
agttgaatgcggcacagggcgtctc

SEQ ID NO: 1237782 - DNA, 25 bp, Homo sapien
gcatacttctaaggcgacgctcaag

SEQ ID NO: 1237783 - DNA, 25 bp, Homo sapien
cgtgccgcggagtaggcagaatcct

SEQ ID NO: 1237784 - DNA, 25 bp, Homo sapien
catgcgtcgggaaggcctgctgttt

SEQ ID NO: 1237785 - DNA, 25 bp, Homo sapien
gctcgacactgcgataactgccggc

SEQ ID NO: 1237786 - DNA, 25 bp, Homo sapien
tagccgcgcagcatcgtgaagggct

SEQ ID NO: 1237787 - DNA, 25 bp, Homo sapien
ctgtgcaagactcggccggtttttc

SEQ ID NO: 1237788 - DNA, 25 bp, Homo sapien
tcgaggaccctgtgcaagactcggc

SEQ ID NO: 1237789 - DNA, 25 bp, Homo sapien
tggaagagcccgatttcctcaggag

SEQ ID NO: 1237790 - DNA, 25 bp, Homo sapien
aacatagccgcgcagcatcgtgaag

SEQ ID NO: 1237791 - DNA, 25 bp, Homo sapien
ggttgctgtcgaggaccctgtgcaa

SEQ ID NO: 1237792 - DNA, 25 bp, Homo sapien
gagtcttgcacagggtcctcgacag

SEQ ID NO: 1237793 - DNA, 25 bp, Homo sapien
ctcctgaggaaatcgggctcttcca

SEQ ID NO: 1237794 - DNA, 25 bp, Homo sapien
agcccttcacgatgctgcgcggcta

SEQ ID NO: 1237795 - DNA, 25 bp, Homo sapien
gggtcctcgacagcaaccccaggta

SEQ ID NO: 1237796 - DNA, 25 bp, Homo sapien
gaaaaaccggccgagtcttgcacag

SEQ ID NO: 1237797 - DNA, 25 bp, Homo sapien
ccttcacgatgctgcgcggctatgt

SEQ ID NO: 1237798 - DNA, 25 bp, Homo sapien
gtgctacccggatgtgtgcccagaa

SEQ ID NO: 1237799 - DNA, 25 bp, Homo sapien
caggatgcgtgctacccggatgtgt

SEQ ID NO: 1237800 - DNA, 25 bp, Homo sapien
taaaacgaggttgctgaaggccagg

SEQ ID NO: 1237801 - DNA, 25 bp, Homo sapien
tgctgaaggccaggatgcgtgctac

SEQ ID NO: 1237802 - DNA, 25 bp, Homo sapien
gtcccatttaaaacgaggttgctga

SEQ ID NO: 1237803 - DNA, 25 bp, Homo sapien
cggatgtgtgcccagaaaccctgca

SEQ ID NO: 1237804 - DNA, 25 bp, Homo sapien
cctggccttcagcaacctcgtttta

SEQ ID NO: 1237805 - DNA, 25 bp, Homo sapien
tcagcaacctcgttttaaatgggac

SEQ ID NO: 1237806 - DNA, 25 bp, Homo sapien
tgcagggtttctgggcacacatccg

SEQ ID NO: 1237807 - DNA, 25 bp, Homo sapien
gtagcacgcatcctggccttcagca

SEQ ID NO: 1237808 - DNA, 25 bp, Homo sapien
atccgggtagcacgcatcctggcct

SEQ ID NO: 1237809 - DNA, 25 bp, Homo sapien
tttctgggcacacatccgggtagca

SEQ ID NO: 1237810 - DNA, 25 bp, Homo sapien
ttctctcggttctcagaaggtcaag

SEQ ID NO: 1237811 - DNA, 25 bp, Homo sapien
gggctgaattctctcggttctcaga

SEQ ID NO: 1237812 - DNA, 25 bp, Homo sapien
aaggtcaagccctctgttagcatct

SEQ ID NO: 1237813 - DNA, 25 bp, Homo sapien
tttgtgtcttacgagaggccaggcg

SEQ ID NO: 1237814 - DNA, 25 bp, Homo sapien
gttagcatctcctcgaacagtgggc

SEQ ID NO: 1237815 - DNA, 25 bp, Homo sapien
gcatctcctcgaacagtgggccggg

SEQ ID NO: 1237816 - DNA, 25 bp, Homo sapien
gagatgctaacagagggcttgacct

SEQ ID NO: 1237817 - DNA, 25 bp, Homo sapien
cgcctggcctctcgtaagacacaaa

SEQ ID NO: 1237818 - DNA, 25 bp, Homo sapien
ccccggcccactgttcgaggagatg

SEQ ID NO: 1237819 - DNA, 25 bp, Homo sapien
ggcccactgttcgaggagatgctaa

SEQ ID NO: 1237820 - DNA, 25 bp, Homo sapien
tctgagaaccgagagaattcagccc

SEQ ID NO: 1237821 - DNA, 25 bp, Homo sapien
cttgaccttctgagaaccgagagaa

SEQ ID NO: 1237822 - DNA, 25 bp, Homo sapien
gaccttccatctcggagctcctgtg

SEQ ID NO: 1237823 - DNA, 25 bp, Homo sapien
agattatgccgccacagcagggagt

SEQ ID NO: 1237824 - DNA, 25 bp, Homo sapien
tccggaacatggatctgcgccggcg

SEQ ID NO: 1237825 - DNA, 25 bp, Homo sapien
aaggaggagattatgccgccacagc

SEQ ID NO: 1237826 - DNA, 25 bp, Homo sapien
tggcagagaccattccggaacatgg

SEQ ID NO: 1237827 - DNA, 25 bp, Homo sapien
ccagtccagggagcgttctggcaga

SEQ ID NO: 1237828 - DNA, 25 bp, Homo sapien
actccctgctgtggcggcataatct

SEQ ID NO: 1237829 - DNA, 25 bp, Homo sapien
tctgccagaacgctccctggactgg

SEQ ID NO: 1237830 - DNA, 25 bp, Homo sapien
gctgtggcggcataatctcctcctt

SEQ ID NO: 1237831 - DNA, 25 bp, Homo sapien
cacaggagctccgagatggaaggtc

SEQ ID NO: 1237832 - DNA, 25 bp, Homo sapien
ccatgttccggaatggtctctgcca

SEQ ID NO: 1237833 - DNA, 25 bp, Homo sapien
gccggcgcagatccatgttccggaa

SEQ ID NO: 1237834 - DNA, 25 bp, Homo sapien
cttgccaggcagctgattggagttt

SEQ ID NO: 1237835 - DNA, 25 bp, Homo sapien
tccttacagttgtgggttgtgtggc

SEQ ID NO: 1237836 - DNA, 25 bp, Homo sapien
cagctgattggagtttgcgactgtg

SEQ ID NO: 1237837 - DNA, 25 bp, Homo sapien
tacagttgtgggttgtgtggcttct

SEQ ID NO: 1237838 - DNA, 25 bp, Homo sapien
caggcagctgattggagtttgcgac

SEQ ID NO: 1237839 - DNA, 25 bp, Homo sapien
ttgtgtggcttcttgccaggcagct

SEQ ID NO: 1237840 - DNA, 25 bp, Homo sapien
aatcagctgcctggcaagaagccac

SEQ ID NO: 1237841 - DNA, 25 bp, Homo sapien
aaactccaatcagctgcctggcaag

SEQ ID NO: 1237842 - DNA, 25 bp, Homo sapien
gccacacaacccacaactgtaagga

SEQ ID NO: 1237843 - DNA, 25 bp, Homo sapien
agaagccacacaacccacaactgta

SEQ ID NO: 1237844 - DNA, 25 bp, Homo sapien
gctgcctggcaagaagccacacaac

SEQ ID NO: 1237845 - DNA, 25 bp, Homo sapien
cacagtcgcaaactccaatcagctg

SEQ ID NO: 1237846 - DNA, 25 bp, Homo sapien
cttgtggtagtttggtgggatcctc

SEQ ID NO: 1237847 - DNA, 25 bp, Homo sapien
cgagtgtaggcacagctgtgcagac

SEQ ID NO: 1237848 - DNA, 25 bp, Homo sapien
ctgtgcagacgacgcccttggcaag

SEQ ID NO: 1237849 - DNA, 25 bp, Homo sapien
cttctgaggacgcaaaaactcccag

SEQ ID NO: 1237850 - DNA, 25 bp, Homo sapien
agtttttggcgattgatgtgccacg

SEQ ID NO: 1237851 - DNA, 25 bp, Homo sapien
ctcccagagtttttggcgattgatg

SEQ ID NO: 1237852 - DNA, 25 bp, Homo sapien
agacacacctgccacttgctgcttg

SEQ ID NO: 1237853 - DNA, 25 bp, Homo sapien
gaagtgaggcacgagctccccaatt

SEQ ID NO: 1237854 - DNA, 25 bp, Homo sapien
tctgatcgttgtcagggccctgtgg

SEQ ID NO: 1237855 - DNA, 25 bp, Homo sapien
tgccacttgctgcttgcgaggaaag

SEQ ID NO: 1237856 - DNA, 25 bp, Homo sapien
catctgttggtgtctgatcgttgtc

SEQ ID NO: 1237857 - DNA, 25 bp, Homo sapien
tctgtgctgggttgcatctgttggt

SEQ ID NO: 1237858 - DNA, 25 bp, Homo sapien
tgacaacgatcagacaccaacagat

SEQ ID NO: 1237859 - DNA, 25 bp, Homo sapien
ctttcctcgcaagcagcaagtggca

SEQ ID NO: 1237860 - DNA, 25 bp, Homo sapien
caagcagcaagtggcaggtgtgtct

SEQ ID NO: 1237861 - DNA, 25 bp, Homo sapien
accaacagatgcaacccagcacaga

SEQ ID NO: 1237862 - DNA, 25 bp, Homo sapien
ggaattggggagctcgtgcctcact

SEQ ID NO: 1237863 - DNA, 25 bp, Homo sapien
accacagggccctgacaacgatcag

SEQ ID NO: 1237864 - DNA, 25 bp, Homo sapien
ctgggagtttttgcgtcctcagaag

SEQ ID NO: 1237865 - DNA, 25 bp, Homo sapien
cttgccaagggcgtcgtctgcacag

SEQ ID NO: 1237866 - DNA, 25 bp, Homo sapien
gtctgcacagctgtgcctacactcg

SEQ ID NO: 1237867 - DNA, 25 bp, Homo sapien
aggatcccaccaaactaccacaaga

SEQ ID NO: 1237868 - DNA, 25 bp, Homo sapien
cgtggcacatcaatcgccaaaaact

SEQ ID NO: 1237869 - DNA, 25 bp, Homo sapien
catcaatcgccaaaaactctgggag

SEQ ID NO: 1237870 - DNA, 25 bp, Homo sapien
ggtaggtttgtgcacacatcctgca

SEQ ID NO: 1237871 - DNA, 25 bp, Homo sapien
gccattcacgcctcgcctgagttgt

SEQ ID NO: 1237872 - DNA, 25 bp, Homo sapien
catttgtgagattacctcggtggcc

SEQ ID NO: 1237873 - DNA, 25 bp, Homo sapien
acaggcggctgtgccctaaacagga

SEQ ID NO: 1237874 - DNA, 25 bp, Homo sapien
tatcccttatggagagcacatggac

SEQ ID NO: 1237875 - DNA, 25 bp, Homo sapien
gatcaatgacatgtatgcgtgtgca

SEQ ID NO: 1237876 - DNA, 25 bp, Homo sapien
tgcaggatgtgtgcacaaacctacc

SEQ ID NO: 1237877 - DNA, 25 bp, Homo sapien
tttaggccaccgaggtaatctcaca

SEQ ID NO: 1237878 - DNA, 25 bp, Homo sapien
tcctgtttagggcacagccgcctgt

SEQ ID NO: 1237879 - DNA, 25 bp, Homo sapien
tccatgtgctctccataagggatag

SEQ ID NO: 1237880 - DNA, 25 bp, Homo sapien
caactcaggcgaggcgtgaatggcc

SEQ ID NO: 1237881 - DNA, 25 bp, Homo sapien
tgtcattgatcacaaacacaccgga

SEQ ID NO: 1237882 - DNA, 25 bp, Homo sapien
acggcagctcccaggtagggtgtca

SEQ ID NO: 1237883 - DNA, 25 bp, Homo sapien
tacaagaccatatctgcagggcaag

SEQ ID NO: 1237884 - DNA, 25 bp, Homo sapien
catcacagataggagtcccaagtcc

SEQ ID NO: 1237885 - DNA, 25 bp, Homo sapien
tgccacgtgtccaagctaggatcct

SEQ ID NO: 1237886 - DNA, 25 bp, Homo sapien
tgctgagaacccagtaaagccggcc

SEQ ID NO: 1237887 - DNA, 25 bp, Homo sapien
gacagcattgcttgctagggacccc

SEQ ID NO: 1237888 - DNA, 25 bp, Homo sapien
gccctgcagatatggtcttgtaaag

SEQ ID NO: 1237889 - DNA, 25 bp, Homo sapien
gggtccctagcaagcaatgctgtct

SEQ ID NO: 1237890 - DNA, 25 bp, Homo sapien
tggaatggaagtgtccctgtccccg

SEQ ID NO: 1237891 - DNA, 25 bp, Homo sapien
gatcctagcttggacacgtggcagg

SEQ ID NO: 1237892 - DNA, 25 bp, Homo sapien
tgatgacaccctacctgggagctgc

SEQ ID NO: 1237893 - DNA, 25 bp, Homo sapien
gaaggccggctttactgggttctca

SEQ ID NO: 1237894 - DNA, 25 bp, Homo sapien
agcgggccttcgggagctgggaaga

SEQ ID NO: 1237895 - DNA, 25 bp, Homo sapien
tgagcgggccttcgggagctgggaa

SEQ ID NO: 1237896 - DNA, 25 bp, Homo sapien
ctgagcgggccttcgggagctggga

SEQ ID NO: 1237897 - DNA, 25 bp, Homo sapien
ttcccagctcccgaaggcccgctca

SEQ ID NO: 1237898 - DNA, 25 bp, Homo sapien
tcttcccagctcccgaaggcccgct

SEQ ID NO: 1237899 - DNA, 25 bp, Homo sapien
tcccagctcccgaaggcccgctcag

SEQ ID NO: 1237900 - DNA, 25 bp, Homo sapien
ccttcgggagctgggaagagcaccc

SEQ ID NO: 1237901 - DNA, 25 bp, Homo sapien
gctgaagaggctgctccaggagcac

SEQ ID NO: 1237902 - DNA, 25 bp, Homo sapien
ctgagcgggccttcgggagctggga

SEQ ID NO: 1237903 - DNA, 25 bp, Homo sapien
tccaggagcacagcggcatctttgg

SEQ ID NO: 1237904 - DNA, 25 bp, Homo sapien
ggcatctttggcttcagcgtgtccc

SEQ ID NO: 1237905 - DNA, 25 bp, Homo sapien
gctgggaagagcaccctgctgaaga

SEQ ID NO: 1237906 - DNA, 25 bp, Homo sapien
aagatgccgctgtgctcctggagca

SEQ ID NO: 1237907 - DNA, 25 bp, Homo sapien
tgaagccaaagatgccgctgtgctc

SEQ ID NO: 1237908 - DNA, 25 bp, Homo sapien
tcttcagcagggtgctcttcccagc

SEQ ID NO: 1237909 - DNA, 25 bp, Homo sapien
ctggagcagcctcttcagcagggtg

SEQ ID NO: 1237910 - DNA, 25 bp, Homo sapien
gggtgctcttcccagctcccgaagg

SEQ ID NO: 1237911 - DNA, 25 bp, Homo sapien
gggacacgctgaagccaaagatgcc

SEQ ID NO: 1237912 - DNA, 25 bp, Homo sapien
gtgagtccagggctctcgtggaggg

SEQ ID NO: 1237913 - DNA, 25 bp, Homo sapien
ccctccacgagagccctggactcac

SEQ ID NO: 1237914 - DNA, 25 bp, Homo sapien
gttatcacactcctgctgtcctgcg

SEQ ID NO: 1237915 - DNA, 25 bp, Homo sapien
gaacctgaggttatcacactcctgc

SEQ ID NO: 1237916 - DNA, 25 bp, Homo sapien
tccctgggtctgttgagtactgata

SEQ ID NO: 1237917 - DNA, 25 bp, Homo sapien
tgagtagtcctagcaccgtgagcag

SEQ ID NO: 1237918 - DNA, 25 bp, Homo sapien
gcagactgtccgaactcttgcacac

SEQ ID NO: 1237919 - DNA, 25 bp, Homo sapien
gagtactgataactgggccacagtg

SEQ ID NO: 1237920 - DNA, 25 bp, Homo sapien
gaaagaaacactgtggcccagttat

SEQ ID NO: 1237921 - DNA, 25 bp, Homo sapien
ctgctcacggtgctaggactactca

SEQ ID NO: 1237922 - DNA, 25 bp, Homo sapien
gacagcaggagtgtgataacctcag

SEQ ID NO: 1237923 - DNA, 25 bp, Homo sapien
gggtttgggctcctggcctgctcac

SEQ ID NO: 1237924 - DNA, 25 bp, Homo sapien
tatcagtactcaacagacccaggga

SEQ ID NO: 1237925 - DNA, 25 bp, Homo sapien
tgtgcaagagttcggacagtctgca

SEQ ID NO: 1237926 - DNA, 25 bp, Homo sapien
ctcaagtgctgtcgggactgcaagg

SEQ ID NO: 1237927 - DNA, 25 bp, Homo sapien
ggctcaagtgctgtcgggactgcaa

SEQ ID NO: 1237928 - DNA, 25 bp, Homo sapien
aagtgctgtcgggactgcaagggaa

SEQ ID NO: 1237929 - DNA, 25 bp, Homo sapien
gaaacgctgggtggggcattgggct

SEQ ID NO: 1237930 - DNA, 25 bp, Homo sapien
gctcaagtgctgtcgggactgcaag

SEQ ID NO: 1237931 - DNA, 25 bp, Homo sapien
actgcaagggaaacgctgggtgggg

SEQ ID NO: 1237932 - DNA, 25 bp, Homo sapien
ttgcagtcccgacagcacttgagcc

SEQ ID NO: 1237933 - DNA, 25 bp, Homo sapien
ccttgcagtcccgacagcacttgag

SEQ ID NO: 1237934 - DNA, 25 bp, Homo sapien
ttcccttgcagtcccgacagcactt

SEQ ID NO: 1237935 - DNA, 25 bp, Homo sapien
agcccaatgccccacccagcgtttc

SEQ ID NO: 1237936 - DNA, 25 bp, Homo sapien
cttgcagtcccgacagcacttgagc

SEQ ID NO: 1237937 - DNA, 25 bp, Homo sapien
aatgccccacccagcgtttcccttg

SEQ ID NO: 1237938 - DNA, 25 bp, Homo sapien
cacgaggaacccgaggcccggcgag

SEQ ID NO: 1237939 - DNA, 25 bp, Homo sapien
ctcgccgggcctcgggttcctcgtg

SEQ ID NO: 1237940 - DNA, 25 bp, Homo sapien
aggcccggcgaggagaacggcaaag

SEQ ID NO: 1237941 - DNA, 25 bp, Homo sapien
gaggcccggcgaggagaacggcaaa

SEQ ID NO: 1237942 - DNA, 25 bp, Homo sapien
ccgaggcccggcgaggagaacggca

SEQ ID NO: 1237943 - DNA, 25 bp, Homo sapien
cacgaggaacccgaggcccggcgag

SEQ ID NO: 1237944 - DNA, 25 bp, Homo sapien
cgaggcccggcgaggagaacggcaa

SEQ ID NO: 1237945 - DNA, 25 bp, Homo sapien
ctttgccgttctcctcgccgggcct

SEQ ID NO: 1237946 - DNA, 25 bp, Homo sapien
tgccgttctcctcgccgggcctcgg

SEQ ID NO: 1237947 - DNA, 25 bp, Homo sapien
ctcgccgggcctcgggttcctcgtg

SEQ ID NO: 1237948 - DNA, 25 bp, Homo sapien
tttgccgttctcctcgccgggcctc

SEQ ID NO: 1237949 - DNA, 25 bp, Homo sapien
ttgccgttctcctcgccgggcctcg

SEQ ID NO: 1237950 - DNA, 25 bp, Homo sapien
tccaagggccggtgaactcaatcag

SEQ ID NO: 1237951 - DNA, 25 bp, Homo sapien
gactcggcacttatcagcacttttg

SEQ ID NO: 1237952 - DNA, 25 bp, Homo sapien
agcacttttgagctgtcttctggag

SEQ ID NO: 1237953 - DNA, 25 bp, Homo sapien
tgtgagatgggtccttgcctccaag

SEQ ID NO: 1237954 - DNA, 25 bp, Homo sapien
catcaatccctaatctgtgagatgg

SEQ ID NO: 1237955 - DNA, 25 bp, Homo sapien
cgccttccttgggtacagtgtgaga

SEQ ID NO: 1237956 - DNA, 25 bp, Homo sapien
ctgattgagttcaccggcccttgga

SEQ ID NO: 1237957 - DNA, 25 bp, Homo sapien
ctccagaagacagctcaaaagtgct

SEQ ID NO: 1237958 - DNA, 25 bp, Homo sapien
ttggaggcaaggacccatctcacag

SEQ ID NO: 1237959 - DNA, 25 bp, Homo sapien
caaaagtgctgataagtgccgagtc

SEQ ID NO: 1237960 - DNA, 25 bp, Homo sapien
tctcacactgtacccaaggaaggcg

SEQ ID NO: 1237961 - DNA, 25 bp, Homo sapien
catctcacagattagggattgatgg

SEQ ID NO: 1237962 - DNA, 25 bp, Homo sapien
gaacccagcagtctcgtatctccat

SEQ ID NO: 1237963 - DNA, 25 bp, Homo sapien
ctggaacccagcagtctcgtatctc

SEQ ID NO: 1237964 - DNA, 25 bp, Homo sapien
cctctgtaacctgacggtctccagt

SEQ ID NO: 1237965 - DNA, 25 bp, Homo sapien
cccttgccgtgcaacccagtggtct

SEQ ID NO: 1237966 - DNA, 25 bp, Homo sapien
tgtaacctgacggtctccagttccc

SEQ ID NO: 1237967 - DNA, 25 bp, Homo sapien
cccaccacatcgtcccctctgtaac

SEQ ID NO: 1237968 - DNA, 25 bp, Homo sapien
atggagatacgagactgctgggttc

SEQ ID NO: 1237969 - DNA, 25 bp, Homo sapien
gggaactggagaccgtcaggttaca

SEQ ID NO: 1237970 - DNA, 25 bp, Homo sapien
gagatacgagactgctgggttccag

SEQ ID NO: 1237971 - DNA, 25 bp, Homo sapien
actggagaccgtcaggttacagagg

SEQ ID NO: 1237972 - DNA, 25 bp, Homo sapien
agaccactgggttgcacggcaaggg

SEQ ID NO: 1237973 - DNA, 25 bp, Homo sapien
gaactggagaccgtcaggttacaga

SEQ ID NO: 1237974 - DNA, 25 bp, Homo sapien
caaggatctgactaaagcagtcgtg

SEQ ID NO: 1237975 - DNA, 25 bp, Homo sapien
cccagcaaggatctgactaaagcag

SEQ ID NO: 1237976 - DNA, 25 bp, Homo sapien
ggctcaggcacttggcagcacttga

SEQ ID NO: 1237977 - DNA, 25 bp, Homo sapien
aatggtgtctggctcaggcacttgg

SEQ ID NO: 1237978 - DNA, 25 bp, Homo sapien
tctgactaaagcagtcgtgggtgtg

SEQ ID NO: 1237979 - DNA, 25 bp, Homo sapien
tggcagcacttgaggggtcctcaga

SEQ ID NO: 1237980 - DNA, 25 bp, Homo sapien
ctgctttagtcagatccttgctggg

SEQ ID NO: 1237981 - DNA, 25 bp, Homo sapien
cacacccacgactgctttagtcaga

SEQ ID NO: 1237982 - DNA, 25 bp, Homo sapien
tctgaggacccctcaagtgctgcca

SEQ ID NO: 1237983 - DNA, 25 bp, Homo sapien
ccaagtgcctgagccagacaccatt

SEQ ID NO: 1237984 - DNA, 25 bp, Homo sapien
tcaagtgctgccaagtgcctgagcc

SEQ ID NO: 1237985 - DNA, 25 bp, Homo sapien
cacgactgctttagtcagatccttg

SEQ ID NO: 1237986 - DNA, 25 bp, Homo sapien
ttctcggggaacctgtatggcacga

SEQ ID NO: 1237987 - DNA, 25 bp, Homo sapien
cgacttcatcgagcatgccgagttc

SEQ ID NO: 1237988 - DNA, 25 bp, Homo sapien
ttcatcgagcatgccgagttctcgg

SEQ ID NO: 1237989 - DNA, 25 bp, Homo sapien
atgcagcgtgacatagcagccggcg

SEQ ID NO: 1237990 - DNA, 25 bp, Homo sapien
gcgtgacatagcagccggcgacttc

SEQ ID NO: 1237991 - DNA, 25 bp, Homo sapien
tgatgcagcgtgacatagcagccgg

SEQ ID NO: 1237992 - DNA, 25 bp, Homo sapien
cgccggctgctatgtcacgctgcat

SEQ ID NO: 1237993 - DNA, 25 bp, Homo sapien
gaactcggcatgctcgatgaagtcg

SEQ ID NO: 1237994 - DNA, 25 bp, Homo sapien
gctgctatgtcacgctgcatcacct

SEQ ID NO: 1237995 - DNA, 25 bp, Homo sapien
tcgtgccatacaggttccccgagaa

SEQ ID NO: 1237996 - DNA, 25 bp, Homo sapien
tacaggttccccgagaactcggcat

SEQ ID NO: 1237997 - DNA, 25 bp, Homo sapien
gaagtcgccggctgctatgtcacgc

SEQ ID NO: 1237998 - DNA, 25 bp, Homo sapien
ctcatgctcactacaggcaccttgg

SEQ ID NO: 1237999 - DNA, 25 bp, Homo sapien
gctcttttcatgaggctgctgggcc

SEQ ID NO: 1238000 - DNA, 25 bp, Homo sapien
cacagtggctcttttcatgaggctg

SEQ ID NO: 1238001 - DNA, 25 bp, Homo sapien
cacccaccccatggttatgaatgtg

SEQ ID NO: 1238002 - DNA, 25 bp, Homo sapien
cccatggttatgaatgtggccaggt

SEQ ID NO: 1238003 - DNA, 25 bp, Homo sapien
aacagggatccaggtagtgcctgct

SEQ ID NO: 1238004 - DNA, 25 bp, Homo sapien
ccaaggtgcctgtagtgagcatgag

SEQ ID NO: 1238005 - DNA, 25 bp, Homo sapien
cagcctcatgaaaagagccactgtg

SEQ ID NO: 1238006 - DNA, 25 bp, Homo sapien
ggcccagcagcctcatgaaaagagc

SEQ ID NO: 1238007 - DNA, 25 bp, Homo sapien
acctggccacattcataaccatggg

SEQ ID NO: 1238008 - DNA, 25 bp, Homo sapien
aatgcacggtggcaggaccgggccc

SEQ ID NO: 1238009 - DNA, 25 bp, Homo sapien
cagcaggcactacctggatccctgt

SEQ ID NO: 1238010 - DNA, 25 bp, Homo sapien
tgtgcagccgccttcactgcacgtg

SEQ ID NO: 1238011 - DNA, 25 bp, Homo sapien
tctgcggcccatctacatctctgtg

SEQ ID NO: 1238012 - DNA, 25 bp, Homo sapien
cgtgcaggccatgaaccgcatctgt

SEQ ID NO: 1238013 - DNA, 25 bp, Homo sapien
aacatcaaggccaccgatctgcggc

SEQ ID NO: 1238014 - DNA, 25 bp, Homo sapien
gcaggccatgaaccgcatctgtgtg

SEQ ID NO: 1238015 - DNA, 25 bp, Homo sapien
gcatctgtgtgctggacgtggacct

SEQ ID NO: 1238016 - DNA, 25 bp, Homo sapien
cacgtgcagtgaaggcggctgcaca

SEQ ID NO: 1238017 - DNA, 25 bp, Homo sapien
gccgcagatcggtggccttgatgtt

SEQ ID NO: 1238018 - DNA, 25 bp, Homo sapien
cacagagatgtagatgggccgcaga

SEQ ID NO: 1238019 - DNA, 25 bp, Homo sapien
acagatgcggttcatggcctgcacg

SEQ ID NO: 1238020 - DNA, 25 bp, Homo sapien
aggtccacgtccagcacacagatgc

SEQ ID NO: 1238021 - DNA, 25 bp, Homo sapien
cacacagatgcggttcatggcctgc

SEQ ID NO: 1238022 - DNA, 25 bp, Homo sapien
gggccagggcatgccaggctctgat

SEQ ID NO: 1238023 - DNA, 25 bp, Homo sapien
gggcatgccaggctctgattgccac

SEQ ID NO: 1238024 - DNA, 25 bp, Homo sapien
ggcatgccaggctctgattgccacc

SEQ ID NO: 1238025 - DNA, 25 bp, Homo sapien
agggcatgccaggctctgattgcca

SEQ ID NO: 1238026 - DNA, 25 bp, Homo sapien
cagggcatgccaggctctgattgcc

SEQ ID NO: 1238027 - DNA, 25 bp, Homo sapien
ggccagggcatgccaggctctgatt

SEQ ID NO: 1238028 - DNA, 25 bp, Homo sapien
tggcaatcagagcctggcatgccct

SEQ ID NO: 1238029 - DNA, 25 bp, Homo sapien
ggcaatcagagcctggcatgccctg

SEQ ID NO: 1238030 - DNA, 25 bp, Homo sapien
gtggcaatcagagcctggcatgccc

SEQ ID NO: 1238031 - DNA, 25 bp, Homo sapien
ggtggcaatcagagcctggcatgcc

SEQ ID NO: 1238032 - DNA, 25 bp, Homo sapien
atcagagcctggcatgccctggccc

SEQ ID NO: 1238033 - DNA, 25 bp, Homo sapien
aatcagagcctggcatgccctggcc

SEQ ID NO: 1238034 - DNA, 25 bp, Homo sapien
gcatgccaggctctgattgccaccc

SEQ ID NO: 1238035 - DNA, 25 bp, Homo sapien
gggcatgccaggctctgattgccac

SEQ ID NO: 1238036 - DNA, 25 bp, Homo sapien
ggcatgccaggctctgattgccacc

SEQ ID NO: 1238037 - DNA, 25 bp, Homo sapien
gctctgattgccaccccctttttag

SEQ ID NO: 1238038 - DNA, 25 bp, Homo sapien
cagggcatgccaggctctgattgcc

SEQ ID NO: 1238039 - DNA, 25 bp, Homo sapien
catgccaggctctgattgccacccc

SEQ ID NO: 1238040 - DNA, 25 bp, Homo sapien
gggtggcaatcagagcctggcatgc

SEQ ID NO: 1238041 - DNA, 25 bp, Homo sapien
tggcaatcagagcctggcatgccct

SEQ ID NO: 1238042 - DNA, 25 bp, Homo sapien
ggcaatcagagcctggcatgccctg

SEQ ID NO: 1238043 - DNA, 25 bp, Homo sapien
gtggcaatcagagcctggcatgccc

SEQ ID NO: 1238044 - DNA, 25 bp, Homo sapien
ctaaaaagggggtggcaatcagagc

SEQ ID NO: 1238045 - DNA, 25 bp, Homo sapien
ggtggcaatcagagcctggcatgcc

SEQ ID NO: 1238046 - DNA, 25 bp, Homo sapien
actgaaaccgaggagagcctggtga

SEQ ID NO: 1238047 - DNA, 25 bp, Homo sapien
tcaccaggctctcctcggtttcagt

SEQ ID NO: 1238048 - DNA, 25 bp, Homo sapien
ggcagcgcaacactgaaaccgagga

SEQ ID NO: 1238049 - DNA, 25 bp, Homo sapien
gctgcggcagcgcaacactgaaacc

SEQ ID NO: 1238050 - DNA, 25 bp, Homo sapien
gctgcccaggccgacatggagagca

SEQ ID NO: 1238051 - DNA, 25 bp, Homo sapien
ctggtgaagcggctggctgctgccc

SEQ ID NO: 1238052 - DNA, 25 bp, Homo sapien
actgaaaccgaggagagcctggtga

SEQ ID NO: 1238053 - DNA, 25 bp, Homo sapien
gcaacactgaaaccgaggagagcct

SEQ ID NO: 1238054 - DNA, 25 bp, Homo sapien
tcggtttcagtgttgcgctgccgca

SEQ ID NO: 1238055 - DNA, 25 bp, Homo sapien
tcctcggtttcagtgttgcgctgcc

SEQ ID NO: 1238056 - DNA, 25 bp, Homo sapien
ggctctcctcggtttcagtgttgcg

SEQ ID NO: 1238057 - DNA, 25 bp, Homo sapien
tcaccaggctctcctcggtttcagt

SEQ ID NO: 1238058 - DNA, 25 bp, Homo sapien
ggtttcagtgttgcgctgccgcagc

SEQ ID NO: 1238059 - DNA, 25 bp, Homo sapien
tgctctccatgtcggcctgggcagc

SEQ ID NO: 1238060 - DNA, 25 bp, Homo sapien
tgagtgtgccgtgggatcaccaggg

SEQ ID NO: 1238061 - DNA, 25 bp, Homo sapien
gtgccgtgggatcaccagggaatgc

SEQ ID NO: 1238062 - DNA, 25 bp, Homo sapien
agtgtgccgtgggatcaccagggaa

SEQ ID NO: 1238063 - DNA, 25 bp, Homo sapien
tgtgccgtgggatcaccagggaatg

SEQ ID NO: 1238064 - DNA, 25 bp, Homo sapien
ggttctgaggtctgtggcaccaggg

SEQ ID NO: 1238065 - DNA, 25 bp, Homo sapien
cagggaatgccaggaggggagtcag

SEQ ID NO: 1238066 - DNA, 25 bp, Homo sapien
ctgactcccctcctggcattccctg

SEQ ID NO: 1238067 - DNA, 25 bp, Homo sapien
ttccctggtgatcccacggcacact

SEQ ID NO: 1238068 - DNA, 25 bp, Homo sapien
ccctggtgccacagacctcagaacc

SEQ ID NO: 1238069 - DNA, 25 bp, Homo sapien
attccctggtgatcccacggcacac

SEQ ID NO: 1238070 - DNA, 25 bp, Homo sapien
gcattccctggtgatcccacggcac

SEQ ID NO: 1238071 - DNA, 25 bp, Homo sapien
cctggtgatcccacggcacactcac

SEQ ID NO: 1238072 - DNA, 25 bp, Homo sapien
tgagtgtgccgtgggatcaccaggg

SEQ ID NO: 1238073 - DNA, 25 bp, Homo sapien
ttctgaggtctgtggcaccagggac

SEQ ID NO: 1238074 - DNA, 25 bp, Homo sapien
ccgtgggatcaccagggaatgccag

SEQ ID NO: 1238075 - DNA, 25 bp, Homo sapien
tggcaccagggaccctgtgggtccc

SEQ ID NO: 1238076 - DNA, 25 bp, Homo sapien
cagggttctgaggtctgtggcacca

SEQ ID NO: 1238077 - DNA, 25 bp, Homo sapien
tgccgtgggatcaccagggaatgcc

SEQ ID NO: 1238078 - DNA, 25 bp, Homo sapien
ctgactcccctcctggcattccctg

SEQ ID NO: 1238079 - DNA, 25 bp, Homo sapien
ggcattccctggtgatcccacggca

SEQ ID NO: 1238080 - DNA, 25 bp, Homo sapien
tggtgccacagacctcagaaccctg

SEQ ID NO: 1238081 - DNA, 25 bp, Homo sapien
acagggtccctggtgccacagacct

SEQ ID NO: 1238082 - DNA, 25 bp, Homo sapien
ctggcattccctggtgatcccacgg

SEQ ID NO: 1238083 - DNA, 25 bp, Homo sapien
gggacccacagggtccctggtgcca

SEQ ID NO: 1238084 - DNA, 25 bp, Homo sapien
tgtgagggtcctcagacctctcaac

SEQ ID NO: 1238085 - DNA, 25 bp, Homo sapien
ccaagggtctcattgagggtcctca

SEQ ID NO: 1238086 - DNA, 25 bp, Homo sapien
gggtcccatgagatgtccccaacct

SEQ ID NO: 1238087 - DNA, 25 bp, Homo sapien
cttacagctgttgcctcttctctgg

SEQ ID NO: 1238088 - DNA, 25 bp, Homo sapien
ccaacacctagagtccccgtgaggg

SEQ ID NO: 1238089 - DNA, 25 bp, Homo sapien
cccagtcaccaagggtctcattgag

SEQ ID NO: 1238090 - DNA, 25 bp, Homo sapien
aggttggggacatctcatgggaccc

SEQ ID NO: 1238091 - DNA, 25 bp, Homo sapien
aagaggatgcacatgacacccccgg

SEQ ID NO: 1238092 - DNA, 25 bp, Homo sapien
ctcaatgagacccttggtgactggg

SEQ ID NO: 1238093 - DNA, 25 bp, Homo sapien
tagttgagaggtctgaggaccctca

SEQ ID NO: 1238094 - DNA, 25 bp, Homo sapien
ccagagaagaggcaacagctgtaag

SEQ ID NO: 1238095 - DNA, 25 bp, Homo sapien
tgaggaccctcaatgagacccttgg

SEQ ID NO: 1238096 - DNA, 25 bp, Homo sapien
gtgctggtgtccagacccaagttct

SEQ ID NO: 1238097 - DNA, 25 bp, Homo sapien
agaacttgggtctggacaccagcac

SEQ ID NO: 1238098 - DNA, 25 bp, Homo sapien
taaccagagtcctgatgggtgctgg

SEQ ID NO: 1238099 - DNA, 25 bp, Homo sapien
gtgctggtgtccagacccaagttct

SEQ ID NO: 1238100 - DNA, 25 bp, Homo sapien
ctggtgtccagacccaagttctggg

SEQ ID NO: 1238101 - DNA, 25 bp, Homo sapien
cctaaccagagtcctgatgggtgct

SEQ ID NO: 1238102 - DNA, 25 bp, Homo sapien
tcctgatgggtgctggtgtccagac

SEQ ID NO: 1238103 - DNA, 25 bp, Homo sapien
tagcccctaaccagagtcctgatgg

SEQ ID NO: 1238104 - DNA, 25 bp, Homo sapien
agaacttgggtctggacaccagcac

SEQ ID NO: 1238105 - DNA, 25 bp, Homo sapien
gcacccatcaggactctggttaggg

SEQ ID NO: 1238106 - DNA, 25 bp, Homo sapien
ccagcacccatcaggactctggtta

SEQ ID NO: 1238107 - DNA, 25 bp, Homo sapien
ctggagccccagaacttgggtctgg

SEQ ID NO: 1238108 - DNA, 25 bp, Homo sapien
gagccccagaacttgggtctggaca

SEQ ID NO: 1238109 - DNA, 25 bp, Homo sapien
cagaacttgggtctggacaccagca

SEQ ID NO: 1238110 - DNA, 25 bp, Homo sapien
aagctgtcccacagccgcagtgagg

SEQ ID NO: 1238111 - DNA, 25 bp, Homo sapien
cctcactgcggctgtgggacagctt

SEQ ID NO: 1238112 - DNA, 25 bp, Homo sapien
acagccgcagtgaggacagccgcag

SEQ ID NO: 1238113 - DNA, 25 bp, Homo sapien
agcaggagtggtgcctgaggactga

SEQ ID NO: 1238114 - DNA, 25 bp, Homo sapien
ccggctgggctggaaagctgtccca

SEQ ID NO: 1238115 - DNA, 25 bp, Homo sapien
ggtgcctgaggactgaggcccaggg

SEQ ID NO: 1238116 - DNA, 25 bp, Homo sapien
gtcccacagccgcagtgaggacagc

SEQ ID NO: 1238117 - DNA, 25 bp, Homo sapien
aagctgtcccacagccgcagtgagg

SEQ ID NO: 1238118 - DNA, 25 bp, Homo sapien
cctcactgcggctgtgggacagctt

SEQ ID NO: 1238119 - DNA, 25 bp, Homo sapien
tcagtcctcaggcaccactcctgct

SEQ ID NO: 1238120 - DNA, 25 bp, Homo sapien
ctgtgcagggtagggaagggccgcc

SEQ ID NO: 1238121 - DNA, 25 bp, Homo sapien
gctgtgggacagctttccagcccag

SEQ ID NO: 1238122 - DNA, 25 bp, Homo sapien
gcccagccgggcctgtgcagggtag

SEQ ID NO: 1238123 - DNA, 25 bp, Homo sapien
tgcggctgtcctcactgcggctgtg

SEQ ID NO: 1238124 - DNA, 25 bp, Homo sapien
tgctctgggggtcgtgtgggacctg

SEQ ID NO: 1238125 - DNA, 25 bp, Homo sapien
ctgctctgggggtcgtgtgggacct

SEQ ID NO: 1238126 - DNA, 25 bp, Homo sapien
gctgctctgggggtcgtgtgggacc

SEQ ID NO: 1238127 - DNA, 25 bp, Homo sapien
caggtcccacacgacccccagagca

SEQ ID NO: 1238128 - DNA, 25 bp, Homo sapien
aggtcccacacgacccccagagcag

SEQ ID NO: 1238129 - DNA, 25 bp, Homo sapien
ggtcccacacgacccccagagcagc

SEQ ID NO: 1238130 - DNA, 25 bp, Homo sapien
tgcatgggctcactgtgccctgacc

SEQ ID NO: 1238131 - DNA, 25 bp, Homo sapien
tgggctcactgtgccctgaccccag

SEQ ID NO: 1238132 - DNA, 25 bp, Homo sapien
gctgcatgggctcactgtgccctga

SEQ ID NO: 1238133 - DNA, 25 bp, Homo sapien
ctgcatgggctcactgtgccctgac

SEQ ID NO: 1238134 - DNA, 25 bp, Homo sapien
ctgctctgggggtcgtgtgggacct

SEQ ID NO: 1238135 - DNA, 25 bp, Homo sapien
ggctgcatgggctcactgtgccctg

SEQ ID NO: 1238136 - DNA, 25 bp, Homo sapien
aggtcccacacgacccccagagcag

SEQ ID NO: 1238137 - DNA, 25 bp, Homo sapien
cagggcacagtgagcccatgcagcc

SEQ ID NO: 1238138 - DNA, 25 bp, Homo sapien
gtcagggcacagtgagcccatgcag

SEQ ID NO: 1238139 - DNA, 25 bp, Homo sapien
tcagggcacagtgagcccatgcagc

SEQ ID NO: 1238140 - DNA, 25 bp, Homo sapien
gggtcagggcacagtgagcccatgc

SEQ ID NO: 1238141 - DNA, 25 bp, Homo sapien
ggtcagggcacagtgagcccatgca

SEQ ID NO: 1238142 - DNA, 25 bp, Homo sapien
tcatcattaacgacagcctggacca

SEQ ID NO: 1238143 - DNA, 25 bp, Homo sapien
tggtcatcattaacgacagcctgga

SEQ ID NO: 1238144 - DNA, 25 bp, Homo sapien
ggtcatcattaacgacagcctggac

SEQ ID NO: 1238145 - DNA, 25 bp, Homo sapien
gatgtggtcatcattaacgacagcc

SEQ ID NO: 1238146 - DNA, 25 bp, Homo sapien
tgtggtcatcattaacgacagcctg

SEQ ID NO: 1238147 - DNA, 25 bp, Homo sapien
catcattaacgacagcctggaccag

SEQ ID NO: 1238148 - DNA, 25 bp, Homo sapien
tccaggctgtcgttaatgatgacca

SEQ ID NO: 1238149 - DNA, 25 bp, Homo sapien
caggctgtcgttaatgatgaccaca

SEQ ID NO: 1238150 - DNA, 25 bp, Homo sapien
ctggtccaggctgtcgttaatgatg

SEQ ID NO: 1238151 - DNA, 25 bp, Homo sapien
gtccaggctgtcgttaatgatgacc

SEQ ID NO: 1238152 - DNA, 25 bp, Homo sapien
tggtccaggctgtcgttaatgatga

SEQ ID NO: 1238153 - DNA, 25 bp, Homo sapien
gctgtcgttaatgatgaccacatca

SEQ ID NO: 1238154 - DNA, 25 bp, Homo sapien
ctacgcagagctgaaggaggcgctc

SEQ ID NO: 1238155 - DNA, 25 bp, Homo sapien
cgcagagctgaaggaggcgctctct

SEQ ID NO: 1238156 - DNA, 25 bp, Homo sapien
tacgcagagctgaaggaggcgctct

SEQ ID NO: 1238157 - DNA, 25 bp, Homo sapien
cagagctgaaggaggcgctctctga

SEQ ID NO: 1238158 - DNA, 25 bp, Homo sapien
cctacgcagagctgaaggaggcgct

SEQ ID NO: 1238159 - DNA, 25 bp, Homo sapien
agagctgaaggaggcgctctctgag

SEQ ID NO: 1238160 - DNA, 25 bp, Homo sapien
agcgcctccttcagctctgcgtagg

SEQ ID NO: 1238161 - DNA, 25 bp, Homo sapien
gagcgcctccttcagctctgcgtag

SEQ ID NO: 1238162 - DNA, 25 bp, Homo sapien
ctcagagagcgcctccttcagctct

SEQ ID NO: 1238163 - DNA, 25 bp, Homo sapien
gagagcgcctccttcagctctgcgt

SEQ ID NO: 1238164 - DNA, 25 bp, Homo sapien
tcagagagcgcctccttcagctctg

SEQ ID NO: 1238165 - DNA, 25 bp, Homo sapien
agagagcgcctccttcagctctgcg

SEQ ID NO: 1238166 - DNA, 25 bp, Homo sapien
cctttgttgtccatgaggccactga

SEQ ID NO: 1238167 - DNA, 25 bp, Homo sapien
aggcctttgttgtccatgaggccac

SEQ ID NO: 1238168 - DNA, 25 bp, Homo sapien
gcctttgttgtccatgaggccactg

SEQ ID NO: 1238169 - DNA, 25 bp, Homo sapien
ccatccttgtgcctacctgggcaag

SEQ ID NO: 1238170 - DNA, 25 bp, Homo sapien
caggcctttgttgtccatgaggcca

SEQ ID NO: 1238171 - DNA, 25 bp, Homo sapien
ggcctttgttgtccatgaggccact

SEQ ID NO: 1238172 - DNA, 25 bp, Homo sapien
cagtggcctcatggacaacaaaggc

SEQ ID NO: 1238173 - DNA, 25 bp, Homo sapien
tggcctcatggacaacaaaggcctg

SEQ ID NO: 1238174 - DNA, 25 bp, Homo sapien
cttgcccaggtaggcacaaggatgg

SEQ ID NO: 1238175 - DNA, 25 bp, Homo sapien
tcagtggcctcatggacaacaaagg

SEQ ID NO: 1238176 - DNA, 25 bp, Homo sapien
gtggcctcatggacaacaaaggcct

SEQ ID NO: 1238177 - DNA, 25 bp, Homo sapien
agtggcctcatggacaacaaaggcc

SEQ ID NO: 1238178 - DNA, 25 bp, Homo sapien
tgggacagtcctacccaagcactgg

SEQ ID NO: 1238179 - DNA, 25 bp, Homo sapien
gggacagtcctacccaagcactggc

SEQ ID NO: 1238180 - DNA, 25 bp, Homo sapien
aagcactggcatgagacaccgaggt

SEQ ID NO: 1238181 - DNA, 25 bp, Homo sapien
ttcctggataccagccctcccaact

SEQ ID NO: 1238182 - DNA, 25 bp, Homo sapien
gcatgagacaccgaggtccacggtg

SEQ ID NO: 1238183 - DNA, 25 bp, Homo sapien
actggcatgagacaccgaggtccac

SEQ ID NO: 1238184 - DNA, 25 bp, Homo sapien
cctcggtgtctcatgccagtgcttg

SEQ ID NO: 1238185 - DNA, 25 bp, Homo sapien
cgtggacctcggtgtctcatgccag

SEQ ID NO: 1238186 - DNA, 25 bp, Homo sapien
caccgtggacctcggtgtctcatgc

SEQ ID NO: 1238187 - DNA, 25 bp, Homo sapien
ccagtgcttgggtaggactgtccca

SEQ ID NO: 1238188 - DNA, 25 bp, Homo sapien
tggacctcggtgtctcatgccagtg

SEQ ID NO: 1238189 - DNA, 25 bp, Homo sapien
gagttgggagggctggtatccagga

SEQ ID NO: 1238190 - DNA, 25 bp, Homo sapien
aaatcaagaaagctcaaaggaccgg

SEQ ID NO: 1238191 - DNA, 25 bp, Homo sapien
gaaatcaagaaagctcaaaggaccg

SEQ ID NO: 1238192 - DNA, 25 bp, Homo sapien
cggtcctttgagctttcttgatttc

SEQ ID NO: 1238193 - DNA, 25 bp, Homo sapien
ccggtcctttgagctttcttgattt

SEQ ID NO: 1238194 - DNA, 25 bp, Homo sapien
ttggcaggcgatacggcagctctgt

SEQ ID NO: 1238195 - DNA, 25 bp, Homo sapien
ttgctgtctgttctcggcaccccgg

SEQ ID NO: 1238196 - DNA, 25 bp, Homo sapien
cttggccagcatgtggagtggagga

SEQ ID NO: 1238197 - DNA, 25 bp, Homo sapien
ccgggcccatacaggaccagggcag

SEQ ID NO: 1238198 - DNA, 25 bp, Homo sapien
caggcgatacggcagctctgtgccc

SEQ ID NO: 1238199 - DNA, 25 bp, Homo sapien
ccttggcaggcgatacggcagctct

SEQ ID NO: 1238200 - DNA, 25 bp, Homo sapien
ccggggtgccgagaacagacagcaa

SEQ ID NO: 1238201 - DNA, 25 bp, Homo sapien
acagagctgccgtatcgcctgccaa

SEQ ID NO: 1238202 - DNA, 25 bp, Homo sapien
gctgccctggtcctgtatgggcccg

SEQ ID NO: 1238203 - DNA, 25 bp, Homo sapien
gagctgccgtatcgcctgccaaggg

SEQ ID NO: 1238204 - DNA, 25 bp, Homo sapien
gggcacagagctgccgtatcgcctg

SEQ ID NO: 1238205 - DNA, 25 bp, Homo sapien
tcctccactccacatgctggccaag

SEQ ID NO: 1238206 - DNA, 25 bp, Homo sapien
acatcctaataaaataactgttgga

SEQ ID NO: 1238207 - DNA, 25 bp, Homo sapien
catcctaataaaataactgttggat

SEQ ID NO: 1238208 - DNA, 25 bp, Homo sapien
atcctaataaaataactgttggatt

SEQ ID NO: 1238209 - DNA, 25 bp, Homo sapien
gacatcctaataaaataactgttgg

SEQ ID NO: 1238210 - DNA, 25 bp, Homo sapien
tgacatcctaataaaataactgttg

SEQ ID NO: 1238211 - DNA, 25 bp, Homo sapien
ccaacagttattttattaggatgtc

SEQ ID NO: 1238212 - DNA, 25 bp, Homo sapien
tccaacagttattttattaggatgt

SEQ ID NO: 1238213 - DNA, 25 bp, Homo sapien
aatccaacagttattttattaggat

SEQ ID NO: 1238214 - DNA, 25 bp, Homo sapien
atccaacagttattttattaggatg

SEQ ID NO: 1238215 - DNA, 25 bp, Homo sapien
caacagttattttattaggatgtca

SEQ ID NO: 1238216 - DNA, 25 bp, Homo sapien
ggctggggctgaccctaggggtggc

SEQ ID NO: 1238217 - DNA, 25 bp, Homo sapien
ctaggctcagaacagggctggggct

SEQ ID NO: 1238218 - DNA, 25 bp, Homo sapien
acagggctggggctgaccctagggg

SEQ ID NO: 1238219 - DNA, 25 bp, Homo sapien
taggctcagaacagggctggggctg

SEQ ID NO: 1238220 - DNA, 25 bp, Homo sapien
cttggatgctggtcctccccgaggg

SEQ ID NO: 1238221 - DNA, 25 bp, Homo sapien
tcaccaccaagcacaatgggggctg

SEQ ID NO: 1238222 - DNA, 25 bp, Homo sapien
agaaaattccagtctccctcagagc

SEQ ID NO: 1238223 - DNA, 25 bp, Homo sapien
tccccgagggtgtgtggccgagcca

SEQ ID NO: 1238224 - DNA, 25 bp, Homo sapien
cagggtgcccaaaatgaggattggt

SEQ ID NO: 1238225 - DNA, 25 bp, Homo sapien
cccaaagctacacctccagggtgcc

SEQ ID NO: 1238226 - DNA, 25 bp, Homo sapien
aaaatgaggattggtggggagaggc

SEQ ID NO: 1238227 - DNA, 25 bp, Homo sapien
acctccagggtgcccaaaatgagga

SEQ ID NO: 1238228 - DNA, 25 bp, Homo sapien
caggagaccccttagctccctccgc

SEQ ID NO: 1238229 - DNA, 25 bp, Homo sapien
agaccccttagctccctccgcctct

SEQ ID NO: 1238230 - DNA, 25 bp, Homo sapien
ctgaggcaggagaccccttagctcc

SEQ ID NO: 1238231 - DNA, 25 bp, Homo sapien
ctcccggtacctggcctgggaggca

SEQ ID NO: 1238232 - DNA, 25 bp, Homo sapien
ccttgcccacgaaggtggagtggtt

SEQ ID NO: 1238233 - DNA, 25 bp, Homo sapien
gtgaacttggcctgctcgtccgagt

SEQ ID NO: 1238234 - DNA, 25 bp, Homo sapien
cagccgtcagcacgatgcggaagac

SEQ ID NO: 1238235 - DNA, 25 bp, Homo sapien
tggctgccgcgtgttgcaagtgaac

SEQ ID NO: 1238236 - DNA, 25 bp, Homo sapien
ccgagggcgtggagatgaccacaat

SEQ ID NO: 1238237 - DNA, 25 bp, Homo sapien
gggccaggcggtgcacggcgtagcc

SEQ ID NO: 1238238 - DNA, 25 bp, Homo sapien
gcgtagcccaggtacatgaccgagg

SEQ ID NO: 1238239 - DNA, 25 bp, Homo sapien
gagatgaccacaatctggaagaccc

SEQ ID NO: 1238240 - DNA, 25 bp, Homo sapien
cggcgccgctcctgctcagacgcac

SEQ ID NO: 1238241 - DNA, 25 bp, Homo sapien
ggcgcgcggcgtggccccgggcggc

SEQ ID NO: 1238242 - DNA, 25 bp, Homo sapien
gggcgcggcgccgctcctgctcaga

SEQ ID NO: 1238243 - DNA, 25 bp, Homo sapien
gcgcggcgccgctcctgctcagacg

SEQ ID NO: 1238244 - DNA, 25 bp, Homo sapien
ggcgggctcaggccagccggcgtgc

SEQ ID NO: 1238245 - DNA, 25 bp, Homo sapien
gtcggcgggctcaggccagccggcg

SEQ ID NO: 1238246 - DNA, 25 bp, Homo sapien
gggctcaggccagccggcgtgcggg

SEQ ID NO: 1238247 - DNA, 25 bp, Homo sapien
tcggcgggctcaggccagccggcgt

SEQ ID NO: 1238248 - DNA, 25 bp, Homo sapien
gcgccgaccgccttagtgcacgcct

SEQ ID NO: 1238249 - DNA, 25 bp, Homo sapien
tcctccgcttcctcgccggcgccct

SEQ ID NO: 1238250 - DNA, 25 bp, Homo sapien
cttgccgtcagcgccgaccgcctta

SEQ ID NO: 1238251 - DNA, 25 bp, Homo sapien
cgccttagtgcacgcctcctccgcg

SEQ ID NO: 1238252 - DNA, 25 bp, Homo sapien
tgggccacgtacacgcgcatcaggc

SEQ ID NO: 1238253 - DNA, 25 bp, Homo sapien
ctgggccacgtacacgcgcatcagg

SEQ ID NO: 1238254 - DNA, 25 bp, Homo sapien
gcccatcgtgttgcccggtcgggcc

SEQ ID NO: 1238255 - DNA, 25 bp, Homo sapien
caggccctcccgctggatgcgcctc

SEQ ID NO: 1238256 - DNA, 25 bp, Homo sapien
tgaccacgtacataaccagcaggaa

SEQ ID NO: 1238257 - DNA, 25 bp, Homo sapien
tgcagggaaagaacggtcgcacctc

SEQ ID NO: 1238258 - DNA, 25 bp, Homo sapien
aagaccgtcttttcagtagggcgcg

SEQ ID NO: 1238259 - DNA, 25 bp, Homo sapien
caggtgggccatctcacagaggttg

SEQ ID NO: 1238260 - DNA, 25 bp, Homo sapien
ccaggctgtagtcgggcgggcaggc

SEQ ID NO: 1238261 - DNA, 25 bp, Homo sapien
caccaggctgtagtcgggcgggcag

SEQ ID NO: 1238262 - DNA, 25 bp, Homo sapien
cgccgcagggaaggcgcagggcggg

SEQ ID NO: 1238263 - DNA, 25 bp, Homo sapien
cgggcaggccaagccagcggccgcc

SEQ ID NO: 1238264 - DNA, 25 bp, Homo sapien
gtcatgcgcccgagcgcgctcggcc

SEQ ID NO: 1238265 - DNA, 25 bp, Homo sapien
ctggtcatgcgcccgagcgcgctcg

SEQ ID NO: 1238266 - DNA, 25 bp, Homo sapien
tggtcatgcgcccgagcgcgctcgg

SEQ ID NO: 1238267 - DNA, 25 bp, Homo sapien
ggtcatgcgcccgagcgcgctcggc

SEQ ID NO: 1238268 - DNA, 25 bp, Homo sapien
ccagccgctgccccgtcgcgcagcg

SEQ ID NO: 1238269 - DNA, 25 bp, Homo sapien
ctgtcccggtcgcggtccccagccg

SEQ ID NO: 1238270 - DNA, 25 bp, Homo sapien
agatccacacggtggtcttcccgtc

SEQ ID NO: 1238271 - DNA, 25 bp, Homo sapien
cgcagggaggccgacgcacggcgaa

SEQ ID NO: 1238272 - DNA, 25 bp, Homo sapien
agtgcccgcagaggtagcactgccc

SEQ ID NO: 1238273 - DNA, 25 bp, Homo sapien
ggcttggctcctggccgctcgtggg

SEQ ID NO: 1238274 - DNA, 25 bp, Homo sapien
gaggacctattccagctcaggacag

SEQ ID NO: 1238275 - DNA, 25 bp, Homo sapien
cattgggtccaagctgcaaggcata

SEQ ID NO: 1238276 - DNA, 25 bp, Homo sapien
gctgaagaaggagccccatttgctg

SEQ ID NO: 1238277 - DNA, 25 bp, Homo sapien
tcaaagagggtatggtcctgtccac

SEQ ID NO: 1238278 - DNA, 25 bp, Homo sapien
cagggagtggcgcagacaacaccca

SEQ ID NO: 1238279 - DNA, 25 bp, Homo sapien
agagcctggcgttcctgagggtgac

SEQ ID NO: 1238280 - DNA, 25 bp, Homo sapien
ccccatgcggacagagcggaaggca

SEQ ID NO: 1238281 - DNA, 25 bp, Homo sapien
ataggccaggcctagaatgcgctcc

SEQ ID NO: 1238282 - DNA, 25 bp, Homo sapien
cgggaggggcgggtgccacagcggc

SEQ ID NO: 1238283 - DNA, 25 bp, Homo sapien
ggaggggcgggtgccacagcggccc

SEQ ID NO: 1238284 - DNA, 25 bp, Homo sapien
gggaggggcgggtgccacagcggcc

SEQ ID NO: 1238285 - DNA, 25 bp, Homo sapien
gccgctccggccgttgggtcgccac

SEQ ID NO: 1238286 - DNA, 25 bp, Homo sapien
tggcgcctcgaagcagcgccgcggt

SEQ ID NO: 1238287 - DNA, 25 bp, Homo sapien
ccggagtggcgcctcgaagcagcgc

SEQ ID NO: 1238288 - DNA, 25 bp, Homo sapien
ccgttgggtcgccaccaggactgca

SEQ ID NO: 1238289 - DNA, 25 bp, Homo sapien
ccctagcaggaagggcgccgcgtcg

SEQ ID NO: 1238290 - DNA, 25 bp, Homo sapien
agccctagcaggaagggcgccgcgt

SEQ ID NO: 1238291 - DNA, 25 bp, Homo sapien
tcggaagcggcagttcattggtcag

SEQ ID NO: 1238292 - DNA, 25 bp, Homo sapien
gttcattggtcagcagccctagcag

SEQ ID NO: 1238293 - DNA, 25 bp, Homo sapien
cgcgcagcaggcggggcccccgcgg

SEQ ID NO: 1238294 - DNA, 25 bp, Homo sapien
cccgcgcgcgcagcaggcggggccc

SEQ ID NO: 1238295 - DNA, 25 bp, Homo sapien
gcgcagcaggcggggcccccgcggc

SEQ ID NO: 1238296 - DNA, 25 bp, Homo sapien
gcgcgcgcagcaggcggggcccccg

SEQ ID NO: 1238297 - DNA, 25 bp, Homo sapien
tacaagatgacgtcatagagcgtcc

SEQ ID NO: 1238298 - DNA, 25 bp, Homo sapien
agatgacgtcatagagcgtccggcc

SEQ ID NO: 1238299 - DNA, 25 bp, Homo sapien
ccgtacaagatgacgtcatagagcg

SEQ ID NO: 1238300 - DNA, 25 bp, Homo sapien
caagatgacgtcatagagcgtccgg

SEQ ID NO: 1238301 - DNA, 25 bp, Homo sapien
gatgactgagccaaatgccaatgtg

SEQ ID NO: 1238302 - DNA, 25 bp, Homo sapien
catcactgacagtcgtgatgtcagc

SEQ ID NO: 1238303 - DNA, 25 bp, Homo sapien
agcacagatgactgagccaaatgcc

SEQ ID NO: 1238304 - DNA, 25 bp, Homo sapien
cagtcgtgatgtcagcacagatgac

SEQ ID NO: 1238305 - DNA, 25 bp, Homo sapien
cacttccgggcatggatcactgaga

SEQ ID NO: 1238306 - DNA, 25 bp, Homo sapien
gagcttcgcctgcagaggtgtccga

SEQ ID NO: 1238307 - DNA, 25 bp, Homo sapien
tacacacgtgggctaagatgacggg

SEQ ID NO: 1238308 - DNA, 25 bp, Homo sapien
cacaggtccagggtctagtgagcca

SEQ ID NO: 1238309 - DNA, 25 bp, Homo sapien
gaaccagtaggcacaggtctcactg

SEQ ID NO: 1238310 - DNA, 25 bp, Homo sapien
cgtgccagcagccacggagaacgtt

SEQ ID NO: 1238311 - DNA, 25 bp, Homo sapien
gccacggagaacgttcacgctcatc

SEQ ID NO: 1238312 - DNA, 25 bp, Homo sapien
acgctcatcacccagaaccagtagg

SEQ ID NO: 1238313 - DNA, 25 bp, Homo sapien
cctgaccagacggatggtgggaaga

SEQ ID NO: 1238314 - DNA, 25 bp, Homo sapien
tgagacagggaggtagtaagacccc

SEQ ID NO: 1238315 - DNA, 25 bp, Homo sapien
ggttgattgcaggtatggactgcac

SEQ ID NO: 1238316 - DNA, 25 bp, Homo sapien
caggtatggactgcacagggcttca

SEQ ID NO: 1238317 - DNA, 25 bp, Homo sapien
tgcctgttccagcccagggaagcca

SEQ ID NO: 1238318 - DNA, 25 bp, Homo sapien
ctgcctgttccagcccagggaagcc

SEQ ID NO: 1238319 - DNA, 25 bp, Homo sapien
gcctgttccagcccagggaagccat

SEQ ID NO: 1238320 - DNA, 25 bp, Homo sapien
cagaaatgacaacagtccgctggat

SEQ ID NO: 1238321 - DNA, 25 bp, Homo sapien
gaacggtgtgcacagccactgagaa

SEQ ID NO: 1238322 - DNA, 25 bp, Homo sapien
gccccgcaggggaacggtgtgcaca

SEQ ID NO: 1238323 - DNA, 25 bp, Homo sapien
ctagggcagaaatgacaacagtccg

SEQ ID NO: 1238324 - DNA, 25 bp, Homo sapien
taagcaggcaaagacgagctcacag

SEQ ID NO: 1238325 - DNA, 25 bp, Homo sapien
ctagatgcgggcaccttggagacca

SEQ ID NO: 1238326 - DNA, 25 bp, Homo sapien
ccacagcaatgcgagggtgcgtgca

SEQ ID NO: 1238327 - DNA, 25 bp, Homo sapien
ggcatcatccggagtagtcccagag

SEQ ID NO: 1238328 - DNA, 25 bp, Homo sapien
ggtgataatcccacaagtccccgag

SEQ ID NO: 1238329 - DNA, 25 bp, Homo sapien
ctgtatagcgcgaggtgcttctgca

SEQ ID NO: 1238330 - DNA, 25 bp, Homo sapien
cttccgccggatcctgtatagcgcg

SEQ ID NO: 1238331 - DNA, 25 bp, Homo sapien
cccatgcgtgctgttcgcgggtcgc

SEQ ID NO: 1238332 - DNA, 25 bp, Homo sapien
gcagcctttggtgaagctcacgccg

SEQ ID NO: 1238333 - DNA, 25 bp, Homo sapien
cgcttgcggatgacgcccatgtggt

SEQ ID NO: 1238334 - DNA, 25 bp, Homo sapien
tcacgccgttcatgaaggccaggtt

SEQ ID NO: 1238335 - DNA, 25 bp, Homo sapien
ggctctgatgtgcagaggacccttg

SEQ ID NO: 1238336 - DNA, 25 bp, Homo sapien
tacttggagactgtaggccaccagt

SEQ ID NO: 1238337 - DNA, 25 bp, Homo sapien
ctggcacagatgcggctaaggccac

SEQ ID NO: 1238338 - DNA, 25 bp, Homo sapien
gtctggcacagatgcggctaaggcc

SEQ ID NO: 1238339 - DNA, 25 bp, Homo sapien
ctacttggagactgtaggccaccag

SEQ ID NO: 1238340 - DNA, 25 bp, Homo sapien
tgtgcttctcgatgtgtagacaccc

SEQ ID NO: 1238341 - DNA, 25 bp, Homo sapien
ccagcatgggatacctagtggctca

SEQ ID NO: 1238342 - DNA, 25 bp, Homo sapien
tgtgccccgtgactgacagcaagtc

SEQ ID NO: 1238343 - DNA, 25 bp, Homo sapien
cagacagatgggacgggaagaccct

SEQ ID NO: 1238344 - DNA, 25 bp, Homo sapien
ccaacaggcaatgtgggctcagaaa

SEQ ID NO: 1238345 - DNA, 25 bp, Homo sapien
tagggcctgcttccaaggtcctaaa

SEQ ID NO: 1238346 - DNA, 25 bp, Homo sapien
cagcagatcccagtgttcctgaaca

SEQ ID NO: 1238347 - DNA, 25 bp, Homo sapien
tgtgcagttttggagcggctacacc

SEQ ID NO: 1238348 - DNA, 25 bp, Homo sapien
tccttacagataagggcccagctgg

SEQ ID NO: 1238349 - DNA, 25 bp, Homo sapien
gcttactctaagatcagaacattgg

SEQ ID NO: 1238350 - DNA, 25 bp, Homo sapien
agagcccacctctatctggccagag

SEQ ID NO: 1238351 - DNA, 25 bp, Homo sapien
tccaccttctggctgggagactgcc

SEQ ID NO: 1238352 - DNA, 25 bp, Homo sapien
ggattttctgggtacacaattctag

SEQ ID NO: 1238353 - DNA, 25 bp, Homo sapien
tctaggctatcactattttctccca

SEQ ID NO: 1238354 - DNA, 25 bp, Homo sapien
tttctcccaggactttgaagatatt

SEQ ID NO: 1238355 - DNA, 25 bp, Homo sapien
ctcattcttgaaagacggattttct

SEQ ID NO: 1238356 - DNA, 25 bp, Homo sapien
tctggagaccggacagtccaagatc

SEQ ID NO: 1238357 - DNA, 25 bp, Homo sapien
taactccgcccttggagagtggagc

SEQ ID NO: 1238358 - DNA, 25 bp, Homo sapien
caggaactggccgacttgggaattc

SEQ ID NO: 1238359 - DNA, 25 bp, Homo sapien
gcacaagcgggctggacttaccctt

SEQ ID NO: 1238360 - DNA, 25 bp, Homo sapien
taagaagactgacagcaccaagcgc

SEQ ID NO: 1238361 - DNA, 25 bp, Homo sapien
gacagtcacagtcctagcttgggct

SEQ ID NO: 1238362 - DNA, 25 bp, Homo sapien
tgccgatgcgcacaaactaagctag

SEQ ID NO: 1238363 - DNA, 25 bp, Homo sapien
tgtaaatgctgcactcactccggga

SEQ ID NO: 1238364 - DNA, 25 bp, Homo sapien
tctgagctcccaaattcaggaccct

SEQ ID NO: 1238365 - DNA, 25 bp, Homo sapien
tgcagcccagcacgatgtccttaaa

SEQ ID NO: 1238366 - DNA, 25 bp, Homo sapien
gtccagcgggcaataaagtttcaat

SEQ ID NO: 1238367 - DNA, 25 bp, Homo sapien
ttctccagcatgtccgggtggccca

SEQ ID NO: 1238368 - DNA, 25 bp, Homo sapien
gacataggtgtgaaagggccacaca

SEQ ID NO: 1238369 - DNA, 25 bp, Homo sapien
gatgacaaaattctagaaacggaag

SEQ ID NO: 1238370 - DNA, 25 bp, Homo sapien
gatgggctatggttgccagggatta

SEQ ID NO: 1238371 - DNA, 25 bp, Homo sapien
taagatggcgttagagacataggtg

SEQ ID NO: 1238372 - DNA, 25 bp, Homo sapien
tcagtgctgcctcgaccggcttgag

SEQ ID NO: 1238373 - DNA, 25 bp, Homo sapien
aacaacccacgtgtcttcagtgctg

SEQ ID NO: 1238374 - DNA, 25 bp, Homo sapien
ggcagttttaggtgtaacagcaaca

SEQ ID NO: 1238375 - DNA, 25 bp, Homo sapien
gtcagattaaattagggccctccca

SEQ ID NO: 1238376 - DNA, 25 bp, Homo sapien
ccccagcagctaaaaccatcttgaa

SEQ ID NO: 1238377 - DNA, 25 bp, Homo sapien
ccacccccagcagctaaaaccatct

SEQ ID NO: 1238378 - DNA, 25 bp, Homo sapien
cagcagctaaaaccatcttgaaaga

SEQ ID NO: 1238379 - DNA, 25 bp, Homo sapien
gcagctaaaaccatcttgaaagaaa

SEQ ID NO: 1238380 - DNA, 25 bp, Homo sapien
gggatgctgcctatctggtagcact

SEQ ID NO: 1238381 - DNA, 25 bp, Homo sapien
taaagaccacaatacggtcacagag

SEQ ID NO: 1238382 - DNA, 25 bp, Homo sapien
ctggtagcacttcaagaatcggagc

SEQ ID NO: 1238383 - DNA, 25 bp, Homo sapien
tggcaaggaccccatagggatgctg

SEQ ID NO: 1238384 - DNA, 25 bp, Homo sapien
actcgtcgggagaacgtggctgctc

SEQ ID NO: 1238385 - DNA, 25 bp, Homo sapien
caaatgcccgggactcacgtccggg

SEQ ID NO: 1238386 - DNA, 25 bp, Homo sapien
acgtccgggactcatgccctggaag

SEQ ID NO: 1238387 - DNA, 25 bp, Homo sapien
cagaaacgcagccaaatgcccggga

SEQ ID NO: 1238388 - DNA, 25 bp, Homo sapien
tttcctccactaaggacagtttctg

SEQ ID NO: 1238389 - DNA, 25 bp, Homo sapien
tgggtttggcctcgagtacattgcg

SEQ ID NO: 1238390 - DNA, 25 bp, Homo sapien
cagtggaagactgcagacccagcac

SEQ ID NO: 1238391 - DNA, 25 bp, Homo sapien
tccactaaggacagtttctgaacag

SEQ ID NO: 1238392 - DNA, 25 bp, Homo sapien
cacttggtatcccctcgcagcggcc

SEQ ID NO: 1238393 - DNA, 25 bp, Homo sapien
gggactgcagggaaaaaagcgtcat

SEQ ID NO: 1238394 - DNA, 25 bp, Homo sapien
cagaacgcttattggggactgcagg

SEQ ID NO: 1238395 - DNA, 25 bp, Homo sapien
ttctctgcagcagaacgcttattgg

SEQ ID NO: 1238396 - DNA, 25 bp, Homo sapien
cacagagggacagacggggctcaac

SEQ ID NO: 1238397 - DNA, 25 bp, Homo sapien
tgctgacccgtccacctggcgcctg

SEQ ID NO: 1238398 - DNA, 25 bp, Homo sapien
cacaggccatgtgcccgcaggctgt

SEQ ID NO: 1238399 - DNA, 25 bp, Homo sapien
attaaatccaagaaacgcctctgct

SEQ ID NO: 1238400 - DNA, 25 bp, Homo sapien
tgacagaacgataccctctcattca

SEQ ID NO: 1238401 - DNA, 25 bp, Homo sapien
ccaagaatttaaggctacaatgagc

SEQ ID NO: 1238402 - DNA, 25 bp, Homo sapien
cattcatagaaaggtataactacag

SEQ ID NO: 1238403 - DNA, 25 bp, Homo sapien
agttcttatcatgaggttagggcgg

SEQ ID NO: 1238404 - DNA, 25 bp, Homo sapien
tcaatgtgagatttagtgggaacac

SEQ ID NO: 1238405 - DNA, 25 bp, Homo sapien
gaactttcctttaagatcaagagcc

SEQ ID NO: 1238406 - DNA, 25 bp, Homo sapien
tatgattgtctaaagtaaaagcccc

SEQ ID NO: 1238407 - DNA, 25 bp, Homo sapien
ggtgatatggacaagttcctcgaaa

SEQ ID NO: 1238408 - DNA, 25 bp, Homo sapien
cacagactgctgaccatggtgacct

SEQ ID NO: 1238409 - DNA, 25 bp, Homo sapien
taaatgtttgggcatcccgtggccc

SEQ ID NO: 1238410 - DNA, 25 bp, Homo sapien
tgcagaacatcgagggtgcaacccc

SEQ ID NO: 1238411 - DNA, 25 bp, Homo sapien
caaggcccacccatctttggaaaag

SEQ ID NO: 1238412 - DNA, 25 bp, Homo sapien
aatagccagcgccagggctagcaca

SEQ ID NO: 1238413 - DNA, 25 bp, Homo sapien
cactgctagctcttcaatagccagc

SEQ ID NO: 1238414 - DNA, 25 bp, Homo sapien
tcttcaatagccagcgccagggcta

SEQ ID NO: 1238415 - DNA, 25 bp, Homo sapien
atgtggccactgctagctcttcaat

SEQ ID NO: 1238416 - DNA, 25 bp, Homo sapien
tccattatgattagagagtggctct

SEQ ID NO: 1238417 - DNA, 25 bp, Homo sapien
tacagagtgactcagggccaccgct

SEQ ID NO: 1238418 - DNA, 25 bp, Homo sapien
tgggagatgccctggacagagtcat

SEQ ID NO: 1238419 - DNA, 25 bp, Homo sapien
cagttcatgcaacatcccgtcattg

SEQ ID NO: 1238420 - DNA, 25 bp, Homo sapien
ttaggcacaccaacatacacatgag

SEQ ID NO: 1238421 - DNA, 25 bp, Homo sapien
caaagggaggtacgatgatgatgtc

SEQ ID NO: 1238422 - DNA, 25 bp, Homo sapien
caacataaactgtgagaggatccag

SEQ ID NO: 1238423 - DNA, 25 bp, Homo sapien
gagagggagaacagacaacataaac

SEQ ID NO: 1238424 - DNA, 25 bp, Homo sapien
ggtcttaaaggccatatgtctagca

SEQ ID NO: 1238425 - DNA, 25 bp, Homo sapien
tggctcccgctcaaacaggtatgtg

SEQ ID NO: 1238426 - DNA, 25 bp, Homo sapien
tcacacccggacctgaatgtggtct

SEQ ID NO: 1238427 - DNA, 25 bp, Homo sapien
gagctcccagtcagatactccacag

SEQ ID NO: 1238428 - DNA, 25 bp, Homo sapien
ccaaagcaccaaggttacagatgtg

SEQ ID NO: 1238429 - DNA, 25 bp, Homo sapien
gatacacacaaaggacggctattca

SEQ ID NO: 1238430 - DNA, 25 bp, Homo sapien
cacaaaggacggctattcagtttat

SEQ ID NO: 1238431 - DNA, 25 bp, Homo sapien
gcagccggcccacccatatttattg

SEQ ID NO: 1238432 - DNA, 25 bp, Homo sapien
cacttctacatggtagaaggtttat

SEQ ID NO: 1238433 - DNA, 25 bp, Homo sapien
ttactaaatacgatcatttatttca

SEQ ID NO: 1238434 - DNA, 25 bp, Homo sapien
tactaaatacgatcatttatttcac

SEQ ID NO: 1238435 - DNA, 25 bp, Homo sapien
tttcacttctacatggtagaaggtt

SEQ ID NO: 1238436 - DNA, 25 bp, Homo sapien
tcctgcggtgtgctgccaacagggc

SEQ ID NO: 1238437 - DNA, 25 bp, Homo sapien
atttatcctgcggtgtgctgccaac

SEQ ID NO: 1238438 - DNA, 25 bp, Homo sapien
cggtgtgctgccaacagggccccag

SEQ ID NO: 1238439 - DNA, 25 bp, Homo sapien
gggcatttatcctgcggtgtgctgc

SEQ ID NO: 1238440 - DNA, 25 bp, Homo sapien
acaggagtgtcctgtgagaacccag

SEQ ID NO: 1238441 - DNA, 25 bp, Homo sapien
gagcacaggagtgtcctgtgagaac

SEQ ID NO: 1238442 - DNA, 25 bp, Homo sapien
gcacaggagtgtcctgtgagaaccc

SEQ ID NO: 1238443 - DNA, 25 bp, Homo sapien
caggagtgtcctgtgagaacccagc

SEQ ID NO: 1238444 - DNA, 25 bp, Homo sapien
taccagcagcccacactccggccgc

SEQ ID NO: 1238445 - DNA, 25 bp, Homo sapien
agcagcccacactccggccgctcct

SEQ ID NO: 1238446 - DNA, 25 bp, Homo sapien
ggaccagcaggctgcctaccagcag

SEQ ID NO: 1238447 - DNA, 25 bp, Homo sapien
cctccgagggcccaggaccagcagg

SEQ ID NO: 1238448 - DNA, 25 bp, Homo sapien
ctctctctatgggggctctgggcag

SEQ ID NO: 1238449 - DNA, 25 bp, Homo sapien
tctctctatgggggctctgggcagc

SEQ ID NO: 1238450 - DNA, 25 bp, Homo sapien
tatagccctgcattctgtcgcctgg

SEQ ID NO: 1238451 - DNA, 25 bp, Homo sapien
tcatcagctgccagggacggcacta

SEQ ID NO: 1238452 - DNA, 25 bp, Homo sapien
gagcgggtagagactgaggtcctca

SEQ ID NO: 1238453 - DNA, 25 bp, Homo sapien
tggcctgggaagagcgggtagagac

SEQ ID NO: 1238454 - DNA, 25 bp, Homo sapien
ctctgccacacccagatccccagct

SEQ ID NO: 1238455 - DNA, 25 bp, Homo sapien
ctgccacacccagatccccagctgg

SEQ ID NO: 1238456 - DNA, 25 bp, Homo sapien
gccacacccagatccccagctggcc

SEQ ID NO: 1238457 - DNA, 25 bp, Homo sapien
tctgccacacccagatccccagctg

SEQ ID NO: 1238458 - DNA, 25 bp, Homo sapien
tgacactaccgtgcctatgcagctc

SEQ ID NO: 1238459 - DNA, 25 bp, Homo sapien
ggtgtgggttgacactaccgtgcct

SEQ ID NO: 1238460 - DNA, 25 bp, Homo sapien
ccccatatagatggtgtgggttgac

SEQ ID NO: 1238461 - DNA, 25 bp, Homo sapien
agggtggacaccagtgccaaaggcc

SEQ ID NO: 1238462 - DNA, 25 bp, Homo sapien
ctgggtcagccaggcccaacttggt

SEQ ID NO: 1238463 - DNA, 25 bp, Homo sapien
cagctgggctgggtcagccaggccc

SEQ ID NO: 1238464 - DNA, 25 bp, Homo sapien
ggctgggtcagccaggcccaacttg

SEQ ID NO: 1238465 - DNA, 25 bp, Homo sapien
ggtcagccaggcccaacttggtcac

SEQ ID NO: 1238466 - DNA, 25 bp, Homo sapien
cagaagaggatcttgagcacgaagt

SEQ ID NO: 1238467 - DNA, 25 bp, Homo sapien
tgcttgccttcagtcaccgtgcagg

SEQ ID NO: 1238468 - DNA, 25 bp, Homo sapien
ctcacctgtggcgtgggattaccca

SEQ ID NO: 1238469 - DNA, 25 bp, Homo sapien
aaggcctcgcctatggcattgcgcg

SEQ ID NO: 1238470 - DNA, 25 bp, Homo sapien
tccagatcttgcagccgctttttga

SEQ ID NO: 1238471 - DNA, 25 bp, Homo sapien
agatcttgcagccgctttttgaagg

SEQ ID NO: 1238472 - DNA, 25 bp, Homo sapien
ccagatcttgcagccgctttttgaa

SEQ ID NO: 1238473 - DNA, 25 bp, Homo sapien
ctccagatcttgcagccgctttttg

SEQ ID NO: 1238474 - DNA, 25 bp, Homo sapien
ctcacataggaacgtggccgactcc

SEQ ID NO: 1238475 - DNA, 25 bp, Homo sapien
tcacataggaacgtggccgactcct

SEQ ID NO: 1238476 - DNA, 25 bp, Homo sapien
gtcaggcggcgctcggtgccctcct

SEQ ID NO: 1238477 - DNA, 25 bp, Homo sapien
ctcctcctcgatgccgtacttggcg

SEQ ID NO: 1238478 - DNA, 25 bp, Homo sapien
cttgaaccacgcggcctcagtggac

SEQ ID NO: 1238479 - DNA, 25 bp, Homo sapien
gcccacaaccgcgtctcctccttga

SEQ ID NO: 1238480 - DNA, 25 bp, Homo sapien
ctgccctctggcgtctcgcagatgt

SEQ ID NO: 1238481 - DNA, 25 bp, Homo sapien
ccgcgtcgtcgtcggccgagacatt

SEQ ID NO: 1238482 - DNA, 25 bp, Homo sapien
tcgtcgtcggccgagacattgcgca

SEQ ID NO: 1238483 - DNA, 25 bp, Homo sapien
tggcgtctcgcagatgtacaccgcg

SEQ ID NO: 1238484 - DNA, 25 bp, Homo sapien
cagctccacgcaaaacatagccgtg

SEQ ID NO: 1238485 - DNA, 25 bp, Homo sapien
tctggcagtcgccagccataaaggc

SEQ ID NO: 1238486 - DNA, 25 bp, Homo sapien
agaactgggtggacgtctggcagtc

SEQ ID NO: 1238487 - DNA, 25 bp, Homo sapien
gatggttagtgtgtggcgcgtgccc

SEQ ID NO: 1238488 - DNA, 25 bp, Homo sapien
taccaggtagccgtcgatagtgaca

SEQ ID NO: 1238489 - DNA, 25 bp, Homo sapien
aaagctgttgagagcggacactcgg

SEQ ID NO: 1238490 - DNA, 25 bp, Homo sapien
gaactcgaggtagggactctgacca

SEQ ID NO: 1238491 - DNA, 25 bp, Homo sapien
gtgtagccacccattcagcctcgtg

SEQ ID NO: 1238492 - DNA, 25 bp, Homo sapien
tcctacagagcctagacctaaatgt

SEQ ID NO: 1238493 - DNA, 25 bp, Homo sapien
tcttcctacagagcctagacctaaa

SEQ ID NO: 1238494 - DNA, 25 bp, Homo sapien
ttctcttcctacagagcctagacct

SEQ ID NO: 1238495 - DNA, 25 bp, Homo sapien
ctacagagcctagacctaaatgttc

SEQ ID NO: 1238496 - DNA, 25 bp, Homo sapien
gtccacggagaaagtgacctcgcca

SEQ ID NO: 1238497 - DNA, 25 bp, Homo sapien
tgccgggtgcgatcacagtggatct

SEQ ID NO: 1238498 - DNA, 25 bp, Homo sapien
tgccgttggccacgaacttcagctg

SEQ ID NO: 1238499 - DNA, 25 bp, Homo sapien
ggatgctgctctcaatgccgttggc

SEQ ID NO: 1238500 - DNA, 25 bp, Homo sapien
ggccctcagacctgtagcagcccta

SEQ ID NO: 1238501 - DNA, 25 bp, Homo sapien
ccgcccaccctggagaaatgaggct

SEQ ID NO: 1238502 - DNA, 25 bp, Homo sapien
tgacaccgcccaccctggagaaatg

SEQ ID NO: 1238503 - DNA, 25 bp, Homo sapien
ctacctggagccctgacaccgccca

SEQ ID NO: 1238504 - DNA, 25 bp, Homo sapien
gcggctgacgcactcgtagaggcct

SEQ ID NO: 1238505 - DNA, 25 bp, Homo sapien
tagaggcctgcatcgtcccgggcca

SEQ ID NO: 1238506 - DNA, 25 bp, Homo sapien
ccgatgcctgcacctcatacttggg

SEQ ID NO: 1238507 - DNA, 25 bp, Homo sapien
cgggccacatctcgcacaaggagca

SEQ ID NO: 1238508 - DNA, 25 bp, Homo sapien
taggtgccttcatcctgcctggtga

SEQ ID NO: 1238509 - DNA, 25 bp, Homo sapien
ctgcaagaagcgctcaccggagtgg

SEQ ID NO: 1238510 - DNA, 25 bp, Homo sapien
catccttgtaccagtgcacgtggac

SEQ ID NO: 1238511 - DNA, 25 bp, Homo sapien
gaggtctcacactcaaactgcgccg

SEQ ID NO: 1238512 - DNA, 25 bp, Homo sapien
tccttggcaaacaccgccttgggct

SEQ ID NO: 1238513 - DNA, 25 bp, Homo sapien
caggcggaaggagaccctctgtccc

SEQ ID NO: 1238514 - DNA, 25 bp, Homo sapien
ggcctcacagctgtactctccggag

SEQ ID NO: 1238515 - DNA, 25 bp, Homo sapien
cggaaggagaccctctgtcccctgg

SEQ ID NO: 1238516 - DNA, 25 bp, Homo sapien
ccagcctccgcatacagcccacagc

SEQ ID NO: 1238517 - DNA, 25 bp, Homo sapien
ccaggaacaggtgacgcagagaggg

SEQ ID NO: 1238518 - DNA, 25 bp, Homo sapien
tgagtaccagtgcagcacatgctcc

SEQ ID NO: 1238519 - DNA, 25 bp, Homo sapien
tggacaggtgctgaccatgccacta

SEQ ID NO: 1238520 - DNA, 25 bp, Homo sapien
cagaggtgctgagtaccagtgcagc

SEQ ID NO: 1238521 - DNA, 25 bp, Homo sapien
aaccgccagccggacatgggtttga

SEQ ID NO: 1238522 - DNA, 25 bp, Homo sapien
gggtttgagcaaaagagaatgcata

SEQ ID NO: 1238523 - DNA, 25 bp, Homo sapien
ccagccggacatgggtttgagcaaa

SEQ ID NO: 1238524 - DNA, 25 bp, Homo sapien
catgggtttgagcaaaagagaatgc

SEQ ID NO: 1238525 - DNA, 25 bp, Homo sapien
acctcgcagctcagtgtggcactgg

SEQ ID NO: 1238526 - DNA, 25 bp, Homo sapien
catgcacactttcgagctggagctc

SEQ ID NO: 1238527 - DNA, 25 bp, Homo sapien
ttgtaccacgtcacctccgtctggg

SEQ ID NO: 1238528 - DNA, 25 bp, Homo sapien
ctttgacatccagatggaaggagag

SEQ ID NO: 1238529 - DNA, 25 bp, Homo sapien
gatgctcaaatgtctgctctatcaa

SEQ ID NO: 1238530 - DNA, 25 bp, Homo sapien
tgctcccatgagatgctcaaatgtc

SEQ ID NO: 1238531 - DNA, 25 bp, Homo sapien
tcaaatgtctgctctatcaactgac

SEQ ID NO: 1238532 - DNA, 25 bp, Homo sapien
atgagatgctcaaatgtctgctcta

SEQ ID NO: 1238533 - DNA, 25 bp, Homo sapien
tgtcccagcctacgctgaaacactg

SEQ ID NO: 1238534 - DNA, 25 bp, Homo sapien
caagcactgtcccagcctacgctga

SEQ ID NO: 1238535 - DNA, 25 bp, Homo sapien
actgtcccagcctacgctgaaacac

SEQ ID NO: 1238536 - DNA, 25 bp, Homo sapien
agcactgtcccagcctacgctgaaa

SEQ ID NO: 1238537 - DNA, 25 bp, Homo sapien
ggcaggacagatcaaaccacacagg

SEQ ID NO: 1238538 - DNA, 25 bp, Homo sapien
gggagatgctcgaaaaatagaacac

SEQ ID NO: 1238539 - DNA, 25 bp, Homo sapien
tcagctctggcacatacagttgcaa

SEQ ID NO: 1238540 - DNA, 25 bp, Homo sapien
aaagtcctggagaggatcctggaaa

SEQ ID NO: 1238541 - DNA, 25 bp, Homo sapien
gatcttgcaaggacccacacagcag

SEQ ID NO: 1238542 - DNA, 25 bp, Homo sapien
tgttctcagggacccgggtatggat

SEQ ID NO: 1238543 - DNA, 25 bp, Homo sapien
tatggattcaggcactgcgaggatc

SEQ ID NO: 1238544 - DNA, 25 bp, Homo sapien
gcctgtcagcaacgtgtcttcagca

SEQ ID NO: 1238545 - DNA, 25 bp, Homo sapien
ctgctctctctcttgcccttcaaag

SEQ ID NO: 1238546 - DNA, 25 bp, Homo sapien
tgctctctctcttgcccttcaaagc

SEQ ID NO: 1238547 - DNA, 25 bp, Homo sapien
cctgctctctctcttgcccttcaaa

SEQ ID NO: 1238548 - DNA, 25 bp, Homo sapien
ccctgctctctctcttgcccttcaa

SEQ ID NO: 1238549 - DNA, 25 bp, Homo sapien
gagtgggacacacagggtcagacat

SEQ ID NO: 1238550 - DNA, 25 bp, Homo sapien
cagggtcagacatattccaattact

SEQ ID NO: 1238551 - DNA, 25 bp, Homo sapien
gacacacagggtcagacatattcca

SEQ ID NO: 1238552 - DNA, 25 bp, Homo sapien
acagagtgggacacacagggtcaga

SEQ ID NO: 1238553 - DNA, 25 bp, Homo sapien
gtgccacctggtccttggcaaacac

SEQ ID NO: 1238554 - DNA, 25 bp, Homo sapien
actgtgtgccacctggtccttggca

SEQ ID NO: 1238555 - DNA, 25 bp, Homo sapien
tgtgtgccacctggtccttggcaaa

SEQ ID NO: 1238556 - DNA, 25 bp, Homo sapien
tgtgccacctggtccttggcaaaca

SEQ ID NO: 1238557 - DNA, 25 bp, Homo sapien
agcccttggcctctacatgcacttt

SEQ ID NO: 1238558 - DNA, 25 bp, Homo sapien
cttggcctctacatgcactttcaag

SEQ ID NO: 1238559 - DNA, 25 bp, Homo sapien
agcctccgtctgcagcccttggcct

SEQ ID NO: 1238560 - DNA, 25 bp, Homo sapien
atgcactttcaagctggagctcagc

SEQ ID NO: 1238561 - DNA, 25 bp, Homo sapien
tgtagtccccggcatctgtcttgcc

SEQ ID NO: 1238562 - DNA, 25 bp, Homo sapien
gctgtagtccccggcatctgtcttg

SEQ ID NO: 1238563 - DNA, 25 bp, Homo sapien
gcggaaggagaccctctggcccctg

SEQ ID NO: 1238564 - DNA, 25 bp, Homo sapien
agctgtagtccccggcatctgtctt

SEQ ID NO: 1238565 - DNA, 25 bp, Homo sapien
tcctaaggaacataagaaagatctc

SEQ ID NO: 1238566 - DNA, 25 bp, Homo sapien
aattatcctaaggaacataagaaag

SEQ ID NO: 1238567 - DNA, 25 bp, Homo sapien
acataagaaagatctcaagaaaccc

SEQ ID NO: 1238568 - DNA, 25 bp, Homo sapien
taaggaacataagaaagatctcaag

SEQ ID NO: 1238569 - DNA, 25 bp, Homo sapien
tcagcctgcacctcattatgcactg

SEQ ID NO: 1238570 - DNA, 25 bp, Homo sapien
gcacctcattatgcactgactgctc

SEQ ID NO: 1238571 - DNA, 25 bp, Homo sapien
ttcccatccttgtaccacgtcacct

SEQ ID NO: 1238572 - DNA, 25 bp, Homo sapien
ttgtaccacgtcacctccgtctggg

SEQ ID NO: 1238573 - DNA, 25 bp, Homo sapien
ctaaaagcacaagaaaggcctcaaa

SEQ ID NO: 1238574 - DNA, 25 bp, Homo sapien
ctatcctaaaagcacaagaaaggcc

SEQ ID NO: 1238575 - DNA, 25 bp, Homo sapien
cacaagaaaggcctcaaaaaactca

SEQ ID NO: 1238576 - DNA, 25 bp, Homo sapien
tcctaaaagcacaagaaaggcctca

SEQ ID NO: 1238577 - DNA, 25 bp, Homo sapien
gcccttgacctccatgcgtactttt

SEQ ID NO: 1238578 - DNA, 25 bp, Homo sapien
cccttgacctccatgcgtacttttg

SEQ ID NO: 1238579 - DNA, 25 bp, Homo sapien
agccttcgtgtgcagcccttgacct

SEQ ID NO: 1238580 - DNA, 25 bp, Homo sapien
ctgtgatgtgcagttgaaaggagac

SEQ ID NO: 1238581 - DNA, 25 bp, Homo sapien
ctggcccccagcctcgcagctgtac

SEQ ID NO: 1238582 - DNA, 25 bp, Homo sapien
gatgtgcagttgaaaggagactctc

SEQ ID NO: 1238583 - DNA, 25 bp, Homo sapien
tgatgtgcagttgaaaggagactct

SEQ ID NO: 1238584 - DNA, 25 bp, Homo sapien
gacaggagggatgcgcagtcagaga

SEQ ID NO: 1238585 - DNA, 25 bp, Homo sapien
tggacaggagggatgcgcagtcaga

SEQ ID NO: 1238586 - DNA, 25 bp, Homo sapien
acaggagggatgcgcagtcagagac

SEQ ID NO: 1238587 - DNA, 25 bp, Homo sapien
aggagggatgcgcagtcagagacac

SEQ ID NO: 1238588 - DNA, 25 bp, Homo sapien
tgcctcagtccgcacctcattatgc

SEQ ID NO: 1238589 - DNA, 25 bp, Homo sapien
tatgcgcactttcgaactggagctc

SEQ ID NO: 1238590 - DNA, 25 bp, Homo sapien
cgcagcctctatgcgcactttcgaa

SEQ ID NO: 1238591 - DNA, 25 bp, Homo sapien
tccgcacctcattatgcaccaactg

SEQ ID NO: 1238592 - DNA, 25 bp, Homo sapien
tagaaggaaattcacacaaccccag

SEQ ID NO: 1238593 - DNA, 25 bp, Homo sapien
gcatgtgagagctgccagacattca

SEQ ID NO: 1238594 - DNA, 25 bp, Homo sapien
tgtcactagggagaacaagcatgag

SEQ ID NO: 1238595 - DNA, 25 bp, Homo sapien
gaaaacaccactccaggtacacagc

SEQ ID NO: 1238596 - DNA, 25 bp, Homo sapien
cttgtaccacgtcacctctgtctgg

SEQ ID NO: 1238597 - DNA, 25 bp, Homo sapien
tcttcccgtccttgtaccacgtcac

SEQ ID NO: 1238598 - DNA, 25 bp, Homo sapien
tgtaccacgtcacctctgtctgggc

SEQ ID NO: 1238599 - DNA, 25 bp, Homo sapien
ccgtccttgtaccacgtcacctctg

SEQ ID NO: 1238600 - DNA, 25 bp, Homo sapien
gaagaggctcctcggtgcccacaaa

SEQ ID NO: 1238601 - DNA, 25 bp, Homo sapien
tcacctccgaagaggctcctcggtg

SEQ ID NO: 1238602 - DNA, 25 bp, Homo sapien
gaggctcctcggtgcccacaaagca

SEQ ID NO: 1238603 - DNA, 25 bp, Homo sapien
ccgaagaggctcctcggtgcccaca

SEQ ID NO: 1238604 - DNA, 25 bp, Homo sapien
gggaaggcaagatgcacacggtgac

SEQ ID NO: 1238605 - DNA, 25 bp, Homo sapien
aggcaagatgcacacggtgaccacc

SEQ ID NO: 1238606 - DNA, 25 bp, Homo sapien
caagatgcacacggtgaccaccaac

SEQ ID NO: 1238607 - DNA, 25 bp, Homo sapien
agatgcacacggtgaccaccaacat

SEQ ID NO: 1238608 - DNA, 25 bp, Homo sapien
ccacctcgcagctgagtgtggtgct

SEQ ID NO: 1238609 - DNA, 25 bp, Homo sapien
tcactctccaacccccaaagcactg

SEQ ID NO: 1238610 - DNA, 25 bp, Homo sapien
gtcactctccaacccccaaagcact

SEQ ID NO: 1238611 - DNA, 25 bp, Homo sapien
aggggaggcacctggtccacctcag

SEQ ID NO: 1238612 - DNA, 25 bp, Homo sapien
cccaggggaggcacctggtccacct

SEQ ID NO: 1238613 - DNA, 25 bp, Homo sapien
accacaggtccagacagcgccaggg

SEQ ID NO: 1238614 - DNA, 25 bp, Homo sapien
tggtccacctcagaccacaggtcca

SEQ ID NO: 1238615 - DNA, 25 bp, Homo sapien
aaacgtctctcatgggctagaagcc

SEQ ID NO: 1238616 - DNA, 25 bp, Homo sapien
gatgccccgaagttcagtctggaaa

SEQ ID NO: 1238617 - DNA, 25 bp, Homo sapien
gaattccaagtgggactgcatgggc

SEQ ID NO: 1238618 - DNA, 25 bp, Homo sapien
ggctgccgggacaccaaaagctttg

SEQ ID NO: 1238619 - DNA, 25 bp, Homo sapien
ggcagggatgcacagggtggccacc

SEQ ID NO: 1238620 - DNA, 25 bp, Homo sapien
gggaaggcagggatgcacagggtgg

SEQ ID NO: 1238621 - DNA, 25 bp, Homo sapien
tggggaaggcagggatgcacagggt

SEQ ID NO: 1238622 - DNA, 25 bp, Homo sapien
ggatgcacagggtggccaccaccat

SEQ ID NO: 1238623 - DNA, 25 bp, Homo sapien
atactctccggtgtctgcctggcct

SEQ ID NO: 1238624 - DNA, 25 bp, Homo sapien
gtgtggcgctagcccctgcttcagc

SEQ ID NO: 1238625 - DNA, 25 bp, Homo sapien
agtgtggcgctagcccctgcttcag

SEQ ID NO: 1238626 - DNA, 25 bp, Homo sapien
cacacaaggtaactcagcatcccca

SEQ ID NO: 1238627 - DNA, 25 bp, Homo sapien
aaggtaactcagcatccccaaacca

SEQ ID NO: 1238628 - DNA, 25 bp, Homo sapien
ctacacacaaggtaactcagcatcc

SEQ ID NO: 1238629 - DNA, 25 bp, Homo sapien
cacaaggtaactcagcatccccaaa

SEQ ID NO: 1238630 - DNA, 25 bp, Homo sapien
tcttcccgtccttgtaccacgtcac

SEQ ID NO: 1238631 - DNA, 25 bp, Homo sapien
tccttggcaaacaccgccttgggct

SEQ ID NO: 1238632 - DNA, 25 bp, Homo sapien
tactccccggcgtccgcctggcctg

SEQ ID NO: 1238633 - DNA, 25 bp, Homo sapien
acctcgcagctcagcgtggcactgg

SEQ ID NO: 1238634 - DNA, 25 bp, Homo sapien
gtccctttggtctgacaactgtcct

SEQ ID NO: 1238635 - DNA, 25 bp, Homo sapien
tgtccctttggtctgacaactgtcc

SEQ ID NO: 1238636 - DNA, 25 bp, Homo sapien
tccctttggtctgacaactgtcctt

SEQ ID NO: 1238637 - DNA, 25 bp, Homo sapien
ctgtccctttggtctgacaactgtc

SEQ ID NO: 1238638 - DNA, 25 bp, Homo sapien
agttgtgacaaaccctccgtgcacg

SEQ ID NO: 1238639 - DNA, 25 bp, Homo sapien
ctggtgacatgcaaggtggagccct

SEQ ID NO: 1238640 - DNA, 25 bp, Homo sapien
gaccggccttttcgctctcaaatga

SEQ ID NO: 1238641 - DNA, 25 bp, Homo sapien
tcaaggatatgctagggtctcccca

SEQ ID NO: 1238642 - DNA, 25 bp, Homo sapien
cagaaccttcccaagcttggcactg

SEQ ID NO: 1238643 - DNA, 25 bp, Homo sapien
cactggccatgtagctgggagaagc

SEQ ID NO: 1238644 - DNA, 25 bp, Homo sapien
acacacgaggtcaaagatactgccc

SEQ ID NO: 1238645 - DNA, 25 bp, Homo sapien
tcaggaagaccaccctagggtagga

SEQ ID NO: 1238646 - DNA, 25 bp, Homo sapien
tccttggcaaacaccaccttgggct

SEQ ID NO: 1238647 - DNA, 25 bp, Homo sapien
ttcccatccttgtaccacgtcacct

SEQ ID NO: 1238648 - DNA, 25 bp, Homo sapien
tgtaccacgtcacctctgtctgggc

SEQ ID NO: 1238649 - DNA, 25 bp, Homo sapien
acctcgcagctcagcgtggcactgg

SEQ ID NO: 1238650 - DNA, 25 bp, Homo sapien
tcactcagcatccccaaagcactga

SEQ ID NO: 1238651 - DNA, 25 bp, Homo sapien
cactcagcatccccaaagcactgac

SEQ ID NO: 1238652 - DNA, 25 bp, Homo sapien
tggacacctcgggacatcggtagtt

SEQ ID NO: 1238653 - DNA, 25 bp, Homo sapien
gtctaatggaaagcccactgggtca

SEQ ID NO: 1238654 - DNA, 25 bp, Homo sapien
catgcattagataggaccagagtcc

SEQ ID NO: 1238655 - DNA, 25 bp, Homo sapien
cacacactaacgctgtggatctggg

SEQ ID NO: 1238656 - DNA, 25 bp, Homo sapien
tccacacgcattttcgagctggagc

SEQ ID NO: 1238657 - DNA, 25 bp, Homo sapien
ccacacgcattttcgagctggagct

SEQ ID NO: 1238658 - DNA, 25 bp, Homo sapien
ctgatccttggcaaacaccacctgc

SEQ ID NO: 1238659 - DNA, 25 bp, Homo sapien
ctccacacgcattttcgagctggag

SEQ ID NO: 1238660 - DNA, 25 bp, Homo sapien
ctgggatggacaaggagggatgcag

SEQ ID NO: 1238661 - DNA, 25 bp, Homo sapien
acacagcccatgtgtcagcccagtg

SEQ ID NO: 1238662 - DNA, 25 bp, Homo sapien
gtcagaggctccagagcagacacag

SEQ ID NO: 1238663 - DNA, 25 bp, Homo sapien
gtcagcccagtgacagccaggcagg

SEQ ID NO: 1238664 - DNA, 25 bp, Homo sapien
ctggcctccatgtgcacttttgagc

SEQ ID NO: 1238665 - DNA, 25 bp, Homo sapien
ccagcctccgtgtgtagccgctggc

SEQ ID NO: 1238666 - DNA, 25 bp, Homo sapien
agcctccgtgtgtagccgctggcct

SEQ ID NO: 1238667 - DNA, 25 bp, Homo sapien
gtgtgtagccgctggcctccatgtg

SEQ ID NO: 1238668 - DNA, 25 bp, Homo sapien
ctgcggcagggtctctctgaaattt

SEQ ID NO: 1238669 - DNA, 25 bp, Homo sapien
cggcagggtctctctgaaatttggg

SEQ ID NO: 1238670 - DNA, 25 bp, Homo sapien
tctctctgaaatttggggctccagc

SEQ ID NO: 1238671 - DNA, 25 bp, Homo sapien
ctctctgaaatttggggctccagct

SEQ ID NO: 1238672 - DNA, 25 bp, Homo sapien
aacctgggcgccatgcacggtcagg

SEQ ID NO: 1238673 - DNA, 25 bp, Homo sapien
ccacacggcagctgtagatggcgct

SEQ ID NO: 1238674 - DNA, 25 bp, Homo sapien
ttgagccaggtcaccgtggccgcag

SEQ ID NO: 1238675 - DNA, 25 bp, Homo sapien
tggctgtctcatgccgcttgctgcg

SEQ ID NO: 1238676 - DNA, 25 bp, Homo sapien
cactgacggtgagctgcgcactggt

SEQ ID NO: 1238677 - DNA, 25 bp, Homo sapien
ggcttagctcgcaggccagtgtcac

SEQ ID NO: 1238678 - DNA, 25 bp, Homo sapien
ttgcccacccgaagctgcgtgttgc

SEQ ID NO: 1238679 - DNA, 25 bp, Homo sapien
cactggtgtggtcatcacggctctc

SEQ ID NO: 1238680 - DNA, 25 bp, Homo sapien
tccagcaccaggtctgagatggtca

SEQ ID NO: 1238681 - DNA, 25 bp, Homo sapien
gatatggcaaacttctcgctgggct

SEQ ID NO: 1238682 - DNA, 25 bp, Homo sapien
gctggcgccactctgtgatatggca

SEQ ID NO: 1238683 - DNA, 25 bp, Homo sapien
ccagacataaacttcaccactcggg

SEQ ID NO: 1238684 - DNA, 25 bp, Homo sapien
gtctcgcagccaaagaagccacggt

SEQ ID NO: 1238685 - DNA, 25 bp, Homo sapien
gtgtcttgtcatccggcgtctcgca

SEQ ID NO: 1238686 - DNA, 25 bp, Homo sapien
caaaacctacgttgtgcagaaccag

SEQ ID NO: 1238687 - DNA, 25 bp, Homo sapien
tggatctccacgttctttcccggcg

SEQ ID NO: 1238688 - DNA, 25 bp, Homo sapien
ctgctggaaccgcagaccgtcacga

SEQ ID NO: 1238689 - DNA, 25 bp, Homo sapien
taaggccactatcctctggccgcag

SEQ ID NO: 1238690 - DNA, 25 bp, Homo sapien
agaccgtcacgagtccagctgccat

SEQ ID NO: 1238691 - DNA, 25 bp, Homo sapien
acgtgtgcactccttcggccttgaa

SEQ ID NO: 1238692 - DNA, 25 bp, Homo sapien
tctcagtggtcaccacgtcctgcag

SEQ ID NO: 1238693 - DNA, 25 bp, Homo sapien
acagctcgcactccagggtaacctt

SEQ ID NO: 1238694 - DNA, 25 bp, Homo sapien
ttcagccagcgcacatccacattag

SEQ ID NO: 1238695 - DNA, 25 bp, Homo sapien
agcgggcggctgaagctcacgggaa

SEQ ID NO: 1238696 - DNA, 25 bp, Homo sapien
cctgggctgcgatggccatcgtctt

SEQ ID NO: 1238697 - DNA, 25 bp, Homo sapien
acatacactccctgatccgcgaact

SEQ ID NO: 1238698 - DNA, 25 bp, Homo sapien
gggcatcatgggcatcacacacata

SEQ ID NO: 1238699 - DNA, 25 bp, Homo sapien
cgcaccggtaaatggtgaggctcct

SEQ ID NO: 1238700 - DNA, 25 bp, Homo sapien
ttcgtcgtgggagacctcacaggag

SEQ ID NO: 1238701 - DNA, 25 bp, Homo sapien
ttcctggcggatgcgcacgttgtca

SEQ ID NO: 1238702 - DNA, 25 bp, Homo sapien
cacgttgtcagtgggccgcagttta

SEQ ID NO: 1238703 - DNA, 25 bp, Homo sapien
ggcctcacgatctggatgttgcggc

SEQ ID NO: 1238704 - DNA, 25 bp, Homo sapien
gacaaaggcggctcagtatgggcgg

SEQ ID NO: 1238705 - DNA, 25 bp, Homo sapien
gggacaaaggcggctcagtatgggc

SEQ ID NO: 1238706 - DNA, 25 bp, Homo sapien
ggggacaaaggcggctcagtatggg

SEQ ID NO: 1238707 - DNA, 25 bp, Homo sapien
ggacaaaggcggctcagtatgggcg

SEQ ID NO: 1238708 - DNA, 25 bp, Homo sapien
ctccggtagatgagagtgtatgtcc

SEQ ID NO: 1238709 - DNA, 25 bp, Homo sapien
cttcactcggagctgggctcgcgat

SEQ ID NO: 1238710 - DNA, 25 bp, Homo sapien
cgattctgcattttcggctacaaat

SEQ ID NO: 1238711 - DNA, 25 bp, Homo sapien
tccgccaggactctccggtagatga

SEQ ID NO: 1238712 - DNA, 25 bp, Homo sapien
tcctctgcgtggacatcactgatga

SEQ ID NO: 1238713 - DNA, 25 bp, Homo sapien
gatgatcagcttgcggtagaggcca

SEQ ID NO: 1238714 - DNA, 25 bp, Homo sapien
tcacaggtgtaggtgtcctcgtcct

SEQ ID NO: 1238715 - DNA, 25 bp, Homo sapien
tcactgaccagctcgtacttgggcc

SEQ ID NO: 1238716 - DNA, 25 bp, Homo sapien
aactgtgcactggtcttgacatcac

SEQ ID NO: 1238717 - DNA, 25 bp, Homo sapien
gaactgtgcactggtcttgacatca

SEQ ID NO: 1238718 - DNA, 25 bp, Homo sapien
gatggaggtctcacactcaaaccag

SEQ ID NO: 1238719 - DNA, 25 bp, Homo sapien
gagccacttaggtggccgcactgag

SEQ ID NO: 1238720 - DNA, 25 bp, Homo sapien
tgcagaccccgcacaatggtgatgg

SEQ ID NO: 1238721 - DNA, 25 bp, Homo sapien
ttgccaacggtgaagtgcacgggcc

SEQ ID NO: 1238722 - DNA, 25 bp, Homo sapien
ggctcatcttaaacttctcagaggg

SEQ ID NO: 1238723 - DNA, 25 bp, Homo sapien
cggaggatgcgcagctcagccatct

SEQ ID NO: 1238724 - DNA, 25 bp, Homo sapien
ggaagtcgcaggacaggaccactga

SEQ ID NO: 1238725 - DNA, 25 bp, Homo sapien
tccaacggccgtgtgaggactacgg

SEQ ID NO: 1238726 - DNA, 25 bp, Homo sapien
aggaggcgcgtactatgcccgcatc

SEQ ID NO: 1238727 - DNA, 25 bp, Homo sapien
cgccggcccttgtgtgagatctcat

SEQ ID NO: 1238728 - DNA, 25 bp, Homo sapien
gatgctcttcagtaccagcgtgtgg

SEQ ID NO: 1238729 - DNA, 25 bp, Homo sapien
gatctcatggaagctgtcgttgtac

SEQ ID NO: 1238730 - DNA, 25 bp, Homo sapien
agggctcacgtcatgcaccacgagc

SEQ ID NO: 1238731 - DNA, 25 bp, Homo sapien
ggacaggtcatccagcgccttcagg

SEQ ID NO: 1238732 - DNA, 25 bp, Homo sapien
ctcctcggagcccacgtggcaggtg

SEQ ID NO: 1238733 - DNA, 25 bp, Homo sapien
tgcccgccgtgtgcaggaagtcata

SEQ ID NO: 1238734 - DNA, 25 bp, Homo sapien
accaggatgtattttcggccctgac

SEQ ID NO: 1238735 - DNA, 25 bp, Homo sapien
cctcttggtgatgcccacgtgcaga

SEQ ID NO: 1238736 - DNA, 25 bp, Homo sapien
ggacaggacgcactcaaagctgcag

SEQ ID NO: 1238737 - DNA, 25 bp, Homo sapien
tcgctggcactctcgtgggacagga

SEQ ID NO: 1238738 - DNA, 25 bp, Homo sapien
tactcgcccgcgtccttgagcgagg

SEQ ID NO: 1238739 - DNA, 25 bp, Homo sapien
catacttctggctcttgcggatggc

SEQ ID NO: 1238740 - DNA, 25 bp, Homo sapien
gtccttcagccagtgcacgggcgtt

SEQ ID NO: 1238741 - DNA, 25 bp, Homo sapien
ggctgtgctcttggaagcctccacc

SEQ ID NO: 1238742 - DNA, 25 bp, Homo sapien
cctgaggcccgtagctccaagaggc

SEQ ID NO: 1238743 - DNA, 25 bp, Homo sapien
aggcccttgcgccaggtcactgtgg

SEQ ID NO: 1238744 - DNA, 25 bp, Homo sapien
actgggcctggccaatgtcgcaggt

SEQ ID NO: 1238745 - DNA, 25 bp, Homo sapien
tataggtgtcgctgtctgccttctc

SEQ ID NO: 1238746 - DNA, 25 bp, Homo sapien
atactgaaccctgtgaacgccctgt

SEQ ID NO: 1238747 - DNA, 25 bp, Homo sapien
ccattcatggatcaacgggttaaca

SEQ ID NO: 1238748 - DNA, 25 bp, Homo sapien
gatacacgctgagcttacgcatggg

SEQ ID NO: 1238749 - DNA, 25 bp, Homo sapien
taaacacacgagtaagtgagcacca

SEQ ID NO: 1238750 - DNA, 25 bp, Homo sapien
tggtcacccgcctcaaagtagatgg

SEQ ID NO: 1238751 - DNA, 25 bp, Homo sapien
tcattgagctcgttggcatgcaggg

SEQ ID NO: 1238752 - DNA, 25 bp, Homo sapien
ccgggctgggcatcgatctcattga

SEQ ID NO: 1238753 - DNA, 25 bp, Homo sapien
ggtcctcgatgatgtgcactctccg

SEQ ID NO: 1238754 - DNA, 25 bp, Homo sapien
gcctcacacttgtagcgtccactgt

SEQ ID NO: 1238755 - DNA, 25 bp, Homo sapien
agctcccgggagaagacgcttggct

SEQ ID NO: 1238756 - DNA, 25 bp, Homo sapien
ttggtccagcacacaggaatgtcgc

SEQ ID NO: 1238757 - DNA, 25 bp, Homo sapien
gaatgtcgcaggtgctggtctcgca

SEQ ID NO: 1238758 - DNA, 25 bp, Homo sapien
tggtccccgaaggagcatgagtacc

SEQ ID NO: 1238759 - DNA, 25 bp, Homo sapien
cctggcgtaggctgtatttgtcacc

SEQ ID NO: 1238760 - DNA, 25 bp, Homo sapien
tcaggacgttgtttccatagcacca

SEQ ID NO: 1238761 - DNA, 25 bp, Homo sapien
cagatgacagcacacagcgcagtgt

SEQ ID NO: 1238762 - DNA, 25 bp, Homo sapien
ctcagtttcccgatgaactgggcag

SEQ ID NO: 1238763 - DNA, 25 bp, Homo sapien
tcagtttcccgatgaactgggcagg

SEQ ID NO: 1238764 - DNA, 25 bp, Homo sapien
tactccgcggcatccaccatggcca

SEQ ID NO: 1238765 - DNA, 25 bp, Homo sapien
gagtactccgcggcatccaccatgg

SEQ ID NO: 1238766 - DNA, 25 bp, Homo sapien
agtgaggctgaggtcctctcctctc

SEQ ID NO: 1238767 - DNA, 25 bp, Homo sapien
tggtgagtgaggctgaggtcctctc

SEQ ID NO: 1238768 - DNA, 25 bp, Homo sapien
tgagtgaggctgaggtcctctcctc

SEQ ID NO: 1238769 - DNA, 25 bp, Homo sapien
tgaggctgaggtcctctcctctcca

SEQ ID NO: 1238770 - DNA, 25 bp, Homo sapien
atgctctcttggtgtctcagtcttc

SEQ ID NO: 1238771 - DNA, 25 bp, Homo sapien
ctatgctctcttggtgtctcagtct

SEQ ID NO: 1238772 - DNA, 25 bp, Homo sapien
tatgctctcttggtgtctcagtctt

SEQ ID NO: 1238773 - DNA, 25 bp, Homo sapien
ccttcacggtgagagtggcagaggt

SEQ ID NO: 1238774 - DNA, 25 bp, Homo sapien
cttcacggtgagagtggcagaggtc

SEQ ID NO: 1238775 - DNA, 25 bp, Homo sapien
cagctcgcacacagccccgtcctgc

SEQ ID NO: 1238776 - DNA, 25 bp, Homo sapien
gctcagttcacaccacaacatggct

SEQ ID NO: 1238777 - DNA, 25 bp, Homo sapien
gttcacaccacaacatggctgtggc

SEQ ID NO: 1238778 - DNA, 25 bp, Homo sapien
cttgctcagttcacaccacaacatg

SEQ ID NO: 1238779 - DNA, 25 bp, Homo sapien
tcagttcacaccacaacatggctgt

SEQ ID NO: 1238780 - DNA, 25 bp, Homo sapien
ctgggaaggaccaagcagtcgctga

SEQ ID NO: 1238781 - DNA, 25 bp, Homo sapien
gagatcatcagactgtctggaagac

SEQ ID NO: 1238782 - DNA, 25 bp, Homo sapien
cgctgagatcatcagactgtctgga

SEQ ID NO: 1238783 - DNA, 25 bp, Homo sapien
ggaaggaccaagcagtcgctgagat

SEQ ID NO: 1238784 - DNA, 25 bp, Homo sapien
ttcacatcttctatgaacctggcag

SEQ ID NO: 1238785 - DNA, 25 bp, Homo sapien
tttcacatcttctatgaacctggca

SEQ ID NO: 1238786 - DNA, 25 bp, Homo sapien
tgagcatagccgaggtcctctcctg

SEQ ID NO: 1238787 - DNA, 25 bp, Homo sapien
acgcacgagtactccccagtgtctg

SEQ ID NO: 1238788 - DNA, 25 bp, Homo sapien
ccctgacggtgagcatagccgaggt

SEQ ID NO: 1238789 - DNA, 25 bp, Homo sapien
tctcctgcccgcacacgcacgagta

SEQ ID NO: 1238790 - DNA, 25 bp, Homo sapien
cacatgaggaccgtgagagtctctg

SEQ ID NO: 1238791 - DNA, 25 bp, Homo sapien
gctccagcctgtcagcgctgtagct

SEQ ID NO: 1238792 - DNA, 25 bp, Homo sapien
tcctcacactttatgtaactctggc

SEQ ID NO: 1238793 - DNA, 25 bp, Homo sapien
cactttatgtaactctggctgccag

SEQ ID NO: 1238794 - DNA, 25 bp, Homo sapien
gggggagggtcagaatatatgaaca

SEQ ID NO: 1238795 - DNA, 25 bp, Homo sapien
atctctgagggtctcatgccccttc

SEQ ID NO: 1238796 - DNA, 25 bp, Homo sapien
ctgacggtgagcatggctgaggtcc

SEQ ID NO: 1238797 - DNA, 25 bp, Homo sapien
tgacggtgagcatggctgaggtcct

SEQ ID NO: 1238798 - DNA, 25 bp, Homo sapien
ggctgaggtcctctccttcccgcac

SEQ ID NO: 1238799 - DNA, 25 bp, Homo sapien
catggctgaggtcctctccttcccg

SEQ ID NO: 1238800 - DNA, 25 bp, Homo sapien
gctgcttggctgcatgtggccttta

SEQ ID NO: 1238801 - DNA, 25 bp, Homo sapien
gatggcgtcaagtcaacacgtggac

SEQ ID NO: 1238802 - DNA, 25 bp, Homo sapien
cacgtggacatgagagcatggtgct

SEQ ID NO: 1238803 - DNA, 25 bp, Homo sapien
gcagagacggatggcgtcaagtcaa

SEQ ID NO: 1238804 - DNA, 25 bp, Homo sapien
cctcagaccctctatgaacttggaa

SEQ ID NO: 1238805 - DNA, 25 bp, Homo sapien
cagaccctctatgaacttggaaggc

SEQ ID NO: 1238806 - DNA, 25 bp, Homo sapien
accctctatgaacttggaaggcatg

SEQ ID NO: 1238807 - DNA, 25 bp, Homo sapien
agtactccccggcatccaccacagc

SEQ ID NO: 1238808 - DNA, 25 bp, Homo sapien
gtgagtgtggctgaggtcctctcct

SEQ ID NO: 1238809 - DNA, 25 bp, Homo sapien
ccctgacagtgagtgtggctgaggt

SEQ ID NO: 1238810 - DNA, 25 bp, Homo sapien
tgaggtcctctcctgcccgcacaca

SEQ ID NO: 1238811 - DNA, 25 bp, Homo sapien
tgacagtgagtgtggctgaggtcct

SEQ ID NO: 1238812 - DNA, 25 bp, Homo sapien
gagaaggacatgagcatgagaacac

SEQ ID NO: 1238813 - DNA, 25 bp, Homo sapien
aagagcaaacaaacgtacacatggg

SEQ ID NO: 1238814 - DNA, 25 bp, Homo sapien
gaccacacgtgaaagagcaaacaaa

SEQ ID NO: 1238815 - DNA, 25 bp, Homo sapien
catcaaaggaccacacgtgaaagag

SEQ ID NO: 1238816 - DNA, 25 bp, Homo sapien
gtgattatcagaccgtctggaggac

SEQ ID NO: 1238817 - DNA, 25 bp, Homo sapien
cagtcattgtgattatcagaccgtc

SEQ ID NO: 1238818 - DNA, 25 bp, Homo sapien
agcagtcattgtgattatcagaccg

SEQ ID NO: 1238819 - DNA, 25 bp, Homo sapien
tcattgtgattatcagaccgtctgg

SEQ ID NO: 1238820 - DNA, 25 bp, Homo sapien
gccatgaatctgcagctcacatctg

SEQ ID NO: 1238821 - DNA, 25 bp, Homo sapien
caggccatgaatctgcagctcacat

SEQ ID NO: 1238822 - DNA, 25 bp, Homo sapien
cacgggggccgccttgctcagctca

SEQ ID NO: 1238823 - DNA, 25 bp, Homo sapien
cctgcctcaggctgtatctgtcccc

SEQ ID NO: 1238824 - DNA, 25 bp, Homo sapien
gagacaggaatcactcaggtggcca

SEQ ID NO: 1238825 - DNA, 25 bp, Homo sapien
aggagacaggaatcactcaggtggc

SEQ ID NO: 1238826 - DNA, 25 bp, Homo sapien
acaggaatcactcaggtggccacat

SEQ ID NO: 1238827 - DNA, 25 bp, Homo sapien
gacaggaatcactcaggtggccaca

SEQ ID NO: 1238828 - DNA, 25 bp, Homo sapien
tcttgagtgaatcgtgcaggcaggg

SEQ ID NO: 1238829 - DNA, 25 bp, Homo sapien
agatcttgagtgaatcgtgcaggca

SEQ ID NO: 1238830 - DNA, 25 bp, Homo sapien
gatcttgagtgaatcgtgcaggcag

SEQ ID NO: 1238831 - DNA, 25 bp, Homo sapien
cagatcttgagtgaatcgtgcaggc

SEQ ID NO: 1238832 - DNA, 25 bp, Homo sapien
agcgtggccgaggtcctctcttgtc

SEQ ID NO: 1238833 - DNA, 25 bp, Homo sapien
gtggccgaggtcctctcttgtccac

SEQ ID NO: 1238834 - DNA, 25 bp, Homo sapien
cgtggccgaggtcctctcttgtcca

SEQ ID NO: 1238835 - DNA, 25 bp, Homo sapien
gcgtggccgaggtcctctcttgtcc

SEQ ID NO: 1238836 - DNA, 25 bp, Homo sapien
tagtgtggcatgacgtgaagagtgt

SEQ ID NO: 1238837 - DNA, 25 bp, Homo sapien
gagagggaatctggatgtagatgag

SEQ ID NO: 1238838 - DNA, 25 bp, Homo sapien
caggaagctggaagggatagtgtgg

SEQ ID NO: 1238839 - DNA, 25 bp, Homo sapien
ggcatgacgtgaagagtgtggcagt

SEQ ID NO: 1238840 - DNA, 25 bp, Homo sapien
gtggagggatcagaaagacatggac

SEQ ID NO: 1238841 - DNA, 25 bp, Homo sapien
cacaattacattgagcacatgaaag

SEQ ID NO: 1238842 - DNA, 25 bp, Homo sapien
gacatggacacaattacattgagca

SEQ ID NO: 1238843 - DNA, 25 bp, Homo sapien
gaaagacatggacacaattacattg

SEQ ID NO: 1238844 - DNA, 25 bp, Homo sapien
cttgtctcaggctgtatttgtcccc

SEQ ID NO: 1238845 - DNA, 25 bp, Homo sapien
gttatctgccatagccaggccatga

SEQ ID NO: 1238846 - DNA, 25 bp, Homo sapien
gagtacaccccgttatctgccatag

SEQ ID NO: 1238847 - DNA, 25 bp, Homo sapien
ggccatgaatctgcagctcacacac

SEQ ID NO: 1238848 - DNA, 25 bp, Homo sapien
ccctgacagtgagtgtagctgaggt

SEQ ID NO: 1238849 - DNA, 25 bp, Homo sapien
aaacagtcactgatatcatcagact

SEQ ID NO: 1238850 - DNA, 25 bp, Homo sapien
acagtcactgatatcatcagactgt

SEQ ID NO: 1238851 - DNA, 25 bp, Homo sapien
gagaaggaccaaacagtcactgata

SEQ ID NO: 1238852 - DNA, 25 bp, Homo sapien
ctgagaaggaccaaacagtcactga

SEQ ID NO: 1238853 - DNA, 25 bp, Homo sapien
gtacctgtccccatctttgagggtg

SEQ ID NO: 1238854 - DNA, 25 bp, Homo sapien
gcctttctcagcttacattgcaatg

SEQ ID NO: 1238855 - DNA, 25 bp, Homo sapien
tatgcacgagtattctccagcatct

SEQ ID NO: 1238856 - DNA, 25 bp, Homo sapien
tgactgtagccccttctgtggcctt

SEQ ID NO: 1238857 - DNA, 25 bp, Homo sapien
agcgtggccgaggtcctctcctgct

SEQ ID NO: 1238858 - DNA, 25 bp, Homo sapien
tgagcgtggccgaggtcctctcctg

SEQ ID NO: 1238859 - DNA, 25 bp, Homo sapien
agtgagcgtggccgaggtcctctcc

SEQ ID NO: 1238860 - DNA, 25 bp, Homo sapien
cgtggccgaggtcctctcctgctca

SEQ ID NO: 1238861 - DNA, 25 bp, Homo sapien
tggacatccacaggcctttgcaaga

SEQ ID NO: 1238862 - DNA, 25 bp, Homo sapien
tcaacgacactgagagacactggga

SEQ ID NO: 1238863 - DNA, 25 bp, Homo sapien
catattttgcacgtgagaaggccat

SEQ ID NO: 1238864 - DNA, 25 bp, Homo sapien
cacaggatgggccaatagagctaca

SEQ ID NO: 1238865 - DNA, 25 bp, Homo sapien
aagagatagcctgaccagacagggc

SEQ ID NO: 1238866 - DNA, 25 bp, Homo sapien
tgcatttgacagtgaggacttcctg

SEQ ID NO: 1238867 - DNA, 25 bp, Homo sapien
tctatgatgacacagcagacacctt

SEQ ID NO: 1238868 - DNA, 25 bp, Homo sapien
tgaggcggaccaaagtgcatttgac

SEQ ID NO: 1238869 - DNA, 25 bp, Homo sapien
cttagttcacactgcaatgtggctg

SEQ ID NO: 1238870 - DNA, 25 bp, Homo sapien
ttcacactgcaatgtggctgtggcc

SEQ ID NO: 1238871 - DNA, 25 bp, Homo sapien
tgcttagttcacactgcaatgtggc

SEQ ID NO: 1238872 - DNA, 25 bp, Homo sapien
cttgcttagttcacactgcaatgtg

SEQ ID NO: 1238873 - DNA, 25 bp, Homo sapien
gcaaatgaatatacagatggtgaga

SEQ ID NO: 1238874 - DNA, 25 bp, Homo sapien
caaatgaatatacagatggtgagaa

SEQ ID NO: 1238875 - DNA, 25 bp, Homo sapien
agatggtgagaaagcacacggccca

SEQ ID NO: 1238876 - DNA, 25 bp, Homo sapien
cagatggtgagaaagcacacggccc

SEQ ID NO: 1238877 - DNA, 25 bp, Homo sapien
agacactgagatcatcagactaact

SEQ ID NO: 1238878 - DNA, 25 bp, Homo sapien
gacactgagatcatcagactaactg

SEQ ID NO: 1238879 - DNA, 25 bp, Homo sapien
cagacactgagatcatcagactaac

SEQ ID NO: 1238880 - DNA, 25 bp, Homo sapien
acactgagatcatcagactaactgg

SEQ ID NO: 1238881 - DNA, 25 bp, Homo sapien
ttctgtggcctcgtgatttctcaca

SEQ ID NO: 1238882 - DNA, 25 bp, Homo sapien
ggcctcgtgatttctcacatcttct

SEQ ID NO: 1238883 - DNA, 25 bp, Homo sapien
tgagggtctcagaccccttccgcca

SEQ ID NO: 1238884 - DNA, 25 bp, Homo sapien
ctctgagggtctcagaccccttccg

SEQ ID NO: 1238885 - DNA, 25 bp, Homo sapien
ccaggccacgaatctgcagctcaca

SEQ ID NO: 1238886 - DNA, 25 bp, Homo sapien
gccaggccacgaatctgcagctcac

SEQ ID NO: 1238887 - DNA, 25 bp, Homo sapien
caggccacgaatctgcagctcacac

SEQ ID NO: 1238888 - DNA, 25 bp, Homo sapien
tgagtgtagctgaggttctctcctg

SEQ ID NO: 1238889 - DNA, 25 bp, Homo sapien
ctgacagtgagtgtagctgaggttc

SEQ ID NO: 1238890 - DNA, 25 bp, Homo sapien
cagtgagtgtagctgaggttctctc

SEQ ID NO: 1238891 - DNA, 25 bp, Homo sapien
agtgtagctgaggttctctcctgcc

SEQ ID NO: 1238892 - DNA, 25 bp, Homo sapien
cagagacacttagattccaagccac

SEQ ID NO: 1238893 - DNA, 25 bp, Homo sapien
acagagacacttagattccaagcca

SEQ ID NO: 1238894 - DNA, 25 bp, Homo sapien
ggaaggaccaagcagtcactgagat

SEQ ID NO: 1238895 - DNA, 25 bp, Homo sapien
caagcagtcactgagatcatcagac

SEQ ID NO: 1238896 - DNA, 25 bp, Homo sapien
gaccaagcagtcactgagatcatca

SEQ ID NO: 1238897 - DNA, 25 bp, Homo sapien
gcagtcactgagatcatcagactgt

SEQ ID NO: 1238898 - DNA, 25 bp, Homo sapien
ctggcctcctggtttgtcatgttgt

SEQ ID NO: 1238899 - DNA, 25 bp, Homo sapien
acgcacgagtactccccggcatctg

SEQ ID NO: 1238900 - DNA, 25 bp, Homo sapien
cctggtttgtcatgttgtctatgaa

SEQ ID NO: 1238901 - DNA, 25 bp, Homo sapien
tgtcatgttgtctatgaatctggct

SEQ ID NO: 1238902 - DNA, 25 bp, Homo sapien
ccttgacagtgagagtggccgacgt

SEQ ID NO: 1238903 - DNA, 25 bp, Homo sapien
acactgcaacatagccgtggcccct

SEQ ID NO: 1238904 - DNA, 25 bp, Homo sapien
agtggccgacgtcttctcctgacca

SEQ ID NO: 1238905 - DNA, 25 bp, Homo sapien
ttctcctgaccacatacacatgagt

SEQ ID NO: 1238906 - DNA, 25 bp, Homo sapien
ccatgtggccacgtgtggtcattac

SEQ ID NO: 1238907 - DNA, 25 bp, Homo sapien
agtccatgtggccacgtgtggtcat

SEQ ID NO: 1238908 - DNA, 25 bp, Homo sapien
cacatcagtccatgtggccacgtgt

SEQ ID NO: 1238909 - DNA, 25 bp, Homo sapien
catcagtccatgtggccacgtgtgg

SEQ ID NO: 1238910 - DNA, 25 bp, Homo sapien
tgcagactctgcagcggctcccgga

SEQ ID NO: 1238911 - DNA, 25 bp, Homo sapien
ggccgtggagccctcctccgcctgc

SEQ ID NO: 1238912 - DNA, 25 bp, Homo sapien
agggtggccgtggagccctcctccg

SEQ ID NO: 1238913 - DNA, 25 bp, Homo sapien
tctgcagcggctcccggaacactgg

SEQ ID NO: 1238914 - DNA, 25 bp, Homo sapien
gctccagaccactgtagcagtgggc

SEQ ID NO: 1238915 - DNA, 25 bp, Homo sapien
ctccagaccactgtagcagtgggct

SEQ ID NO: 1238916 - DNA, 25 bp, Homo sapien
gagccacaggtgcaagtgtattcgc

SEQ ID NO: 1238917 - DNA, 25 bp, Homo sapien
tgtaacaccagctccgcggtgcagc

SEQ ID NO: 1238918 - DNA, 25 bp, Homo sapien
cacgttgtaggtcctgtaacaccag

SEQ ID NO: 1238919 - DNA, 25 bp, Homo sapien
aagtgtattcgccagtgtcttcacg

SEQ ID NO: 1238920 - DNA, 25 bp, Homo sapien
gagctgtagggagcccttgcgccac

SEQ ID NO: 1238921 - DNA, 25 bp, Homo sapien
cagcataagtgtgcggtgcctccct

SEQ ID NO: 1238922 - DNA, 25 bp, Homo sapien
gtgtcacacgtgtagtcacccgcat

SEQ ID NO: 1238923 - DNA, 25 bp, Homo sapien
atgctctgcgtgtggcccgtgtcac

SEQ ID NO: 1238924 - DNA, 25 bp, Homo sapien
cctccagttggtggatcagcagctc

SEQ ID NO: 1238925 - DNA, 25 bp, Homo sapien
ccagactctgaagccgggtcttgaa

SEQ ID NO: 1238926 - DNA, 25 bp, Homo sapien
aggcagcggttttctggccgcctgt

SEQ ID NO: 1238927 - DNA, 25 bp, Homo sapien
cctggctccgcatctcgtacttggg

SEQ ID NO: 1238928 - DNA, 25 bp, Homo sapien
tcctcgggcgtcacgcccttcagcc

SEQ ID NO: 1238929 - DNA, 25 bp, Homo sapien
tcatcggccgtcacctccgcatcaa

SEQ ID NO: 1238930 - DNA, 25 bp, Homo sapien
ggcaggccctgtaggcaccactgca

SEQ ID NO: 1238931 - DNA, 25 bp, Homo sapien
actcaacatcctcatcggccgtcac

SEQ ID NO: 1238932 - DNA, 25 bp, Homo sapien
cccatgcagtcactggtggggcccg

SEQ ID NO: 1238933 - DNA, 25 bp, Homo sapien
atgcagtcactggtggggcccgcct

SEQ ID NO: 1238934 - DNA, 25 bp, Homo sapien
gcagtcactggtggggcccgcctgt

SEQ ID NO: 1238935 - DNA, 25 bp, Homo sapien
catgcagtcactggtggggcccgcc

SEQ ID NO: 1238936 - DNA, 25 bp, Homo sapien
cctgaagctctggatagccggcact

SEQ ID NO: 1238937 - DNA, 25 bp, Homo sapien
tggcctgaagctctggatagccggc

SEQ ID NO: 1238938 - DNA, 25 bp, Homo sapien
aagctctggatagccggcactggaa

SEQ ID NO: 1238939 - DNA, 25 bp, Homo sapien
tgaagctctggatagccggcactgg

SEQ ID NO: 1238940 - DNA, 25 bp, Homo sapien
ccctgctccacagtgatgtcattca

SEQ ID NO: 1238941 - DNA, 25 bp, Homo sapien
atgtcattcatctcgttggcctgca

SEQ ID NO: 1238942 - DNA, 25 bp, Homo sapien
gccctgctccacagtgatgtcattc

SEQ ID NO: 1238943 - DNA, 25 bp, Homo sapien
gatgtcattcatctcgttggcctgc

SEQ ID NO: 1238944 - DNA, 25 bp, Homo sapien
actgacagttccagcatcctcaagg

SEQ ID NO: 1238945 - DNA, 25 bp, Homo sapien
cacgtgcccacgtggaaactgacag

SEQ ID NO: 1238946 - DNA, 25 bp, Homo sapien
tgggcctcagagctacacgtgccca

SEQ ID NO: 1238947 - DNA, 25 bp, Homo sapien
gtggaaactgacagttccagcatcc

SEQ ID NO: 1238948 - DNA, 25 bp, Homo sapien
tgggacttgctagaatagcctcggg

SEQ ID NO: 1238949 - DNA, 25 bp, Homo sapien
aaagtgggacttgctagaatagcct

SEQ ID NO: 1238950 - DNA, 25 bp, Homo sapien
gctagtaactggtacaggggccacc

SEQ ID NO: 1238951 - DNA, 25 bp, Homo sapien
agcctcggggctagtaactggtaca

SEQ ID NO: 1238952 - DNA, 25 bp, Homo sapien
gggccatcctgtagcagggtcccat

SEQ ID NO: 1238953 - DNA, 25 bp, Homo sapien
gaaagatcccatctcgcacagcgat

SEQ ID NO: 1238954 - DNA, 25 bp, Homo sapien
agagcatgagggagtgaaagatccc

SEQ ID NO: 1238955 - DNA, 25 bp, Homo sapien
ctttgatcaacaacttggccgtgga

SEQ ID NO: 1238956 - DNA, 25 bp, Homo sapien
gtggcaggcaatggcagagcagtga

SEQ ID NO: 1238957 - DNA, 25 bp, Homo sapien
gcaggcaatggcagagcagtgacca

SEQ ID NO: 1238958 - DNA, 25 bp, Homo sapien
ggcaggcaatggcagagcagtgacc

SEQ ID NO: 1238959 - DNA, 25 bp, Homo sapien
ctgtggcaggcaatggcagagcagt

SEQ ID NO: 1238960 - DNA, 25 bp, Homo sapien
aggcttcagcggcagtaagcgcaga

SEQ ID NO: 1238961 - DNA, 25 bp, Homo sapien
tctgctgtcagtgttagaggcttca

SEQ ID NO: 1238962 - DNA, 25 bp, Homo sapien
tgtcagtgttagaggcttcagcggc

SEQ ID NO: 1238963 - DNA, 25 bp, Homo sapien
ttagaggcttcagcggcagtaagcg

SEQ ID NO: 1238964 - DNA, 25 bp, Homo sapien
ctgtcggccaacatgccggacacat

SEQ ID NO: 1238965 - DNA, 25 bp, Homo sapien
cggccaacatgccggacacatgtca

SEQ ID NO: 1238966 - DNA, 25 bp, Homo sapien
gccaacatgccggacacatgtcagc

SEQ ID NO: 1238967 - DNA, 25 bp, Homo sapien
gtcggccaacatgccggacacatgt

SEQ ID NO: 1238968 - DNA, 25 bp, Homo sapien
tggccacgttccagtcctgctctat

SEQ ID NO: 1238969 - DNA, 25 bp, Homo sapien
tatgatgacacggtgcccatccgtg

SEQ ID NO: 1238970 - DNA, 25 bp, Homo sapien
aagaatagatgccactgtcacaggg

SEQ ID NO: 1238971 - DNA, 25 bp, Homo sapien
tgcccgcagcctcacaagaatagat

SEQ ID NO: 1238972 - DNA, 25 bp, Homo sapien
tctcgaagaagaccacctcggcgtt

SEQ ID NO: 1238973 - DNA, 25 bp, Homo sapien
aaggtcacccggcagctgtcttgtg

SEQ ID NO: 1238974 - DNA, 25 bp, Homo sapien
tctccgaggtgtgcacgggttcgtc

SEQ ID NO: 1238975 - DNA, 25 bp, Homo sapien
tgaggaatgcggacgtcaccatatc

SEQ ID NO: 1238976 - DNA, 25 bp, Homo sapien
gtcgcggcaagcgaaggtgacctcc

SEQ ID NO: 1238977 - DNA, 25 bp, Homo sapien
gccattgatgtaccaggacgcctct

SEQ ID NO: 1238978 - DNA, 25 bp, Homo sapien
cctcgctgagcgtgcaggtgaagca

SEQ ID NO: 1238979 - DNA, 25 bp, Homo sapien
cggaccgccgcgtttttcagaggct

SEQ ID NO: 1238980 - DNA, 25 bp, Homo sapien
tgccacacggaagcggtaggtctcc

SEQ ID NO: 1238981 - DNA, 25 bp, Homo sapien
gtggctgctgcgagccaccacctca

SEQ ID NO: 1238982 - DNA, 25 bp, Homo sapien
gggcaggtgaaccggttccccagca

SEQ ID NO: 1238983 - DNA, 25 bp, Homo sapien
aggccatccaccacacactcgggtc

SEQ ID NO: 1238984 - DNA, 25 bp, Homo sapien
tggggaggcacaggcttcggtggct

SEQ ID NO: 1238985 - DNA, 25 bp, Homo sapien
gctggggaggcacaggcttcggtgg

SEQ ID NO: 1238986 - DNA, 25 bp, Homo sapien
ggctggggaggcacaggcttcggtg

SEQ ID NO: 1238987 - DNA, 25 bp, Homo sapien
agggctggggaggcacaggcttcgg

SEQ ID NO: 1238988 - DNA, 25 bp, Homo sapien
accagctgccacctgccggctctca

SEQ ID NO: 1238989 - DNA, 25 bp, Homo sapien
cttcaccagctgccacctgccggct

SEQ ID NO: 1238990 - DNA, 25 bp, Homo sapien
tcaccagctgccacctgccggctct

SEQ ID NO: 1238991 - DNA, 25 bp, Homo sapien
cagctgccacctgccggctctcagg

SEQ ID NO: 1238992 - DNA, 25 bp, Homo sapien
cacagtggtactcgccctggtcttc

SEQ ID NO: 1238993 - DNA, 25 bp, Homo sapien
gaagcccttgatcaccagcatctgt

SEQ ID NO: 1238994 - DNA, 25 bp, Homo sapien
accacctcaagctccagagagacat

SEQ ID NO: 1238995 - DNA, 25 bp, Homo sapien
atctgttgccgaccctgggagacca

SEQ ID NO: 1238996 - DNA, 25 bp, Homo sapien
tgcccgggactcatcatcagagctg

SEQ ID NO: 1238997 - DNA, 25 bp, Homo sapien
gctcatcggccgtggagtagccttc

SEQ ID NO: 1238998 - DNA, 25 bp, Homo sapien
ctcatgcgacgtttccgagccaggg

SEQ ID NO: 1238999 - DNA, 25 bp, Homo sapien
tctggcagctcgctaatggagtcca

SEQ ID NO: 1239000 - DNA, 25 bp, Homo sapien
tctcctggaagcgagttaccgcctg

SEQ ID NO: 1239001 - DNA, 25 bp, Homo sapien
tgagcgcctcaaaacggatgcagat

SEQ ID NO: 1239002 - DNA, 25 bp, Homo sapien
caaacttgttgctcacctgacaggt

SEQ ID NO: 1239003 - DNA, 25 bp, Homo sapien
acttcagccggacttttggtgcgga

SEQ ID NO: 1239004 - DNA, 25 bp, Homo sapien
cagcgtcagaagtcagtaggctggg

SEQ ID NO: 1239005 - DNA, 25 bp, Homo sapien
tcagaagtcagtaggctgggcaatg

SEQ ID NO: 1239006 - DNA, 25 bp, Homo sapien
aggctgggcaatggctctggaggca

SEQ ID NO: 1239007 - DNA, 25 bp, Homo sapien
agtcagtaggctgggcaatggctct

SEQ ID NO: 1239008 - DNA, 25 bp, Homo sapien
accacgcagtcaaagctcacaggat

SEQ ID NO: 1239009 - DNA, 25 bp, Homo sapien
cggtagacgcccatgtctgctggca

SEQ ID NO: 1239010 - DNA, 25 bp, Homo sapien
catccttgaaccagcgcacactggg

SEQ ID NO: 1239011 - DNA, 25 bp, Homo sapien
cttggttctgcaactcagtcaggaa

SEQ ID NO: 1239012 - DNA, 25 bp, Homo sapien
ggcactgaagtaggatgaggactcc

SEQ ID NO: 1239013 - DNA, 25 bp, Homo sapien
tggacaggtagccttgggcactgaa

SEQ ID NO: 1239014 - DNA, 25 bp, Homo sapien
gacaggtagccttgggcactgaagt

SEQ ID NO: 1239015 - DNA, 25 bp, Homo sapien
aggatgaggactccgtggcatctgc

SEQ ID NO: 1239016 - DNA, 25 bp, Homo sapien
gctggccctcatcagtggtggactc

SEQ ID NO: 1239017 - DNA, 25 bp, Homo sapien
cagtggtggactctgttccctcctg

SEQ ID NO: 1239018 - DNA, 25 bp, Homo sapien
gggccacctggaggtctctcagctc

SEQ ID NO: 1239019 - DNA, 25 bp, Homo sapien
ttcaccttgagctggaacttggcca

SEQ ID NO: 1239020 - DNA, 25 bp, Homo sapien
acgagtaggcagcacccatggcatt

SEQ ID NO: 1239021 - DNA, 25 bp, Homo sapien
tgctgatataggctgcatactggcc

SEQ ID NO: 1239022 - DNA, 25 bp, Homo sapien
tcccgggtgacggagatgatctcca

SEQ ID NO: 1239023 - DNA, 25 bp, Homo sapien
tcttgtcagtcatgcggatgtgggc

SEQ ID NO: 1239024 - DNA, 25 bp, Homo sapien
gatgcaggcttctcttctggctcat

SEQ ID NO: 1239025 - DNA, 25 bp, Homo sapien
caggcttctcttctggctcatcagg

SEQ ID NO: 1239026 - DNA, 25 bp, Homo sapien
ggcttctcttctggctcatcagggc

SEQ ID NO: 1239027 - DNA, 25 bp, Homo sapien
ctgatgcaggcttctcttctggctc

SEQ ID NO: 1239028 - DNA, 25 bp, Homo sapien
gtgatgctggagcctttcttcactt

SEQ ID NO: 1239029 - DNA, 25 bp, Homo sapien
gatgctggagcctttcttcactttc

SEQ ID NO: 1239030 - DNA, 25 bp, Homo sapien
cctctccagcattcggggcggcacc

SEQ ID NO: 1239031 - DNA, 25 bp, Homo sapien
tctccagcattcggggcggcaccag

SEQ ID NO: 1239032 - DNA, 25 bp, Homo sapien
ccagtgcacggtgggcaccgggcgt

SEQ ID NO: 1239033 - DNA, 25 bp, Homo sapien
tgtagcccggtgtgtcagggccaat

SEQ ID NO: 1239034 - DNA, 25 bp, Homo sapien
agctggccacggtgtagcccggtgt

SEQ ID NO: 1239035 - DNA, 25 bp, Homo sapien
tgtgtcagggccaatccacagcacg

SEQ ID NO: 1239036 - DNA, 25 bp, Homo sapien
gaaagtggaaatcagcgcttccttc

SEQ ID NO: 1239037 - DNA, 25 bp, Homo sapien
tggaaatcagcgcttccttcacttt

SEQ ID NO: 1239038 - DNA, 25 bp, Homo sapien
gaaatcagcgcttccttcactttct

SEQ ID NO: 1239039 - DNA, 25 bp, Homo sapien
aagtggaaatcagcgcttccttcac

SEQ ID NO: 1239040 - DNA, 25 bp, Homo sapien
ccaaggtcagcaaaactcgcagttt

SEQ ID NO: 1239041 - DNA, 25 bp, Homo sapien
caccaaggtcagcaaaactcgcagt

SEQ ID NO: 1239042 - DNA, 25 bp, Homo sapien
cagcaaaactcgcagtttccaaccc

SEQ ID NO: 1239043 - DNA, 25 bp, Homo sapien
accaaggtcagcaaaactcgcagtt

SEQ ID NO: 1239044 - DNA, 25 bp, Homo sapien
tctcagtgatctgggaggtcagttt

SEQ ID NO: 1239045 - DNA, 25 bp, Homo sapien
cctgcgtgatcttggccgataccat

SEQ ID NO: 1239046 - DNA, 25 bp, Homo sapien
ctcagcgagggacaggtggccgagg

SEQ ID NO: 1239047 - DNA, 25 bp, Homo sapien
cgataccatctcagtgatctgggag

SEQ ID NO: 1239048 - DNA, 25 bp, Homo sapien
gctcaggggaagggcaaacacccca

SEQ ID NO: 1239049 - DNA, 25 bp, Homo sapien
gggtgcaaggatcatgacaccctgg

SEQ ID NO: 1239050 - DNA, 25 bp, Homo sapien
tgcaaggatcatgacaccctggcct

SEQ ID NO: 1239051 - DNA, 25 bp, Homo sapien
aaggatcatgacaccctggcctgcc

SEQ ID NO: 1239052 - DNA, 25 bp, Homo sapien
gatggccgtgatcggccatggcggg

SEQ ID NO: 1239053 - DNA, 25 bp, Homo sapien
tggatgctggaggatggccgtgatc

SEQ ID NO: 1239054 - DNA, 25 bp, Homo sapien
ctcgcctcgggcatcgccgtcctct

SEQ ID NO: 1239055 - DNA, 25 bp, Homo sapien
ctctgaggaagactcctggatgctg

SEQ ID NO: 1239056 - DNA, 25 bp, Homo sapien
agcctcctgtccaggtaggctggtg

SEQ ID NO: 1239057 - DNA, 25 bp, Homo sapien
gacttggtgggcttggtgcggacaa

SEQ ID NO: 1239058 - DNA, 25 bp, Homo sapien
cagcggtgaccacgtagatgtcaaa

SEQ ID NO: 1239059 - DNA, 25 bp, Homo sapien
ggccttcccgcagcgtgatggcatc

SEQ ID NO: 1239060 - DNA, 25 bp, Homo sapien
ttttctgttggggtactgagctctg

SEQ ID NO: 1239061 - DNA, 25 bp, Homo sapien
tttctgttggggtactgagctctgg

SEQ ID NO: 1239062 - DNA, 25 bp, Homo sapien
ttctgttggggtactgagctctggc

SEQ ID NO: 1239063 - DNA, 25 bp, Homo sapien
ttgtattcgtcttcagacacagcct

SEQ ID NO: 1239064 - DNA, 25 bp, Homo sapien
tcagccttgccttgtattcgtcttc

SEQ ID NO: 1239065 - DNA, 25 bp, Homo sapien
tgccttgtattcgtcttcagacaca

SEQ ID NO: 1239066 - DNA, 25 bp, Homo sapien
ccagggaactcaggggcctcagcgg

SEQ ID NO: 1239067 - DNA, 25 bp, Homo sapien
gggctgccgtaagggaccacggagc

SEQ ID NO: 1239068 - DNA, 25 bp, Homo sapien
gctgccgtaagggaccacggagctc

SEQ ID NO: 1239069 - DNA, 25 bp, Homo sapien
ggctgccgtaagggaccacggagct

SEQ ID NO: 1239070 - DNA, 25 bp, Homo sapien
aagatgactgccttctggccggcca

SEQ ID NO: 1239071 - DNA, 25 bp, Homo sapien
gtggaagcggccgatgtcccgcaca

SEQ ID NO: 1239072 - DNA, 25 bp, Homo sapien
tggccggccacagctatgggcacgt

SEQ ID NO: 1239073 - DNA, 25 bp, Homo sapien
cgcacattgcggaagatgactgcct

SEQ ID NO: 1239074 - DNA, 25 bp, Homo sapien
gtactgctcaaaggccgcctggttc

SEQ ID NO: 1239075 - DNA, 25 bp, Homo sapien
tggatggccgtgctgacgaccaccg

SEQ ID NO: 1239076 - DNA, 25 bp, Homo sapien
tcgtccgtgtcgcactgctgcaact

SEQ ID NO: 1239077 - DNA, 25 bp, Homo sapien
tcttgatgaagcacatggccacgtc

SEQ ID NO: 1239078 - DNA, 25 bp, Homo sapien
gaagcacagggctgcaaaagcagct

SEQ ID NO: 1239079 - DNA, 25 bp, Homo sapien
aaagcagctccacccgcatttctga

SEQ ID NO: 1239080 - DNA, 25 bp, Homo sapien
caagcacaggacttgggctgctgaa

SEQ ID NO: 1239081 - DNA, 25 bp, Homo sapien
tcctgacaggtgacaagcacaggac

SEQ ID NO: 1239082 - DNA, 25 bp, Homo sapien
ggtcccctgccaacagggcctcctc

SEQ ID NO: 1239083 - DNA, 25 bp, Homo sapien
gagaggggtcccctgccaacagggc

SEQ ID NO: 1239084 - DNA, 25 bp, Homo sapien
gctgcacccgctccactggctgctc

SEQ ID NO: 1239085 - DNA, 25 bp, Homo sapien
gcctggtagcgctgcacccgctcca

SEQ ID NO: 1239086 - DNA, 25 bp, Homo sapien
tccagcagcgcgcagttctgtctgt

SEQ ID NO: 1239087 - DNA, 25 bp, Homo sapien
agggcagacaccacggcataggcct

SEQ ID NO: 1239088 - DNA, 25 bp, Homo sapien
agcttgttctcagcgcgctgtggca

SEQ ID NO: 1239089 - DNA, 25 bp, Homo sapien
tccatgagggacacgtgcagcttgt

SEQ ID NO: 1239090 - DNA, 25 bp, Homo sapien
aacacgtagctgacggtatcggtgc

SEQ ID NO: 1239091 - DNA, 25 bp, Homo sapien
acacgtgacggttgtggcccttcca

SEQ ID NO: 1239092 - DNA, 25 bp, Homo sapien
tgcaccctcccacacgatgaagtgg

SEQ ID NO: 1239093 - DNA, 25 bp, Homo sapien
ggcttgcagattaccaggtggttgc

SEQ ID NO: 1239094 - DNA, 25 bp, Homo sapien
ggcgctgagggacagggagccccgc

SEQ ID NO: 1239095 - DNA, 25 bp, Homo sapien
accccggcgctgagggacagggagc

SEQ ID NO: 1239096 - DNA, 25 bp, Homo sapien
atccaccccggcgctgagggacagg

SEQ ID NO: 1239097 - DNA, 25 bp, Homo sapien
tggcatccaccccggcgctgaggga

SEQ ID NO: 1239098 - DNA, 25 bp, Homo sapien
gataatggctgtccgtgcctgcagc

SEQ ID NO: 1239099 - DNA, 25 bp, Homo sapien
tgccacacctcgaaggcgcggtcat

SEQ ID NO: 1239100 - DNA, 25 bp, Homo sapien
ttcacccacgagctcttgataatgg

SEQ ID NO: 1239101 - DNA, 25 bp, Homo sapien
tgcagcaggtacttgcgcaccgagt

SEQ ID NO: 1239102 - DNA, 25 bp, Homo sapien
ttgggtgtgcccgtcacgcggcagg

SEQ ID NO: 1239103 - DNA, 25 bp, Homo sapien
gtgtgcccgtcacgcggcaggccag

SEQ ID NO: 1239104 - DNA, 25 bp, Homo sapien
atgacaggcttgggtgtgcccgtca

SEQ ID NO: 1239105 - DNA, 25 bp, Homo sapien
acaggcttgggtgtgcccgtcacgc

SEQ ID NO: 1239106 - DNA, 25 bp, Homo sapien
tgggcagtgccttggttggcactct

SEQ ID NO: 1239107 - DNA, 25 bp, Homo sapien
tgccctgctaaggagagaaactagg

SEQ ID NO: 1239108 - DNA, 25 bp, Homo sapien
gaagaagcggccctgtggatctctt

SEQ ID NO: 1239109 - DNA, 25 bp, Homo sapien
ggcaggtagttgcatgctgagcact

SEQ ID NO: 1239110 - DNA, 25 bp, Homo sapien
gctggccgcgaagcacatgtactgg

SEQ ID NO: 1239111 - DNA, 25 bp, Homo sapien
tgcccagggtactgcagttgccagc

SEQ ID NO: 1239112 - DNA, 25 bp, Homo sapien
caggatgagtgcacacgagccatca

SEQ ID NO: 1239113 - DNA, 25 bp, Homo sapien
gagccatcagggtcttcaatgagga

SEQ ID NO: 1239114 - DNA, 25 bp, Homo sapien
gcgccttcgatggtgcaggtgaact

SEQ ID NO: 1239115 - DNA, 25 bp, Homo sapien
tgcaggtgaactgggcgtcctctcc

SEQ ID NO: 1239116 - DNA, 25 bp, Homo sapien
cggaccttgttcacgaaccgtggtg

SEQ ID NO: 1239117 - DNA, 25 bp, Homo sapien
ggtgaggcccggaccttgttcacga

SEQ ID NO: 1239118 - DNA, 25 bp, Homo sapien
ccagcactagcaggccgctgcgagg

SEQ ID NO: 1239119 - DNA, 25 bp, Homo sapien
ctcagtgtctggaacttgttgccag

SEQ ID NO: 1239120 - DNA, 25 bp, Homo sapien
tggccgcccggatcaccagcactag

SEQ ID NO: 1239121 - DNA, 25 bp, Homo sapien
gtgtctggaacttgttgccagtggt

SEQ ID NO: 1239122 - DNA, 25 bp, Homo sapien
aggtggtggccggacaagtgcccct

SEQ ID NO: 1239123 - DNA, 25 bp, Homo sapien
aactggacagaagctagcgcctgga

SEQ ID NO: 1239124 - DNA, 25 bp, Homo sapien
ggcacccgtagttggcacacagcca

SEQ ID NO: 1239125 - DNA, 25 bp, Homo sapien
gacaagtgcccctggaggaactgga

SEQ ID NO: 1239126 - DNA, 25 bp, Homo sapien
ctagctttggatttaactttagttg

SEQ ID NO: 1239127 - DNA, 25 bp, Homo sapien
agcacctagctttggatttaacttt

SEQ ID NO: 1239128 - DNA, 25 bp, Homo sapien
cacctagctttggatttaactttag

SEQ ID NO: 1239129 - DNA, 25 bp, Homo sapien
tagctttggatttaactttagttga

SEQ ID NO: 1239130 - DNA, 25 bp, Homo sapien
ctgcaaggacggcagggccggctca

SEQ ID NO: 1239131 - DNA, 25 bp, Homo sapien
agagcccaaggctccccacgggtag

SEQ ID NO: 1239132 - DNA, 25 bp, Homo sapien
cacgggtagggccctctccctgtgg

SEQ ID NO: 1239133 - DNA, 25 bp, Homo sapien
gggtagggccctctccctgtggcca

SEQ ID NO: 1239134 - DNA, 25 bp, Homo sapien
agctccgcactagcccgcgcggagc

SEQ ID NO: 1239135 - DNA, 25 bp, Homo sapien
cagcatggggctctgaatgcgcagc

SEQ ID NO: 1239136 - DNA, 25 bp, Homo sapien
tgcagcatggggctctgaatgcgca

SEQ ID NO: 1239137 - DNA, 25 bp, Homo sapien
tgaatgcgcagctccgcactagccc

SEQ ID NO: 1239138 - DNA, 25 bp, Homo sapien
aagtgaacgactgtggaggacgctc

SEQ ID NO: 1239139 - DNA, 25 bp, Homo sapien
gaaagacttgttgtgacagccaagt

SEQ ID NO: 1239140 - DNA, 25 bp, Homo sapien
acagccaagtgaacgactgtggagg

SEQ ID NO: 1239141 - DNA, 25 bp, Homo sapien
gctgaggcgctgacactctgtccag

SEQ ID NO: 1239142 - DNA, 25 bp, Homo sapien
gggactttagtctcttgctcagtga

SEQ ID NO: 1239143 - DNA, 25 bp, Homo sapien
gaggcactgcagtcagaaggaaggt

SEQ ID NO: 1239144 - DNA, 25 bp, Homo sapien
aggttaggaacacgcctgcacttac

SEQ ID NO: 1239145 - DNA, 25 bp, Homo sapien
cagtcagagggtgcatgttatgtga

SEQ ID NO: 1239146 - DNA, 25 bp, Homo sapien
tcagagggtgcatgttatgtgagca

SEQ ID NO: 1239147 - DNA, 25 bp, Homo sapien
tgatgaacccctggatgaaccactg

SEQ ID NO: 1239148 - DNA, 25 bp, Homo sapien
cccagggtgctgaggattagaattc

SEQ ID NO: 1239149 - DNA, 25 bp, Homo sapien
aacactgtcgtaaatcccagggtgc

SEQ ID NO: 1239150 - DNA, 25 bp, Homo sapien
aagcaggtctcaggcctagctcctg

SEQ ID NO: 1239151 - DNA, 25 bp, Homo sapien
ttccagtcattagccacccagagct

SEQ ID NO: 1239152 - DNA, 25 bp, Homo sapien
aacattccggatgcttcaacagacg

SEQ ID NO: 1239153 - DNA, 25 bp, Homo sapien
tccaaatgtgaaaatcgggcttggg

SEQ ID NO: 1239154 - DNA, 25 bp, Homo sapien
tcaacagacgcaagtggctagtggc

SEQ ID NO: 1239155 - DNA, 25 bp, Homo sapien
gtgattttcctaaatccttgaggca

SEQ ID NO: 1239156 - DNA, 25 bp, Homo sapien
agcagcagcatgtgtgattttccta

SEQ ID NO: 1239157 - DNA, 25 bp, Homo sapien
tgtgattttcctaaatccttgaggc

SEQ ID NO: 1239158 - DNA, 25 bp, Homo sapien
cagcatgtgtgattttcctaaatcc

SEQ ID NO: 1239159 - DNA, 25 bp, Homo sapien
gaagggttaacccaggatctcaaca

SEQ ID NO: 1239160 - DNA, 25 bp, Homo sapien
gattttcccacaatacggccaactg

SEQ ID NO: 1239161 - DNA, 25 bp, Homo sapien
ggcaccgttgcatacctccaggagt

SEQ ID NO: 1239162 - DNA, 25 bp, Homo sapien
gaactaagagttttcccatcctgga

SEQ ID NO: 1239163 - DNA, 25 bp, Homo sapien
aaggtgagcgggagggggacttgct

SEQ ID NO: 1239164 - DNA, 25 bp, Homo sapien
agagcagcgggaaggtgagcgggag

SEQ ID NO: 1239165 - DNA, 25 bp, Homo sapien
tgctgggggaccgtcgttggccacg

SEQ ID NO: 1239166 - DNA, 25 bp, Homo sapien
ggccacgtgggctcttcaccacagt

SEQ ID NO: 1239167 - DNA, 25 bp, Homo sapien
gtgtgaagagatgccccgatgagct

SEQ ID NO: 1239168 - DNA, 25 bp, Homo sapien
tcttcacccggacttcaatggtctc

SEQ ID NO: 1239169 - DNA, 25 bp, Homo sapien
ctctggcatccacgcggaagacaag

SEQ ID NO: 1239170 - DNA, 25 bp, Homo sapien
ctctctgacgccgaccatggctgtg

SEQ ID NO: 1239171 - DNA, 25 bp, Homo sapien
ctccaggctgcccatgccagaagca

SEQ ID NO: 1239172 - DNA, 25 bp, Homo sapien
ctctcccgcctcctccatggtgccc

SEQ ID NO: 1239173 - DNA, 25 bp, Homo sapien
ctcctccaggctgcccatgccagaa

SEQ ID NO: 1239174 - DNA, 25 bp, Homo sapien
tctcccgcctcctccatggtgccct

SEQ ID NO: 1239175 - DNA, 25 bp, Homo sapien
ctggatcaccgagacctcgcaggga

SEQ ID NO: 1239176 - DNA, 25 bp, Homo sapien
ggtcacgatccccaaggctgtgtgt

SEQ ID NO: 1239177 - DNA, 25 bp, Homo sapien
gccagtgtcagcatgcggccgttgt

SEQ ID NO: 1239178 - DNA, 25 bp, Homo sapien
caggcacgtaatcttccaggtcagc

SEQ ID NO: 1239179 - DNA, 25 bp, Homo sapien
tgcagaaagactgcgtccagggagc

SEQ ID NO: 1239180 - DNA, 25 bp, Homo sapien
cctaaagaggccgagagggcctcgg

SEQ ID NO: 1239181 - DNA, 25 bp, Homo sapien
cactgtcccgaagttgacggtctgg

SEQ ID NO: 1239182 - DNA, 25 bp, Homo sapien
aaggaggtgccctcaaggctacgga

SEQ ID NO: 1239183 - DNA, 25 bp, Homo sapien
atccccatccctgtctgggcagatg

SEQ ID NO: 1239184 - DNA, 25 bp, Homo sapien
tcagggctgtgccgcctcatcccca

SEQ ID NO: 1239185 - DNA, 25 bp, Homo sapien
ccccatccctgtctgggcagatgtg

SEQ ID NO: 1239186 - DNA, 25 bp, Homo sapien
tcatccccatccctgtctgggcaga

SEQ ID NO: 1239187 - DNA, 25 bp, Homo sapien
gagccggtcattccaacattgcaag

SEQ ID NO: 1239188 - DNA, 25 bp, Homo sapien
gcccatgtgggaacaggacaaatgc

SEQ ID NO: 1239189 - DNA, 25 bp, Homo sapien
acatccttcgtccacagtcctgagg

SEQ ID NO: 1239190 - DNA, 25 bp, Homo sapien
agagctgaggtctttgagccggtca

SEQ ID NO: 1239191 - DNA, 25 bp, Homo sapien
caggaagctgctttattcttgctga

SEQ ID NO: 1239192 - DNA, 25 bp, Homo sapien
acaggaagctgctttattcttgctg

SEQ ID NO: 1239193 - DNA, 25 bp, Homo sapien
tatgtgtaggtcctctgtgtggtct

SEQ ID NO: 1239194 - DNA, 25 bp, Homo sapien
tgtggtctctctgaccacgtggctg

SEQ ID NO: 1239195 - DNA, 25 bp, Homo sapien
tgcggtgtgcgtgtcgatggcctgg

SEQ ID NO: 1239196 - DNA, 25 bp, Homo sapien
cacgtggctgtggacgtcccagagc

SEQ ID NO: 1239197 - DNA, 25 bp, Homo sapien
tgatagcctcgaattgggccgttcc

SEQ ID NO: 1239198 - DNA, 25 bp, Homo sapien
tgtgggtcgccctcaatgatagcct

SEQ ID NO: 1239199 - DNA, 25 bp, Homo sapien
acatcctcgatggttacctgcatgg

SEQ ID NO: 1239200 - DNA, 25 bp, Homo sapien
ttgtaccaggtcaccgagggctgtg

SEQ ID NO: 1239201 - DNA, 25 bp, Homo sapien
ccagaatctcacccacttggacctg

SEQ ID NO: 1239202 - DNA, 25 bp, Homo sapien
agtgcttccgacacctgctgtgtgt

SEQ ID NO: 1239203 - DNA, 25 bp, Homo sapien
agtgcacggtgtggactgcacccac

SEQ ID NO: 1239204 - DNA, 25 bp, Homo sapien
gcagtgcttccgacacctgctgtgt

SEQ ID NO: 1239205 - DNA, 25 bp, Homo sapien
agggctgctatcagcccactctggg

SEQ ID NO: 1239206 - DNA, 25 bp, Homo sapien
aggcaggtgtaaacgccggcatcct

SEQ ID NO: 1239207 - DNA, 25 bp, Homo sapien
caccagggagtatgtggtgccttct

SEQ ID NO: 1239208 - DNA, 25 bp, Homo sapien
atccttcgaggccacatgcctcagc

SEQ ID NO: 1239209 - DNA, 25 bp, Homo sapien
tcttgctgctggctaagccgggtgc

SEQ ID NO: 1239210 - DNA, 25 bp, Homo sapien
tgacctcatagaaggagtgcagctt

SEQ ID NO: 1239211 - DNA, 25 bp, Homo sapien
ttgcttctctgagtccggctcattg

SEQ ID NO: 1239212 - DNA, 25 bp, Homo sapien
ctttgcttctctgagtccggctcat

SEQ ID NO: 1239213 - DNA, 25 bp, Homo sapien
gcttctctgagtccggctcattgtc

SEQ ID NO: 1239214 - DNA, 25 bp, Homo sapien
cttggcagcgcacaagatcttgttt

SEQ ID NO: 1239215 - DNA, 25 bp, Homo sapien
cccgagttctgctccgtagggggat

SEQ ID NO: 1239216 - DNA, 25 bp, Homo sapien
cactctttttacgaagccaaacacg

SEQ ID NO: 1239217 - DNA, 25 bp, Homo sapien
ggatgtctcgctccctgtatgcctg

SEQ ID NO: 1239218 - DNA, 25 bp, Homo sapien
gggtctcaaactggtccagcagccc

SEQ ID NO: 1239219 - DNA, 25 bp, Homo sapien
gggtcttgcgggtctcaaactggtc

SEQ ID NO: 1239220 - DNA, 25 bp, Homo sapien
tgcgggtctcaaactggtccagcag

SEQ ID NO: 1239221 - DNA, 25 bp, Homo sapien
aggatgagggtcttgcgggtctcaa

SEQ ID NO: 1239222 - DNA, 25 bp, Homo sapien
cctgcaaagaggacaccgactttgg

SEQ ID NO: 1239223 - DNA, 25 bp, Homo sapien
cctgtcccctctgtacagagcccat

SEQ ID NO: 1239224 - DNA, 25 bp, Homo sapien
aaagaggacaccgactttgggcagg

SEQ ID NO: 1239225 - DNA, 25 bp, Homo sapien
cctctgtacagagcccatccagcac

SEQ ID NO: 1239226 - DNA, 25 bp, Homo sapien
gcagtggcacggtgggagggggcat

SEQ ID NO: 1239227 - DNA, 25 bp, Homo sapien
tgcagtggcacggtgggagggggca

SEQ ID NO: 1239228 - DNA, 25 bp, Homo sapien
gggacccctctgaaccccagatggc

SEQ ID NO: 1239229 - DNA, 25 bp, Homo sapien
gagggtggagcggggacccctctga

SEQ ID NO: 1239230 - DNA, 25 bp, Homo sapien
cggggacccctctgaaccccagatg

SEQ ID NO: 1239231 - DNA, 25 bp, Homo sapien
ccaggtctatgggtacatctgatct

SEQ ID NO: 1239232 - DNA, 25 bp, Homo sapien
cagccaggtctatgggtacatctga

SEQ ID NO: 1239233 - DNA, 25 bp, Homo sapien
tgaggcagccaggtctatgggtaca

SEQ ID NO: 1239234 - DNA, 25 bp, Homo sapien
ggcagccaggtctatgggtacatct

SEQ ID NO: 1239235 - DNA, 25 bp, Homo sapien
cgtcaccacgcccttcctgtacagg

SEQ ID NO: 1239236 - DNA, 25 bp, Homo sapien
acgcccttcctgtacaggcggtcca

SEQ ID NO: 1239237 - DNA, 25 bp, Homo sapien
ggcctccgtcaccacgcccttcctg

SEQ ID NO: 1239238 - DNA, 25 bp, Homo sapien
ccttcctgtacaggcggtccagcag

SEQ ID NO: 1239239 - DNA, 25 bp, Homo sapien
ggtggagaacgccatggctgtgcag

SEQ ID NO: 1239240 - DNA, 25 bp, Homo sapien
ccatggctgtgcaggtagtgcagcc

SEQ ID NO: 1239241 - DNA, 25 bp, Homo sapien
ctttatgtccaggtggagaacgcca

SEQ ID NO: 1239242 - DNA, 25 bp, Homo sapien
ccagctgctggatgtagaccttgac

SEQ ID NO: 1239243 - DNA, 25 bp, Homo sapien
tggggtgcaggggtgaggacatgcg

SEQ ID NO: 1239244 - DNA, 25 bp, Homo sapien
gggtgcaggggtgaggacatgcgaa

SEQ ID NO: 1239245 - DNA, 25 bp, Homo sapien
ggtgcaggggtgaggacatgcgaac

SEQ ID NO: 1239246 - DNA, 25 bp, Homo sapien
ctctggggtgcaggggtgaggacat

SEQ ID NO: 1239247 - DNA, 25 bp, Homo sapien
gttgggagtgggtgagagccgtgcc

SEQ ID NO: 1239248 - DNA, 25 bp, Homo sapien
agttgggagtgggtgagagccgtgc

SEQ ID NO: 1239249 - DNA, 25 bp, Homo sapien
ctgttggggagagttgggagtgggt

SEQ ID NO: 1239250 - DNA, 25 bp, Homo sapien
ttggggagagttgggagtgggtgag

SEQ ID NO: 1239251 - DNA, 25 bp, Homo sapien
caaagccaaagtcgcagattttaat

SEQ ID NO: 1239252 - DNA, 25 bp, Homo sapien
tcggaggcttcgctcacagggttct

SEQ ID NO: 1239253 - DNA, 25 bp, Homo sapien
aaatgtcggaggcttcgctcacagg

SEQ ID NO: 1239254 - DNA, 25 bp, Homo sapien
cttcccgggcaggatgcaccatcag

SEQ ID NO: 1239255 - DNA, 25 bp, Homo sapien
tgaggtaggagatgacacccatggc

SEQ ID NO: 1239256 - DNA, 25 bp, Homo sapien
tgcagcgtagccttgatgaagtctt

SEQ ID NO: 1239257 - DNA, 25 bp, Homo sapien
gcgcccctccaggacgttcaggagg

SEQ ID NO: 1239258 - DNA, 25 bp, Homo sapien
acggtcactctcgccggcaaatggg

SEQ ID NO: 1239259 - DNA, 25 bp, Homo sapien
aagtctttggcgtcttcgctgaggt

SEQ ID NO: 1239260 - DNA, 25 bp, Homo sapien
gggagaggcactgggccgcactagg

SEQ ID NO: 1239261 - DNA, 25 bp, Homo sapien
ggcactgggccgcactaggccgggc

SEQ ID NO: 1239262 - DNA, 25 bp, Homo sapien
agaggcactgggccgcactaggccg

SEQ ID NO: 1239263 - DNA, 25 bp, Homo sapien
gagaggcactgggccgcactaggcc

SEQ ID NO: 1239264 - DNA, 25 bp, Homo sapien
cgacttcgggccaggaggaacttga

SEQ ID NO: 1239265 - DNA, 25 bp, Homo sapien
ctgccagcgacttcgggccaggagg

SEQ ID NO: 1239266 - DNA, 25 bp, Homo sapien
agcgacttcgggccaggaggaactt

SEQ ID NO: 1239267 - DNA, 25 bp, Homo sapien
cttcgggccaggaggaacttgagct

SEQ ID NO: 1239268 - DNA, 25 bp, Homo sapien
tggcagtgacttagcccgggcaaat

SEQ ID NO: 1239269 - DNA, 25 bp, Homo sapien
tgctcggagagtcatgttccaggga

SEQ ID NO: 1239270 - DNA, 25 bp, Homo sapien
gatggacttgtagctcatcagggaa

SEQ ID NO: 1239271 - DNA, 25 bp, Homo sapien
aacaggctgcggatgacgctgtgcc

SEQ ID NO: 1239272 - DNA, 25 bp, Homo sapien
ggctgaaggcagtcgctgtgcctca

SEQ ID NO: 1239273 - DNA, 25 bp, Homo sapien
gagggtgccccatgtccctgatagg

SEQ ID NO: 1239274 - DNA, 25 bp, Homo sapien
cagtggatggaagctgcttggagcc

SEQ ID NO: 1239275 - DNA, 25 bp, Homo sapien
agccctgagggtgccccatgtccct

SEQ ID NO: 1239276 - DNA, 25 bp, Homo sapien
ctttgcaagatcctggagggaagga

SEQ ID NO: 1239277 - DNA, 25 bp, Homo sapien
catcttagagtccaatggggggctt

SEQ ID NO: 1239278 - DNA, 25 bp, Homo sapien
gttttggcctcccaggaagagagat

SEQ ID NO: 1239279 - DNA, 25 bp, Homo sapien
agagatgtctccaggccccatctta

SEQ ID NO: 1239280 - DNA, 25 bp, Homo sapien
ggtgtggagtcggacagatcctcag

SEQ ID NO: 1239281 - DNA, 25 bp, Homo sapien
tgtggagtcggacagatcctcagcc

SEQ ID NO: 1239282 - DNA, 25 bp, Homo sapien
tggagtcggacagatcctcagcctc

SEQ ID NO: 1239283 - DNA, 25 bp, Homo sapien
gtccagccctccgcatccagggagg

SEQ ID NO: 1239284 - DNA, 25 bp, Homo sapien
aatgtccagggatattgtgtcggcc

SEQ ID NO: 1239285 - DNA, 25 bp, Homo sapien
gtgacggcgaggaccacttgcgctt

SEQ ID NO: 1239286 - DNA, 25 bp, Homo sapien
cagggagaacttgcgcatggtcgcc

SEQ ID NO: 1239287 - DNA, 25 bp, Homo sapien
tacttgatatcgtacaggtctgaga

SEQ ID NO: 1239288 - DNA, 25 bp, Homo sapien
cccagctcttcagacctgagagccg

SEQ ID NO: 1239289 - DNA, 25 bp, Homo sapien
ccagctcttcagacctgagagccgg

SEQ ID NO: 1239290 - DNA, 25 bp, Homo sapien
ctgagagctcccttaggaatgtcgg

SEQ ID NO: 1239291 - DNA, 25 bp, Homo sapien
gagagctcccttaggaatgtcggcg

SEQ ID NO: 1239292 - DNA, 25 bp, Homo sapien
tgagagctcccttaggaatgtcggc

SEQ ID NO: 1239293 - DNA, 25 bp, Homo sapien
aggacgcccgtggtggtcactgtcc

SEQ ID NO: 1239294 - DNA, 25 bp, Homo sapien
tgtccccagcgcattgctcacgctg

SEQ ID NO: 1239295 - DNA, 25 bp, Homo sapien
cattgctcacgctgcaggtgtacac

SEQ ID NO: 1239296 - DNA, 25 bp, Homo sapien
caggatggtcagaagctggaagttc

SEQ ID NO: 1239297 - DNA, 25 bp, Homo sapien
tctaggctgcactgcacaatgtagg

SEQ ID NO: 1239298 - DNA, 25 bp, Homo sapien
ccgatatccgggcatggcgaagatg

SEQ ID NO: 1239299 - DNA, 25 bp, Homo sapien
ggccgtaggattccacgggcttcca

SEQ ID NO: 1239300 - DNA, 25 bp, Homo sapien
caatgtaggtcacagggccgtagga

SEQ ID NO: 1239301 - DNA, 25 bp, Homo sapien
ttcctgccttgctgacacatgccgt

SEQ ID NO: 1239302 - DNA, 25 bp, Homo sapien
agagcttgctggtcaggtagcagca

SEQ ID NO: 1239303 - DNA, 25 bp, Homo sapien
cctcccaggaggacttgctccgagg

SEQ ID NO: 1239304 - DNA, 25 bp, Homo sapien
tcaaagatgtcggaggccagtgtgg

SEQ ID NO: 1239305 - DNA, 25 bp, Homo sapien
ctggaatgcgaaggtctttgtgctg

SEQ ID NO: 1239306 - DNA, 25 bp, Homo sapien
tgtctggaatgcgaaggtctttgtg

SEQ ID NO: 1239307 - DNA, 25 bp, Homo sapien
ggttgggctgaccgcccctggctct

SEQ ID NO: 1239308 - DNA, 25 bp, Homo sapien
ctgtgtctggaatgcgaaggtcttt

SEQ ID NO: 1239309 - DNA, 25 bp, Homo sapien
gcattgccgcaccacgctgaagcgg

SEQ ID NO: 1239310 - DNA, 25 bp, Homo sapien
agcacagctccaagatgagcaccag

SEQ ID NO: 1239311 - DNA, 25 bp, Homo sapien
gtgcgggtggcgcaggcccttgagg

SEQ ID NO: 1239312 - DNA, 25 bp, Homo sapien
ccttgagggcctcgtattcgcgcag

SEQ ID NO: 1239313 - DNA, 25 bp, Homo sapien
ccatggtctctaggtagtccttgaa

SEQ ID NO: 1239314 - DNA, 25 bp, Homo sapien
agtccttgaacttgtctgagggcag

SEQ ID NO: 1239315 - DNA, 25 bp, Homo sapien
cacctcggattctgagtaggaggcc

SEQ ID NO: 1239316 - DNA, 25 bp, Homo sapien
tgatcatgttctcggacctcaggtc

SEQ ID NO: 1239317 - DNA, 25 bp, Homo sapien
caccgatggcccagatgtctgtctg

SEQ ID NO: 1239318 - DNA, 25 bp, Homo sapien
aaggctgtcacaccgatggcccaga

SEQ ID NO: 1239319 - DNA, 25 bp, Homo sapien
ggcccagatgtctgtctgtggaaca

SEQ ID NO: 1239320 - DNA, 25 bp, Homo sapien
tgtcacaccgatggcccagatgtct

SEQ ID NO: 1239321 - DNA, 25 bp, Homo sapien
agccccttgcgcagtcctctctgca

SEQ ID NO: 1239322 - DNA, 25 bp, Homo sapien
cgcacagagtgctgcgcaggaaggc

SEQ ID NO: 1239323 - DNA, 25 bp, Homo sapien
gtcctctctgcaggtcgcgtgcacc

SEQ ID NO: 1239324 - DNA, 25 bp, Homo sapien
tgctcaccgggtactcggcgctcag

SEQ ID NO: 1239325 - DNA, 25 bp, Homo sapien
tcttgtacagcagcgcgcgtctctt

SEQ ID NO: 1239326 - DNA, 25 bp, Homo sapien
gtctcttctcgcgattgcgcacgaa

SEQ ID NO: 1239327 - DNA, 25 bp, Homo sapien
ctctgttagccacgggcactgcagg

SEQ ID NO: 1239328 - DNA, 25 bp, Homo sapien
agccgcgcggtagggaaggtcacgg

SEQ ID NO: 1239329 - DNA, 25 bp, Homo sapien
tgtgcgtttttattggcgcgtctgc

SEQ ID NO: 1239330 - DNA, 25 bp, Homo sapien
ttttattggcgcgtctgcagcgacc

SEQ ID NO: 1239331 - DNA, 25 bp, Homo sapien
gagaccaagggtgtggccggggcga

SEQ ID NO: 1239332 - DNA, 25 bp, Homo sapien
cagcggggagaccaagggtgtggcc

SEQ ID NO: 1239333 - DNA, 25 bp, Homo sapien
tgcaggtcagcgtgatggaagagag

SEQ ID NO: 1239334 - DNA, 25 bp, Homo sapien
agaggaaggcgcacggcgggtggaa

SEQ ID NO: 1239335 - DNA, 25 bp, Homo sapien
aataaacgcgcatgggtgtgaggac

SEQ ID NO: 1239336 - DNA, 25 bp, Homo sapien
gtgtgaggacggagacgccccgagg

SEQ ID NO: 1239337 - DNA, 25 bp, Homo sapien
cccgacggcggagaaagcgggctgc

SEQ ID NO: 1239338 - DNA, 25 bp, Homo sapien
gcccgacggcggagaaagcgggctg

SEQ ID NO: 1239339 - DNA, 25 bp, Homo sapien
cgacggcggagaaagcgggctgcgg

SEQ ID NO: 1239340 - DNA, 25 bp, Homo sapien
tggcccgacggcggagaaagcgggc

SEQ ID NO: 1239341 - DNA, 25 bp, Homo sapien
ttgcccatggaatctcaaacactgg

SEQ ID NO: 1239342 - DNA, 25 bp, Homo sapien
agcgtttgagagacaacgcgcgcac

SEQ ID NO: 1239343 - DNA, 25 bp, Homo sapien
gaaaggacattcagcagcgtttgag

SEQ ID NO: 1239344 - DNA, 25 bp, Homo sapien
tcggccagcgtagtcattgcccatg

SEQ ID NO: 1239345 - DNA, 25 bp, Homo sapien
gggccatacgtgcaaggttcatcca

SEQ ID NO: 1239346 - DNA, 25 bp, Homo sapien
gaatctgaacaaacgggccttggca

SEQ ID NO: 1239347 - DNA, 25 bp, Homo sapien
ccaaaagcgggtcataggatcctca

SEQ ID NO: 1239348 - DNA, 25 bp, Homo sapien
cattgggcccctgagatgagctgag

SEQ ID NO: 1239349 - DNA, 25 bp, Homo sapien
tgtgcagcacccaaccgtcctggtg

SEQ ID NO: 1239350 - DNA, 25 bp, Homo sapien
ccatgatgtcccaagagctgcggga

SEQ ID NO: 1239351 - DNA, 25 bp, Homo sapien
ttgtcatgccgtgggctgcatgcag

SEQ ID NO: 1239352 - DNA, 25 bp, Homo sapien
acagtagctggccaccctcagagtg

SEQ ID NO: 1239353 - DNA, 25 bp, Homo sapien
tgagagcccgtcacagtcctgggtg

SEQ ID NO: 1239354 - DNA, 25 bp, Homo sapien
ctttctgagcctgcgtgggagaacc

SEQ ID NO: 1239355 - DNA, 25 bp, Homo sapien
tgcaggcccacgttctgacttgaag

SEQ ID NO: 1239356 - DNA, 25 bp, Homo sapien
gaatccagggttcacctaagctgca

SEQ ID NO: 1239357 - DNA, 25 bp, Homo sapien
gtcactgctattcatctttcccgag

SEQ ID NO: 1239358 - DNA, 25 bp, Homo sapien
tttctacagtgccaccgatgggtca

SEQ ID NO: 1239359 - DNA, 25 bp, Homo sapien
gatctttctggactacgaggctgga

SEQ ID NO: 1239360 - DNA, 25 bp, Homo sapien
gagctattacaattcctcggaacgg

SEQ ID NO: 1239361 - DNA, 25 bp, Homo sapien
tcagctcttgctagcaggtcaggag

SEQ ID NO: 1239362 - DNA, 25 bp, Homo sapien
tgcagtggcatcaactcaggtgtga

SEQ ID NO: 1239363 - DNA, 25 bp, Homo sapien
tattgtgaaggataccactcaggaa

SEQ ID NO: 1239364 - DNA, 25 bp, Homo sapien
cctgagccccaagagctgtttaggt

SEQ ID NO: 1239365 - DNA, 25 bp, Homo sapien
gatggacacaattcgggccctaaca

SEQ ID NO: 1239366 - DNA, 25 bp, Homo sapien
cacataggacatcaaggacgccctg

SEQ ID NO: 1239367 - DNA, 25 bp, Homo sapien
cctatggagctgaggaccgtgtgca

SEQ ID NO: 1239368 - DNA, 25 bp, Homo sapien
agactgaggtcaaagctggttcccc

SEQ ID NO: 1239369 - DNA, 25 bp, Homo sapien
tgtgggggctcatgacacagcctgt

SEQ ID NO: 1239370 - DNA, 25 bp, Homo sapien
tgaggctgggaccatggccgccaat

SEQ ID NO: 1239371 - DNA, 25 bp, Homo sapien
gactgctccgggagtaatctgtctc

SEQ ID NO: 1239372 - DNA, 25 bp, Homo sapien
tgacacagcctgtttcaaccaggcc

SEQ ID NO: 1239373 - DNA, 25 bp, Homo sapien
aacagcatgcccctttggagtggtt

SEQ ID NO: 1239374 - DNA, 25 bp, Homo sapien
cgacaaagccggagtgtctgcgcga

SEQ ID NO: 1239375 - DNA, 25 bp, Homo sapien
tcgacaaagccggagtgtctgcgcg

SEQ ID NO: 1239376 - DNA, 25 bp, Homo sapien
catgcccctttggagtggttcccgc

SEQ ID NO: 1239377 - DNA, 25 bp, Homo sapien
ctgggaggtgggcatgaacatcacc

SEQ ID NO: 1239378 - DNA, 25 bp, Homo sapien
tcctctgggaggcactactgggagg

SEQ ID NO: 1239379 - DNA, 25 bp, Homo sapien
gcatgaacatcaccggggacgcgtt

SEQ ID NO: 1239380 - DNA, 25 bp, Homo sapien
gtgctgtgggccagacggccttctc

SEQ ID NO: 1239381 - DNA, 25 bp, Homo sapien
cctctcctgagttgcaggacctcag

SEQ ID NO: 1239382 - DNA, 25 bp, Homo sapien
tgtggccgtgggctgacagggtagc

SEQ ID NO: 1239383 - DNA, 25 bp, Homo sapien
tgacagggtagctcagcttaggtga

SEQ ID NO: 1239384 - DNA, 25 bp, Homo sapien
tagctcagcttaggtgaggcactgg

SEQ ID NO: 1239385 - DNA, 25 bp, Homo sapien
tgcactgtcccaggagtgagttgtg

SEQ ID NO: 1239386 - DNA, 25 bp, Homo sapien
aggttccaacctgagacagtgtccc

SEQ ID NO: 1239387 - DNA, 25 bp, Homo sapien
gcttgattacggctgataagacgcc

SEQ ID NO: 1239388 - DNA, 25 bp, Homo sapien
catgtctcggtgtggaggaggtgca

SEQ ID NO: 1239389 - DNA, 25 bp, Homo sapien
tgagaagatgaacctctacctggtg

SEQ ID NO: 1239390 - DNA, 25 bp, Homo sapien
cagttcaaaacagtggcccctgagg

SEQ ID NO: 1239391 - DNA, 25 bp, Homo sapien
tctttatgaactacggaggcagggt

SEQ ID NO: 1239392 - DNA, 25 bp, Homo sapien
gaacctcctcagagcaagggtgcat

SEQ ID NO: 1239393 - DNA, 25 bp, Homo sapien
tcctaatgcctgtcaaaacacaaaa

SEQ ID NO: 1239394 - DNA, 25 bp, Homo sapien
tccaatggtgcggtgtcagttcact

SEQ ID NO: 1239395 - DNA, 25 bp, Homo sapien
gtcatcgcgccaggccaggcacttt

SEQ ID NO: 1239396 - DNA, 25 bp, Homo sapien
tttcctgcttctgcgggttctcaat

SEQ ID NO: 1239397 - DNA, 25 bp, Homo sapien
gcaggggcgtaggtcagcaccacaa

SEQ ID NO: 1239398 - DNA, 25 bp, Homo sapien
gcaccacaaaggaatagggcttggg

SEQ ID NO: 1239399 - DNA, 25 bp, Homo sapien
ttacagatgcacacatagggtggag

SEQ ID NO: 1239400 - DNA, 25 bp, Homo sapien
agaaggtgggggctcaataccacaa

SEQ ID NO: 1239401 - DNA, 25 bp, Homo sapien
ccaaggtcacggtgccaacagattg

SEQ ID NO: 1239402 - DNA, 25 bp, Homo sapien
aaagaactccatctcctaacaccat

SEQ ID NO: 1239403 - DNA, 25 bp, Homo sapien
tctctggaaaggcaccaatcctatt

SEQ ID NO: 1239404 - DNA, 25 bp, Homo sapien
gattgagcttctggtgagattctgc

SEQ ID NO: 1239405 - DNA, 25 bp, Homo sapien
tgagattacagacgtaattatcaca

SEQ ID NO: 1239406 - DNA, 25 bp, Homo sapien
gagattacagacgtaattatcacac

SEQ ID NO: 1239407 - DNA, 25 bp, Homo sapien
ttacagacgtaattatcacacccgg

SEQ ID NO: 1239408 - DNA, 25 bp, Homo sapien
cagacgtaattatcacacccggcta

SEQ ID NO: 1239409 - DNA, 25 bp, Homo sapien
tgctgatgcctcatcctcaagtgag

SEQ ID NO: 1239410 - DNA, 25 bp, Homo sapien
tctctggagtccattttacagtggc

SEQ ID NO: 1239411 - DNA, 25 bp, Homo sapien
caccagagactgagcaatttgtaga

SEQ ID NO: 1239412 - DNA, 25 bp, Homo sapien
tgtggttgcaacctcatgtgatgga

SEQ ID NO: 1239413 - DNA, 25 bp, Homo sapien
tgactctagcaaggttcccgtgtgg

SEQ ID NO: 1239414 - DNA, 25 bp, Homo sapien
gctcatgaatgagcgcagtggccat

SEQ ID NO: 1239415 - DNA, 25 bp, Homo sapien
tatctcgagaaaagagccgcactga

SEQ ID NO: 1239416 - DNA, 25 bp, Homo sapien
tgcagttctttataggccggaggcc

SEQ ID NO: 1239417 - DNA, 25 bp, Homo sapien
tttgatggacataaaggctcttttc

SEQ ID NO: 1239418 - DNA, 25 bp, Homo sapien
ggcccctttgatggacataaaggct

SEQ ID NO: 1239419 - DNA, 25 bp, Homo sapien
gccaagggcaagtgaggccgcccgc

SEQ ID NO: 1239420 - DNA, 25 bp, Homo sapien
tgcccaagaagacggagagccacca

SEQ ID NO: 1239421 - DNA, 25 bp, Homo sapien
ggccgcggtgctcgagtacttgact

SEQ ID NO: 1239422 - DNA, 25 bp, Homo sapien
gcaagggcaactattcggagcgcgt

SEQ ID NO: 1239423 - DNA, 25 bp, Homo sapien
cggaaatgtccggtcgtggtaagca

SEQ ID NO: 1239424 - DNA, 25 bp, Homo sapien
tctgtaccatacataagggctcgct

SEQ ID NO: 1239425 - DNA, 25 bp, Homo sapien
tctgattggctaccatagccatcca

SEQ ID NO: 1239426 - DNA, 25 bp, Homo sapien
tcgctgggaaaggaatacgcaaatt

SEQ ID NO: 1239427 - DNA, 25 bp, Homo sapien
aacgttgttctacgtcatcgctggg

SEQ ID NO: 1239428 - DNA, 25 bp, Homo sapien
tacgcaaattaggagtgccaggttc

SEQ ID NO: 1239429 - DNA, 25 bp, Homo sapien
agaacccttcttgggcgcaggagcc

SEQ ID NO: 1239430 - DNA, 25 bp, Homo sapien
gagccgatttggacgggtctggcat

SEQ ID NO: 1239431 - DNA, 25 bp, Homo sapien
tttagaacccttcttgggcgcagga

SEQ ID NO: 1239432 - DNA, 25 bp, Homo sapien
cttcttgggcgcaggagccgatttg

SEQ ID NO: 1239433 - DNA, 25 bp, Homo sapien
aaccgctagggtgcatggagacaca

SEQ ID NO: 1239434 - DNA, 25 bp, Homo sapien
aaagagctttcctgcgccaaaatgg

SEQ ID NO: 1239435 - DNA, 25 bp, Homo sapien
gggaaagtgacaacacccatggcct

SEQ ID NO: 1239436 - DNA, 25 bp, Homo sapien
gaaaggaattctgcgttgctaacgc

SEQ ID NO: 1239437 - DNA, 25 bp, Homo sapien
cacaacggtttgaggaagcaattac

SEQ ID NO: 1239438 - DNA, 25 bp, Homo sapien
tcagtacttcgaattttcacaacgg

SEQ ID NO: 1239439 - DNA, 25 bp, Homo sapien
ttttcacaacggtttgaggaagcaa

SEQ ID NO: 1239440 - DNA, 25 bp, Homo sapien
cttcgaattttcacaacggtttgag

SEQ ID NO: 1239441 - DNA, 25 bp, Homo sapien
ccctgctggaaatggtgacacaaac

SEQ ID NO: 1239442 - DNA, 25 bp, Homo sapien
agccgttttggtcgaggatgttcac

SEQ ID NO: 1239443 - DNA, 25 bp, Homo sapien
tcttgtagaggaatcacgcaggaaa

SEQ ID NO: 1239444 - DNA, 25 bp, Homo sapien
tagctttaaaacatgcgaggttctc

SEQ ID NO: 1239445 - DNA, 25 bp, Homo sapien
tacgcataggcttaacaatcaaacc

SEQ ID NO: 1239446 - DNA, 25 bp, Homo sapien
ccatgttgctgatgacgggatttca

SEQ ID NO: 1239447 - DNA, 25 bp, Homo sapien
tattcacaccctctttaggtcgaga

SEQ ID NO: 1239448 - DNA, 25 bp, Homo sapien
gggacatccgtcatcatattcacac

SEQ ID NO: 1239449 - DNA, 25 bp, Homo sapien
cttcgtcaatgacatcttcgagcgc

SEQ ID NO: 1239450 - DNA, 25 bp, Homo sapien
ttcgagcgcatcgccagcgaggcct

SEQ ID NO: 1239451 - DNA, 25 bp, Homo sapien
tcaatgacatcttcgagcgcatcgc

SEQ ID NO: 1239452 - DNA, 25 bp, Homo sapien
catcttcgagcgcatcgccagcgag

SEQ ID NO: 1239453 - DNA, 25 bp, Homo sapien
gacttgaatgtagagggtactgcct

SEQ ID NO: 1239454 - DNA, 25 bp, Homo sapien
aagatgcccagaagacctcagagga

SEQ ID NO: 1239455 - DNA, 25 bp, Homo sapien
cacaagcagatactgactgggcccc

SEQ ID NO: 1239456 - DNA, 25 bp, Homo sapien
tatttacgtgatggatctgcccggg

SEQ ID NO: 1239457 - DNA, 25 bp, Homo sapien
caattggctgatgcgccttctcgag

SEQ ID NO: 1239458 - DNA, 25 bp, Homo sapien
cacaaaccaattggctgatgcgcct

SEQ ID NO: 1239459 - DNA, 25 bp, Homo sapien
gatgcgccttctcgagctttccaaa

SEQ ID NO: 1239460 - DNA, 25 bp, Homo sapien
cacaccacaaaccaattggctgatg

SEQ ID NO: 1239461 - DNA, 25 bp, Homo sapien
tataagggtcaccagttgcagggat

SEQ ID NO: 1239462 - DNA, 25 bp, Homo sapien
attataagggtcaccagttgcaggg

SEQ ID NO: 1239463 - DNA, 25 bp, Homo sapien
gggtgccggacgcaagggtgtcaga

SEQ ID NO: 1239464 - DNA, 25 bp, Homo sapien
tgccggacgcaagggtgtcagatgg

SEQ ID NO: 1239465 - DNA, 25 bp, Homo sapien
tccgtcttgggttcctgcgcgaagg

SEQ ID NO: 1239466 - DNA, 25 bp, Homo sapien
caggctcagggcatgcggcgccagg

SEQ ID NO: 1239467 - DNA, 25 bp, Homo sapien
ggtgctctgcttcacgaatgccggg

SEQ ID NO: 1239468 - DNA, 25 bp, Homo sapien
gcgcaacgcgagtgggttccgtctt

SEQ ID NO: 1239469 - DNA, 25 bp, Homo sapien
gggaaaagcgtttctgcgcagtcca

SEQ ID NO: 1239470 - DNA, 25 bp, Homo sapien
cgtgctgggcgggtctggcggacca

SEQ ID NO: 1239471 - DNA, 25 bp, Homo sapien
tagttaatgtcttgggcggttctgg

SEQ ID NO: 1239472 - DNA, 25 bp, Homo sapien
tccttaggtgtgttggtgacgtgct

SEQ ID NO: 1239473 - DNA, 25 bp, Homo sapien
cagaatccacattgtgtggtgccag

SEQ ID NO: 1239474 - DNA, 25 bp, Homo sapien
caccagcagaatccacattgtgtgg

SEQ ID NO: 1239475 - DNA, 25 bp, Homo sapien
ccagcagaatccacattgtgtggtg

SEQ ID NO: 1239476 - DNA, 25 bp, Homo sapien
agcagaatccacattgtgtggtgcc

SEQ ID NO: 1239477 - DNA, 25 bp, Homo sapien
ggaaaatacaccttgtcatgggatt

SEQ ID NO: 1239478 - DNA, 25 bp, Homo sapien
tagccaaattaggaacattgtaacc

SEQ ID NO: 1239479 - DNA, 25 bp, Homo sapien
tttccactattaagtaagcagacca

SEQ ID NO: 1239480 - DNA, 25 bp, Homo sapien
agaatagctggaaccgggagacgaa

SEQ ID NO: 1239481 - DNA, 25 bp, Homo sapien
cctgggaagctaccctggttgtccg

SEQ ID NO: 1239482 - DNA, 25 bp, Homo sapien
cgtgggatctccctgcgtggaccca

SEQ ID NO: 1239483 - DNA, 25 bp, Homo sapien
tgggatctccctgcgtggacccatc

SEQ ID NO: 1239484 - DNA, 25 bp, Homo sapien
tggttgtccgctgtctcctggctgg

SEQ ID NO: 1239485 - DNA, 25 bp, Homo sapien
gacggggcgggaaatggcctgcgtg

SEQ ID NO: 1239486 - DNA, 25 bp, Homo sapien
tagctcgcccgcgtgggctggggac

SEQ ID NO: 1239487 - DNA, 25 bp, Homo sapien
ccccgcggtagctcgcccgcgtggg

SEQ ID NO: 1239488 - DNA, 25 bp, Homo sapien
cggggcgggaaatggcctgcgtggg

SEQ ID NO: 1239489 - DNA, 25 bp, Homo sapien
tactgcatccttaggtcctggccgc

SEQ ID NO: 1239490 - DNA, 25 bp, Homo sapien
ggcaactatgctctccacctgcaag

SEQ ID NO: 1239491 - DNA, 25 bp, Homo sapien
gagcgctctgccgataagatcctgg

SEQ ID NO: 1239492 - DNA, 25 bp, Homo sapien
gcgctccacagacaagatcctggca

SEQ ID NO: 1239493 - DNA, 25 bp, Homo sapien
cggcggggccggcaagggcgcagga

SEQ ID NO: 1239494 - DNA, 25 bp, Homo sapien
tgccagcagtcgtcggcgcactcgg

SEQ ID NO: 1239495 - DNA, 25 bp, Homo sapien
cgcgctggcacagggcgcaggcggc

SEQ ID NO: 1239496 - DNA, 25 bp, Homo sapien
cacgcacgcccgacagaagcggtgg

SEQ ID NO: 1239497 - DNA, 25 bp, Homo sapien
aagcggtggccgcagtcggcgcgca

SEQ ID NO: 1239498 - DNA, 25 bp, Homo sapien
tcctcgagcgccagaaggcggcggc

SEQ ID NO: 1239499 - DNA, 25 bp, Homo sapien
cctcgagcgccagaaggcggcggct

SEQ ID NO: 1239500 - DNA, 25 bp, Homo sapien
gcggcggctgagcgggggcctgccg

SEQ ID NO: 1239501 - DNA, 25 bp, Homo sapien
tgagcgggggcctgccgggctccac

SEQ ID NO: 1239502 - DNA, 25 bp, Homo sapien
tggccgggccgtcgcgcgcgggcgc

SEQ ID NO: 1239503 - DNA, 25 bp, Homo sapien
ctggccgggccgtcgcgcgcgggcg

SEQ ID NO: 1239504 - DNA, 25 bp, Homo sapien
gtcgcgcgcgggcgccgcggccgcc

SEQ ID NO: 1239505 - DNA, 25 bp, Homo sapien
gccgtcgcgcgcgggcgccgcggcc

SEQ ID NO: 1239506 - DNA, 25 bp, Homo sapien
cccgcagccatacggcaggcggcgc

SEQ ID NO: 1239507 - DNA, 25 bp, Homo sapien
caggcggcgcagagcgggccggcgt

SEQ ID NO: 1239508 - DNA, 25 bp, Homo sapien
agcgcggttcccactcgggcggctc

SEQ ID NO: 1239509 - DNA, 25 bp, Homo sapien
agcgccttcctccagcgcggttccc

SEQ ID NO: 1239510 - DNA, 25 bp, Homo sapien
tggcccggggagcagacgagaaggt

SEQ ID NO: 1239511 - DNA, 25 bp, Homo sapien
tgggcaaggctccagactcccggac

SEQ ID NO: 1239512 - DNA, 25 bp, Homo sapien
gggagcagacgagaaggtgggccag

SEQ ID NO: 1239513 - DNA, 25 bp, Homo sapien
ctcagagcgggtttctgaaagatgg

SEQ ID NO: 1239514 - DNA, 25 bp, Homo sapien
aggtcccgggcgtcattcaagtcct

SEQ ID NO: 1239515 - DNA, 25 bp, Homo sapien
tggccatgcaggtcccgggcgtcat

SEQ ID NO: 1239516 - DNA, 25 bp, Homo sapien
ggccatgcaggtcccgggcgtcatt

SEQ ID NO: 1239517 - DNA, 25 bp, Homo sapien
atgcaggtcccgggcgtcattcaag

SEQ ID NO: 1239518 - DNA, 25 bp, Homo sapien
tcattccaggctgccccaggtcccc

SEQ ID NO: 1239519 - DNA, 25 bp, Homo sapien
ttccaggctgccccaggtcccccca

SEQ ID NO: 1239520 - DNA, 25 bp, Homo sapien
tccaggctgccccaggtccccccac

SEQ ID NO: 1239521 - DNA, 25 bp, Homo sapien
cattccaggctgccccaggtccccc

SEQ ID NO: 1239522 - DNA, 25 bp, Homo sapien
ttcttgtagtcggtcagtgccttct

SEQ ID NO: 1239523 - DNA, 25 bp, Homo sapien
cttgtagtcggtcagtgccttcttc

SEQ ID NO: 1239524 - DNA, 25 bp, Homo sapien
cttcttgtagtcggtcagtgccttc

SEQ ID NO: 1239525 - DNA, 25 bp, Homo sapien
gcttcttgtagtcggtcagtgcctt

SEQ ID NO: 1239526 - DNA, 25 bp, Homo sapien
ctcgtcctcagggagcccctcctcc

SEQ ID NO: 1239527 - DNA, 25 bp, Homo sapien
cttctcagcctcctgcaggaaatgc

SEQ ID NO: 1239528 - DNA, 25 bp, Homo sapien
ctcagggagcccctcctccttctca

SEQ ID NO: 1239529 - DNA, 25 bp, Homo sapien
tcagcctcctgcaggaaatgctcct

SEQ ID NO: 1239530 - DNA, 25 bp, Homo sapien
agtgacctgaaccgctcagtggggt

SEQ ID NO: 1239531 - DNA, 25 bp, Homo sapien
tccgagaccgcctgcagcagtgacc

SEQ ID NO: 1239532 - DNA, 25 bp, Homo sapien
caggttgcgatgcttcttctccagc

SEQ ID NO: 1239533 - DNA, 25 bp, Homo sapien
ttctccagctccgagaccgcctgca

SEQ ID NO: 1239534 - DNA, 25 bp, Homo sapien
ttaagccttgacttcgggcaatggt

SEQ ID NO: 1239535 - DNA, 25 bp, Homo sapien
tgcgtccaccctggcccgatggtgg

SEQ ID NO: 1239536 - DNA, 25 bp, Homo sapien
caccctggcccgatggtgggcagac

SEQ ID NO: 1239537 - DNA, 25 bp, Homo sapien
ttcgggcaatggtcccccaatggct

SEQ ID NO: 1239538 - DNA, 25 bp, Homo sapien
ccattcccgaaattcagccctgcaa

SEQ ID NO: 1239539 - DNA, 25 bp, Homo sapien
gagccttccatgctcgggcactcgg

SEQ ID NO: 1239540 - DNA, 25 bp, Homo sapien
cacctcagaccctcctcaacttaaa

SEQ ID NO: 1239541 - DNA, 25 bp, Homo sapien
ggcactcgggatgccaagtgccctc

SEQ ID NO: 1239542 - DNA, 25 bp, Homo sapien
catgagacagcgcatgaggtactgt

SEQ ID NO: 1239543 - DNA, 25 bp, Homo sapien
gccaaagccttgtcacctatggctg

SEQ ID NO: 1239544 - DNA, 25 bp, Homo sapien
aaagagagagcgcacatgagacagc

SEQ ID NO: 1239545 - DNA, 25 bp, Homo sapien
ggctggcacgggcaactgaaccgtt

SEQ ID NO: 1239546 - DNA, 25 bp, Homo sapien
tctaccgggaggtgtttgcagcccc

SEQ ID NO: 1239547 - DNA, 25 bp, Homo sapien
tttattcagcattgagccagcccac

SEQ ID NO: 1239548 - DNA, 25 bp, Homo sapien
cctcaggaggcatcaaggtgcaatc

SEQ ID NO: 1239549 - DNA, 25 bp, Homo sapien
aactatgtagatggacccaaggcca

SEQ ID NO: 1239550 - DNA, 25 bp, Homo sapien
catgctttagcacgtgtcacgagga

SEQ ID NO: 1239551 - DNA, 25 bp, Homo sapien
cactgatgttgtgggagactctgcc

SEQ ID NO: 1239552 - DNA, 25 bp, Homo sapien
tcggacctggtgatgtggagacact

SEQ ID NO: 1239553 - DNA, 25 bp, Homo sapien
tgttggcgtgctgacaaagattctc

SEQ ID NO: 1239554 - DNA, 25 bp, Homo sapien
tctagtcagagggtacagagtccct

SEQ ID NO: 1239555 - DNA, 25 bp, Homo sapien
gactgtcccacatatgtgcagaggg

SEQ ID NO: 1239556 - DNA, 25 bp, Homo sapien
gacttcagctgataaccgtgtactg

SEQ ID NO: 1239557 - DNA, 25 bp, Homo sapien
tgtactgtacgcagttggccctctg

SEQ ID NO: 1239558 - DNA, 25 bp, Homo sapien
gcctaggtttcagggttgtatcact

SEQ ID NO: 1239559 - DNA, 25 bp, Homo sapien
taatcatcagggaaacgtaaaccaa

SEQ ID NO: 1239560 - DNA, 25 bp, Homo sapien
cagacaagggcttaattgtaaggcc

SEQ ID NO: 1239561 - DNA, 25 bp, Homo sapien
gagtgaagacaactcacaaattggg

SEQ ID NO: 1239562 - DNA, 25 bp, Homo sapien
agtagaaacccatctacctgctggg

SEQ ID NO: 1239563 - DNA, 25 bp, Homo sapien
tctagtcatttagcaggaactccca

SEQ ID NO: 1239564 - DNA, 25 bp, Homo sapien
tgtacatcggatcaccagactggtt

SEQ ID NO: 1239565 - DNA, 25 bp, Homo sapien
cagatagcaaaatggtcactacagg

SEQ ID NO: 1239566 - DNA, 25 bp, Homo sapien
gaggaagggcgtctgtttcaagcca

SEQ ID NO: 1239567 - DNA, 25 bp, Homo sapien
ggctcctcagagcttgcgtggtcaa

SEQ ID NO: 1239568 - DNA, 25 bp, Homo sapien
gagaggccatcatgctgggtctgca

SEQ ID NO: 1239569 - DNA, 25 bp, Homo sapien
tttctataaaacaccctgtgggagc

SEQ ID NO: 1239570 - DNA, 25 bp, Homo sapien
ccacaggatcctgaaactgaaaacg

SEQ ID NO: 1239571 - DNA, 25 bp, Homo sapien
ctttgggtcccaactatccacggct

SEQ ID NO: 1239572 - DNA, 25 bp, Homo sapien
atcctgaaactgaaaacgacctttg

SEQ ID NO: 1239573 - DNA, 25 bp, Homo sapien
aactatccacggctttcccacaaag

SEQ ID NO: 1239574 - DNA, 25 bp, Homo sapien
tatgccttttagtttgaccccagac

SEQ ID NO: 1239575 - DNA, 25 bp, Homo sapien
tgcactccaaagcagcggccttatt

SEQ ID NO: 1239576 - DNA, 25 bp, Homo sapien
tacagctgccttagacaatgattcc

SEQ ID NO: 1239577 - DNA, 25 bp, Homo sapien
ggatgactctgagcgatcccggact

SEQ ID NO: 1239578 - DNA, 25 bp, Homo sapien
gggcagtctatccacaggtttccaa

SEQ ID NO: 1239579 - DNA, 25 bp, Homo sapien
ggaatcaatcgtcagcaaaatgggc

SEQ ID NO: 1239580 - DNA, 25 bp, Homo sapien
tagattagacaaaccgcactctggc

SEQ ID NO: 1239581 - DNA, 25 bp, Homo sapien
taagcccggttctcaggaatggcaa

SEQ ID NO: 1239582 - DNA, 25 bp, Homo sapien
tccagaagctcccagttcacggcat

SEQ ID NO: 1239583 - DNA, 25 bp, Homo sapien
cagttcacggcatggaaagcagctc

SEQ ID NO: 1239584 - DNA, 25 bp, Homo sapien
tgcctctgatccttgttgccatggg

SEQ ID NO: 1239585 - DNA, 25 bp, Homo sapien
ccatgggactcgtaatagctggagg

SEQ ID NO: 1239586 - DNA, 25 bp, Homo sapien
gcagtgacatgcgatccagaggcct

SEQ ID NO: 1239587 - DNA, 25 bp, Homo sapien
tgttccccaatatcagtgccgagga

SEQ ID NO: 1239588 - DNA, 25 bp, Homo sapien
taaagttcggcgaggccactgtgca

SEQ ID NO: 1239589 - DNA, 25 bp, Homo sapien
ggacatactgctgccgcttcaagga

SEQ ID NO: 1239590 - DNA, 25 bp, Homo sapien
ctccagcacctggtattctcaggcg

SEQ ID NO: 1239591 - DNA, 25 bp, Homo sapien
aaagcctccagcacctggtattctc

SEQ ID NO: 1239592 - DNA, 25 bp, Homo sapien
cttccgagatcagtcgcgttcaggg

SEQ ID NO: 1239593 - DNA, 25 bp, Homo sapien
agcttccgagatcagtcgcgttcag

SEQ ID NO: 1239594 - DNA, 25 bp, Homo sapien
aattcatccaagaaaacgcccgcct

SEQ ID NO: 1239595 - DNA, 25 bp, Homo sapien
tctaaggctctatcgctctcgctct

SEQ ID NO: 1239596 - DNA, 25 bp, Homo sapien
ggagccgggcgcttcctctctaagg

SEQ ID NO: 1239597 - DNA, 25 bp, Homo sapien
tcaagagggcgctgcctaacggagc

SEQ ID NO: 1239598 - DNA, 25 bp, Homo sapien
gagggatccaaaacgctgcctccgc

SEQ ID NO: 1239599 - DNA, 25 bp, Homo sapien
tccgagcgggcccgatgtggtggaa

SEQ ID NO: 1239600 - DNA, 25 bp, Homo sapien
aggagcccctgtgcggcgagggatc

SEQ ID NO: 1239601 - DNA, 25 bp, Homo sapien
ctgctccgagcgggcccgatgtggt

SEQ ID NO: 1239602 - DNA, 25 bp, Homo sapien
ccgcccggcctgctgtaggcttttg

SEQ ID NO: 1239603 - DNA, 25 bp, Homo sapien
gagggatccaaaacgctgcctccgc

SEQ ID NO: 1239604 - DNA, 25 bp, Homo sapien
aggagcccctgtgcggcgagggatc

SEQ ID NO: 1239605 - DNA, 25 bp, Homo sapien
ctgctccgagcgggcccgatgtggt

SEQ ID NO: 1239606 - DNA, 25 bp, Homo sapien
tccgagcgggcccgatgtggtggaa

SEQ ID NO: 1239607 - DNA, 25 bp, Homo sapien
ccgcccggcctgctgtaggcttttg

SEQ ID NO: 1239608 - DNA, 25 bp, Homo sapien
ctgctccgagcgggcccgatgtggt

SEQ ID NO: 1239609 - DNA, 25 bp, Homo sapien
aggagcccctgtgcggcgagggatc

SEQ ID NO: 1239610 - DNA, 25 bp, Homo sapien
tccgagcgggcccgatgtggtggaa

SEQ ID NO: 1239611 - DNA, 25 bp, Homo sapien
gagggatccaaaacgctgcctccgc

SEQ ID NO: 1239612 - DNA, 25 bp, Homo sapien
ccgcccggcctgctgtaggcttttg

SEQ ID NO: 1239613 - DNA, 25 bp, Homo sapien
aggagcccctgtgcggcgagggatc

SEQ ID NO: 1239614 - DNA, 25 bp, Homo sapien
tccgagcgggcccgatgtggtggaa

SEQ ID NO: 1239615 - DNA, 25 bp, Homo sapien
gagggatccaaaacgctgcctccgc

SEQ ID NO: 1239616 - DNA, 25 bp, Homo sapien
ctgctccgagcgggcccgatgtggt

SEQ ID NO: 1239617 - DNA, 25 bp, Homo sapien
ggagccgggcgcttcctctctaagg

SEQ ID NO: 1239618 - DNA, 25 bp, Homo sapien
tctaaggctctatcgctctcgctct

SEQ ID NO: 1239619 - DNA, 25 bp, Homo sapien
aattcatccaagaaaacgcccgcct

SEQ ID NO: 1239620 - DNA, 25 bp, Homo sapien
tcaagagggcgctgcctaacggagc

SEQ ID NO: 1239621 - DNA, 25 bp, Homo sapien
aggagcccctgtgcggcgagggatc

SEQ ID NO: 1239622 - DNA, 25 bp, Homo sapien
tccgagcgggcccgatgtggtggaa

SEQ ID NO: 1239623 - DNA, 25 bp, Homo sapien
gagggatccaaaacgctgcctccgc

SEQ ID NO: 1239624 - DNA, 25 bp, Homo sapien
ctgctccgagcgggcccgatgtggt

SEQ ID NO: 1239625 - DNA, 25 bp, Homo sapien
ccgcccggcctgctgtaggcttttg

SEQ ID NO: 1239626 - DNA, 25 bp, Homo sapien
gagggatccaaaacgctgcctccgc

SEQ ID NO: 1239627 - DNA, 25 bp, Homo sapien
tccgagcgggcccgatgtggtggaa

SEQ ID NO: 1239628 - DNA, 25 bp, Homo sapien
aggagcccctgtgcggcgagggatc

SEQ ID NO: 1239629 - DNA, 25 bp, Homo sapien
ctgctccgagcgggcccgatgtggt

SEQ ID NO: 1239630 - DNA, 25 bp, Homo sapien
ggagccgggcgcttcctctctaagg

SEQ ID NO: 1239631 - DNA, 25 bp, Homo sapien
tcaagagggcgctgcctaacggagc

SEQ ID NO: 1239632 - DNA, 25 bp, Homo sapien
tctaaggctctatcgctctcgctct

SEQ ID NO: 1239633 - DNA, 25 bp, Homo sapien
aattcatccaagaaaacgcccgcct

SEQ ID NO: 1239634 - DNA, 25 bp, Homo sapien
ccgcccggcctgctgtaggcttttg

SEQ ID NO: 1239635 - DNA, 25 bp, Homo sapien
tcaagagggcgctgcctaacggagc

SEQ ID NO: 1239636 - DNA, 25 bp, Homo sapien
ggagccgggcgcttcctctctaagg

SEQ ID NO: 1239637 - DNA, 25 bp, Homo sapien
tctaaggctctatcgctctcgctct

SEQ ID NO: 1239638 - DNA, 25 bp, Homo sapien
aattcatccaagaaaacgcccgcct

SEQ ID NO: 1239639 - DNA, 25 bp, Homo sapien
tccgagcgggcccgatgtggtggaa

SEQ ID NO: 1239640 - DNA, 25 bp, Homo sapien
aggagcccctgtgcggcgagggatc

SEQ ID NO: 1239641 - DNA, 25 bp, Homo sapien
ctgctccgagcgggcccgatgtggt

SEQ ID NO: 1239642 - DNA, 25 bp, Homo sapien
gagggatccaaaacgctgcctccgc

SEQ ID NO: 1239643 - DNA, 25 bp, Homo sapien
tccgagcgggcccgatgtggtggaa

SEQ ID NO: 1239644 - DNA, 25 bp, Homo sapien
aggagcccctgtgcggcgagggatc

SEQ ID NO: 1239645 - DNA, 25 bp, Homo sapien
gagggatccaaaacgctgcctccgc

SEQ ID NO: 1239646 - DNA, 25 bp, Homo sapien
ctgctccgagcgggcccgatgtggt

SEQ ID NO: 1239647 - DNA, 25 bp, Homo sapien
ggagccgggcgcttcctctctaagg

SEQ ID NO: 1239648 - DNA, 25 bp, Homo sapien
tctaaggctctatcgctctcgctct

SEQ ID NO: 1239649 - DNA, 25 bp, Homo sapien
ctcaagagggcgctgcctaacggag

SEQ ID NO: 1239650 - DNA, 25 bp, Homo sapien
aattcatccaagaaaacgcccgcct

SEQ ID NO: 1239651 - DNA, 25 bp, Homo sapien
agggaggtgccaagaaaggcaggag

SEQ ID NO: 1239652 - DNA, 25 bp, Homo sapien
ggaggtgccaagaaaggcaggagcc

SEQ ID NO: 1239653 - DNA, 25 bp, Homo sapien
gggaggtgccaagaaaggcaggagc

SEQ ID NO: 1239654 - DNA, 25 bp, Homo sapien
gaggtgccaagaaaggcaggagcct

SEQ ID NO: 1239655 - DNA, 25 bp, Homo sapien
ccgcccggcctgctgtaggcttttg

SEQ ID NO: 1239656 - DNA, 25 bp, Homo sapien
gagggatccaaaacgctgcctccgc

SEQ ID NO: 1239657 - DNA, 25 bp, Homo sapien
aggagcccctgtgcggcgagggatc

SEQ ID NO: 1239658 - DNA, 25 bp, Homo sapien
tccgagcgggcccgatgtggtggaa

SEQ ID NO: 1239659 - DNA, 25 bp, Homo sapien
ctgctccgagcgggcccgatgtggt

SEQ ID NO: 1239660 - DNA, 25 bp, Homo sapien
tgggccagaccgctacttagatgaa

SEQ ID NO: 1239661 - DNA, 25 bp, Homo sapien
tgagaaaaccaggagacgcaggctt

SEQ ID NO: 1239662 - DNA, 25 bp, Homo sapien
tcagatcactaaggtgcaggccagg

SEQ ID NO: 1239663 - DNA, 25 bp, Homo sapien
tagatgaaacgccacttgagaaaac

SEQ ID NO: 1239664 - DNA, 25 bp, Homo sapien
gggtcccgataagatccccatggca

SEQ ID NO: 1239665 - DNA, 25 bp, Homo sapien
tcacggaaggctctaagaggccaac

SEQ ID NO: 1239666 - DNA, 25 bp, Homo sapien
ggcaaaagaccagagaagatcccag

SEQ ID NO: 1239667 - DNA, 25 bp, Homo sapien
ttgggcgtagacacggagagcaacc

SEQ ID NO: 1239668 - DNA, 25 bp, Homo sapien
tgatcccgggaaagcttgccaaaat

SEQ ID NO: 1239669 - DNA, 25 bp, Homo sapien
gaaagcacatttagagaacctggaa

SEQ ID NO: 1239670 - DNA, 25 bp, Homo sapien
gaaattgccggctcacatgaaacaa

SEQ ID NO: 1239671 - DNA, 25 bp, Homo sapien
gaacctggaagtcaaacctgacgaa

SEQ ID NO: 1239672 - DNA, 25 bp, Homo sapien
gccgctgatggaactaggccctaac

SEQ ID NO: 1239673 - DNA, 25 bp, Homo sapien
actaggccctaaccgcagtgcagct

SEQ ID NO: 1239674 - DNA, 25 bp, Homo sapien
tacctgttagagttctttctatgaa

SEQ ID NO: 1239675 - DNA, 25 bp, Homo sapien
cagcgccacgtactccacaggtgcc

SEQ ID NO: 1239676 - DNA, 25 bp, Homo sapien
ttgagtgagccaggcacgctcaagg

SEQ ID NO: 1239677 - DNA, 25 bp, Homo sapien
acgctcaaggcggtaaaggccaggt

SEQ ID NO: 1239678 - DNA, 25 bp, Homo sapien
aggttgatgttgagtgagccaggca

SEQ ID NO: 1239679 - DNA, 25 bp, Homo sapien
cgctcaaggcggtaaaggccaggta

SEQ ID NO: 1239680 - DNA, 25 bp, Homo sapien
ccacagccgccccgggctggcgcac

SEQ ID NO: 1239681 - DNA, 25 bp, Homo sapien
cccacagccgccccgggctggcgca

SEQ ID NO: 1239682 - DNA, 25 bp, Homo sapien
cacagccgccccgggctggcgcaca

SEQ ID NO: 1239683 - DNA, 25 bp, Homo sapien
acagccgccccgggctggcgcacac

SEQ ID NO: 1239684 - DNA, 25 bp, Homo sapien
catctggcagcaagtagcacgctga

SEQ ID NO: 1239685 - DNA, 25 bp, Homo sapien
gcatctggcagcaagtagcacgctg

SEQ ID NO: 1239686 - DNA, 25 bp, Homo sapien
atctggcagcaagtagcacgctgac

SEQ ID NO: 1239687 - DNA, 25 bp, Homo sapien
caggcaggcgagcagtgaggtgagg

SEQ ID NO: 1239688 - DNA, 25 bp, Homo sapien
gcaaccctggaagaaggtctcatat

SEQ ID NO: 1239689 - DNA, 25 bp, Homo sapien
aggaagtagacccgccagcaggagg

SEQ ID NO: 1239690 - DNA, 25 bp, Homo sapien
cgagtgaaacgagttttacatccat

SEQ ID NO: 1239691 - DNA, 25 bp, Homo sapien
tttcaactggaccaccctgatcata

SEQ ID NO: 1239692 - DNA, 25 bp, Homo sapien
atttcaactggaccaccctgatcat

SEQ ID NO: 1239693 - DNA, 25 bp, Homo sapien
tggcctgtagttgatgtttagcact

SEQ ID NO: 1239694 - DNA, 25 bp, Homo sapien
gtttagcactactagctttccacac

SEQ ID NO: 1239695 - DNA, 25 bp, Homo sapien
gtatagcttgatgaggaacttgcac

SEQ ID NO: 1239696 - DNA, 25 bp, Homo sapien
tgtatagcttgatgaggaacttgca

SEQ ID NO: 1239697 - DNA, 25 bp, Homo sapien
aaggatccattcgtatgtaggtggg

SEQ ID NO: 1239698 - DNA, 25 bp, Homo sapien
aggatccattcgtatgtaggtgggt

SEQ ID NO: 1239699 - DNA, 25 bp, Homo sapien
atccattcgtatgtaggtgggtctt

SEQ ID NO: 1239700 - DNA, 25 bp, Homo sapien
ccattcgtatgtaggtgggtcttgc

SEQ ID NO: 1239701 - DNA, 25 bp, Homo sapien
ccaaagctgggtgagatcatgctcc

SEQ ID NO: 1239702 - DNA, 25 bp, Homo sapien
tatttcctgaagcaacggagacaga

SEQ ID NO: 1239703 - DNA, 25 bp, Homo sapien
ggatttcaaattcctaccgcaggag

SEQ ID NO: 1239704 - DNA, 25 bp, Homo sapien
gagacacaacacatagaaggacagg

SEQ ID NO: 1239705 - DNA, 25 bp, Homo sapien
gcttggactgaggtgtatataggat

SEQ ID NO: 1239706 - DNA, 25 bp, Homo sapien
tatataggataggtttactctgcct

SEQ ID NO: 1239707 - DNA, 25 bp, Homo sapien
cagtcagtgaaagagcacagtctgt

SEQ ID NO: 1239708 - DNA, 25 bp, Homo sapien
cattcataatacagaccaggcttgg

SEQ ID NO: 1239709 - DNA, 25 bp, Homo sapien
ttatgtggtctgctgattttatttt

SEQ ID NO: 1239710 - DNA, 25 bp, Homo sapien
gtggtctgctgattttattttcttt

SEQ ID NO: 1239711 - DNA, 25 bp, Homo sapien
tttatgtggtctgctgattttattt

SEQ ID NO: 1239712 - DNA, 25 bp, Homo sapien
tatgtggtctgctgattttattttc

SEQ ID NO: 1239713 - DNA, 25 bp, Homo sapien
gcaaataaacactcgcgtgcatttg

SEQ ID NO: 1239714 - DNA, 25 bp, Homo sapien
tcgcgtgcatttgtcttaatagtag

SEQ ID NO: 1239715 - DNA, 25 bp, Homo sapien
taaacactcgcgtgcatttgtctta

SEQ ID NO: 1239716 - DNA, 25 bp, Homo sapien
gctgcaaataaacactcgcgtgcat

SEQ ID NO: 1239717 - DNA, 25 bp, Homo sapien
tcagcatgttccctctcctcatgag

SEQ ID NO: 1239718 - DNA, 25 bp, Homo sapien
cagtttctcagcatgttccctctcc

SEQ ID NO: 1239719 - DNA, 25 bp, Homo sapien
agcatgttccctctcctcatgagat

SEQ ID NO: 1239720 - DNA, 25 bp, Homo sapien
tggtgaagaaagtatttggcaaagt

SEQ ID NO: 1239721 - DNA, 25 bp, Homo sapien
ctccatcgcattcagcccgctctcc

SEQ ID NO: 1239722 - DNA, 25 bp, Homo sapien
cccgctctcccagtcatcacagtct

SEQ ID NO: 1239723 - DNA, 25 bp, Homo sapien
tccaaatgtaatgcacactccatcg

SEQ ID NO: 1239724 - DNA, 25 bp, Homo sapien
gtagtgactgattcacacttttttc

SEQ ID NO: 1239725 - DNA, 25 bp, Homo sapien
tttgatggctttcacctgcttattc

SEQ ID NO: 1239726 - DNA, 25 bp, Homo sapien
tggctttcacctgcttattcaggta

SEQ ID NO: 1239727 - DNA, 25 bp, Homo sapien
atggctttcacctgcttattcaggt

SEQ ID NO: 1239728 - DNA, 25 bp, Homo sapien
attctttgatggctttcacctgctt

SEQ ID NO: 1239729 - DNA, 25 bp, Homo sapien
tgcttgtctaagaggtattccgccg

SEQ ID NO: 1239730 - DNA, 25 bp, Homo sapien
ctaagaggtattccgccgagccaga

SEQ ID NO: 1239731 - DNA, 25 bp, Homo sapien
gtctaagaggtattccgccgagcca

SEQ ID NO: 1239732 - DNA, 25 bp, Homo sapien
ttgtctaagaggtattccgccgagc

SEQ ID NO: 1239733 - DNA, 25 bp, Homo sapien
gcgctggtgacctgttcattctgct

SEQ ID NO: 1239734 - DNA, 25 bp, Homo sapien
gcactttacaactggccatggccag

SEQ ID NO: 1239735 - DNA, 25 bp, Homo sapien
gaaaggcagtaccaatcctgggact

SEQ ID NO: 1239736 - DNA, 25 bp, Homo sapien
ttcattctgcttgaccagggaagca

SEQ ID NO: 1239737 - DNA, 25 bp, Homo sapien
gaccacagtgacactgagagaattc

SEQ ID NO: 1239738 - DNA, 25 bp, Homo sapien
caaggaccacagtgacactgagaga

SEQ ID NO: 1239739 - DNA, 25 bp, Homo sapien
cacagtgacactgagagaattctac

SEQ ID NO: 1239740 - DNA, 25 bp, Homo sapien
aggaccacagtgacactgagagaat

SEQ ID NO: 1239741 - DNA, 25 bp, Homo sapien
cttctgcaaagactgtggttacaca

SEQ ID NO: 1239742 - DNA, 25 bp, Homo sapien
gggtcttgtatacactcatgtggta

SEQ ID NO: 1239743 - DNA, 25 bp, Homo sapien
agagaaagactactcttgccaccca

SEQ ID NO: 1239744 - DNA, 25 bp, Homo sapien
aaaggaaagacaaagggccgatgtg

SEQ ID NO: 1239745 - DNA, 25 bp, Homo sapien
gtgagggaggtatgtcactttttat

SEQ ID NO: 1239746 - DNA, 25 bp, Homo sapien
agttctatctttccgttgtccacca

SEQ ID NO: 1239747 - DNA, 25 bp, Homo sapien
gagtccttgatgagccttccactgg

SEQ ID NO: 1239748 - DNA, 25 bp, Homo sapien
ggctcagtgatttggggtcctaaga

SEQ ID NO: 1239749 - DNA, 25 bp, Homo sapien
tcaaccaatggatagataggaaagc

SEQ ID NO: 1239750 - DNA, 25 bp, Homo sapien
cacttgatctgaactgtaaccaaat

SEQ ID NO: 1239751 - DNA, 25 bp, Homo sapien
tgtttctttagagaatcaaggcaca

SEQ ID NO: 1239752 - DNA, 25 bp, Homo sapien
cataggtgctgtagaatagatgcca

SEQ ID NO: 1239753 - DNA, 25 bp, Homo sapien
ttgcagcatccacacggccatccgt

SEQ ID NO: 1239754 - DNA, 25 bp, Homo sapien
gggttgctcatcactagtccctttg

SEQ ID NO: 1239755 - DNA, 25 bp, Homo sapien
gccatccgtgttctggaactgaatc

SEQ ID NO: 1239756 - DNA, 25 bp, Homo sapien
ctcagggttgctcatcactagtccc

SEQ ID NO: 1239757 - DNA, 25 bp, Homo sapien
ttccctccagaaactgcagccctct

SEQ ID NO: 1239758 - DNA, 25 bp, Homo sapien
ttccaagctgagcacatgagcactc

SEQ ID NO: 1239759 - DNA, 25 bp, Homo sapien
tccaagctgagcacatgagcactcc

SEQ ID NO: 1239760 - DNA, 25 bp, Homo sapien
ctcccttttctagctcttccaagct

SEQ ID NO: 1239761 - DNA, 25 bp, Homo sapien
tggcttttctccaagttcccaccag

SEQ ID NO: 1239762 - DNA, 25 bp, Homo sapien
tattggcttttctccaagttcccac

SEQ ID NO: 1239763 - DNA, 25 bp, Homo sapien
gcttttctccaagttcccaccagta

SEQ ID NO: 1239764 - DNA, 25 bp, Homo sapien
ttttctccaagttcccaccagtatc

SEQ ID NO: 1239765 - DNA, 25 bp, Homo sapien
gccgcacggccagtagacaaaggcg

SEQ ID NO: 1239766 - DNA, 25 bp, Homo sapien
caagagggtgaccaccgcgcgactg

SEQ ID NO: 1239767 - DNA, 25 bp, Homo sapien
agcgccgtggatcccaagcgctctg

SEQ ID NO: 1239768 - DNA, 25 bp, Homo sapien
gggaggttccgctttctggcgccca

SEQ ID NO: 1239769 - DNA, 25 bp, Homo sapien
ggaggcgcctcgcagcggtcgggga

SEQ ID NO: 1239770 - DNA, 25 bp, Homo sapien
cgcctcgcagcggtcggggaacgcg

SEQ ID NO: 1239771 - DNA, 25 bp, Homo sapien
aggcgcctcgcagcggtcggggaac

SEQ ID NO: 1239772 - DNA, 25 bp, Homo sapien
cctcgcagcggtcggggaacgcggg

SEQ ID NO: 1239773 - DNA, 25 bp, Homo sapien
cttgacgccgcgcccctcggcaccc

SEQ ID NO: 1239774 - DNA, 25 bp, Homo sapien
cgcgcccctcggcaccccccgcacg

SEQ ID NO: 1239775 - DNA, 25 bp, Homo sapien
gcgcccctcggcaccccccgcacgc

SEQ ID NO: 1239776 - DNA, 25 bp, Homo sapien
tgacgccgcgcccctcggcaccccc

SEQ ID NO: 1239777 - DNA, 25 bp, Homo sapien
caggctcgtcttgcccaccgcgccg

SEQ ID NO: 1239778 - DNA, 25 bp, Homo sapien
ctcaccaccaggctcgtcttgccca

SEQ ID NO: 1239779 - DNA, 25 bp, Homo sapien
tagggatgtactcggtggggtagcc

SEQ ID NO: 1239780 - DNA, 25 bp, Homo sapien
agaagttgtcgaaggcagtagggat

SEQ ID NO: 1239781 - DNA, 25 bp, Homo sapien
tcacagagttggagtctcacgggcc

SEQ ID NO: 1239782 - DNA, 25 bp, Homo sapien
ctgtccggcagtgtcacagagttgg

SEQ ID NO: 1239783 - DNA, 25 bp, Homo sapien
agttggagtctcacgggccgcccat

SEQ ID NO: 1239784 - DNA, 25 bp, Homo sapien
gcagtgtcacagagttggagtctca

SEQ ID NO: 1239785 - DNA, 25 bp, Homo sapien
tgccaaaatcaagtacccctgggtg

SEQ ID NO: 1239786 - DNA, 25 bp, Homo sapien
cagatagtcatgtgatggcacctca

SEQ ID NO: 1239787 - DNA, 25 bp, Homo sapien
gaagtgctcccaagctatggcctgc

SEQ ID NO: 1239788 - DNA, 25 bp, Homo sapien
gcaacttggaagctctggcgtagat

SEQ ID NO: 1239789 - DNA, 25 bp, Homo sapien
tcagaaaacctgaccccctggtaga

SEQ ID NO: 1239790 - DNA, 25 bp, Homo sapien
ctggtagacaaagcatcctcacttc

SEQ ID NO: 1239791 - DNA, 25 bp, Homo sapien
ctcagaaaacctgaccccctggtag

SEQ ID NO: 1239792 - DNA, 25 bp, Homo sapien
tgaagatggttcttcttcaaaagtt

SEQ ID NO: 1239793 - DNA, 25 bp, Homo sapien
agtcacttaaccctcaaggctctta

SEQ ID NO: 1239794 - DNA, 25 bp, Homo sapien
ggctcttatgtcaactgcctagaag

SEQ ID NO: 1239795 - DNA, 25 bp, Homo sapien
gaagaggtatgtgttccttcctcca

SEQ ID NO: 1239796 - DNA, 25 bp, Homo sapien
actgcctagaagaggtatgtgttcc

SEQ ID NO: 1239797 - DNA, 25 bp, Homo sapien
tgtgctcacgttgattctccaggca

SEQ ID NO: 1239798 - DNA, 25 bp, Homo sapien
tcccatcaacttctgtgggaaaccc

SEQ ID NO: 1239799 - DNA, 25 bp, Homo sapien
tctgtgggaaacccacactccagct

SEQ ID NO: 1239800 - DNA, 25 bp, Homo sapien
atccccaagttctagcctatctgtg

SEQ ID NO: 1239801 - DNA, 25 bp, Homo sapien
gaaaagccaaagtacaagaagtgat

SEQ ID NO: 1239802 - DNA, 25 bp, Homo sapien
cagtgaactactcctatttccgcaa

SEQ ID NO: 1239803 - DNA, 25 bp, Homo sapien
cttcagcatgtagagccatccatac

SEQ ID NO: 1239804 - DNA, 25 bp, Homo sapien
tgacatcttatagactcgcctaccc

SEQ ID NO: 1239805 - DNA, 25 bp, Homo sapien
ctgcaaccaagcaaagtacccaaaa

SEQ ID NO: 1239806 - DNA, 25 bp, Homo sapien
gcaggtgatagaagacccgctggtt

SEQ ID NO: 1239807 - DNA, 25 bp, Homo sapien
tttcatgaaagggtctggcaggtga

SEQ ID NO: 1239808 - DNA, 25 bp, Homo sapien
tgcaaccaagcaaagtacccaaaag

SEQ ID NO: 1239809 - DNA, 25 bp, Homo sapien
tgaacactcgatgtaggaggcggct

SEQ ID NO: 1239810 - DNA, 25 bp, Homo sapien
gctttgggacagtggcatcgaatct

SEQ ID NO: 1239811 - DNA, 25 bp, Homo sapien
gcggctttgatttcctcggcgcaca

SEQ ID NO: 1239812 - DNA, 25 bp, Homo sapien
tgagatccgactgcgttccaactag

SEQ ID NO: 1239813 - DNA, 25 bp, Homo sapien
tgccagcgacgatggctgcatcaaa

SEQ ID NO: 1239814 - DNA, 25 bp, Homo sapien
tttggctgttgctgagtgtccgagt

SEQ ID NO: 1239815 - DNA, 25 bp, Homo sapien
tcatacgaaacagcagtacttcttc

SEQ ID NO: 1239816 - DNA, 25 bp, Homo sapien
tccgagtattgaatgccagcgacga

SEQ ID NO: 1239817 - DNA, 25 bp, Homo sapien
gaatacataaaattgagagctcctc

SEQ ID NO: 1239818 - DNA, 25 bp, Homo sapien
tctacgcagtaaaaggagttgtttc

SEQ ID NO: 1239819 - DNA, 25 bp, Homo sapien
taagtatctcatccctaagctcaaa

SEQ ID NO: 1239820 - DNA, 25 bp, Homo sapien
cactctcgatataggttctacgcag

SEQ ID NO: 1239821 - DNA, 25 bp, Homo sapien
tccacagataggtaagccaggcgcg

SEQ ID NO: 1239822 - DNA, 25 bp, Homo sapien
tacagagtgccatacagtcagtggg

SEQ ID NO: 1239823 - DNA, 25 bp, Homo sapien
tataaagctttcagaactgggccac

SEQ ID NO: 1239824 - DNA, 25 bp, Homo sapien
aagagtattcacctccctgccgaag

SEQ ID NO: 1239825 - DNA, 25 bp, Homo sapien
tgttgcacaactacccatgaaaatg

SEQ ID NO: 1239826 - DNA, 25 bp, Homo sapien
cattcaacagggtgccaattttcct

SEQ ID NO: 1239827 - DNA, 25 bp, Homo sapien
tctgtatggaacacaaccactgaga

SEQ ID NO: 1239828 - DNA, 25 bp, Homo sapien
cagggcatgtcagaagagcggtatc

SEQ ID NO: 1239829 - DNA, 25 bp, Homo sapien
tgaactccttgtgtatcagaaagtg

SEQ ID NO: 1239830 - DNA, 25 bp, Homo sapien
gccatcctcttaagctccaaagctg

SEQ ID NO: 1239831 - DNA, 25 bp, Homo sapien
cctctgaccacgagcatgtggccag

SEQ ID NO: 1239832 - DNA, 25 bp, Homo sapien
tcccagtctcggcacagacactgct

SEQ ID NO: 1239833 - DNA, 25 bp, Homo sapien
ttttgatgttctcttctatgctgct

SEQ ID NO: 1239834 - DNA, 25 bp, Homo sapien
tttgatgttctcttctatgctgctt

SEQ ID NO: 1239835 - DNA, 25 bp, Homo sapien
tagaaggtctgcgtgtgaccgcttg

SEQ ID NO: 1239836 - DNA, 25 bp, Homo sapien
cgcttgtggctgtcggtgccttgct

SEQ ID NO: 1239837 - DNA, 25 bp, Homo sapien
ccttcgaggtggaacccaagctggg

SEQ ID NO: 1239838 - DNA, 25 bp, Homo sapien
ccttgctgtagccttcgaggtggaa

SEQ ID NO: 1239839 - DNA, 25 bp, Homo sapien
taatggtaattttcccccagcctca

SEQ ID NO: 1239840 - DNA, 25 bp, Homo sapien
tgctgcaaattcttcagtgccacag

SEQ ID NO: 1239841 - DNA, 25 bp, Homo sapien
gtgccacagccacaatcaggagggc

SEQ ID NO: 1239842 - DNA, 25 bp, Homo sapien
agccacaatcaggagggccggcccc

SEQ ID NO: 1239843 - DNA, 25 bp, Homo sapien
cggccccagatgtgcgtgtgctcat

SEQ ID NO: 1239844 - DNA, 25 bp, Homo sapien
tagcacacagctcccgcattttgtc

SEQ ID NO: 1239845 - DNA, 25 bp, Homo sapien
agtcggtggtgcactcccacagcac

SEQ ID NO: 1239846 - DNA, 25 bp, Homo sapien
ccagcattctcatggtgatgttagc

SEQ ID NO: 1239847 - DNA, 25 bp, Homo sapien
tcacgcagtcggtttcacgcagtcg

SEQ ID NO: 1239848 - DNA, 25 bp, Homo sapien
ccacttatggacagggagctaagca

SEQ ID NO: 1239849 - DNA, 25 bp, Homo sapien
taatcatggcgatctagtaccaccc

SEQ ID NO: 1239850 - DNA, 25 bp, Homo sapien
gaactgagctaccacatctcttagg

SEQ ID NO: 1239851 - DNA, 25 bp, Homo sapien
tctaacaacagtcaaaagtccaggg

SEQ ID NO: 1239852 - DNA, 25 bp, Homo sapien
attcatatgggcctaggcttgggag

SEQ ID NO: 1239853 - DNA, 25 bp, Homo sapien
agggaatgtagaacaattgccatat

SEQ ID NO: 1239854 - DNA, 25 bp, Homo sapien
gaggaatcttggagggaatgtagaa

SEQ ID NO: 1239855 - DNA, 25 bp, Homo sapien
ggattctggagctaagtgaaaattc

SEQ ID NO: 1239856 - DNA, 25 bp, Homo sapien
tgttttcagagctccttcccacgct

SEQ ID NO: 1239857 - DNA, 25 bp, Homo sapien
ctccttcccacgctatcagacacat

SEQ ID NO: 1239858 - DNA, 25 bp, Homo sapien
ttttcagagctccttcccacgctat

SEQ ID NO: 1239859 - DNA, 25 bp, Homo sapien
ggtcctgttttcagagctccttccc

SEQ ID NO: 1239860 - DNA, 25 bp, Homo sapien
tttaatttgtggatctccctcttct

SEQ ID NO: 1239861 - DNA, 25 bp, Homo sapien
ttttaatttgtggatctccctcttc

SEQ ID NO: 1239862 - DNA, 25 bp, Homo sapien
ctccacagcaggtccagctcacctc

SEQ ID NO: 1239863 - DNA, 25 bp, Homo sapien
cacctccacagcaggtccagctcac

SEQ ID NO: 1239864 - DNA, 25 bp, Homo sapien
acagcaggtccagctcacctccaca

SEQ ID NO: 1239865 - DNA, 25 bp, Homo sapien
ccacagcaggtccagctcacctcca

SEQ ID NO: 1239866 - DNA, 25 bp, Homo sapien
aaaatgcataaacgcctctcgaggg

SEQ ID NO: 1239867 - DNA, 25 bp, Homo sapien
tcatgccagagtgttccagtaaaat

SEQ ID NO: 1239868 - DNA, 25 bp, Homo sapien
tctcgagggatatggaggcttgacc

SEQ ID NO: 1239869 - DNA, 25 bp, Homo sapien
tgccttccaggaagcggtgcctctg

SEQ ID NO: 1239870 - DNA, 25 bp, Homo sapien
tcaatggattgacaaaccagtccag

SEQ ID NO: 1239871 - DNA, 25 bp, Homo sapien
cagaatcagtgggaacagttgcatt

SEQ ID NO: 1239872 - DNA, 25 bp, Homo sapien
cctttgagtctaattagtaaatgac

SEQ ID NO: 1239873 - DNA, 25 bp, Homo sapien
tattagcttctggtgaggcagctgc

SEQ ID NO: 1239874 - DNA, 25 bp, Homo sapien
gctctggttcattacaatgctgaag

SEQ ID NO: 1239875 - DNA, 25 bp, Homo sapien
tacaatgctgaagtcactctgctta

SEQ ID NO: 1239876 - DNA, 25 bp, Homo sapien
cactctgcttatcagggacctttga

SEQ ID NO: 1239877 - DNA, 25 bp, Homo sapien
tgtgctctggttcattacaatgctg

SEQ ID NO: 1239878 - DNA, 25 bp, Homo sapien
tgcagaggcgcagattgtctccttg

SEQ ID NO: 1239879 - DNA, 25 bp, Homo sapien
ccaagcgcagggtgagtactggtac

SEQ ID NO: 1239880 - DNA, 25 bp, Homo sapien
taagtgagactcaccacagcagcct

SEQ ID NO: 1239881 - DNA, 25 bp, Homo sapien
caaggatagtccaatgcacgggcaa

SEQ ID NO: 1239882 - DNA, 25 bp, Homo sapien
taatgttggcttcacacagcggaag

SEQ ID NO: 1239883 - DNA, 25 bp, Homo sapien
ggaagccctggcatagaaattgtct

SEQ ID NO: 1239884 - DNA, 25 bp, Homo sapien
tcagattaattgcatcaagagtagc

SEQ ID NO: 1239885 - DNA, 25 bp, Homo sapien
taagccatgtcgaatgttatcgcac

SEQ ID NO: 1239886 - DNA, 25 bp, Homo sapien
taaatggcacgctgaatggcactca

SEQ ID NO: 1239887 - DNA, 25 bp, Homo sapien
tgtttggttcagaccgcacagtccc

SEQ ID NO: 1239888 - DNA, 25 bp, Homo sapien
gattagacgggttactcagagccag

SEQ ID NO: 1239889 - DNA, 25 bp, Homo sapien
caatttccacgaggtggctaagggc

SEQ ID NO: 1239890 - DNA, 25 bp, Homo sapien
ccagggacaacctatgggaagacag

SEQ ID NO: 1239891 - DNA, 25 bp, Homo sapien
tctctggtgcccgtgcagaagctgg

SEQ ID NO: 1239892 - DNA, 25 bp, Homo sapien
gaatgaataaacgtagcccttaagc

SEQ ID NO: 1239893 - DNA, 25 bp, Homo sapien
tgagattctaacaggacccagggac

SEQ ID NO: 1239894 - DNA, 25 bp, Homo sapien
tcatgtgcccacagtactcgggaga

SEQ ID NO: 1239895 - DNA, 25 bp, Homo sapien
gcagtggtccctaaaatggataccc

SEQ ID NO: 1239896 - DNA, 25 bp, Homo sapien
taagcaactcagtgggagcaggcaa

SEQ ID NO: 1239897 - DNA, 25 bp, Homo sapien
gcagcacctgaacactagttagaaa

SEQ ID NO: 1239898 - DNA, 25 bp, Homo sapien
ctacacttctaacagctcctcctct

SEQ ID NO: 1239899 - DNA, 25 bp, Homo sapien
gctcctcctctgcatctgaaccatt

SEQ ID NO: 1239900 - DNA, 25 bp, Homo sapien
aacagctcctcctctgcatctgaac

SEQ ID NO: 1239901 - DNA, 25 bp, Homo sapien
cagctcctcctctgcatctgaacca

SEQ ID NO: 1239902 - DNA, 25 bp, Homo sapien
ccgccgaaaagactccaagggtcat

SEQ ID NO: 1239903 - DNA, 25 bp, Homo sapien
cgccgaaaagactccaagggtcatt

SEQ ID NO: 1239904 - DNA, 25 bp, Homo sapien
cgaaaagactccaagggtcattcat

SEQ ID NO: 1239905 - DNA, 25 bp, Homo sapien
gccgaaaagactccaagggtcattc

SEQ ID NO: 1239906 - DNA, 25 bp, Homo sapien
agcatcactacctgatcctcttcag

SEQ ID NO: 1239907 - DNA, 25 bp, Homo sapien
agccacagcatcactacctgatcct

SEQ ID NO: 1239908 - DNA, 25 bp, Homo sapien
gccacagcatcactacctgatcctc

SEQ ID NO: 1239909 - DNA, 25 bp, Homo sapien
tggagatgccatgctaagttgtagc

SEQ ID NO: 1239910 - DNA, 25 bp, Homo sapien
tttctctgcctatctcatctggaga

SEQ ID NO: 1239911 - DNA, 25 bp, Homo sapien
ggctggcccttgtccggcttttctc

SEQ ID NO: 1239912 - DNA, 25 bp, Homo sapien
tctttccatgggcaacgaccacatg

SEQ ID NO: 1239913 - DNA, 25 bp, Homo sapien
tgtgatgtaccagcaaaatctcaga

SEQ ID NO: 1239914 - DNA, 25 bp, Homo sapien
agaagggaaagccaacagcagttca

SEQ ID NO: 1239915 - DNA, 25 bp, Homo sapien
ttcactggggtctcgaagggctttg

SEQ ID NO: 1239916 - DNA, 25 bp, Homo sapien
ggaaagccaacagcagttcactggg

SEQ ID NO: 1239917 - DNA, 25 bp, Homo sapien
gttgattcttgagataaccaccaag

SEQ ID NO: 1239918 - DNA, 25 bp, Homo sapien
tgagtaattggcatctcatacttgg

SEQ ID NO: 1239919 - DNA, 25 bp, Homo sapien
tctatatgggacagtggaatgagta

SEQ ID NO: 1239920 - DNA, 25 bp, Homo sapien
ttatgaaggctcagcactagatgct

SEQ ID NO: 1239921 - DNA, 25 bp, Homo sapien
aatgttgcaccctggctcttgaata

SEQ ID NO: 1239922 - DNA, 25 bp, Homo sapien
atcagtccagtctgaggtttaaatg

SEQ ID NO: 1239923 - DNA, 25 bp, Homo sapien
cagatggttcagcccaacagcattc

SEQ ID NO: 1239924 - DNA, 25 bp, Homo sapien
cacctttggaatatgcagtagagac

SEQ ID NO: 1239925 - DNA, 25 bp, Homo sapien
tggaaagagttccttgactagcgtt

SEQ ID NO: 1239926 - DNA, 25 bp, Homo sapien
gcaggaacccattggtggaaagagt

SEQ ID NO: 1239927 - DNA, 25 bp, Homo sapien
gttccttgactagcgttgagggaga

SEQ ID NO: 1239928 - DNA, 25 bp, Homo sapien
gaaagagttccttgactagcgttga

SEQ ID NO: 1239929 - DNA, 25 bp, Homo sapien
tcaggcgtggctggctgtgactcat

SEQ ID NO: 1239930 - DNA, 25 bp, Homo sapien
caggcgtggctggctgtgactcatc

SEQ ID NO: 1239931 - DNA, 25 bp, Homo sapien
ctcaggcgtggctggctgtgactca

SEQ ID NO: 1239932 - DNA, 25 bp, Homo sapien
gcaggtagtcgtggcttgcactgtg

SEQ ID NO: 1239933 - DNA, 25 bp, Homo sapien
gctgttcccccagcctctacacagc

SEQ ID NO: 1239934 - DNA, 25 bp, Homo sapien
agcaggtagtcgtggcttgcactgt

SEQ ID NO: 1239935 - DNA, 25 bp, Homo sapien
agagcaggtagtcgtggcttgcact

SEQ ID NO: 1239936 - DNA, 25 bp, Homo sapien
tctggtgggcaggggcgagggtcac

SEQ ID NO: 1239937 - DNA, 25 bp, Homo sapien
gtgggcaggggcgagggtcacaagg

SEQ ID NO: 1239938 - DNA, 25 bp, Homo sapien
gaaggaaattcacagggttaatcac

SEQ ID NO: 1239939 - DNA, 25 bp, Homo sapien
gagaaggaaattcacagggttaatc

SEQ ID NO: 1239940 - DNA, 25 bp, Homo sapien
ggaaccatactgacataaaggagga

SEQ ID NO: 1239941 - DNA, 25 bp, Homo sapien
gcttagcgtcaaaatgaggaacatg

SEQ ID NO: 1239942 - DNA, 25 bp, Homo sapien
agaggattgcacagatcccagaggg

SEQ ID NO: 1239943 - DNA, 25 bp, Homo sapien
agctttcatcagcttagcgtcaaaa

SEQ ID NO: 1239944 - DNA, 25 bp, Homo sapien
tctgatgtgtccttaggtggcccac

SEQ ID NO: 1239945 - DNA, 25 bp, Homo sapien
tatgaactcagtcagcacgtcggtg

SEQ ID NO: 1239946 - DNA, 25 bp, Homo sapien
ttatctcgtaaagaaggcgctagct

SEQ ID NO: 1239947 - DNA, 25 bp, Homo sapien
agtctttcacaaagcagggcgcgcg

SEQ ID NO: 1239948 - DNA, 25 bp, Homo sapien
gaccagcagtctagaaatcgtttct

SEQ ID NO: 1239949 - DNA, 25 bp, Homo sapien
tcgtttcttagtgatgctaaagggc

SEQ ID NO: 1239950 - DNA, 25 bp, Homo sapien
aggacagaccagcagtctagaaatc

SEQ ID NO: 1239951 - DNA, 25 bp, Homo sapien
ctagtgcctgttatatcttgtgagt

SEQ ID NO: 1239952 - DNA, 25 bp, Homo sapien
ttgatggcgatgttggacgtgaagg

SEQ ID NO: 1239953 - DNA, 25 bp, Homo sapien
gccctgggtgcgttgatggcgatgt

SEQ ID NO: 1239954 - DNA, 25 bp, Homo sapien
cgatgttggacgtgaaggtgtctgt

SEQ ID NO: 1239955 - DNA, 25 bp, Homo sapien
tgccctgggtgcgttgatggcgatg

SEQ ID NO: 1239956 - DNA, 25 bp, Homo sapien
atagggaaggactgcgcaatttgct

SEQ ID NO: 1239957 - DNA, 25 bp, Homo sapien
tgtttctttaaggagtggagcatct

SEQ ID NO: 1239958 - DNA, 25 bp, Homo sapien
aaggactgcgcaatttgctgtttct

SEQ ID NO: 1239959 - DNA, 25 bp, Homo sapien
ggaaggactgcgcaatttgctgttt

SEQ ID NO: 1239960 - DNA, 25 bp, Homo sapien
tgctgcctgtggtagctcctccacc

SEQ ID NO: 1239961 - DNA, 25 bp, Homo sapien
ggaacggggtagcagatccctggag

SEQ ID NO: 1239962 - DNA, 25 bp, Homo sapien
agtgtcctcgggtcacagctctcag

SEQ ID NO: 1239963 - DNA, 25 bp, Homo sapien
caggagggtggagtgggtcccggag

SEQ ID NO: 1239964 - DNA, 25 bp, Homo sapien
gctcatctgccgcacagatggctgt

SEQ ID NO: 1239965 - DNA, 25 bp, Homo sapien
tgccgcacagatggctgtctgagct

SEQ ID NO: 1239966 - DNA, 25 bp, Homo sapien
gtgtgcagctcatctgccgcacaga

SEQ ID NO: 1239967 - DNA, 25 bp, Homo sapien
tctgccgcacagatggctgtctgag

SEQ ID NO: 1239968 - DNA, 25 bp, Homo sapien
cccactttaaaaaactcagcacctg

SEQ ID NO: 1239969 - DNA, 25 bp, Homo sapien
cactttaaaaaactcagcacctggc

SEQ ID NO: 1239970 - DNA, 25 bp, Homo sapien
taaaaaactcagcacctggcctcat

SEQ ID NO: 1239971 - DNA, 25 bp, Homo sapien
tttaaaaaactcagcacctggcctc

SEQ ID NO: 1239972 - DNA, 25 bp, Homo sapien
cagggtgaaggcagccccgttgggc

SEQ ID NO: 1239973 - DNA, 25 bp, Homo sapien
gtgtcagggtgaaggcagccccgtt

SEQ ID NO: 1239974 - DNA, 25 bp, Homo sapien
aggcagccccgttgggctgcagttt

SEQ ID NO: 1239975 - DNA, 25 bp, Homo sapien
gaaggcagccccgttgggctgcagt

SEQ ID NO: 1239976 - DNA, 25 bp, Homo sapien
agtataagaaaggccattacagccc

SEQ ID NO: 1239977 - DNA, 25 bp, Homo sapien
cagtataagaaaggccattacagcc

SEQ ID NO: 1239978 - DNA, 25 bp, Homo sapien
tacagtataagaaaggccattacag

SEQ ID NO: 1239979 - DNA, 25 bp, Homo sapien
ctacagtataagaaaggccattaca

SEQ ID NO: 1239980 - DNA, 25 bp, Homo sapien
tgttcctaaaagtgttagctgggct

SEQ ID NO: 1239981 - DNA, 25 bp, Homo sapien
ttctgttcctaaaagtgttagctgg

SEQ ID NO: 1239982 - DNA, 25 bp, Homo sapien
tgggctttcttttcgatgaatactc

SEQ ID NO: 1239983 - DNA, 25 bp, Homo sapien
tagtccatttctgttcctaaaagtg

SEQ ID NO: 1239984 - DNA, 25 bp, Homo sapien
ggtttctcgacagccacaagttcct

SEQ ID NO: 1239985 - DNA, 25 bp, Homo sapien
atattaaaggtttctcgacagccac

SEQ ID NO: 1239986 - DNA, 25 bp, Homo sapien
aaaggtttctcgacagccacaagtt

SEQ ID NO: 1239987 - DNA, 25 bp, Homo sapien
aatattaaaggtttctcgacagcca

SEQ ID NO: 1239988 - DNA, 25 bp, Homo sapien
cgaggctcctgcctggtccgatgac

SEQ ID NO: 1239989 - DNA, 25 bp, Homo sapien
tcaccgtgacacatgcagaccacga

SEQ ID NO: 1239990 - DNA, 25 bp, Homo sapien
atgcagaccacgaggctcctgcctg

SEQ ID NO: 1239991 - DNA, 25 bp, Homo sapien
ggtccgatgacccacagctgtgaac

SEQ ID NO: 1239992 - DNA, 25 bp, Homo sapien
tgggtcggtgccagcagagtaggag

SEQ ID NO: 1239993 - DNA, 25 bp, Homo sapien
gagtaggagccccaagcatgaaaag

SEQ ID NO: 1239994 - DNA, 25 bp, Homo sapien
gtgtagcgcctggagctgcggagca

SEQ ID NO: 1239995 - DNA, 25 bp, Homo sapien
cacaatcttagacggcgtgggtcgg

SEQ ID NO: 1239996 - DNA, 25 bp, Homo sapien
ccacaggagctgtcccagaccccat

SEQ ID NO: 1239997 - DNA, 25 bp, Homo sapien
ggagacagccacaggagctgtccca

SEQ ID NO: 1239998 - DNA, 25 bp, Homo sapien
gacagccacaggagctgtcccagac

SEQ ID NO: 1239999 - DNA, 25 bp, Homo sapien
tgaggagacagccacaggagctgtc

SEQ ID NO: 1240000 - DNA, 25 bp, Homo sapien
tatttgtaaaaggatgcggctgctc

SEQ ID NO: 1240001 - DNA, 25 bp, Homo sapien
tttttcttgcatcgtggcagctatg

SEQ ID NO: 1240002 - DNA, 25 bp, Homo sapien
ggcagctatggaaaacggcattcat

SEQ ID NO: 1240003 - DNA, 25 bp, Homo sapien
ttgtaaaaggatgcggctgctcacg

SEQ ID NO: 1240004 - DNA, 25 bp, Homo sapien
agcaggccgtgaggctgccaagccc

SEQ ID NO: 1240005 - DNA, 25 bp, Homo sapien
cagtaagctgaacaagagcaggccg

SEQ ID NO: 1240006 - DNA, 25 bp, Homo sapien
taagctgaacaagagcaggccgtga

SEQ ID NO: 1240007 - DNA, 25 bp, Homo sapien
cacactcagtaagctgaacaagagc

SEQ ID NO: 1240008 - DNA, 25 bp, Homo sapien
tttccagattcacaggaaactgctt

SEQ ID NO: 1240009 - DNA, 25 bp, Homo sapien
tgtctctttccagattcacaggaaa

SEQ ID NO: 1240010 - DNA, 25 bp, Homo sapien
ggaaactgcttgaaagcggggtcca

SEQ ID NO: 1240011 - DNA, 25 bp, Homo sapien
tgttgtctctttccagattcacagg

SEQ ID NO: 1240012 - DNA, 25 bp, Homo sapien
tgagtatgatatttggcaccttctt

SEQ ID NO: 1240013 - DNA, 25 bp, Homo sapien
ttaaaagagttctgagtatgatatt

SEQ ID NO: 1240014 - DNA, 25 bp, Homo sapien
tctgagtatgatatttggcaccttc

SEQ ID NO: 1240015 - DNA, 25 bp, Homo sapien
gagttctgagtatgatatttggcac

SEQ ID NO: 1240016 - DNA, 25 bp, Homo sapien
cattaatagggttggaatacgtgcc

SEQ ID NO: 1240017 - DNA, 25 bp, Homo sapien
catatgaagggatgtatgagcccat

SEQ ID NO: 1240018 - DNA, 25 bp, Homo sapien
gcagctctggagtactttgattgtc

SEQ ID NO: 1240019 - DNA, 25 bp, Homo sapien
tgctcttgtactttgaatccaccag

SEQ ID NO: 1240020 - DNA, 25 bp, Homo sapien
atgtccagggcagacgatcggcagc

SEQ ID NO: 1240021 - DNA, 25 bp, Homo sapien
ccatgtccagggcagacgatcggca

SEQ ID NO: 1240022 - DNA, 25 bp, Homo sapien
ccagggcagacgatcggcagccaca

SEQ ID NO: 1240023 - DNA, 25 bp, Homo sapien
gtccagggcagacgatcggcagcca

SEQ ID NO: 1240024 - DNA, 25 bp, Homo sapien
caggacgctccaggtttgggtggtg

SEQ ID NO: 1240025 - DNA, 25 bp, Homo sapien
agtgagtgtcctgcgtctcccctgg

SEQ ID NO: 1240026 - DNA, 25 bp, Homo sapien
cagaaattcgcagtgagtgtcctgc

SEQ ID NO: 1240027 - DNA, 25 bp, Homo sapien
cagcccttcagaaattcgcagtgag

SEQ ID NO: 1240028 - DNA, 25 bp, Homo sapien
tgtaacatcctgagagcatgcatcc

SEQ ID NO: 1240029 - DNA, 25 bp, Homo sapien
cagagtccccgtccttatggagcat

SEQ ID NO: 1240030 - DNA, 25 bp, Homo sapien
gagcatgctttccaggcactaagta

SEQ ID NO: 1240031 - DNA, 25 bp, Homo sapien
taagtagtggtatggaccttggcca

SEQ ID NO: 1240032 - DNA, 25 bp, Homo sapien
acgagcaggggccacctgacagcga

SEQ ID NO: 1240033 - DNA, 25 bp, Homo sapien
gatggtctagggctggctcagccac

SEQ ID NO: 1240034 - DNA, 25 bp, Homo sapien
ggtctgcctattggatctggatggt

SEQ ID NO: 1240035 - DNA, 25 bp, Homo sapien
tcagccacgagcaggggccacctga

SEQ ID NO: 1240036 - DNA, 25 bp, Homo sapien
ccatctttgctcaggtctgaattct

SEQ ID NO: 1240037 - DNA, 25 bp, Homo sapien
catctttgctcaggtctgaattctc

SEQ ID NO: 1240038 - DNA, 25 bp, Homo sapien
atctttgctcaggtctgaattctca

SEQ ID NO: 1240039 - DNA, 25 bp, Homo sapien
tggcttgcaagccatgcttcctcat

SEQ ID NO: 1240040 - DNA, 25 bp, Homo sapien
cctggcttgcaagccatgcttcctc

SEQ ID NO: 1240041 - DNA, 25 bp, Homo sapien
gcctccctggcttgcaagccatgct

SEQ ID NO: 1240042 - DNA, 25 bp, Homo sapien
tccctggcttgcaagccatgcttcc

SEQ ID NO: 1240043 - DNA, 25 bp, Homo sapien
gctcagtgcggcctctttgagggcc

SEQ ID NO: 1240044 - DNA, 25 bp, Homo sapien
ttggacgctcagtgcggcctctttg

SEQ ID NO: 1240045 - DNA, 25 bp, Homo sapien
cagtgcggcctctttgagggccagt

SEQ ID NO: 1240046 - DNA, 25 bp, Homo sapien
gcggcctctttgagggccagttttc

SEQ ID NO: 1240047 - DNA, 25 bp, Homo sapien
tcttctgaccttttagtggaggcat

SEQ ID NO: 1240048 - DNA, 25 bp, Homo sapien
ttcttctgaccttttagtggaggca

SEQ ID NO: 1240049 - DNA, 25 bp, Homo sapien
caggactcccacttagtgcagattt

SEQ ID NO: 1240050 - DNA, 25 bp, Homo sapien
tggtctcgacacctcagcttgagtg

SEQ ID NO: 1240051 - DNA, 25 bp, Homo sapien
cctctgggatgtggtctcgacacct

SEQ ID NO: 1240052 - DNA, 25 bp, Homo sapien
ccctctgggatgtggtctcgacacc

SEQ ID NO: 1240053 - DNA, 25 bp, Homo sapien
ccagaggaggctttgtgacgaggtc

SEQ ID NO: 1240054 - DNA, 25 bp, Homo sapien
tttgtgacgaggtcctggccatggg

SEQ ID NO: 1240055 - DNA, 25 bp, Homo sapien
cagaggaggctttgtgacgaggtcc

SEQ ID NO: 1240056 - DNA, 25 bp, Homo sapien
gaggaggctttgtgacgaggtcctg

SEQ ID NO: 1240057 - DNA, 25 bp, Homo sapien
cttgcttgggcaagtttctgtccca

SEQ ID NO: 1240058 - DNA, 25 bp, Homo sapien
tgggcaagtttctgtcccatcccat

SEQ ID NO: 1240059 - DNA, 25 bp, Homo sapien
tgcttgggcaagtttctgtcccatc

SEQ ID NO: 1240060 - DNA, 25 bp, Homo sapien
cttgggcaagtttctgtcccatccc

SEQ ID NO: 1240061 - DNA, 25 bp, Homo sapien
cctgggctgatggacttgctttgca

SEQ ID NO: 1240062 - DNA, 25 bp, Homo sapien
tcttggatatgagtagggtgctgcc

SEQ ID NO: 1240063 - DNA, 25 bp, Homo sapien
gcagggcatgctttgggtcatcagt

SEQ ID NO: 1240064 - DNA, 25 bp, Homo sapien
tgccgacaggcagaaacgtctcttg

SEQ ID NO: 1240065 - DNA, 25 bp, Homo sapien
tctgtcatgaaatggagcacacagc

SEQ ID NO: 1240066 - DNA, 25 bp, Homo sapien
caatactacaatgcatctggcccca

SEQ ID NO: 1240067 - DNA, 25 bp, Homo sapien
ccacagctagcggttgatagatgca

SEQ ID NO: 1240068 - DNA, 25 bp, Homo sapien
ttcacttgaacactaggtcccacag

SEQ ID NO: 1240069 - DNA, 25 bp, Homo sapien
cagcgaatgagggccatcatcatct

SEQ ID NO: 1240070 - DNA, 25 bp, Homo sapien
agcgaatgagggccatcatcatctt

SEQ ID NO: 1240071 - DNA, 25 bp, Homo sapien
tcagcgaatgagggccatcatcatc

SEQ ID NO: 1240072 - DNA, 25 bp, Homo sapien
gctacagagagtttgcgaatttcct

SEQ ID NO: 1240073 - DNA, 25 bp, Homo sapien
tatttcagttgttgctagccccgag

SEQ ID NO: 1240074 - DNA, 25 bp, Homo sapien
ccttcaaaaggagccacctattatg

SEQ ID NO: 1240075 - DNA, 25 bp, Homo sapien
gaacccaataagttcagcaccaggg

SEQ ID NO: 1240076 - DNA, 25 bp, Homo sapien
caaagatgctcttctgtcagcttat

SEQ ID NO: 1240077 - DNA, 25 bp, Homo sapien
gatgctcttctgtcagcttatcata

SEQ ID NO: 1240078 - DNA, 25 bp, Homo sapien
cttctgtacaaagatgctcttctgt

SEQ ID NO: 1240079 - DNA, 25 bp, Homo sapien
tgctgatcttctgtacaaagatgct

SEQ ID NO: 1240080 - DNA, 25 bp, Homo sapien
tgtaggttatccaaatcccgtgtaa

SEQ ID NO: 1240081 - DNA, 25 bp, Homo sapien
tgggagtccccaaacaagagccggc

SEQ ID NO: 1240082 - DNA, 25 bp, Homo sapien
ggcattcgcaggcttggaagtcgcc

SEQ ID NO: 1240083 - DNA, 25 bp, Homo sapien
caagaattgtaggttatccaaatcc

SEQ ID NO: 1240084 - DNA, 25 bp, Homo sapien
tgggacaccagactgcatggttgat

SEQ ID NO: 1240085 - DNA, 25 bp, Homo sapien
gcatggttgattaagtgaaaccgga

SEQ ID NO: 1240086 - DNA, 25 bp, Homo sapien
cagactgcatggttgattaagtgaa

SEQ ID NO: 1240087 - DNA, 25 bp, Homo sapien
taagtgaaaccggagctttgtgccc

SEQ ID NO: 1240088 - DNA, 25 bp, Homo sapien
ctgccaacacaaatggatggcttgt

SEQ ID NO: 1240089 - DNA, 25 bp, Homo sapien
caaatgctgccaacacaaatggatg

SEQ ID NO: 1240090 - DNA, 25 bp, Homo sapien
tgctgccaacacaaatggatggctt

SEQ ID NO: 1240091 - DNA, 25 bp, Homo sapien
aatgctgccaacacaaatggatggc

SEQ ID NO: 1240092 - DNA, 25 bp, Homo sapien
ttctcatctttgtctcagtggtgtg

SEQ ID NO: 1240093 - DNA, 25 bp, Homo sapien
gccacacctatttgtgcccacagag

SEQ ID NO: 1240094 - DNA, 25 bp, Homo sapien
gttgaacatggtccctgtggaatgg

SEQ ID NO: 1240095 - DNA, 25 bp, Homo sapien
tcagtggtgtggtttggttgaacat

SEQ ID NO: 1240096 - DNA, 25 bp, Homo sapien
ccttgggaagacagcactttttcca

SEQ ID NO: 1240097 - DNA, 25 bp, Homo sapien
tccagggcagttgctatttggctct

SEQ ID NO: 1240098 - DNA, 25 bp, Homo sapien
cttgggaagacagcactttttccag

SEQ ID NO: 1240099 - DNA, 25 bp, Homo sapien
tttttccagggcagttgctatttgg

SEQ ID NO: 1240100 - DNA, 25 bp, Homo sapien
cagcaggtgtcactgtccccatgaa

SEQ ID NO: 1240101 - DNA, 25 bp, Homo sapien
ttagaaagacctgggacctggtagc

SEQ ID NO: 1240102 - DNA, 25 bp, Homo sapien
catgtgccgcatgggatgaagtcag

SEQ ID NO: 1240103 - DNA, 25 bp, Homo sapien
cctggtagcaggtccatgtgccgca

SEQ ID NO: 1240104 - DNA, 25 bp, Homo sapien
tcctctagtaaatctgctgatattt

SEQ ID NO: 1240105 - DNA, 25 bp, Homo sapien
tgattgtctcttggagatacttagt

SEQ ID NO: 1240106 - DNA, 25 bp, Homo sapien
tttccccttgattgtctcttggaga

SEQ ID NO: 1240107 - DNA, 25 bp, Homo sapien
aaagtgctgtgccatgattttcccc

SEQ ID NO: 1240108 - DNA, 25 bp, Homo sapien
tttggaagttaagagctccctcctc

SEQ ID NO: 1240109 - DNA, 25 bp, Homo sapien
atagttcctggactgggtggttttg

SEQ ID NO: 1240110 - DNA, 25 bp, Homo sapien
tggaagttaagagctccctcctcta

SEQ ID NO: 1240111 - DNA, 25 bp, Homo sapien
gaagttaagagctccctcctctata

SEQ ID NO: 1240112 - DNA, 25 bp, Homo sapien
tccttctctaaagagcagatttcca

SEQ ID NO: 1240113 - DNA, 25 bp, Homo sapien
tctttttccttgtatcatttccttc

SEQ ID NO: 1240114 - DNA, 25 bp, Homo sapien
ttctctaaagagcagatttccatct

SEQ ID NO: 1240115 - DNA, 25 bp, Homo sapien
tgcagatgtctttttccttgtatca

SEQ ID NO: 1240116 - DNA, 25 bp, Homo sapien
aactgtggccctgacgtatggaggc

SEQ ID NO: 1240117 - DNA, 25 bp, Homo sapien
tattgcggtcatcactgagcacgtg

SEQ ID NO: 1240118 - DNA, 25 bp, Homo sapien
ggaaggcccataaactgctcagtat

SEQ ID NO: 1240119 - DNA, 25 bp, Homo sapien
tattgcaagttaccccacgctagaa

SEQ ID NO: 1240120 - DNA, 25 bp, Homo sapien
ttagaacaggattctaaagcctggt

SEQ ID NO: 1240121 - DNA, 25 bp, Homo sapien
tgttcatggcaaaggaagttagttc

SEQ ID NO: 1240122 - DNA, 25 bp, Homo sapien
ccagaatgggttaaatctaaggcag

SEQ ID NO: 1240123 - DNA, 25 bp, Homo sapien
cccatcgctacaaaatacttcaaag

SEQ ID NO: 1240124 - DNA, 25 bp, Homo sapien
ggccatctgggcgcatatacgtgca

SEQ ID NO: 1240125 - DNA, 25 bp, Homo sapien
aggtgctcagtgagggtggtttttg

SEQ ID NO: 1240126 - DNA, 25 bp, Homo sapien
ctcagtgagggtggtttttgagcca

SEQ ID NO: 1240127 - DNA, 25 bp, Homo sapien
tctgggcgcatatacgtgcaagtca

SEQ ID NO: 1240128 - DNA, 25 bp, Homo sapien
catctgggcgtatacgtgcaagtca

SEQ ID NO: 1240129 - DNA, 25 bp, Homo sapien
tgggggtggtttttgagccaggatg

SEQ ID NO: 1240130 - DNA, 25 bp, Homo sapien
tctgggcgtatacgtgcaagtcaca

SEQ ID NO: 1240131 - DNA, 25 bp, Homo sapien
gactttcacaaggtaacgtcatcac

SEQ ID NO: 1240132 - DNA, 25 bp, Homo sapien
gcattggtgattttaaacagcagca

SEQ ID NO: 1240133 - DNA, 25 bp, Homo sapien
acttcactttggtgtaggcagagta

SEQ ID NO: 1240134 - DNA, 25 bp, Homo sapien
agtactttctgcaggttttctcata

SEQ ID NO: 1240135 - DNA, 25 bp, Homo sapien
cagcaggattaccaaaaatggcaat

SEQ ID NO: 1240136 - DNA, 25 bp, Homo sapien
tgtttggttttctgacacgtgtgcc

SEQ ID NO: 1240137 - DNA, 25 bp, Homo sapien
tgcaggtagtcgtgaaattgtttgg

SEQ ID NO: 1240138 - DNA, 25 bp, Homo sapien
ctgaaagtgtgcaggtagtcgtgaa

SEQ ID NO: 1240139 - DNA, 25 bp, Homo sapien
tctgacacgtgtgccttcagcatgc

SEQ ID NO: 1240140 - DNA, 25 bp, Homo sapien
gccttggagaacctggtaagcactg

SEQ ID NO: 1240141 - DNA, 25 bp, Homo sapien
gatcaggactctttccgcgtttcgg

SEQ ID NO: 1240142 - DNA, 25 bp, Homo sapien
taagggaagtacaaactggcagggc

SEQ ID NO: 1240143 - DNA, 25 bp, Homo sapien
tcattgccgggtccatttcacaggc

SEQ ID NO: 1240144 - DNA, 25 bp, Homo sapien
tgccagtgcctctcaatggcagaag

SEQ ID NO: 1240145 - DNA, 25 bp, Homo sapien
gtgcctctcaatggcagaagctaga

SEQ ID NO: 1240146 - DNA, 25 bp, Homo sapien
tccaaatatcagctacctgccagtg

SEQ ID NO: 1240147 - DNA, 25 bp, Homo sapien
aaatatcagctacctgccagtgcct

SEQ ID NO: 1240148 - DNA, 25 bp, Homo sapien
tcgcccagctggccctctggttggt

SEQ ID NO: 1240149 - DNA, 25 bp, Homo sapien
gcccagctggccctctggttggtgc

SEQ ID NO: 1240150 - DNA, 25 bp, Homo sapien
cccagctggccctctggttggtgca

SEQ ID NO: 1240151 - DNA, 25 bp, Homo sapien
agctcgcccagctggccctctggtt

SEQ ID NO: 1240152 - DNA, 25 bp, Homo sapien
cctgctgctgatgcagaggccaggg

SEQ ID NO: 1240153 - DNA, 25 bp, Homo sapien
gctgatgcagaggccaggggacgca

SEQ ID NO: 1240154 - DNA, 25 bp, Homo sapien
ctgatgcagaggccaggggacgcac

SEQ ID NO: 1240155 - DNA, 25 bp, Homo sapien
tctcctgctgctgatgcagaggcca

SEQ ID NO: 1240156 - DNA, 25 bp, Homo sapien
tccgacagtccatgatgaagttcct

SEQ ID NO: 1240157 - DNA, 25 bp, Homo sapien
tcatgacctagatccttggcacttc

SEQ ID NO: 1240158 - DNA, 25 bp, Homo sapien
gtgcctgctggctggatccgacagt

SEQ ID NO: 1240159 - DNA, 25 bp, Homo sapien
cacagtccagtacactgaagatggc

SEQ ID NO: 1240160 - DNA, 25 bp, Homo sapien
tcaagttccgagtgtttctggtagc

SEQ ID NO: 1240161 - DNA, 25 bp, Homo sapien
tgtcttagtgtagtgcccagcatat

SEQ ID NO: 1240162 - DNA, 25 bp, Homo sapien
aaagctctggcataggtttgggccg

SEQ ID NO: 1240163 - DNA, 25 bp, Homo sapien
ccgttgtgaagctgacgtgggcttc

SEQ ID NO: 1240164 - DNA, 25 bp, Homo sapien
ccatccccgtgtgtgagaaggctca

SEQ ID NO: 1240165 - DNA, 25 bp, Homo sapien
gcccgaatgtgcagagtccctaaca

SEQ ID NO: 1240166 - DNA, 25 bp, Homo sapien
tacgcggtgcatttctctttgacgg

SEQ ID NO: 1240167 - DNA, 25 bp, Homo sapien
aatggttcctcttcgtgtgtacgcg

SEQ ID NO: 1240168 - DNA, 25 bp, Homo sapien
ctttactggccaagatacaaagccc

SEQ ID NO: 1240169 - DNA, 25 bp, Homo sapien
ggaggtactttgcacagcttagagc

SEQ ID NO: 1240170 - DNA, 25 bp, Homo sapien
tgtaccaccatagaactcggctcag

SEQ ID NO: 1240171 - DNA, 25 bp, Homo sapien
cagacaattacttacgggctcacaa

SEQ ID NO: 1240172 - DNA, 25 bp, Homo sapien
taagagatgacagtagaggcccctg

SEQ ID NO: 1240173 - DNA, 25 bp, Homo sapien
ttcaccatgattggcggaattcgga

SEQ ID NO: 1240174 - DNA, 25 bp, Homo sapien
tgcactgctcagtaaagacttgaag

SEQ ID NO: 1240175 - DNA, 25 bp, Homo sapien
tgaagggaaccctctgcaaacctct

SEQ ID NO: 1240176 - DNA, 25 bp, Homo sapien
gaattcggagttcctctgggccgtg

SEQ ID NO: 1240177 - DNA, 25 bp, Homo sapien
gaggagatgggctacgcgaggcccg

SEQ ID NO: 1240178 - DNA, 25 bp, Homo sapien
aagaggagatgggctacgcgaggcc

SEQ ID NO: 1240179 - DNA, 25 bp, Homo sapien
agatgggctacgcgaggcccggccc

SEQ ID NO: 1240180 - DNA, 25 bp, Homo sapien
ggagatgggctacgcgaggcccggc

SEQ ID NO: 1240181 - DNA, 25 bp, Homo sapien
gcggtccgccggcgcgtctcggtgg

SEQ ID NO: 1240182 - DNA, 25 bp, Homo sapien
gtcaccggctgcactcgcccgcggt

SEQ ID NO: 1240183 - DNA, 25 bp, Homo sapien
agccggactccagctccgcgcaggc

SEQ ID NO: 1240184 - DNA, 25 bp, Homo sapien
ggcaaccgccggtctcccagcggct

SEQ ID NO: 1240185 - DNA, 25 bp, Homo sapien
cgtaggtttcggacatggccgtctg

SEQ ID NO: 1240186 - DNA, 25 bp, Homo sapien
aatcattctggcaggaatgcatcat

SEQ ID NO: 1240187 - DNA, 25 bp, Homo sapien
ctggatctcacagaaatcattctgg

SEQ ID NO: 1240188 - DNA, 25 bp, Homo sapien
gatctcacagaaatcattctggcag

SEQ ID NO: 1240189 - DNA, 25 bp, Homo sapien
aaatcattctggcaggaatgcatca

SEQ ID NO: 1240190 - DNA, 25 bp, Homo sapien
tttcaataaactgatgaagtaagca

SEQ ID NO: 1240191 - DNA, 25 bp, Homo sapien
aactgatgaagtaagcaagatttgc

SEQ ID NO: 1240192 - DNA, 25 bp, Homo sapien
tgatgaagtaagcaagatttgccag

SEQ ID NO: 1240193 - DNA, 25 bp, Homo sapien
ttcctgcatttccaataaccaagaa

SEQ ID NO: 1240194 - DNA, 25 bp, Homo sapien
tcatgcccagacagtatagaactag

SEQ ID NO: 1240195 - DNA, 25 bp, Homo sapien
taaacccagcgggaatacactgcct

SEQ ID NO: 1240196 - DNA, 25 bp, Homo sapien
tatcgcagctatacagtccattggc

SEQ ID NO: 1240197 - DNA, 25 bp, Homo sapien
gggcatcctggttacaaagagagac

SEQ ID NO: 1240198 - DNA, 25 bp, Homo sapien
gactgctgacataccagcgtaccat

SEQ ID NO: 1240199 - DNA, 25 bp, Homo sapien
tccaactgtgcactgttaagatgct

SEQ ID NO: 1240200 - DNA, 25 bp, Homo sapien
taagatgctcacagatggtgactgc

SEQ ID NO: 1240201 - DNA, 25 bp, Homo sapien
catatccgaaccacatccaactgtg

SEQ ID NO: 1240202 - DNA, 25 bp, Homo sapien
cctgctgtatcccatatttgtaact

SEQ ID NO: 1240203 - DNA, 25 bp, Homo sapien
gtatcccatatttgtaactttacat

SEQ ID NO: 1240204 - DNA, 25 bp, Homo sapien
ccactcctattgtatgatttgagtc

SEQ ID NO: 1240205 - DNA, 25 bp, Homo sapien
ttattatctttgaaccaaattccac

SEQ ID NO: 1240206 - DNA, 25 bp, Homo sapien
gaatgggtcagcctccgaattataa

SEQ ID NO: 1240207 - DNA, 25 bp, Homo sapien
gccacatcctcctgagaatgggtca

SEQ ID NO: 1240208 - DNA, 25 bp, Homo sapien
tattctttagtaatccatgctgcag

SEQ ID NO: 1240209 - DNA, 25 bp, Homo sapien
cgaattataatgcagttgcgcggag

SEQ ID NO: 1240210 - DNA, 25 bp, Homo sapien
tgtactcaacttcaagtgaaatgtt

SEQ ID NO: 1240211 - DNA, 25 bp, Homo sapien
atgaatatcagttctgactttgtgc

SEQ ID NO: 1240212 - DNA, 25 bp, Homo sapien
caattatttaatatacgacatgtac

SEQ ID NO: 1240213 - DNA, 25 bp, Homo sapien
tttgtgcatctgtgcaaaaaccaca

SEQ ID NO: 1240214 - DNA, 25 bp, Homo sapien
tactctccacaagcgaggtgagttc

SEQ ID NO: 1240215 - DNA, 25 bp, Homo sapien
aaagagcacatactgcgcccctgtg

SEQ ID NO: 1240216 - DNA, 25 bp, Homo sapien
agtgccatcacatactgactgctgt

SEQ ID NO: 1240217 - DNA, 25 bp, Homo sapien
acagagtcgtgagctcttacagagc

SEQ ID NO: 1240218 - DNA, 25 bp, Homo sapien
gctggtgtgctgcaaccgctaactc

SEQ ID NO: 1240219 - DNA, 25 bp, Homo sapien
tgctgcaaccgctaactcgtcatct

SEQ ID NO: 1240220 - DNA, 25 bp, Homo sapien
catgctggtgtgctgcaaccgctaa

SEQ ID NO: 1240221 - DNA, 25 bp, Homo sapien
gtgctgcaaccgctaactcgtcatc

SEQ ID NO: 1240222 - DNA, 25 bp, Homo sapien
ggcgcggtggaatccatagtcacca

SEQ ID NO: 1240223 - DNA, 25 bp, Homo sapien
cctctcggcgcggtggaatccatag

SEQ ID NO: 1240224 - DNA, 25 bp, Homo sapien
agttctcgccacctctcggcgcggt

SEQ ID NO: 1240225 - DNA, 25 bp, Homo sapien
gaatccatagtcaccacaggaatcc

SEQ ID NO: 1240226 - DNA, 25 bp, Homo sapien
ggccgcgcctcggtaataacttctc

SEQ ID NO: 1240227 - DNA, 25 bp, Homo sapien
ctggtgatatcatagacgaggagag

SEQ ID NO: 1240228 - DNA, 25 bp, Homo sapien
tgatatcatagacgaggagagcccc

SEQ ID NO: 1240229 - DNA, 25 bp, Homo sapien
tcggtaataacttctcgtcacggac

SEQ ID NO: 1240230 - DNA, 25 bp, Homo sapien
attagtaagcgcattgtaggtttct

SEQ ID NO: 1240231 - DNA, 25 bp, Homo sapien
tgatcacaatgttctggctcgctag

SEQ ID NO: 1240232 - DNA, 25 bp, Homo sapien
caaaggatgatcacaatgttctggc

SEQ ID NO: 1240233 - DNA, 25 bp, Homo sapien
gtttccacaaaggatgatcacaatg

SEQ ID NO: 1240234 - DNA, 25 bp, Homo sapien
tcttgtttccacaaaggatgatcac

SEQ ID NO: 1240235 - DNA, 25 bp, Homo sapien
cattttcttgagcaaatctggaggc

SEQ ID NO: 1240236 - DNA, 25 bp, Homo sapien
aaatctggaggcttctaagaaggta

SEQ ID NO: 1240237 - DNA, 25 bp, Homo sapien
cttgagcaaatctggaggcttctaa

SEQ ID NO: 1240238 - DNA, 25 bp, Homo sapien
tgagcaaatctggaggcttctaaga

SEQ ID NO: 1240239 - DNA, 25 bp, Homo sapien
ttgcacactgtacaaaagcctcttc

SEQ ID NO: 1240240 - DNA, 25 bp, Homo sapien
tcttgcacactgtacaaaagcctct

SEQ ID NO: 1240241 - DNA, 25 bp, Homo sapien
cttgcacactgtacaaaagcctctt

SEQ ID NO: 1240242 - DNA, 25 bp, Homo sapien
taacaaccacactcctgagcgttcg

SEQ ID NO: 1240243 - DNA, 25 bp, Homo sapien
caaggcagcatctccgtactgaata

SEQ ID NO: 1240244 - DNA, 25 bp, Homo sapien
tgcgcgccgcggtgacctcagctgt

SEQ ID NO: 1240245 - DNA, 25 bp, Homo sapien
cgtactgaatacctgagcccattct

SEQ ID NO: 1240246 - DNA, 25 bp, Homo sapien
gtcttttaacacttgcctgtgccta

SEQ ID NO: 1240247 - DNA, 25 bp, Homo sapien
tataaataaaacgtccactgtggta

SEQ ID NO: 1240248 - DNA, 25 bp, Homo sapien
tgtgcctactacatgatgtcgacta

SEQ ID NO: 1240249 - DNA, 25 bp, Homo sapien
ttaaagcctaaaagagaattcgtga

SEQ ID NO: 1240250 - DNA, 25 bp, Homo sapien
taacggtgttgtccatttaattcga

SEQ ID NO: 1240251 - DNA, 25 bp, Homo sapien
ggttccaacgattgtgtcccaaatg

SEQ ID NO: 1240252 - DNA, 25 bp, Homo sapien
aaagatctacttccatacagagtag

SEQ ID NO: 1240253 - DNA, 25 bp, Homo sapien
gtcccaaatgccactgtatgaacac

SEQ ID NO: 1240254 - DNA, 25 bp, Homo sapien
tgtggatcacgtaaacaccatgtag

SEQ ID NO: 1240255 - DNA, 25 bp, Homo sapien
ggctacaggacatacagtacatata

SEQ ID NO: 1240256 - DNA, 25 bp, Homo sapien
caccatgtagaatgtagtaaacgga

SEQ ID NO: 1240257 - DNA, 25 bp, Homo sapien
gccagagtctttgaatatcaggtca

SEQ ID NO: 1240258 - DNA, 25 bp, Homo sapien
gctagtctcacagccaaaaacagag

SEQ ID NO: 1240259 - DNA, 25 bp, Homo sapien
aactggaagtggatgagcggcccca

SEQ ID NO: 1240260 - DNA, 25 bp, Homo sapien
gagaagtattagtagcccagtaggt

SEQ ID NO: 1240261 - DNA, 25 bp, Homo sapien
tgttttctagcagggagaccagcaa

SEQ ID NO: 1240262 - DNA, 25 bp, Homo sapien
gtcaactggataactgtagtaaggc

SEQ ID NO: 1240263 - DNA, 25 bp, Homo sapien
tactagtcttcaactaaaaagtcac

SEQ ID NO: 1240264 - DNA, 25 bp, Homo sapien
cacagtggaagaacatatataaggt

SEQ ID NO: 1240265 - DNA, 25 bp, Homo sapien
gcatttaagtattcagcagaagcca

SEQ ID NO: 1240266 - DNA, 25 bp, Homo sapien
tcttacagtgaggtctaagaagtag

SEQ ID NO: 1240267 - DNA, 25 bp, Homo sapien
caaaaatgagcagcttgcaaatcta

SEQ ID NO: 1240268 - DNA, 25 bp, Homo sapien
gtgaggtctaagaagtagttcagtc

SEQ ID NO: 1240269 - DNA, 25 bp, Homo sapien
tcaaaaatgagcagcttgcaaatct

SEQ ID NO: 1240270 - DNA, 25 bp, Homo sapien
gaataagctgatgtgttagaataga

SEQ ID NO: 1240271 - DNA, 25 bp, Homo sapien
gcaacttttattggccaaaggatgc

SEQ ID NO: 1240272 - DNA, 25 bp, Homo sapien
gctcctatcccatgcaaaaagctgt

SEQ ID NO: 1240273 - DNA, 25 bp, Homo sapien
caaaggatgcagaaggatatatggt

SEQ ID NO: 1240274 - DNA, 25 bp, Homo sapien
gattcccaaattgtgatgttctcat

SEQ ID NO: 1240275 - DNA, 25 bp, Homo sapien
tcacttaaatgctggactgtaaaag

SEQ ID NO: 1240276 - DNA, 25 bp, Homo sapien
caacaaaaccattacagattcccaa

SEQ ID NO: 1240277 - DNA, 25 bp, Homo sapien
gccactcttatacaagccacaagta

SEQ ID NO: 1240278 - DNA, 25 bp, Homo sapien
gatgcctcggatgttttcaagtacc

SEQ ID NO: 1240279 - DNA, 25 bp, Homo sapien
gtaccatagtatgaaaacgctgggt

SEQ ID NO: 1240280 - DNA, 25 bp, Homo sapien
gatgttttcaagtaccatagtatga

SEQ ID NO: 1240281 - DNA, 25 bp, Homo sapien
ggtgaaatgacagatgcctcggatg

SEQ ID NO: 1240282 - DNA, 25 bp, Homo sapien
tgcatgcaatttttggatgataagg

SEQ ID NO: 1240283 - DNA, 25 bp, Homo sapien
gacatgattctgttaacccacaata

SEQ ID NO: 1240284 - DNA, 25 bp, Homo sapien
gtctggcagcggagaggagaacagc

SEQ ID NO: 1240285 - DNA, 25 bp, Homo sapien
agtacagcatcttcagactgctgct

SEQ ID NO: 1240286 - DNA, 25 bp, Homo sapien
gccgggagctgttgcttcgaaaaaa

SEQ ID NO: 1240287 - DNA, 25 bp, Homo sapien
taagtaaaatgaacccacaactagc

SEQ ID NO: 1240288 - DNA, 25 bp, Homo sapien
cccacaactagcagaacaaaggaag

SEQ ID NO: 1240289 - DNA, 25 bp, Homo sapien
tggaatatgaatgaagccgggagct

SEQ ID NO: 1240290 - DNA, 25 bp, Homo sapien
gagaatctgaaattgcctggaagtt

SEQ ID NO: 1240291 - DNA, 25 bp, Homo sapien
aaatacgtgggcacagataatgcag

SEQ ID NO: 1240292 - DNA, 25 bp, Homo sapien
aaatcaccaaagaggaattctcaag

SEQ ID NO: 1240293 - DNA, 25 bp, Homo sapien
gaccataatggaattgaactaaaat

SEQ ID NO: 1240294 - DNA, 25 bp, Homo sapien
tatgggtagagctgatcctaagtcc

SEQ ID NO: 1240295 - DNA, 25 bp, Homo sapien
cattttttcgtgctgaagctcccag

SEQ ID NO: 1240296 - DNA, 25 bp, Homo sapien
gaagagcttaagaaagtgactccac

SEQ ID NO: 1240297 - DNA, 25 bp, Homo sapien
cagagaaccgagcttgcaggtgagc

SEQ ID NO: 1240298 - DNA, 25 bp, Homo sapien
tgacctggtcattgcacaacgtttg

SEQ ID NO: 1240299 - DNA, 25 bp, Homo sapien
ttaggatgccaaactccatggatac

SEQ ID NO: 1240300 - DNA, 25 bp, Homo sapien
caaaggctgggcacataatcacaaa

SEQ ID NO: 1240301 - DNA, 25 bp, Homo sapien
cagagggccgactgtactttcttta

SEQ ID NO: 1240302 - DNA, 25 bp, Homo sapien
aagataattctgcacaattcgtaag

SEQ ID NO: 1240303 - DNA, 25 bp, Homo sapien
gttattggaagccataacttccaga

SEQ ID NO: 1240304 - DNA, 25 bp, Homo sapien
gataattctgcacaattcgtaagtt

SEQ ID NO: 1240305 - DNA, 25 bp, Homo sapien
ccagaagataattctgcacaattcg

SEQ ID NO: 1240306 - DNA, 25 bp, Homo sapien
taggctataggtgatcttacttgcg

SEQ ID NO: 1240307 - DNA, 25 bp, Homo sapien
cttgggtcacttgaactcagctgac

SEQ ID NO: 1240308 - DNA, 25 bp, Homo sapien
caattgctagcaacttgaagggtat

SEQ ID NO: 1240309 - DNA, 25 bp, Homo sapien
taggtaggaggcacatatttatacc

SEQ ID NO: 1240310 - DNA, 25 bp, Homo sapien
tattgaagcaatattgtctagcact

SEQ ID NO: 1240311 - DNA, 25 bp, Homo sapien
cactctgctggacattaagtccgcg

SEQ ID NO: 1240312 - DNA, 25 bp, Homo sapien
gtctgaaacagagaacccaatgata

SEQ ID NO: 1240313 - DNA, 25 bp, Homo sapien
taagtccgcgggaggagaagtgaac

SEQ ID NO: 1240314 - DNA, 25 bp, Homo sapien
gtcaattaccttttgaacctgtgaa

SEQ ID NO: 1240315 - DNA, 25 bp, Homo sapien
catccaagtccttagttggttaggg

SEQ ID NO: 1240316 - DNA, 25 bp, Homo sapien
tagttgttaacagtctgatggtcct

SEQ ID NO: 1240317 - DNA, 25 bp, Homo sapien
tcatgttcctaattcttgggacaac

SEQ ID NO: 1240318 - DNA, 25 bp, Homo sapien
caatctggaattgcacttggtacat

SEQ ID NO: 1240319 - DNA, 25 bp, Homo sapien
gcctcttctgtaatggctggcaatg

SEQ ID NO: 1240320 - DNA, 25 bp, Homo sapien
ttttggcatacacccactgtggact

SEQ ID NO: 1240321 - DNA, 25 bp, Homo sapien
gatgcctgttagatagactgcccac

SEQ ID NO: 1240322 - DNA, 25 bp, Homo sapien
tccaatagacgaagtgcacacaaca

SEQ ID NO: 1240323 - DNA, 25 bp, Homo sapien
ggcaacagatgcttacagttcagta

SEQ ID NO: 1240324 - DNA, 25 bp, Homo sapien
tcttttcataagcttaggtagagcc

SEQ ID NO: 1240325 - DNA, 25 bp, Homo sapien
gaatattggtcacctacctcggcag

SEQ ID NO: 1240326 - DNA, 25 bp, Homo sapien
tgcatccaacgtgacaagcaccctt

SEQ ID NO: 1240327 - DNA, 25 bp, Homo sapien
ggaccaggagtgtcttgcatccaac

SEQ ID NO: 1240328 - DNA, 25 bp, Homo sapien
tgcattaaatgacggtgtccccggg

SEQ ID NO: 1240329 - DNA, 25 bp, Homo sapien
gtgacttggtccacaccaggagccg

SEQ ID NO: 1240330 - DNA, 25 bp, Homo sapien
ataaatgaagtgtacaggtcagtgg

SEQ ID NO: 1240331 - DNA, 25 bp, Homo sapien
agttcaggctatgcacccgcctcag

SEQ ID NO: 1240332 - DNA, 25 bp, Homo sapien
taaataaatgaagtgtacaggtcag

SEQ ID NO: 1240333 - DNA, 25 bp, Homo sapien
tgagttcaggctatgcacccgcctc

SEQ ID NO: 1240334 - DNA, 25 bp, Homo sapien
gcagatgcagaacccctggatacgg

SEQ ID NO: 1240335 - DNA, 25 bp, Homo sapien
ttatagtcagaagagcacgagggct

SEQ ID NO: 1240336 - DNA, 25 bp, Homo sapien
caattcatggttgagtgagcctgca

SEQ ID NO: 1240337 - DNA, 25 bp, Homo sapien
gccctgggcagtgagataccttgtc

SEQ ID NO: 1240338 - DNA, 25 bp, Homo sapien
taaatactagtgcaatgagcactct

SEQ ID NO: 1240339 - DNA, 25 bp, Homo sapien
tagtatgtaccgtattgtgcccatg

SEQ ID NO: 1240340 - DNA, 25 bp, Homo sapien
gccatagatgcacatagaatcacgt

SEQ ID NO: 1240341 - DNA, 25 bp, Homo sapien
gttactcaaagctgacccatactat

SEQ ID NO: 1240342 - DNA, 25 bp, Homo sapien
cagcgttgtgatatggatggtgcct

SEQ ID NO: 1240343 - DNA, 25 bp, Homo sapien
tgcaagccaatcagactcttcctgg

SEQ ID NO: 1240344 - DNA, 25 bp, Homo sapien
tcctgtgggtactgatctgctagct

SEQ ID NO: 1240345 - DNA, 25 bp, Homo sapien
tattttcagctcatcatcggaggca

SEQ ID NO: 1240346 - DNA, 25 bp, Homo sapien
ccgtggacagtagggttcctgacat

SEQ ID NO: 1240347 - DNA, 25 bp, Homo sapien
aacgtagcagctgggtcaaggccgt

SEQ ID NO: 1240348 - DNA, 25 bp, Homo sapien
agctgggtcaaggccgtggacagta

SEQ ID NO: 1240349 - DNA, 25 bp, Homo sapien
tcaaggccgtggacagtagggttcc

SEQ ID NO: 1240350 - DNA, 25 bp, Homo sapien
cttggccatgcgcaaatctgaactg

SEQ ID NO: 1240351 - DNA, 25 bp, Homo sapien
gaataaattcttggccatgcgcaaa

SEQ ID NO: 1240352 - DNA, 25 bp, Homo sapien
gccatgcgcaaatctgaactggaaa

SEQ ID NO: 1240353 - DNA, 25 bp, Homo sapien
aattcttggccatgcgcaaatctga

SEQ ID NO: 1240354 - DNA, 25 bp, Homo sapien
agtctgtagcagtataaagttaggg

SEQ ID NO: 1240355 - DNA, 25 bp, Homo sapien
tctgattcctacatcgactgtgtgc

SEQ ID NO: 1240356 - DNA, 25 bp, Homo sapien
tttgtttagtctgtagcagtataaa

SEQ ID NO: 1240357 - DNA, 25 bp, Homo sapien
ctctgattcctacatcgactgtgtg

SEQ ID NO: 1240358 - DNA, 25 bp, Homo sapien
gcaaacagcaaggattccacaaggt

SEQ ID NO: 1240359 - DNA, 25 bp, Homo sapien
aacagcaaggattccacaaggtaat

SEQ ID NO: 1240360 - DNA, 25 bp, Homo sapien
cagcaaggattccacaaggtaattc

SEQ ID NO: 1240361 - DNA, 25 bp, Homo sapien
caaacagcaaggattccacaaggta

SEQ ID NO: 1240362 - DNA, 25 bp, Homo sapien
tctgttgagtggatgtcaggtcctg

SEQ ID NO: 1240363 - DNA, 25 bp, Homo sapien
tgccaggaacccagtaggggcttca

SEQ ID NO: 1240364 - DNA, 25 bp, Homo sapien
taggggcttcatcagtatctgttga

SEQ ID NO: 1240365 - DNA, 25 bp, Homo sapien
agtatctgttgagtggatgtcaggt

SEQ ID NO: 1240366 - DNA, 25 bp, Homo sapien
atgtccggccggctaagagaagatt

SEQ ID NO: 1240367 - DNA, 25 bp, Homo sapien
tccggccggctaagagaagatttct

SEQ ID NO: 1240368 - DNA, 25 bp, Homo sapien
cggccggctaagagaagatttctaa

SEQ ID NO: 1240369 - DNA, 25 bp, Homo sapien
accatgtccggccggctaagagaag

SEQ ID NO: 1240370 - DNA, 25 bp, Homo sapien
agaagcttgacaggcctggaatgat

SEQ ID NO: 1240371 - DNA, 25 bp, Homo sapien
ggaaagctagtatgtcaatgaccca

SEQ ID NO: 1240372 - DNA, 25 bp, Homo sapien
gatgggctcagaccaataagtcaaa

SEQ ID NO: 1240373 - DNA, 25 bp, Homo sapien
gccagcccagagaaatgtcaagttt

SEQ ID NO: 1240374 - DNA, 25 bp, Homo sapien
tgaaccctggctccgctaccctctt

SEQ ID NO: 1240375 - DNA, 25 bp, Homo sapien
cctcacttcttgtggacctgcaggt

SEQ ID NO: 1240376 - DNA, 25 bp, Homo sapien
gcaccctcacttcttgtggacctgc

SEQ ID NO: 1240377 - DNA, 25 bp, Homo sapien
gctccgctaccctcttgctgctgag

SEQ ID NO: 1240378 - DNA, 25 bp, Homo sapien
agggaggctcctctttatctttctg

SEQ ID NO: 1240379 - DNA, 25 bp, Homo sapien
ggagggaggctcctctttatctttc

SEQ ID NO: 1240380 - DNA, 25 bp, Homo sapien
ggaggctcctctttatctttctgcc

SEQ ID NO: 1240381 - DNA, 25 bp, Homo sapien
cctggagggaggctcctctttatct

SEQ ID NO: 1240382 - DNA, 25 bp, Homo sapien
caagtcccggatgactctcaagtgg

SEQ ID NO: 1240383 - DNA, 25 bp, Homo sapien
tgggaacatgcagattcccgggctc

SEQ ID NO: 1240384 - DNA, 25 bp, Homo sapien
tccagaatgtggtggcgaaagtgct

SEQ ID NO: 1240385 - DNA, 25 bp, Homo sapien
gaaagtgctgcctgatatgctagaa

SEQ ID NO: 1240386 - DNA, 25 bp, Homo sapien
tatacgtgctgccgaagtgagcact

SEQ ID NO: 1240387 - DNA, 25 bp, Homo sapien
cacgtggggtgaggtgcttaatatg

SEQ ID NO: 1240388 - DNA, 25 bp, Homo sapien
tggggtgaggtgcttaatatgtgct

SEQ ID NO: 1240389 - DNA, 25 bp, Homo sapien
gtgaggtgcttaatatgtgctccat

SEQ ID NO: 1240390 - DNA, 25 bp, Homo sapien
agggcacgtggggtgaggtgcttaa

SEQ ID NO: 1240391 - DNA, 25 bp, Homo sapien
cagacgcttctggattaaaggagaa

SEQ ID NO: 1240392 - DNA, 25 bp, Homo sapien
agggctcatagatcccagacgcttc

SEQ ID NO: 1240393 - DNA, 25 bp, Homo sapien
gaggatgaagcatgaagggtcttat

SEQ ID NO: 1240394 - DNA, 25 bp, Homo sapien
agcatgaagggtcttattgaggaga

SEQ ID NO: 1240395 - DNA, 25 bp, Homo sapien
ctcgctccctcccgggacagcccct

SEQ ID NO: 1240396 - DNA, 25 bp, Homo sapien
gggaccagagctccctctcgtgtct

SEQ ID NO: 1240397 - DNA, 25 bp, Homo sapien
tcggggaccagagctccctctcgtg

SEQ ID NO: 1240398 - DNA, 25 bp, Homo sapien
cagacgctcagtccgcggggtgctc

SEQ ID NO: 1240399 - DNA, 25 bp, Homo sapien
ggcgaatccggctagggtgcctttc

SEQ ID NO: 1240400 - DNA, 25 bp, Homo sapien
gaagccgcgggagagccgcgtgagt

SEQ ID NO: 1240401 - DNA, 25 bp, Homo sapien
cgtttgtgcgaagagctgattgccc

SEQ ID NO: 1240402 - DNA, 25 bp, Homo sapien
tgattgccctggaggcgaattcccg

SEQ ID NO: 1240403 - DNA, 25 bp, Homo sapien
tcaacgagggcaccttcctttggga

SEQ ID NO: 1240404 - DNA, 25 bp, Homo sapien
tcacacatttggatgctcaacgagg

SEQ ID NO: 1240405 - DNA, 25 bp, Homo sapien
ttcctttgggagcttcggctggtgt

SEQ ID NO: 1240406 - DNA, 25 bp, Homo sapien
catttggatgctcaacgagggcacc

SEQ ID NO: 1240407 - DNA, 25 bp, Homo sapien
ttggccaatctagcctgtgcagacc

SEQ ID NO: 1240408 - DNA, 25 bp, Homo sapien
cctccactgctgaatgtatatataa

SEQ ID NO: 1240409 - DNA, 25 bp, Homo sapien
gcacagttggccaatctagcctgtg

SEQ ID NO: 1240410 - DNA, 25 bp, Homo sapien
tgcagaccctccactgctgaatgta

SEQ ID NO: 1240411 - DNA, 25 bp, Homo sapien
gtgtggcatgggacagcattgacca

SEQ ID NO: 1240412 - DNA, 25 bp, Homo sapien
gcaaacaaccaaatagcaacttgaa

SEQ ID NO: 1240413 - DNA, 25 bp, Homo sapien
aacttgaaccaatgtgcctctgcac

SEQ ID NO: 1240414 - DNA, 25 bp, Homo sapien
agcattgaccaatcctcggtcagga

SEQ ID NO: 1240415 - DNA, 25 bp, Homo sapien
tgggcggatccattcacaatcctgc

SEQ ID NO: 1240416 - DNA, 25 bp, Homo sapien
gatccattcacaatcctgctgatga

SEQ ID NO: 1240417 - DNA, 25 bp, Homo sapien
caagtttgggcggatccattcacaa

SEQ ID NO: 1240418 - DNA, 25 bp, Homo sapien
ttccagtaggacaagtttgggcgga

SEQ ID NO: 1240419 - DNA, 25 bp, Homo sapien
tatcttgtgtgcctaacattctcaa

SEQ ID NO: 1240420 - DNA, 25 bp, Homo sapien
gcctaacattctcaataacaacatt

SEQ ID NO: 1240421 - DNA, 25 bp, Homo sapien
tgggtaacgttgtatttgtgggaca

SEQ ID NO: 1240422 - DNA, 25 bp, Homo sapien
gcatgctgggtaacgttgtatttgt

SEQ ID NO: 1240423 - DNA, 25 bp, Homo sapien
tccagcacgcgacttctcaggacga

SEQ ID NO: 1240424 - DNA, 25 bp, Homo sapien
gctgccatcgtaaactgacacagtg

SEQ ID NO: 1240425 - DNA, 25 bp, Homo sapien
ctcaggacgacgaatcttctcaatg

SEQ ID NO: 1240426 - DNA, 25 bp, Homo sapien
cgcaaatgcttctagacacactcca

SEQ ID NO: 1240427 - DNA, 25 bp, Homo sapien
tgtgactgaaaggtactgtactctc

SEQ ID NO: 1240428 - DNA, 25 bp, Homo sapien
tcagagctttgtcctgaccagtgtc

SEQ ID NO: 1240429 - DNA, 25 bp, Homo sapien
gagagtgggcctaactcatgtgagc

SEQ ID NO: 1240430 - DNA, 25 bp, Homo sapien
cagtctgcctagctagtcaaaagca

SEQ ID NO: 1240431 - DNA, 25 bp, Homo sapien
ctgtggaacgccagacctcaggtga

SEQ ID NO: 1240432 - DNA, 25 bp, Homo sapien
gctgtggaacgccagacctcaggtg

SEQ ID NO: 1240433 - DNA, 25 bp, Homo sapien
ttgtcaggctgctgtggaacgccag

SEQ ID NO: 1240434 - DNA, 25 bp, Homo sapien
caggctgctgtggaacgccagacct

SEQ ID NO: 1240435 - DNA, 25 bp, Homo sapien
tcttaacgcgatgggaacatttgca

SEQ ID NO: 1240436 - DNA, 25 bp, Homo sapien
tagcacaatgtgtctaatcggaggg

SEQ ID NO: 1240437 - DNA, 25 bp, Homo sapien
catttgcaggtctcagtgattctac

SEQ ID NO: 1240438 - DNA, 25 bp, Homo sapien
tccccggagatagccactggtactg

SEQ ID NO: 1240439 - DNA, 25 bp, Homo sapien
catctgcagattcgaccaaacatca

SEQ ID NO: 1240440 - DNA, 25 bp, Homo sapien
gatgtgttcctgtcatcagttagca

SEQ ID NO: 1240441 - DNA, 25 bp, Homo sapien
cagacttttcagaggatatgctaca

SEQ ID NO: 1240442 - DNA, 25 bp, Homo sapien
tatctcttagaaacaggacctgtct

SEQ ID NO: 1240443 - DNA, 25 bp, Homo sapien
atgtctagtgggacagctgctggcc

SEQ ID NO: 1240444 - DNA, 25 bp, Homo sapien
tagtgagtgctgtccaatccattgc

SEQ ID NO: 1240445 - DNA, 25 bp, Homo sapien
tggccacatgtgacctgaacagttg

SEQ ID NO: 1240446 - DNA, 25 bp, Homo sapien
tcttgtctcgtcaataaaagtggct

SEQ ID NO: 1240447 - DNA, 25 bp, Homo sapien
gaagcatgcttaggaattgctatgc

SEQ ID NO: 1240448 - DNA, 25 bp, Homo sapien
gcttaggaattgctatgcagggtcc

SEQ ID NO: 1240449 - DNA, 25 bp, Homo sapien
aattggaggcatgaggttgagaatg

SEQ ID NO: 1240450 - DNA, 25 bp, Homo sapien
ggaattgctatgcagggtccaccca

SEQ ID NO: 1240451 - DNA, 25 bp, Homo sapien
tgggcaccgcccttaacgtcacgat

SEQ ID NO: 1240452 - DNA, 25 bp, Homo sapien
actgggcaccgcccttaacgtcacg

SEQ ID NO: 1240453 - DNA, 25 bp, Homo sapien
ctgggcaccgcccttaacgtcacga

SEQ ID NO: 1240454 - DNA, 25 bp, Homo sapien
tccacctaggcgcagtcaagaaggg

SEQ ID NO: 1240455 - DNA, 25 bp, Homo sapien
aaagaggctacgttcaagctgctgg

SEQ ID NO: 1240456 - DNA, 25 bp, Homo sapien
gaactaccagtgtgaaaagaggcta

SEQ ID NO: 1240457 - DNA, 25 bp, Homo sapien
tcatttcacaagaggttcaggaact

SEQ ID NO: 1240458 - DNA, 25 bp, Homo sapien
gccatacatttggactccaggcaag

SEQ ID NO: 1240459 - DNA, 25 bp, Homo sapien
ccataacgaatggatgacttttagt

SEQ ID NO: 1240460 - DNA, 25 bp, Homo sapien
agttcttgctcaaaggtggctgaca

SEQ ID NO: 1240461 - DNA, 25 bp, Homo sapien
gtgctgtctgcttactatccttcaa

SEQ ID NO: 1240462 - DNA, 25 bp, Homo sapien
tttttatgcttagggttgatgagtg

SEQ ID NO: 1240463 - DNA, 25 bp, Homo sapien
tgatctaacggtaacaactggggga

SEQ ID NO: 1240464 - DNA, 25 bp, Homo sapien
ttgatgagtggacaacttgtggaag

SEQ ID NO: 1240465 - DNA, 25 bp, Homo sapien
aacttgtggaaggatatgactggac

SEQ ID NO: 1240466 - DNA, 25 bp, Homo sapien
tagttccctgattagactggaagaa

SEQ ID NO: 1240467 - DNA, 25 bp, Homo sapien
ccatggatgaggctagaccctaaga

SEQ ID NO: 1240468 - DNA, 25 bp, Homo sapien
gccatagaagtatttacgaaattgc

SEQ ID NO: 1240469 - DNA, 25 bp, Homo sapien
gaagaaaccactatttcatgaaaag

SEQ ID NO: 1240470 - DNA, 25 bp, Homo sapien
tgctacaaccattgaatttgccata

SEQ ID NO: 1240471 - DNA, 25 bp, Homo sapien
aattcctaaagcaatgctacaacca

SEQ ID NO: 1240472 - DNA, 25 bp, Homo sapien
gtatcactctcctgaaaagaagata

SEQ ID NO: 1240473 - DNA, 25 bp, Homo sapien
gcgaagcaaggcatgaactgctagg

SEQ ID NO: 1240474 - DNA, 25 bp, Homo sapien
tgattttaatccagtggttgatgag

SEQ ID NO: 1240475 - DNA, 25 bp, Homo sapien
ttcctctgcggcattatgattttaa

SEQ ID NO: 1240476 - DNA, 25 bp, Homo sapien
ccagtggttgatgagtatgactata

SEQ ID NO: 1240477 - DNA, 25 bp, Homo sapien
caatgcttttaactaggtagatttc

SEQ ID NO: 1240478 - DNA, 25 bp, Homo sapien
tttattgagtggctgaaggtgaggt

SEQ ID NO: 1240479 - DNA, 25 bp, Homo sapien
tacttgaagtatatgggagtatgtg

SEQ ID NO: 1240480 - DNA, 25 bp, Homo sapien
agtggctgaaggtgaggtattattt

SEQ ID NO: 1240481 - DNA, 25 bp, Homo sapien
gagtagcgtatcaaagttgtattta

SEQ ID NO: 1240482 - DNA, 25 bp, Homo sapien
cactctacattagtttttgggaaag

SEQ ID NO: 1240483 - DNA, 25 bp, Homo sapien
ccacaactaggattgttttgtatac

SEQ ID NO: 1240484 - DNA, 25 bp, Homo sapien
gacttagtcatgtatcaagagtggc

SEQ ID NO: 1240485 - DNA, 25 bp, Homo sapien
gatagtgtcttttgtggagttctca

SEQ ID NO: 1240486 - DNA, 25 bp, Homo sapien
ggagttctcacttcttactatcact

SEQ ID NO: 1240487 - DNA, 25 bp, Homo sapien
gccctgttggtctcatgtcctgatg

SEQ ID NO: 1240488 - DNA, 25 bp, Homo sapien
cccagaagtgttagacctgccctgt

SEQ ID NO: 1240489 - DNA, 25 bp, Homo sapien
ggtgccagcaccctgtattagtcat

SEQ ID NO: 1240490 - DNA, 25 bp, Homo sapien
gaatcttgatggactgtgcctgccc

SEQ ID NO: 1240491 - DNA, 25 bp, Homo sapien
tgcggttggatttctcacgatgtcc

SEQ ID NO: 1240492 - DNA, 25 bp, Homo sapien
cacgatgtccagtgttatctccatg

SEQ ID NO: 1240493 - DNA, 25 bp, Homo sapien
tctgcctagggctcagtgccgtgtt

SEQ ID NO: 1240494 - DNA, 25 bp, Homo sapien
ctgtggactacagcgacaacctgac

SEQ ID NO: 1240495 - DNA, 25 bp, Homo sapien
gtgaggcctcgccctgcgtagcttc

SEQ ID NO: 1240496 - DNA, 25 bp, Homo sapien
gaggcctcgccctgcgtagcttctg

SEQ ID NO: 1240497 - DNA, 25 bp, Homo sapien
ccaagtactagtgaggcctcgccct

SEQ ID NO: 1240498 - DNA, 25 bp, Homo sapien
ggtgcgttcagagtgtatggccgta

SEQ ID NO: 1240499 - DNA, 25 bp, Homo sapien
gcttctgtgtaatgatccgtgaaac

SEQ ID NO: 1240500 - DNA, 25 bp, Homo sapien
tttttaggtgcatgaacaatcctgt

SEQ ID NO: 1240501 - DNA, 25 bp, Homo sapien
taagactctatcttgtttgcctgtt

SEQ ID NO: 1240502 - DNA, 25 bp, Homo sapien
tatcatgttgatatttcgcaaagca

SEQ ID NO: 1240503 - DNA, 25 bp, Homo sapien
gccacaaaatccttctgttctataa

SEQ ID NO: 1240504 - DNA, 25 bp, Homo sapien
cacaaaatccttctgttctataatc

SEQ ID NO: 1240505 - DNA, 25 bp, Homo sapien
tctgttctataatctagaggcttca

SEQ ID NO: 1240506 - DNA, 25 bp, Homo sapien
tgttctataatctagaggcttcatt

SEQ ID NO: 1240507 - DNA, 25 bp, Homo sapien
gggctggcgtaccctgagcgccgga

SEQ ID NO: 1240508 - DNA, 25 bp, Homo sapien
ctcctggggctggcgtaccctgagc

SEQ ID NO: 1240509 - DNA, 25 bp, Homo sapien
tggggctggcgtaccctgagcgccg

SEQ ID NO: 1240510 - DNA, 25 bp, Homo sapien
gctggcgtaccctgagcgccggagg

SEQ ID NO: 1240511 - DNA, 25 bp, Homo sapien
cagctgccaaactaagggcagctgc

SEQ ID NO: 1240512 - DNA, 25 bp, Homo sapien
tttccagctgccaaactaagggcag

SEQ ID NO: 1240513 - DNA, 25 bp, Homo sapien
ttccagctgccaaactaagggcagc

SEQ ID NO: 1240514 - DNA, 25 bp, Homo sapien
tccagctgccaaactaagggcagct

SEQ ID NO: 1240515 - DNA, 25 bp, Homo sapien
ctacgcaggggcctttttaggcttg

SEQ ID NO: 1240516 - DNA, 25 bp, Homo sapien
tttccctttgggtactgtctctcta

SEQ ID NO: 1240517 - DNA, 25 bp, Homo sapien
tccctttgggtactgtctctctatt

SEQ ID NO: 1240518 - DNA, 25 bp, Homo sapien
ttccctttgggtactgtctctctat

SEQ ID NO: 1240519 - DNA, 25 bp, Homo sapien
tgcctggtctgttttggcatctcca

SEQ ID NO: 1240520 - DNA, 25 bp, Homo sapien
ttctgtgcctggtctgttttggcat

SEQ ID NO: 1240521 - DNA, 25 bp, Homo sapien
agcaccttcagctttctgtgcctgg

SEQ ID NO: 1240522 - DNA, 25 bp, Homo sapien
tgtgcctggtctgttttggcatctc

SEQ ID NO: 1240523 - DNA, 25 bp, Homo sapien
tgtctgacttgagactctgttaggg

SEQ ID NO: 1240524 - DNA, 25 bp, Homo sapien
tggcattctgccctagcacagagtg

SEQ ID NO: 1240525 - DNA, 25 bp, Homo sapien
acagagtgcgccatagatcccatga

SEQ ID NO: 1240526 - DNA, 25 bp, Homo sapien
ttctggcgtgtggttcccagcaagg

SEQ ID NO: 1240527 - DNA, 25 bp, Homo sapien
gagaacctgtcacaaccaaagttca

SEQ ID NO: 1240528 - DNA, 25 bp, Homo sapien
catggattttggtactattgagaac

SEQ ID NO: 1240529 - DNA, 25 bp, Homo sapien
tgagttcccaagtcgtgatcatcgc

SEQ ID NO: 1240530 - DNA, 25 bp, Homo sapien
caaagttcagctcactcttcagaga

SEQ ID NO: 1240531 - DNA, 25 bp, Homo sapien
caagaattagagtgccctggaggtc

SEQ ID NO: 1240532 - DNA, 25 bp, Homo sapien
aggtcactcacaagtcctcatggag

SEQ ID NO: 1240533 - DNA, 25 bp, Homo sapien
catgatcctggcaaatagtctttcc

SEQ ID NO: 1240534 - DNA, 25 bp, Homo sapien
tctgccgtgacctcgcgcatgcgag

SEQ ID NO: 1240535 - DNA, 25 bp, Homo sapien
gaaagccaggcataaattagttacg

SEQ ID NO: 1240536 - DNA, 25 bp, Homo sapien
tggtttctgacaacaagcatttggg

SEQ ID NO: 1240537 - DNA, 25 bp, Homo sapien
tgtagatgctagctaacctctgccc

SEQ ID NO: 1240538 - DNA, 25 bp, Homo sapien
tgcatgcccgcccattttatcacag

SEQ ID NO: 1240539 - DNA, 25 bp, Homo sapien
aggtcttacaggagagcattaagcg

SEQ ID NO: 1240540 - DNA, 25 bp, Homo sapien
acgaggctgccctagaggtcttaca

SEQ ID NO: 1240541 - DNA, 25 bp, Homo sapien
gcttctatgccttctataacacaga

SEQ ID NO: 1240542 - DNA, 25 bp, Homo sapien
ttaagcgagtcaaggatgggcctcc

SEQ ID NO: 1240543 - DNA, 25 bp, Homo sapien
cactcatctcgcaagctgatcgtgg

SEQ ID NO: 1240544 - DNA, 25 bp, Homo sapien
ttatcgactgtaatcacagggcagg

SEQ ID NO: 1240545 - DNA, 25 bp, Homo sapien
tacctccattgtgtagcagttccag

SEQ ID NO: 1240546 - DNA, 25 bp, Homo sapien
tacagagatgtcctaagggatctcc

SEQ ID NO: 1240547 - DNA, 25 bp, Homo sapien
tgtctctcggggctcgttgcctcat

SEQ ID NO: 1240548 - DNA, 25 bp, Homo sapien
gtgtctctcggggctcgttgcctca

SEQ ID NO: 1240549 - DNA, 25 bp, Homo sapien
ggtgtctctcggggctcgttgcctc

SEQ ID NO: 1240550 - DNA, 25 bp, Homo sapien
cgctccttccgccggacgccggcgg

SEQ ID NO: 1240551 - DNA, 25 bp, Homo sapien
ccttccgccggacgccggcggcgca

SEQ ID NO: 1240552 - DNA, 25 bp, Homo sapien
tccttccgccggacgccggcggcgc

SEQ ID NO: 1240553 - DNA, 25 bp, Homo sapien
ctccttccgccggacgccggcggcg

SEQ ID NO: 1240554 - DNA, 25 bp, Homo sapien
gctgctgtcccggtgcggcggaggc

SEQ ID NO: 1240555 - DNA, 25 bp, Homo sapien
ctcgagacagctccgggtagacagg

SEQ ID NO: 1240556 - DNA, 25 bp, Homo sapien
cagctcgagacagctccgggtagac

SEQ ID NO: 1240557 - DNA, 25 bp, Homo sapien
tgctgtcccggtgcggcggaggccg

SEQ ID NO: 1240558 - DNA, 25 bp, Homo sapien
tggctgcccgcaggggctgaccgca

SEQ ID NO: 1240559 - DNA, 25 bp, Homo sapien
ctcgggacctggctgcccgcagggg

SEQ ID NO: 1240560 - DNA, 25 bp, Homo sapien
cgggacctggctgcccgcaggggct

SEQ ID NO: 1240561 - DNA, 25 bp, Homo sapien
gggctgaccgcaggtgggggactca

SEQ ID NO: 1240562 - DNA, 25 bp, Homo sapien
tagtttatcttcccaggaagttgtc

SEQ ID NO: 1240563 - DNA, 25 bp, Homo sapien
tgtcttgcttttaagcttaagggaa

SEQ ID NO: 1240564 - DNA, 25 bp, Homo sapien
ttttaagcttaagggaaatgccaga

SEQ ID NO: 1240565 - DNA, 25 bp, Homo sapien
tgcttttaagcttaagggaaatgcc

SEQ ID NO: 1240566 - DNA, 25 bp, Homo sapien
gcactggatatgaccgctgctctcc

SEQ ID NO: 1240567 - DNA, 25 bp, Homo sapien
gccaagatgactcccaagtgcagcc

SEQ ID NO: 1240568 - DNA, 25 bp, Homo sapien
agccaggtgtagaaagcactggata

SEQ ID NO: 1240569 - DNA, 25 bp, Homo sapien
tagaaagcactggatatgaccgctg

SEQ ID NO: 1240570 - DNA, 25 bp, Homo sapien
caatgattgtcttgcccaatcaagt

SEQ ID NO: 1240571 - DNA, 25 bp, Homo sapien
atgcaaccaatgattgtcttgccca

SEQ ID NO: 1240572 - DNA, 25 bp, Homo sapien
gattgtcttgcccaatcaagtaaca

SEQ ID NO: 1240573 - DNA, 25 bp, Homo sapien
aatgttatctatatagatccaaagc

SEQ ID NO: 1240574 - DNA, 25 bp, Homo sapien
tctggaagacagtacgaataagcgc

SEQ ID NO: 1240575 - DNA, 25 bp, Homo sapien
tatgaagggatgctgcacagtagcc

SEQ ID NO: 1240576 - DNA, 25 bp, Homo sapien
ttaagcacggtgtccatgggagcca

SEQ ID NO: 1240577 - DNA, 25 bp, Homo sapien
tttgggatcccgaaagagagaactc

SEQ ID NO: 1240578 - DNA, 25 bp, Homo sapien
aaactgaacatagcgtccacctggg

SEQ ID NO: 1240579 - DNA, 25 bp, Homo sapien
acctgggcccaagtgtaagagagca

SEQ ID NO: 1240580 - DNA, 25 bp, Homo sapien
atagcgtccacctgggcccaagtgt

SEQ ID NO: 1240581 - DNA, 25 bp, Homo sapien
tggctacagttcaaactgaacatag

SEQ ID NO: 1240582 - DNA, 25 bp, Homo sapien
gcagcatcgcacctcaaactttgga

SEQ ID NO: 1240583 - DNA, 25 bp, Homo sapien
ccttcagaccggaaactagtttgca

SEQ ID NO: 1240584 - DNA, 25 bp, Homo sapien
gaagccgtcgttctctgattcaagc

SEQ ID NO: 1240585 - DNA, 25 bp, Homo sapien
gatctccagagcaacacctataagg

SEQ ID NO: 1240586 - DNA, 25 bp, Homo sapien
tggaggaattccagccaagcgggat

SEQ ID NO: 1240587 - DNA, 25 bp, Homo sapien
gaagctgctgactgacaagacctga

SEQ ID NO: 1240588 - DNA, 25 bp, Homo sapien
taagaacgtccctatcacttggagg

SEQ ID NO: 1240589 - DNA, 25 bp, Homo sapien
ccaagaagttggtagcaagtcgtca

SEQ ID NO: 1240590 - DNA, 25 bp, Homo sapien
acccaggtcggcttccaagagcgtg

SEQ ID NO: 1240591 - DNA, 25 bp, Homo sapien
gatgagatgaggaccgagggaaggc

SEQ ID NO: 1240592 - DNA, 25 bp, Homo sapien
tcggcttccaagagcgtgctgacgg

SEQ ID NO: 1240593 - DNA, 25 bp, Homo sapien
ccaagagcgtgctgacggatgagat

SEQ ID NO: 1240594 - DNA, 25 bp, Homo sapien
tgcaaggctgcctgaaaagactgat

SEQ ID NO: 1240595 - DNA, 25 bp, Homo sapien
aaagactgatcatgtcccgcgagag

SEQ ID NO: 1240596 - DNA, 25 bp, Homo sapien
aacacggagtcctttttgggatgca

SEQ ID NO: 1240597 - DNA, 25 bp, Homo sapien
tctgagagtaaacaccctggtagag

SEQ ID NO: 1240598 - DNA, 25 bp, Homo sapien
ctcaagtcctctgtcgtcccaacct

SEQ ID NO: 1240599 - DNA, 25 bp, Homo sapien
taacatttgggtgaacaaggctccc

SEQ ID NO: 1240600 - DNA, 25 bp, Homo sapien
agtccctggagaatacactgcatca

SEQ ID NO: 1240601 - DNA, 25 bp, Homo sapien
tcaatatcctgagtgacctgaacag

SEQ ID NO: 1240602 - DNA, 25 bp, Homo sapien
gatgtgggcagagccctacctttac

SEQ ID NO: 1240603 - DNA, 25 bp, Homo sapien
tatgaacaaacagacccagtgccag

SEQ ID NO: 1240604 - DNA, 25 bp, Homo sapien
ttcacattgtcagtgagttcctatt

SEQ ID NO: 1240605 - DNA, 25 bp, Homo sapien
gtattttacataataagaccacaca

SEQ ID NO: 1240606 - DNA, 25 bp, Homo sapien
taaagctgtgactatctggggacac

SEQ ID NO: 1240607 - DNA, 25 bp, Homo sapien
tgagtgggcagttcagtagcagcct

SEQ ID NO: 1240608 - DNA, 25 bp, Homo sapien
gtagcagcctcagcagtgtaacagc

SEQ ID NO: 1240609 - DNA, 25 bp, Homo sapien
acgcacgccacaacagacttgcttt

SEQ ID NO: 1240610 - DNA, 25 bp, Homo sapien
tccagcggcttcagatggtccaaag

SEQ ID NO: 1240611 - DNA, 25 bp, Homo sapien
aagagcacgttgtgcagcctcggga

SEQ ID NO: 1240612 - DNA, 25 bp, Homo sapien
cagtgcagccaggacatctaagaca

SEQ ID NO: 1240613 - DNA, 25 bp, Homo sapien
gaagacgcttccatactccagcggc

SEQ ID NO: 1240614 - DNA, 25 bp, Homo sapien
tagtcagccacacatacagtggtgg

SEQ ID NO: 1240615 - DNA, 25 bp, Homo sapien
tatttggcggcactgagcctcagtt

SEQ ID NO: 1240616 - DNA, 25 bp, Homo sapien
taagcgatgcattaaccgtcgtatc

SEQ ID NO: 1240617 - DNA, 25 bp, Homo sapien
tgtaggtttctagcccagaagcaac

SEQ ID NO: 1240618 - DNA, 25 bp, Homo sapien
tatcgggacactcaaaccagttgtg

SEQ ID NO: 1240619 - DNA, 25 bp, Homo sapien
taagctggtgctaatccattctgga

SEQ ID NO: 1240620 - DNA, 25 bp, Homo sapien
ggatagccacatcctttcgcctgga

SEQ ID NO: 1240621 - DNA, 25 bp, Homo sapien
ggtagagaacccacactgcgtaact

SEQ ID NO: 1240622 - DNA, 25 bp, Homo sapien
ctgaaaacaccaatctattgaaaga

SEQ ID NO: 1240623 - DNA, 25 bp, Homo sapien
cgcccttcccgcataactgaaaaca

SEQ ID NO: 1240624 - DNA, 25 bp, Homo sapien
aagaagggatggctttcagcattac

SEQ ID NO: 1240625 - DNA, 25 bp, Homo sapien
caccaatctattgaaagagttcaag

SEQ ID NO: 1240626 - DNA, 25 bp, Homo sapien
tatgctattgccatatggcagttag

SEQ ID NO: 1240627 - DNA, 25 bp, Homo sapien
gccatatggcagttagtgtttccct

SEQ ID NO: 1240628 - DNA, 25 bp, Homo sapien
gtacacataatatatgctattgcca

SEQ ID NO: 1240629 - DNA, 25 bp, Homo sapien
aatgaattgtacacataatatatgc

SEQ ID NO: 1240630 - DNA, 25 bp, Homo sapien
ttctttcaaccaggcgtgcacactt

SEQ ID NO: 1240631 - DNA, 25 bp, Homo sapien
aaactcctcagctcgtgcggcgatg

SEQ ID NO: 1240632 - DNA, 25 bp, Homo sapien
cactttaggaccgtaggcaggtcat

SEQ ID NO: 1240633 - DNA, 25 bp, Homo sapien
ccaacacgtactgggccaccataaa

SEQ ID NO: 1240634 - DNA, 25 bp, Homo sapien
ccaccttgtcatcgactttgagtgt

SEQ ID NO: 1240635 - DNA, 25 bp, Homo sapien
ctccaccttgtcatcgactttgagt

SEQ ID NO: 1240636 - DNA, 25 bp, Homo sapien
tccaccttgtcatcgactttgagtg

SEQ ID NO: 1240637 - DNA, 25 bp, Homo sapien
ctatttagcattagatctggtattt

SEQ ID NO: 1240638 - DNA, 25 bp, Homo sapien
tatttagcattagatctggtattta

SEQ ID NO: 1240639 - DNA, 25 bp, Homo sapien
agcattagatctggtatttaattaa

SEQ ID NO: 1240640 - DNA, 25 bp, Homo sapien
tttagcattagatctggtatttaat

SEQ ID NO: 1240641 - DNA, 25 bp, Homo sapien
actgacaggtcccaccagcaatact

SEQ ID NO: 1240642 - DNA, 25 bp, Homo sapien
cccaccagcaatactcaactctgca

SEQ ID NO: 1240643 - DNA, 25 bp, Homo sapien
gactactgacaggtcccaccagcaa

SEQ ID NO: 1240644 - DNA, 25 bp, Homo sapien
tgacaggtcccaccagcaatactca

SEQ ID NO: 1240645 - DNA, 25 bp, Homo sapien
gatggttcctgacttaagacggttc

SEQ ID NO: 1240646 - DNA, 25 bp, Homo sapien
ggactcattactgcttggaggaaag

SEQ ID NO: 1240647 - DNA, 25 bp, Homo sapien
atactatggctttattgggacacag

SEQ ID NO: 1240648 - DNA, 25 bp, Homo sapien
ccaggagcatctgtagagggacatt

SEQ ID NO: 1240649 - DNA, 25 bp, Homo sapien
cctgccaacaatgccttgggaagca

SEQ ID NO: 1240650 - DNA, 25 bp, Homo sapien
ctctgtgagaacaattgggggcaga

SEQ ID NO: 1240651 - DNA, 25 bp, Homo sapien
ggcagagatcaagccgcaccacctg

SEQ ID NO: 1240652 - DNA, 25 bp, Homo sapien
accacctgccaacaatgccttggga

SEQ ID NO: 1240653 - DNA, 25 bp, Homo sapien
gatgaggtaaatgccctcctgcagc

SEQ ID NO: 1240654 - DNA, 25 bp, Homo sapien
gatagtcattatagagctccttaaa

SEQ ID NO: 1240655 - DNA, 25 bp, Homo sapien
gacgtcaggctcgatgcagaggtcc

SEQ ID NO: 1240656 - DNA, 25 bp, Homo sapien
ttttcacagctggatataaggtcac

SEQ ID NO: 1240657 - DNA, 25 bp, Homo sapien
tccttcatgtttggccttgtggtac

SEQ ID NO: 1240658 - DNA, 25 bp, Homo sapien
ttaggccgtatatcttttctctcct

SEQ ID NO: 1240659 - DNA, 25 bp, Homo sapien
tctccttcatgtttggccttgtggt

SEQ ID NO: 1240660 - DNA, 25 bp, Homo sapien
tctctccttcatgtttggccttgtg

SEQ ID NO: 1240661 - DNA, 25 bp, Homo sapien
gccaagacgagaaccaaacacagaa

SEQ ID NO: 1240662 - DNA, 25 bp, Homo sapien
tgaattaatctcatcccagggtcaa

SEQ ID NO: 1240663 - DNA, 25 bp, Homo sapien
ttccagtgcagacgagggaacacca

SEQ ID NO: 1240664 - DNA, 25 bp, Homo sapien
aaacgtcaccgacctgcctgaggtg

SEQ ID NO: 1240665 - DNA, 25 bp, Homo sapien
cagctgcaagcaccatctataaaag

SEQ ID NO: 1240666 - DNA, 25 bp, Homo sapien
cagatacctatgtctaaccatggtg

SEQ ID NO: 1240667 - DNA, 25 bp, Homo sapien
caagatactccaaggtgacaaccga

SEQ ID NO: 1240668 - DNA, 25 bp, Homo sapien
caaccgaggttatctgggtaactga

SEQ ID NO: 1240669 - DNA, 25 bp, Homo sapien
tctgagcaggcacaagaaatccaag

SEQ ID NO: 1240670 - DNA, 25 bp, Homo sapien
cagaaactagaatgtgaagggagct

SEQ ID NO: 1240671 - DNA, 25 bp, Homo sapien
tcaatagaggtagccctgacgctga

SEQ ID NO: 1240672 - DNA, 25 bp, Homo sapien
gaccacaccggagccaatcattatt

SEQ ID NO: 1240673 - DNA, 25 bp, Homo sapien
gaagggatggcatcaggggggacat

SEQ ID NO: 1240674 - DNA, 25 bp, Homo sapien
ctgggaaccagatgaagggatggca

SEQ ID NO: 1240675 - DNA, 25 bp, Homo sapien
gaaccagatgaagggatggcatcag

SEQ ID NO: 1240676 - DNA, 25 bp, Homo sapien
ggaaccagatgaagggatggcatca

SEQ ID NO: 1240677 - DNA, 25 bp, Homo sapien
tatactggaactaagcagaatggcc

SEQ ID NO: 1240678 - DNA, 25 bp, Homo sapien
ccatgagctcctgggtagcagccac

SEQ ID NO: 1240679 - DNA, 25 bp, Homo sapien
atccccagagagctcgtgtatactg

SEQ ID NO: 1240680 - DNA, 25 bp, Homo sapien
actaagcagaatggccatgagctcc

SEQ ID NO: 1240681 - DNA, 25 bp, Homo sapien
ttctctacctgggactgtactaaag

SEQ ID NO: 1240682 - DNA, 25 bp, Homo sapien
agaccaagcagcgtgcgaggtgaac

SEQ ID NO: 1240683 - DNA, 25 bp, Homo sapien
tggttttcacaaagttacacggata

SEQ ID NO: 1240684 - DNA, 25 bp, Homo sapien
tattgactcctgagcattcaaagga

SEQ ID NO: 1240685 - DNA, 25 bp, Homo sapien
accctccagatgacgaatccagctt

SEQ ID NO: 1240686 - DNA, 25 bp, Homo sapien
gcaaccctccagatgacgaatccag

SEQ ID NO: 1240687 - DNA, 25 bp, Homo sapien
taatgtcatcctctgcaagcaaccc

SEQ ID NO: 1240688 - DNA, 25 bp, Homo sapien
cacataatgtcatcctctgcaagca

SEQ ID NO: 1240689 - DNA, 25 bp, Homo sapien
ggcagagtatgaccctccaagctct

SEQ ID NO: 1240690 - DNA, 25 bp, Homo sapien
cagcaacgtcagcacaatggcagag

SEQ ID NO: 1240691 - DNA, 25 bp, Homo sapien
tggcagagtatgaccctccaagctc

SEQ ID NO: 1240692 - DNA, 25 bp, Homo sapien
acgtcagcacaatggcagagtatga

SEQ ID NO: 1240693 - DNA, 25 bp, Homo sapien
cacagcacaaattaggaacgtatgg

SEQ ID NO: 1240694 - DNA, 25 bp, Homo sapien
attaggaacgtatggggatggtagt

SEQ ID NO: 1240695 - DNA, 25 bp, Homo sapien
tatttcaagcaggttgttgttggtg

SEQ ID NO: 1240696 - DNA, 25 bp, Homo sapien
gatatttcaagcaggttgttgttgg

SEQ ID NO: 1240697 - DNA, 25 bp, Homo sapien
ggtggaagaccatatatgctaacga

SEQ ID NO: 1240698 - DNA, 25 bp, Homo sapien
ctaaacatggtaaagggagatccta

SEQ ID NO: 1240699 - DNA, 25 bp, Homo sapien
gacttgccagataggcactgggcaa

SEQ ID NO: 1240700 - DNA, 25 bp, Homo sapien
aaagtacagaggctgcgtctggctc

SEQ ID NO: 1240701 - DNA, 25 bp, Homo sapien
acgtcaggcagggctcacagggcat

SEQ ID NO: 1240702 - DNA, 25 bp, Homo sapien
ctgatggcacgtcaggcagggctca

SEQ ID NO: 1240703 - DNA, 25 bp, Homo sapien
atggcacgtcaggcagggctcacag

SEQ ID NO: 1240704 - DNA, 25 bp, Homo sapien
cacgtcaggcagggctcacagggca

SEQ ID NO: 1240705 - DNA, 25 bp, Homo sapien
gaacaggtttagaggcacagttgcc

SEQ ID NO: 1240706 - DNA, 25 bp, Homo sapien
cacagttgccttgggcaaaggaaca

SEQ ID NO: 1240707 - DNA, 25 bp, Homo sapien
tcaatagccagatgcactgaacagg

SEQ ID NO: 1240708 - DNA, 25 bp, Homo sapien
gccttgggcaaaggaacagaatttg

SEQ ID NO: 1240709 - DNA, 25 bp, Homo sapien
aatattcctatgactcgactttaga

SEQ ID NO: 1240710 - DNA, 25 bp, Homo sapien
aaactcaatattcctatgactcgac

SEQ ID NO: 1240711 - DNA, 25 bp, Homo sapien
atctgtccaaactcaatattcctat

SEQ ID NO: 1240712 - DNA, 25 bp, Homo sapien
ccaaactcaatattcctatgactcg

SEQ ID NO: 1240713 - DNA, 25 bp, Homo sapien
agaggcagggccatagggtcaggca

SEQ ID NO: 1240714 - DNA, 25 bp, Homo sapien
gcagggccatagggtcaggcaggct

SEQ ID NO: 1240715 - DNA, 25 bp, Homo sapien
gaggcagggccatagggtcaggcag

SEQ ID NO: 1240716 - DNA, 25 bp, Homo sapien
cagaggcagggccatagggtcaggc

SEQ ID NO: 1240717 - DNA, 25 bp, Homo sapien
tgaatgtcacagaggcaaagtggcc

SEQ ID NO: 1240718 - DNA, 25 bp, Homo sapien
agtttttgcagcttgcaggcaggtc

SEQ ID NO: 1240719 - DNA, 25 bp, Homo sapien
gtaagcacttcttgaatgtcacaga

SEQ ID NO: 1240720 - DNA, 25 bp, Homo sapien
ggcaggtctcagttgtaagcacttc

SEQ ID NO: 1240721 - DNA, 25 bp, Homo sapien
caagagcactctccaagcaaagttt

SEQ ID NO: 1240722 - DNA, 25 bp, Homo sapien
tcaagagcactctccaagcaaagtt

SEQ ID NO: 1240723 - DNA, 25 bp, Homo sapien
agagcactctccaagcaaagttttt

SEQ ID NO: 1240724 - DNA, 25 bp, Homo sapien
agcactctccaagcaaagtttttcc

SEQ ID NO: 1240725 - DNA, 25 bp, Homo sapien
tgacccctatttcacccccatattc

SEQ ID NO: 1240726 - DNA, 25 bp, Homo sapien
ctttgtccactgatagtctttccat

SEQ ID NO: 1240727 - DNA, 25 bp, Homo sapien
tcattcaatctatttcctggatttc

SEQ ID NO: 1240728 - DNA, 25 bp, Homo sapien
tggcaaaacttcctcagattctatt

SEQ ID NO: 1240729 - DNA, 25 bp, Homo sapien
ggcaaaacttcctcagattctattt

SEQ ID NO: 1240730 - DNA, 25 bp, Homo sapien
aacaggcaaccccagcatttggtgc

SEQ ID NO: 1240731 - DNA, 25 bp, Homo sapien
gtcagccacacaaactttccatatt

SEQ ID NO: 1240732 - DNA, 25 bp, Homo sapien
tattcactggaacaacggggctgga

SEQ ID NO: 1240733 - DNA, 25 bp, Homo sapien
acaaacgaaataggtgaggagaggc

SEQ ID NO: 1240734 - DNA, 25 bp, Homo sapien
agcctaaatgggctgggcttgtccc

SEQ ID NO: 1240735 - DNA, 25 bp, Homo sapien
gtcgatggtactgccgctcactgac

SEQ ID NO: 1240736 - DNA, 25 bp, Homo sapien
gacagcctaaatgggctgggcttgt

SEQ ID NO: 1240737 - DNA, 25 bp, Homo sapien
tagagaatgtttagactgtcgatgg

SEQ ID NO: 1240738 - DNA, 25 bp, Homo sapien
aactgttgttgatgggtctgcctca

SEQ ID NO: 1240739 - DNA, 25 bp, Homo sapien
agaggacaaggacatcctttgtagt

SEQ ID NO: 1240740 - DNA, 25 bp, Homo sapien
ctgttgttgatgggtctgcctcacc

SEQ ID NO: 1240741 - DNA, 25 bp, Homo sapien
tgaactgttgttgatgggtctgcct

SEQ ID NO: 1240742 - DNA, 25 bp, Homo sapien
aacctgtgggcaagtgatccttctg

SEQ ID NO: 1240743 - DNA, 25 bp, Homo sapien
atgactcacgtgtctttggtacaaa

SEQ ID NO: 1240744 - DNA, 25 bp, Homo sapien
gaatgcaacaccacaaccggccttt

SEQ ID NO: 1240745 - DNA, 25 bp, Homo sapien
cagccttgaacctgtgggcaagtga

SEQ ID NO: 1240746 - DNA, 25 bp, Homo sapien
agagatctggccaggttatgaaaac

SEQ ID NO: 1240747 - DNA, 25 bp, Homo sapien
ctttctcgttgagagatctggccag

SEQ ID NO: 1240748 - DNA, 25 bp, Homo sapien
gagatctggccaggttatgaaaacc

SEQ ID NO: 1240749 - DNA, 25 bp, Homo sapien
tgtaaaaggaattcatctttgataa

SEQ ID NO: 1240750 - DNA, 25 bp, Homo sapien
cagttatagctatgataaagtccta

SEQ ID NO: 1240751 - DNA, 25 bp, Homo sapien
catctttgataacatgggtttcttt

SEQ ID NO: 1240752 - DNA, 25 bp, Homo sapien
tatcagttatagctatgataaagtc

SEQ ID NO: 1240753 - DNA, 25 bp, Homo sapien
tcctctgggtttctagactgtggtg

SEQ ID NO: 1240754 - DNA, 25 bp, Homo sapien
tggtacttggcggtgagtggtttgg

SEQ ID NO: 1240755 - DNA, 25 bp, Homo sapien
ggtttctagactgtggtggtacttg

SEQ ID NO: 1240756 - DNA, 25 bp, Homo sapien
agctggcagctctcttttcatgtgt

SEQ ID NO: 1240757 - DNA, 25 bp, Homo sapien
ggcagaatcacgagccaattgaacc

SEQ ID NO: 1240758 - DNA, 25 bp, Homo sapien
caggtatgccttgatagtaacacaa

SEQ ID NO: 1240759 - DNA, 25 bp, Homo sapien
tctgatatggaaagaggttctccac

SEQ ID NO: 1240760 - DNA, 25 bp, Homo sapien
taaagaccagtcatcacggagcatc

SEQ ID NO: 1240761 - DNA, 25 bp, Homo sapien
tgaccaatgagaaaagacataagcc

SEQ ID NO: 1240762 - DNA, 25 bp, Homo sapien
caagagcattcctgggtcaaagcgt

SEQ ID NO: 1240763 - DNA, 25 bp, Homo sapien
taggcaagataggaaatctgaggcc

SEQ ID NO: 1240764 - DNA, 25 bp, Homo sapien
gtgtgtacaatatggcagctctagg

SEQ ID NO: 1240765 - DNA, 25 bp, Homo sapien
agcacagcctggctgtgagtgacat

SEQ ID NO: 1240766 - DNA, 25 bp, Homo sapien
cgtgcctgggcaaggagcaggagca

SEQ ID NO: 1240767 - DNA, 25 bp, Homo sapien
caggagtgggtagcacagcctggct

SEQ ID NO: 1240768 - DNA, 25 bp, Homo sapien
aaggagcaggagcaggagtgggtag

SEQ ID NO: 1240769 - DNA, 25 bp, Homo sapien
tagttggggccagcgacgttattgg

SEQ ID NO: 1240770 - DNA, 25 bp, Homo sapien
ggccagcgacgttattggtggattc

SEQ ID NO: 1240771 - DNA, 25 bp, Homo sapien
ggggccagcgacgttattggtggat

SEQ ID NO: 1240772 - DNA, 25 bp, Homo sapien
ttggggccagcgacgttattggtgg

SEQ ID NO: 1240773 - DNA, 25 bp, Homo sapien
cactgtgagttgccatccaccttgg

SEQ ID NO: 1240774 - DNA, 25 bp, Homo sapien
tgacactgtgagttgccatccacct

SEQ ID NO: 1240775 - DNA, 25 bp, Homo sapien
atgacactgtgagttgccatccacc

SEQ ID NO: 1240776 - DNA, 25 bp, Homo sapien
gacactgtgagttgccatccacctt

SEQ ID NO: 1240777 - DNA, 25 bp, Homo sapien
tccttggtgttctatgcgaatgtgt

SEQ ID NO: 1240778 - DNA, 25 bp, Homo sapien
tctccggcccaagacctgccctttc

SEQ ID NO: 1240779 - DNA, 25 bp, Homo sapien
ctcctctgcattgagctgtccttgg

SEQ ID NO: 1240780 - DNA, 25 bp, Homo sapien
ctgacccacttctccggcccaagac

SEQ ID NO: 1240781 - DNA, 25 bp, Homo sapien
tacaaaagtaatggtgctttctatc

SEQ ID NO: 1240782 - DNA, 25 bp, Homo sapien
gacgttactggcatgcctgcgtaca

SEQ ID NO: 1240783 - DNA, 25 bp, Homo sapien
cttctgctttaaggagacgttactg

SEQ ID NO: 1240784 - DNA, 25 bp, Homo sapien
tgttattggtaattgtttgctgtgg

SEQ ID NO: 1240785 - DNA, 25 bp, Homo sapien
aactggcgtcttctggtagtaaatc

SEQ ID NO: 1240786 - DNA, 25 bp, Homo sapien
gtaaatccaatggttgctgtgatgg

SEQ ID NO: 1240787 - DNA, 25 bp, Homo sapien
gatggtgagaatgtcatctgctggt

SEQ ID NO: 1240788 - DNA, 25 bp, Homo sapien
tctacatatgttgttaactggcgtc

SEQ ID NO: 1240789 - DNA, 25 bp, Homo sapien
ttctcagagcgttggaaaatggtgc

SEQ ID NO: 1240790 - DNA, 25 bp, Homo sapien
cgttggaaaatggtgcataaccaaa

SEQ ID NO: 1240791 - DNA, 25 bp, Homo sapien
aatggtgcataaccaaagtgactca

SEQ ID NO: 1240792 - DNA, 25 bp, Homo sapien
cagagcgttggaaaatggtgcataa

SEQ ID NO: 1240793 - DNA, 25 bp, Homo sapien
cagcaatgacatttcagcctctgag

SEQ ID NO: 1240794 - DNA, 25 bp, Homo sapien
gaaggctgtagtaaagtctgcatgg

SEQ ID NO: 1240795 - DNA, 25 bp, Homo sapien
gggccggtcactaggagcccgcact

SEQ ID NO: 1240796 - DNA, 25 bp, Homo sapien
tacagtgttagcttctgcgaaggct

SEQ ID NO: 1240797 - DNA, 25 bp, Homo sapien
cactgggctataagataaagggcct

SEQ ID NO: 1240798 - DNA, 25 bp, Homo sapien
ggcaccactgggctataagataaag

SEQ ID NO: 1240799 - DNA, 25 bp, Homo sapien
gatcttatttagtccttccaatgtc

SEQ ID NO: 1240800 - DNA, 25 bp, Homo sapien
gctataagataaagggcctgccctg

SEQ ID NO: 1240801 - DNA, 25 bp, Homo sapien
gcagtggtggcgagctggaaagtga

SEQ ID NO: 1240802 - DNA, 25 bp, Homo sapien
agtggtggcgagctggaaagtgact

SEQ ID NO: 1240803 - DNA, 25 bp, Homo sapien
tggtggcgagctggaaagtgactgt

SEQ ID NO: 1240804 - DNA, 25 bp, Homo sapien
cagtggtggcgagctggaaagtgac

SEQ ID NO: 1240805 - DNA, 25 bp, Homo sapien
tcccttgtggcgcagatcctgggag

SEQ ID NO: 1240806 - DNA, 25 bp, Homo sapien
gaggtccggcagcagttcagtgcat

SEQ ID NO: 1240807 - DNA, 25 bp, Homo sapien
gatcgtggtcgctaccattcctcgt

SEQ ID NO: 1240808 - DNA, 25 bp, Homo sapien
gcatcgaggtttgcgtgctccagaa

SEQ ID NO: 1240809 - DNA, 25 bp, Homo sapien
tgttaaatccaatgtagttttgatt

SEQ ID NO: 1240810 - DNA, 25 bp, Homo sapien
tggtcctacccaaggttcttggtgc

SEQ ID NO: 1240811 - DNA, 25 bp, Homo sapien
gcctttggacattcctctaaaatgg

SEQ ID NO: 1240812 - DNA, 25 bp, Homo sapien
tttgcttactattccagagaacatc

SEQ ID NO: 1240813 - DNA, 25 bp, Homo sapien
ggcagaatcacgagccaattgaacc

SEQ ID NO: 1240814 - DNA, 25 bp, Homo sapien
taaagaccagtcatcacggagcatc

SEQ ID NO: 1240815 - DNA, 25 bp, Homo sapien
caggtatgccttgatagtaacacaa

SEQ ID NO: 1240816 - DNA, 25 bp, Homo sapien
tctgatatggaaagaggttctccac

SEQ ID NO: 1240817 - DNA, 25 bp, Homo sapien
gagcagggaggaatcaaacaagagc

SEQ ID NO: 1240818 - DNA, 25 bp, Homo sapien
ggtttaggcaggaaaggagactcat

SEQ ID NO: 1240819 - DNA, 25 bp, Homo sapien
ggacttgagtgggaaggtttaggca

SEQ ID NO: 1240820 - DNA, 25 bp, Homo sapien
atcaaacaagagctggctgggaagc

SEQ ID NO: 1240821 - DNA, 25 bp, Homo sapien
gcagatctgagctccagtcaggtct

SEQ ID NO: 1240822 - DNA, 25 bp, Homo sapien
gtggggcagatctgagctccagtca

SEQ ID NO: 1240823 - DNA, 25 bp, Homo sapien
gtaaggggacgagtccatgctctgc

SEQ ID NO: 1240824 - DNA, 25 bp, Homo sapien
gggcagatctgagctccagtcaggt

SEQ ID NO: 1240825 - DNA, 25 bp, Homo sapien
ttccacatagatgatctccagccag

SEQ ID NO: 1240826 - DNA, 25 bp, Homo sapien
cactcttgtatcagagccctttcct

SEQ ID NO: 1240827 - DNA, 25 bp, Homo sapien
gtccacattccacatagatgatctc

SEQ ID NO: 1240828 - DNA, 25 bp, Homo sapien
cttttcgttcgtgtacactcttgta

SEQ ID NO: 1240829 - DNA, 25 bp, Homo sapien
cccaggctgcccctgagtgagcctg

SEQ ID NO: 1240830 - DNA, 25 bp, Homo sapien
ctgcccctgagtgagcctgagagtt

SEQ ID NO: 1240831 - DNA, 25 bp, Homo sapien
gctgcccctgagtgagcctgagagt

SEQ ID NO: 1240832 - DNA, 25 bp, Homo sapien
aggctgcccctgagtgagcctgaga

SEQ ID NO: 1240833 - DNA, 25 bp, Homo sapien
agttttctcactaatcttgcagcaa

SEQ ID NO: 1240834 - DNA, 25 bp, Homo sapien
gcaaaacattcctgacccgctggta

SEQ ID NO: 1240835 - DNA, 25 bp, Homo sapien
gcttgaacccgactttgctgctgct

SEQ ID NO: 1240836 - DNA, 25 bp, Homo sapien
tgagtttttggtgcaaaccgcccgc

SEQ ID NO: 1240837 - DNA, 25 bp, Homo sapien
gctgctcgcgagtgctgcctgggcc

SEQ ID NO: 1240838 - DNA, 25 bp, Homo sapien
cgctgctcgcgagtgctgcctgggc

SEQ ID NO: 1240839 - DNA, 25 bp, Homo sapien
ccgctgctcgcgagtgctgcctggg

SEQ ID NO: 1240840 - DNA, 25 bp, Homo sapien
gccgctgctcgcgagtgctgcctgg

SEQ ID NO: 1240841 - DNA, 25 bp, Homo sapien
gtagtaggcgatgcccagcacccac

SEQ ID NO: 1240842 - DNA, 25 bp, Homo sapien
atgtagtaggcgatgcccagcaccc

SEQ ID NO: 1240843 - DNA, 25 bp, Homo sapien
gaaggcgaagcagagcagcatccgc

SEQ ID NO: 1240844 - DNA, 25 bp, Homo sapien
gcgaagcagagcagcatccgcgagc

SEQ ID NO: 1240845 - DNA, 25 bp, Homo sapien
cgcgcccccggccagcgcagagccg

SEQ ID NO: 1240846 - DNA, 25 bp, Homo sapien
cagcgcagagccgccccccgagtac

SEQ ID NO: 1240847 - DNA, 25 bp, Homo sapien
cgcccccggccagcgcagagccgcc

SEQ ID NO: 1240848 - DNA, 25 bp, Homo sapien
ggccagcgcagagccgccccccgag

SEQ ID NO: 1240849 - DNA, 25 bp, Homo sapien
gcccaccagagtgaggaatcagcct

SEQ ID NO: 1240850 - DNA, 25 bp, Homo sapien
cacgtgtactaatgaaagtggcaga

SEQ ID NO: 1240851 - DNA, 25 bp, Homo sapien
agacttctgcatggaagacccctca

SEQ ID NO: 1240852 - DNA, 25 bp, Homo sapien
ctaagaatcacacacttcaggagtg

SEQ ID NO: 1240853 - DNA, 25 bp, Homo sapien
ctagaagttaggcaggacagtggcc

SEQ ID NO: 1240854 - DNA, 25 bp, Homo sapien
ccactcagtgctgggtaaagcagtt

SEQ ID NO: 1240855 - DNA, 25 bp, Homo sapien
aactgacagcgggtctgaagactca

SEQ ID NO: 1240856 - DNA, 25 bp, Homo sapien
caaagccctaagaaacatgagcagt

SEQ ID NO: 1240857 - DNA, 25 bp, Homo sapien
ctttccaaatgaggccgcagtatga

SEQ ID NO: 1240858 - DNA, 25 bp, Homo sapien
caaatgaggccgcagtatgagggca

SEQ ID NO: 1240859 - DNA, 25 bp, Homo sapien
ttccaaatgaggccgcagtatgagg

SEQ ID NO: 1240860 - DNA, 25 bp, Homo sapien
tccaaatgaggccgcagtatgaggg

SEQ ID NO: 1240861 - DNA, 25 bp, Homo sapien
caagacccgtcctgggtcagagaag

SEQ ID NO: 1240862 - DNA, 25 bp, Homo sapien
ctgcaggtctgctctaagcaagacc

SEQ ID NO: 1240863 - DNA, 25 bp, Homo sapien
tctgctctaagcaagacccgtcctg

SEQ ID NO: 1240864 - DNA, 25 bp, Homo sapien
gtcagagaagtcaagccagaccagc

SEQ ID NO: 1240865 - DNA, 25 bp, Homo sapien
caaatcagggaaatctcgggtgtcc

SEQ ID NO: 1240866 - DNA, 25 bp, Homo sapien
tacacagaggctccaggcaaatcag

SEQ ID NO: 1240867 - DNA, 25 bp, Homo sapien
cacactctgatattggcgtgaccgt

SEQ ID NO: 1240868 - DNA, 25 bp, Homo sapien
tgtacgccaacatccgggtgctgat

SEQ ID NO: 1240869 - DNA, 25 bp, Homo sapien
tagatatcagggaagtagcaacgac

SEQ ID NO: 1240870 - DNA, 25 bp, Homo sapien
gctgggataactgaagactgaattc

SEQ ID NO: 1240871 - DNA, 25 bp, Homo sapien
gcttctaccgcctcctgctgatgga

SEQ ID NO: 1240872 - DNA, 25 bp, Homo sapien
cttagaagcgtagccaaagggccct

SEQ ID NO: 1240873 - DNA, 25 bp, Homo sapien
gaaaacatagagtgtttaagcaagc

SEQ ID NO: 1240874 - DNA, 25 bp, Homo sapien
tgcacattaccaggcaaagagctgg

SEQ ID NO: 1240875 - DNA, 25 bp, Homo sapien
caatgtcctatggagccatttgaga

SEQ ID NO: 1240876 - DNA, 25 bp, Homo sapien
tagagtgtttaagcaagctacctgg

SEQ ID NO: 1240877 - DNA, 25 bp, Homo sapien
tgggcataagctccagaggccctgt

SEQ ID NO: 1240878 - DNA, 25 bp, Homo sapien
gcatcaaccagtaaaaccattcgga

SEQ ID NO: 1240879 - DNA, 25 bp, Homo sapien
ggaggaggccatcttatacgtttca

SEQ ID NO: 1240880 - DNA, 25 bp, Homo sapien
gaattacaatgaggcacccttgcca

SEQ ID NO: 1240881 - DNA, 25 bp, Homo sapien
ggacctcgggcttaacctcaatatg

SEQ ID NO: 1240882 - DNA, 25 bp, Homo sapien
tcacctaggaggtaacagaggctct

SEQ ID NO: 1240883 - DNA, 25 bp, Homo sapien
tgcagatagctccttctagcaactg

SEQ ID NO: 1240884 - DNA, 25 bp, Homo sapien
taaacacgatctcagcaaggccaat

SEQ ID NO: 1240885 - DNA, 25 bp, Homo sapien
catctgggtgctcaacactgtggct

SEQ ID NO: 1240886 - DNA, 25 bp, Homo sapien
tgcatgactgtagcaaggttgctca

SEQ ID NO: 1240887 - DNA, 25 bp, Homo sapien
tttcctgggagcagaactcatgccc

SEQ ID NO: 1240888 - DNA, 25 bp, Homo sapien
ttctttccaaccaccaaggctgaag

SEQ ID NO: 1240889 - DNA, 25 bp, Homo sapien
cacagcatggcctccctgaaaggca

SEQ ID NO: 1240890 - DNA, 25 bp, Homo sapien
caaggtggcctaggattctcaactc

SEQ ID NO: 1240891 - DNA, 25 bp, Homo sapien
cctgctaaagcaccaatatgtaaac

SEQ ID NO: 1240892 - DNA, 25 bp, Homo sapien
gagtgtgataaacatcgtctaggaa

SEQ ID NO: 1240893 - DNA, 25 bp, Homo sapien
ccccagtcagggactaagtgtatca

SEQ ID NO: 1240894 - DNA, 25 bp, Homo sapien
gagcttgcttgtatgcccaattaga

SEQ ID NO: 1240895 - DNA, 25 bp, Homo sapien
aaagtgtaagcgaaaccatccccag

SEQ ID NO: 1240896 - DNA, 25 bp, Homo sapien
tctgtgtttaccgtgcccagcatcc

SEQ ID NO: 1240897 - DNA, 25 bp, Homo sapien
cccgtgagtcagatgctcagcacat

SEQ ID NO: 1240898 - DNA, 25 bp, Homo sapien
ggagagagacattgaaactctgcca

SEQ ID NO: 1240899 - DNA, 25 bp, Homo sapien
tctgccaataatcctttctaggagt

SEQ ID NO: 1240900 - DNA, 25 bp, Homo sapien
caccttccttcgtatattcacatgg

SEQ ID NO: 1240901 - DNA, 25 bp, Homo sapien
gagtggcacacattccaatcctgga

SEQ ID NO: 1240902 - DNA, 25 bp, Homo sapien
ctgatctctggttgagacaagcatt

SEQ ID NO: 1240903 - DNA, 25 bp, Homo sapien
atctctggttgagacaagcatttct

SEQ ID NO: 1240904 - DNA, 25 bp, Homo sapien
tgatctctggttgagacaagcattt

SEQ ID NO: 1240905 - DNA, 25 bp, Homo sapien
gatctctggttgagacaagcatttc

SEQ ID NO: 1240906 - DNA, 25 bp, Homo sapien
gaatacaggcgctctgagccaccat

SEQ ID NO: 1240907 - DNA, 25 bp, Homo sapien
tcactttactccatggactcaccct

SEQ ID NO: 1240908 - DNA, 25 bp, Homo sapien
ataaactcgctttcactttactcca

SEQ ID NO: 1240909 - DNA, 25 bp, Homo sapien
tgcctggccctgtttattttcttaa

SEQ ID NO: 1240910 - DNA, 25 bp, Homo sapien
aggccatggttccaagcccgactgg

SEQ ID NO: 1240911 - DNA, 25 bp, Homo sapien
ggctacagtaaaggagccggccaaa

SEQ ID NO: 1240912 - DNA, 25 bp, Homo sapien
ataggagatcggcacaaaataaggt

SEQ ID NO: 1240913 - DNA, 25 bp, Homo sapien
ggagatcggcacaaaataaggtcat

SEQ ID NO: 1240914 - DNA, 25 bp, Homo sapien
caagcggttcaaagaggaagctacc

SEQ ID NO: 1240915 - DNA, 25 bp, Homo sapien
tcactgcctcacaatgacaagcggt

SEQ ID NO: 1240916 - DNA, 25 bp, Homo sapien
catcacgttagagccaaggacaggg

SEQ ID NO: 1240917 - DNA, 25 bp, Homo sapien
cacatacggtgtcataaaagggtac

SEQ ID NO: 1240918 - DNA, 25 bp, Homo sapien
gagttccacattgctttctaaagcc

SEQ ID NO: 1240919 - DNA, 25 bp, Homo sapien
tggccccgagttccacattgctttc

SEQ ID NO: 1240920 - DNA, 25 bp, Homo sapien
cccgagttccacattgctttctaaa

SEQ ID NO: 1240921 - DNA, 25 bp, Homo sapien
gccccgagttccacattgctttcta

SEQ ID NO: 1240922 - DNA, 25 bp, Homo sapien
aatgagatcagttatggcccagaga

SEQ ID NO: 1240923 - DNA, 25 bp, Homo sapien
tcagttatggcccagagacttcatg

SEQ ID NO: 1240924 - DNA, 25 bp, Homo sapien
ggcccagagacttcatgtatagtct

SEQ ID NO: 1240925 - DNA, 25 bp, Homo sapien
acaagaattaaggtgtaatgagatc

SEQ ID NO: 1240926 - DNA, 25 bp, Homo sapien
gatcacagtagctgagtggagcaca

SEQ ID NO: 1240927 - DNA, 25 bp, Homo sapien
tgtcaacctgatccaaaacagtggt

SEQ ID NO: 1240928 - DNA, 25 bp, Homo sapien
taatatgagtgacctacagcaggac

SEQ ID NO: 1240929 - DNA, 25 bp, Homo sapien
cactgtcatggcttattagaccact

SEQ ID NO: 1240930 - DNA, 25 bp, Homo sapien
gactgccaatgaaacagagatacat

SEQ ID NO: 1240931 - DNA, 25 bp, Homo sapien
taataggactgccaatgaaacagag

SEQ ID NO: 1240932 - DNA, 25 bp, Homo sapien
tctaataggactgccaatgaaacag

SEQ ID NO: 1240933 - DNA, 25 bp, Homo sapien
ataggactgccaatgaaacagagat

SEQ ID NO: 1240934 - DNA, 25 bp, Homo sapien
cattgctgtgatgaaggtctttctt

SEQ ID NO: 1240935 - DNA, 25 bp, Homo sapien
tttaatggggtcaatttcattccag

SEQ ID NO: 1240936 - DNA, 25 bp, Homo sapien
ctccattgctgtgatgaaggtcttt

SEQ ID NO: 1240937 - DNA, 25 bp, Homo sapien
tggggtcaatttcattccagtcctc

SEQ ID NO: 1240938 - DNA, 25 bp, Homo sapien
agatggcttcctggcccctggcagt

SEQ ID NO: 1240939 - DNA, 25 bp, Homo sapien
aaagcaagatggcttcctggcccct

SEQ ID NO: 1240940 - DNA, 25 bp, Homo sapien
atggcttcctggcccctggcagtac

SEQ ID NO: 1240941 - DNA, 25 bp, Homo sapien
tcaaagcaagatggcttcctggccc

SEQ ID NO: 1240942 - DNA, 25 bp, Homo sapien
caaacgctgcttcctgaatgggcac

SEQ ID NO: 1240943 - DNA, 25 bp, Homo sapien
cacctgttgttggactcagaaggaa

SEQ ID NO: 1240944 - DNA, 25 bp, Homo sapien
aaaaatgtgtctggcatagtggcac

SEQ ID NO: 1240945 - DNA, 25 bp, Homo sapien
gacatcatctctccaggtgtgaaaa

SEQ ID NO: 1240946 - DNA, 25 bp, Homo sapien
ggccagtggtgcctccccagcgctc

SEQ ID NO: 1240947 - DNA, 25 bp, Homo sapien
gccacggtggaatctgtggcggtgc

SEQ ID NO: 1240948 - DNA, 25 bp, Homo sapien
ggtggaatctgtggcggtgcgggca

SEQ ID NO: 1240949 - DNA, 25 bp, Homo sapien
ccaggaggagccacggtggaatctg

SEQ ID NO: 1240950 - DNA, 25 bp, Homo sapien
cggcgtgctggggacagcaaagtct

SEQ ID NO: 1240951 - DNA, 25 bp, Homo sapien
agcaaagtctgaggactctggttgg

SEQ ID NO: 1240952 - DNA, 25 bp, Homo sapien
tctgaggactctggttggtgtgggc

SEQ ID NO: 1240953 - DNA, 25 bp, Homo sapien
aaagtctgaggactctggttggtgt

SEQ ID NO: 1240954 - DNA, 25 bp, Homo sapien
ttctataaaaggagatgttctcagc

SEQ ID NO: 1240955 - DNA, 25 bp, Homo sapien
gttttctataaaaggagatgttctc

SEQ ID NO: 1240956 - DNA, 25 bp, Homo sapien
aaggagatgttctcagcttgtccca

SEQ ID NO: 1240957 - DNA, 25 bp, Homo sapien
aggagatgttctcagcttgtcccac

SEQ ID NO: 1240958 - DNA, 25 bp, Homo sapien
tccacctggttgaacttgttgcggg

SEQ ID NO: 1240959 - DNA, 25 bp, Homo sapien
cgaagcttatcactctccacctggt

SEQ ID NO: 1240960 - DNA, 25 bp, Homo sapien
gggatggctctgtccattcgaagct

SEQ ID NO: 1240961 - DNA, 25 bp, Homo sapien
gcggaccatcgtccctccaacataa

SEQ ID NO: 1240962 - DNA, 25 bp, Homo sapien
ctattgatcaacacgaaggtagata

SEQ ID NO: 1240963 - DNA, 25 bp, Homo sapien
ttctaatatctaagaggacctaata

SEQ ID NO: 1240964 - DNA, 25 bp, Homo sapien
taaagcatagcccagagttttttgt

SEQ ID NO: 1240965 - DNA, 25 bp, Homo sapien
tacatctagaaaggtaaataaagca

SEQ ID NO: 1240966 - DNA, 25 bp, Homo sapien
tattccttgtatctatccttcaggg

SEQ ID NO: 1240967 - DNA, 25 bp, Homo sapien
gtgtgctcacatggtagggaaaaaa

SEQ ID NO: 1240968 - DNA, 25 bp, Homo sapien
cctgtcctgtaggacaggtggatca

SEQ ID NO: 1240969 - DNA, 25 bp, Homo sapien
gcacctggcccaacaatagatttgt

SEQ ID NO: 1240970 - DNA, 25 bp, Homo sapien
gatcagggcgccaccctttaggacc

SEQ ID NO: 1240971 - DNA, 25 bp, Homo sapien
aggaccctgtggtgcggcatacaga

SEQ ID NO: 1240972 - DNA, 25 bp, Homo sapien
tctaccatggagcagcggttccgtc

SEQ ID NO: 1240973 - DNA, 25 bp, Homo sapien
ttccgtcacaagaatctcaggaggc

SEQ ID NO: 1240974 - DNA, 25 bp, Homo sapien
ttggagttgggcagcaaattgatgc

SEQ ID NO: 1240975 - DNA, 25 bp, Homo sapien
tgcattcccaggatgatggcagaaa

SEQ ID NO: 1240976 - DNA, 25 bp, Homo sapien
ttcttgacaacaaagacgatcctca

SEQ ID NO: 1240977 - DNA, 25 bp, Homo sapien
acaaagacgatcctcatggtcatca

SEQ ID NO: 1240978 - DNA, 25 bp, Homo sapien
tcatggtcatcactgcattcccagg

SEQ ID NO: 1240979 - DNA, 25 bp, Homo sapien
tgctacatcatagtaaacggaaccg

SEQ ID NO: 1240980 - DNA, 25 bp, Homo sapien
gttgaatgacttactgaacatgagc

SEQ ID NO: 1240981 - DNA, 25 bp, Homo sapien
tgctgagacgagcagacctaggttg

SEQ ID NO: 1240982 - DNA, 25 bp, Homo sapien
ggaaccgatccaatcatgtcctatt

SEQ ID NO: 1240983 - DNA, 25 bp, Homo sapien
ggtcttgaggatgaacagtcttgcc

SEQ ID NO: 1240984 - DNA, 25 bp, Homo sapien
gatgccccgtggtcttgaggatgaa

SEQ ID NO: 1240985 - DNA, 25 bp, Homo sapien
tctgtcccatgccaaggtttcctcc

SEQ ID NO: 1240986 - DNA, 25 bp, Homo sapien
aatggttcttaaatggtgatgttga

SEQ ID NO: 1240987 - DNA, 25 bp, Homo sapien
tgacagcccacgaggacttctagaa

SEQ ID NO: 1240988 - DNA, 25 bp, Homo sapien
gcccacgaggacttctagaaacact

SEQ ID NO: 1240989 - DNA, 25 bp, Homo sapien
cagcccacgaggacttctagaaaca

SEQ ID NO: 1240990 - DNA, 25 bp, Homo sapien
ccacgaggacttctagaaacactta

SEQ ID NO: 1240991 - DNA, 25 bp, Homo sapien
ctgagagatgaacgatttcggcaaa

SEQ ID NO: 1240992 - DNA, 25 bp, Homo sapien
gagatgaacgatttcggcaaaaagt

SEQ ID NO: 1240993 - DNA, 25 bp, Homo sapien
gatgaacgatttcggcaaaaagtaa

SEQ ID NO: 1240994 - DNA, 25 bp, Homo sapien
gagagatgaacgatttcggcaaaaa

SEQ ID NO: 1240995 - DNA, 25 bp, Homo sapien
gacctggcttcattgtgaaacgtga

SEQ ID NO: 1240996 - DNA, 25 bp, Homo sapien
atcaccacgctggtggccggcagat

SEQ ID NO: 1240997 - DNA, 25 bp, Homo sapien
ttgtgaaacgtgatcaccacgctgg

SEQ ID NO: 1240998 - DNA, 25 bp, Homo sapien
ctgagtagggccgacctggcttcat

SEQ ID NO: 1240999 - DNA, 25 bp, Homo sapien
ttcttttatgagatggggcgggctt

SEQ ID NO: 1241000 - DNA, 25 bp, Homo sapien
agatggggcgggcttttcttaagca

SEQ ID NO: 1241001 - DNA, 25 bp, Homo sapien
cttttatgagatggggcgggctttt

SEQ ID NO: 1241002 - DNA, 25 bp, Homo sapien
atggggcgggcttttcttaagcacg

SEQ ID NO: 1241003 - DNA, 25 bp, Homo sapien
atcatttctaagaactcgcactttc

SEQ ID NO: 1241004 - DNA, 25 bp, Homo sapien
tttctaagaactcgcactttctcaa

SEQ ID NO: 1241005 - DNA, 25 bp, Homo sapien
aagaactcgcactttctcaattttc

SEQ ID NO: 1241006 - DNA, 25 bp, Homo sapien
tctaagaactcgcactttctcaatt

SEQ ID NO: 1241007 - DNA, 25 bp, Homo sapien
gctcattacactcgcagtgactgtc

SEQ ID NO: 1241008 - DNA, 25 bp, Homo sapien
ccccgaacccgtgagcgcatgaggc

SEQ ID NO: 1241009 - DNA, 25 bp, Homo sapien
ccttggcttgggcagcatcggcccc

SEQ ID NO: 1241010 - DNA, 25 bp, Homo sapien
agtgctcattacactcgcagtgact

SEQ ID NO: 1241011 - DNA, 25 bp, Homo sapien
gtttgcccaaataccattagtgatt

SEQ ID NO: 1241012 - DNA, 25 bp, Homo sapien
tctaggagtggagacacccatggtt

SEQ ID NO: 1241013 - DNA, 25 bp, Homo sapien
tattatcacagcagaaggttaacca

SEQ ID NO: 1241014 - DNA, 25 bp, Homo sapien
cgtagcaggagtcactctaggagtg

SEQ ID NO: 1241015 - DNA, 25 bp, Homo sapien
gacatcgatgatgggtgacacaacc

SEQ ID NO: 1241016 - DNA, 25 bp, Homo sapien
taatgacatcgatgatgggtgacac

SEQ ID NO: 1241017 - DNA, 25 bp, Homo sapien
tgggtgacacaacccgagtcctgtc

SEQ ID NO: 1241018 - DNA, 25 bp, Homo sapien
cgatgatgggtgacacaacccgagt

SEQ ID NO: 1241019 - DNA, 25 bp, Homo sapien
ccttcaagtcagcagatgcccccac

SEQ ID NO: 1241020 - DNA, 25 bp, Homo sapien
cgcccttcaagtcagcagatgcccc

SEQ ID NO: 1241021 - DNA, 25 bp, Homo sapien
gcccttcaagtcagcagatgccccc

SEQ ID NO: 1241022 - DNA, 25 bp, Homo sapien
cccttcaagtcagcagatgccccca

SEQ ID NO: 1241023 - DNA, 25 bp, Homo sapien
gattcctgcaaggagggcttcatca

SEQ ID NO: 1241024 - DNA, 25 bp, Homo sapien
agattcctgcaaggagggcttcatc

SEQ ID NO: 1241025 - DNA, 25 bp, Homo sapien
caagaaaccatgatacatgcaaggg

SEQ ID NO: 1241026 - DNA, 25 bp, Homo sapien
tgtggtcattccaacggaaggggac

SEQ ID NO: 1241027 - DNA, 25 bp, Homo sapien
gaaagaggggtacaagaaaccatga

SEQ ID NO: 1241028 - DNA, 25 bp, Homo sapien
cagggtgatgtaggcacaggtgttg

SEQ ID NO: 1241029 - DNA, 25 bp, Homo sapien
ttcacacagatgaaagctctttgag

SEQ ID NO: 1241030 - DNA, 25 bp, Homo sapien
accatcagttaaccctctgcccagt

SEQ ID NO: 1241031 - DNA, 25 bp, Homo sapien
tctatctagaatagttcatcttcac

SEQ ID NO: 1241032 - DNA, 25 bp, Homo sapien
aaacagacaaagtgctcttggggct

SEQ ID NO: 1241033 - DNA, 25 bp, Homo sapien
ggcgtcatgtaatcccacttgaata

SEQ ID NO: 1241034 - DNA, 25 bp, Homo sapien
tataggggcgactgggttcccctgc

SEQ ID NO: 1241035 - DNA, 25 bp, Homo sapien
tgctcaggcgtcatgtaatcccact

SEQ ID NO: 1241036 - DNA, 25 bp, Homo sapien
catgtaatcccacttgaataccaag

SEQ ID NO: 1241037 - DNA, 25 bp, Homo sapien
cacatccatcatcatgtcgtacttc

SEQ ID NO: 1241038 - DNA, 25 bp, Homo sapien
catgtcgtacttccccagttcttca

SEQ ID NO: 1241039 - DNA, 25 bp, Homo sapien
aatagaacttatccatcacaaacag

SEQ ID NO: 1241040 - DNA, 25 bp, Homo sapien
aacagcccaccagcaatcatggggg

SEQ ID NO: 1241041 - DNA, 25 bp, Homo sapien
aatggctagtagtgtgcacggcccc

SEQ ID NO: 1241042 - DNA, 25 bp, Homo sapien
ttctcacgtgaagctcttgagccct

SEQ ID NO: 1241043 - DNA, 25 bp, Homo sapien
tttggatcttactcgggcctctctg

SEQ ID NO: 1241044 - DNA, 25 bp, Homo sapien
gcccctcaggttggcaatggctagt

SEQ ID NO: 1241045 - DNA, 25 bp, Homo sapien
ccaggaggaggatactgaatgttcc

SEQ ID NO: 1241046 - DNA, 25 bp, Homo sapien
tacagcccggtagggtgactctagg

SEQ ID NO: 1241047 - DNA, 25 bp, Homo sapien
gatcttgcttgtgttctacagcccg

SEQ ID NO: 1241048 - DNA, 25 bp, Homo sapien
tataacggaggatagtaaaggctgg

SEQ ID NO: 1241049 - DNA, 25 bp, Homo sapien
ggactatggacttagggactgcctt

SEQ ID NO: 1241050 - DNA, 25 bp, Homo sapien
ggtgactgacagagcctgggacgca

SEQ ID NO: 1241051 - DNA, 25 bp, Homo sapien
aggtgactgacagagcctgggacgc

SEQ ID NO: 1241052 - DNA, 25 bp, Homo sapien
gactgacagagcctgggacgcacct

SEQ ID NO: 1241053 - DNA, 25 bp, Homo sapien
gtgactgacagagcctgggacgcac

SEQ ID NO: 1241054 - DNA, 25 bp, Homo sapien
accacactgccacacgcggaacgag

SEQ ID NO: 1241055 - DNA, 25 bp, Homo sapien
acactgccacacgcggaacgagatc

SEQ ID NO: 1241056 - DNA, 25 bp, Homo sapien
cactgccacacgcggaacgagatct

SEQ ID NO: 1241057 - DNA, 25 bp, Homo sapien
cacactgccacacgcggaacgagat

SEQ ID NO: 1241058 - DNA, 25 bp, Homo sapien
acgtgtcccacacggctgcacggga

SEQ ID NO: 1241059 - DNA, 25 bp, Homo sapien
gtgctgcttccggaacacgtgtccc

SEQ ID NO: 1241060 - DNA, 25 bp, Homo sapien
tgtaggggtgctgcttccggaacac

SEQ ID NO: 1241061 - DNA, 25 bp, Homo sapien
ggctgcacgggatgatctccaggct

SEQ ID NO: 1241062 - DNA, 25 bp, Homo sapien
ttcagggtagtcatcaatgttttgg

SEQ ID NO: 1241063 - DNA, 25 bp, Homo sapien
gtcaggtcctgctttcagggtagtc

SEQ ID NO: 1241064 - DNA, 25 bp, Homo sapien
ggtcctgctttcagggtagtcatca

SEQ ID NO: 1241065 - DNA, 25 bp, Homo sapien
cctgctttcagggtagtcatcaatg

SEQ ID NO: 1241066 - DNA, 25 bp, Homo sapien
tttgctgtctacactcaagagaagg

SEQ ID NO: 1241067 - DNA, 25 bp, Homo sapien
catcaagaatcgtgactctgtgtca

SEQ ID NO: 1241068 - DNA, 25 bp, Homo sapien
gagaaggcaatctccctgagatctg

SEQ ID NO: 1241069 - DNA, 25 bp, Homo sapien
ccctagaaggacacttggcttgata

SEQ ID NO: 1241070 - DNA, 25 bp, Homo sapien
ggactataggcatgtaccaccacac

SEQ ID NO: 1241071 - DNA, 25 bp, Homo sapien
tgggactataggcatgtaccaccac

SEQ ID NO: 1241072 - DNA, 25 bp, Homo sapien
tggagtctcgctctgctgccaagct

SEQ ID NO: 1241073 - DNA, 25 bp, Homo sapien
gctgggactataggcatgtaccacc

SEQ ID NO: 1241074 - DNA, 25 bp, Homo sapien
ctacataagataagagttcctggga

SEQ ID NO: 1241075 - DNA, 25 bp, Homo sapien
tacataagataagagttcctgggaa

SEQ ID NO: 1241076 - DNA, 25 bp, Homo sapien
acggccttctccgtcacggctacga

SEQ ID NO: 1241077 - DNA, 25 bp, Homo sapien
tacgacactatcagacagctctgca

SEQ ID NO: 1241078 - DNA, 25 bp, Homo sapien
tccgtcacggctacgacactatcag

SEQ ID NO: 1241079 - DNA, 25 bp, Homo sapien
tcacggctacgacactatcagacag

SEQ ID NO: 1241080 - DNA, 25 bp, Homo sapien
tggtcaaagggcaaaaggcaaagtg

SEQ ID NO: 1241081 - DNA, 25 bp, Homo sapien
cacctgtctgctggcgtgtgactga

SEQ ID NO: 1241082 - DNA, 25 bp, Homo sapien
gcctcagcgggtgcttactgaacca

SEQ ID NO: 1241083 - DNA, 25 bp, Homo sapien
aagtggaaattacagcacgagccaa

SEQ ID NO: 1241084 - DNA, 25 bp, Homo sapien
taaggaacgtttctagcagaaggca

SEQ ID NO: 1241085 - DNA, 25 bp, Homo sapien
aggaacgtttctagcagaaggcact

SEQ ID NO: 1241086 - DNA, 25 bp, Homo sapien
cataaggaacgtttctagcagaagg

SEQ ID NO: 1241087 - DNA, 25 bp, Homo sapien
tttccataaggaacgtttctagcag

SEQ ID NO: 1241088 - DNA, 25 bp, Homo sapien
tgcagctgagtttcttcctaagctc

SEQ ID NO: 1241089 - DNA, 25 bp, Homo sapien
tcttcctaagctccaatctgctctg

SEQ ID NO: 1241090 - DNA, 25 bp, Homo sapien
tcaaggtaccatttgaaaggcttgc

SEQ ID NO: 1241091 - DNA, 25 bp, Homo sapien
taccatttgaaaggcttgcagctga

SEQ ID NO: 1241092 - DNA, 25 bp, Homo sapien
gaaacggttccaaagagccaagtga

SEQ ID NO: 1241093 - DNA, 25 bp, Homo sapien
cacatgtgattaacctagctgggag

SEQ ID NO: 1241094 - DNA, 25 bp, Homo sapien
caacaaatctccgtgacaagggctc

SEQ ID NO: 1241095 - DNA, 25 bp, Homo sapien
caagaatctgttgtatagggacacc

SEQ ID NO: 1241096 - DNA, 25 bp, Homo sapien
agcattgtgacattcataaactcca

SEQ ID NO: 1241097 - DNA, 25 bp, Homo sapien
aagtgtcccaaagtgtcgaggcagt

SEQ ID NO: 1241098 - DNA, 25 bp, Homo sapien
ggccccaaaagctatatcctgatgg

SEQ ID NO: 1241099 - DNA, 25 bp, Homo sapien
tcataaactccaaccacaccatcag

SEQ ID NO: 1241100 - DNA, 25 bp, Homo sapien
aaagtgtgtgacattctatctggcc

SEQ ID NO: 1241101 - DNA, 25 bp, Homo sapien
gacattctatctggccctggtgctg

SEQ ID NO: 1241102 - DNA, 25 bp, Homo sapien
tgacattctatctggccctggtgct

SEQ ID NO: 1241103 - DNA, 25 bp, Homo sapien
agtgtgtgacattctatctggccct

SEQ ID NO: 1241104 - DNA, 25 bp, Homo sapien
aggaggtgtagacatcatattctgg

SEQ ID NO: 1241105 - DNA, 25 bp, Homo sapien
ttgagtgcacatggccgagaggaca

SEQ ID NO: 1241106 - DNA, 25 bp, Homo sapien
cagcaactgtgaccagtgcaccctt

SEQ ID NO: 1241107 - DNA, 25 bp, Homo sapien
tgtgaccagtgcacccttgccgctg

SEQ ID NO: 1241108 - DNA, 25 bp, Homo sapien
ccagaggctacacacagacgccagg

SEQ ID NO: 1241109 - DNA, 25 bp, Homo sapien
acagcccagaggctacacacagacg

SEQ ID NO: 1241110 - DNA, 25 bp, Homo sapien
gcccagaggctacacacagacgcca

SEQ ID NO: 1241111 - DNA, 25 bp, Homo sapien
agaggctacacacagacgccaggcc

SEQ ID NO: 1241112 - DNA, 25 bp, Homo sapien
cacagttaacagcagggtcttggat

SEQ ID NO: 1241113 - DNA, 25 bp, Homo sapien
tgactgagaacacagttaacagcag

SEQ ID NO: 1241114 - DNA, 25 bp, Homo sapien
tgagaacacagttaacagcagggtc

SEQ ID NO: 1241115 - DNA, 25 bp, Homo sapien
gaacacagttaacagcagggtcttg

SEQ ID NO: 1241116 - DNA, 25 bp, Homo sapien
cacgaattatccacatgtctgcatt

SEQ ID NO: 1241117 - DNA, 25 bp, Homo sapien
tcatccacagaccagaggtaagctt

SEQ ID NO: 1241118 - DNA, 25 bp, Homo sapien
ggtgggcacctcgtccgttttgtca

SEQ ID NO: 1241119 - DNA, 25 bp, Homo sapien
tgtgtgatcgaccaagccttgcagc

SEQ ID NO: 1241120 - DNA, 25 bp, Homo sapien
tgcagacccgatcttgttcactcct

SEQ ID NO: 1241121 - DNA, 25 bp, Homo sapien
cgatcttgttcactccttggcacag

SEQ ID NO: 1241122 - DNA, 25 bp, Homo sapien
gcaaggaatgggcgctctgtgtcaa

SEQ ID NO: 1241123 - DNA, 25 bp, Homo sapien
gctgacccctgaagttggtgcagag

SEQ ID NO: 1241124 - DNA, 25 bp, Homo sapien
tctcgtttctcatccgtgtcacacg

SEQ ID NO: 1241125 - DNA, 25 bp, Homo sapien
ctctcgtttctcatccgtgtcacac

SEQ ID NO: 1241126 - DNA, 25 bp, Homo sapien
cctctcgtttctcatccgtgtcaca

SEQ ID NO: 1241127 - DNA, 25 bp, Homo sapien
gctggggacaccaccaggatgtgtg

SEQ ID NO: 1241128 - DNA, 25 bp, Homo sapien
ggggacaccaccaggatgtgtgaaa

SEQ ID NO: 1241129 - DNA, 25 bp, Homo sapien
aggggctggggacaccaccaggatg

SEQ ID NO: 1241130 - DNA, 25 bp, Homo sapien
gggctggggacaccaccaggatgtg

SEQ ID NO: 1241131 - DNA, 25 bp, Homo sapien
agaccttatacaaccactggcggga

SEQ ID NO: 1241132 - DNA, 25 bp, Homo sapien
tgtgaggaatcctaggaaagacgga

SEQ ID NO: 1241133 - DNA, 25 bp, Homo sapien
tctaggaatcagtgaagacaccttc

SEQ ID NO: 1241134 - DNA, 25 bp, Homo sapien
gaggcacggacacccgtctaggaat

SEQ ID NO: 1241135 - DNA, 25 bp, Homo sapien
aagtcagaggcgtgctatgcaccgg

SEQ ID NO: 1241136 - DNA, 25 bp, Homo sapien
gaagtcagaggcgtgctatgcaccg

SEQ ID NO: 1241137 - DNA, 25 bp, Homo sapien
aaaccagaagtcagaggcgtgctat

SEQ ID NO: 1241138 - DNA, 25 bp, Homo sapien
ccagaagtcagaggcgtgctatgca

SEQ ID NO: 1241139 - DNA, 25 bp, Homo sapien
cattttctcggcagccctgcagctt

SEQ ID NO: 1241140 - DNA, 25 bp, Homo sapien
caaatccatgtgcttcaccgacttc

SEQ ID NO: 1241141 - DNA, 25 bp, Homo sapien
cagctttataagagagcccggtgcc

SEQ ID NO: 1241142 - DNA, 25 bp, Homo sapien
ccaccacagtaaggcacaaatccat

SEQ ID NO: 1241143 - DNA, 25 bp, Homo sapien
cgctcttggccgtgcgactgtccag

SEQ ID NO: 1241144 - DNA, 25 bp, Homo sapien
ttggccgtgcgactgtccaggcaca

SEQ ID NO: 1241145 - DNA, 25 bp, Homo sapien
tgcctcagcttggagttgccctcga

SEQ ID NO: 1241146 - DNA, 25 bp, Homo sapien
gagttgccctcgatctgttcccatt

SEQ ID NO: 1241147 - DNA, 25 bp, Homo sapien
actgctgcgaaagggccgggccaca

SEQ ID NO: 1241148 - DNA, 25 bp, Homo sapien
gctgcaggttgagcgtgaacttcca

SEQ ID NO: 1241149 - DNA, 25 bp, Homo sapien
tccactgctgcgaaagggccgggcc

SEQ ID NO: 1241150 - DNA, 25 bp, Homo sapien
ctactgctgcaggttgagcgtgaac

SEQ ID NO: 1241151 - DNA, 25 bp, Homo sapien
gaagacacttgcgaatggaggagca

SEQ ID NO: 1241152 - DNA, 25 bp, Homo sapien
gtgtcactcagttgcggagccggca

SEQ ID NO: 1241153 - DNA, 25 bp, Homo sapien
gacacgactcggctttgtggaaacc

SEQ ID NO: 1241154 - DNA, 25 bp, Homo sapien
ggactattgacgtaaacctgccacg

SEQ ID NO: 1241155 - DNA, 25 bp, Homo sapien
tctcccggaagctgcgaacggcttt

SEQ ID NO: 1241156 - DNA, 25 bp, Homo sapien
agaaactggccccaccgggctctgg

SEQ ID NO: 1241157 - DNA, 25 bp, Homo sapien
gccgaggccggtggtctggaggaag

SEQ ID NO: 1241158 - DNA, 25 bp, Homo sapien
ccaactggctgatcgggctccaggg

SEQ ID NO: 1241159 - DNA, 25 bp, Homo sapien
taaccgctccaggttcacagatacg

SEQ ID NO: 1241160 - DNA, 25 bp, Homo sapien
ggattctgacgcacagtagggactc

SEQ ID NO: 1241161 - DNA, 25 bp, Homo sapien
gatacgcacagcacgcaaggtggat

SEQ ID NO: 1241162 - DNA, 25 bp, Homo sapien
aaaagacccaaagtgatatctgtca

SEQ ID NO: 1241163 - DNA, 25 bp, Homo sapien
gaagagaagacctatagggcagccc

SEQ ID NO: 1241164 - DNA, 25 bp, Homo sapien
tgaggacataagaaaggaccagcac

SEQ ID NO: 1241165 - DNA, 25 bp, Homo sapien
gaagccaatactagcgtgtgacagc

SEQ ID NO: 1241166 - DNA, 25 bp, Homo sapien
cattaattctgaaggcccagcgtgc

SEQ ID NO: 1241167 - DNA, 25 bp, Homo sapien
acaccaggacagactctggccagca

SEQ ID NO: 1241168 - DNA, 25 bp, Homo sapien
cctcacacaccaggacagactctgg

SEQ ID NO: 1241169 - DNA, 25 bp, Homo sapien
aggacagactctggccagcaaagag

SEQ ID NO: 1241170 - DNA, 25 bp, Homo sapien
acccagccctcacacaccaggacag

SEQ ID NO: 1241171 - DNA, 25 bp, Homo sapien
gacaatgtgaagttataccgcagaa

SEQ ID NO: 1241172 - DNA, 25 bp, Homo sapien
ggttcaaatctgactcacccgtggg

SEQ ID NO: 1241173 - DNA, 25 bp, Homo sapien
cctgggctgaggaccaaaaggtctt

SEQ ID NO: 1241174 - DNA, 25 bp, Homo sapien
gctaagcgaacactcctctttggaa

SEQ ID NO: 1241175 - DNA, 25 bp, Homo sapien
gtggctgccgatgctaaacacggac

SEQ ID NO: 1241176 - DNA, 25 bp, Homo sapien
tggctgccgatgctaaacacggaca

SEQ ID NO: 1241177 - DNA, 25 bp, Homo sapien
ggctgccgatgctaaacacggacat

SEQ ID NO: 1241178 - DNA, 25 bp, Homo sapien
tctgctgatccgaatactgaaaaca

SEQ ID NO: 1241179 - DNA, 25 bp, Homo sapien
atatccaatcctctctgctgatccg

SEQ ID NO: 1241180 - DNA, 25 bp, Homo sapien
tgacaactttgtgggggattttctc

SEQ ID NO: 1241181 - DNA, 25 bp, Homo sapien
aaacaatcattatgagatccgggac

SEQ ID NO: 1241182 - DNA, 25 bp, Homo sapien
ccgatcccctgagggatgtctctgc

SEQ ID NO: 1241183 - DNA, 25 bp, Homo sapien
aagccaagccgatcccctgagggat

SEQ ID NO: 1241184 - DNA, 25 bp, Homo sapien
atggcaagtgagagcccattccact

SEQ ID NO: 1241185 - DNA, 25 bp, Homo sapien
gagagcccattccactcagatccag

SEQ ID NO: 1241186 - DNA, 25 bp, Homo sapien
tctagttgaagtgcatctggttcca

SEQ ID NO: 1241187 - DNA, 25 bp, Homo sapien
acggactgacagaacctccagggac

SEQ ID NO: 1241188 - DNA, 25 bp, Homo sapien
gccctcaggttgattcttgattggc

SEQ ID NO: 1241189 - DNA, 25 bp, Homo sapien
gacagaatagcatgtaggacggact

SEQ ID NO: 1241190 - DNA, 25 bp, Homo sapien
gccctaagctttgtcgcagatgtca

SEQ ID NO: 1241191 - DNA, 25 bp, Homo sapien
tggcttccgaacagacgtggttgct

SEQ ID NO: 1241192 - DNA, 25 bp, Homo sapien
gtcacggctctttgcatgatcacag

SEQ ID NO: 1241193 - DNA, 25 bp, Homo sapien
agagtggcccctcagaacaacaggg

SEQ ID NO: 1241194 - DNA, 25 bp, Homo sapien
cagagaacattcgtgggatgatggc

SEQ ID NO: 1241195 - DNA, 25 bp, Homo sapien
gagcaagctctttatcacatcagag

SEQ ID NO: 1241196 - DNA, 25 bp, Homo sapien
ttatcacatcagagaacattcgtgg

SEQ ID NO: 1241197 - DNA, 25 bp, Homo sapien
tggcggggggacgtttatcttgcat

SEQ ID NO: 1241198 - DNA, 25 bp, Homo sapien
attctccgtcaagatcttggcagag

SEQ ID NO: 1241199 - DNA, 25 bp, Homo sapien
tcattctccgtcaagatcttggcag

SEQ ID NO: 1241200 - DNA, 25 bp, Homo sapien
gtttcattctccgtcaagatcttgg

SEQ ID NO: 1241201 - DNA, 25 bp, Homo sapien
tggtgtttcattctccgtcaagatc

SEQ ID NO: 1241202 - DNA, 25 bp, Homo sapien
tacttggactcaaaggagtagccag

SEQ ID NO: 1241203 - DNA, 25 bp, Homo sapien
ttctgtacttggactcaaaggagta

SEQ ID NO: 1241204 - DNA, 25 bp, Homo sapien
gccagaaagggatctcaatgaggag

SEQ ID NO: 1241205 - DNA, 25 bp, Homo sapien
gaaagggatctcaatgaggagtgca

SEQ ID NO: 1241206 - DNA, 25 bp, Homo sapien
gagagcccactcgacaagacctcat

SEQ ID NO: 1241207 - DNA, 25 bp, Homo sapien
ggagagagcccactcgacaagacct

SEQ ID NO: 1241208 - DNA, 25 bp, Homo sapien
aggagagagcccactcgacaagacc

SEQ ID NO: 1241209 - DNA, 25 bp, Homo sapien
agagagcccactcgacaagacctca

SEQ ID NO: 1241210 - DNA, 25 bp, Homo sapien
tgcagcagcggtctgagcccaaggc

SEQ ID NO: 1241211 - DNA, 25 bp, Homo sapien
gcagcagcggtctgagcccaaggca

SEQ ID NO: 1241212 - DNA, 25 bp, Homo sapien
cctgcagacatcctgaaggccgaga

SEQ ID NO: 1241213 - DNA, 25 bp, Homo sapien
tacaaccttattccgggcttgaaca

SEQ ID NO: 1241214 - DNA, 25 bp, Homo sapien
tgtattctctgggtactgtgcctgc

SEQ ID NO: 1241215 - DNA, 25 bp, Homo sapien
agctctctcaactgtattctctggg

SEQ ID NO: 1241216 - DNA, 25 bp, Homo sapien
ttctctggcgtaggctcgggccact

SEQ ID NO: 1241217 - DNA, 25 bp, Homo sapien
ggactcctgtgtcgggctccctttg

SEQ ID NO: 1241218 - DNA, 25 bp, Homo sapien
cttctgttcctttctaaccgcatca

SEQ ID NO: 1241219 - DNA, 25 bp, Homo sapien
ttctaaccgcatcattaaaatgagc

SEQ ID NO: 1241220 - DNA, 25 bp, Homo sapien
ggtgtgaacccagaaggtggagcct

SEQ ID NO: 1241221 - DNA, 25 bp, Homo sapien
agtgagccaagatcacgccattgca

SEQ ID NO: 1241222 - DNA, 25 bp, Homo sapien
tgtgaacccagaaggtggagcctgc

SEQ ID NO: 1241223 - DNA, 25 bp, Homo sapien
gtgtgaacccagaaggtggagcctg

SEQ ID NO: 1241224 - DNA, 25 bp, Homo sapien
agcccctacttcccaggcccaagca

SEQ ID NO: 1241225 - DNA, 25 bp, Homo sapien
actgcagcccctacttcccaggccc

SEQ ID NO: 1241226 - DNA, 25 bp, Homo sapien
ctggagtgcgatgatgcgatcacgg

SEQ ID NO: 1241227 - DNA, 25 bp, Homo sapien
gctggagtgcgatgatgcgatcacg

SEQ ID NO: 1241228 - DNA, 25 bp, Homo sapien
aaccggtcaggaacacggcacatgg

SEQ ID NO: 1241229 - DNA, 25 bp, Homo sapien
ggcatgatgcggcttttcctgtggc

SEQ ID NO: 1241230 - DNA, 25 bp, Homo sapien
ttccgtagaagtgcgcgcaaccggt

SEQ ID NO: 1241231 - DNA, 25 bp, Homo sapien
gtatttcttgttccacggccttctg

SEQ ID NO: 1241232 - DNA, 25 bp, Homo sapien
cagcctctgccttctttgaaagctg

SEQ ID NO: 1241233 - DNA, 25 bp, Homo sapien
tctgccttctttgaaagctgcagac

SEQ ID NO: 1241234 - DNA, 25 bp, Homo sapien
ttcctctgcagaagctccgcagcct

SEQ ID NO: 1241235 - DNA, 25 bp, Homo sapien
cacttcctctgcagaagctccgcag

SEQ ID NO: 1241236 - DNA, 25 bp, Homo sapien
tgtggccacagacaagccccgaata

SEQ ID NO: 1241237 - DNA, 25 bp, Homo sapien
gtggccacagacaagccccgaatac

SEQ ID NO: 1241238 - DNA, 25 bp, Homo sapien
ccccgcgcttcgaggataccggcgg

SEQ ID NO: 1241239 - DNA, 25 bp, Homo sapien
cgcgcttcgaggataccggcggtaa

SEQ ID NO: 1241240 - DNA, 25 bp, Homo sapien
cgcccccgcgcttcgaggataccgg

SEQ ID NO: 1241241 - DNA, 25 bp, Homo sapien
gggctgcccgcgggtggatgtcggg

SEQ ID NO: 1241242 - DNA, 25 bp, Homo sapien
ctggagcgtttcggcggcgcctggt

SEQ ID NO: 1241243 - DNA, 25 bp, Homo sapien
agcgtttcggcggcgcctggttcag

SEQ ID NO: 1241244 - DNA, 25 bp, Homo sapien
tcagaaccaccggggcggacagctc

SEQ ID NO: 1241245 - DNA, 25 bp, Homo sapien
ttcggcggcgcctggttcagaacca

SEQ ID NO: 1241246 - DNA, 25 bp, Homo sapien
tagctgttgactttttcattggcta

SEQ ID NO: 1241247 - DNA, 25 bp, Homo sapien
agctgttgactttttcattggctag

SEQ ID NO: 1241248 - DNA, 25 bp, Homo sapien
ttagctgttgactttttcattggct

SEQ ID NO: 1241249 - DNA, 25 bp, Homo sapien
agaggaacatttgactacagaaggg

SEQ ID NO: 1241250 - DNA, 25 bp, Homo sapien
aaattctcgaatacttgtgtggtga

SEQ ID NO: 1241251 - DNA, 25 bp, Homo sapien
gaccctctagagtgtctacatccta

SEQ ID NO: 1241252 - DNA, 25 bp, Homo sapien
tatcctggattatcctcgtgggcca

SEQ ID NO: 1241253 - DNA, 25 bp, Homo sapien
gtttccctccgtccacaatgtgagt

SEQ ID NO: 1241254 - DNA, 25 bp, Homo sapien
gagaccactgcaatatagaccccaa

SEQ ID NO: 1241255 - DNA, 25 bp, Homo sapien
gaaatacgccctctacagcatttgg

SEQ ID NO: 1241256 - DNA, 25 bp, Homo sapien
tttggctgtcattcccatccgaggc

SEQ ID NO: 1241257 - DNA, 25 bp, Homo sapien
gagattgaatcagttgttgaaaagt

SEQ ID NO: 1241258 - DNA, 25 bp, Homo sapien
cttaaaatgattgaggagattgaat

SEQ ID NO: 1241259 - DNA, 25 bp, Homo sapien
ccagcagtttcaccaaacatacaga

SEQ ID NO: 1241260 - DNA, 25 bp, Homo sapien
gaaaacactagtcccagttggcttc

SEQ ID NO: 1241261 - DNA, 25 bp, Homo sapien
gcaggtggttggggtcgcatgtgtc

SEQ ID NO: 1241262 - DNA, 25 bp, Homo sapien
ggttggggtcgcatgtgtcaggcat

SEQ ID NO: 1241263 - DNA, 25 bp, Homo sapien
tggttggggtcgcatgtgtcaggca

SEQ ID NO: 1241264 - DNA, 25 bp, Homo sapien
ggtggttggggtcgcatgtgtcagg

SEQ ID NO: 1241265 - DNA, 25 bp, Homo sapien
gccttggggacatcatagccttcca

SEQ ID NO: 1241266 - DNA, 25 bp, Homo sapien
ccttggggacatcatagccttccat

SEQ ID NO: 1241267 - DNA, 25 bp, Homo sapien
cagccttggggacatcatagccttc

SEQ ID NO: 1241268 - DNA, 25 bp, Homo sapien
cagcagccttggggacatcatagcc

SEQ ID NO: 1241269 - DNA, 25 bp, Homo sapien
tgaagagagtgccagaggacatgca

SEQ ID NO: 1241270 - DNA, 25 bp, Homo sapien
gagaaggcacatagaccccgcttct

SEQ ID NO: 1241271 - DNA, 25 bp, Homo sapien
gccaccaagacagggacttcctggg

SEQ ID NO: 1241272 - DNA, 25 bp, Homo sapien
catgttctgaccatggatgaaaacc

SEQ ID NO: 1241273 - DNA, 25 bp, Homo sapien
ccagatcttccgtcctccgttgtaa

SEQ ID NO: 1241274 - DNA, 25 bp, Homo sapien
tgcagtagagcaggatcttggaccc

SEQ ID NO: 1241275 - DNA, 25 bp, Homo sapien
ccccttcgttgaaagtagagctgaa

SEQ ID NO: 1241276 - DNA, 25 bp, Homo sapien
caaaggaggtgtttgcctgctgctt

SEQ ID NO: 1241277 - DNA, 25 bp, Homo sapien
ctttatagggtttgggaagataatg

SEQ ID NO: 1241278 - DNA, 25 bp, Homo sapien
acatgggtgcaggtggtctgagtct

SEQ ID NO: 1241279 - DNA, 25 bp, Homo sapien
aattcacagggttaatcactcagtt

SEQ ID NO: 1241280 - DNA, 25 bp, Homo sapien
gaaggaaattcacagggttaatcac

SEQ ID NO: 1241281 - DNA, 25 bp, Homo sapien
gcaggagcagatgtcaggaaccagc

SEQ ID NO: 1241282 - DNA, 25 bp, Homo sapien
tggcaggagcagatgtcaggaacca

SEQ ID NO: 1241283 - DNA, 25 bp, Homo sapien
aggagcagatgtcaggaaccagcac

SEQ ID NO: 1241284 - DNA, 25 bp, Homo sapien
atggcaggagcagatgtcaggaacc

SEQ ID NO: 1241285 - DNA, 25 bp, Homo sapien
actgggtcacacaaatgacagggct

SEQ ID NO: 1241286 - DNA, 25 bp, Homo sapien
acttggccttgagagggagccgcat

SEQ ID NO: 1241287 - DNA, 25 bp, Homo sapien
tcacacaaatgacagggcttaactt

SEQ ID NO: 1241288 - DNA, 25 bp, Homo sapien
atgacagggcttaacttggccttga

SEQ ID NO: 1241289 - DNA, 25 bp, Homo sapien
tcagcagcggagcacactagatgtg

SEQ ID NO: 1241290 - DNA, 25 bp, Homo sapien
cactagatgtgtccatgacaaccca

SEQ ID NO: 1241291 - DNA, 25 bp, Homo sapien
gtgtccatgacaacccacaagccaa

SEQ ID NO: 1241292 - DNA, 25 bp, Homo sapien
ggagcacactagatgtgtccatgac

SEQ ID NO: 1241293 - DNA, 25 bp, Homo sapien
cagactgggcttatcttgaggatgc

SEQ ID NO: 1241294 - DNA, 25 bp, Homo sapien
ttcaaagcccagtaccaaggcacgg

SEQ ID NO: 1241295 - DNA, 25 bp, Homo sapien
taagtggcaagttgcaaacccaggc

SEQ ID NO: 1241296 - DNA, 25 bp, Homo sapien
gattcagaagggaaccatcaggacc

SEQ ID NO: 1241297 - DNA, 25 bp, Homo sapien
gccaccgcctctcagtgccaagatc

SEQ ID NO: 1241298 - DNA, 25 bp, Homo sapien
caagcgagaaaacgcaggaggctgc

SEQ ID NO: 1241299 - DNA, 25 bp, Homo sapien
gaggctgcgcagaccgactcggcgg

SEQ ID NO: 1241300 - DNA, 25 bp, Homo sapien
caccgccagtttccacggcacaggg

SEQ ID NO: 1241301 - DNA, 25 bp, Homo sapien
cttgtcgaagcagagcgtgtccggc

SEQ ID NO: 1241302 - DNA, 25 bp, Homo sapien
aactcgtccttgtcgaagcagagcg

SEQ ID NO: 1241303 - DNA, 25 bp, Homo sapien
aagcagagcgtgtccggccccttgg

SEQ ID NO: 1241304 - DNA, 25 bp, Homo sapien
cttcatgaactcgtccttgtcgaag

SEQ ID NO: 1241305 - DNA, 25 bp, Homo sapien
cttgtccctactgataaaatgcatg

SEQ ID NO: 1241306 - DNA, 25 bp, Homo sapien
tatttttccagtactgaagcctggg

SEQ ID NO: 1241307 - DNA, 25 bp, Homo sapien
gagtcatgagataatggccctgggt

SEQ ID NO: 1241308 - DNA, 25 bp, Homo sapien
tccagatcactagatgggttacaat

SEQ ID NO: 1241309 - DNA, 25 bp, Homo sapien
gaattcaagcttttcatgaagacca

SEQ ID NO: 1241310 - DNA, 25 bp, Homo sapien
tttagttgctgtgaaatgatggcac

SEQ ID NO: 1241311 - DNA, 25 bp, Homo sapien
cgctccacatgtgggtaattagaaa

SEQ ID NO: 1241312 - DNA, 25 bp, Homo sapien
aatgaaaccatgaacctgtaaggtc

SEQ ID NO: 1241313 - DNA, 25 bp, Homo sapien
tgttgaaagattgacaaaatctgca

SEQ ID NO: 1241314 - DNA, 25 bp, Homo sapien
aaaatctgcataatccttgttgatg

SEQ ID NO: 1241315 - DNA, 25 bp, Homo sapien
agctggacccgcttcctacagtcag

SEQ ID NO: 1241316 - DNA, 25 bp, Homo sapien
ttatagtagagctccaggtcatctc

SEQ ID NO: 1241317 - DNA, 25 bp, Homo sapien
aggcacagaaagctggttgagggct

SEQ ID NO: 1241318 - DNA, 25 bp, Homo sapien
ggttgagggctttgtccatgccaac

SEQ ID NO: 1241319 - DNA, 25 bp, Homo sapien
ctcttctcgtaattgtcccaaaggc

SEQ ID NO: 1241320 - DNA, 25 bp, Homo sapien
agaacctcttctcgtaattgtccca

SEQ ID NO: 1241321 - DNA, 25 bp, Homo sapien
actgtttgatgttattcgggaaact

SEQ ID NO: 1241322 - DNA, 25 bp, Homo sapien
tgtttgatgttattcgggaaactta

SEQ ID NO: 1241323 - DNA, 25 bp, Homo sapien
ctgtttgatgttattcgggaaactt

SEQ ID NO: 1241324 - DNA, 25 bp, Homo sapien
ggagtcccaactcacagcagacatt

SEQ ID NO: 1241325 - DNA, 25 bp, Homo sapien
tgttcatccggatggagtccctgtc

SEQ ID NO: 1241326 - DNA, 25 bp, Homo sapien
acatatgagtgagctgacagtaaca

SEQ ID NO: 1241327 - DNA, 25 bp, Homo sapien
catcaatcctaagacagcatggaag

SEQ ID NO: 1241328 - DNA, 25 bp, Homo sapien
ctcttgtttagacattcgttcatca

SEQ ID NO: 1241329 - DNA, 25 bp, Homo sapien
aactgcccgaattccttcactgaca

SEQ ID NO: 1241330 - DNA, 25 bp, Homo sapien
tcgttcatcaactgcccgaattcct

SEQ ID NO: 1241331 - DNA, 25 bp, Homo sapien
cttcactgacagacgatctaaggct

SEQ ID NO: 1241332 - DNA, 25 bp, Homo sapien
ctgcttgcttctagtgcagaggttt

SEQ ID NO: 1241333 - DNA, 25 bp, Homo sapien
caactgaccgaataacttgtataag

SEQ ID NO: 1241334 - DNA, 25 bp, Homo sapien
gcttctagtgcagaggtttctttag

SEQ ID NO: 1241335 - DNA, 25 bp, Homo sapien
caattttctcaactgaccgaataac

SEQ ID NO: 1241336 - DNA, 25 bp, Homo sapien
gcatgaaactgtaactgattaaatt

SEQ ID NO: 1241337 - DNA, 25 bp, Homo sapien
ttctctccaaaatttgtccagtcaa

SEQ ID NO: 1241338 - DNA, 25 bp, Homo sapien
tttgaacagcatgaaactgtaactg

SEQ ID NO: 1241339 - DNA, 25 bp, Homo sapien
tctctccaaaatttgtccagtcaaa

SEQ ID NO: 1241340 - DNA, 25 bp, Homo sapien
tctataatgtgtgacacttaggaag

SEQ ID NO: 1241341 - DNA, 25 bp, Homo sapien
gtgactgagtctttacacaaaatct

SEQ ID NO: 1241342 - DNA, 25 bp, Homo sapien
agtcaatcttgaggaaacatcatgg

SEQ ID NO: 1241343 - DNA, 25 bp, Homo sapien
tcctcttaagctacgaagtcaatct

SEQ ID NO: 1241344 - DNA, 25 bp, Homo sapien
tgccgtattatatcgacgtcagacg

SEQ ID NO: 1241345 - DNA, 25 bp, Homo sapien
cagtgactgctgtaacatggctgta

SEQ ID NO: 1241346 - DNA, 25 bp, Homo sapien
cgtaagtccgcaagcagtgccgtat

SEQ ID NO: 1241347 - DNA, 25 bp, Homo sapien
tcttgtcaatcgtggcgtaagtccg

SEQ ID NO: 1241348 - DNA, 25 bp, Homo sapien
ctcgtctatgtatggtttcactagt

SEQ ID NO: 1241349 - DNA, 25 bp, Homo sapien
tcgtctatgtatggtttcactagta

SEQ ID NO: 1241350 - DNA, 25 bp, Homo sapien
cgtctatgtatggtttcactagtac

SEQ ID NO: 1241351 - DNA, 25 bp, Homo sapien
gatgcccttgaatctcgcccttgaa

SEQ ID NO: 1241352 - DNA, 25 bp, Homo sapien
aaaatattttcatcggttgggcgca

SEQ ID NO: 1241353 - DNA, 25 bp, Homo sapien
tgacctaaaagcacgtggatgccct

SEQ ID NO: 1241354 - DNA, 25 bp, Homo sapien
taaagcagagcacatgattcgccac

SEQ ID NO: 1241355 - DNA, 25 bp, Homo sapien
gacctgaaggccattgggatgagat

SEQ ID NO: 1241356 - DNA, 25 bp, Homo sapien
gcaatggtgaggaacaaactccagg

SEQ ID NO: 1241357 - DNA, 25 bp, Homo sapien
tatacatgacctgaaggccattggg

SEQ ID NO: 1241358 - DNA, 25 bp, Homo sapien
ctgtgacttctcgaagaaggcggca

SEQ ID NO: 1241359 - DNA, 25 bp, Homo sapien
tgtactatttgtggccaaacagaat

SEQ ID NO: 1241360 - DNA, 25 bp, Homo sapien
ctcatgaaatgcatcgggattccca

SEQ ID NO: 1241361 - DNA, 25 bp, Homo sapien
atccttgtactatttgtggccaaac

SEQ ID NO: 1241362 - DNA, 25 bp, Homo sapien
aatgcatcgggattcccaggattaa

SEQ ID NO: 1241363 - DNA, 25 bp, Homo sapien
ggcaagttccacttcttattgaagc

SEQ ID NO: 1241364 - DNA, 25 bp, Homo sapien
ctgccgttccaatcttctgacaaaa

SEQ ID NO: 1241365 - DNA, 25 bp, Homo sapien
tgaaaataaacaggcaagttccact

SEQ ID NO: 1241366 - DNA, 25 bp, Homo sapien
tctctttacactagcctgtgatcca

SEQ ID NO: 1241367 - DNA, 25 bp, Homo sapien
gaaatagcccatgggagctccagga

SEQ ID NO: 1241368 - DNA, 25 bp, Homo sapien
gaaaggaactctaattgcccagtga

SEQ ID NO: 1241369 - DNA, 25 bp, Homo sapien
tggaaacatcattaagtgcacccgt

SEQ ID NO: 1241370 - DNA, 25 bp, Homo sapien
gatccatgtaagaagggcaacccca

SEQ ID NO: 1241371 - DNA, 25 bp, Homo sapien
tctaaggatcccgctatttctctaa

SEQ ID NO: 1241372 - DNA, 25 bp, Homo sapien
gcttctaaggatcccgctatttctc

SEQ ID NO: 1241373 - DNA, 25 bp, Homo sapien
taaggatcccgctatttctctaaat

SEQ ID NO: 1241374 - DNA, 25 bp, Homo sapien
ctgcttctaaggatcccgctatttc

SEQ ID NO: 1241375 - DNA, 25 bp, Homo sapien
ccaacatcctaggatgggcggccag

SEQ ID NO: 1241376 - DNA, 25 bp, Homo sapien
cctctaccatgcagaccagtcctca

SEQ ID NO: 1241377 - DNA, 25 bp, Homo sapien
ctgttacctgcccaacatcctagga

SEQ ID NO: 1241378 - DNA, 25 bp, Homo sapien
gagcacctgaccctctaccatgcag

SEQ ID NO: 1241379 - DNA, 25 bp, Homo sapien
cacagtatttcagtggtcactagga

SEQ ID NO: 1241380 - DNA, 25 bp, Homo sapien
gtcaacatgtactggtaagtccaca

SEQ ID NO: 1241381 - DNA, 25 bp, Homo sapien
tacaaaaattaatgaggctgaaagg

SEQ ID NO: 1241382 - DNA, 25 bp, Homo sapien
cctagatatcagcacacagtatttc

SEQ ID NO: 1241383 - DNA, 25 bp, Homo sapien
taatggcaagaacatctcatctgac

SEQ ID NO: 1241384 - DNA, 25 bp, Homo sapien
taaggctgctccaagttctatgaga

SEQ ID NO: 1241385 - DNA, 25 bp, Homo sapien
gccaaaaggcaatacggactttcag

SEQ ID NO: 1241386 - DNA, 25 bp, Homo sapien
cattgacaaacacagagtatcgtgc

SEQ ID NO: 1241387 - DNA, 25 bp, Homo sapien
gtgcgggaaatggaaaccacaggct

SEQ ID NO: 1241388 - DNA, 25 bp, Homo sapien
cacaggctttgtttccgaaggacca

SEQ ID NO: 1241389 - DNA, 25 bp, Homo sapien
cacatacacgagctgagtgcgggaa

SEQ ID NO: 1241390 - DNA, 25 bp, Homo sapien
gaaggttctttgctaccagttacca

SEQ ID NO: 1241391 - DNA, 25 bp, Homo sapien
tatgcactttatatattcagttact

SEQ ID NO: 1241392 - DNA, 25 bp, Homo sapien
gcactttatatattcagttactttt

SEQ ID NO: 1241393 - DNA, 25 bp, Homo sapien
taaatatgcactttatatattcagt

SEQ ID NO: 1241394 - DNA, 25 bp, Homo sapien
aatatgcactttatatattcagtta

SEQ ID NO: 1241395 - DNA, 25 bp, Homo sapien
caagttttggcttgattatttccaa

SEQ ID NO: 1241396 - DNA, 25 bp, Homo sapien
tcaagttttggcttgattatttcca

SEQ ID NO: 1241397 - DNA, 25 bp, Homo sapien
tataccctacagtctctgagatttt

SEQ ID NO: 1241398 - DNA, 25 bp, Homo sapien
caaagatttgcttagtcaagattca

SEQ ID NO: 1241399 - DNA, 25 bp, Homo sapien
aacaaccaaggatttacaactacag

SEQ ID NO: 1241400 - DNA, 25 bp, Homo sapien
gactggatttaatcatcatgctcag

SEQ ID NO: 1241401 - DNA, 25 bp, Homo sapien
ttgctactcaaggagggcacacagg

SEQ ID NO: 1241402 - DNA, 25 bp, Homo sapien
tttaggaaaccgaagcaagagtcac

SEQ ID NO: 1241403 - DNA, 25 bp, Homo sapien
aaatcctggatgatcttgctactca

SEQ ID NO: 1241404 - DNA, 25 bp, Homo sapien
gcaagagtcacttaaatcctggatg

SEQ ID NO: 1241405 - DNA, 25 bp, Homo sapien
cttattggttcttcggtaaagcctg

SEQ ID NO: 1241406 - DNA, 25 bp, Homo sapien
tatgagtgctttcactgagagtgcc

SEQ ID NO: 1241407 - DNA, 25 bp, Homo sapien
tccgctctgaagctggaataagggc

SEQ ID NO: 1241408 - DNA, 25 bp, Homo sapien
tgctgaattattgcttgtttgagct

SEQ ID NO: 1241409 - DNA, 25 bp, Homo sapien
tgtttgagcttatccttgtgtccgc

SEQ ID NO: 1241410 - DNA, 25 bp, Homo sapien
catacgcagtgcttgattgccttgg

SEQ ID NO: 1241411 - DNA, 25 bp, Homo sapien
caaggcccacaaggtctgcttttaa

SEQ ID NO: 1241412 - DNA, 25 bp, Homo sapien
gggtttctgccgcagactcttctaa

SEQ ID NO: 1241413 - DNA, 25 bp, Homo sapien
gcagactcttctaagcaaggcccac

SEQ ID NO: 1241414 - DNA, 25 bp, Homo sapien
atacatctgacacggtttcatagta

SEQ ID NO: 1241415 - DNA, 25 bp, Homo sapien
tacatctgacacggtttcatagtac

SEQ ID NO: 1241416 - DNA, 25 bp, Homo sapien
aatacatctgacacggtttcatagt

SEQ ID NO: 1241417 - DNA, 25 bp, Homo sapien
taatacatctgacacggtttcatag

SEQ ID NO: 1241418 - DNA, 25 bp, Homo sapien
tgcagcctgattttgtcgtcgtcgc

SEQ ID NO: 1241419 - DNA, 25 bp, Homo sapien
ttttgtcgtcgtcgctcatgccacc

SEQ ID NO: 1241420 - DNA, 25 bp, Homo sapien
tcaacatctagggccaactgcagcc

SEQ ID NO: 1241421 - DNA, 25 bp, Homo sapien
ttcagccttttcaggctctcttcca

SEQ ID NO: 1241422 - DNA, 25 bp, Homo sapien
tattgccgtctcatactgcctaggg

SEQ ID NO: 1241423 - DNA, 25 bp, Homo sapien
cacgccaccagacttcaaaacggga

SEQ ID NO: 1241424 - DNA, 25 bp, Homo sapien
ggaagcaattccctagccactgcga

SEQ ID NO: 1241425 - DNA, 25 bp, Homo sapien
tgcccggctctcagaatttggtttc

SEQ ID NO: 1241426 - DNA, 25 bp, Homo sapien
aaaacaccaccaagtgtcctcttgt

SEQ ID NO: 1241427 - DNA, 25 bp, Homo sapien
gcaccttatccatatcacctcttaa

SEQ ID NO: 1241428 - DNA, 25 bp, Homo sapien
tatgtgcgacgctttaacagtttag

SEQ ID NO: 1241429 - DNA, 25 bp, Homo sapien
tgtggaaaggcctcccttgaggacc

SEQ ID NO: 1241430 - DNA, 25 bp, Homo sapien
gagacatggcacactacgttcccac

SEQ ID NO: 1241431 - DNA, 25 bp, Homo sapien
tgtttggcaaagcaactaccgtgga

SEQ ID NO: 1241432 - DNA, 25 bp, Homo sapien
gattattttggtcaccgagacatgg

SEQ ID NO: 1241433 - DNA, 25 bp, Homo sapien
tcaaaaaagtactggtctgtgctct

SEQ ID NO: 1241434 - DNA, 25 bp, Homo sapien
ggcagcagcaacaagctctgcgaga

SEQ ID NO: 1241435 - DNA, 25 bp, Homo sapien
ctctgcgagagctgagaagcttttt

SEQ ID NO: 1241436 - DNA, 25 bp, Homo sapien
ttatgtcacttgcttgtagtcccaa

SEQ ID NO: 1241437 - DNA, 25 bp, Homo sapien
ctgctctgctgttgcctggtccttg

SEQ ID NO: 1241438 - DNA, 25 bp, Homo sapien
tggagtgatgctggaagcacttctt

SEQ ID NO: 1241439 - DNA, 25 bp, Homo sapien
gacccaaatacgctgagagaagacg

SEQ ID NO: 1241440 - DNA, 25 bp, Homo sapien
tgctacagacggttgctaagagaac

SEQ ID NO: 1241441 - DNA, 25 bp, Homo sapien
gcttaagaatctaacctcgggatct

SEQ ID NO: 1241442 - DNA, 25 bp, Homo sapien
aatttgttctgtaaactatagtaga

SEQ ID NO: 1241443 - DNA, 25 bp, Homo sapien
tttgttctgtaaactatagtagaaa

SEQ ID NO: 1241444 - DNA, 25 bp, Homo sapien
ataatttgttctgtaaactatagta

SEQ ID NO: 1241445 - DNA, 25 bp, Homo sapien
gaaatcagctcttccacactaagat

SEQ ID NO: 1241446 - DNA, 25 bp, Homo sapien
tacagtcgtcacttccaactacagg

SEQ ID NO: 1241447 - DNA, 25 bp, Homo sapien
aggctcagggagacgactcttgata

SEQ ID NO: 1241448 - DNA, 25 bp, Homo sapien
gaagggcatttctatacaagacatc

SEQ ID NO: 1241449 - DNA, 25 bp, Homo sapien
caagacatcattccattacagtcgt

SEQ ID NO: 1241450 - DNA, 25 bp, Homo sapien
aggaggtctttcctactggcgccgg

SEQ ID NO: 1241451 - DNA, 25 bp, Homo sapien
ggaaggaggtctttcctactggcgc

SEQ ID NO: 1241452 - DNA, 25 bp, Homo sapien
aaggaggtctttcctactggcgccg

SEQ ID NO: 1241453 - DNA, 25 bp, Homo sapien
aggtctttcctactggcgccggctc

SEQ ID NO: 1241454 - DNA, 25 bp, Homo sapien
ggatcattaagccatggcagcacag

SEQ ID NO: 1241455 - DNA, 25 bp, Homo sapien
ttccatcactaggatcattaagcca

SEQ ID NO: 1241456 - DNA, 25 bp, Homo sapien
gactgtgcggttctcatatgggcaa

SEQ ID NO: 1241457 - DNA, 25 bp, Homo sapien
caactccatatagcagttctaggga

SEQ ID NO: 1241458 - DNA, 25 bp, Homo sapien
taacaaccccggacaaatcagcgat

SEQ ID NO: 1241459 - DNA, 25 bp, Homo sapien
tgtgtatgatcaaagcgccactgcc

SEQ ID NO: 1241460 - DNA, 25 bp, Homo sapien
gaaccagtgtttagcgcgggactac

SEQ ID NO: 1241461 - DNA, 25 bp, Homo sapien
gaattccaaccgaccagcttgtttg

SEQ ID NO: 1241462 - DNA, 25 bp, Homo sapien
cggttggcttggcatgagtgttgaa

SEQ ID NO: 1241463 - DNA, 25 bp, Homo sapien
taggagcaagcatgatgagcccagc

SEQ ID NO: 1241464 - DNA, 25 bp, Homo sapien
atcccggaagcctgccgtgtgcaga

SEQ ID NO: 1241465 - DNA, 25 bp, Homo sapien
ttgaacgccatgcttggtaggtgtg

SEQ ID NO: 1241466 - DNA, 25 bp, Homo sapien
gcaaatgcctaggatttggagctgc

SEQ ID NO: 1241467 - DNA, 25 bp, Homo sapien
gagctgcagggaaacgtgctccaca

SEQ ID NO: 1241468 - DNA, 25 bp, Homo sapien
cttgtaagactttaagcctggcatc

SEQ ID NO: 1241469 - DNA, 25 bp, Homo sapien
gcctccaggcttttaaaggtcaatg

SEQ ID NO: 1241470 - DNA, 25 bp, Homo sapien
gctggatgcgcacaaggtcctgtct

SEQ ID NO: 1241471 - DNA, 25 bp, Homo sapien
tccttggaaggacaagaactgcacc

SEQ ID NO: 1241472 - DNA, 25 bp, Homo sapien
gcttccgtatatatggcatgcacag

SEQ ID NO: 1241473 - DNA, 25 bp, Homo sapien
caccgaagacaagttgagggccgca

SEQ ID NO: 1241474 - DNA, 25 bp, Homo sapien
aatgagagtacctgtgagcagctgg

SEQ ID NO: 1241475 - DNA, 25 bp, Homo sapien
aaaaggccctacaggaccagctggt

SEQ ID NO: 1241476 - DNA, 25 bp, Homo sapien
tggcaaaggccaatgccgggaagcc

SEQ ID NO: 1241477 - DNA, 25 bp, Homo sapien
ccagtctgagatggctcctgccggt

SEQ ID NO: 1241478 - DNA, 25 bp, Homo sapien
tattctgggctaaatggtgacaggg

SEQ ID NO: 1241479 - DNA, 25 bp, Homo sapien
tgaggacttcaacacgggcattatg

SEQ ID NO: 1241480 - DNA, 25 bp, Homo sapien
ggaggtaggacataattcagctgat

SEQ ID NO: 1241481 - DNA, 25 bp, Homo sapien
ggttagatggcacttaaaggtcagt

SEQ ID NO: 1241482 - DNA, 25 bp, Homo sapien
tagggccctcgaatgagcatctcag

SEQ ID NO: 1241483 - DNA, 25 bp, Homo sapien
aaatacttggactttgggctgagcc

SEQ ID NO: 1241484 - DNA, 25 bp, Homo sapien
caatcccggctgcatgttgggacca

SEQ ID NO: 1241485 - DNA, 25 bp, Homo sapien
ggaggcctccacaaagacctactga

SEQ ID NO: 1241486 - DNA, 25 bp, Homo sapien
agtgaagaagcgagctgtgtgtgcc

SEQ ID NO: 1241487 - DNA, 25 bp, Homo sapien
gccggtcaagaaggaacagctcaga

SEQ ID NO: 1241488 - DNA, 25 bp, Homo sapien
ggctggcttgggtccggcagtggat

SEQ ID NO: 1241489 - DNA, 25 bp, Homo sapien
ctgtgtgtgccggtcaagaaggaac

SEQ ID NO: 1241490 - DNA, 25 bp, Homo sapien
ctctggcctgaggagtgggtgatcc

SEQ ID NO: 1241491 - DNA, 25 bp, Homo sapien
ggcactcctgcctcatttgctcaaa

SEQ ID NO: 1241492 - DNA, 25 bp, Homo sapien
gaagtctgcatcctcaaacagggtg

SEQ ID NO: 1241493 - DNA, 25 bp, Homo sapien
cacacaaaggggatctgcggcctct

SEQ ID NO: 1241494 - DNA, 25 bp, Homo sapien
caaagctttccacggtagactggga

SEQ ID NO: 1241495 - DNA, 25 bp, Homo sapien
tgtcacccggttgctgagaccttgc

SEQ ID NO: 1241496 - DNA, 25 bp, Homo sapien
tgggacgacacctccagactgtcag

SEQ ID NO: 1241497 - DNA, 25 bp, Homo sapien
ggttctcgggagaagattcctgctt

SEQ ID NO: 1241498 - DNA, 25 bp, Homo sapien
gctggcgccgggtcagaggtagagc

SEQ ID NO: 1241499 - DNA, 25 bp, Homo sapien
attgacatggcgtcccaggcacaag

SEQ ID NO: 1241500 - DNA, 25 bp, Homo sapien
tccagcaccgcaaatattgacatgg

SEQ ID NO: 1241501 - DNA, 25 bp, Homo sapien
agaggtagagccctgactaatccag

SEQ ID NO: 1241502 - DNA, 25 bp, Homo sapien
cacaggggttgttcacatgggctag

SEQ ID NO: 1241503 - DNA, 25 bp, Homo sapien
catgccacgctgtgcacaggtctgc

SEQ ID NO: 1241504 - DNA, 25 bp, Homo sapien
caggagaggctgtggtcacatgcca

SEQ ID NO: 1241505 - DNA, 25 bp, Homo sapien
ggtcacatgccacgctgtgcacagg

SEQ ID NO: 1241506 - DNA, 25 bp, Homo sapien
tcttcccacttttccaggcaccagg

SEQ ID NO: 1241507 - DNA, 25 bp, Homo sapien
gggcctgcagaggagtgaaggattt

SEQ ID NO: 1241508 - DNA, 25 bp, Homo sapien
caggggtggtgagttaactgggccg

SEQ ID NO: 1241509 - DNA, 25 bp, Homo sapien
ctgcagaggagtgaaggatttttcc

SEQ ID NO: 1241510 - DNA, 25 bp, Homo sapien
ctggtggcccctccaagaatgaatt

SEQ ID NO: 1241511 - DNA, 25 bp, Homo sapien
tctccctggcagatatcagtcctgg

SEQ ID NO: 1241512 - DNA, 25 bp, Homo sapien
tgaattctgggtttttcacgatttc

SEQ ID NO: 1241513 - DNA, 25 bp, Homo sapien
ggtggcccctccaagaatgaattct

SEQ ID NO: 1241514 - DNA, 25 bp, Homo sapien
ctgcaaaatggaagccataaatcac

SEQ ID NO: 1241515 - DNA, 25 bp, Homo sapien
aatggaagccataaatcacaatttt

SEQ ID NO: 1241516 - DNA, 25 bp, Homo sapien
caaaatggaagccataaatcacaat

SEQ ID NO: 1241517 - DNA, 25 bp, Homo sapien
tggaagccataaatcacaattttca

SEQ ID NO: 1241518 - DNA, 25 bp, Homo sapien
gaatatcccggcataaccagggcca

SEQ ID NO: 1241519 - DNA, 25 bp, Homo sapien
ttttgattaagcgtaagggaggcga

SEQ ID NO: 1241520 - DNA, 25 bp, Homo sapien
aagctttggtcctgggggatgactc

SEQ ID NO: 1241521 - DNA, 25 bp, Homo sapien
aggcgatggcggctaatagccagca

SEQ ID NO: 1241522 - DNA, 25 bp, Homo sapien
aactcgttgtggtcggcagagtgga

SEQ ID NO: 1241523 - DNA, 25 bp, Homo sapien
tgaaggtgggcaggcggtcatcgat

SEQ ID NO: 1241524 - DNA, 25 bp, Homo sapien
ctccagaactcgttgtggtcggcag

SEQ ID NO: 1241525 - DNA, 25 bp, Homo sapien
tttttccagcaaggcgctccagaac

SEQ ID NO: 1241526 - DNA, 25 bp, Homo sapien
tctggtggcactgatggtgtttgca

SEQ ID NO: 1241527 - DNA, 25 bp, Homo sapien
ccccttaagcctgtctggtggcact

SEQ ID NO: 1241528 - DNA, 25 bp, Homo sapien
agtgccctttgtccccttaagcctg

SEQ ID NO: 1241529 - DNA, 25 bp, Homo sapien
ctggacttggaaacagtgccctttg

SEQ ID NO: 1241530 - DNA, 25 bp, Homo sapien
ttccatggcctcgatggcgctgcct

SEQ ID NO: 1241531 - DNA, 25 bp, Homo sapien
ctagaatctcatagaagttctcggg

SEQ ID NO: 1241532 - DNA, 25 bp, Homo sapien
cagagcttcatagctcccatttagc

SEQ ID NO: 1241533 - DNA, 25 bp, Homo sapien
tagtttggaaggtctctgccacacc

SEQ ID NO: 1241534 - DNA, 25 bp, Homo sapien
accaaacggcgtccgggcctcagat

SEQ ID NO: 1241535 - DNA, 25 bp, Homo sapien
tggtcaattcccgttacactgtagg

SEQ ID NO: 1241536 - DNA, 25 bp, Homo sapien
catgacccttaataagaccaaacgg

SEQ ID NO: 1241537 - DNA, 25 bp, Homo sapien
cgttacactgtaggcatgaccctta

SEQ ID NO: 1241538 - DNA, 25 bp, Homo sapien
ccaagggttccggattcggatgagc

SEQ ID NO: 1241539 - DNA, 25 bp, Homo sapien
ctgtcgctccacgacccgttccact

SEQ ID NO: 1241540 - DNA, 25 bp, Homo sapien
cacgacccgttccactcaacctggc

SEQ ID NO: 1241541 - DNA, 25 bp, Homo sapien
ttccggattcggatgagctcgattc

SEQ ID NO: 1241542 - DNA, 25 bp, Homo sapien
gttctgtgagctaggtgtgcccgtc

SEQ ID NO: 1241543 - DNA, 25 bp, Homo sapien
cttgatgttgtctgtacccggcacc

SEQ ID NO: 1241544 - DNA, 25 bp, Homo sapien
catgcttgatgttgtctgtacccgg

SEQ ID NO: 1241545 - DNA, 25 bp, Homo sapien
ttttgtatgtgacctcgctggcaag

SEQ ID NO: 1241546 - DNA, 25 bp, Homo sapien
agtgtgacacagacgcttctgctca

SEQ ID NO: 1241547 - DNA, 25 bp, Homo sapien
agcagtgtgacacagacgcttctgc

SEQ ID NO: 1241548 - DNA, 25 bp, Homo sapien
ggaccaacagaacgccactccggag

SEQ ID NO: 1241549 - DNA, 25 bp, Homo sapien
cgcttctgctcagctggaccaacag

SEQ ID NO: 1241550 - DNA, 25 bp, Homo sapien
acttgctcgtatctgcagttaacac

SEQ ID NO: 1241551 - DNA, 25 bp, Homo sapien
ccagggccatgggacttgctcgtat

SEQ ID NO: 1241552 - DNA, 25 bp, Homo sapien
gggccatgggacttgctcgtatctg

SEQ ID NO: 1241553 - DNA, 25 bp, Homo sapien
catgggacttgctcgtatctgcagt

SEQ ID NO: 1241554 - DNA, 25 bp, Homo sapien
gagggaatggatcctgtgagcagta

SEQ ID NO: 1241555 - DNA, 25 bp, Homo sapien
ggagggaatggatcctgtgagcagt

SEQ ID NO: 1241556 - DNA, 25 bp, Homo sapien
tggagggaatggatcctgtgagcag

SEQ ID NO: 1241557 - DNA, 25 bp, Homo sapien
gtggagggaatggatcctgtgagca

SEQ ID NO: 1241558 - DNA, 25 bp, Homo sapien
tgaatttccgagtttcctctgcccg

SEQ ID NO: 1241559 - DNA, 25 bp, Homo sapien
aagggctccacgcacagagtgcatg

SEQ ID NO: 1241560 - DNA, 25 bp, Homo sapien
gaaagaggctacacagggcttcaga

SEQ ID NO: 1241561 - DNA, 25 bp, Homo sapien
ggcagggcaatggatcactcacatg

SEQ ID NO: 1241562 - DNA, 25 bp, Homo sapien
gtggagccgcgaacccagcttccct

SEQ ID NO: 1241563 - DNA, 25 bp, Homo sapien
aagtgggccttgaagtccttaaatg

SEQ ID NO: 1241564 - DNA, 25 bp, Homo sapien
ccatttgtggatcgcgtcttcctcc

SEQ ID NO: 1241565 - DNA, 25 bp, Homo sapien
agcttccctgatggaccgtcacctc

SEQ ID NO: 1241566 - DNA, 25 bp, Homo sapien
ctgaggacccggcccttatcctttg

SEQ ID NO: 1241567 - DNA, 25 bp, Homo sapien
tcataaatggcatagccgattgtca

SEQ ID NO: 1241568 - DNA, 25 bp, Homo sapien
cgattgtcagcacattggcaccaaa

SEQ ID NO: 1241569 - DNA, 25 bp, Homo sapien
tatctttctgcatcagggctacaag

SEQ ID NO: 1241570 - DNA, 25 bp, Homo sapien
caccaaatctcttgagtttccttct

SEQ ID NO: 1241571 - DNA, 25 bp, Homo sapien
aacgtcttgcttctggcccgagaag

SEQ ID NO: 1241572 - DNA, 25 bp, Homo sapien
cagcttgaaccggtcggagacttct

SEQ ID NO: 1241573 - DNA, 25 bp, Homo sapien
tctctcaggttgatgaacgtcttgc

SEQ ID NO: 1241574 - DNA, 25 bp, Homo sapien
aaaagattctcagacagaaatcagc

SEQ ID NO: 1241575 - DNA, 25 bp, Homo sapien
ctcaggaaggtcaatgtctacattt

SEQ ID NO: 1241576 - DNA, 25 bp, Homo sapien
gttcaaacagagcccgaaaccgctg

SEQ ID NO: 1241577 - DNA, 25 bp, Homo sapien
aacagagcccgaaaccgctgctcct

SEQ ID NO: 1241578 - DNA, 25 bp, Homo sapien
ctcctggtcaggtggagttggcttt

SEQ ID NO: 1241579 - DNA, 25 bp, Homo sapien
tgtctcctggtcaggtggagttggc

SEQ ID NO: 1241580 - DNA, 25 bp, Homo sapien
aaaacatactcaagttcctctgctg

SEQ ID NO: 1241581 - DNA, 25 bp, Homo sapien
aaacatactcaagttcctctgctgt

SEQ ID NO: 1241582 - DNA, 25 bp, Homo sapien
acatactcaagttcctctgctgtca

SEQ ID NO: 1241583 - DNA, 25 bp, Homo sapien
aacatactcaagttcctctgctgtc

SEQ ID NO: 1241584 - DNA, 25 bp, Homo sapien
tacaggagatcaggcttagcttctt

SEQ ID NO: 1241585 - DNA, 25 bp, Homo sapien
tttacaggagatcaggcttagcttc

SEQ ID NO: 1241586 - DNA, 25 bp, Homo sapien
ggagatcaggcttagcttcttgaat

SEQ ID NO: 1241587 - DNA, 25 bp, Homo sapien
gtttttacaggagatcaggcttagc

SEQ ID NO: 1241588 - DNA, 25 bp, Homo sapien
gtgtttcaacctgaggctcctcgtg

SEQ ID NO: 1241589 - DNA, 25 bp, Homo sapien
caacctgaggctcctcgtgggacct

SEQ ID NO: 1241590 - DNA, 25 bp, Homo sapien
catgagcagtgtttcaacctgaggc

SEQ ID NO: 1241591 - DNA, 25 bp, Homo sapien
ggagacatgagcagtgtttcaacct

SEQ ID NO: 1241592 - DNA, 25 bp, Homo sapien
cttgtcccagaacactttgaattca

SEQ ID NO: 1241593 - DNA, 25 bp, Homo sapien
cagtgcagtccgtagttcataggta

SEQ ID NO: 1241594 - DNA, 25 bp, Homo sapien
tcataggtagacatggtgccggact

SEQ ID NO: 1241595 - DNA, 25 bp, Homo sapien
gtgccggacttgtcagcatcaaacc

SEQ ID NO: 1241596 - DNA, 25 bp, Homo sapien
cagcatcaaaccgaaggaaaaggtt

SEQ ID NO: 1241597 - DNA, 25 bp, Homo sapien
agccacctgtactccagtcttttct

SEQ ID NO: 1241598 - DNA, 25 bp, Homo sapien
gccacctgtactccagtcttttctt

SEQ ID NO: 1241599 - DNA, 25 bp, Homo sapien
attctccagccggaccaggcagttg

SEQ ID NO: 1241600 - DNA, 25 bp, Homo sapien
tacctgagcacaatcagctgcagga

SEQ ID NO: 1241601 - DNA, 25 bp, Homo sapien
agtcatcgaagtccagctggagctc

SEQ ID NO: 1241602 - DNA, 25 bp, Homo sapien
tggagctcctcatccgcatacctga

SEQ ID NO: 1241603 - DNA, 25 bp, Homo sapien
gacaataaactgcaaacactgaagc

SEQ ID NO: 1241604 - DNA, 25 bp, Homo sapien
caaaaccacctttgaggggcaggat

SEQ ID NO: 1241605 - DNA, 25 bp, Homo sapien
acactgaagcgcacgggcacataat

SEQ ID NO: 1241606 - DNA, 25 bp, Homo sapien
gcacataatccctctctatttgtgg

SEQ ID NO: 1241607 - DNA, 25 bp, Homo sapien
gccagtggtcacctaagccagtcag

SEQ ID NO: 1241608 - DNA, 25 bp, Homo sapien
tagcaagccagtggtcacctaagcc

SEQ ID NO: 1241609 - DNA, 25 bp, Homo sapien
ctgtagcaagccagtggtcacctaa

SEQ ID NO: 1241610 - DNA, 25 bp, Homo sapien
gtggtcacctaagccagtcagccgg

SEQ ID NO: 1241611 - DNA, 25 bp, Homo sapien
gactctcatcaagggcgggctgaag

SEQ ID NO: 1241612 - DNA, 25 bp, Homo sapien
caaagggccttccagtggagcctgt

SEQ ID NO: 1241613 - DNA, 25 bp, Homo sapien
caaggactttcatcaagggcggcga

SEQ ID NO: 1241614 - DNA, 25 bp, Homo sapien
ccatctggtggtaaacaaggacttt

SEQ ID NO: 1241615 - DNA, 25 bp, Homo sapien
catttatattgagatgaatgaactc

SEQ ID NO: 1241616 - DNA, 25 bp, Homo sapien
tttatattgagatgaatgaactcct

SEQ ID NO: 1241617 - DNA, 25 bp, Homo sapien
ctcatttatattgagatgaatgaac

SEQ ID NO: 1241618 - DNA, 25 bp, Homo sapien
ttatattgagatgaatgaactcctt

SEQ ID NO: 1241619 - DNA, 25 bp, Homo sapien
gagcagagggtctggattggccata

SEQ ID NO: 1241620 - DNA, 25 bp, Homo sapien
ctgagcagagggtctggattggcca

SEQ ID NO: 1241621 - DNA, 25 bp, Homo sapien
tgagcagagggtctggattggccat

SEQ ID NO: 1241622 - DNA, 25 bp, Homo sapien
agggtcttgctatcactctcttcca

SEQ ID NO: 1241623 - DNA, 25 bp, Homo sapien
gggtcttgctatcactctcttccag

SEQ ID NO: 1241624 - DNA, 25 bp, Homo sapien
tcagatgttcattgtcaaatggatg

SEQ ID NO: 1241625 - DNA, 25 bp, Homo sapien
cagatgttcattgtcaaatggatga

SEQ ID NO: 1241626 - DNA, 25 bp, Homo sapien
agatgttcattgtcaaatggatgaa

SEQ ID NO: 1241627 - DNA, 25 bp, Homo sapien
gctagtgatgcctgaacctggatgt

SEQ ID NO: 1241628 - DNA, 25 bp, Homo sapien
ggcaggctgcatctctacaaggcag

SEQ ID NO: 1241629 - DNA, 25 bp, Homo sapien
caatgactggagctacatggaagtc

SEQ ID NO: 1241630 - DNA, 25 bp, Homo sapien
gagaagttctgaaggtcaaggtcca

SEQ ID NO: 1241631 - DNA, 25 bp, Homo sapien
tgtgctcctggacataaaggcctaa

SEQ ID NO: 1241632 - DNA, 25 bp, Homo sapien
taaaggcaccctgtgggagtgacac

SEQ ID NO: 1241633 - DNA, 25 bp, Homo sapien
gaaagaaaacaggacgcccagttca

SEQ ID NO: 1241634 - DNA, 25 bp, Homo sapien
tctcagtgaggcagaaattaccatc

SEQ ID NO: 1241635 - DNA, 25 bp, Homo sapien
tggcccctcagcgcactgcgtagct

SEQ ID NO: 1241636 - DNA, 25 bp, Homo sapien
aggtcacatgctctgggctttctga

SEQ ID NO: 1241637 - DNA, 25 bp, Homo sapien
aaccaggtcacatgctctgggcttt

SEQ ID NO: 1241638 - DNA, 25 bp, Homo sapien
ccaggtcacatgctctgggctttct

SEQ ID NO: 1241639 - DNA, 25 bp, Homo sapien
cagtacactgaattgggctggcacc

SEQ ID NO: 1241640 - DNA, 25 bp, Homo sapien
cacagctgtggtgacgaggcagcct

SEQ ID NO: 1241641 - DNA, 25 bp, Homo sapien
tttctactaatgatccagtacactg

SEQ ID NO: 1241642 - DNA, 25 bp, Homo sapien
tacttggcaggcggtcttggctctc

SEQ ID NO: 1241643 - DNA, 25 bp, Homo sapien
ggcttgtctaaccacgctagaggta

SEQ ID NO: 1241644 - DNA, 25 bp, Homo sapien
taaccacgctagaggtaaccagggc

SEQ ID NO: 1241645 - DNA, 25 bp, Homo sapien
catcctgaagggcttgtctaaccac

SEQ ID NO: 1241646 - DNA, 25 bp, Homo sapien
tagaggtaaccagggctttgctggc

SEQ ID NO: 1241647 - DNA, 25 bp, Homo sapien
ctctctgtcccatggtcacatcagc

SEQ ID NO: 1241648 - DNA, 25 bp, Homo sapien
tctctctgtcccatggtcacatcag

SEQ ID NO: 1241649 - DNA, 25 bp, Homo sapien
ctctctctgtcccatggtcacatca

SEQ ID NO: 1241650 - DNA, 25 bp, Homo sapien
tctctgtcccatggtcacatcagcc

SEQ ID NO: 1241651 - DNA, 25 bp, Homo sapien
catatctgtacttttgaaagccact

SEQ ID NO: 1241652 - DNA, 25 bp, Homo sapien
tatctgtacttttgaaagccactgt

SEQ ID NO: 1241653 - DNA, 25 bp, Homo sapien
tccatatctgtacttttgaaagcca

SEQ ID NO: 1241654 - DNA, 25 bp, Homo sapien
ccgtccatatctgtacttttgaaag

SEQ ID NO: 1241655 - DNA, 25 bp, Homo sapien
catgtggtctcccaccctagtacta

SEQ ID NO: 1241656 - DNA, 25 bp, Homo sapien
ctgcgtagctgacaagatcaggtgc

SEQ ID NO: 1241657 - DNA, 25 bp, Homo sapien
tgcagcatccggtattcccatgtgg

SEQ ID NO: 1241658 - DNA, 25 bp, Homo sapien
caggccagaccctgcgtagctgaca

SEQ ID NO: 1241659 - DNA, 25 bp, Homo sapien
taataccctgtcagctgcaagtggc

SEQ ID NO: 1241660 - DNA, 25 bp, Homo sapien
caaaggcgtcagagttaataccctg

SEQ ID NO: 1241661 - DNA, 25 bp, Homo sapien
gaacccagctcttcctgtggacaga

SEQ ID NO: 1241662 - DNA, 25 bp, Homo sapien
gatgaacgagcagggttttcccaga

SEQ ID NO: 1241663 - DNA, 25 bp, Homo sapien
tggggcatctggtccgactttggca

SEQ ID NO: 1241664 - DNA, 25 bp, Homo sapien
catctggtccgactttggcaccaca

SEQ ID NO: 1241665 - DNA, 25 bp, Homo sapien
gtccgactttggcaccacatcaggg

SEQ ID NO: 1241666 - DNA, 25 bp, Homo sapien
tggtccgactttggcaccacatcag

SEQ ID NO: 1241667 - DNA, 25 bp, Homo sapien
ggctctggcaatgtatgtcctccct

SEQ ID NO: 1241668 - DNA, 25 bp, Homo sapien
ttcaccgcttccaggtggctctggc

SEQ ID NO: 1241669 - DNA, 25 bp, Homo sapien
gcaatgtatgtcctccctctgcaca

SEQ ID NO: 1241670 - DNA, 25 bp, Homo sapien
tccaggtggctctggcaatgtatgt

SEQ ID NO: 1241671 - DNA, 25 bp, Homo sapien
ctacgagctccttgagagtcaaggc

SEQ ID NO: 1241672 - DNA, 25 bp, Homo sapien
gcaggcttgcagaatgtctggtctc

SEQ ID NO: 1241673 - DNA, 25 bp, Homo sapien
ctccttgagagtcaaggctctggca

SEQ ID NO: 1241674 - DNA, 25 bp, Homo sapien
cttcactcgcatgtccattagacta

SEQ ID NO: 1241675 - DNA, 25 bp, Homo sapien
agccctgcgtacactggtttctgtc

SEQ ID NO: 1241676 - DNA, 25 bp, Homo sapien
aagcaggtgcccaatgttgcttctg

SEQ ID NO: 1241677 - DNA, 25 bp, Homo sapien
ttctggcagaccagccctgcgtaca

SEQ ID NO: 1241678 - DNA, 25 bp, Homo sapien
ggacagtggttgagaagccctcctg

SEQ ID NO: 1241679 - DNA, 25 bp, Homo sapien
ccctccaacacgcagctcccaccct

SEQ ID NO: 1241680 - DNA, 25 bp, Homo sapien
accctccagctctcgttctactcag

SEQ ID NO: 1241681 - DNA, 25 bp, Homo sapien
ctaagtcatactcaacttccctcca

SEQ ID NO: 1241682 - DNA, 25 bp, Homo sapien
cttcctccaggtgcattctgtgcct

SEQ ID NO: 1241683 - DNA, 25 bp, Homo sapien
gctgactgtgccagtttcagggcct

SEQ ID NO: 1241684 - DNA, 25 bp, Homo sapien
tgccagagcgtgatgtgggtttgat

SEQ ID NO: 1241685 - DNA, 25 bp, Homo sapien
gtttgattgttgttggatagcaggt

SEQ ID NO: 1241686 - DNA, 25 bp, Homo sapien
tggaggaccacgtggccttgccaga

SEQ ID NO: 1241687 - DNA, 25 bp, Homo sapien
gaaaaacgctcacttaggttggcag

SEQ ID NO: 1241688 - DNA, 25 bp, Homo sapien
gagtgagtaattgcacctgccgact

SEQ ID NO: 1241689 - DNA, 25 bp, Homo sapien
aaaccttgctgctttcgggactgga

SEQ ID NO: 1241690 - DNA, 25 bp, Homo sapien
cagccctcgggtgaaatggaagcat

SEQ ID NO: 1241691 - DNA, 25 bp, Homo sapien
ggagcttagaaatcccagttggcac

SEQ ID NO: 1241692 - DNA, 25 bp, Homo sapien
tacaccttgggcaaagtctatgcga

SEQ ID NO: 1241693 - DNA, 25 bp, Homo sapien
tgggattcagctcaaggattcagtg

SEQ ID NO: 1241694 - DNA, 25 bp, Homo sapien
acagggatcctcagaatcagcggcc

SEQ ID NO: 1241695 - DNA, 25 bp, Homo sapien
gattatcaacaatggggctaccact

SEQ ID NO: 1241696 - DNA, 25 bp, Homo sapien
ctagattatcaacaatggggctacc

SEQ ID NO: 1241697 - DNA, 25 bp, Homo sapien
caacaatggggctaccactttcctt

SEQ ID NO: 1241698 - DNA, 25 bp, Homo sapien
tgttgcttatgtgacctgttggttg

SEQ ID NO: 1241699 - DNA, 25 bp, Homo sapien
tatgtagcagtgtagtctttaacct

SEQ ID NO: 1241700 - DNA, 25 bp, Homo sapien
gggtgatgttatcagccatgacatc

SEQ ID NO: 1241701 - DNA, 25 bp, Homo sapien
tcagcatgctggctgtgaccccgga

SEQ ID NO: 1241702 - DNA, 25 bp, Homo sapien
aaggatgtgtttcaaccatgtcaca

SEQ ID NO: 1241703 - DNA, 25 bp, Homo sapien
acaggtgtcaaccagaaactctcct

SEQ ID NO: 1241704 - DNA, 25 bp, Homo sapien
tatttatggatttcaggaagacgat

SEQ ID NO: 1241705 - DNA, 25 bp, Homo sapien
gatgccacaggtgtcaaccagaaac

SEQ ID NO: 1241706 - DNA, 25 bp, Homo sapien
cttcaagccaagatgccacaggtgt

SEQ ID NO: 1241707 - DNA, 25 bp, Homo sapien
aaccaagatggccaggccacctggc

SEQ ID NO: 1241708 - DNA, 25 bp, Homo sapien
ctggatgaaccaagatggccaggcc

SEQ ID NO: 1241709 - DNA, 25 bp, Homo sapien
tgaaccaagatggccaggccacctg

SEQ ID NO: 1241710 - DNA, 25 bp, Homo sapien
ccaagatggccaggccacctggcat

SEQ ID NO: 1241711 - DNA, 25 bp, Homo sapien
caacaaccagtgttgtcactcggta

SEQ ID NO: 1241712 - DNA, 25 bp, Homo sapien
tcagttggtcaacatgtccagggtg

SEQ ID NO: 1241713 - DNA, 25 bp, Homo sapien
tgtcattatcagtgacaacaaccag

SEQ ID NO: 1241714 - DNA, 25 bp, Homo sapien
cttacagttgatccacaggacaggc

SEQ ID NO: 1241715 - DNA, 25 bp, Homo sapien
gggatgtcgcctctgagtctgaaaa

SEQ ID NO: 1241716 - DNA, 25 bp, Homo sapien
tgtttgcaaacgtcgaactgccaag

SEQ ID NO: 1241717 - DNA, 25 bp, Homo sapien
tgactttccttgagcaccagatgcc

SEQ ID NO: 1241718 - DNA, 25 bp, Homo sapien
caagagttctgagctccttgggttg

SEQ ID NO: 1241719 - DNA, 25 bp, Homo sapien
gagtggacacaattctcacctgagt

SEQ ID NO: 1241720 - DNA, 25 bp, Homo sapien
tgtctttaactgtagagcctgccac

SEQ ID NO: 1241721 - DNA, 25 bp, Homo sapien
ggtctgtctgggacacacctcaaaa

SEQ ID NO: 1241722 - DNA, 25 bp, Homo sapien
tatgtgaatatcaaagcaagcctgg

SEQ ID NO: 1241723 - DNA, 25 bp, Homo sapien
tacggaatcagaaactgtcagggtg

SEQ ID NO: 1241724 - DNA, 25 bp, Homo sapien
tcaaggagctgaacgtctctgctgg

SEQ ID NO: 1241725 - DNA, 25 bp, Homo sapien
cactctgccatgcttgagcttcgga

SEQ ID NO: 1241726 - DNA, 25 bp, Homo sapien
gggtggcaccctgaactctgattta

SEQ ID NO: 1241727 - DNA, 25 bp, Homo sapien
tgaatggataaagatcccagcctcc

SEQ ID NO: 1241728 - DNA, 25 bp, Homo sapien
gaccaatagaccagcatcatttaga

SEQ ID NO: 1241729 - DNA, 25 bp, Homo sapien
caaaacgtttgaatcttgtcagccc

SEQ ID NO: 1241730 - DNA, 25 bp, Homo sapien
tgggtgatgacggtgccccacttca

SEQ ID NO: 1241731 - DNA, 25 bp, Homo sapien
tttcctctgaggcagcgaagggtac

SEQ ID NO: 1241732 - DNA, 25 bp, Homo sapien
tgacacgacactaacaatatccggg

SEQ ID NO: 1241733 - DNA, 25 bp, Homo sapien
tcctggattgctggaggctccggtc

SEQ ID NO: 1241734 - DNA, 25 bp, Homo sapien
tgaacagttgtccaccaggtcattc

SEQ ID NO: 1241735 - DNA, 25 bp, Homo sapien
cagtgtctcagggaaaactctctct

SEQ ID NO: 1241736 - DNA, 25 bp, Homo sapien
tgcctagagaagacgattgtgttcc

SEQ ID NO: 1241737 - DNA, 25 bp, Homo sapien
catgtgagtcacgtggttttgccta

SEQ ID NO: 1241738 - DNA, 25 bp, Homo sapien
tatagacggcaagaagggtccagct

SEQ ID NO: 1241739 - DNA, 25 bp, Homo sapien
tccacatctgggagtgtttagaagt

SEQ ID NO: 1241740 - DNA, 25 bp, Homo sapien
ggaagaaacatgcattccacatctg

SEQ ID NO: 1241741 - DNA, 25 bp, Homo sapien
gaaaccgatcatttagaagaagaca

SEQ ID NO: 1241742 - DNA, 25 bp, Homo sapien
tagaagttggaaaccgatcatttag

SEQ ID NO: 1241743 - DNA, 25 bp, Homo sapien
caagtcccggagctttggctaatga

SEQ ID NO: 1241744 - DNA, 25 bp, Homo sapien
caagtctcttgtcgagcagatggag

SEQ ID NO: 1241745 - DNA, 25 bp, Homo sapien
ggtaacagaacaaactcaagtctct

SEQ ID NO: 1241746 - DNA, 25 bp, Homo sapien
catctacggatctcaaagtggcaac

SEQ ID NO: 1241747 - DNA, 25 bp, Homo sapien
ttctcgtcttgcagaaacttcacag

SEQ ID NO: 1241748 - DNA, 25 bp, Homo sapien
ctcgtcttgcagaaacttcacaggc

SEQ ID NO: 1241749 - DNA, 25 bp, Homo sapien
tctcgtcttgcagaaacttcacagg

SEQ ID NO: 1241750 - DNA, 25 bp, Homo sapien
cagcaacagtgaccatagcatagag

SEQ ID NO: 1241751 - DNA, 25 bp, Homo sapien
tggcatttaacccagaccttcagaa

SEQ ID NO: 1241752 - DNA, 25 bp, Homo sapien
cagaaattggtagaacttggacagg

SEQ ID NO: 1241753 - DNA, 25 bp, Homo sapien
tgccggagctgtgtgactgttgtcc

SEQ ID NO: 1241754 - DNA, 25 bp, Homo sapien
gacaccggatccgcatagcacattc

SEQ ID NO: 1241755 - DNA, 25 bp, Homo sapien
cagtgcacccctccttagcctgggt

SEQ ID NO: 1241756 - DNA, 25 bp, Homo sapien
cttagtacagacaccggatccgcat

SEQ ID NO: 1241757 - DNA, 25 bp, Homo sapien
gtgcacccctccttagcctgggtga

SEQ ID NO: 1241758 - DNA, 25 bp, Homo sapien
ttgtacctttgcgtgtaccactcat

SEQ ID NO: 1241759 - DNA, 25 bp, Homo sapien
agggagtaggagtctcctcgctgcc

SEQ ID NO: 1241760 - DNA, 25 bp, Homo sapien
agtaggagtctcctcgctgcccttt

SEQ ID NO: 1241761 - DNA, 25 bp, Homo sapien
gcctttgtacctttgcgtgtaccac

SEQ ID NO: 1241762 - DNA, 25 bp, Homo sapien
tcgcgcatgcgccttgagggaagat

SEQ ID NO: 1241763 - DNA, 25 bp, Homo sapien
ctgcccgccgtaggttagaggcggg

SEQ ID NO: 1241764 - DNA, 25 bp, Homo sapien
ggaagatggcacctgccggctgctg

SEQ ID NO: 1241765 - DNA, 25 bp, Homo sapien
ctgagagccgggcaagggctgtcgc

SEQ ID NO: 1241766 - DNA, 25 bp, Homo sapien
ccgattctgtggagggtaagacgtc

SEQ ID NO: 1241767 - DNA, 25 bp, Homo sapien
gtaagacgtcagacgccagaccgga

SEQ ID NO: 1241768 - DNA, 25 bp, Homo sapien
tattgggattcgtagtcccggcacc

SEQ ID NO: 1241769 - DNA, 25 bp, Homo sapien
tggccgagctgggactaccattccc

SEQ ID NO: 1241770 - DNA, 25 bp, Homo sapien
tttggcctcctggttgcattcgatg

SEQ ID NO: 1241771 - DNA, 25 bp, Homo sapien
cgtggttatagtctcggtacaactc

SEQ ID NO: 1241772 - DNA, 25 bp, Homo sapien
tgcattcgatgcacctgtactggca

SEQ ID NO: 1241773 - DNA, 25 bp, Homo sapien
gcagcagtaggagtcgctgccaccc

SEQ ID NO: 1241774 - DNA, 25 bp, Homo sapien
tatgccccagtatgagaaaagcgct

SEQ ID NO: 1241775 - DNA, 25 bp, Homo sapien
agatattcatgcaaagatcccgggc

SEQ ID NO: 1241776 - DNA, 25 bp, Homo sapien
gatcccgggcgggaatgtcaactac

SEQ ID NO: 1241777 - DNA, 25 bp, Homo sapien
taaagactgtatcagaggaccctgc

SEQ ID NO: 1241778 - DNA, 25 bp, Homo sapien
gatgataacaggatcatactcgata

SEQ ID NO: 1241779 - DNA, 25 bp, Homo sapien
caatatagcattaatcaagatgata

SEQ ID NO: 1241780 - DNA, 25 bp, Homo sapien
tatatttgtctacaggtttctggca

SEQ ID NO: 1241781 - DNA, 25 bp, Homo sapien
ggcctgagctttgcacaatatagca

SEQ ID NO: 1241782 - DNA, 25 bp, Homo sapien
caccacctcaggtatgcttcacaaa

SEQ ID NO: 1241783 - DNA, 25 bp, Homo sapien
ctgccaccacctcaggtatgcttca

SEQ ID NO: 1241784 - DNA, 25 bp, Homo sapien
ccaccacctcaggtatgcttcacaa

SEQ ID NO: 1241785 - DNA, 25 bp, Homo sapien
gccaccacctcaggtatgcttcaca

SEQ ID NO: 1241786 - DNA, 25 bp, Homo sapien
ctaaagcagcaatcgcaaacattct

SEQ ID NO: 1241787 - DNA, 25 bp, Homo sapien
ctgatcaagtcatcaggggcagtat

SEQ ID NO: 1241788 - DNA, 25 bp, Homo sapien
cattctatagaaatcccattcctta

SEQ ID NO: 1241789 - DNA, 25 bp, Homo sapien
ttccttagcatatctgatcaagtca

SEQ ID NO: 1241790 - DNA, 25 bp, Homo sapien
gagatcaggagtgtcagaggtacac

SEQ ID NO: 1241791 - DNA, 25 bp, Homo sapien
gggacaggcattccgggcacaggaa

SEQ ID NO: 1241792 - DNA, 25 bp, Homo sapien
gccaactcttgaggggtatgcagga

SEQ ID NO: 1241793 - DNA, 25 bp, Homo sapien
aaacaaagtagagccggaacaggag

SEQ ID NO: 1241794 - DNA, 25 bp, Homo sapien
tagttccactgtgtcctatggtcag

SEQ ID NO: 1241795 - DNA, 25 bp, Homo sapien
tcagtctgaaagatgggacctatcg

SEQ ID NO: 1241796 - DNA, 25 bp, Homo sapien
catcttcagtgtaagagatctccaa

SEQ ID NO: 1241797 - DNA, 25 bp, Homo sapien
taagaatgggataacacaggaagac

SEQ ID NO: 1241798 - DNA, 25 bp, Homo sapien
cacagatgtgtagtcatgttcccaa

SEQ ID NO: 1241799 - DNA, 25 bp, Homo sapien
tactttaatgagtttgaggcacaca

SEQ ID NO: 1241800 - DNA, 25 bp, Homo sapien
ttttgccgtcatgggccgttctacc

SEQ ID NO: 1241801 - DNA, 25 bp, Homo sapien
tcagcaagagttttccgtagctaga

SEQ ID NO: 1241802 - DNA, 25 bp, Homo sapien
tctaacgctataagagaataacgac

SEQ ID NO: 1241803 - DNA, 25 bp, Homo sapien
tcctcatatcaagcggcagattccc

SEQ ID NO: 1241804 - DNA, 25 bp, Homo sapien
gagaaggcagccaataagttcagaa

SEQ ID NO: 1241805 - DNA, 25 bp, Homo sapien
gcagattcccgtgaatatcaaagga

SEQ ID NO: 1241806 - DNA, 25 bp, Homo sapien
tccaacatcccattccatactctgg

SEQ ID NO: 1241807 - DNA, 25 bp, Homo sapien
gtaagccactcaacacggccaagaa

SEQ ID NO: 1241808 - DNA, 25 bp, Homo sapien
gccaagaaggagagcttacggttga

SEQ ID NO: 1241809 - DNA, 25 bp, Homo sapien
aagtcctgagatttaaagatggcat

SEQ ID NO: 1241810 - DNA, 25 bp, Homo sapien
cttgcaaggaggatgtaacagcgag

SEQ ID NO: 1241811 - DNA, 25 bp, Homo sapien
gaagcagcgatatgtctgaagaccc

SEQ ID NO: 1241812 - DNA, 25 bp, Homo sapien
gctttacagccgctacttgcaagga

SEQ ID NO: 1241813 - DNA, 25 bp, Homo sapien
caaaaaggtggattagctgggcatg

SEQ ID NO: 1241814 - DNA, 25 bp, Homo sapien
gaacttaagtaggaacatgcctggg

SEQ ID NO: 1241815 - DNA, 25 bp, Homo sapien
gagagcataaggcaagtttggagaa

SEQ ID NO: 1241816 - DNA, 25 bp, Homo sapien
gatgatgacattacagagggccaca

SEQ ID NO: 1241817 - DNA, 25 bp, Homo sapien
gagaagagaggacctgtggtggatg

SEQ ID NO: 1241818 - DNA, 25 bp, Homo sapien
cacgtgactgctgtaggtgttaagc

SEQ ID NO: 1241819 - DNA, 25 bp, Homo sapien
tcagaagttcttgggcacgtgactg

SEQ ID NO: 1241820 - DNA, 25 bp, Homo sapien
gagcactcggaggtcaacggaaaaa

SEQ ID NO: 1241821 - DNA, 25 bp, Homo sapien
taagcactgcaaactggagtttttg

SEQ ID NO: 1241822 - DNA, 25 bp, Homo sapien
taaaggatgtatttagaatgccaca

SEQ ID NO: 1241823 - DNA, 25 bp, Homo sapien
caggccctgagttaaggtggataca

SEQ ID NO: 1241824 - DNA, 25 bp, Homo sapien
gggtaatggctttcaagtgattcaa

SEQ ID NO: 1241825 - DNA, 25 bp, Homo sapien
gacaagcagatgcacttatgaaaag

SEQ ID NO: 1241826 - DNA, 25 bp, Homo sapien
acagctggtcatgccacagatagtg

SEQ ID NO: 1241827 - DNA, 25 bp, Homo sapien
gctggtcatgccacagatagtgaag

SEQ ID NO: 1241828 - DNA, 25 bp, Homo sapien
aatgaggaggttggtttatatttca

SEQ ID NO: 1241829 - DNA, 25 bp, Homo sapien
tacagctggtcatgccacagatagt

SEQ ID NO: 1241830 - DNA, 25 bp, Homo sapien
taacgtataaaccttcacctgttgc

SEQ ID NO: 1241831 - DNA, 25 bp, Homo sapien
gcatgtcattcagtctctgcagcaa

SEQ ID NO: 1241832 - DNA, 25 bp, Homo sapien
gggtatccaccgctattatcattgc

SEQ ID NO: 1241833 - DNA, 25 bp, Homo sapien
tgcagcaacattccttgtgtccatg

SEQ ID NO: 1241834 - DNA, 25 bp, Homo sapien
ttatgtgtgaattatgagcgcttac

SEQ ID NO: 1241835 - DNA, 25 bp, Homo sapien
gcgtttctattgtaagaacacaaaa

SEQ ID NO: 1241836 - DNA, 25 bp, Homo sapien
cgtttctattgtaagaacacaaaat

SEQ ID NO: 1241837 - DNA, 25 bp, Homo sapien
aaagcgtttctattgtaagaacaca

SEQ ID NO: 1241838 - DNA, 25 bp, Homo sapien
agatgtaatttacccttgcaaagta

SEQ ID NO: 1241839 - DNA, 25 bp, Homo sapien
ttatcacttatttttggatcatcca

SEQ ID NO: 1241840 - DNA, 25 bp, Homo sapien
tttttggatcatccaattttaaaga

SEQ ID NO: 1241841 - DNA, 25 bp, Homo sapien
tcagatgtaatttacccttgcaaag

SEQ ID NO: 1241842 - DNA, 25 bp, Homo sapien
ccacctctccatagagggctaccag

SEQ ID NO: 1241843 - DNA, 25 bp, Homo sapien
ctctccatagagggctaccaggatc

SEQ ID NO: 1241844 - DNA, 25 bp, Homo sapien
cacctctccatagagggctaccagg

SEQ ID NO: 1241845 - DNA, 25 bp, Homo sapien
cctctccatagagggctaccaggat

SEQ ID NO: 1241846 - DNA, 25 bp, Homo sapien
taactgcccagtgattcggtgaaag

SEQ ID NO: 1241847 - DNA, 25 bp, Homo sapien
tgtctatcagatacgagaggaagga

SEQ ID NO: 1241848 - DNA, 25 bp, Homo sapien
ctagtgtgctagaaagcaaaccacc

SEQ ID NO: 1241849 - DNA, 25 bp, Homo sapien
gattccgaatgtaaactagtgtgct

SEQ ID NO: 1241850 - DNA, 25 bp, Homo sapien
ctagttaggtctgcaggcgctgcca

SEQ ID NO: 1241851 - DNA, 25 bp, Homo sapien
tagttaggtctgcaggcgctgccac

SEQ ID NO: 1241852 - DNA, 25 bp, Homo sapien
tgctccacctcgacgctttcttgta

SEQ ID NO: 1241853 - DNA, 25 bp, Homo sapien
attgctccacctcgacgctttcttg

SEQ ID NO: 1241854 - DNA, 25 bp, Homo sapien
ttgctccacctcgacgctttcttgt

SEQ ID NO: 1241855 - DNA, 25 bp, Homo sapien
tgaatggagtggtactgtttgtggt

SEQ ID NO: 1241856 - DNA, 25 bp, Homo sapien
tctgaatatctgtccatgcagatag

SEQ ID NO: 1241857 - DNA, 25 bp, Homo sapien
gcagataggacaaccgacagtaccc

SEQ ID NO: 1241858 - DNA, 25 bp, Homo sapien
aagtgtgggtagtcacatacacgtc

SEQ ID NO: 1241859 - DNA, 25 bp, Homo sapien
gtttacatatcagacgtgggtttca

SEQ ID NO: 1241860 - DNA, 25 bp, Homo sapien
tcagacgtgggtttcaaaacagtct

SEQ ID NO: 1241861 - DNA, 25 bp, Homo sapien
ggagaacctgattgtccatccgtct

SEQ ID NO: 1241862 - DNA, 25 bp, Homo sapien
actggagaacctgattgtccatccg

SEQ ID NO: 1241863 - DNA, 25 bp, Homo sapien
tgtcttcaaggataaaacttaaaga

SEQ ID NO: 1241864 - DNA, 25 bp, Homo sapien
gcttctgctcggagagtggcttgct

SEQ ID NO: 1241865 - DNA, 25 bp, Homo sapien
gagtggcttgctcggcggctcccca

SEQ ID NO: 1241866 - DNA, 25 bp, Homo sapien
gctgcttctgctcggagagtggctt

SEQ ID NO: 1241867 - DNA, 25 bp, Homo sapien
gagagtggcttgctcggcggctccc

SEQ ID NO: 1241868 - DNA, 25 bp, Homo sapien
tcctccaagggcatgcgagaacaca

SEQ ID NO: 1241869 - DNA, 25 bp, Homo sapien
gtcctccaagggcatgcgagaacac

SEQ ID NO: 1241870 - DNA, 25 bp, Homo sapien
gaatgtggagaccagccgtcctcca

SEQ ID NO: 1241871 - DNA, 25 bp, Homo sapien
aatccagctgtgaatgtggagacca

SEQ ID NO: 1241872 - DNA, 25 bp, Homo sapien
atcaggttataatcgattggatctc

SEQ ID NO: 1241873 - DNA, 25 bp, Homo sapien
cagaaatcaggttataatcgattgg

SEQ ID NO: 1241874 - DNA, 25 bp, Homo sapien
tttatcagaaatcaggttataatcg

SEQ ID NO: 1241875 - DNA, 25 bp, Homo sapien
ggttataatcgattggatctctgct

SEQ ID NO: 1241876 - DNA, 25 bp, Homo sapien
cacgtgttcctaatgtttggaagtg

SEQ ID NO: 1241877 - DNA, 25 bp, Homo sapien
catgctcaggaagcgatcccccgag

SEQ ID NO: 1241878 - DNA, 25 bp, Homo sapien
agatatttgcccccgttgccagtgt

SEQ ID NO: 1241879 - DNA, 25 bp, Homo sapien
gattagacaggagtcataaaggctg

SEQ ID NO: 1241880 - DNA, 25 bp, Homo sapien
tgtaccttgcagacagcggtgcctc

SEQ ID NO: 1241881 - DNA, 25 bp, Homo sapien
cagtgtgggcacctcttcatttgca

SEQ ID NO: 1241882 - DNA, 25 bp, Homo sapien
tcaagtgagcaatagccctggcatt

SEQ ID NO: 1241883 - DNA, 25 bp, Homo sapien
gtaaaggtgccccaataattggcag

SEQ ID NO: 1241884 - DNA, 25 bp, Homo sapien
ggcccaacggattaacgcgattgcg

SEQ ID NO: 1241885 - DNA, 25 bp, Homo sapien
tttgtccgccgccagtgtagacagc

SEQ ID NO: 1241886 - DNA, 25 bp, Homo sapien
gattgcgttttcctaccacgaagag

SEQ ID NO: 1241887 - DNA, 25 bp, Homo sapien
tagacagcagattggaacagcccgg

SEQ ID NO: 1241888 - DNA, 25 bp, Homo sapien
aaagttcgcggggaccgcgctctgt

SEQ ID NO: 1241889 - DNA, 25 bp, Homo sapien
gctgctccgcaaagagatggtgagt

SEQ ID NO: 1241890 - DNA, 25 bp, Homo sapien
tctgtccggaagtccccgcgcccac

SEQ ID NO: 1241891 - DNA, 25 bp, Homo sapien
tctggcgctgctccgcaaagagatg

SEQ ID NO: 1241892 - DNA, 25 bp, Homo sapien
tgccctcgacgtcctgccggttgtg

SEQ ID NO: 1241893 - DNA, 25 bp, Homo sapien
cctcgacgtcctgccggttgtgagc

SEQ ID NO: 1241894 - DNA, 25 bp, Homo sapien
cctgcaacggcctgcttcgtgggat

SEQ ID NO: 1241895 - DNA, 25 bp, Homo sapien
aacggcctgcttcgtgggatctgaa

SEQ ID NO: 1241896 - DNA, 25 bp, Homo sapien
tcttgctgactgctgcgggtactgc

SEQ ID NO: 1241897 - DNA, 25 bp, Homo sapien
gtactgctggacaaggccgtgctga

SEQ ID NO: 1241898 - DNA, 25 bp, Homo sapien
agtgggtctggcgttcttgctgact

SEQ ID NO: 1241899 - DNA, 25 bp, Homo sapien
gcggcaaggagcgacctgcccgggt

SEQ ID NO: 1241900 - DNA, 25 bp, Homo sapien
gttccacaggccagatattgagcag

SEQ ID NO: 1241901 - DNA, 25 bp, Homo sapien
cacaggccagatattgagcagggag

SEQ ID NO: 1241902 - DNA, 25 bp, Homo sapien
agatattgagcagggagcttcttcc

SEQ ID NO: 1241903 - DNA, 25 bp, Homo sapien
cagatattgagcagggagcttcttc

SEQ ID NO: 1241904 - DNA, 25 bp, Homo sapien
ttcctggaacaacagagagttcggc

SEQ ID NO: 1241905 - DNA, 25 bp, Homo sapien
cctggaacaacagagagttcggcct

SEQ ID NO: 1241906 - DNA, 25 bp, Homo sapien
tggaacaacagagagttcggcctct

SEQ ID NO: 1241907 - DNA, 25 bp, Homo sapien
ggaacaacagagagttcggcctctg

SEQ ID NO: 1241908 - DNA, 25 bp, Homo sapien
cctggcatctttttcacggcaaatg

SEQ ID NO: 1241909 - DNA, 25 bp, Homo sapien
catcaccatgatagcgagcccttgg

SEQ ID NO: 1241910 - DNA, 25 bp, Homo sapien
gggctgcgtctgttttgatctgttt

SEQ ID NO: 1241911 - DNA, 25 bp, Homo sapien
cgagcccatctgtggagagaaattt

SEQ ID NO: 1241912 - DNA, 25 bp, Homo sapien
agttgggagtgtcagtccttctttc

SEQ ID NO: 1241913 - DNA, 25 bp, Homo sapien
ttgggagtgtcagtccttctttctt

SEQ ID NO: 1241914 - DNA, 25 bp, Homo sapien
gttgggagtgtcagtccttctttct

SEQ ID NO: 1241915 - DNA, 25 bp, Homo sapien
acactgcgccctgcggttacaatgt

SEQ ID NO: 1241916 - DNA, 25 bp, Homo sapien
gacactgcgccctgcggttacaatg

SEQ ID NO: 1241917 - DNA, 25 bp, Homo sapien
tctttggcctccagcagcggcaaat

SEQ ID NO: 1241918 - DNA, 25 bp, Homo sapien
tttggcctccagcagcggcaaatcc

SEQ ID NO: 1241919 - DNA, 25 bp, Homo sapien
tctctttggcctccagcagcggcaa

SEQ ID NO: 1241920 - DNA, 25 bp, Homo sapien
tggcctccagcagcggcaaatccat

SEQ ID NO: 1241921 - DNA, 25 bp, Homo sapien
ctggggaagccactatgacttgaat

SEQ ID NO: 1241922 - DNA, 25 bp, Homo sapien
gggaagccactatgacttgaatccc

SEQ ID NO: 1241923 - DNA, 25 bp, Homo sapien
ggaagccactatgacttgaatccca

SEQ ID NO: 1241924 - DNA, 25 bp, Homo sapien
aagccactatgacttgaatcccatt

SEQ ID NO: 1241925 - DNA, 25 bp, Homo sapien
aggcagtagataggatctaggagtt

SEQ ID NO: 1241926 - DNA, 25 bp, Homo sapien
ttatcgaagtgcttggcgtatgctt

SEQ ID NO: 1241927 - DNA, 25 bp, Homo sapien
taggatctaggagttggaggaccca

SEQ ID NO: 1241928 - DNA, 25 bp, Homo sapien
tgctttctatgctataaggcagtag

SEQ ID NO: 1241929 - DNA, 25 bp, Homo sapien
tctacaacataaatcagcttatccg

SEQ ID NO: 1241930 - DNA, 25 bp, Homo sapien
gcactgtacttttgctaaaacattg

SEQ ID NO: 1241931 - DNA, 25 bp, Homo sapien
gcttatccgtgcactgtacttttgc

SEQ ID NO: 1241932 - DNA, 25 bp, Homo sapien
cataaatcagcttatccgtgcactg

SEQ ID NO: 1241933 - DNA, 25 bp, Homo sapien
gggaaaatctccacattctccaacg

SEQ ID NO: 1241934 - DNA, 25 bp, Homo sapien
ccccggctgtttggtctgctcggct

SEQ ID NO: 1241935 - DNA, 25 bp, Homo sapien
tggtctgctcggctgttcttccccg

SEQ ID NO: 1241936 - DNA, 25 bp, Homo sapien
aggcggcaagcggagacgttccttt

SEQ ID NO: 1241937 - DNA, 25 bp, Homo sapien
taggtgatgaatcagcaccagcgcc

SEQ ID NO: 1241938 - DNA, 25 bp, Homo sapien
tcaacctgcggccagattccggagc

SEQ ID NO: 1241939 - DNA, 25 bp, Homo sapien
ggctgctgtgcgctcgctgcttcag

SEQ ID NO: 1241940 - DNA, 25 bp, Homo sapien
gagggtcccgcaccagcggcttcaa

SEQ ID NO: 1241941 - DNA, 25 bp, Homo sapien
ggatgaatggccggagctcgggaga

SEQ ID NO: 1241942 - DNA, 25 bp, Homo sapien
ctggggatgaatggccggagctcgg

SEQ ID NO: 1241943 - DNA, 25 bp, Homo sapien
ctctgcgctggggatgaatggccgg

SEQ ID NO: 1241944 - DNA, 25 bp, Homo sapien
cgctggggatgaatggccggagctc

SEQ ID NO: 1241945 - DNA, 25 bp, Homo sapien
caggcagacattgtgggaacagggc

SEQ ID NO: 1241946 - DNA, 25 bp, Homo sapien
ggcaggatgataggctcccgaaaca

SEQ ID NO: 1241947 - DNA, 25 bp, Homo sapien
cacacgggacacttcagctcttcct

SEQ ID NO: 1241948 - DNA, 25 bp, Homo sapien
tgcgagcgcaaggcaggcagacatt

SEQ ID NO: 1241949 - DNA, 25 bp, Homo sapien
ccagccgcagcgtcgtgctccagag

SEQ ID NO: 1241950 - DNA, 25 bp, Homo sapien
agccgcagcgtcgtgctccagagag

SEQ ID NO: 1241951 - DNA, 25 bp, Homo sapien
cagccgcagcgtcgtgctccagaga

SEQ ID NO: 1241952 - DNA, 25 bp, Homo sapien
ccgcagcgtcgtgctccagagaggc

SEQ ID NO: 1241953 - DNA, 25 bp, Homo sapien
tgtaggacccgtagccgctgtctgt

SEQ ID NO: 1241954 - DNA, 25 bp, Homo sapien
tccccgggatggatggcacttgagc

SEQ ID NO: 1241955 - DNA, 25 bp, Homo sapien
caagctgagcttgtccgcgtggtct

SEQ ID NO: 1241956 - DNA, 25 bp, Homo sapien
tgtctgtctcgctgtacaagctgag

SEQ ID NO: 1241957 - DNA, 25 bp, Homo sapien
gcggtgccagtgggcccggaggctg

SEQ ID NO: 1241958 - DNA, 25 bp, Homo sapien
ggtgccagtgggcccggaggctgcc

SEQ ID NO: 1241959 - DNA, 25 bp, Homo sapien
cggtgccagtgggcccggaggctgc

SEQ ID NO: 1241960 - DNA, 25 bp, Homo sapien
cgtgctgcccccagtcgcccccgcc

SEQ ID NO: 1241961 - DNA, 25 bp, Homo sapien
ttcacctcgtgcttggcgtgccggc

SEQ ID NO: 1241962 - DNA, 25 bp, Homo sapien
ggttcgacagctcacgcagtacatg

SEQ ID NO: 1241963 - DNA, 25 bp, Homo sapien
ctccaggcacagataacacaccggg

SEQ ID NO: 1241964 - DNA, 25 bp, Homo sapien
ccatttcatgctcgggacacgtggg

SEQ ID NO: 1241965 - DNA, 25 bp, Homo sapien
gctcctctctttctcgcagtatcag

SEQ ID NO: 1241966 - DNA, 25 bp, Homo sapien
tatcagatacaaggacacattgcca

SEQ ID NO: 1241967 - DNA, 25 bp, Homo sapien
tctcgcagtatcagatacaaggaca

SEQ ID NO: 1241968 - DNA, 25 bp, Homo sapien
aggacacattgccagccataagttg

SEQ ID NO: 1241969 - DNA, 25 bp, Homo sapien
acagtgtttgaccaaggctctccca

SEQ ID NO: 1241970 - DNA, 25 bp, Homo sapien
ccaacagtgggagtcttaatggagg

SEQ ID NO: 1241971 - DNA, 25 bp, Homo sapien
gaaatgttgctgtcccaattctagt

SEQ ID NO: 1241972 - DNA, 25 bp, Homo sapien
tacatactggtctagatgcccagcc

SEQ ID NO: 1241973 - DNA, 25 bp, Homo sapien
tcttttaaggctcttcgatttacca

SEQ ID NO: 1241974 - DNA, 25 bp, Homo sapien
tactcctggagtatcagtgagattt

SEQ ID NO: 1241975 - DNA, 25 bp, Homo sapien
tgctgactcagtgggaatagtactc

SEQ ID NO: 1241976 - DNA, 25 bp, Homo sapien
cttcgatttaccatggctctcaaag

SEQ ID NO: 1241977 - DNA, 25 bp, Homo sapien
tccagttgaatgagaggttgtgctc

SEQ ID NO: 1241978 - DNA, 25 bp, Homo sapien
cagttgaatgagaggttgtgctcca

SEQ ID NO: 1241979 - DNA, 25 bp, Homo sapien
cctgctgccccattccagttgaatg

SEQ ID NO: 1241980 - DNA, 25 bp, Homo sapien
attccagttgaatgagaggttgtgc

SEQ ID NO: 1241981 - DNA, 25 bp, Homo sapien
ttcttcctgggtaagatagagaaaa

SEQ ID NO: 1241982 - DNA, 25 bp, Homo sapien
gagcacagcaaagacctctagtagc

SEQ ID NO: 1241983 - DNA, 25 bp, Homo sapien
gagacacaggcccatagcattagac

SEQ ID NO: 1241984 - DNA, 25 bp, Homo sapien
agaaaaacaacctcccagagcacag

SEQ ID NO: 1241985 - DNA, 25 bp, Homo sapien
gttgagaggatgaaaagactccctt

SEQ ID NO: 1241986 - DNA, 25 bp, Homo sapien
ccatcttcaatgcaatagatttggc

SEQ ID NO: 1241987 - DNA, 25 bp, Homo sapien
catccagatatgacttagggtagaa

SEQ ID NO: 1241988 - DNA, 25 bp, Homo sapien
cagatatgacttagggtagaacagt

SEQ ID NO: 1241989 - DNA, 25 bp, Homo sapien
gagcatccagatatgacttagggta

SEQ ID NO: 1241990 - DNA, 25 bp, Homo sapien
tcagtgagggccaaatgaccttcaa

SEQ ID NO: 1241991 - DNA, 25 bp, Homo sapien
tcttcctctgacaaggcagtcagtg

SEQ ID NO: 1241992 - DNA, 25 bp, Homo sapien
tgggaaatccatgcctccccttgga

SEQ ID NO: 1241993 - DNA, 25 bp, Homo sapien
gaccttcaaaagctcacgtgtgcag

SEQ ID NO: 1241994 - DNA, 25 bp, Homo sapien
tcaatgcacgccacattggggcctg

SEQ ID NO: 1241995 - DNA, 25 bp, Homo sapien
tgcacgccacattggggcctgccat

SEQ ID NO: 1241996 - DNA, 25 bp, Homo sapien
ctcaatgcacgccacattggggcct

SEQ ID NO: 1241997 - DNA, 25 bp, Homo sapien
aatgcacgccacattggggcctgcc

SEQ ID NO: 1241998 - DNA, 25 bp, Homo sapien
cttcctgcttggcaagaagaccaag

SEQ ID NO: 1241999 - DNA, 25 bp, Homo sapien
cccgtgaccgcaggctaatgcctgg

SEQ ID NO: 1242000 - DNA, 25 bp, Homo sapien
caaaaacagagtggttttgaaggag

SEQ ID NO: 1242001 - DNA, 25 bp, Homo sapien
gttttgaaggagacccgtgaccgca

SEQ ID NO: 1242002 - DNA, 25 bp, Homo sapien
ggccaggacggctctgtcccagcca

SEQ ID NO: 1242003 - DNA, 25 bp, Homo sapien
cagccagcgccagccttccaggagc

SEQ ID NO: 1242004 - DNA, 25 bp, Homo sapien
gggccaggacggctctgtcccagcc

SEQ ID NO: 1242005 - DNA, 25 bp, Homo sapien
ctggatctgctgcaatatgttcttt

SEQ ID NO: 1242006 - DNA, 25 bp, Homo sapien
tgaaccagaaactcctttgcttcct

SEQ ID NO: 1242007 - DNA, 25 bp, Homo sapien
tctgacgagttaaagcatccacaag

SEQ ID NO: 1242008 - DNA, 25 bp, Homo sapien
gcttggctttctgacgagttaaagc

SEQ ID NO: 1242009 - DNA, 25 bp, Homo sapien
ggcatcacactgagcaacgaggcag

SEQ ID NO: 1242010 - DNA, 25 bp, Homo sapien
gcaggcttcgtagtccagtccgttt

SEQ ID NO: 1242011 - DNA, 25 bp, Homo sapien
gcagtactccatcagtccggtggac

SEQ ID NO: 1242012 - DNA, 25 bp, Homo sapien
tcagtccggtggactgacgcagctt

SEQ ID NO: 1242013 - DNA, 25 bp, Homo sapien
cagtgattgatctggtcccaaacca

SEQ ID NO: 1242014 - DNA, 25 bp, Homo sapien
cgcagcttcaatgtgcagtgattga

SEQ ID NO: 1242015 - DNA, 25 bp, Homo sapien
cacctggacgcgcttgatcagagca

SEQ ID NO: 1242016 - DNA, 25 bp, Homo sapien
gcggctcgctgtccaaagtcagatc

SEQ ID NO: 1242017 - DNA, 25 bp, Homo sapien
gatcaaactccgcagacactttcgg

SEQ ID NO: 1242018 - DNA, 25 bp, Homo sapien
agacactttcggctccagggcgcct

SEQ ID NO: 1242019 - DNA, 25 bp, Homo sapien
tcagttaacgagctggtaggagtcc

SEQ ID NO: 1242020 - DNA, 25 bp, Homo sapien
tggcaatgtgagagagacttccttc

SEQ ID NO: 1242021 - DNA, 25 bp, Homo sapien
agcagcatctggagtggccctaagc

SEQ ID NO: 1242022 - DNA, 25 bp, Homo sapien
cacaaattatgcaggtaaggacttc

SEQ ID NO: 1242023 - DNA, 25 bp, Homo sapien
tgacgctgttgttacgggtgcagca

SEQ ID NO: 1242024 - DNA, 25 bp, Homo sapien
cagcgtgacgctgttgttacgggtg

SEQ ID NO: 1242025 - DNA, 25 bp, Homo sapien
gttgttacgggtgcagcatttctcc

SEQ ID NO: 1242026 - DNA, 25 bp, Homo sapien
tccagctgcagtagggggacgggtg

SEQ ID NO: 1242027 - DNA, 25 bp, Homo sapien
gaaagagagcaatgctgctcaccag

SEQ ID NO: 1242028 - DNA, 25 bp, Homo sapien
agagagcaatgctgctcaccaggct

SEQ ID NO: 1242029 - DNA, 25 bp, Homo sapien
aagagagcaatgctgctcaccaggc

SEQ ID NO: 1242030 - DNA, 25 bp, Homo sapien
ctgaaagagagcaatgctgctcacc

SEQ ID NO: 1242031 - DNA, 25 bp, Homo sapien
tgtaaggcccgacaccagaagagtt

SEQ ID NO: 1242032 - DNA, 25 bp, Homo sapien
catcggatgtctgcaggacgacagt

SEQ ID NO: 1242033 - DNA, 25 bp, Homo sapien
gaaagctttgactcgggcgttgtag

SEQ ID NO: 1242034 - DNA, 25 bp, Homo sapien
gaagaccgtcgatggtacacaaagt

SEQ ID NO: 1242035 - DNA, 25 bp, Homo sapien
ttgtcgtaccggtccacgtgcagct

SEQ ID NO: 1242036 - DNA, 25 bp, Homo sapien
ataaaatgatgtcccgatgcccaga

SEQ ID NO: 1242037 - DNA, 25 bp, Homo sapien
tgcagtgcatgaaccagctgcggtt

SEQ ID NO: 1242038 - DNA, 25 bp, Homo sapien
acccggtcgtcatagctgctgcagg

SEQ ID NO: 1242039 - DNA, 25 bp, Homo sapien
ccacgggaggcaggatggggcccaa

SEQ ID NO: 1242040 - DNA, 25 bp, Homo sapien
cgggaggcaggatggggcccaatcg

SEQ ID NO: 1242041 - DNA, 25 bp, Homo sapien
gaggcaggatggggcccaatcgcac

SEQ ID NO: 1242042 - DNA, 25 bp, Homo sapien
ctgtgtccacgggaggcaggatggg

SEQ ID NO: 1242043 - DNA, 25 bp, Homo sapien
tgatgctatttggacaccgaccacc

SEQ ID NO: 1242044 - DNA, 25 bp, Homo sapien
gaatgagtccaacctaagcaaagcc

SEQ ID NO: 1242045 - DNA, 25 bp, Homo sapien
tacccgatccacatccgagggtggg

SEQ ID NO: 1242046 - DNA, 25 bp, Homo sapien
tcggcttcctcccagatagcgctta

SEQ ID NO: 1242047 - DNA, 25 bp, Homo sapien
cgcccttttctgttttaggcaagtg

SEQ ID NO: 1242048 - DNA, 25 bp, Homo sapien
ttttctgttttaggcaagtgaggat

SEQ ID NO: 1242049 - DNA, 25 bp, Homo sapien
cccttttctgttttaggcaagtgag

SEQ ID NO: 1242050 - DNA, 25 bp, Homo sapien
ttggcgcccttttctgttttaggca

SEQ ID NO: 1242051 - DNA, 25 bp, Homo sapien
tgctgcccgttgatgaagaaggtga

SEQ ID NO: 1242052 - DNA, 25 bp, Homo sapien
tgcttattcaggtccagcagcacgc

SEQ ID NO: 1242053 - DNA, 25 bp, Homo sapien
ccccttgcacacgccaccttccgtc

SEQ ID NO: 1242054 - DNA, 25 bp, Homo sapien
aagaaggtgagagtgtgcttattca

SEQ ID NO: 1242055 - DNA, 25 bp, Homo sapien
cacgttgcggttgaggctgagggct

SEQ ID NO: 1242056 - DNA, 25 bp, Homo sapien
tgcacgttgcggttgaggctgaggg

SEQ ID NO: 1242057 - DNA, 25 bp, Homo sapien
gcacgttgcggttgaggctgagggc

SEQ ID NO: 1242058 - DNA, 25 bp, Homo sapien
caggttagaacggaacgcctccagg

SEQ ID NO: 1242059 - DNA, 25 bp, Homo sapien
tgggtgtcccaagtgaacaggttag

SEQ ID NO: 1242060 - DNA, 25 bp, Homo sapien
agttgataagctctgtctgggaagg

SEQ ID NO: 1242061 - DNA, 25 bp, Homo sapien
aggcaggccagttgataagctctgt

SEQ ID NO: 1242062 - DNA, 25 bp, Homo sapien
gccccaggttagtcggcacttccaa

SEQ ID NO: 1242063 - DNA, 25 bp, Homo sapien
ttagtcggcacttccaatcctgtgt

SEQ ID NO: 1242064 - DNA, 25 bp, Homo sapien
tttggccgccccaggttagtcggca

SEQ ID NO: 1242065 - DNA, 25 bp, Homo sapien
acagctttggccgccccaggttagt

SEQ ID NO: 1242066 - DNA, 25 bp, Homo sapien
gatctcaagggagaagcctggtgtt

SEQ ID NO: 1242067 - DNA, 25 bp, Homo sapien
ctctgagaggtgtggatgaatcaat

SEQ ID NO: 1242068 - DNA, 25 bp, Homo sapien
tagggtggactgactagaacaggct

SEQ ID NO: 1242069 - DNA, 25 bp, Homo sapien
gagacaaggtacctgatactgccct

SEQ ID NO: 1242070 - DNA, 25 bp, Homo sapien
ctttgatcttctgggaggaactgcc

SEQ ID NO: 1242071 - DNA, 25 bp, Homo sapien
cacctagggcgctgttgcaactaca

SEQ ID NO: 1242072 - DNA, 25 bp, Homo sapien
aaggctggcagctttgtcacataca

SEQ ID NO: 1242073 - DNA, 25 bp, Homo sapien
caggagatacctagcaatgtcgaca

SEQ ID NO: 1242074 - DNA, 25 bp, Homo sapien
tgtcgacggtcaaaacaaggacgcg

SEQ ID NO: 1242075 - DNA, 25 bp, Homo sapien
cacagaaaggataagagattggccc

SEQ ID NO: 1242076 - DNA, 25 bp, Homo sapien
tacaacagcttagtgccaacgcagc

SEQ ID NO: 1242077 - DNA, 25 bp, Homo sapien
gatgagagaccccttagataccaga

SEQ ID NO: 1242078 - DNA, 25 bp, Homo sapien
tgtatgttagtgtccagtgtttgcc

SEQ ID NO: 1242079 - DNA, 25 bp, Homo sapien
caaagatcgttagcgcattctgcag

SEQ ID NO: 1242080 - DNA, 25 bp, Homo sapien
tacccactacgaagatggtttggct

SEQ ID NO: 1242081 - DNA, 25 bp, Homo sapien
caggttctgaagaggagtaggacat

SEQ ID NO: 1242082 - DNA, 25 bp, Homo sapien
tccagtagcgaacacatttctccat

SEQ ID NO: 1242083 - DNA, 25 bp, Homo sapien
gttccagtagcgaacacatttctcc

SEQ ID NO: 1242084 - DNA, 25 bp, Homo sapien
ctggttccagtagcgaacacatttc

SEQ ID NO: 1242085 - DNA, 25 bp, Homo sapien
ggttccagtagcgaacacatttctc

SEQ ID NO: 1242086 - DNA, 25 bp, Homo sapien
aacctttacgactttggtgagtgcg

SEQ ID NO: 1242087 - DNA, 25 bp, Homo sapien
taaaggttcttgcatgtcaagcacc

SEQ ID NO: 1242088 - DNA, 25 bp, Homo sapien
gagcccacgtggagaacagatttga

SEQ ID NO: 1242089 - DNA, 25 bp, Homo sapien
cctgtgttgcccgtcctgggttggc

SEQ ID NO: 1242090 - DNA, 25 bp, Homo sapien
gcggttctttcgctcaggacggccc

SEQ ID NO: 1242091 - DNA, 25 bp, Homo sapien
tttcgctcaggacggccctacttcg

SEQ ID NO: 1242092 - DNA, 25 bp, Homo sapien
caggacggccctacttcgcctaggg

SEQ ID NO: 1242093 - DNA, 25 bp, Homo sapien
ctgctgggggcggttctttcgctca

SEQ ID NO: 1242094 - DNA, 25 bp, Homo sapien
gaggagcacgacagcgctgggactg

SEQ ID NO: 1242095 - DNA, 25 bp, Homo sapien
gaaataagagttagatgaactggaa

SEQ ID NO: 1242096 - DNA, 25 bp, Homo sapien
tggttgggccaacggagaaataaga

SEQ ID NO: 1242097 - DNA, 25 bp, Homo sapien
gagtagaggagcacgacagcgctgg

SEQ ID NO: 1242098 - DNA, 25 bp, Homo sapien
tcattcctcattctcgtgtccagga

SEQ ID NO: 1242099 - DNA, 25 bp, Homo sapien
ccgaatccagtggttttaaactcag

SEQ ID NO: 1242100 - DNA, 25 bp, Homo sapien
aacgcgcccggccgaatccagtggt

SEQ ID NO: 1242101 - DNA, 25 bp, Homo sapien
gtggttttaaactcaggctgcacat

SEQ ID NO: 1242102 - DNA, 25 bp, Homo sapien
cgcgcccggccgaatccagtggttt

SEQ ID NO: 1242103 - DNA, 25 bp, Homo sapien
tgtcttagcatatgaccccaggctc

SEQ ID NO: 1242104 - DNA, 25 bp, Homo sapien
atcaagtccacctgtcttagcatat

SEQ ID NO: 1242105 - DNA, 25 bp, Homo sapien
cttagcatatgaccccaggctcttc

SEQ ID NO: 1242106 - DNA, 25 bp, Homo sapien
tcaagtccacctgtcttagcatatg

SEQ ID NO: 1242107 - DNA, 25 bp, Homo sapien
ccactcctgagagggcaaatccaac

SEQ ID NO: 1242108 - DNA, 25 bp, Homo sapien
tgacgatccactcccacttgatgaa

SEQ ID NO: 1242109 - DNA, 25 bp, Homo sapien
tcagcctactcgatgtgaagtgatg

SEQ ID NO: 1242110 - DNA, 25 bp, Homo sapien
cacgcctggcctatatgaggatttt

SEQ ID NO: 1242111 - DNA, 25 bp, Homo sapien
tctcatgtaaagttgcaacccttgt

SEQ ID NO: 1242112 - DNA, 25 bp, Homo sapien
agtttgcgctctatagactgcagcc

SEQ ID NO: 1242113 - DNA, 25 bp, Homo sapien
taaatactcttgcttataaggctgg

SEQ ID NO: 1242114 - DNA, 25 bp, Homo sapien
tgttaactgagaccacaatttggca

SEQ ID NO: 1242115 - DNA, 25 bp, Homo sapien
taaggcaagaaagtaatgagcacat

SEQ ID NO: 1242116 - DNA, 25 bp, Homo sapien
tggataaggcaagaaagtaatgagc

SEQ ID NO: 1242117 - DNA, 25 bp, Homo sapien
gataaggcaagaaagtaatgagcac

SEQ ID NO: 1242118 - DNA, 25 bp, Homo sapien
ctgtggataaggcaagaaagtaatg

SEQ ID NO: 1242119 - DNA, 25 bp, Homo sapien
tacatggagtaattcccttatagac

SEQ ID NO: 1242120 - DNA, 25 bp, Homo sapien
taatgacataatgaatctcctcaga

SEQ ID NO: 1242121 - DNA, 25 bp, Homo sapien
taatatcaattggtttacatggagt

SEQ ID NO: 1242122 - DNA, 25 bp, Homo sapien
tctcctcagaattgagaacactaca

SEQ ID NO: 1242123 - DNA, 25 bp, Homo sapien
tcactcacttcctctcggaggacat

SEQ ID NO: 1242124 - DNA, 25 bp, Homo sapien
taaatactttgctcagggtgaaggc

SEQ ID NO: 1242125 - DNA, 25 bp, Homo sapien
ggtgaaggcacaaaaccgaatggct

SEQ ID NO: 1242126 - DNA, 25 bp, Homo sapien
ccacagattgaagggattccttgga

SEQ ID NO: 1242127 - DNA, 25 bp, Homo sapien
agatgagacttttatttctttattt

SEQ ID NO: 1242128 - DNA, 25 bp, Homo sapien
tatttttttaataatcaatactcac

SEQ ID NO: 1242129 - DNA, 25 bp, Homo sapien
aagatgagacttttatttctttatt

SEQ ID NO: 1242130 - DNA, 25 bp, Homo sapien
gactaggcagcagaacaacaggatg

SEQ ID NO: 1242131 - DNA, 25 bp, Homo sapien
gaaaagacaacatgaggaagtcaat

SEQ ID NO: 1242132 - DNA, 25 bp, Homo sapien
caatgtaacttcgatgactaggcag

SEQ ID NO: 1242133 - DNA, 25 bp, Homo sapien
tgaggaagtcaatgtaacttcgatg

SEQ ID NO: 1242134 - DNA, 25 bp, Homo sapien
cacttttaggaatcgatcttacagg

SEQ ID NO: 1242135 - DNA, 25 bp, Homo sapien
tgcctaccaggaaaaaacatcaacc

SEQ ID NO: 1242136 - DNA, 25 bp, Homo sapien
ctgacaacagaccaatatgtgccct

SEQ ID NO: 1242137 - DNA, 25 bp, Homo sapien
gataccaaaagcacagggaaccagg

SEQ ID NO: 1242138 - DNA, 25 bp, Homo sapien
catgcaccactccctttacaagtag

SEQ ID NO: 1242139 - DNA, 25 bp, Homo sapien
gcaccactccctttacaagtaggcc

SEQ ID NO: 1242140 - DNA, 25 bp, Homo sapien
accactccctttacaagtaggccag

SEQ ID NO: 1242141 - DNA, 25 bp, Homo sapien
tgcaccactccctttacaagtaggc

SEQ ID NO: 1242142 - DNA, 25 bp, Homo sapien
tttattgccaccaaaggtacgccgc

SEQ ID NO: 1242143 - DNA, 25 bp, Homo sapien
gacattcgtagcagctcaccaacca

SEQ ID NO: 1242144 - DNA, 25 bp, Homo sapien
tacgccgcatgaaaaaggcacccga

SEQ ID NO: 1242145 - DNA, 25 bp, Homo sapien
tacagcccagtagagtttattgcca

SEQ ID NO: 1242146 - DNA, 25 bp, Homo sapien
aacccattgcctactctcaaaatga

SEQ ID NO: 1242147 - DNA, 25 bp, Homo sapien
acaaaacccattgcctactctcaaa

SEQ ID NO: 1242148 - DNA, 25 bp, Homo sapien
aaacacaaaacccattgcctactct

SEQ ID NO: 1242149 - DNA, 25 bp, Homo sapien
cccattgcctactctcaaaatgata

SEQ ID NO: 1242150 - DNA, 25 bp, Homo sapien
tcttgtcccttcgaggaaaaattca

SEQ ID NO: 1242151 - DNA, 25 bp, Homo sapien
aaatttaggagtcaatgtcttggca

SEQ ID NO: 1242152 - DNA, 25 bp, Homo sapien
caaatttaggagtcaatgtcttggc

SEQ ID NO: 1242153 - DNA, 25 bp, Homo sapien
aatttaggagtcaatgtcttggcag

SEQ ID NO: 1242154 - DNA, 25 bp, Homo sapien
cataactgatactaattgggacaag

SEQ ID NO: 1242155 - DNA, 25 bp, Homo sapien
cttccaagatcttatcataactgat

SEQ ID NO: 1242156 - DNA, 25 bp, Homo sapien
tagaagctcatacacataaagagtt

SEQ ID NO: 1242157 - DNA, 25 bp, Homo sapien
gtttaggaacccctagaagctcata

SEQ ID NO: 1242158 - DNA, 25 bp, Homo sapien
tctcaattaagctaaaatcaagctc

SEQ ID NO: 1242159 - DNA, 25 bp, Homo sapien
ctctcaattaagctaaaatcaagct

SEQ ID NO: 1242160 - DNA, 25 bp, Homo sapien
tctctcaattaagctaaaatcaagc

SEQ ID NO: 1242161 - DNA, 25 bp, Homo sapien
cagctgccaaagatcgaagtgacac

SEQ ID NO: 1242162 - DNA, 25 bp, Homo sapien
tcgaagtgacacaggatctccaaag

SEQ ID NO: 1242163 - DNA, 25 bp, Homo sapien
cttggaaccaagttatatgagctcc

SEQ ID NO: 1242164 - DNA, 25 bp, Homo sapien
aaagtacacatggatgcttccaaaa

SEQ ID NO: 1242165 - DNA, 25 bp, Homo sapien
ctaaaaggaagagcacagagcaaca

SEQ ID NO: 1242166 - DNA, 25 bp, Homo sapien
taaaaggaagagcacagagcaacaa

SEQ ID NO: 1242167 - DNA, 25 bp, Homo sapien
ccattttgtaggcaacttcagtgac

SEQ ID NO: 1242168 - DNA, 25 bp, Homo sapien
cttcagtgacaaaggcatgcatgtc

SEQ ID NO: 1242169 - DNA, 25 bp, Homo sapien
catggatggccggttctgaagcaga

SEQ ID NO: 1242170 - DNA, 25 bp, Homo sapien
tgaagcagaacagcaactattaggg

SEQ ID NO: 1242171 - DNA, 25 bp, Homo sapien
taactcttccaaattaagcaagcat

SEQ ID NO: 1242172 - DNA, 25 bp, Homo sapien
ttaagcaagcattctcaacacatat

SEQ ID NO: 1242173 - DNA, 25 bp, Homo sapien
gagcaatcctttgctcaagtcctct

SEQ ID NO: 1242174 - DNA, 25 bp, Homo sapien
tctatagatttttcaggtccaggtt

SEQ ID NO: 1242175 - DNA, 25 bp, Homo sapien
ggaaatggtattctagtcctcaaga

SEQ ID NO: 1242176 - DNA, 25 bp, Homo sapien
caacgtgctgtgttcactgtgtcct

SEQ ID NO: 1242177 - DNA, 25 bp, Homo sapien
accgtactaggtgccaaggaaatgg

SEQ ID NO: 1242178 - DNA, 25 bp, Homo sapien
cagagtctcgtagtgggaaatgaca

SEQ ID NO: 1242179 - DNA, 25 bp, Homo sapien
ggtagtacccagcacagaggaggta

SEQ ID NO: 1242180 - DNA, 25 bp, Homo sapien
tcttcctgaagggttcaaaagtcgc

SEQ ID NO: 1242181 - DNA, 25 bp, Homo sapien
tcatccctgccttggcgaggatcct

SEQ ID NO: 1242182 - DNA, 25 bp, Homo sapien
caaagaacagtaggtacttgacttc

SEQ ID NO: 1242183 - DNA, 25 bp, Homo sapien
gaacagaactgtagtgacactgaac

SEQ ID NO: 1242184 - DNA, 25 bp, Homo sapien
tggattagttatggcatttatccca

SEQ ID NO: 1242185 - DNA, 25 bp, Homo sapien
gatactcttagttatggattagtta

SEQ ID NO: 1242186 - DNA, 25 bp, Homo sapien
cctgggccaaacaatgatgggtttg

SEQ ID NO: 1242187 - DNA, 25 bp, Homo sapien
tatcacctgacatattggcctgcag

SEQ ID NO: 1242188 - DNA, 25 bp, Homo sapien
cactgcagggagtcttaggcctagc

SEQ ID NO: 1242189 - DNA, 25 bp, Homo sapien
cacactgctcaagttgggtggcaag

SEQ ID NO: 1242190 - DNA, 25 bp, Homo sapien
ttcaaacaagatgggtcactgcagg

SEQ ID NO: 1242191 - DNA, 25 bp, Homo sapien
gatgtgctggagcataagcccatcg

SEQ ID NO: 1242192 - DNA, 25 bp, Homo sapien
cagaatcacctggtctttgacaagg

SEQ ID NO: 1242193 - DNA, 25 bp, Homo sapien
gagtctccggagtccactttcagaa

SEQ ID NO: 1242194 - DNA, 25 bp, Homo sapien
tgctactgctactaaggatgggcgc

SEQ ID NO: 1242195 - DNA, 25 bp, Homo sapien
tctgcaaaaacatcacgtaggaagc

SEQ ID NO: 1242196 - DNA, 25 bp, Homo sapien
cacgtaggaagcgaaagcaactgta

SEQ ID NO: 1242197 - DNA, 25 bp, Homo sapien
ggaagcgaaagcaactgtagacatc

SEQ ID NO: 1242198 - DNA, 25 bp, Homo sapien
aaacatcacgtaggaagcgaaagca

SEQ ID NO: 1242199 - DNA, 25 bp, Homo sapien
taggatgtctttcgtagtcacttgt

SEQ ID NO: 1242200 - DNA, 25 bp, Homo sapien
tgtctttcgtagtcacttgtatggc

SEQ ID NO: 1242201 - DNA, 25 bp, Homo sapien
gtaactaggatgtctttcgtagtca

SEQ ID NO: 1242202 - DNA, 25 bp, Homo sapien
tagtcacttgtatggcttcactttt

SEQ ID NO: 1242203 - DNA, 25 bp, Homo sapien
cctcgaggttacatattgactgaca

SEQ ID NO: 1242204 - DNA, 25 bp, Homo sapien
gttgagtcctgccacaattcctgct

SEQ ID NO: 1242205 - DNA, 25 bp, Homo sapien
cctgtgaatactgtgaccatggcat

SEQ ID NO: 1242206 - DNA, 25 bp, Homo sapien
tcaagtcttgcctttactgagtgcc

SEQ ID NO: 1242207 - DNA, 25 bp, Homo sapien
tacattgcccctcttaagagaagga

SEQ ID NO: 1242208 - DNA, 25 bp, Homo sapien
tcttatgctacttgggaagagaggg

SEQ ID NO: 1242209 - DNA, 25 bp, Homo sapien
taagtgctagactttgtgcaaggag

SEQ ID NO: 1242210 - DNA, 25 bp, Homo sapien
gagaaaaaggatagccaagttcaac

SEQ ID NO: 1242211 - DNA, 25 bp, Homo sapien
tgcagccaagtactgttcctcactg

SEQ ID NO: 1242212 - DNA, 25 bp, Homo sapien
caagtactgttcctcactgaagtgg

SEQ ID NO: 1242213 - DNA, 25 bp, Homo sapien
gttcctcactgaagtggtcctcttc

SEQ ID NO: 1242214 - DNA, 25 bp, Homo sapien
tactgttcctcactgaagtggtcct

SEQ ID NO: 1242215 - DNA, 25 bp, Homo sapien
gataatacatcataacattgagagg

SEQ ID NO: 1242216 - DNA, 25 bp, Homo sapien
agataatacatcataacattgagag

SEQ ID NO: 1242217 - DNA, 25 bp, Homo sapien
ctgcacatcagaagataatacatca

SEQ ID NO: 1242218 - DNA, 25 bp, Homo sapien
aatacatcataacattgagaggtac

SEQ ID NO: 1242219 - DNA, 25 bp, Homo sapien
tccactactccgagcctcacacagg

SEQ ID NO: 1242220 - DNA, 25 bp, Homo sapien
ttcttctccactactccgagcctca

SEQ ID NO: 1242221 - DNA, 25 bp, Homo sapien
ttctccactactccgagcctcacac

SEQ ID NO: 1242222 - DNA, 25 bp, Homo sapien
tcacacaggctgctaaggcgttttt

SEQ ID NO: 1242223 - DNA, 25 bp, Homo sapien
ccttgagcactcatgggatcttgta

SEQ ID NO: 1242224 - DNA, 25 bp, Homo sapien
gttccttgagcactcatgggatctt

SEQ ID NO: 1242225 - DNA, 25 bp, Homo sapien
gagcactcatgggatcttgtacagt

SEQ ID NO: 1242226 - DNA, 25 bp, Homo sapien
tcatgggatcttgtacagtacttac

SEQ ID NO: 1242227 - DNA, 25 bp, Homo sapien
tctaatttggttgtggcaggttcat

SEQ ID NO: 1242228 - DNA, 25 bp, Homo sapien
ctaatttggttgtggcaggttcatt

SEQ ID NO: 1242229 - DNA, 25 bp, Homo sapien
atttggttgtggcaggttcattcac

SEQ ID NO: 1242230 - DNA, 25 bp, Homo sapien
taatttggttgtggcaggttcattc

SEQ ID NO: 1242231 - DNA, 25 bp, Homo sapien
actatttcttcatagctgataggct

SEQ ID NO: 1242232 - DNA, 25 bp, Homo sapien
gactatttcttcatagctgataggc

SEQ ID NO: 1242233 - DNA, 25 bp, Homo sapien
ctagactatttcttcatagctgata

SEQ ID NO: 1242234 - DNA, 25 bp, Homo sapien
agactatttcttcatagctgatagg

SEQ ID NO: 1242235 - DNA, 25 bp, Homo sapien
tgaaatgatgctgattttgcccttc

SEQ ID NO: 1242236 - DNA, 25 bp, Homo sapien
ttcctcatacagctgttccttgggc

SEQ ID NO: 1242237 - DNA, 25 bp, Homo sapien
cctccacaagggaagcggtagatgc

SEQ ID NO: 1242238 - DNA, 25 bp, Homo sapien
ccaagaggtgacagcatggccagag

SEQ ID NO: 1242239 - DNA, 25 bp, Homo sapien
tttgcagtggctggttttcctattg

SEQ ID NO: 1242240 - DNA, 25 bp, Homo sapien
agtggctggttttcctattggtgtc

SEQ ID NO: 1242241 - DNA, 25 bp, Homo sapien
ctggttttcctattggtgtcttaca

SEQ ID NO: 1242242 - DNA, 25 bp, Homo sapien
gcagtggctggttttcctattggtg

SEQ ID NO: 1242243 - DNA, 25 bp, Homo sapien
cttccctgtttgttgtaatgagtcc

SEQ ID NO: 1242244 - DNA, 25 bp, Homo sapien
cgatgagagtaattacgtgaccgaa

SEQ ID NO: 1242245 - DNA, 25 bp, Homo sapien
gagtatgagaggatgtgtctcttcc

SEQ ID NO: 1242246 - DNA, 25 bp, Homo sapien
aagagtaaactgattgcttccaatg

SEQ ID NO: 1242247 - DNA, 25 bp, Homo sapien
acacacatagtgtcagatacaaacg

SEQ ID NO: 1242248 - DNA, 25 bp, Homo sapien
cacacatagtgtcagatacaaacgc

SEQ ID NO: 1242249 - DNA, 25 bp, Homo sapien
atactttaattcaaaagtcaacata

SEQ ID NO: 1242250 - DNA, 25 bp, Homo sapien
taatacatatagtaagctgaaaagt

SEQ ID NO: 1242251 - DNA, 25 bp, Homo sapien
tactttaattcaaaagtcaacataa

SEQ ID NO: 1242252 - DNA, 25 bp, Homo sapien
aattaaagcaagctacaagtaacgt

SEQ ID NO: 1242253 - DNA, 25 bp, Homo sapien
aagcaagctacaagtaacgtagata

SEQ ID NO: 1242254 - DNA, 25 bp, Homo sapien
taaagcaagctacaagtaacgtaga

SEQ ID NO: 1242255 - DNA, 25 bp, Homo sapien
ttaattaaagcaagctacaagtaac

SEQ ID NO: 1242256 - DNA, 25 bp, Homo sapien
tcccaaagaaatcgagaaccagccc

SEQ ID NO: 1242257 - DNA, 25 bp, Homo sapien
tctccgatctcaatgtgcagcagaa

SEQ ID NO: 1242258 - DNA, 25 bp, Homo sapien
aactgactcttcaactcgctcttgg

SEQ ID NO: 1242259 - DNA, 25 bp, Homo sapien
tcaccaatgcatggagaagatggct

SEQ ID NO: 1242260 - DNA, 25 bp, Homo sapien
gctgacacaccctagactgctgaag

SEQ ID NO: 1242261 - DNA, 25 bp, Homo sapien
cctccaggaggctttagcggcagtt

SEQ ID NO: 1242262 - DNA, 25 bp, Homo sapien
tattagaatatatatggcccgggca

SEQ ID NO: 1242263 - DNA, 25 bp, Homo sapien
tattgagacacaactttgaaaggca

SEQ ID NO: 1242264 - DNA, 25 bp, Homo sapien
gggacaactgtatacactgttacag

SEQ ID NO: 1242265 - DNA, 25 bp, Homo sapien
tccacagtacccacgcttgcaatgt

SEQ ID NO: 1242266 - DNA, 25 bp, Homo sapien
ttggaaggatctcccaaggatactg

SEQ ID NO: 1242267 - DNA, 25 bp, Homo sapien
acctcctgctaggtgggaacctctg

SEQ ID NO: 1242268 - DNA, 25 bp, Homo sapien
taggccaggacattagtaatatgtg

SEQ ID NO: 1242269 - DNA, 25 bp, Homo sapien
caggtggtaaaaaacaagatgatag

SEQ ID NO: 1242270 - DNA, 25 bp, Homo sapien
tatgtgaggccacgaggttgatgaa

SEQ ID NO: 1242271 - DNA, 25 bp, Homo sapien
gccaataattgaaagccaggtggta

SEQ ID NO: 1242272 - DNA, 25 bp, Homo sapien
tgagcatgtgcctctacgtgtgtaa

SEQ ID NO: 1242273 - DNA, 25 bp, Homo sapien
tcttccagatctgagccgcctttgg

SEQ ID NO: 1242274 - DNA, 25 bp, Homo sapien
cacctaatgtgtcataagatgggct

SEQ ID NO: 1242275 - DNA, 25 bp, Homo sapien
tttcctgtaatctgcactggccacg

SEQ ID NO: 1242276 - DNA, 25 bp, Homo sapien
ttatccagtcaatcccaaagtaaaa

SEQ ID NO: 1242277 - DNA, 25 bp, Homo sapien
taatcagttaatagatgggggaaaa

SEQ ID NO: 1242278 - DNA, 25 bp, Homo sapien
aaaaattatccagtcaatcccaaag

SEQ ID NO: 1242279 - DNA, 25 bp, Homo sapien
aattatccagtcaatcccaaagtaa

SEQ ID NO: 1242280 - DNA, 25 bp, Homo sapien
gaaaagggccaaagacacgacttga

SEQ ID NO: 1242281 - DNA, 25 bp, Homo sapien
taccagtgggatgcccctagaaggt

SEQ ID NO: 1242282 - DNA, 25 bp, Homo sapien
ggctgtatacatgctcccttgaggc

SEQ ID NO: 1242283 - DNA, 25 bp, Homo sapien
gagagatcaagagcaccgtctgacc

SEQ ID NO: 1242284 - DNA, 25 bp, Homo sapien
ctccagatcttaccctatgcatgct

SEQ ID NO: 1242285 - DNA, 25 bp, Homo sapien
catgctccacttgattgttcctgag

SEQ ID NO: 1242286 - DNA, 25 bp, Homo sapien
caccccctccagatcttaccctatg

SEQ ID NO: 1242287 - DNA, 25 bp, Homo sapien
gcatgctccacttgattgttcctga

SEQ ID NO: 1242288 - DNA, 25 bp, Homo sapien
tgcaattctagagttccagcccttg

SEQ ID NO: 1242289 - DNA, 25 bp, Homo sapien
gagaccctgagctatatcaaaggaa

SEQ ID NO: 1242290 - DNA, 25 bp, Homo sapien
gaaagtttaaatgcagctcctcagt

SEQ ID NO: 1242291 - DNA, 25 bp, Homo sapien
cagcccttgctatgtggtgttaagc

SEQ ID NO: 1242292 - DNA, 25 bp, Homo sapien
tagtgacagtgagtgcgtgagaccc

SEQ ID NO: 1242293 - DNA, 25 bp, Homo sapien
taccggcagttcatagagacggccc

SEQ ID NO: 1242294 - DNA, 25 bp, Homo sapien
cctacctggagagcgagatgtacca

SEQ ID NO: 1242295 - DNA, 25 bp, Homo sapien
ttgagaacgagaacggagcttaccc

SEQ ID NO: 1242296 - DNA, 25 bp, Homo sapien
gacgcgtccactagcgacagggact

SEQ ID NO: 1242297 - DNA, 25 bp, Homo sapien
ctggccccagaagaattggtcgtta

SEQ ID NO: 1242298 - DNA, 25 bp, Homo sapien
tgaagccgcagtgccaacatcaagt

SEQ ID NO: 1242299 - DNA, 25 bp, Homo sapien
aacagtgcctgcaagtccggtgtgg

SEQ ID NO: 1242300 - DNA, 25 bp, Homo sapien
gggtcattcgcacgctccacttcac

SEQ ID NO: 1242301 - DNA, 25 bp, Homo sapien
agggtcattcgcacgctccacttca

SEQ ID NO: 1242302 - DNA, 25 bp, Homo sapien
cgatgcggaccacatggcccaactg

SEQ ID NO: 1242303 - DNA, 25 bp, Homo sapien
atacgatgcggaccacatggcccaa

SEQ ID NO: 1242304 - DNA, 25 bp, Homo sapien
aatacgatgcggaccacatggccca

SEQ ID NO: 1242305 - DNA, 25 bp, Homo sapien
acgatgcggaccacatggcccaact

SEQ ID NO: 1242306 - DNA, 25 bp, Homo sapien
caggaccgtacctggtgtacaacgg

SEQ ID NO: 1242307 - DNA, 25 bp, Homo sapien
caggcacctgctagagacgccagga

SEQ ID NO: 1242308 - DNA, 25 bp, Homo sapien
gccaggaccgtacctggtgtacaac

SEQ ID NO: 1242309 - DNA, 25 bp, Homo sapien
acctgctagagacgccaggaccgta

SEQ ID NO: 1242310 - DNA, 25 bp, Homo sapien
gccaaatatgcccaagtccttacac

SEQ ID NO: 1242311 - DNA, 25 bp, Homo sapien
tgggcagttcacactaactcagttg

SEQ ID NO: 1242312 - DNA, 25 bp, Homo sapien
gtataccccccttggttagcagata

SEQ ID NO: 1242313 - DNA, 25 bp, Homo sapien
gatggctttcatgaaagtatacccc

SEQ ID NO: 1242314 - DNA, 25 bp, Homo sapien
ctttcttggcctcaacttcaaaagg

SEQ ID NO: 1242315 - DNA, 25 bp, Homo sapien
ggttcgctgagacggatggaacaca

SEQ ID NO: 1242316 - DNA, 25 bp, Homo sapien
tcaaaaggggttcgctgagacggat

SEQ ID NO: 1242317 - DNA, 25 bp, Homo sapien
gagacggatggaacacattccaccc

SEQ ID NO: 1242318 - DNA, 25 bp, Homo sapien
tattgtttgccccataattcaagct

SEQ ID NO: 1242319 - DNA, 25 bp, Homo sapien
ttttttaacgatacatacaggcgaa

SEQ ID NO: 1242320 - DNA, 25 bp, Homo sapien
gacaagtatttgtaaattactgcgc

SEQ ID NO: 1242321 - DNA, 25 bp, Homo sapien
cacagcagtctaaatcattgacaag

SEQ ID NO: 1242322 - DNA, 25 bp, Homo sapien
ccatgactgttctatcgggttaaaa

SEQ ID NO: 1242323 - DNA, 25 bp, Homo sapien
ccatctatctgattacgtgcatgag

SEQ ID NO: 1242324 - DNA, 25 bp, Homo sapien
ctcaaattcaagaaaggtactgcaa

SEQ ID NO: 1242325 - DNA, 25 bp, Homo sapien
tttttcaagtaaatgccgctcaacg

SEQ ID NO: 1242326 - DNA, 25 bp, Homo sapien
tctatctggtgtctaaccttttctg

SEQ ID NO: 1242327 - DNA, 25 bp, Homo sapien
tttcttattctatctggtgtctaac

SEQ ID NO: 1242328 - DNA, 25 bp, Homo sapien
tattctatctggtgtctaacctttt

SEQ ID NO: 1242329 - DNA, 25 bp, Homo sapien
ttagttttagagtctgtatgacact

SEQ ID NO: 1242330 - DNA, 25 bp, Homo sapien
aattctggaccatgcccttctcggt

SEQ ID NO: 1242331 - DNA, 25 bp, Homo sapien
ccttctcggtctttgtcgttattag

SEQ ID NO: 1242332 - DNA, 25 bp, Homo sapien
acaaataaataggcatgtatcattt

SEQ ID NO: 1242333 - DNA, 25 bp, Homo sapien
cggtctttgtcgttattagtgacaa

SEQ ID NO: 1242334 - DNA, 25 bp, Homo sapien
caggctgttgatgcgatgcatatgt

SEQ ID NO: 1242335 - DNA, 25 bp, Homo sapien
ctccagtcaggctgttgatgcgatg

SEQ ID NO: 1242336 - DNA, 25 bp, Homo sapien
ccagtcaggctgttgatgcgatgca

SEQ ID NO: 1242337 - DNA, 25 bp, Homo sapien
ctgttgatgcgatgcatatgtttac

SEQ ID NO: 1242338 - DNA, 25 bp, Homo sapien
taggcctctcgttcgctgtggaaaa

SEQ ID NO: 1242339 - DNA, 25 bp, Homo sapien
gacgcctccagctttttgaacctga

SEQ ID NO: 1242340 - DNA, 25 bp, Homo sapien
ggcctcagggatatcactggctctg

SEQ ID NO: 1242341 - DNA, 25 bp, Homo sapien
tccagaagtgacgtactgcaggcct

SEQ ID NO: 1242342 - DNA, 25 bp, Homo sapien
attcctgtaactcctaacgcttggg

SEQ ID NO: 1242343 - DNA, 25 bp, Homo sapien
tctataattctcttgctaacccgga

SEQ ID NO: 1242344 - DNA, 25 bp, Homo sapien
tacaatgtagataccctgcagagtt

SEQ ID NO: 1242345 - DNA, 25 bp, Homo sapien
gaacaatgggacgtatacaagggct

SEQ ID NO: 1242346 - DNA, 25 bp, Homo sapien
ggcactgaagactatagagcaccat

SEQ ID NO: 1242347 - DNA, 25 bp, Homo sapien
ccccttgtgggaaagaatgctaagc

SEQ ID NO: 1242348 - DNA, 25 bp, Homo sapien
taaggcaaagaagcacgggaaacca

SEQ ID NO: 1242349 - DNA, 25 bp, Homo sapien
cagaagggactgaaggacataggtt

SEQ ID NO: 1242350 - DNA, 25 bp, Homo sapien
cataaactgtgtaaagatagatgca

SEQ ID NO: 1242351 - DNA, 25 bp, Homo sapien
gatgcacatgggattagaggacaaa

SEQ ID NO: 1242352 - DNA, 25 bp, Homo sapien
tcccactgctaaattgaagttttcc

SEQ ID NO: 1242353 - DNA, 25 bp, Homo sapien
agttgattttaatgggaaacagcag

SEQ ID NO: 1242354 - DNA, 25 bp, Homo sapien
gcccaccaatagtcatgagcagagg

SEQ ID NO: 1242355 - DNA, 25 bp, Homo sapien
cagagggttccctgttagtagctcg

SEQ ID NO: 1242356 - DNA, 25 bp, Homo sapien
gatttttatgtaagtgcctccacag

SEQ ID NO: 1242357 - DNA, 25 bp, Homo sapien
tagtagctcgtttgacatagccgta

SEQ ID NO: 1242358 - DNA, 25 bp, Homo sapien
ttaataccagttctctgaaggacag

SEQ ID NO: 1242359 - DNA, 25 bp, Homo sapien
tgaagacttctacaccagaaacgat

SEQ ID NO: 1242360 - DNA, 25 bp, Homo sapien
cctaccatcatttcatggacagtgg

SEQ ID NO: 1242361 - DNA, 25 bp, Homo sapien
tgtagttaggacgtatattccgggc

SEQ ID NO: 1242362 - DNA, 25 bp, Homo sapien
caatagagtcacttggatagaatcc

SEQ ID NO: 1242363 - DNA, 25 bp, Homo sapien
tccaggagggaaaatctgctgcctc

SEQ ID NO: 1242364 - DNA, 25 bp, Homo sapien
tactcacgaaaatgaagatacggtc

SEQ ID NO: 1242365 - DNA, 25 bp, Homo sapien
taacctatgttcttgggtcaacaac

SEQ ID NO: 1242366 - DNA, 25 bp, Homo sapien
tcccaggtgaaggtaaattgcttgt

SEQ ID NO: 1242367 - DNA, 25 bp, Homo sapien
ctaaaagggattactagctgggcct

SEQ ID NO: 1242368 - DNA, 25 bp, Homo sapien
tagaacatatcctttcccactaaaa

SEQ ID NO: 1242369 - DNA, 25 bp, Homo sapien
gatcttgggttttattaatggcatg

SEQ ID NO: 1242370 - DNA, 25 bp, Homo sapien
tctagcctaggtcgtttatttggga

SEQ ID NO: 1242371 - DNA, 25 bp, Homo sapien
gactgagtttttagggatgttgcca

SEQ ID NO: 1242372 - DNA, 25 bp, Homo sapien
tcaaggcaccagtccaagtgctcat

SEQ ID NO: 1242373 - DNA, 25 bp, Homo sapien
ttgatgctgtcaccttcaaggcacc

SEQ ID NO: 1242374 - DNA, 25 bp, Homo sapien
taaggcaagagtgaatgtagcaccc

SEQ ID NO: 1242375 - DNA, 25 bp, Homo sapien
gaacaactgtgttagggctatgcca

SEQ ID NO: 1242376 - DNA, 25 bp, Homo sapien
tcatgggtatcaactgggaacagac

SEQ ID NO: 1242377 - DNA, 25 bp, Homo sapien
gaaatataccccgtgactcagcaat

SEQ ID NO: 1242378 - DNA, 25 bp, Homo sapien
gaagtttggcttaccaagagcacca

SEQ ID NO: 1242379 - DNA, 25 bp, Homo sapien
tagaagatagatagccggttgagca

SEQ ID NO: 1242380 - DNA, 25 bp, Homo sapien
aagcacacattcttggcctgccgtg

SEQ ID NO: 1242381 - DNA, 25 bp, Homo sapien
tcttgcaggagactactatgttaca

SEQ ID NO: 1242382 - DNA, 25 bp, Homo sapien
gaccttttctatgggaagctcagta

SEQ ID NO: 1242383 - DNA, 25 bp, Homo sapien
ggcgttaggccacaactcaaaagca

SEQ ID NO: 1242384 - DNA, 25 bp, Homo sapien
tggtctatagtacagtgcgcggcgt

SEQ ID NO: 1242385 - DNA, 25 bp, Homo sapien
gaattatgggtgtaagaccttgccc

SEQ ID NO: 1242386 - DNA, 25 bp, Homo sapien
ctttcaggtgtatgtatcctctaga

SEQ ID NO: 1242387 - DNA, 25 bp, Homo sapien
tctatctgatctgcagacaagaacc

SEQ ID NO: 1242388 - DNA, 25 bp, Homo sapien
tactgtgatctatctgatctgcaga

SEQ ID NO: 1242389 - DNA, 25 bp, Homo sapien
ctgatctgcagacaagaaccttgtc

SEQ ID NO: 1242390 - DNA, 25 bp, Homo sapien
ggaggaagataagctactaattgaa

SEQ ID NO: 1242391 - DNA, 25 bp, Homo sapien
caaatctgtgattgcttacaggagg

SEQ ID NO: 1242392 - DNA, 25 bp, Homo sapien
tactgcatgatcaacttcaaatctg

SEQ ID NO: 1242393 - DNA, 25 bp, Homo sapien
cagatctgttatctagctgagttca

SEQ ID NO: 1242394 - DNA, 25 bp, Homo sapien
gactgtcacatcacatgatgtgccc

SEQ ID NO: 1242395 - DNA, 25 bp, Homo sapien
tgtcacatcacatgatgtgcccttt

SEQ ID NO: 1242396 - DNA, 25 bp, Homo sapien
aagactgtcacatcacatgatgtgc

SEQ ID NO: 1242397 - DNA, 25 bp, Homo sapien
catcacatgatgtgcccttttcaat

SEQ ID NO: 1242398 - DNA, 25 bp, Homo sapien
taacgacttgattatcagctgtgcc

SEQ ID NO: 1242399 - DNA, 25 bp, Homo sapien
gcatcctaattcacgtactgagtag

SEQ ID NO: 1242400 - DNA, 25 bp, Homo sapien
ccttctgaggtgtgttgcctgcatc

SEQ ID NO: 1242401 - DNA, 25 bp, Homo sapien
aacattctgatagtgagcttccggc

SEQ ID NO: 1242402 - DNA, 25 bp, Homo sapien
gatggccttccagcatgacctgttt

SEQ ID NO: 1242403 - DNA, 25 bp, Homo sapien
aaaataccatgtgcagtacagcagg

SEQ ID NO: 1242404 - DNA, 25 bp, Homo sapien
ccaatgtctgtgtggagcatgcaag

SEQ ID NO: 1242405 - DNA, 25 bp, Homo sapien
aagaatcaattcctggccgaggcca

SEQ ID NO: 1242406 - DNA, 25 bp, Homo sapien
ggtttaccctgcaagatcactgaga

SEQ ID NO: 1242407 - DNA, 25 bp, Homo sapien
gagtttgaaaagtatgcagtgccca

SEQ ID NO: 1242408 - DNA, 25 bp, Homo sapien
tttcaagggaaatacactggcgtca

SEQ ID NO: 1242409 - DNA, 25 bp, Homo sapien
tttcagaggcactataggaggcagg

SEQ ID NO: 1242410 - DNA, 25 bp, Homo sapien
tatgcagagggtgtcatagtttctg

SEQ ID NO: 1242411 - DNA, 25 bp, Homo sapien
cataacatatggtattggtcaagta

SEQ ID NO: 1242412 - DNA, 25 bp, Homo sapien
ttcaagtaactcaggcaatgtatgc

SEQ ID NO: 1242413 - DNA, 25 bp, Homo sapien
caagatcacattaatgccagggccc

SEQ ID NO: 1242414 - DNA, 25 bp, Homo sapien
tattaaatgagtctttcccttattg

SEQ ID NO: 1242415 - DNA, 25 bp, Homo sapien
gtaatttcagaaatgcaccattgga

SEQ ID NO: 1242416 - DNA, 25 bp, Homo sapien
attaaatgagtctttcccttattga

SEQ ID NO: 1242417 - DNA, 25 bp, Homo sapien
tttcccttattgaagtaatttcaga

SEQ ID NO: 1242418 - DNA, 25 bp, Homo sapien
ttacactcttcattgctgtcctgga

SEQ ID NO: 1242419 - DNA, 25 bp, Homo sapien
tagttcattctgtccattgctactt

SEQ ID NO: 1242420 - DNA, 25 bp, Homo sapien
tccaagtctggaaacagcatgatgt

SEQ ID NO: 1242421 - DNA, 25 bp, Homo sapien
ggaacctgtttgcaggtccctgaac

SEQ ID NO: 1242422 - DNA, 25 bp, Homo sapien
ggatccaggatacacaaattgaagt

SEQ ID NO: 1242423 - DNA, 25 bp, Homo sapien
gaaaacattttgtgtagtgagttga

SEQ ID NO: 1242424 - DNA, 25 bp, Homo sapien
cagctataagggacgtgtggactga

SEQ ID NO: 1242425 - DNA, 25 bp, Homo sapien
ggactgagagggtagtcttaataga

SEQ ID NO: 1242426 - DNA, 25 bp, Homo sapien
tgaagctggcgctcgagtacatcgt

SEQ ID NO: 1242427 - DNA, 25 bp, Homo sapien
gcatctgtgtggtggacgacttcct

SEQ ID NO: 1242428 - DNA, 25 bp, Homo sapien
catgagcagcatggacgacctgata

SEQ ID NO: 1242429 - DNA, 25 bp, Homo sapien
tacatcgtgccgtgcatgaacaagc

SEQ ID NO: 1242430 - DNA, 25 bp, Homo sapien
tttgcatttgttgaaccaaacctga

SEQ ID NO: 1242431 - DNA, 25 bp, Homo sapien
caataaccacaaaagctgacagcca

SEQ ID NO: 1242432 - DNA, 25 bp, Homo sapien
aataaccacaaaagctgacagccaa

SEQ ID NO: 1242433 - DNA, 25 bp, Homo sapien
ataaccacaaaagctgacagccaag

SEQ ID NO: 1242434 - DNA, 25 bp, Homo sapien
tcaataaccacaaaagctgacagcc

SEQ ID NO: 1242435 - DNA, 25 bp, Homo sapien
tagcaatagccttgtaactggtttc

SEQ ID NO: 1242436 - DNA, 25 bp, Homo sapien
atagcaatagccttgtaactggttt

SEQ ID NO: 1242437 - DNA, 25 bp, Homo sapien
catagcaatagccttgtaactggtt

SEQ ID NO: 1242438 - DNA, 25 bp, Homo sapien
ggagatgtgtactgaggtccccaag

SEQ ID NO: 1242439 - DNA, 25 bp, Homo sapien
ctactgacaacaacaagctgctggg

SEQ ID NO: 1242440 - DNA, 25 bp, Homo sapien
agaatgtgaaggagatgtgtactga

SEQ ID NO: 1242441 - DNA, 25 bp, Homo sapien
aagccagccaacaaagaccacttca

SEQ ID NO: 1242442 - DNA, 25 bp, Homo sapien
tattgcttgctgcacaagaacttta

SEQ ID NO: 1242443 - DNA, 25 bp, Homo sapien
gctgcacaagaactttaactgattc

SEQ ID NO: 1242444 - DNA, 25 bp, Homo sapien
taagttagagtccatttctattgct

SEQ ID NO: 1242445 - DNA, 25 bp, Homo sapien
gattcagaaattgtaaccacaaagt

SEQ ID NO: 1242446 - DNA, 25 bp, Homo sapien
ggatgtgagaaagaagcgagccctc

SEQ ID NO: 1242447 - DNA, 25 bp, Homo sapien
agaaagaagcgagccctcgagtttc

SEQ ID NO: 1242448 - DNA, 25 bp, Homo sapien
tgtgagaaagaagcgagccctcgag

SEQ ID NO: 1242449 - DNA, 25 bp, Homo sapien
tgagaaagaagcgagccctcgagtt

SEQ ID NO: 1242450 - DNA, 25 bp, Homo sapien
caggggggcccagcttcgcgcgcgg

SEQ ID NO: 1242451 - DNA, 25 bp, Homo sapien
gtgctgtgggggttgtagttcctcc

SEQ ID NO: 1242452 - DNA, 25 bp, Homo sapien
tgtagttcctccgccggagcgggac

SEQ ID NO: 1242453 - DNA, 25 bp, Homo sapien
gctggctccgcccaccgcgtggtcc

SEQ ID NO: 1242454 - DNA, 25 bp, Homo sapien
ggaggggaggccgtcgccgctggct

SEQ ID NO: 1242455 - DNA, 25 bp, Homo sapien
cgcccaccgcgtggtccaaggacca

SEQ ID NO: 1242456 - DNA, 25 bp, Homo sapien
aggccgtcgccgctggctccgccca

SEQ ID NO: 1242457 - DNA, 25 bp, Homo sapien
acgagcggagactgaaggacctgga

SEQ ID NO: 1242458 - DNA, 25 bp, Homo sapien
cagaaaaacgctttgcagccgggcc

SEQ ID NO: 1242459 - DNA, 25 bp, Homo sapien
actacaacgcagtggccggaagtct

SEQ ID NO: 1242460 - DNA, 25 bp, Homo sapien
tcacagcctacggtgagacgagcgg

SEQ ID NO: 1242461 - DNA, 25 bp, Homo sapien
atttaaaggccaacatcacgggtga

SEQ ID NO: 1242462 - DNA, 25 bp, Homo sapien
catcacgggtgaagatgaattaaca

SEQ ID NO: 1242463 - DNA, 25 bp, Homo sapien
gtgggaaattgtcatgcttcctttt

SEQ ID NO: 1242464 - DNA, 25 bp, Homo sapien
gaagatgaattaacatccttccctt

SEQ ID NO: 1242465 - DNA, 25 bp, Homo sapien
tatgtagtattccagccagggatgc

SEQ ID NO: 1242466 - DNA, 25 bp, Homo sapien
gactgcttaagaatcacgtgcctcc

SEQ ID NO: 1242467 - DNA, 25 bp, Homo sapien
gatatcattctgctcaaggactgct

SEQ ID NO: 1242468 - DNA, 25 bp, Homo sapien
tcctgagatcgatgaaaggctgaac

SEQ ID NO: 1242469 - DNA, 25 bp, Homo sapien
ctaaaaacacattatgatcataagc

SEQ ID NO: 1242470 - DNA, 25 bp, Homo sapien
aaacacattatgatcataagcatgt

SEQ ID NO: 1242471 - DNA, 25 bp, Homo sapien
taaaaacacattatgatcataagca

SEQ ID NO: 1242472 - DNA, 25 bp, Homo sapien
aaaacacattatgatcataagcatg

SEQ ID NO: 1242473 - DNA, 25 bp, Homo sapien
cagttatatcccgactaagtttcac

SEQ ID NO: 1242474 - DNA, 25 bp, Homo sapien
cttgtaatcctatggaggagaaaaa

SEQ ID NO: 1242475 - DNA, 25 bp, Homo sapien
ctttcaacagttatatcccgactaa

SEQ ID NO: 1242476 - DNA, 25 bp, Homo sapien
tatatcccgactaagtttcacaagt

SEQ ID NO: 1242477 - DNA, 25 bp, Homo sapien
tattctacctctcgtgaaacaggca

SEQ ID NO: 1242478 - DNA, 25 bp, Homo sapien
ggagatcctcagctgctcataagat

SEQ ID NO: 1242479 - DNA, 25 bp, Homo sapien
gctggactaaaacacgtaagctggg

SEQ ID NO: 1242480 - DNA, 25 bp, Homo sapien
tcacagctacccttctggagacatc

SEQ ID NO: 1242481 - DNA, 25 bp, Homo sapien
tctgattcagtcaatatatcttcca

SEQ ID NO: 1242482 - DNA, 25 bp, Homo sapien
ctgtagtaatggctcgatggaactg

SEQ ID NO: 1242483 - DNA, 25 bp, Homo sapien
ctgatagctcttgggctacctggaa

SEQ ID NO: 1242484 - DNA, 25 bp, Homo sapien
gaactgatgcatatcttcccctgat

SEQ ID NO: 1242485 - DNA, 25 bp, Homo sapien
aaacataaagccaacttgcctttgg

SEQ ID NO: 1242486 - DNA, 25 bp, Homo sapien
caatgaccatcactacactgttaaa

SEQ ID NO: 1242487 - DNA, 25 bp, Homo sapien
catgttaatcatgtagcacaccatt

SEQ ID NO: 1242488 - DNA, 25 bp, Homo sapien
ggtgtcacttaaaattcatgcaact

SEQ ID NO: 1242489 - DNA, 25 bp, Homo sapien
tacaaggagacctcacagactagaa

SEQ ID NO: 1242490 - DNA, 25 bp, Homo sapien
cagcactgaagaacgagtattgagc

SEQ ID NO: 1242491 - DNA, 25 bp, Homo sapien
gcaagccttacctcttacaaggaga

SEQ ID NO: 1242492 - DNA, 25 bp, Homo sapien
cccaggtctgatggcaaagttgatc

SEQ ID NO: 1242493 - DNA, 25 bp, Homo sapien
gaatcagctgccagtaagagagaag

SEQ ID NO: 1242494 - DNA, 25 bp, Homo sapien
gaaagttcaaggacatctggcccaa

SEQ ID NO: 1242495 - DNA, 25 bp, Homo sapien
ggtgaaaattttcaacgtactgcca

SEQ ID NO: 1242496 - DNA, 25 bp, Homo sapien
ttttcagtgaataatccccaaggtg

SEQ ID NO: 1242497 - DNA, 25 bp, Homo sapien
gatcgtgttttgatgaagtgttgaa

SEQ ID NO: 1242498 - DNA, 25 bp, Homo sapien
gtcttcagtcgtaaatatcaattgt

SEQ ID NO: 1242499 - DNA, 25 bp, Homo sapien
ccattgtcttcagtcgtaaatatca

SEQ ID NO: 1242500 - DNA, 25 bp, Homo sapien
atactaattaatgatcgtgttttga

SEQ ID NO: 1242501 - DNA, 25 bp, Homo sapien
aaatgaccttgacccatctcctccc

SEQ ID NO: 1242502 - DNA, 25 bp, Homo sapien
tcttgtttgaggttaactcttccaa

SEQ ID NO: 1242503 - DNA, 25 bp, Homo sapien
tcataaggtgtatgcccttgggcaa

SEQ ID NO: 1242504 - DNA, 25 bp, Homo sapien
gatgatgagttgtccctcctcttgt

SEQ ID NO: 1242505 - DNA, 25 bp, Homo sapien
taataaccacttgggatgttacagg

SEQ ID NO: 1242506 - DNA, 25 bp, Homo sapien
tgtgccctgggtagtgaaatgaacc

SEQ ID NO: 1242507 - DNA, 25 bp, Homo sapien
taatgttttcctaagaagctcagtc

SEQ ID NO: 1242508 - DNA, 25 bp, Homo sapien
tgaaaaaccatacagccctccaagt

SEQ ID NO: 1242509 - DNA, 25 bp, Homo sapien
acctcgtaaggtccagtgttgccaa

SEQ ID NO: 1242510 - DNA, 25 bp, Homo sapien
acaggtgtgactctcagtctccaag

SEQ ID NO: 1242511 - DNA, 25 bp, Homo sapien
gacgtaaaaactggctcacttcaaa

SEQ ID NO: 1242512 - DNA, 25 bp, Homo sapien
tcccagaaggtaatcgacaggtgtg

SEQ ID NO: 1242513 - DNA, 25 bp, Homo sapien
ggaatcagcccttacaaacagagct

SEQ ID NO: 1242514 - DNA, 25 bp, Homo sapien
taacaccatgggacaactaaaggtc

SEQ ID NO: 1242515 - DNA, 25 bp, Homo sapien
gacgctcatgtccagaagtttaact

SEQ ID NO: 1242516 - DNA, 25 bp, Homo sapien
ggttatggcaaaaggtacactctga

SEQ ID NO: 1242517 - DNA, 25 bp, Homo sapien
gatcttctgtcatggtgtcctagcc

SEQ ID NO: 1242518 - DNA, 25 bp, Homo sapien
gatccactggttacttaggagtaca

SEQ ID NO: 1242519 - DNA, 25 bp, Homo sapien
cagagtggttcaagttccttactga

SEQ ID NO: 1242520 - DNA, 25 bp, Homo sapien
taaatccaattggtctacagagtgg

SEQ ID NO: 1242521 - DNA, 25 bp, Homo sapien
gctgagacaagggttcttaatctgg

SEQ ID NO: 1242522 - DNA, 25 bp, Homo sapien
cttaatctgggttccagcaacatag

SEQ ID NO: 1242523 - DNA, 25 bp, Homo sapien
gagcatccatagatgaatttcagag

SEQ ID NO: 1242524 - DNA, 25 bp, Homo sapien
cagcaacatagttttagagcatcca

SEQ ID NO: 1242525 - DNA, 25 bp, Homo sapien
gatattgggcacatgctctgaagga

SEQ ID NO: 1242526 - DNA, 25 bp, Homo sapien
caagcaatcacaggtcagaggcgga

SEQ ID NO: 1242527 - DNA, 25 bp, Homo sapien
taggcccacctatacgaagttatgc

SEQ ID NO: 1242528 - DNA, 25 bp, Homo sapien
aataaatgacggatataggcccacc

SEQ ID NO: 1242529 - DNA, 25 bp, Homo sapien
tacagtcagttactgcatagaatca

SEQ ID NO: 1242530 - DNA, 25 bp, Homo sapien
tatttaacaagtataattcatgaca

SEQ ID NO: 1242531 - DNA, 25 bp, Homo sapien
aacaagtataattcatgacatcaaa

SEQ ID NO: 1242532 - DNA, 25 bp, Homo sapien
gttactgcatagaatcaaaggcaag

SEQ ID NO: 1242533 - DNA, 25 bp, Homo sapien
cataagaactaaactaccagtagcc

SEQ ID NO: 1242534 - DNA, 25 bp, Homo sapien
ttagggaccaagtaatgagacagcc

SEQ ID NO: 1242535 - DNA, 25 bp, Homo sapien
gaacttctcttttcggtgtgatgca

SEQ ID NO: 1242536 - DNA, 25 bp, Homo sapien
agtagccacagaggcactcaccaaa

SEQ ID NO: 1242537 - DNA, 25 bp, Homo sapien
cacatgaagagctcgaccctcttgg

SEQ ID NO: 1242538 - DNA, 25 bp, Homo sapien
gagctcgaccctcttggagccgatt

SEQ ID NO: 1242539 - DNA, 25 bp, Homo sapien
gaccctcttggagccgattctggat

SEQ ID NO: 1242540 - DNA, 25 bp, Homo sapien
ctgtttgtaatccagccacatgaag

SEQ ID NO: 1242541 - DNA, 25 bp, Homo sapien
gataacggcactatatccaagctcc

SEQ ID NO: 1242542 - DNA, 25 bp, Homo sapien
aagctccactacttcttagctgtgg

SEQ ID NO: 1242543 - DNA, 25 bp, Homo sapien
taggaggatacgctctgcactcaga

SEQ ID NO: 1242544 - DNA, 25 bp, Homo sapien
tggtcctaccaaccatctcattagc

SEQ ID NO: 1242545 - DNA, 25 bp, Homo sapien
cagtcatacgattgttgggtcaaac

SEQ ID NO: 1242546 - DNA, 25 bp, Homo sapien
gatctttgttagatcacagtttgca

SEQ ID NO: 1242547 - DNA, 25 bp, Homo sapien
cagttatcccatcaccatttaggaa

SEQ ID NO: 1242548 - DNA, 25 bp, Homo sapien
tacccattctgaccggtgttaggtg

SEQ ID NO: 1242549 - DNA, 25 bp, Homo sapien
tcctcccgctccgcctgggctgcct

SEQ ID NO: 1242550 - DNA, 25 bp, Homo sapien
agctcctcccgctccgcctgggctg

SEQ ID NO: 1242551 - DNA, 25 bp, Homo sapien
gcgccccgctgccagctcctcccgc

SEQ ID NO: 1242552 - DNA, 25 bp, Homo sapien
ctcccgctccgcctgggctgcctcc

SEQ ID NO: 1242553 - DNA, 25 bp, Homo sapien
gctggggcgccctgaggacccccgc

SEQ ID NO: 1242554 - DNA, 25 bp, Homo sapien
gcggctggggcgccctgaggacccc

SEQ ID NO: 1242555 - DNA, 25 bp, Homo sapien
tcactaagagttgacagcgagaccc

SEQ ID NO: 1242556 - DNA, 25 bp, Homo sapien
aaaccgagcagtctccggcttgggc

SEQ ID NO: 1242557 - DNA, 25 bp, Homo sapien
cgctccaggcggtggaaaccgagca

SEQ ID NO: 1242558 - DNA, 25 bp, Homo sapien
tccccgttactgtagccaagtagga

SEQ ID NO: 1242559 - DNA, 25 bp, Homo sapien
aaactaggaattgtttctgcagcac

SEQ ID NO: 1242560 - DNA, 25 bp, Homo sapien
cagaaacagagcattcacgctcctc

SEQ ID NO: 1242561 - DNA, 25 bp, Homo sapien
ttcacgctcctctcggaagtttctg

SEQ ID NO: 1242562 - DNA, 25 bp, Homo sapien
caaataaactaggaattgtttctgc

SEQ ID NO: 1242563 - DNA, 25 bp, Homo sapien
ttctgtgcttcctgtaatgagcatg

SEQ ID NO: 1242564 - DNA, 25 bp, Homo sapien
ctttctgtgcttcctgtaatgagca

SEQ ID NO: 1242565 - DNA, 25 bp, Homo sapien
tgtgcttcctgtaatgagcatgcat

SEQ ID NO: 1242566 - DNA, 25 bp, Homo sapien
tctgtgcttcctgtaatgagcatgc

SEQ ID NO: 1242567 - DNA, 25 bp, Homo sapien
tcaaaggaggcctaaacacagtgag

SEQ ID NO: 1242568 - DNA, 25 bp, Homo sapien
caaagaattagcgaaatggcctgcc

SEQ ID NO: 1242569 - DNA, 25 bp, Homo sapien
tgaaaatttacagagccggcaaggt

SEQ ID NO: 1242570 - DNA, 25 bp, Homo sapien
gctgttccagtgcatgctcaggttg

SEQ ID NO: 1242571 - DNA, 25 bp, Homo sapien
gatattatcatttgggaggcgagga

SEQ ID NO: 1242572 - DNA, 25 bp, Homo sapien
cagtaaggtgcagaaaggagcttca

SEQ ID NO: 1242573 - DNA, 25 bp, Homo sapien
taaccctgggacatcaggcagacct

SEQ ID NO: 1242574 - DNA, 25 bp, Homo sapien
caatgaaggtccctgctctaaaggc

SEQ ID NO: 1242575 - DNA, 25 bp, Homo sapien
gacacaagatggcagacattctacg

SEQ ID NO: 1242576 - DNA, 25 bp, Homo sapien
tctaacattcggattaagggaggta

SEQ ID NO: 1242577 - DNA, 25 bp, Homo sapien
tctacgagatataagaacagctcat

SEQ ID NO: 1242578 - DNA, 25 bp, Homo sapien
ctgtcctactaagaccacatatgga

SEQ ID NO: 1242579 - DNA, 25 bp, Homo sapien
cgtaaaagtcacaagatttatatga

SEQ ID NO: 1242580 - DNA, 25 bp, Homo sapien
tttcgtaaaagtcacaagatttata

SEQ ID NO: 1242581 - DNA, 25 bp, Homo sapien
tcatgggaatctttcgtaaaagtca

SEQ ID NO: 1242582 - DNA, 25 bp, Homo sapien
cttcatgggaatctttcgtaaaagt

SEQ ID NO: 1242583 - DNA, 25 bp, Homo sapien
gagcaggtcaatcaaggaatcgcca

SEQ ID NO: 1242584 - DNA, 25 bp, Homo sapien
ttacaacagcctcacagtcggaagg

SEQ ID NO: 1242585 - DNA, 25 bp, Homo sapien
ccaggcggattgttttcccaggcat

SEQ ID NO: 1242586 - DNA, 25 bp, Homo sapien
tgcaggtacagacgccaacaggtct

SEQ ID NO: 1242587 - DNA, 25 bp, Homo sapien
cagagggcagatccggagggcactg

SEQ ID NO: 1242588 - DNA, 25 bp, Homo sapien
tgaaatctgtaggaaaaactcccag

SEQ ID NO: 1242589 - DNA, 25 bp, Homo sapien
agggcagatccggagggcactgctg

SEQ ID NO: 1242590 - DNA, 25 bp, Homo sapien
ataaggcaagaatgaaatctgtagg

SEQ ID NO: 1242591 - DNA, 25 bp, Homo sapien
tccgaaagcacgctgcaggtggtaa

SEQ ID NO: 1242592 - DNA, 25 bp, Homo sapien
aaagcacgctgcaggtggtaagcaa

SEQ ID NO: 1242593 - DNA, 25 bp, Homo sapien
tgcaggtggtaagcaatcccggctg

SEQ ID NO: 1242594 - DNA, 25 bp, Homo sapien
cacgctgcaggtggtaagcaatccc

SEQ ID NO: 1242595 - DNA, 25 bp, Homo sapien
atcccaggccctgtcgagcttctca

SEQ ID NO: 1242596 - DNA, 25 bp, Homo sapien
tcgagcttctcatgtagcccggcct

SEQ ID NO: 1242597 - DNA, 25 bp, Homo sapien
cctgtcgagcttctcatgtagcccg

SEQ ID NO: 1242598 - DNA, 25 bp, Homo sapien
caggccctgtcgagcttctcatgta

SEQ ID NO: 1242599 - DNA, 25 bp, Homo sapien
gtggtgggactcctcgccagacacc

SEQ ID NO: 1242600 - DNA, 25 bp, Homo sapien
caaggccacactgtctggccctgga

SEQ ID NO: 1242601 - DNA, 25 bp, Homo sapien
tcctgggaaccggaacagtgtgccc

SEQ ID NO: 1242602 - DNA, 25 bp, Homo sapien
tggccctggactccgagtggtggga

SEQ ID NO: 1242603 - DNA, 25 bp, Homo sapien
tctgagctgaatcccaaagtgcgcc

SEQ ID NO: 1242604 - DNA, 25 bp, Homo sapien
aaagtgcgccgaggttcctctcaca

SEQ ID NO: 1242605 - DNA, 25 bp, Homo sapien
ttggaaacagggctccggaccaaga

SEQ ID NO: 1242606 - DNA, 25 bp, Homo sapien
gcgtccagggtctcagaactatcca

SEQ ID NO: 1242607 - DNA, 25 bp, Homo sapien
cagagccaagcgagagccgaataaa

SEQ ID NO: 1242608 - DNA, 25 bp, Homo sapien
actgaagggccgagagagacatcgc

SEQ ID NO: 1242609 - DNA, 25 bp, Homo sapien
taaagaatgcatgtcacgctctggc

SEQ ID NO: 1242610 - DNA, 25 bp, Homo sapien
catttcctgagcagggtgtcccaag

SEQ ID NO: 1242611 - DNA, 25 bp, Homo sapien
catttgatcgctcttgtaggactcc

SEQ ID NO: 1242612 - DNA, 25 bp, Homo sapien
gggttacctctacgctgaagcattt

SEQ ID NO: 1242613 - DNA, 25 bp, Homo sapien
gatcatatgttcagatggtgcaggc

SEQ ID NO: 1242614 - DNA, 25 bp, Homo sapien
gaatggagtacttattgcaccaggt

SEQ ID NO: 1242615 - DNA, 25 bp, Homo sapien
gcagtcttatttaacccacatggag

SEQ ID NO: 1242616 - DNA, 25 bp, Homo sapien
tgaacttaagctcagcaggctgtcc

SEQ ID NO: 1242617 - DNA, 25 bp, Homo sapien
gggcttgatccctgaaaaacatctt

SEQ ID NO: 1242618 - DNA, 25 bp, Homo sapien
tacttctctgagtgttaccaatggg

SEQ ID NO: 1242619 - DNA, 25 bp, Homo sapien
gcatcttcctgaagtttctgaagtt

SEQ ID NO: 1242620 - DNA, 25 bp, Homo sapien
tcattctcaactgcatcttcctgaa

SEQ ID NO: 1242621 - DNA, 25 bp, Homo sapien
tctgaagttttaatcttaaggatat

SEQ ID NO: 1242622 - DNA, 25 bp, Homo sapien
tcatcattctcaactgcatcttcct

SEQ ID NO: 1242623 - DNA, 25 bp, Homo sapien
aaagagtcaactattccctggtaga

SEQ ID NO: 1242624 - DNA, 25 bp, Homo sapien
ttgtacaattcttttgggattcaaa

SEQ ID NO: 1242625 - DNA, 25 bp, Homo sapien
gatgatcagaggaacagattgtaca

SEQ ID NO: 1242626 - DNA, 25 bp, Homo sapien
ggtagatatgagtaaagatggaaag

SEQ ID NO: 1242627 - DNA, 25 bp, Homo sapien
taatgttcatgaagtactttgaaat

SEQ ID NO: 1242628 - DNA, 25 bp, Homo sapien
ttaatgttcatgaagtactttgaaa

SEQ ID NO: 1242629 - DNA, 25 bp, Homo sapien
tagcatatcataggtgtcagacgaa

SEQ ID NO: 1242630 - DNA, 25 bp, Homo sapien
tcacaagggcagataccatgtctgt

SEQ ID NO: 1242631 - DNA, 25 bp, Homo sapien
gcagacaggtggcaagctaatataa

SEQ ID NO: 1242632 - DNA, 25 bp, Homo sapien
gattatagatacatcacaccatggg

SEQ ID NO: 1242633 - DNA, 25 bp, Homo sapien
tacctctcaacacactgaatcgggt

SEQ ID NO: 1242634 - DNA, 25 bp, Homo sapien
ttacctctcaacacactgaatcggg

SEQ ID NO: 1242635 - DNA, 25 bp, Homo sapien
tcttaagatagattcataaaagatg

SEQ ID NO: 1242636 - DNA, 25 bp, Homo sapien
tccagcatactgtgtatgtgcatat

SEQ ID NO: 1242637 - DNA, 25 bp, Homo sapien
tgtttcaaatgaatccatgtggtgg

SEQ ID NO: 1242638 - DNA, 25 bp, Homo sapien
gatgatagagcttcctccagcatac

SEQ ID NO: 1242639 - DNA, 25 bp, Homo sapien
aaaacaaaagtgtgctgcgtggcca

SEQ ID NO: 1242640 - DNA, 25 bp, Homo sapien
tagtactgactatcccaggctgatt

SEQ ID NO: 1242641 - DNA, 25 bp, Homo sapien
gtttatccaggaacaagccagtgct

SEQ ID NO: 1242642 - DNA, 25 bp, Homo sapien
cccacacagcaggataggtattatt

SEQ ID NO: 1242643 - DNA, 25 bp, Homo sapien
gctgctcagaaccacttctgccctg

SEQ ID NO: 1242644 - DNA, 25 bp, Homo sapien
tcagaaccacttctgccctgtgact

SEQ ID NO: 1242645 - DNA, 25 bp, Homo sapien
tgctcagaaccacttctgccctgtg

SEQ ID NO: 1242646 - DNA, 25 bp, Homo sapien
ctgctgctcagaaccacttctgccc

SEQ ID NO: 1242647 - DNA, 25 bp, Homo sapien
ggttattaatgcagtcaatgtcaga

SEQ ID NO: 1242648 - DNA, 25 bp, Homo sapien
ctaggtatgcaaagtgagatgactg

SEQ ID NO: 1242649 - DNA, 25 bp, Homo sapien
gagatgactggtagcaacttcctcc

SEQ ID NO: 1242650 - DNA, 25 bp, Homo sapien
gactggtagcaacttcctccaacaa

SEQ ID NO: 1242651 - DNA, 25 bp, Homo sapien
catttctcacatcaggacagacctg

SEQ ID NO: 1242652 - DNA, 25 bp, Homo sapien
catcagcccagcaaggtaggtagag

SEQ ID NO: 1242653 - DNA, 25 bp, Homo sapien
tttggcagatgaggacatcatttct

SEQ ID NO: 1242654 - DNA, 25 bp, Homo sapien
tgttgacatagctcctttcaatcag

SEQ ID NO: 1242655 - DNA, 25 bp, Homo sapien
ataggagtttggttcaggatgtcga

SEQ ID NO: 1242656 - DNA, 25 bp, Homo sapien
ctgtgtggatatctatttgtcttgc

SEQ ID NO: 1242657 - DNA, 25 bp, Homo sapien
atggtggatccaaagcaattggttc

SEQ ID NO: 1242658 - DNA, 25 bp, Homo sapien
gatctacgctgtgtggatatctatt

SEQ ID NO: 1242659 - DNA, 25 bp, Homo sapien
ttttttcaagcccatggccagcatc

SEQ ID NO: 1242660 - DNA, 25 bp, Homo sapien
gggagaggaatatgatgctaccctg

SEQ ID NO: 1242661 - DNA, 25 bp, Homo sapien
atccagacagctgctatcctgaaat

SEQ ID NO: 1242662 - DNA, 25 bp, Homo sapien
tgctaccctgatcataaatgagcgt

SEQ ID NO: 1242663 - DNA, 25 bp, Homo sapien
aaacggtacagtgggcagaaatgcc

SEQ ID NO: 1242664 - DNA, 25 bp, Homo sapien
tgtcccaacacagaacaatagcggt

SEQ ID NO: 1242665 - DNA, 25 bp, Homo sapien
taattgtccagacatcggcactggg

SEQ ID NO: 1242666 - DNA, 25 bp, Homo sapien
tctgcacaaagagtaaggtcgtagc

SEQ ID NO: 1242667 - DNA, 25 bp, Homo sapien
tgcagcacagcggttattgtacgct

SEQ ID NO: 1242668 - DNA, 25 bp, Homo sapien
gcggttattgtacgctggttccctc

SEQ ID NO: 1242669 - DNA, 25 bp, Homo sapien
tctcctgggtgaagggcttcaagac

SEQ ID NO: 1242670 - DNA, 25 bp, Homo sapien
gaagggcttcaagacaatcaccttg

SEQ ID NO: 1242671 - DNA, 25 bp, Homo sapien
tcatgtgctatgttcatccatttta

SEQ ID NO: 1242672 - DNA, 25 bp, Homo sapien
atccattttatcatcttgcagacac

SEQ ID NO: 1242673 - DNA, 25 bp, Homo sapien
tgttcatccattttatcatcttgca

SEQ ID NO: 1242674 - DNA, 25 bp, Homo sapien
ttcatccattttatcatcttgcaga

SEQ ID NO: 1242675 - DNA, 25 bp, Homo sapien
gcacagctgagccagtctcagacat

SEQ ID NO: 1242676 - DNA, 25 bp, Homo sapien
gctgagccagtctcagacatttcag

SEQ ID NO: 1242677 - DNA, 25 bp, Homo sapien
tggagtttgttgagtttattttcat

SEQ ID NO: 1242678 - DNA, 25 bp, Homo sapien
catttcagaacactggagtttgttg

SEQ ID NO: 1242679 - DNA, 25 bp, Homo sapien
aggcatctggcagcacacgtggtga

SEQ ID NO: 1242680 - DNA, 25 bp, Homo sapien
tggcagcacacgtggtgatgagcct

SEQ ID NO: 1242681 - DNA, 25 bp, Homo sapien
cacacgtggtgatgagcctgccagg

SEQ ID NO: 1242682 - DNA, 25 bp, Homo sapien
catctggcagcacacgtggtgatga

SEQ ID NO: 1242683 - DNA, 25 bp, Homo sapien
tctatacatggacaataaactagct

SEQ ID NO: 1242684 - DNA, 25 bp, Homo sapien
tctgcaagggaaactatgaaccatt

SEQ ID NO: 1242685 - DNA, 25 bp, Homo sapien
caaagtaatcataagcgaaaagaac

SEQ ID NO: 1242686 - DNA, 25 bp, Homo sapien
gacagcccatactgatggattgtaa

SEQ ID NO: 1242687 - DNA, 25 bp, Homo sapien
ggaaactgctaagagctggctgcct

SEQ ID NO: 1242688 - DNA, 25 bp, Homo sapien
ggaagttgaaagtgcaggctgattt

SEQ ID NO: 1242689 - DNA, 25 bp, Homo sapien
cgcaaggcagcctggacttgtgctg

SEQ ID NO: 1242690 - DNA, 25 bp, Homo sapien
tctaatctttgttgtaacgtctcag

SEQ ID NO: 1242691 - DNA, 25 bp, Homo sapien
gctcatagcattcataaaacacctg

SEQ ID NO: 1242692 - DNA, 25 bp, Homo sapien
gatgaggctcatagcattcataaaa

SEQ ID NO: 1242693 - DNA, 25 bp, Homo sapien
ctgaattgtgatgaggctcatagca

SEQ ID NO: 1242694 - DNA, 25 bp, Homo sapien
attgtgatgaggctcatagcattca

SEQ ID NO: 1242695 - DNA, 25 bp, Homo sapien
agaatacagattatgggccagacac

SEQ ID NO: 1242696 - DNA, 25 bp, Homo sapien
gaatcccaataaagtgaagtcagtc

SEQ ID NO: 1242697 - DNA, 25 bp, Homo sapien
tatataccccttgactcggagagcc

SEQ ID NO: 1242698 - DNA, 25 bp, Homo sapien
tttcctctagggcaactgaatccca

SEQ ID NO: 1242699 - DNA, 25 bp, Homo sapien
ggttccgagaacacctgtgcagaca

SEQ ID NO: 1242700 - DNA, 25 bp, Homo sapien
tgttgctgccccgtaaaccagggaa

SEQ ID NO: 1242701 - DNA, 25 bp, Homo sapien
cctgagtggaaagccgactgtgagc

SEQ ID NO: 1242702 - DNA, 25 bp, Homo sapien
cctgataaacctgttgggtgcctga

SEQ ID NO: 1242703 - DNA, 25 bp, Homo sapien
tatggctcacactagattttattgg

SEQ ID NO: 1242704 - DNA, 25 bp, Homo sapien
taatgtcttactgcgacacccaggc

SEQ ID NO: 1242705 - DNA, 25 bp, Homo sapien
tgccttggactatccaaacagggcc

SEQ ID NO: 1242706 - DNA, 25 bp, Homo sapien
gtgcgtactagatcatttaaaattg

SEQ ID NO: 1242707 - DNA, 25 bp, Homo sapien
gtggggtgtgggtgtcatctccgct

SEQ ID NO: 1242708 - DNA, 25 bp, Homo sapien
gggtgtgggtgtcatctccgctggc

SEQ ID NO: 1242709 - DNA, 25 bp, Homo sapien
ctcagtggggtgtgggtgtcatctc

SEQ ID NO: 1242710 - DNA, 25 bp, Homo sapien
ggtgtgggtgtcatctccgctggcc

SEQ ID NO: 1242711 - DNA, 25 bp, Homo sapien
tctcgtctcgtgatggacacgtgca

SEQ ID NO: 1242712 - DNA, 25 bp, Homo sapien
cctgaagaagccagtctcgtctcgt

SEQ ID NO: 1242713 - DNA, 25 bp, Homo sapien
gaagccagtctcgtctcgtgatgga

SEQ ID NO: 1242714 - DNA, 25 bp, Homo sapien
gatggacacgtgcaagctgtcctga

SEQ ID NO: 1242715 - DNA, 25 bp, Homo sapien
aggtctgagctaagcaggttacccc

SEQ ID NO: 1242716 - DNA, 25 bp, Homo sapien
ggtctgagctaagcaggttacccca

SEQ ID NO: 1242717 - DNA, 25 bp, Homo sapien
tgaggtctgagctaagcaggttacc

SEQ ID NO: 1242718 - DNA, 25 bp, Homo sapien
tctgagctaagcaggttaccccagc

SEQ ID NO: 1242719 - DNA, 25 bp, Homo sapien
ttcatttcggatggatgagttagga

SEQ ID NO: 1242720 - DNA, 25 bp, Homo sapien
catttcggatggatgagttaggaca

SEQ ID NO: 1242721 - DNA, 25 bp, Homo sapien
ttcggatggatgagttaggacacag

SEQ ID NO: 1242722 - DNA, 25 bp, Homo sapien
tttcggatggatgagttaggacaca

SEQ ID NO: 1242723 - DNA, 25 bp, Homo sapien
tccagcacaaacatccttgcttgga

SEQ ID NO: 1242724 - DNA, 25 bp, Homo sapien
cccttctcagctgttgatctttggc

SEQ ID NO: 1242725 - DNA, 25 bp, Homo sapien
ggtcaggtcgcagccctgccactgg

SEQ ID NO: 1242726 - DNA, 25 bp, Homo sapien
ccttgcttggagagcttcgatttct

SEQ ID NO: 1242727 - DNA, 25 bp, Homo sapien
ggccagggtgtcctgcaaggccttg

SEQ ID NO: 1242728 - DNA, 25 bp, Homo sapien
aggccagggtgtcctgcaaggcctt

SEQ ID NO: 1242729 - DNA, 25 bp, Homo sapien
tgaggccagggtgtcctgcaaggcc

SEQ ID NO: 1242730 - DNA, 25 bp, Homo sapien
gccagggtgtcctgcaaggccttgc

SEQ ID NO: 1242731 - DNA, 25 bp, Homo sapien
ttatggtttccggtggctctgcatg

SEQ ID NO: 1242732 - DNA, 25 bp, Homo sapien
tccttatggtttccggtggctctgc

SEQ ID NO: 1242733 - DNA, 25 bp, Homo sapien
ccttatggtttccggtggctctgca

SEQ ID NO: 1242734 - DNA, 25 bp, Homo sapien
ctccttatggtttccggtggctctg

SEQ ID NO: 1242735 - DNA, 25 bp, Homo sapien
tccaacagttctcaaagggagagag

SEQ ID NO: 1242736 - DNA, 25 bp, Homo sapien
gatgatcgtcctcagcaaaagttgg

SEQ ID NO: 1242737 - DNA, 25 bp, Homo sapien
cccttagtgagaggcatagttcatc

SEQ ID NO: 1242738 - DNA, 25 bp, Homo sapien
tagagtcagcttataacactgcctg

SEQ ID NO: 1242739 - DNA, 25 bp, Homo sapien
ctctagttgatggttacggcaggga

SEQ ID NO: 1242740 - DNA, 25 bp, Homo sapien
tcaaatgcttcacttctgcagatcc

SEQ ID NO: 1242741 - DNA, 25 bp, Homo sapien
gcagggagcagtctgatgcctcacc

SEQ ID NO: 1242742 - DNA, 25 bp, Homo sapien
tggaaagcccaaatattgatgacgg

SEQ ID NO: 1242743 - DNA, 25 bp, Homo sapien
gccccaaagatgagcctttgaagaa

SEQ ID NO: 1242744 - DNA, 25 bp, Homo sapien
aaagatgagcctttgaagaacaaac

SEQ ID NO: 1242745 - DNA, 25 bp, Homo sapien
tgagcctttgaagaacaaactctgt

SEQ ID NO: 1242746 - DNA, 25 bp, Homo sapien
ctgccccaaagatgagcctttgaag

SEQ ID NO: 1242747 - DNA, 25 bp, Homo sapien
cacatccaaggtgacaacaacacac

SEQ ID NO: 1242748 - DNA, 25 bp, Homo sapien
ttcctcgtaccaccagtaacccagc

SEQ ID NO: 1242749 - DNA, 25 bp, Homo sapien
agcattagaggcacatccaaggtga

SEQ ID NO: 1242750 - DNA, 25 bp, Homo sapien
gtaccaccagtaacccagccataac

SEQ ID NO: 1242751 - DNA, 25 bp, Homo sapien
actcaaaccacaggatggggagcgg

SEQ ID NO: 1242752 - DNA, 25 bp, Homo sapien
ctctgctagaggcacactcaaacca

SEQ ID NO: 1242753 - DNA, 25 bp, Homo sapien
gctagaggcacactcaaaccacagg

SEQ ID NO: 1242754 - DNA, 25 bp, Homo sapien
gaggcacactcaaaccacaggatgg

SEQ ID NO: 1242755 - DNA, 25 bp, Homo sapien
cacactgtggtccccaaaccgtaat

SEQ ID NO: 1242756 - DNA, 25 bp, Homo sapien
cccaaaccgtaattccaggagcagg

SEQ ID NO: 1242757 - DNA, 25 bp, Homo sapien
tccccaaaccgtaattccaggagca

SEQ ID NO: 1242758 - DNA, 25 bp, Homo sapien
atcacactgtggtccccaaaccgta

SEQ ID NO: 1242759 - DNA, 25 bp, Homo sapien
aagaggagattggtcttcttggtaa

SEQ ID NO: 1242760 - DNA, 25 bp, Homo sapien
tcttggtaaccacaattcaatacca

SEQ ID NO: 1242761 - DNA, 25 bp, Homo sapien
agaattaaaaagaggagattggtct

SEQ ID NO: 1242762 - DNA, 25 bp, Homo sapien
ggagattggtcttcttggtaaccac

SEQ ID NO: 1242763 - DNA, 25 bp, Homo sapien
gtgatttctttaagtgacaagttga

SEQ ID NO: 1242764 - DNA, 25 bp, Homo sapien
gtgacaagttgagggattttattct

SEQ ID NO: 1242765 - DNA, 25 bp, Homo sapien
agtgacaagttgagggattttattc

SEQ ID NO: 1242766 - DNA, 25 bp, Homo sapien
cttagtagtgatttctttaagtgac

SEQ ID NO: 1242767 - DNA, 25 bp, Homo sapien
tttcaatatgcatagtggcagtcct

SEQ ID NO: 1242768 - DNA, 25 bp, Homo sapien
cccgaatgcatctttaagcaaaggc

SEQ ID NO: 1242769 - DNA, 25 bp, Homo sapien
ctttttcagtccctaaattgacagc

SEQ ID NO: 1242770 - DNA, 25 bp, Homo sapien
gggtgtccacaagtcaagacctcca

SEQ ID NO: 1242771 - DNA, 25 bp, Homo sapien
ttttggagtcaaagcagacctcatc

SEQ ID NO: 1242772 - DNA, 25 bp, Homo sapien
agaatctaaggtttgtgggacacca

SEQ ID NO: 1242773 - DNA, 25 bp, Homo sapien
gaagacgacagtttggtagcctcta

SEQ ID NO: 1242774 - DNA, 25 bp, Homo sapien
aatcattctctggatgaagacgaca

SEQ ID NO: 1242775 - DNA, 25 bp, Homo sapien
aggctggtagttgggtttcaatatc

SEQ ID NO: 1242776 - DNA, 25 bp, Homo sapien
ggcttcaagcaaggctggtagttgg

SEQ ID NO: 1242777 - DNA, 25 bp, Homo sapien
tggtagttgggtttcaatatcgtta

SEQ ID NO: 1242778 - DNA, 25 bp, Homo sapien
ttcaagcaaggctggtagttgggtt

SEQ ID NO: 1242779 - DNA, 25 bp, Homo sapien
gacgctttcccttcgctctgcccca

SEQ ID NO: 1242780 - DNA, 25 bp, Homo sapien
tgacgctttcccttcgctctgcccc

SEQ ID NO: 1242781 - DNA, 25 bp, Homo sapien
acgctttcccttcgctctgccccag

SEQ ID NO: 1242782 - DNA, 25 bp, Homo sapien
ctgacgctttcccttcgctctgccc

SEQ ID NO: 1242783 - DNA, 25 bp, Homo sapien
ttgctgtagtgccacactctcggcc

SEQ ID NO: 1242784 - DNA, 25 bp, Homo sapien
catccagaagctggaacatcagcca

SEQ ID NO: 1242785 - DNA, 25 bp, Homo sapien
tggaacatcagccagctccaatcac

SEQ ID NO: 1242786 - DNA, 25 bp, Homo sapien
cagcatccagaagctggaacatcag

SEQ ID NO: 1242787 - DNA, 25 bp, Homo sapien
tccagcatccagaagctggaacatc

SEQ ID NO: 1242788 - DNA, 25 bp, Homo sapien
cacagcatgggcaaagaaactgcac

SEQ ID NO: 1242789 - DNA, 25 bp, Homo sapien
aaagaaactgcactttgagattatg

SEQ ID NO: 1242790 - DNA, 25 bp, Homo sapien
gatctagcagcagctaatgtacatt

SEQ ID NO: 1242791 - DNA, 25 bp, Homo sapien
agctaatgtacattcacagcatggg

SEQ ID NO: 1242792 - DNA, 25 bp, Homo sapien
tcagtctgttgtaatcttctttaac

SEQ ID NO: 1242793 - DNA, 25 bp, Homo sapien
aggtctttagccgtccagaaatggt

SEQ ID NO: 1242794 - DNA, 25 bp, Homo sapien
tcctggaactcaacaccaacagctt

SEQ ID NO: 1242795 - DNA, 25 bp, Homo sapien
tctctctctgatgttaatgatctaa

SEQ ID NO: 1242796 - DNA, 25 bp, Homo sapien
ggaacacttgaactcctctgacaag

SEQ ID NO: 1242797 - DNA, 25 bp, Homo sapien
gctaaggcggcattcacatcttcta

SEQ ID NO: 1242798 - DNA, 25 bp, Homo sapien
gaaaagtccacacatagaagagcca

SEQ ID NO: 1242799 - DNA, 25 bp, Homo sapien
agcagacactttggctaaggcggca

SEQ ID NO: 1242800 - DNA, 25 bp, Homo sapien
tctcagagtaagctcagttactcct

SEQ ID NO: 1242801 - DNA, 25 bp, Homo sapien
gcgtcttctgagaccatccctctgg

SEQ ID NO: 1242802 - DNA, 25 bp, Homo sapien
caatttgcactgaaccagcgtcttc

SEQ ID NO: 1242803 - DNA, 25 bp, Homo sapien
atccctctgggtgcaaatctcagag

SEQ ID NO: 1242804 - DNA, 25 bp, Homo sapien
cagggaaccagccagatttttgagc

SEQ ID NO: 1242805 - DNA, 25 bp, Homo sapien
tcctctatagcaacgcagatggact

SEQ ID NO: 1242806 - DNA, 25 bp, Homo sapien
gcacagttagccatcgttctcagaa

SEQ ID NO: 1242807 - DNA, 25 bp, Homo sapien
caaaccataattggaaaggtgcctc

SEQ ID NO: 1242808 - DNA, 25 bp, Homo sapien
gcaatgaccagggatgtgaaatgtt

SEQ ID NO: 1242809 - DNA, 25 bp, Homo sapien
ggaagaagagttggatgcaggcaat

SEQ ID NO: 1242810 - DNA, 25 bp, Homo sapien
atgcaggcaatgaccagggatgtga

SEQ ID NO: 1242811 - DNA, 25 bp, Homo sapien
caggcaatgaccagggatgtgaaat

SEQ ID NO: 1242812 - DNA, 25 bp, Homo sapien
catggcagatagtggatcatcatct

SEQ ID NO: 1242813 - DNA, 25 bp, Homo sapien
tctcaggcacaaaatatagggaggg

SEQ ID NO: 1242814 - DNA, 25 bp, Homo sapien
tagtatgccaagtttctcctagtca

SEQ ID NO: 1242815 - DNA, 25 bp, Homo sapien
tagggtgataacctatagaacctcc

SEQ ID NO: 1242816 - DNA, 25 bp, Homo sapien
gaacatgcctcaatataacctccgg

SEQ ID NO: 1242817 - DNA, 25 bp, Homo sapien
aaccatgtaaatggacttcctgcca

SEQ ID NO: 1242818 - DNA, 25 bp, Homo sapien
aaagactggctcaggctatgacggg

SEQ ID NO: 1242819 - DNA, 25 bp, Homo sapien
tggtctgcacaaccccttatcgaaa

SEQ ID NO: 1242820 - DNA, 25 bp, Homo sapien
tgtgctccgcacaactcgggaagat

SEQ ID NO: 1242821 - DNA, 25 bp, Homo sapien
taaggatcgaagacactagggaaca

SEQ ID NO: 1242822 - DNA, 25 bp, Homo sapien
caggccctagcattgtacagacaga

SEQ ID NO: 1242823 - DNA, 25 bp, Homo sapien
gaaggttaagcaactcaggccctag

SEQ ID NO: 1242824 - DNA, 25 bp, Homo sapien
caaagacaaggtcccaattttatat

SEQ ID NO: 1242825 - DNA, 25 bp, Homo sapien
aagctgtccaggttaacactttgct

SEQ ID NO: 1242826 - DNA, 25 bp, Homo sapien
ccaaagctgtccaggttaacacttt

SEQ ID NO: 1242827 - DNA, 25 bp, Homo sapien
gacaaggtcccaattttatattcta

SEQ ID NO: 1242828 - DNA, 25 bp, Homo sapien
agatattctgaaatgagatattcct

SEQ ID NO: 1242829 - DNA, 25 bp, Homo sapien
tcagatattctgaaatgagatattc

SEQ ID NO: 1242830 - DNA, 25 bp, Homo sapien
tattctgaaatgagatattcctcat

SEQ ID NO: 1242831 - DNA, 25 bp, Homo sapien
cttcagatattctgaaatgagatat

SEQ ID NO: 1242832 - DNA, 25 bp, Homo sapien
tttctactttccccagatacttgga

SEQ ID NO: 1242833 - DNA, 25 bp, Homo sapien
ttctactttccccagatacttggag

SEQ ID NO: 1242834 - DNA, 25 bp, Homo sapien
tgaggtttctactttccccagatac

SEQ ID NO: 1242835 - DNA, 25 bp, Homo sapien
tacaacaaaggtttagcctcccatc

SEQ ID NO: 1242836 - DNA, 25 bp, Homo sapien
cagaaagtataacagaggttgccag

SEQ ID NO: 1242837 - DNA, 25 bp, Homo sapien
gaaagccgacatataaacaaaccag

SEQ ID NO: 1242838 - DNA, 25 bp, Homo sapien
ttgccaaggaaatagacgtcagtct

SEQ ID NO: 1242839 - DNA, 25 bp, Homo sapien
ggacttcgaaagtgcctggagcctt

SEQ ID NO: 1242840 - DNA, 25 bp, Homo sapien
gagaaatctctggtccaaaggagca

SEQ ID NO: 1242841 - DNA, 25 bp, Homo sapien
gcctaattagtcaatggcagagctg

SEQ ID NO: 1242842 - DNA, 25 bp, Homo sapien
tggagaacagctcccataggaagct

SEQ ID NO: 1242843 - DNA, 25 bp, Homo sapien
caattaatagtagttgagcgctggg

SEQ ID NO: 1242844 - DNA, 25 bp, Homo sapien
tcttcaatgccctttcaattaatag

SEQ ID NO: 1242845 - DNA, 25 bp, Homo sapien
tcaatgccctttcaattaatagtag

SEQ ID NO: 1242846 - DNA, 25 bp, Homo sapien
aattaatagtagttgagcgctgggg

SEQ ID NO: 1242847 - DNA, 25 bp, Homo sapien
aatgacagcacactgaagcctcaaa

SEQ ID NO: 1242848 - DNA, 25 bp, Homo sapien
cctcctgagtgaccaggactatggt

SEQ ID NO: 1242849 - DNA, 25 bp, Homo sapien
tgaccaggactatggttgcttacca

SEQ ID NO: 1242850 - DNA, 25 bp, Homo sapien
gactatggttgcttaccatcatgcc

SEQ ID NO: 1242851 - DNA, 25 bp, Homo sapien
gatataggtattgatctgctcacac

SEQ ID NO: 1242852 - DNA, 25 bp, Homo sapien
ttcacgctgttcaccgactgaaggc

SEQ ID NO: 1242853 - DNA, 25 bp, Homo sapien
cacgccttgcatgcatcaggctgtc

SEQ ID NO: 1242854 - DNA, 25 bp, Homo sapien
tcaatagggtaagtgatcaagtact

SEQ ID NO: 1242855 - DNA, 25 bp, Homo sapien
tctggtacagtttgctttatgcttt

SEQ ID NO: 1242856 - DNA, 25 bp, Homo sapien
cttctggtacagtttgctttatgct

SEQ ID NO: 1242857 - DNA, 25 bp, Homo sapien
tcctctttatttgtggccccaattc

SEQ ID NO: 1242858 - DNA, 25 bp, Homo sapien
tttgtcctctttatttgtggcccca

SEQ ID NO: 1242859 - DNA, 25 bp, Homo sapien
ctcgggccttttcagcccacattta

SEQ ID NO: 1242860 - DNA, 25 bp, Homo sapien
tccaaatagaaactagttcaagagc

SEQ ID NO: 1242861 - DNA, 25 bp, Homo sapien
gcaggctttacagtcagcatgaggc

SEQ ID NO: 1242862 - DNA, 25 bp, Homo sapien
cacacatcccaagtatatcagaggg

SEQ ID NO: 1242863 - DNA, 25 bp, Homo sapien
gcagagcagcaactacacaacttat

SEQ ID NO: 1242864 - DNA, 25 bp, Homo sapien
tacccacgatcagagccatagaagg

SEQ ID NO: 1242865 - DNA, 25 bp, Homo sapien
tttgtgctcgatcaatactgcagag

SEQ ID NO: 1242866 - DNA, 25 bp, Homo sapien
catagaaggcacagattactcacac

SEQ ID NO: 1242867 - DNA, 25 bp, Homo sapien
gcatgagatactccctactctagga

SEQ ID NO: 1242868 - DNA, 25 bp, Homo sapien
caagcttctcagtcatttgcatgag

SEQ ID NO: 1242869 - DNA, 25 bp, Homo sapien
tatacctggcctgccacattcttaa

SEQ ID NO: 1242870 - DNA, 25 bp, Homo sapien
tctaggaatcatctttctccccgtt

SEQ ID NO: 1242871 - DNA, 25 bp, Homo sapien
aagagtaagtgattccttgcaaagc

SEQ ID NO: 1242872 - DNA, 25 bp, Homo sapien
cagcaatagcattgaggagctcttt

SEQ ID NO: 1242873 - DNA, 25 bp, Homo sapien
tcccatggcagaagagtaagtgatt

SEQ ID NO: 1242874 - DNA, 25 bp, Homo sapien
aagctttctgaaacaagccattgat

SEQ ID NO: 1242875 - DNA, 25 bp, Homo sapien
ccaggtaggtgtcacacaggaataa

SEQ ID NO: 1242876 - DNA, 25 bp, Homo sapien
cacaggaataaacttgtccaacaaa

SEQ ID NO: 1242877 - DNA, 25 bp, Homo sapien
cactggagccaaactgaatttatct

SEQ ID NO: 1242878 - DNA, 25 bp, Homo sapien
tgcccaaagacccatccaaatgaca

SEQ ID NO: 1242879 - DNA, 25 bp, Homo sapien
gtgttagtccagtgggttccttctg

SEQ ID NO: 1242880 - DNA, 25 bp, Homo sapien
caaggtgttagtccagtgggttcct

SEQ ID NO: 1242881 - DNA, 25 bp, Homo sapien
tcaaggtgttagtccagtgggttcc

SEQ ID NO: 1242882 - DNA, 25 bp, Homo sapien
tagtccagtgggttccttctgaggc

SEQ ID NO: 1242883 - DNA, 25 bp, Homo sapien
catcaatgacttccttcgtattcca

SEQ ID NO: 1242884 - DNA, 25 bp, Homo sapien
tgtgtgtcctctccatcaatgactt

SEQ ID NO: 1242885 - DNA, 25 bp, Homo sapien
tccttcgtattccaagtacttggca

SEQ ID NO: 1242886 - DNA, 25 bp, Homo sapien
ttgtgtgtcctctccatcaatgact

SEQ ID NO: 1242887 - DNA, 25 bp, Homo sapien
gatggaccccagaaactagacttgc

SEQ ID NO: 1242888 - DNA, 25 bp, Homo sapien
ttgtacatctagtctccaagccatc

SEQ ID NO: 1242889 - DNA, 25 bp, Homo sapien
ctggcttgtaatcttgtacatctag

SEQ ID NO: 1242890 - DNA, 25 bp, Homo sapien
gaaactagacttgcatctggcttgt

SEQ ID NO: 1242891 - DNA, 25 bp, Homo sapien
cctgtatgtaaacctagccctgcaa

SEQ ID NO: 1242892 - DNA, 25 bp, Homo sapien
gagtagtttctcgttatcacaggga

SEQ ID NO: 1242893 - DNA, 25 bp, Homo sapien
cagttcccgggatctttagagacag

SEQ ID NO: 1242894 - DNA, 25 bp, Homo sapien
gatggataaaactcctatgggctcc

SEQ ID NO: 1242895 - DNA, 25 bp, Homo sapien
gaggtccaacacagaaggactcggc

SEQ ID NO: 1242896 - DNA, 25 bp, Homo sapien
tttatcgctgtggtactgcattgcc

SEQ ID NO: 1242897 - DNA, 25 bp, Homo sapien
tgaaaccatggtgaacgcagggcta

SEQ ID NO: 1242898 - DNA, 25 bp, Homo sapien
agtcttccacttgtacgggctcatg

SEQ ID NO: 1242899 - DNA, 25 bp, Homo sapien
tgtggcagagccggaggaacatgtc

SEQ ID NO: 1242900 - DNA, 25 bp, Homo sapien
tggcagagccggaggaacatgtcag

SEQ ID NO: 1242901 - DNA, 25 bp, Homo sapien
gtggcagagccggaggaacatgtca

SEQ ID NO: 1242902 - DNA, 25 bp, Homo sapien
gaggtgtttgtaagccagcgttctg

SEQ ID NO: 1242903 - DNA, 25 bp, Homo sapien
caccctgcgaatgcccatgtcttaa

SEQ ID NO: 1242904 - DNA, 25 bp, Homo sapien
ctgcatgcctatgagaggaggtgtt

SEQ ID NO: 1242905 - DNA, 25 bp, Homo sapien
cagcgttctgtgcaccctgcgaatg

SEQ ID NO: 1242906 - DNA, 25 bp, Homo sapien
cagctgtagtggcacatgtccatag

SEQ ID NO: 1242907 - DNA, 25 bp, Homo sapien
attatccagctgtagtggcacatgt

SEQ ID NO: 1242908 - DNA, 25 bp, Homo sapien
tatccagctgtagtggcacatgtcc

SEQ ID NO: 1242909 - DNA, 25 bp, Homo sapien
ctgtagtggcacatgtccatagtcc

SEQ ID NO: 1242910 - DNA, 25 bp, Homo sapien
tgtaacttccgcttcttaaactcaa

SEQ ID NO: 1242911 - DNA, 25 bp, Homo sapien
tctttgccagcttaggcttctgagt

SEQ ID NO: 1242912 - DNA, 25 bp, Homo sapien
tgagtgtgcacagtatggccagtct

SEQ ID NO: 1242913 - DNA, 25 bp, Homo sapien
cttgctgcgttaagggtatgtggaa

SEQ ID NO: 1242914 - DNA, 25 bp, Homo sapien
tatgtgatggattaagtttgtgatg

SEQ ID NO: 1242915 - DNA, 25 bp, Homo sapien
ttatgtgatggattaagtttgtgat

SEQ ID NO: 1242916 - DNA, 25 bp, Homo sapien
gagaagaatgtatttggtatttatg

SEQ ID NO: 1242917 - DNA, 25 bp, Homo sapien
atgtatttggtatttatgtgatgga

SEQ ID NO: 1242918 - DNA, 25 bp, Homo sapien
ttccttaaatgcctaacacatgcca

SEQ ID NO: 1242919 - DNA, 25 bp, Homo sapien
tctcttgaacagctgagacttgaat

SEQ ID NO: 1242920 - DNA, 25 bp, Homo sapien
tgttccttaaatgcctaacacatgc

SEQ ID NO: 1242921 - DNA, 25 bp, Homo sapien
gagacttgaatagctgagtcaggtg

SEQ ID NO: 1242922 - DNA, 25 bp, Homo sapien
tattcttaagtgtttccatgtactt

SEQ ID NO: 1242923 - DNA, 25 bp, Homo sapien
tcttaagtgtttccatgtacttcat

SEQ ID NO: 1242924 - DNA, 25 bp, Homo sapien
catagtattttccttcacacttgtt

SEQ ID NO: 1242925 - DNA, 25 bp, Homo sapien
cagtttattcttaagtgtttccatg

SEQ ID NO: 1242926 - DNA, 25 bp, Homo sapien
aaggccagactcagagcggagcatc

SEQ ID NO: 1242927 - DNA, 25 bp, Homo sapien
ctgtgctgatggctaaaacaatggc

SEQ ID NO: 1242928 - DNA, 25 bp, Homo sapien
ccccgaacacatgcgagaggaggaa

SEQ ID NO: 1242929 - DNA, 25 bp, Homo sapien
agaaggatgtgccagaaatctgccc

SEQ ID NO: 1242930 - DNA, 25 bp, Homo sapien
gatgcttactcaaaaccacctggag

SEQ ID NO: 1242931 - DNA, 25 bp, Homo sapien
cctgtgtgtcaagggcaaggagacc

SEQ ID NO: 1242932 - DNA, 25 bp, Homo sapien
ggctttatgcttaggacatcgggca

SEQ ID NO: 1242933 - DNA, 25 bp, Homo sapien
cacctgaaggaagaaacgctgcaca

SEQ ID NO: 1242934 - DNA, 25 bp, Homo sapien
ttcactagaggacaaggacgcaagc

SEQ ID NO: 1242935 - DNA, 25 bp, Homo sapien
ggacaaggacacaaacatcagctat

SEQ ID NO: 1242936 - DNA, 25 bp, Homo sapien
cacttgaggaacacactagaggaca

SEQ ID NO: 1242937 - DNA, 25 bp, Homo sapien
cagagacatgagtttgccatcaggc

SEQ ID NO: 1242938 - DNA, 25 bp, Homo sapien
tgcatttcaaactgataaggtaatg

SEQ ID NO: 1242939 - DNA, 25 bp, Homo sapien
tctctgcgtatgtttagcttatgca

SEQ ID NO: 1242940 - DNA, 25 bp, Homo sapien
cacttaactttgtagaattaagcgc

SEQ ID NO: 1242941 - DNA, 25 bp, Homo sapien
tcaaaagtgtataaatccgacagtg

SEQ ID NO: 1242942 - DNA, 25 bp, Homo sapien
gccattctctagggcaatatttttg

SEQ ID NO: 1242943 - DNA, 25 bp, Homo sapien
caagcccacagggcttcacttctaa

SEQ ID NO: 1242944 - DNA, 25 bp, Homo sapien
gacaagcccacagggcttcacttct

SEQ ID NO: 1242945 - DNA, 25 bp, Homo sapien
cagacaagcccacagggcttcactt

SEQ ID NO: 1242946 - DNA, 25 bp, Homo sapien
gcccacagggcttcacttctaatct

SEQ ID NO: 1242947 - DNA, 25 bp, Homo sapien
gtaggtcttgctcatttttgtgaaa

SEQ ID NO: 1242948 - DNA, 25 bp, Homo sapien
ctgataattttttgtggtaggtctt

SEQ ID NO: 1242949 - DNA, 25 bp, Homo sapien
ttttttgtggtaggtcttgctcatt

SEQ ID NO: 1242950 - DNA, 25 bp, Homo sapien
tttgtggtaggtcttgctcattttt

SEQ ID NO: 1242951 - DNA, 25 bp, Homo sapien
tagggagaacgattgcacaaccgcc

SEQ ID NO: 1242952 - DNA, 25 bp, Homo sapien
ttctcagagttgacgtagggagaac

SEQ ID NO: 1242953 - DNA, 25 bp, Homo sapien
gttgacgtagggagaacgattgcac

SEQ ID NO: 1242954 - DNA, 25 bp, Homo sapien
gaacgattgcacaaccgccctttct

SEQ ID NO: 1242955 - DNA, 25 bp, Homo sapien
tagggatgctctccctcgtatctgg

SEQ ID NO: 1242956 - DNA, 25 bp, Homo sapien
atgctctccctcgtatctggtattc

SEQ ID NO: 1242957 - DNA, 25 bp, Homo sapien
caggcaggactggtgtcaggtgaag

SEQ ID NO: 1242958 - DNA, 25 bp, Homo sapien
gggatgctctccctcgtatctggta

SEQ ID NO: 1242959 - DNA, 25 bp, Homo sapien
caaccagtaatgaggcagctagcag

SEQ ID NO: 1242960 - DNA, 25 bp, Homo sapien
taatgaggcagctagcagatacaat

SEQ ID NO: 1242961 - DNA, 25 bp, Homo sapien
ggtgatgttttcacaaccagtaatg

SEQ ID NO: 1242962 - DNA, 25 bp, Homo sapien
ttttcacaaccagtaatgaggcagc

SEQ ID NO: 1242963 - DNA, 25 bp, Homo sapien
gtgctaaagagagtagtggttgatt

SEQ ID NO: 1242964 - DNA, 25 bp, Homo sapien
acaggccccacgcaactccaaattc

SEQ ID NO: 1242965 - DNA, 25 bp, Homo sapien
ctaatctgagacaaagtaagtctct

SEQ ID NO: 1242966 - DNA, 25 bp, Homo sapien
ggcattggataaatgctccatccca

SEQ ID NO: 1242967 - DNA, 25 bp, Homo sapien
atgctccatcccaaatgggagaaac

SEQ ID NO: 1242968 - DNA, 25 bp, Homo sapien
tcttctacagacaggcttcccctgg

SEQ ID NO: 1242969 - DNA, 25 bp, Homo sapien
gataagcaatcgacaagcttccaag

SEQ ID NO: 1242970 - DNA, 25 bp, Homo sapien
ttttatcctcggagtggagcctggg

SEQ ID NO: 1242971 - DNA, 25 bp, Homo sapien
gagctgtaggctctggataagcaat

SEQ ID NO: 1242972 - DNA, 25 bp, Homo sapien
aggggatgaggtgagtcttccattc

SEQ ID NO: 1242973 - DNA, 25 bp, Homo sapien
tctttctgttcacctccagcacagt

SEQ ID NO: 1242974 - DNA, 25 bp, Homo sapien
ctgttcacctccagcacagtgcaga

SEQ ID NO: 1242975 - DNA, 25 bp, Homo sapien
gatgaggtgagtcttccattcttcc

SEQ ID NO: 1242976 - DNA, 25 bp, Homo sapien
tattgttcccatttggagcatggtc

SEQ ID NO: 1242977 - DNA, 25 bp, Homo sapien
tagaataagggtcccctctggaggc

SEQ ID NO: 1242978 - DNA, 25 bp, Homo sapien
gggtcccctctggaggccatgtgaa

SEQ ID NO: 1242979 - DNA, 25 bp, Homo sapien
tggtcccaaagcaccccttagaata

SEQ ID NO: 1242980 - DNA, 25 bp, Homo sapien
cattcattatgatctggttttggta

SEQ ID NO: 1242981 - DNA, 25 bp, Homo sapien
ggtaattctatattagactgcatat

SEQ ID NO: 1242982 - DNA, 25 bp, Homo sapien
gactgcatattctaattctagccac

SEQ ID NO: 1242983 - DNA, 25 bp, Homo sapien
tatctcaggccaaactttagttgtg

SEQ ID NO: 1242984 - DNA, 25 bp, Homo sapien
gaataaacccttgcttaggtggcac

SEQ ID NO: 1242985 - DNA, 25 bp, Homo sapien
taaattaacgtagagcctgtgactg

SEQ ID NO: 1242986 - DNA, 25 bp, Homo sapien
tgtagcacctgggttaacaaacgag

SEQ ID NO: 1242987 - DNA, 25 bp, Homo sapien
tcgattttctaagcagtccagaggc

SEQ ID NO: 1242988 - DNA, 25 bp, Homo sapien
tcacacactggctactcacatactg

SEQ ID NO: 1242989 - DNA, 25 bp, Homo sapien
gctaattccgttcactgcagctgtg

SEQ ID NO: 1242990 - DNA, 25 bp, Homo sapien
catactgcacgcaatgactcaacat

SEQ ID NO: 1242991 - DNA, 25 bp, Homo sapien
ctggttgcgttgtgtcttattgcta

SEQ ID NO: 1242992 - DNA, 25 bp, Homo sapien
gttgaattagagctgatgtcaaatt

SEQ ID NO: 1242993 - DNA, 25 bp, Homo sapien
tgttgaattagagctgatgtcaaat

SEQ ID NO: 1242994 - DNA, 25 bp, Homo sapien
ctgtgttgaattagagctgatgtca

SEQ ID NO: 1242995 - DNA, 25 bp, Homo sapien
gatcaaaacccgtaggcctgaatgt

SEQ ID NO: 1242996 - DNA, 25 bp, Homo sapien
taggcctgaatgtttgggcagaaat

SEQ ID NO: 1242997 - DNA, 25 bp, Homo sapien
acccgtaggcctgaatgtttgggca

SEQ ID NO: 1242998 - DNA, 25 bp, Homo sapien
tcatgatcaaaacccgtaggcctga

SEQ ID NO: 1242999 - DNA, 25 bp, Homo sapien
tagatgtctggatgagagcctcagc

SEQ ID NO: 1243000 - DNA, 25 bp, Homo sapien
taatgcccagacttctctcagggag

SEQ ID NO: 1243001 - DNA, 25 bp, Homo sapien
cagacattgtggagcagagacaccc

SEQ ID NO: 1243002 - DNA, 25 bp, Homo sapien
tacacagaacctcgcatgagtggat

SEQ ID NO: 1243003 - DNA, 25 bp, Homo sapien
gagctcaagtcaccatgtttgctaa

SEQ ID NO: 1243004 - DNA, 25 bp, Homo sapien
tctgaactgagaggatactgaatgt

SEQ ID NO: 1243005 - DNA, 25 bp, Homo sapien
tccaaggcacaagttacaggatctc

SEQ ID NO: 1243006 - DNA, 25 bp, Homo sapien
gaacctctacttgttggtctgacag

SEQ ID NO: 1243007 - DNA, 25 bp, Homo sapien
agtacaatagcttcttgcctatgtc

SEQ ID NO: 1243008 - DNA, 25 bp, Homo sapien
catgactgtggattgctgtgtgaag

SEQ ID NO: 1243009 - DNA, 25 bp, Homo sapien
atcatgactgtggattgctgtgtga

SEQ ID NO: 1243010 - DNA, 25 bp, Homo sapien
ctgtgtgaagttgatcttccaagta

SEQ ID NO: 1243011 - DNA, 25 bp, Homo sapien
tttgccttgcttcatctgcaagatg

SEQ ID NO: 1243012 - DNA, 25 bp, Homo sapien
cacattccaatgtggacttagatta

SEQ ID NO: 1243013 - DNA, 25 bp, Homo sapien
caatgtggacttagattaattgggt

SEQ ID NO: 1243014 - DNA, 25 bp, Homo sapien
tagattaattgggtacctcacatgc

SEQ ID NO: 1243015 - DNA, 25 bp, Homo sapien
cctcacatgcacagtaggctctggc

SEQ ID NO: 1243016 - DNA, 25 bp, Homo sapien
ttcgaaggtgatcgtggccctctgc

SEQ ID NO: 1243017 - DNA, 25 bp, Homo sapien
gtgggcacattgttaaggagcacat

SEQ ID NO: 1243018 - DNA, 25 bp, Homo sapien
taaggagcacattcgaaggtgatcg

SEQ ID NO: 1243019 - DNA, 25 bp, Homo sapien
cctccgagggatcgaagagcgtgtg

SEQ ID NO: 1243020 - DNA, 25 bp, Homo sapien
tgtgcttcgtggacaccagctgtca

SEQ ID NO: 1243021 - DNA, 25 bp, Homo sapien
tcaggcttgtgcttcgtggacacca

SEQ ID NO: 1243022 - DNA, 25 bp, Homo sapien
ggcttgtgcttcgtggacaccagct

SEQ ID NO: 1243023 - DNA, 25 bp, Homo sapien
cttgtgcttcgtggacaccagctgt

SEQ ID NO: 1243024 - DNA, 25 bp, Homo sapien
gggaaaccagccttactgcagggaa

SEQ ID NO: 1243025 - DNA, 25 bp, Homo sapien
tcaagaaagtcagcccagtgtcagg

SEQ ID NO: 1243026 - DNA, 25 bp, Homo sapien
tacaaaaatcatcagggcccggtgg

SEQ ID NO: 1243027 - DNA, 25 bp, Homo sapien
tccacagtggccatgagttcttagc

SEQ ID NO: 1243028 - DNA, 25 bp, Homo sapien
aatgtttcgtgtgatgtaactgtac

SEQ ID NO: 1243029 - DNA, 25 bp, Homo sapien
aacagaaagatgagatgaataaacc

SEQ ID NO: 1243030 - DNA, 25 bp, Homo sapien
tgaataaacctgatacatttttcta

SEQ ID NO: 1243031 - DNA, 25 bp, Homo sapien
caattaatcatcctgtaacagaaag

SEQ ID NO: 1243032 - DNA, 25 bp, Homo sapien
caatatctggttgagaattctccct

SEQ ID NO: 1243033 - DNA, 25 bp, Homo sapien
tattgtggatatattcatgatgagc

SEQ ID NO: 1243034 - DNA, 25 bp, Homo sapien
gaatgggccattgctgggctgatct

SEQ ID NO: 1243035 - DNA, 25 bp, Homo sapien
tgatgagcaggaacaccacgaaatc

SEQ ID NO: 1243036 - DNA, 25 bp, Homo sapien
ctttgtgctgtaggttgattatgac

SEQ ID NO: 1243037 - DNA, 25 bp, Homo sapien
gtaatttcctaacatgagcagtagc

SEQ ID NO: 1243038 - DNA, 25 bp, Homo sapien
ttgattatgaccattggtgaaggct

SEQ ID NO: 1243039 - DNA, 25 bp, Homo sapien
gcagtagcagcaatttcctgattcc

SEQ ID NO: 1243040 - DNA, 25 bp, Homo sapien
ggctcagttgattcttgtgccctta

SEQ ID NO: 1243041 - DNA, 25 bp, Homo sapien
aggctcagttgattcttgtgccctt

SEQ ID NO: 1243042 - DNA, 25 bp, Homo sapien
gaaaaaggcacaatgttaaaggctg

SEQ ID NO: 1243043 - DNA, 25 bp, Homo sapien
tgaccactgaaagtcgacggctgtg

SEQ ID NO: 1243044 - DNA, 25 bp, Homo sapien
cccaaagttgaccactgaaagtcga

SEQ ID NO: 1243045 - DNA, 25 bp, Homo sapien
tcgacggctgtgttgttgaaaaagg

SEQ ID NO: 1243046 - DNA, 25 bp, Homo sapien
aatgggggactatatcccactggga

SEQ ID NO: 1243047 - DNA, 25 bp, Homo sapien
cagggatgaatgggggactatatcc

SEQ ID NO: 1243048 - DNA, 25 bp, Homo sapien
ggatgaatgggggactatatcccac

SEQ ID NO: 1243049 - DNA, 25 bp, Homo sapien
tgaatgggggactatatcccactgg

SEQ ID NO: 1243050 - DNA, 25 bp, Homo sapien
gtcccttcccctgagaagtgctgct

SEQ ID NO: 1243051 - DNA, 25 bp, Homo sapien
tgtcccttcccctgagaagtgctgc

SEQ ID NO: 1243052 - DNA, 25 bp, Homo sapien
tgctccgcaggaggcaatattcctc

SEQ ID NO: 1243053 - DNA, 25 bp, Homo sapien
agtgtgccacccctatagcttaggg

SEQ ID NO: 1243054 - DNA, 25 bp, Homo sapien
aactccagcgaaggctctgacctaa

SEQ ID NO: 1243055 - DNA, 25 bp, Homo sapien
ggtgccaggcaactccctagtgtgc

SEQ ID NO: 1243056 - DNA, 25 bp, Homo sapien
agacaatccagagcttgatgtcaga

SEQ ID NO: 1243057 - DNA, 25 bp, Homo sapien
tcagcagacaatccagagcttgatg

SEQ ID NO: 1243058 - DNA, 25 bp, Homo sapien
gggcctggagttgaacagtgaactc

SEQ ID NO: 1243059 - DNA, 25 bp, Homo sapien
tggggcctggagttgaacagtgaac

SEQ ID NO: 1243060 - DNA, 25 bp, Homo sapien
tgaagcgtcccttaaagtcctctcc

SEQ ID NO: 1243061 - DNA, 25 bp, Homo sapien
ctgaagcgtcccttaaagtcctctc

SEQ ID NO: 1243062 - DNA, 25 bp, Homo sapien
cctgaagcgtcccttaaagtcctct

SEQ ID NO: 1243063 - DNA, 25 bp, Homo sapien
ctcaaacctgaagcgtcccttaaag

SEQ ID NO: 1243064 - DNA, 25 bp, Homo sapien
attgggtgctagagcagccttcccc

SEQ ID NO: 1243065 - DNA, 25 bp, Homo sapien
cactaggcgtattttgggctcagac

SEQ ID NO: 1243066 - DNA, 25 bp, Homo sapien
tcttctcatggctacgctggactgt

SEQ ID NO: 1243067 - DNA, 25 bp, Homo sapien
tgaagagctcgacaacactggcttg

SEQ ID NO: 1243068 - DNA, 25 bp, Homo sapien
tccaagcacattgccgcactaggcg

SEQ ID NO: 1243069 - DNA, 25 bp, Homo sapien
tacaacctaagacagtgaggggtcc

SEQ ID NO: 1243070 - DNA, 25 bp, Homo sapien
acaacctaagacagtgaggggtcct

SEQ ID NO: 1243071 - DNA, 25 bp, Homo sapien
ctacaacctaagacagtgaggggtc

SEQ ID NO: 1243072 - DNA, 25 bp, Homo sapien
caacctaagacagtgaggggtcctc

SEQ ID NO: 1243073 - DNA, 25 bp, Homo sapien
tgcaggaaacatcgcaatgggacac

SEQ ID NO: 1243074 - DNA, 25 bp, Homo sapien
gcaggaaacatcgcaatgggacaca

SEQ ID NO: 1243075 - DNA, 25 bp, Homo sapien
tttgcaggaaacatcgcaatgggac

SEQ ID NO: 1243076 - DNA, 25 bp, Homo sapien
ttgcaggaaacatcgcaatgggaca

SEQ ID NO: 1243077 - DNA, 25 bp, Homo sapien
tactccagagctagtctcatgaagg

SEQ ID NO: 1243078 - DNA, 25 bp, Homo sapien
cagcagtctggatttaaggcccgaa

SEQ ID NO: 1243079 - DNA, 25 bp, Homo sapien
tataaacaaaagagccggcctggaa

SEQ ID NO: 1243080 - DNA, 25 bp, Homo sapien
tatggacatgctctcaaacggcttg

SEQ ID NO: 1243081 - DNA, 25 bp, Homo sapien
tcatggtggaaggtggcatggtggc

SEQ ID NO: 1243082 - DNA, 25 bp, Homo sapien
agaatgaaagccaagtgaaacgggt

SEQ ID NO: 1243083 - DNA, 25 bp, Homo sapien
aggtggcatggtggctgcaagagag

SEQ ID NO: 1243084 - DNA, 25 bp, Homo sapien
tggaaggtggcatggtggctgcaag

SEQ ID NO: 1243085 - DNA, 25 bp, Homo sapien
tgggagcaccggcggtcccagccat

SEQ ID NO: 1243086 - DNA, 25 bp, Homo sapien
gtgggagcaccggcggtcccagcca

SEQ ID NO: 1243087 - DNA, 25 bp, Homo sapien
actggtgagtcagccaaaccagcaa

SEQ ID NO: 1243088 - DNA, 25 bp, Homo sapien
tctccaaaggcacactggtgagtca

SEQ ID NO: 1243089 - DNA, 25 bp, Homo sapien
tggctttgcctctaactggcctgga

SEQ ID NO: 1243090 - DNA, 25 bp, Homo sapien
cttttctggcgctgcagcccaagga

SEQ ID NO: 1243091 - DNA, 25 bp, Homo sapien
gagccctggcctcggtcatgtatgt

SEQ ID NO: 1243092 - DNA, 25 bp, Homo sapien
taactggcctggatacagctctgcc

SEQ ID NO: 1243093 - DNA, 25 bp, Homo sapien
tcttgggcactcacatatgactgtg

SEQ ID NO: 1243094 - DNA, 25 bp, Homo sapien
tagaggagaggcagtcagtctcaca

SEQ ID NO: 1243095 - DNA, 25 bp, Homo sapien
agaaagtgaatagcttctcttgggc

SEQ ID NO: 1243096 - DNA, 25 bp, Homo sapien
tatgactgtgatgctcaatagagcc

SEQ ID NO: 1243097 - DNA, 25 bp, Homo sapien
tcaatcaactctgggttggggcagg

SEQ ID NO: 1243098 - DNA, 25 bp, Homo sapien
gactccctgaaaaggggtctggcag

SEQ ID NO: 1243099 - DNA, 25 bp, Homo sapien
gagagaggcccatcttagtgggggt

SEQ ID NO: 1243100 - DNA, 25 bp, Homo sapien
gggggaactcagtgtccaacctgga

SEQ ID NO: 1243101 - DNA, 25 bp, Homo sapien
agggacctggactcgactgaactgg

SEQ ID NO: 1243102 - DNA, 25 bp, Homo sapien
ggtggactcgatctgcttctcaaag

SEQ ID NO: 1243103 - DNA, 25 bp, Homo sapien
caaaatcaattggacgacgacaggt

SEQ ID NO: 1243104 - DNA, 25 bp, Homo sapien
aagcttggcttagggagtaggcaca

SEQ ID NO: 1243105 - DNA, 25 bp, Homo sapien
tgtgtttctaatcctcatcccacac

SEQ ID NO: 1243106 - DNA, 25 bp, Homo sapien
tctctgccttgaataacttcactca

SEQ ID NO: 1243107 - DNA, 25 bp, Homo sapien
aagccaaactggaacgtcactaatt

SEQ ID NO: 1243108 - DNA, 25 bp, Homo sapien
aggaccaccacctcagtattttgcc

SEQ ID NO: 1243109 - DNA, 25 bp, Homo sapien
gaatgaaaagggaaacagaataaca

SEQ ID NO: 1243110 - DNA, 25 bp, Homo sapien
cttgatagttgaatgaaaagggaaa

SEQ ID NO: 1243111 - DNA, 25 bp, Homo sapien
tgaaaagggaaacagaataacagac

SEQ ID NO: 1243112 - DNA, 25 bp, Homo sapien
ttgatagttgaatgaaaagggaaac

SEQ ID NO: 1243113 - DNA, 25 bp, Homo sapien
cattaggactgattccaagaataat

SEQ ID NO: 1243114 - DNA, 25 bp, Homo sapien
ccacgttttgggcaatctggagatg

SEQ ID NO: 1243115 - DNA, 25 bp, Homo sapien
gatgtctctggacggtcaaagggtt

SEQ ID NO: 1243116 - DNA, 25 bp, Homo sapien
gagtctctccttagcccgtttgaaa

SEQ ID NO: 1243117 - DNA, 25 bp, Homo sapien
aacttgcaggtcaacatccctaccg

SEQ ID NO: 1243118 - DNA, 25 bp, Homo sapien
ccctcataatgcttgtgcatactgt

SEQ ID NO: 1243119 - DNA, 25 bp, Homo sapien
gaaacaggcttcatacgatcccagt

SEQ ID NO: 1243120 - DNA, 25 bp, Homo sapien
ctgtatttgttgaaatggcctcctc

SEQ ID NO: 1243121 - DNA, 25 bp, Homo sapien
ccacccatggcaaatgatattccta

SEQ ID NO: 1243122 - DNA, 25 bp, Homo sapien
ctaagtgtatggcttggatcggaat

SEQ ID NO: 1243123 - DNA, 25 bp, Homo sapien
taaacactgaacacgtcgctggtat

SEQ ID NO: 1243124 - DNA, 25 bp, Homo sapien
ttctttaggcctgtttctccaccca

SEQ ID NO: 1243125 - DNA, 25 bp, Homo sapien
tcccaggcggtcacgatatcgatga

SEQ ID NO: 1243126 - DNA, 25 bp, Homo sapien
gatatcgatgacaaacttagtgcaa

SEQ ID NO: 1243127 - DNA, 25 bp, Homo sapien
tactcccaggcggtcacgatatcga

SEQ ID NO: 1243128 - DNA, 25 bp, Homo sapien
gcggtcacgatatcgatgacaaact

SEQ ID NO: 1243129 - DNA, 25 bp, Homo sapien
ttccttggcaagtggagcaagggct

SEQ ID NO: 1243130 - DNA, 25 bp, Homo sapien
ggacattccttggcaagtggagcaa

SEQ ID NO: 1243131 - DNA, 25 bp, Homo sapien
agggctccattcagaacctgcttgc

SEQ ID NO: 1243132 - DNA, 25 bp, Homo sapien
cattccttggcaagtggagcaaggg

SEQ ID NO: 1243133 - DNA, 25 bp, Homo sapien
cagccccacccttatctcccttcac

SEQ ID NO: 1243134 - DNA, 25 bp, Homo sapien
cttaactgcgtgattaaccctgtga

SEQ ID NO: 1243135 - DNA, 25 bp, Homo sapien
ctgcgtgattaaccctgtgaatctc

SEQ ID NO: 1243136 - DNA, 25 bp, Homo sapien
caccttaactgcgtgattaaccctg

SEQ ID NO: 1243137 - DNA, 25 bp, Homo sapien
cttaaggagagcaggaagcatttca

SEQ ID NO: 1243138 - DNA, 25 bp, Homo sapien
ggagagcaggaagcatttcagtcat

SEQ ID NO: 1243139 - DNA, 25 bp, Homo sapien
taaggagagcaggaagcatttcagt

SEQ ID NO: 1243140 - DNA, 25 bp, Homo sapien
aaggagagcaggaagcatttcagtc

SEQ ID NO: 1243141 - DNA, 25 bp, Homo sapien
tgaaggtgctttcccatgtggtaaa

SEQ ID NO: 1243142 - DNA, 25 bp, Homo sapien
aaatcccgttgggtttagcactgtg

SEQ ID NO: 1243143 - DNA, 25 bp, Homo sapien
cccatgtggtaaacagagctttgct

SEQ ID NO: 1243144 - DNA, 25 bp, Homo sapien
cccgttgggtttagcactgtgcaca

SEQ ID NO: 1243145 - DNA, 25 bp, Homo sapien
ctttgacagcgggcttctgatggcc

SEQ ID NO: 1243146 - DNA, 25 bp, Homo sapien
tgatggccttcagcttccaacagca

SEQ ID NO: 1243147 - DNA, 25 bp, Homo sapien
agcttccaacagcagtggaagtgca

SEQ ID NO: 1243148 - DNA, 25 bp, Homo sapien
acagcagtggaagtgcaggagtctt

SEQ ID NO: 1243149 - DNA, 25 bp, Homo sapien
caccctccattagacgtctgcacat

SEQ ID NO: 1243150 - DNA, 25 bp, Homo sapien
tggcattccaacaccctccattaga

SEQ ID NO: 1243151 - DNA, 25 bp, Homo sapien
tctacgtccagtggcattccaacac

SEQ ID NO: 1243152 - DNA, 25 bp, Homo sapien
tagtctacgtccagtggcattccaa

SEQ ID NO: 1243153 - DNA, 25 bp, Homo sapien
ctgactttgcagagacaaaggaagc

SEQ ID NO: 1243154 - DNA, 25 bp, Homo sapien
ggtccaaaagtccaaggttgatgca

SEQ ID NO: 1243155 - DNA, 25 bp, Homo sapien
gcagccgactcaggagatccatagt

SEQ ID NO: 1243156 - DNA, 25 bp, Homo sapien
gatgcagtcaccaggggagaatgct

SEQ ID NO: 1243157 - DNA, 25 bp, Homo sapien
ctgcagagagcgttgtcacagcttg

SEQ ID NO: 1243158 - DNA, 25 bp, Homo sapien
caaagcctgcagagagcgttgtcac

SEQ ID NO: 1243159 - DNA, 25 bp, Homo sapien
gcagagagcgttgtcacagcttgcc

SEQ ID NO: 1243160 - DNA, 25 bp, Homo sapien
aaagcctgcagagagcgttgtcaca

SEQ ID NO: 1243161 - DNA, 25 bp, Homo sapien
taatggatgcaaagtgaagcctgca

SEQ ID NO: 1243162 - DNA, 25 bp, Homo sapien
tcaaagaaatccttcgagggtcgct

SEQ ID NO: 1243163 - DNA, 25 bp, Homo sapien
ttagcatgcaccttgtcagaaactg

SEQ ID NO: 1243164 - DNA, 25 bp, Homo sapien
caggagggcacttcttgtaaaacca

SEQ ID NO: 1243165 - DNA, 25 bp, Homo sapien
tcactgtgttggagtggcaccagga

SEQ ID NO: 1243166 - DNA, 25 bp, Homo sapien
gcaccaggagtctgcgcttctgcca

SEQ ID NO: 1243167 - DNA, 25 bp, Homo sapien
tcctgtcccttgttgatgggctcca

SEQ ID NO: 1243168 - DNA, 25 bp, Homo sapien
gtacccgctggaagccaaccaggat

SEQ ID NO: 1243169 - DNA, 25 bp, Homo sapien
atctaaaactgaggtctccacgagc

SEQ ID NO: 1243170 - DNA, 25 bp, Homo sapien
tctaaaactgaggtctccacgagca

SEQ ID NO: 1243171 - DNA, 25 bp, Homo sapien
ctaaaactgaggtctccacgagcat

SEQ ID NO: 1243172 - DNA, 25 bp, Homo sapien
ggagcgatgagtctgggcacgctga

SEQ ID NO: 1243173 - DNA, 25 bp, Homo sapien
tgggcacgctgaatggggtcggtca

SEQ ID NO: 1243174 - DNA, 25 bp, Homo sapien
caggagcgatgagtctgggcacgct

SEQ ID NO: 1243175 - DNA, 25 bp, Homo sapien
agcgatgagtctgggcacgctgaat

SEQ ID NO: 1243176 - DNA, 25 bp, Homo sapien
ctgaaggttatagggccacaacgtc

SEQ ID NO: 1243177 - DNA, 25 bp, Homo sapien
ggccacaacgtcttaacaatgtgta

SEQ ID NO: 1243178 - DNA, 25 bp, Homo sapien
gttatagggccacaacgtcttaaca

SEQ ID NO: 1243179 - DNA, 25 bp, Homo sapien
tagggccacaacgtcttaacaatgt

SEQ ID NO: 1243180 - DNA, 25 bp, Homo sapien
ttggtagcacctgcgctagattgtt

SEQ ID NO: 1243181 - DNA, 25 bp, Homo sapien
caggtcattgtaattccactgagcc

SEQ ID NO: 1243182 - DNA, 25 bp, Homo sapien
gtcattgtaattccactgagcccca

SEQ ID NO: 1243183 - DNA, 25 bp, Homo sapien
cccagagatgggctctgttggtagc

SEQ ID NO: 1243184 - DNA, 25 bp, Homo sapien
gctcggtcagcactgccttgtctaa

SEQ ID NO: 1243185 - DNA, 25 bp, Homo sapien
ggcccctttggctcccacacttgag

SEQ ID NO: 1243186 - DNA, 25 bp, Homo sapien
tgcctgccaccgtaaagttgtccca

SEQ ID NO: 1243187 - DNA, 25 bp, Homo sapien
aggtgctggcaccacgctcggtcag

SEQ ID NO: 1243188 - DNA, 25 bp, Homo sapien
ggtcccctggagagctggggacatg

SEQ ID NO: 1243189 - DNA, 25 bp, Homo sapien
cctggagagctggggacatgtgtac

SEQ ID NO: 1243190 - DNA, 25 bp, Homo sapien
ccctggagagctggggacatgtgta

SEQ ID NO: 1243191 - DNA, 25 bp, Homo sapien
tcagggtcccctggagagctgggga

SEQ ID NO: 1243192 - DNA, 25 bp, Homo sapien
ctcgccaccagtgaccagctgcggg

SEQ ID NO: 1243193 - DNA, 25 bp, Homo sapien
tatgcctgtgttggcgctcatctcg

SEQ ID NO: 1243194 - DNA, 25 bp, Homo sapien
gggctccatggcaccatccaacgtc

SEQ ID NO: 1243195 - DNA, 25 bp, Homo sapien
tggcaccatccaacgtccttgcact

SEQ ID NO: 1243196 - DNA, 25 bp, Homo sapien
aacctcacccctgcaacaagttgct

SEQ ID NO: 1243197 - DNA, 25 bp, Homo sapien
ctgctaacctcacccctgcaacaag

SEQ ID NO: 1243198 - DNA, 25 bp, Homo sapien
taacctcacccctgcaacaagttgc

SEQ ID NO: 1243199 - DNA, 25 bp, Homo sapien
gctaacctcacccctgcaacaagtt

SEQ ID NO: 1243200 - DNA, 25 bp, Homo sapien
ctgtactctcagctgtgccaattcc

SEQ ID NO: 1243201 - DNA, 25 bp, Homo sapien
gctgtgccaattccagctccttcag

SEQ ID NO: 1243202 - DNA, 25 bp, Homo sapien
ttcagctgtgcaggacacgaggact

SEQ ID NO: 1243203 - DNA, 25 bp, Homo sapien
aggacacgaggactctgggggccat

SEQ ID NO: 1243204 - DNA, 25 bp, Homo sapien
tccttgcccctagtctgatggctct

SEQ ID NO: 1243205 - DNA, 25 bp, Homo sapien
cccctagtctgatggttctccttgc

SEQ ID NO: 1243206 - DNA, 25 bp, Homo sapien
tgatggctctatgcctcttccccaa

SEQ ID NO: 1243207 - DNA, 25 bp, Homo sapien
cccaaatgcttaacagcttcacatt

SEQ ID NO: 1243208 - DNA, 25 bp, Homo sapien
agttagccagaaaggcaactggaga

SEQ ID NO: 1243209 - DNA, 25 bp, Homo sapien
tccacatatcaatcttggtgaaggg

SEQ ID NO: 1243210 - DNA, 25 bp, Homo sapien
cagccagcctcggttttacaagtgt

SEQ ID NO: 1243211 - DNA, 25 bp, Homo sapien
gggctctagagatccaaagcaagtt

SEQ ID NO: 1243212 - DNA, 25 bp, Homo sapien
tactgaacaggtgtcaaggtcacag

SEQ ID NO: 1243213 - DNA, 25 bp, Homo sapien
ctactgaacaggtgtcaaggtcaca

SEQ ID NO: 1243214 - DNA, 25 bp, Homo sapien
tgctgccccttggtactaaccccat

SEQ ID NO: 1243215 - DNA, 25 bp, Homo sapien
atgctcccagtttatttgcaaggat

SEQ ID NO: 1243216 - DNA, 25 bp, Homo sapien
ttggatgctcccagtttatttgcaa

SEQ ID NO: 1243217 - DNA, 25 bp, Homo sapien
ggatgctcccagtttatttgcaagg

SEQ ID NO: 1243218 - DNA, 25 bp, Homo sapien
gatgctcccagtttatttgcaagga

SEQ ID NO: 1243219 - DNA, 25 bp, Homo sapien
ggaaactgattgctgtctgagcctt

SEQ ID NO: 1243220 - DNA, 25 bp, Homo sapien
tgattgctgtctgagccttttatca

SEQ ID NO: 1243221 - DNA, 25 bp, Homo sapien
attgctgtctgagccttttatcagg

SEQ ID NO: 1243222 - DNA, 25 bp, Homo sapien
aactgattgctgtctgagcctttta

SEQ ID NO: 1243223 - DNA, 25 bp, Homo sapien
ctctgacggtcgttcagcttgctct

SEQ ID NO: 1243224 - DNA, 25 bp, Homo sapien
tctgacggtcgttcagcttgctctt

SEQ ID NO: 1243225 - DNA, 25 bp, Homo sapien
ctgacggtcgttcagcttgctcttt

SEQ ID NO: 1243226 - DNA, 25 bp, Homo sapien
ctgagttattgtgatcgttataaca

SEQ ID NO: 1243227 - DNA, 25 bp, Homo sapien
gttattgtgatcgttataacaacat

SEQ ID NO: 1243228 - DNA, 25 bp, Homo sapien
cctggattgggcctgagttattgtg

SEQ ID NO: 1243229 - DNA, 25 bp, Homo sapien
ctggattgggcctgagttattgtga

SEQ ID NO: 1243230 - DNA, 25 bp, Homo sapien
acttgctccactgtctctaattctg

SEQ ID NO: 1243231 - DNA, 25 bp, Homo sapien
aattctgaggtctgtgctaactgaa

SEQ ID NO: 1243232 - DNA, 25 bp, Homo sapien
cctgggctgacacttgctccactgt

SEQ ID NO: 1243233 - DNA, 25 bp, Homo sapien
ggaaagcattctggaccatagacct

SEQ ID NO: 1243234 - DNA, 25 bp, Homo sapien
agtgaccagtgccaagaaggaggat

SEQ ID NO: 1243235 - DNA, 25 bp, Homo sapien
caaagtgaccagtgccaagaaggag

SEQ ID NO: 1243236 - DNA, 25 bp, Homo sapien
gaccagtgccaagaaggaggataaa

SEQ ID NO: 1243237 - DNA, 25 bp, Homo sapien
ctttgcaaagtgaccagtgccaaga

SEQ ID NO: 1243238 - DNA, 25 bp, Homo sapien
caagtcgctgctgaactgatggagc

SEQ ID NO: 1243239 - DNA, 25 bp, Homo sapien
gggaggtttacatggctgctccttc

SEQ ID NO: 1243240 - DNA, 25 bp, Homo sapien
taagagggcaccattcctgcgtgga

SEQ ID NO: 1243241 - DNA, 25 bp, Homo sapien
gagctcccgttgtcttgataagagg

SEQ ID NO: 1243242 - DNA, 25 bp, Homo sapien
cttttccttgacctagcccagcttg

SEQ ID NO: 1243243 - DNA, 25 bp, Homo sapien
ttggcttttccttgacctagcccag

SEQ ID NO: 1243244 - DNA, 25 bp, Homo sapien
ttttccttgacctagcccagcttga

SEQ ID NO: 1243245 - DNA, 25 bp, Homo sapien
ggcttttccttgacctagcccagct

SEQ ID NO: 1243246 - DNA, 25 bp, Homo sapien
tgcagtcctggatcccaaattcttt

SEQ ID NO: 1243247 - DNA, 25 bp, Homo sapien
cagatgcttgttttggagttagaag

SEQ ID NO: 1243248 - DNA, 25 bp, Homo sapien
ttgtctttcattgcagtcctggatc

SEQ ID NO: 1243249 - DNA, 25 bp, Homo sapien
cacagatgcttgttttggagttaga

SEQ ID NO: 1243250 - DNA, 25 bp, Homo sapien
cccaaactggaagaagatatcctac

SEQ ID NO: 1243251 - DNA, 25 bp, Homo sapien
cactctgacggccatcctgggttct

SEQ ID NO: 1243252 - DNA, 25 bp, Homo sapien
ttctgctgacgccatagctgcaacc

SEQ ID NO: 1243253 - DNA, 25 bp, Homo sapien
cagagcacgactatccagggtctgt

SEQ ID NO: 1243254 - DNA, 25 bp, Homo sapien
atctggtccacctgacagttaaatt

SEQ ID NO: 1243255 - DNA, 25 bp, Homo sapien
ctgtgtggccgagtgaaaagctgca

SEQ ID NO: 1243256 - DNA, 25 bp, Homo sapien
tcttagtctgcaccatggacgttcg

SEQ ID NO: 1243257 - DNA, 25 bp, Homo sapien
tggacgttcgaaacaccagagcact

SEQ ID NO: 1243258 - DNA, 25 bp, Homo sapien
gctttgacagctgacagtgatccca

SEQ ID NO: 1243259 - DNA, 25 bp, Homo sapien
ccagccggatgtgttcagccatctt

SEQ ID NO: 1243260 - DNA, 25 bp, Homo sapien
cttctgctagaaggagctgaaagtg

SEQ ID NO: 1243261 - DNA, 25 bp, Homo sapien
ggttcccagccggatgtgttcagcc

SEQ ID NO: 1243262 - DNA, 25 bp, Homo sapien
tctgctagaaggagctgaaagtgct

SEQ ID NO: 1243263 - DNA, 25 bp, Homo sapien
tataaaattcccagaatgggcattc

SEQ ID NO: 1243264 - DNA, 25 bp, Homo sapien
taaaattcccagaatgggcattctg

SEQ ID NO: 1243265 - DNA, 25 bp, Homo sapien
aattcccagaatgggcattctgtgt

SEQ ID NO: 1243266 - DNA, 25 bp, Homo sapien
tcccagaatgggcattctgtgtcat

SEQ ID NO: 1243267 - DNA, 25 bp, Homo sapien
caaacagcaggctacagcccacagt

SEQ ID NO: 1243268 - DNA, 25 bp, Homo sapien
tcattgatgccaaaccaagcggatc

SEQ ID NO: 1243269 - DNA, 25 bp, Homo sapien
gagtctcctccatcgctgtgtatga

SEQ ID NO: 1243270 - DNA, 25 bp, Homo sapien
atgaaacaagctgggactgggcgtc

SEQ ID NO: 1243271 - DNA, 25 bp, Homo sapien
caagcggatcttgtggaatgctcca

SEQ ID NO: 1243272 - DNA, 25 bp, Homo sapien
gagcttgcacagatcagaccgagaa

SEQ ID NO: 1243273 - DNA, 25 bp, Homo sapien
tatgccttgtaaatggctcaccgag

SEQ ID NO: 1243274 - DNA, 25 bp, Homo sapien
tttggcctgcactacgatgagggat

SEQ ID NO: 1243275 - DNA, 25 bp, Homo sapien
tgtgagccagcggaaccacttgtac

SEQ ID NO: 1243276 - DNA, 25 bp, Homo sapien
taacactagttcagatgcagttacc

SEQ ID NO: 1243277 - DNA, 25 bp, Homo sapien
ccatagtttgggctttagtattgta

SEQ ID NO: 1243278 - DNA, 25 bp, Homo sapien
cagccacattaccatagcaataaga

SEQ ID NO: 1243279 - DNA, 25 bp, Homo sapien
gcaataagaaaggaggcatagtaca

SEQ ID NO: 1243280 - DNA, 25 bp, Homo sapien
aatgtatataatggctttcgtcccc

SEQ ID NO: 1243281 - DNA, 25 bp, Homo sapien
aagatcatagttttgccaccctgca

SEQ ID NO: 1243282 - DNA, 25 bp, Homo sapien
ttggtggtagagatcgccatcttcc

SEQ ID NO: 1243283 - DNA, 25 bp, Homo sapien
gaaaacctggctatgggtcaaacag

SEQ ID NO: 1243284 - DNA, 25 bp, Homo sapien
ccctcccaggtcaatgatggtgtta

SEQ ID NO: 1243285 - DNA, 25 bp, Homo sapien
gatacattaggagccgggaggattc

SEQ ID NO: 1243286 - DNA, 25 bp, Homo sapien
taacccaaggttaagcacgtgataa

SEQ ID NO: 1243287 - DNA, 25 bp, Homo sapien
tgtcaactataatacccctcccagg

SEQ ID NO: 1243288 - DNA, 25 bp, Homo sapien
agactcagatgcctacgggccagac

SEQ ID NO: 1243289 - DNA, 25 bp, Homo sapien
gacaggcggattgcgctctctcgag

SEQ ID NO: 1243290 - DNA, 25 bp, Homo sapien
tgatgggaaaagtaacgacctcgtc

SEQ ID NO: 1243291 - DNA, 25 bp, Homo sapien
tgagtcccctttagggagcaaggag

SEQ ID NO: 1243292 - DNA, 25 bp, Homo sapien
tagccacgctcacaagaggacagag

SEQ ID NO: 1243293 - DNA, 25 bp, Homo sapien
ggtggcaggattggccgttttatta

SEQ ID NO: 1243294 - DNA, 25 bp, Homo sapien
gcaggattggccgttttattaacta

SEQ ID NO: 1243295 - DNA, 25 bp, Homo sapien
agccgcgtagccacgctcacaagag

SEQ ID NO: 1243296 - DNA, 25 bp, Homo sapien
caggtctttagattgcacggtttcc

SEQ ID NO: 1243297 - DNA, 25 bp, Homo sapien
gacacgaagctgaggtggccttttg

SEQ ID NO: 1243298 - DNA, 25 bp, Homo sapien
gtggtaccattcacgggcaggcatc

SEQ ID NO: 1243299 - DNA, 25 bp, Homo sapien
ggcttcttctctaactcggacacga

SEQ ID NO: 1243300 - DNA, 25 bp, Homo sapien
tcacccattcttctgtgcccagctt

SEQ ID NO: 1243301 - DNA, 25 bp, Homo sapien
gtcacccattcttctgtgcccagct

SEQ ID NO: 1243302 - DNA, 25 bp, Homo sapien
acccattcttctgtgcccagcttca

SEQ ID NO: 1243303 - DNA, 25 bp, Homo sapien
cccattcttctgtgcccagcttcat

SEQ ID NO: 1243304 - DNA, 25 bp, Homo sapien
cttttactggcctccgccaagccag

SEQ ID NO: 1243305 - DNA, 25 bp, Homo sapien
ttttactggcctccgccaagccagg

SEQ ID NO: 1243306 - DNA, 25 bp, Homo sapien
gaagcttttactggcctccgccaag

SEQ ID NO: 1243307 - DNA, 25 bp, Homo sapien
ctggaagcttttactggcctccgcc

SEQ ID NO: 1243308 - DNA, 25 bp, Homo sapien
tggactcagaacttacacagcttag

SEQ ID NO: 1243309 - DNA, 25 bp, Homo sapien
tactttctctggcagactgggaacc

SEQ ID NO: 1243310 - DNA, 25 bp, Homo sapien
tctttctttggactagtggactcag

SEQ ID NO: 1243311 - DNA, 25 bp, Homo sapien
gcttagagtctggtgattgggaatt

SEQ ID NO: 1243312 - DNA, 25 bp, Homo sapien
agattgtgaaccgaagatgatgaat

SEQ ID NO: 1243313 - DNA, 25 bp, Homo sapien
gatttgctgtttgcttgacgaggag

SEQ ID NO: 1243314 - DNA, 25 bp, Homo sapien
tttgcttgacgaggagactctgagg

SEQ ID NO: 1243315 - DNA, 25 bp, Homo sapien
tgctgtttgcttgacgaggagactc

SEQ ID NO: 1243316 - DNA, 25 bp, Homo sapien
tgtctcctcactcccagtccactgt

SEQ ID NO: 1243317 - DNA, 25 bp, Homo sapien
tcccagtccactgtttctgtttcat

SEQ ID NO: 1243318 - DNA, 25 bp, Homo sapien
ctgtctcctcactcccagtccactg

SEQ ID NO: 1243319 - DNA, 25 bp, Homo sapien
cactcccagtccactgtttctgttt

SEQ ID NO: 1243320 - DNA, 25 bp, Homo sapien
agtttaggtgatccttgaactgttg

SEQ ID NO: 1243321 - DNA, 25 bp, Homo sapien
gtttaggtgatccttgaactgttga

SEQ ID NO: 1243322 - DNA, 25 bp, Homo sapien
ctgggttaactatggcttgccgtct

SEQ ID NO: 1243323 - DNA, 25 bp, Homo sapien
taactatggcttgccgtctctgcaa

SEQ ID NO: 1243324 - DNA, 25 bp, Homo sapien
gagaagtgagttgaacaattatggc

SEQ ID NO: 1243325 - DNA, 25 bp, Homo sapien
tgcaggttgcccggcacatttgcca

SEQ ID NO: 1243326 - DNA, 25 bp, Homo sapien
cccttcctgaaggtagacagaggtc

SEQ ID NO: 1243327 - DNA, 25 bp, Homo sapien
gggtggggcacatttaccatcagaa

SEQ ID NO: 1243328 - DNA, 25 bp, Homo sapien
tttgccgaagtacccatgcccaggt

SEQ ID NO: 1243329 - DNA, 25 bp, Homo sapien
aggcctttgccgaagtacccatgcc

SEQ ID NO: 1243330 - DNA, 25 bp, Homo sapien
ctgaggcctttgccgaagtacccat

SEQ ID NO: 1243331 - DNA, 25 bp, Homo sapien
atgcccaggtgcattccacacgctg

SEQ ID NO: 1243332 - DNA, 25 bp, Homo sapien
cactctgtaaggacaagcctgggca

SEQ ID NO: 1243333 - DNA, 25 bp, Homo sapien
ggtggtctcagcaacttatccatat

SEQ ID NO: 1243334 - DNA, 25 bp, Homo sapien
tacagacgcatgtgcctccttggca

SEQ ID NO: 1243335 - DNA, 25 bp, Homo sapien
gaagccgtatttactcgctcagggc

SEQ ID NO: 1243336 - DNA, 25 bp, Homo sapien
ccgaggagacggcatacttatttaa

SEQ ID NO: 1243337 - DNA, 25 bp, Homo sapien
cattttcccattggcgaagttagga

SEQ ID NO: 1243338 - DNA, 25 bp, Homo sapien
ggtcagtttcgtaaggccagtagaa

SEQ ID NO: 1243339 - DNA, 25 bp, Homo sapien
gattttgtgatagcgtcagaaccga

SEQ ID NO: 1243340 - DNA, 25 bp, Homo sapien
tgatgtaaatcagccacaatacttc

SEQ ID NO: 1243341 - DNA, 25 bp, Homo sapien
gaatgtttgatgtaaatcagccaca

SEQ ID NO: 1243342 - DNA, 25 bp, Homo sapien
acttagtgaatgtttgatgtaaatc

SEQ ID NO: 1243343 - DNA, 25 bp, Homo sapien
aaatcagccacaatacttcctctct

SEQ ID NO: 1243344 - DNA, 25 bp, Homo sapien
ttctgctgttgctataagccctttg

SEQ ID NO: 1243345 - DNA, 25 bp, Homo sapien
ttgctataagccctttgatttgcat

SEQ ID NO: 1243346 - DNA, 25 bp, Homo sapien
ctgctgttgctataagccctttgat

SEQ ID NO: 1243347 - DNA, 25 bp, Homo sapien
gctgttgctataagccctttgattt

SEQ ID NO: 1243348 - DNA, 25 bp, Homo sapien
cttcctgtgaatctcgaacactcag

SEQ ID NO: 1243349 - DNA, 25 bp, Homo sapien
gactccctggtaataactgtggcga

SEQ ID NO: 1243350 - DNA, 25 bp, Homo sapien
cactcaggttggagtcgttcggtct

SEQ ID NO: 1243351 - DNA, 25 bp, Homo sapien
gccctttgcagtaggactccctggt

SEQ ID NO: 1243352 - DNA, 25 bp, Homo sapien
cccggattgcgttgctggattgcag

SEQ ID NO: 1243353 - DNA, 25 bp, Homo sapien
gactgtctgttccatgatgtgctcc

SEQ ID NO: 1243354 - DNA, 25 bp, Homo sapien
tgttctgtgattcgtcctccttggc

SEQ ID NO: 1243355 - DNA, 25 bp, Homo sapien
cagaggaacccttgacttgagatag

SEQ ID NO: 1243356 - DNA, 25 bp, Homo sapien
tatctggcagatagcggaggaaaat

SEQ ID NO: 1243357 - DNA, 25 bp, Homo sapien
aattgtatctggcagatagcggagg

SEQ ID NO: 1243358 - DNA, 25 bp, Homo sapien
tggcagatagcggaggaaaattgtc

SEQ ID NO: 1243359 - DNA, 25 bp, Homo sapien
gatagcggaggaaaattgtcttcat

SEQ ID NO: 1243360 - DNA, 25 bp, Homo sapien
ggaactctaaggtaattgtcaacca

SEQ ID NO: 1243361 - DNA, 25 bp, Homo sapien
gaactctaaggtaattgtcaaccat

SEQ ID NO: 1243362 - DNA, 25 bp, Homo sapien
acttcgaggtcatcacagctgcttc

SEQ ID NO: 1243363 - DNA, 25 bp, Homo sapien
tttgatagcgtacagaagatgatgc

SEQ ID NO: 1243364 - DNA, 25 bp, Homo sapien
ctgcttcctactgtggagtcacaca

SEQ ID NO: 1243365 - DNA, 25 bp, Homo sapien
tctgcactgtggattggtgggtttc

SEQ ID NO: 1243366 - DNA, 25 bp, Homo sapien
gtgtagccgctctcaccaaaactca

SEQ ID NO: 1243367 - DNA, 25 bp, Homo sapien
cgtgtagccgctctcaccaaaactc

SEQ ID NO: 1243368 - DNA, 25 bp, Homo sapien
tgtagccgctctcaccaaaactcac

SEQ ID NO: 1243369 - DNA, 25 bp, Homo sapien
tatgagtggcttccatgagttttcc

SEQ ID NO: 1243370 - DNA, 25 bp, Homo sapien
tggctgtcacctatgtgccctgagg

SEQ ID NO: 1243371 - DNA, 25 bp, Homo sapien
ggtgacattgctgtgtaggctgcct

SEQ ID NO: 1243372 - DNA, 25 bp, Homo sapien
gaaagtatttttgtcgtgacacagt

SEQ ID NO: 1243373 - DNA, 25 bp, Homo sapien
catctaagtttagtttcacgtatgc

SEQ ID NO: 1243374 - DNA, 25 bp, Homo sapien
tactagactctacttaacagaaatt

SEQ ID NO: 1243375 - DNA, 25 bp, Homo sapien
aaagctctcggcttatttctgaaag

SEQ ID NO: 1243376 - DNA, 25 bp, Homo sapien
gcagagataccttgacccagataac

SEQ ID NO: 1243377 - DNA, 25 bp, Homo sapien
agactttgaacaaagcagcccttct

SEQ ID NO: 1243378 - DNA, 25 bp, Homo sapien
ctgtgtgcctgaagactttgaacaa

SEQ ID NO: 1243379 - DNA, 25 bp, Homo sapien
ttgaacaaagcagcccttctcttcc

SEQ ID NO: 1243380 - DNA, 25 bp, Homo sapien
aacaaagcagcccttctcttccatg

SEQ ID NO: 1243381 - DNA, 25 bp, Homo sapien
atccacatcacctagcacagccctt

SEQ ID NO: 1243382 - DNA, 25 bp, Homo sapien
ggtctcaaccagtgacttgttccca

SEQ ID NO: 1243383 - DNA, 25 bp, Homo sapien
cagtgacttgttcccatccacatca

SEQ ID NO: 1243384 - DNA, 25 bp, Homo sapien
tccaagtgagtccaggtctcaacca

SEQ ID NO: 1243385 - DNA, 25 bp, Homo sapien
atcttccatagcaccgagtttttgt

SEQ ID NO: 1243386 - DNA, 25 bp, Homo sapien
tggaaacctggcgtccagcccagtg

SEQ ID NO: 1243387 - DNA, 25 bp, Homo sapien
tagcaccgagtttttgtgtcttgct

SEQ ID NO: 1243388 - DNA, 25 bp, Homo sapien
taagtaaggcacatttccctcttta

SEQ ID NO: 1243389 - DNA, 25 bp, Homo sapien
cccaggtgcctgagttcgtcattgc

SEQ ID NO: 1243390 - DNA, 25 bp, Homo sapien
atgacacggtgccactccacactga

SEQ ID NO: 1243391 - DNA, 25 bp, Homo sapien
ccaacttgggaacagatgacacggt

SEQ ID NO: 1243392 - DNA, 25 bp, Homo sapien
ctgtgctggcctctgatgagttcca

SEQ ID NO: 1243393 - DNA, 25 bp, Homo sapien
cttgggagcaaaaacctttcgaatg

SEQ ID NO: 1243394 - DNA, 25 bp, Homo sapien
tttcgaatgactgcagggccctctg

SEQ ID NO: 1243395 - DNA, 25 bp, Homo sapien
gcaaaaacctttcgaatgactgcag

SEQ ID NO: 1243396 - DNA, 25 bp, Homo sapien
aacctttcgaatgactgcagggccc

SEQ ID NO: 1243397 - DNA, 25 bp, Homo sapien
aacagggttctggcaatatgcactt

SEQ ID NO: 1243398 - DNA, 25 bp, Homo sapien
ggcaatatgcacttgctttccttgt

SEQ ID NO: 1243399 - DNA, 25 bp, Homo sapien
tggaacagggttctggcaatatgca

SEQ ID NO: 1243400 - DNA, 25 bp, Homo sapien
gcaatatgcacttgctttccttgtc

SEQ ID NO: 1243401 - DNA, 25 bp, Homo sapien
gtctagttgtcatgctcctttgggc

SEQ ID NO: 1243402 - DNA, 25 bp, Homo sapien
tatttagtgcaacccaattccttgg

SEQ ID NO: 1243403 - DNA, 25 bp, Homo sapien
aaatatgcagcaagtcgagtctagt

SEQ ID NO: 1243404 - DNA, 25 bp, Homo sapien
cagtactagatagccaagttgggtg

SEQ ID NO: 1243405 - DNA, 25 bp, Homo sapien
tgatacctgagcttagtaaacactt

SEQ ID NO: 1243406 - DNA, 25 bp, Homo sapien
ccttgatacctgagcttagtaaaca

SEQ ID NO: 1243407 - DNA, 25 bp, Homo sapien
ggttccttgatacctgagcttagta

SEQ ID NO: 1243408 - DNA, 25 bp, Homo sapien
tgaagggttccttgatacctgagct

SEQ ID NO: 1243409 - DNA, 25 bp, Homo sapien
gatgtggttcttctcctcaaggccc

SEQ ID NO: 1243410 - DNA, 25 bp, Homo sapien
caaggatctgctccggattgtagtg

SEQ ID NO: 1243411 - DNA, 25 bp, Homo sapien
tgtgccttagggatcaaaatgctgg

SEQ ID NO: 1243412 - DNA, 25 bp, Homo sapien
tgacaacccactgaccaaggatctg

SEQ ID NO: 1243413 - DNA, 25 bp, Homo sapien
gcttctgccacctcgtgcaggacat

SEQ ID NO: 1243414 - DNA, 25 bp, Homo sapien
cttctgccacctcgtgcaggacatt

SEQ ID NO: 1243415 - DNA, 25 bp, Homo sapien
ttctgccacctcgtgcaggacattg

SEQ ID NO: 1243416 - DNA, 25 bp, Homo sapien
tgcttctgccacctcgtgcaggaca

SEQ ID NO: 1243417 - DNA, 25 bp, Homo sapien
tcttgcttgtctgggtaaagccaca

SEQ ID NO: 1243418 - DNA, 25 bp, Homo sapien
aagccacacctgccgaataccatga

SEQ ID NO: 1243419 - DNA, 25 bp, Homo sapien
tctccaacgcatgtctgggcgtctt

SEQ ID NO: 1243420 - DNA, 25 bp, Homo sapien
tctgcagcttcaaccaaggacacta

SEQ ID NO: 1243421 - DNA, 25 bp, Homo sapien
tcaacactcactcttcacacccttc

SEQ ID NO: 1243422 - DNA, 25 bp, Homo sapien
tcacacccttcttctctaatttcct

SEQ ID NO: 1243423 - DNA, 25 bp, Homo sapien
tcttcacacccttcttctctaattt

SEQ ID NO: 1243424 - DNA, 25 bp, Homo sapien
ctcttcacacccttcttctctaatt

SEQ ID NO: 1243425 - DNA, 25 bp, Homo sapien
ggcccaagacccgttgatgagcaaa

SEQ ID NO: 1243426 - DNA, 25 bp, Homo sapien
cccaagacccgttgatgagcaaatg

SEQ ID NO: 1243427 - DNA, 25 bp, Homo sapien
cctggcccaagacccgttgatgagc

SEQ ID NO: 1243428 - DNA, 25 bp, Homo sapien
taagccctggcccaagacccgttga

SEQ ID NO: 1243429 - DNA, 25 bp, Homo sapien
tttgttgccatggttgctcctgagc

SEQ ID NO: 1243430 - DNA, 25 bp, Homo sapien
tggatcaaatacagatgccatgccc

SEQ ID NO: 1243431 - DNA, 25 bp, Homo sapien
tcctgagcacacacaagatgctaaa

SEQ ID NO: 1243432 - DNA, 25 bp, Homo sapien
ggcttacagttgatatgctctgaga

SEQ ID NO: 1243433 - DNA, 25 bp, Homo sapien
gcagctgattcacaacgtttcctgt

SEQ ID NO: 1243434 - DNA, 25 bp, Homo sapien
acagcagctgattcacaacgtttcc

SEQ ID NO: 1243435 - DNA, 25 bp, Homo sapien
tgattcacaacgtttcctgttttac

SEQ ID NO: 1243436 - DNA, 25 bp, Homo sapien
gctgattcacaacgtttcctgtttt

SEQ ID NO: 1243437 - DNA, 25 bp, Homo sapien
tccgagtgggaaatcttatgttatt

SEQ ID NO: 1243438 - DNA, 25 bp, Homo sapien
ttagatccgagtgggaaatcttatg

SEQ ID NO: 1243439 - DNA, 25 bp, Homo sapien
ggtatgttacctctgctattattat

SEQ ID NO: 1243440 - DNA, 25 bp, Homo sapien
taatacttctcttcgaataagctgg

SEQ ID NO: 1243441 - DNA, 25 bp, Homo sapien
tgatctggaacgtgtcctctggctc

SEQ ID NO: 1243442 - DNA, 25 bp, Homo sapien
tctggaacatgatctggaacgtgtc

SEQ ID NO: 1243443 - DNA, 25 bp, Homo sapien
gaacatgatctggaacgtgtcctct

SEQ ID NO: 1243444 - DNA, 25 bp, Homo sapien
gtgttctggaacatgatctggaacg

SEQ ID NO: 1243445 - DNA, 25 bp, Homo sapien
tgtttctcatttgctggcacctctc

SEQ ID NO: 1243446 - DNA, 25 bp, Homo sapien
gaagctagacatggccagaatcaaa

SEQ ID NO: 1243447 - DNA, 25 bp, Homo sapien
gaaatggcctgagttagactcacac

SEQ ID NO: 1243448 - DNA, 25 bp, Homo sapien
gaaagaagctagacatggccagaat

SEQ ID NO: 1243449 - DNA, 25 bp, Homo sapien
aatcaaaacaggatctgtatcaggg

SEQ ID NO: 1243450 - DNA, 25 bp, Homo sapien
cagggtcgacaagaagttagacttt

SEQ ID NO: 1243451 - DNA, 25 bp, Homo sapien
aaaggttcttattccataccaggtg

SEQ ID NO: 1243452 - DNA, 25 bp, Homo sapien
tcttattccataccaggtgtagcac

SEQ ID NO: 1243453 - DNA, 25 bp, Homo sapien
tggatatgtttctcggaggaaaagg

SEQ ID NO: 1243454 - DNA, 25 bp, Homo sapien
ctgagccttgctttacactgtagca

SEQ ID NO: 1243455 - DNA, 25 bp, Homo sapien
cttttccaagccaacgtcatctgag

SEQ ID NO: 1243456 - DNA, 25 bp, Homo sapien
tgagccttgctttacactgtagcac

SEQ ID NO: 1243457 - DNA, 25 bp, Homo sapien
gccaacgtcatctgagccttgcttt

SEQ ID NO: 1243458 - DNA, 25 bp, Homo sapien
ggctgttcccctggtggtgttacca

SEQ ID NO: 1243459 - DNA, 25 bp, Homo sapien
gctgttcccctggtggtgttaccat

SEQ ID NO: 1243460 - DNA, 25 bp, Homo sapien
tggctgttcccctggtggtgttacc

SEQ ID NO: 1243461 - DNA, 25 bp, Homo sapien
cttgcttggatctaatttcaaattg

SEQ ID NO: 1243462 - DNA, 25 bp, Homo sapien
cctgatgtcctggtagatgggtgag

SEQ ID NO: 1243463 - DNA, 25 bp, Homo sapien
ggagcagaggcggtcaattctgcaa

SEQ ID NO: 1243464 - DNA, 25 bp, Homo sapien
atgtcctggtagatgggtgagcaat

SEQ ID NO: 1243465 - DNA, 25 bp, Homo sapien
attctgcaagtagagctgagcagcc

SEQ ID NO: 1243466 - DNA, 25 bp, Homo sapien
atattaaacgctttgcaagtttgtg

SEQ ID NO: 1243467 - DNA, 25 bp, Homo sapien
tattaaacgctttgcaagtttgtgt

SEQ ID NO: 1243468 - DNA, 25 bp, Homo sapien
cttgctgcagatctctcgttttcgg

SEQ ID NO: 1243469 - DNA, 25 bp, Homo sapien
gatctctcgttttcggcactgacag

SEQ ID NO: 1243470 - DNA, 25 bp, Homo sapien
gctgcagatctctcgttttcggcac

SEQ ID NO: 1243471 - DNA, 25 bp, Homo sapien
gcagatctctcgttttcggcactga

SEQ ID NO: 1243472 - DNA, 25 bp, Homo sapien
tgatggcagaacacgaaaagttact

SEQ ID NO: 1243473 - DNA, 25 bp, Homo sapien
cctcaccttaggagatagtggatta

SEQ ID NO: 1243474 - DNA, 25 bp, Homo sapien
tacctctctcgaagagtattgcaag

SEQ ID NO: 1243475 - DNA, 25 bp, Homo sapien
caacatctatgggactattgggtca

SEQ ID NO: 1243476 - DNA, 25 bp, Homo sapien
gtggtctggactgtgtttgattcat

SEQ ID NO: 1243477 - DNA, 25 bp, Homo sapien
ggactgtgtttgattcatttgtact

SEQ ID NO: 1243478 - DNA, 25 bp, Homo sapien
tggtgaaacaatttcccaggactgt

SEQ ID NO: 1243479 - DNA, 25 bp, Homo sapien
tctggactgtgtttgattcatttgt

SEQ ID NO: 1243480 - DNA, 25 bp, Homo sapien
gctgtgcctgatcactcagtgccat

SEQ ID NO: 1243481 - DNA, 25 bp, Homo sapien
cttgcccctcttgcccctcgggctg

SEQ ID NO: 1243482 - DNA, 25 bp, Homo sapien
ctcgggctgtgcctgatcactcagt

SEQ ID NO: 1243483 - DNA, 25 bp, Homo sapien
aagcagatgccaaaaccttgcccct

SEQ ID NO: 1243484 - DNA, 25 bp, Homo sapien
gtaggccggcaccaagtgctcccgg

SEQ ID NO: 1243485 - DNA, 25 bp, Homo sapien
gcaccaagtgctcccggcagatcta

SEQ ID NO: 1243486 - DNA, 25 bp, Homo sapien
ttcctgtaggccggcaccaagtgct

SEQ ID NO: 1243487 - DNA, 25 bp, Homo sapien
ggcaccaagtgctcccggcagatct

SEQ ID NO: 1243488 - DNA, 25 bp, Homo sapien
gaacaaacgctcctatgaacccagt

SEQ ID NO: 1243489 - DNA, 25 bp, Homo sapien
cataaacaacgctttaggccaaggt

SEQ ID NO: 1243490 - DNA, 25 bp, Homo sapien
gacttatgactcagaggtgtgcctg

SEQ ID NO: 1243491 - DNA, 25 bp, Homo sapien
cacgtcttattctggctgtgggcca

SEQ ID NO: 1243492 - DNA, 25 bp, Homo sapien
gctccaattcgtaaagaggacttgg

SEQ ID NO: 1243493 - DNA, 25 bp, Homo sapien
tgctccaattcgtaaagaggacttg

SEQ ID NO: 1243494 - DNA, 25 bp, Homo sapien
gctgctccaattcgtaaagaggact

SEQ ID NO: 1243495 - DNA, 25 bp, Homo sapien
ctccaattcgtaaagaggacttggc

SEQ ID NO: 1243496 - DNA, 25 bp, Homo sapien
cagatgggtcagtctgagttctggc

SEQ ID NO: 1243497 - DNA, 25 bp, Homo sapien
ttctggcttgagtctggtcataggg

SEQ ID NO: 1243498 - DNA, 25 bp, Homo sapien
gagttctggcttgagtctggtcata

SEQ ID NO: 1243499 - DNA, 25 bp, Homo sapien
gtcagtctgagttctggcttgagtc

SEQ ID NO: 1243500 - DNA, 25 bp, Homo sapien
ccagaaatgccaagttcttgagcaa

SEQ ID NO: 1243501 - DNA, 25 bp, Homo sapien
ctttccagaaatgccaagttcttga

SEQ ID NO: 1243502 - DNA, 25 bp, Homo sapien
cagaaatgccaagttcttgagcaag

SEQ ID NO: 1243503 - DNA, 25 bp, Homo sapien
gaaatgccaagttcttgagcaagga

SEQ ID NO: 1243504 - DNA, 25 bp, Homo sapien
aatagaagaactggctgacactggc

SEQ ID NO: 1243505 - DNA, 25 bp, Homo sapien
tttcagtagcttcacaagagttggc

SEQ ID NO: 1243506 - DNA, 25 bp, Homo sapien
cctgcgtgagctcaatagaagaact

SEQ ID NO: 1243507 - DNA, 25 bp, Homo sapien
ttcacaagagttggctttgcaggcc

SEQ ID NO: 1243508 - DNA, 25 bp, Homo sapien
cttttgtaccatcttctgttgatca

SEQ ID NO: 1243509 - DNA, 25 bp, Homo sapien
tgtaccatcttctgttgatcaggaa

SEQ ID NO: 1243510 - DNA, 25 bp, Homo sapien
acattttagcattgaattgttctcc

SEQ ID NO: 1243511 - DNA, 25 bp, Homo sapien
catcttctgttgatcaggaactgaa

SEQ ID NO: 1243512 - DNA, 25 bp, Homo sapien
cgctgcctgctatctcgcgagattt

SEQ ID NO: 1243513 - DNA, 25 bp, Homo sapien
ctcaatgtgtttggcccctttgtat

SEQ ID NO: 1243514 - DNA, 25 bp, Homo sapien
tccagcgggtctcgggcggtgtctg

SEQ ID NO: 1243515 - DNA, 25 bp, Homo sapien
gagaaaccggagcaaaaggcatcgc

SEQ ID NO: 1243516 - DNA, 25 bp, Homo sapien
ctgttgccccaggaaacgccgccgc

SEQ ID NO: 1243517 - DNA, 25 bp, Homo sapien
tgttgccccaggaaacgccgccgcg

SEQ ID NO: 1243518 - DNA, 25 bp, Homo sapien
gctgttgccccaggaaacgccgccg

SEQ ID NO: 1243519 - DNA, 25 bp, Homo sapien
cgccgcgggctccgcaaacgagaag

SEQ ID NO: 1243520 - DNA, 25 bp, Homo sapien
agctccagcgagaagagccgctcgg

SEQ ID NO: 1243521 - DNA, 25 bp, Homo sapien
ccagcgagaagagccgctcggacag

SEQ ID NO: 1243522 - DNA, 25 bp, Homo sapien
gctccagcgagaagagccgctcgga

SEQ ID NO: 1243523 - DNA, 25 bp, Homo sapien
aagagccgctcggacagcgaggccg

SEQ ID NO: 1243524 - DNA, 25 bp, Homo sapien
agaccgcgcggcgacgaggcctccc

SEQ ID NO: 1243525 - DNA, 25 bp, Homo sapien
gcggggcacagaccgcgcggcgacg

SEQ ID NO: 1243526 - DNA, 25 bp, Homo sapien
cctcctgctccactgcggcagcggg

SEQ ID NO: 1243527 - DNA, 25 bp, Homo sapien
gggcacagaccgcgcggcgacgagg

SEQ ID NO: 1243528 - DNA, 25 bp, Homo sapien
aagcggatgacaccgggccacggtt

SEQ ID NO: 1243529 - DNA, 25 bp, Homo sapien
gccgtcaggagggtaaaccaacagc

SEQ ID NO: 1243530 - DNA, 25 bp, Homo sapien
gacttgccgcgaccgaagcggatga

SEQ ID NO: 1243531 - DNA, 25 bp, Homo sapien
gaggcaggacttgccgcgaccgaag

SEQ ID NO: 1243532 - DNA, 25 bp, Homo sapien
ctgtggggtgggcgtcgggcgccca

SEQ ID NO: 1243533 - DNA, 25 bp, Homo sapien
gggcgtcgggcgcccagggggcagc

SEQ ID NO: 1243534 - DNA, 25 bp, Homo sapien
gtgggcgtcgggcgcccagggggca

SEQ ID NO: 1243535 - DNA, 25 bp, Homo sapien
caaggtggcaagcggggtccgcagg

SEQ ID NO: 1243536 - DNA, 25 bp, Homo sapien
cttcccaggtcagtcaggcggtagg

SEQ ID NO: 1243537 - DNA, 25 bp, Homo sapien
ctgcggtggccagcgaaatgtcgca

SEQ ID NO: 1243538 - DNA, 25 bp, Homo sapien
aggcggtaggccagtgcaatgtccc

SEQ ID NO: 1243539 - DNA, 25 bp, Homo sapien
ctcaagttggctcagcaggcggctt

SEQ ID NO: 1243540 - DNA, 25 bp, Homo sapien
tttgaggctcaatggtgattttagc

SEQ ID NO: 1243541 - DNA, 25 bp, Homo sapien
gcattcatttgaggctcaatggtga

SEQ ID NO: 1243542 - DNA, 25 bp, Homo sapien
catttgaggctcaatggtgatttta

SEQ ID NO: 1243543 - DNA, 25 bp, Homo sapien
caggtgcattcatttgaggctcaat

SEQ ID NO: 1243544 - DNA, 25 bp, Homo sapien
attgtattaattcgattttgttcag

SEQ ID NO: 1243545 - DNA, 25 bp, Homo sapien
tgattagttgctcctatattctgaa

SEQ ID NO: 1243546 - DNA, 25 bp, Homo sapien
caagcattggaggatgttcgtgtgc

SEQ ID NO: 1243547 - DNA, 25 bp, Homo sapien
tgttcagtttgacatgtttgattag

SEQ ID NO: 1243548 - DNA, 25 bp, Homo sapien
cacaggttggtcatataacaaggac

SEQ ID NO: 1243549 - DNA, 25 bp, Homo sapien
caaggacaactcaactaacaaagca

SEQ ID NO: 1243550 - DNA, 25 bp, Homo sapien
tcttggcttcagaccggcatgtgga

SEQ ID NO: 1243551 - DNA, 25 bp, Homo sapien
gatttggcagaagattcgggtgact

SEQ ID NO: 1243552 - DNA, 25 bp, Homo sapien
tgttaagccataaagtagcctccct

SEQ ID NO: 1243553 - DNA, 25 bp, Homo sapien
taatggaatttgcaggactcacaac

SEQ ID NO: 1243554 - DNA, 25 bp, Homo sapien
gaactcttttatggagggcaccact

SEQ ID NO: 1243555 - DNA, 25 bp, Homo sapien
gctgggctcatcaaaaactccactg

SEQ ID NO: 1243556 - DNA, 25 bp, Homo sapien
cagtccaatgtgttgaagataaatc

SEQ ID NO: 1243557 - DNA, 25 bp, Homo sapien
gcagagatactagatgcttcctcca

SEQ ID NO: 1243558 - DNA, 25 bp, Homo sapien
tatgagtgtacaggtgacccggctg

SEQ ID NO: 1243559 - DNA, 25 bp, Homo sapien
tagcaagggctagacaaatcatctg

SEQ ID NO: 1243560 - DNA, 25 bp, Homo sapien
ggacattaagttcggacacatttga

SEQ ID NO: 1243561 - DNA, 25 bp, Homo sapien
tccaggacattaagttcggacacat

SEQ ID NO: 1243562 - DNA, 25 bp, Homo sapien
taagttcggacacatttgaaggcag

SEQ ID NO: 1243563 - DNA, 25 bp, Homo sapien
gttcggacacatttgaaggcaggta

SEQ ID NO: 1243564 - DNA, 25 bp, Homo sapien
gcttggaaatatttagtgaaccaac

SEQ ID NO: 1243565 - DNA, 25 bp, Homo sapien
ggaaatatttagtgaaccaacatca

SEQ ID NO: 1243566 - DNA, 25 bp, Homo sapien
tgtatcctggaagtttatttattac

SEQ ID NO: 1243567 - DNA, 25 bp, Homo sapien
ttacattgtgtatcctggaagttta

SEQ ID NO: 1243568 - DNA, 25 bp, Homo sapien
gaaagacacacttttattcttatga

SEQ ID NO: 1243569 - DNA, 25 bp, Homo sapien
catcaaaggaataacgttaattcat

SEQ ID NO: 1243570 - DNA, 25 bp, Homo sapien
ttttcactaacagtacacataggtc

SEQ ID NO: 1243571 - DNA, 25 bp, Homo sapien
agtacacataggtccttgaaagttt

SEQ ID NO: 1243572 - DNA, 25 bp, Homo sapien
tttctgcatctaacacagtaagtct

SEQ ID NO: 1243573 - DNA, 25 bp, Homo sapien
tccaattaaaatttgaggctgtcct

SEQ ID NO: 1243574 - DNA, 25 bp, Homo sapien
tagactagacactttaagagagaca

SEQ ID NO: 1243575 - DNA, 25 bp, Homo sapien
gcttttaaaacagcagggctctatc

SEQ ID NO: 1243576 - DNA, 25 bp, Homo sapien
ctgaaatgacaagaaactgaactcc

SEQ ID NO: 1243577 - DNA, 25 bp, Homo sapien
aggtgcagggcactatgagagcata

SEQ ID NO: 1243578 - DNA, 25 bp, Homo sapien
cacaactgaagcctagtggaagata

SEQ ID NO: 1243579 - DNA, 25 bp, Homo sapien
tccaataaggattttctgcaggttt

SEQ ID NO: 1243580 - DNA, 25 bp, Homo sapien
taaacatctagttacaatacctggc

SEQ ID NO: 1243581 - DNA, 25 bp, Homo sapien
tctgtagcatgagtggatcattcta

SEQ ID NO: 1243582 - DNA, 25 bp, Homo sapien
aaaattaagatcatagccactagcc

SEQ ID NO: 1243583 - DNA, 25 bp, Homo sapien
tatacttagcatttgaggctctctg

SEQ ID NO: 1243584 - DNA, 25 bp, Homo sapien
cccattttgcaaactcctctgactt

SEQ ID NO: 1243585 - DNA, 25 bp, Homo sapien
cattttgcaaactcctctgacttta

SEQ ID NO: 1243586 - DNA, 25 bp, Homo sapien
actcctctgactttacttcctcttg

SEQ ID NO: 1243587 - DNA, 25 bp, Homo sapien
tgcaaactcctctgactttacttcc

SEQ ID NO: 1243588 - DNA, 25 bp, Homo sapien
caatcaacatgagcagaaaactcag

SEQ ID NO: 1243589 - DNA, 25 bp, Homo sapien
tcaccatggaatagttcctccagct

SEQ ID NO: 1243590 - DNA, 25 bp, Homo sapien
gcttcgtgaagacagctgggctttc

SEQ ID NO: 1243591 - DNA, 25 bp, Homo sapien
agaaacatccatggcttcgtgaaga

SEQ ID NO: 1243592 - DNA, 25 bp, Homo sapien
tggaaggcaaccacgaccatctttg

SEQ ID NO: 1243593 - DNA, 25 bp, Homo sapien
tcagtgggcactctgctagactcat

SEQ ID NO: 1243594 - DNA, 25 bp, Homo sapien
gacagcaattggaatctatctggca

SEQ ID NO: 1243595 - DNA, 25 bp, Homo sapien
tgtgagatggatacgcttatacact

SEQ ID NO: 1243596 - DNA, 25 bp, Homo sapien
gaggagaatttattcgagaaaaaca

SEQ ID NO: 1243597 - DNA, 25 bp, Homo sapien
tagacgtagcaacaatctttcataa

SEQ ID NO: 1243598 - DNA, 25 bp, Homo sapien
cactggagagggaacaatgggcttc

SEQ ID NO: 1243599 - DNA, 25 bp, Homo sapien
cagttacatcttagtaaaaacaaca

SEQ ID NO: 1243600 - DNA, 25 bp, Homo sapien
cacccaaaatctaatgggtagtgac

SEQ ID NO: 1243601 - DNA, 25 bp, Homo sapien
ctcaaacttgggatggtcccctggg

SEQ ID NO: 1243602 - DNA, 25 bp, Homo sapien
tctaatgggtagtgacagcttgtcc

SEQ ID NO: 1243603 - DNA, 25 bp, Homo sapien
tgggatggtcccctgggaccaccca

SEQ ID NO: 1243604 - DNA, 25 bp, Homo sapien
catctgggtgtgtccaacgccagca

SEQ ID NO: 1243605 - DNA, 25 bp, Homo sapien
aagctgttaattcacactgtcaagg

SEQ ID NO: 1243606 - DNA, 25 bp, Homo sapien
catctgcgcctgaacagcatgctct

SEQ ID NO: 1243607 - DNA, 25 bp, Homo sapien
tcccatgtccatgaagataagctgt

SEQ ID NO: 1243608 - DNA, 25 bp, Homo sapien
tctaaaggagcttgataccttgata

SEQ ID NO: 1243609 - DNA, 25 bp, Homo sapien
gtccaggtcacaccccacttcttat

SEQ ID NO: 1243610 - DNA, 25 bp, Homo sapien
caacgtctaaaggagcttgatacct

SEQ ID NO: 1243611 - DNA, 25 bp, Homo sapien
ccccacttcttatcaacgtctaaag

SEQ ID NO: 1243612 - DNA, 25 bp, Homo sapien
ggaatcacgacagtcagagtcccaa

SEQ ID NO: 1243613 - DNA, 25 bp, Homo sapien
tgggtactggaatcacgacagtcag

SEQ ID NO: 1243614 - DNA, 25 bp, Homo sapien
tactggaatcacgacagtcagagtc

SEQ ID NO: 1243615 - DNA, 25 bp, Homo sapien
ggtactggaatcacgacagtcagag

SEQ ID NO: 1243616 - DNA, 25 bp, Homo sapien
atgcacccagcattgggtgggaagc

SEQ ID NO: 1243617 - DNA, 25 bp, Homo sapien
ggatgcacccagcattgggtgggaa

SEQ ID NO: 1243618 - DNA, 25 bp, Homo sapien
gcacccagcattgggtgggaagcat

SEQ ID NO: 1243619 - DNA, 25 bp, Homo sapien
ttgggatgcacccagcattgggtgg

SEQ ID NO: 1243620 - DNA, 25 bp, Homo sapien
tgctagcagccaggctttagcttcc

SEQ ID NO: 1243621 - DNA, 25 bp, Homo sapien
gcaatgcattctatttcagcatcag

SEQ ID NO: 1243622 - DNA, 25 bp, Homo sapien
cctctgctagcagccaggctttagc

SEQ ID NO: 1243623 - DNA, 25 bp, Homo sapien
cttggtggcaatgcattctatttca

SEQ ID NO: 1243624 - DNA, 25 bp, Homo sapien
aatgggtggtaccacacataatcac

SEQ ID NO: 1243625 - DNA, 25 bp, Homo sapien
gggatcaaatgggtggtaccacaca

SEQ ID NO: 1243626 - DNA, 25 bp, Homo sapien
ctgtgagggcattgagccgttggga

SEQ ID NO: 1243627 - DNA, 25 bp, Homo sapien
gagccgttgggatcaaatgggtggt

SEQ ID NO: 1243628 - DNA, 25 bp, Homo sapien
gtcatccactctagggccaggcctt

SEQ ID NO: 1243629 - DNA, 25 bp, Homo sapien
gcatcggtggccttctctttagcag

SEQ ID NO: 1243630 - DNA, 25 bp, Homo sapien
tctttagcaggacactggtgatttg

SEQ ID NO: 1243631 - DNA, 25 bp, Homo sapien
ggactgcttaggcttcttggtgtca

SEQ ID NO: 1243632 - DNA, 25 bp, Homo sapien
tactgcaagttcatgataaagtgcc

SEQ ID NO: 1243633 - DNA, 25 bp, Homo sapien
tgggttggtttctggcaagctctaa

SEQ ID NO: 1243634 - DNA, 25 bp, Homo sapien
tgtatctgtgcctgactgagcaaag

SEQ ID NO: 1243635 - DNA, 25 bp, Homo sapien
tcttgagattagcagctgcccctct

SEQ ID NO: 1243636 - DNA, 25 bp, Homo sapien
agaaaaagaaagcaagatagcacac

SEQ ID NO: 1243637 - DNA, 25 bp, Homo sapien
aagaaaaagaaagcaagatagcaca

SEQ ID NO: 1243638 - DNA, 25 bp, Homo sapien
agttccaactgccattctcgcctaa

SEQ ID NO: 1243639 - DNA, 25 bp, Homo sapien
gccattctcgcctaaagaacatttc

SEQ ID NO: 1243640 - DNA, 25 bp, Homo sapien
cagttccatcacaacagttccaact

SEQ ID NO: 1243641 - DNA, 25 bp, Homo sapien
tcagtgaattcagggaatccagttc

SEQ ID NO: 1243642 - DNA, 25 bp, Homo sapien
tttgttttgttgctgtgcctggaat

SEQ ID NO: 1243643 - DNA, 25 bp, Homo sapien
tcttttgttttgttgctgtgcctgg

SEQ ID NO: 1243644 - DNA, 25 bp, Homo sapien
gttgctgtgcctggaattctggcat

SEQ ID NO: 1243645 - DNA, 25 bp, Homo sapien
tgttttgttgctgtgcctggaattc

SEQ ID NO: 1243646 - DNA, 25 bp, Homo sapien
ggtcgcaattcaggtcaggtccgga

SEQ ID NO: 1243647 - DNA, 25 bp, Homo sapien
gcagtccaggttggggtcgcaattc

SEQ ID NO: 1243648 - DNA, 25 bp, Homo sapien
gaccagggtcgcgactcaggacccg

SEQ ID NO: 1243649 - DNA, 25 bp, Homo sapien
tcaggtccggaccagggtcgcgact

SEQ ID NO: 1243650 - DNA, 25 bp, Homo sapien
ccgttaggaacacgtgccgggccat

SEQ ID NO: 1243651 - DNA, 25 bp, Homo sapien
tacagtaggagttaccgctgccgct

SEQ ID NO: 1243652 - DNA, 25 bp, Homo sapien
gaccacaacgtcaacactacagtag

SEQ ID NO: 1243653 - DNA, 25 bp, Homo sapien
tgaaataccatttgtgcagaccaca

SEQ ID NO: 1243654 - DNA, 25 bp, Homo sapien
gcggttgccgcagatctcttgaaat

SEQ ID NO: 1243655 - DNA, 25 bp, Homo sapien
caacgctatcctgcttctcagatga

SEQ ID NO: 1243656 - DNA, 25 bp, Homo sapien
cgctatcctgcttctcagatgagaa

SEQ ID NO: 1243657 - DNA, 25 bp, Homo sapien
aacgctatcctgcttctcagatgag

SEQ ID NO: 1243658 - DNA, 25 bp, Homo sapien
ctcaacgctatcctgcttctcagat

SEQ ID NO: 1243659 - DNA, 25 bp, Homo sapien
cgtgacgacatcgaatcctattctt

SEQ ID NO: 1243660 - DNA, 25 bp, Homo sapien
ccctgtctgacttcttcggtataaa

SEQ ID NO: 1243661 - DNA, 25 bp, Homo sapien
cggtataaaatccatcaacaggcac

SEQ ID NO: 1243662 - DNA, 25 bp, Homo sapien
gacaacgtgacgacatcgaatccta

SEQ ID NO: 1243663 - DNA, 25 bp, Homo sapien
gagctaccctgttcaaagtgtccac

SEQ ID NO: 1243664 - DNA, 25 bp, Homo sapien
tgaaaagtggcaccagaaacaggac

SEQ ID NO: 1243665 - DNA, 25 bp, Homo sapien
aacaatgggccttgcagttatggca

SEQ ID NO: 1243666 - DNA, 25 bp, Homo sapien
caaaatgcggtggtctgtaaagctg

SEQ ID NO: 1243667 - DNA, 25 bp, Homo sapien
tgagcctctggcattccacatatgc

SEQ ID NO: 1243668 - DNA, 25 bp, Homo sapien
gcctctggcattccacatatgctaa

SEQ ID NO: 1243669 - DNA, 25 bp, Homo sapien
ggcattccacatatgctaaatcatc

SEQ ID NO: 1243670 - DNA, 25 bp, Homo sapien
cactgagcctctggcattccacata

SEQ ID NO: 1243671 - DNA, 25 bp, Homo sapien
tactgcccaactcggcattcacgtt

SEQ ID NO: 1243672 - DNA, 25 bp, Homo sapien
actgctcaaaagaagtcaggtcgac

SEQ ID NO: 1243673 - DNA, 25 bp, Homo sapien
gtcaggtcgaccacatactgcccaa

SEQ ID NO: 1243674 - DNA, 25 bp, Homo sapien
tcctcaagacgggtagtgccaactg

SEQ ID NO: 1243675 - DNA, 25 bp, Homo sapien
tttataggaatttatctgtagctca

SEQ ID NO: 1243676 - DNA, 25 bp, Homo sapien
gcaattcccacaatacactaagagc

SEQ ID NO: 1243677 - DNA, 25 bp, Homo sapien
atgttgtttatccttattaagactc

SEQ ID NO: 1243678 - DNA, 25 bp, Homo sapien
tagctcagagtgatagcaaattatg

SEQ ID NO: 1243679 - DNA, 25 bp, Homo sapien
ttcctgccatttagaatattctccc

SEQ ID NO: 1243680 - DNA, 25 bp, Homo sapien
gatttggtctactctgtctgagcag

SEQ ID NO: 1243681 - DNA, 25 bp, Homo sapien
gaaaagaaatccatgaccctgactg

SEQ ID NO: 1243682 - DNA, 25 bp, Homo sapien
tgcatctagacactaaacacctgtg

SEQ ID NO: 1243683 - DNA, 25 bp, Homo sapien
aagcaaggatattcttcacgtggcg

SEQ ID NO: 1243684 - DNA, 25 bp, Homo sapien
agacatgagccgctgcaaccagtcc

SEQ ID NO: 1243685 - DNA, 25 bp, Homo sapien
cagtcccagccacatccttacttcc

SEQ ID NO: 1243686 - DNA, 25 bp, Homo sapien
ctgagtacctgggacacgggcatgt

SEQ ID NO: 1243687 - DNA, 25 bp, Homo sapien
tgaagttatccactcacctcagact

SEQ ID NO: 1243688 - DNA, 25 bp, Homo sapien
caagtatggatagcgaatggcccac

SEQ ID NO: 1243689 - DNA, 25 bp, Homo sapien
ttttagactgatacgcacgggaggc

SEQ ID NO: 1243690 - DNA, 25 bp, Homo sapien
gattaagtgagttcatgcctggcac

SEQ ID NO: 1243691 - DNA, 25 bp, Homo sapien
caaaccaaattgtgaagggaggctc

SEQ ID NO: 1243692 - DNA, 25 bp, Homo sapien
gacagattactatcccactccggac

SEQ ID NO: 1243693 - DNA, 25 bp, Homo sapien
cctgggactccatgacagattacta

SEQ ID NO: 1243694 - DNA, 25 bp, Homo sapien
ctgcacatttgggctcctgggactc

SEQ ID NO: 1243695 - DNA, 25 bp, Homo sapien
gactccatgacagattactatccca

SEQ ID NO: 1243696 - DNA, 25 bp, Homo sapien
gaagagcgcttgaatggtagccatg

SEQ ID NO: 1243697 - DNA, 25 bp, Homo sapien
catggtcacccgactgaagagcgct

SEQ ID NO: 1243698 - DNA, 25 bp, Homo sapien
cagtcagtccagtgagacggagagc

SEQ ID NO: 1243699 - DNA, 25 bp, Homo sapien
gacggagagcccagtactcctcgtc

SEQ ID NO: 1243700 - DNA, 25 bp, Homo sapien
gggcatagccaggacaaggtgtcta

SEQ ID NO: 1243701 - DNA, 25 bp, Homo sapien
aggtgtctagactgcccgatggcgc

SEQ ID NO: 1243702 - DNA, 25 bp, Homo sapien
cagggctccggtcatattttatgtg

SEQ ID NO: 1243703 - DNA, 25 bp, Homo sapien
cagtcaagaatactccgggcagaag

SEQ ID NO: 1243704 - DNA, 25 bp, Homo sapien
ctctcagaagttaggcagcaaaact

SEQ ID NO: 1243705 - DNA, 25 bp, Homo sapien
aaagtgaataaggagtgtctctcag

SEQ ID NO: 1243706 - DNA, 25 bp, Homo sapien
ccacctgggacagcaagtatggaaa

SEQ ID NO: 1243707 - DNA, 25 bp, Homo sapien
gcccttcgccaaacagcagcaagtt

SEQ ID NO: 1243708 - DNA, 25 bp, Homo sapien
gagtcctaaaattgaccagccaggg

SEQ ID NO: 1243709 - DNA, 25 bp, Homo sapien
tatgtaacacactagccttcctggc

SEQ ID NO: 1243710 - DNA, 25 bp, Homo sapien
ggagtccactgtaatcacccaagag

SEQ ID NO: 1243711 - DNA, 25 bp, Homo sapien
catgagcaagcttagaggcagggcc

SEQ ID NO: 1243712 - DNA, 25 bp, Homo sapien
tttgccctgggccactgctgcagtc

SEQ ID NO: 1243713 - DNA, 25 bp, Homo sapien
ctttgccctgggccactgctgcagt

SEQ ID NO: 1243714 - DNA, 25 bp, Homo sapien
ttgccctgggccactgctgcagtcg

SEQ ID NO: 1243715 - DNA, 25 bp, Homo sapien
gccctgggccactgctgcagtcggc

SEQ ID NO: 1243716 - DNA, 25 bp, Homo sapien
gtagacagcgtctgacgaacagctt

SEQ ID NO: 1243717 - DNA, 25 bp, Homo sapien
cctggggtagacagcgtctgacgaa

SEQ ID NO: 1243718 - DNA, 25 bp, Homo sapien
gggtagacagcgtctgacgaacagc

SEQ ID NO: 1243719 - DNA, 25 bp, Homo sapien
aagagccagtggctttcctttagga

SEQ ID NO: 1243720 - DNA, 25 bp, Homo sapien
cctgacttgttcacttggcacttgc

SEQ ID NO: 1243721 - DNA, 25 bp, Homo sapien
tgcctgcctgacttgttcacttggc

SEQ ID NO: 1243722 - DNA, 25 bp, Homo sapien
cacttggcacttgcagggccaggga

SEQ ID NO: 1243723 - DNA, 25 bp, Homo sapien
tctccactccccctgataggagtgg

SEQ ID NO: 1243724 - DNA, 25 bp, Homo sapien
aaaacagggtatgtcagcccctatc

SEQ ID NO: 1243725 - DNA, 25 bp, Homo sapien
gagtctaacactagcaatttcccgg

SEQ ID NO: 1243726 - DNA, 25 bp, Homo sapien
gacgacatgaaactctgaagaaccc

SEQ ID NO: 1243727 - DNA, 25 bp, Homo sapien
tggtatgatcctaagacacaaagtc

SEQ ID NO: 1243728 - DNA, 25 bp, Homo sapien
tctcctgttactacaatgatgtgaa

SEQ ID NO: 1243729 - DNA, 25 bp, Homo sapien
gctgttgagatctgctgatggcctt

SEQ ID NO: 1243730 - DNA, 25 bp, Homo sapien
tatctgagtcaccttgctgttgaga

SEQ ID NO: 1243731 - DNA, 25 bp, Homo sapien
tgccctataattccactatctgagt

SEQ ID NO: 1243732 - DNA, 25 bp, Homo sapien
catcagagaatgttatcgttttgcc

SEQ ID NO: 1243733 - DNA, 25 bp, Homo sapien
aaaagcccactacactcactcagag

SEQ ID NO: 1243734 - DNA, 25 bp, Homo sapien
tcttatagaattatgagtcgacagt

SEQ ID NO: 1243735 - DNA, 25 bp, Homo sapien
cataattcttcaaaagtcaacagag

SEQ ID NO: 1243736 - DNA, 25 bp, Homo sapien
tgaagataagactgtgagcaccatg

SEQ ID NO: 1243737 - DNA, 25 bp, Homo sapien
tctgccaacctcaggagtctttgcc

SEQ ID NO: 1243738 - DNA, 25 bp, Homo sapien
tattcaacagccagaattttggttg

SEQ ID NO: 1243739 - DNA, 25 bp, Homo sapien
gagtgaacctgaacccttgcacctg

SEQ ID NO: 1243740 - DNA, 25 bp, Homo sapien
aacaaggtagtgtatatttcaagat

SEQ ID NO: 1243741 - DNA, 25 bp, Homo sapien
ctacagagtaaataacaaggtagtg

SEQ ID NO: 1243742 - DNA, 25 bp, Homo sapien
caaggtagtgtatatttcaagatag

SEQ ID NO: 1243743 - DNA, 25 bp, Homo sapien
cagagtaaataacaaggtagtgtat

SEQ ID NO: 1243744 - DNA, 25 bp, Homo sapien
actctgagttcagcagtgattgcag

SEQ ID NO: 1243745 - DNA, 25 bp, Homo sapien
gtggactgtgatacacagctggaga

SEQ ID NO: 1243746 - DNA, 25 bp, Homo sapien
gctggagaatttgctctggtcttct

SEQ ID NO: 1243747 - DNA, 25 bp, Homo sapien
gattgcagtagcttctgcctccagc

SEQ ID NO: 1243748 - DNA, 25 bp, Homo sapien
gacagctccaaagcctataaggctt

SEQ ID NO: 1243749 - DNA, 25 bp, Homo sapien
gctccaaagcctataaggctttttg

SEQ ID NO: 1243750 - DNA, 25 bp, Homo sapien
agtccattcctgttgtttgcattca

SEQ ID NO: 1243751 - DNA, 25 bp, Homo sapien
cacttaagttagccaaagtccattc

SEQ ID NO: 1243752 - DNA, 25 bp, Homo sapien
taccccaagaggagtgactgagatc

SEQ ID NO: 1243753 - DNA, 25 bp, Homo sapien
tgagccaaggttcccggtaagagca

SEQ ID NO: 1243754 - DNA, 25 bp, Homo sapien
tgagctcacgcagcaagtgccagaa

SEQ ID NO: 1243755 - DNA, 25 bp, Homo sapien
taggtgccaatacatgtctgaagag

SEQ ID NO: 1243756 - DNA, 25 bp, Homo sapien
gacggatgatgggcacacaggaccc

SEQ ID NO: 1243757 - DNA, 25 bp, Homo sapien
ctcaactgttggagtgaagcgagga

SEQ ID NO: 1243758 - DNA, 25 bp, Homo sapien
gagcacgacctgtcctgaatggaag

SEQ ID NO: 1243759 - DNA, 25 bp, Homo sapien
tggaaggaactcaactgttggagtg

SEQ ID NO: 1243760 - DNA, 25 bp, Homo sapien
ttgtgctaggtaactctctaaaaga

SEQ ID NO: 1243761 - DNA, 25 bp, Homo sapien
cactcagaaacaggacaggaatcac

SEQ ID NO: 1243762 - DNA, 25 bp, Homo sapien
gaatcaccgagtcccagcatcagtt

SEQ ID NO: 1243763 - DNA, 25 bp, Homo sapien
ctctaaaagaaacgcctggaaggct

SEQ ID NO: 1243764 - DNA, 25 bp, Homo sapien
cacgtcacgatatctggcagaaggt

SEQ ID NO: 1243765 - DNA, 25 bp, Homo sapien
cacgcacgtcacgatatctggcaga

SEQ ID NO: 1243766 - DNA, 25 bp, Homo sapien
tgctgctctgcacgcacgtcacgat

SEQ ID NO: 1243767 - DNA, 25 bp, Homo sapien
tctgcacgcacgtcacgatatctgg

SEQ ID NO: 1243768 - DNA, 25 bp, Homo sapien
acagcctcgacaggcagggctccat

SEQ ID NO: 1243769 - DNA, 25 bp, Homo sapien
cataggcatacagcctcgacaggca

SEQ ID NO: 1243770 - DNA, 25 bp, Homo sapien
aaggttccataaccccataggcata

SEQ ID NO: 1243771 - DNA, 25 bp, Homo sapien
gaactgggcactccttcacggaagg

SEQ ID NO: 1243772 - DNA, 25 bp, Homo sapien
gggtgaattccatctaatactctga

SEQ ID NO: 1243773 - DNA, 25 bp, Homo sapien
catgtgcatgactgcaagaggaaat

SEQ ID NO: 1243774 - DNA, 25 bp, Homo sapien
gcatagataagccacaatggatagt

SEQ ID NO: 1243775 - DNA, 25 bp, Homo sapien
tcatgacatgcaaaactgattaggc

SEQ ID NO: 1243776 - DNA, 25 bp, Homo sapien
aataactgttatcactttaagttgc

SEQ ID NO: 1243777 - DNA, 25 bp, Homo sapien
cactttaagttgcatgaggctgaag

SEQ ID NO: 1243778 - DNA, 25 bp, Homo sapien
agcagtaagcaaacagagttggggg

SEQ ID NO: 1243779 - DNA, 25 bp, Homo sapien
taagcaaacagagttgggggagatg

SEQ ID NO: 1243780 - DNA, 25 bp, Homo sapien
cgacttgtccacagttagagagaag

SEQ ID NO: 1243781 - DNA, 25 bp, Homo sapien
acccgccacatgcccgacttgtcca

SEQ ID NO: 1243782 - DNA, 25 bp, Homo sapien
ttgtccacagttagagagaaggcac

SEQ ID NO: 1243783 - DNA, 25 bp, Homo sapien
acttgtccacagttagagagaaggc

SEQ ID NO: 1243784 - DNA, 25 bp, Homo sapien
tacagggattgcatctgacatctcc

SEQ ID NO: 1243785 - DNA, 25 bp, Homo sapien
atttcaggacctcaccacaagagac

SEQ ID NO: 1243786 - DNA, 25 bp, Homo sapien
tgtcattgccttacaatacagggat

SEQ ID NO: 1243787 - DNA, 25 bp, Homo sapien
catgctccatgatcattctgtttga

SEQ ID NO: 1243788 - DNA, 25 bp, Homo sapien
gacactgttgctacaggctgtgtgc

SEQ ID NO: 1243789 - DNA, 25 bp, Homo sapien
gctgtgtgcgtttggccctgagttc

SEQ ID NO: 1243790 - DNA, 25 bp, Homo sapien
ggccctgagttctagttatctgtga

SEQ ID NO: 1243791 - DNA, 25 bp, Homo sapien
tgctacaggctgtgtgcgtttggcc

SEQ ID NO: 1243792 - DNA, 25 bp, Homo sapien
ggacggtcacgtggagttctgccac

SEQ ID NO: 1243793 - DNA, 25 bp, Homo sapien
gcaccgacagggaggtggcgctcag

SEQ ID NO: 1243794 - DNA, 25 bp, Homo sapien
ggtcacgtggagttctgccacggca

SEQ ID NO: 1243795 - DNA, 25 bp, Homo sapien
acgtggagttctgccacggcacctc

SEQ ID NO: 1243796 - DNA, 25 bp, Homo sapien
ggaggcattccaaactcaggtataa

SEQ ID NO: 1243797 - DNA, 25 bp, Homo sapien
tccgaccttgttattctagctgaga

SEQ ID NO: 1243798 - DNA, 25 bp, Homo sapien
ggtataagagaatccctgacttcaa

SEQ ID NO: 1243799 - DNA, 25 bp, Homo sapien
taaatcgtgcttcaaatcagtcctg

SEQ ID NO: 1243800 - DNA, 25 bp, Homo sapien
atctccctgcatgtgcttaccctca

SEQ ID NO: 1243801 - DNA, 25 bp, Homo sapien
ccatctccctgcatgtgcttaccct

SEQ ID NO: 1243802 - DNA, 25 bp, Homo sapien
catctccctgcatgtgcttaccctc

SEQ ID NO: 1243803 - DNA, 25 bp, Homo sapien
aaaagagttatttggacacagatca

SEQ ID NO: 1243804 - DNA, 25 bp, Homo sapien
agagttatttggacacagatcaaaa

SEQ ID NO: 1243805 - DNA, 25 bp, Homo sapien
aaaaaagagttatttggacacagat

SEQ ID NO: 1243806 - DNA, 25 bp, Homo sapien
aaagagttatttggacacagatcaa

SEQ ID NO: 1243807 - DNA, 25 bp, Homo sapien
catgaacttgttaatctggtccttc

SEQ ID NO: 1243808 - DNA, 25 bp, Homo sapien
tctagtcagctatgtatcagaaagg

SEQ ID NO: 1243809 - DNA, 25 bp, Homo sapien
tttgaccagccatcaacagtgcagc

SEQ ID NO: 1243810 - DNA, 25 bp, Homo sapien
aaggtggcagtattggagtcacccc

SEQ ID NO: 1243811 - DNA, 25 bp, Homo sapien
ggaatgcagtgacgctctgcaccgt

SEQ ID NO: 1243812 - DNA, 25 bp, Homo sapien
agcgggcatctcgagtgtgcatacc

SEQ ID NO: 1243813 - DNA, 25 bp, Homo sapien
tcgagtgtgcataccgaggcacaga

SEQ ID NO: 1243814 - DNA, 25 bp, Homo sapien
ccgtctatgagagcgggcatctcga

SEQ ID NO: 1243815 - DNA, 25 bp, Homo sapien
taatgggaagctgatagggccttgc

SEQ ID NO: 1243816 - DNA, 25 bp, Homo sapien
ttcagtgaggaaaaccacggtgcct

SEQ ID NO: 1243817 - DNA, 25 bp, Homo sapien
cacagaaagcattccacaaaacggg

SEQ ID NO: 1243818 - DNA, 25 bp, Homo sapien
ccttaggcatccagaagtaggaaac

SEQ ID NO: 1243819 - DNA, 25 bp, Homo sapien
cacagggacgcgtgcttgttctcca

SEQ ID NO: 1243820 - DNA, 25 bp, Homo sapien
tcactgtagtccaggcgattggtgg

SEQ ID NO: 1243821 - DNA, 25 bp, Homo sapien
tccatagagtatcactggcctggtg

SEQ ID NO: 1243822 - DNA, 25 bp, Homo sapien
gtagaggtcccaaaatgcagtccat

SEQ ID NO: 1243823 - DNA, 25 bp, Homo sapien
tgttaagcgtaacatggtggcagct

SEQ ID NO: 1243824 - DNA, 25 bp, Homo sapien
caagaaccgtgatcatgcatgcagt

SEQ ID NO: 1243825 - DNA, 25 bp, Homo sapien
tcagctgggcagatgcattaaggtt

SEQ ID NO: 1243826 - DNA, 25 bp, Homo sapien
acagcagcacgtctgataccatcag

SEQ ID NO: 1243827 - DNA, 25 bp, Homo sapien
catgaccgatgtctggctgaggctg

SEQ ID NO: 1243828 - DNA, 25 bp, Homo sapien
ggtagtgaacgtttgctgagctgtt

SEQ ID NO: 1243829 - DNA, 25 bp, Homo sapien
tgccagttagaagtgggtagtgaac

SEQ ID NO: 1243830 - DNA, 25 bp, Homo sapien
atgtgagccccctgatgccaccgag

SEQ ID NO: 1243831 - DNA, 25 bp, Homo sapien
gctgggccggccgccctacaaggag

SEQ ID NO: 1243832 - DNA, 25 bp, Homo sapien
caaggagccacaggattgcagccat

SEQ ID NO: 1243833 - DNA, 25 bp, Homo sapien
cctacaaggagccacaggattgcag

SEQ ID NO: 1243834 - DNA, 25 bp, Homo sapien
gggccggccgccctacaaggagcca

SEQ ID NO: 1243835 - DNA, 25 bp, Homo sapien
gcgctcgtcatttccggactctctg

SEQ ID NO: 1243836 - DNA, 25 bp, Homo sapien
gagcttcctcttcggcaagaggagc

SEQ ID NO: 1243837 - DNA, 25 bp, Homo sapien
gcaagaggagcttttccagcgcgct

SEQ ID NO: 1243838 - DNA, 25 bp, Homo sapien
cgaggcgctcatcaggtccagcctg

SEQ ID NO: 1243839 - DNA, 25 bp, Homo sapien
aatataagctatgaatatcaatgca

SEQ ID NO: 1243840 - DNA, 25 bp, Homo sapien
aagaataagtgaaagcattaggcaa

SEQ ID NO: 1243841 - DNA, 25 bp, Homo sapien
gaaagcattaggcaagtgcaaacaa

SEQ ID NO: 1243842 - DNA, 25 bp, Homo sapien
tggcttaatattgaacacagatgta

SEQ ID NO: 1243843 - DNA, 25 bp, Homo sapien
agaaagcgtggtgagtggccacttt

SEQ ID NO: 1243844 - DNA, 25 bp, Homo sapien
ctgcaagaaagcgtggtgagtggcc

SEQ ID NO: 1243845 - DNA, 25 bp, Homo sapien
aggctgcaagaaagcgtggtgagtg

SEQ ID NO: 1243846 - DNA, 25 bp, Homo sapien
caagaaagcgtggtgagtggccact

SEQ ID NO: 1243847 - DNA, 25 bp, Homo sapien
tatacatccccgtaatgtcagagca

SEQ ID NO: 1243848 - DNA, 25 bp, Homo sapien
taaaatacattagacctacagcgct

SEQ ID NO: 1243849 - DNA, 25 bp, Homo sapien
gatacatgtgcccagttatctcagc

SEQ ID NO: 1243850 - DNA, 25 bp, Homo sapien
taattccaggcaacaatagcaaatg

SEQ ID NO: 1243851 - DNA, 25 bp, Homo sapien
agaaaagcacgggctccccagatgg

SEQ ID NO: 1243852 - DNA, 25 bp, Homo sapien
gagaaaagcacgggctccccagatg

SEQ ID NO: 1243853 - DNA, 25 bp, Homo sapien
aggtctccagaaggcgagatgccag

SEQ ID NO: 1243854 - DNA, 25 bp, Homo sapien
actgtattggaagcagggggctcaa

SEQ ID NO: 1243855 - DNA, 25 bp, Homo sapien
gcctgaggtctccagaaggcgagat

SEQ ID NO: 1243856 - DNA, 25 bp, Homo sapien
tggcagcctccggtagtgactgtat

SEQ ID NO: 1243857 - DNA, 25 bp, Homo sapien
ccactatggacaaagtctgaatgct

SEQ ID NO: 1243858 - DNA, 25 bp, Homo sapien
gatttcctgagtggccactatggac

SEQ ID NO: 1243859 - DNA, 25 bp, Homo sapien
tgagtggccactatggacaaagtct

SEQ ID NO: 1243860 - DNA, 25 bp, Homo sapien
aaggacggtcctggccccgctggct

SEQ ID NO: 1243861 - DNA, 25 bp, Homo sapien
tgatgttgaacctgaataatgtcta

SEQ ID NO: 1243862 - DNA, 25 bp, Homo sapien
tgttgaacctgaataatgtctatca

SEQ ID NO: 1243863 - DNA, 25 bp, Homo sapien
gaataatgtctatcaattcattcaa

SEQ ID NO: 1243864 - DNA, 25 bp, Homo sapien
gaacctgaataatgtctatcaattc

SEQ ID NO: 1243865 - DNA, 25 bp, Homo sapien
caagaatgatggcacatcttgtgga

SEQ ID NO: 1243866 - DNA, 25 bp, Homo sapien
tttgtttgcaagaatgatggcacat

SEQ ID NO: 1243867 - DNA, 25 bp, Homo sapien
aatgatggcacatcttgtggaatcc

SEQ ID NO: 1243868 - DNA, 25 bp, Homo sapien
ctttcctgcatctggggagctgttt

SEQ ID NO: 1243869 - DNA, 25 bp, Homo sapien
gctgagagaaatgaagagtcgcctt

SEQ ID NO: 1243870 - DNA, 25 bp, Homo sapien
taaaatgggatctcatcgtctgcgc

SEQ ID NO: 1243871 - DNA, 25 bp, Homo sapien
tgtcattgcgagtatgtatccacca

SEQ ID NO: 1243872 - DNA, 25 bp, Homo sapien
tcctctcatttgcagtcagcgccag

SEQ ID NO: 1243873 - DNA, 25 bp, Homo sapien
gcagatgtcgtttctttggtatcaa

SEQ ID NO: 1243874 - DNA, 25 bp, Homo sapien
tgtgtaagctcccatacatctgagt

SEQ ID NO: 1243875 - DNA, 25 bp, Homo sapien
catctgagtattgagcttggagcct

SEQ ID NO: 1243876 - DNA, 25 bp, Homo sapien
ttcatactttgaaacacaatgctca

SEQ ID NO: 1243877 - DNA, 25 bp, Homo sapien
ctctcccttggacactggaagggaa

SEQ ID NO: 1243878 - DNA, 25 bp, Homo sapien
tccaaagaaagaagaggtccgtgca

SEQ ID NO: 1243879 - DNA, 25 bp, Homo sapien
aagaagaggtccgtgcaggatgcct

SEQ ID NO: 1243880 - DNA, 25 bp, Homo sapien
gaggtccgtgcaggatgcctcatca

SEQ ID NO: 1243881 - DNA, 25 bp, Homo sapien
tgagtcattatgaaagcccaaacct

SEQ ID NO: 1243882 - DNA, 25 bp, Homo sapien
cttgctgaaaattcttgtccacatg

SEQ ID NO: 1243883 - DNA, 25 bp, Homo sapien
tgatgtaagctactcaattccttca

SEQ ID NO: 1243884 - DNA, 25 bp, Homo sapien
ttctcgcaaggatatgtcagggtgc

SEQ ID NO: 1243885 - DNA, 25 bp, Homo sapien
gaacaaattgcaaggaagtatctgc

SEQ ID NO: 1243886 - DNA, 25 bp, Homo sapien
gatgaaggggaaaccgatctcagcc

SEQ ID NO: 1243887 - DNA, 25 bp, Homo sapien
tgcaagagaccaggaataataagtc

SEQ ID NO: 1243888 - DNA, 25 bp, Homo sapien
tttatggctagaattgtatcatttc

SEQ ID NO: 1243889 - DNA, 25 bp, Homo sapien
aaacgttcgtattctgtgatagtcg

SEQ ID NO: 1243890 - DNA, 25 bp, Homo sapien
aaacatgcatgctctctgtaactga

SEQ ID NO: 1243891 - DNA, 25 bp, Homo sapien
tacttgattaatggaaacggaaaca

SEQ ID NO: 1243892 - DNA, 25 bp, Homo sapien
actgatgcagaagttgaaacgttcg

SEQ ID NO: 1243893 - DNA, 25 bp, Homo sapien
gctccacgcagtctgcttcagtgca

SEQ ID NO: 1243894 - DNA, 25 bp, Homo sapien
aggtgtgaggaccatgggccctcat

SEQ ID NO: 1243895 - DNA, 25 bp, Homo sapien
tctgcttcagtgcagtgaaggtagg

SEQ ID NO: 1243896 - DNA, 25 bp, Homo sapien
tgtttacagtgtggcccggagcgtc

SEQ ID NO: 1243897 - DNA, 25 bp, Homo sapien
tatcttttggagcaaattgacatgc

SEQ ID NO: 1243898 - DNA, 25 bp, Homo sapien
gggctcttcccgcaaatcaacactt

SEQ ID NO: 1243899 - DNA, 25 bp, Homo sapien
aacactttctgcacttatcttttgg

SEQ ID NO: 1243900 - DNA, 25 bp, Homo sapien
tggtggttctggtaagtcgtttaca

SEQ ID NO: 1243901 - DNA, 25 bp, Homo sapien
agcctgctgcccctttgctcatcca

SEQ ID NO: 1243902 - DNA, 25 bp, Homo sapien
tgccctggcattattttgtgaactc

SEQ ID NO: 1243903 - DNA, 25 bp, Homo sapien
ctgatctgttggtgccctggcatta

SEQ ID NO: 1243904 - DNA, 25 bp, Homo sapien
tgttggtgccctggcattattttgt

SEQ ID NO: 1243905 - DNA, 25 bp, Homo sapien
tacagcaaaacgttgtggggttgga

SEQ ID NO: 1243906 - DNA, 25 bp, Homo sapien
tccatacagcaaaacgttgtggggt

SEQ ID NO: 1243907 - DNA, 25 bp, Homo sapien
ctcctcctaccactgttccatacag

SEQ ID NO: 1243908 - DNA, 25 bp, Homo sapien
ctcctaccactgttccatacagcaa

SEQ ID NO: 1243909 - DNA, 25 bp, Homo sapien
accggggacgtgacagtgcccactg

SEQ ID NO: 1243910 - DNA, 25 bp, Homo sapien
gcattacttgatcggtaagccactg

SEQ ID NO: 1243911 - DNA, 25 bp, Homo sapien
aagagaacattgtcacttgcacatt

SEQ ID NO: 1243912 - DNA, 25 bp, Homo sapien
tgcacacacactgtcggaaggcaca

SEQ ID NO: 1243913 - DNA, 25 bp, Homo sapien
caggcagtttccgcaaagctctctt

SEQ ID NO: 1243914 - DNA, 25 bp, Homo sapien
acaccaggcagtttccgcaaagctc

SEQ ID NO: 1243915 - DNA, 25 bp, Homo sapien
atgacaccaggcagtttccgcaaag

SEQ ID NO: 1243916 - DNA, 25 bp, Homo sapien
accaggcagtttccgcaaagctctc

SEQ ID NO: 1243917 - DNA, 25 bp, Homo sapien
agatgcccctaggtgattccctgca

SEQ ID NO: 1243918 - DNA, 25 bp, Homo sapien
tccaaaccaccttgccaagttctcc

SEQ ID NO: 1243919 - DNA, 25 bp, Homo sapien
ccttcttgcacacatgtgcggcatc

SEQ ID NO: 1243920 - DNA, 25 bp, Homo sapien
acacatgtgcggcatccagatgccc

SEQ ID NO: 1243921 - DNA, 25 bp, Homo sapien
caggcatgcaaagtccccatgcaaa

SEQ ID NO: 1243922 - DNA, 25 bp, Homo sapien
gcatgcaaagtccccatgcaaatgg

SEQ ID NO: 1243923 - DNA, 25 bp, Homo sapien
ggcatgcaaagtccccatgcaaatg

SEQ ID NO: 1243924 - DNA, 25 bp, Homo sapien
aacaggcatgcaaagtccccatgca

SEQ ID NO: 1243925 - DNA, 25 bp, Homo sapien
gatgggaaccgtaggtgatggctct

SEQ ID NO: 1243926 - DNA, 25 bp, Homo sapien
taaagcagactgcatgtgcccaaag

SEQ ID NO: 1243927 - DNA, 25 bp, Homo sapien
gtccttcccaagctttgcattaaag

SEQ ID NO: 1243928 - DNA, 25 bp, Homo sapien
cattcaggtaggtctgatgggaacc

SEQ ID NO: 1243929 - DNA, 25 bp, Homo sapien
acagcgatgaagataaagtgaggat

SEQ ID NO: 1243930 - DNA, 25 bp, Homo sapien
gagacacagcgatgaagataaagtg

SEQ ID NO: 1243931 - DNA, 25 bp, Homo sapien
gacacagcgatgaagataaagtgag

SEQ ID NO: 1243932 - DNA, 25 bp, Homo sapien
gggagacacagcgatgaagataaag

SEQ ID NO: 1243933 - DNA, 25 bp, Homo sapien
agctttgtttccaggcttgagagct

SEQ ID NO: 1243934 - DNA, 25 bp, Homo sapien
tgagtggagctttgtttccaggctt

SEQ ID NO: 1243935 - DNA, 25 bp, Homo sapien
tcaggctcggtgagtggagctttgt

SEQ ID NO: 1243936 - DNA, 25 bp, Homo sapien
gctcggtgagtggagctttgtttcc

SEQ ID NO: 1243937 - DNA, 25 bp, Homo sapien
tctaccatcaaataatgactgtctc

SEQ ID NO: 1243938 - DNA, 25 bp, Homo sapien
agcctctaccatcaaataatgactg

SEQ ID NO: 1243939 - DNA, 25 bp, Homo sapien
cctctaccatcaaataatgactgtc

SEQ ID NO: 1243940 - DNA, 25 bp, Homo sapien
taccatcaaataatgactgtctctc

SEQ ID NO: 1243941 - DNA, 25 bp, Homo sapien
catccagtcaactgaatggctcagc

SEQ ID NO: 1243942 - DNA, 25 bp, Homo sapien
gttagaatccattaatacttccaag

SEQ ID NO: 1243943 - DNA, 25 bp, Homo sapien
cctggaatttgtctccctgttagaa

SEQ ID NO: 1243944 - DNA, 25 bp, Homo sapien
tacttccaagatgacggcatccagt

SEQ ID NO: 1243945 - DNA, 25 bp, Homo sapien
gctctgtttgaatccattcccgttg

SEQ ID NO: 1243946 - DNA, 25 bp, Homo sapien
gaatccattcccgttgctgctttat

SEQ ID NO: 1243947 - DNA, 25 bp, Homo sapien
cattcccgttgctgctttatctaac

SEQ ID NO: 1243948 - DNA, 25 bp, Homo sapien
tatgactgctctgtttgaatccatt

SEQ ID NO: 1243949 - DNA, 25 bp, Homo sapien
gttgtgtgaggtggacaaatgtcct

SEQ ID NO: 1243950 - DNA, 25 bp, Homo sapien
tggctggtcaccctcagtatgagag

SEQ ID NO: 1243951 - DNA, 25 bp, Homo sapien
ggtcacaggacattcagtgctgaag

SEQ ID NO: 1243952 - DNA, 25 bp, Homo sapien
gagagtcttgcagatgaaacgtaag

SEQ ID NO: 1243953 - DNA, 25 bp, Homo sapien
acgtcccaccatggtcgtgcccagg

SEQ ID NO: 1243954 - DNA, 25 bp, Homo sapien
atcgtccggcggtgtggccgtcggc

SEQ ID NO: 1243955 - DNA, 25 bp, Homo sapien
aatcgcgatcggtgacggcagagat

SEQ ID NO: 1243956 - DNA, 25 bp, Homo sapien
tcacgggctagctgcccaaagggtc

SEQ ID NO: 1243957 - DNA, 25 bp, Homo sapien
tcgtagtcatagagcgcggcccaca

SEQ ID NO: 1243958 - DNA, 25 bp, Homo sapien
gaggtggacgacgaggacgctgagc

SEQ ID NO: 1243959 - DNA, 25 bp, Homo sapien
tcgtcgcccgacacggcggcgtcct

SEQ ID NO: 1243960 - DNA, 25 bp, Homo sapien
gtcctcgccgcgagcctcgtagtca

SEQ ID NO: 1243961 - DNA, 25 bp, Homo sapien
cggggaagatgccgaggcgccgctg

SEQ ID NO: 1243962 - DNA, 25 bp, Homo sapien
tagttggcggggaagatgccgaggc

SEQ ID NO: 1243963 - DNA, 25 bp, Homo sapien
gtagttggcggggaagatgccgagg

SEQ ID NO: 1243964 - DNA, 25 bp, Homo sapien
tggcggccgggcggcagggagccac

SEQ ID NO: 1243965 - DNA, 25 bp, Homo sapien
ctggcggccgggcggcagggagcca

SEQ ID NO: 1243966 - DNA, 25 bp, Homo sapien
cggggctggcggccgggcggcaggg

SEQ ID NO: 1243967 - DNA, 25 bp, Homo sapien
ggctggcggccgggcggcagggagc

SEQ ID NO: 1243968 - DNA, 25 bp, Homo sapien
ctcgaaggcgacgtgtaccggggag

SEQ ID NO: 1243969 - DNA, 25 bp, Homo sapien
cccccagcgccgatgagctccttca

SEQ ID NO: 1243970 - DNA, 25 bp, Homo sapien
agcccccagcgccgatgagctcctt

SEQ ID NO: 1243971 - DNA, 25 bp, Homo sapien
gcccccagcgccgatgagctccttc

SEQ ID NO: 1243972 - DNA, 25 bp, Homo sapien
aagcccccagcgccgatgagctcct

SEQ ID NO: 1243973 - DNA, 25 bp, Homo sapien
tcgcgccgcacgctctcggcagccg

SEQ ID NO: 1243974 - DNA, 25 bp, Homo sapien
aggcacacgccgcgcagctcgatga

SEQ ID NO: 1243975 - DNA, 25 bp, Homo sapien
gctccgggtcctggcgcgccgcctt

SEQ ID NO: 1243976 - DNA, 25 bp, Homo sapien
atggcgaagagccgagcctcgcgcc

SEQ ID NO: 1243977 - DNA, 25 bp, Homo sapien
ggcgttggcagcggccagcgctcgg

SEQ ID NO: 1243978 - DNA, 25 bp, Homo sapien
ttgagcgctccgccgcgggcgaact

SEQ ID NO: 1243979 - DNA, 25 bp, Homo sapien
gttgaccagcacgtgcggagggatg

SEQ ID NO: 1243980 - DNA, 25 bp, Homo sapien
gtgcggagggatgcggcgcgcgcgg

SEQ ID NO: 1243981 - DNA, 25 bp, Homo sapien
tgcaggtagagcatgccccgcgcta

SEQ ID NO: 1243982 - DNA, 25 bp, Homo sapien
gcaggtagagcatgccccgcgctat

SEQ ID NO: 1243983 - DNA, 25 bp, Homo sapien
catataatctgcagaaggcctcggt

SEQ ID NO: 1243984 - DNA, 25 bp, Homo sapien
cttgtaaagttgacgtccccgagtg

SEQ ID NO: 1243985 - DNA, 25 bp, Homo sapien
ggtgaagacggtcatgggttccata

SEQ ID NO: 1243986 - DNA, 25 bp, Homo sapien
gactttgatgaaggccaccgggtga

SEQ ID NO: 1243987 - DNA, 25 bp, Homo sapien
tcatattttgaataggcaaacagca

SEQ ID NO: 1243988 - DNA, 25 bp, Homo sapien
atattttgaataggcaaacagcaac

SEQ ID NO: 1243989 - DNA, 25 bp, Homo sapien
catattttgaataggcaaacagcaa

SEQ ID NO: 1243990 - DNA, 25 bp, Homo sapien
gaaagacctccagctgttgtaggcc

SEQ ID NO: 1243991 - DNA, 25 bp, Homo sapien
aaacagcaattctataggctctttt

SEQ ID NO: 1243992 - DNA, 25 bp, Homo sapien
tcacaggattgaaagacctccagct

SEQ ID NO: 1243993 - DNA, 25 bp, Homo sapien
gaatatgaagcgatcttcaatatta

SEQ ID NO: 1243994 - DNA, 25 bp, Homo sapien
catctggactgacttctctgtgcct

SEQ ID NO: 1243995 - DNA, 25 bp, Homo sapien
ggacatctggactgacttctctgtg

SEQ ID NO: 1243996 - DNA, 25 bp, Homo sapien
gacatctggactgacttctctgtgc

SEQ ID NO: 1243997 - DNA, 25 bp, Homo sapien
tgggacatctggactgacttctctg

SEQ ID NO: 1243998 - DNA, 25 bp, Homo sapien
aatattagatgagtctataagcaac

SEQ ID NO: 1243999 - DNA, 25 bp, Homo sapien
tgctccaatattagatgagtctata

SEQ ID NO: 1244000 - DNA, 25 bp, Homo sapien
tccaatattagatgagtctataagc

SEQ ID NO: 1244001 - DNA, 25 bp, Homo sapien
tattagatgagtctataagcaacat

SEQ ID NO: 1244002 - DNA, 25 bp, Homo sapien
cgccaacccaaaatctgtaatcttc

SEQ ID NO: 1244003 - DNA, 25 bp, Homo sapien
ctcgccaacccaaaatctgtaatct

SEQ ID NO: 1244004 - DNA, 25 bp, Homo sapien
ttccctcgccaacccaaaatctgta

SEQ ID NO: 1244005 - DNA, 25 bp, Homo sapien
ccattccctcgccaacccaaaatct

SEQ ID NO: 1244006 - DNA, 25 bp, Homo sapien
acttgatcacttcgggggccatcca

SEQ ID NO: 1244007 - DNA, 25 bp, Homo sapien
gaaaacaaggaagacttgatcactt

SEQ ID NO: 1244008 - DNA, 25 bp, Homo sapien
cttcgggggccatccaggcataggt

SEQ ID NO: 1244009 - DNA, 25 bp, Homo sapien
acaaggaagacttgatcacttcggg

SEQ ID NO: 1244010 - DNA, 25 bp, Homo sapien
cgaggccatcaatgccccgataggg

SEQ ID NO: 1244011 - DNA, 25 bp, Homo sapien
ggacttctccggtgagcagttccca

SEQ ID NO: 1244012 - DNA, 25 bp, Homo sapien
tattgactgctaccccataagccac

SEQ ID NO: 1244013 - DNA, 25 bp, Homo sapien
tgagcttggcaaacggctcagggca

SEQ ID NO: 1244014 - DNA, 25 bp, Homo sapien
tgaaaagattcttgaggcatctcag

SEQ ID NO: 1244015 - DNA, 25 bp, Homo sapien
caactgttcgagaattaaggcaaac

SEQ ID NO: 1244016 - DNA, 25 bp, Homo sapien
caaacgatggacgaatatgagggtc

SEQ ID NO: 1244017 - DNA, 25 bp, Homo sapien
ttccagtcatcttgcatggaatgaa

SEQ ID NO: 1244018 - DNA, 25 bp, Homo sapien
tatgctgtttaaaaatttctctcac

SEQ ID NO: 1244019 - DNA, 25 bp, Homo sapien
attatgctgtttaaaaatttctctc

SEQ ID NO: 1244020 - DNA, 25 bp, Homo sapien
ttatgctgtttaaaaatttctctca

SEQ ID NO: 1244021 - DNA, 25 bp, Homo sapien
ctgggagaacagtgatcccattacc

SEQ ID NO: 1244022 - DNA, 25 bp, Homo sapien
gtgatcccattaccacaaataaggg

SEQ ID NO: 1244023 - DNA, 25 bp, Homo sapien
tgtcaacaaggtccaaatcactagc

SEQ ID NO: 1244024 - DNA, 25 bp, Homo sapien
gagattatatgcagccccttttaaa

SEQ ID NO: 1244025 - DNA, 25 bp, Homo sapien
aacaggcagtcacccaagcagtcta

SEQ ID NO: 1244026 - DNA, 25 bp, Homo sapien
tgaggaggtacagagtaacagagtc

SEQ ID NO: 1244027 - DNA, 25 bp, Homo sapien
tctggctgctttgcatacaggactc

SEQ ID NO: 1244028 - DNA, 25 bp, Homo sapien
gacacagggttacagtgatggctcc

SEQ ID NO: 1244029 - DNA, 25 bp, Homo sapien
agttcccgctccagcacgtcgatct

SEQ ID NO: 1244030 - DNA, 25 bp, Homo sapien
tgctgcagagccgcccgagtcagct

SEQ ID NO: 1244031 - DNA, 25 bp, Homo sapien
tcgatctcgcgctctgccagctgct

SEQ ID NO: 1244032 - DNA, 25 bp, Homo sapien
tgctcacgccgctttagcagctcct

SEQ ID NO: 1244033 - DNA, 25 bp, Homo sapien
tgaaggtaaactgattcgatgtcca

SEQ ID NO: 1244034 - DNA, 25 bp, Homo sapien
tgagctttaaacgacttctcttaaa

SEQ ID NO: 1244035 - DNA, 25 bp, Homo sapien
actgattcgatgtccatctttgagc

SEQ ID NO: 1244036 - DNA, 25 bp, Homo sapien
tctttgagctttaaacgacttctct

SEQ ID NO: 1244037 - DNA, 25 bp, Homo sapien
aaactccagatctcaggcaacccgt

SEQ ID NO: 1244038 - DNA, 25 bp, Homo sapien
tctcaaactccagatctcaggcaac

SEQ ID NO: 1244039 - DNA, 25 bp, Homo sapien
actccagatctcaggcaacccgtcc

SEQ ID NO: 1244040 - DNA, 25 bp, Homo sapien
agatctcaggcaacccgtccacttc

SEQ ID NO: 1244041 - DNA, 25 bp, Homo sapien
cagtctgctttgaataaactcaggg

SEQ ID NO: 1244042 - DNA, 25 bp, Homo sapien
aactcagggtattagccaaggaaca

SEQ ID NO: 1244043 - DNA, 25 bp, Homo sapien
taagacagaccagtcagtgaccctg

SEQ ID NO: 1244044 - DNA, 25 bp, Homo sapien
tctatggctgactgacacgtaagac

SEQ ID NO: 1244045 - DNA, 25 bp, Homo sapien
tattctgtgctagtcccttgtcaga

SEQ ID NO: 1244046 - DNA, 25 bp, Homo sapien
tacacttccattagctatagatagc

SEQ ID NO: 1244047 - DNA, 25 bp, Homo sapien
gcttttcggttcaatatagtcccaa

SEQ ID NO: 1244048 - DNA, 25 bp, Homo sapien
cattctaactaaggtgagctagctc

SEQ ID NO: 1244049 - DNA, 25 bp, Homo sapien
gctatggacctcaaaccagtaagga

SEQ ID NO: 1244050 - DNA, 25 bp, Homo sapien
tggccctggatttaaatgagtcctg

SEQ ID NO: 1244051 - DNA, 25 bp, Homo sapien
tctaggcattctacaaatgctggct

SEQ ID NO: 1244052 - DNA, 25 bp, Homo sapien
caatatttcacatggtggtcgtggt

SEQ ID NO: 1244053 - DNA, 25 bp, Homo sapien
caaaaagggagaactggtatttcat

SEQ ID NO: 1244054 - DNA, 25 bp, Homo sapien
gcaaaaagggagaactggtatttca

SEQ ID NO: 1244055 - DNA, 25 bp, Homo sapien
actgctgctgttcaggctccgccgt

SEQ ID NO: 1244056 - DNA, 25 bp, Homo sapien
aggctccgccgtttgtccaagttgg

SEQ ID NO: 1244057 - DNA, 25 bp, Homo sapien
tatggctcggagtcggggcatcatt

SEQ ID NO: 1244058 - DNA, 25 bp, Homo sapien
ttgggagaggcctgcacggttatct

SEQ ID NO: 1244059 - DNA, 25 bp, Homo sapien
gttgtggcacctacgaaatgtccta

SEQ ID NO: 1244060 - DNA, 25 bp, Homo sapien
tttaactggtacacatcttgggccc

SEQ ID NO: 1244061 - DNA, 25 bp, Homo sapien
tcctggtgtccgagaacttgcaaaa

SEQ ID NO: 1244062 - DNA, 25 bp, Homo sapien
gaggcattcttggagcacccagggt

SEQ ID NO: 1244063 - DNA, 25 bp, Homo sapien
ccttcccctcttgatttgctcctct

SEQ ID NO: 1244064 - DNA, 25 bp, Homo sapien
tgagggcagcagaaccggaaaagct

SEQ ID NO: 1244065 - DNA, 25 bp, Homo sapien
gactgactgatctacactcccagag

SEQ ID NO: 1244066 - DNA, 25 bp, Homo sapien
cagttttcatttaagtgagggcagc

SEQ ID NO: 1244067 - DNA, 25 bp, Homo sapien
cagtagaatgacagataaacggatc

SEQ ID NO: 1244068 - DNA, 25 bp, Homo sapien
gtagatgcatgcctaaatgtaagtg

SEQ ID NO: 1244069 - DNA, 25 bp, Homo sapien
taagtgtgcatgtgtaacaatcttg

SEQ ID NO: 1244070 - DNA, 25 bp, Homo sapien
gcatataaatgtgcttaggccgggt

SEQ ID NO: 1244071 - DNA, 25 bp, Homo sapien
ctttgtaaaattggacacattgtgg

SEQ ID NO: 1244072 - DNA, 25 bp, Homo sapien
cagttaaagttttgacctagaggca

SEQ ID NO: 1244073 - DNA, 25 bp, Homo sapien
caattttgctcagtcatgacaacac

SEQ ID NO: 1244074 - DNA, 25 bp, Homo sapien
gatgctgtccctctaatttaagtgc

SEQ ID NO: 1244075 - DNA, 25 bp, Homo sapien
tttttcactacctcacaggacgatg

SEQ ID NO: 1244076 - DNA, 25 bp, Homo sapien
tgaatcatatcagttgtgaaactac

SEQ ID NO: 1244077 - DNA, 25 bp, Homo sapien
ttaaccatattaaccacaacaatca

SEQ ID NO: 1244078 - DNA, 25 bp, Homo sapien
tcatattaaccaatattggctttgt

SEQ ID NO: 1244079 - DNA, 25 bp, Homo sapien
gaaactaccttactcaaaacatgaa

SEQ ID NO: 1244080 - DNA, 25 bp, Homo sapien
tgtcgaaagactgtgttccttcccc

SEQ ID NO: 1244081 - DNA, 25 bp, Homo sapien
cctcaaattcttcttgtcgaaagac

SEQ ID NO: 1244082 - DNA, 25 bp, Homo sapien
tctttgcaatctgttctatctttca

SEQ ID NO: 1244083 - DNA, 25 bp, Homo sapien
attcctttttacatcctcaaattct

SEQ ID NO: 1244084 - DNA, 25 bp, Homo sapien
gttgccatcggagagaggtcttatc

SEQ ID NO: 1244085 - DNA, 25 bp, Homo sapien
ttaagatagttgaccaaggactgtt

SEQ ID NO: 1244086 - DNA, 25 bp, Homo sapien
ggtccacaaacaatgaagccaaggg

SEQ ID NO: 1244087 - DNA, 25 bp, Homo sapien
ctggctggtccacaaacaatgaagc

SEQ ID NO: 1244088 - DNA, 25 bp, Homo sapien
ttgggcaacggttcttcagcagcct

SEQ ID NO: 1244089 - DNA, 25 bp, Homo sapien
tggaagcccgctggaagattccctc

SEQ ID NO: 1244090 - DNA, 25 bp, Homo sapien
cccaagaggtagatcaatgtaggcc

SEQ ID NO: 1244091 - DNA, 25 bp, Homo sapien
agaaggacggtgcacccatacagag

SEQ ID NO: 1244092 - DNA, 25 bp, Homo sapien
caaaaatccggagtgagcatctcag

SEQ ID NO: 1244093 - DNA, 25 bp, Homo sapien
gaagcacagtaaggtacattcccac

SEQ ID NO: 1244094 - DNA, 25 bp, Homo sapien
tacaatcagtgtcaagtcttggcat

SEQ ID NO: 1244095 - DNA, 25 bp, Homo sapien
gatgcccagggcacttgacagtggc

SEQ ID NO: 1244096 - DNA, 25 bp, Homo sapien
gtggctgagataatagttgcaccag

SEQ ID NO: 1244097 - DNA, 25 bp, Homo sapien
agtggctgagataatagttgcacca

SEQ ID NO: 1244098 - DNA, 25 bp, Homo sapien
cactgctgtctgtgggtaagcctga

SEQ ID NO: 1244099 - DNA, 25 bp, Homo sapien
gcgacgctgaggcacgatgtggaca

SEQ ID NO: 1244100 - DNA, 25 bp, Homo sapien
gggtgagacctcccttggcagatga

SEQ ID NO: 1244101 - DNA, 25 bp, Homo sapien
gtaagcctgaggcagatctgagcgg

SEQ ID NO: 1244102 - DNA, 25 bp, Homo sapien
catccagtaatgaaggcacatggga

SEQ ID NO: 1244103 - DNA, 25 bp, Homo sapien
cacgtcagcatccagtaatgaaggc

SEQ ID NO: 1244104 - DNA, 25 bp, Homo sapien
cttggcagcgaggaattgggtggga

SEQ ID NO: 1244105 - DNA, 25 bp, Homo sapien
ggcacatgggatttagttctctcct

SEQ ID NO: 1244106 - DNA, 25 bp, Homo sapien
gttcatatatagatggccggctggt

SEQ ID NO: 1244107 - DNA, 25 bp, Homo sapien
tctccagttcatatatagatggccg

SEQ ID NO: 1244108 - DNA, 25 bp, Homo sapien
ggcacagtgtagtccctgctctgac

SEQ ID NO: 1244109 - DNA, 25 bp, Homo sapien
tccagttcatatatagatggccggc

SEQ ID NO: 1244110 - DNA, 25 bp, Homo sapien
gaactggacatatgcattatcggcc

SEQ ID NO: 1244111 - DNA, 25 bp, Homo sapien
ttatcggcccacagccaaggttagg

SEQ ID NO: 1244112 - DNA, 25 bp, Homo sapien
tgtggtctcagtcaaatggcaagga

SEQ ID NO: 1244113 - DNA, 25 bp, Homo sapien
aaggcaaatttaccaagctctcggg

SEQ ID NO: 1244114 - DNA, 25 bp, Homo sapien
aaaataaaccattgcaaactatagt

SEQ ID NO: 1244115 - DNA, 25 bp, Homo sapien
gcaggttaatacctggcttattaaa

SEQ ID NO: 1244116 - DNA, 25 bp, Homo sapien
tatatttagcaggttaatacctggc

SEQ ID NO: 1244117 - DNA, 25 bp, Homo sapien
gagaggatcaaagctactgagcaaa

SEQ ID NO: 1244118 - DNA, 25 bp, Homo sapien
gacgttgcctgtccaaaaccgagca

SEQ ID NO: 1244119 - DNA, 25 bp, Homo sapien
tcaacgatcaccaaaattccgatga

SEQ ID NO: 1244120 - DNA, 25 bp, Homo sapien
gaatttgctcgttggatacctgtaa

SEQ ID NO: 1244121 - DNA, 25 bp, Homo sapien
tccaagtccgacttctgtctcaaat

SEQ ID NO: 1244122 - DNA, 25 bp, Homo sapien
tggccttcacctacatgattaaaac

SEQ ID NO: 1244123 - DNA, 25 bp, Homo sapien
taatcactattgtctatggccttca

SEQ ID NO: 1244124 - DNA, 25 bp, Homo sapien
tggccgatagaacgagacactgttt

SEQ ID NO: 1244125 - DNA, 25 bp, Homo sapien
taaaaagccttcagctagggccagg

SEQ ID NO: 1244126 - DNA, 25 bp, Homo sapien
gctgtgtgttcagcaacaggttgag

SEQ ID NO: 1244127 - DNA, 25 bp, Homo sapien
ctgtgtgttcagcaacaggttgagc

SEQ ID NO: 1244128 - DNA, 25 bp, Homo sapien
gatgccctttccaagaatattcagc

SEQ ID NO: 1244129 - DNA, 25 bp, Homo sapien
cattctttggattcacggaacagtt

SEQ ID NO: 1244130 - DNA, 25 bp, Homo sapien
gttgtgaatatgactcattgatgcc

SEQ ID NO: 1244131 - DNA, 25 bp, Homo sapien
cattgatgccctttccaagaatatt

SEQ ID NO: 1244132 - DNA, 25 bp, Homo sapien
ctatccccggagagctgcttaggct

SEQ ID NO: 1244133 - DNA, 25 bp, Homo sapien
tggtgcaggtgctctggcctatccc

SEQ ID NO: 1244134 - DNA, 25 bp, Homo sapien
cttaggctccggagaagcaggtgca

SEQ ID NO: 1244135 - DNA, 25 bp, Homo sapien
ccaccaggcccatggtagtgacatt

SEQ ID NO: 1244136 - DNA, 25 bp, Homo sapien
tgagaaccagcccaggggagattcc

SEQ ID NO: 1244137 - DNA, 25 bp, Homo sapien
gagattccagcgcacagacgggctg

SEQ ID NO: 1244138 - DNA, 25 bp, Homo sapien
cctgttgtgaggccgttgcagtgac

SEQ ID NO: 1244139 - DNA, 25 bp, Homo sapien
cagtttgttccccaagactagagcc

SEQ ID NO: 1244140 - DNA, 25 bp, Homo sapien
ttggcttctcttaattggaacacag

SEQ ID NO: 1244141 - DNA, 25 bp, Homo sapien
cagacagggcggtggaactctgcat

SEQ ID NO: 1244142 - DNA, 25 bp, Homo sapien
tgaccatttggcaagcatcatgaga

SEQ ID NO: 1244143 - DNA, 25 bp, Homo sapien
gcttctcttaattggaacacagtgg

SEQ ID NO: 1244144 - DNA, 25 bp, Homo sapien
tcttgcacttgcatgtgaaccccat

SEQ ID NO: 1244145 - DNA, 25 bp, Homo sapien
taactgcctagttgggagtcctcct

SEQ ID NO: 1244146 - DNA, 25 bp, Homo sapien
cctgtacctccagagtttaaaatct

SEQ ID NO: 1244147 - DNA, 25 bp, Homo sapien
cacagagttcacagaagaaacctgg

SEQ ID NO: 1244148 - DNA, 25 bp, Homo sapien
gagtacagtgggaagatctcagctc

SEQ ID NO: 1244149 - DNA, 25 bp, Homo sapien
ccctccaccatgcctggctaatttt

SEQ ID NO: 1244150 - DNA, 25 bp, Homo sapien
agctcactgcaacctctgcctccca

SEQ ID NO: 1244151 - DNA, 25 bp, Homo sapien
aggttcaaccgattctcctgcttca

SEQ ID NO: 1244152 - DNA, 25 bp, Homo sapien
aaaaaatgtgtattgcacttctcct

SEQ ID NO: 1244153 - DNA, 25 bp, Homo sapien
aaaatgtgtattgcacttctccttc

SEQ ID NO: 1244154 - DNA, 25 bp, Homo sapien
aaagatatttgacccgtgtgccagg

SEQ ID NO: 1244155 - DNA, 25 bp, Homo sapien
gcacttcagcagaggaattctgtgg

SEQ ID NO: 1244156 - DNA, 25 bp, Homo sapien
cactctctggttgttggtatgaaac

SEQ ID NO: 1244157 - DNA, 25 bp, Homo sapien
cagaaggcccgctgtgtgaaatgtg

SEQ ID NO: 1244158 - DNA, 25 bp, Homo sapien
gagtatgttggaggtcagcctctcc

SEQ ID NO: 1244159 - DNA, 25 bp, Homo sapien
ggagtatgttggaggtcagcctctc

SEQ ID NO: 1244160 - DNA, 25 bp, Homo sapien
agattttcctgagtctaggcaccac

SEQ ID NO: 1244161 - DNA, 25 bp, Homo sapien
tcagattttcctgagtctaggcacc

SEQ ID NO: 1244162 - DNA, 25 bp, Homo sapien
cagattttcctgagtctaggcacca

SEQ ID NO: 1244163 - DNA, 25 bp, Homo sapien
tgctgagcccctgcgaagatgacag

SEQ ID NO: 1244164 - DNA, 25 bp, Homo sapien
cgtgttgatgcactcagaagaggat

SEQ ID NO: 1244165 - DNA, 25 bp, Homo sapien
tatagatttctatggcagcaaccgt

SEQ ID NO: 1244166 - DNA, 25 bp, Homo sapien
tacacaggtctagggctcagctgct

SEQ ID NO: 1244167 - DNA, 25 bp, Homo sapien
cactagtctaggagtagctgctggt

SEQ ID NO: 1244168 - DNA, 25 bp, Homo sapien
ttgcagtaccagtgatgaaagattt

SEQ ID NO: 1244169 - DNA, 25 bp, Homo sapien
acagtgtcttgcagtaccagtgatg

SEQ ID NO: 1244170 - DNA, 25 bp, Homo sapien
gtctgttctgattgacagtgtcttg

SEQ ID NO: 1244171 - DNA, 25 bp, Homo sapien
cctcagcacattgataactgcatcc

SEQ ID NO: 1244172 - DNA, 25 bp, Homo sapien
cctttataggatacggccactagca

SEQ ID NO: 1244173 - DNA, 25 bp, Homo sapien
tggccccatggagcctttataggat

SEQ ID NO: 1244174 - DNA, 25 bp, Homo sapien
atacggccactagcacctcgagtgc

SEQ ID NO: 1244175 - DNA, 25 bp, Homo sapien
gtgggcacggtggctggctgctccc

SEQ ID NO: 1244176 - DNA, 25 bp, Homo sapien
ctggtttgtgggcacggtggctggc

SEQ ID NO: 1244177 - DNA, 25 bp, Homo sapien
tttgtgggcacggtggctggctgct

SEQ ID NO: 1244178 - DNA, 25 bp, Homo sapien
ggtttgtgggcacggtggctggctg

SEQ ID NO: 1244179 - DNA, 25 bp, Homo sapien
tccggccttcgggagcttcaggctc

SEQ ID NO: 1244180 - DNA, 25 bp, Homo sapien
ggctcggcagtcaccccaatgtggg

SEQ ID NO: 1244181 - DNA, 25 bp, Homo sapien
tctgggagcccatcatgagcaccag

SEQ ID NO: 1244182 - DNA, 25 bp, Homo sapien
cagctggcaactctgcctgggtgtg

SEQ ID NO: 1244183 - DNA, 25 bp, Homo sapien
aatgcagcacaagaagcagagaggc

SEQ ID NO: 1244184 - DNA, 25 bp, Homo sapien
ggaaaaatgcagcacaagaagcaga

SEQ ID NO: 1244185 - DNA, 25 bp, Homo sapien
gaaaaatgcagcacaagaagcagag

SEQ ID NO: 1244186 - DNA, 25 bp, Homo sapien
caagtggtccgagacaggaaagctt

SEQ ID NO: 1244187 - DNA, 25 bp, Homo sapien
gcaagtggtccgagacaggaaagct

SEQ ID NO: 1244188 - DNA, 25 bp, Homo sapien
gaatctaccctgttcttccgtagaa

SEQ ID NO: 1244189 - DNA, 25 bp, Homo sapien
cttccgtagaagagcccagtgggtg

SEQ ID NO: 1244190 - DNA, 25 bp, Homo sapien
taaaggatgcggatttcaacaaaga

SEQ ID NO: 1244191 - DNA, 25 bp, Homo sapien
cactcaaggtgagggcagagcttgc

SEQ ID NO: 1244192 - DNA, 25 bp, Homo sapien
tgaaggagtcacattctcgtttcat

SEQ ID NO: 1244193 - DNA, 25 bp, Homo sapien
atgaaggagtcacattctcgtttca

SEQ ID NO: 1244194 - DNA, 25 bp, Homo sapien
ccttatgcctgctatgactgagaag

SEQ ID NO: 1244195 - DNA, 25 bp, Homo sapien
tctgccttatgcctgctatgactga

SEQ ID NO: 1244196 - DNA, 25 bp, Homo sapien
tgcctgctatgactgagaagtttac

SEQ ID NO: 1244197 - DNA, 25 bp, Homo sapien
tatgcctgctatgactgagaagttt

SEQ ID NO: 1244198 - DNA, 25 bp, Homo sapien
caaaataagtttcacttctcaacac

SEQ ID NO: 1244199 - DNA, 25 bp, Homo sapien
acacattttgcattgtctgattggc

SEQ ID NO: 1244200 - DNA, 25 bp, Homo sapien
cacattttgcattgtctgattggca

SEQ ID NO: 1244201 - DNA, 25 bp, Homo sapien
gtgttcgcgcgcgtgtagtgtgggc

SEQ ID NO: 1244202 - DNA, 25 bp, Homo sapien
ttcgcgcgcgtgtagtgtgggccgc

SEQ ID NO: 1244203 - DNA, 25 bp, Homo sapien
tgttcgcgcgcgtgtagtgtgggcc

SEQ ID NO: 1244204 - DNA, 25 bp, Homo sapien
cgcgcgcgtgtagtgtgggccgctt

SEQ ID NO: 1244205 - DNA, 25 bp, Homo sapien
cgccttctgcgcactccagaggtgg

SEQ ID NO: 1244206 - DNA, 25 bp, Homo sapien
tcagcggagaccgcgcgcaaacttg

SEQ ID NO: 1244207 - DNA, 25 bp, Homo sapien
ggcccgggacgcaccgccttctgcg

SEQ ID NO: 1244208 - DNA, 25 bp, Homo sapien
ctcaggtaacccgagagtcagcgga

SEQ ID NO: 1244209 - DNA, 25 bp, Homo sapien
aagcccagatgatgtggcgctgacg

SEQ ID NO: 1244210 - DNA, 25 bp, Homo sapien
gggcagcgccgtcttcctgcgattg

SEQ ID NO: 1244211 - DNA, 25 bp, Homo sapien
tgcgattggctctctcgggcgatgt

SEQ ID NO: 1244212 - DNA, 25 bp, Homo sapien
tctctcgggcgatgtttttcttcct

SEQ ID NO: 1244213 - DNA, 25 bp, Homo sapien
actgcgccgaagaccaggtagagca

SEQ ID NO: 1244214 - DNA, 25 bp, Homo sapien
gaagcgtcgcttcagcttgcgcagc

SEQ ID NO: 1244215 - DNA, 25 bp, Homo sapien
tccagttgcccgaggcgttgctgag

SEQ ID NO: 1244216 - DNA, 25 bp, Homo sapien
gcgcggaggtgaagtcccagttcca

SEQ ID NO: 1244217 - DNA, 25 bp, Homo sapien
gaagagcagagtgatgtcactcggc

SEQ ID NO: 1244218 - DNA, 25 bp, Homo sapien
ggacggcacactccggaaggtgacc

SEQ ID NO: 1244219 - DNA, 25 bp, Homo sapien
cagagtgatgtcactcggctacccc

SEQ ID NO: 1244220 - DNA, 25 bp, Homo sapien
ccaaagggacggcacactccggaag

SEQ ID NO: 1244221 - DNA, 25 bp, Homo sapien
ggatcggcctgtccgcccagaggtc

SEQ ID NO: 1244222 - DNA, 25 bp, Homo sapien
accggatcggcctgtccgcccagag

SEQ ID NO: 1244223 - DNA, 25 bp, Homo sapien
tctgaaaagaaaccggatcggcctg

SEQ ID NO: 1244224 - DNA, 25 bp, Homo sapien
ctctgaaaagaaaccggatcggcct

SEQ ID NO: 1244225 - DNA, 25 bp, Homo sapien
aagggactgtgctgaacgctctttc

SEQ ID NO: 1244226 - DNA, 25 bp, Homo sapien
tcaaagattggatctcatagatcaa

SEQ ID NO: 1244227 - DNA, 25 bp, Homo sapien
tatgtgccttactaggtccggctgg

SEQ ID NO: 1244228 - DNA, 25 bp, Homo sapien
taccaattgatatctccactctggg

SEQ ID NO: 1244229 - DNA, 25 bp, Homo sapien
gagttcacagatttaaacactaaga

SEQ ID NO: 1244230 - DNA, 25 bp, Homo sapien
tttatagacaggtatgagttcacag

SEQ ID NO: 1244231 - DNA, 25 bp, Homo sapien
ggatactggttcaatcaaagattct

SEQ ID NO: 1244232 - DNA, 25 bp, Homo sapien
tccttgataggactcacagttatgt

SEQ ID NO: 1244233 - DNA, 25 bp, Homo sapien
cagcagcgggcaggcttttatttca

SEQ ID NO: 1244234 - DNA, 25 bp, Homo sapien
tctgggatcaagcagacggtagcaa

SEQ ID NO: 1244235 - DNA, 25 bp, Homo sapien
caaagttggtcaatcccagtcagag

SEQ ID NO: 1244236 - DNA, 25 bp, Homo sapien
ccagtcagaggagctaatgcaaaaa

SEQ ID NO: 1244237 - DNA, 25 bp, Homo sapien
ctgtttatctcagtgcgcctactcc

SEQ ID NO: 1244238 - DNA, 25 bp, Homo sapien
ttaccatactgcctgtttatctcag

SEQ ID NO: 1244239 - DNA, 25 bp, Homo sapien
tctcagtgcgcctactccataaagc

SEQ ID NO: 1244240 - DNA, 25 bp, Homo sapien
agtgcgcctactccataaagcttcc

SEQ ID NO: 1244241 - DNA, 25 bp, Homo sapien
ctgttttaagccaggttgcaggaca

SEQ ID NO: 1244242 - DNA, 25 bp, Homo sapien
gacaggctatttatcacggtgcagg

SEQ ID NO: 1244243 - DNA, 25 bp, Homo sapien
tatgtccacctaggagctgtccatg

SEQ ID NO: 1244244 - DNA, 25 bp, Homo sapien
tcatccctgcgactacggagcatca

SEQ ID NO: 1244245 - DNA, 25 bp, Homo sapien
taacagtataaacacgattgcagca

SEQ ID NO: 1244246 - DNA, 25 bp, Homo sapien
taagttacaactcagtgacgtagga

SEQ ID NO: 1244247 - DNA, 25 bp, Homo sapien
gaggccaatgtaccaagaagttatc

SEQ ID NO: 1244248 - DNA, 25 bp, Homo sapien
gattgcagcaactactcaaacgctt

SEQ ID NO: 1244249 - DNA, 25 bp, Homo sapien
caagtgtgattctgtgcgtagttaa

SEQ ID NO: 1244250 - DNA, 25 bp, Homo sapien
gaaccaaaggtctgcacttctgagc

SEQ ID NO: 1244251 - DNA, 25 bp, Homo sapien
gtcatcccaacttccttgtcaagaa

SEQ ID NO: 1244252 - DNA, 25 bp, Homo sapien
gaacagacttgtaatattgggagcc

SEQ ID NO: 1244253 - DNA, 25 bp, Homo sapien
gattcaacatgggacctacttcttg

SEQ ID NO: 1244254 - DNA, 25 bp, Homo sapien
tgtagattcaacatgggacctactt

SEQ ID NO: 1244255 - DNA, 25 bp, Homo sapien
ggacctacttcttgagttcacagct

SEQ ID NO: 1244256 - DNA, 25 bp, Homo sapien
catgggacctacttcttgagttcac

SEQ ID NO: 1244257 - DNA, 25 bp, Homo sapien
gtggaaatgacttggctaaaagaat

SEQ ID NO: 1244258 - DNA, 25 bp, Homo sapien
tatctccagacttgggcatgagtgt

SEQ ID NO: 1244259 - DNA, 25 bp, Homo sapien
tggaaatgacttggctaaaagaatc

SEQ ID NO: 1244260 - DNA, 25 bp, Homo sapien
ctgtgtatctccagacttgggcatg

SEQ ID NO: 1244261 - DNA, 25 bp, Homo sapien
tttgagttagcagttaccacgtagg

SEQ ID NO: 1244262 - DNA, 25 bp, Homo sapien
ccagagatgaggcacggtcttttcc

SEQ ID NO: 1244263 - DNA, 25 bp, Homo sapien
ttaccagagtggaccctcagaggtt

SEQ ID NO: 1244264 - DNA, 25 bp, Homo sapien
gacctggagaggtagcatgtctgac

SEQ ID NO: 1244265 - DNA, 25 bp, Homo sapien
tcttgatgttgtcagaaacccgcac

SEQ ID NO: 1244266 - DNA, 25 bp, Homo sapien
atcttgatgttgtcagaaacccgca

SEQ ID NO: 1244267 - DNA, 25 bp, Homo sapien
tatcttgatgttgtcagaaacccgc

SEQ ID NO: 1244268 - DNA, 25 bp, Homo sapien
ttaaattctgtgtctcagggcagtg

SEQ ID NO: 1244269 - DNA, 25 bp, Homo sapien
aagaagcaggcctaattaaattctg

SEQ ID NO: 1244270 - DNA, 25 bp, Homo sapien
cccaacagttaaacacacattaggg

SEQ ID NO: 1244271 - DNA, 25 bp, Homo sapien
cttccccaacagttaaacacacatt

SEQ ID NO: 1244272 - DNA, 25 bp, Homo sapien
gctgataaccgttgagcttaaaatc

SEQ ID NO: 1244273 - DNA, 25 bp, Homo sapien
ttttgagctgataaccgttgagctt

SEQ ID NO: 1244274 - DNA, 25 bp, Homo sapien
ccagggcacaaacgggaatgaacat

SEQ ID NO: 1244275 - DNA, 25 bp, Homo sapien
cacattcttcaagataccagggcac

SEQ ID NO: 1244276 - DNA, 25 bp, Homo sapien
gactgcctaagagatgggatgcccc

SEQ ID NO: 1244277 - DNA, 25 bp, Homo sapien
gctgaactgctaatgaacctgatga

SEQ ID NO: 1244278 - DNA, 25 bp, Homo sapien
tcagacccagcataggaacaaggct

SEQ ID NO: 1244279 - DNA, 25 bp, Homo sapien
tgtcaagcctaatgcagtggttccc

SEQ ID NO: 1244280 - DNA, 25 bp, Homo sapien
tcatacctgtcagaagaaggcaaat

SEQ ID NO: 1244281 - DNA, 25 bp, Homo sapien
caggctctcattgctattttcatat

SEQ ID NO: 1244282 - DNA, 25 bp, Homo sapien
ggcaaatccatctagtatgggatag

SEQ ID NO: 1244283 - DNA, 25 bp, Homo sapien
accagtattgcttgtaacctcctct

SEQ ID NO: 1244284 - DNA, 25 bp, Homo sapien
ctcatcgtagtcattgccaagcaca

SEQ ID NO: 1244285 - DNA, 25 bp, Homo sapien
cattaagttcattgggctatcatca

SEQ ID NO: 1244286 - DNA, 25 bp, Homo sapien
tactgctgtgttgcggatgtgtgac

SEQ ID NO: 1244287 - DNA, 25 bp, Homo sapien
gacactggaaactgcaatactaaag

SEQ ID NO: 1244288 - DNA, 25 bp, Homo sapien
tgtgttgactataccctcagggata

SEQ ID NO: 1244289 - DNA, 25 bp, Homo sapien
taaagaattggcctaagcggtccat

SEQ ID NO: 1244290 - DNA, 25 bp, Homo sapien
tatatagtcgtgatgccctactggc

SEQ ID NO: 1244291 - DNA, 25 bp, Homo sapien
catatttcaagcctagcagagacag

SEQ ID NO: 1244292 - DNA, 25 bp, Homo sapien
ttttcaccacctcccaacttggctc

SEQ ID NO: 1244293 - DNA, 25 bp, Homo sapien
accacctcccaacttggctctactg

SEQ ID NO: 1244294 - DNA, 25 bp, Homo sapien
ttcaccacctcccaacttggctcta

SEQ ID NO: 1244295 - DNA, 25 bp, Homo sapien
caccacctcccaacttggctctact

SEQ ID NO: 1244296 - DNA, 25 bp, Homo sapien
cagtcttgtgatccgattcctccct

SEQ ID NO: 1244297 - DNA, 25 bp, Homo sapien
gatccgattcctccctgttcagata

SEQ ID NO: 1244298 - DNA, 25 bp, Homo sapien
ttttcctatgacatcactaaccacc

SEQ ID NO: 1244299 - DNA, 25 bp, Homo sapien
tcccttgtcctagagggatcacctg

SEQ ID NO: 1244300 - DNA, 25 bp, Homo sapien
gccaccacacctggccccatctcac

SEQ ID NO: 1244301 - DNA, 25 bp, Homo sapien
cctcatgatcctcccgccatggcct

SEQ ID NO: 1244302 - DNA, 25 bp, Homo sapien
gagccaccacacctggccccatctc

SEQ ID NO: 1244303 - DNA, 25 bp, Homo sapien
caccactccctgctaattttttgaa

SEQ ID NO: 1244304 - DNA, 25 bp, Homo sapien
tcaccttactgaagaaatggatgcc

SEQ ID NO: 1244305 - DNA, 25 bp, Homo sapien
catgagctcttctaaaaacccacca

SEQ ID NO: 1244306 - DNA, 25 bp, Homo sapien
cagctcgcttcctgggtatggggtc

SEQ ID NO: 1244307 - DNA, 25 bp, Homo sapien
gaaatggatgccaactgacatgagc

SEQ ID NO: 1244308 - DNA, 25 bp, Homo sapien
cactacattgcaccagaaagcagaa

SEQ ID NO: 1244309 - DNA, 25 bp, Homo sapien
caatcctgaggttcccaaaacgaca

SEQ ID NO: 1244310 - DNA, 25 bp, Homo sapien
gacaccagagtcataaaatcttcca

SEQ ID NO: 1244311 - DNA, 25 bp, Homo sapien
tcatcactggtcacgtcattggaag

SEQ ID NO: 1244312 - DNA, 25 bp, Homo sapien
cccggttttaaggatctcacatcag

SEQ ID NO: 1244313 - DNA, 25 bp, Homo sapien
tgtgggacctcaggaaagagcttca

SEQ ID NO: 1244314 - DNA, 25 bp, Homo sapien
taacaaaggtgaatagccacaccag

SEQ ID NO: 1244315 - DNA, 25 bp, Homo sapien
tactaactgttataatcaatgcccc

SEQ ID NO: 1244316 - DNA, 25 bp, Homo sapien
gccctgaggctggcgtcaccgtggc

SEQ ID NO: 1244317 - DNA, 25 bp, Homo sapien
ctgaggctggcgtcaccgtggccat

SEQ ID NO: 1244318 - DNA, 25 bp, Homo sapien
gtgcaatatggccactcagccccaa

SEQ ID NO: 1244319 - DNA, 25 bp, Homo sapien
agccccaaaaggatggcccagggag

SEQ ID NO: 1244320 - DNA, 25 bp, Homo sapien
tgtgtgtcctcggttggctccccac

SEQ ID NO: 1244321 - DNA, 25 bp, Homo sapien
gcagagctggagtgctcatcacatg

SEQ ID NO: 1244322 - DNA, 25 bp, Homo sapien
gctcatcacatgctgtgtgtcctcg

SEQ ID NO: 1244323 - DNA, 25 bp, Homo sapien
tgtgtcctcggttggctccccacag

SEQ ID NO: 1244324 - DNA, 25 bp, Homo sapien
ctggcaataagtcagtctcggcagt

SEQ ID NO: 1244325 - DNA, 25 bp, Homo sapien
tcggcagttaagtccacactgacac

SEQ ID NO: 1244326 - DNA, 25 bp, Homo sapien
tataaatgtttccacgccttttaga

SEQ ID NO: 1244327 - DNA, 25 bp, Homo sapien
ccaacactgcataattggtatttct

SEQ ID NO: 1244328 - DNA, 25 bp, Homo sapien
tgcaaaaccgtgagctcatacatag

SEQ ID NO: 1244329 - DNA, 25 bp, Homo sapien
aaagtgctgcactcacaatagaagc

SEQ ID NO: 1244330 - DNA, 25 bp, Homo sapien
tcctgccaacctggtctaagacctg

SEQ ID NO: 1244331 - DNA, 25 bp, Homo sapien
taaagagaactgaccatagggaaag

SEQ ID NO: 1244332 - DNA, 25 bp, Homo sapien
taatgtacgccaagcctatgagaca

SEQ ID NO: 1244333 - DNA, 25 bp, Homo sapien
cctgtggctgctgtacaaattacca

SEQ ID NO: 1244334 - DNA, 25 bp, Homo sapien
ctatgagacactggtattcgtttcc

SEQ ID NO: 1244335 - DNA, 25 bp, Homo sapien
tattgtctcaaaatttctgcagggc

SEQ ID NO: 1244336 - DNA, 25 bp, Homo sapien
ctcagggaagttcaagctctctcct

SEQ ID NO: 1244337 - DNA, 25 bp, Homo sapien
tcctttaggcacttgaaaggctctc

SEQ ID NO: 1244338 - DNA, 25 bp, Homo sapien
tcacagccagattcaacaatcttct

SEQ ID NO: 1244339 - DNA, 25 bp, Homo sapien
taggcacttgaaaggctctcacagc

SEQ ID NO: 1244340 - DNA, 25 bp, Homo sapien
cagacgctgcacataggaagtacca

SEQ ID NO: 1244341 - DNA, 25 bp, Homo sapien
tatgtctccctgaaaaatttgatgc

SEQ ID NO: 1244342 - DNA, 25 bp, Homo sapien
caaatgaactatatgctcccctctg

SEQ ID NO: 1244343 - DNA, 25 bp, Homo sapien
gactatttcctatctcatgcaggtg

SEQ ID NO: 1244344 - DNA, 25 bp, Homo sapien
gcctgtctatcaaacacagacccac

SEQ ID NO: 1244345 - DNA, 25 bp, Homo sapien
ctgtctatcaaacacagacccacct

SEQ ID NO: 1244346 - DNA, 25 bp, Homo sapien
gtctatcaaacacagacccaccttt

SEQ ID NO: 1244347 - DNA, 25 bp, Homo sapien
tgcctgtctatcaaacacagaccca

SEQ ID NO: 1244348 - DNA, 25 bp, Homo sapien
aaacgtcttgtaggagacagcagcc

SEQ ID NO: 1244349 - DNA, 25 bp, Homo sapien
tcaacgtgtcctggcgttctcacac

SEQ ID NO: 1244350 - DNA, 25 bp, Homo sapien
gggtttatacaacctcatgtgaatg

SEQ ID NO: 1244351 - DNA, 25 bp, Homo sapien
gaatgtaatccacataaacgtcttg

SEQ ID NO: 1244352 - DNA, 25 bp, Homo sapien
tacatgtggtttactgcatctatca

SEQ ID NO: 1244353 - DNA, 25 bp, Homo sapien
cattgtccaataacatggtcctcat

SEQ ID NO: 1244354 - DNA, 25 bp, Homo sapien
tgccaacgttctgttcatgatcact

SEQ ID NO: 1244355 - DNA, 25 bp, Homo sapien
tatcagactggcctttattacccat

SEQ ID NO: 1244356 - DNA, 25 bp, Homo sapien
gctgcttcctcatagacttctcact

SEQ ID NO: 1244357 - DNA, 25 bp, Homo sapien
agtggctgggaagtctctgatcaag

SEQ ID NO: 1244358 - DNA, 25 bp, Homo sapien
ggaagtctctgatcaaggcaccagc

SEQ ID NO: 1244359 - DNA, 25 bp, Homo sapien
tgagggctgcttcctcatagacttc

SEQ ID NO: 1244360 - DNA, 25 bp, Homo sapien
tatcaagggtccgagaacgtaggca

SEQ ID NO: 1244361 - DNA, 25 bp, Homo sapien
tacagatatcagaaggtgggtcagc

SEQ ID NO: 1244362 - DNA, 25 bp, Homo sapien
tctgtggtaaatagtaaggtcatca

SEQ ID NO: 1244363 - DNA, 25 bp, Homo sapien
tggagcctagggtaactctacagat

SEQ ID NO: 1244364 - DNA, 25 bp, Homo sapien
tgtatggtgaaactcattgcacggt

SEQ ID NO: 1244365 - DNA, 25 bp, Homo sapien
cacggtgatgaataagcttcaggtc

SEQ ID NO: 1244366 - DNA, 25 bp, Homo sapien
gaataagcttcaggtcaggttgact

SEQ ID NO: 1244367 - DNA, 25 bp, Homo sapien
cattgcacggtgatgaataagcttc

SEQ ID NO: 1244368 - DNA, 25 bp, Homo sapien
tcctctgagattgtacatccacttt

SEQ ID NO: 1244369 - DNA, 25 bp, Homo sapien
ccactttcccatggagagattccag

SEQ ID NO: 1244370 - DNA, 25 bp, Homo sapien
cagggttcttgacccactgtcccag

SEQ ID NO: 1244371 - DNA, 25 bp, Homo sapien
tatgaatgaactacggcaaggccca

SEQ ID NO: 1244372 - DNA, 25 bp, Homo sapien
agagacaaagtggcaaacacgtttt

SEQ ID NO: 1244373 - DNA, 25 bp, Homo sapien
atgcctatcatctgcccttattccc

SEQ ID NO: 1244374 - DNA, 25 bp, Homo sapien
gaatttttgattgtagccttcccca

SEQ ID NO: 1244375 - DNA, 25 bp, Homo sapien
tctgacaagggcacggtgtggccat

SEQ ID NO: 1244376 - DNA, 25 bp, Homo sapien
gatcccaatcttatagagctctctg

SEQ ID NO: 1244377 - DNA, 25 bp, Homo sapien
ggacacagtgacaaacccaaggagc

SEQ ID NO: 1244378 - DNA, 25 bp, Homo sapien
tcaatggtttgcagggccatccacg

SEQ ID NO: 1244379 - DNA, 25 bp, Homo sapien
gcagatgactgggtggccacaaaag

SEQ ID NO: 1244380 - DNA, 25 bp, Homo sapien
tatgatgtgcacctgatcctcgtcc

SEQ ID NO: 1244381 - DNA, 25 bp, Homo sapien
ggcaataaggccaagtagcaggtaa

SEQ ID NO: 1244382 - DNA, 25 bp, Homo sapien
taataagacattgcaaacagtagct

SEQ ID NO: 1244383 - DNA, 25 bp, Homo sapien
ctcacatattagacatcctgctggg

SEQ ID NO: 1244384 - DNA, 25 bp, Homo sapien
gaactacactaggatctggtgacct

SEQ ID NO: 1244385 - DNA, 25 bp, Homo sapien
tgggtgggtacatgcaaaccagtac

SEQ ID NO: 1244386 - DNA, 25 bp, Homo sapien
gaaacatttattgcagcagaatact

SEQ ID NO: 1244387 - DNA, 25 bp, Homo sapien
cgcaagagggtagaaacatttattg

SEQ ID NO: 1244388 - DNA, 25 bp, Homo sapien
tagaaacatttattgcagcagaata

SEQ ID NO: 1244389 - DNA, 25 bp, Homo sapien
gagggtagaaacatttattgcagca

SEQ ID NO: 1244390 - DNA, 25 bp, Homo sapien
taaacatgttagacatctgacacca

SEQ ID NO: 1244391 - DNA, 25 bp, Homo sapien
taagttctatgctttagtgctaggt

SEQ ID NO: 1244392 - DNA, 25 bp, Homo sapien
ggctgcaaatcacaatgtactttca

SEQ ID NO: 1244393 - DNA, 25 bp, Homo sapien
agggattcgtgtttaagttctatgc

SEQ ID NO: 1244394 - DNA, 25 bp, Homo sapien
agcccctcaaccaccaactcctggg

SEQ ID NO: 1244395 - DNA, 25 bp, Homo sapien
tgggcagccacccatgggaggtaag

SEQ ID NO: 1244396 - DNA, 25 bp, Homo sapien
tcctgggcagccacccatgggaggt

SEQ ID NO: 1244397 - DNA, 25 bp, Homo sapien
ccacccatgggaggtaaggctccat

SEQ ID NO: 1244398 - DNA, 25 bp, Homo sapien
tcctgggtgaccaagctcgcttctc

SEQ ID NO: 1244399 - DNA, 25 bp, Homo sapien
tgagaggctgacccagagctcctcc

SEQ ID NO: 1244400 - DNA, 25 bp, Homo sapien
ttccacctccttgtcatgcctgcag

SEQ ID NO: 1244401 - DNA, 25 bp, Homo sapien
gcagcaagccgaatttctgttctct

SEQ ID NO: 1244402 - DNA, 25 bp, Homo sapien
tgctgctgttctaccctgagggcat

SEQ ID NO: 1244403 - DNA, 25 bp, Homo sapien
tttaagttcacgcacaggaccatgt

SEQ ID NO: 1244404 - DNA, 25 bp, Homo sapien
taccctgagggcattccgcaggcat

SEQ ID NO: 1244405 - DNA, 25 bp, Homo sapien
gacacgtgtcacatttaagttcacg

SEQ ID NO: 1244406 - DNA, 25 bp, Homo sapien
gaagtcagaccaaatttctgtcttc

SEQ ID NO: 1244407 - DNA, 25 bp, Homo sapien
caaaaggcccataaagctggtttgg

SEQ ID NO: 1244408 - DNA, 25 bp, Homo sapien
ttgctgaaactacatcctaaaggga

SEQ ID NO: 1244409 - DNA, 25 bp, Homo sapien
tcttgcctcacacaaaaggctttga

SEQ ID NO: 1244410 - DNA, 25 bp, Homo sapien
tttccgttatcttgaggtctccaga

SEQ ID NO: 1244411 - DNA, 25 bp, Homo sapien
gaaccttgaaatctacagacgtaag

SEQ ID NO: 1244412 - DNA, 25 bp, Homo sapien
gatatagccatggaaccttgaaatc

SEQ ID NO: 1244413 - DNA, 25 bp, Homo sapien
cttagatatagccatggaaccttga

SEQ ID NO: 1244414 - DNA, 25 bp, Homo sapien
cttgaaatctacagacgtaagtaac

SEQ ID NO: 1244415 - DNA, 25 bp, Homo sapien
tatagcgcttaacgcggaccccttc

SEQ ID NO: 1244416 - DNA, 25 bp, Homo sapien
caccagctgactaggggctccatgg

SEQ ID NO: 1244417 - DNA, 25 bp, Homo sapien
attccattgtcgtagaacagatggg

SEQ ID NO: 1244418 - DNA, 25 bp, Homo sapien
cagatgggggtatagcgcttaacgc

SEQ ID NO: 1244419 - DNA, 25 bp, Homo sapien
tcaggtcaaagtactcaggaacttc

SEQ ID NO: 1244420 - DNA, 25 bp, Homo sapien
tcaatcctcaggtcaaagtactcag

SEQ ID NO: 1244421 - DNA, 25 bp, Homo sapien
caggaacttccgtcaagtcttcaaa

SEQ ID NO: 1244422 - DNA, 25 bp, Homo sapien
actgcactccggactcaggtcaatc

SEQ ID NO: 1244423 - DNA, 25 bp, Homo sapien
gcagttgacactttgaccattttct

SEQ ID NO: 1244424 - DNA, 25 bp, Homo sapien
taggcaattattacggtcactatcc

SEQ ID NO: 1244425 - DNA, 25 bp, Homo sapien
tcagacattgtagccaggcctagcg

SEQ ID NO: 1244426 - DNA, 25 bp, Homo sapien
tctgctatcagaagtcaccaagtcc

SEQ ID NO: 1244427 - DNA, 25 bp, Homo sapien
ccagttcaaataaattccgagttgg

SEQ ID NO: 1244428 - DNA, 25 bp, Homo sapien
tggaaatacagctcataaactacag

SEQ ID NO: 1244429 - DNA, 25 bp, Homo sapien
ggcggcttgtttgttattacctgga

SEQ ID NO: 1244430 - DNA, 25 bp, Homo sapien
aataaattccgagttggcggcttgt

SEQ ID NO: 1244431 - DNA, 25 bp, Homo sapien
aacacattctttggatatgacggta

SEQ ID NO: 1244432 - DNA, 25 bp, Homo sapien
caaaacacattctttggatatgacg

SEQ ID NO: 1244433 - DNA, 25 bp, Homo sapien
ggatatgacggtataaaatgtaaaa

SEQ ID NO: 1244434 - DNA, 25 bp, Homo sapien
cattctttggatatgacggtataaa

SEQ ID NO: 1244435 - DNA, 25 bp, Homo sapien
gccagaaaactcatttctcagtgac

SEQ ID NO: 1244436 - DNA, 25 bp, Homo sapien
ctgatcaatctcacgtctttccttt

SEQ ID NO: 1244437 - DNA, 25 bp, Homo sapien
tttcctttctttcagcattgccaga

SEQ ID NO: 1244438 - DNA, 25 bp, Homo sapien
agcattgccagaaaactcatttctc

SEQ ID NO: 1244439 - DNA, 25 bp, Homo sapien
cagctctttccggggcaaaacgtct

SEQ ID NO: 1244440 - DNA, 25 bp, Homo sapien
caacttcttaattctcctgacctta

SEQ ID NO: 1244441 - DNA, 25 bp, Homo sapien
ctgcagctctttccggggcaaaacg

SEQ ID NO: 1244442 - DNA, 25 bp, Homo sapien
acttcttaattctcctgaccttaga

SEQ ID NO: 1244443 - DNA, 25 bp, Homo sapien
gatcagttcccgaaagccctgtgct

SEQ ID NO: 1244444 - DNA, 25 bp, Homo sapien
tagtcttcaaaatggtcgtgcctgt

SEQ ID NO: 1244445 - DNA, 25 bp, Homo sapien
gaaacacatgccaactcaattagcc

SEQ ID NO: 1244446 - DNA, 25 bp, Homo sapien
tctcattgctagaggatacccgcat

SEQ ID NO: 1244447 - DNA, 25 bp, Homo sapien
caccctagagcaacattttcagtag

SEQ ID NO: 1244448 - DNA, 25 bp, Homo sapien
gaattgaatagcatccattcttttc

SEQ ID NO: 1244449 - DNA, 25 bp, Homo sapien
ttcagtagtagagttattctgggtt

SEQ ID NO: 1244450 - DNA, 25 bp, Homo sapien
cactttgccaaagttgaattgaata

SEQ ID NO: 1244451 - DNA, 25 bp, Homo sapien
tagcgcagccccaaaaagtgagcaa

SEQ ID NO: 1244452 - DNA, 25 bp, Homo sapien
catatgtgggtaagagcagatcctc

SEQ ID NO: 1244453 - DNA, 25 bp, Homo sapien
ccaggagtgttaaccaaagccaagc

SEQ ID NO: 1244454 - DNA, 25 bp, Homo sapien
taacgcttatgtgtggcgccctgtc

SEQ ID NO: 1244455 - DNA, 25 bp, Homo sapien
tggcctgcaaccacgtgacaatggt

SEQ ID NO: 1244456 - DNA, 25 bp, Homo sapien
tccatgtctttctgtatagtccgca

SEQ ID NO: 1244457 - DNA, 25 bp, Homo sapien
tcctttctggtttggtatctacgca

SEQ ID NO: 1244458 - DNA, 25 bp, Homo sapien
gcagcaaactctgtggcaggcctcc

SEQ ID NO: 1244459 - DNA, 25 bp, Homo sapien
tccgcaagtctagtgagggtcgaag

SEQ ID NO: 1244460 - DNA, 25 bp, Homo sapien
agaggcaggtgtttccgcaagtcta

SEQ ID NO: 1244461 - DNA, 25 bp, Homo sapien
caggtgtttccgcaagtctagtgag

SEQ ID NO: 1244462 - DNA, 25 bp, Homo sapien
gaagaggcctgaggccggcaagaga

SEQ ID NO: 1244463 - DNA, 25 bp, Homo sapien
ttcatgaaggggtcctcctgtggcg

SEQ ID NO: 1244464 - DNA, 25 bp, Homo sapien
gctgccgagtactggattgggcatc

SEQ ID NO: 1244465 - DNA, 25 bp, Homo sapien
catgaaggggtcctcctgtggcgaa

SEQ ID NO: 1244466 - DNA, 25 bp, Homo sapien
aaggggtcctcctgtggcgaaggag

SEQ ID NO: 1244467 - DNA, 25 bp, Homo sapien
aaaagtgttacagagcaagggctga

SEQ ID NO: 1244468 - DNA, 25 bp, Homo sapien
gtgcaatgccaactatagcgaactc

SEQ ID NO: 1244469 - DNA, 25 bp, Homo sapien
taatatccagatcaagtgcaatgcc

SEQ ID NO: 1244470 - DNA, 25 bp, Homo sapien
tcctttggtggaatcctggtgggca

SEQ ID NO: 1244471 - DNA, 25 bp, Homo sapien
tgtccccgaaactgagttgaagcct

SEQ ID NO: 1244472 - DNA, 25 bp, Homo sapien
ccattttccaagaggggcagctctc

SEQ ID NO: 1244473 - DNA, 25 bp, Homo sapien
gagttgaagcctaaaacgcacatct

SEQ ID NO: 1244474 - DNA, 25 bp, Homo sapien
cccagtgtccccgaaactgagttga

SEQ ID NO: 1244475 - DNA, 25 bp, Homo sapien
tccttgactgacagctgaactacat

SEQ ID NO: 1244476 - DNA, 25 bp, Homo sapien
agtccttgactgacagctgaactac

SEQ ID NO: 1244477 - DNA, 25 bp, Homo sapien
ctagtccttgactgacagctgaact

SEQ ID NO: 1244478 - DNA, 25 bp, Homo sapien
cttgactgacagctgaactacatgt

SEQ ID NO: 1244479 - DNA, 25 bp, Homo sapien
tcccaggggtccacgtatgagcttc

SEQ ID NO: 1244480 - DNA, 25 bp, Homo sapien
gcagccatgctgagtacattttgat

SEQ ID NO: 1244481 - DNA, 25 bp, Homo sapien
tgcaattgtcttcaaaatgtgatat

SEQ ID NO: 1244482 - DNA, 25 bp, Homo sapien
catgctgagtacattttgatctggg

SEQ ID NO: 1244483 - DNA, 25 bp, Homo sapien
cttgcagttcaatccattgggtcat

SEQ ID NO: 1244484 - DNA, 25 bp, Homo sapien
ttctcacaggcagcataattcaact

SEQ ID NO: 1244485 - DNA, 25 bp, Homo sapien
cacaggcagcataattcaactgcat

SEQ ID NO: 1244486 - DNA, 25 bp, Homo sapien
accttgcattttacaagtatcataa

SEQ ID NO: 1244487 - DNA, 25 bp, Homo sapien
ttaccttgcattttacaagtatcat

SEQ ID NO: 1244488 - DNA, 25 bp, Homo sapien
aacagcaaacttcagactcccatca

SEQ ID NO: 1244489 - DNA, 25 bp, Homo sapien
aacgacctaagcagaatagataaac

SEQ ID NO: 1244490 - DNA, 25 bp, Homo sapien
aaaggcaaaacgacctaagcagaat

SEQ ID NO: 1244491 - DNA, 25 bp, Homo sapien
atctccaagggtgagatccagagaa

SEQ ID NO: 1244492 - DNA, 25 bp, Homo sapien
tggaaagttattcttcctctcacct

SEQ ID NO: 1244493 - DNA, 25 bp, Homo sapien
tccctattatcatgtggaaagttat

SEQ ID NO: 1244494 - DNA, 25 bp, Homo sapien
ttatcatgtggaaagttattcttcc

SEQ ID NO: 1244495 - DNA, 25 bp, Homo sapien
catgtggaaagttattcttcctctc

SEQ ID NO: 1244496 - DNA, 25 bp, Homo sapien
ggtcacccactgttgtagaagtatt

SEQ ID NO: 1244497 - DNA, 25 bp, Homo sapien
ttgtttgtccagcaatcgacggtca

SEQ ID NO: 1244498 - DNA, 25 bp, Homo sapien
tttccagcttagcatggaccaggct

SEQ ID NO: 1244499 - DNA, 25 bp, Homo sapien
ccagcttagcatggaccaggcttgc

SEQ ID NO: 1244500 - DNA, 25 bp, Homo sapien
gcctggcctgaaatggtcatcttaa

SEQ ID NO: 1244501 - DNA, 25 bp, Homo sapien
gcctgaaatggtcatcttaatacat

SEQ ID NO: 1244502 - DNA, 25 bp, Homo sapien
tggtaagatagtgaattggttttaa

SEQ ID NO: 1244503 - DNA, 25 bp, Homo sapien
tggcctgaaatggtcatcttaatac

SEQ ID NO: 1244504 - DNA, 25 bp, Homo sapien
tgtgggcatccgtgtggatcctcca

SEQ ID NO: 1244505 - DNA, 25 bp, Homo sapien
tgtggatcctccagctgacaaaagc

SEQ ID NO: 1244506 - DNA, 25 bp, Homo sapien
tccagctgacaaaagctaatgggct

SEQ ID NO: 1244507 - DNA, 25 bp, Homo sapien
aagctaatgggctggtgatagagaa

SEQ ID NO: 1244508 - DNA, 25 bp, Homo sapien
ctttctattccatggggcttcacaa

SEQ ID NO: 1244509 - DNA, 25 bp, Homo sapien
tgtctcagaccactctcattctcat

SEQ ID NO: 1244510 - DNA, 25 bp, Homo sapien
gacatagttcccagtaagtcatttc

SEQ ID NO: 1244511 - DNA, 25 bp, Homo sapien
caggctgacatagttcccagtaagt

SEQ ID NO: 1244512 - DNA, 25 bp, Homo sapien
gcagtcccggtcatgaagcaagcag

SEQ ID NO: 1244513 - DNA, 25 bp, Homo sapien
aatcggtggactgacagcctggtcg

SEQ ID NO: 1244514 - DNA, 25 bp, Homo sapien
tatcctacaattccagagaattggg

SEQ ID NO: 1244515 - DNA, 25 bp, Homo sapien
tctggctgaattatcctacaattcc

SEQ ID NO: 1244516 - DNA, 25 bp, Homo sapien
gcaggttcagaagcatcatcccaga

SEQ ID NO: 1244517 - DNA, 25 bp, Homo sapien
aatgagcaggttcagaagcatcatc

SEQ ID NO: 1244518 - DNA, 25 bp, Homo sapien
tcagaagcatcatcccagaaatgaa

SEQ ID NO: 1244519 - DNA, 25 bp, Homo sapien
ggttcagaagcatcatcccagaaat

SEQ ID NO: 1244520 - DNA, 25 bp, Homo sapien
ggactgcacctgtgtgtacaccaac

SEQ ID NO: 1244521 - DNA, 25 bp, Homo sapien
gcacctgtgtgtacaccaacatggg

SEQ ID NO: 1244522 - DNA, 25 bp, Homo sapien
tgaccagccaccattggtgtacatc

SEQ ID NO: 1244523 - DNA, 25 bp, Homo sapien
caccattggtgtacatcatggactg

SEQ ID NO: 1244524 - DNA, 25 bp, Homo sapien
tcatgcaggatggaggaagactctc

SEQ ID NO: 1244525 - DNA, 25 bp, Homo sapien
ctcttggccgcagctctgagtgtga

SEQ ID NO: 1244526 - DNA, 25 bp, Homo sapien
tgatactgctttgacattgtgaggg

SEQ ID NO: 1244527 - DNA, 25 bp, Homo sapien
gcactgggtgacctcaaaggaccag

SEQ ID NO: 1244528 - DNA, 25 bp, Homo sapien
cttgggagctatgatccacaaaaac

SEQ ID NO: 1244529 - DNA, 25 bp, Homo sapien
ccctattatgggaatgactctgact

SEQ ID NO: 1244530 - DNA, 25 bp, Homo sapien
tgtgtcaggtgctacagagcgttct

SEQ ID NO: 1244531 - DNA, 25 bp, Homo sapien
gttgcccggcagattaccaaagaaa

SEQ ID NO: 1244532 - DNA, 25 bp, Homo sapien
tacttctctgggcatggctagacct

SEQ ID NO: 1244533 - DNA, 25 bp, Homo sapien
taaatacgacagatgctccctgctg

SEQ ID NO: 1244534 - DNA, 25 bp, Homo sapien
aatgaatttatggtgcttcccgctc

SEQ ID NO: 1244535 - DNA, 25 bp, Homo sapien
gaggctgctgagtgccaaaaaccac

SEQ ID NO: 1244536 - DNA, 25 bp, Homo sapien
ggttttagaccagtgctaagcaggc

SEQ ID NO: 1244537 - DNA, 25 bp, Homo sapien
gcaccggttttagaccagtgctaag

SEQ ID NO: 1244538 - DNA, 25 bp, Homo sapien
ttagaccagtgctaagcaggctctg

SEQ ID NO: 1244539 - DNA, 25 bp, Homo sapien
ccttgcaccggttttagaccagtgc

SEQ ID NO: 1244540 - DNA, 25 bp, Homo sapien
ttacgacatattctagagcaacacg

SEQ ID NO: 1244541 - DNA, 25 bp, Homo sapien
taagaactgtgaagaacagccatag

SEQ ID NO: 1244542 - DNA, 25 bp, Homo sapien
gcaagcgatgtctcctttaaggttg

SEQ ID NO: 1244543 - DNA, 25 bp, Homo sapien
gatttccaccctgtagaacctgatg

SEQ ID NO: 1244544 - DNA, 25 bp, Homo sapien
ggctccagaattccttcctgaacct

SEQ ID NO: 1244545 - DNA, 25 bp, Homo sapien
tccttcctgaacctcagtcctgtcc

SEQ ID NO: 1244546 - DNA, 25 bp, Homo sapien
ctggctccagaattccttcctgaac

SEQ ID NO: 1244547 - DNA, 25 bp, Homo sapien
cttcctgaacctcagtcctgtccat

SEQ ID NO: 1244548 - DNA, 25 bp, Homo sapien
tcccagacttgaggcggaggggccg

SEQ ID NO: 1244549 - DNA, 25 bp, Homo sapien
agtgcgctgcccaccgagggtctgc

SEQ ID NO: 1244550 - DNA, 25 bp, Homo sapien
ggaagactggagtgcgctgcccacc

SEQ ID NO: 1244551 - DNA, 25 bp, Homo sapien
cctgcagccgctagcctgggaagac

SEQ ID NO: 1244552 - DNA, 25 bp, Homo sapien
gccgctgggaaactctcgaatcccc

SEQ ID NO: 1244553 - DNA, 25 bp, Homo sapien
gcgccgctgggaaactctcgaatcc

SEQ ID NO: 1244554 - DNA, 25 bp, Homo sapien
cgctgggaaactctcgaatccccat

SEQ ID NO: 1244555 - DNA, 25 bp, Homo sapien
tgcgccgctgggaaactctcgaatc

SEQ ID NO: 1244556 - DNA, 25 bp, Homo sapien
ggatccgctcctcgatggacgtgag

SEQ ID NO: 1244557 - DNA, 25 bp, Homo sapien
caccaagtacttgagctgccggagc

SEQ ID NO: 1244558 - DNA, 25 bp, Homo sapien
cacggagcgcgaccatttcagatcc

SEQ ID NO: 1244559 - DNA, 25 bp, Homo sapien
gtagccagtgatgcgcaggatccgc

SEQ ID NO: 1244560 - DNA, 25 bp, Homo sapien
cacggtctgccacataggagtgtcc

SEQ ID NO: 1244561 - DNA, 25 bp, Homo sapien
tggaccagtgaacgggaaacatgac

SEQ ID NO: 1244562 - DNA, 25 bp, Homo sapien
tcttcctcgaagttgcaaacctggg

SEQ ID NO: 1244563 - DNA, 25 bp, Homo sapien
tgtaagagaacgcatcagaacgcct

SEQ ID NO: 1244564 - DNA, 25 bp, Homo sapien
agcatctccatctgagcctggtgag

SEQ ID NO: 1244565 - DNA, 25 bp, Homo sapien
tgaagaccgataaaatccaggggag

SEQ ID NO: 1244566 - DNA, 25 bp, Homo sapien
gaacggcatccaaaatgaagacccc

SEQ ID NO: 1244567 - DNA, 25 bp, Homo sapien
cggcatccaaaatgaagaccccaag

SEQ ID NO: 1244568 - DNA, 25 bp, Homo sapien
gaccccaagaattgtcctctatcat

SEQ ID NO: 1244569 - DNA, 25 bp, Homo sapien
ctagaatgatccctatagaacctcc

SEQ ID NO: 1244570 - DNA, 25 bp, Homo sapien
atctagaatgatccctatagaacct

SEQ ID NO: 1244571 - DNA, 25 bp, Homo sapien
tatctagaatgatccctatagaacc

SEQ ID NO: 1244572 - DNA, 25 bp, Homo sapien
ctatctagaatgatccctatagaac

SEQ ID NO: 1244573 - DNA, 25 bp, Homo sapien
atcacagcatcctcaaagccattag

SEQ ID NO: 1244574 - DNA, 25 bp, Homo sapien
ttgatcacagcatcctcaaagccat

SEQ ID NO: 1244575 - DNA, 25 bp, Homo sapien
tgatcacagcatcctcaaagccatt

SEQ ID NO: 1244576 - DNA, 25 bp, Homo sapien
aattgatcacagcatcctcaaagcc

SEQ ID NO: 1244577 - DNA, 25 bp, Homo sapien
gagcaaaggtaatttctgtactgtt

SEQ ID NO: 1244578 - DNA, 25 bp, Homo sapien
tctgtactgttcacaattacctcat

SEQ ID NO: 1244579 - DNA, 25 bp, Homo sapien
gaaacttgcgaatccaaatgactga

SEQ ID NO: 1244580 - DNA, 25 bp, Homo sapien
tcatttatcttaacaacccaaacaa

SEQ ID NO: 1244581 - DNA, 25 bp, Homo sapien
gggactagagtcgtgaaccactgca

SEQ ID NO: 1244582 - DNA, 25 bp, Homo sapien
tgttctcaaagtgacaactctcagg

SEQ ID NO: 1244583 - DNA, 25 bp, Homo sapien
catctatagattgccaggtgggaaa

SEQ ID NO: 1244584 - DNA, 25 bp, Homo sapien
caggaataggtctcagccagattga

SEQ ID NO: 1244585 - DNA, 25 bp, Homo sapien
taaaatatgcatccggttcatagcc

SEQ ID NO: 1244586 - DNA, 25 bp, Homo sapien
tctgaacctaaagacatactctgaa

SEQ ID NO: 1244587 - DNA, 25 bp, Homo sapien
tcactttgaagaataactgatatcc

SEQ ID NO: 1244588 - DNA, 25 bp, Homo sapien
tatgctatccttagcagcatgtgaa

SEQ ID NO: 1244589 - DNA, 25 bp, Homo sapien
taggtttttataatgacaggcacag

SEQ ID NO: 1244590 - DNA, 25 bp, Homo sapien
aggtttttataatgacaggcacagg

SEQ ID NO: 1244591 - DNA, 25 bp, Homo sapien
gtaggtttttataatgacaggcaca

SEQ ID NO: 1244592 - DNA, 25 bp, Homo sapien
aaagacagcagttcatttccgttac

SEQ ID NO: 1244593 - DNA, 25 bp, Homo sapien
gcagcagtcagtcaagggattctta

SEQ ID NO: 1244594 - DNA, 25 bp, Homo sapien
gttataaccatatacggtgtgtgga

SEQ ID NO: 1244595 - DNA, 25 bp, Homo sapien
tgttccaactgcctacactaaatgc

SEQ ID NO: 1244596 - DNA, 25 bp, Homo sapien
taatataattcaggtgacgtggagg

SEQ ID NO: 1244597 - DNA, 25 bp, Homo sapien
catcacgatgtttaaagtacttgcc

SEQ ID NO: 1244598 - DNA, 25 bp, Homo sapien
ggagccttggctaacttgcttcatg

SEQ ID NO: 1244599 - DNA, 25 bp, Homo sapien
catggaatactatccgtgaacatca

SEQ ID NO: 1244600 - DNA, 25 bp, Homo sapien
ccatttttggtttgaggtggcactc

SEQ ID NO: 1244601 - DNA, 25 bp, Homo sapien
caaaagtttccatgttagtgaggga

SEQ ID NO: 1244602 - DNA, 25 bp, Homo sapien
cactcaacatatggagggagaaagg

SEQ ID NO: 1244603 - DNA, 25 bp, Homo sapien
catgtccaggcatacttgatccaag

SEQ ID NO: 1244604 - DNA, 25 bp, Homo sapien
gatgccctccatgtgctaactcctg

SEQ ID NO: 1244605 - DNA, 25 bp, Homo sapien
ggttagctcctgtggctagcagaag

SEQ ID NO: 1244606 - DNA, 25 bp, Homo sapien
gaagaggtcgatgccctccatgtgc

SEQ ID NO: 1244607 - DNA, 25 bp, Homo sapien
gcagttgtgatccagtcctggttag

SEQ ID NO: 1244608 - DNA, 25 bp, Homo sapien
ttttgaaatatctgactgtcagatt

SEQ ID NO: 1244609 - DNA, 25 bp, Homo sapien
tgcagttaagggcaaaaagtcgtta

SEQ ID NO: 1244610 - DNA, 25 bp, Homo sapien
agcagctgcagttaagggcaaaaag

SEQ ID NO: 1244611 - DNA, 25 bp, Homo sapien
agctgcagttaagggcaaaaagtcg

SEQ ID NO: 1244612 - DNA, 25 bp, Homo sapien
tattggaggataacggagaaaaaga

SEQ ID NO: 1244613 - DNA, 25 bp, Homo sapien
aaaagacatgtttaatgtcctcacc

SEQ ID NO: 1244614 - DNA, 25 bp, Homo sapien
aaaagtggccgcttgtattggagga

SEQ ID NO: 1244615 - DNA, 25 bp, Homo sapien
taatgtcctcacctaaaggcgagtg

SEQ ID NO: 1244616 - DNA, 25 bp, Homo sapien
tcatggtgaggtcctccatgctgtg

SEQ ID NO: 1244617 - DNA, 25 bp, Homo sapien
cattgggaaagctccagttgagtat

SEQ ID NO: 1244618 - DNA, 25 bp, Homo sapien
gtgcctggcattgggaaagctccag

SEQ ID NO: 1244619 - DNA, 25 bp, Homo sapien
ctccctcatggtgaggtcctccatg

SEQ ID NO: 1244620 - DNA, 25 bp, Homo sapien
gtaggctgagctctcgggcagcggg

SEQ ID NO: 1244621 - DNA, 25 bp, Homo sapien
cattgtgcaggccagcacgctgtag

SEQ ID NO: 1244622 - DNA, 25 bp, Homo sapien
acaggttgaggcattgtgcaggcca

SEQ ID NO: 1244623 - DNA, 25 bp, Homo sapien
ggccagcacgctgtaggctgagctc

SEQ ID NO: 1244624 - DNA, 25 bp, Homo sapien
tactgttacccgaggagccatgggt

SEQ ID NO: 1244625 - DNA, 25 bp, Homo sapien
cacatttgcagccagcaaccttagt

SEQ ID NO: 1244626 - DNA, 25 bp, Homo sapien
tttcaaatactgttacccgaggagc

SEQ ID NO: 1244627 - DNA, 25 bp, Homo sapien
ggccaaatagcttttgtacattgtt

SEQ ID NO: 1244628 - DNA, 25 bp, Homo sapien
cgggtactgagaacttcctgagcct

SEQ ID NO: 1244629 - DNA, 25 bp, Homo sapien
tccgagctgcacatgtgctccgggt

SEQ ID NO: 1244630 - DNA, 25 bp, Homo sapien
tgtgctccgggtactgagaacttcc

SEQ ID NO: 1244631 - DNA, 25 bp, Homo sapien
ccactctgggtgctggccgacgcat

SEQ ID NO: 1244632 - DNA, 25 bp, Homo sapien
tattgaagcacatcttcaagtcctt

SEQ ID NO: 1244633 - DNA, 25 bp, Homo sapien
ttattgaagcacatcttcaagtcct

SEQ ID NO: 1244634 - DNA, 25 bp, Homo sapien
attgaagcacatcttcaagtccttt

SEQ ID NO: 1244635 - DNA, 25 bp, Homo sapien
gacttataagacttgtatctgcatc

SEQ ID NO: 1244636 - DNA, 25 bp, Homo sapien
tctgcatcttgagcgcagagcagca

SEQ ID NO: 1244637 - DNA, 25 bp, Homo sapien
acgccctggcctgacaattgcttac

SEQ ID NO: 1244638 - DNA, 25 bp, Homo sapien
gccagaagtcctgcttggtagactt

SEQ ID NO: 1244639 - DNA, 25 bp, Homo sapien
ttgccttctcccacgagggccagaa

SEQ ID NO: 1244640 - DNA, 25 bp, Homo sapien
cttctcccacgagggccagaagaag

SEQ ID NO: 1244641 - DNA, 25 bp, Homo sapien
acgagggccagaagaagagccaatt

SEQ ID NO: 1244642 - DNA, 25 bp, Homo sapien
aagagccaattctggcagtttaggc

SEQ ID NO: 1244643 - DNA, 25 bp, Homo sapien
gatctgatgagctaagtattcccaa

SEQ ID NO: 1244644 - DNA, 25 bp, Homo sapien
tatttgggaagcatctacagcacag

SEQ ID NO: 1244645 - DNA, 25 bp, Homo sapien
caaagggagcattaggcaaggcacg

SEQ ID NO: 1244646 - DNA, 25 bp, Homo sapien
ggcacgggcgtttcaagaacattca

SEQ ID NO: 1244647 - DNA, 25 bp, Homo sapien
tctgattcatttgagcatgcggcag

SEQ ID NO: 1244648 - DNA, 25 bp, Homo sapien
caattagggaccatggttttgagaa

SEQ ID NO: 1244649 - DNA, 25 bp, Homo sapien
gagccattaatcgttccccaggtat

SEQ ID NO: 1244650 - DNA, 25 bp, Homo sapien
tacttcctgagaggtacaattaggg

SEQ ID NO: 1244651 - DNA, 25 bp, Homo sapien
gtcacccaatatggagtcaaatccc

SEQ ID NO: 1244652 - DNA, 25 bp, Homo sapien
aaatcccattctgccagttgccagc

SEQ ID NO: 1244653 - DNA, 25 bp, Homo sapien
tacatgtgaaatcgaaaaacacccc

SEQ ID NO: 1244654 - DNA, 25 bp, Homo sapien
cacagggtcacccaatatggagtca

SEQ ID NO: 1244655 - DNA, 25 bp, Homo sapien
ccgacatgatttttgccccgaaaga

SEQ ID NO: 1244656 - DNA, 25 bp, Homo sapien
gagaaaaatccgacatgatttttgc

SEQ ID NO: 1244657 - DNA, 25 bp, Homo sapien
tctgtatctggtataatactcagta

SEQ ID NO: 1244658 - DNA, 25 bp, Homo sapien
attctgtatctggtataatactcag

SEQ ID NO: 1244659 - DNA, 25 bp, Homo sapien
gaatgaacacctttagacccctgac

SEQ ID NO: 1244660 - DNA, 25 bp, Homo sapien
cagaagttgaagaagcaagtgccat

SEQ ID NO: 1244661 - DNA, 25 bp, Homo sapien
cagagcatacagtcctaacacagag

SEQ ID NO: 1244662 - DNA, 25 bp, Homo sapien
gagagggacctacttctggctagga

SEQ ID NO: 1244663 - DNA, 25 bp, Homo sapien
tgcctatcctggaggatgtttcatg

SEQ ID NO: 1244664 - DNA, 25 bp, Homo sapien
tttgtggtctaacatatgcctatcc

SEQ ID NO: 1244665 - DNA, 25 bp, Homo sapien
tctagtttgatactactgtgatcag

SEQ ID NO: 1244666 - DNA, 25 bp, Homo sapien
tctgatacaatttgaatcctcttaa

SEQ ID NO: 1244667 - DNA, 25 bp, Homo sapien
tttcacccagtccttgggtctcttc

SEQ ID NO: 1244668 - DNA, 25 bp, Homo sapien
aggagcacgacagcacccagaaact

SEQ ID NO: 1244669 - DNA, 25 bp, Homo sapien
ccatgcgggcattcaggtgctcatc

SEQ ID NO: 1244670 - DNA, 25 bp, Homo sapien
tcttccgacagggatgctggtgagt

SEQ ID NO: 1244671 - DNA, 25 bp, Homo sapien
ggcacctggattcagagcagttgct

SEQ ID NO: 1244672 - DNA, 25 bp, Homo sapien
cagttgcttcaggtgagatgagcca

SEQ ID NO: 1244673 - DNA, 25 bp, Homo sapien
caccattgactgctcctcaatagca

SEQ ID NO: 1244674 - DNA, 25 bp, Homo sapien
tccaaatgccatgtaagacccgtca

SEQ ID NO: 1244675 - DNA, 25 bp, Homo sapien
aaaaatatggaacaaatgcccatga

SEQ ID NO: 1244676 - DNA, 25 bp, Homo sapien
atggaatattccaccacaaaaaata

SEQ ID NO: 1244677 - DNA, 25 bp, Homo sapien
aacaaatgcccatgaatcaatgagt

SEQ ID NO: 1244678 - DNA, 25 bp, Homo sapien
gtatacttataccatggaatattcc

SEQ ID NO: 1244679 - DNA, 25 bp, Homo sapien
aggatatgcggaggtcatgctgcaa

SEQ ID NO: 1244680 - DNA, 25 bp, Homo sapien
cataaggagaggatatgcggaggtc

SEQ ID NO: 1244681 - DNA, 25 bp, Homo sapien
tgatccaccacacccttgctcagag

SEQ ID NO: 1244682 - DNA, 25 bp, Homo sapien
tatgcggaggtcatgctgcaaatga

SEQ ID NO: 1244683 - DNA, 25 bp, Homo sapien
tgcatctggctgacagcagttgttg

SEQ ID NO: 1244684 - DNA, 25 bp, Homo sapien
tttgcacctttcacagcacccttga

SEQ ID NO: 1244685 - DNA, 25 bp, Homo sapien
ggctgacagcagttgttgaagtttt

SEQ ID NO: 1244686 - DNA, 25 bp, Homo sapien
tcacagcacccttgactgcatctgg

SEQ ID NO: 1244687 - DNA, 25 bp, Homo sapien
cagctgcttgctctggcattgcttt

SEQ ID NO: 1244688 - DNA, 25 bp, Homo sapien
tagaagtgcccagtgttcaatcatt

SEQ ID NO: 1244689 - DNA, 25 bp, Homo sapien
ttgacatactcctttagggcagctg

SEQ ID NO: 1244690 - DNA, 25 bp, Homo sapien
tatctatgtctatttgctagttgcc

SEQ ID NO: 1244691 - DNA, 25 bp, Homo sapien
tggaggcagcagacgaaccttctga

SEQ ID NO: 1244692 - DNA, 25 bp, Homo sapien
ctggaggcagcagacgaaccttctg

SEQ ID NO: 1244693 - DNA, 25 bp, Homo sapien
cctccctgctcatgtgctttctgtc

SEQ ID NO: 1244694 - DNA, 25 bp, Homo sapien
ctccctgctcatgtgctttctgtcc

SEQ ID NO: 1244695 - DNA, 25 bp, Homo sapien
caagtttctgtaaaggaacttgata

SEQ ID NO: 1244696 - DNA, 25 bp, Homo sapien
gccagacagagataaactcagggaa

SEQ ID NO: 1244697 - DNA, 25 bp, Homo sapien
gaacttgataataaagccagacaga

SEQ ID NO: 1244698 - DNA, 25 bp, Homo sapien
ggcagcctataacctggcagaatgt

SEQ ID NO: 1244699 - DNA, 25 bp, Homo sapien
tggcaagaaactctggggcaagtgt

SEQ ID NO: 1244700 - DNA, 25 bp, Homo sapien
gggtcctctcacttttataacagcc

SEQ ID NO: 1244701 - DNA, 25 bp, Homo sapien
gccatttctgtaacaatacagtcct

SEQ ID NO: 1244702 - DNA, 25 bp, Homo sapien
tataacagcctggtctaagagaact

SEQ ID NO: 1244703 - DNA, 25 bp, Homo sapien
tgagtgcacagcgactgtgggccat

SEQ ID NO: 1244704 - DNA, 25 bp, Homo sapien
tgcagactccctctccaagagtgtt

SEQ ID NO: 1244705 - DNA, 25 bp, Homo sapien
ctctccaagagtgttccagtttttc

SEQ ID NO: 1244706 - DNA, 25 bp, Homo sapien
ggtctgctgcttggacagcgctggc

SEQ ID NO: 1244707 - DNA, 25 bp, Homo sapien
tacttcaccaattgccatcagtgcc

SEQ ID NO: 1244708 - DNA, 25 bp, Homo sapien
tctctgccccctttagataaaagtc

SEQ ID NO: 1244709 - DNA, 25 bp, Homo sapien
tccctcatgcctcataaaagcgccc

SEQ ID NO: 1244710 - DNA, 25 bp, Homo sapien
tcaaagcccctatcaagcctccctc

SEQ ID NO: 1244711 - DNA, 25 bp, Homo sapien
ctgatccgggtctgaatccatcctg

SEQ ID NO: 1244712 - DNA, 25 bp, Homo sapien
cgggtctgaatccatcctgagctct

SEQ ID NO: 1244713 - DNA, 25 bp, Homo sapien
gatccgggtctgaatccatcctgag

SEQ ID NO: 1244714 - DNA, 25 bp, Homo sapien
tccgggtctgaatccatcctgagct

SEQ ID NO: 1244715 - DNA, 25 bp, Homo sapien
tgcttgggcagctagactcttgtgc

SEQ ID NO: 1244716 - DNA, 25 bp, Homo sapien
tgaacttggttagccatctgtgtgt

SEQ ID NO: 1244717 - DNA, 25 bp, Homo sapien
ttcagaagttccgactttagcggct

SEQ ID NO: 1244718 - DNA, 25 bp, Homo sapien
tggaatcttcgcgtggaaagccggc

SEQ ID NO: 1244719 - DNA, 25 bp, Homo sapien
tcactcatggtgcttccagtcccta

SEQ ID NO: 1244720 - DNA, 25 bp, Homo sapien
tcatggtgcttccagtccctaaagc

SEQ ID NO: 1244721 - DNA, 25 bp, Homo sapien
ccagttcactcatggtgcttccagt

SEQ ID NO: 1244722 - DNA, 25 bp, Homo sapien
atggtgcttccagtccctaaagctg

SEQ ID NO: 1244723 - DNA, 25 bp, Homo sapien
gctacttgctgcgacatgtgctcct

SEQ ID NO: 1244724 - DNA, 25 bp, Homo sapien
tcctgctaatttgcagctacttgct

SEQ ID NO: 1244725 - DNA, 25 bp, Homo sapien
ttcggttctcctctccacaagtctt

SEQ ID NO: 1244726 - DNA, 25 bp, Homo sapien
tttccaacgcatactttcagctcca

SEQ ID NO: 1244727 - DNA, 25 bp, Homo sapien
tggcttgctggtggtctgtattctg

SEQ ID NO: 1244728 - DNA, 25 bp, Homo sapien
gcagccagaggtagactgtagcata

SEQ ID NO: 1244729 - DNA, 25 bp, Homo sapien
gaatggaaaaacgacactgcctctg

SEQ ID NO: 1244730 - DNA, 25 bp, Homo sapien
tctccatacctgtctgacctttcgg

SEQ ID NO: 1244731 - DNA, 25 bp, Homo sapien
atagatactgtgctccatatgccaa

SEQ ID NO: 1244732 - DNA, 25 bp, Homo sapien
tatgccaagaggcattaacagccac

SEQ ID NO: 1244733 - DNA, 25 bp, Homo sapien
gaccttctggcaagctgtcttgtcc

SEQ ID NO: 1244734 - DNA, 25 bp, Homo sapien
tgtcctgtccaacttggaacggcgg

SEQ ID NO: 1244735 - DNA, 25 bp, Homo sapien
gcatagcaaatgcagtcttgaaccc

SEQ ID NO: 1244736 - DNA, 25 bp, Homo sapien
tgacctcctcccgtagtggagctgt

SEQ ID NO: 1244737 - DNA, 25 bp, Homo sapien
caagatgtccctgacaggcagtatg

SEQ ID NO: 1244738 - DNA, 25 bp, Homo sapien
tgggccccatggtcaacaagatgtc

SEQ ID NO: 1244739 - DNA, 25 bp, Homo sapien
tgacacaatcccagaatgttagagc

SEQ ID NO: 1244740 - DNA, 25 bp, Homo sapien
gggtactctacaccctggggtctgc

SEQ ID NO: 1244741 - DNA, 25 bp, Homo sapien
ctgccagcaggtgacctgaccacca

SEQ ID NO: 1244742 - DNA, 25 bp, Homo sapien
cagcaggtgacctgaccaccaagaa

SEQ ID NO: 1244743 - DNA, 25 bp, Homo sapien
tgccagcaggtgacctgaccaccaa

SEQ ID NO: 1244744 - DNA, 25 bp, Homo sapien
tgtccagctcgtgcttgtatcagga

SEQ ID NO: 1244745 - DNA, 25 bp, Homo sapien
tctggttctaattccccaggtagcc

SEQ ID NO: 1244746 - DNA, 25 bp, Homo sapien
aggactgccacgcagagctgtccag

SEQ ID NO: 1244747 - DNA, 25 bp, Homo sapien
ccagctcgtgcttgtatcaggatgc

SEQ ID NO: 1244748 - DNA, 25 bp, Homo sapien
agggacaaaacattctctgtggcac

SEQ ID NO: 1244749 - DNA, 25 bp, Homo sapien
cacagggacaaaacattctctgtgg

SEQ ID NO: 1244750 - DNA, 25 bp, Homo sapien
ttagcacagggacaaaacattctct

SEQ ID NO: 1244751 - DNA, 25 bp, Homo sapien
tagcacagggacaaaacattctctg

SEQ ID NO: 1244752 - DNA, 25 bp, Homo sapien
ttgctctttcgttctaaagaagcat

SEQ ID NO: 1244753 - DNA, 25 bp, Homo sapien
gtcaaagaggcttttgctgtcagtc

SEQ ID NO: 1244754 - DNA, 25 bp, Homo sapien
ctgaagtcaaagaggcttttgctgt

SEQ ID NO: 1244755 - DNA, 25 bp, Homo sapien
gttctaaagaagcatactgaattcc

SEQ ID NO: 1244756 - DNA, 25 bp, Homo sapien
caggtgctgttgtcactcatcccta

SEQ ID NO: 1244757 - DNA, 25 bp, Homo sapien
actgtcatttctagccaggtgctgt

SEQ ID NO: 1244758 - DNA, 25 bp, Homo sapien
tctagccaggtgctgttgtcactca

SEQ ID NO: 1244759 - DNA, 25 bp, Homo sapien
tggagccacagactgtcatttctag

SEQ ID NO: 1244760 - DNA, 25 bp, Homo sapien
ttcccacgttccttctatgagaaaa

SEQ ID NO: 1244761 - DNA, 25 bp, Homo sapien
tcccacgttccttctatgagaaaaa

SEQ ID NO: 1244762 - DNA, 25 bp, Homo sapien
ctgctctggcctgcggcagcattcc

SEQ ID NO: 1244763 - DNA, 25 bp, Homo sapien
tggcctgcggcagcattcccacgtt

SEQ ID NO: 1244764 - DNA, 25 bp, Homo sapien
ttttcacatgcagcttaccccagga

SEQ ID NO: 1244765 - DNA, 25 bp, Homo sapien
taatgcaatgttgtgtacagagtca

SEQ ID NO: 1244766 - DNA, 25 bp, Homo sapien
tctgcttgccgaagaggagttacta

SEQ ID NO: 1244767 - DNA, 25 bp, Homo sapien
ttgatatttgggaggtcatcacctc

SEQ ID NO: 1244768 - DNA, 25 bp, Homo sapien
ctcggtagcaggaaagctccttttc

SEQ ID NO: 1244769 - DNA, 25 bp, Homo sapien
gcccgtggccgacgcggccctctgc

SEQ ID NO: 1244770 - DNA, 25 bp, Homo sapien
agcgctgccgccgatcgcctacatc

SEQ ID NO: 1244771 - DNA, 25 bp, Homo sapien
cgggctccggttgccgcgttgctca

SEQ ID NO: 1244772 - DNA, 25 bp, Homo sapien
ctggggccggctggagcgcgtctct

SEQ ID NO: 1244773 - DNA, 25 bp, Homo sapien
tcaggaccggactgttgcaggcgct

SEQ ID NO: 1244774 - DNA, 25 bp, Homo sapien
tgagcggggccacccgggccgagtg

SEQ ID NO: 1244775 - DNA, 25 bp, Homo sapien
gtaagggtcaggaccggactgttgc

SEQ ID NO: 1244776 - DNA, 25 bp, Homo sapien
cggactgttgcaggcgctgagcggg

SEQ ID NO: 1244777 - DNA, 25 bp, Homo sapien
ctgccagatccccccacgcaggcgg

SEQ ID NO: 1244778 - DNA, 25 bp, Homo sapien
gctgccagatccccccacgcaggcg

SEQ ID NO: 1244779 - DNA, 25 bp, Homo sapien
gccagatccccccacgcaggcggcg

SEQ ID NO: 1244780 - DNA, 25 bp, Homo sapien
cagatccccccacgcaggcggcggc

SEQ ID NO: 1244781 - DNA, 25 bp, Homo sapien
tacagtggttaggacgtgggcatac

SEQ ID NO: 1244782 - DNA, 25 bp, Homo sapien
tggttaggacgtgggcataccacat

SEQ ID NO: 1244783 - DNA, 25 bp, Homo sapien
tcagatggtacagtggttaggacgt

SEQ ID NO: 1244784 - DNA, 25 bp, Homo sapien
tgccatcagatggtacagtggttag

SEQ ID NO: 1244785 - DNA, 25 bp, Homo sapien
ggcaaagacactgccctctcctgca

SEQ ID NO: 1244786 - DNA, 25 bp, Homo sapien
gagggctcttgaggaagagggacat

SEQ ID NO: 1244787 - DNA, 25 bp, Homo sapien
agcctgagggctcttgaggaagagg

SEQ ID NO: 1244788 - DNA, 25 bp, Homo sapien
cctgagggctcttgaggaagaggga

SEQ ID NO: 1244789 - DNA, 25 bp, Homo sapien
ggagggcaggttatatgcaggacag

SEQ ID NO: 1244790 - DNA, 25 bp, Homo sapien
gggcaggttatatgcaggacagtac

SEQ ID NO: 1244791 - DNA, 25 bp, Homo sapien
agggcaggttatatgcaggacagta

SEQ ID NO: 1244792 - DNA, 25 bp, Homo sapien
gagggcaggttatatgcaggacagt

SEQ ID NO: 1244793 - DNA, 25 bp, Homo sapien
tcctcatcagattgttagcatctcc

SEQ ID NO: 1244794 - DNA, 25 bp, Homo sapien
gctaatgacctgcacacaaaaccca

SEQ ID NO: 1244795 - DNA, 25 bp, Homo sapien
aaatatgcatactcctctttgctgg

SEQ ID NO: 1244796 - DNA, 25 bp, Homo sapien
ctggtgatgttttggtgctgctaat

SEQ ID NO: 1244797 - DNA, 25 bp, Homo sapien
ccccggaacgtgttggaaatgcaga

SEQ ID NO: 1244798 - DNA, 25 bp, Homo sapien
tgggaaacactcctccagaacacac

SEQ ID NO: 1244799 - DNA, 25 bp, Homo sapien
ggtgatctgcgtgctttgggaaaca

SEQ ID NO: 1244800 - DNA, 25 bp, Homo sapien
cgagtactcacgtgctcctgggtgc

SEQ ID NO: 1244801 - DNA, 25 bp, Homo sapien
cctgcacttcgcagggcgctgccct

SEQ ID NO: 1244802 - DNA, 25 bp, Homo sapien
tcacccctgcacttcgcagggcgct

SEQ ID NO: 1244803 - DNA, 25 bp, Homo sapien
agaagggcgtggttagcggggcctg

SEQ ID NO: 1244804 - DNA, 25 bp, Homo sapien
aagggcgtggttagcggggcctgca

SEQ ID NO: 1244805 - DNA, 25 bp, Homo sapien
agcggcgactcgctctcccgccggc

SEQ ID NO: 1244806 - DNA, 25 bp, Homo sapien
ggagcacgtccagcagcggcgactc

SEQ ID NO: 1244807 - DNA, 25 bp, Homo sapien
cggcgactcgctctcccgccggcct

SEQ ID NO: 1244808 - DNA, 25 bp, Homo sapien
gcgactcgctctcccgccggcctcc

SEQ ID NO: 1244809 - DNA, 25 bp, Homo sapien
gaagggcgcgtcgaacttcctgaag

SEQ ID NO: 1244810 - DNA, 25 bp, Homo sapien
aagttccagttggtggcaaaccacg

SEQ ID NO: 1244811 - DNA, 25 bp, Homo sapien
tgtatcgctgcttcacagactgctt

SEQ ID NO: 1244812 - DNA, 25 bp, Homo sapien
tgccccacgtagtacaacgggaaga

SEQ ID NO: 1244813 - DNA, 25 bp, Homo sapien
caacatggtagattcccggaaagaa

SEQ ID NO: 1244814 - DNA, 25 bp, Homo sapien
ttacaggaacaacatggtagattcc

SEQ ID NO: 1244815 - DNA, 25 bp, Homo sapien
ccaatgatgtttttagttaccttgt

SEQ ID NO: 1244816 - DNA, 25 bp, Homo sapien
tctttgttccttggacccaatgatg

SEQ ID NO: 1244817 - DNA, 25 bp, Homo sapien
cctgaggatcagaattctttgcacc

SEQ ID NO: 1244818 - DNA, 25 bp, Homo sapien
caatttctggctggtccatgagcca

SEQ ID NO: 1244819 - DNA, 25 bp, Homo sapien
ctggtttaggtcaaccctgaggatc

SEQ ID NO: 1244820 - DNA, 25 bp, Homo sapien
agggtgcattaagtgcctctttagc

SEQ ID NO: 1244821 - DNA, 25 bp, Homo sapien
tccatgcatatccttagcgggtgca

SEQ ID NO: 1244822 - DNA, 25 bp, Homo sapien
gcatgatcactatgggaatcccagg

SEQ ID NO: 1244823 - DNA, 25 bp, Homo sapien
tgtcacaccgcttttgtcagaggca

SEQ ID NO: 1244824 - DNA, 25 bp, Homo sapien
taacacctcactcctaccagcatga

SEQ ID NO: 1244825 - DNA, 25 bp, Homo sapien
tgaattccaataacccgcaccttgg

SEQ ID NO: 1244826 - DNA, 25 bp, Homo sapien
tgtgttagaatacaaacagtcctgt

SEQ ID NO: 1244827 - DNA, 25 bp, Homo sapien
cagctctgtgttagaatacaaacag

SEQ ID NO: 1244828 - DNA, 25 bp, Homo sapien
tcctgttttcccaaagctagctgaa

SEQ ID NO: 1244829 - DNA, 25 bp, Homo sapien
caccaagaggacatgtggaaccagg

SEQ ID NO: 1244830 - DNA, 25 bp, Homo sapien
catgtagcctcattagtaaagcccc

SEQ ID NO: 1244831 - DNA, 25 bp, Homo sapien
ttccaagtccacctgagagttctga

SEQ ID NO: 1244832 - DNA, 25 bp, Homo sapien
agagttctgatgctgtgctgacccc

SEQ ID NO: 1244833 - DNA, 25 bp, Homo sapien
gacgctgaatacacagactgtgcag

SEQ ID NO: 1244834 - DNA, 25 bp, Homo sapien
cactgagaaggcaacgaacaatcca

SEQ ID NO: 1244835 - DNA, 25 bp, Homo sapien
taatgcctgtaccagtgtctctatg

SEQ ID NO: 1244836 - DNA, 25 bp, Homo sapien
taaaaatctctttggtgacgctgaa

SEQ ID NO: 1244837 - DNA, 25 bp, Homo sapien
cagggtgttcttcctcagcagttgg

SEQ ID NO: 1244838 - DNA, 25 bp, Homo sapien
cagccagggtgttcttcctcagcag

SEQ ID NO: 1244839 - DNA, 25 bp, Homo sapien
ccagggtgttcttcctcagcagttg

SEQ ID NO: 1244840 - DNA, 25 bp, Homo sapien
gccagggtgttcttcctcagcagtt

SEQ ID NO: 1244841 - DNA, 25 bp, Homo sapien
ctggaatagaataggagtgggtggg

SEQ ID NO: 1244842 - DNA, 25 bp, Homo sapien
aataggagtgggtgggaatgtggta

SEQ ID NO: 1244843 - DNA, 25 bp, Homo sapien
taggagtgggtgggaatgtggtata

SEQ ID NO: 1244844 - DNA, 25 bp, Homo sapien
agaataggagtgggtgggaatgtgg

SEQ ID NO: 1244845 - DNA, 25 bp, Homo sapien
cacttgggtcttgtcggtgctcaga

SEQ ID NO: 1244846 - DNA, 25 bp, Homo sapien
gattttccgatgagggaggctttca

SEQ ID NO: 1244847 - DNA, 25 bp, Homo sapien
cgcatcaaatgaggtccggtgtgaa

SEQ ID NO: 1244848 - DNA, 25 bp, Homo sapien
cactttgtacacatagcctgagggt

SEQ ID NO: 1244849 - DNA, 25 bp, Homo sapien
acaggcccgtgccattgcaccagtc

SEQ ID NO: 1244850 - DNA, 25 bp, Homo sapien
ccgtgccattgcaccagtctaattt

SEQ ID NO: 1244851 - DNA, 25 bp, Homo sapien
aggcccgtgccattgcaccagtcta

SEQ ID NO: 1244852 - DNA, 25 bp, Homo sapien
gcccgtgccattgcaccagtctaat

SEQ ID NO: 1244853 - DNA, 25 bp, Homo sapien
gtaagcagccgacccaggcccactc

SEQ ID NO: 1244854 - DNA, 25 bp, Homo sapien
caggcagcctggtatttcccagaca

SEQ ID NO: 1244855 - DNA, 25 bp, Homo sapien
gcagcctggtatttcccagacattt

SEQ ID NO: 1244856 - DNA, 25 bp, Homo sapien
tccacaggcagcctggtatttccca

SEQ ID NO: 1244857 - DNA, 25 bp, Homo sapien
agctggaaacaagctcaacgtcatt

SEQ ID NO: 1244858 - DNA, 25 bp, Homo sapien
ggaaacaagctcaacgtcattttct

SEQ ID NO: 1244859 - DNA, 25 bp, Homo sapien
tagatggcaccccaaaattttctgt

SEQ ID NO: 1244860 - DNA, 25 bp, Homo sapien
gtttttactgttgcaacttgctgaa

SEQ ID NO: 1244861 - DNA, 25 bp, Homo sapien
ggcatctgtgtctgtagctggacaa

SEQ ID NO: 1244862 - DNA, 25 bp, Homo sapien
acaccagatctgagggtgcccgtca

SEQ ID NO: 1244863 - DNA, 25 bp, Homo sapien
ggaactcagactcagtgggaacagt

SEQ ID NO: 1244864 - DNA, 25 bp, Homo sapien
cagcagagtgtgtggacctttactt

SEQ ID NO: 1244865 - DNA, 25 bp, Homo sapien
ttaaaagaagttggaactcagactc

SEQ ID NO: 1244866 - DNA, 25 bp, Homo sapien
tcttgttcaacaggtaccagaaaat

SEQ ID NO: 1244867 - DNA, 25 bp, Homo sapien
tcagctcttgttcaacaggtaccag

SEQ ID NO: 1244868 - DNA, 25 bp, Homo sapien
aatgattggtttgagtttcactaaa

SEQ ID NO: 1244869 - DNA, 25 bp, Homo sapien
ctttttcacaacttccacatcagca

SEQ ID NO: 1244870 - DNA, 25 bp, Homo sapien
gacagctgttagtactgaaatggaa

SEQ ID NO: 1244871 - DNA, 25 bp, Homo sapien
ccataggaccatcccttgcaaaatg

SEQ ID NO: 1244872 - DNA, 25 bp, Homo sapien
aagcacatccctccgcaaaacagag

SEQ ID NO: 1244873 - DNA, 25 bp, Homo sapien
taggcggctcaggaaagtgtcaacc

SEQ ID NO: 1244874 - DNA, 25 bp, Homo sapien
ggtcccataatgccctgtcttcctc

SEQ ID NO: 1244875 - DNA, 25 bp, Homo sapien
caattgggtatcagctcgtatatcc

SEQ ID NO: 1244876 - DNA, 25 bp, Homo sapien
tttccatcaattgggtatcagctcg

SEQ ID NO: 1244877 - DNA, 25 bp, Homo sapien
gtatcagctcgtatatccccttcag

SEQ ID NO: 1244878 - DNA, 25 bp, Homo sapien
cagctcgtatatccccttcagtgaa

SEQ ID NO: 1244879 - DNA, 25 bp, Homo sapien
tgatggcccaagttgctggaaatgg

SEQ ID NO: 1244880 - DNA, 25 bp, Homo sapien
caaagcctgatcattgtagatggga

SEQ ID NO: 1244881 - DNA, 25 bp, Homo sapien
gcttggtattgatggcccaagttgc

SEQ ID NO: 1244882 - DNA, 25 bp, Homo sapien
ctcctccaaagcctgatcattgtag

SEQ ID NO: 1244883 - DNA, 25 bp, Homo sapien
gttgcttctgaacaaaccggggcca

SEQ ID NO: 1244884 - DNA, 25 bp, Homo sapien
catgaaaccgattcaactgaattga

SEQ ID NO: 1244885 - DNA, 25 bp, Homo sapien
tggccacctctctctgtacacagag

SEQ ID NO: 1244886 - DNA, 25 bp, Homo sapien
ggagtctggtgcagtttggccacct

SEQ ID NO: 1244887 - DNA, 25 bp, Homo sapien
gaagaataagcagatccaaaagttc

SEQ ID NO: 1244888 - DNA, 25 bp, Homo sapien
aaagtcttttgatgccgttctagag

SEQ ID NO: 1244889 - DNA, 25 bp, Homo sapien
tccaaaagttcagagtctaacgcgg

SEQ ID NO: 1244890 - DNA, 25 bp, Homo sapien
taacgcgggaatgagatgaggaaac

SEQ ID NO: 1244891 - DNA, 25 bp, Homo sapien
caccaaagggtgctgccttggtaaa

SEQ ID NO: 1244892 - DNA, 25 bp, Homo sapien
tgcatgtaagtacaggtagtttgtg

SEQ ID NO: 1244893 - DNA, 25 bp, Homo sapien
aaagaacaccaaagggtgctgcctt

SEQ ID NO: 1244894 - DNA, 25 bp, Homo sapien
tgtctccaaaaaatcgacagcattc

SEQ ID NO: 1244895 - DNA, 25 bp, Homo sapien
aacacaaaagctttgttgcagcaga

SEQ ID NO: 1244896 - DNA, 25 bp, Homo sapien
tgcagcagaacaacacggagacatc

SEQ ID NO: 1244897 - DNA, 25 bp, Homo sapien
cctgagaacgatccatgagagcaag

SEQ ID NO: 1244898 - DNA, 25 bp, Homo sapien
cctcactcccatgaatctgtccctg

SEQ ID NO: 1244899 - DNA, 25 bp, Homo sapien
cctcaatgctccccacggaacaatc

SEQ ID NO: 1244900 - DNA, 25 bp, Homo sapien
gacaagcctggtagataatccctgg

SEQ ID NO: 1244901 - DNA, 25 bp, Homo sapien
tgaaagtacctcctgtgaccttgct

SEQ ID NO: 1244902 - DNA, 25 bp, Homo sapien
tatgcaagcgccaaagagctggaaa

SEQ ID NO: 1244903 - DNA, 25 bp, Homo sapien
tagagagggcacttagcaaagcttg

SEQ ID NO: 1244904 - DNA, 25 bp, Homo sapien
taggtcatcatcacaatgccagcga

SEQ ID NO: 1244905 - DNA, 25 bp, Homo sapien
ggcagacatcgatgctgaggccacc

SEQ ID NO: 1244906 - DNA, 25 bp, Homo sapien
ctgtggaagccatcagcgtaggtca

SEQ ID NO: 1244907 - DNA, 25 bp, Homo sapien
caccagtgcgatgccgatgacggag

SEQ ID NO: 1244908 - DNA, 25 bp, Homo sapien
aagtagaggataataggaatgcagg

SEQ ID NO: 1244909 - DNA, 25 bp, Homo sapien
agatggacaaaaataaggcggcttc

SEQ ID NO: 1244910 - DNA, 25 bp, Homo sapien
ggacaaaaataaggcggcttctcca

SEQ ID NO: 1244911 - DNA, 25 bp, Homo sapien
ccactttggtaaagtagaggataat

SEQ ID NO: 1244912 - DNA, 25 bp, Homo sapien
atccacaaaggtttccccatggaat

SEQ ID NO: 1244913 - DNA, 25 bp, Homo sapien
cccatggaatgtcatcaaaagagct

SEQ ID NO: 1244914 - DNA, 25 bp, Homo sapien
tcaataaaagaactgaaaatccaca

SEQ ID NO: 1244915 - DNA, 25 bp, Homo sapien
tccccatggaatgtcatcaaaagag

SEQ ID NO: 1244916 - DNA, 25 bp, Homo sapien
gtgggatatgtaacggcaattccaa

SEQ ID NO: 1244917 - DNA, 25 bp, Homo sapien
tgctgaggacgattccaagagacat

SEQ ID NO: 1244918 - DNA, 25 bp, Homo sapien
ctgcattcacaggtatgctgaggac

SEQ ID NO: 1244919 - DNA, 25 bp, Homo sapien
gatatgtaacggcaattccaaaatt

SEQ ID NO: 1244920 - DNA, 25 bp, Homo sapien
caggattctcctcagtatgattttg

SEQ ID NO: 1244921 - DNA, 25 bp, Homo sapien
ggattctcctcagtatgattttgtt

SEQ ID NO: 1244922 - DNA, 25 bp, Homo sapien
gattctcctcagtatgattttgttc

SEQ ID NO: 1244923 - DNA, 25 bp, Homo sapien
aggattctcctcagtatgattttgt

SEQ ID NO: 1244924 - DNA, 25 bp, Homo sapien
atgatgatggcgatgacccggaccc

SEQ ID NO: 1244925 - DNA, 25 bp, Homo sapien
tgacccggaccccattgaagacgat

SEQ ID NO: 1244926 - DNA, 25 bp, Homo sapien
ggcgatgacccggaccccattgaag

SEQ ID NO: 1244927 - DNA, 25 bp, Homo sapien
tgatggcgatgacccggaccccatt

SEQ ID NO: 1244928 - DNA, 25 bp, Homo sapien
tttgagtcgggtgagcagcttgatc

SEQ ID NO: 1244929 - DNA, 25 bp, Homo sapien
tgagcagcttgatcaaccagacatc

SEQ ID NO: 1244930 - DNA, 25 bp, Homo sapien
agctcaggtcggcagcgccctctgc

SEQ ID NO: 1244931 - DNA, 25 bp, Homo sapien
ctcaggtcggcagcgccctctgcag

SEQ ID NO: 1244932 - DNA, 25 bp, Homo sapien
tgagctcaggtcggcagcgccctct

SEQ ID NO: 1244933 - DNA, 25 bp, Homo sapien
ctgagctcaggtcggcagcgccctc

SEQ ID NO: 1244934 - DNA, 25 bp, Homo sapien
tatgggtattgtacaccgcgggcca

SEQ ID NO: 1244935 - DNA, 25 bp, Homo sapien
tctaaattataagacggcgccagtg

SEQ ID NO: 1244936 - DNA, 25 bp, Homo sapien
tcattaccaccgagttctagaggag

SEQ ID NO: 1244937 - DNA, 25 bp, Homo sapien
gccatccaaaacgatctacgcaggg

SEQ ID NO: 1244938 - DNA, 25 bp, Homo sapien
gggcaagtgcaattgaggaaaagcc

SEQ ID NO: 1244939 - DNA, 25 bp, Homo sapien
tgaggactgcttcaggactggtgca

SEQ ID NO: 1244940 - DNA, 25 bp, Homo sapien
gaaaagccagaatgtggtgaggact

SEQ ID NO: 1244941 - DNA, 25 bp, Homo sapien
gaaagtaacagaatggccatggaga

SEQ ID NO: 1244942 - DNA, 25 bp, Homo sapien
gccccgctgttccatccgcaggaac

SEQ ID NO: 1244943 - DNA, 25 bp, Homo sapien
ttaattgctacccagacccgcctct

SEQ ID NO: 1244944 - DNA, 25 bp, Homo sapien
ttgggtccctcctaggtttgccgca

SEQ ID NO: 1244945 - DNA, 25 bp, Homo sapien
cccgcctctagagggcagacaattc

SEQ ID NO: 1244946 - DNA, 25 bp, Homo sapien
ccctctagctccaaacgatcacatt

SEQ ID NO: 1244947 - DNA, 25 bp, Homo sapien
ttcatgccctctagctccaaacgat

SEQ ID NO: 1244948 - DNA, 25 bp, Homo sapien
gccctctagctccaaacgatcacat

SEQ ID NO: 1244949 - DNA, 25 bp, Homo sapien
tcacttcatgccctctagctccaaa

SEQ ID NO: 1244950 - DNA, 25 bp, Homo sapien
agtcttcgcagattggatctgtgcc

SEQ ID NO: 1244951 - DNA, 25 bp, Homo sapien
gagagagaacaatacctcttatagt

SEQ ID NO: 1244952 - DNA, 25 bp, Homo sapien
cagagctcagccctaggttgaagtt

SEQ ID NO: 1244953 - DNA, 25 bp, Homo sapien
tagctaagcttgcactgagctcaga

SEQ ID NO: 1244954 - DNA, 25 bp, Homo sapien
ttactggctaggaagtacttgtttc

SEQ ID NO: 1244955 - DNA, 25 bp, Homo sapien
tactggctaggaagtacttgtttct

SEQ ID NO: 1244956 - DNA, 25 bp, Homo sapien
aaaaaagaggaagcacttgtttctg

SEQ ID NO: 1244957 - DNA, 25 bp, Homo sapien
gcacttgtttctgccgttttgttgt

SEQ ID NO: 1244958 - DNA, 25 bp, Homo sapien
tactggtaccagtgaactttctgga

SEQ ID NO: 1244959 - DNA, 25 bp, Homo sapien
gggaaaaacctcaatggatagcact

SEQ ID NO: 1244960 - DNA, 25 bp, Homo sapien
gctgaaataacttgctaagaccctt

SEQ ID NO: 1244961 - DNA, 25 bp, Homo sapien
tcagagtctcgaggctaaagggaaa

SEQ ID NO: 1244962 - DNA, 25 bp, Homo sapien
ctacgaacagctgatgcagctgtac

SEQ ID NO: 1244963 - DNA, 25 bp, Homo sapien
catgtcctacgaacagctgatgcag

SEQ ID NO: 1244964 - DNA, 25 bp, Homo sapien
ggacatgtcctacgaacagctgatg

SEQ ID NO: 1244965 - DNA, 25 bp, Homo sapien
tgtcctacgaacagctgatgcagct

SEQ ID NO: 1244966 - DNA, 25 bp, Homo sapien
tccagacaaggttctaatgtagagg

SEQ ID NO: 1244967 - DNA, 25 bp, Homo sapien
tgtagagggtactcaatgccatgct

SEQ ID NO: 1244968 - DNA, 25 bp, Homo sapien
cccctgcaggtttgatagacatctt

SEQ ID NO: 1244969 - DNA, 25 bp, Homo sapien
acatgagggcattcagtggtcagca

SEQ ID NO: 1244970 - DNA, 25 bp, Homo sapien
gggaaacacctaagacacagctgcc

SEQ ID NO: 1244971 - DNA, 25 bp, Homo sapien
gagccttgcattggctgacccctgg

SEQ ID NO: 1244972 - DNA, 25 bp, Homo sapien
aaactaatcctgagctgtgggccga

SEQ ID NO: 1244973 - DNA, 25 bp, Homo sapien
taccttgtcgctacatatgggaaac

SEQ ID NO: 1244974 - DNA, 25 bp, Homo sapien
tgttccctggtccttcagtcaggcc

SEQ ID NO: 1244975 - DNA, 25 bp, Homo sapien
tattaggagtctctagtctctgcaa

SEQ ID NO: 1244976 - DNA, 25 bp, Homo sapien
caagtgccactttcatcacgttgct

SEQ ID NO: 1244977 - DNA, 25 bp, Homo sapien
gatgcactggcccatatcctttcag

SEQ ID NO: 1244978 - DNA, 25 bp, Homo sapien
tccttgtataacagatcctgattct

SEQ ID NO: 1244979 - DNA, 25 bp, Homo sapien
tgggtccttgtataacagatcctga

SEQ ID NO: 1244980 - DNA, 25 bp, Homo sapien
ggtccttgtataacagatcctgatt

SEQ ID NO: 1244981 - DNA, 25 bp, Homo sapien
ctgggtccttgtataacagatcctg

SEQ ID NO: 1244982 - DNA, 25 bp, Homo sapien
gacctgagtgttcgctttataatta

SEQ ID NO: 1244983 - DNA, 25 bp, Homo sapien
cacaaatgttcctctctagggtaag

SEQ ID NO: 1244984 - DNA, 25 bp, Homo sapien
ggtgaattgccatactgagacaacc

SEQ ID NO: 1244985 - DNA, 25 bp, Homo sapien
tcaaaaacgggcagaactctactat

SEQ ID NO: 1244986 - DNA, 25 bp, Homo sapien
tacgtggctccaccagtaagttcct

SEQ ID NO: 1244987 - DNA, 25 bp, Homo sapien
cataggagagccaattgtgcacacc

SEQ ID NO: 1244988 - DNA, 25 bp, Homo sapien
gaagcagcacttacagggacattta

SEQ ID NO: 1244989 - DNA, 25 bp, Homo sapien
gaaaagtcttgagctgaaaatccct

SEQ ID NO: 1244990 - DNA, 25 bp, Homo sapien
ctcagtgcagtttgatccattccaa

SEQ ID NO: 1244991 - DNA, 25 bp, Homo sapien
tatatgcagacttttccgggtggcg

SEQ ID NO: 1244992 - DNA, 25 bp, Homo sapien
ggtcagtcatctggcaccccgttct

SEQ ID NO: 1244993 - DNA, 25 bp, Homo sapien
tctcttaatagatcccatctgctcc

SEQ ID NO: 1244994 - DNA, 25 bp, Homo sapien
tatgtgagtgaatatcttagaaaca

SEQ ID NO: 1244995 - DNA, 25 bp, Homo sapien
cagaaagaggcggtgacgtcccaga

SEQ ID NO: 1244996 - DNA, 25 bp, Homo sapien
ggcgcacaacaccatcgcttcttgg

SEQ ID NO: 1244997 - DNA, 25 bp, Homo sapien
agagagttgcttcaaatgttttgag

SEQ ID NO: 1244998 - DNA, 25 bp, Homo sapien
tgtcgacgggaggaaactgtcacgc

SEQ ID NO: 1244999 - DNA, 25 bp, Homo sapien
cgcaaaaagcaactcacgcggcgaa

SEQ ID NO: 1245000 - DNA, 25 bp, Homo sapien
agctctagaagcgtagacctcccca

SEQ ID NO: 1245001 - DNA, 25 bp, Homo sapien
acgtccggcttcctttcgatgtcga

SEQ ID NO: 1245002 - DNA, 25 bp, Homo sapien
ccgggcccatagtccacgcgcgccc

SEQ ID NO: 1245003 - DNA, 25 bp, Homo sapien
gagtgccaccccgttttgcacaaga

SEQ ID NO: 1245004 - DNA, 25 bp, Homo sapien
ttgcacaagaggaacccgcggctcg

SEQ ID NO: 1245005 - DNA, 25 bp, Homo sapien
ttttgcacaagaggaacccgcggct

SEQ ID NO: 1245006 - DNA, 25 bp, Homo sapien
gtgtgtgggggccacaatcaccaag

SEQ ID NO: 1245007 - DNA, 25 bp, Homo sapien
ctaagcgctgtagaaacaggtgtgt

SEQ ID NO: 1245008 - DNA, 25 bp, Homo sapien
agcgctgtagaaacaggtgtgtggg

SEQ ID NO: 1245009 - DNA, 25 bp, Homo sapien
gtgtgggggccacaatcaccaagca

SEQ ID NO: 1245010 - DNA, 25 bp, Homo sapien
cccagtcgcttagggcagctcattt

SEQ ID NO: 1245011 - DNA, 25 bp, Homo sapien
cagaaagcccggctgagaactgtgg

SEQ ID NO: 1245012 - DNA, 25 bp, Homo sapien
gaactgtggttctgtcccagtcgct

SEQ ID NO: 1245013 - DNA, 25 bp, Homo sapien
ggattttgatgaggcaactgaaccc

SEQ ID NO: 1245014 - DNA, 25 bp, Homo sapien
taatatttgagattaacaatgaact

SEQ ID NO: 1245015 - DNA, 25 bp, Homo sapien
tatttgagattaacaatgaactttg

SEQ ID NO: 1245016 - DNA, 25 bp, Homo sapien
aatatttgagattaacaatgaactt

SEQ ID NO: 1245017 - DNA, 25 bp, Homo sapien
ataatatttgagattaacaatgaac

SEQ ID NO: 1245018 - DNA, 25 bp, Homo sapien
cacttccagtactcatcccgggccc

SEQ ID NO: 1245019 - DNA, 25 bp, Homo sapien
ctctaagttctcatctaaacacttc

SEQ ID NO: 1245020 - DNA, 25 bp, Homo sapien
gcagacctgtctttccttcatagat

SEQ ID NO: 1245021 - DNA, 25 bp, Homo sapien
aacacttccagtactcatcccgggc

SEQ ID NO: 1245022 - DNA, 25 bp, Homo sapien
gcttcttaacttcttgcattgagaa

SEQ ID NO: 1245023 - DNA, 25 bp, Homo sapien
gttggggacaacttgattcgaaaga

SEQ ID NO: 1245024 - DNA, 25 bp, Homo sapien
gacaacttgattcgaaagagcttct

SEQ ID NO: 1245025 - DNA, 25 bp, Homo sapien
gattcgaaagagcttcttaacttct

SEQ ID NO: 1245026 - DNA, 25 bp, Homo sapien
tagcttcatgctgcctgcatctgga

SEQ ID NO: 1245027 - DNA, 25 bp, Homo sapien
tggcagcaagactggttacagagag

SEQ ID NO: 1245028 - DNA, 25 bp, Homo sapien
tcagctctgcggttctacgggtgag

SEQ ID NO: 1245029 - DNA, 25 bp, Homo sapien
tttataggtacacaccccatgtggg

SEQ ID NO: 1245030 - DNA, 25 bp, Homo sapien
cacatatgcgagtggtctctaaacc

SEQ ID NO: 1245031 - DNA, 25 bp, Homo sapien
cctaagttaggaacaataggagcct

SEQ ID NO: 1245032 - DNA, 25 bp, Homo sapien
tgctagaatgataggcctgatccct

SEQ ID NO: 1245033 - DNA, 25 bp, Homo sapien
tctaaaccactgaataagacccagg

SEQ ID NO: 1245034 - DNA, 25 bp, Homo sapien
ccaggctgccagagtataatctttc

SEQ ID NO: 1245035 - DNA, 25 bp, Homo sapien
tgaacgcatcacatctacctagaca

SEQ ID NO: 1245036 - DNA, 25 bp, Homo sapien
caactccatttagaggtcctactga

SEQ ID NO: 1245037 - DNA, 25 bp, Homo sapien
tgttgcagtcccaacttgtccagaa

SEQ ID NO: 1245038 - DNA, 25 bp, Homo sapien
ttctgaaggctcaaattgtcctgct

SEQ ID NO: 1245039 - DNA, 25 bp, Homo sapien
ggctcaaattgtcctgcttcaaatt

SEQ ID NO: 1245040 - DNA, 25 bp, Homo sapien
aaggctcaaattgtcctgcttcaaa

SEQ ID NO: 1245041 - DNA, 25 bp, Homo sapien
tgaaggctcaaattgtcctgcttca

SEQ ID NO: 1245042 - DNA, 25 bp, Homo sapien
gaatactttcaatctttatgaacag

SEQ ID NO: 1245043 - DNA, 25 bp, Homo sapien
caaactattactgttccatagtcag

SEQ ID NO: 1245044 - DNA, 25 bp, Homo sapien
tatcaagtgtcgtatatagggaaca

SEQ ID NO: 1245045 - DNA, 25 bp, Homo sapien
cagtggagctttttcaatgtccaga

SEQ ID NO: 1245046 - DNA, 25 bp, Homo sapien
cacttactagacaacagtataaaca

SEQ ID NO: 1245047 - DNA, 25 bp, Homo sapien
tcatctcaatgacttacaataccta

SEQ ID NO: 1245048 - DNA, 25 bp, Homo sapien
tctagttctcagcatagaggcctcc

SEQ ID NO: 1245049 - DNA, 25 bp, Homo sapien
ctccatttaatctgatgtagtctgc

SEQ ID NO: 1245050 - DNA, 25 bp, Homo sapien
cctgaatgtccatgtgagtggagcc

SEQ ID NO: 1245051 - DNA, 25 bp, Homo sapien
gcacggagataccaagccatgatgt

SEQ ID NO: 1245052 - DNA, 25 bp, Homo sapien
aattcctcaacagggcattatccgc

SEQ ID NO: 1245053 - DNA, 25 bp, Homo sapien
tgatctgggagtacaccaggcagca

SEQ ID NO: 1245054 - DNA, 25 bp, Homo sapien
tcagaatcagagcacgaagtgttcc

SEQ ID NO: 1245055 - DNA, 25 bp, Homo sapien
tgagcggacatgagaattcacgagc

SEQ ID NO: 1245056 - DNA, 25 bp, Homo sapien
tgagtgtgggctccataggaagcac

SEQ ID NO: 1245057 - DNA, 25 bp, Homo sapien
tgtatacctagctccaagatcttgg

SEQ ID NO: 1245058 - DNA, 25 bp, Homo sapien
tattctgagtaaaggagcacactga

SEQ ID NO: 1245059 - DNA, 25 bp, Homo sapien
cactgagtggaacaagtagaaagac

SEQ ID NO: 1245060 - DNA, 25 bp, Homo sapien
ttctgaatgcgtgaatgatccaccc

SEQ ID NO: 1245061 - DNA, 25 bp, Homo sapien
cttggtgaggtcctaagggcagctt

SEQ ID NO: 1245062 - DNA, 25 bp, Homo sapien
tggattcaagtgattctcctgcctc

SEQ ID NO: 1245063 - DNA, 25 bp, Homo sapien
tccaggctggagtgcgaaggtgcga

SEQ ID NO: 1245064 - DNA, 25 bp, Homo sapien
caccctccttggcctcccagagtgc

SEQ ID NO: 1245065 - DNA, 25 bp, Homo sapien
cattgcaacctctgcctcctggatt

SEQ ID NO: 1245066 - DNA, 25 bp, Homo sapien
tatatatagatgcaaggatgaggag

SEQ ID NO: 1245067 - DNA, 25 bp, Homo sapien
gggactacagccacgacactggcta

SEQ ID NO: 1245068 - DNA, 25 bp, Homo sapien
cgcacccgtccaggacttttgagtt

SEQ ID NO: 1245069 - DNA, 25 bp, Homo sapien
aatccaaatgtgcaccaaaccttgt

SEQ ID NO: 1245070 - DNA, 25 bp, Homo sapien
tagaattaagcgtcatagaggccat

SEQ ID NO: 1245071 - DNA, 25 bp, Homo sapien
caaatcactgcggttgggaacgttc

SEQ ID NO: 1245072 - DNA, 25 bp, Homo sapien
taatggagcccgtgcaagattttac

SEQ ID NO: 1245073 - DNA, 25 bp, Homo sapien
aacccagagccggtggaatacagca

SEQ ID NO: 1245074 - DNA, 25 bp, Homo sapien
gtccggccgcgtagaggagaagctg

SEQ ID NO: 1245075 - DNA, 25 bp, Homo sapien
tgccgtggaagtgctagcagccgtc

SEQ ID NO: 1245076 - DNA, 25 bp, Homo sapien
ggccgagaagctgttgcccgagccc

SEQ ID NO: 1245077 - DNA, 25 bp, Homo sapien
tgccagtgctggtccaatgtggcgg

SEQ ID NO: 1245078 - DNA, 25 bp, Homo sapien
tgtctcaaattgagccaggaaccaa

SEQ ID NO: 1245079 - DNA, 25 bp, Homo sapien
gaaaaccctatgtcactgatctagt

SEQ ID NO: 1245080 - DNA, 25 bp, Homo sapien
catgcatgccgaggtgaggttttct

SEQ ID NO: 1245081 - DNA, 25 bp, Homo sapien
cctgtgtaatgtcagataaccttaa

SEQ ID NO: 1245082 - DNA, 25 bp, Homo sapien
gatgtgcggccttctatggcatcac

SEQ ID NO: 1245083 - DNA, 25 bp, Homo sapien
ctccttctttattgcaaatgcagct

SEQ ID NO: 1245084 - DNA, 25 bp, Homo sapien
gacttctccccgcagtgatgtgcgg

SEQ ID NO: 1245085 - DNA, 25 bp, Homo sapien
tcacactggcgagaactccctgggc

SEQ ID NO: 1245086 - DNA, 25 bp, Homo sapien
gcaccgttggtggagtcttgtccgt

SEQ ID NO: 1245087 - DNA, 25 bp, Homo sapien
ggagtcttgtccgttggtgcttttg

SEQ ID NO: 1245088 - DNA, 25 bp, Homo sapien
gggactcccgagaccgctgcttcct

SEQ ID NO: 1245089 - DNA, 25 bp, Homo sapien
ttgtccgttggtgcttttgtggcca

SEQ ID NO: 1245090 - DNA, 25 bp, Homo sapien
cttttcccggcatctttattcgctg

SEQ ID NO: 1245091 - DNA, 25 bp, Homo sapien
tcgtcttggcatattttacattgaa

SEQ ID NO: 1245092 - DNA, 25 bp, Homo sapien
caaccgttgcccatgtgaaatctct

SEQ ID NO: 1245093 - DNA, 25 bp, Homo sapien
cgctgtcccagtagcttgagctcca

SEQ ID NO: 1245094 - DNA, 25 bp, Homo sapien
tggaaactcgtcagtgaggccagcc

SEQ ID NO: 1245095 - DNA, 25 bp, Homo sapien
caatgttgccatgcagtttggaaac

SEQ ID NO: 1245096 - DNA, 25 bp, Homo sapien
gaaaagcagctcatccaatgttgcc

SEQ ID NO: 1245097 - DNA, 25 bp, Homo sapien
tggctaagaactgctgccacgcaaa

SEQ ID NO: 1245098 - DNA, 25 bp, Homo sapien
tgacgtcccaccacgcatttgctgt

SEQ ID NO: 1245099 - DNA, 25 bp, Homo sapien
gtcccaccacgcatttgctgtgagg

SEQ ID NO: 1245100 - DNA, 25 bp, Homo sapien
ccaccacgcatttgctgtgaggaac

SEQ ID NO: 1245101 - DNA, 25 bp, Homo sapien
ctttgtcgtcgttctgacgtcccac

SEQ ID NO: 1245102 - DNA, 25 bp, Homo sapien
ggcactgggctgcaatcacagtctg

SEQ ID NO: 1245103 - DNA, 25 bp, Homo sapien
ccacagtttcgctggcactgggctg

SEQ ID NO: 1245104 - DNA, 25 bp, Homo sapien
ctggcccacagtttcgctggcactg

SEQ ID NO: 1245105 - DNA, 25 bp, Homo sapien
ctggcactgggctgcaatcacagtc

SEQ ID NO: 1245106 - DNA, 25 bp, Homo sapien
ccagcagccaggctcagccggccac

SEQ ID NO: 1245107 - DNA, 25 bp, Homo sapien
ctccagcagccaggctcagccggcc

SEQ ID NO: 1245108 - DNA, 25 bp, Homo sapien
tcctccagcagccaggctcagccgg

SEQ ID NO: 1245109 - DNA, 25 bp, Homo sapien
ctttcctccagcagccaggctcagc

SEQ ID NO: 1245110 - DNA, 25 bp, Homo sapien
tttctgaatggctgcatattagtat

SEQ ID NO: 1245111 - DNA, 25 bp, Homo sapien
gtcatcaaaaggactctttctgaat

SEQ ID NO: 1245112 - DNA, 25 bp, Homo sapien
tggtcatcaaaaggactctttctga

SEQ ID NO: 1245113 - DNA, 25 bp, Homo sapien
tctgaatggctgcatattagtatct

SEQ ID NO: 1245114 - DNA, 25 bp, Homo sapien
gaggcacagaacagtcccggatgag

SEQ ID NO: 1245115 - DNA, 25 bp, Homo sapien
gtttctgatctgtgaggcacagaac

SEQ ID NO: 1245116 - DNA, 25 bp, Homo sapien
tgatctgtgaggcacagaacagtcc

SEQ ID NO: 1245117 - DNA, 25 bp, Homo sapien
tctgtgaggcacagaacagtcccgg

SEQ ID NO: 1245118 - DNA, 25 bp, Homo sapien
tccttgatatgctcaaaagggggaa

SEQ ID NO: 1245119 - DNA, 25 bp, Homo sapien
ttgtcatgttgaaggggtattcttg

SEQ ID NO: 1245120 - DNA, 25 bp, Homo sapien
tttccttgatatgctcaaaaggggg

SEQ ID NO: 1245121 - DNA, 25 bp, Homo sapien
aggggtattcttggcgctgtgccat

SEQ ID NO: 1245122 - DNA, 25 bp, Homo sapien
ggcagttcctgagcatggaggccgg

SEQ ID NO: 1245123 - DNA, 25 bp, Homo sapien
tccagggcagagacgattcactggg

SEQ ID NO: 1245124 - DNA, 25 bp, Homo sapien
aggccggctgggcatccatcctcag

SEQ ID NO: 1245125 - DNA, 25 bp, Homo sapien
cttccagggcagagacgattcactg

SEQ ID NO: 1245126 - DNA, 25 bp, Homo sapien
tcttagtctccaggtttggttctcg

SEQ ID NO: 1245127 - DNA, 25 bp, Homo sapien
gacccattaatcagcaatttcaggc

SEQ ID NO: 1245128 - DNA, 25 bp, Homo sapien
ttcctcttcagttgagttaatgaaa

SEQ ID NO: 1245129 - DNA, 25 bp, Homo sapien
gcaatttcaggctcttagtctccag

SEQ ID NO: 1245130 - DNA, 25 bp, Homo sapien
tctgggagccagttgtctggtggtc

SEQ ID NO: 1245131 - DNA, 25 bp, Homo sapien
caatcgtctgggagccagttgtctg

SEQ ID NO: 1245132 - DNA, 25 bp, Homo sapien
aagcaatcgtctgggagccagttgt

SEQ ID NO: 1245133 - DNA, 25 bp, Homo sapien
ttaagcaatcgtctgggagccagtt

SEQ ID NO: 1245134 - DNA, 25 bp, Homo sapien
caagggtccccaagagtgacccgtg

SEQ ID NO: 1245135 - DNA, 25 bp, Homo sapien
gtctgtgctgggtccttggcttcca

SEQ ID NO: 1245136 - DNA, 25 bp, Homo sapien
tgtgggatgcagctagcctcttcca

SEQ ID NO: 1245137 - DNA, 25 bp, Homo sapien
gatgacaatcctgagtccttatggg

SEQ ID NO: 1245138 - DNA, 25 bp, Homo sapien
ttagtgctctggctagacaggatta

SEQ ID NO: 1245139 - DNA, 25 bp, Homo sapien
cagaataagcaggttccttagtgct

SEQ ID NO: 1245140 - DNA, 25 bp, Homo sapien
gctagacaggattaacgcttgtttc

SEQ ID NO: 1245141 - DNA, 25 bp, Homo sapien
ggaccttgctgaggcattcgcagaa

SEQ ID NO: 1245142 - DNA, 25 bp, Homo sapien
aatcagatgaataatgcctggtcgt

SEQ ID NO: 1245143 - DNA, 25 bp, Homo sapien
aatgcctggtcgtatttggtggttg

SEQ ID NO: 1245144 - DNA, 25 bp, Homo sapien
gtggttgtgagattccgatgagaaa

SEQ ID NO: 1245145 - DNA, 25 bp, Homo sapien
gagattccgatgagaaattatattt

SEQ ID NO: 1245146 - DNA, 25 bp, Homo sapien
tgtaatcagcacgaatactaaattc

SEQ ID NO: 1245147 - DNA, 25 bp, Homo sapien
ggcatccaccgagtcttgccgtaga

SEQ ID NO: 1245148 - DNA, 25 bp, Homo sapien
gaaattccacctgtcctgtaatcag

SEQ ID NO: 1245149 - DNA, 25 bp, Homo sapien
ccaccgagtcttgccgtagaaattc

SEQ ID NO: 1245150 - DNA, 25 bp, Homo sapien
caagaacaaggactacagagctagg

SEQ ID NO: 1245151 - DNA, 25 bp, Homo sapien
cactggatttgcttagtgtatgtct

SEQ ID NO: 1245152 - DNA, 25 bp, Homo sapien
atgagcccggcgatccagatcacac

SEQ ID NO: 1245153 - DNA, 25 bp, Homo sapien
gctgagagcatgagcccggcgatcc

SEQ ID NO: 1245154 - DNA, 25 bp, Homo sapien
gagagtaagctcacatctccccgca

SEQ ID NO: 1245155 - DNA, 25 bp, Homo sapien
taaaggcaagctctccagcaattct

SEQ ID NO: 1245156 - DNA, 25 bp, Homo sapien
gcaccaagcatcaattaaaggcaag

SEQ ID NO: 1245157 - DNA, 25 bp, Homo sapien
ggctgcgggccagataccattcttt

SEQ ID NO: 1245158 - DNA, 25 bp, Homo sapien
ggtccaggtcgggctgagcagagct

SEQ ID NO: 1245159 - DNA, 25 bp, Homo sapien
ccaggttgccgagggtccaggtcgg

SEQ ID NO: 1245160 - DNA, 25 bp, Homo sapien
gaacatcagacaggaaacggaccag

SEQ ID NO: 1245161 - DNA, 25 bp, Homo sapien
gacaggaaacggaccaggttgccga

SEQ ID NO: 1245162 - DNA, 25 bp, Homo sapien
tagtcaatcatgaacccaagcataa

SEQ ID NO: 1245163 - DNA, 25 bp, Homo sapien
cagcaaaggttagtcaatcatgaac

SEQ ID NO: 1245164 - DNA, 25 bp, Homo sapien
catgaacccaagcataataatatgt

SEQ ID NO: 1245165 - DNA, 25 bp, Homo sapien
ggttagtcaatcatgaacccaagca

SEQ ID NO: 1245166 - DNA, 25 bp, Homo sapien
cctccaaacataggtaaggattatc

SEQ ID NO: 1245167 - DNA, 25 bp, Homo sapien
cattatgtcctaatactgtcctcca

SEQ ID NO: 1245168 - DNA, 25 bp, Homo sapien
tgtgactccaatcattatgtcctaa

SEQ ID NO: 1245169 - DNA, 25 bp, Homo sapien
tgtgagacctgattatgaagcagac

SEQ ID NO: 1245170 - DNA, 25 bp, Homo sapien
ttttgaaagattctgctaagtggac

SEQ ID NO: 1245171 - DNA, 25 bp, Homo sapien
tcttgggtagtcttaggagcatgtt

SEQ ID NO: 1245172 - DNA, 25 bp, Homo sapien
gctaagtggacatagaacagtgtca

SEQ ID NO: 1245173 - DNA, 25 bp, Homo sapien
tagtcttaggagcatgttagcagca

SEQ ID NO: 1245174 - DNA, 25 bp, Homo sapien
tcagccaggacagagggtccgcaca

SEQ ID NO: 1245175 - DNA, 25 bp, Homo sapien
aggacagagggtccgcacagacaga

SEQ ID NO: 1245176 - DNA, 25 bp, Homo sapien
agccaggacagagggtccgcacaga

SEQ ID NO: 1245177 - DNA, 25 bp, Homo sapien
ccaggacagagggtccgcacagaca

SEQ ID NO: 1245178 - DNA, 25 bp, Homo sapien
gaaggtgatactttttctatatatg

SEQ ID NO: 1245179 - DNA, 25 bp, Homo sapien
ttactatatacctttccttggccac

SEQ ID NO: 1245180 - DNA, 25 bp, Homo sapien
catgtcaactgaagtgagtgtaatc

SEQ ID NO: 1245181 - DNA, 25 bp, Homo sapien
ctatatatgatgaaactcatgtcaa

SEQ ID NO: 1245182 - DNA, 25 bp, Homo sapien
ccagctgtggaaagggcaacctgtg

SEQ ID NO: 1245183 - DNA, 25 bp, Homo sapien
tctgcacgagtctgactggcctttg

SEQ ID NO: 1245184 - DNA, 25 bp, Homo sapien
tgttgtacctgatgacagtgcagag

SEQ ID NO: 1245185 - DNA, 25 bp, Homo sapien
ctttgtggacggctcgtagctggaa

SEQ ID NO: 1245186 - DNA, 25 bp, Homo sapien
tatgaaccaaagaaggctgggcccc

SEQ ID NO: 1245187 - DNA, 25 bp, Homo sapien
cccaaatgtgggtggaggaaacctg

SEQ ID NO: 1245188 - DNA, 25 bp, Homo sapien
tttatataatagacaggccccacct

SEQ ID NO: 1245189 - DNA, 25 bp, Homo sapien
tacaatgacagtaacagccgcgtgg

SEQ ID NO: 1245190 - DNA, 25 bp, Homo sapien
acaccgcctgaagcggcccagaatg

SEQ ID NO: 1245191 - DNA, 25 bp, Homo sapien
aaccggaccacaccgcctgaagcgg

SEQ ID NO: 1245192 - DNA, 25 bp, Homo sapien
ggaccacaccgcctgaagcggccca

SEQ ID NO: 1245193 - DNA, 25 bp, Homo sapien
tcattccaaccggaccacaccgcct

SEQ ID NO: 1245194 - DNA, 25 bp, Homo sapien
cagaaccagaaggtgaagtcgggcc

SEQ ID NO: 1245195 - DNA, 25 bp, Homo sapien
ccctaagatcaacggagaggcccag

SEQ ID NO: 1245196 - DNA, 25 bp, Homo sapien
catgttgagtgcaaacgagggtact

SEQ ID NO: 1245197 - DNA, 25 bp, Homo sapien
tgcatgtgcacctgaaactcgtata

SEQ ID NO: 1245198 - DNA, 25 bp, Homo sapien
tcctgatctgcctgaggcggaacca

SEQ ID NO: 1245199 - DNA, 25 bp, Homo sapien
gcttctccaagctagaggagccgcc

SEQ ID NO: 1245200 - DNA, 25 bp, Homo sapien
agttcgtcatcgagacggcgcggca

SEQ ID NO: 1245201 - DNA, 25 bp, Homo sapien
ccagtgcttggtggcaacgtgttca

SEQ ID NO: 1245202 - DNA, 25 bp, Homo sapien
ccggcggcagtcgtgctacctgtgt

SEQ ID NO: 1245203 - DNA, 25 bp, Homo sapien
cccggcggcagtcgtgctacctgtg

SEQ ID NO: 1245204 - DNA, 25 bp, Homo sapien
ggcggcagtcgtgctacctgtgtga

SEQ ID NO: 1245205 - DNA, 25 bp, Homo sapien
gcggcagtcgtgctacctgtgtgac

SEQ ID NO: 1245206 - DNA, 25 bp, Homo sapien
gaatattcacagtctccctagttag

SEQ ID NO: 1245207 - DNA, 25 bp, Homo sapien
gcaccagtgacggatttcatgctat

SEQ ID NO: 1245208 - DNA, 25 bp, Homo sapien
cgcatacctacataaggcagccggg

SEQ ID NO: 1245209 - DNA, 25 bp, Homo sapien
gaactgtgaaccacgctagacctaa

SEQ ID NO: 1245210 - DNA, 25 bp, Homo sapien
actgagagcctcttgaacaatctga

SEQ ID NO: 1245211 - DNA, 25 bp, Homo sapien
cagtatatagcctgcaaagaagcca

SEQ ID NO: 1245212 - DNA, 25 bp, Homo sapien
aaagcaagtttccatatcctgccga

SEQ ID NO: 1245213 - DNA, 25 bp, Homo sapien
taagttatcccataatcagacccgt

SEQ ID NO: 1245214 - DNA, 25 bp, Homo sapien
caattggttgacacaatggctagag

SEQ ID NO: 1245215 - DNA, 25 bp, Homo sapien
aattggttgacacaatggctagagt

SEQ ID NO: 1245216 - DNA, 25 bp, Homo sapien
ttacaattggttgacacaatggcta

SEQ ID NO: 1245217 - DNA, 25 bp, Homo sapien
tacaattggttgacacaatggctag

SEQ ID NO: 1245218 - DNA, 25 bp, Homo sapien
gttcttctgtatgtactgtcccatg

SEQ ID NO: 1245219 - DNA, 25 bp, Homo sapien
gctgtggtccaggtaaattggagac

SEQ ID NO: 1245220 - DNA, 25 bp, Homo sapien
cagaatcctggccttggtgatagga

SEQ ID NO: 1245221 - DNA, 25 bp, Homo sapien
cctgaggatacggtgctggctgtgg

SEQ ID NO: 1245222 - DNA, 25 bp, Homo sapien
tcatgtgctccaagaagaattgact

SEQ ID NO: 1245223 - DNA, 25 bp, Homo sapien
tgtgctccaagaagaattgactctt

SEQ ID NO: 1245224 - DNA, 25 bp, Homo sapien
gctccaagaagaattgactcttccc

SEQ ID NO: 1245225 - DNA, 25 bp, Homo sapien
caagaagaattgactcttcccccta

SEQ ID NO: 1245226 - DNA, 25 bp, Homo sapien
gggtcaggaatgtatcgcacaagga

SEQ ID NO: 1245227 - DNA, 25 bp, Homo sapien
gagctttctaaactgggtgaggagt

SEQ ID NO: 1245228 - DNA, 25 bp, Homo sapien
atgatgaaagcagtacaaagatcaa

SEQ ID NO: 1245229 - DNA, 25 bp, Homo sapien
taatgtgttgggagatgcattgtcc

SEQ ID NO: 1245230 - DNA, 25 bp, Homo sapien
tgagtccagccaaaaactagggttc

SEQ ID NO: 1245231 - DNA, 25 bp, Homo sapien
gaagacctgggctcatgacatgacc

SEQ ID NO: 1245232 - DNA, 25 bp, Homo sapien
gcaaggatctaaggacccaggtttc

SEQ ID NO: 1245233 - DNA, 25 bp, Homo sapien
tggttgtgcccaagaagaagacctg

SEQ ID NO: 1245234 - DNA, 25 bp, Homo sapien
gggtacaatttcacgcataacaggg

SEQ ID NO: 1245235 - DNA, 25 bp, Homo sapien
caggtaccgtgggttgggtcatcaa

SEQ ID NO: 1245236 - DNA, 25 bp, Homo sapien
gaacaaggcatgacgctgtcctgaa

SEQ ID NO: 1245237 - DNA, 25 bp, Homo sapien
tgtaagtcaggtgccattcatgccc

SEQ ID NO: 1245238 - DNA, 25 bp, Homo sapien
gcctgtgatccgggggtcccatgca

SEQ ID NO: 1245239 - DNA, 25 bp, Homo sapien
ggtctctgttatccatggtctgtgt

SEQ ID NO: 1245240 - DNA, 25 bp, Homo sapien
ctgtgttgcttcgttcacacgtggg

SEQ ID NO: 1245241 - DNA, 25 bp, Homo sapien
cctagagaggtctctgttatccatg

SEQ ID NO: 1245242 - DNA, 25 bp, Homo sapien
gaaacaagctctgtctatattaaag

SEQ ID NO: 1245243 - DNA, 25 bp, Homo sapien
tccgctggaaatgttttctccgtaa

SEQ ID NO: 1245244 - DNA, 25 bp, Homo sapien
tagaaactagcccttactgtgaagt

SEQ ID NO: 1245245 - DNA, 25 bp, Homo sapien
tatattaaagaactcctccgctgga

SEQ ID NO: 1245246 - DNA, 25 bp, Homo sapien
ttctcaagtggtctccggaggcacc

SEQ ID NO: 1245247 - DNA, 25 bp, Homo sapien
gctgaatcccggcaccaatgtaact

SEQ ID NO: 1245248 - DNA, 25 bp, Homo sapien
tacgatcctgggacctatgtagtca

SEQ ID NO: 1245249 - DNA, 25 bp, Homo sapien
acccgaggtggctggctacgatcct

SEQ ID NO: 1245250 - DNA, 25 bp, Homo sapien
tctgctagctgtgcataattactga

SEQ ID NO: 1245251 - DNA, 25 bp, Homo sapien
tagctgtgcataattactgagtggg

SEQ ID NO: 1245252 - DNA, 25 bp, Homo sapien
gctagctgtgcataattactgagtg

SEQ ID NO: 1245253 - DNA, 25 bp, Homo sapien
gctgtgcataattactgagtgggga

SEQ ID NO: 1245254 - DNA, 25 bp, Homo sapien
cctgggatttccgatttgctgcagg

SEQ ID NO: 1245255 - DNA, 25 bp, Homo sapien
ttccgatttgctgcagggtgtggga

SEQ ID NO: 1245256 - DNA, 25 bp, Homo sapien
cagggtgtgggagaacccagctccc

SEQ ID NO: 1245257 - DNA, 25 bp, Homo sapien
agggtgtgggagaacccagctccca

SEQ ID NO: 1245258 - DNA, 25 bp, Homo sapien
gggagatgcggccaaattcttcagg

SEQ ID NO: 1245259 - DNA, 25 bp, Homo sapien
caaaaagggagatgcggccaaattc

SEQ ID NO: 1245260 - DNA, 25 bp, Homo sapien
ccttcaaaaagggagatgcggccaa

SEQ ID NO: 1245261 - DNA, 25 bp, Homo sapien
gagatgcggccaaattcttcaggaa

SEQ ID NO: 1245262 - DNA, 25 bp, Homo sapien
gcctcttataggacagcttcatagc

SEQ ID NO: 1245263 - DNA, 25 bp, Homo sapien
tgtggtcctcttacacggaaagccc

SEQ ID NO: 1245264 - DNA, 25 bp, Homo sapien
tataggacagcttcatagcctgtga

SEQ ID NO: 1245265 - DNA, 25 bp, Homo sapien
catagcctgtgacttcagtgtggtc

SEQ ID NO: 1245266 - DNA, 25 bp, Homo sapien
gagaggaagcagtgaactgcccgca

SEQ ID NO: 1245267 - DNA, 25 bp, Homo sapien
tgagggttgagctggattccgaaaa

SEQ ID NO: 1245268 - DNA, 25 bp, Homo sapien
tactgaggcgttatttaccaaggtg

SEQ ID NO: 1245269 - DNA, 25 bp, Homo sapien
gataagctacaagtgcccacaggga

SEQ ID NO: 1245270 - DNA, 25 bp, Homo sapien
ccaccaccacggtggagatgtcgtt

SEQ ID NO: 1245271 - DNA, 25 bp, Homo sapien
cacggtggagatgtcgttatacagc

SEQ ID NO: 1245272 - DNA, 25 bp, Homo sapien
gagatgtcgttatacagctgtaaag

SEQ ID NO: 1245273 - DNA, 25 bp, Homo sapien
gtcgttatacagctgtaaagtgcct

SEQ ID NO: 1245274 - DNA, 25 bp, Homo sapien
cataccgtttggaatggagcatgcg

SEQ ID NO: 1245275 - DNA, 25 bp, Homo sapien
gcatgcgcagtgctcgccataccgt

SEQ ID NO: 1245276 - DNA, 25 bp, Homo sapien
tgtttagggaggtccacgcaggccc

SEQ ID NO: 1245277 - DNA, 25 bp, Homo sapien
tctggtggagtggtcatcaaacgtc

SEQ ID NO: 1245278 - DNA, 25 bp, Homo sapien
gcaaaattcgcttgaaagagaccca

SEQ ID NO: 1245279 - DNA, 25 bp, Homo sapien
tctttcagagacgagggtgatgtca

SEQ ID NO: 1245280 - DNA, 25 bp, Homo sapien
caagcaggcgcctgaaggtccaaga

SEQ ID NO: 1245281 - DNA, 25 bp, Homo sapien
gcagtggaagagagccgagttaccc

SEQ ID NO: 1245282 - DNA, 25 bp, Homo sapien
tccacctcctgaatcgctccggcat

SEQ ID NO: 1245283 - DNA, 25 bp, Homo sapien
ctcacctggttcatccacctcctga

SEQ ID NO: 1245284 - DNA, 25 bp, Homo sapien
taccttcctgtccactcgtcagagg

SEQ ID NO: 1245285 - DNA, 25 bp, Homo sapien
tcaattaacgaccacttcccactct

SEQ ID NO: 1245286 - DNA, 25 bp, Homo sapien
aatcagtgggaatcctcactcagct

SEQ ID NO: 1245287 - DNA, 25 bp, Homo sapien
gaatcagtgggaatcctcactcagc

SEQ ID NO: 1245288 - DNA, 25 bp, Homo sapien
tagaatcagtgggaatcctcactca

SEQ ID NO: 1245289 - DNA, 25 bp, Homo sapien
tcagtgggaatcctcactcagcttg

SEQ ID NO: 1245290 - DNA, 25 bp, Homo sapien
ggtttcggtgatgagcacagaaaat

SEQ ID NO: 1245291 - DNA, 25 bp, Homo sapien
ttgttaaggagaggtttcggtgatg

SEQ ID NO: 1245292 - DNA, 25 bp, Homo sapien
agaggtttcggtgatgagcacagaa

SEQ ID NO: 1245293 - DNA, 25 bp, Homo sapien
aaggagaggtttcggtgatgagcac

SEQ ID NO: 1245294 - DNA, 25 bp, Homo sapien
gttgtagtgattgggcttctcagag

SEQ ID NO: 1245295 - DNA, 25 bp, Homo sapien
ttagtggttgtagtgattgggcttc

SEQ ID NO: 1245296 - DNA, 25 bp, Homo sapien
agtggttgtagtgattgggcttctc

SEQ ID NO: 1245297 - DNA, 25 bp, Homo sapien
tggttgtagtgattgggcttctcag

SEQ ID NO: 1245298 - DNA, 25 bp, Homo sapien
cagatggagatgcaaccgtgaagca

SEQ ID NO: 1245299 - DNA, 25 bp, Homo sapien
tgaactagagccaatccatatgacc

SEQ ID NO: 1245300 - DNA, 25 bp, Homo sapien
gataccagtcacgtttgaactagag

SEQ ID NO: 1245301 - DNA, 25 bp, Homo sapien
aagcccaagggcaggtttgacgcca

SEQ ID NO: 1245302 - DNA, 25 bp, Homo sapien
gagccgcctgactttattgaatgca

SEQ ID NO: 1245303 - DNA, 25 bp, Homo sapien
tggaaatcctggagactgagcccca

SEQ ID NO: 1245304 - DNA, 25 bp, Homo sapien
tggtggtctcccaaaactagtgaag

SEQ ID NO: 1245305 - DNA, 25 bp, Homo sapien
cgtttactgactgggaccgcctgtg

SEQ ID NO: 1245306 - DNA, 25 bp, Homo sapien
ctttgattactggtaaagtgagcac

SEQ ID NO: 1245307 - DNA, 25 bp, Homo sapien
ttgctgataaaatacccggtgatta

SEQ ID NO: 1245308 - DNA, 25 bp, Homo sapien
tattgtaacttggtaatttatggct

SEQ ID NO: 1245309 - DNA, 25 bp, Homo sapien
gctattgagagtaaattttccagca

SEQ ID NO: 1245310 - DNA, 25 bp, Homo sapien
cagaggtcacaatctcatgccgcca

SEQ ID NO: 1245311 - DNA, 25 bp, Homo sapien
catttaccctgtgtccctatcttgg

SEQ ID NO: 1245312 - DNA, 25 bp, Homo sapien
tttactgagcacacccaggtatcca

SEQ ID NO: 1245313 - DNA, 25 bp, Homo sapien
catgccgccaattgccatagattcg

SEQ ID NO: 1245314 - DNA, 25 bp, Homo sapien
tcctctaactggaagcttcagccct

SEQ ID NO: 1245315 - DNA, 25 bp, Homo sapien
tcttatgagagacgccttcaaaaac

SEQ ID NO: 1245316 - DNA, 25 bp, Homo sapien
ctcaaatgccatcttatgagagacg

SEQ ID NO: 1245317 - DNA, 25 bp, Homo sapien
gccatcttatgagagacgccttcaa

SEQ ID NO: 1245318 - DNA, 25 bp, Homo sapien
tacctgtctacaccttgctcactcc

SEQ ID NO: 1245319 - DNA, 25 bp, Homo sapien
ccatcctggatattacttgaagaca

SEQ ID NO: 1245320 - DNA, 25 bp, Homo sapien
tgtgggatgattcctccccgtccac

SEQ ID NO: 1245321 - DNA, 25 bp, Homo sapien
ttttgcagtgcgtacaaggccctgt

SEQ ID NO: 1245322 - DNA, 25 bp, Homo sapien
gaatctttgattatgtctctaccac

SEQ ID NO: 1245323 - DNA, 25 bp, Homo sapien
taacaaaaccgtcatgtgcattctg

SEQ ID NO: 1245324 - DNA, 25 bp, Homo sapien
gattattaagtgtatccttttccaa

SEQ ID NO: 1245325 - DNA, 25 bp, Homo sapien
tcacaatttattgggagagtccgtt

SEQ ID NO: 1245326 - DNA, 25 bp, Homo sapien
caaaagcggtgagacagaataatcc

SEQ ID NO: 1245327 - DNA, 25 bp, Homo sapien
taggaagatggtcaaacccgcatgc

SEQ ID NO: 1245328 - DNA, 25 bp, Homo sapien
acagatgcagaaggcaacactggcc

SEQ ID NO: 1245329 - DNA, 25 bp, Homo sapien
caaacatttagatctgtggccgggt

SEQ ID NO: 1245330 - DNA, 25 bp, Homo sapien
cggttctgctgctgcgtctgtgttc

SEQ ID NO: 1245331 - DNA, 25 bp, Homo sapien
ctgctgcgtctgtgttccttcaacc

SEQ ID NO: 1245332 - DNA, 25 bp, Homo sapien
tcaacccattctccacacagggcca

SEQ ID NO: 1245333 - DNA, 25 bp, Homo sapien
ctgctgctgcgtctgtgttccttca

SEQ ID NO: 1245334 - DNA, 25 bp, Homo sapien
ttgttccctctgcctgaaagaggtc

SEQ ID NO: 1245335 - DNA, 25 bp, Homo sapien
ttttgttccctctgcctgaaagagg

SEQ ID NO: 1245336 - DNA, 25 bp, Homo sapien
tattttgttccctctgcctgaaaga

SEQ ID NO: 1245337 - DNA, 25 bp, Homo sapien
tgtggcttattttgttccctctgcc

SEQ ID NO: 1245338 - DNA, 25 bp, Homo sapien
tttacccagtaagctagaagttctc

SEQ ID NO: 1245339 - DNA, 25 bp, Homo sapien
gaagttctcacctggttcaaggatg

SEQ ID NO: 1245340 - DNA, 25 bp, Homo sapien
ccatggatggaattctgcaccacgt

SEQ ID NO: 1245341 - DNA, 25 bp, Homo sapien
cattgtcttctcaagggtgcagggt

SEQ ID NO: 1245342 - DNA, 25 bp, Homo sapien
gagctgtacaaagttcactgcaaag

SEQ ID NO: 1245343 - DNA, 25 bp, Homo sapien
ctgggagagctgtacaaagttcact

SEQ ID NO: 1245344 - DNA, 25 bp, Homo sapien
gagagctgtacaaagttcactgcaa

SEQ ID NO: 1245345 - DNA, 25 bp, Homo sapien
ggagagctgtacaaagttcactgca

SEQ ID NO: 1245346 - DNA, 25 bp, Homo sapien
ccatgccaatgtgaaggaccctaga

SEQ ID NO: 1245347 - DNA, 25 bp, Homo sapien
tgtttcttgtagacgccacacgcct

SEQ ID NO: 1245348 - DNA, 25 bp, Homo sapien
tggtgagcatttaggccagacggcc

SEQ ID NO: 1245349 - DNA, 25 bp, Homo sapien
tccattatgttttggtggccccaca

SEQ ID NO: 1245350 - DNA, 25 bp, Homo sapien
cacacaccgtaacaaagggcaggct

SEQ ID NO: 1245351 - DNA, 25 bp, Homo sapien
taacgtcgttgcctgagaagcactg

SEQ ID NO: 1245352 - DNA, 25 bp, Homo sapien
ttgttgtacggccacatcacggagc

SEQ ID NO: 1245353 - DNA, 25 bp, Homo sapien
tcagtaatctccaaccaacggtgtc

SEQ ID NO: 1245354 - DNA, 25 bp, Homo sapien
gcttatttgcagaaaccagtaaaac

SEQ ID NO: 1245355 - DNA, 25 bp, Homo sapien
aaacttgcatttggttactacttgc

SEQ ID NO: 1245356 - DNA, 25 bp, Homo sapien
tggtctggcttatttgcagaaacca

SEQ ID NO: 1245357 - DNA, 25 bp, Homo sapien
tgggcatagacctagactccacggc

SEQ ID NO: 1245358 - DNA, 25 bp, Homo sapien
tcctaagggacaatcaagggcttcc

SEQ ID NO: 1245359 - DNA, 25 bp, Homo sapien
caaaaatactgaccctgacaacgct

SEQ ID NO: 1245360 - DNA, 25 bp, Homo sapien
aacgcttcagatcaggtggctccga

SEQ ID NO: 1245361 - DNA, 25 bp, Homo sapien
gagtgacagatgttagcaggagacc

SEQ ID NO: 1245362 - DNA, 25 bp, Homo sapien
cttccgtggctgtccacataatttc

SEQ ID NO: 1245363 - DNA, 25 bp, Homo sapien
tccgtggctgtccacataatttcct

SEQ ID NO: 1245364 - DNA, 25 bp, Homo sapien
gtggtcatttcttccgtggctgtcc

SEQ ID NO: 1245365 - DNA, 25 bp, Homo sapien
cgtggctgtccacataatttcctcc

SEQ ID NO: 1245366 - DNA, 25 bp, Homo sapien
tggcggcaatgcttgtttggcaccc

SEQ ID NO: 1245367 - DNA, 25 bp, Homo sapien
tgaaatgaggcctctggcgggcagc

SEQ ID NO: 1245368 - DNA, 25 bp, Homo sapien
ggcacccttatatggtttcccagaa

SEQ ID NO: 1245369 - DNA, 25 bp, Homo sapien
ctgtcagttcctaatgttggcggca

SEQ ID NO: 1245370 - DNA, 25 bp, Homo sapien
gagacttgcctttgatcacgacttg

SEQ ID NO: 1245371 - DNA, 25 bp, Homo sapien
tgggacacaatcatgtacactctgg

SEQ ID NO: 1245372 - DNA, 25 bp, Homo sapien
taacctttgcttcggaaacctgcca

SEQ ID NO: 1245373 - DNA, 25 bp, Homo sapien
gaaaaggcctttccgagaatcttgc

SEQ ID NO: 1245374 - DNA, 25 bp, Homo sapien
taagccctcagtccagtagtgcaga

SEQ ID NO: 1245375 - DNA, 25 bp, Homo sapien
cattagccagatgcagcggcagggt

SEQ ID NO: 1245376 - DNA, 25 bp, Homo sapien
tgcctggttctacgaagacactggg

SEQ ID NO: 1245377 - DNA, 25 bp, Homo sapien
taaacgctgcaggtttgggccatga

SEQ ID NO: 1245378 - DNA, 25 bp, Homo sapien
tgcatttattcacaagtgaatatgc

SEQ ID NO: 1245379 - DNA, 25 bp, Homo sapien
tttattcacaagtgaatatgcgaga

SEQ ID NO: 1245380 - DNA, 25 bp, Homo sapien
catttattcacaagtgaatatgcga

SEQ ID NO: 1245381 - DNA, 25 bp, Homo sapien
tattcacaagtgaatatgcgagaaa

SEQ ID NO: 1245382 - DNA, 25 bp, Homo sapien
aagcctaggcccaaactcacactgc

SEQ ID NO: 1245383 - DNA, 25 bp, Homo sapien
ctgctgaatatacaggggtagatcc

SEQ ID NO: 1245384 - DNA, 25 bp, Homo sapien
tgcaattctttgtaccctcctccca

SEQ ID NO: 1245385 - DNA, 25 bp, Homo sapien
gcatctgtacaaagaatgcttccag

SEQ ID NO: 1245386 - DNA, 25 bp, Homo sapien
ctccggctggctcaaaccggctttg

SEQ ID NO: 1245387 - DNA, 25 bp, Homo sapien
cggctggctcaaaccggctttgtca

SEQ ID NO: 1245388 - DNA, 25 bp, Homo sapien
cttcccctccggctggctcaaaccg

SEQ ID NO: 1245389 - DNA, 25 bp, Homo sapien
ggctggctcaaaccggctttgtcat

SEQ ID NO: 1245390 - DNA, 25 bp, Homo sapien
tcaacatggtgctcgattccacaat

SEQ ID NO: 1245391 - DNA, 25 bp, Homo sapien
gaaaagtagtatcacatctgcccaa

SEQ ID NO: 1245392 - DNA, 25 bp, Homo sapien
tgcactggctaaaacctaaactgac

SEQ ID NO: 1245393 - DNA, 25 bp, Homo sapien
tctgttgcttcgagtaactccagta

SEQ ID NO: 1245394 - DNA, 25 bp, Homo sapien
gaagcatcccgcgttctcagttgca

SEQ ID NO: 1245395 - DNA, 25 bp, Homo sapien
tctggactcaacaaggatgtagagc

SEQ ID NO: 1245396 - DNA, 25 bp, Homo sapien
gcaggatgccgatgttctcaccact

SEQ ID NO: 1245397 - DNA, 25 bp, Homo sapien
tgagagtcctataagccaaacgcag

SEQ ID NO: 1245398 - DNA, 25 bp, Homo sapien
gccagtctgtaggagctgcttcgag

SEQ ID NO: 1245399 - DNA, 25 bp, Homo sapien
taaggtgaaagagccagtctgtagg

SEQ ID NO: 1245400 - DNA, 25 bp, Homo sapien
tgtatccaaaactatggcgtttaag

SEQ ID NO: 1245401 - DNA, 25 bp, Homo sapien
gagctgcttcgaggaaagtcttgca

SEQ ID NO: 1245402 - DNA, 25 bp, Homo sapien
cagccaatgcccccagtacgtgcag

SEQ ID NO: 1245403 - DNA, 25 bp, Homo sapien
gccaatgcccccagtacgtgcagaa

SEQ ID NO: 1245404 - DNA, 25 bp, Homo sapien
caatgcccccagtacgtgcagaaaa

SEQ ID NO: 1245405 - DNA, 25 bp, Homo sapien
tcaacagccaatgcccccagtacgt

SEQ ID NO: 1245406 - DNA, 25 bp, Homo sapien
tttccgaagttcagtggatggcccc

SEQ ID NO: 1245407 - DNA, 25 bp, Homo sapien
ggaaactcaagtggctgtacaggct

SEQ ID NO: 1245408 - DNA, 25 bp, Homo sapien
cacacatgtggcgtcatcctgagct

SEQ ID NO: 1245409 - DNA, 25 bp, Homo sapien
tctggatgcagcaatccaagtcccc

SEQ ID NO: 1245410 - DNA, 25 bp, Homo sapien
cctgagctgaccactcgccttcctc

SEQ ID NO: 1245411 - DNA, 25 bp, Homo sapien
attcctgagctgaccactcgccttc

SEQ ID NO: 1245412 - DNA, 25 bp, Homo sapien
ttcctgagctgaccactcgccttcc

SEQ ID NO: 1245413 - DNA, 25 bp, Homo sapien
cattcctgagctgaccactcgcctt

SEQ ID NO: 1245414 - DNA, 25 bp, Homo sapien
gcacaccccagagaacagcttcctt

SEQ ID NO: 1245415 - DNA, 25 bp, Homo sapien
agcttccttctgtcagtcagcgatc

SEQ ID NO: 1245416 - DNA, 25 bp, Homo sapien
ttggtctttgggtcacgcacacccc

SEQ ID NO: 1245417 - DNA, 25 bp, Homo sapien
ggccatttggagcatctattcttcc

SEQ ID NO: 1245418 - DNA, 25 bp, Homo sapien
gcaatttccgcctaattgaggccat

SEQ ID NO: 1245419 - DNA, 25 bp, Homo sapien
gagaagcagaacaggagcgccagca

SEQ ID NO: 1245420 - DNA, 25 bp, Homo sapien
catcgccatcaaggtgcaaagtgct

SEQ ID NO: 1245421 - DNA, 25 bp, Homo sapien
attgtgtaccaaccgcacatcgcca

SEQ ID NO: 1245422 - DNA, 25 bp, Homo sapien
aagctacagccataaaaccactttt

SEQ ID NO: 1245423 - DNA, 25 bp, Homo sapien
taaaaccacttttatgccagcgcct

SEQ ID NO: 1245424 - DNA, 25 bp, Homo sapien
aaccacttttatgccagcgcctttc

SEQ ID NO: 1245425 - DNA, 25 bp, Homo sapien
cacttttatgccagcgcctttcaca

SEQ ID NO: 1245426 - DNA, 25 bp, Homo sapien
tcatggctggtgttcactggggaat

SEQ ID NO: 1245427 - DNA, 25 bp, Homo sapien
agcaaatggttctgcaggatcaggc

SEQ ID NO: 1245428 - DNA, 25 bp, Homo sapien
actggggaatccaacagcaaatggt

SEQ ID NO: 1245429 - DNA, 25 bp, Homo sapien
tccaacagcaaatggttctgcagga

SEQ ID NO: 1245430 - DNA, 25 bp, Homo sapien
tggaaatgatttaggaggaaactca

SEQ ID NO: 1245431 - DNA, 25 bp, Homo sapien
atggaaatgatttaggaggaaactc

SEQ ID NO: 1245432 - DNA, 25 bp, Homo sapien
ggaaatgatttaggaggaaactcag

SEQ ID NO: 1245433 - DNA, 25 bp, Homo sapien
taaatgccttcattcccaattacca

SEQ ID NO: 1245434 - DNA, 25 bp, Homo sapien
gtatttttggccacaataatcttca

SEQ ID NO: 1245435 - DNA, 25 bp, Homo sapien
tggccacaataatcttcacggagtg

SEQ ID NO: 1245436 - DNA, 25 bp, Homo sapien
aaataaatgccttcattcccaatta

SEQ ID NO: 1245437 - DNA, 25 bp, Homo sapien
ccagtcaaatgtagcagtggctgag

SEQ ID NO: 1245438 - DNA, 25 bp, Homo sapien
gctgagttgggggttgaacaccaac

SEQ ID NO: 1245439 - DNA, 25 bp, Homo sapien
ggctgagttgggggttgaacaccaa

SEQ ID NO: 1245440 - DNA, 25 bp, Homo sapien
gtcaaatgtagcagtggctgagttg

SEQ ID NO: 1245441 - DNA, 25 bp, Homo sapien
tatgggtgcatccagagtccgtgtg

SEQ ID NO: 1245442 - DNA, 25 bp, Homo sapien
tccagagtccgtgtgcttcttgccc

SEQ ID NO: 1245443 - DNA, 25 bp, Homo sapien
gtaccccgaaaatcgcaggcccata

SEQ ID NO: 1245444 - DNA, 25 bp, Homo sapien
gcaggcccatatgggtgcatccaga

SEQ ID NO: 1245445 - DNA, 25 bp, Homo sapien
caatccagcgtggttcatggtccct

SEQ ID NO: 1245446 - DNA, 25 bp, Homo sapien
tctggaagtatctagtgctgtgccc

SEQ ID NO: 1245447 - DNA, 25 bp, Homo sapien
tatcgatgacataactggactaaga

SEQ ID NO: 1245448 - DNA, 25 bp, Homo sapien
gactaagatcacacatccagcctgt

SEQ ID NO: 1245449 - DNA, 25 bp, Homo sapien
cctgcagcttcagaaaggagcagtg

SEQ ID NO: 1245450 - DNA, 25 bp, Homo sapien
aacctgcagcttcagaaaggagcag

SEQ ID NO: 1245451 - DNA, 25 bp, Homo sapien
tggctacaaaacctgcagcttcaga

SEQ ID NO: 1245452 - DNA, 25 bp, Homo sapien
tgcagcttcagaaaggagcagtgca

SEQ ID NO: 1245453 - DNA, 25 bp, Homo sapien
tgtgcctgtctcatcttgtagcgcc

SEQ ID NO: 1245454 - DNA, 25 bp, Homo sapien
agcttttgcttttccgcagaggaag

SEQ ID NO: 1245455 - DNA, 25 bp, Homo sapien
ggcggctttggaaactccagtttgc

SEQ ID NO: 1245456 - DNA, 25 bp, Homo sapien
tctcatcttgtagcgccttggccag

SEQ ID NO: 1245457 - DNA, 25 bp, Homo sapien
tagaacatcagcctactgggttcaa

SEQ ID NO: 1245458 - DNA, 25 bp, Homo sapien
cttttctgctattgcagatggggaa

SEQ ID NO: 1245459 - DNA, 25 bp, Homo sapien
ctgctgccgcttccaggtctgactt

SEQ ID NO: 1245460 - DNA, 25 bp, Homo sapien
tctgctgccgcttccaggtctgact

SEQ ID NO: 1245461 - DNA, 25 bp, Homo sapien
gcacgggatactgtagccaggagcc

SEQ ID NO: 1245462 - DNA, 25 bp, Homo sapien
tgcacgggatactgtagccaggagc

SEQ ID NO: 1245463 - DNA, 25 bp, Homo sapien
cacgggatactgtagccaggagcca

SEQ ID NO: 1245464 - DNA, 25 bp, Homo sapien
gttgcacgggatactgtagccagga

SEQ ID NO: 1245465 - DNA, 25 bp, Homo sapien
gtcgctggcactagaaagccaccag

SEQ ID NO: 1245466 - DNA, 25 bp, Homo sapien
agaagatagtgtcgtcgctggcact

SEQ ID NO: 1245467 - DNA, 25 bp, Homo sapien
tagtgtcgtcgctggcactagaaag

SEQ ID NO: 1245468 - DNA, 25 bp, Homo sapien
ctggcactagaaagccaccagagga

SEQ ID NO: 1245469 - DNA, 25 bp, Homo sapien
ctgtcatccaagtctccaaaccaca

SEQ ID NO: 1245470 - DNA, 25 bp, Homo sapien
aggacagcacgtgggcactggcggg

SEQ ID NO: 1245471 - DNA, 25 bp, Homo sapien
ttttgtcttggctggtctcgtgtgg

SEQ ID NO: 1245472 - DNA, 25 bp, Homo sapien
cttttgtcttggctggtctcgtgtg

SEQ ID NO: 1245473 - DNA, 25 bp, Homo sapien
gggaggacagcacgtgggcactggc

SEQ ID NO: 1245474 - DNA, 25 bp, Homo sapien
tcaatattctcgtggttaaattcca

SEQ ID NO: 1245475 - DNA, 25 bp, Homo sapien
acttatcaatattctcgtggttaaa

SEQ ID NO: 1245476 - DNA, 25 bp, Homo sapien
tatcaatattctcgtggttaaattc

SEQ ID NO: 1245477 - DNA, 25 bp, Homo sapien
tattctcgtggttaaattccacaag

SEQ ID NO: 1245478 - DNA, 25 bp, Homo sapien
ggctgatgacagacatcgactttgt

SEQ ID NO: 1245479 - DNA, 25 bp, Homo sapien
ctcccccgagtgaaccataggcaat

SEQ ID NO: 1245480 - DNA, 25 bp, Homo sapien
tcccccgagtgaaccataggcaatt

SEQ ID NO: 1245481 - DNA, 25 bp, Homo sapien
ccccgagtgaaccataggcaatttc

SEQ ID NO: 1245482 - DNA, 25 bp, Homo sapien
cccgagtgaaccataggcaatttct

SEQ ID NO: 1245483 - DNA, 25 bp, Homo sapien
gcctcctcatgctgacgttggcaga

SEQ ID NO: 1245484 - DNA, 25 bp, Homo sapien
tgacgttggcagaggtaagccttag

SEQ ID NO: 1245485 - DNA, 25 bp, Homo sapien
cggtctgttgggtgcagaatgtcct

SEQ ID NO: 1245486 - DNA, 25 bp, Homo sapien
tccttggctgtcatatgcctctcct

SEQ ID NO: 1245487 - DNA, 25 bp, Homo sapien
atttgcacacatgcagtgttctggc

SEQ ID NO: 1245488 - DNA, 25 bp, Homo sapien
cgtcatgggagtagcattattataa

SEQ ID NO: 1245489 - DNA, 25 bp, Homo sapien
gcaggcagtgttccctctccaatcc

SEQ ID NO: 1245490 - DNA, 25 bp, Homo sapien
tcatgggagtagcattattataaac

SEQ ID NO: 1245491 - DNA, 25 bp, Homo sapien
gacaaggacattgaaccaactggtt

SEQ ID NO: 1245492 - DNA, 25 bp, Homo sapien
gggacaaggacattgaaccaactgg

SEQ ID NO: 1245493 - DNA, 25 bp, Homo sapien
ggacaaggacattgaaccaactggt

SEQ ID NO: 1245494 - DNA, 25 bp, Homo sapien
tgggacaaggacattgaaccaactg

SEQ ID NO: 1245495 - DNA, 25 bp, Homo sapien
tcctcacactgagcaaccttggagc

SEQ ID NO: 1245496 - DNA, 25 bp, Homo sapien
cagcttcatgatggataaatcctta

SEQ ID NO: 1245497 - DNA, 25 bp, Homo sapien
tatgtcatcaaattgaacgaaggaa

SEQ ID NO: 1245498 - DNA, 25 bp, Homo sapien
ccttagtcacagtcaattcctcaca

SEQ ID NO: 1245499 - DNA, 25 bp, Homo sapien
tctgtaaatggatgctgccaaccgg

SEQ ID NO: 1245500 - DNA, 25 bp, Homo sapien
ccagatcctcggtgttagatgtgaa

SEQ ID NO: 1245501 - DNA, 25 bp, Homo sapien
tgaatgtgattttccaggtacgctg

SEQ ID NO: 1245502 - DNA, 25 bp, Homo sapien
cttggcttcgcttcccacggaaggg

SEQ ID NO: 1245503 - DNA, 25 bp, Homo sapien
gtagcgacttatccttgctccaggg

SEQ ID NO: 1245504 - DNA, 25 bp, Homo sapien
gacagaagggtgcttttaagaggca

SEQ ID NO: 1245505 - DNA, 25 bp, Homo sapien
tctggatgaggcatccttcttagac

SEQ ID NO: 1245506 - DNA, 25 bp, Homo sapien
ctcctggtagcgacttatccttgct

SEQ ID NO: 1245507 - DNA, 25 bp, Homo sapien
gactttggtgccctgtgatgcatgc

SEQ ID NO: 1245508 - DNA, 25 bp, Homo sapien
agctcggttcccatggcggtccttt

SEQ ID NO: 1245509 - DNA, 25 bp, Homo sapien
ctcttgctgtgaagcactcacagat

SEQ ID NO: 1245510 - DNA, 25 bp, Homo sapien
agatacagcagctcggttcccatgg

SEQ ID NO: 1245511 - DNA, 25 bp, Homo sapien
cagggaagtcaagatcccgaagtag

SEQ ID NO: 1245512 - DNA, 25 bp, Homo sapien
ggaagtcaagatcccgaagtagggc

SEQ ID NO: 1245513 - DNA, 25 bp, Homo sapien
agggaagtcaagatcccgaagtagg

SEQ ID NO: 1245514 - DNA, 25 bp, Homo sapien
aagtcaagatcccgaagtagggcag

SEQ ID NO: 1245515 - DNA, 25 bp, Homo sapien
cacaggcacgatccccttattgatg

SEQ ID NO: 1245516 - DNA, 25 bp, Homo sapien
ctgatcagcacagcgcaccgcagcc

SEQ ID NO: 1245517 - DNA, 25 bp, Homo sapien
gcggggtctgttcacccaccttaga

SEQ ID NO: 1245518 - DNA, 25 bp, Homo sapien
gcacgatccccttattgatggacat

SEQ ID NO: 1245519 - DNA, 25 bp, Homo sapien
gctggattccattgagtctaccagc

SEQ ID NO: 1245520 - DNA, 25 bp, Homo sapien
cattgagtctaccagcaggaaacag

SEQ ID NO: 1245521 - DNA, 25 bp, Homo sapien
tcaggctcaggaacctgaactaacg

SEQ ID NO: 1245522 - DNA, 25 bp, Homo sapien
gaacctgaactaacgatgtctgttt

SEQ ID NO: 1245523 - DNA, 25 bp, Homo sapien
acaccaccagtttaacccttcatca

SEQ ID NO: 1245524 - DNA, 25 bp, Homo sapien
tttcatgtctactggtttcttatgc

SEQ ID NO: 1245525 - DNA, 25 bp, Homo sapien
gtttccctttgagttcacaccacca

SEQ ID NO: 1245526 - DNA, 25 bp, Homo sapien
ttcatgtctactggtttcttatgct

SEQ ID NO: 1245527 - DNA, 25 bp, Homo sapien
tgaggatgatcagcttcagcttttc

SEQ ID NO: 1245528 - DNA, 25 bp, Homo sapien
caccaaggaggtgaggatgatcagc

SEQ ID NO: 1245529 - DNA, 25 bp, Homo sapien
tcacaccaaggaggtgaggatgatc

SEQ ID NO: 1245530 - DNA, 25 bp, Homo sapien
aggtgaggatgatcagcttcagctt

SEQ ID NO: 1245531 - DNA, 25 bp, Homo sapien
aggctgggtcggacgcctcaaagcc

SEQ ID NO: 1245532 - DNA, 25 bp, Homo sapien
tcctccaggactctggagctgcagg

SEQ ID NO: 1245533 - DNA, 25 bp, Homo sapien
ggtctcacaggctgcgtggttatgc

SEQ ID NO: 1245534 - DNA, 25 bp, Homo sapien
ttatgcggttctgtaagacttgcca

SEQ ID NO: 1245535 - DNA, 25 bp, Homo sapien
gcagcagttgcgtttctgggcttga

SEQ ID NO: 1245536 - DNA, 25 bp, Homo sapien
gagtggagattctccatgcagcacc

SEQ ID NO: 1245537 - DNA, 25 bp, Homo sapien
caccagggatttctgccatcgtgga

SEQ ID NO: 1245538 - DNA, 25 bp, Homo sapien
gattcaaggcatgactgagcaggtg

SEQ ID NO: 1245539 - DNA, 25 bp, Homo sapien
gggatgcatcggtgggactttaagg

SEQ ID NO: 1245540 - DNA, 25 bp, Homo sapien
ctttaagggtgcagtgtccagtagg

SEQ ID NO: 1245541 - DNA, 25 bp, Homo sapien
ttcgggaacctggagactgcagcag

SEQ ID NO: 1245542 - DNA, 25 bp, Homo sapien
gggctgtttgtgcagggcgacccgg

SEQ ID NO: 1245543 - DNA, 25 bp, Homo sapien
tttacagtgtcggtgaggagatgca

SEQ ID NO: 1245544 - DNA, 25 bp, Homo sapien
ctgccccggcagctgatttacagtg

SEQ ID NO: 1245545 - DNA, 25 bp, Homo sapien
ggcagctgatttacagtgtcggtga

SEQ ID NO: 1245546 - DNA, 25 bp, Homo sapien
ctgatttacagtgtcggtgaggaga

SEQ ID NO: 1245547 - DNA, 25 bp, Homo sapien
agccaggtcggtggactgggcccga

SEQ ID NO: 1245548 - DNA, 25 bp, Homo sapien
ttcgttcgtctatggtgccgctggg

SEQ ID NO: 1245549 - DNA, 25 bp, Homo sapien
gacagacagtttcgttcgtctatgg

SEQ ID NO: 1245550 - DNA, 25 bp, Homo sapien
acacaggacagacagtttcgttcgt

SEQ ID NO: 1245551 - DNA, 25 bp, Homo sapien
agtgtcccctgtgggtatggtagcc

SEQ ID NO: 1245552 - DNA, 25 bp, Homo sapien
ttgaccctcattgaccgtgggcggg

SEQ ID NO: 1245553 - DNA, 25 bp, Homo sapien
ttaatgttgaccctcattgaccgtg

SEQ ID NO: 1245554 - DNA, 25 bp, Homo sapien
cccctgtgggtatggtagcctctgg

SEQ ID NO: 1245555 - DNA, 25 bp, Homo sapien
tctataggagtctccagtcctgtgt

SEQ ID NO: 1245556 - DNA, 25 bp, Homo sapien
ctccagtcctgtgtaatatcctgcc

SEQ ID NO: 1245557 - DNA, 25 bp, Homo sapien
taggagtctccagtcctgtgtaata

SEQ ID NO: 1245558 - DNA, 25 bp, Homo sapien
gagtctccagtcctgtgtaatatcc

SEQ ID NO: 1245559 - DNA, 25 bp, Homo sapien
ctggctggagttttcctggaaagcc

SEQ ID NO: 1245560 - DNA, 25 bp, Homo sapien
gctggctggagttttcctggaaagc

SEQ ID NO: 1245561 - DNA, 25 bp, Homo sapien
gcctctcgggtccaggaagccatct

SEQ ID NO: 1245562 - DNA, 25 bp, Homo sapien
ttgatctttggtgaatagcctctcg

SEQ ID NO: 1245563 - DNA, 25 bp, Homo sapien
tctttggtgaatagcctctcgggtc

SEQ ID NO: 1245564 - DNA, 25 bp, Homo sapien
tgaatagcctctcgggtccaggaag

SEQ ID NO: 1245565 - DNA, 25 bp, Homo sapien
atgttttaaattatgcagacaagcc

SEQ ID NO: 1245566 - DNA, 25 bp, Homo sapien
caagcctgggattattccataaaaa

SEQ ID NO: 1245567 - DNA, 25 bp, Homo sapien
tgttttaaattatgcagacaagcct

SEQ ID NO: 1245568 - DNA, 25 bp, Homo sapien
tggaccccagtatcagatcctctaa

SEQ ID NO: 1245569 - DNA, 25 bp, Homo sapien
ctaacaatgaggagaagagtggctt

SEQ ID NO: 1245570 - DNA, 25 bp, Homo sapien
gatcctctaaccatatgatgctgtg

SEQ ID NO: 1245571 - DNA, 25 bp, Homo sapien
gcttcagactgtgggtttacctcct

SEQ ID NO: 1245572 - DNA, 25 bp, Homo sapien
ggctctttgtcctcatggggactgt

SEQ ID NO: 1245573 - DNA, 25 bp, Homo sapien
ctttgtcctcatggggactgtgcat

SEQ ID NO: 1245574 - DNA, 25 bp, Homo sapien
cactgggctctttgtcctcatgggg

SEQ ID NO: 1245575 - DNA, 25 bp, Homo sapien
tgggctctttgtcctcatggggact

SEQ ID NO: 1245576 - DNA, 25 bp, Homo sapien
aaaaaaggaagcagcaagttgagag

SEQ ID NO: 1245577 - DNA, 25 bp, Homo sapien
aaaaggaagcagcaagttgagagca

SEQ ID NO: 1245578 - DNA, 25 bp, Homo sapien
ttaaaaaaaggaagcagcaagttga

SEQ ID NO: 1245579 - DNA, 25 bp, Homo sapien
taaaaaaaggaagcagcaagttgag

SEQ ID NO: 1245580 - DNA, 25 bp, Homo sapien
gcaggacagcgccataacacctaga

SEQ ID NO: 1245581 - DNA, 25 bp, Homo sapien
cacctagagttactgtgtttggttc

SEQ ID NO: 1245582 - DNA, 25 bp, Homo sapien
ttactgtgtttggttcacacttctg

SEQ ID NO: 1245583 - DNA, 25 bp, Homo sapien
gcgccataacacctagagttactgt

SEQ ID NO: 1245584 - DNA, 25 bp, Homo sapien
tgctgaccacttcttgagcgcactg

SEQ ID NO: 1245585 - DNA, 25 bp, Homo sapien
gaccacttcttgagcgcactgctag

SEQ ID NO: 1245586 - DNA, 25 bp, Homo sapien
acttcttgagcgcactgctagctgc

SEQ ID NO: 1245587 - DNA, 25 bp, Homo sapien
ttgagcgcactgctagctgcttctg

SEQ ID NO: 1245588 - DNA, 25 bp, Homo sapien
tgaactttgttcagccgaaacccta

SEQ ID NO: 1245589 - DNA, 25 bp, Homo sapien
ctagggtggctccactaggttctgc

SEQ ID NO: 1245590 - DNA, 25 bp, Homo sapien
cagcagtgaactttgttcagccgaa

SEQ ID NO: 1245591 - DNA, 25 bp, Homo sapien
gggtggctccactaggttctgcttt

SEQ ID NO: 1245592 - DNA, 25 bp, Homo sapien
gccagcagcctgctctcccggccat

SEQ ID NO: 1245593 - DNA, 25 bp, Homo sapien
tgccagcagcctgctctcccggcca

SEQ ID NO: 1245594 - DNA, 25 bp, Homo sapien
ctgccagcagcctgctctcccggcc

SEQ ID NO: 1245595 - DNA, 25 bp, Homo sapien
aaatgtctaacgtggagtccacctg

SEQ ID NO: 1245596 - DNA, 25 bp, Homo sapien
tttcagggctcaagcctggaagaag

SEQ ID NO: 1245597 - DNA, 25 bp, Homo sapien
gggaaatgtctaacgtggagtccac

SEQ ID NO: 1245598 - DNA, 25 bp, Homo sapien
ttttcagggctcaagcctggaagaa

SEQ ID NO: 1245599 - DNA, 25 bp, Homo sapien
tggaagtaagcttgtggggccgggc

SEQ ID NO: 1245600 - DNA, 25 bp, Homo sapien
ctggaagtaagcttgtggggccggg

SEQ ID NO: 1245601 - DNA, 25 bp, Homo sapien
actggaagtaagcttgtggggccgg

SEQ ID NO: 1245602 - DNA, 25 bp, Homo sapien
gcagtttgcgtttcgggtggccctg

SEQ ID NO: 1245603 - DNA, 25 bp, Homo sapien
gagcagtttgcgtttcgggtggccc

SEQ ID NO: 1245604 - DNA, 25 bp, Homo sapien
agcagtttgcgtttcgggtggccct

SEQ ID NO: 1245605 - DNA, 25 bp, Homo sapien
tcagtgaacagggggcgtttccaga

SEQ ID NO: 1245606 - DNA, 25 bp, Homo sapien
tgctgggcatagtgccggccagcca

SEQ ID NO: 1245607 - DNA, 25 bp, Homo sapien
tgttttctgcatggcaagactccta

SEQ ID NO: 1245608 - DNA, 25 bp, Homo sapien
gccttgctgggcatagtgccggcca

SEQ ID NO: 1245609 - DNA, 25 bp, Homo sapien
tgggtcctgcggatggtcggggtga

SEQ ID NO: 1245610 - DNA, 25 bp, Homo sapien
ccttcccgctgagagggatgtgggt

SEQ ID NO: 1245611 - DNA, 25 bp, Homo sapien
tgccttcccgctgagagggatgtgg

SEQ ID NO: 1245612 - DNA, 25 bp, Homo sapien
cctgcggatggtcggggtgaagctt

SEQ ID NO: 1245613 - DNA, 25 bp, Homo sapien
ctcaggatagcagggaacaggcagc

SEQ ID NO: 1245614 - DNA, 25 bp, Homo sapien
gaggtcgtcgccttgcagccctggc

SEQ ID NO: 1245615 - DNA, 25 bp, Homo sapien
ccggttcctcgagaggtcgtcgcct

SEQ ID NO: 1245616 - DNA, 25 bp, Homo sapien
gctgatttcgaaggctaaaggcgat

SEQ ID NO: 1245617 - DNA, 25 bp, Homo sapien
gcagccctggctgatttcgaaggct

SEQ ID NO: 1245618 - DNA, 25 bp, Homo sapien
tcagaccgtgcttgtgtagggcgct

SEQ ID NO: 1245619 - DNA, 25 bp, Homo sapien
ggctcgagtaaattgatccagctgc

SEQ ID NO: 1245620 - DNA, 25 bp, Homo sapien
cagctgcttgcaaagctcatggaaa

SEQ ID NO: 1245621 - DNA, 25 bp, Homo sapien
tgctggcgctgtcacgtggtcccgc

SEQ ID NO: 1245622 - DNA, 25 bp, Homo sapien
tgctgagttgcagagtccagtgcgt

SEQ ID NO: 1245623 - DNA, 25 bp, Homo sapien
catgggtgggtaataggaatccagt

SEQ ID NO: 1245624 - DNA, 25 bp, Homo sapien
tttttaatggcatgcccatgggtgg

SEQ ID NO: 1245625 - DNA, 25 bp, Homo sapien
cagtgcgttctggagcttattcata

SEQ ID NO: 1245626 - DNA, 25 bp, Homo sapien
taaccaggcaaggtgatctgctggg

SEQ ID NO: 1245627 - DNA, 25 bp, Homo sapien
catgtttggctgatgcgcagacgcc

SEQ ID NO: 1245628 - DNA, 25 bp, Homo sapien
tggctgatgcgcagacgccttctca

SEQ ID NO: 1245629 - DNA, 25 bp, Homo sapien
tgcaccccttcctcggtgtgtgtct

SEQ ID NO: 1245630 - DNA, 25 bp, Homo sapien
ctctaccctcagcagaaagcagaaa

SEQ ID NO: 1245631 - DNA, 25 bp, Homo sapien
ctgcagtgcgtggaagaatgcactg

SEQ ID NO: 1245632 - DNA, 25 bp, Homo sapien
tgcgtggaagaatgcactgatgaga

SEQ ID NO: 1245633 - DNA, 25 bp, Homo sapien
gcagtgcgtggaagaatgcactgat

SEQ ID NO: 1245634 - DNA, 25 bp, Homo sapien
agtgcgtggaagaatgcactgatga

SEQ ID NO: 1245635 - DNA, 25 bp, Homo sapien
tcataattgagtgacgtagctgaat

SEQ ID NO: 1245636 - DNA, 25 bp, Homo sapien
cagcacagacaatcataattgagtg

SEQ ID NO: 1245637 - DNA, 25 bp, Homo sapien
gattgattaagtaaacactcacagc

SEQ ID NO: 1245638 - DNA, 25 bp, Homo sapien
ttgatttagtcaccaaaacacccat

SEQ ID NO: 1245639 - DNA, 25 bp, Homo sapien
tccctcctttgtgggagttgcattt

SEQ ID NO: 1245640 - DNA, 25 bp, Homo sapien
agagaggctagtgacatagagagcc

SEQ ID NO: 1245641 - DNA, 25 bp, Homo sapien
aggcaaatcctggatctgtgcctgc

SEQ ID NO: 1245642 - DNA, 25 bp, Homo sapien
gggctccacctaggcaggcgctaga

SEQ ID NO: 1245643 - DNA, 25 bp, Homo sapien
cctggtgcgcagtggtttcctgcct

SEQ ID NO: 1245644 - DNA, 25 bp, Homo sapien
taaatggccgttgctcggtggtgat

SEQ ID NO: 1245645 - DNA, 25 bp, Homo sapien
ttccaggcctggtgcgcagtggttt

SEQ ID NO: 1245646 - DNA, 25 bp, Homo sapien
tgctaaatggccgttgctcggtggt

SEQ ID NO: 1245647 - DNA, 25 bp, Homo sapien
cctctcacttttagaaccaactgac

SEQ ID NO: 1245648 - DNA, 25 bp, Homo sapien
ctctcacttttagaaccaactgacc

SEQ ID NO: 1245649 - DNA, 25 bp, Homo sapien
tctcacttttagaaccaactgaccc

SEQ ID NO: 1245650 - DNA, 25 bp, Homo sapien
ggaaattccccataagatgggtaca

SEQ ID NO: 1245651 - DNA, 25 bp, Homo sapien
tcacttcgtaggtgccagatgtatt

SEQ ID NO: 1245652 - DNA, 25 bp, Homo sapien
ccctcctttgtctgaccggtttgca

SEQ ID NO: 1245653 - DNA, 25 bp, Homo sapien
tgtctgaccggtttgcatgttccac

SEQ ID NO: 1245654 - DNA, 25 bp, Homo sapien
gaagtcaacattctccggcatccac

SEQ ID NO: 1245655 - DNA, 25 bp, Homo sapien
ttagcaggggctggttacagacggt

SEQ ID NO: 1245656 - DNA, 25 bp, Homo sapien
gaggaagtcaacattctccggcatc

SEQ ID NO: 1245657 - DNA, 25 bp, Homo sapien
tacagacggttgtgccggtgggaga

SEQ ID NO: 1245658 - DNA, 25 bp, Homo sapien
tccctggcatctggcgctgtgccat

SEQ ID NO: 1245659 - DNA, 25 bp, Homo sapien
ggtgatgagttttcgccatcgcagc

SEQ ID NO: 1245660 - DNA, 25 bp, Homo sapien
ttgggtgcagcggaggcaatgcttg

SEQ ID NO: 1245661 - DNA, 25 bp, Homo sapien
gccatgtcccgtggcgccctgtggt

SEQ ID NO: 1245662 - DNA, 25 bp, Homo sapien
gatgtgagggctggactttgctaaa

SEQ ID NO: 1245663 - DNA, 25 bp, Homo sapien
tgagggctggactttgctaaaaata

SEQ ID NO: 1245664 - DNA, 25 bp, Homo sapien
ggatgtgagggctggactttgctaa

SEQ ID NO: 1245665 - DNA, 25 bp, Homo sapien
tgtgagggctggactttgctaaaaa

SEQ ID NO: 1245666 - DNA, 25 bp, Homo sapien
agagaggtcttgacttgttcagcgg

SEQ ID NO: 1245667 - DNA, 25 bp, Homo sapien
atgcaggcggcacaataccagagac

SEQ ID NO: 1245668 - DNA, 25 bp, Homo sapien
catccagagaggtcttgacttgttc

SEQ ID NO: 1245669 - DNA, 25 bp, Homo sapien
ggttgctggcgttgcctgggatgca

SEQ ID NO: 1245670 - DNA, 25 bp, Homo sapien
gcctgtgtcagccaaaatggaggaa

SEQ ID NO: 1245671 - DNA, 25 bp, Homo sapien
cacttgaatgcccactgacggctgc

SEQ ID NO: 1245672 - DNA, 25 bp, Homo sapien
tttggccagtgtcgtttccagccag

SEQ ID NO: 1245673 - DNA, 25 bp, Homo sapien
ttccagccaggtagacacccatggg

SEQ ID NO: 1245674 - DNA, 25 bp, Homo sapien
tattgtggaatagtaaatgaggcct

SEQ ID NO: 1245675 - DNA, 25 bp, Homo sapien
ttgtggcagatcctgctctctggac

SEQ ID NO: 1245676 - DNA, 25 bp, Homo sapien
gggtcacatgctttctagttgctat

SEQ ID NO: 1245677 - DNA, 25 bp, Homo sapien
tcctggtggagcagtctaatctggg

SEQ ID NO: 1245678 - DNA, 25 bp, Homo sapien
tcccaagattaaccaattagtcacc

SEQ ID NO: 1245679 - DNA, 25 bp, Homo sapien
gcaggccgccaaggcctcttggttt

SEQ ID NO: 1245680 - DNA, 25 bp, Homo sapien
ccccgtgagtaataccggcttctca

SEQ ID NO: 1245681 - DNA, 25 bp, Homo sapien
gaggccattctctgctgactcaggc

SEQ ID NO: 1245682 - DNA, 25 bp, Homo sapien
cagtttcctctgttctgatcggctc

SEQ ID NO: 1245683 - DNA, 25 bp, Homo sapien
tcaggttgtctggaggcactgccct

SEQ ID NO: 1245684 - DNA, 25 bp, Homo sapien
ttctgatcggctccaaactgtcatt

SEQ ID NO: 1245685 - DNA, 25 bp, Homo sapien
cacctccttgcagatcgttctaggg

SEQ ID NO: 1245686 - DNA, 25 bp, Homo sapien
agttgttcccagacttttggattcg

SEQ ID NO: 1245687 - DNA, 25 bp, Homo sapien
tactagttgttcccagacttttgga

SEQ ID NO: 1245688 - DNA, 25 bp, Homo sapien
tgttcccagacttttggattcgtag

SEQ ID NO: 1245689 - DNA, 25 bp, Homo sapien
tagttgttcccagacttttggattc

SEQ ID NO: 1245690 - DNA, 25 bp, Homo sapien
agctgtgccgctgtctttctgtgcc

SEQ ID NO: 1245691 - DNA, 25 bp, Homo sapien
tagccgcacaggtttcagcaagaca

SEQ ID NO: 1245692 - DNA, 25 bp, Homo sapien
tgtaccccaaatcttcggtggcaca

SEQ ID NO: 1245693 - DNA, 25 bp, Homo sapien
tatttttgcaggtacgcagcgctct

SEQ ID NO: 1245694 - DNA, 25 bp, Homo sapien
ggcatgatagtatatgcctgtgtaa

SEQ ID NO: 1245695 - DNA, 25 bp, Homo sapien
tcagtgactaaccaggcagctaaga

SEQ ID NO: 1245696 - DNA, 25 bp, Homo sapien
tgtcacttggctctgaacatactgg

SEQ ID NO: 1245697 - DNA, 25 bp, Homo sapien
gcagcagcccagacatgtatagagg

SEQ ID NO: 1245698 - DNA, 25 bp, Homo sapien
cagcttgagcgtttccatgtgctaa

SEQ ID NO: 1245699 - DNA, 25 bp, Homo sapien
taaggatccttggtacttggtggca

SEQ ID NO: 1245700 - DNA, 25 bp, Homo sapien
tattctccgtagtcacagtttcaga

SEQ ID NO: 1245701 - DNA, 25 bp, Homo sapien
tgagagtaagttgcaaccttgtgac

SEQ ID NO: 1245702 - DNA, 25 bp, Homo sapien
caggtgggacctcttattctcaaat

SEQ ID NO: 1245703 - DNA, 25 bp, Homo sapien
tgagttactaaaatatcatggattt

SEQ ID NO: 1245704 - DNA, 25 bp, Homo sapien
cctgaaacatagttacatagttaaa

SEQ ID NO: 1245705 - DNA, 25 bp, Homo sapien
acatagttacatagttaaactgtac

SEQ ID NO: 1245706 - DNA, 25 bp, Homo sapien
attctataaatacactatgagttac

SEQ ID NO: 1245707 - DNA, 25 bp, Homo sapien
aggcacgtgctaccatgctcagcta

SEQ ID NO: 1245708 - DNA, 25 bp, Homo sapien
aacttccgtcttccaggttcaagcg

SEQ ID NO: 1245709 - DNA, 25 bp, Homo sapien
acttccgtcttccaggttcaagcga

SEQ ID NO: 1245710 - DNA, 25 bp, Homo sapien
gactacaggcacgtgctaccatgct

SEQ ID NO: 1245711 - DNA, 25 bp, Homo sapien
ttaagatcaatttcctgtgaattta

SEQ ID NO: 1245712 - DNA, 25 bp, Homo sapien
tatatcgtgggaaattgtttggtaa

SEQ ID NO: 1245713 - DNA, 25 bp, Homo sapien
cctgtgaatttatatcgtgggaaat

SEQ ID NO: 1245714 - DNA, 25 bp, Homo sapien
tttaagatcaatttcctgtgaattt

SEQ ID NO: 1245715 - DNA, 25 bp, Homo sapien
cttgcatcgcataacactgggtttg

SEQ ID NO: 1245716 - DNA, 25 bp, Homo sapien
gataccacttacgacgatctggcta

SEQ ID NO: 1245717 - DNA, 25 bp, Homo sapien
caagataggcaccagtcaggaaaca

SEQ ID NO: 1245718 - DNA, 25 bp, Homo sapien
aactgcagaggagtacaagataggc

SEQ ID NO: 1245719 - DNA, 25 bp, Homo sapien
aagggaaggagaacgctccagtgca

SEQ ID NO: 1245720 - DNA, 25 bp, Homo sapien
gaccagaacatgtcatatgctcttg

SEQ ID NO: 1245721 - DNA, 25 bp, Homo sapien
cagatcacagggagggatagattcc

SEQ ID NO: 1245722 - DNA, 25 bp, Homo sapien
aaatggaattaatgactgccacagc

SEQ ID NO: 1245723 - DNA, 25 bp, Homo sapien
ccttagttgactgggaccggaagtg

SEQ ID NO: 1245724 - DNA, 25 bp, Homo sapien
ctcgttacagcatggtcggcggata

SEQ ID NO: 1245725 - DNA, 25 bp, Homo sapien
tagtcttctgagtacgtgcacgcca

SEQ ID NO: 1245726 - DNA, 25 bp, Homo sapien
tccgtggtcacgtgcaaattcccga

SEQ ID NO: 1245727 - DNA, 25 bp, Homo sapien
tattagacatcaatcctggtaacca

SEQ ID NO: 1245728 - DNA, 25 bp, Homo sapien
taaagcaagtcaccttagggtggct

SEQ ID NO: 1245729 - DNA, 25 bp, Homo sapien
tcactgcctgtagagacaatacagt

SEQ ID NO: 1245730 - DNA, 25 bp, Homo sapien
gacaagctgacttggcacttaagtg

SEQ ID NO: 1245731 - DNA, 25 bp, Homo sapien
cagctgctgttatgttaactttagc

SEQ ID NO: 1245732 - DNA, 25 bp, Homo sapien
caatgtccagcgcatcacaaaatgg

SEQ ID NO: 1245733 - DNA, 25 bp, Homo sapien
tgaaccgtcaatgtccagcgcatca

SEQ ID NO: 1245734 - DNA, 25 bp, Homo sapien
gttaactttagctgaaccgtcaatg

SEQ ID NO: 1245735 - DNA, 25 bp, Homo sapien
taaatctgtgcatgtatttaaaaat

SEQ ID NO: 1245736 - DNA, 25 bp, Homo sapien
cagagaggccgggcgcaattgctca

SEQ ID NO: 1245737 - DNA, 25 bp, Homo sapien
taatttatgaacactaatttataac

SEQ ID NO: 1245738 - DNA, 25 bp, Homo sapien
taatttataacagagaggccgggcg

SEQ ID NO: 1245739 - DNA, 25 bp, Homo sapien
gagataaaattcctgtagaacaggg

SEQ ID NO: 1245740 - DNA, 25 bp, Homo sapien
caagtaagccagatttgcccctggg

SEQ ID NO: 1245741 - DNA, 25 bp, Homo sapien
gtttttaaaggtgttgctatatcta

SEQ ID NO: 1245742 - DNA, 25 bp, Homo sapien
ccatgtggtctctgtagaaactact

SEQ ID NO: 1245743 - DNA, 25 bp, Homo sapien
gagacagagtatctctctgtcatcc

SEQ ID NO: 1245744 - DNA, 25 bp, Homo sapien
gagactgagtttcattgtgttagcc

SEQ ID NO: 1245745 - DNA, 25 bp, Homo sapien
tgagacagagtatctctctgtcatc

SEQ ID NO: 1245746 - DNA, 25 bp, Homo sapien
gtagagactgagtttcattgtgtta

SEQ ID NO: 1245747 - DNA, 25 bp, Homo sapien
tcctgagctcaagactgagctgatc

SEQ ID NO: 1245748 - DNA, 25 bp, Homo sapien
ccttaagtattcttaggagattgaa

SEQ ID NO: 1245749 - DNA, 25 bp, Homo sapien
tttaatactactctagagtttttca

SEQ ID NO: 1245750 - DNA, 25 bp, Homo sapien
tatccacagtcttgttactcacaaa

SEQ ID NO: 1245751 - DNA, 25 bp, Homo sapien
tattgggattctgccatggtaaatc

SEQ ID NO: 1245752 - DNA, 25 bp, Homo sapien
taatacagagatatagtgttctccc

SEQ ID NO: 1245753 - DNA, 25 bp, Homo sapien
aattgtttggtgtaactggtaggat

SEQ ID NO: 1245754 - DNA, 25 bp, Homo sapien
cctaagagagcgcatcttcaatgag

SEQ ID NO: 1245755 - DNA, 25 bp, Homo sapien
taaacttactctgaatagggcctgg

SEQ ID NO: 1245756 - DNA, 25 bp, Homo sapien
tctcagcttgtatttggtaaggaca

SEQ ID NO: 1245757 - DNA, 25 bp, Homo sapien
tatacaaagagcataattggcaagg

SEQ ID NO: 1245758 - DNA, 25 bp, Homo sapien
gatctatcagacaactaaagtgcta

SEQ ID NO: 1245759 - DNA, 25 bp, Homo sapien
gaatgagaaatcttgacccactaat

SEQ ID NO: 1245760 - DNA, 25 bp, Homo sapien
catgtagagtttttccccgcatgaa

SEQ ID NO: 1245761 - DNA, 25 bp, Homo sapien
taattggcaccagtaattatgccag

SEQ ID NO: 1245762 - DNA, 25 bp, Homo sapien
gctagggtaccgtggcatgcgatct

SEQ ID NO: 1245763 - DNA, 25 bp, Homo sapien
tttggaaacaccacaatactctggg

SEQ ID NO: 1245764 - DNA, 25 bp, Homo sapien
tcataaatgataacaacgcctaaca

SEQ ID NO: 1245765 - DNA, 25 bp, Homo sapien
agggttggcctaagaagtatgctgt

SEQ ID NO: 1245766 - DNA, 25 bp, Homo sapien
caatactctgggaattgaacgtttt

SEQ ID NO: 1245767 - DNA, 25 bp, Homo sapien
tgaggcgtccgttttgtgaatatga

SEQ ID NO: 1245768 - DNA, 25 bp, Homo sapien
tagtgtaggaatgaagacctgctcc

SEQ ID NO: 1245769 - DNA, 25 bp, Homo sapien
tagatgtttcttagttgaggcgtcc

SEQ ID NO: 1245770 - DNA, 25 bp, Homo sapien
tctcactgccaaggaacctgacaat

SEQ ID NO: 1245771 - DNA, 25 bp, Homo sapien
ttctatctttaggaaagctgtgttt

SEQ ID NO: 1245772 - DNA, 25 bp, Homo sapien
tcaaaatctgagcatattcttaaat

SEQ ID NO: 1245773 - DNA, 25 bp, Homo sapien
tccctggggggagagtttaatctca

SEQ ID NO: 1245774 - DNA, 25 bp, Homo sapien
ttttctatctttaggaaagctgtgt

SEQ ID NO: 1245775 - DNA, 25 bp, Homo sapien
aattttgttggcaacgtcatcatag

SEQ ID NO: 1245776 - DNA, 25 bp, Homo sapien
cgtcatcatagtcaggaaccggtag

SEQ ID NO: 1245777 - DNA, 25 bp, Homo sapien
caggaaccggtagaacatgggcctt

SEQ ID NO: 1245778 - DNA, 25 bp, Homo sapien
tgttggcaacgtcatcatagtcagg

SEQ ID NO: 1245779 - DNA, 25 bp, Homo sapien
ttacttgtatggacttaattctgtc

SEQ ID NO: 1245780 - DNA, 25 bp, Homo sapien
ttctgcattgatggaggtagtgaag

SEQ ID NO: 1245781 - DNA, 25 bp, Homo sapien
catggtacagtgtctaatgcctgta

SEQ ID NO: 1245782 - DNA, 25 bp, Homo sapien
gctttccaattgtagtttttctgca

SEQ ID NO: 1245783 - DNA, 25 bp, Homo sapien
tcattgtcgtagacgggaaactccg

SEQ ID NO: 1245784 - DNA, 25 bp, Homo sapien
tagaggataccttggtcccagagtc

SEQ ID NO: 1245785 - DNA, 25 bp, Homo sapien
tgcctgcggaaaacgaatctctggg

SEQ ID NO: 1245786 - DNA, 25 bp, Homo sapien
aaactccgtcgggtctcgacaatgg

SEQ ID NO: 1245787 - DNA, 25 bp, Homo sapien
cacttgtcgggtctgagcccggaac

SEQ ID NO: 1245788 - DNA, 25 bp, Homo sapien
ctctcgctcggacgcggcgcgtggg

SEQ ID NO: 1245789 - DNA, 25 bp, Homo sapien
gggccagatgttgatctcgctccca

SEQ ID NO: 1245790 - DNA, 25 bp, Homo sapien
ggcgcggattcgctcggccgggcgc

SEQ ID NO: 1245791 - DNA, 25 bp, Homo sapien
gaagcgatgtttgcccgtcagtcga

SEQ ID NO: 1245792 - DNA, 25 bp, Homo sapien
cgttggccccagagtatggacttta

SEQ ID NO: 1245793 - DNA, 25 bp, Homo sapien
cgtcgttgtttgtatccagggacca

SEQ ID NO: 1245794 - DNA, 25 bp, Homo sapien
caatccaaggtcgtctaagaggcca

SEQ ID NO: 1245795 - DNA, 25 bp, Homo sapien
tccacgcaggcgcagggcattgcgg

SEQ ID NO: 1245796 - DNA, 25 bp, Homo sapien
cacgcaggcgcagggcattgcgggc

SEQ ID NO: 1245797 - DNA, 25 bp, Homo sapien
cggtccacgcaggcgcagggcattg

SEQ ID NO: 1245798 - DNA, 25 bp, Homo sapien
gtccacgcaggcgcagggcattgcg

SEQ ID NO: 1245799 - DNA, 25 bp, Homo sapien
ccgccagcgacaccgcattagttgg

SEQ ID NO: 1245800 - DNA, 25 bp, Homo sapien
caccgcattagttggtgcaagaaaa

SEQ ID NO: 1245801 - DNA, 25 bp, Homo sapien
aagaaaatgcgccatcccggtcaca

SEQ ID NO: 1245802 - DNA, 25 bp, Homo sapien
ggtgcaagaaaatgcgccatcccgg

SEQ ID NO: 1245803 - DNA, 25 bp, Homo sapien
cacgccgccggtccgggagtaactg

SEQ ID NO: 1245804 - DNA, 25 bp, Homo sapien
gatgatatcacgactttcacgccgc

SEQ ID NO: 1245805 - DNA, 25 bp, Homo sapien
ggagtaactgtaccccgcatcaact

SEQ ID NO: 1245806 - DNA, 25 bp, Homo sapien
tataatgtggacttaggctcttccc

SEQ ID NO: 1245807 - DNA, 25 bp, Homo sapien
tacacaatccggttcagcatccggg

SEQ ID NO: 1245808 - DNA, 25 bp, Homo sapien
acttcgaggccgattttccacagcg

SEQ ID NO: 1245809 - DNA, 25 bp, Homo sapien
tatacagtgctagcacagagtccgg

SEQ ID NO: 1245810 - DNA, 25 bp, Homo sapien
tactccgggagaaagacgatggatc

SEQ ID NO: 1245811 - DNA, 25 bp, Homo sapien
cagggatgacattccaatcggagcc

SEQ ID NO: 1245812 - DNA, 25 bp, Homo sapien
tctaaaggattctacacaccgtggc

SEQ ID NO: 1245813 - DNA, 25 bp, Homo sapien
tacggcaatagcctcctcgtcgggt

SEQ ID NO: 1245814 - DNA, 25 bp, Homo sapien
cgcgttagacgatgaaaccagggca

SEQ ID NO: 1245815 - DNA, 25 bp, Homo sapien
tcaggttactcttcaggattgaaag

SEQ ID NO: 1245816 - DNA, 25 bp, Homo sapien
cataaaaaagatcagcactccacca

SEQ ID NO: 1245817 - DNA, 25 bp, Homo sapien
gatctctgacacgtgaccttattat

SEQ ID NO: 1245818 - DNA, 25 bp, Homo sapien
aattaataccaaagacgtcgcaagg

SEQ ID NO: 1245819 - DNA, 25 bp, Homo sapien
cactgttaggcagttggtaagcaca

SEQ ID NO: 1245820 - DNA, 25 bp, Homo sapien
acgtacctcagattaagattcccag

SEQ ID NO: 1245821 - DNA, 25 bp, Homo sapien
agtgctgagactacccaatttggtg

SEQ ID NO: 1245822 - DNA, 25 bp, Homo sapien
tataaccatcaactgtgcaagtgct

SEQ ID NO: 1245823 - DNA, 25 bp, Homo sapien
gagtaaataccaacaacgtgccaca

SEQ ID NO: 1245824 - DNA, 25 bp, Homo sapien
tagcccagtcacctgatactatgat

SEQ ID NO: 1245825 - DNA, 25 bp, Homo sapien
ctagtactgtaacttcttgctggca

SEQ ID NO: 1245826 - DNA, 25 bp, Homo sapien
tcaccagtgttcctcgatttctaaa

SEQ ID NO: 1245827 - DNA, 25 bp, Homo sapien
tgttcagaataagccaatctacaga

SEQ ID NO: 1245828 - DNA, 25 bp, Homo sapien
gcaagattctacagctatgaagcct

SEQ ID NO: 1245829 - DNA, 25 bp, Homo sapien
cactttaaatgggtggtatgtaaat

SEQ ID NO: 1245830 - DNA, 25 bp, Homo sapien
acagggtttcttttcgcagggatca

SEQ ID NO: 1245831 - DNA, 25 bp, Homo sapien
taagtatttatagggttctagaaga

SEQ ID NO: 1245832 - DNA, 25 bp, Homo sapien
tgaagtaagtatttatagggttcta

SEQ ID NO: 1245833 - DNA, 25 bp, Homo sapien
agtcacttcacccaacagtatcatc

SEQ ID NO: 1245834 - DNA, 25 bp, Homo sapien
tcacccaacagtatcatctttttct

SEQ ID NO: 1245835 - DNA, 25 bp, Homo sapien
tcatctttttcttacacggaaagct

SEQ ID NO: 1245836 - DNA, 25 bp, Homo sapien
tcaagcaatccggccgctacagcct

SEQ ID NO: 1245837 - DNA, 25 bp, Homo sapien
ctttcagccaatgattaaatgcctg

SEQ ID NO: 1245838 - DNA, 25 bp, Homo sapien
cagccaatgattaaatgcctgtgaa

SEQ ID NO: 1245839 - DNA, 25 bp, Homo sapien
gaactttcagccaatgattaaatgc

SEQ ID NO: 1245840 - DNA, 25 bp, Homo sapien
gccaatgattaaatgcctgtgaaag

SEQ ID NO: 1245841 - DNA, 25 bp, Homo sapien
gcgcaagatattctgcacctgggtg

SEQ ID NO: 1245842 - DNA, 25 bp, Homo sapien
gctggcgggtaaaaagcttcactgc

SEQ ID NO: 1245843 - DNA, 25 bp, Homo sapien
gattccatagatgctgtgggccact

SEQ ID NO: 1245844 - DNA, 25 bp, Homo sapien
ccactggaaagccacgtcggagttt

SEQ ID NO: 1245845 - DNA, 25 bp, Homo sapien
ttattcattttcttctttgaacatc

SEQ ID NO: 1245846 - DNA, 25 bp, Homo sapien
tcattttcttctttgaacatcttac

SEQ ID NO: 1245847 - DNA, 25 bp, Homo sapien
tattcattttcttctttgaacatct

SEQ ID NO: 1245848 - DNA, 25 bp, Homo sapien
ttcattttcttctttgaacatctta

SEQ ID NO: 1245849 - DNA, 25 bp, Homo sapien
tggtggcaatgtcctgtcactgcaa

SEQ ID NO: 1245850 - DNA, 25 bp, Homo sapien
ttaactaaaataagctatgaggtcc

SEQ ID NO: 1245851 - DNA, 25 bp, Homo sapien
caaatcagacctacataactgtggc

SEQ ID NO: 1245852 - DNA, 25 bp, Homo sapien
tatgaggtccaatcaagaatggctt

SEQ ID NO: 1245853 - DNA, 25 bp, Homo sapien
gacggaataaacacaacattgatgg

SEQ ID NO: 1245854 - DNA, 25 bp, Homo sapien
ttttattgacggaataaacacaaca

SEQ ID NO: 1245855 - DNA, 25 bp, Homo sapien
taaacacaacattgatggtagtagg

SEQ ID NO: 1245856 - DNA, 25 bp, Homo sapien
caacattgatggtagtaggatagag

SEQ ID NO: 1245857 - DNA, 25 bp, Homo sapien
tttgtcctacctcttgggccacaga

SEQ ID NO: 1245858 - DNA, 25 bp, Homo sapien
aatagaaactggcttggaactgccc

SEQ ID NO: 1245859 - DNA, 25 bp, Homo sapien
taagaaaaaggaccggagtgctcac

SEQ ID NO: 1245860 - DNA, 25 bp, Homo sapien
gttacttttcagtcaggccctctca

SEQ ID NO: 1245861 - DNA, 25 bp, Homo sapien
tatcagccactacgacataattgtg

SEQ ID NO: 1245862 - DNA, 25 bp, Homo sapien
ggaatagtagggagagattatagaa

SEQ ID NO: 1245863 - DNA, 25 bp, Homo sapien
ctgggactgtatttcaaatagtgaa

SEQ ID NO: 1245864 - DNA, 25 bp, Homo sapien
tggagtgcagtaacgagatgtcgac

SEQ ID NO: 1245865 - DNA, 25 bp, Homo sapien
gaaagaacagatccagtaagtcagg

SEQ ID NO: 1245866 - DNA, 25 bp, Homo sapien
tattaatgacattctcacggtgctg

SEQ ID NO: 1245867 - DNA, 25 bp, Homo sapien
gatctttggtttgttgcagcagtca

SEQ ID NO: 1245868 - DNA, 25 bp, Homo sapien
gaagctaaggtgtttgtcctacaaa

SEQ ID NO: 1245869 - DNA, 25 bp, Homo sapien
gattcacctgacagacacatgcagg

SEQ ID NO: 1245870 - DNA, 25 bp, Homo sapien
caagggattcacctgacagacacat

SEQ ID NO: 1245871 - DNA, 25 bp, Homo sapien
tgacagacacatgcaggagcaactg

SEQ ID NO: 1245872 - DNA, 25 bp, Homo sapien
cacatgcaggagcaactggctaatt

SEQ ID NO: 1245873 - DNA, 25 bp, Homo sapien
catagaagctattggcaggtttatt

SEQ ID NO: 1245874 - DNA, 25 bp, Homo sapien
ggtcatagaagctattggcaggttt

SEQ ID NO: 1245875 - DNA, 25 bp, Homo sapien
gaagctattggcaggtttatttatt

SEQ ID NO: 1245876 - DNA, 25 bp, Homo sapien
tgggtcatagaagctattggcaggt

SEQ ID NO: 1245877 - DNA, 25 bp, Homo sapien
cagaaaatttgatctcagtcagttt

SEQ ID NO: 1245878 - DNA, 25 bp, Homo sapien
gaaaatttgatctcagtcagttttg

SEQ ID NO: 1245879 - DNA, 25 bp, Homo sapien
aaaatttgatctcagtcagttttgg

SEQ ID NO: 1245880 - DNA, 25 bp, Homo sapien
ttgcaagactagcagaaaatttgat

SEQ ID NO: 1245881 - DNA, 25 bp, Homo sapien
cagactttaaggtggccctgtgacc

SEQ ID NO: 1245882 - DNA, 25 bp, Homo sapien
tcaaagtgatcgctagcctggtcct

SEQ ID NO: 1245883 - DNA, 25 bp, Homo sapien
gaaattggatccttccctgctagag

SEQ ID NO: 1245884 - DNA, 25 bp, Homo sapien
caaatgaattctaccaagccgaggg

SEQ ID NO: 1245885 - DNA, 25 bp, Homo sapien
ccatgaactaactgagggagaacta

SEQ ID NO: 1245886 - DNA, 25 bp, Homo sapien
ttctggacagtacaagaagtgtggt

SEQ ID NO: 1245887 - DNA, 25 bp, Homo sapien
ttaatatgatagaatcacccctatg

SEQ ID NO: 1245888 - DNA, 25 bp, Homo sapien
agccagagcaagagaaagctagtgg

SEQ ID NO: 1245889 - DNA, 25 bp, Homo sapien
tttgatctgtctggtgcttaggggt

SEQ ID NO: 1245890 - DNA, 25 bp, Homo sapien
atctgtctggtgcttaggggtaacc

SEQ ID NO: 1245891 - DNA, 25 bp, Homo sapien
tgatctgtctggtgcttaggggtaa

SEQ ID NO: 1245892 - DNA, 25 bp, Homo sapien
ggactcttagtggtctcatactcct

SEQ ID NO: 1245893 - DNA, 25 bp, Homo sapien
ccggaagtgctgtaggaagtcccgc

SEQ ID NO: 1245894 - DNA, 25 bp, Homo sapien
cctccaccggagtgaggtacggctg

SEQ ID NO: 1245895 - DNA, 25 bp, Homo sapien
aactgcccagcagcgaagcttgagg

SEQ ID NO: 1245896 - DNA, 25 bp, Homo sapien
aagcttgaggctctggccggaagtg

SEQ ID NO: 1245897 - DNA, 25 bp, Homo sapien
gccaggaatgctcgttccgaaagct

SEQ ID NO: 1245898 - DNA, 25 bp, Homo sapien
cggccaggaatgctcgttccgaaag

SEQ ID NO: 1245899 - DNA, 25 bp, Homo sapien
atgctcgttccgaaagctccccgaa

SEQ ID NO: 1245900 - DNA, 25 bp, Homo sapien
ggaatgctcgttccgaaagctcccc

SEQ ID NO: 1245901 - DNA, 25 bp, Homo sapien
taaaagtcgttggtcgcctgtacca

SEQ ID NO: 1245902 - DNA, 25 bp, Homo sapien
aagtgacatgccaattctctgagag

SEQ ID NO: 1245903 - DNA, 25 bp, Homo sapien
aatgttaactgattcggaaggacga

SEQ ID NO: 1245904 - DNA, 25 bp, Homo sapien
gaggctgttcctctaaggtgacacc

SEQ ID NO: 1245905 - DNA, 25 bp, Homo sapien
atatatccagaatccaaaatatgag

SEQ ID NO: 1245906 - DNA, 25 bp, Homo sapien
taatatatccagaatccaaaatatg

SEQ ID NO: 1245907 - DNA, 25 bp, Homo sapien
atatccagaatccaaaatatgagat

SEQ ID NO: 1245908 - DNA, 25 bp, Homo sapien
ataatatatccagaatccaaaatat

SEQ ID NO: 1245909 - DNA, 25 bp, Homo sapien
cgggagggacaacaccagcaaaacg

SEQ ID NO: 1245910 - DNA, 25 bp, Homo sapien
catccgctgtcaaagtgtcactcat

SEQ ID NO: 1245911 - DNA, 25 bp, Homo sapien
cagcaaaacgtactgttgcatgttc

SEQ ID NO: 1245912 - DNA, 25 bp, Homo sapien
taacttcaactcttcgaccaatgac

SEQ ID NO: 1245913 - DNA, 25 bp, Homo sapien
cctctctcgggattgtcccattcta

SEQ ID NO: 1245914 - DNA, 25 bp, Homo sapien
tcccattctactcctaaccagggtc

SEQ ID NO: 1245915 - DNA, 25 bp, Homo sapien
ttaaaatacacagtcccttcgtggc

SEQ ID NO: 1245916 - DNA, 25 bp, Homo sapien
atgctttcctctctcgggattgtcc

SEQ ID NO: 1245917 - DNA, 25 bp, Homo sapien
catgtccagctaacacttttcgtac

SEQ ID NO: 1245918 - DNA, 25 bp, Homo sapien
ttgttcggacgaataaaggatcctc

SEQ ID NO: 1245919 - DNA, 25 bp, Homo sapien
cttgttcggacgaataaaggatcct

SEQ ID NO: 1245920 - DNA, 25 bp, Homo sapien
tctggtccatcttctaacacatagc

SEQ ID NO: 1245921 - DNA, 25 bp, Homo sapien
gatagtctccacaggtttatttcca

SEQ ID NO: 1245922 - DNA, 25 bp, Homo sapien
cacatagcggttcttaattgcagta

SEQ ID NO: 1245923 - DNA, 25 bp, Homo sapien
ttcataatagagtcaaaaccgatag

SEQ ID NO: 1245924 - DNA, 25 bp, Homo sapien
tccaagtggccacaaatttatcctc

SEQ ID NO: 1245925 - DNA, 25 bp, Homo sapien
ttacccagatgcctcgtccaagtca

SEQ ID NO: 1245926 - DNA, 25 bp, Homo sapien
aaatatattgcaggcctccaagtgg

SEQ ID NO: 1245927 - DNA, 25 bp, Homo sapien
gcacccagcccgtttacgatactta

SEQ ID NO: 1245928 - DNA, 25 bp, Homo sapien
catggatacataagcacgtatgcta

SEQ ID NO: 1245929 - DNA, 25 bp, Homo sapien
aaaaacagagttcacatggatacat

SEQ ID NO: 1245930 - DNA, 25 bp, Homo sapien
gagttcacatggatacataagcacg

SEQ ID NO: 1245931 - DNA, 25 bp, Homo sapien
taagcacgtatgctatccactggcc

SEQ ID NO: 1245932 - DNA, 25 bp, Homo sapien
cagagaaacttcttgcaacttgctc

SEQ ID NO: 1245933 - DNA, 25 bp, Homo sapien
tactgcacagttcctcagagaaact

SEQ ID NO: 1245934 - DNA, 25 bp, Homo sapien
cctttttcaccagcacaacttactg

SEQ ID NO: 1245935 - DNA, 25 bp, Homo sapien
tcaccagcacaacttactgcacagt

SEQ ID NO: 1245936 - DNA, 25 bp, Homo sapien
agtctctggcacaggtataaaatcc

SEQ ID NO: 1245937 - DNA, 25 bp, Homo sapien
gtcagattccaataacaagctctcg

SEQ ID NO: 1245938 - DNA, 25 bp, Homo sapien
gtctctggcacaggtataaaatcca

SEQ ID NO: 1245939 - DNA, 25 bp, Homo sapien
aacaagctctcggtgaaaaggatac

SEQ ID NO: 1245940 - DNA, 25 bp, Homo sapien
tcaaggagcccggtgtagaaacttc

SEQ ID NO: 1245941 - DNA, 25 bp, Homo sapien
aacttgcaagcaaaggggtctggga

SEQ ID NO: 1245942 - DNA, 25 bp, Homo sapien
gaaacttccacctgaacatgctggc

SEQ ID NO: 1245943 - DNA, 25 bp, Homo sapien
gaacatgctggcaaacttgcaagca

SEQ ID NO: 1245944 - DNA, 25 bp, Homo sapien
gcccagcctccatgggaaatttctt

SEQ ID NO: 1245945 - DNA, 25 bp, Homo sapien
gcgcccagcctccatgggaaatttc

SEQ ID NO: 1245946 - DNA, 25 bp, Homo sapien
agcctccatgggaaatttcttaata

SEQ ID NO: 1245947 - DNA, 25 bp, Homo sapien
cctccatgggaaatttcttaataga

SEQ ID NO: 1245948 - DNA, 25 bp, Homo sapien
gttgtaacagtatcactccaactgc

SEQ ID NO: 1245949 - DNA, 25 bp, Homo sapien
ggacacatgtgcaaaagcgcatgac

SEQ ID NO: 1245950 - DNA, 25 bp, Homo sapien
taaatagcatctacagggcagagaa

SEQ ID NO: 1245951 - DNA, 25 bp, Homo sapien
agcgcatgacttaggaattgagagg

SEQ ID NO: 1245952 - DNA, 25 bp, Homo sapien
aaaagttcattgtgaggccaggcgc

SEQ ID NO: 1245953 - DNA, 25 bp, Homo sapien
aaaaagttcattgtgaggccaggcg

SEQ ID NO: 1245954 - DNA, 25 bp, Homo sapien
ttttgacaaatctacctttctgata

SEQ ID NO: 1245955 - DNA, 25 bp, Homo sapien
tcagcaatgtgtatcacttcatccc

SEQ ID NO: 1245956 - DNA, 25 bp, Homo sapien
ttttttgacaaatctacctttctga

SEQ ID NO: 1245957 - DNA, 25 bp, Homo sapien
atgtgtatcacttcatcccatgatg

SEQ ID NO: 1245958 - DNA, 25 bp, Homo sapien
gagagatgagctttattgttaatga

SEQ ID NO: 1245959 - DNA, 25 bp, Homo sapien
aaggagagatgagctttattgttaa

SEQ ID NO: 1245960 - DNA, 25 bp, Homo sapien
tattgttaatgaagattcagcaacc

SEQ ID NO: 1245961 - DNA, 25 bp, Homo sapien
taatgaagattcagcaaccaagagt

SEQ ID NO: 1245962 - DNA, 25 bp, Homo sapien
cccacgttattcctgtttgattgag

SEQ ID NO: 1245963 - DNA, 25 bp, Homo sapien
tttgattgaggactaaaaccttcag

SEQ ID NO: 1245964 - DNA, 25 bp, Homo sapien
aaccttcagtacagaaagcgttcca

SEQ ID NO: 1245965 - DNA, 25 bp, Homo sapien
cgttccagttaatactgaaccggag

SEQ ID NO: 1245966 - DNA, 25 bp, Homo sapien
cgagaccgtgcctgctgccaccaca

SEQ ID NO: 1245967 - DNA, 25 bp, Homo sapien
tcgagaccgtgcctgctgccaccac

SEQ ID NO: 1245968 - DNA, 25 bp, Homo sapien
gtcgagaccgtgcctgctgccacca

SEQ ID NO: 1245969 - DNA, 25 bp, Homo sapien
catggatgtgtggtccttggcactg

SEQ ID NO: 1245970 - DNA, 25 bp, Homo sapien
ctgcccgtgacctcactggccttgg

SEQ ID NO: 1245971 - DNA, 25 bp, Homo sapien
ccttggccacgttcatccgcatgga

SEQ ID NO: 1245972 - DNA, 25 bp, Homo sapien
cgcacagatccacgaacttgctggc

SEQ ID NO: 1245973 - DNA, 25 bp, Homo sapien
ggaacaggagatactaactgcacat

SEQ ID NO: 1245974 - DNA, 25 bp, Homo sapien
aaagcagctacgaggtggaacagga

SEQ ID NO: 1245975 - DNA, 25 bp, Homo sapien
caatgcatggtttaggtaaagcagc

SEQ ID NO: 1245976 - DNA, 25 bp, Homo sapien
ccttggaggtacgtgtcaatgcatg

SEQ ID NO: 1245977 - DNA, 25 bp, Homo sapien
ggacagttcataagactgtttcagg

SEQ ID NO: 1245978 - DNA, 25 bp, Homo sapien
gacagttcataagactgtttcaggc

SEQ ID NO: 1245979 - DNA, 25 bp, Homo sapien
ggaaccaccacaagaattcagctca

SEQ ID NO: 1245980 - DNA, 25 bp, Homo sapien
ccgggtgttcataggaaccaccaca

SEQ ID NO: 1245981 - DNA, 25 bp, Homo sapien
tggctgtttcttcccgggtgttcat

SEQ ID NO: 1245982 - DNA, 25 bp, Homo sapien
cacaagaattcagctcagttactgt

SEQ ID NO: 1245983 - DNA, 25 bp, Homo sapien
gttgttagactcaaggtagagttcc

SEQ ID NO: 1245984 - DNA, 25 bp, Homo sapien
tccaggcctgggcaccccgcgacac

SEQ ID NO: 1245985 - DNA, 25 bp, Homo sapien
tagactcaaggtagagttcctccag

SEQ ID NO: 1245986 - DNA, 25 bp, Homo sapien
aaatgttgttagactcaaggtagag

SEQ ID NO: 1245987 - DNA, 25 bp, Homo sapien
gaggaaagatctaataacttgactg

SEQ ID NO: 1245988 - DNA, 25 bp, Homo sapien
ggcaggtgggctatcagatacagct

SEQ ID NO: 1245989 - DNA, 25 bp, Homo sapien
caggtgggctatcagatacagctga

SEQ ID NO: 1245990 - DNA, 25 bp, Homo sapien
gactgtctggagaacatctgttggc

SEQ ID NO: 1245991 - DNA, 25 bp, Homo sapien
catagtccacattatacagggttca

SEQ ID NO: 1245992 - DNA, 25 bp, Homo sapien
acactattgtatcaggcatttaggg

SEQ ID NO: 1245993 - DNA, 25 bp, Homo sapien
tatgaaaactgcttcactaagaatt

SEQ ID NO: 1245994 - DNA, 25 bp, Homo sapien
gaattgactgaacactattgtatca

SEQ ID NO: 1245995 - DNA, 25 bp, Homo sapien
aaatgctatggggtatcaaccagac

SEQ ID NO: 1245996 - DNA, 25 bp, Homo sapien
acagaacaatgtaaaatgctatggg

SEQ ID NO: 1245997 - DNA, 25 bp, Homo sapien
tatcaaccagactcggtttgtaaat

SEQ ID NO: 1245998 - DNA, 25 bp, Homo sapien
gattacacagaacaatgtaaaatgc

SEQ ID NO: 1245999 - DNA, 25 bp, Homo sapien
caattccagcatccggaaaatgtag

SEQ ID NO: 1246000 - DNA, 25 bp, Homo sapien
gtcagagaggattaattgttctaac

SEQ ID NO: 1246001 - DNA, 25 bp, Homo sapien
tccagcatccggaaaatgtagagaa

SEQ ID NO: 1246002 - DNA, 25 bp, Homo sapien
tgtcagagaggattaattgttctaa

SEQ ID NO: 1246003 - DNA, 25 bp, Homo sapien
tgaaagtagctgaagtatagtgtgg

SEQ ID NO: 1246004 - DNA, 25 bp, Homo sapien
gtgaaagtagctgaagtatagtgtg

SEQ ID NO: 1246005 - DNA, 25 bp, Homo sapien
gaatgaagttacacagtagaagtga

SEQ ID NO: 1246006 - DNA, 25 bp, Homo sapien
aagaggaatgaagttacacagtaga

SEQ ID NO: 1246007 - DNA, 25 bp, Homo sapien
gatgggaacatggacgttttgcacc

SEQ ID NO: 1246008 - DNA, 25 bp, Homo sapien
tacttcaaggatgggaacatggacg

SEQ ID NO: 1246009 - DNA, 25 bp, Homo sapien
gatatctgattgtcgtttactacca

SEQ ID NO: 1246010 - DNA, 25 bp, Homo sapien
ttactaccaggtacttcaaggatgg

SEQ ID NO: 1246011 - DNA, 25 bp, Homo sapien
cagtgtgctgggcatactccgagca

SEQ ID NO: 1246012 - DNA, 25 bp, Homo sapien
tctgccatgagagtggaaagaggca

SEQ ID NO: 1246013 - DNA, 25 bp, Homo sapien
tgggcatactccgagcagctcttac

SEQ ID NO: 1246014 - DNA, 25 bp, Homo sapien
gaaagaggcaacagtgtgctgggca

SEQ ID NO: 1246015 - DNA, 25 bp, Homo sapien
gaggaggtatttctctttcgattta

SEQ ID NO: 1246016 - DNA, 25 bp, Homo sapien
tgaggaggtatttctctttcgattt

SEQ ID NO: 1246017 - DNA, 25 bp, Homo sapien
tctgaggaggtatttctctttcgat

SEQ ID NO: 1246018 - DNA, 25 bp, Homo sapien
ctgaggaggtatttctctttcgatt

SEQ ID NO: 1246019 - DNA, 25 bp, Homo sapien
tccacttaagtgtgaagtgaactaa

SEQ ID NO: 1246020 - DNA, 25 bp, Homo sapien
cacttaagtgtgaagtgaactaatt

SEQ ID NO: 1246021 - DNA, 25 bp, Homo sapien
gtccacttaagtgtgaagtgaacta

SEQ ID NO: 1246022 - DNA, 25 bp, Homo sapien
aagtccacttaagtgtgaagtgaac

SEQ ID NO: 1246023 - DNA, 25 bp, Homo sapien
cctagttctaatctgaggcagggaa

SEQ ID NO: 1246024 - DNA, 25 bp, Homo sapien
accagcaacaggaaagcatgtccct

SEQ ID NO: 1246025 - DNA, 25 bp, Homo sapien
gcggtacgttcatgccacttttgca

SEQ ID NO: 1246026 - DNA, 25 bp, Homo sapien
taagcaatcccctctagaaagacca

SEQ ID NO: 1246027 - DNA, 25 bp, Homo sapien
ttggtaacttctctagctcattgaa

SEQ ID NO: 1246028 - DNA, 25 bp, Homo sapien
tctctagctcattgaaaaacgacca

SEQ ID NO: 1246029 - DNA, 25 bp, Homo sapien
gcaggacaaagcccgtagacttggt

SEQ ID NO: 1246030 - DNA, 25 bp, Homo sapien
acttctctagctcattgaaaaacga

SEQ ID NO: 1246031 - DNA, 25 bp, Homo sapien
gctggccaatgctggcgataatgag

SEQ ID NO: 1246032 - DNA, 25 bp, Homo sapien
gctggcgataatgagtagtcgcgcc

SEQ ID NO: 1246033 - DNA, 25 bp, Homo sapien
ccaatgctggcgataatgagtagtc

SEQ ID NO: 1246034 - DNA, 25 bp, Homo sapien
gataatgagtagtcgcgccgtctct

SEQ ID NO: 1246035 - DNA, 25 bp, Homo sapien
gaactggtatctgggatgggctgtg

SEQ ID NO: 1246036 - DNA, 25 bp, Homo sapien
ttttccggatccttatgtccaccag

SEQ ID NO: 1246037 - DNA, 25 bp, Homo sapien
gctgtgaggaattcttcgctgagtc

SEQ ID NO: 1246038 - DNA, 25 bp, Homo sapien
ttttcggtagtcaagctcagctctc

SEQ ID NO: 1246039 - DNA, 25 bp, Homo sapien
aggccaccagtgtatacgcacgtac

SEQ ID NO: 1246040 - DNA, 25 bp, Homo sapien
caagaacataaacagtctcccaggt

SEQ ID NO: 1246041 - DNA, 25 bp, Homo sapien
cctcctgctgaaagatactgctctt

SEQ ID NO: 1246042 - DNA, 25 bp, Homo sapien
ctgagaacctcttttgatacccaag

SEQ ID NO: 1246043 - DNA, 25 bp, Homo sapien
cctcgccccaggaaagtgcctatag

SEQ ID NO: 1246044 - DNA, 25 bp, Homo sapien
aatgctttcctgctacgcacggtgg

SEQ ID NO: 1246045 - DNA, 25 bp, Homo sapien
aaatgctttcctgctacgcacggtg

SEQ ID NO: 1246046 - DNA, 25 bp, Homo sapien
tgataaaccaaaggccactataagt

SEQ ID NO: 1246047 - DNA, 25 bp, Homo sapien
agcaaaagagatgaatgataaacca

SEQ ID NO: 1246048 - DNA, 25 bp, Homo sapien
caaacaaacaaaggataggtaagcg

SEQ ID NO: 1246049 - DNA, 25 bp, Homo sapien
gagatgaatgataaaccaaaggcca

SEQ ID NO: 1246050 - DNA, 25 bp, Homo sapien
agcataagtggttgctgtgttttga

SEQ ID NO: 1246051 - DNA, 25 bp, Homo sapien
agtagctggtttttcagcataagtg

SEQ ID NO: 1246052 - DNA, 25 bp, Homo sapien
gagttcccaatcttcaggtgcacca

SEQ ID NO: 1246053 - DNA, 25 bp, Homo sapien
ttcccaatcttcaggtgcaccatat

SEQ ID NO: 1246054 - DNA, 25 bp, Homo sapien
caggactttctgatcaagttgatga

SEQ ID NO: 1246055 - DNA, 25 bp, Homo sapien
ctgatcaagttgatgagggtatttt

SEQ ID NO: 1246056 - DNA, 25 bp, Homo sapien
atcaagttgatgagggtattttatc

SEQ ID NO: 1246057 - DNA, 25 bp, Homo sapien
ctttctgatcaagttgatgagggta

SEQ ID NO: 1246058 - DNA, 25 bp, Homo sapien
aggccgatgattcagagtttaagga

SEQ ID NO: 1246059 - DNA, 25 bp, Homo sapien
taggccgatgattcagagtttaagg

SEQ ID NO: 1246060 - DNA, 25 bp, Homo sapien
ctaggccgatgattcagagtttaag

SEQ ID NO: 1246061 - DNA, 25 bp, Homo sapien
ggccgatgattcagagtttaaggaa

SEQ ID NO: 1246062 - DNA, 25 bp, Homo sapien
aacggacctaagtgccctttgacag

SEQ ID NO: 1246063 - DNA, 25 bp, Homo sapien
ggggaaagcctgagtcttgtaccac

SEQ ID NO: 1246064 - DNA, 25 bp, Homo sapien
cttacttaagtaagtcttgctctgt

SEQ ID NO: 1246065 - DNA, 25 bp, Homo sapien
tgagcccagcgcctggctgtatctt

SEQ ID NO: 1246066 - DNA, 25 bp, Homo sapien
ctgacacaggaactttgagaagacg

SEQ ID NO: 1246067 - DNA, 25 bp, Homo sapien
gaactttgagaagacgtgacagcaa

SEQ ID NO: 1246068 - DNA, 25 bp, Homo sapien
gacagcaatcccttcaccttttgaa

SEQ ID NO: 1246069 - DNA, 25 bp, Homo sapien
ttcataggacaacagaaggtctgac

SEQ ID NO: 1246070 - DNA, 25 bp, Homo sapien
ggcagtagcttacccttaaaatcaa

SEQ ID NO: 1246071 - DNA, 25 bp, Homo sapien
tacgaggactaagcttgactttgac

SEQ ID NO: 1246072 - DNA, 25 bp, Homo sapien
gacagatccgataaagcatgctaca

SEQ ID NO: 1246073 - DNA, 25 bp, Homo sapien
tggtctccatttagaatcaaactgt

SEQ ID NO: 1246074 - DNA, 25 bp, Homo sapien
actttaggtcattttccagctcgat

SEQ ID NO: 1246075 - DNA, 25 bp, Homo sapien
gactttaggtcattttccagctcga

SEQ ID NO: 1246076 - DNA, 25 bp, Homo sapien
cctttgttttgacagtagaattgtt

SEQ ID NO: 1246077 - DNA, 25 bp, Homo sapien
cagacacgataagcagtgtggtctt

SEQ ID NO: 1246078 - DNA, 25 bp, Homo sapien
tatttccggtgaaccccagacacga

SEQ ID NO: 1246079 - DNA, 25 bp, Homo sapien
tgaaccccagacacgataagcagtg

SEQ ID NO: 1246080 - DNA, 25 bp, Homo sapien
ctttattattgctattatgtataag

SEQ ID NO: 1246081 - DNA, 25 bp, Homo sapien
attattgctattatgtataagccta

SEQ ID NO: 1246082 - DNA, 25 bp, Homo sapien
ttattattgctattatgtataagcc

SEQ ID NO: 1246083 - DNA, 25 bp, Homo sapien
aggttcaaagcctttattattgcta

SEQ ID NO: 1246084 - DNA, 25 bp, Homo sapien
tgccatcgggaaggatatttctaaa

SEQ ID NO: 1246085 - DNA, 25 bp, Homo sapien
acctctcagggttttagtgccatcg

SEQ ID NO: 1246086 - DNA, 25 bp, Homo sapien
cctggattgcaggatagctctgtag

SEQ ID NO: 1246087 - DNA, 25 bp, Homo sapien
gatcacatatttgagcagtggtcac

SEQ ID NO: 1246088 - DNA, 25 bp, Homo sapien
aaactgaaggaacggtgcggtgatc

SEQ ID NO: 1246089 - DNA, 25 bp, Homo sapien
tattctccgtgggaactgacggaac

SEQ ID NO: 1246090 - DNA, 25 bp, Homo sapien
tgtcaagcaagataacagggacttg

SEQ ID NO: 1246091 - DNA, 25 bp, Homo sapien
cggtgatccttgtcgatgtcaagca

SEQ ID NO: 1246092 - DNA, 25 bp, Homo sapien
cagttgttccacacacggagttatc

SEQ ID NO: 1246093 - DNA, 25 bp, Homo sapien
ggtacagtccctgcaatattgtaag

SEQ ID NO: 1246094 - DNA, 25 bp, Homo sapien
cataaaagctgtctacgtgcatact

SEQ ID NO: 1246095 - DNA, 25 bp, Homo sapien
ggacctggtgctttcccaaatcagg

SEQ ID NO: 1246096 - DNA, 25 bp, Homo sapien
tgttgggcttacacagactgactac

SEQ ID NO: 1246097 - DNA, 25 bp, Homo sapien
ttttgttttatcacccctgaggctg

SEQ ID NO: 1246098 - DNA, 25 bp, Homo sapien
tctgccatgcatctaggaatactac

SEQ ID NO: 1246099 - DNA, 25 bp, Homo sapien
cagacctacctaagtgcaagctgtg

SEQ ID NO: 1246100 - DNA, 25 bp, Homo sapien
gagccctgggaagaaatcaagcaca

SEQ ID NO: 1246101 - DNA, 25 bp, Homo sapien
gaccaaaatggaaactagagccctg

SEQ ID NO: 1246102 - DNA, 25 bp, Homo sapien
aacttaacaacagaaggccgaggcg

SEQ ID NO: 1246103 - DNA, 25 bp, Homo sapien
cactttggccatcgaaggtgcaggg

SEQ ID NO: 1246104 - DNA, 25 bp, Homo sapien
tactgcaatcaacttgctaaagatt

SEQ ID NO: 1246105 - DNA, 25 bp, Homo sapien
ttgtgagttctactgcaatcaactt

SEQ ID NO: 1246106 - DNA, 25 bp, Homo sapien
tctactgcaatcaacttgctaaaga

SEQ ID NO: 1246107 - DNA, 25 bp, Homo sapien
gagttctactgcaatcaacttgcta

SEQ ID NO: 1246108 - DNA, 25 bp, Homo sapien
agtcagatgcattaaggcaccaggg

SEQ ID NO: 1246109 - DNA, 25 bp, Homo sapien
gtttcaaatgtgagctgcgtatggg

SEQ ID NO: 1246110 - DNA, 25 bp, Homo sapien
agctgcgtatgggaaggcccaagaa

SEQ ID NO: 1246111 - DNA, 25 bp, Homo sapien
caagaacagtctctgaatgcagaac

SEQ ID NO: 1246112 - DNA, 25 bp, Homo sapien
atgggggagtgtggtcagggctgtc

SEQ ID NO: 1246113 - DNA, 25 bp, Homo sapien
tatgggggagtgtggtcagggctgt

SEQ ID NO: 1246114 - DNA, 25 bp, Homo sapien
ctatgggggagtgtggtcagggctg

SEQ ID NO: 1246115 - DNA, 25 bp, Homo sapien
ttatgtgagtttcggggtgaagact

SEQ ID NO: 1246116 - DNA, 25 bp, Homo sapien
gagtttcggggtgaagactggcaag

SEQ ID NO: 1246117 - DNA, 25 bp, Homo sapien
cctttatgtgagtttcggggtgaag

SEQ ID NO: 1246118 - DNA, 25 bp, Homo sapien
ttcctttatgtgagtttcggggtga

SEQ ID NO: 1246119 - DNA, 25 bp, Homo sapien
ggttgcttgagcacaagttggatta

SEQ ID NO: 1246120 - DNA, 25 bp, Homo sapien
atgagactccggaagcccaactctg

SEQ ID NO: 1246121 - DNA, 25 bp, Homo sapien
tagtaataacgttactgaccacatg

SEQ ID NO: 1246122 - DNA, 25 bp, Homo sapien
gagcacaagttggattagtaataac

SEQ ID NO: 1246123 - DNA, 25 bp, Homo sapien
ctacaaggccaggtcatgcagggac

SEQ ID NO: 1246124 - DNA, 25 bp, Homo sapien
atcattgttgaacttcaactagaag

SEQ ID NO: 1246125 - DNA, 25 bp, Homo sapien
tcattgttgaacttcaactagaaga

SEQ ID NO: 1246126 - DNA, 25 bp, Homo sapien
aatcattgttgaacttcaactagaa

SEQ ID NO: 1246127 - DNA, 25 bp, Homo sapien
gccattgccatggtatagccaaaaa

SEQ ID NO: 1246128 - DNA, 25 bp, Homo sapien
aagactgtcaaccccacaaaagcca

SEQ ID NO: 1246129 - DNA, 25 bp, Homo sapien
ccactaataattagctctaggcccc

SEQ ID NO: 1246130 - DNA, 25 bp, Homo sapien
catcatgccacccaagtgaaccaaa

SEQ ID NO: 1246131 - DNA, 25 bp, Homo sapien
gatgaatggaataaagcctgcttgc

SEQ ID NO: 1246132 - DNA, 25 bp, Homo sapien
cttcctacagcagggacatcatgcc

SEQ ID NO: 1246133 - DNA, 25 bp, Homo sapien
taaacttagtggtgtgcagtaccca

SEQ ID NO: 1246134 - DNA, 25 bp, Homo sapien
tctgcacatgagctgtgagatccac

SEQ ID NO: 1246135 - DNA, 25 bp, Homo sapien
ggttttcttagcatatcctcctggg

SEQ ID NO: 1246136 - DNA, 25 bp, Homo sapien
tggtgggcggacaccgaagtcaact

SEQ ID NO: 1246137 - DNA, 25 bp, Homo sapien
caacaacccacaggattggaatggt

SEQ ID NO: 1246138 - DNA, 25 bp, Homo sapien
ccataccgttgacgcgctgtggcag

SEQ ID NO: 1246139 - DNA, 25 bp, Homo sapien
ccgttctcattagatagcaccgcca

SEQ ID NO: 1246140 - DNA, 25 bp, Homo sapien
gcactggtagcatccccgttctcat

SEQ ID NO: 1246141 - DNA, 25 bp, Homo sapien
agatcttcagcactggtagcatccc

SEQ ID NO: 1246142 - DNA, 25 bp, Homo sapien
cgttctcattagatagcaccgccat

SEQ ID NO: 1246143 - DNA, 25 bp, Homo sapien
gactgggcttgatgcatccttcata

SEQ ID NO: 1246144 - DNA, 25 bp, Homo sapien
gcattccctctgagtctgtatgaga

SEQ ID NO: 1246145 - DNA, 25 bp, Homo sapien
tcatagcacttgtcaaggcaccact

SEQ ID NO: 1246146 - DNA, 25 bp, Homo sapien
tgctgtgctagagggcttcatgtcc

SEQ ID NO: 1246147 - DNA, 25 bp, Homo sapien
gatgtcagcccaaggagaaacagca

SEQ ID NO: 1246148 - DNA, 25 bp, Homo sapien
gagggtcttgcacatggctggatcc

SEQ ID NO: 1246149 - DNA, 25 bp, Homo sapien
gctaaaggaatttgccaaggcagtc

SEQ ID NO: 1246150 - DNA, 25 bp, Homo sapien
agtcaaaaggtcttcccgagcaggg

SEQ ID NO: 1246151 - DNA, 25 bp, Homo sapien
catagaacctgtatagcctcacaaa

SEQ ID NO: 1246152 - DNA, 25 bp, Homo sapien
tcctccaggttgtcgcaggcatgag

SEQ ID NO: 1246153 - DNA, 25 bp, Homo sapien
catgtgactcttcatcttgcctaga

SEQ ID NO: 1246154 - DNA, 25 bp, Homo sapien
caggcatgaggaggattcaccatag

SEQ ID NO: 1246155 - DNA, 25 bp, Homo sapien
catggtaggaatcgtggcaactccc

SEQ ID NO: 1246156 - DNA, 25 bp, Homo sapien
agcacggcagatgggaacccaaaga

SEQ ID NO: 1246157 - DNA, 25 bp, Homo sapien
gtatgtagccaaccatagggcccac

SEQ ID NO: 1246158 - DNA, 25 bp, Homo sapien
tgtgcacacgacgatagggcaggct

SEQ ID NO: 1246159 - DNA, 25 bp, Homo sapien
gttacttctaggggcagtagaatga

SEQ ID NO: 1246160 - DNA, 25 bp, Homo sapien
ggttacttctaggggcagtagaatg

SEQ ID NO: 1246161 - DNA, 25 bp, Homo sapien
ttacttctaggggcagtagaatgaa

SEQ ID NO: 1246162 - DNA, 25 bp, Homo sapien
gacggggcaattgcaattgtgatgt

SEQ ID NO: 1246163 - DNA, 25 bp, Homo sapien
cggggcaattgcaattgtgatgtgt

SEQ ID NO: 1246164 - DNA, 25 bp, Homo sapien
acggggcaattgcaattgtgatgtg

SEQ ID NO: 1246165 - DNA, 25 bp, Homo sapien
gggcaattgcaattgtgatgtgtgt

SEQ ID NO: 1246166 - DNA, 25 bp, Homo sapien
tgctctcagtgacctgtccccagct

SEQ ID NO: 1246167 - DNA, 25 bp, Homo sapien
ccagctctcaggctttagttttagg

SEQ ID NO: 1246168 - DNA, 25 bp, Homo sapien
aggcttcctttgaagcagattctca

SEQ ID NO: 1246169 - DNA, 25 bp, Homo sapien
tctcaggctttagttttaggcttcc

SEQ ID NO: 1246170 - DNA, 25 bp, Homo sapien
tattttatctccagcgcacaacaag

SEQ ID NO: 1246171 - DNA, 25 bp, Homo sapien
ttttgaacagcggaagaatgaggaa

SEQ ID NO: 1246172 - DNA, 25 bp, Homo sapien
gcatgtggaaaacgagcccttcttt

SEQ ID NO: 1246173 - DNA, 25 bp, Homo sapien
ctgagggatcagggccgtctgaaca

SEQ ID NO: 1246174 - DNA, 25 bp, Homo sapien
gctggagagtggacgcacatggagg

SEQ ID NO: 1246175 - DNA, 25 bp, Homo sapien
aggccatggagggatggaaccccca

SEQ ID NO: 1246176 - DNA, 25 bp, Homo sapien
ccatggagggatggaacccccagag

SEQ ID NO: 1246177 - DNA, 25 bp, Homo sapien
gcagacatgggctggagagtggacg

SEQ ID NO: 1246178 - DNA, 25 bp, Homo sapien
gggaggaggaagcagcagagaaggg

SEQ ID NO: 1246179 - DNA, 25 bp, Homo sapien
ggaggaggaagcagcagagaagggg

SEQ ID NO: 1246180 - DNA, 25 bp, Homo sapien
ctaagtatggagccaggggaggagg

SEQ ID NO: 1246181 - DNA, 25 bp, Homo sapien
atggagccaggggaggaggaagcag

SEQ ID NO: 1246182 - DNA, 25 bp, Homo sapien
cagagaagcagacggctcttgggag

SEQ ID NO: 1246183 - DNA, 25 bp, Homo sapien
agagaagcagacggctcttgggaga

SEQ ID NO: 1246184 - DNA, 25 bp, Homo sapien
ccagagaagcagacggctcttggga

SEQ ID NO: 1246185 - DNA, 25 bp, Homo sapien
ggccagagaagcagacggctcttgg

SEQ ID NO: 1246186 - DNA, 25 bp, Homo sapien
taaaatacggacgtccaggtgtgca

SEQ ID NO: 1246187 - DNA, 25 bp, Homo sapien
tcgttagaagcgcaggatctcggcc

SEQ ID NO: 1246188 - DNA, 25 bp, Homo sapien
taagcaaggttaggatcacccaggg

SEQ ID NO: 1246189 - DNA, 25 bp, Homo sapien
gggatgaaatcctaagcgccactag

SEQ ID NO: 1246190 - DNA, 25 bp, Homo sapien
ctgtgcagggaggcatacctgagtc

SEQ ID NO: 1246191 - DNA, 25 bp, Homo sapien
caggtgccacccctaagcaaatggt

SEQ ID NO: 1246192 - DNA, 25 bp, Homo sapien
ggtccaggtgggatgtgcagacgca

SEQ ID NO: 1246193 - DNA, 25 bp, Homo sapien
ccagtcagtgttgccggtagccagt

SEQ ID NO: 1246194 - DNA, 25 bp, Homo sapien
ttctggaaagccgagagcccagtca

SEQ ID NO: 1246195 - DNA, 25 bp, Homo sapien
ctatagggaaaccaaacatctcgta

SEQ ID NO: 1246196 - DNA, 25 bp, Homo sapien
agacccgtacaacgggttctctgct

SEQ ID NO: 1246197 - DNA, 25 bp, Homo sapien
tctcagggctaacttggtgctagct

SEQ ID NO: 1246198 - DNA, 25 bp, Homo sapien
ccggtgcgacctatgtgcatgagca

SEQ ID NO: 1246199 - DNA, 25 bp, Homo sapien
tgcctctcagcaggtaaggagagtg

SEQ ID NO: 1246200 - DNA, 25 bp, Homo sapien
gttgtgctttcaggtgacctcaaag

SEQ ID NO: 1246201 - DNA, 25 bp, Homo sapien
tggttgtgctttcaggtgacctcaa

SEQ ID NO: 1246202 - DNA, 25 bp, Homo sapien
gtgctttcaggtgacctcaaagcag

SEQ ID NO: 1246203 - DNA, 25 bp, Homo sapien
tgtgctttcaggtgacctcaaagca

SEQ ID NO: 1246204 - DNA, 25 bp, Homo sapien
attaggatgcctcggagatggatgc

SEQ ID NO: 1246205 - DNA, 25 bp, Homo sapien
atgccgtagggcagagcattcggaa

SEQ ID NO: 1246206 - DNA, 25 bp, Homo sapien
ctttgctccaagttcattaggatgc

SEQ ID NO: 1246207 - DNA, 25 bp, Homo sapien
cgtagggcagagcattcggaaaacc

SEQ ID NO: 1246208 - DNA, 25 bp, Homo sapien
gagacccatactgtaaaatgtatca

SEQ ID NO: 1246209 - DNA, 25 bp, Homo sapien
aatgtatcaagcttgcctatcacag

SEQ ID NO: 1246210 - DNA, 25 bp, Homo sapien
ggcactcaagatgtaagttgagtaa

SEQ ID NO: 1246211 - DNA, 25 bp, Homo sapien
gcctatcacagtacttaatttgcaa

SEQ ID NO: 1246212 - DNA, 25 bp, Homo sapien
tgcccaaagcttcgaatccctggac

SEQ ID NO: 1246213 - DNA, 25 bp, Homo sapien
tgtggttgtctctcaagtccattac

SEQ ID NO: 1246214 - DNA, 25 bp, Homo sapien
ggaccccgcgtgctcttcctaagaa

SEQ ID NO: 1246215 - DNA, 25 bp, Homo sapien
agtccattacaacccatgccctgcc

SEQ ID NO: 1246216 - DNA, 25 bp, Homo sapien
aattaacatcacagtcagtaagggc

SEQ ID NO: 1246217 - DNA, 25 bp, Homo sapien
tcaggccacgagtaaacttctaaca

SEQ ID NO: 1246218 - DNA, 25 bp, Homo sapien
cctgttgattaagagttttgatttc

SEQ ID NO: 1246219 - DNA, 25 bp, Homo sapien
cagtaagggctgatgtaagagcctc

SEQ ID NO: 1246220 - DNA, 25 bp, Homo sapien
tactgaaaagccgtgccgatgggat

SEQ ID NO: 1246221 - DNA, 25 bp, Homo sapien
tgatcaaagcgcgtgacccactaaa

SEQ ID NO: 1246222 - DNA, 25 bp, Homo sapien
tctgcatgctttccgctgtaggcgg

SEQ ID NO: 1246223 - DNA, 25 bp, Homo sapien
ggcgatggccagcaacctcattgaa

SEQ ID NO: 1246224 - DNA, 25 bp, Homo sapien
tccagagggttgaaatcaaaagccc

SEQ ID NO: 1246225 - DNA, 25 bp, Homo sapien
gaggcataatggctatgtctatgtg

SEQ ID NO: 1246226 - DNA, 25 bp, Homo sapien
aatggctatgtctatgtgatgttca

SEQ ID NO: 1246227 - DNA, 25 bp, Homo sapien
gaaggaagcctctcagaggcataat

SEQ ID NO: 1246228 - DNA, 25 bp, Homo sapien
ccatccatcatggactgcttgccat

SEQ ID NO: 1246229 - DNA, 25 bp, Homo sapien
cttcccatccatcatggactgcttg

SEQ ID NO: 1246230 - DNA, 25 bp, Homo sapien
ggactgcttgccatccagttcactg

SEQ ID NO: 1246231 - DNA, 25 bp, Homo sapien
cacgaccttcccatccatcatggac

SEQ ID NO: 1246232 - DNA, 25 bp, Homo sapien
agacctcattcgtctcagggaacat

SEQ ID NO: 1246233 - DNA, 25 bp, Homo sapien
tgaatatatcacgaggaccagcatg

SEQ ID NO: 1246234 - DNA, 25 bp, Homo sapien
cgaggaccagcatgacggtgaatct

SEQ ID NO: 1246235 - DNA, 25 bp, Homo sapien
tatcacgaggaccagcatgacggtg

SEQ ID NO: 1246236 - DNA, 25 bp, Homo sapien
ctgtcctgaatatatcacgaggacc

SEQ ID NO: 1246237 - DNA, 25 bp, Homo sapien
ctgcctgccagtgactaggtgagaa

SEQ ID NO: 1246238 - DNA, 25 bp, Homo sapien
gcctgcctgccagtgactaggtgag

SEQ ID NO: 1246239 - DNA, 25 bp, Homo sapien
cctgcctgccagtgactaggtgaga

SEQ ID NO: 1246240 - DNA, 25 bp, Homo sapien
agccttccagtttccaacagtgtcc

SEQ ID NO: 1246241 - DNA, 25 bp, Homo sapien
ttccagtttccaacagtgtcctggg

SEQ ID NO: 1246242 - DNA, 25 bp, Homo sapien
agtttccaacagtgtcctggggaga

SEQ ID NO: 1246243 - DNA, 25 bp, Homo sapien
tccaacagtgtcctggggagaggcc

SEQ ID NO: 1246244 - DNA, 25 bp, Homo sapien
accctttaggctggttgctgttggt

SEQ ID NO: 1246245 - DNA, 25 bp, Homo sapien
gaccctttaggctggttgctgttgg

SEQ ID NO: 1246246 - DNA, 25 bp, Homo sapien
tggggaccctttaggctggttgctg

SEQ ID NO: 1246247 - DNA, 25 bp, Homo sapien
tctgtccactgggtgacccgtagga

SEQ ID NO: 1246248 - DNA, 25 bp, Homo sapien
gtatctgtccactgggtgacccgta

SEQ ID NO: 1246249 - DNA, 25 bp, Homo sapien
tgtccactgggtgacccgtaggaca

SEQ ID NO: 1246250 - DNA, 25 bp, Homo sapien
tccactgggtgacccgtaggacacc

SEQ ID NO: 1246251 - DNA, 25 bp, Homo sapien
ttaaaacgcaaatcgaagcatgcat

SEQ ID NO: 1246252 - DNA, 25 bp, Homo sapien
gcttgggttgcctcagtgtttcccc

SEQ ID NO: 1246253 - DNA, 25 bp, Homo sapien
aacgcaaatcgaagcatgcattctg

SEQ ID NO: 1246254 - DNA, 25 bp, Homo sapien
ggcctgcttgggttgcctcagtgtt

SEQ ID NO: 1246255 - DNA, 25 bp, Homo sapien
tttttatggccttatcctggttgga

SEQ ID NO: 1246256 - DNA, 25 bp, Homo sapien
ctttttatggccttatcctggttgg

SEQ ID NO: 1246257 - DNA, 25 bp, Homo sapien
ttatggccttatcctggttggactt

SEQ ID NO: 1246258 - DNA, 25 bp, Homo sapien
ttttatggccttatcctggttggac

SEQ ID NO: 1246259 - DNA, 25 bp, Homo sapien
tggattctcgtctttttatccttcc

SEQ ID NO: 1246260 - DNA, 25 bp, Homo sapien
tataaagactgtccatgagctgggc

SEQ ID NO: 1246261 - DNA, 25 bp, Homo sapien
ttgcttataaagactgtccatgagc

SEQ ID NO: 1246262 - DNA, 25 bp, Homo sapien
tccctatttgcttataaagactgtc

SEQ ID NO: 1246263 - DNA, 25 bp, Homo sapien
cttgaggcagtgcggataactctgg

SEQ ID NO: 1246264 - DNA, 25 bp, Homo sapien
aagaaggctttctgaacccgctttg

SEQ ID NO: 1246265 - DNA, 25 bp, Homo sapien
atcaaaggctttagcgtctaaaact

SEQ ID NO: 1246266 - DNA, 25 bp, Homo sapien
cacttctgtgtaatcgtcctcattc

SEQ ID NO: 1246267 - DNA, 25 bp, Homo sapien
gcgtctaaaacttgttcctgaagaa

SEQ ID NO: 1246268 - DNA, 25 bp, Homo sapien
ctctgcgtggccgtggcttgctgca

SEQ ID NO: 1246269 - DNA, 25 bp, Homo sapien
catggagatacgcaggtctctgatg

SEQ ID NO: 1246270 - DNA, 25 bp, Homo sapien
ctggaggacccatggagatacgcag

SEQ ID NO: 1246271 - DNA, 25 bp, Homo sapien
tgatgggaggtctcagcgtgggcac

SEQ ID NO: 1246272 - DNA, 25 bp, Homo sapien
tggccaggtagtgaagggcagacat

SEQ ID NO: 1246273 - DNA, 25 bp, Homo sapien
ctggccaggtagtgaagggcagaca

SEQ ID NO: 1246274 - DNA, 25 bp, Homo sapien
cagccacagagtgagctgtgtgccc

SEQ ID NO: 1246275 - DNA, 25 bp, Homo sapien
tatcagatggtttaaaagtgccacc

SEQ ID NO: 1246276 - DNA, 25 bp, Homo sapien
ttgggcccagtgcacccacatgtgg

SEQ ID NO: 1246277 - DNA, 25 bp, Homo sapien
tgtgtgcccatacagactgtgccgc

SEQ ID NO: 1246278 - DNA, 25 bp, Homo sapien
gccagggtccgggaagctcttcttg

SEQ ID NO: 1246279 - DNA, 25 bp, Homo sapien
ccttttcggtggtctcctcaagtct

SEQ ID NO: 1246280 - DNA, 25 bp, Homo sapien
ggtggtctcctcaagtctgtgccgg

SEQ ID NO: 1246281 - DNA, 25 bp, Homo sapien
gaagatgaagctggccagatgcgca

SEQ ID NO: 1246282 - DNA, 25 bp, Homo sapien
cagtgtatcatccttccgtgcgtgg

SEQ ID NO: 1246283 - DNA, 25 bp, Homo sapien
gtctctattcgagagggagtttctg

SEQ ID NO: 1246284 - DNA, 25 bp, Homo sapien
gattggctcggacgctgttagcacc

SEQ ID NO: 1246285 - DNA, 25 bp, Homo sapien
gtctcttgctgcaggcccacgtcgg

SEQ ID NO: 1246286 - DNA, 25 bp, Homo sapien
ctggataacgcccaagggtgccccg

SEQ ID NO: 1246287 - DNA, 25 bp, Homo sapien
gagactggataacgcccaagggtgc

SEQ ID NO: 1246288 - DNA, 25 bp, Homo sapien
tcggggtggccgtctgattggaaac

SEQ ID NO: 1246289 - DNA, 25 bp, Homo sapien
ggacagggagactggataacgccca

SEQ ID NO: 1246290 - DNA, 25 bp, Homo sapien
cttggccgtctggctgtgactgcca

SEQ ID NO: 1246291 - DNA, 25 bp, Homo sapien
gggaatccagggccattgtcaggca

SEQ ID NO: 1246292 - DNA, 25 bp, Homo sapien
aatggggaatccagggccattgtca

SEQ ID NO: 1246293 - DNA, 25 bp, Homo sapien
cagggccattgtcaggcagaagcag

SEQ ID NO: 1246294 - DNA, 25 bp, Homo sapien
gaatccagggccattgtcaggcaga

SEQ ID NO: 1246295 - DNA, 25 bp, Homo sapien
ggacttttccaatacagacatactg

SEQ ID NO: 1246296 - DNA, 25 bp, Homo sapien
gatgtgttcatcgaagactgcatgt

SEQ ID NO: 1246297 - DNA, 25 bp, Homo sapien
catactgctggatgcgatcgatgtg

SEQ ID NO: 1246298 - DNA, 25 bp, Homo sapien
tggatttgccattctagggctctgc

SEQ ID NO: 1246299 - DNA, 25 bp, Homo sapien
tggacccaggcacgtttttattcat

SEQ ID NO: 1246300 - DNA, 25 bp, Homo sapien
ctggacccaggcacgtttttattca

SEQ ID NO: 1246301 - DNA, 25 bp, Homo sapien
tagggtttgttgcagtcaatagtgt

SEQ ID NO: 1246302 - DNA, 25 bp, Homo sapien
ttgtgctagggtttgttgcagtcaa

SEQ ID NO: 1246303 - DNA, 25 bp, Homo sapien
caagtttctcgttagaccctctcct

SEQ ID NO: 1246304 - DNA, 25 bp, Homo sapien
tttctcgttagaccctctccttgtg

SEQ ID NO: 1246305 - DNA, 25 bp, Homo sapien
ggcaaggccttcgtgggtctcacac

SEQ ID NO: 1246306 - DNA, 25 bp, Homo sapien
gtacccatcaacctttcagtaggag

SEQ ID NO: 1246307 - DNA, 25 bp, Homo sapien
ggaactggcagtgttgccggccact

SEQ ID NO: 1246308 - DNA, 25 bp, Homo sapien
cccgctgtggctgaattttatctga

SEQ ID NO: 1246309 - DNA, 25 bp, Homo sapien
tgaacaccaagcagcataaacacaa

SEQ ID NO: 1246310 - DNA, 25 bp, Homo sapien
gccatagaaaaagagacgcattaca

SEQ ID NO: 1246311 - DNA, 25 bp, Homo sapien
gaaaacttgacaatcagccatagaa

SEQ ID NO: 1246312 - DNA, 25 bp, Homo sapien
gacgcattacatatccaggaaaagg

SEQ ID NO: 1246313 - DNA, 25 bp, Homo sapien
tattagaatagggttgctactcatc

SEQ ID NO: 1246314 - DNA, 25 bp, Homo sapien
gagattactcctattcacgttgaag

SEQ ID NO: 1246315 - DNA, 25 bp, Homo sapien
atcctgaggtccatggaggtgcaga

SEQ ID NO: 1246316 - DNA, 25 bp, Homo sapien
gaataactggtcttgttaagagtgc

SEQ ID NO: 1246317 - DNA, 25 bp, Homo sapien
cctaaacatcttggagccgtctgtc

SEQ ID NO: 1246318 - DNA, 25 bp, Homo sapien
aataaaatctcgtgtattccacagc

SEQ ID NO: 1246319 - DNA, 25 bp, Homo sapien
gatagattcgagagaaagcacgtgg

SEQ ID NO: 1246320 - DNA, 25 bp, Homo sapien
gcacgtggccatgtatgctttaacc

SEQ ID NO: 1246321 - DNA, 25 bp, Homo sapien
cagctcaacttgagtgatcccctgt

SEQ ID NO: 1246322 - DNA, 25 bp, Homo sapien
gattatgtgtcacctcgcacaagtg

SEQ ID NO: 1246323 - DNA, 25 bp, Homo sapien
tagcccatttccaagttcagtttga

SEQ ID NO: 1246324 - DNA, 25 bp, Homo sapien
gaacttccttatcataccagctcaa

SEQ ID NO: 1246325 - DNA, 25 bp, Homo sapien
ctcatggcctctcctgcatcagtag

SEQ ID NO: 1246326 - DNA, 25 bp, Homo sapien
ggcctctcctgcatcagtagtgcct

SEQ ID NO: 1246327 - DNA, 25 bp, Homo sapien
tcctgcatcagtagtgcctgctgtg

SEQ ID NO: 1246328 - DNA, 25 bp, Homo sapien
tgcatcagtagtgcctgctgtgggc

SEQ ID NO: 1246329 - DNA, 25 bp, Homo sapien
gcaaatgcggtgtcatcacagccta

SEQ ID NO: 1246330 - DNA, 25 bp, Homo sapien
ttacaagcagcacggtaggttctgg

SEQ ID NO: 1246331 - DNA, 25 bp, Homo sapien
gacagttgccagctgtttactggaa

SEQ ID NO: 1246332 - DNA, 25 bp, Homo sapien
tcaaaggtgactagttgtgcttggg

SEQ ID NO: 1246333 - DNA, 25 bp, Homo sapien
caatggatccttatggtataacggg

SEQ ID NO: 1246334 - DNA, 25 bp, Homo sapien
cagagacgtgaacacacttgtagtg

SEQ ID NO: 1246335 - DNA, 25 bp, Homo sapien
tcattttctaaggtagcagagacgt

SEQ ID NO: 1246336 - DNA, 25 bp, Homo sapien
cttaggttgattcactggatccatg

SEQ ID NO: 1246337 - DNA, 25 bp, Homo sapien
tcagggttccaaagacaagtgttcc

SEQ ID NO: 1246338 - DNA, 25 bp, Homo sapien
ttcattgaggcagtcacaagtgtct

SEQ ID NO: 1246339 - DNA, 25 bp, Homo sapien
cactgtattcttcctattcattgag

SEQ ID NO: 1246340 - DNA, 25 bp, Homo sapien
cctgttcttagcagccacgcagcat

SEQ ID NO: 1246341 - DNA, 25 bp, Homo sapien
agatggttttagctcagggtgtctc

SEQ ID NO: 1246342 - DNA, 25 bp, Homo sapien
ccttcaggttttctggagctggaac

SEQ ID NO: 1246343 - DNA, 25 bp, Homo sapien
gcaggagatgaagccttaggcagct

SEQ ID NO: 1246344 - DNA, 25 bp, Homo sapien
atcaccctctcttcatgcaatgtca

SEQ ID NO: 1246345 - DNA, 25 bp, Homo sapien
ggcacgcggcagtgagatccagact

SEQ ID NO: 1246346 - DNA, 25 bp, Homo sapien
gcacgcggcagtgagatccagactc

SEQ ID NO: 1246347 - DNA, 25 bp, Homo sapien
aatcgagaatgcacgtccggcgggt

SEQ ID NO: 1246348 - DNA, 25 bp, Homo sapien
aaaaggaatcgagaatgcacgtccg

SEQ ID NO: 1246349 - DNA, 25 bp, Homo sapien
tgagcgtatacttgagagtatattg

SEQ ID NO: 1246350 - DNA, 25 bp, Homo sapien
agcgtatacttgagagtatattgga

SEQ ID NO: 1246351 - DNA, 25 bp, Homo sapien
gagcgtatacttgagagtatattgg

SEQ ID NO: 1246352 - DNA, 25 bp, Homo sapien
cttgagcgtatacttgagagtatat

SEQ ID NO: 1246353 - DNA, 25 bp, Homo sapien
ctttagaagactgtgaataagctga

SEQ ID NO: 1246354 - DNA, 25 bp, Homo sapien
ttagaagactgtgaataagctgatc

SEQ ID NO: 1246355 - DNA, 25 bp, Homo sapien
tttagaagactgtgaataagctgat

SEQ ID NO: 1246356 - DNA, 25 bp, Homo sapien
cctttagaagactgtgaataagctg

SEQ ID NO: 1246357 - DNA, 25 bp, Homo sapien
cttgcgatgtgcctcagccgtgata

SEQ ID NO: 1246358 - DNA, 25 bp, Homo sapien
cctcttgcgatgtgcctcagccgtg

SEQ ID NO: 1246359 - DNA, 25 bp, Homo sapien
cgatgtgcctcagccgtgatagtga

SEQ ID NO: 1246360 - DNA, 25 bp, Homo sapien
ttctccctcttgcgatgtgcctcag

SEQ ID NO: 1246361 - DNA, 25 bp, Homo sapien
ctataggtcaaagatatccactgga

SEQ ID NO: 1246362 - DNA, 25 bp, Homo sapien
tattttacaacattaggaatgatga

SEQ ID NO: 1246363 - DNA, 25 bp, Homo sapien
gcagttcgggctgtattttacaaca

SEQ ID NO: 1246364 - DNA, 25 bp, Homo sapien
aagcaacttgcagttcgggctgtat

SEQ ID NO: 1246365 - DNA, 25 bp, Homo sapien
ataacatggtttttgggaaagccat

SEQ ID NO: 1246366 - DNA, 25 bp, Homo sapien
cattgggtaacggaattgggctgag

SEQ ID NO: 1246367 - DNA, 25 bp, Homo sapien
gggtaacggaattgggctgagtcca

SEQ ID NO: 1246368 - DNA, 25 bp, Homo sapien
cccattgggtaacggaattgggctg

SEQ ID NO: 1246369 - DNA, 25 bp, Homo sapien
gaatctccatgttccccaaggactc

SEQ ID NO: 1246370 - DNA, 25 bp, Homo sapien
ctagaatctccatgttccccaagga

SEQ ID NO: 1246371 - DNA, 25 bp, Homo sapien
atctccatgttccccaaggactcac

SEQ ID NO: 1246372 - DNA, 25 bp, Homo sapien
tagaatctccatgttccccaaggac

SEQ ID NO: 1246373 - DNA, 25 bp, Homo sapien
gagggagacaccagtaacatttgct

SEQ ID NO: 1246374 - DNA, 25 bp, Homo sapien
agagtcttgagggagacaccagtaa

SEQ ID NO: 1246375 - DNA, 25 bp, Homo sapien
cagagtcttgagggagacaccagta

SEQ ID NO: 1246376 - DNA, 25 bp, Homo sapien
cttgagggagacaccagtaacattt

SEQ ID NO: 1246377 - DNA, 25 bp, Homo sapien
cttcattatactttctgccaaatct

SEQ ID NO: 1246378 - DNA, 25 bp, Homo sapien
ggtggaaattgggtgcacccgccta

SEQ ID NO: 1246379 - DNA, 25 bp, Homo sapien
gaaattgggtgcacccgcctaagat

SEQ ID NO: 1246380 - DNA, 25 bp, Homo sapien
gccacagagagtccaatggcccagg

SEQ ID NO: 1246381 - DNA, 25 bp, Homo sapien
ttcaaatgggccccttcctcaggag

SEQ ID NO: 1246382 - DNA, 25 bp, Homo sapien
tttgtatcccccaaagtggatctgc

SEQ ID NO: 1246383 - DNA, 25 bp, Homo sapien
agtggatctgcactgttcttcaaat

SEQ ID NO: 1246384 - DNA, 25 bp, Homo sapien
cattctctcccaagatgcaaggaat

SEQ ID NO: 1246385 - DNA, 25 bp, Homo sapien
catacatgcaatattggatttatat

SEQ ID NO: 1246386 - DNA, 25 bp, Homo sapien
tttatatactggatccaggatgtga

SEQ ID NO: 1246387 - DNA, 25 bp, Homo sapien
ttggatttatatactggatccagga

SEQ ID NO: 1246388 - DNA, 25 bp, Homo sapien
tacatgcaatattggatttatatac

SEQ ID NO: 1246389 - DNA, 25 bp, Homo sapien
ccatttgtccatgatactaaaggga

SEQ ID NO: 1246390 - DNA, 25 bp, Homo sapien
tatgctacaggtacaaaaactgcag

SEQ ID NO: 1246391 - DNA, 25 bp, Homo sapien
aagactcaagccgttctctttactg

SEQ ID NO: 1246392 - DNA, 25 bp, Homo sapien
gcagtgtggttacaaaaactaattc

SEQ ID NO: 1246393 - DNA, 25 bp, Homo sapien
aggtctctgtcagtgatgtcccaaa

SEQ ID NO: 1246394 - DNA, 25 bp, Homo sapien
caaagaggacgcattcatcagtagc

SEQ ID NO: 1246395 - DNA, 25 bp, Homo sapien
tatgctgcgttctagaagcctacca

SEQ ID NO: 1246396 - DNA, 25 bp, Homo sapien
tcataaacagttgggagcagaaccc

SEQ ID NO: 1246397 - DNA, 25 bp, Homo sapien
tattcacaagccttacataggtaga

SEQ ID NO: 1246398 - DNA, 25 bp, Homo sapien
catatgcagtgatactcatctcgtc

SEQ ID NO: 1246399 - DNA, 25 bp, Homo sapien
gaaactcaagcattagcactgcgag

SEQ ID NO: 1246400 - DNA, 25 bp, Homo sapien
aggttgttgaactcagtagctgtga

SEQ ID NO: 1246401 - DNA, 25 bp, Homo sapien
cccaagggaaaaggaggattcatgg

SEQ ID NO: 1246402 - DNA, 25 bp, Homo sapien
ccccaagggaaaaggaggattcatg

SEQ ID NO: 1246403 - DNA, 25 bp, Homo sapien
cctatcagaaggtttcagtgtttcc

SEQ ID NO: 1246404 - DNA, 25 bp, Homo sapien
caagaaagaggctgatagagagagt

SEQ ID NO: 1246405 - DNA, 25 bp, Homo sapien
ggagtgtatccatgaagctgagagt

SEQ ID NO: 1246406 - DNA, 25 bp, Homo sapien
gagcacgagtttcacggagcaagaa

SEQ ID NO: 1246407 - DNA, 25 bp, Homo sapien
tattatttgaaatgagggaccatct

SEQ ID NO: 1246408 - DNA, 25 bp, Homo sapien
cccagtcaaaggtgattgaaacaca

SEQ ID NO: 1246409 - DNA, 25 bp, Homo sapien
tagaacttgtctgtggaaagtatat

SEQ ID NO: 1246410 - DNA, 25 bp, Homo sapien
gcctttatttgatgccctgcttcga

SEQ ID NO: 1246411 - DNA, 25 bp, Homo sapien
tatgctgccatgtatatctctcgag

SEQ ID NO: 1246412 - DNA, 25 bp, Homo sapien
gtgaccccataccatcagaactagg

SEQ ID NO: 1246413 - DNA, 25 bp, Homo sapien
tacaagtcaagaaagtgagacctca

SEQ ID NO: 1246414 - DNA, 25 bp, Homo sapien
tcatggtgccagaactagtcaacag

SEQ ID NO: 1246415 - DNA, 25 bp, Homo sapien
taagataaataagagggctgtcacc

SEQ ID NO: 1246416 - DNA, 25 bp, Homo sapien
tgtttagagtaagtataggtgtgcc

SEQ ID NO: 1246417 - DNA, 25 bp, Homo sapien
gataagtgtgagaggaggtaaccca

SEQ ID NO: 1246418 - DNA, 25 bp, Homo sapien
accgctctcagcagatataatcctg

SEQ ID NO: 1246419 - DNA, 25 bp, Homo sapien
gccaccatgcccagcatgaactgat

SEQ ID NO: 1246420 - DNA, 25 bp, Homo sapien
ggaacaaagccggaatatagagaat

SEQ ID NO: 1246421 - DNA, 25 bp, Homo sapien
gatgccagagatagtctcttgaagg

SEQ ID NO: 1246422 - DNA, 25 bp, Homo sapien
gagaattggagtacagagttcctaa

SEQ ID NO: 1246423 - DNA, 25 bp, Homo sapien
gatagctggcagactaataagcagg

SEQ ID NO: 1246424 - DNA, 25 bp, Homo sapien
tgtaatttcttcagtgacaacttga

SEQ ID NO: 1246425 - DNA, 25 bp, Homo sapien
agtgacaacttgagctgctgtttcc

SEQ ID NO: 1246426 - DNA, 25 bp, Homo sapien
tcttcagtgacaacttgagctgctg

SEQ ID NO: 1246427 - DNA, 25 bp, Homo sapien
aatttcttcagtgacaacttgagct

SEQ ID NO: 1246428 - DNA, 25 bp, Homo sapien
tttgtagttgtgataccaaacttac

SEQ ID NO: 1246429 - DNA, 25 bp, Homo sapien
tttgccttacgtggtactatcctac

SEQ ID NO: 1246430 - DNA, 25 bp, Homo sapien
ccagattgttggagctaccacaaat

SEQ ID NO: 1246431 - DNA, 25 bp, Homo sapien
tcaacatgtctaactggcttactgt

SEQ ID NO: 1246432 - DNA, 25 bp, Homo sapien
ccacaaatggctttgaggtacagga

SEQ ID NO: 1246433 - DNA, 25 bp, Homo sapien
ggatcccctgagacatctgccgtct

SEQ ID NO: 1246434 - DNA, 25 bp, Homo sapien
caccctttgactgggcgagagcctc

SEQ ID NO: 1246435 - DNA, 25 bp, Homo sapien
tccggtatcactggagcctgactga

SEQ ID NO: 1246436 - DNA, 25 bp, Homo sapien
gcctgactgagatgccccttcgctt

SEQ ID NO: 1246437 - DNA, 25 bp, Homo sapien
gccgcctttgacagccgccgggccg

SEQ ID NO: 1246438 - DNA, 25 bp, Homo sapien
ccgggccgcctttgacagccgccgg

SEQ ID NO: 1246439 - DNA, 25 bp, Homo sapien
gcgccgggccgcctttgacagccgc

SEQ ID NO: 1246440 - DNA, 25 bp, Homo sapien
cggcgccgggccgcctttgacagcc

SEQ ID NO: 1246441 - DNA, 25 bp, Homo sapien
ggcggtttggggctggtggctgtca

SEQ ID NO: 1246442 - DNA, 25 bp, Homo sapien
cggtttggggctggtggctgtcagc

SEQ ID NO: 1246443 - DNA, 25 bp, Homo sapien
ctgtcagcctgggttgagggccggg

SEQ ID NO: 1246444 - DNA, 25 bp, Homo sapien
cagcctgggttgagggccgggaccg

SEQ ID NO: 1246445 - DNA, 25 bp, Homo sapien
ccgacgctgccggcagaaggttccg

SEQ ID NO: 1246446 - DNA, 25 bp, Homo sapien
ttacaatatggctttttccaggtcc

SEQ ID NO: 1246447 - DNA, 25 bp, Homo sapien
ctccttcccgttatttcttctatct

SEQ ID NO: 1246448 - DNA, 25 bp, Homo sapien
cccagaggaaggctaggggtgcctt

SEQ ID NO: 1246449 - DNA, 25 bp, Homo sapien
tgactccttcccgttatttcttcta

SEQ ID NO: 1246450 - DNA, 25 bp, Homo sapien
ggactggtctattagggcatatgac

SEQ ID NO: 1246451 - DNA, 25 bp, Homo sapien
gagggactggtctattagggcatat

SEQ ID NO: 1246452 - DNA, 25 bp, Homo sapien
gggcatatgacactgacagtgcgca

SEQ ID NO: 1246453 - DNA, 25 bp, Homo sapien
actggtctattagggcatatgacac

SEQ ID NO: 1246454 - DNA, 25 bp, Homo sapien
ggagggtggcccttgaaatgccaaa

SEQ ID NO: 1246455 - DNA, 25 bp, Homo sapien
tcagtgactaggaggtgaggagggt

SEQ ID NO: 1246456 - DNA, 25 bp, Homo sapien
gggtggcccttgaaatgccaaactg

SEQ ID NO: 1246457 - DNA, 25 bp, Homo sapien
ggcccttgaaatgccaaactgccta

SEQ ID NO: 1246458 - DNA, 25 bp, Homo sapien
ttttatctgagagaagcggagagcc

SEQ ID NO: 1246459 - DNA, 25 bp, Homo sapien
gagacgaagttttgaggagccagat

SEQ ID NO: 1246460 - DNA, 25 bp, Homo sapien
tagagctctgtaggccaattgtaag

SEQ ID NO: 1246461 - DNA, 25 bp, Homo sapien
tgcaaagcccttaaagcaggactgt

SEQ ID NO: 1246462 - DNA, 25 bp, Homo sapien
tcatttgttatagctcatgatgtac

SEQ ID NO: 1246463 - DNA, 25 bp, Homo sapien
ggttggttgcagctcagcgtttgct

SEQ ID NO: 1246464 - DNA, 25 bp, Homo sapien
tcagggattgacacaggtgtgggct

SEQ ID NO: 1246465 - DNA, 25 bp, Homo sapien
ttgacacaggtgtgggctatggcct

SEQ ID NO: 1246466 - DNA, 25 bp, Homo sapien
gaaaggtgactggtggatgaatttc

SEQ ID NO: 1246467 - DNA, 25 bp, Homo sapien
ggtggatgaatttctggcagtgctg

SEQ ID NO: 1246468 - DNA, 25 bp, Homo sapien
agactgcttgctcagagagtggcca

SEQ ID NO: 1246469 - DNA, 25 bp, Homo sapien
tgcagactgcttgctcagagagtgg

SEQ ID NO: 1246470 - DNA, 25 bp, Homo sapien
ccaaacgccttgagaaatcctctgc

SEQ ID NO: 1246471 - DNA, 25 bp, Homo sapien
aaacgccttgagaaatcctctgcat

SEQ ID NO: 1246472 - DNA, 25 bp, Homo sapien
acccaaacgccttgagaaatcctct

SEQ ID NO: 1246473 - DNA, 25 bp, Homo sapien
tgaaacccaaacgccttgagaaatc

SEQ ID NO: 1246474 - DNA, 25 bp, Homo sapien
agttgggctttgctctcacctggtc

SEQ ID NO: 1246475 - DNA, 25 bp, Homo sapien
tcacctggtcacctttcaggaatcc

SEQ ID NO: 1246476 - DNA, 25 bp, Homo sapien
cattcactgcgctgagagcttttcc

SEQ ID NO: 1246477 - DNA, 25 bp, Homo sapien
ctccgaatgtagcattcactgcgct

SEQ ID NO: 1246478 - DNA, 25 bp, Homo sapien
cttgcacaaggaccgtgctaatctt

SEQ ID NO: 1246479 - DNA, 25 bp, Homo sapien
gtcatccttgcacaaggaccgtgct

SEQ ID NO: 1246480 - DNA, 25 bp, Homo sapien
tgcacaaggaccgtgctaatcttct

SEQ ID NO: 1246481 - DNA, 25 bp, Homo sapien
atccttgcacaaggaccgtgctaat

SEQ ID NO: 1246482 - DNA, 25 bp, Homo sapien
gcagcatggttatgagcctcaagtc

SEQ ID NO: 1246483 - DNA, 25 bp, Homo sapien
cccggaaatggtagtcctgcctgaa

SEQ ID NO: 1246484 - DNA, 25 bp, Homo sapien
gagtgctcattacaggcgctttgga

SEQ ID NO: 1246485 - DNA, 25 bp, Homo sapien
tgaataccgtttgcccatccaaggg

SEQ ID NO: 1246486 - DNA, 25 bp, Homo sapien
tttacagccacctggtggatccctg

SEQ ID NO: 1246487 - DNA, 25 bp, Homo sapien
gctttacagccacctggtggatccc

SEQ ID NO: 1246488 - DNA, 25 bp, Homo sapien
cttagctttacagccacctggtgga

SEQ ID NO: 1246489 - DNA, 25 bp, Homo sapien
tagctttacagccacctggtggatc

SEQ ID NO: 1246490 - DNA, 25 bp, Homo sapien
tcgctcgggcagttcaaacggtgct

SEQ ID NO: 1246491 - DNA, 25 bp, Homo sapien
caacacgcagatgctctcttggagc

SEQ ID NO: 1246492 - DNA, 25 bp, Homo sapien
gccacagtcagaacaaaggtcttgc

SEQ ID NO: 1246493 - DNA, 25 bp, Homo sapien
tctgtgatctgtgcgccagctggtc

SEQ ID NO: 1246494 - DNA, 25 bp, Homo sapien
ctaaatctatgtcccactccgaggc

SEQ ID NO: 1246495 - DNA, 25 bp, Homo sapien
caatcacagcatcgtccttcactga

SEQ ID NO: 1246496 - DNA, 25 bp, Homo sapien
caggaccaccctgttagcagtttgg

SEQ ID NO: 1246497 - DNA, 25 bp, Homo sapien
cagtttggtgtctacttgtgggttc

SEQ ID NO: 1246498 - DNA, 25 bp, Homo sapien
tctgcggctcatcagccagttccag

SEQ ID NO: 1246499 - DNA, 25 bp, Homo sapien
aggtcctttcgagccataaaatgcc

SEQ ID NO: 1246500 - DNA, 25 bp, Homo sapien
cagttccagtcactggacctgggag

SEQ ID NO: 1246501 - DNA, 25 bp, Homo sapien
ccctgtgcctgattttgagtcttga

SEQ ID NO: 1246502 - DNA, 25 bp, Homo sapien
gccccaggagattagtcagctgatt

SEQ ID NO: 1246503 - DNA, 25 bp, Homo sapien
cttaacagagacgggcctcagcccc

SEQ ID NO: 1246504 - DNA, 25 bp, Homo sapien
cagccccaggagattagtcagctga

SEQ ID NO: 1246505 - DNA, 25 bp, Homo sapien
ctcagccccaggagattagtcagct

SEQ ID NO: 1246506 - DNA, 25 bp, Homo sapien
gcaggctctagtcttggtttttccc

SEQ ID NO: 1246507 - DNA, 25 bp, Homo sapien
cccacttgtcaccacttagaatgaa

SEQ ID NO: 1246508 - DNA, 25 bp, Homo sapien
aacgtcaaacgcctcagtggttgca

SEQ ID NO: 1246509 - DNA, 25 bp, Homo sapien
tgtcaccacttagaatgaattcaaa

SEQ ID NO: 1246510 - DNA, 25 bp, Homo sapien
tgcagtgtggcaataattacaggac

SEQ ID NO: 1246511 - DNA, 25 bp, Homo sapien
tacttatcagatggcaccggattgc

SEQ ID NO: 1246512 - DNA, 25 bp, Homo sapien
ggtttgccaatgtctgtgcctgatg

SEQ ID NO: 1246513 - DNA, 25 bp, Homo sapien
tcagcccaggccgagtaggtttgcc

SEQ ID NO: 1246514 - DNA, 25 bp, Homo sapien
caggcagtccaataatgcacaaggg

SEQ ID NO: 1246515 - DNA, 25 bp, Homo sapien
gactcacggccagtatggcagcaag

SEQ ID NO: 1246516 - DNA, 25 bp, Homo sapien
gcagcaagggacagctaagcgtata

SEQ ID NO: 1246517 - DNA, 25 bp, Homo sapien
tgggcccctggttattcactctggt

SEQ ID NO: 1246518 - DNA, 25 bp, Homo sapien
tctggaatacttcatcaaaagactg

SEQ ID NO: 1246519 - DNA, 25 bp, Homo sapien
cacattaggttcctttgaccctggc

SEQ ID NO: 1246520 - DNA, 25 bp, Homo sapien
ctgtatgataaggagttctgtgttc

SEQ ID NO: 1246521 - DNA, 25 bp, Homo sapien
tgatgttctgtatgataaggagttc

SEQ ID NO: 1246522 - DNA, 25 bp, Homo sapien
cttagtaactaaacacctgaattct

SEQ ID NO: 1246523 - DNA, 25 bp, Homo sapien
gttctgtaagcgtgtccaatgtttc

SEQ ID NO: 1246524 - DNA, 25 bp, Homo sapien
gcgttctgtaagcgtgtccaatgtt

SEQ ID NO: 1246525 - DNA, 25 bp, Homo sapien
aattagcttagtaactaaacacctg

SEQ ID NO: 1246526 - DNA, 25 bp, Homo sapien
ctatttgctcaattctactgctgag

SEQ ID NO: 1246527 - DNA, 25 bp, Homo sapien
ttctatttgctcaattctactgctg

SEQ ID NO: 1246528 - DNA, 25 bp, Homo sapien
tcttctatttgctcaattctactgc

SEQ ID NO: 1246529 - DNA, 25 bp, Homo sapien
ttcttctatttgctcaattctactg

SEQ ID NO: 1246530 - DNA, 25 bp, Homo sapien
tgtgtcactggatacgaaattcttg

SEQ ID NO: 1246531 - DNA, 25 bp, Homo sapien
tacgtattaggtgaatctcctgaag

SEQ ID NO: 1246532 - DNA, 25 bp, Homo sapien
tccacgtaactattgaggtgtgagg

SEQ ID NO: 1246533 - DNA, 25 bp, Homo sapien
tttatgtgagatgtgagtccttacg

SEQ ID NO: 1246534 - DNA, 25 bp, Homo sapien
tttcctcttaagaccgcctttgctg

SEQ ID NO: 1246535 - DNA, 25 bp, Homo sapien
gttctatatatatcggttgagtcca

SEQ ID NO: 1246536 - DNA, 25 bp, Homo sapien
tgtcttgacctgtctgatgctgtca

SEQ ID NO: 1246537 - DNA, 25 bp, Homo sapien
aatttattgaggctctttgctgcct

SEQ ID NO: 1246538 - DNA, 25 bp, Homo sapien
aaagttcaaaactcttcgagtgccg

SEQ ID NO: 1246539 - DNA, 25 bp, Homo sapien
ttcgagtgccgatatgatgctcaaa

SEQ ID NO: 1246540 - DNA, 25 bp, Homo sapien
aatctgaaatactccaaagttcaaa

SEQ ID NO: 1246541 - DNA, 25 bp, Homo sapien
tcaaaactcttcgagtgccgatatg

SEQ ID NO: 1246542 - DNA, 25 bp, Homo sapien
tggtttctccctcgatctgtggccc

SEQ ID NO: 1246543 - DNA, 25 bp, Homo sapien
gaccatatcagtagctcgtgttatc

SEQ ID NO: 1246544 - DNA, 25 bp, Homo sapien
taacaacacaatccggaaagactga

SEQ ID NO: 1246545 - DNA, 25 bp, Homo sapien
gcttcccagagtcctaaaacaatag

SEQ ID NO: 1246546 - DNA, 25 bp, Homo sapien
ttcacggagacctatctgaggtaca

SEQ ID NO: 1246547 - DNA, 25 bp, Homo sapien
cctatctgaggtacaggatggggct

SEQ ID NO: 1246548 - DNA, 25 bp, Homo sapien
ggggctggcaccagatgatgtccca

SEQ ID NO: 1246549 - DNA, 25 bp, Homo sapien
gctggcaccagatgatgtcccacca

SEQ ID NO: 1246550 - DNA, 25 bp, Homo sapien
gacagacttatacacccctgagtga

SEQ ID NO: 1246551 - DNA, 25 bp, Homo sapien
tttgaggtacccaccgtcctgtcag

SEQ ID NO: 1246552 - DNA, 25 bp, Homo sapien
ccctgagtgaggattacatgcccat

SEQ ID NO: 1246553 - DNA, 25 bp, Homo sapien
tcagctccttgacctatgagccggg

SEQ ID NO: 1246554 - DNA, 25 bp, Homo sapien
tctcccacggttgcatgtcgtctct

SEQ ID NO: 1246555 - DNA, 25 bp, Homo sapien
ggttctcccacggttgcatgtcgtc

SEQ ID NO: 1246556 - DNA, 25 bp, Homo sapien
gtctctttccagagagtcttgacat

SEQ ID NO: 1246557 - DNA, 25 bp, Homo sapien
cacggttgcatgtcgtctctttcca

SEQ ID NO: 1246558 - DNA, 25 bp, Homo sapien
tcagaacccgtgtaggccctgggag

SEQ ID NO: 1246559 - DNA, 25 bp, Homo sapien
ttgtccagagatgtgtgtcccagag

SEQ ID NO: 1246560 - DNA, 25 bp, Homo sapien
cgtgtaggccctgggagtagctgcc

SEQ ID NO: 1246561 - DNA, 25 bp, Homo sapien
gaggtgcatgctcagaacccgtgta

SEQ ID NO: 1246562 - DNA, 25 bp, Homo sapien
cgttcactaggagtgataaccagtg

SEQ ID NO: 1246563 - DNA, 25 bp, Homo sapien
cactcgttcactaggagtgataacc

SEQ ID NO: 1246564 - DNA, 25 bp, Homo sapien
cactaggagtgataaccagtgataa

SEQ ID NO: 1246565 - DNA, 25 bp, Homo sapien
ctcgttcactaggagtgataaccag

SEQ ID NO: 1246566 - DNA, 25 bp, Homo sapien
tccgtggaatgcgagtgtattccca

SEQ ID NO: 1246567 - DNA, 25 bp, Homo sapien
tctgggtcactagaacatgccttga

SEQ ID NO: 1246568 - DNA, 25 bp, Homo sapien
ttgaagtgttaatgtatcgagacat

SEQ ID NO: 1246569 - DNA, 25 bp, Homo sapien
tattcccagtcaggacacttattgt

SEQ ID NO: 1246570 - DNA, 25 bp, Homo sapien
tcaacttcgtaagcctcctggatag

SEQ ID NO: 1246571 - DNA, 25 bp, Homo sapien
tagtaataaggtgcagaagtaaccc

SEQ ID NO: 1246572 - DNA, 25 bp, Homo sapien
ggctctggccagttcaaagcagcat

SEQ ID NO: 1246573 - DNA, 25 bp, Homo sapien
tgttgaactgtgacctcgtggctaa

SEQ ID NO: 1246574 - DNA, 25 bp, Homo sapien
gaacttgtgcgcatagtgcaggctg

SEQ ID NO: 1246575 - DNA, 25 bp, Homo sapien
tatgtttggccagcttgctgatagc

SEQ ID NO: 1246576 - DNA, 25 bp, Homo sapien
tatatgtggtagaattcagtctggg

SEQ ID NO: 1246577 - DNA, 25 bp, Homo sapien
tgcaggctgtatgtttggccagctt

SEQ ID NO: 1246578 - DNA, 25 bp, Homo sapien
tgtcgctggctatacgggcaatggc

SEQ ID NO: 1246579 - DNA, 25 bp, Homo sapien
ttttcagctataacacggattcccg

SEQ ID NO: 1246580 - DNA, 25 bp, Homo sapien
gattcccgccagacgtgtgctaaca

SEQ ID NO: 1246581 - DNA, 25 bp, Homo sapien
tctatgttcgtttcatgcgggagaa

SEQ ID NO: 1246582 - DNA, 25 bp, Homo sapien
cagtgtctctaaactaggcagccaa

SEQ ID NO: 1246583 - DNA, 25 bp, Homo sapien
gttacggactccagcaaatgtgtgt

SEQ ID NO: 1246584 - DNA, 25 bp, Homo sapien
cattaggtgacagcccatgtttgct

SEQ ID NO: 1246585 - DNA, 25 bp, Homo sapien
cacccatggagtttgcttttgcaag

SEQ ID NO: 1246586 - DNA, 25 bp, Homo sapien
tttagcctggggggtttgtatatca

SEQ ID NO: 1246587 - DNA, 25 bp, Homo sapien
ttagcctggggggtttgtatatcaa

SEQ ID NO: 1246588 - DNA, 25 bp, Homo sapien
acagtggctcaatcttagctcacca

SEQ ID NO: 1246589 - DNA, 25 bp, Homo sapien
ctagagtacagtggctcaatcttag

SEQ ID NO: 1246590 - DNA, 25 bp, Homo sapien
agagtacagtggctcaatcttagct

SEQ ID NO: 1246591 - DNA, 25 bp, Homo sapien
agctcaccacaacctccgcctccca

SEQ ID NO: 1246592 - DNA, 25 bp, Homo sapien
atggtaggatggtttatattcccct

SEQ ID NO: 1246593 - DNA, 25 bp, Homo sapien
tagattcccaccaacggagtataaa

SEQ ID NO: 1246594 - DNA, 25 bp, Homo sapien
tggtaggatggtttatattcccctg

SEQ ID NO: 1246595 - DNA, 25 bp, Homo sapien
cattagtgacgttaacaaccttgga

SEQ ID NO: 1246596 - DNA, 25 bp, Homo sapien
gaatactcgaaaacttcattagtga

SEQ ID NO: 1246597 - DNA, 25 bp, Homo sapien
ggagtagaatactcgaaaacttcat

SEQ ID NO: 1246598 - DNA, 25 bp, Homo sapien
aaccaggttaggagtagaatactcg

SEQ ID NO: 1246599 - DNA, 25 bp, Homo sapien
gtgagtcagccagtcccaaaacctc

SEQ ID NO: 1246600 - DNA, 25 bp, Homo sapien
atggcatagatgtaacggtccccct

SEQ ID NO: 1246601 - DNA, 25 bp, Homo sapien
ttccctgttctcagacctatgaagg

SEQ ID NO: 1246602 - DNA, 25 bp, Homo sapien
gcagggcagtgagtcagccagtccc

SEQ ID NO: 1246603 - DNA, 25 bp, Homo sapien
cctgcataaggaatggctagtttgt

SEQ ID NO: 1246604 - DNA, 25 bp, Homo sapien
aaggaatggctagtttgtaatcaga

SEQ ID NO: 1246605 - DNA, 25 bp, Homo sapien
tgtaatcagaattaaatgggctata

SEQ ID NO: 1246606 - DNA, 25 bp, Homo sapien
tttgttcctgcataaggaatggcta

SEQ ID NO: 1246607 - DNA, 25 bp, Homo sapien
tgtcctcttcctgttgatccatgtt

SEQ ID NO: 1246608 - DNA, 25 bp, Homo sapien
tgatccatgttgattggcaggggat

SEQ ID NO: 1246609 - DNA, 25 bp, Homo sapien
tctcaaacagagaggagccccccat

SEQ ID NO: 1246610 - DNA, 25 bp, Homo sapien
tgatgacgtctttcctttttcaaga

SEQ ID NO: 1246611 - DNA, 25 bp, Homo sapien
tggcgcaccaggagcactgggattc

SEQ ID NO: 1246612 - DNA, 25 bp, Homo sapien
tactattggcaatggcgcaccagga

SEQ ID NO: 1246613 - DNA, 25 bp, Homo sapien
caccaggagcactgggattccgggc

SEQ ID NO: 1246614 - DNA, 25 bp, Homo sapien
agcttctgtggttactattggcaat

SEQ ID NO: 1246615 - DNA, 25 bp, Homo sapien
gattgccgatcattgtagtttcaga

SEQ ID NO: 1246616 - DNA, 25 bp, Homo sapien
tacagggactcaggggtttctgccc

SEQ ID NO: 1246617 - DNA, 25 bp, Homo sapien
catatttggtccgaaatgagtggat

SEQ ID NO: 1246618 - DNA, 25 bp, Homo sapien
tttggtccatacagttaacatccac

SEQ ID NO: 1246619 - DNA, 25 bp, Homo sapien
gtgggctggccagaccagatgtccc

SEQ ID NO: 1246620 - DNA, 25 bp, Homo sapien
gttgccttccagatccacggagctt

SEQ ID NO: 1246621 - DNA, 25 bp, Homo sapien
cagacagtcggtagtttgagaagag

SEQ ID NO: 1246622 - DNA, 25 bp, Homo sapien
acaccgccccagacagtcggtagtt

SEQ ID NO: 1246623 - DNA, 25 bp, Homo sapien
cgcgcggtgtcgctggcttgggcca

SEQ ID NO: 1246624 - DNA, 25 bp, Homo sapien
cggtgtcgctggcttgggccaatgt

SEQ ID NO: 1246625 - DNA, 25 bp, Homo sapien
tgtcgctggcttgggccaatgtggc

SEQ ID NO: 1246626 - DNA, 25 bp, Homo sapien
ttgatttcagccttgccgggcccag

SEQ ID NO: 1246627 - DNA, 25 bp, Homo sapien
tactggtgagatccgctgaagagca

SEQ ID NO: 1246628 - DNA, 25 bp, Homo sapien
tgagactggcgaaggttttctctga

SEQ ID NO: 1246629 - DNA, 25 bp, Homo sapien
agatgaaagaggagcgttccttccc

SEQ ID NO: 1246630 - DNA, 25 bp, Homo sapien
tgaagagcaggccacgtgtgtactg

SEQ ID NO: 1246631 - DNA, 25 bp, Homo sapien
gggcccggtctctagcccaaatgcc

SEQ ID NO: 1246632 - DNA, 25 bp, Homo sapien
aggggcccggtctctagcccaaatg

SEQ ID NO: 1246633 - DNA, 25 bp, Homo sapien
gcccggtctctagcccaaatgccag

SEQ ID NO: 1246634 - DNA, 25 bp, Homo sapien
tcaggggcccggtctctagcccaaa

SEQ ID NO: 1246635 - DNA, 25 bp, Homo sapien
tccagcttcaccttcggaggctgat

SEQ ID NO: 1246636 - DNA, 25 bp, Homo sapien
cagagcctcagacacctggtgttgg

SEQ ID NO: 1246637 - DNA, 25 bp, Homo sapien
gagcccctgcttagcggcagctttg

SEQ ID NO: 1246638 - DNA, 25 bp, Homo sapien
ctcattccagcttcaccttcggagg

SEQ ID NO: 1246639 - DNA, 25 bp, Homo sapien
tacaaatactgtgctaatattcagc

SEQ ID NO: 1246640 - DNA, 25 bp, Homo sapien
aaaacaaaggctgcgcaagtccact

SEQ ID NO: 1246641 - DNA, 25 bp, Homo sapien
agccaaaacaaaggctgcgcaagtc

SEQ ID NO: 1246642 - DNA, 25 bp, Homo sapien
ctcccttacaaatactgtgctaata

SEQ ID NO: 1246643 - DNA, 25 bp, Homo sapien
gggaagtacttggagacaatcctgc

SEQ ID NO: 1246644 - DNA, 25 bp, Homo sapien
gacctggggaagtacttggagacaa

SEQ ID NO: 1246645 - DNA, 25 bp, Homo sapien
gaagtacttggagacaatcctgccc

SEQ ID NO: 1246646 - DNA, 25 bp, Homo sapien
tctccattcatgtcccggtcacagc

SEQ ID NO: 1246647 - DNA, 25 bp, Homo sapien
ctgcagccgggtcaccagtgggctg

SEQ ID NO: 1246648 - DNA, 25 bp, Homo sapien
cagccgggtcaccagtgggctgtag

SEQ ID NO: 1246649 - DNA, 25 bp, Homo sapien
ccgggtcaccagtgggctgtaggga

SEQ ID NO: 1246650 - DNA, 25 bp, Homo sapien
tcaccagtgggctgtagggagccat

SEQ ID NO: 1246651 - DNA, 25 bp, Homo sapien
cagttcagtcgtttgcaaacaatgt

SEQ ID NO: 1246652 - DNA, 25 bp, Homo sapien
agttcagtcgtttgcaaacaatgtt

SEQ ID NO: 1246653 - DNA, 25 bp, Homo sapien
tgccctgctcgatttcctggctggc

SEQ ID NO: 1246654 - DNA, 25 bp, Homo sapien
gcatggccacgtggtccggccacag

SEQ ID NO: 1246655 - DNA, 25 bp, Homo sapien
gtgtcttgccctgctcgatttcctg

SEQ ID NO: 1246656 - DNA, 25 bp, Homo sapien
ctgcagcatggccacgtggtccggc

SEQ ID NO: 1246657 - DNA, 25 bp, Homo sapien
tcacagtggatggtggacggcatgg

SEQ ID NO: 1246658 - DNA, 25 bp, Homo sapien
acagtggatggtggacggcatggcc

SEQ ID NO: 1246659 - DNA, 25 bp, Homo sapien
ctttcagatggtcacagtggatggt

SEQ ID NO: 1246660 - DNA, 25 bp, Homo sapien
agtggatggtggacggcatggccac

SEQ ID NO: 1246661 - DNA, 25 bp, Homo sapien
ggtctttctcgcctccgagctgggc

SEQ ID NO: 1246662 - DNA, 25 bp, Homo sapien
aggtctttctcgcctccgagctggg

SEQ ID NO: 1246663 - DNA, 25 bp, Homo sapien
aatgaatgattccagatccaagcct

SEQ ID NO: 1246664 - DNA, 25 bp, Homo sapien
ctaatgaatgattccagatccaagc

SEQ ID NO: 1246665 - DNA, 25 bp, Homo sapien
taatgaatgattccagatccaagcc

SEQ ID NO: 1246666 - DNA, 25 bp, Homo sapien
atcagaagaaccctaaggtatgcat

SEQ ID NO: 1246667 - DNA, 25 bp, Homo sapien
accctaaggtatgcatagttttcca

SEQ ID NO: 1246668 - DNA, 25 bp, Homo sapien
caatcagaagaaccctaaggtatgc

SEQ ID NO: 1246669 - DNA, 25 bp, Homo sapien
gaagaaccctaaggtatgcatagtt

SEQ ID NO: 1246670 - DNA, 25 bp, Homo sapien
acgtcttagggtgaggtccaattgg

SEQ ID NO: 1246671 - DNA, 25 bp, Homo sapien
attggagagggagcctgttagcttc

SEQ ID NO: 1246672 - DNA, 25 bp, Homo sapien
ttggagagggagcctgttagcttca

SEQ ID NO: 1246673 - DNA, 25 bp, Homo sapien
atcacgtcttagggtgaggtccaat

SEQ ID NO: 1246674 - DNA, 25 bp, Homo sapien
aagtggtggccccaatttctgcgcc

SEQ ID NO: 1246675 - DNA, 25 bp, Homo sapien
ggccccaatttctgcgcccatgttg

SEQ ID NO: 1246676 - DNA, 25 bp, Homo sapien
cgcccatgttgcagattgtcgccat

SEQ ID NO: 1246677 - DNA, 25 bp, Homo sapien
ttgtcgccatgccagcacaggagat

SEQ ID NO: 1246678 - DNA, 25 bp, Homo sapien
ccgtcttgcttaggtacctcctcat

SEQ ID NO: 1246679 - DNA, 25 bp, Homo sapien
gccgtcttgcttaggtacctcctca

SEQ ID NO: 1246680 - DNA, 25 bp, Homo sapien
cggccgtcttgcttaggtacctcct

SEQ ID NO: 1246681 - DNA, 25 bp, Homo sapien
tccggccgtcttgcttaggtacctc

SEQ ID NO: 1246682 - DNA, 25 bp, Homo sapien
aattcatcagctagattggcaatgt

SEQ ID NO: 1246683 - DNA, 25 bp, Homo sapien
gaattcatcagctagattggcaatg

SEQ ID NO: 1246684 - DNA, 25 bp, Homo sapien
gatcttcatagctttaactgttgca

SEQ ID NO: 1246685 - DNA, 25 bp, Homo sapien
agcgcccgggatcttcatagcttta

SEQ ID NO: 1246686 - DNA, 25 bp, Homo sapien
ccgggatcttcatagctttaactgt

SEQ ID NO: 1246687 - DNA, 25 bp, Homo sapien
gcccgggatcttcatagctttaact

SEQ ID NO: 1246688 - DNA, 25 bp, Homo sapien
gtgcgtagctgtcccgctcaatggt

SEQ ID NO: 1246689 - DNA, 25 bp, Homo sapien
ctgtgcgtagctgtcccgctcaatg

SEQ ID NO: 1246690 - DNA, 25 bp, Homo sapien
tgtgcgtagctgtcccgctcaatgg

SEQ ID NO: 1246691 - DNA, 25 bp, Homo sapien
tcgcatcattgcagcccgtgaagtt

SEQ ID NO: 1246692 - DNA, 25 bp, Homo sapien
tcttgatgtccttcgtgtcccagcg

SEQ ID NO: 1246693 - DNA, 25 bp, Homo sapien
tgtccttcgtgtcccagcggccaat

SEQ ID NO: 1246694 - DNA, 25 bp, Homo sapien
gacgtgacgaagacatgggtctcag

SEQ ID NO: 1246695 - DNA, 25 bp, Homo sapien
cgtctgcatccagagcctctagctt

SEQ ID NO: 1246696 - DNA, 25 bp, Homo sapien
cctatctttgcccatcaggtagttg

SEQ ID NO: 1246697 - DNA, 25 bp, Homo sapien
tcttcctatctttgcccatcaggta

SEQ ID NO: 1246698 - DNA, 25 bp, Homo sapien
tcctcttggggaaggtcgtctgcat

SEQ ID NO: 1246699 - DNA, 25 bp, Homo sapien
tttgaccttgatgagtatctgcggg

SEQ ID NO: 1246700 - DNA, 25 bp, Homo sapien
agtggggctcacatccacgtgctgg

SEQ ID NO: 1246701 - DNA, 25 bp, Homo sapien
tggcactgcacacggagttggcctg

SEQ ID NO: 1246702 - DNA, 25 bp, Homo sapien
ttcaatgttggcactgcacacggag

SEQ ID NO: 1246703 - DNA, 25 bp, Homo sapien
agcactgcgtgctcccggctcgagt

SEQ ID NO: 1246704 - DNA, 25 bp, Homo sapien
gggtgaaccttgttgtagtcgcctg

SEQ ID NO: 1246705 - DNA, 25 bp, Homo sapien
accttgttgtagtcgcctgggtcag

SEQ ID NO: 1246706 - DNA, 25 bp, Homo sapien
ggctcgagttctcgtccccgatcac

SEQ ID NO: 1246707 - DNA, 25 bp, Homo sapien
cagaaccacttgatccgcatctcat

SEQ ID NO: 1246708 - DNA, 25 bp, Homo sapien
gaaccacttgatccgcatctcattg

SEQ ID NO: 1246709 - DNA, 25 bp, Homo sapien
acttgatccgcatctcattgaaggt

SEQ ID NO: 1246710 - DNA, 25 bp, Homo sapien
tgagggcactgccggcacagaacca

SEQ ID NO: 1246711 - DNA, 25 bp, Homo sapien
ctgctgatggcgcatgtggagctga

SEQ ID NO: 1246712 - DNA, 25 bp, Homo sapien
ctgcttaagattggaaccaaacact

SEQ ID NO: 1246713 - DNA, 25 bp, Homo sapien
catggctggatggatcggatctgct

SEQ ID NO: 1246714 - DNA, 25 bp, Homo sapien
caccatcttggaatcagaacccatg

SEQ ID NO: 1246715 - DNA, 25 bp, Homo sapien
ataggtgtcgtaagatatcagagtc

SEQ ID NO: 1246716 - DNA, 25 bp, Homo sapien
actgtggccccgcaatcgaagtgtc

SEQ ID NO: 1246717 - DNA, 25 bp, Homo sapien
ggtccaggctgatccctgataggtg

SEQ ID NO: 1246718 - DNA, 25 bp, Homo sapien
ccgctcaggtaacaggtccaggctg

SEQ ID NO: 1246719 - DNA, 25 bp, Homo sapien
tccagtgtcagctgcaaccaccagc

SEQ ID NO: 1246720 - DNA, 25 bp, Homo sapien
gatgtaggggtggcacatctcccgg

SEQ ID NO: 1246721 - DNA, 25 bp, Homo sapien
ggtggcacatctcccggggggcgaa

SEQ ID NO: 1246722 - DNA, 25 bp, Homo sapien
gtgtcagctgcaaccaccagctcag

SEQ ID NO: 1246723 - DNA, 25 bp, Homo sapien
tgggcatggagcaagacagttggaa

SEQ ID NO: 1246724 - DNA, 25 bp, Homo sapien
gtgttgggcatggagcaagacagtt

SEQ ID NO: 1246725 - DNA, 25 bp, Homo sapien
gaaagcttgcaagggtaagacatga

SEQ ID NO: 1246726 - DNA, 25 bp, Homo sapien
aagggtaagacatgatcctgtaggg

SEQ ID NO: 1246727 - DNA, 25 bp, Homo sapien
caaatgggggcttctctctctggca

SEQ ID NO: 1246728 - DNA, 25 bp, Homo sapien
tgcagccctgcgtgcattttcaaag

SEQ ID NO: 1246729 - DNA, 25 bp, Homo sapien
gtggaatctctggcagatgcctgct

SEQ ID NO: 1246730 - DNA, 25 bp, Homo sapien
ctgcttccccacaacccccaaatgg

SEQ ID NO: 1246731 - DNA, 25 bp, Homo sapien
ggctggcctgagacgtgccagaacc

SEQ ID NO: 1246732 - DNA, 25 bp, Homo sapien
aggctggcctgagacgtgccagaac

SEQ ID NO: 1246733 - DNA, 25 bp, Homo sapien
atgagtggccctgcagtgccctgca

SEQ ID NO: 1246734 - DNA, 25 bp, Homo sapien
tgagagaggacatgagtggccctgc

SEQ ID NO: 1246735 - DNA, 25 bp, Homo sapien
gaggtgagagaggacatgagtggcc

SEQ ID NO: 1246736 - DNA, 25 bp, Homo sapien
gaggcccagaggtgagagaggacat

SEQ ID NO: 1246737 - DNA, 25 bp, Homo sapien
agatgctgctcagcatagacatcca

SEQ ID NO: 1246738 - DNA, 25 bp, Homo sapien
gatgctgctcagcatagacatccac

SEQ ID NO: 1246739 - DNA, 25 bp, Homo sapien
tgcttaaataaccatcggcaaactg

SEQ ID NO: 1246740 - DNA, 25 bp, Homo sapien
ttggtgagaacctgagcaactgtca

SEQ ID NO: 1246741 - DNA, 25 bp, Homo sapien
ccacccttgtgatatgtgcttaaat

SEQ ID NO: 1246742 - DNA, 25 bp, Homo sapien
catcggcaaactgtgccagggaagc

SEQ ID NO: 1246743 - DNA, 25 bp, Homo sapien
caattccacggccatagtagtggcc

SEQ ID NO: 1246744 - DNA, 25 bp, Homo sapien
tccttcaatatgcagccaggctctg

SEQ ID NO: 1246745 - DNA, 25 bp, Homo sapien
ggagctgatgaccttacgaactgca

SEQ ID NO: 1246746 - DNA, 25 bp, Homo sapien
cagtaagtgctgctcgagtaatgac

SEQ ID NO: 1246747 - DNA, 25 bp, Homo sapien
cgaaggccttcttgggacgagagcc

SEQ ID NO: 1246748 - DNA, 25 bp, Homo sapien
gccttcttgggacgagagccatcct

SEQ ID NO: 1246749 - DNA, 25 bp, Homo sapien
atttttcctctgctcggcagagcac

SEQ ID NO: 1246750 - DNA, 25 bp, Homo sapien
ggcagagcacagtgactgctttgtg

SEQ ID NO: 1246751 - DNA, 25 bp, Homo sapien
tacccacagaacttcattacatcaa

SEQ ID NO: 1246752 - DNA, 25 bp, Homo sapien
ctttcaggagtataacattcacgca

SEQ ID NO: 1246753 - DNA, 25 bp, Homo sapien
tgtacccacagaacttcattacatc

SEQ ID NO: 1246754 - DNA, 25 bp, Homo sapien
ggctggttgtacccacagaacttca

SEQ ID NO: 1246755 - DNA, 25 bp, Homo sapien
aaacctcctaccctgcctctatact

SEQ ID NO: 1246756 - DNA, 25 bp, Homo sapien
tctatactgctcaggaatccaggaa

SEQ ID NO: 1246757 - DNA, 25 bp, Homo sapien
tctctgagatcaggctaccaacagg

SEQ ID NO: 1246758 - DNA, 25 bp, Homo sapien
ctggtctctgagatcaggctaccaa

SEQ ID NO: 1246759 - DNA, 25 bp, Homo sapien
gcaattctgattgtcagactggcca

SEQ ID NO: 1246760 - DNA, 25 bp, Homo sapien
ccaaagatctttgatgtgcaggcaa

SEQ ID NO: 1246761 - DNA, 25 bp, Homo sapien
gactggccattctcagactggtcat

SEQ ID NO: 1246762 - DNA, 25 bp, Homo sapien
tgggataacctctcccttactggtg

SEQ ID NO: 1246763 - DNA, 25 bp, Homo sapien
ccccataagtgggtcagagaagccc

SEQ ID NO: 1246764 - DNA, 25 bp, Homo sapien
taacatgcagctcaagacgggcagc

SEQ ID NO: 1246765 - DNA, 25 bp, Homo sapien
gattctcctaacagggcttgtcaca

SEQ ID NO: 1246766 - DNA, 25 bp, Homo sapien
caaataaggcatgtatgtgttccca

SEQ ID NO: 1246767 - DNA, 25 bp, Homo sapien
gaaatacggaattgggctccacgcc

SEQ ID NO: 1246768 - DNA, 25 bp, Homo sapien
tacttagtggttacagcgctcccag

SEQ ID NO: 1246769 - DNA, 25 bp, Homo sapien
caagtgtgcctttggcgtggagctc

SEQ ID NO: 1246770 - DNA, 25 bp, Homo sapien
cattgctgggcaagcggttctggta

SEQ ID NO: 1246771 - DNA, 25 bp, Homo sapien
gggtctccgcgcatcgcgctcagcc

SEQ ID NO: 1246772 - DNA, 25 bp, Homo sapien
gaggaaagaaaacaagccgcacttc

SEQ ID NO: 1246773 - DNA, 25 bp, Homo sapien
tgcagccccgagactggaggaaaga

SEQ ID NO: 1246774 - DNA, 25 bp, Homo sapien
gtctccgcgcatcgcgctcagcctg

SEQ ID NO: 1246775 - DNA, 25 bp, Homo sapien
tgccgcgcggccggggacgctcggg

SEQ ID NO: 1246776 - DNA, 25 bp, Homo sapien
gcggccggggacgctcgggcctcat

SEQ ID NO: 1246777 - DNA, 25 bp, Homo sapien
cgcgcggccggggacgctcgggcct

SEQ ID NO: 1246778 - DNA, 25 bp, Homo sapien
gggcgctgccgcgcggccggggacg

SEQ ID NO: 1246779 - DNA, 25 bp, Homo sapien
tagatgaacacgaagagcagcgcgt

SEQ ID NO: 1246780 - DNA, 25 bp, Homo sapien
tacaagttcatcagcgtgagggtga

SEQ ID NO: 1246781 - DNA, 25 bp, Homo sapien
gaattggccgccacgaagtctttga

SEQ ID NO: 1246782 - DNA, 25 bp, Homo sapien
gtagacgacggtgaggccaagcttc

SEQ ID NO: 1246783 - DNA, 25 bp, Homo sapien
cctacactctcagccctagggccgg

SEQ ID NO: 1246784 - DNA, 25 bp, Homo sapien
agagccggcgccttctccctacact

SEQ ID NO: 1246785 - DNA, 25 bp, Homo sapien
cagggttcggacgaccccagagccg

SEQ ID NO: 1246786 - DNA, 25 bp, Homo sapien
gacaaatgcccgcaaacaggacagg

SEQ ID NO: 1246787 - DNA, 25 bp, Homo sapien
tgcgcacggagaagcgccccgaatc

SEQ ID NO: 1246788 - DNA, 25 bp, Homo sapien
aggcgctgctgcttcgcgctgcgca

SEQ ID NO: 1246789 - DNA, 25 bp, Homo sapien
tactaactggcgtgtgcaggcgctg

SEQ ID NO: 1246790 - DNA, 25 bp, Homo sapien
gaatccaccgcacgatgcggagcca

SEQ ID NO: 1246791 - DNA, 25 bp, Homo sapien
cagctcggagctgggtgttacccca

SEQ ID NO: 1246792 - DNA, 25 bp, Homo sapien
tagtaagccgcagttctgtagagct

SEQ ID NO: 1246793 - DNA, 25 bp, Homo sapien
cagtaactctgatgagcggcagcag

SEQ ID NO: 1246794 - DNA, 25 bp, Homo sapien
tgctgtttagcaatccggtggaatg

SEQ ID NO: 1246795 - DNA, 25 bp, Homo sapien
gagcaagtcatctacgacctctcag

SEQ ID NO: 1246796 - DNA, 25 bp, Homo sapien
ccttgagcaagtcatctacgacctc

SEQ ID NO: 1246797 - DNA, 25 bp, Homo sapien
agcaagtcatctacgacctctcagc

SEQ ID NO: 1246798 - DNA, 25 bp, Homo sapien
ttgagcaagtcatctacgacctctc

SEQ ID NO: 1246799 - DNA, 25 bp, Homo sapien
ggccacgtgcggcagtgtgcagtgt

SEQ ID NO: 1246800 - DNA, 25 bp, Homo sapien
gcggcagtgtgcagtgtcgtaccat

SEQ ID NO: 1246801 - DNA, 25 bp, Homo sapien
gtcccgggccacgtgcggcagtgtg

SEQ ID NO: 1246802 - DNA, 25 bp, Homo sapien
agggtcccgggccacgtgcggcagt

SEQ ID NO: 1246803 - DNA, 25 bp, Homo sapien
ctccctgagcctcataaactgagct

SEQ ID NO: 1246804 - DNA, 25 bp, Homo sapien
ttcactccatccaacggcgccaaca

SEQ ID NO: 1246805 - DNA, 25 bp, Homo sapien
ctccatcggctcacgagagcctccc

SEQ ID NO: 1246806 - DNA, 25 bp, Homo sapien
tgagcttcactccatccaacggcgc

SEQ ID NO: 1246807 - DNA, 25 bp, Homo sapien
agcagggtgacaagacagtcggtcc

SEQ ID NO: 1246808 - DNA, 25 bp, Homo sapien
ttcccggaagacacacaaggcggct

SEQ ID NO: 1246809 - DNA, 25 bp, Homo sapien
gaaatccagacaccggagttctcct

SEQ ID NO: 1246810 - DNA, 25 bp, Homo sapien
ctcctttctgcagggttcccggaag

SEQ ID NO: 1246811 - DNA, 25 bp, Homo sapien
caagaatagtacaagaaagaccggc

SEQ ID NO: 1246812 - DNA, 25 bp, Homo sapien
tttcatctgtgataaggcaagtccc

SEQ ID NO: 1246813 - DNA, 25 bp, Homo sapien
atcacagtgggtggcgaaaggcact

SEQ ID NO: 1246814 - DNA, 25 bp, Homo sapien
atccagcaggtcagtcaaagtttaa

SEQ ID NO: 1246815 - DNA, 25 bp, Homo sapien
ggagaatattttgacttggctttga

SEQ ID NO: 1246816 - DNA, 25 bp, Homo sapien
ttctggagaatattttgacttggct

SEQ ID NO: 1246817 - DNA, 25 bp, Homo sapien
attttgacttggctttgaaaatcac

SEQ ID NO: 1246818 - DNA, 25 bp, Homo sapien
cggtatttgagtaattctggagaat

SEQ ID NO: 1246819 - DNA, 25 bp, Homo sapien
tgtggatggataccctgcaagcagc

SEQ ID NO: 1246820 - DNA, 25 bp, Homo sapien
caacttagggttcaatgggcactga

SEQ ID NO: 1246821 - DNA, 25 bp, Homo sapien
acaaaatgtccatgcctcccggtgt

SEQ ID NO: 1246822 - DNA, 25 bp, Homo sapien
ttaggaaagtcataggcctctcccc

SEQ ID NO: 1246823 - DNA, 25 bp, Homo sapien
gcctctgaccagaactaatgtagtt

SEQ ID NO: 1246824 - DNA, 25 bp, Homo sapien
gaggcagctcaatctatggacaggc

SEQ ID NO: 1246825 - DNA, 25 bp, Homo sapien
cttccagaacccagcactcaagagg

SEQ ID NO: 1246826 - DNA, 25 bp, Homo sapien
tggacaggctacgtgctcatcaagc

SEQ ID NO: 1246827 - DNA, 25 bp, Homo sapien
tataacaaaacagacgggtgaccat

SEQ ID NO: 1246828 - DNA, 25 bp, Homo sapien
aatgcctgcgtctccctagacagaa

SEQ ID NO: 1246829 - DNA, 25 bp, Homo sapien
catgggtacacaggcagtcaggttt

SEQ ID NO: 1246830 - DNA, 25 bp, Homo sapien
ggtgaccatctgatcaatgcctgcg

SEQ ID NO: 1246831 - DNA, 25 bp, Homo sapien
gtcattaatggccactcgcacagag

SEQ ID NO: 1246832 - DNA, 25 bp, Homo sapien
aatttcccgtctttaccagcacagc

SEQ ID NO: 1246833 - DNA, 25 bp, Homo sapien
caagtaaatgttggctaaggacatc

SEQ ID NO: 1246834 - DNA, 25 bp, Homo sapien
cacagcacgaagagcgtgtcattaa

SEQ ID NO: 1246835 - DNA, 25 bp, Homo sapien
gcagtcacttgacacacggaggagc

SEQ ID NO: 1246836 - DNA, 25 bp, Homo sapien
gaatggacgctcttgttctgagaaa

SEQ ID NO: 1246837 - DNA, 25 bp, Homo sapien
tagcaggcccgagaggtgtaaagca

SEQ ID NO: 1246838 - DNA, 25 bp, Homo sapien
tgtaaagcagtatcacggtgacacc

SEQ ID NO: 1246839 - DNA, 25 bp, Homo sapien
tttggtattgtaaatcatctagaga

SEQ ID NO: 1246840 - DNA, 25 bp, Homo sapien
aatgcctcgaggataccaagagtcc

SEQ ID NO: 1246841 - DNA, 25 bp, Homo sapien
tggaaccaatgcctcgaggatacca

SEQ ID NO: 1246842 - DNA, 25 bp, Homo sapien
gaaccaatgcctcgaggataccaag

SEQ ID NO: 1246843 - DNA, 25 bp, Homo sapien
aaataatacgtatccagcatctccc

SEQ ID NO: 1246844 - DNA, 25 bp, Homo sapien
ttgtaggatttctaactcggaagaa

SEQ ID NO: 1246845 - DNA, 25 bp, Homo sapien
aaataacaccactccaaataatacg

SEQ ID NO: 1246846 - DNA, 25 bp, Homo sapien
ctttgtaggatttctaactcggaag

SEQ ID NO: 1246847 - DNA, 25 bp, Homo sapien
taaccactttagaggagaatataaa

SEQ ID NO: 1246848 - DNA, 25 bp, Homo sapien
taaactcctccgagctaaagaagca

SEQ ID NO: 1246849 - DNA, 25 bp, Homo sapien
ctacctagaataaccactttagagg

SEQ ID NO: 1246850 - DNA, 25 bp, Homo sapien
ataaactcctccgagctaaagaagc

SEQ ID NO: 1246851 - DNA, 25 bp, Homo sapien
aggtggccacatgacggctatctaa

SEQ ID NO: 1246852 - DNA, 25 bp, Homo sapien
cagaactagattatatggtacacca

SEQ ID NO: 1246853 - DNA, 25 bp, Homo sapien
tttaagaatacctatgagccacgcg

SEQ ID NO: 1246854 - DNA, 25 bp, Homo sapien
tcaggtacaccctagaggtcattgc

SEQ ID NO: 1246855 - DNA, 25 bp, Homo sapien
gaaagttgacagcattaaattccta

SEQ ID NO: 1246856 - DNA, 25 bp, Homo sapien
aggcacagcaaaagtggggctgaga

SEQ ID NO: 1246857 - DNA, 25 bp, Homo sapien
ggcacagcaaaagtggggctgagag

SEQ ID NO: 1246858 - DNA, 25 bp, Homo sapien
cgagggttgtcaaagaaataagatc

SEQ ID NO: 1246859 - DNA, 25 bp, Homo sapien
atctgggactgaatccatggctggg

SEQ ID NO: 1246860 - DNA, 25 bp, Homo sapien
catcatcactgtcatatcttcgagg

SEQ ID NO: 1246861 - DNA, 25 bp, Homo sapien
tgaagtccctgaggggcaatgttcc

SEQ ID NO: 1246862 - DNA, 25 bp, Homo sapien
catgtgattaaagatatcatgttcc

SEQ ID NO: 1246863 - DNA, 25 bp, Homo sapien
tccatagacaagtgctgtatttccc

SEQ ID NO: 1246864 - DNA, 25 bp, Homo sapien
gctttagaacatgtgattaaagata

SEQ ID NO: 1246865 - DNA, 25 bp, Homo sapien
gttccattgagtgattccatagaca

SEQ ID NO: 1246866 - DNA, 25 bp, Homo sapien
tatacagcatgactagagaacccag

SEQ ID NO: 1246867 - DNA, 25 bp, Homo sapien
taactacgtcgtgggcctattgtgg

SEQ ID NO: 1246868 - DNA, 25 bp, Homo sapien
ccatatcggtagtgaggactccctc

SEQ ID NO: 1246869 - DNA, 25 bp, Homo sapien
caacctgtggtggtgtctttggaca

SEQ ID NO: 1246870 - DNA, 25 bp, Homo sapien
cacaaaaccatgctacacacagggc

SEQ ID NO: 1246871 - DNA, 25 bp, Homo sapien
gacttgaaacattatatagtatgta

SEQ ID NO: 1246872 - DNA, 25 bp, Homo sapien
ccatgctacacacagggctgaaatg

SEQ ID NO: 1246873 - DNA, 25 bp, Homo sapien
tagtttaggtagacagagctgagat

SEQ ID NO: 1246874 - DNA, 25 bp, Homo sapien
caggaagctgttagtttgttgtccc

SEQ ID NO: 1246875 - DNA, 25 bp, Homo sapien
agttcctgcttgtgccaggaagctg

SEQ ID NO: 1246876 - DNA, 25 bp, Homo sapien
gtttgttgtccccaatcatagtaat

SEQ ID NO: 1246877 - DNA, 25 bp, Homo sapien
cttggtttgtcaggatccaaagttg

SEQ ID NO: 1246878 - DNA, 25 bp, Homo sapien
cattagcgccctactgaaaggaagt

SEQ ID NO: 1246879 - DNA, 25 bp, Homo sapien
ttccttgaggaacctacggcctgaa

SEQ ID NO: 1246880 - DNA, 25 bp, Homo sapien
agaatcggagtgaccatcagtgacc

SEQ ID NO: 1246881 - DNA, 25 bp, Homo sapien
ttttaggagtctaccaatgtggcac

SEQ ID NO: 1246882 - DNA, 25 bp, Homo sapien
tctggaacatggctgacaggcatca

SEQ ID NO: 1246883 - DNA, 25 bp, Homo sapien
tctgggaggcagtacttcataacct

SEQ ID NO: 1246884 - DNA, 25 bp, Homo sapien
taggattccacatagtcttagctca

SEQ ID NO: 1246885 - DNA, 25 bp, Homo sapien
tagaatggcacttccggtctgggag

SEQ ID NO: 1246886 - DNA, 25 bp, Homo sapien
caattagctgcagaggtagacacct

SEQ ID NO: 1246887 - DNA, 25 bp, Homo sapien
tcaactgagttcattgtaaaaaggg

SEQ ID NO: 1246888 - DNA, 25 bp, Homo sapien
cagttacccagaaacgttcacatga

SEQ ID NO: 1246889 - DNA, 25 bp, Homo sapien
ttttcagtgttccatcagacttagc

SEQ ID NO: 1246890 - DNA, 25 bp, Homo sapien
caaacaggtgatggcagatagaggc

SEQ ID NO: 1246891 - DNA, 25 bp, Homo sapien
tacagtgttctatttggcagtgccc

SEQ ID NO: 1246892 - DNA, 25 bp, Homo sapien
caatgcctgtgtggaaagaatgtca

SEQ ID NO: 1246893 - DNA, 25 bp, Homo sapien
gcagacatctaccaaaaaacaggat

SEQ ID NO: 1246894 - DNA, 25 bp, Homo sapien
tttactatgcctaaggttgaccacc

SEQ ID NO: 1246895 - DNA, 25 bp, Homo sapien
atagcctggcttataggtgcacgcc

SEQ ID NO: 1246896 - DNA, 25 bp, Homo sapien
tgtgccagtgttgaattaacccgtc

SEQ ID NO: 1246897 - DNA, 25 bp, Homo sapien
tatttccattcagctacaaagtggg

SEQ ID NO: 1246898 - DNA, 25 bp, Homo sapien
gcattggctggcattgtattaaggg

SEQ ID NO: 1246899 - DNA, 25 bp, Homo sapien
ttgtttcttatcataatggcaagca

SEQ ID NO: 1246900 - DNA, 25 bp, Homo sapien
ctggcattgtattaagggcttttac

SEQ ID NO: 1246901 - DNA, 25 bp, Homo sapien
ggttgtttcttatcataatggcaag

SEQ ID NO: 1246902 - DNA, 25 bp, Homo sapien
tttaaggaatatctacaggtgcagc

SEQ ID NO: 1246903 - DNA, 25 bp, Homo sapien
tacctgcagaaaccatagctactca

SEQ ID NO: 1246904 - DNA, 25 bp, Homo sapien
cagttcacagtaaacctctcagtag

SEQ ID NO: 1246905 - DNA, 25 bp, Homo sapien
gtttgcaaactgaggtacctgcaga

SEQ ID NO: 1246906 - DNA, 25 bp, Homo sapien
actggagaaaatcctcgctcatgtc

SEQ ID NO: 1246907 - DNA, 25 bp, Homo sapien
caccactccctcagttaaaggctat

SEQ ID NO: 1246908 - DNA, 25 bp, Homo sapien
taaatgattgtgtgagcctggtgac

SEQ ID NO: 1246909 - DNA, 25 bp, Homo sapien
tgacttgattggagcctcctctact

SEQ ID NO: 1246910 - DNA, 25 bp, Homo sapien
catctgtgtagaagtaatgcaggta

SEQ ID NO: 1246911 - DNA, 25 bp, Homo sapien
ttgcatctgtgtagaagtaatgcag

SEQ ID NO: 1246912 - DNA, 25 bp, Homo sapien
gatacaatttggaagattgcatctg

SEQ ID NO: 1246913 - DNA, 25 bp, Homo sapien
gtaatgcaggtacaagatctagagt

SEQ ID NO: 1246914 - DNA, 25 bp, Homo sapien
ttcactgtatataaacggtactttc

SEQ ID NO: 1246915 - DNA, 25 bp, Homo sapien
tagaatacaatctatgcaatcctcg

SEQ ID NO: 1246916 - DNA, 25 bp, Homo sapien
aatcctcgaactcagtgtgcttttc

SEQ ID NO: 1246917 - DNA, 25 bp, Homo sapien
tatataaaaaggtagattaggtcaa

SEQ ID NO: 1246918 - DNA, 25 bp, Homo sapien
gggctggcccaagagtgttctttta

SEQ ID NO: 1246919 - DNA, 25 bp, Homo sapien
ttttgtgtgtgtaatgggctggccc

SEQ ID NO: 1246920 - DNA, 25 bp, Homo sapien
ggtgaacaagacctctcccctatgc

SEQ ID NO: 1246921 - DNA, 25 bp, Homo sapien
ggccctttcaatgcatagttacaga

SEQ ID NO: 1246922 - DNA, 25 bp, Homo sapien
gggactacggacacatgctattttg

SEQ ID NO: 1246923 - DNA, 25 bp, Homo sapien
cagctgttgcttccctgtatttaaa

SEQ ID NO: 1246924 - DNA, 25 bp, Homo sapien
tatgaggcctgtagaaagataacac

SEQ ID NO: 1246925 - DNA, 25 bp, Homo sapien
ctatgtaggttgagatttcagacac

SEQ ID NO: 1246926 - DNA, 25 bp, Homo sapien
tcctcattgttcattgaattagaat

SEQ ID NO: 1246927 - DNA, 25 bp, Homo sapien
aataggcagatccaaggtgtttttt

SEQ ID NO: 1246928 - DNA, 25 bp, Homo sapien
ctcattgttcattgaattagaattt

SEQ ID NO: 1246929 - DNA, 25 bp, Homo sapien
cctcattgttcattgaattagaatt

SEQ ID NO: 1246930 - DNA, 25 bp, Homo sapien
gatgcagctttcagaataccatgag

SEQ ID NO: 1246931 - DNA, 25 bp, Homo sapien
tatgtacttctgaaatccgggtagt

SEQ ID NO: 1246932 - DNA, 25 bp, Homo sapien
tagcaaaacctgacctaaactggtg

SEQ ID NO: 1246933 - DNA, 25 bp, Homo sapien
gagcttttagccactttgaggacaa

SEQ ID NO: 1246934 - DNA, 25 bp, Homo sapien
gatatttacaccttcaatgaataag

SEQ ID NO: 1246935 - DNA, 25 bp, Homo sapien
cactgtggccagctcatattttgac

SEQ ID NO: 1246936 - DNA, 25 bp, Homo sapien
tttgagatcgttaaaatgtttgccc

SEQ ID NO: 1246937 - DNA, 25 bp, Homo sapien
ggaataatcaatagttggacgtttg

SEQ ID NO: 1246938 - DNA, 25 bp, Homo sapien
ttttatcaaagcaagccattgaacc

SEQ ID NO: 1246939 - DNA, 25 bp, Homo sapien
ccagcccatagtggagtaagttaga

SEQ ID NO: 1246940 - DNA, 25 bp, Homo sapien
gagcttctacgatagtatggtaaac

SEQ ID NO: 1246941 - DNA, 25 bp, Homo sapien
agtgcttaacactcatagtcattta

SEQ ID NO: 1246942 - DNA, 25 bp, Homo sapien
cattatgatataccatctgccatgg

SEQ ID NO: 1246943 - DNA, 25 bp, Homo sapien
caaagaagctttcattgactgggca

SEQ ID NO: 1246944 - DNA, 25 bp, Homo sapien
tctgccatggaccttcaattgaagc

SEQ ID NO: 1246945 - DNA, 25 bp, Homo sapien
gcaagatatgatgattcacgggatc

SEQ ID NO: 1246946 - DNA, 25 bp, Homo sapien
aataaagatcatcataccctctctc

SEQ ID NO: 1246947 - DNA, 25 bp, Homo sapien
ttgccattgatatgtttttagagaa

SEQ ID NO: 1246948 - DNA, 25 bp, Homo sapien
gctctctctcccgtgtaatcttttg

SEQ ID NO: 1246949 - DNA, 25 bp, Homo sapien
tgtttttcactactgcgcatccata

SEQ ID NO: 1246950 - DNA, 25 bp, Homo sapien
tgagaacttgcagtccccagatgtg

SEQ ID NO: 1246951 - DNA, 25 bp, Homo sapien
gccagaagcttaagggaggtgtcca

SEQ ID NO: 1246952 - DNA, 25 bp, Homo sapien
caggtgggtatacaggccagaagct

SEQ ID NO: 1246953 - DNA, 25 bp, Homo sapien
ccttatggtaggaggcgcagacaat

SEQ ID NO: 1246954 - DNA, 25 bp, Homo sapien
tttgttcatgcatcgcactccttac

SEQ ID NO: 1246955 - DNA, 25 bp, Homo sapien
tagtttggctattgtgttcttcagg

SEQ ID NO: 1246956 - DNA, 25 bp, Homo sapien
tagtctgctgttggacccctctact

SEQ ID NO: 1246957 - DNA, 25 bp, Homo sapien
gactccttctaaatgtcctgttagg

SEQ ID NO: 1246958 - DNA, 25 bp, Homo sapien
taagcaagctaacaggagggatctg

SEQ ID NO: 1246959 - DNA, 25 bp, Homo sapien
tgtaattctgcttggtggtatccta

SEQ ID NO: 1246960 - DNA, 25 bp, Homo sapien
tatcctatgagtcccttagactgtc

SEQ ID NO: 1246961 - DNA, 25 bp, Homo sapien
tctggtactctgataatgtgtgtaa

SEQ ID NO: 1246962 - DNA, 25 bp, Homo sapien
gtagtctctttttcttcgatgtcag

SEQ ID NO: 1246963 - DNA, 25 bp, Homo sapien
tggtcacataagatacttcgtatga

SEQ ID NO: 1246964 - DNA, 25 bp, Homo sapien
ctagtttcatgttagtgtggtcaca

SEQ ID NO: 1246965 - DNA, 25 bp, Homo sapien
gaacatagtcgtgattagtagtctc

SEQ ID NO: 1246966 - DNA, 25 bp, Homo sapien
tctcacagaggagggttaatgccat

SEQ ID NO: 1246967 - DNA, 25 bp, Homo sapien
ctctcacagaggagggttaatgcca

SEQ ID NO: 1246968 - DNA, 25 bp, Homo sapien
cctctcacagaggagggttaatgcc

SEQ ID NO: 1246969 - DNA, 25 bp, Homo sapien
ggtattaacagatacttcacttgat

SEQ ID NO: 1246970 - DNA, 25 bp, Homo sapien
gttctcgggtagaggacatatcagg

SEQ ID NO: 1246971 - DNA, 25 bp, Homo sapien
gtagaggacatatcaggtattaaca

SEQ ID NO: 1246972 - DNA, 25 bp, Homo sapien
catgtaatatattgttctcgggtag

SEQ ID NO: 1246973 - DNA, 25 bp, Homo sapien
tggtgaagcactggaaactaaaggc

SEQ ID NO: 1246974 - DNA, 25 bp, Homo sapien
tttggtgaagcactggaaactaaag

SEQ ID NO: 1246975 - DNA, 25 bp, Homo sapien
gtgaagcactggaaactaaaggcat

SEQ ID NO: 1246976 - DNA, 25 bp, Homo sapien
ggtgaagcactggaaactaaaggca

SEQ ID NO: 1246977 - DNA, 25 bp, Homo sapien
tgaggcttagctgaccagatccttt

SEQ ID NO: 1246978 - DNA, 25 bp, Homo sapien
tctgccaagtggcatcgccaggtaa

SEQ ID NO: 1246979 - DNA, 25 bp, Homo sapien
caggtaagtcccaatacgagactgg

SEQ ID NO: 1246980 - DNA, 25 bp, Homo sapien
gaagcgatgattacaagtgttctca

SEQ ID NO: 1246981 - DNA, 25 bp, Homo sapien
actgtcggactagagctttctgggc

SEQ ID NO: 1246982 - DNA, 25 bp, Homo sapien
ttttactcttcctcgagcaccttcc

SEQ ID NO: 1246983 - DNA, 25 bp, Homo sapien
agagttgggggcactccgcagaccc

SEQ ID NO: 1246984 - DNA, 25 bp, Homo sapien
gggcaagacttcactcgaactgtcg

SEQ ID NO: 1246985 - DNA, 25 bp, Homo sapien
cgggagatgggacgggcatgaacca

SEQ ID NO: 1246986 - DNA, 25 bp, Homo sapien
cgagcgcccagagaaacggtgacgt

SEQ ID NO: 1246987 - DNA, 25 bp, Homo sapien
cagagaaacggtgacgtccttccct

SEQ ID NO: 1246988 - DNA, 25 bp, Homo sapien
gaaccacctcggctgtcttgcgaag

SEQ ID NO: 1246989 - DNA, 25 bp, Homo sapien
cgtccagtgcgggaaacatctgcga

SEQ ID NO: 1246990 - DNA, 25 bp, Homo sapien
ttttcctctcggatgtgttaagcgg

SEQ ID NO: 1246991 - DNA, 25 bp, Homo sapien
cactccgggtaatggcagtcaaaag

SEQ ID NO: 1246992 - DNA, 25 bp, Homo sapien
aggaagatggtgacggtccccctga

SEQ ID NO: 1246993 - DNA, 25 bp, Homo sapien
taagcccgagtgatagcgggccggg

SEQ ID NO: 1246994 - DNA, 25 bp, Homo sapien
ccgcggtgtgggtagaggtcagcat

SEQ ID NO: 1246995 - DNA, 25 bp, Homo sapien
cctgagcttcctgcggagcgtcgtc

SEQ ID NO: 1246996 - DNA, 25 bp, Homo sapien
gtcgtcgaggcgcaggtaagcccga

SEQ ID NO: 1246997 - DNA, 25 bp, Homo sapien
ttggggaaagagtcgcctgcctccg

SEQ ID NO: 1246998 - DNA, 25 bp, Homo sapien
agagtcgcctgcctccggactggag

SEQ ID NO: 1246999 - DNA, 25 bp, Homo sapien
ggaaagagtcgcctgcctccggact

SEQ ID NO: 1247000 - DNA, 25 bp, Homo sapien
tgttggggaaagagtcgcctgcctc

SEQ ID NO: 1247001 - DNA, 25 bp, Homo sapien
gttcccgagtcctctcgttcagcgg

SEQ ID NO: 1247002 - DNA, 25 bp, Homo sapien
ctagagcctggcgtctgcgaggact

SEQ ID NO: 1247003 - DNA, 25 bp, Homo sapien
taactcgcccgcgtactgggtgaat

SEQ ID NO: 1247004 - DNA, 25 bp, Homo sapien
ggccttcgcagttgtagttcccgag

SEQ ID NO: 1247005 - DNA, 25 bp, Homo sapien
atacgcttcagaccgaaagtcaaag

SEQ ID NO: 1247006 - DNA, 25 bp, Homo sapien
cccacagcagatgtgaggctacaga

SEQ ID NO: 1247007 - DNA, 25 bp, Homo sapien
tgagacaaagaatacgcttcagacc

SEQ ID NO: 1247008 - DNA, 25 bp, Homo sapien
cagcagatgtgaggctacagaaaaa

SEQ ID NO: 1247009 - DNA, 25 bp, Homo sapien
gaagcatgggtgatagcacatcccc

SEQ ID NO: 1247010 - DNA, 25 bp, Homo sapien
gggaaggttctaactgaacatcatc

SEQ ID NO: 1247011 - DNA, 25 bp, Homo sapien
cagggcctctcacaatgctggtttc

SEQ ID NO: 1247012 - DNA, 25 bp, Homo sapien
taactgaacatcatctgcaggaagc

SEQ ID NO: 1247013 - DNA, 25 bp, Homo sapien
ctgggggagaagttgatgaggcagg

SEQ ID NO: 1247014 - DNA, 25 bp, Homo sapien
tgggggagaagttgatgaggcagga

SEQ ID NO: 1247015 - DNA, 25 bp, Homo sapien
ggcaggaggacaatgaagtcaatga

SEQ ID NO: 1247016 - DNA, 25 bp, Homo sapien
gatgaggcaggaggacaatgaagtc

SEQ ID NO: 1247017 - DNA, 25 bp, Homo sapien
gctggctggaacctattgctgggta

SEQ ID NO: 1247018 - DNA, 25 bp, Homo sapien
cttcttagagcgctccttggaggca

SEQ ID NO: 1247019 - DNA, 25 bp, Homo sapien
ccacatcttactggagactgcaggg

SEQ ID NO: 1247020 - DNA, 25 bp, Homo sapien
gcctgagccgtgcagatgtccacat

SEQ ID NO: 1247021 - DNA, 25 bp, Homo sapien
tgcagcttcattgggcagcacatgg

SEQ ID NO: 1247022 - DNA, 25 bp, Homo sapien
cacatggacggcagcttggaagtag

SEQ ID NO: 1247023 - DNA, 25 bp, Homo sapien
cagaggttcacgtgttgcagcttca

SEQ ID NO: 1247024 - DNA, 25 bp, Homo sapien
taggaagctgtaggcaaccaacact

SEQ ID NO: 1247025 - DNA, 25 bp, Homo sapien
aggcaggcatgactgaagtctcaca

SEQ ID NO: 1247026 - DNA, 25 bp, Homo sapien
cttaaacaattgaccccaggtatgg

SEQ ID NO: 1247027 - DNA, 25 bp, Homo sapien
tctctggtcccgagtactttacaga

SEQ ID NO: 1247028 - DNA, 25 bp, Homo sapien
ttacagagctcagaatgcttggagc

SEQ ID NO: 1247029 - DNA, 25 bp, Homo sapien
cattccagtgcgtgtatttaagcat

SEQ ID NO: 1247030 - DNA, 25 bp, Homo sapien
tttgtcagagacacagcattccagt

SEQ ID NO: 1247031 - DNA, 25 bp, Homo sapien
gagacacagcattccagtgcgtgta

SEQ ID NO: 1247032 - DNA, 25 bp, Homo sapien
tctgtttgtcagagacacagcattc

SEQ ID NO: 1247033 - DNA, 25 bp, Homo sapien
gcaacagattgcgagaagatgctcg

SEQ ID NO: 1247034 - DNA, 25 bp, Homo sapien
aagatgctcgctggttgtctggcca

SEQ ID NO: 1247035 - DNA, 25 bp, Homo sapien
accttctagatgaaagctctctggg

SEQ ID NO: 1247036 - DNA, 25 bp, Homo sapien
attctctggagtttgccatggaaga

SEQ ID NO: 1247037 - DNA, 25 bp, Homo sapien
ctcttggtgaccaggagctttagtg

SEQ ID NO: 1247038 - DNA, 25 bp, Homo sapien
gaccaggagctttagtgcctctccc

SEQ ID NO: 1247039 - DNA, 25 bp, Homo sapien
catctgtttagtcgtcctgaggccc

SEQ ID NO: 1247040 - DNA, 25 bp, Homo sapien
tgcctctccccatctgtttagtcgt

SEQ ID NO: 1247041 - DNA, 25 bp, Homo sapien
aaggactggccttaagaaacggctg

SEQ ID NO: 1247042 - DNA, 25 bp, Homo sapien
agactgcgagcgaaggactggcctt

SEQ ID NO: 1247043 - DNA, 25 bp, Homo sapien
actgccgcccgggacagactgcgag

SEQ ID NO: 1247044 - DNA, 25 bp, Homo sapien
aacggctgcagtcgcgggtcgcttt

SEQ ID NO: 1247045 - DNA, 25 bp, Homo sapien
tcctgctttggcaattagcaaagcc

SEQ ID NO: 1247046 - DNA, 25 bp, Homo sapien
ggcaattagcaaagccccttcgctg

SEQ ID NO: 1247047 - DNA, 25 bp, Homo sapien
tcggtacctccctccagaggcgcgg

SEQ ID NO: 1247048 - DNA, 25 bp, Homo sapien
cttcgctgcgcgtccctcggtacct

SEQ ID NO: 1247049 - DNA, 25 bp, Homo sapien
tccttcgcttcttccacgagctcac

SEQ ID NO: 1247050 - DNA, 25 bp, Homo sapien
ctgcggttccgacgcgcctggagca

SEQ ID NO: 1247051 - DNA, 25 bp, Homo sapien
ttccgacgcgcctggagcaaaccgt

SEQ ID NO: 1247052 - DNA, 25 bp, Homo sapien
gcctggagcaaaccgtggctctgcg

SEQ ID NO: 1247053 - DNA, 25 bp, Homo sapien
aacgagcgtccgagcggggctggca

SEQ ID NO: 1247054 - DNA, 25 bp, Homo sapien
gttaggggcaaacgagcgtccgagc

SEQ ID NO: 1247055 - DNA, 25 bp, Homo sapien
ggcaaacgagcgtccgagcggggct

SEQ ID NO: 1247056 - DNA, 25 bp, Homo sapien
aggggcaaacgagcgtccgagcggg

SEQ ID NO: 1247057 - DNA, 25 bp, Homo sapien
gcgcgcagagggtcgtccggtgaag

SEQ ID NO: 1247058 - DNA, 25 bp, Homo sapien
gcagagggtcgtccggtgaagccat

SEQ ID NO: 1247059 - DNA, 25 bp, Homo sapien
gcgcagagggtcgtccggtgaagcc

SEQ ID NO: 1247060 - DNA, 25 bp, Homo sapien
tgcgcgcagagggtcgtccggtgaa

SEQ ID NO: 1247061 - DNA, 25 bp, Homo sapien
gagcgggcgcggcgctgtgtccctt

SEQ ID NO: 1247062 - DNA, 25 bp, Homo sapien
cgggcgcggcgctgtgtccctttac

SEQ ID NO: 1247063 - DNA, 25 bp, Homo sapien
ccaggagcgggcgcggcgctgtgtc

SEQ ID NO: 1247064 - DNA, 25 bp, Homo sapien
aggagcgggcgcggcgctgtgtccc

SEQ ID NO: 1247065 - DNA, 25 bp, Homo sapien
tatcaggttctgtgtaactctcttc

SEQ ID NO: 1247066 - DNA, 25 bp, Homo sapien
ctaaacggttatatcaggttctgtg

SEQ ID NO: 1247067 - DNA, 25 bp, Homo sapien
ttcagtgtttccaacctcaacaaaa

SEQ ID NO: 1247068 - DNA, 25 bp, Homo sapien
aggttctgtgtaactctcttcagtg

SEQ ID NO: 1247069 - DNA, 25 bp, Homo sapien
ttaaaggataaagtgctagggtctg

SEQ ID NO: 1247070 - DNA, 25 bp, Homo sapien
tccactggttcctttaccatatgat

SEQ ID NO: 1247071 - DNA, 25 bp, Homo sapien
catattaaaggataaagtgctaggg

SEQ ID NO: 1247072 - DNA, 25 bp, Homo sapien
ctgtgtcttccactggttcctttac

SEQ ID NO: 1247073 - DNA, 25 bp, Homo sapien
agggagttccgtatcttgaatggga

SEQ ID NO: 1247074 - DNA, 25 bp, Homo sapien
tagggagttccgtatcttgaatggg

SEQ ID NO: 1247075 - DNA, 25 bp, Homo sapien
ttagggagttccgtatcttgaatgg

SEQ ID NO: 1247076 - DNA, 25 bp, Homo sapien
ctttagggagttccgtatcttgaat

SEQ ID NO: 1247077 - DNA, 25 bp, Homo sapien
tttgtgaagtgcatccccaggtcag

SEQ ID NO: 1247078 - DNA, 25 bp, Homo sapien
tgctaaggcaaaggcagtgaccctg

SEQ ID NO: 1247079 - DNA, 25 bp, Homo sapien
caggggcatcgaggtacacagccat

SEQ ID NO: 1247080 - DNA, 25 bp, Homo sapien
gggcagctgtacaggcactgtttgt

SEQ ID NO: 1247081 - DNA, 25 bp, Homo sapien
catatctgaatttcgtgggcagttc

SEQ ID NO: 1247082 - DNA, 25 bp, Homo sapien
gaatttcgtgggcagttcaaagtaa

SEQ ID NO: 1247083 - DNA, 25 bp, Homo sapien
tttcatatctgaatttcgtgggcag

SEQ ID NO: 1247084 - DNA, 25 bp, Homo sapien
ttcgtgggcagttcaaagtaattgt

SEQ ID NO: 1247085 - DNA, 25 bp, Homo sapien
gaactttccagggtgtgggacatca

SEQ ID NO: 1247086 - DNA, 25 bp, Homo sapien
cagggtgtgggacatcaagttcaca

SEQ ID NO: 1247087 - DNA, 25 bp, Homo sapien
atcattccaccgtcagactctttcg

SEQ ID NO: 1247088 - DNA, 25 bp, Homo sapien
cattccaccgtcagactctttcggg

SEQ ID NO: 1247089 - DNA, 25 bp, Homo sapien
cgatacttagacctgccaatcctga

SEQ ID NO: 1247090 - DNA, 25 bp, Homo sapien
tctccgacaattgacactccgatac

SEQ ID NO: 1247091 - DNA, 25 bp, Homo sapien
tgtgtatgggtgctcacagtgattg

SEQ ID NO: 1247092 - DNA, 25 bp, Homo sapien
gccaatcctgaaagcattctttgtg

SEQ ID NO: 1247093 - DNA, 25 bp, Homo sapien
catcaataatgaatcacgacttctc

SEQ ID NO: 1247094 - DNA, 25 bp, Homo sapien
acatcaataatgaatcacgacttct

SEQ ID NO: 1247095 - DNA, 25 bp, Homo sapien
gacatcaataatgaatcacgacttc

SEQ ID NO: 1247096 - DNA, 25 bp, Homo sapien
tcaataatgaatcacgacttctcac

SEQ ID NO: 1247097 - DNA, 25 bp, Homo sapien
actttaaggcctccaaatttcagat

SEQ ID NO: 1247098 - DNA, 25 bp, Homo sapien
tatcaggtaattgtgcagtggccaa

SEQ ID NO: 1247099 - DNA, 25 bp, Homo sapien
agagccaggtccaaccgcctaactt

SEQ ID NO: 1247100 - DNA, 25 bp, Homo sapien
gccaaattctcatctccggggagga

SEQ ID NO: 1247101 - DNA, 25 bp, Homo sapien
caggtaagaggtgcaaggtgtattc

SEQ ID NO: 1247102 - DNA, 25 bp, Homo sapien
tcaggtaagaggtgcaaggtgtatt

SEQ ID NO: 1247103 - DNA, 25 bp, Homo sapien
ctcaggtaagaggtgcaaggtgtat

SEQ ID NO: 1247104 - DNA, 25 bp, Homo sapien
tccagcaaatgctggtcgggtccat

SEQ ID NO: 1247105 - DNA, 25 bp, Homo sapien
cagatcttgttggagcttgaaggga

SEQ ID NO: 1247106 - DNA, 25 bp, Homo sapien
tactgtatgtaatgacttcgggtct

SEQ ID NO: 1247107 - DNA, 25 bp, Homo sapien
ggcctgtcgggctgacaccagatat

SEQ ID NO: 1247108 - DNA, 25 bp, Homo sapien
ggaagaggatctccagtgctatctg

SEQ ID NO: 1247109 - DNA, 25 bp, Homo sapien
gaagaggatctccagtgctatctgg

SEQ ID NO: 1247110 - DNA, 25 bp, Homo sapien
ctggaagaggatctccagtgctatc

SEQ ID NO: 1247111 - DNA, 25 bp, Homo sapien
agaggatctccagtgctatctggaa

SEQ ID NO: 1247112 - DNA, 25 bp, Homo sapien
tacctgggctgatgatagctgcccc

SEQ ID NO: 1247113 - DNA, 25 bp, Homo sapien
ctgatgatagctgcccctgagggct

SEQ ID NO: 1247114 - DNA, 25 bp, Homo sapien
tttcagcttggttacctgggctgat

SEQ ID NO: 1247115 - DNA, 25 bp, Homo sapien
gcttggttacctgggctgatgatag

SEQ ID NO: 1247116 - DNA, 25 bp, Homo sapien
ggaaaaagttgagtacgcactgcac

SEQ ID NO: 1247117 - DNA, 25 bp, Homo sapien
ttctaatatcgtgtttctaagggga

SEQ ID NO: 1247118 - DNA, 25 bp, Homo sapien
gggaaaaagttgagtacgcactgca

SEQ ID NO: 1247119 - DNA, 25 bp, Homo sapien
aggggaaaaagttgagtacgcactg

SEQ ID NO: 1247120 - DNA, 25 bp, Homo sapien
cataaattggggccacatctttaat

SEQ ID NO: 1247121 - DNA, 25 bp, Homo sapien
taaattggggccacatctttaatca

SEQ ID NO: 1247122 - DNA, 25 bp, Homo sapien
ataaattggggccacatctttaatc

SEQ ID NO: 1247123 - DNA, 25 bp, Homo sapien
aggctccctttgaagtggcgccaac

SEQ ID NO: 1247124 - DNA, 25 bp, Homo sapien
catccacaggctccctttgaagtgg

SEQ ID NO: 1247125 - DNA, 25 bp, Homo sapien
gctccctttgaagtggcgccaacac

SEQ ID NO: 1247126 - DNA, 25 bp, Homo sapien
ttcatccacaggctccctttgaagt

SEQ ID NO: 1247127 - DNA, 25 bp, Homo sapien
gagtaaccagccgacacttgcatgc

SEQ ID NO: 1247128 - DNA, 25 bp, Homo sapien
acacttgcatgcacctcagcccttg

SEQ ID NO: 1247129 - DNA, 25 bp, Homo sapien
gggctgctgtgtctgtgagtaacca

SEQ ID NO: 1247130 - DNA, 25 bp, Homo sapien
tgtgtctgtgagtaaccagccgaca

SEQ ID NO: 1247131 - DNA, 25 bp, Homo sapien
caggtcaacaagaggcctaacatat

SEQ ID NO: 1247132 - DNA, 25 bp, Homo sapien
ttagtccacaggtcaacaagaggcc

SEQ ID NO: 1247133 - DNA, 25 bp, Homo sapien
acaagaggcctaacatatgcattca

SEQ ID NO: 1247134 - DNA, 25 bp, Homo sapien
ggagaaacaatttagtccacaggtc

SEQ ID NO: 1247135 - DNA, 25 bp, Homo sapien
tgggtgacacggatccagctttatc

SEQ ID NO: 1247136 - DNA, 25 bp, Homo sapien
tcctgatcacgtctagtaagtcctg

SEQ ID NO: 1247137 - DNA, 25 bp, Homo sapien
cggagcaagcaggaggaacaagtac

SEQ ID NO: 1247138 - DNA, 25 bp, Homo sapien
caggaagcacaattcgtcataggac

SEQ ID NO: 1247139 - DNA, 25 bp, Homo sapien
ctccacgtcggccctgtggtagagc

SEQ ID NO: 1247140 - DNA, 25 bp, Homo sapien
tccacgtcggccctgtggtagagcc

SEQ ID NO: 1247141 - DNA, 25 bp, Homo sapien
tctccacgtcggccctgtggtagag

SEQ ID NO: 1247142 - DNA, 25 bp, Homo sapien
ctagaagtgcctggaggggtctcca

SEQ ID NO: 1247143 - DNA, 25 bp, Homo sapien
gttgtttcaacatccggagaggcca

SEQ ID NO: 1247144 - DNA, 25 bp, Homo sapien
tgcagacactcaggtaagcattcct

SEQ ID NO: 1247145 - DNA, 25 bp, Homo sapien
ggactttggcccttagaggatacta

SEQ ID NO: 1247146 - DNA, 25 bp, Homo sapien
tctttgaaaccgtgggaatggcact

SEQ ID NO: 1247147 - DNA, 25 bp, Homo sapien
gaacaccgggactggcaagatgact

SEQ ID NO: 1247148 - DNA, 25 bp, Homo sapien
gaatgatgaggcaccatgacacacc

SEQ ID NO: 1247149 - DNA, 25 bp, Homo sapien
ctttggagttgccagacaagtcggc

SEQ ID NO: 1247150 - DNA, 25 bp, Homo sapien
tcttctcattcacggccgaggctgt

SEQ ID NO: 1247151 - DNA, 25 bp, Homo sapien
caaggggcaccagtcttgagctgcc

SEQ ID NO: 1247152 - DNA, 25 bp, Homo sapien
ctcagatcagcaaggggcaccagtc

SEQ ID NO: 1247153 - DNA, 25 bp, Homo sapien
atcagcaaggggcaccagtcttgag

SEQ ID NO: 1247154 - DNA, 25 bp, Homo sapien
gggcaccagtcttgagctgcccagg

SEQ ID NO: 1247155 - DNA, 25 bp, Homo sapien
tctgaagttcctgccggcaaactta

SEQ ID NO: 1247156 - DNA, 25 bp, Homo sapien
agttcctgccggcaaacttagcctt

SEQ ID NO: 1247157 - DNA, 25 bp, Homo sapien
tttctgaagttcctgccggcaaact

SEQ ID NO: 1247158 - DNA, 25 bp, Homo sapien
tgccggcaaacttagccttgctgcc

SEQ ID NO: 1247159 - DNA, 25 bp, Homo sapien
caagggtagctaactagcagcggcc

SEQ ID NO: 1247160 - DNA, 25 bp, Homo sapien
tgtcaaacactattcccatggcctt

SEQ ID NO: 1247161 - DNA, 25 bp, Homo sapien
ccccggagatgacactggagggtca

SEQ ID NO: 1247162 - DNA, 25 bp, Homo sapien
ggctccggtgatttgggccaattac

SEQ ID NO: 1247163 - DNA, 25 bp, Homo sapien
acacccggcctaactatcacattaa

SEQ ID NO: 1247164 - DNA, 25 bp, Homo sapien
cacccggcctaactatcacattaaa

SEQ ID NO: 1247165 - DNA, 25 bp, Homo sapien
ctgttcttccatcttttctgtctct

SEQ ID NO: 1247166 - DNA, 25 bp, Homo sapien
tgttcttccatcttttctgtctctg

SEQ ID NO: 1247167 - DNA, 25 bp, Homo sapien
gttcttccatcttttctgtctctgt

SEQ ID NO: 1247168 - DNA, 25 bp, Homo sapien
ccttgtggctttcagtagagcaggg

SEQ ID NO: 1247169 - DNA, 25 bp, Homo sapien
cttgtggctttcagtagagcagggc

SEQ ID NO: 1247170 - DNA, 25 bp, Homo sapien
ggccaccgagaatggccttgtggct

SEQ ID NO: 1247171 - DNA, 25 bp, Homo sapien
gctgtcccaggccaccgagaatggc

SEQ ID NO: 1247172 - DNA, 25 bp, Homo sapien
ccactctctcctttgtaaagtatcg

SEQ ID NO: 1247173 - DNA, 25 bp, Homo sapien
actctctcctttgtaaagtatcggc

SEQ ID NO: 1247174 - DNA, 25 bp, Homo sapien
ttccactctctcctttgtaaagtat

SEQ ID NO: 1247175 - DNA, 25 bp, Homo sapien
tctctcctttgtaaagtatcggcat

SEQ ID NO: 1247176 - DNA, 25 bp, Homo sapien
tgtgagtcctcctgtgtgtagatgt

SEQ ID NO: 1247177 - DNA, 25 bp, Homo sapien
gtgtgagtcctcctgtgtgtagatg

SEQ ID NO: 1247178 - DNA, 25 bp, Homo sapien
cctgtgtgagtcctcctgtgtgtag

SEQ ID NO: 1247179 - DNA, 25 bp, Homo sapien
cttgggctcatgtagataagctgtg

SEQ ID NO: 1247180 - DNA, 25 bp, Homo sapien
taggactaaagtgtcattaaggatg

SEQ ID NO: 1247181 - DNA, 25 bp, Homo sapien
gaatgttgctactgccttgggctca

SEQ ID NO: 1247182 - DNA, 25 bp, Homo sapien
taaggatgaaagacaaggccagatg

SEQ ID NO: 1247183 - DNA, 25 bp, Homo sapien
ttcttctggtctaggtggtgagcac

SEQ ID NO: 1247184 - DNA, 25 bp, Homo sapien
tcttctggtctaggtggtgagcacc

SEQ ID NO: 1247185 - DNA, 25 bp, Homo sapien
agcatggctcagttcaggatgtccg

SEQ ID NO: 1247186 - DNA, 25 bp, Homo sapien
gcaaaagcgctgataagctcaatcg

SEQ ID NO: 1247187 - DNA, 25 bp, Homo sapien
ggagctaccctcttgtacatttgca

SEQ ID NO: 1247188 - DNA, 25 bp, Homo sapien
gctgatttctaggaggcatccccag

SEQ ID NO: 1247189 - DNA, 25 bp, Homo sapien
ctgaggaacatcctccatgaagctt

SEQ ID NO: 1247190 - DNA, 25 bp, Homo sapien
catgaagcttcggggacctgcctca

SEQ ID NO: 1247191 - DNA, 25 bp, Homo sapien
caggggaagattcaggggtcactgg

SEQ ID NO: 1247192 - DNA, 25 bp, Homo sapien
gctgaggaacatcctccatgaagct

SEQ ID NO: 1247193 - DNA, 25 bp, Homo sapien
tacaggtgataacacgaagtcagct

SEQ ID NO: 1247194 - DNA, 25 bp, Homo sapien
gaagtcagcttaaaaagtacagcac

SEQ ID NO: 1247195 - DNA, 25 bp, Homo sapien
cagcacaaagatgtataaacagtat

SEQ ID NO: 1247196 - DNA, 25 bp, Homo sapien
acaaagatttaggagctcaagagcc

SEQ ID NO: 1247197 - DNA, 25 bp, Homo sapien
tgcactgctctctccggtaacttcc

SEQ ID NO: 1247198 - DNA, 25 bp, Homo sapien
taacttccctgattgtccgcagtga

SEQ ID NO: 1247199 - DNA, 25 bp, Homo sapien
tctccggtaacttccctgattgtcc

SEQ ID NO: 1247200 - DNA, 25 bp, Homo sapien
tgattgtccgcagtgattctccctc

SEQ ID NO: 1247201 - DNA, 25 bp, Homo sapien
tctttgttggccatggtagggaaac

SEQ ID NO: 1247202 - DNA, 25 bp, Homo sapien
gcccgacctgacaagcatttttgaa

SEQ ID NO: 1247203 - DNA, 25 bp, Homo sapien
tctggattcagtgaaaccgttgaca

SEQ ID NO: 1247204 - DNA, 25 bp, Homo sapien
actacaccagaccaggccttcataa

SEQ ID NO: 1247205 - DNA, 25 bp, Homo sapien
tgcgtttggcattttgcggtgctct

SEQ ID NO: 1247206 - DNA, 25 bp, Homo sapien
aagcgtcttcttcctacgcggtcct

SEQ ID NO: 1247207 - DNA, 25 bp, Homo sapien
tacgcggtcctgttgcgtttggcat

SEQ ID NO: 1247208 - DNA, 25 bp, Homo sapien
ggtgctctctctaggcttttgctga

SEQ ID NO: 1247209 - DNA, 25 bp, Homo sapien
tagctcaaaggatgagatagcctat

SEQ ID NO: 1247210 - DNA, 25 bp, Homo sapien
gaatggcttacagactatgatgtta

SEQ ID NO: 1247211 - DNA, 25 bp, Homo sapien
gaggagtataaattaattcatctca

SEQ ID NO: 1247212 - DNA, 25 bp, Homo sapien
atttgatatgaggaaaatgtatctg

SEQ ID NO: 1247213 - DNA, 25 bp, Homo sapien
caaatccagtcttttcaggtgggag

SEQ ID NO: 1247214 - DNA, 25 bp, Homo sapien
tccgaagttctacaggatcatgtcc

SEQ ID NO: 1247215 - DNA, 25 bp, Homo sapien
gggagaaacaagcttctagaactat

SEQ ID NO: 1247216 - DNA, 25 bp, Homo sapien
taaaagaatcttagtgacgagaggg

SEQ ID NO: 1247217 - DNA, 25 bp, Homo sapien
tacctcttccgattatcttccccaa

SEQ ID NO: 1247218 - DNA, 25 bp, Homo sapien
catggacggtgtcttctacctcttc

SEQ ID NO: 1247219 - DNA, 25 bp, Homo sapien
ttccccaggaagtgtcatggacggt

SEQ ID NO: 1247220 - DNA, 25 bp, Homo sapien
aagtgtcatggacggtgtcttctac

SEQ ID NO: 1247221 - DNA, 25 bp, Homo sapien
tcgccagttatcctgcgtgtgggtg

SEQ ID NO: 1247222 - DNA, 25 bp, Homo sapien
tagtgataacttggactcgcagcca

SEQ ID NO: 1247223 - DNA, 25 bp, Homo sapien
caagctccccatccgttagtgataa

SEQ ID NO: 1247224 - DNA, 25 bp, Homo sapien
ggttcagtacgctggactgtgccca

SEQ ID NO: 1247225 - DNA, 25 bp, Homo sapien
agaactggaaggagttgtatcggac

SEQ ID NO: 1247226 - DNA, 25 bp, Homo sapien
gtccgatacaactccttccagttct

SEQ ID NO: 1247227 - DNA, 25 bp, Homo sapien
ttcctcgtctgcctcggatccaagt

SEQ ID NO: 1247228 - DNA, 25 bp, Homo sapien
ctgggacttttcaggaccagggtgg

SEQ ID NO: 1247229 - DNA, 25 bp, Homo sapien
tggaccaagcgctggccttcccggg

SEQ ID NO: 1247230 - DNA, 25 bp, Homo sapien
tccaggtctaggagggagggcgctc

SEQ ID NO: 1247231 - DNA, 25 bp, Homo sapien
gacaggagtcagtcctcgttcactt

SEQ ID NO: 1247232 - DNA, 25 bp, Homo sapien
gccgctgatcgccacccagctcggc

SEQ ID NO: 1247233 - DNA, 25 bp, Homo sapien
ttttggacagggacccgccgctgat

SEQ ID NO: 1247234 - DNA, 25 bp, Homo sapien
cggctcgcgcgcctcactgctgtgg

SEQ ID NO: 1247235 - DNA, 25 bp, Homo sapien
cacggagcaggttgtttgtcagcag

SEQ ID NO: 1247236 - DNA, 25 bp, Homo sapien
actggtgtttcaggcgctccacgga

SEQ ID NO: 1247237 - DNA, 25 bp, Homo sapien
caaagactggtgtttcaggcgctcc

SEQ ID NO: 1247238 - DNA, 25 bp, Homo sapien
agctaagtgccgtcagggttcccgg

SEQ ID NO: 1247239 - DNA, 25 bp, Homo sapien
ccgaggccgggggtcgcgcgactca

SEQ ID NO: 1247240 - DNA, 25 bp, Homo sapien
cgaggccgggggtcgcgcgactcac

SEQ ID NO: 1247241 - DNA, 25 bp, Homo sapien
actgtcccacccatcaaatggtgat

SEQ ID NO: 1247242 - DNA, 25 bp, Homo sapien
gatttaggagccgtgacatccgaat

SEQ ID NO: 1247243 - DNA, 25 bp, Homo sapien
ttaggagccgtgacatccgaatgcc

SEQ ID NO: 1247244 - DNA, 25 bp, Homo sapien
aatggtgatttaggagccgtgacat

SEQ ID NO: 1247245 - DNA, 25 bp, Homo sapien
gtggcgctcggcctcaggctaggag

SEQ ID NO: 1247246 - DNA, 25 bp, Homo sapien
tgataatcccttatgccccggagcg

SEQ ID NO: 1247247 - DNA, 25 bp, Homo sapien
atgtccaagaaaggccgcgactcct

SEQ ID NO: 1247248 - DNA, 25 bp, Homo sapien
gggtgggtttgcagcgaggagacac

SEQ ID NO: 1247249 - DNA, 25 bp, Homo sapien
aaatgactcggcatcctaaagagcg

SEQ ID NO: 1247250 - DNA, 25 bp, Homo sapien
tgtataataacaagccagtgaccca

SEQ ID NO: 1247251 - DNA, 25 bp, Homo sapien
tcacgtacggtcaaaggaagtcaca

SEQ ID NO: 1247252 - DNA, 25 bp, Homo sapien
caaaaagaatggatgccgagttgcc

SEQ ID NO: 1247253 - DNA, 25 bp, Homo sapien
ctggattgaaactgaggcactggcc

SEQ ID NO: 1247254 - DNA, 25 bp, Homo sapien
ttcttgtcgattggagtctcttctg

SEQ ID NO: 1247255 - DNA, 25 bp, Homo sapien
tctgtgtatgacctaagattttagg

SEQ ID NO: 1247256 - DNA, 25 bp, Homo sapien
cagcttcttgtcgattggagtctct

SEQ ID NO: 1247257 - DNA, 25 bp, Homo sapien
tttccagcttcttgtcgattggagt

SEQ ID NO: 1247258 - DNA, 25 bp, Homo sapien
cgggttatagatgatattctgtagg

SEQ ID NO: 1247259 - DNA, 25 bp, Homo sapien
ttctgtaggttgtttaaggacaaca

SEQ ID NO: 1247260 - DNA, 25 bp, Homo sapien
tctaggacctgcctgaactgcacga

SEQ ID NO: 1247261 - DNA, 25 bp, Homo sapien
aatattctattggatctgtcctggc

SEQ ID NO: 1247262 - DNA, 25 bp, Homo sapien
ctccactagaggacaagagctgttt

SEQ ID NO: 1247263 - DNA, 25 bp, Homo sapien
ctgagggaaagatcgagacattaac

SEQ ID NO: 1247264 - DNA, 25 bp, Homo sapien
ctggactcccagactgcaacccaga

SEQ ID NO: 1247265 - DNA, 25 bp, Homo sapien
gctggactcccagactgcaacccag

SEQ ID NO: 1247266 - DNA, 25 bp, Homo sapien
tggactcccagactgcaacccagac

SEQ ID NO: 1247267 - DNA, 25 bp, Homo sapien
tgcgtcactaggaacatgcccacgt

SEQ ID NO: 1247268 - DNA, 25 bp, Homo sapien
gatccagctgatcaggaatggtgcc

SEQ ID NO: 1247269 - DNA, 25 bp, Homo sapien
gaatggtgccaacaaacgggattac

SEQ ID NO: 1247270 - DNA, 25 bp, Homo sapien
tatcacaatcaaagttccaggatcc

SEQ ID NO: 1247271 - DNA, 25 bp, Homo sapien
atgagggaagacacaggggccccat

SEQ ID NO: 1247272 - DNA, 25 bp, Homo sapien
tatgagggaagacacaggggcccca

SEQ ID NO: 1247273 - DNA, 25 bp, Homo sapien
tatatgagggaagacacaggggccc

SEQ ID NO: 1247274 - DNA, 25 bp, Homo sapien
ctatatgagggaagacacaggggcc

SEQ ID NO: 1247275 - DNA, 25 bp, Homo sapien
cagccggcccttttgaaacgaggat

SEQ ID NO: 1247276 - DNA, 25 bp, Homo sapien
tctcttttgaaaggcgtgtcatagg

SEQ ID NO: 1247277 - DNA, 25 bp, Homo sapien
tgtcataggtgatctcttcccgtcc

SEQ ID NO: 1247278 - DNA, 25 bp, Homo sapien
aatgaaaggccacatcggctcgagg

SEQ ID NO: 1247279 - DNA, 25 bp, Homo sapien
tcaacctgtccctctccaaaaccta

SEQ ID NO: 1247280 - DNA, 25 bp, Homo sapien
taatgaggactcaacctgtccctct

SEQ ID NO: 1247281 - DNA, 25 bp, Homo sapien
ggactcaacctgtccctctccaaaa

SEQ ID NO: 1247282 - DNA, 25 bp, Homo sapien
actaatgaggactcaacctgtccct

SEQ ID NO: 1247283 - DNA, 25 bp, Homo sapien
cagtcataagtatatgtgcgtgtgc

SEQ ID NO: 1247284 - DNA, 25 bp, Homo sapien
tgtgcgcctctgcatacatgtgaga

SEQ ID NO: 1247285 - DNA, 25 bp, Homo sapien
gagttcctgatttgattaagcacca

SEQ ID NO: 1247286 - DNA, 25 bp, Homo sapien
tgaccaaatggtaaccgaaagcacc

SEQ ID NO: 1247287 - DNA, 25 bp, Homo sapien
gccatagagcagagtatgttttcca

SEQ ID NO: 1247288 - DNA, 25 bp, Homo sapien
taaaaccaattgagtgaatattcac

SEQ ID NO: 1247289 - DNA, 25 bp, Homo sapien
attcactttgccataaatgcccaga

SEQ ID NO: 1247290 - DNA, 25 bp, Homo sapien
cgagctgaagctaaaaccaattgag

SEQ ID NO: 1247291 - DNA, 25 bp, Homo sapien
tctgtcagttccagactagatgctt

SEQ ID NO: 1247292 - DNA, 25 bp, Homo sapien
cagttccagactagatgcttgggta

SEQ ID NO: 1247293 - DNA, 25 bp, Homo sapien
tccagactagatgcttgggtacttt

SEQ ID NO: 1247294 - DNA, 25 bp, Homo sapien
cagactagatgcttgggtactttgt

SEQ ID NO: 1247295 - DNA, 25 bp, Homo sapien
aaatattccacatgaaataacccag

SEQ ID NO: 1247296 - DNA, 25 bp, Homo sapien
atattccacatgaaataacccaggc

SEQ ID NO: 1247297 - DNA, 25 bp, Homo sapien
aaaatattccacatgaaataaccca

SEQ ID NO: 1247298 - DNA, 25 bp, Homo sapien
aatattccacatgaaataacccagg

SEQ ID NO: 1247299 - DNA, 25 bp, Homo sapien
gttctacagtaaggaatggaatgaa

SEQ ID NO: 1247300 - DNA, 25 bp, Homo sapien
tagggaaacagttctacagtaagga

SEQ ID NO: 1247301 - DNA, 25 bp, Homo sapien
aacagttctacagtaaggaatggaa

SEQ ID NO: 1247302 - DNA, 25 bp, Homo sapien
ggaaacagttctacagtaaggaatg

SEQ ID NO: 1247303 - DNA, 25 bp, Homo sapien
tgctcttggtgtagacagttctggg

SEQ ID NO: 1247304 - DNA, 25 bp, Homo sapien
ctttgacacatagttcataggtggt

SEQ ID NO: 1247305 - DNA, 25 bp, Homo sapien
ttgacagtcgaatctttgctcttgg

SEQ ID NO: 1247306 - DNA, 25 bp, Homo sapien
cataggtggtattttggtgcaagtc

SEQ ID NO: 1247307 - DNA, 25 bp, Homo sapien
taagaaaatttggtgctcttcaaac

SEQ ID NO: 1247308 - DNA, 25 bp, Homo sapien
tatgagtgaaacacgccaggaaggc

SEQ ID NO: 1247309 - DNA, 25 bp, Homo sapien
tccagggacggcacacaaatgcaga

SEQ ID NO: 1247310 - DNA, 25 bp, Homo sapien
tggctcgaagcaaacacacatgatt

SEQ ID NO: 1247311 - DNA, 25 bp, Homo sapien
ggttgactctcgaatccgtccaggg

SEQ ID NO: 1247312 - DNA, 25 bp, Homo sapien
cgatctccagggaaaactcgtgtcc

SEQ ID NO: 1247313 - DNA, 25 bp, Homo sapien
cggaatgtttcagagccatgaccct

SEQ ID NO: 1247314 - DNA, 25 bp, Homo sapien
tccaaagaacactacggaatgtttc

SEQ ID NO: 1247315 - DNA, 25 bp, Homo sapien
gaaagcgatctccagggaaaactcg

SEQ ID NO: 1247316 - DNA, 25 bp, Homo sapien
cttctcctttaacgacgacagttcg

SEQ ID NO: 1247317 - DNA, 25 bp, Homo sapien
cccatgggggtgttcaaccttgcag

SEQ ID NO: 1247318 - DNA, 25 bp, Homo sapien
cgacagttcgtccagggcccatggg

SEQ ID NO: 1247319 - DNA, 25 bp, Homo sapien
tgttcaaccttgcagcgaatggcag

SEQ ID NO: 1247320 - DNA, 25 bp, Homo sapien
gtgactggtaccgaaggatactgac

SEQ ID NO: 1247321 - DNA, 25 bp, Homo sapien
ggcggtaacaggcacggaagtatct

SEQ ID NO: 1247322 - DNA, 25 bp, Homo sapien
acggaagtatctgcactgtgactgg

SEQ ID NO: 1247323 - DNA, 25 bp, Homo sapien
tcacgggtggaaggcggtaacaggc

SEQ ID NO: 1247324 - DNA, 25 bp, Homo sapien
gctttaatattcaggcgtgggttca

SEQ ID NO: 1247325 - DNA, 25 bp, Homo sapien
tgggttcaagtgtagagcaatatcc

SEQ ID NO: 1247326 - DNA, 25 bp, Homo sapien
caaagtacatcccaggactaaatgg

SEQ ID NO: 1247327 - DNA, 25 bp, Homo sapien
tcctgctagtaggtcaacattaaag

SEQ ID NO: 1247328 - DNA, 25 bp, Homo sapien
tgagtcctcaagaacccacatggtc

SEQ ID NO: 1247329 - DNA, 25 bp, Homo sapien
cctgaaaccgtctaccctgatggga

SEQ ID NO: 1247330 - DNA, 25 bp, Homo sapien
tgatggccagtgcaagcaagcagtt

SEQ ID NO: 1247331 - DNA, 25 bp, Homo sapien
gcaagcagttttagggtctccacgt

SEQ ID NO: 1247332 - DNA, 25 bp, Homo sapien
gcttccgggtgagcagactactgca

SEQ ID NO: 1247333 - DNA, 25 bp, Homo sapien
tactgtatcagagcaagtgcaaagc

SEQ ID NO: 1247334 - DNA, 25 bp, Homo sapien
tctgataacagctggccaagatgaa

SEQ ID NO: 1247335 - DNA, 25 bp, Homo sapien
tgccgaacagctggaacacggattt

SEQ ID NO: 1247336 - DNA, 25 bp, Homo sapien
cctgtgctcctcgcccccatgaagg

SEQ ID NO: 1247337 - DNA, 25 bp, Homo sapien
ttctggtgccacgctgccagtgcca

SEQ ID NO: 1247338 - DNA, 25 bp, Homo sapien
tctggtgccacgctgccagtgccag

SEQ ID NO: 1247339 - DNA, 25 bp, Homo sapien
ctggtgccacgctgccagtgccagg

SEQ ID NO: 1247340 - DNA, 25 bp, Homo sapien
tactagccttttacatcacctttac

SEQ ID NO: 1247341 - DNA, 25 bp, Homo sapien
tttacatcacctttacacctacact

SEQ ID NO: 1247342 - DNA, 25 bp, Homo sapien
atcacctttacacctacacttcata

SEQ ID NO: 1247343 - DNA, 25 bp, Homo sapien
gccttttacatcacctttacaccta

SEQ ID NO: 1247344 - DNA, 25 bp, Homo sapien
tgcaaccttgaattctctaacatca

SEQ ID NO: 1247345 - DNA, 25 bp, Homo sapien
ttccagtaagtggatgtctccatta

SEQ ID NO: 1247346 - DNA, 25 bp, Homo sapien
ttgtactccaggctgtgtacgccat

SEQ ID NO: 1247347 - DNA, 25 bp, Homo sapien
ttaatttccagcgtgtcaatactgc

SEQ ID NO: 1247348 - DNA, 25 bp, Homo sapien
cagtagcgcacagaagagtcgaagc

SEQ ID NO: 1247349 - DNA, 25 bp, Homo sapien
tcatggcaaggactgagaacaccca

SEQ ID NO: 1247350 - DNA, 25 bp, Homo sapien
gatagtgcctgccttatgaatgcct

SEQ ID NO: 1247351 - DNA, 25 bp, Homo sapien
tgcgtttcagcaaggccagtatcac

SEQ ID NO: 1247352 - DNA, 25 bp, Homo sapien
tctgccccagtctaatgtgataaaa

SEQ ID NO: 1247353 - DNA, 25 bp, Homo sapien
gggctagcgatttctacactgagta

SEQ ID NO: 1247354 - DNA, 25 bp, Homo sapien
caagatctgacctgtaaagatccca

SEQ ID NO: 1247355 - DNA, 25 bp, Homo sapien
tatacatggaacttctgccaactcc

SEQ ID NO: 1247356 - DNA, 25 bp, Homo sapien
taatctctagtactgggtcatggtg

SEQ ID NO: 1247357 - DNA, 25 bp, Homo sapien
tcattttgggtaggcgaacttcagc

SEQ ID NO: 1247358 - DNA, 25 bp, Homo sapien
gagagatgaaggcaacacgctgctt

SEQ ID NO: 1247359 - DNA, 25 bp, Homo sapien
cagaaacactgggtggcacgaggaa

SEQ ID NO: 1247360 - DNA, 25 bp, Homo sapien
ggtgccttaatacacctacttggat

SEQ ID NO: 1247361 - DNA, 25 bp, Homo sapien
gcctatcgtatagagctgcagaaag

SEQ ID NO: 1247362 - DNA, 25 bp, Homo sapien
tgatacacggtatttttatacagac

SEQ ID NO: 1247363 - DNA, 25 bp, Homo sapien
tgggtgccatgttacttttggtgcc

SEQ ID NO: 1247364 - DNA, 25 bp, Homo sapien
gatgtccacttttagtagcaaccga

SEQ ID NO: 1247365 - DNA, 25 bp, Homo sapien
gaacatagagtcttaggcccaggaa

SEQ ID NO: 1247366 - DNA, 25 bp, Homo sapien
gcagttgatccagtcctcatacagg

SEQ ID NO: 1247367 - DNA, 25 bp, Homo sapien
gatttggatataacgtgactagcag

SEQ ID NO: 1247368 - DNA, 25 bp, Homo sapien
catacaattatagtggtgaccagtc

SEQ ID NO: 1247369 - DNA, 25 bp, Homo sapien
gctggcgagcgccaatgaagtaaaa

SEQ ID NO: 1247370 - DNA, 25 bp, Homo sapien
gaggcactttattgccagcctggcg

SEQ ID NO: 1247371 - DNA, 25 bp, Homo sapien
gagtttatcccaagcgactgtcctg

SEQ ID NO: 1247372 - DNA, 25 bp, Homo sapien
ggaaatcctgattgaatctaggtag

SEQ ID NO: 1247373 - DNA, 25 bp, Homo sapien
ttatagacaaggcatgtgaggaaca

SEQ ID NO: 1247374 - DNA, 25 bp, Homo sapien
tccaaaattagaagaccagtagggc

SEQ ID NO: 1247375 - DNA, 25 bp, Homo sapien
gccccaaaactaggatattgtgaca

SEQ ID NO: 1247376 - DNA, 25 bp, Homo sapien
tgagactattatgatgaacccccac

SEQ ID NO: 1247377 - DNA, 25 bp, Homo sapien
caatgagactattatgatgaacccc

SEQ ID NO: 1247378 - DNA, 25 bp, Homo sapien
taacaatgagactattatgatgaac

SEQ ID NO: 1247379 - DNA, 25 bp, Homo sapien
gagactattatgatgaacccccaca

SEQ ID NO: 1247380 - DNA, 25 bp, Homo sapien
tagtgtatttgtggatgcgctgcca

SEQ ID NO: 1247381 - DNA, 25 bp, Homo sapien
caacttgttgatacactgggtgcag

SEQ ID NO: 1247382 - DNA, 25 bp, Homo sapien
gaagattacttgcacctactcattg

SEQ ID NO: 1247383 - DNA, 25 bp, Homo sapien
tgcctatggcgaaaaggtcagaacc

SEQ ID NO: 1247384 - DNA, 25 bp, Homo sapien
tcatgctattgaccctctgagggat

SEQ ID NO: 1247385 - DNA, 25 bp, Homo sapien
tctcagtgtccaccaagttggcaag

SEQ ID NO: 1247386 - DNA, 25 bp, Homo sapien
agtgtcttaacatcattcgggtggg

SEQ ID NO: 1247387 - DNA, 25 bp, Homo sapien
cagtgccagtcgaataagtaaatgc

SEQ ID NO: 1247388 - DNA, 25 bp, Homo sapien
catgctacatgccaagatgcttcgt

SEQ ID NO: 1247389 - DNA, 25 bp, Homo sapien
tacatgccaagatgcttcgtactgc

SEQ ID NO: 1247390 - DNA, 25 bp, Homo sapien
tgggtcatgctacatgccaagatgc

SEQ ID NO: 1247391 - DNA, 25 bp, Homo sapien
aagatgcttcgtactgctgatccca

SEQ ID NO: 1247392 - DNA, 25 bp, Homo sapien
ggcactgaactacaaccagacagat

SEQ ID NO: 1247393 - DNA, 25 bp, Homo sapien
gcactgaactacaaccagacagata

SEQ ID NO: 1247394 - DNA, 25 bp, Homo sapien
cactgaactacaaccagacagatat

SEQ ID NO: 1247395 - DNA, 25 bp, Homo sapien
aaccaacattgaatctgccctaaaa

SEQ ID NO: 1247396 - DNA, 25 bp, Homo sapien
ctgtgagaaagctcacagggcaaca

SEQ ID NO: 1247397 - DNA, 25 bp, Homo sapien
ccctgagtgctcccttttggaaatg

SEQ ID NO: 1247398 - DNA, 25 bp, Homo sapien
ggcagccgaggacttctgacatctc

SEQ ID NO: 1247399 - DNA, 25 bp, Homo sapien
tcacagggcaacatcaaggagggca

SEQ ID NO: 1247400 - DNA, 25 bp, Homo sapien
ctccttggctatgctgctgcagtac

SEQ ID NO: 1247401 - DNA, 25 bp, Homo sapien
ccttggctatgctgctgcagtacaa

SEQ ID NO: 1247402 - DNA, 25 bp, Homo sapien
tccttggctatgctgctgcagtaca

SEQ ID NO: 1247403 - DNA, 25 bp, Homo sapien
ctgggacgcgttccaggacttgagt

SEQ ID NO: 1247404 - DNA, 25 bp, Homo sapien
cagcgtcctgggacgcgttccagga

SEQ ID NO: 1247405 - DNA, 25 bp, Homo sapien
gcaacactgaaacagtggttctggg

SEQ ID NO: 1247406 - DNA, 25 bp, Homo sapien
cagcaagcaacactgaaacagtggt

SEQ ID NO: 1247407 - DNA, 25 bp, Homo sapien
cacagaagagtcatcattggagtcg

SEQ ID NO: 1247408 - DNA, 25 bp, Homo sapien
agacgcgctggatcctgcagtagga

SEQ ID NO: 1247409 - DNA, 25 bp, Homo sapien
cagcataggacaacagcaaccttca

SEQ ID NO: 1247410 - DNA, 25 bp, Homo sapien
gcaaccttcaatcctccttcgtata

SEQ ID NO: 1247411 - DNA, 25 bp, Homo sapien
catggagcagtagagctggaaaaaa

SEQ ID NO: 1247412 - DNA, 25 bp, Homo sapien
cgaattcatcccatgcagactggac

SEQ ID NO: 1247413 - DNA, 25 bp, Homo sapien
tgcctccggtgggaatcgaattcat

SEQ ID NO: 1247414 - DNA, 25 bp, Homo sapien
ggaatcgaattcatcccatgcagac

SEQ ID NO: 1247415 - DNA, 25 bp, Homo sapien
tgcagactggactttcccaaggagc

SEQ ID NO: 1247416 - DNA, 25 bp, Homo sapien
cccgtctgctaatctacccagaaga

SEQ ID NO: 1247417 - DNA, 25 bp, Homo sapien
gcatcttgcccgtctgctaatctac

SEQ ID NO: 1247418 - DNA, 25 bp, Homo sapien
ttgcccgtctgctaatctacccaga

SEQ ID NO: 1247419 - DNA, 25 bp, Homo sapien
tgcatcttgcccgtctgctaatcta

SEQ ID NO: 1247420 - DNA, 25 bp, Homo sapien
cagacttgatgaatctgagtttggg

SEQ ID NO: 1247421 - DNA, 25 bp, Homo sapien
tttttaggatgtaggatgttagacg

SEQ ID NO: 1247422 - DNA, 25 bp, Homo sapien
ctgagtagggagatgtaattcggac

SEQ ID NO: 1247423 - DNA, 25 bp, Homo sapien
taggatgttagacggtgaagaccag

SEQ ID NO: 1247424 - DNA, 25 bp, Homo sapien
actggcaaacggacccacggaggcg

SEQ ID NO: 1247425 - DNA, 25 bp, Homo sapien
tgggtctcgggcgaagcaccagctc

SEQ ID NO: 1247426 - DNA, 25 bp, Homo sapien
gggctcggacgcacgggctgactgg

SEQ ID NO: 1247427 - DNA, 25 bp, Homo sapien
tctcggggcgacacgcctgggcgct

SEQ ID NO: 1247428 - DNA, 25 bp, Homo sapien
gcacgccgggctctatctggttcat

SEQ ID NO: 1247429 - DNA, 25 bp, Homo sapien
catcctcgtcgtacacgtagttgta

SEQ ID NO: 1247430 - DNA, 25 bp, Homo sapien
tacacgtagttgtactgcacgccgg

SEQ ID NO: 1247431 - DNA, 25 bp, Homo sapien
tggatcatgtactcatcctcgtcgt

SEQ ID NO: 1247432 - DNA, 25 bp, Homo sapien
ctgtacctccgatgctgctagcgcg

SEQ ID NO: 1247433 - DNA, 25 bp, Homo sapien
gtgtcctgcctgtccccggacgtgt

SEQ ID NO: 1247434 - DNA, 25 bp, Homo sapien
cgcgggttggtgtgaggaacagaac

SEQ ID NO: 1247435 - DNA, 25 bp, Homo sapien
tcagatctggtctaacgcgggttgg

SEQ ID NO: 1247436 - DNA, 25 bp, Homo sapien
aacccaaaagattgaataaatgact

SEQ ID NO: 1247437 - DNA, 25 bp, Homo sapien
tttccatgactctaggggcagcccg

SEQ ID NO: 1247438 - DNA, 25 bp, Homo sapien
tcatacaacatccctctccaaggaa

SEQ ID NO: 1247439 - DNA, 25 bp, Homo sapien
gggcagcccggtggaaattgcaatg

SEQ ID NO: 1247440 - DNA, 25 bp, Homo sapien
aaggctcccaggctctctatttaat

SEQ ID NO: 1247441 - DNA, 25 bp, Homo sapien
tctctatttaatccgaaccctgtgg

SEQ ID NO: 1247442 - DNA, 25 bp, Homo sapien
ttaatccgaaccctgtgggcggctg

SEQ ID NO: 1247443 - DNA, 25 bp, Homo sapien
agaacaagggcaggggcaactcgaa

SEQ ID NO: 1247444 - DNA, 25 bp, Homo sapien
gattcaactgtagtcgggtaccagg

SEQ ID NO: 1247445 - DNA, 25 bp, Homo sapien
aagtccctcacaagtctaagcgcag

SEQ ID NO: 1247446 - DNA, 25 bp, Homo sapien
caagggccaaatctcatgctcacaa

SEQ ID NO: 1247447 - DNA, 25 bp, Homo sapien
ggtaccaggcagagcttcgactcat

SEQ ID NO: 1247448 - DNA, 25 bp, Homo sapien
tggaagacttagtgccgttcccagg

SEQ ID NO: 1247449 - DNA, 25 bp, Homo sapien
catagtagtttgcaagcgtctcccc

SEQ ID NO: 1247450 - DNA, 25 bp, Homo sapien
tgaactcctctgctcatcatggtag

SEQ ID NO: 1247451 - DNA, 25 bp, Homo sapien
gactgtcctccaacgcattccgtgt

SEQ ID NO: 1247452 - DNA, 25 bp, Homo sapien
tcctgcttccctaccaagttcttaa

SEQ ID NO: 1247453 - DNA, 25 bp, Homo sapien
ttcctgcttccctaccaagttctta

SEQ ID NO: 1247454 - DNA, 25 bp, Homo sapien
ctgcttccctaccaagttcttaaag

SEQ ID NO: 1247455 - DNA, 25 bp, Homo sapien
ctaccaagttcttaaaggcctccat

SEQ ID NO: 1247456 - DNA, 25 bp, Homo sapien
acaccctctcgtgtgaaactactgg

SEQ ID NO: 1247457 - DNA, 25 bp, Homo sapien
tacagccatcactttaatagtgttc

SEQ ID NO: 1247458 - DNA, 25 bp, Homo sapien
aattcccaatttgccaagattacct

SEQ ID NO: 1247459 - DNA, 25 bp, Homo sapien
tgtatcacgatggttctgaacaccc

SEQ ID NO: 1247460 - DNA, 25 bp, Homo sapien
cacagtgaggaatgaagctatcagt

SEQ ID NO: 1247461 - DNA, 25 bp, Homo sapien
agtctcttgcatatcccttcagtgg

SEQ ID NO: 1247462 - DNA, 25 bp, Homo sapien
cagtgaggaatgaagctatcagtct

SEQ ID NO: 1247463 - DNA, 25 bp, Homo sapien
cacacagtgaggaatgaagctatca

SEQ ID NO: 1247464 - DNA, 25 bp, Homo sapien
ctgtatcttcaccttttgaaaccct

SEQ ID NO: 1247465 - DNA, 25 bp, Homo sapien
agcatgagcttaaggccattcctga

SEQ ID NO: 1247466 - DNA, 25 bp, Homo sapien
aaaagcagcatgagcttaaggccat

SEQ ID NO: 1247467 - DNA, 25 bp, Homo sapien
tctgggtgccggctttccttaggtg

SEQ ID NO: 1247468 - DNA, 25 bp, Homo sapien
ctcaatctgggtgccggctttcctt

SEQ ID NO: 1247469 - DNA, 25 bp, Homo sapien
gctggctatgtaatccaaagctttg

SEQ ID NO: 1247470 - DNA, 25 bp, Homo sapien
gcaattttgtggaaccgcatttttc

SEQ ID NO: 1247471 - DNA, 25 bp, Homo sapien
cacccctttgctggctatgtaatcc

SEQ ID NO: 1247472 - DNA, 25 bp, Homo sapien
agctttgttgacattagcaattttg

SEQ ID NO: 1247473 - DNA, 25 bp, Homo sapien
ggtcattttcacgttgccatcaaca

SEQ ID NO: 1247474 - DNA, 25 bp, Homo sapien
tatcctgaatagcaaagcgaaggat

SEQ ID NO: 1247475 - DNA, 25 bp, Homo sapien
cttcaaccgaaatatcctgaatagc

SEQ ID NO: 1247476 - DNA, 25 bp, Homo sapien
tcatacccagggtcattttcacgtt

SEQ ID NO: 1247477 - DNA, 25 bp, Homo sapien
aaaagaccagagtctcatgcctgta

SEQ ID NO: 1247478 - DNA, 25 bp, Homo sapien
cacttaaaaagaccagagtctcatg

SEQ ID NO: 1247479 - DNA, 25 bp, Homo sapien
aatcacttaaaaagaccagagtctc

SEQ ID NO: 1247480 - DNA, 25 bp, Homo sapien
tgtttgttggttgatgagtacctaa

SEQ ID NO: 1247481 - DNA, 25 bp, Homo sapien
ccagaagggaataattgaagtgagt

SEQ ID NO: 1247482 - DNA, 25 bp, Homo sapien
cataagtcggtctccggtgccagaa

SEQ ID NO: 1247483 - DNA, 25 bp, Homo sapien
gacttttagatgacataagtcggtc

SEQ ID NO: 1247484 - DNA, 25 bp, Homo sapien
cctgagcttgaattgttttaatgcc

SEQ ID NO: 1247485 - DNA, 25 bp, Homo sapien
ttcacatttctataaggagcagttt

SEQ ID NO: 1247486 - DNA, 25 bp, Homo sapien
catttctataaggagcagttttcct

SEQ ID NO: 1247487 - DNA, 25 bp, Homo sapien
tttctataaggagcagttttcctct

SEQ ID NO: 1247488 - DNA, 25 bp, Homo sapien
cacatttctataaggagcagttttc

SEQ ID NO: 1247489 - DNA, 25 bp, Homo sapien
taccagggtgaaggctagagtaaga

SEQ ID NO: 1247490 - DNA, 25 bp, Homo sapien
gggtacgcagactctgccagggtct

SEQ ID NO: 1247491 - DNA, 25 bp, Homo sapien
gctgagggctgaagagtcgctagtg

SEQ ID NO: 1247492 - DNA, 25 bp, Homo sapien
tttcccaataccagggtgaaggcta

SEQ ID NO: 1247493 - DNA, 25 bp, Homo sapien
tccttttgacttccttgcctgagac

SEQ ID NO: 1247494 - DNA, 25 bp, Homo sapien
tcctgccctgatctggtccgtgctg

SEQ ID NO: 1247495 - DNA, 25 bp, Homo sapien
gagatgtctctactgctgtccctgc

SEQ ID NO: 1247496 - DNA, 25 bp, Homo sapien
gcccggtgagcttgaacactcatct

SEQ ID NO: 1247497 - DNA, 25 bp, Homo sapien
taagctttgagtagtcaatgaggtc

SEQ ID NO: 1247498 - DNA, 25 bp, Homo sapien
agggcacagagtccaaggccatctt

SEQ ID NO: 1247499 - DNA, 25 bp, Homo sapien
cttgttaagctttgagtagtcaatg

SEQ ID NO: 1247500 - DNA, 25 bp, Homo sapien
ttgagtagtcaatgaggtcaggccg

SEQ ID NO: 1247501 - DNA, 25 bp, Homo sapien
ggcagaattgcagttttctaagtta

SEQ ID NO: 1247502 - DNA, 25 bp, Homo sapien
aaggcagaattgcagttttctaagt

SEQ ID NO: 1247503 - DNA, 25 bp, Homo sapien
taaaggcagaattgcagttttctaa

SEQ ID NO: 1247504 - DNA, 25 bp, Homo sapien
gcagaattgcagttttctaagttaa

SEQ ID NO: 1247505 - DNA, 25 bp, Homo sapien
cattttaggaatatccaggtgcttc

SEQ ID NO: 1247506 - DNA, 25 bp, Homo sapien
ctcagcgatttccatggccaggtta

SEQ ID NO: 1247507 - DNA, 25 bp, Homo sapien
aggtgcttctcagcgatttccatgg

SEQ ID NO: 1247508 - DNA, 25 bp, Homo sapien
tttaggaatatccaggtgcttctca

SEQ ID NO: 1247509 - DNA, 25 bp, Homo sapien
caaatttcctgtaactcagcaaaca

SEQ ID NO: 1247510 - DNA, 25 bp, Homo sapien
tcctgtaactcagcaaacacaattt

SEQ ID NO: 1247511 - DNA, 25 bp, Homo sapien
ctgtaactcagcaaacacaattttc

SEQ ID NO: 1247512 - DNA, 25 bp, Homo sapien
aatttcctgtaactcagcaaacaca

SEQ ID NO: 1247513 - DNA, 25 bp, Homo sapien
aacaggaaacataagtcattatggc

SEQ ID NO: 1247514 - DNA, 25 bp, Homo sapien
tttcatcgggtctggcagtgtatac

SEQ ID NO: 1247515 - DNA, 25 bp, Homo sapien
ccagcaaaagcatgatagtaacagg

SEQ ID NO: 1247516 - DNA, 25 bp, Homo sapien
attatggctctttcatcgggtctgg

SEQ ID NO: 1247517 - DNA, 25 bp, Homo sapien
aacctcgttcataaacttgggtcag

SEQ ID NO: 1247518 - DNA, 25 bp, Homo sapien
gatacctgacaattccctatggtga

SEQ ID NO: 1247519 - DNA, 25 bp, Homo sapien
aacatgaacggcataccactgcatg

SEQ ID NO: 1247520 - DNA, 25 bp, Homo sapien
cagacagtctccttactcggaggag

SEQ ID NO: 1247521 - DNA, 25 bp, Homo sapien
tagaaatcaccaagaataacaaaac

SEQ ID NO: 1247522 - DNA, 25 bp, Homo sapien
agaaatcaccaagaataacaaaaca

SEQ ID NO: 1247523 - DNA, 25 bp, Homo sapien
atagaaatcaccaagaataacaaaa

SEQ ID NO: 1247524 - DNA, 25 bp, Homo sapien
cttcctcgtgactccggtcctccaa

SEQ ID NO: 1247525 - DNA, 25 bp, Homo sapien
ctgttgcagatcagagcttgttacc

SEQ ID NO: 1247526 - DNA, 25 bp, Homo sapien
cgtgactccggtcctccaaccgcat

SEQ ID NO: 1247527 - DNA, 25 bp, Homo sapien
cacatggaaacctggtctgttgcag

SEQ ID NO: 1247528 - DNA, 25 bp, Homo sapien
cctcaggaaggccatattgtatcga

SEQ ID NO: 1247529 - DNA, 25 bp, Homo sapien
tctgtgtttcatgggcccgtggtcc

SEQ ID NO: 1247530 - DNA, 25 bp, Homo sapien
tttctgtgtttcatgggcccgtggt

SEQ ID NO: 1247531 - DNA, 25 bp, Homo sapien
gtatcgaaatgattcgtgaacagga

SEQ ID NO: 1247532 - DNA, 25 bp, Homo sapien
gatggctctttcatcgggtttaggg

SEQ ID NO: 1247533 - DNA, 25 bp, Homo sapien
atggctctttcatcgggtttagggg

SEQ ID NO: 1247534 - DNA, 25 bp, Homo sapien
cgcgcccgcaaaagcgtggtagaag

SEQ ID NO: 1247535 - DNA, 25 bp, Homo sapien
tccgcgcccgcaaaagcgtggtaga

SEQ ID NO: 1247536 - DNA, 25 bp, Homo sapien
agcgtggtagaagcaagagacgtac

SEQ ID NO: 1247537 - DNA, 25 bp, Homo sapien
gctccgcgcccgcaaaagcgtggta

SEQ ID NO: 1247538 - DNA, 25 bp, Homo sapien
gatgggcttcacagcggtcactgaa

SEQ ID NO: 1247539 - DNA, 25 bp, Homo sapien
gaaataatgcatactccgcccactg

SEQ ID NO: 1247540 - DNA, 25 bp, Homo sapien
tgttagaccaaatcacggaactgtg

SEQ ID NO: 1247541 - DNA, 25 bp, Homo sapien
caaggccgggttggaaaggcattca

SEQ ID NO: 1247542 - DNA, 25 bp, Homo sapien
cacacacagcatggaacgaggtggg

SEQ ID NO: 1247543 - DNA, 25 bp, Homo sapien
gcgcacacacagcatggaacgaggt

SEQ ID NO: 1247544 - DNA, 25 bp, Homo sapien
cgggaatgcgcacacacagcatgga

SEQ ID NO: 1247545 - DNA, 25 bp, Homo sapien
ctctgtcgacgggaatgcgcacaca

SEQ ID NO: 1247546 - DNA, 25 bp, Homo sapien
ctgtaaaacacaataggtaaacagg

SEQ ID NO: 1247547 - DNA, 25 bp, Homo sapien
tgtaaaacacaataggtaaacagga

SEQ ID NO: 1247548 - DNA, 25 bp, Homo sapien
gcaagaaccttacatatcctgttag

SEQ ID NO: 1247549 - DNA, 25 bp, Homo sapien
gaaccttacatatcctgttagccgc

SEQ ID NO: 1247550 - DNA, 25 bp, Homo sapien
tcttgattcacagcaagaaccttac

SEQ ID NO: 1247551 - DNA, 25 bp, Homo sapien
ctctcattctcttgattcacagcaa

SEQ ID NO: 1247552 - DNA, 25 bp, Homo sapien
gaggcatccaataatttgtaaagga

SEQ ID NO: 1247553 - DNA, 25 bp, Homo sapien
aaatgaggcatccaataatttgtaa

SEQ ID NO: 1247554 - DNA, 25 bp, Homo sapien
catccaataatttgtaaaggatgaa

SEQ ID NO: 1247555 - DNA, 25 bp, Homo sapien
tgaggcatccaataatttgtaaagg

SEQ ID NO: 1247556 - DNA, 25 bp, Homo sapien
tcttctgcatggcttgcatggtctt

SEQ ID NO: 1247557 - DNA, 25 bp, Homo sapien
tccggttctccagccaggggatcgt

SEQ ID NO: 1247558 - DNA, 25 bp, Homo sapien
gtggcttgtgcttccggcggtaatc

SEQ ID NO: 1247559 - DNA, 25 bp, Homo sapien
tcgtgcgacgaatccattccaaaag

SEQ ID NO: 1247560 - DNA, 25 bp, Homo sapien
ttcccgtggcgccaggagggcttgg

SEQ ID NO: 1247561 - DNA, 25 bp, Homo sapien
ctagaaggagggcttcccgtggcgc

SEQ ID NO: 1247562 - DNA, 25 bp, Homo sapien
ccaggagggcttggcgcttgctact

SEQ ID NO: 1247563 - DNA, 25 bp, Homo sapien
gagggcttcccgtggcgccaggagg

SEQ ID NO: 1247564 - DNA, 25 bp, Homo sapien
ttcggaaagcgataaacaaaatgcc

SEQ ID NO: 1247565 - DNA, 25 bp, Homo sapien
taccaggcactagtgagaaactctg

SEQ ID NO: 1247566 - DNA, 25 bp, Homo sapien
gagggctgacaatttctggctacaa

SEQ ID NO: 1247567 - DNA, 25 bp, Homo sapien
tgggcatctagcatgtaccaggcac

SEQ ID NO: 1247568 - DNA, 25 bp, Homo sapien
cataagcccaagtctcgtgcgttga

SEQ ID NO: 1247569 - DNA, 25 bp, Homo sapien
tctcgtgcgttgaggccttctgcct

SEQ ID NO: 1247570 - DNA, 25 bp, Homo sapien
tcattgagcaaccactcctcgtaac

SEQ ID NO: 1247571 - DNA, 25 bp, Homo sapien
aagcgctccagtctccgaatctcat

SEQ ID NO: 1247572 - DNA, 25 bp, Homo sapien
ggtggtagcaagaaagtatgaatat

SEQ ID NO: 1247573 - DNA, 25 bp, Homo sapien
gtggtagcaagaaagtatgaatatg

SEQ ID NO: 1247574 - DNA, 25 bp, Homo sapien
ctctgtcagcgacgccgactcgtaa

SEQ ID NO: 1247575 - DNA, 25 bp, Homo sapien
aacgcctcgtgcttccgcagcagag

SEQ ID NO: 1247576 - DNA, 25 bp, Homo sapien
ttctgcagcaagatctgctctttgc

SEQ ID NO: 1247577 - DNA, 25 bp, Homo sapien
gctcctgcgcgatggctgcgatctg

SEQ ID NO: 1247578 - DNA, 25 bp, Homo sapien
tctgagtaagcgttcccagtcggtc

SEQ ID NO: 1247579 - DNA, 25 bp, Homo sapien
gcaccgatcattgacattcacagcg

SEQ ID NO: 1247580 - DNA, 25 bp, Homo sapien
cagtcggtcccactggtcacaaatt

SEQ ID NO: 1247581 - DNA, 25 bp, Homo sapien
cacagcgtcgtgatagtccagttca

SEQ ID NO: 1247582 - DNA, 25 bp, Homo sapien
gaaaaatatacttcgctgctgtctg

SEQ ID NO: 1247583 - DNA, 25 bp, Homo sapien
tatgccgtaatctcatcacccctgg

SEQ ID NO: 1247584 - DNA, 25 bp, Homo sapien
cagctcaatttactcaggtagaagg

SEQ ID NO: 1247585 - DNA, 25 bp, Homo sapien
ttagaggttcctttcactaggcaac

SEQ ID NO: 1247586 - DNA, 25 bp, Homo sapien
tgaagctgatcaatggtttctagca

SEQ ID NO: 1247587 - DNA, 25 bp, Homo sapien
catagcgccctccatccaattgttg

SEQ ID NO: 1247588 - DNA, 25 bp, Homo sapien
cctcaatgctgtggacaatgaacat

SEQ ID NO: 1247589 - DNA, 25 bp, Homo sapien
aaggagcagccctcttggcaaactc

SEQ ID NO: 1247590 - DNA, 25 bp, Homo sapien
gcatagggcatacagagttgcggtt

SEQ ID NO: 1247591 - DNA, 25 bp, Homo sapien
gcatacagagttgcggttccattac

SEQ ID NO: 1247592 - DNA, 25 bp, Homo sapien
tagggcatacagagttgcggttcca

SEQ ID NO: 1247593 - DNA, 25 bp, Homo sapien
gggcatacagagttgcggttccatt

SEQ ID NO: 1247594 - DNA, 25 bp, Homo sapien
gctgtacgggttgcttgagctgatt

SEQ ID NO: 1247595 - DNA, 25 bp, Homo sapien
ctcgggcagcgtggccttgaactgc

SEQ ID NO: 1247596 - DNA, 25 bp, Homo sapien
catccatggtgacagtgctgtacgg

SEQ ID NO: 1247597 - DNA, 25 bp, Homo sapien
acttggtccggagctcatccatggt

SEQ ID NO: 1247598 - DNA, 25 bp, Homo sapien
tgtcagggcccaaggacaacaaggg

SEQ ID NO: 1247599 - DNA, 25 bp, Homo sapien
ctgtcagggcccaaggacaacaagg

SEQ ID NO: 1247600 - DNA, 25 bp, Homo sapien
tcgttagcatgctggcgagccagct

SEQ ID NO: 1247601 - DNA, 25 bp, Homo sapien
gcattggcttgggcagcaaactggc

SEQ ID NO: 1247602 - DNA, 25 bp, Homo sapien
tggcgcctcagacgctcgttagcat

SEQ ID NO: 1247603 - DNA, 25 bp, Homo sapien
tcgcggatgggcacgagttgcttca

SEQ ID NO: 1247604 - DNA, 25 bp, Homo sapien
tgttgtgctcatactgcttcagctg

SEQ ID NO: 1247605 - DNA, 25 bp, Homo sapien
cagcttgtcgatgttgttcttatag

SEQ ID NO: 1247606 - DNA, 25 bp, Homo sapien
gttgatgatgttgtgctcatactgc

SEQ ID NO: 1247607 - DNA, 25 bp, Homo sapien
cgatgttgttcttatagttgatgat

SEQ ID NO: 1247608 - DNA, 25 bp, Homo sapien
tggcgatggttgtcagcagcagctc

SEQ ID NO: 1247609 - DNA, 25 bp, Homo sapien
cagcagctcccatccaacacgaatg

SEQ ID NO: 1247610 - DNA, 25 bp, Homo sapien
tgggtgatgcccttcgcatctctcg

SEQ ID NO: 1247611 - DNA, 25 bp, Homo sapien
gcatctctcgtcaggatctgagtct

SEQ ID NO: 1247612 - DNA, 25 bp, Homo sapien
ctcatgatccatcaggccattcttc

SEQ ID NO: 1247613 - DNA, 25 bp, Homo sapien
catgatccatcaggccattcttcct

SEQ ID NO: 1247614 - DNA, 25 bp, Homo sapien
tcatgatccatcaggccattcttcc

SEQ ID NO: 1247615 - DNA, 25 bp, Homo sapien
aacaatcaaaaagcctatgttctca

SEQ ID NO: 1247616 - DNA, 25 bp, Homo sapien
aaaagcctatgttctcatctccttc

SEQ ID NO: 1247617 - DNA, 25 bp, Homo sapien
taaaccgtagtacgtgagttatatc

SEQ ID NO: 1247618 - DNA, 25 bp, Homo sapien
aaccgtagtacgtgagttatatctc

SEQ ID NO: 1247619 - DNA, 25 bp, Homo sapien
ggtgtcagccgtctctctagtcatg

SEQ ID NO: 1247620 - DNA, 25 bp, Homo sapien
tatcagaagccaggatccggaagga

SEQ ID NO: 1247621 - DNA, 25 bp, Homo sapien
gccttgcccgttgggatctaccagg

SEQ ID NO: 1247622 - DNA, 25 bp, Homo sapien
gacctgctcggcagtgtcggtgtca

SEQ ID NO: 1247623 - DNA, 25 bp, Homo sapien
tttgttagaaggatgtagtggactc

SEQ ID NO: 1247624 - DNA, 25 bp, Homo sapien
ggatgtagtggactcctgctaaagc

SEQ ID NO: 1247625 - DNA, 25 bp, Homo sapien
ggactcctgctaaagcagaaggaaa

SEQ ID NO: 1247626 - DNA, 25 bp, Homo sapien
cagaaggaaatctgtcaatgcagac

SEQ ID NO: 1247627 - DNA, 25 bp, Homo sapien
tatgcttcataaaggcaaatggagc

SEQ ID NO: 1247628 - DNA, 25 bp, Homo sapien
tgtaggagcgtatctagaagcggcc

SEQ ID NO: 1247629 - DNA, 25 bp, Homo sapien
ccagcaggaagggtgatatgcttca

SEQ ID NO: 1247630 - DNA, 25 bp, Homo sapien
tcaaactgagccacaatgcgaggat

SEQ ID NO: 1247631 - DNA, 25 bp, Homo sapien
cgctctccccgtagagtgcggaaga

SEQ ID NO: 1247632 - DNA, 25 bp, Homo sapien
tgcggaagagaacgcagcgtaatcc

SEQ ID NO: 1247633 - DNA, 25 bp, Homo sapien
ggcatcctcttgatgcagtactggg

SEQ ID NO: 1247634 - DNA, 25 bp, Homo sapien
cgtaatccagtgcaccaggcacact

SEQ ID NO: 1247635 - DNA, 25 bp, Homo sapien
ctgatgggatgagtgattacagaag

SEQ ID NO: 1247636 - DNA, 25 bp, Homo sapien
attgcattctgatgggatgagtgat

SEQ ID NO: 1247637 - DNA, 25 bp, Homo sapien
cattctgatgggatgagtgattaca

SEQ ID NO: 1247638 - DNA, 25 bp, Homo sapien
gcattctgatgggatgagtgattac

SEQ ID NO: 1247639 - DNA, 25 bp, Homo sapien
tctctcaacttaataaagcttgtca

SEQ ID NO: 1247640 - DNA, 25 bp, Homo sapien
cattttagccgtgttatattgctgg

SEQ ID NO: 1247641 - DNA, 25 bp, Homo sapien
cctatttatgaagcgcactatgtca

SEQ ID NO: 1247642 - DNA, 25 bp, Homo sapien
ggcaattactgaactacgaaaggct

SEQ ID NO: 1247643 - DNA, 25 bp, Homo sapien
caatagtaatctttggataagcatg

SEQ ID NO: 1247644 - DNA, 25 bp, Homo sapien
agaatcccaaatatactcccctagg

SEQ ID NO: 1247645 - DNA, 25 bp, Homo sapien
ccctaggggcaatcacataagcata

SEQ ID NO: 1247646 - DNA, 25 bp, Homo sapien
tttaatccccggcagttccatctca

SEQ ID NO: 1247647 - DNA, 25 bp, Homo sapien
gactgagttgaccatccagccctaa

SEQ ID NO: 1247648 - DNA, 25 bp, Homo sapien
tctaacaaaaagcatgggaacctgg

SEQ ID NO: 1247649 - DNA, 25 bp, Homo sapien
tggagcaggcctttagacacagaac

SEQ ID NO: 1247650 - DNA, 25 bp, Homo sapien
actagaggcataaggaagtcctgac

SEQ ID NO: 1247651 - DNA, 25 bp, Homo sapien
tatggccgggatatagcacctactt

SEQ ID NO: 1247652 - DNA, 25 bp, Homo sapien
tattagcagatagagactactgacc

SEQ ID NO: 1247653 - DNA, 25 bp, Homo sapien
gaaggttctaaatggcccagtgtag

SEQ ID NO: 1247654 - DNA, 25 bp, Homo sapien
taggtagatgagttacccacaccca

SEQ ID NO: 1247655 - DNA, 25 bp, Homo sapien
acgttttaatttttgagcatccagc

SEQ ID NO: 1247656 - DNA, 25 bp, Homo sapien
aatttttgagcatccagcttcagaa

SEQ ID NO: 1247657 - DNA, 25 bp, Homo sapien
ttttaatttttgagcatccagcttc

SEQ ID NO: 1247658 - DNA, 25 bp, Homo sapien
ttaatttttgagcatccagcttcag

SEQ ID NO: 1247659 - DNA, 25 bp, Homo sapien
tagaacctttcagagcgcggttagt

SEQ ID NO: 1247660 - DNA, 25 bp, Homo sapien
agaaaaccggcagaggaggacgacg

SEQ ID NO: 1247661 - DNA, 25 bp, Homo sapien
aggacgacgtgacatccggctctga

SEQ ID NO: 1247662 - DNA, 25 bp, Homo sapien
ctctgagccccgcagacatttagaa

SEQ ID NO: 1247663 - DNA, 25 bp, Homo sapien
agagaagacgtgctctccacaggtg

SEQ ID NO: 1247664 - DNA, 25 bp, Homo sapien
tcctccttgcgcagagggcgcggca

SEQ ID NO: 1247665 - DNA, 25 bp, Homo sapien
tcttttgacgcctcccgttggctcg

SEQ ID NO: 1247666 - DNA, 25 bp, Homo sapien
gagcacgtgctttcttcccgggtac

SEQ ID NO: 1247667 - DNA, 25 bp, Homo sapien
cgggttgcgacaggtcttggagcgc

SEQ ID NO: 1247668 - DNA, 25 bp, Homo sapien
acaggtcttggagcgcgggtgacat

SEQ ID NO: 1247669 - DNA, 25 bp, Homo sapien
ttgcgacaggtcttggagcgcgggt

SEQ ID NO: 1247670 - DNA, 25 bp, Homo sapien
cgacaggtcttggagcgcgggtgac

SEQ ID NO: 1247671 - DNA, 25 bp, Homo sapien
gcagaagggaatcgccccagggatt

SEQ ID NO: 1247672 - DNA, 25 bp, Homo sapien
aggccacagcacgagttaagaaaca

SEQ ID NO: 1247673 - DNA, 25 bp, Homo sapien
cgtctcccgccgcagaagggaatcg

SEQ ID NO: 1247674 - DNA, 25 bp, Homo sapien
ttaagaaacacaacccaaccacgca

SEQ ID NO: 1247675 - DNA, 25 bp, Homo sapien
cagtttttccagtaggaggtcattt

SEQ ID NO: 1247676 - DNA, 25 bp, Homo sapien
cactgggctttaattaccattctaa

SEQ ID NO: 1247677 - DNA, 25 bp, Homo sapien
acttgctcaaaagaataagtcacct

SEQ ID NO: 1247678 - DNA, 25 bp, Homo sapien
gaaatgtcactcttccatgaagaac

SEQ ID NO: 1247679 - DNA, 25 bp, Homo sapien
tgaccaacacctcccactgctccct

SEQ ID NO: 1247680 - DNA, 25 bp, Homo sapien
ccaacacctcccactgctccctcat

SEQ ID NO: 1247681 - DNA, 25 bp, Homo sapien
accaacacctcccactgctccctca

SEQ ID NO: 1247682 - DNA, 25 bp, Homo sapien
gatgaccaacacctcccactgctcc

SEQ ID NO: 1247683 - DNA, 25 bp, Homo sapien
tgacttctaattcccagtccagaaa

SEQ ID NO: 1247684 - DNA, 25 bp, Homo sapien
tctgcccaactatgaaataataact

SEQ ID NO: 1247685 - DNA, 25 bp, Homo sapien
taactggctaacacccttgaacttc

SEQ ID NO: 1247686 - DNA, 25 bp, Homo sapien
cagaaaagggcccaatgcttactcc

SEQ ID NO: 1247687 - DNA, 25 bp, Homo sapien
gcggcctggcatgatctttaaattc

SEQ ID NO: 1247688 - DNA, 25 bp, Homo sapien
gaatggcattgatctcatcccgcag

SEQ ID NO: 1247689 - DNA, 25 bp, Homo sapien
cattgttgcctttcagcggcctggc

SEQ ID NO: 1247690 - DNA, 25 bp, Homo sapien
tagcttctcccgctggatcatggtc

SEQ ID NO: 1247691 - DNA, 25 bp, Homo sapien
agcttgggcaatactagtgctgcta

SEQ ID NO: 1247692 - DNA, 25 bp, Homo sapien
ggcaatactagtgctgctaaaagta

SEQ ID NO: 1247693 - DNA, 25 bp, Homo sapien
tgggcaatactagtgctgctaaaag

SEQ ID NO: 1247694 - DNA, 25 bp, Homo sapien
ttgtttcaatgatatctgccccagc

SEQ ID NO: 1247695 - DNA, 25 bp, Homo sapien
ggagagttacctcctcggcagcttt

SEQ ID NO: 1247696 - DNA, 25 bp, Homo sapien
gcagagcacatgttcatccggtagg

SEQ ID NO: 1247697 - DNA, 25 bp, Homo sapien
ttacctcctcggcagcttttctggc

SEQ ID NO: 1247698 - DNA, 25 bp, Homo sapien
cagagcacatgttcatccggtaggc

SEQ ID NO: 1247699 - DNA, 25 bp, Homo sapien
caggtctataatcttttgtccacaa

SEQ ID NO: 1247700 - DNA, 25 bp, Homo sapien
tctcctaaactaacgagagactatt

SEQ ID NO: 1247701 - DNA, 25 bp, Homo sapien
tatacacatatcatcacgaaaccag

SEQ ID NO: 1247702 - DNA, 25 bp, Homo sapien
tatgccatataggagatatacacat

SEQ ID NO: 1247703 - DNA, 25 bp, Homo sapien
tataatccggcctttccacagatgg

SEQ ID NO: 1247704 - DNA, 25 bp, Homo sapien
gatgttcctataatccggcctttcc

SEQ ID NO: 1247705 - DNA, 25 bp, Homo sapien
tgtcttattagtcggacccagagcc

SEQ ID NO: 1247706 - DNA, 25 bp, Homo sapien
gggacacagagagtgtcttattagt

SEQ ID NO: 1247707 - DNA, 25 bp, Homo sapien
agtaagatatcaaccccgccatcca

SEQ ID NO: 1247708 - DNA, 25 bp, Homo sapien
aaaaatagtttcaatgagtaagata

SEQ ID NO: 1247709 - DNA, 25 bp, Homo sapien
gcctgctcttggtatgcttcaacaa

SEQ ID NO: 1247710 - DNA, 25 bp, Homo sapien
cttggcattggcagtatcaaaaata

SEQ ID NO: 1247711 - DNA, 25 bp, Homo sapien
aaagataggccggggagcatatttc

SEQ ID NO: 1247712 - DNA, 25 bp, Homo sapien
aaagattttggagtgcaaacaaggc

SEQ ID NO: 1247713 - DNA, 25 bp, Homo sapien
cctcaaaaagattttggagtgcaaa

SEQ ID NO: 1247714 - DNA, 25 bp, Homo sapien
gattttggagtgcaaacaaggctgc

SEQ ID NO: 1247715 - DNA, 25 bp, Homo sapien
agagtccgcccacttttatcaacga

SEQ ID NO: 1247716 - DNA, 25 bp, Homo sapien
tctcctgtctgtccggaaagagtcc

SEQ ID NO: 1247717 - DNA, 25 bp, Homo sapien
acgctgatgacaaatccctctcctg

SEQ ID NO: 1247718 - DNA, 25 bp, Homo sapien
ggttctccatgagacacgctgatga

SEQ ID NO: 1247719 - DNA, 25 bp, Homo sapien
taaatgggttcctgctgtaaggaac

SEQ ID NO: 1247720 - DNA, 25 bp, Homo sapien
ctaaatgggttcctgctgtaaggaa

SEQ ID NO: 1247721 - DNA, 25 bp, Homo sapien
agtcaagtttggtgccacctaaatg

SEQ ID NO: 1247722 - DNA, 25 bp, Homo sapien
caagtttggtgccacctaaatgggt

SEQ ID NO: 1247723 - DNA, 25 bp, Homo sapien
atggcacaagccgccagctgtagct

SEQ ID NO: 1247724 - DNA, 25 bp, Homo sapien
aacaatggcacaagccgccagctgt

SEQ ID NO: 1247725 - DNA, 25 bp, Homo sapien
acaatggcacaagccgccagctgta

SEQ ID NO: 1247726 - DNA, 25 bp, Homo sapien
gcacaagccgccagctgtagcttct

SEQ ID NO: 1247727 - DNA, 25 bp, Homo sapien
agaggctgctggtcagccctcgagt

SEQ ID NO: 1247728 - DNA, 25 bp, Homo sapien
tgctggtcagccctcgagtcagtaa

SEQ ID NO: 1247729 - DNA, 25 bp, Homo sapien
ggctgctggtcagccctcgagtcag

SEQ ID NO: 1247730 - DNA, 25 bp, Homo sapien
tgagaggctgctggtcagccctcga

SEQ ID NO: 1247731 - DNA, 25 bp, Homo sapien
gttacacagcgcaatggtaggcagg

SEQ ID NO: 1247732 - DNA, 25 bp, Homo sapien
ctgtgttacacagcgcaatggtagg

SEQ ID NO: 1247733 - DNA, 25 bp, Homo sapien
tgtgttacacagcgcaatggtaggc

SEQ ID NO: 1247734 - DNA, 25 bp, Homo sapien
tgttacacagcgcaatggtaggcag

SEQ ID NO: 1247735 - DNA, 25 bp, Homo sapien
cccttgttgcatgcaatggcaatgt

SEQ ID NO: 1247736 - DNA, 25 bp, Homo sapien
tgagctcccttgttgcatgcaatgg

SEQ ID NO: 1247737 - DNA, 25 bp, Homo sapien
agctcccttgttgcatgcaatggca

SEQ ID NO: 1247738 - DNA, 25 bp, Homo sapien
caatgtccacatagcgcagagggga

SEQ ID NO: 1247739 - DNA, 25 bp, Homo sapien
ggtcacagtcttttcagtagcagcc

SEQ ID NO: 1247740 - DNA, 25 bp, Homo sapien
cctgaaactcctccttggtcacagt

SEQ ID NO: 1247741 - DNA, 25 bp, Homo sapien
ctcctccttggtcacagtcttttca

SEQ ID NO: 1247742 - DNA, 25 bp, Homo sapien
tgaaactcctccttggtcacagtct

SEQ ID NO: 1247743 - DNA, 25 bp, Homo sapien
tgctccagtcttcagctggaaactg

SEQ ID NO: 1247744 - DNA, 25 bp, Homo sapien
ttcagctggaaactgctgaataggc

SEQ ID NO: 1247745 - DNA, 25 bp, Homo sapien
tcttcagctggaaactgctgaatag

SEQ ID NO: 1247746 - DNA, 25 bp, Homo sapien
ccagtcttcagctggaaactgctga

SEQ ID NO: 1247747 - DNA, 25 bp, Homo sapien
tgcacccaaagcacaatttaatcca

SEQ ID NO: 1247748 - DNA, 25 bp, Homo sapien
ctgcacccaaagcacaatttaatcc

SEQ ID NO: 1247749 - DNA, 25 bp, Homo sapien
gcacccaaagcacaatttaatccaa

SEQ ID NO: 1247750 - DNA, 25 bp, Homo sapien
acccaaagcacaatttaatccaatg

SEQ ID NO: 1247751 - DNA, 25 bp, Homo sapien
aggacataggctgttgtacattttc

SEQ ID NO: 1247752 - DNA, 25 bp, Homo sapien
agaggacataggctgttgtacattt

SEQ ID NO: 1247753 - DNA, 25 bp, Homo sapien
cattgggataacagaggacataggc

SEQ ID NO: 1247754 - DNA, 25 bp, Homo sapien
tgcattgggataacagaggacatag

SEQ ID NO: 1247755 - DNA, 25 bp, Homo sapien
gcttggccatcatagaaggcgtttc

SEQ ID NO: 1247756 - DNA, 25 bp, Homo sapien
gaaggcgtttcatcatagtcaccaa

SEQ ID NO: 1247757 - DNA, 25 bp, Homo sapien
tagtcaccaaaggtgttgggaagac

SEQ ID NO: 1247758 - DNA, 25 bp, Homo sapien
tcatagtcaccaaaggtgttgggaa

SEQ ID NO: 1247759 - DNA, 25 bp, Homo sapien
cctccaactatattgaccaagccat

SEQ ID NO: 1247760 - DNA, 25 bp, Homo sapien
gatatgatctggtgttgacccacag

SEQ ID NO: 1247761 - DNA, 25 bp, Homo sapien
gatctggtgttgacccacagcatcc

SEQ ID NO: 1247762 - DNA, 25 bp, Homo sapien
tatattgaccaagccatccatagca

SEQ ID NO: 1247763 - DNA, 25 bp, Homo sapien
tatgagcttgttaggaagggctgcc

SEQ ID NO: 1247764 - DNA, 25 bp, Homo sapien
cataatataaaggtgtatgagcttg

SEQ ID NO: 1247765 - DNA, 25 bp, Homo sapien
tgagggatagatgaaataagaatgg

SEQ ID NO: 1247766 - DNA, 25 bp, Homo sapien
catgtgacaggcatatagaggtcca

SEQ ID NO: 1247767 - DNA, 25 bp, Homo sapien
ggtcatgcttgtttcgctcccttcc

SEQ ID NO: 1247768 - DNA, 25 bp, Homo sapien
gagtctatcacatcagtcaacaaaa

SEQ ID NO: 1247769 - DNA, 25 bp, Homo sapien
caaaagcagtgaactacaaggtaac

SEQ ID NO: 1247770 - DNA, 25 bp, Homo sapien
gactggctggaaatatgatcatcag

SEQ ID NO: 1247771 - DNA, 25 bp, Homo sapien
gcaggtggaactctaggcttacaat

SEQ ID NO: 1247772 - DNA, 25 bp, Homo sapien
caggtggaactctaggcttacaatt

SEQ ID NO: 1247773 - DNA, 25 bp, Homo sapien
taccctaaagttgacgtcatcttgc

SEQ ID NO: 1247774 - DNA, 25 bp, Homo sapien
accctaaagttgacgtcatcttgcc

SEQ ID NO: 1247775 - DNA, 25 bp, Homo sapien
ttaccctaaagttgacgtcatcttg

SEQ ID NO: 1247776 - DNA, 25 bp, Homo sapien
tggtgtacggtccaatcctgaaggg

SEQ ID NO: 1247777 - DNA, 25 bp, Homo sapien
tacagcgctctccaatgttaacaaa

SEQ ID NO: 1247778 - DNA, 25 bp, Homo sapien
caatgttaacaaagttggtgtacgg

SEQ ID NO: 1247779 - DNA, 25 bp, Homo sapien
tgcaacattacagcgctctccaatg

SEQ ID NO: 1247780 - DNA, 25 bp, Homo sapien
gaaacaccacatgtagtgagccaag

SEQ ID NO: 1247781 - DNA, 25 bp, Homo sapien
tagaaacttttagcactcattgtga

SEQ ID NO: 1247782 - DNA, 25 bp, Homo sapien
aaattcagtaaatctggaccgggtg

SEQ ID NO: 1247783 - DNA, 25 bp, Homo sapien
aacaggcatgaaaccctatggcata

SEQ ID NO: 1247784 - DNA, 25 bp, Homo sapien
tccataataccttctaagtaacaag

SEQ ID NO: 1247785 - DNA, 25 bp, Homo sapien
aaaatatacatgttccataatacct

SEQ ID NO: 1247786 - DNA, 25 bp, Homo sapien
taccttctaagtaacaaggcagaga

SEQ ID NO: 1247787 - DNA, 25 bp, Homo sapien
tacatgttccataataccttctaag

SEQ ID NO: 1247788 - DNA, 25 bp, Homo sapien
gcacttggaccatctagcatgccat

SEQ ID NO: 1247789 - DNA, 25 bp, Homo sapien
tctggctcggaagcaattaagttgc

SEQ ID NO: 1247790 - DNA, 25 bp, Homo sapien
catgttgacatccaacacctgggct

SEQ ID NO: 1247791 - DNA, 25 bp, Homo sapien
tgcactttggcaacacacaaggctt

SEQ ID NO: 1247792 - DNA, 25 bp, Homo sapien
cagactaatgctattgacaatgcac

SEQ ID NO: 1247793 - DNA, 25 bp, Homo sapien
tggcagcactttaacccagcttcaa

SEQ ID NO: 1247794 - DNA, 25 bp, Homo sapien
tattgacaatgcacttcccttggca

SEQ ID NO: 1247795 - DNA, 25 bp, Homo sapien
tggaggagtcgatgcacaaaggtac

SEQ ID NO: 1247796 - DNA, 25 bp, Homo sapien
tagcagctccatactttttaatctt

SEQ ID NO: 1247797 - DNA, 25 bp, Homo sapien
tctccaagaagtcgtcctctccttc

SEQ ID NO: 1247798 - DNA, 25 bp, Homo sapien
caaaagccatgaccaccatagcagc

SEQ ID NO: 1247799 - DNA, 25 bp, Homo sapien
tgaccaccatagcagctccatactt

SEQ ID NO: 1247800 - DNA, 25 bp, Homo sapien
ttctctgcttatgcagacaaacata

SEQ ID NO: 1247801 - DNA, 25 bp, Homo sapien
taagttgggatcatgtcactcattt

SEQ ID NO: 1247802 - DNA, 25 bp, Homo sapien
agtatgtccccatttgagaccaccc

SEQ ID NO: 1247803 - DNA, 25 bp, Homo sapien
tatactgaagacatggttccatctc

SEQ ID NO: 1247804 - DNA, 25 bp, Homo sapien
cgaccatttagcacaggccctgatg

SEQ ID NO: 1247805 - DNA, 25 bp, Homo sapien
gctgtgtgacaaccgccaagtcctg

SEQ ID NO: 1247806 - DNA, 25 bp, Homo sapien
gacagcctcttcactcgaccattta

SEQ ID NO: 1247807 - DNA, 25 bp, Homo sapien
caagtcctgggacatctctgtgctt

SEQ ID NO: 1247808 - DNA, 25 bp, Homo sapien
ttaatcaagatccaatggttctcca

SEQ ID NO: 1247809 - DNA, 25 bp, Homo sapien
cctcaatgacaaatctaaacactgg

SEQ ID NO: 1247810 - DNA, 25 bp, Homo sapien
tgagtaattgaaagacacgccatgt

SEQ ID NO: 1247811 - DNA, 25 bp, Homo sapien
gagacactgacaagtaggaagggaa

SEQ ID NO: 1247812 - DNA, 25 bp, Homo sapien
cattccagtcccaatggttaggata

SEQ ID NO: 1247813 - DNA, 25 bp, Homo sapien
ccaatggttaggatattagggtcaa

SEQ ID NO: 1247814 - DNA, 25 bp, Homo sapien
ttttcacaagcagatggtaggcccg

SEQ ID NO: 1247815 - DNA, 25 bp, Homo sapien
aatggcatacaagttgtgttcctcc

SEQ ID NO: 1247816 - DNA, 25 bp, Homo sapien
tggaaagacctccacttattctggc

SEQ ID NO: 1247817 - DNA, 25 bp, Homo sapien
catgcattgcttctcgaatggcttc

SEQ ID NO: 1247818 - DNA, 25 bp, Homo sapien
cattcctcggaaggagaaggacaag

SEQ ID NO: 1247819 - DNA, 25 bp, Homo sapien
ggaaaaccccatgcattgcttctcg

SEQ ID NO: 1247820 - DNA, 25 bp, Homo sapien
cctcagggtctttattccagatgag

SEQ ID NO: 1247821 - DNA, 25 bp, Homo sapien
gttccttatggatatcatcatacac

SEQ ID NO: 1247822 - DNA, 25 bp, Homo sapien
cgtaagagcttctcagtggcctcag

SEQ ID NO: 1247823 - DNA, 25 bp, Homo sapien
gctgcagaagttccttatggatatc

SEQ ID NO: 1247824 - DNA, 25 bp, Homo sapien
tgatagctatgttccaaacctgatg

SEQ ID NO: 1247825 - DNA, 25 bp, Homo sapien
ccaaacctgatgaatttgactcatg

SEQ ID NO: 1247826 - DNA, 25 bp, Homo sapien
aaacctgatgaatttgactcatgaa

SEQ ID NO: 1247827 - DNA, 25 bp, Homo sapien
ttccaaacctgatgaatttgactca

SEQ ID NO: 1247828 - DNA, 25 bp, Homo sapien
cgttcttcgacagggccatttctcc

SEQ ID NO: 1247829 - DNA, 25 bp, Homo sapien
tactcaaggcgttcttcgacagggc

SEQ ID NO: 1247830 - DNA, 25 bp, Homo sapien
cttcacaagggcatactcaaggcgt

SEQ ID NO: 1247831 - DNA, 25 bp, Homo sapien
cactcatcagtctgaatgactttct

SEQ ID NO: 1247832 - DNA, 25 bp, Homo sapien
cattccattcatcaggggtccttca

SEQ ID NO: 1247833 - DNA, 25 bp, Homo sapien
ccagctccaaaaagatcaccaacaa

SEQ ID NO: 1247834 - DNA, 25 bp, Homo sapien
ggcttcctcagtatcctcaataata

SEQ ID NO: 1247835 - DNA, 25 bp, Homo sapien
ctgaggtagaaacatttttccagct

SEQ ID NO: 1247836 - DNA, 25 bp, Homo sapien
tctactgtgccgttaagcactctgg

SEQ ID NO: 1247837 - DNA, 25 bp, Homo sapien
gccttcttcataacccgggctgact

SEQ ID NO: 1247838 - DNA, 25 bp, Homo sapien
tcataacccgggctgactttataac

SEQ ID NO: 1247839 - DNA, 25 bp, Homo sapien
tgaaagggataaggtggccaacagc

SEQ ID NO: 1247840 - DNA, 25 bp, Homo sapien
gcagccaaggactactccaactatg

SEQ ID NO: 1247841 - DNA, 25 bp, Homo sapien
ttaacagtggccagcacgatggtgc

SEQ ID NO: 1247842 - DNA, 25 bp, Homo sapien
gaaattattgcagccaaggactact

SEQ ID NO: 1247843 - DNA, 25 bp, Homo sapien
aactatgttcttgcctatgtcgtgc

SEQ ID NO: 1247844 - DNA, 25 bp, Homo sapien
cagtgtactatgtatggaaggccca

SEQ ID NO: 1247845 - DNA, 25 bp, Homo sapien
gaatgggtttcctggcacatctgag

SEQ ID NO: 1247846 - DNA, 25 bp, Homo sapien
taattagcctgccttcaaagtcgtc

SEQ ID NO: 1247847 - DNA, 25 bp, Homo sapien
gacacttatggtactgggatgcaca

SEQ ID NO: 1247848 - DNA, 25 bp, Homo sapien
ctttgttggcactaacccagtagca

SEQ ID NO: 1247849 - DNA, 25 bp, Homo sapien
tggtaacaatgggtgctgaacgctg

SEQ ID NO: 1247850 - DNA, 25 bp, Homo sapien
ggccagagcctgtgtagacttcgca

SEQ ID NO: 1247851 - DNA, 25 bp, Homo sapien
caggagtgagatggtaccacatgct

SEQ ID NO: 1247852 - DNA, 25 bp, Homo sapien
tcagtatcttatcacatggagtcat

SEQ ID NO: 1247853 - DNA, 25 bp, Homo sapien
gagcagctttcagtatcttatcaca

SEQ ID NO: 1247854 - DNA, 25 bp, Homo sapien
gctttgtggtcaagagcagctttca

SEQ ID NO: 1247855 - DNA, 25 bp, Homo sapien
aagagcagctttcagtatcttatca

SEQ ID NO: 1247856 - DNA, 25 bp, Homo sapien
caatggaatccttatagctaatctc

SEQ ID NO: 1247857 - DNA, 25 bp, Homo sapien
caatcaacaatggaatccttatagc

SEQ ID NO: 1247858 - DNA, 25 bp, Homo sapien
ttgctcctccaatcaacaatggaat

SEQ ID NO: 1247859 - DNA, 25 bp, Homo sapien
gaatccttatagctaatctctccat

SEQ ID NO: 1247860 - DNA, 25 bp, Homo sapien
tcaaatttccctcgtaaaacatgaa

SEQ ID NO: 1247861 - DNA, 25 bp, Homo sapien
tacaactcttgttcagcgccattag

SEQ ID NO: 1247862 - DNA, 25 bp, Homo sapien
aagatgggaaacctagcccaggctc

SEQ ID NO: 1247863 - DNA, 25 bp, Homo sapien
ggtgcttacctacaaatactgaact

SEQ ID NO: 1247864 - DNA, 25 bp, Homo sapien
accacactcttggacgcgtccagga

SEQ ID NO: 1247865 - DNA, 25 bp, Homo sapien
ttacaggtgcactgtatctcggagc

SEQ ID NO: 1247866 - DNA, 25 bp, Homo sapien
ggacgcgtccaggacatggattaca

SEQ ID NO: 1247867 - DNA, 25 bp, Homo sapien
tctcggagctattttaactgctgtg

SEQ ID NO: 1247868 - DNA, 25 bp, Homo sapien
acctccgtaaccttcctcgcctgca

SEQ ID NO: 1247869 - DNA, 25 bp, Homo sapien
tcgcctgcacaatgtgaaggctggg

SEQ ID NO: 1247870 - DNA, 25 bp, Homo sapien
tgaaggctgggctaaatctgtggtt

SEQ ID NO: 1247871 - DNA, 25 bp, Homo sapien
caggccacctccgtaaccttcctcg

SEQ ID NO: 1247872 - DNA, 25 bp, Homo sapien
tagtccaggtcgcatggcatcactg

SEQ ID NO: 1247873 - DNA, 25 bp, Homo sapien
tccaggtcgcatggcatcactggaa

SEQ ID NO: 1247874 - DNA, 25 bp, Homo sapien
ccaggtcgcatggcatcactggaag

SEQ ID NO: 1247875 - DNA, 25 bp, Homo sapien
agtccaggtcgcatggcatcactgg

SEQ ID NO: 1247876 - DNA, 25 bp, Homo sapien
aatggtcctgtctaatatcttcata

SEQ ID NO: 1247877 - DNA, 25 bp, Homo sapien
ctcataatggtcctgtctaatatct

SEQ ID NO: 1247878 - DNA, 25 bp, Homo sapien
cataatggtcctgtctaatatcttc

SEQ ID NO: 1247879 - DNA, 25 bp, Homo sapien
tttcctcaaagtattcatcctttag

SEQ ID NO: 1247880 - DNA, 25 bp, Homo sapien
ttctggcttgacttaagggtaagta

SEQ ID NO: 1247881 - DNA, 25 bp, Homo sapien
gacagccaatccatttggaaaccac

SEQ ID NO: 1247882 - DNA, 25 bp, Homo sapien
ctgggtgaggttcagacagccaatc

SEQ ID NO: 1247883 - DNA, 25 bp, Homo sapien
ctggcttgacttaagggtaagtatc

SEQ ID NO: 1247884 - DNA, 25 bp, Homo sapien
agcctttatagtccccttagtagag

SEQ ID NO: 1247885 - DNA, 25 bp, Homo sapien
tacacgggacaatcccttctttgga

SEQ ID NO: 1247886 - DNA, 25 bp, Homo sapien
catacttgttcacggtagccctttc

SEQ ID NO: 1247887 - DNA, 25 bp, Homo sapien
tacagatagacccttgattcaagcg

SEQ ID NO: 1247888 - DNA, 25 bp, Homo sapien
gggttaatcctcacttgcacaaatg

SEQ ID NO: 1247889 - DNA, 25 bp, Homo sapien
cagctgactacaccacccttggaaa

SEQ ID NO: 1247890 - DNA, 25 bp, Homo sapien
tgtcacccgtaggagttgttttaca

SEQ ID NO: 1247891 - DNA, 25 bp, Homo sapien
ggagtaattctgcactgagtcttaa

SEQ ID NO: 1247892 - DNA, 25 bp, Homo sapien
tcatagtcttcaaagacctgggtcc

SEQ ID NO: 1247893 - DNA, 25 bp, Homo sapien
ggcttccagtcaatgtagtccacca

SEQ ID NO: 1247894 - DNA, 25 bp, Homo sapien
gattcgggtacttgccccggagctg

SEQ ID NO: 1247895 - DNA, 25 bp, Homo sapien
tatcttgggaaagcctcgattcggg

SEQ ID NO: 1247896 - DNA, 25 bp, Homo sapien
ccgtgtctctgtcggtggattctgg

SEQ ID NO: 1247897 - DNA, 25 bp, Homo sapien
tgtctctgtcggtggattctggggt

SEQ ID NO: 1247898 - DNA, 25 bp, Homo sapien
tccgtgtctctgtcggtggattctg

SEQ ID NO: 1247899 - DNA, 25 bp, Homo sapien
tctctgtcggtggattctggggtaa

SEQ ID NO: 1247900 - DNA, 25 bp, Homo sapien
cctccctgctgctctgatctggcta

SEQ ID NO: 1247901 - DNA, 25 bp, Homo sapien
cctgctgctctgatctggctactac

SEQ ID NO: 1247902 - DNA, 25 bp, Homo sapien
tccctgctgctctgatctggctact

SEQ ID NO: 1247903 - DNA, 25 bp, Homo sapien
ccctccctgctgctctgatctggct

SEQ ID NO: 1247904 - DNA, 25 bp, Homo sapien
agcagcctctgcgtacaggtgaatg

SEQ ID NO: 1247905 - DNA, 25 bp, Homo sapien
cagtgtgttcagcatattgtgggca

SEQ ID NO: 1247906 - DNA, 25 bp, Homo sapien
tgggcatcatcgtagaccttcctgg

SEQ ID NO: 1247907 - DNA, 25 bp, Homo sapien
tcgtcttggatactctgtgctggcc

SEQ ID NO: 1247908 - DNA, 25 bp, Homo sapien
gaataagcttcacaacgcacagatg

SEQ ID NO: 1247909 - DNA, 25 bp, Homo sapien
cgttagcaagaacgtggcgccagca

SEQ ID NO: 1247910 - DNA, 25 bp, Homo sapien
cagcacaccatgaagagcaatcggg

SEQ ID NO: 1247911 - DNA, 25 bp, Homo sapien
gcaatcgggtatcgtcaaatgagaa

SEQ ID NO: 1247912 - DNA, 25 bp, Homo sapien
tctgagaggcagtagtatggctccg

SEQ ID NO: 1247913 - DNA, 25 bp, Homo sapien
ggtagtcacggatgccagaatgcaa

SEQ ID NO: 1247914 - DNA, 25 bp, Homo sapien
cagaatgcaagggagcgatgaagtc

SEQ ID NO: 1247915 - DNA, 25 bp, Homo sapien
gatgctgctgtagtcgtcaccatca

SEQ ID NO: 1247916 - DNA, 25 bp, Homo sapien
gatgacaccagcattacaacgaggg

SEQ ID NO: 1247917 - DNA, 25 bp, Homo sapien
tacgtataatgttaaagccagcagc

SEQ ID NO: 1247918 - DNA, 25 bp, Homo sapien
aaaggtcaatccaaagctccacggg

SEQ ID NO: 1247919 - DNA, 25 bp, Homo sapien
gacactggttctaagggctgatcag

SEQ ID NO: 1247920 - DNA, 25 bp, Homo sapien
gctctgaaggaccatacttaatgac

SEQ ID NO: 1247921 - DNA, 25 bp, Homo sapien
ctgcagctcaattttggcctcaacc

SEQ ID NO: 1247922 - DNA, 25 bp, Homo sapien
ggaaacaggctggattcttgattgg

SEQ ID NO: 1247923 - DNA, 25 bp, Homo sapien
cagcaggcatgcttaggcagacgca

SEQ ID NO: 1247924 - DNA, 25 bp, Homo sapien
gggcggatgcccttgtaccgcagcc

SEQ ID NO: 1247925 - DNA, 25 bp, Homo sapien
gtctgcgacgtccagctgctcactg

SEQ ID NO: 1247926 - DNA, 25 bp, Homo sapien
tcgatgtctgcgagtctccacatgg

SEQ ID NO: 1247927 - DNA, 25 bp, Homo sapien
agtaggcccacagttctcggcgaac

SEQ ID NO: 1247928 - DNA, 25 bp, Homo sapien
aaatatttggacttcaaattggaga

SEQ ID NO: 1247929 - DNA, 25 bp, Homo sapien
caggtgccattgctaatgattctgt

SEQ ID NO: 1247930 - DNA, 25 bp, Homo sapien
gctaatgattctgttaacctaatgc

SEQ ID NO: 1247931 - DNA, 25 bp, Homo sapien
gccattgctaatgattctgttaacc

SEQ ID NO: 1247932 - DNA, 25 bp, Homo sapien
aatgggtccaagccatttctcaacc

SEQ ID NO: 1247933 - DNA, 25 bp, Homo sapien
tcttcctcaatgcataatcctcaac

SEQ ID NO: 1247934 - DNA, 25 bp, Homo sapien
taaaagatgttaaccggccaggctc

SEQ ID NO: 1247935 - DNA, 25 bp, Homo sapien
tatcacatagggtgcgtgtccccaa

SEQ ID NO: 1247936 - DNA, 25 bp, Homo sapien
tcttccgaagagaacagagctacac

SEQ ID NO: 1247937 - DNA, 25 bp, Homo sapien
gagaacctgctcaatcctggaaaca

SEQ ID NO: 1247938 - DNA, 25 bp, Homo sapien
cttgtaagcctaccaggaggaacca

SEQ ID NO: 1247939 - DNA, 25 bp, Homo sapien
aacttggcatctacctatgtgctcc

SEQ ID NO: 1247940 - DNA, 25 bp, Homo sapien
tcctccttctgtgggtaattactat

SEQ ID NO: 1247941 - DNA, 25 bp, Homo sapien
gggtaattactatgctcaattttgg

SEQ ID NO: 1247942 - DNA, 25 bp, Homo sapien
tagatgatcccatcgcactgcagcc

SEQ ID NO: 1247943 - DNA, 25 bp, Homo sapien
tgtcttcaacctagcaaagccagct

SEQ ID NO: 1247944 - DNA, 25 bp, Homo sapien
ccaggcctctttgcagcattgggtt

SEQ ID NO: 1247945 - DNA, 25 bp, Homo sapien
tctgctggcatgcttcgaaacgctc

SEQ ID NO: 1247946 - DNA, 25 bp, Homo sapien
tgagaacatgagaagctggccgctg

SEQ ID NO: 1247947 - DNA, 25 bp, Homo sapien
tatctagcgcgtaaaatcgccaggg

SEQ ID NO: 1247948 - DNA, 25 bp, Homo sapien
gaaagtatcacttgggccgcatcta

SEQ ID NO: 1247949 - DNA, 25 bp, Homo sapien
tagggcttccaagacatgaggcagg

SEQ ID NO: 1247950 - DNA, 25 bp, Homo sapien
tatttttaattaatggtatttggca

SEQ ID NO: 1247951 - DNA, 25 bp, Homo sapien
tttaattaatggtatttggcactat

SEQ ID NO: 1247952 - DNA, 25 bp, Homo sapien
ttttaattaatggtatttggcacta

SEQ ID NO: 1247953 - DNA, 25 bp, Homo sapien
ttaattaatggtatttggcactata

SEQ ID NO: 1247954 - DNA, 25 bp, Homo sapien
gtgtacagcacactggttcatcagg

SEQ ID NO: 1247955 - DNA, 25 bp, Homo sapien
tggtgtacagcacactggttcatca

SEQ ID NO: 1247956 - DNA, 25 bp, Homo sapien
gcatagcaatacaggagattaatat

SEQ ID NO: 1247957 - DNA, 25 bp, Homo sapien
tgtaccagaactttgtaccagtgtt

SEQ ID NO: 1247958 - DNA, 25 bp, Homo sapien
atagggtatagcctccaggattccc

SEQ ID NO: 1247959 - DNA, 25 bp, Homo sapien
ctcattttccccatacatagggtat

SEQ ID NO: 1247960 - DNA, 25 bp, Homo sapien
ttttccccatacatagggtatagcc

SEQ ID NO: 1247961 - DNA, 25 bp, Homo sapien
agggtatagcctccaggattcccag

SEQ ID NO: 1247962 - DNA, 25 bp, Homo sapien
ttaactccaataagtaggtgacctg

SEQ ID NO: 1247963 - DNA, 25 bp, Homo sapien
gataatgctatcatcttccagagag

SEQ ID NO: 1247964 - DNA, 25 bp, Homo sapien
tccagagagggctagtcctattttc

SEQ ID NO: 1247965 - DNA, 25 bp, Homo sapien
aatgaagccatctagccttggttaa

SEQ ID NO: 1247966 - DNA, 25 bp, Homo sapien
accaagagaagtgcagatcgaaggg

SEQ ID NO: 1247967 - DNA, 25 bp, Homo sapien
gggaaaagcccctcacaaaatcatc

SEQ ID NO: 1247968 - DNA, 25 bp, Homo sapien
gggaaccgccccatggttcaatcac

SEQ ID NO: 1247969 - DNA, 25 bp, Homo sapien
gagaagaccaagagaagtgcagatc

SEQ ID NO: 1247970 - DNA, 25 bp, Homo sapien
ttacttttctgggatctgctcttgc

SEQ ID NO: 1247971 - DNA, 25 bp, Homo sapien
ctgccagataaagaagtttcaacaa

SEQ ID NO: 1247972 - DNA, 25 bp, Homo sapien
tacttttctgggatctgctcttgct

SEQ ID NO: 1247973 - DNA, 25 bp, Homo sapien
aaattacttttctgggatctgctct

SEQ ID NO: 1247974 - DNA, 25 bp, Homo sapien
taacgtggtatgaaggaggccggca

SEQ ID NO: 1247975 - DNA, 25 bp, Homo sapien
caatccttcatttgatggatgctga

SEQ ID NO: 1247976 - DNA, 25 bp, Homo sapien
tgcaggtttgatgagttaccatttt

SEQ ID NO: 1247977 - DNA, 25 bp, Homo sapien
gagttgaaaagttgccttctgctgc

SEQ ID NO: 1247978 - DNA, 25 bp, Homo sapien
tgacattctgattggtcgtgatgac

SEQ ID NO: 1247979 - DNA, 25 bp, Homo sapien
aggagcagatctccagctagggtga

SEQ ID NO: 1247980 - DNA, 25 bp, Homo sapien
ggtcgtgatgacagcagtgcatttt

SEQ ID NO: 1247981 - DNA, 25 bp, Homo sapien
ccagctagggtgacattctgattgg

SEQ ID NO: 1247982 - DNA, 25 bp, Homo sapien
gaagaggtggatctgtagggctata

SEQ ID NO: 1247983 - DNA, 25 bp, Homo sapien
tctgtagggctatagtggatgctca

SEQ ID NO: 1247984 - DNA, 25 bp, Homo sapien
ttgcaagaccccagtgactgatgga

SEQ ID NO: 1247985 - DNA, 25 bp, Homo sapien
gggtcttgcaagaccccagtgactg

SEQ ID NO: 1247986 - DNA, 25 bp, Homo sapien
tgtccatacctgtttagagcactgg

SEQ ID NO: 1247987 - DNA, 25 bp, Homo sapien
aagccccctcagtggtatccacaga

SEQ ID NO: 1247988 - DNA, 25 bp, Homo sapien
gggtatggaggctcaagggcctctt

SEQ ID NO: 1247989 - DNA, 25 bp, Homo sapien
ccagagcctgtccatacctgtttag

SEQ ID NO: 1247990 - DNA, 25 bp, Homo sapien
cacaggggtggcaggactgagtcct

SEQ ID NO: 1247991 - DNA, 25 bp, Homo sapien
tggacttgacagatggtgcttgccc

SEQ ID NO: 1247992 - DNA, 25 bp, Homo sapien
gacactgtccttgttcagggtctct

SEQ ID NO: 1247993 - DNA, 25 bp, Homo sapien
tatccactcccaacgtagaggcttt

SEQ ID NO: 1247994 - DNA, 25 bp, Homo sapien
gtttggtttccatgcgtgtcgtata

SEQ ID NO: 1247995 - DNA, 25 bp, Homo sapien
tgccaagagcagctgatttgaaaac

SEQ ID NO: 1247996 - DNA, 25 bp, Homo sapien
ccgcctcacggggaattgctcttaa

SEQ ID NO: 1247997 - DNA, 25 bp, Homo sapien
ctagaatccgatttaagaaagctcc

SEQ ID NO: 1247998 - DNA, 25 bp, Homo sapien
tgccatctgtgatcctaactgccca

SEQ ID NO: 1247999 - DNA, 25 bp, Homo sapien
agaagggtcccgttctcctgccatc

SEQ ID NO: 1248000 - DNA, 25 bp, Homo sapien
tagaatctcatgctcttgaacccaa

SEQ ID NO: 1248001 - DNA, 25 bp, Homo sapien
gtgaacagcgggcactgaggacagg

SEQ ID NO: 1248002 - DNA, 25 bp, Homo sapien
caggcaatgggccaggagagctacc

SEQ ID NO: 1248003 - DNA, 25 bp, Homo sapien
acagcgggcactgaggacaggcaat

SEQ ID NO: 1248004 - DNA, 25 bp, Homo sapien
agagctacccccaccagcatcagga

SEQ ID NO: 1248005 - DNA, 25 bp, Homo sapien
tgctgcacaggccgccgacgccgac

SEQ ID NO: 1248006 - DNA, 25 bp, Homo sapien
ctgcacaggccgccgacgccgaccc

SEQ ID NO: 1248007 - DNA, 25 bp, Homo sapien
gctgcacaggccgccgacgccgacc

SEQ ID NO: 1248008 - DNA, 25 bp, Homo sapien
cttcccgtgaagatctcgagctttg

SEQ ID NO: 1248009 - DNA, 25 bp, Homo sapien
tgaagatctcgagctttgatcttgg

SEQ ID NO: 1248010 - DNA, 25 bp, Homo sapien
ccgtgaagatctcgagctttgatct

SEQ ID NO: 1248011 - DNA, 25 bp, Homo sapien
tcccgtgaagatctcgagctttgat

SEQ ID NO: 1248012 - DNA, 25 bp, Homo sapien
tcgcgcttgttgagccggtggcgcg

SEQ ID NO: 1248013 - DNA, 25 bp, Homo sapien
gctcctcgcgcttgttgagccggtg

SEQ ID NO: 1248014 - DNA, 25 bp, Homo sapien
gcgcttgttgagccggtggcgcgtg

SEQ ID NO: 1248015 - DNA, 25 bp, Homo sapien
tgctcctcgcgcttgttgagccggt

SEQ ID NO: 1248016 - DNA, 25 bp, Homo sapien
ctgtgctttattgacaacgtgctcc

SEQ ID NO: 1248017 - DNA, 25 bp, Homo sapien
gctgtgctttattgacaacgtgctc

SEQ ID NO: 1248018 - DNA, 25 bp, Homo sapien
gccagctgtgctttattgacaacgt

SEQ ID NO: 1248019 - DNA, 25 bp, Homo sapien
cagctgtgctttattgacaacgtgc

SEQ ID NO: 1248020 - DNA, 25 bp, Homo sapien
ccaaaagtgccccggactctgccca

SEQ ID NO: 1248021 - DNA, 25 bp, Homo sapien
aaaagtgccccggactctgcccact

SEQ ID NO: 1248022 - DNA, 25 bp, Homo sapien
aaagtgccccggactctgcccactg

SEQ ID NO: 1248023 - DNA, 25 bp, Homo sapien
ttaccaaaagtgccccggactctgc

SEQ ID NO: 1248024 - DNA, 25 bp, Homo sapien
gaaatttcgtgggtgtctgcgggag

SEQ ID NO: 1248025 - DNA, 25 bp, Homo sapien
ctgtcgtttattgggaaggaatgac

SEQ ID NO: 1248026 - DNA, 25 bp, Homo sapien
agagccacgcatggcatgcaggctg

SEQ ID NO: 1248027 - DNA, 25 bp, Homo sapien
gtgtctgcgggagatagcccactgt

SEQ ID NO: 1248028 - DNA, 25 bp, Homo sapien
cacctctgagggatggtctccagat

SEQ ID NO: 1248029 - DNA, 25 bp, Homo sapien
ctctgagggatggtctccagatgca

SEQ ID NO: 1248030 - DNA, 25 bp, Homo sapien
gatggtctccagatgcaggtcaggt

SEQ ID NO: 1248031 - DNA, 25 bp, Homo sapien
agcacctctgagggatggtctccag

SEQ ID NO: 1248032 - DNA, 25 bp, Homo sapien
agcatctggctgtaggtctgttgcc

SEQ ID NO: 1248033 - DNA, 25 bp, Homo sapien
gcatctggctgtaggtctgttgcca

SEQ ID NO: 1248034 - DNA, 25 bp, Homo sapien
gagcatctggctgtaggtctgttgc

SEQ ID NO: 1248035 - DNA, 25 bp, Homo sapien
tgtggctcctccgatgctccacttt

SEQ ID NO: 1248036 - DNA, 25 bp, Homo sapien
aagccacctatatgtcacctgtgca

SEQ ID NO: 1248037 - DNA, 25 bp, Homo sapien
tgtgttgagtctctcgtggaacata

SEQ ID NO: 1248038 - DNA, 25 bp, Homo sapien
ttctccataggcaaaaagccaccta

SEQ ID NO: 1248039 - DNA, 25 bp, Homo sapien
gctctttggagctgaactaaccagc

SEQ ID NO: 1248040 - DNA, 25 bp, Homo sapien
gactaggagaacatagatgcagggc

SEQ ID NO: 1248041 - DNA, 25 bp, Homo sapien
taccggaaactcaattgtaagacca

SEQ ID NO: 1248042 - DNA, 25 bp, Homo sapien
gaatacctattatgagcagacccag

SEQ ID NO: 1248043 - DNA, 25 bp, Homo sapien
cgcaaaggggcttcggaaaagtgca

SEQ ID NO: 1248044 - DNA, 25 bp, Homo sapien
ctgcatccgcaaaggggcttcggaa

SEQ ID NO: 1248045 - DNA, 25 bp, Homo sapien
tggaggctcctacgcctgcgccggc

SEQ ID NO: 1248046 - DNA, 25 bp, Homo sapien
ccgctggaggctcctacgcctgcgc

SEQ ID NO: 1248047 - DNA, 25 bp, Homo sapien
aagcaagtcctcagtgacctacaaa

SEQ ID NO: 1248048 - DNA, 25 bp, Homo sapien
cataaagcaagtcctcagtgaccta

SEQ ID NO: 1248049 - DNA, 25 bp, Homo sapien
aagtcctcagtgacctacaaagaga

SEQ ID NO: 1248050 - DNA, 25 bp, Homo sapien
agtcctcagtgacctacaaagagac

SEQ ID NO: 1248051 - DNA, 25 bp, Homo sapien
tcctcgccggggccggctcccgagc

SEQ ID NO: 1248052 - DNA, 25 bp, Homo sapien
ggcggcggcccctggcgctgccttc

SEQ ID NO: 1248053 - DNA, 25 bp, Homo sapien
ttctgcttctgctgccgggagccgg

SEQ ID NO: 1248054 - DNA, 25 bp, Homo sapien
cggcccctggcgctgccttctgctt

SEQ ID NO: 1248055 - DNA, 25 bp, Homo sapien
tcgtcttcgccctcgcccccatcgg

SEQ ID NO: 1248056 - DNA, 25 bp, Homo sapien
agttcgcaggaactggatctcgtct

SEQ ID NO: 1248057 - DNA, 25 bp, Homo sapien
aactggatctcgtcttcgccctcgc

SEQ ID NO: 1248058 - DNA, 25 bp, Homo sapien
tggatctcgtcttcgccctcgcccc

SEQ ID NO: 1248059 - DNA, 25 bp, Homo sapien
ctgcaccatcacccccgcccccggt

SEQ ID NO: 1248060 - DNA, 25 bp, Homo sapien
caccatcacccccgcccccggtcag

SEQ ID NO: 1248061 - DNA, 25 bp, Homo sapien
cgcccccggtcagctgcgccgcacg

SEQ ID NO: 1248062 - DNA, 25 bp, Homo sapien
tgcaccatcacccccgcccccggtc

SEQ ID NO: 1248063 - DNA, 25 bp, Homo sapien
ggcgactcctcctccgctttcgcag

SEQ ID NO: 1248064 - DNA, 25 bp, Homo sapien
gcaccaccacggatggcaccagccc

SEQ ID NO: 1248065 - DNA, 25 bp, Homo sapien
tccgctttcgcagcaccttgacttg

SEQ ID NO: 1248066 - DNA, 25 bp, Homo sapien
cggatggcaccagccccgggaaccg

SEQ ID NO: 1248067 - DNA, 25 bp, Homo sapien
gaacgacacgttcacgatgttctcc

SEQ ID NO: 1248068 - DNA, 25 bp, Homo sapien
ccagcatttagagaacgacacgttc

SEQ ID NO: 1248069 - DNA, 25 bp, Homo sapien
cacactttgcttcacttggcatgca

SEQ ID NO: 1248070 - DNA, 25 bp, Homo sapien
catgccttccacgctttgcaagcgg

SEQ ID NO: 1248071 - DNA, 25 bp, Homo sapien
aaggcccagggctgtcgaatctacg

SEQ ID NO: 1248072 - DNA, 25 bp, Homo sapien
ggaagtctaaacagaggcttgaagt

SEQ ID NO: 1248073 - DNA, 25 bp, Homo sapien
gctgtcgaatctacggtgggtttct

SEQ ID NO: 1248074 - DNA, 25 bp, Homo sapien
gcaagagggaagtctaaacagaggc

SEQ ID NO: 1248075 - DNA, 25 bp, Homo sapien
gaaggttaggatcacactggagcca

SEQ ID NO: 1248076 - DNA, 25 bp, Homo sapien
gtggattccggcctcagactcaggt

SEQ ID NO: 1248077 - DNA, 25 bp, Homo sapien
tcgcttagggaaccgaacaggcaat

SEQ ID NO: 1248078 - DNA, 25 bp, Homo sapien
tgatcagcagagacactaggaagga

SEQ ID NO: 1248079 - DNA, 25 bp, Homo sapien
tccctaagagggctactgacatgag

SEQ ID NO: 1248080 - DNA, 25 bp, Homo sapien
gatttgcaaacaagctcactaggag

SEQ ID NO: 1248081 - DNA, 25 bp, Homo sapien
tggaagccagagaagtacttcacgg

SEQ ID NO: 1248082 - DNA, 25 bp, Homo sapien
tacttcacggctgggacaatagaga

SEQ ID NO: 1248083 - DNA, 25 bp, Homo sapien
gctgactgtaacattctgggaaacc

SEQ ID NO: 1248084 - DNA, 25 bp, Homo sapien
gggctttgaggctgactgtaacatt

SEQ ID NO: 1248085 - DNA, 25 bp, Homo sapien
gactgtaacattctgggaaacccca

SEQ ID NO: 1248086 - DNA, 25 bp, Homo sapien
ttgaggctgactgtaacattctggg

SEQ ID NO: 1248087 - DNA, 25 bp, Homo sapien
tcagtgaccacatgcgggtttcccc

SEQ ID NO: 1248088 - DNA, 25 bp, Homo sapien
taaattggcagatactcatcatcgg

SEQ ID NO: 1248089 - DNA, 25 bp, Homo sapien
gaatcagattctaaactcaggagga

SEQ ID NO: 1248090 - DNA, 25 bp, Homo sapien
tctgaacactccgtcactaacaggg

SEQ ID NO: 1248091 - DNA, 25 bp, Homo sapien
cccaggttgatgcatataaggtttc

SEQ ID NO: 1248092 - DNA, 25 bp, Homo sapien
gtttgagcatctgaactctacggga

SEQ ID NO: 1248093 - DNA, 25 bp, Homo sapien
tcccaggttgatgcatataaggttt

SEQ ID NO: 1248094 - DNA, 25 bp, Homo sapien
tctacgggaactatggcttccacct

SEQ ID NO: 1248095 - DNA, 25 bp, Homo sapien
tcaagtcgggctgactttgcaggct

SEQ ID NO: 1248096 - DNA, 25 bp, Homo sapien
tcctctttggtgtgagtaggactga

SEQ ID NO: 1248097 - DNA, 25 bp, Homo sapien
catcttcaggagatgatggcccctt

SEQ ID NO: 1248098 - DNA, 25 bp, Homo sapien
gacgggagcaggacatttagactta

SEQ ID NO: 1248099 - DNA, 25 bp, Homo sapien
atggacagctctgacccatttttct

SEQ ID NO: 1248100 - DNA, 25 bp, Homo sapien
ttataaattgctgccccattaatct

SEQ ID NO: 1248101 - DNA, 25 bp, Homo sapien
cggtcccgctctgatctctctacat

SEQ ID NO: 1248102 - DNA, 25 bp, Homo sapien
tctctacatcccaatttatcttata

SEQ ID NO: 1248103 - DNA, 25 bp, Homo sapien
tcaagtcagcctgcaagaaaaaatc

SEQ ID NO: 1248104 - DNA, 25 bp, Homo sapien
ggatcttgctgccaattttgcttca

SEQ ID NO: 1248105 - DNA, 25 bp, Homo sapien
ctggaccagtttataatgagcaatg

SEQ ID NO: 1248106 - DNA, 25 bp, Homo sapien
ggtatgtcaaaccagcctccagtag

SEQ ID NO: 1248107 - DNA, 25 bp, Homo sapien
actagaacttgggacctggcaggac

SEQ ID NO: 1248108 - DNA, 25 bp, Homo sapien
cctgccgggccatgtgggcgaaata

SEQ ID NO: 1248109 - DNA, 25 bp, Homo sapien
cacttgcagtaggtctgatccagcc

SEQ ID NO: 1248110 - DNA, 25 bp, Homo sapien
taagcccagtgggagcaagcaaaac

SEQ ID NO: 1248111 - DNA, 25 bp, Homo sapien
tggaagccgaccctgatcagtggaa

SEQ ID NO: 1248112 - DNA, 25 bp, Homo sapien
catccgctcaatgcctggaagccga

SEQ ID NO: 1248113 - DNA, 25 bp, Homo sapien
gctggttggtgcactaaagaaaaaa

SEQ ID NO: 1248114 - DNA, 25 bp, Homo sapien
tgatctcaaaagctgcacaggccgg

SEQ ID NO: 1248115 - DNA, 25 bp, Homo sapien
tgtctgctcgagagagaggcccatc

SEQ ID NO: 1248116 - DNA, 25 bp, Homo sapien
tacgtggtcccctttgtcttatgag

SEQ ID NO: 1248117 - DNA, 25 bp, Homo sapien
taagtgtctagttcagcgtgcggtg

SEQ ID NO: 1248118 - DNA, 25 bp, Homo sapien
tatatggattcaactacctggcacg

SEQ ID NO: 1248119 - DNA, 25 bp, Homo sapien
ggaacacacattctacccgtggtga

SEQ ID NO: 1248120 - DNA, 25 bp, Homo sapien
tacactgggcgaagaaggactaagc

SEQ ID NO: 1248121 - DNA, 25 bp, Homo sapien
ggtgaatcctgcttgaggcctcaga

SEQ ID NO: 1248122 - DNA, 25 bp, Homo sapien
catcttgggtttgcataagtcatcc

SEQ ID NO: 1248123 - DNA, 25 bp, Homo sapien
ggtaaccaggtgagcaacaaagaag

SEQ ID NO: 1248124 - DNA, 25 bp, Homo sapien
ggtaggctataaaatcagatgattc

SEQ ID NO: 1248125 - DNA, 25 bp, Homo sapien
gtatgtcctaaacctggaattgaac

SEQ ID NO: 1248126 - DNA, 25 bp, Homo sapien
aatgagcagtatgtcctaaacctgg

SEQ ID NO: 1248127 - DNA, 25 bp, Homo sapien
ctctttcccaggtgactgcccgggc

SEQ ID NO: 1248128 - DNA, 25 bp, Homo sapien
tctttcccaggtgactgcccgggca

SEQ ID NO: 1248129 - DNA, 25 bp, Homo sapien
gttcaggcatccatcgtccaaatac

SEQ ID NO: 1248130 - DNA, 25 bp, Homo sapien
atcgtccaaatacccaggactcctg

SEQ ID NO: 1248131 - DNA, 25 bp, Homo sapien
tgcgctgcaccactctggtttgcca

SEQ ID NO: 1248132 - DNA, 25 bp, Homo sapien
actctggtttgccacgttcagtcag

SEQ ID NO: 1248133 - DNA, 25 bp, Homo sapien
taagcaataggagatctcaaccgtc

SEQ ID NO: 1248134 - DNA, 25 bp, Homo sapien
taaatccccagaaacggtgcaatgg

SEQ ID NO: 1248135 - DNA, 25 bp, Homo sapien
taaggaggccattagtcaaccccaa

SEQ ID NO: 1248136 - DNA, 25 bp, Homo sapien
cagaggccagacttacagagcagca

SEQ ID NO: 1248137 - DNA, 25 bp, Homo sapien
tgtggtcttggaacacaccgagaac

SEQ ID NO: 1248138 - DNA, 25 bp, Homo sapien
tgttgtccccgcaggtgagaagcgc

SEQ ID NO: 1248139 - DNA, 25 bp, Homo sapien
gaagcgcagtggttgtctgagccct

SEQ ID NO: 1248140 - DNA, 25 bp, Homo sapien
caatatcgactgaatcactggcccg

SEQ ID NO: 1248141 - DNA, 25 bp, Homo sapien
ttgaaggaaagcaccgtcatgcggc

SEQ ID NO: 1248142 - DNA, 25 bp, Homo sapien
catccaaggatgagcctaagagaac

SEQ ID NO: 1248143 - DNA, 25 bp, Homo sapien
tcagcttaggaagtgaggcggcaaa

SEQ ID NO: 1248144 - DNA, 25 bp, Homo sapien
tggtggtccctagcagacacgtctg

SEQ ID NO: 1248145 - DNA, 25 bp, Homo sapien
gccggagcatcacacagaagcagca

SEQ ID NO: 1248146 - DNA, 25 bp, Homo sapien
ggagcatcacacagaagcagcagtg

SEQ ID NO: 1248147 - DNA, 25 bp, Homo sapien
cggagcatcacacagaagcagcagt

SEQ ID NO: 1248148 - DNA, 25 bp, Homo sapien
catgccggagcatcacacagaagca

SEQ ID NO: 1248149 - DNA, 25 bp, Homo sapien
aagcatcctcacaaaggacccaatt

SEQ ID NO: 1248150 - DNA, 25 bp, Homo sapien
ttggtccaacctcgaagcatcctca

SEQ ID NO: 1248151 - DNA, 25 bp, Homo sapien
catcctcacaaaggacccaattgct

SEQ ID NO: 1248152 - DNA, 25 bp, Homo sapien
tcctcacaaaggacccaattgctct

SEQ ID NO: 1248153 - DNA, 25 bp, Homo sapien
cctgcctaaagggtagcctgggcaa

SEQ ID NO: 1248154 - DNA, 25 bp, Homo sapien
aaaatgggaatcatgaggccagcta

SEQ ID NO: 1248155 - DNA, 25 bp, Homo sapien
tgaggccagctaactaaagagcaga

SEQ ID NO: 1248156 - DNA, 25 bp, Homo sapien
tcctccctgcctaaagggtagcctg

SEQ ID NO: 1248157 - DNA, 25 bp, Homo sapien
gaaggtcattctcttggatgcaacc

SEQ ID NO: 1248158 - DNA, 25 bp, Homo sapien
tgccctcctctgtcgaggaaggtca

SEQ ID NO: 1248159 - DNA, 25 bp, Homo sapien
cagaagaaggaagttcctcccattt

SEQ ID NO: 1248160 - DNA, 25 bp, Homo sapien
gggccacagatgtaccacacagatt

SEQ ID NO: 1248161 - DNA, 25 bp, Homo sapien
gacctctcaactacaaaactgtaag

SEQ ID NO: 1248162 - DNA, 25 bp, Homo sapien
cagacctctcaactacaaaactgta

SEQ ID NO: 1248163 - DNA, 25 bp, Homo sapien
tacagacctctcaactacaaaactg

SEQ ID NO: 1248164 - DNA, 25 bp, Homo sapien
cctttacagacctctcaactacaaa

SEQ ID NO: 1248165 - DNA, 25 bp, Homo sapien
tcggcctagctctgcatatctgaag

SEQ ID NO: 1248166 - DNA, 25 bp, Homo sapien
tgactataacacagcagatgcactc

SEQ ID NO: 1248167 - DNA, 25 bp, Homo sapien
tccagagaaatcctatggtccaagg

SEQ ID NO: 1248168 - DNA, 25 bp, Homo sapien
gactttatgcagatactccagagaa

SEQ ID NO: 1248169 - DNA, 25 bp, Homo sapien
tgcaggtttcaacatatctcaggct

SEQ ID NO: 1248170 - DNA, 25 bp, Homo sapien
caagccttgcaagggatatcttcat

SEQ ID NO: 1248171 - DNA, 25 bp, Homo sapien
gaaaataagctgcaaccgactttcc

SEQ ID NO: 1248172 - DNA, 25 bp, Homo sapien
tcagccaatagtccttcaagccttg

SEQ ID NO: 1248173 - DNA, 25 bp, Homo sapien
cagtggaaacagcattcttagagac

SEQ ID NO: 1248174 - DNA, 25 bp, Homo sapien
gctgtcttctagtatgcatggaaag

SEQ ID NO: 1248175 - DNA, 25 bp, Homo sapien
actgtctgccaaaataactgctgtc

SEQ ID NO: 1248176 - DNA, 25 bp, Homo sapien
gcatgcagagtctacaaataattcc

SEQ ID NO: 1248177 - DNA, 25 bp, Homo sapien
tacaatggcctgtaaacaagcaagg

SEQ ID NO: 1248178 - DNA, 25 bp, Homo sapien
gctattctgttacctgcctgtgaga

SEQ ID NO: 1248179 - DNA, 25 bp, Homo sapien
cagagtgagtacataaaggaagtcc

SEQ ID NO: 1248180 - DNA, 25 bp, Homo sapien
tccaacatgctaacgcagagtgagt

SEQ ID NO: 1248181 - DNA, 25 bp, Homo sapien
tgctctgcgcttccggcttacaaag

SEQ ID NO: 1248182 - DNA, 25 bp, Homo sapien
gcttacaaaggacatgctgaccctc

SEQ ID NO: 1248183 - DNA, 25 bp, Homo sapien
gacgacacggacatggctcagtaag

SEQ ID NO: 1248184 - DNA, 25 bp, Homo sapien
tcagtaagtcgggtctcccatcaac

SEQ ID NO: 1248185 - DNA, 25 bp, Homo sapien
tattaaggcagtccgcatcgagtct

SEQ ID NO: 1248186 - DNA, 25 bp, Homo sapien
cctgtgctgcaaagggtcaaactgc

SEQ ID NO: 1248187 - DNA, 25 bp, Homo sapien
gatttacaactctatgtgggccagg

SEQ ID NO: 1248188 - DNA, 25 bp, Homo sapien
caactgaattgaggcacacgatgct

SEQ ID NO: 1248189 - DNA, 25 bp, Homo sapien
actatgagctccttgccgctgtttc

SEQ ID NO: 1248190 - DNA, 25 bp, Homo sapien
tctcagaggctgcactatgagctcc

SEQ ID NO: 1248191 - DNA, 25 bp, Homo sapien
tctcccacacgggaatctcagaggc

SEQ ID NO: 1248192 - DNA, 25 bp, Homo sapien
acgggaatctcagaggctgcactat

SEQ ID NO: 1248193 - DNA, 25 bp, Homo sapien
tctcccacaagaacacttctgacag

SEQ ID NO: 1248194 - DNA, 25 bp, Homo sapien
ctcccacaagaacacttctgacagc

SEQ ID NO: 1248195 - DNA, 25 bp, Homo sapien
tctctcccacaagaacacttctgac

SEQ ID NO: 1248196 - DNA, 25 bp, Homo sapien
tcccacaagaacacttctgacagcc

SEQ ID NO: 1248197 - DNA, 25 bp, Homo sapien
aggagaaggttgcagtgcgtcatga

SEQ ID NO: 1248198 - DNA, 25 bp, Homo sapien
gagaaggttgcagtgcgtcatgatt

SEQ ID NO: 1248199 - DNA, 25 bp, Homo sapien
ggaggagaaggttgcagtgcgtcat

SEQ ID NO: 1248200 - DNA, 25 bp, Homo sapien
aggaggagaaggttgcagtgcgtca

SEQ ID NO: 1248201 - DNA, 25 bp, Homo sapien
gtgtattccaaccctgtcacaaaca

SEQ ID NO: 1248202 - DNA, 25 bp, Homo sapien
ctcggaaccctgtggtgtattccaa

SEQ ID NO: 1248203 - DNA, 25 bp, Homo sapien
agggcccaccaaccagcgtagccca

SEQ ID NO: 1248204 - DNA, 25 bp, Homo sapien
ccaaccagcgtagcccatttgctag

SEQ ID NO: 1248205 - DNA, 25 bp, Homo sapien
cgtggcaggcagcaagccctccatg

SEQ ID NO: 1248206 - DNA, 25 bp, Homo sapien
tccatggctcccaagggctctacag

SEQ ID NO: 1248207 - DNA, 25 bp, Homo sapien
ttcgtggcaggcagcaagccctcca

SEQ ID NO: 1248208 - DNA, 25 bp, Homo sapien
aagggctctacagctctgcctcccc

SEQ ID NO: 1248209 - DNA, 25 bp, Homo sapien
tcggatcccccatggcatccatatg

SEQ ID NO: 1248210 - DNA, 25 bp, Homo sapien
gattgcacatagtctcttggccaca

SEQ ID NO: 1248211 - DNA, 25 bp, Homo sapien
tctgattgcacatagtctcttggcc

SEQ ID NO: 1248212 - DNA, 25 bp, Homo sapien
taaacagcttgtacggctgcccaca

SEQ ID NO: 1248213 - DNA, 25 bp, Homo sapien
agctgcaggacctccgtctccagcc

SEQ ID NO: 1248214 - DNA, 25 bp, Homo sapien
ctgcaggacctccgtctccagccgt

SEQ ID NO: 1248215 - DNA, 25 bp, Homo sapien
gctgcaggacctccgtctccagccg

SEQ ID NO: 1248216 - DNA, 25 bp, Homo sapien
ctccggtccaggtccagacagtagg

SEQ ID NO: 1248217 - DNA, 25 bp, Homo sapien
gcctccggtccaggtccagacagta

SEQ ID NO: 1248218 - DNA, 25 bp, Homo sapien
aagcctccggtccaggtccagacag

SEQ ID NO: 1248219 - DNA, 25 bp, Homo sapien
cctgcatcttgccaagcctccggtc

SEQ ID NO: 1248220 - DNA, 25 bp, Homo sapien
tcttgagccagtcgcgggtctgact

SEQ ID NO: 1248221 - DNA, 25 bp, Homo sapien
caatcttcttgagccagtcgcgggt

SEQ ID NO: 1248222 - DNA, 25 bp, Homo sapien
tcttcttgagccagtcgcgggtctg

SEQ ID NO: 1248223 - DNA, 25 bp, Homo sapien
ttcttgagccagtcgcgggtctgac

SEQ ID NO: 1248224 - DNA, 25 bp, Homo sapien
tctccagctagtttcaaagacccca

SEQ ID NO: 1248225 - DNA, 25 bp, Homo sapien
taatactctccagctagtttcaaag

SEQ ID NO: 1248226 - DNA, 25 bp, Homo sapien
tctgaatccttatactcttttcagc

SEQ ID NO: 1248227 - DNA, 25 bp, Homo sapien
cagcacctaatactctccagctagt

SEQ ID NO: 1248228 - DNA, 25 bp, Homo sapien
gacttcatgtgatatgagaaacaca

SEQ ID NO: 1248229 - DNA, 25 bp, Homo sapien
agaaacacattccatgggtcatttc

SEQ ID NO: 1248230 - DNA, 25 bp, Homo sapien
taatcccttgcaaaattactagtcc

SEQ ID NO: 1248231 - DNA, 25 bp, Homo sapien
tttctcctgctcaataccataatcc

SEQ ID NO: 1248232 - DNA, 25 bp, Homo sapien
gcccttcgagcaaaacaaatacagc

SEQ ID NO: 1248233 - DNA, 25 bp, Homo sapien
ggcatactcagggtgcatcccacag

SEQ ID NO: 1248234 - DNA, 25 bp, Homo sapien
aaatacagcaaagcttgcgtctgca

SEQ ID NO: 1248235 - DNA, 25 bp, Homo sapien
gaataccacagcagtaagcccttcg

SEQ ID NO: 1248236 - DNA, 25 bp, Homo sapien
acatcatcagctgtagagaaagctg

SEQ ID NO: 1248237 - DNA, 25 bp, Homo sapien
catcatcagctgtagagaaagctgt

SEQ ID NO: 1248238 - DNA, 25 bp, Homo sapien
cacatcatcagctgtagagaaagct

SEQ ID NO: 1248239 - DNA, 25 bp, Homo sapien
acacaagtgcctgctcacctatcac

SEQ ID NO: 1248240 - DNA, 25 bp, Homo sapien
cattagcctcctgcgtgcgtagctg

SEQ ID NO: 1248241 - DNA, 25 bp, Homo sapien
catttggtattctgtcataacatca

SEQ ID NO: 1248242 - DNA, 25 bp, Homo sapien
cacagaacaatacagcggttgtttt

SEQ ID NO: 1248243 - DNA, 25 bp, Homo sapien
gctagtagccaaaagcacattctgg

SEQ ID NO: 1248244 - DNA, 25 bp, Homo sapien
tcagtctagacacagccaaagggtt

SEQ ID NO: 1248245 - DNA, 25 bp, Homo sapien
taacacctgagattcaatgacacgc

SEQ ID NO: 1248246 - DNA, 25 bp, Homo sapien
ctgtaggagaaaaggtgcaatggca

SEQ ID NO: 1248247 - DNA, 25 bp, Homo sapien
gaaaacccatctacataataaaaga

SEQ ID NO: 1248248 - DNA, 25 bp, Homo sapien
ctgcaaacatagatagccaggtata

SEQ ID NO: 1248249 - DNA, 25 bp, Homo sapien
caaggagatgcaggccaggtagaaa

SEQ ID NO: 1248250 - DNA, 25 bp, Homo sapien
catagatagccaggtatattcaaca

SEQ ID NO: 1248251 - DNA, 25 bp, Homo sapien
tacttggagtagcaccagaggtcat

SEQ ID NO: 1248252 - DNA, 25 bp, Homo sapien
gccaatgctagagtggaaagaactc

SEQ ID NO: 1248253 - DNA, 25 bp, Homo sapien
gtgagatctgatcacccacgaggac

SEQ ID NO: 1248254 - DNA, 25 bp, Homo sapien
gaacaaggtcatatgcagtttcagc

SEQ ID NO: 1248255 - DNA, 25 bp, Homo sapien
tttcttgcaattggtagatatttca

SEQ ID NO: 1248256 - DNA, 25 bp, Homo sapien
ctcacttttcttgcaattggtagat

SEQ ID NO: 1248257 - DNA, 25 bp, Homo sapien
gtagatatttcagctgaaggctttt

SEQ ID NO: 1248258 - DNA, 25 bp, Homo sapien
tgcaattggtagatatttcagctga

SEQ ID NO: 1248259 - DNA, 25 bp, Homo sapien
gaagcaacattaagttcaggagagc

SEQ ID NO: 1248260 - DNA, 25 bp, Homo sapien
ccttaacattgtatgatggagtgca

SEQ ID NO: 1248261 - DNA, 25 bp, Homo sapien
tcaggagagctccactataccacca

SEQ ID NO: 1248262 - DNA, 25 bp, Homo sapien
caccaaggagagaggctatagctac

SEQ ID NO: 1248263 - DNA, 25 bp, Homo sapien
gaagtggactccaagaaacaaagtc

SEQ ID NO: 1248264 - DNA, 25 bp, Homo sapien
ttctgctgccaagcatagcttctgt

SEQ ID NO: 1248265 - DNA, 25 bp, Homo sapien
tctttgtggatggttgcggtgcact

SEQ ID NO: 1248266 - DNA, 25 bp, Homo sapien
ggtgcactgcagaaccacttcatca

SEQ ID NO: 1248267 - DNA, 25 bp, Homo sapien
tatatccaggagtaggattttccac

SEQ ID NO: 1248268 - DNA, 25 bp, Homo sapien
gaatcaaattcatacagactgtggg

SEQ ID NO: 1248269 - DNA, 25 bp, Homo sapien
gctcagaccatgttcagtgcttaag

SEQ ID NO: 1248270 - DNA, 25 bp, Homo sapien
cactataatcgctggtaagcagcaa

SEQ ID NO: 1248271 - DNA, 25 bp, Homo sapien
tcattacaggttcaaattctcaaat

SEQ ID NO: 1248272 - DNA, 25 bp, Homo sapien
atataagcctcctgaatcactagga

SEQ ID NO: 1248273 - DNA, 25 bp, Homo sapien
tataagcctcctgaatcactaggac

SEQ ID NO: 1248274 - DNA, 25 bp, Homo sapien
cataactcattacaggttcaaattc

SEQ ID NO: 1248275 - DNA, 25 bp, Homo sapien
tcatttaggccaaaacctatgtaga

SEQ ID NO: 1248276 - DNA, 25 bp, Homo sapien
taagcggagatttactctcagtttc

SEQ ID NO: 1248277 - DNA, 25 bp, Homo sapien
tctcatttaggccaaaacctatgta

SEQ ID NO: 1248278 - DNA, 25 bp, Homo sapien
taaggatttaagcggagatttactc

SEQ ID NO: 1248279 - DNA, 25 bp, Homo sapien
tgagggcaaccaacagattccgact

SEQ ID NO: 1248280 - DNA, 25 bp, Homo sapien
gcatagctaagcattaaccagcctg

SEQ ID NO: 1248281 - DNA, 25 bp, Homo sapien
taatatagtgcagattcgttcaggc

SEQ ID NO: 1248282 - DNA, 25 bp, Homo sapien
catctcactgtttgcaggtgtctca

SEQ ID NO: 1248283 - DNA, 25 bp, Homo sapien
tatatattctccagtgacaaaaaaa

SEQ ID NO: 1248284 - DNA, 25 bp, Homo sapien
atatattctccagtgacaaaaaaaa

SEQ ID NO: 1248285 - DNA, 25 bp, Homo sapien
tatattctccagtgacaaaaaaaac

SEQ ID NO: 1248286 - DNA, 25 bp, Homo sapien
tatgcacgtaggagagcagtacttg

SEQ ID NO: 1248287 - DNA, 25 bp, Homo sapien
gataagaattgactggctgttcacg

SEQ ID NO: 1248288 - DNA, 25 bp, Homo sapien
tgggtgcactagaagcccagactta

SEQ ID NO: 1248289 - DNA, 25 bp, Homo sapien
gctgttcacgattcaggtgatgggt

SEQ ID NO: 1248290 - DNA, 25 bp, Homo sapien
tgcacagaaagaggaagagcagtca

SEQ ID NO: 1248291 - DNA, 25 bp, Homo sapien
cagaaagaggaagagcagtcagcag

SEQ ID NO: 1248292 - DNA, 25 bp, Homo sapien
agaaagaggaagagcagtcagcagc

SEQ ID NO: 1248293 - DNA, 25 bp, Homo sapien
cacagaaagaggaagagcagtcagc

SEQ ID NO: 1248294 - DNA, 25 bp, Homo sapien
tgcagcgcccggacagagagggact

SEQ ID NO: 1248295 - DNA, 25 bp, Homo sapien
gatttctccacggtgttagccagca

SEQ ID NO: 1248296 - DNA, 25 bp, Homo sapien
ctgcagcgcccggacagagagggac

SEQ ID NO: 1248297 - DNA, 25 bp, Homo sapien
tgatttctccacggtgttagccagc

SEQ ID NO: 1248298 - DNA, 25 bp, Homo sapien
cataaatacaatagaggcctccaga

SEQ ID NO: 1248299 - DNA, 25 bp, Homo sapien
ctgtggcaagctaggaatgaatatc

SEQ ID NO: 1248300 - DNA, 25 bp, Homo sapien
gctcgggctacctccaaatccataa

SEQ ID NO: 1248301 - DNA, 25 bp, Homo sapien
cattaactggcatcacctgtggcaa

SEQ ID NO: 1248302 - DNA, 25 bp, Homo sapien
ttctaacactgctgcggcatcatta

SEQ ID NO: 1248303 - DNA, 25 bp, Homo sapien
gcggcatcattaaatcggcaaacta

SEQ ID NO: 1248304 - DNA, 25 bp, Homo sapien
tacatgtgccaggattgatgagaat

SEQ ID NO: 1248305 - DNA, 25 bp, Homo sapien
taaatcggcaaactacatgtgccag

SEQ ID NO: 1248306 - DNA, 25 bp, Homo sapien
tcacagttatgaggacgtacaaggg

SEQ ID NO: 1248307 - DNA, 25 bp, Homo sapien
caataggtaggtaacagaacacagc

SEQ ID NO: 1248308 - DNA, 25 bp, Homo sapien
atttcttggtcatggagacacctga

SEQ ID NO: 1248309 - DNA, 25 bp, Homo sapien
tgaatgaacactgtacgaatgagac

SEQ ID NO: 1248310 - DNA, 25 bp, Homo sapien
tcaagacaatgtggtgttggttaaa

SEQ ID NO: 1248311 - DNA, 25 bp, Homo sapien
cacccagtgataaggaactctacga

SEQ ID NO: 1248312 - DNA, 25 bp, Homo sapien
aatacataccaaataatcactatat

SEQ ID NO: 1248313 - DNA, 25 bp, Homo sapien
tgtggtgttggttaaagaatggaca

SEQ ID NO: 1248314 - DNA, 25 bp, Homo sapien
taacatagttataccagctttcttt

SEQ ID NO: 1248315 - DNA, 25 bp, Homo sapien
tacaactttaccatcctatagcttt

SEQ ID NO: 1248316 - DNA, 25 bp, Homo sapien
cttttactctttctgtaagacagtc

SEQ ID NO: 1248317 - DNA, 25 bp, Homo sapien
ccagcccttttctcagatattaaca

SEQ ID NO: 1248318 - DNA, 25 bp, Homo sapien
tgtgtactttctcagcatatggtgc

SEQ ID NO: 1248319 - DNA, 25 bp, Homo sapien
tttggaacaaagctagtcacagtat

SEQ ID NO: 1248320 - DNA, 25 bp, Homo sapien
tttggtggaattaaccagtgaggcc

SEQ ID NO: 1248321 - DNA, 25 bp, Homo sapien
cataggcttatggatttgcaattcc

SEQ ID NO: 1248322 - DNA, 25 bp, Homo sapien
tacatcaaatttaagccttttcgcc

SEQ ID NO: 1248323 - DNA, 25 bp, Homo sapien
catcaaatttaagccttttcgccat

SEQ ID NO: 1248324 - DNA, 25 bp, Homo sapien
atacatcaaatttaagccttttcgc

SEQ ID NO: 1248325 - DNA, 25 bp, Homo sapien
acatcaaatttaagccttttcgcca

SEQ ID NO: 1248326 - DNA, 25 bp, Homo sapien
gactgacaagaacgcgcttcctttt

SEQ ID NO: 1248327 - DNA, 25 bp, Homo sapien
aattcaacagactgacaagaacgcg

SEQ ID NO: 1248328 - DNA, 25 bp, Homo sapien
cagactgacaagaacgcgcttcctt

SEQ ID NO: 1248329 - DNA, 25 bp, Homo sapien
tcaacagactgacaagaacgcgctt

SEQ ID NO: 1248330 - DNA, 25 bp, Homo sapien
tgaacaggtccaggttagggtgtcc

SEQ ID NO: 1248331 - DNA, 25 bp, Homo sapien
caggtccaggttagggtgtcccaca

SEQ ID NO: 1248332 - DNA, 25 bp, Homo sapien
ccacaatgcacctggttcagtttta

SEQ ID NO: 1248333 - DNA, 25 bp, Homo sapien
tagatggcttcaaagaaatactctg

SEQ ID NO: 1248334 - DNA, 25 bp, Homo sapien
atactctgttctgtcatcccatcca

SEQ ID NO: 1248335 - DNA, 25 bp, Homo sapien
taagagctagagttatttgaaattc

SEQ ID NO: 1248336 - DNA, 25 bp, Homo sapien
tggaagatgttccacgtcctggttg

SEQ ID NO: 1248337 - DNA, 25 bp, Homo sapien
tttcccttccctgaatatgccatac

SEQ ID NO: 1248338 - DNA, 25 bp, Homo sapien
tcccttccctgaatatgccatactg

SEQ ID NO: 1248339 - DNA, 25 bp, Homo sapien
actttcccttccctgaatatgccat

SEQ ID NO: 1248340 - DNA, 25 bp, Homo sapien
gccatactgctttcatgctgcccca

SEQ ID NO: 1248341 - DNA, 25 bp, Homo sapien
ctttagagagaagagaaaaaaggag

SEQ ID NO: 1248342 - DNA, 25 bp, Homo sapien
gagaaaaaaggagaacaagagagaa

SEQ ID NO: 1248343 - DNA, 25 bp, Homo sapien
caagagagaaaaacacaaaagagta

SEQ ID NO: 1248344 - DNA, 25 bp, Homo sapien
agagagaagagaaaaaaggagaaca

SEQ ID NO: 1248345 - DNA, 25 bp, Homo sapien
gcaatatggcatgtccgtagaggag

SEQ ID NO: 1248346 - DNA, 25 bp, Homo sapien
tagaggagtgttcgatgaccaccac

SEQ ID NO: 1248347 - DNA, 25 bp, Homo sapien
taggaatggcgcagcaatatggcat

SEQ ID NO: 1248348 - DNA, 25 bp, Homo sapien
catgccactataggaatggcgcagc

SEQ ID NO: 1248349 - DNA, 25 bp, Homo sapien
agctcttataagaatggaatgaggc

SEQ ID NO: 1248350 - DNA, 25 bp, Homo sapien
tcttataagaatggaatgaggccgg

SEQ ID NO: 1248351 - DNA, 25 bp, Homo sapien
ttaataaagctcttataagaatgga

SEQ ID NO: 1248352 - DNA, 25 bp, Homo sapien
taaagctcttataagaatggaatga

SEQ ID NO: 1248353 - DNA, 25 bp, Homo sapien
gaaatgttctctgtcagtacaggaa

SEQ ID NO: 1248354 - DNA, 25 bp, Homo sapien
tttggcatccatctatccctactgt

SEQ ID NO: 1248355 - DNA, 25 bp, Homo sapien
taaggtttatagttgtaccagcaga

SEQ ID NO: 1248356 - DNA, 25 bp, Homo sapien
acagtgaccagccatcgttaaggtt

SEQ ID NO: 1248357 - DNA, 25 bp, Homo sapien
aaagccagcttatcagttgaagacc

SEQ ID NO: 1248358 - DNA, 25 bp, Homo sapien
aagccagcttatcagttgaagaccg

SEQ ID NO: 1248359 - DNA, 25 bp, Homo sapien
tcccatgtatcgtatttcccggctt

SEQ ID NO: 1248360 - DNA, 25 bp, Homo sapien
tgtatcgtatttcccggcttcttcc

SEQ ID NO: 1248361 - DNA, 25 bp, Homo sapien
taagaacattcatcccatgtatcgt

SEQ ID NO: 1248362 - DNA, 25 bp, Homo sapien
cattcatcccatgtatcgtatttcc

SEQ ID NO: 1248363 - DNA, 25 bp, Homo sapien
gatatacggatatgtgaaacatgaa

SEQ ID NO: 1248364 - DNA, 25 bp, Homo sapien
tacggatatgtgaaacatgaaaaag

SEQ ID NO: 1248365 - DNA, 25 bp, Homo sapien
cggatatgtgaaacatgaaaaagtt

SEQ ID NO: 1248366 - DNA, 25 bp, Homo sapien
tgcagatatacggatatgtgaaaca

SEQ ID NO: 1248367 - DNA, 25 bp, Homo sapien
ttagaggcagggtgtatggtccacc

SEQ ID NO: 1248368 - DNA, 25 bp, Homo sapien
ctgcttagaggcagggtgtatggtc

SEQ ID NO: 1248369 - DNA, 25 bp, Homo sapien
gtgtatggtccaccaacaagcctcc

SEQ ID NO: 1248370 - DNA, 25 bp, Homo sapien
cttagaggcagggtgtatggtccac

SEQ ID NO: 1248371 - DNA, 25 bp, Homo sapien
ttcagaggacacgctaactaagatg

SEQ ID NO: 1248372 - DNA, 25 bp, Homo sapien
aggacacgctaactaagatgaggtc

SEQ ID NO: 1248373 - DNA, 25 bp, Homo sapien
cagaggacacgctaactaagatgag

SEQ ID NO: 1248374 - DNA, 25 bp, Homo sapien
agaggacacgctaactaagatgagg

SEQ ID NO: 1248375 - DNA, 25 bp, Homo sapien
tgtgccattcacagaactacgagcc

SEQ ID NO: 1248376 - DNA, 25 bp, Homo sapien
tctcccaagtaaatagtgacagtaa

SEQ ID NO: 1248377 - DNA, 25 bp, Homo sapien
taaaggttacatgattagcccaggt

SEQ ID NO: 1248378 - DNA, 25 bp, Homo sapien
tagcccaggttcatactcaccagac

SEQ ID NO: 1248379 - DNA, 25 bp, Homo sapien
gcaacgatagaaaacgaaacaccga

SEQ ID NO: 1248380 - DNA, 25 bp, Homo sapien
cgatagaaaacgaaacaccgaatgt

SEQ ID NO: 1248381 - DNA, 25 bp, Homo sapien
caaactatcgcaacgatagaaaacg

SEQ ID NO: 1248382 - DNA, 25 bp, Homo sapien
tatcgcaacgatagaaaacgaaaca

SEQ ID NO: 1248383 - DNA, 25 bp, Homo sapien
taagctgccgttgccataagacaag

SEQ ID NO: 1248384 - DNA, 25 bp, Homo sapien
catccacgtgtaagctgccgttgcc

SEQ ID NO: 1248385 - DNA, 25 bp, Homo sapien
gaaagcggcatccacgtgtaagctg

SEQ ID NO: 1248386 - DNA, 25 bp, Homo sapien
tccagagagtctgctggaaagcggc

SEQ ID NO: 1248387 - DNA, 25 bp, Homo sapien
gacactcgtccatgtgtccatgcag

SEQ ID NO: 1248388 - DNA, 25 bp, Homo sapien
cagtgagacactcgtccatgtgtcc

SEQ ID NO: 1248389 - DNA, 25 bp, Homo sapien
gggacagtgagacactcgtccatgt

SEQ ID NO: 1248390 - DNA, 25 bp, Homo sapien
tgtgtccatgcagcaacctgaggac

SEQ ID NO: 1248391 - DNA, 25 bp, Homo sapien
gaaattataagcgtttcagttgaca

SEQ ID NO: 1248392 - DNA, 25 bp, Homo sapien
cagagtgaaattataagcgtttcag

SEQ ID NO: 1248393 - DNA, 25 bp, Homo sapien
taagcgtttcagttgacacattttc

SEQ ID NO: 1248394 - DNA, 25 bp, Homo sapien
aattataagcgtttcagttgacaca

SEQ ID NO: 1248395 - DNA, 25 bp, Homo sapien
gaagtccagttgatccatgtgaatg

SEQ ID NO: 1248396 - DNA, 25 bp, Homo sapien
cacccaagcagctggctaatttgtg

SEQ ID NO: 1248397 - DNA, 25 bp, Homo sapien
caagtttaagaactctatgatccca

SEQ ID NO: 1248398 - DNA, 25 bp, Homo sapien
aatgtgaagtttaggcccaggttct

SEQ ID NO: 1248399 - DNA, 25 bp, Homo sapien
gagttctctttgtctccctccatcc

SEQ ID NO: 1248400 - DNA, 25 bp, Homo sapien
tcctctctccttggctgcttcctct

SEQ ID NO: 1248401 - DNA, 25 bp, Homo sapien
ctctctcccacccttgtcctttcat

SEQ ID NO: 1248402 - DNA, 25 bp, Homo sapien
ctgtgagttctctttgtctccctcc

SEQ ID NO: 1248403 - DNA, 25 bp, Homo sapien
cgaagttgggagactgacactatct

SEQ ID NO: 1248404 - DNA, 25 bp, Homo sapien
gacattctccccaaatagtactgaa

SEQ ID NO: 1248405 - DNA, 25 bp, Homo sapien
gaacagacaaacaggtcagtggaac

SEQ ID NO: 1248406 - DNA, 25 bp, Homo sapien
caaagaatcagtaagtcaatggaca

SEQ ID NO: 1248407 - DNA, 25 bp, Homo sapien
tttgatcatgaatccattacatatg

SEQ ID NO: 1248408 - DNA, 25 bp, Homo sapien
taaaagacaattcaatcagtcacat

SEQ ID NO: 1248409 - DNA, 25 bp, Homo sapien
tactgaacaccagaagaggtaaata

SEQ ID NO: 1248410 - DNA, 25 bp, Homo sapien
gagaaaacagtttaccaggctctga

SEQ ID NO: 1248411 - DNA, 25 bp, Homo sapien
acgtgcatgaacagacacagcgcca

SEQ ID NO: 1248412 - DNA, 25 bp, Homo sapien
gcaactcttagcgtctctagtctcc

SEQ ID NO: 1248413 - DNA, 25 bp, Homo sapien
caaagggaacgtgcatgaacagaca

SEQ ID NO: 1248414 - DNA, 25 bp, Homo sapien
tctctagtctccaaagggaacgtgc

SEQ ID NO: 1248415 - DNA, 25 bp, Homo sapien
tccccagtggctgaccataagatca

SEQ ID NO: 1248416 - DNA, 25 bp, Homo sapien
taaaagctcctaaactgaatgtagc

SEQ ID NO: 1248417 - DNA, 25 bp, Homo sapien
acataagcaacagtagagagacagg

SEQ ID NO: 1248418 - DNA, 25 bp, Homo sapien
cagtgacatctggactatgagaagc

SEQ ID NO: 1248419 - DNA, 25 bp, Homo sapien
tggcgtagtcggaatggctgtcccc

SEQ ID NO: 1248420 - DNA, 25 bp, Homo sapien
gtccccatcttatgtggcttccact

SEQ ID NO: 1248421 - DNA, 25 bp, Homo sapien
ctgtccccatcttatgtggcttcca

SEQ ID NO: 1248422 - DNA, 25 bp, Homo sapien
ttcctgttgtgacatggcgtagtcg

SEQ ID NO: 1248423 - DNA, 25 bp, Homo sapien
cttggaagaccggaaggtaaatgct

SEQ ID NO: 1248424 - DNA, 25 bp, Homo sapien
gaagaccggaaggtaaatgctgttg

SEQ ID NO: 1248425 - DNA, 25 bp, Homo sapien
aatgctgttgattttacatcagctt

SEQ ID NO: 1248426 - DNA, 25 bp, Homo sapien
gaccggaaggtaaatgctgttgatt

SEQ ID NO: 1248427 - DNA, 25 bp, Homo sapien
taagtaagccataggcctgtgtcta

SEQ ID NO: 1248428 - DNA, 25 bp, Homo sapien
gatcccattctcacggatttcacgt

SEQ ID NO: 1248429 - DNA, 25 bp, Homo sapien
tttcacgtccacagactggtaagta

SEQ ID NO: 1248430 - DNA, 25 bp, Homo sapien
gtatatagcatactgagtcaccgta

SEQ ID NO: 1248431 - DNA, 25 bp, Homo sapien
ggaagactgtgctccggataactcg

SEQ ID NO: 1248432 - DNA, 25 bp, Homo sapien
gctgggatctcgacaaacttatgcc

SEQ ID NO: 1248433 - DNA, 25 bp, Homo sapien
tcgggctgtgcgtgattcttcatgc

SEQ ID NO: 1248434 - DNA, 25 bp, Homo sapien
tccatgtggccttcatgatgcataa

SEQ ID NO: 1248435 - DNA, 25 bp, Homo sapien
agagattttgccgattcttcagggc

SEQ ID NO: 1248436 - DNA, 25 bp, Homo sapien
tcttcagggctcgtagtctgttctg

SEQ ID NO: 1248437 - DNA, 25 bp, Homo sapien
gactctataggcaaatcgactgtgg

SEQ ID NO: 1248438 - DNA, 25 bp, Homo sapien
gagatcctgcagacttaggcttacg

SEQ ID NO: 1248439 - DNA, 25 bp, Homo sapien
actcaagcacgaggttgatcattcc

SEQ ID NO: 1248440 - DNA, 25 bp, Homo sapien
agcaactcatacagagaattcagaa

SEQ ID NO: 1248441 - DNA, 25 bp, Homo sapien
gcaaacggtctatgcactcaagcac

SEQ ID NO: 1248442 - DNA, 25 bp, Homo sapien
cactgctgtagacgtgcaaacggtc

SEQ ID NO: 1248443 - DNA, 25 bp, Homo sapien
gccatgttccagtaaaagccaacct

SEQ ID NO: 1248444 - DNA, 25 bp, Homo sapien
taattaggagcaggaaccgtgttca

SEQ ID NO: 1248445 - DNA, 25 bp, Homo sapien
gaagggaccaatgaacagagactat

SEQ ID NO: 1248446 - DNA, 25 bp, Homo sapien
gatacaatacctgttgaagggacca

SEQ ID NO: 1248447 - DNA, 25 bp, Homo sapien
gcacagtttttacgatttcctctaa

SEQ ID NO: 1248448 - DNA, 25 bp, Homo sapien
tcgagggagccagaaaattgagcac

SEQ ID NO: 1248449 - DNA, 25 bp, Homo sapien
ttacgatttcctctaattagagccg

SEQ ID NO: 1248450 - DNA, 25 bp, Homo sapien
ccagtctttccaatctgctgatcaa

SEQ ID NO: 1248451 - DNA, 25 bp, Homo sapien
taagtgaggttaagattttgagaat

SEQ ID NO: 1248452 - DNA, 25 bp, Homo sapien
agtgaggttaagattttgagaattt

SEQ ID NO: 1248453 - DNA, 25 bp, Homo sapien
ttaagtgaggttaagattttgagaa

SEQ ID NO: 1248454 - DNA, 25 bp, Homo sapien
gaggttaagattttgagaattttgc

SEQ ID NO: 1248455 - DNA, 25 bp, Homo sapien
cacccggctgattttgttttctaat

SEQ ID NO: 1248456 - DNA, 25 bp, Homo sapien
ccggctgattttgttttctaataag

SEQ ID NO: 1248457 - DNA, 25 bp, Homo sapien
cggctgattttgttttctaataagc

SEQ ID NO: 1248458 - DNA, 25 bp, Homo sapien
ggaacatttgggtgggtggcaaatg

SEQ ID NO: 1248459 - DNA, 25 bp, Homo sapien
acatttgggtgggtggcaaatgact

SEQ ID NO: 1248460 - DNA, 25 bp, Homo sapien
gggtgggtggcaaatgacttccctc

SEQ ID NO: 1248461 - DNA, 25 bp, Homo sapien
ttgggtgggtggcaaatgacttccc

SEQ ID NO: 1248462 - DNA, 25 bp, Homo sapien
gcacctcggctaatatccatcaaga

SEQ ID NO: 1248463 - DNA, 25 bp, Homo sapien
agcaggtacctttcatgggtgccaa

SEQ ID NO: 1248464 - DNA, 25 bp, Homo sapien
tttcactatatcacactgaccctga

SEQ ID NO: 1248465 - DNA, 25 bp, Homo sapien
tgaccctgaggggactgcctggaca

SEQ ID NO: 1248466 - DNA, 25 bp, Homo sapien
cacagaggagctaagcgacttggtc

SEQ ID NO: 1248467 - DNA, 25 bp, Homo sapien
gtcagtcttggtagggatgaaccct

SEQ ID NO: 1248468 - DNA, 25 bp, Homo sapien
gaaactttggaacaggccctattgc

SEQ ID NO: 1248469 - DNA, 25 bp, Homo sapien
taatgggctgactacactctgagac

SEQ ID NO: 1248470 - DNA, 25 bp, Homo sapien
tgggagtcgaaacctgttagagctt

SEQ ID NO: 1248471 - DNA, 25 bp, Homo sapien
ctgggagtcgaaacctgttagagct

SEQ ID NO: 1248472 - DNA, 25 bp, Homo sapien
aagaatacgttcatgaccattttca

SEQ ID NO: 1248473 - DNA, 25 bp, Homo sapien
cgtacacgaagcaacacagaggtgg

SEQ ID NO: 1248474 - DNA, 25 bp, Homo sapien
gaagggcagtatgtgcatgagtaaa

SEQ ID NO: 1248475 - DNA, 25 bp, Homo sapien
gcatgagtaaagtcttgaacgtggg

SEQ ID NO: 1248476 - DNA, 25 bp, Homo sapien
gatttcttccatgtttgtctaaaag

SEQ ID NO: 1248477 - DNA, 25 bp, Homo sapien
ttaataatatttagagcttctggac

SEQ ID NO: 1248478 - DNA, 25 bp, Homo sapien
taatatttagagcttctggactttc

SEQ ID NO: 1248479 - DNA, 25 bp, Homo sapien
tgtctaaaagtgagataatagattt

SEQ ID NO: 1248480 - DNA, 25 bp, Homo sapien
gatgctggttagaacggactgcaac

SEQ ID NO: 1248481 - DNA, 25 bp, Homo sapien
caaccccgtggcaaacacagagtga

SEQ ID NO: 1248482 - DNA, 25 bp, Homo sapien
acatggttcacaagacgtgtctgca

SEQ ID NO: 1248483 - DNA, 25 bp, Homo sapien
cagagtgagcacaagacatccagaa

SEQ ID NO: 1248484 - DNA, 25 bp, Homo sapien
agggtagggagaatatccttcagtg

SEQ ID NO: 1248485 - DNA, 25 bp, Homo sapien
cactgacgcccagaaaaatattggg

SEQ ID NO: 1248486 - DNA, 25 bp, Homo sapien
atatccttcagtggaagcccagccc

SEQ ID NO: 1248487 - DNA, 25 bp, Homo sapien
caggtgagttgcttcagctgtcaca

SEQ ID NO: 1248488 - DNA, 25 bp, Homo sapien
gagcttacagtacgagcaatacaac

SEQ ID NO: 1248489 - DNA, 25 bp, Homo sapien
taacgactggaaagaagaggccatc

SEQ ID NO: 1248490 - DNA, 25 bp, Homo sapien
gaacaggttgtccattaattcggaa

SEQ ID NO: 1248491 - DNA, 25 bp, Homo sapien
gatgacatcatcagttcttaacaga

SEQ ID NO: 1248492 - DNA, 25 bp, Homo sapien
gcaggtcgcgtgtgtaagttctttc

SEQ ID NO: 1248493 - DNA, 25 bp, Homo sapien
tgtcgccctccaagcagaaagcgta

SEQ ID NO: 1248494 - DNA, 25 bp, Homo sapien
taacaaggagcatacccaggtggag

SEQ ID NO: 1248495 - DNA, 25 bp, Homo sapien
tgaaggcagcttgcgtcagggaaac

SEQ ID NO: 1248496 - DNA, 25 bp, Homo sapien
ttattcataacccagagttcatgga

SEQ ID NO: 1248497 - DNA, 25 bp, Homo sapien
ccagccaagctcaattttattcata

SEQ ID NO: 1248498 - DNA, 25 bp, Homo sapien
gccagccaagctcaattttattcat

SEQ ID NO: 1248499 - DNA, 25 bp, Homo sapien
attttattcataacccagagttcat

SEQ ID NO: 1248500 - DNA, 25 bp, Homo sapien
gaaaacccgaagagtgtcttgaaca

SEQ ID NO: 1248501 - DNA, 25 bp, Homo sapien
tcaaccagaactaaatgtaactgga

SEQ ID NO: 1248502 - DNA, 25 bp, Homo sapien
gaatgtgatgtatggtatcaaccag

SEQ ID NO: 1248503 - DNA, 25 bp, Homo sapien
tgcaaaacataaccacttaggtgaa

SEQ ID NO: 1248504 - DNA, 25 bp, Homo sapien
ggcaagaagaaacacccagatcatt

SEQ ID NO: 1248505 - DNA, 25 bp, Homo sapien
ttttctcagtgaggtttaccctgcc

SEQ ID NO: 1248506 - DNA, 25 bp, Homo sapien
gccaggcactagcaatggaattcaa

SEQ ID NO: 1248507 - DNA, 25 bp, Homo sapien
taaaatagtctccaatgccaggcac

SEQ ID NO: 1248508 - DNA, 25 bp, Homo sapien
caccaggcatgggtgttgtctcttg

SEQ ID NO: 1248509 - DNA, 25 bp, Homo sapien
gtaattgcgctcctgttcaggcagc

SEQ ID NO: 1248510 - DNA, 25 bp, Homo sapien
tgtaagttgtaattgcgctcctgtt

SEQ ID NO: 1248511 - DNA, 25 bp, Homo sapien
ttcagggtctcaagcgacatttgta

SEQ ID NO: 1248512 - DNA, 25 bp, Homo sapien
tcagggaaggcaggttggaaaatag

SEQ ID NO: 1248513 - DNA, 25 bp, Homo sapien
cagggaaggcaggttggaaaataga

SEQ ID NO: 1248514 - DNA, 25 bp, Homo sapien
ttcagggaaggcaggttggaaaata

SEQ ID NO: 1248515 - DNA, 25 bp, Homo sapien
tgtctgtcaactgttgactgcaaaa

SEQ ID NO: 1248516 - DNA, 25 bp, Homo sapien
taagtgtctgtcaactgttgactgc

SEQ ID NO: 1248517 - DNA, 25 bp, Homo sapien
cattatcaggtcacgcgtttgagac

SEQ ID NO: 1248518 - DNA, 25 bp, Homo sapien
ctgtcaactgttgactgcaaaaaga

SEQ ID NO: 1248519 - DNA, 25 bp, Homo sapien
ttcagcatgttcatctgatataccc

SEQ ID NO: 1248520 - DNA, 25 bp, Homo sapien
tgttcatctgatatacccacatgac

SEQ ID NO: 1248521 - DNA, 25 bp, Homo sapien
tatacccacatgacatcctaatgcc

SEQ ID NO: 1248522 - DNA, 25 bp, Homo sapien
tcatctgatatacccacatgacatc

SEQ ID NO: 1248523 - DNA, 25 bp, Homo sapien
tcttgggtagcttcatttttttcac

SEQ ID NO: 1248524 - DNA, 25 bp, Homo sapien
ttcttgggtagcttcatttttttca

SEQ ID NO: 1248525 - DNA, 25 bp, Homo sapien
gaagtttcgatatccacctgtgaat

SEQ ID NO: 1248526 - DNA, 25 bp, Homo sapien
cacagatgatgaagtttcgatatcc

SEQ ID NO: 1248527 - DNA, 25 bp, Homo sapien
tttcgatatccacctgtgaatcact

SEQ ID NO: 1248528 - DNA, 25 bp, Homo sapien
gatgatgaagtttcgatatccacct

SEQ ID NO: 1248529 - DNA, 25 bp, Homo sapien
ggccttttcataaaaatctctgtaa

SEQ ID NO: 1248530 - DNA, 25 bp, Homo sapien
tttctggccctacctcattactgtt

SEQ ID NO: 1248531 - DNA, 25 bp, Homo sapien
tggccttttcataaaaatctctgta

SEQ ID NO: 1248532 - DNA, 25 bp, Homo sapien
aatatcattttctggccctacctca

SEQ ID NO: 1248533 - DNA, 25 bp, Homo sapien
ataagtccagccctgccggattcga

SEQ ID NO: 1248534 - DNA, 25 bp, Homo sapien
gggcaggcttgtatccacttgtcag

SEQ ID NO: 1248535 - DNA, 25 bp, Homo sapien
taaagctcaggtccataggggcagg

SEQ ID NO: 1248536 - DNA, 25 bp, Homo sapien
gatcccgcgcccacacattatgtgc

SEQ ID NO: 1248537 - DNA, 25 bp, Homo sapien
gatttcttggttcggtcatccagaa

SEQ ID NO: 1248538 - DNA, 25 bp, Homo sapien
catgatcttgatctggtgcttccaa

SEQ ID NO: 1248539 - DNA, 25 bp, Homo sapien
tcatccagaagagtgtagggaacaa

SEQ ID NO: 1248540 - DNA, 25 bp, Homo sapien
cttccaagttgtagccgtaccccag

SEQ ID NO: 1248541 - DNA, 25 bp, Homo sapien
catcttgcaaccgaagaagaggaaa

SEQ ID NO: 1248542 - DNA, 25 bp, Homo sapien
tgcaaccgaagaagaggaaagtaaa

SEQ ID NO: 1248543 - DNA, 25 bp, Homo sapien
tcatcttgcaaccgaagaagaggaa

SEQ ID NO: 1248544 - DNA, 25 bp, Homo sapien
tcttgcaaccgaagaagaggaaagt

SEQ ID NO: 1248545 - DNA, 25 bp, Homo sapien
gctgagttcgccagaaaacacatgc

SEQ ID NO: 1248546 - DNA, 25 bp, Homo sapien
tctctaacctcaacgggaccatcaa

SEQ ID NO: 1248547 - DNA, 25 bp, Homo sapien
gggaccatcaatgtttctccacaat

SEQ ID NO: 1248548 - DNA, 25 bp, Homo sapien
aacacatgcaccgaacagattggca

SEQ ID NO: 1248549 - DNA, 25 bp, Homo sapien
tgtatctagaaacgaagactcttcc

SEQ ID NO: 1248550 - DNA, 25 bp, Homo sapien
ggtagcatcctgtcaaaggcacaga

SEQ ID NO: 1248551 - DNA, 25 bp, Homo sapien
gacaaatagctaatgggtagcatcc

SEQ ID NO: 1248552 - DNA, 25 bp, Homo sapien
ccgggctccggatatagcagcccag

SEQ ID NO: 1248553 - DNA, 25 bp, Homo sapien
tgagccaagctcctgatccggttga

SEQ ID NO: 1248554 - DNA, 25 bp, Homo sapien
tccggttgacaaccaggacgactcc

SEQ ID NO: 1248555 - DNA, 25 bp, Homo sapien
accgtccggccttcactgcataggt

SEQ ID NO: 1248556 - DNA, 25 bp, Homo sapien
catgtctccagcagtgaccgtctca

SEQ ID NO: 1248557 - DNA, 25 bp, Homo sapien
gaagggttttgagactacgaggaca

SEQ ID NO: 1248558 - DNA, 25 bp, Homo sapien
atgagcctccagcacgtacagatga

SEQ ID NO: 1248559 - DNA, 25 bp, Homo sapien
cactgcattcatgggttgtagggaa

SEQ ID NO: 1248560 - DNA, 25 bp, Homo sapien
gaaacactggtactgtgaagctacc

SEQ ID NO: 1248561 - DNA, 25 bp, Homo sapien
catagtgttcattgccctgatgcca

SEQ ID NO: 1248562 - DNA, 25 bp, Homo sapien
tgcttgccaagagcgcccatagtgt

SEQ ID NO: 1248563 - DNA, 25 bp, Homo sapien
cattcagtgtgaacatcatggtgtg

SEQ ID NO: 1248564 - DNA, 25 bp, Homo sapien
ggtgtgttcgttcatgtcaaccata

SEQ ID NO: 1248565 - DNA, 25 bp, Homo sapien
tcatcaaggaagagaccatttctcc

SEQ ID NO: 1248566 - DNA, 25 bp, Homo sapien
accttatcaaaactgcagaatgggc

SEQ ID NO: 1248567 - DNA, 25 bp, Homo sapien
ggtcacagacttatcccaaagatgc

SEQ ID NO: 1248568 - DNA, 25 bp, Homo sapien
tcttaagccattcactgcaggactc

SEQ ID NO: 1248569 - DNA, 25 bp, Homo sapien
tgctcagccacatggtaatatccct

SEQ ID NO: 1248570 - DNA, 25 bp, Homo sapien
ggtgaaatatttcaaggtgctgaca

SEQ ID NO: 1248571 - DNA, 25 bp, Homo sapien
tagccctcttgtaagccacagatgg

SEQ ID NO: 1248572 - DNA, 25 bp, Homo sapien
taacggcaaatggttcatagccctc

SEQ ID NO: 1248573 - DNA, 25 bp, Homo sapien
gggaactgtctatggtgccgtctat

SEQ ID NO: 1248574 - DNA, 25 bp, Homo sapien
ctatggtgccgtctattctggtcac

SEQ ID NO: 1248575 - DNA, 25 bp, Homo sapien
acatggggaactgtctatggtgccg

SEQ ID NO: 1248576 - DNA, 25 bp, Homo sapien
actgtctatggtgccgtctattctg

SEQ ID NO: 1248577 - DNA, 25 bp, Homo sapien
ttgtttcagacgagagggcttttcc

SEQ ID NO: 1248578 - DNA, 25 bp, Homo sapien
tcgggcactagatggccatgagctg

SEQ ID NO: 1248579 - DNA, 25 bp, Homo sapien
cactcgatcggcatgctcaggcgat

SEQ ID NO: 1248580 - DNA, 25 bp, Homo sapien
tgtctttgtcaacacgatcgggcac

SEQ ID NO: 1248581 - DNA, 25 bp, Homo sapien
aatggcttgtgctgtaatctggctt

SEQ ID NO: 1248582 - DNA, 25 bp, Homo sapien
tcagcaaggacatcttcggtgagtc

SEQ ID NO: 1248583 - DNA, 25 bp, Homo sapien
cgtggacgtttgcatcaagaaatca

SEQ ID NO: 1248584 - DNA, 25 bp, Homo sapien
catagtcatcccgatcatcagcaag

SEQ ID NO: 1248585 - DNA, 25 bp, Homo sapien
tccaggaaagattctcactgagtaa

SEQ ID NO: 1248586 - DNA, 25 bp, Homo sapien
tgtgtcatactgatggaaatctgat

SEQ ID NO: 1248587 - DNA, 25 bp, Homo sapien
actgtgcgaactctgtccaagtcaa

SEQ ID NO: 1248588 - DNA, 25 bp, Homo sapien
ctcctagagtaactgttactgtgcg

SEQ ID NO: 1248589 - DNA, 25 bp, Homo sapien
cattgacattaatggcttgattata

SEQ ID NO: 1248590 - DNA, 25 bp, Homo sapien
ggaaaaggaatagctaggttcacca

SEQ ID NO: 1248591 - DNA, 25 bp, Homo sapien
tgtcattcttgcaaaaaattgagga

SEQ ID NO: 1248592 - DNA, 25 bp, Homo sapien
taatggcttgattatattcttccta

SEQ ID NO: 1248593 - DNA, 25 bp, Homo sapien
gcaatgaatgtgagcagcccgctgg

SEQ ID NO: 1248594 - DNA, 25 bp, Homo sapien
cattattgttgcgtccttgcccggg

SEQ ID NO: 1248595 - DNA, 25 bp, Homo sapien
cacataccatatagcagttgctgcg

SEQ ID NO: 1248596 - DNA, 25 bp, Homo sapien
caatctccagtccattattgttgcg

SEQ ID NO: 1248597 - DNA, 25 bp, Homo sapien
cccaactcaaactggaaaacattgg

SEQ ID NO: 1248598 - DNA, 25 bp, Homo sapien
gcttgtgcaaaaaccgcaggaaata

SEQ ID NO: 1248599 - DNA, 25 bp, Homo sapien
ggaaaacattgggacttgtagcttg

SEQ ID NO: 1248600 - DNA, 25 bp, Homo sapien
gacttgtagcttgtgcaaaaaccgc

SEQ ID NO: 1248601 - DNA, 25 bp, Homo sapien
ttcatttcagaataaatcaatgcta

SEQ ID NO: 1248602 - DNA, 25 bp, Homo sapien
ctaatatactgaattcatttcagaa

SEQ ID NO: 1248603 - DNA, 25 bp, Homo sapien
tttcagaataaatcaatgctatatc

SEQ ID NO: 1248604 - DNA, 25 bp, Homo sapien
catttcagaataaatcaatgctata

SEQ ID NO: 1248605 - DNA, 25 bp, Homo sapien
tggagtattccatacataccactat

SEQ ID NO: 1248606 - DNA, 25 bp, Homo sapien
ctttcatttatgttactggagtatt

SEQ ID NO: 1248607 - DNA, 25 bp, Homo sapien
gttactggagtattccatacatacc

SEQ ID NO: 1248608 - DNA, 25 bp, Homo sapien
tacataccactattgtaggtggcat

SEQ ID NO: 1248609 - DNA, 25 bp, Homo sapien
tacagttagtaatcaaactaaatgt

SEQ ID NO: 1248610 - DNA, 25 bp, Homo sapien
ttacagttagtaatcaaactaaatg

SEQ ID NO: 1248611 - DNA, 25 bp, Homo sapien
catttggctaccttaagagagtcat

SEQ ID NO: 1248612 - DNA, 25 bp, Homo sapien
gagtcatagttactcccgccgttta

SEQ ID NO: 1248613 - DNA, 25 bp, Homo sapien
aagagagtcatagttactcccgccg

SEQ ID NO: 1248614 - DNA, 25 bp, Homo sapien
tagatgactaggcatttggctacct

SEQ ID NO: 1248615 - DNA, 25 bp, Homo sapien
cgtgccagactagagtcaagctcaa

SEQ ID NO: 1248616 - DNA, 25 bp, Homo sapien
tctttccccgcggattccaccaagc

SEQ ID NO: 1248617 - DNA, 25 bp, Homo sapien
cgttcccttggctgtggtttcgctg

SEQ ID NO: 1248618 - DNA, 25 bp, Homo sapien
ggacagtgggaatctcgttcatcca

SEQ ID NO: 1248619 - DNA, 25 bp, Homo sapien
acctcacggggtcagtgaataaaca

SEQ ID NO: 1248620 - DNA, 25 bp, Homo sapien
ttggggccacctcacggggtcagtg

SEQ ID NO: 1248621 - DNA, 25 bp, Homo sapien
ggccacctcacggggtcagtgaata

SEQ ID NO: 1248622 - DNA, 25 bp, Homo sapien
cacggggtcagtgaataaacaatca

SEQ ID NO: 1248623 - DNA, 25 bp, Homo sapien
tgcggcacggggttcttgtgctcac

SEQ ID NO: 1248624 - DNA, 25 bp, Homo sapien
ctcttgaataatcccgccgagagag

SEQ ID NO: 1248625 - DNA, 25 bp, Homo sapien
tcttgtgctcactcttgaataatcc

SEQ ID NO: 1248626 - DNA, 25 bp, Homo sapien
gctcactcttgaataatcccgccga

SEQ ID NO: 1248627 - DNA, 25 bp, Homo sapien
tgaactgcagaggatccaaacactg

SEQ ID NO: 1248628 - DNA, 25 bp, Homo sapien
tgctccacaggacgtgtgacaggaa

SEQ ID NO: 1248629 - DNA, 25 bp, Homo sapien
cagccttggcgttcacttattcgag

SEQ ID NO: 1248630 - DNA, 25 bp, Homo sapien
gagacacatctaccttcaaaaactg

SEQ ID NO: 1248631 - DNA, 25 bp, Homo sapien
aagtcctcgttgtgaaagatgccca

SEQ ID NO: 1248632 - DNA, 25 bp, Homo sapien
gttcccaagagcacagacggctgag

SEQ ID NO: 1248633 - DNA, 25 bp, Homo sapien
tcagcaggtcatagtagccagcacg

SEQ ID NO: 1248634 - DNA, 25 bp, Homo sapien
aaaactgcatccgtggcctgaggga

SEQ ID NO: 1248635 - DNA, 25 bp, Homo sapien
agagtaaggcttcagtcaacgctga

SEQ ID NO: 1248636 - DNA, 25 bp, Homo sapien
ccagagtaaggcttcagtcaacgct

SEQ ID NO: 1248637 - DNA, 25 bp, Homo sapien
cagagtaaggcttcagtcaacgctg

SEQ ID NO: 1248638 - DNA, 25 bp, Homo sapien
tacaatggcttctatccggtgccgg

SEQ ID NO: 1248639 - DNA, 25 bp, Homo sapien
gttgattgtcttggagcttagccac

SEQ ID NO: 1248640 - DNA, 25 bp, Homo sapien
gcttgcatgacttcgttgtatcgga

SEQ ID NO: 1248641 - DNA, 25 bp, Homo sapien
tgagtgcagctgacatgtttaaggc

SEQ ID NO: 1248642 - DNA, 25 bp, Homo sapien
aatgtgtcatcaaatcttcatggaa

SEQ ID NO: 1248643 - DNA, 25 bp, Homo sapien
ccaatagttggtcacgaatttcttc

SEQ ID NO: 1248644 - DNA, 25 bp, Homo sapien
tgtcatccttaaaattgagaagcat

SEQ ID NO: 1248645 - DNA, 25 bp, Homo sapien
catccttaaaattgagaagcatatt

SEQ ID NO: 1248646 - DNA, 25 bp, Homo sapien
tttctaccagggatagcagacgccc

SEQ ID NO: 1248647 - DNA, 25 bp, Homo sapien
gtttccatccagagacccatcttca

SEQ ID NO: 1248648 - DNA, 25 bp, Homo sapien
gagtcactctcaactggtttttctg

SEQ ID NO: 1248649 - DNA, 25 bp, Homo sapien
gcagacgccctctaattgttaaatc

SEQ ID NO: 1248650 - DNA, 25 bp, Homo sapien
ctgccagtgcactctcatactgctt

SEQ ID NO: 1248651 - DNA, 25 bp, Homo sapien
gccagtgcactctcatactgcttac

SEQ ID NO: 1248652 - DNA, 25 bp, Homo sapien
tctgccagtgcactctcatactgct

SEQ ID NO: 1248653 - DNA, 25 bp, Homo sapien
tgccagtgcactctcatactgctta

SEQ ID NO: 1248654 - DNA, 25 bp, Homo sapien
agacaaatcagttggacatttcaag

SEQ ID NO: 1248655 - DNA, 25 bp, Homo sapien
aagacaaatcagttggacatttcaa

SEQ ID NO: 1248656 - DNA, 25 bp, Homo sapien
gacaaatcagttggacatttcaagt

SEQ ID NO: 1248657 - DNA, 25 bp, Homo sapien
gtctcagaaatcagctgctgcagag

SEQ ID NO: 1248658 - DNA, 25 bp, Homo sapien
tcagaaatcagctgctgcagagtgg

SEQ ID NO: 1248659 - DNA, 25 bp, Homo sapien
ggtctcagaaatcagctgctgcaga

SEQ ID NO: 1248660 - DNA, 25 bp, Homo sapien
tctcagaaatcagctgctgcagagt

SEQ ID NO: 1248661 - DNA, 25 bp, Homo sapien
caatgccgtcatactgccgatggag

SEQ ID NO: 1248662 - DNA, 25 bp, Homo sapien
taatccacgaatcatgagcttctct

SEQ ID NO: 1248663 - DNA, 25 bp, Homo sapien
cagggaccgaatctgaccaagggat

SEQ ID NO: 1248664 - DNA, 25 bp, Homo sapien
catttatcgtgtaggtctttggcag

SEQ ID NO: 1248665 - DNA, 25 bp, Homo sapien
ctccaaggacgttcaccatgacctc

SEQ ID NO: 1248666 - DNA, 25 bp, Homo sapien
agtgccctcatgagattagggtgct

SEQ ID NO: 1248667 - DNA, 25 bp, Homo sapien
ttggactctccacctccaaggacgt

SEQ ID NO: 1248668 - DNA, 25 bp, Homo sapien
ctcatgagattagggtgctggtaaa

SEQ ID NO: 1248669 - DNA, 25 bp, Homo sapien
aataactgagatgatcaaacatagc

SEQ ID NO: 1248670 - DNA, 25 bp, Homo sapien
cttatacgacagaagtaacagagaa

SEQ ID NO: 1248671 - DNA, 25 bp, Homo sapien
cagagaaaacggcaacagttggcca

SEQ ID NO: 1248672 - DNA, 25 bp, Homo sapien
agctttttgattctgcctacttata

SEQ ID NO: 1248673 - DNA, 25 bp, Homo sapien
gaagatgaaatataacctggatcgt

SEQ ID NO: 1248674 - DNA, 25 bp, Homo sapien
aagatgaaatataacctggatcgtg

SEQ ID NO: 1248675 - DNA, 25 bp, Homo sapien
gctgcagccacatccagtggtgttg

SEQ ID NO: 1248676 - DNA, 25 bp, Homo sapien
ttctagatccggctcacgcagagct

SEQ ID NO: 1248677 - DNA, 25 bp, Homo sapien
tggtgttgaacctctcatagctggg

SEQ ID NO: 1248678 - DNA, 25 bp, Homo sapien
cattattatccatcaccgaagctgc

SEQ ID NO: 1248679 - DNA, 25 bp, Homo sapien
tatctctctccttcaactgggttcc

SEQ ID NO: 1248680 - DNA, 25 bp, Homo sapien
cacccaatgtctggatagcccttag

SEQ ID NO: 1248681 - DNA, 25 bp, Homo sapien
tagcccttagacaccagcatctggc

SEQ ID NO: 1248682 - DNA, 25 bp, Homo sapien
taagaaagtcaagatatctctctcc

SEQ ID NO: 1248683 - DNA, 25 bp, Homo sapien
tgagggaccatctcgggaaggatcc

SEQ ID NO: 1248684 - DNA, 25 bp, Homo sapien
tactggatccgctatttggtgaggg

SEQ ID NO: 1248685 - DNA, 25 bp, Homo sapien
tcaaagcaggaccaaaacactcagg

SEQ ID NO: 1248686 - DNA, 25 bp, Homo sapien
tcaggcctccgaatgagcaatctca

SEQ ID NO: 1248687 - DNA, 25 bp, Homo sapien
gtgaggctttgaatgacagcctcat

SEQ ID NO: 1248688 - DNA, 25 bp, Homo sapien
cagtgaggctttgaatgacagcctc

SEQ ID NO: 1248689 - DNA, 25 bp, Homo sapien
gacagtgaggctttgaatgacagcc

SEQ ID NO: 1248690 - DNA, 25 bp, Homo sapien
gaggctttgaatgacagcctcattc

SEQ ID NO: 1248691 - DNA, 25 bp, Homo sapien
gatcgcgttccccatgtggatagtg

SEQ ID NO: 1248692 - DNA, 25 bp, Homo sapien
tccccatgtggatagtgtcatcttc

SEQ ID NO: 1248693 - DNA, 25 bp, Homo sapien
ccatgtggatagtgtcatcttcctc

SEQ ID NO: 1248694 - DNA, 25 bp, Homo sapien
cgcgttccccatgtggatagtgtca

SEQ ID NO: 1248695 - DNA, 25 bp, Homo sapien
atgcatctcaggagcacagcgtccc

SEQ ID NO: 1248696 - DNA, 25 bp, Homo sapien
gcacagcgtcccaagaggtcaatca

SEQ ID NO: 1248697 - DNA, 25 bp, Homo sapien
cgtcccaagaggtcaatcaaagctg

SEQ ID NO: 1248698 - DNA, 25 bp, Homo sapien
atctcaggagcacagcgtcccaaga

SEQ ID NO: 1248699 - DNA, 25 bp, Homo sapien
tctgaaaagcgatgctgataacgcc

SEQ ID NO: 1248700 - DNA, 25 bp, Homo sapien
gcgatgctgataacgcccaccaaat

SEQ ID NO: 1248701 - DNA, 25 bp, Homo sapien
gaatgagggatctcaaaatggacct

SEQ ID NO: 1248702 - DNA, 25 bp, Homo sapien
ccaaatctcccaggggaatgaggga

SEQ ID NO: 1248703 - DNA, 25 bp, Homo sapien
aagagagaagtgaattttggtgtca

SEQ ID NO: 1248704 - DNA, 25 bp, Homo sapien
agagagaagtgaattttggtgtcaa

SEQ ID NO: 1248705 - DNA, 25 bp, Homo sapien
aaagagagaagtgaattttggtgtc

SEQ ID NO: 1248706 - DNA, 25 bp, Homo sapien
gagagaagtgaattttggtgtcaat

SEQ ID NO: 1248707 - DNA, 25 bp, Homo sapien
tcaatcccatagaccctgtcaagga

SEQ ID NO: 1248708 - DNA, 25 bp, Homo sapien
gccttgtgatctgggcaaaaccccg

SEQ ID NO: 1248709 - DNA, 25 bp, Homo sapien
aggaataaaaccatggctgccttgt

SEQ ID NO: 1248710 - DNA, 25 bp, Homo sapien
atctaaagaagcagccgcccggaga

SEQ ID NO: 1248711 - DNA, 25 bp, Homo sapien
agagtagaaggccatttgtgtttgg

SEQ ID NO: 1248712 - DNA, 25 bp, Homo sapien
ccatttgtgtttggcagtagataat

SEQ ID NO: 1248713 - DNA, 25 bp, Homo sapien
aatcagagagtagaaggccatttgt

SEQ ID NO: 1248714 - DNA, 25 bp, Homo sapien
cagagagtagaaggccatttgtgtt

SEQ ID NO: 1248715 - DNA, 25 bp, Homo sapien
cccgctgagctttggtaagtgaaca

SEQ ID NO: 1248716 - DNA, 25 bp, Homo sapien
ttaacaatggcaagacggctgtgca

SEQ ID NO: 1248717 - DNA, 25 bp, Homo sapien
caaaggtaccgattgagggccaagg

SEQ ID NO: 1248718 - DNA, 25 bp, Homo sapien
gggccaaggccatgtctgtagcact

SEQ ID NO: 1248719 - DNA, 25 bp, Homo sapien
gcatctttgcgtgttcatttaataa

SEQ ID NO: 1248720 - DNA, 25 bp, Homo sapien
gaacatcaaatactaatcttctgag

SEQ ID NO: 1248721 - DNA, 25 bp, Homo sapien
tttaagaggcatctttgcgtgttca

SEQ ID NO: 1248722 - DNA, 25 bp, Homo sapien
cttctgagtaagtgctgcatcatag

SEQ ID NO: 1248723 - DNA, 25 bp, Homo sapien
tgggagaaatttcccagcgtcaagc

SEQ ID NO: 1248724 - DNA, 25 bp, Homo sapien
ttcccagcgtcaagcatgatgtatc

SEQ ID NO: 1248725 - DNA, 25 bp, Homo sapien
aaatttcccagcgtcaagcatgatg

SEQ ID NO: 1248726 - DNA, 25 bp, Homo sapien
gcgtcaagcatgatgtatctaagaa

SEQ ID NO: 1248727 - DNA, 25 bp, Homo sapien
caggcaggcagtaatatttccagca

SEQ ID NO: 1248728 - DNA, 25 bp, Homo sapien
caggcagtaatatttccagcatctt

SEQ ID NO: 1248729 - DNA, 25 bp, Homo sapien
aaaatgccccagaacaactttcttg

SEQ ID NO: 1248730 - DNA, 25 bp, Homo sapien
ctttcttgataaatgaagttcttct

SEQ ID NO: 1248731 - DNA, 25 bp, Homo sapien
ctggaggcaaagctcccgcaactgc

SEQ ID NO: 1248732 - DNA, 25 bp, Homo sapien
ccgcaactgcactcaggcaaggcag

SEQ ID NO: 1248733 - DNA, 25 bp, Homo sapien
taatttgactccatgtagtctggag

SEQ ID NO: 1248734 - DNA, 25 bp, Homo sapien
ctcaggcaaggcagtgccagtttga

SEQ ID NO: 1248735 - DNA, 25 bp, Homo sapien
gaggtatcaacaggttgtgggttaa

SEQ ID NO: 1248736 - DNA, 25 bp, Homo sapien
tttgaggtatcaacaggttgtgggt

SEQ ID NO: 1248737 - DNA, 25 bp, Homo sapien
ttgaggtatcaacaggttgtgggtt

SEQ ID NO: 1248738 - DNA, 25 bp, Homo sapien
tgaggtatcaacaggttgtgggtta

SEQ ID NO: 1248739 - DNA, 25 bp, Homo sapien
gcatatttgttaatgaagtattcca

SEQ ID NO: 1248740 - DNA, 25 bp, Homo sapien
gagtgttctgcatatttgttaatga

SEQ ID NO: 1248741 - DNA, 25 bp, Homo sapien
gtattccaatttctcaggaattgta

SEQ ID NO: 1248742 - DNA, 25 bp, Homo sapien
ttgaccatttgtcatgggagtgttc

SEQ ID NO: 1248743 - DNA, 25 bp, Homo sapien
tcagacaatagcttatatggcttca

SEQ ID NO: 1248744 - DNA, 25 bp, Homo sapien
gcttatatggcttcattaatggctg

SEQ ID NO: 1248745 - DNA, 25 bp, Homo sapien
gacaatagcttatatggcttcatta

SEQ ID NO: 1248746 - DNA, 25 bp, Homo sapien
taatggctgaaccttagaagagtct

SEQ ID NO: 1248747 - DNA, 25 bp, Homo sapien
tccggttgtaaagggccatgctgtc

SEQ ID NO: 1248748 - DNA, 25 bp, Homo sapien
gagtccggttgtaaagggccatgct

SEQ ID NO: 1248749 - DNA, 25 bp, Homo sapien
acgagtccggttgtaaagggccatg

SEQ ID NO: 1248750 - DNA, 25 bp, Homo sapien
ccatgctgtctccctcccgagttct

SEQ ID NO: 1248751 - DNA, 25 bp, Homo sapien
tgtttgtcgaactcccttgacatgg

SEQ ID NO: 1248752 - DNA, 25 bp, Homo sapien
accttgagcaccgaagacctatggg

SEQ ID NO: 1248753 - DNA, 25 bp, Homo sapien
gacctatgggtagagccttgcttgt

SEQ ID NO: 1248754 - DNA, 25 bp, Homo sapien
cgcccttgtgccttctaaatctgga

SEQ ID NO: 1248755 - DNA, 25 bp, Homo sapien
ggtggtatttggtgtcctccctgaa

SEQ ID NO: 1248756 - DNA, 25 bp, Homo sapien
gtggtatttggtgtcctccctgaac

SEQ ID NO: 1248757 - DNA, 25 bp, Homo sapien
ctcgtgactaaatgttaacgggtgg

SEQ ID NO: 1248758 - DNA, 25 bp, Homo sapien
cgggtggtatttggtgtcctccctg

SEQ ID NO: 1248759 - DNA, 25 bp, Homo sapien
gctcatgtcaatggcccggggactg

SEQ ID NO: 1248760 - DNA, 25 bp, Homo sapien
atgcaggtctctagatagtgtaaca

SEQ ID NO: 1248761 - DNA, 25 bp, Homo sapien
tctctagatagtgtaacattgctca

SEQ ID NO: 1248762 - DNA, 25 bp, Homo sapien
caggtctctagatagtgtaacattg

SEQ ID NO: 1248763 - DNA, 25 bp, Homo sapien
ttgcccatatattatggtagttttc

SEQ ID NO: 1248764 - DNA, 25 bp, Homo sapien
ttttctttgcccatatattatggta

SEQ ID NO: 1248765 - DNA, 25 bp, Homo sapien
tttgcccatatattatggtagtttt

SEQ ID NO: 1248766 - DNA, 25 bp, Homo sapien
ttctttgcccatatattatggtagt

SEQ ID NO: 1248767 - DNA, 25 bp, Homo sapien
caggtgactgaactagcactgtgcc

SEQ ID NO: 1248768 - DNA, 25 bp, Homo sapien
gaagggatctgaaagcctgccaggt

SEQ ID NO: 1248769 - DNA, 25 bp, Homo sapien
tattaccaaacataccagcacggac

SEQ ID NO: 1248770 - DNA, 25 bp, Homo sapien
cattgaactagatggcgaagggatc

SEQ ID NO: 1248771 - DNA, 25 bp, Homo sapien
acaagaacacagcatagtaatttga

SEQ ID NO: 1248772 - DNA, 25 bp, Homo sapien
caagaacacagcatagtaatttgaa

SEQ ID NO: 1248773 - DNA, 25 bp, Homo sapien
ggacaagaacacagcatagtaattt

SEQ ID NO: 1248774 - DNA, 25 bp, Homo sapien
gacaagaacacagcatagtaatttg

SEQ ID NO: 1248775 - DNA, 25 bp, Homo sapien
tcagtgtatcatagggcaccagcag

SEQ ID NO: 1248776 - DNA, 25 bp, Homo sapien
agcatatccattgatctgcaagaac

SEQ ID NO: 1248777 - DNA, 25 bp, Homo sapien
tttggctgtcagtgtatcatagggc

SEQ ID NO: 1248778 - DNA, 25 bp, Homo sapien
tttctctttggctgtcagtgtatca

SEQ ID NO: 1248779 - DNA, 25 bp, Homo sapien
caaactccaggatatactgatgggc

SEQ ID NO: 1248780 - DNA, 25 bp, Homo sapien
aatagaaggcgtgtccagttccagg

SEQ ID NO: 1248781 - DNA, 25 bp, Homo sapien
tataggcaaatcgtttctcaataga

SEQ ID NO: 1248782 - DNA, 25 bp, Homo sapien
catccacatagcgaatgagttgttg

SEQ ID NO: 1248783 - DNA, 25 bp, Homo sapien
caaagaacttgatttcttgttcata

SEQ ID NO: 1248784 - DNA, 25 bp, Homo sapien
aaagaacttgatttcttgttcataa

SEQ ID NO: 1248785 - DNA, 25 bp, Homo sapien
gcaaagaacttgatttcttgttcat

SEQ ID NO: 1248786 - DNA, 25 bp, Homo sapien
tgcaaagaacttgatttcttgttca

SEQ ID NO: 1248787 - DNA, 25 bp, Homo sapien
cagataagaagtataaacgatggtt

SEQ ID NO: 1248788 - DNA, 25 bp, Homo sapien
actgatcaattaaaggaagaacgac

SEQ ID NO: 1248789 - DNA, 25 bp, Homo sapien
tctgcttgctgcagataagaagtat

SEQ ID NO: 1248790 - DNA, 25 bp, Homo sapien
tctctttgttggaagcatgtcctcc

SEQ ID NO: 1248791 - DNA, 25 bp, Homo sapien
atagtgaaatcctatgcctgacaag

SEQ ID NO: 1248792 - DNA, 25 bp, Homo sapien
atgaagacagttgacaattgatgtt

SEQ ID NO: 1248793 - DNA, 25 bp, Homo sapien
ttgacaattgatgttgcatcattgc

SEQ ID NO: 1248794 - DNA, 25 bp, Homo sapien
gaagacagttgacaattgatgttgc

SEQ ID NO: 1248795 - DNA, 25 bp, Homo sapien
acagttgacaattgatgttgcatca

SEQ ID NO: 1248796 - DNA, 25 bp, Homo sapien
ttaatgccactatttgtagtaggaa

SEQ ID NO: 1248797 - DNA, 25 bp, Homo sapien
cttaatgccactatttgtagtagga

SEQ ID NO: 1248798 - DNA, 25 bp, Homo sapien
tgtgagtgaactggccctgcttgag

SEQ ID NO: 1248799 - DNA, 25 bp, Homo sapien
tcttctccgaactgatgctggccaa

SEQ ID NO: 1248800 - DNA, 25 bp, Homo sapien
gataatctgagtaacccctttgggc

SEQ ID NO: 1248801 - DNA, 25 bp, Homo sapien
tgcagcgttgtccagaaaagctctg

SEQ ID NO: 1248802 - DNA, 25 bp, Homo sapien
taaatactcttgctggttcccaaag

SEQ ID NO: 1248803 - DNA, 25 bp, Homo sapien
aagctagtcagaattctataacaag

SEQ ID NO: 1248804 - DNA, 25 bp, Homo sapien
tggttcccaaagcatataagctagt

SEQ ID NO: 1248805 - DNA, 25 bp, Homo sapien
taacaagacacctggacatcttcca

SEQ ID NO: 1248806 - DNA, 25 bp, Homo sapien
aggcagctagacattctcctaatgc

SEQ ID NO: 1248807 - DNA, 25 bp, Homo sapien
ttatgtttgtccagatgagtttcca

SEQ ID NO: 1248808 - DNA, 25 bp, Homo sapien
cttggtattgtagatggagtaaata

SEQ ID NO: 1248809 - DNA, 25 bp, Homo sapien
gtagatggagtaaatattatgtttg

SEQ ID NO: 1248810 - DNA, 25 bp, Homo sapien
ctttctcgtgaagacttggtattgt

SEQ ID NO: 1248811 - DNA, 25 bp, Homo sapien
catttgagtgtagcgaatgccggac

SEQ ID NO: 1248812 - DNA, 25 bp, Homo sapien
caaagacggtatgtttggacaaaca

SEQ ID NO: 1248813 - DNA, 25 bp, Homo sapien
gccggactcggctaattccacgatt

SEQ ID NO: 1248814 - DNA, 25 bp, Homo sapien
caacgagacatgtagctgcaaagca

SEQ ID NO: 1248815 - DNA, 25 bp, Homo sapien
tccacaaatctaatcaagagagggt

SEQ ID NO: 1248816 - DNA, 25 bp, Homo sapien
ttgagtttctccattaacggcaaga

SEQ ID NO: 1248817 - DNA, 25 bp, Homo sapien
tcagacaccaccgtagctgcctttt

SEQ ID NO: 1248818 - DNA, 25 bp, Homo sapien
agtgtggtgaactcatctaggatga

SEQ ID NO: 1248819 - DNA, 25 bp, Homo sapien
ctgggttaggctcctttagccactt

SEQ ID NO: 1248820 - DNA, 25 bp, Homo sapien
atgggacttcgaccagtagataaac

SEQ ID NO: 1248821 - DNA, 25 bp, Homo sapien
gaccagtagataaacacttcagcca

SEQ ID NO: 1248822 - DNA, 25 bp, Homo sapien
aaacacttcagccaccatgcggaag

SEQ ID NO: 1248823 - DNA, 25 bp, Homo sapien
tgtacaacgaagttctgctcttctc

SEQ ID NO: 1248824 - DNA, 25 bp, Homo sapien
gatttcattctgtacaacgaagttc

SEQ ID NO: 1248825 - DNA, 25 bp, Homo sapien
tgacttggtatcagtaataaggaaa

SEQ ID NO: 1248826 - DNA, 25 bp, Homo sapien
tctttgacttggtatcagtaataag

SEQ ID NO: 1248827 - DNA, 25 bp, Homo sapien
aacccaatgggcagtaaccgcttca

SEQ ID NO: 1248828 - DNA, 25 bp, Homo sapien
gctgctacaatcagagaggtctgca

SEQ ID NO: 1248829 - DNA, 25 bp, Homo sapien
gctaaatcgatttttggccagagca

SEQ ID NO: 1248830 - DNA, 25 bp, Homo sapien
gaggtctgcatggaataccgatctc

SEQ ID NO: 1248831 - DNA, 25 bp, Homo sapien
ccttgtaaatgaatattgctgcgga

SEQ ID NO: 1248832 - DNA, 25 bp, Homo sapien
tctcgtacttcatcctcggtatctt

SEQ ID NO: 1248833 - DNA, 25 bp, Homo sapien
tattgctgcggattatatctcgtac

SEQ ID NO: 1248834 - DNA, 25 bp, Homo sapien
gattatatctcgtacttcatcctcg

SEQ ID NO: 1248835 - DNA, 25 bp, Homo sapien
tcatcagtcctgtttggtaagtctt

SEQ ID NO: 1248836 - DNA, 25 bp, Homo sapien
aagtctttgtaaagagccatttgcc

SEQ ID NO: 1248837 - DNA, 25 bp, Homo sapien
tcttctctggatctgaggtatcatc

SEQ ID NO: 1248838 - DNA, 25 bp, Homo sapien
gccatctaatagcaggatcctccaa

SEQ ID NO: 1248839 - DNA, 25 bp, Homo sapien
gatcaataaacacgtggtgacaatt

SEQ ID NO: 1248840 - DNA, 25 bp, Homo sapien
ggtgacaattatccacttcaatcat

SEQ ID NO: 1248841 - DNA, 25 bp, Homo sapien
ttagaaattttcacgaggcaacttg

SEQ ID NO: 1248842 - DNA, 25 bp, Homo sapien
aatgtttggactgcggtggtttaga

SEQ ID NO: 1248843 - DNA, 25 bp, Homo sapien
taatgtctccgacccacacgtttag

SEQ ID NO: 1248844 - DNA, 25 bp, Homo sapien
tgtctccgacccacacgtttagact

SEQ ID NO: 1248845 - DNA, 25 bp, Homo sapien
acagtaatgtctccgacccacacgt

SEQ ID NO: 1248846 - DNA, 25 bp, Homo sapien
cagacagtaatgtctccgacccaca

SEQ ID NO: 1248847 - DNA, 25 bp, Homo sapien
gaagacaacgctttgtgaacacagt

SEQ ID NO: 1248848 - DNA, 25 bp, Homo sapien
taatagtgtttggaactctaagaga

SEQ ID NO: 1248849 - DNA, 25 bp, Homo sapien
attagtaatctctaggccattgagc

SEQ ID NO: 1248850 - DNA, 25 bp, Homo sapien
gaacacagtattaggagtgagtaaa

SEQ ID NO: 1248851 - DNA, 25 bp, Homo sapien
tcctctgcttggacagtagtttatg

SEQ ID NO: 1248852 - DNA, 25 bp, Homo sapien
ggccatccggaagcaggctacaaca

SEQ ID NO: 1248853 - DNA, 25 bp, Homo sapien
cagattatataagggggccatccgg

SEQ ID NO: 1248854 - DNA, 25 bp, Homo sapien
tggacagtagtttatgccatacagc

SEQ ID NO: 1248855 - DNA, 25 bp, Homo sapien
ctgaagaaagagattgacagcccga

SEQ ID NO: 1248856 - DNA, 25 bp, Homo sapien
aagaaagagattgacagcccgatgc

SEQ ID NO: 1248857 - DNA, 25 bp, Homo sapien
tgaagaaagagattgacagcccgat

SEQ ID NO: 1248858 - DNA, 25 bp, Homo sapien
gaagaaagagattgacagcccgatg

SEQ ID NO: 1248859 - DNA, 25 bp, Homo sapien
tgctaaatcttctatcagtttatct

SEQ ID NO: 1248860 - DNA, 25 bp, Homo sapien
atcagtttatcttcaaagtaatgtt

SEQ ID NO: 1248861 - DNA, 25 bp, Homo sapien
cttctgtttcaatccaagacttttc

SEQ ID NO: 1248862 - DNA, 25 bp, Homo sapien
ttcaaagtaatgttcttctgtttca

SEQ ID NO: 1248863 - DNA, 25 bp, Homo sapien
cagaaggatcagctgatgtagagga

SEQ ID NO: 1248864 - DNA, 25 bp, Homo sapien
tgtccgactaaacagaaggatcagc

SEQ ID NO: 1248865 - DNA, 25 bp, Homo sapien
catttctctgttaaagctgtccgac

SEQ ID NO: 1248866 - DNA, 25 bp, Homo sapien
tagaggatcaactctcttagtgcct

SEQ ID NO: 1248867 - DNA, 25 bp, Homo sapien
tgcataggccatatataaaaaatct

SEQ ID NO: 1248868 - DNA, 25 bp, Homo sapien
taatatctgcataggccatatataa

SEQ ID NO: 1248869 - DNA, 25 bp, Homo sapien
ctttgccataatatctgcataggcc

SEQ ID NO: 1248870 - DNA, 25 bp, Homo sapien
gccatatataaaaaatcttcctcca

SEQ ID NO: 1248871 - DNA, 25 bp, Homo sapien
cagcttcaaatagtccaagagggat

SEQ ID NO: 1248872 - DNA, 25 bp, Homo sapien
gggtgaagcagcttcaaatagtcca

SEQ ID NO: 1248873 - DNA, 25 bp, Homo sapien
ccaccgttggggtgaagcagcttca

SEQ ID NO: 1248874 - DNA, 25 bp, Homo sapien
gaagcagcttcaaatagtccaagag

SEQ ID NO: 1248875 - DNA, 25 bp, Homo sapien
ttcctcttcaccatcgtcatcttcc

SEQ ID NO: 1248876 - DNA, 25 bp, Homo sapien
cgtcatcttcctcatcatgacaact

SEQ ID NO: 1248877 - DNA, 25 bp, Homo sapien
ttcaaaactcttcacttcctcttca

SEQ ID NO: 1248878 - DNA, 25 bp, Homo sapien
atcgtcatcttcctcatcatgacaa

SEQ ID NO: 1248879 - DNA, 25 bp, Homo sapien
tgtaatcaggttaaatcaggcacgt

SEQ ID NO: 1248880 - DNA, 25 bp, Homo sapien
gaagaaaagagctggcaaatcattc

SEQ ID NO: 1248881 - DNA, 25 bp, Homo sapien
taaccaggtatagggatagaattca

SEQ ID NO: 1248882 - DNA, 25 bp, Homo sapien
gaattattgaaactgacaagtagcc

SEQ ID NO: 1248883 - DNA, 25 bp, Homo sapien
tgataaaaacttgcatgctttcatc

SEQ ID NO: 1248884 - DNA, 25 bp, Homo sapien
gagaaactgcgaaattgcccttaaa

SEQ ID NO: 1248885 - DNA, 25 bp, Homo sapien
ttgtgttgtttatgttcaccacact

SEQ ID NO: 1248886 - DNA, 25 bp, Homo sapien
tgcctggatagcaaaccacacaact

SEQ ID NO: 1248887 - DNA, 25 bp, Homo sapien
ggcactgattgtctgtagcaccatc

SEQ ID NO: 1248888 - DNA, 25 bp, Homo sapien
tggtatagaagcttttgcttttcca

SEQ ID NO: 1248889 - DNA, 25 bp, Homo sapien
ggcttgctggtatagaagcttttgc

SEQ ID NO: 1248890 - DNA, 25 bp, Homo sapien
tcagccgcgccacgatcgtggagtc

SEQ ID NO: 1248891 - DNA, 25 bp, Homo sapien
agtagctgctaccattggtccagtt

SEQ ID NO: 1248892 - DNA, 25 bp, Homo sapien
gtagctgctaccattggtccagttt

SEQ ID NO: 1248893 - DNA, 25 bp, Homo sapien
gagtagctgctaccattggtccagt

SEQ ID NO: 1248894 - DNA, 25 bp, Homo sapien
tagttgccttacacatcaccacaag

SEQ ID NO: 1248895 - DNA, 25 bp, Homo sapien
cgcaaacttggaataagagggttag

SEQ ID NO: 1248896 - DNA, 25 bp, Homo sapien
gattcagatactctagtgcaagtta

SEQ ID NO: 1248897 - DNA, 25 bp, Homo sapien
ctcgaagcaagatagttacgcaaac

SEQ ID NO: 1248898 - DNA, 25 bp, Homo sapien
gactgcatcaggccggccaggctct

SEQ ID NO: 1248899 - DNA, 25 bp, Homo sapien
atgactgcatcaggccggccaggct

SEQ ID NO: 1248900 - DNA, 25 bp, Homo sapien
catgactgcatcaggccggccaggc

SEQ ID NO: 1248901 - DNA, 25 bp, Homo sapien
tgactgcatcaggccggccaggctc

SEQ ID NO: 1248902 - DNA, 25 bp, Homo sapien
gctctgggattatagtactatggga

SEQ ID NO: 1248903 - DNA, 25 bp, Homo sapien
tattaattatgatattaccaacccc

SEQ ID NO: 1248904 - DNA, 25 bp, Homo sapien
tgcaattatcgtcagagtaagaaac

SEQ ID NO: 1248905 - DNA, 25 bp, Homo sapien
tgccgattatcccactttaaagtgt

SEQ ID NO: 1248906 - DNA, 25 bp, Homo sapien
agctttgttttgtcgctcaaatgca

SEQ ID NO: 1248907 - DNA, 25 bp, Homo sapien
gctttgttttgtcgctcaaatgcat

SEQ ID NO: 1248908 - DNA, 25 bp, Homo sapien
caagaccttcagctttgttttgtcg

SEQ ID NO: 1248909 - DNA, 25 bp, Homo sapien
accttcagctttgttttgtcgctca

SEQ ID NO: 1248910 - DNA, 25 bp, Homo sapien
ctacaattggtgaattaggataaat

SEQ ID NO: 1248911 - DNA, 25 bp, Homo sapien
tagactccaaaagactaacattctc

SEQ ID NO: 1248912 - DNA, 25 bp, Homo sapien
ctttatcaggtcctgtcatgtcaat

SEQ ID NO: 1248913 - DNA, 25 bp, Homo sapien
ggtgaattaggataaatagactcca

SEQ ID NO: 1248914 - DNA, 25 bp, Homo sapien
tccagagggatcaaacattaccagc

SEQ ID NO: 1248915 - DNA, 25 bp, Homo sapien
aaatccagagggatcaaacattacc

SEQ ID NO: 1248916 - DNA, 25 bp, Homo sapien
aatccagagggatcaaacattacca

SEQ ID NO: 1248917 - DNA, 25 bp, Homo sapien
atccagagggatcaaacattaccag

SEQ ID NO: 1248918 - DNA, 25 bp, Homo sapien
gaactcatcgtcctgcagaaccttt

SEQ ID NO: 1248919 - DNA, 25 bp, Homo sapien
gaatcggaagaggtcacaggtgaac

SEQ ID NO: 1248920 - DNA, 25 bp, Homo sapien
acagagtagttgcaggaatcggaag

SEQ ID NO: 1248921 - DNA, 25 bp, Homo sapien
gaggtcacaggtgaactcatcgtcc

SEQ ID NO: 1248922 - DNA, 25 bp, Homo sapien
ctgaactctcagtaggtagtctaca

SEQ ID NO: 1248923 - DNA, 25 bp, Homo sapien
gtattattgccagtctgagttctca

SEQ ID NO: 1248924 - DNA, 25 bp, Homo sapien
cagttgtattattgccagtctgagt

SEQ ID NO: 1248925 - DNA, 25 bp, Homo sapien
cagtggagataattatgttgacagt

SEQ ID NO: 1248926 - DNA, 25 bp, Homo sapien
catctttcccagagtaataccaata

SEQ ID NO: 1248927 - DNA, 25 bp, Homo sapien
tctgtaagagtgttaaagacttgtt

SEQ ID NO: 1248928 - DNA, 25 bp, Homo sapien
ttttgccacttggatagctttggag

SEQ ID NO: 1248929 - DNA, 25 bp, Homo sapien
ctttggagaaattccgttgtccttg

SEQ ID NO: 1248930 - DNA, 25 bp, Homo sapien
aacacatgaagaaagccgaccacag

SEQ ID NO: 1248931 - DNA, 25 bp, Homo sapien
tgctgtgtgccaaactctgttgatt

SEQ ID NO: 1248932 - DNA, 25 bp, Homo sapien
cttcatctgcatatgggcaaacaca

SEQ ID NO: 1248933 - DNA, 25 bp, Homo sapien
aactctgttgattcccagtgcaagg

SEQ ID NO: 1248934 - DNA, 25 bp, Homo sapien
tcttttaatagctcaatttgactgg

SEQ ID NO: 1248935 - DNA, 25 bp, Homo sapien
tctaacatggacagcaacatgacca

SEQ ID NO: 1248936 - DNA, 25 bp, Homo sapien
acatgaccaccatatccttctgcag

SEQ ID NO: 1248937 - DNA, 25 bp, Homo sapien
tatccttctgcagatccattaattc

SEQ ID NO: 1248938 - DNA, 25 bp, Homo sapien
gtttgccaatcgttccattaacaac

SEQ ID NO: 1248939 - DNA, 25 bp, Homo sapien
ctgtttgccaatcgttccattaaca

SEQ ID NO: 1248940 - DNA, 25 bp, Homo sapien
ttgccaatcgttccattaacaacat

SEQ ID NO: 1248941 - DNA, 25 bp, Homo sapien
gccaatcgttccattaacaacatta

SEQ ID NO: 1248942 - DNA, 25 bp, Homo sapien
tagaccctctcgatgcgtttggcgc

SEQ ID NO: 1248943 - DNA, 25 bp, Homo sapien
ccaaagatgtccgaaagaaggtcac

SEQ ID NO: 1248944 - DNA, 25 bp, Homo sapien
gaaaaagcctctgaaaacgctggcc

SEQ ID NO: 1248945 - DNA, 25 bp, Homo sapien
tttaagtcggtcagatcctcggagg

SEQ ID NO: 1248946 - DNA, 25 bp, Homo sapien
ccttttcttcttcttttgccttctg

SEQ ID NO: 1248947 - DNA, 25 bp, Homo sapien
tcggctttttcaggttcagatttgg

SEQ ID NO: 1248948 - DNA, 25 bp, Homo sapien
ttcaggttcagatttggtttcttct

SEQ ID NO: 1248949 - DNA, 25 bp, Homo sapien
tttcttcttcttttgccttctgttc

SEQ ID NO: 1248950 - DNA, 25 bp, Homo sapien
ttttccggtgaatgataatattctg

SEQ ID NO: 1248951 - DNA, 25 bp, Homo sapien
ttttctgttgatcacagtcccctgg

SEQ ID NO: 1248952 - DNA, 25 bp, Homo sapien
tttcttttccggtgaatgataatat

SEQ ID NO: 1248953 - DNA, 25 bp, Homo sapien
actaatttcttttccggtgaatgat

SEQ ID NO: 1248954 - DNA, 25 bp, Homo sapien
gcacttctggttctccgtatctgtg

SEQ ID NO: 1248955 - DNA, 25 bp, Homo sapien
acttctggttctccgtatctgtgtg

SEQ ID NO: 1248956 - DNA, 25 bp, Homo sapien
tctggcacttctggttctccgtatc

SEQ ID NO: 1248957 - DNA, 25 bp, Homo sapien
tggcacttctggttctccgtatctg

SEQ ID NO: 1248958 - DNA, 25 bp, Homo sapien
agatgaaattgatagcaaatgcgac

SEQ ID NO: 1248959 - DNA, 25 bp, Homo sapien
atgttgtaaaagttgcgagcaaaat

SEQ ID NO: 1248960 - DNA, 25 bp, Homo sapien
gcaaatgcgacaaataaggctaaca

SEQ ID NO: 1248961 - DNA, 25 bp, Homo sapien
tgtaaaagttgcgagcaaaatagtt

SEQ ID NO: 1248962 - DNA, 25 bp, Homo sapien
ctgattcaaagcatttaaagtagag

SEQ ID NO: 1248963 - DNA, 25 bp, Homo sapien
gattcaaagcatttaaagtagagtc

SEQ ID NO: 1248964 - DNA, 25 bp, Homo sapien
ttcaaagcatttaaagtagagtcag

SEQ ID NO: 1248965 - DNA, 25 bp, Homo sapien
tttaaagtagagtcagtttgctgca

SEQ ID NO: 1248966 - DNA, 25 bp, Homo sapien
cgatgattctatgggagctgctgtc

SEQ ID NO: 1248967 - DNA, 25 bp, Homo sapien
gaaatgaccgtgtgcagaatagcta

SEQ ID NO: 1248968 - DNA, 25 bp, Homo sapien
gcaacgtgggctccatgtagccgct

SEQ ID NO: 1248969 - DNA, 25 bp, Homo sapien
gaatagctaagatacgcaacgtggg

SEQ ID NO: 1248970 - DNA, 25 bp, Homo sapien
tgttctgtaatataaagcccatcaa

SEQ ID NO: 1248971 - DNA, 25 bp, Homo sapien
caaattccaatttccgtgccacttc

SEQ ID NO: 1248972 - DNA, 25 bp, Homo sapien
tgtgtgttgattacgagtctatccc

SEQ ID NO: 1248973 - DNA, 25 bp, Homo sapien
cccactggcctttaatatcatcttc

SEQ ID NO: 1248974 - DNA, 25 bp, Homo sapien
ttgtcccagtagttgttgggaaatg

SEQ ID NO: 1248975 - DNA, 25 bp, Homo sapien
gtcccagtagttgttgggaaatgac

SEQ ID NO: 1248976 - DNA, 25 bp, Homo sapien
tgtcccagtagttgttgggaaatga

SEQ ID NO: 1248977 - DNA, 25 bp, Homo sapien
ctgataaggagctgtctttctttgg

SEQ ID NO: 1248978 - DNA, 25 bp, Homo sapien
caagtaattcactgattctgtctcg

SEQ ID NO: 1248979 - DNA, 25 bp, Homo sapien
tcggccgtagaactctccatattta

SEQ ID NO: 1248980 - DNA, 25 bp, Homo sapien
gctgccttgtccatgccaagtaatt

SEQ ID NO: 1248981 - DNA, 25 bp, Homo sapien
gtaggtggcagccatgctgtttgtt

SEQ ID NO: 1248982 - DNA, 25 bp, Homo sapien
cgtaggtggcagccatgctgtttgt

SEQ ID NO: 1248983 - DNA, 25 bp, Homo sapien
ccgtaggtggcagccatgctgtttg

SEQ ID NO: 1248984 - DNA, 25 bp, Homo sapien
catctgatacttcacatcaatggag

SEQ ID NO: 1248985 - DNA, 25 bp, Homo sapien
gatacttcacatcaatggagttcag

SEQ ID NO: 1248986 - DNA, 25 bp, Homo sapien
gttgtcagtgaaaacgactcctagt

SEQ ID NO: 1248987 - DNA, 25 bp, Homo sapien
aaacgactcctagtttccacatctg

SEQ ID NO: 1248988 - DNA, 25 bp, Homo sapien
taatgaacgtactcacaaatctgca

SEQ ID NO: 1248989 - DNA, 25 bp, Homo sapien
gcagaactcccacagtcttatctaa

SEQ ID NO: 1248990 - DNA, 25 bp, Homo sapien
gtgggtctctctccagatctggtct

SEQ ID NO: 1248991 - DNA, 25 bp, Homo sapien
ataaaactgaagtatgccattgtcc

SEQ ID NO: 1248992 - DNA, 25 bp, Homo sapien
gaatgttttgctagtggagtcagaa

SEQ ID NO: 1248993 - DNA, 25 bp, Homo sapien
gggctgagctagtaaagggatttca

SEQ ID NO: 1248994 - DNA, 25 bp, Homo sapien
aagatatcttaatctttcacagaga

SEQ ID NO: 1248995 - DNA, 25 bp, Homo sapien
gactacagtctctgctccataagga

SEQ ID NO: 1248996 - DNA, 25 bp, Homo sapien
ccattgtgagttactgaggacaaga

SEQ ID NO: 1248997 - DNA, 25 bp, Homo sapien
ttgttatagtgtccaagaacagaca

SEQ ID NO: 1248998 - DNA, 25 bp, Homo sapien
caatgtcgagaaggtgagcggcaaa

SEQ ID NO: 1248999 - DNA, 25 bp, Homo sapien
agaacagacatagtcatataccagg

SEQ ID NO: 1249000 - DNA, 25 bp, Homo sapien
tcggaaaaaattgaatgccaccaca

SEQ ID NO: 1249001 - DNA, 25 bp, Homo sapien
ctaataagccaacggttaatacgag

SEQ ID NO: 1249002 - DNA, 25 bp, Homo sapien
gcatatcgtcacatttcatatctgg

SEQ ID NO: 1249003 - DNA, 25 bp, Homo sapien
tgccaccacagtgtataggtataca

SEQ ID NO: 1249004 - DNA, 25 bp, Homo sapien
catagttcagaacatcaacaggccg

SEQ ID NO: 1249005 - DNA, 25 bp, Homo sapien
gaaggcagttgtcttcctaagcaaa

SEQ ID NO: 1249006 - DNA, 25 bp, Homo sapien
caacaggccgtatttcctcaccgga

SEQ ID NO: 1249007 - DNA, 25 bp, Homo sapien
taggcaaaatcaaccaggtgaaggc

SEQ ID NO: 1249008 - DNA, 25 bp, Homo sapien
tttggatagtatacctggttctgga

SEQ ID NO: 1249009 - DNA, 25 bp, Homo sapien
tacctggttctggactggtactcct

SEQ ID NO: 1249010 - DNA, 25 bp, Homo sapien
gtgtttgcaactctcctccggggat

SEQ ID NO: 1249011 - DNA, 25 bp, Homo sapien
tggggactcagtttggatagtatac

SEQ ID NO: 1249012 - DNA, 25 bp, Homo sapien
ctcctccaagtgaactattcctgat

SEQ ID NO: 1249013 - DNA, 25 bp, Homo sapien
tccagatctttgctcgtacattctc

SEQ ID NO: 1249014 - DNA, 25 bp, Homo sapien
caagtgaactattcctgattccaga

SEQ ID NO: 1249015 - DNA, 25 bp, Homo sapien
gctcgtacattctccttctcttgca

SEQ ID NO: 1249016 - DNA, 25 bp, Homo sapien
gcacgaactccaacatacatgtgga

SEQ ID NO: 1249017 - DNA, 25 bp, Homo sapien
gatgattcgatagatctcatattca

SEQ ID NO: 1249018 - DNA, 25 bp, Homo sapien
tcctgctgggtcttcgatttcatcc

SEQ ID NO: 1249019 - DNA, 25 bp, Homo sapien
gggtcttcgatttcatccccgatcc

SEQ ID NO: 1249020 - DNA, 25 bp, Homo sapien
cttgtattatggccaagagaatgac

SEQ ID NO: 1249021 - DNA, 25 bp, Homo sapien
cagggttccataccgctttatattt

SEQ ID NO: 1249022 - DNA, 25 bp, Homo sapien
cccggtagattgcatgatgaagaaa

SEQ ID NO: 1249023 - DNA, 25 bp, Homo sapien
tcccccggtagattgcatgatgaag

SEQ ID NO: 1249024 - DNA, 25 bp, Homo sapien
atatttcccccggtagattgcatga

SEQ ID NO: 1249025 - DNA, 25 bp, Homo sapien
tcttagttctccaaaagcatcaata

SEQ ID NO: 1249026 - DNA, 25 bp, Homo sapien
tctttgacttgttcctgttggtctc

SEQ ID NO: 1249027 - DNA, 25 bp, Homo sapien
tgttggtctcttagttctccaaaag

SEQ ID NO: 1249028 - DNA, 25 bp, Homo sapien
ccatgtcttctttgacttgttcctg

SEQ ID NO: 1249029 - DNA, 25 bp, Homo sapien
tcagtcaccaagtccctcgctgagg

SEQ ID NO: 1249030 - DNA, 25 bp, Homo sapien
tgtgccacctctagcaaaagcttca

SEQ ID NO: 1249031 - DNA, 25 bp, Homo sapien
tgcacatcaacttccctaaaatcag

SEQ ID NO: 1249032 - DNA, 25 bp, Homo sapien
ctagatggattcaggcagtacttgc

SEQ ID NO: 1249033 - DNA, 25 bp, Homo sapien
ggaaaacacaactcgccatgtaggg

SEQ ID NO: 1249034 - DNA, 25 bp, Homo sapien
tcaaagatcatcacatggaggctgt

SEQ ID NO: 1249035 - DNA, 25 bp, Homo sapien
cagcaagaagtagcagacgcagaca

SEQ ID NO: 1249036 - DNA, 25 bp, Homo sapien
tctagcctaggtgaaaatgtccagg

SEQ ID NO: 1249037 - DNA, 25 bp, Homo sapien
aaagccatgtggcactgtgtcgaag

SEQ ID NO: 1249038 - DNA, 25 bp, Homo sapien
tcctgtaaagtgtgggtttcaaagc

SEQ ID NO: 1249039 - DNA, 25 bp, Homo sapien
cactgtgtcgaagtaatcattgcct

SEQ ID NO: 1249040 - DNA, 25 bp, Homo sapien
aagttgtgctcctgtaaagtgtggg

SEQ ID NO: 1249041 - DNA, 25 bp, Homo sapien
gtttcatctttgtttataagataca

SEQ ID NO: 1249042 - DNA, 25 bp, Homo sapien
ctttgtttataagatacatcagaaa

SEQ ID NO: 1249043 - DNA, 25 bp, Homo sapien
gtcctgtgtgttctgtttcatcttt

SEQ ID NO: 1249044 - DNA, 25 bp, Homo sapien
catctttgtttataagatacatcag

SEQ ID NO: 1249045 - DNA, 25 bp, Homo sapien
ccggaagcaatcccctgctgggaaa

SEQ ID NO: 1249046 - DNA, 25 bp, Homo sapien
tgtttccggaagcaatcccctgctg

SEQ ID NO: 1249047 - DNA, 25 bp, Homo sapien
tttccggaagcaatcccctgctggg

SEQ ID NO: 1249048 - DNA, 25 bp, Homo sapien
tccggaagcaatcccctgctgggaa

SEQ ID NO: 1249049 - DNA, 25 bp, Homo sapien
tagctcaacccacatatagtaaggc

SEQ ID NO: 1249050 - DNA, 25 bp, Homo sapien
tcgtagctcgagaagactccgggag

SEQ ID NO: 1249051 - DNA, 25 bp, Homo sapien
gaaacagagcttcgatgctcccaga

SEQ ID NO: 1249052 - DNA, 25 bp, Homo sapien
taaaaaatggcctgacaagaagtcc

SEQ ID NO: 1249053 - DNA, 25 bp, Homo sapien
acagatgaaataggggcagaatgat

SEQ ID NO: 1249054 - DNA, 25 bp, Homo sapien
gaggaacagatgaaataggggcaga

SEQ ID NO: 1249055 - DNA, 25 bp, Homo sapien
gaacagatgaaataggggcagaatg

SEQ ID NO: 1249056 - DNA, 25 bp, Homo sapien
gtgttgtagttgagaatagggatat

SEQ ID NO: 1249057 - DNA, 25 bp, Homo sapien
caaactgtctcctgcacacgaaaaa

SEQ ID NO: 1249058 - DNA, 25 bp, Homo sapien
tgaccatccgaggagtaccagtgga

SEQ ID NO: 1249059 - DNA, 25 bp, Homo sapien
taaacttattttatggcgtagatgc

SEQ ID NO: 1249060 - DNA, 25 bp, Homo sapien
agtaccagtggacagtgatgaccgg

SEQ ID NO: 1249061 - DNA, 25 bp, Homo sapien
tcctctaggctccgccatgctggag

SEQ ID NO: 1249062 - DNA, 25 bp, Homo sapien
tcaggttgatctggccctctatgat

SEQ ID NO: 1249063 - DNA, 25 bp, Homo sapien
cagcaaggagatgtgagaagttgcc

SEQ ID NO: 1249064 - DNA, 25 bp, Homo sapien
gcaaggatggcaaaacctgcccaca

SEQ ID NO: 1249065 - DNA, 25 bp, Homo sapien
tccactactgtttaataggagtgat

SEQ ID NO: 1249066 - DNA, 25 bp, Homo sapien
gatatagaatccagtcatttgcaaa

SEQ ID NO: 1249067 - DNA, 25 bp, Homo sapien
catgattgccctggtcaggatttcc

SEQ ID NO: 1249068 - DNA, 25 bp, Homo sapien
tcagattaatgagcctgtgggctga

SEQ ID NO: 1249069 - DNA, 25 bp, Homo sapien
atttgagctcttttattttattcca

SEQ ID NO: 1249070 - DNA, 25 bp, Homo sapien
gattaccttggctatttgagctctt

SEQ ID NO: 1249071 - DNA, 25 bp, Homo sapien
atggtgcgatcacagccccctgcaa

SEQ ID NO: 1249072 - DNA, 25 bp, Homo sapien
ttggctatttgagctcttttatttt

SEQ ID NO: 1249073 - DNA, 25 bp, Homo sapien
aatggcattgcctaagttgccttcc

SEQ ID NO: 1249074 - DNA, 25 bp, Homo sapien
cattgcctaagttgccttccagggt

SEQ ID NO: 1249075 - DNA, 25 bp, Homo sapien
tatgtggtgtaaggggtctagtttc

SEQ ID NO: 1249076 - DNA, 25 bp, Homo sapien
ggcattgcctaagttgccttccagg

SEQ ID NO: 1249077 - DNA, 25 bp, Homo sapien
ctgctttggctgctgtctgtttacc

SEQ ID NO: 1249078 - DNA, 25 bp, Homo sapien
tttggctgctgtctgtttaccagcc

SEQ ID NO: 1249079 - DNA, 25 bp, Homo sapien
gctgtctgtttaccagcctggctct

SEQ ID NO: 1249080 - DNA, 25 bp, Homo sapien
gcttcttcatcctcaggcctgcttt

SEQ ID NO: 1249081 - DNA, 25 bp, Homo sapien
cctatggagtgactttgctctgtga

SEQ ID NO: 1249082 - DNA, 25 bp, Homo sapien
ggttcctatggagtgactttgctct

SEQ ID NO: 1249083 - DNA, 25 bp, Homo sapien
ctcactagctggttcctatggagtg

SEQ ID NO: 1249084 - DNA, 25 bp, Homo sapien
ctagctggttcctatggagtgactt

SEQ ID NO: 1249085 - DNA, 25 bp, Homo sapien
tgtaatgaagtaagctcagctccca

SEQ ID NO: 1249086 - DNA, 25 bp, Homo sapien
ttctcatagccccagtttgcaggtg

SEQ ID NO: 1249087 - DNA, 25 bp, Homo sapien
caggtggcccatagttaccaccggg

SEQ ID NO: 1249088 - DNA, 25 bp, Homo sapien
tgtgagcacgtctgaccccattctc

SEQ ID NO: 1249089 - DNA, 25 bp, Homo sapien
gccgtgtcacttgaacgctctgatg

SEQ ID NO: 1249090 - DNA, 25 bp, Homo sapien
ccagctccgctttggcaaatggcca

SEQ ID NO: 1249091 - DNA, 25 bp, Homo sapien
tctgatgacaaatccacgtggcttt

SEQ ID NO: 1249092 - DNA, 25 bp, Homo sapien
caagctgtaccgtgcttaaagcagt

SEQ ID NO: 1249093 - DNA, 25 bp, Homo sapien
tgtgggaggcaggggagggagggga

SEQ ID NO: 1249094 - DNA, 25 bp, Homo sapien
ggccccaaaagaagtgcatcagagg

SEQ ID NO: 1249095 - DNA, 25 bp, Homo sapien
gtgtggccccaaaagaagtgcatca

SEQ ID NO: 1249096 - DNA, 25 bp, Homo sapien
tgggccagcgactggtgcccagcct

SEQ ID NO: 1249097 - DNA, 25 bp, Homo sapien
gcatcagaggtggaaacatgggcca

SEQ ID NO: 1249098 - DNA, 25 bp, Homo sapien
tagatggcacaaggagaaagttcat

SEQ ID NO: 1249099 - DNA, 25 bp, Homo sapien
tagaaatggtagtcacagtctcttc

SEQ ID NO: 1249100 - DNA, 25 bp, Homo sapien
tcatcatcagaggtccagttcccag

SEQ ID NO: 1249101 - DNA, 25 bp, Homo sapien
tgcttgatgaaagagtagatggcac

SEQ ID NO: 1249102 - DNA, 25 bp, Homo sapien
caagcagctcctagacaggatggac

SEQ ID NO: 1249103 - DNA, 25 bp, Homo sapien
gagtgaaatcctttagccccaactg

SEQ ID NO: 1249104 - DNA, 25 bp, Homo sapien
tgctggccaactacaacactggttg

SEQ ID NO: 1249105 - DNA, 25 bp, Homo sapien
gacagatggacaaggacaggaccag

SEQ ID NO: 1249106 - DNA, 25 bp, Homo sapien
ggagccttgttagtatcctacttgg

SEQ ID NO: 1249107 - DNA, 25 bp, Homo sapien
gcaggcctttctgggaccttaatcc

SEQ ID NO: 1249108 - DNA, 25 bp, Homo sapien
ggtgttcctgtagactcgaaagttc

SEQ ID NO: 1249109 - DNA, 25 bp, Homo sapien
cctgtagactcgaaagttctgtggg

SEQ ID NO: 1249110 - DNA, 25 bp, Homo sapien
catctgcactgcagcgtgtcagtct

SEQ ID NO: 1249111 - DNA, 25 bp, Homo sapien
gagtaaattgttcatggaggagtcc

SEQ ID NO: 1249112 - DNA, 25 bp, Homo sapien
gaaggcaggctattggaatggtccc

SEQ ID NO: 1249113 - DNA, 25 bp, Homo sapien
cttcatcaaagttggaaataggact

SEQ ID NO: 1249114 - DNA, 25 bp, Homo sapien
tcaatcctgggcaaaagtctctcct

SEQ ID NO: 1249115 - DNA, 25 bp, Homo sapien
tctaaaagaagctacatcaacgatg

SEQ ID NO: 1249116 - DNA, 25 bp, Homo sapien
ggaaccctgtcagcgactccgggga

SEQ ID NO: 1249117 - DNA, 25 bp, Homo sapien
tggaagcaacaggacaaatgtaatc

SEQ ID NO: 1249118 - DNA, 25 bp, Homo sapien
caatatccatccttgaagatgggca

SEQ ID NO: 1249119 - DNA, 25 bp, Homo sapien
tcctgttgaaggcatgcctgtacgt

SEQ ID NO: 1249120 - DNA, 25 bp, Homo sapien
aggcatgcctgtacgtactccatca

SEQ ID NO: 1249121 - DNA, 25 bp, Homo sapien
ggagggcagacatatcctcacccca

SEQ ID NO: 1249122 - DNA, 25 bp, Homo sapien
tgcctcctgaagtctctattcctgt

SEQ ID NO: 1249123 - DNA, 25 bp, Homo sapien
gcaaagtttcgctgtttgagaggct

SEQ ID NO: 1249124 - DNA, 25 bp, Homo sapien
tccttaggttcctcaagacatggtt

SEQ ID NO: 1249125 - DNA, 25 bp, Homo sapien
gtaggactgcaggttaagggcccat

SEQ ID NO: 1249126 - DNA, 25 bp, Homo sapien
tcttcagtgattggcagcacaggtg

SEQ ID NO: 1249127 - DNA, 25 bp, Homo sapien
tgaccgcaatcctcaggaatatctc

SEQ ID NO: 1249128 - DNA, 25 bp, Homo sapien
ttgaccgcaatcctcaggaatatct

SEQ ID NO: 1249129 - DNA, 25 bp, Homo sapien
ggtcagtggatctctccctgtgtgc

SEQ ID NO: 1249130 - DNA, 25 bp, Homo sapien
attgaccgcaatcctcaggaatatc

SEQ ID NO: 1249131 - DNA, 25 bp, Homo sapien
tgctcatctcaagtgggttaatgga

SEQ ID NO: 1249132 - DNA, 25 bp, Homo sapien
gcagtctccctgctcatctcaagtg

SEQ ID NO: 1249133 - DNA, 25 bp, Homo sapien
ggttgctttctgttggtattgctca

SEQ ID NO: 1249134 - DNA, 25 bp, Homo sapien
gctttctgttggtattgctcaccca

SEQ ID NO: 1249135 - DNA, 25 bp, Homo sapien
tctgccattggaacaggacctggtg

SEQ ID NO: 1249136 - DNA, 25 bp, Homo sapien
gttagaggatccaacaccagctgtc

SEQ ID NO: 1249137 - DNA, 25 bp, Homo sapien
cacagagttggttagaggatccaac

SEQ ID NO: 1249138 - DNA, 25 bp, Homo sapien
gacctggtgccctgtattaggacag

SEQ ID NO: 1249139 - DNA, 25 bp, Homo sapien
ggaatgagcttccatattatccaca

SEQ ID NO: 1249140 - DNA, 25 bp, Homo sapien
ttgctcttgctcttcataattcact

SEQ ID NO: 1249141 - DNA, 25 bp, Homo sapien
aattcacttggaaagaggctataac

SEQ ID NO: 1249142 - DNA, 25 bp, Homo sapien
atgagcttccatattatccacactt

SEQ ID NO: 1249143 - DNA, 25 bp, Homo sapien
aggataacacggtgaacaggctggc

SEQ ID NO: 1249144 - DNA, 25 bp, Homo sapien
gagcagcaggataacacggtgaaca

SEQ ID NO: 1249145 - DNA, 25 bp, Homo sapien
agcagagcagcaggataacacggtg

SEQ ID NO: 1249146 - DNA, 25 bp, Homo sapien
gcgggggcgactgagcttgaacatc

SEQ ID NO: 1249147 - DNA, 25 bp, Homo sapien
tgtcaatggcaagcgtggcgatctc

SEQ ID NO: 1249148 - DNA, 25 bp, Homo sapien
gagccattgtcaatggcaagcgtgg

SEQ ID NO: 1249149 - DNA, 25 bp, Homo sapien
cattgtcaatggcaagcgtggcgat

SEQ ID NO: 1249150 - DNA, 25 bp, Homo sapien
aatggcaagcgtggcgatctcttct

SEQ ID NO: 1249151 - DNA, 25 bp, Homo sapien
catcatgctcttgtgccgggggtgc

SEQ ID NO: 1249152 - DNA, 25 bp, Homo sapien
aatgatggagggaaacacagcttgg

SEQ ID NO: 1249153 - DNA, 25 bp, Homo sapien
cagcttggggggcatcgtccccagc

SEQ ID NO: 1249154 - DNA, 25 bp, Homo sapien
ggtgcccaatgatggagggaaacac

SEQ ID NO: 1249155 - DNA, 25 bp, Homo sapien
aggagtccttctggcccatgcccac

SEQ ID NO: 1249156 - DNA, 25 bp, Homo sapien
gtaggagtccttctggcccatgccc

SEQ ID NO: 1249157 - DNA, 25 bp, Homo sapien
taggagtccttctggcccatgccca

SEQ ID NO: 1249158 - DNA, 25 bp, Homo sapien
gatgccggcttgctctgggccttgt

SEQ ID NO: 1249159 - DNA, 25 bp, Homo sapien
gggtcaggatgccggcttgctctgg

SEQ ID NO: 1249160 - DNA, 25 bp, Homo sapien
ggatgccggcttgctctgggccttg

SEQ ID NO: 1249161 - DNA, 25 bp, Homo sapien
gccggcttgctctgggccttgtcgc

SEQ ID NO: 1249162 - DNA, 25 bp, Homo sapien
gttcgggcaggcctcgatcagcagc

SEQ ID NO: 1249163 - DNA, 25 bp, Homo sapien
gaggtagcctgtcaggtccctgcca

SEQ ID NO: 1249164 - DNA, 25 bp, Homo sapien
accgtgtgagtgaccctgaccccat

SEQ ID NO: 1249165 - DNA, 25 bp, Homo sapien
gacggcatgtgggagggcatagccc

SEQ ID NO: 1249166 - DNA, 25 bp, Homo sapien
ggaggaggaagatgcggccgtggcc

SEQ ID NO: 1249167 - DNA, 25 bp, Homo sapien
tctccttctcgaagtccagggtgat

SEQ ID NO: 1249168 - DNA, 25 bp, Homo sapien
gggaggaggaagatgcggccgtggc

SEQ ID NO: 1249169 - DNA, 25 bp, Homo sapien
tctcgaagtccagggtgatgtagca

SEQ ID NO: 1249170 - DNA, 25 bp, Homo sapien
gccagtactcccagtgtgctaatca

SEQ ID NO: 1249171 - DNA, 25 bp, Homo sapien
cagggaactttggaatggcgtaaca

SEQ ID NO: 1249172 - DNA, 25 bp, Homo sapien
taacaaatggatgatctctgtccga

SEQ ID NO: 1249173 - DNA, 25 bp, Homo sapien
ccacattagtggcaccgggatggct

SEQ ID NO: 1249174 - DNA, 25 bp, Homo sapien
agaggtcttgacctctgtctttaga

SEQ ID NO: 1249175 - DNA, 25 bp, Homo sapien
tatagtctaatgcttactcagtcat

SEQ ID NO: 1249176 - DNA, 25 bp, Homo sapien
atttatagtctaatgcttactcagt

SEQ ID NO: 1249177 - DNA, 25 bp, Homo sapien
taaaaagaggtcttgacctctgtct

SEQ ID NO: 1249178 - DNA, 25 bp, Homo sapien
tcaacatgaaaaatcacctcagggc

SEQ ID NO: 1249179 - DNA, 25 bp, Homo sapien
aagccctgcaggattgaagctgctc

SEQ ID NO: 1249180 - DNA, 25 bp, Homo sapien
agccctgcaggattgaagctgctcc

SEQ ID NO: 1249181 - DNA, 25 bp, Homo sapien
gcaattcaacatgaaaaatcacctc

SEQ ID NO: 1249182 - DNA, 25 bp, Homo sapien
gttaacagctaaataccctaatcaa

SEQ ID NO: 1249183 - DNA, 25 bp, Homo sapien
gatcggtgggattcaaacccatgaa

SEQ ID NO: 1249184 - DNA, 25 bp, Homo sapien
acccatgaaaacttagttaacagct

SEQ ID NO: 1249185 - DNA, 25 bp, Homo sapien
ctagatcggtgggattcaaacccat

SEQ ID NO: 1249186 - DNA, 25 bp, Homo sapien
gactgcgagactctattctgcatca

SEQ ID NO: 1249187 - DNA, 25 bp, Homo sapien
taaggactgcgagactctattctgc

SEQ ID NO: 1249188 - DNA, 25 bp, Homo sapien
actgcgagactctattctgcatcaa

SEQ ID NO: 1249189 - DNA, 25 bp, Homo sapien
aggactgcgagactctattctgcat

SEQ ID NO: 1249190 - DNA, 25 bp, Homo sapien
cctgagaatccaaatctcttcgtgc

SEQ ID NO: 1249191 - DNA, 25 bp, Homo sapien
ccaaatctcttcgtgctacctatta

SEQ ID NO: 1249192 - DNA, 25 bp, Homo sapien
gaatccaaatctcttcgtgctacct

SEQ ID NO: 1249193 - DNA, 25 bp, Homo sapien
aaatctcttcgtgctacctattaca

SEQ ID NO: 1249194 - DNA, 25 bp, Homo sapien
gatatgatttatttgcgtgctagca

SEQ ID NO: 1249195 - DNA, 25 bp, Homo sapien
ggcatattacgagccgtggcccaga

SEQ ID NO: 1249196 - DNA, 25 bp, Homo sapien
gccgtggcccagacaatctcacatg

SEQ ID NO: 1249197 - DNA, 25 bp, Homo sapien
ctatgccctgatcggcatattacga

SEQ ID NO: 1249198 - DNA, 25 bp, Homo sapien
gacgtactccgatttgattcctact

SEQ ID NO: 1249199 - DNA, 25 bp, Homo sapien
tatattgaatattccgaacccacat

SEQ ID NO: 1249200 - DNA, 25 bp, Homo sapien
gaacccacataacaaccatacggtg

SEQ ID NO: 1249201 - DNA, 25 bp, Homo sapien
ccatacggtgttaattaattcatgc

SEQ ID NO: 1249202 - DNA, 25 bp, Homo sapien
tgaaaaaccatcgttttcaattata

SEQ ID NO: 1249203 - DNA, 25 bp, Homo sapien
tcagctatctgtgatccgtttctcc

SEQ ID NO: 1249204 - DNA, 25 bp, Homo sapien
ttttaagctgcctacaccatgcacc

SEQ ID NO: 1249205 - DNA, 25 bp, Homo sapien
tttggttctctgtctacccagtact

SEQ ID NO: 1249206 - DNA, 25 bp, Homo sapien
catgcaccagttcatgggtttcccc

SEQ ID NO: 1249207 - DNA, 25 bp, Homo sapien
tgtttacactcaacattgatcacaa

SEQ ID NO: 1249208 - DNA, 25 bp, Homo sapien
tacactcaacattgatcacaagttc

SEQ ID NO: 1249209 - DNA, 25 bp, Homo sapien
ctcaacattgatcacaagttcttta

SEQ ID NO: 1249210 - DNA, 25 bp, Homo sapien
gtttacactcaacattgatcacaag

SEQ ID NO: 1249211 - DNA, 25 bp, Homo sapien
gctggggttgtcactcatgatcgcc

SEQ ID NO: 1249212 - DNA, 25 bp, Homo sapien
cccaccagcgtgctggaagggcatg

SEQ ID NO: 1249213 - DNA, 25 bp, Homo sapien
tgtcactcatgatcgccaacaccat

SEQ ID NO: 1249214 - DNA, 25 bp, Homo sapien
cacaaacccaccagcgtgctggaag

SEQ ID NO: 1249215 - DNA, 25 bp, Homo sapien
ctgaagtgaagcctgcatgtcactg

SEQ ID NO: 1249216 - DNA, 25 bp, Homo sapien
ccgtgcatgctgaagtgaagcctgc

SEQ ID NO: 1249217 - DNA, 25 bp, Homo sapien
tgctgaagtgaagcctgcatgtcac

SEQ ID NO: 1249218 - DNA, 25 bp, Homo sapien
aagtgaagcctgcatgtcactgtgc

SEQ ID NO: 1249219 - DNA, 25 bp, Homo sapien
tgatgaaaactcattcgagtgttgt

SEQ ID NO: 1249220 - DNA, 25 bp, Homo sapien
catgaaatggtgaaatctgtgagca

SEQ ID NO: 1249221 - DNA, 25 bp, Homo sapien
ttgctaaagtaacggaaagcactca

SEQ ID NO: 1249222 - DNA, 25 bp, Homo sapien
aatctgtgagcacccctcacggtca

SEQ ID NO: 1249223 - DNA, 25 bp, Homo sapien
aaatggtgaaatctgcatcccttac

SEQ ID NO: 1249224 - DNA, 25 bp, Homo sapien
tgaaatggtgaaatctgcatccctt

SEQ ID NO: 1249225 - DNA, 25 bp, Homo sapien
catgaaatggtgaaatctgcatccc

SEQ ID NO: 1249226 - DNA, 25 bp, Homo sapien
gaaatggtgaaatctgcatccctta

SEQ ID NO: 1249227 - DNA, 25 bp, Homo sapien
tattttataagtgcaaggatcccta

SEQ ID NO: 1249228 - DNA, 25 bp, Homo sapien
tactgagagtttggttctctcccca

SEQ ID NO: 1249229 - DNA, 25 bp, Homo sapien
aactgaagaatggaacgagacctcc

SEQ ID NO: 1249230 - DNA, 25 bp, Homo sapien
cgagacctccgatagacctcatttt

SEQ ID NO: 1249231 - DNA, 25 bp, Homo sapien
aaaacctatgttgtaagacatcaac

SEQ ID NO: 1249232 - DNA, 25 bp, Homo sapien
ctattataaaacctatgttgtaaga

SEQ ID NO: 1249233 - DNA, 25 bp, Homo sapien
aatgtacttatatcactattataaa

SEQ ID NO: 1249234 - DNA, 25 bp, Homo sapien
tataaaacctatgttgtaagacatc

SEQ ID NO: 1249235 - DNA, 25 bp, Homo sapien
ccaccagctgtagcctacggacagc

SEQ ID NO: 1249236 - DNA, 25 bp, Homo sapien
agcctacggacagccagtttgtaac

SEQ ID NO: 1249237 - DNA, 25 bp, Homo sapien
agctgtagcctacggacagccagtt

SEQ ID NO: 1249238 - DNA, 25 bp, Homo sapien
tgtagcctacggacagccagtttgt

SEQ ID NO: 1249239 - DNA, 25 bp, Homo sapien
tgttagtaataatatctcccattga

SEQ ID NO: 1249240 - DNA, 25 bp, Homo sapien
gaagttcacatttcactagagttac

SEQ ID NO: 1249241 - DNA, 25 bp, Homo sapien
ttagttggatgtgctctaggattta

SEQ ID NO: 1249242 - DNA, 25 bp, Homo sapien
gttacactagagtaatctggagagt

SEQ ID NO: 1249243 - DNA, 25 bp, Homo sapien
attaaaatgtatgcgtgcttgtttc

SEQ ID NO: 1249244 - DNA, 25 bp, Homo sapien
ttaaaatgtatgcgtgcttgtttca

SEQ ID NO: 1249245 - DNA, 25 bp, Homo sapien
cattaaaatgtatgcgtgcttgttt

SEQ ID NO: 1249246 - DNA, 25 bp, Homo sapien
ttgatattttgcagggtacttttcc

SEQ ID NO: 1249247 - DNA, 25 bp, Homo sapien
cttgatattttgcagggtacttttc

SEQ ID NO: 1249248 - DNA, 25 bp, Homo sapien
cgcacttctgatgtagcattgtata

SEQ ID NO: 1249249 - DNA, 25 bp, Homo sapien
tcagtcctcgcacttctgatgtagc

SEQ ID NO: 1249250 - DNA, 25 bp, Homo sapien
tcctcgcacttctgatgtagcattg

SEQ ID NO: 1249251 - DNA, 25 bp, Homo sapien
agatttcccaaactggtggaatcct

SEQ ID NO: 1249252 - DNA, 25 bp, Homo sapien
ttcttcttttctcaatgcaagccaa

SEQ ID NO: 1249253 - DNA, 25 bp, Homo sapien
tgacacttttgactactccttccat

SEQ ID NO: 1249254 - DNA, 25 bp, Homo sapien
aatcttataaagcttatcttgacac

SEQ ID NO: 1249255 - DNA, 25 bp, Homo sapien
cacctcttgtcaaaagctaatctta

SEQ ID NO: 1249256 - DNA, 25 bp, Homo sapien
aaggcttcccgctttgagatacttc

SEQ ID NO: 1249257 - DNA, 25 bp, Homo sapien
cacaagattcaaaaccatagatgag

SEQ ID NO: 1249258 - DNA, 25 bp, Homo sapien
tcaaaaccatagatgagtcaaggct

SEQ ID NO: 1249259 - DNA, 25 bp, Homo sapien
tgttttcggaattcattacctttca

SEQ ID NO: 1249260 - DNA, 25 bp, Homo sapien
tcagctgccctagcttgttcagggt

SEQ ID NO: 1249261 - DNA, 25 bp, Homo sapien
gattagaacattcagttatccattt

SEQ ID NO: 1249262 - DNA, 25 bp, Homo sapien
gtccactgctttccatcacattcat

SEQ ID NO: 1249263 - DNA, 25 bp, Homo sapien
tcagggtattcacttaaaacctgga

SEQ ID NO: 1249264 - DNA, 25 bp, Homo sapien
gcttaataatttccatagcatcttt

SEQ ID NO: 1249265 - DNA, 25 bp, Homo sapien
caaccttgtataacacatctgccat

SEQ ID NO: 1249266 - DNA, 25 bp, Homo sapien
aataatttccatagcatctttgatg

SEQ ID NO: 1249267 - DNA, 25 bp, Homo sapien
ctttgatgaaataatcaaccttgta

SEQ ID NO: 1249268 - DNA, 25 bp, Homo sapien
tcacagcttgggcccaagttttcta

SEQ ID NO: 1249269 - DNA, 25 bp, Homo sapien
cacagcttgggcccaagttttctat

SEQ ID NO: 1249270 - DNA, 25 bp, Homo sapien
acagcttgggcccaagttttctatc

SEQ ID NO: 1249271 - DNA, 25 bp, Homo sapien
ctgtaacctgctgctcattgcatat

SEQ ID NO: 1249272 - DNA, 25 bp, Homo sapien
gcaggccagatctcacaaaagctga

SEQ ID NO: 1249273 - DNA, 25 bp, Homo sapien
aaaggcaggcctccgaaacaaatgt

SEQ ID NO: 1249274 - DNA, 25 bp, Homo sapien
ggttaatgaacttctggcaggccag

SEQ ID NO: 1249275 - DNA, 25 bp, Homo sapien
tcttaattggactgttgagccctcc

SEQ ID NO: 1249276 - DNA, 25 bp, Homo sapien
ctgcagacttggcataacaggccat

SEQ ID NO: 1249277 - DNA, 25 bp, Homo sapien
tctgcagacttggcataacaggcca

SEQ ID NO: 1249278 - DNA, 25 bp, Homo sapien
ctgacaagtgtgagataacctgaca

SEQ ID NO: 1249279 - DNA, 25 bp, Homo sapien
aaaagcctgctctcataaaggctac

SEQ ID NO: 1249280 - DNA, 25 bp, Homo sapien
gctaccacagcaaggcagtaaccag

SEQ ID NO: 1249281 - DNA, 25 bp, Homo sapien
gacaatgagttactgaaaagcctgc

SEQ ID NO: 1249282 - DNA, 25 bp, Homo sapien
catgctcagtaatgactgtggcctt

SEQ ID NO: 1249283 - DNA, 25 bp, Homo sapien
tcaccacttctaaggattgtatagc

SEQ ID NO: 1249284 - DNA, 25 bp, Homo sapien
gattgtatagctgcccggaagtcca

SEQ ID NO: 1249285 - DNA, 25 bp, Homo sapien
tgatggaatgaggaccccatgccat

SEQ ID NO: 1249286 - DNA, 25 bp, Homo sapien
gaaccacattgtaagttgaatacca

SEQ ID NO: 1249287 - DNA, 25 bp, Homo sapien
ctactccatatctgttgggagactc

SEQ ID NO: 1249288 - DNA, 25 bp, Homo sapien
agtagacactgggagaccaaaactc

SEQ ID NO: 1249289 - DNA, 25 bp, Homo sapien
tgttgggagactctacagtagacac

SEQ ID NO: 1249290 - DNA, 25 bp, Homo sapien
gagtatttcgagctcagtaatattt

SEQ ID NO: 1249291 - DNA, 25 bp, Homo sapien
tgcattgggttgaatgcatgagctg

SEQ ID NO: 1249292 - DNA, 25 bp, Homo sapien
gagctgagtatttcgagctcagtaa

SEQ ID NO: 1249293 - DNA, 25 bp, Homo sapien
gaatgcatgagctgagtatttcgag

SEQ ID NO: 1249294 - DNA, 25 bp, Homo sapien
aagctgttcctttatcctgtgttcc

SEQ ID NO: 1249295 - DNA, 25 bp, Homo sapien
taagctgttcctttatcctgtgttc

SEQ ID NO: 1249296 - DNA, 25 bp, Homo sapien
ttctgggtaggcactttcataaacc

SEQ ID NO: 1249297 - DNA, 25 bp, Homo sapien
ctgggtaggcactttcataaacctc

SEQ ID NO: 1249298 - DNA, 25 bp, Homo sapien
ctggccactgagaagtaagtcaagt

SEQ ID NO: 1249299 - DNA, 25 bp, Homo sapien
tcaattgccaacatttgcttccagg

SEQ ID NO: 1249300 - DNA, 25 bp, Homo sapien
gaaggattccttgacagagctgtcc

SEQ ID NO: 1249301 - DNA, 25 bp, Homo sapien
gaaatgagttattcttcaattgcca

SEQ ID NO: 1249302 - DNA, 25 bp, Homo sapien
ggtagagaaccaagcacttgatggg

SEQ ID NO: 1249303 - DNA, 25 bp, Homo sapien
cctctgttgtcaaaaggtagagaac

SEQ ID NO: 1249304 - DNA, 25 bp, Homo sapien
cagaacaaaacttcctttgtggagg

SEQ ID NO: 1249305 - DNA, 25 bp, Homo sapien
tgctgaacggagctgcagaacaaaa

SEQ ID NO: 1249306 - DNA, 25 bp, Homo sapien
ccaagcgtcactgttgctagtttct

SEQ ID NO: 1249307 - DNA, 25 bp, Homo sapien
tcaatggcagccctgatgtgtagct

SEQ ID NO: 1249308 - DNA, 25 bp, Homo sapien
gtgtagctcgcctgacacttccagc

SEQ ID NO: 1249309 - DNA, 25 bp, Homo sapien
cagccccaagcgtcactgttgctag

SEQ ID NO: 1249310 - DNA, 25 bp, Homo sapien
tgatgccttagtctctttcctagcc

SEQ ID NO: 1249311 - DNA, 25 bp, Homo sapien
gtctctttattcctgaacgagccct

SEQ ID NO: 1249312 - DNA, 25 bp, Homo sapien
agccctggcctgatgccttagtctc

SEQ ID NO: 1249313 - DNA, 25 bp, Homo sapien
ctctttattcctgaacgagccctgg

SEQ ID NO: 1249314 - DNA, 25 bp, Homo sapien
ccacagggttgaatgaccccggcag

SEQ ID NO: 1249315 - DNA, 25 bp, Homo sapien
tgttatcagctcttttcgatcttca

SEQ ID NO: 1249316 - DNA, 25 bp, Homo sapien
ctactctcctgaattgagatctgtt

SEQ ID NO: 1249317 - DNA, 25 bp, Homo sapien
tgtccacagggttgaatgaccccgg

SEQ ID NO: 1249318 - DNA, 25 bp, Homo sapien
tcctgctacaacaacagctcagttt

SEQ ID NO: 1249319 - DNA, 25 bp, Homo sapien
acacttgccaccgtatttctactga

SEQ ID NO: 1249320 - DNA, 25 bp, Homo sapien
actgaattcacatgatttattttcc

SEQ ID NO: 1249321 - DNA, 25 bp, Homo sapien
gactcaatttcttgtgtaaccacaa

SEQ ID NO: 1249322 - DNA, 25 bp, Homo sapien
atctgctatcaagcagcaagtgctg

SEQ ID NO: 1249323 - DNA, 25 bp, Homo sapien
catctgctatcaagcagcaagtgct

SEQ ID NO: 1249324 - DNA, 25 bp, Homo sapien
ttatacgtcctgctttccagcatca

SEQ ID NO: 1249325 - DNA, 25 bp, Homo sapien
tcctctcttaggaccattatacgtc

SEQ ID NO: 1249326 - DNA, 25 bp, Homo sapien
tcccgcaaaggcaaatttagaatac

SEQ ID NO: 1249327 - DNA, 25 bp, Homo sapien
caatgcagaagttcccgcaaaggca

SEQ ID NO: 1249328 - DNA, 25 bp, Homo sapien
gttcacctaaagtccatttatcagt

SEQ ID NO: 1249329 - DNA, 25 bp, Homo sapien
agtgatttgcagttactcgttcacc

SEQ ID NO: 1249330 - DNA, 25 bp, Homo sapien
taatgggcacaaccatcatagtgat

SEQ ID NO: 1249331 - DNA, 25 bp, Homo sapien
ccactgacattgtcttgttctgagc

SEQ ID NO: 1249332 - DNA, 25 bp, Homo sapien
ttccgcgtaggatcaaacagctggt

SEQ ID NO: 1249333 - DNA, 25 bp, Homo sapien
tagatgctggtataattcactagcg

SEQ ID NO: 1249334 - DNA, 25 bp, Homo sapien
taaggaaagccttccgcgtaggatc

SEQ ID NO: 1249335 - DNA, 25 bp, Homo sapien
gcgtccattcagaaggtacagaaat

SEQ ID NO: 1249336 - DNA, 25 bp, Homo sapien
ggaaccatctgtagtcttaatctct

SEQ ID NO: 1249337 - DNA, 25 bp, Homo sapien
ctccatagtctaaaagttcaggcag

SEQ ID NO: 1249338 - DNA, 25 bp, Homo sapien
tgtagtcttaatctctccatagtct

SEQ ID NO: 1249339 - DNA, 25 bp, Homo sapien
ttttagggaaccatctgtagtctta

SEQ ID NO: 1249340 - DNA, 25 bp, Homo sapien
aaatagaggattaaatcagagtcaa

SEQ ID NO: 1249341 - DNA, 25 bp, Homo sapien
tgacctgcatatttgaaatagagga

SEQ ID NO: 1249342 - DNA, 25 bp, Homo sapien
aggagtttaactctggaatgacctg

SEQ ID NO: 1249343 - DNA, 25 bp, Homo sapien
tagaggattaaatcagagtcaatta

SEQ ID NO: 1249344 - DNA, 25 bp, Homo sapien
gtggttaaatatagacttggcaatt

SEQ ID NO: 1249345 - DNA, 25 bp, Homo sapien
aaatatagacttggcaattgataga

SEQ ID NO: 1249346 - DNA, 25 bp, Homo sapien
ctgtggttaaatatagacttggcaa

SEQ ID NO: 1249347 - DNA, 25 bp, Homo sapien
ggttaaatatagacttggcaattga

SEQ ID NO: 1249348 - DNA, 25 bp, Homo sapien
tttatcatgacaattcccacttcag

SEQ ID NO: 1249349 - DNA, 25 bp, Homo sapien
ctatattgtcatattttatcatgac

SEQ ID NO: 1249350 - DNA, 25 bp, Homo sapien
catgacaattcccacttcagtgagg

SEQ ID NO: 1249351 - DNA, 25 bp, Homo sapien
gacaattcccacttcagtgaggaga

SEQ ID NO: 1249352 - DNA, 25 bp, Homo sapien
tgtccgggtgctttccaggcttaga

SEQ ID NO: 1249353 - DNA, 25 bp, Homo sapien
tcagggaataagtccggagcccttg

SEQ ID NO: 1249354 - DNA, 25 bp, Homo sapien
tggactcatccccacttgggattgc

SEQ ID NO: 1249355 - DNA, 25 bp, Homo sapien
gctgctgtgctaacgggtcttcttt

SEQ ID NO: 1249356 - DNA, 25 bp, Homo sapien
tgatccaatgcaagacagccttcct

SEQ ID NO: 1249357 - DNA, 25 bp, Homo sapien
agaacacccagagatgccgacgtgc

SEQ ID NO: 1249358 - DNA, 25 bp, Homo sapien
tagagacgtaatgaaggaaaccact

SEQ ID NO: 1249359 - DNA, 25 bp, Homo sapien
tttgagattccttaagccagcccag

SEQ ID NO: 1249360 - DNA, 25 bp, Homo sapien
cagggagtgttatcgctcttcaaag

SEQ ID NO: 1249361 - DNA, 25 bp, Homo sapien
catatagttggacccatgcaattca

SEQ ID NO: 1249362 - DNA, 25 bp, Homo sapien
tactgaaagtcctagtgtgtccgga

SEQ ID NO: 1249363 - DNA, 25 bp, Homo sapien
tacagctcatacaggtaacgtatta

SEQ ID NO: 1249364 - DNA, 25 bp, Homo sapien
tatgacagcaaaagtataggcacat

SEQ ID NO: 1249365 - DNA, 25 bp, Homo sapien
gaaaattcaattggacaaagctctc

SEQ ID NO: 1249366 - DNA, 25 bp, Homo sapien
gaatgagaatgtagcgacactgcaa

SEQ ID NO: 1249367 - DNA, 25 bp, Homo sapien
agaactcgtaccactcaataatgaa

SEQ ID NO: 1249368 - DNA, 25 bp, Homo sapien
gacaatcatatgatcacggtcaatg

SEQ ID NO: 1249369 - DNA, 25 bp, Homo sapien
caatcatatgatcacggtcaatgag

SEQ ID NO: 1249370 - DNA, 25 bp, Homo sapien
cctgacaatcatatgatcacggtca

SEQ ID NO: 1249371 - DNA, 25 bp, Homo sapien
aatcatatgatcacggtcaatgagg

SEQ ID NO: 1249372 - DNA, 25 bp, Homo sapien
ttagatgcagccgactgccgggcag

SEQ ID NO: 1249373 - DNA, 25 bp, Homo sapien
gaacaataagctgtcaaaagtatga

SEQ ID NO: 1249374 - DNA, 25 bp, Homo sapien
tccctgtgagttttagatgcagccg

SEQ ID NO: 1249375 - DNA, 25 bp, Homo sapien
tgagttttagatgcagccgactgcc

SEQ ID NO: 1249376 - DNA, 25 bp, Homo sapien
gaattactatcttgccctctctgca

SEQ ID NO: 1249377 - DNA, 25 bp, Homo sapien
taaacacaagttacaacacacgtgg

SEQ ID NO: 1249378 - DNA, 25 bp, Homo sapien
tcaagtaatccctggctgcattttt

SEQ ID NO: 1249379 - DNA, 25 bp, Homo sapien
ctcttttggtgtagcgtaaacacaa

SEQ ID NO: 1249380 - DNA, 25 bp, Homo sapien
tgttgtccatcaaggaccccatcgt

SEQ ID NO: 1249381 - DNA, 25 bp, Homo sapien
tgtccatcaaggaccccatcgtcat

SEQ ID NO: 1249382 - DNA, 25 bp, Homo sapien
actgatattgttgtccatcaaggac

SEQ ID NO: 1249383 - DNA, 25 bp, Homo sapien
gatattgttgtccatcaaggacccc

SEQ ID NO: 1249384 - DNA, 25 bp, Homo sapien
ggcgatttgggtcatccctattgct

SEQ ID NO: 1249385 - DNA, 25 bp, Homo sapien
tccatgggcagcaggtcgatttcca

SEQ ID NO: 1249386 - DNA, 25 bp, Homo sapien
aggaatgtagggagcgaatgtccat

SEQ ID NO: 1249387 - DNA, 25 bp, Homo sapien
tccagtatcggcgatttgggtcatc

SEQ ID NO: 1249388 - DNA, 25 bp, Homo sapien
aggcaaagagataatggctggagag

SEQ ID NO: 1249389 - DNA, 25 bp, Homo sapien
agataatggctggagagagtctcac

SEQ ID NO: 1249390 - DNA, 25 bp, Homo sapien
caaagagataatggctggagagagt

SEQ ID NO: 1249391 - DNA, 25 bp, Homo sapien
aagagataatggctggagagagtct

SEQ ID NO: 1249392 - DNA, 25 bp, Homo sapien
caatgccccgttctgatgaatcagt

SEQ ID NO: 1249393 - DNA, 25 bp, Homo sapien
tttgaaactgcaggaaggatcacag

SEQ ID NO: 1249394 - DNA, 25 bp, Homo sapien
ttggccatttgaaatgaggaagcta

SEQ ID NO: 1249395 - DNA, 25 bp, Homo sapien
gagcacgtttttgaagttagcgata

SEQ ID NO: 1249396 - DNA, 25 bp, Homo sapien
ctggctcaaggcgtcatgagtggct

SEQ ID NO: 1249397 - DNA, 25 bp, Homo sapien
ttctgccacgcactcatgggatctc

SEQ ID NO: 1249398 - DNA, 25 bp, Homo sapien
tcatgagtggctggcgttttctgcc

SEQ ID NO: 1249399 - DNA, 25 bp, Homo sapien
caattaaacttgtctccctggtgga

SEQ ID NO: 1249400 - DNA, 25 bp, Homo sapien
accagccaggtcaatatagtatgac

SEQ ID NO: 1249401 - DNA, 25 bp, Homo sapien
gctgtctggtgaagagagcgagagg

SEQ ID NO: 1249402 - DNA, 25 bp, Homo sapien
aagctgtctggtgaagagagcgaga

SEQ ID NO: 1249403 - DNA, 25 bp, Homo sapien
tcaagctgtctggtgaagagagcga

SEQ ID NO: 1249404 - DNA, 25 bp, Homo sapien
caagctgtctggtgaagagagcgag

SEQ ID NO: 1249405 - DNA, 25 bp, Homo sapien
ctgaccggctgggcgcctcgctggg

SEQ ID NO: 1249406 - DNA, 25 bp, Homo sapien
accggctgggcgcctcgctgggcgc

SEQ ID NO: 1249407 - DNA, 25 bp, Homo sapien
gaccggctgggcgcctcgctgggcg

SEQ ID NO: 1249408 - DNA, 25 bp, Homo sapien
tgaccggctgggcgcctcgctgggc

SEQ ID NO: 1249409 - DNA, 25 bp, Homo sapien
agaagctggtggagcgggtcacaga

SEQ ID NO: 1249410 - DNA, 25 bp, Homo sapien
agctggtggagcgggtcacagagat

SEQ ID NO: 1249411 - DNA, 25 bp, Homo sapien
ccccagaagctggtggagcgggtca

SEQ ID NO: 1249412 - DNA, 25 bp, Homo sapien
caaccccagaagctggtggagcggg

SEQ ID NO: 1249413 - DNA, 25 bp, Homo sapien
ctctccatgtgctccgggattttgc

SEQ ID NO: 1249414 - DNA, 25 bp, Homo sapien
cttcctctccatgtgctccgggatt

SEQ ID NO: 1249415 - DNA, 25 bp, Homo sapien
ccttcctctccatgtgctccgggat

SEQ ID NO: 1249416 - DNA, 25 bp, Homo sapien
tcctctccatgtgctccgggatttt

SEQ ID NO: 1249417 - DNA, 25 bp, Homo sapien
taaagtcgtcagcagtaagatggtc

SEQ ID NO: 1249418 - DNA, 25 bp, Homo sapien
ctaaagtcgtcagcagtaagatggt

SEQ ID NO: 1249419 - DNA, 25 bp, Homo sapien
tcgtcagcagtaagatggtcattgt

SEQ ID NO: 1249420 - DNA, 25 bp, Homo sapien
aagtcgtcagcagtaagatggtcat

SEQ ID NO: 1249421 - DNA, 25 bp, Homo sapien
gcagctccttcttgagagccttgat

SEQ ID NO: 1249422 - DNA, 25 bp, Homo sapien
ttcttgagagccttgatctctgtct

SEQ ID NO: 1249423 - DNA, 25 bp, Homo sapien
gtgtcatcgatgaccttgcagagcc

SEQ ID NO: 1249424 - DNA, 25 bp, Homo sapien
ttgcagagcccatggatgtggctct

SEQ ID NO: 1249425 - DNA, 25 bp, Homo sapien
gcaatctgggcttgtaggcctttta

SEQ ID NO: 1249426 - DNA, 25 bp, Homo sapien
ctggcaatctgggcttgtaggcctt

SEQ ID NO: 1249427 - DNA, 25 bp, Homo sapien
caatctgggcttgtaggccttttac

SEQ ID NO: 1249428 - DNA, 25 bp, Homo sapien
agtcaatccacagctggcaatctgg

SEQ ID NO: 1249429 - DNA, 25 bp, Homo sapien
tatttatattggggccggatatctg

SEQ ID NO: 1249430 - DNA, 25 bp, Homo sapien
ctatttatattggggccggatatct

SEQ ID NO: 1249431 - DNA, 25 bp, Homo sapien
tccgtgagtgttgattcagcagctc

SEQ ID NO: 1249432 - DNA, 25 bp, Homo sapien
cgtggtgaccactctggtgctgtcc

SEQ ID NO: 1249433 - DNA, 25 bp, Homo sapien
cagctccgtgagtgttgattcagca

SEQ ID NO: 1249434 - DNA, 25 bp, Homo sapien
gagtgttgattcagcagctccaacc

SEQ ID NO: 1249435 - DNA, 25 bp, Homo sapien
tgctgtccggggcatcagtaagatt

SEQ ID NO: 1249436 - DNA, 25 bp, Homo sapien
agtaagattgaagccctcactgtct

SEQ ID NO: 1249437 - DNA, 25 bp, Homo sapien
tccggggcatcagtaagattgaagc

SEQ ID NO: 1249438 - DNA, 25 bp, Homo sapien
ggcatcagtaagattgaagccctca

SEQ ID NO: 1249439 - DNA, 25 bp, Homo sapien
tgcttccgctggctttatgcctcag

SEQ ID NO: 1249440 - DNA, 25 bp, Homo sapien
ttccgctggctttatgcctcagaac

SEQ ID NO: 1249441 - DNA, 25 bp, Homo sapien
cctgcttccgctggctttatgcctc

SEQ ID NO: 1249442 - DNA, 25 bp, Homo sapien
gcttccgctggctttatgcctcaga

SEQ ID NO: 1249443 - DNA, 25 bp, Homo sapien
agaagtttattctgaaagcgtcatc

SEQ ID NO: 1249444 - DNA, 25 bp, Homo sapien
ttctgaaagcgtcatcatttaccct

SEQ ID NO: 1249445 - DNA, 25 bp, Homo sapien
gtttattctgaaagcgtcatcattt

SEQ ID NO: 1249446 - DNA, 25 bp, Homo sapien
tattctgaaagcgtcatcatttacc

SEQ ID NO: 1249447 - DNA, 25 bp, Homo sapien
actatttttagctgttttcagtgag

SEQ ID NO: 1249448 - DNA, 25 bp, Homo sapien
taccatattactaggaggagattcc

SEQ ID NO: 1249449 - DNA, 25 bp, Homo sapien
gagttggtgaataacctgatctacc

SEQ ID NO: 1249450 - DNA, 25 bp, Homo sapien
ggagattcctggaagcctattaaat

SEQ ID NO: 1249451 - DNA, 25 bp, Homo sapien
tgtttgctggtagattcctctcatc

SEQ ID NO: 1249452 - DNA, 25 bp, Homo sapien
ctctttgtttgctggtagattcctc

SEQ ID NO: 1249453 - DNA, 25 bp, Homo sapien
tttgtttgctggtagattcctctca

SEQ ID NO: 1249454 - DNA, 25 bp, Homo sapien
ttgactctttgtttgctggtagatt

SEQ ID NO: 1249455 - DNA, 25 bp, Homo sapien
tctgagactggccattgcttcccag

SEQ ID NO: 1249456 - DNA, 25 bp, Homo sapien
tgagactggccattgcttcccagaa

SEQ ID NO: 1249457 - DNA, 25 bp, Homo sapien
gaagttatggaactagagcttcacg

SEQ ID NO: 1249458 - DNA, 25 bp, Homo sapien
ctgagactggccattgcttcccaga

SEQ ID NO: 1249459 - DNA, 25 bp, Homo sapien
tagtacctgaaaccgatggacgatc

SEQ ID NO: 1249460 - DNA, 25 bp, Homo sapien
caaagtgcttggactgcagacggga

SEQ ID NO: 1249461 - DNA, 25 bp, Homo sapien
taaatggttctaacccacaggagcc

SEQ ID NO: 1249462 - DNA, 25 bp, Homo sapien
taggttatagctgaaccccaagggc

SEQ ID NO: 1249463 - DNA, 25 bp, Homo sapien
gttattgcttcgtctgttacaaact

SEQ ID NO: 1249464 - DNA, 25 bp, Homo sapien
aaaaggtagttattgcttcgtctgt

SEQ ID NO: 1249465 - DNA, 25 bp, Homo sapien
ttctgaactgcaatcgtgatattca

SEQ ID NO: 1249466 - DNA, 25 bp, Homo sapien
gaactgcaatcgtgatattcagtaa

SEQ ID NO: 1249467 - DNA, 25 bp, Homo sapien
tcttcattgactcagcccctagacc

SEQ ID NO: 1249468 - DNA, 25 bp, Homo sapien
tgactcagcccctagaccaattgat

SEQ ID NO: 1249469 - DNA, 25 bp, Homo sapien
ttcattgactcagcccctagaccaa

SEQ ID NO: 1249470 - DNA, 25 bp, Homo sapien
attgactcagcccctagaccaattg

SEQ ID NO: 1249471 - DNA, 25 bp, Homo sapien
gatcactattagaggaggcagcttt

SEQ ID NO: 1249472 - DNA, 25 bp, Homo sapien
gctttcagggaacagtcccatacag

SEQ ID NO: 1249473 - DNA, 25 bp, Homo sapien
ccaagtgtgcaaagccattgtcttc

SEQ ID NO: 1249474 - DNA, 25 bp, Homo sapien
gccattgtcttcaggatcactatta

SEQ ID NO: 1249475 - DNA, 25 bp, Homo sapien
gcatggaggtttcagacgcctgtaa

SEQ ID NO: 1249476 - DNA, 25 bp, Homo sapien
gaaagccacgccgtatcattggaag

SEQ ID NO: 1249477 - DNA, 25 bp, Homo sapien
tccctgtgagttgcttggtcccttc

SEQ ID NO: 1249478 - DNA, 25 bp, Homo sapien
tggacttggaattagcatgcatgga

SEQ ID NO: 1249479 - DNA, 25 bp, Homo sapien
aactgtacaagccccagatgcaagg

SEQ ID NO: 1249480 - DNA, 25 bp, Homo sapien
gtacaagccccagatgcaaggagac

SEQ ID NO: 1249481 - DNA, 25 bp, Homo sapien
ctgtacaagccccagatgcaaggag

SEQ ID NO: 1249482 - DNA, 25 bp, Homo sapien
ttaactgtacaagccccagatgcaa

SEQ ID NO: 1249483 - DNA, 25 bp, Homo sapien
gtctccaacaggactggtaccagtc

SEQ ID NO: 1249484 - DNA, 25 bp, Homo sapien
aaccaatagaacacctggaaatctg

SEQ ID NO: 1249485 - DNA, 25 bp, Homo sapien
ctcccaaccaatagaacacctggaa

SEQ ID NO: 1249486 - DNA, 25 bp, Homo sapien
cccaaccaatagaacacctggaaat

SEQ ID NO: 1249487 - DNA, 25 bp, Homo sapien
aaataattggagtaagaggccagac

SEQ ID NO: 1249488 - DNA, 25 bp, Homo sapien
gaggccagactacactttccaaagt

SEQ ID NO: 1249489 - DNA, 25 bp, Homo sapien
tgttgaagcagagcaaggacaggaa

SEQ ID NO: 1249490 - DNA, 25 bp, Homo sapien
cctttttggtgcagaatctgggaaa

SEQ ID NO: 1249491 - DNA, 25 bp, Homo sapien
gcttccttgacctgattatgcaatc

SEQ ID NO: 1249492 - DNA, 25 bp, Homo sapien
ttatggcccgtaggggcttgtagct

SEQ ID NO: 1249493 - DNA, 25 bp, Homo sapien
gacctgattatgcaatcccacagca

SEQ ID NO: 1249494 - DNA, 25 bp, Homo sapien
ccgtaggggcttgtagcttccttga

SEQ ID NO: 1249495 - DNA, 25 bp, Homo sapien
cttagcctatctgtaagattcattg

SEQ ID NO: 1249496 - DNA, 25 bp, Homo sapien
taccatagcttgacccagtttcagg

SEQ ID NO: 1249497 - DNA, 25 bp, Homo sapien
tcttctttatccatactagtgctac

SEQ ID NO: 1249498 - DNA, 25 bp, Homo sapien
gattcattgttgtcaaatccctctc

SEQ ID NO: 1249499 - DNA, 25 bp, Homo sapien
tgctatttcgtccatctttaattca

SEQ ID NO: 1249500 - DNA, 25 bp, Homo sapien
ttgacttgctatttcgtccatcttt

SEQ ID NO: 1249501 - DNA, 25 bp, Homo sapien
cttgctatttcgtccatctttaatt

SEQ ID NO: 1249502 - DNA, 25 bp, Homo sapien
gacttgctatttcgtccatctttaa

SEQ ID NO: 1249503 - DNA, 25 bp, Homo sapien
tcttgcacctcttacaaatgctgtg

SEQ ID NO: 1249504 - DNA, 25 bp, Homo sapien
tttatccaggaagttagagactgaa

SEQ ID NO: 1249505 - DNA, 25 bp, Homo sapien
catagggacataaattttgactcaa

SEQ ID NO: 1249506 - DNA, 25 bp, Homo sapien
tgcccttgaaaaatccgtaatacat

SEQ ID NO: 1249507 - DNA, 25 bp, Homo sapien
ctgcccaaactcttccagatctcat

SEQ ID NO: 1249508 - DNA, 25 bp, Homo sapien
gagcagccgatcatctgtggcacag

SEQ ID NO: 1249509 - DNA, 25 bp, Homo sapien
gagagcagccgatcatctgtggcac

SEQ ID NO: 1249510 - DNA, 25 bp, Homo sapien
ctgtggcagagagcagccgatcatc

SEQ ID NO: 1249511 - DNA, 25 bp, Homo sapien
cacagcaaaactggcatgcaacaca

SEQ ID NO: 1249512 - DNA, 25 bp, Homo sapien
actggcatgcaacacaggacatttt

SEQ ID NO: 1249513 - DNA, 25 bp, Homo sapien
tgtggacatagctgaattcacagca

SEQ ID NO: 1249514 - DNA, 25 bp, Homo sapien
caatatgtggacatagctgaattca

SEQ ID NO: 1249515 - DNA, 25 bp, Homo sapien
tgataaagctgacatagcccatggc

SEQ ID NO: 1249516 - DNA, 25 bp, Homo sapien
ctgataaagctgacatagcccatgg

SEQ ID NO: 1249517 - DNA, 25 bp, Homo sapien
gataaagctgacatagcccatggca

SEQ ID NO: 1249518 - DNA, 25 bp, Homo sapien
cagagattcttggcattgatgtaaa

SEQ ID NO: 1249519 - DNA, 25 bp, Homo sapien
agagattcttggcattgatgtaaaa

SEQ ID NO: 1249520 - DNA, 25 bp, Homo sapien
gagattcttggcattgatgtaaaaa

SEQ ID NO: 1249521 - DNA, 25 bp, Homo sapien
agattcttggcattgatgtaaaaat

SEQ ID NO: 1249522 - DNA, 25 bp, Homo sapien
gtttatcttgcacgtttttctccca

SEQ ID NO: 1249523 - DNA, 25 bp, Homo sapien
gcagtatgacattgtgcccagttta

SEQ ID NO: 1249524 - DNA, 25 bp, Homo sapien
taaactgtgagagattttgttgtct

SEQ ID NO: 1249525 - DNA, 25 bp, Homo sapien
ttttctcccatggaacacgagtgga

SEQ ID NO: 1249526 - DNA, 25 bp, Homo sapien
ctgtccagtcgcaggccctctgggt

SEQ ID NO: 1249527 - DNA, 25 bp, Homo sapien
ccttggtatacccgggtacacgatg

SEQ ID NO: 1249528 - DNA, 25 bp, Homo sapien
tacccgggtacacgatgacttcagg

SEQ ID NO: 1249529 - DNA, 25 bp, Homo sapien
ccgggtacacgatgacttcaggtgt

SEQ ID NO: 1249530 - DNA, 25 bp, Homo sapien
tgtgctcctcatctgtggatgtctt

SEQ ID NO: 1249531 - DNA, 25 bp, Homo sapien
tttctgtctaggcaatgaataaaca

SEQ ID NO: 1249532 - DNA, 25 bp, Homo sapien
gagtctcgagtgaactgataattca

SEQ ID NO: 1249533 - DNA, 25 bp, Homo sapien
aacaataaatgtgcagagtctcgag

SEQ ID NO: 1249534 - DNA, 25 bp, Homo sapien
gccttacgtaattctgacaagaaga

SEQ ID NO: 1249535 - DNA, 25 bp, Homo sapien
tgcctgacactacttgtgaaaaatc

SEQ ID NO: 1249536 - DNA, 25 bp, Homo sapien
tgtgaccaacacatagccttacgta

SEQ ID NO: 1249537 - DNA, 25 bp, Homo sapien
tgtagttgtctaaataatgctcctg

SEQ ID NO: 1249538 - DNA, 25 bp, Homo sapien
tttcttcatcccgatccactttgat

SEQ ID NO: 1249539 - DNA, 25 bp, Homo sapien
tcttcatcccgatccactttgatga

SEQ ID NO: 1249540 - DNA, 25 bp, Homo sapien
ttcatcccgatccactttgatgaga

SEQ ID NO: 1249541 - DNA, 25 bp, Homo sapien
tcatcccgatccactttgatgagac

SEQ ID NO: 1249542 - DNA, 25 bp, Homo sapien
tcagtctgccaagcccaaatgcaat

SEQ ID NO: 1249543 - DNA, 25 bp, Homo sapien
gctaggagaagtaagtcctgggtta

SEQ ID NO: 1249544 - DNA, 25 bp, Homo sapien
cagggaaactgtgctaggagaagta

SEQ ID NO: 1249545 - DNA, 25 bp, Homo sapien
cctagtgatagagctgaaatgccat

SEQ ID NO: 1249546 - DNA, 25 bp, Homo sapien
tgtgaatcatcattaatattagtca

SEQ ID NO: 1249547 - DNA, 25 bp, Homo sapien
atgtgaatcatcattaatattagtc

SEQ ID NO: 1249548 - DNA, 25 bp, Homo sapien
gccatgatccatatgtgtaattccc

SEQ ID NO: 1249549 - DNA, 25 bp, Homo sapien
cagaagcacatggagcaccaaagtg

SEQ ID NO: 1249550 - DNA, 25 bp, Homo sapien
aattcccatgcagagctcagaagca

SEQ ID NO: 1249551 - DNA, 25 bp, Homo sapien
tgtctgatcctgaatgctcagtgcc

SEQ ID NO: 1249552 - DNA, 25 bp, Homo sapien
acatcaaggcccacactctggatag

SEQ ID NO: 1249553 - DNA, 25 bp, Homo sapien
tagctaaatattgagatggcttaag

SEQ ID NO: 1249554 - DNA, 25 bp, Homo sapien
cactctggatagctaaatattgaga

SEQ ID NO: 1249555 - DNA, 25 bp, Homo sapien
ggcccacactctggatagctaaata

SEQ ID NO: 1249556 - DNA, 25 bp, Homo sapien
agggatttttaagacctgtgtatct

SEQ ID NO: 1249557 - DNA, 25 bp, Homo sapien
tcagctcttggcctaactctggtta

SEQ ID NO: 1249558 - DNA, 25 bp, Homo sapien
ttcttagtttgtatgagttggtcat

SEQ ID NO: 1249559 - DNA, 25 bp, Homo sapien
taatggtcaatttcttccagccaga

SEQ ID NO: 1249560 - DNA, 25 bp, Homo sapien
agctgttctatctattgggtggcca

SEQ ID NO: 1249561 - DNA, 25 bp, Homo sapien
ctatctattgggtggccagtgttct

SEQ ID NO: 1249562 - DNA, 25 bp, Homo sapien
cacacttaggcctttagctgttcta

SEQ ID NO: 1249563 - DNA, 25 bp, Homo sapien
tgttctatctattgggtggccagtg

SEQ ID NO: 1249564 - DNA, 25 bp, Homo sapien
tccccttgtgaggttgtcaaatctc

SEQ ID NO: 1249565 - DNA, 25 bp, Homo sapien
gttgtcaaatctctccctgcgttgc

SEQ ID NO: 1249566 - DNA, 25 bp, Homo sapien
tgtcaaatctctccctgcgttgctg

SEQ ID NO: 1249567 - DNA, 25 bp, Homo sapien
cttccccttgtgaggttgtcaaatc

SEQ ID NO: 1249568 - DNA, 25 bp, Homo sapien
tagtcacactcttcagttctaagga

SEQ ID NO: 1249569 - DNA, 25 bp, Homo sapien
taataggaggcaacaaatcactgaa

SEQ ID NO: 1249570 - DNA, 25 bp, Homo sapien
agacatggaattgtgcatgcaaatc

SEQ ID NO: 1249571 - DNA, 25 bp, Homo sapien
caatctgacttttcatcgatacatg

SEQ ID NO: 1249572 - DNA, 25 bp, Homo sapien
gccaccgtggtgtgttcttgactcc

SEQ ID NO: 1249573 - DNA, 25 bp, Homo sapien
ttcttgactccacttctcgccatgt

SEQ ID NO: 1249574 - DNA, 25 bp, Homo sapien
gttcttgactccacttctcgccatg

SEQ ID NO: 1249575 - DNA, 25 bp, Homo sapien
ttctctgccaccgtggtgtgttctt

SEQ ID NO: 1249576 - DNA, 25 bp, Homo sapien
tctccaatttcttcttttgtcttca

SEQ ID NO: 1249577 - DNA, 25 bp, Homo sapien
tgtttctctccaatttcttcttttg

SEQ ID NO: 1249578 - DNA, 25 bp, Homo sapien
ttctctccaatttcttcttttgtct

SEQ ID NO: 1249579 - DNA, 25 bp, Homo sapien
ctgtttctctccaatttcttctttt

SEQ ID NO: 1249580 - DNA, 25 bp, Homo sapien
tacttccccaagtgtgctgtctgca

SEQ ID NO: 1249581 - DNA, 25 bp, Homo sapien
agattgctcacagggtagctcccag

SEQ ID NO: 1249582 - DNA, 25 bp, Homo sapien
taatttctcacgcagcatctgtggc

SEQ ID NO: 1249583 - DNA, 25 bp, Homo sapien
gggcccagtgttgtatacagattgc

SEQ ID NO: 1249584 - DNA, 25 bp, Homo sapien
catgtgtgctcattggttttgcact

SEQ ID NO: 1249585 - DNA, 25 bp, Homo sapien
gaagaggacctccttaaagtcagga

SEQ ID NO: 1249586 - DNA, 25 bp, Homo sapien
tcctgtctgccataatggaagagga

SEQ ID NO: 1249587 - DNA, 25 bp, Homo sapien
aaatcacgatgcttggcccaaactg

SEQ ID NO: 1249588 - DNA, 25 bp, Homo sapien
ctaatgaacaattttgaatacaaag

SEQ ID NO: 1249589 - DNA, 25 bp, Homo sapien
aatgctgagagttggattttctgac

SEQ ID NO: 1249590 - DNA, 25 bp, Homo sapien
tgcttaaatgctgagagttggattt

SEQ ID NO: 1249591 - DNA, 25 bp, Homo sapien
gcaattctgtgagccctcatatctt

SEQ ID NO: 1249592 - DNA, 25 bp, Homo sapien
ctttgcaattctgtgagccctcata

SEQ ID NO: 1249593 - DNA, 25 bp, Homo sapien
aaagttctgaatgtcgattgtcgtt

SEQ ID NO: 1249594 - DNA, 25 bp, Homo sapien
gtcgattgtcgttttctgaaaatgg

SEQ ID NO: 1249595 - DNA, 25 bp, Homo sapien
tttctgaaaatggttctgctgccct

SEQ ID NO: 1249596 - DNA, 25 bp, Homo sapien
gtgaaaagttctgaatgtcgattgt

SEQ ID NO: 1249597 - DNA, 25 bp, Homo sapien
taaaagccttatcatcctgacattc

SEQ ID NO: 1249598 - DNA, 25 bp, Homo sapien
cattaatgagctcaatgacacagcc

SEQ ID NO: 1249599 - DNA, 25 bp, Homo sapien
tggaaagttgtcagtggcgaccatg

SEQ ID NO: 1249600 - DNA, 25 bp, Homo sapien
tttccgattctttcctgataacagc

SEQ ID NO: 1249601 - DNA, 25 bp, Homo sapien
tttggacgcaggttgtaacaaggac

SEQ ID NO: 1249602 - DNA, 25 bp, Homo sapien
cgcaggttgtaacaaggacggtcat

SEQ ID NO: 1249603 - DNA, 25 bp, Homo sapien
gacaaatagtttgatttggacgcag

SEQ ID NO: 1249604 - DNA, 25 bp, Homo sapien
tagtttgatttggacgcaggttgta

SEQ ID NO: 1249605 - DNA, 25 bp, Homo sapien
taaggatcgcttaaggcaacccaat

SEQ ID NO: 1249606 - DNA, 25 bp, Homo sapien
actgtagcccaaaagaaacctgtgc

SEQ ID NO: 1249607 - DNA, 25 bp, Homo sapien
tatctacggccatagttaccccaag

SEQ ID NO: 1249608 - DNA, 25 bp, Homo sapien
gatgaatggcccactgcactagaga

SEQ ID NO: 1249609 - DNA, 25 bp, Homo sapien
tttcatgacggatccacctccgtga

SEQ ID NO: 1249610 - DNA, 25 bp, Homo sapien
tttggggaggcaaatatccaaacca

SEQ ID NO: 1249611 - DNA, 25 bp, Homo sapien
gcattgatcttttcatgacggatcc

SEQ ID NO: 1249612 - DNA, 25 bp, Homo sapien
tccaaaccatagcaccttgtatatt

SEQ ID NO: 1249613 - DNA, 25 bp, Homo sapien
gtattgtgaacaaaagggacctcca

SEQ ID NO: 1249614 - DNA, 25 bp, Homo sapien
cagtattgtgaacaaaagggacctc

SEQ ID NO: 1249615 - DNA, 25 bp, Homo sapien
tattgtgaacaaaagggacctccac

SEQ ID NO: 1249616 - DNA, 25 bp, Homo sapien
aacttgtgtgcatgtctgccctgtc

SEQ ID NO: 1249617 - DNA, 25 bp, Homo sapien
ttgtgtgcatgtctgccctgtctgt

SEQ ID NO: 1249618 - DNA, 25 bp, Homo sapien
aaacttgtgtgcatgtctgccctgt

SEQ ID NO: 1249619 - DNA, 25 bp, Homo sapien
tgaaaacttgtgtgcatgtctgccc

SEQ ID NO: 1249620 - DNA, 25 bp, Homo sapien
cagtccagagatttctggttctttc

SEQ ID NO: 1249621 - DNA, 25 bp, Homo sapien
tataaccagggcaggtacgaggcca

SEQ ID NO: 1249622 - DNA, 25 bp, Homo sapien
gaggccatccaattggctgccaatt

SEQ ID NO: 1249623 - DNA, 25 bp, Homo sapien
gaaggattgtcacagtccagagatt

SEQ ID NO: 1249624 - DNA, 25 bp, Homo sapien
gaatctctgctaacgccaattagag

SEQ ID NO: 1249625 - DNA, 25 bp, Homo sapien
aaactgagagtcacttcaagggcag

SEQ ID NO: 1249626 - DNA, 25 bp, Homo sapien
gagatgaaaactgagagtcacttca

SEQ ID NO: 1249627 - DNA, 25 bp, Homo sapien
gtaagaaagtaatcgaaattcagat

SEQ ID NO: 1249628 - DNA, 25 bp, Homo sapien
tgttcctggtttggcagtatatgac

SEQ ID NO: 1249629 - DNA, 25 bp, Homo sapien
aaatccttgcgtgtataatcctctc

SEQ ID NO: 1249630 - DNA, 25 bp, Homo sapien
cactgaattgcttggaggattaacc

SEQ ID NO: 1249631 - DNA, 25 bp, Homo sapien
gactcagagcaacagtatttcactg

SEQ ID NO: 1249632 - DNA, 25 bp, Homo sapien
tccactgtctggactagagacaacc

SEQ ID NO: 1249633 - DNA, 25 bp, Homo sapien
actgtctggactagagacaaccttc

SEQ ID NO: 1249634 - DNA, 25 bp, Homo sapien
aatttccactgtctggactagagac

SEQ ID NO: 1249635 - DNA, 25 bp, Homo sapien
tgaggaatttccactgtctggacta

SEQ ID NO: 1249636 - DNA, 25 bp, Homo sapien
cactcttccctggaactcatgatca

SEQ ID NO: 1249637 - DNA, 25 bp, Homo sapien
gcagcctgagggatcccaactcaaa

SEQ ID NO: 1249638 - DNA, 25 bp, Homo sapien
gagggatcccaactcaaacactctt

SEQ ID NO: 1249639 - DNA, 25 bp, Homo sapien
gaactcatgatcagcagctcgttca

SEQ ID NO: 1249640 - DNA, 25 bp, Homo sapien
caagtcctctaatggtcctcaggca

SEQ ID NO: 1249641 - DNA, 25 bp, Homo sapien
cctctaatggtcctcaggcatgctg

SEQ ID NO: 1249642 - DNA, 25 bp, Homo sapien
tatcatctctctatgttggtacgtg

SEQ ID NO: 1249643 - DNA, 25 bp, Homo sapien
ggtacgtgctgtaactctcattgcc

SEQ ID NO: 1249644 - DNA, 25 bp, Homo sapien
taagaagatacaacaggaaaggagg

SEQ ID NO: 1249645 - DNA, 25 bp, Homo sapien
tggaatctccattgacgataaggat

SEQ ID NO: 1249646 - DNA, 25 bp, Homo sapien
ccagctctgggtgtttgcaagagtg

SEQ ID NO: 1249647 - DNA, 25 bp, Homo sapien
ttgacgataaggatccagctctggg

SEQ ID NO: 1249648 - DNA, 25 bp, Homo sapien
ctctttgaagtaggaaggcttaaat

SEQ ID NO: 1249649 - DNA, 25 bp, Homo sapien
ttgatgtatcttcacgggaacaaca

SEQ ID NO: 1249650 - DNA, 25 bp, Homo sapien
gatgtatcttcacgggaacaacaaa

SEQ ID NO: 1249651 - DNA, 25 bp, Homo sapien
cctgttgatgtatcttcacgggaac

SEQ ID NO: 1249652 - DNA, 25 bp, Homo sapien
ccctcatggtcctgttgatgtatct

SEQ ID NO: 1249653 - DNA, 25 bp, Homo sapien
ctggagatccgcgatggcaccgatg

SEQ ID NO: 1249654 - DNA, 25 bp, Homo sapien
tccgcgttcagggagcgactgtcct

SEQ ID NO: 1249655 - DNA, 25 bp, Homo sapien
agctgcgctccaggtggctgtccca

SEQ ID NO: 1249656 - DNA, 25 bp, Homo sapien
gtcttcccagaagcgctgctgcggc

SEQ ID NO: 1249657 - DNA, 25 bp, Homo sapien
tccacttgccatgccaaggtcacta

SEQ ID NO: 1249658 - DNA, 25 bp, Homo sapien
ttttccacttgccatgccaaggtca

SEQ ID NO: 1249659 - DNA, 25 bp, Homo sapien
catgccaaggtcactattccaccat

SEQ ID NO: 1249660 - DNA, 25 bp, Homo sapien
ttgccatgccaaggtcactattcca

SEQ ID NO: 1249661 - DNA, 25 bp, Homo sapien
cctatctacaaaccattttggcgtg

SEQ ID NO: 1249662 - DNA, 25 bp, Homo sapien
tcaccatccacaaatgacaaaccat

SEQ ID NO: 1249663 - DNA, 25 bp, Homo sapien
tgatccatcgagacttcacgactac

SEQ ID NO: 1249664 - DNA, 25 bp, Homo sapien
atgacaaaccatcttaaacactgac

SEQ ID NO: 1249665 - DNA, 25 bp, Homo sapien
gcactcttaaaagcattaagcatta

SEQ ID NO: 1249666 - DNA, 25 bp, Homo sapien
ggagctgagtcctataatgaaggca

SEQ ID NO: 1249667 - DNA, 25 bp, Homo sapien
caaaaacctcgggaagcgatctcga

SEQ ID NO: 1249668 - DNA, 25 bp, Homo sapien
tactgaaatccactgggagctgagt

SEQ ID NO: 1249669 - DNA, 25 bp, Homo sapien
actatacttcatggcaaattctatg

SEQ ID NO: 1249670 - DNA, 25 bp, Homo sapien
ccattatactatacttcatggcaaa

SEQ ID NO: 1249671 - DNA, 25 bp, Homo sapien
ctcttcttaaatgggtcagtaccct

SEQ ID NO: 1249672 - DNA, 25 bp, Homo sapien
tcagtaccctctgagttggcagctt

SEQ ID NO: 1249673 - DNA, 25 bp, Homo sapien
tcacccatcattgctacctttcagt

SEQ ID NO: 1249674 - DNA, 25 bp, Homo sapien
caaacggttacaataaacagagacg

SEQ ID NO: 1249675 - DNA, 25 bp, Homo sapien
taaattgagctgtcataagtcccct

SEQ ID NO: 1249676 - DNA, 25 bp, Homo sapien
tttcaccagataaagtaaattgagc

SEQ ID NO: 1249677 - DNA, 25 bp, Homo sapien
tttcctgaacaacacaagtacggca

SEQ ID NO: 1249678 - DNA, 25 bp, Homo sapien
aacaagtgatgaaaccatttcacaa

SEQ ID NO: 1249679 - DNA, 25 bp, Homo sapien
gcataactgagactgaattgaagcc

SEQ ID NO: 1249680 - DNA, 25 bp, Homo sapien
gaattgaagcccacaaatttctacc

SEQ ID NO: 1249681 - DNA, 25 bp, Homo sapien
ccattggacggtcattttttcctgt

SEQ ID NO: 1249682 - DNA, 25 bp, Homo sapien
gccattggacggtcattttttcctg

SEQ ID NO: 1249683 - DNA, 25 bp, Homo sapien
cattggacggtcattttttcctgtc

SEQ ID NO: 1249684 - DNA, 25 bp, Homo sapien
gcagtcaactgagatcgcaccagtg

SEQ ID NO: 1249685 - DNA, 25 bp, Homo sapien
ggttgcagtcaactgagatcgcacc

SEQ ID NO: 1249686 - DNA, 25 bp, Homo sapien
ttgcagtcaactgagatcgcaccag

SEQ ID NO: 1249687 - DNA, 25 bp, Homo sapien
gaggttgcagtcaactgagatcgca

SEQ ID NO: 1249688 - DNA, 25 bp, Homo sapien
ccagtttattaaggggctaggcagt

SEQ ID NO: 1249689 - DNA, 25 bp, Homo sapien
tccagccagtttattaaggggctag

SEQ ID NO: 1249690 - DNA, 25 bp, Homo sapien
agccagtttattaaggggctaggca

SEQ ID NO: 1249691 - DNA, 25 bp, Homo sapien
agactccagccagtttattaagggg

SEQ ID NO: 1249692 - DNA, 25 bp, Homo sapien
attcacaattatatccacatctata

SEQ ID NO: 1249693 - DNA, 25 bp, Homo sapien
tattcacaattatatccacatctat

SEQ ID NO: 1249694 - DNA, 25 bp, Homo sapien
taatagcattatgtttttcaacaaa

SEQ ID NO: 1249695 - DNA, 25 bp, Homo sapien
ttaatagcattatgtttttcaacaa

SEQ ID NO: 1249696 - DNA, 25 bp, Homo sapien
tagcattatgtttttcaacaaagtc

SEQ ID NO: 1249697 - DNA, 25 bp, Homo sapien
cattatgtttttcaacaaagtccat

SEQ ID NO: 1249698 - DNA, 25 bp, Homo sapien
ttacacctaagttcagatcctggcc

SEQ ID NO: 1249699 - DNA, 25 bp, Homo sapien
gcaatggtttacacctaagttcaga

SEQ ID NO: 1249700 - DNA, 25 bp, Homo sapien
ccagggcaatggtttacacctaagt

SEQ ID NO: 1249701 - DNA, 25 bp, Homo sapien
cctaagttcagatcctggcccaaag

SEQ ID NO: 1249702 - DNA, 25 bp, Homo sapien
tcaaagtacacttatttggtggaag

SEQ ID NO: 1249703 - DNA, 25 bp, Homo sapien
tctgaggttctgatcaaagtacact

SEQ ID NO: 1249704 - DNA, 25 bp, Homo sapien
ccttccttcagcaaacactgtgtgc

SEQ ID NO: 1249705 - DNA, 25 bp, Homo sapien
aacactgtgtgctgaattaattcca

SEQ ID NO: 1249706 - DNA, 25 bp, Homo sapien
gattggtaccctggtgaatccccaa

SEQ ID NO: 1249707 - DNA, 25 bp, Homo sapien
gccactggcacggttgattggtacc

SEQ ID NO: 1249708 - DNA, 25 bp, Homo sapien
tggcacggttgattggtaccctggt

SEQ ID NO: 1249709 - DNA, 25 bp, Homo sapien
cacggttgattggtaccctggtgaa

SEQ ID NO: 1249710 - DNA, 25 bp, Homo sapien
cttttattagaggaattctccaagt

SEQ ID NO: 1249711 - DNA, 25 bp, Homo sapien
ttattagaggaattctccaagtgag

SEQ ID NO: 1249712 - DNA, 25 bp, Homo sapien
ctccaagtgagtttaagtccacagt

SEQ ID NO: 1249713 - DNA, 25 bp, Homo sapien
attctccaagtgagtttaagtccac

SEQ ID NO: 1249714 - DNA, 25 bp, Homo sapien
ctgtggctgtgcccattaacagcca

SEQ ID NO: 1249715 - DNA, 25 bp, Homo sapien
tgtggctgtgcccattaacagccac

SEQ ID NO: 1249716 - DNA, 25 bp, Homo sapien
gctgtgcccattaacagccactgac

SEQ ID NO: 1249717 - DNA, 25 bp, Homo sapien
tggctgtgcccattaacagccactg

SEQ ID NO: 1249718 - DNA, 25 bp, Homo sapien
tcttcggattcctgttgaatagagg

SEQ ID NO: 1249719 - DNA, 25 bp, Homo sapien
ctccactaggctcttcggattcctg

SEQ ID NO: 1249720 - DNA, 25 bp, Homo sapien
ttcggattcctgttgaatagaggaa

SEQ ID NO: 1249721 - DNA, 25 bp, Homo sapien
ctatactccactaggctcttcggat

SEQ ID NO: 1249722 - DNA, 25 bp, Homo sapien
taactgagacaaccagtcttcctgc

SEQ ID NO: 1249723 - DNA, 25 bp, Homo sapien
caatgtgccaggatggcattctctt

SEQ ID NO: 1249724 - DNA, 25 bp, Homo sapien
tgtctccctccctaaaggtgccatt

SEQ ID NO: 1249725 - DNA, 25 bp, Homo sapien
tcattctgcaatgtgccaggatggc

SEQ ID NO: 1249726 - DNA, 25 bp, Homo sapien
tctgagtgactcataaccaaaatat

SEQ ID NO: 1249727 - DNA, 25 bp, Homo sapien
cacagtcctctgagtgactcataac

SEQ ID NO: 1249728 - DNA, 25 bp, Homo sapien
atccacagtcctctgagtgactcat

SEQ ID NO: 1249729 - DNA, 25 bp, Homo sapien
gtcctctgagtgactcataaccaaa

SEQ ID NO: 1249730 - DNA, 25 bp, Homo sapien
gcatctgtgagtggaagcacatcaa

SEQ ID NO: 1249731 - DNA, 25 bp, Homo sapien
cataccggcgacactaatacatgtg

SEQ ID NO: 1249732 - DNA, 25 bp, Homo sapien
taatagatacagctcagcatgcctc

SEQ ID NO: 1249733 - DNA, 25 bp, Homo sapien
aagtttaagcttacattggcaccag

SEQ ID NO: 1249734 - DNA, 25 bp, Homo sapien
aagaaatgcaccctcaaagccttta

SEQ ID NO: 1249735 - DNA, 25 bp, Homo sapien
caagaaatgcaccctcaaagccttt

SEQ ID NO: 1249736 - DNA, 25 bp, Homo sapien
caccctcaaagcctttatgcccaaa

SEQ ID NO: 1249737 - DNA, 25 bp, Homo sapien
ctcaaagcctttatgcccaaaagct

SEQ ID NO: 1249738 - DNA, 25 bp, Homo sapien
cctcacaaagggacagcaacacagc

SEQ ID NO: 1249739 - DNA, 25 bp, Homo sapien
cacaaagggacagcaacacagcaac

SEQ ID NO: 1249740 - DNA, 25 bp, Homo sapien
aaccaggcctgtacccatgtccata

SEQ ID NO: 1249741 - DNA, 25 bp, Homo sapien
atgtccatagcatgtagattcttac

SEQ ID NO: 1249742 - DNA, 25 bp, Homo sapien
agggctagaagtatggcatgctgca

SEQ ID NO: 1249743 - DNA, 25 bp, Homo sapien
ttgaagggctagaagtatggcatgc

SEQ ID NO: 1249744 - DNA, 25 bp, Homo sapien
ctagaagtatggcatgctgcaggcc

SEQ ID NO: 1249745 - DNA, 25 bp, Homo sapien
tgcattgaagggctagaagtatggc

SEQ ID NO: 1249746 - DNA, 25 bp, Homo sapien
tggctaggaactccctccagttact

SEQ ID NO: 1249747 - DNA, 25 bp, Homo sapien
gaacagtatacgtctcctcgtttgt

SEQ ID NO: 1249748 - DNA, 25 bp, Homo sapien
ggaagatgataatggagtccttgca

SEQ ID NO: 1249749 - DNA, 25 bp, Homo sapien
cttgcgacgattgagagacaacgtg

SEQ ID NO: 1249750 - DNA, 25 bp, Homo sapien
gaggaatatctccttctcgtgcctg

SEQ ID NO: 1249751 - DNA, 25 bp, Homo sapien
aggaatatctccttctcgtgcctgc

SEQ ID NO: 1249752 - DNA, 25 bp, Homo sapien
ggaatatctccttctcgtgcctgca

SEQ ID NO: 1249753 - DNA, 25 bp, Homo sapien
gaatatctccttctcgtgcctgcat

SEQ ID NO: 1249754 - DNA, 25 bp, Homo sapien
tatcaacggggtccaaggattcttc

SEQ ID NO: 1249755 - DNA, 25 bp, Homo sapien
caaggattcttcagcagtcactggg

SEQ ID NO: 1249756 - DNA, 25 bp, Homo sapien
gaagaggactgaaattgtgaaatct

SEQ ID NO: 1249757 - DNA, 25 bp, Homo sapien
tcttttgaattggaatctcatctcc

SEQ ID NO: 1249758 - DNA, 25 bp, Homo sapien
tttgattttcttcacgcagaaggaa

SEQ ID NO: 1249759 - DNA, 25 bp, Homo sapien
tctaccgataaacttttcttgatta

SEQ ID NO: 1249760 - DNA, 25 bp, Homo sapien
ggtgatattactcagcatcctcatc

SEQ ID NO: 1249761 - DNA, 25 bp, Homo sapien
taaaactgctgggatatcaaactgg

SEQ ID NO: 1249762 - DNA, 25 bp, Homo sapien
aatgcagggattattcaagggctac

SEQ ID NO: 1249763 - DNA, 25 bp, Homo sapien
caatgcctgccatacagtgagtact

SEQ ID NO: 1249764 - DNA, 25 bp, Homo sapien
tgtgaaaatggctaaggtgaaccct

SEQ ID NO: 1249765 - DNA, 25 bp, Homo sapien
gaaccctaagccctaattatgtgaa

SEQ ID NO: 1249766 - DNA, 25 bp, Homo sapien
gaagtcaactctttcccggctcagg

SEQ ID NO: 1249767 - DNA, 25 bp, Homo sapien
tggtcagaaaggtcaccacgcgctg

SEQ ID NO: 1249768 - DNA, 25 bp, Homo sapien
tctgatcatcctgtgacagaatgtg

SEQ ID NO: 1249769 - DNA, 25 bp, Homo sapien
tcactgctctgtacagcacgtggag

SEQ ID NO: 1249770 - DNA, 25 bp, Homo sapien
aactatctgcaatggctgcaaatcc

SEQ ID NO: 1249771 - DNA, 25 bp, Homo sapien
tcccccattgtaccacttcagaaga

SEQ ID NO: 1249772 - DNA, 25 bp, Homo sapien
gaaaactatctgcaatggctgcaaa

SEQ ID NO: 1249773 - DNA, 25 bp, Homo sapien
agaagaaaactatctgcaatggctg

SEQ ID NO: 1249774 - DNA, 25 bp, Homo sapien
tctggcttaacgaacaaacagctgg

SEQ ID NO: 1249775 - DNA, 25 bp, Homo sapien
gcactctgcgtactacaatactgcc

SEQ ID NO: 1249776 - DNA, 25 bp, Homo sapien
tcttccatatctggcttaacgaaca

SEQ ID NO: 1249777 - DNA, 25 bp, Homo sapien
ccctcatgaatcctctggtcaagta

SEQ ID NO: 1249778 - DNA, 25 bp, Homo sapien
tccccttgtacctgcagacctttca

SEQ ID NO: 1249779 - DNA, 25 bp, Homo sapien
gcttccactccccttgtacctgcag

SEQ ID NO: 1249780 - DNA, 25 bp, Homo sapien
cactccccttgtacctgcagacctt

SEQ ID NO: 1249781 - DNA, 25 bp, Homo sapien
ttccactccccttgtacctgcagac

SEQ ID NO: 1249782 - DNA, 25 bp, Homo sapien
tcatggaacagaagggtgacatcaa

SEQ ID NO: 1249783 - DNA, 25 bp, Homo sapien
cagaagggtgacatcaattacatcc

SEQ ID NO: 1249784 - DNA, 25 bp, Homo sapien
tttgggtccgagtcatggaacagaa

SEQ ID NO: 1249785 - DNA, 25 bp, Homo sapien
catcaattacatccaggatgaggca

SEQ ID NO: 1249786 - DNA, 25 bp, Homo sapien
attaaaaatactaggagccaagatg

SEQ ID NO: 1249787 - DNA, 25 bp, Homo sapien
taattaaaaatactaggagccaaga

SEQ ID NO: 1249788 - DNA, 25 bp, Homo sapien
cagaccagcttaagaaacggcgcac

SEQ ID NO: 1249789 - DNA, 25 bp, Homo sapien
taaaaatactaggagccaagatggc

SEQ ID NO: 1249790 - DNA, 25 bp, Homo sapien
tagctgaagttctgactgtcattta

SEQ ID NO: 1249791 - DNA, 25 bp, Homo sapien
tttatttggccactaatcagaacac

SEQ ID NO: 1249792 - DNA, 25 bp, Homo sapien
cttagctgaagttctgactgtcatt

SEQ ID NO: 1249793 - DNA, 25 bp, Homo sapien
ttggccactaatcagaacacaagtg

SEQ ID NO: 1249794 - DNA, 25 bp, Homo sapien
tgggcttgccagagctcaagctcat

SEQ ID NO: 1249795 - DNA, 25 bp, Homo sapien
gatgatgggcttgccagagctcaag

SEQ ID NO: 1249796 - DNA, 25 bp, Homo sapien
tcctgctccagtatccccagttcgg

SEQ ID NO: 1249797 - DNA, 25 bp, Homo sapien
agtatccccagttcggcttttgttg

SEQ ID NO: 1249798 - DNA, 25 bp, Homo sapien
ttctagatgaacaattagtgcatcc

SEQ ID NO: 1249799 - DNA, 25 bp, Homo sapien
caattagtgcatccaactgcttatt

SEQ ID NO: 1249800 - DNA, 25 bp, Homo sapien
tcttgttatacttcctctcaaaacc

SEQ ID NO: 1249801 - DNA, 25 bp, Homo sapien
ctcttgtgttgtccacactctcttg

SEQ ID NO: 1249802 - DNA, 25 bp, Homo sapien
caatctatcaattggcttccattcc

SEQ ID NO: 1249803 - DNA, 25 bp, Homo sapien
gaacaatctatcaattggcttccat

SEQ ID NO: 1249804 - DNA, 25 bp, Homo sapien
tgtgaacaatctatcaattggcttc

SEQ ID NO: 1249805 - DNA, 25 bp, Homo sapien
ctgtgaacaatctatcaattggctt

SEQ ID NO: 1249806 - DNA, 25 bp, Homo sapien
cctgtgacagtcccttccactgcct

SEQ ID NO: 1249807 - DNA, 25 bp, Homo sapien
tggtgaccctgtgacagtcccttcc

SEQ ID NO: 1249808 - DNA, 25 bp, Homo sapien
ccttccactgcctcagttctttcca

SEQ ID NO: 1249809 - DNA, 25 bp, Homo sapien
gacagtcccttccactgcctcagtt

SEQ ID NO: 1249810 - DNA, 25 bp, Homo sapien
cccagggccaaccataaaagtcttg

SEQ ID NO: 1249811 - DNA, 25 bp, Homo sapien
tctctcccaagattctgtttatccc

SEQ ID NO: 1249812 - DNA, 25 bp, Homo sapien
gattctgtttatcccccagggccaa

SEQ ID NO: 1249813 - DNA, 25 bp, Homo sapien
gccaaccataaaagtcttgactctg

SEQ ID NO: 1249814 - DNA, 25 bp, Homo sapien
cagtatgtgactattcatcatagga

SEQ ID NO: 1249815 - DNA, 25 bp, Homo sapien
gaattgaaccgtcaaggtccctcaa

SEQ ID NO: 1249816 - DNA, 25 bp, Homo sapien
tacgaggcctaagcaagaggattgc

SEQ ID NO: 1249817 - DNA, 25 bp, Homo sapien
tccaatcctgtgcaactgagtttcc

SEQ ID NO: 1249818 - DNA, 25 bp, Homo sapien
gactcactgcagtgtccactttctg

SEQ ID NO: 1249819 - DNA, 25 bp, Homo sapien
atgactcactgcagtgtccactttc

SEQ ID NO: 1249820 - DNA, 25 bp, Homo sapien
gattatagatgcatatcaccacacc

SEQ ID NO: 1249821 - DNA, 25 bp, Homo sapien
tagatgcatatcaccacaccagcta

SEQ ID NO: 1249822 - DNA, 25 bp, Homo sapien
attttggcagagtacttagttgttc

SEQ ID NO: 1249823 - DNA, 25 bp, Homo sapien
ggcagagtacttagttgttctttgg

SEQ ID NO: 1249824 - DNA, 25 bp, Homo sapien
cagagtacttagttgttctttggcc

SEQ ID NO: 1249825 - DNA, 25 bp, Homo sapien
aaaattttggcagagtacttagttg

SEQ ID NO: 1249826 - DNA, 25 bp, Homo sapien
tgtgttgagtcatcaaagcgcataa

SEQ ID NO: 1249827 - DNA, 25 bp, Homo sapien
tgagtcatcaaagcgcataactgct

SEQ ID NO: 1249828 - DNA, 25 bp, Homo sapien
caaagcgcataactgctgaaccttc

SEQ ID NO: 1249829 - DNA, 25 bp, Homo sapien
actgctgaaccttctttgttagctc

SEQ ID NO: 1249830 - DNA, 25 bp, Homo sapien
ggagcatcaaaccaatacaatgtgt

SEQ ID NO: 1249831 - DNA, 25 bp, Homo sapien
aattgtgctgtatgttgaactttcc

SEQ ID NO: 1249832 - DNA, 25 bp, Homo sapien
agaaagagaccaggtgccacgccac

SEQ ID NO: 1249833 - DNA, 25 bp, Homo sapien
tgttccaggtaggagcatcaaacca

SEQ ID NO: 1249834 - DNA, 25 bp, Homo sapien
tcgtgatattcattaaagccgaaat

SEQ ID NO: 1249835 - DNA, 25 bp, Homo sapien
catgaatcgtgatattcattaaagc

SEQ ID NO: 1249836 - DNA, 25 bp, Homo sapien
gaatcgtgatattcattaaagccga

SEQ ID NO: 1249837 - DNA, 25 bp, Homo sapien
tgatattcattaaagccgaaatgcc

SEQ ID NO: 1249838 - DNA, 25 bp, Homo sapien
cccaatgcacgagaggagcaggaac

SEQ ID NO: 1249839 - DNA, 25 bp, Homo sapien
aaactcccgggaagaatatatgact

SEQ ID NO: 1249840 - DNA, 25 bp, Homo sapien
tggcagaatacaaacgactatgggt

SEQ ID NO: 1249841 - DNA, 25 bp, Homo sapien
cagttttgagaggtaccacaaccca

SEQ ID NO: 1249842 - DNA, 25 bp, Homo sapien
catcctcccttgatataaatgccag

SEQ ID NO: 1249843 - DNA, 25 bp, Homo sapien
cccttgatataaatgccagaactga

SEQ ID NO: 1249844 - DNA, 25 bp, Homo sapien
tcccttgatataaatgccagaactg

SEQ ID NO: 1249845 - DNA, 25 bp, Homo sapien
tcctcccttgatataaatgccagaa

SEQ ID NO: 1249846 - DNA, 25 bp, Homo sapien
tagtgtgtgaggacatgcaatctcc

SEQ ID NO: 1249847 - DNA, 25 bp, Homo sapien
gacggaacctggaattgactcacat

SEQ ID NO: 1249848 - DNA, 25 bp, Homo sapien
tggcaactcccaaatgtgacggaac

SEQ ID NO: 1249849 - DNA, 25 bp, Homo sapien
taacagattgctaggtgacagtcat

SEQ ID NO: 1249850 - DNA, 25 bp, Homo sapien
caccctagtaggttgcatttcaatc

SEQ ID NO: 1249851 - DNA, 25 bp, Homo sapien
gcttgtcatgtttcaccctagtagg

SEQ ID NO: 1249852 - DNA, 25 bp, Homo sapien
tctgcgcagtgttcaatgaaccgct

SEQ ID NO: 1249853 - DNA, 25 bp, Homo sapien
gggatgttataacatgcactgtcat

SEQ ID NO: 1249854 - DNA, 25 bp, Homo sapien
tgactccccttcaaacttactagct

SEQ ID NO: 1249855 - DNA, 25 bp, Homo sapien
agatgtactgttagttaccaactgc

SEQ ID NO: 1249856 - DNA, 25 bp, Homo sapien
ttcttcagccttgcgtataatgcct

SEQ ID NO: 1249857 - DNA, 25 bp, Homo sapien
cttcaaacttactagctcatgagga

SEQ ID NO: 1249858 - DNA, 25 bp, Homo sapien
cttcagtggacacatgctgaaaatg

SEQ ID NO: 1249859 - DNA, 25 bp, Homo sapien
cccagtaattccttacgtatacagg

SEQ ID NO: 1249860 - DNA, 25 bp, Homo sapien
gtaattccttacgtatacaggtcag

SEQ ID NO: 1249861 - DNA, 25 bp, Homo sapien
tgacccagtaattccttacgtatac

SEQ ID NO: 1249862 - DNA, 25 bp, Homo sapien
tctgacttctgtaatgcttctctca

SEQ ID NO: 1249863 - DNA, 25 bp, Homo sapien
aaaaagtcattttgacccttgctga

SEQ ID NO: 1249864 - DNA, 25 bp, Homo sapien
gcttctctcatgttctctttaaaaa

SEQ ID NO: 1249865 - DNA, 25 bp, Homo sapien
ctgaaagcaaaaggtgaggtctttt

SEQ ID NO: 1249866 - DNA, 25 bp, Homo sapien
cacatgtgggaaggtatccgtcagt

SEQ ID NO: 1249867 - DNA, 25 bp, Homo sapien
cactccaaggaacacatgtgggaag

SEQ ID NO: 1249868 - DNA, 25 bp, Homo sapien
cactggccttaatgaagcctgcatc

SEQ ID NO: 1249869 - DNA, 25 bp, Homo sapien
ggtttgcaaatacacgacacacgag

SEQ ID NO: 1249870 - DNA, 25 bp, Homo sapien
gatgtcaggtatatatctacagata

SEQ ID NO: 1249871 - DNA, 25 bp, Homo sapien
cacttgccccttattaatggaactt

SEQ ID NO: 1249872 - DNA, 25 bp, Homo sapien
tcaattatctcccttcgttcataag

SEQ ID NO: 1249873 - DNA, 25 bp, Homo sapien
gttcataagtctttgagacaacggg

SEQ ID NO: 1249874 - DNA, 25 bp, Homo sapien
ccttttccagaataatggctcagga

SEQ ID NO: 1249875 - DNA, 25 bp, Homo sapien
gattctgactgcatcgtaagagaga

SEQ ID NO: 1249876 - DNA, 25 bp, Homo sapien
tgcagataacgggtgtgtatacact

SEQ ID NO: 1249877 - DNA, 25 bp, Homo sapien
caggaaatgtgcaccatggagtggc

SEQ ID NO: 1249878 - DNA, 25 bp, Homo sapien
tatcccgtatgtagtcctgatgagc

SEQ ID NO: 1249879 - DNA, 25 bp, Homo sapien
ctagtgcaatcaggtcaggagtgga

SEQ ID NO: 1249880 - DNA, 25 bp, Homo sapien
caatggctggacatatggctgccta

SEQ ID NO: 1249881 - DNA, 25 bp, Homo sapien
gatgggcgctgcttccatgtctgac

SEQ ID NO: 1249882 - DNA, 25 bp, Homo sapien
cccagatactgcaattgaaacacgt

SEQ ID NO: 1249883 - DNA, 25 bp, Homo sapien
aatgattggtgggtcaacatgcaaa

SEQ ID NO: 1249884 - DNA, 25 bp, Homo sapien
aaagtataagctcccttagggcagg

SEQ ID NO: 1249885 - DNA, 25 bp, Homo sapien
tgaaacacgtttgcatataagtctc

SEQ ID NO: 1249886 - DNA, 25 bp, Homo sapien
cagtgtagtgtaaggtgaaaggcaa

SEQ ID NO: 1249887 - DNA, 25 bp, Homo sapien
tgtcctactcttgatgcaaaacata

SEQ ID NO: 1249888 - DNA, 25 bp, Homo sapien
ttttcattactgtgtattgtcctac

SEQ ID NO: 1249889 - DNA, 25 bp, Homo sapien
gcaaaacatatcagtgtagtgtaag

SEQ ID NO: 1249890 - DNA, 25 bp, Homo sapien
ttgtaactttgcagcgtgccactct

SEQ ID NO: 1249891 - DNA, 25 bp, Homo sapien
ggcagtatctctagggagtatattt

SEQ ID NO: 1249892 - DNA, 25 bp, Homo sapien
gacttgtgagttccaccacaggcca

SEQ ID NO: 1249893 - DNA, 25 bp, Homo sapien
ctgtgggtggccttgaatttgtaac

SEQ ID NO: 1249894 - DNA, 25 bp, Homo sapien
cagaggagtggaccagatgtcaggc

SEQ ID NO: 1249895 - DNA, 25 bp, Homo sapien
cagtgacataatctctacggtcatg

SEQ ID NO: 1249896 - DNA, 25 bp, Homo sapien
tgatgatcccggcataggacagagg

SEQ ID NO: 1249897 - DNA, 25 bp, Homo sapien
taacaaggatgcaaaacagtgacat

SEQ ID NO: 1249898 - DNA, 25 bp, Homo sapien
aaccgaagctcagaagggccaaaat

SEQ ID NO: 1249899 - DNA, 25 bp, Homo sapien
cagatctagccctcatagtgtgcat

SEQ ID NO: 1249900 - DNA, 25 bp, Homo sapien
tgcagcaggtcacatatagtcacag

SEQ ID NO: 1249901 - DNA, 25 bp, Homo sapien
gcattgatattctagctcccaggtg

SEQ ID NO: 1249902 - DNA, 25 bp, Homo sapien
cgaaatgttacatggcactgcccct

SEQ ID NO: 1249903 - DNA, 25 bp, Homo sapien
tgtaggagcctagcggtgtccacag

SEQ ID NO: 1249904 - DNA, 25 bp, Homo sapien
tcttggagacatgtgacagagcagt

SEQ ID NO: 1249905 - DNA, 25 bp, Homo sapien
gaaatgaccgagtcagcgtctcctg

SEQ ID NO: 1249906 - DNA, 25 bp, Homo sapien
acaccaagcctgagtctagactata

SEQ ID NO: 1249907 - DNA, 25 bp, Homo sapien
ccaagcctgagtctagactatattc

SEQ ID NO: 1249908 - DNA, 25 bp, Homo sapien
agcctgagtctagactatattcatc

SEQ ID NO: 1249909 - DNA, 25 bp, Homo sapien
ggacaccaagcctgagtctagacta

SEQ ID NO: 1249910 - DNA, 25 bp, Homo sapien
ggccaaaatcccatgaatacccctg

SEQ ID NO: 1249911 - DNA, 25 bp, Homo sapien
gagcatgcatggaaggttgtcccct

SEQ ID NO: 1249912 - DNA, 25 bp, Homo sapien
gcaggaattcctcggcttggtcaca

SEQ ID NO: 1249913 - DNA, 25 bp, Homo sapien
tacccctgggtctgaaagtattagc

SEQ ID NO: 1249914 - DNA, 25 bp, Homo sapien
acatgctacttctatgtcagcaatt

SEQ ID NO: 1249915 - DNA, 25 bp, Homo sapien
tatgtcagcaattaaagtctttttt

SEQ ID NO: 1249916 - DNA, 25 bp, Homo sapien
ctctttctggggggaagaacatgct

SEQ ID NO: 1249917 - DNA, 25 bp, Homo sapien
ttctggggggaagaacatgctactt

SEQ ID NO: 1249918 - DNA, 25 bp, Homo sapien
tcaaccttacatcctatcccttccg

SEQ ID NO: 1249919 - DNA, 25 bp, Homo sapien
ttcccatgtggttcaaccttacatc

SEQ ID NO: 1249920 - DNA, 25 bp, Homo sapien
cttacatcctatcccttccgccttt

SEQ ID NO: 1249921 - DNA, 25 bp, Homo sapien
tttcccatgtggttcaaccttacat

SEQ ID NO: 1249922 - DNA, 25 bp, Homo sapien
tctacgagatgataggaaagccttt

SEQ ID NO: 1249923 - DNA, 25 bp, Homo sapien
ccccaagaaggtgtcagatgttgct

SEQ ID NO: 1249924 - DNA, 25 bp, Homo sapien
aactaagttctaggccactgctgag

SEQ ID NO: 1249925 - DNA, 25 bp, Homo sapien
gcagatggctgcaacactttctata

SEQ ID NO: 1249926 - DNA, 25 bp, Homo sapien
aaataacagactgactcagtgggcc

SEQ ID NO: 1249927 - DNA, 25 bp, Homo sapien
cagcacttctcaaacatcacgatgc

SEQ ID NO: 1249928 - DNA, 25 bp, Homo sapien
tttattggagttgaattggacctgc

SEQ ID NO: 1249929 - DNA, 25 bp, Homo sapien
gacctgctgtctcatgtttctgctg

SEQ ID NO: 1249930 - DNA, 25 bp, Homo sapien
aagacctatggtaattgcacaaaca

SEQ ID NO: 1249931 - DNA, 25 bp, Homo sapien
gacctagctgaggtgaaacaaagac

SEQ ID NO: 1249932 - DNA, 25 bp, Homo sapien
taagagagcctctggcatcgctaaa

SEQ ID NO: 1249933 - DNA, 25 bp, Homo sapien
tctaagatttcagacaggtggcaat

SEQ ID NO: 1249934 - DNA, 25 bp, Homo sapien
taagtaacaggataggctctgagta

SEQ ID NO: 1249935 - DNA, 25 bp, Homo sapien
tttattcttcccataagtaacagga

SEQ ID NO: 1249936 - DNA, 25 bp, Homo sapien
taacaggataggctctgagtagagc

SEQ ID NO: 1249937 - DNA, 25 bp, Homo sapien
tcccataagtaacaggataggctct

SEQ ID NO: 1249938 - DNA, 25 bp, Homo sapien
tggtcccgttttatgctcctccttg

SEQ ID NO: 1249939 - DNA, 25 bp, Homo sapien
aattaagtgtttggtgctgggtgcc

SEQ ID NO: 1249940 - DNA, 25 bp, Homo sapien
cacgggcacacttgcagtgggcttt

SEQ ID NO: 1249941 - DNA, 25 bp, Homo sapien
tctttacagtgtgtgcgattcaagg

SEQ ID NO: 1249942 - DNA, 25 bp, Homo sapien
gcagggaacacgtctcaaagcgagg

SEQ ID NO: 1249943 - DNA, 25 bp, Homo sapien
aagtgaatctggctttcaggtatgc

SEQ ID NO: 1249944 - DNA, 25 bp, Homo sapien
ggaagagcagcacgtccccgccagt

SEQ ID NO: 1249945 - DNA, 25 bp, Homo sapien
gtaaagcacaaaatcgcctctgtag

SEQ ID NO: 1249946 - DNA, 25 bp, Homo sapien
cattttcataagtataatgtttacc

SEQ ID NO: 1249947 - DNA, 25 bp, Homo sapien
tacttcctgctgatatttggacatt

SEQ ID NO: 1249948 - DNA, 25 bp, Homo sapien
attcggatttttctacttcctgctg

SEQ ID NO: 1249949 - DNA, 25 bp, Homo sapien
ttcataagtataatgtttaccctta

SEQ ID NO: 1249950 - DNA, 25 bp, Homo sapien
agtacttctctaaggggactggaga

SEQ ID NO: 1249951 - DNA, 25 bp, Homo sapien
attctgcacactgggcgctgccagg

SEQ ID NO: 1249952 - DNA, 25 bp, Homo sapien
gctttcattgctgccggattctgca

SEQ ID NO: 1249953 - DNA, 25 bp, Homo sapien
tttgttctggatcagcaagtacttc

SEQ ID NO: 1249954 - DNA, 25 bp, Homo sapien
accagctgtgtgtgaccgtggaggg

SEQ ID NO: 1249955 - DNA, 25 bp, Homo sapien
ggagggagagacttctattgcagca

SEQ ID NO: 1249956 - DNA, 25 bp, Homo sapien
taactatgtccagtgtcattgtagc

SEQ ID NO: 1249957 - DNA, 25 bp, Homo sapien
cagctgtgtgtgaccgtggagggac

SEQ ID NO: 1249958 - DNA, 25 bp, Homo sapien
tcatcaaggtttgggtacgagagaa

SEQ ID NO: 1249959 - DNA, 25 bp, Homo sapien
gatgttacgctctccatggccactg

SEQ ID NO: 1249960 - DNA, 25 bp, Homo sapien
tagaatccatatccgtcagggttgg

SEQ ID NO: 1249961 - DNA, 25 bp, Homo sapien
tcagtgcacataacccaaagcagta

SEQ ID NO: 1249962 - DNA, 25 bp, Homo sapien
cagaaaggttctgagactgggccag

SEQ ID NO: 1249963 - DNA, 25 bp, Homo sapien
tcagcatcagtgaggccaatacaaa

SEQ ID NO: 1249964 - DNA, 25 bp, Homo sapien
catgccctagaggtaatcactggta

SEQ ID NO: 1249965 - DNA, 25 bp, Homo sapien
taaaccaaagccgtctgatccaaga

SEQ ID NO: 1249966 - DNA, 25 bp, Homo sapien
gcttcaacctctactgctgcagaga

SEQ ID NO: 1249967 - DNA, 25 bp, Homo sapien
tcttcaaatgtccatctggtcatgg

SEQ ID NO: 1249968 - DNA, 25 bp, Homo sapien
ctggtcatggacacaatccagctag

SEQ ID NO: 1249969 - DNA, 25 bp, Homo sapien
aagaggtgagttctccgtaaacaca

SEQ ID NO: 1249970 - DNA, 25 bp, Homo sapien
tgatgaaggcaagcaagatcgcact

SEQ ID NO: 1249971 - DNA, 25 bp, Homo sapien
aactgaatgaagcactctcccggag

SEQ ID NO: 1249972 - DNA, 25 bp, Homo sapien
cagacggtatgacctcccagagggt

SEQ ID NO: 1249973 - DNA, 25 bp, Homo sapien
gccaggatgcccgttaagaaagcga

SEQ ID NO: 1249974 - DNA, 25 bp, Homo sapien
cgggtgcgcgcttgtgaaaaatgac

SEQ ID NO: 1249975 - DNA, 25 bp, Homo sapien
ctcgggtgcgcgcttgtgaaaaatg

SEQ ID NO: 1249976 - DNA, 25 bp, Homo sapien
tcgggtgcgcgcttgtgaaaaatga

SEQ ID NO: 1249977 - DNA, 25 bp, Homo sapien
gacaggaagctctattgggacaaga

SEQ ID NO: 1249978 - DNA, 25 bp, Homo sapien
gaactgggtcagctatgctcatctg

SEQ ID NO: 1249979 - DNA, 25 bp, Homo sapien
gggccccgatttagctctgttgaga

SEQ ID NO: 1249980 - DNA, 25 bp, Homo sapien
gaaccacagattcgtaagcctgcag

SEQ ID NO: 1249981 - DNA, 25 bp, Homo sapien
aaagggaagatatctccgcggccct

SEQ ID NO: 1249982 - DNA, 25 bp, Homo sapien
gctgattaacaaaggtgcaagccct

SEQ ID NO: 1249983 - DNA, 25 bp, Homo sapien
ggacaccatggctgacgactgaaga

SEQ ID NO: 1249984 - DNA, 25 bp, Homo sapien
tctgggttcacaacacgaatgccct

SEQ ID NO: 1249985 - DNA, 25 bp, Homo sapien
gacattctgtagtttgctgtgtaca

SEQ ID NO: 1249986 - DNA, 25 bp, Homo sapien
tgtgtacatattagaaaatcgtctg

SEQ ID NO: 1249987 - DNA, 25 bp, Homo sapien
gttgaatgtgggcccaaaaaaatca

SEQ ID NO: 1249988 - DNA, 25 bp, Homo sapien
cacaggtggataatatgacattctg

SEQ ID NO: 1249989 - DNA, 25 bp, Homo sapien
gtgccaggccaacttgagaaataaa

SEQ ID NO: 1249990 - DNA, 25 bp, Homo sapien
agaaataaaatatagatgcaattgc

SEQ ID NO: 1249991 - DNA, 25 bp, Homo sapien
ataaaatatagatgcaattgcttac

SEQ ID NO: 1249992 - DNA, 25 bp, Homo sapien
aaataaaatatagatgcaattgctt

SEQ ID NO: 1249993 - DNA, 25 bp, Homo sapien
tagggaggactagcatagaggccac

SEQ ID NO: 1249994 - DNA, 25 bp, Homo sapien
tgcacgagggcaacgtaggaagcct

SEQ ID NO: 1249995 - DNA, 25 bp, Homo sapien
aaaatatgtagagagtcaaggctgg

SEQ ID NO: 1249996 - DNA, 25 bp, Homo sapien
cagcagggtctaacgcttaggcttc

SEQ ID NO: 1249997 - DNA, 25 bp, Homo sapien
tagacttctccgctgtgacagagcc

SEQ ID NO: 1249998 - DNA, 25 bp, Homo sapien
agcttctctctcgatacatgaaggg

SEQ ID NO: 1249999 - DNA, 25 bp, Homo sapien
gacaccctgactgatccctggaatc

SEQ ID NO: 1250000 - DNA, 25 bp, Homo sapien
gaaacagccaactgtgcatcagagc

SEQ ID NO: 1250001 - DNA, 25 bp, Homo sapien
gacctcagttttgaccgatttggca

SEQ ID NO: 1250002 - DNA, 25 bp, Homo sapien
gtttaggttaagtgacaagcattcc

SEQ ID NO: 1250003 - DNA, 25 bp, Homo sapien
tcctaaggacatgtaactaagcagt

SEQ ID NO: 1250004 - DNA, 25 bp, Homo sapien
aaggcaaattagagaagcttcggtg

SEQ ID NO: 1250005 - DNA, 25 bp, Homo sapien
tctctgcgcgaagctgtgaacgtga

SEQ ID NO: 1250006 - DNA, 25 bp, Homo sapien
tgacacacctgaaatgcctactgag

SEQ ID NO: 1250007 - DNA, 25 bp, Homo sapien
tgagccgtacaacaaaacactgtgc

SEQ ID NO: 1250008 - DNA, 25 bp, Homo sapien
taagcagacgcccagaggaagtttg

SEQ ID NO: 1250009 - DNA, 25 bp, Homo sapien
caggagtggaacctcgaatagtgtc

SEQ ID NO: 1250010 - DNA, 25 bp, Homo sapien
caaggaggctctgcattttgctgcc

SEQ ID NO: 1250011 - DNA, 25 bp, Homo sapien
aaaagctgatgcataggtgtctggc

SEQ ID NO: 1250012 - DNA, 25 bp, Homo sapien
tagtgtcagtagaagtaaagtctgc

SEQ ID NO: 1250013 - DNA, 25 bp, Homo sapien
cacttgacttggattgcagcattat

SEQ ID NO: 1250014 - DNA, 25 bp, Homo sapien
gcagcattatcccaactccagttgg

SEQ ID NO: 1250015 - DNA, 25 bp, Homo sapien
gacttggattgcagcattatcccaa

SEQ ID NO: 1250016 - DNA, 25 bp, Homo sapien
tatcccaactccagttggaagacgc

SEQ ID NO: 1250017 - DNA, 25 bp, Homo sapien
tttggtgccggaactggatctggtg

SEQ ID NO: 1250018 - DNA, 25 bp, Homo sapien
tgacttcgtgttcggtttggtgccg

SEQ ID NO: 1250019 - DNA, 25 bp, Homo sapien
agttgcacgccctgcaagcccaggc

SEQ ID NO: 1250020 - DNA, 25 bp, Homo sapien
ctgccctcccagcaccgctcagttg

SEQ ID NO: 1250021 - DNA, 25 bp, Homo sapien
catctatatcaacatacttttccaa

SEQ ID NO: 1250022 - DNA, 25 bp, Homo sapien
agcatctatatcaacatacttttcc

SEQ ID NO: 1250023 - DNA, 25 bp, Homo sapien
tccagcatctatatcaacatacttt

SEQ ID NO: 1250024 - DNA, 25 bp, Homo sapien
ctttccagcatctatatcaacatac

SEQ ID NO: 1250025 - DNA, 25 bp, Homo sapien
ttggcctggcccaagccaatggtat

SEQ ID NO: 1250026 - DNA, 25 bp, Homo sapien
cttggcctggcccaagccaatggta

SEQ ID NO: 1250027 - DNA, 25 bp, Homo sapien
tggcctggcccaagccaatggtata

SEQ ID NO: 1250028 - DNA, 25 bp, Homo sapien
gagagttgatctcttctccatgtgt

SEQ ID NO: 1250029 - DNA, 25 bp, Homo sapien
tgcaaagagagttgatctcttctcc

SEQ ID NO: 1250030 - DNA, 25 bp, Homo sapien
ctcttctccatgtgtgcaggagccc

SEQ ID NO: 1250031 - DNA, 25 bp, Homo sapien
caaagagagttgatctcttctccat

SEQ ID NO: 1250032 - DNA, 25 bp, Homo sapien
cttccagtcggccagtgcaatcgta

SEQ ID NO: 1250033 - DNA, 25 bp, Homo sapien
tgttccaacttccagtcggccagtg

SEQ ID NO: 1250034 - DNA, 25 bp, Homo sapien
cagtcggccagtgcaatcgtaggaa

SEQ ID NO: 1250035 - DNA, 25 bp, Homo sapien
ccagtgcaatcgtaggaaagatttt

SEQ ID NO: 1250036 - DNA, 25 bp, Homo sapien
cctgtcagtctaacttttcctgtgg

SEQ ID NO: 1250037 - DNA, 25 bp, Homo sapien
acctgtcagtctaacttttcctgtg

SEQ ID NO: 1250038 - DNA, 25 bp, Homo sapien
ctacctgtcagtctaacttttcctg

SEQ ID NO: 1250039 - DNA, 25 bp, Homo sapien
tacctgtcagtctaacttttcctgt

SEQ ID NO: 1250040 - DNA, 25 bp, Homo sapien
gcagtcgacagaatagcagtgatct

SEQ ID NO: 1250041 - DNA, 25 bp, Homo sapien
aaaagccataggcacgttgcatatg

SEQ ID NO: 1250042 - DNA, 25 bp, Homo sapien
gcagtgatctaatgcactgaagcag

SEQ ID NO: 1250043 - DNA, 25 bp, Homo sapien
actgggcacggatcgttttgcagtc

SEQ ID NO: 1250044 - DNA, 25 bp, Homo sapien
tattcaaggtaaaatctttatcatt

SEQ ID NO: 1250045 - DNA, 25 bp, Homo sapien
cagtttacaatatggtgagtgaagg

SEQ ID NO: 1250046 - DNA, 25 bp, Homo sapien
tcaagaagccaaaattattcaaggt

SEQ ID NO: 1250047 - DNA, 25 bp, Homo sapien
tggtgagtgaaggatcaagaagcca

SEQ ID NO: 1250048 - DNA, 25 bp, Homo sapien
cacatctgtatcaaaatagatgtct

SEQ ID NO: 1250049 - DNA, 25 bp, Homo sapien
catctccacatctgtatcaaaatag

SEQ ID NO: 1250050 - DNA, 25 bp, Homo sapien
gttcggaactatccttcataaatgc

SEQ ID NO: 1250051 - DNA, 25 bp, Homo sapien
ctgatgggagagttcggaactatcc

SEQ ID NO: 1250052 - DNA, 25 bp, Homo sapien
gagtcttggcactgtcttagcaggg

SEQ ID NO: 1250053 - DNA, 25 bp, Homo sapien
tctggtaccacacaagttcttgagc

SEQ ID NO: 1250054 - DNA, 25 bp, Homo sapien
caacagcagaccatggtgtggcatc

SEQ ID NO: 1250055 - DNA, 25 bp, Homo sapien
ggctgaaccagaaccgtacgagaac

SEQ ID NO: 1250056 - DNA, 25 bp, Homo sapien
aaaattgggatatgatctaactgca

SEQ ID NO: 1250057 - DNA, 25 bp, Homo sapien
gaatgttgtcttttgctgacgccaa

SEQ ID NO: 1250058 - DNA, 25 bp, Homo sapien
gatctaactgcaagcccatagcaat

SEQ ID NO: 1250059 - DNA, 25 bp, Homo sapien
catagcaatgtctaaatttgaatgt

SEQ ID NO: 1250060 - DNA, 25 bp, Homo sapien
gtccccagggatactttgacctcca

SEQ ID NO: 1250061 - DNA, 25 bp, Homo sapien
tccccagggatactttgacctccat

SEQ ID NO: 1250062 - DNA, 25 bp, Homo sapien
attgtccccagggatactttgacct

SEQ ID NO: 1250063 - DNA, 25 bp, Homo sapien
tgtccccagggatactttgacctcc

SEQ ID NO: 1250064 - DNA, 25 bp, Homo sapien
tgccagagcgggccttcccctcagg

SEQ ID NO: 1250065 - DNA, 25 bp, Homo sapien
gtctgtccaagtgggctcacaggca

SEQ ID NO: 1250066 - DNA, 25 bp, Homo sapien
ggtctgtccaagtgggctcacaggc

SEQ ID NO: 1250067 - DNA, 25 bp, Homo sapien
tgggtctgtccaagtgggctcacag

SEQ ID NO: 1250068 - DNA, 25 bp, Homo sapien
tgcacacataaccttgtgtcacaga

SEQ ID NO: 1250069 - DNA, 25 bp, Homo sapien
ccctgactgcacacataaccttgtg

SEQ ID NO: 1250070 - DNA, 25 bp, Homo sapien
tgactgcacacataaccttgtgtca

SEQ ID NO: 1250071 - DNA, 25 bp, Homo sapien
cataaccttgtgtcacagatgtcca

SEQ ID NO: 1250072 - DNA, 25 bp, Homo sapien
tgttggtagcatgaggctgctgccc

SEQ ID NO: 1250073 - DNA, 25 bp, Homo sapien
tcctgcctcgagttcagtaaaggca

SEQ ID NO: 1250074 - DNA, 25 bp, Homo sapien
gcttgcccctgttggtagcatgagg

SEQ ID NO: 1250075 - DNA, 25 bp, Homo sapien
gagtagagggcctgttgaccagctc

SEQ ID NO: 1250076 - DNA, 25 bp, Homo sapien
tctcattgatcataatctccagggc

SEQ ID NO: 1250077 - DNA, 25 bp, Homo sapien
gcaaacagtgctaacagatctttcc

SEQ ID NO: 1250078 - DNA, 25 bp, Homo sapien
tgtgtattgcctgattgctttctct

SEQ ID NO: 1250079 - DNA, 25 bp, Homo sapien
tccttaagtcaccaaacatgattgc

SEQ ID NO: 1250080 - DNA, 25 bp, Homo sapien
caatgggaccccactaatatgccta

SEQ ID NO: 1250081 - DNA, 25 bp, Homo sapien
cgcaatgggaccccactaatatgcc

SEQ ID NO: 1250082 - DNA, 25 bp, Homo sapien
cccgcaatgggaccccactaatatg

SEQ ID NO: 1250083 - DNA, 25 bp, Homo sapien
ccccgcaatgggaccccactaatat

SEQ ID NO: 1250084 - DNA, 25 bp, Homo sapien
gacccatggtccacaagtaggaaga

SEQ ID NO: 1250085 - DNA, 25 bp, Homo sapien
gatgctgatgtttcaactggttgac

SEQ ID NO: 1250086 - DNA, 25 bp, Homo sapien
caactggttgacattgtccttaaga

SEQ ID NO: 1250087 - DNA, 25 bp, Homo sapien
aggaactgacccatggtccacaagt

SEQ ID NO: 1250088 - DNA, 25 bp, Homo sapien
agttagctttgaaaatagggatgca

SEQ ID NO: 1250089 - DNA, 25 bp, Homo sapien
aaatagggatgcaatgtgccgaatc

SEQ ID NO: 1250090 - DNA, 25 bp, Homo sapien
tgcaatgtgccgaatcgacctcacc

SEQ ID NO: 1250091 - DNA, 25 bp, Homo sapien
tgcccttaagttagctttgaaaata

SEQ ID NO: 1250092 - DNA, 25 bp, Homo sapien
ctgcgtaggtgggtgggtgggagcg

SEQ ID NO: 1250093 - DNA, 25 bp, Homo sapien
tgcgtaggtgggtgggtgggagcgg

SEQ ID NO: 1250094 - DNA, 25 bp, Homo sapien
gacatccgcgtagactcgcccttta

SEQ ID NO: 1250095 - DNA, 25 bp, Homo sapien
tcggcgagtcgcaaggccgccaggg

SEQ ID NO: 1250096 - DNA, 25 bp, Homo sapien
acgaggttccgcaggtcggcgagtc

SEQ ID NO: 1250097 - DNA, 25 bp, Homo sapien
tgtgagggcggcgacgaggttccgc

SEQ ID NO: 1250098 - DNA, 25 bp, Homo sapien
gtggccagcgcagccgggattcgga

SEQ ID NO: 1250099 - DNA, 25 bp, Homo sapien
cgccgtgcgggtggcggagcggccg

SEQ ID NO: 1250100 - DNA, 25 bp, Homo sapien
cccgcgaatccccagccggagcagc

SEQ ID NO: 1250101 - DNA, 25 bp, Homo sapien
gccgccccgcgcgtggaggagcgtg

SEQ ID NO: 1250102 - DNA, 25 bp, Homo sapien
ttatctggagaacaggcgcggtcac

SEQ ID NO: 1250103 - DNA, 25 bp, Homo sapien
aaattatctggagaacaggcgcggt

SEQ ID NO: 1250104 - DNA, 25 bp, Homo sapien
cggtcacggcggaacgctgacatca

SEQ ID NO: 1250105 - DNA, 25 bp, Homo sapien
acggcggaacgctgacatcagcctc

SEQ ID NO: 1250106 - DNA, 25 bp, Homo sapien
ggttagaagacactcccagcatgcc

SEQ ID NO: 1250107 - DNA, 25 bp, Homo sapien
tccaacatccgcattagggataggg

SEQ ID NO: 1250108 - DNA, 25 bp, Homo sapien
gactttgattgcagtatcatccaca

SEQ ID NO: 1250109 - DNA, 25 bp, Homo sapien
atctattccaacatccgcattaggg

SEQ ID NO: 1250110 - DNA, 25 bp, Homo sapien
tctacgtctccgaggacacctctga

SEQ ID NO: 1250111 - DNA, 25 bp, Homo sapien
tctgacacccttggataccctaatg

SEQ ID NO: 1250112 - DNA, 25 bp, Homo sapien
ttggataccctaatgaatctcccat

SEQ ID NO: 1250113 - DNA, 25 bp, Homo sapien
gaatctcccatttctggccgacctg

SEQ ID NO: 1250114 - DNA, 25 bp, Homo sapien
gtggagaattttgggcaagcagcat

SEQ ID NO: 1250115 - DNA, 25 bp, Homo sapien
gagaattttgggcaagcagcatgtt

SEQ ID NO: 1250116 - DNA, 25 bp, Homo sapien
aattttgggcaagcagcatgttcct

SEQ ID NO: 1250117 - DNA, 25 bp, Homo sapien
gattgtggagaattttgggcaagca

SEQ ID NO: 1250118 - DNA, 25 bp, Homo sapien
taagacattggagtgggaaacccgc

SEQ ID NO: 1250119 - DNA, 25 bp, Homo sapien
gaatgatgagaacctctgtgtcgtc

SEQ ID NO: 1250120 - DNA, 25 bp, Homo sapien
tgtgtcgtctttcatctgtctgcgc

SEQ ID NO: 1250121 - DNA, 25 bp, Homo sapien
gacaaaagccgtgattccaaactaa

SEQ ID NO: 1250122 - DNA, 25 bp, Homo sapien
acggcctctcttttcttggtgatta

SEQ ID NO: 1250123 - DNA, 25 bp, Homo sapien
cacggcctctcttttcttggtgatt

SEQ ID NO: 1250124 - DNA, 25 bp, Homo sapien
cggcctctcttttcttggtgattat

SEQ ID NO: 1250125 - DNA, 25 bp, Homo sapien
ttgacttcttttcggctgaattggg

SEQ ID NO: 1250126 - DNA, 25 bp, Homo sapien
aggcaggagggattgacttcttttc

SEQ ID NO: 1250127 - DNA, 25 bp, Homo sapien
gagggattgacttcttttcggctga

SEQ ID NO: 1250128 - DNA, 25 bp, Homo sapien
ttcttttcggctgaattgggcattc

SEQ ID NO: 1250129 - DNA, 25 bp, Homo sapien
caatgaaaagctggtatcttggtta

SEQ ID NO: 1250130 - DNA, 25 bp, Homo sapien
tagttttgcctacacatagcagaaa

SEQ ID NO: 1250131 - DNA, 25 bp, Homo sapien
ggtttccatcctgaaggctgtctca

SEQ ID NO: 1250132 - DNA, 25 bp, Homo sapien
tatcttggttaggattagttttgcc

SEQ ID NO: 1250133 - DNA, 25 bp, Homo sapien
caggtccgggcaggcatgttgagct

SEQ ID NO: 1250134 - DNA, 25 bp, Homo sapien
ttgagctgcagataggccccagcac

SEQ ID NO: 1250135 - DNA, 25 bp, Homo sapien
gataggccccagcacctcgagaggg

SEQ ID NO: 1250136 - DNA, 25 bp, Homo sapien
tgggccaggagtaggtggacacggt

SEQ ID NO: 1250137 - DNA, 25 bp, Homo sapien
taaacatggccttctccttgctgag

SEQ ID NO: 1250138 - DNA, 25 bp, Homo sapien
acatggccttctccttgctgagtgc

SEQ ID NO: 1250139 - DNA, 25 bp, Homo sapien
tggccttctccttgctgagtgccac

SEQ ID NO: 1250140 - DNA, 25 bp, Homo sapien
ctaaacatggccttctccttgctga

SEQ ID NO: 1250141 - DNA, 25 bp, Homo sapien
acttgtctggcttctcgctcttggg

SEQ ID NO: 1250142 - DNA, 25 bp, Homo sapien
ttgtctggcttctcgctcttgggct

SEQ ID NO: 1250143 - DNA, 25 bp, Homo sapien
ccctgaactgaaccttgaggtgtga

SEQ ID NO: 1250144 - DNA, 25 bp, Homo sapien
tgaaccttgaggtgtgagttaatct

SEQ ID NO: 1250145 - DNA, 25 bp, Homo sapien
gctccctgaactgaaccttgaggtg

SEQ ID NO: 1250146 - DNA, 25 bp, Homo sapien
gaggtgtgagttaatctccagctcc

SEQ ID NO: 1250147 - DNA, 25 bp, Homo sapien
agacaacatgcttcccccaaacttt

SEQ ID NO: 1250148 - DNA, 25 bp, Homo sapien
agcaataaagacaacatgcttcccc

SEQ ID NO: 1250149 - DNA, 25 bp, Homo sapien
ataaagacaacatgcttcccccaaa

SEQ ID NO: 1250150 - DNA, 25 bp, Homo sapien
aaagacaacatgcttcccccaaact

SEQ ID NO: 1250151 - DNA, 25 bp, Homo sapien
aacgttgcgttccacattgttttgc

SEQ ID NO: 1250152 - DNA, 25 bp, Homo sapien
caagtcctcggggattgagtcatgc

SEQ ID NO: 1250153 - DNA, 25 bp, Homo sapien
ttcaacgttgcgttccacattgttt

SEQ ID NO: 1250154 - DNA, 25 bp, Homo sapien
tcatgcatggctttcagggtacggc

SEQ ID NO: 1250155 - DNA, 25 bp, Homo sapien
gaaagagagccgtagaaagcgcctg

SEQ ID NO: 1250156 - DNA, 25 bp, Homo sapien
aatctcatacttggagctgaccaag

SEQ ID NO: 1250157 - DNA, 25 bp, Homo sapien
tcataaatctcatacttggagctga

SEQ ID NO: 1250158 - DNA, 25 bp, Homo sapien
ctcttcaacgttcataaatctcata

SEQ ID NO: 1250159 - DNA, 25 bp, Homo sapien
aaatcaggctgtgggacacttagac

SEQ ID NO: 1250160 - DNA, 25 bp, Homo sapien
gaagagctgtataaaaccctggatt

SEQ ID NO: 1250161 - DNA, 25 bp, Homo sapien
ttagactgaccatctgaagagctgt

SEQ ID NO: 1250162 - DNA, 25 bp, Homo sapien
gagctgtataaaaccctggattcaa

SEQ ID NO: 1250163 - DNA, 25 bp, Homo sapien
cagtgctggatcaacttgattcttc

SEQ ID NO: 1250164 - DNA, 25 bp, Homo sapien
ctatgacgactcagtctctggggac

SEQ ID NO: 1250165 - DNA, 25 bp, Homo sapien
ggacagtgctggatcaacttgattc

SEQ ID NO: 1250166 - DNA, 25 bp, Homo sapien
gtgctggatcaacttgattcttcac

SEQ ID NO: 1250167 - DNA, 25 bp, Homo sapien
catgtaccagacaccctgatagctg

SEQ ID NO: 1250168 - DNA, 25 bp, Homo sapien
tgtaatcagtggattcaaagaaccc

SEQ ID NO: 1250169 - DNA, 25 bp, Homo sapien
gatagctgctagacagtggcctaca

SEQ ID NO: 1250170 - DNA, 25 bp, Homo sapien
taagcctttgtgacatctggtagat

SEQ ID NO: 1250171 - DNA, 25 bp, Homo sapien
tatcatcaggttggtttcctccttt

SEQ ID NO: 1250172 - DNA, 25 bp, Homo sapien
caggcctatcatcaggttggtttcc

SEQ ID NO: 1250173 - DNA, 25 bp, Homo sapien
gggcaggcctatcatcaggttggtt

SEQ ID NO: 1250174 - DNA, 25 bp, Homo sapien
ctgggggcaggcctatcatcaggtt

SEQ ID NO: 1250175 - DNA, 25 bp, Homo sapien
gcctggttcctggtttatgtctgaa

SEQ ID NO: 1250176 - DNA, 25 bp, Homo sapien
gggtttgatgcctaacactgttatc

SEQ ID NO: 1250177 - DNA, 25 bp, Homo sapien
taggcccttagctctgaaagcaggt

SEQ ID NO: 1250178 - DNA, 25 bp, Homo sapien
gagctgcaggcctctctataaacct

SEQ ID NO: 1250179 - DNA, 25 bp, Homo sapien
ccttttttagcttcagctggtctga

SEQ ID NO: 1250180 - DNA, 25 bp, Homo sapien
gctggtctgaatccatcaggataaa

SEQ ID NO: 1250181 - DNA, 25 bp, Homo sapien
gttttgataccaccttgctaaaggc

SEQ ID NO: 1250182 - DNA, 25 bp, Homo sapien
cactggtcggaaaagagtgggtcct

SEQ ID NO: 1250183 - DNA, 25 bp, Homo sapien
tctatatgacgcaggagatgccaag

SEQ ID NO: 1250184 - DNA, 25 bp, Homo sapien
gaatgtagcaaaacatgggtgaaat

SEQ ID NO: 1250185 - DNA, 25 bp, Homo sapien
gatgccaatagaatcagctctatat

SEQ ID NO: 1250186 - DNA, 25 bp, Homo sapien
aaacatgggtgaaattgttggagca

SEQ ID NO: 1250187 - DNA, 25 bp, Homo sapien
catcctgtaccacaatggtgaatca

SEQ ID NO: 1250188 - DNA, 25 bp, Homo sapien
acatcctgtaccacaatggtgaatc

SEQ ID NO: 1250189 - DNA, 25 bp, Homo sapien
ggctgagttctacctaacttcacag

SEQ ID NO: 1250190 - DNA, 25 bp, Homo sapien
atgtacgtggcctgcgatagctgag

SEQ ID NO: 1250191 - DNA, 25 bp, Homo sapien
gttctacctaacttcacagtcaagt

SEQ ID NO: 1250192 - DNA, 25 bp, Homo sapien
tggcctgcgatagctgagcaaggct

SEQ ID NO: 1250193 - DNA, 25 bp, Homo sapien
aacatagttgggatcagtcattgca

SEQ ID NO: 1250194 - DNA, 25 bp, Homo sapien
cattgcaggttctaagtgttgctca

SEQ ID NO: 1250195 - DNA, 25 bp, Homo sapien
cagtagtcgttagccgtatgtggtc

SEQ ID NO: 1250196 - DNA, 25 bp, Homo sapien
ttccagggtccaaagcagtagtcgt

SEQ ID NO: 1250197 - DNA, 25 bp, Homo sapien
aagcaagccattgcccctaactgaa

SEQ ID NO: 1250198 - DNA, 25 bp, Homo sapien
aaggtaccgctttgcattgcacaaa

SEQ ID NO: 1250199 - DNA, 25 bp, Homo sapien
ccatttcctagtgaagtctacatta

SEQ ID NO: 1250200 - DNA, 25 bp, Homo sapien
tcagaacaagtttcccctaatgcct

SEQ ID NO: 1250201 - DNA, 25 bp, Homo sapien
gcgcgaaaaacgtttcctctatctc

SEQ ID NO: 1250202 - DNA, 25 bp, Homo sapien
tctatctcggggactttaatctcca

SEQ ID NO: 1250203 - DNA, 25 bp, Homo sapien
tctccaccgtgcgaatcgaatgcat

SEQ ID NO: 1250204 - DNA, 25 bp, Homo sapien
cgcgaaaaacgtttcctctatctcg

SEQ ID NO: 1250205 - DNA, 25 bp, Homo sapien
aatggctgcgcagaacgcagctcgg

SEQ ID NO: 1250206 - DNA, 25 bp, Homo sapien
agcgcggcgcccaccaatggctgcg

SEQ ID NO: 1250207 - DNA, 25 bp, Homo sapien
gcggggcgcgaacatgctcagtgca

SEQ ID NO: 1250208 - DNA, 25 bp, Homo sapien
atgctcagtgcagagcgcggcgccc

SEQ ID NO: 1250209 - DNA, 25 bp, Homo sapien
gctttgcataatgcgcggcggctcc

SEQ ID NO: 1250210 - DNA, 25 bp, Homo sapien
tgccgccgctttgcataatgcgcgg

SEQ ID NO: 1250211 - DNA, 25 bp, Homo sapien
catctgccgccgctttgcataatgc

SEQ ID NO: 1250212 - DNA, 25 bp, Homo sapien
cggctggccccgctcgcatctgccg

SEQ ID NO: 1250213 - DNA, 25 bp, Homo sapien
cccatggtgcaatcccgctgctgcg

SEQ ID NO: 1250214 - DNA, 25 bp, Homo sapien
gcgccgcgggcactcaggccatccc

SEQ ID NO: 1250215 - DNA, 25 bp, Homo sapien
gggcactcaggccatcccggccctc

SEQ ID NO: 1250216 - DNA, 25 bp, Homo sapien
atggtgcaatcccgctgctgcgccg

SEQ ID NO: 1250217 - DNA, 25 bp, Homo sapien
accgccgccttcgtgcaaagcatca

SEQ ID NO: 1250218 - DNA, 25 bp, Homo sapien
cgccaccgccgccttcgtgcaaagc

SEQ ID NO: 1250219 - DNA, 25 bp, Homo sapien
ccaccgccgccttcgtgcaaagcat

SEQ ID NO: 1250220 - DNA, 25 bp, Homo sapien
ccgccgccttcgtgcaaagcatcac

SEQ ID NO: 1250221 - DNA, 25 bp, Homo sapien
tgcccccgctccccttctttgtggc

SEQ ID NO: 1250222 - DNA, 25 bp, Homo sapien
ccccttgccgtgcttgcctagcgcc

SEQ ID NO: 1250223 - DNA, 25 bp, Homo sapien
gccgtgcttgcctagcgccttcttg

SEQ ID NO: 1250224 - DNA, 25 bp, Homo sapien
ttgccgtgcttgcctagcgccttct

SEQ ID NO: 1250225 - DNA, 25 bp, Homo sapien
gatccgcaggttggaaaacaccgag

SEQ ID NO: 1250226 - DNA, 25 bp, Homo sapien
gaatccagtacatcttcgcgggagc

SEQ ID NO: 1250227 - DNA, 25 bp, Homo sapien
ggacagattcttcctgatccgcagg

SEQ ID NO: 1250228 - DNA, 25 bp, Homo sapien
aagggtccgcacactcggtatccga

SEQ ID NO: 1250229 - DNA, 25 bp, Homo sapien
cctagcctcggcaggcccaggaccc

SEQ ID NO: 1250230 - DNA, 25 bp, Homo sapien
agtttccacatcctcggcgatcggc

SEQ ID NO: 1250231 - DNA, 25 bp, Homo sapien
gaagctatagatgtccgtgtccgag

SEQ ID NO: 1250232 - DNA, 25 bp, Homo sapien
ggatcgcctgctggatgtctgaaag

SEQ ID NO: 1250233 - DNA, 25 bp, Homo sapien
gcaaatcctcttgctccgtagccga

SEQ ID NO: 1250234 - DNA, 25 bp, Homo sapien
ctgaggggagacggcagtggggggc

SEQ ID NO: 1250235 - DNA, 25 bp, Homo sapien
gttccggccgcctcttgatcctggg

SEQ ID NO: 1250236 - DNA, 25 bp, Homo sapien
agttctggaccctcggctcagggag

SEQ ID NO: 1250237 - DNA, 25 bp, Homo sapien
gttctggaagccatccgcagccgcg

SEQ ID NO: 1250238 - DNA, 25 bp, Homo sapien
tagggcttgaaacagcgctggctag

SEQ ID NO: 1250239 - DNA, 25 bp, Homo sapien
tacacacagctatgagagcggtcag

SEQ ID NO: 1250240 - DNA, 25 bp, Homo sapien
gagactgcctttggatcgtaccgga

SEQ ID NO: 1250241 - DNA, 25 bp, Homo sapien
tgtgcctccaaaaccgactcttgcg

SEQ ID NO: 1250242 - DNA, 25 bp, Homo sapien
gactcttgcgaaagaaccatgaaca

SEQ ID NO: 1250243 - DNA, 25 bp, Homo sapien
aagatagaaactacatatcacatac

SEQ ID NO: 1250244 - DNA, 25 bp, Homo sapien
acttcactaagcagcggaacccaga

SEQ ID NO: 1250245 - DNA, 25 bp, Homo sapien
aattttctaatagcatgtatcggat

SEQ ID NO: 1250246 - DNA, 25 bp, Homo sapien
cagcagtgagtgaccgcttaacttc

SEQ ID NO: 1250247 - DNA, 25 bp, Homo sapien
gcatgtatcggattttcttgcagca

SEQ ID NO: 1250248 - DNA, 25 bp, Homo sapien
tagtcaactaagaagtcgctgtctg

SEQ ID NO: 1250249 - DNA, 25 bp, Homo sapien
ggtaccagttggactagacgtgctt

SEQ ID NO: 1250250 - DNA, 25 bp, Homo sapien
tgggctggaccatgaaactgaatga

SEQ ID NO: 1250251 - DNA, 25 bp, Homo sapien
tgccgccctgggtatgagtctataa

SEQ ID NO: 1250252 - DNA, 25 bp, Homo sapien
cctctccaaacaggcaagtattggt

SEQ ID NO: 1250253 - DNA, 25 bp, Homo sapien
tccctctgacacgggctttcacacc

SEQ ID NO: 1250254 - DNA, 25 bp, Homo sapien
tctgacacgggctttcacaccccat

SEQ ID NO: 1250255 - DNA, 25 bp, Homo sapien
ctctgacacgggctttcacacccca

SEQ ID NO: 1250256 - DNA, 25 bp, Homo sapien
ctggggccaggaaccagaggcttcc

SEQ ID NO: 1250257 - DNA, 25 bp, Homo sapien
tctgattacacggttccctgaagca

SEQ ID NO: 1250258 - DNA, 25 bp, Homo sapien
aagacccatggcaatgatccgggag

SEQ ID NO: 1250259 - DNA, 25 bp, Homo sapien
tggaggcccgttctcctgctggctg

SEQ ID NO: 1250260 - DNA, 25 bp, Homo sapien
cattcgtctgggcattctgattaca

SEQ ID NO: 1250261 - DNA, 25 bp, Homo sapien
gacagaagtgaattctcctacttac

SEQ ID NO: 1250262 - DNA, 25 bp, Homo sapien
tcacggacagaagtgaattctccta

SEQ ID NO: 1250263 - DNA, 25 bp, Homo sapien
cacggacagaagtgaattctcctac

SEQ ID NO: 1250264 - DNA, 25 bp, Homo sapien
cggacagaagtgaattctcctactt

SEQ ID NO: 1250265 - DNA, 25 bp, Homo sapien
tagcgttctgcctctacaataacac

SEQ ID NO: 1250266 - DNA, 25 bp, Homo sapien
gttctgcctctacaataacacagac

SEQ ID NO: 1250267 - DNA, 25 bp, Homo sapien
gcgttctgcctctacaataacacag

SEQ ID NO: 1250268 - DNA, 25 bp, Homo sapien
ctagcgttctgcctctacaataaca

SEQ ID NO: 1250269 - DNA, 25 bp, Homo sapien
tctccccatagataagcacattctt

SEQ ID NO: 1250270 - DNA, 25 bp, Homo sapien
tgtatcattatatcgtcgccctctc

SEQ ID NO: 1250271 - DNA, 25 bp, Homo sapien
gaaactccttgactgcgcatccaat

SEQ ID NO: 1250272 - DNA, 25 bp, Homo sapien
tagttagaaatgtccccaacagcca

SEQ ID NO: 1250273 - DNA, 25 bp, Homo sapien
aaaatccttgtttgagtggcctggg

SEQ ID NO: 1250274 - DNA, 25 bp, Homo sapien
caaggaaggagtataaaggagctaa

SEQ ID NO: 1250275 - DNA, 25 bp, Homo sapien
tcagaatatatctgcctctgcagtg

SEQ ID NO: 1250276 - DNA, 25 bp, Homo sapien
cagggctcagactaaatgaaggcaa

SEQ ID NO: 1250277 - DNA, 25 bp, Homo sapien
tactacttttgcaacgatgcacttg

SEQ ID NO: 1250278 - DNA, 25 bp, Homo sapien
gatgcacttgaattgagcataacgg

SEQ ID NO: 1250279 - DNA, 25 bp, Homo sapien
tcagaaaacttcatgatcgggggaa

SEQ ID NO: 1250280 - DNA, 25 bp, Homo sapien
catgatcgggggaataacaataact

SEQ ID NO: 1250281 - DNA, 25 bp, Homo sapien
caacttcttggccttagctcgggag

SEQ ID NO: 1250282 - DNA, 25 bp, Homo sapien
caaggaccacggaatgttgagtgca

SEQ ID NO: 1250283 - DNA, 25 bp, Homo sapien
gcctacgctggctcaaatcatgaag

SEQ ID NO: 1250284 - DNA, 25 bp, Homo sapien
tgaagatgtcctaacactgctgctg

SEQ ID NO: 1250285 - DNA, 25 bp, Homo sapien
agctctgagattggcactgatgcgc

SEQ ID NO: 1250286 - DNA, 25 bp, Homo sapien
cactgatgcgcaatgacatggagct

SEQ ID NO: 1250287 - DNA, 25 bp, Homo sapien
gtttagccgctttcctaaagctctg

SEQ ID NO: 1250288 - DNA, 25 bp, Homo sapien
ctactgcgttgtgccctgggtgtgt

SEQ ID NO: 1250289 - DNA, 25 bp, Homo sapien
caaaggtctgcctttatctcaccag

SEQ ID NO: 1250290 - DNA, 25 bp, Homo sapien
ggtctgcctttatctcaccagttgt

SEQ ID NO: 1250291 - DNA, 25 bp, Homo sapien
gagaatgcatacacaaaggtctgcc

SEQ ID NO: 1250292 - DNA, 25 bp, Homo sapien
gatgagaatgcatacacaaaggtct

SEQ ID NO: 1250293 - DNA, 25 bp, Homo sapien
taattccgtcccatcacaagagtgg

SEQ ID NO: 1250294 - DNA, 25 bp, Homo sapien
tctactttgcataattccgtcccat

SEQ ID NO: 1250295 - DNA, 25 bp, Homo sapien
acaagagtggatgctttctcttacc

SEQ ID NO: 1250296 - DNA, 25 bp, Homo sapien
cctgacaaaccttttctactttgca

SEQ ID NO: 1250297 - DNA, 25 bp, Homo sapien
agtgttccataaatagtaccaacta

SEQ ID NO: 1250298 - DNA, 25 bp, Homo sapien
ttgcaaatcataatgcctgaaatat

SEQ ID NO: 1250299 - DNA, 25 bp, Homo sapien
tagtaccaactacagttactatagt

SEQ ID NO: 1250300 - DNA, 25 bp, Homo sapien
ccacgtctggcccttttcagtgata

SEQ ID NO: 1250301 - DNA, 25 bp, Homo sapien
agaggctttccagcctcccaggcaa

SEQ ID NO: 1250302 - DNA, 25 bp, Homo sapien
gcctttaggggtgccacctctatct

SEQ ID NO: 1250303 - DNA, 25 bp, Homo sapien
ctctatctcctctacggagagaggc

SEQ ID NO: 1250304 - DNA, 25 bp, Homo sapien
ctcccaggcaactgcagccttgcac

SEQ ID NO: 1250305 - DNA, 25 bp, Homo sapien
ctgcagtggcaatgatcttgattca

SEQ ID NO: 1250306 - DNA, 25 bp, Homo sapien
tgcagtggcaatgatcttgattcaa

SEQ ID NO: 1250307 - DNA, 25 bp, Homo sapien
gcagtggcaatgatcttgattcaaa

SEQ ID NO: 1250308 - DNA, 25 bp, Homo sapien
cagtggcaatgatcttgattcaaac

SEQ ID NO: 1250309 - DNA, 25 bp, Homo sapien
tcagctctgctcagggtataggcat

SEQ ID NO: 1250310 - DNA, 25 bp, Homo sapien
cagggtataggcattggtatggcaa

SEQ ID NO: 1250311 - DNA, 25 bp, Homo sapien
tgctcagggtataggcattggtatg

SEQ ID NO: 1250312 - DNA, 25 bp, Homo sapien
aaaacaaccctcaggatcagctctg

SEQ ID NO: 1250313 - DNA, 25 bp, Homo sapien
cttcccacaattccagcaccttcat

SEQ ID NO: 1250314 - DNA, 25 bp, Homo sapien
aacacttcccacaattccagcacct

SEQ ID NO: 1250315 - DNA, 25 bp, Homo sapien
cacttcccacaattccagcaccttc

SEQ ID NO: 1250316 - DNA, 25 bp, Homo sapien
caacacttcccacaattccagcacc

SEQ ID NO: 1250317 - DNA, 25 bp, Homo sapien
ggatgacagttatcacccgccttca

SEQ ID NO: 1250318 - DNA, 25 bp, Homo sapien
atgtaaaatgggatgacagttatca

SEQ ID NO: 1250319 - DNA, 25 bp, Homo sapien
aaaatgggatgacagttatcacccg

SEQ ID NO: 1250320 - DNA, 25 bp, Homo sapien
tgacagttatcacccgccttcagct

SEQ ID NO: 1250321 - DNA, 25 bp, Homo sapien
tttagacaaaatttgcattctccac

SEQ ID NO: 1250322 - DNA, 25 bp, Homo sapien
ttaggatttagacaaaatttgcatt

SEQ ID NO: 1250323 - DNA, 25 bp, Homo sapien
gatttagacaaaatttgcattctcc

SEQ ID NO: 1250324 - DNA, 25 bp, Homo sapien
taggatttagacaaaatttgcattc

SEQ ID NO: 1250325 - DNA, 25 bp, Homo sapien
ggttcccatgtaatgtaaaattgtc

SEQ ID NO: 1250326 - DNA, 25 bp, Homo sapien
ggtaccatctggcactaatcctttc

SEQ ID NO: 1250327 - DNA, 25 bp, Homo sapien
caaaggtgctaaagaatctatttta

SEQ ID NO: 1250328 - DNA, 25 bp, Homo sapien
agagatatcagccacaactgtgcat

SEQ ID NO: 1250329 - DNA, 25 bp, Homo sapien
ggttgactaaaatcctgacggttca

SEQ ID NO: 1250330 - DNA, 25 bp, Homo sapien
actttaccgcccacgataactgtca

SEQ ID NO: 1250331 - DNA, 25 bp, Homo sapien
cctaatacattcaaaggagtagtcc

SEQ ID NO: 1250332 - DNA, 25 bp, Homo sapien
tgctgctctcacgaccttgacattc

SEQ ID NO: 1250333 - DNA, 25 bp, Homo sapien
ggcagtgcctttccatgtgcgacct

SEQ ID NO: 1250334 - DNA, 25 bp, Homo sapien
tgcctttccatgtgcgacctgttac

SEQ ID NO: 1250335 - DNA, 25 bp, Homo sapien
tcaccctccaaaggcagtgcctttc

SEQ ID NO: 1250336 - DNA, 25 bp, Homo sapien
caaaggcagtgcctttccatgtgcg

SEQ ID NO: 1250337 - DNA, 25 bp, Homo sapien
gctttttccagaatgcaacagttca

SEQ ID NO: 1250338 - DNA, 25 bp, Homo sapien
tgttaatttcatcaaaagacagatt

SEQ ID NO: 1250339 - DNA, 25 bp, Homo sapien
gattgtgagtcacaaattcatcaac

SEQ ID NO: 1250340 - DNA, 25 bp, Homo sapien
aacagttcgaatgctttttccagaa

SEQ ID NO: 1250341 - DNA, 25 bp, Homo sapien
tgtttcagcatcctcgagcctgtgt

SEQ ID NO: 1250342 - DNA, 25 bp, Homo sapien
tcgagcctgtgttcctcatcgggag

SEQ ID NO: 1250343 - DNA, 25 bp, Homo sapien
tgtgtgggttgactaactgcagccc

SEQ ID NO: 1250344 - DNA, 25 bp, Homo sapien
cccatggatggaactcgcctaggaa

SEQ ID NO: 1250345 - DNA, 25 bp, Homo sapien
atgatcaagtccctattcacatcta

SEQ ID NO: 1250346 - DNA, 25 bp, Homo sapien
gatcaagtccctattcacatctaca

SEQ ID NO: 1250347 - DNA, 25 bp, Homo sapien
cagaggaaacgacaatgatcaagtc

SEQ ID NO: 1250348 - DNA, 25 bp, Homo sapien
tccacagaggaaacgacaatgatca

SEQ ID NO: 1250349 - DNA, 25 bp, Homo sapien
cttctggacagcatctgagcgtttt

SEQ ID NO: 1250350 - DNA, 25 bp, Homo sapien
catctgagcgtttttggggagtttc

SEQ ID NO: 1250351 - DNA, 25 bp, Homo sapien
tttttggggagtttctgaaacagca

SEQ ID NO: 1250352 - DNA, 25 bp, Homo sapien
tggacagcatctgagcgtttttggg

SEQ ID NO: 1250353 - DNA, 25 bp, Homo sapien
ttacgaccacagaagaacgcaggca

SEQ ID NO: 1250354 - DNA, 25 bp, Homo sapien
ggcaacgctgatggaccagaaaaat

SEQ ID NO: 1250355 - DNA, 25 bp, Homo sapien
ccagaaaaatctcttaggttcatca

SEQ ID NO: 1250356 - DNA, 25 bp, Homo sapien
catttccagctgcatttagagatac

SEQ ID NO: 1250357 - DNA, 25 bp, Homo sapien
gatcctcaatagtctgttccagctg

SEQ ID NO: 1250358 - DNA, 25 bp, Homo sapien
tcagctattttggttctcagatcct

SEQ ID NO: 1250359 - DNA, 25 bp, Homo sapien
ccagctgctgaattacagtggcctg

SEQ ID NO: 1250360 - DNA, 25 bp, Homo sapien
gctgaattacagtggcctgtccctc

SEQ ID NO: 1250361 - DNA, 25 bp, Homo sapien
tcgccttggagacacaatcaaagaa

SEQ ID NO: 1250362 - DNA, 25 bp, Homo sapien
agtaggcactgtcatgccagggaga

SEQ ID NO: 1250363 - DNA, 25 bp, Homo sapien
ggaagtctgtatcgatttcgcctct

SEQ ID NO: 1250364 - DNA, 25 bp, Homo sapien
gagctggactgatattcgccttgga

SEQ ID NO: 1250365 - DNA, 25 bp, Homo sapien
gggcagagggagtatgcctgctccg

SEQ ID NO: 1250366 - DNA, 25 bp, Homo sapien
gagggggtggcagcatttctgtacc

SEQ ID NO: 1250367 - DNA, 25 bp, Homo sapien
agtatgcctgctccgggtagaggcg

SEQ ID NO: 1250368 - DNA, 25 bp, Homo sapien
aggtatgcccgctccgggaagagga

SEQ ID NO: 1250369 - DNA, 25 bp, Homo sapien
tatgcccgctccgggtagaggggga

SEQ ID NO: 1250370 - DNA, 25 bp, Homo sapien
gaggtatgcccgctccgggaagagg

SEQ ID NO: 1250371 - DNA, 25 bp, Homo sapien
gtggaggaggtatgcccgctccggg

SEQ ID NO: 1250372 - DNA, 25 bp, Homo sapien
aggtatgcccgctccgggaagaggg

SEQ ID NO: 1250373 - DNA, 25 bp, Homo sapien
gagggggcggaggaggtatgcccac

SEQ ID NO: 1250374 - DNA, 25 bp, Homo sapien
tagagggggcggaggaggtatgccc

SEQ ID NO: 1250375 - DNA, 25 bp, Homo sapien
gtagagggggcggaggaggtatgcc

SEQ ID NO: 1250376 - DNA, 25 bp, Homo sapien
agagggggcggaggaggtatgccca

SEQ ID NO: 1250377 - DNA, 25 bp, Homo sapien
tatgcccgctccgggtagaggggga

SEQ ID NO: 1250378 - DNA, 25 bp, Homo sapien
agagggggtggaggaggtatgcccg

SEQ ID NO: 1250379 - DNA, 25 bp, Homo sapien
tatgcccgctccgggtagaggggga

SEQ ID NO: 1250380 - DNA, 25 bp, Homo sapien
aggaggtattcccactccaggtaga

SEQ ID NO: 1250381 - DNA, 25 bp, Homo sapien
tatgcccgctccgggaagtgggggc

SEQ ID NO: 1250382 - DNA, 25 bp, Homo sapien
ggaggtattcccactccaggtagag

SEQ ID NO: 1250383 - DNA, 25 bp, Homo sapien
tggggttggtaaagtgctactccca

SEQ ID NO: 1250384 - DNA, 25 bp, Homo sapien
ctgtggggttggtaaagtgctactc

SEQ ID NO: 1250385 - DNA, 25 bp, Homo sapien
ttggtaaagtgctactcccaacttg

SEQ ID NO: 1250386 - DNA, 25 bp, Homo sapien
tggtaaagtgctactcccaacttgt

SEQ ID NO: 1250387 - DNA, 25 bp, Homo sapien
atggaggaggaagaaatccacacac

SEQ ID NO: 1250388 - DNA, 25 bp, Homo sapien
cttggcaatggaggaggaagaaatc

SEQ ID NO: 1250389 - DNA, 25 bp, Homo sapien
caatggaggaggaagaaatccacac

SEQ ID NO: 1250390 - DNA, 25 bp, Homo sapien
ggcaatggaggaggaagaaatccac

SEQ ID NO: 1250391 - DNA, 25 bp, Homo sapien
ttactatgtagttgaatcctggtcc

SEQ ID NO: 1250392 - DNA, 25 bp, Homo sapien
cttttactatgtagttgaatcctgg

SEQ ID NO: 1250393 - DNA, 25 bp, Homo sapien
tactatgtagttgaatcctggtcca

SEQ ID NO: 1250394 - DNA, 25 bp, Homo sapien
tttactatgtagttgaatcctggtc

SEQ ID NO: 1250395 - DNA, 25 bp, Homo sapien
tcctcaaattcatgacaatctatgg

SEQ ID NO: 1250396 - DNA, 25 bp, Homo sapien
gacaatctatggatggctcttcaat

SEQ ID NO: 1250397 - DNA, 25 bp, Homo sapien
aaattcatgacaatctatggatggc

SEQ ID NO: 1250398 - DNA, 25 bp, Homo sapien
tcgtctttgagatagtatcagagat

SEQ ID NO: 1250399 - DNA, 25 bp, Homo sapien
tctctaatgacagttcacacttatg

SEQ ID NO: 1250400 - DNA, 25 bp, Homo sapien
cagttcacacttatgccagaaacac

SEQ ID NO: 1250401 - DNA, 25 bp, Homo sapien
cactgtccaatttcataaagcacaa

SEQ ID NO: 1250402 - DNA, 25 bp, Homo sapien
aaacactgtccaatttcataaagca

SEQ ID NO: 1250403 - DNA, 25 bp, Homo sapien
aaatgtagccactctccatttcagg

SEQ ID NO: 1250404 - DNA, 25 bp, Homo sapien
ttcagggtaaagacgggcaccatta

SEQ ID NO: 1250405 - DNA, 25 bp, Homo sapien
tatcatgaggttttactctactttc

SEQ ID NO: 1250406 - DNA, 25 bp, Homo sapien
ctatctggagttcattatcatgagg

SEQ ID NO: 1250407 - DNA, 25 bp, Homo sapien
tttgcttccaagacctctttcctgc

SEQ ID NO: 1250408 - DNA, 25 bp, Homo sapien
tgagctgcttgccattcctttgctt

SEQ ID NO: 1250409 - DNA, 25 bp, Homo sapien
cattcctttgcttccaagacctctt

SEQ ID NO: 1250410 - DNA, 25 bp, Homo sapien
tctttgcttcccaagactgagctgc

SEQ ID NO: 1250411 - DNA, 25 bp, Homo sapien
agctgagactacgggcacctgctgc

SEQ ID NO: 1250412 - DNA, 25 bp, Homo sapien
tagctgagactacgggcacctgctg

SEQ ID NO: 1250413 - DNA, 25 bp, Homo sapien
ctgagactacgggcacctgctgcca

SEQ ID NO: 1250414 - DNA, 25 bp, Homo sapien
gagactacgggcacctgctgccacg

SEQ ID NO: 1250415 - DNA, 25 bp, Homo sapien
taaacttatgccctcaaataacagg

SEQ ID NO: 1250416 - DNA, 25 bp, Homo sapien
cagcatcccttctggtagacaaaag

SEQ ID NO: 1250417 - DNA, 25 bp, Homo sapien
ggtcaaatgacgaataaaatcctcc

SEQ ID NO: 1250418 - DNA, 25 bp, Homo sapien
ggtaggacctatcataattgtgact

SEQ ID NO: 1250419 - DNA, 25 bp, Homo sapien
cccttgatatcttctccgacagaag

SEQ ID NO: 1250420 - DNA, 25 bp, Homo sapien
ttctggaagatctctacacccttga

SEQ ID NO: 1250421 - DNA, 25 bp, Homo sapien
ccttgatatcttctccgacagaagt

SEQ ID NO: 1250422 - DNA, 25 bp, Homo sapien
cttgatatcttctccgacagaagtt

SEQ ID NO: 1250423 - DNA, 25 bp, Homo sapien
tgtctatctccaaacgggtacaagg

SEQ ID NO: 1250424 - DNA, 25 bp, Homo sapien
tctatctccaaacgggtacaaggta

SEQ ID NO: 1250425 - DNA, 25 bp, Homo sapien
tttgtgtctatctccaaacgggtac

SEQ ID NO: 1250426 - DNA, 25 bp, Homo sapien
ctcctttgtgtctatctccaaacgg

SEQ ID NO: 1250427 - DNA, 25 bp, Homo sapien
actgcagaccacagaaggcactgac

SEQ ID NO: 1250428 - DNA, 25 bp, Homo sapien
agcattccaaggcactgcagaccac

SEQ ID NO: 1250429 - DNA, 25 bp, Homo sapien
aggcatccaacagcattccaaggca

SEQ ID NO: 1250430 - DNA, 25 bp, Homo sapien
gcagaccacagaaggcactgacact

SEQ ID NO: 1250431 - DNA, 25 bp, Homo sapien
ctcaggcttccctagaaggcaggac

SEQ ID NO: 1250432 - DNA, 25 bp, Homo sapien
tggtgcacagattgtgaggttctcc

SEQ ID NO: 1250433 - DNA, 25 bp, Homo sapien
ctttcgggtgatgccagttcttctg

SEQ ID NO: 1250434 - DNA, 25 bp, Homo sapien
cagttacctcccctagaaaaatgat

SEQ ID NO: 1250435 - DNA, 25 bp, Homo sapien
gctagacattagtattccaactgct

SEQ ID NO: 1250436 - DNA, 25 bp, Homo sapien
tatctaaatgaaggctagacattag

SEQ ID NO: 1250437 - DNA, 25 bp, Homo sapien
aatgaaggctagacattagtattcc

SEQ ID NO: 1250438 - DNA, 25 bp, Homo sapien
tcatatctaaatgaaggctagacat

SEQ ID NO: 1250439 - DNA, 25 bp, Homo sapien
gagttctcagcaagtacagcagagg

SEQ ID NO: 1250440 - DNA, 25 bp, Homo sapien
tgcctgtgtttagatcatagcccca

SEQ ID NO: 1250441 - DNA, 25 bp, Homo sapien
cacctgcctcatacagttgttgcaa

SEQ ID NO: 1250442 - DNA, 25 bp, Homo sapien
tagcattaatcggaatcttgcagac

SEQ ID NO: 1250443 - DNA, 25 bp, Homo sapien
ttatttctgtatcccactgccagga

SEQ ID NO: 1250444 - DNA, 25 bp, Homo sapien
tttatctctctacttggcacagaag

SEQ ID NO: 1250445 - DNA, 25 bp, Homo sapien
tgaacgaattatggcctccctgatg

SEQ ID NO: 1250446 - DNA, 25 bp, Homo sapien
cctgatgttaatgtcaatgctggca

SEQ ID NO: 1250447 - DNA, 25 bp, Homo sapien
caaacaggctatactttctacttaa

SEQ ID NO: 1250448 - DNA, 25 bp, Homo sapien
tacgctggattcttccattccttag

SEQ ID NO: 1250449 - DNA, 25 bp, Homo sapien
catttgcatggataacaaacaggct

SEQ ID NO: 1250450 - DNA, 25 bp, Homo sapien
ggtttgatccctcttatacgctgga

SEQ ID NO: 1250451 - DNA, 25 bp, Homo sapien
gcctgtgtagtctgcaccatgaggg

SEQ ID NO: 1250452 - DNA, 25 bp, Homo sapien
cctgtgtagtctgcaccatgagggt

SEQ ID NO: 1250453 - DNA, 25 bp, Homo sapien
ctgtgtagtctgcaccatgagggtc

SEQ ID NO: 1250454 - DNA, 25 bp, Homo sapien
cctcaggcaccgtgaattttcagca

SEQ ID NO: 1250455 - DNA, 25 bp, Homo sapien
aaattacagttcgagctcaggttgc

SEQ ID NO: 1250456 - DNA, 25 bp, Homo sapien
taagggaaatcgttgctagtggcta

SEQ ID NO: 1250457 - DNA, 25 bp, Homo sapien
aatctgctatggtcttttccttggc

SEQ ID NO: 1250458 - DNA, 25 bp, Homo sapien
caaaggagattatcagttttgcttt

SEQ ID NO: 1250459 - DNA, 25 bp, Homo sapien
cctccttcattgctttaagtatcca

SEQ ID NO: 1250460 - DNA, 25 bp, Homo sapien
taagtatccagtgactttcagcatt

SEQ ID NO: 1250461 - DNA, 25 bp, Homo sapien
gagttcagtaagtaccacctgcttc

SEQ ID NO: 1250462 - DNA, 25 bp, Homo sapien
ctaattaaagttccagaggtgactg

SEQ ID NO: 1250463 - DNA, 25 bp, Homo sapien
taattaaagttccagaggtgactgg

SEQ ID NO: 1250464 - DNA, 25 bp, Homo sapien
tcatagagagcttgaagggtctcca

SEQ ID NO: 1250465 - DNA, 25 bp, Homo sapien
ttgaagggtctccaggtcaaccaca

SEQ ID NO: 1250466 - DNA, 25 bp, Homo sapien
tctccaggtcaaccacagaattatc

SEQ ID NO: 1250467 - DNA, 25 bp, Homo sapien
ctcatagagagcttgaagggtctcc

SEQ ID NO: 1250468 - DNA, 25 bp, Homo sapien
acataaaattccttctattactcac

SEQ ID NO: 1250469 - DNA, 25 bp, Homo sapien
tcatttcggtttgatgggcatctga

SEQ ID NO: 1250470 - DNA, 25 bp, Homo sapien
catttcggtttgatgggcatctgag

SEQ ID NO: 1250471 - DNA, 25 bp, Homo sapien
gcgcagattcagattcctagatgtc

SEQ ID NO: 1250472 - DNA, 25 bp, Homo sapien
agcgcagattcagattcctagatgt

SEQ ID NO: 1250473 - DNA, 25 bp, Homo sapien
ccagcgcagattcagattcctagat

SEQ ID NO: 1250474 - DNA, 25 bp, Homo sapien
cagcgcagattcagattcctagatg

SEQ ID NO: 1250475 - DNA, 25 bp, Homo sapien
ttctattttttcgagttcgtctgac

SEQ ID NO: 1250476 - DNA, 25 bp, Homo sapien
tttcgagttcgtctgactgtgctct

SEQ ID NO: 1250477 - DNA, 25 bp, Homo sapien
gtctttggaagatcggccatgcttt

SEQ ID NO: 1250478 - DNA, 25 bp, Homo sapien
ttgtctttggaagatcggccatgct

SEQ ID NO: 1250479 - DNA, 25 bp, Homo sapien
tgttcaggtttgtccagagacttgg

SEQ ID NO: 1250480 - DNA, 25 bp, Homo sapien
gttcaggtttgtccagagacttggc

SEQ ID NO: 1250481 - DNA, 25 bp, Homo sapien
ttcaggtttgtccagagacttggca

SEQ ID NO: 1250482 - DNA, 25 bp, Homo sapien
tgtagtaattccagtttgcgacgaa

SEQ ID NO: 1250483 - DNA, 25 bp, Homo sapien
tgcgacgaattgagcaaatgctttc

SEQ ID NO: 1250484 - DNA, 25 bp, Homo sapien
aaaagactcgctctgaaaagttggg

SEQ ID NO: 1250485 - DNA, 25 bp, Homo sapien
ggattagtgacagttcataaaggaa

SEQ ID NO: 1250486 - DNA, 25 bp, Homo sapien
gatttaccgcaactagaacaaatgg

SEQ ID NO: 1250487 - DNA, 25 bp, Homo sapien
tctgttgagtcatatggctgttcct

SEQ ID NO: 1250488 - DNA, 25 bp, Homo sapien
aatgttaacattggtcgtttctgcc

SEQ ID NO: 1250489 - DNA, 25 bp, Homo sapien
cttaatggtgcctacgtctggaaca

SEQ ID NO: 1250490 - DNA, 25 bp, Homo sapien
catctgcctgtcctcgagtcttatt

SEQ ID NO: 1250491 - DNA, 25 bp, Homo sapien
tgcctgtcctcgagtcttatttcct

SEQ ID NO: 1250492 - DNA, 25 bp, Homo sapien
gcaagaaccaaacctagaacctgca

SEQ ID NO: 1250493 - DNA, 25 bp, Homo sapien
aaacctagaacctgcataacccctg

SEQ ID NO: 1250494 - DNA, 25 bp, Homo sapien
atcaaaatttcggagataatacgaa

SEQ ID NO: 1250495 - DNA, 25 bp, Homo sapien
gagataatacgaaacaatatatgac

SEQ ID NO: 1250496 - DNA, 25 bp, Homo sapien
ttcggagataatacgaaacaatata

SEQ ID NO: 1250497 - DNA, 25 bp, Homo sapien
aatttcggagataatacgaaacaat

SEQ ID NO: 1250498 - DNA, 25 bp, Homo sapien
ctgtgaggcctgaaaaaggtcctgg

SEQ ID NO: 1250499 - DNA, 25 bp, Homo sapien
ttctggcagtggaaagaggcactgt

SEQ ID NO: 1250500 - DNA, 25 bp, Homo sapien
ctggcagtggaaagaggcactgttc

SEQ ID NO: 1250501 - DNA, 25 bp, Homo sapien
aaagaggcactgttcttttccagca

SEQ ID NO: 1250502 - DNA, 25 bp, Homo sapien
gcaaaattgttctttcgccacacac

SEQ ID NO: 1250503 - DNA, 25 bp, Homo sapien
gaaatagacagctgaggtgttcgca

SEQ ID NO: 1250504 - DNA, 25 bp, Homo sapien
tatcaaatcaaaagctcgggtaaat

SEQ ID NO: 1250505 - DNA, 25 bp, Homo sapien
gttcccaggaaagttcataagccag

SEQ ID NO: 1250506 - DNA, 25 bp, Homo sapien
tcaggttgcttaacgaactacaagt

SEQ ID NO: 1250507 - DNA, 25 bp, Homo sapien
tgcttaacgaactacaagtcgctga

SEQ ID NO: 1250508 - DNA, 25 bp, Homo sapien
aaagcagatcaggttgcttaacgaa

SEQ ID NO: 1250509 - DNA, 25 bp, Homo sapien
cgaactacaagtcgctgagctcaga

SEQ ID NO: 1250510 - DNA, 25 bp, Homo sapien
gggtaaagaatagaacgagcagttc

SEQ ID NO: 1250511 - DNA, 25 bp, Homo sapien
agggggtaaagaatagaacgagcag

SEQ ID NO: 1250512 - DNA, 25 bp, Homo sapien
gtaaagaatagaacgagcagttcaa

SEQ ID NO: 1250513 - DNA, 25 bp, Homo sapien
ggtaaagaatagaacgagcagttca

SEQ ID NO: 1250514 - DNA, 25 bp, Homo sapien
caagcaggatgaggcgtccttcttt

SEQ ID NO: 1250515 - DNA, 25 bp, Homo sapien
catatgctcttttgaggagacctgg

SEQ ID NO: 1250516 - DNA, 25 bp, Homo sapien
gagacctggtatactttccctgctt

SEQ ID NO: 1250517 - DNA, 25 bp, Homo sapien
ttccttgaaaggctgcatatgctct

SEQ ID NO: 1250518 - DNA, 25 bp, Homo sapien
aggagacctggtatactttccctgc

SEQ ID NO: 1250519 - DNA, 25 bp, Homo sapien
tatctacctgactactaacacctgg

SEQ ID NO: 1250520 - DNA, 25 bp, Homo sapien
ccagaatactatccctggatctaat

SEQ ID NO: 1250521 - DNA, 25 bp, Homo sapien
tcctctgtccatcctaaaaatgcta

SEQ ID NO: 1250522 - DNA, 25 bp, Homo sapien
ccgtaacaaattcatctgccaattt

SEQ ID NO: 1250523 - DNA, 25 bp, Homo sapien
agcctgagccagcatgaccagcatg

SEQ ID NO: 1250524 - DNA, 25 bp, Homo sapien
cagcctgagccagcatgaccagcat

SEQ ID NO: 1250525 - DNA, 25 bp, Homo sapien
cagggaagtctcccaggcttgctcc

SEQ ID NO: 1250526 - DNA, 25 bp, Homo sapien
ctccagactctttcgcaatgtgaaa

SEQ ID NO: 1250527 - DNA, 25 bp, Homo sapien
gctccagactctttcgcaatgtgaa

SEQ ID NO: 1250528 - DNA, 25 bp, Homo sapien
cagactctttcgcaatgtgaaatac

SEQ ID NO: 1250529 - DNA, 25 bp, Homo sapien
actctttcgcaatgtgaaatacttc

SEQ ID NO: 1250530 - DNA, 25 bp, Homo sapien
aatcacctggtgtctagtcatcctc

SEQ ID NO: 1250531 - DNA, 25 bp, Homo sapien
tacagcaacagagaaattatggccc

SEQ ID NO: 1250532 - DNA, 25 bp, Homo sapien
gtaggatggagatgcattgcttgca

SEQ ID NO: 1250533 - DNA, 25 bp, Homo sapien
ggccgagctgtttcatgatttaata

SEQ ID NO: 1250534 - DNA, 25 bp, Homo sapien
catttatgagtctctgtcagtgaat

SEQ ID NO: 1250535 - DNA, 25 bp, Homo sapien
tctgtcagtgaattttcctctgcct

SEQ ID NO: 1250536 - DNA, 25 bp, Homo sapien
agtcttggccaattcaagcaaaaga

SEQ ID NO: 1250537 - DNA, 25 bp, Homo sapien
tttacatggggagagagtacatatg

SEQ ID NO: 1250538 - DNA, 25 bp, Homo sapien
tacatggggagagagtacatatggt

SEQ ID NO: 1250539 - DNA, 25 bp, Homo sapien
aaagtcttggccaattcaagcaaaa

SEQ ID NO: 1250540 - DNA, 25 bp, Homo sapien
aacaacagctttccacctgggaagc

SEQ ID NO: 1250541 - DNA, 25 bp, Homo sapien
acaacagctttccacctgggaagcc

SEQ ID NO: 1250542 - DNA, 25 bp, Homo sapien
cacacggcccgaaaataaaaggcat

SEQ ID NO: 1250543 - DNA, 25 bp, Homo sapien
acacggcccgaaaataaaaggcatg

SEQ ID NO: 1250544 - DNA, 25 bp, Homo sapien
caaccccgattacaactttgcaaga

SEQ ID NO: 1250545 - DNA, 25 bp, Homo sapien
gcttactgcatggttagttatggta

SEQ ID NO: 1250546 - DNA, 25 bp, Homo sapien
tcatgtgatcacattgaattctcac

SEQ ID NO: 1250547 - DNA, 25 bp, Homo sapien
gatgcaggacttcaacggtgctgga

SEQ ID NO: 1250548 - DNA, 25 bp, Homo sapien
tggggtaaattcagagattgtgaag

SEQ ID NO: 1250549 - DNA, 25 bp, Homo sapien
ctggggtaaattcagagattgtgaa

SEQ ID NO: 1250550 - DNA, 25 bp, Homo sapien
cctggggtaaattcagagattgtga

SEQ ID NO: 1250551 - DNA, 25 bp, Homo sapien
tccttatggggatgccaggtccaca

SEQ ID NO: 1250552 - DNA, 25 bp, Homo sapien
tgccaggtccacagtaaggtctacg

SEQ ID NO: 1250553 - DNA, 25 bp, Homo sapien
tacgagtgaaggttctgttatcagt

SEQ ID NO: 1250554 - DNA, 25 bp, Homo sapien
cacagtaaggtctacgagtgaaggt

SEQ ID NO: 1250555 - DNA, 25 bp, Homo sapien
tgtactattctgttcacctttgcac

SEQ ID NO: 1250556 - DNA, 25 bp, Homo sapien
gtaccacaaagtaatagctatacac

SEQ ID NO: 1250557 - DNA, 25 bp, Homo sapien
gatggataaaatggagggtcactgt

SEQ ID NO: 1250558 - DNA, 25 bp, Homo sapien
tatagaggaaaccaaattgactaca

SEQ ID NO: 1250559 - DNA, 25 bp, Homo sapien
ttttgaacaatgacttggtatttgg

SEQ ID NO: 1250560 - DNA, 25 bp, Homo sapien
gtaacatacatgaactaattgaatt

SEQ ID NO: 1250561 - DNA, 25 bp, Homo sapien
tgaacaatgacttggtatttggtga

SEQ ID NO: 1250562 - DNA, 25 bp, Homo sapien
taaaatcagttgtaacatacatgaa

SEQ ID NO: 1250563 - DNA, 25 bp, Homo sapien
aagcaggaagaaccctcaaattaca

SEQ ID NO: 1250564 - DNA, 25 bp, Homo sapien
tctaaaatgatagctacagaagcag

SEQ ID NO: 1250565 - DNA, 25 bp, Homo sapien
gaagcaggaccatttcggaatttct

SEQ ID NO: 1250566 - DNA, 25 bp, Homo sapien
tgatagctacagaagcaggaccatt

SEQ ID NO: 1250567 - DNA, 25 bp, Homo sapien
aatgatagctacagaagcaggacca

SEQ ID NO: 1250568 - DNA, 25 bp, Homo sapien
ctatgtgaggatctggctgccacgg

SEQ ID NO: 1250569 - DNA, 25 bp, Homo sapien
cctggcggaatgtgttgatggcatc

SEQ ID NO: 1250570 - DNA, 25 bp, Homo sapien
gccacgggctatggtaatgacgtta

SEQ ID NO: 1250571 - DNA, 25 bp, Homo sapien
taatgacgttagaatgcacctggcg

SEQ ID NO: 1250572 - DNA, 25 bp, Homo sapien
tcatgaagaaatatgccgtggtctc

SEQ ID NO: 1250573 - DNA, 25 bp, Homo sapien
ctctccaagttttggtttcatgaag

SEQ ID NO: 1250574 - DNA, 25 bp, Homo sapien
tctccaagttttggtttcatgaaga

SEQ ID NO: 1250575 - DNA, 25 bp, Homo sapien
tgaagaaatatgccgtggtctccaa

SEQ ID NO: 1250576 - DNA, 25 bp, Homo sapien
ctggcaagccagcaccctagttact

SEQ ID NO: 1250577 - DNA, 25 bp, Homo sapien
tctttgaagtgcgtgggtctgccat

SEQ ID NO: 1250578 - DNA, 25 bp, Homo sapien
tagtttcccactagacgcagctatt

SEQ ID NO: 1250579 - DNA, 25 bp, Homo sapien
tagaagttgatttacccgacagtgg

SEQ ID NO: 1250580 - DNA, 25 bp, Homo sapien
tgatgtgcatcggaccagctactcc

SEQ ID NO: 1250581 - DNA, 25 bp, Homo sapien
tgcatcggaccagctactccaaagt

SEQ ID NO: 1250582 - DNA, 25 bp, Homo sapien
gaccagctactccaaagtgacaacg

SEQ ID NO: 1250583 - DNA, 25 bp, Homo sapien
caaagtgacaacgtcatcagtccca

SEQ ID NO: 1250584 - DNA, 25 bp, Homo sapien
tcttcactgggtatctgctcactag

SEQ ID NO: 1250585 - DNA, 25 bp, Homo sapien
tgtaattctatagccggttcttcag

SEQ ID NO: 1250586 - DNA, 25 bp, Homo sapien
gctgcccacggttcaagtttctaag

SEQ ID NO: 1250587 - DNA, 25 bp, Homo sapien
caaaaagcctgagcggtgacttggt

SEQ ID NO: 1250588 - DNA, 25 bp, Homo sapien
gatatgaactccctcatagagaagt

SEQ ID NO: 1250589 - DNA, 25 bp, Homo sapien
cacagggttccatggtaagaatatt

SEQ ID NO: 1250590 - DNA, 25 bp, Homo sapien
taaaatattaagtggcggatcatgc

SEQ ID NO: 1250591 - DNA, 25 bp, Homo sapien
tgattgctacggatccacagtgaag

SEQ ID NO: 1250592 - DNA, 25 bp, Homo sapien
attccagagtcatgtcttggtttta

SEQ ID NO: 1250593 - DNA, 25 bp, Homo sapien
aattccagagtcatgtcttggtttt

SEQ ID NO: 1250594 - DNA, 25 bp, Homo sapien
tataaagtgattttcctttcttctg

SEQ ID NO: 1250595 - DNA, 25 bp, Homo sapien
ccagagtcatgtcttggttttattt

SEQ ID NO: 1250596 - DNA, 25 bp, Homo sapien
atataaacggggtctgggcaccctg

SEQ ID NO: 1250597 - DNA, 25 bp, Homo sapien
gggcaaagcgtcacactgctcttgg

SEQ ID NO: 1250598 - DNA, 25 bp, Homo sapien
aactttacatcccagtggatctaat

SEQ ID NO: 1250599 - DNA, 25 bp, Homo sapien
caattagaatgatcactcgtggctc

SEQ ID NO: 1250600 - DNA, 25 bp, Homo sapien
caagttttcatgcttatctttgctt

SEQ ID NO: 1250601 - DNA, 25 bp, Homo sapien
tcaagttttcatgcttatctttgct

SEQ ID NO: 1250602 - DNA, 25 bp, Homo sapien
aagttttcatgcttatctttgcttt

SEQ ID NO: 1250603 - DNA, 25 bp, Homo sapien
tgtgaaagtcgttgcaatgactcat

SEQ ID NO: 1250604 - DNA, 25 bp, Homo sapien
tttgtgaaagtcgttgcaatgactc

SEQ ID NO: 1250605 - DNA, 25 bp, Homo sapien
aagtcgttgcaatgactcattttca

SEQ ID NO: 1250606 - DNA, 25 bp, Homo sapien
ctgaattttgtgaaagtcgttgcaa

SEQ ID NO: 1250607 - DNA, 25 bp, Homo sapien
cagaatgacggtagtttccctccca

SEQ ID NO: 1250608 - DNA, 25 bp, Homo sapien
tctccactggtctagtacgtttgca

SEQ ID NO: 1250609 - DNA, 25 bp, Homo sapien
tacacatgctgttttggtctatcgg

SEQ ID NO: 1250610 - DNA, 25 bp, Homo sapien
gacgaggaatattctcacaacagtg

SEQ ID NO: 1250611 - DNA, 25 bp, Homo sapien
cccaagagttgggaaagcactgatt

SEQ ID NO: 1250612 - DNA, 25 bp, Homo sapien
tacatagttatggagagcaacccaa

SEQ ID NO: 1250613 - DNA, 25 bp, Homo sapien
ttccataattggtttgcaagagcaa

SEQ ID NO: 1250614 - DNA, 25 bp, Homo sapien
tcacaatgcattacgagctgaccca

SEQ ID NO: 1250615 - DNA, 25 bp, Homo sapien
gggacaggaagactacaaaacaata

SEQ ID NO: 1250616 - DNA, 25 bp, Homo sapien
tatacacactggagggactgaaggg

SEQ ID NO: 1250617 - DNA, 25 bp, Homo sapien
cacatagcgatctttgttaaatgcc

SEQ ID NO: 1250618 - DNA, 25 bp, Homo sapien
cattggagaatggtaatatacacac

SEQ ID NO: 1250619 - DNA, 25 bp, Homo sapien
agagtgagaattgtcctgatcgtcc

SEQ ID NO: 1250620 - DNA, 25 bp, Homo sapien
gagaggacatctgatagagctgcta

SEQ ID NO: 1250621 - DNA, 25 bp, Homo sapien
cacatagctctctgtagtggtctag

SEQ ID NO: 1250622 - DNA, 25 bp, Homo sapien
tggcttgccagccttacacatagct

SEQ ID NO: 1250623 - DNA, 25 bp, Homo sapien
tgatgacgcactgatggcctgagcc

SEQ ID NO: 1250624 - DNA, 25 bp, Homo sapien
tggtggcaaccctccttgctctgct

SEQ ID NO: 1250625 - DNA, 25 bp, Homo sapien
tgagcaatgccacatcttcctgatg

SEQ ID NO: 1250626 - DNA, 25 bp, Homo sapien
tctgctctttgagcaatgccacatc

SEQ ID NO: 1250627 - DNA, 25 bp, Homo sapien
catgcatatctgttgccatagacaa

SEQ ID NO: 1250628 - DNA, 25 bp, Homo sapien
atatctgttgccatagacaattcca

SEQ ID NO: 1250629 - DNA, 25 bp, Homo sapien
ccatgcatatctgttgccatagaca

SEQ ID NO: 1250630 - DNA, 25 bp, Homo sapien
tgcatatctgttgccatagacaatt

SEQ ID NO: 1250631 - DNA, 25 bp, Homo sapien
gccagaccaggtaatagaattggat

SEQ ID NO: 1250632 - DNA, 25 bp, Homo sapien
ggttagggccagaccaggtaataga

SEQ ID NO: 1250633 - DNA, 25 bp, Homo sapien
ctgaaggttagggccagaccaggta

SEQ ID NO: 1250634 - DNA, 25 bp, Homo sapien
gttagggccagaccaggtaatagaa

SEQ ID NO: 1250635 - DNA, 25 bp, Homo sapien
tcaggggctcttgcaacaacataaa

SEQ ID NO: 1250636 - DNA, 25 bp, Homo sapien
tcacgacatgctaggtgattggagg

SEQ ID NO: 1250637 - DNA, 25 bp, Homo sapien
aacagaatctgggtccagataggcc

SEQ ID NO: 1250638 - DNA, 25 bp, Homo sapien
ctagtcacgacatgctaggtgattg

SEQ ID NO: 1250639 - DNA, 25 bp, Homo sapien
agtcacgacatgctaggtgattgga

SEQ ID NO: 1250640 - DNA, 25 bp, Homo sapien
agagcaacataatagtcacctttcc

SEQ ID NO: 1250641 - DNA, 25 bp, Homo sapien
gagagcaacataatagtcacctttc

SEQ ID NO: 1250642 - DNA, 25 bp, Homo sapien
gaagacggtatctggggagagcaac

SEQ ID NO: 1250643 - DNA, 25 bp, Homo sapien
tcagccctgaagacggtatctgggg

SEQ ID NO: 1250644 - DNA, 25 bp, Homo sapien
gctgaagacagagtattctcactgt

SEQ ID NO: 1250645 - DNA, 25 bp, Homo sapien
ctgaagacagagtattctcactgtg

SEQ ID NO: 1250646 - DNA, 25 bp, Homo sapien
tgaagacagagtattctcactgtgc

SEQ ID NO: 1250647 - DNA, 25 bp, Homo sapien
agctgaagacagagtattctcactg

SEQ ID NO: 1250648 - DNA, 25 bp, Homo sapien
tagaaccgatgcttttccctttcgc

SEQ ID NO: 1250649 - DNA, 25 bp, Homo sapien
ctccaggtagaaccgatgcttttcc

SEQ ID NO: 1250650 - DNA, 25 bp, Homo sapien
cctttcgccctcactatactttgtg

SEQ ID NO: 1250651 - DNA, 25 bp, Homo sapien
cgccctcactatactttgtggccat

SEQ ID NO: 1250652 - DNA, 25 bp, Homo sapien
ggtgaactctgcacagccaagggcc

SEQ ID NO: 1250653 - DNA, 25 bp, Homo sapien
gtgtaggtgccgttagcagttgctg

SEQ ID NO: 1250654 - DNA, 25 bp, Homo sapien
taggtgccgttagcagttgctggct

SEQ ID NO: 1250655 - DNA, 25 bp, Homo sapien
ccaagggccagcagtgtaggtgccg

SEQ ID NO: 1250656 - DNA, 25 bp, Homo sapien
agtgctaaattcagctcctggcggg

SEQ ID NO: 1250657 - DNA, 25 bp, Homo sapien
tataaagtgctaaattcagctcctg

SEQ ID NO: 1250658 - DNA, 25 bp, Homo sapien
gatgatgagcgaacggacagaggca

SEQ ID NO: 1250659 - DNA, 25 bp, Homo sapien
gccgctgacatgcttgtgcagggat

SEQ ID NO: 1250660 - DNA, 25 bp, Homo sapien
aatcttattacccacacagagctgg

SEQ ID NO: 1250661 - DNA, 25 bp, Homo sapien
gctcagtaatcttattacccacaca

SEQ ID NO: 1250662 - DNA, 25 bp, Homo sapien
tctaccgctcagtaatcttattacc

SEQ ID NO: 1250663 - DNA, 25 bp, Homo sapien
cagtaatcttattacccacacagag

SEQ ID NO: 1250664 - DNA, 25 bp, Homo sapien
tctcaacatgaccctccatagagct

SEQ ID NO: 1250665 - DNA, 25 bp, Homo sapien
ctctcaacatgaccctccatagagc

SEQ ID NO: 1250666 - DNA, 25 bp, Homo sapien
ctcaacatgaccctccatagagctg

SEQ ID NO: 1250667 - DNA, 25 bp, Homo sapien
tggccccttctaccataacagatgc

SEQ ID NO: 1250668 - DNA, 25 bp, Homo sapien
taacagatgcctgcctacagattct

SEQ ID NO: 1250669 - DNA, 25 bp, Homo sapien
gcagaattccttctatggccccttc

SEQ ID NO: 1250670 - DNA, 25 bp, Homo sapien
ccgcttcttaagttcccattcaatg

SEQ ID NO: 1250671 - DNA, 25 bp, Homo sapien
taaaagtgacatcaatgacaaaacc

SEQ ID NO: 1250672 - DNA, 25 bp, Homo sapien
tgacgctatgtaggattcgggctgt

SEQ ID NO: 1250673 - DNA, 25 bp, Homo sapien
tgcttcgtacgatgttgccttcact

SEQ ID NO: 1250674 - DNA, 25 bp, Homo sapien
aatgcctttgattgacgctatgtag

SEQ ID NO: 1250675 - DNA, 25 bp, Homo sapien
ctgcggcacaacccctacatggaga

SEQ ID NO: 1250676 - DNA, 25 bp, Homo sapien
tgcggcacaacccctacatggagac

SEQ ID NO: 1250677 - DNA, 25 bp, Homo sapien
gcggcacaacccctacatggagaca

SEQ ID NO: 1250678 - DNA, 25 bp, Homo sapien
cggcacaacccctacatggagacac

SEQ ID NO: 1250679 - DNA, 25 bp, Homo sapien
tcatggaagccacatgtgatccttt

SEQ ID NO: 1250680 - DNA, 25 bp, Homo sapien
gagtcatatattttagagaggaatg

SEQ ID NO: 1250681 - DNA, 25 bp, Homo sapien
tataactctatgtaattcctttgaa

SEQ ID NO: 1250682 - DNA, 25 bp, Homo sapien
tccttacactagtaaacagagtcat

SEQ ID NO: 1250683 - DNA, 25 bp, Homo sapien
tggagttcttcatacgtggctagca

SEQ ID NO: 1250684 - DNA, 25 bp, Homo sapien
tacaaccgaaggaatagcgtttggc

SEQ ID NO: 1250685 - DNA, 25 bp, Homo sapien
gtttatcattgcatcgccttatgga

SEQ ID NO: 1250686 - DNA, 25 bp, Homo sapien
tacgtggctagcatagaaagaatct

SEQ ID NO: 1250687 - DNA, 25 bp, Homo sapien
cttaggtgatccacaatctgatggg

SEQ ID NO: 1250688 - DNA, 25 bp, Homo sapien
gattactgtcctaggccgtagagca

SEQ ID NO: 1250689 - DNA, 25 bp, Homo sapien
tagcagcatgacgacagactaatag

SEQ ID NO: 1250690 - DNA, 25 bp, Homo sapien
gaaacctcagaaggagagcagccta

SEQ ID NO: 1250691 - DNA, 25 bp, Homo sapien
gagtcttctgagcattgttggagaa

SEQ ID NO: 1250692 - DNA, 25 bp, Homo sapien
ctgtgcccggcgtaagtgaatattc

SEQ ID NO: 1250693 - DNA, 25 bp, Homo sapien
taaagctacttgagggtattggaat

SEQ ID NO: 1250694 - DNA, 25 bp, Homo sapien
cacatggcctcccttttaactggtg

SEQ ID NO: 1250695 - DNA, 25 bp, Homo sapien
cctcccttttaactggtgtcctgtg

SEQ ID NO: 1250696 - DNA, 25 bp, Homo sapien
tggatgggtgccgttgactaaacat

SEQ ID NO: 1250697 - DNA, 25 bp, Homo sapien
cacctaaacagttgctatagagacc

SEQ ID NO: 1250698 - DNA, 25 bp, Homo sapien
tcccatggatgggtgccgttgacta

SEQ ID NO: 1250699 - DNA, 25 bp, Homo sapien
ttgctatagagaccgcctaaggttc

SEQ ID NO: 1250700 - DNA, 25 bp, Homo sapien
gaaaagtttatcataaggcaagaat

SEQ ID NO: 1250701 - DNA, 25 bp, Homo sapien
ctgaaaagtttatcataaggcaaga

SEQ ID NO: 1250702 - DNA, 25 bp, Homo sapien
tgaaaagtttatcataaggcaagaa

SEQ ID NO: 1250703 - DNA, 25 bp, Homo sapien
aaagtttatcataaggcaagaatta

SEQ ID NO: 1250704 - DNA, 25 bp, Homo sapien
tcatgctgacgtaggtggctggtcc

SEQ ID NO: 1250705 - DNA, 25 bp, Homo sapien
caaactccctgctggaattggccaa

SEQ ID NO: 1250706 - DNA, 25 bp, Homo sapien
cagtcagaatgtctccgaaatggga

SEQ ID NO: 1250707 - DNA, 25 bp, Homo sapien
gaaatgggagaattgatggacagcc

SEQ ID NO: 1250708 - DNA, 25 bp, Homo sapien
cataaataaataggtgaggtcatgt

SEQ ID NO: 1250709 - DNA, 25 bp, Homo sapien
catgtgccacgtgagagaagttatt

SEQ ID NO: 1250710 - DNA, 25 bp, Homo sapien
gaacttagttcttagatgatacctt

SEQ ID NO: 1250711 - DNA, 25 bp, Homo sapien
tgatacctttttgcattattgatgt

SEQ ID NO: 1250712 - DNA, 25 bp, Homo sapien
ctatttggctttgcaactctcattc

SEQ ID NO: 1250713 - DNA, 25 bp, Homo sapien
tatttggctttgcaactctcattct

SEQ ID NO: 1250714 - DNA, 25 bp, Homo sapien
gctaataagcttagtcctggacaag

SEQ ID NO: 1250715 - DNA, 25 bp, Homo sapien
tacaaacatcatgggtacatgcagt

SEQ ID NO: 1250716 - DNA, 25 bp, Homo sapien
tgacacctgattgaccactattctg

SEQ ID NO: 1250717 - DNA, 25 bp, Homo sapien
cctggacaagcttctgcacttggag

SEQ ID NO: 1250718 - DNA, 25 bp, Homo sapien
taggttccggttcaggctctactta

SEQ ID NO: 1250719 - DNA, 25 bp, Homo sapien
tctggtcaacaaacataggttccgg

SEQ ID NO: 1250720 - DNA, 25 bp, Homo sapien
ggtgcttgccatacagcccagctaa

SEQ ID NO: 1250721 - DNA, 25 bp, Homo sapien
gaccttgcacgaaaaagctcttaga

SEQ ID NO: 1250722 - DNA, 25 bp, Homo sapien
tgaagattgacccaaagagctctgg

SEQ ID NO: 1250723 - DNA, 25 bp, Homo sapien
agaattcagacccaactcggcctga

SEQ ID NO: 1250724 - DNA, 25 bp, Homo sapien
gcccaggctttctgtccactcaata

SEQ ID NO: 1250725 - DNA, 25 bp, Homo sapien
ggcttccagggcattatcctcattc

SEQ ID NO: 1250726 - DNA, 25 bp, Homo sapien
tatccaaatttggagcaaaactcct

SEQ ID NO: 1250727 - DNA, 25 bp, Homo sapien
tgatgtctgaaaaggcaccatatgg

SEQ ID NO: 1250728 - DNA, 25 bp, Homo sapien
gtcttcataagggtgatatgtaccc

SEQ ID NO: 1250729 - DNA, 25 bp, Homo sapien
tggggttgaatgagacagcactgct

SEQ ID NO: 1250730 - DNA, 25 bp, Homo sapien
tgataattcgcaatcgactcaccat

SEQ ID NO: 1250731 - DNA, 25 bp, Homo sapien
ttcccagtggagtcttagtcgatca

SEQ ID NO: 1250732 - DNA, 25 bp, Homo sapien
tcgtctaaacagcactcttcccagt

SEQ ID NO: 1250733 - DNA, 25 bp, Homo sapien
tagtcgatcatatccaaaccattca

SEQ ID NO: 1250734 - DNA, 25 bp, Homo sapien
tcaggcaacacgcccgtcagtcatg

SEQ ID NO: 1250735 - DNA, 25 bp, Homo sapien
gaaatgagctttggtcatagtcacc

SEQ ID NO: 1250736 - DNA, 25 bp, Homo sapien
ctctgtggccacttgttgggaaatg

SEQ ID NO: 1250737 - DNA, 25 bp, Homo sapien
caccacgtgattcctgggttctgaa

SEQ ID NO: 1250738 - DNA, 25 bp, Homo sapien
ttctcttatttcctctatccaaacc

SEQ ID NO: 1250739 - DNA, 25 bp, Homo sapien
ctcttatttcctctatccaaaccat

SEQ ID NO: 1250740 - DNA, 25 bp, Homo sapien
tctcttatttcctctatccaaacca

SEQ ID NO: 1250741 - DNA, 25 bp, Homo sapien
tatctgctgggacctcttctatctg

SEQ ID NO: 1250742 - DNA, 25 bp, Homo sapien
gtaggtagctctcagtgtcacccaa

SEQ ID NO: 1250743 - DNA, 25 bp, Homo sapien
tcatctcccaggacatcatgcacaa

SEQ ID NO: 1250744 - DNA, 25 bp, Homo sapien
taaatgttatcacccaagtctctgg

SEQ ID NO: 1250745 - DNA, 25 bp, Homo sapien
cctctccatggaaacttctagtaaa

SEQ ID NO: 1250746 - DNA, 25 bp, Homo sapien
caaaaaatttggttatcaactcaca

SEQ ID NO: 1250747 - DNA, 25 bp, Homo sapien
cttattcattctaaagaatgagcat

SEQ ID NO: 1250748 - DNA, 25 bp, Homo sapien
ggttatcaactcacactgttcctct

SEQ ID NO: 1250749 - DNA, 25 bp, Homo sapien
gcagaaggtccaggtcttcgctcac

SEQ ID NO: 1250750 - DNA, 25 bp, Homo sapien
tccaggtcttcgctcacatgcacat

SEQ ID NO: 1250751 - DNA, 25 bp, Homo sapien
caggtcttcgctcacatgcacatgg

SEQ ID NO: 1250752 - DNA, 25 bp, Homo sapien
cagaaggtccaggtcttcgctcaca

SEQ ID NO: 1250753 - DNA, 25 bp, Homo sapien
ctggaggagggaggccatgtctagc

SEQ ID NO: 1250754 - DNA, 25 bp, Homo sapien
tggaggagggaggccatgtctagca

SEQ ID NO: 1250755 - DNA, 25 bp, Homo sapien
ggaggagggaggccatgtctagcat

SEQ ID NO: 1250756 - DNA, 25 bp, Homo sapien
tctgccagcccagcagggagttctc

SEQ ID NO: 1250757 - DNA, 25 bp, Homo sapien
gatctgccagcccagcagggagttc

SEQ ID NO: 1250758 - DNA, 25 bp, Homo sapien
atctgccagcccagcagggagttct

SEQ ID NO: 1250759 - DNA, 25 bp, Homo sapien
tgaggccatgacaatccgggaagtt

SEQ ID NO: 1250760 - DNA, 25 bp, Homo sapien
tgggctcggctgacacttggctgtt

SEQ ID NO: 1250761 - DNA, 25 bp, Homo sapien
gagcttggacatgggatctctctca

SEQ ID NO: 1250762 - DNA, 25 bp, Homo sapien
gaagttcctggcgttctagggcaga

SEQ ID NO: 1250763 - DNA, 25 bp, Homo sapien
cacaaggcaggttgaatggaggcaa

SEQ ID NO: 1250764 - DNA, 25 bp, Homo sapien
caacagaaagtacagcagatggcag

SEQ ID NO: 1250765 - DNA, 25 bp, Homo sapien
tgccctgcccagtgatgagcaaaca

SEQ ID NO: 1250766 - DNA, 25 bp, Homo sapien
ggtcccatgcttgctagcaacagaa

SEQ ID NO: 1250767 - DNA, 25 bp, Homo sapien
actgtggttcattcacgctgggaaa

SEQ ID NO: 1250768 - DNA, 25 bp, Homo sapien
aaggtggccgcttttctgacatgaa

SEQ ID NO: 1250769 - DNA, 25 bp, Homo sapien
cacgctgggaaaggtggccgctttt

SEQ ID NO: 1250770 - DNA, 25 bp, Homo sapien
gaatccgtagctgcattatcatggg

SEQ ID NO: 1250771 - DNA, 25 bp, Homo sapien
ggtaaagaacagaacaagttcagtc

SEQ ID NO: 1250772 - DNA, 25 bp, Homo sapien
taaagaacagaacaagttcagtctg

SEQ ID NO: 1250773 - DNA, 25 bp, Homo sapien
gataactcacaaacttcacactggc

SEQ ID NO: 1250774 - DNA, 25 bp, Homo sapien
tgagataactcacaaacttcacact

SEQ ID NO: 1250775 - DNA, 25 bp, Homo sapien
agtagtttttctttcatgagtcccg

SEQ ID NO: 1250776 - DNA, 25 bp, Homo sapien
tctttcatgagtcccgcttccactg

SEQ ID NO: 1250777 - DNA, 25 bp, Homo sapien
catttctcttagacatgctctctcc

SEQ ID NO: 1250778 - DNA, 25 bp, Homo sapien
ttttctttcatgagtcccgcttcca

SEQ ID NO: 1250779 - DNA, 25 bp, Homo sapien
tgaaccgctttcactggttttccta

SEQ ID NO: 1250780 - DNA, 25 bp, Homo sapien
tgttctgaaccgctttcactggttt

SEQ ID NO: 1250781 - DNA, 25 bp, Homo sapien
tccttgttctgaaccgctttcactg

SEQ ID NO: 1250782 - DNA, 25 bp, Homo sapien
tctgaaccgctttcactggttttcc

SEQ ID NO: 1250783 - DNA, 25 bp, Homo sapien
tctcagcacccaggtatttagtatg

SEQ ID NO: 1250784 - DNA, 25 bp, Homo sapien
gaatcttaaaggacgatgagtttct

SEQ ID NO: 1250785 - DNA, 25 bp, Homo sapien
cctctctgaaaatatgtcgcatcct

SEQ ID NO: 1250786 - DNA, 25 bp, Homo sapien
tccaataatcctagaatgacccttt

SEQ ID NO: 1250787 - DNA, 25 bp, Homo sapien
caggcgtgccgcacttctcctttgt

SEQ ID NO: 1250788 - DNA, 25 bp, Homo sapien
aggcgtgccgcacttctcctttgtc

SEQ ID NO: 1250789 - DNA, 25 bp, Homo sapien
cagggacgcacagctcgccatcttg

SEQ ID NO: 1250790 - DNA, 25 bp, Homo sapien
agggacgcacagctcgccatcttgg

SEQ ID NO: 1250791 - DNA, 25 bp, Homo sapien
gaaaatctagatggagagcttgtgc

SEQ ID NO: 1250792 - DNA, 25 bp, Homo sapien
ccagatgattgagagactggttaga

SEQ ID NO: 1250793 - DNA, 25 bp, Homo sapien
ttgagagactggttagaaaatctag

SEQ ID NO: 1250794 - DNA, 25 bp, Homo sapien
tggagagcttgtgcgcagacagcat

SEQ ID NO: 1250795 - DNA, 25 bp, Homo sapien
gatggtaataccacctatcttagag

SEQ ID NO: 1250796 - DNA, 25 bp, Homo sapien
gaaaaccttgaacacaaatgccagc

SEQ ID NO: 1250797 - DNA, 25 bp, Homo sapien
caaaatctggcttacatatggtgga

SEQ ID NO: 1250798 - DNA, 25 bp, Homo sapien
cattagaccatggtgtcaaagacag

SEQ ID NO: 1250799 - DNA, 25 bp, Homo sapien
cacaagcatgtgacgaatcccagat

SEQ ID NO: 1250800 - DNA, 25 bp, Homo sapien
gatctaaggcaatactccagagaac

SEQ ID NO: 1250801 - DNA, 25 bp, Homo sapien
tcaaagcaattaaggagggtcacac

SEQ ID NO: 1250802 - DNA, 25 bp, Homo sapien
cacgtggtcatggttaacacaagca

SEQ ID NO: 1250803 - DNA, 25 bp, Homo sapien
ttgtgtctccttcttcatgcttcat

SEQ ID NO: 1250804 - DNA, 25 bp, Homo sapien
cttgtgtctccttcttcatgcttca

SEQ ID NO: 1250805 - DNA, 25 bp, Homo sapien
caccaggcagcctcgacagcaggag

SEQ ID NO: 1250806 - DNA, 25 bp, Homo sapien
gaccatcaggttggatctgaatcca

SEQ ID NO: 1250807 - DNA, 25 bp, Homo sapien
ctcgacagcaggagcgcaggccctg

SEQ ID NO: 1250808 - DNA, 25 bp, Homo sapien
ctgtaaggcaatgagagagagctcc

SEQ ID NO: 1250809 - DNA, 25 bp, Homo sapien
cttctgcaataacccagagacagct

SEQ ID NO: 1250810 - DNA, 25 bp, Homo sapien
gctagggcatcagaaaccaagcaga

SEQ ID NO: 1250811 - DNA, 25 bp, Homo sapien
gactgaggaggacattgccagagcc

SEQ ID NO: 1250812 - DNA, 25 bp, Homo sapien
ccagagacagctagggcatcagaaa

SEQ ID NO: 1250813 - DNA, 25 bp, Homo sapien
gaagagggtccacaaggaggctcac

SEQ ID NO: 1250814 - DNA, 25 bp, Homo sapien
cagggcaagaagagggtccacaagg

SEQ ID NO: 1250815 - DNA, 25 bp, Homo sapien
tatcgaaggctgagcagggcaagaa

SEQ ID NO: 1250816 - DNA, 25 bp, Homo sapien
ctatcgaaggctgagcagggcaaga

SEQ ID NO: 1250817 - DNA, 25 bp, Homo sapien
tgttgcggggagagccacagaggct

SEQ ID NO: 1250818 - DNA, 25 bp, Homo sapien
catgaggtgtcagagaccacgaagg

SEQ ID NO: 1250819 - DNA, 25 bp, Homo sapien
tcaaaccacaagccggtagctgggg

SEQ ID NO: 1250820 - DNA, 25 bp, Homo sapien
acagaggctgcatgaggtgtcagag

SEQ ID NO: 1250821 - DNA, 25 bp, Homo sapien
tataggaccttaatcatttcacatt

SEQ ID NO: 1250822 - DNA, 25 bp, Homo sapien
tctccaaaaggtcatcgttgcagaa

SEQ ID NO: 1250823 - DNA, 25 bp, Homo sapien
catcttcctccagtattggttgaaa

SEQ ID NO: 1250824 - DNA, 25 bp, Homo sapien
gcacagtgcttgatacataatggat

SEQ ID NO: 1250825 - DNA, 25 bp, Homo sapien
gggttcagtgttgaccttgcacaaa

SEQ ID NO: 1250826 - DNA, 25 bp, Homo sapien
cagactggagtcactgcacacactt

SEQ ID NO: 1250827 - DNA, 25 bp, Homo sapien
tcacgtccaagaggttaacaagcct

SEQ ID NO: 1250828 - DNA, 25 bp, Homo sapien
tgtagctcaatgttgtgacctggag

SEQ ID NO: 1250829 - DNA, 25 bp, Homo sapien
ttttgtcctgaaactgattatatgc

SEQ ID NO: 1250830 - DNA, 25 bp, Homo sapien
ttgtcctgaaactgattatatgctg

SEQ ID NO: 1250831 - DNA, 25 bp, Homo sapien
tttgtcctgaaactgattatatgct

SEQ ID NO: 1250832 - DNA, 25 bp, Homo sapien
gcatctccgcagctaattttccaga

SEQ ID NO: 1250833 - DNA, 25 bp, Homo sapien
ggtgagcataggatggaccctctac

SEQ ID NO: 1250834 - DNA, 25 bp, Homo sapien
caagaatacgaagaagtccatggac

SEQ ID NO: 1250835 - DNA, 25 bp, Homo sapien
gactataacgtgaggcatctgccct

SEQ ID NO: 1250836 - DNA, 25 bp, Homo sapien
tccacagctctgtatctgcggagca

SEQ ID NO: 1250837 - DNA, 25 bp, Homo sapien
cagcaagctgtttcaccaccctctg

SEQ ID NO: 1250838 - DNA, 25 bp, Homo sapien
gcaagctgtttcaccaccctctgag

SEQ ID NO: 1250839 - DNA, 25 bp, Homo sapien
ccacagctctgtatctgcggagcag

SEQ ID NO: 1250840 - DNA, 25 bp, Homo sapien
tcaaatgcttctgcccgtaggaact

SEQ ID NO: 1250841 - DNA, 25 bp, Homo sapien
aaagcaccacaaaaccaattcggat

SEQ ID NO: 1250842 - DNA, 25 bp, Homo sapien
aaccaattcggatgcggtgctcaaa

SEQ ID NO: 1250843 - DNA, 25 bp, Homo sapien
tcggatgcggtgctcaaatgcttct

SEQ ID NO: 1250844 - DNA, 25 bp, Homo sapien
cggaagacttttccgtattcacagt

SEQ ID NO: 1250845 - DNA, 25 bp, Homo sapien
tttctctggagtcacttctaaggac

SEQ ID NO: 1250846 - DNA, 25 bp, Homo sapien
cacttctaaggacatctaatgcttt

SEQ ID NO: 1250847 - DNA, 25 bp, Homo sapien
tccacggaagacttttccgtattca

SEQ ID NO: 1250848 - DNA, 25 bp, Homo sapien
tctgcctttttgccctttcttccca

SEQ ID NO: 1250849 - DNA, 25 bp, Homo sapien
tcagctctgcctttttgccctttct

SEQ ID NO: 1250850 - DNA, 25 bp, Homo sapien
gctctgcctttttgccctttcttcc

SEQ ID NO: 1250851 - DNA, 25 bp, Homo sapien
cagctctgcctttttgccctttctt

SEQ ID NO: 1250852 - DNA, 25 bp, Homo sapien
tctatgacacatcttatcatacttg

SEQ ID NO: 1250853 - DNA, 25 bp, Homo sapien
ttcccaccccttaacatatggaaga

SEQ ID NO: 1250854 - DNA, 25 bp, Homo sapien
cccttaacatatggaagaaaatctc

SEQ ID NO: 1250855 - DNA, 25 bp, Homo sapien
ttccttttcctggatattatatcct

SEQ ID NO: 1250856 - DNA, 25 bp, Homo sapien
catccacccactattcttagatctt

SEQ ID NO: 1250857 - DNA, 25 bp, Homo sapien
tgtgccttttactactgtggcatgc

SEQ ID NO: 1250858 - DNA, 25 bp, Homo sapien
catgcaagaaactccggatggcttg

SEQ ID NO: 1250859 - DNA, 25 bp, Homo sapien
gtggcatgcaagaaactccggatgg

SEQ ID NO: 1250860 - DNA, 25 bp, Homo sapien
attttaagttgagccatagtaagtc

SEQ ID NO: 1250861 - DNA, 25 bp, Homo sapien
gggtactatggatcatgcatgcagt

SEQ ID NO: 1250862 - DNA, 25 bp, Homo sapien
agaataagggatcattcttactggg

SEQ ID NO: 1250863 - DNA, 25 bp, Homo sapien
cacagtgcttcgcacctgtaatacc

SEQ ID NO: 1250864 - DNA, 25 bp, Homo sapien
taggacttagtaagtagatgggtcg

SEQ ID NO: 1250865 - DNA, 25 bp, Homo sapien
ttgtgcgtaggacttagtaagtaga

SEQ ID NO: 1250866 - DNA, 25 bp, Homo sapien
tagtaagtagatgggtcgggaggag

SEQ ID NO: 1250867 - DNA, 25 bp, Homo sapien
ttcagtttgtgcgtaggacttagta

SEQ ID NO: 1250868 - DNA, 25 bp, Homo sapien
gtctttcgtgtctcccaccagcaag

SEQ ID NO: 1250869 - DNA, 25 bp, Homo sapien
catatgagtgttatccaagaggcct

SEQ ID NO: 1250870 - DNA, 25 bp, Homo sapien
tctatccagtgcaagtcgggcgcta

SEQ ID NO: 1250871 - DNA, 25 bp, Homo sapien
tgccttagccctttgtgtgcctctg

SEQ ID NO: 1250872 - DNA, 25 bp, Homo sapien
ctggtgcaatggcgccctctgcagg

SEQ ID NO: 1250873 - DNA, 25 bp, Homo sapien
caggaactgcgttcttgagggacat

SEQ ID NO: 1250874 - DNA, 25 bp, Homo sapien
tctgcaggtagacagaagaattaac

SEQ ID NO: 1250875 - DNA, 25 bp, Homo sapien
gaagaattaacgtggtcccagctcc

SEQ ID NO: 1250876 - DNA, 25 bp, Homo sapien
gaggataataattctggtcattcac

SEQ ID NO: 1250877 - DNA, 25 bp, Homo sapien
caatagaagcacttagaggataata

SEQ ID NO: 1250878 - DNA, 25 bp, Homo sapien
tcacaggtgagggaggaattacttt

SEQ ID NO: 1250879 - DNA, 25 bp, Homo sapien
ggttgccttctatcttaggtggagc

SEQ ID NO: 1250880 - DNA, 25 bp, Homo sapien
ccatggagctcttgatgtttgaatc

SEQ ID NO: 1250881 - DNA, 25 bp, Homo sapien
gcccatggagctcttgatgtttgaa

SEQ ID NO: 1250882 - DNA, 25 bp, Homo sapien
ccaaagcccatggagctcttgatgt

SEQ ID NO: 1250883 - DNA, 25 bp, Homo sapien
gagctcttgatgtttgaatctctca

SEQ ID NO: 1250884 - DNA, 25 bp, Homo sapien
ccacatccccattctccacagtggc

SEQ ID NO: 1250885 - DNA, 25 bp, Homo sapien
ggccacatccccattctccacagtg

SEQ ID NO: 1250886 - DNA, 25 bp, Homo sapien
gccacatccccattctccacagtgg

SEQ ID NO: 1250887 - DNA, 25 bp, Homo sapien
tcaatcagtcatgatttcaatccct

SEQ ID NO: 1250888 - DNA, 25 bp, Homo sapien
ttccaaactgttcaaaataatctct

SEQ ID NO: 1250889 - DNA, 25 bp, Homo sapien
caatcccttcaatttttccaaactg

SEQ ID NO: 1250890 - DNA, 25 bp, Homo sapien
ttccacaactctcccatccaccttg

SEQ ID NO: 1250891 - DNA, 25 bp, Homo sapien
tcccaccaaaaccaccaccacgatc

SEQ ID NO: 1250892 - DNA, 25 bp, Homo sapien
accaaaaccaccaccacgatcacca

SEQ ID NO: 1250893 - DNA, 25 bp, Homo sapien
ccaccaaaaccaccaccacgatcac

SEQ ID NO: 1250894 - DNA, 25 bp, Homo sapien
catatccaccaccacaacagctgcc

SEQ ID NO: 1250895 - DNA, 25 bp, Homo sapien
tccaaatgccagttctaaaaaataa

SEQ ID NO: 1250896 - DNA, 25 bp, Homo sapien
tttgaaggatttctaaaatgaccac

SEQ ID NO: 1250897 - DNA, 25 bp, Homo sapien
tgaaggatttctaaaatgaccactt

SEQ ID NO: 1250898 - DNA, 25 bp, Homo sapien
ggatttctaaaatgaccacttccat

SEQ ID NO: 1250899 - DNA, 25 bp, Homo sapien
gaatgttgttgcagtgactcagcca

SEQ ID NO: 1250900 - DNA, 25 bp, Homo sapien
taagatcttgtaaagcctatgacaa

SEQ ID NO: 1250901 - DNA, 25 bp, Homo sapien
tgcacaggagcgacttgatctaata

SEQ ID NO: 1250902 - DNA, 25 bp, Homo sapien
agataatcatcatagcaaagggcaa

SEQ ID NO: 1250903 - DNA, 25 bp, Homo sapien
aactgcactttatcaggggtgccca

SEQ ID NO: 1250904 - DNA, 25 bp, Homo sapien
actgcactttatcaggggtgcccag

SEQ ID NO: 1250905 - DNA, 25 bp, Homo sapien
gccttgcatccttctccggcctgag

SEQ ID NO: 1250906 - DNA, 25 bp, Homo sapien
aatctgacatcgtatctggaacaca

SEQ ID NO: 1250907 - DNA, 25 bp, Homo sapien
caaatgccaataaggactttcagga

SEQ ID NO: 1250908 - DNA, 25 bp, Homo sapien
caaagatttcgccttctcagaggaa

SEQ ID NO: 1250909 - DNA, 25 bp, Homo sapien
tcatgaaggccatacgttgaagttt

SEQ ID NO: 1250910 - DNA, 25 bp, Homo sapien
cattctgtaatgcaacgagtgactg

SEQ ID NO: 1250911 - DNA, 25 bp, Homo sapien
tgctctgcacaacaaagtccccaaa

SEQ ID NO: 1250912 - DNA, 25 bp, Homo sapien
ccccaaacctagaatgtactgaaag

SEQ ID NO: 1250913 - DNA, 25 bp, Homo sapien
ctgcctccaagacatggccatggct

SEQ ID NO: 1250914 - DNA, 25 bp, Homo sapien
gctgcctccaagacatggccatggc

SEQ ID NO: 1250915 - DNA, 25 bp, Homo sapien
aaattgattgtcctttgcttccaga

SEQ ID NO: 1250916 - DNA, 25 bp, Homo sapien
tgcatctacacgctgttgctaagtg

SEQ ID NO: 1250917 - DNA, 25 bp, Homo sapien
ctcagtcttctgtggtggcttttca

SEQ ID NO: 1250918 - DNA, 25 bp, Homo sapien
tacagagttgtcttctaaccaagaa

SEQ ID NO: 1250919 - DNA, 25 bp, Homo sapien
ccatttttatgcacagtgatccatc

SEQ ID NO: 1250920 - DNA, 25 bp, Homo sapien
atacaggaatgggcacctccctgca

SEQ ID NO: 1250921 - DNA, 25 bp, Homo sapien
acagttggctgatacaggaatgggc

SEQ ID NO: 1250922 - DNA, 25 bp, Homo sapien
tttcttgccacagttggctgataca

SEQ ID NO: 1250923 - DNA, 25 bp, Homo sapien
tcctgagggtggtctccattacctt

SEQ ID NO: 1250924 - DNA, 25 bp, Homo sapien
gacgtgatgtttctctgaatgcgac

SEQ ID NO: 1250925 - DNA, 25 bp, Homo sapien
tcccacacaagaggcagacgtgatg

SEQ ID NO: 1250926 - DNA, 25 bp, Homo sapien
tgaatgcgacttgggaaaagcttct

SEQ ID NO: 1250927 - DNA, 25 bp, Homo sapien
gcaggagcttctgcccgcctctgct

SEQ ID NO: 1250928 - DNA, 25 bp, Homo sapien
cagcaggagcttctgcccgcctctg

SEQ ID NO: 1250929 - DNA, 25 bp, Homo sapien
cccgcctctgctgctgctgctccag

SEQ ID NO: 1250930 - DNA, 25 bp, Homo sapien
aggagcttctgcccgcctctgctgc

SEQ ID NO: 1250931 - DNA, 25 bp, Homo sapien
ctacctggccctcattccgcacgat

SEQ ID NO: 1250932 - DNA, 25 bp, Homo sapien
tgccatggccttcgtctcccagctc

SEQ ID NO: 1250933 - DNA, 25 bp, Homo sapien
aaggtgctcggtccatccgcgtccg

SEQ ID NO: 1250934 - DNA, 25 bp, Homo sapien
ctggccctcattccgcacgatgatg

SEQ ID NO: 1250935 - DNA, 25 bp, Homo sapien
ctccagcaagcatgtcagcatccat

SEQ ID NO: 1250936 - DNA, 25 bp, Homo sapien
tcatttctaacactcaaggggccac

SEQ ID NO: 1250937 - DNA, 25 bp, Homo sapien
tttctaacactcaaggggccacagg

SEQ ID NO: 1250938 - DNA, 25 bp, Homo sapien
tggttttcatttctaacactcaagg

SEQ ID NO: 1250939 - DNA, 25 bp, Homo sapien
tcaacagtcctgtgacatcattggg

SEQ ID NO: 1250940 - DNA, 25 bp, Homo sapien
ggccacagtcgaaatgactggagag

SEQ ID NO: 1250941 - DNA, 25 bp, Homo sapien
gagagcttgcaaaagtttagttctg

SEQ ID NO: 1250942 - DNA, 25 bp, Homo sapien
tggagagagcttgcaaaagtttagt

SEQ ID NO: 1250943 - DNA, 25 bp, Homo sapien
cagtaaagctttggataggcacaag

SEQ ID NO: 1250944 - DNA, 25 bp, Homo sapien
tttcctagcagacaacttaatgttg

SEQ ID NO: 1250945 - DNA, 25 bp, Homo sapien
caaactgaatatgagttccaaactc

SEQ ID NO: 1250946 - DNA, 25 bp, Homo sapien
tgtcaggtaaattcaattcacaagc

SEQ ID NO: 1250947 - DNA, 25 bp, Homo sapien
tctataaccatgattccaaacccca

SEQ ID NO: 1250948 - DNA, 25 bp, Homo sapien
cttgtcaccaaattcatctataacc

SEQ ID NO: 1250949 - DNA, 25 bp, Homo sapien
agatgtgtggaaactcatttccaaa

SEQ ID NO: 1250950 - DNA, 25 bp, Homo sapien
catgattccaaaccccacgtcagat

SEQ ID NO: 1250951 - DNA, 25 bp, Homo sapien
aactgcagaaccgtcattggtgtaa

SEQ ID NO: 1250952 - DNA, 25 bp, Homo sapien
gcctgttatctgtgcctctccgctt

SEQ ID NO: 1250953 - DNA, 25 bp, Homo sapien
ggtgtaatggaggtgcctgttatct

SEQ ID NO: 1250954 - DNA, 25 bp, Homo sapien
tgtgcctctccgcttcacgtattgc

SEQ ID NO: 1250955 - DNA, 25 bp, Homo sapien
acgtatttcctagccgtgtactcca

SEQ ID NO: 1250956 - DNA, 25 bp, Homo sapien
gatacgtatttcctagccgtgtact

SEQ ID NO: 1250957 - DNA, 25 bp, Homo sapien
tctgatacgtatttcctagccgtgt

SEQ ID NO: 1250958 - DNA, 25 bp, Homo sapien
cagcttctgatacgtatttcctagc

SEQ ID NO: 1250959 - DNA, 25 bp, Homo sapien
cagaacgagatatggcgccttgtgg

SEQ ID NO: 1250960 - DNA, 25 bp, Homo sapien
taaaccacccatgtgccaaagacaa

SEQ ID NO: 1250961 - DNA, 25 bp, Homo sapien
gatccttccagtgatgtgcagccat

SEQ ID NO: 1250962 - DNA, 25 bp, Homo sapien
gcagccatctgtcagaacgagatat

SEQ ID NO: 1250963 - DNA, 25 bp, Homo sapien
ctttggggtctgatgcctgatggct

SEQ ID NO: 1250964 - DNA, 25 bp, Homo sapien
ggggtctgatgcctgatggcttcat

SEQ ID NO: 1250965 - DNA, 25 bp, Homo sapien
ttggggtctgatgcctgatggcttc

SEQ ID NO: 1250966 - DNA, 25 bp, Homo sapien
tttggggtctgatgcctgatggctt

SEQ ID NO: 1250967 - DNA, 25 bp, Homo sapien
gcctttggaggaggtccactggcat

SEQ ID NO: 1250968 - DNA, 25 bp, Homo sapien
tgaccaaagcctgatatctgtagaa

SEQ ID NO: 1250969 - DNA, 25 bp, Homo sapien
agttcgtccaacatacccattagca

SEQ ID NO: 1250970 - DNA, 25 bp, Homo sapien
gaagtccattatgccaaattccatc

SEQ ID NO: 1250971 - DNA, 25 bp, Homo sapien
tctgcaccaacagttcgtccaacat

SEQ ID NO: 1250972 - DNA, 25 bp, Homo sapien
tgcccctttagacttagctcaggca

SEQ ID NO: 1250973 - DNA, 25 bp, Homo sapien
gcccctttagacttagctcaggcat

SEQ ID NO: 1250974 - DNA, 25 bp, Homo sapien
ttcaaaccagggctatactctacgg

SEQ ID NO: 1250975 - DNA, 25 bp, Homo sapien
tttcatccaagaggccatttttagg

SEQ ID NO: 1250976 - DNA, 25 bp, Homo sapien
ggagcacactttagtatttataggg

SEQ ID NO: 1250977 - DNA, 25 bp, Homo sapien
taggcatctcacaggataagtgggt

SEQ ID NO: 1250978 - DNA, 25 bp, Homo sapien
ggccttagttcacttggagcagcaa

SEQ ID NO: 1250979 - DNA, 25 bp, Homo sapien
caagtcgctaaagatgatgggcctc

SEQ ID NO: 1250980 - DNA, 25 bp, Homo sapien
gaccgcttgtaagtaaccaggaatc

SEQ ID NO: 1250981 - DNA, 25 bp, Homo sapien
gatgggcctctatggaacagaaaca

SEQ ID NO: 1250982 - DNA, 25 bp, Homo sapien
gcttgttgagccagcttgaggacaa

SEQ ID NO: 1250983 - DNA, 25 bp, Homo sapien
aatgagtgattgagacataaatctc

SEQ ID NO: 1250984 - DNA, 25 bp, Homo sapien
acataaatctcaatcactgaagctt

SEQ ID NO: 1250985 - DNA, 25 bp, Homo sapien
caagttatggatgcctgtttggctg

SEQ ID NO: 1250986 - DNA, 25 bp, Homo sapien
agactattgattcggacttccaggg

SEQ ID NO: 1250987 - DNA, 25 bp, Homo sapien
gggccgatgataagactattgattc

SEQ ID NO: 1250988 - DNA, 25 bp, Homo sapien
ttcggacttccagggttattggaga

SEQ ID NO: 1250989 - DNA, 25 bp, Homo sapien
gataagactattgattcggacttcc

SEQ ID NO: 1250990 - DNA, 25 bp, Homo sapien
tgtgccctcatggcaggtgtcacca

SEQ ID NO: 1250991 - DNA, 25 bp, Homo sapien
caccacttctaatgtgactctccat

SEQ ID NO: 1250992 - DNA, 25 bp, Homo sapien
tgtcaccacttctaatgtgactctc

SEQ ID NO: 1250993 - DNA, 25 bp, Homo sapien
ggtgtcaccacttctaatgtgactc

SEQ ID NO: 1250994 - DNA, 25 bp, Homo sapien
gtgaacgactttttgcagcaggtgg

SEQ ID NO: 1250995 - DNA, 25 bp, Homo sapien
tagatctatattcaggttgcatgga

SEQ ID NO: 1250996 - DNA, 25 bp, Homo sapien
tagaacagctgtctgaatttgcctg

SEQ ID NO: 1250997 - DNA, 25 bp, Homo sapien
ttgaccacagggagcgaaccaagga

SEQ ID NO: 1250998 - DNA, 25 bp, Homo sapien
ctcctctccaactattgctgctccc

SEQ ID NO: 1250999 - DNA, 25 bp, Homo sapien
tcctcctctccaactattgctgctc

SEQ ID NO: 1251000 - DNA, 25 bp, Homo sapien
cctcctctccaactattgctgctcc

SEQ ID NO: 1251001 - DNA, 25 bp, Homo sapien
aattcagtagaagtacagccagtgc

SEQ ID NO: 1251002 - DNA, 25 bp, Homo sapien
gaagtacagccagtgcaggcaccat

SEQ ID NO: 1251003 - DNA, 25 bp, Homo sapien
agtagaagtacagccagtgcaggca

SEQ ID NO: 1251004 - DNA, 25 bp, Homo sapien
ttcagtagaagtacagccagtgcag

SEQ ID NO: 1251005 - DNA, 25 bp, Homo sapien
tccaggatccacaggtgagctactc

SEQ ID NO: 1251006 - DNA, 25 bp, Homo sapien
gcatgaaaatgcctcgcctttgctt

SEQ ID NO: 1251007 - DNA, 25 bp, Homo sapien
gtccatctgcccaacagggtgttgc

SEQ ID NO: 1251008 - DNA, 25 bp, Homo sapien
gggtagttctgactcccatcgactc

SEQ ID NO: 1251009 - DNA, 25 bp, Homo sapien
tcttggggagcaaggtctgaaccag

SEQ ID NO: 1251010 - DNA, 25 bp, Homo sapien
ttggggagcaaggtctgaaccagaa

SEQ ID NO: 1251011 - DNA, 25 bp, Homo sapien
ggggagcaaggtctgaaccagaagt

SEQ ID NO: 1251012 - DNA, 25 bp, Homo sapien
ttcttggggagcaaggtctgaacca

SEQ ID NO: 1251013 - DNA, 25 bp, Homo sapien
cagtcaagttcatttcggatgataa

SEQ ID NO: 1251014 - DNA, 25 bp, Homo sapien
tgacggtgtggccgatttcccagac

SEQ ID NO: 1251015 - DNA, 25 bp, Homo sapien
tcatttcggatgataaactgataag

SEQ ID NO: 1251016 - DNA, 25 bp, Homo sapien
gatttcccagaccagtcaagttcat

SEQ ID NO: 1251017 - DNA, 25 bp, Homo sapien
ggtatatggtccagtgcacaaagtc

SEQ ID NO: 1251018 - DNA, 25 bp, Homo sapien
gtatatggtccagtgcacaaagtcc

SEQ ID NO: 1251019 - DNA, 25 bp, Homo sapien
gccagaccctgtggccttgcctagg

SEQ ID NO: 1251020 - DNA, 25 bp, Homo sapien
tatatggtccagtgcacaaagtcct

SEQ ID NO: 1251021 - DNA, 25 bp, Homo sapien
tgacatgtcccgtttgctgctgtcg

SEQ ID NO: 1251022 - DNA, 25 bp, Homo sapien
tgctgtcgccactgttcccttgaga

SEQ ID NO: 1251023 - DNA, 25 bp, Homo sapien
gagaaccacggatctagactgagaa

SEQ ID NO: 1251024 - DNA, 25 bp, Homo sapien
cacgctgcctagcttttctgtggta

SEQ ID NO: 1251025 - DNA, 25 bp, Homo sapien
ttctagccgatgaggagggttggga

SEQ ID NO: 1251026 - DNA, 25 bp, Homo sapien
ttaattagctctggcctgccgagga

SEQ ID NO: 1251027 - DNA, 25 bp, Homo sapien
caaacaggcagttctagccgatgag

SEQ ID NO: 1251028 - DNA, 25 bp, Homo sapien
tcttaattagctctggcctgccgag

SEQ ID NO: 1251029 - DNA, 25 bp, Homo sapien
accgcttcagtttttgtgtcagcca

SEQ ID NO: 1251030 - DNA, 25 bp, Homo sapien
agagctccagttggtgcttattttc

SEQ ID NO: 1251031 - DNA, 25 bp, Homo sapien
ttctttaaacgaagacagatacttg

SEQ ID NO: 1251032 - DNA, 25 bp, Homo sapien
ttgatctctgaattacaagtacaat

SEQ ID NO: 1251033 - DNA, 25 bp, Homo sapien
agagaaggttccctttactcaccat

SEQ ID NO: 1251034 - DNA, 25 bp, Homo sapien
cttccagacagataaccgtgggctc

SEQ ID NO: 1251035 - DNA, 25 bp, Homo sapien
agcaaagcacctttttccatctggg

SEQ ID NO: 1251036 - DNA, 25 bp, Homo sapien
gggatcagagagaaggttcccttta

SEQ ID NO: 1251037 - DNA, 25 bp, Homo sapien
tgtcttttgggacatttcacctttg

SEQ ID NO: 1251038 - DNA, 25 bp, Homo sapien
ctttgaaggctcttatcctcagact

SEQ ID NO: 1251039 - DNA, 25 bp, Homo sapien
gaaggctcttatcctcagactccat

SEQ ID NO: 1251040 - DNA, 25 bp, Homo sapien
tcttttgggacatttcacctttgct

SEQ ID NO: 1251041 - DNA, 25 bp, Homo sapien
tctagaaagacagctccaacaacag

SEQ ID NO: 1251042 - DNA, 25 bp, Homo sapien
tccggaatctctagaaagacagctc

SEQ ID NO: 1251043 - DNA, 25 bp, Homo sapien
tgccgactccggaatctctagaaag

SEQ ID NO: 1251044 - DNA, 25 bp, Homo sapien
ttagatgccatttgccgactccgga

SEQ ID NO: 1251045 - DNA, 25 bp, Homo sapien
cctggccctaccaatttgatttgtg

SEQ ID NO: 1251046 - DNA, 25 bp, Homo sapien
caaagtctgagcaatattcatgatc

SEQ ID NO: 1251047 - DNA, 25 bp, Homo sapien
tatcacaaaatcagatgccttcatg

SEQ ID NO: 1251048 - DNA, 25 bp, Homo sapien
gatatattcattggcacttatagcc

SEQ ID NO: 1251049 - DNA, 25 bp, Homo sapien
agtgctacttgtgggattatgagaa

SEQ ID NO: 1251050 - DNA, 25 bp, Homo sapien
tcagaggaaagtgcaaatgtgcaaa

SEQ ID NO: 1251051 - DNA, 25 bp, Homo sapien
ctgaatctaattgatcagaggaaag

SEQ ID NO: 1251052 - DNA, 25 bp, Homo sapien
gaggaaagtgcaaatgtgcaaaaga

SEQ ID NO: 1251053 - DNA, 25 bp, Homo sapien
gtcctggatggtgtcccatcatgat

SEQ ID NO: 1251054 - DNA, 25 bp, Homo sapien
cctggatggtgtcccatcatgattt

SEQ ID NO: 1251055 - DNA, 25 bp, Homo sapien
tcctggatggtgtcccatcatgatt

SEQ ID NO: 1251056 - DNA, 25 bp, Homo sapien
ggatggtgtcccatcatgatttttg

SEQ ID NO: 1251057 - DNA, 25 bp, Homo sapien
ctggggtgctgaaagggcccatttt

SEQ ID NO: 1251058 - DNA, 25 bp, Homo sapien
gaaagggcccattttcattcactcc

SEQ ID NO: 1251059 - DNA, 25 bp, Homo sapien
aattggctctccatgccagtggcca

SEQ ID NO: 1251060 - DNA, 25 bp, Homo sapien
tttcattcactccaaattggctctc

SEQ ID NO: 1251061 - DNA, 25 bp, Homo sapien
ccttcaccagtggaaactctctttt

SEQ ID NO: 1251062 - DNA, 25 bp, Homo sapien
gggagatggatctgatttgatgcca

SEQ ID NO: 1251063 - DNA, 25 bp, Homo sapien
tgccatgactgacacctgctcttct

SEQ ID NO: 1251064 - DNA, 25 bp, Homo sapien
tcttctcctagatggaaagaagtga

SEQ ID NO: 1251065 - DNA, 25 bp, Homo sapien
ggtatttcagtctcagtctcagatt

SEQ ID NO: 1251066 - DNA, 25 bp, Homo sapien
tgtggtatttcagtctcagtctcag

SEQ ID NO: 1251067 - DNA, 25 bp, Homo sapien
tatttcagtctcagtctcagatttc

SEQ ID NO: 1251068 - DNA, 25 bp, Homo sapien
catgtggtatttcagtctcagtctc

SEQ ID NO: 1251069 - DNA, 25 bp, Homo sapien
tcaagctgcggtgactaacacccca

SEQ ID NO: 1251070 - DNA, 25 bp, Homo sapien
ctgtctctatagagacagccgctca

SEQ ID NO: 1251071 - DNA, 25 bp, Homo sapien
ttttccaaagctctcgtacttgcag

SEQ ID NO: 1251072 - DNA, 25 bp, Homo sapien
cctgaggcatttgtactgtttttcc

SEQ ID NO: 1251073 - DNA, 25 bp, Homo sapien
atgtctgagttgatgtgcagctgat

SEQ ID NO: 1251074 - DNA, 25 bp, Homo sapien
ctgtgtagaagcatgtctgagttga

SEQ ID NO: 1251075 - DNA, 25 bp, Homo sapien
tatcctgtgtagaagcatgtctgag

SEQ ID NO: 1251076 - DNA, 25 bp, Homo sapien
cctggtatcctgtgtagaagcatgt

SEQ ID NO: 1251077 - DNA, 25 bp, Homo sapien
tctagccatttccaaccttcttgtg

SEQ ID NO: 1251078 - DNA, 25 bp, Homo sapien
tcaggctgttttcgctttgatgaca

SEQ ID NO: 1251079 - DNA, 25 bp, Homo sapien
tagtacttggcttttgactccaggt

SEQ ID NO: 1251080 - DNA, 25 bp, Homo sapien
cagctgcaggacatagccacttggc

SEQ ID NO: 1251081 - DNA, 25 bp, Homo sapien
ccttcgagagcgtcaggctcagcga

SEQ ID NO: 1251082 - DNA, 25 bp, Homo sapien
gcccagtgggaaagcctccggagta

SEQ ID NO: 1251083 - DNA, 25 bp, Homo sapien
ggctcagcgatcactccgatgcggg

SEQ ID NO: 1251084 - DNA, 25 bp, Homo sapien
ctccggagtagattgcgggccccag

SEQ ID NO: 1251085 - DNA, 25 bp, Homo sapien
ggaagggatgatgtcgccacaaatt

SEQ ID NO: 1251086 - DNA, 25 bp, Homo sapien
gaagggatgatgtcgccacaaattc

SEQ ID NO: 1251087 - DNA, 25 bp, Homo sapien
tctggtcaagtctcctcacagcctg

SEQ ID NO: 1251088 - DNA, 25 bp, Homo sapien
tccaggtcctcactgcacccgggtg

SEQ ID NO: 1251089 - DNA, 25 bp, Homo sapien
caggcagctctggtcaagtctcctc

SEQ ID NO: 1251090 - DNA, 25 bp, Homo sapien
aggtcctcactgcacccgggtggca

SEQ ID NO: 1251091 - DNA, 25 bp, Homo sapien
caagaaagagaagatgatcattttc

SEQ ID NO: 1251092 - DNA, 25 bp, Homo sapien
tgctgtgttaaagtggcttgggata

SEQ ID NO: 1251093 - DNA, 25 bp, Homo sapien
ttattagatctcaatgactgcttgc

SEQ ID NO: 1251094 - DNA, 25 bp, Homo sapien
atttggaagcaaatcaacttgatgc

SEQ ID NO: 1251095 - DNA, 25 bp, Homo sapien
cgaagaccccaaaaagcatccagag

SEQ ID NO: 1251096 - DNA, 25 bp, Homo sapien
taaaggcaatttcatcagtaaggca

SEQ ID NO: 1251097 - DNA, 25 bp, Homo sapien
tgtaacaagtagtacagggcccatt

SEQ ID NO: 1251098 - DNA, 25 bp, Homo sapien
tattcagatagctgtagaggagcca

SEQ ID NO: 1251099 - DNA, 25 bp, Homo sapien
gattcaaagtagttcggttccactg

SEQ ID NO: 1251100 - DNA, 25 bp, Homo sapien
tgaccactgggctttgtgaagtctc

SEQ ID NO: 1251101 - DNA, 25 bp, Homo sapien
tatggagagtcttgattagcccttc

SEQ ID NO: 1251102 - DNA, 25 bp, Homo sapien
gaaatcatcccttttggactatgga

SEQ ID NO: 1251103 - DNA, 25 bp, Homo sapien
ccctctccctgtccaatgtgtgagg

SEQ ID NO: 1251104 - DNA, 25 bp, Homo sapien
tccctgtccaatgtgtgaggccaga

SEQ ID NO: 1251105 - DNA, 25 bp, Homo sapien
tccaatgtgtgaggccagaggtgaa

SEQ ID NO: 1251106 - DNA, 25 bp, Homo sapien
aggccagaggtgaagcaggatcttc

SEQ ID NO: 1251107 - DNA, 25 bp, Homo sapien
agctcaggggtatctggacagccaa

SEQ ID NO: 1251108 - DNA, 25 bp, Homo sapien
gctccttcaagtaattgcatgtata

SEQ ID NO: 1251109 - DNA, 25 bp, Homo sapien
taatatatacacaggggagctcagg

SEQ ID NO: 1251110 - DNA, 25 bp, Homo sapien
agccaagcctggaaagcggtggttc

SEQ ID NO: 1251111 - DNA, 25 bp, Homo sapien
aacttggcagcaagatacctgtgca

SEQ ID NO: 1251112 - DNA, 25 bp, Homo sapien
tatggcagactggatcaggaactca

SEQ ID NO: 1251113 - DNA, 25 bp, Homo sapien
aacgatcatgttaataaaagccagg

SEQ ID NO: 1251114 - DNA, 25 bp, Homo sapien
aaaagccaggtcagtatgtgagctt

SEQ ID NO: 1251115 - DNA, 25 bp, Homo sapien
tctcccgatcaacattttgaattgt

SEQ ID NO: 1251116 - DNA, 25 bp, Homo sapien
aatattctcccgatcaacattttga

SEQ ID NO: 1251117 - DNA, 25 bp, Homo sapien
tctctgcaaggtcttaatattctcc

SEQ ID NO: 1251118 - DNA, 25 bp, Homo sapien
tgcaaggtcttaatattctcccgat

SEQ ID NO: 1251119 - DNA, 25 bp, Homo sapien
tggccaaagtacaatcagctcagct

SEQ ID NO: 1251120 - DNA, 25 bp, Homo sapien
cagtattaacccattagttggccaa

SEQ ID NO: 1251121 - DNA, 25 bp, Homo sapien
ccatccaattggagacactctattt

SEQ ID NO: 1251122 - DNA, 25 bp, Homo sapien
caatgtttagtcagggctaatttcc

SEQ ID NO: 1251123 - DNA, 25 bp, Homo sapien
agtttttatactgccccaagcctag

SEQ ID NO: 1251124 - DNA, 25 bp, Homo sapien
tatactgccccaagcctagtgcatt

SEQ ID NO: 1251125 - DNA, 25 bp, Homo sapien
ctctgagtttttatactgccccaag

SEQ ID NO: 1251126 - DNA, 25 bp, Homo sapien
tctgtgtctcctacacactgatttc

SEQ ID NO: 1251127 - DNA, 25 bp, Homo sapien
ttcctttgaatgacagatgagtcca

SEQ ID NO: 1251128 - DNA, 25 bp, Homo sapien
aagccaccaccaatgacagctactt

SEQ ID NO: 1251129 - DNA, 25 bp, Homo sapien
ccaatgacagctacttttttccttt

SEQ ID NO: 1251130 - DNA, 25 bp, Homo sapien
ttttcctttgaatgacagatgagtc

SEQ ID NO: 1251131 - DNA, 25 bp, Homo sapien
acagaaacctttgtatttaatggct

SEQ ID NO: 1251132 - DNA, 25 bp, Homo sapien
gaacagattaaaactcatactatat

SEQ ID NO: 1251133 - DNA, 25 bp, Homo sapien
tttgcagaagtgacgaataataatc

SEQ ID NO: 1251134 - DNA, 25 bp, Homo sapien
ccaacaatagtaatccatctgaaaa

SEQ ID NO: 1251135 - DNA, 25 bp, Homo sapien
gtttgttgatctctttgactgaaca

SEQ ID NO: 1251136 - DNA, 25 bp, Homo sapien
ggtttgttgatctctttgactgaac

SEQ ID NO: 1251137 - DNA, 25 bp, Homo sapien
ttactggtttgttgatctctttgac

SEQ ID NO: 1251138 - DNA, 25 bp, Homo sapien
ctggtttgttgatctctttgactga

SEQ ID NO: 1251139 - DNA, 25 bp, Homo sapien
agctttagctgtcactgaaatggtg

SEQ ID NO: 1251140 - DNA, 25 bp, Homo sapien
caaaaaatggtgtcttgagtagctt

SEQ ID NO: 1251141 - DNA, 25 bp, Homo sapien
gctttagctgtcactgaaatggtgc

SEQ ID NO: 1251142 - DNA, 25 bp, Homo sapien
tagctttagctgtcactgaaatggt

SEQ ID NO: 1251143 - DNA, 25 bp, Homo sapien
agctgtctaaagttgttggttccat

SEQ ID NO: 1251144 - DNA, 25 bp, Homo sapien
gttccattccagatacttcccacca

SEQ ID NO: 1251145 - DNA, 25 bp, Homo sapien
tgtttcgaagcaccaaacgttcacg

SEQ ID NO: 1251146 - DNA, 25 bp, Homo sapien
tgtaaagcatgctaagcgcaccaca

SEQ ID NO: 1251147 - DNA, 25 bp, Homo sapien
taattgggaataactgccagtgcca

SEQ ID NO: 1251148 - DNA, 25 bp, Homo sapien
ttagacagctgggagaaacaaaact

SEQ ID NO: 1251149 - DNA, 25 bp, Homo sapien
attcctctttgcaagaaagcatgct

SEQ ID NO: 1251150 - DNA, 25 bp, Homo sapien
aagaaagcatgcttgtaatgagcca

SEQ ID NO: 1251151 - DNA, 25 bp, Homo sapien
tgcaagaaagcatgcttgtaatgag

SEQ ID NO: 1251152 - DNA, 25 bp, Homo sapien
tctttgcaagaaagcatgcttgtaa

SEQ ID NO: 1251153 - DNA, 25 bp, Homo sapien
gcagactccatgttacgcacacttt

SEQ ID NO: 1251154 - DNA, 25 bp, Homo sapien
aattactgcatctgaacaactggtt

SEQ ID NO: 1251155 - DNA, 25 bp, Homo sapien
gcacactttatatcctagctcagga

SEQ ID NO: 1251156 - DNA, 25 bp, Homo sapien
gctcaggatgagcaaaattactgca

SEQ ID NO: 1251157 - DNA, 25 bp, Homo sapien
cttgtcgtcctctatgagaaagggc

SEQ ID NO: 1251158 - DNA, 25 bp, Homo sapien
cgtgtgaaggtagccactcgagtat

SEQ ID NO: 1251159 - DNA, 25 bp, Homo sapien
aagttaatgcttcttccacgtgtga

SEQ ID NO: 1251160 - DNA, 25 bp, Homo sapien
agctttcaaggcttgtcgtcctcta

SEQ ID NO: 1251161 - DNA, 25 bp, Homo sapien
gggtgcctcgagtgtccaatgttca

SEQ ID NO: 1251162 - DNA, 25 bp, Homo sapien
tcactttctacaggcagtgacgcac

SEQ ID NO: 1251163 - DNA, 25 bp, Homo sapien
tcagaagcaatcatccggttgcagg

SEQ ID NO: 1251164 - DNA, 25 bp, Homo sapien
catcctgttgagaacccaatatcag

SEQ ID NO: 1251165 - DNA, 25 bp, Homo sapien
ccagggttcctaacattcaatgcaa

SEQ ID NO: 1251166 - DNA, 25 bp, Homo sapien
agattatgaggagtaaaacccaggg

SEQ ID NO: 1251167 - DNA, 25 bp, Homo sapien
catgactgctgctatctgggagaaa

SEQ ID NO: 1251168 - DNA, 25 bp, Homo sapien
taatcttagatcttagaaccggctt

SEQ ID NO: 1251169 - DNA, 25 bp, Homo sapien
tgtcccatagggaattgcagacttt

SEQ ID NO: 1251170 - DNA, 25 bp, Homo sapien
ttcttgctctcatgggaataccttg

SEQ ID NO: 1251171 - DNA, 25 bp, Homo sapien
tcatgggaataccttgggatacaat

SEQ ID NO: 1251172 - DNA, 25 bp, Homo sapien
gactttgtcccatagggaattgcag

SEQ ID NO: 1251173 - DNA, 25 bp, Homo sapien
tattataagcccaattttgagcaag

SEQ ID NO: 1251174 - DNA, 25 bp, Homo sapien
tagaaatcatgtagtactcaaagca

SEQ ID NO: 1251175 - DNA, 25 bp, Homo sapien
gcacagagcaggataatgagtctcc

SEQ ID NO: 1251176 - DNA, 25 bp, Homo sapien
tctgttgtcgatggatgtttggtgc

SEQ ID NO: 1251177 - DNA, 25 bp, Homo sapien
agtcaatagatccttgtttagattt

SEQ ID NO: 1251178 - DNA, 25 bp, Homo sapien
tcaatagatccttgtttagattttc

SEQ ID NO: 1251179 - DNA, 25 bp, Homo sapien
caatagatccttgtttagattttct

SEQ ID NO: 1251180 - DNA, 25 bp, Homo sapien
cagtcaatagatccttgtttagatt

SEQ ID NO: 1251181 - DNA, 25 bp, Homo sapien
tatgacaagattagtgtcatgtgct

SEQ ID NO: 1251182 - DNA, 25 bp, Homo sapien
aaatcatatgacaagattagtgtca

SEQ ID NO: 1251183 - DNA, 25 bp, Homo sapien
aatccaataaatcatatgacaagat

SEQ ID NO: 1251184 - DNA, 25 bp, Homo sapien
agattagtgtcatgtgctttactca

SEQ ID NO: 1251185 - DNA, 25 bp, Homo sapien
taaaagccctgagaagtactataag

SEQ ID NO: 1251186 - DNA, 25 bp, Homo sapien
tccacaatgcagaccaagaatataa

SEQ ID NO: 1251187 - DNA, 25 bp, Homo sapien
gactgtgctgctctggaagatccac

SEQ ID NO: 1251188 - DNA, 25 bp, Homo sapien
aaagtatacacgtgcctggtatttg

SEQ ID NO: 1251189 - DNA, 25 bp, Homo sapien
caggagttctattcctgcctgtact

SEQ ID NO: 1251190 - DNA, 25 bp, Homo sapien
gattttgtccctattaatgctcatg

SEQ ID NO: 1251191 - DNA, 25 bp, Homo sapien
ctggaagtaaaggtaaaatgcctga

SEQ ID NO: 1251192 - DNA, 25 bp, Homo sapien
gttagagctggaatagacttcagag

SEQ ID NO: 1251193 - DNA, 25 bp, Homo sapien
tttcacattggggtatttctcagca

SEQ ID NO: 1251194 - DNA, 25 bp, Homo sapien
ttcacattggggtatttctcagcag

SEQ ID NO: 1251195 - DNA, 25 bp, Homo sapien
tcaacagcctgtggttaaagtgcat

SEQ ID NO: 1251196 - DNA, 25 bp, Homo sapien
caggaatgagagccggaagtactgt

SEQ ID NO: 1251197 - DNA, 25 bp, Homo sapien
gaatgagagccggaagtactgtcct

SEQ ID NO: 1251198 - DNA, 25 bp, Homo sapien
gagagccggaagtactgtcctgcag

SEQ ID NO: 1251199 - DNA, 25 bp, Homo sapien
tgagagccggaagtactgtcctgca

SEQ ID NO: 1251200 - DNA, 25 bp, Homo sapien
gtacctctgggtatgagaagtagtg

SEQ ID NO: 1251201 - DNA, 25 bp, Homo sapien
tgagaagtagtggctccatagataa

SEQ ID NO: 1251202 - DNA, 25 bp, Homo sapien
atgagaagtagtggctccatagata

SEQ ID NO: 1251203 - DNA, 25 bp, Homo sapien
tatgagaagtagtggctccatagat

SEQ ID NO: 1251204 - DNA, 25 bp, Homo sapien
caaaacatccaaaagaaaaatatgt

SEQ ID NO: 1251205 - DNA, 25 bp, Homo sapien
ctgaaaaatagaacaaaacatccaa

SEQ ID NO: 1251206 - DNA, 25 bp, Homo sapien
tgaaaaatagaacaaaacatccaaa

SEQ ID NO: 1251207 - DNA, 25 bp, Homo sapien
acaaaacatccaaaagaaaaatatg

SEQ ID NO: 1251208 - DNA, 25 bp, Homo sapien
gaatagtcaactccatgtacccatg

SEQ ID NO: 1251209 - DNA, 25 bp, Homo sapien
tacccatgaggaatgtactgctgac

SEQ ID NO: 1251210 - DNA, 25 bp, Homo sapien
taatcaaagcgaggtttcttcatca

SEQ ID NO: 1251211 - DNA, 25 bp, Homo sapien
agatctgacagttgaataggctcca

SEQ ID NO: 1251212 - DNA, 25 bp, Homo sapien
agtgggtcctctgtaattactatta

SEQ ID NO: 1251213 - DNA, 25 bp, Homo sapien
agacccaagtgacgcacatttttga

SEQ ID NO: 1251214 - DNA, 25 bp, Homo sapien
tctatactggacaaaaaggtcttac

SEQ ID NO: 1251215 - DNA, 25 bp, Homo sapien
gatcaattgacccaaagacccaagt

SEQ ID NO: 1251216 - DNA, 25 bp, Homo sapien
ggaagtgcaatcatcataaaggtat

SEQ ID NO: 1251217 - DNA, 25 bp, Homo sapien
aaatatgcagataattaggttccat

SEQ ID NO: 1251218 - DNA, 25 bp, Homo sapien
tgttaggaagtgcaatcatcataaa

SEQ ID NO: 1251219 - DNA, 25 bp, Homo sapien
gcagataattaggttccatggcata

SEQ ID NO: 1251220 - DNA, 25 bp, Homo sapien
ccacatcattactggttagaagttt

SEQ ID NO: 1251221 - DNA, 25 bp, Homo sapien
tgaacaaagtacatgtgaatgattt

SEQ ID NO: 1251222 - DNA, 25 bp, Homo sapien
tcttcaaagggcatgaacaaagtac

SEQ ID NO: 1251223 - DNA, 25 bp, Homo sapien
tcattactggttagaagtttttcaa

SEQ ID NO: 1251224 - DNA, 25 bp, Homo sapien
tctccaattagagggatggcatccg

SEQ ID NO: 1251225 - DNA, 25 bp, Homo sapien
caattagagggatggcatccggaaa

SEQ ID NO: 1251226 - DNA, 25 bp, Homo sapien
gatggcatccggaaagtatttctgg

SEQ ID NO: 1251227 - DNA, 25 bp, Homo sapien
gagggatggcatccggaaagtattt

SEQ ID NO: 1251228 - DNA, 25 bp, Homo sapien
taggatccaagatctgaggctgccg

SEQ ID NO: 1251229 - DNA, 25 bp, Homo sapien
aggctgccggatgtatctgctgtgc

SEQ ID NO: 1251230 - DNA, 25 bp, Homo sapien
aaagcctcgggacattggtggctca

SEQ ID NO: 1251231 - DNA, 25 bp, Homo sapien
tgaggagcctgcataagatgcccaa

SEQ ID NO: 1251232 - DNA, 25 bp, Homo sapien
ccttgcccaaaaaacggcactatag

SEQ ID NO: 1251233 - DNA, 25 bp, Homo sapien
cccaaaaaacggcactatagcatga

SEQ ID NO: 1251234 - DNA, 25 bp, Homo sapien
tcattccttgcccaaaaaacggcac

SEQ ID NO: 1251235 - DNA, 25 bp, Homo sapien
acggcactatagcatgagctgcatc

SEQ ID NO: 1251236 - DNA, 25 bp, Homo sapien
atcaaataccaagcagtcttcaaag

SEQ ID NO: 1251237 - DNA, 25 bp, Homo sapien
taactcatcaaataccaagcagtct

SEQ ID NO: 1251238 - DNA, 25 bp, Homo sapien
taaggtcgttactgaatttatccat

SEQ ID NO: 1251239 - DNA, 25 bp, Homo sapien
ccattaactcatcaaataccaagca

SEQ ID NO: 1251240 - DNA, 25 bp, Homo sapien
aacaagtgtaaaatcagaggtggcc

SEQ ID NO: 1251241 - DNA, 25 bp, Homo sapien
cctttgaaagcacgtgatgctggga

SEQ ID NO: 1251242 - DNA, 25 bp, Homo sapien
tctgaagttgagagtatcatcccca

SEQ ID NO: 1251243 - DNA, 25 bp, Homo sapien
taagtttaaggccagttctctagtc

SEQ ID NO: 1251244 - DNA, 25 bp, Homo sapien
cttgagaacacaggaagacacaaac

SEQ ID NO: 1251245 - DNA, 25 bp, Homo sapien
tgtaattgtacatggataggtctga

SEQ ID NO: 1251246 - DNA, 25 bp, Homo sapien
tctgaaatcgcgtgatcatctggga

SEQ ID NO: 1251247 - DNA, 25 bp, Homo sapien
cgcgtgatcatctgggattctcaat

SEQ ID NO: 1251248 - DNA, 25 bp, Homo sapien
catggataggtctgaaatcgcgtga

SEQ ID NO: 1251249 - DNA, 25 bp, Homo sapien
tgaaaaatgaaccagcttgagttga

SEQ ID NO: 1251250 - DNA, 25 bp, Homo sapien
aaaaatgaaccagcttgagttgaca

SEQ ID NO: 1251251 - DNA, 25 bp, Homo sapien
tgaaccagcttgagttgacatgtgc

SEQ ID NO: 1251252 - DNA, 25 bp, Homo sapien
aaatgaaccagcttgagttgacatg

SEQ ID NO: 1251253 - DNA, 25 bp, Homo sapien
ggtcgatggcataatcgcatgaaga

SEQ ID NO: 1251254 - DNA, 25 bp, Homo sapien
gataaaggtcgatggcataatcgca

SEQ ID NO: 1251255 - DNA, 25 bp, Homo sapien
tgtatagagagggataaaggtcgat

SEQ ID NO: 1251256 - DNA, 25 bp, Homo sapien
gagggataaaggtcgatggcataat

SEQ ID NO: 1251257 - DNA, 25 bp, Homo sapien
aatgccaacgctgcacagcctcatg

SEQ ID NO: 1251258 - DNA, 25 bp, Homo sapien
tgccaacgctgcacagcctcatggt

SEQ ID NO: 1251259 - DNA, 25 bp, Homo sapien
caacgctgcacagcctcatggtatc

SEQ ID NO: 1251260 - DNA, 25 bp, Homo sapien
gctgcacagcctcatggtatcttat

SEQ ID NO: 1251261 - DNA, 25 bp, Homo sapien
ggacagtagcttagcataactaaca

SEQ ID NO: 1251262 - DNA, 25 bp, Homo sapien
ttagcataactaacatagctatagt

SEQ ID NO: 1251263 - DNA, 25 bp, Homo sapien
agtagcttagcataactaacatagc

SEQ ID NO: 1251264 - DNA, 25 bp, Homo sapien
gcttagcataactaacatagctata

SEQ ID NO: 1251265 - DNA, 25 bp, Homo sapien
gatggctatcagtgatcccaagaaa

SEQ ID NO: 1251266 - DNA, 25 bp, Homo sapien
tctcaagcggaggaaagatcgtggt

SEQ ID NO: 1251267 - DNA, 25 bp, Homo sapien
aacatgttgtattccggaagtgagc

SEQ ID NO: 1251268 - DNA, 25 bp, Homo sapien
gaagtgagctatccagttccatggt

SEQ ID NO: 1251269 - DNA, 25 bp, Homo sapien
tatcttccactagtgaatcaaatat

SEQ ID NO: 1251270 - DNA, 25 bp, Homo sapien
taattataagcagaacactatcttc

SEQ ID NO: 1251271 - DNA, 25 bp, Homo sapien
tataagcagaacactatcttccact

SEQ ID NO: 1251272 - DNA, 25 bp, Homo sapien
gtgaatcaaatatggcaatggaaac

SEQ ID NO: 1251273 - DNA, 25 bp, Homo sapien
tttgtaagtctctggaactcccctg

SEQ ID NO: 1251274 - DNA, 25 bp, Homo sapien
tatctagtaagtctgagccctgtgg

SEQ ID NO: 1251275 - DNA, 25 bp, Homo sapien
gaaaaggcatgattactgtcttccc

SEQ ID NO: 1251276 - DNA, 25 bp, Homo sapien
tagtaaattgcttctgagggtctga

SEQ ID NO: 1251277 - DNA, 25 bp, Homo sapien
taagccagggagttctaagacgcca

SEQ ID NO: 1251278 - DNA, 25 bp, Homo sapien
tattcgatgttgtacccaggacacg

SEQ ID NO: 1251279 - DNA, 25 bp, Homo sapien
tacctgccctcatagaaagtgtgtg

SEQ ID NO: 1251280 - DNA, 25 bp, Homo sapien
tgacgacagcgacaaaaccaatggg

SEQ ID NO: 1251281 - DNA, 25 bp, Homo sapien
agcccaacgattggaaatggttaag

SEQ ID NO: 1251282 - DNA, 25 bp, Homo sapien
tgagtggcatatgcccaggaaaata

SEQ ID NO: 1251283 - DNA, 25 bp, Homo sapien
ttgagtggcatatgcccaggaaaat

SEQ ID NO: 1251284 - DNA, 25 bp, Homo sapien
taataactgctggtggaaagactag

SEQ ID NO: 1251285 - DNA, 25 bp, Homo sapien
caactggttgctgtgtggaatatgg

SEQ ID NO: 1251286 - DNA, 25 bp, Homo sapien
ctagctagatgtcagtgtggaaaga

SEQ ID NO: 1251287 - DNA, 25 bp, Homo sapien
ggaaagattagatccactttacatg

SEQ ID NO: 1251288 - DNA, 25 bp, Homo sapien
tcaaaattagaaaagagcaatctcg

SEQ ID NO: 1251289 - DNA, 25 bp, Homo sapien
taaaggacagtttcccatatgagta

SEQ ID NO: 1251290 - DNA, 25 bp, Homo sapien
tatgatgaatgctatgcagatgttg

SEQ ID NO: 1251291 - DNA, 25 bp, Homo sapien
gaaatgctgttttggacctccttca

SEQ ID NO: 1251292 - DNA, 25 bp, Homo sapien
tttccaactgaagaattctgccctc

SEQ ID NO: 1251293 - DNA, 25 bp, Homo sapien
aggagatctttccaactgaagaatt

SEQ ID NO: 1251294 - DNA, 25 bp, Homo sapien
tctttccaactgaagaattctgccc

SEQ ID NO: 1251295 - DNA, 25 bp, Homo sapien
ttttccaggagatctttccaactga

SEQ ID NO: 1251296 - DNA, 25 bp, Homo sapien
tttctataaacagtggagccatgcg

SEQ ID NO: 1251297 - DNA, 25 bp, Homo sapien
gaatcacacatagactgtaatggcc

SEQ ID NO: 1251298 - DNA, 25 bp, Homo sapien
gaagagttccagtcacaaatgcata

SEQ ID NO: 1251299 - DNA, 25 bp, Homo sapien
taagatgtcacactccaatggattg

SEQ ID NO: 1251300 - DNA, 25 bp, Homo sapien
ctctttcctctgctgatcccaccct

SEQ ID NO: 1251301 - DNA, 25 bp, Homo sapien
gctgatcccaccctcctgtgtctcc

SEQ ID NO: 1251302 - DNA, 25 bp, Homo sapien
gtgtctcctggtcacttctcccttc

SEQ ID NO: 1251303 - DNA, 25 bp, Homo sapien
ctctgctgatcccaccctcctgtgt

SEQ ID NO: 1251304 - DNA, 25 bp, Homo sapien
tagcggcagcctcttcggtgagttg

SEQ ID NO: 1251305 - DNA, 25 bp, Homo sapien
gcgtcggcaacaacctgctggtgct

SEQ ID NO: 1251306 - DNA, 25 bp, Homo sapien
ttcgtgtcctgcctgaggaacggct

SEQ ID NO: 1251307 - DNA, 25 bp, Homo sapien
gctggtgctcgtcctctactacaag

SEQ ID NO: 1251308 - DNA, 25 bp, Homo sapien
cgggccatgtactcggggaaccgca

SEQ ID NO: 1251309 - DNA, 25 bp, Homo sapien
ggccacggctactgggacggcggcg

SEQ ID NO: 1251310 - DNA, 25 bp, Homo sapien
tcagtgcacaatggctagagcaggc

SEQ ID NO: 1251311 - DNA, 25 bp, Homo sapien
gagccccgccgcaagctgagcgcct

SEQ ID NO: 1251312 - DNA, 25 bp, Homo sapien
cacgcccgtatggagagcagtttct

SEQ ID NO: 1251313 - DNA, 25 bp, Homo sapien
gaagtctcacagatggcgagtccag

SEQ ID NO: 1251314 - DNA, 25 bp, Homo sapien
tctctccagggaattcagaatgtgg

SEQ ID NO: 1251315 - DNA, 25 bp, Homo sapien
tgtgttcgtcaccagtgtccaggac

SEQ ID NO: 1251316 - DNA, 25 bp, Homo sapien
gtgtggacaagcgagttttccgtga

SEQ ID NO: 1251317 - DNA, 25 bp, Homo sapien
tttccgtgagttttagcttttcagc

SEQ ID NO: 1251318 - DNA, 25 bp, Homo sapien
ttcagcattacaatgtgctggcctt

SEQ ID NO: 1251319 - DNA, 25 bp, Homo sapien
gcttttcagcattacaatgtgctgg

SEQ ID NO: 1251320 - DNA, 25 bp, Homo sapien
tcctcaacacggctgtctcttgagt

SEQ ID NO: 1251321 - DNA, 25 bp, Homo sapien
actcctcaacacggctgtctcttga

SEQ ID NO: 1251322 - DNA, 25 bp, Homo sapien
cacactcctcaacacggctgtctct

SEQ ID NO: 1251323 - DNA, 25 bp, Homo sapien
cactcctcaacacggctgtctcttg

SEQ ID NO: 1251324 - DNA, 25 bp, Homo sapien
taaaaagatgacacaagagcagaag

SEQ ID NO: 1251325 - DNA, 25 bp, Homo sapien
aaaaagatgacacaagagcagaagc

SEQ ID NO: 1251326 - DNA, 25 bp, Homo sapien
aaaagatgacacaagagcagaagcc

SEQ ID NO: 1251327 - DNA, 25 bp, Homo sapien
aaagatgacacaagagcagaagcca

SEQ ID NO: 1251328 - DNA, 25 bp, Homo sapien
ttataagggcccgtatgaggaagga

SEQ ID NO: 1251329 - DNA, 25 bp, Homo sapien
taggcctggtaccagtcatctggca

SEQ ID NO: 1251330 - DNA, 25 bp, Homo sapien
gaaggagtgctaccatgacacaagg

SEQ ID NO: 1251331 - DNA, 25 bp, Homo sapien
gaagaactcctttgcggtgaaatga

SEQ ID NO: 1251332 - DNA, 25 bp, Homo sapien
cagttgttacagtgcctccctgctg

SEQ ID NO: 1251333 - DNA, 25 bp, Homo sapien
gagttgccactaggatgttagcagg

SEQ ID NO: 1251334 - DNA, 25 bp, Homo sapien
taaaatcccatagtgcgggtaggag

SEQ ID NO: 1251335 - DNA, 25 bp, Homo sapien
tgctgtctcagtttttgccctaggt

SEQ ID NO: 1251336 - DNA, 25 bp, Homo sapien
gccatgttgagacgcttttccttcc

SEQ ID NO: 1251337 - DNA, 25 bp, Homo sapien
ccatgttgagacgcttttccttcct

SEQ ID NO: 1251338 - DNA, 25 bp, Homo sapien
tcaaacctgttcaaagcctttttga

SEQ ID NO: 1251339 - DNA, 25 bp, Homo sapien
gtgccatgttgagacgcttttcctt

SEQ ID NO: 1251340 - DNA, 25 bp, Homo sapien
ctgcattgaaaaaagtacagtccat

SEQ ID NO: 1251341 - DNA, 25 bp, Homo sapien
ccaaagagcttctgtaccgatgcat

SEQ ID NO: 1251342 - DNA, 25 bp, Homo sapien
cagtctgcagatgcatccgtgttgt

SEQ ID NO: 1251343 - DNA, 25 bp, Homo sapien
tccgtgttgttgcacagtttcctgt

SEQ ID NO: 1251344 - DNA, 25 bp, Homo sapien
cacagtttcctgtaaaagcgtttca

SEQ ID NO: 1251345 - DNA, 25 bp, Homo sapien
catattatgaacatgaaatgagtct

SEQ ID NO: 1251346 - DNA, 25 bp, Homo sapien
ggatttcatattatgaacatgaaat

SEQ ID NO: 1251347 - DNA, 25 bp, Homo sapien
ctggatttcatattatgaacatgaa

SEQ ID NO: 1251348 - DNA, 25 bp, Homo sapien
tttcatattatgaacatgaaatgag

SEQ ID NO: 1251349 - DNA, 25 bp, Homo sapien
caacaaaggtggctgtctatccaga

SEQ ID NO: 1251350 - DNA, 25 bp, Homo sapien
tagcacagaagcaaccgtggccagt

SEQ ID NO: 1251351 - DNA, 25 bp, Homo sapien
tattgaaccacctttactttgctgg

SEQ ID NO: 1251352 - DNA, 25 bp, Homo sapien
ttgtacttgaatcctgcactgcagg

SEQ ID NO: 1251353 - DNA, 25 bp, Homo sapien
tatgggggaatatccgcagggttta

SEQ ID NO: 1251354 - DNA, 25 bp, Homo sapien
ggtttacaaagtgtgatagagatta

SEQ ID NO: 1251355 - DNA, 25 bp, Homo sapien
ttaccgatctatgggggaatatccg

SEQ ID NO: 1251356 - DNA, 25 bp, Homo sapien
gtttacaaagtgtgatagagattag

SEQ ID NO: 1251357 - DNA, 25 bp, Homo sapien
atcttcttcagaggagaagtatcca

SEQ ID NO: 1251358 - DNA, 25 bp, Homo sapien
gatcttcttcagaggagaagtatcc

SEQ ID NO: 1251359 - DNA, 25 bp, Homo sapien
caactgggaagcaataggatcttct

SEQ ID NO: 1251360 - DNA, 25 bp, Homo sapien
aactgggaagcaataggatcttctt

SEQ ID NO: 1251361 - DNA, 25 bp, Homo sapien
ccaggtgaggtatcttgacaatgct

SEQ ID NO: 1251362 - DNA, 25 bp, Homo sapien
ctttctgagtagctgttattagtaa

SEQ ID NO: 1251363 - DNA, 25 bp, Homo sapien
tgttattaatcctttctgagtagct

SEQ ID NO: 1251364 - DNA, 25 bp, Homo sapien
tgacaatgctcttaatcacatctcg

SEQ ID NO: 1251365 - DNA, 25 bp, Homo sapien
tatgtaagtggctcactaagctccc

SEQ ID NO: 1251366 - DNA, 25 bp, Homo sapien
gaggaacaatgccaaatgcagtcac

SEQ ID NO: 1251367 - DNA, 25 bp, Homo sapien
catggttccatatgacaccctgagg

SEQ ID NO: 1251368 - DNA, 25 bp, Homo sapien
cagtttcaaagaattgccacagagc

SEQ ID NO: 1251369 - DNA, 25 bp, Homo sapien
tgataaaattttaatcacataatga

SEQ ID NO: 1251370 - DNA, 25 bp, Homo sapien
gataaaattttaatcacataatgat

SEQ ID NO: 1251371 - DNA, 25 bp, Homo sapien
atgataaaattttaatcacataatg

SEQ ID NO: 1251372 - DNA, 25 bp, Homo sapien
tctatgattcgggatgaggaaccag

SEQ ID NO: 1251373 - DNA, 25 bp, Homo sapien
ggctgtctgtgacttcaacttctga

SEQ ID NO: 1251374 - DNA, 25 bp, Homo sapien
cacagctgtaagtgttagtgcgagg

SEQ ID NO: 1251375 - DNA, 25 bp, Homo sapien
gatattaaataacacgcacagctgt

SEQ ID NO: 1251376 - DNA, 25 bp, Homo sapien
aacattggtgctggtctgaactctc

SEQ ID NO: 1251377 - DNA, 25 bp, Homo sapien
cattggtgctggtctgaactctcat

SEQ ID NO: 1251378 - DNA, 25 bp, Homo sapien
taacattggtgctggtctgaactct

SEQ ID NO: 1251379 - DNA, 25 bp, Homo sapien
tgtaacattggtgctggtctgaact

SEQ ID NO: 1251380 - DNA, 25 bp, Homo sapien
ctggctgctcccttgagctttataa

SEQ ID NO: 1251381 - DNA, 25 bp, Homo sapien
tacgattcgtttcagctgcaagagg

SEQ ID NO: 1251382 - DNA, 25 bp, Homo sapien
taatggtcctttcggttgtggctac

SEQ ID NO: 1251383 - DNA, 25 bp, Homo sapien
tataatcccagacaataatggtcct

SEQ ID NO: 1251384 - DNA, 25 bp, Homo sapien
caagaggatgtcatctcggcagaga

SEQ ID NO: 1251385 - DNA, 25 bp, Homo sapien
caggaggcagtgatccattggtttt

SEQ ID NO: 1251386 - DNA, 25 bp, Homo sapien
gcctgctttattccaaagtcatcac

SEQ ID NO: 1251387 - DNA, 25 bp, Homo sapien
cactgttgactgtgaatctgttcac

SEQ ID NO: 1251388 - DNA, 25 bp, Homo sapien
agtcattatgtagcttccttttaac

SEQ ID NO: 1251389 - DNA, 25 bp, Homo sapien
ccagtcattatgtagcttcctttta

SEQ ID NO: 1251390 - DNA, 25 bp, Homo sapien
acccagtcattatgtagcttccttt

SEQ ID NO: 1251391 - DNA, 25 bp, Homo sapien
aacccagtcattatgtagcttcctt

SEQ ID NO: 1251392 - DNA, 25 bp, Homo sapien
caatttagggctgaaatatatctaa

SEQ ID NO: 1251393 - DNA, 25 bp, Homo sapien
aaacaatttagggctgaaatatatc

SEQ ID NO: 1251394 - DNA, 25 bp, Homo sapien
ccaaaacaatttagggctgaaatat

SEQ ID NO: 1251395 - DNA, 25 bp, Homo sapien
caaaacaatttagggctgaaatata

SEQ ID NO: 1251396 - DNA, 25 bp, Homo sapien
cattttcttaagaaacggtcaagcg

SEQ ID NO: 1251397 - DNA, 25 bp, Homo sapien
aatgagagtcccttttgctccacac

SEQ ID NO: 1251398 - DNA, 25 bp, Homo sapien
cggtcaagcggaattctaaagtcac

SEQ ID NO: 1251399 - DNA, 25 bp, Homo sapien
aagtgttttgcatcctttcttatgc

SEQ ID NO: 1251400 - DNA, 25 bp, Homo sapien
catacatgaataagcactctcataa

SEQ ID NO: 1251401 - DNA, 25 bp, Homo sapien
catcatactttctgagcagcaatgc

SEQ ID NO: 1251402 - DNA, 25 bp, Homo sapien
tgtggatggcgtcccagagctgtgg

SEQ ID NO: 1251403 - DNA, 25 bp, Homo sapien
cagcctatcgcagtggtccctggtt

SEQ ID NO: 1251404 - DNA, 25 bp, Homo sapien
tcacatttgccttaacacagtagca

SEQ ID NO: 1251405 - DNA, 25 bp, Homo sapien
cacatttgccttaacacagtagcaa

SEQ ID NO: 1251406 - DNA, 25 bp, Homo sapien
tggcatggaaaactctctgacaggc

SEQ ID NO: 1251407 - DNA, 25 bp, Homo sapien
gcaaaaagtgttggctcctcttggc

SEQ ID NO: 1251408 - DNA, 25 bp, Homo sapien
caatccatccatcaagtctcagcat

SEQ ID NO: 1251409 - DNA, 25 bp, Homo sapien
tcttcttcgagtatcccaatccatc

SEQ ID NO: 1251410 - DNA, 25 bp, Homo sapien
ttcctccagtaatattccagaatac

SEQ ID NO: 1251411 - DNA, 25 bp, Homo sapien
catcaagtctcagcatagcttttcc

SEQ ID NO: 1251412 - DNA, 25 bp, Homo sapien
gatctcggcgatactgaacatgtgt

SEQ ID NO: 1251413 - DNA, 25 bp, Homo sapien
ggaaaggctgacgacatgttgatct

SEQ ID NO: 1251414 - DNA, 25 bp, Homo sapien
agtttccctactggcttggtgctga

SEQ ID NO: 1251415 - DNA, 25 bp, Homo sapien
tttttcattggttacgatctcggcg

SEQ ID NO: 1251416 - DNA, 25 bp, Homo sapien
gatcccgattgcttccatcgaaggg

SEQ ID NO: 1251417 - DNA, 25 bp, Homo sapien
ggctccagggagattcgcatagttc

SEQ ID NO: 1251418 - DNA, 25 bp, Homo sapien
ttccgtgagcatggagggaacgact

SEQ ID NO: 1251419 - DNA, 25 bp, Homo sapien
catcgaagggttttgcatcgggtag

SEQ ID NO: 1251420 - DNA, 25 bp, Homo sapien
tggaagacttgtaatagtgaaagag

SEQ ID NO: 1251421 - DNA, 25 bp, Homo sapien
gagtttgtatatcccacacccggaa

SEQ ID NO: 1251422 - DNA, 25 bp, Homo sapien
tcctccctggctgtcatggaagact

SEQ ID NO: 1251423 - DNA, 25 bp, Homo sapien
ggtcctccctggctgtcatggaaga

SEQ ID NO: 1251424 - DNA, 25 bp, Homo sapien
gattggcatcatatatcatagagta

SEQ ID NO: 1251425 - DNA, 25 bp, Homo sapien
gccatgattggcatcatatatcata

SEQ ID NO: 1251426 - DNA, 25 bp, Homo sapien
taagcatgccatgattggcatcata

SEQ ID NO: 1251427 - DNA, 25 bp, Homo sapien
tcatatatcatagagtaaatctgca

SEQ ID NO: 1251428 - DNA, 25 bp, Homo sapien
ggatacatgtccataacactagatc

SEQ ID NO: 1251429 - DNA, 25 bp, Homo sapien
cttgtatcatcctagtcaaaggata

SEQ ID NO: 1251430 - DNA, 25 bp, Homo sapien
cctaattatggattcagagcagata

SEQ ID NO: 1251431 - DNA, 25 bp, Homo sapien
tgtgaggaacctgttttgtatcttg

SEQ ID NO: 1251432 - DNA, 25 bp, Homo sapien
cttttttcccacacagggatgacat

SEQ ID NO: 1251433 - DNA, 25 bp, Homo sapien
ttggagcccagtctcgagttcccat

SEQ ID NO: 1251434 - DNA, 25 bp, Homo sapien
gaaatccactttcatcgacagctgc

SEQ ID NO: 1251435 - DNA, 25 bp, Homo sapien
ggagcccagtctcgagttcccatac

SEQ ID NO: 1251436 - DNA, 25 bp, Homo sapien
atccactttcatcgacagctgcaga

SEQ ID NO: 1251437 - DNA, 25 bp, Homo sapien
ctaaagcagggacgccacattctgg

SEQ ID NO: 1251438 - DNA, 25 bp, Homo sapien
cagggacgccacattctggatgtta

SEQ ID NO: 1251439 - DNA, 25 bp, Homo sapien
gggacgccacattctggatgttagt

SEQ ID NO: 1251440 - DNA, 25 bp, Homo sapien
gccacattctggatgttagtctgac

SEQ ID NO: 1251441 - DNA, 25 bp, Homo sapien
ctcctgcccactgccaaagtcccag

SEQ ID NO: 1251442 - DNA, 25 bp, Homo sapien
cactgccaaagtcccagattctgac

SEQ ID NO: 1251443 - DNA, 25 bp, Homo sapien
tgcccactgccaaagtcccagattc

SEQ ID NO: 1251444 - DNA, 25 bp, Homo sapien
ccaaagtcccagattctgactgttc

SEQ ID NO: 1251445 - DNA, 25 bp, Homo sapien
agtgctcgtcctccttccagtcttt

SEQ ID NO: 1251446 - DNA, 25 bp, Homo sapien
aaaatgaggcgtcgtaggcagtgct

SEQ ID NO: 1251447 - DNA, 25 bp, Homo sapien
gctttgaggaaaatgaggcgtcgta

SEQ ID NO: 1251448 - DNA, 25 bp, Homo sapien
aggcgtcgtaggcagtgctcgtcct

SEQ ID NO: 1251449 - DNA, 25 bp, Homo sapien
acgagtatgaagtgggattgtaaac

SEQ ID NO: 1251450 - DNA, 25 bp, Homo sapien
tacgagtatgaagtgggattgtaaa

SEQ ID NO: 1251451 - DNA, 25 bp, Homo sapien
ctgcagtacgagtatgaagtgggat

SEQ ID NO: 1251452 - DNA, 25 bp, Homo sapien
cagtacgagtatgaagtgggattgt

SEQ ID NO: 1251453 - DNA, 25 bp, Homo sapien
gccctgagcagattgcgtcattaac

SEQ ID NO: 1251454 - DNA, 25 bp, Homo sapien
agccctgagcagattgcgtcattaa

SEQ ID NO: 1251455 - DNA, 25 bp, Homo sapien
aaggcacaacatcaggcagctccca

SEQ ID NO: 1251456 - DNA, 25 bp, Homo sapien
ttgtaggaaaggcacaacatcaggc

SEQ ID NO: 1251457 - DNA, 25 bp, Homo sapien
ggaaaggcacaacatcaggcagctc

SEQ ID NO: 1251458 - DNA, 25 bp, Homo sapien
agctcccagatcaccatgaggtaga

SEQ ID NO: 1251459 - DNA, 25 bp, Homo sapien
catgttcctgtctctagtagacatt

SEQ ID NO: 1251460 - DNA, 25 bp, Homo sapien
atgttcctgtctctagtagacattc

SEQ ID NO: 1251461 - DNA, 25 bp, Homo sapien
taggttgagaaaagttcctctcaac

SEQ ID NO: 1251462 - DNA, 25 bp, Homo sapien
cagtaggttgagaaaagttcctctc

SEQ ID NO: 1251463 - DNA, 25 bp, Homo sapien
agtaggttgagaaaagttcctctca

SEQ ID NO: 1251464 - DNA, 25 bp, Homo sapien
atcagtaggttgagaaaagttcctc

SEQ ID NO: 1251465 - DNA, 25 bp, Homo sapien
taaatcaatgcagttcactcgtaat

SEQ ID NO: 1251466 - DNA, 25 bp, Homo sapien
cactcgtaataaatccatggtggga

SEQ ID NO: 1251467 - DNA, 25 bp, Homo sapien
aggttccagctgctatcaaattata

SEQ ID NO: 1251468 - DNA, 25 bp, Homo sapien
tatccttctacttgtagtaaatcaa

SEQ ID NO: 1251469 - DNA, 25 bp, Homo sapien
ttttttgacagtagacgtcacaaaa

SEQ ID NO: 1251470 - DNA, 25 bp, Homo sapien
acaaaattccataagatgatcacac

SEQ ID NO: 1251471 - DNA, 25 bp, Homo sapien
acagtagacgtcacaaaattccata

SEQ ID NO: 1251472 - DNA, 25 bp, Homo sapien
tttgacagtagacgtcacaaaattc

SEQ ID NO: 1251473 - DNA, 25 bp, Homo sapien
gagcccttctgcagtaaagctttta

SEQ ID NO: 1251474 - DNA, 25 bp, Homo sapien
gctactgagcccttctgcagtaaag

SEQ ID NO: 1251475 - DNA, 25 bp, Homo sapien
tgcctcaccctctccattagatagg

SEQ ID NO: 1251476 - DNA, 25 bp, Homo sapien
ttacattgtttaaggataatacaca

SEQ ID NO: 1251477 - DNA, 25 bp, Homo sapien
aacactgaactttgtaggcaccatc

SEQ ID NO: 1251478 - DNA, 25 bp, Homo sapien
gacccagattccaaggtcaacactg

SEQ ID NO: 1251479 - DNA, 25 bp, Homo sapien
ctcctgttgacccagattccaaggt

SEQ ID NO: 1251480 - DNA, 25 bp, Homo sapien
caaggtcaacactgaactttgtagg

SEQ ID NO: 1251481 - DNA, 25 bp, Homo sapien
cagggtttacagtgaagcaatcttc

SEQ ID NO: 1251482 - DNA, 25 bp, Homo sapien
cattcaggggtacgaaagaggaaca

SEQ ID NO: 1251483 - DNA, 25 bp, Homo sapien
cttgggatgcaagtcagggtttaca

SEQ ID NO: 1251484 - DNA, 25 bp, Homo sapien
ttttaaagtgcttgggatgcaagtc

SEQ ID NO: 1251485 - DNA, 25 bp, Homo sapien
actttaagatatgctaccatactca

SEQ ID NO: 1251486 - DNA, 25 bp, Homo sapien
gatatgctaccatactcaaagggtg

SEQ ID NO: 1251487 - DNA, 25 bp, Homo sapien
accatactcaaagggtgtgcttctc

SEQ ID NO: 1251488 - DNA, 25 bp, Homo sapien
tgctaccatactcaaagggtgtgct

SEQ ID NO: 1251489 - DNA, 25 bp, Homo sapien
tgctctgtggacctttgctggattc

SEQ ID NO: 1251490 - DNA, 25 bp, Homo sapien
gattcacactgggatgaagaacata

SEQ ID NO: 1251491 - DNA, 25 bp, Homo sapien
gatgaagaacatatggaatcctgac

SEQ ID NO: 1251492 - DNA, 25 bp, Homo sapien
ctctgtggacctttgctggattcac

SEQ ID NO: 1251493 - DNA, 25 bp, Homo sapien
ttaacctcactgtcatgtatgcttt

SEQ ID NO: 1251494 - DNA, 25 bp, Homo sapien
tttaacctcactgtcatgtatgctt

SEQ ID NO: 1251495 - DNA, 25 bp, Homo sapien
tgttttttgtccattggctgttgct

SEQ ID NO: 1251496 - DNA, 25 bp, Homo sapien
gggcttctggtaaattggcaattcc

SEQ ID NO: 1251497 - DNA, 25 bp, Homo sapien
ctttcccaccattacatctgtttgt

SEQ ID NO: 1251498 - DNA, 25 bp, Homo sapien
tgctttcccaccattacatctgttt

SEQ ID NO: 1251499 - DNA, 25 bp, Homo sapien
ctccagagtccacaagcggaggtgt

SEQ ID NO: 1251500 - DNA, 25 bp, Homo sapien
agtccacaagcggaggtgtccatcc

SEQ ID NO: 1251501 - DNA, 25 bp, Homo sapien
aggtgtccatcctcatgagcagtga

SEQ ID NO: 1251502 - DNA, 25 bp, Homo sapien
gtccatcctcatgagcagtgacaag

SEQ ID NO: 1251503 - DNA, 25 bp, Homo sapien
tattagggacataagggatgagact

SEQ ID NO: 1251504 - DNA, 25 bp, Homo sapien
ggatgagactgaagcagtgtgccaa

SEQ ID NO: 1251505 - DNA, 25 bp, Homo sapien
gtatctatcccagtatgggtatctg

SEQ ID NO: 1251506 - DNA, 25 bp, Homo sapien
gaacattcttttctcaatacgggta

SEQ ID NO: 1251507 - DNA, 25 bp, Homo sapien
tggcagaaagccatgcggttccgtg

SEQ ID NO: 1251508 - DNA, 25 bp, Homo sapien
taagctaggatctactggtacactt

SEQ ID NO: 1251509 - DNA, 25 bp, Homo sapien
ggttgttttcacgaataagctagga

SEQ ID NO: 1251510 - DNA, 25 bp, Homo sapien
tggtacacttagagttttatctggc

SEQ ID NO: 1251511 - DNA, 25 bp, Homo sapien
tgttttgtgaaaggtagcatatctt

SEQ ID NO: 1251512 - DNA, 25 bp, Homo sapien
gaatcagtatacagcgatgtcagag

SEQ ID NO: 1251513 - DNA, 25 bp, Homo sapien
agtagtatcctcgtacatgaatcag

SEQ ID NO: 1251514 - DNA, 25 bp, Homo sapien
gtagcatatctttcagtagtcttcc

SEQ ID NO: 1251515 - DNA, 25 bp, Homo sapien
aatattgcaaaggataacatgtcct

SEQ ID NO: 1251516 - DNA, 25 bp, Homo sapien
catcatgaggtggatccaggaaaga

SEQ ID NO: 1251517 - DNA, 25 bp, Homo sapien
tttcatcatgaggtggatccaggaa

SEQ ID NO: 1251518 - DNA, 25 bp, Homo sapien
cttttcatcatgaggtggatccagg

SEQ ID NO: 1251519 - DNA, 25 bp, Homo sapien
caccagcagaccactgcaatttgtc

SEQ ID NO: 1251520 - DNA, 25 bp, Homo sapien
accagcagaccactgcaatttgtca

SEQ ID NO: 1251521 - DNA, 25 bp, Homo sapien
tcaccagcagaccactgcaatttgt

SEQ ID NO: 1251522 - DNA, 25 bp, Homo sapien
agccatcgatggaggcagtaagtac

SEQ ID NO: 1251523 - DNA, 25 bp, Homo sapien
tcgatggaggcagtaagtaccactt

SEQ ID NO: 1251524 - DNA, 25 bp, Homo sapien
tcttctacatagattacttgaataa

SEQ ID NO: 1251525 - DNA, 25 bp, Homo sapien
gaatgagcacgccaggaaagcagct

SEQ ID NO: 1251526 - DNA, 25 bp, Homo sapien
gagccttcgctgtccaaaatatcca

SEQ ID NO: 1251527 - DNA, 25 bp, Homo sapien
gatattcagtaacatcacaaggcaa

SEQ ID NO: 1251528 - DNA, 25 bp, Homo sapien
tatccacaataatgtccattgaggg

SEQ ID NO: 1251529 - DNA, 25 bp, Homo sapien
ttttcccggtcaaatatcagaggat

SEQ ID NO: 1251530 - DNA, 25 bp, Homo sapien
gaggtgtgcgtttgaaaagtagaga

SEQ ID NO: 1251531 - DNA, 25 bp, Homo sapien
ccttgggaggtgtgcgtttgaaaag

SEQ ID NO: 1251532 - DNA, 25 bp, Homo sapien
ttgaaaaacttgaaatcctgttcca

SEQ ID NO: 1251533 - DNA, 25 bp, Homo sapien
aaagtagagacactgagctcatttt

SEQ ID NO: 1251534 - DNA, 25 bp, Homo sapien
agagagccgaaaacaatccctgcct

SEQ ID NO: 1251535 - DNA, 25 bp, Homo sapien
actgtatataggcagagagccgaaa

SEQ ID NO: 1251536 - DNA, 25 bp, Homo sapien
gaaaccttccaagggatatcttcga

SEQ ID NO: 1251537 - DNA, 25 bp, Homo sapien
tctctgttttcagtcacgaaacctt

SEQ ID NO: 1251538 - DNA, 25 bp, Homo sapien
ggcttctacgccaatcagtggaaga

SEQ ID NO: 1251539 - DNA, 25 bp, Homo sapien
gaagaaatcttagactagtggggct

SEQ ID NO: 1251540 - DNA, 25 bp, Homo sapien
tttttcacgttgaacatgacctccc

SEQ ID NO: 1251541 - DNA, 25 bp, Homo sapien
tccttttgggcttctacgccaatca

SEQ ID NO: 1251542 - DNA, 25 bp, Homo sapien
gtctttatgtagattaactgtgaat

SEQ ID NO: 1251543 - DNA, 25 bp, Homo sapien
ttataaaacctaatgcacagagtcg

SEQ ID NO: 1251544 - DNA, 25 bp, Homo sapien
taaataagagtgcaaatagacataa

SEQ ID NO: 1251545 - DNA, 25 bp, Homo sapien
ggtacctaagacatatttggccatc

SEQ ID NO: 1251546 - DNA, 25 bp, Homo sapien
cagatttatttgtgggactaaattt

SEQ ID NO: 1251547 - DNA, 25 bp, Homo sapien
agccagatttatttgtgggactaaa

SEQ ID NO: 1251548 - DNA, 25 bp, Homo sapien
gccagatttatttgtgggactaaat

SEQ ID NO: 1251549 - DNA, 25 bp, Homo sapien
aagccagatttatttgtgggactaa

SEQ ID NO: 1251550 - DNA, 25 bp, Homo sapien
ccattttatgtgcagcagccatttc

SEQ ID NO: 1251551 - DNA, 25 bp, Homo sapien
gacaaacatctagagatctgactgg

SEQ ID NO: 1251552 - DNA, 25 bp, Homo sapien
gaaacaccgcctaaacttctggctg

SEQ ID NO: 1251553 - DNA, 25 bp, Homo sapien
cacatagcatgacttgaaagtgcct

SEQ ID NO: 1251554 - DNA, 25 bp, Homo sapien
tattcagagttaaggtcaccagaac

SEQ ID NO: 1251555 - DNA, 25 bp, Homo sapien
taggcatattcagtttttggttagc

SEQ ID NO: 1251556 - DNA, 25 bp, Homo sapien
aacacttggtaatcaatttggctgc

SEQ ID NO: 1251557 - DNA, 25 bp, Homo sapien
agaggtgactggtaggcatattcag

SEQ ID NO: 1251558 - DNA, 25 bp, Homo sapien
tgataacatagcttttgaagaggtg

SEQ ID NO: 1251559 - DNA, 25 bp, Homo sapien
tcatccccaggctttttcactacct

SEQ ID NO: 1251560 - DNA, 25 bp, Homo sapien
caggctttttcactacctctttttg

SEQ ID NO: 1251561 - DNA, 25 bp, Homo sapien
gtcttgcccacactcatccccaggc

SEQ ID NO: 1251562 - DNA, 25 bp, Homo sapien
ctgtcttgcccacactcatccccag

SEQ ID NO: 1251563 - DNA, 25 bp, Homo sapien
cagccgtactgtggactttgatgat

SEQ ID NO: 1251564 - DNA, 25 bp, Homo sapien
tggctacagtgaagattgagtgaac

SEQ ID NO: 1251565 - DNA, 25 bp, Homo sapien
gccttgctaagggtcttcagccgta

SEQ ID NO: 1251566 - DNA, 25 bp, Homo sapien
ttaggaggcctaagatgtagctcca

SEQ ID NO: 1251567 - DNA, 25 bp, Homo sapien
aaaatgtctctcacagatccgctgg

SEQ ID NO: 1251568 - DNA, 25 bp, Homo sapien
tcctggaatgccctagaccctcttt

SEQ ID NO: 1251569 - DNA, 25 bp, Homo sapien
tatttttgaggctaggccaataagc

SEQ ID NO: 1251570 - DNA, 25 bp, Homo sapien
tttagaaccagccattagccccaag

SEQ ID NO: 1251571 - DNA, 25 bp, Homo sapien
cagtacttggtttggaacttcaagc

SEQ ID NO: 1251572 - DNA, 25 bp, Homo sapien
gctgtcaggtttcgtagctgcaaca

SEQ ID NO: 1251573 - DNA, 25 bp, Homo sapien
ctttgacagctttggtgactggttt

SEQ ID NO: 1251574 - DNA, 25 bp, Homo sapien
taagggccatgcgtgtttggctttg

SEQ ID NO: 1251575 - DNA, 25 bp, Homo sapien
ctattgtcaaggtggagaacgctga

SEQ ID NO: 1251576 - DNA, 25 bp, Homo sapien
gctattgtcaaggtggagaacgctg

SEQ ID NO: 1251577 - DNA, 25 bp, Homo sapien
agggtttgttgccatggctcagcag

SEQ ID NO: 1251578 - DNA, 25 bp, Homo sapien
tgaagggtttgttgccatggctcag

SEQ ID NO: 1251579 - DNA, 25 bp, Homo sapien
gactgaagggtttgttgccatggct

SEQ ID NO: 1251580 - DNA, 25 bp, Homo sapien
ctgactgaagggtttgttgccatgg

SEQ ID NO: 1251581 - DNA, 25 bp, Homo sapien
ccctgtggcctccagtgaggaggat

SEQ ID NO: 1251582 - DNA, 25 bp, Homo sapien
cctccagtgaggaggatcagaatgg

SEQ ID NO: 1251583 - DNA, 25 bp, Homo sapien
aagtaataagccactagccagctgc

SEQ ID NO: 1251584 - DNA, 25 bp, Homo sapien
gaggatcagaatggtccccggggta

SEQ ID NO: 1251585 - DNA, 25 bp, Homo sapien
cgattgagggccagaggtccagtca

SEQ ID NO: 1251586 - DNA, 25 bp, Homo sapien
gattgagggccagaggtccagtcac

SEQ ID NO: 1251587 - DNA, 25 bp, Homo sapien
tcgattgagggccagaggtccagtc

SEQ ID NO: 1251588 - DNA, 25 bp, Homo sapien
atttgtccgggcaaacacagatggc

SEQ ID NO: 1251589 - DNA, 25 bp, Homo sapien
gtttttcgtaaaatgtgtgagtcca

SEQ ID NO: 1251590 - DNA, 25 bp, Homo sapien
tcaccttcctggtctgaacttccac

SEQ ID NO: 1251591 - DNA, 25 bp, Homo sapien
cacagatggcaggtagacctgatgc

SEQ ID NO: 1251592 - DNA, 25 bp, Homo sapien
catggcccaagtgaatttgcttatc

SEQ ID NO: 1251593 - DNA, 25 bp, Homo sapien
gcttcaactttttgcttatctccat

SEQ ID NO: 1251594 - DNA, 25 bp, Homo sapien
gcagcacttgcttctctcatgattt

SEQ ID NO: 1251595 - DNA, 25 bp, Homo sapien
tgttaccacgactttctcatggccc

SEQ ID NO: 1251596 - DNA, 25 bp, Homo sapien
ctttggatagctagcatatgtattt

SEQ ID NO: 1251597 - DNA, 25 bp, Homo sapien
tttggatagctagcatatgtattta

SEQ ID NO: 1251598 - DNA, 25 bp, Homo sapien
ttggatagctagcatatgtatttat

SEQ ID NO: 1251599 - DNA, 25 bp, Homo sapien
gccggggctgctgggcgttgtagtt

SEQ ID NO: 1251600 - DNA, 25 bp, Homo sapien
gtgtttacacccgccggggctgctg

SEQ ID NO: 1251601 - DNA, 25 bp, Homo sapien
gagtgtttacacccgccggggctgc

SEQ ID NO: 1251602 - DNA, 25 bp, Homo sapien
ggctgctgggcgttgtagttccctc

SEQ ID NO: 1251603 - DNA, 25 bp, Homo sapien
ggcgcgagtggcactggcgctgatg

SEQ ID NO: 1251604 - DNA, 25 bp, Homo sapien
gcgagtggcactggcgctgatggcc

SEQ ID NO: 1251605 - DNA, 25 bp, Homo sapien
gagggcgcgagtggcactggcgctg

SEQ ID NO: 1251606 - DNA, 25 bp, Homo sapien
cttgagggcgcgagtggcactggcg

SEQ ID NO: 1251607 - DNA, 25 bp, Homo sapien
aaggctgacctttcaatttgcgcgg

SEQ ID NO: 1251608 - DNA, 25 bp, Homo sapien
gaacacgggtaacttgcctacacag

SEQ ID NO: 1251609 - DNA, 25 bp, Homo sapien
tcatagggttgcgtcctgagctctc

SEQ ID NO: 1251610 - DNA, 25 bp, Homo sapien
gatgtgacgtcaacgcgtatcccgc

SEQ ID NO: 1251611 - DNA, 25 bp, Homo sapien
cccttgagcggagccgattgcggtt

SEQ ID NO: 1251612 - DNA, 25 bp, Homo sapien
tcctccccttgagcggagccgattg

SEQ ID NO: 1251613 - DNA, 25 bp, Homo sapien
ttgcggttggagaaacccgctccga

SEQ ID NO: 1251614 - DNA, 25 bp, Homo sapien
gagccgattgcggttggagaaaccc

SEQ ID NO: 1251615 - DNA, 25 bp, Homo sapien
tggcactcgaggtaacaataacagc

SEQ ID NO: 1251616 - DNA, 25 bp, Homo sapien
gggccaggcaaatatcctcgaataa

SEQ ID NO: 1251617 - DNA, 25 bp, Homo sapien
caagcccattccagacgacacgttt

SEQ ID NO: 1251618 - DNA, 25 bp, Homo sapien
catatctcagaggtcgcatgtggca

SEQ ID NO: 1251619 - DNA, 25 bp, Homo sapien
tctaaaggctctggtccagcagttc

SEQ ID NO: 1251620 - DNA, 25 bp, Homo sapien
gacaccttatcagagctctaaaggc

SEQ ID NO: 1251621 - DNA, 25 bp, Homo sapien
ggttcttagactctcaactccactc

SEQ ID NO: 1251622 - DNA, 25 bp, Homo sapien
tccactcagtgactgggattcacta

SEQ ID NO: 1251623 - DNA, 25 bp, Homo sapien
agagattctggaactgtcacaaccc

SEQ ID NO: 1251624 - DNA, 25 bp, Homo sapien
gtgaaactgcgtctgctatgcaaat

SEQ ID NO: 1251625 - DNA, 25 bp, Homo sapien
cagcttcaagacaaatgctttaact

SEQ ID NO: 1251626 - DNA, 25 bp, Homo sapien
taaagaactgtgaaactgcgtctgc

SEQ ID NO: 1251627 - DNA, 25 bp, Homo sapien
aattgtagcaatccctgtatcccca

SEQ ID NO: 1251628 - DNA, 25 bp, Homo sapien
gaagccagcaatatgtatccacagc

SEQ ID NO: 1251629 - DNA, 25 bp, Homo sapien
gtttttcagcacaagcaatagctcc

SEQ ID NO: 1251630 - DNA, 25 bp, Homo sapien
tatcagtaggttcacctttggctag

SEQ ID NO: 1251631 - DNA, 25 bp, Homo sapien
tacatccatcaaatacgagaatagg

SEQ ID NO: 1251632 - DNA, 25 bp, Homo sapien
caaatacgagaataggcttgatccc

SEQ ID NO: 1251633 - DNA, 25 bp, Homo sapien
ttttagaaggtaaagtacatccatc

SEQ ID NO: 1251634 - DNA, 25 bp, Homo sapien
gaataggcttgatcccatgagatag

SEQ ID NO: 1251635 - DNA, 25 bp, Homo sapien
ccttaagaagattggcttgtcgtct

SEQ ID NO: 1251636 - DNA, 25 bp, Homo sapien
ttccgagactttcccctcacgaaga

SEQ ID NO: 1251637 - DNA, 25 bp, Homo sapien
tcccctcacgaagaagttgctttcc

SEQ ID NO: 1251638 - DNA, 25 bp, Homo sapien
gaccgggtgaaacactctcgagctt

SEQ ID NO: 1251639 - DNA, 25 bp, Homo sapien
caattcccgctttgttaagataggc

SEQ ID NO: 1251640 - DNA, 25 bp, Homo sapien
catcagcttcatagggagccacgag

SEQ ID NO: 1251641 - DNA, 25 bp, Homo sapien
tacagccaaaagctaggagatccga

SEQ ID NO: 1251642 - DNA, 25 bp, Homo sapien
taagataggccaactgcgcatcagc

SEQ ID NO: 1251643 - DNA, 25 bp, Homo sapien
tccaatcccacgcagtgatgacagg

SEQ ID NO: 1251644 - DNA, 25 bp, Homo sapien
tcctagccgagcttgatcaatttca

SEQ ID NO: 1251645 - DNA, 25 bp, Homo sapien
aagctgtctgcacattcctagccga

SEQ ID NO: 1251646 - DNA, 25 bp, Homo sapien
tccgtgaatacatccccaagctgtc

SEQ ID NO: 1251647 - DNA, 25 bp, Homo sapien
cccagcgtagcttagtgtttcagga

SEQ ID NO: 1251648 - DNA, 25 bp, Homo sapien
taggcgttcagaggaataagtttcc

SEQ ID NO: 1251649 - DNA, 25 bp, Homo sapien
gatgtaatcctctggtaccgtgata

SEQ ID NO: 1251650 - DNA, 25 bp, Homo sapien
tggcccgaataaacccgttgatgta

SEQ ID NO: 1251651 - DNA, 25 bp, Homo sapien
gtgctatttgaagagctatggaatc

SEQ ID NO: 1251652 - DNA, 25 bp, Homo sapien
tagtcatcgatctgttcaaaagtat

SEQ ID NO: 1251653 - DNA, 25 bp, Homo sapien
gcagtgtctggattgtagtcatcga

SEQ ID NO: 1251654 - DNA, 25 bp, Homo sapien
tatttgaagagctatggaatcatca

SEQ ID NO: 1251655 - DNA, 25 bp, Homo sapien
gccccttcaaatatgactggccaga

SEQ ID NO: 1251656 - DNA, 25 bp, Homo sapien
gaaagctggctactataactaagga

SEQ ID NO: 1251657 - DNA, 25 bp, Homo sapien
ccgtattacatggagcaaggttaga

SEQ ID NO: 1251658 - DNA, 25 bp, Homo sapien
ggtacacagcagttacagagagcgg

SEQ ID NO: 1251659 - DNA, 25 bp, Homo sapien
ccttaaaaacaatagctgttgatga

SEQ ID NO: 1251660 - DNA, 25 bp, Homo sapien
actttgctggtcctatacttttcca

SEQ ID NO: 1251661 - DNA, 25 bp, Homo sapien
atttcctactttgctggtcctatac

SEQ ID NO: 1251662 - DNA, 25 bp, Homo sapien
tcctactttgctggtcctatacttt

SEQ ID NO: 1251663 - DNA, 25 bp, Homo sapien
tctgggagagtaattcctatgccaa

SEQ ID NO: 1251664 - DNA, 25 bp, Homo sapien
gacatgttttgtcatcccaactatg

SEQ ID NO: 1251665 - DNA, 25 bp, Homo sapien
tcgttccactcccacagtacttgga

SEQ ID NO: 1251666 - DNA, 25 bp, Homo sapien
cagtacccgactctggtctgggaga

SEQ ID NO: 1251667 - DNA, 25 bp, Homo sapien
ccaggtcaggcacaaacacttcaga

SEQ ID NO: 1251668 - DNA, 25 bp, Homo sapien
tagtaggtccatttaccaggtcagg

SEQ ID NO: 1251669 - DNA, 25 bp, Homo sapien
gaaagagaatactgactcaacaggt

SEQ ID NO: 1251670 - DNA, 25 bp, Homo sapien
tcgtcctaggtggagtgcttacact

SEQ ID NO: 1251671 - DNA, 25 bp, Homo sapien
gtccctggaaccacaactgcaccac

SEQ ID NO: 1251672 - DNA, 25 bp, Homo sapien
ggtccctggaaccacaactgcacca

SEQ ID NO: 1251673 - DNA, 25 bp, Homo sapien
tcaatgataggctgggtatagaaaa

SEQ ID NO: 1251674 - DNA, 25 bp, Homo sapien
tgtgacagcagtttcatccagaggc

SEQ ID NO: 1251675 - DNA, 25 bp, Homo sapien
gccttgtctggaatatgatcacctg

SEQ ID NO: 1251676 - DNA, 25 bp, Homo sapien
ttcctgggactgtgaagaacatgcc

SEQ ID NO: 1251677 - DNA, 25 bp, Homo sapien
ggaatcgctctttcttcggaactgc

SEQ ID NO: 1251678 - DNA, 25 bp, Homo sapien
tcattcacatgtaggaaaaatttcc

SEQ ID NO: 1251679 - DNA, 25 bp, Homo sapien
tttcctcagtttgagcaacaatcta

SEQ ID NO: 1251680 - DNA, 25 bp, Homo sapien
aataatatagctcgtcattcacatg

SEQ ID NO: 1251681 - DNA, 25 bp, Homo sapien
gaactttctgcacagtagagtttag

SEQ ID NO: 1251682 - DNA, 25 bp, Homo sapien
caagtaacttaatattgcaatcaga

SEQ ID NO: 1251683 - DNA, 25 bp, Homo sapien
ggtctggtcactttgactgtcaagt

SEQ ID NO: 1251684 - DNA, 25 bp, Homo sapien
aaacgtagcttggaggtctggtcac

SEQ ID NO: 1251685 - DNA, 25 bp, Homo sapien
gaaatgagataaacgtagcttggag

SEQ ID NO: 1251686 - DNA, 25 bp, Homo sapien
gagagctcacctgaagggtcaccaa

SEQ ID NO: 1251687 - DNA, 25 bp, Homo sapien
cagaagtggtagttaaatccctgac

SEQ ID NO: 1251688 - DNA, 25 bp, Homo sapien
ctaactgctgtagaaggatcaaact

SEQ ID NO: 1251689 - DNA, 25 bp, Homo sapien
taaagatgggtatcagggagagctc

SEQ ID NO: 1251690 - DNA, 25 bp, Homo sapien
gctctggcaggtcctagaggtttga

SEQ ID NO: 1251691 - DNA, 25 bp, Homo sapien
tctcttctggatgcttgccggcttc

SEQ ID NO: 1251692 - DNA, 25 bp, Homo sapien
ccccggcttgttctcggcattatga

SEQ ID NO: 1251693 - DNA, 25 bp, Homo sapien
tctgcagaactggacttatatagcc

SEQ ID NO: 1251694 - DNA, 25 bp, Homo sapien
atacactgcaaatctggcaaattca

SEQ ID NO: 1251695 - DNA, 25 bp, Homo sapien
aatgagtctccccattttagatgtg

SEQ ID NO: 1251696 - DNA, 25 bp, Homo sapien
tattgcactgtgtttctaccccttc

SEQ ID NO: 1251697 - DNA, 25 bp, Homo sapien
gatgtgataaattagagaagtacga

SEQ ID NO: 1251698 - DNA, 25 bp, Homo sapien
tggaatattgctctttgaacacggc

SEQ ID NO: 1251699 - DNA, 25 bp, Homo sapien
ctggagttagttggatgttatctct

SEQ ID NO: 1251700 - DNA, 25 bp, Homo sapien
aatatatcctcttccgcttctggag

SEQ ID NO: 1251701 - DNA, 25 bp, Homo sapien
cacattcaggtttgttaaatatatc

SEQ ID NO: 1251702 - DNA, 25 bp, Homo sapien
gataagtgcctcattcccaaacagg

SEQ ID NO: 1251703 - DNA, 25 bp, Homo sapien
tataaactccagaggattttcccaa

SEQ ID NO: 1251704 - DNA, 25 bp, Homo sapien
tattttcaattcaaccctgaaggac

SEQ ID NO: 1251705 - DNA, 25 bp, Homo sapien
aaattgatcagattctcttgcaggc

SEQ ID NO: 1251706 - DNA, 25 bp, Homo sapien
tatttgcagagtgtacgtgtcacag

SEQ ID NO: 1251707 - DNA, 25 bp, Homo sapien
gaaagctttagcctatacttcaaaa

SEQ ID NO: 1251708 - DNA, 25 bp, Homo sapien
caggtatctgcccatttatttgcag

SEQ ID NO: 1251709 - DNA, 25 bp, Homo sapien
gaccttgcagctttagtatcttatg

SEQ ID NO: 1251710 - DNA, 25 bp, Homo sapien
taaacgaactagttttgctctgctc

SEQ ID NO: 1251711 - DNA, 25 bp, Homo sapien
gagattttggttgactatcccctat

SEQ ID NO: 1251712 - DNA, 25 bp, Homo sapien
cgctgtcctggaagagaaccttggt

SEQ ID NO: 1251713 - DNA, 25 bp, Homo sapien
gaaggaagcatgattcacgggaact

SEQ ID NO: 1251714 - DNA, 25 bp, Homo sapien
tgggtatctcgaaaatggtcaatcc

SEQ ID NO: 1251715 - DNA, 25 bp, Homo sapien
tgctgcttaggtaccacagttcact

SEQ ID NO: 1251716 - DNA, 25 bp, Homo sapien
catttcacctggttttgcctagcca

SEQ ID NO: 1251717 - DNA, 25 bp, Homo sapien
ctttattagatatgaaaacctcagc

SEQ ID NO: 1251718 - DNA, 25 bp, Homo sapien
tgagctgagattgtgacacagcgag

SEQ ID NO: 1251719 - DNA, 25 bp, Homo sapien
gagctgagattgtgacacagcgaga

SEQ ID NO: 1251720 - DNA, 25 bp, Homo sapien
gcagtgagctgagattgtgacacag

SEQ ID NO: 1251721 - DNA, 25 bp, Homo sapien
agtgagctgagattgtgacacagcg

SEQ ID NO: 1251722 - DNA, 25 bp, Homo sapien
agctgtatccctagacttctctagc

SEQ ID NO: 1251723 - DNA, 25 bp, Homo sapien
tttatttctgcctaggatggaggaa

SEQ ID NO: 1251724 - DNA, 25 bp, Homo sapien
gaataaagggtgatgatgggtcctc

SEQ ID NO: 1251725 - DNA, 25 bp, Homo sapien
tctagcctgagatgatcaaggaatg

SEQ ID NO: 1251726 - DNA, 25 bp, Homo sapien
cagttatctgcattcgctgagccat

SEQ ID NO: 1251727 - DNA, 25 bp, Homo sapien
aacactggatcgttcttttctcgtt

SEQ ID NO: 1251728 - DNA, 25 bp, Homo sapien
caacactggatcgttcttttctcgt

SEQ ID NO: 1251729 - DNA, 25 bp, Homo sapien
tgggtgcaacactggatcgttcttt

SEQ ID NO: 1251730 - DNA, 25 bp, Homo sapien
tcggaattttcccagccggatccca

SEQ ID NO: 1251731 - DNA, 25 bp, Homo sapien
ggaattttcccagccggatcccagc

SEQ ID NO: 1251732 - DNA, 25 bp, Homo sapien
cggaattttcccagccggatcccag

SEQ ID NO: 1251733 - DNA, 25 bp, Homo sapien
gacactaatggagctccaagcccat

SEQ ID NO: 1251734 - DNA, 25 bp, Homo sapien
tctgggttgcagaaggtagcagaca

SEQ ID NO: 1251735 - DNA, 25 bp, Homo sapien
catagtagtgccttgtctcctttca

SEQ ID NO: 1251736 - DNA, 25 bp, Homo sapien
gaaacctggccattagctctgtatc

SEQ ID NO: 1251737 - DNA, 25 bp, Homo sapien
gagcagctccacgaatccatgaaca

SEQ ID NO: 1251738 - DNA, 25 bp, Homo sapien
tccatgaacaagacaacgctgggcg

SEQ ID NO: 1251739 - DNA, 25 bp, Homo sapien
gacaacagacttggcccatcaacat

SEQ ID NO: 1251740 - DNA, 25 bp, Homo sapien
gatgaagggccgaagaatcagagca

SEQ ID NO: 1251741 - DNA, 25 bp, Homo sapien
taagcaaatggcaaggcaagccata

SEQ ID NO: 1251742 - DNA, 25 bp, Homo sapien
agctgctcttcttttattcccctag

SEQ ID NO: 1251743 - DNA, 25 bp, Homo sapien
ttcccctagtcagccagaaaggtac

SEQ ID NO: 1251744 - DNA, 25 bp, Homo sapien
tggttgctgtgacgatttcaagtat

SEQ ID NO: 1251745 - DNA, 25 bp, Homo sapien
aactgcagtgccctgggtagtgcca

SEQ ID NO: 1251746 - DNA, 25 bp, Homo sapien
gggacaatggaactgcagtgccctg

SEQ ID NO: 1251747 - DNA, 25 bp, Homo sapien
aatggaactgcagtgccctgggtag

SEQ ID NO: 1251748 - DNA, 25 bp, Homo sapien
agtgccctgggtagtgccagagtcc

SEQ ID NO: 1251749 - DNA, 25 bp, Homo sapien
tagcagagaggagtgcccagacgct

SEQ ID NO: 1251750 - DNA, 25 bp, Homo sapien
ggtcacacgtgtgctcctcacacag

SEQ ID NO: 1251751 - DNA, 25 bp, Homo sapien
ccagacgctccagaaggtcacacgt

SEQ ID NO: 1251752 - DNA, 25 bp, Homo sapien
cgctccagaaggtcacacgtgtgct

SEQ ID NO: 1251753 - DNA, 25 bp, Homo sapien
ttctgtgcactgctaattactgaga

SEQ ID NO: 1251754 - DNA, 25 bp, Homo sapien
tgtgcactgctaattactgagaggg

SEQ ID NO: 1251755 - DNA, 25 bp, Homo sapien
tgctcccttctgtgcactgctaatt

SEQ ID NO: 1251756 - DNA, 25 bp, Homo sapien
cactgctaattactgagagggctgg

SEQ ID NO: 1251757 - DNA, 25 bp, Homo sapien
atctgggctgtcttcgggaggtgca

SEQ ID NO: 1251758 - DNA, 25 bp, Homo sapien
ggatatctgggctgtcttcgggagg

SEQ ID NO: 1251759 - DNA, 25 bp, Homo sapien
tgcgggaatttgatgatggcacagt

SEQ ID NO: 1251760 - DNA, 25 bp, Homo sapien
atggcacagtggtcaggcctgctcc

SEQ ID NO: 1251761 - DNA, 25 bp, Homo sapien
tcgcagcctgcttgatctgacgctt

SEQ ID NO: 1251762 - DNA, 25 bp, Homo sapien
gactttgaccacactagtattagtg

SEQ ID NO: 1251763 - DNA, 25 bp, Homo sapien
catcagcctgatcggggtgtggact

SEQ ID NO: 1251764 - DNA, 25 bp, Homo sapien
tattagtgagctttctcgcagcctg

SEQ ID NO: 1251765 - DNA, 25 bp, Homo sapien
tgctgacaatacccaaagcattgta

SEQ ID NO: 1251766 - DNA, 25 bp, Homo sapien
gctgacaatacccaaagcattgtaa

SEQ ID NO: 1251767 - DNA, 25 bp, Homo sapien
gtaattaggatccaggtaaacatac

SEQ ID NO: 1251768 - DNA, 25 bp, Homo sapien
gggaaggacccggtatgcctcatca

SEQ ID NO: 1251769 - DNA, 25 bp, Homo sapien
aaggacccggtatgcctcatcaggg

SEQ ID NO: 1251770 - DNA, 25 bp, Homo sapien
atcagggaaggacccggtatgcctc

SEQ ID NO: 1251771 - DNA, 25 bp, Homo sapien
acatcagggaaggacccggtatgcc

SEQ ID NO: 1251772 - DNA, 25 bp, Homo sapien
tgtgattgccaagcaagttctccag

SEQ ID NO: 1251773 - DNA, 25 bp, Homo sapien
ttgccaagcaagttctccagtttac

SEQ ID NO: 1251774 - DNA, 25 bp, Homo sapien
ttgaaagcacgcatcccagatctca

SEQ ID NO: 1251775 - DNA, 25 bp, Homo sapien
gatgccatcaccttgaaagcacgca

SEQ ID NO: 1251776 - DNA, 25 bp, Homo sapien
caaatgcaaggaagcaagcacagga

SEQ ID NO: 1251777 - DNA, 25 bp, Homo sapien
aaggaaggggtgacaaatgcaagga

SEQ ID NO: 1251778 - DNA, 25 bp, Homo sapien
ctgtgtgacttgtggggatgtggag

SEQ ID NO: 1251779 - DNA, 25 bp, Homo sapien
gcaagcacaggaaaaaggtggtttc

SEQ ID NO: 1251780 - DNA, 25 bp, Homo sapien
gttgtaagtccaacactcagtgaga

SEQ ID NO: 1251781 - DNA, 25 bp, Homo sapien
tatcttgatgtcaggaccgttgttg

SEQ ID NO: 1251782 - DNA, 25 bp, Homo sapien
cactcagtgagaccgagagaagctg

SEQ ID NO: 1251783 - DNA, 25 bp, Homo sapien
cgatttcccgcagaatatcttgatg

SEQ ID NO: 1251784 - DNA, 25 bp, Homo sapien
tcctggtggaattgatcttaacttg

SEQ ID NO: 1251785 - DNA, 25 bp, Homo sapien
tcatcctggtggaattgatcttaac

SEQ ID NO: 1251786 - DNA, 25 bp, Homo sapien
catcctggtggaattgatcttaact

SEQ ID NO: 1251787 - DNA, 25 bp, Homo sapien
ctggtggaattgatcttaacttgag

SEQ ID NO: 1251788 - DNA, 25 bp, Homo sapien
tgattcgggatcttttgggttagca

SEQ ID NO: 1251789 - DNA, 25 bp, Homo sapien
gattgattcgggatcttttgggtta

SEQ ID NO: 1251790 - DNA, 25 bp, Homo sapien
ttttgggttagcattcacatcaaag

SEQ ID NO: 1251791 - DNA, 25 bp, Homo sapien
tagcattcacatcaaagagactcat

SEQ ID NO: 1251792 - DNA, 25 bp, Homo sapien
aattccatccttttcgctgccgtgg

SEQ ID NO: 1251793 - DNA, 25 bp, Homo sapien
cttgccctgctttgagatgacctca

SEQ ID NO: 1251794 - DNA, 25 bp, Homo sapien
cagcaccaggagttcggaggaatgt

SEQ ID NO: 1251795 - DNA, 25 bp, Homo sapien
ttgttttcaaggtctcggcagctct

SEQ ID NO: 1251796 - DNA, 25 bp, Homo sapien
tctgctaaaatgttgtgactgtagc

SEQ ID NO: 1251797 - DNA, 25 bp, Homo sapien
tgcctttttccgacttttccagcca

SEQ ID NO: 1251798 - DNA, 25 bp, Homo sapien
tccagccaaaagctctgctaaaatg

SEQ ID NO: 1251799 - DNA, 25 bp, Homo sapien
aatgttgtgactgtagcttcacagc

SEQ ID NO: 1251800 - DNA, 25 bp, Homo sapien
tttgccctgtgagcatttgctgatc

SEQ ID NO: 1251801 - DNA, 25 bp, Homo sapien
ccctgtgagcatttgctgatctgga

SEQ ID NO: 1251802 - DNA, 25 bp, Homo sapien
cctgtgagcatttgctgatctggat

SEQ ID NO: 1251803 - DNA, 25 bp, Homo sapien
tgccctgtgagcatttgctgatctg

SEQ ID NO: 1251804 - DNA, 25 bp, Homo sapien
tctgggacacattcaaagcagtgtg

SEQ ID NO: 1251805 - DNA, 25 bp, Homo sapien
ggacacattcaaagcagtgtgtaga

SEQ ID NO: 1251806 - DNA, 25 bp, Homo sapien
aaagcaggaaagatccaaaattgac

SEQ ID NO: 1251807 - DNA, 25 bp, Homo sapien
gatccaaaattgacaccctaacatc

SEQ ID NO: 1251808 - DNA, 25 bp, Homo sapien
atccggttcccgcactgccccgtct

SEQ ID NO: 1251809 - DNA, 25 bp, Homo sapien
ccgcactgccccgtctgcgtgagca

SEQ ID NO: 1251810 - DNA, 25 bp, Homo sapien
cactgccccgtctgcgtgagcacaa

SEQ ID NO: 1251811 - DNA, 25 bp, Homo sapien
tgccccgtctgcgtgagcacaatct

SEQ ID NO: 1251812 - DNA, 25 bp, Homo sapien
gcaggtccgcgctggaccctcaagg

SEQ ID NO: 1251813 - DNA, 25 bp, Homo sapien
aggtccgcgctggaccctcaagggc

SEQ ID NO: 1251814 - DNA, 25 bp, Homo sapien
caggtccgcgctggaccctcaaggg

SEQ ID NO: 1251815 - DNA, 25 bp, Homo sapien
cgccactgccagcatcttccccggc

SEQ ID NO: 1251816 - DNA, 25 bp, Homo sapien
gggcggcaatgcaggggcgccgccc

SEQ ID NO: 1251817 - DNA, 25 bp, Homo sapien
cccaggggcggcaatgcaggggcgc

SEQ ID NO: 1251818 - DNA, 25 bp, Homo sapien
ggcaatgcaggggcgccgcccccgc

SEQ ID NO: 1251819 - DNA, 25 bp, Homo sapien
ctgcgagagacaagaggggccagaa

SEQ ID NO: 1251820 - DNA, 25 bp, Homo sapien
tgcgagagacaagaggggccagaaa

SEQ ID NO: 1251821 - DNA, 25 bp, Homo sapien
tacgttgatacgcttcagcagcagg

SEQ ID NO: 1251822 - DNA, 25 bp, Homo sapien
tagtatacgttgatacgcttcagca

SEQ ID NO: 1251823 - DNA, 25 bp, Homo sapien
gtatacgttgatacgcttcagcagc

SEQ ID NO: 1251824 - DNA, 25 bp, Homo sapien
tatacgttgatacgcttcagcagca

SEQ ID NO: 1251825 - DNA, 25 bp, Homo sapien
gctccagatcagttagcacagcgcg

SEQ ID NO: 1251826 - DNA, 25 bp, Homo sapien
gaagttctccggcctgaagatctgg

SEQ ID NO: 1251827 - DNA, 25 bp, Homo sapien
gcccggctccagatcagttagcaca

SEQ ID NO: 1251828 - DNA, 25 bp, Homo sapien
aagttctccggcctgaagatctggc

SEQ ID NO: 1251829 - DNA, 25 bp, Homo sapien
ttcctcctggatcttactgagtaga

SEQ ID NO: 1251830 - DNA, 25 bp, Homo sapien
ttgagaggatggcattatagggctc

SEQ ID NO: 1251831 - DNA, 25 bp, Homo sapien
tgcttcgttatcaatacaaaaggtc

SEQ ID NO: 1251832 - DNA, 25 bp, Homo sapien
cggcatctgacaccttgagcgaggg

SEQ ID NO: 1251833 - DNA, 25 bp, Homo sapien
gcattcaaccgcctgggaagtgcag

SEQ ID NO: 1251834 - DNA, 25 bp, Homo sapien
gtcagcattcaaccgcctgggaagt

SEQ ID NO: 1251835 - DNA, 25 bp, Homo sapien
gcaggtcagcattcaaccgcctggg

SEQ ID NO: 1251836 - DNA, 25 bp, Homo sapien
ctcctggataagctcagccaccgtc

SEQ ID NO: 1251837 - DNA, 25 bp, Homo sapien
tcaaacacctcctggataagctcag

SEQ ID NO: 1251838 - DNA, 25 bp, Homo sapien
aacacctcctggataagctcagcca

SEQ ID NO: 1251839 - DNA, 25 bp, Homo sapien
tcctggataagctcagccaccgtca

SEQ ID NO: 1251840 - DNA, 25 bp, Homo sapien
taggtagcagccatgacggggtcac

SEQ ID NO: 1251841 - DNA, 25 bp, Homo sapien
gcagccaccattaggtagcagccat

SEQ ID NO: 1251842 - DNA, 25 bp, Homo sapien
aatggcagccaccattaggtagcag

SEQ ID NO: 1251843 - DNA, 25 bp, Homo sapien
caccattaggtagcagccatgacgg

SEQ ID NO: 1251844 - DNA, 25 bp, Homo sapien
ccttggatgggatgtcacacgtggc

SEQ ID NO: 1251845 - DNA, 25 bp, Homo sapien
gccgacatttctagccccttggatg

SEQ ID NO: 1251846 - DNA, 25 bp, Homo sapien
ttattactgattccagtggccgaca

SEQ ID NO: 1251847 - DNA, 25 bp, Homo sapien
gaactgctccatagtgcgcttgaac

SEQ ID NO: 1251848 - DNA, 25 bp, Homo sapien
catcaggagttcagatccagtctca

SEQ ID NO: 1251849 - DNA, 25 bp, Homo sapien
gactgacagctctaaacaaattttg

SEQ ID NO: 1251850 - DNA, 25 bp, Homo sapien
tgcatccaagacaactcaagagctc

SEQ ID NO: 1251851 - DNA, 25 bp, Homo sapien
gcctccgatattgcctgcatccaag

SEQ ID NO: 1251852 - DNA, 25 bp, Homo sapien
cttgttgggtcggatagagactcat

SEQ ID NO: 1251853 - DNA, 25 bp, Homo sapien
tagagactcatgtcggagatctcca

SEQ ID NO: 1251854 - DNA, 25 bp, Homo sapien
ttgggtcggatagagactcatgtcg

SEQ ID NO: 1251855 - DNA, 25 bp, Homo sapien
cggatagagactcatgtcggagatc

SEQ ID NO: 1251856 - DNA, 25 bp, Homo sapien
tagggagtttgaacaccagaaagta

SEQ ID NO: 1251857 - DNA, 25 bp, Homo sapien
gaatagacacagtcaccgtaatggt

SEQ ID NO: 1251858 - DNA, 25 bp, Homo sapien
cagtcaccgtaatggtgactctgag

SEQ ID NO: 1251859 - DNA, 25 bp, Homo sapien
gaagcacagccagaatagacacagt

SEQ ID NO: 1251860 - DNA, 25 bp, Homo sapien
caacttgtgtccatctatcctgtgg

SEQ ID NO: 1251861 - DNA, 25 bp, Homo sapien
taccatgaagctggaaatcgatgac

SEQ ID NO: 1251862 - DNA, 25 bp, Homo sapien
cgatgacagatctgtacagaggaac

SEQ ID NO: 1251863 - DNA, 25 bp, Homo sapien
tgaagtctatcagtgggttaaacaa

SEQ ID NO: 1251864 - DNA, 25 bp, Homo sapien
agcttcctatccaagggctaaccag

SEQ ID NO: 1251865 - DNA, 25 bp, Homo sapien
tcagcttcctatccaagggctaacc

SEQ ID NO: 1251866 - DNA, 25 bp, Homo sapien
gcttcctatccaagggctaaccagg

SEQ ID NO: 1251867 - DNA, 25 bp, Homo sapien
agtcagcttcctatccaagggctaa

SEQ ID NO: 1251868 - DNA, 25 bp, Homo sapien
tagaaaaggcttcctgtgagtccgt

SEQ ID NO: 1251869 - DNA, 25 bp, Homo sapien
tctgttggttctgaattacccagca

SEQ ID NO: 1251870 - DNA, 25 bp, Homo sapien
catgaactgtttagcaatgcagagc

SEQ ID NO: 1251871 - DNA, 25 bp, Homo sapien
cattagttttgaatacatgaactgt

SEQ ID NO: 1251872 - DNA, 25 bp, Homo sapien
cgatgctctatgtggttgtacctca

SEQ ID NO: 1251873 - DNA, 25 bp, Homo sapien
catcaaccagagtaggaatctctcc

SEQ ID NO: 1251874 - DNA, 25 bp, Homo sapien
cgagatgtccagcttgcaaggatcc

SEQ ID NO: 1251875 - DNA, 25 bp, Homo sapien
gcaaggatccagtgtcatcaaccag

SEQ ID NO: 1251876 - DNA, 25 bp, Homo sapien
gagtcgaatgatgcatctgtgccaa

SEQ ID NO: 1251877 - DNA, 25 bp, Homo sapien
tgtttcgggtttcggagtcgaatga

SEQ ID NO: 1251878 - DNA, 25 bp, Homo sapien
cgaatgatgcatctgtgccaaagag

SEQ ID NO: 1251879 - DNA, 25 bp, Homo sapien
tttcggagtcgaatgatgcatctgt

SEQ ID NO: 1251880 - DNA, 25 bp, Homo sapien
cagaggtcctgaagttcattctgaa

SEQ ID NO: 1251881 - DNA, 25 bp, Homo sapien
gcataaatttattagggccttctct

SEQ ID NO: 1251882 - DNA, 25 bp, Homo sapien
catgtgtattaagaaagacctttca

SEQ ID NO: 1251883 - DNA, 25 bp, Homo sapien
ttcttaattacgtatgttgtgggca

SEQ ID NO: 1251884 - DNA, 25 bp, Homo sapien
agtggaaatcccctgtctggaggcc

SEQ ID NO: 1251885 - DNA, 25 bp, Homo sapien
tgcccgtgcacttttgggctcagta

SEQ ID NO: 1251886 - DNA, 25 bp, Homo sapien
cttgctagcttgttcctggatccca

SEQ ID NO: 1251887 - DNA, 25 bp, Homo sapien
gatttggtaacttgctgcccgtgca

SEQ ID NO: 1251888 - DNA, 25 bp, Homo sapien
cgaggtttctattctgccggcagaa

SEQ ID NO: 1251889 - DNA, 25 bp, Homo sapien
gagttgtgataactgacgaggtttc

SEQ ID NO: 1251890 - DNA, 25 bp, Homo sapien
gacttggaacatgggaagtctagaa

SEQ ID NO: 1251891 - DNA, 25 bp, Homo sapien
aagtggacttggaacatgggaagtc

SEQ ID NO: 1251892 - DNA, 25 bp, Homo sapien
gaatgacagagcagttgtgagttat

SEQ ID NO: 1251893 - DNA, 25 bp, Homo sapien
ggattcactagctcccagagctgca

SEQ ID NO: 1251894 - DNA, 25 bp, Homo sapien
gggcttccagatctacagggaacaa

SEQ ID NO: 1251895 - DNA, 25 bp, Homo sapien
tgagttatttgccactgggagagga

SEQ ID NO: 1251896 - DNA, 25 bp, Homo sapien
aaagttctggtggtccattccaggg

SEQ ID NO: 1251897 - DNA, 25 bp, Homo sapien
ggatctcatctgttgattgccctgc

SEQ ID NO: 1251898 - DNA, 25 bp, Homo sapien
atctcatctgttgattgccctgcac

SEQ ID NO: 1251899 - DNA, 25 bp, Homo sapien
tttaagaagcctgctacagggagga

SEQ ID NO: 1251900 - DNA, 25 bp, Homo sapien
gatgctggatcaaccaataggcaga

SEQ ID NO: 1251901 - DNA, 25 bp, Homo sapien
tgactcaaggaaacgaccaaggacc

SEQ ID NO: 1251902 - DNA, 25 bp, Homo sapien
taatgatacaagagggagaagacac

SEQ ID NO: 1251903 - DNA, 25 bp, Homo sapien
aagtgggtaaacagctcaggactgc

SEQ ID NO: 1251904 - DNA, 25 bp, Homo sapien
ccataatgtaccgacagcgcgtgag

SEQ ID NO: 1251905 - DNA, 25 bp, Homo sapien
tcttgagcccctaaatagtaagtgc

SEQ ID NO: 1251906 - DNA, 25 bp, Homo sapien
taagtgccacagtaatgccgatccg

SEQ ID NO: 1251907 - DNA, 25 bp, Homo sapien
gcacctgcagggtatcggttgtaaa

SEQ ID NO: 1251908 - DNA, 25 bp, Homo sapien
catgtagatagagggcccatcatca

SEQ ID NO: 1251909 - DNA, 25 bp, Homo sapien
ttagggcctgatcatgtagatagag

SEQ ID NO: 1251910 - DNA, 25 bp, Homo sapien
gcctgatcatgtagatagagggccc

SEQ ID NO: 1251911 - DNA, 25 bp, Homo sapien
tgatcatgtagatagagggcccatc

SEQ ID NO: 1251912 - DNA, 25 bp, Homo sapien
gcctcggcctgggttcctcgttgtc

SEQ ID NO: 1251913 - DNA, 25 bp, Homo sapien
tggcctcggcctgggttcctcgttg

SEQ ID NO: 1251914 - DNA, 25 bp, Homo sapien
ctggcctcggcctgggttcctcgtt

SEQ ID NO: 1251915 - DNA, 25 bp, Homo sapien
agcaggcacatcagtggcaagagag

SEQ ID NO: 1251916 - DNA, 25 bp, Homo sapien
gagcttacaatccaggcagaaggtg

SEQ ID NO: 1251917 - DNA, 25 bp, Homo sapien
aggcacatcagtggcaagagaggga

SEQ ID NO: 1251918 - DNA, 25 bp, Homo sapien
gggagcttacaatccaggcagaagg

SEQ ID NO: 1251919 - DNA, 25 bp, Homo sapien
gacctgacagcactggaacaaagct

SEQ ID NO: 1251920 - DNA, 25 bp, Homo sapien
gctagagaaagtgcccaggtgagca

SEQ ID NO: 1251921 - DNA, 25 bp, Homo sapien
tgtaatcagagccaggacctgacag

SEQ ID NO: 1251922 - DNA, 25 bp, Homo sapien
gggaactaccgaagacctgtaatca

SEQ ID NO: 1251923 - DNA, 25 bp, Homo sapien
aagaaaagagcacagcggtcttcaa

SEQ ID NO: 1251924 - DNA, 25 bp, Homo sapien
cagcgtgtgaagccgaaagaaaaga

SEQ ID NO: 1251925 - DNA, 25 bp, Homo sapien
agcacagcggtcttcaacccacagg

SEQ ID NO: 1251926 - DNA, 25 bp, Homo sapien
gcgtgtgaagccgaaagaaaagagc

SEQ ID NO: 1251927 - DNA, 25 bp, Homo sapien
gcgtcaggtgctcccctagaattcc

SEQ ID NO: 1251928 - DNA, 25 bp, Homo sapien
gggaagacggagaacaccaccgcag

SEQ ID NO: 1251929 - DNA, 25 bp, Homo sapien
ggtctggatttgtctgtgaaattca

SEQ ID NO: 1251930 - DNA, 25 bp, Homo sapien
acggagaacaccaccgcaggctttc

SEQ ID NO: 1251931 - DNA, 25 bp, Homo sapien
caaggaccagccattgacacttcct

SEQ ID NO: 1251932 - DNA, 25 bp, Homo sapien
tgattttgagccagaatgagccagg

SEQ ID NO: 1251933 - DNA, 25 bp, Homo sapien
agccattgacacttcctttgtggtg

SEQ ID NO: 1251934 - DNA, 25 bp, Homo sapien
gggtgattttgagccagaatgagcc

SEQ ID NO: 1251935 - DNA, 25 bp, Homo sapien
tgctgcacaaaccttcctgcatgtg

SEQ ID NO: 1251936 - DNA, 25 bp, Homo sapien
actttgcacctgcttaggcgctgtg

SEQ ID NO: 1251937 - DNA, 25 bp, Homo sapien
tgtcgcttgtacataaggagcacac

SEQ ID NO: 1251938 - DNA, 25 bp, Homo sapien
aattttgccacaggccggagagctg

SEQ ID NO: 1251939 - DNA, 25 bp, Homo sapien
ggatcctaaaacctacagcatttat

SEQ ID NO: 1251940 - DNA, 25 bp, Homo sapien
taaggatcctaaaacctacagcatt

SEQ ID NO: 1251941 - DNA, 25 bp, Homo sapien
agataaggatcctaaaacctacagc

SEQ ID NO: 1251942 - DNA, 25 bp, Homo sapien
ctgcagataaggatcctaaaaccta

SEQ ID NO: 1251943 - DNA, 25 bp, Homo sapien
cagtgccggtttggactggcaatcc

SEQ ID NO: 1251944 - DNA, 25 bp, Homo sapien
tgaacatgaccgcttacaacaaggg

SEQ ID NO: 1251945 - DNA, 25 bp, Homo sapien
tccctgggacaggtaagctttctac

SEQ ID NO: 1251946 - DNA, 25 bp, Homo sapien
caaacagcacgtgtatatcggcagt

SEQ ID NO: 1251947 - DNA, 25 bp, Homo sapien
tgtccttgaactcctaggagccgag

SEQ ID NO: 1251948 - DNA, 25 bp, Homo sapien
actgtccttgaactcctaggagccg

SEQ ID NO: 1251949 - DNA, 25 bp, Homo sapien
cagactgtccttgaactcctaggag

SEQ ID NO: 1251950 - DNA, 25 bp, Homo sapien
cttgaactcctaggagccgaggtga

SEQ ID NO: 1251951 - DNA, 25 bp, Homo sapien
agcccaggcagggccttgacgcaga

SEQ ID NO: 1251952 - DNA, 25 bp, Homo sapien
ccaggcagggccttgacgcagaggc

SEQ ID NO: 1251953 - DNA, 25 bp, Homo sapien
gcagggccttgacgcagaggctgac

SEQ ID NO: 1251954 - DNA, 25 bp, Homo sapien
aggcagggccttgacgcagaggctg

SEQ ID NO: 1251955 - DNA, 25 bp, Homo sapien
cagagaaactgacacatattttttt

SEQ ID NO: 1251956 - DNA, 25 bp, Homo sapien
cacagagaaactgacacatattttt

SEQ ID NO: 1251957 - DNA, 25 bp, Homo sapien
ctgcacacagagaaactgacacata

SEQ ID NO: 1251958 - DNA, 25 bp, Homo sapien
gagaaactgacacatattttttttc

SEQ ID NO: 1251959 - DNA, 25 bp, Homo sapien
gcatctctcggttgacatccggaga

SEQ ID NO: 1251960 - DNA, 25 bp, Homo sapien
gacgcgtcacattgtgatgtatgca

SEQ ID NO: 1251961 - DNA, 25 bp, Homo sapien
tgtgcgcagccactaggccatggtc

SEQ ID NO: 1251962 - DNA, 25 bp, Homo sapien
catccggagatctctgggcaatggg

SEQ ID NO: 1251963 - DNA, 25 bp, Homo sapien
cccctgacagttgcgacaagcagaa

SEQ ID NO: 1251964 - DNA, 25 bp, Homo sapien
tgtctccaggcattgctgcacatcc

SEQ ID NO: 1251965 - DNA, 25 bp, Homo sapien
tgaagctgtcaacattgtgagctga

SEQ ID NO: 1251966 - DNA, 25 bp, Homo sapien
tctctggcctctaccgactaaatac

SEQ ID NO: 1251967 - DNA, 25 bp, Homo sapien
cctatagatagcttaactgttggac

SEQ ID NO: 1251968 - DNA, 25 bp, Homo sapien
gaagcatcaaagcaacctgtgagag

SEQ ID NO: 1251969 - DNA, 25 bp, Homo sapien
tcccaagaagcagaatatcctagtc

SEQ ID NO: 1251970 - DNA, 25 bp, Homo sapien
ccttgtaggtccaaacctgtagact

SEQ ID NO: 1251971 - DNA, 25 bp, Homo sapien
cagcaaatggtaaggtaaagagaac

SEQ ID NO: 1251972 - DNA, 25 bp, Homo sapien
gagaacgatgttggcttttccaaga

SEQ ID NO: 1251973 - DNA, 25 bp, Homo sapien
cgtgagcactggcaccaaaacggat

SEQ ID NO: 1251974 - DNA, 25 bp, Homo sapien
caaaacggatgcctcggaagtactc

SEQ ID NO: 1251975 - DNA, 25 bp, Homo sapien
gctgcctttgtcctatacgctgccg

SEQ ID NO: 1251976 - DNA, 25 bp, Homo sapien
gtattgcaagggattctgtcttcca

SEQ ID NO: 1251977 - DNA, 25 bp, Homo sapien
ttctcaaagcgaatgccacttgaga

SEQ ID NO: 1251978 - DNA, 25 bp, Homo sapien
tacgctgccgtcaaagtgtattgca

SEQ ID NO: 1251979 - DNA, 25 bp, Homo sapien
aagctgctttgtattgggtctgctc

SEQ ID NO: 1251980 - DNA, 25 bp, Homo sapien
tgtctgaaaggttgccatcgttaag

SEQ ID NO: 1251981 - DNA, 25 bp, Homo sapien
gggtctgctctggtaatggcccaga

SEQ ID NO: 1251982 - DNA, 25 bp, Homo sapien
gaaggacagtcctcatggttatcat

SEQ ID NO: 1251983 - DNA, 25 bp, Homo sapien
acttggttgctcccaaatgcgacaa

SEQ ID NO: 1251984 - DNA, 25 bp, Homo sapien
tcttctcccttgatcacagcctctg

SEQ ID NO: 1251985 - DNA, 25 bp, Homo sapien
catgccagtggcgtacaggtgtgct

SEQ ID NO: 1251986 - DNA, 25 bp, Homo sapien
tagctccctaaaacacacttggttg

SEQ ID NO: 1251987 - DNA, 25 bp, Homo sapien
tctctcttgatcatcttacccactt

SEQ ID NO: 1251988 - DNA, 25 bp, Homo sapien
ttacccacttctaaagcgtcaatca

SEQ ID NO: 1251989 - DNA, 25 bp, Homo sapien
acatttggctttgactctattctct

SEQ ID NO: 1251990 - DNA, 25 bp, Homo sapien
ccaggattgattagatgttttccac

SEQ ID NO: 1251991 - DNA, 25 bp, Homo sapien
tctcctcctcctccaatatctccag

SEQ ID NO: 1251992 - DNA, 25 bp, Homo sapien
cctcctcctccaatatctccagtac

SEQ ID NO: 1251993 - DNA, 25 bp, Homo sapien
ctttgtcatcttctcttgcttcact

SEQ ID NO: 1251994 - DNA, 25 bp, Homo sapien
cctcctccaatatctccagtacttt

SEQ ID NO: 1251995 - DNA, 25 bp, Homo sapien
ggatgccacgatgtctgctacgttg

SEQ ID NO: 1251996 - DNA, 25 bp, Homo sapien
gatgtctgctacgttgtccaacacg

SEQ ID NO: 1251997 - DNA, 25 bp, Homo sapien
gcagagggatgccacgatgtctgct

SEQ ID NO: 1251998 - DNA, 25 bp, Homo sapien
tgctacgttgtccaacacgctgcat

SEQ ID NO: 1251999 - DNA, 25 bp, Homo sapien
tatgctcccagggccaagtcagggc

SEQ ID NO: 1252000 - DNA, 25 bp, Homo sapien
gccaagtcagggctgctgcgatgag

SEQ ID NO: 1252001 - DNA, 25 bp, Homo sapien
ttatgctcccagggccaagtcaggg

SEQ ID NO: 1252002 - DNA, 25 bp, Homo sapien
ccaagtcagggctgctgcgatgagg

SEQ ID NO: 1252003 - DNA, 25 bp, Homo sapien
tactccaggtggatgcaacgtttct

SEQ ID NO: 1252004 - DNA, 25 bp, Homo sapien
attctgccaacagagggtactccag

SEQ ID NO: 1252005 - DNA, 25 bp, Homo sapien
caacgtttctggagttcctcaatca

SEQ ID NO: 1252006 - DNA, 25 bp, Homo sapien
ccaacagagggtactccaggtggat

SEQ ID NO: 1252007 - DNA, 25 bp, Homo sapien
ataccctaatccagtttccaacctg

SEQ ID NO: 1252008 - DNA, 25 bp, Homo sapien
cttttctggattattctcatttgaa

SEQ ID NO: 1252009 - DNA, 25 bp, Homo sapien
ggtgcccgagaagcatttgtcctgg

SEQ ID NO: 1252010 - DNA, 25 bp, Homo sapien
tgctgtttctccaggacacacacag

SEQ ID NO: 1252011 - DNA, 25 bp, Homo sapien
ctgatggtgcccgagaagcatttgt

SEQ ID NO: 1252012 - DNA, 25 bp, Homo sapien
ggacacacacagaacttagagcggg

SEQ ID NO: 1252013 - DNA, 25 bp, Homo sapien
gtgggatatccacagccttggcctc

SEQ ID NO: 1252014 - DNA, 25 bp, Homo sapien
gtgtgggatatccacagccttggcc

SEQ ID NO: 1252015 - DNA, 25 bp, Homo sapien
tgtgggatatccacagccttggcct

SEQ ID NO: 1252016 - DNA, 25 bp, Homo sapien
tgaccagtttcttattctggttgaa

SEQ ID NO: 1252017 - DNA, 25 bp, Homo sapien
ggttgaattttttcagcacctcgat

SEQ ID NO: 1252018 - DNA, 25 bp, Homo sapien
gaccagtttcttattctggttgaat

SEQ ID NO: 1252019 - DNA, 25 bp, Homo sapien
attctggttgaattttttcagcacc

SEQ ID NO: 1252020 - DNA, 25 bp, Homo sapien
ctgggcgaggacttacgggatctgc

SEQ ID NO: 1252021 - DNA, 25 bp, Homo sapien
gggcgaggacttacgggatctgctt

SEQ ID NO: 1252022 - DNA, 25 bp, Homo sapien
tgggcgaggacttacgggatctgct

SEQ ID NO: 1252023 - DNA, 25 bp, Homo sapien
gaggacttacgggatctgcttgatc

SEQ ID NO: 1252024 - DNA, 25 bp, Homo sapien
tgtaacatttacatggccaacagtc

SEQ ID NO: 1252025 - DNA, 25 bp, Homo sapien
gggaacgtgccagccttatgtaggc

SEQ ID NO: 1252026 - DNA, 25 bp, Homo sapien
cagggaagggaacgtgccagcctta

SEQ ID NO: 1252027 - DNA, 25 bp, Homo sapien
agcaccttcgtcatctggaacttga

SEQ ID NO: 1252028 - DNA, 25 bp, Homo sapien
atggccttcatcaaatccaaaagga

SEQ ID NO: 1252029 - DNA, 25 bp, Homo sapien
gcatggccttcatcaaatccaaaag

SEQ ID NO: 1252030 - DNA, 25 bp, Homo sapien
atgcggatacacggcatggccttca

SEQ ID NO: 1252031 - DNA, 25 bp, Homo sapien
gcggatacacggcatggccttcatc

SEQ ID NO: 1252032 - DNA, 25 bp, Homo sapien
tgttctatgtttccattagccgtgg

SEQ ID NO: 1252033 - DNA, 25 bp, Homo sapien
tccatatctttgttgattcttgggc

SEQ ID NO: 1252034 - DNA, 25 bp, Homo sapien
tagccgtggtcatctatctcatctg

SEQ ID NO: 1252035 - DNA, 25 bp, Homo sapien
gcaatatctccaatagttagtacaa

SEQ ID NO: 1252036 - DNA, 25 bp, Homo sapien
tccagaatgcatttacttggaagca

SEQ ID NO: 1252037 - DNA, 25 bp, Homo sapien
gaaacactgcagctactcctaggaa

SEQ ID NO: 1252038 - DNA, 25 bp, Homo sapien
gctcccgtggtaatgtaatgctgct

SEQ ID NO: 1252039 - DNA, 25 bp, Homo sapien
gtaccataatagtttgcagcccggg

SEQ ID NO: 1252040 - DNA, 25 bp, Homo sapien
taaagtttgagatgagttttcttga

SEQ ID NO: 1252041 - DNA, 25 bp, Homo sapien
ggtgcttactaccttcagcaagcca

SEQ ID NO: 1252042 - DNA, 25 bp, Homo sapien
ttttctctaagtggtgattcaggaa

SEQ ID NO: 1252043 - DNA, 25 bp, Homo sapien
tatttcttgctcagataaagtttga

SEQ ID NO: 1252044 - DNA, 25 bp, Homo sapien
ggaaaattggatggccagatagagc

SEQ ID NO: 1252045 - DNA, 25 bp, Homo sapien
gcttcacggaaaattggatggccag

SEQ ID NO: 1252046 - DNA, 25 bp, Homo sapien
ctgcagtccgtagtgtgcttcacgg

SEQ ID NO: 1252047 - DNA, 25 bp, Homo sapien
cgtagtgtgcttcacggaaaattgg

SEQ ID NO: 1252048 - DNA, 25 bp, Homo sapien
cattgtcggctggtcccaattaatt

SEQ ID NO: 1252049 - DNA, 25 bp, Homo sapien
agaacaacattgtcggctggtccca

SEQ ID NO: 1252050 - DNA, 25 bp, Homo sapien
cccagcattctaaggggtcattcca

SEQ ID NO: 1252051 - DNA, 25 bp, Homo sapien
cccacaactcagaacaacattgtcg

SEQ ID NO: 1252052 - DNA, 25 bp, Homo sapien
tgccaagtacaatggtgagacctct

SEQ ID NO: 1252053 - DNA, 25 bp, Homo sapien
tgcttcaactttggcagaggatcca

SEQ ID NO: 1252054 - DNA, 25 bp, Homo sapien
cctcttgggctctcgcagaaggtgg

SEQ ID NO: 1252055 - DNA, 25 bp, Homo sapien
gaggatccattttgaagagttgcca

SEQ ID NO: 1252056 - DNA, 25 bp, Homo sapien
gagcgcctgagtcccgcattagcgc

SEQ ID NO: 1252057 - DNA, 25 bp, Homo sapien
tgcaggatacaagcaagcggagctg

SEQ ID NO: 1252058 - DNA, 25 bp, Homo sapien
gcaagcggagctgggcttctgagca

SEQ ID NO: 1252059 - DNA, 25 bp, Homo sapien
ttagcgctgcaggatacaagcaagc

SEQ ID NO: 1252060 - DNA, 25 bp, Homo sapien
tcaactgcgggtatagctcagtgca

SEQ ID NO: 1252061 - DNA, 25 bp, Homo sapien
catttgagctgctactgttcccctc

SEQ ID NO: 1252062 - DNA, 25 bp, Homo sapien
aagccccttgcatttgagctgctac

SEQ ID NO: 1252063 - DNA, 25 bp, Homo sapien
tggactgtccttaacactctgctgc

SEQ ID NO: 1252064 - DNA, 25 bp, Homo sapien
agttgttccttctgcgggaaatgat

SEQ ID NO: 1252065 - DNA, 25 bp, Homo sapien
gatctctccttttgtcgaggcttgg

SEQ ID NO: 1252066 - DNA, 25 bp, Homo sapien
tttgtcgaggcttggtgaaatcctt

SEQ ID NO: 1252067 - DNA, 25 bp, Homo sapien
tctgcgggaaatgatctctcctttt

SEQ ID NO: 1252068 - DNA, 25 bp, Homo sapien
aaaggtgtctcatttgttctggccc

SEQ ID NO: 1252069 - DNA, 25 bp, Homo sapien
ctgaccctttggatggacgctgtcc

SEQ ID NO: 1252070 - DNA, 25 bp, Homo sapien
agctatcctcggtggccatgtggca

SEQ ID NO: 1252071 - DNA, 25 bp, Homo sapien
gggctggcgaaactgactgcttgtc

SEQ ID NO: 1252072 - DNA, 25 bp, Homo sapien
ggatgctgaacatggatggtctgta

SEQ ID NO: 1252073 - DNA, 25 bp, Homo sapien
gatggtctgtaactatcctctgctg

SEQ ID NO: 1252074 - DNA, 25 bp, Homo sapien
gaacatggatggtctgtaactatcc

SEQ ID NO: 1252075 - DNA, 25 bp, Homo sapien
tctgtaactatcctctgctggaggc

SEQ ID NO: 1252076 - DNA, 25 bp, Homo sapien
tgctggagcactgcttgtgggactg

SEQ ID NO: 1252077 - DNA, 25 bp, Homo sapien
ccagtccttcatgttatgggttcct

SEQ ID NO: 1252078 - DNA, 25 bp, Homo sapien
ctggagcactgcttgtgggactgac

SEQ ID NO: 1252079 - DNA, 25 bp, Homo sapien
ccttcatgttatgggttcctctctg

SEQ ID NO: 1252080 - DNA, 25 bp, Homo sapien
ggaaccttaaactcccatgagatga

SEQ ID NO: 1252081 - DNA, 25 bp, Homo sapien
ccatgagatgacgttgcagaacctt

SEQ ID NO: 1252082 - DNA, 25 bp, Homo sapien
aactcccatgagatgacgttgcaga

SEQ ID NO: 1252083 - DNA, 25 bp, Homo sapien
ccttaaactcccatgagatgacgtt

SEQ ID NO: 1252084 - DNA, 25 bp, Homo sapien
gcacagctcagagggtaggtctccc

SEQ ID NO: 1252085 - DNA, 25 bp, Homo sapien
tgatgctatttttaacgcacagctc

SEQ ID NO: 1252086 - DNA, 25 bp, Homo sapien
catcctgaggaccaatgatgctatt

SEQ ID NO: 1252087 - DNA, 25 bp, Homo sapien
gcaacttgaggtctgccgttgtctt

SEQ ID NO: 1252088 - DNA, 25 bp, Homo sapien
taggactggtctgaattaagacttt

SEQ ID NO: 1252089 - DNA, 25 bp, Homo sapien
taagacttttgagcagaatctggac

SEQ ID NO: 1252090 - DNA, 25 bp, Homo sapien
cactcttggtgatggttcgtactgg

SEQ ID NO: 1252091 - DNA, 25 bp, Homo sapien
gatggttcgtactggtaaggacctg

SEQ ID NO: 1252092 - DNA, 25 bp, Homo sapien
cttctctcttacccttaatccccat

SEQ ID NO: 1252093 - DNA, 25 bp, Homo sapien
catctggtcaaggaagatttttctt

SEQ ID NO: 1252094 - DNA, 25 bp, Homo sapien
tcttctctcttacccttaatcccca

SEQ ID NO: 1252095 - DNA, 25 bp, Homo sapien
ctggtcaaggaagatttttcttctc

SEQ ID NO: 1252096 - DNA, 25 bp, Homo sapien
ttggagggtgaagtgacccattaga

SEQ ID NO: 1252097 - DNA, 25 bp, Homo sapien
tattgatcatcttgtagggatcttc

SEQ ID NO: 1252098 - DNA, 25 bp, Homo sapien
cccattagagggacggatctgagga

SEQ ID NO: 1252099 - DNA, 25 bp, Homo sapien
atcttgtagggatcttccccaaggg

SEQ ID NO: 1252100 - DNA, 25 bp, Homo sapien
tgtttcctgatgagccaaggaaatg

SEQ ID NO: 1252101 - DNA, 25 bp, Homo sapien
cctgatgagccaaggaaatgaatgg

SEQ ID NO: 1252102 - DNA, 25 bp, Homo sapien
catttgttgtttcctgatgagccaa

SEQ ID NO: 1252103 - DNA, 25 bp, Homo sapien
tgttgtttcctgatgagccaaggaa

SEQ ID NO: 1252104 - DNA, 25 bp, Homo sapien
gaaggataacattccgccagtgccc

SEQ ID NO: 1252105 - DNA, 25 bp, Homo sapien
ctttcttagtgttaaggccgcaaga

SEQ ID NO: 1252106 - DNA, 25 bp, Homo sapien
aagaaggataacattccgccagtgc

SEQ ID NO: 1252107 - DNA, 25 bp, Homo sapien
caagaggtgcagtaagagaggtaaa

SEQ ID NO: 1252108 - DNA, 25 bp, Homo sapien
ttcctccttcccctgcatgttttat

SEQ ID NO: 1252109 - DNA, 25 bp, Homo sapien
ctccttcccctgcatgttttatgtt

SEQ ID NO: 1252110 - DNA, 25 bp, Homo sapien
tcctccttcccctgcatgttttatg

SEQ ID NO: 1252111 - DNA, 25 bp, Homo sapien
tcttcctccttcccctgcatgtttt

SEQ ID NO: 1252112 - DNA, 25 bp, Homo sapien
aaagtgcatgtgtgatatcaggttt

SEQ ID NO: 1252113 - DNA, 25 bp, Homo sapien
tgggacttctagggaggagagtggc

SEQ ID NO: 1252114 - DNA, 25 bp, Homo sapien
tttcagacaaagtgcatgtgtgata

SEQ ID NO: 1252115 - DNA, 25 bp, Homo sapien
gtaactgagccagaggtgtgctttg

SEQ ID NO: 1252116 - DNA, 25 bp, Homo sapien
tttccttgtccttcaaggcaaattc

SEQ ID NO: 1252117 - DNA, 25 bp, Homo sapien
tatttccttgtccttcaaggcaaat

SEQ ID NO: 1252118 - DNA, 25 bp, Homo sapien
tatatttccttgtccttcaaggcaa

SEQ ID NO: 1252119 - DNA, 25 bp, Homo sapien
ttatatttccttgtccttcaaggca

SEQ ID NO: 1252120 - DNA, 25 bp, Homo sapien
tatgaaagccaccaggctctctgac

SEQ ID NO: 1252121 - DNA, 25 bp, Homo sapien
tatttttagaggtgaggcagcactc

SEQ ID NO: 1252122 - DNA, 25 bp, Homo sapien
caaaagctctttgctaggcccatag

SEQ ID NO: 1252123 - DNA, 25 bp, Homo sapien
tcagtgtaacgttgaaaacctgggc

SEQ ID NO: 1252124 - DNA, 25 bp, Homo sapien
tataaccaaggtcatattcagaatt

SEQ ID NO: 1252125 - DNA, 25 bp, Homo sapien
tgttgcaagatatttataaccaagg

SEQ ID NO: 1252126 - DNA, 25 bp, Homo sapien
gaggagcacatttttgacaagttag

SEQ ID NO: 1252127 - DNA, 25 bp, Homo sapien
cagcttcagtggagttcaatttctg

SEQ ID NO: 1252128 - DNA, 25 bp, Homo sapien
attcttgaccttggtatctatccat

SEQ ID NO: 1252129 - DNA, 25 bp, Homo sapien
ttttcatctatctgctgagtttcac

SEQ ID NO: 1252130 - DNA, 25 bp, Homo sapien
aattcttgaccttggtatctatcca

SEQ ID NO: 1252131 - DNA, 25 bp, Homo sapien
tggctctggtaaatccagtaatgct

SEQ ID NO: 1252132 - DNA, 25 bp, Homo sapien
cagattcaggaccactgagaatggc

SEQ ID NO: 1252133 - DNA, 25 bp, Homo sapien
gtcctccctgagtttcggcttctct

SEQ ID NO: 1252134 - DNA, 25 bp, Homo sapien
gggtagactgaccattctgagcttt

SEQ ID NO: 1252135 - DNA, 25 bp, Homo sapien
ttgtctacctcaggggtcctccctg

SEQ ID NO: 1252136 - DNA, 25 bp, Homo sapien
tcggcttctctgatagaggtccatt

SEQ ID NO: 1252137 - DNA, 25 bp, Homo sapien
gaggtactttttcctggccgccaca

SEQ ID NO: 1252138 - DNA, 25 bp, Homo sapien
tcaatgcgggactgtgaggtacttt

SEQ ID NO: 1252139 - DNA, 25 bp, Homo sapien
caatgcgggactgtgaggtactttt

SEQ ID NO: 1252140 - DNA, 25 bp, Homo sapien
tgcgggactgtgaggtactttttcc

SEQ ID NO: 1252141 - DNA, 25 bp, Homo sapien
catttcctctcctcgtgatcaccat

SEQ ID NO: 1252142 - DNA, 25 bp, Homo sapien
tttgatgcaacatcatttcctctcc

SEQ ID NO: 1252143 - DNA, 25 bp, Homo sapien
ctttgatgcaacatcatttcctctc

SEQ ID NO: 1252144 - DNA, 25 bp, Homo sapien
atcatttcctctcctcgtgatcacc

SEQ ID NO: 1252145 - DNA, 25 bp, Homo sapien
aaaagcatcacatgctgactctcgt

SEQ ID NO: 1252146 - DNA, 25 bp, Homo sapien
tcacatgctgactctcgtttgttgc

SEQ ID NO: 1252147 - DNA, 25 bp, Homo sapien
gcatcacatgctgactctcgtttgt

SEQ ID NO: 1252148 - DNA, 25 bp, Homo sapien
catgctgactctcgtttgttgctca

SEQ ID NO: 1252149 - DNA, 25 bp, Homo sapien
gacacttcccatctctacgtctgtg

SEQ ID NO: 1252150 - DNA, 25 bp, Homo sapien
tatgactccgctgcccttctttttg

SEQ ID NO: 1252151 - DNA, 25 bp, Homo sapien
ttcatttctaattgcagcgtcattc

SEQ ID NO: 1252152 - DNA, 25 bp, Homo sapien
tacgtctgtggtactctgccttcag

SEQ ID NO: 1252153 - DNA, 25 bp, Homo sapien
agattgcagtagcagccctttctgt

SEQ ID NO: 1252154 - DNA, 25 bp, Homo sapien
ctagattgcagtagcagccctttct

SEQ ID NO: 1252155 - DNA, 25 bp, Homo sapien
tagattgcagtagcagccctttctg

SEQ ID NO: 1252156 - DNA, 25 bp, Homo sapien
aaagattgcaaatgctgccagatat

SEQ ID NO: 1252157 - DNA, 25 bp, Homo sapien
aacattttcttcgaaatcaggaggt

SEQ ID NO: 1252158 - DNA, 25 bp, Homo sapien
gccagatattgtccgcaagggtttt

SEQ ID NO: 1252159 - DNA, 25 bp, Homo sapien
tcgaaatcaggaggtagtcagcagt

SEQ ID NO: 1252160 - DNA, 25 bp, Homo sapien
cagtgctcagtagcagaatacaatt

SEQ ID NO: 1252161 - DNA, 25 bp, Homo sapien
tgttgtgtgtgcatcagcgtggcat

SEQ ID NO: 1252162 - DNA, 25 bp, Homo sapien
tgcctggaaaccaaacagtgctcag

SEQ ID NO: 1252163 - DNA, 25 bp, Homo sapien
gtgcatcagcgtggcatcctctctg

SEQ ID NO: 1252164 - DNA, 25 bp, Homo sapien
gagctttcgtggatttaattttcca

SEQ ID NO: 1252165 - DNA, 25 bp, Homo sapien
cagaatgtagaagtctcaggaagac

SEQ ID NO: 1252166 - DNA, 25 bp, Homo sapien
attgaaagaagtccagaatgtagaa

SEQ ID NO: 1252167 - DNA, 25 bp, Homo sapien
tgagaagatgcagttaagtgcttga

SEQ ID NO: 1252168 - DNA, 25 bp, Homo sapien
cacctctcaatcactcctgcaaaat

SEQ ID NO: 1252169 - DNA, 25 bp, Homo sapien
agcacctctcaatcactcctgcaaa

SEQ ID NO: 1252170 - DNA, 25 bp, Homo sapien
cctctcaatcactcctgcaaaatca

SEQ ID NO: 1252171 - DNA, 25 bp, Homo sapien
gggagcacctctcaatcactcctgc

SEQ ID NO: 1252172 - DNA, 25 bp, Homo sapien
aatagtccctgcgaaagccattggc

SEQ ID NO: 1252173 - DNA, 25 bp, Homo sapien
tagtccctgcgaaagccattggctt

SEQ ID NO: 1252174 - DNA, 25 bp, Homo sapien
gtccctgcgaaagccattggcttct

SEQ ID NO: 1252175 - DNA, 25 bp, Homo sapien
tcaatagtccctgcgaaagccattg

SEQ ID NO: 1252176 - DNA, 25 bp, Homo sapien
caggatctgaacctcatctaaaacc

SEQ ID NO: 1252177 - DNA, 25 bp, Homo sapien
gatctgaacctcatctaaaacctgg

SEQ ID NO: 1252178 - DNA, 25 bp, Homo sapien
tgaacctcatctaaaacctgggcac

SEQ ID NO: 1252179 - DNA, 25 bp, Homo sapien
ggcaaaatccatcaaccaggatctg

SEQ ID NO: 1252180 - DNA, 25 bp, Homo sapien
aggtgcccactaccacatccagctg

SEQ ID NO: 1252181 - DNA, 25 bp, Homo sapien
tccagctgatttttgtattttaagt

SEQ ID NO: 1252182 - DNA, 25 bp, Homo sapien
ggtgcccactaccacatccagctga

SEQ ID NO: 1252183 - DNA, 25 bp, Homo sapien
gctgcttcccggaatgctttagtcc

SEQ ID NO: 1252184 - DNA, 25 bp, Homo sapien
cctaactttgcaaggattgtgctgc

SEQ ID NO: 1252185 - DNA, 25 bp, Homo sapien
gcaatcattgcggatgaacgttatg

SEQ ID NO: 1252186 - DNA, 25 bp, Homo sapien
gatgaacgttatgccatggccaggg

SEQ ID NO: 1252187 - DNA, 25 bp, Homo sapien
caatagttttattccataggtctcg

SEQ ID NO: 1252188 - DNA, 25 bp, Homo sapien
tcaatagttttattccataggtctc

SEQ ID NO: 1252189 - DNA, 25 bp, Homo sapien
catcaatagttttattccataggtc

SEQ ID NO: 1252190 - DNA, 25 bp, Homo sapien
tgcatcaatagttttattccatagg

SEQ ID NO: 1252191 - DNA, 25 bp, Homo sapien
cttcaagagggactcgggtaagatg

SEQ ID NO: 1252192 - DNA, 25 bp, Homo sapien
ttgccttcaagagggactcgggtaa

SEQ ID NO: 1252193 - DNA, 25 bp, Homo sapien
gccttcaagagggactcgggtaaga

SEQ ID NO: 1252194 - DNA, 25 bp, Homo sapien
ccttcaagagggactcgggtaagat

SEQ ID NO: 1252195 - DNA, 25 bp, Homo sapien
cagagatgtttaagaagcgtcttca

SEQ ID NO: 1252196 - DNA, 25 bp, Homo sapien
gatgtttaagaagcgtcttcatgtc

SEQ ID NO: 1252197 - DNA, 25 bp, Homo sapien
gtttaagaagcgtcttcatgtctac

SEQ ID NO: 1252198 - DNA, 25 bp, Homo sapien
gagatgtttaagaagcgtcttcatg

SEQ ID NO: 1252199 - DNA, 25 bp, Homo sapien
ttcctggcttcgtctggtgattctg

SEQ ID NO: 1252200 - DNA, 25 bp, Homo sapien
ctggtgattctgacagcggatgccc

SEQ ID NO: 1252201 - DNA, 25 bp, Homo sapien
gcaaatcctttcctggcttcgtctg

SEQ ID NO: 1252202 - DNA, 25 bp, Homo sapien
ggtgattctgacagcggatgcccat

SEQ ID NO: 1252203 - DNA, 25 bp, Homo sapien
catcctggccaggaaacaggtggct

SEQ ID NO: 1252204 - DNA, 25 bp, Homo sapien
acaggtggctgcatgttcagtgttt

SEQ ID NO: 1252205 - DNA, 25 bp, Homo sapien
gtgtgcaattgcacccagcatcctg

SEQ ID NO: 1252206 - DNA, 25 bp, Homo sapien
ggtggctgcatgttcagtgttttct

SEQ ID NO: 1252207 - DNA, 25 bp, Homo sapien
ccactctgcctcctcctctctccat

SEQ ID NO: 1252208 - DNA, 25 bp, Homo sapien
caggatagggctccccactcccttc

SEQ ID NO: 1252209 - DNA, 25 bp, Homo sapien
cactcccttccactctgcctcctcc

SEQ ID NO: 1252210 - DNA, 25 bp, Homo sapien
ctcccttccactctgcctcctcctc

SEQ ID NO: 1252211 - DNA, 25 bp, Homo sapien
cctgagcaccctgagcgacttgata

SEQ ID NO: 1252212 - DNA, 25 bp, Homo sapien
gactaggcatctgggctggagcatc

SEQ ID NO: 1252213 - DNA, 25 bp, Homo sapien
cctgagcgacttgatatttaaatga

SEQ ID NO: 1252214 - DNA, 25 bp, Homo sapien
gccatttctgctctcctcgaagact

SEQ ID NO: 1252215 - DNA, 25 bp, Homo sapien
cgaatcggcatcagattcactccag

SEQ ID NO: 1252216 - DNA, 25 bp, Homo sapien
gaaagtctacgaatcggcatcagat

SEQ ID NO: 1252217 - DNA, 25 bp, Homo sapien
cctctgaaagctgccaatcagtgac

SEQ ID NO: 1252218 - DNA, 25 bp, Homo sapien
gcctctgaaagctgccaatcagtga

SEQ ID NO: 1252219 - DNA, 25 bp, Homo sapien
tatggagtgttctccattctgagga

SEQ ID NO: 1252220 - DNA, 25 bp, Homo sapien
cattctgaggatcctctttgtaaaa

SEQ ID NO: 1252221 - DNA, 25 bp, Homo sapien
gacggtgtctccacttagaaaatgc

SEQ ID NO: 1252222 - DNA, 25 bp, Homo sapien
gaatgcgtgtcttccactggtagct

SEQ ID NO: 1252223 - DNA, 25 bp, Homo sapien
gcaggcgtgagccaccacaccaggc

SEQ ID NO: 1252224 - DNA, 25 bp, Homo sapien
gagccaccacaccaggcctcttttt

SEQ ID NO: 1252225 - DNA, 25 bp, Homo sapien
ctcagccttccaaagtgctgtgatt

SEQ ID NO: 1252226 - DNA, 25 bp, Homo sapien
gatctcttgacctcaggatctgtcc

SEQ ID NO: 1252227 - DNA, 25 bp, Homo sapien
atgagagttaccttaagtccatcag

SEQ ID NO: 1252228 - DNA, 25 bp, Homo sapien
gagagttaccttaagtccatcaggg

SEQ ID NO: 1252229 - DNA, 25 bp, Homo sapien
ttaccttaagtccatcagggcccat

SEQ ID NO: 1252230 - DNA, 25 bp, Homo sapien
gagttaccttaagtccatcagggcc

SEQ ID NO: 1252231 - DNA, 25 bp, Homo sapien
ctcatgtcaatcctggaggcggttg

SEQ ID NO: 1252232 - DNA, 25 bp, Homo sapien
actcatgtcaatcctggaggcggtt

SEQ ID NO: 1252233 - DNA, 25 bp, Homo sapien
tcagggccaaagaggaactcctgaa

SEQ ID NO: 1252234 - DNA, 25 bp, Homo sapien
ccaaagaggaactcctgaattcttc

SEQ ID NO: 1252235 - DNA, 25 bp, Homo sapien
cttgttttgactctgagacttctaa

SEQ ID NO: 1252236 - DNA, 25 bp, Homo sapien
gccagtgtagagttccggatggtca

SEQ ID NO: 1252237 - DNA, 25 bp, Homo sapien
tttatgatgcctctcctgcactctc

SEQ ID NO: 1252238 - DNA, 25 bp, Homo sapien
gggccagtgtagagttccggatggt

SEQ ID NO: 1252239 - DNA, 25 bp, Homo sapien
gcttgaatggattatatggccaggg

SEQ ID NO: 1252240 - DNA, 25 bp, Homo sapien
ttgaagacagtgttcgtcattctct

SEQ ID NO: 1252241 - DNA, 25 bp, Homo sapien
caggctctcgtgaatgaatatttga

SEQ ID NO: 1252242 - DNA, 25 bp, Homo sapien
gtcattctctttgcccaacagacag

SEQ ID NO: 1252243 - DNA, 25 bp, Homo sapien
tcagatgctatagtgggctacagat

SEQ ID NO: 1252244 - DNA, 25 bp, Homo sapien
gagctctccaaaattctctgttaac

SEQ ID NO: 1252245 - DNA, 25 bp, Homo sapien
tcactctgggaagagctctccaaaa

SEQ ID NO: 1252246 - DNA, 25 bp, Homo sapien
aagagctctccaaaattctctgtta

SEQ ID NO: 1252247 - DNA, 25 bp, Homo sapien
actctgggaagagctctccaaaatt

SEQ ID NO: 1252248 - DNA, 25 bp, Homo sapien
gaagcagacgttgttcaggtcgtgc

SEQ ID NO: 1252249 - DNA, 25 bp, Homo sapien
tggcccgcgggaagctcttcagcga

SEQ ID NO: 1252250 - DNA, 25 bp, Homo sapien
gagccagcactggaattgcctgtgt

SEQ ID NO: 1252251 - DNA, 25 bp, Homo sapien
tggttcttcgcagtcccaggaccgg

SEQ ID NO: 1252252 - DNA, 25 bp, Homo sapien
tcaggcactgatcaagttccaagtc

SEQ ID NO: 1252253 - DNA, 25 bp, Homo sapien
tgtacttcgatcaggcactgtgtgt

SEQ ID NO: 1252254 - DNA, 25 bp, Homo sapien
ttagaaataggtttcagtattctgg

SEQ ID NO: 1252255 - DNA, 25 bp, Homo sapien
ggatgctgggtagccacagatcctg

SEQ ID NO: 1252256 - DNA, 25 bp, Homo sapien
ttggctcttggacagcatagctctt

SEQ ID NO: 1252257 - DNA, 25 bp, Homo sapien
tggccgaccacctacccatttctta

SEQ ID NO: 1252258 - DNA, 25 bp, Homo sapien
catttcttaactcacacaacacaca

SEQ ID NO: 1252259 - DNA, 25 bp, Homo sapien
gattctcctgtctcgtggagtctcg

SEQ ID NO: 1252260 - DNA, 25 bp, Homo sapien
caactaaattgtacaggattgttcc

SEQ ID NO: 1252261 - DNA, 25 bp, Homo sapien
gattgttccgcttagctgctcccat

SEQ ID NO: 1252262 - DNA, 25 bp, Homo sapien
tacaggattgttccgcttagctgct

SEQ ID NO: 1252263 - DNA, 25 bp, Homo sapien
aattgtacaggattgttccgcttag

SEQ ID NO: 1252264 - DNA, 25 bp, Homo sapien
gctcactgtagatatctggataggg

SEQ ID NO: 1252265 - DNA, 25 bp, Homo sapien
tgtagatatctggatagggcagcat

SEQ ID NO: 1252266 - DNA, 25 bp, Homo sapien
tcactgtagatatctggatagggca

SEQ ID NO: 1252267 - DNA, 25 bp, Homo sapien
actgtagatatctggatagggcagc

SEQ ID NO: 1252268 - DNA, 25 bp, Homo sapien
cgaggcctccctttgagtgaatttc

SEQ ID NO: 1252269 - DNA, 25 bp, Homo sapien
tcttttcctgtgatcaagttgaact

SEQ ID NO: 1252270 - DNA, 25 bp, Homo sapien
ttaggccgtaataaatcaccgaggc

SEQ ID NO: 1252271 - DNA, 25 bp, Homo sapien
accgaggcctccctttgagtgaatt

SEQ ID NO: 1252272 - DNA, 25 bp, Homo sapien
ccagcaggacattttcctaaaggct

SEQ ID NO: 1252273 - DNA, 25 bp, Homo sapien
gacattttcctaaaggctctgagtc

SEQ ID NO: 1252274 - DNA, 25 bp, Homo sapien
tgagtccagcaggacattttcctaa

SEQ ID NO: 1252275 - DNA, 25 bp, Homo sapien
gcaggacattttcctaaaggctctg

SEQ ID NO: 1252276 - DNA, 25 bp, Homo sapien
aagttggtagttcgctcccgggctg

SEQ ID NO: 1252277 - DNA, 25 bp, Homo sapien
gagctgcggtgacatcctgcagcca

SEQ ID NO: 1252278 - DNA, 25 bp, Homo sapien
cagccacacgggaggtggctcctca

SEQ ID NO: 1252279 - DNA, 25 bp, Homo sapien
ctcctcaggggcgattgctggctgt

SEQ ID NO: 1252280 - DNA, 25 bp, Homo sapien
ttctgagcacagaacaggatgagag

SEQ ID NO: 1252281 - DNA, 25 bp, Homo sapien
cttctgagcacagaacaggatgaga

SEQ ID NO: 1252282 - DNA, 25 bp, Homo sapien
ctgagcacagaacaggatgagagag

SEQ ID NO: 1252283 - DNA, 25 bp, Homo sapien
tctgagcacagaacaggatgagaga

SEQ ID NO: 1252284 - DNA, 25 bp, Homo sapien
ccctgcagtaggccccttttgaagc

SEQ ID NO: 1252285 - DNA, 25 bp, Homo sapien
ctaaagcagatgcagtttggaatat

SEQ ID NO: 1252286 - DNA, 25 bp, Homo sapien
gcagatgcagtttggaatatagtcc

SEQ ID NO: 1252287 - DNA, 25 bp, Homo sapien
agatgcagtttggaatatagtccta

SEQ ID NO: 1252288 - DNA, 25 bp, Homo sapien
aaagcagatgcagtttggaatatag

SEQ ID NO: 1252289 - DNA, 25 bp, Homo sapien
cttctttggcgcttcagcctgcgcg

SEQ ID NO: 1252290 - DNA, 25 bp, Homo sapien
tttggcgcttcagcctgcgcgttcg

SEQ ID NO: 1252291 - DNA, 25 bp, Homo sapien
ctctcgtggcgcagaggtttccaag

SEQ ID NO: 1252292 - DNA, 25 bp, Homo sapien
ggcgcttcagcctgcgcgttcgctt

SEQ ID NO: 1252293 - DNA, 25 bp, Homo sapien
tcacagtcagtttggggactgatcc

SEQ ID NO: 1252294 - DNA, 25 bp, Homo sapien
ttctcctttgtgactcccctgccat

SEQ ID NO: 1252295 - DNA, 25 bp, Homo sapien
tccctgtcacagtcagtttggggac

SEQ ID NO: 1252296 - DNA, 25 bp, Homo sapien
agtcagtttggggactgatcctcca

SEQ ID NO: 1252297 - DNA, 25 bp, Homo sapien
gactcccaatctgaggtccaatgct

SEQ ID NO: 1252298 - DNA, 25 bp, Homo sapien
agactcccaatctgaggtccaatgc

SEQ ID NO: 1252299 - DNA, 25 bp, Homo sapien
tcccaatctgaggtccaatgctctc

SEQ ID NO: 1252300 - DNA, 25 bp, Homo sapien
tcagactcccaatctgaggtccaat

SEQ ID NO: 1252301 - DNA, 25 bp, Homo sapien
cagtggtgatgtcttccctttgatg

SEQ ID NO: 1252302 - DNA, 25 bp, Homo sapien
tagcccactagtgctaaggcggaag

SEQ ID NO: 1252303 - DNA, 25 bp, Homo sapien
gcagtgtgtggtctggcatccccag

SEQ ID NO: 1252304 - DNA, 25 bp, Homo sapien
tgctaaggcggaaggcatccgcagt

SEQ ID NO: 1252305 - DNA, 25 bp, Homo sapien
ggtctctatagtggcatctccaaca

SEQ ID NO: 1252306 - DNA, 25 bp, Homo sapien
catgcccctcagtggtatcatctga

SEQ ID NO: 1252307 - DNA, 25 bp, Homo sapien
ctcagtggtatcatctgactcagct

SEQ ID NO: 1252308 - DNA, 25 bp, Homo sapien
tctggattgctaagaccagggtctc

SEQ ID NO: 1252309 - DNA, 25 bp, Homo sapien
attccccctgattttgagtgtgaat

SEQ ID NO: 1252310 - DNA, 25 bp, Homo sapien
ccctgattttgagtgtgaatgggta

SEQ ID NO: 1252311 - DNA, 25 bp, Homo sapien
tccccctgattttgagtgtgaatgg

SEQ ID NO: 1252312 - DNA, 25 bp, Homo sapien
cccctgattttgagtgtgaatgggt

SEQ ID NO: 1252313 - DNA, 25 bp, Homo sapien
gaaacatctaatgtgaggcccctgg

SEQ ID NO: 1252314 - DNA, 25 bp, Homo sapien
gtcaagagaaacatctaatgtgagg

SEQ ID NO: 1252315 - DNA, 25 bp, Homo sapien
taagtaagcataccaagtagaatgg

SEQ ID NO: 1252316 - DNA, 25 bp, Homo sapien
gaggacagctgataagtaagcatac

SEQ ID NO: 1252317 - DNA, 25 bp, Homo sapien
tagtgtttgttcagcccttactgca

SEQ ID NO: 1252318 - DNA, 25 bp, Homo sapien
aaacttgattcgatactatgtggcc

SEQ ID NO: 1252319 - DNA, 25 bp, Homo sapien
aacaggtacaaaggtcaggttctgg

SEQ ID NO: 1252320 - DNA, 25 bp, Homo sapien
caggcactattctgactgtggcagg

SEQ ID NO: 1252321 - DNA, 25 bp, Homo sapien
cggggggtgcgtcaggaaggggatg

SEQ ID NO: 1252322 - DNA, 25 bp, Homo sapien
tgcggggggtgcgtcaggaagggga

SEQ ID NO: 1252323 - DNA, 25 bp, Homo sapien
gctgcggggggtgcgtcaggaaggg

SEQ ID NO: 1252324 - DNA, 25 bp, Homo sapien
tggctgcggggggtgcgtcaggaag

SEQ ID NO: 1252325 - DNA, 25 bp, Homo sapien
tgtccagcagggactctcctgaggg

SEQ ID NO: 1252326 - DNA, 25 bp, Homo sapien
ccatggtgggaggtgagcttttacc

SEQ ID NO: 1252327 - DNA, 25 bp, Homo sapien
tgtgtggggttgcaggccctgggct

SEQ ID NO: 1252328 - DNA, 25 bp, Homo sapien
gaggtgagcttttaccaggttccac

SEQ ID NO: 1252329 - DNA, 25 bp, Homo sapien
ggccaccagatgtggtccttgtccc

SEQ ID NO: 1252330 - DNA, 25 bp, Homo sapien
ttgcgtccatccttatcagaagatg

SEQ ID NO: 1252331 - DNA, 25 bp, Homo sapien
ccatttgttggggttgcgtccatcc

SEQ ID NO: 1252332 - DNA, 25 bp, Homo sapien
ccttgtcccatttgttggggttgcg

SEQ ID NO: 1252333 - DNA, 25 bp, Homo sapien
gctgatggtctggttatcctggtta

SEQ ID NO: 1252334 - DNA, 25 bp, Homo sapien
gaaggccaggttgtatttctgcatc

SEQ ID NO: 1252335 - DNA, 25 bp, Homo sapien
tgatggtctggttatcctggttagg

SEQ ID NO: 1252336 - DNA, 25 bp, Homo sapien
atggtctggttatcctggttagggt

SEQ ID NO: 1252337 - DNA, 25 bp, Homo sapien
ccgtctctgatatgctccgctccca

SEQ ID NO: 1252338 - DNA, 25 bp, Homo sapien
gctccgctcccacgagcccttgtta

SEQ ID NO: 1252339 - DNA, 25 bp, Homo sapien
cagtgcccgtctctgatatgctccg

SEQ ID NO: 1252340 - DNA, 25 bp, Homo sapien
cccacgagcccttgttacactcctg

SEQ ID NO: 1252341 - DNA, 25 bp, Homo sapien
tggtatccgagctctggagtgtttg

SEQ ID NO: 1252342 - DNA, 25 bp, Homo sapien
tccttggtatccgagctctggagtg

SEQ ID NO: 1252343 - DNA, 25 bp, Homo sapien
cttggtatccgagctctggagtgtt

SEQ ID NO: 1252344 - DNA, 25 bp, Homo sapien
gctccttggtatccgagctctggag

SEQ ID NO: 1252345 - DNA, 25 bp, Homo sapien
gcttgggccaggctgagccaggttc

SEQ ID NO: 1252346 - DNA, 25 bp, Homo sapien
cttgggccaggctgagccaggttcc

SEQ ID NO: 1252347 - DNA, 25 bp, Homo sapien
ccctctgtgggagaaggcttgggcc

SEQ ID NO: 1252348 - DNA, 25 bp, Homo sapien
tctgtgggagaaggcttgggccagg

SEQ ID NO: 1252349 - DNA, 25 bp, Homo sapien
ctgtgtcagttcccgtagtgcctgg

SEQ ID NO: 1252350 - DNA, 25 bp, Homo sapien
gtgtcagttcccgtagtgcctggcg

SEQ ID NO: 1252351 - DNA, 25 bp, Homo sapien
ggcggtctatttccctgccgtccag

SEQ ID NO: 1252352 - DNA, 25 bp, Homo sapien
gcctggcggtctatttccctgccgt

SEQ ID NO: 1252353 - DNA, 25 bp, Homo sapien
gctccatgctgagtagaaggctttg

SEQ ID NO: 1252354 - DNA, 25 bp, Homo sapien
cctggagctccatgctgagtagaag

SEQ ID NO: 1252355 - DNA, 25 bp, Homo sapien
tgcaaagtggcctggagctccatgc

SEQ ID NO: 1252356 - DNA, 25 bp, Homo sapien
catgctgagtagaaggctttgggcc

SEQ ID NO: 1252357 - DNA, 25 bp, Homo sapien
atcggtgtcggtggtgctaaagcca

SEQ ID NO: 1252358 - DNA, 25 bp, Homo sapien
ggtgtcggtggtgctaaagccatca

SEQ ID NO: 1252359 - DNA, 25 bp, Homo sapien
tcgctgtgtcctcaccggccatgtg

SEQ ID NO: 1252360 - DNA, 25 bp, Homo sapien
tgtgctcctcgtcactcgctgtgtc

SEQ ID NO: 1252361 - DNA, 25 bp, Homo sapien
aggaagcatccaagtatgtgttgga

SEQ ID NO: 1252362 - DNA, 25 bp, Homo sapien
aggaggaagcatccaagtatgtgtt

SEQ ID NO: 1252363 - DNA, 25 bp, Homo sapien
aggacagggtgggaccatagacttt

SEQ ID NO: 1252364 - DNA, 25 bp, Homo sapien
ccaagtatgtgttggaggaggacag

SEQ ID NO: 1252365 - DNA, 25 bp, Homo sapien
tccagtgtgggatccatgtccgtgg

SEQ ID NO: 1252366 - DNA, 25 bp, Homo sapien
tgtgggatccatgtccgtggggttc

SEQ ID NO: 1252367 - DNA, 25 bp, Homo sapien
tgggatccatgtccgtggggttccc

SEQ ID NO: 1252368 - DNA, 25 bp, Homo sapien
gtcctccagtgtgggatccatgtcc

SEQ ID NO: 1252369 - DNA, 25 bp, Homo sapien
gggctggggcagaacaaaccttgga

SEQ ID NO: 1252370 - DNA, 25 bp, Homo sapien
cagggctggggcagaacaaaccttg

SEQ ID NO: 1252371 - DNA, 25 bp, Homo sapien
ggctggggcagaacaaaccttggag

SEQ ID NO: 1252372 - DNA, 25 bp, Homo sapien
ctggggcagaacaaaccttggaggg

SEQ ID NO: 1252373 - DNA, 25 bp, Homo sapien
ccagggcagcgtcaagagtctgagc

SEQ ID NO: 1252374 - DNA, 25 bp, Homo sapien
gccagggcagcgtcaagagtctgag

SEQ ID NO: 1252375 - DNA, 25 bp, Homo sapien
agaagatcatgcagtcatcagtccc

SEQ ID NO: 1252376 - DNA, 25 bp, Homo sapien
gaagatcatgcagtcatcagtccca

SEQ ID NO: 1252377 - DNA, 25 bp, Homo sapien
ccccagtccagcctcggaaccatgc

SEQ ID NO: 1252378 - DNA, 25 bp, Homo sapien
ctgccccagtccagcctcggaacca

SEQ ID NO: 1252379 - DNA, 25 bp, Homo sapien
agtccagcctcggaaccatgcagcg

SEQ ID NO: 1252380 - DNA, 25 bp, Homo sapien
cagcctcggaaccatgcagcggctc

SEQ ID NO: 1252381 - DNA, 25 bp, Homo sapien
gcagggcagccagggttgcgccaga

SEQ ID NO: 1252382 - DNA, 25 bp, Homo sapien
ggcagccagggttgcgccagagcct

SEQ ID NO: 1252383 - DNA, 25 bp, Homo sapien
agggcagccagggttgcgccagagc

SEQ ID NO: 1252384 - DNA, 25 bp, Homo sapien
cagccagggttgcgccagagcctga

SEQ ID NO: 1252385 - DNA, 25 bp, Homo sapien
gggatctttggggttgcccacctgc

SEQ ID NO: 1252386 - DNA, 25 bp, Homo sapien
tgggatctttggggttgcccacctg

SEQ ID NO: 1252387 - DNA, 25 bp, Homo sapien
ggagaagataaccatcctgccctcc

SEQ ID NO: 1252388 - DNA, 25 bp, Homo sapien
aagataaccatcctgccctccattg

SEQ ID NO: 1252389 - DNA, 25 bp, Homo sapien
gagaagataaccatcctgccctcca

SEQ ID NO: 1252390 - DNA, 25 bp, Homo sapien
ctgggagaagataaccatcctgccc

SEQ ID NO: 1252391 - DNA, 25 bp, Homo sapien
gtagccccagtaggagctattttcc

SEQ ID NO: 1252392 - DNA, 25 bp, Homo sapien
taggagctattttccgaaaagtgaa

SEQ ID NO: 1252393 - DNA, 25 bp, Homo sapien
gccccagtaggagctattttccgaa

SEQ ID NO: 1252394 - DNA, 25 bp, Homo sapien
cccacaattcatggtatgtacaggg

SEQ ID NO: 1252395 - DNA, 25 bp, Homo sapien
ggcacagtgaaaaatatcgcccatg

SEQ ID NO: 1252396 - DNA, 25 bp, Homo sapien
ttttggcacagtgaaaaatatcgcc

SEQ ID NO: 1252397 - DNA, 25 bp, Homo sapien
caggtttaatgatggtcatggcaac

SEQ ID NO: 1252398 - DNA, 25 bp, Homo sapien
aaacaggtttaatgatggtcatggc

SEQ ID NO: 1252399 - DNA, 25 bp, Homo sapien
tgacatactgcctctgcacgaacgt

SEQ ID NO: 1252400 - DNA, 25 bp, Homo sapien
atgacatactgcctctgcacgaacg

SEQ ID NO: 1252401 - DNA, 25 bp, Homo sapien
tcatgacatactgcctctgcacgaa

SEQ ID NO: 1252402 - DNA, 25 bp, Homo sapien
tgtcatgacatactgcctctgcacg

SEQ ID NO: 1252403 - DNA, 25 bp, Homo sapien
taatttgcttgtatggaattttgcc

SEQ ID NO: 1252404 - DNA, 25 bp, Homo sapien
ggaatgctttgtagacacagtaatt

SEQ ID NO: 1252405 - DNA, 25 bp, Homo sapien
tgcctgagagacctcattgcagttt

SEQ ID NO: 1252406 - DNA, 25 bp, Homo sapien
tgttcagggaatggtgaattaagtg

SEQ ID NO: 1252407 - DNA, 25 bp, Homo sapien
tggagagggagagaagcttccagtt

SEQ ID NO: 1252408 - DNA, 25 bp, Homo sapien
aataatagtgcatgcatcaagtgca

SEQ ID NO: 1252409 - DNA, 25 bp, Homo sapien
caaataatagtgcatgcatcaagtg

SEQ ID NO: 1252410 - DNA, 25 bp, Homo sapien
agagggagagaagcttccagttaag

SEQ ID NO: 1252411 - DNA, 25 bp, Homo sapien
gaagctgtttggattagggtcccca

SEQ ID NO: 1252412 - DNA, 25 bp, Homo sapien
tagctgggtatgttgttacacactt

SEQ ID NO: 1252413 - DNA, 25 bp, Homo sapien
aaaatgaatagtgccccactttcac

SEQ ID NO: 1252414 - DNA, 25 bp, Homo sapien
atcacatcattacattccagctgag

SEQ ID NO: 1252415 - DNA, 25 bp, Homo sapien
tttcatccttctgtaccctgcgtct

SEQ ID NO: 1252416 - DNA, 25 bp, Homo sapien
caagtttcttgaccaccatgagctt

SEQ ID NO: 1252417 - DNA, 25 bp, Homo sapien
tgagactttgtgtgttctggccctt

SEQ ID NO: 1252418 - DNA, 25 bp, Homo sapien
cttacgtgcgtatctatgtgtccca

SEQ ID NO: 1252419 - DNA, 25 bp, Homo sapien
caagacgacgacaaaggcctttggc

SEQ ID NO: 1252420 - DNA, 25 bp, Homo sapien
ggcctttggcctgtgctactaaaca

SEQ ID NO: 1252421 - DNA, 25 bp, Homo sapien
tgatagtttcactcccaagcaatga

SEQ ID NO: 1252422 - DNA, 25 bp, Homo sapien
tttataaggaccctgcaagacgacg

SEQ ID NO: 1252423 - DNA, 25 bp, Homo sapien
taagtactctccacagtaaagcaga

SEQ ID NO: 1252424 - DNA, 25 bp, Homo sapien
ttggacacaatgacataagtactct

SEQ ID NO: 1252425 - DNA, 25 bp, Homo sapien
tgaacccctaagtctcctgtgccaa

SEQ ID NO: 1252426 - DNA, 25 bp, Homo sapien
tctgtacagatttgttaaaccattc

SEQ ID NO: 1252427 - DNA, 25 bp, Homo sapien
agattttattcaacagtacttcaga

SEQ ID NO: 1252428 - DNA, 25 bp, Homo sapien
tattcaacagtacttcagaaatcca

SEQ ID NO: 1252429 - DNA, 25 bp, Homo sapien
attttattcaacagtacttcagaaa

SEQ ID NO: 1252430 - DNA, 25 bp, Homo sapien
tttattcaacagtacttcagaaatc

SEQ ID NO: 1252431 - DNA, 25 bp, Homo sapien
taaaacctgtgtagatgaatctcga

SEQ ID NO: 1252432 - DNA, 25 bp, Homo sapien
gatgaaagcctcaacttccgaaaga

SEQ ID NO: 1252433 - DNA, 25 bp, Homo sapien
tggtgatccaagacctcaagcagca

SEQ ID NO: 1252434 - DNA, 25 bp, Homo sapien
gaaacaacggtcgatctggtgatcc

SEQ ID NO: 1252435 - DNA, 25 bp, Homo sapien
cagtagtaaagtgtctgccttgtct

SEQ ID NO: 1252436 - DNA, 25 bp, Homo sapien
tttgctagccaacactcagctaagt

SEQ ID NO: 1252437 - DNA, 25 bp, Homo sapien
aatgtttacatccaggaattcttac

SEQ ID NO: 1252438 - DNA, 25 bp, Homo sapien
taatgcttttcactaggtttcggaa

SEQ ID NO: 1252439 - DNA, 25 bp, Homo sapien
tattccacataatgctgaaggttgt

SEQ ID NO: 1252440 - DNA, 25 bp, Homo sapien
gatggacttttgtcaccgtagcaga

SEQ ID NO: 1252441 - DNA, 25 bp, Homo sapien
ccgtagcagaaaaagcatagtctca

SEQ ID NO: 1252442 - DNA, 25 bp, Homo sapien
catttacgagaaatagtccaggtgc

SEQ ID NO: 1252443 - DNA, 25 bp, Homo sapien
catcatgctcgtaggtctgtgcttt

SEQ ID NO: 1252444 - DNA, 25 bp, Homo sapien
tataaagattttatctccagatgtc

SEQ ID NO: 1252445 - DNA, 25 bp, Homo sapien
tggaaagatgaggaatattttggcc

SEQ ID NO: 1252446 - DNA, 25 bp, Homo sapien
ggccactgcagtaagataactaaag

SEQ ID NO: 1252447 - DNA, 25 bp, Homo sapien
ctatatcaaataagtattggaacac

SEQ ID NO: 1252448 - DNA, 25 bp, Homo sapien
ccagtcacctttgtatagatacttg

SEQ ID NO: 1252449 - DNA, 25 bp, Homo sapien
agatacttgtgttgagaatatgtcc

SEQ ID NO: 1252450 - DNA, 25 bp, Homo sapien
tatgtctacatcatctcttccagtc

SEQ ID NO: 1252451 - DNA, 25 bp, Homo sapien
tcagagtgtctggattccgcaggct

SEQ ID NO: 1252452 - DNA, 25 bp, Homo sapien
ggcatctactaccattccctgcagt

SEQ ID NO: 1252453 - DNA, 25 bp, Homo sapien
gcagtagtgagttccttgaggcaag

SEQ ID NO: 1252454 - DNA, 25 bp, Homo sapien
gaagacagttttgctgccttcaaag

SEQ ID NO: 1252455 - DNA, 25 bp, Homo sapien
atgtgaggccagctatttctttctc

SEQ ID NO: 1252456 - DNA, 25 bp, Homo sapien
tctcgaggagagaatcttggagcct

SEQ ID NO: 1252457 - DNA, 25 bp, Homo sapien
cgaggagagaatcttggagcctgct

SEQ ID NO: 1252458 - DNA, 25 bp, Homo sapien
tgaacttctcgaggagagaatcttg

SEQ ID NO: 1252459 - DNA, 25 bp, Homo sapien
gtctgtgaacttctcgaggagagaa

SEQ ID NO: 1252460 - DNA, 25 bp, Homo sapien
aaatttccctcgtttctctagattg

SEQ ID NO: 1252461 - DNA, 25 bp, Homo sapien
gattgatccgctgatttttggccag

SEQ ID NO: 1252462 - DNA, 25 bp, Homo sapien
catgctataccccagtttactaaat

SEQ ID NO: 1252463 - DNA, 25 bp, Homo sapien
taatccatgctataccccagtttac

SEQ ID NO: 1252464 - DNA, 25 bp, Homo sapien
cgtgcgagagactcacgggacgcga

SEQ ID NO: 1252465 - DNA, 25 bp, Homo sapien
agagactcacgggacgcgacgcgcc

SEQ ID NO: 1252466 - DNA, 25 bp, Homo sapien
acggcgtgcgagagactcacgggac

SEQ ID NO: 1252467 - DNA, 25 bp, Homo sapien
gggaggacggcgtgcgagagactca

SEQ ID NO: 1252468 - DNA, 25 bp, Homo sapien
ttgtagtcctcacgttcagaacctg

SEQ ID NO: 1252469 - DNA, 25 bp, Homo sapien
cccaggctactcaaggacgcagata

SEQ ID NO: 1252470 - DNA, 25 bp, Homo sapien
tagcttggacggtttggctgccaga

SEQ ID NO: 1252471 - DNA, 25 bp, Homo sapien
taatatgcagcagttgatccccagg

SEQ ID NO: 1252472 - DNA, 25 bp, Homo sapien
gagactccgttgatactgccccaga

SEQ ID NO: 1252473 - DNA, 25 bp, Homo sapien
cccggagactccgttgatactgccc

SEQ ID NO: 1252474 - DNA, 25 bp, Homo sapien
gactccgttgatactgccccagaat

SEQ ID NO: 1252475 - DNA, 25 bp, Homo sapien
cggagactccgttgatactgcccca

SEQ ID NO: 1252476 - DNA, 25 bp, Homo sapien
cagaacccaggtgttaggaaacgca

SEQ ID NO: 1252477 - DNA, 25 bp, Homo sapien
gctgtcgccggttgagaaagatgcc

SEQ ID NO: 1252478 - DNA, 25 bp, Homo sapien
tcttgctcctctgtagcgtggacgg

SEQ ID NO: 1252479 - DNA, 25 bp, Homo sapien
cgtatgggaactgaacaaaaatggc

SEQ ID NO: 1252480 - DNA, 25 bp, Homo sapien
tattatgcagaacaacacatgcttc

SEQ ID NO: 1252481 - DNA, 25 bp, Homo sapien
cctagaggcttatgaaaatgcaaca

SEQ ID NO: 1252482 - DNA, 25 bp, Homo sapien
taacacatagtaggaggcactgaca

SEQ ID NO: 1252483 - DNA, 25 bp, Homo sapien
tcgcaaacagtcatgacctagaggc

SEQ ID NO: 1252484 - DNA, 25 bp, Homo sapien
caattactcatatcattgtgcacag

SEQ ID NO: 1252485 - DNA, 25 bp, Homo sapien
tgcctaatgttaaacagcctccgac

SEQ ID NO: 1252486 - DNA, 25 bp, Homo sapien
tttactgcgtcaaaatgcctaatgt

SEQ ID NO: 1252487 - DNA, 25 bp, Homo sapien
gctcttgaaacatcagtaggttgag

SEQ ID NO: 1252488 - DNA, 25 bp, Homo sapien
taagactctaataactgaaaacatg

SEQ ID NO: 1252489 - DNA, 25 bp, Homo sapien
catgctaaagtggttggcgccagga

SEQ ID NO: 1252490 - DNA, 25 bp, Homo sapien
tgtgaaagagattacaagtactatg

SEQ ID NO: 1252491 - DNA, 25 bp, Homo sapien
aaatcagacaatgtcggctttgtga

SEQ ID NO: 1252492 - DNA, 25 bp, Homo sapien
cctggcctactcactttttgatgct

SEQ ID NO: 1252493 - DNA, 25 bp, Homo sapien
catgtctgtggtcctgggactttgg

SEQ ID NO: 1252494 - DNA, 25 bp, Homo sapien
tgtctcataaaaattttagtccagg

SEQ ID NO: 1252495 - DNA, 25 bp, Homo sapien
tagtacagaaaaatacacctcggcc

SEQ ID NO: 1252496 - DNA, 25 bp, Homo sapien
actacagttacacgccaccacgcgc

SEQ ID NO: 1252497 - DNA, 25 bp, Homo sapien
acagttacacgccaccacgcgcagc

SEQ ID NO: 1252498 - DNA, 25 bp, Homo sapien
ccgagaaactgggactacagttaca

SEQ ID NO: 1252499 - DNA, 25 bp, Homo sapien
agaaactgggactacagttacacgc

SEQ ID NO: 1252500 - DNA, 25 bp, Homo sapien
ctggaattcctatcatgtatatttc

SEQ ID NO: 1252501 - DNA, 25 bp, Homo sapien
tggaattcctatcatgtatatttct

SEQ ID NO: 1252502 - DNA, 25 bp, Homo sapien
agaatccataagattcctggaattc

SEQ ID NO: 1252503 - DNA, 25 bp, Homo sapien
aagaatccataagattcctggaatt

SEQ ID NO: 1252504 - DNA, 25 bp, Homo sapien
tcatctttaaaaggactggcagctt

SEQ ID NO: 1252505 - DNA, 25 bp, Homo sapien
catctttaaaaggactggcagcttc

SEQ ID NO: 1252506 - DNA, 25 bp, Homo sapien
ctcatctttaaaaggactggcagct

SEQ ID NO: 1252507 - DNA, 25 bp, Homo sapien
ggagtctggttgaccaaacggacac

SEQ ID NO: 1252508 - DNA, 25 bp, Homo sapien
ttgaccaaacggacacttactcagg

SEQ ID NO: 1252509 - DNA, 25 bp, Homo sapien
tctggttgaccaaacggacacttac

SEQ ID NO: 1252510 - DNA, 25 bp, Homo sapien
caaacggacacttactcaggaaggc

SEQ ID NO: 1252511 - DNA, 25 bp, Homo sapien
tctgttgtaattcgggccaggctgt

SEQ ID NO: 1252512 - DNA, 25 bp, Homo sapien
ggtgcatcttctccaatagtgacat

SEQ ID NO: 1252513 - DNA, 25 bp, Homo sapien
tcatttcccacactggtgctaaaag

SEQ ID NO: 1252514 - DNA, 25 bp, Homo sapien
tcagttggtgaatgcttctgctggc

SEQ ID NO: 1252515 - DNA, 25 bp, Homo sapien
ttttcttcttcttgacggagatact

SEQ ID NO: 1252516 - DNA, 25 bp, Homo sapien
gcttgttggcgcaacaaatctttga

SEQ ID NO: 1252517 - DNA, 25 bp, Homo sapien
ccttatctgcttgttggcgcaacaa

SEQ ID NO: 1252518 - DNA, 25 bp, Homo sapien
cttcttgacggagatacttcacttt

SEQ ID NO: 1252519 - DNA, 25 bp, Homo sapien
ggtcgtgcatagtaggcatattggt

SEQ ID NO: 1252520 - DNA, 25 bp, Homo sapien
atgatgaatatattgagactggtca

SEQ ID NO: 1252521 - DNA, 25 bp, Homo sapien
taacttctgcctctaaatgatgaat

SEQ ID NO: 1252522 - DNA, 25 bp, Homo sapien
taatagtatgaacaaggtcgtgcat

SEQ ID NO: 1252523 - DNA, 25 bp, Homo sapien
cgttttcaagcacaactacttgtat

SEQ ID NO: 1252524 - DNA, 25 bp, Homo sapien
tgtctttgagattttagctgttgct

SEQ ID NO: 1252525 - DNA, 25 bp, Homo sapien
tctttgagattttagctgttgctgg

SEQ ID NO: 1252526 - DNA, 25 bp, Homo sapien
ttgctggagcccttcgttttcaagc

SEQ ID NO: 1252527 - DNA, 25 bp, Homo sapien
tatcaaggtcatctggcatatctgc

SEQ ID NO: 1252528 - DNA, 25 bp, Homo sapien
caagtgatccatccgttcgtgtgat

SEQ ID NO: 1252529 - DNA, 25 bp, Homo sapien
caaggcatgtgtgctctgaccatca

SEQ ID NO: 1252530 - DNA, 25 bp, Homo sapien
catgcgtaagacactgtatctggcc

SEQ ID NO: 1252531 - DNA, 25 bp, Homo sapien
gatttagcaccaacattttaattga

SEQ ID NO: 1252532 - DNA, 25 bp, Homo sapien
tcagcaaacttcaatatagcaaggg

SEQ ID NO: 1252533 - DNA, 25 bp, Homo sapien
cactgaaaatctatattgaaatcag

SEQ ID NO: 1252534 - DNA, 25 bp, Homo sapien
tcttaaaaggcattatgaaacactg

SEQ ID NO: 1252535 - DNA, 25 bp, Homo sapien
tcatgggaaaatggtcttttggagg

SEQ ID NO: 1252536 - DNA, 25 bp, Homo sapien
cctgttgtaatccaagaattgtgca

SEQ ID NO: 1252537 - DNA, 25 bp, Homo sapien
ccaaaatctgcattgtcatgggaaa

SEQ ID NO: 1252538 - DNA, 25 bp, Homo sapien
tggaggtttcgcccaccccagaatc

SEQ ID NO: 1252539 - DNA, 25 bp, Homo sapien
gggaatggagatattgtttaatacg

SEQ ID NO: 1252540 - DNA, 25 bp, Homo sapien
gatattgtttaatacgtccagactt

SEQ ID NO: 1252541 - DNA, 25 bp, Homo sapien
aatggagatattgtttaatacgtcc

SEQ ID NO: 1252542 - DNA, 25 bp, Homo sapien
ggagatattgtttaatacgtccaga

SEQ ID NO: 1252543 - DNA, 25 bp, Homo sapien
caaagataagtaaagaaggcctcac

SEQ ID NO: 1252544 - DNA, 25 bp, Homo sapien
tatttggtacacatgtctcctgcac

SEQ ID NO: 1252545 - DNA, 25 bp, Homo sapien
tcctgagaatgactccgtgtacagt

SEQ ID NO: 1252546 - DNA, 25 bp, Homo sapien
gaaggcacagaggttgtccaaacca

SEQ ID NO: 1252547 - DNA, 25 bp, Homo sapien
ccttgattgactgttgtaaatctta

SEQ ID NO: 1252548 - DNA, 25 bp, Homo sapien
cagcaggaattcattgttatgggtt

SEQ ID NO: 1252549 - DNA, 25 bp, Homo sapien
taagtcctttgtgtggtgtctatta

SEQ ID NO: 1252550 - DNA, 25 bp, Homo sapien
tatattatagaagggtccacgtcat

SEQ ID NO: 1252551 - DNA, 25 bp, Homo sapien
ctcaaaaacttcaattgggattcct

SEQ ID NO: 1252552 - DNA, 25 bp, Homo sapien
aaaacttcaattgggattcctcaat

SEQ ID NO: 1252553 - DNA, 25 bp, Homo sapien
tcaaaaacttcaattgggattcctc

SEQ ID NO: 1252554 - DNA, 25 bp, Homo sapien
caaaaacttcaattgggattcctca

SEQ ID NO: 1252555 - DNA, 25 bp, Homo sapien
ttaaaatgtcatcaagtaagtctga

SEQ ID NO: 1252556 - DNA, 25 bp, Homo sapien
gactaaaactagaagttcagcaaac

SEQ ID NO: 1252557 - DNA, 25 bp, Homo sapien
ctataaatggacgatttcactttac

SEQ ID NO: 1252558 - DNA, 25 bp, Homo sapien
gcttttggtatgactataaatggac

SEQ ID NO: 1252559 - DNA, 25 bp, Homo sapien
tatataggtcttactgggatctcta

SEQ ID NO: 1252560 - DNA, 25 bp, Homo sapien
caccacaatcagctgagttctggct

SEQ ID NO: 1252561 - DNA, 25 bp, Homo sapien
tacagtgaaagctatgagttccagc

SEQ ID NO: 1252562 - DNA, 25 bp, Homo sapien
tgtctctagataggctatggcctgg

SEQ ID NO: 1252563 - DNA, 25 bp, Homo sapien
gacacgttgaatatgatgagactgg

SEQ ID NO: 1252564 - DNA, 25 bp, Homo sapien
taagacaacatacttgaggtgagga

SEQ ID NO: 1252565 - DNA, 25 bp, Homo sapien
tatgctttagtttacgtccaatacc

SEQ ID NO: 1252566 - DNA, 25 bp, Homo sapien
taatatagattagaatccgcctgac

SEQ ID NO: 1252567 - DNA, 25 bp, Homo sapien
attctagaaaatggccaggtaaaat

SEQ ID NO: 1252568 - DNA, 25 bp, Homo sapien
tggccaggtaaaattacatgacttt

SEQ ID NO: 1252569 - DNA, 25 bp, Homo sapien
actactatcgtttatgggtactcac

SEQ ID NO: 1252570 - DNA, 25 bp, Homo sapien
taactactactatcgtttatgggta

SEQ ID NO: 1252571 - DNA, 25 bp, Homo sapien
tctttcgatggtctgcatatgaaca

SEQ ID NO: 1252572 - DNA, 25 bp, Homo sapien
ttaaccagtctttcgatggtctgca

SEQ ID NO: 1252573 - DNA, 25 bp, Homo sapien
aattctttatgctttagttgctctt

SEQ ID NO: 1252574 - DNA, 25 bp, Homo sapien
caccaacacggttacaagtattagc

SEQ ID NO: 1252575 - DNA, 25 bp, Homo sapien
catattgccaaagtctccgtgcgcg

SEQ ID NO: 1252576 - DNA, 25 bp, Homo sapien
tccgtgcgcgtagaagcatacttac

SEQ ID NO: 1252577 - DNA, 25 bp, Homo sapien
catagggctagaagaacacaatgcc

SEQ ID NO: 1252578 - DNA, 25 bp, Homo sapien
taatcacatgtgacttagcataggg

SEQ ID NO: 1252579 - DNA, 25 bp, Homo sapien
cccaacctgagtgagttagccatgt

SEQ ID NO: 1252580 - DNA, 25 bp, Homo sapien
tccatggtaagttggcagtagaacc

SEQ ID NO: 1252581 - DNA, 25 bp, Homo sapien
ccagaatatgaacccaagcagtcag

SEQ ID NO: 1252582 - DNA, 25 bp, Homo sapien
tctagtgacccctcaaggtaactct

SEQ ID NO: 1252583 - DNA, 25 bp, Homo sapien
ggcttattagttttgctagactacc

SEQ ID NO: 1252584 - DNA, 25 bp, Homo sapien
attgccttcgtccacctctctagtg

SEQ ID NO: 1252585 - DNA, 25 bp, Homo sapien
gactacctagttttaagctctgcct

SEQ ID NO: 1252586 - DNA, 25 bp, Homo sapien
taaaggcctatttgacaccctttca

SEQ ID NO: 1252587 - DNA, 25 bp, Homo sapien
aaggagcttcttgacgcaaagccag

SEQ ID NO: 1252588 - DNA, 25 bp, Homo sapien
ggagcttcttgacgcaaagccagca

SEQ ID NO: 1252589 - DNA, 25 bp, Homo sapien
tgtgttaaccctgcaacattccatg

SEQ ID NO: 1252590 - DNA, 25 bp, Homo sapien
tgttaaccctgcaacattccatgat

SEQ ID NO: 1252591 - DNA, 25 bp, Homo sapien
ggtctagctttatcaaggatatgca

SEQ ID NO: 1252592 - DNA, 25 bp, Homo sapien
aaattcactctttaaggacagcaag

SEQ ID NO: 1252593 - DNA, 25 bp, Homo sapien
tctgttcctgataccatgcagtcac

SEQ ID NO: 1252594 - DNA, 25 bp, Homo sapien
ggacagcaagtcaatataggcatct

SEQ ID NO: 1252595 - DNA, 25 bp, Homo sapien
ccttcgtggcaggacggcatctgtg

SEQ ID NO: 1252596 - DNA, 25 bp, Homo sapien
aatcatctattgtggagagggctgc

SEQ ID NO: 1252597 - DNA, 25 bp, Homo sapien
gatcaaacgatcctgtcctcataag

SEQ ID NO: 1252598 - DNA, 25 bp, Homo sapien
ggccggctgagcacatatgaaataa

SEQ ID NO: 1252599 - DNA, 25 bp, Homo sapien
tgcgtatctgccaagctgctcctta

SEQ ID NO: 1252600 - DNA, 25 bp, Homo sapien
gtgcagacatcaagtcatctctttc

SEQ ID NO: 1252601 - DNA, 25 bp, Homo sapien
tccttacggaaactagtgcagacat

SEQ ID NO: 1252602 - DNA, 25 bp, Homo sapien
ctgttcataagcacttgcttctctt

SEQ ID NO: 1252603 - DNA, 25 bp, Homo sapien
ttcaaaattggcttcctcagatatt

SEQ ID NO: 1252604 - DNA, 25 bp, Homo sapien
tttcaaaattggcttcctcagatat

SEQ ID NO: 1252605 - DNA, 25 bp, Homo sapien
aatgacaattcacatgcatgtgtct

SEQ ID NO: 1252606 - DNA, 25 bp, Homo sapien
gcaatgacaattcacatgcatgtgt

SEQ ID NO: 1252607 - DNA, 25 bp, Homo sapien
ctgcaatgacaattcacatgcatgt

SEQ ID NO: 1252608 - DNA, 25 bp, Homo sapien
tgacaattcacatgcatgtgtcttt

SEQ ID NO: 1252609 - DNA, 25 bp, Homo sapien
gctaaggataactgtctccggctcc

SEQ ID NO: 1252610 - DNA, 25 bp, Homo sapien
ttatacaatctgtcagtgatgaaca

SEQ ID NO: 1252611 - DNA, 25 bp, Homo sapien
tttagattgattccgtcaatttcgg

SEQ ID NO: 1252612 - DNA, 25 bp, Homo sapien
tcccaccctatatcctcaaggagat

SEQ ID NO: 1252613 - DNA, 25 bp, Homo sapien
ggcattgagggacagctagagctca

SEQ ID NO: 1252614 - DNA, 25 bp, Homo sapien
cttgactgacacaagggccttcact

SEQ ID NO: 1252615 - DNA, 25 bp, Homo sapien
ctgagacgacttgactgacacaagg

SEQ ID NO: 1252616 - DNA, 25 bp, Homo sapien
gacagctagagctcacaacaaatga

SEQ ID NO: 1252617 - DNA, 25 bp, Homo sapien
gaaaatggccaactgcaggtcatgt

SEQ ID NO: 1252618 - DNA, 25 bp, Homo sapien
aaaatggccaactgcaggtcatgtt

SEQ ID NO: 1252619 - DNA, 25 bp, Homo sapien
catgtctttctcaatggcccttttc

SEQ ID NO: 1252620 - DNA, 25 bp, Homo sapien
ttctttttcaagtcgctccgcctgc

SEQ ID NO: 1252621 - DNA, 25 bp, Homo sapien
tctcttgctgagatgcaagttcttt

SEQ ID NO: 1252622 - DNA, 25 bp, Homo sapien
atcatgtctttctcaatggcccttt

SEQ ID NO: 1252623 - DNA, 25 bp, Homo sapien
gcaatgtggataacagcagagtcct

SEQ ID NO: 1252624 - DNA, 25 bp, Homo sapien
tcttctgcaatgtggataacagcag

SEQ ID NO: 1252625 - DNA, 25 bp, Homo sapien
tctgcaatgtggataacagcagagt

SEQ ID NO: 1252626 - DNA, 25 bp, Homo sapien
tttcttctgcaatgtggataacagc

SEQ ID NO: 1252627 - DNA, 25 bp, Homo sapien
ggaatcatcaatggcatcataaaaa

SEQ ID NO: 1252628 - DNA, 25 bp, Homo sapien
aatcatcaatggcatcataaaaaac

SEQ ID NO: 1252629 - DNA, 25 bp, Homo sapien
ctatggaatcatcaatggcatcata

SEQ ID NO: 1252630 - DNA, 25 bp, Homo sapien
atggaatcatcaatggcatcataaa

SEQ ID NO: 1252631 - DNA, 25 bp, Homo sapien
taataataattaaatcccctagaga

SEQ ID NO: 1252632 - DNA, 25 bp, Homo sapien
agtagtttgaggatacgatgagcta

SEQ ID NO: 1252633 - DNA, 25 bp, Homo sapien
ataataattaaatcccctagagaag

SEQ ID NO: 1252634 - DNA, 25 bp, Homo sapien
tgagccaagtagtttgaggatacga

SEQ ID NO: 1252635 - DNA, 25 bp, Homo sapien
catctggaagtcaacattacacggc

SEQ ID NO: 1252636 - DNA, 25 bp, Homo sapien
tttctgcagagcagtccctagtgta

SEQ ID NO: 1252637 - DNA, 25 bp, Homo sapien
ctttgacaggggcaaggaagagaca

SEQ ID NO: 1252638 - DNA, 25 bp, Homo sapien
cagagccagaagtaacacagacaca

SEQ ID NO: 1252639 - DNA, 25 bp, Homo sapien
ttgtgacatccatttcccgagaagc

SEQ ID NO: 1252640 - DNA, 25 bp, Homo sapien
agccagctggctttgaatttcctcc

SEQ ID NO: 1252641 - DNA, 25 bp, Homo sapien
caatattctgagacaagatcaacat

SEQ ID NO: 1252642 - DNA, 25 bp, Homo sapien
tgggcctccagttgggcaatattct

SEQ ID NO: 1252643 - DNA, 25 bp, Homo sapien
taatgtacaagtcagctaagttggc

SEQ ID NO: 1252644 - DNA, 25 bp, Homo sapien
ttatctcaccgttatgctttcttgg

SEQ ID NO: 1252645 - DNA, 25 bp, Homo sapien
aaacaagcaaattatgggccttttg

SEQ ID NO: 1252646 - DNA, 25 bp, Homo sapien
ttgagagaactgagaacctatagaa

SEQ ID NO: 1252647 - DNA, 25 bp, Homo sapien
agatccctgttagtttttgctctga

SEQ ID NO: 1252648 - DNA, 25 bp, Homo sapien
tttcaagatccctgttagtttttgc

SEQ ID NO: 1252649 - DNA, 25 bp, Homo sapien
ggttttattcagctgatagcgcatt

SEQ ID NO: 1252650 - DNA, 25 bp, Homo sapien
gctgatagcgcatttctccacacac

SEQ ID NO: 1252651 - DNA, 25 bp, Homo sapien
gcagccctacgcagttctcagaaat

SEQ ID NO: 1252652 - DNA, 25 bp, Homo sapien
gccctacgcagttctcagaaatata

SEQ ID NO: 1252653 - DNA, 25 bp, Homo sapien
cagccctacgcagttctcagaaata

SEQ ID NO: 1252654 - DNA, 25 bp, Homo sapien
tgcagccctacgcagttctcagaaa

SEQ ID NO: 1252655 - DNA, 25 bp, Homo sapien
gactgaactcctgtatgtggtctca

SEQ ID NO: 1252656 - DNA, 25 bp, Homo sapien
cgcccggctagaattgtgttttgta

SEQ ID NO: 1252657 - DNA, 25 bp, Homo sapien
ttttgtaggtgtactctgatggaac

SEQ ID NO: 1252658 - DNA, 25 bp, Homo sapien
ctctgatggaacaatggagactgaa

SEQ ID NO: 1252659 - DNA, 25 bp, Homo sapien
gcagagttggtacctgagaaggcac

SEQ ID NO: 1252660 - DNA, 25 bp, Homo sapien
tggtagctaccagaactgcagagtt

SEQ ID NO: 1252661 - DNA, 25 bp, Homo sapien
tacactgtttgggtgatggaactac

SEQ ID NO: 1252662 - DNA, 25 bp, Homo sapien
cattatatttcttcagggcacacag

SEQ ID NO: 1252663 - DNA, 25 bp, Homo sapien
gtagatgcacggttttaccacgttg

SEQ ID NO: 1252664 - DNA, 25 bp, Homo sapien
cacggctggccctaggcaacattct

SEQ ID NO: 1252665 - DNA, 25 bp, Homo sapien
aacattctaaccaccctgcaaggat

SEQ ID NO: 1252666 - DNA, 25 bp, Homo sapien
gatagctactatgttctctttgaca

SEQ ID NO: 1252667 - DNA, 25 bp, Homo sapien
tactctgcttgttggtgacacaaaa

SEQ ID NO: 1252668 - DNA, 25 bp, Homo sapien
ctgcttgttggtgacacaaaataat

SEQ ID NO: 1252669 - DNA, 25 bp, Homo sapien
ctctgcttgttggtgacacaaaata

SEQ ID NO: 1252670 - DNA, 25 bp, Homo sapien
cttgttggtgacacaaaataattcc

SEQ ID NO: 1252671 - DNA, 25 bp, Homo sapien
gcagttggtgctcagattcgcccag

SEQ ID NO: 1252672 - DNA, 25 bp, Homo sapien
agttctgttagtctcaggcactcct

SEQ ID NO: 1252673 - DNA, 25 bp, Homo sapien
ccagcagttctgttagtctcaggca

SEQ ID NO: 1252674 - DNA, 25 bp, Homo sapien
ctcagattcgcccagcagttctgtt

SEQ ID NO: 1252675 - DNA, 25 bp, Homo sapien
aatcggtgctatggcgcataatggg

SEQ ID NO: 1252676 - DNA, 25 bp, Homo sapien
tcagtggaatgaaatcggtgctatg

SEQ ID NO: 1252677 - DNA, 25 bp, Homo sapien
ctatggcgcataatgggattaggga

SEQ ID NO: 1252678 - DNA, 25 bp, Homo sapien
ggaatgaaatcggtgctatggcgca

SEQ ID NO: 1252679 - DNA, 25 bp, Homo sapien
cccaaaggcttgatgtgaacactgc

SEQ ID NO: 1252680 - DNA, 25 bp, Homo sapien
tactgtaatttagggccgagctaca

SEQ ID NO: 1252681 - DNA, 25 bp, Homo sapien
ttaagaactgagcaaccccaaaggc

SEQ ID NO: 1252682 - DNA, 25 bp, Homo sapien
cctcaatggtgtaagcctggttata

SEQ ID NO: 1252683 - DNA, 25 bp, Homo sapien
caggctgttcaagtggtgcttttct

SEQ ID NO: 1252684 - DNA, 25 bp, Homo sapien
ggctgttcaagtggtgcttttctcc

SEQ ID NO: 1252685 - DNA, 25 bp, Homo sapien
cgcaggctgttcaagtggtgctttt

SEQ ID NO: 1252686 - DNA, 25 bp, Homo sapien
aacgcaggctgttcaagtggtgctt

SEQ ID NO: 1252687 - DNA, 25 bp, Homo sapien
gttaccactcgtccattttcagcag

SEQ ID NO: 1252688 - DNA, 25 bp, Homo sapien
taacagaaccagaggcatcttaaca

SEQ ID NO: 1252689 - DNA, 25 bp, Homo sapien
gcttacaaaagagtaccgcacttag

SEQ ID NO: 1252690 - DNA, 25 bp, Homo sapien
gatactatacgggaaaactctctac

SEQ ID NO: 1252691 - DNA, 25 bp, Homo sapien
tacagatctctactacagtttttaa

SEQ ID NO: 1252692 - DNA, 25 bp, Homo sapien
ggatgatcacgaactcttagcctca

SEQ ID NO: 1252693 - DNA, 25 bp, Homo sapien
tcttttaggttgatgtacagatctc

SEQ ID NO: 1252694 - DNA, 25 bp, Homo sapien
aaagatttggatccttatttcatca

SEQ ID NO: 1252695 - DNA, 25 bp, Homo sapien
gtaactcagaatgggcgaaactccg

SEQ ID NO: 1252696 - DNA, 25 bp, Homo sapien
aaactccggagatggcccataaggc

SEQ ID NO: 1252697 - DNA, 25 bp, Homo sapien
ggtcagacttgacccatgggttgca

SEQ ID NO: 1252698 - DNA, 25 bp, Homo sapien
caatcatgttgacgctcctgcctaa

SEQ ID NO: 1252699 - DNA, 25 bp, Homo sapien
taggctgggaggtcaaacaattaat

SEQ ID NO: 1252700 - DNA, 25 bp, Homo sapien
aaaatatctgtactagaggccgggc

SEQ ID NO: 1252701 - DNA, 25 bp, Homo sapien
cctgactcgtatggataggctggga

SEQ ID NO: 1252702 - DNA, 25 bp, Homo sapien
tatgatagcatgctggctccaggaa

SEQ ID NO: 1252703 - DNA, 25 bp, Homo sapien
cccaagtagccaggacccaggcgcg

SEQ ID NO: 1252704 - DNA, 25 bp, Homo sapien
aagtagccaggacccaggcgcgcac

SEQ ID NO: 1252705 - DNA, 25 bp, Homo sapien
caagtagccaggacccaggcgcgca

SEQ ID NO: 1252706 - DNA, 25 bp, Homo sapien
ctcccaagtagccaggacccaggcg

SEQ ID NO: 1252707 - DNA, 25 bp, Homo sapien
ggctttctgacagcctgttttctct

SEQ ID NO: 1252708 - DNA, 25 bp, Homo sapien
cttagcccttcaaacaggtggagca

SEQ ID NO: 1252709 - DNA, 25 bp, Homo sapien
ccagggttcttagcccttcaaacag

SEQ ID NO: 1252710 - DNA, 25 bp, Homo sapien
gttcttagcccttcaaacaggtgga

SEQ ID NO: 1252711 - DNA, 25 bp, Homo sapien
caggctgtgggcctatgtggcaggg

SEQ ID NO: 1252712 - DNA, 25 bp, Homo sapien
tgtgggcaatacattctcggtttcc

SEQ ID NO: 1252713 - DNA, 25 bp, Homo sapien
gcaatacattctcggtttcctctgg

SEQ ID NO: 1252714 - DNA, 25 bp, Homo sapien
ggcaagtggtgtgggcaatacattc

SEQ ID NO: 1252715 - DNA, 25 bp, Homo sapien
gtgagttgtcgcatgctgccattct

SEQ ID NO: 1252716 - DNA, 25 bp, Homo sapien
ccacagttctgatctgggctcgatt

SEQ ID NO: 1252717 - DNA, 25 bp, Homo sapien
caaatcagtttgagtgtaggatctg

SEQ ID NO: 1252718 - DNA, 25 bp, Homo sapien
ggatctgaatttgggttcctccaca

SEQ ID NO: 1252719 - DNA, 25 bp, Homo sapien
ttcaggaagacaataatttggagtc

SEQ ID NO: 1252720 - DNA, 25 bp, Homo sapien
tacttttgggttcaggaagacaata

SEQ ID NO: 1252721 - DNA, 25 bp, Homo sapien
ggttcaggaagacaataatttggag

SEQ ID NO: 1252722 - DNA, 25 bp, Homo sapien
ttgggttcaggaagacaataatttg

SEQ ID NO: 1252723 - DNA, 25 bp, Homo sapien
gggctattctggcactcgcaacctt

SEQ ID NO: 1252724 - DNA, 25 bp, Homo sapien
gaagcaaagcccctcaaggtcattg

SEQ ID NO: 1252725 - DNA, 25 bp, Homo sapien
ctgttggattccactgaacatttcc

SEQ ID NO: 1252726 - DNA, 25 bp, Homo sapien
gaagtgaactttgtttaccgcaagc

SEQ ID NO: 1252727 - DNA, 25 bp, Homo sapien
caaactaatttccacaaggtagcct

SEQ ID NO: 1252728 - DNA, 25 bp, Homo sapien
ggtagcctgccctgactatatccaa

SEQ ID NO: 1252729 - DNA, 25 bp, Homo sapien
tatatccaaactgaggactttgtgc

SEQ ID NO: 1252730 - DNA, 25 bp, Homo sapien
cattcctgtagctacagagcggccc

SEQ ID NO: 1252731 - DNA, 25 bp, Homo sapien
ttggtatgaaaaaacttgtgagaat

SEQ ID NO: 1252732 - DNA, 25 bp, Homo sapien
attggtatgaaaaaacttgtgagaa

SEQ ID NO: 1252733 - DNA, 25 bp, Homo sapien
tggtatgaaaaaacttgtgagaatt

SEQ ID NO: 1252734 - DNA, 25 bp, Homo sapien
tttgtgagctttgtgatagtagcat

SEQ ID NO: 1252735 - DNA, 25 bp, Homo sapien
taaaattttgtgagctttgtgatag

SEQ ID NO: 1252736 - DNA, 25 bp, Homo sapien
ctgaagttccaatgtgagacataca

SEQ ID NO: 1252737 - DNA, 25 bp, Homo sapien
gttccaatgtgagacatacaactct

SEQ ID NO: 1252738 - DNA, 25 bp, Homo sapien
cttgggcctttgcttccttgctaaa

SEQ ID NO: 1252739 - DNA, 25 bp, Homo sapien
cagttttgtcatgctgggcctccat

SEQ ID NO: 1252740 - DNA, 25 bp, Homo sapien
agctctgctgaatgctatctttttc

SEQ ID NO: 1252741 - DNA, 25 bp, Homo sapien
tgcttccttgctaaagctctgctga

SEQ ID NO: 1252742 - DNA, 25 bp, Homo sapien
ttttgagagatttgttccagtttct

SEQ ID NO: 1252743 - DNA, 25 bp, Homo sapien
aaaatgtattctgggaggtcagcaa

SEQ ID NO: 1252744 - DNA, 25 bp, Homo sapien
caaaaatgtattctgggaggtcagc

SEQ ID NO: 1252745 - DNA, 25 bp, Homo sapien
atgtattctgggaggtcagcaacaa

SEQ ID NO: 1252746 - DNA, 25 bp, Homo sapien
cattcttggtggttacaggagcctc

SEQ ID NO: 1252747 - DNA, 25 bp, Homo sapien
gagagttggatgcacgagccctctg

SEQ ID NO: 1252748 - DNA, 25 bp, Homo sapien
gagccctctgattccccaaaagatt

SEQ ID NO: 1252749 - DNA, 25 bp, Homo sapien
gctaagacagcttgttgatgcagga

SEQ ID NO: 1252750 - DNA, 25 bp, Homo sapien
ggacacactgttcctccaattcttc

SEQ ID NO: 1252751 - DNA, 25 bp, Homo sapien
gacacactgttcctccaattcttca

SEQ ID NO: 1252752 - DNA, 25 bp, Homo sapien
ttcatcgtctcatgtactctcccat

SEQ ID NO: 1252753 - DNA, 25 bp, Homo sapien
tctcatgtactctcccatgctggac

SEQ ID NO: 1252754 - DNA, 25 bp, Homo sapien
gtggaagtccaagtctacagaaacc

SEQ ID NO: 1252755 - DNA, 25 bp, Homo sapien
gcaaagtagatatgattagcgccaa

SEQ ID NO: 1252756 - DNA, 25 bp, Homo sapien
tattgatgacatttagtgggtggcc

SEQ ID NO: 1252757 - DNA, 25 bp, Homo sapien
gctatcatcgtgcatgcggttgtca

SEQ ID NO: 1252758 - DNA, 25 bp, Homo sapien
aatatgggtgtcgtccttgacacgc

SEQ ID NO: 1252759 - DNA, 25 bp, Homo sapien
cacagctctattttctagggagaaa

SEQ ID NO: 1252760 - DNA, 25 bp, Homo sapien
ccctggactgcctttgtggacacca

SEQ ID NO: 1252761 - DNA, 25 bp, Homo sapien
agtagcagcactaggcacccattgc

SEQ ID NO: 1252762 - DNA, 25 bp, Homo sapien
tcatcctgaatctagtttatagaag

SEQ ID NO: 1252763 - DNA, 25 bp, Homo sapien
gaatcaaatttctatgacaaacata

SEQ ID NO: 1252764 - DNA, 25 bp, Homo sapien
tatgacaaacatagaacttacggat

SEQ ID NO: 1252765 - DNA, 25 bp, Homo sapien
acttacggatttggtaaagatcatc

SEQ ID NO: 1252766 - DNA, 25 bp, Homo sapien
taactgtcaccctagtattaagccg

SEQ ID NO: 1252767 - DNA, 25 bp, Homo sapien
gagttcacgcagttctccaaggcag

SEQ ID NO: 1252768 - DNA, 25 bp, Homo sapien
gtgtctccaggcctagcacagtgac

SEQ ID NO: 1252769 - DNA, 25 bp, Homo sapien
tctcaggaaccttatacgccgcact

SEQ ID NO: 1252770 - DNA, 25 bp, Homo sapien
gaaagctccggaaactgcatatcat

SEQ ID NO: 1252771 - DNA, 25 bp, Homo sapien
taaccattatgcaccatatgctcca

SEQ ID NO: 1252772 - DNA, 25 bp, Homo sapien
catacgtcgttttgtacacgccagg

SEQ ID NO: 1252773 - DNA, 25 bp, Homo sapien
gcactagaacccaggcagaaagctc

SEQ ID NO: 1252774 - DNA, 25 bp, Homo sapien
tgacgtaaaatccagaggcactgtg

SEQ ID NO: 1252775 - DNA, 25 bp, Homo sapien
tgagacacacttgaatgggacgctt

SEQ ID NO: 1252776 - DNA, 25 bp, Homo sapien
gcactgtgtcatgcaagcactgaga

SEQ ID NO: 1252777 - DNA, 25 bp, Homo sapien
ttgtctttgggaaggccacaccagg

SEQ ID NO: 1252778 - DNA, 25 bp, Homo sapien
aaatgggcgcttgtgctcccaacag

SEQ ID NO: 1252779 - DNA, 25 bp, Homo sapien
aaagtcagccatgtttcttcccaag

SEQ ID NO: 1252780 - DNA, 25 bp, Homo sapien
tgctactcaccagcacaaatgggcg

SEQ ID NO: 1252781 - DNA, 25 bp, Homo sapien
gattctatgaaaacgcagtggagtg

SEQ ID NO: 1252782 - DNA, 25 bp, Homo sapien
tcaggtccccatccgagaaagcctg

SEQ ID NO: 1252783 - DNA, 25 bp, Homo sapien
caagcatgggttcttaatccaagag

SEQ ID NO: 1252784 - DNA, 25 bp, Homo sapien
gaacagtggccgatgcttttattgc

SEQ ID NO: 1252785 - DNA, 25 bp, Homo sapien
ggtcacctgaaaacctgtacatgag

SEQ ID NO: 1252786 - DNA, 25 bp, Homo sapien
caaacgggtacagtgatgtaggctg

SEQ ID NO: 1252787 - DNA, 25 bp, Homo sapien
cgacatgcccaaacgggtacagtga

SEQ ID NO: 1252788 - DNA, 25 bp, Homo sapien
tgcttgttccgacatgcccaaacgg

SEQ ID NO: 1252789 - DNA, 25 bp, Homo sapien
ttgttccgacatgcccaaacgggta

SEQ ID NO: 1252790 - DNA, 25 bp, Homo sapien
actgaactgactgggtccatgctct

SEQ ID NO: 1252791 - DNA, 25 bp, Homo sapien
gagactgaactgactgggtccatgc

SEQ ID NO: 1252792 - DNA, 25 bp, Homo sapien
gatggagactgaactgactgggtcc

SEQ ID NO: 1252793 - DNA, 25 bp, Homo sapien
taggatgatggagactgaactgact

SEQ ID NO: 1252794 - DNA, 25 bp, Homo sapien
cattcgatgaataaggagttggaag

SEQ ID NO: 1252795 - DNA, 25 bp, Homo sapien
aggctttccaccaagataaattctg

SEQ ID NO: 1252796 - DNA, 25 bp, Homo sapien
aattctgcatgctcccggttcattc

SEQ ID NO: 1252797 - DNA, 25 bp, Homo sapien
cccggttcattcgatgaataaggag

SEQ ID NO: 1252798 - DNA, 25 bp, Homo sapien
gagtagtcagatgtcttcacgagaa

SEQ ID NO: 1252799 - DNA, 25 bp, Homo sapien
aacattcggtgctgtcaaactgtgg

SEQ ID NO: 1252800 - DNA, 25 bp, Homo sapien
gaaattagggaatcaaggacagggc

SEQ ID NO: 1252801 - DNA, 25 bp, Homo sapien
aaaggatggttgagcttcttacagc

SEQ ID NO: 1252802 - DNA, 25 bp, Homo sapien
ttcaaaatggacctgcttcaacttt

SEQ ID NO: 1252803 - DNA, 25 bp, Homo sapien
gttcttcaaaatggacctgcttcaa

SEQ ID NO: 1252804 - DNA, 25 bp, Homo sapien
atgtccaatcagatgttcttcaaaa

SEQ ID NO: 1252805 - DNA, 25 bp, Homo sapien
cagatgttcttcaaaatggacctgc

SEQ ID NO: 1252806 - DNA, 25 bp, Homo sapien
ctttgttccagtcagctagggctgc

SEQ ID NO: 1252807 - DNA, 25 bp, Homo sapien
actttgttccagtcagctagggctg

SEQ ID NO: 1252808 - DNA, 25 bp, Homo sapien
aatttagcgctgtttgggcacaagg

SEQ ID NO: 1252809 - DNA, 25 bp, Homo sapien
ttaagggtataaatcttgaaggcat

SEQ ID NO: 1252810 - DNA, 25 bp, Homo sapien
tggaatttagcgctgtttgggcaca

SEQ ID NO: 1252811 - DNA, 25 bp, Homo sapien
gcgctgtttgggcacaaggtgcccc

SEQ ID NO: 1252812 - DNA, 25 bp, Homo sapien
tccagcagcggcaaggctgttcctg

SEQ ID NO: 1252813 - DNA, 25 bp, Homo sapien
tgggctcgcaggaccatttgttcca

SEQ ID NO: 1252814 - DNA, 25 bp, Homo sapien
tcctgaagccatttagagagagctc

SEQ ID NO: 1252815 - DNA, 25 bp, Homo sapien
tgtaccaacacgacacatggcttcc

SEQ ID NO: 1252816 - DNA, 25 bp, Homo sapien
tttggggtcattgcctgtgagaaag

SEQ ID NO: 1252817 - DNA, 25 bp, Homo sapien
tccgtttttggggtcattgcctgtg

SEQ ID NO: 1252818 - DNA, 25 bp, Homo sapien
ttgcttccgtttttggggtcattgc

SEQ ID NO: 1252819 - DNA, 25 bp, Homo sapien
tttttggggtcattgcctgtgagaa

SEQ ID NO: 1252820 - DNA, 25 bp, Homo sapien
aggaggagatgggtgaaagcttcat

SEQ ID NO: 1252821 - DNA, 25 bp, Homo sapien
aggagatgggtgaaagcttcattaa

SEQ ID NO: 1252822 - DNA, 25 bp, Homo sapien
cgggatgacggttgagaggaggaga

SEQ ID NO: 1252823 - DNA, 25 bp, Homo sapien
cagaaggagaggattaaaccgggat

SEQ ID NO: 1252824 - DNA, 25 bp, Homo sapien
cgaagccgcgcgagagggcctggag

SEQ ID NO: 1252825 - DNA, 25 bp, Homo sapien
ctctggatactaggcccgggctcgg

SEQ ID NO: 1252826 - DNA, 25 bp, Homo sapien
tgcttcgactctggatactaggccc

SEQ ID NO: 1252827 - DNA, 25 bp, Homo sapien
tcccggcggctgcttcgactctgga

SEQ ID NO: 1252828 - DNA, 25 bp, Homo sapien
ccagcagcagacgagatggagcctg

SEQ ID NO: 1252829 - DNA, 25 bp, Homo sapien
gatggcataactcttccagctagaa

SEQ ID NO: 1252830 - DNA, 25 bp, Homo sapien
tagaaggtccatgacagatcagagt

SEQ ID NO: 1252831 - DNA, 25 bp, Homo sapien
gagtgattaggcctgctggagggct

SEQ ID NO: 1252832 - DNA, 25 bp, Homo sapien
tcattcagtaaaagggggtcctcca

SEQ ID NO: 1252833 - DNA, 25 bp, Homo sapien
cttgtcaaagaaccccatctgctgg

SEQ ID NO: 1252834 - DNA, 25 bp, Homo sapien
ctgaaggcgaccaattgagctgaac

SEQ ID NO: 1252835 - DNA, 25 bp, Homo sapien
gttgccacggtaactgaaggcgacc

SEQ ID NO: 1252836 - DNA, 25 bp, Homo sapien
aaagaaccccatctgctggttgcca

SEQ ID NO: 1252837 - DNA, 25 bp, Homo sapien
gaaccgtcaatgctgaaagcttttt

SEQ ID NO: 1252838 - DNA, 25 bp, Homo sapien
gtaatttgataacaactcctggccg

SEQ ID NO: 1252839 - DNA, 25 bp, Homo sapien
tggccgtccgctacggaaccgtcaa

SEQ ID NO: 1252840 - DNA, 25 bp, Homo sapien
tttgataacaactcctggccgtccg

SEQ ID NO: 1252841 - DNA, 25 bp, Homo sapien
cagggattccccaatgagctcagtg

SEQ ID NO: 1252842 - DNA, 25 bp, Homo sapien
tgcttctaccaaaaaggaggcacag

SEQ ID NO: 1252843 - DNA, 25 bp, Homo sapien
taaagcctctgacaatatcaccgag

SEQ ID NO: 1252844 - DNA, 25 bp, Homo sapien
taacagtttgaggaccgtactctgg

SEQ ID NO: 1252845 - DNA, 25 bp, Homo sapien
gcagctgacaccagttcattttccg

SEQ ID NO: 1252846 - DNA, 25 bp, Homo sapien
agcagctgacaccagttcattttcc

SEQ ID NO: 1252847 - DNA, 25 bp, Homo sapien
agctgacaccagttcattttccgag

SEQ ID NO: 1252848 - DNA, 25 bp, Homo sapien
ctgacaccagttcattttccgaggc

SEQ ID NO: 1252849 - DNA, 25 bp, Homo sapien
tgagagagagaacacgctgggtaac

SEQ ID NO: 1252850 - DNA, 25 bp, Homo sapien
ctgagagagagaacacgctgggtaa

SEQ ID NO: 1252851 - DNA, 25 bp, Homo sapien
gagaggcaccttagagaacattcag

SEQ ID NO: 1252852 - DNA, 25 bp, Homo sapien
cagcccattatggtgaagccaagaa

SEQ ID NO: 1252853 - DNA, 25 bp, Homo sapien
tcatattatgttagggctgagaggc

SEQ ID NO: 1252854 - DNA, 25 bp, Homo sapien
tgtagtaaatctggcgctagagccc

SEQ ID NO: 1252855 - DNA, 25 bp, Homo sapien
cttcaggatctgcagatgaacaact

SEQ ID NO: 1252856 - DNA, 25 bp, Homo sapien
gctggtgcggccgtcctaatctcag

SEQ ID NO: 1252857 - DNA, 25 bp, Homo sapien
gatctgcagatgaacaactgccacc

SEQ ID NO: 1252858 - DNA, 25 bp, Homo sapien
tgcggccgtcctaatctcaggcaca

SEQ ID NO: 1252859 - DNA, 25 bp, Homo sapien
ttcagagctcaacccctaattcaga

SEQ ID NO: 1252860 - DNA, 25 bp, Homo sapien
cgcggagtctgtttaggcagcagcc

SEQ ID NO: 1252861 - DNA, 25 bp, Homo sapien
aacacagaatcgtccgatttcagag

SEQ ID NO: 1252862 - DNA, 25 bp, Homo sapien
attcagacccttctttcccgcgcct

SEQ ID NO: 1252863 - DNA, 25 bp, Homo sapien
gagagagtgcaatttcttgttctgt

SEQ ID NO: 1252864 - DNA, 25 bp, Homo sapien
acgggcctggaaacctcttccagcg

SEQ ID NO: 1252865 - DNA, 25 bp, Homo sapien
cgactgtcgttttgagagagtgcaa

SEQ ID NO: 1252866 - DNA, 25 bp, Homo sapien
agcgtccgtttcagggcgactgtcg

SEQ ID NO: 1252867 - DNA, 25 bp, Homo sapien
ccccacgtagagggcaccgctgttt

SEQ ID NO: 1252868 - DNA, 25 bp, Homo sapien
tgcgagaaaggcgacgaggcagcgg

SEQ ID NO: 1252869 - DNA, 25 bp, Homo sapien
tccaggatcccccacgtagagggca

SEQ ID NO: 1252870 - DNA, 25 bp, Homo sapien
gcaccgctgtttgcgagaaaggcga

SEQ ID NO: 1252871 - DNA, 25 bp, Homo sapien
accagcaaatatggacttcgtcctg

SEQ ID NO: 1252872 - DNA, 25 bp, Homo sapien
tcagaggaaggcgacgctggactct

SEQ ID NO: 1252873 - DNA, 25 bp, Homo sapien
catttaacagacagaggatggcagg

SEQ ID NO: 1252874 - DNA, 25 bp, Homo sapien
cttcgtcctgcaggcaatggcagtg

SEQ ID NO: 1252875 - DNA, 25 bp, Homo sapien
atgacaaatgctcccggctctcggg

SEQ ID NO: 1252876 - DNA, 25 bp, Homo sapien
gtcaagtactgatttaagacctggg

SEQ ID NO: 1252877 - DNA, 25 bp, Homo sapien
taagacctgggggtccatcaagaat

SEQ ID NO: 1252878 - DNA, 25 bp, Homo sapien
cggccaacacctcttaagggtcaag

SEQ ID NO: 1252879 - DNA, 25 bp, Homo sapien
actgctaacaccttgagcccctggg

SEQ ID NO: 1252880 - DNA, 25 bp, Homo sapien
gctcactgcgccacaattacctatg

SEQ ID NO: 1252881 - DNA, 25 bp, Homo sapien
gaggtacatgctagtatcatcccca

SEQ ID NO: 1252882 - DNA, 25 bp, Homo sapien
aaaagttcactatagtcctaggagg

SEQ ID NO: 1252883 - DNA, 25 bp, Homo sapien
ctccggcgctgctcggcccacaccc

SEQ ID NO: 1252884 - DNA, 25 bp, Homo sapien
cctccggcgctgctcggcccacacc

SEQ ID NO: 1252885 - DNA, 25 bp, Homo sapien
gcctccggcgctgctcggcccacac

SEQ ID NO: 1252886 - DNA, 25 bp, Homo sapien
acatgtgggcacaggtaccactgcc

SEQ ID NO: 1252887 - DNA, 25 bp, Homo sapien
gggcacaggtaccactgccctctgg

SEQ ID NO: 1252888 - DNA, 25 bp, Homo sapien
tgccctctgggaaacccggcgatgg

SEQ ID NO: 1252889 - DNA, 25 bp, Homo sapien
ctttacaaaaaaggccgcacatgtg

SEQ ID NO: 1252890 - DNA, 25 bp, Homo sapien
agcagcacagtcacccatggaactg

SEQ ID NO: 1252891 - DNA, 25 bp, Homo sapien
gccagcagcacagtcacccatggaa

SEQ ID NO: 1252892 - DNA, 25 bp, Homo sapien
gcacagtcacccatggaactgttgg

SEQ ID NO: 1252893 - DNA, 25 bp, Homo sapien
gcagcacagtcacccatggaactgt

SEQ ID NO: 1252894 - DNA, 25 bp, Homo sapien
gctgatgggcgctcctctccagact

SEQ ID NO: 1252895 - DNA, 25 bp, Homo sapien
cactcagaccattatcctcatctgt

SEQ ID NO: 1252896 - DNA, 25 bp, Homo sapien
tctccagacttgctaattcactcag

SEQ ID NO: 1252897 - DNA, 25 bp, Homo sapien
aaagatcctaaatttgtcattctgc

SEQ ID NO: 1252898 - DNA, 25 bp, Homo sapien
ggctgtgcttatccagctgccttag

SEQ ID NO: 1252899 - DNA, 25 bp, Homo sapien
ctgcctctccaggagaagctggttc

SEQ ID NO: 1252900 - DNA, 25 bp, Homo sapien
caggagaagctggttctgcttgctg

SEQ ID NO: 1252901 - DNA, 25 bp, Homo sapien
ggtccacctcttccgacaggctctg

SEQ ID NO: 1252902 - DNA, 25 bp, Homo sapien
taaccgatgtgatccgtgagaaagc

SEQ ID NO: 1252903 - DNA, 25 bp, Homo sapien
tgatccgtgagaaagccggcctgtt

SEQ ID NO: 1252904 - DNA, 25 bp, Homo sapien
cctgttgaggtgcataaaagatcca

SEQ ID NO: 1252905 - DNA, 25 bp, Homo sapien
tcccagcttactgctaaccgatgtg

SEQ ID NO: 1252906 - DNA, 25 bp, Homo sapien
tgcacggcgcaacttggcactcggt

SEQ ID NO: 1252907 - DNA, 25 bp, Homo sapien
gggtctgttcacctgcacggacttt

SEQ ID NO: 1252908 - DNA, 25 bp, Homo sapien
tgttcacctgcacggactttaactc

SEQ ID NO: 1252909 - DNA, 25 bp, Homo sapien
cactcggtgtggttcgttgattcgc

SEQ ID NO: 1252910 - DNA, 25 bp, Homo sapien
gagtggcactggtcccacagctgct

SEQ ID NO: 1252911 - DNA, 25 bp, Homo sapien
ttctgggctgggtctggtggaggat

SEQ ID NO: 1252912 - DNA, 25 bp, Homo sapien
ggaggggagtggcactggtcccaca

SEQ ID NO: 1252913 - DNA, 25 bp, Homo sapien
ggatgagggggtcatcctgaaagca

SEQ ID NO: 1252914 - DNA, 25 bp, Homo sapien
gtcctgatctttggctggccaggcc

SEQ ID NO: 1252915 - DNA, 25 bp, Homo sapien
tggccaggcctaaagcaggtgctgc

SEQ ID NO: 1252916 - DNA, 25 bp, Homo sapien
cagtggtcctgatctttggctggcc

SEQ ID NO: 1252917 - DNA, 25 bp, Homo sapien
gctccagtggtcctgatctttggct

SEQ ID NO: 1252918 - DNA, 25 bp, Homo sapien
gaagattcactcatgccaggagtca

SEQ ID NO: 1252919 - DNA, 25 bp, Homo sapien
ggtccctccctcctatgtgacaaga

SEQ ID NO: 1252920 - DNA, 25 bp, Homo sapien
cacgttctcctgatctagtccagag

SEQ ID NO: 1252921 - DNA, 25 bp, Homo sapien
gagcccaaaggaagctgccgtgtgc

SEQ ID NO: 1252922 - DNA, 25 bp, Homo sapien
ttttgcaactcatttggcaatagcc

SEQ ID NO: 1252923 - DNA, 25 bp, Homo sapien
agcatcggtgatccatgttaagatc

SEQ ID NO: 1252924 - DNA, 25 bp, Homo sapien
tttaaagccctggaagaagcttcta

SEQ ID NO: 1252925 - DNA, 25 bp, Homo sapien
tgcaactcatttggcaatagccaga

SEQ ID NO: 1252926 - DNA, 25 bp, Homo sapien
aagaaggcatcgcagaggctgaagc

SEQ ID NO: 1252927 - DNA, 25 bp, Homo sapien
aagctgattccatgacaagaaggca

SEQ ID NO: 1252928 - DNA, 25 bp, Homo sapien
tcaagctgattccatgacaagaagg

SEQ ID NO: 1252929 - DNA, 25 bp, Homo sapien
agaaggcatcgcagaggctgaagcc

SEQ ID NO: 1252930 - DNA, 25 bp, Homo sapien
caaggcctaacatgggcagcctgca

SEQ ID NO: 1252931 - DNA, 25 bp, Homo sapien
cacagtaaattaggtgacacctcca

SEQ ID NO: 1252932 - DNA, 25 bp, Homo sapien
tgacaattcgggtgaaaatcaggat

SEQ ID NO: 1252933 - DNA, 25 bp, Homo sapien
tattcaagcgccatctgtcttacag

SEQ ID NO: 1252934 - DNA, 25 bp, Homo sapien
acttcctctacacacaggcaggtct

SEQ ID NO: 1252935 - DNA, 25 bp, Homo sapien
tatctacactacatgcaatattcag

SEQ ID NO: 1252936 - DNA, 25 bp, Homo sapien
taaaggcaagaaccacttatctaca

SEQ ID NO: 1252937 - DNA, 25 bp, Homo sapien
ttaagaattcccaaaggacagacag

SEQ ID NO: 1252938 - DNA, 25 bp, Homo sapien
tgtctgccattagggatatccacga

SEQ ID NO: 1252939 - DNA, 25 bp, Homo sapien
tatgccagtgggacatgagccctca

SEQ ID NO: 1252940 - DNA, 25 bp, Homo sapien
gctgttccagaaacgggtgacctcc

SEQ ID NO: 1252941 - DNA, 25 bp, Homo sapien
caaagctggccctgagttgacagag

SEQ ID NO: 1252942 - DNA, 25 bp, Homo sapien
ggaggctggggcaataggatcgctt

SEQ ID NO: 1252943 - DNA, 25 bp, Homo sapien
tgggaggctggggcaataggatcgc

SEQ ID NO: 1252944 - DNA, 25 bp, Homo sapien
ctggggcaataggatcgcttgagtc

SEQ ID NO: 1252945 - DNA, 25 bp, Homo sapien
caggagttcgagaccagcctgggca

SEQ ID NO: 1252946 - DNA, 25 bp, Homo sapien
gataaattgggacgcactgcagggc

SEQ ID NO: 1252947 - DNA, 25 bp, Homo sapien
caaaaacagggtgtaggccaagtgc

SEQ ID NO: 1252948 - DNA, 25 bp, Homo sapien
gatactgacagcacggagactgcca

SEQ ID NO: 1252949 - DNA, 25 bp, Homo sapien
cagtcctcgccctctagattgtgaa

SEQ ID NO: 1252950 - DNA, 25 bp, Homo sapien
aatcagattgtggcatgctgggtaa

SEQ ID NO: 1252951 - DNA, 25 bp, Homo sapien
gcaatcagattgtggcatgctgggt

SEQ ID NO: 1252952 - DNA, 25 bp, Homo sapien
cagcaatcagattgtggcatgctgg

SEQ ID NO: 1252953 - DNA, 25 bp, Homo sapien
caatcagattgtggcatgctgggta

SEQ ID NO: 1252954 - DNA, 25 bp, Homo sapien
gacagcgcccgcgttgatgaggacc

SEQ ID NO: 1252955 - DNA, 25 bp, Homo sapien
tataacctagcatacgaatgagcag

SEQ ID NO: 1252956 - DNA, 25 bp, Homo sapien
tgctcagctagagtcagactccagc

SEQ ID NO: 1252957 - DNA, 25 bp, Homo sapien
gtcgtggtgcgttgtggcatattaa

SEQ ID NO: 1252958 - DNA, 25 bp, Homo sapien
tgagactccattggtgtcacacaag

SEQ ID NO: 1252959 - DNA, 25 bp, Homo sapien
tgattttgagaatcccctattttca

SEQ ID NO: 1252960 - DNA, 25 bp, Homo sapien
gaaaaccagaaatgcgtgtagaggg

SEQ ID NO: 1252961 - DNA, 25 bp, Homo sapien
agtcacttctattccaccctctgag

SEQ ID NO: 1252962 - DNA, 25 bp, Homo sapien
taatgactggcactgacattgcccc

SEQ ID NO: 1252963 - DNA, 25 bp, Homo sapien
ttaatgactggcactgacattgccc

SEQ ID NO: 1252964 - DNA, 25 bp, Homo sapien
gacttcacgggcaatcatgagcaag

SEQ ID NO: 1252965 - DNA, 25 bp, Homo sapien
gaaacaatttgagccagagagcatc

SEQ ID NO: 1252966 - DNA, 25 bp, Homo sapien
gaaggcatatgcacagtcaaggtca

SEQ ID NO: 1252967 - DNA, 25 bp, Homo sapien
cacatgtggatgtcgagacttcacg

SEQ ID NO: 1252968 - DNA, 25 bp, Homo sapien
gtcctagctcttacacatagcaggg

SEQ ID NO: 1252969 - DNA, 25 bp, Homo sapien
gattcctggacatcaccagtcctag

SEQ ID NO: 1252970 - DNA, 25 bp, Homo sapien
gagcccaccattgttcatttgtgca

SEQ ID NO: 1252971 - DNA, 25 bp, Homo sapien
tgtatctcagtctaaggtctcatgc

SEQ ID NO: 1252972 - DNA, 25 bp, Homo sapien
gatttccattgcaggacagcatatg

SEQ ID NO: 1252973 - DNA, 25 bp, Homo sapien
tgttcaaagttctgcggtccttggg

SEQ ID NO: 1252974 - DNA, 25 bp, Homo sapien
gactgagtggctgaccacgtggcca

SEQ ID NO: 1252975 - DNA, 25 bp, Homo sapien
ggaagagcttccaacagcacaggac

SEQ ID NO: 1252976 - DNA, 25 bp, Homo sapien
tgtacattgacaggctccgactcag

SEQ ID NO: 1252977 - DNA, 25 bp, Homo sapien
tccgactcagagtcagctgccactt

SEQ ID NO: 1252978 - DNA, 25 bp, Homo sapien
tagggccatgatcagatgttcacgc

SEQ ID NO: 1252979 - DNA, 25 bp, Homo sapien
tgttcacgcctcattgtttccaagc

SEQ ID NO: 1252980 - DNA, 25 bp, Homo sapien
cggacagggctgactaatgcgatgc

SEQ ID NO: 1252981 - DNA, 25 bp, Homo sapien
gactaatgcgatgctcagaaatgtg

SEQ ID NO: 1252982 - DNA, 25 bp, Homo sapien
ggatgataggcccaacgcagcaagc

SEQ ID NO: 1252983 - DNA, 25 bp, Homo sapien
ttactgtatgctgtgggccagtcca

SEQ ID NO: 1252984 - DNA, 25 bp, Homo sapien
caagcaccagattggctagtccata

SEQ ID NO: 1252985 - DNA, 25 bp, Homo sapien
aagcaccagattggctagtccatag

SEQ ID NO: 1252986 - DNA, 25 bp, Homo sapien
tcaagcaccagattggctagtccat

SEQ ID NO: 1252987 - DNA, 25 bp, Homo sapien
cgaatgagatgattcctgccctgtc

SEQ ID NO: 1252988 - DNA, 25 bp, Homo sapien
catgtaacgtcaggggctaccagga

SEQ ID NO: 1252989 - DNA, 25 bp, Homo sapien
tgcagtgcgaatgagatgattcctg

SEQ ID NO: 1252990 - DNA, 25 bp, Homo sapien
agattttgcatgtaacgtcaggggc

SEQ ID NO: 1252991 - DNA, 25 bp, Homo sapien
gtgtaaaattaatgaccttagcttc

SEQ ID NO: 1252992 - DNA, 25 bp, Homo sapien
tatcttaagaaactaggactgggca

SEQ ID NO: 1252993 - DNA, 25 bp, Homo sapien
gactgaaaacgaaaacacaatgtgt

SEQ ID NO: 1252994 - DNA, 25 bp, Homo sapien
cacaatgtgtttagctgtgatatac

SEQ ID NO: 1252995 - DNA, 25 bp, Homo sapien
cttcaccctcaaccttccacctcag

SEQ ID NO: 1252996 - DNA, 25 bp, Homo sapien
gctcacttcaccctcaaccttccac

SEQ ID NO: 1252997 - DNA, 25 bp, Homo sapien
ggcacatgctaccatacctgggtaa

SEQ ID NO: 1252998 - DNA, 25 bp, Homo sapien
cacttcaccctcaaccttccacctc

SEQ ID NO: 1252999 - DNA, 25 bp, Homo sapien
atctggtgtggtattaagagagtgg

SEQ ID NO: 1253000 - DNA, 25 bp, Homo sapien
ggtgtggtattaagagagtggctgt

SEQ ID NO: 1253001 - DNA, 25 bp, Homo sapien
tctggtgtggtattaagagagtggc

SEQ ID NO: 1253002 - DNA, 25 bp, Homo sapien
ctggtgtggtattaagagagtggct

SEQ ID NO: 1253003 - DNA, 25 bp, Homo sapien
tttctgttctcatagccttggtgga

SEQ ID NO: 1253004 - DNA, 25 bp, Homo sapien
atttctgttctcatagccttggtgg

SEQ ID NO: 1253005 - DNA, 25 bp, Homo sapien
ttctgttctcatagccttggtggag

SEQ ID NO: 1253006 - DNA, 25 bp, Homo sapien
ttctcatagccttggtggaggacca

SEQ ID NO: 1253007 - DNA, 25 bp, Homo sapien
taacaagttttctgtgagaatcagg

SEQ ID NO: 1253008 - DNA, 25 bp, Homo sapien
catgttggaactaatcgtaagtttc

SEQ ID NO: 1253009 - DNA, 25 bp, Homo sapien
ccattgtatcactttcagctttgac

SEQ ID NO: 1253010 - DNA, 25 bp, Homo sapien
tcatccattagtggctttggcgtac

SEQ ID NO: 1253011 - DNA, 25 bp, Homo sapien
cagactatgttgacgcatgcttgaa

SEQ ID NO: 1253012 - DNA, 25 bp, Homo sapien
gaaaatgccatggagctttgatgtt

SEQ ID NO: 1253013 - DNA, 25 bp, Homo sapien
cagcactgatcttgccttcaaagga

SEQ ID NO: 1253014 - DNA, 25 bp, Homo sapien
ggttccccaagcacaagcttagaat

SEQ ID NO: 1253015 - DNA, 25 bp, Homo sapien
aatagatgtgtcaagcccctccact

SEQ ID NO: 1253016 - DNA, 25 bp, Homo sapien
aatatttggcttggtattcgaggca

SEQ ID NO: 1253017 - DNA, 25 bp, Homo sapien
tccatgaatagcacatagtcggtac

SEQ ID NO: 1253018 - DNA, 25 bp, Homo sapien
aattcttagaatgttaaccgcctag

SEQ ID NO: 1253019 - DNA, 25 bp, Homo sapien
cacattatgtaggaatcttgctgca

SEQ ID NO: 1253020 - DNA, 25 bp, Homo sapien
gaagatgtttttgccctcaagtggc

SEQ ID NO: 1253021 - DNA, 25 bp, Homo sapien
cttttacctcagatggtgtctcgca

SEQ ID NO: 1253022 - DNA, 25 bp, Homo sapien
gaattgagagcaaggcgatactgtg

SEQ ID NO: 1253023 - DNA, 25 bp, Homo sapien
gaacccagcaggtcaagaccaactt

SEQ ID NO: 1253024 - DNA, 25 bp, Homo sapien
acccagcaggtcaagaccaacttgg

SEQ ID NO: 1253025 - DNA, 25 bp, Homo sapien
aacccagcaggtcaagaccaacttg

SEQ ID NO: 1253026 - DNA, 25 bp, Homo sapien
tggatgcccgtaaacttaaacttgc

SEQ ID NO: 1253027 - DNA, 25 bp, Homo sapien
tagtctggcctacattcaagcctag

SEQ ID NO: 1253028 - DNA, 25 bp, Homo sapien
gactgggtgctacaaacaggttaca

SEQ ID NO: 1253029 - DNA, 25 bp, Homo sapien
tcaagcctagcttctcagactgggt

SEQ ID NO: 1253030 - DNA, 25 bp, Homo sapien
ttttttctcaatggcgagcccatca

SEQ ID NO: 1253031 - DNA, 25 bp, Homo sapien
catgatataagggtggactctattt

SEQ ID NO: 1253032 - DNA, 25 bp, Homo sapien
tagtggcaaactgaatctatatgac

SEQ ID NO: 1253033 - DNA, 25 bp, Homo sapien
tctcactgattgtggataacacata

SEQ ID NO: 1253034 - DNA, 25 bp, Homo sapien
tattcttctaaagaagtattggcta

SEQ ID NO: 1253035 - DNA, 25 bp, Homo sapien
tctaaagaagtattggctaatccat

SEQ ID NO: 1253036 - DNA, 25 bp, Homo sapien
tcttctaaagaagtattggctaatc

SEQ ID NO: 1253037 - DNA, 25 bp, Homo sapien
tgcgttgggaatctttacgtaacca

SEQ ID NO: 1253038 - DNA, 25 bp, Homo sapien
gaaacgagatgtcaaggatcagcat

SEQ ID NO: 1253039 - DNA, 25 bp, Homo sapien
gagaaacgagatgtcaaggatcagc

SEQ ID NO: 1253040 - DNA, 25 bp, Homo sapien
ctggagaaacgagatgtcaaggatc

SEQ ID NO: 1253041 - DNA, 25 bp, Homo sapien
ggagaaacgagatgtcaaggatcag

SEQ ID NO: 1253042 - DNA, 25 bp, Homo sapien
ctttattctttacatctactccttt

SEQ ID NO: 1253043 - DNA, 25 bp, Homo sapien
ttattctttacatctactcctttca

SEQ ID NO: 1253044 - DNA, 25 bp, Homo sapien
aaatcctttattctttacatctact

SEQ ID NO: 1253045 - DNA, 25 bp, Homo sapien
attctttacatctactcctttcacc

SEQ ID NO: 1253046 - DNA, 25 bp, Homo sapien
agtttctgtagtaacattgctgttc

SEQ ID NO: 1253047 - DNA, 25 bp, Homo sapien
tttctgtagtaacattgctgttcat

SEQ ID NO: 1253048 - DNA, 25 bp, Homo sapien
gtttctgtagtaacattgctgttca

SEQ ID NO: 1253049 - DNA, 25 bp, Homo sapien
tacaacaagtttgagtgagcattgg

SEQ ID NO: 1253050 - DNA, 25 bp, Homo sapien
accgtcttccttatgcagtgattag

SEQ ID NO: 1253051 - DNA, 25 bp, Homo sapien
ctgacatacatgtgaggatgctccc

SEQ ID NO: 1253052 - DNA, 25 bp, Homo sapien
tcttcagagatgtataaggacaaat

SEQ ID NO: 1253053 - DNA, 25 bp, Homo sapien
gctccagcagggtgttcaagaggtt

SEQ ID NO: 1253054 - DNA, 25 bp, Homo sapien
aacttgagacggtttatgatgctgc

SEQ ID NO: 1253055 - DNA, 25 bp, Homo sapien
tcaagaggttgtttggagagacgca

SEQ ID NO: 1253056 - DNA, 25 bp, Homo sapien
gatgtcgaactgaataatggctaga

SEQ ID NO: 1253057 - DNA, 25 bp, Homo sapien
gctgttgatgccgattgttgacttg

SEQ ID NO: 1253058 - DNA, 25 bp, Homo sapien
gttgatgccgattgttgacttgcca

SEQ ID NO: 1253059 - DNA, 25 bp, Homo sapien
agatattcggctgctgttgatgccg

SEQ ID NO: 1253060 - DNA, 25 bp, Homo sapien
ggagatattcggctgctgttgatgc

SEQ ID NO: 1253061 - DNA, 25 bp, Homo sapien
tttaagcagctgcattgtagggaag

SEQ ID NO: 1253062 - DNA, 25 bp, Homo sapien
agctgcattgtagggaagcacaaag

SEQ ID NO: 1253063 - DNA, 25 bp, Homo sapien
gcagctgcattgtagggaagcacaa

SEQ ID NO: 1253064 - DNA, 25 bp, Homo sapien
tagcgaaatggtttaagcagctgca

SEQ ID NO: 1253065 - DNA, 25 bp, Homo sapien
gtaagtaacgatacagagaatgcat

SEQ ID NO: 1253066 - DNA, 25 bp, Homo sapien
gagaatgcatacaatcgttggcttg

SEQ ID NO: 1253067 - DNA, 25 bp, Homo sapien
tttcatctcctatgtaagtaacgat

SEQ ID NO: 1253068 - DNA, 25 bp, Homo sapien
caatcgttggcttgtggacatccat

SEQ ID NO: 1253069 - DNA, 25 bp, Homo sapien
gcccggccaccatttttagatatac

SEQ ID NO: 1253070 - DNA, 25 bp, Homo sapien
ggtgtggccatacgactgagttctg

SEQ ID NO: 1253071 - DNA, 25 bp, Homo sapien
gttcagtgtagcagagattggccaa

SEQ ID NO: 1253072 - DNA, 25 bp, Homo sapien
gattggccaaatccgtttgcgcgta

SEQ ID NO: 1253073 - DNA, 25 bp, Homo sapien
ttaatttgagcattctgacccattt

SEQ ID NO: 1253074 - DNA, 25 bp, Homo sapien
gttttttcatgaggatgccctggct

SEQ ID NO: 1253075 - DNA, 25 bp, Homo sapien
gattcttaatttgagcattctgacc

SEQ ID NO: 1253076 - DNA, 25 bp, Homo sapien
tttgattcttaatttgagcattctg

SEQ ID NO: 1253077 - DNA, 25 bp, Homo sapien
gaaccataacaatactgattggcaa

SEQ ID NO: 1253078 - DNA, 25 bp, Homo sapien
tctggtgcactggattctttgtaga

SEQ ID NO: 1253079 - DNA, 25 bp, Homo sapien
tggcaaatgcacataacaatagatg

SEQ ID NO: 1253080 - DNA, 25 bp, Homo sapien
cataattagctgcagtctggtgcac

SEQ ID NO: 1253081 - DNA, 25 bp, Homo sapien
tgttctctcaataaatttgcagtct

SEQ ID NO: 1253082 - DNA, 25 bp, Homo sapien
ttgaaagcatcaaatgggtgctagt

SEQ ID NO: 1253083 - DNA, 25 bp, Homo sapien
tgttgagcatgtgtttatgcagatg

SEQ ID NO: 1253084 - DNA, 25 bp, Homo sapien
gctagttgtgaaatagaacacctgt

SEQ ID NO: 1253085 - DNA, 25 bp, Homo sapien
cagtaaaagtcctgaactggtcatt

SEQ ID NO: 1253086 - DNA, 25 bp, Homo sapien
gagtgtatgaattggcatagcacag

SEQ ID NO: 1253087 - DNA, 25 bp, Homo sapien
cttaccagtaaaagtcctgaactgg

SEQ ID NO: 1253088 - DNA, 25 bp, Homo sapien
actggtcattttacttggagtgtat

SEQ ID NO: 1253089 - DNA, 25 bp, Homo sapien
gtaaagaactgttgcataatggaga

SEQ ID NO: 1253090 - DNA, 25 bp, Homo sapien
tggagagaccaagtagaactattag

SEQ ID NO: 1253091 - DNA, 25 bp, Homo sapien
gaacccagttgtcagggtagctggc

SEQ ID NO: 1253092 - DNA, 25 bp, Homo sapien
gaactattaggatgcaaatgtgaaa

SEQ ID NO: 1253093 - DNA, 25 bp, Homo sapien
caacagggtctgtagtcttcattgg

SEQ ID NO: 1253094 - DNA, 25 bp, Homo sapien
ttgttagacaacagggtctgtagtc

SEQ ID NO: 1253095 - DNA, 25 bp, Homo sapien
cttttagtctctggcttgttagaca

SEQ ID NO: 1253096 - DNA, 25 bp, Homo sapien
tctctggcttgttagacaacagggt

SEQ ID NO: 1253097 - DNA, 25 bp, Homo sapien
tagtcgagacagtttgttgacccca

SEQ ID NO: 1253098 - DNA, 25 bp, Homo sapien
tgaaagtagtcgagacagtttgttg

SEQ ID NO: 1253099 - DNA, 25 bp, Homo sapien
cgagacagtttgttgaccccaaaga

SEQ ID NO: 1253100 - DNA, 25 bp, Homo sapien
agtagtcgagacagtttgttgaccc

SEQ ID NO: 1253101 - DNA, 25 bp, Homo sapien
gacaaaggtccattcagcactagaa

SEQ ID NO: 1253102 - DNA, 25 bp, Homo sapien
tatcttccagatcaaagtgcccctc

SEQ ID NO: 1253103 - DNA, 25 bp, Homo sapien
aatggactagatttgccagggcctc

SEQ ID NO: 1253104 - DNA, 25 bp, Homo sapien
gggcctcatagcagaatatcctgtc

SEQ ID NO: 1253105 - DNA, 25 bp, Homo sapien
cacttataaaccaagggactacctg

SEQ ID NO: 1253106 - DNA, 25 bp, Homo sapien
caagtgattaatgcttaataaggag

SEQ ID NO: 1253107 - DNA, 25 bp, Homo sapien
agggactacctgcaaagtgtttctg

SEQ ID NO: 1253108 - DNA, 25 bp, Homo sapien
cagtgaatttcacaccacttataaa

SEQ ID NO: 1253109 - DNA, 25 bp, Homo sapien
gcatgatgcgctctgtcacatagaa

SEQ ID NO: 1253110 - DNA, 25 bp, Homo sapien
cagtccgtttggagcatgatgcgct

SEQ ID NO: 1253111 - DNA, 25 bp, Homo sapien
tacggaaaacagtccgtttggagca

SEQ ID NO: 1253112 - DNA, 25 bp, Homo sapien
tctgtcacatagaaacagtttttgg

SEQ ID NO: 1253113 - DNA, 25 bp, Homo sapien
gatgcagacgtttttgtcaaagttg

SEQ ID NO: 1253114 - DNA, 25 bp, Homo sapien
gctagtaatctgactgatgcagacg

SEQ ID NO: 1253115 - DNA, 25 bp, Homo sapien
gaatgctgttctaaatgttgctaaa

SEQ ID NO: 1253116 - DNA, 25 bp, Homo sapien
tcttgggagacatatgatgagattg

SEQ ID NO: 1253117 - DNA, 25 bp, Homo sapien
ttagcgatgaacagaatttaagtca

SEQ ID NO: 1253118 - DNA, 25 bp, Homo sapien
gtggatgtctttctatttgttagtt

SEQ ID NO: 1253119 - DNA, 25 bp, Homo sapien
gatgtctttctatttgttagttttc

SEQ ID NO: 1253120 - DNA, 25 bp, Homo sapien
ggtgtggatgtctttctatttgtta

SEQ ID NO: 1253121 - DNA, 25 bp, Homo sapien
tttggtgtggatgtctttctatttg

SEQ ID NO: 1253122 - DNA, 25 bp, Homo sapien
gccaagcagtaaatatatagggtat

SEQ ID NO: 1253123 - DNA, 25 bp, Homo sapien
tatagggtatcgtgtgattcctttc

SEQ ID NO: 1253124 - DNA, 25 bp, Homo sapien
ccccttgtcaagagattcggattga

SEQ ID NO: 1253125 - DNA, 25 bp, Homo sapien
taaccactgccaagtatgtcatgcc

SEQ ID NO: 1253126 - DNA, 25 bp, Homo sapien
ctcgtgttatcgagttctcatgaga

SEQ ID NO: 1253127 - DNA, 25 bp, Homo sapien
gacttgctgtttccttatatagtca

SEQ ID NO: 1253128 - DNA, 25 bp, Homo sapien
tatagtcatgtgccattgatatggt

SEQ ID NO: 1253129 - DNA, 25 bp, Homo sapien
catgctgttctcgtgttatcgagtt

SEQ ID NO: 1253130 - DNA, 25 bp, Homo sapien
cctcctccggcgcatcggtccgcat

SEQ ID NO: 1253131 - DNA, 25 bp, Homo sapien
cggcgcatcggtccgcatcagccat

SEQ ID NO: 1253132 - DNA, 25 bp, Homo sapien
cttgtccacctcctccggcgcatcg

SEQ ID NO: 1253133 - DNA, 25 bp, Homo sapien
tgtccacctcctccggcgcatcggt

SEQ ID NO: 1253134 - DNA, 25 bp, Homo sapien
ctaagaatagaaatgtgcggaagat

SEQ ID NO: 1253135 - DNA, 25 bp, Homo sapien
ctgggtttggctgatccagtgatgc

SEQ ID NO: 1253136 - DNA, 25 bp, Homo sapien
gctgggtttggctgatccagtgatg

SEQ ID NO: 1253137 - DNA, 25 bp, Homo sapien
agaatagaaatgtgcggaagatgct

SEQ ID NO: 1253138 - DNA, 25 bp, Homo sapien
tcaagagtgaattacgatccgcccg

SEQ ID NO: 1253139 - DNA, 25 bp, Homo sapien
taattttctgaagtgcgctgcatgg

SEQ ID NO: 1253140 - DNA, 25 bp, Homo sapien
gaatgattcttgctacgggctgacc

SEQ ID NO: 1253141 - DNA, 25 bp, Homo sapien
ggtgcaggactttctctcagacgga

SEQ ID NO: 1253142 - DNA, 25 bp, Homo sapien
tctattaagacagaagagcagtaac

SEQ ID NO: 1253143 - DNA, 25 bp, Homo sapien
cttccaaagtgtgttagtagatggg

SEQ ID NO: 1253144 - DNA, 25 bp, Homo sapien
ggctcaagatggctgggaacattaa

SEQ ID NO: 1253145 - DNA, 25 bp, Homo sapien
ggatgacacaccctttctattaaga

SEQ ID NO: 1253146 - DNA, 25 bp, Homo sapien
gagccatctggagttgcgcctatga

SEQ ID NO: 1253147 - DNA, 25 bp, Homo sapien
gagattgcagttagggtagcccaga

SEQ ID NO: 1253148 - DNA, 25 bp, Homo sapien
ggtgcattacccacatcgcagagat

SEQ ID NO: 1253149 - DNA, 25 bp, Homo sapien
aaagcccctggacagctagcatgaa

SEQ ID NO: 1253150 - DNA, 25 bp, Homo sapien
tctgttcatactgttgtcctctgag

SEQ ID NO: 1253151 - DNA, 25 bp, Homo sapien
catttccatttgctggtgtgctgga

SEQ ID NO: 1253152 - DNA, 25 bp, Homo sapien
ggtcatcttgattgccccttgattg

SEQ ID NO: 1253153 - DNA, 25 bp, Homo sapien
gtcctctgagatattggtcatcttg

SEQ ID NO: 1253154 - DNA, 25 bp, Homo sapien
ttgctgcgtggttggaaagttccta

SEQ ID NO: 1253155 - DNA, 25 bp, Homo sapien
tatctgcctgggattgtgatgatgc

SEQ ID NO: 1253156 - DNA, 25 bp, Homo sapien
ggcctccattttgctgcgtggttgg

SEQ ID NO: 1253157 - DNA, 25 bp, Homo sapien
acttgcatgggagcaatttgtctgg

SEQ ID NO: 1253158 - DNA, 25 bp, Homo sapien
gggcggtcctcaaacacgactagat

SEQ ID NO: 1253159 - DNA, 25 bp, Homo sapien
caaaagctgaatagatgggttgaca

SEQ ID NO: 1253160 - DNA, 25 bp, Homo sapien
cattgattgaatttggggcggtcct

SEQ ID NO: 1253161 - DNA, 25 bp, Homo sapien
caaacacgactagattcaaaagctg

SEQ ID NO: 1253162 - DNA, 25 bp, Homo sapien
ctgtttctttccaagtctttctaca

SEQ ID NO: 1253163 - DNA, 25 bp, Homo sapien
tctttctacatagctccacgggggt

SEQ ID NO: 1253164 - DNA, 25 bp, Homo sapien
ctaataccaactgcagcgatgctgt

SEQ ID NO: 1253165 - DNA, 25 bp, Homo sapien
gacattgggctggactgacatctgc

SEQ ID NO: 1253166 - DNA, 25 bp, Homo sapien
gggtgaggatcggaatcagaattgg

SEQ ID NO: 1253167 - DNA, 25 bp, Homo sapien
tggcataggcaagaaacagccagtg

SEQ ID NO: 1253168 - DNA, 25 bp, Homo sapien
ggtgaggatcggaatcagaattggc

SEQ ID NO: 1253169 - DNA, 25 bp, Homo sapien
tgtatcatcagtcctggaatgttgc

SEQ ID NO: 1253170 - DNA, 25 bp, Homo sapien
tcttggatatgtatcatcagtcctg

SEQ ID NO: 1253171 - DNA, 25 bp, Homo sapien
cctggaatgttgctgaggccagagt

SEQ ID NO: 1253172 - DNA, 25 bp, Homo sapien
gttgctgaggccagagtaagcatct

SEQ ID NO: 1253173 - DNA, 25 bp, Homo sapien
cctcgaggttctcggtgcagaagcg

SEQ ID NO: 1253174 - DNA, 25 bp, Homo sapien
tgggcttggcgtcacctccacgtgc

SEQ ID NO: 1253175 - DNA, 25 bp, Homo sapien
ttggcgtcacctccacgtgcgtgcg

SEQ ID NO: 1253176 - DNA, 25 bp, Homo sapien
acgtgcgtgcgcgcctcgaggttct

SEQ ID NO: 1253177 - DNA, 25 bp, Homo sapien
gggaaagcacggctaatccgtgcga

SEQ ID NO: 1253178 - DNA, 25 bp, Homo sapien
gcctgccccttgatgacagatgtcc

SEQ ID NO: 1253179 - DNA, 25 bp, Homo sapien
agcacggctaatccgtgcgagcccg

SEQ ID NO: 1253180 - DNA, 25 bp, Homo sapien
cctgagcagcctgccccttgatgac

SEQ ID NO: 1253181 - DNA, 25 bp, Homo sapien
gatgctttcgctttcctttgactaa

SEQ ID NO: 1253182 - DNA, 25 bp, Homo sapien
gactaagagtggagttaaaacagta

SEQ ID NO: 1253183 - DNA, 25 bp, Homo sapien
tccaggagcagatcacctccctgcg

SEQ ID NO: 1253184 - DNA, 25 bp, Homo sapien
ctaatgttgctcctttcgggtgggc

SEQ ID NO: 1253185 - DNA, 25 bp, Homo sapien
caaaggcatgagcggaatgagccga

SEQ ID NO: 1253186 - DNA, 25 bp, Homo sapien
cggtggtgcccttccgtgtccacgg

SEQ ID NO: 1253187 - DNA, 25 bp, Homo sapien
gcagtgcattatcagccggctcgct

SEQ ID NO: 1253188 - DNA, 25 bp, Homo sapien
gcgcagcggctacaggtgaggcctg

SEQ ID NO: 1253189 - DNA, 25 bp, Homo sapien
tcacgaggagggcctggggcggcta

SEQ ID NO: 1253190 - DNA, 25 bp, Homo sapien
cacgaggagggcctggggcggctaa

SEQ ID NO: 1253191 - DNA, 25 bp, Homo sapien
ctgtccctccttaaccaccccgcag

SEQ ID NO: 1253192 - DNA, 25 bp, Homo sapien
ttaaccaccccgcagttcggccgca

SEQ ID NO: 1253193 - DNA, 25 bp, Homo sapien
taaccaccccgcagttcggccgcat

SEQ ID NO: 1253194 - DNA, 25 bp, Homo sapien
tttcataagctgtccctccttaacc

SEQ ID NO: 1253195 - DNA, 25 bp, Homo sapien
cctagggacaggcacacgagtatga

SEQ ID NO: 1253196 - DNA, 25 bp, Homo sapien
gagttgaccaatcggcctgaaggac

SEQ ID NO: 1253197 - DNA, 25 bp, Homo sapien
caactgtgttagcctagggacaggc

SEQ ID NO: 1253198 - DNA, 25 bp, Homo sapien
cacgagtatgaaccgagttgaccaa

SEQ ID NO: 1253199 - DNA, 25 bp, Homo sapien
gatacatacgggctctgtgccgtgt

SEQ ID NO: 1253200 - DNA, 25 bp, Homo sapien
gatactgcctgctggtttctcgtgt

SEQ ID NO: 1253201 - DNA, 25 bp, Homo sapien
ggatacctttggctgcccgcctgac

SEQ ID NO: 1253202 - DNA, 25 bp, Homo sapien
tcacctgggcgatactgcctgctgg

SEQ ID NO: 1253203 - DNA, 25 bp, Homo sapien
cattggcaggcatagaaagttagca

SEQ ID NO: 1253204 - DNA, 25 bp, Homo sapien
gaatcgggctgagattgcagacatc

SEQ ID NO: 1253205 - DNA, 25 bp, Homo sapien
tgcagacatctttctatcatcagga

SEQ ID NO: 1253206 - DNA, 25 bp, Homo sapien
cagacgtggcacagcgtggcattct

SEQ ID NO: 1253207 - DNA, 25 bp, Homo sapien
ggtccagtctgggttagtcttggca

SEQ ID NO: 1253208 - DNA, 25 bp, Homo sapien
ctgaggacacggagaatggagtata

SEQ ID NO: 1253209 - DNA, 25 bp, Homo sapien
tggaagttatttgttccggctgcct

SEQ ID NO: 1253210 - DNA, 25 bp, Homo sapien
acttggaagttatttgttccggctg

SEQ ID NO: 1253211 - DNA, 25 bp, Homo sapien
tggaatgctgtatctccgacttata

SEQ ID NO: 1253212 - DNA, 25 bp, Homo sapien
tcaaggccaggtttcactcagccct

SEQ ID NO: 1253213 - DNA, 25 bp, Homo sapien
ggaatgctgtatctccgacttatac

SEQ ID NO: 1253214 - DNA, 25 bp, Homo sapien
cttggaatgctgtatctccgactta

SEQ ID NO: 1253215 - DNA, 25 bp, Homo sapien
caggcgttatttacataactctccc

SEQ ID NO: 1253216 - DNA, 25 bp, Homo sapien
tccctccactacctgagacagtgga

SEQ ID NO: 1253217 - DNA, 25 bp, Homo sapien
actacctgagacagtggagttccca

SEQ ID NO: 1253218 - DNA, 25 bp, Homo sapien
tggagttcccagagacgcaggcgtt

SEQ ID NO: 1253219 - DNA, 25 bp, Homo sapien
cagatgcacagcgttccgactgaat

SEQ ID NO: 1253220 - DNA, 25 bp, Homo sapien
acagcgttccgactgaatggtctca

SEQ ID NO: 1253221 - DNA, 25 bp, Homo sapien
gatgcacagcgttccgactgaatgg

SEQ ID NO: 1253222 - DNA, 25 bp, Homo sapien
gggcagatgcacagcgttccgactg

SEQ ID NO: 1253223 - DNA, 25 bp, Homo sapien
tggcttgcctcttcgttttttctaa

SEQ ID NO: 1253224 - DNA, 25 bp, Homo sapien
tcttgaccggaatctggggttgtgc

SEQ ID NO: 1253225 - DNA, 25 bp, Homo sapien
ctgatcttgctgagcttttcttgac

SEQ ID NO: 1253226 - DNA, 25 bp, Homo sapien
taagagcttcgtgtctgccttggct

SEQ ID NO: 1253227 - DNA, 25 bp, Homo sapien
ctctgagatacttaactccaaccta

SEQ ID NO: 1253228 - DNA, 25 bp, Homo sapien
catagcagagactcaacgtgtgatc

SEQ ID NO: 1253229 - DNA, 25 bp, Homo sapien
tcaacgtgtgatccaagtttagtgc

SEQ ID NO: 1253230 - DNA, 25 bp, Homo sapien
gagatacttaactccaacctatctg

SEQ ID NO: 1253231 - DNA, 25 bp, Homo sapien
gcggaggcgcggaaggcagactcgt

SEQ ID NO: 1253232 - DNA, 25 bp, Homo sapien
agcggaggcgcggaaggcagactcg

SEQ ID NO: 1253233 - DNA, 25 bp, Homo sapien
gcagcggaggcgcggaaggcagact

SEQ ID NO: 1253234 - DNA, 25 bp, Homo sapien
cagcggaggcgcggaaggcagactc

SEQ ID NO: 1253235 - DNA, 25 bp, Homo sapien
cagaataggacgaggggttggagtt

SEQ ID NO: 1253236 - DNA, 25 bp, Homo sapien
agcagaataggacgaggggttggag

SEQ ID NO: 1253237 - DNA, 25 bp, Homo sapien
aattgccagcagaataggacgaggg

SEQ ID NO: 1253238 - DNA, 25 bp, Homo sapien
ttaattgccagcagaataggacgag

SEQ ID NO: 1253239 - DNA, 25 bp, Homo sapien
gaagagagaagacttgcagctgctt

SEQ ID NO: 1253240 - DNA, 25 bp, Homo sapien
ggtgccagttgtcttcctctcagag

SEQ ID NO: 1253241 - DNA, 25 bp, Homo sapien
gggacccatccaccagtgtttgtgg

SEQ ID NO: 1253242 - DNA, 25 bp, Homo sapien
cagcaagggacttctttagtgatgc

SEQ ID NO: 1253243 - DNA, 25 bp, Homo sapien
gaggacagcgcatgcacacagaatt

SEQ ID NO: 1253244 - DNA, 25 bp, Homo sapien
cttcctgaacttgctcggtgccagg

SEQ ID NO: 1253245 - DNA, 25 bp, Homo sapien
gaatgtccgaattatcatatgcccc

SEQ ID NO: 1253246 - DNA, 25 bp, Homo sapien
cggtgccaggaatgtccgaattatc

SEQ ID NO: 1253247 - DNA, 25 bp, Homo sapien
tatgccccatttattgcagacctct

SEQ ID NO: 1253248 - DNA, 25 bp, Homo sapien
actgctgaggactggagcaaggctt

SEQ ID NO: 1253249 - DNA, 25 bp, Homo sapien
tggagcaaggcttgcagatgccaca

SEQ ID NO: 1253250 - DNA, 25 bp, Homo sapien
gtactgctgaggactggagcaaggc

SEQ ID NO: 1253251 - DNA, 25 bp, Homo sapien
agcaaggcttgcagatgccacaggg

SEQ ID NO: 1253252 - DNA, 25 bp, Homo sapien
ctgtgccggtcacgggtatgtgggt

SEQ ID NO: 1253253 - DNA, 25 bp, Homo sapien
cttctgtgccggtcacgggtatgtg

SEQ ID NO: 1253254 - DNA, 25 bp, Homo sapien
ccggtcacgggtatgtgggttcttg

SEQ ID NO: 1253255 - DNA, 25 bp, Homo sapien
ctcttctgtgccggtcacgggtatg

SEQ ID NO: 1253256 - DNA, 25 bp, Homo sapien
cactcgatttcctgtgtactctctg

SEQ ID NO: 1253257 - DNA, 25 bp, Homo sapien
atctgagtctggaagtaagcaatgg

SEQ ID NO: 1253258 - DNA, 25 bp, Homo sapien
acgcagacatccagccgacggaggg

SEQ ID NO: 1253259 - DNA, 25 bp, Homo sapien
ctgtccaagttaatggaaggaagca

SEQ ID NO: 1253260 - DNA, 25 bp, Homo sapien
ttgaatccttgcaggaatccacaaa

SEQ ID NO: 1253261 - DNA, 25 bp, Homo sapien
catattcaccgccttcattgatgtg

SEQ ID NO: 1253262 - DNA, 25 bp, Homo sapien
atgtgagtcacttgaatccttgcag

SEQ ID NO: 1253263 - DNA, 25 bp, Homo sapien
tggtgtttgggtccaacatattcac

SEQ ID NO: 1253264 - DNA, 25 bp, Homo sapien
gtaccaattctcccatttctgcatc

SEQ ID NO: 1253265 - DNA, 25 bp, Homo sapien
agctgtgtcattggtgccaaatatg

SEQ ID NO: 1253266 - DNA, 25 bp, Homo sapien
ggtgccaaatatgccagatgttcta

SEQ ID NO: 1253267 - DNA, 25 bp, Homo sapien
tgtcattggtgccaaatatgccaga

SEQ ID NO: 1253268 - DNA, 25 bp, Homo sapien
cacaacttgtgccagctgttgaggt

SEQ ID NO: 1253269 - DNA, 25 bp, Homo sapien
caggattgtcacaacttgtgccagc

SEQ ID NO: 1253270 - DNA, 25 bp, Homo sapien
gtgccagctgttgaggttgtgacac

SEQ ID NO: 1253271 - DNA, 25 bp, Homo sapien
gaaatcccaggattgtcacaacttg

SEQ ID NO: 1253272 - DNA, 25 bp, Homo sapien
tctagtttaattgccttaactctct

SEQ ID NO: 1253273 - DNA, 25 bp, Homo sapien
gaaacaagtgttggactctggaggg

SEQ ID NO: 1253274 - DNA, 25 bp, Homo sapien
aatctagtttaattgccttaactct

SEQ ID NO: 1253275 - DNA, 25 bp, Homo sapien
ccatcagggtaagcattgttcccca

SEQ ID NO: 1253276 - DNA, 25 bp, Homo sapien
tagaagctgcttgccttccagcatg

SEQ ID NO: 1253277 - DNA, 25 bp, Homo sapien
tgaataagggcactcagaagagcat

SEQ ID NO: 1253278 - DNA, 25 bp, Homo sapien
ccaaagcgagtgttaagaagctgac

SEQ ID NO: 1253279 - DNA, 25 bp, Homo sapien
tgaacagacacctgctgccagtgac

SEQ ID NO: 1253280 - DNA, 25 bp, Homo sapien
gtgctgagttgtccctacactgaca

SEQ ID NO: 1253281 - DNA, 25 bp, Homo sapien
cagtgctgagttgtccctacactga

SEQ ID NO: 1253282 - DNA, 25 bp, Homo sapien
gctgagttgtccctacactgacaag

SEQ ID NO: 1253283 - DNA, 25 bp, Homo sapien
ctacactgacaaggggtgaggaggc

SEQ ID NO: 1253284 - DNA, 25 bp, Homo sapien
actttcaccattgaaaccataattt

SEQ ID NO: 1253285 - DNA, 25 bp, Homo sapien
gactttcaccattgaaaccataatt

SEQ ID NO: 1253286 - DNA, 25 bp, Homo sapien
gtcgagaccctaatcttaaagcaaa

SEQ ID NO: 1253287 - DNA, 25 bp, Homo sapien
tctgagcctcgttgctcagtgtcag

SEQ ID NO: 1253288 - DNA, 25 bp, Homo sapien
cagtggtccccggtggttcaacact

SEQ ID NO: 1253289 - DNA, 25 bp, Homo sapien
tcattctactttgtcgagaccctaa

SEQ ID NO: 1253290 - DNA, 25 bp, Homo sapien
tagagcagagggttcttgacaatat

SEQ ID NO: 1253291 - DNA, 25 bp, Homo sapien
tgtagagcagagggttcttgacaat

SEQ ID NO: 1253292 - DNA, 25 bp, Homo sapien
ctgtagagcagagggttcttgacaa

SEQ ID NO: 1253293 - DNA, 25 bp, Homo sapien
gtagagcagagggttcttgacaata

SEQ ID NO: 1253294 - DNA, 25 bp, Homo sapien
ggaggtgggtcaagaacagcaaaga

SEQ ID NO: 1253295 - DNA, 25 bp, Homo sapien
gaggtgggtcaagaacagcaaagaa

SEQ ID NO: 1253296 - DNA, 25 bp, Homo sapien
aaggaggtgggtcaagaacagcaaa

SEQ ID NO: 1253297 - DNA, 25 bp, Homo sapien
aggaggtgggtcaagaacagcaaag

SEQ ID NO: 1253298 - DNA, 25 bp, Homo sapien
tggggagatccccttgtacaggaac

SEQ ID NO: 1253299 - DNA, 25 bp, Homo sapien
tttccctccgttgtatctgcctggg

SEQ ID NO: 1253300 - DNA, 25 bp, Homo sapien
tcccgtttccctccgttgtatctgc

SEQ ID NO: 1253301 - DNA, 25 bp, Homo sapien
ggagatccccttgtacaggaacact

SEQ ID NO: 1253302 - DNA, 25 bp, Homo sapien
tatgacctccggtgtggcagctaca

SEQ ID NO: 1253303 - DNA, 25 bp, Homo sapien
tagccctgggcagcttgaaatatga

SEQ ID NO: 1253304 - DNA, 25 bp, Homo sapien
gcttgaaatatgacctccggtgtgg

SEQ ID NO: 1253305 - DNA, 25 bp, Homo sapien
tggcagctacagaccctgtcacaac

SEQ ID NO: 1253306 - DNA, 25 bp, Homo sapien
caatcgcttgctcattcaaagaata

SEQ ID NO: 1253307 - DNA, 25 bp, Homo sapien
cttgtatgcctgtgttgtgtcagat

SEQ ID NO: 1253308 - DNA, 25 bp, Homo sapien
aaagaatatttcttgtatgcctgtg

SEQ ID NO: 1253309 - DNA, 25 bp, Homo sapien
atcctcacagtcaatcgcttgctca

SEQ ID NO: 1253310 - DNA, 25 bp, Homo sapien
atagcgtgtggacaacttgtgggat

SEQ ID NO: 1253311 - DNA, 25 bp, Homo sapien
tggtcggggatagcgtgtggacaac

SEQ ID NO: 1253312 - DNA, 25 bp, Homo sapien
gggatagcgtgtggacaacttgtgg

SEQ ID NO: 1253313 - DNA, 25 bp, Homo sapien
ctaggcatatggtcggggatagcgt

SEQ ID NO: 1253314 - DNA, 25 bp, Homo sapien
ttggcaatcaggcacctgccgattc

SEQ ID NO: 1253315 - DNA, 25 bp, Homo sapien
cgattcctagcacctcccgtctctt

SEQ ID NO: 1253316 - DNA, 25 bp, Homo sapien
gtcctaacaccttcatcttgcaccc

SEQ ID NO: 1253317 - DNA, 25 bp, Homo sapien
aatcaggcacctgccgattcctagc

SEQ ID NO: 1253318 - DNA, 25 bp, Homo sapien
ttgattctgctggttaaatctattg

SEQ ID NO: 1253319 - DNA, 25 bp, Homo sapien
tgtaacaacatctcccaccatcagt

SEQ ID NO: 1253320 - DNA, 25 bp, Homo sapien
gattctgctggttaaatctattgtt

SEQ ID NO: 1253321 - DNA, 25 bp, Homo sapien
aagcccagttctgtaacaacatctc

SEQ ID NO: 1253322 - DNA, 25 bp, Homo sapien
gggaaccatgccttcaggattctct

SEQ ID NO: 1253323 - DNA, 25 bp, Homo sapien
tctgtattaactatttcaccccgtc

SEQ ID NO: 1253324 - DNA, 25 bp, Homo sapien
accccgtctgggaaccatgccttca

SEQ ID NO: 1253325 - DNA, 25 bp, Homo sapien
tgtattaactatttcaccccgtctg

SEQ ID NO: 1253326 - DNA, 25 bp, Homo sapien
tactgtttgctctattaaatggctc

SEQ ID NO: 1253327 - DNA, 25 bp, Homo sapien
acagtgtggagatgtttgggcctga

SEQ ID NO: 1253328 - DNA, 25 bp, Homo sapien
tttttggtgcagcacaaataaactg

SEQ ID NO: 1253329 - DNA, 25 bp, Homo sapien
taaactgccaaacgaatactgtttg

SEQ ID NO: 1253330 - DNA, 25 bp, Homo sapien
attacttaatctctcggtgtcaagg

SEQ ID NO: 1253331 - DNA, 25 bp, Homo sapien
ccaagctctgcacttaaaactgtga

SEQ ID NO: 1253332 - DNA, 25 bp, Homo sapien
ttaatctctcggtgtcaaggttttc

SEQ ID NO: 1253333 - DNA, 25 bp, Homo sapien
aagtccaagctctgcacttaaaact

SEQ ID NO: 1253334 - DNA, 25 bp, Homo sapien
taagcgaccatgaggtccactgttg

SEQ ID NO: 1253335 - DNA, 25 bp, Homo sapien
gaaggcccatcaaccttgagggagg

SEQ ID NO: 1253336 - DNA, 25 bp, Homo sapien
gtttgtcaaagaagaccacagtcag

SEQ ID NO: 1253337 - DNA, 25 bp, Homo sapien
gctcagtggtgccacagcaggcaag

SEQ ID NO: 1253338 - DNA, 25 bp, Homo sapien
tgctgtctccaatgttggaatgtga

SEQ ID NO: 1253339 - DNA, 25 bp, Homo sapien
ggctgtcacagggactgttcccaag

SEQ ID NO: 1253340 - DNA, 25 bp, Homo sapien
gatgccttcgggtagtccagcctca

SEQ ID NO: 1253341 - DNA, 25 bp, Homo sapien
cccaaggctctaaggtgttggagct

SEQ ID NO: 1253342 - DNA, 25 bp, Homo sapien
accccgatgccttcgggtagtccag

SEQ ID NO: 1253343 - DNA, 25 bp, Homo sapien
ccataaggagggatctggtcagaca

SEQ ID NO: 1253344 - DNA, 25 bp, Homo sapien
ggccataaggagggatctggtcaga

SEQ ID NO: 1253345 - DNA, 25 bp, Homo sapien
gccataaggagggatctggtcagac

SEQ ID NO: 1253346 - DNA, 25 bp, Homo sapien
cataaggagggatctggtcagacat

SEQ ID NO: 1253347 - DNA, 25 bp, Homo sapien
cttccttggtgggatgtaagcttcc

SEQ ID NO: 1253348 - DNA, 25 bp, Homo sapien
gcttggcacataatacgcattcaag

SEQ ID NO: 1253349 - DNA, 25 bp, Homo sapien
tgataatagctgtatccttagcacc

SEQ ID NO: 1253350 - DNA, 25 bp, Homo sapien
gactcttctatgataatagctgtat

SEQ ID NO: 1253351 - DNA, 25 bp, Homo sapien
ttcggacgcaaagatacaaatagcg

SEQ ID NO: 1253352 - DNA, 25 bp, Homo sapien
gttagctgctgtgcttcggacgcaa

SEQ ID NO: 1253353 - DNA, 25 bp, Homo sapien
cgcaaagatacaaatagcgtctgtc

SEQ ID NO: 1253354 - DNA, 25 bp, Homo sapien
gctgtgcttcggacgcaaagataca

SEQ ID NO: 1253355 - DNA, 25 bp, Homo sapien
tttagaaatgaacaggttgatatgc

SEQ ID NO: 1253356 - DNA, 25 bp, Homo sapien
ttagaaatgaacaggttgatatgct

SEQ ID NO: 1253357 - DNA, 25 bp, Homo sapien
ctgtgctgtcgatgaattctaggtc

SEQ ID NO: 1253358 - DNA, 25 bp, Homo sapien
ttttcagtctagtggtagaaggccc

SEQ ID NO: 1253359 - DNA, 25 bp, Homo sapien
ttccaggtcaaatgggtaaagtagc

SEQ ID NO: 1253360 - DNA, 25 bp, Homo sapien
gactggcaagcctgttgctaaccaa

SEQ ID NO: 1253361 - DNA, 25 bp, Homo sapien
gacacggatgactcgaggccgactt

SEQ ID NO: 1253362 - DNA, 25 bp, Homo sapien
ccgacttcgggtggctctctctgct

SEQ ID NO: 1253363 - DNA, 25 bp, Homo sapien
gggagcgggaccgaggagcgctctc

SEQ ID NO: 1253364 - DNA, 25 bp, Homo sapien
gcgagttacgcaggtatcctggaga

SEQ ID NO: 1253365 - DNA, 25 bp, Homo sapien
gagcttttcggtgtgcactgtgaca

SEQ ID NO: 1253366 - DNA, 25 bp, Homo sapien
cggtgtgcactgtgacaaccacaaa

SEQ ID NO: 1253367 - DNA, 25 bp, Homo sapien
cggagcgagcttttcggtgtgcact

SEQ ID NO: 1253368 - DNA, 25 bp, Homo sapien
tctgcgggtgcggagcgagcttttc

SEQ ID NO: 1253369 - DNA, 25 bp, Homo sapien
ccgccgccgccggacttggtgggct

SEQ ID NO: 1253370 - DNA, 25 bp, Homo sapien
gccgccgccggacttggtgggcttc

SEQ ID NO: 1253371 - DNA, 25 bp, Homo sapien
acggagcggccctaagtcaccgcgt

SEQ ID NO: 1253372 - DNA, 25 bp, Homo sapien
gagcggccctaagtcaccgcgtccc

SEQ ID NO: 1253373 - DNA, 25 bp, Homo sapien
tcgttcccattagaaagccgtggcg

SEQ ID NO: 1253374 - DNA, 25 bp, Homo sapien
tctcggtaccaacaagctgaaactg

SEQ ID NO: 1253375 - DNA, 25 bp, Homo sapien
ctgatgaaactgtaacgcgacccgg

SEQ ID NO: 1253376 - DNA, 25 bp, Homo sapien
tccaacttcgcggtgagtgacataa

SEQ ID NO: 1253377 - DNA, 25 bp, Homo sapien
gttagagaggaatgagataccttct

SEQ ID NO: 1253378 - DNA, 25 bp, Homo sapien
tagagaggaatgagataccttctcc

SEQ ID NO: 1253379 - DNA, 25 bp, Homo sapien
cttctccaccacagatccgcacaca

SEQ ID NO: 1253380 - DNA, 25 bp, Homo sapien
ttagagaggaatgagataccttctc

SEQ ID NO: 1253381 - DNA, 25 bp, Homo sapien
ctggctccaggtctgttacatcggt

SEQ ID NO: 1253382 - DNA, 25 bp, Homo sapien
gctccaggtctgttacatcggtgga

SEQ ID NO: 1253383 - DNA, 25 bp, Homo sapien
tccaggtctgttacatcggtggaaa

SEQ ID NO: 1253384 - DNA, 25 bp, Homo sapien
caggtctgttacatcggtggaaaaa

SEQ ID NO: 1253385 - DNA, 25 bp, Homo sapien
tatacaacaatctagctgcttaact

SEQ ID NO: 1253386 - DNA, 25 bp, Homo sapien
tcagtagtgctgctcaatgttttga

SEQ ID NO: 1253387 - DNA, 25 bp, Homo sapien
tctcatataagtttgaatgctggat

SEQ ID NO: 1253388 - DNA, 25 bp, Homo sapien
tcaaatctaaatagcagtgaacaac

SEQ ID NO: 1253389 - DNA, 25 bp, Homo sapien
aatgaggaaaccagtcaaactattc

SEQ ID NO: 1253390 - DNA, 25 bp, Homo sapien
gaggaaaccagtcaaactattctcc

SEQ ID NO: 1253391 - DNA, 25 bp, Homo sapien
agagaaatgaggaaaccagtcaaac

SEQ ID NO: 1253392 - DNA, 25 bp, Homo sapien
gaaatgaggaaaccagtcaaactat

SEQ ID NO: 1253393 - DNA, 25 bp, Homo sapien
aaatctacaagttctaaattagtcg

SEQ ID NO: 1253394 - DNA, 25 bp, Homo sapien
cagctgtctggccaattcaggcagc

SEQ ID NO: 1253395 - DNA, 25 bp, Homo sapien
taagaatagaggagtgcgattacag

SEQ ID NO: 1253396 - DNA, 25 bp, Homo sapien
caagttctaaattagtcgctaacac

SEQ ID NO: 1253397 - DNA, 25 bp, Homo sapien
tttgcaggtatagcacacatgtacg

SEQ ID NO: 1253398 - DNA, 25 bp, Homo sapien
gaaggagctgcaccaacagatggaa

SEQ ID NO: 1253399 - DNA, 25 bp, Homo sapien
cacatgtacgagatcagaaggagct

SEQ ID NO: 1253400 - DNA, 25 bp, Homo sapien
ttcaactgcagtgggtaaactcctg

SEQ ID NO: 1253401 - DNA, 25 bp, Homo sapien
gccgccgtggtacatgtccctgaat

SEQ ID NO: 1253402 - DNA, 25 bp, Homo sapien
aattaattccgctttggccgccgtg

SEQ ID NO: 1253403 - DNA, 25 bp, Homo sapien
taatcaggcttatgacccaagcacc

SEQ ID NO: 1253404 - DNA, 25 bp, Homo sapien
ggaacaacttttcagcgctccagtc

SEQ ID NO: 1253405 - DNA, 25 bp, Homo sapien
cagctgctagcacgtcttcaatggg

SEQ ID NO: 1253406 - DNA, 25 bp, Homo sapien
tgcatgaagccagtacagctcggtg

SEQ ID NO: 1253407 - DNA, 25 bp, Homo sapien
tacatgaattcaagcaggagagcga

SEQ ID NO: 1253408 - DNA, 25 bp, Homo sapien
tgctgccatcggagagactctcgac

SEQ ID NO: 1253409 - DNA, 25 bp, Homo sapien
tcggccgccaagtcccttttgctgg

SEQ ID NO: 1253410 - DNA, 25 bp, Homo sapien
ggctggctactgtttttccagctgc

SEQ ID NO: 1253411 - DNA, 25 bp, Homo sapien
ggcaatcgcatccacatgttcccag

SEQ ID NO: 1253412 - DNA, 25 bp, Homo sapien
gagtctgagggcaatcgcatccaca

SEQ ID NO: 1253413 - DNA, 25 bp, Homo sapien
gacttgacagacaggtccagcacac

SEQ ID NO: 1253414 - DNA, 25 bp, Homo sapien
tggacttgacagacaggtccagcac

SEQ ID NO: 1253415 - DNA, 25 bp, Homo sapien
cagcacacagtcaacatctgccgaa

SEQ ID NO: 1253416 - DNA, 25 bp, Homo sapien
acatctgccgaatccctcacggagg

SEQ ID NO: 1253417 - DNA, 25 bp, Homo sapien
gtcatagtcattagtgccaacatca

SEQ ID NO: 1253418 - DNA, 25 bp, Homo sapien
cagatgggccggctcatactgtacc

SEQ ID NO: 1253419 - DNA, 25 bp, Homo sapien
atactgtaccctgttattagtgctc

SEQ ID NO: 1253420 - DNA, 25 bp, Homo sapien
tctttcacagtgctatgttccatgt

SEQ ID NO: 1253421 - DNA, 25 bp, Homo sapien
cgtaggggagcagactgctctccat

SEQ ID NO: 1253422 - DNA, 25 bp, Homo sapien
cccgcggggctcaggatgttggaga

SEQ ID NO: 1253423 - DNA, 25 bp, Homo sapien
ggctcaggatgttggagacgtaggg

SEQ ID NO: 1253424 - DNA, 25 bp, Homo sapien
agacgtaggggagcagactgctctc

SEQ ID NO: 1253425 - DNA, 25 bp, Homo sapien
aagaccttgttgcacagggggcaca

SEQ ID NO: 1253426 - DNA, 25 bp, Homo sapien
tcctgctcgcggaagtgcgtgctca

SEQ ID NO: 1253427 - DNA, 25 bp, Homo sapien
ctctcgtggcgcttgagggtgtaca

SEQ ID NO: 1253428 - DNA, 25 bp, Homo sapien
gtcttcccacacagcgagcacgtgg

SEQ ID NO: 1253429 - DNA, 25 bp, Homo sapien
tgcgagtactggaagctcttgccgc

SEQ ID NO: 1253430 - DNA, 25 bp, Homo sapien
gcttttgaccgacaaggagttcacc

SEQ ID NO: 1253431 - DNA, 25 bp, Homo sapien
cttctaaggtccagtctctgacagt

SEQ ID NO: 1253432 - DNA, 25 bp, Homo sapien
tccaaagttcttgagagctatcttc

SEQ ID NO: 1253433 - DNA, 25 bp, Homo sapien
gacagtaggcaagctcagtgcttcg

SEQ ID NO: 1253434 - DNA, 25 bp, Homo sapien
taaaaccacacgttaggctgcagcc

SEQ ID NO: 1253435 - DNA, 25 bp, Homo sapien
catgtcaatcaaggcagtccagtcc

SEQ ID NO: 1253436 - DNA, 25 bp, Homo sapien
gaacgctcaactgggtaaatgtgta

SEQ ID NO: 1253437 - DNA, 25 bp, Homo sapien
caagactgcttttagaccgtaccac

SEQ ID NO: 1253438 - DNA, 25 bp, Homo sapien
aggatttcatccaattcgatgtcgt

SEQ ID NO: 1253439 - DNA, 25 bp, Homo sapien
gtgacccaacatattccctaattta

SEQ ID NO: 1253440 - DNA, 25 bp, Homo sapien
tcctttaacctaaggatttcatcca

SEQ ID NO: 1253441 - DNA, 25 bp, Homo sapien
ccaattcgatgtcgtttattgtcat

SEQ ID NO: 1253442 - DNA, 25 bp, Homo sapien
ctgcaaggagcagtgcctcgttgtg

SEQ ID NO: 1253443 - DNA, 25 bp, Homo sapien
taacatgttttggaaacccaagcaa

SEQ ID NO: 1253444 - DNA, 25 bp, Homo sapien
gtggttgaacaaataacatgttttg

SEQ ID NO: 1253445 - DNA, 25 bp, Homo sapien
cgttgtggttgaacaaataacatgt

SEQ ID NO: 1253446 - DNA, 25 bp, Homo sapien
tttgaggatcccgtttggctgccgc

SEQ ID NO: 1253447 - DNA, 25 bp, Homo sapien
cattccaagaaaccaaggccaattt

SEQ ID NO: 1253448 - DNA, 25 bp, Homo sapien
tgtttcattgatagatcttccccaa

SEQ ID NO: 1253449 - DNA, 25 bp, Homo sapien
tctttccagtagatgatgctgagag

SEQ ID NO: 1253450 - DNA, 25 bp, Homo sapien
gcctttggactagttaatcagatag

SEQ ID NO: 1253451 - DNA, 25 bp, Homo sapien
aagagcacatagatgaggcaaggcc

SEQ ID NO: 1253452 - DNA, 25 bp, Homo sapien
gcaaggcctgagattgagatgctct

SEQ ID NO: 1253453 - DNA, 25 bp, Homo sapien
catgaaccaacgctttcagtcttga

SEQ ID NO: 1253454 - DNA, 25 bp, Homo sapien
tgacccgtgcaatatttacccaaag

SEQ ID NO: 1253455 - DNA, 25 bp, Homo sapien
gatttgcattacaccacaacgtggg

SEQ ID NO: 1253456 - DNA, 25 bp, Homo sapien
gttggatcgtaagtttgacccgtgc

SEQ ID NO: 1253457 - DNA, 25 bp, Homo sapien
tgtaagcagcattgcacatagcagc

SEQ ID NO: 1253458 - DNA, 25 bp, Homo sapien
aggcatccaatacgcggccctgtta

SEQ ID NO: 1253459 - DNA, 25 bp, Homo sapien
gggaattctgaaggcatccaatacg

SEQ ID NO: 1253460 - DNA, 25 bp, Homo sapien
gcaaagtggacacgctgaatgggaa

SEQ ID NO: 1253461 - DNA, 25 bp, Homo sapien
gcttttgtgaggtggcattgcatca

SEQ ID NO: 1253462 - DNA, 25 bp, Homo sapien
taaccacggctctacatgaacgatc

SEQ ID NO: 1253463 - DNA, 25 bp, Homo sapien
tcccttaaggaggagctgactcgcg

SEQ ID NO: 1253464 - DNA, 25 bp, Homo sapien
gagaggacccaactgctaagcagct

SEQ ID NO: 1253465 - DNA, 25 bp, Homo sapien
tcagccgtatccaaagtccagatgg

SEQ ID NO: 1253466 - DNA, 25 bp, Homo sapien
gaagctgtagatgtctaagaaatca

SEQ ID NO: 1253467 - DNA, 25 bp, Homo sapien
tcctggataaccctgcacgtgtcga

SEQ ID NO: 1253468 - DNA, 25 bp, Homo sapien
ccctgcacgtgtcgaagctgtagat

SEQ ID NO: 1253469 - DNA, 25 bp, Homo sapien
ctgtagatgtctaagaaatcaaggg

SEQ ID NO: 1253470 - DNA, 25 bp, Homo sapien
atcagaggacttgagggcagaactc

SEQ ID NO: 1253471 - DNA, 25 bp, Homo sapien
cctcactcatagttccaggttctta

SEQ ID NO: 1253472 - DNA, 25 bp, Homo sapien
tcagaggacttgagggcagaactca

SEQ ID NO: 1253473 - DNA, 25 bp, Homo sapien
ctcctcactcatagttccaggttct

SEQ ID NO: 1253474 - DNA, 25 bp, Homo sapien
tgtccaaccaagactctgtgaagga

SEQ ID NO: 1253475 - DNA, 25 bp, Homo sapien
aaggtgacggggagctgtccaacca

SEQ ID NO: 1253476 - DNA, 25 bp, Homo sapien
tgacggggagctgtccaaccaagac

SEQ ID NO: 1253477 - DNA, 25 bp, Homo sapien
gtccaaccaagactctgtgaaggag

SEQ ID NO: 1253478 - DNA, 25 bp, Homo sapien
agctgcctgtctaccagaattagcc

SEQ ID NO: 1253479 - DNA, 25 bp, Homo sapien
gcctgtctaccagaattagcctttt

SEQ ID NO: 1253480 - DNA, 25 bp, Homo sapien
acatccaaaagcgatggtccttggt

SEQ ID NO: 1253481 - DNA, 25 bp, Homo sapien
aaagcgatggtccttggtgtgccac

SEQ ID NO: 1253482 - DNA, 25 bp, Homo sapien
agtcaaatgatctctgatctttagg

SEQ ID NO: 1253483 - DNA, 25 bp, Homo sapien
cgaagtcaaatgatctctgatcttt

SEQ ID NO: 1253484 - DNA, 25 bp, Homo sapien
tcaaatgatctctgatctttaggcc

SEQ ID NO: 1253485 - DNA, 25 bp, Homo sapien
aaatgatctctgatctttaggccta

SEQ ID NO: 1253486 - DNA, 25 bp, Homo sapien
cctcgcctcctagattccggtgttt

SEQ ID NO: 1253487 - DNA, 25 bp, Homo sapien
tacagagctcttcagtgacacgagt

SEQ ID NO: 1253488 - DNA, 25 bp, Homo sapien
gaacacacattccacacctgctgtg

SEQ ID NO: 1253489 - DNA, 25 bp, Homo sapien
ttccggtgtttctacgtggagaaca

SEQ ID NO: 1253490 - DNA, 25 bp, Homo sapien
atttgcatacgttggagaaccttga

SEQ ID NO: 1253491 - DNA, 25 bp, Homo sapien
gcatttgcatacgttggagaacctt

SEQ ID NO: 1253492 - DNA, 25 bp, Homo sapien
gccgtttttgcaagtcttagagact

SEQ ID NO: 1253493 - DNA, 25 bp, Homo sapien
agtcagtctccggtcgccgtttttg

SEQ ID NO: 1253494 - DNA, 25 bp, Homo sapien
cgctcccatcccactagctcattca

SEQ ID NO: 1253495 - DNA, 25 bp, Homo sapien
tcccatcccactagctcattcactc

SEQ ID NO: 1253496 - DNA, 25 bp, Homo sapien
atcccactagctcattcactcttct

SEQ ID NO: 1253497 - DNA, 25 bp, Homo sapien
ctccacatccccgtgttcacagcaa

SEQ ID NO: 1253498 - DNA, 25 bp, Homo sapien
aggtaaacaagtaaggctgagagag

SEQ ID NO: 1253499 - DNA, 25 bp, Homo sapien
tgaggtaaacaagtaaggctgagag

SEQ ID NO: 1253500 - DNA, 25 bp, Homo sapien
aaacaagtaaggctgagagagacct

SEQ ID NO: 1253501 - DNA, 25 bp, Homo sapien
ctatgaggtaaacaagtaaggctga

SEQ ID NO: 1253502 - DNA, 25 bp, Homo sapien
cctctatggaggcatctcccatagc

SEQ ID NO: 1253503 - DNA, 25 bp, Homo sapien
caaagtggccgtctttagaaataat

SEQ ID NO: 1253504 - DNA, 25 bp, Homo sapien
cgtctttagaaataatcggcacaga

SEQ ID NO: 1253505 - DNA, 25 bp, Homo sapien
ctcccatagctaggtaggtttcttc

SEQ ID NO: 1253506 - DNA, 25 bp, Homo sapien
tatgcggacgtgtgatacttcgcag

SEQ ID NO: 1253507 - DNA, 25 bp, Homo sapien
tcctccttaaatgtatgcgtgtgca

SEQ ID NO: 1253508 - DNA, 25 bp, Homo sapien
gaatggcgcattcctccttaaatgt

SEQ ID NO: 1253509 - DNA, 25 bp, Homo sapien
tcgcagggcagcgaatggcgcattc

SEQ ID NO: 1253510 - DNA, 25 bp, Homo sapien
aaaactgtagacaaactttccatag

SEQ ID NO: 1253511 - DNA, 25 bp, Homo sapien
cagcccaagatggtatgacagcagc

SEQ ID NO: 1253512 - DNA, 25 bp, Homo sapien
catagaatgagtctaccacaaaatt

SEQ ID NO: 1253513 - DNA, 25 bp, Homo sapien
gacagcagcttgattaataacgatt

SEQ ID NO: 1253514 - DNA, 25 bp, Homo sapien
ggtgagcaggcttcaacctgccaaa

SEQ ID NO: 1253515 - DNA, 25 bp, Homo sapien
gactgccatgctgaattggcagctt

SEQ ID NO: 1253516 - DNA, 25 bp, Homo sapien
tccgtgagtaatgaacggccccgga

SEQ ID NO: 1253517 - DNA, 25 bp, Homo sapien
tcctcagtgggaagaacggcgttaa

SEQ ID NO: 1253518 - DNA, 25 bp, Homo sapien
ctgggtatttcacggttaatggtga

SEQ ID NO: 1253519 - DNA, 25 bp, Homo sapien
tatttcacggttaatggtgaaagga

SEQ ID NO: 1253520 - DNA, 25 bp, Homo sapien
gctgggcgccgtgggatgacagcat

SEQ ID NO: 1253521 - DNA, 25 bp, Homo sapien
gtgctgggtatttcacggttaatgg

SEQ ID NO: 1253522 - DNA, 25 bp, Homo sapien
aaacagctgttgagtggagggggta

SEQ ID NO: 1253523 - DNA, 25 bp, Homo sapien
gagggggtaatggatggcgggtctg

SEQ ID NO: 1253524 - DNA, 25 bp, Homo sapien
gttgcacggagcaagcaggaaacag

SEQ ID NO: 1253525 - DNA, 25 bp, Homo sapien
agcagcgcggaggagatggctctgt

SEQ ID NO: 1253526 - DNA, 25 bp, Homo sapien
gagatgttaaccctgggacgaccag

SEQ ID NO: 1253527 - DNA, 25 bp, Homo sapien
cactgagatgttaaccctgggacga

SEQ ID NO: 1253528 - DNA, 25 bp, Homo sapien
tccagttcactgagatgttaaccct

SEQ ID NO: 1253529 - DNA, 25 bp, Homo sapien
ctgtccagttcactgagatgttaac

SEQ ID NO: 1253530 - DNA, 25 bp, Homo sapien
gctagggccgtgacctcctgtgact

SEQ ID NO: 1253531 - DNA, 25 bp, Homo sapien
tgaaggccgctagggccgtgacctc

SEQ ID NO: 1253532 - DNA, 25 bp, Homo sapien
agaggcacaggcacctcagtgaagg

SEQ ID NO: 1253533 - DNA, 25 bp, Homo sapien
gcacctcagtgaaggccgctagggc

SEQ ID NO: 1253534 - DNA, 25 bp, Homo sapien
tgtcgtcaccccttagcctcagtgg

SEQ ID NO: 1253535 - DNA, 25 bp, Homo sapien
gatctgtgtcgtcaccccttagcct

SEQ ID NO: 1253536 - DNA, 25 bp, Homo sapien
ctgaggatctgtgtcgtcacccctt

SEQ ID NO: 1253537 - DNA, 25 bp, Homo sapien
gtgtcgtcaccccttagcctcagtg

SEQ ID NO: 1253538 - DNA, 25 bp, Homo sapien
tgggccaaccgcacttacagcccag

SEQ ID NO: 1253539 - DNA, 25 bp, Homo sapien
ccaaccgcacttacagcccagagct

SEQ ID NO: 1253540 - DNA, 25 bp, Homo sapien
cagccccactggagatcagcacaag

SEQ ID NO: 1253541 - DNA, 25 bp, Homo sapien
ttagggcagactccccatgggccaa

SEQ ID NO: 1253542 - DNA, 25 bp, Homo sapien
catggtttgttccatgatccgctgc

SEQ ID NO: 1253543 - DNA, 25 bp, Homo sapien
tactcatggtttgttccatgatccg

SEQ ID NO: 1253544 - DNA, 25 bp, Homo sapien
catgggcagagggtactcatggttt

SEQ ID NO: 1253545 - DNA, 25 bp, Homo sapien
tttgttccatgatccgctgccccat

SEQ ID NO: 1253546 - DNA, 25 bp, Homo sapien
tgcaggctagttgcggatttagatc

SEQ ID NO: 1253547 - DNA, 25 bp, Homo sapien
tcgatgtcctgtagaataattgcca

SEQ ID NO: 1253548 - DNA, 25 bp, Homo sapien
tgaaaaagtctgattcacagcaggt

SEQ ID NO: 1253549 - DNA, 25 bp, Homo sapien
aggttcctaggcttttgcactgaca

SEQ ID NO: 1253550 - DNA, 25 bp, Homo sapien
tgcgctgcaagagcagtcctgagtt

SEQ ID NO: 1253551 - DNA, 25 bp, Homo sapien
cagacttccagagtgttccagggaa

SEQ ID NO: 1253552 - DNA, 25 bp, Homo sapien
tcagttatgacttcttcaaaagaga

SEQ ID NO: 1253553 - DNA, 25 bp, Homo sapien
ggactgctgctgacgttgcgctgca

SEQ ID NO: 1253554 - DNA, 25 bp, Homo sapien
tgtctgtgaccctaatgatgaatcc

SEQ ID NO: 1253555 - DNA, 25 bp, Homo sapien
gggtttgtctgtgaccctaatgatg

SEQ ID NO: 1253556 - DNA, 25 bp, Homo sapien
cctaatgatgaatccaaagactgtg

SEQ ID NO: 1253557 - DNA, 25 bp, Homo sapien
tgtgaccctaatgatgaatccaaag

SEQ ID NO: 1253558 - DNA, 25 bp, Homo sapien
gaagatgatcagatgtagagcatct

SEQ ID NO: 1253559 - DNA, 25 bp, Homo sapien
gatgatcagatgtagagcatctgaa

SEQ ID NO: 1253560 - DNA, 25 bp, Homo sapien
gggaagatgatcagatgtagagcat

SEQ ID NO: 1253561 - DNA, 25 bp, Homo sapien
ctggggaagatgatcagatgtagag

SEQ ID NO: 1253562 - DNA, 25 bp, Homo sapien
gactgcatccgaaaggccacaacca

SEQ ID NO: 1253563 - DNA, 25 bp, Homo sapien
ctgcatccgaaaggccacaaccacc

SEQ ID NO: 1253564 - DNA, 25 bp, Homo sapien
tagactgcatccgaaaggccacaac

SEQ ID NO: 1253565 - DNA, 25 bp, Homo sapien
ctagactgcatccgaaaggccacaa

SEQ ID NO: 1253566 - DNA, 25 bp, Homo sapien
ggttgattagcactcttgcttaaga

SEQ ID NO: 1253567 - DNA, 25 bp, Homo sapien
tggttgattagcactcttgcttaag

SEQ ID NO: 1253568 - DNA, 25 bp, Homo sapien
tctctggcatccaaaccagatggct

SEQ ID NO: 1253569 - DNA, 25 bp, Homo sapien
cagatggcttggtgacggccctcct

SEQ ID NO: 1253570 - DNA, 25 bp, Homo sapien
cagtctctggcatccaaaccagatg

SEQ ID NO: 1253571 - DNA, 25 bp, Homo sapien
atggcttggtgacggccctcctcct

SEQ ID NO: 1253572 - DNA, 25 bp, Homo sapien
gtttggctgcagatggactctctgg

SEQ ID NO: 1253573 - DNA, 25 bp, Homo sapien
ccctgatgccaagctttggaagcaa

SEQ ID NO: 1253574 - DNA, 25 bp, Homo sapien
cttgttgccagcctctaagctgtgg

SEQ ID NO: 1253575 - DNA, 25 bp, Homo sapien
ctctgggttgcctcgtgcttctgga

SEQ ID NO: 1253576 - DNA, 25 bp, Homo sapien
tggacatatacattgatcagaaaag

SEQ ID NO: 1253577 - DNA, 25 bp, Homo sapien
ctggacatatacattgatcagaaaa

SEQ ID NO: 1253578 - DNA, 25 bp, Homo sapien
aagtgcactggttgacagcatcctc

SEQ ID NO: 1253579 - DNA, 25 bp, Homo sapien
cagcatcctcaatcagcagagtcat

SEQ ID NO: 1253580 - DNA, 25 bp, Homo sapien
tgtaagagatcggtataatcttgcc

SEQ ID NO: 1253581 - DNA, 25 bp, Homo sapien
tgtgtgcgttagttgctccatgagg

SEQ ID NO: 1253582 - DNA, 25 bp, Homo sapien
tcagagctgttaagcagaaggccct

SEQ ID NO: 1253583 - DNA, 25 bp, Homo sapien
gaagtgtctactaatctctctgtgt

SEQ ID NO: 1253584 - DNA, 25 bp, Homo sapien
ttgcccttcatgtttgattgatacg

SEQ ID NO: 1253585 - DNA, 25 bp, Homo sapien
ttttgaaggctaggagctgattctg

SEQ ID NO: 1253586 - DNA, 25 bp, Homo sapien
tttatccgagtagaaggaatatgga

SEQ ID NO: 1253587 - DNA, 25 bp, Homo sapien
gtttgattgatacgtttcactttga

SEQ ID NO: 1253588 - DNA, 25 bp, Homo sapien
gaaactgattatcggattccttaga

SEQ ID NO: 1253589 - DNA, 25 bp, Homo sapien
ttgtccctccatccgggagcaggca

SEQ ID NO: 1253590 - DNA, 25 bp, Homo sapien
tgaaaatatctagcacgtacagagt

SEQ ID NO: 1253591 - DNA, 25 bp, Homo sapien
tcccgtcgtggagcagactaagagt

SEQ ID NO: 1253592 - DNA, 25 bp, Homo sapien
aattggcacagctccgtgaggcctg

SEQ ID NO: 1253593 - DNA, 25 bp, Homo sapien
tgccgaggtaacacgcatgactgct

SEQ ID NO: 1253594 - DNA, 25 bp, Homo sapien
cccttgtagcagaaggtaaattggc

SEQ ID NO: 1253595 - DNA, 25 bp, Homo sapien
atgaagtgacttggcccttgtagca

SEQ ID NO: 1253596 - DNA, 25 bp, Homo sapien
tgagggcagtcaccgaagcagatgc

SEQ ID NO: 1253597 - DNA, 25 bp, Homo sapien
ggcccagcgggaagccgatgtccct

SEQ ID NO: 1253598 - DNA, 25 bp, Homo sapien
agtggcccacgccataaacaaaggg

SEQ ID NO: 1253599 - DNA, 25 bp, Homo sapien
gagtcttactgtgccagctcttggc

SEQ ID NO: 1253600 - DNA, 25 bp, Homo sapien
ggacagcagatgccccacatacagt

SEQ ID NO: 1253601 - DNA, 25 bp, Homo sapien
aattataaagttggacagcagatgc

SEQ ID NO: 1253602 - DNA, 25 bp, Homo sapien
aagttggacagcagatgccccacat

SEQ ID NO: 1253603 - DNA, 25 bp, Homo sapien
cagatgccccacatacagtgttttc

SEQ ID NO: 1253604 - DNA, 25 bp, Homo sapien
tgtttggtcctaaagggctctcctg

SEQ ID NO: 1253605 - DNA, 25 bp, Homo sapien
tttcctgctgaacctttcacctgac

SEQ ID NO: 1253606 - DNA, 25 bp, Homo sapien
ttcacctgaccctgagggtctccgt

SEQ ID NO: 1253607 - DNA, 25 bp, Homo sapien
gagctgagctgcaagttgatcccca

SEQ ID NO: 1253608 - DNA, 25 bp, Homo sapien
tgggcgaggagcagagcggctgtga

SEQ ID NO: 1253609 - DNA, 25 bp, Homo sapien
gcgaggagcagagcggctgtgatct

SEQ ID NO: 1253610 - DNA, 25 bp, Homo sapien
ggtgggcgaggagcagagcggctgt

SEQ ID NO: 1253611 - DNA, 25 bp, Homo sapien
caggtgggcgaggagcagagcggct

SEQ ID NO: 1253612 - DNA, 25 bp, Homo sapien
agcaggtaaatcagagcccagtttg

SEQ ID NO: 1253613 - DNA, 25 bp, Homo sapien
ggaaagcaggtaaatcagagcccag

SEQ ID NO: 1253614 - DNA, 25 bp, Homo sapien
ctggtcccagaatccccggagcagg

SEQ ID NO: 1253615 - DNA, 25 bp, Homo sapien
ccagaatccccggagcaggaaagca

SEQ ID NO: 1253616 - DNA, 25 bp, Homo sapien
caagagcgcagcttactccatgcaa

SEQ ID NO: 1253617 - DNA, 25 bp, Homo sapien
gattaatgccgccaacactggtgag

SEQ ID NO: 1253618 - DNA, 25 bp, Homo sapien
gcctcaaccagtttaagcatccgtg

SEQ ID NO: 1253619 - DNA, 25 bp, Homo sapien
gtgaggaccgcgttcagagaccatc

SEQ ID NO: 1253620 - DNA, 25 bp, Homo sapien
tttatgtcagtgcctgtttgcacca

SEQ ID NO: 1253621 - DNA, 25 bp, Homo sapien
tatgtcagtgcctgtttgcaccaga

SEQ ID NO: 1253622 - DNA, 25 bp, Homo sapien
tgtcagtgcctgtttgcaccagagc

SEQ ID NO: 1253623 - DNA, 25 bp, Homo sapien
atgtcagtgcctgtttgcaccagag

SEQ ID NO: 1253624 - DNA, 25 bp, Homo sapien
tgtggacgggacaaatggccacagg

SEQ ID NO: 1253625 - DNA, 25 bp, Homo sapien
ctgtggacgggacaaatggccacag

SEQ ID NO: 1253626 - DNA, 25 bp, Homo sapien
caggtcctcagggacggcctgtgca

SEQ ID NO: 1253627 - DNA, 25 bp, Homo sapien
ctgctctgtgtaggcctgggcaggt

SEQ ID NO: 1253628 - DNA, 25 bp, Homo sapien
tccaacctgagtagcgacaagtggg

SEQ ID NO: 1253629 - DNA, 25 bp, Homo sapien
aaaggagaggtttgttgcaggctgc

SEQ ID NO: 1253630 - DNA, 25 bp, Homo sapien
catcattccgcacagacacgcaata

SEQ ID NO: 1253631 - DNA, 25 bp, Homo sapien
agacacgcaatactttccttccatg

SEQ ID NO: 1253632 - DNA, 25 bp, Homo sapien
tgtagccaaatatccaagccccagc

SEQ ID NO: 1253633 - DNA, 25 bp, Homo sapien
aaatgtttgttgtagccaaatatcc

SEQ ID NO: 1253634 - DNA, 25 bp, Homo sapien
ctagaggatccttggtgtgtcaaga

SEQ ID NO: 1253635 - DNA, 25 bp, Homo sapien
ggtgtgtcaagatctctctgacgtt

SEQ ID NO: 1253636 - DNA, 25 bp, Homo sapien
tctctctgacgtttctttgtgtgct

SEQ ID NO: 1253637 - DNA, 25 bp, Homo sapien
gatccttggtgtgtcaagatctctc

SEQ ID NO: 1253638 - DNA, 25 bp, Homo sapien
gcttccgctctgtccctgagtaatg

SEQ ID NO: 1253639 - DNA, 25 bp, Homo sapien
ggcgccatgggtggaattcccactt

SEQ ID NO: 1253640 - DNA, 25 bp, Homo sapien
aagcctgcagaaggtagagggcgcc

SEQ ID NO: 1253641 - DNA, 25 bp, Homo sapien
ttggctcccatatccgctgtcaagt

SEQ ID NO: 1253642 - DNA, 25 bp, Homo sapien
caagggaatggggtcagtgtccctt

SEQ ID NO: 1253643 - DNA, 25 bp, Homo sapien
gctgatggagtctttggttcctggc

SEQ ID NO: 1253644 - DNA, 25 bp, Homo sapien
tctttgatgagcttctttgtccata

SEQ ID NO: 1253645 - DNA, 25 bp, Homo sapien
attcaagggaatggggtcagtgtcc

SEQ ID NO: 1253646 - DNA, 25 bp, Homo sapien
ccattttcctgggaaacgccgctgg

SEQ ID NO: 1253647 - DNA, 25 bp, Homo sapien
aactcttttgataacgagagatgaa

SEQ ID NO: 1253648 - DNA, 25 bp, Homo sapien
ttcctgggaaacgccgctggaaaca

SEQ ID NO: 1253649 - DNA, 25 bp, Homo sapien
cattttcctgggaaacgccgctgga

SEQ ID NO: 1253650 - DNA, 25 bp, Homo sapien
gatgcagagggtcgcaggaaatcac

SEQ ID NO: 1253651 - DNA, 25 bp, Homo sapien
aagatgcagagggtcgcaggaaatc

SEQ ID NO: 1253652 - DNA, 25 bp, Homo sapien
agagggtcgcaggaaatcacagcag

SEQ ID NO: 1253653 - DNA, 25 bp, Homo sapien
gtcgcaggaaatcacagcagttctg

SEQ ID NO: 1253654 - DNA, 25 bp, Homo sapien
cttcctgaacctgcagatgagcttc

SEQ ID NO: 1253655 - DNA, 25 bp, Homo sapien
ctctccctgcggacagagcatggac

SEQ ID NO: 1253656 - DNA, 25 bp, Homo sapien
cctctccctgcggacagagcatgga

SEQ ID NO: 1253657 - DNA, 25 bp, Homo sapien
tctccctgcggacagagcatggaca

SEQ ID NO: 1253658 - DNA, 25 bp, Homo sapien
tgggagtccacttaatcgtgagcaa

SEQ ID NO: 1253659 - DNA, 25 bp, Homo sapien
gagctgtcacggtagtatgggtaca

SEQ ID NO: 1253660 - DNA, 25 bp, Homo sapien
tcgtgagcaatgttccatcccttct

SEQ ID NO: 1253661 - DNA, 25 bp, Homo sapien
tgagtccacagatgcttgccgtttt

SEQ ID NO: 1253662 - DNA, 25 bp, Homo sapien
tgactccagtttccttgggaccatt

SEQ ID NO: 1253663 - DNA, 25 bp, Homo sapien
ctccagtttccttgggaccatttct

SEQ ID NO: 1253664 - DNA, 25 bp, Homo sapien
aatccactggcttgttgtgtccaca

SEQ ID NO: 1253665 - DNA, 25 bp, Homo sapien
tttagcaatctgtctacccttgaag

SEQ ID NO: 1253666 - DNA, 25 bp, Homo sapien
gagtagctgttttggctgttgaaca

SEQ ID NO: 1253667 - DNA, 25 bp, Homo sapien
tttctttcggcatggatacttatcc

SEQ ID NO: 1253668 - DNA, 25 bp, Homo sapien
tccgggcaagctggacatcagatct

SEQ ID NO: 1253669 - DNA, 25 bp, Homo sapien
tactgttgccttcggaaactccttc

SEQ ID NO: 1253670 - DNA, 25 bp, Homo sapien
tccttccagagttgttccgggcaag

SEQ ID NO: 1253671 - DNA, 25 bp, Homo sapien
tcagatctctattgatttttgttcc

SEQ ID NO: 1253672 - DNA, 25 bp, Homo sapien
cctcggtgacgagagggaccacaga

SEQ ID NO: 1253673 - DNA, 25 bp, Homo sapien
tgcagagccccctcggtgacgagag

SEQ ID NO: 1253674 - DNA, 25 bp, Homo sapien
gataagcccaggtacctccgggctc

SEQ ID NO: 1253675 - DNA, 25 bp, Homo sapien
ataagcccaggtacctccgggctct

SEQ ID NO: 1253676 - DNA, 25 bp, Homo sapien
tgaacaaagaacttcccaaatagga

SEQ ID NO: 1253677 - DNA, 25 bp, Homo sapien
ctgaacaaagaacttcccaaatagg

SEQ ID NO: 1253678 - DNA, 25 bp, Homo sapien
caaagaacttcccaaataggagcat

SEQ ID NO: 1253679 - DNA, 25 bp, Homo sapien
acaaagaacttcccaaataggagca

SEQ ID NO: 1253680 - DNA, 25 bp, Homo sapien
agctggcaagttccagaagcactgg

SEQ ID NO: 1253681 - DNA, 25 bp, Homo sapien
aagcactgggaacatcctggatgtt

SEQ ID NO: 1253682 - DNA, 25 bp, Homo sapien
tacagctggcaagttccagaagcac

SEQ ID NO: 1253683 - DNA, 25 bp, Homo sapien
tcctctacagctggcaagttccaga

SEQ ID NO: 1253684 - DNA, 25 bp, Homo sapien
acacttctttagtgatttgcccaag

SEQ ID NO: 1253685 - DNA, 25 bp, Homo sapien
gctttggacacttctttagtgattt

SEQ ID NO: 1253686 - DNA, 25 bp, Homo sapien
tcttcctctagaacgttctgctcct

SEQ ID NO: 1253687 - DNA, 25 bp, Homo sapien
tccctgccctctgtttaataatgtg

SEQ ID NO: 1253688 - DNA, 25 bp, Homo sapien
gtcttgatcacattaataagaaggg

SEQ ID NO: 1253689 - DNA, 25 bp, Homo sapien
cacacacaaggatttgtattcctgg

SEQ ID NO: 1253690 - DNA, 25 bp, Homo sapien
cagcacagttgttgggaaccttgtc

SEQ ID NO: 1253691 - DNA, 25 bp, Homo sapien
ggttcccacggctcctcttgtaata

SEQ ID NO: 1253692 - DNA, 25 bp, Homo sapien
gaacaggcaacaccttgagttccct

SEQ ID NO: 1253693 - DNA, 25 bp, Homo sapien
ccgtaacctgggtaggctaagcctg

SEQ ID NO: 1253694 - DNA, 25 bp, Homo sapien
ctagcgtaagccatgactctggttc

SEQ ID NO: 1253695 - DNA, 25 bp, Homo sapien
tctggttctgctcaaacgttgaaca

SEQ ID NO: 1253696 - DNA, 25 bp, Homo sapien
tgcttccagatagaaatcaggctgg

SEQ ID NO: 1253697 - DNA, 25 bp, Homo sapien
tgtcagagggaacttttgttccatg

SEQ ID NO: 1253698 - DNA, 25 bp, Homo sapien
cttgtcagagggaacttttgttcca

SEQ ID NO: 1253699 - DNA, 25 bp, Homo sapien
catactttggaacccaaatgggctt

SEQ ID NO: 1253700 - DNA, 25 bp, Homo sapien
tgcaccagtagagggctgtagttcc

SEQ ID NO: 1253701 - DNA, 25 bp, Homo sapien
cttgcaccagtagagggctgtagtt

SEQ ID NO: 1253702 - DNA, 25 bp, Homo sapien
cacaagatggcagggtagcctcgat

SEQ ID NO: 1253703 - DNA, 25 bp, Homo sapien
cctcgatgattgagaaattggcttc

SEQ ID NO: 1253704 - DNA, 25 bp, Homo sapien
tcctggaacaggcagacgtggtgag

SEQ ID NO: 1253705 - DNA, 25 bp, Homo sapien
gctgcctctgagtcggaaggtgagt

SEQ ID NO: 1253706 - DNA, 25 bp, Homo sapien
tgagaaagggattcacgtagtcctc

SEQ ID NO: 1253707 - DNA, 25 bp, Homo sapien
caaatgtgactttcggtgagttccc

SEQ ID NO: 1253708 - DNA, 25 bp, Homo sapien
tgtgcaaggcgcctttgaaggcccc

SEQ ID NO: 1253709 - DNA, 25 bp, Homo sapien
ccagctgacgcttcaggcggtgtct

SEQ ID NO: 1253710 - DNA, 25 bp, Homo sapien
caggcaacacctgtgagtcgttggg

SEQ ID NO: 1253711 - DNA, 25 bp, Homo sapien
tggtgccagtattcccaatggcaaa

SEQ ID NO: 1253712 - DNA, 25 bp, Homo sapien
gatgccaacccaccgaaattaccat

SEQ ID NO: 1253713 - DNA, 25 bp, Homo sapien
gaagaccccaacaggattcttacca

SEQ ID NO: 1253714 - DNA, 25 bp, Homo sapien
acaggattcttaccaaatagatgag

SEQ ID NO: 1253715 - DNA, 25 bp, Homo sapien
ccaaatagatgagttgatgccaacc

SEQ ID NO: 1253716 - DNA, 25 bp, Homo sapien
tggagaagcgcccttgcggtgtaaa

SEQ ID NO: 1253717 - DNA, 25 bp, Homo sapien
cgtgctggtggcgtctggccctttc

SEQ ID NO: 1253718 - DNA, 25 bp, Homo sapien
gaaaatgattccatggagttggaga

SEQ ID NO: 1253719 - DNA, 25 bp, Homo sapien
tgtttggccctttgtcccactgtcc

SEQ ID NO: 1253720 - DNA, 25 bp, Homo sapien
cagaaagaggccagaaagttgcttc

SEQ ID NO: 1253721 - DNA, 25 bp, Homo sapien
agcagaaagaggccagaaagttgct

SEQ ID NO: 1253722 - DNA, 25 bp, Homo sapien
tgttttgtagttcagttgctgccac

SEQ ID NO: 1253723 - DNA, 25 bp, Homo sapien
ctgtagttggcacccccctgttttg

SEQ ID NO: 1253724 - DNA, 25 bp, Homo sapien
agggatcccggtcgctctctggtga

SEQ ID NO: 1253725 - DNA, 25 bp, Homo sapien
ttcagttgctgccaccctcagagga

SEQ ID NO: 1253726 - DNA, 25 bp, Homo sapien
taaactgcgtctgtaattgaggccg

SEQ ID NO: 1253727 - DNA, 25 bp, Homo sapien
ggaactactgccaagatgcatcttc

SEQ ID NO: 1253728 - DNA, 25 bp, Homo sapien
gaatcaagacgtttcactaccgccc

SEQ ID NO: 1253729 - DNA, 25 bp, Homo sapien
gcccaattcatttgaggaactactg

SEQ ID NO: 1253730 - DNA, 25 bp, Homo sapien
cggaaatcaacatggccaccaccat

SEQ ID NO: 1253731 - DNA, 25 bp, Homo sapien
gattctgatggaacatctgcaaaag

SEQ ID NO: 1253732 - DNA, 25 bp, Homo sapien
attgcattcatcagtgattctgatg

SEQ ID NO: 1253733 - DNA, 25 bp, Homo sapien
ttgcatctgggccttatgccaaagg

SEQ ID NO: 1253734 - DNA, 25 bp, Homo sapien
tgggccttatgccaaagggatgaaa

SEQ ID NO: 1253735 - DNA, 25 bp, Homo sapien
cactcgcacaaaccattccaggtgg

SEQ ID NO: 1253736 - DNA, 25 bp, Homo sapien
ggtggtacctgagggacgccttcaa

SEQ ID NO: 1253737 - DNA, 25 bp, Homo sapien
cgtccaaatatacgaggcctcaaaa

SEQ ID NO: 1253738 - DNA, 25 bp, Homo sapien
tcatttggtagtagagctccactcg

SEQ ID NO: 1253739 - DNA, 25 bp, Homo sapien
ctgcaattaaggagataggcaatta

SEQ ID NO: 1253740 - DNA, 25 bp, Homo sapien
ctgtgtcttaattacagcagctgcc

SEQ ID NO: 1253741 - DNA, 25 bp, Homo sapien
tcaaaatcctatcactgcaattaag

SEQ ID NO: 1253742 - DNA, 25 bp, Homo sapien
gagataggcaattaactgtgtctta

SEQ ID NO: 1253743 - DNA, 25 bp, Homo sapien
catcaataagtagcaagatcctgga

SEQ ID NO: 1253744 - DNA, 25 bp, Homo sapien
ggactctggcgccttgatacggtgt

SEQ ID NO: 1253745 - DNA, 25 bp, Homo sapien
tatgatgaccatttggactctggcg

SEQ ID NO: 1253746 - DNA, 25 bp, Homo sapien
gccttgatacggtgtcatcaataag

SEQ ID NO: 1253747 - DNA, 25 bp, Homo sapien
tagacacattgctcctcatgtctgc

SEQ ID NO: 1253748 - DNA, 25 bp, Homo sapien
cactgtgcagttgatgcagccatgc

SEQ ID NO: 1253749 - DNA, 25 bp, Homo sapien
atgctgtcacgcgtgctgcttcctg

SEQ ID NO: 1253750 - DNA, 25 bp, Homo sapien
gctgtagacacattgctcctcatgt

SEQ ID NO: 1253751 - DNA, 25 bp, Homo sapien
ctgccattgatatgacgcggcttcc

SEQ ID NO: 1253752 - DNA, 25 bp, Homo sapien
gccattgatatgacgcggcttccat

SEQ ID NO: 1253753 - DNA, 25 bp, Homo sapien
actgccattgatatgacgcggcttc

SEQ ID NO: 1253754 - DNA, 25 bp, Homo sapien
tgccattgatatgacgcggcttcca

SEQ ID NO: 1253755 - DNA, 25 bp, Homo sapien
ccgccagacgataattagatggagc

SEQ ID NO: 1253756 - DNA, 25 bp, Homo sapien
atggagcagcaacatgacccgcagg

SEQ ID NO: 1253757 - DNA, 25 bp, Homo sapien
tctgctggccgccagacgataatta

SEQ ID NO: 1253758 - DNA, 25 bp, Homo sapien
gacccgcaggggaagtgcctgaccc

SEQ ID NO: 1253759 - DNA, 25 bp, Homo sapien
tgcagagtggcagggcctgattcct

SEQ ID NO: 1253760 - DNA, 25 bp, Homo sapien
cattcaaagggtattgtgacgcaca

SEQ ID NO: 1253761 - DNA, 25 bp, Homo sapien
tgctgctggatcaactgcagagtgg

SEQ ID NO: 1253762 - DNA, 25 bp, Homo sapien
tgttcttaaaagtactctgaggaca

SEQ ID NO: 1253763 - DNA, 25 bp, Homo sapien
tggctaggagcatggtgactgtact

SEQ ID NO: 1253764 - DNA, 25 bp, Homo sapien
gagcatggtgactgtactagctgcc

SEQ ID NO: 1253765 - DNA, 25 bp, Homo sapien
gcatggtgactgtactagctgcctc

SEQ ID NO: 1253766 - DNA, 25 bp, Homo sapien
taggagcatggtgactgtactagct

SEQ ID NO: 1253767 - DNA, 25 bp, Homo sapien
tgctgtacaactgttgttctcagca

SEQ ID NO: 1253768 - DNA, 25 bp, Homo sapien
acagccagtgctgtacaactgttgt

SEQ ID NO: 1253769 - DNA, 25 bp, Homo sapien
tggtcacagccagtgctgtacaact

SEQ ID NO: 1253770 - DNA, 25 bp, Homo sapien
gctgtacaactgttgttctcagcac

SEQ ID NO: 1253771 - DNA, 25 bp, Homo sapien
catcggactgagacccatgtgacct

SEQ ID NO: 1253772 - DNA, 25 bp, Homo sapien
ttatgtatgcatagacagctgggcc

SEQ ID NO: 1253773 - DNA, 25 bp, Homo sapien
tggtgtagcaggagaacatcggact

SEQ ID NO: 1253774 - DNA, 25 bp, Homo sapien
gctgggcctatggtttgcacaaaca

SEQ ID NO: 1253775 - DNA, 25 bp, Homo sapien
ggcgacgctcaataaattctcgtag

SEQ ID NO: 1253776 - DNA, 25 bp, Homo sapien
ggatcactgggcgacgctcaataaa

SEQ ID NO: 1253777 - DNA, 25 bp, Homo sapien
aattctcgtagtcggatggcagtca

SEQ ID NO: 1253778 - DNA, 25 bp, Homo sapien
gctcaataaattctcgtagtcggat

SEQ ID NO: 1253779 - DNA, 25 bp, Homo sapien
ccggaggctgtgcatctggaagaac

SEQ ID NO: 1253780 - DNA, 25 bp, Homo sapien
cctggcttcagtcccggaggctgtg

SEQ ID NO: 1253781 - DNA, 25 bp, Homo sapien
ggaggctgtgcatctggaagaacta

SEQ ID NO: 1253782 - DNA, 25 bp, Homo sapien
tcccggaggctgtgcatctggaaga

SEQ ID NO: 1253783 - DNA, 25 bp, Homo sapien
cccagggtaatagccttgaacgtct

SEQ ID NO: 1253784 - DNA, 25 bp, Homo sapien
agctgcccagggtaatagccttgaa

SEQ ID NO: 1253785 - DNA, 25 bp, Homo sapien
tctttgcactatgatcaaaatggag

SEQ ID NO: 1253786 - DNA, 25 bp, Homo sapien
taatagccttgaacgtctcttcctt

SEQ ID NO: 1253787 - DNA, 25 bp, Homo sapien
ttttctcgtcagctggaatccattc

SEQ ID NO: 1253788 - DNA, 25 bp, Homo sapien
tttctcgtcagctggaatccattcc

SEQ ID NO: 1253789 - DNA, 25 bp, Homo sapien
tccattttctcgtcagctggaatcc

SEQ ID NO: 1253790 - DNA, 25 bp, Homo sapien
cattttctcgtcagctggaatccat

SEQ ID NO: 1253791 - DNA, 25 bp, Homo sapien
ttggtctaattgaggctgatagtga

SEQ ID NO: 1253792 - DNA, 25 bp, Homo sapien
tggaattgtcaagtctatgagcggt

SEQ ID NO: 1253793 - DNA, 25 bp, Homo sapien
cgaagacaaatatatcgaatgagtg

SEQ ID NO: 1253794 - DNA, 25 bp, Homo sapien
tatcgaatgagtgtttgttggtcta

SEQ ID NO: 1253795 - DNA, 25 bp, Homo sapien
atagtctcgtcggtaagtggtttct

SEQ ID NO: 1253796 - DNA, 25 bp, Homo sapien
aatggcagagaatagtctcgtcggt

SEQ ID NO: 1253797 - DNA, 25 bp, Homo sapien
ctttataccatggctcggcaggctt

SEQ ID NO: 1253798 - DNA, 25 bp, Homo sapien
cggtaagtggtttctttataccatg

SEQ ID NO: 1253799 - DNA, 25 bp, Homo sapien
ggaagccccctaaattcttcctgca

SEQ ID NO: 1253800 - DNA, 25 bp, Homo sapien
aactcgactggtcccaaacaggctc

SEQ ID NO: 1253801 - DNA, 25 bp, Homo sapien
cagacttgagactgtgtgttaataa

SEQ ID NO: 1253802 - DNA, 25 bp, Homo sapien
tcctctgcagggaactaggtagcgg

SEQ ID NO: 1253803 - DNA, 25 bp, Homo sapien
ggaacagctttcaaactcccagttg

SEQ ID NO: 1253804 - DNA, 25 bp, Homo sapien
gcaaagggaacagctttcaaactcc

SEQ ID NO: 1253805 - DNA, 25 bp, Homo sapien
ttatgcaaagggaacagctttcaaa

SEQ ID NO: 1253806 - DNA, 25 bp, Homo sapien
aagggaacagctttcaaactcccag

SEQ ID NO: 1253807 - DNA, 25 bp, Homo sapien
aactgtggctaatttctggttccaa

SEQ ID NO: 1253808 - DNA, 25 bp, Homo sapien
ttcacaacagtagagctctggcagt

SEQ ID NO: 1253809 - DNA, 25 bp, Homo sapien
ctctggcagtgaattaagcggtcga

SEQ ID NO: 1253810 - DNA, 25 bp, Homo sapien
cgaggattcagcgaaactgtggcta

SEQ ID NO: 1253811 - DNA, 25 bp, Homo sapien
gaagaccctttagctttctgcctga

SEQ ID NO: 1253812 - DNA, 25 bp, Homo sapien
gggtgctaactcctggacacagact

SEQ ID NO: 1253813 - DNA, 25 bp, Homo sapien
tgagggtctccagtgccagttttct

SEQ ID NO: 1253814 - DNA, 25 bp, Homo sapien
gatcctgcgtatacattggcctaaa

SEQ ID NO: 1253815 - DNA, 25 bp, Homo sapien
gctggcatcgctgtgctgtgatggg

SEQ ID NO: 1253816 - DNA, 25 bp, Homo sapien
atgccagctggcatcgctgtgctgt

SEQ ID NO: 1253817 - DNA, 25 bp, Homo sapien
agatgccagctggcatcgctgtgct

SEQ ID NO: 1253818 - DNA, 25 bp, Homo sapien
cagctggcatcgctgtgctgtgatg

SEQ ID NO: 1253819 - DNA, 25 bp, Homo sapien
tcaagtaggtgtctgtcaacagggg

SEQ ID NO: 1253820 - DNA, 25 bp, Homo sapien
cgtttgggtcccctccatacagagg

SEQ ID NO: 1253821 - DNA, 25 bp, Homo sapien
tgttactcccattcctgcacactcc

SEQ ID NO: 1253822 - DNA, 25 bp, Homo sapien
tgtcaacaggggtgctcgaggctca

SEQ ID NO: 1253823 - DNA, 25 bp, Homo sapien
gactcctggtagcacactcaccctg

SEQ ID NO: 1253824 - DNA, 25 bp, Homo sapien
tcctggtagcacactcaccctgctg

SEQ ID NO: 1253825 - DNA, 25 bp, Homo sapien
ctcctggtagcacactcaccctgct

SEQ ID NO: 1253826 - DNA, 25 bp, Homo sapien
ctcaggccagcgtggaaagcctgca

SEQ ID NO: 1253827 - DNA, 25 bp, Homo sapien
gcaggcaagaggaagatcaggggga

SEQ ID NO: 1253828 - DNA, 25 bp, Homo sapien
ctggcaggcaagaggaagatcaggg

SEQ ID NO: 1253829 - DNA, 25 bp, Homo sapien
tggcaggcaagaggaagatcagggg

SEQ ID NO: 1253830 - DNA, 25 bp, Homo sapien
aggcaagaggaagatcagggggagc

SEQ ID NO: 1253831 - DNA, 25 bp, Homo sapien
aggtgaagacgaaggcctcctctcc

SEQ ID NO: 1253832 - DNA, 25 bp, Homo sapien
aatagcataagatggtattctatga

SEQ ID NO: 1253833 - DNA, 25 bp, Homo sapien
taatagcataagatggtattctatg

SEQ ID NO: 1253834 - DNA, 25 bp, Homo sapien
atagcataagatggtattctatgaa

SEQ ID NO: 1253835 - DNA, 25 bp, Homo sapien
tgcctgccgatatgcctacagaatc

SEQ ID NO: 1253836 - DNA, 25 bp, Homo sapien
gacactgaagtaagtttgaagccct

SEQ ID NO: 1253837 - DNA, 25 bp, Homo sapien
tggttttcaacatcgtgcctgccga

SEQ ID NO: 1253838 - DNA, 25 bp, Homo sapien
tgttcaaagagaatagatgtttccc

SEQ ID NO: 1253839 - DNA, 25 bp, Homo sapien
gctttagagactcccgctgtcacca

SEQ ID NO: 1253840 - DNA, 25 bp, Homo sapien
tcaccatggcactgaacggacagtt

SEQ ID NO: 1253841 - DNA, 25 bp, Homo sapien
aaagcctgtaaggttcacttcccag

SEQ ID NO: 1253842 - DNA, 25 bp, Homo sapien
gactgagcctgtagaagataagcgc

SEQ ID NO: 1253843 - DNA, 25 bp, Homo sapien
cttaatcagcataccgcaatttagg

SEQ ID NO: 1253844 - DNA, 25 bp, Homo sapien
gcatccggcccaactaatattcttt

SEQ ID NO: 1253845 - DNA, 25 bp, Homo sapien
gcaaggcgctgcattagataatgaa

SEQ ID NO: 1253846 - DNA, 25 bp, Homo sapien
tcctgttgtggataaagcaaggcgc

SEQ ID NO: 1253847 - DNA, 25 bp, Homo sapien
tgaaactggcctcttcattacattg

SEQ ID NO: 1253848 - DNA, 25 bp, Homo sapien
gatagctgtttgttagtgtaagtgg

SEQ ID NO: 1253849 - DNA, 25 bp, Homo sapien
taaactctattggattaacatacag

SEQ ID NO: 1253850 - DNA, 25 bp, Homo sapien
tattagtagactggttatccttgaa

SEQ ID NO: 1253851 - DNA, 25 bp, Homo sapien
cagcctcatcaagatacttacagta

SEQ ID NO: 1253852 - DNA, 25 bp, Homo sapien
cagaaatcaaataacggtccctcca

SEQ ID NO: 1253853 - DNA, 25 bp, Homo sapien
aaataacggtccctccagataacag

SEQ ID NO: 1253854 - DNA, 25 bp, Homo sapien
gaaatcaaataacggtccctccaga

SEQ ID NO: 1253855 - DNA, 25 bp, Homo sapien
catatttgttataactatcttttgg

SEQ ID NO: 1253856 - DNA, 25 bp, Homo sapien
tatttgttataactatcttttggga

SEQ ID NO: 1253857 - DNA, 25 bp, Homo sapien
acccagcccatatttgttataacta

SEQ ID NO: 1253858 - DNA, 25 bp, Homo sapien
cagcccatatttgttataactatct

SEQ ID NO: 1253859 - DNA, 25 bp, Homo sapien
catcttaatgtaagaataacagtca

SEQ ID NO: 1253860 - DNA, 25 bp, Homo sapien
atattaggggatgttttgtgactgc

SEQ ID NO: 1253861 - DNA, 25 bp, Homo sapien
taatgtaagaataacagtcaaagaa

SEQ ID NO: 1253862 - DNA, 25 bp, Homo sapien
ttcatcttaatgtaagaataacagt

SEQ ID NO: 1253863 - DNA, 25 bp, Homo sapien
ttgaggctctctcctcctgtcctga

SEQ ID NO: 1253864 - DNA, 25 bp, Homo sapien
cttgaggctctctcctcctgtcctg

SEQ ID NO: 1253865 - DNA, 25 bp, Homo sapien
tgaggctctctcctcctgtcctgag

SEQ ID NO: 1253866 - DNA, 25 bp, Homo sapien
tgccggcataccagatttccgggtt

SEQ ID NO: 1253867 - DNA, 25 bp, Homo sapien
cctctgtgccggcataccagatttc

SEQ ID NO: 1253868 - DNA, 25 bp, Homo sapien
catagacgagattcttaatttgcaa

SEQ ID NO: 1253869 - DNA, 25 bp, Homo sapien
tactgttttatggaaacatagacga

SEQ ID NO: 1253870 - DNA, 25 bp, Homo sapien
agaagatccaatgaagatagcatga

SEQ ID NO: 1253871 - DNA, 25 bp, Homo sapien
cgggcggctgcaggcgcctgggtcc

SEQ ID NO: 1253872 - DNA, 25 bp, Homo sapien
ggcgggcggctgcaggcgcctgggt

SEQ ID NO: 1253873 - DNA, 25 bp, Homo sapien
ggcggctgcaggcgcctgggtcccg

SEQ ID NO: 1253874 - DNA, 25 bp, Homo sapien
ggctgcaggcgcctgggtcccggcg

SEQ ID NO: 1253875 - DNA, 25 bp, Homo sapien
ctccgcccaaccgcctcggccactc

SEQ ID NO: 1253876 - DNA, 25 bp, Homo sapien
gggcggagccatagcagctcagcca

SEQ ID NO: 1253877 - DNA, 25 bp, Homo sapien
ctccaaagggcggagccatagcagc

SEQ ID NO: 1253878 - DNA, 25 bp, Homo sapien
ccaaagggcggagccatagcagctc

SEQ ID NO: 1253879 - DNA, 25 bp, Homo sapien
aaagggcggagccatagcagctcag

SEQ ID NO: 1253880 - DNA, 25 bp, Homo sapien
aaaatgcgatagtttgggctgttag

SEQ ID NO: 1253881 - DNA, 25 bp, Homo sapien
aatgcgatagtttgggctgttagtg

SEQ ID NO: 1253882 - DNA, 25 bp, Homo sapien
actaaaaatgcgatagtttgggctg

SEQ ID NO: 1253883 - DNA, 25 bp, Homo sapien
taaaaatgcgatagtttgggctgtt

SEQ ID NO: 1253884 - DNA, 25 bp, Homo sapien
taaaaggacctatagaggacactca

SEQ ID NO: 1253885 - DNA, 25 bp, Homo sapien
gatggtaggaagctatatgtccagc

SEQ ID NO: 1253886 - DNA, 25 bp, Homo sapien
cctacataatatgcgaagagatgct

SEQ ID NO: 1253887 - DNA, 25 bp, Homo sapien
gccattcgggaaacaatcttgcgga

SEQ ID NO: 1253888 - DNA, 25 bp, Homo sapien
ggtggcaacagcaactttttgacta

SEQ ID NO: 1253889 - DNA, 25 bp, Homo sapien
ggagagacttgtgacatgggcacct

SEQ ID NO: 1253890 - DNA, 25 bp, Homo sapien
cctgatctctggtggcaacagcaac

SEQ ID NO: 1253891 - DNA, 25 bp, Homo sapien
gtgacatgggcacctatttcctcca

SEQ ID NO: 1253892 - DNA, 25 bp, Homo sapien
agtttctggcacactccactcagta

SEQ ID NO: 1253893 - DNA, 25 bp, Homo sapien
aatgttccttcatactctaacttaa

SEQ ID NO: 1253894 - DNA, 25 bp, Homo sapien
acaagtttctggcacactccactca

SEQ ID NO: 1253895 - DNA, 25 bp, Homo sapien
ataatgttccttcatactctaactt

SEQ ID NO: 1253896 - DNA, 25 bp, Homo sapien
ttttatagcgtgaacaccaggtgag

SEQ ID NO: 1253897 - DNA, 25 bp, Homo sapien
ccaggtgaggaacaacgcaattctg

SEQ ID NO: 1253898 - DNA, 25 bp, Homo sapien
gaggaacaacgcaattctgtcgtgg

SEQ ID NO: 1253899 - DNA, 25 bp, Homo sapien
tgggccagtaacaattggttttata

SEQ ID NO: 1253900 - DNA, 25 bp, Homo sapien
cacaaataaatagcgttcttcttca

SEQ ID NO: 1253901 - DNA, 25 bp, Homo sapien
caaataaatagcgttcttcttcatc

SEQ ID NO: 1253902 - DNA, 25 bp, Homo sapien
actctatagtaccacagaaagcaag

SEQ ID NO: 1253903 - DNA, 25 bp, Homo sapien
ctaactctatagtaccacagaaagc

SEQ ID NO: 1253904 - DNA, 25 bp, Homo sapien
agaactgagtcactgagtgagttac

SEQ ID NO: 1253905 - DNA, 25 bp, Homo sapien
gtcactgagtgagttaccagcgtat

SEQ ID NO: 1253906 - DNA, 25 bp, Homo sapien
ttacttgtcagaggcacagggaaga

SEQ ID NO: 1253907 - DNA, 25 bp, Homo sapien
gagtcactgagtgagttaccagcgt

SEQ ID NO: 1253908 - DNA, 25 bp, Homo sapien
aatctccactgaatgctcgtctgcc

SEQ ID NO: 1253909 - DNA, 25 bp, Homo sapien
taatcttaaagcaactcaggcgtaa

SEQ ID NO: 1253910 - DNA, 25 bp, Homo sapien
aactacgtgtttgcttgagaattcc

SEQ ID NO: 1253911 - DNA, 25 bp, Homo sapien
cagtaaccagtacggccaatttgct

SEQ ID NO: 1253912 - DNA, 25 bp, Homo sapien
ctttctggatcatatgcccacacag

SEQ ID NO: 1253913 - DNA, 25 bp, Homo sapien
cagcaactcatcaggatctgcactt

SEQ ID NO: 1253914 - DNA, 25 bp, Homo sapien
tcccattagtgggtatataacccaa

SEQ ID NO: 1253915 - DNA, 25 bp, Homo sapien
tacagggctgaaaacctagatgatg

SEQ ID NO: 1253916 - DNA, 25 bp, Homo sapien
catggcctgtcgaggggtggggggg

SEQ ID NO: 1253917 - DNA, 25 bp, Homo sapien
cattagtgggtatataacccaaagg

SEQ ID NO: 1253918 - DNA, 25 bp, Homo sapien
agaggagagtatgtatctttcatga

SEQ ID NO: 1253919 - DNA, 25 bp, Homo sapien
gagtatgtatctttcatgagacagc

SEQ ID NO: 1253920 - DNA, 25 bp, Homo sapien
ggagagtatgtatctttcatgagac

SEQ ID NO: 1253921 - DNA, 25 bp, Homo sapien
tatgtatctttcatgagacagctgt

SEQ ID NO: 1253922 - DNA, 25 bp, Homo sapien
ataactgctgaggaaagagtaaatg

SEQ ID NO: 1253923 - DNA, 25 bp, Homo sapien
gaactgtatgtatgacaggcttctg

SEQ ID NO: 1253924 - DNA, 25 bp, Homo sapien
ttctgtcccaatgtggccatctgtg

SEQ ID NO: 1253925 - DNA, 25 bp, Homo sapien
aatgtggccatctgtgtgctgagta

SEQ ID NO: 1253926 - DNA, 25 bp, Homo sapien
ctgtatgtatgacaggcttctgtcc

SEQ ID NO: 1253927 - DNA, 25 bp, Homo sapien
cagagcatgaagtcctgggaacagg

SEQ ID NO: 1253928 - DNA, 25 bp, Homo sapien
tggaaatggttcagtgtagtcagcc

SEQ ID NO: 1253929 - DNA, 25 bp, Homo sapien
ggtagctggctaatcaccacacaga

SEQ ID NO: 1253930 - DNA, 25 bp, Homo sapien
gcagactgggtactcagagatggcc

SEQ ID NO: 1253931 - DNA, 25 bp, Homo sapien
tgcaactacacaagcatcccaggaa

SEQ ID NO: 1253932 - DNA, 25 bp, Homo sapien
ggtgaggagattggtaaataaccag

SEQ ID NO: 1253933 - DNA, 25 bp, Homo sapien
aatttcaggtatggtcaacaaagga

SEQ ID NO: 1253934 - DNA, 25 bp, Homo sapien
taattgactaccacgtggtgaggag

SEQ ID NO: 1253935 - DNA, 25 bp, Homo sapien
gaatcagttgtgtgaaaggtctcca

SEQ ID NO: 1253936 - DNA, 25 bp, Homo sapien
cactcagaatgtctggaggcactct

SEQ ID NO: 1253937 - DNA, 25 bp, Homo sapien
taagaaaaacgattccatcccgcga

SEQ ID NO: 1253938 - DNA, 25 bp, Homo sapien
catcccgcgataagatcacatgagc

SEQ ID NO: 1253939 - DNA, 25 bp, Homo sapien
gcagtcaccgatagacttaggatgt

SEQ ID NO: 1253940 - DNA, 25 bp, Homo sapien
cacagcaatctccagagggtgtcct

SEQ ID NO: 1253941 - DNA, 25 bp, Homo sapien
caaacttaagaagaatggatccgag

SEQ ID NO: 1253942 - DNA, 25 bp, Homo sapien
tatactcaaccctgtctatggtcag

SEQ ID NO: 1253943 - DNA, 25 bp, Homo sapien
gatactatgcttgttccatagcagt

SEQ ID NO: 1253944 - DNA, 25 bp, Homo sapien
cagtaatcctggcagtgctgaaaat

SEQ ID NO: 1253945 - DNA, 25 bp, Homo sapien
tgaaattatggtaacaatagtagat

SEQ ID NO: 1253946 - DNA, 25 bp, Homo sapien
tggtaacactgtcaataggggcatc

SEQ ID NO: 1253947 - DNA, 25 bp, Homo sapien
gcattgatagatttccatgtcctgc

SEQ ID NO: 1253948 - DNA, 25 bp, Homo sapien
cattgatagatttccatgtcctgca

SEQ ID NO: 1253949 - DNA, 25 bp, Homo sapien
ttccagatgtaagggatagtcctgt

SEQ ID NO: 1253950 - DNA, 25 bp, Homo sapien
tgcatctctagtattaatcttggaa

SEQ ID NO: 1253951 - DNA, 25 bp, Homo sapien
gtattgtgccatcatccaaagcata

SEQ ID NO: 1253952 - DNA, 25 bp, Homo sapien
tgtgtaatttgtccataaatgcagc

SEQ ID NO: 1253953 - DNA, 25 bp, Homo sapien
tgagcaacattgttatgaaatgcca

SEQ ID NO: 1253954 - DNA, 25 bp, Homo sapien
atgagcaacattgttatgaaatgcc

SEQ ID NO: 1253955 - DNA, 25 bp, Homo sapien
gagcaacattgttatgaaatgccat

SEQ ID NO: 1253956 - DNA, 25 bp, Homo sapien
gattccacaataacatacagaccag

SEQ ID NO: 1253957 - DNA, 25 bp, Homo sapien
tgttttctggatagacgatctgagt

SEQ ID NO: 1253958 - DNA, 25 bp, Homo sapien
atatttttgggccataagattccac

SEQ ID NO: 1253959 - DNA, 25 bp, Homo sapien
caaaggaaatctcatgactctcttg

SEQ ID NO: 1253960 - DNA, 25 bp, Homo sapien
tggccacaaggatcccacccagccc

SEQ ID NO: 1253961 - DNA, 25 bp, Homo sapien
gtggccacaaggatcccacccagcc

SEQ ID NO: 1253962 - DNA, 25 bp, Homo sapien
tgtggccacaaggatcccacccagc

SEQ ID NO: 1253963 - DNA, 25 bp, Homo sapien
gggccagcaacagcccggggcctgg

SEQ ID NO: 1253964 - DNA, 25 bp, Homo sapien
ggtacgtcctgccaccctcggagga

SEQ ID NO: 1253965 - DNA, 25 bp, Homo sapien
ggccatggacgcctgcaagttagag

SEQ ID NO: 1253966 - DNA, 25 bp, Homo sapien
agctagagccatccaggccaccagc

SEQ ID NO: 1253967 - DNA, 25 bp, Homo sapien
aggccaccagctgtcgagccccaag

SEQ ID NO: 1253968 - DNA, 25 bp, Homo sapien
tctacattctgataaaatgttagtg

SEQ ID NO: 1253969 - DNA, 25 bp, Homo sapien
ctcataatctacattctgataaaat

SEQ ID NO: 1253970 - DNA, 25 bp, Homo sapien
agtaatcagatattctctcataatc

SEQ ID NO: 1253971 - DNA, 25 bp, Homo sapien
tgtctcaaagtaatcagatattctc

SEQ ID NO: 1253972 - DNA, 25 bp, Homo sapien
ctttggacaataaagagtgagttgt

SEQ ID NO: 1253973 - DNA, 25 bp, Homo sapien
gaaagctaggtcagatagaatgcct

SEQ ID NO: 1253974 - DNA, 25 bp, Homo sapien
ccactatgaagtgcacaagaatcat

SEQ ID NO: 1253975 - DNA, 25 bp, Homo sapien
aatggtctaatatgatctgactggg

SEQ ID NO: 1253976 - DNA, 25 bp, Homo sapien
cgttttcccctcgtattgatagcac

SEQ ID NO: 1253977 - DNA, 25 bp, Homo sapien
ccgttttcccctcgtattgatagca

SEQ ID NO: 1253978 - DNA, 25 bp, Homo sapien
tgcagacatctcgacctgaaggtgg

SEQ ID NO: 1253979 - DNA, 25 bp, Homo sapien
catctcgacctgaaggtggcagcca

SEQ ID NO: 1253980 - DNA, 25 bp, Homo sapien
tgctgcagacatctcgacctgaagg

SEQ ID NO: 1253981 - DNA, 25 bp, Homo sapien
cagacatctcgacctgaaggtggca

SEQ ID NO: 1253982 - DNA, 25 bp, Homo sapien
aggagaaacaattcgtacaggttat

SEQ ID NO: 1253983 - DNA, 25 bp, Homo sapien
acaattcgtacaggttattgtatca

SEQ ID NO: 1253984 - DNA, 25 bp, Homo sapien
ctaggagaaacaattcgtacaggtt

SEQ ID NO: 1253985 - DNA, 25 bp, Homo sapien
gaaacaattcgtacaggttattgta

SEQ ID NO: 1253986 - DNA, 25 bp, Homo sapien
tgaatattcactaggtcgaaactga

SEQ ID NO: 1253987 - DNA, 25 bp, Homo sapien
cttttgggctattggacatgctttt

SEQ ID NO: 1253988 - DNA, 25 bp, Homo sapien
tgaaccagcacaagacccgtgtgct

SEQ ID NO: 1253989 - DNA, 25 bp, Homo sapien
taggtcgaaactgaaccagcacaag

SEQ ID NO: 1253990 - DNA, 25 bp, Homo sapien
ggttgaccgcctatacattcttgaa

SEQ ID NO: 1253991 - DNA, 25 bp, Homo sapien
gtattgtacggaggtattgtatgca

SEQ ID NO: 1253992 - DNA, 25 bp, Homo sapien
gatggtactctatggaggtattgta

SEQ ID NO: 1253993 - DNA, 25 bp, Homo sapien
gaataaatatggaacttgctaagta

SEQ ID NO: 1253994 - DNA, 25 bp, Homo sapien
atgttgttggatgttgcacatttcc

SEQ ID NO: 1253995 - DNA, 25 bp, Homo sapien
cacagccaacagctatttggaacac

SEQ ID NO: 1253996 - DNA, 25 bp, Homo sapien
catcacagccaacagctatttggaa

SEQ ID NO: 1253997 - DNA, 25 bp, Homo sapien
attgcaatgaattttttatcatcac

SEQ ID NO: 1253998 - DNA, 25 bp, Homo sapien
attttttatcatcacagccaacagc

SEQ ID NO: 1253999 - DNA, 25 bp, Homo sapien
cgtatgaaaaatcatggtgatgaca

SEQ ID NO: 1254000 - DNA, 25 bp, Homo sapien
ttcaatcacgtatgaaaaatcatgg

SEQ ID NO: 1254001 - DNA, 25 bp, Homo sapien
tgaaaaatcatggtgatgacatcct

SEQ ID NO: 1254002 - DNA, 25 bp, Homo sapien
tggtgatgacatccttttttactaa

SEQ ID NO: 1254003 - DNA, 25 bp, Homo sapien
caagtttttcgatggctgatgcctc

SEQ ID NO: 1254004 - DNA, 25 bp, Homo sapien
ttttcgatggctgatgcctcagata

SEQ ID NO: 1254005 - DNA, 25 bp, Homo sapien
gtttttcgatggctgatgcctcaga

SEQ ID NO: 1254006 - DNA, 25 bp, Homo sapien
tcgatggctgatgcctcagatatga

SEQ ID NO: 1254007 - DNA, 25 bp, Homo sapien
atatttggtccattgacagaatttt

SEQ ID NO: 1254008 - DNA, 25 bp, Homo sapien
tatttggtccattgacagaatttta

SEQ ID NO: 1254009 - DNA, 25 bp, Homo sapien
ttatatatttggtccattgacagaa

SEQ ID NO: 1254010 - DNA, 25 bp, Homo sapien
attttatatatttggtccattgaca

SEQ ID NO: 1254011 - DNA, 25 bp, Homo sapien
acttttctgtgaagtcaagcctcag

SEQ ID NO: 1254012 - DNA, 25 bp, Homo sapien
agggcagccatattctccccaaata

SEQ ID NO: 1254013 - DNA, 25 bp, Homo sapien
ggcagccatattctccccaaatata

SEQ ID NO: 1254014 - DNA, 25 bp, Homo sapien
ctgtgaagtcaagcctcagagggca

SEQ ID NO: 1254015 - DNA, 25 bp, Homo sapien
caaatgcatcatctacggaaggagc

SEQ ID NO: 1254016 - DNA, 25 bp, Homo sapien
tacggaaggagcaattggagaatcc

SEQ ID NO: 1254017 - DNA, 25 bp, Homo sapien
caattggagaatcccaagtagtaca

SEQ ID NO: 1254018 - DNA, 25 bp, Homo sapien
tgggtgcaagacaggtgaggtggct

SEQ ID NO: 1254019 - DNA, 25 bp, Homo sapien
gaaatttgcttcaacgtctttaaca

SEQ ID NO: 1254020 - DNA, 25 bp, Homo sapien
tgccgtgtatttcccacactatgaa

SEQ ID NO: 1254021 - DNA, 25 bp, Homo sapien
ctgtgccatagtattattaaagcta

SEQ ID NO: 1254022 - DNA, 25 bp, Homo sapien
tgcttcaacgtctttaacatagcca

SEQ ID NO: 1254023 - DNA, 25 bp, Homo sapien
tgacttccatgtctgtgcttcatgt

SEQ ID NO: 1254024 - DNA, 25 bp, Homo sapien
acttccatgtctgtgcttcatgtaa

SEQ ID NO: 1254025 - DNA, 25 bp, Homo sapien
ttccatgtctgtgcttcatgtaaac

SEQ ID NO: 1254026 - DNA, 25 bp, Homo sapien
tctgtgcttcatgtaaacaaccact

SEQ ID NO: 1254027 - DNA, 25 bp, Homo sapien
ggtccccagacttcttctagtggga

SEQ ID NO: 1254028 - DNA, 25 bp, Homo sapien
gggaggtgcttgttaagttcaatca

SEQ ID NO: 1254029 - DNA, 25 bp, Homo sapien
acttcttctagtgggaggtgcttgt

SEQ ID NO: 1254030 - DNA, 25 bp, Homo sapien
ctagtgggaggtgcttgttaagttc

SEQ ID NO: 1254031 - DNA, 25 bp, Homo sapien
aacaatctggaaggtaatgtttctc

SEQ ID NO: 1254032 - DNA, 25 bp, Homo sapien
aatgccagattagttattccaaata

SEQ ID NO: 1254033 - DNA, 25 bp, Homo sapien
tttccatcaagtttttgttaatagc

SEQ ID NO: 1254034 - DNA, 25 bp, Homo sapien
atgccagattagttattccaaataa

SEQ ID NO: 1254035 - DNA, 25 bp, Homo sapien
tcaatcagctcttgcacagtctcaa

SEQ ID NO: 1254036 - DNA, 25 bp, Homo sapien
gcaataacgataagctctagaggga

SEQ ID NO: 1254037 - DNA, 25 bp, Homo sapien
gagacttcctcatggcaactctatg

SEQ ID NO: 1254038 - DNA, 25 bp, Homo sapien
tcccagtcaatagagctttgcaatc

SEQ ID NO: 1254039 - DNA, 25 bp, Homo sapien
catacattccagaatggcccatggg

SEQ ID NO: 1254040 - DNA, 25 bp, Homo sapien
gggccaaaatatatggttaccatta

SEQ ID NO: 1254041 - DNA, 25 bp, Homo sapien
gataatctcgtatggttgatttaag

SEQ ID NO: 1254042 - DNA, 25 bp, Homo sapien
caggatcttcacacgaaatacatac

SEQ ID NO: 1254043 - DNA, 25 bp, Homo sapien
tgggaatcagtccaaatgtctctat

SEQ ID NO: 1254044 - DNA, 25 bp, Homo sapien
ggaatcagtccaaatgtctctattg

SEQ ID NO: 1254045 - DNA, 25 bp, Homo sapien
aatcagtccaaatgtctctattgca

SEQ ID NO: 1254046 - DNA, 25 bp, Homo sapien
agtccaaatgtctctattgcaaaca

SEQ ID NO: 1254047 - DNA, 25 bp, Homo sapien
ggtgggtatataccttaatattcac

SEQ ID NO: 1254048 - DNA, 25 bp, Homo sapien
ctttctcctggctaactcacttgac

SEQ ID NO: 1254049 - DNA, 25 bp, Homo sapien
tgactccttcttcggttggtgggta

SEQ ID NO: 1254050 - DNA, 25 bp, Homo sapien
cttgggtgggtatataccttaatat

SEQ ID NO: 1254051 - DNA, 25 bp, Homo sapien
tcatgtaccgaaagtagctcaaaac

SEQ ID NO: 1254052 - DNA, 25 bp, Homo sapien
gagcagcatcaggacgaagaggaaa

SEQ ID NO: 1254053 - DNA, 25 bp, Homo sapien
aatatatcgtctataaatcctcatg

SEQ ID NO: 1254054 - DNA, 25 bp, Homo sapien
agaagagcagcatcaggacgaagag

SEQ ID NO: 1254055 - DNA, 25 bp, Homo sapien
aacacacactctcaatatcactatg

SEQ ID NO: 1254056 - DNA, 25 bp, Homo sapien
tatttagtatttcttggtcaaacac

SEQ ID NO: 1254057 - DNA, 25 bp, Homo sapien
tggtgatgcctactacgagcttata

SEQ ID NO: 1254058 - DNA, 25 bp, Homo sapien
ccatgtgagagtacatagagtatct

SEQ ID NO: 1254059 - DNA, 25 bp, Homo sapien
tcatataaggtttcatgtgaaaagt

SEQ ID NO: 1254060 - DNA, 25 bp, Homo sapien
aaatgatacttgacacatagatata

SEQ ID NO: 1254061 - DNA, 25 bp, Homo sapien
ctacagtcatataaggtttcatgtg

SEQ ID NO: 1254062 - DNA, 25 bp, Homo sapien
attaactacagtcatataaggtttc

SEQ ID NO: 1254063 - DNA, 25 bp, Homo sapien
cagtgcccgtggaatttcatcttgc

SEQ ID NO: 1254064 - DNA, 25 bp, Homo sapien
gacatgagcaattctttgtggacag

SEQ ID NO: 1254065 - DNA, 25 bp, Homo sapien
tttcaaaacagcgatgaccagcagg

SEQ ID NO: 1254066 - DNA, 25 bp, Homo sapien
gacagcagctttgatcagtgcccgt

SEQ ID NO: 1254067 - DNA, 25 bp, Homo sapien
tactataagtgcagaggcggagtct

SEQ ID NO: 1254068 - DNA, 25 bp, Homo sapien
ggcgcacctcgggacctaaaatggc

SEQ ID NO: 1254069 - DNA, 25 bp, Homo sapien
taaaatggcggcaactccggcgcct

SEQ ID NO: 1254070 - DNA, 25 bp, Homo sapien
gactgagcccgcctgcgctctggtt

SEQ ID NO: 1254071 - DNA, 25 bp, Homo sapien
ggcgccgccgacaggagcgtctgtg

SEQ ID NO: 1254072 - DNA, 25 bp, Homo sapien
ttggcggcccgctccggatgaggca

SEQ ID NO: 1254073 - DNA, 25 bp, Homo sapien
gggcggaagcatcgggcagccgagc

SEQ ID NO: 1254074 - DNA, 25 bp, Homo sapien
tgagccgggcactaagcgtacagcc

SEQ ID NO: 1254075 - DNA, 25 bp, Homo sapien
cgttgagcaccactaactggttagc

SEQ ID NO: 1254076 - DNA, 25 bp, Homo sapien
acacgttgagcaccactaactggtt

SEQ ID NO: 1254077 - DNA, 25 bp, Homo sapien
tgagcaccactaactggttagcccc

SEQ ID NO: 1254078 - DNA, 25 bp, Homo sapien
cacgttgagcaccactaactggtta

SEQ ID NO: 1254079 - DNA, 25 bp, Homo sapien
ggtccgagccccacgggcgagagga

SEQ ID NO: 1254080 - DNA, 25 bp, Homo sapien
gtccgagccccacgggcgagaggaa

SEQ ID NO: 1254081 - DNA, 25 bp, Homo sapien
ccacgggcgagaggaagccggcctg

SEQ ID NO: 1254082 - DNA, 25 bp, Homo sapien
agccccacgggcgagaggaagccgg

SEQ ID NO: 1254083 - DNA, 25 bp, Homo sapien
caacggaagctttgccgaaaggaca

SEQ ID NO: 1254084 - DNA, 25 bp, Homo sapien
aggttcaagcccacccgagctttgg

SEQ ID NO: 1254085 - DNA, 25 bp, Homo sapien
agagacggacagttcggcagaagca

SEQ ID NO: 1254086 - DNA, 25 bp, Homo sapien
ggagtttctgaagacgtagccatgg

SEQ ID NO: 1254087 - DNA, 25 bp, Homo sapien
cgaggttgcctttaacacacaagga

SEQ ID NO: 1254088 - DNA, 25 bp, Homo sapien
gcaccaccaggatctctaaataatt

SEQ ID NO: 1254089 - DNA, 25 bp, Homo sapien
tctaaataattcagctgggctattt

SEQ ID NO: 1254090 - DNA, 25 bp, Homo sapien
gagtgtaggaaaggagcaccaccag

SEQ ID NO: 1254091 - DNA, 25 bp, Homo sapien
gcagcaagcaataggaacactatgc

SEQ ID NO: 1254092 - DNA, 25 bp, Homo sapien
tcatgcatacggcagagttatggaa

SEQ ID NO: 1254093 - DNA, 25 bp, Homo sapien
aaaagaaatgatccgcagcagccca

SEQ ID NO: 1254094 - DNA, 25 bp, Homo sapien
taagtaaccttctgaggatcacact

SEQ ID NO: 1254095 - DNA, 25 bp, Homo sapien
caattaggaatacgtgaacaagctc

SEQ ID NO: 1254096 - DNA, 25 bp, Homo sapien
gctatgtgtgccagtcaattaggaa

SEQ ID NO: 1254097 - DNA, 25 bp, Homo sapien
ttgaaactaatctgagtcacctgct

SEQ ID NO: 1254098 - DNA, 25 bp, Homo sapien
cctgaaaagcacaaaatctggatct

SEQ ID NO: 1254099 - DNA, 25 bp, Homo sapien
tgaactatcaggtcaactgttcctg

SEQ ID NO: 1254100 - DNA, 25 bp, Homo sapien
taactcagccgcctgagaaactggg

SEQ ID NO: 1254101 - DNA, 25 bp, Homo sapien
gaacttatcagagtgggcatcctaa

SEQ ID NO: 1254102 - DNA, 25 bp, Homo sapien
tatacaaagcccacaagttgctagg

SEQ ID NO: 1254103 - DNA, 25 bp, Homo sapien
tgtgataacagcactatggttaggt

SEQ ID NO: 1254104 - DNA, 25 bp, Homo sapien
cagcactatggttaggtagaaaatg

SEQ ID NO: 1254105 - DNA, 25 bp, Homo sapien
gataacagcactatggttaggtaga

SEQ ID NO: 1254106 - DNA, 25 bp, Homo sapien
tattcaataatactacatcaattaa

SEQ ID NO: 1254107 - DNA, 25 bp, Homo sapien
gaagaagcccgtggtactggatcgt

SEQ ID NO: 1254108 - DNA, 25 bp, Homo sapien
ctctagtagagagcaagtgagtaca

SEQ ID NO: 1254109 - DNA, 25 bp, Homo sapien
tacatatactgatggtgggaaccag

SEQ ID NO: 1254110 - DNA, 25 bp, Homo sapien
ttattacctagcttgcccactgaag

SEQ ID NO: 1254111 - DNA, 25 bp, Homo sapien
caactccgcgctacagaagtgactg

SEQ ID NO: 1254112 - DNA, 25 bp, Homo sapien
tgttcatttacaacccaactccgcg

SEQ ID NO: 1254113 - DNA, 25 bp, Homo sapien
catgataacgatccagtggtcctgt

SEQ ID NO: 1254114 - DNA, 25 bp, Homo sapien
tgaaactcccatgataacgatccag

SEQ ID NO: 1254115 - DNA, 25 bp, Homo sapien
caattccaatggatgaggtatattc

SEQ ID NO: 1254116 - DNA, 25 bp, Homo sapien
actccaattccaatggatgaggtat

SEQ ID NO: 1254117 - DNA, 25 bp, Homo sapien
taaggatggccaccataagcaaatt

SEQ ID NO: 1254118 - DNA, 25 bp, Homo sapien
aatgtttctcctagttcagaagcat

SEQ ID NO: 1254119 - DNA, 25 bp, Homo sapien
tccagaaaaggggtaaggatggcca

SEQ ID NO: 1254120 - DNA, 25 bp, Homo sapien
tctcctagttcagaagcatttcctg

SEQ ID NO: 1254121 - DNA, 25 bp, Homo sapien
atcatcttctaggaagtccgtgctc

SEQ ID NO: 1254122 - DNA, 25 bp, Homo sapien
tcatcttctaggaagtccgtgctcc

SEQ ID NO: 1254123 - DNA, 25 bp, Homo sapien
gggatagcaaatatttatttgaaga

SEQ ID NO: 1254124 - DNA, 25 bp, Homo sapien
gatagcaaatatttatttgaagaac

SEQ ID NO: 1254125 - DNA, 25 bp, Homo sapien
tagcaaatatttatttgaagaactt

SEQ ID NO: 1254126 - DNA, 25 bp, Homo sapien
agcaaatatttatttgaagaacttt

SEQ ID NO: 1254127 - DNA, 25 bp, Homo sapien
agaattgctctttgggccccaaatg

SEQ ID NO: 1254128 - DNA, 25 bp, Homo sapien
ctttgggccccaaatgcaaaatggt

SEQ ID NO: 1254129 - DNA, 25 bp, Homo sapien
tggcctaaaaagatggctccaggga

SEQ ID NO: 1254130 - DNA, 25 bp, Homo sapien
aacaattcagcactcatatggggaa

SEQ ID NO: 1254131 - DNA, 25 bp, Homo sapien
caaaataccactgggactggtcgaa

SEQ ID NO: 1254132 - DNA, 25 bp, Homo sapien
gacaaaataccactgggactggtcg

SEQ ID NO: 1254133 - DNA, 25 bp, Homo sapien
taccactgggactggtcgaatgagg

SEQ ID NO: 1254134 - DNA, 25 bp, Homo sapien
aataccactgggactggtcgaatga

SEQ ID NO: 1254135 - DNA, 25 bp, Homo sapien
aatattacagttgcggaggagaccc

SEQ ID NO: 1254136 - DNA, 25 bp, Homo sapien
caaacggcagctagtccagaagtcc

SEQ ID NO: 1254137 - DNA, 25 bp, Homo sapien
ggtaagtccactgttgcaaacggca

SEQ ID NO: 1254138 - DNA, 25 bp, Homo sapien
cagatgtattcgaccccttgcagta

SEQ ID NO: 1254139 - DNA, 25 bp, Homo sapien
tccttcgggaggcaactctgtagaa

SEQ ID NO: 1254140 - DNA, 25 bp, Homo sapien
tggctgacactagactgcagggctg

SEQ ID NO: 1254141 - DNA, 25 bp, Homo sapien
tatagtttagtgtggcgcccgggtc

SEQ ID NO: 1254142 - DNA, 25 bp, Homo sapien
gcaagtcgattgatccagcgaggaa

SEQ ID NO: 1254143 - DNA, 25 bp, Homo sapien
tggattcaggcatcaggacgaggct

SEQ ID NO: 1254144 - DNA, 25 bp, Homo sapien
gaagccatggatatcgagtcctgca

SEQ ID NO: 1254145 - DNA, 25 bp, Homo sapien
tggtgacaacaaagagactccgtat

SEQ ID NO: 1254146 - DNA, 25 bp, Homo sapien
tataatcctgagctgaaaaactggg

SEQ ID NO: 1254147 - DNA, 25 bp, Homo sapien
ttatacctgagtcttgtggcctggc

SEQ ID NO: 1254148 - DNA, 25 bp, Homo sapien
gaagtaagtagctgtctgccactga

SEQ ID NO: 1254149 - DNA, 25 bp, Homo sapien
tcttccggtggagtaaagcaggcct

SEQ ID NO: 1254150 - DNA, 25 bp, Homo sapien
gctttgacaggaaggaacgaccaag

SEQ ID NO: 1254151 - DNA, 25 bp, Homo sapien
taagcatactaccaagcaaaccatc

SEQ ID NO: 1254152 - DNA, 25 bp, Homo sapien
caattacactatgaatgggagagag

SEQ ID NO: 1254153 - DNA, 25 bp, Homo sapien
tgacacagtggcagcttctaagcat

SEQ ID NO: 1254154 - DNA, 25 bp, Homo sapien
tgtgaactacagaccattcatcctg

SEQ ID NO: 1254155 - DNA, 25 bp, Homo sapien
ccatcaggaaggctttccatgtgca

SEQ ID NO: 1254156 - DNA, 25 bp, Homo sapien
tcaggaaggctttccatgtgcacat

SEQ ID NO: 1254157 - DNA, 25 bp, Homo sapien
tggccagggccctagagttccaggt

SEQ ID NO: 1254158 - DNA, 25 bp, Homo sapien
tggccatcaggaaggctttccatgt

SEQ ID NO: 1254159 - DNA, 25 bp, Homo sapien
caaagtgagacaacttggtacatga

SEQ ID NO: 1254160 - DNA, 25 bp, Homo sapien
tctcgatatggtttatttagacttc

SEQ ID NO: 1254161 - DNA, 25 bp, Homo sapien
gaacccattaactccacaaagtgag

SEQ ID NO: 1254162 - DNA, 25 bp, Homo sapien
ctttttctattccacgtacagcagg

SEQ ID NO: 1254163 - DNA, 25 bp, Homo sapien
ttgatacaccaacagatgtctccca

SEQ ID NO: 1254164 - DNA, 25 bp, Homo sapien
ctgggttgatacaccaacagatgtc

SEQ ID NO: 1254165 - DNA, 25 bp, Homo sapien
tgggttgatacaccaacagatgtct

SEQ ID NO: 1254166 - DNA, 25 bp, Homo sapien
ggttgatacaccaacagatgtctcc

SEQ ID NO: 1254167 - DNA, 25 bp, Homo sapien
gagcagagtggtagcttctaccaga

SEQ ID NO: 1254168 - DNA, 25 bp, Homo sapien
caagagcagagtggtagcttctacc

SEQ ID NO: 1254169 - DNA, 25 bp, Homo sapien
agagtggtagcttctaccagatttg

SEQ ID NO: 1254170 - DNA, 25 bp, Homo sapien
cagggcaagagcagagtggtagctt

SEQ ID NO: 1254171 - DNA, 25 bp, Homo sapien
ctcctcttggctgttgattagaatg

SEQ ID NO: 1254172 - DNA, 25 bp, Homo sapien
actgtgctgtcggccttcaattggc

SEQ ID NO: 1254173 - DNA, 25 bp, Homo sapien
cttggctgttgattagaatggctgt

SEQ ID NO: 1254174 - DNA, 25 bp, Homo sapien
gtgctgtcggccttcaattggctcc

SEQ ID NO: 1254175 - DNA, 25 bp, Homo sapien
ggttcgcagcgagctaaacgagccg

SEQ ID NO: 1254176 - DNA, 25 bp, Homo sapien
ggatgtgcatggaaaccaagggtta

SEQ ID NO: 1254177 - DNA, 25 bp, Homo sapien
ccaagggttatcttgaggttcgcag

SEQ ID NO: 1254178 - DNA, 25 bp, Homo sapien
cccagcaccgtaggaatgaaagcac

SEQ ID NO: 1254179 - DNA, 25 bp, Homo sapien
ctgcggcgcaaggagcggccggacc

SEQ ID NO: 1254180 - DNA, 25 bp, Homo sapien
aaggagcggccggaccggctggagg

SEQ ID NO: 1254181 - DNA, 25 bp, Homo sapien
gcaaggagcggccggaccggctgga

SEQ ID NO: 1254182 - DNA, 25 bp, Homo sapien
gcggcgcaaggagcggccggaccgg

SEQ ID NO: 1254183 - DNA, 25 bp, Homo sapien
ggaggccccggagcgcggcctgtgg

SEQ ID NO: 1254184 - DNA, 25 bp, Homo sapien
aggcaaggaggccccggagcgcggc

SEQ ID NO: 1254185 - DNA, 25 bp, Homo sapien
aaggaggccccggagcgcggcctgt

SEQ ID NO: 1254186 - DNA, 25 bp, Homo sapien
gcaaggaggccccggagcgcggcct

SEQ ID NO: 1254187 - DNA, 25 bp, Homo sapien
cagcccgacggttcccgagatgtgg

SEQ ID NO: 1254188 - DNA, 25 bp, Homo sapien
aggcggcagcgttgttgtccagccc

SEQ ID NO: 1254189 - DNA, 25 bp, Homo sapien
ggcctgtgggtacattcccgggaga

SEQ ID NO: 1254190 - DNA, 25 bp, Homo sapien
cctgggcaacccaagcgcgtagagg

SEQ ID NO: 1254191 - DNA, 25 bp, Homo sapien
ccttgggtcgctggattctggtgac

SEQ ID NO: 1254192 - DNA, 25 bp, Homo sapien
tgggtcgctggattctggtgacccc

SEQ ID NO: 1254193 - DNA, 25 bp, Homo sapien
ttatttgagggattccttgggtcgc

SEQ ID NO: 1254194 - DNA, 25 bp, Homo sapien
gggattccttgggtcgctggattct

SEQ ID NO: 1254195 - DNA, 25 bp, Homo sapien
tcatagtcttacaagaaagaggcct

SEQ ID NO: 1254196 - DNA, 25 bp, Homo sapien
ccaggtgaggccatatgtgtaaatc

SEQ ID NO: 1254197 - DNA, 25 bp, Homo sapien
cagttcgcagcgaaatttggccgac

SEQ ID NO: 1254198 - DNA, 25 bp, Homo sapien
gacgctgtgtgtcttcgtgaaccag

SEQ ID NO: 1254199 - DNA, 25 bp, Homo sapien
catctctcgctgctcaacaccatga

SEQ ID NO: 1254200 - DNA, 25 bp, Homo sapien
gagtaaatgctatcgtgttttgttg

SEQ ID NO: 1254201 - DNA, 25 bp, Homo sapien
tcccatctctcgctgctcaacacca

SEQ ID NO: 1254202 - DNA, 25 bp, Homo sapien
ccatctctcgctgctcaacaccatg

SEQ ID NO: 1254203 - DNA, 25 bp, Homo sapien
aagttgtcatcatcgcgggaaggga

SEQ ID NO: 1254204 - DNA, 25 bp, Homo sapien
ccattggatacaagaagttgtcatc

SEQ ID NO: 1254205 - DNA, 25 bp, Homo sapien
agaagttgtcatcatcgcgggaagg

SEQ ID NO: 1254206 - DNA, 25 bp, Homo sapien
tgttgcccattggatacaagaagtt

SEQ ID NO: 1254207 - DNA, 25 bp, Homo sapien
agcagctgggacgacaaatcctcct

SEQ ID NO: 1254208 - DNA, 25 bp, Homo sapien
tcaagcagctgggacgacaaatcct

SEQ ID NO: 1254209 - DNA, 25 bp, Homo sapien
tcctcctttgaagggtggtcaggtg

SEQ ID NO: 1254210 - DNA, 25 bp, Homo sapien
caaatcctcctttgaagggtggtca

SEQ ID NO: 1254211 - DNA, 25 bp, Homo sapien
cgttactgaagcatttagcatcccc

SEQ ID NO: 1254212 - DNA, 25 bp, Homo sapien
tcatcccgagactcaggtggcgtta

SEQ ID NO: 1254213 - DNA, 25 bp, Homo sapien
tcaaagggcgatgaataatgttgct

SEQ ID NO: 1254214 - DNA, 25 bp, Homo sapien
tttcatcagtgccagtgccgcagat

SEQ ID NO: 1254215 - DNA, 25 bp, Homo sapien
gctggcccgtcgctgtgtggttctc

SEQ ID NO: 1254216 - DNA, 25 bp, Homo sapien
tccacaccacaggtaaggaaagacg

SEQ ID NO: 1254217 - DNA, 25 bp, Homo sapien
gattactagtcgtgactggcctcac

SEQ ID NO: 1254218 - DNA, 25 bp, Homo sapien
actaagattctgtgacccgcagccc

SEQ ID NO: 1254219 - DNA, 25 bp, Homo sapien
gaaccagggcttagcaaaaagccat

SEQ ID NO: 1254220 - DNA, 25 bp, Homo sapien
aagcagcctggactttcgggaccct

SEQ ID NO: 1254221 - DNA, 25 bp, Homo sapien
ggtgtccaccgagcgaggattcttt

SEQ ID NO: 1254222 - DNA, 25 bp, Homo sapien
tctccacatgtggtcctggcgggtc

SEQ ID NO: 1254223 - DNA, 25 bp, Homo sapien
ctcggcggccctcgtcccctaagtg

SEQ ID NO: 1254224 - DNA, 25 bp, Homo sapien
cttccggccacgggacgagcccttg

SEQ ID NO: 1254225 - DNA, 25 bp, Homo sapien
ggaaggcgctccgcgctggctcggc

SEQ ID NO: 1254226 - DNA, 25 bp, Homo sapien
gccacgggacgagcccttggtgccg

SEQ ID NO: 1254227 - DNA, 25 bp, Homo sapien
gagcggaaggagatgggttcggaaa

SEQ ID NO: 1254228 - DNA, 25 bp, Homo sapien
gcgggagagcggaaggagatgggtt

SEQ ID NO: 1254229 - DNA, 25 bp, Homo sapien
gaggtgggggcgtaaccgagccaga

SEQ ID NO: 1254230 - DNA, 25 bp, Homo sapien
gggcgtaaccgagccagacagcccc

SEQ ID NO: 1254231 - DNA, 25 bp, Homo sapien
gtcgaacgggtcacactttcttcca

SEQ ID NO: 1254232 - DNA, 25 bp, Homo sapien
actttcttccaagctcggcacacag

SEQ ID NO: 1254233 - DNA, 25 bp, Homo sapien
catgtcctttgttccgtcgaacggg

SEQ ID NO: 1254234 - DNA, 25 bp, Homo sapien
gggccgggctgtcatgtcctttgtt

SEQ ID NO: 1254235 - DNA, 25 bp, Homo sapien
gggtcgcggaagcagaagcccggct

SEQ ID NO: 1254236 - DNA, 25 bp, Homo sapien
cgccggccgccattttagggaatgt

SEQ ID NO: 1254237 - DNA, 25 bp, Homo sapien
gcggaagcagaagcccggctggccg

SEQ ID NO: 1254238 - DNA, 25 bp, Homo sapien
ctcccgccctgttccgacgcgccgg

SEQ ID NO: 1254239 - DNA, 25 bp, Homo sapien
tgttaggcagaggaatgaaaactgt

SEQ ID NO: 1254240 - DNA, 25 bp, Homo sapien
tagctttactataccaagaatttgg

SEQ ID NO: 1254241 - DNA, 25 bp, Homo sapien
cttaaagagataggatgggctgcta

SEQ ID NO: 1254242 - DNA, 25 bp, Homo sapien
ggagagcgcttggtttagctttact

SEQ ID NO: 1254243 - DNA, 25 bp, Homo sapien
ataaatgtaacgacgtacaagatgc

SEQ ID NO: 1254244 - DNA, 25 bp, Homo sapien
tatgataaatgtaacgacgtacaag

SEQ ID NO: 1254245 - DNA, 25 bp, Homo sapien
caatatgataaatgtaacgacgtac

SEQ ID NO: 1254246 - DNA, 25 bp, Homo sapien
tccaatatgataaatgtaacgacgt

SEQ ID NO: 1254247 - DNA, 25 bp, Homo sapien
cagataaggcaccagtagtacgtaa

SEQ ID NO: 1254248 - DNA, 25 bp, Homo sapien
cactaagcttattccagatgggcag

SEQ ID NO: 1254249 - DNA, 25 bp, Homo sapien
cccaccagagaagcaagcaagagca

SEQ ID NO: 1254250 - DNA, 25 bp, Homo sapien
taggttccctgctcttaataaggag

SEQ ID NO: 1254251 - DNA, 25 bp, Homo sapien
tagtctcttcctaggtatcccaagg

SEQ ID NO: 1254252 - DNA, 25 bp, Homo sapien
acttggcttcaaatacgtctcctgg

SEQ ID NO: 1254253 - DNA, 25 bp, Homo sapien
tgtataaaaagcaccttgaacctcg

SEQ ID NO: 1254254 - DNA, 25 bp, Homo sapien
tcacttgagtgaggcatctatccac

SEQ ID NO: 1254255 - DNA, 25 bp, Homo sapien
gaagtcagtttcaccacaaagccta

SEQ ID NO: 1254256 - DNA, 25 bp, Homo sapien
tctagggcggcaagacagacattta

SEQ ID NO: 1254257 - DNA, 25 bp, Homo sapien
gagaccagcttgtaccacaggatag

SEQ ID NO: 1254258 - DNA, 25 bp, Homo sapien
gacgactttttcctatcagcttgag

SEQ ID NO: 1254259 - DNA, 25 bp, Homo sapien
gatcctaatgaaccatacaatattg

SEQ ID NO: 1254260 - DNA, 25 bp, Homo sapien
gccacaacagatcctaatgaaccat

SEQ ID NO: 1254261 - DNA, 25 bp, Homo sapien
aaagccagccacaacagatcctaat

SEQ ID NO: 1254262 - DNA, 25 bp, Homo sapien
tacaatattgaatgccgggcgcagg

SEQ ID NO: 1254263 - DNA, 25 bp, Homo sapien
aaaaaatagttcattatgtagagaa

SEQ ID NO: 1254264 - DNA, 25 bp, Homo sapien
taattacgttatatacattactcca

SEQ ID NO: 1254265 - DNA, 25 bp, Homo sapien
tatatacattactccacctagaaaa

SEQ ID NO: 1254266 - DNA, 25 bp, Homo sapien
gtagagaaatgctttttttagtaca

SEQ ID NO: 1254267 - DNA, 25 bp, Homo sapien
tccaacatcacatgatcttctaatt

SEQ ID NO: 1254268 - DNA, 25 bp, Homo sapien
catcccaaagtcaccaagataaacc

SEQ ID NO: 1254269 - DNA, 25 bp, Homo sapien
agcatcccaaagtcaccaagataaa

SEQ ID NO: 1254270 - DNA, 25 bp, Homo sapien
aagataaaccctcctactccaacat

SEQ ID NO: 1254271 - DNA, 25 bp, Homo sapien
cactcatcagtagttgtaaacacat

SEQ ID NO: 1254272 - DNA, 25 bp, Homo sapien
ctcccaatgggagactgctctgaaa

SEQ ID NO: 1254273 - DNA, 25 bp, Homo sapien
ttttcagatatgaataagcagggat

SEQ ID NO: 1254274 - DNA, 25 bp, Homo sapien
aaatggttgaggctttcctaagtga

SEQ ID NO: 1254275 - DNA, 25 bp, Homo sapien
tacatatcatactcttaggtctggc

SEQ ID NO: 1254276 - DNA, 25 bp, Homo sapien
caagtatttgctctcgtttttaacg

SEQ ID NO: 1254277 - DNA, 25 bp, Homo sapien
tttggtgtcagaatacctatcaaca

SEQ ID NO: 1254278 - DNA, 25 bp, Homo sapien
atgactactaccctgagactgaaaa

SEQ ID NO: 1254279 - DNA, 25 bp, Homo sapien
tctttcaggatcgaggtgggtacct

SEQ ID NO: 1254280 - DNA, 25 bp, Homo sapien
tcaggatcgaggtgggtaccttcat

SEQ ID NO: 1254281 - DNA, 25 bp, Homo sapien
ctttcaggatcgaggtgggtacctt

SEQ ID NO: 1254282 - DNA, 25 bp, Homo sapien
ttcaggatcgaggtgggtaccttca

SEQ ID NO: 1254283 - DNA, 25 bp, Homo sapien
gtggttgatcttaacttcgtttaca

SEQ ID NO: 1254284 - DNA, 25 bp, Homo sapien
gattgagagcttattgcacatgaaa

SEQ ID NO: 1254285 - DNA, 25 bp, Homo sapien
aaactttatttacttgattgagagc

SEQ ID NO: 1254286 - DNA, 25 bp, Homo sapien
attgcacatgaaatgttttatgtgg

SEQ ID NO: 1254287 - DNA, 25 bp, Homo sapien
tactacaaggaaactccaagtacat

SEQ ID NO: 1254288 - DNA, 25 bp, Homo sapien
gacaagtccactatatgtaacacgt

SEQ ID NO: 1254289 - DNA, 25 bp, Homo sapien
taagaatgctatcctggcagtagac

SEQ ID NO: 1254290 - DNA, 25 bp, Homo sapien
taagggacgtttacttatcatcaaa

SEQ ID NO: 1254291 - DNA, 25 bp, Homo sapien
taatggccacaatcctgttgactgc

SEQ ID NO: 1254292 - DNA, 25 bp, Homo sapien
aaaactgagcataagtggcctgtcc

SEQ ID NO: 1254293 - DNA, 25 bp, Homo sapien
tgttgactgctgttaccttcgcccc

SEQ ID NO: 1254294 - DNA, 25 bp, Homo sapien
ttctcccggagaataaatcctgagg

SEQ ID NO: 1254295 - DNA, 25 bp, Homo sapien
gtatgttacacgtcagccctccatg

SEQ ID NO: 1254296 - DNA, 25 bp, Homo sapien
taattgcagtgtgctagcgctggaa

SEQ ID NO: 1254297 - DNA, 25 bp, Homo sapien
tgcaaacttctgtgaaaatgagctt

SEQ ID NO: 1254298 - DNA, 25 bp, Homo sapien
tttaccagccaaaacagagtttctc

SEQ ID NO: 1254299 - DNA, 25 bp, Homo sapien
tggaacaatgaaggaagctgtacac

SEQ ID NO: 1254300 - DNA, 25 bp, Homo sapien
taggtatgatagataagccacaaga

SEQ ID NO: 1254301 - DNA, 25 bp, Homo sapien
cacctagtgtgacatttcggaatta

SEQ ID NO: 1254302 - DNA, 25 bp, Homo sapien
gctatttagctggtacctactgcta

SEQ ID NO: 1254303 - DNA, 25 bp, Homo sapien
tggagtagaggtacgtagactaaag

SEQ ID NO: 1254304 - DNA, 25 bp, Homo sapien
acctagggatagtcacattttcttg

SEQ ID NO: 1254305 - DNA, 25 bp, Homo sapien
agagatgcttgcaaatgatggtacc

SEQ ID NO: 1254306 - DNA, 25 bp, Homo sapien
tagaggtacgtagactaaagagatg

SEQ ID NO: 1254307 - DNA, 25 bp, Homo sapien
aagtgaacaatagaaacctctctca

SEQ ID NO: 1254308 - DNA, 25 bp, Homo sapien
cccctgagggtgtgccatataatag

SEQ ID NO: 1254309 - DNA, 25 bp, Homo sapien
taataggtgactgataacatacagg

SEQ ID NO: 1254310 - DNA, 25 bp, Homo sapien
gaacagatatcacccattacattga

SEQ ID NO: 1254311 - DNA, 25 bp, Homo sapien
tggacaaatcctgactacccagagg

SEQ ID NO: 1254312 - DNA, 25 bp, Homo sapien
aaactcactgtgagattgctgttga

SEQ ID NO: 1254313 - DNA, 25 bp, Homo sapien
gctgagtgtaaactggctttggatt

SEQ ID NO: 1254314 - DNA, 25 bp, Homo sapien
taaagtagaataacacatgctgagt

SEQ ID NO: 1254315 - DNA, 25 bp, Homo sapien
cacagagaataacagtcgggagtca

SEQ ID NO: 1254316 - DNA, 25 bp, Homo sapien
gaagttagccatgtctgtatgccct

SEQ ID NO: 1254317 - DNA, 25 bp, Homo sapien
cctcagcattgtgcacgataagaga

SEQ ID NO: 1254318 - DNA, 25 bp, Homo sapien
gactaagtggtcctcatgaattgca

SEQ ID NO: 1254319 - DNA, 25 bp, Homo sapien
taatgtggcactggtaaatctacct

SEQ ID NO: 1254320 - DNA, 25 bp, Homo sapien
tattaacagcattagacggccaggt

SEQ ID NO: 1254321 - DNA, 25 bp, Homo sapien
gatcgtctcagtgcttcttccctta

SEQ ID NO: 1254322 - DNA, 25 bp, Homo sapien
taatttggtcgtggcctcccttcag

SEQ ID NO: 1254323 - DNA, 25 bp, Homo sapien
tataaataagttgctaggaattggc

SEQ ID NO: 1254324 - DNA, 25 bp, Homo sapien
ttcaaaagtatcagctatggtgtca

SEQ ID NO: 1254325 - DNA, 25 bp, Homo sapien
tagatggaaggcattggagcttagc

SEQ ID NO: 1254326 - DNA, 25 bp, Homo sapien
gtcagcctgctgtgttagatggaag

SEQ ID NO: 1254327 - DNA, 25 bp, Homo sapien
gactagctaacggaaacttgtaaca

SEQ ID NO: 1254328 - DNA, 25 bp, Homo sapien
taatatttagcacgtcatcagttgt

SEQ ID NO: 1254329 - DNA, 25 bp, Homo sapien
tcttccaaagacctgaggcagcagc

SEQ ID NO: 1254330 - DNA, 25 bp, Homo sapien
gcttaagtgcagcaaaacttgggtt

SEQ ID NO: 1254331 - DNA, 25 bp, Homo sapien
tgtctttagactgcgtcactagcgc

SEQ ID NO: 1254332 - DNA, 25 bp, Homo sapien
tctgcgctctcttcgggatacacgt

SEQ ID NO: 1254333 - DNA, 25 bp, Homo sapien
tcgaatcatcgaggagactggcaaa

SEQ ID NO: 1254334 - DNA, 25 bp, Homo sapien
aaagaccacgagaagatcatggccg

SEQ ID NO: 1254335 - DNA, 25 bp, Homo sapien
ccacctcgctgttcgcggtgacggt

SEQ ID NO: 1254336 - DNA, 25 bp, Homo sapien
aacggcgacgatcagggtttccagg

SEQ ID NO: 1254337 - DNA, 25 bp, Homo sapien
gaggaaggaatctccgctctggacg

SEQ ID NO: 1254338 - DNA, 25 bp, Homo sapien
tctggacggcgaccagatggagcta

SEQ ID NO: 1254339 - DNA, 25 bp, Homo sapien
tctgacaagggtctcaaggccgagc

SEQ ID NO: 1254340 - DNA, 25 bp, Homo sapien
aaagctgaaggtgtcggagctgaaa

SEQ ID NO: 1254341 - DNA, 25 bp, Homo sapien
gagttcctcgcctgttaatgtaaaa

SEQ ID NO: 1254342 - DNA, 25 bp, Homo sapien
aggagctcaagaagcgacgcctttc

SEQ ID NO: 1254343 - DNA, 25 bp, Homo sapien
cagccgccaccagtggccgagtgag

SEQ ID NO: 1254344 - DNA, 25 bp, Homo sapien
gccgagtgagcggagccgagtttga

SEQ ID NO: 1254345 - DNA, 25 bp, Homo sapien
agcggagccgagtttgaggcagcgc

SEQ ID NO: 1254346 - DNA, 25 bp, Homo sapien
ctgcagcacgaacccatctccagcc

SEQ ID NO: 1254347 - DNA, 25 bp, Homo sapien
ggaattggcgccgttcgacaccagg

SEQ ID NO: 1254348 - DNA, 25 bp, Homo sapien
gtgaaaggaattggcgccgttcgac

SEQ ID NO: 1254349 - DNA, 25 bp, Homo sapien
tcggtgaaaggaattggcgccgttc

SEQ ID NO: 1254350 - DNA, 25 bp, Homo sapien
tggcgccgttcgacaccaggcggat

SEQ ID NO: 1254351 - DNA, 25 bp, Homo sapien
cgcctatattacgtgcgcggcgccg

SEQ ID NO: 1254352 - DNA, 25 bp, Homo sapien
tcctgcgagaggacgttgcgtgctc

SEQ ID NO: 1254353 - DNA, 25 bp, Homo sapien
tgcgcagtgctcccgtcagcgcagg

SEQ ID NO: 1254354 - DNA, 25 bp, Homo sapien
gctccggctttcctcctgcgcagtg

SEQ ID NO: 1254355 - DNA, 25 bp, Homo sapien
gagccgctgcgtgtaacagttgcca

SEQ ID NO: 1254356 - DNA, 25 bp, Homo sapien
taaaatccaattcgcaaggcaggac

SEQ ID NO: 1254357 - DNA, 25 bp, Homo sapien
taagagcatgagaatagctgccctg

SEQ ID NO: 1254358 - DNA, 25 bp, Homo sapien
gaaagcatttggataaagcagcctc

SEQ ID NO: 1254359 - DNA, 25 bp, Homo sapien
gatgaccaggtcctaaagtggacag

SEQ ID NO: 1254360 - DNA, 25 bp, Homo sapien
gaggtccgtctttgtggtagctaca

SEQ ID NO: 1254361 - DNA, 25 bp, Homo sapien
tactgggacttcgtagctgatgacc

SEQ ID NO: 1254362 - DNA, 25 bp, Homo sapien
tcaagtgggcctataatcaaagacc

SEQ ID NO: 1254363 - DNA, 25 bp, Homo sapien
ttccaagagtgactgttacagatct

SEQ ID NO: 1254364 - DNA, 25 bp, Homo sapien
gggctatcctcaccacttaacttga

SEQ ID NO: 1254365 - DNA, 25 bp, Homo sapien
tgcaactgacttaatgttccaagag

SEQ ID NO: 1254366 - DNA, 25 bp, Homo sapien
tctagtttgtgaacatgtaaacccc

SEQ ID NO: 1254367 - DNA, 25 bp, Homo sapien
ggttatgctgagagctaaaggctga

SEQ ID NO: 1254368 - DNA, 25 bp, Homo sapien
ctgggaacaagtgggtcccttcatc

SEQ ID NO: 1254369 - DNA, 25 bp, Homo sapien
gcaggacaccaacgcaggctctggg

SEQ ID NO: 1254370 - DNA, 25 bp, Homo sapien
aagagtatttccatggcaggcagga

SEQ ID NO: 1254371 - DNA, 25 bp, Homo sapien
ttttcatgcaacacaagagctgcca

SEQ ID NO: 1254372 - DNA, 25 bp, Homo sapien
tgggtgagcctgtgctattctggtt

SEQ ID NO: 1254373 - DNA, 25 bp, Homo sapien
aagagtatagggtacattttccagg

SEQ ID NO: 1254374 - DNA, 25 bp, Homo sapien
ctgtgttttcgtgagtgggtgagcc

SEQ ID NO: 1254375 - DNA, 25 bp, Homo sapien
actgtgatttctacatggctcaaat

SEQ ID NO: 1254376 - DNA, 25 bp, Homo sapien
tgatgcagactctcatctctatctc

SEQ ID NO: 1254377 - DNA, 25 bp, Homo sapien
tcttgtatctgtcacgatgatgcag

SEQ ID NO: 1254378 - DNA, 25 bp, Homo sapien
aattgcatgaatcccagtgactgtg

SEQ ID NO: 1254379 - DNA, 25 bp, Homo sapien
gaaccagaagaaccttacggcagtg

SEQ ID NO: 1254380 - DNA, 25 bp, Homo sapien
cagaataatgatgcgaggcctgaca

SEQ ID NO: 1254381 - DNA, 25 bp, Homo sapien
tccacaagctggcaaaggatccaag

SEQ ID NO: 1254382 - DNA, 25 bp, Homo sapien
gcaagttccctcgtgctggatgaaa

SEQ ID NO: 1254383 - DNA, 25 bp, Homo sapien
gtgggtgtgcgcgcccccgagctgc

SEQ ID NO: 1254384 - DNA, 25 bp, Homo sapien
ggtgtgcgcgcccccgagctgccgg

SEQ ID NO: 1254385 - DNA, 25 bp, Homo sapien
tgggtgtgcgcgcccccgagctgcc

SEQ ID NO: 1254386 - DNA, 25 bp, Homo sapien
tgtgggtgtgcgcgcccccgagctg

SEQ ID NO: 1254387 - DNA, 25 bp, Homo sapien
ccaacgcacccagccttaatttttg

SEQ ID NO: 1254388 - DNA, 25 bp, Homo sapien
tcaaactcctgacttcaggtgatgt

SEQ ID NO: 1254389 - DNA, 25 bp, Homo sapien
tgagccaacgcacccagccttaatt

SEQ ID NO: 1254390 - DNA, 25 bp, Homo sapien
caaactcctgacttcaggtgatgta

SEQ ID NO: 1254391 - DNA, 25 bp, Homo sapien
gggacacgtgcctagtcagccaggt

SEQ ID NO: 1254392 - DNA, 25 bp, Homo sapien
cacagcttcgggaggcgagggagga

SEQ ID NO: 1254393 - DNA, 25 bp, Homo sapien
atggttgtcctcttaaaccaagcgc

SEQ ID NO: 1254394 - DNA, 25 bp, Homo sapien
tgtcctcttaaaccaagcgcacagc

SEQ ID NO: 1254395 - DNA, 25 bp, Homo sapien
taaccctgcatgtaagtatgaagct

SEQ ID NO: 1254396 - DNA, 25 bp, Homo sapien
tcctaacgtgtatcaggcaacaggc

SEQ ID NO: 1254397 - DNA, 25 bp, Homo sapien
ttactatggagcatgtgagcgttgc

SEQ ID NO: 1254398 - DNA, 25 bp, Homo sapien
tagaatcagtgtgtgcctgcgcttc

SEQ ID NO: 1254399 - DNA, 25 bp, Homo sapien
tatggaaagcttcatgaattcatgt

SEQ ID NO: 1254400 - DNA, 25 bp, Homo sapien
gaattcatgtatcatccttgctcag

SEQ ID NO: 1254401 - DNA, 25 bp, Homo sapien
atgaattcatgtatcatccttgctc

SEQ ID NO: 1254402 - DNA, 25 bp, Homo sapien
ggaaagcttcatgaattcatgtatc

SEQ ID NO: 1254403 - DNA, 25 bp, Homo sapien
tatgacatgcgatctggtttacacc

SEQ ID NO: 1254404 - DNA, 25 bp, Homo sapien
cttgtttccaccttgctattcagga

SEQ ID NO: 1254405 - DNA, 25 bp, Homo sapien
ggtttacaccgtacagcttatcatc

SEQ ID NO: 1254406 - DNA, 25 bp, Homo sapien
tgctgtaatctgctgcctgtatgac

SEQ ID NO: 1254407 - DNA, 25 bp, Homo sapien
caagggggtgatagaaccagcccgc

SEQ ID NO: 1254408 - DNA, 25 bp, Homo sapien
cagattttgaaaagcgccggagagc

SEQ ID NO: 1254409 - DNA, 25 bp, Homo sapien
ggcgttgctcgatttttgttgttaa

SEQ ID NO: 1254410 - DNA, 25 bp, Homo sapien
tcctgtttgtgcgacgtggcgttgc

SEQ ID NO: 1254411 - DNA, 25 bp, Homo sapien
cgaccctcgcgctgggggaagacca

SEQ ID NO: 1254412 - DNA, 25 bp, Homo sapien
ccgggcctagcatgttgcttcatca

SEQ ID NO: 1254413 - DNA, 25 bp, Homo sapien
aggaggctccgagcgcgcgccctgt

SEQ ID NO: 1254414 - DNA, 25 bp, Homo sapien
gagccggacttgtcccgggcctagc

SEQ ID NO: 1254415 - DNA, 25 bp, Homo sapien
gagatgcctaacgataacctcggcc

SEQ ID NO: 1254416 - DNA, 25 bp, Homo sapien
cgcctgggagatgcctaacgataac

SEQ ID NO: 1254417 - DNA, 25 bp, Homo sapien
ctaacgataacctcggccgcggtgt

SEQ ID NO: 1254418 - DNA, 25 bp, Homo sapien
agccggtcgcctgggagatgcctaa

SEQ ID NO: 1254419 - DNA, 25 bp, Homo sapien
cttccctgtccttctcgtccgccat

SEQ ID NO: 1254420 - DNA, 25 bp, Homo sapien
gcagcccgcgcaggatgcaaggccc

SEQ ID NO: 1254421 - DNA, 25 bp, Homo sapien
gcccgcgcaggatgcaaggcccggc

SEQ ID NO: 1254422 - DNA, 25 bp, Homo sapien
agcccgcgcaggatgcaaggcccgg

SEQ ID NO: 1254423 - DNA, 25 bp, Homo sapien
cgcagcccgcgcaggatgcaaggcc

SEQ ID NO: 1254424 - DNA, 25 bp, Homo sapien
caccgagaccccaggcgagagtgtg

SEQ ID NO: 1254425 - DNA, 25 bp, Homo sapien
aggcaaaatggtggccgcgaacgcc

SEQ ID NO: 1254426 - DNA, 25 bp, Homo sapien
gcgcaaacagaggatcccgtcagat

SEQ ID NO: 1254427 - DNA, 25 bp, Homo sapien
ccgtcagattcaggcggccagaact

SEQ ID NO: 1254428 - DNA, 25 bp, Homo sapien
gaccacacttggttctatgctgaga

SEQ ID NO: 1254429 - DNA, 25 bp, Homo sapien
gattttctgtgatcaccggaacaag

SEQ ID NO: 1254430 - DNA, 25 bp, Homo sapien
gaacaagtgactaaatatctcaggg

SEQ ID NO: 1254431 - DNA, 25 bp, Homo sapien
gagagggtgttttgagcactccaga

SEQ ID NO: 1254432 - DNA, 25 bp, Homo sapien
aatgtggcccaatttagctttagaa

SEQ ID NO: 1254433 - DNA, 25 bp, Homo sapien
tggcccaatttagctttagaatgag

SEQ ID NO: 1254434 - DNA, 25 bp, Homo sapien
tgtggcccaatttagctttagaatg

SEQ ID NO: 1254435 - DNA, 25 bp, Homo sapien
ggcccaatttagctttagaatgagc

SEQ ID NO: 1254436 - DNA, 25 bp, Homo sapien
tgacacttctcagcttcagtgcccc

SEQ ID NO: 1254437 - DNA, 25 bp, Homo sapien
cacactgttgctaaagtggtgggca

SEQ ID NO: 1254438 - DNA, 25 bp, Homo sapien
catccttcacactgttgctaaagtg

SEQ ID NO: 1254439 - DNA, 25 bp, Homo sapien
tgctaaagtggtgggcacaatatgt

SEQ ID NO: 1254440 - DNA, 25 bp, Homo sapien
gttccccataacaccgtcattgtgt

SEQ ID NO: 1254441 - DNA, 25 bp, Homo sapien
tgttcgatcagtaaagtccgaggcc

SEQ ID NO: 1254442 - DNA, 25 bp, Homo sapien
tcttccaccttccattagatgttcg

SEQ ID NO: 1254443 - DNA, 25 bp, Homo sapien
attgtgtgatggtctcttcttccac

SEQ ID NO: 1254444 - DNA, 25 bp, Homo sapien
ggttagcaatagagagctccccatt

SEQ ID NO: 1254445 - DNA, 25 bp, Homo sapien
tagagagctccccattgctactcat

SEQ ID NO: 1254446 - DNA, 25 bp, Homo sapien
gggaaggttagcaatagagagctcc

SEQ ID NO: 1254447 - DNA, 25 bp, Homo sapien
acttggggaaggttagcaatagaga

SEQ ID NO: 1254448 - DNA, 25 bp, Homo sapien
tgcaaacaattttccaggtcagttg

SEQ ID NO: 1254449 - DNA, 25 bp, Homo sapien
catttcctttctgatgatcaaaatc

SEQ ID NO: 1254450 - DNA, 25 bp, Homo sapien
tctgatgatcaaaatcatacacaat

SEQ ID NO: 1254451 - DNA, 25 bp, Homo sapien
attttccaggtcagttgtttgaact

SEQ ID NO: 1254452 - DNA, 25 bp, Homo sapien
ctctaaattgtgctaagcatgggag

SEQ ID NO: 1254453 - DNA, 25 bp, Homo sapien
ggacaataatgtaattaagtctcta

SEQ ID NO: 1254454 - DNA, 25 bp, Homo sapien
taaattgtgctaagcatgggagctc

SEQ ID NO: 1254455 - DNA, 25 bp, Homo sapien
gctaagcatgggagctcatgcctat

SEQ ID NO: 1254456 - DNA, 25 bp, Homo sapien
cacatccactgtattattcgactca

SEQ ID NO: 1254457 - DNA, 25 bp, Homo sapien
ctcacatccactgtattattcgact

SEQ ID NO: 1254458 - DNA, 25 bp, Homo sapien
cactgtattattcgactcatggtca

SEQ ID NO: 1254459 - DNA, 25 bp, Homo sapien
ttattcgactcatggtcaaagactt

SEQ ID NO: 1254460 - DNA, 25 bp, Homo sapien
cagtattcatgtcttctcttgcctt

SEQ ID NO: 1254461 - DNA, 25 bp, Homo sapien
tgcctttttatgttcttctgtttgg

SEQ ID NO: 1254462 - DNA, 25 bp, Homo sapien
tcttgcctttttatgttcttctgtt

SEQ ID NO: 1254463 - DNA, 25 bp, Homo sapien
agtattcatgtcttctcttgccttt

SEQ ID NO: 1254464 - DNA, 25 bp, Homo sapien
tttagtatatgtgctgcccaagcaa

SEQ ID NO: 1254465 - DNA, 25 bp, Homo sapien
atgctaatctctgtagcgttccaat

SEQ ID NO: 1254466 - DNA, 25 bp, Homo sapien
ccatgctaatctctgtagcgttcca

SEQ ID NO: 1254467 - DNA, 25 bp, Homo sapien
tatatgtgctgcccaagcaagcaca

SEQ ID NO: 1254468 - DNA, 25 bp, Homo sapien
gacagccaataccaagatttaacag

SEQ ID NO: 1254469 - DNA, 25 bp, Homo sapien
tatatatggtactatgtttccgtcc

SEQ ID NO: 1254470 - DNA, 25 bp, Homo sapien
cacaccactattctgaggataatcc

SEQ ID NO: 1254471 - DNA, 25 bp, Homo sapien
tacaggagaaaatacgacagccaat

SEQ ID NO: 1254472 - DNA, 25 bp, Homo sapien
gaacccatgaggaggtagacgcaaa

SEQ ID NO: 1254473 - DNA, 25 bp, Homo sapien
cacagcaggatcaaatcagtcggga

SEQ ID NO: 1254474 - DNA, 25 bp, Homo sapien
tgcagaatcacaaagcatctgaacc

SEQ ID NO: 1254475 - DNA, 25 bp, Homo sapien
gtagacgcaaaggagtaggagacac

SEQ ID NO: 1254476 - DNA, 25 bp, Homo sapien
tgaattacagcacttacagcctggc

SEQ ID NO: 1254477 - DNA, 25 bp, Homo sapien
gactggtttcattactgcatggcac

SEQ ID NO: 1254478 - DNA, 25 bp, Homo sapien
taatgaattcccatgctacctgggc

SEQ ID NO: 1254479 - DNA, 25 bp, Homo sapien
tgcatggcacctctgaacacttgtt

SEQ ID NO: 1254480 - DNA, 25 bp, Homo sapien
atgtggatattcagtcatcctagca

SEQ ID NO: 1254481 - DNA, 25 bp, Homo sapien
tggatattcagtcatcctagcatca

SEQ ID NO: 1254482 - DNA, 25 bp, Homo sapien
tattcagtcatcctagcatcatgtg

SEQ ID NO: 1254483 - DNA, 25 bp, Homo sapien
ttcagtcatcctagcatcatgtgtt

SEQ ID NO: 1254484 - DNA, 25 bp, Homo sapien
gattttctcggttccggaggccaga

SEQ ID NO: 1254485 - DNA, 25 bp, Homo sapien
ccagaggtcccagataaaggtgtca

SEQ ID NO: 1254486 - DNA, 25 bp, Homo sapien
cacttttcatgtgccatggcgcagg

SEQ ID NO: 1254487 - DNA, 25 bp, Homo sapien
gagatcagcaccatacccatgattg

SEQ ID NO: 1254488 - DNA, 25 bp, Homo sapien
cctgtgtaggtgccacgctcatctt

SEQ ID NO: 1254489 - DNA, 25 bp, Homo sapien
gcctgtgtaggtgccacgctcatct

SEQ ID NO: 1254490 - DNA, 25 bp, Homo sapien
ctgtgtaggtgccacgctcatcttc

SEQ ID NO: 1254491 - DNA, 25 bp, Homo sapien
agcctgtgtaggtgccacgctcatc

SEQ ID NO: 1254492 - DNA, 25 bp, Homo sapien
gatccagggccgcaaattgttgacc

SEQ ID NO: 1254493 - DNA, 25 bp, Homo sapien
tgttgacccaagtgacaaatttggc

SEQ ID NO: 1254494 - DNA, 25 bp, Homo sapien
caccccacgggagctttgaccgtag

SEQ ID NO: 1254495 - DNA, 25 bp, Homo sapien
aaagctgtggatattccaccccacg

SEQ ID NO: 1254496 - DNA, 25 bp, Homo sapien
ttctccagccgactgacctctgctt

SEQ ID NO: 1254497 - DNA, 25 bp, Homo sapien
tcaggctccctgctgtgcgcagtca

SEQ ID NO: 1254498 - DNA, 25 bp, Homo sapien
tgtgcgcagtcaacacaaggcatgg

SEQ ID NO: 1254499 - DNA, 25 bp, Homo sapien
taaaacctgcacttctccagagctg

SEQ ID NO: 1254500 - DNA, 25 bp, Homo sapien
cttgcaggcattaagcaacttcttt

SEQ ID NO: 1254501 - DNA, 25 bp, Homo sapien
tctttctctctagtctcgaatcaca

SEQ ID NO: 1254502 - DNA, 25 bp, Homo sapien
ctctctagtctcgaatcacaaaggc

SEQ ID NO: 1254503 - DNA, 25 bp, Homo sapien
tgcaggcattaagcaacttctttct

SEQ ID NO: 1254504 - DNA, 25 bp, Homo sapien
gaaaacaaagcccacgtgattgaca

SEQ ID NO: 1254505 - DNA, 25 bp, Homo sapien
cccagaaaacaaagcccacgtgatt

SEQ ID NO: 1254506 - DNA, 25 bp, Homo sapien
aaaacaaagcccacgtgattgacat

SEQ ID NO: 1254507 - DNA, 25 bp, Homo sapien
cagaaaacaaagcccacgtgattga

SEQ ID NO: 1254508 - DNA, 25 bp, Homo sapien
ggacagcatcctaatgacctgataa

SEQ ID NO: 1254509 - DNA, 25 bp, Homo sapien
ttccgtaggacagcatcctaatgac

SEQ ID NO: 1254510 - DNA, 25 bp, Homo sapien
tcctaatgacctgataattgttcca

SEQ ID NO: 1254511 - DNA, 25 bp, Homo sapien
tgcagctctccttccgtaggacagc

SEQ ID NO: 1254512 - DNA, 25 bp, Homo sapien
ctgaatgaaaccttttcgccgtact

SEQ ID NO: 1254513 - DNA, 25 bp, Homo sapien
tgaatgaaaccttttcgccgtactc

SEQ ID NO: 1254514 - DNA, 25 bp, Homo sapien
ctgatgctactcgaagtaatggctg

SEQ ID NO: 1254515 - DNA, 25 bp, Homo sapien
gatgctactcgaagtaatggctgga

SEQ ID NO: 1254516 - DNA, 25 bp, Homo sapien
tactcgaagtaatggctggatggta

SEQ ID NO: 1254517 - DNA, 25 bp, Homo sapien
gctactcgaagtaatggctggatgg

SEQ ID NO: 1254518 - DNA, 25 bp, Homo sapien
gaatacaaatcacgcagggattcga

SEQ ID NO: 1254519 - DNA, 25 bp, Homo sapien
tgtgaccactagacaactttttgaa

SEQ ID NO: 1254520 - DNA, 25 bp, Homo sapien
gggattcgatcctgtcatctacaga

SEQ ID NO: 1254521 - DNA, 25 bp, Homo sapien
tagagacgagcacaaagaatacaaa

SEQ ID NO: 1254522 - DNA, 25 bp, Homo sapien
cgcagggaattcatcttaacagtgt

SEQ ID NO: 1254523 - DNA, 25 bp, Homo sapien
gctaaaagtaccattcgcagggaat

SEQ ID NO: 1254524 - DNA, 25 bp, Homo sapien
taacagtgtgccagcagatgctcac

SEQ ID NO: 1254525 - DNA, 25 bp, Homo sapien
gatccctcgagtgtagcctgctaaa

SEQ ID NO: 1254526 - DNA, 25 bp, Homo sapien
ttgtttcttctatgggaagggctaa

SEQ ID NO: 1254527 - DNA, 25 bp, Homo sapien
tttgtttcttctatgggaagggcta

SEQ ID NO: 1254528 - DNA, 25 bp, Homo sapien
tgtttcttctatgggaagggctaac

SEQ ID NO: 1254529 - DNA, 25 bp, Homo sapien
gagcacagctgatactctgatcagg

SEQ ID NO: 1254530 - DNA, 25 bp, Homo sapien
cttcatcattcaactggagcacagc

SEQ ID NO: 1254531 - DNA, 25 bp, Homo sapien
atcattcaactggagcacagctgat

SEQ ID NO: 1254532 - DNA, 25 bp, Homo sapien
aactggagcacagctgatactctga

SEQ ID NO: 1254533 - DNA, 25 bp, Homo sapien
tctagtagtatttctgtcatcaccg

SEQ ID NO: 1254534 - DNA, 25 bp, Homo sapien
cggaagaaatttttcgaatcgaatg

SEQ ID NO: 1254535 - DNA, 25 bp, Homo sapien
aatgtatccagtgggttcttcttcc

SEQ ID NO: 1254536 - DNA, 25 bp, Homo sapien
tagtatttctgtcatcaccggaaga

SEQ ID NO: 1254537 - DNA, 25 bp, Homo sapien
aaagctcgaagaaggacatcttctg

SEQ ID NO: 1254538 - DNA, 25 bp, Homo sapien
caaaagctcgaagaaggacatcttc

SEQ ID NO: 1254539 - DNA, 25 bp, Homo sapien
ctcaaaagctcgaagaaggacatct

SEQ ID NO: 1254540 - DNA, 25 bp, Homo sapien
gctcgaagaaggacatcttctggaa

SEQ ID NO: 1254541 - DNA, 25 bp, Homo sapien
agtcatatacttgatcagctcgtcc

SEQ ID NO: 1254542 - DNA, 25 bp, Homo sapien
tagtaagaaacccacgtttagctga

SEQ ID NO: 1254543 - DNA, 25 bp, Homo sapien
gaaacccacgtttagctgaatctaa

SEQ ID NO: 1254544 - DNA, 25 bp, Homo sapien
cagctcgtccttagtaagaaaccca

SEQ ID NO: 1254545 - DNA, 25 bp, Homo sapien
gtggcagctgtgacggccttgccat

SEQ ID NO: 1254546 - DNA, 25 bp, Homo sapien
cattctgaccctcactctctgtatt

SEQ ID NO: 1254547 - DNA, 25 bp, Homo sapien
tgtgacggccttgccattctgaccc

SEQ ID NO: 1254548 - DNA, 25 bp, Homo sapien
agctgtgacggccttgccattctga

SEQ ID NO: 1254549 - DNA, 25 bp, Homo sapien
aacatccccatcagaattaatcccg

SEQ ID NO: 1254550 - DNA, 25 bp, Homo sapien
gaagaagctgatgctttgaaagtcg

SEQ ID NO: 1254551 - DNA, 25 bp, Homo sapien
gctttgaaagtcgtaacatccccat

SEQ ID NO: 1254552 - DNA, 25 bp, Homo sapien
catcagaattaatcccgaaggtaat

SEQ ID NO: 1254553 - DNA, 25 bp, Homo sapien
ggtactttggattcagctctcagct

SEQ ID NO: 1254554 - DNA, 25 bp, Homo sapien
tcatactcgccatcgagggcaaagc

SEQ ID NO: 1254555 - DNA, 25 bp, Homo sapien
ttatgcatctaacaaaccgaccagc

SEQ ID NO: 1254556 - DNA, 25 bp, Homo sapien
tgaaataaccttctaagtggcctcc

SEQ ID NO: 1254557 - DNA, 25 bp, Homo sapien
agaatgggggtgataacgacaccac

SEQ ID NO: 1254558 - DNA, 25 bp, Homo sapien
ctagaatgggggtgataacgacacc

SEQ ID NO: 1254559 - DNA, 25 bp, Homo sapien
tagaatgggggtgataacgacacca

SEQ ID NO: 1254560 - DNA, 25 bp, Homo sapien
ggaagataactgagtggttaaagca

SEQ ID NO: 1254561 - DNA, 25 bp, Homo sapien
ggttaaagcacaagtttggatccac

SEQ ID NO: 1254562 - DNA, 25 bp, Homo sapien
cctctcacgagctctgagatcttga

SEQ ID NO: 1254563 - DNA, 25 bp, Homo sapien
ctggctgcctctcacgagctctgag

SEQ ID NO: 1254564 - DNA, 25 bp, Homo sapien
gcttaatagccatggagccccacaa

SEQ ID NO: 1254565 - DNA, 25 bp, Homo sapien
tccagaggttcaaagacaaggctat

SEQ ID NO: 1254566 - DNA, 25 bp, Homo sapien
gtagagccaggacatcacgacagtc

SEQ ID NO: 1254567 - DNA, 25 bp, Homo sapien
caaggctattgtacaccctggtaga

SEQ ID NO: 1254568 - DNA, 25 bp, Homo sapien
tctggatcaattgcagcagacaaca

SEQ ID NO: 1254569 - DNA, 25 bp, Homo sapien
gaatttgattctggatcaattgcag

SEQ ID NO: 1254570 - DNA, 25 bp, Homo sapien
tctatcaccatcattgttatatagt

SEQ ID NO: 1254571 - DNA, 25 bp, Homo sapien
tagtccttgtaattaattgaatttg

SEQ ID NO: 1254572 - DNA, 25 bp, Homo sapien
cattctgtaaggctagacatactaa

SEQ ID NO: 1254573 - DNA, 25 bp, Homo sapien
tggtttaaagtgttacgatcatctt

SEQ ID NO: 1254574 - DNA, 25 bp, Homo sapien
taggaatcctaagataagatgtgaa

SEQ ID NO: 1254575 - DNA, 25 bp, Homo sapien
tcacatataggaatcctaagataag

SEQ ID NO: 1254576 - DNA, 25 bp, Homo sapien
agccttcattacactgctactcgtt

SEQ ID NO: 1254577 - DNA, 25 bp, Homo sapien
tcgttttcgagtggttcgttctgcc

SEQ ID NO: 1254578 - DNA, 25 bp, Homo sapien
tctttacatgccaaaccttgggtaa

SEQ ID NO: 1254579 - DNA, 25 bp, Homo sapien
tttgataaatcaccttccacactca

SEQ ID NO: 1254580 - DNA, 25 bp, Homo sapien
tcccatgacagatatgcggagtggg

SEQ ID NO: 1254581 - DNA, 25 bp, Homo sapien
gacaaagggagaattgccactacct

SEQ ID NO: 1254582 - DNA, 25 bp, Homo sapien
ggagctgtacatttgcacaccataa

SEQ ID NO: 1254583 - DNA, 25 bp, Homo sapien
tactcagtattcaggacaatgctcc

SEQ ID NO: 1254584 - DNA, 25 bp, Homo sapien
cattccaaatatactgagctgcttt

SEQ ID NO: 1254585 - DNA, 25 bp, Homo sapien
agctgctttcaattcccaggtggtt

SEQ ID NO: 1254586 - DNA, 25 bp, Homo sapien
aattcccaggtggttccatgtttca

SEQ ID NO: 1254587 - DNA, 25 bp, Homo sapien
tctcccacattccaaatatactgag

SEQ ID NO: 1254588 - DNA, 25 bp, Homo sapien
gatatccttaatgataccgctcctg

SEQ ID NO: 1254589 - DNA, 25 bp, Homo sapien
caaactctcacactgaaaccttaac

SEQ ID NO: 1254590 - DNA, 25 bp, Homo sapien
tgaaaccttaactcagcacctaacc

SEQ ID NO: 1254591 - DNA, 25 bp, Homo sapien
tctgtgatcttcagaataaagtcca

SEQ ID NO: 1254592 - DNA, 25 bp, Homo sapien
ccccatggttttgttctagactgtc

SEQ ID NO: 1254593 - DNA, 25 bp, Homo sapien
tttgggtgtcccaaggtgtctgcac

SEQ ID NO: 1254594 - DNA, 25 bp, Homo sapien
gaatggcacttttacccatcgtccg

SEQ ID NO: 1254595 - DNA, 25 bp, Homo sapien
tgccttcccgtaaatgctgatatcc

SEQ ID NO: 1254596 - DNA, 25 bp, Homo sapien
ttccttactccatccactcaactcc

SEQ ID NO: 1254597 - DNA, 25 bp, Homo sapien
caactccataccctgttgcttcccc

SEQ ID NO: 1254598 - DNA, 25 bp, Homo sapien
ctccattgctaacaccaatggacgt

SEQ ID NO: 1254599 - DNA, 25 bp, Homo sapien
tgctaacaccaatggacgttttttc

SEQ ID NO: 1254600 - DNA, 25 bp, Homo sapien
cactgccgaataacttgtcctccag

SEQ ID NO: 1254601 - DNA, 25 bp, Homo sapien
ctcctcttcactgccgaataacttg

SEQ ID NO: 1254602 - DNA, 25 bp, Homo sapien
ccgagcctgttgtccgtttcctcct

SEQ ID NO: 1254603 - DNA, 25 bp, Homo sapien
cactccccgagcctgttgtccgttt

SEQ ID NO: 1254604 - DNA, 25 bp, Homo sapien
cagggaacagtcaacaaacgtcagc

SEQ ID NO: 1254605 - DNA, 25 bp, Homo sapien
taatagcacctgcaccgatgggtgg

SEQ ID NO: 1254606 - DNA, 25 bp, Homo sapien
tctttattgctctggaagctggccc

SEQ ID NO: 1254607 - DNA, 25 bp, Homo sapien
gcccttggactagaaatgaacttgc

SEQ ID NO: 1254608 - DNA, 25 bp, Homo sapien
ccaaacaagtccgtgcctgggtcga

SEQ ID NO: 1254609 - DNA, 25 bp, Homo sapien
ggtgattctagcatgcacggccgag

SEQ ID NO: 1254610 - DNA, 25 bp, Homo sapien
gaggtaggcaatctcgacgcaagct

SEQ ID NO: 1254611 - DNA, 25 bp, Homo sapien
taatggcttacaggtcttaacgcag

SEQ ID NO: 1254612 - DNA, 25 bp, Homo sapien
tcatgagggtaagcaaacttcctgc

SEQ ID NO: 1254613 - DNA, 25 bp, Homo sapien
gaagtgaagcgcctgatccagagtg

SEQ ID NO: 1254614 - DNA, 25 bp, Homo sapien
tacatcagatgctgcgggcgaggtc

SEQ ID NO: 1254615 - DNA, 25 bp, Homo sapien
ggccaagcactctcctagtcgggaa

SEQ ID NO: 1254616 - DNA, 25 bp, Homo sapien
tacaaattaagatgcagaagctcag

SEQ ID NO: 1254617 - DNA, 25 bp, Homo sapien
tcctgaagcagatgattggcaacca

SEQ ID NO: 1254618 - DNA, 25 bp, Homo sapien
ttcattcaatatcagagccccaggt

SEQ ID NO: 1254619 - DNA, 25 bp, Homo sapien
caagcgtgcataaggatcccctgag

SEQ ID NO: 1254620 - DNA, 25 bp, Homo sapien
ggccttgaacctgagccagtgcaaa

SEQ ID NO: 1254621 - DNA, 25 bp, Homo sapien
tccggttgtgtgatgtttgctatcc

SEQ ID NO: 1254622 - DNA, 25 bp, Homo sapien
acatggctgcctagaagcaaggtcc

SEQ ID NO: 1254623 - DNA, 25 bp, Homo sapien
ccctgcacgggctgttccggttgtg

SEQ ID NO: 1254624 - DNA, 25 bp, Homo sapien
atttctcttccccaatagtaccctg

SEQ ID NO: 1254625 - DNA, 25 bp, Homo sapien
tctcttccccaatagtaccctgatt

SEQ ID NO: 1254626 - DNA, 25 bp, Homo sapien
tcttccccaatagtaccctgatttc

SEQ ID NO: 1254627 - DNA, 25 bp, Homo sapien
tccccaatagtaccctgatttctca

SEQ ID NO: 1254628 - DNA, 25 bp, Homo sapien
gccacacgggctccgctggatcgaa

SEQ ID NO: 1254629 - DNA, 25 bp, Homo sapien
gggctccgctggatcgaactccgtt

SEQ ID NO: 1254630 - DNA, 25 bp, Homo sapien
tccgctggatcgaactccgttcagt

SEQ ID NO: 1254631 - DNA, 25 bp, Homo sapien
acacgggctccgctggatcgaactc

SEQ ID NO: 1254632 - DNA, 25 bp, Homo sapien
cacaccatttttgtgaagggcttac

SEQ ID NO: 1254633 - DNA, 25 bp, Homo sapien
ggcacaccatttttgtgaagggctt

SEQ ID NO: 1254634 - DNA, 25 bp, Homo sapien
taggcacaccatttttgtgaagggc

SEQ ID NO: 1254635 - DNA, 25 bp, Homo sapien
ctttaggcacaccatttttgtgaag

SEQ ID NO: 1254636 - DNA, 25 bp, Homo sapien
atgttgcccgttcattcttttctga

SEQ ID NO: 1254637 - DNA, 25 bp, Homo sapien
cacatgttgcccgttcattcttttc

SEQ ID NO: 1254638 - DNA, 25 bp, Homo sapien
ggatcacatgttgcccgttcattct

SEQ ID NO: 1254639 - DNA, 25 bp, Homo sapien
ctgaggatcacatgttgcccgttca

SEQ ID NO: 1254640 - DNA, 25 bp, Homo sapien
tctagtctcactatgggcttttgcc

SEQ ID NO: 1254641 - DNA, 25 bp, Homo sapien
gctgcgtcccagcatcagaagggtg

SEQ ID NO: 1254642 - DNA, 25 bp, Homo sapien
ggcttttgccaaacgtcatgtcgat

SEQ ID NO: 1254643 - DNA, 25 bp, Homo sapien
acagctgaactgtctggagagagca

SEQ ID NO: 1254644 - DNA, 25 bp, Homo sapien
tccagtgcttggtactaggaagctc

SEQ ID NO: 1254645 - DNA, 25 bp, Homo sapien
gctctgagtcaagcagtgcttccca

SEQ ID NO: 1254646 - DNA, 25 bp, Homo sapien
atagcccactccacaagcagccact

SEQ ID NO: 1254647 - DNA, 25 bp, Homo sapien
caccttttctttagtggatccagtg

SEQ ID NO: 1254648 - DNA, 25 bp, Homo sapien
agagtcttcctttctgcccctgtgc

SEQ ID NO: 1254649 - DNA, 25 bp, Homo sapien
gcctgcccactcgacctcactcctg

SEQ ID NO: 1254650 - DNA, 25 bp, Homo sapien
ctcctttccgctttctgggtgcaga

SEQ ID NO: 1254651 - DNA, 25 bp, Homo sapien
tgtgctcggctctcacgcctgccca

SEQ ID NO: 1254652 - DNA, 25 bp, Homo sapien
gcacttctgcccctagagctcttag

SEQ ID NO: 1254653 - DNA, 25 bp, Homo sapien
ctagagctcttagatgccagttggt

SEQ ID NO: 1254654 - DNA, 25 bp, Homo sapien
cctagagctcttagatgccagttgg

SEQ ID NO: 1254655 - DNA, 25 bp, Homo sapien
gccccacagcggcacttctgcccct

SEQ ID NO: 1254656 - DNA, 25 bp, Homo sapien
tcagaacccttgtgtgaatggaggg

SEQ ID NO: 1254657 - DNA, 25 bp, Homo sapien
ttcttcaggaaagacctcagaaccc

SEQ ID NO: 1254658 - DNA, 25 bp, Homo sapien
gaaagacctcagaacccttgtgtga

SEQ ID NO: 1254659 - DNA, 25 bp, Homo sapien
ggcatgagggtgcttgtcttcttca

SEQ ID NO: 1254660 - DNA, 25 bp, Homo sapien
ttcaccaaacgaacaggcaggctgt

SEQ ID NO: 1254661 - DNA, 25 bp, Homo sapien
taaatccttgattaatagcctctcc

SEQ ID NO: 1254662 - DNA, 25 bp, Homo sapien
ggcaggctgttcacgcatcggtgaa

SEQ ID NO: 1254663 - DNA, 25 bp, Homo sapien
tgcaccgagccaagatcactgtgcc

SEQ ID NO: 1254664 - DNA, 25 bp, Homo sapien
tactcaaggtgactgaaagccttac

SEQ ID NO: 1254665 - DNA, 25 bp, Homo sapien
ggagagtttcttgttctgacgccac

SEQ ID NO: 1254666 - DNA, 25 bp, Homo sapien
tttgacgaggtggacactagctagc

SEQ ID NO: 1254667 - DNA, 25 bp, Homo sapien
taggttttagccagatactcaaggt

SEQ ID NO: 1254668 - DNA, 25 bp, Homo sapien
accctcgcataacagccagaggcat

SEQ ID NO: 1254669 - DNA, 25 bp, Homo sapien
cccaccctcgcataacagccagagg

SEQ ID NO: 1254670 - DNA, 25 bp, Homo sapien
ccatgatttccacttgtgttattaa

SEQ ID NO: 1254671 - DNA, 25 bp, Homo sapien
cacttgtgttattaatggttctagc

SEQ ID NO: 1254672 - DNA, 25 bp, Homo sapien
ctccactgtccggtctttgtaaaag

SEQ ID NO: 1254673 - DNA, 25 bp, Homo sapien
tttgaggctttagcggcctgcaagg

SEQ ID NO: 1254674 - DNA, 25 bp, Homo sapien
caaagtgggccaaacctaacattgc

SEQ ID NO: 1254675 - DNA, 25 bp, Homo sapien
tgtaaaaggccaggtgtcatattgt

SEQ ID NO: 1254676 - DNA, 25 bp, Homo sapien
gataggagtgatagttgcacagcac

SEQ ID NO: 1254677 - DNA, 25 bp, Homo sapien
ggtgtaccacattcaacgccatgct

SEQ ID NO: 1254678 - DNA, 25 bp, Homo sapien
cgccatgcttctgggtacttctaag

SEQ ID NO: 1254679 - DNA, 25 bp, Homo sapien
cacaggaagattagcggttgcccga

SEQ ID NO: 1254680 - DNA, 25 bp, Homo sapien
ctacggtccaaatagtgccacttgg

SEQ ID NO: 1254681 - DNA, 25 bp, Homo sapien
caaatagtgccacttggagttgcgt

SEQ ID NO: 1254682 - DNA, 25 bp, Homo sapien
ccacttggagttgcgttttgactgc

SEQ ID NO: 1254683 - DNA, 25 bp, Homo sapien
gttttgactgctggaactgtaatcc

SEQ ID NO: 1254684 - DNA, 25 bp, Homo sapien
ctgggagaagtacatcctgaatacc

SEQ ID NO: 1254685 - DNA, 25 bp, Homo sapien
tagacgagacgtctcttccagtttt

SEQ ID NO: 1254686 - DNA, 25 bp, Homo sapien
tgtgtcccttaacggcgggtcagca

SEQ ID NO: 1254687 - DNA, 25 bp, Homo sapien
cctcagtttttctagcaagtgtagt

SEQ ID NO: 1254688 - DNA, 25 bp, Homo sapien
aaagagcagtttgtgtagacgagac

SEQ ID NO: 1254689 - DNA, 25 bp, Homo sapien
gctgccaatccaaaggcaaggtggt

SEQ ID NO: 1254690 - DNA, 25 bp, Homo sapien
cagtggttaaccacagtgagtgcca

SEQ ID NO: 1254691 - DNA, 25 bp, Homo sapien
aaaacgcagcccaggttctgatctg

SEQ ID NO: 1254692 - DNA, 25 bp, Homo sapien
tgtagtcccctcagctctcgtgaca

SEQ ID NO: 1254693 - DNA, 25 bp, Homo sapien
caagctgcggtgctcataccatgag

SEQ ID NO: 1254694 - DNA, 25 bp, Homo sapien
tccaggccaagtgacggagtctgtg

SEQ ID NO: 1254695 - DNA, 25 bp, Homo sapien
gatgggacagacaacgtggtaccta

SEQ ID NO: 1254696 - DNA, 25 bp, Homo sapien
gcttgagaacgttgccactgtcagc

SEQ ID NO: 1254697 - DNA, 25 bp, Homo sapien
aggtttcatcgtagggccaccgaag

SEQ ID NO: 1254698 - DNA, 25 bp, Homo sapien
gccacggtaaccacgatgggtccat

SEQ ID NO: 1254699 - DNA, 25 bp, Homo sapien
ccagaaagtgaatacgccgaggcat

SEQ ID NO: 1254700 - DNA, 25 bp, Homo sapien
tccaaacagtggaacgaagtggtgt

SEQ ID NO: 1254701 - DNA, 25 bp, Homo sapien
ttggcttaaaaagattgctgatgga

SEQ ID NO: 1254702 - DNA, 25 bp, Homo sapien
taaaaagattgctgatggaaaactg

SEQ ID NO: 1254703 - DNA, 25 bp, Homo sapien
ggcataggataaccaccaagtttgt

SEQ ID NO: 1254704 - DNA, 25 bp, Homo sapien
aatttgattgagttgaggcatagga

SEQ ID NO: 1254705 - DNA, 25 bp, Homo sapien
ggtggatcacgagtcacgcctgtca

SEQ ID NO: 1254706 - DNA, 25 bp, Homo sapien
gggcctgtttctcaaatctgcgtgg

SEQ ID NO: 1254707 - DNA, 25 bp, Homo sapien
ttaagtgtgtcgtagagccagagtc

SEQ ID NO: 1254708 - DNA, 25 bp, Homo sapien
tccgtggagttggatgagcctctga

SEQ ID NO: 1254709 - DNA, 25 bp, Homo sapien
tctgcttgtactcctccacacttcc

SEQ ID NO: 1254710 - DNA, 25 bp, Homo sapien
tttctgcttgtactcctccacactt

SEQ ID NO: 1254711 - DNA, 25 bp, Homo sapien
tatttctgcttgtactcctccacac

SEQ ID NO: 1254712 - DNA, 25 bp, Homo sapien
atttctgcttgtactcctccacact

SEQ ID NO: 1254713 - DNA, 25 bp, Homo sapien
tcaagatgtggtcttgctctttagc

SEQ ID NO: 1254714 - DNA, 25 bp, Homo sapien
tcttgctctttagcccaaagctgga

SEQ ID NO: 1254715 - DNA, 25 bp, Homo sapien
gtggtcttgctctttagcccaaagc

SEQ ID NO: 1254716 - DNA, 25 bp, Homo sapien
ttttattttcaagatgtggtcttgc

SEQ ID NO: 1254717 - DNA, 25 bp, Homo sapien
ctctgatacccagtaatttccatca

SEQ ID NO: 1254718 - DNA, 25 bp, Homo sapien
gcagaaagggcacatcgtctttccg

SEQ ID NO: 1254719 - DNA, 25 bp, Homo sapien
tcaggtcatcgtgtcctctgatacc

SEQ ID NO: 1254720 - DNA, 25 bp, Homo sapien
cagaaagggcacatcgtctttccgg

SEQ ID NO: 1254721 - DNA, 25 bp, Homo sapien
tatcctcacatggtcggtctccagc

SEQ ID NO: 1254722 - DNA, 25 bp, Homo sapien
gacagtcgtctctcaccgtctggag

SEQ ID NO: 1254723 - DNA, 25 bp, Homo sapien
tataagaaatgccaagactgggtgg

SEQ ID NO: 1254724 - DNA, 25 bp, Homo sapien
cacagtccgatgaggtgacaacaga

SEQ ID NO: 1254725 - DNA, 25 bp, Homo sapien
tttgtacccattgagcagtaacccc

SEQ ID NO: 1254726 - DNA, 25 bp, Homo sapien
cagtgttggtcctttgggaactgcc

SEQ ID NO: 1254727 - DNA, 25 bp, Homo sapien
tctctaggaatctgactccctgagg

SEQ ID NO: 1254728 - DNA, 25 bp, Homo sapien
tcttcagcgttttggagtgtacact

SEQ ID NO: 1254729 - DNA, 25 bp, Homo sapien
tctgaaatctgacagacctcaatcc

SEQ ID NO: 1254730 - DNA, 25 bp, Homo sapien
ggtagacattccctccacatgtgga

SEQ ID NO: 1254731 - DNA, 25 bp, Homo sapien
taatttaaggtagacattccctcca

SEQ ID NO: 1254732 - DNA, 25 bp, Homo sapien
gacagacctcaatccttgaaattca

SEQ ID NO: 1254733 - DNA, 25 bp, Homo sapien
caacatacttcttgagacctactca

SEQ ID NO: 1254734 - DNA, 25 bp, Homo sapien
aagcgactttgctgttgcaggattc

SEQ ID NO: 1254735 - DNA, 25 bp, Homo sapien
aacaagcgactttgctgttgcagga

SEQ ID NO: 1254736 - DNA, 25 bp, Homo sapien
cccagagcaacatacttcttgagac

SEQ ID NO: 1254737 - DNA, 25 bp, Homo sapien
acaaattgtgacatgtgacccacag

SEQ ID NO: 1254738 - DNA, 25 bp, Homo sapien
taaatcgagaggtgttgccaacaca

SEQ ID NO: 1254739 - DNA, 25 bp, Homo sapien
ctggctctggccttagctctcatct

SEQ ID NO: 1254740 - DNA, 25 bp, Homo sapien
taaaatgcagggatgagctaaatcg

SEQ ID NO: 1254741 - DNA, 25 bp, Homo sapien
agcgcgcgtgtgcgcccgggcgcag

SEQ ID NO: 1254742 - DNA, 25 bp, Homo sapien
cacagcgcgcgtgtgcgcccgggcg

SEQ ID NO: 1254743 - DNA, 25 bp, Homo sapien
tcacagcgcgcgtgtgcgcccgggc

SEQ ID NO: 1254744 - DNA, 25 bp, Homo sapien
cgcgtgtgcgcccgggcgcagcgcg

SEQ ID NO: 1254745 - DNA, 25 bp, Homo sapien
cagccctcagggcaaggtttcttca

SEQ ID NO: 1254746 - DNA, 25 bp, Homo sapien
aaagcgagggatacaatcagggctc

SEQ ID NO: 1254747 - DNA, 25 bp, Homo sapien
tatctaaaggttccaccgacgctac

SEQ ID NO: 1254748 - DNA, 25 bp, Homo sapien
tcccagctaccgaattcatggtggc

SEQ ID NO: 1254749 - DNA, 25 bp, Homo sapien
aggcgggcgttgcagttctcgcacc

SEQ ID NO: 1254750 - DNA, 25 bp, Homo sapien
aaggagcccggcgaactagtgccga

SEQ ID NO: 1254751 - DNA, 25 bp, Homo sapien
tatgctttccggtaccagctttccg

SEQ ID NO: 1254752 - DNA, 25 bp, Homo sapien
cttggtgggcgagcagacttcattc

SEQ ID NO: 1254753 - DNA, 25 bp, Homo sapien
tatccttgggatgtcacggcagatg

SEQ ID NO: 1254754 - DNA, 25 bp, Homo sapien
gaatctaagctccacgtggacaagg

SEQ ID NO: 1254755 - DNA, 25 bp, Homo sapien
gctgtaacgtattaggactgccaaa

SEQ ID NO: 1254756 - DNA, 25 bp, Homo sapien
tgttaaatcggaaggtctagcacgc

SEQ ID NO: 1254757 - DNA, 25 bp, Homo sapien
gactcttactcttcagagcgaactg

SEQ ID NO: 1254758 - DNA, 25 bp, Homo sapien
cagtgacacctcttgttctaatgaa

SEQ ID NO: 1254759 - DNA, 25 bp, Homo sapien
gaactgagcgaactgcatgttggag

SEQ ID NO: 1254760 - DNA, 25 bp, Homo sapien
aaggttcctggatgtgctattctgc

SEQ ID NO: 1254761 - DNA, 25 bp, Homo sapien
catgaagccctatcctccattggag

SEQ ID NO: 1254762 - DNA, 25 bp, Homo sapien
tacctaccaacaggcacagtgtgag

SEQ ID NO: 1254763 - DNA, 25 bp, Homo sapien
gattcaatagggcttgctacctacc

SEQ ID NO: 1254764 - DNA, 25 bp, Homo sapien
tggaaccaaccagatacccggaatg

SEQ ID NO: 1254765 - DNA, 25 bp, Homo sapien
ctcagactcgctgcatggaaaacca

SEQ ID NO: 1254766 - DNA, 25 bp, Homo sapien
aagctcagactcgctgcatggaaaa

SEQ ID NO: 1254767 - DNA, 25 bp, Homo sapien
agaaagctcagactcgctgcatgga

SEQ ID NO: 1254768 - DNA, 25 bp, Homo sapien
gaaagctcagactcgctgcatggaa

SEQ ID NO: 1254769 - DNA, 25 bp, Homo sapien
ccaggtaagttgctatcggaaagga

SEQ ID NO: 1254770 - DNA, 25 bp, Homo sapien
gaatacagagtatcaacagcagagc

SEQ ID NO: 1254771 - DNA, 25 bp, Homo sapien
cacaaacgtctactcaccaggtaag

SEQ ID NO: 1254772 - DNA, 25 bp, Homo sapien
ccggcaccaaaagagaaacgatata

SEQ ID NO: 1254773 - DNA, 25 bp, Homo sapien
tatcagaatgatctaggctagccca

SEQ ID NO: 1254774 - DNA, 25 bp, Homo sapien
gctgttgtttcgtaggacttgccca

SEQ ID NO: 1254775 - DNA, 25 bp, Homo sapien
ggctagcccaaaattgagcaattcg

SEQ ID NO: 1254776 - DNA, 25 bp, Homo sapien
gagctttactgcttactccagggaa

SEQ ID NO: 1254777 - DNA, 25 bp, Homo sapien
ccttaacagcttctaggggaaagtg

SEQ ID NO: 1254778 - DNA, 25 bp, Homo sapien
gatttctctgttccttgcatatttt

SEQ ID NO: 1254779 - DNA, 25 bp, Homo sapien
tgattggatttctctgttccttgca

SEQ ID NO: 1254780 - DNA, 25 bp, Homo sapien
gggaaagtgtgattggatttctctg

SEQ ID NO: 1254781 - DNA, 25 bp, Homo sapien
tttcattttctctgactgctgtttc

SEQ ID NO: 1254782 - DNA, 25 bp, Homo sapien
tgaatgctttcattttctctgactg

SEQ ID NO: 1254783 - DNA, 25 bp, Homo sapien
gaatgctttcattttctctgactgc

SEQ ID NO: 1254784 - DNA, 25 bp, Homo sapien
cattttctctgactgctgtttctcc

SEQ ID NO: 1254785 - DNA, 25 bp, Homo sapien
ctggttggaatcgatgtgataggat

SEQ ID NO: 1254786 - DNA, 25 bp, Homo sapien
tggttggaatcgatgtgataggatc

SEQ ID NO: 1254787 - DNA, 25 bp, Homo sapien
ggttggaatcgatgtgataggatca

SEQ ID NO: 1254788 - DNA, 25 bp, Homo sapien
tatagcaacgttcagaatgtctcgg

SEQ ID NO: 1254789 - DNA, 25 bp, Homo sapien
gagctgatgtatgtgcaggatatcc

SEQ ID NO: 1254790 - DNA, 25 bp, Homo sapien
taccctcagagccttctgctttgct

SEQ ID NO: 1254791 - DNA, 25 bp, Homo sapien
tattagagctcacaggatccctctc

SEQ ID NO: 1254792 - DNA, 25 bp, Homo sapien
agaagcatcagcaacgacggcgcta

SEQ ID NO: 1254793 - DNA, 25 bp, Homo sapien
tttatgatccgaattccaaaagcag

SEQ ID NO: 1254794 - DNA, 25 bp, Homo sapien
tgcagatgagatgtcccacaaacat

SEQ ID NO: 1254795 - DNA, 25 bp, Homo sapien
tccccttggctggacggacaaggag

SEQ ID NO: 1254796 - DNA, 25 bp, Homo sapien
taatcaatatggctctgtctaggca

SEQ ID NO: 1254797 - DNA, 25 bp, Homo sapien
catgggcctcgttgactcagcgggc

SEQ ID NO: 1254798 - DNA, 25 bp, Homo sapien
agaccacagcatcaaacactacggg

SEQ ID NO: 1254799 - DNA, 25 bp, Homo sapien
aaaatcgatgataactgcatgggcc

SEQ ID NO: 1254800 - DNA, 25 bp, Homo sapien
atctcccatcccgccatttgtcacc

SEQ ID NO: 1254801 - DNA, 25 bp, Homo sapien
ccatttgtcaccaccgtcccatcct

SEQ ID NO: 1254802 - DNA, 25 bp, Homo sapien
gccatttgtcaccaccgtcccatcc

SEQ ID NO: 1254803 - DNA, 25 bp, Homo sapien
cgccatttgtcaccaccgtcccatc

SEQ ID NO: 1254804 - DNA, 25 bp, Homo sapien
tatagccattcacctggccccaatt

SEQ ID NO: 1254805 - DNA, 25 bp, Homo sapien
ttcacctggccccaattctcaatag

SEQ ID NO: 1254806 - DNA, 25 bp, Homo sapien
ccattcacctggccccaattctcaa

SEQ ID NO: 1254807 - DNA, 25 bp, Homo sapien
ctatagccattcacctggccccaat

SEQ ID NO: 1254808 - DNA, 25 bp, Homo sapien
gcaaatgcagagggaggagctaagg

SEQ ID NO: 1254809 - DNA, 25 bp, Homo sapien
cagaaggtccgtggaagtaagagaa

SEQ ID NO: 1254810 - DNA, 25 bp, Homo sapien
gccagggccagccctattctcagaa

SEQ ID NO: 1254811 - DNA, 25 bp, Homo sapien
ccctattctcagaaggtccgtggaa

SEQ ID NO: 1254812 - DNA, 25 bp, Homo sapien
tacttagtgatgacgactgccctgc

SEQ ID NO: 1254813 - DNA, 25 bp, Homo sapien
atgacgactgccctgcccgtgtaaa

SEQ ID NO: 1254814 - DNA, 25 bp, Homo sapien
aaataaaagagctgtcttgcactga

SEQ ID NO: 1254815 - DNA, 25 bp, Homo sapien
aacttttctaacgaccacaggcaca

SEQ ID NO: 1254816 - DNA, 25 bp, Homo sapien
gatgcttcctgaactctggtctcct

SEQ ID NO: 1254817 - DNA, 25 bp, Homo sapien
tctggtctccttccatgaaatatgg

SEQ ID NO: 1254818 - DNA, 25 bp, Homo sapien
tagaccctgtgggaaggatgcttcc

SEQ ID NO: 1254819 - DNA, 25 bp, Homo sapien
ggaaggatgcttcctgaactctggt

SEQ ID NO: 1254820 - DNA, 25 bp, Homo sapien
ctgggatgcagaaaaagaaggaact

SEQ ID NO: 1254821 - DNA, 25 bp, Homo sapien
tgcagaaaaagaaggaactaaatcc

SEQ ID NO: 1254822 - DNA, 25 bp, Homo sapien
gatgcagaaaaagaaggaactaaat

SEQ ID NO: 1254823 - DNA, 25 bp, Homo sapien
gggatgcagaaaaagaaggaactaa

SEQ ID NO: 1254824 - DNA, 25 bp, Homo sapien
agcaagtatgcacctccaggaacat

SEQ ID NO: 1254825 - DNA, 25 bp, Homo sapien
cagcaagtatgcacctccaggaaca

SEQ ID NO: 1254826 - DNA, 25 bp, Homo sapien
gacactgcatgtggcaagcccacgt

SEQ ID NO: 1254827 - DNA, 25 bp, Homo sapien
aagcccacgtcacaggcggtaccac

SEQ ID NO: 1254828 - DNA, 25 bp, Homo sapien
cccgtctgctcggatggctgtagag

SEQ ID NO: 1254829 - DNA, 25 bp, Homo sapien
tgaggagtaagggacagagcccccg

SEQ ID NO: 1254830 - DNA, 25 bp, Homo sapien
tctcagggtgagagctaattgctgc

SEQ ID NO: 1254831 - DNA, 25 bp, Homo sapien
gagatcaagaggcattggcaacagc

SEQ ID NO: 1254832 - DNA, 25 bp, Homo sapien
taatgcagaaaggtcgctgagagct

SEQ ID NO: 1254833 - DNA, 25 bp, Homo sapien
tctgtagtaaattggcatccgtgct

SEQ ID NO: 1254834 - DNA, 25 bp, Homo sapien
tgtgggagggaccggggaggagata

SEQ ID NO: 1254835 - DNA, 25 bp, Homo sapien
ctcacggtagtgagtaagtctcacg

SEQ ID NO: 1254836 - DNA, 25 bp, Homo sapien
atactgttctcacggtagtgagtaa

SEQ ID NO: 1254837 - DNA, 25 bp, Homo sapien
ggaccggggaggagataattgaatc

SEQ ID NO: 1254838 - DNA, 25 bp, Homo sapien
ttagaaacttctttatccatatatt

SEQ ID NO: 1254839 - DNA, 25 bp, Homo sapien
ttctcttgtgataccttctattcta

SEQ ID NO: 1254840 - DNA, 25 bp, Homo sapien
tatgtagtcaaacctgtctatattt

SEQ ID NO: 1254841 - DNA, 25 bp, Homo sapien
tattctatcaagcttagaaacttct

SEQ ID NO: 1254842 - DNA, 25 bp, Homo sapien
gaggaagcgcatcaaaaactgcatg

SEQ ID NO: 1254843 - DNA, 25 bp, Homo sapien
tacaagtggacaaatgctagcggtg

SEQ ID NO: 1254844 - DNA, 25 bp, Homo sapien
cccatggtgggttgtgacagcttga

SEQ ID NO: 1254845 - DNA, 25 bp, Homo sapien
gaaaagcgctttcatgcggcacctc

SEQ ID NO: 1254846 - DNA, 25 bp, Homo sapien
tttctcactatcgacatccgcttgc

SEQ ID NO: 1254847 - DNA, 25 bp, Homo sapien
gaagtctcgttttctcactatcgac

SEQ ID NO: 1254848 - DNA, 25 bp, Homo sapien
tctgtgcacgtacccacggctgtgc

SEQ ID NO: 1254849 - DNA, 25 bp, Homo sapien
catctttaacctgaggactttctgt

SEQ ID NO: 1254850 - DNA, 25 bp, Homo sapien
ccaaagcctggctgcgcacactaaa

SEQ ID NO: 1254851 - DNA, 25 bp, Homo sapien
aagcctggctgcgcacactaaaaat

SEQ ID NO: 1254852 - DNA, 25 bp, Homo sapien
cctggctgcgcacactaaaaatcag

SEQ ID NO: 1254853 - DNA, 25 bp, Homo sapien
gcctggctgcgcacactaaaaatca

SEQ ID NO: 1254854 - DNA, 25 bp, Homo sapien
gctctcagggtgattgactgcccag

SEQ ID NO: 1254855 - DNA, 25 bp, Homo sapien
ccaggctccggtgaaggaaggctct

SEQ ID NO: 1254856 - DNA, 25 bp, Homo sapien
atgatgatgaaaggctcccagcgct

SEQ ID NO: 1254857 - DNA, 25 bp, Homo sapien
tcctaacacagaaaggagtctggcc

SEQ ID NO: 1254858 - DNA, 25 bp, Homo sapien
tgctaacaaaatctcagcggctggt

SEQ ID NO: 1254859 - DNA, 25 bp, Homo sapien
taaacttcgatgtttaggtcccatc

SEQ ID NO: 1254860 - DNA, 25 bp, Homo sapien
tgttaaattcaagggtatctgggac

SEQ ID NO: 1254861 - DNA, 25 bp, Homo sapien
taattacctcaaggtagccccaggc

SEQ ID NO: 1254862 - DNA, 25 bp, Homo sapien
agatccagcacataccctaaaaggg

SEQ ID NO: 1254863 - DNA, 25 bp, Homo sapien
tgaacccagctttgacttcgtttaa

SEQ ID NO: 1254864 - DNA, 25 bp, Homo sapien
tgaggtcatgccaacattataccac

SEQ ID NO: 1254865 - DNA, 25 bp, Homo sapien
gcagagaccagcttcgattccattt

SEQ ID NO: 1254866 - DNA, 25 bp, Homo sapien
gggtctgattcctattacttattta

SEQ ID NO: 1254867 - DNA, 25 bp, Homo sapien
taatatgcacaactatgatgctggg

SEQ ID NO: 1254868 - DNA, 25 bp, Homo sapien
tatctcttaaagaaataacaggtaa

SEQ ID NO: 1254869 - DNA, 25 bp, Homo sapien
tgctggggtctgattcctattactt

SEQ ID NO: 1254870 - DNA, 25 bp, Homo sapien
tgcaggtcatgagggccctgagctc

SEQ ID NO: 1254871 - DNA, 25 bp, Homo sapien
ctcgtggggaacgctgctgactgca

SEQ ID NO: 1254872 - DNA, 25 bp, Homo sapien
ctgcaggtcatgagggccctgagct

SEQ ID NO: 1254873 - DNA, 25 bp, Homo sapien
cctgcaggtcatgagggccctgagc

SEQ ID NO: 1254874 - DNA, 25 bp, Homo sapien
cccaagttcacgtcctcgtttgcag

SEQ ID NO: 1254875 - DNA, 25 bp, Homo sapien
cttgatggtgggaaagacttagcgt

SEQ ID NO: 1254876 - DNA, 25 bp, Homo sapien
tcagtctctgctgggacaagggaat

SEQ ID NO: 1254877 - DNA, 25 bp, Homo sapien
cgtcctcgtttgcagtttcatctct

SEQ ID NO: 1254878 - DNA, 25 bp, Homo sapien
aagggagctgttcctcaaaaatgcc

SEQ ID NO: 1254879 - DNA, 25 bp, Homo sapien
tgggtcattcgaaacaagctgcctg

SEQ ID NO: 1254880 - DNA, 25 bp, Homo sapien
caaaaaacgacataggactggcccg

SEQ ID NO: 1254881 - DNA, 25 bp, Homo sapien
ctgacaaagcaggaccgtggcactg

SEQ ID NO: 1254882 - DNA, 25 bp, Homo sapien
gttgaaagttagtaagtcacggctc

SEQ ID NO: 1254883 - DNA, 25 bp, Homo sapien
ctgcgaatgtgtcaaagttgaaagt

SEQ ID NO: 1254884 - DNA, 25 bp, Homo sapien
ttgaaagttagtaagtcacggctcc

SEQ ID NO: 1254885 - DNA, 25 bp, Homo sapien
tgaaagttagtaagtcacggctcct

SEQ ID NO: 1254886 - DNA, 25 bp, Homo sapien
attttgctgtagtgcgtagctctgc

SEQ ID NO: 1254887 - DNA, 25 bp, Homo sapien
gctgtagtgcgtagctctgctctta

SEQ ID NO: 1254888 - DNA, 25 bp, Homo sapien
ggattttgctgtagtgcgtagctct

SEQ ID NO: 1254889 - DNA, 25 bp, Homo sapien
ttgctgtagtgcgtagctctgctct

SEQ ID NO: 1254890 - DNA, 25 bp, Homo sapien
agaacatggaggcattctctggagg

SEQ ID NO: 1254891 - DNA, 25 bp, Homo sapien
tcttccactaaatgtcctgggcctc

SEQ ID NO: 1254892 - DNA, 25 bp, Homo sapien
gtccatcttccactaaatgtcctgg

SEQ ID NO: 1254893 - DNA, 25 bp, Homo sapien
ggacgcgttaactcctgcccatgtc

SEQ ID NO: 1254894 - DNA, 25 bp, Homo sapien
aatatctgcttcttcgccttgtgca

SEQ ID NO: 1254895 - DNA, 25 bp, Homo sapien
atcatcattttctgcgggactgcag

SEQ ID NO: 1254896 - DNA, 25 bp, Homo sapien
caatatctgcttcttcgccttgtgc

SEQ ID NO: 1254897 - DNA, 25 bp, Homo sapien
atctgcttcttcgccttgtgcaaca

SEQ ID NO: 1254898 - DNA, 25 bp, Homo sapien
tgagacccaagagtaggaaaaggtg

SEQ ID NO: 1254899 - DNA, 25 bp, Homo sapien
agagtaggaaaaggtggagatccat

SEQ ID NO: 1254900 - DNA, 25 bp, Homo sapien
ctgtgagacccaagagtaggaaaag

SEQ ID NO: 1254901 - DNA, 25 bp, Homo sapien
caagagtaggaaaaggtggagatcc

SEQ ID NO: 1254902 - DNA, 25 bp, Homo sapien
gacaggtgtattctgacccaataaa

SEQ ID NO: 1254903 - DNA, 25 bp, Homo sapien
cctgctaatctctgggaatgacacc

SEQ ID NO: 1254904 - DNA, 25 bp, Homo sapien
cactaccgatgattttcctgacagg

SEQ ID NO: 1254905 - DNA, 25 bp, Homo sapien
tactggtaacgggaagaaactgctc

SEQ ID NO: 1254906 - DNA, 25 bp, Homo sapien
tctggcttcgtggtcttcctctggc

SEQ ID NO: 1254907 - DNA, 25 bp, Homo sapien
atgaggatctaaaacccaccggccg

SEQ ID NO: 1254908 - DNA, 25 bp, Homo sapien
tttcctctgtcggggcaccctctgg

SEQ ID NO: 1254909 - DNA, 25 bp, Homo sapien
ggccaaatgaggatctaaaacccac

SEQ ID NO: 1254910 - DNA, 25 bp, Homo sapien
gctctggagaagccgatccagctgc

SEQ ID NO: 1254911 - DNA, 25 bp, Homo sapien
ggctctggagaagccgatccagctg

SEQ ID NO: 1254912 - DNA, 25 bp, Homo sapien
ttagaaccagaccaccacggacagc

SEQ ID NO: 1254913 - DNA, 25 bp, Homo sapien
cttagaaccagaccaccacggacag

SEQ ID NO: 1254914 - DNA, 25 bp, Homo sapien
tgtaaggcacctgggagcccttctc

SEQ ID NO: 1254915 - DNA, 25 bp, Homo sapien
ctgtaaggcacctgggagcccttct

SEQ ID NO: 1254916 - DNA, 25 bp, Homo sapien
aggcacctgggagcccttctcccac

SEQ ID NO: 1254917 - DNA, 25 bp, Homo sapien
taaggcacctgggagcccttctccc

SEQ ID NO: 1254918 - DNA, 25 bp, Homo sapien
atagcagctgttcccgtggacctcc

SEQ ID NO: 1254919 - DNA, 25 bp, Homo sapien
tcccgctgccgctgtgaagcactgc

SEQ ID NO: 1254920 - DNA, 25 bp, Homo sapien
tgtgtccgccgccatagcagctgtt

SEQ ID NO: 1254921 - DNA, 25 bp, Homo sapien
gaggctgcacccagtgctcccgctg

SEQ ID NO: 1254922 - DNA, 25 bp, Homo sapien
ccttgaaggccacctgagaaatggg

SEQ ID NO: 1254923 - DNA, 25 bp, Homo sapien
gaaatggggactgagctcataccac

SEQ ID NO: 1254924 - DNA, 25 bp, Homo sapien
aacgcctgcatctcgaatggctgga

SEQ ID NO: 1254925 - DNA, 25 bp, Homo sapien
taccacaggctaaggggatccacca

SEQ ID NO: 1254926 - DNA, 25 bp, Homo sapien
tgtgatctggataaactgactgcca

SEQ ID NO: 1254927 - DNA, 25 bp, Homo sapien
cttgtgatctggataaactgactgc

SEQ ID NO: 1254928 - DNA, 25 bp, Homo sapien
ctgacttgtgatctggataaactga

SEQ ID NO: 1254929 - DNA, 25 bp, Homo sapien
gatctggataaactgactgccatca

SEQ ID NO: 1254930 - DNA, 25 bp, Homo sapien
cagcacattacatgaccaagacagg

SEQ ID NO: 1254931 - DNA, 25 bp, Homo sapien
cattcatcagaaagttataccacag

SEQ ID NO: 1254932 - DNA, 25 bp, Homo sapien
tatagcaccgcttgtaacagtgtcc

SEQ ID NO: 1254933 - DNA, 25 bp, Homo sapien
ctatgtatgtgtcctgtgagccagc

SEQ ID NO: 1254934 - DNA, 25 bp, Homo sapien
tagaaattgctactctctgggcaaa

SEQ ID NO: 1254935 - DNA, 25 bp, Homo sapien
tgagaagggcatacccaaatcccgg

SEQ ID NO: 1254936 - DNA, 25 bp, Homo sapien
gaaatgtaagaccttgagacgtcaa

SEQ ID NO: 1254937 - DNA, 25 bp, Homo sapien
caaatagcttgttcgaagtcacaca

SEQ ID NO: 1254938 - DNA, 25 bp, Homo sapien
agtttgcttttagtgaccaggcaca

SEQ ID NO: 1254939 - DNA, 25 bp, Homo sapien
cattcaagaggcttctgaacatcat

SEQ ID NO: 1254940 - DNA, 25 bp, Homo sapien
tgaacatcataggaggttgactagc

SEQ ID NO: 1254941 - DNA, 25 bp, Homo sapien
accaggcacaaccaaacccagtatt

SEQ ID NO: 1254942 - DNA, 25 bp, Homo sapien
agtcctgccagctgtgtatgagaat

SEQ ID NO: 1254943 - DNA, 25 bp, Homo sapien
cactgaccaatatcccttgtcagca

SEQ ID NO: 1254944 - DNA, 25 bp, Homo sapien
gaatggcagaactgtgtggtaatag

SEQ ID NO: 1254945 - DNA, 25 bp, Homo sapien
tggtaaaagatggattcaaatcctg

SEQ ID NO: 1254946 - DNA, 25 bp, Homo sapien
gagatgactggcatgtgccacaaca

SEQ ID NO: 1254947 - DNA, 25 bp, Homo sapien
agatgactggcatgtgccacaacat

SEQ ID NO: 1254948 - DNA, 25 bp, Homo sapien
gatgactggcatgtgccacaacatc

SEQ ID NO: 1254949 - DNA, 25 bp, Homo sapien
tgactggcatgtgccacaacatcca

SEQ ID NO: 1254950 - DNA, 25 bp, Homo sapien
gacctcactgaacagaaatccctag

SEQ ID NO: 1254951 - DNA, 25 bp, Homo sapien
ggcagtttggacctcactgaacaga

SEQ ID NO: 1254952 - DNA, 25 bp, Homo sapien
tttggacctcactgaacagaaatcc

SEQ ID NO: 1254953 - DNA, 25 bp, Homo sapien
gaaggcagtttggacctcactgaac

SEQ ID NO: 1254954 - DNA, 25 bp, Homo sapien
agtcaccatgactgcagacactgct

SEQ ID NO: 1254955 - DNA, 25 bp, Homo sapien
gcacccaagaagagcattggcagaa

SEQ ID NO: 1254956 - DNA, 25 bp, Homo sapien
ctgcacccaagaagagcattggcag

SEQ ID NO: 1254957 - DNA, 25 bp, Homo sapien
tgcacccaagaagagcattggcaga

SEQ ID NO: 1254958 - DNA, 25 bp, Homo sapien
gtgagtctccatttcataggccaga

SEQ ID NO: 1254959 - DNA, 25 bp, Homo sapien
gcagagacctgcctttatgtcaagg

SEQ ID NO: 1254960 - DNA, 25 bp, Homo sapien
taatgagcccaatgtactggtccca

SEQ ID NO: 1254961 - DNA, 25 bp, Homo sapien
caaggctatcgatttaggccggaaa

SEQ ID NO: 1254962 - DNA, 25 bp, Homo sapien
taaggaactggctatcagacacgtt

SEQ ID NO: 1254963 - DNA, 25 bp, Homo sapien
cttcaagagggtcacgtgctccgta

SEQ ID NO: 1254964 - DNA, 25 bp, Homo sapien
catgacagaggcttcgtaaggaact

SEQ ID NO: 1254965 - DNA, 25 bp, Homo sapien
gcacagttccatgcatgggaacagt

SEQ ID NO: 1254966 - DNA, 25 bp, Homo sapien
ccccgtgtgatagtgcatgtctgta

SEQ ID NO: 1254967 - DNA, 25 bp, Homo sapien
tgatgaagatctgtgtggccgctgc

SEQ ID NO: 1254968 - DNA, 25 bp, Homo sapien
gacgactcctggctacttctgctga

SEQ ID NO: 1254969 - DNA, 25 bp, Homo sapien
taaagatttacgagggagtcaagct

SEQ ID NO: 1254970 - DNA, 25 bp, Homo sapien
agtggctgtgttgctctccggtaaa

SEQ ID NO: 1254971 - DNA, 25 bp, Homo sapien
cagattgggcttgctgtcggtggac

SEQ ID NO: 1254972 - DNA, 25 bp, Homo sapien
ggcttaggcagattgggctcgcggt

SEQ ID NO: 1254973 - DNA, 25 bp, Homo sapien
tggtgaccttcaggtgaccttcctc

SEQ ID NO: 1254974 - DNA, 25 bp, Homo sapien
gacttgttacaccacattagggcaa

SEQ ID NO: 1254975 - DNA, 25 bp, Homo sapien
gaaatgaactgaggatacaggcccc

SEQ ID NO: 1254976 - DNA, 25 bp, Homo sapien
gccttgggctggtaataatactcca

SEQ ID NO: 1254977 - DNA, 25 bp, Homo sapien
tagggctggagtcagaatttacacc

SEQ ID NO: 1254978 - DNA, 25 bp, Homo sapien
gatgtcgcataccactcctgattac

SEQ ID NO: 1254979 - DNA, 25 bp, Homo sapien
aattaaagtgggtgcatctggttcc

SEQ ID NO: 1254980 - DNA, 25 bp, Homo sapien
cagtttaagtcagcaattttcaccc

SEQ ID NO: 1254981 - DNA, 25 bp, Homo sapien
tcaggcaaagggtagctaataataa

SEQ ID NO: 1254982 - DNA, 25 bp, Homo sapien
aagtgctccaccgtaccgtctctgg

SEQ ID NO: 1254983 - DNA, 25 bp, Homo sapien
tgaaaagtgctccaccgtaccgtct

SEQ ID NO: 1254984 - DNA, 25 bp, Homo sapien
tctgaaaagtgctccaccgtaccgt

SEQ ID NO: 1254985 - DNA, 25 bp, Homo sapien
tctctctgaaaagtgctccaccgta

SEQ ID NO: 1254986 - DNA, 25 bp, Homo sapien
tccggtgccccatgtgcactcaagg

SEQ ID NO: 1254987 - DNA, 25 bp, Homo sapien
cagccagcccacatcagaatgaatg

SEQ ID NO: 1254988 - DNA, 25 bp, Homo sapien
tcttccccagtgcaccagcttccgg

SEQ ID NO: 1254989 - DNA, 25 bp, Homo sapien
gcagctggcagtgacggttccctct

SEQ ID NO: 1254990 - DNA, 25 bp, Homo sapien
gcagatacacatctggttgactcca

SEQ ID NO: 1254991 - DNA, 25 bp, Homo sapien
gaagatgctcccgggagacagcgcc

SEQ ID NO: 1254992 - DNA, 25 bp, Homo sapien
agatacacatctggttgactccact

SEQ ID NO: 1254993 - DNA, 25 bp, Homo sapien
cagatacacatctggttgactccac

SEQ ID NO: 1254994 - DNA, 25 bp, Homo sapien
tgttaactttgactccttaggaaga

SEQ ID NO: 1254995 - DNA, 25 bp, Homo sapien
tcctgtatagttagaccctcatgct

SEQ ID NO: 1254996 - DNA, 25 bp, Homo sapien
gaaagaaaagctatccaactcctcc

SEQ ID NO: 1254997 - DNA, 25 bp, Homo sapien
aaagatgtaagatgggactgcgcag

SEQ ID NO: 1254998 - DNA, 25 bp, Homo sapien
atgtcttattaaggggtgtcagcca

SEQ ID NO: 1254999 - DNA, 25 bp, Homo sapien
tattaaggggtgtcagccagtgaga

SEQ ID NO: 1255000 - DNA, 25 bp, Homo sapien
tcttattaaggggtgtcagccagtg

SEQ ID NO: 1255001 - DNA, 25 bp, Homo sapien
tcagaatgtcttattaaggggtgtc

SEQ ID NO: 1255002 - DNA, 25 bp, Homo sapien
ttcttcattcctgacaatcaagtgg

SEQ ID NO: 1255003 - DNA, 25 bp, Homo sapien
tagagtttatggaccctgctattcc

SEQ ID NO: 1255004 - DNA, 25 bp, Homo sapien
tgtactcacgaatgttatgacaaca

SEQ ID NO: 1255005 - DNA, 25 bp, Homo sapien
cacgaatgttatgacaacagagaaa

SEQ ID NO: 1255006 - DNA, 25 bp, Homo sapien
ccgcaccccgcacatttgccattta

SEQ ID NO: 1255007 - DNA, 25 bp, Homo sapien
tttgccatttatattgccacgtact

SEQ ID NO: 1255008 - DNA, 25 bp, Homo sapien
gccacgtacttccttatgttttaga

SEQ ID NO: 1255009 - DNA, 25 bp, Homo sapien
agaaataacaaattccctgatatgt

SEQ ID NO: 1255010 - DNA, 25 bp, Homo sapien
ccacacatcacagccgcttctgcag

SEQ ID NO: 1255011 - DNA, 25 bp, Homo sapien
aaagaaggcaacatctgaatgagct

SEQ ID NO: 1255012 - DNA, 25 bp, Homo sapien
aagccttcgagtgcaaaagaaggca

SEQ ID NO: 1255013 - DNA, 25 bp, Homo sapien
tctccccatcgtcccgcgttgctgc

SEQ ID NO: 1255014 - DNA, 25 bp, Homo sapien
caggagacgatgacaagacagcgac

SEQ ID NO: 1255015 - DNA, 25 bp, Homo sapien
tccccaaaaaagagcaggcgagtct

SEQ ID NO: 1255016 - DNA, 25 bp, Homo sapien
gatgttgacacagactcctgataga

SEQ ID NO: 1255017 - DNA, 25 bp, Homo sapien
tcagctccgagagatgcgggtcatc

SEQ ID NO: 1255018 - DNA, 25 bp, Homo sapien
gcctggccctgtgattggaatctca

SEQ ID NO: 1255019 - DNA, 25 bp, Homo sapien
ggaagatagacaaatgacctgggca

SEQ ID NO: 1255020 - DNA, 25 bp, Homo sapien
gacctgggcacaaagctaaggagaa

SEQ ID NO: 1255021 - DNA, 25 bp, Homo sapien
tgtcctgccgtgttaacaagcttgc

SEQ ID NO: 1255022 - DNA, 25 bp, Homo sapien
gcactcaaatctcgatgggtatttc

SEQ ID NO: 1255023 - DNA, 25 bp, Homo sapien
ccatttagcaataagcgagggagca

SEQ ID NO: 1255024 - DNA, 25 bp, Homo sapien
gactgtgacatgattgcccgtctga

SEQ ID NO: 1255025 - DNA, 25 bp, Homo sapien
caatgttgttgctttcacgttcccc

SEQ ID NO: 1255026 - DNA, 25 bp, Homo sapien
cggaacctttgcctggcggtcctgg

SEQ ID NO: 1255027 - DNA, 25 bp, Homo sapien
aacagtggtccggaacctttgcctg

SEQ ID NO: 1255028 - DNA, 25 bp, Homo sapien
tgggctcttcgtagaagtcagcatt

SEQ ID NO: 1255029 - DNA, 25 bp, Homo sapien
caagcctacaaccaaagccttggca

SEQ ID NO: 1255030 - DNA, 25 bp, Homo sapien
tcacgagttctcgatgagcgacaac

SEQ ID NO: 1255031 - DNA, 25 bp, Homo sapien
tcaaaccctgtgtccctccttgtaa

SEQ ID NO: 1255032 - DNA, 25 bp, Homo sapien
gagggcggtcacagtgccaaaatga

SEQ ID NO: 1255033 - DNA, 25 bp, Homo sapien
gagcgacaactggacctgtctcaaa

SEQ ID NO: 1255034 - DNA, 25 bp, Homo sapien
tcactcgcgcggaatgagaagcctg

SEQ ID NO: 1255035 - DNA, 25 bp, Homo sapien
tggacatcagcgtctcaggatcatg

SEQ ID NO: 1255036 - DNA, 25 bp, Homo sapien
catggtttctgctcaccgtgtgtgc

SEQ ID NO: 1255037 - DNA, 25 bp, Homo sapien
gcaagagcgcgatccatgtctcggt

SEQ ID NO: 1255038 - DNA, 25 bp, Homo sapien
ggagggactgactgatcggaatttc

SEQ ID NO: 1255039 - DNA, 25 bp, Homo sapien
gccattaatcaaccaggatacaagg

SEQ ID NO: 1255040 - DNA, 25 bp, Homo sapien
gcaaagaaatgaagggcaattacct

SEQ ID NO: 1255041 - DNA, 25 bp, Homo sapien
agtaaagacctaggtggcactgctt

SEQ ID NO: 1255042 - DNA, 25 bp, Homo sapien
cctgcaggcgttgatgggcagcaca

SEQ ID NO: 1255043 - DNA, 25 bp, Homo sapien
gtggaacagcaatccctgcgtggga

SEQ ID NO: 1255044 - DNA, 25 bp, Homo sapien
cccagcggctatgcagagtggaaca

SEQ ID NO: 1255045 - DNA, 25 bp, Homo sapien
ggcactctccttttcccgcgtggga

SEQ ID NO: 1255046 - DNA, 25 bp, Homo sapien
tcccggccaagcacgctatctaaag

SEQ ID NO: 1255047 - DNA, 25 bp, Homo sapien
tgttggttttgcctttgtgattgtc

SEQ ID NO: 1255048 - DNA, 25 bp, Homo sapien
cacgctatctaaaggagacctggct

SEQ ID NO: 1255049 - DNA, 25 bp, Homo sapien
caagctgttagctgtcgctttgttg

SEQ ID NO: 1255050 - DNA, 25 bp, Homo sapien
caatttctggtttacggttcaagag

SEQ ID NO: 1255051 - DNA, 25 bp, Homo sapien
gagacatcgtgtttgcttatttggg

SEQ ID NO: 1255052 - DNA, 25 bp, Homo sapien
gaggtccagaatttcaccgtccatc

SEQ ID NO: 1255053 - DNA, 25 bp, Homo sapien
gggactgatgaattaatcctaggct

SEQ ID NO: 1255054 - DNA, 25 bp, Homo sapien
tttcttccataatgatccttagtga

SEQ ID NO: 1255055 - DNA, 25 bp, Homo sapien
cacgtgaacacgctgaatgtaaagg

SEQ ID NO: 1255056 - DNA, 25 bp, Homo sapien
atgaacaccgcgctgagcacgtgaa

SEQ ID NO: 1255057 - DNA, 25 bp, Homo sapien
caaggtttgtcattgtgattcccag

SEQ ID NO: 1255058 - DNA, 25 bp, Homo sapien
tcacacaatggtgcgggcatgaaca

SEQ ID NO: 1255059 - DNA, 25 bp, Homo sapien
gaaaatgcggttgctggctgatgtc

SEQ ID NO: 1255060 - DNA, 25 bp, Homo sapien
aatgaaaatgcggttgctggctgat

SEQ ID NO: 1255061 - DNA, 25 bp, Homo sapien
tttaatgaaaatgcggttgctggct

SEQ ID NO: 1255062 - DNA, 25 bp, Homo sapien
ctttaatgaaaatgcggttgctggc

SEQ ID NO: 1255063 - DNA, 25 bp, Homo sapien
aacatcaatacgaccgccacagaca

SEQ ID NO: 1255064 - DNA, 25 bp, Homo sapien
agctgggcccaacatcaatacgacc

SEQ ID NO: 1255065 - DNA, 25 bp, Homo sapien
tcagcacagctgggcccaacatcaa

SEQ ID NO: 1255066 - DNA, 25 bp, Homo sapien
acatcaatacgaccgccacagacag

SEQ ID NO: 1255067 - DNA, 25 bp, Homo sapien
gcccagcgagcaccaacagagccat

SEQ ID NO: 1255068 - DNA, 25 bp, Homo sapien
agcccagcgagcaccaacagagcca

SEQ ID NO: 1255069 - DNA, 25 bp, Homo sapien
cactgtcagcttgcatggggtagaa

SEQ ID NO: 1255070 - DNA, 25 bp, Homo sapien
taggacattagggagaaaatctgcc

SEQ ID NO: 1255071 - DNA, 25 bp, Homo sapien
gggtagaagccccatcagagctgaa

SEQ ID NO: 1255072 - DNA, 25 bp, Homo sapien
tgcccttcggaaattcactgtcagc

SEQ ID NO: 1255073 - DNA, 25 bp, Homo sapien
tcgtgaatcacagccgagaaagcag

SEQ ID NO: 1255074 - DNA, 25 bp, Homo sapien
gcaaatgtcacagcggttgtcccgg

SEQ ID NO: 1255075 - DNA, 25 bp, Homo sapien
gttgtcccggtcgttccatgccttc

SEQ ID NO: 1255076 - DNA, 25 bp, Homo sapien
caactggttcaggtgagtggcgcaa

SEQ ID NO: 1255077 - DNA, 25 bp, Homo sapien
ccaggtgccatccaggtactggtga

SEQ ID NO: 1255078 - DNA, 25 bp, Homo sapien
ggccaccgaattgaggatgttccca

SEQ ID NO: 1255079 - DNA, 25 bp, Homo sapien
tgaccccgttggttctcgacaggga

SEQ ID NO: 1255080 - DNA, 25 bp, Homo sapien
gcgaggcgtcgtagtgctcactgcc

SEQ ID NO: 1255081 - DNA, 25 bp, Homo sapien
acaaagagggtctctcaggaaggag

SEQ ID NO: 1255082 - DNA, 25 bp, Homo sapien
ctcttacacaaagagggtctctcag

SEQ ID NO: 1255083 - DNA, 25 bp, Homo sapien
tacacaaagagggtctctcaggaag

SEQ ID NO: 1255084 - DNA, 25 bp, Homo sapien
cttacacaaagagggtctctcagga

SEQ ID NO: 1255085 - DNA, 25 bp, Homo sapien
gccatgtggtaaatctgctggctgg

SEQ ID NO: 1255086 - DNA, 25 bp, Homo sapien
gctctgccatgtggtaaatctgctg

SEQ ID NO: 1255087 - DNA, 25 bp, Homo sapien
tctctgagtaatacacccttgaccg

SEQ ID NO: 1255088 - DNA, 25 bp, Homo sapien
tgacggtcaatgctctctgctgctt

SEQ ID NO: 1255089 - DNA, 25 bp, Homo sapien
gtaatacacccttgaccgtggccgc

SEQ ID NO: 1255090 - DNA, 25 bp, Homo sapien
gcctctccattccagtgacggtcaa

SEQ ID NO: 1255091 - DNA, 25 bp, Homo sapien
ctggcgcagccgccgagtcttctaa

SEQ ID NO: 1255092 - DNA, 25 bp, Homo sapien
cacgtgtgacaagagcttcggagtc

SEQ ID NO: 1255093 - DNA, 25 bp, Homo sapien
gccgagtcttctaaccggcccctgc

SEQ ID NO: 1255094 - DNA, 25 bp, Homo sapien
tctgtcctcgctcatcagcgctggc

SEQ ID NO: 1255095 - DNA, 25 bp, Homo sapien
aatattttacaggaaagcaccagtt

SEQ ID NO: 1255096 - DNA, 25 bp, Homo sapien
tttgaatattttacaggaaagcacc

SEQ ID NO: 1255097 - DNA, 25 bp, Homo sapien
gaatattttacaggaaagcaccagt

SEQ ID NO: 1255098 - DNA, 25 bp, Homo sapien
tgaatattttacaggaaagcaccag

SEQ ID NO: 1255099 - DNA, 25 bp, Homo sapien
taaattgcagaaaggcagagtcgtc

SEQ ID NO: 1255100 - DNA, 25 bp, Homo sapien
gagggaccttctgtcgcccatgtga

SEQ ID NO: 1255101 - DNA, 25 bp, Homo sapien
gattattacacagtggtgcgggcca

SEQ ID NO: 1255102 - DNA, 25 bp, Homo sapien
tgtggagccgcacccttggtagtga

SEQ ID NO: 1255103 - DNA, 25 bp, Homo sapien
tcggccagtgttcagtccagcatta

SEQ ID NO: 1255104 - DNA, 25 bp, Homo sapien
cccctgtattgagtgtggcatcgaa

SEQ ID NO: 1255105 - DNA, 25 bp, Homo sapien
gcgaggttctttccactgcatctaa

SEQ ID NO: 1255106 - DNA, 25 bp, Homo sapien
tacctcataatgacttcggccagtg

SEQ ID NO: 1255107 - DNA, 25 bp, Homo sapien
gtggtacaatcacatcttcctgcag

SEQ ID NO: 1255108 - DNA, 25 bp, Homo sapien
cacccaggttacaggcagtggtaca

SEQ ID NO: 1255109 - DNA, 25 bp, Homo sapien
caaggaaccctctcgcctcaccctc

SEQ ID NO: 1255110 - DNA, 25 bp, Homo sapien
ggaaccctctcgcctcaccctcctg

SEQ ID NO: 1255111 - DNA, 25 bp, Homo sapien
cgtccatgcaacacctggcacagaa

SEQ ID NO: 1255112 - DNA, 25 bp, Homo sapien
aacacctggcacagaaaccagagtc

SEQ ID NO: 1255113 - DNA, 25 bp, Homo sapien
gcacagaaaccagagtctcagcctc

SEQ ID NO: 1255114 - DNA, 25 bp, Homo sapien
gtccatgcaacacctggcacagaaa

SEQ ID NO: 1255115 - DNA, 25 bp, Homo sapien
gaagttgttcattgcatatcttatc

SEQ ID NO: 1255116 - DNA, 25 bp, Homo sapien
tgttcattgcatatcttatcgatgg

SEQ ID NO: 1255117 - DNA, 25 bp, Homo sapien
cattgcatatcttatcgatggagag

SEQ ID NO: 1255118 - DNA, 25 bp, Homo sapien
agttgttcattgcatatcttatcga

SEQ ID NO: 1255119 - DNA, 25 bp, Homo sapien
tgcagcgaacaggaaagttccctgt

SEQ ID NO: 1255120 - DNA, 25 bp, Homo sapien
ctccactactaccacctaacttgtt

SEQ ID NO: 1255121 - DNA, 25 bp, Homo sapien
ttcaggtctagagggctgcgtccag

SEQ ID NO: 1255122 - DNA, 25 bp, Homo sapien
gcatctgagaaggtctacgtggcac

SEQ ID NO: 1255123 - DNA, 25 bp, Homo sapien
cggtggctccacaagctgataaggc

SEQ ID NO: 1255124 - DNA, 25 bp, Homo sapien
gctgcctacacctccgtcgcaggca

SEQ ID NO: 1255125 - DNA, 25 bp, Homo sapien
gctccatgaaccctggctgcctaca

SEQ ID NO: 1255126 - DNA, 25 bp, Homo sapien
gcaggcagccgggattactttatcg

SEQ ID NO: 1255127 - DNA, 25 bp, Homo sapien
tatcatgcgtgttgcttctcataag

SEQ ID NO: 1255128 - DNA, 25 bp, Homo sapien
ctgaacattggtatcgtagctctga

SEQ ID NO: 1255129 - DNA, 25 bp, Homo sapien
taccaagctaaccaaagctctgcat

SEQ ID NO: 1255130 - DNA, 25 bp, Homo sapien
taagtctgtatgatagcctgcgagt

SEQ ID NO: 1255131 - DNA, 25 bp, Homo sapien
agtccctcccggctactctctgtca

SEQ ID NO: 1255132 - DNA, 25 bp, Homo sapien
ctgttagtccctcccggctactctc

SEQ ID NO: 1255133 - DNA, 25 bp, Homo sapien
tccctcccggctactctctgtcatc

SEQ ID NO: 1255134 - DNA, 25 bp, Homo sapien
cttctgttagtccctcccggctact

SEQ ID NO: 1255135 - DNA, 25 bp, Homo sapien
tgtctgcattgtagcggttcagcac

SEQ ID NO: 1255136 - DNA, 25 bp, Homo sapien
tggaagtctcgctggccacgcagga

SEQ ID NO: 1255137 - DNA, 25 bp, Homo sapien
cggccaccgatgtgcctgtggaagt

SEQ ID NO: 1255138 - DNA, 25 bp, Homo sapien
caggcggaaggcttgtctgcattgt

SEQ ID NO: 1255139 - DNA, 25 bp, Homo sapien
gagggatgcctctacaaagtcctga

SEQ ID NO: 1255140 - DNA, 25 bp, Homo sapien
gaaccaaggatctgaacagctctct

SEQ ID NO: 1255141 - DNA, 25 bp, Homo sapien
ttagctggcccgagaggtcacagtg

SEQ ID NO: 1255142 - DNA, 25 bp, Homo sapien
ccagctgggctcatcggaaagaacc

SEQ ID NO: 1255143 - DNA, 25 bp, Homo sapien
caacgccatggaactggcgatacca

SEQ ID NO: 1255144 - DNA, 25 bp, Homo sapien
tctttgtgctcatgtgatctttgtc

SEQ ID NO: 1255145 - DNA, 25 bp, Homo sapien
tggaactggcgataccagctctgcc

SEQ ID NO: 1255146 - DNA, 25 bp, Homo sapien
agctctgccaaaacttgacagtgtc

SEQ ID NO: 1255147 - DNA, 25 bp, Homo sapien
tgcttctcagcgagagtgcggcaat

SEQ ID NO: 1255148 - DNA, 25 bp, Homo sapien
cagtaacagctctccgtatggtcac

SEQ ID NO: 1255149 - DNA, 25 bp, Homo sapien
ggtcatcagaccagtaacagctctc

SEQ ID NO: 1255150 - DNA, 25 bp, Homo sapien
acatgaggatacacagcacgaagag

SEQ ID NO: 1255151 - DNA, 25 bp, Homo sapien
aatattgttgatgtatttctaaggg

SEQ ID NO: 1255152 - DNA, 25 bp, Homo sapien
tatttctaaggggaagaagggagca

SEQ ID NO: 1255153 - DNA, 25 bp, Homo sapien
ctctggtaatattgttgatgtattt

SEQ ID NO: 1255154 - DNA, 25 bp, Homo sapien
ggtaatattgttgatgtatttctaa

SEQ ID NO: 1255155 - DNA, 25 bp, Homo sapien
ggccaatccaatacatttcataggg

SEQ ID NO: 1255156 - DNA, 25 bp, Homo sapien
ttttaagacaattctcgccccatct

SEQ ID NO: 1255157 - DNA, 25 bp, Homo sapien
cttccagaggaaaacgaccacttat

SEQ ID NO: 1255158 - DNA, 25 bp, Homo sapien
tcccgtggtactttcttatcttgag

SEQ ID NO: 1255159 - DNA, 25 bp, Homo sapien
actgcaccgatctggattttatacc

SEQ ID NO: 1255160 - DNA, 25 bp, Homo sapien
tgtcccttttctgagcaactgcacc

SEQ ID NO: 1255161 - DNA, 25 bp, Homo sapien
tcaggcatgaaacaatccaggtgct

SEQ ID NO: 1255162 - DNA, 25 bp, Homo sapien
ggtgcttgggtgaaatgcctctcgc

SEQ ID NO: 1255163 - DNA, 25 bp, Homo sapien
tgattggcaggggtgtataacacct

SEQ ID NO: 1255164 - DNA, 25 bp, Homo sapien
ttggcaggggtgtataacacctaca

SEQ ID NO: 1255165 - DNA, 25 bp, Homo sapien
ctggtgattggcaggggtgtataac

SEQ ID NO: 1255166 - DNA, 25 bp, Homo sapien
ggcaggggtgtataacacctacatg

SEQ ID NO: 1255167 - DNA, 25 bp, Homo sapien
caaaatctggtggccgtttcttttg

SEQ ID NO: 1255168 - DNA, 25 bp, Homo sapien
atctggtggccgtttcttttgggag

SEQ ID NO: 1255169 - DNA, 25 bp, Homo sapien
tctggtggccgtttcttttgggagc

SEQ ID NO: 1255170 - DNA, 25 bp, Homo sapien
tgaaataccctaagccagtgcctgg

SEQ ID NO: 1255171 - DNA, 25 bp, Homo sapien
taaccgcatgagaagaatggtccct

SEQ ID NO: 1255172 - DNA, 25 bp, Homo sapien
gatacgatgccctgtagatcagaag

SEQ ID NO: 1255173 - DNA, 25 bp, Homo sapien
gacaaagaagcaacgatggccatgg

SEQ ID NO: 1255174 - DNA, 25 bp, Homo sapien
gaacacccggtataagaagatgcac

SEQ ID NO: 1255175 - DNA, 25 bp, Homo sapien
cgacctaaaacagtaagtcacctag

SEQ ID NO: 1255176 - DNA, 25 bp, Homo sapien
gcagagaaatcctcacttcatcaag

SEQ ID NO: 1255177 - DNA, 25 bp, Homo sapien
tccctgaggaccacattcttaataa

SEQ ID NO: 1255178 - DNA, 25 bp, Homo sapien
ctaggtgaacagtgagggagatgac

SEQ ID NO: 1255179 - DNA, 25 bp, Homo sapien
gagatgaccgctgtaggtgaacagt

SEQ ID NO: 1255180 - DNA, 25 bp, Homo sapien
gatgaccgctgtaggtgaacagtga

SEQ ID NO: 1255181 - DNA, 25 bp, Homo sapien
tgaacagtgagggagatgaccgctc

SEQ ID NO: 1255182 - DNA, 25 bp, Homo sapien
tgaccgctctaggtgaacagtgagg

SEQ ID NO: 1255183 - DNA, 25 bp, Homo sapien
aggtgaacagtgagggagatgaccg

SEQ ID NO: 1255184 - DNA, 25 bp, Homo sapien
ggtgaacagtgagggagatgaccgc

SEQ ID NO: 1255185 - DNA, 25 bp, Homo sapien
taggtgaacagtgagggagatgacc

SEQ ID NO: 1255186 - DNA, 25 bp, Homo sapien
ctaggtgaacagtgagggagatgac

SEQ ID NO: 1255187 - DNA, 25 bp, Homo sapien
ctggttaatcttgcggctcttttcc

SEQ ID NO: 1255188 - DNA, 25 bp, Homo sapien
cacgggtatctggttaatcttgcgg

SEQ ID NO: 1255189 - DNA, 25 bp, Homo sapien
gggtatctggttaatcttgcggctc

SEQ ID NO: 1255190 - DNA, 25 bp, Homo sapien
aatcttgcggctcttttcccatttc

SEQ ID NO: 1255191 - DNA, 25 bp, Homo sapien
tttcaggacccacagcaatgctggt

SEQ ID NO: 1255192 - DNA, 25 bp, Homo sapien
tctctttcaggacccacagcaatgc

SEQ ID NO: 1255193 - DNA, 25 bp, Homo sapien
gtgatcacagtaacgatttgcttct

SEQ ID NO: 1255194 - DNA, 25 bp, Homo sapien
tgctggtgggaactccctagtgatc

SEQ ID NO: 1255195 - DNA, 25 bp, Homo sapien
tcctctgccgctggaagaaaaggca

SEQ ID NO: 1255196 - DNA, 25 bp, Homo sapien
gatacacgggcatgcacaccacggc

SEQ ID NO: 1255197 - DNA, 25 bp, Homo sapien
ccacaccgatacacgggcatgcaca

SEQ ID NO: 1255198 - DNA, 25 bp, Homo sapien
ggtcctctgccgctggaagaaaagg

SEQ ID NO: 1255199 - DNA, 25 bp, Homo sapien
tgtaagcacacatgtgtgcaggtgc

SEQ ID NO: 1255200 - DNA, 25 bp, Homo sapien
taagcacacatgtgtgcaggtgcac

SEQ ID NO: 1255201 - DNA, 25 bp, Homo sapien
ctgcgtgtaagcacacatgtgtgca

SEQ ID NO: 1255202 - DNA, 25 bp, Homo sapien
cgtgtaagcacacatgtgtgcaggt

SEQ ID NO: 1255203 - DNA, 25 bp, Homo sapien
cactatttgcatatcaggcagaatc

SEQ ID NO: 1255204 - DNA, 25 bp, Homo sapien
tatttgcatatcaggcagaatcctt

SEQ ID NO: 1255205 - DNA, 25 bp, Homo sapien
atctttgcacctcctgttctgagca

SEQ ID NO: 1255206 - DNA, 25 bp, Homo sapien
gtctgttgatttgaaccatgatggc

SEQ ID NO: 1255207 - DNA, 25 bp, Homo sapien
tacgcgtgcatatgtaatggcggca

SEQ ID NO: 1255208 - DNA, 25 bp, Homo sapien
gattcggattttcacataacaccct

SEQ ID NO: 1255209 - DNA, 25 bp, Homo sapien
gcaaaactcgactttagcacattgt

SEQ ID NO: 1255210 - DNA, 25 bp, Homo sapien
ggcggcattctttccacatgtctcg

SEQ ID NO: 1255211 - DNA, 25 bp, Homo sapien
caggctcttggattccacactgaac

SEQ ID NO: 1255212 - DNA, 25 bp, Homo sapien
tccacactgaacatcaaacacaggg

SEQ ID NO: 1255213 - DNA, 25 bp, Homo sapien
tgaacatcaaacacagggcacccat

SEQ ID NO: 1255214 - DNA, 25 bp, Homo sapien
gggcacccatgaaaccctgtgagat

SEQ ID NO: 1255215 - DNA, 25 bp, Homo sapien
gactggttctgagacagcttctcct

SEQ ID NO: 1255216 - DNA, 25 bp, Homo sapien
ttattgtgactggttctgagacagc

SEQ ID NO: 1255217 - DNA, 25 bp, Homo sapien
tgtgactggttctgagacagcttct

SEQ ID NO: 1255218 - DNA, 25 bp, Homo sapien
tggttctgagacagcttctcctcac

SEQ ID NO: 1255219 - DNA, 25 bp, Homo sapien
cgtcctgctcccagaaggaagactt

SEQ ID NO: 1255220 - DNA, 25 bp, Homo sapien
tcgtcctgctcccagaaggaagact

SEQ ID NO: 1255221 - DNA, 25 bp, Homo sapien
ctcgtcctgctcccagaaggaagac

SEQ ID NO: 1255222 - DNA, 25 bp, Homo sapien
aactctcagagcagaccctggtgaa

SEQ ID NO: 1255223 - DNA, 25 bp, Homo sapien
gattccagcctttggctaaaccatg

SEQ ID NO: 1255224 - DNA, 25 bp, Homo sapien
gaccctggtgaaacattcttgtgat

SEQ ID NO: 1255225 - DNA, 25 bp, Homo sapien
gaaagtaaaattgtgcgaaggtgaa

SEQ ID NO: 1255226 - DNA, 25 bp, Homo sapien
aagtcatggctaaataatcaagtgc

SEQ ID NO: 1255227 - DNA, 25 bp, Homo sapien
aataatcaagtgcagaatccatttc

SEQ ID NO: 1255228 - DNA, 25 bp, Homo sapien
tcatcattgataagtcatggctaaa

SEQ ID NO: 1255229 - DNA, 25 bp, Homo sapien
actgctttccaatccatcatcattg

SEQ ID NO: 1255230 - DNA, 25 bp, Homo sapien
tttacgcagccagaaagaacctgct

SEQ ID NO: 1255231 - DNA, 25 bp, Homo sapien
tgctctgaaagccacaggctaactt

SEQ ID NO: 1255232 - DNA, 25 bp, Homo sapien
gccacaggctaacttcatttttatg

SEQ ID NO: 1255233 - DNA, 25 bp, Homo sapien
gaacctgctctgaaagccacaggct

SEQ ID NO: 1255234 - DNA, 25 bp, Homo sapien
caggaaggctataactggtatctgc

SEQ ID NO: 1255235 - DNA, 25 bp, Homo sapien
gatgaaagactgtctgtctccccta

SEQ ID NO: 1255236 - DNA, 25 bp, Homo sapien
tagtgagcagaaactcgaaagatgg

SEQ ID NO: 1255237 - DNA, 25 bp, Homo sapien
acagggaacccaaaacaaggatgag

SEQ ID NO: 1255238 - DNA, 25 bp, Homo sapien
ctaatcgccactcttccactgactc

SEQ ID NO: 1255239 - DNA, 25 bp, Homo sapien
ctgggctggagtgtttgcagattgc

SEQ ID NO: 1255240 - DNA, 25 bp, Homo sapien
gtgtttgcagattgctaaaaaccat

SEQ ID NO: 1255241 - DNA, 25 bp, Homo sapien
ggctggagtgtttgcagattgctaa

SEQ ID NO: 1255242 - DNA, 25 bp, Homo sapien
ggagtgtttgcagattgctaaaaac

SEQ ID NO: 1255243 - DNA, 25 bp, Homo sapien
ctgacagccgccgtgcacctgggta

SEQ ID NO: 1255244 - DNA, 25 bp, Homo sapien
ctgtgaacagagttttgcctgctgc

SEQ ID NO: 1255245 - DNA, 25 bp, Homo sapien
cacctgggtaactgatgacctggcc

SEQ ID NO: 1255246 - DNA, 25 bp, Homo sapien
aactgatgacctggccacgcctata

SEQ ID NO: 1255247 - DNA, 25 bp, Homo sapien
gactccgatggagcggccttactaa

SEQ ID NO: 1255248 - DNA, 25 bp, Homo sapien
tctggccagacgacagcaggatagc

SEQ ID NO: 1255249 - DNA, 25 bp, Homo sapien
aatattttgtatgacggggactccg

SEQ ID NO: 1255250 - DNA, 25 bp, Homo sapien
gcaggatagcagacactgcaaccga

SEQ ID NO: 1255251 - DNA, 25 bp, Homo sapien
tatcgggaataagagcatccacctt

SEQ ID NO: 1255252 - DNA, 25 bp, Homo sapien
tattttctaattggctgtcagggag

SEQ ID NO: 1255253 - DNA, 25 bp, Homo sapien
ctagtcattctggaacttctccgta

SEQ ID NO: 1255254 - DNA, 25 bp, Homo sapien
ttctaattggctgtcagggaggtca

SEQ ID NO: 1255255 - DNA, 25 bp, Homo sapien
tctcattggccagatctacccaaac

SEQ ID NO: 1255256 - DNA, 25 bp, Homo sapien
gctctcattggccagatctacccaa

SEQ ID NO: 1255257 - DNA, 25 bp, Homo sapien
ttgctctcattggccagatctaccc

SEQ ID NO: 1255258 - DNA, 25 bp, Homo sapien
ctctcattggccagatctacccaaa

SEQ ID NO: 1255259 - DNA, 25 bp, Homo sapien
tagaacgggcagtagcctcatggct

SEQ ID NO: 1255260 - DNA, 25 bp, Homo sapien
aaaggcagcttagaacgggcagtag

SEQ ID NO: 1255261 - DNA, 25 bp, Homo sapien
gagtgatactgaaaggcagcttaga

SEQ ID NO: 1255262 - DNA, 25 bp, Homo sapien
agggagtgatactgaaaggcagctt

SEQ ID NO: 1255263 - DNA, 25 bp, Homo sapien
tggttgcaaagagcggtggttcggc

SEQ ID NO: 1255264 - DNA, 25 bp, Homo sapien
aagaagtggaaggccgatgtttctt

SEQ ID NO: 1255265 - DNA, 25 bp, Homo sapien
cggggtgtccttcaccttgttgaca

SEQ ID NO: 1255266 - DNA, 25 bp, Homo sapien
caccttgttgacagccctcagcagg

SEQ ID NO: 1255267 - DNA, 25 bp, Homo sapien
aaatggcagggacggcggatggtcc

SEQ ID NO: 1255268 - DNA, 25 bp, Homo sapien
ttgatccagaacctcgcacactggg

SEQ ID NO: 1255269 - DNA, 25 bp, Homo sapien
tcgcacactgggcaaatggcaggga

SEQ ID NO: 1255270 - DNA, 25 bp, Homo sapien
tcctgaaacttgatccagaacctcg

SEQ ID NO: 1255271 - DNA, 25 bp, Homo sapien
cttcaaagcagaagtcaggatttct

SEQ ID NO: 1255272 - DNA, 25 bp, Homo sapien
tgcttcaaagcagaagtcaggattt

SEQ ID NO: 1255273 - DNA, 25 bp, Homo sapien
ggctgcttcaaagcagaagtcagga

SEQ ID NO: 1255274 - DNA, 25 bp, Homo sapien
agtgggctgcttcaaagcagaagtc

SEQ ID NO: 1255275 - DNA, 25 bp, Homo sapien
tccccacagtttagtagttgctccg

SEQ ID NO: 1255276 - DNA, 25 bp, Homo sapien
caaatgaagcccagggccggagtca

SEQ ID NO: 1255277 - DNA, 25 bp, Homo sapien
cttcagcaagactagcaacggcggc

SEQ ID NO: 1255278 - DNA, 25 bp, Homo sapien
gactggcagtctgcgaactgaacaa

SEQ ID NO: 1255279 - DNA, 25 bp, Homo sapien
ctgcctccttgggtcttactttgct

SEQ ID NO: 1255280 - DNA, 25 bp, Homo sapien
gggtcttactttgctgctgggcctg

SEQ ID NO: 1255281 - DNA, 25 bp, Homo sapien
gggaaagccctcagctgaaaactgt

SEQ ID NO: 1255282 - DNA, 25 bp, Homo sapien
agccctcagctgaaaactgtctgcc

SEQ ID NO: 1255283 - DNA, 25 bp, Homo sapien
tgcttccatgtccagtgatgctggg

SEQ ID NO: 1255284 - DNA, 25 bp, Homo sapien
gacaggagtcctggtccacactgtt

SEQ ID NO: 1255285 - DNA, 25 bp, Homo sapien
cactgagtcctctcctggacaggag

SEQ ID NO: 1255286 - DNA, 25 bp, Homo sapien
ccacctgcttccatgtccagtgatg

SEQ ID NO: 1255287 - DNA, 25 bp, Homo sapien
acacccgtgtgcccctgtggcgtac

SEQ ID NO: 1255288 - DNA, 25 bp, Homo sapien
tcacacccgtgtgcccctgtggcgt

SEQ ID NO: 1255289 - DNA, 25 bp, Homo sapien
cacacccgtgtgcccctgtggcgta

SEQ ID NO: 1255290 - DNA, 25 bp, Homo sapien
caggaagccaattatctgggacaaa

SEQ ID NO: 1255291 - DNA, 25 bp, Homo sapien
ccaattatctgggacaaatttcagc

SEQ ID NO: 1255292 - DNA, 25 bp, Homo sapien
gccaattatctgggacaaatttcag

SEQ ID NO: 1255293 - DNA, 25 bp, Homo sapien
gaagccaattatctgggacaaattt

SEQ ID NO: 1255294 - DNA, 25 bp, Homo sapien
aaaatgcagggggtgacgtttgtct

SEQ ID NO: 1255295 - DNA, 25 bp, Homo sapien
ctttccagccttcttgtaggatagc

SEQ ID NO: 1255296 - DNA, 25 bp, Homo sapien
taggatagcgtcttccacacaggca

SEQ ID NO: 1255297 - DNA, 25 bp, Homo sapien
gaagttttgagtttagggccagaga

SEQ ID NO: 1255298 - DNA, 25 bp, Homo sapien
caaaaaaacgaatgagagacgagca

SEQ ID NO: 1255299 - DNA, 25 bp, Homo sapien
gagcagcgtgtttccacgccaaaaa

SEQ ID NO: 1255300 - DNA, 25 bp, Homo sapien
ctgaggactgagcagcgtgtttcca

SEQ ID NO: 1255301 - DNA, 25 bp, Homo sapien
cacgccaaaaaaacgaatgagagac

SEQ ID NO: 1255302 - DNA, 25 bp, Homo sapien
gctgagatgttttcaacctccacac

SEQ ID NO: 1255303 - DNA, 25 bp, Homo sapien
gagaacctccgtgaagtgcgctgag

SEQ ID NO: 1255304 - DNA, 25 bp, Homo sapien
gggtctctgagaacctccgtgaagt

SEQ ID NO: 1255305 - DNA, 25 bp, Homo sapien
caggttgacaggtttgcgtttccca

SEQ ID NO: 1255306 - DNA, 25 bp, Homo sapien
cacacacacgggagtctgcggaggc

SEQ ID NO: 1255307 - DNA, 25 bp, Homo sapien
tccagagcacacacacgggagtctg

SEQ ID NO: 1255308 - DNA, 25 bp, Homo sapien
cttagcacggctccccttaggggct

SEQ ID NO: 1255309 - DNA, 25 bp, Homo sapien
ttggaggtgagaccgcccaaatcca

SEQ ID NO: 1255310 - DNA, 25 bp, Homo sapien
tgtctaatgcccctcgtgataaaca

SEQ ID NO: 1255311 - DNA, 25 bp, Homo sapien
ctcgtgataaacagccacccatagg

SEQ ID NO: 1255312 - DNA, 25 bp, Homo sapien
gttgatttgtgcctgcgctattgct

SEQ ID NO: 1255313 - DNA, 25 bp, Homo sapien
tgtgcctgcgctattgctgtttcat

SEQ ID NO: 1255314 - DNA, 25 bp, Homo sapien
tctgaagggaccactagcacagctg

SEQ ID NO: 1255315 - DNA, 25 bp, Homo sapien
ccaccgcggagacaaagtacggctg

SEQ ID NO: 1255316 - DNA, 25 bp, Homo sapien
gctgagtctgatctgcacacactga

SEQ ID NO: 1255317 - DNA, 25 bp, Homo sapien
tgctttaagtctgagcaccaccgcg

SEQ ID NO: 1255318 - DNA, 25 bp, Homo sapien
tggatttcagtgaaaaagcctttgt

SEQ ID NO: 1255319 - DNA, 25 bp, Homo sapien
cttgagtttggatttcagtgaaaaa

SEQ ID NO: 1255320 - DNA, 25 bp, Homo sapien
gaaaaagcctttgttgatgcttcgt

SEQ ID NO: 1255321 - DNA, 25 bp, Homo sapien
gagtttggatttcagtgaaaaagcc

SEQ ID NO: 1255322 - DNA, 25 bp, Homo sapien
atgcaaaatccgtgaggagcctgtg

SEQ ID NO: 1255323 - DNA, 25 bp, Homo sapien
aatgcaaaatccgtgaggagcctgt

SEQ ID NO: 1255324 - DNA, 25 bp, Homo sapien
ggaatgcaaaatccgtgaggagcct

SEQ ID NO: 1255325 - DNA, 25 bp, Homo sapien
aaggaatgcaaaatccgtgaggagc

SEQ ID NO: 1255326 - DNA, 25 bp, Homo sapien
tagggcacagcttcgtccatcactg

SEQ ID NO: 1255327 - DNA, 25 bp, Homo sapien
cacaatggaataaatcaggagcagg

SEQ ID NO: 1255328 - DNA, 25 bp, Homo sapien
gaatgctagcatgtcacagtccacc

SEQ ID NO: 1255329 - DNA, 25 bp, Homo sapien
gagtcatttctgtggaagctcttcc

SEQ ID NO: 1255330 - DNA, 25 bp, Homo sapien
ccatgtaggggatgcatcgcccaga

SEQ ID NO: 1255331 - DNA, 25 bp, Homo sapien
taggggatgcactgccgagttccac

SEQ ID NO: 1255332 - DNA, 25 bp, Homo sapien
gaaagctcttccttgtaggggaagc

SEQ ID NO: 1255333 - DNA, 25 bp, Homo sapien
ccggttaggggatgcattgcccaga

SEQ ID NO: 1255334 - DNA, 25 bp, Homo sapien
ggagagtggactcattgccgcagtt

SEQ ID NO: 1255335 - DNA, 25 bp, Homo sapien
tctgtttgcatttgcaagcaaggac

SEQ ID NO: 1255336 - DNA, 25 bp, Homo sapien
ttttctctgtttgcatttgcaagca

SEQ ID NO: 1255337 - DNA, 25 bp, Homo sapien
tttgcatttgcaagcaaggactgtt

SEQ ID NO: 1255338 - DNA, 25 bp, Homo sapien
tgtttgcatttgcaagcaaggactg

SEQ ID NO: 1255339 - DNA, 25 bp, Homo sapien
tggcaggagctaagggtaagtaagg

SEQ ID NO: 1255340 - DNA, 25 bp, Homo sapien
tccaggaagcgaaagactgttctaa

SEQ ID NO: 1255341 - DNA, 25 bp, Homo sapien
tgctgagccaattttcctccgtgcc

SEQ ID NO: 1255342 - DNA, 25 bp, Homo sapien
gactgttctaatccatgctgagcca

SEQ ID NO: 1255343 - DNA, 25 bp, Homo sapien
tccattatgacagcatgggcagaac

SEQ ID NO: 1255344 - DNA, 25 bp, Homo sapien
cattatgacagcatgggcagaacga

SEQ ID NO: 1255345 - DNA, 25 bp, Homo sapien
catccattatgacagcatgggcaga

SEQ ID NO: 1255346 - DNA, 25 bp, Homo sapien
ccatccattatgacagcatgggcag

SEQ ID NO: 1255347 - DNA, 25 bp, Homo sapien
tgatgagtggccaacgctcttcctg

SEQ ID NO: 1255348 - DNA, 25 bp, Homo sapien
tcgggtctgcgtcattctaatagca

SEQ ID NO: 1255349 - DNA, 25 bp, Homo sapien
ggaacttgccttttagtgacctggc

SEQ ID NO: 1255350 - DNA, 25 bp, Homo sapien
gaatttaatcatgcaggagctgctg

SEQ ID NO: 1255351 - DNA, 25 bp, Homo sapien
ccagggaccccgggaccctgcgcat

SEQ ID NO: 1255352 - DNA, 25 bp, Homo sapien
ttgagaaagcagcagtggacgctcc

SEQ ID NO: 1255353 - DNA, 25 bp, Homo sapien
tatagacgcgggttacactaaggtc

SEQ ID NO: 1255354 - DNA, 25 bp, Homo sapien
ctggacgcccagtttttatagacgc

SEQ ID NO: 1255355 - DNA, 25 bp, Homo sapien
taaacactgggtaagtgacaactgg

SEQ ID NO: 1255356 - DNA, 25 bp, Homo sapien
tgcacagacactccatcgacatgga

SEQ ID NO: 1255357 - DNA, 25 bp, Homo sapien
cgagagaggcagagcctcgctccca

SEQ ID NO: 1255358 - DNA, 25 bp, Homo sapien
tcgctcccaaactgcacagacactc

SEQ ID NO: 1255359 - DNA, 25 bp, Homo sapien
ggaggtgatcgctgccacacagcct

SEQ ID NO: 1255360 - DNA, 25 bp, Homo sapien
caaagggacggtcactatttcactc

SEQ ID NO: 1255361 - DNA, 25 bp, Homo sapien
gcagctgttaacaggcacggccttc

SEQ ID NO: 1255362 - DNA, 25 bp, Homo sapien
gctgttaacaggcacggccttctcc

SEQ ID NO: 1255363 - DNA, 25 bp, Homo sapien
ccagctctcgggctcaaagggacgg

SEQ ID NO: 1255364 - DNA, 25 bp, Homo sapien
aacgctgtgattggaaaatgataag

SEQ ID NO: 1255365 - DNA, 25 bp, Homo sapien
cgctgtgattggaaaatgataagat

SEQ ID NO: 1255366 - DNA, 25 bp, Homo sapien
ttaacgctgtgattggaaaatgata

SEQ ID NO: 1255367 - DNA, 25 bp, Homo sapien
cattaacgctgtgattggaaaatga

SEQ ID NO: 1255368 - DNA, 25 bp, Homo sapien
tacaaggtgatctgcttcttccgtg

SEQ ID NO: 1255369 - DNA, 25 bp, Homo sapien
gaacagatgcgaagcatgactttca

SEQ ID NO: 1255370 - DNA, 25 bp, Homo sapien
gattctgaagtatctcgagccaagg

SEQ ID NO: 1255371 - DNA, 25 bp, Homo sapien
ggaaggcattttgacctccacaagt

SEQ ID NO: 1255372 - DNA, 25 bp, Homo sapien
taactgcccgggtcaccacagtggc

SEQ ID NO: 1255373 - DNA, 25 bp, Homo sapien
aagcacaatttctaactgcccgggt

SEQ ID NO: 1255374 - DNA, 25 bp, Homo sapien
atcactgtttagcttcaggaagctg

SEQ ID NO: 1255375 - DNA, 25 bp, Homo sapien
gtcaccacagtggctgcggcttcac

SEQ ID NO: 1255376 - DNA, 25 bp, Homo sapien
ctctccactgagaagagcgtggtca

SEQ ID NO: 1255377 - DNA, 25 bp, Homo sapien
gtggtcagcgggctgtccatctggt

SEQ ID NO: 1255378 - DNA, 25 bp, Homo sapien
tgtcccagcagagacgtgtcccaac

SEQ ID NO: 1255379 - DNA, 25 bp, Homo sapien
gggcagccagcgactgccgaagcca

SEQ ID NO: 1255380 - DNA, 25 bp, Homo sapien
acgcagccatctgccccgttgacca

SEQ ID NO: 1255381 - DNA, 25 bp, Homo sapien
ccgaaacagaacacgcagccatctg

SEQ ID NO: 1255382 - DNA, 25 bp, Homo sapien
gcgtggccgaaacagaacacgcagc

SEQ ID NO: 1255383 - DNA, 25 bp, Homo sapien
ccagtttggcgtggccgaaacagaa

SEQ ID NO: 1255384 - DNA, 25 bp, Homo sapien
tcaattcactaaacatatcaagcgt

SEQ ID NO: 1255385 - DNA, 25 bp, Homo sapien
agcaaggcctctgttggaatctctg

SEQ ID NO: 1255386 - DNA, 25 bp, Homo sapien
tgaagctcctcaattcactaaacat

SEQ ID NO: 1255387 - DNA, 25 bp, Homo sapien
catatcaagcgtgtaagggcaaggc

SEQ ID NO: 1255388 - DNA, 25 bp, Homo sapien
cgttcgtttatgagcttgaagagcc

SEQ ID NO: 1255389 - DNA, 25 bp, Homo sapien
tggcacagggaatgatgcccaggtt

SEQ ID NO: 1255390 - DNA, 25 bp, Homo sapien
cggactgagaaacgggcgccggtct

SEQ ID NO: 1255391 - DNA, 25 bp, Homo sapien
tccacggcggaaacccggactgaga

SEQ ID NO: 1255392 - DNA, 25 bp, Homo sapien
gatgtgcagtgtgaagaacacgtgt

SEQ ID NO: 1255393 - DNA, 25 bp, Homo sapien
acagtcctgttggtggctcctgcgg

SEQ ID NO: 1255394 - DNA, 25 bp, Homo sapien
gcggtggtcgtcctcatcacagtcc

SEQ ID NO: 1255395 - DNA, 25 bp, Homo sapien
gcaatggcggcatccaggaaaaagg

SEQ ID NO: 1255396 - DNA, 25 bp, Homo sapien
gtggcagtctgtctcaaggaaccca

SEQ ID NO: 1255397 - DNA, 25 bp, Homo sapien
cagcaccagcactgtggcagtctgt

SEQ ID NO: 1255398 - DNA, 25 bp, Homo sapien
caacagcatgcagcggacacagcac

SEQ ID NO: 1255399 - DNA, 25 bp, Homo sapien
ccagcactgtggcagtctgtctcaa

SEQ ID NO: 1255400 - DNA, 25 bp, Homo sapien
gctcacacaagctgaatatccctta

SEQ ID NO: 1255401 - DNA, 25 bp, Homo sapien
catatcttggaaataggacccaacg

SEQ ID NO: 1255402 - DNA, 25 bp, Homo sapien
tcccagacattgataagattccagt

SEQ ID NO: 1255403 - DNA, 25 bp, Homo sapien
cattgactcacagtgaaggaagaca

SEQ ID NO: 1255404 - DNA, 25 bp, Homo sapien
aggtccgtttgggccagaaagccat

SEQ ID NO: 1255405 - DNA, 25 bp, Homo sapien
caggtccgtttgggccagaaagcca

SEQ ID NO: 1255406 - DNA, 25 bp, Homo sapien
cgtcattgggtcttccccaggtccg

SEQ ID NO: 1255407 - DNA, 25 bp, Homo sapien
tagctcctcctgttatgggcaagaa

SEQ ID NO: 1255408 - DNA, 25 bp, Homo sapien
tccacttgtgcagagacttgctgag

SEQ ID NO: 1255409 - DNA, 25 bp, Homo sapien
tcagccaatgagaaaggcccatcag

SEQ ID NO: 1255410 - DNA, 25 bp, Homo sapien
ccatcttatagcagaccctgaggag

SEQ ID NO: 1255411 - DNA, 25 bp, Homo sapien
tcaatgagatgcaggcggctgcgac

SEQ ID NO: 1255412 - DNA, 25 bp, Homo sapien
tttgctaagagctttcacacagctg

SEQ ID NO: 1255413 - DNA, 25 bp, Homo sapien
tttgctgccattgacgagagccagg

SEQ ID NO: 1255414 - DNA, 25 bp, Homo sapien
tccttctcgatttttgctaagagct

SEQ ID NO: 1255415 - DNA, 25 bp, Homo sapien
tggtggagtggctttgtctctgcca

SEQ ID NO: 1255416 - DNA, 25 bp, Homo sapien
cacacggtccaatgagaacgcttag

SEQ ID NO: 1255417 - DNA, 25 bp, Homo sapien
ttgtctctgccagacataggagcgg

SEQ ID NO: 1255418 - DNA, 25 bp, Homo sapien
tgccaccacacggtccaatgagaac

SEQ ID NO: 1255419 - DNA, 25 bp, Homo sapien
ggtctttttaagatcacgtacaatg

SEQ ID NO: 1255420 - DNA, 25 bp, Homo sapien
cacgtacaatgaagggcattaggac

SEQ ID NO: 1255421 - DNA, 25 bp, Homo sapien
atattgaatctaggccgtggtccag

SEQ ID NO: 1255422 - DNA, 25 bp, Homo sapien
ctcggagaaaacatttcggcaaggg

SEQ ID NO: 1255423 - DNA, 25 bp, Homo sapien
gaacattcctacgtttgaggcaaga

SEQ ID NO: 1255424 - DNA, 25 bp, Homo sapien
gacttgatgatctcgctgtccatga

SEQ ID NO: 1255425 - DNA, 25 bp, Homo sapien
caaatggcataagcaggtctgtcct

SEQ ID NO: 1255426 - DNA, 25 bp, Homo sapien
tactagagaagtaccagaagcttgg

SEQ ID NO: 1255427 - DNA, 25 bp, Homo sapien
ttccccagagactcccgcagcaaca

SEQ ID NO: 1255428 - DNA, 25 bp, Homo sapien
gttccccagagactcccgcagcaac

SEQ ID NO: 1255429 - DNA, 25 bp, Homo sapien
tccccagagactcccgcagcaacat

SEQ ID NO: 1255430 - DNA, 25 bp, Homo sapien
cgcgatcatggtggtacggcagttc

SEQ ID NO: 1255431 - DNA, 25 bp, Homo sapien
ccgcggccgagatgtgcgcgatcat

SEQ ID NO: 1255432 - DNA, 25 bp, Homo sapien
ctcgatgcaatctggatggtggaca

SEQ ID NO: 1255433 - DNA, 25 bp, Homo sapien
tcctcaagactctcgatgcaatctg

SEQ ID NO: 1255434 - DNA, 25 bp, Homo sapien
gggagttgagaacctctttggtgcc

SEQ ID NO: 1255435 - DNA, 25 bp, Homo sapien
taaagcggaccaagtgcttccggtc

SEQ ID NO: 1255436 - DNA, 25 bp, Homo sapien
gtccagcagactcagtatcatccag

SEQ ID NO: 1255437 - DNA, 25 bp, Homo sapien
aagccttcgaaggacacagtctcca

SEQ ID NO: 1255438 - DNA, 25 bp, Homo sapien
ccggaatccttgctcgagggaggca

SEQ ID NO: 1255439 - DNA, 25 bp, Homo sapien
tcatcgacaggagtttccgggaacc

SEQ ID NO: 1255440 - DNA, 25 bp, Homo sapien
tactccgaggtcttggacaggctgg

SEQ ID NO: 1255441 - DNA, 25 bp, Homo sapien
ggctggcacgatagggacaaagtct

SEQ ID NO: 1255442 - DNA, 25 bp, Homo sapien
ggaccccgctgatggtcagctcctc

SEQ ID NO: 1255443 - DNA, 25 bp, Homo sapien
aggaccccgctgatggtcagctcct

SEQ ID NO: 1255444 - DNA, 25 bp, Homo sapien
tctgggctatgaaactgtggcacga

SEQ ID NO: 1255445 - DNA, 25 bp, Homo sapien
cccgtgcagagcagtcgctgttgaa

SEQ ID NO: 1255446 - DNA, 25 bp, Homo sapien
agctgatggaagagcgtctgctccc

SEQ ID NO: 1255447 - DNA, 25 bp, Homo sapien
tggagtagcactccaggtcctcgct

SEQ ID NO: 1255448 - DNA, 25 bp, Homo sapien
taaactgtgatattggtcttcatgg

SEQ ID NO: 1255449 - DNA, 25 bp, Homo sapien
cactgtggatattttgcagcctttg

SEQ ID NO: 1255450 - DNA, 25 bp, Homo sapien
cccatctcagacaggatgagcaagt

SEQ ID NO: 1255451 - DNA, 25 bp, Homo sapien
gggcctccggctcttggatgttccg

SEQ ID NO: 1255452 - DNA, 25 bp, Homo sapien
ggaaggctgctggacttgacgcttt

SEQ ID NO: 1255453 - DNA, 25 bp, Homo sapien
tttgggccgagccagaacacagtgc

SEQ ID NO: 1255454 - DNA, 25 bp, Homo sapien
ttgacgcttttgttgggatgcacgg

SEQ ID NO: 1255455 - DNA, 25 bp, Homo sapien
tcagcagcgcagtaataggagaggc

SEQ ID NO: 1255456 - DNA, 25 bp, Homo sapien
gtcttgccgctaggctcgtctggga

SEQ ID NO: 1255457 - DNA, 25 bp, Homo sapien
tagtggctgactgtcgccctgccca

SEQ ID NO: 1255458 - DNA, 25 bp, Homo sapien
gctgctggcgtccttcgtcttgccg

SEQ ID NO: 1255459 - DNA, 25 bp, Homo sapien
ttgcccgcgtgcagccgggagctca

SEQ ID NO: 1255460 - DNA, 25 bp, Homo sapien
ggactggccggccttgggcgaggcc

SEQ ID NO: 1255461 - DNA, 25 bp, Homo sapien
gaggagtctgctcacggcggagatc

SEQ ID NO: 1255462 - DNA, 25 bp, Homo sapien
ctgctcacggcggagatcttggact

SEQ ID NO: 1255463 - DNA, 25 bp, Homo sapien
gtggtggaggcggacgggccgcgcg

SEQ ID NO: 1255464 - DNA, 25 bp, Homo sapien
gggggcgagctggagccctggccca

SEQ ID NO: 1255465 - DNA, 25 bp, Homo sapien
ggggcgagctggagccctggcccac

SEQ ID NO: 1255466 - DNA, 25 bp, Homo sapien
ggggggcgagctggagccctggccc

SEQ ID NO: 1255467 - DNA, 25 bp, Homo sapien
cggggggcgagctggagccctggcc

SEQ ID NO: 1255468 - DNA, 25 bp, Homo sapien
agatgcgcccgctgacggcccgcag

SEQ ID NO: 1255469 - DNA, 25 bp, Homo sapien
agcttggaggccaggcccgagctcc

SEQ ID NO: 1255470 - DNA, 25 bp, Homo sapien
cgcaggggaagcttggaggccaggc

SEQ ID NO: 1255471 - DNA, 25 bp, Homo sapien
agcagctccgagatgcgcccgctga

SEQ ID NO: 1255472 - DNA, 25 bp, Homo sapien
ctgtagggcgacgggagcaggtgcg

SEQ ID NO: 1255473 - DNA, 25 bp, Homo sapien
gacgggagcaggtgcgcggccgcgg

SEQ ID NO: 1255474 - DNA, 25 bp, Homo sapien
gggcgacgggagcaggtgcgcggcc

SEQ ID NO: 1255475 - DNA, 25 bp, Homo sapien
gtagggcgacgggagcaggtgcgcg

SEQ ID NO: 1255476 - DNA, 25 bp, Homo sapien
gtggggcctccgcgggggcgtgatc

SEQ ID NO: 1255477 - DNA, 25 bp, Homo sapien
ctgcagcggtggggcctccgcgggg

SEQ ID NO: 1255478 - DNA, 25 bp, Homo sapien
cagcggtggggcctccgcgggggcg

SEQ ID NO: 1255479 - DNA, 25 bp, Homo sapien
gggcctccgcgggggcgtgatcttg

SEQ ID NO: 1255480 - DNA, 25 bp, Homo sapien
tgctgttctcgctcgtggagtcctg

SEQ ID NO: 1255481 - DNA, 25 bp, Homo sapien
atcacgctctcgtagccgctgctgc

SEQ ID NO: 1255482 - DNA, 25 bp, Homo sapien
tgtggtagaacagggccgtcttccc

SEQ ID NO: 1255483 - DNA, 25 bp, Homo sapien
ccgtcttccccatggccggcgggag

SEQ ID NO: 1255484 - DNA, 25 bp, Homo sapien
tgatccctcaacaggctgtaaaccg

SEQ ID NO: 1255485 - DNA, 25 bp, Homo sapien
gctgtaaaccgtccacaggatcctt

SEQ ID NO: 1255486 - DNA, 25 bp, Homo sapien
aatggacggcgaagagccaggctgc

SEQ ID NO: 1255487 - DNA, 25 bp, Homo sapien
aggtgcgggtcatgctgccacctgc

SEQ ID NO: 1255488 - DNA, 25 bp, Homo sapien
ggggcttctgaagccaccaggtcat

SEQ ID NO: 1255489 - DNA, 25 bp, Homo sapien
tgaagccaccaggtcatgagggtag

SEQ ID NO: 1255490 - DNA, 25 bp, Homo sapien
gcttctgaagccaccaggtcatgag

SEQ ID NO: 1255491 - DNA, 25 bp, Homo sapien
ttctgaagccaccaggtcatgaggg

SEQ ID NO: 1255492 - DNA, 25 bp, Homo sapien
tcccacatccctgagagaggctgcc

SEQ ID NO: 1255493 - DNA, 25 bp, Homo sapien
atcccacatccctgagagaggctgc

SEQ ID NO: 1255494 - DNA, 25 bp, Homo sapien
tatcccacatccctgagagaggctg

SEQ ID NO: 1255495 - DNA, 25 bp, Homo sapien
ttatcccacatccctgagagaggct

SEQ ID NO: 1255496 - DNA, 25 bp, Homo sapien
ttttacttccacatatgctgcgggc

SEQ ID NO: 1255497 - DNA, 25 bp, Homo sapien
ccatcttttacttccacatatgctg

SEQ ID NO: 1255498 - DNA, 25 bp, Homo sapien
atgctgcgggcacggatccctgcag

SEQ ID NO: 1255499 - DNA, 25 bp, Homo sapien
tccacatatgctgcgggcacggatc

SEQ ID NO: 1255500 - DNA, 25 bp, Homo sapien
gccttgtcccctgtgccggctgcct

SEQ ID NO: 1255501 - DNA, 25 bp, Homo sapien
acacaccagaaactatcaccaagct

SEQ ID NO: 1255502 - DNA, 25 bp, Homo sapien
agtggccttgtcccctgtgccggct

SEQ ID NO: 1255503 - DNA, 25 bp, Homo sapien
ctccacccacacaccagaaactatc

SEQ ID NO: 1255504 - DNA, 25 bp, Homo sapien
tcaagagcctgtaatgactccccat

SEQ ID NO: 1255505 - DNA, 25 bp, Homo sapien
tgactgtggcttgcgtttgctagcg

SEQ ID NO: 1255506 - DNA, 25 bp, Homo sapien
aatgtgtactgttcttgtagctccc

SEQ ID NO: 1255507 - DNA, 25 bp, Homo sapien
tgtagctcccagatgttccaggtgt

SEQ ID NO: 1255508 - DNA, 25 bp, Homo sapien
ctgtgctgcttgaatttattaaaac

SEQ ID NO: 1255509 - DNA, 25 bp, Homo sapien
gaagtctgacagcaagcggcttgcc

SEQ ID NO: 1255510 - DNA, 25 bp, Homo sapien
ctattctcaactggctctaggttgg

SEQ ID NO: 1255511 - DNA, 25 bp, Homo sapien
gttggttcgcttagaaacattctgg

SEQ ID NO: 1255512 - DNA, 25 bp, Homo sapien
caactgtgtattcaaaaaggctctc

SEQ ID NO: 1255513 - DNA, 25 bp, Homo sapien
tctgcattctgattcaaagagtagg

SEQ ID NO: 1255514 - DNA, 25 bp, Homo sapien
cccacacgagtctgcagatgctgct

SEQ ID NO: 1255515 - DNA, 25 bp, Homo sapien
gagaagctgacattgggccttctac

SEQ ID NO: 1255516 - DNA, 25 bp, Homo sapien
taacatccctgagtccagacagaag

SEQ ID NO: 1255517 - DNA, 25 bp, Homo sapien
gggtcgctggcccatcacagtccat

SEQ ID NO: 1255518 - DNA, 25 bp, Homo sapien
aggggtcgctggcccatcacagtcc

SEQ ID NO: 1255519 - DNA, 25 bp, Homo sapien
cgtgcagtcagaggggtcgctggcc

SEQ ID NO: 1255520 - DNA, 25 bp, Homo sapien
agctgcgtgcagtcagaggggtcgc

SEQ ID NO: 1255521 - DNA, 25 bp, Homo sapien
tccagggatagtgctgggataagcc

SEQ ID NO: 1255522 - DNA, 25 bp, Homo sapien
gggctgctccgcaaggggccatcca

SEQ ID NO: 1255523 - DNA, 25 bp, Homo sapien
catagactttaatctcaaagggttc

SEQ ID NO: 1255524 - DNA, 25 bp, Homo sapien
tccacgtcatcgatttcatagactt

SEQ ID NO: 1255525 - DNA, 25 bp, Homo sapien
attcactgagccacttgttgggatc

SEQ ID NO: 1255526 - DNA, 25 bp, Homo sapien
tcagctttgcattgaagcacatggc

SEQ ID NO: 1255527 - DNA, 25 bp, Homo sapien
tgttgggatccagcatcagatactg

SEQ ID NO: 1255528 - DNA, 25 bp, Homo sapien
gatactgtttggtcgcctccagctc

SEQ ID NO: 1255529 - DNA, 25 bp, Homo sapien
agctgctttggaacataaacctaag

SEQ ID NO: 1255530 - DNA, 25 bp, Homo sapien
gctgctttggaacataaacctaagc

SEQ ID NO: 1255531 - DNA, 25 bp, Homo sapien
tcatcatgagatgggccttgcagaa

SEQ ID NO: 1255532 - DNA, 25 bp, Homo sapien
agctcccaaacctgctccaagtcaa

SEQ ID NO: 1255533 - DNA, 25 bp, Homo sapien
ggcgcctggaggtgatgtcgaagca

SEQ ID NO: 1255534 - DNA, 25 bp, Homo sapien
ccttgcagaagttgacacggctctc

SEQ ID NO: 1255535 - DNA, 25 bp, Homo sapien
tatgaattttgagggccacgcaaac

SEQ ID NO: 1255536 - DNA, 25 bp, Homo sapien
tctttgatgccccagcacagagggc

SEQ ID NO: 1255537 - DNA, 25 bp, Homo sapien
ggctcgtgccgagggaagtctctct

SEQ ID NO: 1255538 - DNA, 25 bp, Homo sapien
tgacgtttgcacctttcctacagaa

SEQ ID NO: 1255539 - DNA, 25 bp, Homo sapien
caaaagggaagcgtgctctgcacac

SEQ ID NO: 1255540 - DNA, 25 bp, Homo sapien
gaggtacactgaccaagaaacgtag

SEQ ID NO: 1255541 - DNA, 25 bp, Homo sapien
agattctgggctgcactatcatcag

SEQ ID NO: 1255542 - DNA, 25 bp, Homo sapien
taagtaccatcctcgatgcgaaggc

SEQ ID NO: 1255543 - DNA, 25 bp, Homo sapien
cctgcgagatcctgcgaggtgttct

SEQ ID NO: 1255544 - DNA, 25 bp, Homo sapien
taaaagcagatttaggcaggaggca

SEQ ID NO: 1255545 - DNA, 25 bp, Homo sapien
gaaggattccatcggtttcagtcca

SEQ ID NO: 1255546 - DNA, 25 bp, Homo sapien
gggcgaaagccaaactcatcgatga

SEQ ID NO: 1255547 - DNA, 25 bp, Homo sapien
tgcaatgcgacgtggagtgactccc

SEQ ID NO: 1255548 - DNA, 25 bp, Homo sapien
gacaggttcacacaaggagttagac

SEQ ID NO: 1255549 - DNA, 25 bp, Homo sapien
tggcaactggcgaataaacaacggg

SEQ ID NO: 1255550 - DNA, 25 bp, Homo sapien
ggaactatcatgtctggccactggg

SEQ ID NO: 1255551 - DNA, 25 bp, Homo sapien
aggctaatttatgacaaaccaggcc

SEQ ID NO: 1255552 - DNA, 25 bp, Homo sapien
taatttatgacaaaccaggccagat

SEQ ID NO: 1255553 - DNA, 25 bp, Homo sapien
gctaatttatgacaaaccaggccag

SEQ ID NO: 1255554 - DNA, 25 bp, Homo sapien
tttatgacaaaccaggccagattcc

SEQ ID NO: 1255555 - DNA, 25 bp, Homo sapien
cacacgtgtggaccttgggaacaac

SEQ ID NO: 1255556 - DNA, 25 bp, Homo sapien
cacggcacgtggatagcatttccaa

SEQ ID NO: 1255557 - DNA, 25 bp, Homo sapien
gatgctctcccagaagggcagctgt

SEQ ID NO: 1255558 - DNA, 25 bp, Homo sapien
ggcacaataaatgcacctgggcaga

SEQ ID NO: 1255559 - DNA, 25 bp, Homo sapien
catgcacaaaactagcctgccaagg

SEQ ID NO: 1255560 - DNA, 25 bp, Homo sapien
cgtttatatagcttgcaaaggccca

SEQ ID NO: 1255561 - DNA, 25 bp, Homo sapien
caaaaagtcagagatcgtagccagc

SEQ ID NO: 1255562 - DNA, 25 bp, Homo sapien
tgccacacagcttaatggattcatg

SEQ ID NO: 1255563 - DNA, 25 bp, Homo sapien
caggtggaccccaaagtagcttcct

SEQ ID NO: 1255564 - DNA, 25 bp, Homo sapien
tggaccccaaagtagcttcctcagg

SEQ ID NO: 1255565 - DNA, 25 bp, Homo sapien
gctggatgctcacagcgcgcccttc

SEQ ID NO: 1255566 - DNA, 25 bp, Homo sapien
accccaaagtagcttcctcaggtgg

SEQ ID NO: 1255567 - DNA, 25 bp, Homo sapien
tctaaactacttattctggcttcgg

SEQ ID NO: 1255568 - DNA, 25 bp, Homo sapien
tcaccgtctaaactacttattctgg

SEQ ID NO: 1255569 - DNA, 25 bp, Homo sapien
tgccctcaccgtctaaactacttat

SEQ ID NO: 1255570 - DNA, 25 bp, Homo sapien
ttattctggcttcggcaacacaccc

SEQ ID NO: 1255571 - DNA, 25 bp, Homo sapien
actactatagattaaggctgcaagg

SEQ ID NO: 1255572 - DNA, 25 bp, Homo sapien
tgcaaggtagttgatttgactcaag

SEQ ID NO: 1255573 - DNA, 25 bp, Homo sapien
cccttgagatggacaaaggtgctgg

SEQ ID NO: 1255574 - DNA, 25 bp, Homo sapien
cccgagcagtaaggctagaggtgaa

SEQ ID NO: 1255575 - DNA, 25 bp, Homo sapien
tttgggtgctcttgtattagatgca

SEQ ID NO: 1255576 - DNA, 25 bp, Homo sapien
gatttcaagttacccaccagccttg

SEQ ID NO: 1255577 - DNA, 25 bp, Homo sapien
ggatgatctcacactcctgatttca

SEQ ID NO: 1255578 - DNA, 25 bp, Homo sapien
gtacacttgacccagagctgagtgc

SEQ ID NO: 1255579 - DNA, 25 bp, Homo sapien
cctctcgtagaattcagctataaat

SEQ ID NO: 1255580 - DNA, 25 bp, Homo sapien
cgtagaattcagctataaatctgta

SEQ ID NO: 1255581 - DNA, 25 bp, Homo sapien
tacctctcgtagaattcagctataa

SEQ ID NO: 1255582 - DNA, 25 bp, Homo sapien
ctcgtagaattcagctataaatctg

SEQ ID NO: 1255583 - DNA, 25 bp, Homo sapien
cagtggggagtagaccttactctta

SEQ ID NO: 1255584 - DNA, 25 bp, Homo sapien
ccttccatgaacaggaatatactgg

SEQ ID NO: 1255585 - DNA, 25 bp, Homo sapien
aacaggaatatactggatcagtggg

SEQ ID NO: 1255586 - DNA, 25 bp, Homo sapien
catgaacaggaatatactggatcag

SEQ ID NO: 1255587 - DNA, 25 bp, Homo sapien
ccaggccgcaagtcctagagattgc

SEQ ID NO: 1255588 - DNA, 25 bp, Homo sapien
ccccagcaatggctgatttagagca

SEQ ID NO: 1255589 - DNA, 25 bp, Homo sapien
tccttgtattcctgcatcggctgcc

SEQ ID NO: 1255590 - DNA, 25 bp, Homo sapien
gagcatgcagttctgttgttcccat

SEQ ID NO: 1255591 - DNA, 25 bp, Homo sapien
cgtgcgggtatcataggaagcgctt

SEQ ID NO: 1255592 - DNA, 25 bp, Homo sapien
tctgggccgccatgcccttgtgtgc

SEQ ID NO: 1255593 - DNA, 25 bp, Homo sapien
gacactttaacaggaccctctgggc

SEQ ID NO: 1255594 - DNA, 25 bp, Homo sapien
gggccggctgatcccaaaacactgg

SEQ ID NO: 1255595 - DNA, 25 bp, Homo sapien
ccccaggagagtgtgagggcttcgt

SEQ ID NO: 1255596 - DNA, 25 bp, Homo sapien
tatcttggcaaccagctcagtgcca

SEQ ID NO: 1255597 - DNA, 25 bp, Homo sapien
tttcacattgcagtaggcatacccg

SEQ ID NO: 1255598 - DNA, 25 bp, Homo sapien
gtaggcatacccgatgaccaccctt

SEQ ID NO: 1255599 - DNA, 25 bp, Homo sapien
tgcgtcctctttctttggtccacga

SEQ ID NO: 1255600 - DNA, 25 bp, Homo sapien
tagccggagtcgtgtgcgtcctctt

SEQ ID NO: 1255601 - DNA, 25 bp, Homo sapien
tctgaaacagcccatagccggagtc

SEQ ID NO: 1255602 - DNA, 25 bp, Homo sapien
cgacaacaccgtattctattctgtt

SEQ ID NO: 1255603 - DNA, 25 bp, Homo sapien
tggttaaatccaatatggtaaattc

SEQ ID NO: 1255604 - DNA, 25 bp, Homo sapien
catatttggttaaatccaatatggt

SEQ ID NO: 1255605 - DNA, 25 bp, Homo sapien
tatttggttaaatccaatatggtaa

SEQ ID NO: 1255606 - DNA, 25 bp, Homo sapien
tcatatttggttaaatccaatatgg

SEQ ID NO: 1255607 - DNA, 25 bp, Homo sapien
cccggaatccagtatcttgtaggtg

SEQ ID NO: 1255608 - DNA, 25 bp, Homo sapien
ggaatccagtatcttgtaggtgcat

SEQ ID NO: 1255609 - DNA, 25 bp, Homo sapien
gacccggaatccagtatcttgtagg

SEQ ID NO: 1255610 - DNA, 25 bp, Homo sapien
gccggacccggaatccagtatcttg

SEQ ID NO: 1255611 - DNA, 25 bp, Homo sapien
ccagtggaaacacactcaggctctg

SEQ ID NO: 1255612 - DNA, 25 bp, Homo sapien
tatcccatcaccagagcaaccatcc

SEQ ID NO: 1255613 - DNA, 25 bp, Homo sapien
tgccactcccctgatcactgtggtc

SEQ ID NO: 1255614 - DNA, 25 bp, Homo sapien
tcatctccagtggaaacacactcag

SEQ ID NO: 1255615 - DNA, 25 bp, Homo sapien
taatgggagctacatgtaaagagct

SEQ ID NO: 1255616 - DNA, 25 bp, Homo sapien
gctacatgtaaagagctgcctcata

SEQ ID NO: 1255617 - DNA, 25 bp, Homo sapien
acatgtaaagagctgcctcatagac

SEQ ID NO: 1255618 - DNA, 25 bp, Homo sapien
tgggagctacatgtaaagagctgcc

SEQ ID NO: 1255619 - DNA, 25 bp, Homo sapien
agtgatttaaaggacacttcagcag

SEQ ID NO: 1255620 - DNA, 25 bp, Homo sapien
taagtgatttaaaggacacttcagc

SEQ ID NO: 1255621 - DNA, 25 bp, Homo sapien
gctaatctggtcaggtcccatccat

SEQ ID NO: 1255622 - DNA, 25 bp, Homo sapien
tgccctgttccctgtgctaatctgg

SEQ ID NO: 1255623 - DNA, 25 bp, Homo sapien
tggaaggaagaaagaattggcccag

SEQ ID NO: 1255624 - DNA, 25 bp, Homo sapien
aaagaattggcccagtttctgaagc

SEQ ID NO: 1255625 - DNA, 25 bp, Homo sapien
aagaaagaattggcccagtttctga

SEQ ID NO: 1255626 - DNA, 25 bp, Homo sapien
ctggaaggaagaaagaattggccca

SEQ ID NO: 1255627 - DNA, 25 bp, Homo sapien
gagtcatccgcaagcatccgggact

SEQ ID NO: 1255628 - DNA, 25 bp, Homo sapien
cctggtgccgtgttccaagaggagt

SEQ ID NO: 1255629 - DNA, 25 bp, Homo sapien
gaaactttcggaatgctttcctgag

SEQ ID NO: 1255630 - DNA, 25 bp, Homo sapien
gagttcttgacttcaccttcaaagg

SEQ ID NO: 1255631 - DNA, 25 bp, Homo sapien
ccgggaacactaaggcatggtctga

SEQ ID NO: 1255632 - DNA, 25 bp, Homo sapien
tctgctatggagagggctagagctt

SEQ ID NO: 1255633 - DNA, 25 bp, Homo sapien
tatcatctctcagaggagtaggcag

SEQ ID NO: 1255634 - DNA, 25 bp, Homo sapien
ttctgtgaagagtatcgagggtgca

SEQ ID NO: 1255635 - DNA, 25 bp, Homo sapien
tgtgtatgtgtgttacgtaggtggg

SEQ ID NO: 1255636 - DNA, 25 bp, Homo sapien
atgtgtatatgggtgcccaggtttg

SEQ ID NO: 1255637 - DNA, 25 bp, Homo sapien
tatgggtgcccaggtttgtgtatgt

SEQ ID NO: 1255638 - DNA, 25 bp, Homo sapien
acgtaggtgggggtatgcatgccca

SEQ ID NO: 1255639 - DNA, 25 bp, Homo sapien
catttttgttggagccttgtgtgat

SEQ ID NO: 1255640 - DNA, 25 bp, Homo sapien
tccatttttgttggagccttgtgtg

SEQ ID NO: 1255641 - DNA, 25 bp, Homo sapien
ttgttggagccttgtgtgattgtgt

SEQ ID NO: 1255642 - DNA, 25 bp, Homo sapien
ttttgttggagccttgtgtgattgt

SEQ ID NO: 1255643 - DNA, 25 bp, Homo sapien
ggaagaaagcgcctctcctgctttc

SEQ ID NO: 1255644 - DNA, 25 bp, Homo sapien
ccccgaaagcctggcatagcactgt

SEQ ID NO: 1255645 - DNA, 25 bp, Homo sapien
gggtcccaactgaggtgggtgctat

SEQ ID NO: 1255646 - DNA, 25 bp, Homo sapien
tgctattggtccctgagggagacac

SEQ ID NO: 1255647 - DNA, 25 bp, Homo sapien
ctgagtgtttttgtctgtatgacca

SEQ ID NO: 1255648 - DNA, 25 bp, Homo sapien
tgagtgtttttgtctgtatgaccag

SEQ ID NO: 1255649 - DNA, 25 bp, Homo sapien
gccatctgtacaaggatgcttagag

SEQ ID NO: 1255650 - DNA, 25 bp, Homo sapien
catctgtacaaggatgcttagagtt

SEQ ID NO: 1255651 - DNA, 25 bp, Homo sapien
aatgccatctgtacaaggatgctta

SEQ ID NO: 1255652 - DNA, 25 bp, Homo sapien
ccaatgccatctgtacaaggatgct

SEQ ID NO: 1255653 - DNA, 25 bp, Homo sapien
ccatgttgaattggaagatgcatca

SEQ ID NO: 1255654 - DNA, 25 bp, Homo sapien
agggactagctctcctttcagaggc

SEQ ID NO: 1255655 - DNA, 25 bp, Homo sapien
agtgatacaccagacgtgacagctg

SEQ ID NO: 1255656 - DNA, 25 bp, Homo sapien
caagaagccatgttgaattggaaga

SEQ ID NO: 1255657 - DNA, 25 bp, Homo sapien
ctttgtgcggccatcagatagcagt

SEQ ID NO: 1255658 - DNA, 25 bp, Homo sapien
gcatgaggagggccagcacattcag

SEQ ID NO: 1255659 - DNA, 25 bp, Homo sapien
ttgtgcggccatcagatagcagtgg

SEQ ID NO: 1255660 - DNA, 25 bp, Homo sapien
ctgcatgaggagggccagcacattc

SEQ ID NO: 1255661 - DNA, 25 bp, Homo sapien
tctcgtagagcacaggaccaatgtc

SEQ ID NO: 1255662 - DNA, 25 bp, Homo sapien
tgacgttggtcacaatggaggatgc

SEQ ID NO: 1255663 - DNA, 25 bp, Homo sapien
ggttggtttcctagacctgcatcca

SEQ ID NO: 1255664 - DNA, 25 bp, Homo sapien
tggttgggcacaccctctcgtagag

SEQ ID NO: 1255665 - DNA, 25 bp, Homo sapien
cctgttctctcttgggctactctga

SEQ ID NO: 1255666 - DNA, 25 bp, Homo sapien
ctgttctctcttgggctactctgac

SEQ ID NO: 1255667 - DNA, 25 bp, Homo sapien
agcactgggcatgggcctgttctct

SEQ ID NO: 1255668 - DNA, 25 bp, Homo sapien
caaagcactgggcatgggcctgttc

SEQ ID NO: 1255669 - DNA, 25 bp, Homo sapien
gaactgcagttcacatcatattcag

SEQ ID NO: 1255670 - DNA, 25 bp, Homo sapien
caaaacaggagtagaccagaaatgc

SEQ ID NO: 1255671 - DNA, 25 bp, Homo sapien
caggagtagaccagaaatgcaggtc

SEQ ID NO: 1255672 - DNA, 25 bp, Homo sapien
gcagttcacatcatattcagtaatt

SEQ ID NO: 1255673 - DNA, 25 bp, Homo sapien
aagacagtggtttggataattggag

SEQ ID NO: 1255674 - DNA, 25 bp, Homo sapien
tttggataattggaggtagctatac

SEQ ID NO: 1255675 - DNA, 25 bp, Homo sapien
ggtagctatacactgaaattattaa

SEQ ID NO: 1255676 - DNA, 25 bp, Homo sapien
gataattggaggtagctatacactg

SEQ ID NO: 1255677 - DNA, 25 bp, Homo sapien
ttaaaggaggatgtgcccttctttc

SEQ ID NO: 1255678 - DNA, 25 bp, Homo sapien
ttctccagggacggatgcctggagc

SEQ ID NO: 1255679 - DNA, 25 bp, Homo sapien
cacttctccagggacggatgcctgg

SEQ ID NO: 1255680 - DNA, 25 bp, Homo sapien
taaaggaggatgtgcccttctttca

SEQ ID NO: 1255681 - DNA, 25 bp, Homo sapien
tatctagagtggaattaccagatca

SEQ ID NO: 1255682 - DNA, 25 bp, Homo sapien
gtatatctagagtggaattaccaga

SEQ ID NO: 1255683 - DNA, 25 bp, Homo sapien
tcatatggtaagtatgcaattaata

SEQ ID NO: 1255684 - DNA, 25 bp, Homo sapien
tcaagtgtatatctagagtggaatt

SEQ ID NO: 1255685 - DNA, 25 bp, Homo sapien
gggtggccacaaaacctgacttggc

SEQ ID NO: 1255686 - DNA, 25 bp, Homo sapien
tttctgttcccttgtcagtgatgag

SEQ ID NO: 1255687 - DNA, 25 bp, Homo sapien
ttgaagtgtcgtttcagcggctgcc

SEQ ID NO: 1255688 - DNA, 25 bp, Homo sapien
tgatgagttgaagtgtcgtttcagc

SEQ ID NO: 1255689 - DNA, 25 bp, Homo sapien
tcctttatgaggaagcttgccacag

SEQ ID NO: 1255690 - DNA, 25 bp, Homo sapien
gaggaagcttgccacagtcaggcag

SEQ ID NO: 1255691 - DNA, 25 bp, Homo sapien
ctttatgaggaagcttgccacagtc

SEQ ID NO: 1255692 - DNA, 25 bp, Homo sapien
tatgaggaagcttgccacagtcagg

SEQ ID NO: 1255693 - DNA, 25 bp, Homo sapien
gactgtcagtatatccgtgcatagc

SEQ ID NO: 1255694 - DNA, 25 bp, Homo sapien
ttactcccggatatcgtgacaaagg

SEQ ID NO: 1255695 - DNA, 25 bp, Homo sapien
tgtgactgaggatgtcagaggctct

SEQ ID NO: 1255696 - DNA, 25 bp, Homo sapien
cgtgcatagctcacagacgtgcaag

SEQ ID NO: 1255697 - DNA, 25 bp, Homo sapien
tcagatgggtggctaatgtttggta

SEQ ID NO: 1255698 - DNA, 25 bp, Homo sapien
aaattgccaatgattcgtttttgcc

SEQ ID NO: 1255699 - DNA, 25 bp, Homo sapien
tcttggagacgtctatgagggtcag

SEQ ID NO: 1255700 - DNA, 25 bp, Homo sapien
tggccacagaagtagttaaaataac

SEQ ID NO: 1255701 - DNA, 25 bp, Homo sapien
taagagcaggtacaagccctgaaga

SEQ ID NO: 1255702 - DNA, 25 bp, Homo sapien
cagcttcacatgtttaggacggtcc

SEQ ID NO: 1255703 - DNA, 25 bp, Homo sapien
aaaccgagtcgggacattgctgtga

SEQ ID NO: 1255704 - DNA, 25 bp, Homo sapien
tgctgtgagtgtaggaccagtcccc

SEQ ID NO: 1255705 - DNA, 25 bp, Homo sapien
cagccctcactgctggcagttccca

SEQ ID NO: 1255706 - DNA, 25 bp, Homo sapien
ctcactgctggcagttcccacagca

SEQ ID NO: 1255707 - DNA, 25 bp, Homo sapien
cctcactgctggcagttcccacagc

SEQ ID NO: 1255708 - DNA, 25 bp, Homo sapien
gccctcactgctggcagttcccaca

SEQ ID NO: 1255709 - DNA, 25 bp, Homo sapien
aaatgggacagacattcttgaaaac

SEQ ID NO: 1255710 - DNA, 25 bp, Homo sapien
aatgcaggtttgaaatgggacagac

SEQ ID NO: 1255711 - DNA, 25 bp, Homo sapien
caggtttgaaatgggacagacattc

SEQ ID NO: 1255712 - DNA, 25 bp, Homo sapien
gtttgaaatgggacagacattcttg

SEQ ID NO: 1255713 - DNA, 25 bp, Homo sapien
tgtgggtctcacacccaaccctgcc

SEQ ID NO: 1255714 - DNA, 25 bp, Homo sapien
ggatggatggctttggcctttgtgg

SEQ ID NO: 1255715 - DNA, 25 bp, Homo sapien
atggatggctttggcctttgtgggt

SEQ ID NO: 1255716 - DNA, 25 bp, Homo sapien
tttgtgggtctcacacccaaccctg

SEQ ID NO: 1255717 - DNA, 25 bp, Homo sapien
cagcgtggtgagacagatggcttcc

SEQ ID NO: 1255718 - DNA, 25 bp, Homo sapien
aattcagggatgcagtctgggccgt

SEQ ID NO: 1255719 - DNA, 25 bp, Homo sapien
cgtcggactgacgtctggctccttt

SEQ ID NO: 1255720 - DNA, 25 bp, Homo sapien
gatctactgcgatggaattcaggga

SEQ ID NO: 1255721 - DNA, 25 bp, Homo sapien
tcacgcagagtagaatctgttgcct

SEQ ID NO: 1255722 - DNA, 25 bp, Homo sapien
acgcagagtagaatctgttgcctac

SEQ ID NO: 1255723 - DNA, 25 bp, Homo sapien
cacgcagagtagaatctgttgccta

SEQ ID NO: 1255724 - DNA, 25 bp, Homo sapien
agcgcttgctttgggtctgcctctc

SEQ ID NO: 1255725 - DNA, 25 bp, Homo sapien
gatgttgttagcttgctctctgagg

SEQ ID NO: 1255726 - DNA, 25 bp, Homo sapien
ctcccaatcccgcatctctccttgt

SEQ ID NO: 1255727 - DNA, 25 bp, Homo sapien
caatcccgcatctctccttgttgct

SEQ ID NO: 1255728 - DNA, 25 bp, Homo sapien
tgggaatgacacttttgtgacgtac

SEQ ID NO: 1255729 - DNA, 25 bp, Homo sapien
aatatgagaagagatgacgttgact

SEQ ID NO: 1255730 - DNA, 25 bp, Homo sapien
ttcaaaacgtattagggccttcatc

SEQ ID NO: 1255731 - DNA, 25 bp, Homo sapien
caaagcccacattatagggtaagat

SEQ ID NO: 1255732 - DNA, 25 bp, Homo sapien
tgagggaattcacactgagtgctct

SEQ ID NO: 1255733 - DNA, 25 bp, Homo sapien
tgtgcatgagggaattcacactgag

SEQ ID NO: 1255734 - DNA, 25 bp, Homo sapien
catgagggaattcacactgagtgct

SEQ ID NO: 1255735 - DNA, 25 bp, Homo sapien
acatgtgcatgagggaattcacact

SEQ ID NO: 1255736 - DNA, 25 bp, Homo sapien
tagctggcagtttgactgactttaa

SEQ ID NO: 1255737 - DNA, 25 bp, Homo sapien
agtagctggcagtttgactgacttt

SEQ ID NO: 1255738 - DNA, 25 bp, Homo sapien
gtagctggcagtttgactgacttta

SEQ ID NO: 1255739 - DNA, 25 bp, Homo sapien
tttcccatgagcagtgaaatgcctg

SEQ ID NO: 1255740 - DNA, 25 bp, Homo sapien
cagactgtgagtcagctttaatcaa

SEQ ID NO: 1255741 - DNA, 25 bp, Homo sapien
gaaatgcctgctcagagtgatcgat

SEQ ID NO: 1255742 - DNA, 25 bp, Homo sapien
gatcgatcttgtgggttctcggaaa

SEQ ID NO: 1255743 - DNA, 25 bp, Homo sapien
taagaacagaagtgagtccagggtc

SEQ ID NO: 1255744 - DNA, 25 bp, Homo sapien
gaaggtacctcgaaagcacctgtga

SEQ ID NO: 1255745 - DNA, 25 bp, Homo sapien
cataatctgaggtgggaatggctca

SEQ ID NO: 1255746 - DNA, 25 bp, Homo sapien
caacgtaggacaacaggcagggaat

SEQ ID NO: 1255747 - DNA, 25 bp, Homo sapien
cgcacagtgaagaaactgcgaggtc

SEQ ID NO: 1255748 - DNA, 25 bp, Homo sapien
cacagtgaagaaactgcgaggtccc

SEQ ID NO: 1255749 - DNA, 25 bp, Homo sapien
ggagggattaaaattacgctccata

SEQ ID NO: 1255750 - DNA, 25 bp, Homo sapien
ttaaaattacgctccataaaccatg

SEQ ID NO: 1255751 - DNA, 25 bp, Homo sapien
tcaacgggcacatgacagtctccag

SEQ ID NO: 1255752 - DNA, 25 bp, Homo sapien
ttctataaacctccttcaacgggca

SEQ ID NO: 1255753 - DNA, 25 bp, Homo sapien
gctttcatgtaacttcctagggtgg

SEQ ID NO: 1255754 - DNA, 25 bp, Homo sapien
gatgtctagagtatgaaaatgtccc

SEQ ID NO: 1255755 - DNA, 25 bp, Homo sapien
gcactgggaatacagctatgatgag

SEQ ID NO: 1255756 - DNA, 25 bp, Homo sapien
tgaggtcacggtccctcagggcgtt

SEQ ID NO: 1255757 - DNA, 25 bp, Homo sapien
gaatacagctatgatgaggtcacgg

SEQ ID NO: 1255758 - DNA, 25 bp, Homo sapien
gtccctcagggcgttctgaggatac

SEQ ID NO: 1255759 - DNA, 25 bp, Homo sapien
cgcgattgtcagaaagcgtgggtcc

SEQ ID NO: 1255760 - DNA, 25 bp, Homo sapien
ctctaaatgatgaccaatgccagct

SEQ ID NO: 1255761 - DNA, 25 bp, Homo sapien
aagccaggagaggtaagcgagccca

SEQ ID NO: 1255762 - DNA, 25 bp, Homo sapien
ccaaataacccttgacgcgattgtc

SEQ ID NO: 1255763 - DNA, 25 bp, Homo sapien
aagcagctgcttggactcacaattc

SEQ ID NO: 1255764 - DNA, 25 bp, Homo sapien
aagtgctcctcagttggatccaagg

SEQ ID NO: 1255765 - DNA, 25 bp, Homo sapien
gagccctgctacatcctgcttgtgg

SEQ ID NO: 1255766 - DNA, 25 bp, Homo sapien
aactttgggctcttgcgaggatgca

SEQ ID NO: 1255767 - DNA, 25 bp, Homo sapien
gctgtttgatgacttcttctcctca

SEQ ID NO: 1255768 - DNA, 25 bp, Homo sapien
tcagctgtttgatgacttcttctcc

SEQ ID NO: 1255769 - DNA, 25 bp, Homo sapien
ctgtttgatgacttcttctcctcac

SEQ ID NO: 1255770 - DNA, 25 bp, Homo sapien
cagctgtttgatgacttcttctcct

SEQ ID NO: 1255771 - DNA, 25 bp, Homo sapien
tagctggagattgaaccttgaaatc

SEQ ID NO: 1255772 - DNA, 25 bp, Homo sapien
tgaaatcgcagttggtttgaatgtg

SEQ ID NO: 1255773 - DNA, 25 bp, Homo sapien
tgtggaaatttgtagttgcaggaga

SEQ ID NO: 1255774 - DNA, 25 bp, Homo sapien
cagaagctatgaagggaatatcccc

SEQ ID NO: 1255775 - DNA, 25 bp, Homo sapien
gtgccacagacttggtcacttttgt

SEQ ID NO: 1255776 - DNA, 25 bp, Homo sapien
gatttattccccgtagtgccacaga

SEQ ID NO: 1255777 - DNA, 25 bp, Homo sapien
gagctaaagagcacctgaagggcat

SEQ ID NO: 1255778 - DNA, 25 bp, Homo sapien
tggtcacttttgtgtctattgtaaa

SEQ ID NO: 1255779 - DNA, 25 bp, Homo sapien
tttccctaaatcccggccaggcaga

SEQ ID NO: 1255780 - DNA, 25 bp, Homo sapien
gcatcctcttctccgggacattttc

SEQ ID NO: 1255781 - DNA, 25 bp, Homo sapien
ctccaagcctgaactcatgcatcct

SEQ ID NO: 1255782 - DNA, 25 bp, Homo sapien
agcctgaactcatgcatcctcttct

SEQ ID NO: 1255783 - DNA, 25 bp, Homo sapien
gtctgtgggctcattctgaagtagc

SEQ ID NO: 1255784 - DNA, 25 bp, Homo sapien
cagctttatgtttttgggtctgtgg

SEQ ID NO: 1255785 - DNA, 25 bp, Homo sapien
ctgaagtagcccttcagcttagtgg

SEQ ID NO: 1255786 - DNA, 25 bp, Homo sapien
ccccgatgaaccgtttaattcagct

SEQ ID NO: 1255787 - DNA, 25 bp, Homo sapien
atccctgcgttgtccctctccaacc

SEQ ID NO: 1255788 - DNA, 25 bp, Homo sapien
tcaacagtatattcctgcagttcag

SEQ ID NO: 1255789 - DNA, 25 bp, Homo sapien
aaccctccaactgctgatgacatca

SEQ ID NO: 1255790 - DNA, 25 bp, Homo sapien
ctcttcctgccatccctgcgttgtc

SEQ ID NO: 1255791 - DNA, 25 bp, Homo sapien
ttgacaagccgttttcagaccccga

SEQ ID NO: 1255792 - DNA, 25 bp, Homo sapien
ttttcagaccccgagaactctaata

SEQ ID NO: 1255793 - DNA, 25 bp, Homo sapien
cctttgttgacaagccgttttcaga

SEQ ID NO: 1255794 - DNA, 25 bp, Homo sapien
cccgagaactctaataagtaaggag

SEQ ID NO: 1255795 - DNA, 25 bp, Homo sapien
tatagcagtgaggatgactagaggt

SEQ ID NO: 1255796 - DNA, 25 bp, Homo sapien
atggccatctcggttttggtaggat

SEQ ID NO: 1255797 - DNA, 25 bp, Homo sapien
atagcagtgaggatgactagaggtc

SEQ ID NO: 1255798 - DNA, 25 bp, Homo sapien
tctcatggccatctcggttttggta

SEQ ID NO: 1255799 - DNA, 25 bp, Homo sapien
tggagcaggggatctatatcttctt

SEQ ID NO: 1255800 - DNA, 25 bp, Homo sapien
ttacccagtgtcagccgtctgtgga

SEQ ID NO: 1255801 - DNA, 25 bp, Homo sapien
gggatctatatcttcttttatcaca

SEQ ID NO: 1255802 - DNA, 25 bp, Homo sapien
ccagtgtcagccgtctgtggagcag

SEQ ID NO: 1255803 - DNA, 25 bp, Homo sapien
gagaacagtggtaacagtgatgccc

SEQ ID NO: 1255804 - DNA, 25 bp, Homo sapien
gacacaaccctgtatgcacttgagg

SEQ ID NO: 1255805 - DNA, 25 bp, Homo sapien
gctcgagtgcgtagccaaggctgta

SEQ ID NO: 1255806 - DNA, 25 bp, Homo sapien
gatacagactatcccctgcacaagg

SEQ ID NO: 1255807 - DNA, 25 bp, Homo sapien
tcttcaatgacagaggcgttgaact

SEQ ID NO: 1255808 - DNA, 25 bp, Homo sapien
ggcactgtgcaaggtcttcaatgac

SEQ ID NO: 1255809 - DNA, 25 bp, Homo sapien
gaggcgttgaacttcaggcagagtt

SEQ ID NO: 1255810 - DNA, 25 bp, Homo sapien
catgtggacggcactgtgcaaggtc

SEQ ID NO: 1255811 - DNA, 25 bp, Homo sapien
cttcccatctaaggagtaggtttgg

SEQ ID NO: 1255812 - DNA, 25 bp, Homo sapien
gggaaggttttataatactgctcat

SEQ ID NO: 1255813 - DNA, 25 bp, Homo sapien
gggcagaacttagtcatattaaatt

SEQ ID NO: 1255814 - DNA, 25 bp, Homo sapien
catgactctgatagactggatgaca

SEQ ID NO: 1255815 - DNA, 25 bp, Homo sapien
agacgatggctttccctaggccgga

SEQ ID NO: 1255816 - DNA, 25 bp, Homo sapien
tccctaggctagagacgatggcttt

SEQ ID NO: 1255817 - DNA, 25 bp, Homo sapien
gacgatggctttccctaggctacag

SEQ ID NO: 1255818 - DNA, 25 bp, Homo sapien
gacgatggctttccctaggctagag

SEQ ID NO: 1255819 - DNA, 25 bp, Homo sapien
gacgatggctttccctaggctacag

SEQ ID NO: 1255820 - DNA, 25 bp, Homo sapien
tccctaggctagagacgatggcttt

SEQ ID NO: 1255821 - DNA, 25 bp, Homo sapien
agacgatggctttccctaggccgga

SEQ ID NO: 1255822 - DNA, 25 bp, Homo sapien
gacgatggctttccctaggctagag

SEQ ID NO: 1255823 - DNA, 25 bp, Homo sapien
ggctccgaaacgctggactcaacgt

SEQ ID NO: 1255824 - DNA, 25 bp, Homo sapien
caccaaggcctgtaatagactggcc

SEQ ID NO: 1255825 - DNA, 25 bp, Homo sapien
ctgtaatagactggccaggctccga

SEQ ID NO: 1255826 - DNA, 25 bp, Homo sapien
tggactcaacgtttaactgcctgct

SEQ ID NO: 1255827 - DNA, 25 bp, Homo sapien
gggctctagggttgatgtaggactt

SEQ ID NO: 1255828 - DNA, 25 bp, Homo sapien
tagggttgatgtaggacttgggtcc

SEQ ID NO: 1255829 - DNA, 25 bp, Homo sapien
cagggatctcacatcacaggagtgg

SEQ ID NO: 1255830 - DNA, 25 bp, Homo sapien
ccttcattcccgaggcatgtctgac

SEQ ID NO: 1255831 - DNA, 25 bp, Homo sapien
agtgagtcaattcttgtctgagttt

SEQ ID NO: 1255832 - DNA, 25 bp, Homo sapien
tcctcaaagcgaacccagtgagtca

SEQ ID NO: 1255833 - DNA, 25 bp, Homo sapien
gtgagtcaattcttgtctgagtttt

SEQ ID NO: 1255834 - DNA, 25 bp, Homo sapien
ataacagtcctcaaagcgaacccag

SEQ ID NO: 1255835 - DNA, 25 bp, Homo sapien
tctgacagcagtcttggattcaact

SEQ ID NO: 1255836 - DNA, 25 bp, Homo sapien
acctttgaatttgaaccgctttgca

SEQ ID NO: 1255837 - DNA, 25 bp, Homo sapien
cttgtttcgtgtaaagaatgcttgg

SEQ ID NO: 1255838 - DNA, 25 bp, Homo sapien
tgataaatgtttggtttctgacagc

SEQ ID NO: 1255839 - DNA, 25 bp, Homo sapien
agggtagattggactttttagatct

SEQ ID NO: 1255840 - DNA, 25 bp, Homo sapien
cagctccttgctatggaagggtaga

SEQ ID NO: 1255841 - DNA, 25 bp, Homo sapien
agattggactttttagatctaagaa

SEQ ID NO: 1255842 - DNA, 25 bp, Homo sapien
gctccttgctatggaagggtagatt

SEQ ID NO: 1255843 - DNA, 25 bp, Homo sapien
gggaaagatcacgttggaagtcatc

SEQ ID NO: 1255844 - DNA, 25 bp, Homo sapien
aaagatcacgttggaagtcatctac

SEQ ID NO: 1255845 - DNA, 25 bp, Homo sapien
atggggggaaagatcacgttggaag

SEQ ID NO: 1255846 - DNA, 25 bp, Homo sapien
agctggtagcatggggggaaagatc

SEQ ID NO: 1255847 - DNA, 25 bp, Homo sapien
tccctcattacactcttcctcctgg

SEQ ID NO: 1255848 - DNA, 25 bp, Homo sapien
gaaaccgaaacgattccatcatagc

SEQ ID NO: 1255849 - DNA, 25 bp, Homo sapien
tccttgaaaccgaaacgattccatc

SEQ ID NO: 1255850 - DNA, 25 bp, Homo sapien
tactgattccttgaaaccgaaacga

SEQ ID NO: 1255851 - DNA, 25 bp, Homo sapien
tgtgctgcatggttgtgaagttgat

SEQ ID NO: 1255852 - DNA, 25 bp, Homo sapien
tgggtgattctcacgcacactcaag

SEQ ID NO: 1255853 - DNA, 25 bp, Homo sapien
tctgcgggcgcaggcacaaatagat

SEQ ID NO: 1255854 - DNA, 25 bp, Homo sapien
tcagattactcaattagaaactctg

SEQ ID NO: 1255855 - DNA, 25 bp, Homo sapien
aagtggccgatccatgaccactcca

SEQ ID NO: 1255856 - DNA, 25 bp, Homo sapien
tagaagtggccgatccatgaccact

SEQ ID NO: 1255857 - DNA, 25 bp, Homo sapien
gaagtggccgatccatgaccactcc

SEQ ID NO: 1255858 - DNA, 25 bp, Homo sapien
ctagaagtggccgatccatgaccac

SEQ ID NO: 1255859 - DNA, 25 bp, Homo sapien
ctagaagtggccgatccatgaccac

SEQ ID NO: 1255860 - DNA, 25 bp, Homo sapien
aagtggccgatccatgaccactcca

SEQ ID NO: 1255861 - DNA, 25 bp, Homo sapien
gaagtggccgatccatgaccactcc

SEQ ID NO: 1255862 - DNA, 25 bp, Homo sapien
tagaagtggccgatccatgaccact

SEQ ID NO: 1255863 - DNA, 25 bp, Homo sapien
aagtggccgatccatgaccactcca

SEQ ID NO: 1255864 - DNA, 25 bp, Homo sapien
gaagtggccgatccatgaccactcc

SEQ ID NO: 1255865 - DNA, 25 bp, Homo sapien
ctagaagtggccgatccatgaccac

SEQ ID NO: 1255866 - DNA, 25 bp, Homo sapien
tagaagtggccgatccatgaccact

SEQ ID NO: 1255867 - DNA, 25 bp, Homo sapien
ctagaagtggccgatccatgaccac

SEQ ID NO: 1255868 - DNA, 25 bp, Homo sapien
aagtggccgatccatgaccactcca

SEQ ID NO: 1255869 - DNA, 25 bp, Homo sapien
gaagtggccgatccatgaccactcc

SEQ ID NO: 1255870 - DNA, 25 bp, Homo sapien
tagaagtggccgatccatgaccact

SEQ ID NO: 1255871 - DNA, 25 bp, Homo sapien
tagaagtggccgatccatgaccact

SEQ ID NO: 1255872 - DNA, 25 bp, Homo sapien
ctagaagtggccgatccatgaccac

SEQ ID NO: 1255873 - DNA, 25 bp, Homo sapien
aagtggccgatccatgaccactcca

SEQ ID NO: 1255874 - DNA, 25 bp, Homo sapien
gaagtggccgatccatgaccactcc

SEQ ID NO: 1255875 - DNA, 25 bp, Homo sapien
taatagatgggactccattgtcatt

SEQ ID NO: 1255876 - DNA, 25 bp, Homo sapien
tgtagagtagctgatccatgaccac

SEQ ID NO: 1255877 - DNA, 25 bp, Homo sapien
gaaaccgaggccttgatagattgta

SEQ ID NO: 1255878 - DNA, 25 bp, Homo sapien
cattttgcggctttggaaaccgagg

SEQ ID NO: 1255879 - DNA, 25 bp, Homo sapien
cagcgacgtcgcctcagtgccaatt

SEQ ID NO: 1255880 - DNA, 25 bp, Homo sapien
cgtcgcctcagtgccaattcataaa

SEQ ID NO: 1255881 - DNA, 25 bp, Homo sapien
catggtgttccgcaccagcgacgtc

SEQ ID NO: 1255882 - DNA, 25 bp, Homo sapien
ggccgacttcttcatggaaagcaca

SEQ ID NO: 1255883 - DNA, 25 bp, Homo sapien
tgactccagactccctttcacgagg

SEQ ID NO: 1255884 - DNA, 25 bp, Homo sapien
gagtgctgcctgataatccctagag

SEQ ID NO: 1255885 - DNA, 25 bp, Homo sapien
tgtctctgcaagtagatcattgacc

SEQ ID NO: 1255886 - DNA, 25 bp, Homo sapien
gagtcttgctttctacggattggga

SEQ ID NO: 1255887 - DNA, 25 bp, Homo sapien
tcctagatgctgtccaccaatacat

SEQ ID NO: 1255888 - DNA, 25 bp, Homo sapien
ttcctagatgctgtccaccaataca

SEQ ID NO: 1255889 - DNA, 25 bp, Homo sapien
tcttcctagatgctgtccaccaata

SEQ ID NO: 1255890 - DNA, 25 bp, Homo sapien
tctcttcctagatgctgtccaccaa

SEQ ID NO: 1255891 - DNA, 25 bp, Homo sapien
gggtacagctccctttctgatggcc

SEQ ID NO: 1255892 - DNA, 25 bp, Homo sapien
gaaaatgaccgtcacagtactggta

SEQ ID NO: 1255893 - DNA, 25 bp, Homo sapien
gagacgtctttgtgtttgggacaca

SEQ ID NO: 1255894 - DNA, 25 bp, Homo sapien
tgtataggacgcagctttttctgag

SEQ ID NO: 1255895 - DNA, 25 bp, Homo sapien
gacttcccaccagcacgtgtgtcta

SEQ ID NO: 1255896 - DNA, 25 bp, Homo sapien
gctgggacttcccaccagcacgtgt

SEQ ID NO: 1255897 - DNA, 25 bp, Homo sapien
tcccaccagcacgtgtgtctaattt

SEQ ID NO: 1255898 - DNA, 25 bp, Homo sapien
caccagcacgtgtgtctaatttttg

SEQ ID NO: 1255899 - DNA, 25 bp, Homo sapien
taactagctgtgaactcttgagcac

SEQ ID NO: 1255900 - DNA, 25 bp, Homo sapien
ctctgagtcttcatatatgagactt

SEQ ID NO: 1255901 - DNA, 25 bp, Homo sapien
tcttgagcacatgaaaccaagcttt

SEQ ID NO: 1255902 - DNA, 25 bp, Homo sapien
catatatgagacttttcctgtctta

SEQ ID NO: 1255903 - DNA, 25 bp, Homo sapien
cagccgtaattgctttgcagcagga

SEQ ID NO: 1255904 - DNA, 25 bp, Homo sapien
gtgaaacgacagtcccgtcctgctg

SEQ ID NO: 1255905 - DNA, 25 bp, Homo sapien
tagcatacaggcatccgcagagaaa

SEQ ID NO: 1255906 - DNA, 25 bp, Homo sapien
gatacatctgtctgcccgtagctca

SEQ ID NO: 1255907 - DNA, 25 bp, Homo sapien
catgaaacttacacctcctcttggg

SEQ ID NO: 1255908 - DNA, 25 bp, Homo sapien
tcctcttgggaggagctcgctacct

SEQ ID NO: 1255909 - DNA, 25 bp, Homo sapien
gacctcaccatttacgttggacctg

SEQ ID NO: 1255910 - DNA, 25 bp, Homo sapien
aaaatcttccggcagtctcagcgtt

SEQ ID NO: 1255911 - DNA, 25 bp, Homo sapien
tcaagcttccttgtactggcttttg

SEQ ID NO: 1255912 - DNA, 25 bp, Homo sapien
ttccttgtactggcttttgaaagac

SEQ ID NO: 1255913 - DNA, 25 bp, Homo sapien
agcttccttgtactggcttttgaaa

SEQ ID NO: 1255914 - DNA, 25 bp, Homo sapien
tccttgtactggcttttgaaagaca

SEQ ID NO: 1255915 - DNA, 25 bp, Homo sapien
aaatgaactcccttttaatcatcat

SEQ ID NO: 1255916 - DNA, 25 bp, Homo sapien
tacatggacaaactgaatcacaggg

SEQ ID NO: 1255917 - DNA, 25 bp, Homo sapien
cgttttaaagtggaggacaggcact

SEQ ID NO: 1255918 - DNA, 25 bp, Homo sapien
gccctcaggtagctcacgttttaaa

SEQ ID NO: 1255919 - DNA, 25 bp, Homo sapien
gaaatacaagacataaatcctgccc

SEQ ID NO: 1255920 - DNA, 25 bp, Homo sapien
ccggatatgggttaacatggttcca

SEQ ID NO: 1255921 - DNA, 25 bp, Homo sapien
gggattttatctgctgccgtcgtgg

SEQ ID NO: 1255922 - DNA, 25 bp, Homo sapien
catggttccatgaataggcacaagg

SEQ ID NO: 1255923 - DNA, 25 bp, Homo sapien
tgttgtatgcttataacctcaggga

SEQ ID NO: 1255924 - DNA, 25 bp, Homo sapien
ggagtgaagtcagattcatagttga

SEQ ID NO: 1255925 - DNA, 25 bp, Homo sapien
tttatcccgtacacaacaggaacta

SEQ ID NO: 1255926 - DNA, 25 bp, Homo sapien
ctttatcccgtacacaacaggaact

SEQ ID NO: 1255927 - DNA, 25 bp, Homo sapien
agtgaagtcagattcatagttgaga

SEQ ID NO: 1255928 - DNA, 25 bp, Homo sapien
gttcccagatggcaaacggacatcc

SEQ ID NO: 1255929 - DNA, 25 bp, Homo sapien
gatggcaaacggacatcctcatagt

SEQ ID NO: 1255930 - DNA, 25 bp, Homo sapien
ggacatcctcatagtaagactgggc

SEQ ID NO: 1255931 - DNA, 25 bp, Homo sapien
agtaagactgggctgctttccacct

SEQ ID NO: 1255932 - DNA, 25 bp, Homo sapien
tgccacttccgagagtttcacagtt

SEQ ID NO: 1255933 - DNA, 25 bp, Homo sapien
cagttttggtgtaagtgtacattgc

SEQ ID NO: 1255934 - DNA, 25 bp, Homo sapien
taagtgtacattgccaaatgagaaa

SEQ ID NO: 1255935 - DNA, 25 bp, Homo sapien
tggtgtaagtgtacattgccaaatg

SEQ ID NO: 1255936 - DNA, 25 bp, Homo sapien
tgtgtagcatggaaaggaccactgc

SEQ ID NO: 1255937 - DNA, 25 bp, Homo sapien
tatgctggaccatgtaagtagccat

SEQ ID NO: 1255938 - DNA, 25 bp, Homo sapien
aaagattctttagactgcactcaag

SEQ ID NO: 1255939 - DNA, 25 bp, Homo sapien
cagaagtagagtgttaaggcaaagc

SEQ ID NO: 1255940 - DNA, 25 bp, Homo sapien
gcctgtgttccagtcatgaccattc

SEQ ID NO: 1255941 - DNA, 25 bp, Homo sapien
ttttctaaaagattcgaggagtatg

SEQ ID NO: 1255942 - DNA, 25 bp, Homo sapien
gcagatatgtttattgttacccaca

SEQ ID NO: 1255943 - DNA, 25 bp, Homo sapien
tgagatacaggataagcaggaagca

SEQ ID NO: 1255944 - DNA, 25 bp, Homo sapien
gacttttttggcctgacatttgagt

SEQ ID NO: 1255945 - DNA, 25 bp, Homo sapien
gctttgacttttttggcctgacatt

SEQ ID NO: 1255946 - DNA, 25 bp, Homo sapien
aaaggtatcatttatgatgttttct

SEQ ID NO: 1255947 - DNA, 25 bp, Homo sapien
taaaggtatcatttatgatgttttc

SEQ ID NO: 1255948 - DNA, 25 bp, Homo sapien
tggaaagggtatgaaaccagcagaa

SEQ ID NO: 1255949 - DNA, 25 bp, Homo sapien
cacgccacagtttgtgcgtttaatg

SEQ ID NO: 1255950 - DNA, 25 bp, Homo sapien
gacattcttgagtaagcgtcagtga

SEQ ID NO: 1255951 - DNA, 25 bp, Homo sapien
ttaatgtttcccatcgctgacattc

SEQ ID NO: 1255952 - DNA, 25 bp, Homo sapien
gagaggaccgaccatcagttagcca

SEQ ID NO: 1255953 - DNA, 25 bp, Homo sapien
taccagcttgtgtgatacgtgctcc

SEQ ID NO: 1255954 - DNA, 25 bp, Homo sapien
ggatctcacagcctagcagggaaga

SEQ ID NO: 1255955 - DNA, 25 bp, Homo sapien
tgtatccccactgtagcaacgtgga

SEQ ID NO: 1255956 - DNA, 25 bp, Homo sapien
agacgtatttcttgcagtaatgcat

SEQ ID NO: 1255957 - DNA, 25 bp, Homo sapien
tgggaagacgtatttcttgcagtaa

SEQ ID NO: 1255958 - DNA, 25 bp, Homo sapien
agcctttgggaagacgtatttcttg

SEQ ID NO: 1255959 - DNA, 25 bp, Homo sapien
cctttgggaagacgtatttcttgca

SEQ ID NO: 1255960 - DNA, 25 bp, Homo sapien
cgggtgtatccgtcagctcttgtca

SEQ ID NO: 1255961 - DNA, 25 bp, Homo sapien
acatggcggtagcagcatcccgatc

SEQ ID NO: 1255962 - DNA, 25 bp, Homo sapien
gctcgacagggaggctgtccgtcca

SEQ ID NO: 1255963 - DNA, 25 bp, Homo sapien
tagtagtcctctggcgggtgtatcc

SEQ ID NO: 1255964 - DNA, 25 bp, Homo sapien
tatgccttaccctgcaccgggtctg

SEQ ID NO: 1255965 - DNA, 25 bp, Homo sapien
gccaattgtgtttactgtctcctct

SEQ ID NO: 1255966 - DNA, 25 bp, Homo sapien
ccgggtctgcataccctccattctg

SEQ ID NO: 1255967 - DNA, 25 bp, Homo sapien
tccattctgagaaagccaattgtgt

SEQ ID NO: 1255968 - DNA, 25 bp, Homo sapien
tctgatggcacagttgcaacagatg

SEQ ID NO: 1255969 - DNA, 25 bp, Homo sapien
ttaagtgctgcagtaactctgccct

SEQ ID NO: 1255970 - DNA, 25 bp, Homo sapien
tgatggcacagttgcaacagatgca

SEQ ID NO: 1255971 - DNA, 25 bp, Homo sapien
gagccttcaagtgcactaagctaat

SEQ ID NO: 1255972 - DNA, 25 bp, Homo sapien
tgatgtgtcaagaatgtggcagaat

SEQ ID NO: 1255973 - DNA, 25 bp, Homo sapien
cacagttacccgagtactaatttct

SEQ ID NO: 1255974 - DNA, 25 bp, Homo sapien
ggcagaatggtgtcaacttaatggc

SEQ ID NO: 1255975 - DNA, 25 bp, Homo sapien
cgagtactaatttctaaacttgatg

SEQ ID NO: 1255976 - DNA, 25 bp, Homo sapien
gacatttcccttcttagacaaatag

SEQ ID NO: 1255977 - DNA, 25 bp, Homo sapien
gacaaatagactcgcttcatcccct

SEQ ID NO: 1255978 - DNA, 25 bp, Homo sapien
atctcttttaggatggtaagctggg

SEQ ID NO: 1255979 - DNA, 25 bp, Homo sapien
gccattgggatgtcactgtggtaat

SEQ ID NO: 1255980 - DNA, 25 bp, Homo sapien
tttcttttgaccaagtctgtaagca

SEQ ID NO: 1255981 - DNA, 25 bp, Homo sapien
tcttttgaccaagtctgtaagcatt

SEQ ID NO: 1255982 - DNA, 25 bp, Homo sapien
ttcttttgaccaagtctgtaagcat

SEQ ID NO: 1255983 - DNA, 25 bp, Homo sapien
ggaagcaagatcatctgagggagac

SEQ ID NO: 1255984 - DNA, 25 bp, Homo sapien
cacacacgcagaggcttggtgcttg

SEQ ID NO: 1255985 - DNA, 25 bp, Homo sapien
tctgcaccatgtgatacggttctgg

SEQ ID NO: 1255986 - DNA, 25 bp, Homo sapien
cttggtgcttgagtagacagttgga

SEQ ID NO: 1255987 - DNA, 25 bp, Homo sapien
ttcagggcgagaggagtaagcaaac

SEQ ID NO: 1255988 - DNA, 25 bp, Homo sapien
gcaatcgctggaacacctgtcttgt

SEQ ID NO: 1255989 - DNA, 25 bp, Homo sapien
tgatggcatcgtctcgcttgtctga

SEQ ID NO: 1255990 - DNA, 25 bp, Homo sapien
tatcagagttgctctgccaggtccc

SEQ ID NO: 1255991 - DNA, 25 bp, Homo sapien
tcagtgagtttgaagtgcacgctga

SEQ ID NO: 1255992 - DNA, 25 bp, Homo sapien
tctgtcatgcttggcggcatgcagg

SEQ ID NO: 1255993 - DNA, 25 bp, Homo sapien
ctgaaagctgtagggccccggagaa

SEQ ID NO: 1255994 - DNA, 25 bp, Homo sapien
ggctgcatgttcatttgtagaggac

SEQ ID NO: 1255995 - DNA, 25 bp, Homo sapien
caattcttgattgtacacagacagc

SEQ ID NO: 1255996 - DNA, 25 bp, Homo sapien
gaaactctattagaccaaagtagaa

SEQ ID NO: 1255997 - DNA, 25 bp, Homo sapien
gacagcattggttctacctcaccca

SEQ ID NO: 1255998 - DNA, 25 bp, Homo sapien
tcacccaatgcgtgggagcacagaa

SEQ ID NO: 1255999 - DNA, 25 bp, Homo sapien
tccagtgatgacaccggcactccct

SEQ ID NO: 1256000 - DNA, 25 bp, Homo sapien
gtgtaagctcttttccagtgatgac

SEQ ID NO: 1256001 - DNA, 25 bp, Homo sapien
tcaggtgtaagctcttttccagtga

SEQ ID NO: 1256002 - DNA, 25 bp, Homo sapien
ggtgtaagctcttttccagtgatga

SEQ ID NO: 1256003 - DNA, 25 bp, Homo sapien
gtaactacatctaattagaagggtg

SEQ ID NO: 1256004 - DNA, 25 bp, Homo sapien
cattcaaataggaaaccactgccat

SEQ ID NO: 1256005 - DNA, 25 bp, Homo sapien
ggaactgttgctacactctggaaga

SEQ ID NO: 1256006 - DNA, 25 bp, Homo sapien
gaagggtgaataaattaccaaagca

SEQ ID NO: 1256007 - DNA, 25 bp, Homo sapien
ttgaaggtgatgggtgccacctgct

SEQ ID NO: 1256008 - DNA, 25 bp, Homo sapien
gggtgccacctgcttgattccagaa

SEQ ID NO: 1256009 - DNA, 25 bp, Homo sapien
ccacctgcttgattccagaaggacc

SEQ ID NO: 1256010 - DNA, 25 bp, Homo sapien
attccagaaggaccgtctctgatcc

SEQ ID NO: 1256011 - DNA, 25 bp, Homo sapien
gatcgctgcagtcatcagccacctg

SEQ ID NO: 1256012 - DNA, 25 bp, Homo sapien
agtatcaatccgtgctcctcatagg

SEQ ID NO: 1256013 - DNA, 25 bp, Homo sapien
cgtgctcctcatagggatcgctgca

SEQ ID NO: 1256014 - DNA, 25 bp, Homo sapien
tcatagggatcgctgcagtcatcag

SEQ ID NO: 1256015 - DNA, 25 bp, Homo sapien
ttttttgaattcacccaccgtgctg

SEQ ID NO: 1256016 - DNA, 25 bp, Homo sapien
tgccagactctcacaggtcaagttt

SEQ ID NO: 1256017 - DNA, 25 bp, Homo sapien
tctggtttcagagtacttgtgcatg

SEQ ID NO: 1256018 - DNA, 25 bp, Homo sapien
tgtggacattgacagtgccagactc

SEQ ID NO: 1256019 - DNA, 25 bp, Homo sapien
gtccaatctggactctgatcgctcc

SEQ ID NO: 1256020 - DNA, 25 bp, Homo sapien
gcttcatggtttgtgcaactcattg

SEQ ID NO: 1256021 - DNA, 25 bp, Homo sapien
tagtgccagacacgacaacattctg

SEQ ID NO: 1256022 - DNA, 25 bp, Homo sapien
tgatcgctcctgttcgctgctgtat

SEQ ID NO: 1256023 - DNA, 25 bp, Homo sapien
taactgcgaatcttggctttaaaaa

SEQ ID NO: 1256024 - DNA, 25 bp, Homo sapien
tattgtagcatttacattaactgcg

SEQ ID NO: 1256025 - DNA, 25 bp, Homo sapien
tacattaactgcgaatcttggcttt

SEQ ID NO: 1256026 - DNA, 25 bp, Homo sapien
catttacattaactgcgaatcttgg

SEQ ID NO: 1256027 - DNA, 25 bp, Homo sapien
gccgtctgcggctcggaagaactga

SEQ ID NO: 1256028 - DNA, 25 bp, Homo sapien
ctgtgtctaaggtaactgtaaggcc

SEQ ID NO: 1256029 - DNA, 25 bp, Homo sapien
agtaggagaagaccactagggctgt

SEQ ID NO: 1256030 - DNA, 25 bp, Homo sapien
gctgcgaggacgatagcagccgtct

SEQ ID NO: 1256031 - DNA, 25 bp, Homo sapien
gagggagaaaaagaagcgtgagtac

SEQ ID NO: 1256032 - DNA, 25 bp, Homo sapien
aagagggagaaaaagaagcgtgagt

SEQ ID NO: 1256033 - DNA, 25 bp, Homo sapien
taaagagggagaaaaagaagcgtga

SEQ ID NO: 1256034 - DNA, 25 bp, Homo sapien
aaagagggagaaaaagaagcgtgag

SEQ ID NO: 1256035 - DNA, 25 bp, Homo sapien
ttccaccttggataaagccttggtg

SEQ ID NO: 1256036 - DNA, 25 bp, Homo sapien
tccaccttggataaagccttggtgt

SEQ ID NO: 1256037 - DNA, 25 bp, Homo sapien
caccttggataaagccttggtgtca

SEQ ID NO: 1256038 - DNA, 25 bp, Homo sapien
accttggataaagccttggtgtcat

SEQ ID NO: 1256039 - DNA, 25 bp, Homo sapien
cagagtctacactgttctcttctat

SEQ ID NO: 1256040 - DNA, 25 bp, Homo sapien
agagtctacactgttctcttctatc

SEQ ID NO: 1256041 - DNA, 25 bp, Homo sapien
tattacagtgggcatctgtgtacat

SEQ ID NO: 1256042 - DNA, 25 bp, Homo sapien
ctattacagtgggcatctgtgtaca

SEQ ID NO: 1256043 - DNA, 25 bp, Homo sapien
acattctttctcagcgtctacacta

SEQ ID NO: 1256044 - DNA, 25 bp, Homo sapien
tatcttctctattacagtgggtgtc

SEQ ID NO: 1256045 - DNA, 25 bp, Homo sapien
gcgtctgcgctgttctccatcctct

SEQ ID NO: 1256046 - DNA, 25 bp, Homo sapien
tccatcctctgtatcacagtggacg

SEQ ID NO: 1256047 - DNA, 25 bp, Homo sapien
tatagtgacgtctgtgtacattcta

SEQ ID NO: 1256048 - DNA, 25 bp, Homo sapien
atagtgacgtctgtgtacattctac

SEQ ID NO: 1256049 - DNA, 25 bp, Homo sapien
ttatagtgacgtctgtgtacattct

SEQ ID NO: 1256050 - DNA, 25 bp, Homo sapien
taacttgccttaagagtgtagcaga

SEQ ID NO: 1256051 - DNA, 25 bp, Homo sapien
agtttagtaacttgccttaagagtg

SEQ ID NO: 1256052 - DNA, 25 bp, Homo sapien
ccttaagagtgtagcagaactggga

SEQ ID NO: 1256053 - DNA, 25 bp, Homo sapien
tgccttaagagtgtagcagaactgg

SEQ ID NO: 1256054 - DNA, 25 bp, Homo sapien
tagcccagaactcctcttacattct

SEQ ID NO: 1256055 - DNA, 25 bp, Homo sapien
tatcagctcctcgtaatgcacttca

SEQ ID NO: 1256056 - DNA, 25 bp, Homo sapien
cattatgatggctcttgcaggacct

SEQ ID NO: 1256057 - DNA, 25 bp, Homo sapien
gcacttcaccacgtgaagtgaatga

SEQ ID NO: 1256058 - DNA, 25 bp, Homo sapien
gtgaatgaaatagcctcagtcttgt

SEQ ID NO: 1256059 - DNA, 25 bp, Homo sapien
tcaatggccgatggccattacagat

SEQ ID NO: 1256060 - DNA, 25 bp, Homo sapien
tacagatgctaagatattctcaggg

SEQ ID NO: 1256061 - DNA, 25 bp, Homo sapien
gccgatggccattacagatgctaag

SEQ ID NO: 1256062 - DNA, 25 bp, Homo sapien
gctaagatattctcagggaccatga

SEQ ID NO: 1256063 - DNA, 25 bp, Homo sapien
tgaccgatgaatcatcgcatttcaa

SEQ ID NO: 1256064 - DNA, 25 bp, Homo sapien
gccattgtggtgatgaccgatgaat

SEQ ID NO: 1256065 - DNA, 25 bp, Homo sapien
gatgaccgatgaatcatcgcatttc

SEQ ID NO: 1256066 - DNA, 25 bp, Homo sapien
gcttctcttccacatgcgtgtggcc

SEQ ID NO: 1256067 - DNA, 25 bp, Homo sapien
gtgttctgccttatgagccctcaag

SEQ ID NO: 1256068 - DNA, 25 bp, Homo sapien
ttagagcttgtagggtcagtgaacc

SEQ ID NO: 1256069 - DNA, 25 bp, Homo sapien
tgagctattattgcgccacggcatg

SEQ ID NO: 1256070 - DNA, 25 bp, Homo sapien
gacagcacagctgtagagagagctt

SEQ ID NO: 1256071 - DNA, 25 bp, Homo sapien
ggaaagggtatgttctcatcactca

SEQ ID NO: 1256072 - DNA, 25 bp, Homo sapien
ttttgatggtgagggacagcgaagc

SEQ ID NO: 1256073 - DNA, 25 bp, Homo sapien
ttacatcaatagaatgaatctctgc

SEQ ID NO: 1256074 - DNA, 25 bp, Homo sapien
tctgcaacggttggtttcagcaagg

SEQ ID NO: 1256075 - DNA, 25 bp, Homo sapien
agtacaaaatcacctatccagtggg

SEQ ID NO: 1256076 - DNA, 25 bp, Homo sapien
catggaacagacttgactacctggg

SEQ ID NO: 1256077 - DNA, 25 bp, Homo sapien
aaaactaggatccatactgggtgca

SEQ ID NO: 1256078 - DNA, 25 bp, Homo sapien
taattgtgtcatgccagaaggtgac

SEQ ID NO: 1256079 - DNA, 25 bp, Homo sapien
cttcactaacaatccacagggcttt

SEQ ID NO: 1256080 - DNA, 25 bp, Homo sapien
tagacttcagttgccttgttcttct

SEQ ID NO: 1256081 - DNA, 25 bp, Homo sapien
ctaacaatccacagggcttttggac

SEQ ID NO: 1256082 - DNA, 25 bp, Homo sapien
ttcttatccaccatatcgttagact

SEQ ID NO: 1256083 - DNA, 25 bp, Homo sapien
gcttttgctttttggtcaacactat

SEQ ID NO: 1256084 - DNA, 25 bp, Homo sapien
ttttgctttttggtcaacactatgc

SEQ ID NO: 1256085 - DNA, 25 bp, Homo sapien
ttgctttttggtcaacactatgcat

SEQ ID NO: 1256086 - DNA, 25 bp, Homo sapien
cttttttcatggtaagcttttgctt

SEQ ID NO: 1256087 - DNA, 25 bp, Homo sapien
tatcccaatagctatcatccctgaa

SEQ ID NO: 1256088 - DNA, 25 bp, Homo sapien
gagagctgctgacatgtgaatatcc

SEQ ID NO: 1256089 - DNA, 25 bp, Homo sapien
tgaagactgcagtttttctggagtc

SEQ ID NO: 1256090 - DNA, 25 bp, Homo sapien
tcctggctcacacttcacaaaatga

SEQ ID NO: 1256091 - DNA, 25 bp, Homo sapien
cagagcagccctaggggctgctggt

SEQ ID NO: 1256092 - DNA, 25 bp, Homo sapien
taggaaagcaataggagagattagt

SEQ ID NO: 1256093 - DNA, 25 bp, Homo sapien
atagagaataggaaagcaataggag

SEQ ID NO: 1256094 - DNA, 25 bp, Homo sapien
tgaaataactagataaagaagaact

SEQ ID NO: 1256095 - DNA, 25 bp, Homo sapien
aagcaataggagagattagtggccg

SEQ ID NO: 1256096 - DNA, 25 bp, Homo sapien
cttttaaagttggctgtttgcagtt

SEQ ID NO: 1256097 - DNA, 25 bp, Homo sapien
ttttaaagttggctgtttgcagttg

SEQ ID NO: 1256098 - DNA, 25 bp, Homo sapien
tttaaagttggctgtttgcagttgt

SEQ ID NO: 1256099 - DNA, 25 bp, Homo sapien
tgtgcctggactagccttagctttt

SEQ ID NO: 1256100 - DNA, 25 bp, Homo sapien
caagactgcagactggtcctgattc

SEQ ID NO: 1256101 - DNA, 25 bp, Homo sapien
ccaggtggttggtttatctagtctt

SEQ ID NO: 1256102 - DNA, 25 bp, Homo sapien
ggagtcttagtctctgcattacccc

SEQ ID NO: 1256103 - DNA, 25 bp, Homo sapien
ttgtggacctccattggtgagttca

SEQ ID NO: 1256104 - DNA, 25 bp, Homo sapien
ccctggattatggttgtggacctcc

SEQ ID NO: 1256105 - DNA, 25 bp, Homo sapien
gttgccctggattatggttgtggac

SEQ ID NO: 1256106 - DNA, 25 bp, Homo sapien
tatggttgtggacctccattggtga

SEQ ID NO: 1256107 - DNA, 25 bp, Homo sapien
acctggcatgttttctcaagtatga

SEQ ID NO: 1256108 - DNA, 25 bp, Homo sapien
ttacagttgaacataggtccagaca

SEQ ID NO: 1256109 - DNA, 25 bp, Homo sapien
ctgtgtgatcgtcaaattcatattt

SEQ ID NO: 1256110 - DNA, 25 bp, Homo sapien
ggtccagacatatggttattagtgt

SEQ ID NO: 1256111 - DNA, 25 bp, Homo sapien
tactggtgtcaaggtcaaaatcttt

SEQ ID NO: 1256112 - DNA, 25 bp, Homo sapien
tattgatggaactggtattgtaacc

SEQ ID NO: 1256113 - DNA, 25 bp, Homo sapien
tccagatcatatggctatagcttgt

SEQ ID NO: 1256114 - DNA, 25 bp, Homo sapien
tcttgctcagaggattcagatttcc

SEQ ID NO: 1256115 - DNA, 25 bp, Homo sapien
ttcgttgagggttcttgatcttaga

SEQ ID NO: 1256116 - DNA, 25 bp, Homo sapien
ctttgttcgttgagggttcttgatc

SEQ ID NO: 1256117 - DNA, 25 bp, Homo sapien
acaaattcttggatgcgttgtttcc

SEQ ID NO: 1256118 - DNA, 25 bp, Homo sapien
ataagacaaattcttggatgcgttg

SEQ ID NO: 1256119 - DNA, 25 bp, Homo sapien
catctaagtccccttgatccttcaa

SEQ ID NO: 1256120 - DNA, 25 bp, Homo sapien
aagtccccttgatccttcaacacaa

SEQ ID NO: 1256121 - DNA, 25 bp, Homo sapien
taatacatctaagtccccttgatcc

SEQ ID NO: 1256122 - DNA, 25 bp, Homo sapien
tttaatacatctaagtccccttgat

SEQ ID NO: 1256123 - DNA, 25 bp, Homo sapien
ctttaaacattgctggccgctttcc

SEQ ID NO: 1256124 - DNA, 25 bp, Homo sapien
tctcattcaggtaatactttaaaca

SEQ ID NO: 1256125 - DNA, 25 bp, Homo sapien
ttaaacattgctggccgctttcctc

SEQ ID NO: 1256126 - DNA, 25 bp, Homo sapien
atactttaaacattgctggccgctt

SEQ ID NO: 1256127 - DNA, 25 bp, Homo sapien
aaagcacagaggcatttgaaaattc

SEQ ID NO: 1256128 - DNA, 25 bp, Homo sapien
gaggcatttgaaaattccagattca

SEQ ID NO: 1256129 - DNA, 25 bp, Homo sapien
gcacagaggcatttgaaaattccag

SEQ ID NO: 1256130 - DNA, 25 bp, Homo sapien
tggaaagcacagaggcatttgaaaa

SEQ ID NO: 1256131 - DNA, 25 bp, Homo sapien
ctacccttaggacgggtagcattat

SEQ ID NO: 1256132 - DNA, 25 bp, Homo sapien
ttccaagctttgctcgtacagtttc

SEQ ID NO: 1256133 - DNA, 25 bp, Homo sapien
ttcttcttccaagctttgctcgtac

SEQ ID NO: 1256134 - DNA, 25 bp, Homo sapien
tcttccaagctttgctcgtacagtt

SEQ ID NO: 1256135 - DNA, 25 bp, Homo sapien
cttcttccaagctttgctcgtacag

SEQ ID NO: 1256136 - DNA, 25 bp, Homo sapien
cattccataggtcacatatttacta

SEQ ID NO: 1256137 - DNA, 25 bp, Homo sapien
tcttcagtattagttgagtaggctc

SEQ ID NO: 1256138 - DNA, 25 bp, Homo sapien
taatatagagctctcagtcagtgtg

SEQ ID NO: 1256139 - DNA, 25 bp, Homo sapien
cattctatagagtgtgatcattcca

SEQ ID NO: 1256140 - DNA, 25 bp, Homo sapien
gacaattcagcaaggcctagttatg

SEQ ID NO: 1256141 - DNA, 25 bp, Homo sapien
tcaaggagggtggttcctaaggcta

SEQ ID NO: 1256142 - DNA, 25 bp, Homo sapien
ggctaatgagcttctacctgtaagt

SEQ ID NO: 1256143 - DNA, 25 bp, Homo sapien
taaagctgctcatatacacgaagga

SEQ ID NO: 1256144 - DNA, 25 bp, Homo sapien
tcaagccaccaaagcttgacgatgc

SEQ ID NO: 1256145 - DNA, 25 bp, Homo sapien
gccaccaaagcttgacgatgcctgc

SEQ ID NO: 1256146 - DNA, 25 bp, Homo sapien
aagcttgacgatgcctgccgcactg

SEQ ID NO: 1256147 - DNA, 25 bp, Homo sapien
accaaagcttgacgatgcctgccgc

SEQ ID NO: 1256148 - DNA, 25 bp, Homo sapien
aaaatcttcatctatgtgacctggt

SEQ ID NO: 1256149 - DNA, 25 bp, Homo sapien
cagattcgtcgtgtgcagtgcctaa

SEQ ID NO: 1256150 - DNA, 25 bp, Homo sapien
cctggttttacttcagattcgtcgt

SEQ ID NO: 1256151 - DNA, 25 bp, Homo sapien
tttcttccgcacagcatactgcttc

SEQ ID NO: 1256152 - DNA, 25 bp, Homo sapien
gatagtctcaacgtaatttcagtag

SEQ ID NO: 1256153 - DNA, 25 bp, Homo sapien
tatttggcagcctgattagaaatgt

SEQ ID NO: 1256154 - DNA, 25 bp, Homo sapien
gaaacgccatggaatgtattgtatt

SEQ ID NO: 1256155 - DNA, 25 bp, Homo sapien
taagcgtgcttcagttgtcatgttc

SEQ ID NO: 1256156 - DNA, 25 bp, Homo sapien
gtcggaccgggttctcaatgctgaa

SEQ ID NO: 1256157 - DNA, 25 bp, Homo sapien
gagaaagttcttaatcccgagagca

SEQ ID NO: 1256158 - DNA, 25 bp, Homo sapien
tgaacgtgcatctgctgcgtaagcc

SEQ ID NO: 1256159 - DNA, 25 bp, Homo sapien
caaacttgcacttcccctgaaagga

SEQ ID NO: 1256160 - DNA, 25 bp, Homo sapien
catgtggcctctttgaccctgcttc

SEQ ID NO: 1256161 - DNA, 25 bp, Homo sapien
tttcactctcaaatggggctaacca

SEQ ID NO: 1256162 - DNA, 25 bp, Homo sapien
ttttcactctcaaatggggctaacc

SEQ ID NO: 1256163 - DNA, 25 bp, Homo sapien
ccagggggctgctgctctgaaccat

SEQ ID NO: 1256164 - DNA, 25 bp, Homo sapien
attttctctgcaggggagcctgcca

SEQ ID NO: 1256165 - DNA, 25 bp, Homo sapien
cctgccagggggctgctgctctgaa

SEQ ID NO: 1256166 - DNA, 25 bp, Homo sapien
tgctgcccaagtattttctctgcag

SEQ ID NO: 1256167 - DNA, 25 bp, Homo sapien
tcagcaggcatcaaagtgcttgcac

SEQ ID NO: 1256168 - DNA, 25 bp, Homo sapien
gggtcagcaggcatcaaagtgcttg

SEQ ID NO: 1256169 - DNA, 25 bp, Homo sapien
ggcatcaaagtgcttgcaccaaccc

SEQ ID NO: 1256170 - DNA, 25 bp, Homo sapien
gcaggcatcaaagtgcttgcaccaa

SEQ ID NO: 1256171 - DNA, 25 bp, Homo sapien
atatctgagtggtattttagggcca

SEQ ID NO: 1256172 - DNA, 25 bp, Homo sapien
aaatatctgagtggtattttagggc

SEQ ID NO: 1256173 - DNA, 25 bp, Homo sapien
aatatctgagtggtattttagggcc

SEQ ID NO: 1256174 - DNA, 25 bp, Homo sapien
gtgagaggcacgtaacagccagtgg

SEQ ID NO: 1256175 - DNA, 25 bp, Homo sapien
aaaaaggtggaacttgtgagaggca

SEQ ID NO: 1256176 - DNA, 25 bp, Homo sapien
agaggcacgtaacagccagtggttt

SEQ ID NO: 1256177 - DNA, 25 bp, Homo sapien
gaaaaaggtggaacttgtgagaggc

SEQ ID NO: 1256178 - DNA, 25 bp, Homo sapien
gtccactcgcagtagtagtgcacat

SEQ ID NO: 1256179 - DNA, 25 bp, Homo sapien
gtgggggtccactcgcagtagtagt

SEQ ID NO: 1256180 - DNA, 25 bp, Homo sapien
ttccctgtctgaccgtgggggtcca

SEQ ID NO: 1256181 - DNA, 25 bp, Homo sapien
ggggtccactcgcagtagtagtgca

SEQ ID NO: 1256182 - DNA, 25 bp, Homo sapien
gagcatagaggcagcgatcgggctc

SEQ ID NO: 1256183 - DNA, 25 bp, Homo sapien
gctcctctcccctgacagtggtggg

SEQ ID NO: 1256184 - DNA, 25 bp, Homo sapien
catagaggcagcgatcgggctcctc

SEQ ID NO: 1256185 - DNA, 25 bp, Homo sapien
tagaggcagcgatcgggctcctctc

SEQ ID NO: 1256186 - DNA, 25 bp, Homo sapien
ttctgaatggaaccatatgtgggtg

SEQ ID NO: 1256187 - DNA, 25 bp, Homo sapien
ggagatggatgtactctgtggtctt

SEQ ID NO: 1256188 - DNA, 25 bp, Homo sapien
tctaggttggtgttgtatctccggt

SEQ ID NO: 1256189 - DNA, 25 bp, Homo sapien
aggagagctgtggtcgtttctgaat

SEQ ID NO: 1256190 - DNA, 25 bp, Homo sapien
tagtcacatcgaagatcttcaacat

SEQ ID NO: 1256191 - DNA, 25 bp, Homo sapien
cctttgctactcctatatcatagta

SEQ ID NO: 1256192 - DNA, 25 bp, Homo sapien
tgctactcctatatcatagtaaaaa

SEQ ID NO: 1256193 - DNA, 25 bp, Homo sapien
tttcctttttagtcacatcgaagat

SEQ ID NO: 1256194 - DNA, 25 bp, Homo sapien
gtgatcaattaattgtaaacacaag

SEQ ID NO: 1256195 - DNA, 25 bp, Homo sapien
ggaacaaagaaatccatagctggtt

SEQ ID NO: 1256196 - DNA, 25 bp, Homo sapien
gaaatccatagctggttgtgatcaa

SEQ ID NO: 1256197 - DNA, 25 bp, Homo sapien
acaaagaaatccatagctggttgtg

SEQ ID NO: 1256198 - DNA, 25 bp, Homo sapien
aacattgaggatcctatcactaagg

SEQ ID NO: 1256199 - DNA, 25 bp, Homo sapien
taacattgaggatgtatctataaca

SEQ ID NO: 1256200 - DNA, 25 bp, Homo sapien
caccatctgtaacattgaggatgta

SEQ ID NO: 1256201 - DNA, 25 bp, Homo sapien
cctatcactaaggagcactgctgtg

SEQ ID NO: 1256202 - DNA, 25 bp, Homo sapien
tggagagcccaccatgactgctaat

SEQ ID NO: 1256203 - DNA, 25 bp, Homo sapien
tactggcacctctgagtgagagctg

SEQ ID NO: 1256204 - DNA, 25 bp, Homo sapien
gattgcctagctgtttatcccgctg

SEQ ID NO: 1256205 - DNA, 25 bp, Homo sapien
gctggcccttctttagaagaaagca

SEQ ID NO: 1256206 - DNA, 25 bp, Homo sapien
tctactttattggtcttattggcac

SEQ ID NO: 1256207 - DNA, 25 bp, Homo sapien
gatggagacgcattccttttgcaat

SEQ ID NO: 1256208 - DNA, 25 bp, Homo sapien
taaagtttgaggacactagggctaa

SEQ ID NO: 1256209 - DNA, 25 bp, Homo sapien
ggtcttattggcactaaagtttgag

SEQ ID NO: 1256210 - DNA, 25 bp, Homo sapien
tggaatgtctcttggccaaggactg

SEQ ID NO: 1256211 - DNA, 25 bp, Homo sapien
acccgaaagcagccatttaaaccag

SEQ ID NO: 1256212 - DNA, 25 bp, Homo sapien
ggagttaaacaaagtctgagtatta

SEQ ID NO: 1256213 - DNA, 25 bp, Homo sapien
ttggagggaaatctacccgaaagca

SEQ ID NO: 1256214 - DNA, 25 bp, Homo sapien
tctacccgaaagcagccatttaaac

SEQ ID NO: 1256215 - DNA, 25 bp, Homo sapien
tttcttctaggatgtccgataagac

SEQ ID NO: 1256216 - DNA, 25 bp, Homo sapien
cactatttcttctaggatgtccgat

SEQ ID NO: 1256217 - DNA, 25 bp, Homo sapien
tcttgccactatttcttctaggatg

SEQ ID NO: 1256218 - DNA, 25 bp, Homo sapien
tgccactatttcttctaggatgtcc

SEQ ID NO: 1256219 - DNA, 25 bp, Homo sapien
ggagatgttatgcaggttagtgata

SEQ ID NO: 1256220 - DNA, 25 bp, Homo sapien
tatgcaggttagtgataggccaaca

SEQ ID NO: 1256221 - DNA, 25 bp, Homo sapien
gcaggttagtgataggccaacacgg

SEQ ID NO: 1256222 - DNA, 25 bp, Homo sapien
cttgagaggagatgttatgcaggtt

SEQ ID NO: 1256223 - DNA, 25 bp, Homo sapien
cggtcagcagtagaaggccttttgc

SEQ ID NO: 1256224 - DNA, 25 bp, Homo sapien
gacggtcagcagtagaaggcctttt

SEQ ID NO: 1256225 - DNA, 25 bp, Homo sapien
gggacggtcagcagtagaaggcctt

SEQ ID NO: 1256226 - DNA, 25 bp, Homo sapien
taaatgggttgaggggacggtcagc

SEQ ID NO: 1256227 - DNA, 25 bp, Homo sapien
cctctcattaaggaatggcttctgg

SEQ ID NO: 1256228 - DNA, 25 bp, Homo sapien
ctcattaaggaatggcttctggttt

SEQ ID NO: 1256229 - DNA, 25 bp, Homo sapien
tttcctctcattaaggaatggcttc

SEQ ID NO: 1256230 - DNA, 25 bp, Homo sapien
atggcttctggtttttccgtgttgt

SEQ ID NO: 1256231 - DNA, 25 bp, Homo sapien
ttctcgggtgcgtaaggagcgccct

SEQ ID NO: 1256232 - DNA, 25 bp, Homo sapien
tggaaaagttcgcaaccgccaagag

SEQ ID NO: 1256233 - DNA, 25 bp, Homo sapien
gatcccttggcgtacacggtgtgca

SEQ ID NO: 1256234 - DNA, 25 bp, Homo sapien
gcctacctgagtcgcgagctgtgtg

SEQ ID NO: 1256235 - DNA, 25 bp, Homo sapien
gcaggggccggcgagatcccgaagc

SEQ ID NO: 1256236 - DNA, 25 bp, Homo sapien
agatcccgaagcctcgcagcaactg

SEQ ID NO: 1256237 - DNA, 25 bp, Homo sapien
ccgaagcctcgcagcaactgctgca

SEQ ID NO: 1256238 - DNA, 25 bp, Homo sapien
ggcgagatcccgaagcctcgcagca

SEQ ID NO: 1256239 - DNA, 25 bp, Homo sapien
tgggaagagcggggaaccagaggtg

SEQ ID NO: 1256240 - DNA, 25 bp, Homo sapien
cttggaaaatgctgttcaatgagga

SEQ ID NO: 1256241 - DNA, 25 bp, Homo sapien
gagaaaggtgagcatggcatccctg

SEQ ID NO: 1256242 - DNA, 25 bp, Homo sapien
gccggtcccgtcaaggccatgagag

SEQ ID NO: 1256243 - DNA, 25 bp, Homo sapien
tggtcccaacctgtggaacagtgtc

SEQ ID NO: 1256244 - DNA, 25 bp, Homo sapien
catgtcccgactcccagtggacttg

SEQ ID NO: 1256245 - DNA, 25 bp, Homo sapien
ccgactcccagtggacttggatgtg

SEQ ID NO: 1256246 - DNA, 25 bp, Homo sapien
ggaactccatgtcccgactcccagt

SEQ ID NO: 1256247 - DNA, 25 bp, Homo sapien
ggcccttggttccataataatttca

SEQ ID NO: 1256248 - DNA, 25 bp, Homo sapien
cctgatcacgtctgtttttctttca

SEQ ID NO: 1256249 - DNA, 25 bp, Homo sapien
gctgcctgatcacgtctgtttttct

SEQ ID NO: 1256250 - DNA, 25 bp, Homo sapien
gtgctgcctgatcacgtctgttttt

SEQ ID NO: 1256251 - DNA, 25 bp, Homo sapien
tgcctgatcacgtctgtttttcttt

SEQ ID NO: 1256252 - DNA, 25 bp, Homo sapien
gcccagaaaggactctttgggccca

SEQ ID NO: 1256253 - DNA, 25 bp, Homo sapien
gggatgtgggcaagacctctccaac

SEQ ID NO: 1256254 - DNA, 25 bp, Homo sapien
tgtgggcaagacctctccaacaagc

SEQ ID NO: 1256255 - DNA, 25 bp, Homo sapien
gtgggcaagacctctccaacaagcc

SEQ ID NO: 1256256 - DNA, 25 bp, Homo sapien
gatgtgggcaagacctctccaacaa

SEQ ID NO: 1256257 - DNA, 25 bp, Homo sapien
agacaataggcccccggtcctcagg

SEQ ID NO: 1256258 - DNA, 25 bp, Homo sapien
cctggactctaagaaagacaatagg

SEQ ID NO: 1256259 - DNA, 25 bp, Homo sapien
aggtgctcagtgcatgtgcactgca

SEQ ID NO: 1256260 - DNA, 25 bp, Homo sapien
ttcctcctggactctaagaaagaca

SEQ ID NO: 1256261 - DNA, 25 bp, Homo sapien
tgaagacgcagctctcgggcaccct

SEQ ID NO: 1256262 - DNA, 25 bp, Homo sapien
cctatccctagagggcctcatgaag

SEQ ID NO: 1256263 - DNA, 25 bp, Homo sapien
gggctggttctcccatacctaggcc

SEQ ID NO: 1256264 - DNA, 25 bp, Homo sapien
cctagagggcctcatgaagacatcc

SEQ ID NO: 1256265 - DNA, 25 bp, Homo sapien
tgatgccgatggcatgcactgcctt

SEQ ID NO: 1256266 - DNA, 25 bp, Homo sapien
ccgatggcatgcactgcctttaagg

SEQ ID NO: 1256267 - DNA, 25 bp, Homo sapien
gtgttgatgccgatggcatgcactg

SEQ ID NO: 1256268 - DNA, 25 bp, Homo sapien
tgccgatggcatgcactgcctttaa

SEQ ID NO: 1256269 - DNA, 25 bp, Homo sapien
tggaagggtcagatgaccctcatgg

SEQ ID NO: 1256270 - DNA, 25 bp, Homo sapien
tccagtgtctgctgtccccatagat

SEQ ID NO: 1256271 - DNA, 25 bp, Homo sapien
ggactgaagtcccagtgggcccagc

SEQ ID NO: 1256272 - DNA, 25 bp, Homo sapien
ccccagccttgaagggccaggtcct

SEQ ID NO: 1256273 - DNA, 25 bp, Homo sapien
gctcgaattctatgcagctgactct

SEQ ID NO: 1256274 - DNA, 25 bp, Homo sapien
cctgcatcccgtagggctggctaga

SEQ ID NO: 1256275 - DNA, 25 bp, Homo sapien
cacgtcataacccaagaccacgagg

SEQ ID NO: 1256276 - DNA, 25 bp, Homo sapien
gaccacgaggcaccctgtgtgttta

SEQ ID NO: 1256277 - DNA, 25 bp, Homo sapien
cctgagccacgctgctgccttgttt

SEQ ID NO: 1256278 - DNA, 25 bp, Homo sapien
tccatggtgactctggatcttgcag

SEQ ID NO: 1256279 - DNA, 25 bp, Homo sapien
agggacctgagccacgctgctgcct

SEQ ID NO: 1256280 - DNA, 25 bp, Homo sapien
gccctccaggagatgtccttccatg

SEQ ID NO: 1256281 - DNA, 25 bp, Homo sapien
agccgtcaaaggttttagtctccag

SEQ ID NO: 1256282 - DNA, 25 bp, Homo sapien
tcaaaggttttagtctccaggagta

SEQ ID NO: 1256283 - DNA, 25 bp, Homo sapien
ggcagccgtcaaaggttttagtctc

SEQ ID NO: 1256284 - DNA, 25 bp, Homo sapien
tttagtctccaggagtagaggttct

SEQ ID NO: 1256285 - DNA, 25 bp, Homo sapien
ggaggctggcggcccgcgaccgcgg

SEQ ID NO: 1256286 - DNA, 25 bp, Homo sapien
cggctggaggctggcggcccgcgac

SEQ ID NO: 1256287 - DNA, 25 bp, Homo sapien
gccggctggaggctggcggcccgcg

SEQ ID NO: 1256288 - DNA, 25 bp, Homo sapien
ctggccggctggaggctggcggccc

SEQ ID NO: 1256289 - DNA, 25 bp, Homo sapien
ccgacgtgctgtcacggagcttgct

SEQ ID NO: 1256290 - DNA, 25 bp, Homo sapien
cactcggcgacatggcggccgacgt

SEQ ID NO: 1256291 - DNA, 25 bp, Homo sapien
gagcttgctcgggtctcccctggct

SEQ ID NO: 1256292 - DNA, 25 bp, Homo sapien
tggctccggtggaggagacacctct

SEQ ID NO: 1256293 - DNA, 25 bp, Homo sapien
gaaaggctttccatcccggccgcga

SEQ ID NO: 1256294 - DNA, 25 bp, Homo sapien
gggaggagcgagaggcttccgaaag

SEQ ID NO: 1256295 - DNA, 25 bp, Homo sapien
aaaggctttccatcccggccgcgag

SEQ ID NO: 1256296 - DNA, 25 bp, Homo sapien
agcgagaggcttccgaaaggctttc

SEQ ID NO: 1256297 - DNA, 25 bp, Homo sapien
gggctcaacgttaacacagtcaaca

SEQ ID NO: 1256298 - DNA, 25 bp, Homo sapien
cacactgttgacgtgcagatgtaaa

SEQ ID NO: 1256299 - DNA, 25 bp, Homo sapien
ggtactctacctgttcacaataaag

SEQ ID NO: 1256300 - DNA, 25 bp, Homo sapien
taactagtaacaatgacacgccagg

SEQ ID NO: 1256301 - DNA, 25 bp, Homo sapien
caacttgaagcacgtatggagacag

SEQ ID NO: 1256302 - DNA, 25 bp, Homo sapien
tgatccccatggaggttaactggct

SEQ ID NO: 1256303 - DNA, 25 bp, Homo sapien
aacaatgatgggtctgactgatccc

SEQ ID NO: 1256304 - DNA, 25 bp, Homo sapien
gaatattaattaggccttcaggcta

SEQ ID NO: 1256305 - DNA, 25 bp, Homo sapien
tctcacagaacaagtaacatccagt

SEQ ID NO: 1256306 - DNA, 25 bp, Homo sapien
ttgtgccaggtctatcatgactata

SEQ ID NO: 1256307 - DNA, 25 bp, Homo sapien
ttctcttatccaactaaaagggtgc

SEQ ID NO: 1256308 - DNA, 25 bp, Homo sapien
catgactatatttgacagagggagt

SEQ ID NO: 1256309 - DNA, 25 bp, Homo sapien
ccaatgctacaggtataactctaac

SEQ ID NO: 1256310 - DNA, 25 bp, Homo sapien
ttggctctttacagtgcttatccaa

SEQ ID NO: 1256311 - DNA, 25 bp, Homo sapien
agtgcttatccaatgctacaggtat

SEQ ID NO: 1256312 - DNA, 25 bp, Homo sapien
tggctctttacagtgcttatccaat

SEQ ID NO: 1256313 - DNA, 25 bp, Homo sapien
gttgatatagcagataacactggac

SEQ ID NO: 1256314 - DNA, 25 bp, Homo sapien
ctgagatggtgtgttccctccattc

SEQ ID NO: 1256315 - DNA, 25 bp, Homo sapien
ttgatatagcagataacactggaca

SEQ ID NO: 1256316 - DNA, 25 bp, Homo sapien
tcagggaggtccctgcgtttctcag

SEQ ID NO: 1256317 - DNA, 25 bp, Homo sapien
acagggcgaatgagtgctggcccca

SEQ ID NO: 1256318 - DNA, 25 bp, Homo sapien
ggccccaggcaccttcaatctgctg

SEQ ID NO: 1256319 - DNA, 25 bp, Homo sapien
tgcgtttctcagacagggcgaatga

SEQ ID NO: 1256320 - DNA, 25 bp, Homo sapien
cttagagttgtcatcaaaatccttt

SEQ ID NO: 1256321 - DNA, 25 bp, Homo sapien
gagttgtcatcaaaatccttttgaa

SEQ ID NO: 1256322 - DNA, 25 bp, Homo sapien
tagagttgtcatcaaaatccttttg

SEQ ID NO: 1256323 - DNA, 25 bp, Homo sapien
gttgtcatcaaaatccttttgaaca

SEQ ID NO: 1256324 - DNA, 25 bp, Homo sapien
tggtgaaccatttaaagttacatta

SEQ ID NO: 1256325 - DNA, 25 bp, Homo sapien
tagagcatcctttggtgaaccattt

SEQ ID NO: 1256326 - DNA, 25 bp, Homo sapien
gagcatcctttggtgaaccatttaa

SEQ ID NO: 1256327 - DNA, 25 bp, Homo sapien
catcctttggtgaaccatttaaagt

SEQ ID NO: 1256328 - DNA, 25 bp, Homo sapien
gggctttcccatcgcactgtcactg

SEQ ID NO: 1256329 - DNA, 25 bp, Homo sapien
caaagggtgttttgcaagttctcac

SEQ ID NO: 1256330 - DNA, 25 bp, Homo sapien
tctctggaggcttcacaaagggtgt

SEQ ID NO: 1256331 - DNA, 25 bp, Homo sapien
tcactgctggtcagatgctcatgcc

SEQ ID NO: 1256332 - DNA, 25 bp, Homo sapien
aattaaagaagaggataaatactat

SEQ ID NO: 1256333 - DNA, 25 bp, Homo sapien
taattaaagaagaggataaatacta

SEQ ID NO: 1256334 - DNA, 25 bp, Homo sapien
attaaagaagaggataaatactatt

SEQ ID NO: 1256335 - DNA, 25 bp, Homo sapien
gactgacttgagagatcacagggag

SEQ ID NO: 1256336 - DNA, 25 bp, Homo sapien
gataacattactcagaccgggtgat

SEQ ID NO: 1256337 - DNA, 25 bp, Homo sapien
accgggtgatggatacgtactgaga

SEQ ID NO: 1256338 - DNA, 25 bp, Homo sapien
cagtactccagctgaagatgctgct

SEQ ID NO: 1256339 - DNA, 25 bp, Homo sapien
aaatttgaatgcacttaggcagggc

SEQ ID NO: 1256340 - DNA, 25 bp, Homo sapien
tgatgtagactcctgttcaccacag

SEQ ID NO: 1256341 - DNA, 25 bp, Homo sapien
tcaatgttctactatagccgaagtc

SEQ ID NO: 1256342 - DNA, 25 bp, Homo sapien
caatctcagggatctcaactctggc

SEQ ID NO: 1256343 - DNA, 25 bp, Homo sapien
tcagtgatgcctagaaaccattatt

SEQ ID NO: 1256344 - DNA, 25 bp, Homo sapien
cttttacaaactaagcggcaggcgc

SEQ ID NO: 1256345 - DNA, 25 bp, Homo sapien
cggcaggcgcatataactttgttta

SEQ ID NO: 1256346 - DNA, 25 bp, Homo sapien
cactctttgtagagatcgtgatcca

SEQ ID NO: 1256347 - DNA, 25 bp, Homo sapien
gaatattacggtcctgccacctggg

SEQ ID NO: 1256348 - DNA, 25 bp, Homo sapien
ttacttccaaagcaggcgggcaaca

SEQ ID NO: 1256349 - DNA, 25 bp, Homo sapien
gaagtagttatggagaaagtcgccc

SEQ ID NO: 1256350 - DNA, 25 bp, Homo sapien
ccctggaaatgctcgtgtgacaaca

SEQ ID NO: 1256351 - DNA, 25 bp, Homo sapien
catgggatagaccttcccccttaat

SEQ ID NO: 1256352 - DNA, 25 bp, Homo sapien
ttgaattctcaggaacgcccgtcga

SEQ ID NO: 1256353 - DNA, 25 bp, Homo sapien
aggaacgcccgtcgacctggacact

SEQ ID NO: 1256354 - DNA, 25 bp, Homo sapien
actttgaattctcaggaacgcccgt

SEQ ID NO: 1256355 - DNA, 25 bp, Homo sapien
gctggccggaagacattactcctga

SEQ ID NO: 1256356 - DNA, 25 bp, Homo sapien
cgtagcagtgacgtcagacagggac

SEQ ID NO: 1256357 - DNA, 25 bp, Homo sapien
tgtcaccaaggtagccgaagcagga

SEQ ID NO: 1256358 - DNA, 25 bp, Homo sapien
tactcctgaggatcgagagagaggc

SEQ ID NO: 1256359 - DNA, 25 bp, Homo sapien
catcccttggtgcttaggttgtaaa

SEQ ID NO: 1256360 - DNA, 25 bp, Homo sapien
ggctccccatcccttggtgcttagg

SEQ ID NO: 1256361 - DNA, 25 bp, Homo sapien
tgcttaggttgtaaaagcaggtaac

SEQ ID NO: 1256362 - DNA, 25 bp, Homo sapien
ccttggtgcttaggttgtaaaagca

SEQ ID NO: 1256363 - DNA, 25 bp, Homo sapien
ggtcctggataatcggcaacctgca

SEQ ID NO: 1256364 - DNA, 25 bp, Homo sapien
gcaacctgcatcgtggttatctcgg

SEQ ID NO: 1256365 - DNA, 25 bp, Homo sapien
tagttatcagggtattactccaggc

SEQ ID NO: 1256366 - DNA, 25 bp, Homo sapien
gaattgatgactccctttccaaagg

SEQ ID NO: 1256367 - DNA, 25 bp, Homo sapien
tagtgtgtacgcatgactgaagcca

SEQ ID NO: 1256368 - DNA, 25 bp, Homo sapien
gaatgtgaaacccactgccctggcc

SEQ ID NO: 1256369 - DNA, 25 bp, Homo sapien
gagcccatcgtgtgtatgcaccatg

SEQ ID NO: 1256370 - DNA, 25 bp, Homo sapien
cgtgtgtatgcacgactgaagccat

SEQ ID NO: 1256371 - DNA, 25 bp, Homo sapien
ggtgcaatatctcctgaaaaaagtc

SEQ ID NO: 1256372 - DNA, 25 bp, Homo sapien
cattaaaggtgcaatatctcctgaa

SEQ ID NO: 1256373 - DNA, 25 bp, Homo sapien
catcatcaacagcatatgtgactgc

SEQ ID NO: 1256374 - DNA, 25 bp, Homo sapien
gactgcgcttagtactttttcttgc

SEQ ID NO: 1256375 - DNA, 25 bp, Homo sapien
caactgctcaacttcacctcgtata

SEQ ID NO: 1256376 - DNA, 25 bp, Homo sapien
tgaaaacagagactgcagaacaagc

SEQ ID NO: 1256377 - DNA, 25 bp, Homo sapien
aagctttggcgcctctggctgctca

SEQ ID NO: 1256378 - DNA, 25 bp, Homo sapien
gcaaaggggaagtgctcttgaatcc

SEQ ID NO: 1256379 - DNA, 25 bp, Homo sapien
ccagccaagacagcattttagatca

SEQ ID NO: 1256380 - DNA, 25 bp, Homo sapien
ggaattttcgtgaggctgaaagtga

SEQ ID NO: 1256381 - DNA, 25 bp, Homo sapien
tagatcattccaaacactgctaggg

SEQ ID NO: 1256382 - DNA, 25 bp, Homo sapien
actgctaggggaattttcgtgaggc

SEQ ID NO: 1256383 - DNA, 25 bp, Homo sapien
cactgagcgcctaataagcctggaa

SEQ ID NO: 1256384 - DNA, 25 bp, Homo sapien
ccacagggcagaatgaatcactcat

SEQ ID NO: 1256385 - DNA, 25 bp, Homo sapien
aacccagctcaagagtcgccttctg

SEQ ID NO: 1256386 - DNA, 25 bp, Homo sapien
atctccaataatatcccagccacgg

SEQ ID NO: 1256387 - DNA, 25 bp, Homo sapien
ccttttaaactggtggacaccatct

SEQ ID NO: 1256388 - DNA, 25 bp, Homo sapien
cttttaaactggtggacaccatcta

SEQ ID NO: 1256389 - DNA, 25 bp, Homo sapien
cctgattcattagagtttaggactc

SEQ ID NO: 1256390 - DNA, 25 bp, Homo sapien
cagagacgttctttggtgtttacac

SEQ ID NO: 1256391 - DNA, 25 bp, Homo sapien
gaaatatgtcaagtcacctgagacc

SEQ ID NO: 1256392 - DNA, 25 bp, Homo sapien
ggcacaggatgcaattctgaagtta

SEQ ID NO: 1256393 - DNA, 25 bp, Homo sapien
agtcctcctcctggaaataggattc

SEQ ID NO: 1256394 - DNA, 25 bp, Homo sapien
cctcctggaaataggattctgctat

SEQ ID NO: 1256395 - DNA, 25 bp, Homo sapien
cctcctcctggaaataggattctgc

SEQ ID NO: 1256396 - DNA, 25 bp, Homo sapien
tcctcctggaaataggattctgcta

SEQ ID NO: 1256397 - DNA, 25 bp, Homo sapien
gatacgacgagattcaccatcacgg

SEQ ID NO: 1256398 - DNA, 25 bp, Homo sapien
cgacagatacgacgagattcaccat

SEQ ID NO: 1256399 - DNA, 25 bp, Homo sapien
ttacaacgacagatacgacgagatt

SEQ ID NO: 1256400 - DNA, 25 bp, Homo sapien
gctgtctagtccaggaccaattaca

SEQ ID NO: 1256401 - DNA, 25 bp, Homo sapien
gaaagatttgcgagcaattgctcat

SEQ ID NO: 1256402 - DNA, 25 bp, Homo sapien
ttgaatggcagaaagatttgcgagc

SEQ ID NO: 1256403 - DNA, 25 bp, Homo sapien
cgagcaattgctcatgatacaatcg

SEQ ID NO: 1256404 - DNA, 25 bp, Homo sapien
tgatacaatcgttctagctgaatga

SEQ ID NO: 1256405 - DNA, 25 bp, Homo sapien
taattttgtagatagtgacttgttg

SEQ ID NO: 1256406 - DNA, 25 bp, Homo sapien
tgtagatagtgacttgttggattac

SEQ ID NO: 1256407 - DNA, 25 bp, Homo sapien
gacttgttggattactgctaattcc

SEQ ID NO: 1256408 - DNA, 25 bp, Homo sapien
tataaaaccaggtcaaatatgttaa

SEQ ID NO: 1256409 - DNA, 25 bp, Homo sapien
gagactaaattagccagtagggcat

SEQ ID NO: 1256410 - DNA, 25 bp, Homo sapien
cttggcattgatatgaagagcaaaa

SEQ ID NO: 1256411 - DNA, 25 bp, Homo sapien
aaagtatttgttagtcactggctct

SEQ ID NO: 1256412 - DNA, 25 bp, Homo sapien
cagttaactagcaccactcataaag

SEQ ID NO: 1256413 - DNA, 25 bp, Homo sapien
ttcgtaagccgttcaaaatcttcac

SEQ ID NO: 1256414 - DNA, 25 bp, Homo sapien
tctgaattccttagagccgtaactg

SEQ ID NO: 1256415 - DNA, 25 bp, Homo sapien
tcttgatgtgttgcacaaattttcg

SEQ ID NO: 1256416 - DNA, 25 bp, Homo sapien
agccgtaactgtatgtggttgcaca

SEQ ID NO: 1256417 - DNA, 25 bp, Homo sapien
tcttgtcaaaaaaggcctggaactg

SEQ ID NO: 1256418 - DNA, 25 bp, Homo sapien
aactgtacaaacaccactaactctt

SEQ ID NO: 1256419 - DNA, 25 bp, Homo sapien
acttcagctacctcaattgtgtctt

SEQ ID NO: 1256420 - DNA, 25 bp, Homo sapien
tgtacaaacaccactaactcttctg

SEQ ID NO: 1256421 - DNA, 25 bp, Homo sapien
acggcgtgcatatcccgcaagtgga

SEQ ID NO: 1256422 - DNA, 25 bp, Homo sapien
cagtaagagggacggcgtgcatatc

SEQ ID NO: 1256423 - DNA, 25 bp, Homo sapien
aagagggacggcgtgcatatcccgc

SEQ ID NO: 1256424 - DNA, 25 bp, Homo sapien
caacccagtaagagggacggcgtgc

SEQ ID NO: 1256425 - DNA, 25 bp, Homo sapien
gatccttatacggtcagtagccgcc

SEQ ID NO: 1256426 - DNA, 25 bp, Homo sapien
tgtatctacccaatccgatgctgtg

SEQ ID NO: 1256427 - DNA, 25 bp, Homo sapien
tgtggaaccttagtcgaggaatgtg

SEQ ID NO: 1256428 - DNA, 25 bp, Homo sapien
tatagaaagatcctattgtggaacc

SEQ ID NO: 1256429 - DNA, 25 bp, Homo sapien
ctcacaaccacagttctcggatggc

SEQ ID NO: 1256430 - DNA, 25 bp, Homo sapien
cagttctcggatggcttgcctgtct

SEQ ID NO: 1256431 - DNA, 25 bp, Homo sapien
ccacagttctcggatggcttgcctg

SEQ ID NO: 1256432 - DNA, 25 bp, Homo sapien
gctcacaaccacagttctcggatgg

SEQ ID NO: 1256433 - DNA, 25 bp, Homo sapien
ggatcttcagacactagtaactgcg

SEQ ID NO: 1256434 - DNA, 25 bp, Homo sapien
taactgcgtggagcatttcctttcc

SEQ ID NO: 1256435 - DNA, 25 bp, Homo sapien
tcctttggatcttcagacactagta

SEQ ID NO: 1256436 - DNA, 25 bp, Homo sapien
cagacactagtaactgcgtggagca

SEQ ID NO: 1256437 - DNA, 25 bp, Homo sapien
tcgcgcccggcaaaatgagactatt

SEQ ID NO: 1256438 - DNA, 25 bp, Homo sapien
aaaggtacagaacagtctgaggtgc

SEQ ID NO: 1256439 - DNA, 25 bp, Homo sapien
ggacagcagctatgccacgaaatac

SEQ ID NO: 1256440 - DNA, 25 bp, Homo sapien
tgccattctatgagtaggagatggg

SEQ ID NO: 1256441 - DNA, 25 bp, Homo sapien
cctggtgaaatcaacggctctgtct

SEQ ID NO: 1256442 - DNA, 25 bp, Homo sapien
tcaatgcaggaggtatacggtcaca

SEQ ID NO: 1256443 - DNA, 25 bp, Homo sapien
gctaacgtggcttcagcgctgcaga

SEQ ID NO: 1256444 - DNA, 25 bp, Homo sapien
tgtttgagccagctgcaagcgactg

SEQ ID NO: 1256445 - DNA, 25 bp, Homo sapien
tcttcataggaaagggaatcttcag

SEQ ID NO: 1256446 - DNA, 25 bp, Homo sapien
caagttggtctgtgggcaacgcctc

SEQ ID NO: 1256447 - DNA, 25 bp, Homo sapien
tcttgaaggagatcggagtcgtcgt

SEQ ID NO: 1256448 - DNA, 25 bp, Homo sapien
gcatcccgaagtggcaaacggagtt

SEQ ID NO: 1256449 - DNA, 25 bp, Homo sapien
cgttaactagaattttccctcatgt

SEQ ID NO: 1256450 - DNA, 25 bp, Homo sapien
acgttaactagaattttccctcatg

SEQ ID NO: 1256451 - DNA, 25 bp, Homo sapien
tcatgtttgagacaagggaaaactt

SEQ ID NO: 1256452 - DNA, 25 bp, Homo sapien
ttccctcatgtttgagacaagggaa

SEQ ID NO: 1256453 - DNA, 25 bp, Homo sapien
tccacgacaagacccttgtgcatct

SEQ ID NO: 1256454 - DNA, 25 bp, Homo sapien
aagacccttgtgcatcttcaacaca

SEQ ID NO: 1256455 - DNA, 25 bp, Homo sapien
tacatccacgacaagacccttgtgc

SEQ ID NO: 1256456 - DNA, 25 bp, Homo sapien
ctttgatacatccacgacaagaccc

SEQ ID NO: 1256457 - DNA, 25 bp, Homo sapien
ggttattaagagatcatgttctata

SEQ ID NO: 1256458 - DNA, 25 bp, Homo sapien
aaacaattccagtaaaatcagccaa

SEQ ID NO: 1256459 - DNA, 25 bp, Homo sapien
taatcacaaacggaaggaagcataa

SEQ ID NO: 1256460 - DNA, 25 bp, Homo sapien
aaaggccaacaacatcatctgattt

SEQ ID NO: 1256461 - DNA, 25 bp, Homo sapien
tgaaaaagctttccaaacctagaca

SEQ ID NO: 1256462 - DNA, 25 bp, Homo sapien
actatacttttgatgataacgtgtc

SEQ ID NO: 1256463 - DNA, 25 bp, Homo sapien
tacatagcaaattactgggtttgaa

SEQ ID NO: 1256464 - DNA, 25 bp, Homo sapien
gacaagttccctttatacatgtcac

SEQ ID NO: 1256465 - DNA, 25 bp, Homo sapien
tcaagtttggatgctaggagctccc

SEQ ID NO: 1256466 - DNA, 25 bp, Homo sapien
tgttgctaaaatctgctcacaaggg

SEQ ID NO: 1256467 - DNA, 25 bp, Homo sapien
taagagtctgtacaagctgagtgcg

SEQ ID NO: 1256468 - DNA, 25 bp, Homo sapien
cacttggtgccagacgactgttaga

SEQ ID NO: 1256469 - DNA, 25 bp, Homo sapien
gaatgtcgagtagtacagcctttat

SEQ ID NO: 1256470 - DNA, 25 bp, Homo sapien
gacgacatgcaaggtgtatctggga

SEQ ID NO: 1256471 - DNA, 25 bp, Homo sapien
gggccagtctgactacggtatagtc

SEQ ID NO: 1256472 - DNA, 25 bp, Homo sapien
gatgacaggagtcctgaatgtcgag

SEQ ID NO: 1256473 - DNA, 25 bp, Homo sapien
taaatcccctgaccttgctgaaatt

SEQ ID NO: 1256474 - DNA, 25 bp, Homo sapien
ctaagtttctaggtgaggcattacc

SEQ ID NO: 1256475 - DNA, 25 bp, Homo sapien
tattacgtgtctctccctctagaaa

SEQ ID NO: 1256476 - DNA, 25 bp, Homo sapien
cagggacttgatctgtgttcagcgc

SEQ ID NO: 1256477 - DNA, 25 bp, Homo sapien
gagtaacttgcttaagcttgcagtg

SEQ ID NO: 1256478 - DNA, 25 bp, Homo sapien
gaacctctaggttggtcaattctga

SEQ ID NO: 1256479 - DNA, 25 bp, Homo sapien
gcttgcagtgccagtagctggtaga

SEQ ID NO: 1256480 - DNA, 25 bp, Homo sapien
ttttgcagacgaagaggccaagctt

SEQ ID NO: 1256481 - DNA, 25 bp, Homo sapien
cttgctcagtgatcttctctaggtc

SEQ ID NO: 1256482 - DNA, 25 bp, Homo sapien
gctcagtgatcttctctaggtcttt

SEQ ID NO: 1256483 - DNA, 25 bp, Homo sapien
tgctcagtgatcttctctaggtctt

SEQ ID NO: 1256484 - DNA, 25 bp, Homo sapien
ctcagtgatcttctctaggtctttc

SEQ ID NO: 1256485 - DNA, 25 bp, Homo sapien
gcaggatgatctcctacagtatcat

SEQ ID NO: 1256486 - DNA, 25 bp, Homo sapien
ggcaggatgatctcctacagtatca

SEQ ID NO: 1256487 - DNA, 25 bp, Homo sapien
caggatgatctcctacagtatcatt

SEQ ID NO: 1256488 - DNA, 25 bp, Homo sapien
ccaagctatcgtctatttcttggaa

SEQ ID NO: 1256489 - DNA, 25 bp, Homo sapien
cactcttcgcttagatggtttgtgt

SEQ ID NO: 1256490 - DNA, 25 bp, Homo sapien
cttgatccaagctatcgtctatttc

SEQ ID NO: 1256491 - DNA, 25 bp, Homo sapien
cttggaatctcactcttcgcttaga

SEQ ID NO: 1256492 - DNA, 25 bp, Homo sapien
ctaggagaggtagatccagtgcttc

SEQ ID NO: 1256493 - DNA, 25 bp, Homo sapien
tgaggaaaaccgttgctatgcacag

SEQ ID NO: 1256494 - DNA, 25 bp, Homo sapien
gtcagtacaaacaggtgactccatg

SEQ ID NO: 1256495 - DNA, 25 bp, Homo sapien
tgactccatgtcaccgaaagtgcag

SEQ ID NO: 1256496 - DNA, 25 bp, Homo sapien
gacaaaactgttgcctgagactcag

SEQ ID NO: 1256497 - DNA, 25 bp, Homo sapien
taataggtgtaagcgtttgccaaac

SEQ ID NO: 1256498 - DNA, 25 bp, Homo sapien
gattattctaacagagttcctccgg

SEQ ID NO: 1256499 - DNA, 25 bp, Homo sapien
caaacttattgcgtgatggcggaaa

SEQ ID NO: 1256500 - DNA, 25 bp, Homo sapien
tggaatcaccaaatgcatgcgcagt

SEQ ID NO: 1256501 - DNA, 25 bp, Homo sapien
tacacctcagataaggaaaggccac

SEQ ID NO: 1256502 - DNA, 25 bp, Homo sapien
taatgctgcccgataaagtcaaagc

SEQ ID NO: 1256503 - DNA, 25 bp, Homo sapien
aacacaaagggaggtactgtgccag

SEQ ID NO: 1256504 - DNA, 25 bp, Homo sapien
gatagagacccaagaggtgaacagg

SEQ ID NO: 1256505 - DNA, 25 bp, Homo sapien
cttgctgcgaaggtccccaggagat

SEQ ID NO: 1256506 - DNA, 25 bp, Homo sapien
aagtggcgaggacacccatggtttc

SEQ ID NO: 1256507 - DNA, 25 bp, Homo sapien
tactacaccagaggttacacaggat

SEQ ID NO: 1256508 - DNA, 25 bp, Homo sapien
gacctattagtcttcccaaagtaga

SEQ ID NO: 1256509 - DNA, 25 bp, Homo sapien
ggaattactccagttcatgcaatag

SEQ ID NO: 1256510 - DNA, 25 bp, Homo sapien
gcagaagagccgttacctaaggacc

SEQ ID NO: 1256511 - DNA, 25 bp, Homo sapien
cttgtagggccagatcaacttctga

SEQ ID NO: 1256512 - DNA, 25 bp, Homo sapien
tctcactatgcagtgtaggccagtc

SEQ ID NO: 1256513 - DNA, 25 bp, Homo sapien
ctcactatgcagtgtaggccagtct

SEQ ID NO: 1256514 - DNA, 25 bp, Homo sapien
tttaaagtgcgcagctctccaaatc

SEQ ID NO: 1256515 - DNA, 25 bp, Homo sapien
attcatttaaagtgcgcagctctcc

SEQ ID NO: 1256516 - DNA, 25 bp, Homo sapien
atttaaagtgcgcagctctccaaat

SEQ ID NO: 1256517 - DNA, 25 bp, Homo sapien
tcatttaaagtgcgcagctctccaa

SEQ ID NO: 1256518 - DNA, 25 bp, Homo sapien
cagccttatgctgtttccctgacaa

SEQ ID NO: 1256519 - DNA, 25 bp, Homo sapien
tgccacggccagatacagactccgt

SEQ ID NO: 1256520 - DNA, 25 bp, Homo sapien
gactccgtgctccaaaccgaaatca

SEQ ID NO: 1256521 - DNA, 25 bp, Homo sapien
tctggctgtctagtggttctgctgc

SEQ ID NO: 1256522 - DNA, 25 bp, Homo sapien
atgctaactgcctcactgcccgtgg

SEQ ID NO: 1256523 - DNA, 25 bp, Homo sapien
gtaacagtgatcaaaggcacaaagt

SEQ ID NO: 1256524 - DNA, 25 bp, Homo sapien
agagtaacagtgatcaaaggcacaa

SEQ ID NO: 1256525 - DNA, 25 bp, Homo sapien
atgtgtaagacccagagtaacagtg

SEQ ID NO: 1256526 - DNA, 25 bp, Homo sapien
ttgctgtcctgaaagagggtcggac

SEQ ID NO: 1256527 - DNA, 25 bp, Homo sapien
gacaaagacgaaagcgctcatccag

SEQ ID NO: 1256528 - DNA, 25 bp, Homo sapien
aacaccaagtgggagttgctgtcct

SEQ ID NO: 1256529 - DNA, 25 bp, Homo sapien
caagcagaggcaatggaagctaagc

SEQ ID NO: 1256530 - DNA, 25 bp, Homo sapien
ggaaacctgcatcgcacacagacaa

SEQ ID NO: 1256531 - DNA, 25 bp, Homo sapien
catcgcacacagacaaggcttggtt

SEQ ID NO: 1256532 - DNA, 25 bp, Homo sapien
gcttggttctgtggtgaccgcctca

SEQ ID NO: 1256533 - DNA, 25 bp, Homo sapien
tgcacaaggaaacctgcatcgcaca

SEQ ID NO: 1256534 - DNA, 25 bp, Homo sapien
gaccctcagtgatgacggaacacgg

SEQ ID NO: 1256535 - DNA, 25 bp, Homo sapien
caaccaagctaccagatgcgtgtga

SEQ ID NO: 1256536 - DNA, 25 bp, Homo sapien
gctcacattggctgggaattctcca

SEQ ID NO: 1256537 - DNA, 25 bp, Homo sapien
taggagtcattacagcccaactggt

SEQ ID NO: 1256538 - DNA, 25 bp, Homo sapien
atacacaaggggcttaagggctgca

SEQ ID NO: 1256539 - DNA, 25 bp, Homo sapien
gcagtcagagttctatacacaaggg

SEQ ID NO: 1256540 - DNA, 25 bp, Homo sapien
ggtgtggcgcctggagctcacacat

SEQ ID NO: 1256541 - DNA, 25 bp, Homo sapien
gcaatggtgcttccgaccactgagg

SEQ ID NO: 1256542 - DNA, 25 bp, Homo sapien
gggtcactagatggcgctctccggc

SEQ ID NO: 1256543 - DNA, 25 bp, Homo sapien
ggtcttggtttctccggactgaata

SEQ ID NO: 1256544 - DNA, 25 bp, Homo sapien
cgaaggcggcgtattttgattggct

SEQ ID NO: 1256545 - DNA, 25 bp, Homo sapien
acttcccggatcaaagcacctctgg

SEQ ID NO: 1256546 - DNA, 25 bp, Homo sapien
ggcttgggcctgtctgtatatatca

SEQ ID NO: 1256547 - DNA, 25 bp, Homo sapien
tatcagtacgtgaacctgaactact

SEQ ID NO: 1256548 - DNA, 25 bp, Homo sapien
tctgtatatatcagtacgtgaacct

SEQ ID NO: 1256549 - DNA, 25 bp, Homo sapien
gaactacttctatggccattgcaaa

SEQ ID NO: 1256550 - DNA, 25 bp, Homo sapien
ttccgtgcggcggtttgttctgcag

SEQ ID NO: 1256551 - DNA, 25 bp, Homo sapien
gcttccaagcctggcaggcgcggac

SEQ ID NO: 1256552 - DNA, 25 bp, Homo sapien
ctgcgcctcaggcagcgaccccagt

SEQ ID NO: 1256553 - DNA, 25 bp, Homo sapien
cgggtgagcggcttgcttgggaggc

SEQ ID NO: 1256554 - DNA, 25 bp, Homo sapien
gagtccacagcgagcccaggccccg

SEQ ID NO: 1256555 - DNA, 25 bp, Homo sapien
agtccacagcgagcccaggccccgg

SEQ ID NO: 1256556 - DNA, 25 bp, Homo sapien
cgagtccacagcgagcccaggcccc

SEQ ID NO: 1256557 - DNA, 25 bp, Homo sapien
acgagtccacagcgagcccaggccc

SEQ ID NO: 1256558 - DNA, 25 bp, Homo sapien
gtggaaaggcctctgctcggtcgcc

SEQ ID NO: 1256559 - DNA, 25 bp, Homo sapien
ggcaggcgggagctccgctccgggt

SEQ ID NO: 1256560 - DNA, 25 bp, Homo sapien
tcggtcacgaactggccggtgaagc

SEQ ID NO: 1256561 - DNA, 25 bp, Homo sapien
ggtgaagccagacgcgccgaacacc

SEQ ID NO: 1256562 - DNA, 25 bp, Homo sapien
cagcttcagggccgccttctccagc

SEQ ID NO: 1256563 - DNA, 25 bp, Homo sapien
agcttcagggccgccttctccagca

SEQ ID NO: 1256564 - DNA, 25 bp, Homo sapien
gcttcagggccgccttctccagcac

SEQ ID NO: 1256565 - DNA, 25 bp, Homo sapien
ccagcttcagggccgccttctccag

SEQ ID NO: 1256566 - DNA, 25 bp, Homo sapien
gtgttggtagtgtcagcaccaaaag

SEQ ID NO: 1256567 - DNA, 25 bp, Homo sapien
tggtcctacgcaattgaggacaact

SEQ ID NO: 1256568 - DNA, 25 bp, Homo sapien
ccatttcatcaagcgaggctggatt

SEQ ID NO: 1256569 - DNA, 25 bp, Homo sapien
gcaattgaggacaactgttgcctgt

SEQ ID NO: 1256570 - DNA, 25 bp, Homo sapien
gcgaggctggattagcaatatcaca

SEQ ID NO: 1256571 - DNA, 25 bp, Homo sapien
gtaaccaatcaacaagccagcacac

SEQ ID NO: 1256572 - DNA, 25 bp, Homo sapien
taaggccttcaaccaacaattctgt

SEQ ID NO: 1256573 - DNA, 25 bp, Homo sapien
aaaaatatactagggagacacactc

SEQ ID NO: 1256574 - DNA, 25 bp, Homo sapien
cctaaggagaacgtcatggagagcc

SEQ ID NO: 1256575 - DNA, 25 bp, Homo sapien
gctacggactatatatagaggccat

SEQ ID NO: 1256576 - DNA, 25 bp, Homo sapien
tgggtcccacttctaacatctttct

SEQ ID NO: 1256577 - DNA, 25 bp, Homo sapien
agccagatgtgatagcaccagtcta

SEQ ID NO: 1256578 - DNA, 25 bp, Homo sapien
tatagcctctagttcagcctgcctg

SEQ ID NO: 1256579 - DNA, 25 bp, Homo sapien
tctccactgatgtcgatacaactgg

SEQ ID NO: 1256580 - DNA, 25 bp, Homo sapien
cactgatgtcgatacaactggctcc

SEQ ID NO: 1256581 - DNA, 25 bp, Homo sapien
ctgaggttctccactgatgtcgata

SEQ ID NO: 1256582 - DNA, 25 bp, Homo sapien
gatgtcgatacaactggctccattt

SEQ ID NO: 1256583 - DNA, 25 bp, Homo sapien
tgaatagtagagagttcccaagtac

SEQ ID NO: 1256584 - DNA, 25 bp, Homo sapien
tcccatccaggattacattcggttg

SEQ ID NO: 1256585 - DNA, 25 bp, Homo sapien
taccagggttaatgctgacttgaac

SEQ ID NO: 1256586 - DNA, 25 bp, Homo sapien
gaggcagtgttcaccaggtttctcc

SEQ ID NO: 1256587 - DNA, 25 bp, Homo sapien
tatttctggtatatattactcccag

SEQ ID NO: 1256588 - DNA, 25 bp, Homo sapien
ccagatctgctggaatggagtcaaa

SEQ ID NO: 1256589 - DNA, 25 bp, Homo sapien
gagtcaaagccgctgcttccaatga

SEQ ID NO: 1256590 - DNA, 25 bp, Homo sapien
gcttccaatgatataaacccctttg

SEQ ID NO: 1256591 - DNA, 25 bp, Homo sapien
caatactttctagctttgacggtta

SEQ ID NO: 1256592 - DNA, 25 bp, Homo sapien
ccagaaattttacagcccaaactat

SEQ ID NO: 1256593 - DNA, 25 bp, Homo sapien
tatttcttagggacgagtcttacta

SEQ ID NO: 1256594 - DNA, 25 bp, Homo sapien
caagtttgaatttataacgttgcca

SEQ ID NO: 1256595 - DNA, 25 bp, Homo sapien
ctcaggtcctgaatgtatagtcagg

SEQ ID NO: 1256596 - DNA, 25 bp, Homo sapien
ggtcctgaatgtatagtcaggaaac

SEQ ID NO: 1256597 - DNA, 25 bp, Homo sapien
cctgaatgtatagtcaggaaacttt

SEQ ID NO: 1256598 - DNA, 25 bp, Homo sapien
caggtcctgaatgtatagtcaggaa

SEQ ID NO: 1256599 - DNA, 25 bp, Homo sapien
gccgaaatttgtccgatgctctata

SEQ ID NO: 1256600 - DNA, 25 bp, Homo sapien
aacaccaaagagcaaggacggacgg

SEQ ID NO: 1256601 - DNA, 25 bp, Homo sapien
ggaatcttgtcctcctagagcagag

SEQ ID NO: 1256602 - DNA, 25 bp, Homo sapien
ggacggccccaactagtacttgcag

SEQ ID NO: 1256603 - DNA, 25 bp, Homo sapien
tgttatctactcaatctgagcctag

SEQ ID NO: 1256604 - DNA, 25 bp, Homo sapien
gaggcagatatgaaggtacctttca

SEQ ID NO: 1256605 - DNA, 25 bp, Homo sapien
agcctagccaaaagggcctatgtga

SEQ ID NO: 1256606 - DNA, 25 bp, Homo sapien
ccatccaaagattcaggttttccta

SEQ ID NO: 1256607 - DNA, 25 bp, Homo sapien
tctcaaattactctgatctccaaaa

SEQ ID NO: 1256608 - DNA, 25 bp, Homo sapien
aggtaccatcatgaatgctcaaccc

SEQ ID NO: 1256609 - DNA, 25 bp, Homo sapien
ccaatgagcgggacaggtttcagat

SEQ ID NO: 1256610 - DNA, 25 bp, Homo sapien
taaattgctgacttccaggtaccat

SEQ ID NO: 1256611 - DNA, 25 bp, Homo sapien
tctgaacttactacaaattagtctc

SEQ ID NO: 1256612 - DNA, 25 bp, Homo sapien
gatagtgaaaagtcatcataagatt

SEQ ID NO: 1256613 - DNA, 25 bp, Homo sapien
cacacgaagtacttaagcttatggt

SEQ ID NO: 1256614 - DNA, 25 bp, Homo sapien
cataagattcacttatttcctagga

SEQ ID NO: 1256615 - DNA, 25 bp, Homo sapien
gagttcccgacaataagaaattggc

SEQ ID NO: 1256616 - DNA, 25 bp, Homo sapien
tcatacaagtaacgttgagtcctcc

SEQ ID NO: 1256617 - DNA, 25 bp, Homo sapien
ggtgattcctctaaattttcataca

SEQ ID NO: 1256618 - DNA, 25 bp, Homo sapien
ttacaacagacacatcagatcccat

SEQ ID NO: 1256619 - DNA, 25 bp, Homo sapien
tcagcttaataacagaggtgatgcc

SEQ ID NO: 1256620 - DNA, 25 bp, Homo sapien
aaagaaaagtcctgcaaacatcagc

SEQ ID NO: 1256621 - DNA, 25 bp, Homo sapien
cagttacatacgcagcatactgaac

SEQ ID NO: 1256622 - DNA, 25 bp, Homo sapien
cccacagttacatacgcagcatact

SEQ ID NO: 1256623 - DNA, 25 bp, Homo sapien
tgttttgaaaaatagccaaaggaga

SEQ ID NO: 1256624 - DNA, 25 bp, Homo sapien
atagccaaaggagaagaaccatggg

SEQ ID NO: 1256625 - DNA, 25 bp, Homo sapien
aaaatagccaaaggagaagaaccat

SEQ ID NO: 1256626 - DNA, 25 bp, Homo sapien
tgaaaaatagccaaaggagaagaac

SEQ ID NO: 1256627 - DNA, 25 bp, Homo sapien
gaatgtcagcgtgaatgaggcagca

SEQ ID NO: 1256628 - DNA, 25 bp, Homo sapien
agaatgtcagcgtgaatgaggcagc

SEQ ID NO: 1256629 - DNA, 25 bp, Homo sapien
atgtcagcgtgaatgaggcagcatc

SEQ ID NO: 1256630 - DNA, 25 bp, Homo sapien
aaagaatgtcagcgtgaatgaggca

SEQ ID NO: 1256631 - DNA, 25 bp, Homo sapien
gatatttggtttgttcttatctgta

SEQ ID NO: 1256632 - DNA, 25 bp, Homo sapien
ttttgatatttggtttgttcttatc

SEQ ID NO: 1256633 - DNA, 25 bp, Homo sapien
caaattttgatatttggtttgttct

SEQ ID NO: 1256634 - DNA, 25 bp, Homo sapien
ttgatatttggtttgttcttatctg

SEQ ID NO: 1256635 - DNA, 25 bp, Homo sapien
acttagaagagtcatggctgcctga

SEQ ID NO: 1256636 - DNA, 25 bp, Homo sapien
gaaccatagctatgggggtagccac

SEQ ID NO: 1256637 - DNA, 25 bp, Homo sapien
tagaagagtcatggctgcctgaacc

SEQ ID NO: 1256638 - DNA, 25 bp, Homo sapien
gcctgaaccatagctatgggggtag

SEQ ID NO: 1256639 - DNA, 25 bp, Homo sapien
ccagctgggtatagttaggcactga

SEQ ID NO: 1256640 - DNA, 25 bp, Homo sapien
tcagggttactactgccagctgggt

SEQ ID NO: 1256641 - DNA, 25 bp, Homo sapien
tcatctagccaggatcccatggttc

SEQ ID NO: 1256642 - DNA, 25 bp, Homo sapien
taaatgctccagtaagacagtacgt

SEQ ID NO: 1256643 - DNA, 25 bp, Homo sapien
aataccgtgtttgttgagtctgtca

SEQ ID NO: 1256644 - DNA, 25 bp, Homo sapien
tcagagctgctaataacactaaact

SEQ ID NO: 1256645 - DNA, 25 bp, Homo sapien
tgagtctgtcaatcaactttgtttt

SEQ ID NO: 1256646 - DNA, 25 bp, Homo sapien
taataacactaaactcaataccgtg

SEQ ID NO: 1256647 - DNA, 25 bp, Homo sapien
tcgtttccacatacactcagacagg

SEQ ID NO: 1256648 - DNA, 25 bp, Homo sapien
taattcacgcacgttatgacttcag

SEQ ID NO: 1256649 - DNA, 25 bp, Homo sapien
tattttagatttgacaatcgtttcc

SEQ ID NO: 1256650 - DNA, 25 bp, Homo sapien
tacactcagacaggcttacagaaga

SEQ ID NO: 1256651 - DNA, 25 bp, Homo sapien
ttccctcctactgcggcaaggcaag

SEQ ID NO: 1256652 - DNA, 25 bp, Homo sapien
tagacctgccagctcattcgtgaaa

SEQ ID NO: 1256653 - DNA, 25 bp, Homo sapien
acagtaacgatggtgtgcgcacccc

SEQ ID NO: 1256654 - DNA, 25 bp, Homo sapien
caaggcaagcggcagttactgcccg

SEQ ID NO: 1256655 - DNA, 25 bp, Homo sapien
gtaacagtccaaaatcagtgtagat

SEQ ID NO: 1256656 - DNA, 25 bp, Homo sapien
ggtaacagtccaaaatcagtgtaga

SEQ ID NO: 1256657 - DNA, 25 bp, Homo sapien
tacatcggcaggtccaaacattaaa

SEQ ID NO: 1256658 - DNA, 25 bp, Homo sapien
catcggcaggtccaaacattaaacc

SEQ ID NO: 1256659 - DNA, 25 bp, Homo sapien
caaatacatcggcaggtccaaacat

SEQ ID NO: 1256660 - DNA, 25 bp, Homo sapien
ctatacaaatacatcggcaggtcca

SEQ ID NO: 1256661 - DNA, 25 bp, Homo sapien
tgatagcaacttataagctgtatcc

SEQ ID NO: 1256662 - DNA, 25 bp, Homo sapien
cctagtcacagatatagaattacgt

SEQ ID NO: 1256663 - DNA, 25 bp, Homo sapien
ggccacttaagcagcatgtttctac

SEQ ID NO: 1256664 - DNA, 25 bp, Homo sapien
cttattggcaagaaacaggttaggc

SEQ ID NO: 1256665 - DNA, 25 bp, Homo sapien
acaagttagggcacagctgaggatc

SEQ ID NO: 1256666 - DNA, 25 bp, Homo sapien
cacaagttagggcacagctgaggat

SEQ ID NO: 1256667 - DNA, 25 bp, Homo sapien
cacggaggaacctgttactgtttcg

SEQ ID NO: 1256668 - DNA, 25 bp, Homo sapien
ttcagatgtgcagctagtcgtgggc

SEQ ID NO: 1256669 - DNA, 25 bp, Homo sapien
gaatcagagtcaatgctcgagcata

SEQ ID NO: 1256670 - DNA, 25 bp, Homo sapien
ggatatgcagcttcacccagcggtt

SEQ ID NO: 1256671 - DNA, 25 bp, Homo sapien
catatactttcagcaaatgggagca

SEQ ID NO: 1256672 - DNA, 25 bp, Homo sapien
ctgaggtgagtcatatactttcagc

SEQ ID NO: 1256673 - DNA, 25 bp, Homo sapien
ggatgacgccgaagctgcactggca

SEQ ID NO: 1256674 - DNA, 25 bp, Homo sapien
aggtcaaataggatgacgccgaagc

SEQ ID NO: 1256675 - DNA, 25 bp, Homo sapien
taggatgacgccgaagctgcactgg

SEQ ID NO: 1256676 - DNA, 25 bp, Homo sapien
caaataggatgacgccgaagctgca

SEQ ID NO: 1256677 - DNA, 25 bp, Homo sapien
tacacactgttggtgaaagtggaaa

SEQ ID NO: 1256678 - DNA, 25 bp, Homo sapien
cagcagccccattactgggtagata

SEQ ID NO: 1256679 - DNA, 25 bp, Homo sapien
tgtggttcttcctcaaagaccgaaa

SEQ ID NO: 1256680 - DNA, 25 bp, Homo sapien
aaaacaaataccttctgacccagca

SEQ ID NO: 1256681 - DNA, 25 bp, Homo sapien
gacacacagacatgattgataagca

SEQ ID NO: 1256682 - DNA, 25 bp, Homo sapien
catgattgataagcattcaccatta

SEQ ID NO: 1256683 - DNA, 25 bp, Homo sapien
acagacatgattgataagcattcac

SEQ ID NO: 1256684 - DNA, 25 bp, Homo sapien
gacatgattgataagcattcaccat

SEQ ID NO: 1256685 - DNA, 25 bp, Homo sapien
caccaacggtcacagatgtttaagg

SEQ ID NO: 1256686 - DNA, 25 bp, Homo sapien
aacactgagggtatttgagcttcga

SEQ ID NO: 1256687 - DNA, 25 bp, Homo sapien
tgaatggccctatgttcctgacgcg

SEQ ID NO: 1256688 - DNA, 25 bp, Homo sapien
tgaacgattagcactcggagctcgg

SEQ ID NO: 1256689 - DNA, 25 bp, Homo sapien
gcagtaaggtaaggtgttggcccaa

SEQ ID NO: 1256690 - DNA, 25 bp, Homo sapien
gattctcgaagtgtgccctatggcc

SEQ ID NO: 1256691 - DNA, 25 bp, Homo sapien
gcactgaggcatctgacatacgaaa

SEQ ID NO: 1256692 - DNA, 25 bp, Homo sapien
taatacatgttcaccgaagacgggt

SEQ ID NO: 1256693 - DNA, 25 bp, Homo sapien
catgaacacggcaagagggcagctt

SEQ ID NO: 1256694 - DNA, 25 bp, Homo sapien
catcccaggtggctagaaaatctct

SEQ ID NO: 1256695 - DNA, 25 bp, Homo sapien
agcttttcagactcagacggcacca

SEQ ID NO: 1256696 - DNA, 25 bp, Homo sapien
gaagatcagcgggatgactgcgcaa

SEQ ID NO: 1256697 - DNA, 25 bp, Homo sapien
gagatgacgaccctttctgggatcc

SEQ ID NO: 1256698 - DNA, 25 bp, Homo sapien
ccaggtgtggatatggtcaaaagcc

SEQ ID NO: 1256699 - DNA, 25 bp, Homo sapien
ggatcctgtcgaggtcgtccgcttg

SEQ ID NO: 1256700 - DNA, 25 bp, Homo sapien
ctttctagatggagatcacggccct

SEQ ID NO: 1256701 - DNA, 25 bp, Homo sapien
ggaagacagcggcaggctgttgtcc

SEQ ID NO: 1256702 - DNA, 25 bp, Homo sapien
ccagagccagtgctgacagaggccc

SEQ ID NO: 1256703 - DNA, 25 bp, Homo sapien
tcatacatggaacgacttgtctgct

SEQ ID NO: 1256704 - DNA, 25 bp, Homo sapien
ctagttttacctgatatttatggtc

SEQ ID NO: 1256705 - DNA, 25 bp, Homo sapien
ttttatgaagagacatcatacatgg

SEQ ID NO: 1256706 - DNA, 25 bp, Homo sapien
aaaggagttgctagttttacctgat

SEQ ID NO: 1256707 - DNA, 25 bp, Homo sapien
gagcactacggttcttcactttgag

SEQ ID NO: 1256708 - DNA, 25 bp, Homo sapien
tatttaatggtggtgccgcctctag

SEQ ID NO: 1256709 - DNA, 25 bp, Homo sapien
ccccacattcttatttaatggtggt

SEQ ID NO: 1256710 - DNA, 25 bp, Homo sapien
tgccgcctctaggagagcactacgg

SEQ ID NO: 1256711 - DNA, 25 bp, Homo sapien
tcgttaaacgttccctgaggaatga

SEQ ID NO: 1256712 - DNA, 25 bp, Homo sapien
gagaagccagttagtggcctccggc

SEQ ID NO: 1256713 - DNA, 25 bp, Homo sapien
gactacatggtaaacattcaactcg

SEQ ID NO: 1256714 - DNA, 25 bp, Homo sapien
gcccgaggcctctgagacagaatct

SEQ ID NO: 1256715 - DNA, 25 bp, Homo sapien
gcctctcccgtgtgctgatctgaga

SEQ ID NO: 1256716 - DNA, 25 bp, Homo sapien
gagcgagtgcagacaaactcggtga

SEQ ID NO: 1256717 - DNA, 25 bp, Homo sapien
tcccgtgtgctgatctgagagcagc

SEQ ID NO: 1256718 - DNA, 25 bp, Homo sapien
gatctgagagcagcgatttcacact

SEQ ID NO: 1256719 - DNA, 25 bp, Homo sapien
gagcaggttcgattacgacttcttc

SEQ ID NO: 1256720 - DNA, 25 bp, Homo sapien
aggacctgagcaggttcgattacga

SEQ ID NO: 1256721 - DNA, 25 bp, Homo sapien
tcgattacgacttcttccagctgga

SEQ ID NO: 1256722 - DNA, 25 bp, Homo sapien
caggttcgattacgacttcttccag

SEQ ID NO: 1256723 - DNA, 25 bp, Homo sapien
caaatgccgacggtaaagtgacggt

SEQ ID NO: 1256724 - DNA, 25 bp, Homo sapien
tgacggtcactccacatagcaaatg

SEQ ID NO: 1256725 - DNA, 25 bp, Homo sapien
gacaacatggcaccactgctggagg

SEQ ID NO: 1256726 - DNA, 25 bp, Homo sapien
tgcaggctcacagaatgtcctaggt

SEQ ID NO: 1256727 - DNA, 25 bp, Homo sapien
gcagctgtagaccttccctcctgtg

SEQ ID NO: 1256728 - DNA, 25 bp, Homo sapien
ccgcagctgtagaccttccctcctg

SEQ ID NO: 1256729 - DNA, 25 bp, Homo sapien
tccgcagctgtagaccttccctcct

SEQ ID NO: 1256730 - DNA, 25 bp, Homo sapien
cgcagctgtagaccttccctcctgt

SEQ ID NO: 1256731 - DNA, 25 bp, Homo sapien
taggtgaggctcgttaagagtcgcc

SEQ ID NO: 1256732 - DNA, 25 bp, Homo sapien
taagagtcgcctcctgagcgtctct

SEQ ID NO: 1256733 - DNA, 25 bp, Homo sapien
cagtgctaggccctcagctggtgtt

SEQ ID NO: 1256734 - DNA, 25 bp, Homo sapien
gttaatgaagcccttgcctgctgtc

SEQ ID NO: 1256735 - DNA, 25 bp, Homo sapien
ccaaatcctataaggtctgaattta

SEQ ID NO: 1256736 - DNA, 25 bp, Homo sapien
ggcgcagaaacagatcaaaacgtac

SEQ ID NO: 1256737 - DNA, 25 bp, Homo sapien
gacacacagatgacatcggtgcagg

SEQ ID NO: 1256738 - DNA, 25 bp, Homo sapien
tctgaatttatacggcgagggcgca

SEQ ID NO: 1256739 - DNA, 25 bp, Homo sapien
tccttagtccaacgcacaggtgcgt

SEQ ID NO: 1256740 - DNA, 25 bp, Homo sapien
caaacagatataagtagagcaggcc

SEQ ID NO: 1256741 - DNA, 25 bp, Homo sapien
gggtggcccaaacataagcgcatcc

SEQ ID NO: 1256742 - DNA, 25 bp, Homo sapien
aagggtttggatgcacacgggtctc

SEQ ID NO: 1256743 - DNA, 25 bp, Homo sapien
agagccacacagtctgcaggacaag

SEQ ID NO: 1256744 - DNA, 25 bp, Homo sapien
cagggctttcgtcctctggctgaaa

SEQ ID NO: 1256745 - DNA, 25 bp, Homo sapien
cctactccagggctggtctgagaaa

SEQ ID NO: 1256746 - DNA, 25 bp, Homo sapien
tcgtccagcattagagaattgtgcc

SEQ ID NO: 1256747 - DNA, 25 bp, Homo sapien
tatatcttgattcctttcaggttca

SEQ ID NO: 1256748 - DNA, 25 bp, Homo sapien
aattatatcttgattcctttcaggt

SEQ ID NO: 1256749 - DNA, 25 bp, Homo sapien
aataaattatatcttgattcctttc

SEQ ID NO: 1256750 - DNA, 25 bp, Homo sapien
tcttgattcctttcaggttcatgtg

SEQ ID NO: 1256751 - DNA, 25 bp, Homo sapien
agtattcagtgggtctcctaaggcc

SEQ ID NO: 1256752 - DNA, 25 bp, Homo sapien
tacacagaaacggagcttcaaacac

SEQ ID NO: 1256753 - DNA, 25 bp, Homo sapien
cactgtagagaaaacgtcacttcca

SEQ ID NO: 1256754 - DNA, 25 bp, Homo sapien
tcctaaggcccagacctaatggtgt

SEQ ID NO: 1256755 - DNA, 25 bp, Homo sapien
gtacccggcccattgtcactcttga

SEQ ID NO: 1256756 - DNA, 25 bp, Homo sapien
gatgttttatctccggcaccttatg

SEQ ID NO: 1256757 - DNA, 25 bp, Homo sapien
gaaaggcttcctagctaaggcagca

SEQ ID NO: 1256758 - DNA, 25 bp, Homo sapien
tcttcagtctgagatgccacttcct

SEQ ID NO: 1256759 - DNA, 25 bp, Homo sapien
catttggagaacttgtcccgacaga

SEQ ID NO: 1256760 - DNA, 25 bp, Homo sapien
tggagaacttgtcccgacagaggtc

SEQ ID NO: 1256761 - DNA, 25 bp, Homo sapien
tttggagaacttgtcccgacagagg

SEQ ID NO: 1256762 - DNA, 25 bp, Homo sapien
acatttggagaacttgtcccgacag

SEQ ID NO: 1256763 - DNA, 25 bp, Homo sapien
aggccgccacggattggcacaggcc

SEQ ID NO: 1256764 - DNA, 25 bp, Homo sapien
aggaggccgccacggattggcacag

SEQ ID NO: 1256765 - DNA, 25 bp, Homo sapien
gccacggattggcacaggccgctgc

SEQ ID NO: 1256766 - DNA, 25 bp, Homo sapien
cacggattggcacaggccgctgctg

SEQ ID NO: 1256767 - DNA, 25 bp, Homo sapien
ggagcccccattgtgccccagaggt

SEQ ID NO: 1256768 - DNA, 25 bp, Homo sapien
acagagaggcctgggatactccccc

SEQ ID NO: 1256769 - DNA, 25 bp, Homo sapien
gtggggagcccccattgtgccccag

SEQ ID NO: 1256770 - DNA, 25 bp, Homo sapien
tgagaaggcccgtcaggggcccagg

SEQ ID NO: 1256771 - DNA, 25 bp, Homo sapien
tcgggggactgtctgtcctcaaaac

SEQ ID NO: 1256772 - DNA, 25 bp, Homo sapien
taggaaatccaagcagaccagctgg

SEQ ID NO: 1256773 - DNA, 25 bp, Homo sapien
ataaaggtggtccatgcccacgggg

SEQ ID NO: 1256774 - DNA, 25 bp, Homo sapien
ccacgggggctgtaggaaatccaag

SEQ ID NO: 1256775 - DNA, 25 bp, Homo sapien
catgcgcgcgtacactgtcatgacg

SEQ ID NO: 1256776 - DNA, 25 bp, Homo sapien
tgctctccaccgaaaaagtgacttg

SEQ ID NO: 1256777 - DNA, 25 bp, Homo sapien
gtgcaattcccacaacacgcatgcg

SEQ ID NO: 1256778 - DNA, 25 bp, Homo sapien
acagggcacctgagcagatcgttca

SEQ ID NO: 1256779 - DNA, 25 bp, Homo sapien
gaaggagcttgctattgaaccacag

SEQ ID NO: 1256780 - DNA, 25 bp, Homo sapien
cttattcggcaagcttaaaggctct

SEQ ID NO: 1256781 - DNA, 25 bp, Homo sapien
ggcaaattctcacaggacctcaggc

SEQ ID NO: 1256782 - DNA, 25 bp, Homo sapien
tagattgaccggttcactgctcact

SEQ ID NO: 1256783 - DNA, 25 bp, Homo sapien
gattctggtctcacagtaagtccag

SEQ ID NO: 1256784 - DNA, 25 bp, Homo sapien
gaacaactttgagatagatgctact

SEQ ID NO: 1256785 - DNA, 25 bp, Homo sapien
gactggttaaactgaactgtgctcg

SEQ ID NO: 1256786 - DNA, 25 bp, Homo sapien
agaagctgggatttactccggcaga

SEQ ID NO: 1256787 - DNA, 25 bp, Homo sapien
tttgaatgcatggtagcactttgga

SEQ ID NO: 1256788 - DNA, 25 bp, Homo sapien
agggaaggaggacgacgcaaactct

SEQ ID NO: 1256789 - DNA, 25 bp, Homo sapien
gcatgtggctatcatagttaccagt

SEQ ID NO: 1256790 - DNA, 25 bp, Homo sapien
tataactcaataaatgcgcattctg

SEQ ID NO: 1256791 - DNA, 25 bp, Homo sapien
caaggtctttgtctgtcacagatgc

SEQ ID NO: 1256792 - DNA, 25 bp, Homo sapien
tgtcacagatgctctagtacagtgg

SEQ ID NO: 1256793 - DNA, 25 bp, Homo sapien
gacaaggtctttgtctgtcacagat

SEQ ID NO: 1256794 - DNA, 25 bp, Homo sapien
cagatgctctagtacagtggtataa

SEQ ID NO: 1256795 - DNA, 25 bp, Homo sapien
tacagtatttatactagattcctct

SEQ ID NO: 1256796 - DNA, 25 bp, Homo sapien
tagctagaaagtttagggtacagta

SEQ ID NO: 1256797 - DNA, 25 bp, Homo sapien
tattgcttacatattatacttttct

SEQ ID NO: 1256798 - DNA, 25 bp, Homo sapien
ctttagaggagctagtaattaaaat

SEQ ID NO: 1256799 - DNA, 25 bp, Homo sapien
tataatcgatgtcttgtagctggcc

SEQ ID NO: 1256800 - DNA, 25 bp, Homo sapien
ggttggatcacgttattagctttct

SEQ ID NO: 1256801 - DNA, 25 bp, Homo sapien
aactcattcctgatggttataatcg

SEQ ID NO: 1256802 - DNA, 25 bp, Homo sapien
taaagaaatcaggtccatcactcaa

SEQ ID NO: 1256803 - DNA, 25 bp, Homo sapien
gcctaagattcttggataagtccct

SEQ ID NO: 1256804 - DNA, 25 bp, Homo sapien
tactacaggtaacggaaattggaga

SEQ ID NO: 1256805 - DNA, 25 bp, Homo sapien
cattaattagggctttctggtcact

SEQ ID NO: 1256806 - DNA, 25 bp, Homo sapien
aacacaatgtctacagaacaggcag

SEQ ID NO: 1256807 - DNA, 25 bp, Homo sapien
cctagcttgaattctggccacacat

SEQ ID NO: 1256808 - DNA, 25 bp, Homo sapien
gaggatttccatataacctagcttg

SEQ ID NO: 1256809 - DNA, 25 bp, Homo sapien
gcccggcctcttgaggatttccata

SEQ ID NO: 1256810 - DNA, 25 bp, Homo sapien
catataacctagcttgaattctggc

SEQ ID NO: 1256811 - DNA, 25 bp, Homo sapien
aattctttgagattccagaggatat

SEQ ID NO: 1256812 - DNA, 25 bp, Homo sapien
attccagaggatatgtggttgtttc

SEQ ID NO: 1256813 - DNA, 25 bp, Homo sapien
tatgtggttgtttccgtggattgct

SEQ ID NO: 1256814 - DNA, 25 bp, Homo sapien
gagattccagaggatatgtggttgt

SEQ ID NO: 1256815 - DNA, 25 bp, Homo sapien
gtggagaggacaccaacccattcat

SEQ ID NO: 1256816 - DNA, 25 bp, Homo sapien
cctaggctagaattcattggtgcag

SEQ ID NO: 1256817 - DNA, 25 bp, Homo sapien
atgtctggccacagtttaaatactg

SEQ ID NO: 1256818 - DNA, 25 bp, Homo sapien
gggacagttatacaaaccacattag

SEQ ID NO: 1256819 - DNA, 25 bp, Homo sapien
ctgctctgcctatctagcctttgga

SEQ ID NO: 1256820 - DNA, 25 bp, Homo sapien
tgctctgcctatctagcctttggaa

SEQ ID NO: 1256821 - DNA, 25 bp, Homo sapien
tcaaagccagtagaacgttcctgct

SEQ ID NO: 1256822 - DNA, 25 bp, Homo sapien
ccagtagaacgttcctgctctgcct

SEQ ID NO: 1256823 - DNA, 25 bp, Homo sapien
tttcttttgccactggttgactgtt

SEQ ID NO: 1256824 - DNA, 25 bp, Homo sapien
tgttctcaaagcttacgaggttcat

SEQ ID NO: 1256825 - DNA, 25 bp, Homo sapien
ttgttctcaaagcttacgaggttca

SEQ ID NO: 1256826 - DNA, 25 bp, Homo sapien
cttttgccactggttgactgttttg

SEQ ID NO: 1256827 - DNA, 25 bp, Homo sapien
agccgtgaggttccagctcacccga

SEQ ID NO: 1256828 - DNA, 25 bp, Homo sapien
ggttccagctcacccgattggtcag

SEQ ID NO: 1256829 - DNA, 25 bp, Homo sapien
aagaagttggactcggggctcagcc

SEQ ID NO: 1256830 - DNA, 25 bp, Homo sapien
cgattggtcagatcaaggagattta

SEQ ID NO: 1256831 - DNA, 25 bp, Homo sapien
gatggactcgttggcgggcctttcc

SEQ ID NO: 1256832 - DNA, 25 bp, Homo sapien
actgttctcccacgcgatggactcg

SEQ ID NO: 1256833 - DNA, 25 bp, Homo sapien
gagcggcgctggtggttcgcgtcct

SEQ ID NO: 1256834 - DNA, 25 bp, Homo sapien
cctgtcctgtgttggcgtgtgttcc

SEQ ID NO: 1256835 - DNA, 25 bp, Homo sapien
tagagcgcggaaccatcgcgagaac

SEQ ID NO: 1256836 - DNA, 25 bp, Homo sapien
gactgcgttttagccgctgagcggt

SEQ ID NO: 1256837 - DNA, 25 bp, Homo sapien
tgtggaactcggttttgtcggcgca

SEQ ID NO: 1256838 - DNA, 25 bp, Homo sapien
gctgagcggtctgcaggcctacagc

SEQ ID NO: 1256839 - DNA, 25 bp, Homo sapien
cctttgtctggagtgcccctttgat

SEQ ID NO: 1256840 - DNA, 25 bp, Homo sapien
ggcttctcaagcatgtgcagatggc

SEQ ID NO: 1256841 - DNA, 25 bp, Homo sapien
cgtgatggatgctgtaatggaccct

SEQ ID NO: 1256842 - DNA, 25 bp, Homo sapien
gctcacagtgtagtcgggaaaataa

SEQ ID NO: 1256843 - DNA, 25 bp, Homo sapien
gagtgtgacatgatcggaaatggac

SEQ ID NO: 1256844 - DNA, 25 bp, Homo sapien
tggccacttccggatgagggaatag

SEQ ID NO: 1256845 - DNA, 25 bp, Homo sapien
tagcatggaaaagcactaaaggcag

SEQ ID NO: 1256846 - DNA, 25 bp, Homo sapien
cggaaatggacattagatgaatata

SEQ ID NO: 1256847 - DNA, 25 bp, Homo sapien
tcctttggcatagagttcctaaaac

SEQ ID NO: 1256848 - DNA, 25 bp, Homo sapien
agtcctttggcatagagttcctaaa

SEQ ID NO: 1256849 - DNA, 25 bp, Homo sapien
ataggggcgttaggagaatcttttg

SEQ ID NO: 1256850 - DNA, 25 bp, Homo sapien
tcctgagtaataggggcgttaggag

SEQ ID NO: 1256851 - DNA, 25 bp, Homo sapien
ccctgcatggttgcgcttctctgca

SEQ ID NO: 1256852 - DNA, 25 bp, Homo sapien
tccctgcatggttgcgcttctctgc

SEQ ID NO: 1256853 - DNA, 25 bp, Homo sapien
agattgttgcgctcttcatggttcc

SEQ ID NO: 1256854 - DNA, 25 bp, Homo sapien
ggccaagctcgtctttaactcataa

SEQ ID NO: 1256855 - DNA, 25 bp, Homo sapien
catggttccttcacgcactgtgtaa

SEQ ID NO: 1256856 - DNA, 25 bp, Homo sapien
catgtgccaccgtgtctttttagta

SEQ ID NO: 1256857 - DNA, 25 bp, Homo sapien
tccacccacatcttcacactttttc

SEQ ID NO: 1256858 - DNA, 25 bp, Homo sapien
tccttaagtgtaaattctcaaagtc

SEQ ID NO: 1256859 - DNA, 25 bp, Homo sapien
ttaagtgtaaattctcaaagtcaca

SEQ ID NO: 1256860 - DNA, 25 bp, Homo sapien
tcttcacactttttccttaagtgta

SEQ ID NO: 1256861 - DNA, 25 bp, Homo sapien
tcttctgagatgttctatgttcttg

SEQ ID NO: 1256862 - DNA, 25 bp, Homo sapien
ggtaaatttctgttatgagtagttg

SEQ ID NO: 1256863 - DNA, 25 bp, Homo sapien
ctatatagaagcagctgatgtaagt

SEQ ID NO: 1256864 - DNA, 25 bp, Homo sapien
agttgttgcccattggtgatgcaca

SEQ ID NO: 1256865 - DNA, 25 bp, Homo sapien
gatttttcattaagtgctttctcac

SEQ ID NO: 1256866 - DNA, 25 bp, Homo sapien
tctcacacttactgcacctataatg

SEQ ID NO: 1256867 - DNA, 25 bp, Homo sapien
tcagttctttctagggcgagtcctc

SEQ ID NO: 1256868 - DNA, 25 bp, Homo sapien
tttccagcatacactctctggtgct

SEQ ID NO: 1256869 - DNA, 25 bp, Homo sapien
atgtagaggccattattcccacttc

SEQ ID NO: 1256870 - DNA, 25 bp, Homo sapien
aacatgataaactgccaggcgtggt

SEQ ID NO: 1256871 - DNA, 25 bp, Homo sapien
tctggtctaccatgtaaagaatgta

SEQ ID NO: 1256872 - DNA, 25 bp, Homo sapien
tttctggtctaccatgtaaagaatg

SEQ ID NO: 1256873 - DNA, 25 bp, Homo sapien
cacatgtgaggaatcagaaaccaca

SEQ ID NO: 1256874 - DNA, 25 bp, Homo sapien
acatgtgaggaatcagaaaccacat

SEQ ID NO: 1256875 - DNA, 25 bp, Homo sapien
tgtgaggaatcagaaaccacattaa

SEQ ID NO: 1256876 - DNA, 25 bp, Homo sapien
catgtgaggaatcagaaaccacatt

SEQ ID NO: 1256877 - DNA, 25 bp, Homo sapien
tagttgagccagttacagtacagag

SEQ ID NO: 1256878 - DNA, 25 bp, Homo sapien
gaatgaaaattcacagtgttgggag

SEQ ID NO: 1256879 - DNA, 25 bp, Homo sapien
gattggtatcgaatgtaatgtcatc

SEQ ID NO: 1256880 - DNA, 25 bp, Homo sapien
taacatttcagtagctcagacagcg

SEQ ID NO: 1256881 - DNA, 25 bp, Homo sapien
ctgcagaactacagcatctcctcac

SEQ ID NO: 1256882 - DNA, 25 bp, Homo sapien
cttgtcatgagggtccagcacgtag

SEQ ID NO: 1256883 - DNA, 25 bp, Homo sapien
tcatgagggtccagcacgtagaaca

SEQ ID NO: 1256884 - DNA, 25 bp, Homo sapien
tgagggtccagcacgtagaacatgt

SEQ ID NO: 1256885 - DNA, 25 bp, Homo sapien
agggtccagcacgtagaacatgtat

SEQ ID NO: 1256886 - DNA, 25 bp, Homo sapien
tcccagaatataccaccgaagacag

SEQ ID NO: 1256887 - DNA, 25 bp, Homo sapien
aaacaatgtacacccctccttccag

SEQ ID NO: 1256888 - DNA, 25 bp, Homo sapien
tgctgtgttagtgatgcgtatggcc

SEQ ID NO: 1256889 - DNA, 25 bp, Homo sapien
cctccttcagtgctgtgttagtgat

SEQ ID NO: 1256890 - DNA, 25 bp, Homo sapien
ctgaagtgaattgtgagacttttgg

SEQ ID NO: 1256891 - DNA, 25 bp, Homo sapien
tttggaagctttgttgaagttcatc

SEQ ID NO: 1256892 - DNA, 25 bp, Homo sapien
gagaatatcttgattaaccaaggca

SEQ ID NO: 1256893 - DNA, 25 bp, Homo sapien
caagggctaaaatcttatcccagct

SEQ ID NO: 1256894 - DNA, 25 bp, Homo sapien
taggcacagaaatgcgacctgtttt

SEQ ID NO: 1256895 - DNA, 25 bp, Homo sapien
ccatcgtggaaacagtcctggagca

SEQ ID NO: 1256896 - DNA, 25 bp, Homo sapien
gatgaacgctaaaagggctctgcgg

SEQ ID NO: 1256897 - DNA, 25 bp, Homo sapien
tgttgacattgataccccatcgtgg

SEQ ID NO: 1256898 - DNA, 25 bp, Homo sapien
tgttcaaaaactcacataaggtgct

SEQ ID NO: 1256899 - DNA, 25 bp, Homo sapien
tcaagaagttgttcaaaaactcaca

SEQ ID NO: 1256900 - DNA, 25 bp, Homo sapien
caaaaactcacataaggtgctagac

SEQ ID NO: 1256901 - DNA, 25 bp, Homo sapien
actcacataaggtgctagactggtc

SEQ ID NO: 1256902 - DNA, 25 bp, Homo sapien
gctgaattggatatcagcacataca

SEQ ID NO: 1256903 - DNA, 25 bp, Homo sapien
tctgagtgcttcagtattgagtgca

SEQ ID NO: 1256904 - DNA, 25 bp, Homo sapien
agtctatagctgttattgttttggg

SEQ ID NO: 1256905 - DNA, 25 bp, Homo sapien
tggtttctattgatatggaatatcc

SEQ ID NO: 1256906 - DNA, 25 bp, Homo sapien
acagactgaggtatgggagtgtagc

SEQ ID NO: 1256907 - DNA, 25 bp, Homo sapien
tatgggagtgtagcttctcagtgga

SEQ ID NO: 1256908 - DNA, 25 bp, Homo sapien
catcttcttccggaggacagactga

SEQ ID NO: 1256909 - DNA, 25 bp, Homo sapien
gggagtcttccgatagacccttcat

SEQ ID NO: 1256910 - DNA, 25 bp, Homo sapien
tcaaggaggttccagatgactctgc

SEQ ID NO: 1256911 - DNA, 25 bp, Homo sapien
tcttctcttgccctatgacctgctt

SEQ ID NO: 1256912 - DNA, 25 bp, Homo sapien
acctgcttgcgggtactgcgacatt

SEQ ID NO: 1256913 - DNA, 25 bp, Homo sapien
gaggttccagatgactctgctgcat

SEQ ID NO: 1256914 - DNA, 25 bp, Homo sapien
gtcttgtctccactgctgcatgtcc

SEQ ID NO: 1256915 - DNA, 25 bp, Homo sapien
gtctccactgctgcatgtcctctga

SEQ ID NO: 1256916 - DNA, 25 bp, Homo sapien
ttgtctccactgctgcatgtcctct

SEQ ID NO: 1256917 - DNA, 25 bp, Homo sapien
cagggtcttgtctccactgctgcat

SEQ ID NO: 1256918 - DNA, 25 bp, Homo sapien
gttgtcccggatcaaaccagtgttc

SEQ ID NO: 1256919 - DNA, 25 bp, Homo sapien
tggtttcactttgcggcaccgagca

SEQ ID NO: 1256920 - DNA, 25 bp, Homo sapien
tccttcttgcatggtcggatcccag

SEQ ID NO: 1256921 - DNA, 25 bp, Homo sapien
caaccgggtcagtttagatcgtgcg

SEQ ID NO: 1256922 - DNA, 25 bp, Homo sapien
tcgggcgtcctttgtcagtcatcct

SEQ ID NO: 1256923 - DNA, 25 bp, Homo sapien
tgtagagattaccgggagcccggcg

SEQ ID NO: 1256924 - DNA, 25 bp, Homo sapien
atttactgcaaattgtcccctaggg

SEQ ID NO: 1256925 - DNA, 25 bp, Homo sapien
taaaggcttttgatccgttatgtgc

SEQ ID NO: 1256926 - DNA, 25 bp, Homo sapien
tacaggaagactcaccaccaaggag

SEQ ID NO: 1256927 - DNA, 25 bp, Homo sapien
ataatgcaggtaaaaagacgacagt

SEQ ID NO: 1256928 - DNA, 25 bp, Homo sapien
gccttgctgacattcacctccgtgt

SEQ ID NO: 1256929 - DNA, 25 bp, Homo sapien
ccttgctgacattcacctccgtgtg

SEQ ID NO: 1256930 - DNA, 25 bp, Homo sapien
ttgagaacagtgaggtacggtgtgc

SEQ ID NO: 1256931 - DNA, 25 bp, Homo sapien
gtgtgctgtccaggcccgccttgct

SEQ ID NO: 1256932 - DNA, 25 bp, Homo sapien
tttcagtaaggcagtcttcatcttt

SEQ ID NO: 1256933 - DNA, 25 bp, Homo sapien
ttatttcagtaaggcagtcttcatc

SEQ ID NO: 1256934 - DNA, 25 bp, Homo sapien
ttcagtaaggcagtcttcatctttt

SEQ ID NO: 1256935 - DNA, 25 bp, Homo sapien
atttcagtaaggcagtcttcatctt

SEQ ID NO: 1256936 - DNA, 25 bp, Homo sapien
caggagctcttgcagcacgggcctg

SEQ ID NO: 1256937 - DNA, 25 bp, Homo sapien
ggcctggtagtaacgaaatccttca

SEQ ID NO: 1256938 - DNA, 25 bp, Homo sapien
gaaatccttcagcatttgtctggaa

SEQ ID NO: 1256939 - DNA, 25 bp, Homo sapien
gatcctgttgtcgtgatgctatttt

SEQ ID NO: 1256940 - DNA, 25 bp, Homo sapien
tctacttagggatgtgacgtcttcc

SEQ ID NO: 1256941 - DNA, 25 bp, Homo sapien
attggtctacttagggatgtgacgt

SEQ ID NO: 1256942 - DNA, 25 bp, Homo sapien
ctgggttagtcttggtaggagtcca

SEQ ID NO: 1256943 - DNA, 25 bp, Homo sapien
cttagggatgtgacgtcttcctggg

SEQ ID NO: 1256944 - DNA, 25 bp, Homo sapien
tttttgccatgaagttgcccacgcc

SEQ ID NO: 1256945 - DNA, 25 bp, Homo sapien
agcatgctattttggctgctgtagc

SEQ ID NO: 1256946 - DNA, 25 bp, Homo sapien
taattttggtataaggaagcagtcc

SEQ ID NO: 1256947 - DNA, 25 bp, Homo sapien
tgcaattgctgtcggcatttttgcc

SEQ ID NO: 1256948 - DNA, 25 bp, Homo sapien
gacccttggggatccactatggcag

SEQ ID NO: 1256949 - DNA, 25 bp, Homo sapien
gagatatgggctgcttgctgcaccc

SEQ ID NO: 1256950 - DNA, 25 bp, Homo sapien
ggcaggcatcacaggtcttctcagt

SEQ ID NO: 1256951 - DNA, 25 bp, Homo sapien
tgctgcacccagtgcggacccttgg

SEQ ID NO: 1256952 - DNA, 25 bp, Homo sapien
tataagcttgctacagaactccagt

SEQ ID NO: 1256953 - DNA, 25 bp, Homo sapien
gacaaaaagagcctgcacctaaaga

SEQ ID NO: 1256954 - DNA, 25 bp, Homo sapien
gggctgcctagctttgtattccaat

SEQ ID NO: 1256955 - DNA, 25 bp, Homo sapien
tgaatccaaactcaaggagggctgg

SEQ ID NO: 1256956 - DNA, 25 bp, Homo sapien
aagtgccggaggggattattccagt

SEQ ID NO: 1256957 - DNA, 25 bp, Homo sapien
taagtgccggaggggattattccag

SEQ ID NO: 1256958 - DNA, 25 bp, Homo sapien
ctaagtgccggaggggattattcca

SEQ ID NO: 1256959 - DNA, 25 bp, Homo sapien
gagagttgagtaagagtaagatccc

SEQ ID NO: 1256960 - DNA, 25 bp, Homo sapien
tgagtaagagtaagatccctccact

SEQ ID NO: 1256961 - DNA, 25 bp, Homo sapien
agagtaagatccctccactcgccaa

SEQ ID NO: 1256962 - DNA, 25 bp, Homo sapien
tacccaaatgagagttgagtaagag

SEQ ID NO: 1256963 - DNA, 25 bp, Homo sapien
cagctgtgatcaaaatctactgagc

SEQ ID NO: 1256964 - DNA, 25 bp, Homo sapien
tgagcagaaagcatccagttgggtc

SEQ ID NO: 1256965 - DNA, 25 bp, Homo sapien
tcatccctgtcacttggagtggacg

SEQ ID NO: 1256966 - DNA, 25 bp, Homo sapien
gatacagatatggagctcttgcttc

SEQ ID NO: 1256967 - DNA, 25 bp, Homo sapien
gtgaatttcctagggtacccacatc

SEQ ID NO: 1256968 - DNA, 25 bp, Homo sapien
tatcagacaattaatcactccgtgc

SEQ ID NO: 1256969 - DNA, 25 bp, Homo sapien
tatgtttacgtctcttcagctgtag

SEQ ID NO: 1256970 - DNA, 25 bp, Homo sapien
cagggctgctatgtaaattccagaa

SEQ ID NO: 1256971 - DNA, 25 bp, Homo sapien
cactgtcgcagtgtcaagcaactta

SEQ ID NO: 1256972 - DNA, 25 bp, Homo sapien
gcacatgtcctaagtggatagcacc

SEQ ID NO: 1256973 - DNA, 25 bp, Homo sapien
aacttaatacctgtgccctgtgggc

SEQ ID NO: 1256974 - DNA, 25 bp, Homo sapien
tataaacatcatgcagcaggagccc

SEQ ID NO: 1256975 - DNA, 25 bp, Homo sapien
cattatctggacataacggtgtgat

SEQ ID NO: 1256976 - DNA, 25 bp, Homo sapien
gcgttgctgcgttcacaatacctac

SEQ ID NO: 1256977 - DNA, 25 bp, Homo sapien
tttatccaactatatacaatcaggt

SEQ ID NO: 1256978 - DNA, 25 bp, Homo sapien
tgtgacacccagattatgcttatct

SEQ ID NO: 1256979 - DNA, 25 bp, Homo sapien
tataactcactcagagacacatggt

SEQ ID NO: 1256980 - DNA, 25 bp, Homo sapien
tgaaggtatcgaatgtgagaatgcc

SEQ ID NO: 1256981 - DNA, 25 bp, Homo sapien
gaatgcccaccagattgaaatccta

SEQ ID NO: 1256982 - DNA, 25 bp, Homo sapien
gacacatggtaacacatactccaga

SEQ ID NO: 1256983 - DNA, 25 bp, Homo sapien
ttctctatccagcttgtcattttgc

SEQ ID NO: 1256984 - DNA, 25 bp, Homo sapien
tgttaggcagttttatagtgagaac

SEQ ID NO: 1256985 - DNA, 25 bp, Homo sapien
taatagcgtgtacttacgcaaacct

SEQ ID NO: 1256986 - DNA, 25 bp, Homo sapien
gtgtcgttagctagttattatgcag

SEQ ID NO: 1256987 - DNA, 25 bp, Homo sapien
tttgggtagttggaccattttagca

SEQ ID NO: 1256988 - DNA, 25 bp, Homo sapien
tatgtgggatctttattggttccac

SEQ ID NO: 1256989 - DNA, 25 bp, Homo sapien
ttcagtagtatgttaataggagtgg

SEQ ID NO: 1256990 - DNA, 25 bp, Homo sapien
ggctctctgcatggatattattcgt

SEQ ID NO: 1256991 - DNA, 25 bp, Homo sapien
cattcccctgagtgtatgtggtaac

SEQ ID NO: 1256992 - DNA, 25 bp, Homo sapien
taaaagcagaggttctctaccgctc

SEQ ID NO: 1256993 - DNA, 25 bp, Homo sapien
taatcaggaatgctaccagggaaga

SEQ ID NO: 1256994 - DNA, 25 bp, Homo sapien
taaatctgtacagcaaccttgcccg

SEQ ID NO: 1256995 - DNA, 25 bp, Homo sapien
aaatgctggtcaggcagtcggatac

SEQ ID NO: 1256996 - DNA, 25 bp, Homo sapien
tccttagagacaaaatgctggtcag

SEQ ID NO: 1256997 - DNA, 25 bp, Homo sapien
ccccgttatcactccttagagacaa

SEQ ID NO: 1256998 - DNA, 25 bp, Homo sapien
cggatactggtattgagggaagaaa

SEQ ID NO: 1256999 - DNA, 25 bp, Homo sapien
tattcctcgtttctgttgctactag

SEQ ID NO: 1257000 - DNA, 25 bp, Homo sapien
ggcagcagagctttattccatgttt

SEQ ID NO: 1257001 - DNA, 25 bp, Homo sapien
tctccattcctacaacagcagcggc

SEQ ID NO: 1257002 - DNA, 25 bp, Homo sapien
gctactacttctaattgtggtaaaa

SEQ ID NO: 1257003 - DNA, 25 bp, Homo sapien
agtctgcgcagaactagcacatctg

SEQ ID NO: 1257004 - DNA, 25 bp, Homo sapien
tgaccgtccgtaaaatccaaatctg

SEQ ID NO: 1257005 - DNA, 25 bp, Homo sapien
caggtgtgtcagtttcactgagtga

SEQ ID NO: 1257006 - DNA, 25 bp, Homo sapien
cagtttcactgagtgaccgtccgta

SEQ ID NO: 1257007 - DNA, 25 bp, Homo sapien
ctccatttcccgctttgcaggtgtg

SEQ ID NO: 1257008 - DNA, 25 bp, Homo sapien
gatgcccagctcacctatgggtcaa

SEQ ID NO: 1257009 - DNA, 25 bp, Homo sapien
gtctgcagccatggcggctgtgccc

SEQ ID NO: 1257010 - DNA, 25 bp, Homo sapien
tgttaaaagtcaaagaggagatggc

SEQ ID NO: 1257011 - DNA, 25 bp, Homo sapien
ttttaaaacctatgactggtcattg

SEQ ID NO: 1257012 - DNA, 25 bp, Homo sapien
atttgaagtccttccaaaaattcag

SEQ ID NO: 1257013 - DNA, 25 bp, Homo sapien
ttgacatttgaagtccttccaaaaa

SEQ ID NO: 1257014 - DNA, 25 bp, Homo sapien
tgacatttgaagtccttccaaaaat

SEQ ID NO: 1257015 - DNA, 25 bp, Homo sapien
catttgaagtccttccaaaaattca

SEQ ID NO: 1257016 - DNA, 25 bp, Homo sapien
aggtggtggtgatggccagacccct

SEQ ID NO: 1257017 - DNA, 25 bp, Homo sapien
aggcaggtggtggtgatggccagac

SEQ ID NO: 1257018 - DNA, 25 bp, Homo sapien
tggtggtgatggccagacccctcat

SEQ ID NO: 1257019 - DNA, 25 bp, Homo sapien
cacaagatgctagggctgatggtga

SEQ ID NO: 1257020 - DNA, 25 bp, Homo sapien
gaacaagagaatgaccgtgtacata

SEQ ID NO: 1257021 - DNA, 25 bp, Homo sapien
gaatgaccgtgtacatactggacag

SEQ ID NO: 1257022 - DNA, 25 bp, Homo sapien
aagagaatgaccgtgtacatactgg

SEQ ID NO: 1257023 - DNA, 25 bp, Homo sapien
ccgtgtacatactggacagcagcat

SEQ ID NO: 1257024 - DNA, 25 bp, Homo sapien
gtgttgcgaaggctctggtatcacc

SEQ ID NO: 1257025 - DNA, 25 bp, Homo sapien
ctggtgttgcgaaggctctggtatc

SEQ ID NO: 1257026 - DNA, 25 bp, Homo sapien
gttgcgaaggctctggtatcacctc

SEQ ID NO: 1257027 - DNA, 25 bp, Homo sapien
tggtgttgcgaaggctctggtatca

SEQ ID NO: 1257028 - DNA, 25 bp, Homo sapien
acaggctggtctgcatggccctttt

SEQ ID NO: 1257029 - DNA, 25 bp, Homo sapien
gtccactgagtatgtgaccacagag

SEQ ID NO: 1257030 - DNA, 25 bp, Homo sapien
catgaacccaccacatggttaagga

SEQ ID NO: 1257031 - DNA, 25 bp, Homo sapien
gcatctggacatcccgggtgactgg

SEQ ID NO: 1257032 - DNA, 25 bp, Homo sapien
gaatgatttgtaccaaaggacagac

SEQ ID NO: 1257033 - DNA, 25 bp, Homo sapien
tcagagttgccagatccgtgtgggt

SEQ ID NO: 1257034 - DNA, 25 bp, Homo sapien
gtgcccctcagaccttcaagatgga

SEQ ID NO: 1257035 - DNA, 25 bp, Homo sapien
ttagtgaaccgaaatactgagcacg

SEQ ID NO: 1257036 - DNA, 25 bp, Homo sapien
gctcctcttagatatgggcgatcag

SEQ ID NO: 1257037 - DNA, 25 bp, Homo sapien
ttttcatggaggacttttagcaggt

SEQ ID NO: 1257038 - DNA, 25 bp, Homo sapien
tcctttgggtattattggctaatag

SEQ ID NO: 1257039 - DNA, 25 bp, Homo sapien
tggtttttcatggaggacttttagc

SEQ ID NO: 1257040 - DNA, 25 bp, Homo sapien
cctttgggtattattggctaataga

SEQ ID NO: 1257041 - DNA, 25 bp, Homo sapien
cattgtagtaagaatttatatcagg

SEQ ID NO: 1257042 - DNA, 25 bp, Homo sapien
cttctatattagctcaagtaggttt

SEQ ID NO: 1257043 - DNA, 25 bp, Homo sapien
taaaagtactatctaaccttgtatg

SEQ ID NO: 1257044 - DNA, 25 bp, Homo sapien
tatatcaggagtgtaagttactgaa

SEQ ID NO: 1257045 - DNA, 25 bp, Homo sapien
taaatagacataagataagacatac

SEQ ID NO: 1257046 - DNA, 25 bp, Homo sapien
aagaatgtgacaattccttttacat

SEQ ID NO: 1257047 - DNA, 25 bp, Homo sapien
tacatatcctcagttctaactccac

SEQ ID NO: 1257048 - DNA, 25 bp, Homo sapien
ggagagatatcttccaactgtaaag

SEQ ID NO: 1257049 - DNA, 25 bp, Homo sapien
attgctggtatgtaggcctgtctct

SEQ ID NO: 1257050 - DNA, 25 bp, Homo sapien
tgctggtatgtaggcctgtctctgg

SEQ ID NO: 1257051 - DNA, 25 bp, Homo sapien
ttgctggtatgtaggcctgtctctg

SEQ ID NO: 1257052 - DNA, 25 bp, Homo sapien
gattgctggtatgtaggcctgtctc

SEQ ID NO: 1257053 - DNA, 25 bp, Homo sapien
tatcaactgcagttcccttcaacat

SEQ ID NO: 1257054 - DNA, 25 bp, Homo sapien
aggtggtgccaatatcaatatcaac

SEQ ID NO: 1257055 - DNA, 25 bp, Homo sapien
tgccaatatcaatatcaactgcagt

SEQ ID NO: 1257056 - DNA, 25 bp, Homo sapien
caatatcaactgcagttcccttcaa

SEQ ID NO: 1257057 - DNA, 25 bp, Homo sapien
tcgttcagtgtctgtaaaggcaaca

SEQ ID NO: 1257058 - DNA, 25 bp, Homo sapien
tgtaaaggcaacatagcttggagtg

SEQ ID NO: 1257059 - DNA, 25 bp, Homo sapien
cctatcaatcgttcagtgtctgtaa

SEQ ID NO: 1257060 - DNA, 25 bp, Homo sapien
ctttgtggcatcacctatcaatcgt

SEQ ID NO: 1257061 - DNA, 25 bp, Homo sapien
ggcatcaaaaaaccatgttggtggg

SEQ ID NO: 1257062 - DNA, 25 bp, Homo sapien
ctgcatccaattagatgtttggcat

SEQ ID NO: 1257063 - DNA, 25 bp, Homo sapien
catccaattagatgtttggcatcaa

SEQ ID NO: 1257064 - DNA, 25 bp, Homo sapien
gtttggcatcaaaaaaccatgttgg

SEQ ID NO: 1257065 - DNA, 25 bp, Homo sapien
gctgtaagcagtagcagctacagtt

SEQ ID NO: 1257066 - DNA, 25 bp, Homo sapien
tctaagctgtaagcagtagcagcta

SEQ ID NO: 1257067 - DNA, 25 bp, Homo sapien
tacagttggctcactgatacttcta

SEQ ID NO: 1257068 - DNA, 25 bp, Homo sapien
catattcccaaggtatgcttctgca

SEQ ID NO: 1257069 - DNA, 25 bp, Homo sapien
gggtgtctccagctgtagatctgac

SEQ ID NO: 1257070 - DNA, 25 bp, Homo sapien
aaatggttgacattcggttgtcaaa

SEQ ID NO: 1257071 - DNA, 25 bp, Homo sapien
ggttgacattcggttgtcaaagtct

SEQ ID NO: 1257072 - DNA, 25 bp, Homo sapien
gacattcggttgtcaaagtcttctc

SEQ ID NO: 1257073 - DNA, 25 bp, Homo sapien
agctctcttattctcactgatgtcc

SEQ ID NO: 1257074 - DNA, 25 bp, Homo sapien
tattctcactgatgtccttcttatg

SEQ ID NO: 1257075 - DNA, 25 bp, Homo sapien
tctcttattctcactgatgtccttc

SEQ ID NO: 1257076 - DNA, 25 bp, Homo sapien
cactgatgtccttcttatgcttgct

SEQ ID NO: 1257077 - DNA, 25 bp, Homo sapien
gagagtacacttagcatgttcataa

SEQ ID NO: 1257078 - DNA, 25 bp, Homo sapien
ctggaagagagagtacacttagcat

SEQ ID NO: 1257079 - DNA, 25 bp, Homo sapien
cataagcagtatggaggcatcttac

SEQ ID NO: 1257080 - DNA, 25 bp, Homo sapien
tacacttagcatgttcataagcagt

SEQ ID NO: 1257081 - DNA, 25 bp, Homo sapien
gggcacaggcaatggacatatagaa

SEQ ID NO: 1257082 - DNA, 25 bp, Homo sapien
aaatcgggcacaggcaatggacata

SEQ ID NO: 1257083 - DNA, 25 bp, Homo sapien
tcgggcacaggcaatggacatatag

SEQ ID NO: 1257084 - DNA, 25 bp, Homo sapien
ttcaaatcgggcacaggcaatggac

SEQ ID NO: 1257085 - DNA, 25 bp, Homo sapien
tctaagaggagcaactcttgaacat

SEQ ID NO: 1257086 - DNA, 25 bp, Homo sapien
ctaagaggagcaactcttgaacatt

SEQ ID NO: 1257087 - DNA, 25 bp, Homo sapien
atctaagaggagcaactcttgaaca

SEQ ID NO: 1257088 - DNA, 25 bp, Homo sapien
tgcttggtaggaatggtagtattac

SEQ ID NO: 1257089 - DNA, 25 bp, Homo sapien
ctgcttggtaggaatggtagtatta

SEQ ID NO: 1257090 - DNA, 25 bp, Homo sapien
gtgaataagcacaccaggctggttg

SEQ ID NO: 1257091 - DNA, 25 bp, Homo sapien
ctgtgaataagcacaccaggctggt

SEQ ID NO: 1257092 - DNA, 25 bp, Homo sapien
gctggttgccagaataggtagtgaa

SEQ ID NO: 1257093 - DNA, 25 bp, Homo sapien
gttgccagaataggtagtgaaggtc

SEQ ID NO: 1257094 - DNA, 25 bp, Homo sapien
gttatccttggtcgtggcacgctca

SEQ ID NO: 1257095 - DNA, 25 bp, Homo sapien
ttatccttggtcgtggcacgctcac

SEQ ID NO: 1257096 - DNA, 25 bp, Homo sapien
gtgagttcacacttgccacgcaggt

SEQ ID NO: 1257097 - DNA, 25 bp, Homo sapien
gcctgtgagttcacacttgccacgc

SEQ ID NO: 1257098 - DNA, 25 bp, Homo sapien
tactcttgtccacagaagagacatt

SEQ ID NO: 1257099 - DNA, 25 bp, Homo sapien
ctgtactcttgtccacagaagagac

SEQ ID NO: 1257100 - DNA, 25 bp, Homo sapien
gaagagacattgaggatgccattgg

SEQ ID NO: 1257101 - DNA, 25 bp, Homo sapien
agaagagacattgaggatgccattg

SEQ ID NO: 1257102 - DNA, 25 bp, Homo sapien
ttagatgacacttcatccctctgct

SEQ ID NO: 1257103 - DNA, 25 bp, Homo sapien
tagatgacacttcatccctctgctt

SEQ ID NO: 1257104 - DNA, 25 bp, Homo sapien
gaattcttagatgacacttcatccc

SEQ ID NO: 1257105 - DNA, 25 bp, Homo sapien
ttcttagatgacacttcatccctct

SEQ ID NO: 1257106 - DNA, 25 bp, Homo sapien
ttatcgagccagctgatagttttat

SEQ ID NO: 1257107 - DNA, 25 bp, Homo sapien
gatttttatcgagccagctgatagt

SEQ ID NO: 1257108 - DNA, 25 bp, Homo sapien
tttatcgagccagctgatagtttta

SEQ ID NO: 1257109 - DNA, 25 bp, Homo sapien
tttttatcgagccagctgatagttt

SEQ ID NO: 1257110 - DNA, 25 bp, Homo sapien
tatacttggtaatgatggagttgca

SEQ ID NO: 1257111 - DNA, 25 bp, Homo sapien
ggtatacttggtaatgatggagttg

SEQ ID NO: 1257112 - DNA, 25 bp, Homo sapien
ctggtatacttggtaatgatggagt

SEQ ID NO: 1257113 - DNA, 25 bp, Homo sapien
atacttggtaatgatggagttgcag

SEQ ID NO: 1257114 - DNA, 25 bp, Homo sapien
aatcaacctcttcaatggtgggccc

SEQ ID NO: 1257115 - DNA, 25 bp, Homo sapien
ggaggagctccaccatcagggaatc

SEQ ID NO: 1257116 - DNA, 25 bp, Homo sapien
gaagcaccatcagagggaggagctc

SEQ ID NO: 1257117 - DNA, 25 bp, Homo sapien
attcttcctggcacgcctcctgcag

SEQ ID NO: 1257118 - DNA, 25 bp, Homo sapien
tgaatcccactattgagcatgactg

SEQ ID NO: 1257119 - DNA, 25 bp, Homo sapien
ggctaaatggtcttccgtggaaaca

SEQ ID NO: 1257120 - DNA, 25 bp, Homo sapien
gactgaggaccaggcttggtgccca

SEQ ID NO: 1257121 - DNA, 25 bp, Homo sapien
tgcgtagtcagtcaaggaaggccct

SEQ ID NO: 1257122 - DNA, 25 bp, Homo sapien
caatggacttagacctgtgactgaa

SEQ ID NO: 1257123 - DNA, 25 bp, Homo sapien
gaaggatggtgtttgctgaaattcc

SEQ ID NO: 1257124 - DNA, 25 bp, Homo sapien
tgaaccaaagaagtctaaggacacc

SEQ ID NO: 1257125 - DNA, 25 bp, Homo sapien
ccaatattgcctgggtgaagagcag

SEQ ID NO: 1257126 - DNA, 25 bp, Homo sapien
ggaagaatcctaagatgtgacttgc

SEQ ID NO: 1257127 - DNA, 25 bp, Homo sapien
tccctcaaagtcattagtgtgaaaa

SEQ ID NO: 1257128 - DNA, 25 bp, Homo sapien
gcagaagattacaccaatgaacatg

SEQ ID NO: 1257129 - DNA, 25 bp, Homo sapien
ggtagccgcagtgtacagcagaaga

SEQ ID NO: 1257130 - DNA, 25 bp, Homo sapien
gtgtgaaggcactgagatagcctct

SEQ ID NO: 1257131 - DNA, 25 bp, Homo sapien
cagcagtaagatagcctgggaggct

SEQ ID NO: 1257132 - DNA, 25 bp, Homo sapien
cactggtgagactcggggacaggct

SEQ ID NO: 1257133 - DNA, 25 bp, Homo sapien
tataaaataatcaccatgtagcctc

SEQ ID NO: 1257134 - DNA, 25 bp, Homo sapien
aatgagaacgtaaagtccacccagt

SEQ ID NO: 1257135 - DNA, 25 bp, Homo sapien
tgaaaatgagaacgtaaagtccacc

SEQ ID NO: 1257136 - DNA, 25 bp, Homo sapien
aaatgagaacgtaaagtccacccag

SEQ ID NO: 1257137 - DNA, 25 bp, Homo sapien
tatcagcataaattagcatcaaagg

SEQ ID NO: 1257138 - DNA, 25 bp, Homo sapien
taattgcggcatagctattggccac

SEQ ID NO: 1257139 - DNA, 25 bp, Homo sapien
tttaaaccataacatttgcagagtc

SEQ ID NO: 1257140 - DNA, 25 bp, Homo sapien
taacctggagccacactagcagaga

SEQ ID NO: 1257141 - DNA, 25 bp, Homo sapien
aagaagttacgcgatataaggagta

SEQ ID NO: 1257142 - DNA, 25 bp, Homo sapien
aatggttagattgcagttgatacag

SEQ ID NO: 1257143 - DNA, 25 bp, Homo sapien
ttgtgtacccagaatcaatgaaatg

SEQ ID NO: 1257144 - DNA, 25 bp, Homo sapien
ccagagtgtcataggaatatcagcc

SEQ ID NO: 1257145 - DNA, 25 bp, Homo sapien
caaggcatatttacgctagacccaa

SEQ ID NO: 1257146 - DNA, 25 bp, Homo sapien
taaaggaggcatataattacttggc

SEQ ID NO: 1257147 - DNA, 25 bp, Homo sapien
gaagtctgcgtagtcacaaggcata

SEQ ID NO: 1257148 - DNA, 25 bp, Homo sapien
tcagtgtgatcctcataagcttgcc

SEQ ID NO: 1257149 - DNA, 25 bp, Homo sapien
ggtattcgcagtggcgatgtaatga

SEQ ID NO: 1257150 - DNA, 25 bp, Homo sapien
tcgcagtggcgatgtaatgaaagtg

SEQ ID NO: 1257151 - DNA, 25 bp, Homo sapien
tttttttgtacttgacacagtacag

SEQ ID NO: 1257152 - DNA, 25 bp, Homo sapien
gtacaggtggtattcgcagtggcga

SEQ ID NO: 1257153 - DNA, 25 bp, Homo sapien
tgctggttagccaaactctccttct

SEQ ID NO: 1257154 - DNA, 25 bp, Homo sapien
caccagaacagagtgctggttagcc

SEQ ID NO: 1257155 - DNA, 25 bp, Homo sapien
gagtgctggttagccaaactctcct

SEQ ID NO: 1257156 - DNA, 25 bp, Homo sapien
gaacagagtgctggttagccaaact

SEQ ID NO: 1257157 - DNA, 25 bp, Homo sapien
tgctgtcttgctgaggcgcgctgct

SEQ ID NO: 1257158 - DNA, 25 bp, Homo sapien
tgttccagtctgacgggactgctac

SEQ ID NO: 1257159 - DNA, 25 bp, Homo sapien
cggtatgagacctaaaatggcgtca

SEQ ID NO: 1257160 - DNA, 25 bp, Homo sapien
ggactgctacgcagcaaccggatgg

SEQ ID NO: 1257161 - DNA, 25 bp, Homo sapien
taccaggaggcttccgtgtggagcc

SEQ ID NO: 1257162 - DNA, 25 bp, Homo sapien
gcaccagtaggctgcgcaggagcct

SEQ ID NO: 1257163 - DNA, 25 bp, Homo sapien
tgagggccgttgtcaaccttatgaa

SEQ ID NO: 1257164 - DNA, 25 bp, Homo sapien
tatgaagcttgtgccaggtatcggg

SEQ ID NO: 1257165 - DNA, 25 bp, Homo sapien
tgtctgtgtctgcttacatcatcca

SEQ ID NO: 1257166 - DNA, 25 bp, Homo sapien
cagcttgcggtctaagacaacatgc

SEQ ID NO: 1257167 - DNA, 25 bp, Homo sapien
tgcttacatcatccagcttgcggtc

SEQ ID NO: 1257168 - DNA, 25 bp, Homo sapien
gtgtctgcttacatcatccagcttg

SEQ ID NO: 1257169 - DNA, 25 bp, Homo sapien
gtgtttgatgtgtaactcactgaac

SEQ ID NO: 1257170 - DNA, 25 bp, Homo sapien
gaagagcagaacaaggtgtttgatg

SEQ ID NO: 1257171 - DNA, 25 bp, Homo sapien
tagtcagatgcagtagtgagagtca

SEQ ID NO: 1257172 - DNA, 25 bp, Homo sapien
actcactgaacaatcgtgataactc

SEQ ID NO: 1257173 - DNA, 25 bp, Homo sapien
cactgatccagagccaaccaaggca

SEQ ID NO: 1257174 - DNA, 25 bp, Homo sapien
cacattgcctctggatttggaaatc

SEQ ID NO: 1257175 - DNA, 25 bp, Homo sapien
tgtctcttgagtccccaccactgat

SEQ ID NO: 1257176 - DNA, 25 bp, Homo sapien
cctgggtaatgtaactgaaacccag

SEQ ID NO: 1257177 - DNA, 25 bp, Homo sapien
gatgcatctgcatgcccaggagcag

SEQ ID NO: 1257178 - DNA, 25 bp, Homo sapien
ttctgtgtagatgcatctgcatgcc

SEQ ID NO: 1257179 - DNA, 25 bp, Homo sapien
tctgcatgcccaggagcagtaaatg

SEQ ID NO: 1257180 - DNA, 25 bp, Homo sapien
catgcccaggagcagtaaatgcaat

SEQ ID NO: 1257181 - DNA, 25 bp, Homo sapien
cctgtctgaacgctaggatctgctc

SEQ ID NO: 1257182 - DNA, 25 bp, Homo sapien
ccttccctgtctgaacgctaggatc

SEQ ID NO: 1257183 - DNA, 25 bp, Homo sapien
tccctgtctgaacgctaggatctgc

SEQ ID NO: 1257184 - DNA, 25 bp, Homo sapien
ctccttccctgtctgaacgctagga

SEQ ID NO: 1257185 - DNA, 25 bp, Homo sapien
tcaattcccctgaaaccttgggcaa

SEQ ID NO: 1257186 - DNA, 25 bp, Homo sapien
tgcctgctagctatgtggccacgag

SEQ ID NO: 1257187 - DNA, 25 bp, Homo sapien
aacaagcacttgcagcagcctggct

SEQ ID NO: 1257188 - DNA, 25 bp, Homo sapien
gatagtcatggagttacctgcacgc

SEQ ID NO: 1257189 - DNA, 25 bp, Homo sapien
cagcacatctggaggcattgaaggt

SEQ ID NO: 1257190 - DNA, 25 bp, Homo sapien
cagttagatgcagacgtttgtgccc

SEQ ID NO: 1257191 - DNA, 25 bp, Homo sapien
gcactcaggccacgcattttgcagg

SEQ ID NO: 1257192 - DNA, 25 bp, Homo sapien
tattcatgccaaaggagcgtatttc

SEQ ID NO: 1257193 - DNA, 25 bp, Homo sapien
taatgaaatccagtggcttcccgag

SEQ ID NO: 1257194 - DNA, 25 bp, Homo sapien
gattcatatgtacaggcaagagtcc

SEQ ID NO: 1257195 - DNA, 25 bp, Homo sapien
gattctgtggaacagcctgggaaga

SEQ ID NO: 1257196 - DNA, 25 bp, Homo sapien
catcaagttgactcccacaggtcct

SEQ ID NO: 1257197 - DNA, 25 bp, Homo sapien
gggatcctgctaagtggccgtgtca

SEQ ID NO: 1257198 - DNA, 25 bp, Homo sapien
cagattctggaggtgactggagcac

SEQ ID NO: 1257199 - DNA, 25 bp, Homo sapien
gcacatactgttccaaggtccctgg

SEQ ID NO: 1257200 - DNA, 25 bp, Homo sapien
catatggttctaaaagctccctggg

SEQ ID NO: 1257201 - DNA, 25 bp, Homo sapien
cctccccagtcctagagcggagcag

SEQ ID NO: 1257202 - DNA, 25 bp, Homo sapien
gaaccactgagatgcggagacctcc

SEQ ID NO: 1257203 - DNA, 25 bp, Homo sapien
gggagcgaaccactgagatgcggag

SEQ ID NO: 1257204 - DNA, 25 bp, Homo sapien
actgagatgcggagacctccccagt

SEQ ID NO: 1257205 - DNA, 25 bp, Homo sapien
aatgccagtccagttacgtcaaagg

SEQ ID NO: 1257206 - DNA, 25 bp, Homo sapien
ccagggccacgggattagaagagca

SEQ ID NO: 1257207 - DNA, 25 bp, Homo sapien
tgagcagggtttacaggcaggatcc

SEQ ID NO: 1257208 - DNA, 25 bp, Homo sapien
gatttaatccgggtgcctgagtcca

SEQ ID NO: 1257209 - DNA, 25 bp, Homo sapien
attacagacctctgacaccacgccc

SEQ ID NO: 1257210 - DNA, 25 bp, Homo sapien
gggcctccaggtcttattgccaagt

SEQ ID NO: 1257211 - DNA, 25 bp, Homo sapien
aattcttcagcatggtgtaccgggg

SEQ ID NO: 1257212 - DNA, 25 bp, Homo sapien
gaatacagcaggaattatcagagca

SEQ ID NO: 1257213 - DNA, 25 bp, Homo sapien
cccctagattcctatgtggagatct

SEQ ID NO: 1257214 - DNA, 25 bp, Homo sapien
gtggagatcttaacctccattgtga

SEQ ID NO: 1257215 - DNA, 25 bp, Homo sapien
gcccggtccaaacatatgaatctgg

SEQ ID NO: 1257216 - DNA, 25 bp, Homo sapien
gggacataactggaatgaatgttta

SEQ ID NO: 1257217 - DNA, 25 bp, Homo sapien
tttcagtctcatggctaaaatttta

SEQ ID NO: 1257218 - DNA, 25 bp, Homo sapien
aaaccatatcagttggattacaggt

SEQ ID NO: 1257219 - DNA, 25 bp, Homo sapien
tgggctgaagtgaccccacccacct

SEQ ID NO: 1257220 - DNA, 25 bp, Homo sapien
caagagttgatgtattagtcatttt

SEQ ID NO: 1257221 - DNA, 25 bp, Homo sapien
cacagtctgcgaagtccagctgcct

SEQ ID NO: 1257222 - DNA, 25 bp, Homo sapien
tttgggcggcagtatcaggcttttc

SEQ ID NO: 1257223 - DNA, 25 bp, Homo sapien
tggactcctctctaaagctatgctg

SEQ ID NO: 1257224 - DNA, 25 bp, Homo sapien
caagccacttctcaatcatatccaa

SEQ ID NO: 1257225 - DNA, 25 bp, Homo sapien
tacatttacagactggctgccagtg

SEQ ID NO: 1257226 - DNA, 25 bp, Homo sapien
tgtggtttgttacatttacagactg

SEQ ID NO: 1257227 - DNA, 25 bp, Homo sapien
tctgtttgcttattgtgaccttctg

SEQ ID NO: 1257228 - DNA, 25 bp, Homo sapien
gcgcccagctcccacttaagttttg

SEQ ID NO: 1257229 - DNA, 25 bp, Homo sapien
tgaattactagtttcctgaggtcct

SEQ ID NO: 1257230 - DNA, 25 bp, Homo sapien
ctgcaggaatgtgaagggagttttc

SEQ ID NO: 1257231 - DNA, 25 bp, Homo sapien
cccttgaattactagtttcctgagg

SEQ ID NO: 1257232 - DNA, 25 bp, Homo sapien
atcccttgaattactagtttcctga

SEQ ID NO: 1257233 - DNA, 25 bp, Homo sapien
gggtcatgggcaggttactctcaag

SEQ ID NO: 1257234 - DNA, 25 bp, Homo sapien
tactctcaagtctaaagcgccgcag

SEQ ID NO: 1257235 - DNA, 25 bp, Homo sapien
taacacacgaagaaatcaagaggga

SEQ ID NO: 1257236 - DNA, 25 bp, Homo sapien
gagggaacttctagcagtcctgaga

SEQ ID NO: 1257237 - DNA, 25 bp, Homo sapien
gcgtggcctgtaaccacccagtggg

SEQ ID NO: 1257238 - DNA, 25 bp, Homo sapien
tttctcccgaacttagcgtggcctg

SEQ ID NO: 1257239 - DNA, 25 bp, Homo sapien
ggagccgatttatcatgacaggaga

SEQ ID NO: 1257240 - DNA, 25 bp, Homo sapien
tacgcttacggctcagtagaattca

SEQ ID NO: 1257241 - DNA, 25 bp, Homo sapien
cagacaggacaaggtatgcgaggca

SEQ ID NO: 1257242 - DNA, 25 bp, Homo sapien
tctttccctggaagtcacggactgg

SEQ ID NO: 1257243 - DNA, 25 bp, Homo sapien
tcctgtctggcgtgtaccgttaaca

SEQ ID NO: 1257244 - DNA, 25 bp, Homo sapien
caaggcaaagttgattcccctggca

SEQ ID NO: 1257245 - DNA, 25 bp, Homo sapien
gagctcagtgtacccattccaagaa

SEQ ID NO: 1257246 - DNA, 25 bp, Homo sapien
tgtcgaaacggcaggcaacaaatga

SEQ ID NO: 1257247 - DNA, 25 bp, Homo sapien
tggcagaagccattgagtcactttt

SEQ ID NO: 1257248 - DNA, 25 bp, Homo sapien
gccatctgtcataaagctggccaga

SEQ ID NO: 1257249 - DNA, 25 bp, Homo sapien
ttctatgaagacaccactcagtggg

SEQ ID NO: 1257250 - DNA, 25 bp, Homo sapien
tcaactacgaacaacaagaaagaga

SEQ ID NO: 1257251 - DNA, 25 bp, Homo sapien
aaagagttcctgataaagagggcag

SEQ ID NO: 1257252 - DNA, 25 bp, Homo sapien
tatttcgctttaccagatataccaa

SEQ ID NO: 1257253 - DNA, 25 bp, Homo sapien
gaacaaccacttcacgatgccatct

SEQ ID NO: 1257254 - DNA, 25 bp, Homo sapien
cagaaagttctcctgttggctcgat

SEQ ID NO: 1257255 - DNA, 25 bp, Homo sapien
gattgtattacagtttacggtgaac

SEQ ID NO: 1257256 - DNA, 25 bp, Homo sapien
ggctatgacattggacaaactcttc

SEQ ID NO: 1257257 - DNA, 25 bp, Homo sapien
ataccaggcagtgaacacggcacac

SEQ ID NO: 1257258 - DNA, 25 bp, Homo sapien
taaagtctccactttgagagatata

SEQ ID NO: 1257259 - DNA, 25 bp, Homo sapien
cggcacacggatgagtcttttttaa

SEQ ID NO: 1257260 - DNA, 25 bp, Homo sapien
tgtcacatgactgtaacaagtcaaa

SEQ ID NO: 1257261 - DNA, 25 bp, Homo sapien
ttcagggtccttaggcttcggtcca

SEQ ID NO: 1257262 - DNA, 25 bp, Homo sapien
cagctgttttcagggtccttaggct

SEQ ID NO: 1257263 - DNA, 25 bp, Homo sapien
tcagggtccttaggcttcggtccac

SEQ ID NO: 1257264 - DNA, 25 bp, Homo sapien
ctgcagctgttttcagggtccttag

SEQ ID NO: 1257265 - DNA, 25 bp, Homo sapien
ttagcgtggctagatccacatggtc

SEQ ID NO: 1257266 - DNA, 25 bp, Homo sapien
cattgaagtcgatcattagcgtggc

SEQ ID NO: 1257267 - DNA, 25 bp, Homo sapien
tttctcataaaggtctctcctgttg

SEQ ID NO: 1257268 - DNA, 25 bp, Homo sapien
ttgatcgcagcgaagatccacacgg

SEQ ID NO: 1257269 - DNA, 25 bp, Homo sapien
ttcgaaacacgtgcattatctgaac

SEQ ID NO: 1257270 - DNA, 25 bp, Homo sapien
tgggattcgaaacacgtgcattatc

SEQ ID NO: 1257271 - DNA, 25 bp, Homo sapien
ctggcatatcacagtgggattcgaa

SEQ ID NO: 1257272 - DNA, 25 bp, Homo sapien
tatcacagtgggattcgaaacacgt

SEQ ID NO: 1257273 - DNA, 25 bp, Homo sapien
tttacaaatagagattctcgaaagg

SEQ ID NO: 1257274 - DNA, 25 bp, Homo sapien
tagagattctcgaaaggtactccag

SEQ ID NO: 1257275 - DNA, 25 bp, Homo sapien
caaatagagattctcgaaaggtact

SEQ ID NO: 1257276 - DNA, 25 bp, Homo sapien
gattctcgaaaggtactccagtaaa

SEQ ID NO: 1257277 - DNA, 25 bp, Homo sapien
tggaaaggaagaagacgtacaccgc

SEQ ID NO: 1257278 - DNA, 25 bp, Homo sapien
gaaatagtccatggccctttgcacg

SEQ ID NO: 1257279 - DNA, 25 bp, Homo sapien
tacatggcggcaaagaactcctgga

SEQ ID NO: 1257280 - DNA, 25 bp, Homo sapien
tttggcctcggagaaacccaggatc

SEQ ID NO: 1257281 - DNA, 25 bp, Homo sapien
aacaggcagcatgagaggagcttgg

SEQ ID NO: 1257282 - DNA, 25 bp, Homo sapien
catgagaacaggcagcatgagagga

SEQ ID NO: 1257283 - DNA, 25 bp, Homo sapien
caggcagcatgagaggagcttggga

SEQ ID NO: 1257284 - DNA, 25 bp, Homo sapien
agaacaggcagcatgagaggagctt

SEQ ID NO: 1257285 - DNA, 25 bp, Homo sapien
tctcaaacagacagtggtggcatta

SEQ ID NO: 1257286 - DNA, 25 bp, Homo sapien
gctgtggcaacagtatttggaagat

SEQ ID NO: 1257287 - DNA, 25 bp, Homo sapien
gaagatagttgaaaagagatgagag

SEQ ID NO: 1257288 - DNA, 25 bp, Homo sapien
tccacctaccatacatcaatctttg

SEQ ID NO: 1257289 - DNA, 25 bp, Homo sapien
tgtcccacagccagacctcaagtcc

SEQ ID NO: 1257290 - DNA, 25 bp, Homo sapien
ctgtcccacagccagacctcaagtc

SEQ ID NO: 1257291 - DNA, 25 bp, Homo sapien
ccccttgtgctttggatactctgca

SEQ ID NO: 1257292 - DNA, 25 bp, Homo sapien
ggtgaacaggttcgtccccttgtgc

SEQ ID NO: 1257293 - DNA, 25 bp, Homo sapien
caagtttccttgtcagagcccatga

SEQ ID NO: 1257294 - DNA, 25 bp, Homo sapien
ccgtgccccgctggtgaacaggttc

SEQ ID NO: 1257295 - DNA, 25 bp, Homo sapien
atcctccggaagctggctgagcggg

SEQ ID NO: 1257296 - DNA, 25 bp, Homo sapien
tcctccggaagctggctgagcgggg

SEQ ID NO: 1257297 - DNA, 25 bp, Homo sapien
ccatcctccggaagctggctgagcg

SEQ ID NO: 1257298 - DNA, 25 bp, Homo sapien
catcctccggaagctggctgagcgg

SEQ ID NO: 1257299 - DNA, 25 bp, Homo sapien
gagccccctaccagggttccagtca

SEQ ID NO: 1257300 - DNA, 25 bp, Homo sapien
gggctcccgtcagagtctgtcctca

SEQ ID NO: 1257301 - DNA, 25 bp, Homo sapien
gtgccatctagagggatgggtgctg

SEQ ID NO: 1257302 - DNA, 25 bp, Homo sapien
ggcaggtgccatctagagggatggg

SEQ ID NO: 1257303 - DNA, 25 bp, Homo sapien
cagaactgaaaagaggccccggcaa

SEQ ID NO: 1257304 - DNA, 25 bp, Homo sapien
aattcagttagactctggctggtgc

SEQ ID NO: 1257305 - DNA, 25 bp, Homo sapien
aggtccaattcagttagactctggc

SEQ ID NO: 1257306 - DNA, 25 bp, Homo sapien
caaaaactggaagtgaggtggctgt

SEQ ID NO: 1257307 - DNA, 25 bp, Homo sapien
gatgctggagcgtttcacacaacac

SEQ ID NO: 1257308 - DNA, 25 bp, Homo sapien
ggagcgtttcacacaacactctcat

SEQ ID NO: 1257309 - DNA, 25 bp, Homo sapien
caggatgctggagcgtttcacacaa

SEQ ID NO: 1257310 - DNA, 25 bp, Homo sapien
gctggagcgtttcacacaacactct

SEQ ID NO: 1257311 - DNA, 25 bp, Homo sapien
agcatcaggacacacctgaccagag

SEQ ID NO: 1257312 - DNA, 25 bp, Homo sapien
tcaggacacacctgaccagagagct

SEQ ID NO: 1257313 - DNA, 25 bp, Homo sapien
ctggaatagagaaagcatcaggaca

SEQ ID NO: 1257314 - DNA, 25 bp, Homo sapien
catcaggacacacctgaccagagag

SEQ ID NO: 1257315 - DNA, 25 bp, Homo sapien
cagagagctccggaatagagaaagc

SEQ ID NO: 1257316 - DNA, 25 bp, Homo sapien
agagagctccggaatagagaaagca

SEQ ID NO: 1257317 - DNA, 25 bp, Homo sapien
gaccagagagctccggaatagagaa

SEQ ID NO: 1257318 - DNA, 25 bp, Homo sapien
gagctccggaatagagaaagcatca

SEQ ID NO: 1257319 - DNA, 25 bp, Homo sapien
gagctctggaatagagaatgcatca

SEQ ID NO: 1257320 - DNA, 25 bp, Homo sapien
ctggaatagagaatgcatcaggaca

SEQ ID NO: 1257321 - DNA, 25 bp, Homo sapien
gctctggaatagagaatgcatcagg

SEQ ID NO: 1257322 - DNA, 25 bp, Homo sapien
agagagctctggaatagagaatgca

SEQ ID NO: 1257323 - DNA, 25 bp, Homo sapien
ccagaatagagaaagcatcaggaca

SEQ ID NO: 1257324 - DNA, 25 bp, Homo sapien
ctgaccagagagctccagaatagag

SEQ ID NO: 1257325 - DNA, 25 bp, Homo sapien
gaatagagaaagcatcaggacacac

SEQ ID NO: 1257326 - DNA, 25 bp, Homo sapien
tgaccagagagctccagaatagaga

SEQ ID NO: 1257327 - DNA, 25 bp, Homo sapien
gagagctccggaatagagaaagcat

SEQ ID NO: 1257328 - DNA, 25 bp, Homo sapien
cagagagctccggaatagagaaagc

SEQ ID NO: 1257329 - DNA, 25 bp, Homo sapien
gaccagagagctccggaatagagaa

SEQ ID NO: 1257330 - DNA, 25 bp, Homo sapien
gagctccggaatagagaaagcatca

SEQ ID NO: 1257331 - DNA, 25 bp, Homo sapien
ctgatcaggaagctccggaatagag

SEQ ID NO: 1257332 - DNA, 25 bp, Homo sapien
acctgatcaggaagctccggaatag

SEQ ID NO: 1257333 - DNA, 25 bp, Homo sapien
cacacctgatcaggaagctccggaa

SEQ ID NO: 1257334 - DNA, 25 bp, Homo sapien
gacacacctgatcaggaagctccgg

SEQ ID NO: 1257335 - DNA, 25 bp, Homo sapien
ctcatgcgagaggccacagcgcccc

SEQ ID NO: 1257336 - DNA, 25 bp, Homo sapien
atgcgagaggccacagcgccccaac

SEQ ID NO: 1257337 - DNA, 25 bp, Homo sapien
catgcgagaggccacagcgccccaa

SEQ ID NO: 1257338 - DNA, 25 bp, Homo sapien
tcatgcgagaggccacagcgcccca

SEQ ID NO: 1257339 - DNA, 25 bp, Homo sapien
ctgaggaccaaggagatgtcgaagc

SEQ ID NO: 1257340 - DNA, 25 bp, Homo sapien
gtcaccgagggcgttgtcactcagg

SEQ ID NO: 1257341 - DNA, 25 bp, Homo sapien
ggaccaaggagatgtcgaagcagca

SEQ ID NO: 1257342 - DNA, 25 bp, Homo sapien
ctgattccgaagtcaccgagggcgt

SEQ ID NO: 1257343 - DNA, 25 bp, Homo sapien
tcagattgcacaacaggtgcttcag

SEQ ID NO: 1257344 - DNA, 25 bp, Homo sapien
tgcacaacaggtgcttcagtcccac

SEQ ID NO: 1257345 - DNA, 25 bp, Homo sapien
gagcttcttcagattgcacaacagg

SEQ ID NO: 1257346 - DNA, 25 bp, Homo sapien
tcttcagattgcacaacaggtgctt

SEQ ID NO: 1257347 - DNA, 25 bp, Homo sapien
cagagtgcgcagcacgcctcgctgg

SEQ ID NO: 1257348 - DNA, 25 bp, Homo sapien
tccttaggggaacgggctcgactca

SEQ ID NO: 1257349 - DNA, 25 bp, Homo sapien
ctggcagaacttccttaggggaacg

SEQ ID NO: 1257350 - DNA, 25 bp, Homo sapien
tgcgcagcacgcctcgctggcagaa

SEQ ID NO: 1257351 - DNA, 25 bp, Homo sapien
aatactgatgcaagatcctgacaac

SEQ ID NO: 1257352 - DNA, 25 bp, Homo sapien
tctggtcagggaatggctggtgctc

SEQ ID NO: 1257353 - DNA, 25 bp, Homo sapien
tcctgacaacatgctgatgtgaggc

SEQ ID NO: 1257354 - DNA, 25 bp, Homo sapien
ttcacataaaattgcgactcctgag

SEQ ID NO: 1257355 - DNA, 25 bp, Homo sapien
cagtgcctcgtcctctctcagcagc

SEQ ID NO: 1257356 - DNA, 25 bp, Homo sapien
agaagagtcctcagtacccagctgt

SEQ ID NO: 1257357 - DNA, 25 bp, Homo sapien
gtacccagctgttccccaacattgt

SEQ ID NO: 1257358 - DNA, 25 bp, Homo sapien
tgactcagtgcctcgtcctctctca

SEQ ID NO: 1257359 - DNA, 25 bp, Homo sapien
cagactgacgtaaggccagaattca

SEQ ID NO: 1257360 - DNA, 25 bp, Homo sapien
caacagactgacgtaaggccagaat

SEQ ID NO: 1257361 - DNA, 25 bp, Homo sapien
tgacgtaaggccagaattcaccaac

SEQ ID NO: 1257362 - DNA, 25 bp, Homo sapien
ctgaacaacagactgacgtaaggcc

SEQ ID NO: 1257363 - DNA, 25 bp, Homo sapien
tccaacacctgaagcttgcagtcgg

SEQ ID NO: 1257364 - DNA, 25 bp, Homo sapien
tgattagtgctgagtaccgaggaca

SEQ ID NO: 1257365 - DNA, 25 bp, Homo sapien
tgtctccgagagtgttgcctcgcag

SEQ ID NO: 1257366 - DNA, 25 bp, Homo sapien
gggtgcaagagtccctcacagagta

SEQ ID NO: 1257367 - DNA, 25 bp, Homo sapien
ttgcccaggctcagctttcgcaggc

SEQ ID NO: 1257368 - DNA, 25 bp, Homo sapien
ggtcagaagtgtggaaagatcccag

SEQ ID NO: 1257369 - DNA, 25 bp, Homo sapien
cccagcagcagtgtgacgtgaggtt

SEQ ID NO: 1257370 - DNA, 25 bp, Homo sapien
aggtcgcccaggtcattgttgccca

SEQ ID NO: 1257371 - DNA, 25 bp, Homo sapien
ctaacgcactttttgtctcataatt

SEQ ID NO: 1257372 - DNA, 25 bp, Homo sapien
ctttttgtctcataattgaaataca

SEQ ID NO: 1257373 - DNA, 25 bp, Homo sapien
cactttttgtctcataattgaaata

SEQ ID NO: 1257374 - DNA, 25 bp, Homo sapien
ttttgtctcataattgaaatacatt

SEQ ID NO: 1257375 - DNA, 25 bp, Homo sapien
caagaaggctcaaagacgacggtca

SEQ ID NO: 1257376 - DNA, 25 bp, Homo sapien
gaaggctcaaagacgacggtcagct

SEQ ID NO: 1257377 - DNA, 25 bp, Homo sapien
agacgacggtcagctcaggcttttc

SEQ ID NO: 1257378 - DNA, 25 bp, Homo sapien
tcaaagacgacggtcagctcaggct

SEQ ID NO: 1257379 - DNA, 25 bp, Homo sapien
agggaccggagaacactggcgtctg

SEQ ID NO: 1257380 - DNA, 25 bp, Homo sapien
ctggagggaccggagaacactggcg

SEQ ID NO: 1257381 - DNA, 25 bp, Homo sapien
ccggagaacactggcgtctggcagc

SEQ ID NO: 1257382 - DNA, 25 bp, Homo sapien
actggcgtctggcagccccgtttcc

SEQ ID NO: 1257383 - DNA, 25 bp, Homo sapien
tcttggcctggatggatcgcagctc

SEQ ID NO: 1257384 - DNA, 25 bp, Homo sapien
gtgatgacaacaacacccgatgctg

SEQ ID NO: 1257385 - DNA, 25 bp, Homo sapien
aggaaggcatcgtcggcaagctctc

SEQ ID NO: 1257386 - DNA, 25 bp, Homo sapien
gacactccaccggaaggatcacaga

SEQ ID NO: 1257387 - DNA, 25 bp, Homo sapien
tatggtcagttaatagaaagatagc

SEQ ID NO: 1257388 - DNA, 25 bp, Homo sapien
caactagttctgtgttatggtcagt

SEQ ID NO: 1257389 - DNA, 25 bp, Homo sapien
tcaacataatatatagtcaactagt

SEQ ID NO: 1257390 - DNA, 25 bp, Homo sapien
tttcaaccagctacaaaaagcatgg

SEQ ID NO: 1257391 - DNA, 25 bp, Homo sapien
taatttatctttagtggtttagaga

SEQ ID NO: 1257392 - DNA, 25 bp, Homo sapien
taggtttaggttgggtttgagcaca

SEQ ID NO: 1257393 - DNA, 25 bp, Homo sapien
ccttcttcaacctcaaggtaaaatg

SEQ ID NO: 1257394 - DNA, 25 bp, Homo sapien
ttaggttgggtttgagcacaggaat

SEQ ID NO: 1257395 - DNA, 25 bp, Homo sapien
aaatgactggaagggccacttaggt

SEQ ID NO: 1257396 - DNA, 25 bp, Homo sapien
ctgtgcatgtgtcttcccagtagcc

SEQ ID NO: 1257397 - DNA, 25 bp, Homo sapien
cactgtgcatgtgtcttcccagtag

SEQ ID NO: 1257398 - DNA, 25 bp, Homo sapien
actgtgcatgtgtcttcccagtagc

SEQ ID NO: 1257399 - DNA, 25 bp, Homo sapien
tcactgtgcatgtgtcttcccagta

SEQ ID NO: 1257400 - DNA, 25 bp, Homo sapien
accaggagttttctcatggataagg

SEQ ID NO: 1257401 - DNA, 25 bp, Homo sapien
gataaggcagctaattcttgtccct

SEQ ID NO: 1257402 - DNA, 25 bp, Homo sapien
ttcaattccggagaccaaccaggag

SEQ ID NO: 1257403 - DNA, 25 bp, Homo sapien
cttccagaggaaattacactgaaaa

SEQ ID NO: 1257404 - DNA, 25 bp, Homo sapien
tgaaaacttagacgccaaggtctga

SEQ ID NO: 1257405 - DNA, 25 bp, Homo sapien
tggctgaaggttatgcccaaaactg

SEQ ID NO: 1257406 - DNA, 25 bp, Homo sapien
actgtaccaacccatatagaggaga

SEQ ID NO: 1257407 - DNA, 25 bp, Homo sapien
gaatccaccaaatggttctctgtgc

SEQ ID NO: 1257408 - DNA, 25 bp, Homo sapien
ggacatgtgtctatgcagccgctgt

SEQ ID NO: 1257409 - DNA, 25 bp, Homo sapien
tctgtagttcccatccattggtcca

SEQ ID NO: 1257410 - DNA, 25 bp, Homo sapien
cctgttggagctgcaattgggaatt

SEQ ID NO: 1257411 - DNA, 25 bp, Homo sapien
tgacaactgacatgctatgagctgt

SEQ ID NO: 1257412 - DNA, 25 bp, Homo sapien
tggcactctccaatttccatttaca

SEQ ID NO: 1257413 - DNA, 25 bp, Homo sapien
tgcagatgatctggcactctccaat

SEQ ID NO: 1257414 - DNA, 25 bp, Homo sapien
ggcacatgcagatgatctggcactc

SEQ ID NO: 1257415 - DNA, 25 bp, Homo sapien
gatgatctggcactctccaatttcc

SEQ ID NO: 1257416 - DNA, 25 bp, Homo sapien
tcatgtagatgtagagttgggccac

SEQ ID NO: 1257417 - DNA, 25 bp, Homo sapien
gagagctgcatcgtctgaggacaca

SEQ ID NO: 1257418 - DNA, 25 bp, Homo sapien
cggtggagcccagcatcatgtagat

SEQ ID NO: 1257419 - DNA, 25 bp, Homo sapien
gagaattttctccagtccaggccga

SEQ ID NO: 1257420 - DNA, 25 bp, Homo sapien
gagggagagcggcaccaggaggaga

SEQ ID NO: 1257421 - DNA, 25 bp, Homo sapien
agggcaaaggtgaatcgcttctacc

SEQ ID NO: 1257422 - DNA, 25 bp, Homo sapien
gcttctaccagcatggtttcctcac

SEQ ID NO: 1257423 - DNA, 25 bp, Homo sapien
ctgcaatcacgccataggagatgag

SEQ ID NO: 1257424 - DNA, 25 bp, Homo sapien
tggaaggctttctttcgccctgctg

SEQ ID NO: 1257425 - DNA, 25 bp, Homo sapien
gtgtggaaggctttctttcgccctg

SEQ ID NO: 1257426 - DNA, 25 bp, Homo sapien
aaggctttctttcgccctgctgctg

SEQ ID NO: 1257427 - DNA, 25 bp, Homo sapien
tgtggaaggctttctttcgccctgc

SEQ ID NO: 1257428 - DNA, 25 bp, Homo sapien
gctgttggccggcttcaggtacacg

SEQ ID NO: 1257429 - DNA, 25 bp, Homo sapien
caggtacacgtagatgatggttccg

SEQ ID NO: 1257430 - DNA, 25 bp, Homo sapien
ttgatgctgggaatgacgatggtgt

SEQ ID NO: 1257431 - DNA, 25 bp, Homo sapien
tagaagagagtcaggaacttcccct

SEQ ID NO: 1257432 - DNA, 25 bp, Homo sapien
agaagtttcttcatggtccccttca

SEQ ID NO: 1257433 - DNA, 25 bp, Homo sapien
gaagtttcttcatggtccccttcac

SEQ ID NO: 1257434 - DNA, 25 bp, Homo sapien
cagaagtttcttcatggtccccttc

SEQ ID NO: 1257435 - DNA, 25 bp, Homo sapien
cccagaagtttcttcatggtcccct

SEQ ID NO: 1257436 - DNA, 25 bp, Homo sapien
tgtctacattactagagtgttcccc

SEQ ID NO: 1257437 - DNA, 25 bp, Homo sapien
tactagagtgttcccctcgttgagg

SEQ ID NO: 1257438 - DNA, 25 bp, Homo sapien
tccagcaaactgtctacattactag

SEQ ID NO: 1257439 - DNA, 25 bp, Homo sapien
gagtgttcccctcgttgaggctccc

SEQ ID NO: 1257440 - DNA, 25 bp, Homo sapien
tacagcagagatatcctgaagcagg

SEQ ID NO: 1257441 - DNA, 25 bp, Homo sapien
catgacataatctgcagactgccca

SEQ ID NO: 1257442 - DNA, 25 bp, Homo sapien
ggtcaaactcgaaagcattttccca

SEQ ID NO: 1257443 - DNA, 25 bp, Homo sapien
aaggaaagtgcaagatacagcagag

SEQ ID NO: 1257444 - DNA, 25 bp, Homo sapien
ccccaaggagtggtaataagctggg

SEQ ID NO: 1257445 - DNA, 25 bp, Homo sapien
cgaattgaatccatgtatgtaagat

SEQ ID NO: 1257446 - DNA, 25 bp, Homo sapien
gctgggaatgccatcagctcatctt

SEQ ID NO: 1257447 - DNA, 25 bp, Homo sapien
ccagctgaatctacgaattgaatcc

SEQ ID NO: 1257448 - DNA, 25 bp, Homo sapien
caaacgggaccgtctccagctttgg

SEQ ID NO: 1257449 - DNA, 25 bp, Homo sapien
agaaccccagcagaatggcgtcacc

SEQ ID NO: 1257450 - DNA, 25 bp, Homo sapien
gaggaggacgttggtgcagttgcca

SEQ ID NO: 1257451 - DNA, 25 bp, Homo sapien
aagtaaaaggccgtgctgaccacaa

SEQ ID NO: 1257452 - DNA, 25 bp, Homo sapien
caggtacgtgtacgcggcgacgtca

SEQ ID NO: 1257453 - DNA, 25 bp, Homo sapien
cacgcgggccatggatttgcctgag

SEQ ID NO: 1257454 - DNA, 25 bp, Homo sapien
taactagcacttgggagaagctgcg

SEQ ID NO: 1257455 - DNA, 25 bp, Homo sapien
cagaggcagcggtgactgcaccgcc

SEQ ID NO: 1257456 - DNA, 25 bp, Homo sapien
ctgccggcgtccacgcggaaatgcg

SEQ ID NO: 1257457 - DNA, 25 bp, Homo sapien
agtgcagacggcgtcaccgtggaaa

SEQ ID NO: 1257458 - DNA, 25 bp, Homo sapien
aatgcggtgatggccggcgtcccac

SEQ ID NO: 1257459 - DNA, 25 bp, Homo sapien
gggaaagccaggcgttccaccctgc

SEQ ID NO: 1257460 - DNA, 25 bp, Homo sapien
ctcccgcgtccagcggctgcgggct

SEQ ID NO: 1257461 - DNA, 25 bp, Homo sapien
tgagggaattcagcggcggttgcag

SEQ ID NO: 1257462 - DNA, 25 bp, Homo sapien
cgtccagcggctgcgggctttcccg

SEQ ID NO: 1257463 - DNA, 25 bp, Homo sapien
cctctcagcgtggggatgagggaat

SEQ ID NO: 1257464 - DNA, 25 bp, Homo sapien
gacccctgaaagagagaacgccttg

SEQ ID NO: 1257465 - DNA, 25 bp, Homo sapien
aagagaaaaagcttcgcggaccaca

SEQ ID NO: 1257466 - DNA, 25 bp, Homo sapien
acatttctggtagcgatgggttctc

SEQ ID NO: 1257467 - DNA, 25 bp, Homo sapien
agtaactaggactaaaggcaggcgc

SEQ ID NO: 1257468 - DNA, 25 bp, Homo sapien
tcttttgcaattaactttgaaggac

SEQ ID NO: 1257469 - DNA, 25 bp, Homo sapien
gaactcttttgcaattaactttgaa

SEQ ID NO: 1257470 - DNA, 25 bp, Homo sapien
ttgcaattaactttgaaggacatgg

SEQ ID NO: 1257471 - DNA, 25 bp, Homo sapien
tgaactcttttgcaattaactttga

SEQ ID NO: 1257472 - DNA, 25 bp, Homo sapien
cacacgtgcgtttctgccatgctgt

SEQ ID NO: 1257473 - DNA, 25 bp, Homo sapien
gccatgctgtctccttactcttgta

SEQ ID NO: 1257474 - DNA, 25 bp, Homo sapien
tgtgggaacaagtgtaccccagaaa

SEQ ID NO: 1257475 - DNA, 25 bp, Homo sapien
tgacattaccgctcagtggaatcag

SEQ ID NO: 1257476 - DNA, 25 bp, Homo sapien
taacagcctgaggaagtaacagtgt

SEQ ID NO: 1257477 - DNA, 25 bp, Homo sapien
gcctgaggaagtaacagtgtcatct

SEQ ID NO: 1257478 - DNA, 25 bp, Homo sapien
gaggaagtaacagtgtcatctgcac

SEQ ID NO: 1257479 - DNA, 25 bp, Homo sapien
gcaggtaacagcctgaggaagtaac

SEQ ID NO: 1257480 - DNA, 25 bp, Homo sapien
caactgaattggatcaggcccatcc

SEQ ID NO: 1257481 - DNA, 25 bp, Homo sapien
tacagtaatcagagaagcgcacctt

SEQ ID NO: 1257482 - DNA, 25 bp, Homo sapien
taaatgcatgtggtgtagtgccaga

SEQ ID NO: 1257483 - DNA, 25 bp, Homo sapien
gaggcaatgtctagtacacaccagg

SEQ ID NO: 1257484 - DNA, 25 bp, Homo sapien
tggggttaaggtcatagataacagc

SEQ ID NO: 1257485 - DNA, 25 bp, Homo sapien
gttggggttaaggtcatagataaca

SEQ ID NO: 1257486 - DNA, 25 bp, Homo sapien
gacggggcggcggccaggtggaggc

SEQ ID NO: 1257487 - DNA, 25 bp, Homo sapien
ggcggcggccaggtggaggcgcccc

SEQ ID NO: 1257488 - DNA, 25 bp, Homo sapien
tgggatcacagaacatgtgcactgg

SEQ ID NO: 1257489 - DNA, 25 bp, Homo sapien
gagtgaaggacccaggccacattga

SEQ ID NO: 1257490 - DNA, 25 bp, Homo sapien
cacactgtgagggtcatgcatcacc

SEQ ID NO: 1257491 - DNA, 25 bp, Homo sapien
gaaaacctggatcatcccaaacctg

SEQ ID NO: 1257492 - DNA, 25 bp, Homo sapien
ccacatccagtagaactattggaat

SEQ ID NO: 1257493 - DNA, 25 bp, Homo sapien
acatccagtagaactattggaatcc

SEQ ID NO: 1257494 - DNA, 25 bp, Homo sapien
cacatccagtagaactattggaatc

SEQ ID NO: 1257495 - DNA, 25 bp, Homo sapien
catccagtagaactattggaatcct

SEQ ID NO: 1257496 - DNA, 25 bp, Homo sapien
ccagtgtgcttacagtgaggcgaga

SEQ ID NO: 1257497 - DNA, 25 bp, Homo sapien
caaacgagtcctaatttacaacagc

SEQ ID NO: 1257498 - DNA, 25 bp, Homo sapien
tagagtaacctatcactagagttca

SEQ ID NO: 1257499 - DNA, 25 bp, Homo sapien
tagagttcacctctatcaatagagt

SEQ ID NO: 1257500 - DNA, 25 bp, Homo sapien
tctgttttacgggagcatcatcttc

SEQ ID NO: 1257501 - DNA, 25 bp, Homo sapien
tcatgtatctccagccagccaagag

SEQ ID NO: 1257502 - DNA, 25 bp, Homo sapien
tgcgctgaacccacttatttacacc

SEQ ID NO: 1257503 - DNA, 25 bp, Homo sapien
gttcatagctctgttctacaccgta

SEQ ID NO: 1257504 - DNA, 25 bp, Homo sapien
gacatgagcttcaccacgagcattg

SEQ ID NO: 1257505 - DNA, 25 bp, Homo sapien
tctggtctcccatacagatgtgcac

SEQ ID NO: 1257506 - DNA, 25 bp, Homo sapien
gtcctgctggccaccatgtcctatg

SEQ ID NO: 1257507 - DNA, 25 bp, Homo sapien
ttttacatggtatcgatcttgggca

SEQ ID NO: 1257508 - DNA, 25 bp, Homo sapien
cttccagctcgcagccatctgcctg

SEQ ID NO: 1257509 - DNA, 25 bp, Homo sapien
ccttccagctcgcagccatctgcct

SEQ ID NO: 1257510 - DNA, 25 bp, Homo sapien
tcccttccagctcgcagccatctgc

SEQ ID NO: 1257511 - DNA, 25 bp, Homo sapien
gttggtttctgatgacgcttccctt

SEQ ID NO: 1257512 - DNA, 25 bp, Homo sapien
agagaaactgcaaaacccggagtgc

SEQ ID NO: 1257513 - DNA, 25 bp, Homo sapien
tctgacgcgttgcagaaagcttgct

SEQ ID NO: 1257514 - DNA, 25 bp, Homo sapien
cttcgtgcccatgctcggaaactgg

SEQ ID NO: 1257515 - DNA, 25 bp, Homo sapien
cgtgctgaacagtgctccggagaga

SEQ ID NO: 1257516 - DNA, 25 bp, Homo sapien
taggtatcctgccattattatggcc

SEQ ID NO: 1257517 - DNA, 25 bp, Homo sapien
ctgcagaatggataggagctacgtg

SEQ ID NO: 1257518 - DNA, 25 bp, Homo sapien
tgaaagggagtctcagtaagccgta

SEQ ID NO: 1257519 - DNA, 25 bp, Homo sapien
cagtaagccgtaggtatcctgccat

SEQ ID NO: 1257520 - DNA, 25 bp, Homo sapien
tgcgcatgatagagaaggcaggaag

SEQ ID NO: 1257521 - DNA, 25 bp, Homo sapien
cgcatgatagagaaggcaggaagag

SEQ ID NO: 1257522 - DNA, 25 bp, Homo sapien
ctgcgcatgatagagaaggcaggaa

SEQ ID NO: 1257523 - DNA, 25 bp, Homo sapien
gcgcatgatagagaaggcaggaaga

SEQ ID NO: 1257524 - DNA, 25 bp, Homo sapien
tcttgccaaccacgagctgccaggg

SEQ ID NO: 1257525 - DNA, 25 bp, Homo sapien
tcgtgctcttgccaaccacgagctg

SEQ ID NO: 1257526 - DNA, 25 bp, Homo sapien
gtgctcttgccaaccacgagctgcc

SEQ ID NO: 1257527 - DNA, 25 bp, Homo sapien
gctcttgccaaccacgagctgccag

SEQ ID NO: 1257528 - DNA, 25 bp, Homo sapien
gaagttctgaccaaagcaccaagag

SEQ ID NO: 1257529 - DNA, 25 bp, Homo sapien
actccacttggggaagttctgacca

SEQ ID NO: 1257530 - DNA, 25 bp, Homo sapien
catgaggcaggacgttgcatctgac

SEQ ID NO: 1257531 - DNA, 25 bp, Homo sapien
aaatgcatgaggcaggacgttgcat

SEQ ID NO: 1257532 - DNA, 25 bp, Homo sapien
ctgagttttcgcaggagataatttc

SEQ ID NO: 1257533 - DNA, 25 bp, Homo sapien
agttttcgcaggagataatttccca

SEQ ID NO: 1257534 - DNA, 25 bp, Homo sapien
gttttcgcaggagataatttcccat

SEQ ID NO: 1257535 - DNA, 25 bp, Homo sapien
gagttttcgcaggagataatttccc

SEQ ID NO: 1257536 - DNA, 25 bp, Homo sapien
cacgtcatatgcaagattgtctgga

SEQ ID NO: 1257537 - DNA, 25 bp, Homo sapien
tcatatgcaagattgtctggaaggg

SEQ ID NO: 1257538 - DNA, 25 bp, Homo sapien
cgtcatatgcaagattgtctggaag

SEQ ID NO: 1257539 - DNA, 25 bp, Homo sapien
tcacgtcatatgcaagattgtctgg

SEQ ID NO: 1257540 - DNA, 25 bp, Homo sapien
tggcccactgaaccagagcaagcgt

SEQ ID NO: 1257541 - DNA, 25 bp, Homo sapien
agtcttggcccactgaaccagagca

SEQ ID NO: 1257542 - DNA, 25 bp, Homo sapien
ccagagcaagcgtctctgggccctg

SEQ ID NO: 1257543 - DNA, 25 bp, Homo sapien
cactgaaccagagcaagcgtctctg

SEQ ID NO: 1257544 - DNA, 25 bp, Homo sapien
tcttgggcttcttttgattctctcc

SEQ ID NO: 1257545 - DNA, 25 bp, Homo sapien
cttcttttgattctctcccaggcaa

SEQ ID NO: 1257546 - DNA, 25 bp, Homo sapien
tcatctgggtttcctttcttgggct

SEQ ID NO: 1257547 - DNA, 25 bp, Homo sapien
tgggcttcttttgattctctcccag

SEQ ID NO: 1257548 - DNA, 25 bp, Homo sapien
ttctttcaaatgtagtcatttcctg

SEQ ID NO: 1257549 - DNA, 25 bp, Homo sapien
tcttatcttgatcttgaagttttct

SEQ ID NO: 1257550 - DNA, 25 bp, Homo sapien
tttcttatcttgatcttgaagtttt

SEQ ID NO: 1257551 - DNA, 25 bp, Homo sapien
aagttttctttcaaatgtagtcatt

SEQ ID NO: 1257552 - DNA, 25 bp, Homo sapien
tgattagaagtggatgaaacttctt

SEQ ID NO: 1257553 - DNA, 25 bp, Homo sapien
gggatgtgattaatgacagtgtagc

SEQ ID NO: 1257554 - DNA, 25 bp, Homo sapien
tctctaaactgtctcactttccttg

SEQ ID NO: 1257555 - DNA, 25 bp, Homo sapien
tggagctcagggaggatctctgatg

SEQ ID NO: 1257556 - DNA, 25 bp, Homo sapien
cagtgtagcacacttcttcagaacc

SEQ ID NO: 1257557 - DNA, 25 bp, Homo sapien
cagaagtcctaagaagggcatattc

SEQ ID NO: 1257558 - DNA, 25 bp, Homo sapien
ttagtgtggaaacacaacttcataa

SEQ ID NO: 1257559 - DNA, 25 bp, Homo sapien
ggaaacacaacttcataatcatgct

SEQ ID NO: 1257560 - DNA, 25 bp, Homo sapien
tgggtgcaggaacaaggcctactaa

SEQ ID NO: 1257561 - DNA, 25 bp, Homo sapien
ctggaaggtgataaagcagcttgag

SEQ ID NO: 1257562 - DNA, 25 bp, Homo sapien
tggaaggtgataaagcagcttgagg

SEQ ID NO: 1257563 - DNA, 25 bp, Homo sapien
gatggtccaatgtgcgcaaactctg

SEQ ID NO: 1257564 - DNA, 25 bp, Homo sapien
cacatcggttcagcttaaagaggca

SEQ ID NO: 1257565 - DNA, 25 bp, Homo sapien
gatggaatccctcagacagtgtgtg

SEQ ID NO: 1257566 - DNA, 25 bp, Homo sapien
tcaggttagcaaagggtctggtcac

SEQ ID NO: 1257567 - DNA, 25 bp, Homo sapien
tatgagcacaaatagaaccttctgt

SEQ ID NO: 1257568 - DNA, 25 bp, Homo sapien
catcggcatatgaagcttgggttcc

SEQ ID NO: 1257569 - DNA, 25 bp, Homo sapien
gaggcatagctgagaaagataacac

SEQ ID NO: 1257570 - DNA, 25 bp, Homo sapien
tccccatatgtaaagtgtgttcccc

SEQ ID NO: 1257571 - DNA, 25 bp, Homo sapien
tgtaaaggtgaaccaaacagccacc

SEQ ID NO: 1257572 - DNA, 25 bp, Homo sapien
taatggagaggacggcagacagcca

SEQ ID NO: 1257573 - DNA, 25 bp, Homo sapien
gccaccataggcgatagttttcatg

SEQ ID NO: 1257574 - DNA, 25 bp, Homo sapien
acgcactcagtggatcccagggcat

SEQ ID NO: 1257575 - DNA, 25 bp, Homo sapien
caatgtagccagaggagaccaggat

SEQ ID NO: 1257576 - DNA, 25 bp, Homo sapien
cagggacctcgcagatgaaatgatc

SEQ ID NO: 1257577 - DNA, 25 bp, Homo sapien
taatcctcaacactgcgtgggcaat

SEQ ID NO: 1257578 - DNA, 25 bp, Homo sapien
aaaagctcagcctcgttaaacgtgg

SEQ ID NO: 1257579 - DNA, 25 bp, Homo sapien
aagcaggtcccgaatgctttctgtc

SEQ ID NO: 1257580 - DNA, 25 bp, Homo sapien
agggttaagcatgcgggttaccaca

SEQ ID NO: 1257581 - DNA, 25 bp, Homo sapien
gccctggtccctggatctactcttg

SEQ ID NO: 1257582 - DNA, 25 bp, Homo sapien
gaagatgatggttccataaaagatg

SEQ ID NO: 1257583 - DNA, 25 bp, Homo sapien
ttaatgcccctttcacctccttgat

SEQ ID NO: 1257584 - DNA, 25 bp, Homo sapien
ctttaatgcccctttcacctccttg

SEQ ID NO: 1257585 - DNA, 25 bp, Homo sapien
taatgcccctttcacctccttgatc

SEQ ID NO: 1257586 - DNA, 25 bp, Homo sapien
tttaatgcccctttcacctccttga

SEQ ID NO: 1257587 - DNA, 25 bp, Homo sapien
aatatttactcccagagcctttgct

SEQ ID NO: 1257588 - DNA, 25 bp, Homo sapien
ttactcccagagcctttgctagaac

SEQ ID NO: 1257589 - DNA, 25 bp, Homo sapien
tatttactcccagagcctttgctag

SEQ ID NO: 1257590 - DNA, 25 bp, Homo sapien
tttactcccagagcctttgctagaa

SEQ ID NO: 1257591 - DNA, 25 bp, Homo sapien
caagaggatacattcagtggagccc

SEQ ID NO: 1257592 - DNA, 25 bp, Homo sapien
tgcgccacacaaccaccgtaagtga

SEQ ID NO: 1257593 - DNA, 25 bp, Homo sapien
agagaaatatagagttgcgccacac

SEQ ID NO: 1257594 - DNA, 25 bp, Homo sapien
gatccgcacctaaggcaggaatgga

SEQ ID NO: 1257595 - DNA, 25 bp, Homo sapien
gattagggaactagccaaaccactg

SEQ ID NO: 1257596 - DNA, 25 bp, Homo sapien
gacagcaatgtaccgatccaaggcc

SEQ ID NO: 1257597 - DNA, 25 bp, Homo sapien
gatagatgccagctgttggcaaagc

SEQ ID NO: 1257598 - DNA, 25 bp, Homo sapien
ggtccagcctatggttgccacagag

SEQ ID NO: 1257599 - DNA, 25 bp, Homo sapien
tacacgtagattatggtgccataga

SEQ ID NO: 1257600 - DNA, 25 bp, Homo sapien
tcccgagagaagtttcctcagagcc

SEQ ID NO: 1257601 - DNA, 25 bp, Homo sapien
tcaccatggtgtagaagagggagat

SEQ ID NO: 1257602 - DNA, 25 bp, Homo sapien
tggtggaatgacaacaaacagaaca

SEQ ID NO: 1257603 - DNA, 25 bp, Homo sapien
gcatgtacaatctgaatatcccagg

SEQ ID NO: 1257604 - DNA, 25 bp, Homo sapien
gaacatccagagtggtaagtatgat

SEQ ID NO: 1257605 - DNA, 25 bp, Homo sapien
tgccaggtaaactaggaagaataga

SEQ ID NO: 1257606 - DNA, 25 bp, Homo sapien
caggaattcgaaaatcccatgagga

SEQ ID NO: 1257607 - DNA, 25 bp, Homo sapien
tgagtcaaggaactaacaatagatt

SEQ ID NO: 1257608 - DNA, 25 bp, Homo sapien
gaaatggaagtatcatgagtcaagg

SEQ ID NO: 1257609 - DNA, 25 bp, Homo sapien
gctacctccgtagttgccaagtcca

SEQ ID NO: 1257610 - DNA, 25 bp, Homo sapien
tgtaaggatggctacctccgtagtt

SEQ ID NO: 1257611 - DNA, 25 bp, Homo sapien
gacctcataatgtaaaggccggcag

SEQ ID NO: 1257612 - DNA, 25 bp, Homo sapien
gacaccttggtttatgatgacctca

SEQ ID NO: 1257613 - DNA, 25 bp, Homo sapien
tgagccacgacatggccatcatcct

SEQ ID NO: 1257614 - DNA, 25 bp, Homo sapien
agatcaccccactgagccacgacat

SEQ ID NO: 1257615 - DNA, 25 bp, Homo sapien
tgacgtattctattgcgcccacaga

SEQ ID NO: 1257616 - DNA, 25 bp, Homo sapien
ttggcttcacataggcaatgctgcc

SEQ ID NO: 1257617 - DNA, 25 bp, Homo sapien
gacttgtaccaaaaaccatgactcc

SEQ ID NO: 1257618 - DNA, 25 bp, Homo sapien
cgactgtgtagaacgcagacaggaa

SEQ ID NO: 1257619 - DNA, 25 bp, Homo sapien
aaagaggaggtgccctagcaggaca

SEQ ID NO: 1257620 - DNA, 25 bp, Homo sapien
tggaaagaggaggtgccctagcagg

SEQ ID NO: 1257621 - DNA, 25 bp, Homo sapien
gaaagaggaggtgccctagcaggac

SEQ ID NO: 1257622 - DNA, 25 bp, Homo sapien
tatggaaagaggaggtgccctagca

SEQ ID NO: 1257623 - DNA, 25 bp, Homo sapien
aacaattcctatgtgtacatcctcc

SEQ ID NO: 1257624 - DNA, 25 bp, Homo sapien
cttcacagccctcaaatagagagtg

SEQ ID NO: 1257625 - DNA, 25 bp, Homo sapien
ctcccatgggagaggaccatagtca

SEQ ID NO: 1257626 - DNA, 25 bp, Homo sapien
gagaggaccatagtcaatgaattct

SEQ ID NO: 1257627 - DNA, 25 bp, Homo sapien
gttaaactcacgacgattttgattg

SEQ ID NO: 1257628 - DNA, 25 bp, Homo sapien
cgattcctgcttcaagaccccaact

SEQ ID NO: 1257629 - DNA, 25 bp, Homo sapien
taaactcacgacgattttgattgac

SEQ ID NO: 1257630 - DNA, 25 bp, Homo sapien
actcacgacgattttgattgaccat

SEQ ID NO: 1257631 - DNA, 25 bp, Homo sapien
tcatgttgagctataagtcaggctc

SEQ ID NO: 1257632 - DNA, 25 bp, Homo sapien
tccaacaagaacacccaaagtttgc

SEQ ID NO: 1257633 - DNA, 25 bp, Homo sapien
ccaaagtttgcaacatagcatgaga

SEQ ID NO: 1257634 - DNA, 25 bp, Homo sapien
tattgctctaaagctactgccagtg

SEQ ID NO: 1257635 - DNA, 25 bp, Homo sapien
taaattcatcagcacagccgtgagg

SEQ ID NO: 1257636 - DNA, 25 bp, Homo sapien
tgacaacaatgaggtgaggcacaca

SEQ ID NO: 1257637 - DNA, 25 bp, Homo sapien
tccagctgtgtacaagagtcccaag

SEQ ID NO: 1257638 - DNA, 25 bp, Homo sapien
ccacaggactttactcagagcggat

SEQ ID NO: 1257639 - DNA, 25 bp, Homo sapien
gacatctgctttacgtcgactacag

SEQ ID NO: 1257640 - DNA, 25 bp, Homo sapien
gggaacatgctcatcattgcgacga

SEQ ID NO: 1257641 - DNA, 25 bp, Homo sapien
ggtagtgaatatcttgactggcacc

SEQ ID NO: 1257642 - DNA, 25 bp, Homo sapien
cgacgattggctttgactctcacct

SEQ ID NO: 1257643 - DNA, 25 bp, Homo sapien
aagccaacgcaaaaattatttaatg

SEQ ID NO: 1257644 - DNA, 25 bp, Homo sapien
tgtaagtgctgagagaaagagaatg

SEQ ID NO: 1257645 - DNA, 25 bp, Homo sapien
gtttggtatttcatgtaaagagaaa

SEQ ID NO: 1257646 - DNA, 25 bp, Homo sapien
gaagaaggaaaacacttataagcca

SEQ ID NO: 1257647 - DNA, 25 bp, Homo sapien
ctgagacatgtgtaaaattcaccat

SEQ ID NO: 1257648 - DNA, 25 bp, Homo sapien
tccgccaaaggaaattgtgtggtcc

SEQ ID NO: 1257649 - DNA, 25 bp, Homo sapien
cagctatgccatacaggatcagaaa

SEQ ID NO: 1257650 - DNA, 25 bp, Homo sapien
gctttgcaggaaggcatacattggg

SEQ ID NO: 1257651 - DNA, 25 bp, Homo sapien
ttgcatggagttcgccagagccctg

SEQ ID NO: 1257652 - DNA, 25 bp, Homo sapien
ccacagaaaggcaacctgaaggtca

SEQ ID NO: 1257653 - DNA, 25 bp, Homo sapien
ggtatctgaacatgagagggacaag

SEQ ID NO: 1257654 - DNA, 25 bp, Homo sapien
aaagtcgttgatctcattggaccca

SEQ ID NO: 1257655 - DNA, 25 bp, Homo sapien
gcattgactacaccccacaagtagg

SEQ ID NO: 1257656 - DNA, 25 bp, Homo sapien
ctagcgtccctgcatggtcgggatc

SEQ ID NO: 1257657 - DNA, 25 bp, Homo sapien
tgatgtaaatgtatgagaccaggac

SEQ ID NO: 1257658 - DNA, 25 bp, Homo sapien
tgagatgatgtaaatgtatgagacc

SEQ ID NO: 1257659 - DNA, 25 bp, Homo sapien
catggtcgggatcctcagaattgtt

SEQ ID NO: 1257660 - DNA, 25 bp, Homo sapien
gaccatagtgtagaatatggacact

SEQ ID NO: 1257661 - DNA, 25 bp, Homo sapien
cactcctgttaggtgggaagcgcac

SEQ ID NO: 1257662 - DNA, 25 bp, Homo sapien
aacagtaccaaaaaacaagcacact

SEQ ID NO: 1257663 - DNA, 25 bp, Homo sapien
gatggcactgggttgtgcatacatg

SEQ ID NO: 1257664 - DNA, 25 bp, Homo sapien
tcacaaagacagcttctgcatgctc

SEQ ID NO: 1257665 - DNA, 25 bp, Homo sapien
tctgcatgctccgtctcagagcctg

SEQ ID NO: 1257666 - DNA, 25 bp, Homo sapien
tgctccgtctcagagcctgcttgac

SEQ ID NO: 1257667 - DNA, 25 bp, Homo sapien
acaaagacagcttctgcatgctccg

SEQ ID NO: 1257668 - DNA, 25 bp, Homo sapien
ccatgggtagcagcgctttggggcg

SEQ ID NO: 1257669 - DNA, 25 bp, Homo sapien
tagcagcgctttggggcgaggtcca

SEQ ID NO: 1257670 - DNA, 25 bp, Homo sapien
ctaagacataacctccatgggtagc

SEQ ID NO: 1257671 - DNA, 25 bp, Homo sapien
ggcgaggtccaggatgactgaggag

SEQ ID NO: 1257672 - DNA, 25 bp, Homo sapien
tgttttctgacggagttggaccaag

SEQ ID NO: 1257673 - DNA, 25 bp, Homo sapien
cagtcgccgccagtctgcattttat

SEQ ID NO: 1257674 - DNA, 25 bp, Homo sapien
agaaactaagaagccctggaatgcc

SEQ ID NO: 1257675 - DNA, 25 bp, Homo sapien
tatatatccgtctattcagtcgccg

SEQ ID NO: 1257676 - DNA, 25 bp, Homo sapien
caacattatcttctgctggcctaga

SEQ ID NO: 1257677 - DNA, 25 bp, Homo sapien
tgccaccaggagacccaacaaaaat

SEQ ID NO: 1257678 - DNA, 25 bp, Homo sapien
ctagatgaaatcagcctactacccc

SEQ ID NO: 1257679 - DNA, 25 bp, Homo sapien
ggttgaccggaattatctagatgaa

SEQ ID NO: 1257680 - DNA, 25 bp, Homo sapien
ttcctgcacgtcaaacagatgaagc

SEQ ID NO: 1257681 - DNA, 25 bp, Homo sapien
gttcctgcacgtcaaacagatgaag

SEQ ID NO: 1257682 - DNA, 25 bp, Homo sapien
actgcaggtagctgacatggtggtg

SEQ ID NO: 1257683 - DNA, 25 bp, Homo sapien
ccagcattttgacttatatatagtc

SEQ ID NO: 1257684 - DNA, 25 bp, Homo sapien
acatttagctgtggactgggcatga

SEQ ID NO: 1257685 - DNA, 25 bp, Homo sapien
taagtcacttggaggcccagaaaac

SEQ ID NO: 1257686 - DNA, 25 bp, Homo sapien
attagcagtaatcttatcatcctgg

SEQ ID NO: 1257687 - DNA, 25 bp, Homo sapien
tgcttgtcggcatctttgatgctga

SEQ ID NO: 1257688 - DNA, 25 bp, Homo sapien
gaatcaggataaaacggccaaagac

SEQ ID NO: 1257689 - DNA, 25 bp, Homo sapien
gcattgcgagacgatgtccaggtaa

SEQ ID NO: 1257690 - DNA, 25 bp, Homo sapien
gaaggtcagtggcatatctggaaga

SEQ ID NO: 1257691 - DNA, 25 bp, Homo sapien
atagataccctgcaggttgaagttc

SEQ ID NO: 1257692 - DNA, 25 bp, Homo sapien
attggaatagataccctgcaggttg

SEQ ID NO: 1257693 - DNA, 25 bp, Homo sapien
agataccctgcaggttgaagttcct

SEQ ID NO: 1257694 - DNA, 25 bp, Homo sapien
tcaacagtgtccaacaaagggagcc

SEQ ID NO: 1257695 - DNA, 25 bp, Homo sapien
ctggtgaatgctctacctggacata

SEQ ID NO: 1257696 - DNA, 25 bp, Homo sapien
tgaatgctctacctggacatactac

SEQ ID NO: 1257697 - DNA, 25 bp, Homo sapien
acagtgtccaacaaagggagccaga

SEQ ID NO: 1257698 - DNA, 25 bp, Homo sapien
gaaaagccataccagtgattctatt

SEQ ID NO: 1257699 - DNA, 25 bp, Homo sapien
ttcagcaatgtctttatctagatcc

SEQ ID NO: 1257700 - DNA, 25 bp, Homo sapien
gaatagtgaccctaacacgcttttc

SEQ ID NO: 1257701 - DNA, 25 bp, Homo sapien
gtctttatctagatccatcttctgg

SEQ ID NO: 1257702 - DNA, 25 bp, Homo sapien
cgcctcccggagggctgcgctcccg

SEQ ID NO: 1257703 - DNA, 25 bp, Homo sapien
cctcccggagggctgcgctcccggc

SEQ ID NO: 1257704 - DNA, 25 bp, Homo sapien
gacccgcctcccggagggctgcgct

SEQ ID NO: 1257705 - DNA, 25 bp, Homo sapien
cccgcctcccggagggctgcgctcc

SEQ ID NO: 1257706 - DNA, 25 bp, Homo sapien
ccgggcaccgcgcatcctcgcgcag

SEQ ID NO: 1257707 - DNA, 25 bp, Homo sapien
ggcaccgcgcatcctcgcgcagccg

SEQ ID NO: 1257708 - DNA, 25 bp, Homo sapien
gcacaccgggcaccgcgcatcctcg

SEQ ID NO: 1257709 - DNA, 25 bp, Homo sapien
aggcacaccgggcaccgcgcatcct

SEQ ID NO: 1257710 - DNA, 25 bp, Homo sapien
gtccgacttctcgcagaactcggag

SEQ ID NO: 1257711 - DNA, 25 bp, Homo sapien
ccgccctgcgcgccgtccgacttct

SEQ ID NO: 1257712 - DNA, 25 bp, Homo sapien
tgcggacaggcgtagacgccgccct

SEQ ID NO: 1257713 - DNA, 25 bp, Homo sapien
ccgacttctcgcagaactcggagat

SEQ ID NO: 1257714 - DNA, 25 bp, Homo sapien
ccgtgccgcgcgcatcgccgcgccc

SEQ ID NO: 1257715 - DNA, 25 bp, Homo sapien
ctcgccgtgccgcgcgcatcgccgc

SEQ ID NO: 1257716 - DNA, 25 bp, Homo sapien
tcgccgtgccgcgcgcatcgccgcg

SEQ ID NO: 1257717 - DNA, 25 bp, Homo sapien
tgccgcgcgcatcgccgcgccccgg

SEQ ID NO: 1257718 - DNA, 25 bp, Homo sapien
tgcagcggcgccgtgcggtgcgtcc

SEQ ID NO: 1257719 - DNA, 25 bp, Homo sapien
ccgtgcggtgcgtcctgtgctcggg

SEQ ID NO: 1257720 - DNA, 25 bp, Homo sapien
gggccggcgtcgcacacccagcaca

SEQ ID NO: 1257721 - DNA, 25 bp, Homo sapien
ggcgccgtgcggtgcgtcctgtgct

SEQ ID NO: 1257722 - DNA, 25 bp, Homo sapien
ggaacccgtacccagctcgacactc

SEQ ID NO: 1257723 - DNA, 25 bp, Homo sapien
aacccgtacccagctcgacactctt

SEQ ID NO: 1257724 - DNA, 25 bp, Homo sapien
tcggaacccgtacccagctcgacac

SEQ ID NO: 1257725 - DNA, 25 bp, Homo sapien
gtcggaacccgtacccagctcgaca

SEQ ID NO: 1257726 - DNA, 25 bp, Homo sapien
tgctgatggagagccacccgctcct

SEQ ID NO: 1257727 - DNA, 25 bp, Homo sapien
ctcttcattgaggatgttcgaatcc

SEQ ID NO: 1257728 - DNA, 25 bp, Homo sapien
gggctacaccccaaatgaagcacct

SEQ ID NO: 1257729 - DNA, 25 bp, Homo sapien
gatgttcgaatcctaagtccccaaa

SEQ ID NO: 1257730 - DNA, 25 bp, Homo sapien
caccagtaggaagaaatcgacacac

SEQ ID NO: 1257731 - DNA, 25 bp, Homo sapien
caagaacttttgaagggcaccagta

SEQ ID NO: 1257732 - DNA, 25 bp, Homo sapien
atccaagaacttttgaagggcacca

SEQ ID NO: 1257733 - DNA, 25 bp, Homo sapien
gaagggcaccagtaggaagaaatcg

SEQ ID NO: 1257734 - DNA, 25 bp, Homo sapien
ggcgtcctccaactctttcctcata

SEQ ID NO: 1257735 - DNA, 25 bp, Homo sapien
agtcaaggcgtcctccaactctttc

SEQ ID NO: 1257736 - DNA, 25 bp, Homo sapien
ctcctgagtcaaggcgtcctccaac

SEQ ID NO: 1257737 - DNA, 25 bp, Homo sapien
ctgagtcaaggcgtcctccaactct

SEQ ID NO: 1257738 - DNA, 25 bp, Homo sapien
aactccaatctgaagcgctgcctct

SEQ ID NO: 1257739 - DNA, 25 bp, Homo sapien
gtctctgcagcgtcgctcgctcctc

SEQ ID NO: 1257740 - DNA, 25 bp, Homo sapien
ccgcctcagctgccgttgctcctcc

SEQ ID NO: 1257741 - DNA, 25 bp, Homo sapien
tcccgcagtctctgcagcgtcgctc

SEQ ID NO: 1257742 - DNA, 25 bp, Homo sapien
gcagacccagggccgggcgctggca

SEQ ID NO: 1257743 - DNA, 25 bp, Homo sapien
tccagcagacccagggccgggcgct

SEQ ID NO: 1257744 - DNA, 25 bp, Homo sapien
ctccagcagacccagggccgggcgc

SEQ ID NO: 1257745 - DNA, 25 bp, Homo sapien
cagcagacccagggccgggcgctgg

SEQ ID NO: 1257746 - DNA, 25 bp, Homo sapien
aagaacataaacgccaaagtgtttg

SEQ ID NO: 1257747 - DNA, 25 bp, Homo sapien
gtgtttgtctctgaaagccattgta

SEQ ID NO: 1257748 - DNA, 25 bp, Homo sapien
acataaacgccaaagtgtttgtctc

SEQ ID NO: 1257749 - DNA, 25 bp, Homo sapien
aaagtgtttgtctctgaaagccatt

SEQ ID NO: 1257750 - DNA, 25 bp, Homo sapien
cttctgagtaaatttgagggtgccc

SEQ ID NO: 1257751 - DNA, 25 bp, Homo sapien
ttctgagtaaatttgagggtgccct

SEQ ID NO: 1257752 - DNA, 25 bp, Homo sapien
tctgagtaaatttgagggtgccctt

SEQ ID NO: 1257753 - DNA, 25 bp, Homo sapien
ctgagtaaatttgagggtgcccttt

SEQ ID NO: 1257754 - DNA, 25 bp, Homo sapien
tgcacgggagtccacgtaatccctc

SEQ ID NO: 1257755 - DNA, 25 bp, Homo sapien
aatcccaaacagactgggaggaagc

SEQ ID NO: 1257756 - DNA, 25 bp, Homo sapien
gaagctgcacgggagtccacgtaat

SEQ ID NO: 1257757 - DNA, 25 bp, Homo sapien
tactcgtctttctgctctctaatcc

SEQ ID NO: 1257758 - DNA, 25 bp, Homo sapien
ggagataggagtcggtccagataaa

SEQ ID NO: 1257759 - DNA, 25 bp, Homo sapien
gcatcacttagtttagaatcccctg

SEQ ID NO: 1257760 - DNA, 25 bp, Homo sapien
gaatccgtgggtcagcttttaaatg

SEQ ID NO: 1257761 - DNA, 25 bp, Homo sapien
ttagaatcccctgcgtgagtcactg

SEQ ID NO: 1257762 - DNA, 25 bp, Homo sapien
cttggaacttccttaagagctccct

SEQ ID NO: 1257763 - DNA, 25 bp, Homo sapien
tcccagggatgcagcatgctgtctt

SEQ ID NO: 1257764 - DNA, 25 bp, Homo sapien
tcctcccagggatgcagcatgctgt

SEQ ID NO: 1257765 - DNA, 25 bp, Homo sapien
tggaacttccttaagagctccctcc

SEQ ID NO: 1257766 - DNA, 25 bp, Homo sapien
tattgatacccaacctgagtggtca

SEQ ID NO: 1257767 - DNA, 25 bp, Homo sapien
agtggtcacgtaactgcgcattgca

SEQ ID NO: 1257768 - DNA, 25 bp, Homo sapien
caaagagtttatgtggtcttcccaa

SEQ ID NO: 1257769 - DNA, 25 bp, Homo sapien
tattatgtaaccaccctgagggtca

SEQ ID NO: 1257770 - DNA, 25 bp, Homo sapien
caggtcggcggtcaagagcagactc

SEQ ID NO: 1257771 - DNA, 25 bp, Homo sapien
gatgcagggccatgtgtcaaatcgc

SEQ ID NO: 1257772 - DNA, 25 bp, Homo sapien
gccgtggcgggatccagctttacat

SEQ ID NO: 1257773 - DNA, 25 bp, Homo sapien
atcctgcacactgcgcaggtcggcg

SEQ ID NO: 1257774 - DNA, 25 bp, Homo sapien
ttcttggcagtgtgtcttgacagac

SEQ ID NO: 1257775 - DNA, 25 bp, Homo sapien
tcattccctttcagcagccacaggg

SEQ ID NO: 1257776 - DNA, 25 bp, Homo sapien
tgtgtcttgacagacccctaaaccc

SEQ ID NO: 1257777 - DNA, 25 bp, Homo sapien
ttctcaggagatggcgtggtttccc

SEQ ID NO: 1257778 - DNA, 25 bp, Homo sapien
caagataagaggagttgcatcacag

SEQ ID NO: 1257779 - DNA, 25 bp, Homo sapien
tcccaatgcagcgaggactttccag

SEQ ID NO: 1257780 - DNA, 25 bp, Homo sapien
aaatttcaccggcttcatagtccaa

SEQ ID NO: 1257781 - DNA, 25 bp, Homo sapien
tttcctgaccctgctattgttgtgg

SEQ ID NO: 1257782 - DNA, 25 bp, Homo sapien
cttacatcagaagcaggatctaaat

SEQ ID NO: 1257783 - DNA, 25 bp, Homo sapien
cagaagcaggatctaaatgatccct

SEQ ID NO: 1257784 - DNA, 25 bp, Homo sapien
agcaggatctaaatgatccctggat

SEQ ID NO: 1257785 - DNA, 25 bp, Homo sapien
catcagaagcaggatctaaatgatc

SEQ ID NO: 1257786 - DNA, 25 bp, Homo sapien
tccaggaacgttcgctacgctagga

SEQ ID NO: 1257787 - DNA, 25 bp, Homo sapien
tacgctaggactgcatcttgggaac

SEQ ID NO: 1257788 - DNA, 25 bp, Homo sapien
tccagaaggaagcaacaggttaaac

SEQ ID NO: 1257789 - DNA, 25 bp, Homo sapien
cagtgaggccagtataattgttcca

SEQ ID NO: 1257790 - DNA, 25 bp, Homo sapien
gaaagtactcaatcggatgcctggc

SEQ ID NO: 1257791 - DNA, 25 bp, Homo sapien
ttctgaaggtaggaccaacagggct

SEQ ID NO: 1257792 - DNA, 25 bp, Homo sapien
tacacagaccttgcatgaacgaggg

SEQ ID NO: 1257793 - DNA, 25 bp, Homo sapien
tgctaaaggaatcagcccagctgct

SEQ ID NO: 1257794 - DNA, 25 bp, Homo sapien
tatcgtttaggtgaagaaaggcaac

SEQ ID NO: 1257795 - DNA, 25 bp, Homo sapien
ggcgtggatgcaccatatcgtttag

SEQ ID NO: 1257796 - DNA, 25 bp, Homo sapien
gacactccatttctggatggcgtgg

SEQ ID NO: 1257797 - DNA, 25 bp, Homo sapien
aatgcacagtaacagggaagcgacg

SEQ ID NO: 1257798 - DNA, 25 bp, Homo sapien
tctgctcactgtgacttgcaacctc

SEQ ID NO: 1257799 - DNA, 25 bp, Homo sapien
gaacccattgtcctacatagtgaaa

SEQ ID NO: 1257800 - DNA, 25 bp, Homo sapien
gaaagaacccattgtcctacatagt

SEQ ID NO: 1257801 - DNA, 25 bp, Homo sapien
tacattaaggagctacagcatggcc

SEQ ID NO: 1257802 - DNA, 25 bp, Homo sapien
ctgctgctgaacagaaatatcaatc

SEQ ID NO: 1257803 - DNA, 25 bp, Homo sapien
tctactgctgctgaacagaaatatc

SEQ ID NO: 1257804 - DNA, 25 bp, Homo sapien
tactgctgctgaacagaaatatcaa

SEQ ID NO: 1257805 - DNA, 25 bp, Homo sapien
ctctactgctgctgaacagaaatat

SEQ ID NO: 1257806 - DNA, 25 bp, Homo sapien
tgggtgctgccattggttccatcca

SEQ ID NO: 1257807 - DNA, 25 bp, Homo sapien
tccattaaggttgtagagcagctgg

SEQ ID NO: 1257808 - DNA, 25 bp, Homo sapien
caggaggtacgcgatcaggatgacc

SEQ ID NO: 1257809 - DNA, 25 bp, Homo sapien
cagagaatcccagtaggatgaaatg

SEQ ID NO: 1257810 - DNA, 25 bp, Homo sapien
tggtccacctcgtggtgcccacagc

SEQ ID NO: 1257811 - DNA, 25 bp, Homo sapien
acagtgctgacgcaggccatccgga

SEQ ID NO: 1257812 - DNA, 25 bp, Homo sapien
catggccaaggagttggccacccca

SEQ ID NO: 1257813 - DNA, 25 bp, Homo sapien
tcagggcgggcatctcacgcaggaa

SEQ ID NO: 1257814 - DNA, 25 bp, Homo sapien
caatgtagctgtaagagagcaggat

SEQ ID NO: 1257815 - DNA, 25 bp, Homo sapien
tcctgatgctgaccgaatttgtaac

SEQ ID NO: 1257816 - DNA, 25 bp, Homo sapien
gtaacacagccctcacaatgtagct

SEQ ID NO: 1257817 - DNA, 25 bp, Homo sapien
catgtacatgtagatgatgtttcca

SEQ ID NO: 1257818 - DNA, 25 bp, Homo sapien
agcaaccttcccagtgcccccttca

SEQ ID NO: 1257819 - DNA, 25 bp, Homo sapien
ttactcctttcctagctctctcttc

SEQ ID NO: 1257820 - DNA, 25 bp, Homo sapien
tctcttccccagaagcaaccttccc

SEQ ID NO: 1257821 - DNA, 25 bp, Homo sapien
cctttcctagctctctcttccccag

SEQ ID NO: 1257822 - DNA, 25 bp, Homo sapien
gaggcacttggaccacgtggagaac

SEQ ID NO: 1257823 - DNA, 25 bp, Homo sapien
gaattcagccgttccagatgctgcc

SEQ ID NO: 1257824 - DNA, 25 bp, Homo sapien
gagaccccgtctcaattttaagagc

SEQ ID NO: 1257825 - DNA, 25 bp, Homo sapien
gcttaagcccaatagtcgaaggagc

SEQ ID NO: 1257826 - DNA, 25 bp, Homo sapien
agccttcatcaaacagcgattgcag

SEQ ID NO: 1257827 - DNA, 25 bp, Homo sapien
ctgcagccaaagcagccttcatcaa

SEQ ID NO: 1257828 - DNA, 25 bp, Homo sapien
acagcgattgcagcagaaaattttg

SEQ ID NO: 1257829 - DNA, 25 bp, Homo sapien
tcatcaaacagcgattgcagcagaa

SEQ ID NO: 1257830 - DNA, 25 bp, Homo sapien
gcaattgcaattaattagccgctta

SEQ ID NO: 1257831 - DNA, 25 bp, Homo sapien
gtgccagactggttcatatgttttc

SEQ ID NO: 1257832 - DNA, 25 bp, Homo sapien
cgcttaaattgtgccagactggttc

SEQ ID NO: 1257833 - DNA, 25 bp, Homo sapien
tgttttcagagaataatctcaacaa

SEQ ID NO: 1257834 - DNA, 25 bp, Homo sapien
taggtgatagactgaaaacagtact

SEQ ID NO: 1257835 - DNA, 25 bp, Homo sapien
aaacagtactgaccttcttggatat

SEQ ID NO: 1257836 - DNA, 25 bp, Homo sapien
gacttatattctcaggtctggaaag

SEQ ID NO: 1257837 - DNA, 25 bp, Homo sapien
tcctttctaaagagggtgacttata

SEQ ID NO: 1257838 - DNA, 25 bp, Homo sapien
aaatggagaaaaagaagacagagtg

SEQ ID NO: 1257839 - DNA, 25 bp, Homo sapien
tggagaaaaagaagacagagtgttt

SEQ ID NO: 1257840 - DNA, 25 bp, Homo sapien
aatggagaaaaagaagacagagtgt

SEQ ID NO: 1257841 - DNA, 25 bp, Homo sapien
agaaaaagaagacagagtgtttatc

SEQ ID NO: 1257842 - DNA, 25 bp, Homo sapien
aaataagaggtatagctcccatttt

SEQ ID NO: 1257843 - DNA, 25 bp, Homo sapien
gaaataagaggtatagctcccattt

SEQ ID NO: 1257844 - DNA, 25 bp, Homo sapien
tgggctctggtgtggttaaagagtc

SEQ ID NO: 1257845 - DNA, 25 bp, Homo sapien
agaggacttggtgggctctggtgtg

SEQ ID NO: 1257846 - DNA, 25 bp, Homo sapien
gaagaggacttggtgggctctggtg

SEQ ID NO: 1257847 - DNA, 25 bp, Homo sapien
cttggtgggctctggtgtggttaaa

SEQ ID NO: 1257848 - DNA, 25 bp, Homo sapien
tacttccggtcaagtagtcagccgc

SEQ ID NO: 1257849 - DNA, 25 bp, Homo sapien
catgagggaattgccaaacagggag

SEQ ID NO: 1257850 - DNA, 25 bp, Homo sapien
gaaaccagcatcacgtccatgaggg

SEQ ID NO: 1257851 - DNA, 25 bp, Homo sapien
cagcgcgggagatggccttacttcc

SEQ ID NO: 1257852 - DNA, 25 bp, Homo sapien
ctcatgagagtgggatatcggagtg

SEQ ID NO: 1257853 - DNA, 25 bp, Homo sapien
gagtgggtggcagacagccgcatag

SEQ ID NO: 1257854 - DNA, 25 bp, Homo sapien
tgagagtgggatatcggagtgggtg

SEQ ID NO: 1257855 - DNA, 25 bp, Homo sapien
ggagtgggtggcagacagccgcata

SEQ ID NO: 1257856 - DNA, 25 bp, Homo sapien
tgcaccgcaatatgggaagctcagg

SEQ ID NO: 1257857 - DNA, 25 bp, Homo sapien
aagtgatcgatctcgtgtgcaccgc

SEQ ID NO: 1257858 - DNA, 25 bp, Homo sapien
gaagctcagggtagcaacagcctgc

SEQ ID NO: 1257859 - DNA, 25 bp, Homo sapien
gaacagcagcgaggatgagaccata

SEQ ID NO: 1257860 - DNA, 25 bp, Homo sapien
cacgacttaaggccacacaccgacc

SEQ ID NO: 1257861 - DNA, 25 bp, Homo sapien
ttattcacgacttaaggccacacac

SEQ ID NO: 1257862 - DNA, 25 bp, Homo sapien
cgacttaaggccacacaccgaccca

SEQ ID NO: 1257863 - DNA, 25 bp, Homo sapien
attcacgacttaaggccacacaccg

SEQ ID NO: 1257864 - DNA, 25 bp, Homo sapien
accacgttccgctccgcacaggaca

SEQ ID NO: 1257865 - DNA, 25 bp, Homo sapien
taccacgttccgctccgcacaggac

SEQ ID NO: 1257866 - DNA, 25 bp, Homo sapien
ccacgttccgctccgcacaggacat

SEQ ID NO: 1257867 - DNA, 25 bp, Homo sapien
cttaccacgttccgctccgcacagg

SEQ ID NO: 1257868 - DNA, 25 bp, Homo sapien
attctgatggcccatcatgaattct

SEQ ID NO: 1257869 - DNA, 25 bp, Homo sapien
aaaactaagaagaagaccacacttg

SEQ ID NO: 1257870 - DNA, 25 bp, Homo sapien
ctgatggcccatcatgaattctcta

SEQ ID NO: 1257871 - DNA, 25 bp, Homo sapien
aagaagaccacacttgttggggaag

SEQ ID NO: 1257872 - DNA, 25 bp, Homo sapien
gagtcactgcgaatgaggaggatca

SEQ ID NO: 1257873 - DNA, 25 bp, Homo sapien
aaatgaaatagttctgctgcctgac

SEQ ID NO: 1257874 - DNA, 25 bp, Homo sapien
tggaacccacaacctgcaaatgaaa

SEQ ID NO: 1257875 - DNA, 25 bp, Homo sapien
tcataagaatcggatagcgcagcgg

SEQ ID NO: 1257876 - DNA, 25 bp, Homo sapien
caggacaacttcaacatggcaggga

SEQ ID NO: 1257877 - DNA, 25 bp, Homo sapien
gaagtgatcaattgccctagagcca

SEQ ID NO: 1257878 - DNA, 25 bp, Homo sapien
actgcagtgcataagctgtgtggac

SEQ ID NO: 1257879 - DNA, 25 bp, Homo sapien
tcagcaggaagatcacagcacttac

SEQ ID NO: 1257880 - DNA, 25 bp, Homo sapien
gtggaaggaacaagtggaaaatgac

SEQ ID NO: 1257881 - DNA, 25 bp, Homo sapien
tgggtgtgaggatcgtatagaatat

SEQ ID NO: 1257882 - DNA, 25 bp, Homo sapien
aggaacttatcctggcctggagtgt

SEQ ID NO: 1257883 - DNA, 25 bp, Homo sapien
gaatattgccaggaacttatcctgg

SEQ ID NO: 1257884 - DNA, 25 bp, Homo sapien
aaatggcccatagtacatcgtgacc

SEQ ID NO: 1257885 - DNA, 25 bp, Homo sapien
ttttgagcatatttttcatcaccgc

SEQ ID NO: 1257886 - DNA, 25 bp, Homo sapien
gcatatttttcatcaccgccagaac

SEQ ID NO: 1257887 - DNA, 25 bp, Homo sapien
gagcatatttttcatcaccgccaga

SEQ ID NO: 1257888 - DNA, 25 bp, Homo sapien
tgagcatatttttcatcaccgccag

SEQ ID NO: 1257889 - DNA, 25 bp, Homo sapien
ttaacatagaaatagacagaacaca

SEQ ID NO: 1257890 - DNA, 25 bp, Homo sapien
tagaaatagacagaacacacattca

SEQ ID NO: 1257891 - DNA, 25 bp, Homo sapien
catagaaatagacagaacacacatt

SEQ ID NO: 1257892 - DNA, 25 bp, Homo sapien
cacacattcaggaattttcctattc

SEQ ID NO: 1257893 - DNA, 25 bp, Homo sapien
cccagcgagtgagcccagggcgcag

SEQ ID NO: 1257894 - DNA, 25 bp, Homo sapien
ccccagcgagtgagcccagggcgca

SEQ ID NO: 1257895 - DNA, 25 bp, Homo sapien
tgataaagaggctccacctggtggc

SEQ ID NO: 1257896 - DNA, 25 bp, Homo sapien
tagagcagagcccttcctttcgaga

SEQ ID NO: 1257897 - DNA, 25 bp, Homo sapien
ttcacgctctcatcgtggtcggcgg

SEQ ID NO: 1257898 - DNA, 25 bp, Homo sapien
cctttcgagagggtcttcacgctct

SEQ ID NO: 1257899 - DNA, 25 bp, Homo sapien
gagggctgacagtcgggagcaagaa

SEQ ID NO: 1257900 - DNA, 25 bp, Homo sapien
gccccaataagatgaaatcagttga

SEQ ID NO: 1257901 - DNA, 25 bp, Homo sapien
gaaatcagttgatgtttgattgtaa

SEQ ID NO: 1257902 - DNA, 25 bp, Homo sapien
cagttgatgtttgattgtaattttc

SEQ ID NO: 1257903 - DNA, 25 bp, Homo sapien
aacagccccaataagatgaaatcag

SEQ ID NO: 1257904 - DNA, 25 bp, Homo sapien
tggacaggtttccaattagagccat

SEQ ID NO: 1257905 - DNA, 25 bp, Homo sapien
agatgggtgtccaagaagatgagaa

SEQ ID NO: 1257906 - DNA, 25 bp, Homo sapien
gaagaatcatggacaggtttccaat

SEQ ID NO: 1257907 - DNA, 25 bp, Homo sapien
gaagatgagaagaatcatggacagg

SEQ ID NO: 1257908 - DNA, 25 bp, Homo sapien
cttctgcacctcctaatgccaagaa

SEQ ID NO: 1257909 - DNA, 25 bp, Homo sapien
ttctgcacctcctaatgccaagaag

SEQ ID NO: 1257910 - DNA, 25 bp, Homo sapien
gcttctgcacctcctaatgccaaga

SEQ ID NO: 1257911 - DNA, 25 bp, Homo sapien
tctgcacctcctaatgccaagaaga

SEQ ID NO: 1257912 - DNA, 25 bp, Homo sapien
agatttcatgtggtagacagcaaag

SEQ ID NO: 1257913 - DNA, 25 bp, Homo sapien
gattgatggccctggatcggcaata

SEQ ID NO: 1257914 - DNA, 25 bp, Homo sapien
gatttcatgtggtagacagcaaaga

SEQ ID NO: 1257915 - DNA, 25 bp, Homo sapien
cagatttcatgtggtagacagcaaa

SEQ ID NO: 1257916 - DNA, 25 bp, Homo sapien
attctctgactcactcgtgtcaggg

SEQ ID NO: 1257917 - DNA, 25 bp, Homo sapien
ttctctgactcactcgtgtcagggc

SEQ ID NO: 1257918 - DNA, 25 bp, Homo sapien
tctctgactcactcgtgtcagggcc

SEQ ID NO: 1257919 - DNA, 25 bp, Homo sapien
gattctctgactcactcgtgtcagg

SEQ ID NO: 1257920 - DNA, 25 bp, Homo sapien
aagagggtggcaatgacgacaaaga

SEQ ID NO: 1257921 - DNA, 25 bp, Homo sapien
taaagagggtggcaatgacgacaaa

SEQ ID NO: 1257922 - DNA, 25 bp, Homo sapien
tattggaaaagaccaacaagtagaa

SEQ ID NO: 1257923 - DNA, 25 bp, Homo sapien
ctgtaaagagggtggcaatgacgac

SEQ ID NO: 1257924 - DNA, 25 bp, Homo sapien
ggatcagcatgatatttcctgtcag

SEQ ID NO: 1257925 - DNA, 25 bp, Homo sapien
gctgactgccatcttgggcactgtg

SEQ ID NO: 1257926 - DNA, 25 bp, Homo sapien
catgaggtcaacgatggagagctga

SEQ ID NO: 1257927 - DNA, 25 bp, Homo sapien
ttcagtcgaatgaggtggatcagca

SEQ ID NO: 1257928 - DNA, 25 bp, Homo sapien
cataagcataggataatgtaaaggg

SEQ ID NO: 1257929 - DNA, 25 bp, Homo sapien
aagcattgatagaaccactggccca

SEQ ID NO: 1257930 - DNA, 25 bp, Homo sapien
tatgtatgaaagcattgatagaacc

SEQ ID NO: 1257931 - DNA, 25 bp, Homo sapien
ggcttcagttccaccaagggccaag

SEQ ID NO: 1257932 - DNA, 25 bp, Homo sapien
atggtagtagcaagataataagtcc

SEQ ID NO: 1257933 - DNA, 25 bp, Homo sapien
gaaaaagtggttaatgagccgagac

SEQ ID NO: 1257934 - DNA, 25 bp, Homo sapien
ggaggactgtatactcatactggga

SEQ ID NO: 1257935 - DNA, 25 bp, Homo sapien
tgtcctgacacaccaatgatagtag

SEQ ID NO: 1257936 - DNA, 25 bp, Homo sapien
tctggaataccacaataagcacacg

SEQ ID NO: 1257937 - DNA, 25 bp, Homo sapien
tgccaccgccttatcccgtgaaggg

SEQ ID NO: 1257938 - DNA, 25 bp, Homo sapien
tggttgcatagaacaggcttgccac

SEQ ID NO: 1257939 - DNA, 25 bp, Homo sapien
taagcacacgagcataggaagccag

SEQ ID NO: 1257940 - DNA, 25 bp, Homo sapien
agcatatccaatatcccaacagtct

SEQ ID NO: 1257941 - DNA, 25 bp, Homo sapien
tacagcatatccaatatcccaacag

SEQ ID NO: 1257942 - DNA, 25 bp, Homo sapien
tttctacagcatatccaatatccca

SEQ ID NO: 1257943 - DNA, 25 bp, Homo sapien
tctacagcatatccaatatcccaac

SEQ ID NO: 1257944 - DNA, 25 bp, Homo sapien
atctcatcggtgcttttgctgctgg

SEQ ID NO: 1257945 - DNA, 25 bp, Homo sapien
catgtagatctcatcggtgcttttg

SEQ ID NO: 1257946 - DNA, 25 bp, Homo sapien
tggatcaccatgtagatctcatcgg

SEQ ID NO: 1257947 - DNA, 25 bp, Homo sapien
cccctggatcaccatgtagatctca

SEQ ID NO: 1257948 - DNA, 25 bp, Homo sapien
caatgaggtagagccgactaagtaa

SEQ ID NO: 1257949 - DNA, 25 bp, Homo sapien
attctggatggtgggaagatcccca

SEQ ID NO: 1257950 - DNA, 25 bp, Homo sapien
ttaaagccaatagcaaaatgagaac

SEQ ID NO: 1257951 - DNA, 25 bp, Homo sapien
ggatcacggactgattgccaattaa

SEQ ID NO: 1257952 - DNA, 25 bp, Homo sapien
aagtgtcgatagagcccattatcca

SEQ ID NO: 1257953 - DNA, 25 bp, Homo sapien
gcacatactatcttgctcatatgga

SEQ ID NO: 1257954 - DNA, 25 bp, Homo sapien
ccattatccaagatcctattatcat

SEQ ID NO: 1257955 - DNA, 25 bp, Homo sapien
ttatcatcagcacatactatcttgc

SEQ ID NO: 1257956 - DNA, 25 bp, Homo sapien
ggaacatgcaataccaataaaggta

SEQ ID NO: 1257957 - DNA, 25 bp, Homo sapien
gagattgcaggtatcttggatatag

SEQ ID NO: 1257958 - DNA, 25 bp, Homo sapien
tggtagacagtaaggagaacctcac

SEQ ID NO: 1257959 - DNA, 25 bp, Homo sapien
tgagaaagagggttgtgctcaaaaa

SEQ ID NO: 1257960 - DNA, 25 bp, Homo sapien
aggcagaaagtttgtcttcatcttc

SEQ ID NO: 1257961 - DNA, 25 bp, Homo sapien
ctaaggcagaaagtttgtcttcatc

SEQ ID NO: 1257962 - DNA, 25 bp, Homo sapien
atcttcacagggaagattctctgac

SEQ ID NO: 1257963 - DNA, 25 bp, Homo sapien
tcatcttcacagggaagattctctg

SEQ ID NO: 1257964 - DNA, 25 bp, Homo sapien
tcatgtagatgatacctgatgtgta

SEQ ID NO: 1257965 - DNA, 25 bp, Homo sapien
atgtagatgatacctgatgtgtacc

SEQ ID NO: 1257966 - DNA, 25 bp, Homo sapien
catgtagatgatacctgatgtgtac

SEQ ID NO: 1257967 - DNA, 25 bp, Homo sapien
gtggtggcgacaatcccaacaagat

SEQ ID NO: 1257968 - DNA, 25 bp, Homo sapien
aatggccaatttttggtggtggcga

SEQ ID NO: 1257969 - DNA, 25 bp, Homo sapien
ggcgacaatcccaacaagatgaaag

SEQ ID NO: 1257970 - DNA, 25 bp, Homo sapien
gccattaggaaaacgaaattaatga

SEQ ID NO: 1257971 - DNA, 25 bp, Homo sapien
tgagggagagctgactaagtaggaa

SEQ ID NO: 1257972 - DNA, 25 bp, Homo sapien
agggagagctgactaagtaggaaat

SEQ ID NO: 1257973 - DNA, 25 bp, Homo sapien
atgagggagagctgactaagtagga

SEQ ID NO: 1257974 - DNA, 25 bp, Homo sapien
ggagagctgactaagtaggaaatac

SEQ ID NO: 1257975 - DNA, 25 bp, Homo sapien
gagatagacttgtttccatacagaa

SEQ ID NO: 1257976 - DNA, 25 bp, Homo sapien
agatagacttgtttccatacagaaa

SEQ ID NO: 1257977 - DNA, 25 bp, Homo sapien
ctgctaaagtcaggaagaagaaact

SEQ ID NO: 1257978 - DNA, 25 bp, Homo sapien
tgatgtcaggagcagcgcttctgca

SEQ ID NO: 1257979 - DNA, 25 bp, Homo sapien
gatgtcaggagcagcgcttctgcac

SEQ ID NO: 1257980 - DNA, 25 bp, Homo sapien
gacccaggtatccgtgcaggctagg

SEQ ID NO: 1257981 - DNA, 25 bp, Homo sapien
ggagatcgcagggatcttgggcgta

SEQ ID NO: 1257982 - DNA, 25 bp, Homo sapien
ccaggtatccgtgcaggctagggtc

SEQ ID NO: 1257983 - DNA, 25 bp, Homo sapien
ccggccataggaacatgcaatacaa

SEQ ID NO: 1257984 - DNA, 25 bp, Homo sapien
gaatcactcgtgtcagggcccccat

SEQ ID NO: 1257985 - DNA, 25 bp, Homo sapien
tttctgaatcactcgtgtcagggcc

SEQ ID NO: 1257986 - DNA, 25 bp, Homo sapien
gaaaagattttctgaatcactcgtg

SEQ ID NO: 1257987 - DNA, 25 bp, Homo sapien
attttctgaatcactcgtgtcaggg

SEQ ID NO: 1257988 - DNA, 25 bp, Homo sapien
aacctgtaactggttgtgatcaatt

SEQ ID NO: 1257989 - DNA, 25 bp, Homo sapien
gtaaacaccactgcactcagaccag

SEQ ID NO: 1257990 - DNA, 25 bp, Homo sapien
ataggctagtcagatgaagcagtgg

SEQ ID NO: 1257991 - DNA, 25 bp, Homo sapien
cagtgggagtggaaaggaaccaaga

SEQ ID NO: 1257992 - DNA, 25 bp, Homo sapien
cacacacttgttatctgctatgact

SEQ ID NO: 1257993 - DNA, 25 bp, Homo sapien
taatcactatcacttacatccacac

SEQ ID NO: 1257994 - DNA, 25 bp, Homo sapien
tgctatgactgttgaataataaagc

SEQ ID NO: 1257995 - DNA, 25 bp, Homo sapien
ttgactgggtgtatcactgaagaga

SEQ ID NO: 1257996 - DNA, 25 bp, Homo sapien
ggtttccaattagagccattaggaa

SEQ ID NO: 1257997 - DNA, 25 bp, Homo sapien
atcatggataggtttccaattagag

SEQ ID NO: 1257998 - DNA, 25 bp, Homo sapien
taggtttccaattagagccattagg

SEQ ID NO: 1257999 - DNA, 25 bp, Homo sapien
ggataggtttccaattagagccatt

SEQ ID NO: 1258000 - DNA, 25 bp, Homo sapien
gatggtggcactcaaaagcactgtg

SEQ ID NO: 1258001 - DNA, 25 bp, Homo sapien
ggagtagcgcttctacaacggctaa

SEQ ID NO: 1258002 - DNA, 25 bp, Homo sapien
aaatgattgataaccctagatgggc

SEQ ID NO: 1258003 - DNA, 25 bp, Homo sapien
caacggctaaagtcgtgaagaagaa

SEQ ID NO: 1258004 - DNA, 25 bp, Homo sapien
gatcttggacgtagataggtgtaga

SEQ ID NO: 1258005 - DNA, 25 bp, Homo sapien
ggatcttggacgtagataggtgtag

SEQ ID NO: 1258006 - DNA, 25 bp, Homo sapien
gtgagggtggtgtagaagacagcca

SEQ ID NO: 1258007 - DNA, 25 bp, Homo sapien
gaagagtgtcctccggagtataggc

SEQ ID NO: 1258008 - DNA, 25 bp, Homo sapien
gagtataggcaaggacggctctcca

SEQ ID NO: 1258009 - DNA, 25 bp, Homo sapien
tctgcatgtctatagtaagaattat

SEQ ID NO: 1258010 - DNA, 25 bp, Homo sapien
caacacttgtctagaatgtcaatca

SEQ ID NO: 1258011 - DNA, 25 bp, Homo sapien
gaggtcaggtgcgtttgttcacacc

SEQ ID NO: 1258012 - DNA, 25 bp, Homo sapien
taaagccagacatgtataccaatag

SEQ ID NO: 1258013 - DNA, 25 bp, Homo sapien
gagaggtcaggtgcgtttgttcaca

SEQ ID NO: 1258014 - DNA, 25 bp, Homo sapien
atcaaaacagtatggcattggtata

SEQ ID NO: 1258015 - DNA, 25 bp, Homo sapien
taggaacacgcaatgccagtgaagg

SEQ ID NO: 1258016 - DNA, 25 bp, Homo sapien
gaagccatcttaggaacaatcgtag

SEQ ID NO: 1258017 - DNA, 25 bp, Homo sapien
caggtgtctgtacaggctaatgtca

SEQ ID NO: 1258018 - DNA, 25 bp, Homo sapien
tcagagatcgcagggatcttggaca

SEQ ID NO: 1258019 - DNA, 25 bp, Homo sapien
ccgagaagatattctgaatcactcg

SEQ ID NO: 1258020 - DNA, 25 bp, Homo sapien
cgagaagatattctgaatcactcgt

SEQ ID NO: 1258021 - DNA, 25 bp, Homo sapien
accgagaagatattctgaatcactc

SEQ ID NO: 1258022 - DNA, 25 bp, Homo sapien
ggatcacaggtgtggacatgttttt

SEQ ID NO: 1258023 - DNA, 25 bp, Homo sapien
tgtttttagggagtctgcatgggtg

SEQ ID NO: 1258024 - DNA, 25 bp, Homo sapien
ctgcatgggtgatgggctaaagtgt

SEQ ID NO: 1258025 - DNA, 25 bp, Homo sapien
gattgctgattggtcgaggcgtgag

SEQ ID NO: 1258026 - DNA, 25 bp, Homo sapien
tggagaagaaaccaagaaacctcta

SEQ ID NO: 1258027 - DNA, 25 bp, Homo sapien
ataggctagtcagatgaagcagtgg

SEQ ID NO: 1258028 - DNA, 25 bp, Homo sapien
actggttgtgatcaattagttgtaa

SEQ ID NO: 1258029 - DNA, 25 bp, Homo sapien
aaacaccactacacttggaccagcc

SEQ ID NO: 1258030 - DNA, 25 bp, Homo sapien
aatgagggtgaatacgaaaaggcca

SEQ ID NO: 1258031 - DNA, 25 bp, Homo sapien
atgagggtgaatacgaaaaggccaa

SEQ ID NO: 1258032 - DNA, 25 bp, Homo sapien
tgagggtgaatacgaaaaggccaat

SEQ ID NO: 1258033 - DNA, 25 bp, Homo sapien
gagaaaaatgagggtgaatacgaaa

SEQ ID NO: 1258034 - DNA, 25 bp, Homo sapien
ccttctgcaactgctaaagtcaaga

SEQ ID NO: 1258035 - DNA, 25 bp, Homo sapien
ggagcagcccttctgcaactgctaa

SEQ ID NO: 1258036 - DNA, 25 bp, Homo sapien
gcccttctgcaactgctaaagtcaa

SEQ ID NO: 1258037 - DNA, 25 bp, Homo sapien
agcagcccttctgcaactgctaaag

SEQ ID NO: 1258038 - DNA, 25 bp, Homo sapien
gtctgtgcaggctagcgtcaacata

SEQ ID NO: 1258039 - DNA, 25 bp, Homo sapien
ctctcatagacccaagtgtctgtgc

SEQ ID NO: 1258040 - DNA, 25 bp, Homo sapien
taagcaaagggtgcatagtagaagg

SEQ ID NO: 1258041 - DNA, 25 bp, Homo sapien
agtgtctgtgcaggctagcgtcaac

SEQ ID NO: 1258042 - DNA, 25 bp, Homo sapien
ttttctgaatcacttgtgtcagggc

SEQ ID NO: 1258043 - DNA, 25 bp, Homo sapien
gaatcacttgtgtcagggcccccat

SEQ ID NO: 1258044 - DNA, 25 bp, Homo sapien
ctgaatcacttgtgtcagggccccc

SEQ ID NO: 1258045 - DNA, 25 bp, Homo sapien
atcacttgtgtcagggcccccatca

SEQ ID NO: 1258046 - DNA, 25 bp, Homo sapien
tgtcttgcatgaaaatacccgtggc

SEQ ID NO: 1258047 - DNA, 25 bp, Homo sapien
cccgtggcaactgaggaggcaaatc

SEQ ID NO: 1258048 - DNA, 25 bp, Homo sapien
gcagaggagctgatcccaatccaag

SEQ ID NO: 1258049 - DNA, 25 bp, Homo sapien
cagagaatggacctaagcagataac

SEQ ID NO: 1258050 - DNA, 25 bp, Homo sapien
caagaaacctgtaactagttgtgat

SEQ ID NO: 1258051 - DNA, 25 bp, Homo sapien
caattagttgtaaacaccactacac

SEQ ID NO: 1258052 - DNA, 25 bp, Homo sapien
aacaccactacactccgaccagcca

SEQ ID NO: 1258053 - DNA, 25 bp, Homo sapien
cagtggagaaggaaccaagaaacct

SEQ ID NO: 1258054 - DNA, 25 bp, Homo sapien
gattgatggccctggattggcaata

SEQ ID NO: 1258055 - DNA, 25 bp, Homo sapien
gcttctgcacctcctaatgccgaga

SEQ ID NO: 1258056 - DNA, 25 bp, Homo sapien
tctgcacctcctaatgccgagaaga

SEQ ID NO: 1258057 - DNA, 25 bp, Homo sapien
ttctgcacctcctaatgccgagaag

SEQ ID NO: 1258058 - DNA, 25 bp, Homo sapien
ctacattttcccagagcagattctc

SEQ ID NO: 1258059 - DNA, 25 bp, Homo sapien
tttcccagagcagattctctgactc

SEQ ID NO: 1258060 - DNA, 25 bp, Homo sapien
acattttcccagagcagattctctg

SEQ ID NO: 1258061 - DNA, 25 bp, Homo sapien
tcccagagcagattctctgactcac

SEQ ID NO: 1258062 - DNA, 25 bp, Homo sapien
tgttcttcttaatgaccacaagggg

SEQ ID NO: 1258063 - DNA, 25 bp, Homo sapien
tgagtacagatactatgtcagtggg

SEQ ID NO: 1258064 - DNA, 25 bp, Homo sapien
gagcttattgctttcctgagccaga

SEQ ID NO: 1258065 - DNA, 25 bp, Homo sapien
caatgtagcaaatgacagtatattt

SEQ ID NO: 1258066 - DNA, 25 bp, Homo sapien
tcacatagccaatgactgctccctg

SEQ ID NO: 1258067 - DNA, 25 bp, Homo sapien
acatagccaatgactgctccctgac

SEQ ID NO: 1258068 - DNA, 25 bp, Homo sapien
tcgtcttctcctggaattaatgctt

SEQ ID NO: 1258069 - DNA, 25 bp, Homo sapien
ccttcgtcttctcctggaattaatg

SEQ ID NO: 1258070 - DNA, 25 bp, Homo sapien
ctgctgagagatccactgttaggct

SEQ ID NO: 1258071 - DNA, 25 bp, Homo sapien
gcatgattttgcagtggctagtacc

SEQ ID NO: 1258072 - DNA, 25 bp, Homo sapien
ttctgctgagagatccactgttagg

SEQ ID NO: 1258073 - DNA, 25 bp, Homo sapien
atgattttgcagtggctagtaccgg

SEQ ID NO: 1258074 - DNA, 25 bp, Homo sapien
gatttggttagtcatcttgggttac

SEQ ID NO: 1258075 - DNA, 25 bp, Homo sapien
agtcatcttgggttactgatttttc

SEQ ID NO: 1258076 - DNA, 25 bp, Homo sapien
gcccagcatattgatttggttagtc

SEQ ID NO: 1258077 - DNA, 25 bp, Homo sapien
tcctgcccagcatattgatttggtt

SEQ ID NO: 1258078 - DNA, 25 bp, Homo sapien
gagaaatattccagtttgatttggg

SEQ ID NO: 1258079 - DNA, 25 bp, Homo sapien
gggggaagcagacccaacaaaatga

SEQ ID NO: 1258080 - DNA, 25 bp, Homo sapien
gccgagttacccaccgaggccagaa

SEQ ID NO: 1258081 - DNA, 25 bp, Homo sapien
tacccaccgaggccagaaagaatat

SEQ ID NO: 1258082 - DNA, 25 bp, Homo sapien
tctggccggacaggaagttgtacgc

SEQ ID NO: 1258083 - DNA, 25 bp, Homo sapien
gagtaagccttcagaacacgccatg

SEQ ID NO: 1258084 - DNA, 25 bp, Homo sapien
gatgtacatcaggtccataagggag

SEQ ID NO: 1258085 - DNA, 25 bp, Homo sapien
caaggagttgatggaccccagtgtc

SEQ ID NO: 1258086 - DNA, 25 bp, Homo sapien
gattcctgggccgaagataggtgta

SEQ ID NO: 1258087 - DNA, 25 bp, Homo sapien
caggaagaagtgatgccaatgaaag

SEQ ID NO: 1258088 - DNA, 25 bp, Homo sapien
gatggtgtagaagactgccaggatc

SEQ ID NO: 1258089 - DNA, 25 bp, Homo sapien
cctttgagtgcatatgatagacagc

SEQ ID NO: 1258090 - DNA, 25 bp, Homo sapien
cctgctctagcgtgttggaatcaac

SEQ ID NO: 1258091 - DNA, 25 bp, Homo sapien
gctgcgctgcactctataaaacaaa

SEQ ID NO: 1258092 - DNA, 25 bp, Homo sapien
tagacactgactactgggcacttga

SEQ ID NO: 1258093 - DNA, 25 bp, Homo sapien
gaaatgtgttttgtccaagctgcgc

SEQ ID NO: 1258094 - DNA, 25 bp, Homo sapien
aggtctgattctcccatgccatgat

SEQ ID NO: 1258095 - DNA, 25 bp, Homo sapien
aaggtctgattctcccatgccatga

SEQ ID NO: 1258096 - DNA, 25 bp, Homo sapien
gaaggtctgattctcccatgccatg

SEQ ID NO: 1258097 - DNA, 25 bp, Homo sapien
ggtatccaggtagattaggagaacc

SEQ ID NO: 1258098 - DNA, 25 bp, Homo sapien
gggtatggagctgggtatccaggta

SEQ ID NO: 1258099 - DNA, 25 bp, Homo sapien
tatccaggtagattaggagaaccat

SEQ ID NO: 1258100 - DNA, 25 bp, Homo sapien
atggagctgggtatccaggtagatt

SEQ ID NO: 1258101 - DNA, 25 bp, Homo sapien
cctgacgtccatgggggacagttga

SEQ ID NO: 1258102 - DNA, 25 bp, Homo sapien
tgcagatgagcctgacgtccatggg

SEQ ID NO: 1258103 - DNA, 25 bp, Homo sapien
atgagcctgacgtccatgggggaca

SEQ ID NO: 1258104 - DNA, 25 bp, Homo sapien
agcctgacgtccatgggggacagtt

SEQ ID NO: 1258105 - DNA, 25 bp, Homo sapien
agccaagcagtgatacacagaagaa

SEQ ID NO: 1258106 - DNA, 25 bp, Homo sapien
gagccaagcagtgatacacagaaga

SEQ ID NO: 1258107 - DNA, 25 bp, Homo sapien
cctttcctgagatcttcatgaatgc

SEQ ID NO: 1258108 - DNA, 25 bp, Homo sapien
gaggtaactctctctccagacttgc

SEQ ID NO: 1258109 - DNA, 25 bp, Homo sapien
ttgccctttcctgagatcttcatga

SEQ ID NO: 1258110 - DNA, 25 bp, Homo sapien
ttatgaggtaactctctctccagac

SEQ ID NO: 1258111 - DNA, 25 bp, Homo sapien
acctagaggagccattaaacggcat

SEQ ID NO: 1258112 - DNA, 25 bp, Homo sapien
tatttgagaagcgaacaacctagag

SEQ ID NO: 1258113 - DNA, 25 bp, Homo sapien
gcgaacaacctagaggagccattaa

SEQ ID NO: 1258114 - DNA, 25 bp, Homo sapien
tgagaagcgaacaacctagaggagc

SEQ ID NO: 1258115 - DNA, 25 bp, Homo sapien
tttctcagttacattagcttaggct

SEQ ID NO: 1258116 - DNA, 25 bp, Homo sapien
gagactgtggcaagatatatcacaa

SEQ ID NO: 1258117 - DNA, 25 bp, Homo sapien
tattgagcactacattgccttgtac

SEQ ID NO: 1258118 - DNA, 25 bp, Homo sapien
ttgagtttgtcctgtcacagagact

SEQ ID NO: 1258119 - DNA, 25 bp, Homo sapien
gaaggtctgattctcccatgccatg

SEQ ID NO: 1258120 - DNA, 25 bp, Homo sapien
aaggtctgattctcccatgccatga

SEQ ID NO: 1258121 - DNA, 25 bp, Homo sapien
aggtctgattctcccatgccatgat

SEQ ID NO: 1258122 - DNA, 25 bp, Homo sapien
tcaatgattgcatccatagagccca

SEQ ID NO: 1258123 - DNA, 25 bp, Homo sapien
aatgattgcatccatagagcccagg

SEQ ID NO: 1258124 - DNA, 25 bp, Homo sapien
gcatcaatgattgcatccatagagc

SEQ ID NO: 1258125 - DNA, 25 bp, Homo sapien
gattgcatccatagagcccaggatc

SEQ ID NO: 1258126 - DNA, 25 bp, Homo sapien
cagtctggccataaccttcctgtag

SEQ ID NO: 1258127 - DNA, 25 bp, Homo sapien
tgtggcccagaaagtcacatgctga

SEQ ID NO: 1258128 - DNA, 25 bp, Homo sapien
catgctcaatagtgtctgtggccca

SEQ ID NO: 1258129 - DNA, 25 bp, Homo sapien
gaacactgtctatgtcagtctggcc

SEQ ID NO: 1258130 - DNA, 25 bp, Homo sapien
ccgcctgaggactggagccgcctga

SEQ ID NO: 1258131 - DNA, 25 bp, Homo sapien
agccgcctgaggactggagccgcct

SEQ ID NO: 1258132 - DNA, 25 bp, Homo sapien
tggagccgcctgaggactggagccg

SEQ ID NO: 1258133 - DNA, 25 bp, Homo sapien
ggagccgcctgaggactggagccgc

SEQ ID NO: 1258134 - DNA, 25 bp, Homo sapien
gacagagcgagcctagcacgggtct

SEQ ID NO: 1258135 - DNA, 25 bp, Homo sapien
gtctcagacggagcctggcgagtca

SEQ ID NO: 1258136 - DNA, 25 bp, Homo sapien
cacgggtgctggagcgccctcctga

SEQ ID NO: 1258137 - DNA, 25 bp, Homo sapien
agagaggcgagggaacgcagggaca

SEQ ID NO: 1258138 - DNA, 25 bp, Homo sapien
ttgggaccctttgcaataagtcagc

SEQ ID NO: 1258139 - DNA, 25 bp, Homo sapien
tgaaacgtattagccagcgccagag

SEQ ID NO: 1258140 - DNA, 25 bp, Homo sapien
gatcctggcattgtgtcatgtcaaa

SEQ ID NO: 1258141 - DNA, 25 bp, Homo sapien
caaggaataaggcagcggcaaatgc

SEQ ID NO: 1258142 - DNA, 25 bp, Homo sapien
gcctaagagtgggtgccattgacaa

SEQ ID NO: 1258143 - DNA, 25 bp, Homo sapien
ccattgacaagagcgtgcggaaacc

SEQ ID NO: 1258144 - DNA, 25 bp, Homo sapien
tacattcaagtggtgctgacatcgg

SEQ ID NO: 1258145 - DNA, 25 bp, Homo sapien
ccaaaaccagttgctagggcctaag

SEQ ID NO: 1258146 - DNA, 25 bp, Homo sapien
tgtgattgaagattccaaggaggat

SEQ ID NO: 1258147 - DNA, 25 bp, Homo sapien
agattccaaggaggatgaagtcgga

SEQ ID NO: 1258148 - DNA, 25 bp, Homo sapien
tgaaggtctgattctcccatgccat

SEQ ID NO: 1258149 - DNA, 25 bp, Homo sapien
atgaagtcggagttgaaggtctgat

SEQ ID NO: 1258150 - DNA, 25 bp, Homo sapien
gaaagaagaggaacgtgtgtggtgg

SEQ ID NO: 1258151 - DNA, 25 bp, Homo sapien
aaggccactaaaaagatgcccagga

SEQ ID NO: 1258152 - DNA, 25 bp, Homo sapien
caggaccagaaagaagaggaacgtg

SEQ ID NO: 1258153 - DNA, 25 bp, Homo sapien
cagagtttcccatgaaggccactaa

SEQ ID NO: 1258154 - DNA, 25 bp, Homo sapien
ggagctgggtgtccaggtagatgag

SEQ ID NO: 1258155 - DNA, 25 bp, Homo sapien
tgtccaggtagatgaggagaaccat

SEQ ID NO: 1258156 - DNA, 25 bp, Homo sapien
gtgtccaggtagatgaggagaacca

SEQ ID NO: 1258157 - DNA, 25 bp, Homo sapien
gtgtggagctgggtgtccaggtaga

SEQ ID NO: 1258158 - DNA, 25 bp, Homo sapien
agagccagacagtgatatatagaag

SEQ ID NO: 1258159 - DNA, 25 bp, Homo sapien
ggattcatgagattggtatatctta

SEQ ID NO: 1258160 - DNA, 25 bp, Homo sapien
aattttaggattcatgagattggta

SEQ ID NO: 1258161 - DNA, 25 bp, Homo sapien
agccagacagtgatatatagaagaa

SEQ ID NO: 1258162 - DNA, 25 bp, Homo sapien
aatgtggctacagcatcaatgattc

SEQ ID NO: 1258163 - DNA, 25 bp, Homo sapien
gaaaatgtggctacagcatcaatga

SEQ ID NO: 1258164 - DNA, 25 bp, Homo sapien
agaaggaaaatgtggctacagcatc

SEQ ID NO: 1258165 - DNA, 25 bp, Homo sapien
gtggctacagcatcaatgattccat

SEQ ID NO: 1258166 - DNA, 25 bp, Homo sapien
gagaggaacaggtcgtgaaagcttt

SEQ ID NO: 1258167 - DNA, 25 bp, Homo sapien
gatcagatgtgggccgtatgtacat

SEQ ID NO: 1258168 - DNA, 25 bp, Homo sapien
aggtgagaggaacaggtcgtgaaag

SEQ ID NO: 1258169 - DNA, 25 bp, Homo sapien
gatgtgggccgtatgtacatgaaca

SEQ ID NO: 1258170 - DNA, 25 bp, Homo sapien
cctaagatcttcatgaatgctctag

SEQ ID NO: 1258171 - DNA, 25 bp, Homo sapien
agatcttcatgaatgctctagtcac

SEQ ID NO: 1258172 - DNA, 25 bp, Homo sapien
ctttcctaagatcttcatgaatgct

SEQ ID NO: 1258173 - DNA, 25 bp, Homo sapien
taagatcttcatgaatgctctagtc

SEQ ID NO: 1258174 - DNA, 25 bp, Homo sapien
cataatcaatgctagtattttgaca

SEQ ID NO: 1258175 - DNA, 25 bp, Homo sapien
acataaagtttatgaggtaactcac

SEQ ID NO: 1258176 - DNA, 25 bp, Homo sapien
caatgctagtattttgacatcatag

SEQ ID NO: 1258177 - DNA, 25 bp, Homo sapien
ttaggcaatgtacataatcaatgct

SEQ ID NO: 1258178 - DNA, 25 bp, Homo sapien
tagtgtatattttcagtgagattgt

SEQ ID NO: 1258179 - DNA, 25 bp, Homo sapien
tatattttcagtgagattgtggttt

SEQ ID NO: 1258180 - DNA, 25 bp, Homo sapien
atattttcagtgagattgtggtttc

SEQ ID NO: 1258181 - DNA, 25 bp, Homo sapien
catgcctgagcaatgccaacacaga

SEQ ID NO: 1258182 - DNA, 25 bp, Homo sapien
gcacatgcctgagcaatgccaacac

SEQ ID NO: 1258183 - DNA, 25 bp, Homo sapien
acactgtgatactgtgcacatgcct

SEQ ID NO: 1258184 - DNA, 25 bp, Homo sapien
cactgtgatactgtgcacatgcctg

SEQ ID NO: 1258185 - DNA, 25 bp, Homo sapien
agagcaatagtaacacagaagttat

SEQ ID NO: 1258186 - DNA, 25 bp, Homo sapien
gagcaatagtaacacagaagttatg

SEQ ID NO: 1258187 - DNA, 25 bp, Homo sapien
gcaatagtaacacagaagttatgaa

SEQ ID NO: 1258188 - DNA, 25 bp, Homo sapien
agcaatagtaacacagaagttatga

SEQ ID NO: 1258189 - DNA, 25 bp, Homo sapien
gacatttgcacatacccagggcaat

SEQ ID NO: 1258190 - DNA, 25 bp, Homo sapien
catcacactgtggtgctgtgcccag

SEQ ID NO: 1258191 - DNA, 25 bp, Homo sapien
tgcacatacccagggcaatagtaac

SEQ ID NO: 1258192 - DNA, 25 bp, Homo sapien
gcaatagtaacacagaagtcatgaa

SEQ ID NO: 1258193 - DNA, 25 bp, Homo sapien
agttgaaggtcgaattctcccttgc

SEQ ID NO: 1258194 - DNA, 25 bp, Homo sapien
ttgaaggtcgaattctcccttgcca

SEQ ID NO: 1258195 - DNA, 25 bp, Homo sapien
gttgaaggtcgaattctcccttgcc

SEQ ID NO: 1258196 - DNA, 25 bp, Homo sapien
aaagatggccaggaccagaaagaag

SEQ ID NO: 1258197 - DNA, 25 bp, Homo sapien
ctgaaaagatggccaggaccagaaa

SEQ ID NO: 1258198 - DNA, 25 bp, Homo sapien
agaaagaagaggaaggtgtgggtgg

SEQ ID NO: 1258199 - DNA, 25 bp, Homo sapien
gaaaagatggccaggaccagaaaga

SEQ ID NO: 1258200 - DNA, 25 bp, Homo sapien
acatcaataattccatccgtagagc

SEQ ID NO: 1258201 - DNA, 25 bp, Homo sapien
ctaagatcttcatgaatgctctggt

SEQ ID NO: 1258202 - DNA, 25 bp, Homo sapien
ctttcctaagatcttcatgaatgct

SEQ ID NO: 1258203 - DNA, 25 bp, Homo sapien
tgccctttcctaagatcttcatgaa

SEQ ID NO: 1258204 - DNA, 25 bp, Homo sapien
ccagacttgccctttcctaagatct

SEQ ID NO: 1258205 - DNA, 25 bp, Homo sapien
cagctttgcgccggctaaaccagca

SEQ ID NO: 1258206 - DNA, 25 bp, Homo sapien
tttgcgccggctaaaccagcaaact

SEQ ID NO: 1258207 - DNA, 25 bp, Homo sapien
gctttgcgccggctaaaccagcaaa

SEQ ID NO: 1258208 - DNA, 25 bp, Homo sapien
ttgcgccggctaaaccagcaaactt

SEQ ID NO: 1258209 - DNA, 25 bp, Homo sapien
tccatcaatgccagtgagaagatgc

SEQ ID NO: 1258210 - DNA, 25 bp, Homo sapien
tctctatgtagatgaggagaaccat

SEQ ID NO: 1258211 - DNA, 25 bp, Homo sapien
ggtgtggagctgtttctctatgtag

SEQ ID NO: 1258212 - DNA, 25 bp, Homo sapien
gtttctctatgtagatgaggagaac

SEQ ID NO: 1258213 - DNA, 25 bp, Homo sapien
ggagctgtttctctatgtagatgag

SEQ ID NO: 1258214 - DNA, 25 bp, Homo sapien
tgaacatagcagcaccgtagtagag

SEQ ID NO: 1258215 - DNA, 25 bp, Homo sapien
tgagttccacaacctgccagagaga

SEQ ID NO: 1258216 - DNA, 25 bp, Homo sapien
tagtgaaggccttgcgacgactttc

SEQ ID NO: 1258217 - DNA, 25 bp, Homo sapien
tagtagagtccgaccacagacaggt

SEQ ID NO: 1258218 - DNA, 25 bp, Homo sapien
gtaccttctgtagtgccctgaacac

SEQ ID NO: 1258219 - DNA, 25 bp, Homo sapien
ttcttttcttcagtaccttctgtag

SEQ ID NO: 1258220 - DNA, 25 bp, Homo sapien
tcttcagtaccttctgtagtgccct

SEQ ID NO: 1258221 - DNA, 25 bp, Homo sapien
cagtaccttctgtagtgccctgaac

SEQ ID NO: 1258222 - DNA, 25 bp, Homo sapien
cctggtatattgtgtctttgttctt

SEQ ID NO: 1258223 - DNA, 25 bp, Homo sapien
gaagcatttgaactccagaagcaca

SEQ ID NO: 1258224 - DNA, 25 bp, Homo sapien
tcaccacggagcaaattctgtgcag

SEQ ID NO: 1258225 - DNA, 25 bp, Homo sapien
gaagcacaggacttgcgactttcag

SEQ ID NO: 1258226 - DNA, 25 bp, Homo sapien
ggagacccgctggaaaggaagcatt

SEQ ID NO: 1258227 - DNA, 25 bp, Homo sapien
cacggtggttgaattgggcatcggt

SEQ ID NO: 1258228 - DNA, 25 bp, Homo sapien
gaaatcctgaacactcacgaagaat

SEQ ID NO: 1258229 - DNA, 25 bp, Homo sapien
attgggcatcggtggatgatgaagc

SEQ ID NO: 1258230 - DNA, 25 bp, Homo sapien
gaagaatcaaatgatggaaagatgg

SEQ ID NO: 1258231 - DNA, 25 bp, Homo sapien
gaattgacacatgaggtagggactg

SEQ ID NO: 1258232 - DNA, 25 bp, Homo sapien
ggcatccaagatagacagattcctg

SEQ ID NO: 1258233 - DNA, 25 bp, Homo sapien
cgccttagaaatggtggtgctgtcc

SEQ ID NO: 1258234 - DNA, 25 bp, Homo sapien
tggtgacggtcacaatgaggatgtt

SEQ ID NO: 1258235 - DNA, 25 bp, Homo sapien
tcttggaaacccgagcacggtcgaa

SEQ ID NO: 1258236 - DNA, 25 bp, Homo sapien
acgttggaccgacagaagggcagct

SEQ ID NO: 1258237 - DNA, 25 bp, Homo sapien
cgagagttcacgatcacagggtagt

SEQ ID NO: 1258238 - DNA, 25 bp, Homo sapien
catagacaagaccactgagtaggga

SEQ ID NO: 1258239 - DNA, 25 bp, Homo sapien
ggaggcattatggaataaaaaccag

SEQ ID NO: 1258240 - DNA, 25 bp, Homo sapien
tggctgcaggtatcgcaggtggcct

SEQ ID NO: 1258241 - DNA, 25 bp, Homo sapien
aaggatcagatcctgggtggctgca

SEQ ID NO: 1258242 - DNA, 25 bp, Homo sapien
tacacagaagagcatgaactgagga

SEQ ID NO: 1258243 - DNA, 25 bp, Homo sapien
tgatattggccattggatgtttgga

SEQ ID NO: 1258244 - DNA, 25 bp, Homo sapien
tattggccattggatgtttggattg

SEQ ID NO: 1258245 - DNA, 25 bp, Homo sapien
caggtgatattggccattggatgtt

SEQ ID NO: 1258246 - DNA, 25 bp, Homo sapien
ggtgatattggccattggatgtttg

SEQ ID NO: 1258247 - DNA, 25 bp, Homo sapien
aatgatgaatctcccgggatccacg

SEQ ID NO: 1258248 - DNA, 25 bp, Homo sapien
ggagtgaatgtgaagccatccactg

SEQ ID NO: 1258249 - DNA, 25 bp, Homo sapien
aaatgaccacacaaagtagtgctgg

SEQ ID NO: 1258250 - DNA, 25 bp, Homo sapien
tcaatacagcaggaacttcacagaa

SEQ ID NO: 1258251 - DNA, 25 bp, Homo sapien
agctttttgaaaggcaggttccact

SEQ ID NO: 1258252 - DNA, 25 bp, Homo sapien
tactccatagctttttgaaaggcag

SEQ ID NO: 1258253 - DNA, 25 bp, Homo sapien
tgaaaggcaggttccactgttaaca

SEQ ID NO: 1258254 - DNA, 25 bp, Homo sapien
ttttgaaaggcaggttccactgtta

SEQ ID NO: 1258255 - DNA, 25 bp, Homo sapien
ggtttcattgttttcattcatggta

SEQ ID NO: 1258256 - DNA, 25 bp, Homo sapien
aaggtttcattgttttcattcatgg

SEQ ID NO: 1258257 - DNA, 25 bp, Homo sapien
ctggtcaaggtttcattgttttcat

SEQ ID NO: 1258258 - DNA, 25 bp, Homo sapien
tcaaggtttcattgttttcattcat

SEQ ID NO: 1258259 - DNA, 25 bp, Homo sapien
catttattgtgagtgaagagcccca

SEQ ID NO: 1258260 - DNA, 25 bp, Homo sapien
gcaggcgatgaaagagatggtcccc

SEQ ID NO: 1258261 - DNA, 25 bp, Homo sapien
ggatcagcagcattgcaacgcagca

SEQ ID NO: 1258262 - DNA, 25 bp, Homo sapien
cgtatacgtatacaaggcagcccca

SEQ ID NO: 1258263 - DNA, 25 bp, Homo sapien
cacatgtcccctaacatcttgccac

SEQ ID NO: 1258264 - DNA, 25 bp, Homo sapien
ccacatgtcccctaacatcttgcca

SEQ ID NO: 1258265 - DNA, 25 bp, Homo sapien
tctggatgccaaagtgctgtcagca

SEQ ID NO: 1258266 - DNA, 25 bp, Homo sapien
aagcaattcatagtcattggtaccc

SEQ ID NO: 1258267 - DNA, 25 bp, Homo sapien
cattggtacccacaacaggaaatcc

SEQ ID NO: 1258268 - DNA, 25 bp, Homo sapien
ccttcaacatctaggccatctggat

SEQ ID NO: 1258269 - DNA, 25 bp, Homo sapien
gatcctacagttgtgccgatataag

SEQ ID NO: 1258270 - DNA, 25 bp, Homo sapien
gccgatataaggtaatatcttccaa

SEQ ID NO: 1258271 - DNA, 25 bp, Homo sapien
aaataagatgatagcattcccaggg

SEQ ID NO: 1258272 - DNA, 25 bp, Homo sapien
taacaacatgtgaattaattgttag

SEQ ID NO: 1258273 - DNA, 25 bp, Homo sapien
taatctcccgggaattgcagaaggg

SEQ ID NO: 1258274 - DNA, 25 bp, Homo sapien
gttgagctgtgcaccccacaaagga

SEQ ID NO: 1258275 - DNA, 25 bp, Homo sapien
tgaacagccccatgaaagtgaagtc

SEQ ID NO: 1258276 - DNA, 25 bp, Homo sapien
cattggccatcagtgcggtgaagaa

SEQ ID NO: 1258277 - DNA, 25 bp, Homo sapien
aacttcaggactgctggtgcctcac

SEQ ID NO: 1258278 - DNA, 25 bp, Homo sapien
ccaacttcaggactgctggtgcctc

SEQ ID NO: 1258279 - DNA, 25 bp, Homo sapien
atcactgtctcgtagagggctgtgt

SEQ ID NO: 1258280 - DNA, 25 bp, Homo sapien
ctgtctcgtagagggctgtgtctgc

SEQ ID NO: 1258281 - DNA, 25 bp, Homo sapien
agaaaggaatcagcagcatcaaaac

SEQ ID NO: 1258282 - DNA, 25 bp, Homo sapien
cagagaaaggaatcagcagcatcaa

SEQ ID NO: 1258283 - DNA, 25 bp, Homo sapien
ctacagagaaaggaatcagcagcat

SEQ ID NO: 1258284 - DNA, 25 bp, Homo sapien
tacagagaaaggaatcagcagcatc

SEQ ID NO: 1258285 - DNA, 25 bp, Homo sapien
tcaggattcgggcataggaagcaag

SEQ ID NO: 1258286 - DNA, 25 bp, Homo sapien
tgagcaagtggcaaatgccttcttc

SEQ ID NO: 1258287 - DNA, 25 bp, Homo sapien
agtcatgtgggatgagcaagtggca

SEQ ID NO: 1258288 - DNA, 25 bp, Homo sapien
actgaactgtagtcaggattcgggc

SEQ ID NO: 1258289 - DNA, 25 bp, Homo sapien
catgggtgtgagaatggtgtaaaac

SEQ ID NO: 1258290 - DNA, 25 bp, Homo sapien
gcttgtggtaagaatgtggcagcat

SEQ ID NO: 1258291 - DNA, 25 bp, Homo sapien
atggcagccccgtagaacaaggaca

SEQ ID NO: 1258292 - DNA, 25 bp, Homo sapien
taagaatgtggcagcatgtaggtgt

SEQ ID NO: 1258293 - DNA, 25 bp, Homo sapien
ctcctgacaccctttgaggaccctt

SEQ ID NO: 1258294 - DNA, 25 bp, Homo sapien
ctgacaccctttgaggacccttgaa

SEQ ID NO: 1258295 - DNA, 25 bp, Homo sapien
cctgacaccctttgaggacccttga

SEQ ID NO: 1258296 - DNA, 25 bp, Homo sapien
tgacaccctttgaggacccttgaac

SEQ ID NO: 1258297 - DNA, 25 bp, Homo sapien
tggaaaggtatctgatttacataaa

SEQ ID NO: 1258298 - DNA, 25 bp, Homo sapien
tacacgaaagagatatgataaagtt

SEQ ID NO: 1258299 - DNA, 25 bp, Homo sapien
aaggtatctgatttacataaaacat

SEQ ID NO: 1258300 - DNA, 25 bp, Homo sapien
ctgtagggtacacgaaagagatatg

SEQ ID NO: 1258301 - DNA, 25 bp, Homo sapien
ggaataattgctctgctccatagct

SEQ ID NO: 1258302 - DNA, 25 bp, Homo sapien
cacggaataattgctctgctccata

SEQ ID NO: 1258303 - DNA, 25 bp, Homo sapien
acacggaataattgctctgctccat

SEQ ID NO: 1258304 - DNA, 25 bp, Homo sapien
cggaataattgctctgctccatagc

SEQ ID NO: 1258305 - DNA, 25 bp, Homo sapien
gaatgatcttgaccacgttgctggc

SEQ ID NO: 1258306 - DNA, 25 bp, Homo sapien
tggatgagaatgatcttgaccacgt

SEQ ID NO: 1258307 - DNA, 25 bp, Homo sapien
gagaatgatcttgaccacgttgctg

SEQ ID NO: 1258308 - DNA, 25 bp, Homo sapien
ctatgtggatgagaatgatcttgac

SEQ ID NO: 1258309 - DNA, 25 bp, Homo sapien
tgagcaagaaaccatcgatagaccc

SEQ ID NO: 1258310 - DNA, 25 bp, Homo sapien
caatcaaccagcagatcttgcggct

SEQ ID NO: 1258311 - DNA, 25 bp, Homo sapien
catacatggctgtctcgtaggctga

SEQ ID NO: 1258312 - DNA, 25 bp, Homo sapien
agtcctaggaggaagaactcagccc

SEQ ID NO: 1258313 - DNA, 25 bp, Homo sapien
gtggtaagaatgaggcagcacgtat

SEQ ID NO: 1258314 - DNA, 25 bp, Homo sapien
cgtatgtgtacatggcagccccata

SEQ ID NO: 1258315 - DNA, 25 bp, Homo sapien
gaatgaggcagcacgtatgtgtaca

SEQ ID NO: 1258316 - DNA, 25 bp, Homo sapien
gaggcagcacgtatgtgtacatggc

SEQ ID NO: 1258317 - DNA, 25 bp, Homo sapien
ctctcaaccctggattggtcttcag

SEQ ID NO: 1258318 - DNA, 25 bp, Homo sapien
tcagtgcccgatttggctacagcca

SEQ ID NO: 1258319 - DNA, 25 bp, Homo sapien
tcttcagtgcccgatttggctacag

SEQ ID NO: 1258320 - DNA, 25 bp, Homo sapien
aatgggttacaaccaatattgatcc

SEQ ID NO: 1258321 - DNA, 25 bp, Homo sapien
ccagtgtcctttctgtggcaataaa

SEQ ID NO: 1258322 - DNA, 25 bp, Homo sapien
gacacaacgtacctgtaaagcttga

SEQ ID NO: 1258323 - DNA, 25 bp, Homo sapien
actagagctatgagaagtatctgcc

SEQ ID NO: 1258324 - DNA, 25 bp, Homo sapien
gaagtcacaggttcttctaccaggg

SEQ ID NO: 1258325 - DNA, 25 bp, Homo sapien
cagaaatctggcagcttatttaacg

SEQ ID NO: 1258326 - DNA, 25 bp, Homo sapien
gaaatctggcagcttatttaacgac

SEQ ID NO: 1258327 - DNA, 25 bp, Homo sapien
agaaatctggcagcttatttaacga

SEQ ID NO: 1258328 - DNA, 25 bp, Homo sapien
gatgggtgatgaggcctgtgaggac

SEQ ID NO: 1258329 - DNA, 25 bp, Homo sapien
cctgtgaggacgaagttagtggagt

SEQ ID NO: 1258330 - DNA, 25 bp, Homo sapien
ggctgttatagccaccacaaagatg

SEQ ID NO: 1258331 - DNA, 25 bp, Homo sapien
acgaagttagtggagttctggagaa

SEQ ID NO: 1258332 - DNA, 25 bp, Homo sapien
ggagccgaccaccatgaataagcaa

SEQ ID NO: 1258333 - DNA, 25 bp, Homo sapien
gtaccgtagagggttgcacacagcc

SEQ ID NO: 1258334 - DNA, 25 bp, Homo sapien
caaaccctgcggttcatgaggagag

SEQ ID NO: 1258335 - DNA, 25 bp, Homo sapien
gagtcagcatgaacccatccaagga

SEQ ID NO: 1258336 - DNA, 25 bp, Homo sapien
gaaaaagtgattgatctctcgggat

SEQ ID NO: 1258337 - DNA, 25 bp, Homo sapien
ccaccataatgtgggaggaacacgt

SEQ ID NO: 1258338 - DNA, 25 bp, Homo sapien
aggctgccccgtagaaaacgctcac

SEQ ID NO: 1258339 - DNA, 25 bp, Homo sapien
catagagtgacgtgtctgtgcaaga

SEQ ID NO: 1258340 - DNA, 25 bp, Homo sapien
ccttcctgatcacagtcgccaccct

SEQ ID NO: 1258341 - DNA, 25 bp, Homo sapien
cttcctgatcacagtcgccaccctg

SEQ ID NO: 1258342 - DNA, 25 bp, Homo sapien
tgaattgctgaaagtgacactgaac

SEQ ID NO: 1258343 - DNA, 25 bp, Homo sapien
tgtaatagctgcgttattggccgca

SEQ ID NO: 1258344 - DNA, 25 bp, Homo sapien
gctagtccttcctgatcagtcacca

SEQ ID NO: 1258345 - DNA, 25 bp, Homo sapien
cagatgtttgcgctagtccttgcta

SEQ ID NO: 1258346 - DNA, 25 bp, Homo sapien
gatcgagaaggtgctagctaaggca

SEQ ID NO: 1258347 - DNA, 25 bp, Homo sapien
cttctgaatgaaaagccacctaggg

SEQ ID NO: 1258348 - DNA, 25 bp, Homo sapien
tatctacgtcagcaacaatggagga

SEQ ID NO: 1258349 - DNA, 25 bp, Homo sapien
gctgaattgaaataacaccgaggat

SEQ ID NO: 1258350 - DNA, 25 bp, Homo sapien
ataaatctaagccacgccagctcag

SEQ ID NO: 1258351 - DNA, 25 bp, Homo sapien
gacaataaatctaagccacgccagc

SEQ ID NO: 1258352 - DNA, 25 bp, Homo sapien
ccacgccagctcagtgaagctgctt

SEQ ID NO: 1258353 - DNA, 25 bp, Homo sapien
gttccatcagacaataaatctaagc

SEQ ID NO: 1258354 - DNA, 25 bp, Homo sapien
aaagaaggaaggtcacggtgtagag

SEQ ID NO: 1258355 - DNA, 25 bp, Homo sapien
gagggcagcatgcttgctctcagca

SEQ ID NO: 1258356 - DNA, 25 bp, Homo sapien
gagggtgaaatcagtgcttgctgtt

SEQ ID NO: 1258357 - DNA, 25 bp, Homo sapien
ctctcagcaaagagtcccgtgaggg

SEQ ID NO: 1258358 - DNA, 25 bp, Homo sapien
cgcgagctggctgatgaagaagtac

SEQ ID NO: 1258359 - DNA, 25 bp, Homo sapien
tgagatccatgagcgcgagctggct

SEQ ID NO: 1258360 - DNA, 25 bp, Homo sapien
ggcacagtcacgcataggtacatga

SEQ ID NO: 1258361 - DNA, 25 bp, Homo sapien
taatggagaggtctgcaaacagcag

SEQ ID NO: 1258362 - DNA, 25 bp, Homo sapien
aggattttcctagactggcaaaagg

SEQ ID NO: 1258363 - DNA, 25 bp, Homo sapien
cttatagagggagacgtcagagcag

SEQ ID NO: 1258364 - DNA, 25 bp, Homo sapien
tgtggatgagatgcaggatgagggt

SEQ ID NO: 1258365 - DNA, 25 bp, Homo sapien
ggatgcagcacaggtacatgagcgt

SEQ ID NO: 1258366 - DNA, 25 bp, Homo sapien
tgagggtgtatgagctggagatgac

SEQ ID NO: 1258367 - DNA, 25 bp, Homo sapien
gatgaccatgatgggggcgagaagc

SEQ ID NO: 1258368 - DNA, 25 bp, Homo sapien
gcactatgatcatgtgggaggagca

SEQ ID NO: 1258369 - DNA, 25 bp, Homo sapien
atgtaggtgtagaaggaagcaccga

SEQ ID NO: 1258370 - DNA, 25 bp, Homo sapien
ccgaagagcagcagcactatgatca

SEQ ID NO: 1258371 - DNA, 25 bp, Homo sapien
tgtagaaggaagcaccgaagagcag

SEQ ID NO: 1258372 - DNA, 25 bp, Homo sapien
gagggggttcagcacaggagtgaag

SEQ ID NO: 1258373 - DNA, 25 bp, Homo sapien
atctttgttgcggagactgtaaatg

SEQ ID NO: 1258374 - DNA, 25 bp, Homo sapien
cacaggagtgaagatggtgtaaaag

SEQ ID NO: 1258375 - DNA, 25 bp, Homo sapien
tttgttgcggagactgtaaatgagg

SEQ ID NO: 1258376 - DNA, 25 bp, Homo sapien
attcttgactgcatcatgctcctca

SEQ ID NO: 1258377 - DNA, 25 bp, Homo sapien
cattcttgactgcatcatgctcctc

SEQ ID NO: 1258378 - DNA, 25 bp, Homo sapien
cttttcgtaaggctctgagagtgca

SEQ ID NO: 1258379 - DNA, 25 bp, Homo sapien
ttcgtaaggctctgagagtgcaggc

SEQ ID NO: 1258380 - DNA, 25 bp, Homo sapien
tcacttttcgtaaggctctgagagt

SEQ ID NO: 1258381 - DNA, 25 bp, Homo sapien
ctacttcacttttcgtaaggctctg

SEQ ID NO: 1258382 - DNA, 25 bp, Homo sapien
catgaggatgaaatccaactttcca

SEQ ID NO: 1258383 - DNA, 25 bp, Homo sapien
gtcccatgaggatgaaatccaactt

SEQ ID NO: 1258384 - DNA, 25 bp, Homo sapien
ccatgaggatgaaatccaactttcc

SEQ ID NO: 1258385 - DNA, 25 bp, Homo sapien
aatccaactttccagtgtggttggc

SEQ ID NO: 1258386 - DNA, 25 bp, Homo sapien
gtctgagcaggacaggatcgttaca

SEQ ID NO: 1258387 - DNA, 25 bp, Homo sapien
caggacaggatcgttacagcaggga

SEQ ID NO: 1258388 - DNA, 25 bp, Homo sapien
gatgaccacactaagtagagctgga

SEQ ID NO: 1258389 - DNA, 25 bp, Homo sapien
cctgctagtgtcagatagaggaaca

SEQ ID NO: 1258390 - DNA, 25 bp, Homo sapien
aaggacgaatctcacagttaacatt

SEQ ID NO: 1258391 - DNA, 25 bp, Homo sapien
ggacgaatctcacagttaacatttt

SEQ ID NO: 1258392 - DNA, 25 bp, Homo sapien
ctaaaggacgaatctcacagttaac

SEQ ID NO: 1258393 - DNA, 25 bp, Homo sapien
acgaatctcacagttaacattttct

SEQ ID NO: 1258394 - DNA, 25 bp, Homo sapien
gagaaaccctgtgtcacgtatatta

SEQ ID NO: 1258395 - DNA, 25 bp, Homo sapien
cctgtgtcacgtatattaaacacac

SEQ ID NO: 1258396 - DNA, 25 bp, Homo sapien
taaacacacagttcctaagtaaaga

SEQ ID NO: 1258397 - DNA, 25 bp, Homo sapien
taaagaccacggaaagatgggagga

SEQ ID NO: 1258398 - DNA, 25 bp, Homo sapien
atccttgtttctcaggatgtagatg

SEQ ID NO: 1258399 - DNA, 25 bp, Homo sapien
ccttgtttctcaggatgtagatgag

SEQ ID NO: 1258400 - DNA, 25 bp, Homo sapien
ggatgtagatgagggggtttagcat

SEQ ID NO: 1258401 - DNA, 25 bp, Homo sapien
ttgtttctcaggatgtagatgaggg

SEQ ID NO: 1258402 - DNA, 25 bp, Homo sapien
gtttagagacttgatgtgttcccag

SEQ ID NO: 1258403 - DNA, 25 bp, Homo sapien
tgtgttctgtttagagacttgatgt

SEQ ID NO: 1258404 - DNA, 25 bp, Homo sapien
tctgtttagagacttgatgtgttcc

SEQ ID NO: 1258405 - DNA, 25 bp, Homo sapien
ctaccgttgttttccacattgatat

SEQ ID NO: 1258406 - DNA, 25 bp, Homo sapien
cagggagagataccaaacacttggg

SEQ ID NO: 1258407 - DNA, 25 bp, Homo sapien
cagatctacaccaacactaggcaga

SEQ ID NO: 1258408 - DNA, 25 bp, Homo sapien
tctggaaagtatccactggcaggca

SEQ ID NO: 1258409 - DNA, 25 bp, Homo sapien
gaacatgggcttcagacttgcatca

SEQ ID NO: 1258410 - DNA, 25 bp, Homo sapien
tcaaatagaatgaagaggtctcaca

SEQ ID NO: 1258411 - DNA, 25 bp, Homo sapien
gaagggagcagtcctataagagcca

SEQ ID NO: 1258412 - DNA, 25 bp, Homo sapien
aggaagataaacagccagcccagga

SEQ ID NO: 1258413 - DNA, 25 bp, Homo sapien
gcagttccgaattatccacagtaaa

SEQ ID NO: 1258414 - DNA, 25 bp, Homo sapien
gatggcactcagagccataagaggt

SEQ ID NO: 1258415 - DNA, 25 bp, Homo sapien
gcattctggtagtttgatgacaacc

SEQ ID NO: 1258416 - DNA, 25 bp, Homo sapien
ttttgcctgctaccatgacttgtaa

SEQ ID NO: 1258417 - DNA, 25 bp, Homo sapien
cacatgattggcttgccatgtccaa

SEQ ID NO: 1258418 - DNA, 25 bp, Homo sapien
gattatttaacctcctgacattaag

SEQ ID NO: 1258419 - DNA, 25 bp, Homo sapien
tatataaatccctcgaaacaaggaa

SEQ ID NO: 1258420 - DNA, 25 bp, Homo sapien
tcactttgtctcacattaacatagc

SEQ ID NO: 1258421 - DNA, 25 bp, Homo sapien
ggttaccaactgcacgaagtatctg

SEQ ID NO: 1258422 - DNA, 25 bp, Homo sapien
cctccatatgaaatccccctaaagt

SEQ ID NO: 1258423 - DNA, 25 bp, Homo sapien
tccttacagtcctccatatgaaatc

SEQ ID NO: 1258424 - DNA, 25 bp, Homo sapien
cttccttacagtcctccatatgaaa

SEQ ID NO: 1258425 - DNA, 25 bp, Homo sapien
ttacagtcctccatatgaaatcccc

SEQ ID NO: 1258426 - DNA, 25 bp, Homo sapien
tctgtgacatctgagttcaaacaag

SEQ ID NO: 1258427 - DNA, 25 bp, Homo sapien
cctcagatgagtgtgtgatgttgga

SEQ ID NO: 1258428 - DNA, 25 bp, Homo sapien
ttcaaacaaggagctgagaggagac

SEQ ID NO: 1258429 - DNA, 25 bp, Homo sapien
tagtgacgaaaagttaccctcagat

SEQ ID NO: 1258430 - DNA, 25 bp, Homo sapien
ccagcccatctaggtgaggttcaag

SEQ ID NO: 1258431 - DNA, 25 bp, Homo sapien
tgttggtgctcttaacctggccaca

SEQ ID NO: 1258432 - DNA, 25 bp, Homo sapien
caactcccagaggtgatgtatcaac

SEQ ID NO: 1258433 - DNA, 25 bp, Homo sapien
caggtcactttcttactcctgttgg

SEQ ID NO: 1258434 - DNA, 25 bp, Homo sapien
ataatgtggaaaaggctaaggctgt

SEQ ID NO: 1258435 - DNA, 25 bp, Homo sapien
tgtggaaaaggctaaggctgtatat

SEQ ID NO: 1258436 - DNA, 25 bp, Homo sapien
gatgatgatgagatttgagattact

SEQ ID NO: 1258437 - DNA, 25 bp, Homo sapien
aaaaggctaaggctgtatatgaact

SEQ ID NO: 1258438 - DNA, 25 bp, Homo sapien
caatcggtcctaatgaagagggaga

SEQ ID NO: 1258439 - DNA, 25 bp, Homo sapien
cacatcagttgacctctgagtttca

SEQ ID NO: 1258440 - DNA, 25 bp, Homo sapien
gagggaaacagactacaatcggtcc

SEQ ID NO: 1258441 - DNA, 25 bp, Homo sapien
caaggtactgatttgtggaggtatc

SEQ ID NO: 1258442 - DNA, 25 bp, Homo sapien
tctcagagccttacgaaaagtgaag

SEQ ID NO: 1258443 - DNA, 25 bp, Homo sapien
gagctgatgggaactctgcactcca

SEQ ID NO: 1258444 - DNA, 25 bp, Homo sapien
gagtgttgtcatccaaggaccaaga

SEQ ID NO: 1258445 - DNA, 25 bp, Homo sapien
catggtccctgttgcttatagctgc

SEQ ID NO: 1258446 - DNA, 25 bp, Homo sapien
gtgtgaatcaccgtatatcaaatgg

SEQ ID NO: 1258447 - DNA, 25 bp, Homo sapien
gaatcaccgtatatcaaatggtaga

SEQ ID NO: 1258448 - DNA, 25 bp, Homo sapien
tgaatcaccgtatatcaaatggtag

SEQ ID NO: 1258449 - DNA, 25 bp, Homo sapien
aatgttgtatattaagaagtgtgaa

SEQ ID NO: 1258450 - DNA, 25 bp, Homo sapien
ttgtcgggcacattgtccttccggg

SEQ ID NO: 1258451 - DNA, 25 bp, Homo sapien
gcttcctacagccatcgccagttgt

SEQ ID NO: 1258452 - DNA, 25 bp, Homo sapien
tcctacagccatcgccagttgtcgg

SEQ ID NO: 1258453 - DNA, 25 bp, Homo sapien
ccagttgtcgggcacattgtccttc

SEQ ID NO: 1258454 - DNA, 25 bp, Homo sapien
gaagagtcctacagcctattacaag

SEQ ID NO: 1258455 - DNA, 25 bp, Homo sapien
tgagcatccatatgtaaatcacaga

SEQ ID NO: 1258456 - DNA, 25 bp, Homo sapien
aacgggaaagggctgaccagcacca

SEQ ID NO: 1258457 - DNA, 25 bp, Homo sapien
gaacaagagaaagatagtgctatca

SEQ ID NO: 1258458 - DNA, 25 bp, Homo sapien
ttcgcctttggtccaggcgtaccat

SEQ ID NO: 1258459 - DNA, 25 bp, Homo sapien
tatttgtctcaggtttcgcctttgg

SEQ ID NO: 1258460 - DNA, 25 bp, Homo sapien
cccttttgcgcctacttcctgattt

SEQ ID NO: 1258461 - DNA, 25 bp, Homo sapien
gagacattatgtgatacagatggac

SEQ ID NO: 1258462 - DNA, 25 bp, Homo sapien
gttcttttgccttgcgtggccgtct

SEQ ID NO: 1258463 - DNA, 25 bp, Homo sapien
ttcttttgccttgcgtggccgtctg

SEQ ID NO: 1258464 - DNA, 25 bp, Homo sapien
cttttgccttgcgtggccgtctgtg

SEQ ID NO: 1258465 - DNA, 25 bp, Homo sapien
tttgccttgcgtggccgtctgtgct

SEQ ID NO: 1258466 - DNA, 25 bp, Homo sapien
ctaattcaggttcgtttcactcttt

SEQ ID NO: 1258467 - DNA, 25 bp, Homo sapien
tctagggtctgccttagtccacctc

SEQ ID NO: 1258468 - DNA, 25 bp, Homo sapien
tgggtgggaaagcaggtcatggcag

SEQ ID NO: 1258469 - DNA, 25 bp, Homo sapien
ggtgggaaagcaggtcatggcaggg

SEQ ID NO: 1258470 - DNA, 25 bp, Homo sapien
tctcccactctgagtgagtctccag

SEQ ID NO: 1258471 - DNA, 25 bp, Homo sapien
gccaggtcatgggccggcctgccct

SEQ ID NO: 1258472 - DNA, 25 bp, Homo sapien
tgatctagccaagccgtcttctgtg

SEQ ID NO: 1258473 - DNA, 25 bp, Homo sapien
gcaaagctctcatcaggagttcctt

SEQ ID NO: 1258474 - DNA, 25 bp, Homo sapien
tctaagatggttatatatctcccca

SEQ ID NO: 1258475 - DNA, 25 bp, Homo sapien
cactgagacatttgcgattgcgtct

SEQ ID NO: 1258476 - DNA, 25 bp, Homo sapien
tcaatatgctaacccctaggtggct

SEQ ID NO: 1258477 - DNA, 25 bp, Homo sapien
ggacagagcggttacatagttgaca

SEQ ID NO: 1258478 - DNA, 25 bp, Homo sapien
cctccattgttgctgacgtagataa

SEQ ID NO: 1258479 - DNA, 25 bp, Homo sapien
tcctggagggattaagtgaagaaac

SEQ ID NO: 1258480 - DNA, 25 bp, Homo sapien
aatggaaattggaaggagcatttgc

SEQ ID NO: 1258481 - DNA, 25 bp, Homo sapien
tgctgaccaacttttgaatggaaat

SEQ ID NO: 1258482 - DNA, 25 bp, Homo sapien
gctgaccaacttttgaatggaaatt

SEQ ID NO: 1258483 - DNA, 25 bp, Homo sapien
attgctgaccaacttttgaatggaa

SEQ ID NO: 1258484 - DNA, 25 bp, Homo sapien
gtcctgcctgtctgtattgctaacg

SEQ ID NO: 1258485 - DNA, 25 bp, Homo sapien
ctgtctgtattgctaacgtgtgatc

SEQ ID NO: 1258486 - DNA, 25 bp, Homo sapien
taacgtgtgatcatgggtcctgcct

SEQ ID NO: 1258487 - DNA, 25 bp, Homo sapien
acgtgtgatcatgggtcctgcctgt

SEQ ID NO: 1258488 - DNA, 25 bp, Homo sapien
tattgctaacgtgtgatcatgagtc

SEQ ID NO: 1258489 - DNA, 25 bp, Homo sapien
cagagggcattctcagtcaagtagc

SEQ ID NO: 1258490 - DNA, 25 bp, Homo sapien
aagtagccctacaaaccattcatgg

SEQ ID NO: 1258491 - DNA, 25 bp, Homo sapien
caagcagctcttggaagtgcccatg

SEQ ID NO: 1258492 - DNA, 25 bp, Homo sapien
ctgcccgccaccgagggacgcgtgg

SEQ ID NO: 1258493 - DNA, 25 bp, Homo sapien
gcatgaaagtaaggctgcaggccaa

SEQ ID NO: 1258494 - DNA, 25 bp, Homo sapien
tgaaagtaaggctgcaggccaagag

SEQ ID NO: 1258495 - DNA, 25 bp, Homo sapien
atgaaagtaaggctgcaggccaaga

SEQ ID NO: 1258496 - DNA, 25 bp, Homo sapien
ggcatgaaagtaaggctgcaggcca

SEQ ID NO: 1258497 - DNA, 25 bp, Homo sapien
gatgccagagaattcaatacacttt

SEQ ID NO: 1258498 - DNA, 25 bp, Homo sapien
tgttgggcacttaaaaccactggag

SEQ ID NO: 1258499 - DNA, 25 bp, Homo sapien
cactggagctgaattcatcaacatc

SEQ ID NO: 1258500 - DNA, 25 bp, Homo sapien
gctgcacaccatttgagttctgtat

SEQ ID NO: 1258501 - DNA, 25 bp, Homo sapien
ggcatgtgccaccactccggccaat

SEQ ID NO: 1258502 - DNA, 25 bp, Homo sapien
acaggcatgtgccaccactccggcc

SEQ ID NO: 1258503 - DNA, 25 bp, Homo sapien
gcatgtgccaccactccggccaatt

SEQ ID NO: 1258504 - DNA, 25 bp, Homo sapien
tgtgccaccactccggccaattttg

SEQ ID NO: 1258505 - DNA, 25 bp, Homo sapien
cttcatttcaatggctacgtcacga

SEQ ID NO: 1258506 - DNA, 25 bp, Homo sapien
tctttgcataggtctgcttgtgtgc

SEQ ID NO: 1258507 - DNA, 25 bp, Homo sapien
tcataaatggaagtggctaggctct

SEQ ID NO: 1258508 - DNA, 25 bp, Homo sapien
tactcttgttagcaattggaaaacc

SEQ ID NO: 1258509 - DNA, 25 bp, Homo sapien
tctctctggtggattgaaggaaact

SEQ ID NO: 1258510 - DNA, 25 bp, Homo sapien
atctctctggtggattgaaggaaac

SEQ ID NO: 1258511 - DNA, 25 bp, Homo sapien
catctctctggtggattgaaggaaa

SEQ ID NO: 1258512 - DNA, 25 bp, Homo sapien
ctctctggtggattgaaggaaactg

SEQ ID NO: 1258513 - DNA, 25 bp, Homo sapien
caaaggacaaaaatgcgggagcaag

SEQ ID NO: 1258514 - DNA, 25 bp, Homo sapien
ggccaggctcatcccaaatcagctg

SEQ ID NO: 1258515 - DNA, 25 bp, Homo sapien
cgcattctaatttaaagctcctggg

SEQ ID NO: 1258516 - DNA, 25 bp, Homo sapien
tcctgggtgattctgtactaagtag

SEQ ID NO: 1258517 - DNA, 25 bp, Homo sapien
taaaatctccataaccggctgtgga

SEQ ID NO: 1258518 - DNA, 25 bp, Homo sapien
gctggttttgaaactacattttctc

SEQ ID NO: 1258519 - DNA, 25 bp, Homo sapien
tacatacgctattgcaactggattc

SEQ ID NO: 1258520 - DNA, 25 bp, Homo sapien
gatattgctgccgttgctggttttg

SEQ ID NO: 1258521 - DNA, 25 bp, Homo sapien
gcatgattgtagctcctggcagcct

SEQ ID NO: 1258522 - DNA, 25 bp, Homo sapien
gaacagtgaagccattcagtcctga

SEQ ID NO: 1258523 - DNA, 25 bp, Homo sapien
gagccactatgtcttgctgattaaa

SEQ ID NO: 1258524 - DNA, 25 bp, Homo sapien
tgtaatgctgacttcgtagaatgag

SEQ ID NO: 1258525 - DNA, 25 bp, Homo sapien
aaatattgccgctgcttctccctac

SEQ ID NO: 1258526 - DNA, 25 bp, Homo sapien
catttgaaatattgccgctgcttct

SEQ ID NO: 1258527 - DNA, 25 bp, Homo sapien
gggacatttgaaatattgccgctgc

SEQ ID NO: 1258528 - DNA, 25 bp, Homo sapien
tcagatcaaatagggacatttgaaa

SEQ ID NO: 1258529 - DNA, 25 bp, Homo sapien
gactcaggtttgagatcctcatgct

SEQ ID NO: 1258530 - DNA, 25 bp, Homo sapien
actcaggtttgagatcctcatgctt

SEQ ID NO: 1258531 - DNA, 25 bp, Homo sapien
ggactcaggtttgagatcctcatgc

SEQ ID NO: 1258532 - DNA, 25 bp, Homo sapien
gggactcaggtttgagatcctcatg

SEQ ID NO: 1258533 - DNA, 25 bp, Homo sapien
atgggttttcaccaagtggctgaag

SEQ ID NO: 1258534 - DNA, 25 bp, Homo sapien
gatgggttttcaccaagtggctgaa

SEQ ID NO: 1258535 - DNA, 25 bp, Homo sapien
tgccagctcatcacgatctgcaggg

SEQ ID NO: 1258536 - DNA, 25 bp, Homo sapien
gagaggccagctgtgttcgagtcct

SEQ ID NO: 1258537 - DNA, 25 bp, Homo sapien
tccctcagggaacttggtctagaag

SEQ ID NO: 1258538 - DNA, 25 bp, Homo sapien
catcagagaaaatgggtgctgggcc

SEQ ID NO: 1258539 - DNA, 25 bp, Homo sapien
gacagtacacctcgagttttgaagt

SEQ ID NO: 1258540 - DNA, 25 bp, Homo sapien
tatgtatcatttccaagctcctgaa

SEQ ID NO: 1258541 - DNA, 25 bp, Homo sapien
agcggaaggatctctgccgttggcc

SEQ ID NO: 1258542 - DNA, 25 bp, Homo sapien
tagctgtgtgactcctcgcttctgt

SEQ ID NO: 1258543 - DNA, 25 bp, Homo sapien
actaaaaggaagattgtgcatgtca

SEQ ID NO: 1258544 - DNA, 25 bp, Homo sapien
gatttgtggccctccttaggcaggg

SEQ ID NO: 1258545 - DNA, 25 bp, Homo sapien
ctgtattcttacctgctgacccaga

SEQ ID NO: 1258546 - DNA, 25 bp, Homo sapien
gattggacatccctagtttagagcc

SEQ ID NO: 1258547 - DNA, 25 bp, Homo sapien
gcagacacatctggccgaatcgcat

SEQ ID NO: 1258548 - DNA, 25 bp, Homo sapien
ggccgaatcgcatctatgccaatca

SEQ ID NO: 1258549 - DNA, 25 bp, Homo sapien
aagcactctaacttctatagctgct

SEQ ID NO: 1258550 - DNA, 25 bp, Homo sapien
cactctaacttctatagctgctagc

SEQ ID NO: 1258551 - DNA, 25 bp, Homo sapien
tccacttagacaatgttactcaagg

SEQ ID NO: 1258552 - DNA, 25 bp, Homo sapien
agatcatgtccctaggagaacccca

SEQ ID NO: 1258553 - DNA, 25 bp, Homo sapien
caaggtcctgctgacttattgaaat

SEQ ID NO: 1258554 - DNA, 25 bp, Homo sapien
tggactgagaactgtagaactcttg

SEQ ID NO: 1258555 - DNA, 25 bp, Homo sapien
ccttcggtgcttccggcgcggtagc

SEQ ID NO: 1258556 - DNA, 25 bp, Homo sapien
cggcgcggtagccggtgcccggcgc

SEQ ID NO: 1258557 - DNA, 25 bp, Homo sapien
gcggtagccggtgcccggcgcggac

SEQ ID NO: 1258558 - DNA, 25 bp, Homo sapien
gcgcggtagccggtgcccggcgcgg

SEQ ID NO: 1258559 - DNA, 25 bp, Homo sapien
cagtgtcaccggttgctgggaagac

SEQ ID NO: 1258560 - DNA, 25 bp, Homo sapien
agcgagcagcgtaccaaccactcag

SEQ ID NO: 1258561 - DNA, 25 bp, Homo sapien
tcagtctggcgcgggcagtgtcacc

SEQ ID NO: 1258562 - DNA, 25 bp, Homo sapien
cccgcgtcggctagtggtcagtctg

SEQ ID NO: 1258563 - DNA, 25 bp, Homo sapien
ctgcctcctcagacaccgcgcggtt

SEQ ID NO: 1258564 - DNA, 25 bp, Homo sapien
tgcctcctcagacaccgcgcggttc

SEQ ID NO: 1258565 - DNA, 25 bp, Homo sapien
gcgcggttcccactcagccggctgc

SEQ ID NO: 1258566 - DNA, 25 bp, Homo sapien
agacaccgcgcggttcccactcagc

SEQ ID NO: 1258567 - DNA, 25 bp, Homo sapien
catagctccacttgcgcgaactgtg

SEQ ID NO: 1258568 - DNA, 25 bp, Homo sapien
cctcacatgattagaacagcacagc

SEQ ID NO: 1258569 - DNA, 25 bp, Homo sapien
gggcagttcttaagagcgactctga

SEQ ID NO: 1258570 - DNA, 25 bp, Homo sapien
tccaggcatcctaaacggtctgcag

SEQ ID NO: 1258571 - DNA, 25 bp, Homo sapien
gctccttagacatgtccgactgaat

SEQ ID NO: 1258572 - DNA, 25 bp, Homo sapien
ccgactgaatctgaagctggaagga

SEQ ID NO: 1258573 - DNA, 25 bp, Homo sapien
gagcgaactgttattcctgtttcca

SEQ ID NO: 1258574 - DNA, 25 bp, Homo sapien
gatcacgatcagacttaggcacttg

SEQ ID NO: 1258575 - DNA, 25 bp, Homo sapien
tcccacaggcaaaagggtcacgctt

SEQ ID NO: 1258576 - DNA, 25 bp, Homo sapien
tgagtcccaaggcacgctcttcaag

SEQ ID NO: 1258577 - DNA, 25 bp, Homo sapien
cggagtaggacactcgctagggtac

SEQ ID NO: 1258578 - DNA, 25 bp, Homo sapien
ccttccattacggatgcggagtagg

SEQ ID NO: 1258579 - DNA, 25 bp, Homo sapien
ctggagactcagtggctgatcccaa

SEQ ID NO: 1258580 - DNA, 25 bp, Homo sapien
agactcagtggctgatcccaaatgc

SEQ ID NO: 1258581 - DNA, 25 bp, Homo sapien
tgcctcctcctcgggtatctggaga

SEQ ID NO: 1258582 - DNA, 25 bp, Homo sapien
ggctgctgattctagttagatgtca

SEQ ID NO: 1258583 - DNA, 25 bp, Homo sapien
acgctgggcaggagtagccgcatgg

SEQ ID NO: 1258584 - DNA, 25 bp, Homo sapien
caggagtagccgcatgggatgtcct

SEQ ID NO: 1258585 - DNA, 25 bp, Homo sapien
cgcatgggatgtcctcctcttgtgc

SEQ ID NO: 1258586 - DNA, 25 bp, Homo sapien
tagccgcatgggatgtcctcctctt

SEQ ID NO: 1258587 - DNA, 25 bp, Homo sapien
tttcctcactgtctcagccacagga

SEQ ID NO: 1258588 - DNA, 25 bp, Homo sapien
tgagaatctggagtagcagaaaaac

SEQ ID NO: 1258589 - DNA, 25 bp, Homo sapien
cctttacggagaccaaatctgctct

SEQ ID NO: 1258590 - DNA, 25 bp, Homo sapien
tctgctctattatcctatttgtctc

SEQ ID NO: 1258591 - DNA, 25 bp, Homo sapien
aaagcaaagccatgggcatcccgga

SEQ ID NO: 1258592 - DNA, 25 bp, Homo sapien
gagcttgcatttagcctgggaacca

SEQ ID NO: 1258593 - DNA, 25 bp, Homo sapien
tgccagtatacagccccaaagttga

SEQ ID NO: 1258594 - DNA, 25 bp, Homo sapien
caaagcgggtaatgtgatgaagcac

SEQ ID NO: 1258595 - DNA, 25 bp, Homo sapien
gggaggccgcaaaaactggtctgat

SEQ ID NO: 1258596 - DNA, 25 bp, Homo sapien
taaggcctggaaagggcactgtaac

SEQ ID NO: 1258597 - DNA, 25 bp, Homo sapien
tgatttcagggttcttctctaaggg

SEQ ID NO: 1258598 - DNA, 25 bp, Homo sapien
ggttcacagggaagcgtgccactca

SEQ ID NO: 1258599 - DNA, 25 bp, Homo sapien
cattctaggcaacggaagcggccgt

SEQ ID NO: 1258600 - DNA, 25 bp, Homo sapien
ttcgctgcacgagtaaggcttcccc

SEQ ID NO: 1258601 - DNA, 25 bp, Homo sapien
ccggtgtgcgcccaagtgtaggtca

SEQ ID NO: 1258602 - DNA, 25 bp, Homo sapien
tgagctcgttcatgtcgcagcagca

SEQ ID NO: 1258603 - DNA, 25 bp, Homo sapien
cgctctgccggaaggtgcgggcgca

SEQ ID NO: 1258604 - DNA, 25 bp, Homo sapien
agcagggtcagaggttgtccccaag

SEQ ID NO: 1258605 - DNA, 25 bp, Homo sapien
tggatgcgcgcgtgactccgcagcc

SEQ ID NO: 1258606 - DNA, 25 bp, Homo sapien
tggtggaagagcagcgcgctctgcc

SEQ ID NO: 1258607 - DNA, 25 bp, Homo sapien
ggcgtctgagacacggggtcgcgtg

SEQ ID NO: 1258608 - DNA, 25 bp, Homo sapien
gcgtctgagacacggggtcgcgtgg

SEQ ID NO: 1258609 - DNA, 25 bp, Homo sapien
cactggtgggcgtctgagacacggg

SEQ ID NO: 1258610 - DNA, 25 bp, Homo sapien
ccacactggtgggcgtctgagacac

SEQ ID NO: 1258611 - DNA, 25 bp, Homo sapien
gcgtggaactctcgctgaagcagcg

SEQ ID NO: 1258612 - DNA, 25 bp, Homo sapien
cgtctgcaggtgtcgcgtcagcgta

SEQ ID NO: 1258613 - DNA, 25 bp, Homo sapien
tgcacgttgagattggacacgcacg

SEQ ID NO: 1258614 - DNA, 25 bp, Homo sapien
tcagcgtagagctcttgccaaagca

SEQ ID NO: 1258615 - DNA, 25 bp, Homo sapien
ttcagccggcccctcaaagacgagg

SEQ ID NO: 1258616 - DNA, 25 bp, Homo sapien
tgcccactgcggactggatggcaac

SEQ ID NO: 1258617 - DNA, 25 bp, Homo sapien
ttttcctgttcagccggcccctcaa

SEQ ID NO: 1258618 - DNA, 25 bp, Homo sapien
aaagacgagggcagtgcccactgcg

SEQ ID NO: 1258619 - DNA, 25 bp, Homo sapien
aggtaggaggccacatcgtcttttc

SEQ ID NO: 1258620 - DNA, 25 bp, Homo sapien
gaggctacgtgaagggctgccaaca

SEQ ID NO: 1258621 - DNA, 25 bp, Homo sapien
aatctccatctacgagttgcctcaa

SEQ ID NO: 1258622 - DNA, 25 bp, Homo sapien
aactgtccccgtgatactatatagg

SEQ ID NO: 1258623 - DNA, 25 bp, Homo sapien
cgagttatacgaggacagcatggca

SEQ ID NO: 1258624 - DNA, 25 bp, Homo sapien
gagagcacagtagcattaaagggac

SEQ ID NO: 1258625 - DNA, 25 bp, Homo sapien
ggtaacgtgcctacagccaaatctg

SEQ ID NO: 1258626 - DNA, 25 bp, Homo sapien
tgaccattacctgaagaggcaggac

SEQ ID NO: 1258627 - DNA, 25 bp, Homo sapien
gagaggccccttgatctgccctggg

SEQ ID NO: 1258628 - DNA, 25 bp, Homo sapien
cagtgaaaatggtcctcacctggct

SEQ ID NO: 1258629 - DNA, 25 bp, Homo sapien
caggcagctcctagcatggagacat

SEQ ID NO: 1258630 - DNA, 25 bp, Homo sapien
catccttcatggaagtgagctttcc

SEQ ID NO: 1258631 - DNA, 25 bp, Homo sapien
tgagcaaaaagttgaccggctccag

SEQ ID NO: 1258632 - DNA, 25 bp, Homo sapien
gctccaggggattttccatcctgcc

SEQ ID NO: 1258633 - DNA, 25 bp, Homo sapien
tttcactagccatgagcaaaaagtt

SEQ ID NO: 1258634 - DNA, 25 bp, Homo sapien
aacaactttatttcactagccatga

SEQ ID NO: 1258635 - DNA, 25 bp, Homo sapien
cacccaaccacaactgccgcggggc

SEQ ID NO: 1258636 - DNA, 25 bp, Homo sapien
tccgcgacacgcgcgggcgacttga

SEQ ID NO: 1258637 - DNA, 25 bp, Homo sapien
actgccgcggggctccgcgacacgc

SEQ ID NO: 1258638 - DNA, 25 bp, Homo sapien
ggggctccgcgacacgcgcgggcga

SEQ ID NO: 1258639 - DNA, 25 bp, Homo sapien
ccactgggaatacatctcaggattt

SEQ ID NO: 1258640 - DNA, 25 bp, Homo sapien
cagtgggttgactcaacttctgtag

SEQ ID NO: 1258641 - DNA, 25 bp, Homo sapien
tgtctgtgggtctcgtggaatttgg

SEQ ID NO: 1258642 - DNA, 25 bp, Homo sapien
ctcaggatttgagggcagtgggttg

SEQ ID NO: 1258643 - DNA, 25 bp, Homo sapien
gtaagcagttaggaacgatcctctg

SEQ ID NO: 1258644 - DNA, 25 bp, Homo sapien
taggaacgatcctctggagtccagg

SEQ ID NO: 1258645 - DNA, 25 bp, Homo sapien
gaggtgatgctttgtgatcaagtcc

SEQ ID NO: 1258646 - DNA, 25 bp, Homo sapien
ttgagatacctaatagatgtgtcaa

SEQ ID NO: 1258647 - DNA, 25 bp, Homo sapien
agcccgcaggcaaggtgcttacctt

SEQ ID NO: 1258648 - DNA, 25 bp, Homo sapien
cagaaagcccgcaggcaaggtgctt

SEQ ID NO: 1258649 - DNA, 25 bp, Homo sapien
gcaggcaaggtgcttaccttgagtc

SEQ ID NO: 1258650 - DNA, 25 bp, Homo sapien
atccggagaccagaaagcccgcagg

SEQ ID NO: 1258651 - DNA, 25 bp, Homo sapien
gccgcggcggtgagagcgccgaatc

SEQ ID NO: 1258652 - DNA, 25 bp, Homo sapien
gggccgcggcggtgagagcgccgaa

SEQ ID NO: 1258653 - DNA, 25 bp, Homo sapien
cccgggccgcggcggtgagagcgcc

SEQ ID NO: 1258654 - DNA, 25 bp, Homo sapien
atcgaacccgggccgcggcggtgag

SEQ ID NO: 1258655 - DNA, 25 bp, Homo sapien
tggtacaaactagggcttgagaacc

SEQ ID NO: 1258656 - DNA, 25 bp, Homo sapien
tccttcctaatcaggagagcatggg

SEQ ID NO: 1258657 - DNA, 25 bp, Homo sapien
gaaactctgagggtgtgcccaataa

SEQ ID NO: 1258658 - DNA, 25 bp, Homo sapien
tcacctgggaaatcgatggaaatgc

SEQ ID NO: 1258659 - DNA, 25 bp, Homo sapien
tgccgccgttgagaaaacgcaacat

SEQ ID NO: 1258660 - DNA, 25 bp, Homo sapien
gagaaaacgcaacatcaacgccaac

SEQ ID NO: 1258661 - DNA, 25 bp, Homo sapien
cagtggtgaggacgaactcctcgga

SEQ ID NO: 1258662 - DNA, 25 bp, Homo sapien
aactcctcggatgccgccgttgaga

SEQ ID NO: 1258663 - DNA, 25 bp, Homo sapien
aagatgaagctgtctttactcacag

SEQ ID NO: 1258664 - DNA, 25 bp, Homo sapien
gaagctgtctttactcacagagtct

SEQ ID NO: 1258665 - DNA, 25 bp, Homo sapien
gtctttactcacagagtctaagaac

SEQ ID NO: 1258666 - DNA, 25 bp, Homo sapien
tgtctttactcacagagtctaagaa

SEQ ID NO: 1258667 - DNA, 25 bp, Homo sapien
taggctgtaaacacatcaccctggc

SEQ ID NO: 1258668 - DNA, 25 bp, Homo sapien
ggatgcaggatttaccacagaagct

SEQ ID NO: 1258669 - DNA, 25 bp, Homo sapien
gagaaagagccctacagacagctgg

SEQ ID NO: 1258670 - DNA, 25 bp, Homo sapien
tctgcagaacggcaaggagatcagc

SEQ ID NO: 1258671 - DNA, 25 bp, Homo sapien
tacatttgtcttactataccttccc

SEQ ID NO: 1258672 - DNA, 25 bp, Homo sapien
cagaaactggcaacagggagccctg

SEQ ID NO: 1258673 - DNA, 25 bp, Homo sapien
ctcagactcaatggccctaggagct

SEQ ID NO: 1258674 - DNA, 25 bp, Homo sapien
ttcttaaacgatgtactctaaagca

SEQ ID NO: 1258675 - DNA, 25 bp, Homo sapien
cagattctgcttttaagtgcagaag

SEQ ID NO: 1258676 - DNA, 25 bp, Homo sapien
ccatggcacccggcccacagattct

SEQ ID NO: 1258677 - DNA, 25 bp, Homo sapien
agcattcagaacctcaagcagcttt

SEQ ID NO: 1258678 - DNA, 25 bp, Homo sapien
acctttgagtggatacctctcccag

SEQ ID NO: 1258679 - DNA, 25 bp, Homo sapien
acttcacctttgagtggatacctct

SEQ ID NO: 1258680 - DNA, 25 bp, Homo sapien
agacttcacctttgagtggatacct

SEQ ID NO: 1258681 - DNA, 25 bp, Homo sapien
caggtcgtcattatcctccccggtg

SEQ ID NO: 1258682 - DNA, 25 bp, Homo sapien
ccgcagcattgtcgggaggtgcaat

SEQ ID NO: 1258683 - DNA, 25 bp, Homo sapien
ggtccaaatgcgctgaggtttcaca

SEQ ID NO: 1258684 - DNA, 25 bp, Homo sapien
tccttggataagagatgtacccact

SEQ ID NO: 1258685 - DNA, 25 bp, Homo sapien
gctgtagaactcttccaagggtgca

SEQ ID NO: 1258686 - DNA, 25 bp, Homo sapien
tccggatgatgagaggtctgacctt

SEQ ID NO: 1258687 - DNA, 25 bp, Homo sapien
ggaaattgcagttcatccggatgat

SEQ ID NO: 1258688 - DNA, 25 bp, Homo sapien
catagactcgccaaagctgtagaac

SEQ ID NO: 1258689 - DNA, 25 bp, Homo sapien
tgtggtactccctgaagcatttggc

SEQ ID NO: 1258690 - DNA, 25 bp, Homo sapien
tccagtgcccaatcatatcgaagcg

SEQ ID NO: 1258691 - DNA, 25 bp, Homo sapien
caggcaatgtatctccggaaggcaa

SEQ ID NO: 1258692 - DNA, 25 bp, Homo sapien
ttctggcacttctcacaccgggtgt

SEQ ID NO: 1258693 - DNA, 25 bp, Homo sapien
tatatcacatgtaggcataacacaa

SEQ ID NO: 1258694 - DNA, 25 bp, Homo sapien
agaagtgctcaactgccatctgtat

SEQ ID NO: 1258695 - DNA, 25 bp, Homo sapien
tgaataaaaagtgatccataacttt

SEQ ID NO: 1258696 - DNA, 25 bp, Homo sapien
taactgtattgtgggtagggagaaa

SEQ ID NO: 1258697 - DNA, 25 bp, Homo sapien
gaaatctgcacctctagccctctga

SEQ ID NO: 1258698 - DNA, 25 bp, Homo sapien
tggtaaagtcttcttactgttcttg

SEQ ID NO: 1258699 - DNA, 25 bp, Homo sapien
ggcagattatccctcaaaagtttga

SEQ ID NO: 1258700 - DNA, 25 bp, Homo sapien
tcttagattataaaccatggcatgc

SEQ ID NO: 1258701 - DNA, 25 bp, Homo sapien
tacacaatgaagtgtgattaatatt

SEQ ID NO: 1258702 - DNA, 25 bp, Homo sapien
tcatgatttgggagcaacctaagtg

SEQ ID NO: 1258703 - DNA, 25 bp, Homo sapien
aagaaagatctgaactcatgtttat

SEQ ID NO: 1258704 - DNA, 25 bp, Homo sapien
tgtttattttctgcactattctcaa

SEQ ID NO: 1258705 - DNA, 25 bp, Homo sapien
ggcagaaatggctgtaatccaaaag

SEQ ID NO: 1258706 - DNA, 25 bp, Homo sapien
aaaaagatatatactgggaggctga

SEQ ID NO: 1258707 - DNA, 25 bp, Homo sapien
actacattgagatatctcatccggg

SEQ ID NO: 1258708 - DNA, 25 bp, Homo sapien
gggaacctcataccaggacctgtca

SEQ ID NO: 1258709 - DNA, 25 bp, Homo sapien
ctctggtgttttcctgtccagtggg

SEQ ID NO: 1258710 - DNA, 25 bp, Homo sapien
ctctctggtgttttcctgtccagtg

SEQ ID NO: 1258711 - DNA, 25 bp, Homo sapien
tgttttcctgtccagtgggggctgc

SEQ ID NO: 1258712 - DNA, 25 bp, Homo sapien
aaactctctggtgttttcctgtcca

SEQ ID NO: 1258713 - DNA, 25 bp, Homo sapien
cttgggtttgcacgccacgtgctgg

SEQ ID NO: 1258714 - DNA, 25 bp, Homo sapien
tggcttgggtttgcacgccacgtgc

SEQ ID NO: 1258715 - DNA, 25 bp, Homo sapien
cctggcttgggtttgcacgccacgt

SEQ ID NO: 1258716 - DNA, 25 bp, Homo sapien
ggcttgggtttgcacgccacgtgct

SEQ ID NO: 1258717 - DNA, 25 bp, Homo sapien
cccgctggcaatgggaatgttcact

SEQ ID NO: 1258718 - DNA, 25 bp, Homo sapien
ccaaatctgtacaggagtcaccaaa

SEQ ID NO: 1258719 - DNA, 25 bp, Homo sapien
gaactcccccgctggcaatgggaat

SEQ ID NO: 1258720 - DNA, 25 bp, Homo sapien
tctctttcccttattatcctaagaa

SEQ ID NO: 1258721 - DNA, 25 bp, Homo sapien
ctcgagggacagatgtgcaaaaagc

SEQ ID NO: 1258722 - DNA, 25 bp, Homo sapien
gtgcaaaaagcaaggtggaggccct

SEQ ID NO: 1258723 - DNA, 25 bp, Homo sapien
tgcaaaaagcaaggtggaggccctt

SEQ ID NO: 1258724 - DNA, 25 bp, Homo sapien
gagggacagatgtgcaaaaagcaag

SEQ ID NO: 1258725 - DNA, 25 bp, Homo sapien
gctgaatttcagggcatcaccacct

SEQ ID NO: 1258726 - DNA, 25 bp, Homo sapien
caagtgatgaccgacacactctgac

SEQ ID NO: 1258727 - DNA, 25 bp, Homo sapien
atcaagtgatgaccgacacactctg

SEQ ID NO: 1258728 - DNA, 25 bp, Homo sapien
gcatcaagtgatgaccgacacactc

SEQ ID NO: 1258729 - DNA, 25 bp, Homo sapien
catcaagtgatgaccgacacactct

SEQ ID NO: 1258730 - DNA, 25 bp, Homo sapien
gaagagcccacgtgatgtctacatg

SEQ ID NO: 1258731 - DNA, 25 bp, Homo sapien
gaacacatgcagtacggacaaggag

SEQ ID NO: 1258732 - DNA, 25 bp, Homo sapien
gtagctctgccaaatgatccaagtg

SEQ ID NO: 1258733 - DNA, 25 bp, Homo sapien
gacactcagccgtcaagaaggtgga

SEQ ID NO: 1258734 - DNA, 25 bp, Homo sapien
gagaaggcaaactacacagatggga

SEQ ID NO: 1258735 - DNA, 25 bp, Homo sapien
caaccctggaacaaagttagaagag

SEQ ID NO: 1258736 - DNA, 25 bp, Homo sapien
tgaggaggatacacacagtgtgacc

SEQ ID NO: 1258737 - DNA, 25 bp, Homo sapien
tgggatatctgccacaatgcatctg

SEQ ID NO: 1258738 - DNA, 25 bp, Homo sapien
tttaggaggagcaggagcttccttc

SEQ ID NO: 1258739 - DNA, 25 bp, Homo sapien
ggaggagcaggagcttccttcgctt

SEQ ID NO: 1258740 - DNA, 25 bp, Homo sapien
taggaggagcaggagcttccttcgc

SEQ ID NO: 1258741 - DNA, 25 bp, Homo sapien
ctttaggaggagcaggagcttcctt

SEQ ID NO: 1258742 - DNA, 25 bp, Homo sapien
cttggcctttaaagccttcgctttg

SEQ ID NO: 1258743 - DNA, 25 bp, Homo sapien
ctttaaagccttcgctttggcttcg

SEQ ID NO: 1258744 - DNA, 25 bp, Homo sapien
tggcctttaaagccttcgctttggc

SEQ ID NO: 1258745 - DNA, 25 bp, Homo sapien
atgccttgttctctttatcaggaca

SEQ ID NO: 1258746 - DNA, 25 bp, Homo sapien
cttgttctctttatcaggacaaatc

SEQ ID NO: 1258747 - DNA, 25 bp, Homo sapien
gccttgttctctttatcaggacaaa

SEQ ID NO: 1258748 - DNA, 25 bp, Homo sapien
gttctctttatcaggacaaatcagg

SEQ ID NO: 1258749 - DNA, 25 bp, Homo sapien
ttagccagctggactcagtttaggt

SEQ ID NO: 1258750 - DNA, 25 bp, Homo sapien
tagccagctggactcagtttaggtg

SEQ ID NO: 1258751 - DNA, 25 bp, Homo sapien
gccagctggactcagtttaggtgat

SEQ ID NO: 1258752 - DNA, 25 bp, Homo sapien
cagctggactcagtttaggtgatcc

SEQ ID NO: 1258753 - DNA, 25 bp, Homo sapien
taagttaacatgatttggataaaac

SEQ ID NO: 1258754 - DNA, 25 bp, Homo sapien
tgcttgagttctagtcaaataagct

SEQ ID NO: 1258755 - DNA, 25 bp, Homo sapien
gaaatataggaactgatcaaatgtt

SEQ ID NO: 1258756 - DNA, 25 bp, Homo sapien
ttcaccaaactcctagaaatatagg

SEQ ID NO: 1258757 - DNA, 25 bp, Homo sapien
ctaggccagtaagtagtgcttgtgc

SEQ ID NO: 1258758 - DNA, 25 bp, Homo sapien
gtgcttgtgctcatctccttggctg

SEQ ID NO: 1258759 - DNA, 25 bp, Homo sapien
taagtagtgcttgtgctcatctcct

SEQ ID NO: 1258760 - DNA, 25 bp, Homo sapien
ccagtaagtagtgcttgtgctcatc

SEQ ID NO: 1258761 - DNA, 25 bp, Homo sapien
ggattctgccagcatagtgctcctg

SEQ ID NO: 1258762 - DNA, 25 bp, Homo sapien
gagaaggggatgcactgttggggag

SEQ ID NO: 1258763 - DNA, 25 bp, Homo sapien
agggattctgccagcatagtgctcc

SEQ ID NO: 1258764 - DNA, 25 bp, Homo sapien
attctgccagcatagtgctcctgga

SEQ ID NO: 1258765 - DNA, 25 bp, Homo sapien
ccaagggccattaggctctcagcat

SEQ ID NO: 1258766 - DNA, 25 bp, Homo sapien
caagggccattaggctctcagcatg

SEQ ID NO: 1258767 - DNA, 25 bp, Homo sapien
tgtgccaagggccattaggctctca

SEQ ID NO: 1258768 - DNA, 25 bp, Homo sapien
tgccaagggccattaggctctcagc

SEQ ID NO: 1258769 - DNA, 25 bp, Homo sapien
gagatcctttattaaaagcacactg

SEQ ID NO: 1258770 - DNA, 25 bp, Homo sapien
gatcctttattaaaagcacactgtt

SEQ ID NO: 1258771 - DNA, 25 bp, Homo sapien
agctagagatcctttattaaaagca

SEQ ID NO: 1258772 - DNA, 25 bp, Homo sapien
tcctttattaaaagcacactgttgg

SEQ ID NO: 1258773 - DNA, 25 bp, Homo sapien
aagaacacagtggcgcaggctgggt

SEQ ID NO: 1258774 - DNA, 25 bp, Homo sapien
ctttattgattggtgtgccgttttc

SEQ ID NO: 1258775 - DNA, 25 bp, Homo sapien
tattgattggtgtgccgttttctct

SEQ ID NO: 1258776 - DNA, 25 bp, Homo sapien
agttctttattgattggtgtgccgt

SEQ ID NO: 1258777 - DNA, 25 bp, Homo sapien
atgtcagagcaacggcccaagtctg

SEQ ID NO: 1258778 - DNA, 25 bp, Homo sapien
gtccatgtcagagcaacggcccaag

SEQ ID NO: 1258779 - DNA, 25 bp, Homo sapien
tcccaaggaagtaggtctgagcagc

SEQ ID NO: 1258780 - DNA, 25 bp, Homo sapien
gtaggtctgagcagcttgtcctggc

SEQ ID NO: 1258781 - DNA, 25 bp, Homo sapien
gagtctgacacgcgggcaaaggctc

SEQ ID NO: 1258782 - DNA, 25 bp, Homo sapien
acacgcgggcaaaggctcctccggg

SEQ ID NO: 1258783 - DNA, 25 bp, Homo sapien
agccccaggtcctttcccagagatg

SEQ ID NO: 1258784 - DNA, 25 bp, Homo sapien
cagaggagggatggagtctgacacg

SEQ ID NO: 1258785 - DNA, 25 bp, Homo sapien
cagcccccggagacttaaatacagg

SEQ ID NO: 1258786 - DNA, 25 bp, Homo sapien
ccagcccccggagacttaaatacag

SEQ ID NO: 1258787 - DNA, 25 bp, Homo sapien
tcatgaccagcttgttgaagagatc

SEQ ID NO: 1258788 - DNA, 25 bp, Homo sapien
ccttgcgcctcatgaccagcttgtt

SEQ ID NO: 1258789 - DNA, 25 bp, Homo sapien
catgaccagcttgttgaagagatcc

SEQ ID NO: 1258790 - DNA, 25 bp, Homo sapien
gaccagcttgttgaagagatccgac

SEQ ID NO: 1258791 - DNA, 25 bp, Homo sapien
tgcccaccttggctcgtggctctca

SEQ ID NO: 1258792 - DNA, 25 bp, Homo sapien
caagtgcccaccttggctcgtggct

SEQ ID NO: 1258793 - DNA, 25 bp, Homo sapien
atcaagtgcccaccttggctcgtgg

SEQ ID NO: 1258794 - DNA, 25 bp, Homo sapien
agtgcccaccttggctcgtggctct

SEQ ID NO: 1258795 - DNA, 25 bp, Homo sapien
gcaaaagcagcgctgggtacaagct

SEQ ID NO: 1258796 - DNA, 25 bp, Homo sapien
gtgtctgcgttcacagcaggcatca

SEQ ID NO: 1258797 - DNA, 25 bp, Homo sapien
gctcaaaaccatagtgcccagggca

SEQ ID NO: 1258798 - DNA, 25 bp, Homo sapien
tgaccattgccttggaccgctcttg

SEQ ID NO: 1258799 - DNA, 25 bp, Homo sapien
cttctccagctttcgctccttcatg

SEQ ID NO: 1258800 - DNA, 25 bp, Homo sapien
ccagctttcgctccttcatgctgcg

SEQ ID NO: 1258801 - DNA, 25 bp, Homo sapien
ttctccagctttcgctccttcatgc

SEQ ID NO: 1258802 - DNA, 25 bp, Homo sapien
cttggccttgccgatgcccccagct

SEQ ID NO: 1258803 - DNA, 25 bp, Homo sapien
gccgatgcccccagcttggcggatg

SEQ ID NO: 1258804 - DNA, 25 bp, Homo sapien
tggccttgccgatgcccccagcttg

SEQ ID NO: 1258805 - DNA, 25 bp, Homo sapien
cgatgcccccagcttggcggatgga

SEQ ID NO: 1258806 - DNA, 25 bp, Homo sapien
agcagagtggccagccaccggaggg

SEQ ID NO: 1258807 - DNA, 25 bp, Homo sapien
ggccagccaccggaggggtcaacca

SEQ ID NO: 1258808 - DNA, 25 bp, Homo sapien
ctagcagagtggccagccaccggag

SEQ ID NO: 1258809 - DNA, 25 bp, Homo sapien
gagtggccagccaccggaggggtca

SEQ ID NO: 1258810 - DNA, 25 bp, Homo sapien
tgagcacgccagaaatcaggtggcc

SEQ ID NO: 1258811 - DNA, 25 bp, Homo sapien
cctctgccctagaagtgagaagtcc

SEQ ID NO: 1258812 - DNA, 25 bp, Homo sapien
gaagtccagagctctacagtttgaa

SEQ ID NO: 1258813 - DNA, 25 bp, Homo sapien
aatccacccgagtgcactgagcacg

SEQ ID NO: 1258814 - DNA, 25 bp, Homo sapien
ctgctgtcgtcctgcctggcgcctt

SEQ ID NO: 1258815 - DNA, 25 bp, Homo sapien
ctgaaggagacgcgctgctgctgct

SEQ ID NO: 1258816 - DNA, 25 bp, Homo sapien
ctgctgctgtcgtcctgcctggcgc

SEQ ID NO: 1258817 - DNA, 25 bp, Homo sapien
tgctgtcgtcctgcctggcgccttg

SEQ ID NO: 1258818 - DNA, 25 bp, Homo sapien
ctacaggggccgcggttgagggtgg

SEQ ID NO: 1258819 - DNA, 25 bp, Homo sapien
ggtggtgttagtaccccatcttgta

SEQ ID NO: 1258820 - DNA, 25 bp, Homo sapien
gtggtgttagtaccccatcttgtag

SEQ ID NO: 1258821 - DNA, 25 bp, Homo sapien
tacatgaggtcgttggcaatgccgg

SEQ ID NO: 1258822 - DNA, 25 bp, Homo sapien
ggcccaggtcggcaatgtacatgag

SEQ ID NO: 1258823 - DNA, 25 bp, Homo sapien
gcaggtaggatggaacatcaatctc

SEQ ID NO: 1258824 - DNA, 25 bp, Homo sapien
tctggcacatagaagtagttctctg

SEQ ID NO: 1258825 - DNA, 25 bp, Homo sapien
tgcacctcccatgggtggaataagg

SEQ ID NO: 1258826 - DNA, 25 bp, Homo sapien
gtgtgcacctcccatgggtggaata

SEQ ID NO: 1258827 - DNA, 25 bp, Homo sapien
ccttgactggagaggagctctggca

SEQ ID NO: 1258828 - DNA, 25 bp, Homo sapien
catgggtggaataaggggcccaaca

SEQ ID NO: 1258829 - DNA, 25 bp, Homo sapien
ctgctgttccagctgctctctcttg

SEQ ID NO: 1258830 - DNA, 25 bp, Homo sapien
tggacaagggggcatcaaacagctt

SEQ ID NO: 1258831 - DNA, 25 bp, Homo sapien
tgatggacaagggggcatcaaacag

SEQ ID NO: 1258832 - DNA, 25 bp, Homo sapien
atggacaagggggcatcaaacagct

SEQ ID NO: 1258833 - DNA, 25 bp, Homo sapien
gatggacaagggggcatcaaacagc

SEQ ID NO: 1258834 - DNA, 25 bp, Homo sapien
ggtcaggcaagctgacacccgctgt

SEQ ID NO: 1258835 - DNA, 25 bp, Homo sapien
tgagcccatgttcctctcccacatc

SEQ ID NO: 1258836 - DNA, 25 bp, Homo sapien
acatgggggtcaggcaagctgacac

SEQ ID NO: 1258837 - DNA, 25 bp, Homo sapien
ctgggtccccactaagccaggccgg

SEQ ID NO: 1258838 - DNA, 25 bp, Homo sapien
acccctcggccctgccctctggcca

SEQ ID NO: 1258839 - DNA, 25 bp, Homo sapien
cccctcggccctgccctctggccat

SEQ ID NO: 1258840 - DNA, 25 bp, Homo sapien
ccctcggccctgccctctggccata

SEQ ID NO: 1258841 - DNA, 25 bp, Homo sapien
cctcggccctgccctctggccatac

SEQ ID NO: 1258842 - DNA, 25 bp, Homo sapien
agtccctcttctgcatcgtcctcgg

SEQ ID NO: 1258843 - DNA, 25 bp, Homo sapien
aaggagctgacagagctgatgttgc

SEQ ID NO: 1258844 - DNA, 25 bp, Homo sapien
tggtgctcacgcacacaggaaagtc

SEQ ID NO: 1258845 - DNA, 25 bp, Homo sapien
ttggtgctcacgcacacaggaaagt

SEQ ID NO: 1258846 - DNA, 25 bp, Homo sapien
tgtgtgacaggctatatgcgcggcc

SEQ ID NO: 1258847 - DNA, 25 bp, Homo sapien
gtgacaggctatatgcgcggccagc

SEQ ID NO: 1258848 - DNA, 25 bp, Homo sapien
aatatttggtgctgggcctaatcag

SEQ ID NO: 1258849 - DNA, 25 bp, Homo sapien
acagaaccctatggtggccccggct

SEQ ID NO: 1258850 - DNA, 25 bp, Homo sapien
cagggtacttggcactggagaacac

SEQ ID NO: 1258851 - DNA, 25 bp, Homo sapien
tggagccatattcctgcaggcgccc

SEQ ID NO: 1258852 - DNA, 25 bp, Homo sapien
ggtcctgggcgcccgtgaagatgga

SEQ ID NO: 1258853 - DNA, 25 bp, Homo sapien
cggtgcttgctctggatcctgtggc

SEQ ID NO: 1258854 - DNA, 25 bp, Homo sapien
agttggaagcctgggcgagaagaaa

SEQ ID NO: 1258855 - DNA, 25 bp, Homo sapien
aggctcagagggctaggattgcttg

SEQ ID NO: 1258856 - DNA, 25 bp, Homo sapien
aatggagggactgcccagtagcctc

SEQ ID NO: 1258857 - DNA, 25 bp, Homo sapien
gaaatggagggactgcccagtagcc

SEQ ID NO: 1258858 - DNA, 25 bp, Homo sapien
gcccttgatcttctcaatcttggcc

SEQ ID NO: 1258859 - DNA, 25 bp, Homo sapien
aggagaccttctctccaatggcctg

SEQ ID NO: 1258860 - DNA, 25 bp, Homo sapien
tcaatcttggcctgggccaaggaga

SEQ ID NO: 1258861 - DNA, 25 bp, Homo sapien
tgggccaaggagaccttctctccaa

SEQ ID NO: 1258862 - DNA, 25 bp, Homo sapien
gcaagggctctgaagtcagggtcac

SEQ ID NO: 1258863 - DNA, 25 bp, Homo sapien
ctcaggcaagggctctgaagtcagg

SEQ ID NO: 1258864 - DNA, 25 bp, Homo sapien
gggctctgaagtcagggtcacctac

SEQ ID NO: 1258865 - DNA, 25 bp, Homo sapien
ccaggccctcaggcaagggctctga

SEQ ID NO: 1258866 - DNA, 25 bp, Homo sapien
atccagggggcctctacaaggataa

SEQ ID NO: 1258867 - DNA, 25 bp, Homo sapien
tccagggggcctctacaaggataat

SEQ ID NO: 1258868 - DNA, 25 bp, Homo sapien
ttgacggtgctgagttccctgcact

SEQ ID NO: 1258869 - DNA, 25 bp, Homo sapien
cggtgctgagttccctgcactctca

SEQ ID NO: 1258870 - DNA, 25 bp, Homo sapien
aggagttgacggtgctgagttccct

SEQ ID NO: 1258871 - DNA, 25 bp, Homo sapien
tgcagggtcgaggagttgacggtgc

SEQ ID NO: 1258872 - DNA, 25 bp, Homo sapien
tgcatctcatggaacgccatttccc

SEQ ID NO: 1258873 - DNA, 25 bp, Homo sapien
tgttccccagatgtgccaagtgcat

SEQ ID NO: 1258874 - DNA, 25 bp, Homo sapien
caagtgtctgatgctttaaggcaca

SEQ ID NO: 1258875 - DNA, 25 bp, Homo sapien
tccatgttctttggccgcagcaagg

SEQ ID NO: 1258876 - DNA, 25 bp, Homo sapien
gggtctgccctgattactcctggct

SEQ ID NO: 1258877 - DNA, 25 bp, Homo sapien
tagaatccgacccaataagccaaag

SEQ ID NO: 1258878 - DNA, 25 bp, Homo sapien
cactcaagcggcttaagtgttccat

SEQ ID NO: 1258879 - DNA, 25 bp, Homo sapien
tccaccaacgttagaaggccttggc

SEQ ID NO: 1258880 - DNA, 25 bp, Homo sapien
gccagagggtagactgcaatcacca

SEQ ID NO: 1258881 - DNA, 25 bp, Homo sapien
tggactgattccagccttgcacgga

SEQ ID NO: 1258882 - DNA, 25 bp, Homo sapien
caaggaacaaatgtgaagcccaaca

SEQ ID NO: 1258883 - DNA, 25 bp, Homo sapien
cagcaggattttgacggcttctaac

SEQ ID NO: 1258884 - DNA, 25 bp, Homo sapien
tgtcgtatcctgactacaataacag

SEQ ID NO: 1258885 - DNA, 25 bp, Homo sapien
tgccctgctcaaaatccaatcacag

SEQ ID NO: 1258886 - DNA, 25 bp, Homo sapien
gtctgtagcctcacccctgtcgtat

SEQ ID NO: 1258887 - DNA, 25 bp, Homo sapien
tccgtgacggatgcctgaggaacct

SEQ ID NO: 1258888 - DNA, 25 bp, Homo sapien
tccgaaggctgctctactgattggt

SEQ ID NO: 1258889 - DNA, 25 bp, Homo sapien
gagctcctcagtctaagccaagtgg

SEQ ID NO: 1258890 - DNA, 25 bp, Homo sapien
cccacgcggttcatgctagcaatta

SEQ ID NO: 1258891 - DNA, 25 bp, Homo sapien
gattctgggatagacatgaggacca

SEQ ID NO: 1258892 - DNA, 25 bp, Homo sapien
ccttgtcacaactgttattgaagaa

SEQ ID NO: 1258893 - DNA, 25 bp, Homo sapien
tagaccttgtcacaactgttattga

SEQ ID NO: 1258894 - DNA, 25 bp, Homo sapien
tatcaatagaccttgtcacaactgt

SEQ ID NO: 1258895 - DNA, 25 bp, Homo sapien
aatattatcaatagaccttgtcaca

SEQ ID NO: 1258896 - DNA, 25 bp, Homo sapien
tgcaggaaaacgtgaaggaataggc

SEQ ID NO: 1258897 - DNA, 25 bp, Homo sapien
gccctccaatgggaggaaaagcatg

SEQ ID NO: 1258898 - DNA, 25 bp, Homo sapien
gcaggaaaacgtgaaggaataggcc

SEQ ID NO: 1258899 - DNA, 25 bp, Homo sapien
gacagggatggccctctcatcaggt

SEQ ID NO: 1258900 - DNA, 25 bp, Homo sapien
acagggatggccctctcatcaggtg

SEQ ID NO: 1258901 - DNA, 25 bp, Homo sapien
ggacagggatggccctctcatcagg

SEQ ID NO: 1258902 - DNA, 25 bp, Homo sapien
cagggatggccctctcatcaggtgg

SEQ ID NO: 1258903 - DNA, 25 bp, Homo sapien
ggcacggcataggtctgacctgcca

SEQ ID NO: 1258904 - DNA, 25 bp, Homo sapien
gcacggcataggtctgacctgccag

SEQ ID NO: 1258905 - DNA, 25 bp, Homo sapien
cataggtctgacctgccagggagtg

SEQ ID NO: 1258906 - DNA, 25 bp, Homo sapien
gggcacggcataggtctgacctgcc

SEQ ID NO: 1258907 - DNA, 25 bp, Homo sapien
gatatcctagaatggactctgacct

SEQ ID NO: 1258908 - DNA, 25 bp, Homo sapien
cctctttcagcagacggtattttct

SEQ ID NO: 1258909 - DNA, 25 bp, Homo sapien
tgtttttgggcagcagatatcctag

SEQ ID NO: 1258910 - DNA, 25 bp, Homo sapien
tatggccccttcttcctatatctgg

SEQ ID NO: 1258911 - DNA, 25 bp, Homo sapien
tcatactttgtctttatgtaaacct

SEQ ID NO: 1258912 - DNA, 25 bp, Homo sapien
tttatgtaaacctaaattagatctg

SEQ ID NO: 1258913 - DNA, 25 bp, Homo sapien
acctaaattagatctgtttttgata

SEQ ID NO: 1258914 - DNA, 25 bp, Homo sapien
tatgtaaacctaaattagatctgtt

SEQ ID NO: 1258915 - DNA, 25 bp, Homo sapien
agcacgcctctttgggaccgcggtt

SEQ ID NO: 1258916 - DNA, 25 bp, Homo sapien
gaacccaacgcggtgtcagagaagt

SEQ ID NO: 1258917 - DNA, 25 bp, Homo sapien
agaatgtaaaccgtgcactcccagg

SEQ ID NO: 1258918 - DNA, 25 bp, Homo sapien
tatactttcgaagtgctcggagccc

SEQ ID NO: 1258919 - DNA, 25 bp, Homo sapien
cggagcgctgtcctgtcgggccgag

SEQ ID NO: 1258920 - DNA, 25 bp, Homo sapien
tgtcctgtcgggccgagtcgcgggc

SEQ ID NO: 1258921 - DNA, 25 bp, Homo sapien
tcctgtcgggccgagtcgcgggcct

SEQ ID NO: 1258922 - DNA, 25 bp, Homo sapien
gcgctgtcctgtcgggccgagtcgc

SEQ ID NO: 1258923 - DNA, 25 bp, Homo sapien
gtcctttgtcccatcgctgccttcc

SEQ ID NO: 1258924 - DNA, 25 bp, Homo sapien
tcttcctagacctccgtcctttgtc

SEQ ID NO: 1258925 - DNA, 25 bp, Homo sapien
tgccttcccctcaagctcagggcca

SEQ ID NO: 1258926 - DNA, 25 bp, Homo sapien
gttgtcttccgagcgtcaggccgcc

SEQ ID NO: 1258927 - DNA, 25 bp, Homo sapien
gaaggcagttgctgtaaccaactat

SEQ ID NO: 1258928 - DNA, 25 bp, Homo sapien
ttgctgtaaccaactataaacaaat

SEQ ID NO: 1258929 - DNA, 25 bp, Homo sapien
cagttgctgtaaccaactataaaca

SEQ ID NO: 1258930 - DNA, 25 bp, Homo sapien
ggcagttgctgtaaccaactataaa

SEQ ID NO: 1258931 - DNA, 25 bp, Homo sapien
ctgggtcttccacaattgccgtgct

SEQ ID NO: 1258932 - DNA, 25 bp, Homo sapien
agagcaggcggaggacacgtgggag

SEQ ID NO: 1258933 - DNA, 25 bp, Homo sapien
caggcggaggacacgtgggaggttt

SEQ ID NO: 1258934 - DNA, 25 bp, Homo sapien
tatttctcactaagggaacatccaa

SEQ ID NO: 1258935 - DNA, 25 bp, Homo sapien
gggtaggaatactggattccactga

SEQ ID NO: 1258936 - DNA, 25 bp, Homo sapien
agacaagaccacaagcagcttggtg

SEQ ID NO: 1258937 - DNA, 25 bp, Homo sapien
ccacaagcagcttggtgcctctgaa

SEQ ID NO: 1258938 - DNA, 25 bp, Homo sapien
ggaggggagactagagaggtgggta

SEQ ID NO: 1258939 - DNA, 25 bp, Homo sapien
tgctggatgtcacgcttagccctcc

SEQ ID NO: 1258940 - DNA, 25 bp, Homo sapien
ggatgtcacgcttagccctcctgct

SEQ ID NO: 1258941 - DNA, 25 bp, Homo sapien
cacgtgctggatgtcacgcttagcc

SEQ ID NO: 1258942 - DNA, 25 bp, Homo sapien
tgctctgtgccgggttaggcacctg

SEQ ID NO: 1258943 - DNA, 25 bp, Homo sapien
tacgtacataatctcaattctgtga

SEQ ID NO: 1258944 - DNA, 25 bp, Homo sapien
ttacgtacataatctcaattctgtg

SEQ ID NO: 1258945 - DNA, 25 bp, Homo sapien
taatctcaattctgtgagggcatcc

SEQ ID NO: 1258946 - DNA, 25 bp, Homo sapien
tctcaattctgtgagggcatccgac

SEQ ID NO: 1258947 - DNA, 25 bp, Homo sapien
aatattaccatctttcccttttgtg

SEQ ID NO: 1258948 - DNA, 25 bp, Homo sapien
tctttcccttttgtgattggagaaa

SEQ ID NO: 1258949 - DNA, 25 bp, Homo sapien
taccatctttcccttttgtgattgg

SEQ ID NO: 1258950 - DNA, 25 bp, Homo sapien
ccatctttcccttttgtgattggag

SEQ ID NO: 1258951 - DNA, 25 bp, Homo sapien
gaagccataaatgcatccttctcgg

SEQ ID NO: 1258952 - DNA, 25 bp, Homo sapien
ggagaccttacagctctcctgtcac

SEQ ID NO: 1258953 - DNA, 25 bp, Homo sapien
ggcctgccctctgtagggtgagaaa

SEQ ID NO: 1258954 - DNA, 25 bp, Homo sapien
cctgccctctgtagggtgagaaagg

SEQ ID NO: 1258955 - DNA, 25 bp, Homo sapien
atgacccactggagaccttacagct

SEQ ID NO: 1258956 - DNA, 25 bp, Homo sapien
gggacccaatatacgacatgttgac

SEQ ID NO: 1258957 - DNA, 25 bp, Homo sapien
tcaattagtaggattacattcaggg

SEQ ID NO: 1258958 - DNA, 25 bp, Homo sapien
tatgatggttactagggttatctgg

SEQ ID NO: 1258959 - DNA, 25 bp, Homo sapien
ttactagggttatctggcagggaga

SEQ ID NO: 1258960 - DNA, 25 bp, Homo sapien
cctaacgttatccctctccttgcct

SEQ ID NO: 1258961 - DNA, 25 bp, Homo sapien
tggagatgagtatgttttgaaggct

SEQ ID NO: 1258962 - DNA, 25 bp, Homo sapien
aacatggagatgagtatgttttgaa

SEQ ID NO: 1258963 - DNA, 25 bp, Homo sapien
ttgaaggcttggaagcatgcaagtg

SEQ ID NO: 1258964 - DNA, 25 bp, Homo sapien
atgttttgaaggcttggaagcatgc

SEQ ID NO: 1258965 - DNA, 25 bp, Homo sapien
tacaaatggattacacgcattttca

SEQ ID NO: 1258966 - DNA, 25 bp, Homo sapien
atggattacacgcattttcatgtgc

SEQ ID NO: 1258967 - DNA, 25 bp, Homo sapien
aaatggattacacgcattttcatgt

SEQ ID NO: 1258968 - DNA, 25 bp, Homo sapien
caaatggattacacgcattttcatg

SEQ ID NO: 1258969 - DNA, 25 bp, Homo sapien
tctgtctctgccaaccagttaacct

SEQ ID NO: 1258970 - DNA, 25 bp, Homo sapien
tctctgccaaccagttaacctgctg

SEQ ID NO: 1258971 - DNA, 25 bp, Homo sapien
tgtctctgccaaccagttaacctgc

SEQ ID NO: 1258972 - DNA, 25 bp, Homo sapien
gcttcatggaggaagacagtccctc

SEQ ID NO: 1258973 - DNA, 25 bp, Homo sapien
ccaattccgggtgacttcaggcgct

SEQ ID NO: 1258974 - DNA, 25 bp, Homo sapien
caattccgggtgacttcaggcgctg

SEQ ID NO: 1258975 - DNA, 25 bp, Homo sapien
aattccgggtgacttcaggcgctgg

SEQ ID NO: 1258976 - DNA, 25 bp, Homo sapien
tcccaattccgggtgacttcaggcg

SEQ ID NO: 1258977 - DNA, 25 bp, Homo sapien
agaggtcagcaaggcaaacccgagc

SEQ ID NO: 1258978 - DNA, 25 bp, Homo sapien
gcagaggtcagcaaggcaaacccga

SEQ ID NO: 1258979 - DNA, 25 bp, Homo sapien
tttggatcacaattcccagtgctga

SEQ ID NO: 1258980 - DNA, 25 bp, Homo sapien
ggaaaagctttggatcacaattccc

SEQ ID NO: 1258981 - DNA, 25 bp, Homo sapien
cattggtttggtctgcattggtttg

SEQ ID NO: 1258982 - DNA, 25 bp, Homo sapien
ccaccatcagcacataggagttctg

SEQ ID NO: 1258983 - DNA, 25 bp, Homo sapien
catcagcacataggagttctgcatt

SEQ ID NO: 1258984 - DNA, 25 bp, Homo sapien
gcattggtttggtctgcattggttt

SEQ ID NO: 1258985 - DNA, 25 bp, Homo sapien
gaagcctaagagtatgactatcctg

SEQ ID NO: 1258986 - DNA, 25 bp, Homo sapien
tcctgaggtagaaagagggtcacat

SEQ ID NO: 1258987 - DNA, 25 bp, Homo sapien
catgctggataagaggtacctgggc

SEQ ID NO: 1258988 - DNA, 25 bp, Homo sapien
tgggctctccacttacaagaagaga

SEQ ID NO: 1258989 - DNA, 25 bp, Homo sapien
aaaacggcctttcgagttgagcaat

SEQ ID NO: 1258990 - DNA, 25 bp, Homo sapien
tgacagcccagcatcagacagaggt

SEQ ID NO: 1258991 - DNA, 25 bp, Homo sapien
tggaagatcatgcatcctgcccctg

SEQ ID NO: 1258992 - DNA, 25 bp, Homo sapien
gaattgatccatgccttctagctag

SEQ ID NO: 1258993 - DNA, 25 bp, Homo sapien
caaagtgccactgtcaatagcctca

SEQ ID NO: 1258994 - DNA, 25 bp, Homo sapien
tcccaaggtcctaacagaagagcaa

SEQ ID NO: 1258995 - DNA, 25 bp, Homo sapien
gcctgattactatcagcacaggaga

SEQ ID NO: 1258996 - DNA, 25 bp, Homo sapien
ttgcctccaatagaaaccagagttg

SEQ ID NO: 1258997 - DNA, 25 bp, Homo sapien
cattggtgcaatctcgactcactgc

SEQ ID NO: 1258998 - DNA, 25 bp, Homo sapien
cctgggctggagtgcattggtgcaa

SEQ ID NO: 1258999 - DNA, 25 bp, Homo sapien
gactcactgcaacttctgcctccca

SEQ ID NO: 1259000 - DNA, 25 bp, Homo sapien
ttttggacagagtctcacactgtca

SEQ ID NO: 1259001 - DNA, 25 bp, Homo sapien
gaggctacataactacatggctagg

SEQ ID NO: 1259002 - DNA, 25 bp, Homo sapien
tatcctgatttcttccatagcttgg

SEQ ID NO: 1259003 - DNA, 25 bp, Homo sapien
tttgtttaagtgagagtgaggctac

SEQ ID NO: 1259004 - DNA, 25 bp, Homo sapien
gcttggatcttgacctagagggaaa

SEQ ID NO: 1259005 - DNA, 25 bp, Homo sapien
ggtcttgataggtctcttgatgtca

SEQ ID NO: 1259006 - DNA, 25 bp, Homo sapien
ctggatacaggtcttgataggtctc

SEQ ID NO: 1259007 - DNA, 25 bp, Homo sapien
tacaggtcttgataggtctcttgat

SEQ ID NO: 1259008 - DNA, 25 bp, Homo sapien
gatacaggtcttgataggtctcttg

SEQ ID NO: 1259009 - DNA, 25 bp, Homo sapien
tcacctgtaaaattgtctgagcaac

SEQ ID NO: 1259010 - DNA, 25 bp, Homo sapien
gattcaaggtgtgaaggtaacatca

SEQ ID NO: 1259011 - DNA, 25 bp, Homo sapien
gcatgtttgctagaactcacctgta

SEQ ID NO: 1259012 - DNA, 25 bp, Homo sapien
ctgtaacagtgcaattaaacgttct

SEQ ID NO: 1259013 - DNA, 25 bp, Homo sapien
accatctacgctaagacataaaatt

SEQ ID NO: 1259014 - DNA, 25 bp, Homo sapien
tggccttgtaagaaagcaaattaac

SEQ ID NO: 1259015 - DNA, 25 bp, Homo sapien
tcagttgtttagttacaagatagaa

SEQ ID NO: 1259016 - DNA, 25 bp, Homo sapien
aattaacttctaacatacaaagcct

SEQ ID NO: 1259017 - DNA, 25 bp, Homo sapien
ttgttaatgtataagagatgtagat

SEQ ID NO: 1259018 - DNA, 25 bp, Homo sapien
attgttaatgtataagagatgtaga

SEQ ID NO: 1259019 - DNA, 25 bp, Homo sapien
tcaggtacttaaagttagctccaaa

SEQ ID NO: 1259020 - DNA, 25 bp, Homo sapien
tgttaatgtataagagatgtagatt

SEQ ID NO: 1259021 - DNA, 25 bp, Homo sapien
gaattcagtcagacaacgtacttac

SEQ ID NO: 1259022 - DNA, 25 bp, Homo sapien
tttcttgaattcagtcagacaacgt

SEQ ID NO: 1259023 - DNA, 25 bp, Homo sapien
acccttctttcttgaattcagtcag

SEQ ID NO: 1259024 - DNA, 25 bp, Homo sapien
cttgaattcagtcagacaacgtact

SEQ ID NO: 1259025 - DNA, 25 bp, Homo sapien
cttagaaaccacctcagctttctcc

SEQ ID NO: 1259026 - DNA, 25 bp, Homo sapien
tatttgtgcacattgcttatactgg

SEQ ID NO: 1259027 - DNA, 25 bp, Homo sapien
tgcacattgcttatactgggcatta

SEQ ID NO: 1259028 - DNA, 25 bp, Homo sapien
tcctctcactctatactatctctgt

SEQ ID NO: 1259029 - DNA, 25 bp, Homo sapien
cactctatactatctctgttagcta

SEQ ID NO: 1259030 - DNA, 25 bp, Homo sapien
tctaaatacctcttaggtcagaaaa

SEQ ID NO: 1259031 - DNA, 25 bp, Homo sapien
aataaacagattatatggaggattt

SEQ ID NO: 1259032 - DNA, 25 bp, Homo sapien
agaaacgccctaaatttctaatctg

SEQ ID NO: 1259033 - DNA, 25 bp, Homo sapien
aagtcaaaagctagagtatagagaa

SEQ ID NO: 1259034 - DNA, 25 bp, Homo sapien
gagtagagctatatatatagcagta

SEQ ID NO: 1259035 - DNA, 25 bp, Homo sapien
attaaaatgttataactctaggatg

SEQ ID NO: 1259036 - DNA, 25 bp, Homo sapien
ttaaaatgttataactctaggatgt

SEQ ID NO: 1259037 - DNA, 25 bp, Homo sapien
aaaagagtagagctatatatatagc

SEQ ID NO: 1259038 - DNA, 25 bp, Homo sapien
tctttgtatcggtgctcagctgagt

SEQ ID NO: 1259039 - DNA, 25 bp, Homo sapien
ttgaatcattttaagatgctcgaac

SEQ ID NO: 1259040 - DNA, 25 bp, Homo sapien
tgtctttctttgtatcggtgctcag

SEQ ID NO: 1259041 - DNA, 25 bp, Homo sapien
aatctatgatttctccttccagttt

SEQ ID NO: 1259042 - DNA, 25 bp, Homo sapien
caaagcccaacacccccaagtgtgc

SEQ ID NO: 1259043 - DNA, 25 bp, Homo sapien
ccaaagcccaacacccccaagtgtg

SEQ ID NO: 1259044 - DNA, 25 bp, Homo sapien
tgggactgatgactgcatgatcttc

SEQ ID NO: 1259045 - DNA, 25 bp, Homo sapien
acaggtggacgctaccacgtccggc

SEQ ID NO: 1259046 - DNA, 25 bp, Homo sapien
acctcttcccgctgggttcacgcca

SEQ ID NO: 1259047 - DNA, 25 bp, Homo sapien
aggtggacgctaccacgtccggcta

SEQ ID NO: 1259048 - DNA, 25 bp, Homo sapien
ttacaggtggacgctaccacgtccg

SEQ ID NO: 1259049 - DNA, 25 bp, Homo sapien
gcctgcagatgtcatcggagggcca

SEQ ID NO: 1259050 - DNA, 25 bp, Homo sapien
cctgcagatgtcatcggagggccag

SEQ ID NO: 1259051 - DNA, 25 bp, Homo sapien
aggacaacttgggcctgcggcggtc

SEQ ID NO: 1259052 - DNA, 25 bp, Homo sapien
acaacttgggcctgcggcggtcgcc

SEQ ID NO: 1259053 - DNA, 25 bp, Homo sapien
tcaggacaacttgggcctgcggcgg

SEQ ID NO: 1259054 - DNA, 25 bp, Homo sapien
cgccgggaggcccaaccttggcgtg

SEQ ID NO: 1259055 - DNA, 25 bp, Homo sapien
actgggccaaaaaaggctgttgtga

SEQ ID NO: 1259056 - DNA, 25 bp, Homo sapien
aactgggccaaaaaaggctgttgtg

SEQ ID NO: 1259057 - DNA, 25 bp, Homo sapien
gtagggtatgggcctaaataggcca

SEQ ID NO: 1259058 - DNA, 25 bp, Homo sapien
tagggtatgggcctaaataggccat

SEQ ID NO: 1259059 - DNA, 25 bp, Homo sapien
agggtatgggcctaaataggccatt

SEQ ID NO: 1259060 - DNA, 25 bp, Homo sapien
gggtatgggcctaaataggccattg

SEQ ID NO: 1259061 - DNA, 25 bp, Homo sapien
tgtagaatcagtgggcgtgttaagc

SEQ ID NO: 1259062 - DNA, 25 bp, Homo sapien
tagaatcagtgggcgtgttaagctt

SEQ ID NO: 1259063 - DNA, 25 bp, Homo sapien
gaatcagtgggcgtgttaagcttgt

SEQ ID NO: 1259064 - DNA, 25 bp, Homo sapien
ttttcctgcaactggatgttcccac

SEQ ID NO: 1259065 - DNA, 25 bp, Homo sapien
cggttcacaacagggtgcgttctcc

SEQ ID NO: 1259066 - DNA, 25 bp, Homo sapien
tgcacggttcacaacagggtgcgtt

SEQ ID NO: 1259067 - DNA, 25 bp, Homo sapien
tcataaggacagcgcaacctcgatc

SEQ ID NO: 1259068 - DNA, 25 bp, Homo sapien
tgctgctgctcatctgagaaggtgg

SEQ ID NO: 1259069 - DNA, 25 bp, Homo sapien
cagcactgccccctgggaaaccaaa

SEQ ID NO: 1259070 - DNA, 25 bp, Homo sapien
tcactgtgaggtcacctactggaaa

SEQ ID NO: 1259071 - DNA, 25 bp, Homo sapien
ccatttcccactggcaaagagctca

SEQ ID NO: 1259072 - DNA, 25 bp, Homo sapien
cttgagtcactgtgaggtcacctac

SEQ ID NO: 1259073 - DNA, 25 bp, Homo sapien
tctcagaaggccaaagctatagtga

SEQ ID NO: 1259074 - DNA, 25 bp, Homo sapien
tcagaaggccaaagctatagtgagc

SEQ ID NO: 1259075 - DNA, 25 bp, Homo sapien
ctcagaaggccaaagctatagtgag

SEQ ID NO: 1259076 - DNA, 25 bp, Homo sapien
gggtgactgcaagctcctaaatttc

SEQ ID NO: 1259077 - DNA, 25 bp, Homo sapien
gctttcagggttgctggacacagga

SEQ ID NO: 1259078 - DNA, 25 bp, Homo sapien
caagaggagggctgattaccatgca

SEQ ID NO: 1259079 - DNA, 25 bp, Homo sapien
catgttcaacagagggcatgggagc

SEQ ID NO: 1259080 - DNA, 25 bp, Homo sapien
tgcacctgatgcatgggaaacataa

SEQ ID NO: 1259081 - DNA, 25 bp, Homo sapien
tcccattgcacctgatgcatgggaa

SEQ ID NO: 1259082 - DNA, 25 bp, Homo sapien
cccattgcacctgatgcatgggaaa

SEQ ID NO: 1259083 - DNA, 25 bp, Homo sapien
cctgatgcatgggaaacataatttg

SEQ ID NO: 1259084 - DNA, 25 bp, Homo sapien
tctcctggtacccttcctagcatca

SEQ ID NO: 1259085 - DNA, 25 bp, Homo sapien
atctcctggtacccttcctagcatc

SEQ ID NO: 1259086 - DNA, 25 bp, Homo sapien
ctcctggtacccttcctagcatcaa

SEQ ID NO: 1259087 - DNA, 25 bp, Homo sapien
gctataatgagccatgataggacca

SEQ ID NO: 1259088 - DNA, 25 bp, Homo sapien
tgaggctataatgagccatgatagg

SEQ ID NO: 1259089 - DNA, 25 bp, Homo sapien
taatgagccatgataggaccactga

SEQ ID NO: 1259090 - DNA, 25 bp, Homo sapien
tgggaaggctgacatggtaggattg

SEQ ID NO: 1259091 - DNA, 25 bp, Homo sapien
cgagttgagctaaggagaatttgga

SEQ ID NO: 1259092 - DNA, 25 bp, Homo sapien
atggctcgagttgagctaaggagaa

SEQ ID NO: 1259093 - DNA, 25 bp, Homo sapien
atttggatccttcctttggttctca

SEQ ID NO: 1259094 - DNA, 25 bp, Homo sapien
ggatccttcctttggttctcagtag

SEQ ID NO: 1259095 - DNA, 25 bp, Homo sapien
gggagactgaagtgagagaaccact

SEQ ID NO: 1259096 - DNA, 25 bp, Homo sapien
tgtcactgtactgtagcctaagcaa

SEQ ID NO: 1259097 - DNA, 25 bp, Homo sapien
tgggagactgaagtgagagaaccac

SEQ ID NO: 1259098 - DNA, 25 bp, Homo sapien
tcatgtcactgtactgtagcctaag

SEQ ID NO: 1259099 - DNA, 25 bp, Homo sapien
ctcatggccttaaaacatactccca

SEQ ID NO: 1259100 - DNA, 25 bp, Homo sapien
gatttcttttatctagcatccttta

SEQ ID NO: 1259101 - DNA, 25 bp, Homo sapien
ctctcaaactgttggaactataggt

SEQ ID NO: 1259102 - DNA, 25 bp, Homo sapien
atggccttaaaacatactcccatct

SEQ ID NO: 1259103 - DNA, 25 bp, Homo sapien
caagtggtccatgtgcctcagcctt

SEQ ID NO: 1259104 - DNA, 25 bp, Homo sapien
tcaagtggtccatgtgcctcagcct

SEQ ID NO: 1259105 - DNA, 25 bp, Homo sapien
agtggtccatgtgcctcagccttcc

SEQ ID NO: 1259106 - DNA, 25 bp, Homo sapien
cctcaagtggtccatgtgcctcagc

SEQ ID NO: 1259107 - DNA, 25 bp, Homo sapien
aaggaactggagattgacttaacta

SEQ ID NO: 1259108 - DNA, 25 bp, Homo sapien
gaactggagattgacttaactacca

SEQ ID NO: 1259109 - DNA, 25 bp, Homo sapien
tgtgcccaacagagggcatggaagc

SEQ ID NO: 1259110 - DNA, 25 bp, Homo sapien
tgggagggtagtgtgcccaacagag

SEQ ID NO: 1259111 - DNA, 25 bp, Homo sapien
cagacatcagcacttaaaagtttta

SEQ ID NO: 1259112 - DNA, 25 bp, Homo sapien
aaatgtaggagggaaggtgttactg

SEQ ID NO: 1259113 - DNA, 25 bp, Homo sapien
cagacagacatcagcacttaaaagt

SEQ ID NO: 1259114 - DNA, 25 bp, Homo sapien
cacagacagacatcagcacttaaaa

SEQ ID NO: 1259115 - DNA, 25 bp, Homo sapien
cccagctaataggaggtctttcatt

SEQ ID NO: 1259116 - DNA, 25 bp, Homo sapien
atcccagctaataggaggtctttca

SEQ ID NO: 1259117 - DNA, 25 bp, Homo sapien
tcccagctaataggaggtctttcat

SEQ ID NO: 1259118 - DNA, 25 bp, Homo sapien
taaacaaaaggtcatatgcacaaac

SEQ ID NO: 1259119 - DNA, 25 bp, Homo sapien
taagaatgctcatgccctgtgactc

SEQ ID NO: 1259120 - DNA, 25 bp, Homo sapien
tacagacagtgactcattatactgc

SEQ ID NO: 1259121 - DNA, 25 bp, Homo sapien
tttacatcgagggtaataagaatgc

SEQ ID NO: 1259122 - DNA, 25 bp, Homo sapien
tcacagaggccgtgccaatctctct

SEQ ID NO: 1259123 - DNA, 25 bp, Homo sapien
cttaagtatgtgtgctactgaggca

SEQ ID NO: 1259124 - DNA, 25 bp, Homo sapien
caacttaagtatgtgtgctactgag

SEQ ID NO: 1259125 - DNA, 25 bp, Homo sapien
taagtatgtgtgctactgaggcaag

SEQ ID NO: 1259126 - DNA, 25 bp, Homo sapien
ggacagtacttgttctcaagggaat

SEQ ID NO: 1259127 - DNA, 25 bp, Homo sapien
ttccattagtagaaagccttcctaa

SEQ ID NO: 1259128 - DNA, 25 bp, Homo sapien
tccttctaaagtaacatcctctcaa

SEQ ID NO: 1259129 - DNA, 25 bp, Homo sapien
tctaaagtaacatcctctcaaggcc

SEQ ID NO: 1259130 - DNA, 25 bp, Homo sapien
tcacttgatatcaggagtcgaggcg

SEQ ID NO: 1259131 - DNA, 25 bp, Homo sapien
aaaagggtatgggatcatcaccgga

SEQ ID NO: 1259132 - DNA, 25 bp, Homo sapien
gactggaaaaaagggtatgggatca

SEQ ID NO: 1259133 - DNA, 25 bp, Homo sapien
aaagggtatgggatcatcaccggac

SEQ ID NO: 1259134 - DNA, 25 bp, Homo sapien
gaaaaaagggtatgggatcatcacc

SEQ ID NO: 1259135 - DNA, 25 bp, Homo sapien
agttgatttatcaagttgtaaatct

SEQ ID NO: 1259136 - DNA, 25 bp, Homo sapien
ttgatttatcaagttgtaaatcttc

SEQ ID NO: 1259137 - DNA, 25 bp, Homo sapien
ctgacaaagttgatttatcaagttg

SEQ ID NO: 1259138 - DNA, 25 bp, Homo sapien
gatttatcaagttgtaaatcttcac

SEQ ID NO: 1259139 - DNA, 25 bp, Homo sapien
acgtagatcagcgatacgatgattc

SEQ ID NO: 1259140 - DNA, 25 bp, Homo sapien
gtttacgtagatcagcgatacgatg

SEQ ID NO: 1259141 - DNA, 25 bp, Homo sapien
gtagatcagcgatacgatgattcca

SEQ ID NO: 1259142 - DNA, 25 bp, Homo sapien
ttacgtagatcagcgatacgatgat

SEQ ID NO: 1259143 - DNA, 25 bp, Homo sapien
aggccacctctacggccaggaaacg

SEQ ID NO: 1259144 - DNA, 25 bp, Homo sapien
cagtcattcgagacgggcagcacaa

SEQ ID NO: 1259145 - DNA, 25 bp, Homo sapien
gcacaagctgcggagtgcaggccac

SEQ ID NO: 1259146 - DNA, 25 bp, Homo sapien
ctctacggccaggaaacggattctc

SEQ ID NO: 1259147 - DNA, 25 bp, Homo sapien
cacaccaagatatgcacctggccac

SEQ ID NO: 1259148 - DNA, 25 bp, Homo sapien
tcacaccaagatatgcacctggcca

SEQ ID NO: 1259149 - DNA, 25 bp, Homo sapien
tggcagctctctccaactttggaag

SEQ ID NO: 1259150 - DNA, 25 bp, Homo sapien
aactttggaagcccaggggcatggc

SEQ ID NO: 1259151 - DNA, 25 bp, Homo sapien
acagaggcagatgagtttcgtctcc

SEQ ID NO: 1259152 - DNA, 25 bp, Homo sapien
ggggcatggcccctgtccacagatg

SEQ ID NO: 1259153 - DNA, 25 bp, Homo sapien
ttttccgttccccagcattggcagg

SEQ ID NO: 1259154 - DNA, 25 bp, Homo sapien
caggttctgggactggtggctgtgg

SEQ ID NO: 1259155 - DNA, 25 bp, Homo sapien
cattttccgttccccagcattggca

SEQ ID NO: 1259156 - DNA, 25 bp, Homo sapien
ccgttccccagcattggcaggttct

SEQ ID NO: 1259157 - DNA, 25 bp, Homo sapien
tacttctttttctgccctcttgggc

SEQ ID NO: 1259158 - DNA, 25 bp, Homo sapien
acttctttttctgccctcttgggct

SEQ ID NO: 1259159 - DNA, 25 bp, Homo sapien
cttctttttctgccctcttgggctt

SEQ ID NO: 1259160 - DNA, 25 bp, Homo sapien
ctacttctttttctgccctcttggg

SEQ ID NO: 1259161 - DNA, 25 bp, Homo sapien
agtgctctattctaacttggcttgg

SEQ ID NO: 1259162 - DNA, 25 bp, Homo sapien
aaaagtgctctattctaacttggct

SEQ ID NO: 1259163 - DNA, 25 bp, Homo sapien
aagtgctctattctaacttggcttg

SEQ ID NO: 1259164 - DNA, 25 bp, Homo sapien
gtgctctattctaacttggcttgga

SEQ ID NO: 1259165 - DNA, 25 bp, Homo sapien
ttagccagctggactcagtttaggt

SEQ ID NO: 1259166 - DNA, 25 bp, Homo sapien
tagccagctggactcagtttaggtg

SEQ ID NO: 1259167 - DNA, 25 bp, Homo sapien
cagctggactcagtttaggtgatcc

SEQ ID NO: 1259168 - DNA, 25 bp, Homo sapien
gccagctggactcagtttaggtgat

SEQ ID NO: 1259169 - DNA, 25 bp, Homo sapien
catatgccttctctttatcaggaca

SEQ ID NO: 1259170 - DNA, 25 bp, Homo sapien
gaacatatgccttctctttatcagg

SEQ ID NO: 1259171 - DNA, 25 bp, Homo sapien
atgccttctctttatcaggacaaat

SEQ ID NO: 1259172 - DNA, 25 bp, Homo sapien
tgccttctctttatcaggacaaatc

SEQ ID NO: 1259173 - DNA, 25 bp, Homo sapien
ctttaaggccttcgctttggcttcg

SEQ ID NO: 1259174 - DNA, 25 bp, Homo sapien
tggcctttaaggccttcgctttggc

SEQ ID NO: 1259175 - DNA, 25 bp, Homo sapien
cttcttggcctttaaggccttcgct

SEQ ID NO: 1259176 - DNA, 25 bp, Homo sapien
tttaggaggagcaggagcttccttc

SEQ ID NO: 1259177 - DNA, 25 bp, Homo sapien
ggaggagcaggagcttccttcgctt

SEQ ID NO: 1259178 - DNA, 25 bp, Homo sapien
taggaggagcaggagcttccttcgc

SEQ ID NO: 1259179 - DNA, 25 bp, Homo sapien
ctttaggaggagcaggagcttcctt

SEQ ID NO: 1259180 - DNA, 25 bp, Homo sapien
taccatgaattactagtaattgaca

SEQ ID NO: 1259181 - DNA, 25 bp, Homo sapien
ccatgaattactagtaattgacact

SEQ ID NO: 1259182 - DNA, 25 bp, Homo sapien
tgtttaattatttataccatgaatt

SEQ ID NO: 1259183 - DNA, 25 bp, Homo sapien
ttgtttaattatttataccatgaat

SEQ ID NO: 1259184 - DNA, 25 bp, Homo sapien
tctatataggtagccatgaagttga

SEQ ID NO: 1259185 - DNA, 25 bp, Homo sapien
caaaaatggcgggacattctacggg

SEQ ID NO: 1259186 - DNA, 25 bp, Homo sapien
tgcaaatttagttgagcttctgtgt

SEQ ID NO: 1259187 - DNA, 25 bp, Homo sapien
tattggaaacccaaactctggaatg

SEQ ID NO: 1259188 - DNA, 25 bp, Homo sapien
tacagccacatctccccaggtcagt

SEQ ID NO: 1259189 - DNA, 25 bp, Homo sapien
caatggcctacagccacatctcccc

SEQ ID NO: 1259190 - DNA, 25 bp, Homo sapien
gccacatctccccaggtcagtctta

SEQ ID NO: 1259191 - DNA, 25 bp, Homo sapien
cttaaggacaatgaaactctggtct

SEQ ID NO: 1259192 - DNA, 25 bp, Homo sapien
cacactaccaggcgctccaaagcca

SEQ ID NO: 1259193 - DNA, 25 bp, Homo sapien
acactaccaggcgctccaaagccat

SEQ ID NO: 1259194 - DNA, 25 bp, Homo sapien
cattcgtggtagtcataggtgctgt

SEQ ID NO: 1259195 - DNA, 25 bp, Homo sapien
ttccctctgagtggtatggcttcag

SEQ ID NO: 1259196 - DNA, 25 bp, Homo sapien
gaaacagagtgctattccgcatact

SEQ ID NO: 1259197 - DNA, 25 bp, Homo sapien
taaaaagtttggagggtgacagcac

SEQ ID NO: 1259198 - DNA, 25 bp, Homo sapien
aataccagtaaagtgagaagcagag

SEQ ID NO: 1259199 - DNA, 25 bp, Homo sapien
cagagataaactagtcctagacagc

SEQ ID NO: 1259200 - DNA, 25 bp, Homo sapien
gaagcagagataaactagtcctaga

SEQ ID NO: 1259201 - DNA, 25 bp, Homo sapien
caggagctgccccataataccagta

SEQ ID NO: 1259202 - DNA, 25 bp, Homo sapien
tgggcaaaagctgagcatttatccc

SEQ ID NO: 1259203 - DNA, 25 bp, Homo sapien
tgtgttcccacctcgaggcagcttt

SEQ ID NO: 1259204 - DNA, 25 bp, Homo sapien
ttaaaatgcccccactgcatctagt

SEQ ID NO: 1259205 - DNA, 25 bp, Homo sapien
ggattaatgttgtgttcccacctcg

SEQ ID NO: 1259206 - DNA, 25 bp, Homo sapien
gcattggtttggtctgcattggttt

SEQ ID NO: 1259207 - DNA, 25 bp, Homo sapien
ccaccatcagcacataggagttctg

SEQ ID NO: 1259208 - DNA, 25 bp, Homo sapien
cattggtttggtctgcattggtttg

SEQ ID NO: 1259209 - DNA, 25 bp, Homo sapien
catcagcacataggagttctgcatt

SEQ ID NO: 1259210 - DNA, 25 bp, Homo sapien
tcctgaggtagaaagagggtcacat

SEQ ID NO: 1259211 - DNA, 25 bp, Homo sapien
gaagcctaagagtatgactatcctg

SEQ ID NO: 1259212 - DNA, 25 bp, Homo sapien
catgctggataagaggtacctgggc

SEQ ID NO: 1259213 - DNA, 25 bp, Homo sapien
tgggctctccacttacaagaagaga

SEQ ID NO: 1259214 - DNA, 25 bp, Homo sapien
gacttcgggagtaagtgaactgact

SEQ ID NO: 1259215 - DNA, 25 bp, Homo sapien
caccaaactgcggacttcgggagta

SEQ ID NO: 1259216 - DNA, 25 bp, Homo sapien
agctgaacaccaaactgcggacttc

SEQ ID NO: 1259217 - DNA, 25 bp, Homo sapien
tgaacaccaaactgcggacttcggg

SEQ ID NO: 1259218 - DNA, 25 bp, Homo sapien
ttttggacagagtctcacactgtca

SEQ ID NO: 1259219 - DNA, 25 bp, Homo sapien
ggagtgcattggtgcaatctcgact

SEQ ID NO: 1259220 - DNA, 25 bp, Homo sapien
agagtctcacactgtcacctcggct

SEQ ID NO: 1259221 - DNA, 25 bp, Homo sapien
actcactgcaacttctgcctcccag

SEQ ID NO: 1259222 - DNA, 25 bp, Homo sapien
agttctgcacttaactttaggcctt

SEQ ID NO: 1259223 - DNA, 25 bp, Homo sapien
cagttctgcacttaactttaggcct

SEQ ID NO: 1259224 - DNA, 25 bp, Homo sapien
ctgtggccagaatagctctttccac

SEQ ID NO: 1259225 - DNA, 25 bp, Homo sapien
gaggctacataactacatggctagg

SEQ ID NO: 1259226 - DNA, 25 bp, Homo sapien
tttgtttaagtgagagtgaggctac

SEQ ID NO: 1259227 - DNA, 25 bp, Homo sapien
tatcctgatttcttccatagcttgg

SEQ ID NO: 1259228 - DNA, 25 bp, Homo sapien
gcttggatcttgacctagagggaaa

SEQ ID NO: 1259229 - DNA, 25 bp, Homo sapien
ctggatacaggtcttgataggtctc

SEQ ID NO: 1259230 - DNA, 25 bp, Homo sapien
ggtcttgataggtctcttgatgtca

SEQ ID NO: 1259231 - DNA, 25 bp, Homo sapien
tacaggtcttgataggtctcttgat

SEQ ID NO: 1259232 - DNA, 25 bp, Homo sapien
gatacaggtcttgataggtctcttg

SEQ ID NO: 1259233 - DNA, 25 bp, Homo sapien
gattcaaggtgtgaaggtaacatca

SEQ ID NO: 1259234 - DNA, 25 bp, Homo sapien
tcacctgtaaaattgtctgagcaac

SEQ ID NO: 1259235 - DNA, 25 bp, Homo sapien
gcatgtttgctagaactcacctgta

SEQ ID NO: 1259236 - DNA, 25 bp, Homo sapien
ctgtaacagtgcaattaaacgttct

SEQ ID NO: 1259237 - DNA, 25 bp, Homo sapien
tgtataaagcactaaccattgtagc

SEQ ID NO: 1259238 - DNA, 25 bp, Homo sapien
gtgtatagaagaccaaagggccaaa

SEQ ID NO: 1259239 - DNA, 25 bp, Homo sapien
catctcatgatactaggaaaagagg

SEQ ID NO: 1259240 - DNA, 25 bp, Homo sapien
aagggccaaaagagtcaacttctga

SEQ ID NO: 1259241 - DNA, 25 bp, Homo sapien
accatctacgctaagacataaaatt

SEQ ID NO: 1259242 - DNA, 25 bp, Homo sapien
tcagttgtttagttacaagatagaa

SEQ ID NO: 1259243 - DNA, 25 bp, Homo sapien
aattaacttctaacatacaaagcct

SEQ ID NO: 1259244 - DNA, 25 bp, Homo sapien
tggccttgtaagaaagcaaattaac

SEQ ID NO: 1259245 - DNA, 25 bp, Homo sapien
acatctggctagtttcttttatttt

SEQ ID NO: 1259246 - DNA, 25 bp, Homo sapien
accacatctggctagtttcttttat

SEQ ID NO: 1259247 - DNA, 25 bp, Homo sapien
aggctggccacaaattcctggtctc

SEQ ID NO: 1259248 - DNA, 25 bp, Homo sapien
atagatggggtcttgttgtgttggc

SEQ ID NO: 1259249 - DNA, 25 bp, Homo sapien
tagagttccaactactagggaagct

SEQ ID NO: 1259250 - DNA, 25 bp, Homo sapien
tggtgttgtgcacctagagttccaa

SEQ ID NO: 1259251 - DNA, 25 bp, Homo sapien
taataactggtgtggtgttgtgcac

SEQ ID NO: 1259252 - DNA, 25 bp, Homo sapien
ctgagatgagaggataccttgagct

SEQ ID NO: 1259253 - DNA, 25 bp, Homo sapien
ttggacaaaagagcctgatcctgtc

SEQ ID NO: 1259254 - DNA, 25 bp, Homo sapien
gacaaaagagcctgatcctgtctca

SEQ ID NO: 1259255 - DNA, 25 bp, Homo sapien
ggacaaaagagcctgatcctgtctc

SEQ ID NO: 1259256 - DNA, 25 bp, Homo sapien
caaaagagcctgatcctgtctcaaa

SEQ ID NO: 1259257 - DNA, 25 bp, Homo sapien
tggtgatttccagtaggtgacctca

SEQ ID NO: 1259258 - DNA, 25 bp, Homo sapien
gatgctggtgatttccagtaggtga

SEQ ID NO: 1259259 - DNA, 25 bp, Homo sapien
tccagtaggtgacctcacagtgact

SEQ ID NO: 1259260 - DNA, 25 bp, Homo sapien
tgatttccagtaggtgacctcacag

SEQ ID NO: 1259261 - DNA, 25 bp, Homo sapien
gtatgtcatgtcacgacatactgcc

SEQ ID NO: 1259262 - DNA, 25 bp, Homo sapien
tcatgtcacgacatactgccgctgc

SEQ ID NO: 1259263 - DNA, 25 bp, Homo sapien
tgtcatgtcacgacatactgccgct

SEQ ID NO: 1259264 - DNA, 25 bp, Homo sapien
gtcacgacatactgccgctgcacga

SEQ ID NO: 1259265 - DNA, 25 bp, Homo sapien
acatttggaattttcgtatacgtgg

SEQ ID NO: 1259266 - DNA, 25 bp, Homo sapien
catttggaattttcgtatacgtgga

SEQ ID NO: 1259267 - DNA, 25 bp, Homo sapien
aacatttggaattttcgtatacgtg

SEQ ID NO: 1259268 - DNA, 25 bp, Homo sapien
caggtgcaaaacttcctcgagtcag

SEQ ID NO: 1259269 - DNA, 25 bp, Homo sapien
ggtgcaaaacttcctcgagtcagcc

SEQ ID NO: 1259270 - DNA, 25 bp, Homo sapien
gcaaaacttcctcgagtcagcctct

SEQ ID NO: 1259271 - DNA, 25 bp, Homo sapien
tgcaaaacttcctcgagtcagcctc

SEQ ID NO: 1259272 - DNA, 25 bp, Homo sapien
aatgaaaaatatcgcccacgatcaa

SEQ ID NO: 1259273 - DNA, 25 bp, Homo sapien
gcacaatgaaaaatatcgcccacga

SEQ ID NO: 1259274 - DNA, 25 bp, Homo sapien
tttaatgacggtcatggcaactttt

SEQ ID NO: 1259275 - DNA, 25 bp, Homo sapien
aacaggtttaatgacggtcatggca

SEQ ID NO: 1259276 - DNA, 25 bp, Homo sapien
agatgtgtgcatagtgggcctggag

SEQ ID NO: 1259277 - DNA, 25 bp, Homo sapien
gaagatgtgtgcatagtgggcctgg

SEQ ID NO: 1259278 - DNA, 25 bp, Homo sapien
gtgtgcatagtgggcctggagggcg

SEQ ID NO: 1259279 - DNA, 25 bp, Homo sapien
ggggaagatgtgtgcatagtgggcc

SEQ ID NO: 1259280 - DNA, 25 bp, Homo sapien
ctgagcctgtcctcggcttctccac

SEQ ID NO: 1259281 - DNA, 25 bp, Homo sapien
ggccggcactggtccagggtacgtg

SEQ ID NO: 1259282 - DNA, 25 bp, Homo sapien
ccggcactggtccagggtacgtgca

SEQ ID NO: 1259283 - DNA, 25 bp, Homo sapien
cagggccggcactggtccagggtac

SEQ ID NO: 1259284 - DNA, 25 bp, Homo sapien
ttcgtcactcgctatgacctcgctg

SEQ ID NO: 1259285 - DNA, 25 bp, Homo sapien
tgtgctcttcgtcactcgctatgac

SEQ ID NO: 1259286 - DNA, 25 bp, Homo sapien
ctcttcgtcactcgctatgacctcg

SEQ ID NO: 1259287 - DNA, 25 bp, Homo sapien
tgctcttcgtcactcgctatgacct

SEQ ID NO: 1259288 - DNA, 25 bp, Homo sapien
ctggaaggccaggttgtatttctgc

SEQ ID NO: 1259289 - DNA, 25 bp, Homo sapien
gctgacggtccggttatcctggttg

SEQ ID NO: 1259290 - DNA, 25 bp, Homo sapien
cagcatctggctgacggtccggtta

SEQ ID NO: 1259291 - DNA, 25 bp, Homo sapien
gaaggccaggttgtatttctgcatc

SEQ ID NO: 1259292 - DNA, 25 bp, Homo sapien
ccgcctgctgaagatcatgagcgcc

SEQ ID NO: 1259293 - DNA, 25 bp, Homo sapien
ccttgtctgatttgttggggctgcg

SEQ ID NO: 1259294 - DNA, 25 bp, Homo sapien
ggccaccggatgtggtccttgtctg

SEQ ID NO: 1259295 - DNA, 25 bp, Homo sapien
ccgccagggcctggtgccgcctgct

SEQ ID NO: 1259296 - DNA, 25 bp, Homo sapien
ggccgcccagggtcaacactccctg

SEQ ID NO: 1259297 - DNA, 25 bp, Homo sapien
caaagtgtgtggggttgcgggccct

SEQ ID NO: 1259298 - DNA, 25 bp, Homo sapien
cgcccagggtcaacactccctgtcc

SEQ ID NO: 1259299 - DNA, 25 bp, Homo sapien
ccagggtcaacactccctgtcccac

SEQ ID NO: 1259300 - DNA, 25 bp, Homo sapien
tggtggacgctcatgagcaacggct

SEQ ID NO: 1259301 - DNA, 25 bp, Homo sapien
tggacgctcatgagcaacggctgcc

SEQ ID NO: 1259302 - DNA, 25 bp, Homo sapien
gacgctcatgagcaacggctgccaa

SEQ ID NO: 1259303 - DNA, 25 bp, Homo sapien
ctggtggacgctcatgagcaacggc

SEQ ID NO: 1259304 - DNA, 25 bp, Homo sapien
ggagaacacggccgcagagtgacct

SEQ ID NO: 1259305 - DNA, 25 bp, Homo sapien
agaacacggccgcagagtgaccttc

SEQ ID NO: 1259306 - DNA, 25 bp, Homo sapien
taccaggagaacacggccgcagagt

SEQ ID NO: 1259307 - DNA, 25 bp, Homo sapien
caggagaacacggccgcagagtgac

SEQ ID NO: 1259308 - DNA, 25 bp, Homo sapien
gctgagcaccgatacaaagaaagac

SEQ ID NO: 1259309 - DNA, 25 bp, Homo sapien
ctaaagcgtgaactcctagcagggc

SEQ ID NO: 1259310 - DNA, 25 bp, Homo sapien
gctgcaggacaagttcgagcatctt

SEQ ID NO: 1259311 - DNA, 25 bp, Homo sapien
cacattggtttcacagctgcaggac

SEQ ID NO: 1259312 - DNA, 25 bp, Homo sapien
ctggcattctcggatctccaaggca

SEQ ID NO: 1259313 - DNA, 25 bp, Homo sapien
ggtaattccccaggccgtgtgatct

SEQ ID NO: 1259314 - DNA, 25 bp, Homo sapien
accaaaatgaccataggcggtaatt

SEQ ID NO: 1259315 - DNA, 25 bp, Homo sapien
tctcagtctggcattctcggatctc

SEQ ID NO: 1259316 - DNA, 25 bp, Homo sapien
taccctgatgggcagtacctgtggc

SEQ ID NO: 1259317 - DNA, 25 bp, Homo sapien
ttaccctgatgggcagtacctgtgg

SEQ ID NO: 1259318 - DNA, 25 bp, Homo sapien
ccctgatgggcagtacctgtggctg

SEQ ID NO: 1259319 - DNA, 25 bp, Homo sapien
cagtccataggcttctggttgtaaa

SEQ ID NO: 1259320 - DNA, 25 bp, Homo sapien
gcatgctgcatgaagttctcatggc

SEQ ID NO: 1259321 - DNA, 25 bp, Homo sapien
aaccttctgatgaggtcactgagtg

SEQ ID NO: 1259322 - DNA, 25 bp, Homo sapien
tctgttggtgtttgccctaggtcta

SEQ ID NO: 1259323 - DNA, 25 bp, Homo sapien
cttccgcttgatcgaatcagtgctt

SEQ ID NO: 1259324 - DNA, 25 bp, Homo sapien
acactgagactgcccatagcagtgt

SEQ ID NO: 1259325 - DNA, 25 bp, Homo sapien
agactgcccatagcagtgtcctgtt

SEQ ID NO: 1259326 - DNA, 25 bp, Homo sapien
gtagtagttacaacactgagactgc

SEQ ID NO: 1259327 - DNA, 25 bp, Homo sapien
gcccatagcagtgtcctgttgtgtc

SEQ ID NO: 1259328 - DNA, 25 bp, Homo sapien
ggttcagccctggctgacacagggc

SEQ ID NO: 1259329 - DNA, 25 bp, Homo sapien
ttcagccctggctgacacagggctg

SEQ ID NO: 1259330 - DNA, 25 bp, Homo sapien
ctgtgggggttcagccctggctgac

SEQ ID NO: 1259331 - DNA, 25 bp, Homo sapien
tgggggttcagccctggctgacaca

SEQ ID NO: 1259332 - DNA, 25 bp, Homo sapien
ttacttttcgtcatgtcatatagtt

SEQ ID NO: 1259333 - DNA, 25 bp, Homo sapien
tacttttcgtcatgtcatatagttt

SEQ ID NO: 1259334 - DNA, 25 bp, Homo sapien
tcctgccaccttggcatctcaaaat

SEQ ID NO: 1259335 - DNA, 25 bp, Homo sapien
cactattttccacatattctggaaa

SEQ ID NO: 1259336 - DNA, 25 bp, Homo sapien
tttttattgtcactattttccacat

SEQ ID NO: 1259337 - DNA, 25 bp, Homo sapien
tgtcactattttccacatattctgg

SEQ ID NO: 1259338 - DNA, 25 bp, Homo sapien
tagaagggtaaattaatgtctcatt

SEQ ID NO: 1259339 - DNA, 25 bp, Homo sapien
gggtaaattaatgtctcatttacca

SEQ ID NO: 1259340 - DNA, 25 bp, Homo sapien
gtgatagagattagaagggtaaatt

SEQ ID NO: 1259341 - DNA, 25 bp, Homo sapien
gattagaagggtaaattaatgtctc

SEQ ID NO: 1259342 - DNA, 25 bp, Homo sapien
taaaacgtgctctgggcgtcctgtg

SEQ ID NO: 1259343 - DNA, 25 bp, Homo sapien
tctgggcgtcctgtggtggctacca

SEQ ID NO: 1259344 - DNA, 25 bp, Homo sapien
acccagtagctagagaagtgctgga

SEQ ID NO: 1259345 - DNA, 25 bp, Homo sapien
cagaggctttggtgagtcattgtca

SEQ ID NO: 1259346 - DNA, 25 bp, Homo sapien
atgcatgatcttccactgtgcctcc

SEQ ID NO: 1259347 - DNA, 25 bp, Homo sapien
ctgtgtgcaggagaaagctctcagg

SEQ ID NO: 1259348 - DNA, 25 bp, Homo sapien
cccaggggaaggatgcatgatcttc

SEQ ID NO: 1259349 - DNA, 25 bp, Homo sapien
tctcaggctctggcagaggagtccc

SEQ ID NO: 1259350 - DNA, 25 bp, Homo sapien
agactcccaatctgaggtccaatgc

SEQ ID NO: 1259351 - DNA, 25 bp, Homo sapien
tcccaatctgaggtccaatgctctc

SEQ ID NO: 1259352 - DNA, 25 bp, Homo sapien
tcagactcccaatctgaggtccaat

SEQ ID NO: 1259353 - DNA, 25 bp, Homo sapien
gactcccaatctgaggtccaatgct

SEQ ID NO: 1259354 - DNA, 25 bp, Homo sapien
cttttatatatactaaggtttcaca

SEQ ID NO: 1259355 - DNA, 25 bp, Homo sapien
ataagtcaatacagtagtaagagtc

SEQ ID NO: 1259356 - DNA, 25 bp, Homo sapien
cacagcaatacatgttagcaacttt

SEQ ID NO: 1259357 - DNA, 25 bp, Homo sapien
agtcatggaaaagccagcggggacc

SEQ ID NO: 1259358 - DNA, 25 bp, Homo sapien
ggagtaaatagggaaaatcaccatc

SEQ ID NO: 1259359 - DNA, 25 bp, Homo sapien
actgaaagggacaggcctttcttgg

SEQ ID NO: 1259360 - DNA, 25 bp, Homo sapien
tcttggaacaaattccaaacaagaa

SEQ ID NO: 1259361 - DNA, 25 bp, Homo sapien
tagggaaaatcaccatcaggctggg

SEQ ID NO: 1259362 - DNA, 25 bp, Homo sapien
ccccaggattgtggagtgagaacgt

SEQ ID NO: 1259363 - DNA, 25 bp, Homo sapien
cgctacggttactaattgtgtgcac

SEQ ID NO: 1259364 - DNA, 25 bp, Homo sapien
actgaggtaactaacgacggcggca

SEQ ID NO: 1259365 - DNA, 25 bp, Homo sapien
tgtgtgcacctagccctgtagctgt

SEQ ID NO: 1259366 - DNA, 25 bp, Homo sapien
cctctgctgtatgtcgggaatcagg

SEQ ID NO: 1259367 - DNA, 25 bp, Homo sapien
gccaagcgagatcaccacagtgcag

SEQ ID NO: 1259368 - DNA, 25 bp, Homo sapien
tcaccacagtgcaggccagtgtgca

SEQ ID NO: 1259369 - DNA, 25 bp, Homo sapien
tctcgccaaaaacgtgcagcacaat

SEQ ID NO: 1259370 - DNA, 25 bp, Homo sapien
ccaatgcaaaaagcatactgccttc

SEQ ID NO: 1259371 - DNA, 25 bp, Homo sapien
aatgcaaaaagcatactgccttctc

SEQ ID NO: 1259372 - DNA, 25 bp, Homo sapien
cacccaatgcaaaaagcatactgcc

SEQ ID NO: 1259373 - DNA, 25 bp, Homo sapien
ttccacccaatgcaaaaagcatact

SEQ ID NO: 1259374 - DNA, 25 bp, Homo sapien
gcctcaagctcccgggctcaaggaa

SEQ ID NO: 1259375 - DNA, 25 bp, Homo sapien
cctcaagctcccgggctcaaggaat

SEQ ID NO: 1259376 - DNA, 25 bp, Homo sapien
agcctcaagctcccgggctcaagga

SEQ ID NO: 1259377 - DNA, 25 bp, Homo sapien
gcctacttggaatatctatcgcctt

SEQ ID NO: 1259378 - DNA, 25 bp, Homo sapien
aaatatacagtaggcaattgccaac

SEQ ID NO: 1259379 - DNA, 25 bp, Homo sapien
ttgctttatgctagaaccgttccga

SEQ ID NO: 1259380 - DNA, 25 bp, Homo sapien
caggctgtcgttcctctgtatggct

SEQ ID NO: 1259381 - DNA, 25 bp, Homo sapien
aggatttattttccgttctcacagg

SEQ ID NO: 1259382 - DNA, 25 bp, Homo sapien
ttaaggacacacctgagaaaagaac

SEQ ID NO: 1259383 - DNA, 25 bp, Homo sapien
cttcagcactgggaattgtgatcca

SEQ ID NO: 1259384 - DNA, 25 bp, Homo sapien
tgggaattgtgatccaaagcttttc

SEQ ID NO: 1259385 - DNA, 25 bp, Homo sapien
tgagcagacctgcatgtctgcggtc

SEQ ID NO: 1259386 - DNA, 25 bp, Homo sapien
gagcagacctgcatgtctgcggtca

SEQ ID NO: 1259387 - DNA, 25 bp, Homo sapien
agcaggttggctctggttccttcgt

SEQ ID NO: 1259388 - DNA, 25 bp, Homo sapien
gggacagagggactgtcttcctcca

SEQ ID NO: 1259389 - DNA, 25 bp, Homo sapien
tctccagggcagcaagagagaccaa

SEQ ID NO: 1259390 - DNA, 25 bp, Homo sapien
gttccttcgtggggcagctggtctc

SEQ ID NO: 1259391 - DNA, 25 bp, Homo sapien
catggctttggagcacctggtagtg

SEQ ID NO: 1259392 - DNA, 25 bp, Homo sapien
atggctttggagcacctggtagtgt

SEQ ID NO: 1259393 - DNA, 25 bp, Homo sapien
ttttagactcttgttttagaaagca

SEQ ID NO: 1259394 - DNA, 25 bp, Homo sapien
ggtgtccgcagccacacgcaaaaaa

SEQ ID NO: 1259395 - DNA, 25 bp, Homo sapien
cacgcaaaaaagaagatccgcatgt

SEQ ID NO: 1259396 - DNA, 25 bp, Homo sapien
caaaaaagaagatccgcatgtcacc

SEQ ID NO: 1259397 - DNA, 25 bp, Homo sapien
gaaaggtgtccgcagccacacgcaa

SEQ ID NO: 1259398 - DNA, 25 bp, Homo sapien
gccaaggtcaccaccctgatttgtc

SEQ ID NO: 1259399 - DNA, 25 bp, Homo sapien
ctgagtcggccggaagaagatagaa

SEQ ID NO: 1259400 - DNA, 25 bp, Homo sapien
ggccaaggtcaccaccctgatttgt

SEQ ID NO: 1259401 - DNA, 25 bp, Homo sapien
gctgaccactgagtcggccggaaga

SEQ ID NO: 1259402 - DNA, 25 bp, Homo sapien
ctgcacgtttttggcgagagcatgg

SEQ ID NO: 1259403 - DNA, 25 bp, Homo sapien
tgtgctgcacgtttttggcgagagc

SEQ ID NO: 1259404 - DNA, 25 bp, Homo sapien
tgctgcacgtttttggcgagagcat

SEQ ID NO: 1259405 - DNA, 25 bp, Homo sapien
aattgtgctgcacgtttttggcgag

SEQ ID NO: 1259406 - DNA, 25 bp, Homo sapien
gagcatttccggttcccctgctgtg

SEQ ID NO: 1259407 - DNA, 25 bp, Homo sapien
gaggcccagctgagtttggatcata

SEQ ID NO: 1259408 - DNA, 25 bp, Homo sapien
taggctcaggtggaacagcctcaac

SEQ ID NO: 1259409 - DNA, 25 bp, Homo sapien
gaatatccttaagataaggccccag

SEQ ID NO: 1259410 - DNA, 25 bp, Homo sapien
tgtacccatcctgtacccgtcagga

SEQ ID NO: 1259411 - DNA, 25 bp, Homo sapien
ggcgtgtcctgctgtggaacacact

SEQ ID NO: 1259412 - DNA, 25 bp, Homo sapien
tctttcagcgcaggcgtgtcctgct

SEQ ID NO: 1259413 - DNA, 25 bp, Homo sapien
ggtctgtacccatcctgtacccgtc

SEQ ID NO: 1259414 - DNA, 25 bp, Homo sapien
tagagcccagaaatcatggcaatcc

SEQ ID NO: 1259415 - DNA, 25 bp, Homo sapien
ggtttgctgagaagtcactgacatg

SEQ ID NO: 1259416 - DNA, 25 bp, Homo sapien
aggagggtccgagtgtccacaactg

SEQ ID NO: 1259417 - DNA, 25 bp, Homo sapien
caggcccattgtgcctgccgctgga

SEQ ID NO: 1259418 - DNA, 25 bp, Homo sapien
gaacagatgcgtcaccaagcaaggg

SEQ ID NO: 1259419 - DNA, 25 bp, Homo sapien
taaagttgggcacacgcttcccaca

SEQ ID NO: 1259420 - DNA, 25 bp, Homo sapien
ccgattagcgggagcgcaaagcgaa

SEQ ID NO: 1259421 - DNA, 25 bp, Homo sapien
gcagcaggcactcattcccgattag

SEQ ID NO: 1259422 - DNA, 25 bp, Homo sapien
gcgcacgcgcggtcggctcggcgag

SEQ ID NO: 1259423 - DNA, 25 bp, Homo sapien
gtcggctcggcgaggagccggtctc

SEQ ID NO: 1259424 - DNA, 25 bp, Homo sapien
tcagcacggacgaggagggagccgc

SEQ ID NO: 1259425 - DNA, 25 bp, Homo sapien
cgctcagcacggacgaggagggagc

SEQ ID NO: 1259426 - DNA, 25 bp, Homo sapien
tataaatgtgttaaactcatagaac

SEQ ID NO: 1259427 - DNA, 25 bp, Homo sapien
taacaacaagcaactttacaagaga

SEQ ID NO: 1259428 - DNA, 25 bp, Homo sapien
tccacagtgttgctacatgaatcta

SEQ ID NO: 1259429 - DNA, 25 bp, Homo sapien
agacaaaccacagggagagctgccg

SEQ ID NO: 1259430 - DNA, 25 bp, Homo sapien
cagtgttgttgacagggtagggtgc

SEQ ID NO: 1259431 - DNA, 25 bp, Homo sapien
cagagagtatgcaagcacgaccacg

SEQ ID NO: 1259432 - DNA, 25 bp, Homo sapien
ggttcacacagcacgttttctgctc

SEQ ID NO: 1259433 - DNA, 25 bp, Homo sapien
atgcaagcacgaccacgtcaacagg

SEQ ID NO: 1259434 - DNA, 25 bp, Homo sapien
ttcacacagcacgttttctgctcca

SEQ ID NO: 1259435 - DNA, 25 bp, Homo sapien
cgtgtatggggcagggggcagcaga

SEQ ID NO: 1259436 - DNA, 25 bp, Homo sapien
tcacgtgtatggggcagggggcagc

SEQ ID NO: 1259437 - DNA, 25 bp, Homo sapien
cacgtgtatggggcagggggcagca

SEQ ID NO: 1259438 - DNA, 25 bp, Homo sapien
gtgtatggggcagggggcagcagag

SEQ ID NO: 1259439 - DNA, 25 bp, Homo sapien
ccggcgcacgcgggttctctgtggc

SEQ ID NO: 1259440 - DNA, 25 bp, Homo sapien
gccggcgcacgcgggttctctgtgg

SEQ ID NO: 1259441 - DNA, 25 bp, Homo sapien
cggccggcgcacgcgggttctctgt

SEQ ID NO: 1259442 - DNA, 25 bp, Homo sapien
ggccggcgcacgcgggttctctgtg

SEQ ID NO: 1259443 - DNA, 25 bp, Homo sapien
ggccggcgcacgcgggttctctgtg

SEQ ID NO: 1259444 - DNA, 25 bp, Homo sapien
ccggcgcacgcgggttctctgtggc

SEQ ID NO: 1259445 - DNA, 25 bp, Homo sapien
gccggcgcacgcgggttctctgtgg

SEQ ID NO: 1259446 - DNA, 25 bp, Homo sapien
cggccggcgcacgcgggttctctgt

SEQ ID NO: 1259447 - DNA, 25 bp, Homo sapien
ccggcgcacgcgggttctctgtggc

SEQ ID NO: 1259448 - DNA, 25 bp, Homo sapien
ggccggcgcacgcgggttctctgtg

SEQ ID NO: 1259449 - DNA, 25 bp, Homo sapien
cggccggcgcacgcgggttctctgt

SEQ ID NO: 1259450 - DNA, 25 bp, Homo sapien
gccggcgcacgcgggttctctgtgg

SEQ ID NO: 1259451 - DNA, 25 bp, Homo sapien
ccggcgcacgcgggttctctgtggc

SEQ ID NO: 1259452 - DNA, 25 bp, Homo sapien
ggccggcgcacgcgggttctctgtg

SEQ ID NO: 1259453 - DNA, 25 bp, Homo sapien
gccggcgcacgcgggttctctgtgg

SEQ ID NO: 1259454 - DNA, 25 bp, Homo sapien
cggccggcgcacgcgggttctctgt

SEQ ID NO: 1259455 - DNA, 25 bp, Homo sapien
ccggcgcacgcgggttctctgtggc

SEQ ID NO: 1259456 - DNA, 25 bp, Homo sapien
gccggcgcacgcgggttctctgtgg

SEQ ID NO: 1259457 - DNA, 25 bp, Homo sapien
cggccggcgcacgcgggttctctgt

SEQ ID NO: 1259458 - DNA, 25 bp, Homo sapien
ggccggcgcacgcgggttctctgtg

SEQ ID NO: 1259459 - DNA, 25 bp, Homo sapien
gccggcgcacgcgggttctctgtgg

SEQ ID NO: 1259460 - DNA, 25 bp, Homo sapien
cggccggcgcacgcgggttctctgt

SEQ ID NO: 1259461 - DNA, 25 bp, Homo sapien
ggccggcgcacgcgggttctctgtg

SEQ ID NO: 1259462 - DNA, 25 bp, Homo sapien
ccggcgcacgcgggttctctgtggc

SEQ ID NO: 1259463 - DNA, 25 bp, Homo sapien
tcctgaggttccctagtggccgcga

SEQ ID NO: 1259464 - DNA, 25 bp, Homo sapien
ccctagtggccgcgaagggtgggct

SEQ ID NO: 1259465 - DNA, 25 bp, Homo sapien
ctgaggttccctagtggccgcgaag

SEQ ID NO: 1259466 - DNA, 25 bp, Homo sapien
ctagtggccgcgaagggtgggctca

SEQ ID NO: 1259467 - DNA, 25 bp, Homo sapien
gggtgcggggatggctgcggccacg

SEQ ID NO: 1259468 - DNA, 25 bp, Homo sapien
aggaggccggagctcaggcccactc

SEQ ID NO: 1259469 - DNA, 25 bp, Homo sapien
gaggccggagctcaggcccactctg

SEQ ID NO: 1259470 - DNA, 25 bp, Homo sapien
ccacgggagggcgtccagggaggag

SEQ ID NO: 1259471 - DNA, 25 bp, Homo sapien
cttccttcgtgcacattctggggct

SEQ ID NO: 1259472 - DNA, 25 bp, Homo sapien
ctcttccttcgtgcacattctgggg

SEQ ID NO: 1259473 - DNA, 25 bp, Homo sapien
tcttccttcgtgcacattctggggc

SEQ ID NO: 1259474 - DNA, 25 bp, Homo sapien
tctcttccttcgtgcacattctggg

SEQ ID NO: 1259475 - DNA, 25 bp, Homo sapien
gaggtcatgaccagtagaaatctca

SEQ ID NO: 1259476 - DNA, 25 bp, Homo sapien
cgcttactacctggcacttattggg

SEQ ID NO: 1259477 - DNA, 25 bp, Homo sapien
gacggtgtcttactcatctgctctc

SEQ ID NO: 1259478 - DNA, 25 bp, Homo sapien
catgtgtccctaagaatctgagagc

SEQ ID NO: 1259479 - DNA, 25 bp, Homo sapien
tctgtccctcgatccttgcaacgta

SEQ ID NO: 1259480 - DNA, 25 bp, Homo sapien
gctgcaaggatgctcagaaaaccag

SEQ ID NO: 1259481 - DNA, 25 bp, Homo sapien
ggcacagcagcttctaccttatgga

SEQ ID NO: 1259482 - DNA, 25 bp, Homo sapien
tattcattggccacttgctgcacgc

SEQ ID NO: 1259483 - DNA, 25 bp, Homo sapien
ggtcatccatcctttggccccaata

SEQ ID NO: 1259484 - DNA, 25 bp, Homo sapien
gaaatggtcatccatcctttggccc

SEQ ID NO: 1259485 - DNA, 25 bp, Homo sapien
cctggcttagcctggatcgtttgaa

SEQ ID NO: 1259486 - DNA, 25 bp, Homo sapien
gcctggatcgtttgaaatggtcatc

SEQ ID NO: 1259487 - DNA, 25 bp, Homo sapien
tctaggactatgagaatcgaaccca

SEQ ID NO: 1259488 - DNA, 25 bp, Homo sapien
gtgccacctatcacaccccatccta

SEQ ID NO: 1259489 - DNA, 25 bp, Homo sapien
tatgagaatcgaacccatccctgag

SEQ ID NO: 1259490 - DNA, 25 bp, Homo sapien
gactatgagaatcgaacccatccct

SEQ ID NO: 1259491 - DNA, 25 bp, Homo sapien
ataaaccctcgttccacagaagctg

SEQ ID NO: 1259492 - DNA, 25 bp, Homo sapien
ggcacactcatcacagcgctaagct

SEQ ID NO: 1259493 - DNA, 25 bp, Homo sapien
taggcctagaaataaacatgctagc

SEQ ID NO: 1259494 - DNA, 25 bp, Homo sapien
gccatcaagtatttcctcacgcaag

SEQ ID NO: 1259495 - DNA, 25 bp, Homo sapien
gaaacaagctaacatgactaacacc

SEQ ID NO: 1259496 - DNA, 25 bp, Homo sapien
ctactactatctcgcacctgaaaca

SEQ ID NO: 1259497 - DNA, 25 bp, Homo sapien
gcattcctactactcaacttaaact

SEQ ID NO: 1259498 - DNA, 25 bp, Homo sapien
tatattatcctaactactaccgcat

SEQ ID NO: 1259499 - DNA, 25 bp, Homo sapien
tcaactgaacgcaaatcagccactt

SEQ ID NO: 1259500 - DNA, 25 bp, Homo sapien
cactctgcatcaactgaacgcaaat

SEQ ID NO: 1259501 - DNA, 25 bp, Homo sapien
ctaaggactgcaaaaccccactctg

SEQ ID NO: 1259502 - DNA, 25 bp, Homo sapien
tgcatcaactgaacgcaaatcagcc

SEQ ID NO: 1259503 - DNA, 25 bp, Homo sapien
cacttagttaacagctaagcaccct

SEQ ID NO: 1259504 - DNA, 25 bp, Homo sapien
aacacttagttaacagctaagcacc

SEQ ID NO: 1259505 - DNA, 25 bp, Homo sapien
tagaccaatgggacttaaacccaca

SEQ ID NO: 1259506 - DNA, 25 bp, Homo sapien
acaaacacttagttaacagctaagc

SEQ ID NO: 1259507 - DNA, 25 bp, Homo sapien
attcaatatgaaaatcacctcagag

SEQ ID NO: 1259508 - DNA, 25 bp, Homo sapien
gaagccccggcaggtttgaagctgc

SEQ ID NO: 1259509 - DNA, 25 bp, Homo sapien
agccccggcaggtttgaagctgctt

SEQ ID NO: 1259510 - DNA, 25 bp, Homo sapien
tgcttcttcgaatttgcaattcaat

SEQ ID NO: 1259511 - DNA, 25 bp, Homo sapien
agaggcttaacccctgtctttagat

SEQ ID NO: 1259512 - DNA, 25 bp, Homo sapien
gatttacagtccaatgcttcactca

SEQ ID NO: 1259513 - DNA, 25 bp, Homo sapien
tttagatttacagtccaatgcttca

SEQ ID NO: 1259514 - DNA, 25 bp, Homo sapien
ttacagtccaatgcttcactcagcc

SEQ ID NO: 1259515 - DNA, 25 bp, Homo sapien
ggcgtttccccgcataaacaacata

SEQ ID NO: 1259516 - DNA, 25 bp, Homo sapien
gactagttcccctaataatcggtgc

SEQ ID NO: 1259517 - DNA, 25 bp, Homo sapien
tcggtgcccccgatatggcgtttcc

SEQ ID NO: 1259518 - DNA, 25 bp, Homo sapien
acaacgttatcgtcacagcccatgc

SEQ ID NO: 1259519 - DNA, 25 bp, Homo sapien
gctggcatcactatactactaacag

SEQ ID NO: 1259520 - DNA, 25 bp, Homo sapien
tctgatccgtcctaatcacagcagt

SEQ ID NO: 1259521 - DNA, 25 bp, Homo sapien
ttcgtctgatccgtcctaatcacag

SEQ ID NO: 1259522 - DNA, 25 bp, Homo sapien
gcatcactatactactaacagaccg

SEQ ID NO: 1259523 - DNA, 25 bp, Homo sapien
cctggagtgactatatggatgcccc

SEQ ID NO: 1259524 - DNA, 25 bp, Homo sapien
cctagggtttatcgtgtgagcacac

SEQ ID NO: 1259525 - DNA, 25 bp, Homo sapien
tatgatatcaattggcttcctaggg

SEQ ID NO: 1259526 - DNA, 25 bp, Homo sapien
tcctaatagtagaagaaccctccat

SEQ ID NO: 1259527 - DNA, 25 bp, Homo sapien
cccatggcctccatgactttttcaa

SEQ ID NO: 1259528 - DNA, 25 bp, Homo sapien
tactcatgcacctaattggaagcgc

SEQ ID NO: 1259529 - DNA, 25 bp, Homo sapien
tatcctagaaatcgctgtcgcctta

SEQ ID NO: 1259530 - DNA, 25 bp, Homo sapien
taaccgctaacattactgcaggcca

SEQ ID NO: 1259531 - DNA, 25 bp, Homo sapien
catggccatccccttatgagcgggc

SEQ ID NO: 1259532 - DNA, 25 bp, Homo sapien
catccgagttgctctgttggaggaa

SEQ ID NO: 1259533 - DNA, 25 bp, Homo sapien
tgtctgaaaggaggactaccggccc

SEQ ID NO: 1259534 - DNA, 25 bp, Homo sapien
cataagtgcgctccggtccatgcac

SEQ ID NO: 1259535 - DNA, 25 bp, Homo sapien
ggcagtcttctatggaaaggccact

SEQ ID NO: 1259536 - DNA, 25 bp, Homo sapien
agatcctcttgtaaatcactagctg

SEQ ID NO: 1259537 - DNA, 25 bp, Homo sapien
ttatgagatcctcttgtaaatcact

SEQ ID NO: 1259538 - DNA, 25 bp, Homo sapien
tgagatcctcttgtaaatcactagc

SEQ ID NO: 1259539 - DNA, 25 bp, Homo sapien
atgagatcctcttgtaaatcactag

SEQ ID NO: 1259540 - DNA, 25 bp, Homo sapien
gaactgcaatctgtaggtgtcggta

SEQ ID NO: 1259541 - DNA, 25 bp, Homo sapien
gtaatgcttgccacatagagcacag

SEQ ID NO: 1259542 - DNA, 25 bp, Homo sapien
tccatctgtgaattagggtgtggcc

SEQ ID NO: 1259543 - DNA, 25 bp, Homo sapien
aagctgtccaacacattagggccac

SEQ ID NO: 1259544 - DNA, 25 bp, Homo sapien
gccaactgggctgtggctaaaatta

SEQ ID NO: 1259545 - DNA, 25 bp, Homo sapien
ccagccaactgggctgtggctaaaa

SEQ ID NO: 1259546 - DNA, 25 bp, Homo sapien
cagccaactgggctgtggctaaaat

SEQ ID NO: 1259547 - DNA, 25 bp, Homo sapien
agccaactgggctgtggctaaaatt

SEQ ID NO: 1259548 - DNA, 25 bp, Homo sapien
gaaaatggggaggaaattgtgatta

SEQ ID NO: 1259549 - DNA, 25 bp, Homo sapien
cctgcaatgatttcataaggagcct

SEQ ID NO: 1259550 - DNA, 25 bp, Homo sapien
tcggaaagcccacaactgtagcaga

SEQ ID NO: 1259551 - DNA, 25 bp, Homo sapien
gtttgcacccacaattctctgacag

SEQ ID NO: 1259552 - DNA, 25 bp, Homo sapien
taaggagcctatgccacctgtcatg

SEQ ID NO: 1259553 - DNA, 25 bp, Homo sapien
tatagcctaggagtcattctaacag

SEQ ID NO: 1259554 - DNA, 25 bp, Homo sapien
gaaaaggataagtcacaagtcacat

SEQ ID NO: 1259555 - DNA, 25 bp, Homo sapien
tatgaatccactctaagccatagtc

SEQ ID NO: 1259556 - DNA, 25 bp, Homo sapien
tcacctttggaataattaggacacg

SEQ ID NO: 1259557 - DNA, 25 bp, Homo sapien
tcacctgtaaaattgtctgagcaac

SEQ ID NO: 1259558 - DNA, 25 bp, Homo sapien
gattcaaggtgtgaaggtaacatca

SEQ ID NO: 1259559 - DNA, 25 bp, Homo sapien
ctgtaacagtgcaattaaacgttct

SEQ ID NO: 1259560 - DNA, 25 bp, Homo sapien
gcatgtttgctagaactcacctgta

SEQ ID NO: 1259561 - DNA, 25 bp, Homo sapien
agtatgtatatgcagtgactcagca

SEQ ID NO: 1259562 - DNA, 25 bp, Homo sapien
ttacatccatgagcctgataaaagt

SEQ ID NO: 1259563 - DNA, 25 bp, Homo sapien
gaaaatcttgtccattactggttaa

SEQ ID NO: 1259564 - DNA, 25 bp, Homo sapien
tcaagagaaacttacaggagtggac

SEQ ID NO: 1259565 - DNA, 25 bp, Homo sapien
accatctacgctaagacataaaatt

SEQ ID NO: 1259566 - DNA, 25 bp, Homo sapien
tcagttgtttagttacaagatagaa

SEQ ID NO: 1259567 - DNA, 25 bp, Homo sapien
tggccttgtaagaaagcaaattaac

SEQ ID NO: 1259568 - DNA, 25 bp, Homo sapien
aattaacttctaacatacaaagcct

SEQ ID NO: 1259569 - DNA, 25 bp, Homo sapien
cagtatctatatcaaaaatggctta

SEQ ID NO: 1259570 - DNA, 25 bp, Homo sapien
cttcaagtttgctcttagcaagtaa

SEQ ID NO: 1259571 - DNA, 25 bp, Homo sapien
caagtaattgtttcagtatctatat

SEQ ID NO: 1259572 - DNA, 25 bp, Homo sapien
caagtttgctcttagcaagtaattg

SEQ ID NO: 1259573 - DNA, 25 bp, Homo sapien
aagaatgttgactgttcacaataca

SEQ ID NO: 1259574 - DNA, 25 bp, Homo sapien
agaatgttgactgttcacaatacaa

SEQ ID NO: 1259575 - DNA, 25 bp, Homo sapien
gatgggatgtagaatgataaggctc

SEQ ID NO: 1259576 - DNA, 25 bp, Homo sapien
aaagacaaactcacaggaagatggg

SEQ ID NO: 1259577 - DNA, 25 bp, Homo sapien
gccctgctaggagttcacgctttag

SEQ ID NO: 1259578 - DNA, 25 bp, Homo sapien
tgagaactgcaattagagttaaatg

SEQ ID NO: 1259579 - DNA, 25 bp, Homo sapien
tctttgtatcggtgctcagctgagt

SEQ ID NO: 1259580 - DNA, 25 bp, Homo sapien
tgtctttctttgtatcggtgctcag

SEQ ID NO: 1259581 - DNA, 25 bp, Homo sapien
ttgaatcattttaagatgctcgaac

SEQ ID NO: 1259582 - DNA, 25 bp, Homo sapien
tctttctttgtatcggtgctcagct

SEQ ID NO: 1259583 - DNA, 25 bp, Homo sapien
agcagtgtggctgaacacctaaaag

SEQ ID NO: 1259584 - DNA, 25 bp, Homo sapien
tcatcacagtagagcacgatcttaa

SEQ ID NO: 1259585 - DNA, 25 bp, Homo sapien
actcaggagtaaacactcagatatg

SEQ ID NO: 1259586 - DNA, 25 bp, Homo sapien
tcaaacaaacccaaatcatcacagt

SEQ ID NO: 1259587 - DNA, 25 bp, Homo sapien
ttcggccgtgttctcctggtactcc

SEQ ID NO: 1259588 - DNA, 25 bp, Homo sapien
cggccgtgttctcctggtactccat

SEQ ID NO: 1259589 - DNA, 25 bp, Homo sapien
tcggccgtgttctcctggtactcca

SEQ ID NO: 1259590 - DNA, 25 bp, Homo sapien
tcttcggccgtgttctcctggtact

SEQ ID NO: 1259591 - DNA, 25 bp, Homo sapien
caaagcccaacacccccaagtgtgc

SEQ ID NO: 1259592 - DNA, 25 bp, Homo sapien
ccaaagcccaacacccccaagtgtg

SEQ ID NO: 1259593 - DNA, 25 bp, Homo sapien
gggactgatgactgcatgatcttct

SEQ ID NO: 1259594 - DNA, 25 bp, Homo sapien
tgggactgatgactgcatgatcttc

SEQ ID NO: 1259595 - DNA, 25 bp, Homo sapien
aggcaggtgggcaaccccaaagatc

SEQ ID NO: 1259596 - DNA, 25 bp, Homo sapien
agatgtgtgcatagcaggtccactg

SEQ ID NO: 1259597 - DNA, 25 bp, Homo sapien
tggttatcttctcccaggtgaagcc

SEQ ID NO: 1259598 - DNA, 25 bp, Homo sapien
tctccataactaccacaggcaggtg

SEQ ID NO: 1259599 - DNA, 25 bp, Homo sapien
aagctcttcagacccacatcccttc

SEQ ID NO: 1259600 - DNA, 25 bp, Homo sapien
ccgcctgcgtttgtagaccccgaag

SEQ ID NO: 1259601 - DNA, 25 bp, Homo sapien
ttttggctcagctcccgcctgcgtt

SEQ ID NO: 1259602 - DNA, 25 bp, Homo sapien
tgactgaacagtcccagctccggct

SEQ ID NO: 1259603 - DNA, 25 bp, Homo sapien
agcagcccgagtgcgatcctgttcc

SEQ ID NO: 1259604 - DNA, 25 bp, Homo sapien
cagcagcccgagtgcgatcctgttc

SEQ ID NO: 1259605 - DNA, 25 bp, Homo sapien
cccagcagcccgagtgcgatcctgt

SEQ ID NO: 1259606 - DNA, 25 bp, Homo sapien
ccagcagcccgagtgcgatcctgtt

SEQ ID NO: 1259607 - DNA, 25 bp, Homo sapien
cagtgctagaactgtacaggccacc

SEQ ID NO: 1259608 - DNA, 25 bp, Homo sapien
tctccaaccagtgctagaactgtac

SEQ ID NO: 1259609 - DNA, 25 bp, Homo sapien
caaccagtgctagaactgtacaggc

SEQ ID NO: 1259610 - DNA, 25 bp, Homo sapien
tgctagaactgtacaggccaccagg

SEQ ID NO: 1259611 - DNA, 25 bp, Homo sapien
gaggccgcagtgaagcaacagctag

SEQ ID NO: 1259612 - DNA, 25 bp, Homo sapien
cgcagtgaagcaacagctagctggg

SEQ ID NO: 1259613 - DNA, 25 bp, Homo sapien
gccgcagtgaagcaacagctagctg

SEQ ID NO: 1259614 - DNA, 25 bp, Homo sapien
cagtgaagcaacagctagctgggcg

SEQ ID NO: 1259615 - DNA, 25 bp, Homo sapien
taggcctggaaatggactcacagtc

SEQ ID NO: 1259616 - DNA, 25 bp, Homo sapien
cagaaatttggcctggggcagctgc

SEQ ID NO: 1259617 - DNA, 25 bp, Homo sapien
cctggaaatggactcacagtcatga

SEQ ID NO: 1259618 - DNA, 25 bp, Homo sapien
aaatggactcacagtcatgagttgg

SEQ ID NO: 1259619 - DNA, 25 bp, Homo sapien
actgggccaaaaaaggctgttgtga

SEQ ID NO: 1259620 - DNA, 25 bp, Homo sapien
aactgggccaaaaaaggctgttgtg

SEQ ID NO: 1259621 - DNA, 25 bp, Homo sapien
tagggtatgggcctaaataggccat

SEQ ID NO: 1259622 - DNA, 25 bp, Homo sapien
gggtatgggcctaaataggccattg

SEQ ID NO: 1259623 - DNA, 25 bp, Homo sapien
agggtatgggcctaaataggccatt

SEQ ID NO: 1259624 - DNA, 25 bp, Homo sapien
agaattagtgggcgtgttaagcttg

SEQ ID NO: 1259625 - DNA, 25 bp, Homo sapien
tgtagaattagtgggcgtgttaagc

SEQ ID NO: 1259626 - DNA, 25 bp, Homo sapien
taatgtagaattagtgggcgtgtta

SEQ ID NO: 1259627 - DNA, 25 bp, Homo sapien
attagtgggcgtgttaagcttgttt

SEQ ID NO: 1259628 - DNA, 25 bp, Homo sapien
tgagcgtgatgggagaaagtgacag

SEQ ID NO: 1259629 - DNA, 25 bp, Homo sapien
agtgacagatcaataggtattagat

SEQ ID NO: 1259630 - DNA, 25 bp, Homo sapien
ctcataaggacagcgcaacctcgat

SEQ ID NO: 1259631 - DNA, 25 bp, Homo sapien
tctcataaggacagcgcaacctcga

SEQ ID NO: 1259632 - DNA, 25 bp, Homo sapien
agaatccacgtatacgaaaattcca

SEQ ID NO: 1259633 - DNA, 25 bp, Homo sapien
cctctagaatccacgtatacgaaaa

SEQ ID NO: 1259634 - DNA, 25 bp, Homo sapien
acccctctagaatccacgtatacga

SEQ ID NO: 1259635 - DNA, 25 bp, Homo sapien
tctagaatccacgtatacgaaaatt

SEQ ID NO: 1259636 - DNA, 25 bp, Homo sapien
gtagggtatgggcctaaataggcca

SEQ ID NO: 1259637 - DNA, 25 bp, Homo sapien
tagggtatgggcctaaataggccat

SEQ ID NO: 1259638 - DNA, 25 bp, Homo sapien
agggtatgggcctaaataggccatt

SEQ ID NO: 1259639 - DNA, 25 bp, Homo sapien
gggtatgggcctaaataggccattg

SEQ ID NO: 1259640 - DNA, 25 bp, Homo sapien
tagaatcagtgggcgtgttaagctt

SEQ ID NO: 1259641 - DNA, 25 bp, Homo sapien
gaatcagtgggcgtgttaagcttgt

SEQ ID NO: 1259642 - DNA, 25 bp, Homo sapien
ttttcctgcaactggatggtcccac

SEQ ID NO: 1259643 - DNA, 25 bp, Homo sapien
tgtagaatcagtgggcgtgttaagc

SEQ ID NO: 1259644 - DNA, 25 bp, Homo sapien
tgcacggttcacaacagggtgcgtt

SEQ ID NO: 1259645 - DNA, 25 bp, Homo sapien
gctgctcatctgagaaggtggagct

SEQ ID NO: 1259646 - DNA, 25 bp, Homo sapien
tctaacgctgctgctcatctgagaa

SEQ ID NO: 1259647 - DNA, 25 bp, Homo sapien
cggttcacaacagggtgcgttctcc

SEQ ID NO: 1259648 - DNA, 25 bp, Homo sapien
ccacgtatacgaaaattccaaatgt

SEQ ID NO: 1259649 - DNA, 25 bp, Homo sapien
cctctggaatccacgtatacgaaaa

SEQ ID NO: 1259650 - DNA, 25 bp, Homo sapien
gcagtcagctgcgatagcactacta

SEQ ID NO: 1259651 - DNA, 25 bp, Homo sapien
acccctctggaatccacgtatacga

SEQ ID NO: 1259652 - DNA, 25 bp, Homo sapien
gtagggtatgggcctaaataggcca

SEQ ID NO: 1259653 - DNA, 25 bp, Homo sapien
agggtatgggcctaaataggccatt

SEQ ID NO: 1259654 - DNA, 25 bp, Homo sapien
tagggtatgggcctaaataggccat

SEQ ID NO: 1259655 - DNA, 25 bp, Homo sapien
gggtatgggcctaaataggccattg

SEQ ID NO: 1259656 - DNA, 25 bp, Homo sapien
gaatcagtgggcgtgttaagcttgt

SEQ ID NO: 1259657 - DNA, 25 bp, Homo sapien
ttttcctgcaactggatgttcccac

SEQ ID NO: 1259658 - DNA, 25 bp, Homo sapien
tagaatcagtgggcgtgttaagctt

SEQ ID NO: 1259659 - DNA, 25 bp, Homo sapien
tgtagaatcagtgggcgtgttaagc

SEQ ID NO: 1259660 - DNA, 25 bp, Homo sapien
gctgctcatctgagaaggtggagct

SEQ ID NO: 1259661 - DNA, 25 bp, Homo sapien
tgcacggttcacaacagggtgcgtt

SEQ ID NO: 1259662 - DNA, 25 bp, Homo sapien
ctcataaggacagcgcaaccttgat

SEQ ID NO: 1259663 - DNA, 25 bp, Homo sapien
tctaacgctgctgctcatctgagaa

SEQ ID NO: 1259664 - DNA, 25 bp, Homo sapien
cctgctgtgtggctccttgcggctc

SEQ ID NO: 1259665 - DNA, 25 bp, Homo sapien
gctgtgtggctccttgcggctccat

SEQ ID NO: 1259666 - DNA, 25 bp, Homo sapien
tgctgtgtggctccttgcggctcca

SEQ ID NO: 1259667 - DNA, 25 bp, Homo sapien
ctcctgctgtgtggctccttgcggc

SEQ ID NO: 1259668 - DNA, 25 bp, Homo sapien
gttttgctgtcacccctctggaatc

SEQ ID NO: 1259669 - DNA, 25 bp, Homo sapien
acccctctggaatccacgtatacga

SEQ ID NO: 1259670 - DNA, 25 bp, Homo sapien
gcagtcagctgcgatagcactacta

SEQ ID NO: 1259671 - DNA, 25 bp, Homo sapien
ccacgtatacgaaaattccaaatat

SEQ ID NO: 1259672 - DNA, 25 bp, Homo sapien
gaggcaggagctgggtctaaagagg

SEQ ID NO: 1259673 - DNA, 25 bp, Homo sapien
gagaatgttcagggcctggagagaa

SEQ ID NO: 1259674 - DNA, 25 bp, Homo sapien
ctggagagaaggctgggaggcagga

SEQ ID NO: 1259675 - DNA, 25 bp, Homo sapien
tgagaatgttcagggcctggagaga

SEQ ID NO: 1259676 - DNA, 25 bp, Homo sapien
gtagggtatgggcctaaataggcca

SEQ ID NO: 1259677 - DNA, 25 bp, Homo sapien
tagggtatgggcctaaataggccat

SEQ ID NO: 1259678 - DNA, 25 bp, Homo sapien
gggtatgggcctaaataggccattg

SEQ ID NO: 1259679 - DNA, 25 bp, Homo sapien
agggtatgggcctaaataggccatt

SEQ ID NO: 1259680 - DNA, 25 bp, Homo sapien
acactgtgatatataataaaataat

SEQ ID NO: 1259681 - DNA, 25 bp, Homo sapien
ataataaaataattatagaactcac

SEQ ID NO: 1259682 - DNA, 25 bp, Homo sapien
cactgtgatatataataaaataatt

SEQ ID NO: 1259683 - DNA, 25 bp, Homo sapien
tagaatcagtgggcgtgttaagctt

SEQ ID NO: 1259684 - DNA, 25 bp, Homo sapien
gaatcagtgggcgtgttaagcttgt

SEQ ID NO: 1259685 - DNA, 25 bp, Homo sapien
tgtagaatcagtgggcgtgttaagc

SEQ ID NO: 1259686 - DNA, 25 bp, Homo sapien
ttttcctgcaactggatgttcccac

SEQ ID NO: 1259687 - DNA, 25 bp, Homo sapien
tattagactctcataaggacagcgc

SEQ ID NO: 1259688 - DNA, 25 bp, Homo sapien
gctcaggtgggaatgtgagcaaagg

SEQ ID NO: 1259689 - DNA, 25 bp, Homo sapien
tctaacgctgctgctcatctgagaa

SEQ ID NO: 1259690 - DNA, 25 bp, Homo sapien
tgcacggttcacaacagggtgcgtt

SEQ ID NO: 1259691 - DNA, 25 bp, Homo sapien
cttgagtcactgtgaggtcacctac

SEQ ID NO: 1259692 - DNA, 25 bp, Homo sapien
ccatttcccactggcaaagagctca

SEQ ID NO: 1259693 - DNA, 25 bp, Homo sapien
cagcactgccccctgggaaaccaaa

SEQ ID NO: 1259694 - DNA, 25 bp, Homo sapien
tcactgtgaggtcacctactggaaa

SEQ ID NO: 1259695 - DNA, 25 bp, Homo sapien
ggtgggagaaccactggaacccaga

SEQ ID NO: 1259696 - DNA, 25 bp, Homo sapien
gaaccactggaacccagacaatcaa

SEQ ID NO: 1259697 - DNA, 25 bp, Homo sapien
ggagaaccactggaacccagacaat

SEQ ID NO: 1259698 - DNA, 25 bp, Homo sapien
gccaacacaacaagaccccatctat

SEQ ID NO: 1259699 - DNA, 25 bp, Homo sapien
catacattcagtcggaagtgtgtga

SEQ ID NO: 1259700 - DNA, 25 bp, Homo sapien
tacccagttaatatccagagcactg

SEQ ID NO: 1259701 - DNA, 25 bp, Homo sapien
tgtgagtagagacaaacatgggctt

SEQ ID NO: 1259702 - DNA, 25 bp, Homo sapien
ggtgagcctgcgcaaatcattcatt

SEQ ID NO: 1259703 - DNA, 25 bp, Homo sapien
agtttgcgctatcccatcccggccc

SEQ ID NO: 1259704 - DNA, 25 bp, Homo sapien
gggcagtttgcgctatcccatcccg

SEQ ID NO: 1259705 - DNA, 25 bp, Homo sapien
ttgcgctatcccatcccggcccatt

SEQ ID NO: 1259706 - DNA, 25 bp, Homo sapien
ggcagtttgcgctatcccatcccgg

SEQ ID NO: 1259707 - DNA, 25 bp, Homo sapien
ctcttcctggattcacaagtctttc

SEQ ID NO: 1259708 - DNA, 25 bp, Homo sapien
tcctggattcacaagtctttcatgg

SEQ ID NO: 1259709 - DNA, 25 bp, Homo sapien
ctggattcacaagtctttcatggta

SEQ ID NO: 1259710 - DNA, 25 bp, Homo sapien
cttcctggattcacaagtctttcat

SEQ ID NO: 1259711 - DNA, 25 bp, Homo sapien
gagagaggtatattacttgaggcca

SEQ ID NO: 1259712 - DNA, 25 bp, Homo sapien
aaacagagtgaatgtgtggaagaca

SEQ ID NO: 1259713 - DNA, 25 bp, Homo sapien
cacagactgggaatgagggaataat

SEQ ID NO: 1259714 - DNA, 25 bp, Homo sapien
tataacgtagactcagtgggatctc

SEQ ID NO: 1259715 - DNA, 25 bp, Homo sapien
atctcctggtacccttcctagcatc

SEQ ID NO: 1259716 - DNA, 25 bp, Homo sapien
ctcctggtacccttcctagcatcaa

SEQ ID NO: 1259717 - DNA, 25 bp, Homo sapien
tctcctggtacccttcctagcatca

SEQ ID NO: 1259718 - DNA, 25 bp, Homo sapien
tgactcctctgtcacttgtccgctt

SEQ ID NO: 1259719 - DNA, 25 bp, Homo sapien
tcacttgtccgctttggcatcacct

SEQ ID NO: 1259720 - DNA, 25 bp, Homo sapien
tactctcttcctagctagctttgac

SEQ ID NO: 1259721 - DNA, 25 bp, Homo sapien
tataatatgcttccccttaaacctc

SEQ ID NO: 1259722 - DNA, 25 bp, Homo sapien
tgaggctataatgagccatgatagg

SEQ ID NO: 1259723 - DNA, 25 bp, Homo sapien
tgggaaggctgacatggtaggattg

SEQ ID NO: 1259724 - DNA, 25 bp, Homo sapien
taatgagccatgataggaccactga

SEQ ID NO: 1259725 - DNA, 25 bp, Homo sapien
gctataatgagccatgataggacca

SEQ ID NO: 1259726 - DNA, 25 bp, Homo sapien
tcctgaggtgcctacaaggcatctc

SEQ ID NO: 1259727 - DNA, 25 bp, Homo sapien
ttacagagtggagcaacaggaaaac

SEQ ID NO: 1259728 - DNA, 25 bp, Homo sapien
tctgcaaacgagtaaacatcaccct

SEQ ID NO: 1259729 - DNA, 25 bp, Homo sapien
acatcaccctccaactccttacaga

SEQ ID NO: 1259730 - DNA, 25 bp, Homo sapien
agcaagacctgggtggcatacacct

SEQ ID NO: 1259731 - DNA, 25 bp, Homo sapien
tagcaagacctgggtggcatacacc

SEQ ID NO: 1259732 - DNA, 25 bp, Homo sapien
atagcaagacctgggtggcatacac

SEQ ID NO: 1259733 - DNA, 25 bp, Homo sapien
gcaagacctgggtggcatacacctg

SEQ ID NO: 1259734 - DNA, 25 bp, Homo sapien
taatgcctttatcctgttgactcag

SEQ ID NO: 1259735 - DNA, 25 bp, Homo sapien
taaatcaggagacggatcatgtcgc

SEQ ID NO: 1259736 - DNA, 25 bp, Homo sapien
gccaggtcgtgcttttaaatcagga

SEQ ID NO: 1259737 - DNA, 25 bp, Homo sapien
caatagcgtcccagggcttacacga

SEQ ID NO: 1259738 - DNA, 25 bp, Homo sapien
gctacaacaaagtaccctacattta

SEQ ID NO: 1259739 - DNA, 25 bp, Homo sapien
aagtaccctacatttagtggcatca

SEQ ID NO: 1259740 - DNA, 25 bp, Homo sapien
gggccagaagcccaactaggtctat

SEQ ID NO: 1259741 - DNA, 25 bp, Homo sapien
gcaaccgtaacatgaggtcccagct

SEQ ID NO: 1259742 - DNA, 25 bp, Homo sapien
aagctccgagactgcttcaggagga

SEQ ID NO: 1259743 - DNA, 25 bp, Homo sapien
gggctagctgccagagaaagcaacc

SEQ ID NO: 1259744 - DNA, 25 bp, Homo sapien
tggccccaaccacattttttgaggc

SEQ ID NO: 1259745 - DNA, 25 bp, Homo sapien
tataaagcccttcgtgacagaggta

SEQ ID NO: 1259746 - DNA, 25 bp, Homo sapien
tgagatggagccattacattgagcc

SEQ ID NO: 1259747 - DNA, 25 bp, Homo sapien
ctttcattggctgttcctgagatgg

SEQ ID NO: 1259748 - DNA, 25 bp, Homo sapien
tagaaaataaggtggccagatgcgc

SEQ ID NO: 1259749 - DNA, 25 bp, Homo sapien
tcctgtgcatctctttcattggctg

SEQ ID NO: 1259750 - DNA, 25 bp, Homo sapien
gtcagtttctcttcctggattcaga

SEQ ID NO: 1259751 - DNA, 25 bp, Homo sapien
cagaagtctttcatggtaggtccag

SEQ ID NO: 1259752 - DNA, 25 bp, Homo sapien
tttctcttcctggattcagaagtct

SEQ ID NO: 1259753 - DNA, 25 bp, Homo sapien
tcagaagtctttcatggtaggtcca

SEQ ID NO: 1259754 - DNA, 25 bp, Homo sapien
tctattgttccaactaaagtatgtg

SEQ ID NO: 1259755 - DNA, 25 bp, Homo sapien
actaaagtatgtgtgctactgaggc

SEQ ID NO: 1259756 - DNA, 25 bp, Homo sapien
ccaactaaagtatgtgtgctactga

SEQ ID NO: 1259757 - DNA, 25 bp, Homo sapien
aaagtatgtgtgctactgaggcaag

SEQ ID NO: 1259758 - DNA, 25 bp, Homo sapien
aaaggtgatgtctggggctcaggtg

SEQ ID NO: 1259759 - DNA, 25 bp, Homo sapien
gaaaggtgatgtctggggctcaggt

SEQ ID NO: 1259760 - DNA, 25 bp, Homo sapien
tgaaaggtgatgtctggggctcagg

SEQ ID NO: 1259761 - DNA, 25 bp, Homo sapien
aatgaaaggtgatgtctggggctca

SEQ ID NO: 1259762 - DNA, 25 bp, Homo sapien
ggacagtacttgttctcaagggaat

SEQ ID NO: 1259763 - DNA, 25 bp, Homo sapien
tccttttgcttgtgtctgaataagg

SEQ ID NO: 1259764 - DNA, 25 bp, Homo sapien
tgtgtctgaataaggcaccaatttt

SEQ ID NO: 1259765 - DNA, 25 bp, Homo sapien
tgcttgtgtctgaataaggcaccaa

SEQ ID NO: 1259766 - DNA, 25 bp, Homo sapien
tgaataaggcaccaattttaagctg

SEQ ID NO: 1259767 - DNA, 25 bp, Homo sapien
gggcgataagagtgaaaactccatc

SEQ ID NO: 1259768 - DNA, 25 bp, Homo sapien
ggttgcagtgaccagcaaggttgcg

SEQ ID NO: 1259769 - DNA, 25 bp, Homo sapien
tgatatcaggagtcgaggcgggaag

SEQ ID NO: 1259770 - DNA, 25 bp, Homo sapien
cagtgaccagcaaggttgcgccatt

SEQ ID NO: 1259771 - DNA, 25 bp, Homo sapien
gactggaaaaaagggtatgggatca

SEQ ID NO: 1259772 - DNA, 25 bp, Homo sapien
ctggaaaaaagggtatgggatcatc

SEQ ID NO: 1259773 - DNA, 25 bp, Homo sapien
aacatgagactggaaaaaagggtat

SEQ ID NO: 1259774 - DNA, 25 bp, Homo sapien
ggaaaaaagggtatgggatcatcac

SEQ ID NO: 1259775 - DNA, 25 bp, Homo sapien
cggacctttggcttttacagctcga

SEQ ID NO: 1259776 - DNA, 25 bp, Homo sapien
ggacctttggcttttacagctcgag

SEQ ID NO: 1259777 - DNA, 25 bp, Homo sapien
gataatatgcatggttccatactct

SEQ ID NO: 1259778 - DNA, 25 bp, Homo sapien
tatcatggacatttgatgaatgctt

SEQ ID NO: 1259779 - DNA, 25 bp, Homo sapien
aaacttatgtcctgcatatcatgga

SEQ ID NO: 1259780 - DNA, 25 bp, Homo sapien
cagttgactggtgtagacttcaata

SEQ ID NO: 1259781 - DNA, 25 bp, Homo sapien
ctgacaaagttgatttatcaagttg

SEQ ID NO: 1259782 - DNA, 25 bp, Homo sapien
ttcacctgttgaattcataagttca

SEQ ID NO: 1259783 - DNA, 25 bp, Homo sapien
atcttcacctgttgaattcataagt

SEQ ID NO: 1259784 - DNA, 25 bp, Homo sapien
cacctgttgaattcataagttcatg

SEQ ID NO: 1259785 - DNA, 25 bp, Homo sapien
acgtagatcagcgatacgatgattc

SEQ ID NO: 1259786 - DNA, 25 bp, Homo sapien
gtagatcagcgatacgatgattcca

SEQ ID NO: 1259787 - DNA, 25 bp, Homo sapien
gtttacgtagatcagcgatacgatg

SEQ ID NO: 1259788 - DNA, 25 bp, Homo sapien
ttacgtagatcagcgatacgatgat

SEQ ID NO: 1259789 - DNA, 25 bp, Homo sapien
caagcaaaagttgcttctcaataac

SEQ ID NO: 1259790 - DNA, 25 bp, Homo sapien
aaagttgcttctcaataacacatcc

SEQ ID NO: 1259791 - DNA, 25 bp, Homo sapien
caaaagttgcttctcaataacacat

SEQ ID NO: 1259792 - DNA, 25 bp, Homo sapien
agcaaaagttgcttctcaataacac

SEQ ID NO: 1259793 - DNA, 25 bp, Homo sapien
ctctacggccaggaaacagattctc

SEQ ID NO: 1259794 - DNA, 25 bp, Homo sapien
cagtcattcgagacgggcagcacag

SEQ ID NO: 1259795 - DNA, 25 bp, Homo sapien
aggccacctctacggccaggaaaca

SEQ ID NO: 1259796 - DNA, 25 bp, Homo sapien
cacctctacggccaggaaacagatt

SEQ ID NO: 1259797 - DNA, 25 bp, Homo sapien
cagcgaaggtcctcacaccaagata

SEQ ID NO: 1259798 - DNA, 25 bp, Homo sapien
caaggtaaccagtaggcattcccag

SEQ ID NO: 1259799 - DNA, 25 bp, Homo sapien
taggcattcccagatacagcgaagg

SEQ ID NO: 1259800 - DNA, 25 bp, Homo sapien
agtaggcattcccagatacagcgaa

SEQ ID NO: 1259801 - DNA, 25 bp, Homo sapien
gcgtctcctccactggattgtgagg

SEQ ID NO: 1259802 - DNA, 25 bp, Homo sapien
agggacagaggcagatgagttgcgt

SEQ ID NO: 1259803 - DNA, 25 bp, Homo sapien
gagttgcgtctcctccactggattg

SEQ ID NO: 1259804 - DNA, 25 bp, Homo sapien
gacagaggcagatgagttgcgtctc

SEQ ID NO: 1259805 - DNA, 25 bp, Homo sapien
attttccgttccccagcattggcgg

SEQ ID NO: 1259806 - DNA, 25 bp, Homo sapien
ctcattttccgttccccagcattgg

SEQ ID NO: 1259807 - DNA, 25 bp, Homo sapien
ctccctcattttccgttccccagca

SEQ ID NO: 1259808 - DNA, 25 bp, Homo sapien
cagagttgaactccctcattttccg

SEQ ID NO: 1259809 - DNA, 25 bp, Homo sapien
ttagaaggtggggaataatcatcat

SEQ ID NO: 1259810 - DNA, 25 bp, Homo sapien
cttagaaggtggggaataatcatca

SEQ ID NO: 1259811 - DNA, 25 bp, Homo sapien
caccatggcgccccagtgatgtagc

SEQ ID NO: 1259812 - DNA, 25 bp, Homo sapien
accatggcgccccagtgatgtagcc

SEQ ID NO: 1259813 - DNA, 25 bp, Homo sapien
ccatggcgccccagtgatgtagccg

SEQ ID NO: 1259814 - DNA, 25 bp, Homo sapien
gcaccatggcgccccagtgatgtag

SEQ ID NO: 1259815 - DNA, 25 bp, Homo sapien
cacataagccacgaggaggagcttt

SEQ ID NO: 1259816 - DNA, 25 bp, Homo sapien
gccgccgcacataagccacgaggag

SEQ ID NO: 1259817 - DNA, 25 bp, Homo sapien
catgagcggacgctgcctactggtg

SEQ ID NO: 1259818 - DNA, 25 bp, Homo sapien
agagccaatcagaactcgcggtggg

SEQ ID NO: 1259819 - DNA, 25 bp, Homo sapien
ctgtcgcagaaggtgcaaccgatcg

SEQ ID NO: 1259820 - DNA, 25 bp, Homo sapien
cagaaggtgcaaccgatcgcactgt

SEQ ID NO: 1259821 - DNA, 25 bp, Homo sapien
aaccgatcgcactgtcgcgcagaag

SEQ ID NO: 1259822 - DNA, 25 bp, Homo sapien
cactgtcgcgcagaagctcctcaat

SEQ ID NO: 1259823 - DNA, 25 bp, Homo sapien
acttcggatggtccacccacttctg

SEQ ID NO: 1259824 - DNA, 25 bp, Homo sapien
ttgctcattttagatactagaactt

SEQ ID NO: 1259825 - DNA, 25 bp, Homo sapien
aacctctgacttcggatggtccacc

SEQ ID NO: 1259826 - DNA, 25 bp, Homo sapien
tttgctcattttagatactagaact

SEQ ID NO: 1259827 - DNA, 25 bp, Homo sapien
gaatgcagttgaattgaatggaccc

SEQ ID NO: 1259828 - DNA, 25 bp, Homo sapien
atgcaatggaatggacacctatgga

SEQ ID NO: 1259829 - DNA, 25 bp, Homo sapien
gaatggaatgaaaggtgctcgaata

SEQ ID NO: 1259830 - DNA, 25 bp, Homo sapien
gaatggacacctatggaatgcagtt

SEQ ID NO: 1259831 - DNA, 25 bp, Homo sapien
gaatttgtattctgggaagccacag

SEQ ID NO: 1259832 - DNA, 25 bp, Homo sapien
tcctgtgggaatgatgaccgaggcc

SEQ ID NO: 1259833 - DNA, 25 bp, Homo sapien
cacgaagtagaggtctcctgtggga

SEQ ID NO: 1259834 - DNA, 25 bp, Homo sapien
tgggcttcttacgtacaacttggag

SEQ ID NO: 1259835 - DNA, 25 bp, Homo sapien
gagcccgaggtctaaactatttcca

SEQ ID NO: 1259836 - DNA, 25 bp, Homo sapien
gagagagttctaccaccacggttcc

SEQ ID NO: 1259837 - DNA, 25 bp, Homo sapien
aagaagagttacacatgcctgtttc

SEQ ID NO: 1259838 - DNA, 25 bp, Homo sapien
acggttcccaaagcatcgtctaggg

SEQ ID NO: 1259839 - DNA, 25 bp, Homo sapien
tactacttgccaggtgcttgggata

SEQ ID NO: 1259840 - DNA, 25 bp, Homo sapien
tgggatatagcagggcctactgaat

SEQ ID NO: 1259841 - DNA, 25 bp, Homo sapien
cagttccatctaatttgccaggtca

SEQ ID NO: 1259842 - DNA, 25 bp, Homo sapien
caatagttggtttgtatgctcagtc

SEQ ID NO: 1259843 - DNA, 25 bp, Homo sapien
gttcttattcataagtgggagccga

SEQ ID NO: 1259844 - DNA, 25 bp, Homo sapien
aacaccacatgttcttattcataag

SEQ ID NO: 1259845 - DNA, 25 bp, Homo sapien
gtggggggctaggggacggatagca

SEQ ID NO: 1259846 - DNA, 25 bp, Homo sapien
acaatgagaacacatgggcacaggg

SEQ ID NO: 1259847 - DNA, 25 bp, Homo sapien
tttccacatttaagagatccctggg

SEQ ID NO: 1259848 - DNA, 25 bp, Homo sapien
tactgcgaagcaggagtccatctcc

SEQ ID NO: 1259849 - DNA, 25 bp, Homo sapien
tgggatactgcgaagcaggagtcca

SEQ ID NO: 1259850 - DNA, 25 bp, Homo sapien
catctccagacatgaggagcaggtg

SEQ ID NO: 1259851 - DNA, 25 bp, Homo sapien
tcttgaattgcacttgagaagtcta

SEQ ID NO: 1259852 - DNA, 25 bp, Homo sapien
ctcccaaggtgcaatagccatgcct

SEQ ID NO: 1259853 - DNA, 25 bp, Homo sapien
ttctcccaaggtgcaatagccatgc

SEQ ID NO: 1259854 - DNA, 25 bp, Homo sapien
tatcttgaattgcacttgagaagtc

SEQ ID NO: 1259855 - DNA, 25 bp, Homo sapien
tttatggacatagatccatttttca

SEQ ID NO: 1259856 - DNA, 25 bp, Homo sapien
tatggacatagatccatttttcatg

SEQ ID NO: 1259857 - DNA, 25 bp, Homo sapien
ttctttatggacatagatccatttt

SEQ ID NO: 1259858 - DNA, 25 bp, Homo sapien
ggacatagatccatttttcatgata

SEQ ID NO: 1259859 - DNA, 25 bp, Homo sapien
ttgtttttaaaatctggcaaatcat

SEQ ID NO: 1259860 - DNA, 25 bp, Homo sapien
tttgtttttaaaatctggcaaatca

SEQ ID NO: 1259861 - DNA, 25 bp, Homo sapien
catattcatgctcttcattattgac

SEQ ID NO: 1259862 - DNA, 25 bp, Homo sapien
gctcttcattattgactatttctcc

SEQ ID NO: 1259863 - DNA, 25 bp, Homo sapien
tcctttttttggatgcatattcatg

SEQ ID NO: 1259864 - DNA, 25 bp, Homo sapien
ttctccatcttcactatttaagata

SEQ ID NO: 1259865 - DNA, 25 bp, Homo sapien
cagactgtgggcttgaaatcacagg

SEQ ID NO: 1259866 - DNA, 25 bp, Homo sapien
catgttttagaatctctgaagggtc

SEQ ID NO: 1259867 - DNA, 25 bp, Homo sapien
tatgcttatccaaggtagtttcaaa

SEQ ID NO: 1259868 - DNA, 25 bp, Homo sapien
gagaaataagatgtatcctggttct

SEQ ID NO: 1259869 - DNA, 25 bp, Homo sapien
ggtgaacctaaagacatcccatgga

SEQ ID NO: 1259870 - DNA, 25 bp, Homo sapien
catatgtacagggagaacgacactc

SEQ ID NO: 1259871 - DNA, 25 bp, Homo sapien
gagaacttcagcgttagggccttgg

SEQ ID NO: 1259872 - DNA, 25 bp, Homo sapien
cttgggcactgctgggacacttcct

SEQ ID NO: 1259873 - DNA, 25 bp, Homo sapien
cgctcattatgaggctactggcaaa

SEQ ID NO: 1259874 - DNA, 25 bp, Homo sapien
tataaccttcaagacaaacatcacc

SEQ ID NO: 1259875 - DNA, 25 bp, Homo sapien
acaagggaacctgtccaacaacttg

SEQ ID NO: 1259876 - DNA, 25 bp, Homo sapien
gatgctccacatcacgaattgttag

SEQ ID NO: 1259877 - DNA, 25 bp, Homo sapien
ccttattacatgaaggagcagcaga

SEQ ID NO: 1259878 - DNA, 25 bp, Homo sapien
caagagcaccaaggccaggtggagc

SEQ ID NO: 1259879 - DNA, 25 bp, Homo sapien
cagcagagcagagggcggcaagagc

SEQ ID NO: 1259880 - DNA, 25 bp, Homo sapien
ggtggagccacagccaatgtgggcc

SEQ ID NO: 1259881 - DNA, 25 bp, Homo sapien
ccaaaacagcttctgtactggtaca

SEQ ID NO: 1259882 - DNA, 25 bp, Homo sapien
agactgaagccagacccctaccttt

SEQ ID NO: 1259883 - DNA, 25 bp, Homo sapien
tcttagagctaaacaagttaattat

SEQ ID NO: 1259884 - DNA, 25 bp, Homo sapien
tatacagccccagtaaccaaaacag

SEQ ID NO: 1259885 - DNA, 25 bp, Homo sapien
catgagcacacgcagcaattgtggc

SEQ ID NO: 1259886 - DNA, 25 bp, Homo sapien
tgattgtaaagcacggaatgactct

SEQ ID NO: 1259887 - DNA, 25 bp, Homo sapien
gactcaggctgatgctgcgtcagga

SEQ ID NO: 1259888 - DNA, 25 bp, Homo sapien
gaaactgggcgtcattctttgtggt

SEQ ID NO: 1259889 - DNA, 25 bp, Homo sapien
aggagcactgaaggaacacttttcc

SEQ ID NO: 1259890 - DNA, 25 bp, Homo sapien
aaggttgatgtagctccccgtcttt

SEQ ID NO: 1259891 - DNA, 25 bp, Homo sapien
gaggagcactgaaggaacacttttc

SEQ ID NO: 1259892 - DNA, 25 bp, Homo sapien
tgatgtagctccccgtctttttttc

SEQ ID NO: 1259893 - DNA, 25 bp, Homo sapien
acggatccctcggccagctctcatc

SEQ ID NO: 1259894 - DNA, 25 bp, Homo sapien
gcacacggatccctcggccagctct

SEQ ID NO: 1259895 - DNA, 25 bp, Homo sapien
acacggatccctcggccagctctca

SEQ ID NO: 1259896 - DNA, 25 bp, Homo sapien
cggatccctcggccagctctcatct

SEQ ID NO: 1259897 - DNA, 25 bp, Homo sapien
gatgcatcctgtcttcactacctgc

SEQ ID NO: 1259898 - DNA, 25 bp, Homo sapien
catcctgtcttcactacctgcttgt

SEQ ID NO: 1259899 - DNA, 25 bp, Homo sapien
ctgcctggccagtagatgcatcctg

SEQ ID NO: 1259900 - DNA, 25 bp, Homo sapien
ggccagtagatgcatcctgtcttca

SEQ ID NO: 1259901 - DNA, 25 bp, Homo sapien
aggaaaagtcaaacttcaagaagag

SEQ ID NO: 1259902 - DNA, 25 bp, Homo sapien
ctcttcttgaagtttgacttttcct

SEQ ID NO: 1259903 - DNA, 25 bp, Homo sapien
tctatacagtttgtgggctgcatct

SEQ ID NO: 1259904 - DNA, 25 bp, Homo sapien
gaataaaacacactccatcgtgtgg

SEQ ID NO: 1259905 - DNA, 25 bp, Homo sapien
cagaggagtcagtgtgctagtaagc

SEQ ID NO: 1259906 - DNA, 25 bp, Homo sapien
catcgtgtggatgaaatgctacctt

SEQ ID NO: 1259907 - DNA, 25 bp, Homo sapien
tgaacctccaggaattcaggacaat

SEQ ID NO: 1259908 - DNA, 25 bp, Homo sapien
gatccttcttgagaagcccctgctg

SEQ ID NO: 1259909 - DNA, 25 bp, Homo sapien
caccgttcttccctagtgaagtcca

SEQ ID NO: 1259910 - DNA, 25 bp, Homo sapien
tctacatggagaccaacaggtgagt

SEQ ID NO: 1259911 - DNA, 25 bp, Homo sapien
cattgtattctgtcctccatatctc

SEQ ID NO: 1259912 - DNA, 25 bp, Homo sapien
tgccctctctgctactgacggtcaa

SEQ ID NO: 1259913 - DNA, 25 bp, Homo sapien
tctttgagcaatttattcgttatga

SEQ ID NO: 1259914 - DNA, 25 bp, Homo sapien
atttgggaattaggcttctgctgcc

SEQ ID NO: 1259915 - DNA, 25 bp, Homo sapien
ttttctcgctcgttggctctacctc

SEQ ID NO: 1259916 - DNA, 25 bp, Homo sapien
tactgcttgctcaggtcactctcct

SEQ ID NO: 1259917 - DNA, 25 bp, Homo sapien
cactgtcggtgtttgttcaaattcc

SEQ ID NO: 1259918 - DNA, 25 bp, Homo sapien
tcagacccatccacttcccatctaa

SEQ ID NO: 1259919 - DNA, 25 bp, Homo sapien
ttctcagtgggacaccgggaaggta

SEQ ID NO: 1259920 - DNA, 25 bp, Homo sapien
caacagtcaccgctagtgggaggcg

SEQ ID NO: 1259921 - DNA, 25 bp, Homo sapien
ttgttacaggatcgggcaggtcccc

SEQ ID NO: 1259922 - DNA, 25 bp, Homo sapien
gacatccacagcgaggcaatgaaga

SEQ ID NO: 1259923 - DNA, 25 bp, Homo sapien
tggcgtctgccgaatcccagggctg

SEQ ID NO: 1259924 - DNA, 25 bp, Homo sapien
tcagggaggactggcgtctgccgaa

SEQ ID NO: 1259925 - DNA, 25 bp, Homo sapien
ggaaggacggggaagcatctcaggg

SEQ ID NO: 1259926 - DNA, 25 bp, Homo sapien
aggactggcgtctgccgaatcccag

SEQ ID NO: 1259927 - DNA, 25 bp, Homo sapien
tggggacgatggaagacaagccaca

SEQ ID NO: 1259928 - DNA, 25 bp, Homo sapien
caagaggggcgagggtggggacgat

SEQ ID NO: 1259929 - DNA, 25 bp, Homo sapien
ggcgagggtggggacgatggaagac

SEQ ID NO: 1259930 - DNA, 25 bp, Homo sapien
ctgaggggccaagaggggcgagggt

SEQ ID NO: 1259931 - DNA, 25 bp, Homo sapien
gtttggccacaaaaagcggagggca

SEQ ID NO: 1259932 - DNA, 25 bp, Homo sapien
ggagggcactcacccgagcggacct

SEQ ID NO: 1259933 - DNA, 25 bp, Homo sapien
tggccacaaaaagcggagggcactc

SEQ ID NO: 1259934 - DNA, 25 bp, Homo sapien
gggcactcacccgagcggaccttgg

SEQ ID NO: 1259935 - DNA, 25 bp, Homo sapien
ccagtgtctccgccggttgaaagcg

SEQ ID NO: 1259936 - DNA, 25 bp, Homo sapien
cgtcgggttctgttggagtgcgttc

SEQ ID NO: 1259937 - DNA, 25 bp, Homo sapien
tccgccggttgaaagcgcgtgtctg

SEQ ID NO: 1259938 - DNA, 25 bp, Homo sapien
aaagcgcgtgtctgcgtcgggttct

SEQ ID NO: 1259939 - DNA, 25 bp, Homo sapien
cccgcactccgcctctgggtagcag

SEQ ID NO: 1259940 - DNA, 25 bp, Homo sapien
gcgagcccgcactccgcctctgggt

SEQ ID NO: 1259941 - DNA, 25 bp, Homo sapien
ctcgcgagcccgcactccgcctctg

SEQ ID NO: 1259942 - DNA, 25 bp, Homo sapien
cgagcccgcactccgcctctgggta

SEQ ID NO: 1259943 - DNA, 25 bp, Homo sapien
ctcgggctccgcgttcgcgtcgagg

SEQ ID NO: 1259944 - DNA, 25 bp, Homo sapien
ctccgcgttcgcgtcgaggcagagg

SEQ ID NO: 1259945 - DNA, 25 bp, Homo sapien
gcgtcgaggcagaggcgtagtaggg

SEQ ID NO: 1259946 - DNA, 25 bp, Homo sapien
gcgttcgcgtcgaggcagaggcgta

SEQ ID NO: 1259947 - DNA, 25 bp, Homo sapien
gccctcatgtacgtccaggatgcgg

SEQ ID NO: 1259948 - DNA, 25 bp, Homo sapien
gaggtctggacttcgctgtgaaaga

SEQ ID NO: 1259949 - DNA, 25 bp, Homo sapien
aagacacaggccctcatgtacgtcc

SEQ ID NO: 1259950 - DNA, 25 bp, Homo sapien
tctggacttcgctgtgaaagacaca

SEQ ID NO: 1259951 - DNA, 25 bp, Homo sapien
tagtcagtccttgtgatgaaggtgc

SEQ ID NO: 1259952 - DNA, 25 bp, Homo sapien
agtcagtccttgtgatgaaggtgca

SEQ ID NO: 1259953 - DNA, 25 bp, Homo sapien
ttagtcagtccttgtgatgaaggtg

SEQ ID NO: 1259954 - DNA, 25 bp, Homo sapien
ggcaagtttggaactgctgttgttc

SEQ ID NO: 1259955 - DNA, 25 bp, Homo sapien
gcatagtctcaagcgagtggaatga

SEQ ID NO: 1259956 - DNA, 25 bp, Homo sapien
gacggtttcctatagaagcacagtt

SEQ ID NO: 1259957 - DNA, 25 bp, Homo sapien
ctgtgggcaagtttggaactgctgt

SEQ ID NO: 1259958 - DNA, 25 bp, Homo sapien
cacgcggcttacttcacagccagga

SEQ ID NO: 1259959 - DNA, 25 bp, Homo sapien
gggccaaggtgtctccaaggtgctg

SEQ ID NO: 1259960 - DNA, 25 bp, Homo sapien
acagcaggaccacgagcagggccaa

SEQ ID NO: 1259961 - DNA, 25 bp, Homo sapien
caggatccgggatcaggctatgtcc

SEQ ID NO: 1259962 - DNA, 25 bp, Homo sapien
ccacgaatctcacatggaagccttg

SEQ ID NO: 1259963 - DNA, 25 bp, Homo sapien
tttagagctggtggcgtaaggtcac

SEQ ID NO: 1259964 - DNA, 25 bp, Homo sapien
tgctgatttagagctggtggcgtaa

SEQ ID NO: 1259965 - DNA, 25 bp, Homo sapien
acagagctcccacgaatctcacatg

SEQ ID NO: 1259966 - DNA, 25 bp, Homo sapien
cctgagtaccctggattaatctcct

SEQ ID NO: 1259967 - DNA, 25 bp, Homo sapien
taccctggattaatctccttttgga

SEQ ID NO: 1259968 - DNA, 25 bp, Homo sapien
tgagtaccctggattaatctccttt

SEQ ID NO: 1259969 - DNA, 25 bp, Homo sapien
ggattaatctccttttggataggtc

SEQ ID NO: 1259970 - DNA, 25 bp, Homo sapien
aactcagtcaaggacaggcccaggt

SEQ ID NO: 1259971 - DNA, 25 bp, Homo sapien
caagtcgtgacttaagttagcgccc

SEQ ID NO: 1259972 - DNA, 25 bp, Homo sapien
tcacaaggtactagtggaaccccag

SEQ ID NO: 1259973 - DNA, 25 bp, Homo sapien
tcagagcccgcttagaacacaagtg

SEQ ID NO: 1259974 - DNA, 25 bp, Homo sapien
ggcagggcccggcacaaggtaggaa

SEQ ID NO: 1259975 - DNA, 25 bp, Homo sapien
cacaaggtaggaactgagtgtgagt

SEQ ID NO: 1259976 - DNA, 25 bp, Homo sapien
gtgtgagtgcgggatgcacccaggt

SEQ ID NO: 1259977 - DNA, 25 bp, Homo sapien
gcacccaggtctgaaatgctcagga

SEQ ID NO: 1259978 - DNA, 25 bp, Homo sapien
cagacgatgcttgcaacaacgccat

SEQ ID NO: 1259979 - DNA, 25 bp, Homo sapien
ggttctcagacgatgcttgcaacaa

SEQ ID NO: 1259980 - DNA, 25 bp, Homo sapien
cttggttctcagacgatgcttgcaa

SEQ ID NO: 1259981 - DNA, 25 bp, Homo sapien
tctcagacgatgcttgcaacaacgc

SEQ ID NO: 1259982 - DNA, 25 bp, Homo sapien
tagtgccttatcaacgccctgtggc

SEQ ID NO: 1259983 - DNA, 25 bp, Homo sapien
tgactggtcagggtcaggtccactg

SEQ ID NO: 1259984 - DNA, 25 bp, Homo sapien
tatcctcgtccggtgtggcactgag

SEQ ID NO: 1259985 - DNA, 25 bp, Homo sapien
taactgttgccctcgttggttccca

SEQ ID NO: 1259986 - DNA, 25 bp, Homo sapien
gcactcctgtttaatcagagggatg

SEQ ID NO: 1259987 - DNA, 25 bp, Homo sapien
tctcccacgtggtccagtcaccatt

SEQ ID NO: 1259988 - DNA, 25 bp, Homo sapien
acagagactaccctaaaacccagcg

SEQ ID NO: 1259989 - DNA, 25 bp, Homo sapien
aaacccagcgactctcgtgtgcctg

SEQ ID NO: 1259990 - DNA, 25 bp, Homo sapien
gaaaccaaagtttagcctgaggcta

SEQ ID NO: 1259991 - DNA, 25 bp, Homo sapien
ttagcctgaggctacaattaattgg

SEQ ID NO: 1259992 - DNA, 25 bp, Homo sapien
cctgaggctacaattaattgggcaa

SEQ ID NO: 1259993 - DNA, 25 bp, Homo sapien
ggctacaattaattgggcaataagc

SEQ ID NO: 1259994 - DNA, 25 bp, Homo sapien
aggatttcacagatttaaggtgcaa

SEQ ID NO: 1259995 - DNA, 25 bp, Homo sapien
aaaagtcactgggttctctaagaag

SEQ ID NO: 1259996 - DNA, 25 bp, Homo sapien
caaaaagtcactgggttctctaaga

SEQ ID NO: 1259997 - DNA, 25 bp, Homo sapien
cagatttaaggtgcaaaaagtcact

SEQ ID NO: 1259998 - DNA, 25 bp, Homo sapien
ggaggaggctgttattgaagtgaag

SEQ ID NO: 1259999 - DNA, 25 bp, Homo sapien
aggaggctgttattgaagtgaagca

SEQ ID NO: 1260000 - DNA, 25 bp, Homo sapien
gaattgtttttactaatctgcttat

SEQ ID NO: 1260001 - DNA, 25 bp, Homo sapien
tgaagcagaattgtttttactaatc

SEQ ID NO: 1260002 - DNA, 25 bp, Homo sapien
tattcatgcacaaggtcctcttgct

SEQ ID NO: 1260003 - DNA, 25 bp, Homo sapien
ctgtagtatggaaacaaattattca

SEQ ID NO: 1260004 - DNA, 25 bp, Homo sapien
attattcatgcacaaggtcctcttg

SEQ ID NO: 1260005 - DNA, 25 bp, Homo sapien
catgcacaaggtcctcttgctgttc

SEQ ID NO: 1260006 - DNA, 25 bp, Homo sapien
ctttcgccatcaagagcttcaacac

SEQ ID NO: 1260007 - DNA, 25 bp, Homo sapien
catcaagagcttcaacacctggaca

SEQ ID NO: 1260008 - DNA, 25 bp, Homo sapien
acctggacacattccgcaaagtttc

SEQ ID NO: 1260009 - DNA, 25 bp, Homo sapien
tcgccatcaagagcttcaacacctg

SEQ ID NO: 1260010 - DNA, 25 bp, Homo sapien
caaccccagctttttcactagtaag

SEQ ID NO: 1260011 - DNA, 25 bp, Homo sapien
gggccgcggctccacggcccgcaac

SEQ ID NO: 1260012 - DNA, 25 bp, Homo sapien
gccgcggctccacggcccgcaacag

SEQ ID NO: 1260013 - DNA, 25 bp, Homo sapien
aaggcactcgcgctgctgggccacg

SEQ ID NO: 1260014 - DNA, 25 bp, Homo sapien
gcattcggcgcgctccgcggggcag

SEQ ID NO: 1260015 - DNA, 25 bp, Homo sapien
ccggcattcggcgcgctccgcgggg

SEQ ID NO: 1260016 - DNA, 25 bp, Homo sapien
cggcattcggcgcgctccgcggggc

SEQ ID NO: 1260017 - DNA, 25 bp, Homo sapien
ggcattcggcgcgctccgcggggca

SEQ ID NO: 1260018 - DNA, 25 bp, Homo sapien
cacctgcagtgaggtctgttagccc

SEQ ID NO: 1260019 - DNA, 25 bp, Homo sapien
ttagcccgtctcaggtttgactcct

SEQ ID NO: 1260020 - DNA, 25 bp, Homo sapien
tagcccgtctcaggtttgactcctg

SEQ ID NO: 1260021 - DNA, 25 bp, Homo sapien
ccacctgcagtgaggtctgttagcc

SEQ ID NO: 1260022 - DNA, 25 bp, Homo sapien
cattagtaagatccgggaggagtac

SEQ ID NO: 1260023 - DNA, 25 bp, Homo sapien
taaacacattcagcgtcctgccctc

SEQ ID NO: 1260024 - DNA, 25 bp, Homo sapien
cctgccctcgcccaaggtgtcggac

SEQ ID NO: 1260025 - DNA, 25 bp, Homo sapien
tcataaacacattcagcgtcctgcc

SEQ ID NO: 1260026 - DNA, 25 bp, Homo sapien
caatatcaggatgccacggctgagg

SEQ ID NO: 1260027 - DNA, 25 bp, Homo sapien
ttgggaataatacggccatccagga

SEQ ID NO: 1260028 - DNA, 25 bp, Homo sapien
gggaagcagcgtggattcttaactg

SEQ ID NO: 1260029 - DNA, 25 bp, Homo sapien
caggaactcttcaagcgtgtctcag

SEQ ID NO: 1260030 - DNA, 25 bp, Homo sapien
tgaaccctatgtagaagggattagg

SEQ ID NO: 1260031 - DNA, 25 bp, Homo sapien
ccatagatggcggttgctgggcctg

SEQ ID NO: 1260032 - DNA, 25 bp, Homo sapien
gcactgaaccctatgtagaagggat

SEQ ID NO: 1260033 - DNA, 25 bp, Homo sapien
ctatgtagaagggattaggtcctgg

SEQ ID NO: 1260034 - DNA, 25 bp, Homo sapien
gacaggagtggtgcttttccaggcc

SEQ ID NO: 1260035 - DNA, 25 bp, Homo sapien
ttccaagtttctggagcccctcttc

SEQ ID NO: 1260036 - DNA, 25 bp, Homo sapien
tccagcctggcaagcatggcgtgtt

SEQ ID NO: 1260037 - DNA, 25 bp, Homo sapien
cagctacaggcccaggtttccaagt

SEQ ID NO: 1260038 - DNA, 25 bp, Homo sapien
cctgctcaacgaggatgacagcggg

SEQ ID NO: 1260039 - DNA, 25 bp, Homo sapien
taacagcagcagttggcctcattcc

SEQ ID NO: 1260040 - DNA, 25 bp, Homo sapien
tcccagttgatgctacccttgagtc

SEQ ID NO: 1260041 - DNA, 25 bp, Homo sapien
aaggcggcaggcatcagcgttttct

SEQ ID NO: 1260042 - DNA, 25 bp, Homo sapien
aggagccacagcgtacggtgcagca

SEQ ID NO: 1260043 - DNA, 25 bp, Homo sapien
aggaggagccacagcgtacggtgca

SEQ ID NO: 1260044 - DNA, 25 bp, Homo sapien
cacagcgtacggtgcagcacttcca

SEQ ID NO: 1260045 - DNA, 25 bp, Homo sapien
agccacagcgtacggtgcagcactt

SEQ ID NO: 1260046 - DNA, 25 bp, Homo sapien
cagggctggactgcgacaccgacgt

SEQ ID NO: 1260047 - DNA, 25 bp, Homo sapien
ccaagcgcgcttgtccgcagggctg

SEQ ID NO: 1260048 - DNA, 25 bp, Homo sapien
tcccgaagacgatccagctggtttg

SEQ ID NO: 1260049 - DNA, 25 bp, Homo sapien
tgcagacggaggctccgtacaagtt

SEQ ID NO: 1260050 - DNA, 25 bp, Homo sapien
acagtccgagggcaagatgagcacc

SEQ ID NO: 1260051 - DNA, 25 bp, Homo sapien
agctggaagtttctgtggttacctt

SEQ ID NO: 1260052 - DNA, 25 bp, Homo sapien
catgagtggaagcacggcaaggccc

SEQ ID NO: 1260053 - DNA, 25 bp, Homo sapien
aaggtacaattcacaaggttggagg

SEQ ID NO: 1260054 - DNA, 25 bp, Homo sapien
tgtcaaaatcccgacctcaagtggt

SEQ ID NO: 1260055 - DNA, 25 bp, Homo sapien
cagccctccagagtgctgagatgac

SEQ ID NO: 1260056 - DNA, 25 bp, Homo sapien
gaggctttggggatcctcttgtcca

SEQ ID NO: 1260057 - DNA, 25 bp, Homo sapien
ccgcgcccggtgagactgtggttct

SEQ ID NO: 1260058 - DNA, 25 bp, Homo sapien
gccccggtggagtcctcagagatgc

SEQ ID NO: 1260059 - DNA, 25 bp, Homo sapien
agaatgaggggtggacaagctaaat

SEQ ID NO: 1260060 - DNA, 25 bp, Homo sapien
caagctaaatggagcctggtcttgg

SEQ ID NO: 1260061 - DNA, 25 bp, Homo sapien
agatgccaggctcctttcgcgtcct

SEQ ID NO: 1260062 - DNA, 25 bp, Homo sapien
gcaggcagcgcaggttcccggtctt

SEQ ID NO: 1260063 - DNA, 25 bp, Homo sapien
gcaggttcccggtcttgagcgcgca

SEQ ID NO: 1260064 - DNA, 25 bp, Homo sapien
cgcaggttcccggtcttgagcgcgc

SEQ ID NO: 1260065 - DNA, 25 bp, Homo sapien
gcagcgcaggttcccggtcttgagc

SEQ ID NO: 1260066 - DNA, 25 bp, Homo sapien
tgcaccggccagagtgccacacaga

SEQ ID NO: 1260067 - DNA, 25 bp, Homo sapien
ggctcggcaggcttgctcaaaccca

SEQ ID NO: 1260068 - DNA, 25 bp, Homo sapien
caccggccagagtgccacacagaag

SEQ ID NO: 1260069 - DNA, 25 bp, Homo sapien
agtgccatgcgcctccagtccctgc

SEQ ID NO: 1260070 - DNA, 25 bp, Homo sapien
ggtgtcttgaagatgttgtcatagc

SEQ ID NO: 1260071 - DNA, 25 bp, Homo sapien
acggccgtgggctgcctgcagaagg

SEQ ID NO: 1260072 - DNA, 25 bp, Homo sapien
gcaaatgcgccggcatccgggcctg

SEQ ID NO: 1260073 - DNA, 25 bp, Homo sapien
ggcagaagacgtgggtgcaggagag

SEQ ID NO: 1260074 - DNA, 25 bp, Homo sapien
agatggagcactccaggggggaggc

SEQ ID NO: 1260075 - DNA, 25 bp, Homo sapien
gggaggccaccctctccgagccagg

SEQ ID NO: 1260076 - DNA, 25 bp, Homo sapien
caggggggaggccaccctctccgag

SEQ ID NO: 1260077 - DNA, 25 bp, Homo sapien
tggagcactccaggggggaggccac

SEQ ID NO: 1260078 - DNA, 25 bp, Homo sapien
ggtggcacagccgtgtgccacacct

SEQ ID NO: 1260079 - DNA, 25 bp, Homo sapien
agccgtgtgccacacctgctggcct

SEQ ID NO: 1260080 - DNA, 25 bp, Homo sapien
cgaggctatggagctgctccggcga

SEQ ID NO: 1260081 - DNA, 25 bp, Homo sapien
gctgctccggcgagggggtggcaca

SEQ ID NO: 1260082 - DNA, 25 bp, Homo sapien
tcgccggccacggttgggctccaag

SEQ ID NO: 1260083 - DNA, 25 bp, Homo sapien
gccggccacggttgggctccaaggc

SEQ ID NO: 1260084 - DNA, 25 bp, Homo sapien
cctcgccggccacggttgggctcca

SEQ ID NO: 1260085 - DNA, 25 bp, Homo sapien
ctcctcgccggccacggttgggctc

SEQ ID NO: 1260086 - DNA, 25 bp, Homo sapien
ggacacaaggaatgcgtgcgccgtc

SEQ ID NO: 1260087 - DNA, 25 bp, Homo sapien
cgtgcgccgtcacccgcacagagct

SEQ ID NO: 1260088 - DNA, 25 bp, Homo sapien
tctgtccaagacaggcggggacaca

SEQ ID NO: 1260089 - DNA, 25 bp, Homo sapien
tgtgcttcacccagcaggtatccct

SEQ ID NO: 1260090 - DNA, 25 bp, Homo sapien
gtggccgcaagcctcagggattggc

SEQ ID NO: 1260091 - DNA, 25 bp, Homo sapien
agggtgtggccgcaagcctcaggga

SEQ ID NO: 1260092 - DNA, 25 bp, Homo sapien
gccaagggtgtggccgcaagcctca

SEQ ID NO: 1260093 - DNA, 25 bp, Homo sapien
ggtgtggccgcaagcctcagggatt

SEQ ID NO: 1260094 - DNA, 25 bp, Homo sapien
cacagtggacttcgcaaaggagcgt

SEQ ID NO: 1260095 - DNA, 25 bp, Homo sapien
tgatggcacccacagtggacttcgc

SEQ ID NO: 1260096 - DNA, 25 bp, Homo sapien
cgactttatatcagcacacccagtg

SEQ ID NO: 1260097 - DNA, 25 bp, Homo sapien
aggtcccggagaccatgatggcacc

SEQ ID NO: 1260098 - DNA, 25 bp, Homo sapien
cgtctgagacccacggtggagcccg

SEQ ID NO: 1260099 - DNA, 25 bp, Homo sapien
gccggtgccgcagggcgtctgagac

SEQ ID NO: 1260100 - DNA, 25 bp, Homo sapien
tgctaaagcagacggtgccggtgcc

SEQ ID NO: 1260101 - DNA, 25 bp, Homo sapien
acgtgggcagggatcagccaggcat

SEQ ID NO: 1260102 - DNA, 25 bp, Homo sapien
gaggacttttctgcacaatgaattt

SEQ ID NO: 1260103 - DNA, 25 bp, Homo sapien
gatccgagcggggccacagagctct

SEQ ID NO: 1260104 - DNA, 25 bp, Homo sapien
tctggaggacttttctgcacaatga

SEQ ID NO: 1260105 - DNA, 25 bp, Homo sapien
agctctggaggacttttctgcacaa

SEQ ID NO: 1260106 - DNA, 25 bp, Homo sapien
tatcctgcagctccggaaatgggtg

SEQ ID NO: 1260107 - DNA, 25 bp, Homo sapien
gccccatagatcgtgccagctttgg

SEQ ID NO: 1260108 - DNA, 25 bp, Homo sapien
agagcccctggcttttctaggcaga

SEQ ID NO: 1260109 - DNA, 25 bp, Homo sapien
gatcaagaggaagctctatcctgca

SEQ ID NO: 1260110 - DNA, 25 bp, Homo sapien
accctttggcgtccgtcgctgggag

SEQ ID NO: 1260111 - DNA, 25 bp, Homo sapien
gcctgctcctggtccgataaacgag

SEQ ID NO: 1260112 - DNA, 25 bp, Homo sapien
cccaaggcctcgatctgaagctctg

SEQ ID NO: 1260113 - DNA, 25 bp, Homo sapien
gcgccgggcgatgccaacactttgt

SEQ ID NO: 1260114 - DNA, 25 bp, Homo sapien
tcagacattgctgatacgggcctcc

SEQ ID NO: 1260115 - DNA, 25 bp, Homo sapien
gctcccgcctgacgtagcgcggctt

SEQ ID NO: 1260116 - DNA, 25 bp, Homo sapien
cgcctgacgtagcgcggcttccgta

SEQ ID NO: 1260117 - DNA, 25 bp, Homo sapien
cagcgggatccgtggccctgtccag

SEQ ID NO: 1260118 - DNA, 25 bp, Homo sapien
ggtctgtcccctaaaggcacggtca

SEQ ID NO: 1260119 - DNA, 25 bp, Homo sapien
cgtagtcccaagacctcgaatgtga

SEQ ID NO: 1260120 - DNA, 25 bp, Homo sapien
tgtgggtcccagagtatcatgcacc

SEQ ID NO: 1260121 - DNA, 25 bp, Homo sapien
tgtggccccgcacataaaatgggtc

SEQ ID NO: 1260122 - DNA, 25 bp, Homo sapien
tgactcttgggtccgcctgacccag

SEQ ID NO: 1260123 - DNA, 25 bp, Homo sapien
cactgaagcgatggctgctcaggag

SEQ ID NO: 1260124 - DNA, 25 bp, Homo sapien
ccggctgcgtctgtcctcgggtgga

SEQ ID NO: 1260125 - DNA, 25 bp, Homo sapien
cagcaccactgaagcgatggctgct

SEQ ID NO: 1260126 - DNA, 25 bp, Homo sapien
ctgccctgtcgtggtgggtcctcct

SEQ ID NO: 1260127 - DNA, 25 bp, Homo sapien
tgccctgtcgtggtgggtcctcctt

SEQ ID NO: 1260128 - DNA, 25 bp, Homo sapien
tccagagccaggcaaacccgtttgg

SEQ ID NO: 1260129 - DNA, 25 bp, Homo sapien
gcaccagccaaatccggccctggcc

SEQ ID NO: 1260130 - DNA, 25 bp, Homo sapien
accccacagggggatgcgacagctg

SEQ ID NO: 1260131 - DNA, 25 bp, Homo sapien
aaagagcatggaagtcacggggatt

SEQ ID NO: 1260132 - DNA, 25 bp, Homo sapien
aggactgtggcggggggatcattgc

SEQ ID NO: 1260133 - DNA, 25 bp, Homo sapien
actgtggcggggggatcattgcagc

SEQ ID NO: 1260134 - DNA, 25 bp, Homo sapien
gactgtggcggggggatcattgcag

SEQ ID NO: 1260135 - DNA, 25 bp, Homo sapien
ggactgtggcggggggatcattgca

SEQ ID NO: 1260136 - DNA, 25 bp, Homo sapien
ggcagagtgaggactcgggatggcc

SEQ ID NO: 1260137 - DNA, 25 bp, Homo sapien
aggcagagtgaggactcgggatggc

SEQ ID NO: 1260138 - DNA, 25 bp, Homo sapien
gcagagtgaggactcgggatggcct

SEQ ID NO: 1260139 - DNA, 25 bp, Homo sapien
cagagtgaggactcgggatggcctg

SEQ ID NO: 1260140 - DNA, 25 bp, Homo sapien
cagcccggatgatgtgggttactta

SEQ ID NO: 1260141 - DNA, 25 bp, Homo sapien
agcccggatgatgtgggttacttac

SEQ ID NO: 1260142 - DNA, 25 bp, Homo sapien
tcagcccggatgatgtgggttactt

SEQ ID NO: 1260143 - DNA, 25 bp, Homo sapien
ggcttcgccaggctgcagggccgga

SEQ ID NO: 1260144 - DNA, 25 bp, Homo sapien
gcttcgccaggctgcagggccggag

SEQ ID NO: 1260145 - DNA, 25 bp, Homo sapien
cttctcgtcccgtggccaccagggc

SEQ ID NO: 1260146 - DNA, 25 bp, Homo sapien
cctggcagcgggctcccgactggag

SEQ ID NO: 1260147 - DNA, 25 bp, Homo sapien
tgcccataggcagagatgctgagca

SEQ ID NO: 1260148 - DNA, 25 bp, Homo sapien
tggcttctcgtcccgtggccaccag

SEQ ID NO: 1260149 - DNA, 25 bp, Homo sapien
gctggaccatctgcctggcagggac

SEQ ID NO: 1260150 - DNA, 25 bp, Homo sapien
cttggggtccgaactgctggctgga

SEQ ID NO: 1260151 - DNA, 25 bp, Homo sapien
ggctggaccatctgcctggcaggga

SEQ ID NO: 1260152 - DNA, 25 bp, Homo sapien
ccggagctaatgaagaacgtgccca

SEQ ID NO: 1260153 - DNA, 25 bp, Homo sapien
tggagcgcttgaggtagaagaaccc

SEQ ID NO: 1260154 - DNA, 25 bp, Homo sapien
gaggtagaagaacccagctacggag

SEQ ID NO: 1260155 - DNA, 25 bp, Homo sapien
ccctggggagtttactggagcgctt

SEQ ID NO: 1260156 - DNA, 25 bp, Homo sapien
gatgtggccgcccgggggtccctga

SEQ ID NO: 1260157 - DNA, 25 bp, Homo sapien
tgtggccgcccgggggtccctgagc

SEQ ID NO: 1260158 - DNA, 25 bp, Homo sapien
ccgcccgggggtccctgagcttctg

SEQ ID NO: 1260159 - DNA, 25 bp, Homo sapien
cgggggtccctgagcttctgttcat

SEQ ID NO: 1260160 - DNA, 25 bp, Homo sapien
gggaatggcgcacccgggccagcaa

SEQ ID NO: 1260161 - DNA, 25 bp, Homo sapien
ggggaatggcgcacccgggccagca

SEQ ID NO: 1260162 - DNA, 25 bp, Homo sapien
ggagcccacggggacacccacgtgc

SEQ ID NO: 1260163 - DNA, 25 bp, Homo sapien
cggagcccacggggacacccacgtg

SEQ ID NO: 1260164 - DNA, 25 bp, Homo sapien
cacggagcccacggggacacccacg

SEQ ID NO: 1260165 - DNA, 25 bp, Homo sapien
gatagcagaactgtgggaagcctgt

SEQ ID NO: 1260166 - DNA, 25 bp, Homo sapien
ggacggaaatatgaaagcgaggggc

SEQ ID NO: 1260167 - DNA, 25 bp, Homo sapien
cggaaatatgaaagcgaggggctga

SEQ ID NO: 1260168 - DNA, 25 bp, Homo sapien
ctcaggacggaaatatgaaagcgag

SEQ ID NO: 1260169 - DNA, 25 bp, Homo sapien
tcaggacggaaatatgaaagcgagg

SEQ ID NO: 1260170 - DNA, 25 bp, Homo sapien
tcccgaatggcccagcagactcggg

SEQ ID NO: 1260171 - DNA, 25 bp, Homo sapien
gaatggcccagcagactcgggaaga

SEQ ID NO: 1260172 - DNA, 25 bp, Homo sapien
gctgtcccgaatggcccagcagact

SEQ ID NO: 1260173 - DNA, 25 bp, Homo sapien
cagagctgtcccgaatggcccagca

SEQ ID NO: 1260174 - DNA, 25 bp, Homo sapien
actcccacagtgtctcccacagctg

SEQ ID NO: 1260175 - DNA, 25 bp, Homo sapien
acacagacagcaactcccacagtgt

SEQ ID NO: 1260176 - DNA, 25 bp, Homo sapien
tcccacagtgtctcccacagctgga

SEQ ID NO: 1260177 - DNA, 25 bp, Homo sapien
gtggggacacagacagcaactccca

SEQ ID NO: 1260178 - DNA, 25 bp, Homo sapien
tgtgagaagggagccggggggagcc

SEQ ID NO: 1260179 - DNA, 25 bp, Homo sapien
ctgtgagaagggagccggggggagc

SEQ ID NO: 1260180 - DNA, 25 bp, Homo sapien
tggcgctcccgtccgcgttccagcg

SEQ ID NO: 1260181 - DNA, 25 bp, Homo sapien
gttcccacagcggacgcagctggcg

SEQ ID NO: 1260182 - DNA, 25 bp, Homo sapien
agcttctacactcggagccgttgta

SEQ ID NO: 1260183 - DNA, 25 bp, Homo sapien
gctgggagggttccgttcccacagc

SEQ ID NO: 1260184 - DNA, 25 bp, Homo sapien
ctgcgtggggcagaggacgggcatg

SEQ ID NO: 1260185 - DNA, 25 bp, Homo sapien
gtggggcagaggacgggcatgtcag

SEQ ID NO: 1260186 - DNA, 25 bp, Homo sapien
gcgtggggcagaggacgggcatgtc

SEQ ID NO: 1260187 - DNA, 25 bp, Homo sapien
cgtggggcagaggacgggcatgtca

SEQ ID NO: 1260188 - DNA, 25 bp, Homo sapien
tggacttcacgacccgctggcctgg

SEQ ID NO: 1260189 - DNA, 25 bp, Homo sapien
gcccttggacttcacgacccgctgg

SEQ ID NO: 1260190 - DNA, 25 bp, Homo sapien
cttggacttcacgacccgctggcct

SEQ ID NO: 1260191 - DNA, 25 bp, Homo sapien
ctcggcccttggacttcacgacccg

SEQ ID NO: 1260192 - DNA, 25 bp, Homo sapien
acacaggccggcatcctcgtggcgt

SEQ ID NO: 1260193 - DNA, 25 bp, Homo sapien
gttgattggcattccactccacgca

SEQ ID NO: 1260194 - DNA, 25 bp, Homo sapien
cctgcccgtggcacgctgacacagg

SEQ ID NO: 1260195 - DNA, 25 bp, Homo sapien
ctctgatgaacagggcctgcccgtg

SEQ ID NO: 1260196 - DNA, 25 bp, Homo sapien
cgagcacggacaggcaaaaatgtct

SEQ ID NO: 1260197 - DNA, 25 bp, Homo sapien
tgcccgagcacggacaggcaaaaat

SEQ ID NO: 1260198 - DNA, 25 bp, Homo sapien
cacctctgcccgagcacggacaggc

SEQ ID NO: 1260199 - DNA, 25 bp, Homo sapien
cacggacaggcaaaaatgtcttggg

SEQ ID NO: 1260200 - DNA, 25 bp, Homo sapien
gggcagctggcgttgacgcccacca

SEQ ID NO: 1260201 - DNA, 25 bp, Homo sapien
ggcagctggcgttgacgcccaccac

SEQ ID NO: 1260202 - DNA, 25 bp, Homo sapien
gcagctggcgttgacgcccaccaca

SEQ ID NO: 1260203 - DNA, 25 bp, Homo sapien
gtgaaactccaggacgcgcctgcca

SEQ ID NO: 1260204 - DNA, 25 bp, Homo sapien
gaggggacacggcagtgaaactcca

SEQ ID NO: 1260205 - DNA, 25 bp, Homo sapien
gaaactccaggacgcgcctgccagg

SEQ ID NO: 1260206 - DNA, 25 bp, Homo sapien
cagtgaaactccaggacgcgcctgc

SEQ ID NO: 1260207 - DNA, 25 bp, Homo sapien
ggagcacatctcaatgtccgcagct

SEQ ID NO: 1260208 - DNA, 25 bp, Homo sapien
gggtgccgtgggagcacatctcaat

SEQ ID NO: 1260209 - DNA, 25 bp, Homo sapien
agtcagcatcgggtggccctctgtc

SEQ ID NO: 1260210 - DNA, 25 bp, Homo sapien
cttctggagtcagcatcgggtggcc

SEQ ID NO: 1260211 - DNA, 25 bp, Homo sapien
gtgcacatccctgtgggaccctggg

SEQ ID NO: 1260212 - DNA, 25 bp, Homo sapien
tgggaccctgggtgggcggtctcca

SEQ ID NO: 1260213 - DNA, 25 bp, Homo sapien
agccacagtgcacatccctgtggga

SEQ ID NO: 1260214 - DNA, 25 bp, Homo sapien
cagtgcacatccctgtgggaccctg

SEQ ID NO: 1260215 - DNA, 25 bp, Homo sapien
tgcccaggtactgcacaggtgcgct

SEQ ID NO: 1260216 - DNA, 25 bp, Homo sapien
atggcagcgccaccgacattctctg

SEQ ID NO: 1260217 - DNA, 25 bp, Homo sapien
ttcaggggacgaattcacgcccagg

SEQ ID NO: 1260218 - DNA, 25 bp, Homo sapien
caggggtttccgcttgaccccacag

SEQ ID NO: 1260219 - DNA, 25 bp, Homo sapien
agggtaccctcagcttgtgtgttga

SEQ ID NO: 1260220 - DNA, 25 bp, Homo sapien
ctcagggtaccctcagcttgtgtgt

SEQ ID NO: 1260221 - DNA, 25 bp, Homo sapien
gggctcagggtaccctcagcttgtg

SEQ ID NO: 1260222 - DNA, 25 bp, Homo sapien
gtgttgatcacagctgtgctgtttc

SEQ ID NO: 1260223 - DNA, 25 bp, Homo sapien
gaatgcagtgaacggtgagggcgtc

SEQ ID NO: 1260224 - DNA, 25 bp, Homo sapien
ctgaatgcagtgaacggtgagggcg

SEQ ID NO: 1260225 - DNA, 25 bp, Homo sapien
tgcagtgaacggtgagggcgtccag

SEQ ID NO: 1260226 - DNA, 25 bp, Homo sapien
cagtgaacggtgagggcgtccaggg

SEQ ID NO: 1260227 - DNA, 25 bp, Homo sapien
tacactccccgatagcgatgcgcgg

SEQ ID NO: 1260228 - DNA, 25 bp, Homo sapien
tgcggagtgcgggatagaatccaca

SEQ ID NO: 1260229 - DNA, 25 bp, Homo sapien
cgatgcgcggcacgctgtgctgtca

SEQ ID NO: 1260230 - DNA, 25 bp, Homo sapien
cagaggtgctcccattgcgggccag

SEQ ID NO: 1260231 - DNA, 25 bp, Homo sapien
ccagccattcctgagcaggcgctca

SEQ ID NO: 1260232 - DNA, 25 bp, Homo sapien
cagccattcctgagcaggcgctcac

SEQ ID NO: 1260233 - DNA, 25 bp, Homo sapien
ccctctgcgaggcacaggcccctct

SEQ ID NO: 1260234 - DNA, 25 bp, Homo sapien
agcaggcagcggagggctcccctct

SEQ ID NO: 1260235 - DNA, 25 bp, Homo sapien
ggagggctcccctctgcgaggcaca

SEQ ID NO: 1260236 - DNA, 25 bp, Homo sapien
tgaccccagcagtggacctggtcag

SEQ ID NO: 1260237 - DNA, 25 bp, Homo sapien
gctggcgactcccacgagaaggcca

SEQ ID NO: 1260238 - DNA, 25 bp, Homo sapien
tggcgactcccacgagaaggccagc

SEQ ID NO: 1260239 - DNA, 25 bp, Homo sapien
tccatggacttgctggcgactccca

SEQ ID NO: 1260240 - DNA, 25 bp, Homo sapien
cgtgttctccatggacttgctggcg

SEQ ID NO: 1260241 - DNA, 25 bp, Homo sapien
acagggaggagcatgcggagccaaa

SEQ ID NO: 1260242 - DNA, 25 bp, Homo sapien
gaggagcatgcggagccaaagagat

SEQ ID NO: 1260243 - DNA, 25 bp, Homo sapien
catgcggagccaaagagatggagtg

SEQ ID NO: 1260244 - DNA, 25 bp, Homo sapien
ggagcatgcggagccaaagagatgg

SEQ ID NO: 1260245 - DNA, 25 bp, Homo sapien
ggccgcggcagatgactgagttaaa

SEQ ID NO: 1260246 - DNA, 25 bp, Homo sapien
cttggggcctttggaggcacgggtg

SEQ ID NO: 1260247 - DNA, 25 bp, Homo sapien
ccacgacagggaaggtggagccaaa

SEQ ID NO: 1260248 - DNA, 25 bp, Homo sapien
ggcagagccaaatggagatgggtgg

SEQ ID NO: 1260249 - DNA, 25 bp, Homo sapien
cctgggtgttcaggggttagctctg

SEQ ID NO: 1260250 - DNA, 25 bp, Homo sapien
tctgggagctcatgggctcagctga

SEQ ID NO: 1260251 - DNA, 25 bp, Homo sapien
tccaggatggggactaccgacatca

SEQ ID NO: 1260252 - DNA, 25 bp, Homo sapien
gggactaccgacatcagccctttgc

SEQ ID NO: 1260253 - DNA, 25 bp, Homo sapien
tccctttaacatttgcccagcagag

SEQ ID NO: 1260254 - DNA, 25 bp, Homo sapien
tgccaggcgcacaaatcctcaagtg

SEQ ID NO: 1260255 - DNA, 25 bp, Homo sapien
caagtggtgtcactgcactggctca

SEQ ID NO: 1260256 - DNA, 25 bp, Homo sapien
tgctggattcaggtcatggcctcac

SEQ ID NO: 1260257 - DNA, 25 bp, Homo sapien
tgttcatttatcagactcagggagt

SEQ ID NO: 1260258 - DNA, 25 bp, Homo sapien
gataaactttgcaccttagccttga

SEQ ID NO: 1260259 - DNA, 25 bp, Homo sapien
tgtagctttcttaggaccctctgca

SEQ ID NO: 1260260 - DNA, 25 bp, Homo sapien
tcttaccttattgcagtggctggga

SEQ ID NO: 1260261 - DNA, 25 bp, Homo sapien
aaccatgtatatttgcaggagtttt

SEQ ID NO: 1260262 - DNA, 25 bp, Homo sapien
ccatgtatatttgcaggagttttct

SEQ ID NO: 1260263 - DNA, 25 bp, Homo sapien
accatgtatatttgcaggagttttc

SEQ ID NO: 1260264 - DNA, 25 bp, Homo sapien
taaaattgaccattcttagtagagg

SEQ ID NO: 1260265 - DNA, 25 bp, Homo sapien
gcctttacacgcacttagttacaga

SEQ ID NO: 1260266 - DNA, 25 bp, Homo sapien
tagaggtttgtcaatctttccaatc

SEQ ID NO: 1260267 - DNA, 25 bp, Homo sapien
tttctcatgctttctatgccactga

SEQ ID NO: 1260268 - DNA, 25 bp, Homo sapien
tgtgcagcctgatatgtgtaacttc

SEQ ID NO: 1260269 - DNA, 25 bp, Homo sapien
tattctaagaatcggagagagatta

SEQ ID NO: 1260270 - DNA, 25 bp, Homo sapien
ggtcactccgtcttttgggttcaca

SEQ ID NO: 1260271 - DNA, 25 bp, Homo sapien
taacttcctataaataccattcagg

SEQ ID NO: 1260272 - DNA, 25 bp, Homo sapien
attcctctgtctttgaggactctgc

SEQ ID NO: 1260273 - DNA, 25 bp, Homo sapien
ttaaaatttcagatcttggccaagc

SEQ ID NO: 1260274 - DNA, 25 bp, Homo sapien
tttctattcctctgtctttgaggac

SEQ ID NO: 1260275 - DNA, 25 bp, Homo sapien
taaaatttcagatcttggccaagca

SEQ ID NO: 1260276 - DNA, 25 bp, Homo sapien
cctcgctgagatttccggcactttg

SEQ ID NO: 1260277 - DNA, 25 bp, Homo sapien
gagtgattttgaactgtaccctgta

SEQ ID NO: 1260278 - DNA, 25 bp, Homo sapien
cgcccagccagatcttgtgtttgtt

SEQ ID NO: 1260279 - DNA, 25 bp, Homo sapien
gattcaaactgcaaacgctgtcaca

SEQ ID NO: 1260280 - DNA, 25 bp, Homo sapien
caagagcacggaatataactggagt

SEQ ID NO: 1260281 - DNA, 25 bp, Homo sapien
tgccgacaagagcacggaatataac

SEQ ID NO: 1260282 - DNA, 25 bp, Homo sapien
tataactggagtccgctcgctgagg

SEQ ID NO: 1260283 - DNA, 25 bp, Homo sapien
ctagaagtgaaatgcgtgccgacaa

SEQ ID NO: 1260284 - DNA, 25 bp, Homo sapien
aattctagacacattagcagcacca

SEQ ID NO: 1260285 - DNA, 25 bp, Homo sapien
caattctagacacattagcagcacc

SEQ ID NO: 1260286 - DNA, 25 bp, Homo sapien
attctagacacattagcagcaccat

SEQ ID NO: 1260287 - DNA, 25 bp, Homo sapien
ccaattctagacacattagcagcac

SEQ ID NO: 1260288 - DNA, 25 bp, Homo sapien
cagccaccatgtctcggcaccgttc

SEQ ID NO: 1260289 - DNA, 25 bp, Homo sapien
ccatgtctcggcaccgttcaccaca

SEQ ID NO: 1260290 - DNA, 25 bp, Homo sapien
gccaccatgtctcggcaccgttcac

SEQ ID NO: 1260291 - DNA, 25 bp, Homo sapien
ctcagcagcaccgtccaccacagcc

SEQ ID NO: 1260292 - DNA, 25 bp, Homo sapien
ctcagcagcaccgtccaccacagcc

SEQ ID NO: 1260293 - DNA, 25 bp, Homo sapien
ctcagcagcaccgtccaccacagcc

SEQ ID NO: 1260294 - DNA, 25 bp, Homo sapien
cagccaccatgtctgcagcagcatt

SEQ ID NO: 1260295 - DNA, 25 bp, Homo sapien
agccaccatgtctgcagcagcattg

SEQ ID NO: 1260296 - DNA, 25 bp, Homo sapien
ccaccatgtctgcagcagcattgtt

SEQ ID NO: 1260297 - DNA, 25 bp, Homo sapien
gccaccatgtctgcagcagcattgt

SEQ ID NO: 1260298 - DNA, 25 bp, Homo sapien
gattctactcatgaggttcccaggg

SEQ ID NO: 1260299 - DNA, 25 bp, Homo sapien
tcccagggttgtcgaattcatagag

SEQ ID NO: 1260300 - DNA, 25 bp, Homo sapien
tgaaagcagctcatcacaacaggac

SEQ ID NO: 1260301 - DNA, 25 bp, Homo sapien
aaagaaattttggacgcatgctaca

SEQ ID NO: 1260302 - DNA, 25 bp, Homo sapien
caacacgggtgagcgtcagggaaat

SEQ ID NO: 1260303 - DNA, 25 bp, Homo sapien
gggacacacagaaccgctgggactt

SEQ ID NO: 1260304 - DNA, 25 bp, Homo sapien
aaagcctccacgaccaaacggcact

SEQ ID NO: 1260305 - DNA, 25 bp, Homo sapien
acacagaaccgctgggacttccaca

SEQ ID NO: 1260306 - DNA, 25 bp, Homo sapien
tctacatcacgacaggagtctggtg

SEQ ID NO: 1260307 - DNA, 25 bp, Homo sapien
taggcccaactcttcagacagcgga

SEQ ID NO: 1260308 - DNA, 25 bp, Homo sapien
tcagagtgtcggtaaaatcacagca

SEQ ID NO: 1260309 - DNA, 25 bp, Homo sapien
acagttctctgcgtgagccgtggca

SEQ ID NO: 1260310 - DNA, 25 bp, Homo sapien
cgtaactccagccgcccaggcagca

SEQ ID NO: 1260311 - DNA, 25 bp, Homo sapien
aactccagccgcccaggcagcagta

SEQ ID NO: 1260312 - DNA, 25 bp, Homo sapien
actccagccgcccaggcagcagtaa

SEQ ID NO: 1260313 - DNA, 25 bp, Homo sapien
taactccagccgcccaggcagcagt

SEQ ID NO: 1260314 - DNA, 25 bp, Homo sapien
aaataaaagaggaagacgcagctct

SEQ ID NO: 1260315 - DNA, 25 bp, Homo sapien
aagaggaagacgcagctctgccttc

SEQ ID NO: 1260316 - DNA, 25 bp, Homo sapien
aaaagaggaagacgcagctctgcct

SEQ ID NO: 1260317 - DNA, 25 bp, Homo sapien
taaaagaggaagacgcagctctgcc

SEQ ID NO: 1260318 - DNA, 25 bp, Homo sapien
tcgcctggtggtaccatcgcgcgcg

SEQ ID NO: 1260319 - DNA, 25 bp, Homo sapien
gcgcgaagcgccctgggaaatgtag

SEQ ID NO: 1260320 - DNA, 25 bp, Homo sapien
catgtctcgggtccctgacacggag

SEQ ID NO: 1260321 - DNA, 25 bp, Homo sapien
aatgtagtcctagaagaaccagcgc

SEQ ID NO: 1260322 - DNA, 25 bp, Homo sapien
aaaggcttcaatcctgtcggtgtcc

SEQ ID NO: 1260323 - DNA, 25 bp, Homo sapien
cttcaatcctgtcggtgtccccggg

SEQ ID NO: 1260324 - DNA, 25 bp, Homo sapien
ggaactggggacgtccgtccgctca

SEQ ID NO: 1260325 - DNA, 25 bp, Homo sapien
ggcttcaatcctgtcggtgtccccg

SEQ ID NO: 1260326 - DNA, 25 bp, Homo sapien
gacagtgttcgcctgagggtccatc

SEQ ID NO: 1260327 - DNA, 25 bp, Homo sapien
tttagagggacagtgttcgcctgag

SEQ ID NO: 1260328 - DNA, 25 bp, Homo sapien
gtcttctctttagagggacagtgtt

SEQ ID NO: 1260329 - DNA, 25 bp, Homo sapien
acagtgttcgcctgagggtccatcc

SEQ ID NO: 1260330 - DNA, 25 bp, Homo sapien
gacagctgcagggtttccggccatg

SEQ ID NO: 1260331 - DNA, 25 bp, Homo sapien
tgcagcttctgtgtcggtcccatta

SEQ ID NO: 1260332 - DNA, 25 bp, Homo sapien
gcaccaggggttcgctgacagctgc

SEQ ID NO: 1260333 - DNA, 25 bp, Homo sapien
atgcgcccgcggacgtgcagcttct

SEQ ID NO: 1260334 - DNA, 25 bp, Homo sapien
ctgggcgacgtttgaggaccacggg

SEQ ID NO: 1260335 - DNA, 25 bp, Homo sapien
gtgccacaggctcttgccgtctgcg

SEQ ID NO: 1260336 - DNA, 25 bp, Homo sapien
ggaggacacagtcgcggtccccttc

SEQ ID NO: 1260337 - DNA, 25 bp, Homo sapien
gtcgcggtccccttctcggagtcca

SEQ ID NO: 1260338 - DNA, 25 bp, Homo sapien
tccctcgtctgtcaggcgggcagtg

SEQ ID NO: 1260339 - DNA, 25 bp, Homo sapien
gcccctgccggcgtgggccaacctg

SEQ ID NO: 1260340 - DNA, 25 bp, Homo sapien
gcgggcagtggatagctcgtcctct

SEQ ID NO: 1260341 - DNA, 25 bp, Homo sapien
actgggcactccctcgtctgtcagg

SEQ ID NO: 1260342 - DNA, 25 bp, Homo sapien
actcctgcccgggaagtcaggcagt

SEQ ID NO: 1260343 - DNA, 25 bp, Homo sapien
tgggcactgcacttggcgttgccga

SEQ ID NO: 1260344 - DNA, 25 bp, Homo sapien
actgcacttggcgttgccgacccag

SEQ ID NO: 1260345 - DNA, 25 bp, Homo sapien
tcaggcagtgtggccgggaccttcc

SEQ ID NO: 1260346 - DNA, 25 bp, Homo sapien
gcgactcagcgaggtgggggcgtct

SEQ ID NO: 1260347 - DNA, 25 bp, Homo sapien
ctgctggcgactcagcgaggtgggg

SEQ ID NO: 1260348 - DNA, 25 bp, Homo sapien
tggcgactcagcgaggtgggggcgt

SEQ ID NO: 1260349 - DNA, 25 bp, Homo sapien
gctggcgactcagcgaggtgggggc

SEQ ID NO: 1260350 - DNA, 25 bp, Homo sapien
tgctgcaggctccgcggactttagg

SEQ ID NO: 1260351 - DNA, 25 bp, Homo sapien
gcaggctccgcggactttaggctca

SEQ ID NO: 1260352 - DNA, 25 bp, Homo sapien
ggctccgcggactttaggctcattt

SEQ ID NO: 1260353 - DNA, 25 bp, Homo sapien
ctccgcggactttaggctcatttaa

SEQ ID NO: 1260354 - DNA, 25 bp, Homo sapien
aatatttatttgacaaataagggct

SEQ ID NO: 1260355 - DNA, 25 bp, Homo sapien
caaatatttatttgacaaataaggg

SEQ ID NO: 1260356 - DNA, 25 bp, Homo sapien
cctgggcaaatatttatttgacaaa

SEQ ID NO: 1260357 - DNA, 25 bp, Homo sapien
atttatttgacaaataagggctcac

SEQ ID NO: 1260358 - DNA, 25 bp, Homo sapien
gggcagccgctgagcggctgtggag

SEQ ID NO: 1260359 - DNA, 25 bp, Homo sapien
ggcagccgctgagcggctgtggagg

SEQ ID NO: 1260360 - DNA, 25 bp, Homo sapien
tctctctgttctgatgagaggatag

SEQ ID NO: 1260361 - DNA, 25 bp, Homo sapien
cgtgagtccccagatcggttcaggg

SEQ ID NO: 1260362 - DNA, 25 bp, Homo sapien
tctgttctgatgagaggatagggaa

SEQ ID NO: 1260363 - DNA, 25 bp, Homo sapien
tgcgtggtacaagacggcccccgtg

SEQ ID NO: 1260364 - DNA, 25 bp, Homo sapien
ctgttttctgaaacggcacccctgg

SEQ ID NO: 1260365 - DNA, 25 bp, Homo sapien
tgtctggtcccagcacatgatgctc

SEQ ID NO: 1260366 - DNA, 25 bp, Homo sapien
tcgccgtcccctggaaaagatgagc

SEQ ID NO: 1260367 - DNA, 25 bp, Homo sapien
gagtgcggaaccgagcgtgtccttc

SEQ ID NO: 1260368 - DNA, 25 bp, Homo sapien
agcagtagtggttgtaccaggcaaa

SEQ ID NO: 1260369 - DNA, 25 bp, Homo sapien
ttccgccggccgggcagagataaga

SEQ ID NO: 1260370 - DNA, 25 bp, Homo sapien
cagtagtggttgtaccaggcaaagg

SEQ ID NO: 1260371 - DNA, 25 bp, Homo sapien
cgccggccgggcagagataagacca

SEQ ID NO: 1260372 - DNA, 25 bp, Homo sapien
acgcgacagagggacagaatgccgt

SEQ ID NO: 1260373 - DNA, 25 bp, Homo sapien
cagagatttggagcacagagcatca

SEQ ID NO: 1260374 - DNA, 25 bp, Homo sapien
tcggctgccagaacgagaggaagca

SEQ ID NO: 1260375 - DNA, 25 bp, Homo sapien
ttatggatgtgagcatcggctgcca

SEQ ID NO: 1260376 - DNA, 25 bp, Homo sapien
caatgcgtatgggaagccggtgaac

SEQ ID NO: 1260377 - DNA, 25 bp, Homo sapien
tgcttgcagggaatctacacagggt

SEQ ID NO: 1260378 - DNA, 25 bp, Homo sapien
tgtcaggtacgacaagggtgcccag

SEQ ID NO: 1260379 - DNA, 25 bp, Homo sapien
cacacgctcgcgttgttggtactga

SEQ ID NO: 1260380 - DNA, 25 bp, Homo sapien
cttttcagcgttccgccgaacaggg

SEQ ID NO: 1260381 - DNA, 25 bp, Homo sapien
gcagcagcatctgacatctgagtct

SEQ ID NO: 1260382 - DNA, 25 bp, Homo sapien
tgtgtttgcacatttggaggccggt

SEQ ID NO: 1260383 - DNA, 25 bp, Homo sapien
cgatgggtacatcccgcagcagcat

SEQ ID NO: 1260384 - DNA, 25 bp, Homo sapien
gcctgcggcgtcaaagggcttgaat

SEQ ID NO: 1260385 - DNA, 25 bp, Homo sapien
ttgaatctccgtgtagccaccgagg

SEQ ID NO: 1260386 - DNA, 25 bp, Homo sapien
caaagggcttgaatctccgtgtagc

SEQ ID NO: 1260387 - DNA, 25 bp, Homo sapien
ggtcctggctgactttgcctgcggc

SEQ ID NO: 1260388 - DNA, 25 bp, Homo sapien
aaccccaagcgtcttggcgcaggga

SEQ ID NO: 1260389 - DNA, 25 bp, Homo sapien
ggagggatccccgtcagccaggtcc

SEQ ID NO: 1260390 - DNA, 25 bp, Homo sapien
cctgatattagcaaccccaagcgtc

SEQ ID NO: 1260391 - DNA, 25 bp, Homo sapien
tgtcttcggaaaatgccaggtcccc

SEQ ID NO: 1260392 - DNA, 25 bp, Homo sapien
gcagctctggcaccgggaacttcag

SEQ ID NO: 1260393 - DNA, 25 bp, Homo sapien
tctggcaccgggaacttcagagacc

SEQ ID NO: 1260394 - DNA, 25 bp, Homo sapien
ctgaggccttgtgggtcgcctcaaa

SEQ ID NO: 1260395 - DNA, 25 bp, Homo sapien
gggtcgcctcaaattcaagcctcat

SEQ ID NO: 1260396 - DNA, 25 bp, Homo sapien
ggccaggccagacgccggatccaga

SEQ ID NO: 1260397 - DNA, 25 bp, Homo sapien
cacgaggcaggaaccctggcatgcg

SEQ ID NO: 1260398 - DNA, 25 bp, Homo sapien
tcactgccgcacctgcgctctgaga

SEQ ID NO: 1260399 - DNA, 25 bp, Homo sapien
gctctgagacctgcactcgcccagg

SEQ ID NO: 1260400 - DNA, 25 bp, Homo sapien
ttccaggtactctaggccctgctga

SEQ ID NO: 1260401 - DNA, 25 bp, Homo sapien
gggtgcatgacctcaggcccaagct

SEQ ID NO: 1260402 - DNA, 25 bp, Homo sapien
ctcaggaagatcctcggcctccaag

SEQ ID NO: 1260403 - DNA, 25 bp, Homo sapien
tccccagcgggtgcatgacctcagg

SEQ ID NO: 1260404 - DNA, 25 bp, Homo sapien
tatatcatatctttgcgagactggt

SEQ ID NO: 1260405 - DNA, 25 bp, Homo sapien
tcgacggcgtgctggtcattgtact

SEQ ID NO: 1260406 - DNA, 25 bp, Homo sapien
cgagactggttatcttcgacggcgt

SEQ ID NO: 1260407 - DNA, 25 bp, Homo sapien
tgtaggacgatttgatgcctcgagc

SEQ ID NO: 1260408 - DNA, 25 bp, Homo sapien
gtggatctgagaacctccgccagca

SEQ ID NO: 1260409 - DNA, 25 bp, Homo sapien
cagcaggtggatctgagaacctccg

SEQ ID NO: 1260410 - DNA, 25 bp, Homo sapien
cttggctcttcgaagctttaatcgg

SEQ ID NO: 1260411 - DNA, 25 bp, Homo sapien
ctttaatcggatggttgaacatttc

SEQ ID NO: 1260412 - DNA, 25 bp, Homo sapien
ctccatgtccacagcagcgagggtg

SEQ ID NO: 1260413 - DNA, 25 bp, Homo sapien
aagcaggtgttcagccagacgcaaa

SEQ ID NO: 1260414 - DNA, 25 bp, Homo sapien
tgtcaccatgaagccgggaagcagg

SEQ ID NO: 1260415 - DNA, 25 bp, Homo sapien
cacagtggattttattatggggcga

SEQ ID NO: 1260416 - DNA, 25 bp, Homo sapien
agtccttccagactcgcctgaggat

SEQ ID NO: 1260417 - DNA, 25 bp, Homo sapien
ccggacagagcggaggccgtgtgca

SEQ ID NO: 1260418 - DNA, 25 bp, Homo sapien
aactgctcctgggacccggacagag

SEQ ID NO: 1260419 - DNA, 25 bp, Homo sapien
ccgtgtgcacgagcagcgtggacca

SEQ ID NO: 1260420 - DNA, 25 bp, Homo sapien
ccccacacagacacctgagtgggca

SEQ ID NO: 1260421 - DNA, 25 bp, Homo sapien
cacacagacacctgagtgggcatca

SEQ ID NO: 1260422 - DNA, 25 bp, Homo sapien
agacacctgagtgggcatcagagtg

SEQ ID NO: 1260423 - DNA, 25 bp, Homo sapien
cagacacctgagtgggcatcagagt

SEQ ID NO: 1260424 - DNA, 25 bp, Homo sapien
tcaacccggctcctgggccgcggcc

SEQ ID NO: 1260425 - DNA, 25 bp, Homo sapien
caacccggctcctgggccgcggccg

SEQ ID NO: 1260426 - DNA, 25 bp, Homo sapien
tttcgggtgtggagccatcttggac

SEQ ID NO: 1260427 - DNA, 25 bp, Homo sapien
tccgggcacgggcacagtgtgtggg

SEQ ID NO: 1260428 - DNA, 25 bp, Homo sapien
agcgtccaggggagctccggtcact

SEQ ID NO: 1260429 - DNA, 25 bp, Homo sapien
cccctgcgcagatgcggctgggttt

SEQ ID NO: 1260430 - DNA, 25 bp, Homo sapien
gaggggtcacgttcttgccgcctac

SEQ ID NO: 1260431 - DNA, 25 bp, Homo sapien
ccgagaggggtcacgttcttgccgc

SEQ ID NO: 1260432 - DNA, 25 bp, Homo sapien
aggctccgagaggggtcacgttctt

SEQ ID NO: 1260433 - DNA, 25 bp, Homo sapien
gctccgagaggggtcacgttcttgc

SEQ ID NO: 1260434 - DNA, 25 bp, Homo sapien
gggtttggccgggtgcgaggatgac

SEQ ID NO: 1260435 - DNA, 25 bp, Homo sapien
caccgccgtcctgaggcactttgtg

SEQ ID NO: 1260436 - DNA, 25 bp, Homo sapien
agaggtgggtgcgtagaagggtttg

SEQ ID NO: 1260437 - DNA, 25 bp, Homo sapien
acgggaagctgtcgcctcagaggtg

SEQ ID NO: 1260438 - DNA, 25 bp, Homo sapien
cagccttgaacttgccgcgggggca

SEQ ID NO: 1260439 - DNA, 25 bp, Homo sapien
gcccagccttgaacttgccgcgggg

SEQ ID NO: 1260440 - DNA, 25 bp, Homo sapien
agccttgaacttgccgcgggggcac

SEQ ID NO: 1260441 - DNA, 25 bp, Homo sapien
ccagccttgaacttgccgcgggggc

SEQ ID NO: 1260442 - DNA, 25 bp, Homo sapien
ctgaacacggttttacagcccggat

SEQ ID NO: 1260443 - DNA, 25 bp, Homo sapien
acacggttttacagcccggatcact

SEQ ID NO: 1260444 - DNA, 25 bp, Homo sapien
cacggttttacagcccggatcactg

SEQ ID NO: 1260445 - DNA, 25 bp, Homo sapien
gaacacggttttacagcccggatca

SEQ ID NO: 1260446 - DNA, 25 bp, Homo sapien
tcccggcgacggttgacaagaaagc

SEQ ID NO: 1260447 - DNA, 25 bp, Homo sapien
gacggttgacaagaaagcgccgcgt

SEQ ID NO: 1260448 - DNA, 25 bp, Homo sapien
tagctccacttcccggcgacggttg

SEQ ID NO: 1260449 - DNA, 25 bp, Homo sapien
ggcaccgccacgctagctccacttc

SEQ ID NO: 1260450 - DNA, 25 bp, Homo sapien
ggacacgacctttgttgtggtcggc

SEQ ID NO: 1260451 - DNA, 25 bp, Homo sapien
gaggaggagactggaaccgggtgga

SEQ ID NO: 1260452 - DNA, 25 bp, Homo sapien
caggacctcggagacgtggcctttg

SEQ ID NO: 1260453 - DNA, 25 bp, Homo sapien
tggaaccgggtggacccggcagcag

SEQ ID NO: 1260454 - DNA, 25 bp, Homo sapien
gggaccgttctgtctcgagagcctc

SEQ ID NO: 1260455 - DNA, 25 bp, Homo sapien
tctgtctcgagagcctcgcagacac

SEQ ID NO: 1260456 - DNA, 25 bp, Homo sapien
accgttctgtctcgagagcctcgca

SEQ ID NO: 1260457 - DNA, 25 bp, Homo sapien
tctcgagagcctcgcagacaccggg

SEQ ID NO: 1260458 - DNA, 25 bp, Homo sapien
ggaagcagctcctggaacaccatcc

SEQ ID NO: 1260459 - DNA, 25 bp, Homo sapien
gctcctggaacaccatcctggagac

SEQ ID NO: 1260460 - DNA, 25 bp, Homo sapien
cagctcctggaacaccatcctggag

SEQ ID NO: 1260461 - DNA, 25 bp, Homo sapien
aagcagctcctggaacaccatcctg

SEQ ID NO: 1260462 - DNA, 25 bp, Homo sapien
cctgccctccggcgatgctgtcctc

SEQ ID NO: 1260463 - DNA, 25 bp, Homo sapien
aggacgaggccccccagctactgag

SEQ ID NO: 1260464 - DNA, 25 bp, Homo sapien
atgcaaccctcagccgggcggcccc

SEQ ID NO: 1260465 - DNA, 25 bp, Homo sapien
ttcccagcgagtcccatgcaaccct

SEQ ID NO: 1260466 - DNA, 25 bp, Homo sapien
gtgagcctgagctcatccaacaccg

SEQ ID NO: 1260467 - DNA, 25 bp, Homo sapien
gccacacctgtgagcctgagctcat

SEQ ID NO: 1260468 - DNA, 25 bp, Homo sapien
cagggccacacctgtgagcctgagc

SEQ ID NO: 1260469 - DNA, 25 bp, Homo sapien
cacctgtgagcctgagctcatccaa

SEQ ID NO: 1260470 - DNA, 25 bp, Homo sapien
tgctccgcaccagggtccagcggga

SEQ ID NO: 1260471 - DNA, 25 bp, Homo sapien
tcctgggtctgctccgcaccagggt

SEQ ID NO: 1260472 - DNA, 25 bp, Homo sapien
gggtctgctccgcaccagggtccag

SEQ ID NO: 1260473 - DNA, 25 bp, Homo sapien
tctgctccgcaccagggtccagcgg

SEQ ID NO: 1260474 - DNA, 25 bp, Homo sapien
gaactcgcagcaggacactaacatg

SEQ ID NO: 1260475 - DNA, 25 bp, Homo sapien
gacacgtcagtcagcatctcggagt

SEQ ID NO: 1260476 - DNA, 25 bp, Homo sapien
aacaatgtcagtaccttcctagggc

SEQ ID NO: 1260477 - DNA, 25 bp, Homo sapien
catttgctagatcgacaggcgtgag

SEQ ID NO: 1260478 - DNA, 25 bp, Homo sapien
tgctgtgcggcacctcggatttaca

SEQ ID NO: 1260479 - DNA, 25 bp, Homo sapien
gctttaaaagcacgcggctctctga

SEQ ID NO: 1260480 - DNA, 25 bp, Homo sapien
acacagtcatcaggtcagctgcaag

SEQ ID NO: 1260481 - DNA, 25 bp, Homo sapien
cctggtaggccaggtatggaattcc

SEQ ID NO: 1260482 - DNA, 25 bp, Homo sapien
agaggggagctgtcgcgctccgcgg

SEQ ID NO: 1260483 - DNA, 25 bp, Homo sapien
gcctccctgggacgggtgccccata

SEQ ID NO: 1260484 - DNA, 25 bp, Homo sapien
caaggaagtcagtcggcctcatggg

SEQ ID NO: 1260485 - DNA, 25 bp, Homo sapien
gggccagctgtgggcgccgggctct

SEQ ID NO: 1260486 - DNA, 25 bp, Homo sapien
ccagcctcatcgaaattttaatagg

SEQ ID NO: 1260487 - DNA, 25 bp, Homo sapien
tgtaagtcacgtagcagtggcatct

SEQ ID NO: 1260488 - DNA, 25 bp, Homo sapien
catcgaaattttaataggcattgca

SEQ ID NO: 1260489 - DNA, 25 bp, Homo sapien
tgaatctgtaagtcacgtagcagtg

SEQ ID NO: 1260490 - DNA, 25 bp, Homo sapien
tgtttattgaaggtcccctgcagcc

SEQ ID NO: 1260491 - DNA, 25 bp, Homo sapien
tgcagccgggtcccgtgctgggcac

SEQ ID NO: 1260492 - DNA, 25 bp, Homo sapien
cctgcagccgggtcccgtgctgggc

SEQ ID NO: 1260493 - DNA, 25 bp, Homo sapien
agtgtttattgaaggtcccctgcag

SEQ ID NO: 1260494 - DNA, 25 bp, Homo sapien
gggctggctgcggtcggtggccccg

SEQ ID NO: 1260495 - DNA, 25 bp, Homo sapien
cggccgccgaactgcatggtccagg

SEQ ID NO: 1260496 - DNA, 25 bp, Homo sapien
cggcccagagcagaacgcagagccc

SEQ ID NO: 1260497 - DNA, 25 bp, Homo sapien
agccgcggccgccgaactgcatggt

SEQ ID NO: 1260498 - DNA, 25 bp, Homo sapien
gcagcttctggcgtcttcggtcgac

SEQ ID NO: 1260499 - DNA, 25 bp, Homo sapien
ttctcctctgccgatcgctcgcccc

SEQ ID NO: 1260500 - DNA, 25 bp, Homo sapien
gcgtcttcggtcgacggcggcacct

SEQ ID NO: 1260501 - DNA, 25 bp, Homo sapien
ctcttcctcggggaactggcagctt

SEQ ID NO: 1260502 - DNA, 25 bp, Homo sapien
tgcaggggggccacggtcagcaggc

SEQ ID NO: 1260503 - DNA, 25 bp, Homo sapien
ctccccgcaccaggctgtgacagac

SEQ ID NO: 1260504 - DNA, 25 bp, Homo sapien
cacagtgagaaacccgaactgggtg

SEQ ID NO: 1260505 - DNA, 25 bp, Homo sapien
agatgtgcagtccaagctgggccga

SEQ ID NO: 1260506 - DNA, 25 bp, Homo sapien
acagcgttgtgggtcttgttcccag

SEQ ID NO: 1260507 - DNA, 25 bp, Homo sapien
aggaggacgacggtcagccacccaa

SEQ ID NO: 1260508 - DNA, 25 bp, Homo sapien
cacagtcgatacactggaagccaaa

SEQ ID NO: 1260509 - DNA, 25 bp, Homo sapien
tctgtccaaggtttgcagtggcctt

SEQ ID NO: 1260510 - DNA, 25 bp, Homo sapien
aaggtttgcagtggccttcgtggcc

SEQ ID NO: 1260511 - DNA, 25 bp, Homo sapien
gaaggtccccgaggcacagtcgata

SEQ ID NO: 1260512 - DNA, 25 bp, Homo sapien
acacatgcagtcccactcggaacag

SEQ ID NO: 1260513 - DNA, 25 bp, Homo sapien
ccggcaggtcgtgcagcaagggtct

SEQ ID NO: 1260514 - DNA, 25 bp, Homo sapien
atgcagtcccactcggaacagcact

SEQ ID NO: 1260515 - DNA, 25 bp, Homo sapien
gggacaagggtggtgccggcaggtc

SEQ ID NO: 1260516 - DNA, 25 bp, Homo sapien
ggcgatggccaagggctcacgaccc

SEQ ID NO: 1260517 - DNA, 25 bp, Homo sapien
tgggcctccggacagagcctccctt

SEQ ID NO: 1260518 - DNA, 25 bp, Homo sapien
agcaacgccggtctgagcacgggaa

SEQ ID NO: 1260519 - DNA, 25 bp, Homo sapien
tcttgagggcgctcccacctggctc

SEQ ID NO: 1260520 - DNA, 25 bp, Homo sapien
cagcagcgcgtcgtgtgaacccggc

SEQ ID NO: 1260521 - DNA, 25 bp, Homo sapien
gcgtccgttcccgtcccaagcagga

SEQ ID NO: 1260522 - DNA, 25 bp, Homo sapien
gttcccgtcccaagcaggaggcgcc

SEQ ID NO: 1260523 - DNA, 25 bp, Homo sapien
cgcgtcgtgtgaacccggcagcagc

SEQ ID NO: 1260524 - DNA, 25 bp, Homo sapien
ccaggctgagcgcgcacagcagcgc

SEQ ID NO: 1260525 - DNA, 25 bp, Homo sapien
caggctgagcgcgcacagcagcgcc

SEQ ID NO: 1260526 - DNA, 25 bp, Homo sapien
aggccgcacagggcccgaaacgcgc

SEQ ID NO: 1260527 - DNA, 25 bp, Homo sapien
cgcacagggcccgaaacgcgcccat

SEQ ID NO: 1260528 - DNA, 25 bp, Homo sapien
gggaccgttcatgacctgagaatcc

SEQ ID NO: 1260529 - DNA, 25 bp, Homo sapien
cccgacccaggtgaagtgcgtgtga

SEQ ID NO: 1260530 - DNA, 25 bp, Homo sapien
ctcgggtttcaagagcccacagcca

SEQ ID NO: 1260531 - DNA, 25 bp, Homo sapien
agagcccacagccagttggacacgc

SEQ ID NO: 1260532 - DNA, 25 bp, Homo sapien
tgctggcgcctcctcgggacagtgt

SEQ ID NO: 1260533 - DNA, 25 bp, Homo sapien
actgcctccgggtggtatctgcgag

SEQ ID NO: 1260534 - DNA, 25 bp, Homo sapien
cgtttatagcaccttgtcccatggg

SEQ ID NO: 1260535 - DNA, 25 bp, Homo sapien
tcaggtgtgaaactcaccatgggct

SEQ ID NO: 1260536 - DNA, 25 bp, Homo sapien
ctttgagaggcctggagatcttcag

SEQ ID NO: 1260537 - DNA, 25 bp, Homo sapien
ttgagaggcctggagatcttcagcc

SEQ ID NO: 1260538 - DNA, 25 bp, Homo sapien
gaggcctggagatcttcagccccga

SEQ ID NO: 1260539 - DNA, 25 bp, Homo sapien
gcctggagatcttcagccccgaggc

SEQ ID NO: 1260540 - DNA, 25 bp, Homo sapien
aggttgcggcgaaccaagatggcac

SEQ ID NO: 1260541 - DNA, 25 bp, Homo sapien
ttgcggcgaaccaagatggcaccat

SEQ ID NO: 1260542 - DNA, 25 bp, Homo sapien
gcagaggttgcggcgaaccaagatg

SEQ ID NO: 1260543 - DNA, 25 bp, Homo sapien
agaggttgcggcgaaccaagatggc

SEQ ID NO: 1260544 - DNA, 25 bp, Homo sapien
gccgggcgagggacagcccttgcgt

SEQ ID NO: 1260545 - DNA, 25 bp, Homo sapien
cggtgacacaaatgacggggcattc

SEQ ID NO: 1260546 - DNA, 25 bp, Homo sapien
cccttgcgtacgtccagaagggcag

SEQ ID NO: 1260547 - DNA, 25 bp, Homo sapien
cgagggacagcccttgcgtacgtcc

SEQ ID NO: 1260548 - DNA, 25 bp, Homo sapien
gttccccacttccacgacaccggca

SEQ ID NO: 1260549 - DNA, 25 bp, Homo sapien
tggcgcgtggcgctcccactgtgca

SEQ ID NO: 1260550 - DNA, 25 bp, Homo sapien
cacttccacgacaccggcagggggg

SEQ ID NO: 1260551 - DNA, 25 bp, Homo sapien
gggctgttgtgagtggcgcgtggcg

SEQ ID NO: 1260552 - DNA, 25 bp, Homo sapien
ccagccacggtagccggagtgtcca

SEQ ID NO: 1260553 - DNA, 25 bp, Homo sapien
ggccacaccagccacggtagccgga

SEQ ID NO: 1260554 - DNA, 25 bp, Homo sapien
ccagggacgctgtgtggggcagcgg

SEQ ID NO: 1260555 - DNA, 25 bp, Homo sapien
tgccaggccctcagcaaaaccttcc

SEQ ID NO: 1260556 - DNA, 25 bp, Homo sapien
gagctcagacgatcgtctggcctca

SEQ ID NO: 1260557 - DNA, 25 bp, Homo sapien
atcgcagtactccagggcaccgagg

SEQ ID NO: 1260558 - DNA, 25 bp, Homo sapien
cggcctcggctgtgtgtttcttgct

SEQ ID NO: 1260559 - DNA, 25 bp, Homo sapien
accgtgaccggcctcggctgtgtgt

SEQ ID NO: 1260560 - DNA, 25 bp, Homo sapien
tggcatacgtaagcagagagccgga

SEQ ID NO: 1260561 - DNA, 25 bp, Homo sapien
cctagaacggtgcagagttggccca

SEQ ID NO: 1260562 - DNA, 25 bp, Homo sapien
cagcgtccaccttggtgggcccagg

SEQ ID NO: 1260563 - DNA, 25 bp, Homo sapien
gcaggaggtatgcatggcatacgta

SEQ ID NO: 1260564 - DNA, 25 bp, Homo sapien
agggtggagtgggcgtcggcctgct

SEQ ID NO: 1260565 - DNA, 25 bp, Homo sapien
cagggtggagtgggcgtcggcctgc

SEQ ID NO: 1260566 - DNA, 25 bp, Homo sapien
ctcttggatgggggtccggaaactg

SEQ ID NO: 1260567 - DNA, 25 bp, Homo sapien
ggtggagtgggcgtcggcctgctcc

SEQ ID NO: 1260568 - DNA, 25 bp, Homo sapien
tcacccgccaggagcagtgcggcag

SEQ ID NO: 1260569 - DNA, 25 bp, Homo sapien
ggagagattggtgggtgggcctcac

SEQ ID NO: 1260570 - DNA, 25 bp, Homo sapien
gggtgggcctcacccgccaggagca

SEQ ID NO: 1260571 - DNA, 25 bp, Homo sapien
aaaggagagattggtgggtgggcct

SEQ ID NO: 1260572 - DNA, 25 bp, Homo sapien
gcctctggtccctccggagcaggta

SEQ ID NO: 1260573 - DNA, 25 bp, Homo sapien
ggcagcctctggtccctccggagca

SEQ ID NO: 1260574 - DNA, 25 bp, Homo sapien
gcttgtgggcatcggggggcagcct

SEQ ID NO: 1260575 - DNA, 25 bp, Homo sapien
aggcccaggatggcggcaaccgcac

SEQ ID NO: 1260576 - DNA, 25 bp, Homo sapien
ctgcaggaaggggtctgctgggtgg

SEQ ID NO: 1260577 - DNA, 25 bp, Homo sapien
gggtccacaggaggggcccccatgc

SEQ ID NO: 1260578 - DNA, 25 bp, Homo sapien
acaggaggggcccccatgccgccct

SEQ ID NO: 1260579 - DNA, 25 bp, Homo sapien
gaaggggtctgctgggtggggtcca

SEQ ID NO: 1260580 - DNA, 25 bp, Homo sapien
gattgcgtccgagctattgctggcc

SEQ ID NO: 1260581 - DNA, 25 bp, Homo sapien
tccgagctattgctggccggctgca

SEQ ID NO: 1260582 - DNA, 25 bp, Homo sapien
tgtcctcacagattgcgtccgagct

SEQ ID NO: 1260583 - DNA, 25 bp, Homo sapien
gggtccctgtgaggttctgggccag

SEQ ID NO: 1260584 - DNA, 25 bp, Homo sapien
atctacaccccccaccagcacctcc

SEQ ID NO: 1260585 - DNA, 25 bp, Homo sapien
accagcacctccctgtcctgtgccc

SEQ ID NO: 1260586 - DNA, 25 bp, Homo sapien
cccacatctacaccccccaccagca

SEQ ID NO: 1260587 - DNA, 25 bp, Homo sapien
ccttctcccacatctacacccccca

SEQ ID NO: 1260588 - DNA, 25 bp, Homo sapien
cctggttgtcgcctggggagaagtg

SEQ ID NO: 1260589 - DNA, 25 bp, Homo sapien
ggcttgcaggcctggttgtcgcctg

SEQ ID NO: 1260590 - DNA, 25 bp, Homo sapien
caggcctggttgtcgcctggggaga

SEQ ID NO: 1260591 - DNA, 25 bp, Homo sapien
cttgcaggcctggttgtcgcctggg

SEQ ID NO: 1260592 - DNA, 25 bp, Homo sapien
cgccggccgcagccaccgagctcac

SEQ ID NO: 1260593 - DNA, 25 bp, Homo sapien
caaccgccggccgcagccaccgagc

SEQ ID NO: 1260594 - DNA, 25 bp, Homo sapien
accgccggccgcagccaccgagctc

SEQ ID NO: 1260595 - DNA, 25 bp, Homo sapien
ccccaaccgccggccgcagccaccg

SEQ ID NO: 1260596 - DNA, 25 bp, Homo sapien
agctgcttccgctcactcccacttc

SEQ ID NO: 1260597 - DNA, 25 bp, Homo sapien
tcctgtgtggccgtgcacagctgct

SEQ ID NO: 1260598 - DNA, 25 bp, Homo sapien
tgtgtggccgtgcacagctgcttcc

SEQ ID NO: 1260599 - DNA, 25 bp, Homo sapien
agactgtgtcctgtgtggccgtgca

SEQ ID NO: 1260600 - DNA, 25 bp, Homo sapien
gccagccccgcctgcggcagggtct

SEQ ID NO: 1260601 - DNA, 25 bp, Homo sapien
ggtctgcggcctcccctgagacttg

SEQ ID NO: 1260602 - DNA, 25 bp, Homo sapien
tcctcaggaagcgtgggcactggag

SEQ ID NO: 1260603 - DNA, 25 bp, Homo sapien
cactggaggacaggttggcctcccc

SEQ ID NO: 1260604 - DNA, 25 bp, Homo sapien
gccccatgctgctgcgtgggaatgt

SEQ ID NO: 1260605 - DNA, 25 bp, Homo sapien
tcagctcctcgaaggacccctgtgg

SEQ ID NO: 1260606 - DNA, 25 bp, Homo sapien
tttgaggttcgtttctgcggctgtg

SEQ ID NO: 1260607 - DNA, 25 bp, Homo sapien
agcagaccccgctgtggtttgaggt

SEQ ID NO: 1260608 - DNA, 25 bp, Homo sapien
acggacggcacaccgtgttctggga

SEQ ID NO: 1260609 - DNA, 25 bp, Homo sapien
gctgcagcggctcaccatcccgttg

SEQ ID NO: 1260610 - DNA, 25 bp, Homo sapien
tgaccacgtcgttgtagaagcccgg

SEQ ID NO: 1260611 - DNA, 25 bp, Homo sapien
ggcttgcacggcttggagctgacca

SEQ ID NO: 1260612 - DNA, 25 bp, Homo sapien
tggcctgcactcgtggcagcaccgg

SEQ ID NO: 1260613 - DNA, 25 bp, Homo sapien
gtaggtgtccccgacacagtggagc

SEQ ID NO: 1260614 - DNA, 25 bp, Homo sapien
actcgtggcagcaccggtcgttgct

SEQ ID NO: 1260615 - DNA, 25 bp, Homo sapien
agtggagccccgtcacggtgctcag

SEQ ID NO: 1260616 - DNA, 25 bp, Homo sapien
ctcgtctctgctgtcgccagagtct

SEQ ID NO: 1260617 - DNA, 25 bp, Homo sapien
tggctataaggactgtggaggaggg

SEQ ID NO: 1260618 - DNA, 25 bp, Homo sapien
tttccttgcggggtgtggctataag

SEQ ID NO: 1260619 - DNA, 25 bp, Homo sapien
ccagagtctgggttttccttgcggg

SEQ ID NO: 1260620 - DNA, 25 bp, Homo sapien
taaagtaaatgtatgtgattcttgt

SEQ ID NO: 1260621 - DNA, 25 bp, Homo sapien
ttaaagtaaatgtatgtgattcttg

SEQ ID NO: 1260622 - DNA, 25 bp, Homo sapien
aaagtaaatgtatgtgattcttgtc

SEQ ID NO: 1260623 - DNA, 25 bp, Homo sapien
cagagtgactgaagcgagatttcgt

SEQ ID NO: 1260624 - DNA, 25 bp, Homo sapien
gatgccacgatttcgagggaccagg

SEQ ID NO: 1260625 - DNA, 25 bp, Homo sapien
cgtcagcgccttcggcagagtgact

SEQ ID NO: 1260626 - DNA, 25 bp, Homo sapien
ttttcaaggaaatggaggagctgtt

SEQ ID NO: 1260627 - DNA, 25 bp, Homo sapien
tcctcgtgcacgctgcgcgcgtagt

SEQ ID NO: 1260628 - DNA, 25 bp, Homo sapien
gcttggcctcgttcagcgcgttgta

SEQ ID NO: 1260629 - DNA, 25 bp, Homo sapien
cggcgacggcgatcatctgcttggc

SEQ ID NO: 1260630 - DNA, 25 bp, Homo sapien
gaactcgctgtacttgagcacctcc

SEQ ID NO: 1260631 - DNA, 25 bp, Homo sapien
agcggggcacaggtcagcgtcgcct

SEQ ID NO: 1260632 - DNA, 25 bp, Homo sapien
ggcgagcggggcacaggtcagcgtc

SEQ ID NO: 1260633 - DNA, 25 bp, Homo sapien
tttaaggtgcctattggctgcagcg

SEQ ID NO: 1260634 - DNA, 25 bp, Homo sapien
gggcacaggtcagcgtcgcctttcc

SEQ ID NO: 1260635 - DNA, 25 bp, Homo sapien
tcctcggcggtcacgatgccgtcgt

SEQ ID NO: 1260636 - DNA, 25 bp, Homo sapien
gttgtcgtcaatgtcctggccctgc

SEQ ID NO: 1260637 - DNA, 25 bp, Homo sapien
cgtcgtggttggagtcaatgagctc

SEQ ID NO: 1260638 - DNA, 25 bp, Homo sapien
tgctggttctccacggtgcccacgg

SEQ ID NO: 1260639 - DNA, 25 bp, Homo sapien
gggtcctggcgtgccggccaggctg

SEQ ID NO: 1260640 - DNA, 25 bp, Homo sapien
gcccctgccagtcggtcctgggtcc

SEQ ID NO: 1260641 - DNA, 25 bp, Homo sapien
ctgcgagacgggaatgggtcagccc

SEQ ID NO: 1260642 - DNA, 25 bp, Homo sapien
gggaatgggtcagcccacacccagg

SEQ ID NO: 1260643 - DNA, 25 bp, Homo sapien
ggtggaggaacgacaggaactcctc

SEQ ID NO: 1260644 - DNA, 25 bp, Homo sapien
ggtcccggacgatctccttcaccat

SEQ ID NO: 1260645 - DNA, 25 bp, Homo sapien
tggtaccagcggtccttcaggttct

SEQ ID NO: 1260646 - DNA, 25 bp, Homo sapien
ggctgtccgcctggtaccagcggtc

SEQ ID NO: 1260647 - DNA, 25 bp, Homo sapien
ggtatcgaggccgacagacgccagc

SEQ ID NO: 1260648 - DNA, 25 bp, Homo sapien
gcacgcaaatccagaaagttccgag

SEQ ID NO: 1260649 - DNA, 25 bp, Homo sapien
atccagaaagttccgagaggtgctg

SEQ ID NO: 1260650 - DNA, 25 bp, Homo sapien
acagacgccagcacgcaaatccaga

SEQ ID NO: 1260651 - DNA, 25 bp, Homo sapien
aaggcatagcttggacccctccaca

SEQ ID NO: 1260652 - DNA, 25 bp, Homo sapien
atggatggccctgactccccacaga

SEQ ID NO: 1260653 - DNA, 25 bp, Homo sapien
ctccaggattcacacgtccccagaa

SEQ ID NO: 1260654 - DNA, 25 bp, Homo sapien
tcgagggacacagccacccgcgaga

SEQ ID NO: 1260655 - DNA, 25 bp, Homo sapien
ggacatggcctggaccccccacaca

SEQ ID NO: 1260656 - DNA, 25 bp, Homo sapien
aggacatggcctggaccccccacac

SEQ ID NO: 1260657 - DNA, 25 bp, Homo sapien
tctggaggagcggaatcaccctgaa

SEQ ID NO: 1260658 - DNA, 25 bp, Homo sapien
ggaacagcacctcagcatgcatggg

SEQ ID NO: 1260659 - DNA, 25 bp, Homo sapien
caacgactgctgtccctgtgagaag

SEQ ID NO: 1260660 - DNA, 25 bp, Homo sapien
ggtgaagaagccttgagtcccagtc

SEQ ID NO: 1260661 - DNA, 25 bp, Homo sapien
tcacagagctctaggtccaggtggg

SEQ ID NO: 1260662 - DNA, 25 bp, Homo sapien
tgctgagtcccaaaggtagacggag

SEQ ID NO: 1260663 - DNA, 25 bp, Homo sapien
acagagctctaggtccaggtgggcc

SEQ ID NO: 1260664 - DNA, 25 bp, Homo sapien
ggtagacggaggcttcacagaaatg

SEQ ID NO: 1260665 - DNA, 25 bp, Homo sapien
gcttaaagacgcagtcaggacagca

SEQ ID NO: 1260666 - DNA, 25 bp, Homo sapien
aacaggctcaaaagtctccgcgtca

SEQ ID NO: 1260667 - DNA, 25 bp, Homo sapien
tgcaggatttagaacggacaggacc

SEQ ID NO: 1260668 - DNA, 25 bp, Homo sapien
tcattctagaaggtcaaggccaggc

SEQ ID NO: 1260669 - DNA, 25 bp, Homo sapien
accacgggcatgaccgggaagggca

SEQ ID NO: 1260670 - DNA, 25 bp, Homo sapien
gcgactctgcacgttctcctcaaag

SEQ ID NO: 1260671 - DNA, 25 bp, Homo sapien
caggatgccgggcagcgacggagca

SEQ ID NO: 1260672 - DNA, 25 bp, Homo sapien
aacgccacggtacccgctcagctgt

SEQ ID NO: 1260673 - DNA, 25 bp, Homo sapien
tctgcaggacctaactgagtaacgg

SEQ ID NO: 1260674 - DNA, 25 bp, Homo sapien
taacggccgtgaaggtgccgtgacc

SEQ ID NO: 1260675 - DNA, 25 bp, Homo sapien
tgaaggtgccgtgaccagcagagct

SEQ ID NO: 1260676 - DNA, 25 bp, Homo sapien
ctaactgagtaacggccgtgaaggt

SEQ ID NO: 1260677 - DNA, 25 bp, Homo sapien
ggttgggccatgctgttaagacgaa

SEQ ID NO: 1260678 - DNA, 25 bp, Homo sapien
gagcctacatgaacagctacctgga

SEQ ID NO: 1260679 - DNA, 25 bp, Homo sapien
ctggatgtactcacaagcacacgca

SEQ ID NO: 1260680 - DNA, 25 bp, Homo sapien
taagacgaacacgtgtgcacacagc

SEQ ID NO: 1260681 - DNA, 25 bp, Homo sapien
ctcatccactttgagttcctcgttg

SEQ ID NO: 1260682 - DNA, 25 bp, Homo sapien
tttcctcatccactttgagttcctc

SEQ ID NO: 1260683 - DNA, 25 bp, Homo sapien
tcctcatccactttgagttcctcgt

SEQ ID NO: 1260684 - DNA, 25 bp, Homo sapien
atccactttgagttcctcgttgagc

SEQ ID NO: 1260685 - DNA, 25 bp, Homo sapien
tccttctcgctatggcctttactcg

SEQ ID NO: 1260686 - DNA, 25 bp, Homo sapien
gctatggcctttactcgccaaaaac

SEQ ID NO: 1260687 - DNA, 25 bp, Homo sapien
accttatactcgtcccaagacacgt

SEQ ID NO: 1260688 - DNA, 25 bp, Homo sapien
ctgatggcgtcggcaacctccttct

SEQ ID NO: 1260689 - DNA, 25 bp, Homo sapien
cagccggcaacgtctgtgcctcggg

SEQ ID NO: 1260690 - DNA, 25 bp, Homo sapien
aggcatagacaccaccagatgaagg

SEQ ID NO: 1260691 - DNA, 25 bp, Homo sapien
gaagacataagaggcgccctccatg

SEQ ID NO: 1260692 - DNA, 25 bp, Homo sapien
gaaggccccgaagacataagaggcg

SEQ ID NO: 1260693 - DNA, 25 bp, Homo sapien
tccacggcgcggaagtgtgtcttgc

SEQ ID NO: 1260694 - DNA, 25 bp, Homo sapien
gtcttctccatgatccagcgctgca

SEQ ID NO: 1260695 - DNA, 25 bp, Homo sapien
tcctggaagtgctcggccgtcttct

SEQ ID NO: 1260696 - DNA, 25 bp, Homo sapien
gatcttccggtcagtgttcacatcc

SEQ ID NO: 1260697 - DNA, 25 bp, Homo sapien
agtgaactcaggccacgcaaggacc

SEQ ID NO: 1260698 - DNA, 25 bp, Homo sapien
gggaaggcgagctcgtggccaggcc

SEQ ID NO: 1260699 - DNA, 25 bp, Homo sapien
gcgggaaggcgagctcgtggccagg

SEQ ID NO: 1260700 - DNA, 25 bp, Homo sapien
cgggaaggcgagctcgtggccaggc

SEQ ID NO: 1260701 - DNA, 25 bp, Homo sapien
ggcgggaaggcgagctcgtggccag

SEQ ID NO: 1260702 - DNA, 25 bp, Homo sapien
aggttgacccatcttggacccctca

SEQ ID NO: 1260703 - DNA, 25 bp, Homo sapien
cttgtgggtgagtggtcaggttgac

SEQ ID NO: 1260704 - DNA, 25 bp, Homo sapien
caacaggctctcgagactcagggat

SEQ ID NO: 1260705 - DNA, 25 bp, Homo sapien
acaggctctcgagactcagggatgg

SEQ ID NO: 1260706 - DNA, 25 bp, Homo sapien
tgaccactgcagtgccgcgtgggct

SEQ ID NO: 1260707 - DNA, 25 bp, Homo sapien
tgcagcctgcggaggctgcccgtgg

SEQ ID NO: 1260708 - DNA, 25 bp, Homo sapien
ctcagcatggaggacgctgaccact

SEQ ID NO: 1260709 - DNA, 25 bp, Homo sapien
atggaggacgctgaccactgcagtg

SEQ ID NO: 1260710 - DNA, 25 bp, Homo sapien
ttggaaaagatgaccatcagcttcc

SEQ ID NO: 1260711 - DNA, 25 bp, Homo sapien
agatgaccatcagcttcctccggct

SEQ ID NO: 1260712 - DNA, 25 bp, Homo sapien
aaaagatgaccatcagcttcctccg

SEQ ID NO: 1260713 - DNA, 25 bp, Homo sapien
tccggctccgccgcggctccgcgtc

SEQ ID NO: 1260714 - DNA, 25 bp, Homo sapien
tcatcaaagccacccaggtccttgc

SEQ ID NO: 1260715 - DNA, 25 bp, Homo sapien
caaagccacccaggtccttgcctag

SEQ ID NO: 1260716 - DNA, 25 bp, Homo sapien
atcaaagccacccaggtccttgcct

SEQ ID NO: 1260717 - DNA, 25 bp, Homo sapien
ctcatcaaagccacccaggtccttg

SEQ ID NO: 1260718 - DNA, 25 bp, Homo sapien
tctctctcgagtggacgagtggttg

SEQ ID NO: 1260719 - DNA, 25 bp, Homo sapien
ttggcaggccgtgcagacgcgtcca

SEQ ID NO: 1260720 - DNA, 25 bp, Homo sapien
gcttcaccccgttcaggtggtctgg

SEQ ID NO: 1260721 - DNA, 25 bp, Homo sapien
gaagccgcgattgaggtgcccgtcc

SEQ ID NO: 1260722 - DNA, 25 bp, Homo sapien
ggaccccacctggacgccatcgcca

SEQ ID NO: 1260723 - DNA, 25 bp, Homo sapien
cagcacggagccaggccaatgaggg

SEQ ID NO: 1260724 - DNA, 25 bp, Homo sapien
gcagcacggagccaggccaatgagg

SEQ ID NO: 1260725 - DNA, 25 bp, Homo sapien
cctggacgccatcgccacccagggc

SEQ ID NO: 1260726 - DNA, 25 bp, Homo sapien
tgcagggtgtgggccaggtgctggg

SEQ ID NO: 1260727 - DNA, 25 bp, Homo sapien
ggggcgggctgcagggtgtgggcca

SEQ ID NO: 1260728 - DNA, 25 bp, Homo sapien
gcagggtgtgggccaggtgctggga

SEQ ID NO: 1260729 - DNA, 25 bp, Homo sapien
cgggctgcagggtgtgggccaggtg

SEQ ID NO: 1260730 - DNA, 25 bp, Homo sapien
caggacggccgcaggatggggacaa

SEQ ID NO: 1260731 - DNA, 25 bp, Homo sapien
tccaatccaatccccgggcaccacg

SEQ ID NO: 1260732 - DNA, 25 bp, Homo sapien
ccaggacggccgcaggatggggaca

SEQ ID NO: 1260733 - DNA, 25 bp, Homo sapien
gacggccgcaggatggggacaagca

SEQ ID NO: 1260734 - DNA, 25 bp, Homo sapien
gctttgcgaagacagccaaccctaa

SEQ ID NO: 1260735 - DNA, 25 bp, Homo sapien
caaccctaagtgcagagggcgtcag

SEQ ID NO: 1260736 - DNA, 25 bp, Homo sapien
ccccgactgaccaggctttgcgaag

SEQ ID NO: 1260737 - DNA, 25 bp, Homo sapien
cagcttctcactaagaaacaggagg

SEQ ID NO: 1260738 - DNA, 25 bp, Homo sapien
ctgagggcttttcccttccctagtg

SEQ ID NO: 1260739 - DNA, 25 bp, Homo sapien
ttccctagtggtggcataattctat

SEQ ID NO: 1260740 - DNA, 25 bp, Homo sapien
ccttccctagtggtggcataattct

SEQ ID NO: 1260741 - DNA, 25 bp, Homo sapien
ttttcccttccctagtggtggcata

SEQ ID NO: 1260742 - DNA, 25 bp, Homo sapien
tttggccagtaggagaccagacgtg

SEQ ID NO: 1260743 - DNA, 25 bp, Homo sapien
gccgataaacgcgagtccaaccaga

SEQ ID NO: 1260744 - DNA, 25 bp, Homo sapien
ctccgtttcccggtggcattcgtag

SEQ ID NO: 1260745 - DNA, 25 bp, Homo sapien
cacgcggttcagaagcggaagcgca

SEQ ID NO: 1260746 - DNA, 25 bp, Homo sapien
cgcgctcgggatccgaggaccggag

SEQ ID NO: 1260747 - DNA, 25 bp, Homo sapien
gagcgaagcgtcagtgacgccgcca

SEQ ID NO: 1260748 - DNA, 25 bp, Homo sapien
agtgacgccgccaacgggcccggat

SEQ ID NO: 1260749 - DNA, 25 bp, Homo sapien
gggcggtgcgaacgggcgcgacctc

SEQ ID NO: 1260750 - DNA, 25 bp, Homo sapien
gaacttggtgcctgtaccgtcaacc

SEQ ID NO: 1260751 - DNA, 25 bp, Homo sapien
tgtcctacgtgtacgactggtccgc

SEQ ID NO: 1260752 - DNA, 25 bp, Homo sapien
tcttccgtgtctcttatcagtggcg

SEQ ID NO: 1260753 - DNA, 25 bp, Homo sapien
cctggcacagcgaggacgtgtctct

SEQ ID NO: 1260754 - DNA, 25 bp, Homo sapien
gattttacctgggatgtcttctctg

SEQ ID NO: 1260755 - DNA, 25 bp, Homo sapien
gggcttgctgagaaccccatggaca

SEQ ID NO: 1260756 - DNA, 25 bp, Homo sapien
ggattcgaaccaagggctggactcc

SEQ ID NO: 1260757 - DNA, 25 bp, Homo sapien
tggctctgaagaattggccgctgtg

SEQ ID NO: 1260758 - DNA, 25 bp, Homo sapien
tcctcaggtctaagggggtcacggc

SEQ ID NO: 1260759 - DNA, 25 bp, Homo sapien
ccagctcagagtcctcaggtctaag

SEQ ID NO: 1260760 - DNA, 25 bp, Homo sapien
ctaagggggtcacggccctcctgtg

SEQ ID NO: 1260761 - DNA, 25 bp, Homo sapien
gtcccagctcagagtcctcaggtct

SEQ ID NO: 1260762 - DNA, 25 bp, Homo sapien
gcttccccttgggacagcgcgctga

SEQ ID NO: 1260763 - DNA, 25 bp, Homo sapien
tggaccccttcacgcagttcaggga

SEQ ID NO: 1260764 - DNA, 25 bp, Homo sapien
acctgaactgggagtccaagcacag

SEQ ID NO: 1260765 - DNA, 25 bp, Homo sapien
agtcagatgcgcaggcggacagaca

SEQ ID NO: 1260766 - DNA, 25 bp, Homo sapien
ggcagggagcccacggcaggagtgt

SEQ ID NO: 1260767 - DNA, 25 bp, Homo sapien
caggagtgtccgatgcccccagccc

SEQ ID NO: 1260768 - DNA, 25 bp, Homo sapien
gcagcagggtcggcctgcggttctg

SEQ ID NO: 1260769 - DNA, 25 bp, Homo sapien
ggagtgtccgatgcccccagccccg

SEQ ID NO: 1260770 - DNA, 25 bp, Homo sapien
ccctcgtcaagagtccagggtccct

SEQ ID NO: 1260771 - DNA, 25 bp, Homo sapien
ccacgctccggctgggtgagtgaca

SEQ ID NO: 1260772 - DNA, 25 bp, Homo sapien
ctgggtgagtgacaggcatctccca

SEQ ID NO: 1260773 - DNA, 25 bp, Homo sapien
agggtcccttctatggcaaacattg

SEQ ID NO: 1260774 - DNA, 25 bp, Homo sapien
agggcccccattcccggatggtgag

SEQ ID NO: 1260775 - DNA, 25 bp, Homo sapien
ctgaagaacctagagggcccccatt

SEQ ID NO: 1260776 - DNA, 25 bp, Homo sapien
gccccaggcggtgttcagaaaggcc

SEQ ID NO: 1260777 - DNA, 25 bp, Homo sapien
tgcccagggttggcccgtcagtttg

SEQ ID NO: 1260778 - DNA, 25 bp, Homo sapien
gagatggcatctccgcagctcagca

SEQ ID NO: 1260779 - DNA, 25 bp, Homo sapien
taagggctctggatgccaaccagag

SEQ ID NO: 1260780 - DNA, 25 bp, Homo sapien
agcgactaagggctctggatgccaa

SEQ ID NO: 1260781 - DNA, 25 bp, Homo sapien
tgaggccagtttacactctttggtg

SEQ ID NO: 1260782 - DNA, 25 bp, Homo sapien
cacctgagcccgcaggggtgccttt

SEQ ID NO: 1260783 - DNA, 25 bp, Homo sapien
ccgggcacggcacggtctgggcgca

SEQ ID NO: 1260784 - DNA, 25 bp, Homo sapien
gagcccgcaggggtgcctttcagct

SEQ ID NO: 1260785 - DNA, 25 bp, Homo sapien
cacggcacggtctgggcgcacctga

SEQ ID NO: 1260786 - DNA, 25 bp, Homo sapien
gtgtgtggcatgcacgtcctcttgc

SEQ ID NO: 1260787 - DNA, 25 bp, Homo sapien
cacatgcaagcacgcggtcccgtgt

SEQ ID NO: 1260788 - DNA, 25 bp, Homo sapien
tgtgtggcatgcacgtcctcttgcc

SEQ ID NO: 1260789 - DNA, 25 bp, Homo sapien
cacgcggtcccgtgtgtggcatgca

SEQ ID NO: 1260790 - DNA, 25 bp, Homo sapien
ccacaggacgcaggcctcccgaggg

SEQ ID NO: 1260791 - DNA, 25 bp, Homo sapien
tccttgtcctcagggtcgacgtggc

SEQ ID NO: 1260792 - DNA, 25 bp, Homo sapien
cctcccgagggcccagaacagtgct

SEQ ID NO: 1260793 - DNA, 25 bp, Homo sapien
gggccggcacggacagtggtccttg

SEQ ID NO: 1260794 - DNA, 25 bp, Homo sapien
ttgtggtgaccacgggcatcagtag

SEQ ID NO: 1260795 - DNA, 25 bp, Homo sapien
ctctttattgtggtgaccacgggca

SEQ ID NO: 1260796 - DNA, 25 bp, Homo sapien
tattgtggtgaccacgggcatcagt

SEQ ID NO: 1260797 - DNA, 25 bp, Homo sapien
accacgggcatcagtaggagggtcc

SEQ ID NO: 1260798 - DNA, 25 bp, Homo sapien
aggacggccccggagccattgtcca

SEQ ID NO: 1260799 - DNA, 25 bp, Homo sapien
caaacacagaagcgtactgtccagc

SEQ ID NO: 1260800 - DNA, 25 bp, Homo sapien
tgaggacggccccggagccattgtc

SEQ ID NO: 1260801 - DNA, 25 bp, Homo sapien
ggtgaggacggccccggagccattg

SEQ ID NO: 1260802 - DNA, 25 bp, Homo sapien
tgtagcgtgaagaccctgctgttgc

SEQ ID NO: 1260803 - DNA, 25 bp, Homo sapien
gcacctgtagcgtgaagaccctgct

SEQ ID NO: 1260804 - DNA, 25 bp, Homo sapien
gcccctgcacctgtagcgtgaagac

SEQ ID NO: 1260805 - DNA, 25 bp, Homo sapien
cctgcacctgtagcgtgaagaccct

SEQ ID NO: 1260806 - DNA, 25 bp, Homo sapien
tgtgagcccctccaagggtggtccg

SEQ ID NO: 1260807 - DNA, 25 bp, Homo sapien
aagagggaggcgttgcaggtccagg

SEQ ID NO: 1260808 - DNA, 25 bp, Homo sapien
caagagggaggcgttgcaggtccag

SEQ ID NO: 1260809 - DNA, 25 bp, Homo sapien
ctgtgagcccctccaagggtggtcc

SEQ ID NO: 1260810 - DNA, 25 bp, Homo sapien
gggcccgcagccgggccttgccctg

SEQ ID NO: 1260811 - DNA, 25 bp, Homo sapien
acagatgagaacacacaccacgtcc

SEQ ID NO: 1260812 - DNA, 25 bp, Homo sapien
ctggcacagggactcaatacagatg

SEQ ID NO: 1260813 - DNA, 25 bp, Homo sapien
acagggactcaatacagatgagaac

SEQ ID NO: 1260814 - DNA, 25 bp, Homo sapien
ggcgcctgaggccaggcgtgcagca

SEQ ID NO: 1260815 - DNA, 25 bp, Homo sapien
ggcaggggataggtccctaacagga

SEQ ID NO: 1260816 - DNA, 25 bp, Homo sapien
agcagggaccccatgcccagtccaa

SEQ ID NO: 1260817 - DNA, 25 bp, Homo sapien
gataggtccctaacaggacccgcac

SEQ ID NO: 1260818 - DNA, 25 bp, Homo sapien
gccggcgatgccaggcgcccccaga

SEQ ID NO: 1260819 - DNA, 25 bp, Homo sapien
ccggcgatgccaggcgcccccagaa

SEQ ID NO: 1260820 - DNA, 25 bp, Homo sapien
gccccgtcacagcacacggcactgc

SEQ ID NO: 1260821 - DNA, 25 bp, Homo sapien
ccagccccgtcacagcacacggcac

SEQ ID NO: 1260822 - DNA, 25 bp, Homo sapien
gccgtgaaccgacccgaggccaggc

SEQ ID NO: 1260823 - DNA, 25 bp, Homo sapien
tggaagatgccggacacgggggccg

SEQ ID NO: 1260824 - DNA, 25 bp, Homo sapien
gaagatgccggacacgggggccgtg

SEQ ID NO: 1260825 - DNA, 25 bp, Homo sapien
gaaccgacccgaggccaggctcaga

SEQ ID NO: 1260826 - DNA, 25 bp, Homo sapien
cccgctctaagctcccggctccact

SEQ ID NO: 1260827 - DNA, 25 bp, Homo sapien
tggtcccgtcttgcctgtggggccc

SEQ ID NO: 1260828 - DNA, 25 bp, Homo sapien
ctgccccatgagtgtcaggcggtgt

SEQ ID NO: 1260829 - DNA, 25 bp, Homo sapien
gagtgtcaggcggtgtgtgtggtcc

SEQ ID NO: 1260830 - DNA, 25 bp, Homo sapien
gcagctccaccagcgtccgcttgtc

SEQ ID NO: 1260831 - DNA, 25 bp, Homo sapien
agcgtccgcttgtccacccggcggg

SEQ ID NO: 1260832 - DNA, 25 bp, Homo sapien
agccggcagtgaaaggcctcgccca

SEQ ID NO: 1260833 - DNA, 25 bp, Homo sapien
ggaaaccatgcagctccaccagcgt

SEQ ID NO: 1260834 - DNA, 25 bp, Homo sapien
agcgggtccagaagccctgagaacc

SEQ ID NO: 1260835 - DNA, 25 bp, Homo sapien
tccagaagccctgagaaccggcgct

SEQ ID NO: 1260836 - DNA, 25 bp, Homo sapien
gggcagcagcgggtccagaagccct

SEQ ID NO: 1260837 - DNA, 25 bp, Homo sapien
agcagcgggtccagaagccctgaga

SEQ ID NO: 1260838 - DNA, 25 bp, Homo sapien
agggcccaggcacgtctggtctctg

SEQ ID NO: 1260839 - DNA, 25 bp, Homo sapien
gcccaggcacgtctggtctctgggc

SEQ ID NO: 1260840 - DNA, 25 bp, Homo sapien
cagggcccaggcacgtctggtctct

SEQ ID NO: 1260841 - DNA, 25 bp, Homo sapien
cacagggcccaggcacgtctggtct

SEQ ID NO: 1260842 - DNA, 25 bp, Homo sapien
gcggtcacttctgcacctggaggtc

SEQ ID NO: 1260843 - DNA, 25 bp, Homo sapien
tcctgaaactcgtgaagcagagtct

SEQ ID NO: 1260844 - DNA, 25 bp, Homo sapien
tgaagcagagtctccgcggtcactt

SEQ ID NO: 1260845 - DNA, 25 bp, Homo sapien
agagtctccgcggtcacttctgcac

SEQ ID NO: 1260846 - DNA, 25 bp, Homo sapien
ccggtgggagctaccaccacaccct

SEQ ID NO: 1260847 - DNA, 25 bp, Homo sapien
accacaccctgtccggggctcagac

SEQ ID NO: 1260848 - DNA, 25 bp, Homo sapien
caccacaccctgtccggggctcaga

SEQ ID NO: 1260849 - DNA, 25 bp, Homo sapien
tgggacccggtgggagctaccacca

SEQ ID NO: 1260850 - DNA, 25 bp, Homo sapien
tcagccatgtcatgtgggcgtcgga

SEQ ID NO: 1260851 - DNA, 25 bp, Homo sapien
gccgccggacaaagttcagccatgt

SEQ ID NO: 1260852 - DNA, 25 bp, Homo sapien
tcggagaactcaggtcctgaggcct

SEQ ID NO: 1260853 - DNA, 25 bp, Homo sapien
gcttccgcaccgcttccttaaggcg

SEQ ID NO: 1260854 - DNA, 25 bp, Homo sapien
aggaggaccacgaccgcggcccagg

SEQ ID NO: 1260855 - DNA, 25 bp, Homo sapien
gttggggggatctgcgcgctggcca

SEQ ID NO: 1260856 - DNA, 25 bp, Homo sapien
aggacgcgctggcggtggcgttggg

SEQ ID NO: 1260857 - DNA, 25 bp, Homo sapien
ctcgggcagcccctcgcgggaggac

SEQ ID NO: 1260858 - DNA, 25 bp, Homo sapien
ctcagcgcggcgagtctcggcgcca

SEQ ID NO: 1260859 - DNA, 25 bp, Homo sapien
ccagggcgcagtcatggggacggcc

SEQ ID NO: 1260860 - DNA, 25 bp, Homo sapien
cactccgccgcccagtaaatcctcc

SEQ ID NO: 1260861 - DNA, 25 bp, Homo sapien
catgtctgcgcggacctgcccggaa

SEQ ID NO: 1260862 - DNA, 25 bp, Homo sapien
acggtctgcttaggtcacgggtgcc

SEQ ID NO: 1260863 - DNA, 25 bp, Homo sapien
gagaagctcgaggttgccagaacac

SEQ ID NO: 1260864 - DNA, 25 bp, Homo sapien
aaggatgtggcttcgtgttcccaac

SEQ ID NO: 1260865 - DNA, 25 bp, Homo sapien
ccttcggataactgtgggtgggcct

SEQ ID NO: 1260866 - DNA, 25 bp, Homo sapien
gagaaaaggctctgcaggtacccaa

SEQ ID NO: 1260867 - DNA, 25 bp, Homo sapien
tctggcccaccggacataaggaatt

SEQ ID NO: 1260868 - DNA, 25 bp, Homo sapien
ttacctactgtgaaggccagcgcag

SEQ ID NO: 1260869 - DNA, 25 bp, Homo sapien
tccaccagcataggaggacgggctt

SEQ ID NO: 1260870 - DNA, 25 bp, Homo sapien
gacttatggatcctgagccacggcc

SEQ ID NO: 1260871 - DNA, 25 bp, Homo sapien
caggtccaaagacaacacggaagat

SEQ ID NO: 1260872 - DNA, 25 bp, Homo sapien
gctgagaccaaaccccgacttatgg

SEQ ID NO: 1260873 - DNA, 25 bp, Homo sapien
taagctacaaatccagcacacaagg

SEQ ID NO: 1260874 - DNA, 25 bp, Homo sapien
ctgccgaggtcacgctctggtgcgc

SEQ ID NO: 1260875 - DNA, 25 bp, Homo sapien
gtcacgctctggtgcgcggtgccct

SEQ ID NO: 1260876 - DNA, 25 bp, Homo sapien
cagcctgccgaggtcacgctctggt

SEQ ID NO: 1260877 - DNA, 25 bp, Homo sapien
gtccagcctgccgaggtcacgctct

SEQ ID NO: 1260878 - DNA, 25 bp, Homo sapien
gcgcatgcccgttgagcagctgaat

SEQ ID NO: 1260879 - DNA, 25 bp, Homo sapien
tgaatcccgttctggacgaggtgcg

SEQ ID NO: 1260880 - DNA, 25 bp, Homo sapien
atcacaaacaagttcgccagggcgc

SEQ ID NO: 1260881 - DNA, 25 bp, Homo sapien
tacttgaccgtgtaagcaaaggctg

SEQ ID NO: 1260882 - DNA, 25 bp, Homo sapien
ctcaagtgttttaacgcaggggaag

SEQ ID NO: 1260883 - DNA, 25 bp, Homo sapien
caggacacagattttactctttgga

SEQ ID NO: 1260884 - DNA, 25 bp, Homo sapien
gattttactctttggaaagaggtga

SEQ ID NO: 1260885 - DNA, 25 bp, Homo sapien
cacagattttactctttggaaagag

SEQ ID NO: 1260886 - DNA, 25 bp, Homo sapien
taattcacaaaagactttatctttc

SEQ ID NO: 1260887 - DNA, 25 bp, Homo sapien
cgacttcaggaaataattcacaaaa

SEQ ID NO: 1260888 - DNA, 25 bp, Homo sapien
ctccacgacttcaggaaataattca

SEQ ID NO: 1260889 - DNA, 25 bp, Homo sapien
cacgacttcaggaaataattcacaa

SEQ ID NO: 1260890 - DNA, 25 bp, Homo sapien
ctggatgtggataaaagcaagaccg

SEQ ID NO: 1260891 - DNA, 25 bp, Homo sapien
tctgtgcaactggtaccgccttggc

SEQ ID NO: 1260892 - DNA, 25 bp, Homo sapien
tcaagggctgcagtcttcgtgttgc

SEQ ID NO: 1260893 - DNA, 25 bp, Homo sapien
ggaagggaatcagccagaaaactaa

SEQ ID NO: 1260894 - DNA, 25 bp, Homo sapien
ccacgtgtccgggtggaaatccgtg

SEQ ID NO: 1260895 - DNA, 25 bp, Homo sapien
gacgtctctatactgcccagggtgg

SEQ ID NO: 1260896 - DNA, 25 bp, Homo sapien
ggaaatccgtgatagaaagacacag

SEQ ID NO: 1260897 - DNA, 25 bp, Homo sapien
tggagacagaccaggccgggttcca

SEQ ID NO: 1260898 - DNA, 25 bp, Homo sapien
gtgatcatatagatactgggaggtt

SEQ ID NO: 1260899 - DNA, 25 bp, Homo sapien
cccgttgggagtgatcatatagata

SEQ ID NO: 1260900 - DNA, 25 bp, Homo sapien
ttaaacctcccgttgggagtgatca

SEQ ID NO: 1260901 - DNA, 25 bp, Homo sapien
ctggtgttgcacttaaacctcccgt

SEQ ID NO: 1260902 - DNA, 25 bp, Homo sapien
tcccctggattcgggcctcattcat

SEQ ID NO: 1260903 - DNA, 25 bp, Homo sapien
tgatcccctggattcgggcctcatt

SEQ ID NO: 1260904 - DNA, 25 bp, Homo sapien
gatcccctggattcgggcctcattc

SEQ ID NO: 1260905 - DNA, 25 bp, Homo sapien
ctgatcccctggattcgggcctcat

SEQ ID NO: 1260906 - DNA, 25 bp, Homo sapien
tttctgaccacccaacggcatagcc

SEQ ID NO: 1260907 - DNA, 25 bp, Homo sapien
agtttcacggcctcccatcaggagc

SEQ ID NO: 1260908 - DNA, 25 bp, Homo sapien
ccacgggccctgtgcacactccagg

SEQ ID NO: 1260909 - DNA, 25 bp, Homo sapien
acccaacggcatagccttataaggg

SEQ ID NO: 1260910 - DNA, 25 bp, Homo sapien
gaaatccggccacttccaccaaatg

SEQ ID NO: 1260911 - DNA, 25 bp, Homo sapien
atggcaacttggcaactccatcctc

SEQ ID NO: 1260912 - DNA, 25 bp, Homo sapien
agcacagcgcccagacgcccccatc

SEQ ID NO: 1260913 - DNA, 25 bp, Homo sapien
catccaggacagaaatccggccact

SEQ ID NO: 1260914 - DNA, 25 bp, Homo sapien
gcacctggagttggttggaaattca

SEQ ID NO: 1260915 - DNA, 25 bp, Homo sapien
cacctgcatgcgttgacgtgtgtgt

SEQ ID NO: 1260916 - DNA, 25 bp, Homo sapien
accacaagtgcacaagccaggactc

SEQ ID NO: 1260917 - DNA, 25 bp, Homo sapien
atctagagccgcacaccctgtgtgg

SEQ ID NO: 1260918 - DNA, 25 bp, Homo sapien
tgcatgccatcaggacgcacttgtg

SEQ ID NO: 1260919 - DNA, 25 bp, Homo sapien
ttaaaagaggaagcgggaacagcca

SEQ ID NO: 1260920 - DNA, 25 bp, Homo sapien
gacgcagctaatgcacaggcaggaa

SEQ ID NO: 1260921 - DNA, 25 bp, Homo sapien
taatgggcaagagtgacttacacgg

SEQ ID NO: 1260922 - DNA, 25 bp, Homo sapien
cacacgcatcgtaacaagtacttta

SEQ ID NO: 1260923 - DNA, 25 bp, Homo sapien
cacgcatcgtaacaagtactttaac

SEQ ID NO: 1260924 - DNA, 25 bp, Homo sapien
catcgtaacaagtactttaacacgc

SEQ ID NO: 1260925 - DNA, 25 bp, Homo sapien
cacacacgcatcgtaacaagtactt

SEQ ID NO: 1260926 - DNA, 25 bp, Homo sapien
cccaacgctggtcatgggcaatgac

SEQ ID NO: 1260927 - DNA, 25 bp, Homo sapien
tacagatgtactcccgcactctggc

SEQ ID NO: 1260928 - DNA, 25 bp, Homo sapien
atgacacgatgatggagggcccacc

SEQ ID NO: 1260929 - DNA, 25 bp, Homo sapien
aatgacacgatgatggagggcccac

SEQ ID NO: 1260930 - DNA, 25 bp, Homo sapien
ctagttgcagatgatccagaactgg

SEQ ID NO: 1260931 - DNA, 25 bp, Homo sapien
gttgcagatgatccagaactgggat

SEQ ID NO: 1260932 - DNA, 25 bp, Homo sapien
tgcagatgatccagaactgggattc

SEQ ID NO: 1260933 - DNA, 25 bp, Homo sapien
tagttgcagatgatccagaactggg

SEQ ID NO: 1260934 - DNA, 25 bp, Homo sapien
tataaatgacactaggtctctaggt

SEQ ID NO: 1260935 - DNA, 25 bp, Homo sapien
ctataaatgacactaggtctctagg

SEQ ID NO: 1260936 - DNA, 25 bp, Homo sapien
ggtgaacacagacgctacaggcggc

SEQ ID NO: 1260937 - DNA, 25 bp, Homo sapien
gagcaaacacttccagcgtgtggag

SEQ ID NO: 1260938 - DNA, 25 bp, Homo sapien
ctgagaatataaaaaccgcctggtg

SEQ ID NO: 1260939 - DNA, 25 bp, Homo sapien
tacttccacttagctcagagaccgt

SEQ ID NO: 1260940 - DNA, 25 bp, Homo sapien
ctctgggcctcggacgacatagtgc

SEQ ID NO: 1260941 - DNA, 25 bp, Homo sapien
gccaaaattacattcacattcaggc

SEQ ID NO: 1260942 - DNA, 25 bp, Homo sapien
atctgaatcattccaagcctggggt

SEQ ID NO: 1260943 - DNA, 25 bp, Homo sapien
caagcctggggtttatagaacccag

SEQ ID NO: 1260944 - DNA, 25 bp, Homo sapien
caggcagtgaacaaatgaaggtgaa

SEQ ID NO: 1260945 - DNA, 25 bp, Homo sapien
gagggatttccccacacaatgaaga

SEQ ID NO: 1260946 - DNA, 25 bp, Homo sapien
gaggcggctaccgtggaacttgtcc

SEQ ID NO: 1260947 - DNA, 25 bp, Homo sapien
tcctcgcaaccagcgaggaggcggc

SEQ ID NO: 1260948 - DNA, 25 bp, Homo sapien
ggacgcctgacccacagatttgtgg

SEQ ID NO: 1260949 - DNA, 25 bp, Homo sapien
ctggggccacatgtgattttcaaca

SEQ ID NO: 1260950 - DNA, 25 bp, Homo sapien
tggtggccaaggggctccgcctcac

SEQ ID NO: 1260951 - DNA, 25 bp, Homo sapien
accctgggtatcctccgcctgcctg

SEQ ID NO: 1260952 - DNA, 25 bp, Homo sapien
ggcagagagcactctggtggccaag

SEQ ID NO: 1260953 - DNA, 25 bp, Homo sapien
tgaccaagccgaaacacatttcctt

SEQ ID NO: 1260954 - DNA, 25 bp, Homo sapien
tgcaggagcaccttgccaatgccat

SEQ ID NO: 1260955 - DNA, 25 bp, Homo sapien
gtgcaggagcaccttgccaatgcca

SEQ ID NO: 1260956 - DNA, 25 bp, Homo sapien
gggtgcaggagcaccttgccaatgc

SEQ ID NO: 1260957 - DNA, 25 bp, Homo sapien
gagggtgcaggagcaccttgccaat

SEQ ID NO: 1260958 - DNA, 25 bp, Homo sapien
accaggctcgcccagcaggggccgg

SEQ ID NO: 1260959 - DNA, 25 bp, Homo sapien
ggggcaccaggctcgcccagcaggg

SEQ ID NO: 1260960 - DNA, 25 bp, Homo sapien
gactggggcaccaggctcgcccagc

SEQ ID NO: 1260961 - DNA, 25 bp, Homo sapien
aggctcgcccagcaggggccggcag

SEQ ID NO: 1260962 - DNA, 25 bp, Homo sapien
gcagggcgatcagtggcgcggagcc

SEQ ID NO: 1260963 - DNA, 25 bp, Homo sapien
gcgcagggcgatcagtggcgcggag

SEQ ID NO: 1260964 - DNA, 25 bp, Homo sapien
agggcgatcagtggcgcggagcctt

SEQ ID NO: 1260965 - DNA, 25 bp, Homo sapien
tcagcgcagggcgatcagtggcgcg

SEQ ID NO: 1260966 - DNA, 25 bp, Homo sapien
tgcgaaggtagtcctgcttcagcct

SEQ ID NO: 1260967 - DNA, 25 bp, Homo sapien
acagatgtaaggcaccgggtctttc

SEQ ID NO: 1260968 - DNA, 25 bp, Homo sapien
cactcgagaatattcgaagggaggg

SEQ ID NO: 1260969 - DNA, 25 bp, Homo sapien
tggtcggagccctcttactgctggt

SEQ ID NO: 1260970 - DNA, 25 bp, Homo sapien
tccaactcagctcaaggaccccgca

SEQ ID NO: 1260971 - DNA, 25 bp, Homo sapien
ccaactcagctcaaggaccccgcac

SEQ ID NO: 1260972 - DNA, 25 bp, Homo sapien
cacccggaagcccgctgcccagcat

SEQ ID NO: 1260973 - DNA, 25 bp, Homo sapien
gaagtgggcaggcaccaccgccggc

SEQ ID NO: 1260974 - DNA, 25 bp, Homo sapien
accgcacccggaagcccgctgccca

SEQ ID NO: 1260975 - DNA, 25 bp, Homo sapien
ccttcaccgcacccggaagcccgct

SEQ ID NO: 1260976 - DNA, 25 bp, Homo sapien
tgggacgttcaagacagcactgaag

SEQ ID NO: 1260977 - DNA, 25 bp, Homo sapien
gctgcatcagactagctccaactca

SEQ ID NO: 1260978 - DNA, 25 bp, Homo sapien
ggctccattgggacgttcaagacag

SEQ ID NO: 1260979 - DNA, 25 bp, Homo sapien
agtcactctggtggctccattggga

SEQ ID NO: 1260980 - DNA, 25 bp, Homo sapien
atgggccagggatctcccctcaggc

SEQ ID NO: 1260981 - DNA, 25 bp, Homo sapien
gccccagcgggttcctctgcctaag

SEQ ID NO: 1260982 - DNA, 25 bp, Homo sapien
gccaatgggccagggatctcccctc

SEQ ID NO: 1260983 - DNA, 25 bp, Homo sapien
gggccccagcgggttcctctgccta

SEQ ID NO: 1260984 - DNA, 25 bp, Homo sapien
gggccgatggaaatgggacactcac

SEQ ID NO: 1260985 - DNA, 25 bp, Homo sapien
tccaccagactgctccggaggctgg

SEQ ID NO: 1260986 - DNA, 25 bp, Homo sapien
tggcaggaaaccttggcctgaccca

SEQ ID NO: 1260987 - DNA, 25 bp, Homo sapien
aggctggacggaagcccgggccgat

SEQ ID NO: 1260988 - DNA, 25 bp, Homo sapien
tgacggactgcaagttccgggcacc

SEQ ID NO: 1260989 - DNA, 25 bp, Homo sapien
aaccacgccctaggctcaggtgcta

SEQ ID NO: 1260990 - DNA, 25 bp, Homo sapien
tcacgcacatccctgccgagagtgg

SEQ ID NO: 1260991 - DNA, 25 bp, Homo sapien
ggtgctagactaagcgagatactca

SEQ ID NO: 1260992 - DNA, 25 bp, Homo sapien
cccggcgccgcttagagacttgttc

SEQ ID NO: 1260993 - DNA, 25 bp, Homo sapien
cagtctggagtctaacagttcaggg

SEQ ID NO: 1260994 - DNA, 25 bp, Homo sapien
ctggcaagaggatggcaaccggact

SEQ ID NO: 1260995 - DNA, 25 bp, Homo sapien
taaatacacacgcactaagtggcag

SEQ ID NO: 1260996 - DNA, 25 bp, Homo sapien
agtgtcccagctgacgggaaacccg

SEQ ID NO: 1260997 - DNA, 25 bp, Homo sapien
caggatcgaggctgcccgtcctggg

SEQ ID NO: 1260998 - DNA, 25 bp, Homo sapien
ggtcaagtccccgacatgaccctga

SEQ ID NO: 1260999 - DNA, 25 bp, Homo sapien
cggccgagtggtcaagtccccgaca

SEQ ID NO: 1261000 - DNA, 25 bp, Homo sapien
aacggagaagcgtcgcgcagggtcc

SEQ ID NO: 1261001 - DNA, 25 bp, Homo sapien
ccggctccggcaggggggacgagcg

SEQ ID NO: 1261002 - DNA, 25 bp, Homo sapien
agcgggcccgaggacccggcgcagg

SEQ ID NO: 1261003 - DNA, 25 bp, Homo sapien
tcgggttccgcgcaggcaggctcgg

SEQ ID NO: 1261004 - DNA, 25 bp, Homo sapien
attgggcccaccgaacccgccgcag

SEQ ID NO: 1261005 - DNA, 25 bp, Homo sapien
tctccctgtcgctgcgcgtgggccg

SEQ ID NO: 1261006 - DNA, 25 bp, Homo sapien
tcgcggggcggaaccagcctagctt

SEQ ID NO: 1261007 - DNA, 25 bp, Homo sapien
cgctcaggctcgccgtagtcgaggc

SEQ ID NO: 1261008 - DNA, 25 bp, Homo sapien
ctcacagccatgctcggtcaatggg

SEQ ID NO: 1261009 - DNA, 25 bp, Homo sapien
tcagcggcccaaggaggtgagctca

SEQ ID NO: 1261010 - DNA, 25 bp, Homo sapien
tgagctcacagccatgctcggtcaa

SEQ ID NO: 1261011 - DNA, 25 bp, Homo sapien
catgctcggtcaatggggcctggcc

SEQ ID NO: 1261012 - DNA, 25 bp, Homo sapien
tggtcatggtgcagtgaccacagga

SEQ ID NO: 1261013 - DNA, 25 bp, Homo sapien
ctgcaccgggccagcgaggggatgg

SEQ ID NO: 1261014 - DNA, 25 bp, Homo sapien
atgccgggagctgggttcgccccac

SEQ ID NO: 1261015 - DNA, 25 bp, Homo sapien
ggacccccacatgccgggagctggg

SEQ ID NO: 1261016 - DNA, 25 bp, Homo sapien
tgtgtacgtgtgtcaagcctagcca

SEQ ID NO: 1261017 - DNA, 25 bp, Homo sapien
ttctggcgggagtctcagccgaaga

SEQ ID NO: 1261018 - DNA, 25 bp, Homo sapien
ggtgatgtacccatgctccgtgtgt

SEQ ID NO: 1261019 - DNA, 25 bp, Homo sapien
tcttggcctggtccttgcagctgtg

SEQ ID NO: 1261020 - DNA, 25 bp, Homo sapien
gcagcattgcatagtgaccagccga

SEQ ID NO: 1261021 - DNA, 25 bp, Homo sapien
caaagtggctttatgcgcaggctct

SEQ ID NO: 1261022 - DNA, 25 bp, Homo sapien
cctgcaatatgagccgaaagacccc

SEQ ID NO: 1261023 - DNA, 25 bp, Homo sapien
caaagtcagacgaggcctatagcaa

SEQ ID NO: 1261024 - DNA, 25 bp, Homo sapien
agggagccagctaacaggtcagtgt

SEQ ID NO: 1261025 - DNA, 25 bp, Homo sapien
gcttgtgacatgagcaacccaggcc

SEQ ID NO: 1261026 - DNA, 25 bp, Homo sapien
tgacacgggccttaaaagtggcttg

SEQ ID NO: 1261027 - DNA, 25 bp, Homo sapien
ggcacgaagtaacacaggccctgag

SEQ ID NO: 1261028 - DNA, 25 bp, Homo sapien
atttcctccgccatgcgcgccagac

SEQ ID NO: 1261029 - DNA, 25 bp, Homo sapien
ctggatacacctgcggaactggagc

SEQ ID NO: 1261030 - DNA, 25 bp, Homo sapien
ggcagcctcggcctcgcgcatttcc

SEQ ID NO: 1261031 - DNA, 25 bp, Homo sapien
tacacctgcggaactggagctccgt

SEQ ID NO: 1261032 - DNA, 25 bp, Homo sapien
gatgtcagcgttggccgcctgcact

SEQ ID NO: 1261033 - DNA, 25 bp, Homo sapien
ttggtccagggcgtgctggtccgcg

SEQ ID NO: 1261034 - DNA, 25 bp, Homo sapien
gatggccaacgggtcccgctgctct

SEQ ID NO: 1261035 - DNA, 25 bp, Homo sapien
aacgggtcccgctgctcttggtcca

SEQ ID NO: 1261036 - DNA, 25 bp, Homo sapien
gttcacgtccgctccgttttgcagc

SEQ ID NO: 1261037 - DNA, 25 bp, Homo sapien
cccagcagcgtggcgtggtgcaggg

SEQ ID NO: 1261038 - DNA, 25 bp, Homo sapien
ggaactcacagacgatcaaggagcc

SEQ ID NO: 1261039 - DNA, 25 bp, Homo sapien
acgtccgctccgttttgcagcagga

SEQ ID NO: 1261040 - DNA, 25 bp, Homo sapien
tcggcctcagtgtccccgtctgcct

SEQ ID NO: 1261041 - DNA, 25 bp, Homo sapien
tgcgccaagagccccgggtgcagct

SEQ ID NO: 1261042 - DNA, 25 bp, Homo sapien
acggcctgcaccagcggcgtcttgc

SEQ ID NO: 1261043 - DNA, 25 bp, Homo sapien
gccgccagcgcaggaaggtcgcggg

SEQ ID NO: 1261044 - DNA, 25 bp, Homo sapien
ctcagtgacgctgtccaccacagag

SEQ ID NO: 1261045 - DNA, 25 bp, Homo sapien
gacgtccgagctgccatccgagctg

SEQ ID NO: 1261046 - DNA, 25 bp, Homo sapien
ccaaggccactgtcgctactcagac

SEQ ID NO: 1261047 - DNA, 25 bp, Homo sapien
cacagagcccgagccgaaagccagg

SEQ ID NO: 1261048 - DNA, 25 bp, Homo sapien
tgcaggtccgcagggaagggggtcc

SEQ ID NO: 1261049 - DNA, 25 bp, Homo sapien
aggcccagactccgtccagagccct

SEQ ID NO: 1261050 - DNA, 25 bp, Homo sapien
gaggcccagactccgtccagagccc

SEQ ID NO: 1261051 - DNA, 25 bp, Homo sapien
ggaggcccagactccgtccagagcc

SEQ ID NO: 1261052 - DNA, 25 bp, Homo sapien
ctgacagtcagggccttggcctcca

SEQ ID NO: 1261053 - DNA, 25 bp, Homo sapien
tgacagtcagggccttggcctccag

SEQ ID NO: 1261054 - DNA, 25 bp, Homo sapien
cggaacttacgatccagggtgccca

SEQ ID NO: 1261055 - DNA, 25 bp, Homo sapien
ccctgcgtcgaagtaggagaagagc

SEQ ID NO: 1261056 - DNA, 25 bp, Homo sapien
gagtctcggcggaacttacgatcca

SEQ ID NO: 1261057 - DNA, 25 bp, Homo sapien
gagtccagctcgtcgggacagaaga

SEQ ID NO: 1261058 - DNA, 25 bp, Homo sapien
cgggagtctgcggagcctgaggtgc

SEQ ID NO: 1261059 - DNA, 25 bp, Homo sapien
ttgacggagtccatccccgaccaag

SEQ ID NO: 1261060 - DNA, 25 bp, Homo sapien
aaccccaggtcacgccgggagtctg

SEQ ID NO: 1261061 - DNA, 25 bp, Homo sapien
cagtgcgtgttcagagtgtggaaca

SEQ ID NO: 1261062 - DNA, 25 bp, Homo sapien
gaacgggctcaagccggaccttgcg

SEQ ID NO: 1261063 - DNA, 25 bp, Homo sapien
gggctggtgccatgggcgccttccg

SEQ ID NO: 1261064 - DNA, 25 bp, Homo sapien
tgtggggccgcaggcacttctgcac

SEQ ID NO: 1261065 - DNA, 25 bp, Homo sapien
tatttgtccttgatccaggcctcct

SEQ ID NO: 1261066 - DNA, 25 bp, Homo sapien
gatctgattcacagcgctgtttcca

SEQ ID NO: 1261067 - DNA, 25 bp, Homo sapien
tagatctgattcacagcgctgtttc

SEQ ID NO: 1261068 - DNA, 25 bp, Homo sapien
attcacagcgctgtttccaagctca

SEQ ID NO: 1261069 - DNA, 25 bp, Homo sapien
catagatctgattcacagcgctgtt

SEQ ID NO: 1261070 - DNA, 25 bp, Homo sapien
cttggagcagtggacacccaggctc

SEQ ID NO: 1261071 - DNA, 25 bp, Homo sapien
gctcccacgagtccagcgtcaggga

SEQ ID NO: 1261072 - DNA, 25 bp, Homo sapien
ggaccgcaccttggagcagtggaca

SEQ ID NO: 1261073 - DNA, 25 bp, Homo sapien
cagcgtcagggaccgcaccttggag

SEQ ID NO: 1261074 - DNA, 25 bp, Homo sapien
cggagtcgatgctgctcgtggacgg

SEQ ID NO: 1261075 - DNA, 25 bp, Homo sapien
tggctgttgccggccacactctgca

SEQ ID NO: 1261076 - DNA, 25 bp, Homo sapien
gatgccggagcactcaatgcagagc

SEQ ID NO: 1261077 - DNA, 25 bp, Homo sapien
cccgagtgtcggtggcggagtcgat

SEQ ID NO: 1261078 - DNA, 25 bp, Homo sapien
tagcaactgtcagggctctcgcggt

SEQ ID NO: 1261079 - DNA, 25 bp, Homo sapien
aactgtcagggctctcgcggtaggc

SEQ ID NO: 1261080 - DNA, 25 bp, Homo sapien
caactgtcagggctctcgcggtagg

SEQ ID NO: 1261081 - DNA, 25 bp, Homo sapien
acccaggcttgccgcagcttctcgg

SEQ ID NO: 1261082 - DNA, 25 bp, Homo sapien
gagcacaggcggaggtcatccacca

SEQ ID NO: 1261083 - DNA, 25 bp, Homo sapien
agcacctcgaagcagaacctccgct

SEQ ID NO: 1261084 - DNA, 25 bp, Homo sapien
tccgctcgatgtcctcacacggctt

SEQ ID NO: 1261085 - DNA, 25 bp, Homo sapien
ctcacacggcttcacagagcacagg

SEQ ID NO: 1261086 - DNA, 25 bp, Homo sapien
ccagctggctgttctgaatggagaa

SEQ ID NO: 1261087 - DNA, 25 bp, Homo sapien
gctgttctgaatggagaaccagcgc

SEQ ID NO: 1261088 - DNA, 25 bp, Homo sapien
ttcttctggtagaccagctggctgt

SEQ ID NO: 1261089 - DNA, 25 bp, Homo sapien
cttgagcttcttctggtagaccagc

SEQ ID NO: 1261090 - DNA, 25 bp, Homo sapien
ccatgtcttgaaagcgttgctggcc

SEQ ID NO: 1261091 - DNA, 25 bp, Homo sapien
gaaagcgttgctggccctcttgaag

SEQ ID NO: 1261092 - DNA, 25 bp, Homo sapien
tgctggccctcttgaagaggtagcc

SEQ ID NO: 1261093 - DNA, 25 bp, Homo sapien
ccctcttgaagaggtagccctccat

SEQ ID NO: 1261094 - DNA, 25 bp, Homo sapien
ccactgggcgcgtccacgtcaaact

SEQ ID NO: 1261095 - DNA, 25 bp, Homo sapien
gcgtccacgtcaaactccactttgg

SEQ ID NO: 1261096 - DNA, 25 bp, Homo sapien
cgtcaaactccactttggactcatc

SEQ ID NO: 1261097 - DNA, 25 bp, Homo sapien
tccacgtcaaactccactttggact

SEQ ID NO: 1261098 - DNA, 25 bp, Homo sapien
caggggccctgctaccctccgtgct

SEQ ID NO: 1261099 - DNA, 25 bp, Homo sapien
gggccctgctaccctccgtgctttc

SEQ ID NO: 1261100 - DNA, 25 bp, Homo sapien
gggatggaacccgccccctcagtgc

SEQ ID NO: 1261101 - DNA, 25 bp, Homo sapien
acggaccacacgctcagacgagaga

SEQ ID NO: 1261102 - DNA, 25 bp, Homo sapien
acggcccacggaccacacgctcaga

SEQ ID NO: 1261103 - DNA, 25 bp, Homo sapien
ttcttgacctgagcaaggcccccag

SEQ ID NO: 1261104 - DNA, 25 bp, Homo sapien
cgctcagacgagagaccctctgttc

SEQ ID NO: 1261105 - DNA, 25 bp, Homo sapien
gcccgagagtgccggccccacccca

SEQ ID NO: 1261106 - DNA, 25 bp, Homo sapien
tagaggagggaaaggcaccgcccca

SEQ ID NO: 1261107 - DNA, 25 bp, Homo sapien
tgtgtgtcccgccatctggcaggcc

SEQ ID NO: 1261108 - DNA, 25 bp, Homo sapien
tgggcggacagagccccattcagga

SEQ ID NO: 1261109 - DNA, 25 bp, Homo sapien
ccagcaggctgcgatcaggaaggaa

SEQ ID NO: 1261110 - DNA, 25 bp, Homo sapien
tgagtgacggctgccaactcctggt

SEQ ID NO: 1261111 - DNA, 25 bp, Homo sapien
gtgacggctgccaactcctggtgac

SEQ ID NO: 1261112 - DNA, 25 bp, Homo sapien
ccagtgagtgacggctgccaactcc

SEQ ID NO: 1261113 - DNA, 25 bp, Homo sapien
agtgagtgacggctgccaactcctg

SEQ ID NO: 1261114 - DNA, 25 bp, Homo sapien
ccactgcacacatcaaagggagcag

SEQ ID NO: 1261115 - DNA, 25 bp, Homo sapien
gagcagccttggtcccctagagagg

SEQ ID NO: 1261116 - DNA, 25 bp, Homo sapien
caggcaagcaaaggccccgcaagga

SEQ ID NO: 1261117 - DNA, 25 bp, Homo sapien
ggtgaccaccgcctcaaaaggagat

SEQ ID NO: 1261118 - DNA, 25 bp, Homo sapien
cacgcttttccaccgcagagtcgat

SEQ ID NO: 1261119 - DNA, 25 bp, Homo sapien
ccgcagagtcgatcaccagctggtc

SEQ ID NO: 1261120 - DNA, 25 bp, Homo sapien
tgctttcgctccatctcacgctttt

SEQ ID NO: 1261121 - DNA, 25 bp, Homo sapien
ctggatggcggcgtgctttcgctcc

SEQ ID NO: 1261122 - DNA, 25 bp, Homo sapien
cattagggaaggtcacggaggcctg

SEQ ID NO: 1261123 - DNA, 25 bp, Homo sapien
ggtggcattagggaaggtcacggag

SEQ ID NO: 1261124 - DNA, 25 bp, Homo sapien
ttgggggtggcattagggaaggtca

SEQ ID NO: 1261125 - DNA, 25 bp, Homo sapien
tagggaaggtcacggaggcctggcc

SEQ ID NO: 1261126 - DNA, 25 bp, Homo sapien
aagctggactgggcgtgcatgaagg

SEQ ID NO: 1261127 - DNA, 25 bp, Homo sapien
gaagctggactgggcgtgcatgaag

SEQ ID NO: 1261128 - DNA, 25 bp, Homo sapien
gctggactgggcgtgcatgaaggac

SEQ ID NO: 1261129 - DNA, 25 bp, Homo sapien
tggactgggcgtgcatgaaggacag

SEQ ID NO: 1261130 - DNA, 25 bp, Homo sapien
agagtccaggatctcaaacttcttc

SEQ ID NO: 1261131 - DNA, 25 bp, Homo sapien
gtccaggatctcaaacttcttcttg

SEQ ID NO: 1261132 - DNA, 25 bp, Homo sapien
ccaggatctcaaacttcttcttggc

SEQ ID NO: 1261133 - DNA, 25 bp, Homo sapien
tcttcttggcctgcagaacattgat

SEQ ID NO: 1261134 - DNA, 25 bp, Homo sapien
tcggggcctgggcgttcctcaccag

SEQ ID NO: 1261135 - DNA, 25 bp, Homo sapien
caggtggcggaagcacttcctggtg

SEQ ID NO: 1261136 - DNA, 25 bp, Homo sapien
ggtcctcccgcaccttgtcaaactg

SEQ ID NO: 1261137 - DNA, 25 bp, Homo sapien
ggagcacatagtccagtgccaggtg

SEQ ID NO: 1261138 - DNA, 25 bp, Homo sapien
gctcaccgcaatctctgcctcgcga

SEQ ID NO: 1261139 - DNA, 25 bp, Homo sapien
cgcaatctctgcctcgcgagttcaa

SEQ ID NO: 1261140 - DNA, 25 bp, Homo sapien
accgcaatctctgcctcgcgagttc

SEQ ID NO: 1261141 - DNA, 25 bp, Homo sapien
tcaccgcaatctctgcctcgcgagt

SEQ ID NO: 1261142 - DNA, 25 bp, Homo sapien
caaacccaacgtggactggacctct

SEQ ID NO: 1261143 - DNA, 25 bp, Homo sapien
cttgtggagccgctgcacagcctgg

SEQ ID NO: 1261144 - DNA, 25 bp, Homo sapien
ctttctttgctcctgggcatagcct

SEQ ID NO: 1261145 - DNA, 25 bp, Homo sapien
tgctgaccccgatcatctgctccag

SEQ ID NO: 1261146 - DNA, 25 bp, Homo sapien
tttgacaaagctctggagctgctgc

SEQ ID NO: 1261147 - DNA, 25 bp, Homo sapien
gctgccgcacggacctctgggcctg

SEQ ID NO: 1261148 - DNA, 25 bp, Homo sapien
ctgctgccgcacggacctctgggcc

SEQ ID NO: 1261149 - DNA, 25 bp, Homo sapien
tctttgacaaagctctggagctgct

SEQ ID NO: 1261150 - DNA, 25 bp, Homo sapien
agaggcgggcagagatccttggggt

SEQ ID NO: 1261151 - DNA, 25 bp, Homo sapien
gcagaggcgggcagagatccttggg

SEQ ID NO: 1261152 - DNA, 25 bp, Homo sapien
cagaggcgggcagagatccttgggg

SEQ ID NO: 1261153 - DNA, 25 bp, Homo sapien
tagttcaccacctcctgtaggctgt

SEQ ID NO: 1261154 - DNA, 25 bp, Homo sapien
tggtagttcaccacctcctgtaggc

SEQ ID NO: 1261155 - DNA, 25 bp, Homo sapien
tgtggtagttcaccacctcctgtag

SEQ ID NO: 1261156 - DNA, 25 bp, Homo sapien
catgtggtagttcaccacctcctgt

SEQ ID NO: 1261157 - DNA, 25 bp, Homo sapien
ctggaggagcagatgggaacccgtg

SEQ ID NO: 1261158 - DNA, 25 bp, Homo sapien
ggtcagaggtcagtcggcccctcac

SEQ ID NO: 1261159 - DNA, 25 bp, Homo sapien
aggtcagaggtcagtcggcccctca

SEQ ID NO: 1261160 - DNA, 25 bp, Homo sapien
gctgggacaggtcgcggacgccgct

SEQ ID NO: 1261161 - DNA, 25 bp, Homo sapien
gagatgacggtgtcgccctggcact

SEQ ID NO: 1261162 - DNA, 25 bp, Homo sapien
cctgctggtgctgacgtaggcctta

SEQ ID NO: 1261163 - DNA, 25 bp, Homo sapien
gacgccgctcacgaaaagcctgctg

SEQ ID NO: 1261164 - DNA, 25 bp, Homo sapien
tcccagatgggacgagactcagggc

SEQ ID NO: 1261165 - DNA, 25 bp, Homo sapien
acacatgctaagacacagggaccag

SEQ ID NO: 1261166 - DNA, 25 bp, Homo sapien
cagggtaggttccactcagggcgtt

SEQ ID NO: 1261167 - DNA, 25 bp, Homo sapien
ggctcatggataaggctgcccactc

SEQ ID NO: 1261168 - DNA, 25 bp, Homo sapien
cgtccgtctccacctcgtcaatggt

SEQ ID NO: 1261169 - DNA, 25 bp, Homo sapien
agtttggcctcaatctccaccacgt

SEQ ID NO: 1261170 - DNA, 25 bp, Homo sapien
cgtctccacctcgtcaatggtcgcc

SEQ ID NO: 1261171 - DNA, 25 bp, Homo sapien
cttgtccagtttggcctcaatctcc

SEQ ID NO: 1261172 - DNA, 25 bp, Homo sapien
aggactgggaccaggttcagtgcac

SEQ ID NO: 1261173 - DNA, 25 bp, Homo sapien
tgggaccaggttcagtgcacttccc

SEQ ID NO: 1261174 - DNA, 25 bp, Homo sapien
agtcaaccctggacccatctggagc

SEQ ID NO: 1261175 - DNA, 25 bp, Homo sapien
ccgcctctcctctaggagttcagag

SEQ ID NO: 1261176 - DNA, 25 bp, Homo sapien
agcccatccaggtctggcacccatg

SEQ ID NO: 1261177 - DNA, 25 bp, Homo sapien
ccactgcactactgcagcccatcca

SEQ ID NO: 1261178 - DNA, 25 bp, Homo sapien
gcacccatgcactgtgggacagggt

SEQ ID NO: 1261179 - DNA, 25 bp, Homo sapien
agaccagctggggagagacgccccc

SEQ ID NO: 1261180 - DNA, 25 bp, Homo sapien
ctcacagctgcaagcggcatggtcc

SEQ ID NO: 1261181 - DNA, 25 bp, Homo sapien
tccgctggaaagacgggtaggccat

SEQ ID NO: 1261182 - DNA, 25 bp, Homo sapien
aagcggcatggtccgctggaaagac

SEQ ID NO: 1261183 - DNA, 25 bp, Homo sapien
gacgggtaggccatcctcctcagag

SEQ ID NO: 1261184 - DNA, 25 bp, Homo sapien
atcaccagagaagcctcggcgggag

SEQ ID NO: 1261185 - DNA, 25 bp, Homo sapien
gagaagagttaaggcatgacatcac

SEQ ID NO: 1261186 - DNA, 25 bp, Homo sapien
agatggatcgggcacgtgaccaccc

SEQ ID NO: 1261187 - DNA, 25 bp, Homo sapien
gagaatccccggaagacaggaggca

SEQ ID NO: 1261188 - DNA, 25 bp, Homo sapien
gcagccctccacacaatcggctcac

SEQ ID NO: 1261189 - DNA, 25 bp, Homo sapien
tcgtaccttgctaccctgaccggtg

SEQ ID NO: 1261190 - DNA, 25 bp, Homo sapien
ggccaggactccaggtctagggcag

SEQ ID NO: 1261191 - DNA, 25 bp, Homo sapien
agggcctacagtccctcgtaccttg

SEQ ID NO: 1261192 - DNA, 25 bp, Homo sapien
ttgctaccctgaccggtgtcccagg

SEQ ID NO: 1261193 - DNA, 25 bp, Homo sapien
tgtcctcaattaggagctggagctg

SEQ ID NO: 1261194 - DNA, 25 bp, Homo sapien
aatctcgctgtggtgtccgctgacc

SEQ ID NO: 1261195 - DNA, 25 bp, Homo sapien
gaggactctgaatcccgaagcaggg

SEQ ID NO: 1261196 - DNA, 25 bp, Homo sapien
cagaacagagaagggaccatcctcc

SEQ ID NO: 1261197 - DNA, 25 bp, Homo sapien
caggaaactcaagttacgcccttag

SEQ ID NO: 1261198 - DNA, 25 bp, Homo sapien
tcgaaccccagttaaatcacagcct

SEQ ID NO: 1261199 - DNA, 25 bp, Homo sapien
agggcagtcactctacggcacctac

SEQ ID NO: 1261200 - DNA, 25 bp, Homo sapien
tcaagttacgcccttagggcctgcc

SEQ ID NO: 1261201 - DNA, 25 bp, Homo sapien
ctggaagagggcagtacagggccgt

SEQ ID NO: 1261202 - DNA, 25 bp, Homo sapien
gtgagtgggttccagcacccccaca

SEQ ID NO: 1261203 - DNA, 25 bp, Homo sapien
catgagagccggttaccagagagaa

SEQ ID NO: 1261204 - DNA, 25 bp, Homo sapien
tcctgtaacaggctcccatgagagc

SEQ ID NO: 1261205 - DNA, 25 bp, Homo sapien
tccagggatacagaggctccccgtg

SEQ ID NO: 1261206 - DNA, 25 bp, Homo sapien
tcctcaatgcaggatcctagggtgc

SEQ ID NO: 1261207 - DNA, 25 bp, Homo sapien
tcagcaacagaagatgggagagcag

SEQ ID NO: 1261208 - DNA, 25 bp, Homo sapien
ggaggtccattaggcttctgacgga

SEQ ID NO: 1261209 - DNA, 25 bp, Homo sapien
gcacgagctcgtgcagaggaggggg

SEQ ID NO: 1261210 - DNA, 25 bp, Homo sapien
cccgcacgagctcgtgcagaggagg

SEQ ID NO: 1261211 - DNA, 25 bp, Homo sapien
cacgagctcgtgcagaggagggggc

SEQ ID NO: 1261212 - DNA, 25 bp, Homo sapien
ccgcacgagctcgtgcagaggaggg

SEQ ID NO: 1261213 - DNA, 25 bp, Homo sapien
attgtcgtttgccaaatgtccacca

SEQ ID NO: 1261214 - DNA, 25 bp, Homo sapien
tgcctccattgtcgtttgccaaatg

SEQ ID NO: 1261215 - DNA, 25 bp, Homo sapien
aagcaaagccgatgcacacttgtgc

SEQ ID NO: 1261216 - DNA, 25 bp, Homo sapien
tttctttgcctccattgtcgtttgc

SEQ ID NO: 1261217 - DNA, 25 bp, Homo sapien
acatgtagttcacgcaggtgtacac

SEQ ID NO: 1261218 - DNA, 25 bp, Homo sapien
atgtagttcacgcaggtgtacacgc

SEQ ID NO: 1261219 - DNA, 25 bp, Homo sapien
ctgtgaacatgtagttcacgcaggt

SEQ ID NO: 1261220 - DNA, 25 bp, Homo sapien
tgaacatgtagttcacgcaggtgta

SEQ ID NO: 1261221 - DNA, 25 bp, Homo sapien
cagggcaggagcgtcttttgttcca

SEQ ID NO: 1261222 - DNA, 25 bp, Homo sapien
ggcaggagcgtcttttgttccaacc

SEQ ID NO: 1261223 - DNA, 25 bp, Homo sapien
ggccgcacagggcaggagcgtcttt

SEQ ID NO: 1261224 - DNA, 25 bp, Homo sapien
gcaggagcgtcttttgttccaaccc

SEQ ID NO: 1261225 - DNA, 25 bp, Homo sapien
aagcgcggggagtccttgacgcact

SEQ ID NO: 1261226 - DNA, 25 bp, Homo sapien
gagtccttgacgcactcctcgaact

SEQ ID NO: 1261227 - DNA, 25 bp, Homo sapien
tcctcgaactccacggtcatggctg

SEQ ID NO: 1261228 - DNA, 25 bp, Homo sapien
gcggcgctcactggcacgaggaccg

SEQ ID NO: 1261229 - DNA, 25 bp, Homo sapien
ttgaacgcaacctatgctggactct

SEQ ID NO: 1261230 - DNA, 25 bp, Homo sapien
ccactggctgtcaccggcgtgatga

SEQ ID NO: 1261231 - DNA, 25 bp, Homo sapien
gatgagctgccggtgtttgaacgca

SEQ ID NO: 1261232 - DNA, 25 bp, Homo sapien
agtgcccagcgacttccacgctcgt

SEQ ID NO: 1261233 - DNA, 25 bp, Homo sapien
gagagtaccaagtagtcttttgttc

SEQ ID NO: 1261234 - DNA, 25 bp, Homo sapien
caaccctgtgctggtcaagccaggg

SEQ ID NO: 1261235 - DNA, 25 bp, Homo sapien
atgtacaccaagaagagagtaccaa

SEQ ID NO: 1261236 - DNA, 25 bp, Homo sapien
tggatgcccgtctctgtcccaggcg

SEQ ID NO: 1261237 - DNA, 25 bp, Homo sapien
ccaggaataaaggcaagacagcctg

SEQ ID NO: 1261238 - DNA, 25 bp, Homo sapien
aaccaggaataaaggcaagacagcc

SEQ ID NO: 1261239 - DNA, 25 bp, Homo sapien
ctaaccaggaataaaggcaagacag

SEQ ID NO: 1261240 - DNA, 25 bp, Homo sapien
ccacctgccctaaccaggaataaag

SEQ ID NO: 1261241 - DNA, 25 bp, Homo sapien
aggtgacacaaggcctctgtcccca

SEQ ID NO: 1261242 - DNA, 25 bp, Homo sapien
acctgcagggtctgttcacccaggg

SEQ ID NO: 1261243 - DNA, 25 bp, Homo sapien
gacctgcagggtctgttcacccagg

SEQ ID NO: 1261244 - DNA, 25 bp, Homo sapien
ctgcagggtctgttcacccagggca

SEQ ID NO: 1261245 - DNA, 25 bp, Homo sapien
gcagggtctgttcacccagggcacc

SEQ ID NO: 1261246 - DNA, 25 bp, Homo sapien
agaggtggcggctgggtgagttgcc

SEQ ID NO: 1261247 - DNA, 25 bp, Homo sapien
ggtggcggctgggtgagttgccggc

SEQ ID NO: 1261248 - DNA, 25 bp, Homo sapien
gtggcggctgggtgagttgccggcc

SEQ ID NO: 1261249 - DNA, 25 bp, Homo sapien
gaggtggcggctgggtgagttgccg

SEQ ID NO: 1261250 - DNA, 25 bp, Homo sapien
tcagcagagatgtgaggaagctccc

SEQ ID NO: 1261251 - DNA, 25 bp, Homo sapien
tcttcagcagagatgtgaggaagct

SEQ ID NO: 1261252 - DNA, 25 bp, Homo sapien
aggcccttcttcagcagagatgtga

SEQ ID NO: 1261253 - DNA, 25 bp, Homo sapien
agatgtgaggaagctccccagctcc

SEQ ID NO: 1261254 - DNA, 25 bp, Homo sapien
cttggtgcctgggtcctcagaaggg

SEQ ID NO: 1261255 - DNA, 25 bp, Homo sapien
ctggtaggtccaggagaccagcagc

SEQ ID NO: 1261256 - DNA, 25 bp, Homo sapien
taggtccaggagaccagcagcacct

SEQ ID NO: 1261257 - DNA, 25 bp, Homo sapien
ctgggtcctcagaaggggcggcggc

SEQ ID NO: 1261258 - DNA, 25 bp, Homo sapien
gaggaggacggactccacagtcaca

SEQ ID NO: 1261259 - DNA, 25 bp, Homo sapien
ggaggacggactccacagtcacaga

SEQ ID NO: 1261260 - DNA, 25 bp, Homo sapien
gaggacggactccacagtcacagag

SEQ ID NO: 1261261 - DNA, 25 bp, Homo sapien
tggaggaggacggactccacagtca

SEQ ID NO: 1261262 - DNA, 25 bp, Homo sapien
tagacgcgcaatgccgtctcctgct

SEQ ID NO: 1261263 - DNA, 25 bp, Homo sapien
tgctccttgcgtgtgtcatgcaggt

SEQ ID NO: 1261264 - DNA, 25 bp, Homo sapien
catgcaggtgcacgcggcaggtgaa

SEQ ID NO: 1261265 - DNA, 25 bp, Homo sapien
tgaggtggctgtagacgcgcaatgc

SEQ ID NO: 1261266 - DNA, 25 bp, Homo sapien
gggacaggtcagtgagcgcagcagc

SEQ ID NO: 1261267 - DNA, 25 bp, Homo sapien
cctccagagaccgtcctggcactca

SEQ ID NO: 1261268 - DNA, 25 bp, Homo sapien
cagggacaggtcagtgagcgcagca

SEQ ID NO: 1261269 - DNA, 25 bp, Homo sapien
gcagggacaggtcagtgagcgcagc

SEQ ID NO: 1261270 - DNA, 25 bp, Homo sapien
ttcatgatcagggtgccgtgcagga

SEQ ID NO: 1261271 - DNA, 25 bp, Homo sapien
gatcagggtgccgtgcaggagccga

SEQ ID NO: 1261272 - DNA, 25 bp, Homo sapien
ccttcatgatcagggtgccgtgcag

SEQ ID NO: 1261273 - DNA, 25 bp, Homo sapien
cagggtgccgtgcaggagccgaggc

SEQ ID NO: 1261274 - DNA, 25 bp, Homo sapien
tggcaggagccatcaatgtgagggc

SEQ ID NO: 1261275 - DNA, 25 bp, Homo sapien
gaggtggcaggagccatcaatgtga

SEQ ID NO: 1261276 - DNA, 25 bp, Homo sapien
caggagccatcaatgtgagggccgc

SEQ ID NO: 1261277 - DNA, 25 bp, Homo sapien
agccatcaatgtgagggccgctccc

SEQ ID NO: 1261278 - DNA, 25 bp, Homo sapien
ggcttgtgggcagcgtcaccgtctc

SEQ ID NO: 1261279 - DNA, 25 bp, Homo sapien
ccagcgagatgcctacggggatgct

SEQ ID NO: 1261280 - DNA, 25 bp, Homo sapien
ccgtctcgccattggccggcatgta

SEQ ID NO: 1261281 - DNA, 25 bp, Homo sapien
ttggccggcatgtagcagttgaccc

SEQ ID NO: 1261282 - DNA, 25 bp, Homo sapien
gcccgtgctgacccgaggtgggccc

SEQ ID NO: 1261283 - DNA, 25 bp, Homo sapien
tgacccgaggtgggccccacgccgc

SEQ ID NO: 1261284 - DNA, 25 bp, Homo sapien
ctgacccgaggtgggccccacgccg

SEQ ID NO: 1261285 - DNA, 25 bp, Homo sapien
gctgcccgtgctgacccgaggtggg

SEQ ID NO: 1261286 - DNA, 25 bp, Homo sapien
tcttggcctcgccatgcaccagcag

SEQ ID NO: 1261287 - DNA, 25 bp, Homo sapien
catcttcttggcctcgccatgcacc

SEQ ID NO: 1261288 - DNA, 25 bp, Homo sapien
ttcttggcctcgccatgcaccagca

SEQ ID NO: 1261289 - DNA, 25 bp, Homo sapien
tcttcttggcctcgccatgcaccag

SEQ ID NO: 1261290 - DNA, 25 bp, Homo sapien
atgcccttggcgtccgcgtgtgcgc

SEQ ID NO: 1261291 - DNA, 25 bp, Homo sapien
cgtgtgcgctgaatgacatgtactc

SEQ ID NO: 1261292 - DNA, 25 bp, Homo sapien
gcgtccgcgtgtgcgctgaatgaca

SEQ ID NO: 1261293 - DNA, 25 bp, Homo sapien
gcgctgaatgacatgtactccacct

SEQ ID NO: 1261294 - DNA, 25 bp, Homo sapien
ccgctgcccgctgaggatcttgtgg

SEQ ID NO: 1261295 - DNA, 25 bp, Homo sapien
tcgagcttccgctgcccgctgagga

SEQ ID NO: 1261296 - DNA, 25 bp, Homo sapien
gatcttgtggccgacggtgccctgc

SEQ ID NO: 1261297 - DNA, 25 bp, Homo sapien
ctgcacgcagtagccgggcatgatg

SEQ ID NO: 1261298 - DNA, 25 bp, Homo sapien
ccgcctgaacccctggaagctgttt

SEQ ID NO: 1261299 - DNA, 25 bp, Homo sapien
cagcatgggtggaaggacaacccgt

SEQ ID NO: 1261300 - DNA, 25 bp, Homo sapien
gcacgaggccaagccagtgagagct

SEQ ID NO: 1261301 - DNA, 25 bp, Homo sapien
gcagactccaaagggctcaggtttt

SEQ ID NO: 1261302 - DNA, 25 bp, Homo sapien
catgttcttttcgtttccggcccat

SEQ ID NO: 1261303 - DNA, 25 bp, Homo sapien
cagggactgcccagcgtgcagcatt

SEQ ID NO: 1261304 - DNA, 25 bp, Homo sapien
gcattcctggcgtggcaaacacaac

SEQ ID NO: 1261305 - DNA, 25 bp, Homo sapien
tttccggaagatctgcagggactgc

SEQ ID NO: 1261306 - DNA, 25 bp, Homo sapien
aagacaggagaccgacgggtgtgga

SEQ ID NO: 1261307 - DNA, 25 bp, Homo sapien
acaggagaccgacgggtgtggatgt

SEQ ID NO: 1261308 - DNA, 25 bp, Homo sapien
ggatgtgctggccggccctgccgcg

SEQ ID NO: 1261309 - DNA, 25 bp, Homo sapien
gtggatgtgctggccggccctgccg

SEQ ID NO: 1261310 - DNA, 25 bp, Homo sapien
agcccggtcgaaggccttgatgtgc

SEQ ID NO: 1261311 - DNA, 25 bp, Homo sapien
agcaaaagcccggtcgaaggccttg

SEQ ID NO: 1261312 - DNA, 25 bp, Homo sapien
gtcagcaaaagcccggtcgaaggcc

SEQ ID NO: 1261313 - DNA, 25 bp, Homo sapien
caaaagcccggtcgaaggccttgat

SEQ ID NO: 1261314 - DNA, 25 bp, Homo sapien
aaacatgttcctctgcacgaaagtc

SEQ ID NO: 1261315 - DNA, 25 bp, Homo sapien
tagtggttggccttctcggtcagcc

SEQ ID NO: 1261316 - DNA, 25 bp, Homo sapien
tcttctggttggtccaggggatgaa

SEQ ID NO: 1261317 - DNA, 25 bp, Homo sapien
tgcacgaaagtcttgcggatcttct

SEQ ID NO: 1261318 - DNA, 25 bp, Homo sapien
acgcacgggccaggttgagtccagt

SEQ ID NO: 1261319 - DNA, 25 bp, Homo sapien
gtcgcgaccacttgtcccattaagc

SEQ ID NO: 1261320 - DNA, 25 bp, Homo sapien
gtctgcacagcccacgcacgggcca

SEQ ID NO: 1261321 - DNA, 25 bp, Homo sapien
accaccggcccagtcagcacagtgg

SEQ ID NO: 1261322 - DNA, 25 bp, Homo sapien
tggcgctgacgggatgtcacaggct

SEQ ID NO: 1261323 - DNA, 25 bp, Homo sapien
ggtggcgctgacgggatgtcacagg

SEQ ID NO: 1261324 - DNA, 25 bp, Homo sapien
gcgctgacgggatgtcacaggcttc

SEQ ID NO: 1261325 - DNA, 25 bp, Homo sapien
ggcgctgacgggatgtcacaggctt

SEQ ID NO: 1261326 - DNA, 25 bp, Homo sapien
gccaccgctacgctggacagggctg

SEQ ID NO: 1261327 - DNA, 25 bp, Homo sapien
gcagggccaagatgccaccgctacg

SEQ ID NO: 1261328 - DNA, 25 bp, Homo sapien
aagatgccaccgctacgctggacag

SEQ ID NO: 1261329 - DNA, 25 bp, Homo sapien
gggtcacacagcacacgagcggccc

SEQ ID NO: 1261330 - DNA, 25 bp, Homo sapien
ggactgtgttcaggccgggccaggg

SEQ ID NO: 1261331 - DNA, 25 bp, Homo sapien
tggactgtgttcaggccgggccagg

SEQ ID NO: 1261332 - DNA, 25 bp, Homo sapien
cgcggcccagcgcgaacacaggtat

SEQ ID NO: 1261333 - DNA, 25 bp, Homo sapien
cggcccagcgcgaacacaggtatca

SEQ ID NO: 1261334 - DNA, 25 bp, Homo sapien
gcggcccagcgcgaacacaggtatc

SEQ ID NO: 1261335 - DNA, 25 bp, Homo sapien
ggcccagcgcgaacacaggtatcag

SEQ ID NO: 1261336 - DNA, 25 bp, Homo sapien
ccagggcttcgtccgcacctgaggt

SEQ ID NO: 1261337 - DNA, 25 bp, Homo sapien
atagggaccttagcctctcatctgc

SEQ ID NO: 1261338 - DNA, 25 bp, Homo sapien
tcaatgttgagcaaatcttcttccc

SEQ ID NO: 1261339 - DNA, 25 bp, Homo sapien
aagagctgcggcctcatagggacct

SEQ ID NO: 1261340 - DNA, 25 bp, Homo sapien
tcgtggcgtacgtggactctgtgat

SEQ ID NO: 1261341 - DNA, 25 bp, Homo sapien
gcggcacttgtcaatccaggcagct

SEQ ID NO: 1261342 - DNA, 25 bp, Homo sapien
cccggcagcgcttggagtcacggat

SEQ ID NO: 1261343 - DNA, 25 bp, Homo sapien
ggtctcgtggactttcttcaggaag

SEQ ID NO: 1261344 - DNA, 25 bp, Homo sapien
actgtccccacggttgcagggctgg

SEQ ID NO: 1261345 - DNA, 25 bp, Homo sapien
tgccttcgcgcatttgggcccagaa

SEQ ID NO: 1261346 - DNA, 25 bp, Homo sapien
cttcggaagagcgagacagaggcac

SEQ ID NO: 1261347 - DNA, 25 bp, Homo sapien
acgggacaaaaagacacctcagcct

SEQ ID NO: 1261348 - DNA, 25 bp, Homo sapien
ctggtgaacgatcaaggatgccatg

SEQ ID NO: 1261349 - DNA, 25 bp, Homo sapien
ggtgaacgatcaaggatgccatgag

SEQ ID NO: 1261350 - DNA, 25 bp, Homo sapien
tggtgaacgatcaaggatgccatga

SEQ ID NO: 1261351 - DNA, 25 bp, Homo sapien
gtgaacgatcaaggatgccatgagg

SEQ ID NO: 1261352 - DNA, 25 bp, Homo sapien
tgtagaccacagactctgagcccac

SEQ ID NO: 1261353 - DNA, 25 bp, Homo sapien
cgtgtagaccacagactctgagccc

SEQ ID NO: 1261354 - DNA, 25 bp, Homo sapien
gtgtagaccacagactctgagccca

SEQ ID NO: 1261355 - DNA, 25 bp, Homo sapien
taggccttgatctccagctcatcat

SEQ ID NO: 1261356 - DNA, 25 bp, Homo sapien
agcacgtggcctgcatagtaggcct

SEQ ID NO: 1261357 - DNA, 25 bp, Homo sapien
tggcctgcatagtaggccttgatct

SEQ ID NO: 1261358 - DNA, 25 bp, Homo sapien
gtaggccttgatctccagctcatca

SEQ ID NO: 1261359 - DNA, 25 bp, Homo sapien
tgcgctcaggctgtgtcctcacagc

SEQ ID NO: 1261360 - DNA, 25 bp, Homo sapien
acaaggttcagaatgttggcggcca

SEQ ID NO: 1261361 - DNA, 25 bp, Homo sapien
gggacctgaaattggagtttccagc

SEQ ID NO: 1261362 - DNA, 25 bp, Homo sapien
tggacaaagaacgaaagacaacgga

SEQ ID NO: 1261363 - DNA, 25 bp, Homo sapien
cagttcacaagggacgggcaacgtg

SEQ ID NO: 1261364 - DNA, 25 bp, Homo sapien
gaatccatgaactgaaagacaccag

SEQ ID NO: 1261365 - DNA, 25 bp, Homo sapien
gacaccagagggaatatccatcagg

SEQ ID NO: 1261366 - DNA, 25 bp, Homo sapien
gcgggactccatctcggtaaaaaca

SEQ ID NO: 1261367 - DNA, 25 bp, Homo sapien
tcaagaggttgaacgtcaggctctc

SEQ ID NO: 1261368 - DNA, 25 bp, Homo sapien
ttggtgttaccaggcattagaaatg

SEQ ID NO: 1261369 - DNA, 25 bp, Homo sapien
caggcagaaggcaaattatcccaag

SEQ ID NO: 1261370 - DNA, 25 bp, Homo sapien
ggcagaaggcaaattatcccaagta

SEQ ID NO: 1261371 - DNA, 25 bp, Homo sapien
ggtgttaccaggcattagaaatgat

SEQ ID NO: 1261372 - DNA, 25 bp, Homo sapien
gtgggagatcacctcaacccgggag

SEQ ID NO: 1261373 - DNA, 25 bp, Homo sapien
ggtgggagatcacctcaacccggga

SEQ ID NO: 1261374 - DNA, 25 bp, Homo sapien
tgggagatcacctcaacccgggagg

SEQ ID NO: 1261375 - DNA, 25 bp, Homo sapien
tggaatttcacctgtcactcgctga

SEQ ID NO: 1261376 - DNA, 25 bp, Homo sapien
ggtgggttcataagccggtgcatac

SEQ ID NO: 1261377 - DNA, 25 bp, Homo sapien
cccagagattcgagtgagacacaga

SEQ ID NO: 1261378 - DNA, 25 bp, Homo sapien
ggccatttcaatgccgctcggacag

SEQ ID NO: 1261379 - DNA, 25 bp, Homo sapien
gtctggtctgggacccgcatcctcg

SEQ ID NO: 1261380 - DNA, 25 bp, Homo sapien
gtgctctcccgggtcggcgcccagt

SEQ ID NO: 1261381 - DNA, 25 bp, Homo sapien
ctgcacgtgctctcccgggtcggcg

SEQ ID NO: 1261382 - DNA, 25 bp, Homo sapien
tcctcgcgctgacgcctcctggtgt

SEQ ID NO: 1261383 - DNA, 25 bp, Homo sapien
ctggacgcaagagtgaggtggggtg

SEQ ID NO: 1261384 - DNA, 25 bp, Homo sapien
caagagtgaggtggggtgggctcac

SEQ ID NO: 1261385 - DNA, 25 bp, Homo sapien
gacgcaagagtgaggtggggtgggc

SEQ ID NO: 1261386 - DNA, 25 bp, Homo sapien
cgcaagagtgaggtggggtgggctc

SEQ ID NO: 1261387 - DNA, 25 bp, Homo sapien
cagccttccagaaactgtgtagaac

SEQ ID NO: 1261388 - DNA, 25 bp, Homo sapien
tagaacgggcggagggcatggttgg

SEQ ID NO: 1261389 - DNA, 25 bp, Homo sapien
ccttccagaaactgtgtagaacggg

SEQ ID NO: 1261390 - DNA, 25 bp, Homo sapien
ccagaaactgtgtagaacgggcgga

SEQ ID NO: 1261391 - DNA, 25 bp, Homo sapien
tggaccgtctggtggaggtggacag

SEQ ID NO: 1261392 - DNA, 25 bp, Homo sapien
gaccgtctggtggaggtggacagcc

SEQ ID NO: 1261393 - DNA, 25 bp, Homo sapien
ggaccgtctggtggaggtggacagc

SEQ ID NO: 1261394 - DNA, 25 bp, Homo sapien
accgtctggtggaggtggacagcca

SEQ ID NO: 1261395 - DNA, 25 bp, Homo sapien
tcgcccttcttgtctacggcgatct

SEQ ID NO: 1261396 - DNA, 25 bp, Homo sapien
tctacggcgatcttgcggtagtcct

SEQ ID NO: 1261397 - DNA, 25 bp, Homo sapien
ggtgaagaagttggcctcgcccttc

SEQ ID NO: 1261398 - DNA, 25 bp, Homo sapien
cctccagcaagatggggcagatggc

SEQ ID NO: 1261399 - DNA, 25 bp, Homo sapien
agatgggcccgtcgtagcccaccat

SEQ ID NO: 1261400 - DNA, 25 bp, Homo sapien
gtagcccaccatctcgctgaagtag

SEQ ID NO: 1261401 - DNA, 25 bp, Homo sapien
tgagtcatgtagatgggcccgtcgt

SEQ ID NO: 1261402 - DNA, 25 bp, Homo sapien
tctcgctgaagtaggggagtgcccc

SEQ ID NO: 1261403 - DNA, 25 bp, Homo sapien
gtcagtaatgagcaaacacaaaact

SEQ ID NO: 1261404 - DNA, 25 bp, Homo sapien
ggccccttcattcgcctgctgtgcg

SEQ ID NO: 1261405 - DNA, 25 bp, Homo sapien
tcccgagtaccgaagagtcagtaat

SEQ ID NO: 1261406 - DNA, 25 bp, Homo sapien
aggcctcatcccgagtaccgaagag

SEQ ID NO: 1261407 - DNA, 25 bp, Homo sapien
catgctcgcgagacaatgcaaagct

SEQ ID NO: 1261408 - DNA, 25 bp, Homo sapien
ctagcaaggcaataagcaaacggga

SEQ ID NO: 1261409 - DNA, 25 bp, Homo sapien
aagctgctgagggaaccgcgcatag

SEQ ID NO: 1261410 - DNA, 25 bp, Homo sapien
aattgaacacgtcggtgacggcgac

SEQ ID NO: 1261411 - DNA, 25 bp, Homo sapien
gcaagggcagcgcctggcaagcccc

SEQ ID NO: 1261412 - DNA, 25 bp, Homo sapien
caagggcagcgcctggcaagcccca

SEQ ID NO: 1261413 - DNA, 25 bp, Homo sapien
gacctgagggcaagggcagcgcctg

SEQ ID NO: 1261414 - DNA, 25 bp, Homo sapien
gcacagacctgagggcaagggcagc

SEQ ID NO: 1261415 - DNA, 25 bp, Homo sapien
ctgaggacactgcctccggagagga

SEQ ID NO: 1261416 - DNA, 25 bp, Homo sapien
aggacactgcctccggagaggagaa

SEQ ID NO: 1261417 - DNA, 25 bp, Homo sapien
gaggacactgcctccggagaggaga

SEQ ID NO: 1261418 - DNA, 25 bp, Homo sapien
acactgcctccggagaggagaaggg

SEQ ID NO: 1261419 - DNA, 25 bp, Homo sapien
catgtgtgtgaccagtaaggcaggc

SEQ ID NO: 1261420 - DNA, 25 bp, Homo sapien
tctggaatcgccaacaagacagtgg

SEQ ID NO: 1261421 - DNA, 25 bp, Homo sapien
tcagggcagactcgggactctggaa

SEQ ID NO: 1261422 - DNA, 25 bp, Homo sapien
taaagatcctgagacagtgaaggca

SEQ ID NO: 1261423 - DNA, 25 bp, Homo sapien
cggccgttctgggtgatgtaggaga

SEQ ID NO: 1261424 - DNA, 25 bp, Homo sapien
tccaggaagtctgttaggcggccgt

SEQ ID NO: 1261425 - DNA, 25 bp, Homo sapien
acagtccaggaagtctgttaggcgg

SEQ ID NO: 1261426 - DNA, 25 bp, Homo sapien
caggaagtctgttaggcggccgttc

SEQ ID NO: 1261427 - DNA, 25 bp, Homo sapien
ggggttctatgtgcagactcaggct

SEQ ID NO: 1261428 - DNA, 25 bp, Homo sapien
aaggggggttctatgtgcagactca

SEQ ID NO: 1261429 - DNA, 25 bp, Homo sapien
ccaggaaggggggttctatgtgcag

SEQ ID NO: 1261430 - DNA, 25 bp, Homo sapien
gttctatgtgcagactcaggctggg

SEQ ID NO: 1261431 - DNA, 25 bp, Homo sapien
gccatccaagcacaaccactgctgc

SEQ ID NO: 1261432 - DNA, 25 bp, Homo sapien
ctcacggagtccagcctacaggacc

SEQ ID NO: 1261433 - DNA, 25 bp, Homo sapien
ccaacctcactgacagatgtgagct

SEQ ID NO: 1261434 - DNA, 25 bp, Homo sapien
gctgtggatggccggctctcccagc

SEQ ID NO: 1261435 - DNA, 25 bp, Homo sapien
tgtgcattccacagtccagcatgac

SEQ ID NO: 1261436 - DNA, 25 bp, Homo sapien
ttcttgcccgcaatggagaccagga

SEQ ID NO: 1261437 - DNA, 25 bp, Homo sapien
gtcattgaagcccatgtgcattcca

SEQ ID NO: 1261438 - DNA, 25 bp, Homo sapien
aggatgcagcttcggcccacgtcct

SEQ ID NO: 1261439 - DNA, 25 bp, Homo sapien
ggggacacaggggaccatgccccac

SEQ ID NO: 1261440 - DNA, 25 bp, Homo sapien
ggacacaggggaccatgccccacac

SEQ ID NO: 1261441 - DNA, 25 bp, Homo sapien
gaagggggacacaggggaccatgcc

SEQ ID NO: 1261442 - DNA, 25 bp, Homo sapien
aggaagggggacacaggggaccatg

SEQ ID NO: 1261443 - DNA, 25 bp, Homo sapien
acacctcggtcagagtcactcctgg

SEQ ID NO: 1261444 - DNA, 25 bp, Homo sapien
atgccatagcgaacacggtgccagt

SEQ ID NO: 1261445 - DNA, 25 bp, Homo sapien
gcctccaacagagacaacggctggt

SEQ ID NO: 1261446 - DNA, 25 bp, Homo sapien
gcagagctgcaaaccaatgaggcca

SEQ ID NO: 1261447 - DNA, 25 bp, Homo sapien
caaagccagcaccacacatcaggat

SEQ ID NO: 1261448 - DNA, 25 bp, Homo sapien
ccacacatcaggatgacggggccac

SEQ ID NO: 1261449 - DNA, 25 bp, Homo sapien
acacatcaggatgacggggccacag

SEQ ID NO: 1261450 - DNA, 25 bp, Homo sapien
aagtgtccaaagccagcaccacaca

SEQ ID NO: 1261451 - DNA, 25 bp, Homo sapien
tgaagccacatgaaagatcagaaag

SEQ ID NO: 1261452 - DNA, 25 bp, Homo sapien
ggtgaccttgagaatatacccaggt

SEQ ID NO: 1261453 - DNA, 25 bp, Homo sapien
gatcagaaagatcagatgtccagag

SEQ ID NO: 1261454 - DNA, 25 bp, Homo sapien
cagattgcgggtaattgaagccaca

SEQ ID NO: 1261455 - DNA, 25 bp, Homo sapien
aggacatggaatcccgtcctggtgt

SEQ ID NO: 1261456 - DNA, 25 bp, Homo sapien
acatggaatcccgtcctggtgtctg

SEQ ID NO: 1261457 - DNA, 25 bp, Homo sapien
gggaggacatggaatcccgtcctgg

SEQ ID NO: 1261458 - DNA, 25 bp, Homo sapien
tggaaggtgccctcgaccccctgcc

SEQ ID NO: 1261459 - DNA, 25 bp, Homo sapien
gctaaggacatcaggatgactggcc

SEQ ID NO: 1261460 - DNA, 25 bp, Homo sapien
ggaaaacgctaaggacatcaggatg

SEQ ID NO: 1261461 - DNA, 25 bp, Homo sapien
ctgtggaaaacgctaaggacatcag

SEQ ID NO: 1261462 - DNA, 25 bp, Homo sapien
aacgctaaggacatcaggatgactg

SEQ ID NO: 1261463 - DNA, 25 bp, Homo sapien
aagggcgtgactctgatctcaggca

SEQ ID NO: 1261464 - DNA, 25 bp, Homo sapien
caagggcgtgactctgatctcaggc

SEQ ID NO: 1261465 - DNA, 25 bp, Homo sapien
ccaagggcgtgactctgatctcagg

SEQ ID NO: 1261466 - DNA, 25 bp, Homo sapien
agggcgtgactctgatctcaggcat

SEQ ID NO: 1261467 - DNA, 25 bp, Homo sapien
cgcgaggcccgcctgcggtgatgca

SEQ ID NO: 1261468 - DNA, 25 bp, Homo sapien
cgaggcccgcctgcggtgatgcact

SEQ ID NO: 1261469 - DNA, 25 bp, Homo sapien
ccgcctgcggtgatgcactgcgcag

SEQ ID NO: 1261470 - DNA, 25 bp, Homo sapien
gcccgcctgcggtgatgcactgcgc

SEQ ID NO: 1261471 - DNA, 25 bp, Homo sapien
aggccctgcacaacactcttcagtg

SEQ ID NO: 1261472 - DNA, 25 bp, Homo sapien
acactcttcagtgcaacgcctcagg

SEQ ID NO: 1261473 - DNA, 25 bp, Homo sapien
tcttcagtgcaacgcctcaggctgc

SEQ ID NO: 1261474 - DNA, 25 bp, Homo sapien
gcaggaccccgtgaagccctggcag

SEQ ID NO: 1261475 - DNA, 25 bp, Homo sapien
gaagcagctctatgttaaccatcta

SEQ ID NO: 1261476 - DNA, 25 bp, Homo sapien
cacgtactttcagactgttgccgga

SEQ ID NO: 1261477 - DNA, 25 bp, Homo sapien
taaccatctaaacgctgggactttg

SEQ ID NO: 1261478 - DNA, 25 bp, Homo sapien
tgggacagatgacagggtcgcctcc

SEQ ID NO: 1261479 - DNA, 25 bp, Homo sapien
actggcggctgcctgtcaattccgg

SEQ ID NO: 1261480 - DNA, 25 bp, Homo sapien
tagccgaggcctgactgcgtgggct

SEQ ID NO: 1261481 - DNA, 25 bp, Homo sapien
tgtccacgaagaactcgcaggggtt

SEQ ID NO: 1261482 - DNA, 25 bp, Homo sapien
caccactgtataggccttggtcgtg

SEQ ID NO: 1261483 - DNA, 25 bp, Homo sapien
tccgggtggacccactgcttttgct

SEQ ID NO: 1261484 - DNA, 25 bp, Homo sapien
ccactcggtgccgtgtgatccgatt

SEQ ID NO: 1261485 - DNA, 25 bp, Homo sapien
tgtgatccgattcactgccactgcc

SEQ ID NO: 1261486 - DNA, 25 bp, Homo sapien
ctgctccgggtggacccactgcttt

SEQ ID NO: 1261487 - DNA, 25 bp, Homo sapien
aacaggatggggaaggagcctgtca

SEQ ID NO: 1261488 - DNA, 25 bp, Homo sapien
caggatggggaaggagcctgtcagc

SEQ ID NO: 1261489 - DNA, 25 bp, Homo sapien
ggatggggaaggagcctgtcagcac

SEQ ID NO: 1261490 - DNA, 25 bp, Homo sapien
ctgggagtgagaacaggatggggaa

SEQ ID NO: 1261491 - DNA, 25 bp, Homo sapien
cgtccagaacaaccgcccccgccag

SEQ ID NO: 1261492 - DNA, 25 bp, Homo sapien
cggtggcccgtgcaggacgggtggg

SEQ ID NO: 1261493 - DNA, 25 bp, Homo sapien
ccgggcaggaacggtggcccgtgca

SEQ ID NO: 1261494 - DNA, 25 bp, Homo sapien
tggcccgtgcaggacgggtgggtgg

SEQ ID NO: 1261495 - DNA, 25 bp, Homo sapien
cgctccgctagtccttcagtctaag

SEQ ID NO: 1261496 - DNA, 25 bp, Homo sapien
gctccgctagtccttcagtctaagg

SEQ ID NO: 1261497 - DNA, 25 bp, Homo sapien
ggcccaaggtccgctccgctagtcc

SEQ ID NO: 1261498 - DNA, 25 bp, Homo sapien
cggcccaaggtccgctccgctagtc

SEQ ID NO: 1261499 - DNA, 25 bp, Homo sapien
ctaaagcccgggtcctggtaggcag

SEQ ID NO: 1261500 - DNA, 25 bp, Homo sapien
gtcctgatccgaagtcccactggag

SEQ ID NO: 1261501 - DNA, 25 bp, Homo sapien
tgccgctgccatagctaaagcccgg

SEQ ID NO: 1261502 - DNA, 25 bp, Homo sapien
gggccagcgtgtcctgatccgaagt

SEQ ID NO: 1261503 - DNA, 25 bp, Homo sapien
ctgttgaggttcagggtggcgagat

SEQ ID NO: 1261504 - DNA, 25 bp, Homo sapien
tcttgttgaccgtgtgccgcaggaa

SEQ ID NO: 1261505 - DNA, 25 bp, Homo sapien
gatccccgaagacgtagtagcactg

SEQ ID NO: 1261506 - DNA, 25 bp, Homo sapien
ccgcaggaagccgtgcttcagcaag

SEQ ID NO: 1261507 - DNA, 25 bp, Homo sapien
gaagccgtgcttcagcaagctgctg

SEQ ID NO: 1261508 - DNA, 25 bp, Homo sapien
tgaagccctccacgtgtgtgtacag

SEQ ID NO: 1261509 - DNA, 25 bp, Homo sapien
atgtcactcttcaccgtcagcggcg

SEQ ID NO: 1261510 - DNA, 25 bp, Homo sapien
ggacgacggcgctcatgtcactctt

SEQ ID NO: 1261511 - DNA, 25 bp, Homo sapien
tccagtcccgagtctggcagctgca

SEQ ID NO: 1261512 - DNA, 25 bp, Homo sapien
atgcggtcgcggatctccagtcccg

SEQ ID NO: 1261513 - DNA, 25 bp, Homo sapien
tggagcaccaggcacggagctggtt

SEQ ID NO: 1261514 - DNA, 25 bp, Homo sapien
caccaggcacggagctggttagtga

SEQ ID NO: 1261515 - DNA, 25 bp, Homo sapien
aggaggagctggtgcgcgtgacggc

SEQ ID NO: 1261516 - DNA, 25 bp, Homo sapien
acggcgctggagcagggactcgtac

SEQ ID NO: 1261517 - DNA, 25 bp, Homo sapien
gggacagccaggcggcggggtcgat

SEQ ID NO: 1261518 - DNA, 25 bp, Homo sapien
ccaggcggcggggtcgatgggccgc

SEQ ID NO: 1261519 - DNA, 25 bp, Homo sapien
gggtcgatgggccgcaccgggtcag

SEQ ID NO: 1261520 - DNA, 25 bp, Homo sapien
cggcggggtcgatgggccgcaccgg

SEQ ID NO: 1261521 - DNA, 25 bp, Homo sapien
cgatgacaggcggacagatggacag

SEQ ID NO: 1261522 - DNA, 25 bp, Homo sapien
gagagaggccttcaggctaggtagg

SEQ ID NO: 1261523 - DNA, 25 bp, Homo sapien
tgggtggccgccacgtggcgatgac

SEQ ID NO: 1261524 - DNA, 25 bp, Homo sapien
ggccttcaggctaggtaggcgcccc

SEQ ID NO: 1261525 - DNA, 25 bp, Homo sapien
cttcggggcgttgggtcccagcact

SEQ ID NO: 1261526 - DNA, 25 bp, Homo sapien
cccgtgggacggtgaagtagcttcg

SEQ ID NO: 1261527 - DNA, 25 bp, Homo sapien
cgtgggacggtgaagtagcttcggg

SEQ ID NO: 1261528 - DNA, 25 bp, Homo sapien
tagcttcggggcgttgggtcccagc

SEQ ID NO: 1261529 - DNA, 25 bp, Homo sapien
ggtggtcacacagcaaggcccccat

SEQ ID NO: 1261530 - DNA, 25 bp, Homo sapien
acggtggtcacacagcaaggccccc

SEQ ID NO: 1261531 - DNA, 25 bp, Homo sapien
ctgcaggaacggtggtcacacagca

SEQ ID NO: 1261532 - DNA, 25 bp, Homo sapien
gcaggaacggtggtcacacagcaag

SEQ ID NO: 1261533 - DNA, 25 bp, Homo sapien
gcccctcccgctccagcgcccccag

SEQ ID NO: 1261534 - DNA, 25 bp, Homo sapien
ctggcccctcccgctccagcgcccc

SEQ ID NO: 1261535 - DNA, 25 bp, Homo sapien
ctgcctggcccctcccgctccagcg

SEQ ID NO: 1261536 - DNA, 25 bp, Homo sapien
tgcctggcccctcccgctccagcgc

SEQ ID NO: 1261537 - DNA, 25 bp, Homo sapien
gcacccgcacggcatcgtcattgct

SEQ ID NO: 1261538 - DNA, 25 bp, Homo sapien
cacggcatcgtcattgctcatgttc

SEQ ID NO: 1261539 - DNA, 25 bp, Homo sapien
ccgtctgggaaacgatctcccgcag

SEQ ID NO: 1261540 - DNA, 25 bp, Homo sapien
tctgggaaacgatctcccgcagcac

SEQ ID NO: 1261541 - DNA, 25 bp, Homo sapien
ccccgcagacccacccgcagccgca

SEQ ID NO: 1261542 - DNA, 25 bp, Homo sapien
cagacccacccgcagccgcatgtcc

SEQ ID NO: 1261543 - DNA, 25 bp, Homo sapien
agacccacccgcagccgcatgtccc

SEQ ID NO: 1261544 - DNA, 25 bp, Homo sapien
cgcagacccacccgcagccgcatgt

SEQ ID NO: 1261545 - DNA, 25 bp, Homo sapien
gcagcaacatgtcgccgggctcgat

SEQ ID NO: 1261546 - DNA, 25 bp, Homo sapien
atgcggccgtcagcggccacagccc

SEQ ID NO: 1261547 - DNA, 25 bp, Homo sapien
ctgcagcaacatgtcgccgggctcg

SEQ ID NO: 1261548 - DNA, 25 bp, Homo sapien
gccgggctcgatgcggccgtcagcg

SEQ ID NO: 1261549 - DNA, 25 bp, Homo sapien
ggtcgttgctctgccccacgatgct

SEQ ID NO: 1261550 - DNA, 25 bp, Homo sapien
gccgccgtctccacggtcgttgctc

SEQ ID NO: 1261551 - DNA, 25 bp, Homo sapien
cacggtcgttgctctgccccacgat

SEQ ID NO: 1261552 - DNA, 25 bp, Homo sapien
acggtcgttgctctgccccacgatg

SEQ ID NO: 1261553 - DNA, 25 bp, Homo sapien
ctgcaggaagagccatgagccgcgg

SEQ ID NO: 1261554 - DNA, 25 bp, Homo sapien
gaagagccatgagccgcggccaagc

SEQ ID NO: 1261555 - DNA, 25 bp, Homo sapien
caggaagagccatgagccgcggcca

SEQ ID NO: 1261556 - DNA, 25 bp, Homo sapien
aggaagagccatgagccgcggccaa

SEQ ID NO: 1261557 - DNA, 25 bp, Homo sapien
tgagggacatggtggagtcggttat

SEQ ID NO: 1261558 - DNA, 25 bp, Homo sapien
tgacagtgacgatgttgagggacat

SEQ ID NO: 1261559 - DNA, 25 bp, Homo sapien
ggacatggtggagtcggttatgctg

SEQ ID NO: 1261560 - DNA, 25 bp, Homo sapien
ccatgttgagcgtgacagtgacgat

SEQ ID NO: 1261561 - DNA, 25 bp, Homo sapien
tgtaaaaggcacggggctgcccgac

SEQ ID NO: 1261562 - DNA, 25 bp, Homo sapien
cgccctgctccacccggctgcctac

SEQ ID NO: 1261563 - DNA, 25 bp, Homo sapien
cccgacactgacttcgcctccccag

SEQ ID NO: 1261564 - DNA, 25 bp, Homo sapien
gagagggggcgtgtgtaaaaggcac

SEQ ID NO: 1261565 - DNA, 25 bp, Homo sapien
ctccgccggcgtttgtgcttccgga

SEQ ID NO: 1261566 - DNA, 25 bp, Homo sapien
gcttcctccgccggcgtttgtgctt

SEQ ID NO: 1261567 - DNA, 25 bp, Homo sapien
tcctccgccggcgtttgtgcttccg

SEQ ID NO: 1261568 - DNA, 25 bp, Homo sapien
ggtccgcctgccgaaggcgctgctt

SEQ ID NO: 1261569 - DNA, 25 bp, Homo sapien
tctggatgaggtgctctgctccgtg

SEQ ID NO: 1261570 - DNA, 25 bp, Homo sapien
ctggatgaggtgctctgctccgtgg

SEQ ID NO: 1261571 - DNA, 25 bp, Homo sapien
gagtctggatgaggtgctctgctcc

SEQ ID NO: 1261572 - DNA, 25 bp, Homo sapien
atgaggtgctctgctccgtggagct

SEQ ID NO: 1261573 - DNA, 25 bp, Homo sapien
acaaagctgctggactcaagctcgc

SEQ ID NO: 1261574 - DNA, 25 bp, Homo sapien
tgctgagggcggtggacgcgctgtc

SEQ ID NO: 1261575 - DNA, 25 bp, Homo sapien
acatcccgccgtcggtctccccttg

SEQ ID NO: 1261576 - DNA, 25 bp, Homo sapien
atcctcgtccgagtccacaaagctg

SEQ ID NO: 1261577 - DNA, 25 bp, Homo sapien
ctgctgtagtaggaacatggctcat

SEQ ID NO: 1261578 - DNA, 25 bp, Homo sapien
ggagctggcagctcaactgtaggct

SEQ ID NO: 1261579 - DNA, 25 bp, Homo sapien
ctcaactgtaggctcgctgggcctg

SEQ ID NO: 1261580 - DNA, 25 bp, Homo sapien
ctgtagtaggaacatggctcatggg

SEQ ID NO: 1261581 - DNA, 25 bp, Homo sapien
gactccgtgcctgtctcgttgtcca

SEQ ID NO: 1261582 - DNA, 25 bp, Homo sapien
gccggtgactgaccatggactccgt

SEQ ID NO: 1261583 - DNA, 25 bp, Homo sapien
tcccgtcacggctgctggccacatt

SEQ ID NO: 1261584 - DNA, 25 bp, Homo sapien
cggtgactgaccatggactccgtgc

SEQ ID NO: 1261585 - DNA, 25 bp, Homo sapien
tgggaccccgcatccgagtgagcac

SEQ ID NO: 1261586 - DNA, 25 bp, Homo sapien
catccgagtgagcaccctcagccag

SEQ ID NO: 1261587 - DNA, 25 bp, Homo sapien
cccgatgccgcctgtccgctcaaga

SEQ ID NO: 1261588 - DNA, 25 bp, Homo sapien
gatgccgcctgtccgctcaagaggc

SEQ ID NO: 1261589 - DNA, 25 bp, Homo sapien
cgcggccgttgaagcagggaagctt

SEQ ID NO: 1261590 - DNA, 25 bp, Homo sapien
tgggcatatgctgccgtgaggcccc

SEQ ID NO: 1261591 - DNA, 25 bp, Homo sapien
ggcatatgctgccgtgaggccccac

SEQ ID NO: 1261592 - DNA, 25 bp, Homo sapien
ctgtgggcatatgctgccgtgaggc

SEQ ID NO: 1261593 - DNA, 25 bp, Homo sapien
tgtgggcatatgctgccgtgaggcc

SEQ ID NO: 1261594 - DNA, 25 bp, Homo sapien
ggaggaatccactcagaggcagcgc

SEQ ID NO: 1261595 - DNA, 25 bp, Homo sapien
aatccactcagaggcagcgccctgg

SEQ ID NO: 1261596 - DNA, 25 bp, Homo sapien
cgccccggggaggaatccactcaga

SEQ ID NO: 1261597 - DNA, 25 bp, Homo sapien
ccccggggaggaatccactcagagg

SEQ ID NO: 1261598 - DNA, 25 bp, Homo sapien
gaataaagtttcatggtcaccagtg

SEQ ID NO: 1261599 - DNA, 25 bp, Homo sapien
gctgctccgggaacgcaagtgcttt

SEQ ID NO: 1261600 - DNA, 25 bp, Homo sapien
aggctgccccgaaacagcagatggt

SEQ ID NO: 1261601 - DNA, 25 bp, Homo sapien
ctcaggacacgggtaggcgaataaa

SEQ ID NO: 1261602 - DNA, 25 bp, Homo sapien
gcggaggcgcgtcgcggtcgcaggt

SEQ ID NO: 1261603 - DNA, 25 bp, Homo sapien
ccaggctcgcgcaggcctcgcggcc

SEQ ID NO: 1261604 - DNA, 25 bp, Homo sapien
gcgccgcatctagcggaggcgcgtc

SEQ ID NO: 1261605 - DNA, 25 bp, Homo sapien
tcgcgcaggcctcgcggccgactga

SEQ ID NO: 1261606 - DNA, 25 bp, Homo sapien
tggtagataatcttggtctccgcca

SEQ ID NO: 1261607 - DNA, 25 bp, Homo sapien
tttgtaggcgtgcacgggccggttg

SEQ ID NO: 1261608 - DNA, 25 bp, Homo sapien
cctggtccatggacttaaagaagaa

SEQ ID NO: 1261609 - DNA, 25 bp, Homo sapien
agcacgttcttgaagtcggccagcg

SEQ ID NO: 1261610 - DNA, 25 bp, Homo sapien
gctcggacgcggggcgctacccgcc

SEQ ID NO: 1261611 - DNA, 25 bp, Homo sapien
ggctcggacgcggggcgctacccgc

SEQ ID NO: 1261612 - DNA, 25 bp, Homo sapien
cgcgagggacgcagcacggagggcg

SEQ ID NO: 1261613 - DNA, 25 bp, Homo sapien
gcgcgtcccgactgctgccccgcgg

SEQ ID NO: 1261614 - DNA, 25 bp, Homo sapien
acgcagcacggagggcgcgctcagc

SEQ ID NO: 1261615 - DNA, 25 bp, Homo sapien
cgcaccgctctcggccccgacgctc

SEQ ID NO: 1261616 - DNA, 25 bp, Homo sapien
cctgcgcccctcgggccgcgccgtt

SEQ ID NO: 1261617 - DNA, 25 bp, Homo sapien
cccgcctgcgcccctcgggccgcgc

SEQ ID NO: 1261618 - DNA, 25 bp, Homo sapien
cgcctgcgcccctcgggccgcgccg

SEQ ID NO: 1261619 - DNA, 25 bp, Homo sapien
gccctcccgcctgcgcccctcgggc

SEQ ID NO: 1261620 - DNA, 25 bp, Homo sapien
gagcccagtgactatcaaggtggct

SEQ ID NO: 1261621 - DNA, 25 bp, Homo sapien
caggccaccccaaaccaacttcact

SEQ ID NO: 1261622 - DNA, 25 bp, Homo sapien
gggtgctgagagtggcaacacaggc

SEQ ID NO: 1261623 - DNA, 25 bp, Homo sapien
ctgagagcaaggctagggtagggat

SEQ ID NO: 1261624 - DNA, 25 bp, Homo sapien
ggcccaaagcaacacagaggagcaa

SEQ ID NO: 1261625 - DNA, 25 bp, Homo sapien
ggagcaagggctggcattcaagtca

SEQ ID NO: 1261626 - DNA, 25 bp, Homo sapien
cccaggtggcccaaagcaacacaga

SEQ ID NO: 1261627 - DNA, 25 bp, Homo sapien
gagaacagatggtgcctggagtccc

SEQ ID NO: 1261628 - DNA, 25 bp, Homo sapien
gcccccgacgagcagagccctggag

SEQ ID NO: 1261629 - DNA, 25 bp, Homo sapien
ggtgggggagctctcggtggcaggc

SEQ ID NO: 1261630 - DNA, 25 bp, Homo sapien
agctctcggtggcaggcagcacccc

SEQ ID NO: 1261631 - DNA, 25 bp, Homo sapien
gggagctctcggtggcaggcagcac

SEQ ID NO: 1261632 - DNA, 25 bp, Homo sapien
catcagtgggattttggttgtgcca

SEQ ID NO: 1261633 - DNA, 25 bp, Homo sapien
tgagccccggagcatcaggagatgc

SEQ ID NO: 1261634 - DNA, 25 bp, Homo sapien
gccaaattccaggaaagcgggacca

SEQ ID NO: 1261635 - DNA, 25 bp, Homo sapien
gaggcggcctctgcatacgcccagg

SEQ ID NO: 1261636 - DNA, 25 bp, Homo sapien
tatttgcagttctccttccggaacc

SEQ ID NO: 1261637 - DNA, 25 bp, Homo sapien
ctatttgcagttctccttccggaac

SEQ ID NO: 1261638 - DNA, 25 bp, Homo sapien
agccaagggcgccaacgggttggcg

SEQ ID NO: 1261639 - DNA, 25 bp, Homo sapien
tgccatcgttggtcccaggtgaggt

SEQ ID NO: 1261640 - DNA, 25 bp, Homo sapien
tccaccctcatcacagtgggagaca

SEQ ID NO: 1261641 - DNA, 25 bp, Homo sapien
ctgagatgggctgaggtcgcccccg

SEQ ID NO: 1261642 - DNA, 25 bp, Homo sapien
gtctaggtcgatgtacttggcaggc

SEQ ID NO: 1261643 - DNA, 25 bp, Homo sapien
ctaggtcgatgtacttggcaggcag

SEQ ID NO: 1261644 - DNA, 25 bp, Homo sapien
ctttgtctaggtcgatgtacttggc

SEQ ID NO: 1261645 - DNA, 25 bp, Homo sapien
ttgtctaggtcgatgtacttggcag

SEQ ID NO: 1261646 - DNA, 25 bp, Homo sapien
agccacagcgaactccgccaagtta

SEQ ID NO: 1261647 - DNA, 25 bp, Homo sapien
tgtaaagcatctggtcccctgcagc

SEQ ID NO: 1261648 - DNA, 25 bp, Homo sapien
tcactcctgtaaagcatctggtccc

SEQ ID NO: 1261649 - DNA, 25 bp, Homo sapien
gcgaactccgccaagttaacatcct

SEQ ID NO: 1261650 - DNA, 25 bp, Homo sapien
cgacttctggtccgagtattcgtag

SEQ ID NO: 1261651 - DNA, 25 bp, Homo sapien
ccgacttctggtccgagtattcgta

SEQ ID NO: 1261652 - DNA, 25 bp, Homo sapien
gacttctggtccgagtattcgtagc

SEQ ID NO: 1261653 - DNA, 25 bp, Homo sapien
cccgacttctggtccgagtattcgt

SEQ ID NO: 1261654 - DNA, 25 bp, Homo sapien
tcacattgggggcagtgccgcccct

SEQ ID NO: 1261655 - DNA, 25 bp, Homo sapien
gccgctggctttgccggggcagcct

SEQ ID NO: 1261656 - DNA, 25 bp, Homo sapien
gagactcacattgggggcagtgccg

SEQ ID NO: 1261657 - DNA, 25 bp, Homo sapien
ccagcccagaggaccaccctcccgc

SEQ ID NO: 1261658 - DNA, 25 bp, Homo sapien
tgctggaagaagtgggctcggctct

SEQ ID NO: 1261659 - DNA, 25 bp, Homo sapien
gggacgatgacattgatgacgttgt

SEQ ID NO: 1261660 - DNA, 25 bp, Homo sapien
ccaggaggacagtgaccagtagcag

SEQ ID NO: 1261661 - DNA, 25 bp, Homo sapien
acattgatgacgttgtggccgcgcg

SEQ ID NO: 1261662 - DNA, 25 bp, Homo sapien
agtgagaagtcaccgcgctcaaagg

SEQ ID NO: 1261663 - DNA, 25 bp, Homo sapien
cggcgttcgtgcaggccacagtaat

SEQ ID NO: 1261664 - DNA, 25 bp, Homo sapien
agtaggtgccctcgtcggcgacctc

SEQ ID NO: 1261665 - DNA, 25 bp, Homo sapien
acctccagcggctcgatacgcagtg

SEQ ID NO: 1261666 - DNA, 25 bp, Homo sapien
tgcccgcggttcacgcaggtcagaa

SEQ ID NO: 1261667 - DNA, 25 bp, Homo sapien
tccacgtgccggtcggtccacacgt

SEQ ID NO: 1261668 - DNA, 25 bp, Homo sapien
cggtcccagtgcaccacctgttgag

SEQ ID NO: 1261669 - DNA, 25 bp, Homo sapien
acctgttgagcctcctccacgtgcc

SEQ ID NO: 1261670 - DNA, 25 bp, Homo sapien
ctcgccgtcccagtaggcgggggtg

SEQ ID NO: 1261671 - DNA, 25 bp, Homo sapien
gcgcggtcagcggcgcgcgggccgg

SEQ ID NO: 1261672 - DNA, 25 bp, Homo sapien
tgcaggtgtacagccccgcgtccgt

SEQ ID NO: 1261673 - DNA, 25 bp, Homo sapien
aggttgcaggtgtacagccccgcgt

SEQ ID NO: 1261674 - DNA, 25 bp, Homo sapien
gcaggttgcaggtgtacagccccgc

SEQ ID NO: 1261675 - DNA, 25 bp, Homo sapien
gcggacggccaggctctcgtagagg

SEQ ID NO: 1261676 - DNA, 25 bp, Homo sapien
tgcgcacccaggaggaagccgcgcg

SEQ ID NO: 1261677 - DNA, 25 bp, Homo sapien
ccgcgcgtgagccttgcggtgcccc

SEQ ID NO: 1261678 - DNA, 25 bp, Homo sapien
gaagccgcgcgtgagccttgcggtg

SEQ ID NO: 1261679 - DNA, 25 bp, Homo sapien
agccgcgcgtgagccttgcggtgcc

SEQ ID NO: 1261680 - DNA, 25 bp, Homo sapien
gttgccgtcgtcgaaggccgaggcc

SEQ ID NO: 1261681 - DNA, 25 bp, Homo sapien
tgccgtcgtcgaaggccgaggccga

SEQ ID NO: 1261682 - DNA, 25 bp, Homo sapien
gaagttgccgtcgtcgaaggccgag

SEQ ID NO: 1261683 - DNA, 25 bp, Homo sapien
aagttgccgtcgtcgaaggccgagg

SEQ ID NO: 1261684 - DNA, 25 bp, Homo sapien
tcgcccgccgagtacaagtccagca

SEQ ID NO: 1261685 - DNA, 25 bp, Homo sapien
gcccgccgagtacaagtccagcagg

SEQ ID NO: 1261686 - DNA, 25 bp, Homo sapien
ccgccgagtacaagtccagcaggcg

SEQ ID NO: 1261687 - DNA, 25 bp, Homo sapien
tgctcgcccgccgagtacaagtcca

SEQ ID NO: 1261688 - DNA, 25 bp, Homo sapien
gctggcggtcgtgcagccggtcctg

SEQ ID NO: 1261689 - DNA, 25 bp, Homo sapien
gcgctggcggtcgtgcagccggtcc

SEQ ID NO: 1261690 - DNA, 25 bp, Homo sapien
ctggcggtcgtgcagccggtcctgg

SEQ ID NO: 1261691 - DNA, 25 bp, Homo sapien
cgctggcggtcgtgcagccggtcct

SEQ ID NO: 1261692 - DNA, 25 bp, Homo sapien
ctctggcagcgcagcaccgcccggg

SEQ ID NO: 1261693 - DNA, 25 bp, Homo sapien
ctgccagcagcggcgggtaccgagg

SEQ ID NO: 1261694 - DNA, 25 bp, Homo sapien
tgccagcagcggcgggtaccgagga

SEQ ID NO: 1261695 - DNA, 25 bp, Homo sapien
agctgccagcagcggcgggtaccga

SEQ ID NO: 1261696 - DNA, 25 bp, Homo sapien
ccagcagcggcgggtaccgaggacc

SEQ ID NO: 1261697 - DNA, 25 bp, Homo sapien
tctgcagaagcacaagtttccaaag

SEQ ID NO: 1261698 - DNA, 25 bp, Homo sapien
ttccaaagcaggattcgggatggca

SEQ ID NO: 1261699 - DNA, 25 bp, Homo sapien
tgcagaagcacaagtttccaaagca

SEQ ID NO: 1261700 - DNA, 25 bp, Homo sapien
ccaaagcaggattcgggatggcagc

SEQ ID NO: 1261701 - DNA, 25 bp, Homo sapien
ggctttgtcccactcggctctaagt

SEQ ID NO: 1261702 - DNA, 25 bp, Homo sapien
ctttgtcccactcggctctaagtct

SEQ ID NO: 1261703 - DNA, 25 bp, Homo sapien
tcccactcggctctaagtctctctc

SEQ ID NO: 1261704 - DNA, 25 bp, Homo sapien
gtcccactcggctctaagtctctct

SEQ ID NO: 1261705 - DNA, 25 bp, Homo sapien
cactttcggggacccagccagcgga

SEQ ID NO: 1261706 - DNA, 25 bp, Homo sapien
cacactttcggggacccagccagcg

SEQ ID NO: 1261707 - DNA, 25 bp, Homo sapien
tccagccacactttcggggacccag

SEQ ID NO: 1261708 - DNA, 25 bp, Homo sapien
tgtcgtctgagagggccctgacctc

SEQ ID NO: 1261709 - DNA, 25 bp, Homo sapien
gagtcccacttcctgtcgttcagaa

SEQ ID NO: 1261710 - DNA, 25 bp, Homo sapien
ccaacacagacagggttaggctcga

SEQ ID NO: 1261711 - DNA, 25 bp, Homo sapien
gttagcacagttttccctgcgtggg

SEQ ID NO: 1261712 - DNA, 25 bp, Homo sapien
taggctcgaggacaaaccgtattcg

SEQ ID NO: 1261713 - DNA, 25 bp, Homo sapien
gccagccttctttctcctacggcct

SEQ ID NO: 1261714 - DNA, 25 bp, Homo sapien
aggaaacaccgccagccttctttct

SEQ ID NO: 1261715 - DNA, 25 bp, Homo sapien
ctttctcctacggcctttggattct

SEQ ID NO: 1261716 - DNA, 25 bp, Homo sapien
ctaagaggaaacaccgccagccttc

SEQ ID NO: 1261717 - DNA, 25 bp, Homo sapien
tcggaaggcccggaagaggagagct

SEQ ID NO: 1261718 - DNA, 25 bp, Homo sapien
gcctgcattcgtgttggtccctcct

SEQ ID NO: 1261719 - DNA, 25 bp, Homo sapien
tctgtggatcccagatcggttgtcg

SEQ ID NO: 1261720 - DNA, 25 bp, Homo sapien
gcattcgtgttggtccctcctcctg

SEQ ID NO: 1261721 - DNA, 25 bp, Homo sapien
ggtgggcaccgggggtgggagctga

SEQ ID NO: 1261722 - DNA, 25 bp, Homo sapien
atctgaagcaggcagggccctgggt

SEQ ID NO: 1261723 - DNA, 25 bp, Homo sapien
agcaggcagggccctgggtgggcac

SEQ ID NO: 1261724 - DNA, 25 bp, Homo sapien
aggcagggccctgggtgggcaccgg

SEQ ID NO: 1261725 - DNA, 25 bp, Homo sapien
gagagacctcacacccggcaaatgg

SEQ ID NO: 1261726 - DNA, 25 bp, Homo sapien
agagacctcacacccggcaaatgga

SEQ ID NO: 1261727 - DNA, 25 bp, Homo sapien
gcctcaatcctgagagacctcacac

SEQ ID NO: 1261728 - DNA, 25 bp, Homo sapien
caatcctgagagacctcacacccgg

SEQ ID NO: 1261729 - DNA, 25 bp, Homo sapien
tttattactacggatcacagcagca

SEQ ID NO: 1261730 - DNA, 25 bp, Homo sapien
attactacggatcacagcagcaacg

SEQ ID NO: 1261731 - DNA, 25 bp, Homo sapien
agaatttattactacggatcacagc

SEQ ID NO: 1261732 - DNA, 25 bp, Homo sapien
aatttattactacggatcacagcag

SEQ ID NO: 1261733 - DNA, 25 bp, Homo sapien
ttagccccgccttcagccagatgcg

SEQ ID NO: 1261734 - DNA, 25 bp, Homo sapien
gccttcagccagatgcgcctcaggt

SEQ ID NO: 1261735 - DNA, 25 bp, Homo sapien
agccagatgcgcctcaggtctttct

SEQ ID NO: 1261736 - DNA, 25 bp, Homo sapien
gcctcaggtctttctcgaacttgat

SEQ ID NO: 1261737 - DNA, 25 bp, Homo sapien
gaaacgtgttctcagcactttgccc

SEQ ID NO: 1261738 - DNA, 25 bp, Homo sapien
ctgcaagacgcagagagagggaccg

SEQ ID NO: 1261739 - DNA, 25 bp, Homo sapien
agtaattcgtggcaaagaaacgtgt

SEQ ID NO: 1261740 - DNA, 25 bp, Homo sapien
cagagagagggaccgccaagtaatt

SEQ ID NO: 1261741 - DNA, 25 bp, Homo sapien
tttgcactgaatttgaggcgcatcc

SEQ ID NO: 1261742 - DNA, 25 bp, Homo sapien
cttcccctatctggctgggcggaca

SEQ ID NO: 1261743 - DNA, 25 bp, Homo sapien
tgcggtcccggtatccagtctgggc

SEQ ID NO: 1261744 - DNA, 25 bp, Homo sapien
gcaggaaccgcgtcttcttcaccag

SEQ ID NO: 1261745 - DNA, 25 bp, Homo sapien
cttgcgagggagagaggccgcccta

SEQ ID NO: 1261746 - DNA, 25 bp, Homo sapien
ttgcgagggagagaggccgccctac

SEQ ID NO: 1261747 - DNA, 25 bp, Homo sapien
taaaggggcccgcagacccggctgc

SEQ ID NO: 1261748 - DNA, 25 bp, Homo sapien
ccggccggcgatgtgctgtaaaggg

SEQ ID NO: 1261749 - DNA, 25 bp, Homo sapien
gggccggccggcgatgtgctgtaaa

SEQ ID NO: 1261750 - DNA, 25 bp, Homo sapien
cagcactccagagacgggccaaggc

SEQ ID NO: 1261751 - DNA, 25 bp, Homo sapien
ccacacaggcccgtcgggttgagga

SEQ ID NO: 1261752 - DNA, 25 bp, Homo sapien
gtcaccgctcgcgagaccacacagg

SEQ ID NO: 1261753 - DNA, 25 bp, Homo sapien
gttgaggagcagcaggttcgtccca

SEQ ID NO: 1261754 - DNA, 25 bp, Homo sapien
tgcagaaaaccagacgccacggtca

SEQ ID NO: 1261755 - DNA, 25 bp, Homo sapien
gcctgaacccctgaggttccctctg

SEQ ID NO: 1261756 - DNA, 25 bp, Homo sapien
cctgaacccctgaggttccctctgt

SEQ ID NO: 1261757 - DNA, 25 bp, Homo sapien
gcactcctaaccaggtgtgcatcct

SEQ ID NO: 1261758 - DNA, 25 bp, Homo sapien
ctaaccaggtgtgcatcctcccatc

SEQ ID NO: 1261759 - DNA, 25 bp, Homo sapien
tgagacccgcactcctaaccaggtg

SEQ ID NO: 1261760 - DNA, 25 bp, Homo sapien
gagctgctgagacccgcactcctaa

SEQ ID NO: 1261761 - DNA, 25 bp, Homo sapien
ctgcccaaggaacggccctcaacag

SEQ ID NO: 1261762 - DNA, 25 bp, Homo sapien
gggaagtcaggcgccccaggagcat

SEQ ID NO: 1261763 - DNA, 25 bp, Homo sapien
ctgggaagtcaggcgccccaggagc

SEQ ID NO: 1261764 - DNA, 25 bp, Homo sapien
tgggaagtcaggcgccccaggagca

SEQ ID NO: 1261765 - DNA, 25 bp, Homo sapien
ggtctgtgggcggcggccacaggtc

SEQ ID NO: 1261766 - DNA, 25 bp, Homo sapien
ggcggcggccacaggtcccagggga

SEQ ID NO: 1261767 - DNA, 25 bp, Homo sapien
gcggcggccacaggtcccaggggag

SEQ ID NO: 1261768 - DNA, 25 bp, Homo sapien
ctgtgggcggcggccacaggtccca

SEQ ID NO: 1261769 - DNA, 25 bp, Homo sapien
aagtgcccgttcaggtcaggcggca

SEQ ID NO: 1261770 - DNA, 25 bp, Homo sapien
ctggaacacaagtgcccgttcaggt

SEQ ID NO: 1261771 - DNA, 25 bp, Homo sapien
actttgcttccaacacagctcgcgc

SEQ ID NO: 1261772 - DNA, 25 bp, Homo sapien
ggcggcagcgccttcagtagtcgcg

SEQ ID NO: 1261773 - DNA, 25 bp, Homo sapien
gaatcgcgttgcctggcgcccggac

SEQ ID NO: 1261774 - DNA, 25 bp, Homo sapien
gcgaatcgcgttgcctggcgcccgg

SEQ ID NO: 1261775 - DNA, 25 bp, Homo sapien
cgcgcgaatcgcgttgcctggcgcc

SEQ ID NO: 1261776 - DNA, 25 bp, Homo sapien
acccccgcgcgaatcgcgttgcctg

SEQ ID NO: 1261777 - DNA, 25 bp, Homo sapien
gcgcccggcgccctcaggcctcccg

SEQ ID NO: 1261778 - DNA, 25 bp, Homo sapien
aggcctcccgctgacccttcccaag

SEQ ID NO: 1261779 - DNA, 25 bp, Homo sapien
ctcggctggaccccgggcccgcctg

SEQ ID NO: 1261780 - DNA, 25 bp, Homo sapien
tcaggcctcccgctgacccttccca

SEQ ID NO: 1261781 - DNA, 25 bp, Homo sapien
tccgcctggtcccttacggaggcaa

SEQ ID NO: 1261782 - DNA, 25 bp, Homo sapien
ccgcaggtccagaatcgtttccgga

SEQ ID NO: 1261783 - DNA, 25 bp, Homo sapien
tccggttagtggaatcacggtccca

SEQ ID NO: 1261784 - DNA, 25 bp, Homo sapien
ggtgcgggccctggatatacccgca

SEQ ID NO: 1261785 - DNA, 25 bp, Homo sapien
gcctgtggagccgtgaaggtgccgg

SEQ ID NO: 1261786 - DNA, 25 bp, Homo sapien
ctgcctgtggagccgtgaaggtgcc

SEQ ID NO: 1261787 - DNA, 25 bp, Homo sapien
ccctgccctgcgaggaacttggggt

SEQ ID NO: 1261788 - DNA, 25 bp, Homo sapien
tgcctgtggagccgtgaaggtgccg

SEQ ID NO: 1261789 - DNA, 25 bp, Homo sapien
cgcagagggcaaatctcaaggaggc

SEQ ID NO: 1261790 - DNA, 25 bp, Homo sapien
gacggtggcctcgtggatgctgggc

SEQ ID NO: 1261791 - DNA, 25 bp, Homo sapien
cccgcagagggcaaatctcaaggag

SEQ ID NO: 1261792 - DNA, 25 bp, Homo sapien
ggcggggacggtggcctcgtggatg

SEQ ID NO: 1261793 - DNA, 25 bp, Homo sapien
gccccaagtgccagggcgaccttgg

SEQ ID NO: 1261794 - DNA, 25 bp, Homo sapien
agacgagatatggggcaagacctgc

SEQ ID NO: 1261795 - DNA, 25 bp, Homo sapien
gggctgccagggagatacccaccca

SEQ ID NO: 1261796 - DNA, 25 bp, Homo sapien
gggcaagacctgcagtcgccccaag

SEQ ID NO: 1261797 - DNA, 25 bp, Homo sapien
tataacaccttcatcagatgacaag

SEQ ID NO: 1261798 - DNA, 25 bp, Homo sapien
gacgtgtatcatctatggccccaca

SEQ ID NO: 1261799 - DNA, 25 bp, Homo sapien
cagacaggccctttgcatcacactg

SEQ ID NO: 1261800 - DNA, 25 bp, Homo sapien
cacactgaactctaggtctgatgac

SEQ ID NO: 1261801 - DNA, 25 bp, Homo sapien
gcctcttcgatagcgtgctttcttt

SEQ ID NO: 1261802 - DNA, 25 bp, Homo sapien
gagaaccccgaggtaccatccagca

SEQ ID NO: 1261803 - DNA, 25 bp, Homo sapien
tttgcctcttcgatagcgtgctttc

SEQ ID NO: 1261804 - DNA, 25 bp, Homo sapien
ggcaggagagaaccccgaggtacca

SEQ ID NO: 1261805 - DNA, 25 bp, Homo sapien
tctttaagcagatttcctgaatttc

SEQ ID NO: 1261806 - DNA, 25 bp, Homo sapien
aaccaatggggacgattgggcaaag

SEQ ID NO: 1261807 - DNA, 25 bp, Homo sapien
caatggggacgattgggcaaaggga

SEQ ID NO: 1261808 - DNA, 25 bp, Homo sapien
tttttccgagcataaagctgcaaga

SEQ ID NO: 1261809 - DNA, 25 bp, Homo sapien
gctggaaccgcacgaagacgtcggt

SEQ ID NO: 1261810 - DNA, 25 bp, Homo sapien
acgtcggtgcgaaggctgtcgttca

SEQ ID NO: 1261811 - DNA, 25 bp, Homo sapien
cacaggcgatgctctctggctggaa

SEQ ID NO: 1261812 - DNA, 25 bp, Homo sapien
ccagcgtccgggcagcaagataaat

SEQ ID NO: 1261813 - DNA, 25 bp, Homo sapien
tgtctactggagtcactaaaacgct

SEQ ID NO: 1261814 - DNA, 25 bp, Homo sapien
ggtcttccgcctgcattatctagag

SEQ ID NO: 1261815 - DNA, 25 bp, Homo sapien
gactcagagctagacagtcctgtga

SEQ ID NO: 1261816 - DNA, 25 bp, Homo sapien
tgcaaagcacgatgcctcagaaaga

SEQ ID NO: 1261817 - DNA, 25 bp, Homo sapien
cccttgggtgcaagttggacgcgtg

SEQ ID NO: 1261818 - DNA, 25 bp, Homo sapien
cgtgggagcatcgtgcggagggaga

SEQ ID NO: 1261819 - DNA, 25 bp, Homo sapien
tgcggagggagactccgcacccaag

SEQ ID NO: 1261820 - DNA, 25 bp, Homo sapien
caagttggacgcgtgggagcatcgt

SEQ ID NO: 1261821 - DNA, 25 bp, Homo sapien
gaagtcctacaggtgcctcttggag

SEQ ID NO: 1261822 - DNA, 25 bp, Homo sapien
aagatgcacaccttttaccagagcg

SEQ ID NO: 1261823 - DNA, 25 bp, Homo sapien
tgatgcaagcgtgccagtgcacagc

SEQ ID NO: 1261824 - DNA, 25 bp, Homo sapien
tgtgagggaatctgacccatgacct

SEQ ID NO: 1261825 - DNA, 25 bp, Homo sapien
tcaatacgattaccaaagcacgaca

SEQ ID NO: 1261826 - DNA, 25 bp, Homo sapien
taacaagaagcacaatcgtcagaga

SEQ ID NO: 1261827 - DNA, 25 bp, Homo sapien
acaatcgtcagagaaccacagcagg

SEQ ID NO: 1261828 - DNA, 25 bp, Homo sapien
caaagcacgacagaggattaacaag

SEQ ID NO: 1261829 - DNA, 25 bp, Homo sapien
cagccttcggtggagagcctgcact

SEQ ID NO: 1261830 - DNA, 25 bp, Homo sapien
ccagccttcggtggagagcctgcac

SEQ ID NO: 1261831 - DNA, 25 bp, Homo sapien
ttggacagcagaggagaagtcttag

SEQ ID NO: 1261832 - DNA, 25 bp, Homo sapien
cttggacagcagaggagaagtctta

SEQ ID NO: 1261833 - DNA, 25 bp, Homo sapien
tgcattgctaaaatcggccccagaa

SEQ ID NO: 1261834 - DNA, 25 bp, Homo sapien
caatgtcagtggagaaacagaccaa

SEQ ID NO: 1261835 - DNA, 25 bp, Homo sapien
ccttacagacttaactccatgggaa

SEQ ID NO: 1261836 - DNA, 25 bp, Homo sapien
cagaccaagtctgcactagcctgtc

SEQ ID NO: 1261837 - DNA, 25 bp, Homo sapien
gtgactgccagtgcccattttggga

SEQ ID NO: 1261838 - DNA, 25 bp, Homo sapien
tgactgccagtgcccattttgggag

SEQ ID NO: 1261839 - DNA, 25 bp, Homo sapien
cgtgactgccagtgcccattttggg

SEQ ID NO: 1261840 - DNA, 25 bp, Homo sapien
gactgccagtgcccattttgggagt

SEQ ID NO: 1261841 - DNA, 25 bp, Homo sapien
aggagcactgggcactcggacaact

SEQ ID NO: 1261842 - DNA, 25 bp, Homo sapien
tgcccaagtgcctcaagtcaacaca

SEQ ID NO: 1261843 - DNA, 25 bp, Homo sapien
tgattggaatttatacagcaggagc

SEQ ID NO: 1261844 - DNA, 25 bp, Homo sapien
aagtcactgggctgcctacccactg

SEQ ID NO: 1261845 - DNA, 25 bp, Homo sapien
accaggtgttggttacgctcacact

SEQ ID NO: 1261846 - DNA, 25 bp, Homo sapien
gctcacactctaacacctgaaggta

SEQ ID NO: 1261847 - DNA, 25 bp, Homo sapien
acacctgaaggtacataacgattat

SEQ ID NO: 1261848 - DNA, 25 bp, Homo sapien
tgttggttacgctcacactctaaca

SEQ ID NO: 1261849 - DNA, 25 bp, Homo sapien
cgggtcaggcagttattaccaagaa

SEQ ID NO: 1261850 - DNA, 25 bp, Homo sapien
tacgggtcaggcagttattaccaag

SEQ ID NO: 1261851 - DNA, 25 bp, Homo sapien
acgggtcaggcagttattaccaaga

SEQ ID NO: 1261852 - DNA, 25 bp, Homo sapien
gggtcaggcagttattaccaagaac

SEQ ID NO: 1261853 - DNA, 25 bp, Homo sapien
aggttgtgcctccactgccactgcc

SEQ ID NO: 1261854 - DNA, 25 bp, Homo sapien
gaggtggaggttgtgcctccactgc

SEQ ID NO: 1261855 - DNA, 25 bp, Homo sapien
ggaggatcacgagggcaagagatga

SEQ ID NO: 1261856 - DNA, 25 bp, Homo sapien
attaactgtagagaaaggaaaacat

SEQ ID NO: 1261857 - DNA, 25 bp, Homo sapien
gccaagtcagggatgcactcagtcc

SEQ ID NO: 1261858 - DNA, 25 bp, Homo sapien
gagccttcaactgcactgaggtgga

SEQ ID NO: 1261859 - DNA, 25 bp, Homo sapien
aatacgtcaggaactattcttgaga

SEQ ID NO: 1261860 - DNA, 25 bp, Homo sapien
taaacagctgacactagaagacgaa

SEQ ID NO: 1261861 - DNA, 25 bp, Homo sapien
cccaactctttgagaactcgtcttt

SEQ ID NO: 1261862 - DNA, 25 bp, Homo sapien
gagaactcgtctttccgcctttata

SEQ ID NO: 1261863 - DNA, 25 bp, Homo sapien
atggacgcagaaacccaactctttg

SEQ ID NO: 1261864 - DNA, 25 bp, Homo sapien
atgcttcacatggacgcagaaaccc

SEQ ID NO: 1261865 - DNA, 25 bp, Homo sapien
tgatgaacaaaactgcacaccgctc

SEQ ID NO: 1261866 - DNA, 25 bp, Homo sapien
tgcacaagcatagaccgaacatagc

SEQ ID NO: 1261867 - DNA, 25 bp, Homo sapien
catagcaagttttaggatctcgtgg

SEQ ID NO: 1261868 - DNA, 25 bp, Homo sapien
tatgtgactcacgataggaaggtac

SEQ ID NO: 1261869 - DNA, 25 bp, Homo sapien
gggcctcttctatcttggaagccag

SEQ ID NO: 1261870 - DNA, 25 bp, Homo sapien
tggaagccaggtggacacaggccat

SEQ ID NO: 1261871 - DNA, 25 bp, Homo sapien
tctctcagctgtcgaaggcggtgaa

SEQ ID NO: 1261872 - DNA, 25 bp, Homo sapien
tgaaacacattgatgacgtcccgta

SEQ ID NO: 1261873 - DNA, 25 bp, Homo sapien
aagcattgcaacacgcccatgtttg

SEQ ID NO: 1261874 - DNA, 25 bp, Homo sapien
gcggaagcattgcaacacgcccatg

SEQ ID NO: 1261875 - DNA, 25 bp, Homo sapien
ctgaagcggaagcattgcaacacgc

SEQ ID NO: 1261876 - DNA, 25 bp, Homo sapien
tgtccccagccacggcgtcctgacg

SEQ ID NO: 1261877 - DNA, 25 bp, Homo sapien
aaaagaaccgctggaacaacacctg

SEQ ID NO: 1261878 - DNA, 25 bp, Homo sapien
gacttggtataaaagaaccgctgga

SEQ ID NO: 1261879 - DNA, 25 bp, Homo sapien
catggagtgcttcacgaaggacttg

SEQ ID NO: 1261880 - DNA, 25 bp, Homo sapien
ctccatggagtgcttcacgaaggac

SEQ ID NO: 1261881 - DNA, 25 bp, Homo sapien
ctagagtagaagaaagtttccgtat

SEQ ID NO: 1261882 - DNA, 25 bp, Homo sapien
ttcccacgtccacaaaggctcttcg

SEQ ID NO: 1261883 - DNA, 25 bp, Homo sapien
tcgcggccgaaagtcatcgagtaac

SEQ ID NO: 1261884 - DNA, 25 bp, Homo sapien
gtgggactccccacgcagaaccaaa

SEQ ID NO: 1261885 - DNA, 25 bp, Homo sapien
gaaccaaacactgaaacgcttccca

SEQ ID NO: 1261886 - DNA, 25 bp, Homo sapien
ctggctagggaatggcgccgaggct

SEQ ID NO: 1261887 - DNA, 25 bp, Homo sapien
gggctggctagggaatggcgccgag

SEQ ID NO: 1261888 - DNA, 25 bp, Homo sapien
tggctagggaatggcgccgaggctg

SEQ ID NO: 1261889 - DNA, 25 bp, Homo sapien
gctggctagggaatggcgccgaggc

SEQ ID NO: 1261890 - DNA, 25 bp, Homo sapien
cggcgtgaaacggagcttgtcgtca

SEQ ID NO: 1261891 - DNA, 25 bp, Homo sapien
aaggtgatgagcaccccggagtaca

SEQ ID NO: 1261892 - DNA, 25 bp, Homo sapien
ctctgtgtcggtgtcgaggccgctc

SEQ ID NO: 1261893 - DNA, 25 bp, Homo sapien
gccgctcgacatggacggcgtgaaa

SEQ ID NO: 1261894 - DNA, 25 bp, Homo sapien
ggcgccggccgctgccgcgggagct

SEQ ID NO: 1261895 - DNA, 25 bp, Homo sapien
gccgctgccgcgggagctgccgacc

SEQ ID NO: 1261896 - DNA, 25 bp, Homo sapien
cccagatcccggggcgccggccgct

SEQ ID NO: 1261897 - DNA, 25 bp, Homo sapien
ctgagggtgcgcccccagatcccgg

SEQ ID NO: 1261898 - DNA, 25 bp, Homo sapien
tttgtgccgccgactccccttcggc

SEQ ID NO: 1261899 - DNA, 25 bp, Homo sapien
ttgtgccgccgactccccttcggct

SEQ ID NO: 1261900 - DNA, 25 bp, Homo sapien
gcagttaccggaacctttgccagga

SEQ ID NO: 1261901 - DNA, 25 bp, Homo sapien
tgcgatcgaccacagctgtgcagga

SEQ ID NO: 1261902 - DNA, 25 bp, Homo sapien
aggactagtacaggaccacgggtga

SEQ ID NO: 1261903 - DNA, 25 bp, Homo sapien
tatctgttgctgcagttaccggaac

SEQ ID NO: 1261904 - DNA, 25 bp, Homo sapien
tcatgaggcacagtgacaagggcca

SEQ ID NO: 1261905 - DNA, 25 bp, Homo sapien
catgcagcggaaaggacagtgaacg

SEQ ID NO: 1261906 - DNA, 25 bp, Homo sapien
ggcctgaagccatctctagcaagtg

SEQ ID NO: 1261907 - DNA, 25 bp, Homo sapien
gaagggcacgttcccacaggattca

SEQ ID NO: 1261908 - DNA, 25 bp, Homo sapien
agggccatccctcatgtctgttatt

SEQ ID NO: 1261909 - DNA, 25 bp, Homo sapien
caaactgcaaattactctgtctctt

SEQ ID NO: 1261910 - DNA, 25 bp, Homo sapien
tctgttattgggttgtagataaaca

SEQ ID NO: 1261911 - DNA, 25 bp, Homo sapien
caaaacatggacatcatctgtgagg

SEQ ID NO: 1261912 - DNA, 25 bp, Homo sapien
ctggaaaaaatgccttcaggttcct

SEQ ID NO: 1261913 - DNA, 25 bp, Homo sapien
cactctggaaaaaatgccttcaggt

SEQ ID NO: 1261914 - DNA, 25 bp, Homo sapien
ctctggaaaaaatgccttcaggttc

SEQ ID NO: 1261915 - DNA, 25 bp, Homo sapien
cccaaggcagcagcaaatccttcgt

SEQ ID NO: 1261916 - DNA, 25 bp, Homo sapien
ttgaaagtctttggctcgtagatgg

SEQ ID NO: 1261917 - DNA, 25 bp, Homo sapien
tggccagatccgctaggactttcct

SEQ ID NO: 1261918 - DNA, 25 bp, Homo sapien
aagatttgaaagtctttggctcgta

SEQ ID NO: 1261919 - DNA, 25 bp, Homo sapien
gatccgctaggactttcctgttgag

SEQ ID NO: 1261920 - DNA, 25 bp, Homo sapien
cctttaagccaacctggaagtgcct

SEQ ID NO: 1261921 - DNA, 25 bp, Homo sapien
gcagaggacttccaggcaggatgct

SEQ ID NO: 1261922 - DNA, 25 bp, Homo sapien
cctaggagaatcctatctgggtggc

SEQ ID NO: 1261923 - DNA, 25 bp, Homo sapien
gagcattaaattcagctaccaaggc

SEQ ID NO: 1261924 - DNA, 25 bp, Homo sapien
tttgtaaagcaccaaagagtgcctt

SEQ ID NO: 1261925 - DNA, 25 bp, Homo sapien
gcccggccaagtatgtctcctttct

SEQ ID NO: 1261926 - DNA, 25 bp, Homo sapien
actacagttccctgagtaaaatggg

SEQ ID NO: 1261927 - DNA, 25 bp, Homo sapien
cctaagcctaccctgaagatctttg

SEQ ID NO: 1261928 - DNA, 25 bp, Homo sapien
aagtgttgggatgcctggccttttt

SEQ ID NO: 1261929 - DNA, 25 bp, Homo sapien
caaagtgttgggatgcctggccttt

SEQ ID NO: 1261930 - DNA, 25 bp, Homo sapien
ttaatggggaaacatcaggacttac

SEQ ID NO: 1261931 - DNA, 25 bp, Homo sapien
tttcttaatggggaaacatcaggac

SEQ ID NO: 1261932 - DNA, 25 bp, Homo sapien
gacgtgccctgtttccaattctgct

SEQ ID NO: 1261933 - DNA, 25 bp, Homo sapien
atcccagaaagacgtgccctgtttc

SEQ ID NO: 1261934 - DNA, 25 bp, Homo sapien
gtgccctgtttccaattctgctctg

SEQ ID NO: 1261935 - DNA, 25 bp, Homo sapien
gaaagacgtgccctgtttccaattc

SEQ ID NO: 1261936 - DNA, 25 bp, Homo sapien
catattgataccacacttaacatgg

SEQ ID NO: 1261937 - DNA, 25 bp, Homo sapien
ggctgttgctggcactattcctagg

SEQ ID NO: 1261938 - DNA, 25 bp, Homo sapien
tacagcccagaagtcagtctccagg

SEQ ID NO: 1261939 - DNA, 25 bp, Homo sapien
ggcactattcctaggcacaatctca

SEQ ID NO: 1261940 - DNA, 25 bp, Homo sapien
gatgtccagaatttcagtgggaccc

SEQ ID NO: 1261941 - DNA, 25 bp, Homo sapien
ctaaattcccaatgagcgctggata

SEQ ID NO: 1261942 - DNA, 25 bp, Homo sapien
cagtccatgttcctggctagcagct

SEQ ID NO: 1261943 - DNA, 25 bp, Homo sapien
tgagcgctggatacttcagtccatg

SEQ ID NO: 1261944 - DNA, 25 bp, Homo sapien
gatacttcagtccatgttcctggct

SEQ ID NO: 1261945 - DNA, 25 bp, Homo sapien
gcctaagcgaaatcaagaccctgtt

SEQ ID NO: 1261946 - DNA, 25 bp, Homo sapien
gagacgaggttgcattaagcctaga

SEQ ID NO: 1261947 - DNA, 25 bp, Homo sapien
gtgccatcactctggcctaagcgaa

SEQ ID NO: 1261948 - DNA, 25 bp, Homo sapien
tggatgttatgtcccagcaaagcct

SEQ ID NO: 1261949 - DNA, 25 bp, Homo sapien
cataatttgtcggagtttcgaagca

SEQ ID NO: 1261950 - DNA, 25 bp, Homo sapien
caggcgtggtctcttcgaggagcac

SEQ ID NO: 1261951 - DNA, 25 bp, Homo sapien
cgttagatgctaggttcatgaggct

SEQ ID NO: 1261952 - DNA, 25 bp, Homo sapien
cagcagatagtagccctggagggtt

SEQ ID NO: 1261953 - DNA, 25 bp, Homo sapien
tttcttcaggtatcgggctttggtg

SEQ ID NO: 1261954 - DNA, 25 bp, Homo sapien
ctttttcttcaggtatcgggctttg

SEQ ID NO: 1261955 - DNA, 25 bp, Homo sapien
tcgaatcacggttctgaccgccaac

SEQ ID NO: 1261956 - DNA, 25 bp, Homo sapien
atttcacaaaggctcgaatcacggt

SEQ ID NO: 1261957 - DNA, 25 bp, Homo sapien
ctgtagcagcgatttttccttcccc

SEQ ID NO: 1261958 - DNA, 25 bp, Homo sapien
cctggatccgaaagtagcggtcggt

SEQ ID NO: 1261959 - DNA, 25 bp, Homo sapien
ggtcggtgacgcgattccgcagcca

SEQ ID NO: 1261960 - DNA, 25 bp, Homo sapien
tcggtgacgcgattccgcagccaga

SEQ ID NO: 1261961 - DNA, 25 bp, Homo sapien
agcacctcctggatccgaaagtagc

SEQ ID NO: 1261962 - DNA, 25 bp, Homo sapien
ctgcaggccggcgtcccgaacactc

SEQ ID NO: 1261963 - DNA, 25 bp, Homo sapien
ggcgtcccgaacactcaacaacgca

SEQ ID NO: 1261964 - DNA, 25 bp, Homo sapien
ggccggcgtcccgaacactcaacaa

SEQ ID NO: 1261965 - DNA, 25 bp, Homo sapien
gcaggccggcgtcccgaacactcaa

SEQ ID NO: 1261966 - DNA, 25 bp, Homo sapien
tgctcctgaactcgcggtggtggtg

SEQ ID NO: 1261967 - DNA, 25 bp, Homo sapien
gggcgaaggtcgtctcccgtcagcc

SEQ ID NO: 1261968 - DNA, 25 bp, Homo sapien
gggtcagcccctgcgatacttccgg

SEQ ID NO: 1261969 - DNA, 25 bp, Homo sapien
catcttgcccgggtcggaaatggtg

SEQ ID NO: 1261970 - DNA, 25 bp, Homo sapien
gcggtggtggcgcgcgcctgaggtc

SEQ ID NO: 1261971 - DNA, 25 bp, Homo sapien
ccagctactcaggaggctgagacgg

SEQ ID NO: 1261972 - DNA, 25 bp, Homo sapien
agctactcaggaggctgagacggga

SEQ ID NO: 1261973 - DNA, 25 bp, Homo sapien
ctactcaggaggctgagacgggagg

SEQ ID NO: 1261974 - DNA, 25 bp, Homo sapien
gggtctcactctcacccagtctgga

SEQ ID NO: 1261975 - DNA, 25 bp, Homo sapien
ccttgtctcaaaaaacaagaagaag

SEQ ID NO: 1261976 - DNA, 25 bp, Homo sapien
ctagcgtgggtgacagatcaagacc

SEQ ID NO: 1261977 - DNA, 25 bp, Homo sapien
atggggtctcactctcacccagtct

SEQ ID NO: 1261978 - DNA, 25 bp, Homo sapien
gctgaaccacaagtgcatgcctggc

SEQ ID NO: 1261979 - DNA, 25 bp, Homo sapien
tgagtagctgaaccacaagtgcatg

SEQ ID NO: 1261980 - DNA, 25 bp, Homo sapien
accacaagtgcatgcctggccaatt

SEQ ID NO: 1261981 - DNA, 25 bp, Homo sapien
gggattacagacacaactggcctac

SEQ ID NO: 1261982 - DNA, 25 bp, Homo sapien
gattttcagtttatggacatgactg

SEQ ID NO: 1261983 - DNA, 25 bp, Homo sapien
ggattttcagtttatggacatgact

SEQ ID NO: 1261984 - DNA, 25 bp, Homo sapien
ctgagcgatggggacactcactgtg

SEQ ID NO: 1261985 - DNA, 25 bp, Homo sapien
ttactcgcatttcctgagcgatggg

SEQ ID NO: 1261986 - DNA, 25 bp, Homo sapien
agatttttattactcgcatttcctg

SEQ ID NO: 1261987 - DNA, 25 bp, Homo sapien
agaagctgttgttattggagatttt

SEQ ID NO: 1261988 - DNA, 25 bp, Homo sapien
actaatttctaaacatggctcctgg

SEQ ID NO: 1261989 - DNA, 25 bp, Homo sapien
aatacaggtatcagacaagggagca

SEQ ID NO: 1261990 - DNA, 25 bp, Homo sapien
agagagaaacaacacggcagggagt

SEQ ID NO: 1261991 - DNA, 25 bp, Homo sapien
gttcctattactattgttactcttg

SEQ ID NO: 1261992 - DNA, 25 bp, Homo sapien
cttctacacagttaagtttcactga

SEQ ID NO: 1261993 - DNA, 25 bp, Homo sapien
acttctacacagttaagtttcactg

SEQ ID NO: 1261994 - DNA, 25 bp, Homo sapien
ccacacatccgctcacatccgctca

SEQ ID NO: 1261995 - DNA, 25 bp, Homo sapien
aacatcagatggaatatctgatcca

SEQ ID NO: 1261996 - DNA, 25 bp, Homo sapien
cacatccgctcacatccgctcaggg

SEQ ID NO: 1261997 - DNA, 25 bp, Homo sapien
agggactgcagaatgtagcggggag

SEQ ID NO: 1261998 - DNA, 25 bp, Homo sapien
ttgttgaagtatggagaaggctgga

SEQ ID NO: 1261999 - DNA, 25 bp, Homo sapien
tgttgaagtatggagaaggctggag

SEQ ID NO: 1262000 - DNA, 25 bp, Homo sapien
cagcccgtggactctatgccctcac

SEQ ID NO: 1262001 - DNA, 25 bp, Homo sapien
tcagcccgtggactctatgccctca

SEQ ID NO: 1262002 - DNA, 25 bp, Homo sapien
tccaagttcaggcagcgcctggggc

SEQ ID NO: 1262003 - DNA, 25 bp, Homo sapien
ccaagttcaggcagcgcctggggca

SEQ ID NO: 1262004 - DNA, 25 bp, Homo sapien
ctccaagttcaggcagcgcctgggg

SEQ ID NO: 1262005 - DNA, 25 bp, Homo sapien
tggccttcccgagaggcgtgatgca

SEQ ID NO: 1262006 - DNA, 25 bp, Homo sapien
tctttcggagccagccggtagcatc

SEQ ID NO: 1262007 - DNA, 25 bp, Homo sapien
ctgggtgaccagcaactggacggca

SEQ ID NO: 1262008 - DNA, 25 bp, Homo sapien
agcagaagccccacggtaggcccat

SEQ ID NO: 1262009 - DNA, 25 bp, Homo sapien
cgcgagtgtccgtgccaggcggcct

SEQ ID NO: 1262010 - DNA, 25 bp, Homo sapien
gcggcagccacgagcagggcgccgt

SEQ ID NO: 1262011 - DNA, 25 bp, Homo sapien
tcggccacccgcgagtgtccgtgcc

SEQ ID NO: 1262012 - DNA, 25 bp, Homo sapien
ggccgccagacccagcgctgtggcc

SEQ ID NO: 1262013 - DNA, 25 bp, Homo sapien
gcccctcgctgcagcaggagacgca

SEQ ID NO: 1262014 - DNA, 25 bp, Homo sapien
cccctcgctgcagcaggagacgcac

SEQ ID NO: 1262015 - DNA, 25 bp, Homo sapien
gggcccctcgctgcagcaggagacg

SEQ ID NO: 1262016 - DNA, 25 bp, Homo sapien
cggggcccctcgctgcagcaggaga

SEQ ID NO: 1262017 - DNA, 25 bp, Homo sapien
gggcgcgtggccccgcagcacggcc

SEQ ID NO: 1262018 - DNA, 25 bp, Homo sapien
aggtggagcggggtccggcctgcgt

SEQ ID NO: 1262019 - DNA, 25 bp, Homo sapien
tggccccgcagcacggccaggtgga

SEQ ID NO: 1262020 - DNA, 25 bp, Homo sapien
gccaggtggagcggggtccggcctg

SEQ ID NO: 1262021 - DNA, 25 bp, Homo sapien
ttgccgcagcagctgcgtcaccagg

SEQ ID NO: 1262022 - DNA, 25 bp, Homo sapien
cgcagcagctgcgtcaccaggcctg

SEQ ID NO: 1262023 - DNA, 25 bp, Homo sapien
gcagctgcgtcaccaggcctgcagg

SEQ ID NO: 1262024 - DNA, 25 bp, Homo sapien
cttgccgcagcagctgcgtcaccag

SEQ ID NO: 1262025 - DNA, 25 bp, Homo sapien
ccccagccctggacaacactaggcc

SEQ ID NO: 1262026 - DNA, 25 bp, Homo sapien
gggcctcttcggagtccagctccat

SEQ ID NO: 1262027 - DNA, 25 bp, Homo sapien
gccctggacaacactaggcccctct

SEQ ID NO: 1262028 - DNA, 25 bp, Homo sapien
ctggacaacactaggcccctctgtc

SEQ ID NO: 1262029 - DNA, 25 bp, Homo sapien
accacttagccttcagaggggcttg

SEQ ID NO: 1262030 - DNA, 25 bp, Homo sapien
cagccgtgtcccaggccaactggag

SEQ ID NO: 1262031 - DNA, 25 bp, Homo sapien
gcagggatcctacatccactgtgga

SEQ ID NO: 1262032 - DNA, 25 bp, Homo sapien
cacttagccttcagaggggcttggc

SEQ ID NO: 1262033 - DNA, 25 bp, Homo sapien
ggctgaggccacctgacgctgttta

SEQ ID NO: 1262034 - DNA, 25 bp, Homo sapien
tgtggacgaaagttgctcagacgcc

SEQ ID NO: 1262035 - DNA, 25 bp, Homo sapien
tgagggtcctctgtagacgggttct

SEQ ID NO: 1262036 - DNA, 25 bp, Homo sapien
cgcagccttggatgtaccccgatgt

SEQ ID NO: 1262037 - DNA, 25 bp, Homo sapien
ctggggccaggcaggagaagggagc

SEQ ID NO: 1262038 - DNA, 25 bp, Homo sapien
tggggccaggcaggagaagggagca

SEQ ID NO: 1262039 - DNA, 25 bp, Homo sapien
ggggccaggcaggagaagggagcat

SEQ ID NO: 1262040 - DNA, 25 bp, Homo sapien
gctgcctctgcaatgcttgtaggac

SEQ ID NO: 1262041 - DNA, 25 bp, Homo sapien
tctgcaatgcttgtaggacccacac

SEQ ID NO: 1262042 - DNA, 25 bp, Homo sapien
gcaatgcttgtaggacccacacaca

SEQ ID NO: 1262043 - DNA, 25 bp, Homo sapien
cctctgcaatgcttgtaggacccac

SEQ ID NO: 1262044 - DNA, 25 bp, Homo sapien
gcagtgggcgctttttctgagcctc

SEQ ID NO: 1262045 - DNA, 25 bp, Homo sapien
tgctgcgtcccggatctcctgttca

SEQ ID NO: 1262046 - DNA, 25 bp, Homo sapien
ccgggcccctttctgctggcacggg

SEQ ID NO: 1262047 - DNA, 25 bp, Homo sapien
gaaaatgtcgttgaagtttcactaa

SEQ ID NO: 1262048 - DNA, 25 bp, Homo sapien
ctccgggtccccggtgccgcgcgct

SEQ ID NO: 1262049 - DNA, 25 bp, Homo sapien
cgctccgggtccccggtgccgcgcg

SEQ ID NO: 1262050 - DNA, 25 bp, Homo sapien
ccgggtccccggtgccgcgcgctgt

SEQ ID NO: 1262051 - DNA, 25 bp, Homo sapien
cgggtccccggtgccgcgcgctgtt

SEQ ID NO: 1262052 - DNA, 25 bp, Homo sapien
cgctgctggtgctcgcctcggccgt

SEQ ID NO: 1262053 - DNA, 25 bp, Homo sapien
ccgcggcgctcatcgtgttcgggct

SEQ ID NO: 1262054 - DNA, 25 bp, Homo sapien
gtgttcgggcttctctcgctgccgc

SEQ ID NO: 1262055 - DNA, 25 bp, Homo sapien
gcgctcatcgtgttcgggcttctct

SEQ ID NO: 1262056 - DNA, 25 bp, Homo sapien
agcctcggtcggctctctccgggag

SEQ ID NO: 1262057 - DNA, 25 bp, Homo sapien
gcattcagacatgcgccagcctcgg

SEQ ID NO: 1262058 - DNA, 25 bp, Homo sapien
tctctccgggagacactaagatctc

SEQ ID NO: 1262059 - DNA, 25 bp, Homo sapien
ggcagccgggctcagcctatggcca

SEQ ID NO: 1262060 - DNA, 25 bp, Homo sapien
tgtccagtttcaccacgaattcctt

SEQ ID NO: 1262061 - DNA, 25 bp, Homo sapien
gtgtaagccacaggtccacaacgtt

SEQ ID NO: 1262062 - DNA, 25 bp, Homo sapien
gttcatcagctctggaaatccctca

SEQ ID NO: 1262063 - DNA, 25 bp, Homo sapien
gaaatccctcaacaattgtgtccag

SEQ ID NO: 1262064 - DNA, 25 bp, Homo sapien
tatgttaacatatccaggccaggca

SEQ ID NO: 1262065 - DNA, 25 bp, Homo sapien
aattattatgttaacatatccaggc

SEQ ID NO: 1262066 - DNA, 25 bp, Homo sapien
catcaaattactcccttccgtctaa

SEQ ID NO: 1262067 - DNA, 25 bp, Homo sapien
tctaatctgctgattaactcattca

SEQ ID NO: 1262068 - DNA, 25 bp, Homo sapien
tcagtgacccttgagacccctggtt

SEQ ID NO: 1262069 - DNA, 25 bp, Homo sapien
gatgcttccctccagagactattcc

SEQ ID NO: 1262070 - DNA, 25 bp, Homo sapien
gctgttatcggagacaattctgagg

SEQ ID NO: 1262071 - DNA, 25 bp, Homo sapien
tccagagactattccccttttccag

SEQ ID NO: 1262072 - DNA, 25 bp, Homo sapien
tagtacatcatattgccagcagggc

SEQ ID NO: 1262073 - DNA, 25 bp, Homo sapien
cagggtcaaggctcattccgtggcc

SEQ ID NO: 1262074 - DNA, 25 bp, Homo sapien
tgtgaccagcaaggtctgggctccg

SEQ ID NO: 1262075 - DNA, 25 bp, Homo sapien
tgggtcgagtccagcagaagtctcg

SEQ ID NO: 1262076 - DNA, 25 bp, Homo sapien
ggaagctcttggctgaggatccgcc

SEQ ID NO: 1262077 - DNA, 25 bp, Homo sapien
ttggctgaggatccgcctggtcccg

SEQ ID NO: 1262078 - DNA, 25 bp, Homo sapien
gcctggtcccggagccgtgaaaaca

SEQ ID NO: 1262079 - DNA, 25 bp, Homo sapien
tctggtcgccactaggggttgaaga

SEQ ID NO: 1262080 - DNA, 25 bp, Homo sapien
ccgaccagctcacagaggaacacct

SEQ ID NO: 1262081 - DNA, 25 bp, Homo sapien
gtggaaggcacggagcagcgaagcc

SEQ ID NO: 1262082 - DNA, 25 bp, Homo sapien
gctgagcggagaggccagctccctt

SEQ ID NO: 1262083 - DNA, 25 bp, Homo sapien
gcctcaggcggctgtttccaaaggt

SEQ ID NO: 1262084 - DNA, 25 bp, Homo sapien
tgggaggccgtagccccggagagca

SEQ ID NO: 1262085 - DNA, 25 bp, Homo sapien
tgtgggaggccgtagccccggagag

SEQ ID NO: 1262086 - DNA, 25 bp, Homo sapien
tgcctgtgggaggccgtagccccgg

SEQ ID NO: 1262087 - DNA, 25 bp, Homo sapien
cctgtgggaggccgtagccccggag

SEQ ID NO: 1262088 - DNA, 25 bp, Homo sapien
ctaagcagctcccttatcggccacc

SEQ ID NO: 1262089 - DNA, 25 bp, Homo sapien
taagcagctcccttatcggccacca

SEQ ID NO: 1262090 - DNA, 25 bp, Homo sapien
aagcagctcccttatcggccaccat

SEQ ID NO: 1262091 - DNA, 25 bp, Homo sapien
tctcccgctgatggcgagctgaagg

SEQ ID NO: 1262092 - DNA, 25 bp, Homo sapien
cctagctggagggactccaggcaga

SEQ ID NO: 1262093 - DNA, 25 bp, Homo sapien
caagaagacccgctcactttttcca

SEQ ID NO: 1262094 - DNA, 25 bp, Homo sapien
tgtgccttctcccgctgatggcgag

SEQ ID NO: 1262095 - DNA, 25 bp, Homo sapien
ggcccctcgaagtggtacagcttgc

SEQ ID NO: 1262096 - DNA, 25 bp, Homo sapien
gcgaggcccctcgaagtggtacagc

SEQ ID NO: 1262097 - DNA, 25 bp, Homo sapien
ctggcgaggcccctcgaagtggtac

SEQ ID NO: 1262098 - DNA, 25 bp, Homo sapien
gaggcccctcgaagtggtacagctt

SEQ ID NO: 1262099 - DNA, 25 bp, Homo sapien
ccaccgggcccaggcggaagcacca

SEQ ID NO: 1262100 - DNA, 25 bp, Homo sapien
gggcccaggcggaagcaccaggcat

SEQ ID NO: 1262101 - DNA, 25 bp, Homo sapien
accgggcccaggcggaagcaccagg

SEQ ID NO: 1262102 - DNA, 25 bp, Homo sapien
cgggcccaggcggaagcaccaggca

SEQ ID NO: 1262103 - DNA, 25 bp, Homo sapien
taggcaaagtcgagtgctggccgtc

SEQ ID NO: 1262104 - DNA, 25 bp, Homo sapien
gggacacagctctcccttgttcctg

SEQ ID NO: 1262105 - DNA, 25 bp, Homo sapien
tttttaggcaaagtcgagtgctggc

SEQ ID NO: 1262106 - DNA, 25 bp, Homo sapien
aagtcgagtgctggccgtccgcacg

SEQ ID NO: 1262107 - DNA, 25 bp, Homo sapien
tgtggagccccatccgttctcccgc

SEQ ID NO: 1262108 - DNA, 25 bp, Homo sapien
gtggagccccatccgttctcccgcg

SEQ ID NO: 1262109 - DNA, 25 bp, Homo sapien
gagccccatccgttctcccgcggcg

SEQ ID NO: 1262110 - DNA, 25 bp, Homo sapien
cccatccgttctcccgcggcgcatc

SEQ ID NO: 1262111 - DNA, 25 bp, Homo sapien
ctgaggaggccctggaagagggcca

SEQ ID NO: 1262112 - DNA, 25 bp, Homo sapien
ccagctctgagctgaggaggccctg

SEQ ID NO: 1262113 - DNA, 25 bp, Homo sapien
ctcccagctctgagctgaggaggcc

SEQ ID NO: 1262114 - DNA, 25 bp, Homo sapien
tgaggaggccctggaagagggccat

SEQ ID NO: 1262115 - DNA, 25 bp, Homo sapien
gtagggttctcctgtccaggggaca

SEQ ID NO: 1262116 - DNA, 25 bp, Homo sapien
tgtccctcaggacgccccctgcaac

SEQ ID NO: 1262117 - DNA, 25 bp, Homo sapien
tcaagagctcctgtctcaccagtgg

SEQ ID NO: 1262118 - DNA, 25 bp, Homo sapien
caagcaggggaaatctgccctggga

SEQ ID NO: 1262119 - DNA, 25 bp, Homo sapien
gctgttccggctttcaggctgctgg

SEQ ID NO: 1262120 - DNA, 25 bp, Homo sapien
tcagtccctgggatacatgtcctgt

SEQ ID NO: 1262121 - DNA, 25 bp, Homo sapien
caaggcgaaaccacggtctggacgt

SEQ ID NO: 1262122 - DNA, 25 bp, Homo sapien
caaggccgggactagaattgaggca

SEQ ID NO: 1262123 - DNA, 25 bp, Homo sapien
acgtggcgctagtgcctgagtccaa

SEQ ID NO: 1262124 - DNA, 25 bp, Homo sapien
cggacacggactacgacgtggcgct

SEQ ID NO: 1262125 - DNA, 25 bp, Homo sapien
ccagggaacgccacggactggatct

SEQ ID NO: 1262126 - DNA, 25 bp, Homo sapien
cagactcgggctactatgtgctgga

SEQ ID NO: 1262127 - DNA, 25 bp, Homo sapien
agatcctgcgggtgcgcacgcggcc

SEQ ID NO: 1262128 - DNA, 25 bp, Homo sapien
cacgcggcccggtgaggcagggccg

SEQ ID NO: 1262129 - DNA, 25 bp, Homo sapien
tgcgggtgcgcacgcggcccggtga

SEQ ID NO: 1262130 - DNA, 25 bp, Homo sapien
ctgaggccccagatcctgcgggtgc

SEQ ID NO: 1262131 - DNA, 25 bp, Homo sapien
agccgtgagccgtaagccggcgtcc

SEQ ID NO: 1262132 - DNA, 25 bp, Homo sapien
cagacgggtgcaggcccggcctttc

SEQ ID NO: 1262133 - DNA, 25 bp, Homo sapien
tttccccacgcggactccgcgcgac

SEQ ID NO: 1262134 - DNA, 25 bp, Homo sapien
gccggcgcctacctgagggcccctg

SEQ ID NO: 1262135 - DNA, 25 bp, Homo sapien
agactcccacgtgtgaagaccgggc

SEQ ID NO: 1262136 - DNA, 25 bp, Homo sapien
cagctagcagccactgggaatcaga

SEQ ID NO: 1262137 - DNA, 25 bp, Homo sapien
tccgtgggtgataattgagagcgtc

SEQ ID NO: 1262138 - DNA, 25 bp, Homo sapien
gaaaccttccgtcgtgagggagcac

SEQ ID NO: 1262139 - DNA, 25 bp, Homo sapien
tggttggggcggaccagtagcccag

SEQ ID NO: 1262140 - DNA, 25 bp, Homo sapien
gctcttcttttggttgtgcgaggac

SEQ ID NO: 1262141 - DNA, 25 bp, Homo sapien
accagtagcccagggccatacactg

SEQ ID NO: 1262142 - DNA, 25 bp, Homo sapien
cagtgcactttgaggagtgctggca

SEQ ID NO: 1262143 - DNA, 25 bp, Homo sapien
aaggagcagggggcccatgctggcc

SEQ ID NO: 1262144 - DNA, 25 bp, Homo sapien
gagcagggggcccatgctggcccag

SEQ ID NO: 1262145 - DNA, 25 bp, Homo sapien
ggaaggagcagggggcccatgctgg

SEQ ID NO: 1262146 - DNA, 25 bp, Homo sapien
tgcccattggggaaggagcaggggg

SEQ ID NO: 1262147 - DNA, 25 bp, Homo sapien
agaccagaacgagtggggaaggagc

SEQ ID NO: 1262148 - DNA, 25 bp, Homo sapien
ctgagaccagaacgagtggggaagg

SEQ ID NO: 1262149 - DNA, 25 bp, Homo sapien
accagaacgagtggggaaggagcag

SEQ ID NO: 1262150 - DNA, 25 bp, Homo sapien
tgagaccagaacgagtggggaagga

SEQ ID NO: 1262151 - DNA, 25 bp, Homo sapien
gccgggcccccgagaagaatgaggc

SEQ ID NO: 1262152 - DNA, 25 bp, Homo sapien
aggccgggcccccgagaagaatgag

SEQ ID NO: 1262153 - DNA, 25 bp, Homo sapien
ccgggcccccgagaagaatgaggct

SEQ ID NO: 1262154 - DNA, 25 bp, Homo sapien
tcgggggaatcacagcaacgagaca

SEQ ID NO: 1262155 - DNA, 25 bp, Homo sapien
cagcaacgagacagcacagtgccat

SEQ ID NO: 1262156 - DNA, 25 bp, Homo sapien
tcagacaggaaacctttgctttggg

SEQ ID NO: 1262157 - DNA, 25 bp, Homo sapien
ctcgctgctggaggactctcagaca

SEQ ID NO: 1262158 - DNA, 25 bp, Homo sapien
ccgcaaaacattgtccctaactcca

SEQ ID NO: 1262159 - DNA, 25 bp, Homo sapien
cgcaaaacattgtccctaactccac

SEQ ID NO: 1262160 - DNA, 25 bp, Homo sapien
caaaacattgtccctaactccaccg

SEQ ID NO: 1262161 - DNA, 25 bp, Homo sapien
gcaaaacattgtccctaactccacc

SEQ ID NO: 1262162 - DNA, 25 bp, Homo sapien
cagccttactgctcacacaaaacct

SEQ ID NO: 1262163 - DNA, 25 bp, Homo sapien
ggactctttacatggacgcacatga

SEQ ID NO: 1262164 - DNA, 25 bp, Homo sapien
gacgcacatgacatgaactactgat

SEQ ID NO: 1262165 - DNA, 25 bp, Homo sapien
ttggtggactctttacatggacgca

SEQ ID NO: 1262166 - DNA, 25 bp, Homo sapien
cattcctatcaaggagagagtcggg

SEQ ID NO: 1262167 - DNA, 25 bp, Homo sapien
actgacataccggttctttgaaggg

SEQ ID NO: 1262168 - DNA, 25 bp, Homo sapien
tattgcaactgcgaggaagttagac

SEQ ID NO: 1262169 - DNA, 25 bp, Homo sapien
aaatagtttccaatccagtgggacg

SEQ ID NO: 1262170 - DNA, 25 bp, Homo sapien
tcaaagcaggagaccgggattagtt

SEQ ID NO: 1262171 - DNA, 25 bp, Homo sapien
gaagtcaaccagttccatcaaggag

SEQ ID NO: 1262172 - DNA, 25 bp, Homo sapien
tactgaaactgcgaggaaggtagac

SEQ ID NO: 1262173 - DNA, 25 bp, Homo sapien
acagtctaaactagtgcccattggc

SEQ ID NO: 1262174 - DNA, 25 bp, Homo sapien
tgccccgatctttcacacactggtg

SEQ ID NO: 1262175 - DNA, 25 bp, Homo sapien
gatgtctttgttctcggctcccaca

SEQ ID NO: 1262176 - DNA, 25 bp, Homo sapien
tgcattttccgtctggctcacaggg

SEQ ID NO: 1262177 - DNA, 25 bp, Homo sapien
tgcacatttaggatatgctcctggg

SEQ ID NO: 1262178 - DNA, 25 bp, Homo sapien
cgccttcaaacagatgctggcccgg

SEQ ID NO: 1262179 - DNA, 25 bp, Homo sapien
tggctgtgcacacgcgggtgctccc

SEQ ID NO: 1262180 - DNA, 25 bp, Homo sapien
agcgcacgggaaacagcgccttcaa

SEQ ID NO: 1262181 - DNA, 25 bp, Homo sapien
gtgggcttcacatgagtgcccgcca

SEQ ID NO: 1262182 - DNA, 25 bp, Homo sapien
cttttacatctgtacagcagccggt

SEQ ID NO: 1262183 - DNA, 25 bp, Homo sapien
cagccggttggctcggtggccccgg

SEQ ID NO: 1262184 - DNA, 25 bp, Homo sapien
ccacgaggtcccttttacatctgta

SEQ ID NO: 1262185 - DNA, 25 bp, Homo sapien
ggtcccttttacatctgtacagcag

SEQ ID NO: 1262186 - DNA, 25 bp, Homo sapien
ctggggtggccattgtggtagagtt

SEQ ID NO: 1262187 - DNA, 25 bp, Homo sapien
tcctcgaagggcctgtgcggccgcc

SEQ ID NO: 1262188 - DNA, 25 bp, Homo sapien
tcgaagggcctgtgcggccgccggc

SEQ ID NO: 1262189 - DNA, 25 bp, Homo sapien
acgtgtaccatgttcccggcggcct

SEQ ID NO: 1262190 - DNA, 25 bp, Homo sapien
gactggtccccgtcgtacgggatca

SEQ ID NO: 1262191 - DNA, 25 bp, Homo sapien
tacgggatcacgtagtggatatggt

SEQ ID NO: 1262192 - DNA, 25 bp, Homo sapien
ccacaccaggaaccagctgatgcaa

SEQ ID NO: 1262193 - DNA, 25 bp, Homo sapien
catgaggtcgatctcctgcttggtc

SEQ ID NO: 1262194 - DNA, 25 bp, Homo sapien
agggcgggctggcacctctcccgcc

SEQ ID NO: 1262195 - DNA, 25 bp, Homo sapien
gcgggctggcacctctcccgccacc

SEQ ID NO: 1262196 - DNA, 25 bp, Homo sapien
gggcgggctggcacctctcccgcca

SEQ ID NO: 1262197 - DNA, 25 bp, Homo sapien
gcagggcgggctggcacctctcccg

SEQ ID NO: 1262198 - DNA, 25 bp, Homo sapien
gaaggtctccgggccttgactctgc

SEQ ID NO: 1262199 - DNA, 25 bp, Homo sapien
ttgactctgccgatcggactggcat

SEQ ID NO: 1262200 - DNA, 25 bp, Homo sapien
ggccttgactctgccgatcggactg

SEQ ID NO: 1262201 - DNA, 25 bp, Homo sapien
ggaaggtctccgggccttgactctg

SEQ ID NO: 1262202 - DNA, 25 bp, Homo sapien
gaggcctctaggaacggcgtcctaa

SEQ ID NO: 1262203 - DNA, 25 bp, Homo sapien
catggacgtacaaacatgcatggcc

SEQ ID NO: 1262204 - DNA, 25 bp, Homo sapien
aagaggatcccatcgctacacgtgc

SEQ ID NO: 1262205 - DNA, 25 bp, Homo sapien
tgggcgctcccctcaatctgaatga

SEQ ID NO: 1262206 - DNA, 25 bp, Homo sapien
cagcagcgcgttcatgtccatcaag

SEQ ID NO: 1262207 - DNA, 25 bp, Homo sapien
cacagttgcagtggcagacgcggtc

SEQ ID NO: 1262208 - DNA, 25 bp, Homo sapien
tcatgtccatcaagcacgcgatggc

SEQ ID NO: 1262209 - DNA, 25 bp, Homo sapien
tagttgtggaatcggtccagcagcg

SEQ ID NO: 1262210 - DNA, 25 bp, Homo sapien
accgacgcccccagaatcatgaaga

SEQ ID NO: 1262211 - DNA, 25 bp, Homo sapien
gaccgacgcccccagaatcatgaag

SEQ ID NO: 1262212 - DNA, 25 bp, Homo sapien
cgtcaccagcagaacacctgtaagt

SEQ ID NO: 1262213 - DNA, 25 bp, Homo sapien
tatttgggtaatgctaccgtcacca

SEQ ID NO: 1262214 - DNA, 25 bp, Homo sapien
acacaggtatgtcgggaagtgcaca

SEQ ID NO: 1262215 - DNA, 25 bp, Homo sapien
gaaacttgattgctttcatctggcg

SEQ ID NO: 1262216 - DNA, 25 bp, Homo sapien
gcggccactcttctcctcgaactcc

SEQ ID NO: 1262217 - DNA, 25 bp, Homo sapien
agctcgtcgatctcgttctccatgt

SEQ ID NO: 1262218 - DNA, 25 bp, Homo sapien
gctcgtcgatctcgttctccatgtc

SEQ ID NO: 1262219 - DNA, 25 bp, Homo sapien
gtgtgcagaaaggtgcggccactct

SEQ ID NO: 1262220 - DNA, 25 bp, Homo sapien
tccccctaacacctggatcgccagg

SEQ ID NO: 1262221 - DNA, 25 bp, Homo sapien
tgcctgtctgctccccctaacacct

SEQ ID NO: 1262222 - DNA, 25 bp, Homo sapien
gcaaggacaggaccgtggtgagggc

SEQ ID NO: 1262223 - DNA, 25 bp, Homo sapien
tgcaaggacaggaccgtggtgaggg

SEQ ID NO: 1262224 - DNA, 25 bp, Homo sapien
gcaccggcagctcgttactcgccat

SEQ ID NO: 1262225 - DNA, 25 bp, Homo sapien
cagctcgttactcgccatctccact

SEQ ID NO: 1262226 - DNA, 25 bp, Homo sapien
ggcagctcgttactcgccatctcca

SEQ ID NO: 1262227 - DNA, 25 bp, Homo sapien
ccctggcaccggcagctcgttactc

SEQ ID NO: 1262228 - DNA, 25 bp, Homo sapien
acattgaccacgtgcacaggctggc

SEQ ID NO: 1262229 - DNA, 25 bp, Homo sapien
tggatgtccacattgaccacgtgca

SEQ ID NO: 1262230 - DNA, 25 bp, Homo sapien
cagggtggcctcctcgtggttgtcc

SEQ ID NO: 1262231 - DNA, 25 bp, Homo sapien
cccagggtggcctcctcgtggttgt

SEQ ID NO: 1262232 - DNA, 25 bp, Homo sapien
actctagacgggctgtactggtcat

SEQ ID NO: 1262233 - DNA, 25 bp, Homo sapien
ccgccactctagacgggctgtactg

SEQ ID NO: 1262234 - DNA, 25 bp, Homo sapien
gtggttcagcgaccagcggccctgc

SEQ ID NO: 1262235 - DNA, 25 bp, Homo sapien
cagcacatgggtggttcagcgacca

SEQ ID NO: 1262236 - DNA, 25 bp, Homo sapien
gaggatcagatcaaacaggtctttg

SEQ ID NO: 1262237 - DNA, 25 bp, Homo sapien
tctcttatttctgtccagcatatgt

SEQ ID NO: 1262238 - DNA, 25 bp, Homo sapien
ttatttctgtccagcatatgtaaaa

SEQ ID NO: 1262239 - DNA, 25 bp, Homo sapien
tacactctctcttcgcaagtgagga

SEQ ID NO: 1262240 - DNA, 25 bp, Homo sapien
cagaaaacaaagtgggcgatggcag

SEQ ID NO: 1262241 - DNA, 25 bp, Homo sapien
tacacatgggagttaaggaacgtca

SEQ ID NO: 1262242 - DNA, 25 bp, Homo sapien
gcctcactgactatgggatggtgga

SEQ ID NO: 1262243 - DNA, 25 bp, Homo sapien
accaagagggcaagacagtcgagga

SEQ ID NO: 1262244 - DNA, 25 bp, Homo sapien
gagcctctggggtcctcagggtggg

SEQ ID NO: 1262245 - DNA, 25 bp, Homo sapien
aggggccacaggagcctctggggtc

SEQ ID NO: 1262246 - DNA, 25 bp, Homo sapien
ccagcagtcccaggaaggggccaca

SEQ ID NO: 1262247 - DNA, 25 bp, Homo sapien
ccccagcagtcccaggaaggggcca

SEQ ID NO: 1262248 - DNA, 25 bp, Homo sapien
taagtgaactcagctaccttcctgg

SEQ ID NO: 1262249 - DNA, 25 bp, Homo sapien
gatggtcagggacaagtaaccactt

SEQ ID NO: 1262250 - DNA, 25 bp, Homo sapien
cattgaagtggttgatctaacggca

SEQ ID NO: 1262251 - DNA, 25 bp, Homo sapien
aacggcatctgaccctgagctgcat

SEQ ID NO: 1262252 - DNA, 25 bp, Homo sapien
agaggaaccggggtcagggtgcagg

SEQ ID NO: 1262253 - DNA, 25 bp, Homo sapien
tgcagggaccggctcacggagagga

SEQ ID NO: 1262254 - DNA, 25 bp, Homo sapien
cagggaccggctcacggagaggaac

SEQ ID NO: 1262255 - DNA, 25 bp, Homo sapien
ggtgcagggaccggctcacggagag

SEQ ID NO: 1262256 - DNA, 25 bp, Homo sapien
acagggatcaccctccctgcacatc

SEQ ID NO: 1262257 - DNA, 25 bp, Homo sapien
cacagggatcaccctccctgcacat

SEQ ID NO: 1262258 - DNA, 25 bp, Homo sapien
gcacagggatcaccctccctgcaca

SEQ ID NO: 1262259 - DNA, 25 bp, Homo sapien
tcccgtcccacagtgacgtctggaa

SEQ ID NO: 1262260 - DNA, 25 bp, Homo sapien
tcccatgggttgagcacgtgtggcc

SEQ ID NO: 1262261 - DNA, 25 bp, Homo sapien
caggcccatcagacccttgagtgag

SEQ ID NO: 1262262 - DNA, 25 bp, Homo sapien
acgtgtggccaatcccgagaggcca

SEQ ID NO: 1262263 - DNA, 25 bp, Homo sapien
tacggcgatgacttctgccaacgca

SEQ ID NO: 1262264 - DNA, 25 bp, Homo sapien
gcttccactgcagtttacggcgatg

SEQ ID NO: 1262265 - DNA, 25 bp, Homo sapien
tgtgaacactcgaccaagtgctgcg

SEQ ID NO: 1262266 - DNA, 25 bp, Homo sapien
tgcacagagaaacctaagccctggc

SEQ ID NO: 1262267 - DNA, 25 bp, Homo sapien
ggcatcatgtgcaagagctttagct

SEQ ID NO: 1262268 - DNA, 25 bp, Homo sapien
tgcacccatcactaaccaggaaacg

SEQ ID NO: 1262269 - DNA, 25 bp, Homo sapien
gctttagctaagtggcaggcttccc

SEQ ID NO: 1262270 - DNA, 25 bp, Homo sapien
acttgtaacagtcacttcccgcggc

SEQ ID NO: 1262271 - DNA, 25 bp, Homo sapien
ttcttctgggccgatgcttcctggg

SEQ ID NO: 1262272 - DNA, 25 bp, Homo sapien
gactcagtccttgcagaacgtggca

SEQ ID NO: 1262273 - DNA, 25 bp, Homo sapien
gaggagcttccgaattctgggacac

SEQ ID NO: 1262274 - DNA, 25 bp, Homo sapien
aaataaggtaatgaaggcacgctcc

SEQ ID NO: 1262275 - DNA, 25 bp, Homo sapien
cagggacctcgcacaaaggcatgtc

SEQ ID NO: 1262276 - DNA, 25 bp, Homo sapien
cagccctaaaccagactccgggaag

SEQ ID NO: 1262277 - DNA, 25 bp, Homo sapien
caaaccagactcttgagcacgcagc

SEQ ID NO: 1262278 - DNA, 25 bp, Homo sapien
gactcttggaataggctctgtggcc

SEQ ID NO: 1262279 - DNA, 25 bp, Homo sapien
acacagggtggacaaggacatggcc

SEQ ID NO: 1262280 - DNA, 25 bp, Homo sapien
agagccatgtcgaagccgtgcccca

SEQ ID NO: 1262281 - DNA, 25 bp, Homo sapien
ttctcagcccacgacgggagcagag

SEQ ID NO: 1262282 - DNA, 25 bp, Homo sapien
gagcagagccatgtcgaagccgtgc

SEQ ID NO: 1262283 - DNA, 25 bp, Homo sapien
gcctggtcaaaaacccgggcactga

SEQ ID NO: 1262284 - DNA, 25 bp, Homo sapien
tggaatacgtttggcctggcctccg

SEQ ID NO: 1262285 - DNA, 25 bp, Homo sapien
gcagcccggctccatgtgtatcagg

SEQ ID NO: 1262286 - DNA, 25 bp, Homo sapien
tctataggagtcttcgcggcagacc

SEQ ID NO: 1262287 - DNA, 25 bp, Homo sapien
cacgcctactgccatgggtggcact

SEQ ID NO: 1262288 - DNA, 25 bp, Homo sapien
cgcctactgccatgggtggcactgg

SEQ ID NO: 1262289 - DNA, 25 bp, Homo sapien
acgcctactgccatgggtggcactg

SEQ ID NO: 1262290 - DNA, 25 bp, Homo sapien
accaagctctcgcaaagacagagga

SEQ ID NO: 1262291 - DNA, 25 bp, Homo sapien
ccgacgtgcaccaggaatagaaacc

SEQ ID NO: 1262292 - DNA, 25 bp, Homo sapien
ctgcacagggtgacacgcctcctgt

SEQ ID NO: 1262293 - DNA, 25 bp, Homo sapien
cgtggacgatccgacgtgcaccagg

SEQ ID NO: 1262294 - DNA, 25 bp, Homo sapien
gtaacaccttccagggaggaccaca

SEQ ID NO: 1262295 - DNA, 25 bp, Homo sapien
taacaccttccagggaggaccacac

SEQ ID NO: 1262296 - DNA, 25 bp, Homo sapien
tcctggaagcttcacgtgagtccct

SEQ ID NO: 1262297 - DNA, 25 bp, Homo sapien
taaacattgggcttgtcgggagctg

SEQ ID NO: 1262298 - DNA, 25 bp, Homo sapien
cctaagaagatcattgtacatctgg

SEQ ID NO: 1262299 - DNA, 25 bp, Homo sapien
gagtccctgttccaaaggatcggac

SEQ ID NO: 1262300 - DNA, 25 bp, Homo sapien
ccaacacccccacgatgtggctcca

SEQ ID NO: 1262301 - DNA, 25 bp, Homo sapien
cccgctccaccacaggaaactctgt

SEQ ID NO: 1262302 - DNA, 25 bp, Homo sapien
aaaggtccaactgcccgctccacca

SEQ ID NO: 1262303 - DNA, 25 bp, Homo sapien
tcccaacacccccacgatgtggctc

SEQ ID NO: 1262304 - DNA, 25 bp, Homo sapien
cagctgccatcccaaccagccgacc

SEQ ID NO: 1262305 - DNA, 25 bp, Homo sapien
tcccaaccagccgacccacgagcgc

SEQ ID NO: 1262306 - DNA, 25 bp, Homo sapien
ccatcccaaccagccgacccacgag

SEQ ID NO: 1262307 - DNA, 25 bp, Homo sapien
aaccagccgacccacgagcgcggcc

SEQ ID NO: 1262308 - DNA, 25 bp, Homo sapien
tccatgctccggttctggttgctcg

SEQ ID NO: 1262309 - DNA, 25 bp, Homo sapien
ggttctggttgctcgagcacaccac

SEQ ID NO: 1262310 - DNA, 25 bp, Homo sapien
ttgtgcgcctccatgctccggttct

SEQ ID NO: 1262311 - DNA, 25 bp, Homo sapien
gatgttgtgcgcctccatgctccgg

SEQ ID NO: 1262312 - DNA, 25 bp, Homo sapien
gccggcggtgtagcgtgcggcgact

SEQ ID NO: 1262313 - DNA, 25 bp, Homo sapien
agcgcaggcactggccttcgggcgc

SEQ ID NO: 1262314 - DNA, 25 bp, Homo sapien
gcgcttccgcgcgaacaaaatggcg

SEQ ID NO: 1262315 - DNA, 25 bp, Homo sapien
ttcgggcgcgctgcactcggcgagg

SEQ ID NO: 1262316 - DNA, 25 bp, Homo sapien
ggtggactaacttggctaaatgaag

SEQ ID NO: 1262317 - DNA, 25 bp, Homo sapien
agtacaccacaaagtgggccgggcg

SEQ ID NO: 1262318 - DNA, 25 bp, Homo sapien
aagggtcaggtggactaacttggct

SEQ ID NO: 1262319 - DNA, 25 bp, Homo sapien
gaattctgtttcaccaaagtacacc

SEQ ID NO: 1262320 - DNA, 25 bp, Homo sapien
acggcgcgccgagtgctccgggcgg

SEQ ID NO: 1262321 - DNA, 25 bp, Homo sapien
acgacggtgcgcgtagtgcatcccc

SEQ ID NO: 1262322 - DNA, 25 bp, Homo sapien
gtgcatccccgtggcccgttggttc

SEQ ID NO: 1262323 - DNA, 25 bp, Homo sapien
gcagagggagaggacgacggtgcgc

SEQ ID NO: 1262324 - DNA, 25 bp, Homo sapien
accagcggcacttcagggcgggatc

SEQ ID NO: 1262325 - DNA, 25 bp, Homo sapien
ccgggctgttccaccagcggcactt

SEQ ID NO: 1262326 - DNA, 25 bp, Homo sapien
cgcccgggctgttccaccagcggca

SEQ ID NO: 1262327 - DNA, 25 bp, Homo sapien
tgttccaccagcggcacttcagggc

SEQ ID NO: 1262328 - DNA, 25 bp, Homo sapien
ggccttcgtatccaggctggcgtcg

SEQ ID NO: 1262329 - DNA, 25 bp, Homo sapien
tcaggaatgaagttacggctaaagg

SEQ ID NO: 1262330 - DNA, 25 bp, Homo sapien
cttaacttagaagacacaaaggcgc

SEQ ID NO: 1262331 - DNA, 25 bp, Homo sapien
gagcttcgtcgagcgttttcctagc

SEQ ID NO: 1262332 - DNA, 25 bp, Homo sapien
agacccagcctgcaggccactcggc

SEQ ID NO: 1262333 - DNA, 25 bp, Homo sapien
cccagcctgcaggccactcggccac

SEQ ID NO: 1262334 - DNA, 25 bp, Homo sapien
acccagcctgcaggccactcggcca

SEQ ID NO: 1262335 - DNA, 25 bp, Homo sapien
ggagacccagcctgcaggccactcg

SEQ ID NO: 1262336 - DNA, 25 bp, Homo sapien
ggccaaggtcactcacgggcaagtt

SEQ ID NO: 1262337 - DNA, 25 bp, Homo sapien
gtcactcacgggcaagttcccgcag

SEQ ID NO: 1262338 - DNA, 25 bp, Homo sapien
agcagcagccgctcatgcccctgca

SEQ ID NO: 1262339 - DNA, 25 bp, Homo sapien
cggggagttctccaggccaaggtca

SEQ ID NO: 1262340 - DNA, 25 bp, Homo sapien
gtttattgaaaggatctgaaaagcg

SEQ ID NO: 1262341 - DNA, 25 bp, Homo sapien
ttattgaaaggatctgaaaagcgta

SEQ ID NO: 1262342 - DNA, 25 bp, Homo sapien
ttgtttattgaaaggatctgaaaag

SEQ ID NO: 1262343 - DNA, 25 bp, Homo sapien
tattgaaaggatctgaaaagcgtaa

SEQ ID NO: 1262344 - DNA, 25 bp, Homo sapien
tgagcggctggaattctgaacactg

SEQ ID NO: 1262345 - DNA, 25 bp, Homo sapien
gaatggtcccctaatggtccctgag

SEQ ID NO: 1262346 - DNA, 25 bp, Homo sapien
taaacattgaatggcagacgactcc

SEQ ID NO: 1262347 - DNA, 25 bp, Homo sapien
gaggacagcgtcttgcagaacataa

SEQ ID NO: 1262348 - DNA, 25 bp, Homo sapien
agttcctttccaaatcacggcccag

SEQ ID NO: 1262349 - DNA, 25 bp, Homo sapien
tgccctggcaagtcacggagaaaac

SEQ ID NO: 1262350 - DNA, 25 bp, Homo sapien
taaaaacctgtcgagtctgctggca

SEQ ID NO: 1262351 - DNA, 25 bp, Homo sapien
cgaagattaaacaatccacccggct

SEQ ID NO: 1262352 - DNA, 25 bp, Homo sapien
aagacgaggagttccgagtctcatc

SEQ ID NO: 1262353 - DNA, 25 bp, Homo sapien
agccgcagtagccacgcctgtggtc

SEQ ID NO: 1262354 - DNA, 25 bp, Homo sapien
gttccgagtctcatcgcagctccag

SEQ ID NO: 1262355 - DNA, 25 bp, Homo sapien
tgtggtcccggctgagttctcccca

SEQ ID NO: 1262356 - DNA, 25 bp, Homo sapien
tggttcgtggtggtaaggtggaagc

SEQ ID NO: 1262357 - DNA, 25 bp, Homo sapien
ctggttcgtggtggtaaggtggaag

SEQ ID NO: 1262358 - DNA, 25 bp, Homo sapien
acgagtcggctaccgtgagaaccct

SEQ ID NO: 1262359 - DNA, 25 bp, Homo sapien
ggacgagtcggctaccgtgagaacc

SEQ ID NO: 1262360 - DNA, 25 bp, Homo sapien
ggctaccgtgagaaccctgcccaag

SEQ ID NO: 1262361 - DNA, 25 bp, Homo sapien
agtcggctaccgtgagaaccctgcc

SEQ ID NO: 1262362 - DNA, 25 bp, Homo sapien
ttgaggccgtcctcagcgctgatcc

SEQ ID NO: 1262363 - DNA, 25 bp, Homo sapien
gggtctcgcggaaatactcatgctt

SEQ ID NO: 1262364 - DNA, 25 bp, Homo sapien
gcggaaatactcatgcttgaggccg

SEQ ID NO: 1262365 - DNA, 25 bp, Homo sapien
ttcacacgctgctgctcgctcttgg

SEQ ID NO: 1262366 - DNA, 25 bp, Homo sapien
agttctggaacgtggtgagccagca

SEQ ID NO: 1262367 - DNA, 25 bp, Homo sapien
tcagggcatgggacgccaggcacca

SEQ ID NO: 1262368 - DNA, 25 bp, Homo sapien
caaagatgggctgtgttgggacggg

SEQ ID NO: 1262369 - DNA, 25 bp, Homo sapien
ggaagtcaccgctatggctcgggac

SEQ ID NO: 1262370 - DNA, 25 bp, Homo sapien
tcatgaggtcgaagccctggtctga

SEQ ID NO: 1262371 - DNA, 25 bp, Homo sapien
gaggttgttgtaggggtgctcgctg

SEQ ID NO: 1262372 - DNA, 25 bp, Homo sapien
ttcatgaggtcgaagccctggtctg

SEQ ID NO: 1262373 - DNA, 25 bp, Homo sapien
gttgttgtaggggtgctcgctgaag

SEQ ID NO: 1262374 - DNA, 25 bp, Homo sapien
ctgtagccgggccagattttctcac

SEQ ID NO: 1262375 - DNA, 25 bp, Homo sapien
tcactgtagccgggccagattttct

SEQ ID NO: 1262376 - DNA, 25 bp, Homo sapien
gagctcactgtagccgggccagatt

SEQ ID NO: 1262377 - DNA, 25 bp, Homo sapien
tgtagccgggccagattttctcact

SEQ ID NO: 1262378 - DNA, 25 bp, Homo sapien
gtcccgtcagagaagacaagccacc

SEQ ID NO: 1262379 - DNA, 25 bp, Homo sapien
cacaccaagtggcccacagtgttgg

SEQ ID NO: 1262380 - DNA, 25 bp, Homo sapien
ccaccaggagggctctcagtggccc

SEQ ID NO: 1262381 - DNA, 25 bp, Homo sapien
gtgttggcacctgtgtcccgtcaga

SEQ ID NO: 1262382 - DNA, 25 bp, Homo sapien
cacatgtccacggccgtggagtatt

SEQ ID NO: 1262383 - DNA, 25 bp, Homo sapien
tctgatcgatttccgaattcccggg

SEQ ID NO: 1262384 - DNA, 25 bp, Homo sapien
gctccccgaagatgcagcccactga

SEQ ID NO: 1262385 - DNA, 25 bp, Homo sapien
cagcagctccccgaagatgcagccc

SEQ ID NO: 1262386 - DNA, 25 bp, Homo sapien
caggaaggccagtgcccgcgaagct

SEQ ID NO: 1262387 - DNA, 25 bp, Homo sapien
gttcaggaaggccagtgcccgcgaa

SEQ ID NO: 1262388 - DNA, 25 bp, Homo sapien
gtgttcaggaaggccagtgcccgcg

SEQ ID NO: 1262389 - DNA, 25 bp, Homo sapien
ttcaggaaggccagtgcccgcgaag

SEQ ID NO: 1262390 - DNA, 25 bp, Homo sapien
cacgaccggggtgtaggccttcaga

SEQ ID NO: 1262391 - DNA, 25 bp, Homo sapien
gggcgcggtaccactgggtcaccac

SEQ ID NO: 1262392 - DNA, 25 bp, Homo sapien
ttcagaggggatccgtactcccgcg

SEQ ID NO: 1262393 - DNA, 25 bp, Homo sapien
cactgggtcaccacgaccggggtgt

SEQ ID NO: 1262394 - DNA, 25 bp, Homo sapien
tcagcagcaggttggacgtcttgag

SEQ ID NO: 1262395 - DNA, 25 bp, Homo sapien
aggtcacggtgcaggatccagttgt

SEQ ID NO: 1262396 - DNA, 25 bp, Homo sapien
ccagttgtcgtgcaggtgtttcacc

SEQ ID NO: 1262397 - DNA, 25 bp, Homo sapien
gatccagttgtcgtgcaggtgtttc

SEQ ID NO: 1262398 - DNA, 25 bp, Homo sapien
tcaccgcgggggtgaccaggacact

SEQ ID NO: 1262399 - DNA, 25 bp, Homo sapien
gtggatgcagctggccctccctgca

SEQ ID NO: 1262400 - DNA, 25 bp, Homo sapien
tgcccccacttgtacgcagacagga

SEQ ID NO: 1262401 - DNA, 25 bp, Homo sapien
gagggaggctcccatgtggacccgg

SEQ ID NO: 1262402 - DNA, 25 bp, Homo sapien
tcaggctcttgaggtcgtgctccac

SEQ ID NO: 1262403 - DNA, 25 bp, Homo sapien
tagttcatcacgatgtagatcttgt

SEQ ID NO: 1262404 - DNA, 25 bp, Homo sapien
gatcttgtccatgttgctgcccacc

SEQ ID NO: 1262405 - DNA, 25 bp, Homo sapien
ccatcaggctcttgaggtcgtgctc

SEQ ID NO: 1262406 - DNA, 25 bp, Homo sapien
tctgtgaagggctccactaagtgca

SEQ ID NO: 1262407 - DNA, 25 bp, Homo sapien
tgcaggagagtgtaggaagcacccg

SEQ ID NO: 1262408 - DNA, 25 bp, Homo sapien
gcaaatacttgcttctgtgtggtct

SEQ ID NO: 1262409 - DNA, 25 bp, Homo sapien
tgctgagggacagtaaggacctccg

SEQ ID NO: 1262410 - DNA, 25 bp, Homo sapien
gacgtgatcgggaagccctccttct

SEQ ID NO: 1262411 - DNA, 25 bp, Homo sapien
tccatcttcagccgctttagagcca

SEQ ID NO: 1262412 - DNA, 25 bp, Homo sapien
gttgatctccctcagggacgtgatc

SEQ ID NO: 1262413 - DNA, 25 bp, Homo sapien
atggtgttgatctccctcagggacg

SEQ ID NO: 1262414 - DNA, 25 bp, Homo sapien
acctgcttgggtgggacgctgggaa

SEQ ID NO: 1262415 - DNA, 25 bp, Homo sapien
tcccggctcacacacctgcttgggt

SEQ ID NO: 1262416 - DNA, 25 bp, Homo sapien
cccagtggccgactcccaacagagt

SEQ ID NO: 1262417 - DNA, 25 bp, Homo sapien
tgggaacgcaaacctgcacaccagc

SEQ ID NO: 1262418 - DNA, 25 bp, Homo sapien
tctgtagaccactccataggtgccc

SEQ ID NO: 1262419 - DNA, 25 bp, Homo sapien
ggtgccctcctcgatcctgttcagg

SEQ ID NO: 1262420 - DNA, 25 bp, Homo sapien
cataggtgccctcctcgatcctgtt

SEQ ID NO: 1262421 - DNA, 25 bp, Homo sapien
tcaggcactggaactcctcgacgct

SEQ ID NO: 1262422 - DNA, 25 bp, Homo sapien
gtggcccgacgcctacgctcagcag

SEQ ID NO: 1262423 - DNA, 25 bp, Homo sapien
gcccaggccggatgtcacgtactct

SEQ ID NO: 1262424 - DNA, 25 bp, Homo sapien
ccggtgcccaggccggatgtcacgt

SEQ ID NO: 1262425 - DNA, 25 bp, Homo sapien
ggcctgtggcccgacgcctacgctc

SEQ ID NO: 1262426 - DNA, 25 bp, Homo sapien
agcagtgacagcagcgcggccgcac

SEQ ID NO: 1262427 - DNA, 25 bp, Homo sapien
tttcaagccgcagagcagtcctgcg

SEQ ID NO: 1262428 - DNA, 25 bp, Homo sapien
cagttccgtccagcatgagaaagag

SEQ ID NO: 1262429 - DNA, 25 bp, Homo sapien
ctccagtgcggaggaggacgcaact

SEQ ID NO: 1262430 - DNA, 25 bp, Homo sapien
actgccaatgcggacagcggcccgg

SEQ ID NO: 1262431 - DNA, 25 bp, Homo sapien
tgtgaggcgacagacgccaacacgg

SEQ ID NO: 1262432 - DNA, 25 bp, Homo sapien
ccctgtggtaactccgactgccaat

SEQ ID NO: 1262433 - DNA, 25 bp, Homo sapien
caacacgggggccaggcttcgctca

SEQ ID NO: 1262434 - DNA, 25 bp, Homo sapien
ctcctgcttgagctcgatgggcaac

SEQ ID NO: 1262435 - DNA, 25 bp, Homo sapien
cgggcacatagtcgccctctgtcag

SEQ ID NO: 1262436 - DNA, 25 bp, Homo sapien
gagtcgggcacatagtcgccctctg

SEQ ID NO: 1262437 - DNA, 25 bp, Homo sapien
gggagtcgggcacatagtcgccctc

SEQ ID NO: 1262438 - DNA, 25 bp, Homo sapien
agtcgggcacatagtcgccctctgt

SEQ ID NO: 1262439 - DNA, 25 bp, Homo sapien
cactctccccggaatctcggtcgaa

SEQ ID NO: 1262440 - DNA, 25 bp, Homo sapien
tcttcactctccccggaatctcggt

SEQ ID NO: 1262441 - DNA, 25 bp, Homo sapien
ttcactctccccggaatctcggtcg

SEQ ID NO: 1262442 - DNA, 25 bp, Homo sapien
ccggaatctcggtcgaaccgtgact

SEQ ID NO: 1262443 - DNA, 25 bp, Homo sapien
ctaattacgaagctaggagtaagta

SEQ ID NO: 1262444 - DNA, 25 bp, Homo sapien
taattacgaagctaggagtaagtaa

SEQ ID NO: 1262445 - DNA, 25 bp, Homo sapien
cattttctcgttcttcatcttcact

SEQ ID NO: 1262446 - DNA, 25 bp, Homo sapien
caagaggtggttttcattttctcgt

SEQ ID NO: 1262447 - DNA, 25 bp, Homo sapien
tcattttctcgttcttcatcttcac

SEQ ID NO: 1262448 - DNA, 25 bp, Homo sapien
tttctcgttcttcatcttcactcat

SEQ ID NO: 1262449 - DNA, 25 bp, Homo sapien
atgcgggctccgcttcagctaagca

SEQ ID NO: 1262450 - DNA, 25 bp, Homo sapien
caagtgttcccaagaatggatatgg

SEQ ID NO: 1262451 - DNA, 25 bp, Homo sapien
ggcgagtgctgccacaggcaggatg

SEQ ID NO: 1262452 - DNA, 25 bp, Homo sapien
tcccaagaatggatatggaggctgg

SEQ ID NO: 1262453 - DNA, 25 bp, Homo sapien
tcctcagagttgctgccggtctcct

SEQ ID NO: 1262454 - DNA, 25 bp, Homo sapien
tgattcttcactggtgctcccttcc

SEQ ID NO: 1262455 - DNA, 25 bp, Homo sapien
cagactgctctgatgcctcctcaga

SEQ ID NO: 1262456 - DNA, 25 bp, Homo sapien
tcctcagaacctgagcctgattccg

SEQ ID NO: 1262457 - DNA, 25 bp, Homo sapien
aaggccttggccaggcggttccagg

SEQ ID NO: 1262458 - DNA, 25 bp, Homo sapien
ggccttggccaggcggttccaggta

SEQ ID NO: 1262459 - DNA, 25 bp, Homo sapien
gccttggccaggcggttccaggtac

SEQ ID NO: 1262460 - DNA, 25 bp, Homo sapien
aggccttggccaggcggttccaggt

SEQ ID NO: 1262461 - DNA, 25 bp, Homo sapien
gctgtcgctgatgtcctgtaagtcg

SEQ ID NO: 1262462 - DNA, 25 bp, Homo sapien
tgtcgctgatgtcctgtaagtcgga

SEQ ID NO: 1262463 - DNA, 25 bp, Homo sapien
tgtaagtcggacagcaggtcccttt

SEQ ID NO: 1262464 - DNA, 25 bp, Homo sapien
ctgacgaggactcggccgagctggt

SEQ ID NO: 1262465 - DNA, 25 bp, Homo sapien
tctgcgcaggcgccggcctggcctc

SEQ ID NO: 1262466 - DNA, 25 bp, Homo sapien
actgtgctggcttctgcgcaggcgc

SEQ ID NO: 1262467 - DNA, 25 bp, Homo sapien
cttctgcgcaggcgccggcctggcc

SEQ ID NO: 1262468 - DNA, 25 bp, Homo sapien
tgcgcaggcgccggcctggcctcac

SEQ ID NO: 1262469 - DNA, 25 bp, Homo sapien
cgggctgcgactccagtggctggct

SEQ ID NO: 1262470 - DNA, 25 bp, Homo sapien
actttgtcgctgtagtcctctctca

SEQ ID NO: 1262471 - DNA, 25 bp, Homo sapien
tggcttccggccgtctcccaactcg

SEQ ID NO: 1262472 - DNA, 25 bp, Homo sapien
tggctggctttcactttgtcgctgt

SEQ ID NO: 1262473 - DNA, 25 bp, Homo sapien
cttccctgcgggcctcccgctcctt

SEQ ID NO: 1262474 - DNA, 25 bp, Homo sapien
ccgccgctcgcgctccttctgctcc

SEQ ID NO: 1262475 - DNA, 25 bp, Homo sapien
gcctcccgctccttgcgccgctcct

SEQ ID NO: 1262476 - DNA, 25 bp, Homo sapien
tccttgcgccgctcctccgcccgcc

SEQ ID NO: 1262477 - DNA, 25 bp, Homo sapien
gctgctcccgcatcttgcgctcccg

SEQ ID NO: 1262478 - DNA, 25 bp, Homo sapien
tcctttctaactgctccaagcggtc

SEQ ID NO: 1262479 - DNA, 25 bp, Homo sapien
cccgctcccgcttcctttctaactg

SEQ ID NO: 1262480 - DNA, 25 bp, Homo sapien
ctgctcccgcatcttgcgctcccgc

SEQ ID NO: 1262481 - DNA, 25 bp, Homo sapien
acccttcggcatcaacaagaaccag

SEQ ID NO: 1262482 - DNA, 25 bp, Homo sapien
tgcacacgcccttccgcttcagact

SEQ ID NO: 1262483 - DNA, 25 bp, Homo sapien
ttcggcatcaacaagaaccagcgcc

SEQ ID NO: 1262484 - DNA, 25 bp, Homo sapien
tggctgctggcaaacatcgctgcac

SEQ ID NO: 1262485 - DNA, 25 bp, Homo sapien
ggagtccagtgtcccgatttccaga

SEQ ID NO: 1262486 - DNA, 25 bp, Homo sapien
tatacagactaatggccaggagtcc

SEQ ID NO: 1262487 - DNA, 25 bp, Homo sapien
ggctacaccgatgttctttcttggg

SEQ ID NO: 1262488 - DNA, 25 bp, Homo sapien
cgtaagtgctggaattctagcgtga

SEQ ID NO: 1262489 - DNA, 25 bp, Homo sapien
tcctggaatgctcccttgccatttc

SEQ ID NO: 1262490 - DNA, 25 bp, Homo sapien
tctcctggaatgctcccttgccatt

SEQ ID NO: 1262491 - DNA, 25 bp, Homo sapien
ttctctcctggaatgctcccttgcc

SEQ ID NO: 1262492 - DNA, 25 bp, Homo sapien
ctttctctcctggaatgctcccttg

SEQ ID NO: 1262493 - DNA, 25 bp, Homo sapien
tcttctcgatgtcgtttccgacgtt

SEQ ID NO: 1262494 - DNA, 25 bp, Homo sapien
ggcgagctttatcctgttcttctcg

SEQ ID NO: 1262495 - DNA, 25 bp, Homo sapien
cgacgttcgtgctctctttctttca

SEQ ID NO: 1262496 - DNA, 25 bp, Homo sapien
tcccggcgagctttatcctgttctt

SEQ ID NO: 1262497 - DNA, 25 bp, Homo sapien
agtgtcatgcaaagaaacctcactt

SEQ ID NO: 1262498 - DNA, 25 bp, Homo sapien
taaagtgtcatgcaaagaaacctca

SEQ ID NO: 1262499 - DNA, 25 bp, Homo sapien
aagtgtcatgcaaagaaacctcact

SEQ ID NO: 1262500 - DNA, 25 bp, Homo sapien
aaagtgtcatgcaaagaaacctcac

SEQ ID NO: 1262501 - DNA, 25 bp, Homo sapien
ttttcggtctgtgacacacgcatgc

SEQ ID NO: 1262502 - DNA, 25 bp, Homo sapien
ggtctgtgacacacgcacgctttca

SEQ ID NO: 1262503 - DNA, 25 bp, Homo sapien
gaacggtctgtgacacacgcatgct

SEQ ID NO: 1262504 - DNA, 25 bp, Homo sapien
tgaacggtctgtgacacacgcatgc

SEQ ID NO: 1262505 - DNA, 25 bp, Homo sapien
ctgtgacacacgcatgctttcagct

SEQ ID NO: 1262506 - DNA, 25 bp, Homo sapien
gacacacgcatgctttcagctggag

SEQ ID NO: 1262507 - DNA, 25 bp, Homo sapien
gtgacacacgcatgctttcagctgg

SEQ ID NO: 1262508 - DNA, 25 bp, Homo sapien
cacgcatgctttcagctggagtttg

SEQ ID NO: 1262509 - DNA, 25 bp, Homo sapien
gaatggtctgtgacacacgcatgct

SEQ ID NO: 1262510 - DNA, 25 bp, Homo sapien
ttttcggtctgtgacacacgcatgc

SEQ ID NO: 1262511 - DNA, 25 bp, Homo sapien
ggtctgtgacacacgcacgctttca

SEQ ID NO: 1262512 - DNA, 25 bp, Homo sapien
gaacggtctgtgacacacgcatgct

SEQ ID NO: 1262513 - DNA, 25 bp, Homo sapien
ttcagctagagtattctctctatag

SEQ ID NO: 1262514 - DNA, 25 bp, Homo sapien
tcagctagagtattctctctatagc

SEQ ID NO: 1262515 - DNA, 25 bp, Homo sapien
cagctagagtattctctctatagcc

SEQ ID NO: 1262516 - DNA, 25 bp, Homo sapien
ctgtgacacacgcacgctttcagct

SEQ ID NO: 1262517 - DNA, 25 bp, Homo sapien
gtctgtgacaccattatgctttcag

SEQ ID NO: 1262518 - DNA, 25 bp, Homo sapien
gacaccattatgctttcagctacag

SEQ ID NO: 1262519 - DNA, 25 bp, Homo sapien
gcagaagagtaggaacaggaaagaa

SEQ ID NO: 1262520 - DNA, 25 bp, Homo sapien
gtgacaccattatgctttcagctac

SEQ ID NO: 1262521 - DNA, 25 bp, Homo sapien
acatgatgtcaaagaaagtaaatgc

SEQ ID NO: 1262522 - DNA, 25 bp, Homo sapien
cttctgctgaatggctatgatgcct

SEQ ID NO: 1262523 - DNA, 25 bp, Homo sapien
tctgctgaatggctatgatgcctac

SEQ ID NO: 1262524 - DNA, 25 bp, Homo sapien
ccttctgctgaatggctatgatgcc

SEQ ID NO: 1262525 - DNA, 25 bp, Homo sapien
ccccttctgctgaatggctatgatg

SEQ ID NO: 1262526 - DNA, 25 bp, Homo sapien
ctttttctttccgagacatttgctg

SEQ ID NO: 1262527 - DNA, 25 bp, Homo sapien
ttgctggggtggtttgatggccaaa

SEQ ID NO: 1262528 - DNA, 25 bp, Homo sapien
tttctttccgagacatttgctgggg

SEQ ID NO: 1262529 - DNA, 25 bp, Homo sapien
ggtttgatggccaaagaatcatctt

SEQ ID NO: 1262530 - DNA, 25 bp, Homo sapien
taaaacacaacagcactgcgtcatg

SEQ ID NO: 1262531 - DNA, 25 bp, Homo sapien
ataaaacacaacagcactgcgtcat

SEQ ID NO: 1262532 - DNA, 25 bp, Homo sapien
tgagtcttctcttctatacggggag

SEQ ID NO: 1262533 - DNA, 25 bp, Homo sapien
cccgcttggaatcccggtcatcaga

SEQ ID NO: 1262534 - DNA, 25 bp, Homo sapien
cctcctcaagggaatcccgcttgga

SEQ ID NO: 1262535 - DNA, 25 bp, Homo sapien
gtgatctccatgcagtgatctctca

SEQ ID NO: 1262536 - DNA, 25 bp, Homo sapien
cctgggcaacatcccaaaacaaact

SEQ ID NO: 1262537 - DNA, 25 bp, Homo sapien
caaactttcacatgtactctgaatg

SEQ ID NO: 1262538 - DNA, 25 bp, Homo sapien
tactctgaatgagccagtgttataa

SEQ ID NO: 1262539 - DNA, 25 bp, Homo sapien
catgtactctgaatgagccagtgtt

SEQ ID NO: 1262540 - DNA, 25 bp, Homo sapien
aaagaacttcaccgaagaagcgttg

SEQ ID NO: 1262541 - DNA, 25 bp, Homo sapien
aagaacttcaccgaagaagcgttgt

SEQ ID NO: 1262542 - DNA, 25 bp, Homo sapien
agaacttcaccgaagaagcgttgtt

SEQ ID NO: 1262543 - DNA, 25 bp, Homo sapien
caaaagaacttcaccgaagaagcgt

SEQ ID NO: 1262544 - DNA, 25 bp, Homo sapien
tgagggcaaagaaattaaatctcct

SEQ ID NO: 1262545 - DNA, 25 bp, Homo sapien
aaatgagggcaaagaaattaaatct

SEQ ID NO: 1262546 - DNA, 25 bp, Homo sapien
tggaaaaatgagggcaaagaaatta

SEQ ID NO: 1262547 - DNA, 25 bp, Homo sapien
ctaatggaaaaatgagggcaaagaa

SEQ ID NO: 1262548 - DNA, 25 bp, Homo sapien
attttttaagcgttttatctctgct

SEQ ID NO: 1262549 - DNA, 25 bp, Homo sapien
cacagcaagctatggtgctgaacac

SEQ ID NO: 1262550 - DNA, 25 bp, Homo sapien
gctgaacacttgaacctagtcactt

SEQ ID NO: 1262551 - DNA, 25 bp, Homo sapien
cttttgagggattcagaataaatcc

SEQ ID NO: 1262552 - DNA, 25 bp, Homo sapien
taattcagcctacatcaggacacag

SEQ ID NO: 1262553 - DNA, 25 bp, Homo sapien
tatggtcttgggtaacgtaattcac

SEQ ID NO: 1262554 - DNA, 25 bp, Homo sapien
taattcacctcagttcagtcttccg

SEQ ID NO: 1262555 - DNA, 25 bp, Homo sapien
tcagtcttccgtacaaccagaataa

SEQ ID NO: 1262556 - DNA, 25 bp, Homo sapien
taacaacacctacgtgatagtatcg

SEQ ID NO: 1262557 - DNA, 25 bp, Homo sapien
gacgttggctccagacagcgtttgg

SEQ ID NO: 1262558 - DNA, 25 bp, Homo sapien
ccaaagttccgtgcgggatgagact

SEQ ID NO: 1262559 - DNA, 25 bp, Homo sapien
gaaagacctcggtgcgcagttctcg

SEQ ID NO: 1262560 - DNA, 25 bp, Homo sapien
ggttcagtcccgcacacttgaggtt

SEQ ID NO: 1262561 - DNA, 25 bp, Homo sapien
ggcgctcgccagaagtatcctcact

SEQ ID NO: 1262562 - DNA, 25 bp, Homo sapien
gatataatagccgacctctggccca

SEQ ID NO: 1262563 - DNA, 25 bp, Homo sapien
tgtgttgacgcctaatgatgatata

SEQ ID NO: 1262564 - DNA, 25 bp, Homo sapien
tccaaaagaaactgcgccgtgagct

SEQ ID NO: 1262565 - DNA, 25 bp, Homo sapien
tttccggtagcgaagcccgcgcctg

SEQ ID NO: 1262566 - DNA, 25 bp, Homo sapien
cctgtgccaaggcttgcgagcagaa

SEQ ID NO: 1262567 - DNA, 25 bp, Homo sapien
gaatgccttcgcgatggacgcccgc

SEQ ID NO: 1262568 - DNA, 25 bp, Homo sapien
gcttgcgagcagaatgccttcgcga

SEQ ID NO: 1262569 - DNA, 25 bp, Homo sapien
tttacttttgagtcggagccttgct

SEQ ID NO: 1262570 - DNA, 25 bp, Homo sapien
aagctgacactggcagtgggtcctc

SEQ ID NO: 1262571 - DNA, 25 bp, Homo sapien
accgcgccgggccttttacaatgtg

SEQ ID NO: 1262572 - DNA, 25 bp, Homo sapien
tatttacttttgagtcggagccttg

SEQ ID NO: 1262573 - DNA, 25 bp, Homo sapien
tgagcaagaatcatagacagctact

SEQ ID NO: 1262574 - DNA, 25 bp, Homo sapien
gaatcatagacagctactaccacgg

SEQ ID NO: 1262575 - DNA, 25 bp, Homo sapien
attttactttgctgagcaagaatca

SEQ ID NO: 1262576 - DNA, 25 bp, Homo sapien
tttgctgagcaagaatcatagacag

SEQ ID NO: 1262577 - DNA, 25 bp, Homo sapien
caatgtaaagaagccgatgacccaa

SEQ ID NO: 1262578 - DNA, 25 bp, Homo sapien
gaccagcggctggaaactgacttgg

SEQ ID NO: 1262579 - DNA, 25 bp, Homo sapien
gattctgtgcggctggaaattccaa

SEQ ID NO: 1262580 - DNA, 25 bp, Homo sapien
cattagggaagctcagatgctctca

SEQ ID NO: 1262581 - DNA, 25 bp, Homo sapien
gaggtcgggtgctagaatcccagca

SEQ ID NO: 1262582 - DNA, 25 bp, Homo sapien
cactgtgggaggtcgggtgctagaa

SEQ ID NO: 1262583 - DNA, 25 bp, Homo sapien
cagtgcctttgtagccccagggaaa

SEQ ID NO: 1262584 - DNA, 25 bp, Homo sapien
ggtgacaggaagtaccctttgcaaa

SEQ ID NO: 1262585 - DNA, 25 bp, Homo sapien
caatcccttaagatcatttgttggg

SEQ ID NO: 1262586 - DNA, 25 bp, Homo sapien
tacacagtgttaggaccgtgcaaaa

SEQ ID NO: 1262587 - DNA, 25 bp, Homo sapien
cactaggcttcaggagcatttggaa

SEQ ID NO: 1262588 - DNA, 25 bp, Homo sapien
ggaaataattcctgaccgcacaaag

SEQ ID NO: 1262589 - DNA, 25 bp, Homo sapien
caaagaaacatgctggtgagagaca

SEQ ID NO: 1262590 - DNA, 25 bp, Homo sapien
ttcctgtctcggagatacctcctac

SEQ ID NO: 1262591 - DNA, 25 bp, Homo sapien
atggacaaggcgactcggtgcaggg

SEQ ID NO: 1262592 - DNA, 25 bp, Homo sapien
cgccatggacaaggcgactcggtgc

SEQ ID NO: 1262593 - DNA, 25 bp, Homo sapien
agcgccatggacaaggcgactcggt

SEQ ID NO: 1262594 - DNA, 25 bp, Homo sapien
gacaaggcgactcggtgcagggcct

SEQ ID NO: 1262595 - DNA, 25 bp, Homo sapien
gaatttaccgcactgacttggacca

SEQ ID NO: 1262596 - DNA, 25 bp, Homo sapien
ttccgcaacagggtatgaggtggcc

SEQ ID NO: 1262597 - DNA, 25 bp, Homo sapien
aaaaggtccgctgatttccgcaaca

SEQ ID NO: 1262598 - DNA, 25 bp, Homo sapien
tgcacagctaccagctcggatgggt

SEQ ID NO: 1262599 - DNA, 25 bp, Homo sapien
aataaaatacataggcagggcgcgg

SEQ ID NO: 1262600 - DNA, 25 bp, Homo sapien
ccatgagggcgtacgccgtgacgct

SEQ ID NO: 1262601 - DNA, 25 bp, Homo sapien
tttccccatgagggcgtacgccgtg

SEQ ID NO: 1262602 - DNA, 25 bp, Homo sapien
ccgtgacgctctgaaggtggaacag

SEQ ID NO: 1262603 - DNA, 25 bp, Homo sapien
tacgccgtgacgctctgaaggtgga

SEQ ID NO: 1262604 - DNA, 25 bp, Homo sapien
cagcaccacgtcctggttgtagctg

SEQ ID NO: 1262605 - DNA, 25 bp, Homo sapien
tgggcgacaagacagagacttctct

SEQ ID NO: 1262606 - DNA, 25 bp, Homo sapien
ttttaaagccggacacggcggctga

SEQ ID NO: 1262607 - DNA, 25 bp, Homo sapien
catacacgcactgagggttgaccct

SEQ ID NO: 1262608 - DNA, 25 bp, Homo sapien
taacatctcatcgaccatggctgga

SEQ ID NO: 1262609 - DNA, 25 bp, Homo sapien
agcactgtggggagctgaggcggga

SEQ ID NO: 1262610 - DNA, 25 bp, Homo sapien
actgtggggagctgaggcgggaaga

SEQ ID NO: 1262611 - DNA, 25 bp, Homo sapien
tcacgaggtcaggagctcaagacca

SEQ ID NO: 1262612 - DNA, 25 bp, Homo sapien
tcagggggccgaagcaggagaatcg

SEQ ID NO: 1262613 - DNA, 25 bp, Homo sapien
gaaaaagttcactggtaagtatgtc

SEQ ID NO: 1262614 - DNA, 25 bp, Homo sapien
tgtcgtctattgcttagaggaaaat

SEQ ID NO: 1262615 - DNA, 25 bp, Homo sapien
ggaaaattctgcctaaaccaactca

SEQ ID NO: 1262616 - DNA, 25 bp, Homo sapien
acatccaagtctggctagtacgtga

SEQ ID NO: 1262617 - DNA, 25 bp, Homo sapien
acgtcgcaatcctcgaggactcggt

SEQ ID NO: 1262618 - DNA, 25 bp, Homo sapien
cgcacgtcgcaatcctcgaggactc

SEQ ID NO: 1262619 - DNA, 25 bp, Homo sapien
ctccgacagctgcgcacgtcgcaat

SEQ ID NO: 1262620 - DNA, 25 bp, Homo sapien
gctccgacagctgcgcacgtcgcaa

SEQ ID NO: 1262621 - DNA, 25 bp, Homo sapien
cagcagctcacaagggttcattcgg

SEQ ID NO: 1262622 - DNA, 25 bp, Homo sapien
cagaacaacgtggaacgcaaggtcc

SEQ ID NO: 1262623 - DNA, 25 bp, Homo sapien
tggtatcgataagaagctcacagcc

SEQ ID NO: 1262624 - DNA, 25 bp, Homo sapien
tgaaattgtgggcaggagaatccgc

SEQ ID NO: 1262625 - DNA, 25 bp, Homo sapien
tttcttaaataagcgaacacgtgtg

SEQ ID NO: 1262626 - DNA, 25 bp, Homo sapien
ctccgttcaagatgccgcgctctgt

SEQ ID NO: 1262627 - DNA, 25 bp, Homo sapien
atcttgtcgtttcttaaataagcga

SEQ ID NO: 1262628 - DNA, 25 bp, Homo sapien
ttaaataagcgaacacgtgtgcacc

SEQ ID NO: 1262629 - DNA, 25 bp, Homo sapien
cagccacactgggtacgcgacatgg

SEQ ID NO: 1262630 - DNA, 25 bp, Homo sapien
agccacactgggtacgcgacatggg

SEQ ID NO: 1262631 - DNA, 25 bp, Homo sapien
tctgagtggtcctcgcggcagagcc

SEQ ID NO: 1262632 - DNA, 25 bp, Homo sapien
ctccgcatgccagtgtgagaacacc

SEQ ID NO: 1262633 - DNA, 25 bp, Homo sapien
accgtgagagaagtgaaggcactgc

SEQ ID NO: 1262634 - DNA, 25 bp, Homo sapien
ccccgcacatgtgaccgtgagagaa

SEQ ID NO: 1262635 - DNA, 25 bp, Homo sapien
gaatcatccgagacatgatcaccgt

SEQ ID NO: 1262636 - DNA, 25 bp, Homo sapien
tctcagcaaacgaaaccgccacatt

SEQ ID NO: 1262637 - DNA, 25 bp, Homo sapien
gggcggagctcttcaccgtctcagc

SEQ ID NO: 1262638 - DNA, 25 bp, Homo sapien
cgaaaccgccacatttttcaggctg

SEQ ID NO: 1262639 - DNA, 25 bp, Homo sapien
cagcatcgtcataaggaagttgggt

SEQ ID NO: 1262640 - DNA, 25 bp, Homo sapien
gaaagccgggccttgtgctgatata

SEQ ID NO: 1262641 - DNA, 25 bp, Homo sapien
cagcaaggaacgagggttttcacac

SEQ ID NO: 1262642 - DNA, 25 bp, Homo sapien
cttgtgctgatataaacagcaagga

SEQ ID NO: 1262643 - DNA, 25 bp, Homo sapien
acttcggtgaccaaacagagagccc

SEQ ID NO: 1262644 - DNA, 25 bp, Homo sapien
tacttgttgaggaagagcgtgcaga

SEQ ID NO: 1262645 - DNA, 25 bp, Homo sapien
ctgaagaagaaccacagcgtgaggt

SEQ ID NO: 1262646 - DNA, 25 bp, Homo sapien
caagtctgactcgatgaccgtggtc

SEQ ID NO: 1262647 - DNA, 25 bp, Homo sapien
ctggggttttcaccgaggacgacat

SEQ ID NO: 1262648 - DNA, 25 bp, Homo sapien
gccacagccacgaacgattttacct

SEQ ID NO: 1262649 - DNA, 25 bp, Homo sapien
agccacgaacgattttacctccagg

SEQ ID NO: 1262650 - DNA, 25 bp, Homo sapien
acagccacgaacgattttacctcca

SEQ ID NO: 1262651 - DNA, 25 bp, Homo sapien
aagccacagccacgaacgattttac

SEQ ID NO: 1262652 - DNA, 25 bp, Homo sapien
actccgggcgccaggaacgaggcca

SEQ ID NO: 1262653 - DNA, 25 bp, Homo sapien
gcagcagggactccgggcgccagga

SEQ ID NO: 1262654 - DNA, 25 bp, Homo sapien
ggcagcatgggtcaccgtgaccgcc

SEQ ID NO: 1262655 - DNA, 25 bp, Homo sapien
gggcagcatgggtcaccgtgaccgc

SEQ ID NO: 1262656 - DNA, 25 bp, Homo sapien
tatgcacgcacaaagcatgtgtgaa

SEQ ID NO: 1262657 - DNA, 25 bp, Homo sapien
acagagggaaagctatgcacgcaca

SEQ ID NO: 1262658 - DNA, 25 bp, Homo sapien
gcacgatgagtagaagacaaacacg

SEQ ID NO: 1262659 - DNA, 25 bp, Homo sapien
tcagagagaaagctatgcacgcacg

SEQ ID NO: 1262660 - DNA, 25 bp, Homo sapien
gctgtgacctcatccgaaggctcaa

SEQ ID NO: 1262661 - DNA, 25 bp, Homo sapien
tctggcttaaggtccctcctgaagc

SEQ ID NO: 1262662 - DNA, 25 bp, Homo sapien
gggaagcttagccaggcacctctgg

SEQ ID NO: 1262663 - DNA, 25 bp, Homo sapien
tgagctcactcaggtggacgctggc

SEQ ID NO: 1262664 - DNA, 25 bp, Homo sapien
agtctccgccgcaggcatagcgcta

SEQ ID NO: 1262665 - DNA, 25 bp, Homo sapien
cgctggcggatccaggtgggcttca

SEQ ID NO: 1262666 - DNA, 25 bp, Homo sapien
cttcacaacaaagggacgctggcgg

SEQ ID NO: 1262667 - DNA, 25 bp, Homo sapien
ggaaatgacgcgcagaaccctgcat

SEQ ID NO: 1262668 - DNA, 25 bp, Homo sapien
cgttggttctgctcgggcccttcca

SEQ ID NO: 1262669 - DNA, 25 bp, Homo sapien
gagaaacacggcgcgctcagcgtcc

SEQ ID NO: 1262670 - DNA, 25 bp, Homo sapien
acgggaggagaaacacggcgcgctc

SEQ ID NO: 1262671 - DNA, 25 bp, Homo sapien
actccaggcagacgggaggagaaac

SEQ ID NO: 1262672 - DNA, 25 bp, Homo sapien
gacacggcgcgccgagtgctccggg

SEQ ID NO: 1262673 - DNA, 25 bp, Homo sapien
gggagggacacggcgcgccgagtgc

SEQ ID NO: 1262674 - DNA, 25 bp, Homo sapien
gagggacacggcgcgccgagtgctc

SEQ ID NO: 1262675 - DNA, 25 bp, Homo sapien
acggcgcgccgagtgctccgggcgg

SEQ ID NO: 1262676 - DNA, 25 bp, Homo sapien
gtgcatccccgtggcccgttggttc

SEQ ID NO: 1262677 - DNA, 25 bp, Homo sapien
acgacggtgcgcgtagtgcatcccc

SEQ ID NO: 1262678 - DNA, 25 bp, Homo sapien
gtgcgcgtagtgcatccccgtggcc

SEQ ID NO: 1262679 - DNA, 25 bp, Homo sapien
gcagagggagaggacgacggtgcgc

SEQ ID NO: 1262680 - DNA, 25 bp, Homo sapien
cgcccgggctgttccaccagcggca

SEQ ID NO: 1262681 - DNA, 25 bp, Homo sapien
accagcggcacttcagggcgggatc

SEQ ID NO: 1262682 - DNA, 25 bp, Homo sapien
tgttccaccagcggcacttcagggc

SEQ ID NO: 1262683 - DNA, 25 bp, Homo sapien
ccgggctgttccaccagcggcactt

SEQ ID NO: 1262684 - DNA, 25 bp, Homo sapien
cttaacttagaagacacaaaggcgc

SEQ ID NO: 1262685 - DNA, 25 bp, Homo sapien
gagcttcgtcgagcgttttcctagc

SEQ ID NO: 1262686 - DNA, 25 bp, Homo sapien
tcaggaatgaagttacggctaaagg

SEQ ID NO: 1262687 - DNA, 25 bp, Homo sapien
ggccttcgtatccaggctggcgtcg

SEQ ID NO: 1262688 - DNA, 25 bp, Homo sapien
agacccagcctgcaggccactcggc

SEQ ID NO: 1262689 - DNA, 25 bp, Homo sapien
cccagcctgcaggccactcggccac

SEQ ID NO: 1262690 - DNA, 25 bp, Homo sapien
acccagcctgcaggccactcggcca

SEQ ID NO: 1262691 - DNA, 25 bp, Homo sapien
ggagacccagcctgcaggccactcg

SEQ ID NO: 1262692 - DNA, 25 bp, Homo sapien
gagcagcagccgctcatgcccctgc

SEQ ID NO: 1262693 - DNA, 25 bp, Homo sapien
agcagcagccgctcatgcccctgca

SEQ ID NO: 1262694 - DNA, 25 bp, Homo sapien
ggccaaggtcactcacgggcaagtt

SEQ ID NO: 1262695 - DNA, 25 bp, Homo sapien
gggagttctccaggccaaggtcact

SEQ ID NO: 1262696 - DNA, 25 bp, Homo sapien
gtcactcacgggcaagttcccgcag

SEQ ID NO: 1262697 - DNA, 25 bp, Homo sapien
cggggagttctccaggccaaggtca

SEQ ID NO: 1262698 - DNA, 25 bp, Homo sapien
cttggctccttggtgttgccagacc

SEQ ID NO: 1262699 - DNA, 25 bp, Homo sapien
ttcagctgtgcgccctggttgtgga

SEQ ID NO: 1262700 - DNA, 25 bp, Homo sapien
ttcctctttcagctgtgcgccctgg

SEQ ID NO: 1262701 - DNA, 25 bp, Homo sapien
ccctggttgtggaggctcctaagga

SEQ ID NO: 1262702 - DNA, 25 bp, Homo sapien
cacagggtggtcgttttggtctctc

SEQ ID NO: 1262703 - DNA, 25 bp, Homo sapien
gagaaggttaggcttgacccacagc

SEQ ID NO: 1262704 - DNA, 25 bp, Homo sapien
tcgaaaaggtttccatgccccagag

SEQ ID NO: 1262705 - DNA, 25 bp, Homo sapien
gatgccgccgtttcaggctcgaaaa

SEQ ID NO: 1262706 - DNA, 25 bp, Homo sapien
gtttattgaaaggatctgaaaagcg

SEQ ID NO: 1262707 - DNA, 25 bp, Homo sapien
ttgtttattgaaaggatctgaaaag

SEQ ID NO: 1262708 - DNA, 25 bp, Homo sapien
ttattgaaaggatctgaaaagcgta

SEQ ID NO: 1262709 - DNA, 25 bp, Homo sapien
tattgaaaggatctgaaaagcgtaa

SEQ ID NO: 1262710 - DNA, 25 bp, Homo sapien
tgagcggctggaattctgaacactg

SEQ ID NO: 1262711 - DNA, 25 bp, Homo sapien
ggtcagttcacaccttctgtgttca

SEQ ID NO: 1262712 - DNA, 25 bp, Homo sapien
ttccagccctaacgctgggcgctgg

SEQ ID NO: 1262713 - DNA, 25 bp, Homo sapien
catctcacgctgctttagaggtcag

SEQ ID NO: 1262714 - DNA, 25 bp, Homo sapien
ctcagggtttttggacgctcaagtc

SEQ ID NO: 1262715 - DNA, 25 bp, Homo sapien
ggtttttggacgctcaagtccacag

SEQ ID NO: 1262716 - DNA, 25 bp, Homo sapien
tggcggacttcaagccaggccggct

SEQ ID NO: 1262717 - DNA, 25 bp, Homo sapien
cctgtgcccagggtcatggcggact

SEQ ID NO: 1262718 - DNA, 25 bp, Homo sapien
tgtgcaaaactcagagagcagttac

SEQ ID NO: 1262719 - DNA, 25 bp, Homo sapien
cagaggagaacgtcttgtgccttcc

SEQ ID NO: 1262720 - DNA, 25 bp, Homo sapien
gccttccttatcgatctccagcaga

SEQ ID NO: 1262721 - DNA, 25 bp, Homo sapien
gcagcagtaaccaggacaccagggt

SEQ ID NO: 1262722 - DNA, 25 bp, Homo sapien
cgggcgccggggtaggcagcatcca

SEQ ID NO: 1262723 - DNA, 25 bp, Homo sapien
ctgtgcccgtggaagacgcgggcgc

SEQ ID NO: 1262724 - DNA, 25 bp, Homo sapien
tgtgcccgtggaagacgcgggcgcc

SEQ ID NO: 1262725 - DNA, 25 bp, Homo sapien
tgcccgtggaagacgcgggcgccgg

SEQ ID NO: 1262726 - DNA, 25 bp, Homo sapien
gtatgtacatcagcacttcagaaag

SEQ ID NO: 1262727 - DNA, 25 bp, Homo sapien
agcagaagctacgtgaggaatgtgt

SEQ ID NO: 1262728 - DNA, 25 bp, Homo sapien
gatttaaactaccttcctgggagca

SEQ ID NO: 1262729 - DNA, 25 bp, Homo sapien
tggcaagaccatgctttcaatggcg

SEQ ID NO: 1262730 - DNA, 25 bp, Homo sapien
cacgcagattggtctgtccccagag

SEQ ID NO: 1262731 - DNA, 25 bp, Homo sapien
tgccactgagacaggcggtcacaga

SEQ ID NO: 1262732 - DNA, 25 bp, Homo sapien
tatcaacattgaaggacaggtcgag

SEQ ID NO: 1262733 - DNA, 25 bp, Homo sapien
tgatttgcggaaaaatatcctggca

SEQ ID NO: 1262734 - DNA, 25 bp, Homo sapien
ctcctcctcgaagtgggcttgcttc

SEQ ID NO: 1262735 - DNA, 25 bp, Homo sapien
cctcctcgaagtgggcttgcttctt

SEQ ID NO: 1262736 - DNA, 25 bp, Homo sapien
cctcgaagtgggcttgcttcttccg

SEQ ID NO: 1262737 - DNA, 25 bp, Homo sapien
tcctcgaagtgggcttgcttcttcc

SEQ ID NO: 1262738 - DNA, 25 bp, Homo sapien
gcgaggctctcaaaccagtcgctca

SEQ ID NO: 1262739 - DNA, 25 bp, Homo sapien
ggtcccgcacacagatggaggggag

SEQ ID NO: 1262740 - DNA, 25 bp, Homo sapien
gggtcccgcacacagatggagggga

SEQ ID NO: 1262741 - DNA, 25 bp, Homo sapien
ggatctcttgtctcttccgtccatc

SEQ ID NO: 1262742 - DNA, 25 bp, Homo sapien
gtctccatggcggatctcttgtctc

SEQ ID NO: 1262743 - DNA, 25 bp, Homo sapien
gctgtgttccttgcttcaggtgaca

SEQ ID NO: 1262744 - DNA, 25 bp, Homo sapien
ttccgtccatcaaaggacacccatg

SEQ ID NO: 1262745 - DNA, 25 bp, Homo sapien
ggaaaaggagtgtcgttggctctga

SEQ ID NO: 1262746 - DNA, 25 bp, Homo sapien
gaaaaggagtgtcgttggctctgac

SEQ ID NO: 1262747 - DNA, 25 bp, Homo sapien
cggaaaaggagtgtcgttggctctg

SEQ ID NO: 1262748 - DNA, 25 bp, Homo sapien
cccgtcggggtggacacgatcactc

SEQ ID NO: 1262749 - DNA, 25 bp, Homo sapien
cacgttggggtggatcatggaggcc

SEQ ID NO: 1262750 - DNA, 25 bp, Homo sapien
cggccgcggccgcatacgccgtgct

SEQ ID NO: 1262751 - DNA, 25 bp, Homo sapien
gtgggggcagatgggcgtgatcatg

SEQ ID NO: 1262752 - DNA, 25 bp, Homo sapien
actcccgcccgagggacgctcaggg

SEQ ID NO: 1262753 - DNA, 25 bp, Homo sapien
cgtcgccctgcaccgtggtgatgag

SEQ ID NO: 1262754 - DNA, 25 bp, Homo sapien
tccgtccaggtagacatccacattg

SEQ ID NO: 1262755 - DNA, 25 bp, Homo sapien
accgtggtgatgaggtgtccgtcca

SEQ ID NO: 1262756 - DNA, 25 bp, Homo sapien
acatccacattggacaggtaggagg

SEQ ID NO: 1262757 - DNA, 25 bp, Homo sapien
ctgcagcctgcgagccgttctcacc

SEQ ID NO: 1262758 - DNA, 25 bp, Homo sapien
gactccggagaacaacagctgcgtt

SEQ ID NO: 1262759 - DNA, 25 bp, Homo sapien
tgcttcccgacatccatgtccaggc

SEQ ID NO: 1262760 - DNA, 25 bp, Homo sapien
tgaccttcagccgactccggagaac

SEQ ID NO: 1262761 - DNA, 25 bp, Homo sapien
ccagtgggagtcagagggctctttc

SEQ ID NO: 1262762 - DNA, 25 bp, Homo sapien
tcagagggcatgcatcagggaagtc

SEQ ID NO: 1262763 - DNA, 25 bp, Homo sapien
tgaggtccagcaggagtcagagggc

SEQ ID NO: 1262764 - DNA, 25 bp, Homo sapien
ccaagttgacacacttctgtgcctt

SEQ ID NO: 1262765 - DNA, 25 bp, Homo sapien
aggccatgaccggagggacgctgcc

SEQ ID NO: 1262766 - DNA, 25 bp, Homo sapien
caggtggaaggccatgaccggaggg

SEQ ID NO: 1262767 - DNA, 25 bp, Homo sapien
agttctcaaagctgaatggggtcag

SEQ ID NO: 1262768 - DNA, 25 bp, Homo sapien
cctgagtaacttgggactgaaagtt

SEQ ID NO: 1262769 - DNA, 25 bp, Homo sapien
taggtgactgctctcgtataaaggg

SEQ ID NO: 1262770 - DNA, 25 bp, Homo sapien
cctagactagaacctggtgtgggtc

SEQ ID NO: 1262771 - DNA, 25 bp, Homo sapien
cagtaggcgaggtcgtttcccagga

SEQ ID NO: 1262772 - DNA, 25 bp, Homo sapien
ccatgcttgtgagcccctcgttacg

SEQ ID NO: 1262773 - DNA, 25 bp, Homo sapien
gaagtctatctgattggaaatgtca

SEQ ID NO: 1262774 - DNA, 25 bp, Homo sapien
ctggaaaagcgaggaagcgtacagc

SEQ ID NO: 1262775 - DNA, 25 bp, Homo sapien
aggaagcgtacagcagcgtcccgtc

SEQ ID NO: 1262776 - DNA, 25 bp, Homo sapien
tctccccccaggcagatgatgaagt

SEQ ID NO: 1262777 - DNA, 25 bp, Homo sapien
cttttccacatacacgatcatgttc

SEQ ID NO: 1262778 - DNA, 25 bp, Homo sapien
cccaaagctttcatcgctggcgatg

SEQ ID NO: 1262779 - DNA, 25 bp, Homo sapien
tttccacatacacgatcatgttctc

SEQ ID NO: 1262780 - DNA, 25 bp, Homo sapien
gcgatggcagggtcttctagcactt

SEQ ID NO: 1262781 - DNA, 25 bp, Homo sapien
ctggaagcaaagtgccaacctgctc

SEQ ID NO: 1262782 - DNA, 25 bp, Homo sapien
gtgccaacctgctcattccacctgc

SEQ ID NO: 1262783 - DNA, 25 bp, Homo sapien
aaagtgccaacctgctcattccacc

SEQ ID NO: 1262784 - DNA, 25 bp, Homo sapien
caaagtgccaacctgctcattccac

SEQ ID NO: 1262785 - DNA, 25 bp, Homo sapien
gagacctggcatcgtggcctgcatg

SEQ ID NO: 1262786 - DNA, 25 bp, Homo sapien
tcacgggcgctgtggtcagagacct

SEQ ID NO: 1262787 - DNA, 25 bp, Homo sapien
ctgcagggaggttcccgactcacgg

SEQ ID NO: 1262788 - DNA, 25 bp, Homo sapien
ccacgctcacgctgaaacttcatca

SEQ ID NO: 1262789 - DNA, 25 bp, Homo sapien
ggtgcttgccatggcggcacacaca

SEQ ID NO: 1262790 - DNA, 25 bp, Homo sapien
caggaaggcccacgtcagatgtggc

SEQ ID NO: 1262791 - DNA, 25 bp, Homo sapien
ggtcacccagtctggtgcttgccat

SEQ ID NO: 1262792 - DNA, 25 bp, Homo sapien
agccgttgcccagcacttgaggtgg

SEQ ID NO: 1262793 - DNA, 25 bp, Homo sapien
ggtgatgtggatggaggccccccca

SEQ ID NO: 1262794 - DNA, 25 bp, Homo sapien
tgatgtggatggaggcccccccaac

SEQ ID NO: 1262795 - DNA, 25 bp, Homo sapien
gcggtgatgtggatggaggcccccc

SEQ ID NO: 1262796 - DNA, 25 bp, Homo sapien
gggcggtgatgtggatggaggcccc

SEQ ID NO: 1262797 - DNA, 25 bp, Homo sapien
ccatgtgcaccccaggcccccttcc

SEQ ID NO: 1262798 - DNA, 25 bp, Homo sapien
tccatgtgcaccccaggcccccttc

SEQ ID NO: 1262799 - DNA, 25 bp, Homo sapien
catgtgcaccccaggcccccttccc

SEQ ID NO: 1262800 - DNA, 25 bp, Homo sapien
ccttgaacggctgcagtaggctggc

SEQ ID NO: 1262801 - DNA, 25 bp, Homo sapien
aacggctgcagtaggctggcatctc

SEQ ID NO: 1262802 - DNA, 25 bp, Homo sapien
catgaggtgcgtgcagagctccttg

SEQ ID NO: 1262803 - DNA, 25 bp, Homo sapien
gcagagctccttgaacggctgcagt

SEQ ID NO: 1262804 - DNA, 25 bp, Homo sapien
ggacgctctttggggacttgttcca

SEQ ID NO: 1262805 - DNA, 25 bp, Homo sapien
ttgttccacgtcagccgctggctcg

SEQ ID NO: 1262806 - DNA, 25 bp, Homo sapien
tctttggggacttgttccacgtcag

SEQ ID NO: 1262807 - DNA, 25 bp, Homo sapien
acgctctttggggacttgttccacg

SEQ ID NO: 1262808 - DNA, 25 bp, Homo sapien
atccaggccacgcttggcgaacacg

SEQ ID NO: 1262809 - DNA, 25 bp, Homo sapien
tcacacatgtggctcgcgaggtagc

SEQ ID NO: 1262810 - DNA, 25 bp, Homo sapien
ggtcactcatgccatcccctatgag

SEQ ID NO: 1262811 - DNA, 25 bp, Homo sapien
tcggtatggtcctgactgtgcgccc

SEQ ID NO: 1262812 - DNA, 25 bp, Homo sapien
tccctgctcctaactgagccgggtg

SEQ ID NO: 1262813 - DNA, 25 bp, Homo sapien
tgagccgggtgggaccaagccctct

SEQ ID NO: 1262814 - DNA, 25 bp, Homo sapien
taaaagcaactaagtcaaaagagct

SEQ ID NO: 1262815 - DNA, 25 bp, Homo sapien
gtcaaaagagcttcctacacttata

SEQ ID NO: 1262816 - DNA, 25 bp, Homo sapien
gcctacacccattccagccctgagg

SEQ ID NO: 1262817 - DNA, 25 bp, Homo sapien
agcgcctcgacctcttcctgggtca

SEQ ID NO: 1262818 - DNA, 25 bp, Homo sapien
cggcgtcgtacaccggcccaggcac

SEQ ID NO: 1262819 - DNA, 25 bp, Homo sapien
ctgtgtgtgaccacaaaccagcgcc

SEQ ID NO: 1262820 - DNA, 25 bp, Homo sapien
cccttgcaggcacgcacggctgtgg

SEQ ID NO: 1262821 - DNA, 25 bp, Homo sapien
gagggcagggggtggcgtgaagctt

SEQ ID NO: 1262822 - DNA, 25 bp, Homo sapien
tggcgtgaagcttgcaggcacacac

SEQ ID NO: 1262823 - DNA, 25 bp, Homo sapien
gtggcgtgaagcttgcaggcacaca

SEQ ID NO: 1262824 - DNA, 25 bp, Homo sapien
ctccacaacacaggcccaccaattc

SEQ ID NO: 1262825 - DNA, 25 bp, Homo sapien
tccacaacacaggcccaccaattcc

SEQ ID NO: 1262826 - DNA, 25 bp, Homo sapien
ctgagtacgccctggtctgagggct

SEQ ID NO: 1262827 - DNA, 25 bp, Homo sapien
gccctggcccgagtgactgacggct

SEQ ID NO: 1262828 - DNA, 25 bp, Homo sapien
cctcgggcagctcggggaccactga

SEQ ID NO: 1262829 - DNA, 25 bp, Homo sapien
cagctgagatgcgagtgacaaagga

SEQ ID NO: 1262830 - DNA, 25 bp, Homo sapien
ggaggacgcccatgtggctttttgt

SEQ ID NO: 1262831 - DNA, 25 bp, Homo sapien
taaatgacctaaacatgtacttctc

SEQ ID NO: 1262832 - DNA, 25 bp, Homo sapien
tgctagaatcttcctcaacacagcg

SEQ ID NO: 1262833 - DNA, 25 bp, Homo sapien
tcggatgcctgcactcagggggttc

SEQ ID NO: 1262834 - DNA, 25 bp, Homo sapien
tggtcaccgggcatggcccatgaag

SEQ ID NO: 1262835 - DNA, 25 bp, Homo sapien
tggcccatgaagagagcgtgtcctc

SEQ ID NO: 1262836 - DNA, 25 bp, Homo sapien
ttggtccaaaagtggtcaccgggca

SEQ ID NO: 1262837 - DNA, 25 bp, Homo sapien
gcatggcccatgaagagagcgtgtc

SEQ ID NO: 1262838 - DNA, 25 bp, Homo sapien
gtctcatcgccgtggcaggccgagc

SEQ ID NO: 1262839 - DNA, 25 bp, Homo sapien
aggcagacaggctgcgagacttggc

SEQ ID NO: 1262840 - DNA, 25 bp, Homo sapien
gggtggttgtaactccaggtctcat

SEQ ID NO: 1262841 - DNA, 25 bp, Homo sapien
cagacaggctgcgagacttggcccg

SEQ ID NO: 1262842 - DNA, 25 bp, Homo sapien
tctgcctcagcatcataatgtgctt

SEQ ID NO: 1262843 - DNA, 25 bp, Homo sapien
tgtgcctagccaaaacactgttaag

SEQ ID NO: 1262844 - DNA, 25 bp, Homo sapien
gtgcctagccaaaacactgttaaga

SEQ ID NO: 1262845 - DNA, 25 bp, Homo sapien
tcagcatcataatgtgcttggatta

SEQ ID NO: 1262846 - DNA, 25 bp, Homo sapien
agccgtcgctacctggcccttggcg

SEQ ID NO: 1262847 - DNA, 25 bp, Homo sapien
tggccgcctgttgccccatggccgc

SEQ ID NO: 1262848 - DNA, 25 bp, Homo sapien
gggcgtctacatgccggaccgagcc

SEQ ID NO: 1262849 - DNA, 25 bp, Homo sapien
cgccgccgagcagcaatgcgccgcg

SEQ ID NO: 1262850 - DNA, 25 bp, Homo sapien
cacgtctacgcctaggcgcccccga

SEQ ID NO: 1262851 - DNA, 25 bp, Homo sapien
gcctaggcgcccccgacattgtgat

SEQ ID NO: 1262852 - DNA, 25 bp, Homo sapien
ccgccacgtctacgcctaggcgccc

SEQ ID NO: 1262853 - DNA, 25 bp, Homo sapien
tacgcctaggcgcccccgacattgt

SEQ ID NO: 1262854 - DNA, 25 bp, Homo sapien
tgaatccagagacacggaacacggc

SEQ ID NO: 1262855 - DNA, 25 bp, Homo sapien
aatccagagacacggaacacggcct

SEQ ID NO: 1262856 - DNA, 25 bp, Homo sapien
cttgaatccagagacacggaacacg

SEQ ID NO: 1262857 - DNA, 25 bp, Homo sapien
tccagagacacggaacacggcctgg

SEQ ID NO: 1262858 - DNA, 25 bp, Homo sapien
gggaagcaaggatcatgagaacttg

SEQ ID NO: 1262859 - DNA, 25 bp, Homo sapien
agggaagcaaggatcatgagaactt

SEQ ID NO: 1262860 - DNA, 25 bp, Homo sapien
ggaagcaaggatcatgagaacttgg

SEQ ID NO: 1262861 - DNA, 25 bp, Homo sapien
agtggaggcagtcaactgcttctgc

SEQ ID NO: 1262862 - DNA, 25 bp, Homo sapien
gagccaggcctcagtagaatcttct

SEQ ID NO: 1262863 - DNA, 25 bp, Homo sapien
tgcagaggcaaccagtgactgtcgt

SEQ ID NO: 1262864 - DNA, 25 bp, Homo sapien
tcccgctgtgtagggagctccagca

SEQ ID NO: 1262865 - DNA, 25 bp, Homo sapien
gagacaacgccatagtgtcacttgc

SEQ ID NO: 1262866 - DNA, 25 bp, Homo sapien
caagtgccctatgggagcctctccg

SEQ ID NO: 1262867 - DNA, 25 bp, Homo sapien
ggcacccttggtggcgtcagaaaca

SEQ ID NO: 1262868 - DNA, 25 bp, Homo sapien
ggttagggcttgtgaagaacttgca

SEQ ID NO: 1262869 - DNA, 25 bp, Homo sapien
caacagcagtcgtttgcaacagaac

SEQ ID NO: 1262870 - DNA, 25 bp, Homo sapien
tgtgtgatgggaatgagccacctca

SEQ ID NO: 1262871 - DNA, 25 bp, Homo sapien
gaacaccaggacaatctgtgtgtga

SEQ ID NO: 1262872 - DNA, 25 bp, Homo sapien
cctgctttccaaacgctgctgctga

SEQ ID NO: 1262873 - DNA, 25 bp, Homo sapien
gacagagccgcaatggttacaactg

SEQ ID NO: 1262874 - DNA, 25 bp, Homo sapien
gcttccgatatgtgccacagagcag

SEQ ID NO: 1262875 - DNA, 25 bp, Homo sapien
cagcaacgagaagtggacagagccg

SEQ ID NO: 1262876 - DNA, 25 bp, Homo sapien
caagcgtgtagagccgcgcgctgta

SEQ ID NO: 1262877 - DNA, 25 bp, Homo sapien
tctatgccacgtttgtgtgcaacaa

SEQ ID NO: 1262878 - DNA, 25 bp, Homo sapien
tgagctcacttttcagcaaaggtga

SEQ ID NO: 1262879 - DNA, 25 bp, Homo sapien
tctgatcacgcatttgagaccgtcc

SEQ ID NO: 1262880 - DNA, 25 bp, Homo sapien
gactgagtcccatatgcacttttga

SEQ ID NO: 1262881 - DNA, 25 bp, Homo sapien
cacaaaacagggtcactggtctaaa

SEQ ID NO: 1262882 - DNA, 25 bp, Homo sapien
tgaccagatgaacaaagccctcagc

SEQ ID NO: 1262883 - DNA, 25 bp, Homo sapien
tcattgacaacatcagagaggctgc

SEQ ID NO: 1262884 - DNA, 25 bp, Homo sapien
gaggctgccctagactctctggttt

SEQ ID NO: 1262885 - DNA, 25 bp, Homo sapien
aagacgatggccccggaaggaatgc

SEQ ID NO: 1262886 - DNA, 25 bp, Homo sapien
ctttctctcaatgggaattgtgctc

SEQ ID NO: 1262887 - DNA, 25 bp, Homo sapien
caaagacgatggccccggaaggaat

SEQ ID NO: 1262888 - DNA, 25 bp, Homo sapien
gtgctcttggtttcagcaataagtg

SEQ ID NO: 1262889 - DNA, 25 bp, Homo sapien
tatgctctcatggtaacgcgtccaa

SEQ ID NO: 1262890 - DNA, 25 bp, Homo sapien
tacggttggataggatatgctctca

SEQ ID NO: 1262891 - DNA, 25 bp, Homo sapien
gctctcatggtaacgcgtccaagtt

SEQ ID NO: 1262892 - DNA, 25 bp, Homo sapien
gaggtgtagggtgtccacgttagta

SEQ ID NO: 1262893 - DNA, 25 bp, Homo sapien
gttctatgagaaacacgcacagttc

SEQ ID NO: 1262894 - DNA, 25 bp, Homo sapien
gagggcacgtgacttcagctttctg

SEQ ID NO: 1262895 - DNA, 25 bp, Homo sapien
ctgtaaacgtttcccacaacacaat

SEQ ID NO: 1262896 - DNA, 25 bp, Homo sapien
tctagaaaccgttaatgacaacttc

SEQ ID NO: 1262897 - DNA, 25 bp, Homo sapien
gtcagtcacgcccaggcagctgacg

SEQ ID NO: 1262898 - DNA, 25 bp, Homo sapien
tgacgcggttgtcatgcccagccaa

SEQ ID NO: 1262899 - DNA, 25 bp, Homo sapien
acgcccaggcagctgacgcggttgt

SEQ ID NO: 1262900 - DNA, 25 bp, Homo sapien
agccatgccatcgtcagtcacgccc

SEQ ID NO: 1262901 - DNA, 25 bp, Homo sapien
gtgcatctctcatgggacaagaccc

SEQ ID NO: 1262902 - DNA, 25 bp, Homo sapien
cacctgtgtgccatgttgtgacgag

SEQ ID NO: 1262903 - DNA, 25 bp, Homo sapien
cagaggcatcgatctcacctgtgtg

SEQ ID NO: 1262904 - DNA, 25 bp, Homo sapien
gaattaacctgcagcatatggccag

SEQ ID NO: 1262905 - DNA, 25 bp, Homo sapien
tgttaactgtaacggcacccagagg

SEQ ID NO: 1262906 - DNA, 25 bp, Homo sapien
taaccttggcttggatcatcaccag

SEQ ID NO: 1262907 - DNA, 25 bp, Homo sapien
tgtacacctggcaataacacgcttg

SEQ ID NO: 1262908 - DNA, 25 bp, Homo sapien
tttgtctgtgatccctagagcccag

SEQ ID NO: 1262909 - DNA, 25 bp, Homo sapien
cggtcggctttgagtgcatcccaga

SEQ ID NO: 1262910 - DNA, 25 bp, Homo sapien
gacagaggtgatcccgcagatgatg

SEQ ID NO: 1262911 - DNA, 25 bp, Homo sapien
agtaagtcatgagctcctggtcagc

SEQ ID NO: 1262912 - DNA, 25 bp, Homo sapien
ttgaagtcgtcgtacccagcaagga

SEQ ID NO: 1262913 - DNA, 25 bp, Homo sapien
catctccagtgtgtccggtaaacgt

SEQ ID NO: 1262914 - DNA, 25 bp, Homo sapien
cagagacgaacagtctggtgtcagg

SEQ ID NO: 1262915 - DNA, 25 bp, Homo sapien
tggtcgtctgctggccggtctcgat

SEQ ID NO: 1262916 - DNA, 25 bp, Homo sapien
gccagtgaaggtctgccggcacatg

SEQ ID NO: 1262917 - DNA, 25 bp, Homo sapien
tccagagctggtgacgatctgattg

SEQ ID NO: 1262918 - DNA, 25 bp, Homo sapien
tctccagagctggtgacgatctgat

SEQ ID NO: 1262919 - DNA, 25 bp, Homo sapien
gctggtgacgatctgattgtcatcc

SEQ ID NO: 1262920 - DNA, 25 bp, Homo sapien
cagagctggtgacgatctgattgtc

SEQ ID NO: 1262921 - DNA, 25 bp, Homo sapien
ggcccggtggaagctctacgtctaa

SEQ ID NO: 1262922 - DNA, 25 bp, Homo sapien
caaagaacaggcctaagtgatgagc

SEQ ID NO: 1262923 - DNA, 25 bp, Homo sapien
ataacgaaggcaacaggaacgcggc

SEQ ID NO: 1262924 - DNA, 25 bp, Homo sapien
tacatagagaaacacattggcccgg

SEQ ID NO: 1262925 - DNA, 25 bp, Homo sapien
gggaatgaccgaatgtataagccac

SEQ ID NO: 1262926 - DNA, 25 bp, Homo sapien
tctcaagcgctgataaaatgatgtg

SEQ ID NO: 1262927 - DNA, 25 bp, Homo sapien
taggaaaaccatgctccaagtaccc

SEQ ID NO: 1262928 - DNA, 25 bp, Homo sapien
tggacaagcatcagctgacaggaac

SEQ ID NO: 1262929 - DNA, 25 bp, Homo sapien
caagaagtcagccatgaccacgccc

SEQ ID NO: 1262930 - DNA, 25 bp, Homo sapien
ccacccaagggaggcgcacaggaca

SEQ ID NO: 1262931 - DNA, 25 bp, Homo sapien
gaaaggtttagttctcctacctgca

SEQ ID NO: 1262932 - DNA, 25 bp, Homo sapien
tgcaccctggagaacatccctgttg

SEQ ID NO: 1262933 - DNA, 25 bp, Homo sapien
cgcgcccagcccacaaacactctta

SEQ ID NO: 1262934 - DNA, 25 bp, Homo sapien
cccagcccacaaacactcttaagag

SEQ ID NO: 1262935 - DNA, 25 bp, Homo sapien
gcccagcccacaaacactcttaaga

SEQ ID NO: 1262936 - DNA, 25 bp, Homo sapien
cgcccagcccacaaacactcttaag

SEQ ID NO: 1262937 - DNA, 25 bp, Homo sapien
tagacagattactgggcaaccacag

SEQ ID NO: 1262938 - DNA, 25 bp, Homo sapien
tccaaaaagggtgctgcgtcagaca

SEQ ID NO: 1262939 - DNA, 25 bp, Homo sapien
gatatccgacacctgaagtgcacag

SEQ ID NO: 1262940 - DNA, 25 bp, Homo sapien
gactgctgaacatagagaacacctt

SEQ ID NO: 1262941 - DNA, 25 bp, Homo sapien
ttaatgattcataaggccgggcgca

SEQ ID NO: 1262942 - DNA, 25 bp, Homo sapien
tgtccagcgcaaatccacaggtttc

SEQ ID NO: 1262943 - DNA, 25 bp, Homo sapien
gacttttatttgaaccagtctcatt

SEQ ID NO: 1262944 - DNA, 25 bp, Homo sapien
cacaggtttcttactggtaaaggca

SEQ ID NO: 1262945 - DNA, 25 bp, Homo sapien
tgccagctcacgactcacgcgcacg

SEQ ID NO: 1262946 - DNA, 25 bp, Homo sapien
agctcacgactcacgcgcacgttcc

SEQ ID NO: 1262947 - DNA, 25 bp, Homo sapien
acgactcacgcgcacgttcccctca

SEQ ID NO: 1262948 - DNA, 25 bp, Homo sapien
gtcctgccagctcacgactcacgcg

SEQ ID NO: 1262949 - DNA, 25 bp, Homo sapien
caccgcaggccacatagttcccaga

SEQ ID NO: 1262950 - DNA, 25 bp, Homo sapien
caggccaccgcaggccacatagttc

SEQ ID NO: 1262951 - DNA, 25 bp, Homo sapien
cagaaggggcatatgcacaggtcat

SEQ ID NO: 1262952 - DNA, 25 bp, Homo sapien
tcccagaaggggcatatgcacaggt

SEQ ID NO: 1262953 - DNA, 25 bp, Homo sapien
ccagcttggtaaggagatgacggac

SEQ ID NO: 1262954 - DNA, 25 bp, Homo sapien
gatgacggacaacagcacaactgtg

SEQ ID NO: 1262955 - DNA, 25 bp, Homo sapien
tgaggtctcctagaaacacagaagg

SEQ ID NO: 1262956 - DNA, 25 bp, Homo sapien
tactaacaaacagagcttgccgctg

SEQ ID NO: 1262957 - DNA, 25 bp, Homo sapien
gctgtcccagatgataagtttacca

SEQ ID NO: 1262958 - DNA, 25 bp, Homo sapien
cagatgataagtttaccatcctgcg

SEQ ID NO: 1262959 - DNA, 25 bp, Homo sapien
gataagtttaccatcctgcgaggca

SEQ ID NO: 1262960 - DNA, 25 bp, Homo sapien
agtttaccatcctgcgaggcactga

SEQ ID NO: 1262961 - DNA, 25 bp, Homo sapien
ggtgccactcacctagaacatagag

SEQ ID NO: 1262962 - DNA, 25 bp, Homo sapien
ctccaggaccctgaaagtagctgtc

SEQ ID NO: 1262963 - DNA, 25 bp, Homo sapien
tcaaaaatcaaaacacctaatgccc

SEQ ID NO: 1262964 - DNA, 25 bp, Homo sapien
cgttgcctagtagtgcctttaccta

SEQ ID NO: 1262965 - DNA, 25 bp, Homo sapien
cgcagtgtcctcctcgtgcgcattt

SEQ ID NO: 1262966 - DNA, 25 bp, Homo sapien
ttcccactgggtcgatgttgtttgt

SEQ ID NO: 1262967 - DNA, 25 bp, Homo sapien
gagtctgtgccccagtgcatggcgt

SEQ ID NO: 1262968 - DNA, 25 bp, Homo sapien
ctcctcgtgcgcatttggattcttc

SEQ ID NO: 1262969 - DNA, 25 bp, Homo sapien
taaaaacatttctgtaaatcaacat

SEQ ID NO: 1262970 - DNA, 25 bp, Homo sapien
ataaaaacatttctgtaaatcaaca

SEQ ID NO: 1262971 - DNA, 25 bp, Homo sapien
ctgtgattaaacgattctcctcatc

SEQ ID NO: 1262972 - DNA, 25 bp, Homo sapien
tgtgattaaacgattctcctcatca

SEQ ID NO: 1262973 - DNA, 25 bp, Homo sapien
cttgtcaaggctgttggctcgccca

SEQ ID NO: 1262974 - DNA, 25 bp, Homo sapien
acccatccttgtcaaggctgttggc

SEQ ID NO: 1262975 - DNA, 25 bp, Homo sapien
agttctccagtggcttccactgtgg

SEQ ID NO: 1262976 - DNA, 25 bp, Homo sapien
cacagttctccagtggcttccactg

SEQ ID NO: 1262977 - DNA, 25 bp, Homo sapien
tctccagtggcttccactgtggcat

SEQ ID NO: 1262978 - DNA, 25 bp, Homo sapien
cccacagttctccagtggcttccac

SEQ ID NO: 1262979 - DNA, 25 bp, Homo sapien
tgctgagcccatcctacatatagac

SEQ ID NO: 1262980 - DNA, 25 bp, Homo sapien
tcagtctggctggtcatcaggaacc

SEQ ID NO: 1262981 - DNA, 25 bp, Homo sapien
gtgtgggcctgcatgacacctgctt

SEQ ID NO: 1262982 - DNA, 25 bp, Homo sapien
tgcttctgcacgaccatcacttgga

SEQ ID NO: 1262983 - DNA, 25 bp, Homo sapien
gagagagagttgcatctgcacatgc

SEQ ID NO: 1262984 - DNA, 25 bp, Homo sapien
gagagttgcatctgcacatgctttc

SEQ ID NO: 1262985 - DNA, 25 bp, Homo sapien
ctgagagagagttgcatctgcacat

SEQ ID NO: 1262986 - DNA, 25 bp, Homo sapien
gagagagttgcatctgcacatgctt

SEQ ID NO: 1262987 - DNA, 25 bp, Homo sapien
caaagtttcaaagagagctttccta

SEQ ID NO: 1262988 - DNA, 25 bp, Homo sapien
aagtttcaaagagagctttcctaag

SEQ ID NO: 1262989 - DNA, 25 bp, Homo sapien
ccagtagtacccaaatctgtctaag

SEQ ID NO: 1262990 - DNA, 25 bp, Homo sapien
tctaagacctgcagcacaatattcc

SEQ ID NO: 1262991 - DNA, 25 bp, Homo sapien
gtccaggccacgctgaacagagaac

SEQ ID NO: 1262992 - DNA, 25 bp, Homo sapien
gactgtccaggccacgctgaacaga

SEQ ID NO: 1262993 - DNA, 25 bp, Homo sapien
tcaaaatggcaaatggcatgtgcag

SEQ ID NO: 1262994 - DNA, 25 bp, Homo sapien
gtggaggacgagttcccagcggttc

SEQ ID NO: 1262995 - DNA, 25 bp, Homo sapien
tgtgcagcccttacaggcgtgcgtc

SEQ ID NO: 1262996 - DNA, 25 bp, Homo sapien
gcgtgcgtccaagtgccccacatgg

SEQ ID NO: 1262997 - DNA, 25 bp, Homo sapien
tcggagacaaagcagctaggcgcct

SEQ ID NO: 1262998 - DNA, 25 bp, Homo sapien
tatgatgtccacttaaaccagagat

SEQ ID NO: 1262999 - DNA, 25 bp, Homo sapien
catctacgcctgtgcatcctgtgga

SEQ ID NO: 1263000 - DNA, 25 bp, Homo sapien
acagcgcggttcctggtacttcgga

SEQ ID NO: 1263001 - DNA, 25 bp, Homo sapien
tcaagggattctctgactttagcct

SEQ ID NO: 1263002 - DNA, 25 bp, Homo sapien
gttcaagggattctctgactttagc

SEQ ID NO: 1263003 - DNA, 25 bp, Homo sapien
agtagctgggaatacaggcacacac

SEQ ID NO: 1263004 - DNA, 25 bp, Homo sapien
gggattctctgactttagcctcctg

SEQ ID NO: 1263005 - DNA, 25 bp, Homo sapien
tataattagtacatcctgggccaac

SEQ ID NO: 1263006 - DNA, 25 bp, Homo sapien
gacacttataaattctacggagaca

SEQ ID NO: 1263007 - DNA, 25 bp, Homo sapien
tacggagacatctggtgtatattca

SEQ ID NO: 1263008 - DNA, 25 bp, Homo sapien
ggcccagggtatcacaaattttcaa

SEQ ID NO: 1263009 - DNA, 25 bp, Homo sapien
tctggttcttaagttgctcggcctc

SEQ ID NO: 1263010 - DNA, 25 bp, Homo sapien
ctggttcttaagttgctcggcctcc

SEQ ID NO: 1263011 - DNA, 25 bp, Homo sapien
tgccgtaactggtcaagctcactca

SEQ ID NO: 1263012 - DNA, 25 bp, Homo sapien
cggcctcctgccgtaactggtcaag

SEQ ID NO: 1263013 - DNA, 25 bp, Homo sapien
tcttcaatgccaccttcaagaatgt

SEQ ID NO: 1263014 - DNA, 25 bp, Homo sapien
aagacaagcacaatcaataaacaac

SEQ ID NO: 1263015 - DNA, 25 bp, Homo sapien
cagaaagacaagcacaatcaataaa

SEQ ID NO: 1263016 - DNA, 25 bp, Homo sapien
gaaagacaagcacaatcaataaaca

SEQ ID NO: 1263017 - DNA, 25 bp, Homo sapien
aaacagaaagacaagcacaatcaat

SEQ ID NO: 1263018 - DNA, 25 bp, Homo sapien
gactgaagatcttggctgttaagta

SEQ ID NO: 1263019 - DNA, 25 bp, Homo sapien
ccaagagaatgtcataaatggaggc

SEQ ID NO: 1263020 - DNA, 25 bp, Homo sapien
taaatcaccttgttaaacaagagac

SEQ ID NO: 1263021 - DNA, 25 bp, Homo sapien
catttctgaccaagatcttagctgt

SEQ ID NO: 1263022 - DNA, 25 bp, Homo sapien
tctacacacaccagatgttatggcg

SEQ ID NO: 1263023 - DNA, 25 bp, Homo sapien
cacacgcatacaaagttaacagagg

SEQ ID NO: 1263024 - DNA, 25 bp, Homo sapien
cagaggctaatctggggtcctagaa

SEQ ID NO: 1263025 - DNA, 25 bp, Homo sapien
caaagcgctagactctaatctattg

SEQ ID NO: 1263026 - DNA, 25 bp, Homo sapien
ctcttgcttttctcttcgcttccct

SEQ ID NO: 1263027 - DNA, 25 bp, Homo sapien
gctcttgcttttctcttcgcttccc

SEQ ID NO: 1263028 - DNA, 25 bp, Homo sapien
tgctcttgcttttctcttcgcttcc

SEQ ID NO: 1263029 - DNA, 25 bp, Homo sapien
tctcttgggcagattcctagcggtg

SEQ ID NO: 1263030 - DNA, 25 bp, Homo sapien
actacaggtgtgtgttgaacattcc

SEQ ID NO: 1263031 - DNA, 25 bp, Homo sapien
gaatggctggatcatactacaggtg

SEQ ID NO: 1263032 - DNA, 25 bp, Homo sapien
cagtggcaaccagtgtaacagtgga

SEQ ID NO: 1263033 - DNA, 25 bp, Homo sapien
accacacgtggctaaatcttttcct

SEQ ID NO: 1263034 - DNA, 25 bp, Homo sapien
ttcttttacgcattctatctttgat

SEQ ID NO: 1263035 - DNA, 25 bp, Homo sapien
ccagactatggtttgtctttcgttc

SEQ ID NO: 1263036 - DNA, 25 bp, Homo sapien
tattttctgccagactatggtttgt

SEQ ID NO: 1263037 - DNA, 25 bp, Homo sapien
ctcgtgatccacccaacctgacctc

SEQ ID NO: 1263038 - DNA, 25 bp, Homo sapien
tcattctcctgactcagcctccaga

SEQ ID NO: 1263039 - DNA, 25 bp, Homo sapien
cctcgtgatccacccaacctgacct

SEQ ID NO: 1263040 - DNA, 25 bp, Homo sapien
ctggtctggtctccaatacatgtaa

SEQ ID NO: 1263041 - DNA, 25 bp, Homo sapien
gtctggtctccaatacatgtaaatt

SEQ ID NO: 1263042 - DNA, 25 bp, Homo sapien
cttctggtctggtctccaatacatg

SEQ ID NO: 1263043 - DNA, 25 bp, Homo sapien
tggtctccaatacatgtaaatttgt

SEQ ID NO: 1263044 - DNA, 25 bp, Homo sapien
cagcgagccactgtatgtcagcctg

SEQ ID NO: 1263045 - DNA, 25 bp, Homo sapien
gcagcgagccactgtatgtcagcct

SEQ ID NO: 1263046 - DNA, 25 bp, Homo sapien
agcagcgagccactgtatgtcagcc

SEQ ID NO: 1263047 - DNA, 25 bp, Homo sapien
catcttaacagcactgcctgattta

SEQ ID NO: 1263048 - DNA, 25 bp, Homo sapien
ttctgaaggacagctctgacatgcg

SEQ ID NO: 1263049 - DNA, 25 bp, Homo sapien
ctcctccgctcagaagtcttcaaat

SEQ ID NO: 1263050 - DNA, 25 bp, Homo sapien
ttgcctggcccgttactaatctgtg

SEQ ID NO: 1263051 - DNA, 25 bp, Homo sapien
agatggagctacacccttcccgatg

SEQ ID NO: 1263052 - DNA, 25 bp, Homo sapien
ggttcgtgctccaacagcagatgga

SEQ ID NO: 1263053 - DNA, 25 bp, Homo sapien
tgtgggccatgaaagcctaagctcc

SEQ ID NO: 1263054 - DNA, 25 bp, Homo sapien
cacagtgatgagtccagcccagact

SEQ ID NO: 1263055 - DNA, 25 bp, Homo sapien
agaggcatgcaccacaaagcccggc

SEQ ID NO: 1263056 - DNA, 25 bp, Homo sapien
aggattagaggcatgcaccacaaag

SEQ ID NO: 1263057 - DNA, 25 bp, Homo sapien
gccaggattagaggcatgcaccaca

SEQ ID NO: 1263058 - DNA, 25 bp, Homo sapien
ttagaggcatgcaccacaaagcccg

SEQ ID NO: 1263059 - DNA, 25 bp, Homo sapien
taaaacatgaagttctctaccctca

SEQ ID NO: 1263060 - DNA, 25 bp, Homo sapien
tgtgttgggctgcaatgcggcccac

SEQ ID NO: 1263061 - DNA, 25 bp, Homo sapien
ggacaagcatgactaggcattcata

SEQ ID NO: 1263062 - DNA, 25 bp, Homo sapien
tataccaaaaattctagctaggagt

SEQ ID NO: 1263063 - DNA, 25 bp, Homo sapien
aacggcttcccactgcatcaaggaa

SEQ ID NO: 1263064 - DNA, 25 bp, Homo sapien
cctggtataaatcaagactgtcctg

SEQ ID NO: 1263065 - DNA, 25 bp, Homo sapien
actacaagtgtatgctacaatgccc

SEQ ID NO: 1263066 - DNA, 25 bp, Homo sapien
ctgccagtttggaaactagagaatg

SEQ ID NO: 1263067 - DNA, 25 bp, Homo sapien
gaggtgacactgtgacttctaaaca

SEQ ID NO: 1263068 - DNA, 25 bp, Homo sapien
atgggaagcacaagccagcctacct

SEQ ID NO: 1263069 - DNA, 25 bp, Homo sapien
ttggaattcagccactatgggagga

SEQ ID NO: 1263070 - DNA, 25 bp, Homo sapien
tcctcaagtagcctgtcaaactctg

SEQ ID NO: 1263071 - DNA, 25 bp, Homo sapien
ctctcagcctgatgcaatacacagt

SEQ ID NO: 1263072 - DNA, 25 bp, Homo sapien
aatggatcttcacatcgtgtctgct

SEQ ID NO: 1263073 - DNA, 25 bp, Homo sapien
cttgtctgcctcaatgggagcaatg

SEQ ID NO: 1263074 - DNA, 25 bp, Homo sapien
aattcagtctcacatagatatgcag

SEQ ID NO: 1263075 - DNA, 25 bp, Homo sapien
tgattatgaaggccggacacggcgg

SEQ ID NO: 1263076 - DNA, 25 bp, Homo sapien
tatgattatgaaggccggacacggc

SEQ ID NO: 1263077 - DNA, 25 bp, Homo sapien
gattatgaaggccggacacggcggc

SEQ ID NO: 1263078 - DNA, 25 bp, Homo sapien
atgattatgaaggccggacacggcg

SEQ ID NO: 1263079 - DNA, 25 bp, Homo sapien
gagaccagttggttgccggatgaaa

SEQ ID NO: 1263080 - DNA, 25 bp, Homo sapien
gctgtgctcttatgcgcttgataaa

SEQ ID NO: 1263081 - DNA, 25 bp, Homo sapien
cagactgtaaaccttttggcttcca

SEQ ID NO: 1263082 - DNA, 25 bp, Homo sapien
ggtaaaagctctttatccagactgt

SEQ ID NO: 1263083 - DNA, 25 bp, Homo sapien
tctagcttcataaatgggaggagga

SEQ ID NO: 1263084 - DNA, 25 bp, Homo sapien
aatctagcttcataaatgggaggag

SEQ ID NO: 1263085 - DNA, 25 bp, Homo sapien
caagggacgtcaacaaattttggtg

SEQ ID NO: 1263086 - DNA, 25 bp, Homo sapien
tattgtccctatcagcaaatcaagg

SEQ ID NO: 1263087 - DNA, 25 bp, Homo sapien
ttggccaggctgatccaccctcctc

SEQ ID NO: 1263088 - DNA, 25 bp, Homo sapien
attttgtattttcagtagagacagg

SEQ ID NO: 1263089 - DNA, 25 bp, Homo sapien
agccaccgcgtctgggctaattttg

SEQ ID NO: 1263090 - DNA, 25 bp, Homo sapien
gagccaccacacccagcccagaatt

SEQ ID NO: 1263091 - DNA, 25 bp, Homo sapien
tcagcattccactaatccactagca

SEQ ID NO: 1263092 - DNA, 25 bp, Homo sapien
cactaatccactagcaaactcaaat

SEQ ID NO: 1263093 - DNA, 25 bp, Homo sapien
aatgtctatagattgtctctatttc

SEQ ID NO: 1263094 - DNA, 25 bp, Homo sapien
gcattccactaatccactagcaaac

SEQ ID NO: 1263095 - DNA, 25 bp, Homo sapien
gccatatggtcaagccagatttaaa

SEQ ID NO: 1263096 - DNA, 25 bp, Homo sapien
ggtttcaaaataacatggcctgcca

SEQ ID NO: 1263097 - DNA, 25 bp, Homo sapien
tttgaaataggtggtgctctgtccc

SEQ ID NO: 1263098 - DNA, 25 bp, Homo sapien
tacacactcactcccatatacgttg

SEQ ID NO: 1263099 - DNA, 25 bp, Homo sapien
cacactgggcctgggcagtgcgcac

SEQ ID NO: 1263100 - DNA, 25 bp, Homo sapien
ctgggcctgggcagtgcgcacttaa

SEQ ID NO: 1263101 - DNA, 25 bp, Homo sapien
cactgggcctgggcagtgcgcactt

SEQ ID NO: 1263102 - DNA, 25 bp, Homo sapien
tcacactgggcctgggcagtgcgca

SEQ ID NO: 1263103 - DNA, 25 bp, Homo sapien
gcccggcctttgttctcgcgccgcg

SEQ ID NO: 1263104 - DNA, 25 bp, Homo sapien
ccgcccggcctttgttctcgcgccg

SEQ ID NO: 1263105 - DNA, 25 bp, Homo sapien
ccggcctttgttctcgcgccgcggg

SEQ ID NO: 1263106 - DNA, 25 bp, Homo sapien
cggccgccgacaccgccccgcctgc

SEQ ID NO: 1263107 - DNA, 25 bp, Homo sapien
cgcggcctgacgcgcccacaccgcc

SEQ ID NO: 1263108 - DNA, 25 bp, Homo sapien
tcgcggcctgacgcgcccacaccgc

SEQ ID NO: 1263109 - DNA, 25 bp, Homo sapien
cgtcgcggcctgacgcgcccacacc

SEQ ID NO: 1263110 - DNA, 25 bp, Homo sapien
gcgctcgggccgcgctgcgcgctcc

SEQ ID NO: 1263111 - DNA, 25 bp, Homo sapien
ctcgggccgcgctgcgcgctccgcg

SEQ ID NO: 1263112 - DNA, 25 bp, Homo sapien
tcgggccgcgctgcgcgctccgcgg

SEQ ID NO: 1263113 - DNA, 25 bp, Homo sapien
gggccgcgctgcgcgctccgcgggc

SEQ ID NO: 1263114 - DNA, 25 bp, Homo sapien
acgcctccagccatcgggatgggcg

SEQ ID NO: 1263115 - DNA, 25 bp, Homo sapien
cgccggcgaggctcggtccagtccc

SEQ ID NO: 1263116 - DNA, 25 bp, Homo sapien
tccgtccgcccctcagacgcctcca

SEQ ID NO: 1263117 - DNA, 25 bp, Homo sapien
tgcgcgccggcgaggctcggtccag

SEQ ID NO: 1263118 - DNA, 25 bp, Homo sapien
ctcgccaggcccgacgggcacgcgc

SEQ ID NO: 1263119 - DNA, 25 bp, Homo sapien
aggcccgacgggcacgcgcacgcct

SEQ ID NO: 1263120 - DNA, 25 bp, Homo sapien
gtcgcgcgcgctcgccaggcccgac

SEQ ID NO: 1263121 - DNA, 25 bp, Homo sapien
acgggcacgcgcacgcctgtgcgcg

SEQ ID NO: 1263122 - DNA, 25 bp, Homo sapien
ctgacgggcagagactcgcgcttgg

SEQ ID NO: 1263123 - DNA, 25 bp, Homo sapien
tcagacgcggctgacgggcagagac

SEQ ID NO: 1263124 - DNA, 25 bp, Homo sapien
ctcagtgcgtgtgaagtgggcctcg

SEQ ID NO: 1263125 - DNA, 25 bp, Homo sapien
agactcgcgcttgggctcagtgcgt

SEQ ID NO: 1263126 - DNA, 25 bp, Homo sapien
tcctcgcgctgctgcgagcagggcc

SEQ ID NO: 1263127 - DNA, 25 bp, Homo sapien
agcaccccgtggctcctcgcgctgc

SEQ ID NO: 1263128 - DNA, 25 bp, Homo sapien
cagcaccccgtggctcctcgcgctg

SEQ ID NO: 1263129 - DNA, 25 bp, Homo sapien
ctcgcgctgctgcgagcagggccgc

SEQ ID NO: 1263130 - DNA, 25 bp, Homo sapien
aggccgcggactcctcccatgccgc

SEQ ID NO: 1263131 - DNA, 25 bp, Homo sapien
gcagtggacagcggggactggagac

SEQ ID NO: 1263132 - DNA, 25 bp, Homo sapien
taaggccgcggactcctcccatgcc

SEQ ID NO: 1263133 - DNA, 25 bp, Homo sapien
ggtaaggccgcggactcctcccatg

SEQ ID NO: 1263134 - DNA, 25 bp, Homo sapien
tggcgtccgttttcctccaggcctg

SEQ ID NO: 1263135 - DNA, 25 bp, Homo sapien
ctgctccccggtcctcaaccaccac

SEQ ID NO: 1263136 - DNA, 25 bp, Homo sapien
ctgggccttcatcgcctccgagctc

SEQ ID NO: 1263137 - DNA, 25 bp, Homo sapien
cttccacaccaaacctggcgtccgt

SEQ ID NO: 1263138 - DNA, 25 bp, Homo sapien
cgggtttccgcaggaaggcttctct

SEQ ID NO: 1263139 - DNA, 25 bp, Homo sapien
gaggaacctgagtggttggacttca

SEQ ID NO: 1263140 - DNA, 25 bp, Homo sapien
ttggacttcaggagagccgggtttc

SEQ ID NO: 1263141 - DNA, 25 bp, Homo sapien
aacaagggcagggtgcgaggaacct

SEQ ID NO: 1263142 - DNA, 25 bp, Homo sapien
ggacgatgcagagtcgggggacagt

SEQ ID NO: 1263143 - DNA, 25 bp, Homo sapien
agggacgatgcagagtcgggggaca

SEQ ID NO: 1263144 - DNA, 25 bp, Homo sapien
acgatgcagagtcgggggacagtgt

SEQ ID NO: 1263145 - DNA, 25 bp, Homo sapien
ctgagggacgatgcagagtcggggg

SEQ ID NO: 1263146 - DNA, 25 bp, Homo sapien
ggcagtggccgtttgtcaccagaga

SEQ ID NO: 1263147 - DNA, 25 bp, Homo sapien
ggcaggcctaatgccagccttcaat

SEQ ID NO: 1263148 - DNA, 25 bp, Homo sapien
gccctcagaatctggcaggcctaat

SEQ ID NO: 1263149 - DNA, 25 bp, Homo sapien
caatgaccacctgaattaaaagtgg

SEQ ID NO: 1263150 - DNA, 25 bp, Homo sapien
ccctgaggccaaagcagggcagctc

SEQ ID NO: 1263151 - DNA, 25 bp, Homo sapien
gtgggtttagcaccaggctctggcc

SEQ ID NO: 1263152 - DNA, 25 bp, Homo sapien
ctctggccctgaggccaaagcaggg

SEQ ID NO: 1263153 - DNA, 25 bp, Homo sapien
tgctgaggcccactgggtgccaggg

SEQ ID NO: 1263154 - DNA, 25 bp, Homo sapien
cgacagcgtgatgggaagcagcggg

SEQ ID NO: 1263155 - DNA, 25 bp, Homo sapien
gggcaggcgacagcgtgatgggaag

SEQ ID NO: 1263156 - DNA, 25 bp, Homo sapien
aggcgacagcgtgatgggaagcagc

SEQ ID NO: 1263157 - DNA, 25 bp, Homo sapien
gcaggcgacagcgtgatgggaagca

SEQ ID NO: 1263158 - DNA, 25 bp, Homo sapien
ggtccagaccccgtagatgccgcag

SEQ ID NO: 1263159 - DNA, 25 bp, Homo sapien
gctcgggggaaccagtgttgcctct

SEQ ID NO: 1263160 - DNA, 25 bp, Homo sapien
cgcagcgaggttccggctgcagctc

SEQ ID NO: 1263161 - DNA, 25 bp, Homo sapien
accgggtccactcgaccgcagcgag

SEQ ID NO: 1263162 - DNA, 25 bp, Homo sapien
gggccctgccggctctgatttaagt

SEQ ID NO: 1263163 - DNA, 25 bp, Homo sapien
ggccctgccggctctgatttaagtc

SEQ ID NO: 1263164 - DNA, 25 bp, Homo sapien
agggccctgccggctctgatttaag

SEQ ID NO: 1263165 - DNA, 25 bp, Homo sapien
gtccatccctctgcccttccaacac

SEQ ID NO: 1263166 - DNA, 25 bp, Homo sapien
ccatccctctgcccttccaacacac

SEQ ID NO: 1263167 - DNA, 25 bp, Homo sapien
tggtccatccctctgcccttccaac

SEQ ID NO: 1263168 - DNA, 25 bp, Homo sapien
ctggtccatccctctgcccttccaa

SEQ ID NO: 1263169 - DNA, 25 bp, Homo sapien
tgtgcaggggcttgtgtcttcgtcc

SEQ ID NO: 1263170 - DNA, 25 bp, Homo sapien
gggcttgtgtcttcgtcccgcactg

SEQ ID NO: 1263171 - DNA, 25 bp, Homo sapien
tcgtcccgcactggtgcctggttgc

SEQ ID NO: 1263172 - DNA, 25 bp, Homo sapien
ttgtgtcttcgtcccgcactggtgc

SEQ ID NO: 1263173 - DNA, 25 bp, Homo sapien
gggcccttggctccaagcattagtt

SEQ ID NO: 1263174 - DNA, 25 bp, Homo sapien
ccaggggccggtgtaacatggcacc

SEQ ID NO: 1263175 - DNA, 25 bp, Homo sapien
tccaagctctggtccgttctcctac

SEQ ID NO: 1263176 - DNA, 25 bp, Homo sapien
aagaagatgcagacgtcacaggtgg

SEQ ID NO: 1263177 - DNA, 25 bp, Homo sapien
cagggctacaaggtggtagttgagt

SEQ ID NO: 1263178 - DNA, 25 bp, Homo sapien
ctctaggcccgaggccccaaggaga

SEQ ID NO: 1263179 - DNA, 25 bp, Homo sapien
tagttgagtattggggcccgactcc

SEQ ID NO: 1263180 - DNA, 25 bp, Homo sapien
gtggtctctaggcccgaggccccaa

SEQ ID NO: 1263181 - DNA, 25 bp, Homo sapien
ggaggctccggggtgtacaggctgt

SEQ ID NO: 1263182 - DNA, 25 bp, Homo sapien
gggcaaccgcatgcccagtgggtac

SEQ ID NO: 1263183 - DNA, 25 bp, Homo sapien
aaagggcaggggcaaccgcatgccc

SEQ ID NO: 1263184 - DNA, 25 bp, Homo sapien
cttcatcgtaggagggtggaggctc

SEQ ID NO: 1263185 - DNA, 25 bp, Homo sapien
tccaccctcaactggcgggccccta

SEQ ID NO: 1263186 - DNA, 25 bp, Homo sapien
tggaggcgggcttggcatttacccc

SEQ ID NO: 1263187 - DNA, 25 bp, Homo sapien
ggttcgtggaggcgggcttggcatt

SEQ ID NO: 1263188 - DNA, 25 bp, Homo sapien
gaaccagagtgggttcgtggaggcg

SEQ ID NO: 1263189 - DNA, 25 bp, Homo sapien
tgcttccggaggcagcagaaccgga

SEQ ID NO: 1263190 - DNA, 25 bp, Homo sapien
gctgtcactgtccatagggatgact

SEQ ID NO: 1263191 - DNA, 25 bp, Homo sapien
tgccacgtcgcagggctgccgtgct

SEQ ID NO: 1263192 - DNA, 25 bp, Homo sapien
aggtcacagtgctgtgtacagggct

SEQ ID NO: 1263193 - DNA, 25 bp, Homo sapien
caggaggaccgccagcaggatgagc

SEQ ID NO: 1263194 - DNA, 25 bp, Homo sapien
agcaggaggaccgccagcaggatga

SEQ ID NO: 1263195 - DNA, 25 bp, Homo sapien
agaagcaggaggaccgccagcagga

SEQ ID NO: 1263196 - DNA, 25 bp, Homo sapien
ctgtgacaccacacagcagaagcag

SEQ ID NO: 1263197 - DNA, 25 bp, Homo sapien
caccctggggaatgtcgtggcacaa

SEQ ID NO: 1263198 - DNA, 25 bp, Homo sapien
ggagagcaaggctctaccactggac

SEQ ID NO: 1263199 - DNA, 25 bp, Homo sapien
gagcaaggctctaccactggactga

SEQ ID NO: 1263200 - DNA, 25 bp, Homo sapien
accaccgaagacaggttaacaggat

SEQ ID NO: 1263201 - DNA, 25 bp, Homo sapien
actgctgagcgggatcgtaggggac

SEQ ID NO: 1263202 - DNA, 25 bp, Homo sapien
tcccaggactcgctgtcctcagcga

SEQ ID NO: 1263203 - DNA, 25 bp, Homo sapien
tcgtaggggactcccgcggaggcca

SEQ ID NO: 1263204 - DNA, 25 bp, Homo sapien
tgctccaggtcagttcccgccagcg

SEQ ID NO: 1263205 - DNA, 25 bp, Homo sapien
ggctgctccagcgggcctggggcgg

SEQ ID NO: 1263206 - DNA, 25 bp, Homo sapien
gctccagcgggcctggggcgggcac

SEQ ID NO: 1263207 - DNA, 25 bp, Homo sapien
cccacgtgccacaggctgctccagc

SEQ ID NO: 1263208 - DNA, 25 bp, Homo sapien
tgctccagcgggcctggggcgggca

SEQ ID NO: 1263209 - DNA, 25 bp, Homo sapien
tgcctccccatagggcggggccagg

SEQ ID NO: 1263210 - DNA, 25 bp, Homo sapien
atgggacggccgacctcgccacccg

SEQ ID NO: 1263211 - DNA, 25 bp, Homo sapien
ctcgccacccgtgcctccccatagg

SEQ ID NO: 1263212 - DNA, 25 bp, Homo sapien
gggcatgggacggccgacctcgcca

SEQ ID NO: 1263213 - DNA, 25 bp, Homo sapien
tggtccgaggggtcgcagctgccgt

SEQ ID NO: 1263214 - DNA, 25 bp, Homo sapien
tccgaggggtcgcagctgccgtccg

SEQ ID NO: 1263215 - DNA, 25 bp, Homo sapien
gctgccgtccgcgaagcccagcgcc

SEQ ID NO: 1263216 - DNA, 25 bp, Homo sapien
gcagctgccgtccgcgaagcccagc

SEQ ID NO: 1263217 - DNA, 25 bp, Homo sapien
gaaccgagagagaacgccgcccgac

SEQ ID NO: 1263218 - DNA, 25 bp, Homo sapien
tggccgaaccgagagagaacgccgc

SEQ ID NO: 1263219 - DNA, 25 bp, Homo sapien
cccgcggtggccgaaccgagagaga

SEQ ID NO: 1263220 - DNA, 25 bp, Homo sapien
gggcgtggtccgagcagggacccgc

SEQ ID NO: 1263221 - DNA, 25 bp, Homo sapien
ggcaggagcggcaggagcggcagca

SEQ ID NO: 1263222 - DNA, 25 bp, Homo sapien
agcagcagccgcagtccgcgggcgg

SEQ ID NO: 1263223 - DNA, 25 bp, Homo sapien
cagcagcagccgcagtccgcgggcg

SEQ ID NO: 1263224 - DNA, 25 bp, Homo sapien
gcagcggcaggagcggcaggagcgg

SEQ ID NO: 1263225 - DNA, 25 bp, Homo sapien
ttaacctcggccgagcgtggcctgc

SEQ ID NO: 1263226 - DNA, 25 bp, Homo sapien
ggtaacgccaccaagatgctgggca

SEQ ID NO: 1263227 - DNA, 25 bp, Homo sapien
tggcctggaaagtcgtggctgcctt

SEQ ID NO: 1263228 - DNA, 25 bp, Homo sapien
ccaggtggactgtagggtaacgcca

SEQ ID NO: 1263229 - DNA, 25 bp, Homo sapien
ttggacacttgattgtggacctgcg

SEQ ID NO: 1263230 - DNA, 25 bp, Homo sapien
aacttggtgtttggacacttgattg

SEQ ID NO: 1263231 - DNA, 25 bp, Homo sapien
cccgaacttggtgtttggacacttg

SEQ ID NO: 1263232 - DNA, 25 bp, Homo sapien
gtgtttggacacttgattgtggacc

SEQ ID NO: 1263233 - DNA, 25 bp, Homo sapien
gggaatgtgacctccattcccgagg

SEQ ID NO: 1263234 - DNA, 25 bp, Homo sapien
ctccattcccgagggccacagggag

SEQ ID NO: 1263235 - DNA, 25 bp, Homo sapien
ccttccctcagcctgcaatgtctgc

SEQ ID NO: 1263236 - DNA, 25 bp, Homo sapien
aatgtgacctccattcccgagggcc

SEQ ID NO: 1263237 - DNA, 25 bp, Homo sapien
ttcacatccccccttagctgcagca

SEQ ID NO: 1263238 - DNA, 25 bp, Homo sapien
gatgaccttgtaggtctccttcaca

SEQ ID NO: 1263239 - DNA, 25 bp, Homo sapien
acatccccccttagctgcagcaggg

SEQ ID NO: 1263240 - DNA, 25 bp, Homo sapien
agcagggccgacaccatgagtgggt

SEQ ID NO: 1263241 - DNA, 25 bp, Homo sapien
gagaaacccttgtgctgcagggatg

SEQ ID NO: 1263242 - DNA, 25 bp, Homo sapien
atcaaagtccgcaggtggcacccag

SEQ ID NO: 1263243 - DNA, 25 bp, Homo sapien
gcgacgctgtctatgctgaactcaa

SEQ ID NO: 1263244 - DNA, 25 bp, Homo sapien
atggtcttcgtctggccgcgctcca

SEQ ID NO: 1263245 - DNA, 25 bp, Homo sapien
tggcgaccaggcaccgctcccagaa

SEQ ID NO: 1263246 - DNA, 25 bp, Homo sapien
ggctggcgaccaggcaccgctccca

SEQ ID NO: 1263247 - DNA, 25 bp, Homo sapien
gaccaggcaccgctcccagaagcag

SEQ ID NO: 1263248 - DNA, 25 bp, Homo sapien
ccaggcaccgctcccagaagcagtg

SEQ ID NO: 1263249 - DNA, 25 bp, Homo sapien
tgccacaggaagtccgagaaaagcc

SEQ ID NO: 1263250 - DNA, 25 bp, Homo sapien
ccacagctgccacaggaagtccgag

SEQ ID NO: 1263251 - DNA, 25 bp, Homo sapien
cacaggaagtccgagaaaagcccgg

SEQ ID NO: 1263252 - DNA, 25 bp, Homo sapien
cagctgccacaggaagtccgagaaa

SEQ ID NO: 1263253 - DNA, 25 bp, Homo sapien
tggctgggtggtccggatacagccc

SEQ ID NO: 1263254 - DNA, 25 bp, Homo sapien
agatggctgggtggtccggatacag

SEQ ID NO: 1263255 - DNA, 25 bp, Homo sapien
gctgggtggtccggatacagcccac

SEQ ID NO: 1263256 - DNA, 25 bp, Homo sapien
gatggctgggtggtccggatacagc

SEQ ID NO: 1263257 - DNA, 25 bp, Homo sapien
ggctggcgtgtctgtgtcaaactgg

SEQ ID NO: 1263258 - DNA, 25 bp, Homo sapien
tggagagagagggcctggccgggag

SEQ ID NO: 1263259 - DNA, 25 bp, Homo sapien
gagagagagggcctggccgggagct

SEQ ID NO: 1263260 - DNA, 25 bp, Homo sapien
ctggagagagagggcctggccggga

SEQ ID NO: 1263261 - DNA, 25 bp, Homo sapien
gagagagggcctggccgggagctgg

SEQ ID NO: 1263262 - DNA, 25 bp, Homo sapien
gccctccacgaacatcatgtgctga

SEQ ID NO: 1263263 - DNA, 25 bp, Homo sapien
gaacatcatgtgctgacaggcggca

SEQ ID NO: 1263264 - DNA, 25 bp, Homo sapien
gctgtcagagactccacgggcacgt

SEQ ID NO: 1263265 - DNA, 25 bp, Homo sapien
gggtcaaatacagggatcgctgtca

SEQ ID NO: 1263266 - DNA, 25 bp, Homo sapien
cagtgaagtcttgtgtcttcccggg

SEQ ID NO: 1263267 - DNA, 25 bp, Homo sapien
gagcaccacctggagcttgtcggag

SEQ ID NO: 1263268 - DNA, 25 bp, Homo sapien
acgctgaacacgctctgaccgttga

SEQ ID NO: 1263269 - DNA, 25 bp, Homo sapien
gcttgtcggagaagtagaggctttc

SEQ ID NO: 1263270 - DNA, 25 bp, Homo sapien
tgggagggcgagctgaggaactgcg

SEQ ID NO: 1263271 - DNA, 25 bp, Homo sapien
ggagggcgagctgaggaactgcggc

SEQ ID NO: 1263272 - DNA, 25 bp, Homo sapien
gggagggcgagctgaggaactgcgg

SEQ ID NO: 1263273 - DNA, 25 bp, Homo sapien
cacctccgtcctctgggagggcgag

SEQ ID NO: 1263274 - DNA, 25 bp, Homo sapien
tgagcgtgcctctcttggtgatgat

SEQ ID NO: 1263275 - DNA, 25 bp, Homo sapien
tcacatagcccatgttgaggacgct

SEQ ID NO: 1263276 - DNA, 25 bp, Homo sapien
caatggagcacgtgatcatggacgc

SEQ ID NO: 1263277 - DNA, 25 bp, Homo sapien
tgaggacgctgccttcaatggagca

SEQ ID NO: 1263278 - DNA, 25 bp, Homo sapien
cctgggtcccacctgcacgcagcag

SEQ ID NO: 1263279 - DNA, 25 bp, Homo sapien
ctgggtcccacctgcacgcagcagg

SEQ ID NO: 1263280 - DNA, 25 bp, Homo sapien
gacctgggtcccacctgcacgcagc

SEQ ID NO: 1263281 - DNA, 25 bp, Homo sapien
acctgggtcccacctgcacgcagca

SEQ ID NO: 1263282 - DNA, 25 bp, Homo sapien
tggagtggttcagcaggacaaaggg

SEQ ID NO: 1263283 - DNA, 25 bp, Homo sapien
ctggagtggttcagcaggacaaagg

SEQ ID NO: 1263284 - DNA, 25 bp, Homo sapien
caaaggggccgttggggttcagcag

SEQ ID NO: 1263285 - DNA, 25 bp, Homo sapien
aggaggggatacaggtgtctgcagg

SEQ ID NO: 1263286 - DNA, 25 bp, Homo sapien
gatcctcgggagagacgttctggat

SEQ ID NO: 1263287 - DNA, 25 bp, Homo sapien
atcctcgggagagacgttctggatg

SEQ ID NO: 1263288 - DNA, 25 bp, Homo sapien
gagacgttctggatggagatcttct

SEQ ID NO: 1263289 - DNA, 25 bp, Homo sapien
ggagagacgttctggatggagatct

SEQ ID NO: 1263290 - DNA, 25 bp, Homo sapien
cacaacagatggtgccaccgtcggg

SEQ ID NO: 1263291 - DNA, 25 bp, Homo sapien
ttatgggacgtcaccacaacagatg

SEQ ID NO: 1263292 - DNA, 25 bp, Homo sapien
accgtcgggcaccacagctccaggt

SEQ ID NO: 1263293 - DNA, 25 bp, Homo sapien
tggtcttgcctttatgggacgtcac

SEQ ID NO: 1263294 - DNA, 25 bp, Homo sapien
tttgatgtcgccactggcaacaaca

SEQ ID NO: 1263295 - DNA, 25 bp, Homo sapien
tacaaatgtgtcaaacttcgcctgg

SEQ ID NO: 1263296 - DNA, 25 bp, Homo sapien
tcgcctggaacgctctgagcagggt

SEQ ID NO: 1263297 - DNA, 25 bp, Homo sapien
tcgggcggcctggtactcgtcggaa

SEQ ID NO: 1263298 - DNA, 25 bp, Homo sapien
atctccaggacgtgggggacagaga

SEQ ID NO: 1263299 - DNA, 25 bp, Homo sapien
agactttgaacagcttgtcgcggtt

SEQ ID NO: 1263300 - DNA, 25 bp, Homo sapien
gagactttgaacagcttgtcgcggt

SEQ ID NO: 1263301 - DNA, 25 bp, Homo sapien
ccaggacgtgggggacagagacttt

SEQ ID NO: 1263302 - DNA, 25 bp, Homo sapien
ctgtgctcgaagaacggagaatgac

SEQ ID NO: 1263303 - DNA, 25 bp, Homo sapien
gagaatgacagtccatgcaggtcct

SEQ ID NO: 1263304 - DNA, 25 bp, Homo sapien
tctggggggccatattctttcggaa

SEQ ID NO: 1263305 - DNA, 25 bp, Homo sapien
ctcgaagaacggagaatgacagtcc

SEQ ID NO: 1263306 - DNA, 25 bp, Homo sapien
tctttgttcaggagtgggagggctt

SEQ ID NO: 1263307 - DNA, 25 bp, Homo sapien
gggagggcttcctggcggatcagct

SEQ ID NO: 1263308 - DNA, 25 bp, Homo sapien
cttctcgggcagcactggccggaag

SEQ ID NO: 1263309 - DNA, 25 bp, Homo sapien
agggcttcctggcggatcagcttct

SEQ ID NO: 1263310 - DNA, 25 bp, Homo sapien
atgcccttcctcacttaggccttcg

SEQ ID NO: 1263311 - DNA, 25 bp, Homo sapien
tgcccttcctcacttaggccttcgg

SEQ ID NO: 1263312 - DNA, 25 bp, Homo sapien
cctcacttaggccttcggcagccct

SEQ ID NO: 1263313 - DNA, 25 bp, Homo sapien
taggccttcggcagccctcagggtc

SEQ ID NO: 1263314 - DNA, 25 bp, Homo sapien
tacagcccggcaagacagcttgaag

SEQ ID NO: 1263315 - DNA, 25 bp, Homo sapien
caaacttgatctggtagtgggacag

SEQ ID NO: 1263316 - DNA, 25 bp, Homo sapien
gagttgatgacgtacactgtagcca

SEQ ID NO: 1263317 - DNA, 25 bp, Homo sapien
cagcaggaactcgaaagacgtgggc

SEQ ID NO: 1263318 - DNA, 25 bp, Homo sapien
gaatctgtgttcctcggccttggtg

SEQ ID NO: 1263319 - DNA, 25 bp, Homo sapien
tgggctggaagatcacacagaactg

SEQ ID NO: 1263320 - DNA, 25 bp, Homo sapien
cgtttccaggggcaggatcgtccca

SEQ ID NO: 1263321 - DNA, 25 bp, Homo sapien
aggatcgtcccaaacccatcgttgg

SEQ ID NO: 1263322 - DNA, 25 bp, Homo sapien
ggaggctgatttccgtcctgatggc

SEQ ID NO: 1263323 - DNA, 25 bp, Homo sapien
tgacaatggcatgcacggtgaatcc

SEQ ID NO: 1263324 - DNA, 25 bp, Homo sapien
caaaatccacctccgagggactgag

SEQ ID NO: 1263325 - DNA, 25 bp, Homo sapien
tcctgatggcctcatagatggtgca

SEQ ID NO: 1263326 - DNA, 25 bp, Homo sapien
caaactctgaggcgcaaccactgct

SEQ ID NO: 1263327 - DNA, 25 bp, Homo sapien
aggacacgacgaggccgtctcttca

SEQ ID NO: 1263328 - DNA, 25 bp, Homo sapien
cccactgtttccaggacacgacgag

SEQ ID NO: 1263329 - DNA, 25 bp, Homo sapien
cttcataaaacccacttccctgtga

SEQ ID NO: 1263330 - DNA, 25 bp, Homo sapien
acatggcgggaggagctgcgggtgg

SEQ ID NO: 1263331 - DNA, 25 bp, Homo sapien
ctgacatggcgggaggagctgcggg

SEQ ID NO: 1263332 - DNA, 25 bp, Homo sapien
tgacatggcgggaggagctgcgggt

SEQ ID NO: 1263333 - DNA, 25 bp, Homo sapien
gacatggcgggaggagctgcgggtg

SEQ ID NO: 1263334 - DNA, 25 bp, Homo sapien
tgtcaaaatacctccctgcgtcctc

SEQ ID NO: 1263335 - DNA, 25 bp, Homo sapien
ctccctgcgtcctccgggagggagt

SEQ ID NO: 1263336 - DNA, 25 bp, Homo sapien
atacctccctgcgtcctccgggagg

SEQ ID NO: 1263337 - DNA, 25 bp, Homo sapien
caaaatacctccctgcgtcctccgg

SEQ ID NO: 1263338 - DNA, 25 bp, Homo sapien
tgcacggagtaggacgactgtgcct

SEQ ID NO: 1263339 - DNA, 25 bp, Homo sapien
cgcggcaggaacttgagctgcacgg

SEQ ID NO: 1263340 - DNA, 25 bp, Homo sapien
gaacttgagctgcacggagtaggac

SEQ ID NO: 1263341 - DNA, 25 bp, Homo sapien
ttgagctgcacggagtaggacgact

SEQ ID NO: 1263342 - DNA, 25 bp, Homo sapien
gtagagccggtcatacatgcagatc

SEQ ID NO: 1263343 - DNA, 25 bp, Homo sapien
cgtgtgcacgagcacagagtcctgg

SEQ ID NO: 1263344 - DNA, 25 bp, Homo sapien
tgcagatcttcaggtccacgctggg

SEQ ID NO: 1263345 - DNA, 25 bp, Homo sapien
atcttcaggtccacgctgggcttcg

SEQ ID NO: 1263346 - DNA, 25 bp, Homo sapien
ggacacaggagctcagcaacaggag

SEQ ID NO: 1263347 - DNA, 25 bp, Homo sapien
ctgcatatggacacaggagctcagc

SEQ ID NO: 1263348 - DNA, 25 bp, Homo sapien
cacaggagctcagcaacaggagttc

SEQ ID NO: 1263349 - DNA, 25 bp, Homo sapien
catatggacacaggagctcagcaac

SEQ ID NO: 1263350 - DNA, 25 bp, Homo sapien
ctttgaacctggcttggacgtcgcc

SEQ ID NO: 1263351 - DNA, 25 bp, Homo sapien
tgaacctggcttggacgtcgcctgg

SEQ ID NO: 1263352 - DNA, 25 bp, Homo sapien
agtgaagacgatgggcaccttgatg

SEQ ID NO: 1263353 - DNA, 25 bp, Homo sapien
cgtcgcctgggacgaccggagtgaa

SEQ ID NO: 1263354 - DNA, 25 bp, Homo sapien
cccagcgtgatctccgtctgctctt

SEQ ID NO: 1263355 - DNA, 25 bp, Homo sapien
agcgtgatctccgtctgctcttcgc

SEQ ID NO: 1263356 - DNA, 25 bp, Homo sapien
cgtgatctccgtctgctcttcgctg

SEQ ID NO: 1263357 - DNA, 25 bp, Homo sapien
tgatctccgtctgctcttcgctggg

SEQ ID NO: 1263358 - DNA, 25 bp, Homo sapien
ctgctactggcgtgtttgagtcatc

SEQ ID NO: 1263359 - DNA, 25 bp, Homo sapien
aaggccccgggtagcagagctgttt

SEQ ID NO: 1263360 - DNA, 25 bp, Homo sapien
gcgtgtttgagtcatcacttccctg

SEQ ID NO: 1263361 - DNA, 25 bp, Homo sapien
agctgtttccttgcaagtctgagca

SEQ ID NO: 1263362 - DNA, 25 bp, Homo sapien
gaaacgccacgcagtggtgaggaca

SEQ ID NO: 1263363 - DNA, 25 bp, Homo sapien
gcactggcagaaggacggatctaga

SEQ ID NO: 1263364 - DNA, 25 bp, Homo sapien
gctctctcaggaaaggaaacgccac

SEQ ID NO: 1263365 - DNA, 25 bp, Homo sapien
tagaacccgaggctctctcaggaaa

SEQ ID NO: 1263366 - DNA, 25 bp, Homo sapien
gaagtgcggctcacaccggaagtgc

SEQ ID NO: 1263367 - DNA, 25 bp, Homo sapien
ctcacacaggctgtggagaaccggc

SEQ ID NO: 1263368 - DNA, 25 bp, Homo sapien
ccggaagtgcggctcacaccggaag

SEQ ID NO: 1263369 - DNA, 25 bp, Homo sapien
cacaccggaagtgcggctcacacag

SEQ ID NO: 1263370 - DNA, 25 bp, Homo sapien
tatcttcgtaggtcaggagactgct

SEQ ID NO: 1263371 - DNA, 25 bp, Homo sapien
atgtccgcctgggaggactccgtgc

SEQ ID NO: 1263372 - DNA, 25 bp, Homo sapien
ttccggctctgcatgtccgcctggg

SEQ ID NO: 1263373 - DNA, 25 bp, Homo sapien
agctggtggcggctttgtcatacaa

SEQ ID NO: 1263374 - DNA, 25 bp, Homo sapien
gactgggagtcgtccatctcacagg

SEQ ID NO: 1263375 - DNA, 25 bp, Homo sapien
gaacttgaaagtcgtgcccaagccc

SEQ ID NO: 1263376 - DNA, 25 bp, Homo sapien
tcaatgagctccttgtcgagggaca

SEQ ID NO: 1263377 - DNA, 25 bp, Homo sapien
cacgtagctgccgaagtcaatgagc

SEQ ID NO: 1263378 - DNA, 25 bp, Homo sapien
cgcacagccgagtgccggcccaacc

SEQ ID NO: 1263379 - DNA, 25 bp, Homo sapien
gcacagccgagtgccggcccaaccg

SEQ ID NO: 1263380 - DNA, 25 bp, Homo sapien
gagtgccggcccaaccgtgaccgct

SEQ ID NO: 1263381 - DNA, 25 bp, Homo sapien
agccgagtgccggcccaaccgtgac

SEQ ID NO: 1263382 - DNA, 25 bp, Homo sapien
ggctggccgcagagggcttcacact

SEQ ID NO: 1263383 - DNA, 25 bp, Homo sapien
gagataatgacgtccccactgtcct

SEQ ID NO: 1263384 - DNA, 25 bp, Homo sapien
gggcttcacactcgcggctgagcca

SEQ ID NO: 1263385 - DNA, 25 bp, Homo sapien
tctgggagatgctcgtgctgccgta

SEQ ID NO: 1263386 - DNA, 25 bp, Homo sapien
agtggaactgaaaactcgcccgtct

SEQ ID NO: 1263387 - DNA, 25 bp, Homo sapien
ctttgttgaacatttcagtggaact

SEQ ID NO: 1263388 - DNA, 25 bp, Homo sapien
aactcgcccgtctgagccaaaaatg

SEQ ID NO: 1263389 - DNA, 25 bp, Homo sapien
gcccgtctgagccaaaaatgagata

SEQ ID NO: 1263390 - DNA, 25 bp, Homo sapien
agcacttcacaggacattccggctg

SEQ ID NO: 1263391 - DNA, 25 bp, Homo sapien
gaaggtgacaagcacttcacaggac

SEQ ID NO: 1263392 - DNA, 25 bp, Homo sapien
tcacaggacattccggctgacaggg

SEQ ID NO: 1263393 - DNA, 25 bp, Homo sapien
acaagcacttcacaggacattccgg

SEQ ID NO: 1263394 - DNA, 25 bp, Homo sapien
tgacccatagcacacgggggttagt

SEQ ID NO: 1263395 - DNA, 25 bp, Homo sapien
cgtgacccatagcacacgggggtta

SEQ ID NO: 1263396 - DNA, 25 bp, Homo sapien
gtgacccatagcacacgggggttag

SEQ ID NO: 1263397 - DNA, 25 bp, Homo sapien
tgtagaatggaaagcgtcgtgccag

SEQ ID NO: 1263398 - DNA, 25 bp, Homo sapien
caggagccggtggacgaatctgtcc

SEQ ID NO: 1263399 - DNA, 25 bp, Homo sapien
ttgcaagaatggccgtgtccccagg

SEQ ID NO: 1263400 - DNA, 25 bp, Homo sapien
gctgccacctgtgcggccgcagagt

SEQ ID NO: 1263401 - DNA, 25 bp, Homo sapien
ctttttcagagcaacctgtgggccc

SEQ ID NO: 1263402 - DNA, 25 bp, Homo sapien
ctggcaaggataggcctcaggcaaa

SEQ ID NO: 1263403 - DNA, 25 bp, Homo sapien
tttcctacgggaggcgaatccttga

SEQ ID NO: 1263404 - DNA, 25 bp, Homo sapien
accctggctgggacaaagtgcgcag

SEQ ID NO: 1263405 - DNA, 25 bp, Homo sapien
gtgcccgtgggcagtggcggaggca

SEQ ID NO: 1263406 - DNA, 25 bp, Homo sapien
gccccggctcgttgaaccttgggca

SEQ ID NO: 1263407 - DNA, 25 bp, Homo sapien
ctgtggcccttaccgtctggcttct

SEQ ID NO: 1263408 - DNA, 25 bp, Homo sapien
gtctgctgtggcccttaccgtctgg

SEQ ID NO: 1263409 - DNA, 25 bp, Homo sapien
tcgggcaggtggttttgtgcagtgt

SEQ ID NO: 1263410 - DNA, 25 bp, Homo sapien
atcgggcaggtggttttgtgcagtg

SEQ ID NO: 1263411 - DNA, 25 bp, Homo sapien
cctccgatcgggcaggtggttttgt

SEQ ID NO: 1263412 - DNA, 25 bp, Homo sapien
tcatccctccgatcgggcaggtggt

SEQ ID NO: 1263413 - DNA, 25 bp, Homo sapien
cagcatgatcggtccctgagtgtca

SEQ ID NO: 1263414 - DNA, 25 bp, Homo sapien
tcacggcagcatcagaggccagttt

SEQ ID NO: 1263415 - DNA, 25 bp, Homo sapien
tgtagacgccaggaacgcggttgta

SEQ ID NO: 1263416 - DNA, 25 bp, Homo sapien
gggagcacaggtgtcggcatcccac

SEQ ID NO: 1263417 - DNA, 25 bp, Homo sapien
cagccctttgttctggacggagctg

SEQ ID NO: 1263418 - DNA, 25 bp, Homo sapien
ggcaccagtccctgttgagcaaggt

SEQ ID NO: 1263419 - DNA, 25 bp, Homo sapien
caaggtccacgcagccctttgttct

SEQ ID NO: 1263420 - DNA, 25 bp, Homo sapien
cacagactccgactccattcttcag

SEQ ID NO: 1263421 - DNA, 25 bp, Homo sapien
gataccaggttgtcttggggccaca

SEQ ID NO: 1263422 - DNA, 25 bp, Homo sapien
ctgtcgtccggtgcaggccacatgg

SEQ ID NO: 1263423 - DNA, 25 bp, Homo sapien
tgctgtcgtccggtgcaggccacat

SEQ ID NO: 1263424 - DNA, 25 bp, Homo sapien
agttcattaggaccagggctgacca

SEQ ID NO: 1263425 - DNA, 25 bp, Homo sapien
gggagcagcaaagcagttcattagg

SEQ ID NO: 1263426 - DNA, 25 bp, Homo sapien
cagggtctttggaaaagtccagaat

SEQ ID NO: 1263427 - DNA, 25 bp, Homo sapien
ctttctgggcccctctcagggtctt

SEQ ID NO: 1263428 - DNA, 25 bp, Homo sapien
ggtctttggaaaagtccagaatgag

SEQ ID NO: 1263429 - DNA, 25 bp, Homo sapien
tctgggcccctctcagggtctttgg

SEQ ID NO: 1263430 - DNA, 25 bp, Homo sapien
ctcgcacccagctgtagagccccat

SEQ ID NO: 1263431 - DNA, 25 bp, Homo sapien
tcctggagccccgtgttgtgtgcgt

SEQ ID NO: 1263432 - DNA, 25 bp, Homo sapien
atgcaccccggaaggcacgcctcgc

SEQ ID NO: 1263433 - DNA, 25 bp, Homo sapien
cgtgttgtgtgcgtccctcagccca

SEQ ID NO: 1263434 - DNA, 25 bp, Homo sapien
tctctaaggcctgtcctgaagtggc

SEQ ID NO: 1263435 - DNA, 25 bp, Homo sapien
gctggcttctctaaggcctgtcctg

SEQ ID NO: 1263436 - DNA, 25 bp, Homo sapien
gagactgctgagttacttctggaat

SEQ ID NO: 1263437 - DNA, 25 bp, Homo sapien
ggaatctgcaccgtgaaagtgaaac

SEQ ID NO: 1263438 - DNA, 25 bp, Homo sapien
tgttgtctgtgttgcgacttctgtg

SEQ ID NO: 1263439 - DNA, 25 bp, Homo sapien
tgtgctgtgacttccgtcgttgtct

SEQ ID NO: 1263440 - DNA, 25 bp, Homo sapien
gacttctgtgggatattcgttggag

SEQ ID NO: 1263441 - DNA, 25 bp, Homo sapien
tgttgcgacttctgtgggatattcg

SEQ ID NO: 1263442 - DNA, 25 bp, Homo sapien
caggtcattagtccgtgtcgtgcta

SEQ ID NO: 1263443 - DNA, 25 bp, Homo sapien
tagtccgtgtcgtgctaaagcagat

SEQ ID NO: 1263444 - DNA, 25 bp, Homo sapien
aagcagatcactcgcaaggaatgga

SEQ ID NO: 1263445 - DNA, 25 bp, Homo sapien
ccgttccaattaaacaggtcattag

SEQ ID NO: 1263446 - DNA, 25 bp, Homo sapien
ccagcttgttgaaaccggaagccat

SEQ ID NO: 1263447 - DNA, 25 bp, Homo sapien
agcccctgtcagatgccagccattc

SEQ ID NO: 1263448 - DNA, 25 bp, Homo sapien
tcagagtgatgagctgcgtctgtta

SEQ ID NO: 1263449 - DNA, 25 bp, Homo sapien
tgaaccagcttgttgaaaccggaag

SEQ ID NO: 1263450 - DNA, 25 bp, Homo sapien
tccccggacgatctcctccaggcac

SEQ ID NO: 1263451 - DNA, 25 bp, Homo sapien
tgtcctctccccggacgatctcctc

SEQ ID NO: 1263452 - DNA, 25 bp, Homo sapien
ccagctccccatgggcgatgatgtc

SEQ ID NO: 1263453 - DNA, 25 bp, Homo sapien
cctctccccggacgatctcctccag

SEQ ID NO: 1263454 - DNA, 25 bp, Homo sapien
caagtttgcacagaaagtggagccc

SEQ ID NO: 1263455 - DNA, 25 bp, Homo sapien
aagtggagcccgtctgttccttctg

SEQ ID NO: 1263456 - DNA, 25 bp, Homo sapien
cttgcaagtttgcacagaaagtgga

SEQ ID NO: 1263457 - DNA, 25 bp, Homo sapien
cacagaaagtggagcccgtctgttc

SEQ ID NO: 1263458 - DNA, 25 bp, Homo sapien
aggtggagaaggtgacttccatact

SEQ ID NO: 1263459 - DNA, 25 bp, Homo sapien
gttctaagaggactccaaaaagcaa

SEQ ID NO: 1263460 - DNA, 25 bp, Homo sapien
ctccaaaaagcaagtcgtagcccca

SEQ ID NO: 1263461 - DNA, 25 bp, Homo sapien
aagcaagtcgtagccccagtgactg

SEQ ID NO: 1263462 - DNA, 25 bp, Homo sapien
ttgttctaagaggactccaaaaagc

SEQ ID NO: 1263463 - DNA, 25 bp, Homo sapien
caaaccccgcttccttgaagagaag

SEQ ID NO: 1263464 - DNA, 25 bp, Homo sapien
gggatggttcatcagcagctggcac

SEQ ID NO: 1263465 - DNA, 25 bp, Homo sapien
tgcagtcatgtacttttcctcatca

SEQ ID NO: 1263466 - DNA, 25 bp, Homo sapien
tccagtggcgcgtgtgcctcgggaa

SEQ ID NO: 1263467 - DNA, 25 bp, Homo sapien
ctgagggaaggttacggctggtggt

SEQ ID NO: 1263468 - DNA, 25 bp, Homo sapien
ggatagacgccagtgcttgccccag

SEQ ID NO: 1263469 - DNA, 25 bp, Homo sapien
gctggtggttggatagacgccagtg

SEQ ID NO: 1263470 - DNA, 25 bp, Homo sapien
tggttggatagacgccagtgcttgc

SEQ ID NO: 1263471 - DNA, 25 bp, Homo sapien
gtgtccagttcaggggccagtacag

SEQ ID NO: 1263472 - DNA, 25 bp, Homo sapien
gggccagtacagcagcatcggtctg

SEQ ID NO: 1263473 - DNA, 25 bp, Homo sapien
agtacagcagcatcggtctgcgagg

SEQ ID NO: 1263474 - DNA, 25 bp, Homo sapien
gccagtacagcagcatcggtctgcg

SEQ ID NO: 1263475 - DNA, 25 bp, Homo sapien
agttggagggcgcttcctcgccggg

SEQ ID NO: 1263476 - DNA, 25 bp, Homo sapien
ctcggtgccagacaggcaggacgca

SEQ ID NO: 1263477 - DNA, 25 bp, Homo sapien
cctcgccgggtgttgcggtgtgagc

SEQ ID NO: 1263478 - DNA, 25 bp, Homo sapien
ggtggtcagaacatcgctcggtgcc

SEQ ID NO: 1263479 - DNA, 25 bp, Homo sapien
gagttcagacttctcaaggacgctt

SEQ ID NO: 1263480 - DNA, 25 bp, Homo sapien
gacgcttgcatagccaacattgttg

SEQ ID NO: 1263481 - DNA, 25 bp, Homo sapien
cattgttgagaacgagtaacccctt

SEQ ID NO: 1263482 - DNA, 25 bp, Homo sapien
cacgtctgtcgtgccatgaagcaat

SEQ ID NO: 1263483 - DNA, 25 bp, Homo sapien
aggagacagctcttgcgctgtgtac

SEQ ID NO: 1263484 - DNA, 25 bp, Homo sapien
gctcttgcgctgtgtaccggcactg

SEQ ID NO: 1263485 - DNA, 25 bp, Homo sapien
ttgtagacgcaactcttgaaaggcc

SEQ ID NO: 1263486 - DNA, 25 bp, Homo sapien
agggtgtttgtagacgcaactcttg

SEQ ID NO: 1263487 - DNA, 25 bp, Homo sapien
ctgaggttggggcttggtcatgagg

SEQ ID NO: 1263488 - DNA, 25 bp, Homo sapien
gcttggtcatgagggtgcccggggc

SEQ ID NO: 1263489 - DNA, 25 bp, Homo sapien
tgaggttggggcttggtcatgaggg

SEQ ID NO: 1263490 - DNA, 25 bp, Homo sapien
tggggcttggtcatgagggtgcccg

SEQ ID NO: 1263491 - DNA, 25 bp, Homo sapien
gaaatcccctctacccgggctgtgc

SEQ ID NO: 1263492 - DNA, 25 bp, Homo sapien
cttgggttctcaggactgccgaaat

SEQ ID NO: 1263493 - DNA, 25 bp, Homo sapien
tctccggcccttcggcagtgtcgag

SEQ ID NO: 1263494 - DNA, 25 bp, Homo sapien
cgggctgtgcctctccggcctgtgc

SEQ ID NO: 1263495 - DNA, 25 bp, Homo sapien
atgtctggctattttttttctatat

SEQ ID NO: 1263496 - DNA, 25 bp, Homo sapien
ctacaggagctcgccaccatgtctg

SEQ ID NO: 1263497 - DNA, 25 bp, Homo sapien
accatgtctggctattttttttcta

SEQ ID NO: 1263498 - DNA, 25 bp, Homo sapien
ctggctattttttttctatatttgg

SEQ ID NO: 1263499 - DNA, 25 bp, Homo sapien
ttggccacagacatccgagcgcctt

SEQ ID NO: 1263500 - DNA, 25 bp, Homo sapien
gctggctgaattctccacgtcttat

SEQ ID NO: 1263501 - DNA, 25 bp, Homo sapien
tatgtatccaccctcatcttgcgag

SEQ ID NO: 1263502 - DNA, 25 bp, Homo sapien
tctgttgcccgtggcgcatctttca

SEQ ID NO: 1263503 - DNA, 25 bp, Homo sapien
tttgtggaggcttcgtgacaggcac

SEQ ID NO: 1263504 - DNA, 25 bp, Homo sapien
ttacctgacgttagcgcagaccctg

SEQ ID NO: 1263505 - DNA, 25 bp, Homo sapien
gggctagaatagctcccggaactca

SEQ ID NO: 1263506 - DNA, 25 bp, Homo sapien
cggaaagttccaacccgctaggcat

SEQ ID NO: 1263507 - DNA, 25 bp, Homo sapien
catttgaggacggtggggcggagga

SEQ ID NO: 1263508 - DNA, 25 bp, Homo sapien
gaactggaggctttggcccttgtcc

SEQ ID NO: 1263509 - DNA, 25 bp, Homo sapien
tttcctgaacggctgctgacagcag

SEQ ID NO: 1263510 - DNA, 25 bp, Homo sapien
gggcactttcctgaacggctgctga

SEQ ID NO: 1263511 - DNA, 25 bp, Homo sapien
ttcccttcctttccatggagcacgg

SEQ ID NO: 1263512 - DNA, 25 bp, Homo sapien
tttccatggagcacggttcctgtcc

SEQ ID NO: 1263513 - DNA, 25 bp, Homo sapien
tgcctctcgccaacatgcagcactt

SEQ ID NO: 1263514 - DNA, 25 bp, Homo sapien
catggagcacggttcctgtcccggg

SEQ ID NO: 1263515 - DNA, 25 bp, Homo sapien
ggtgccgcccacaggttgtttggct

SEQ ID NO: 1263516 - DNA, 25 bp, Homo sapien
aggtgccgcccacaggttgtttggc

SEQ ID NO: 1263517 - DNA, 25 bp, Homo sapien
gccgcccacaggttgtttggctgca

SEQ ID NO: 1263518 - DNA, 25 bp, Homo sapien
tgcaggtgatgggcaggtcccccat

SEQ ID NO: 1263519 - DNA, 25 bp, Homo sapien
tagacgtgagaggacggaagtcggc

SEQ ID NO: 1263520 - DNA, 25 bp, Homo sapien
tgttcgcccgactggcgcctcggct

SEQ ID NO: 1263521 - DNA, 25 bp, Homo sapien
aagtcggcagagcttggctccctgt

SEQ ID NO: 1263522 - DNA, 25 bp, Homo sapien
gtctctcgagctcttctgtgccgtg

SEQ ID NO: 1263523 - DNA, 25 bp, Homo sapien
gctggcactatccagcgcagaagga

SEQ ID NO: 1263524 - DNA, 25 bp, Homo sapien
aatgaaggacttctgttcagacagc

SEQ ID NO: 1263525 - DNA, 25 bp, Homo sapien
tcagcctctggaacggtgcctgcat

SEQ ID NO: 1263526 - DNA, 25 bp, Homo sapien
ctcagcctctggaacggtgcctgca

SEQ ID NO: 1263527 - DNA, 25 bp, Homo sapien
gacctctgggcccaagggcacctca

SEQ ID NO: 1263528 - DNA, 25 bp, Homo sapien
gcaccctcagtgacagctgcaccct

SEQ ID NO: 1263529 - DNA, 25 bp, Homo sapien
ctcagtgacagctgcaccctggctt

SEQ ID NO: 1263530 - DNA, 25 bp, Homo sapien
cagtgacagctgcaccctggcttct

SEQ ID NO: 1263531 - DNA, 25 bp, Homo sapien
tggctatctgcatgtggcttgacca

SEQ ID NO: 1263532 - DNA, 25 bp, Homo sapien
tctgcatgtggcttgaccactgcct

SEQ ID NO: 1263533 - DNA, 25 bp, Homo sapien
tgtggcttgaccactgccttgcacc

SEQ ID NO: 1263534 - DNA, 25 bp, Homo sapien
acctgggccaccatagaaggcacct

SEQ ID NO: 1263535 - DNA, 25 bp, Homo sapien
gggtattgggtgtcctgcccaacca

SEQ ID NO: 1263536 - DNA, 25 bp, Homo sapien
tggcatggaccccatggggcttccc

SEQ ID NO: 1263537 - DNA, 25 bp, Homo sapien
gccttcccgtgggactccgcatggg

SEQ ID NO: 1263538 - DNA, 25 bp, Homo sapien
cagctggggactggcatggacccca

SEQ ID NO: 1263539 - DNA, 25 bp, Homo sapien
tcccgcaagcagtgccagcacactt

SEQ ID NO: 1263540 - DNA, 25 bp, Homo sapien
ccgcaagcagtgccagcacacttgg

SEQ ID NO: 1263541 - DNA, 25 bp, Homo sapien
gcaagcagtgccagcacacttggcc

SEQ ID NO: 1263542 - DNA, 25 bp, Homo sapien
caagcagtgccagcacacttggcct

SEQ ID NO: 1263543 - DNA, 25 bp, Homo sapien
gagcgagcgtttctgagctttgacg

SEQ ID NO: 1263544 - DNA, 25 bp, Homo sapien
agacatcttgaatgctcccgagccc

SEQ ID NO: 1263545 - DNA, 25 bp, Homo sapien
agcccaggagcgagcgtttctgagc

SEQ ID NO: 1263546 - DNA, 25 bp, Homo sapien
cgtttctgagctttgacggagcagc

SEQ ID NO: 1263547 - DNA, 25 bp, Homo sapien
cccctgggggtctgcgcctcttgtg

SEQ ID NO: 1263548 - DNA, 25 bp, Homo sapien
tagagccacatgaggggtcacccga

SEQ ID NO: 1263549 - DNA, 25 bp, Homo sapien
tgtcaaaccccaagccgcatcctgg

SEQ ID NO: 1263550 - DNA, 25 bp, Homo sapien
ctcgggcttgctgggagtcgcgtct

SEQ ID NO: 1263551 - DNA, 25 bp, Homo sapien
ctggaggacccctgacttcttggtt

SEQ ID NO: 1263552 - DNA, 25 bp, Homo sapien
tcttggtttcgctctgaatcttcca

SEQ ID NO: 1263553 - DNA, 25 bp, Homo sapien
catccgtgtggcctgatttcagcag

SEQ ID NO: 1263554 - DNA, 25 bp, Homo sapien
aggttttaccatccgtgtggcctga

SEQ ID NO: 1263555 - DNA, 25 bp, Homo sapien
cggccgtcccgtggtggatcctgtc

SEQ ID NO: 1263556 - DNA, 25 bp, Homo sapien
acttcacggctccactgtcagcaag

SEQ ID NO: 1263557 - DNA, 25 bp, Homo sapien
agccgccgaggccgtgacaccatga

SEQ ID NO: 1263558 - DNA, 25 bp, Homo sapien
tgacaccatgaggatcatgtgagga

SEQ ID NO: 1263559 - DNA, 25 bp, Homo sapien
taatttgtaaagatacctggtggct

SEQ ID NO: 1263560 - DNA, 25 bp, Homo sapien
ctaggaccgtagtgttgcagagtaa

SEQ ID NO: 1263561 - DNA, 25 bp, Homo sapien
cagattcacactgcccttgtcagca

SEQ ID NO: 1263562 - DNA, 25 bp, Homo sapien
aatggtgacctagagaaagccaaac

SEQ ID NO: 1263563 - DNA, 25 bp, Homo sapien
ctgtggacgcggaggagaatggagc

SEQ ID NO: 1263564 - DNA, 25 bp, Homo sapien
acgcggaggagaatggagcaggtct

SEQ ID NO: 1263565 - DNA, 25 bp, Homo sapien
ctggtgttcttctgcgctgtggacg

SEQ ID NO: 1263566 - DNA, 25 bp, Homo sapien
tgttcttctgcgctgtggacgcgga

SEQ ID NO: 1263567 - DNA, 25 bp, Homo sapien
ctagggtccaggcatccagcagccg

SEQ ID NO: 1263568 - DNA, 25 bp, Homo sapien
gtccaggcatccagcagccgaagcg

SEQ ID NO: 1263569 - DNA, 25 bp, Homo sapien
gggtccaggcatccagcagccgaag

SEQ ID NO: 1263570 - DNA, 25 bp, Homo sapien
tagggtccaggcatccagcagccga

SEQ ID NO: 1263571 - DNA, 25 bp, Homo sapien
gggcaaaactcccaatgccggcatt

SEQ ID NO: 1263572 - DNA, 25 bp, Homo sapien
aatgccggcattaagctagattggc

SEQ ID NO: 1263573 - DNA, 25 bp, Homo sapien
catccagcaggtgccgactggggca

SEQ ID NO: 1263574 - DNA, 25 bp, Homo sapien
attggcccggaatcagaggtcttgg

SEQ ID NO: 1263575 - DNA, 25 bp, Homo sapien
tgatgtaggtagcatgtgcagagga

SEQ ID NO: 1263576 - DNA, 25 bp, Homo sapien
tccttcgaatagagcccacggtcct

SEQ ID NO: 1263577 - DNA, 25 bp, Homo sapien
tagagcccacggtcctggtgtggct

SEQ ID NO: 1263578 - DNA, 25 bp, Homo sapien
ccatccctccttcgaatagagccca

SEQ ID NO: 1263579 - DNA, 25 bp, Homo sapien
tcagtgcaggcggttcacagtacac

SEQ ID NO: 1263580 - DNA, 25 bp, Homo sapien
gttttcttacccgatgcccactgtg

SEQ ID NO: 1263581 - DNA, 25 bp, Homo sapien
actgtcctaggtgctggtcatccgg

SEQ ID NO: 1263582 - DNA, 25 bp, Homo sapien
gatgttcatgagtccgagttcccct

SEQ ID NO: 1263583 - DNA, 25 bp, Homo sapien
aactgctggtccataagcgctgcca

SEQ ID NO: 1263584 - DNA, 25 bp, Homo sapien
gcggtcagtgcagcgagaggatatg

SEQ ID NO: 1263585 - DNA, 25 bp, Homo sapien
tcgcgaggcaaggctacaggtgcat

SEQ ID NO: 1263586 - DNA, 25 bp, Homo sapien
ctgcagagagcgtactgcggtcagt

SEQ ID NO: 1263587 - DNA, 25 bp, Homo sapien
ggcggggtcggggcgtggcagccag

SEQ ID NO: 1263588 - DNA, 25 bp, Homo sapien
ggggtcggggcgtggcagccagccc

SEQ ID NO: 1263589 - DNA, 25 bp, Homo sapien
ctgcaggaagcatatggtgagtggc

SEQ ID NO: 1263590 - DNA, 25 bp, Homo sapien
tgcaggaagcatatggtgagtggca

SEQ ID NO: 1263591 - DNA, 25 bp, Homo sapien
caggtctgacctagtagcattgggc

SEQ ID NO: 1263592 - DNA, 25 bp, Homo sapien
gactgaacattcaactccctgggcc

SEQ ID NO: 1263593 - DNA, 25 bp, Homo sapien
gagtctggatcagggtgtcacccca

SEQ ID NO: 1263594 - DNA, 25 bp, Homo sapien
tagcgtaagcaaatgagaccggccc

SEQ ID NO: 1263595 - DNA, 25 bp, Homo sapien
tctgcgtggtaactgtgggccccat

SEQ ID NO: 1263596 - DNA, 25 bp, Homo sapien
ggtctctgcgtggtaactgtgggcc

SEQ ID NO: 1263597 - DNA, 25 bp, Homo sapien
ggctttggatgcacagggttagcat

SEQ ID NO: 1263598 - DNA, 25 bp, Homo sapien
tctctgcgtggtaactgtgggcccc

SEQ ID NO: 1263599 - DNA, 25 bp, Homo sapien
ctgcaggtggggcagcatcacccac

SEQ ID NO: 1263600 - DNA, 25 bp, Homo sapien
caaccaggtcgtgccgtctctgttc

SEQ ID NO: 1263601 - DNA, 25 bp, Homo sapien
gctgcaaccaggtcgtgccgtctct

SEQ ID NO: 1263602 - DNA, 25 bp, Homo sapien
ctcagccgctgcaaccaggtcgtgc

SEQ ID NO: 1263603 - DNA, 25 bp, Homo sapien
agccgctgcaaccaggtcgtgccgt

SEQ ID NO: 1263604 - DNA, 25 bp, Homo sapien
gttgacactggacggccctgtccta

SEQ ID NO: 1263605 - DNA, 25 bp, Homo sapien
acctgcctcactggggtgacgttga

SEQ ID NO: 1263606 - DNA, 25 bp, Homo sapien
tggacggccctgtcctattcctgac

SEQ ID NO: 1263607 - DNA, 25 bp, Homo sapien
cactggggtgacgttgacactggac

SEQ ID NO: 1263608 - DNA, 25 bp, Homo sapien
tttgcaccggaagcgcagtgccatc

SEQ ID NO: 1263609 - DNA, 25 bp, Homo sapien
ctttgcaccggaagcgcagtgccat

SEQ ID NO: 1263610 - DNA, 25 bp, Homo sapien
agtcccacggctgcaccctgccttg

SEQ ID NO: 1263611 - DNA, 25 bp, Homo sapien
gtgaggggctgcctcccatgcgtcc

SEQ ID NO: 1263612 - DNA, 25 bp, Homo sapien
gacacccgtgtttgcctttgcacgt

SEQ ID NO: 1263613 - DNA, 25 bp, Homo sapien
ccatgcgtcctttcatgttgaggac

SEQ ID NO: 1263614 - DNA, 25 bp, Homo sapien
agtaaaatccttctgtggattcagc

SEQ ID NO: 1263615 - DNA, 25 bp, Homo sapien
ccagtagatttctttggacgaagta

SEQ ID NO: 1263616 - DNA, 25 bp, Homo sapien
ctttggacgaagtaaaatccttctg

SEQ ID NO: 1263617 - DNA, 25 bp, Homo sapien
aatccttctgtggattcagctttac

SEQ ID NO: 1263618 - DNA, 25 bp, Homo sapien
aatctgattttccagcgtgccctgt

SEQ ID NO: 1263619 - DNA, 25 bp, Homo sapien
ctgctctccgagtcaggaatctgat

SEQ ID NO: 1263620 - DNA, 25 bp, Homo sapien
tgccctgtaatgacggtgctgtcac

SEQ ID NO: 1263621 - DNA, 25 bp, Homo sapien
gctttaatgtccgtcctgctctccg

SEQ ID NO: 1263622 - DNA, 25 bp, Homo sapien
tgatgttgggtctgacaagccagga

SEQ ID NO: 1263623 - DNA, 25 bp, Homo sapien
ggcccgcccgagtcatctgatgttg

SEQ ID NO: 1263624 - DNA, 25 bp, Homo sapien
gtgtgagccggagaacgtcccctaa

SEQ ID NO: 1263625 - DNA, 25 bp, Homo sapien
ttccaagtgagggttctgggcccgc

SEQ ID NO: 1263626 - DNA, 25 bp, Homo sapien
actggatccggctgcggtctgcgtc

SEQ ID NO: 1263627 - DNA, 25 bp, Homo sapien
gaggtttcgtgagcttccagcatcc

SEQ ID NO: 1263628 - DNA, 25 bp, Homo sapien
tcctaggaggttttgtgagcttccc

SEQ ID NO: 1263629 - DNA, 25 bp, Homo sapien
catgtctgttggatggtgccggttc

SEQ ID NO: 1263630 - DNA, 25 bp, Homo sapien
ctccacgggtgcactgaggacgttc

SEQ ID NO: 1263631 - DNA, 25 bp, Homo sapien
gttgacgttactgaacgagtccctc

SEQ ID NO: 1263632 - DNA, 25 bp, Homo sapien
tactgaacgagtccctccacgggtg

SEQ ID NO: 1263633 - DNA, 25 bp, Homo sapien
acgagtccctccacgggtgcactga

SEQ ID NO: 1263634 - DNA, 25 bp, Homo sapien
aacggcggggacctgatgttccaca

SEQ ID NO: 1263635 - DNA, 25 bp, Homo sapien
tgctctttgcaagactgaacctgcg

SEQ ID NO: 1263636 - DNA, 25 bp, Homo sapien
tggtcattgagtacgtcaacggcgg

SEQ ID NO: 1263637 - DNA, 25 bp, Homo sapien
ggcttctgtctaaggaggccgccgt

SEQ ID NO: 1263638 - DNA, 25 bp, Homo sapien
caggtgagccgttctgcctaaggga

SEQ ID NO: 1263639 - DNA, 25 bp, Homo sapien
cagcttgaacgactggagggtcctg

SEQ ID NO: 1263640 - DNA, 25 bp, Homo sapien
tatcggcaggtgtttcatacaaaga

SEQ ID NO: 1263641 - DNA, 25 bp, Homo sapien
tagtagatgccacgttagtagatgc

SEQ ID NO: 1263642 - DNA, 25 bp, Homo sapien
gcacacacctaaggggcgggccagt

SEQ ID NO: 1263643 - DNA, 25 bp, Homo sapien
ctggatttcagtgttggtacaggag

SEQ ID NO: 1263644 - DNA, 25 bp, Homo sapien
ggggcgggccagtgaatgagtgtgc

SEQ ID NO: 1263645 - DNA, 25 bp, Homo sapien
caggagcacacacctaaggggcggg

SEQ ID NO: 1263646 - DNA, 25 bp, Homo sapien
atgagtgggctaaagagggccgggc

SEQ ID NO: 1263647 - DNA, 25 bp, Homo sapien
caggagtgggttagagagcgaggga

SEQ ID NO: 1263648 - DNA, 25 bp, Homo sapien
ctagagaacgagcaagggaatgaga

SEQ ID NO: 1263649 - DNA, 25 bp, Homo sapien
agagtgggttagagagtgagtgagc

SEQ ID NO: 1263650 - DNA, 25 bp, Homo sapien
tgagtgaatgggagtgggttagcga

SEQ ID NO: 1263651 - DNA, 25 bp, Homo sapien
gggagtaagcgagtgaatgtctctt

SEQ ID NO: 1263652 - DNA, 25 bp, Homo sapien
tgggttagagagtgagggagtaagc

SEQ ID NO: 1263653 - DNA, 25 bp, Homo sapien
aaaaaaaagtgggctagagagtgag

SEQ ID NO: 1263654 - DNA, 25 bp, Homo sapien
aatttctagggagcagagttctttc

SEQ ID NO: 1263655 - DNA, 25 bp, Homo sapien
gaggttgggagtccagggtcatggt

SEQ ID NO: 1263656 - DNA, 25 bp, Homo sapien
gcctgggtaatttctagggagcaga

SEQ ID NO: 1263657 - DNA, 25 bp, Homo sapien
gggagcagagttctttcccagctgt

SEQ ID NO: 1263658 - DNA, 25 bp, Homo sapien
actgggacaagtggccatgagtcgg

SEQ ID NO: 1263659 - DNA, 25 bp, Homo sapien
gggcacattcagaccctattgtggg

SEQ ID NO: 1263660 - DNA, 25 bp, Homo sapien
ggttccacctctctacactgttgct

SEQ ID NO: 1263661 - DNA, 25 bp, Homo sapien
caagctgtcttgacagctacaggag

SEQ ID NO: 1263662 - DNA, 25 bp, Homo sapien
gattctgaagtcgatgcctggatag

SEQ ID NO: 1263663 - DNA, 25 bp, Homo sapien
agttagttgtcggtgcccctctgaa

SEQ ID NO: 1263664 - DNA, 25 bp, Homo sapien
cagggttccaagacgtcatgagacg

SEQ ID NO: 1263665 - DNA, 25 bp, Homo sapien
tgtggccaggtcctacacctttatg

SEQ ID NO: 1263666 - DNA, 25 bp, Homo sapien
caatctggtagggatgatgcccgcg

SEQ ID NO: 1263667 - DNA, 25 bp, Homo sapien
gatgccataaagaggatcgaccagt

SEQ ID NO: 1263668 - DNA, 25 bp, Homo sapien
tggacacgcgtgattgaccctttaa

SEQ ID NO: 1263669 - DNA, 25 bp, Homo sapien
tgcagctgaccccagacgatgagtg

SEQ ID NO: 1263670 - DNA, 25 bp, Homo sapien
gaaacagaactcgatgcactgacct

SEQ ID NO: 1263671 - DNA, 25 bp, Homo sapien
tgagcgtgtagcgtcctgaggaata

SEQ ID NO: 1263672 - DNA, 25 bp, Homo sapien
tcatgcggtttccaaggtgcacatt

SEQ ID NO: 1263673 - DNA, 25 bp, Homo sapien
gatgccttttttccgtgagtggcgc

SEQ ID NO: 1263674 - DNA, 25 bp, Homo sapien
ctaaaagatgtgcatgtgacggacc

SEQ ID NO: 1263675 - DNA, 25 bp, Homo sapien
ccccagccttaaagttgaacgtgat

SEQ ID NO: 1263676 - DNA, 25 bp, Homo sapien
agccttaaagttgaacgtgatgacc

SEQ ID NO: 1263677 - DNA, 25 bp, Homo sapien
agatgtgcatgtgacggaccccagc

SEQ ID NO: 1263678 - DNA, 25 bp, Homo sapien
gggtcgcgccacctcatgcctctga

SEQ ID NO: 1263679 - DNA, 25 bp, Homo sapien
ggtgtggaaattgccacgcagccct

SEQ ID NO: 1263680 - DNA, 25 bp, Homo sapien
tctgagtgaggcctggtgcacaggt

SEQ ID NO: 1263681 - DNA, 25 bp, Homo sapien
tgtcaggtgtggcagagccgtcttc

SEQ ID NO: 1263682 - DNA, 25 bp, Homo sapien
gccgctccaccccattgtgcggctg

SEQ ID NO: 1263683 - DNA, 25 bp, Homo sapien
gggccgctccaccccattgtgcggc

SEQ ID NO: 1263684 - DNA, 25 bp, Homo sapien
ctccaccccattgtgcggctggtgg

SEQ ID NO: 1263685 - DNA, 25 bp, Homo sapien
cgctccaccccattgtgcggctggt

SEQ ID NO: 1263686 - DNA, 25 bp, Homo sapien
gacaagaatgccagcgctgggcata

SEQ ID NO: 1263687 - DNA, 25 bp, Homo sapien
tggagacgggtttcagccacactcc

SEQ ID NO: 1263688 - DNA, 25 bp, Homo sapien
tcagcacgacatggtggattcacac

SEQ ID NO: 1263689 - DNA, 25 bp, Homo sapien
gaagttacacctgccgggtgagtag

SEQ ID NO: 1263690 - DNA, 25 bp, Homo sapien
ttgccagtagcgtgccggttaccag

SEQ ID NO: 1263691 - DNA, 25 bp, Homo sapien
tcacgacggtgtcttttggaagtgg

SEQ ID NO: 1263692 - DNA, 25 bp, Homo sapien
accagtttggccgttcttgtacaca

SEQ ID NO: 1263693 - DNA, 25 bp, Homo sapien
tcctgatatttgctaatggctccgg

SEQ ID NO: 1263694 - DNA, 25 bp, Homo sapien
ttgactgccagggtcattcaaagtc

SEQ ID NO: 1263695 - DNA, 25 bp, Homo sapien
gtcattcaaagtcttgcacatccat

SEQ ID NO: 1263696 - DNA, 25 bp, Homo sapien
tcaaagtcttgcacatccatgaaag

SEQ ID NO: 1263697 - DNA, 25 bp, Homo sapien
acccttgactgccagggtcattcaa

SEQ ID NO: 1263698 - DNA, 25 bp, Homo sapien
cccctagggttggaatcacagtgtg

SEQ ID NO: 1263699 - DNA, 25 bp, Homo sapien
tatcagggcagttttaggctcccag

SEQ ID NO: 1263700 - DNA, 25 bp, Homo sapien
aaaacccctggcgaatgatgaggcc

SEQ ID NO: 1263701 - DNA, 25 bp, Homo sapien
tcttaagtaggcatatatcagggca

SEQ ID NO: 1263702 - DNA, 25 bp, Homo sapien
cgccctgctttaatgcgcatgcggg

SEQ ID NO: 1263703 - DNA, 25 bp, Homo sapien
gcgccgcactctgcgcagggctctt

SEQ ID NO: 1263704 - DNA, 25 bp, Homo sapien
gagcccgccctgctttaatgcgcat

SEQ ID NO: 1263705 - DNA, 25 bp, Homo sapien
ctgctggcgggggagagcgtgtccg

SEQ ID NO: 1263706 - DNA, 25 bp, Homo sapien
tgctttcggccaagcactgggccag

SEQ ID NO: 1263707 - DNA, 25 bp, Homo sapien
tgtgctttcggccaagcactgggcc

SEQ ID NO: 1263708 - DNA, 25 bp, Homo sapien
ctttcggccaagcactgggccaggt

SEQ ID NO: 1263709 - DNA, 25 bp, Homo sapien
tcttctgtgctttcggccaagcact

SEQ ID NO: 1263710 - DNA, 25 bp, Homo sapien
tctatgggattctggcgcctgctca

SEQ ID NO: 1263711 - DNA, 25 bp, Homo sapien
ttgagaacgcgctcatcgtggagcc

SEQ ID NO: 1263712 - DNA, 25 bp, Homo sapien
gaaaacccatccgagtcctgcaggt

SEQ ID NO: 1263713 - DNA, 25 bp, Homo sapien
tgtgcagctcacgtcagagaattgg

SEQ ID NO: 1263714 - DNA, 25 bp, Homo sapien
cacgccctgtggtgtggacaggcca

SEQ ID NO: 1263715 - DNA, 25 bp, Homo sapien
agaagctttctctaaggttgccaga

SEQ ID NO: 1263716 - DNA, 25 bp, Homo sapien
tgtccgtgacgcttctgctcagtag

SEQ ID NO: 1263717 - DNA, 25 bp, Homo sapien
tgctaagatctgaaccgaggtcatc

SEQ ID NO: 1263718 - DNA, 25 bp, Homo sapien
gtgacccggagaacaccaaggctgt

SEQ ID NO: 1263719 - DNA, 25 bp, Homo sapien
tgagaaatgggaggcctcctggcag

SEQ ID NO: 1263720 - DNA, 25 bp, Homo sapien
caaagaacattctacatagtttgtc

SEQ ID NO: 1263721 - DNA, 25 bp, Homo sapien
gcatttgacggtcctctgggtgacc

SEQ ID NO: 1263722 - DNA, 25 bp, Homo sapien
cagggcgacggttcaagaccaagtc

SEQ ID NO: 1263723 - DNA, 25 bp, Homo sapien
taggaaaaattgaggcagtctgcca

SEQ ID NO: 1263724 - DNA, 25 bp, Homo sapien
gaccaagtccggctgttagaccaga

SEQ ID NO: 1263725 - DNA, 25 bp, Homo sapien
caaggatctcagagcttcagccaag

SEQ ID NO: 1263726 - DNA, 25 bp, Homo sapien
cacgcccaggcatgtaaagatggga

SEQ ID NO: 1263727 - DNA, 25 bp, Homo sapien
cgcccaggcatgtaaagatgggatc

SEQ ID NO: 1263728 - DNA, 25 bp, Homo sapien
acgcccaggcatgtaaagatgggat

SEQ ID NO: 1263729 - DNA, 25 bp, Homo sapien
tcgcattcccgagctgtttttgctt

SEQ ID NO: 1263730 - DNA, 25 bp, Homo sapien
ggtgccttcgcattcccgagctgtt

SEQ ID NO: 1263731 - DNA, 25 bp, Homo sapien
ggctgccaactttggactccggtgc

SEQ ID NO: 1263732 - DNA, 25 bp, Homo sapien
tttggactccggtgccttcgcattc

SEQ ID NO: 1263733 - DNA, 25 bp, Homo sapien
acgctggtgccaccagattccagga

SEQ ID NO: 1263734 - DNA, 25 bp, Homo sapien
tctcgggaaggtgttcctgtgctct

SEQ ID NO: 1263735 - DNA, 25 bp, Homo sapien
tgccaccagattccaggatggccag

SEQ ID NO: 1263736 - DNA, 25 bp, Homo sapien
tggtgccaccagattccaggatggc

SEQ ID NO: 1263737 - DNA, 25 bp, Homo sapien
gtggaccccagacccgtgacagaga

SEQ ID NO: 1263738 - DNA, 25 bp, Homo sapien
cacctttccagtgtgaaacagggct

SEQ ID NO: 1263739 - DNA, 25 bp, Homo sapien
caagcaggtggaccccagacccgtg

SEQ ID NO: 1263740 - DNA, 25 bp, Homo sapien
acccgtgacagagagccacctggac

SEQ ID NO: 1263741 - DNA, 25 bp, Homo sapien
ccagcgctgagctcggccacctctt

SEQ ID NO: 1263742 - DNA, 25 bp, Homo sapien
aagccagcgctgagctcggccacct

SEQ ID NO: 1263743 - DNA, 25 bp, Homo sapien
cagcgctgagctcggccacctcttg

SEQ ID NO: 1263744 - DNA, 25 bp, Homo sapien
gccagcgctgagctcggccacctct

SEQ ID NO: 1263745 - DNA, 25 bp, Homo sapien
tgtggtttccaaacacggatggata

SEQ ID NO: 1263746 - DNA, 25 bp, Homo sapien
tccaaacacggatggataaccgggc

SEQ ID NO: 1263747 - DNA, 25 bp, Homo sapien
ccgggcgcaggggtggcctactcac

SEQ ID NO: 1263748 - DNA, 25 bp, Homo sapien
caaacacggatggataaccgggccg

SEQ ID NO: 1263749 - DNA, 25 bp, Homo sapien
atggggcagctgcgcagggccgcgg

SEQ ID NO: 1263750 - DNA, 25 bp, Homo sapien
ctccacagacggctgctgctccacc

SEQ ID NO: 1263751 - DNA, 25 bp, Homo sapien
cagggatcaggtgccgggcgctggg

SEQ ID NO: 1263752 - DNA, 25 bp, Homo sapien
ctgcagggatcaggtgccgggcgct

SEQ ID NO: 1263753 - DNA, 25 bp, Homo sapien
gcagggatcaggtgccgggcgctgg

SEQ ID NO: 1263754 - DNA, 25 bp, Homo sapien
tgcagggatcaggtgccgggcgctg

SEQ ID NO: 1263755 - DNA, 25 bp, Homo sapien
tgaagacttcagtgggctccgggcc

SEQ ID NO: 1263756 - DNA, 25 bp, Homo sapien
ccccgtgaagcagccggtaggaacg

SEQ ID NO: 1263757 - DNA, 25 bp, Homo sapien
caggtccggcggaaagggtgtccag

SEQ ID NO: 1263758 - DNA, 25 bp, Homo sapien
tcttgggtccgacagtgaagacttc

SEQ ID NO: 1263759 - DNA, 25 bp, Homo sapien
ctgtcctgggaaggcgggcagtgaa

SEQ ID NO: 1263760 - DNA, 25 bp, Homo sapien
tcctgggaaggcgggcagtgaaggc

SEQ ID NO: 1263761 - DNA, 25 bp, Homo sapien
ctgggaaggcgggcagtgaaggcac

SEQ ID NO: 1263762 - DNA, 25 bp, Homo sapien
tgtcctgggaaggcgggcagtgaag

SEQ ID NO: 1263763 - DNA, 25 bp, Homo sapien
gtgatccaggatcagctccgggctc

SEQ ID NO: 1263764 - DNA, 25 bp, Homo sapien
gatccaggatcagctccgggctcac

SEQ ID NO: 1263765 - DNA, 25 bp, Homo sapien
cgtgatccaggatcagctccgggct

SEQ ID NO: 1263766 - DNA, 25 bp, Homo sapien
ctcgtgatccaggatcagctccggg

SEQ ID NO: 1263767 - DNA, 25 bp, Homo sapien
tgcgcagtagctcggcccagagccg

SEQ ID NO: 1263768 - DNA, 25 bp, Homo sapien
ccgctcatcaccccccaggagaaac

SEQ ID NO: 1263769 - DNA, 25 bp, Homo sapien
cgctcatcaccccccaggagaaacc

SEQ ID NO: 1263770 - DNA, 25 bp, Homo sapien
tcaaggcgggcgctgaatggcggcg

SEQ ID NO: 1263771 - DNA, 25 bp, Homo sapien
tcctcagcgggatgaggcgatggtt

SEQ ID NO: 1263772 - DNA, 25 bp, Homo sapien
gggtactcagtagcggaaacgctat

SEQ ID NO: 1263773 - DNA, 25 bp, Homo sapien
tactagagggaaattcgatggtgcg

SEQ ID NO: 1263774 - DNA, 25 bp, Homo sapien
ctccggcggctcaaccccagccgcg

SEQ ID NO: 1263775 - DNA, 25 bp, Homo sapien
cggcctccggcggctcaaccccagc

SEQ ID NO: 1263776 - DNA, 25 bp, Homo sapien
cctccggcggctcaaccccagccgc

SEQ ID NO: 1263777 - DNA, 25 bp, Homo sapien
gcggcctccggcggctcaaccccag

SEQ ID NO: 1263778 - DNA, 25 bp, Homo sapien
caagcccgcgccgggcggaagtgag

SEQ ID NO: 1263779 - DNA, 25 bp, Homo sapien
ccaagcccgcgccgggcggaagtga

SEQ ID NO: 1263780 - DNA, 25 bp, Homo sapien
aggcccttcgacttgagtgagcaga

SEQ ID NO: 1263781 - DNA, 25 bp, Homo sapien
gcagaacaagatggaggcaccaacc

SEQ ID NO: 1263782 - DNA, 25 bp, Homo sapien
agaacaagatggaggcaccaacccc

SEQ ID NO: 1263783 - DNA, 25 bp, Homo sapien
ccccaggcccttcgacttgagtgag

SEQ ID NO: 1263784 - DNA, 25 bp, Homo sapien
gcttcagctccgagcttctgggtct

SEQ ID NO: 1263785 - DNA, 25 bp, Homo sapien
cagggctccccgacagtcctggctg

SEQ ID NO: 1263786 - DNA, 25 bp, Homo sapien
tccagggctccccgacagtcctggc

SEQ ID NO: 1263787 - DNA, 25 bp, Homo sapien
aagcgctctcagacagccagtgtcc

SEQ ID NO: 1263788 - DNA, 25 bp, Homo sapien
ggccagtgccatggggcagaaggca

SEQ ID NO: 1263789 - DNA, 25 bp, Homo sapien
aggccagtgccatggggcagaaggc

SEQ ID NO: 1263790 - DNA, 25 bp, Homo sapien
ccaggccagtgccatggggcagaag

SEQ ID NO: 1263791 - DNA, 25 bp, Homo sapien
caggccagtgccatggggcagaagg

SEQ ID NO: 1263792 - DNA, 25 bp, Homo sapien
gaggtttcaaagttgaacctgatga

SEQ ID NO: 1263793 - DNA, 25 bp, Homo sapien
tgtcctcaagttatcagcatgacac

SEQ ID NO: 1263794 - DNA, 25 bp, Homo sapien
cctgcctgtcctcaagttatcagca

SEQ ID NO: 1263795 - DNA, 25 bp, Homo sapien
aaaacgctccacttcttcggagcca

SEQ ID NO: 1263796 - DNA, 25 bp, Homo sapien
gactgacacgtgcacagtggaaatg

SEQ ID NO: 1263797 - DNA, 25 bp, Homo sapien
tggaaatgagttttttctaagccaa

SEQ ID NO: 1263798 - DNA, 25 bp, Homo sapien
gggactgacacgtgcacagtggaaa

SEQ ID NO: 1263799 - DNA, 25 bp, Homo sapien
gtggaaatgagttttttctaagcca

SEQ ID NO: 1263800 - DNA, 25 bp, Homo sapien
ttatggatgatgaatcaggccccag

SEQ ID NO: 1263801 - DNA, 25 bp, Homo sapien
caaatcaggctaagacagcggtgac

SEQ ID NO: 1263802 - DNA, 25 bp, Homo sapien
tacaaaagaacgtttcagctgtggg

SEQ ID NO: 1263803 - DNA, 25 bp, Homo sapien
ttccaccgcggaagaacaagtgtcc

SEQ ID NO: 1263804 - DNA, 25 bp, Homo sapien
aaggacagccaaaaggcccgggcag

SEQ ID NO: 1263805 - DNA, 25 bp, Homo sapien
gcaaggacagccaaaaggcccgggc

SEQ ID NO: 1263806 - DNA, 25 bp, Homo sapien
gcccgggcagccttctgacgcagcc

SEQ ID NO: 1263807 - DNA, 25 bp, Homo sapien
ggcagccttctgacgcagccaggaa

SEQ ID NO: 1263808 - DNA, 25 bp, Homo sapien
ctgctggcccgtggatgccaggcag

SEQ ID NO: 1263809 - DNA, 25 bp, Homo sapien
catttatgggatacgggagtgccag

SEQ ID NO: 1263810 - DNA, 25 bp, Homo sapien
ggcaggcacgcccacccatagccag

SEQ ID NO: 1263811 - DNA, 25 bp, Homo sapien
tgtggtggcatttatgggatacggg

SEQ ID NO: 1263812 - DNA, 25 bp, Homo sapien
gacagttgcctgggaaacatcgcca

SEQ ID NO: 1263813 - DNA, 25 bp, Homo sapien
tgtgagagacagttgcctgggaaac

SEQ ID NO: 1263814 - DNA, 25 bp, Homo sapien
ctgtgagagacagttgcctgggaaa

SEQ ID NO: 1263815 - DNA, 25 bp, Homo sapien
agttgcctgggaaacatcgccagat

SEQ ID NO: 1263816 - DNA, 25 bp, Homo sapien
gctcagatgctgattggtctaccca

SEQ ID NO: 1263817 - DNA, 25 bp, Homo sapien
tacatgtcactcgttttaggctccc

SEQ ID NO: 1263818 - DNA, 25 bp, Homo sapien
cagtacctgagaaagtggcctcgct

SEQ ID NO: 1263819 - DNA, 25 bp, Homo sapien
cctcgctcggaagcaaggtctgtgc

SEQ ID NO: 1263820 - DNA, 25 bp, Homo sapien
caagttcagcttgaaaacgctgagc

SEQ ID NO: 1263821 - DNA, 25 bp, Homo sapien
gggagccctcggtctcctgtccacc

SEQ ID NO: 1263822 - DNA, 25 bp, Homo sapien
tcagcttgaaaacgctgagcccagc

SEQ ID NO: 1263823 - DNA, 25 bp, Homo sapien
tgaaaacgctgagcccagctgggtg

SEQ ID NO: 1263824 - DNA, 25 bp, Homo sapien
gcttctcggctctgtagaatcagct

SEQ ID NO: 1263825 - DNA, 25 bp, Homo sapien
cagttcagcacgtttttatgggaaa

SEQ ID NO: 1263826 - DNA, 25 bp, Homo sapien
ttcagcacgtttttatgggaaatct

SEQ ID NO: 1263827 - DNA, 25 bp, Homo sapien
gtccccagttcagcacgtttttatg

SEQ ID NO: 1263828 - DNA, 25 bp, Homo sapien
ttggtgcatcccctgtgcagccggc

SEQ ID NO: 1263829 - DNA, 25 bp, Homo sapien
ctccaaccctgcttggtttgcttca

SEQ ID NO: 1263830 - DNA, 25 bp, Homo sapien
ctgtgaactgtgggctccaaccctg

SEQ ID NO: 1263831 - DNA, 25 bp, Homo sapien
tttccacttgtcataggaaactgtg

SEQ ID NO: 1263832 - DNA, 25 bp, Homo sapien
gcagaccttcacagaggagccgtgg

SEQ ID NO: 1263833 - DNA, 25 bp, Homo sapien
gtggctccatccaacgcctccctcg

SEQ ID NO: 1263834 - DNA, 25 bp, Homo sapien
gagtgacgtgcagaccttcacagag

SEQ ID NO: 1263835 - DNA, 25 bp, Homo sapien
ctgagtgacgtgcagaccttcacag

SEQ ID NO: 1263836 - DNA, 25 bp, Homo sapien
gcacggtgagcgacctctgtaggct

SEQ ID NO: 1263837 - DNA, 25 bp, Homo sapien
ctccagagggtcagggacacgcacg

SEQ ID NO: 1263838 - DNA, 25 bp, Homo sapien
tcagggacacgcacggtgagcgacc

SEQ ID NO: 1263839 - DNA, 25 bp, Homo sapien
gagcgacctctgtaggctcgaaggc

SEQ ID NO: 1263840 - DNA, 25 bp, Homo sapien
tctcgctctggggttggcctggcgc

SEQ ID NO: 1263841 - DNA, 25 bp, Homo sapien
ggtgttctcgctctggggttggcct

SEQ ID NO: 1263842 - DNA, 25 bp, Homo sapien
cgctctggggttggcctggcgctga

SEQ ID NO: 1263843 - DNA, 25 bp, Homo sapien
tgttctcgctctggggttggcctgg

SEQ ID NO: 1263844 - DNA, 25 bp, Homo sapien
agctctggagctggctggtgcccct

SEQ ID NO: 1263845 - DNA, 25 bp, Homo sapien
ctgacagggaaggtaggcagctctg

SEQ ID NO: 1263846 - DNA, 25 bp, Homo sapien
tctggagctggctggtgcccctcac

SEQ ID NO: 1263847 - DNA, 25 bp, Homo sapien
acagggaaggtaggcagctctggag

SEQ ID NO: 1263848 - DNA, 25 bp, Homo sapien
acatttctcagaaggactccaggat

SEQ ID NO: 1263849 - DNA, 25 bp, Homo sapien
tctcagaaggactccaggatgcagc

SEQ ID NO: 1263850 - DNA, 25 bp, Homo sapien
atttctcagaaggactccaggatgc

SEQ ID NO: 1263851 - DNA, 25 bp, Homo sapien
tggggcaggtcccacatttctcaga

SEQ ID NO: 1263852 - DNA, 25 bp, Homo sapien
ttccttgagcggtcctggagcctgg

SEQ ID NO: 1263853 - DNA, 25 bp, Homo sapien
cagccctgtgacagaggtgctgtcg

SEQ ID NO: 1263854 - DNA, 25 bp, Homo sapien
gtgctgtcgcgtggccccacttaca

SEQ ID NO: 1263855 - DNA, 25 bp, Homo sapien
gcctgtcctctctgagttgcctcaa

SEQ ID NO: 1263856 - DNA, 25 bp, Homo sapien
cctggctctccgagcaccctggggc

SEQ ID NO: 1263857 - DNA, 25 bp, Homo sapien
ctggctctccgagcaccctggggca

SEQ ID NO: 1263858 - DNA, 25 bp, Homo sapien
tcccactggggatcggggtcaggga

SEQ ID NO: 1263859 - DNA, 25 bp, Homo sapien
ggagtgaagtaagtgcctggctctc

SEQ ID NO: 1263860 - DNA, 25 bp, Homo sapien
gcgccgctcgttctgcgacctccag

SEQ ID NO: 1263861 - DNA, 25 bp, Homo sapien
ggcggccgtgcaagaggcgtgggaa

SEQ ID NO: 1263862 - DNA, 25 bp, Homo sapien
gtgcaagaggcgtgggaagcgcgcg

SEQ ID NO: 1263863 - DNA, 25 bp, Homo sapien
ggggttctgagcgtgcagtcgccgc

SEQ ID NO: 1263864 - DNA, 25 bp, Homo sapien
attccttttcggtctgatctgagag

SEQ ID NO: 1263865 - DNA, 25 bp, Homo sapien
tgtccgaagccttaaaaggtcttca

SEQ ID NO: 1263866 - DNA, 25 bp, Homo sapien
gatctgagagccgagctctcggcag

SEQ ID NO: 1263867 - DNA, 25 bp, Homo sapien
gcacacctgtccgaagccttaaaag

SEQ ID NO: 1263868 - DNA, 25 bp, Homo sapien
tggaaaggcagcaatggtcgatttc

SEQ ID NO: 1263869 - DNA, 25 bp, Homo sapien
tgtggaaaggcagcaatggtcgatt

SEQ ID NO: 1263870 - DNA, 25 bp, Homo sapien
gaaaggcagcaatggtcgatttccc

SEQ ID NO: 1263871 - DNA, 25 bp, Homo sapien
aaaggcagcaatggtcgatttcccc

SEQ ID NO: 1263872 - DNA, 25 bp, Homo sapien
tctgtgtccagtccgattgatgggc

SEQ ID NO: 1263873 - DNA, 25 bp, Homo sapien
cttttggagggagtggcccagctct

SEQ ID NO: 1263874 - DNA, 25 bp, Homo sapien
ccagtccgattgatgggctcatgga

SEQ ID NO: 1263875 - DNA, 25 bp, Homo sapien
tggaaagctgtgacagacgccctgg

SEQ ID NO: 1263876 - DNA, 25 bp, Homo sapien
ggtgtgattctgagactaaggctct

SEQ ID NO: 1263877 - DNA, 25 bp, Homo sapien
attctgagactaaggctctgggggc

SEQ ID NO: 1263878 - DNA, 25 bp, Homo sapien
gtgattctgagactaaggctctggg

SEQ ID NO: 1263879 - DNA, 25 bp, Homo sapien
ttctgagactaaggctctgggggcc

SEQ ID NO: 1263880 - DNA, 25 bp, Homo sapien
gaaactccctgtcttggggccgcgc

SEQ ID NO: 1263881 - DNA, 25 bp, Homo sapien
tggaaactccctgtcttggggccgc

SEQ ID NO: 1263882 - DNA, 25 bp, Homo sapien
aactccctgtcttggggccgcgcac

SEQ ID NO: 1263883 - DNA, 25 bp, Homo sapien
ctccctgtcttggggccgcgcacac

SEQ ID NO: 1263884 - DNA, 25 bp, Homo sapien
agcagagcagacgcggctgcaggag

SEQ ID NO: 1263885 - DNA, 25 bp, Homo sapien
cagagcagacgcggctgcaggagca

SEQ ID NO: 1263886 - DNA, 25 bp, Homo sapien
gcagagcagacgcggctgcaggagc

SEQ ID NO: 1263887 - DNA, 25 bp, Homo sapien
ggtgctcaaccctgtgggcactgac

SEQ ID NO: 1263888 - DNA, 25 bp, Homo sapien
acgtggtgctcaaccctgtgggcac

SEQ ID NO: 1263889 - DNA, 25 bp, Homo sapien
gaccctggcaggagcactgcccagc

SEQ ID NO: 1263890 - DNA, 25 bp, Homo sapien
tggtgctcaaccctgtgggcactga

SEQ ID NO: 1263891 - DNA, 25 bp, Homo sapien
gcacccggaccctgtcgggcaggac

SEQ ID NO: 1263892 - DNA, 25 bp, Homo sapien
gaccctgtcgggcaggacacatctg

SEQ ID NO: 1263893 - DNA, 25 bp, Homo sapien
cccggaccctgtcgggcaggacaca

SEQ ID NO: 1263894 - DNA, 25 bp, Homo sapien
ggaccctgtcgggcaggacacatct

SEQ ID NO: 1263895 - DNA, 25 bp, Homo sapien
atgtcggccagtgggacacctgctg

SEQ ID NO: 1263896 - DNA, 25 bp, Homo sapien
ggcgatgtcggccagtgggacacct

SEQ ID NO: 1263897 - DNA, 25 bp, Homo sapien
ttctgtatcgtttctgggagtggcg

SEQ ID NO: 1263898 - DNA, 25 bp, Homo sapien
tatcgtttctgggagtggcgatgtc

SEQ ID NO: 1263899 - DNA, 25 bp, Homo sapien
gcttcccaggccaggcaggttgctg

SEQ ID NO: 1263900 - DNA, 25 bp, Homo sapien
agcttctgatgtaggggctgcgggg

SEQ ID NO: 1263901 - DNA, 25 bp, Homo sapien
gccactgcgccaagagcaagcttct

SEQ ID NO: 1263902 - DNA, 25 bp, Homo sapien
gcaagcttctgatgtaggggctgcg

SEQ ID NO: 1263903 - DNA, 25 bp, Homo sapien
gagggtggctgtcttttgcgttcaa

SEQ ID NO: 1263904 - DNA, 25 bp, Homo sapien
tagcctcctcccaggatccggagca

SEQ ID NO: 1263905 - DNA, 25 bp, Homo sapien
ttttgcgttcaatccgctgggctgc

SEQ ID NO: 1263906 - DNA, 25 bp, Homo sapien
tcagcgccagcgtgtagcctcctcc

SEQ ID NO: 1263907 - DNA, 25 bp, Homo sapien
gagaaggaaggacgctgcccccaag

SEQ ID NO: 1263908 - DNA, 25 bp, Homo sapien
agagaaggaaggacgctgcccccaa

SEQ ID NO: 1263909 - DNA, 25 bp, Homo sapien
gaaggaaggacgctgcccccaagga

SEQ ID NO: 1263910 - DNA, 25 bp, Homo sapien
aggaaggacgctgcccccaaggaca

SEQ ID NO: 1263911 - DNA, 25 bp, Homo sapien
gcagccgtggcccacaggccttgga

SEQ ID NO: 1263912 - DNA, 25 bp, Homo sapien
caggagaggcgcagccgtggcccac

SEQ ID NO: 1263913 - DNA, 25 bp, Homo sapien
gccgtggcccacaggccttggatct

SEQ ID NO: 1263914 - DNA, 25 bp, Homo sapien
tcaggagaggcgcagccgtggccca

SEQ ID NO: 1263915 - DNA, 25 bp, Homo sapien
gggagcaccaggtgggtatgggagg

SEQ ID NO: 1263916 - DNA, 25 bp, Homo sapien
ggagcaccaggtgggtatgggaggg

SEQ ID NO: 1263917 - DNA, 25 bp, Homo sapien
gggggagcaccaggtgggtatggga

SEQ ID NO: 1263918 - DNA, 25 bp, Homo sapien
gcaccaggtgggtatgggagggggc

SEQ ID NO: 1263919 - DNA, 25 bp, Homo sapien
aagttccaagaacgcgagtctctga

SEQ ID NO: 1263920 - DNA, 25 bp, Homo sapien
ttgccgcctggaatctgctgtttgg

SEQ ID NO: 1263921 - DNA, 25 bp, Homo sapien
gagagatgacgtcattgccgcctgg

SEQ ID NO: 1263922 - DNA, 25 bp, Homo sapien
gagtctctgaaaagcgaggcatcca

SEQ ID NO: 1263923 - DNA, 25 bp, Homo sapien
ccaggctgggagtctagcgggaggg

SEQ ID NO: 1263924 - DNA, 25 bp, Homo sapien
acccacacgcggtgtgtccctgcca

SEQ ID NO: 1263925 - DNA, 25 bp, Homo sapien
agagctttgtccccgcgcagggtgt

SEQ ID NO: 1263926 - DNA, 25 bp, Homo sapien
gcaggaggcgtctgcaagcacgctc

SEQ ID NO: 1263927 - DNA, 25 bp, Homo sapien
gcggttgcctgagaaagcgtcctgc

SEQ ID NO: 1263928 - DNA, 25 bp, Homo sapien
gcggccgtggcctgtgagtcgctgg

SEQ ID NO: 1263929 - DNA, 25 bp, Homo sapien
ccggaaacgccagtacacactgtct

SEQ ID NO: 1263930 - DNA, 25 bp, Homo sapien
ggccgcgctgcagggacttttcctt

SEQ ID NO: 1263931 - DNA, 25 bp, Homo sapien
ctttggctgcgtcccagtgtcctca

SEQ ID NO: 1263932 - DNA, 25 bp, Homo sapien
tacagcaggaggctcgagggctctg

SEQ ID NO: 1263933 - DNA, 25 bp, Homo sapien
agatggccgagtccgtggagaaacc

SEQ ID NO: 1263934 - DNA, 25 bp, Homo sapien
tgcgtcccagtgtcctcaatgggtc

SEQ ID NO: 1263935 - DNA, 25 bp, Homo sapien
agcgcgagcctaggcagaagtgtca

SEQ ID NO: 1263936 - DNA, 25 bp, Homo sapien
tctgccctgttttggctctcggtgt

SEQ ID NO: 1263937 - DNA, 25 bp, Homo sapien
tcccgcagcgcgagcctaggcagaa

SEQ ID NO: 1263938 - DNA, 25 bp, Homo sapien
aggggacctcgcctggctgcttcct

SEQ ID NO: 1263939 - DNA, 25 bp, Homo sapien
acaaacgttctcctgagcagcctgg

SEQ ID NO: 1263940 - DNA, 25 bp, Homo sapien
tgactgtccccggttggaaggtgac

SEQ ID NO: 1263941 - DNA, 25 bp, Homo sapien
aaggtgactgcccactacagcaaca

SEQ ID NO: 1263942 - DNA, 25 bp, Homo sapien
cctgggtgctaaatcctggaacatc

SEQ ID NO: 1263943 - DNA, 25 bp, Homo sapien
ctgacaaggagggggtgaccgggag

SEQ ID NO: 1263944 - DNA, 25 bp, Homo sapien
attggtcagctcacggcctgttgct

SEQ ID NO: 1263945 - DNA, 25 bp, Homo sapien
ctcacggcctgttgctgggaaggca

SEQ ID NO: 1263946 - DNA, 25 bp, Homo sapien
tcagctcacggcctgttgctgggaa

SEQ ID NO: 1263947 - DNA, 25 bp, Homo sapien
tgtgccgggtaaaggacagcagcca

SEQ ID NO: 1263948 - DNA, 25 bp, Homo sapien
tgtgtgccgggtaaaggacagcagc

SEQ ID NO: 1263949 - DNA, 25 bp, Homo sapien
gttgtgtgccgggtaaaggacagca

SEQ ID NO: 1263950 - DNA, 25 bp, Homo sapien
ctcgtggtgctcagtgttgtgtgcc

SEQ ID NO: 1263951 - DNA, 25 bp, Homo sapien
cacgggctgctgagggtgtcgaggc

SEQ ID NO: 1263952 - DNA, 25 bp, Homo sapien
tgagggtgtcgaggcctctgtgccc

SEQ ID NO: 1263953 - DNA, 25 bp, Homo sapien
ggctgctgagggtgtcgaggcctct

SEQ ID NO: 1263954 - DNA, 25 bp, Homo sapien
ccaacatcctgctgctgcgccctca

SEQ ID NO: 1263955 - DNA, 25 bp, Homo sapien
gctgggctgtggctctgagtggggt

SEQ ID NO: 1263956 - DNA, 25 bp, Homo sapien
tctgagtggggtggtctgctggcca

SEQ ID NO: 1263957 - DNA, 25 bp, Homo sapien
ctggctttgtccctgtggggagtgg

SEQ ID NO: 1263958 - DNA, 25 bp, Homo sapien
gtggggtggtctgctggccacctgc

SEQ ID NO: 1263959 - DNA, 25 bp, Homo sapien
ccaatggccacaatggcaggaccat

SEQ ID NO: 1263960 - DNA, 25 bp, Homo sapien
cagatcaacgcggtgtgcgacgagc

SEQ ID NO: 1263961 - DNA, 25 bp, Homo sapien
tgtacccgccgcacaagttcgtggt

SEQ ID NO: 1263962 - DNA, 25 bp, Homo sapien
agattctcaactcggtgctgcgcga

SEQ ID NO: 1263963 - DNA, 25 bp, Homo sapien
tgtaccacgagtgcttcggcaagtg

SEQ ID NO: 1263964 - DNA, 25 bp, Homo sapien
tctcggttgagcagggtgtgtctgc

SEQ ID NO: 1263965 - DNA, 25 bp, Homo sapien
tttgtccgactgtgggtcatgtgtg

SEQ ID NO: 1263966 - DNA, 25 bp, Homo sapien
tgtgtctgcgtttgtttttgtccga

SEQ ID NO: 1263967 - DNA, 25 bp, Homo sapien
ccagtggggcctcgttgtcacagct

SEQ ID NO: 1263968 - DNA, 25 bp, Homo sapien
cttccgggtgtttgtggccaggcca

SEQ ID NO: 1263969 - DNA, 25 bp, Homo sapien
ttttgatctgccgaagatgagggca

SEQ ID NO: 1263970 - DNA, 25 bp, Homo sapien
gagggcagaacaaagaatgtactgg

SEQ ID NO: 1263971 - DNA, 25 bp, Homo sapien
gttggctcctcccactcgtgtcttg

SEQ ID NO: 1263972 - DNA, 25 bp, Homo sapien
cctgggccctgactgtctggcagga

SEQ ID NO: 1263973 - DNA, 25 bp, Homo sapien
gcctccagagagaaggcggtggttc

SEQ ID NO: 1263974 - DNA, 25 bp, Homo sapien
ggcccggctctctgtggcaataatg

SEQ ID NO: 1263975 - DNA, 25 bp, Homo sapien
actgtctggcaggaggtgtccacgc

SEQ ID NO: 1263976 - DNA, 25 bp, Homo sapien
gggtgcttgtctcactggccgtggg

SEQ ID NO: 1263977 - DNA, 25 bp, Homo sapien
ttgttgcctgtgtggttgtgttgct

SEQ ID NO: 1263978 - DNA, 25 bp, Homo sapien
gcctctgctggggtgcttgtctcac

SEQ ID NO: 1263979 - DNA, 25 bp, Homo sapien
gccgtgggggttgttgcctgtgtgg

SEQ ID NO: 1263980 - DNA, 25 bp, Homo sapien
gcactggcagtcaaggtttattggc

SEQ ID NO: 1263981 - DNA, 25 bp, Homo sapien
tggcagtcaaggtttattggcaggt

SEQ ID NO: 1263982 - DNA, 25 bp, Homo sapien
cagtcaaggtttattggcaggtcca

SEQ ID NO: 1263983 - DNA, 25 bp, Homo sapien
cactggcagtcaaggtttattggca

SEQ ID NO: 1263984 - DNA, 25 bp, Homo sapien
ggtttcaacctggatggcccgcgtg

SEQ ID NO: 1263985 - DNA, 25 bp, Homo sapien
agccgttggcggcacctttgtacgg

SEQ ID NO: 1263986 - DNA, 25 bp, Homo sapien
catcccatgtgggtgtagccgttgg

SEQ ID NO: 1263987 - DNA, 25 bp, Homo sapien
gtgtgcagtggcaagggccggtcct

SEQ ID NO: 1263988 - DNA, 25 bp, Homo sapien
ctgtcctccgggttcttctccactt

SEQ ID NO: 1263989 - DNA, 25 bp, Homo sapien
tgctgtcctccgggttcttctccac

SEQ ID NO: 1263990 - DNA, 25 bp, Homo sapien
gctgtcctccgggttcttctccact

SEQ ID NO: 1263991 - DNA, 25 bp, Homo sapien
ctggagaagcgacaccggtgggaag

SEQ ID NO: 1263992 - DNA, 25 bp, Homo sapien
aagcgacaccggtgggaagccaccg

SEQ ID NO: 1263993 - DNA, 25 bp, Homo sapien
aagccaccggcagagaagtcaggga

SEQ ID NO: 1263994 - DNA, 25 bp, Homo sapien
acaccggtgggaagccaccggcaga

SEQ ID NO: 1263995 - DNA, 25 bp, Homo sapien
ttcagggcgcgtgtcagcacaaaca

SEQ ID NO: 1263996 - DNA, 25 bp, Homo sapien
catgtgctggctgcacgagatgtca

SEQ ID NO: 1263997 - DNA, 25 bp, Homo sapien
agatgtcagtgtgctccgcgtacca

SEQ ID NO: 1263998 - DNA, 25 bp, Homo sapien
catgggccgtgttttggtatcgcaa

SEQ ID NO: 1263999 - DNA, 25 bp, Homo sapien
tgggcagagtgcttgctgttgggta

SEQ ID NO: 1264000 - DNA, 25 bp, Homo sapien
gtgtcaccgtgcagctttgctcgtc

SEQ ID NO: 1264001 - DNA, 25 bp, Homo sapien
ctttgctcgtcctgttcttgtgcct

SEQ ID NO: 1264002 - DNA, 25 bp, Homo sapien
ccttgggacgagtgggcagagtgct

SEQ ID NO: 1264003 - DNA, 25 bp, Homo sapien
tgtttgtctactgcgtgcaccgtgg

SEQ ID NO: 1264004 - DNA, 25 bp, Homo sapien
tgtaagaggagacgctctgtgagcc

SEQ ID NO: 1264005 - DNA, 25 bp, Homo sapien
tgtgcagcgctgtctgcaagtcaga

SEQ ID NO: 1264006 - DNA, 25 bp, Homo sapien
agctggagcgtctcggcgccagatt

SEQ ID NO: 1264007 - DNA, 25 bp, Homo sapien
caggaacctccacctcgcccactgt

SEQ ID NO: 1264008 - DNA, 25 bp, Homo sapien
cgtgtgcctggcctgtagcagcagc

SEQ ID NO: 1264009 - DNA, 25 bp, Homo sapien
ggaacctccacctcgcccactgtgg

SEQ ID NO: 1264010 - DNA, 25 bp, Homo sapien
cagcagcaaagaggaacctgatggg

SEQ ID NO: 1264011 - DNA, 25 bp, Homo sapien
tagtggtcagtgtactttttgatta

SEQ ID NO: 1264012 - DNA, 25 bp, Homo sapien
tcacgtcttctctgtgcaaatagtg

SEQ ID NO: 1264013 - DNA, 25 bp, Homo sapien
tctttccttctcacgtcttctctgt

SEQ ID NO: 1264014 - DNA, 25 bp, Homo sapien
ttctctgtgcaaatagtggtcagtg

SEQ ID NO: 1264015 - DNA, 25 bp, Homo sapien
agggccccttgcctcattcgtggag

SEQ ID NO: 1264016 - DNA, 25 bp, Homo sapien
gaattctacaggctgaggacgtgtg

SEQ ID NO: 1264017 - DNA, 25 bp, Homo sapien
catcaggtcccattgtggttgggtc

SEQ ID NO: 1264018 - DNA, 25 bp, Homo sapien
cggatgttcctagcgttgccggcca

SEQ ID NO: 1264019 - DNA, 25 bp, Homo sapien
gcaatgggagacaattgtctgctca

SEQ ID NO: 1264020 - DNA, 25 bp, Homo sapien
tggcaatgggagacaattgtctgct

SEQ ID NO: 1264021 - DNA, 25 bp, Homo sapien
ctggcaatgggagacaattgtctgc

SEQ ID NO: 1264022 - DNA, 25 bp, Homo sapien
caatgggagacaattgtctgctcag

SEQ ID NO: 1264023 - DNA, 25 bp, Homo sapien
gtggtcccgggtggccggctcctca

SEQ ID NO: 1264024 - DNA, 25 bp, Homo sapien
tctctgcctttggtggtcccgggtg

SEQ ID NO: 1264025 - DNA, 25 bp, Homo sapien
cctttcaagtgtctctgcctttggt

SEQ ID NO: 1264026 - DNA, 25 bp, Homo sapien
agtgtctctgcctttggtggtcccg

SEQ ID NO: 1264027 - DNA, 25 bp, Homo sapien
ggctgaaaccgaccccaggtgattc

SEQ ID NO: 1264028 - DNA, 25 bp, Homo sapien
ctgagtgggctgaaaccgaccccag

SEQ ID NO: 1264029 - DNA, 25 bp, Homo sapien
ggtgattcttattcggaagagatgt

SEQ ID NO: 1264030 - DNA, 25 bp, Homo sapien
aggtgattcttattcggaagagatg

SEQ ID NO: 1264031 - DNA, 25 bp, Homo sapien
gtgtcccctgctccaaccgactcac

SEQ ID NO: 1264032 - DNA, 25 bp, Homo sapien
ggtgtcccctgctccaaccgactca

SEQ ID NO: 1264033 - DNA, 25 bp, Homo sapien
tttccctgtagagccctcgcctgtg

SEQ ID NO: 1264034 - DNA, 25 bp, Homo sapien
gccctcgcctgtgtaacggttactg

SEQ ID NO: 1264035 - DNA, 25 bp, Homo sapien
accacagtgacgtatggtgtgttca

SEQ ID NO: 1264036 - DNA, 25 bp, Homo sapien
tcgtgtggggccatcgaggctcatc

SEQ ID NO: 1264037 - DNA, 25 bp, Homo sapien
ggtctctgtgcaccccccggtgaga

SEQ ID NO: 1264038 - DNA, 25 bp, Homo sapien
ctctgtgcaccccccggtgagagat

SEQ ID NO: 1264039 - DNA, 25 bp, Homo sapien
gtctctgtgcaccccccggtgagag

SEQ ID NO: 1264040 - DNA, 25 bp, Homo sapien
tctctgtgcaccccccggtgagaga

SEQ ID NO: 1264041 - DNA, 25 bp, Homo sapien
cccagttctgacagctaggaacggt

SEQ ID NO: 1264042 - DNA, 25 bp, Homo sapien
tgcggccctggcttgaggccttggt

SEQ ID NO: 1264043 - DNA, 25 bp, Homo sapien
acggtgcgagcagatggaggatgga

SEQ ID NO: 1264044 - DNA, 25 bp, Homo sapien
tgaggctgcgggtccctcgtgccct

SEQ ID NO: 1264045 - DNA, 25 bp, Homo sapien
tgctttctggtggtgtgcacacatc

SEQ ID NO: 1264046 - DNA, 25 bp, Homo sapien
catcttgggccagagtggtgtcccc

SEQ ID NO: 1264047 - DNA, 25 bp, Homo sapien
tgttggacccacgtgggagctgctt

SEQ ID NO: 1264048 - DNA, 25 bp, Homo sapien
tggtcgtcaggccacggatgcttgt

SEQ ID NO: 1264049 - DNA, 25 bp, Homo sapien
gtctggccttgtgcctagacttgtg

SEQ ID NO: 1264050 - DNA, 25 bp, Homo sapien
agacttgtggccgtcaccactatct

SEQ ID NO: 1264051 - DNA, 25 bp, Homo sapien
ctagacttgtggccgtcaccactat

SEQ ID NO: 1264052 - DNA, 25 bp, Homo sapien
ctggccttgtgcctagacttgtggc

SEQ ID NO: 1264053 - DNA, 25 bp, Homo sapien
aaagctgaatgatgacagccagtgt

SEQ ID NO: 1264054 - DNA, 25 bp, Homo sapien
gctgaatgatgacagccagtgtccc

SEQ ID NO: 1264055 - DNA, 25 bp, Homo sapien
caaaagctgaatgatgacagccagt

SEQ ID NO: 1264056 - DNA, 25 bp, Homo sapien
tgaatgatgacagccagtgtcccca

SEQ ID NO: 1264057 - DNA, 25 bp, Homo sapien
ggacgctccccattcttgctgcata

SEQ ID NO: 1264058 - DNA, 25 bp, Homo sapien
tagtcttctgttgaccccatgtacc

SEQ ID NO: 1264059 - DNA, 25 bp, Homo sapien
gctgcatagtcttctgttgacccca

SEQ ID NO: 1264060 - DNA, 25 bp, Homo sapien
gacgctccccattcttgctgcatag

SEQ ID NO: 1264061 - DNA, 25 bp, Homo sapien
gaggcacgtgctttgggtgttgcat

SEQ ID NO: 1264062 - DNA, 25 bp, Homo sapien
ctgagtagccacagcacactgtgca

SEQ ID NO: 1264063 - DNA, 25 bp, Homo sapien
gcctgggaggcacgtgctttgggtg

SEQ ID NO: 1264064 - DNA, 25 bp, Homo sapien
agcacactgtgcagttgggtgcctg

SEQ ID NO: 1264065 - DNA, 25 bp, Homo sapien
ggagcccgcggatggctcttatgca

SEQ ID NO: 1264066 - DNA, 25 bp, Homo sapien
cggatggctcttatgcagacgtgcg

SEQ ID NO: 1264067 - DNA, 25 bp, Homo sapien
gggccagccccgatcctgcttctgc

SEQ ID NO: 1264068 - DNA, 25 bp, Homo sapien
ggctcttatgcagacgtgcgggcca

SEQ ID NO: 1264069 - DNA, 25 bp, Homo sapien
tttatctagtgacaatgtgtgtgca

SEQ ID NO: 1264070 - DNA, 25 bp, Homo sapien
taagcattgagcaaggaagagtgtg

SEQ ID NO: 1264071 - DNA, 25 bp, Homo sapien
gattatttgcgactttaaccagaag

SEQ ID NO: 1264072 - DNA, 25 bp, Homo sapien
ctttggacagccagatgttattgtc

SEQ ID NO: 1264073 - DNA, 25 bp, Homo sapien
caggctagagcacaatcttgtgatc

SEQ ID NO: 1264074 - DNA, 25 bp, Homo sapien
cctttacctcccaggctgaggtgat

SEQ ID NO: 1264075 - DNA, 25 bp, Homo sapien
tgcccaggctagagcacaatcttgt

SEQ ID NO: 1264076 - DNA, 25 bp, Homo sapien
gctagagcacaatcttgtgatctgg

SEQ ID NO: 1264077 - DNA, 25 bp, Homo sapien
tcagcgggaattgattatgaacaaa

SEQ ID NO: 1264078 - DNA, 25 bp, Homo sapien
tgattatgaacaaagtgccatgatt

SEQ ID NO: 1264079 - DNA, 25 bp, Homo sapien
cgggaattgattatgaacaaagtgc

SEQ ID NO: 1264080 - DNA, 25 bp, Homo sapien
tatgaacaaagtgccatgattttga

SEQ ID NO: 1264081 - DNA, 25 bp, Homo sapien
ggttttgtaacaagcttggtgtcca

SEQ ID NO: 1264082 - DNA, 25 bp, Homo sapien
tggtgtccatatcgctcttaataac

SEQ ID NO: 1264083 - DNA, 25 bp, Homo sapien
tattcaggcgagcaactgcatcgag

SEQ ID NO: 1264084 - DNA, 25 bp, Homo sapien
gcaactgcatcgagccagcactgaa

SEQ ID NO: 1264085 - DNA, 25 bp, Homo sapien
tagcacgtaccactcagaattcagc

SEQ ID NO: 1264086 - DNA, 25 bp, Homo sapien
gcaggcacaggcgacgatagcagtt

SEQ ID NO: 1264087 - DNA, 25 bp, Homo sapien
caggcacaggcgacgatagcagttg

SEQ ID NO: 1264088 - DNA, 25 bp, Homo sapien
aggggggactagcacgtaccactca

SEQ ID NO: 1264089 - DNA, 25 bp, Homo sapien
cgggtccacggtcacacggtctcca

SEQ ID NO: 1264090 - DNA, 25 bp, Homo sapien
gacacgggtccacggtcacacggtc

SEQ ID NO: 1264091 - DNA, 25 bp, Homo sapien
cacgggtccacggtcacacggtctc

SEQ ID NO: 1264092 - DNA, 25 bp, Homo sapien
gtccacggtcacacggtctccaaat

SEQ ID NO: 1264093 - DNA, 25 bp, Homo sapien
cccaacagcactgcgtggagctggt

SEQ ID NO: 1264094 - DNA, 25 bp, Homo sapien
agcactgcgtggagctggtgcccac

SEQ ID NO: 1264095 - DNA, 25 bp, Homo sapien
tcccaacagcactgcgtggagctgg

SEQ ID NO: 1264096 - DNA, 25 bp, Homo sapien
tttgctgccctggagcgtcgctttg

SEQ ID NO: 1264097 - DNA, 25 bp, Homo sapien
cactagtggcgcctggttatcaggt

SEQ ID NO: 1264098 - DNA, 25 bp, Homo sapien
caactttggaatcgcctcatggctg

SEQ ID NO: 1264099 - DNA, 25 bp, Homo sapien
ggttgctgttaagccagccttgggc

SEQ ID NO: 1264100 - DNA, 25 bp, Homo sapien
tcaggctgccgatggatgagcctgc

SEQ ID NO: 1264101 - DNA, 25 bp, Homo sapien
ttggtggtgcctgccatcaggctgc

SEQ ID NO: 1264102 - DNA, 25 bp, Homo sapien
tgggtctggcgggtctggcatgttt

SEQ ID NO: 1264103 - DNA, 25 bp, Homo sapien
catgtttggtggtgcctgccatcag

SEQ ID NO: 1264104 - DNA, 25 bp, Homo sapien
atctgtctacgagctagagcaaggg

SEQ ID NO: 1264105 - DNA, 25 bp, Homo sapien
agaggtcatctgtctacgagctaga

SEQ ID NO: 1264106 - DNA, 25 bp, Homo sapien
ctgggttcggtcctggacctgctgc

SEQ ID NO: 1264107 - DNA, 25 bp, Homo sapien
gctggcgctgcgtctgggttcggtc

SEQ ID NO: 1264108 - DNA, 25 bp, Homo sapien
tttacgagaggtcaggcggtcacag

SEQ ID NO: 1264109 - DNA, 25 bp, Homo sapien
taatgggaggcctgtggttcctggg

SEQ ID NO: 1264110 - DNA, 25 bp, Homo sapien
taaaacgggcagtgtgcagtgttga

SEQ ID NO: 1264111 - DNA, 25 bp, Homo sapien
tgggctgccatctggcgattgtaaa

SEQ ID NO: 1264112 - DNA, 25 bp, Homo sapien
tgggtgtctgaacccaaggtgaaaa

SEQ ID NO: 1264113 - DNA, 25 bp, Homo sapien
gtgcctcccgggcagacacctcacg

SEQ ID NO: 1264114 - DNA, 25 bp, Homo sapien
agacacctcacggcctttctctggg

SEQ ID NO: 1264115 - DNA, 25 bp, Homo sapien
gtgaaaagttcaggctgtccctgct

SEQ ID NO: 1264116 - DNA, 25 bp, Homo sapien
ccaggggcttttgttcactgaagaa

SEQ ID NO: 1264117 - DNA, 25 bp, Homo sapien
gagtctgctcggtgggggagccgca

SEQ ID NO: 1264118 - DNA, 25 bp, Homo sapien
ctcagaagagtctgctcggtggggg

SEQ ID NO: 1264119 - DNA, 25 bp, Homo sapien
gatggctccaggggcttttgttcac

SEQ ID NO: 1264120 - DNA, 25 bp, Homo sapien
tgctctcgcccctcgggaacctttg

SEQ ID NO: 1264121 - DNA, 25 bp, Homo sapien
gccttttgtgctacgctgctctcgc

SEQ ID NO: 1264122 - DNA, 25 bp, Homo sapien
ccagacgctcgccttttgtgctacg

SEQ ID NO: 1264123 - DNA, 25 bp, Homo sapien
attgagccccgccattgcctggggc

SEQ ID NO: 1264124 - DNA, 25 bp, Homo sapien
gtctgttgccgaggggccaggagat

SEQ ID NO: 1264125 - DNA, 25 bp, Homo sapien
tgccgaggggccaggagattctgac

SEQ ID NO: 1264126 - DNA, 25 bp, Homo sapien
gtccaggtctgttgccgaggggcca

SEQ ID NO: 1264127 - DNA, 25 bp, Homo sapien
tccaggtctgttgccgaggggccag

SEQ ID NO: 1264128 - DNA, 25 bp, Homo sapien
tgggagagacactccgggccactgg

SEQ ID NO: 1264129 - DNA, 25 bp, Homo sapien
gattggctggtgatgcttccagaaa

SEQ ID NO: 1264130 - DNA, 25 bp, Homo sapien
attgtgcgatggccccagaggttga

SEQ ID NO: 1264131 - DNA, 25 bp, Homo sapien
actggctgctttctcgcagctgttc

SEQ ID NO: 1264132 - DNA, 25 bp, Homo sapien
ggggcactgagcggaggggcttggg

SEQ ID NO: 1264133 - DNA, 25 bp, Homo sapien
tcctccttcccactggcgccggaga

SEQ ID NO: 1264134 - DNA, 25 bp, Homo sapien
ctgggggtgtctgggccttggccat

SEQ ID NO: 1264135 - DNA, 25 bp, Homo sapien
agccccatgcttctcccggcccctc

SEQ ID NO: 1264136 - DNA, 25 bp, Homo sapien
tgctgccttctccaagccccatgct

SEQ ID NO: 1264137 - DNA, 25 bp, Homo sapien
tccctgtcctggccggccactcctc

SEQ ID NO: 1264138 - DNA, 25 bp, Homo sapien
ctttggtagtgggtgtggaaagaca

SEQ ID NO: 1264139 - DNA, 25 bp, Homo sapien
ctggccggccactcctccttcccgc

SEQ ID NO: 1264140 - DNA, 25 bp, Homo sapien
ttggtagtgggtgtggaaagacagc

SEQ ID NO: 1264141 - DNA, 25 bp, Homo sapien
agtgtgcgaccagagtgtggaccca

SEQ ID NO: 1264142 - DNA, 25 bp, Homo sapien
ggacctcgaagatgccccgtgggca

SEQ ID NO: 1264143 - DNA, 25 bp, Homo sapien
ccagcattgcaccaaagtgtgctcg

SEQ ID NO: 1264144 - DNA, 25 bp, Homo sapien
gaacatccacggagaagtgtgacga

SEQ ID NO: 1264145 - DNA, 25 bp, Homo sapien
tggctggaaggtgacggcatctccc

SEQ ID NO: 1264146 - DNA, 25 bp, Homo sapien
ccctggctggaaggtgacggcatct

SEQ ID NO: 1264147 - DNA, 25 bp, Homo sapien
gctggaaggtgacggcatctccctg

SEQ ID NO: 1264148 - DNA, 25 bp, Homo sapien
cctggctggaaggtgacggcatctc

SEQ ID NO: 1264149 - DNA, 25 bp, Homo sapien
aacagtgtcctggtcgccccagagg

SEQ ID NO: 1264150 - DNA, 25 bp, Homo sapien
acaacagtgtcctggtcgccccaga

SEQ ID NO: 1264151 - DNA, 25 bp, Homo sapien
cagtgtcctggtcgccccagaggca

SEQ ID NO: 1264152 - DNA, 25 bp, Homo sapien
ggatggcagccccacaacagtgtcc

SEQ ID NO: 1264153 - DNA, 25 bp, Homo sapien
tggagcctcatagcgggcagatact

SEQ ID NO: 1264154 - DNA, 25 bp, Homo sapien
gaccctaggagaatagcagccgtga

SEQ ID NO: 1264155 - DNA, 25 bp, Homo sapien
acaagacccttgtgagggtgggcac

SEQ ID NO: 1264156 - DNA, 25 bp, Homo sapien
gccatgagccatgacagttggttga

SEQ ID NO: 1264157 - DNA, 25 bp, Homo sapien
catgagaggagcttctagagatggt

SEQ ID NO: 1264158 - DNA, 25 bp, Homo sapien
cagctgaacaagctcgccctggaac

SEQ ID NO: 1264159 - DNA, 25 bp, Homo sapien
tggaaggaacatcgggcccctgaga

SEQ ID NO: 1264160 - DNA, 25 bp, Homo sapien
tcctggtctgattctgtcttggaag

SEQ ID NO: 1264161 - DNA, 25 bp, Homo sapien
tcctgattgctgtctttgcgtaact

SEQ ID NO: 1264162 - DNA, 25 bp, Homo sapien
tgcgtaacttaggaaccccgatgaa

SEQ ID NO: 1264163 - DNA, 25 bp, Homo sapien
tcctgattgctgagttcctgattgc

SEQ ID NO: 1264164 - DNA, 25 bp, Homo sapien
cactgtgagtatgtggccatcctct

SEQ ID NO: 1264165 - DNA, 25 bp, Homo sapien
gagataggtgtcatgcggcagttgg

SEQ ID NO: 1264166 - DNA, 25 bp, Homo sapien
tgatttcgtgtttgggccaccaggg

SEQ ID NO: 1264167 - DNA, 25 bp, Homo sapien
gccaccagggtatctggaggctggg

SEQ ID NO: 1264168 - DNA, 25 bp, Homo sapien
gtgtggccgtgtggacttgtcccca

SEQ ID NO: 1264169 - DNA, 25 bp, Homo sapien
cttgaaccgtgaaatcttcagagaa

SEQ ID NO: 1264170 - DNA, 25 bp, Homo sapien
gaaggcccatagctcacgtgagccg

SEQ ID NO: 1264171 - DNA, 25 bp, Homo sapien
atttcttgaaccgtgaaatcttcag

SEQ ID NO: 1264172 - DNA, 25 bp, Homo sapien
cacgtgagccgattcttgagtgagg

SEQ ID NO: 1264173 - DNA, 25 bp, Homo sapien
aggtggagaccccacctcgagagct

SEQ ID NO: 1264174 - DNA, 25 bp, Homo sapien
cagacgttcatcagggacctgctgt

SEQ ID NO: 1264175 - DNA, 25 bp, Homo sapien
ggtggagaccccacctcgagagctc

SEQ ID NO: 1264176 - DNA, 25 bp, Homo sapien
ctagcagacgttcatcagggacctg

SEQ ID NO: 1264177 - DNA, 25 bp, Homo sapien
ggggagccgtagcagtgtgggggca

SEQ ID NO: 1264178 - DNA, 25 bp, Homo sapien
ctggggagccgtagcagtgtggggg

SEQ ID NO: 1264179 - DNA, 25 bp, Homo sapien
tggggagccgtagcagtgtgggggc

SEQ ID NO: 1264180 - DNA, 25 bp, Homo sapien
tccttttcagatgcggtgcccacct

SEQ ID NO: 1264181 - DNA, 25 bp, Homo sapien
ggtccttttcagatgcggtgcccac

SEQ ID NO: 1264182 - DNA, 25 bp, Homo sapien
cttttcagatgcggtgcccacctgg

SEQ ID NO: 1264183 - DNA, 25 bp, Homo sapien
gtgcccacctgggtgtgtggacatg

SEQ ID NO: 1264184 - DNA, 25 bp, Homo sapien
tgggcctggaaggtccagccgaggg

SEQ ID NO: 1264185 - DNA, 25 bp, Homo sapien
cctggaaggtccagccgagggttgg

SEQ ID NO: 1264186 - DNA, 25 bp, Homo sapien
tggtgggatccaccggcgtggccct

SEQ ID NO: 1264187 - DNA, 25 bp, Homo sapien
catgttagacctgaggttcgtggtg

SEQ ID NO: 1264188 - DNA, 25 bp, Homo sapien
cgtgtttccgctgcccctgttcttg

SEQ ID NO: 1264189 - DNA, 25 bp, Homo sapien
tgctcgagcatctggtatctccctg

SEQ ID NO: 1264190 - DNA, 25 bp, Homo sapien
tcttctctggactgcgtttggatga

SEQ ID NO: 1264191 - DNA, 25 bp, Homo sapien
taagctgcgtgtcctcgtgtttccg

SEQ ID NO: 1264192 - DNA, 25 bp, Homo sapien
cttgaaactccgtgccaggtgagca

SEQ ID NO: 1264193 - DNA, 25 bp, Homo sapien
cccttccagtgcaggcggtggtcac

SEQ ID NO: 1264194 - DNA, 25 bp, Homo sapien
aggcggtggtcaccgcgccaccatg

SEQ ID NO: 1264195 - DNA, 25 bp, Homo sapien
atctgtcgtgggttctgggttgtcc

SEQ ID NO: 1264196 - DNA, 25 bp, Homo sapien
aggaagaagaccacgtcgtgccgtt

SEQ ID NO: 1264197 - DNA, 25 bp, Homo sapien
acgtcctccactgaacgtgggtcca

SEQ ID NO: 1264198 - DNA, 25 bp, Homo sapien
tcccttgagcccgttagctgtctcg

SEQ ID NO: 1264199 - DNA, 25 bp, Homo sapien
cagggccaccttgtcacgtcctcca

SEQ ID NO: 1264200 - DNA, 25 bp, Homo sapien
aggtgctggttgccagggatggcta

SEQ ID NO: 1264201 - DNA, 25 bp, Homo sapien
tgctggttgccagggatggctatgc

SEQ ID NO: 1264202 - DNA, 25 bp, Homo sapien
ctggttgccagggatggctatgcat

SEQ ID NO: 1264203 - DNA, 25 bp, Homo sapien
cttgcccagaagttgtgggaggtgc

SEQ ID NO: 1264204 - DNA, 25 bp, Homo sapien
tgaacagctgctaaagactcagacc

SEQ ID NO: 1264205 - DNA, 25 bp, Homo sapien
ggagctgcccctgcatgtcatggca

SEQ ID NO: 1264206 - DNA, 25 bp, Homo sapien
gtgtcctgtgtgtccacgcaggtgt

SEQ ID NO: 1264207 - DNA, 25 bp, Homo sapien
gtgtggcagccctgcgccaggagct

SEQ ID NO: 1264208 - DNA, 25 bp, Homo sapien
aggccgccacgttcctgctgtgaaa

SEQ ID NO: 1264209 - DNA, 25 bp, Homo sapien
agtctggactgaggccgccacgttc

SEQ ID NO: 1264210 - DNA, 25 bp, Homo sapien
cacttctgcgggggcgggagtctgg

SEQ ID NO: 1264211 - DNA, 25 bp, Homo sapien
gggcgggagtctggactgaggccgc

SEQ ID NO: 1264212 - DNA, 25 bp, Homo sapien
acagacggttcagtccgggaaatgg

SEQ ID NO: 1264213 - DNA, 25 bp, Homo sapien
cagacggttcagtccgggaaatggt

SEQ ID NO: 1264214 - DNA, 25 bp, Homo sapien
ctacagacggttcagtccgggaaat

SEQ ID NO: 1264215 - DNA, 25 bp, Homo sapien
tacagacggttcagtccgggaaatg

SEQ ID NO: 1264216 - DNA, 25 bp, Homo sapien
aaaatactgaatggaggtgccaggc

SEQ ID NO: 1264217 - DNA, 25 bp, Homo sapien
gaattggtggcctcccttgaaaata

SEQ ID NO: 1264218 - DNA, 25 bp, Homo sapien
ggctcttggtgtgggcataggccgt

SEQ ID NO: 1264219 - DNA, 25 bp, Homo sapien
ctgcaggtgagaattggtggcctcc

SEQ ID NO: 1264220 - DNA, 25 bp, Homo sapien
tcttggtgcctacaacatctgcgcc

SEQ ID NO: 1264221 - DNA, 25 bp, Homo sapien
gatctcctcggaacccagattgtgg

SEQ ID NO: 1264222 - DNA, 25 bp, Homo sapien
cagattgtgggcgatcctgccgctc

SEQ ID NO: 1264223 - DNA, 25 bp, Homo sapien
tcttgggaatgtcagaacaccagca

SEQ ID NO: 1264224 - DNA, 25 bp, Homo sapien
atctgcgtctgcaggacttcccggc

SEQ ID NO: 1264225 - DNA, 25 bp, Homo sapien
agcatctgcgtctgcaggacttccc

SEQ ID NO: 1264226 - DNA, 25 bp, Homo sapien
gtctgcaggacttcccggcccttgg

SEQ ID NO: 1264227 - DNA, 25 bp, Homo sapien
cttggccgcacatttccctccagtt

SEQ ID NO: 1264228 - DNA, 25 bp, Homo sapien
cagctgtgcctggttgcggatgctg

SEQ ID NO: 1264229 - DNA, 25 bp, Homo sapien
agctgtgcctggttgcggatgctgc

SEQ ID NO: 1264230 - DNA, 25 bp, Homo sapien
gcagctgtgcctggttgcggatgct

SEQ ID NO: 1264231 - DNA, 25 bp, Homo sapien
ggaggcgtgggcccgcccggtgtgc

SEQ ID NO: 1264232 - DNA, 25 bp, Homo sapien
ccgcccggtgtgcatgggcaggtct

SEQ ID NO: 1264233 - DNA, 25 bp, Homo sapien
catggcgcatgcattcccctggagg

SEQ ID NO: 1264234 - DNA, 25 bp, Homo sapien
ggccactcccatggcgcatgcattc

SEQ ID NO: 1264235 - DNA, 25 bp, Homo sapien
tgcctgctggccaggtagcttgcct

SEQ ID NO: 1264236 - DNA, 25 bp, Homo sapien
cagcgcggtgtgtcgtctggcctcc

SEQ ID NO: 1264237 - DNA, 25 bp, Homo sapien
gcagccccttgcaggcctatccagg

SEQ ID NO: 1264238 - DNA, 25 bp, Homo sapien
tctggcctccgctgtgtaagctgac

SEQ ID NO: 1264239 - DNA, 25 bp, Homo sapien
tattttttcagcgacaaggacccag

SEQ ID NO: 1264240 - DNA, 25 bp, Homo sapien
atctgcccgcggctgcgtgaggaca

SEQ ID NO: 1264241 - DNA, 25 bp, Homo sapien
gccatctgaagacccgcaacggagt

SEQ ID NO: 1264242 - DNA, 25 bp, Homo sapien
tgcgagatgagctcgaacactgccc

SEQ ID NO: 1264243 - DNA, 25 bp, Homo sapien
gtccccacgggtaccaggaagtgca

SEQ ID NO: 1264244 - DNA, 25 bp, Homo sapien
ggggacggtcttcggctcctctgca

SEQ ID NO: 1264245 - DNA, 25 bp, Homo sapien
agtgcagagccgcacaggagctgcc

SEQ ID NO: 1264246 - DNA, 25 bp, Homo sapien
tctgcaccccgtgattctgcccacg

SEQ ID NO: 1264247 - DNA, 25 bp, Homo sapien
tccgggcacacgtgccgcctgaccg

SEQ ID NO: 1264248 - DNA, 25 bp, Homo sapien
ttttcagttcggcaaacgtcgctcc

SEQ ID NO: 1264249 - DNA, 25 bp, Homo sapien
gcaaacgtcgctcccttcattttgg

SEQ ID NO: 1264250 - DNA, 25 bp, Homo sapien
tgcgtcgggtggtgaccgtggctgg

SEQ ID NO: 1264251 - DNA, 25 bp, Homo sapien
taaacgtatatttagaactgcactt

SEQ ID NO: 1264252 - DNA, 25 bp, Homo sapien
tcatttaaacgtatatttagaactg

SEQ ID NO: 1264253 - DNA, 25 bp, Homo sapien
tcgttcatttaaacgtatatttaga

SEQ ID NO: 1264254 - DNA, 25 bp, Homo sapien
tttaaacgtatatttagaactgcac

SEQ ID NO: 1264255 - DNA, 25 bp, Homo sapien
gacgagcaaagaccagagactgctg

SEQ ID NO: 1264256 - DNA, 25 bp, Homo sapien
agctgcacgcgctcacagaaggtgg

SEQ ID NO: 1264257 - DNA, 25 bp, Homo sapien
ttgaatccgttctaacacccgcggc

SEQ ID NO: 1264258 - DNA, 25 bp, Homo sapien
aggttacttgcccaggtacagacga

SEQ ID NO: 1264259 - DNA, 25 bp, Homo sapien
gccaggtcgaagatcacagtgaggt

SEQ ID NO: 1264260 - DNA, 25 bp, Homo sapien
tccgtcagcgggcattattaccgtg

SEQ ID NO: 1264261 - DNA, 25 bp, Homo sapien
tctgccgtaggtagatccgtcagcg

SEQ ID NO: 1264262 - DNA, 25 bp, Homo sapien
gaaagcgctgtatctgcagtggcag

SEQ ID NO: 1264263 - DNA, 25 bp, Homo sapien
tccagggagatgttcgttctcgctt

SEQ ID NO: 1264264 - DNA, 25 bp, Homo sapien
cacgctgctgctaacgacagtatga

SEQ ID NO: 1264265 - DNA, 25 bp, Homo sapien
gtcaggagtcacaaatgactttttt

SEQ ID NO: 1264266 - DNA, 25 bp, Homo sapien
gcttactctgctactcggaaactat

SEQ ID NO: 1264267 - DNA, 25 bp, Homo sapien
aaccaggattgggtgccatccagat

SEQ ID NO: 1264268 - DNA, 25 bp, Homo sapien
taggtataggggtgccaagtgccca

SEQ ID NO: 1264269 - DNA, 25 bp, Homo sapien
cagaaaccaggattgggtgccatcc

SEQ ID NO: 1264270 - DNA, 25 bp, Homo sapien
gcccagaaaccaggattgggtgcca

SEQ ID NO: 1264271 - DNA, 25 bp, Homo sapien
caggacagaaaacccgcagtggggc

SEQ ID NO: 1264272 - DNA, 25 bp, Homo sapien
aagtctgcggggtcactgctgcgca

SEQ ID NO: 1264273 - DNA, 25 bp, Homo sapien
aggaactacccaggaattccagcgc

SEQ ID NO: 1264274 - DNA, 25 bp, Homo sapien
ggcatccggggaaatcctgtttctg

SEQ ID NO: 1264275 - DNA, 25 bp, Homo sapien
cccgggggcggctggtccgagcagc

SEQ ID NO: 1264276 - DNA, 25 bp, Homo sapien
gccccccagattcgcggccagcgct

SEQ ID NO: 1264277 - DNA, 25 bp, Homo sapien
ggcggcgccccccagattcgcggcc

SEQ ID NO: 1264278 - DNA, 25 bp, Homo sapien
gcccgggggcggctggtccgagcag

SEQ ID NO: 1264279 - DNA, 25 bp, Homo sapien
tcagacggtcacgtggcatggccac

SEQ ID NO: 1264280 - DNA, 25 bp, Homo sapien
cagacggtcacgtggcatggccacc

SEQ ID NO: 1264281 - DNA, 25 bp, Homo sapien
agacggtcacgtggcatggccaccc

SEQ ID NO: 1264282 - DNA, 25 bp, Homo sapien
gcggcagcaagtctgtccactcact

SEQ ID NO: 1264283 - DNA, 25 bp, Homo sapien
ggctcggcactcagggactggttct

SEQ ID NO: 1264284 - DNA, 25 bp, Homo sapien
tgaggccccagtgccgggtgtgagg

SEQ ID NO: 1264285 - DNA, 25 bp, Homo sapien
tcagcgcagggacgctgctcggcgg

SEQ ID NO: 1264286 - DNA, 25 bp, Homo sapien
tgaagtgaaaaacagctacagagca

SEQ ID NO: 1264287 - DNA, 25 bp, Homo sapien
tcttctgacacaaatgtggtttcat

SEQ ID NO: 1264288 - DNA, 25 bp, Homo sapien
acgcagcgatcagggtcagcgtgac

SEQ ID NO: 1264289 - DNA, 25 bp, Homo sapien
cagcgtgacgcggtggtatctgtcc

SEQ ID NO: 1264290 - DNA, 25 bp, Homo sapien
gcctcccctccgacgggcgtagcca

SEQ ID NO: 1264291 - DNA, 25 bp, Homo sapien
gtcagaaccgccaggcgctcacggg

SEQ ID NO: 1264292 - DNA, 25 bp, Homo sapien
cctggccgatgtctgcctggcctcc

SEQ ID NO: 1264293 - DNA, 25 bp, Homo sapien
catggctgtgatgaagccgccctgg

SEQ ID NO: 1264294 - DNA, 25 bp, Homo sapien
ccttgctgtctggaatggatgcctg

SEQ ID NO: 1264295 - DNA, 25 bp, Homo sapien
aggaagggtcccctcgctgcagctc

SEQ ID NO: 1264296 - DNA, 25 bp, Homo sapien
tgcactcggcctcccagtggcagag

SEQ ID NO: 1264297 - DNA, 25 bp, Homo sapien
ctccaaggatgggggactcggcacc

SEQ ID NO: 1264298 - DNA, 25 bp, Homo sapien
ccccagggctgcaaacggtggtctt

SEQ ID NO: 1264299 - DNA, 25 bp, Homo sapien
cgtggagcatcccagcttctgggtg

SEQ ID NO: 1264300 - DNA, 25 bp, Homo sapien
ccgcaacgcaaggaggtcggtgcta

SEQ ID NO: 1264301 - DNA, 25 bp, Homo sapien
gttcctgcactgctgtgaacgcagc

SEQ ID NO: 1264302 - DNA, 25 bp, Homo sapien
aatcggggagcagagtcacgcaagc

SEQ ID NO: 1264303 - DNA, 25 bp, Homo sapien
ccttccattcacaccgaggtggcct

SEQ ID NO: 1264304 - DNA, 25 bp, Homo sapien
cattcacaccgaggtggcctcctgt

SEQ ID NO: 1264305 - DNA, 25 bp, Homo sapien
agagtcacgcaagcagaggcagcgt

SEQ ID NO: 1264306 - DNA, 25 bp, Homo sapien
agctgcttgaggcttcagggccttc

SEQ ID NO: 1264307 - DNA, 25 bp, Homo sapien
ctctggggtgcagctgtgggcggcc

SEQ ID NO: 1264308 - DNA, 25 bp, Homo sapien
gctgtgggcggcctgccagctgctt

SEQ ID NO: 1264309 - DNA, 25 bp, Homo sapien
tgggcggcctgccagctgcttgagg

SEQ ID NO: 1264310 - DNA, 25 bp, Homo sapien
tacgacccgcaggtgtttgaaggcc

SEQ ID NO: 1264311 - DNA, 25 bp, Homo sapien
tcgcggatcatgagcacgtactccc

SEQ ID NO: 1264312 - DNA, 25 bp, Homo sapien
ggtcacgtcgcggatcatgagcacg

SEQ ID NO: 1264313 - DNA, 25 bp, Homo sapien
ctcttcgctacgacccgcaggtgtt

SEQ ID NO: 1264314 - DNA, 25 bp, Homo sapien
taattcattccctccataaactgtt

SEQ ID NO: 1264315 - DNA, 25 bp, Homo sapien
aaaggaaaccacctctgacctcagg

SEQ ID NO: 1264316 - DNA, 25 bp, Homo sapien
atggacacgaccctcgcatggtggc

SEQ ID NO: 1264317 - DNA, 25 bp, Homo sapien
cagcataggtgaataaactaatttg

SEQ ID NO: 1264318 - DNA, 25 bp, Homo sapien
caacattccagacgccggcctggaa

SEQ ID NO: 1264319 - DNA, 25 bp, Homo sapien
tggaaaacagcgctcccctcgcaga

SEQ ID NO: 1264320 - DNA, 25 bp, Homo sapien
gaggaatgtgcttggccccgagtca

SEQ ID NO: 1264321 - DNA, 25 bp, Homo sapien
ggctcacaccgcaaggcagagcaac

SEQ ID NO: 1264322 - DNA, 25 bp, Homo sapien
gggccacagcaccgggcaccgggga

SEQ ID NO: 1264323 - DNA, 25 bp, Homo sapien
ctgcaacctggcgggtgtgggccac

SEQ ID NO: 1264324 - DNA, 25 bp, Homo sapien
gcaacctggcgggtgtgggccacag

SEQ ID NO: 1264325 - DNA, 25 bp, Homo sapien
gtgggccacagcaccgggcaccggg

SEQ ID NO: 1264326 - DNA, 25 bp, Homo sapien
ttgttctcccgctgcgccagaggca

SEQ ID NO: 1264327 - DNA, 25 bp, Homo sapien
gtgccgtccccacgaccagggtggc

SEQ ID NO: 1264328 - DNA, 25 bp, Homo sapien
gagacaccagacgaagggtcattca

SEQ ID NO: 1264329 - DNA, 25 bp, Homo sapien
accccagtgagcagcgggtccagac

SEQ ID NO: 1264330 - DNA, 25 bp, Homo sapien
cagagaggctccattctccgtcagg

SEQ ID NO: 1264331 - DNA, 25 bp, Homo sapien
gacagagaggctccattctccgtca

SEQ ID NO: 1264332 - DNA, 25 bp, Homo sapien
agaggctccattctccgtcaggcag

SEQ ID NO: 1264333 - DNA, 25 bp, Homo sapien
gccagtcagccgcggtgcccaggtc

SEQ ID NO: 1264334 - DNA, 25 bp, Homo sapien
gtgtcggcccagcttcaaatctttc

SEQ ID NO: 1264335 - DNA, 25 bp, Homo sapien
cattcggcccctctggcttggtggg

SEQ ID NO: 1264336 - DNA, 25 bp, Homo sapien
tgctaggggtccgagcctttgtgta

SEQ ID NO: 1264337 - DNA, 25 bp, Homo sapien
taggacattccccacatcaagggct

SEQ ID NO: 1264338 - DNA, 25 bp, Homo sapien
tgctcctccgtggctctcccctcag

SEQ ID NO: 1264339 - DNA, 25 bp, Homo sapien
ctcctccgtggctctcccctcaggc

SEQ ID NO: 1264340 - DNA, 25 bp, Homo sapien
gctgccgcagcctgctcctccgtgg

SEQ ID NO: 1264341 - DNA, 25 bp, Homo sapien
ctaggtgtgctgccgcagcctgctc

SEQ ID NO: 1264342 - DNA, 25 bp, Homo sapien
ctgccagcctaagagaaaggaggca

SEQ ID NO: 1264343 - DNA, 25 bp, Homo sapien
ggagaacaggctttgccggacccca

SEQ ID NO: 1264344 - DNA, 25 bp, Homo sapien
caggacccacgtaagacacaggagt

SEQ ID NO: 1264345 - DNA, 25 bp, Homo sapien
gcaccgagaagaactagtctgccag

SEQ ID NO: 1264346 - DNA, 25 bp, Homo sapien
tggcatcggcctggcagtctcggcc

SEQ ID NO: 1264347 - DNA, 25 bp, Homo sapien
accgcgcagacacatcctgctccct

SEQ ID NO: 1264348 - DNA, 25 bp, Homo sapien
tctggaggccccagtaagtccgcac

SEQ ID NO: 1264349 - DNA, 25 bp, Homo sapien
gccatgacggccctggcaccggctg

SEQ ID NO: 1264350 - DNA, 25 bp, Homo sapien
ccattgtcctgggagttctcatccc

SEQ ID NO: 1264351 - DNA, 25 bp, Homo sapien
ttgtcctgggagttctcatccctgg

SEQ ID NO: 1264352 - DNA, 25 bp, Homo sapien
cctgcagccgatcccattgtcctgg

SEQ ID NO: 1264353 - DNA, 25 bp, Homo sapien
tgtcctgggagttctcatccctggg

SEQ ID NO: 1264354 - DNA, 25 bp, Homo sapien
agggcaccggcgtcccccagtggat

SEQ ID NO: 1264355 - DNA, 25 bp, Homo sapien
ctgagaggagctcctgttgtgcagc

SEQ ID NO: 1264356 - DNA, 25 bp, Homo sapien
tgagaggagctcctgttgtgcagct

SEQ ID NO: 1264357 - DNA, 25 bp, Homo sapien
ctgagggcaccggcgtcccccagtg

SEQ ID NO: 1264358 - DNA, 25 bp, Homo sapien
tgtcttgacatcgaccccacgcagg

SEQ ID NO: 1264359 - DNA, 25 bp, Homo sapien
ggcagttctgtcttgacatcgaccc

SEQ ID NO: 1264360 - DNA, 25 bp, Homo sapien
gttctgtcttgacatcgaccccacg

SEQ ID NO: 1264361 - DNA, 25 bp, Homo sapien
tgtccccctcggcagttctgtcttg

SEQ ID NO: 1264362 - DNA, 25 bp, Homo sapien
acactgcagaatctcgtctgtgcct

SEQ ID NO: 1264363 - DNA, 25 bp, Homo sapien
cagccaggagaaccctttgttagct

SEQ ID NO: 1264364 - DNA, 25 bp, Homo sapien
tggtctcctgttgtccacactgcag

SEQ ID NO: 1264365 - DNA, 25 bp, Homo sapien
cctcgagatttggagcagccaggag

SEQ ID NO: 1264366 - DNA, 25 bp, Homo sapien
agcagccgggtcagccccgggccca

SEQ ID NO: 1264367 - DNA, 25 bp, Homo sapien
caggaccgtgccagggtaggggcca

SEQ ID NO: 1264368 - DNA, 25 bp, Homo sapien
aagggggtccccagcgatggcaact

SEQ ID NO: 1264369 - DNA, 25 bp, Homo sapien
ggcctggagacgctggaacaataca

SEQ ID NO: 1264370 - DNA, 25 bp, Homo sapien
cacgacacagcgagggttccttgaa

SEQ ID NO: 1264371 - DNA, 25 bp, Homo sapien
cacagcgagggttccttgaatgcaa

SEQ ID NO: 1264372 - DNA, 25 bp, Homo sapien
gacacagcgagggttccttgaatgc

SEQ ID NO: 1264373 - DNA, 25 bp, Homo sapien
cagcgagggttccttgaatgcaaac

SEQ ID NO: 1264374 - DNA, 25 bp, Homo sapien
acacagccgactgagtgttggaggc

SEQ ID NO: 1264375 - DNA, 25 bp, Homo sapien
agaattccgaaaagtgggctctttg

SEQ ID NO: 1264376 - DNA, 25 bp, Homo sapien
cagagccaggtctggacgctggttg

SEQ ID NO: 1264377 - DNA, 25 bp, Homo sapien
tcttagaattccgaaaagtgggctc

SEQ ID NO: 1264378 - DNA, 25 bp, Homo sapien
tgcatgggagaccccagagcttctt

SEQ ID NO: 1264379 - DNA, 25 bp, Homo sapien
cacaaacacccagatgggttgtggg

SEQ ID NO: 1264380 - DNA, 25 bp, Homo sapien
tcgtgaggtcgacgccccggtcagc

SEQ ID NO: 1264381 - DNA, 25 bp, Homo sapien
cagcaggtgtaagaacggtaaggga

SEQ ID NO: 1264382 - DNA, 25 bp, Homo sapien
gcacccagaagacgtagtaaggcca

SEQ ID NO: 1264383 - DNA, 25 bp, Homo sapien
gagagttcccgatgggaaagactcc

SEQ ID NO: 1264384 - DNA, 25 bp, Homo sapien
cagggtttccgcacccagaagacgt

SEQ ID NO: 1264385 - DNA, 25 bp, Homo sapien
ggagagttcccgatgggaaagactc

SEQ ID NO: 1264386 - DNA, 25 bp, Homo sapien
tcccaacacgacgagagggccctgg

SEQ ID NO: 1264387 - DNA, 25 bp, Homo sapien
tgtcccaacacgacgagagggccct

SEQ ID NO: 1264388 - DNA, 25 bp, Homo sapien
ggctgcctgtcccaacacgacgaga

SEQ ID NO: 1264389 - DNA, 25 bp, Homo sapien
gcctgtcccaacacgacgagagggc

SEQ ID NO: 1264390 - DNA, 25 bp, Homo sapien
cctggggtgcaggccgcctctggat

SEQ ID NO: 1264391 - DNA, 25 bp, Homo sapien
cgcctctggatctgccgcctgcctt

SEQ ID NO: 1264392 - DNA, 25 bp, Homo sapien
ctcctgtgccgtgggtggtgtcccc

SEQ ID NO: 1264393 - DNA, 25 bp, Homo sapien
tccaggaggctcctgtgccgtgggt

SEQ ID NO: 1264394 - DNA, 25 bp, Homo sapien
atctgtgaactcggcacagccctgc

SEQ ID NO: 1264395 - DNA, 25 bp, Homo sapien
tctgtgaactcggcacagccctgct

SEQ ID NO: 1264396 - DNA, 25 bp, Homo sapien
catctgtgaactcggcacagccctg

SEQ ID NO: 1264397 - DNA, 25 bp, Homo sapien
ccgggacaatggggcgcatgtcccc

SEQ ID NO: 1264398 - DNA, 25 bp, Homo sapien
cccgggacaatggggcgcatgtccc

SEQ ID NO: 1264399 - DNA, 25 bp, Homo sapien
cgggacaatggggcgcatgtcccct

SEQ ID NO: 1264400 - DNA, 25 bp, Homo sapien
ggacaatggggcgcatgtcccctgg

SEQ ID NO: 1264401 - DNA, 25 bp, Homo sapien
ccacgttcctacgagcagctcggag

SEQ ID NO: 1264402 - DNA, 25 bp, Homo sapien
agggctggaggtcggcaccagagct

SEQ ID NO: 1264403 - DNA, 25 bp, Homo sapien
agctcggagctgtcctgacaccgct

SEQ ID NO: 1264404 - DNA, 25 bp, Homo sapien
acttgcacacaccactgggaggagg

SEQ ID NO: 1264405 - DNA, 25 bp, Homo sapien
cagagtaaaggctgtcgtgactgtc

SEQ ID NO: 1264406 - DNA, 25 bp, Homo sapien
ggctcagccaggtaaagggagccct

SEQ ID NO: 1264407 - DNA, 25 bp, Homo sapien
gctcagccaggtaaagggagccctc

SEQ ID NO: 1264408 - DNA, 25 bp, Homo sapien
taaaggctgtcgtgactgtccctgg

SEQ ID NO: 1264409 - DNA, 25 bp, Homo sapien
gccacgacgggccaccacacaggac

SEQ ID NO: 1264410 - DNA, 25 bp, Homo sapien
ccacgacgggccaccacacaggaca

SEQ ID NO: 1264411 - DNA, 25 bp, Homo sapien
aggccacgacgggccaccacacagg

SEQ ID NO: 1264412 - DNA, 25 bp, Homo sapien
cacgacgggccaccacacaggacac

SEQ ID NO: 1264413 - DNA, 25 bp, Homo sapien
gatgagggccgccatacaggctgcc

SEQ ID NO: 1264414 - DNA, 25 bp, Homo sapien
aggccaccacgcagggcacgatgag

SEQ ID NO: 1264415 - DNA, 25 bp, Homo sapien
gcacgatgagggccgccatacaggc

SEQ ID NO: 1264416 - DNA, 25 bp, Homo sapien
acgatgagggccgccatacaggctg

SEQ ID NO: 1264417 - DNA, 25 bp, Homo sapien
ggctgccacacaggctaccatacaa

SEQ ID NO: 1264418 - DNA, 25 bp, Homo sapien
tgaggctgccacacaggctaccata

SEQ ID NO: 1264419 - DNA, 25 bp, Homo sapien
cagacggccacataggccatggcaa

SEQ ID NO: 1264420 - DNA, 25 bp, Homo sapien
tacaaaggccacgacctgtggccgc

SEQ ID NO: 1264421 - DNA, 25 bp, Homo sapien
ggatgctgcccgaatcaacaaggct

SEQ ID NO: 1264422 - DNA, 25 bp, Homo sapien
aatcaacaaggctgctcgggccagg

SEQ ID NO: 1264423 - DNA, 25 bp, Homo sapien
ctgtgtagggcaccaggcagcaggc

SEQ ID NO: 1264424 - DNA, 25 bp, Homo sapien
agccccaagaatagccgcggcaggc

SEQ ID NO: 1264425 - DNA, 25 bp, Homo sapien
taaagctgccaagacaggactgctc

SEQ ID NO: 1264426 - DNA, 25 bp, Homo sapien
tgtctgtgtagctgccagagccgct

SEQ ID NO: 1264427 - DNA, 25 bp, Homo sapien
aggagccccccacaaagctgtctgt

SEQ ID NO: 1264428 - DNA, 25 bp, Homo sapien
tgcgggcacctctgctggtaaagct

SEQ ID NO: 1264429 - DNA, 25 bp, Homo sapien
ccgggccctggggatgacgctgcgg

SEQ ID NO: 1264430 - DNA, 25 bp, Homo sapien
gggccaggcgggtgccgttccagcc

SEQ ID NO: 1264431 - DNA, 25 bp, Homo sapien
aggcgggtgccgttccagccaggcg

SEQ ID NO: 1264432 - DNA, 25 bp, Homo sapien
gccgttccagccaggcgggtgtggg

SEQ ID NO: 1264433 - DNA, 25 bp, Homo sapien
cctggccaaggtccggggctccctg

SEQ ID NO: 1264434 - DNA, 25 bp, Homo sapien
cctcgaggactgagactcgggcctg

SEQ ID NO: 1264435 - DNA, 25 bp, Homo sapien
gcccctcgaggactgagactcgggc

SEQ ID NO: 1264436 - DNA, 25 bp, Homo sapien
tggccaaggtccggggctccctgcg

SEQ ID NO: 1264437 - DNA, 25 bp, Homo sapien
ccactgcattcccacgagctgttct

SEQ ID NO: 1264438 - DNA, 25 bp, Homo sapien
cactgcattcccacgagctgttctg

SEQ ID NO: 1264439 - DNA, 25 bp, Homo sapien
actgcattcccacgagctgttctga

SEQ ID NO: 1264440 - DNA, 25 bp, Homo sapien
gtgcggcgagctggctccgagcgtc

SEQ ID NO: 1264441 - DNA, 25 bp, Homo sapien
gttgagacatggttctgaagccagg

SEQ ID NO: 1264442 - DNA, 25 bp, Homo sapien
cagaagctccggtgagcacactcga

SEQ ID NO: 1264443 - DNA, 25 bp, Homo sapien
cacactcgacaaggtggtgcggcga

SEQ ID NO: 1264444 - DNA, 25 bp, Homo sapien
aaggcccagcgaccaggagcatgtg

SEQ ID NO: 1264445 - DNA, 25 bp, Homo sapien
aggctctacgagccacaacagctgc

SEQ ID NO: 1264446 - DNA, 25 bp, Homo sapien
agcagcaaatgccaagtccccgaat

SEQ ID NO: 1264447 - DNA, 25 bp, Homo sapien
aatgcagaattctgccagagggagc

SEQ ID NO: 1264448 - DNA, 25 bp, Homo sapien
caaatgccaagtccccgaatgcaga

SEQ ID NO: 1264449 - DNA, 25 bp, Homo sapien
gcacaaagcgagagcatcaaagaca

SEQ ID NO: 1264450 - DNA, 25 bp, Homo sapien
ctgttggcacaaagcgagagcatca

SEQ ID NO: 1264451 - DNA, 25 bp, Homo sapien
aaagacagcgtcagcccccgcgagg

SEQ ID NO: 1264452 - DNA, 25 bp, Homo sapien
tggcacaaagcgagagcatcaaaga

SEQ ID NO: 1264453 - DNA, 25 bp, Homo sapien
ctgaaaacggcgtcagcctccggga

SEQ ID NO: 1264454 - DNA, 25 bp, Homo sapien
gctctacgctcatggatggccacat

SEQ ID NO: 1264455 - DNA, 25 bp, Homo sapien
tagatgaccatatgtgccccgaaga

SEQ ID NO: 1264456 - DNA, 25 bp, Homo sapien
gagggtccacgcgtgctcacgctct

SEQ ID NO: 1264457 - DNA, 25 bp, Homo sapien
gtctcctcgaggaacagaaactgtg

SEQ ID NO: 1264458 - DNA, 25 bp, Homo sapien
agccaagctcacgccagcagagtca

SEQ ID NO: 1264459 - DNA, 25 bp, Homo sapien
ccagcagagtcactgttcacaggcc

SEQ ID NO: 1264460 - DNA, 25 bp, Homo sapien
tagccggcaacataggggctctgtg

SEQ ID NO: 1264461 - DNA, 25 bp, Homo sapien
ctgttcagaggctgcgactgtgtgc

SEQ ID NO: 1264462 - DNA, 25 bp, Homo sapien
gcgactgtgtgccagtgccaaagcg

SEQ ID NO: 1264463 - DNA, 25 bp, Homo sapien
gaggtggtttcccacttagagtggc

SEQ ID NO: 1264464 - DNA, 25 bp, Homo sapien
tggtttcccacttagagtggcaggg

SEQ ID NO: 1264465 - DNA, 25 bp, Homo sapien
cccgaagcagggtatggggcactcc

SEQ ID NO: 1264466 - DNA, 25 bp, Homo sapien
ccgaagcagggtatggggcactcca

SEQ ID NO: 1264467 - DNA, 25 bp, Homo sapien
gggaggaggatcccgagtggctgag

SEQ ID NO: 1264468 - DNA, 25 bp, Homo sapien
agggaggaggatcccgagtggctga

SEQ ID NO: 1264469 - DNA, 25 bp, Homo sapien
ccagtgatgtccctcgcaggaagga

SEQ ID NO: 1264470 - DNA, 25 bp, Homo sapien
ggttcttttcagacgcgcacctggg

SEQ ID NO: 1264471 - DNA, 25 bp, Homo sapien
cccgggttacgcatctttggcagga

SEQ ID NO: 1264472 - DNA, 25 bp, Homo sapien
catggtcctggcgtcttcgaagctt

SEQ ID NO: 1264473 - DNA, 25 bp, Homo sapien
tgtaagagaaaccactcagatccgt

SEQ ID NO: 1264474 - DNA, 25 bp, Homo sapien
gggacagtccctctatatgatgtga

SEQ ID NO: 1264475 - DNA, 25 bp, Homo sapien
ttaaagctgttatcaccccacgagg

SEQ ID NO: 1264476 - DNA, 25 bp, Homo sapien
cacattcagacacttttacgggcaa

SEQ ID NO: 1264477 - DNA, 25 bp, Homo sapien
aaatctgggtgctgtaatttaacca

SEQ ID NO: 1264478 - DNA, 25 bp, Homo sapien
tatctggcaatagtccatgtcttgg

SEQ ID NO: 1264479 - DNA, 25 bp, Homo sapien
cacaaaagggttctgcactgcaagc

SEQ ID NO: 1264480 - DNA, 25 bp, Homo sapien
caaaatagggtttagaatatctggc

SEQ ID NO: 1264481 - DNA, 25 bp, Homo sapien
tgactcatgtccgtgctctctcgaa

SEQ ID NO: 1264482 - DNA, 25 bp, Homo sapien
cagaacacgctgagacattggcaat

SEQ ID NO: 1264483 - DNA, 25 bp, Homo sapien
ccacggtgaggcctgttggctgtcc

SEQ ID NO: 1264484 - DNA, 25 bp, Homo sapien
caattgctttaaaacgtgaggcggt

SEQ ID NO: 1264485 - DNA, 25 bp, Homo sapien
aaatggagggtgagactacaggctg

SEQ ID NO: 1264486 - DNA, 25 bp, Homo sapien
cttttgctgcaaaagcggcagactt

SEQ ID NO: 1264487 - DNA, 25 bp, Homo sapien
acttagagtctcgtggaaatggagg

SEQ ID NO: 1264488 - DNA, 25 bp, Homo sapien
tacaggctgtttcggggtcacagca

SEQ ID NO: 1264489 - DNA, 25 bp, Homo sapien
cgtgacgggctatttggcaaagaca

SEQ ID NO: 1264490 - DNA, 25 bp, Homo sapien
tccggtaagagtctttgccagcaca

SEQ ID NO: 1264491 - DNA, 25 bp, Homo sapien
tctctgggactttcgagtcggttgg

SEQ ID NO: 1264492 - DNA, 25 bp, Homo sapien
tgtggccgggccgtgtaaccaagct

SEQ ID NO: 1264493 - DNA, 25 bp, Homo sapien
gactcggccatcttgtaggatacgt

SEQ ID NO: 1264494 - DNA, 25 bp, Homo sapien
tctgtggtccgtgtgtggcagcatc

SEQ ID NO: 1264495 - DNA, 25 bp, Homo sapien
tccacagttaaacttggagcttctg

SEQ ID NO: 1264496 - DNA, 25 bp, Homo sapien
taggatacgtctcattctgtggtcc

SEQ ID NO: 1264497 - DNA, 25 bp, Homo sapien
ctgctcgagggacaccagtaggcat

SEQ ID NO: 1264498 - DNA, 25 bp, Homo sapien
gacctggagcttccaccatggatgt

SEQ ID NO: 1264499 - DNA, 25 bp, Homo sapien
gaatgagtccaccaagaccctagca

SEQ ID NO: 1264500 - DNA, 25 bp, Homo sapien
tccaccaggaattagaggtccacct

SEQ ID NO: 1264501 - DNA, 25 bp, Homo sapien
tcttatgggagcgagaagtcaccgt

SEQ ID NO: 1264502 - DNA, 25 bp, Homo sapien
tttatatgatgaatgacgcctgcgc

SEQ ID NO: 1264503 - DNA, 25 bp, Homo sapien
tctatcaactgaggtgaaggcagac

SEQ ID NO: 1264504 - DNA, 25 bp, Homo sapien
ccacctatgcggtgtggaactgctt

SEQ ID NO: 1264505 - DNA, 25 bp, Homo sapien
tatgcagaaatatgagagctattcc

SEQ ID NO: 1264506 - DNA, 25 bp, Homo sapien
gtctgcggcacccttgggacaggca

SEQ ID NO: 1264507 - DNA, 25 bp, Homo sapien
tggggtctgcggcacccttgggaca

SEQ ID NO: 1264508 - DNA, 25 bp, Homo sapien
tgcggcacccttgggacaggcacac

SEQ ID NO: 1264509 - DNA, 25 bp, Homo sapien
gggtctgcggcacccttgggacagg

SEQ ID NO: 1264510 - DNA, 25 bp, Homo sapien
actgctcgctgcaccggagggatta

SEQ ID NO: 1264511 - DNA, 25 bp, Homo sapien
caccggagggattaagctttgattc

SEQ ID NO: 1264512 - DNA, 25 bp, Homo sapien
ttgattcaactccatgagtaactct

SEQ ID NO: 1264513 - DNA, 25 bp, Homo sapien
gagggtttgatgtgcactgctcgct

SEQ ID NO: 1264514 - DNA, 25 bp, Homo sapien
gttctgccggagcacctgggcctca

SEQ ID NO: 1264515 - DNA, 25 bp, Homo sapien
gggcctcatctccacgaagaaacgt

SEQ ID NO: 1264516 - DNA, 25 bp, Homo sapien
acgaagaaacgtgaggcaacccgtg

SEQ ID NO: 1264517 - DNA, 25 bp, Homo sapien
caacccgtgcagaagcggagcagcg

SEQ ID NO: 1264518 - DNA, 25 bp, Homo sapien
agtcggcgccgcggcccccagagcc

SEQ ID NO: 1264519 - DNA, 25 bp, Homo sapien
cgagagagcagtcggcgccgcggcc

SEQ ID NO: 1264520 - DNA, 25 bp, Homo sapien
ctcgagagagcagtcggcgccgcgg

SEQ ID NO: 1264521 - DNA, 25 bp, Homo sapien
tcggcgccgcggcccccagagccat

SEQ ID NO: 1264522 - DNA, 25 bp, Homo sapien
acgcgtgatgactgaccctgggtgc

SEQ ID NO: 1264523 - DNA, 25 bp, Homo sapien
tcagccaagtagacccagaactctg

SEQ ID NO: 1264524 - DNA, 25 bp, Homo sapien
cagccacccgtgactgcttgtctgg

SEQ ID NO: 1264525 - DNA, 25 bp, Homo sapien
gaacaatcggcttgagcctccgcag

SEQ ID NO: 1264526 - DNA, 25 bp, Homo sapien
caagcaggccaccaggggtgtcctc

SEQ ID NO: 1264527 - DNA, 25 bp, Homo sapien
cctgggcaggggcacgtcggcttct

SEQ ID NO: 1264528 - DNA, 25 bp, Homo sapien
gggcacgtcggcttctgcccctccc

SEQ ID NO: 1264529 - DNA, 25 bp, Homo sapien
gccatggagggcacccaaatgcagc

SEQ ID NO: 1264530 - DNA, 25 bp, Homo sapien
gctctgggccccggcaccccagctg

SEQ ID NO: 1264531 - DNA, 25 bp, Homo sapien
gacacaggataagggatgcattcga

SEQ ID NO: 1264532 - DNA, 25 bp, Homo sapien
tggacacaggataagggatgcattc

SEQ ID NO: 1264533 - DNA, 25 bp, Homo sapien
aggataagggatgcattcgaaccca

SEQ ID NO: 1264534 - DNA, 25 bp, Homo sapien
cacaggataagggatgcattcgaac

SEQ ID NO: 1264535 - DNA, 25 bp, Homo sapien
atctgacgcccgctgagatctgcag

SEQ ID NO: 1264536 - DNA, 25 bp, Homo sapien
ttgacctcagagtaggctgacagct

SEQ ID NO: 1264537 - DNA, 25 bp, Homo sapien
taggctgacagctgcacgtatctga

SEQ ID NO: 1264538 - DNA, 25 bp, Homo sapien
gcacgtatctgacgcccgctgagat

SEQ ID NO: 1264539 - DNA, 25 bp, Homo sapien
ggtggtcctcatcaccctggcagat

SEQ ID NO: 1264540 - DNA, 25 bp, Homo sapien
tggtcctcatcaccctggcagatag

SEQ ID NO: 1264541 - DNA, 25 bp, Homo sapien
tcctcatcaccctggcagatagcag

SEQ ID NO: 1264542 - DNA, 25 bp, Homo sapien
catcaccctggcagatagcaggctc

SEQ ID NO: 1264543 - DNA, 25 bp, Homo sapien
tgtacagttcttacgcatgaagtag

SEQ ID NO: 1264544 - DNA, 25 bp, Homo sapien
tgatgatccccttttacttaacgag

SEQ ID NO: 1264545 - DNA, 25 bp, Homo sapien
tcaagatgtacctctgctacccctg

SEQ ID NO: 1264546 - DNA, 25 bp, Homo sapien
cagcttgccaggagtaaagaataaa

SEQ ID NO: 1264547 - DNA, 25 bp, Homo sapien
agaaagtagatgtaagagtaagggc

SEQ ID NO: 1264548 - DNA, 25 bp, Homo sapien
taagggcagttactagggataaaga

SEQ ID NO: 1264549 - DNA, 25 bp, Homo sapien
gtaaaaggatggatagagctacacc

SEQ ID NO: 1264550 - DNA, 25 bp, Homo sapien
ccatattaatatcacagaaagtaga

SEQ ID NO: 1264551 - DNA, 25 bp, Homo sapien
ataaaagcagaaataggcaaatctt

SEQ ID NO: 1264552 - DNA, 25 bp, Homo sapien
tgcacattgtgcacaggtacctaaa

SEQ ID NO: 1264553 - DNA, 25 bp, Homo sapien
gcagaaataggcaaatcttttgttt

SEQ ID NO: 1264554 - DNA, 25 bp, Homo sapien
gaccagttaatggttgcagtacacc

SEQ ID NO: 1264555 - DNA, 25 bp, Homo sapien
gactctcccaatttcagccttccga

SEQ ID NO: 1264556 - DNA, 25 bp, Homo sapien
gaaatgcgaatcaaaatcacgagga

SEQ ID NO: 1264557 - DNA, 25 bp, Homo sapien
tccaagtgttgggaagacgcagaga

SEQ ID NO: 1264558 - DNA, 25 bp, Homo sapien
tcatcgtcatcactcgttagggaaa

SEQ ID NO: 1264559 - DNA, 25 bp, Homo sapien
cccacagggcagctattacaaaaag

SEQ ID NO: 1264560 - DNA, 25 bp, Homo sapien
aggctctgggcacgaagtcactgct

SEQ ID NO: 1264561 - DNA, 25 bp, Homo sapien
aactgcgatggccagcagcggatga

SEQ ID NO: 1264562 - DNA, 25 bp, Homo sapien
cataggtgcatacccatgagaaatg

SEQ ID NO: 1264563 - DNA, 25 bp, Homo sapien
gaaagtagcccctcactagaatgga

SEQ ID NO: 1264564 - DNA, 25 bp, Homo sapien
gtcatctccccctggagatgcttac

SEQ ID NO: 1264565 - DNA, 25 bp, Homo sapien
taggtcatctccccctggagatgct

SEQ ID NO: 1264566 - DNA, 25 bp, Homo sapien
ttaggtcatctccccctggagatgc

SEQ ID NO: 1264567 - DNA, 25 bp, Homo sapien
ggtcatctccccctggagatgctta

SEQ ID NO: 1264568 - DNA, 25 bp, Homo sapien
tgaacgttcaccgagaagggagacc

SEQ ID NO: 1264569 - DNA, 25 bp, Homo sapien
atcacctccggacccaagatcacga

SEQ ID NO: 1264570 - DNA, 25 bp, Homo sapien
tgcagcagctgaacgttcaccgaga

SEQ ID NO: 1264571 - DNA, 25 bp, Homo sapien
aagatcacgatcctcgtagcttgtt

SEQ ID NO: 1264572 - DNA, 25 bp, Homo sapien
catcgctgtgggtggtgtcgtcaca

SEQ ID NO: 1264573 - DNA, 25 bp, Homo sapien
agtcgtccacactcagaccgtgagg

SEQ ID NO: 1264574 - DNA, 25 bp, Homo sapien
cgctggtcgggatttaggccctgca

SEQ ID NO: 1264575 - DNA, 25 bp, Homo sapien
tttcctgcccgtggaatgttcccgc

SEQ ID NO: 1264576 - DNA, 25 bp, Homo sapien
cagcctccacgaggagcccggggcc

SEQ ID NO: 1264577 - DNA, 25 bp, Homo sapien
tcagcctccacgaggagcccggggc

SEQ ID NO: 1264578 - DNA, 25 bp, Homo sapien
ccacaacccataataggtgacccct

SEQ ID NO: 1264579 - DNA, 25 bp, Homo sapien
cagtccactgaagacgtcgctgtgc

SEQ ID NO: 1264580 - DNA, 25 bp, Homo sapien
tgctgggtggccattgatccacaac

SEQ ID NO: 1264581 - DNA, 25 bp, Homo sapien
tgaagacgtcgctgtgccactgtcc

SEQ ID NO: 1264582 - DNA, 25 bp, Homo sapien
taaggtgccctgcttgtccgttaca

SEQ ID NO: 1264583 - DNA, 25 bp, Homo sapien
gaaatgcctgttcgctgtacacccc

SEQ ID NO: 1264584 - DNA, 25 bp, Homo sapien
cataaaggaggcctgaacccgcaaa

SEQ ID NO: 1264585 - DNA, 25 bp, Homo sapien
cgcaaactggccgactgtggcgttg

SEQ ID NO: 1264586 - DNA, 25 bp, Homo sapien
gcaggagccaagtgggctcctgctt

SEQ ID NO: 1264587 - DNA, 25 bp, Homo sapien
tggggcttctccacggatcctgggc

SEQ ID NO: 1264588 - DNA, 25 bp, Homo sapien
tctggggcttctccacggatcctgg

SEQ ID NO: 1264589 - DNA, 25 bp, Homo sapien
ggggcttctccacggatcctgggcc

SEQ ID NO: 1264590 - DNA, 25 bp, Homo sapien
gcgcagcgtgtgccttctggggctt

SEQ ID NO: 1264591 - DNA, 25 bp, Homo sapien
gaaggcgactggattgccccaaagg

SEQ ID NO: 1264592 - DNA, 25 bp, Homo sapien
cagggagagccacagtacatgaagg

SEQ ID NO: 1264593 - DNA, 25 bp, Homo sapien
gaagatcagagtccggttcaccgtg

SEQ ID NO: 1264594 - DNA, 25 bp, Homo sapien
tcagctaccaaggactggcgcagag

SEQ ID NO: 1264595 - DNA, 25 bp, Homo sapien
tgtcctatgactccagacgttccca

SEQ ID NO: 1264596 - DNA, 25 bp, Homo sapien
ctctgtcctatgactccagacgttc

SEQ ID NO: 1264597 - DNA, 25 bp, Homo sapien
tctgtcctatgactccagacgttcc

SEQ ID NO: 1264598 - DNA, 25 bp, Homo sapien
gtcctatgactccagacgttcccac

SEQ ID NO: 1264599 - DNA, 25 bp, Homo sapien
ggtgagagtccaacgcatttgattg

SEQ ID NO: 1264600 - DNA, 25 bp, Homo sapien
actgggtgagagtccaacgcatttg

SEQ ID NO: 1264601 - DNA, 25 bp, Homo sapien
gagagtccaacgcatttgattggca

SEQ ID NO: 1264602 - DNA, 25 bp, Homo sapien
aaactgggtgagagtccaacgcatt

SEQ ID NO: 1264603 - DNA, 25 bp, Homo sapien
aatggcgatgtctggtctctgcccc

SEQ ID NO: 1264604 - DNA, 25 bp, Homo sapien
aggcgcgagtcagcgcacagctgag

SEQ ID NO: 1264605 - DNA, 25 bp, Homo sapien
tcagtgatgagaatggcgatgtctg

SEQ ID NO: 1264606 - DNA, 25 bp, Homo sapien
gcccccgtcaccgtcagtgatgaga

SEQ ID NO: 1264607 - DNA, 25 bp, Homo sapien
ggctgacaccagctgcaatatggcg

SEQ ID NO: 1264608 - DNA, 25 bp, Homo sapien
caattcaactgatccaatagcccgg

SEQ ID NO: 1264609 - DNA, 25 bp, Homo sapien
caatatggcgtccagggtgagtacc

SEQ ID NO: 1264610 - DNA, 25 bp, Homo sapien
gggaagccagacacactcgagtcat

SEQ ID NO: 1264611 - DNA, 25 bp, Homo sapien
caggtgtgcggtacgggacacggga

SEQ ID NO: 1264612 - DNA, 25 bp, Homo sapien
acaggtgtgcggtacgggacacggg

SEQ ID NO: 1264613 - DNA, 25 bp, Homo sapien
cacaggtgtgcggtacgggacacgg

SEQ ID NO: 1264614 - DNA, 25 bp, Homo sapien
gcacaggtgtgcggtacgggacacg

SEQ ID NO: 1264615 - DNA, 25 bp, Homo sapien
gggccactggggtccaggtccacac

SEQ ID NO: 1264616 - DNA, 25 bp, Homo sapien
agggccactggggtccaggtccaca

SEQ ID NO: 1264617 - DNA, 25 bp, Homo sapien
gaagggccactggggtccaggtcca

SEQ ID NO: 1264618 - DNA, 25 bp, Homo sapien
aacagcggttccaaagtcaggaagc

SEQ ID NO: 1264619 - DNA, 25 bp, Homo sapien
cacagaggcaaacagcggttccaaa

SEQ ID NO: 1264620 - DNA, 25 bp, Homo sapien
caggaagcagtcgtgcaggatgatg

SEQ ID NO: 1264621 - DNA, 25 bp, Homo sapien
ggcaaacagcggttccaaagtcagg

SEQ ID NO: 1264622 - DNA, 25 bp, Homo sapien
tgcccagccgggtggcagagcactc

SEQ ID NO: 1264623 - DNA, 25 bp, Homo sapien
cagcaccactcagccgaaggctcac

SEQ ID NO: 1264624 - DNA, 25 bp, Homo sapien
ccagccgggtggcagagcactcagg

SEQ ID NO: 1264625 - DNA, 25 bp, Homo sapien
gcaccactcagccgaaggctcacac

SEQ ID NO: 1264626 - DNA, 25 bp, Homo sapien
cctgatagtcgacaagctcggacgg

SEQ ID NO: 1264627 - DNA, 25 bp, Homo sapien
cagggactgctctggcgctggccca

SEQ ID NO: 1264628 - DNA, 25 bp, Homo sapien
atagtcgacaagctcggacggctcg

SEQ ID NO: 1264629 - DNA, 25 bp, Homo sapien
cttccctgatagtcgacaagctcgg

SEQ ID NO: 1264630 - DNA, 25 bp, Homo sapien
tgtaaccctagtgcttccatgacgg

SEQ ID NO: 1264631 - DNA, 25 bp, Homo sapien
tttgctgaggttcacggcctggtgc

SEQ ID NO: 1264632 - DNA, 25 bp, Homo sapien
tcaggccacgtcatgagtgaggagc

SEQ ID NO: 1264633 - DNA, 25 bp, Homo sapien
ggtttctgaagaccggccatttgca

SEQ ID NO: 1264634 - DNA, 25 bp, Homo sapien
gcagtaggcccaaacgtggaggcta

SEQ ID NO: 1264635 - DNA, 25 bp, Homo sapien
gcccaaacgtggaggctataggccc

SEQ ID NO: 1264636 - DNA, 25 bp, Homo sapien
aaacgtggaggctataggccccgtg

SEQ ID NO: 1264637 - DNA, 25 bp, Homo sapien
tccaagggcagtaggcccaaacgtg

SEQ ID NO: 1264638 - DNA, 25 bp, Homo sapien
gaaagctggcgtgtgagacagccaa

SEQ ID NO: 1264639 - DNA, 25 bp, Homo sapien
ccaccgaggatgttctggaggacgt

SEQ ID NO: 1264640 - DNA, 25 bp, Homo sapien
tgccaacatgggtaggagacactct

SEQ ID NO: 1264641 - DNA, 25 bp, Homo sapien
caaggcaggagacacggtttgcaga

SEQ ID NO: 1264642 - DNA, 25 bp, Homo sapien
ctgctgtcgagagggagaacaggtc

SEQ ID NO: 1264643 - DNA, 25 bp, Homo sapien
gaacaggtctcccggaggggcctca

SEQ ID NO: 1264644 - DNA, 25 bp, Homo sapien
tgtcgagagggagaacaggtctccc

SEQ ID NO: 1264645 - DNA, 25 bp, Homo sapien
agagggagaacaggtctcccggagg

SEQ ID NO: 1264646 - DNA, 25 bp, Homo sapien
gctcatggtgcctgggtagcagccg

SEQ ID NO: 1264647 - DNA, 25 bp, Homo sapien
ctcatggtgcctgggtagcagccga

SEQ ID NO: 1264648 - DNA, 25 bp, Homo sapien
ggtgcctgggtagcagccgatgtct

SEQ ID NO: 1264649 - DNA, 25 bp, Homo sapien
gcctgggtagcagccgatgtctcct

SEQ ID NO: 1264650 - DNA, 25 bp, Homo sapien
ctgatgtaggaggtgccaagggcat

SEQ ID NO: 1264651 - DNA, 25 bp, Homo sapien
aaaaataaacgaacagccggcgctg

SEQ ID NO: 1264652 - DNA, 25 bp, Homo sapien
tgtccaagaaggtcccagcgcctac

SEQ ID NO: 1264653 - DNA, 25 bp, Homo sapien
aataaacgaacagccggcgctggtt

SEQ ID NO: 1264654 - DNA, 25 bp, Homo sapien
cagtgtccaagaaggtcccagcgcc

SEQ ID NO: 1264655 - DNA, 25 bp, Homo sapien
cctgtgcacaaaggcactccacaaa

SEQ ID NO: 1264656 - DNA, 25 bp, Homo sapien
gccctgatcgatggtttaagctccc

SEQ ID NO: 1264657 - DNA, 25 bp, Homo sapien
ctcgtggccctgatcgatggtttaa

SEQ ID NO: 1264658 - DNA, 25 bp, Homo sapien
cgatggtttaagctcccagggaaga

SEQ ID NO: 1264659 - DNA, 25 bp, Homo sapien
gggagactacagctgccaagaagcg

SEQ ID NO: 1264660 - DNA, 25 bp, Homo sapien
gactacagctgccaagaagcgtcaa

SEQ ID NO: 1264661 - DNA, 25 bp, Homo sapien
ctgggggagactacagctgccaaga

SEQ ID NO: 1264662 - DNA, 25 bp, Homo sapien
gagactacagctgccaagaagcgtc

SEQ ID NO: 1264663 - DNA, 25 bp, Homo sapien
cagctctcgggatgtgcggcctgac

SEQ ID NO: 1264664 - DNA, 25 bp, Homo sapien
acagctctcgggatgtgcggcctga

SEQ ID NO: 1264665 - DNA, 25 bp, Homo sapien
ggacagctctcgggatgtgcggcct

SEQ ID NO: 1264666 - DNA, 25 bp, Homo sapien
tggacagctctcgggatgtgcggcc

SEQ ID NO: 1264667 - DNA, 25 bp, Homo sapien
tctccgggtcgatgccgttttctct

SEQ ID NO: 1264668 - DNA, 25 bp, Homo sapien
gctgctgcctctccgggtcgatgcc

SEQ ID NO: 1264669 - DNA, 25 bp, Homo sapien
gtcgatgccgttttctctccaggtt

SEQ ID NO: 1264670 - DNA, 25 bp, Homo sapien
ctgcctctccgggtcgatgccgttt

SEQ ID NO: 1264671 - DNA, 25 bp, Homo sapien
attatccagagtccaagggacagac

SEQ ID NO: 1264672 - DNA, 25 bp, Homo sapien
ctcgcttctcctcattatccagagt

SEQ ID NO: 1264673 - DNA, 25 bp, Homo sapien
gagcctcgcttctcctcattatcca

SEQ ID NO: 1264674 - DNA, 25 bp, Homo sapien
ctcctcattatccagagtccaaggg

SEQ ID NO: 1264675 - DNA, 25 bp, Homo sapien
cctcctgcctctgaagcgtggtctg

SEQ ID NO: 1264676 - DNA, 25 bp, Homo sapien
ctcctgcctctgaagcgtggtctgg

SEQ ID NO: 1264677 - DNA, 25 bp, Homo sapien
tggtaatgtcttcttgcacaaacag

SEQ ID NO: 1264678 - DNA, 25 bp, Homo sapien
ctggtaatgtcttcttgcacaaaca

SEQ ID NO: 1264679 - DNA, 25 bp, Homo sapien
gaggcggccccggcccagtcctgac

SEQ ID NO: 1264680 - DNA, 25 bp, Homo sapien
tgcgtgggaggcggccccggcccag

SEQ ID NO: 1264681 - DNA, 25 bp, Homo sapien
ctgcgtgggaggcggccccggccca

SEQ ID NO: 1264682 - DNA, 25 bp, Homo sapien
ggaggcggccccggcccagtcctga

SEQ ID NO: 1264683 - DNA, 25 bp, Homo sapien
agcgtctacatcggtctgggcagga

SEQ ID NO: 1264684 - DNA, 25 bp, Homo sapien
ttttggcctcgggcgcccttctcag

SEQ ID NO: 1264685 - DNA, 25 bp, Homo sapien
gcgcccttctcagcgtctacatcgg

SEQ ID NO: 1264686 - DNA, 25 bp, Homo sapien
cgtctacatcggtctgggcaggagg

SEQ ID NO: 1264687 - DNA, 25 bp, Homo sapien
tggccatggtctgcccgtgcctgca

SEQ ID NO: 1264688 - DNA, 25 bp, Homo sapien
gtcagcagcgtggacgaggccaggg

SEQ ID NO: 1264689 - DNA, 25 bp, Homo sapien
cgtggacgaggccaggggactgctg

SEQ ID NO: 1264690 - DNA, 25 bp, Homo sapien
ggtgtcagcagcgtggacgaggcca

SEQ ID NO: 1264691 - DNA, 25 bp, Homo sapien
cctcggttggcaggcggtcccaggg

SEQ ID NO: 1264692 - DNA, 25 bp, Homo sapien
tgcctggggagggtgtgcgggcctc

SEQ ID NO: 1264693 - DNA, 25 bp, Homo sapien
tccccagggagctcaagccacgggc

SEQ ID NO: 1264694 - DNA, 25 bp, Homo sapien
cccgtggggcagcaagcaccagcac

SEQ ID NO: 1264695 - DNA, 25 bp, Homo sapien
agggcgccgtcccttgcctggtcct

SEQ ID NO: 1264696 - DNA, 25 bp, Homo sapien
cagtgtggacccgagttggcgcctg

SEQ ID NO: 1264697 - DNA, 25 bp, Homo sapien
gagttggcgcctgggtagtagccag

SEQ ID NO: 1264698 - DNA, 25 bp, Homo sapien
tggacccgagttggcgcctgggtag

SEQ ID NO: 1264699 - DNA, 25 bp, Homo sapien
caagctccagagctgtgcaccagcg

SEQ ID NO: 1264700 - DNA, 25 bp, Homo sapien
cccaagctccagagctgtgcaccag

SEQ ID NO: 1264701 - DNA, 25 bp, Homo sapien
aagctccagagctgtgcaccagcgc

SEQ ID NO: 1264702 - DNA, 25 bp, Homo sapien
agcccaagctccagagctgtgcacc

SEQ ID NO: 1264703 - DNA, 25 bp, Homo sapien
caatggtcaactgccctgagcaggg

SEQ ID NO: 1264704 - DNA, 25 bp, Homo sapien
gcagcaacgacgctgacatgggctc

SEQ ID NO: 1264705 - DNA, 25 bp, Homo sapien
gctgacatgggctcccgtggtccag

SEQ ID NO: 1264706 - DNA, 25 bp, Homo sapien
agcaaggacactgccaatggtcaac

SEQ ID NO: 1264707 - DNA, 25 bp, Homo sapien
ccccggagtgggtatgggtggcact

SEQ ID NO: 1264708 - DNA, 25 bp, Homo sapien
gtggcacttttacccaagcaggatg

SEQ ID NO: 1264709 - DNA, 25 bp, Homo sapien
gtatgggtggcacttttacccaagc

SEQ ID NO: 1264710 - DNA, 25 bp, Homo sapien
tgggtggcacttttacccaagcagg

SEQ ID NO: 1264711 - DNA, 25 bp, Homo sapien
ctgggcagcaggtgccgcgcgcccc

SEQ ID NO: 1264712 - DNA, 25 bp, Homo sapien
ctctgggcagcaggtgccgcgcgcc

SEQ ID NO: 1264713 - DNA, 25 bp, Homo sapien
ggcagcaggtgccgcgcgcccccgg

SEQ ID NO: 1264714 - DNA, 25 bp, Homo sapien
cctctgggcagcaggtgccgcgcgc

SEQ ID NO: 1264715 - DNA, 25 bp, Homo sapien
cagtcgccgtcgtacttgtcaccgt

SEQ ID NO: 1264716 - DNA, 25 bp, Homo sapien
tcggcgcagcgcagcaccccgtgtc

SEQ ID NO: 1264717 - DNA, 25 bp, Homo sapien
gtcgccgtcgtacttgtcaccgttc

SEQ ID NO: 1264718 - DNA, 25 bp, Homo sapien
cggacccagtcgccgtcgtacttgt

SEQ ID NO: 1264719 - DNA, 25 bp, Homo sapien
ccactctcaacagggggagccgggt

SEQ ID NO: 1264720 - DNA, 25 bp, Homo sapien
gtggcagtgactcagaccggctcct

SEQ ID NO: 1264721 - DNA, 25 bp, Homo sapien
tggtggcagtgactcagaccggctc

SEQ ID NO: 1264722 - DNA, 25 bp, Homo sapien
gggggacacacgcacggagtccact

SEQ ID NO: 1264723 - DNA, 25 bp, Homo sapien
gcccagggccgtgcctcttgttgtc

SEQ ID NO: 1264724 - DNA, 25 bp, Homo sapien
ggccgtgcctcttgttgtcatggaa

SEQ ID NO: 1264725 - DNA, 25 bp, Homo sapien
tggtacacttgtccatcccggtcca

SEQ ID NO: 1264726 - DNA, 25 bp, Homo sapien
tgtcatggaaggagccctggtacac

SEQ ID NO: 1264727 - DNA, 25 bp, Homo sapien
gaaaaagaagctccgtctgtggtgg

SEQ ID NO: 1264728 - DNA, 25 bp, Homo sapien
tcctggcttgagtctggcctcctga

SEQ ID NO: 1264729 - DNA, 25 bp, Homo sapien
gcttgacctgaacgaggagaaactc

SEQ ID NO: 1264730 - DNA, 25 bp, Homo sapien
tccagttctgaaaggtgcggttgag

SEQ ID NO: 1264731 - DNA, 25 bp, Homo sapien
tcaggagcagttaataaagcagtgg

SEQ ID NO: 1264732 - DNA, 25 bp, Homo sapien
cctactgaccccaggatcaggagca

SEQ ID NO: 1264733 - DNA, 25 bp, Homo sapien
gtatgccgggcataggacatggcct

SEQ ID NO: 1264734 - DNA, 25 bp, Homo sapien
agccacgggcgtctgttccgcggta

SEQ ID NO: 1264735 - DNA, 25 bp, Homo sapien
tcctgaacccaagtggacgtaggat

SEQ ID NO: 1264736 - DNA, 25 bp, Homo sapien
tgaacccaagtggacgtaggattcc

SEQ ID NO: 1264737 - DNA, 25 bp, Homo sapien
ccaagtggacgtaggattccatgtc

SEQ ID NO: 1264738 - DNA, 25 bp, Homo sapien
ggattccatgtcctgaaagcgccca

SEQ ID NO: 1264739 - DNA, 25 bp, Homo sapien
catgacgccgtagccttgaggctct

SEQ ID NO: 1264740 - DNA, 25 bp, Homo sapien
cggctttgtactccatgacgccgta

SEQ ID NO: 1264741 - DNA, 25 bp, Homo sapien
ccttcataacatccgccggctttgt

SEQ ID NO: 1264742 - DNA, 25 bp, Homo sapien
gccgtgggagacctccccttcataa

SEQ ID NO: 1264743 - DNA, 25 bp, Homo sapien
aatgtgccatcccagctagagctca

SEQ ID NO: 1264744 - DNA, 25 bp, Homo sapien
tctagaaaagtgtctccggaagcct

SEQ ID NO: 1264745 - DNA, 25 bp, Homo sapien
ggcacaaagcttcccgtctacacgt

SEQ ID NO: 1264746 - DNA, 25 bp, Homo sapien
ttctgcatctagactcggcggacca

SEQ ID NO: 1264747 - DNA, 25 bp, Homo sapien
tctcccgtgatctctccgtccacaa

SEQ ID NO: 1264748 - DNA, 25 bp, Homo sapien
cccttcgtaataactgccatcttta

SEQ ID NO: 1264749 - DNA, 25 bp, Homo sapien
tgaccaggcccagtgccggcggcct

SEQ ID NO: 1264750 - DNA, 25 bp, Homo sapien
cacaaacgccccttcgtaataactg

SEQ ID NO: 1264751 - DNA, 25 bp, Homo sapien
tggcaggagaaatcgtcacgtgaac

SEQ ID NO: 1264752 - DNA, 25 bp, Homo sapien
cacaggaatcgaagtgcaggcagcc

SEQ ID NO: 1264753 - DNA, 25 bp, Homo sapien
gggttgactgcgaatgacactgtgc

SEQ ID NO: 1264754 - DNA, 25 bp, Homo sapien
tatctgccgaaacacgcttgagcgg

SEQ ID NO: 1264755 - DNA, 25 bp, Homo sapien
gaaggaatttgggtatacgtagaca

SEQ ID NO: 1264756 - DNA, 25 bp, Homo sapien
ttctccttcatatcgaaagaaggaa

SEQ ID NO: 1264757 - DNA, 25 bp, Homo sapien
tttgggtatacgtagacaccataac

SEQ ID NO: 1264758 - DNA, 25 bp, Homo sapien
tcatatcgaaagaaggaatttgggt

SEQ ID NO: 1264759 - DNA, 25 bp, Homo sapien
tattgagaagacacacacaggtaag

SEQ ID NO: 1264760 - DNA, 25 bp, Homo sapien
ctgagtattgagaagacacacacag

SEQ ID NO: 1264761 - DNA, 25 bp, Homo sapien
gagtattgagaagacacacacaggt

SEQ ID NO: 1264762 - DNA, 25 bp, Homo sapien
ttgagaagacacacacaggtaagca

SEQ ID NO: 1264763 - DNA, 25 bp, Homo sapien
ttcagcagaccagaggcgacctgtg

SEQ ID NO: 1264764 - DNA, 25 bp, Homo sapien
accagaggcgacctgtggggctcat

SEQ ID NO: 1264765 - DNA, 25 bp, Homo sapien
cagcagaccagaggcgacctgtggg

SEQ ID NO: 1264766 - DNA, 25 bp, Homo sapien
cttcagcagaccagaggcgacctgt

SEQ ID NO: 1264767 - DNA, 25 bp, Homo sapien
agccagcgacctgtcccgtggcccg

SEQ ID NO: 1264768 - DNA, 25 bp, Homo sapien
agggcagccagcgacctgtcccgtg

SEQ ID NO: 1264769 - DNA, 25 bp, Homo sapien
gacctgtcccgtggcccgcagtcgt

SEQ ID NO: 1264770 - DNA, 25 bp, Homo sapien
gcgacctgtcccgtggcccgcagtc

SEQ ID NO: 1264771 - DNA, 25 bp, Homo sapien
ggagctcggggtgccctcgcccgcc

SEQ ID NO: 1264772 - DNA, 25 bp, Homo sapien
gagctcggggtgccctcgcccgccg

SEQ ID NO: 1264773 - DNA, 25 bp, Homo sapien
gggagctcggggtgccctcgcccgc

SEQ ID NO: 1264774 - DNA, 25 bp, Homo sapien
agctcggggtgccctcgcccgccgc

SEQ ID NO: 1264775 - DNA, 25 bp, Homo sapien
ggttctcttagcgaccagcaacgcc

SEQ ID NO: 1264776 - DNA, 25 bp, Homo sapien
ccgccgagggttctcttagcgacca

SEQ ID NO: 1264777 - DNA, 25 bp, Homo sapien
cgagggttctcttagcgaccagcaa

SEQ ID NO: 1264778 - DNA, 25 bp, Homo sapien
ttgccgccgagggttctcttagcga

SEQ ID NO: 1264779 - DNA, 25 bp, Homo sapien
atctctggagcgaagctagccgggc

SEQ ID NO: 1264780 - DNA, 25 bp, Homo sapien
gtggccacgggcctagtccctgagc

SEQ ID NO: 1264781 - DNA, 25 bp, Homo sapien
gcagctgcgcctgtgcgcgtttccg

SEQ ID NO: 1264782 - DNA, 25 bp, Homo sapien
gagcccgcgcaatctctggagcgaa

SEQ ID NO: 1264783 - DNA, 25 bp, Homo sapien
tcttccgggctgtcaaggccgcggg

SEQ ID NO: 1264784 - DNA, 25 bp, Homo sapien
gggagaccgcggctcggccgtagcg

SEQ ID NO: 1264785 - DNA, 25 bp, Homo sapien
tagcggagctgcgaggtgccaggaa

SEQ ID NO: 1264786 - DNA, 25 bp, Homo sapien
tccttcccgcggccgtgagggagac

SEQ ID NO: 1264787 - DNA, 25 bp, Homo sapien
ccttcggtggtgtacagatttttca

SEQ ID NO: 1264788 - DNA, 25 bp, Homo sapien
tccatgggaaaccttcggtggtgta

SEQ ID NO: 1264789 - DNA, 25 bp, Homo sapien
ggtggtgtacagatttttcacaaga

SEQ ID NO: 1264790 - DNA, 25 bp, Homo sapien
catgggaaaccttcggtggtgtaca

SEQ ID NO: 1264791 - DNA, 25 bp, Homo sapien
gcttaagagatgaacctgcttcagg

SEQ ID NO: 1264792 - DNA, 25 bp, Homo sapien
cgattaatgaagttgggtgacaggc

SEQ ID NO: 1264793 - DNA, 25 bp, Homo sapien
gacttgagatgtgacgataagggct

SEQ ID NO: 1264794 - DNA, 25 bp, Homo sapien
taagggctccttcggtcatgtccac

SEQ ID NO: 1264795 - DNA, 25 bp, Homo sapien
cctacacggctgtgcgatgggtcgt

SEQ ID NO: 1264796 - DNA, 25 bp, Homo sapien
gacgagacttggctctgtccacgtt

SEQ ID NO: 1264797 - DNA, 25 bp, Homo sapien
cattttgtggcagggtcagtacaga

SEQ ID NO: 1264798 - DNA, 25 bp, Homo sapien
catgattcgagtttacctgctgcag

SEQ ID NO: 1264799 - DNA, 25 bp, Homo sapien
gggatctaccatctaaatcttttca

SEQ ID NO: 1264800 - DNA, 25 bp, Homo sapien
tggtacattgtgacctatgccttgg

SEQ ID NO: 1264801 - DNA, 25 bp, Homo sapien
gacctatgccttggggatctaccat

SEQ ID NO: 1264802 - DNA, 25 bp, Homo sapien
ggggatctaccatctaaatcttttc

SEQ ID NO: 1264803 - DNA, 25 bp, Homo sapien
ggcgcttaaaccaaatcgcatggat

SEQ ID NO: 1264804 - DNA, 25 bp, Homo sapien
catcccgttcacacatgggaagaga

SEQ ID NO: 1264805 - DNA, 25 bp, Homo sapien
aaggccttcgccagctagaagcggg

SEQ ID NO: 1264806 - DNA, 25 bp, Homo sapien
gaggctgcctcacgtgttgcaagaa

SEQ ID NO: 1264807 - DNA, 25 bp, Homo sapien
ctgcaggcgggaagccaggcgggtg

SEQ ID NO: 1264808 - DNA, 25 bp, Homo sapien
cccatgggagcaagggcgagtggcc

SEQ ID NO: 1264809 - DNA, 25 bp, Homo sapien
caagtgtttctcacggatggaattc

SEQ ID NO: 1264810 - DNA, 25 bp, Homo sapien
tggaattctagtcagctgcaggcgg

SEQ ID NO: 1264811 - DNA, 25 bp, Homo sapien
taccatgattgcttttgagggcccg

SEQ ID NO: 1264812 - DNA, 25 bp, Homo sapien
tcctgcgtgtccgaaagaacttaac

SEQ ID NO: 1264813 - DNA, 25 bp, Homo sapien
cacagagcccgagggatgatctagc

SEQ ID NO: 1264814 - DNA, 25 bp, Homo sapien
agttggcctctatcctaatgactca

SEQ ID NO: 1264815 - DNA, 25 bp, Homo sapien
tacctaaaacatggcagtcgctgga

SEQ ID NO: 1264816 - DNA, 25 bp, Homo sapien
gctttgtaggttcagcactcggccc

SEQ ID NO: 1264817 - DNA, 25 bp, Homo sapien
tgacatgcgagtgaaggcctctcct

SEQ ID NO: 1264818 - DNA, 25 bp, Homo sapien
agaggcggaacccacttgcatgtca

SEQ ID NO: 1264819 - DNA, 25 bp, Homo sapien
taagaggccacgttcaagcttgtgt

SEQ ID NO: 1264820 - DNA, 25 bp, Homo sapien
tctgacatcgagctcctctaagagg

SEQ ID NO: 1264821 - DNA, 25 bp, Homo sapien
ccaggtgttttacgtcagcagggaa

SEQ ID NO: 1264822 - DNA, 25 bp, Homo sapien
taataagcgctcaggcctaaggtgt

SEQ ID NO: 1264823 - DNA, 25 bp, Homo sapien
agtttattaaagatgcctacggtga

SEQ ID NO: 1264824 - DNA, 25 bp, Homo sapien
agatgcctacggtgaactctctggc

SEQ ID NO: 1264825 - DNA, 25 bp, Homo sapien
tattaaagatgcctacggtgaactc

SEQ ID NO: 1264826 - DNA, 25 bp, Homo sapien
tgcctacggtgaactctctggcgca

SEQ ID NO: 1264827 - DNA, 25 bp, Homo sapien
aacacagcagtgaccgtgggtcagc

SEQ ID NO: 1264828 - DNA, 25 bp, Homo sapien
cgtgggtcagcaggtcgcctgccca

SEQ ID NO: 1264829 - DNA, 25 bp, Homo sapien
tggaaacatcaaatggaggcgggaa

SEQ ID NO: 1264830 - DNA, 25 bp, Homo sapien
gggaaataggctggggccgagctga

SEQ ID NO: 1264831 - DNA, 25 bp, Homo sapien
gaagaagtggctgagtcctaccagg

SEQ ID NO: 1264832 - DNA, 25 bp, Homo sapien
tctaaaactggaagcgaccttgacg

SEQ ID NO: 1264833 - DNA, 25 bp, Homo sapien
taaatcttggcgttcagactcccgt

SEQ ID NO: 1264834 - DNA, 25 bp, Homo sapien
tgtgccaaatgcttccgacggaggt

SEQ ID NO: 1264835 - DNA, 25 bp, Homo sapien
gtagtgccgaaggtagatgagcttc

SEQ ID NO: 1264836 - DNA, 25 bp, Homo sapien
agtgccgaaggtagatgagcttctg

SEQ ID NO: 1264837 - DNA, 25 bp, Homo sapien
tcagcggtagtgccgaaggtagatg

SEQ ID NO: 1264838 - DNA, 25 bp, Homo sapien
cggtagtgccgaaggtagatgagct

SEQ ID NO: 1264839 - DNA, 25 bp, Homo sapien
ccaggacggcagcaggctcccacct

SEQ ID NO: 1264840 - DNA, 25 bp, Homo sapien
gaccaccccaggacggcagcaggct

SEQ ID NO: 1264841 - DNA, 25 bp, Homo sapien
ccccaggacggcagcaggctcccac

SEQ ID NO: 1264842 - DNA, 25 bp, Homo sapien
aggacggcagcaggctcccacctca

SEQ ID NO: 1264843 - DNA, 25 bp, Homo sapien
tggctgttgggtgcctgcgctcctc

SEQ ID NO: 1264844 - DNA, 25 bp, Homo sapien
cttgctgctgcaccacgcggtgatg

SEQ ID NO: 1264845 - DNA, 25 bp, Homo sapien
ggcgtggctgttgggtgcctgcgct

SEQ ID NO: 1264846 - DNA, 25 bp, Homo sapien
ctggaaacggctctctcctccaagg

SEQ ID NO: 1264847 - DNA, 25 bp, Homo sapien
ggcagagcgtcaaggtgggtgcacc

SEQ ID NO: 1264848 - DNA, 25 bp, Homo sapien
ggtgcaccttacaggtccttgtgaa

SEQ ID NO: 1264849 - DNA, 25 bp, Homo sapien
ggaaggtggggcagagcgtcaaggt

SEQ ID NO: 1264850 - DNA, 25 bp, Homo sapien
tgggtgcaccttacaggtccttgtg

SEQ ID NO: 1264851 - DNA, 25 bp, Homo sapien
tgccgctgcctgaaaccgtacagct

SEQ ID NO: 1264852 - DNA, 25 bp, Homo sapien
cagcagcctgtagctaacacgggcc

SEQ ID NO: 1264853 - DNA, 25 bp, Homo sapien
ctgtagctaacacgggccctcaggt

SEQ ID NO: 1264854 - DNA, 25 bp, Homo sapien
gcagcagtgagatgacccccagcag

SEQ ID NO: 1264855 - DNA, 25 bp, Homo sapien
agatggcgccacactcatcaggacc

SEQ ID NO: 1264856 - DNA, 25 bp, Homo sapien
ctgtaaggcagatggcgccacactc

SEQ ID NO: 1264857 - DNA, 25 bp, Homo sapien
tcaggaccctgaggggatctggcct

SEQ ID NO: 1264858 - DNA, 25 bp, Homo sapien
ggcagatggcgccacactcatcagg

SEQ ID NO: 1264859 - DNA, 25 bp, Homo sapien
gggagtgcccggcagaaacgatcaa

SEQ ID NO: 1264860 - DNA, 25 bp, Homo sapien
ctctcactggcatggggagtgcccg

SEQ ID NO: 1264861 - DNA, 25 bp, Homo sapien
gcctctcactggcatggggagtgcc

SEQ ID NO: 1264862 - DNA, 25 bp, Homo sapien
agtgcccggcagaaacgatcaagcc

SEQ ID NO: 1264863 - DNA, 25 bp, Homo sapien
agtgtaacaaggcacgtggccccag

SEQ ID NO: 1264864 - DNA, 25 bp, Homo sapien
aagagtcttagctatgaggctggca

SEQ ID NO: 1264865 - DNA, 25 bp, Homo sapien
agggccgggaaccacatacagaggt

SEQ ID NO: 1264866 - DNA, 25 bp, Homo sapien
cattaccagtgcagaaagagtctta

SEQ ID NO: 1264867 - DNA, 25 bp, Homo sapien
cattggctctgcgacgaggtcacgg

SEQ ID NO: 1264868 - DNA, 25 bp, Homo sapien
ggaccagtgcagctctagggacaaa

SEQ ID NO: 1264869 - DNA, 25 bp, Homo sapien
tgaggacgaagacctgaccattggc

SEQ ID NO: 1264870 - DNA, 25 bp, Homo sapien
gactaacgctgtggcaggtggacat

SEQ ID NO: 1264871 - DNA, 25 bp, Homo sapien
gacaaggacggcctaagcagctgtg

SEQ ID NO: 1264872 - DNA, 25 bp, Homo sapien
tcagtaaagagctaagcgcagggcc

SEQ ID NO: 1264873 - DNA, 25 bp, Homo sapien
tccccacagcagtgacataggcagt

SEQ ID NO: 1264874 - DNA, 25 bp, Homo sapien
tagaaccctgttggctgagaggcct

SEQ ID NO: 1264875 - DNA, 25 bp, Homo sapien
cgtgtggtgacgcatccagcgccgc

SEQ ID NO: 1264876 - DNA, 25 bp, Homo sapien
ggccctgtctgaggacgaagaccgc

SEQ ID NO: 1264877 - DNA, 25 bp, Homo sapien
tcagggtggccgtgtggtgacgcat

SEQ ID NO: 1264878 - DNA, 25 bp, Homo sapien
gacaccgtggatgtaaaaccaggca

SEQ ID NO: 1264879 - DNA, 25 bp, Homo sapien
caagggtcgcccactgtcggggtca

SEQ ID NO: 1264880 - DNA, 25 bp, Homo sapien
ggtagggcaggacggcatgcagtgt

SEQ ID NO: 1264881 - DNA, 25 bp, Homo sapien
cgcgatgggtccacctggatgatgc

SEQ ID NO: 1264882 - DNA, 25 bp, Homo sapien
cagcgaggagggcacatgtatccgc

SEQ ID NO: 1264883 - DNA, 25 bp, Homo sapien
ctctgtgacgcagccacatctgtct

SEQ ID NO: 1264884 - DNA, 25 bp, Homo sapien
ccaagatgctctgtgacgcagccac

SEQ ID NO: 1264885 - DNA, 25 bp, Homo sapien
agatgctctgtgacgcagccacatc

SEQ ID NO: 1264886 - DNA, 25 bp, Homo sapien
tgctctgtgacgcagccacatctgt

SEQ ID NO: 1264887 - DNA, 25 bp, Homo sapien
cgagcccctcgtagggaaccaggct

SEQ ID NO: 1264888 - DNA, 25 bp, Homo sapien
ggcactcggtggtccttgctacatg

SEQ ID NO: 1264889 - DNA, 25 bp, Homo sapien
ggctggcactcggtggtccttgcta

SEQ ID NO: 1264890 - DNA, 25 bp, Homo sapien
tctccatggcggcaggatgcccggg

SEQ ID NO: 1264891 - DNA, 25 bp, Homo sapien
agctggggttgggagcctgagagct

SEQ ID NO: 1264892 - DNA, 25 bp, Homo sapien
gcctgagagcttctgtcaacaactc

SEQ ID NO: 1264893 - DNA, 25 bp, Homo sapien
ctgagagcttctgtcaacaactccc

SEQ ID NO: 1264894 - DNA, 25 bp, Homo sapien
ctggggttgggagcctgagagcttc

SEQ ID NO: 1264895 - DNA, 25 bp, Homo sapien
ctgcacttccctgaagcaacctcac

SEQ ID NO: 1264896 - DNA, 25 bp, Homo sapien
cctgcacttccctgaagcaacctca

SEQ ID NO: 1264897 - DNA, 25 bp, Homo sapien
tcagtcctgaggtcccgtgggagct

SEQ ID NO: 1264898 - DNA, 25 bp, Homo sapien
ccctcagtcctgaggtcccgtggga

SEQ ID NO: 1264899 - DNA, 25 bp, Homo sapien
ctcagtcctgaggtcccgtgggagc

SEQ ID NO: 1264900 - DNA, 25 bp, Homo sapien
tgccctcagtcctgaggtcccgtgg

SEQ ID NO: 1264901 - DNA, 25 bp, Homo sapien
ggccaaagtaggccacatctgagag

SEQ ID NO: 1264902 - DNA, 25 bp, Homo sapien
aggccaaagtaggccacatctgaga

SEQ ID NO: 1264903 - DNA, 25 bp, Homo sapien
gccaaagtaggccacatctgagagc

SEQ ID NO: 1264904 - DNA, 25 bp, Homo sapien
cagacagtctgcgaagaatctccca

SEQ ID NO: 1264905 - DNA, 25 bp, Homo sapien
tccgggattcccctgagcaactgtt

SEQ ID NO: 1264906 - DNA, 25 bp, Homo sapien
tctagggcctatgagggccacatgg

SEQ ID NO: 1264907 - DNA, 25 bp, Homo sapien
attaagattacaggccagaggccaa

SEQ ID NO: 1264908 - DNA, 25 bp, Homo sapien
gaactggaggcccacgcaggtcccc

SEQ ID NO: 1264909 - DNA, 25 bp, Homo sapien
ggaactggaggcccacgcaggtccc

SEQ ID NO: 1264910 - DNA, 25 bp, Homo sapien
caggctgtgcagggcgccgcccgcc

SEQ ID NO: 1264911 - DNA, 25 bp, Homo sapien
aggctgtgcagggcgccgcccgccg

SEQ ID NO: 1264912 - DNA, 25 bp, Homo sapien
ctgcgccgcgcggatcacctccggg

SEQ ID NO: 1264913 - DNA, 25 bp, Homo sapien
gtactcgtccttctgcgccgcgcgg

SEQ ID NO: 1264914 - DNA, 25 bp, Homo sapien
ttctgcgccgcgcggatcacctccg

SEQ ID NO: 1264915 - DNA, 25 bp, Homo sapien
actcgtccttctgcgccgcgcggat

SEQ ID NO: 1264916 - DNA, 25 bp, Homo sapien
cccagacgggcgagaactgatgacg

SEQ ID NO: 1264917 - DNA, 25 bp, Homo sapien
acgcccacgcccagacgggcgagaa

SEQ ID NO: 1264918 - DNA, 25 bp, Homo sapien
gggttcgggtggtcccgagcagcca

SEQ ID NO: 1264919 - DNA, 25 bp, Homo sapien
cgagaactgatgacggcacgacgtg

SEQ ID NO: 1264920 - DNA, 25 bp, Homo sapien
acgctgcaggcccatttacggctgg

SEQ ID NO: 1264921 - DNA, 25 bp, Homo sapien
gtaatcctgcgcgaaaagcacacgg

SEQ ID NO: 1264922 - DNA, 25 bp, Homo sapien
gacggaggctttcgcttgggtcttc

SEQ ID NO: 1264923 - DNA, 25 bp, Homo sapien
ttgggtcttcgggaagccgagctcc

SEQ ID NO: 1264924 - DNA, 25 bp, Homo sapien
gaactggaggcccacgcaggtcgcc

SEQ ID NO: 1264925 - DNA, 25 bp, Homo sapien
ggaactggaggcccacgcaggtcgc

SEQ ID NO: 1264926 - DNA, 25 bp, Homo sapien
ctgcagggcaggtgaaggagaaggc

SEQ ID NO: 1264927 - DNA, 25 bp, Homo sapien
ctgttttttggccccaagggcagca

SEQ ID NO: 1264928 - DNA, 25 bp, Homo sapien
cagggcaggtgaaggagaaggccct

SEQ ID NO: 1264929 - DNA, 25 bp, Homo sapien
caggtgaaggagaaggccctgtttt

SEQ ID NO: 1264930 - DNA, 25 bp, Homo sapien
tcctgagggcgacttgaatacggcg

SEQ ID NO: 1264931 - DNA, 25 bp, Homo sapien
agggcgacttgaatacggcggtcct

SEQ ID NO: 1264932 - DNA, 25 bp, Homo sapien
gcgacttgaatacggcggtcctatc

SEQ ID NO: 1264933 - DNA, 25 bp, Homo sapien
cttcctgagggcgacttgaatacgg

SEQ ID NO: 1264934 - DNA, 25 bp, Homo sapien
caggtgtgttgtccgacatccttcc

SEQ ID NO: 1264935 - DNA, 25 bp, Homo sapien
tgcgctcctccgctaaacccagttc

SEQ ID NO: 1264936 - DNA, 25 bp, Homo sapien
gcagcaggtgtgttgtccgacatcc

SEQ ID NO: 1264937 - DNA, 25 bp, Homo sapien
tgtgttgtccgacatccttcctctg

SEQ ID NO: 1264938 - DNA, 25 bp, Homo sapien
tggcacccagcggtcgctcaggacc

SEQ ID NO: 1264939 - DNA, 25 bp, Homo sapien
caggagctggacgcagcaggtcggg

SEQ ID NO: 1264940 - DNA, 25 bp, Homo sapien
gggtgtgagcaccaccggaacaggg

SEQ ID NO: 1264941 - DNA, 25 bp, Homo sapien
caccaccggaacaggggactgctgt

SEQ ID NO: 1264942 - DNA, 25 bp, Homo sapien
ctgggtgggcaaagtgggcgctggt

SEQ ID NO: 1264943 - DNA, 25 bp, Homo sapien
tggtgctgcttgaggggagtggctc

SEQ ID NO: 1264944 - DNA, 25 bp, Homo sapien
tgggtgggcaaagtgggcgctggtg

SEQ ID NO: 1264945 - DNA, 25 bp, Homo sapien
cttgaggggagtggctcctgcccag

SEQ ID NO: 1264946 - DNA, 25 bp, Homo sapien
tgtgatttcaggacaaagcttccca

SEQ ID NO: 1264947 - DNA, 25 bp, Homo sapien
gctgctcgattccactttcagcccc

SEQ ID NO: 1264948 - DNA, 25 bp, Homo sapien
gcttcccaggtgcaggtctgaaagc

SEQ ID NO: 1264949 - DNA, 25 bp, Homo sapien
ccacctccttcgagaggtgggtgtg

SEQ ID NO: 1264950 - DNA, 25 bp, Homo sapien
ctgtctccagagtgccggcgagctg

SEQ ID NO: 1264951 - DNA, 25 bp, Homo sapien
tgaagctggcccctgagcgcagatg

SEQ ID NO: 1264952 - DNA, 25 bp, Homo sapien
gcccctgagcgcagatgtgcaggct

SEQ ID NO: 1264953 - DNA, 25 bp, Homo sapien
tagggctggcccctcgcggtcttcc

SEQ ID NO: 1264954 - DNA, 25 bp, Homo sapien
ctgtgttccctgcatccgctaagtc

SEQ ID NO: 1264955 - DNA, 25 bp, Homo sapien
gctaggggcccaccgggtggagctc

SEQ ID NO: 1264956 - DNA, 25 bp, Homo sapien
cacgttcagcctggagacggaagtc

SEQ ID NO: 1264957 - DNA, 25 bp, Homo sapien
agtcagggtagcagggaagtagcag

SEQ ID NO: 1264958 - DNA, 25 bp, Homo sapien
cctgggggcgttgaggagctgggca

SEQ ID NO: 1264959 - DNA, 25 bp, Homo sapien
ctgggagctcgcgatccaagggaca

SEQ ID NO: 1264960 - DNA, 25 bp, Homo sapien
tcgctggccctgagcaggtacctgg

SEQ ID NO: 1264961 - DNA, 25 bp, Homo sapien
ccagaagtgggagccctccagaagt

SEQ ID NO: 1264962 - DNA, 25 bp, Homo sapien
tattgaaacagaagcagccggcgag

SEQ ID NO: 1264963 - DNA, 25 bp, Homo sapien
ggcagagcccctgccggctccccaa

SEQ ID NO: 1264964 - DNA, 25 bp, Homo sapien
ttaggcagagcccctgccggctccc

SEQ ID NO: 1264965 - DNA, 25 bp, Homo sapien
cagagcccctgccggctccccaaac

SEQ ID NO: 1264966 - DNA, 25 bp, Homo sapien
taggcagagcccctgccggctcccc

SEQ ID NO: 1264967 - DNA, 25 bp, Homo sapien
tgatgttggccgtttggtcccttca

SEQ ID NO: 1264968 - DNA, 25 bp, Homo sapien
catcaacatcgcaggaggttccttc

SEQ ID NO: 1264969 - DNA, 25 bp, Homo sapien
tgctccgaagggcagcagtgcagtc

SEQ ID NO: 1264970 - DNA, 25 bp, Homo sapien
aggttccttcacaggcatcgcgcgt

SEQ ID NO: 1264971 - DNA, 25 bp, Homo sapien
cttcacagccgtttacaacctggga

SEQ ID NO: 1264972 - DNA, 25 bp, Homo sapien
tcctcagctgtatccagaatgcagt

SEQ ID NO: 1264973 - DNA, 25 bp, Homo sapien
cagccgtttacaacctgggaaggtg

SEQ ID NO: 1264974 - DNA, 25 bp, Homo sapien
ttctctcccgggcacccacagggcc

SEQ ID NO: 1264975 - DNA, 25 bp, Homo sapien
tgttctgagaagtccgtggcctgcg

SEQ ID NO: 1264976 - DNA, 25 bp, Homo sapien
ggatttgttctgagaagtccgtggc

SEQ ID NO: 1264977 - DNA, 25 bp, Homo sapien
tctgagaagtccgtggcctgcgagc

SEQ ID NO: 1264978 - DNA, 25 bp, Homo sapien
acaccggggcgcagggacttggctt

SEQ ID NO: 1264979 - DNA, 25 bp, Homo sapien
ctgggctgcagagaagtgggcagtc

SEQ ID NO: 1264980 - DNA, 25 bp, Homo sapien
gggctgcagagaagtgggcagtcca

SEQ ID NO: 1264981 - DNA, 25 bp, Homo sapien
gctgcagagaagtgggcagtccagg

SEQ ID NO: 1264982 - DNA, 25 bp, Homo sapien
cagagaagtgggcagtccaggagct

SEQ ID NO: 1264983 - DNA, 25 bp, Homo sapien
gaaggagagcatgtggaagatggtc

SEQ ID NO: 1264984 - DNA, 25 bp, Homo sapien
agagcatgtggaagatggtcccggg

SEQ ID NO: 1264985 - DNA, 25 bp, Homo sapien
gagagcatgtggaagatggtcccgg

SEQ ID NO: 1264986 - DNA, 25 bp, Homo sapien
aggagagcatgtggaagatggtccc

SEQ ID NO: 1264987 - DNA, 25 bp, Homo sapien
aaggtgtgcacactcgaccctggcc

SEQ ID NO: 1264988 - DNA, 25 bp, Homo sapien
tcgaccctggcctccatcagagagg

SEQ ID NO: 1264989 - DNA, 25 bp, Homo sapien
gtctttgccgattgcccaagagaga

SEQ ID NO: 1264990 - DNA, 25 bp, Homo sapien
gggctggtgcttctccacatcgtct

SEQ ID NO: 1264991 - DNA, 25 bp, Homo sapien
tagctgctgaggattgcacgtttac

SEQ ID NO: 1264992 - DNA, 25 bp, Homo sapien
taaatttagctgctgaggattgcac

SEQ ID NO: 1264993 - DNA, 25 bp, Homo sapien
ttctaaatttagctgctgaggattg

SEQ ID NO: 1264994 - DNA, 25 bp, Homo sapien
aatttagctgctgaggattgcacgt

SEQ ID NO: 1264995 - DNA, 25 bp, Homo sapien
tgagttgcgtgcacgtgctctctct

SEQ ID NO: 1264996 - DNA, 25 bp, Homo sapien
agagcccgtcagagtccagctggat

SEQ ID NO: 1264997 - DNA, 25 bp, Homo sapien
cccgtcagagtccagctggattctt

SEQ ID NO: 1264998 - DNA, 25 bp, Homo sapien
aagcccattgattgagttgcgtgca

SEQ ID NO: 1264999 - DNA, 25 bp, Homo sapien
cttggaaaccaggcaggggtgggca

SEQ ID NO: 1265000 - DNA, 25 bp, Homo sapien
ttggaaaccaggcaggggtgggcag

SEQ ID NO: 1265001 - DNA, 25 bp, Homo sapien
tggaaaccaggcaggggtgggcagg

SEQ ID NO: 1265002 - DNA, 25 bp, Homo sapien
gaagggggagtcaggcttggtggag

SEQ ID NO: 1265003 - DNA, 25 bp, Homo sapien
gagaagggggagtcaggcttggtgg

SEQ ID NO: 1265004 - DNA, 25 bp, Homo sapien
aagggggagtcaggcttggtggagt

SEQ ID NO: 1265005 - DNA, 25 bp, Homo sapien
gggggagtcaggcttggtggagtgt

SEQ ID NO: 1265006 - DNA, 25 bp, Homo sapien
ccaggctgaggggtccgatgtagcc

SEQ ID NO: 1265007 - DNA, 25 bp, Homo sapien
gtccgatgtagcctgtggtccagct

SEQ ID NO: 1265008 - DNA, 25 bp, Homo sapien
gctggagctggggaggatctcgggt

SEQ ID NO: 1265009 - DNA, 25 bp, Homo sapien
gtgggtgtattggagtgaggcctgc

SEQ ID NO: 1265010 - DNA, 25 bp, Homo sapien
tgcattgctgcgaccagtgatcctc

SEQ ID NO: 1265011 - DNA, 25 bp, Homo sapien
catgctgcgaccagggattcttgag

SEQ ID NO: 1265012 - DNA, 25 bp, Homo sapien
tggtgggtgcctccacacagtctgc

SEQ ID NO: 1265013 - DNA, 25 bp, Homo sapien
cacagtctgccgtgagaggaggcct

SEQ ID NO: 1265014 - DNA, 25 bp, Homo sapien
gcactgcccgctccaggtgcccagg

SEQ ID NO: 1265015 - DNA, 25 bp, Homo sapien
agatgggcatggttcagagggcact

SEQ ID NO: 1265016 - DNA, 25 bp, Homo sapien
gtgcagatgggcatggttcagaggg

SEQ ID NO: 1265017 - DNA, 25 bp, Homo sapien
gcatggttcagagggcactgcccgc

SEQ ID NO: 1265018 - DNA, 25 bp, Homo sapien
agaccagctgatgctgtcacggtgg

SEQ ID NO: 1265019 - DNA, 25 bp, Homo sapien
gatgctgtcacggtggggtttcctc

SEQ ID NO: 1265020 - DNA, 25 bp, Homo sapien
tcccagaccagctgatgctgtcacg

SEQ ID NO: 1265021 - DNA, 25 bp, Homo sapien
ccagaccagctgatgctgtcacggt

SEQ ID NO: 1265022 - DNA, 25 bp, Homo sapien
cagcagagcggggaaccgacgaagt

SEQ ID NO: 1265023 - DNA, 25 bp, Homo sapien
gcagagcggggaaccgacgaagtgc

SEQ ID NO: 1265024 - DNA, 25 bp, Homo sapien
ccagagctgggcagtctctcttgac

SEQ ID NO: 1265025 - DNA, 25 bp, Homo sapien
tcttgacttgtctcccgcctcctcc

SEQ ID NO: 1265026 - DNA, 25 bp, Homo sapien
caggcacttctgcaagggtctgcat

SEQ ID NO: 1265027 - DNA, 25 bp, Homo sapien
gttctcagcagtcccaggcacttct

SEQ ID NO: 1265028 - DNA, 25 bp, Homo sapien
tccccgggcttctgcggaggtcgca

SEQ ID NO: 1265029 - DNA, 25 bp, Homo sapien
ttccccgggcttctgcggaggtcgc

SEQ ID NO: 1265030 - DNA, 25 bp, Homo sapien
ccccgggcttctgcggaggtcgcac

SEQ ID NO: 1265031 - DNA, 25 bp, Homo sapien
cttccccgggcttctgcggaggtcg

SEQ ID NO: 1265032 - DNA, 25 bp, Homo sapien
gaggtgctgcgtggacttgccgcat

SEQ ID NO: 1265033 - DNA, 25 bp, Homo sapien
gtgtgggtccgggaggtgctgcgtg

SEQ ID NO: 1265034 - DNA, 25 bp, Homo sapien
ctgtgaccgtgctgagaatgacccc

SEQ ID NO: 1265035 - DNA, 25 bp, Homo sapien
cctgccggatggtgccgcagggcac

SEQ ID NO: 1265036 - DNA, 25 bp, Homo sapien
gatcgctggacctgtgttccgcaca

SEQ ID NO: 1265037 - DNA, 25 bp, Homo sapien
gatcagactctgtgcgtgaggctcc

SEQ ID NO: 1265038 - DNA, 25 bp, Homo sapien
gacggctaagccagccttctcaggg

SEQ ID NO: 1265039 - DNA, 25 bp, Homo sapien
agcagcctttgggtgtcgattccgg

SEQ ID NO: 1265040 - DNA, 25 bp, Homo sapien
gggaggggccgctgacccggagctc

SEQ ID NO: 1265041 - DNA, 25 bp, Homo sapien
cttgactgtgactgagctgctgacc

SEQ ID NO: 1265042 - DNA, 25 bp, Homo sapien
gggaggccccgtgttgagggcctgc

SEQ ID NO: 1265043 - DNA, 25 bp, Homo sapien
cggagctccactgtgacccttgact

SEQ ID NO: 1265044 - DNA, 25 bp, Homo sapien
gagtcctggtcggagctgtagcagc

SEQ ID NO: 1265045 - DNA, 25 bp, Homo sapien
catcccaggatcagtggctctgcag

SEQ ID NO: 1265046 - DNA, 25 bp, Homo sapien
gggcctccagaatgctcgtttcgtc

SEQ ID NO: 1265047 - DNA, 25 bp, Homo sapien
aaactgttgtacgtggctcctttgc

SEQ ID NO: 1265048 - DNA, 25 bp, Homo sapien
ggcggcaccacgtgacatgcttgat

SEQ ID NO: 1265049 - DNA, 25 bp, Homo sapien
gaggctcaaggccatggacctgcta

SEQ ID NO: 1265050 - DNA, 25 bp, Homo sapien
gcaatgcaccgagtggaccgtgtcc

SEQ ID NO: 1265051 - DNA, 25 bp, Homo sapien
tgacatgatgtggtgtggtcccctc

SEQ ID NO: 1265052 - DNA, 25 bp, Homo sapien
ctgttgagccgtgccgtgggtggag

SEQ ID NO: 1265053 - DNA, 25 bp, Homo sapien
ttgagccgtgccgtgggtggaggtg

SEQ ID NO: 1265054 - DNA, 25 bp, Homo sapien
gagccgtgccgtgggtggaggtgag

SEQ ID NO: 1265055 - DNA, 25 bp, Homo sapien
tgttgagccgtgccgtgggtggagg

SEQ ID NO: 1265056 - DNA, 25 bp, Homo sapien
cagtgggtttttgccatccgccagg

SEQ ID NO: 1265057 - DNA, 25 bp, Homo sapien
aggagcttcactgggcctcccgttg

SEQ ID NO: 1265058 - DNA, 25 bp, Homo sapien
aaatgccacgctggtgacaagccct

SEQ ID NO: 1265059 - DNA, 25 bp, Homo sapien
ggacatggtgacaaatgccacgctg

SEQ ID NO: 1265060 - DNA, 25 bp, Homo sapien
gcagccttgccggtggtcttccttg

SEQ ID NO: 1265061 - DNA, 25 bp, Homo sapien
ttccttgggctgacactgagccagc

SEQ ID NO: 1265062 - DNA, 25 bp, Homo sapien
ctgagtaattcacacgcaggaccgg

SEQ ID NO: 1265063 - DNA, 25 bp, Homo sapien
tatctgaatgcagtgctggcgcgtg

SEQ ID NO: 1265064 - DNA, 25 bp, Homo sapien
caggagacccagcacacttggggtc

SEQ ID NO: 1265065 - DNA, 25 bp, Homo sapien
ccaggagacccagcacacttggggt

SEQ ID NO: 1265066 - DNA, 25 bp, Homo sapien
tccaggagacccagcacacttgggg

SEQ ID NO: 1265067 - DNA, 25 bp, Homo sapien
gctgatgacgatggcgtcccagttc

SEQ ID NO: 1265068 - DNA, 25 bp, Homo sapien
agactccacgtgccgccgaggacgg

SEQ ID NO: 1265069 - DNA, 25 bp, Homo sapien
cgccgaggacggagcagatgggcca

SEQ ID NO: 1265070 - DNA, 25 bp, Homo sapien
acagctaatgagctgatgacgatgg

SEQ ID NO: 1265071 - DNA, 25 bp, Homo sapien
acaggaggctctttcagcaggcagg

SEQ ID NO: 1265072 - DNA, 25 bp, Homo sapien
caacagtgagccactctggtgggac

SEQ ID NO: 1265073 - DNA, 25 bp, Homo sapien
tggtgggactgtggaaccccctcca

SEQ ID NO: 1265074 - DNA, 25 bp, Homo sapien
catggctccatgctagctgggtgaa

SEQ ID NO: 1265075 - DNA, 25 bp, Homo sapien
cgagctgagaggcgttcctttattt

SEQ ID NO: 1265076 - DNA, 25 bp, Homo sapien
cccgagctgagaggcgttcctttat

SEQ ID NO: 1265077 - DNA, 25 bp, Homo sapien
ccgagctgagaggcgttcctttatt

SEQ ID NO: 1265078 - DNA, 25 bp, Homo sapien
tgggcctgtgcaaaacctggagatg

SEQ ID NO: 1265079 - DNA, 25 bp, Homo sapien
tgcgggtccaggagagtggtcccct

SEQ ID NO: 1265080 - DNA, 25 bp, Homo sapien
cagacctcaggtctgagcggctgct

SEQ ID NO: 1265081 - DNA, 25 bp, Homo sapien
atgcatctgcgggtccaggagagtg

SEQ ID NO: 1265082 - DNA, 25 bp, Homo sapien
cgggaatcccccctgatgagatgca

SEQ ID NO: 1265083 - DNA, 25 bp, Homo sapien
tcaggcacagccacgaaggttgggg

SEQ ID NO: 1265084 - DNA, 25 bp, Homo sapien
gaggagcgggaatcccccctgatga

SEQ ID NO: 1265085 - DNA, 25 bp, Homo sapien
gaatcccccctgatgagatgcactc

SEQ ID NO: 1265086 - DNA, 25 bp, Homo sapien
gggtcgtggggatggcaaatcccac

SEQ ID NO: 1265087 - DNA, 25 bp, Homo sapien
cgtggggatggcaaatcccactgag

SEQ ID NO: 1265088 - DNA, 25 bp, Homo sapien
ctctgtccccctggggtagccggtg

SEQ ID NO: 1265089 - DNA, 25 bp, Homo sapien
ctctctgtccccctggggtagccgg

SEQ ID NO: 1265090 - DNA, 25 bp, Homo sapien
gagtccctgaggcccgggggcagca

SEQ ID NO: 1265091 - DNA, 25 bp, Homo sapien
gcccgggggcagcaggaatgggtat

SEQ ID NO: 1265092 - DNA, 25 bp, Homo sapien
ggcccgggggcagcaggaatgggta

SEQ ID NO: 1265093 - DNA, 25 bp, Homo sapien
tgaggcccgggggcagcaggaatgg

SEQ ID NO: 1265094 - DNA, 25 bp, Homo sapien
cagtacgggctgtgtctggccgtcc

SEQ ID NO: 1265095 - DNA, 25 bp, Homo sapien
gggtcagcgcgtgcctctcctcggt

SEQ ID NO: 1265096 - DNA, 25 bp, Homo sapien
gtctcctgggtcagcgcgtgcctct

SEQ ID NO: 1265097 - DNA, 25 bp, Homo sapien
cccttggagcatagttgggtcttgc

SEQ ID NO: 1265098 - DNA, 25 bp, Homo sapien
cctctgggccgtggtacccagagca

SEQ ID NO: 1265099 - DNA, 25 bp, Homo sapien
gtgccctgatttccaacgcgtccag

SEQ ID NO: 1265100 - DNA, 25 bp, Homo sapien
atcaacaggactgagaggcccgtct

SEQ ID NO: 1265101 - DNA, 25 bp, Homo sapien
gagctgtttgctgtggcgtggctga

SEQ ID NO: 1265102 - DNA, 25 bp, Homo sapien
gcgggaacaggtcagggccgtggaa

SEQ ID NO: 1265103 - DNA, 25 bp, Homo sapien
tcagggccgtggaatgctcgtaaaa

SEQ ID NO: 1265104 - DNA, 25 bp, Homo sapien
gagccgtgtgtctgattagggatac

SEQ ID NO: 1265105 - DNA, 25 bp, Homo sapien
tacccgcgcactgcgggaacaggtc

SEQ ID NO: 1265106 - DNA, 25 bp, Homo sapien
aggagacatcacgtcacccaccagc

SEQ ID NO: 1265107 - DNA, 25 bp, Homo sapien
ggccctggttttgtgcggcgctcct

SEQ ID NO: 1265108 - DNA, 25 bp, Homo sapien
cagctgcgctggctcactgtcttcc

SEQ ID NO: 1265109 - DNA, 25 bp, Homo sapien
ggtgagacgggacaccctgacagag

SEQ ID NO: 1265110 - DNA, 25 bp, Homo sapien
cgtggttctgataaacgtgctcacc

SEQ ID NO: 1265111 - DNA, 25 bp, Homo sapien
agaagacaccccaagaaaagacctg

SEQ ID NO: 1265112 - DNA, 25 bp, Homo sapien
tgccacttacttaccaggtgcccgt

SEQ ID NO: 1265113 - DNA, 25 bp, Homo sapien
gcctctgtcaactcccaaacgtggt

SEQ ID NO: 1265114 - DNA, 25 bp, Homo sapien
agcaggggtgtggtgagctggttgc

SEQ ID NO: 1265115 - DNA, 25 bp, Homo sapien
gaacacttgcgtgtgggcagctgca

SEQ ID NO: 1265116 - DNA, 25 bp, Homo sapien
ggcggcacctgaacctgaggagtct

SEQ ID NO: 1265117 - DNA, 25 bp, Homo sapien
cgagccccagaacacttgcgtgtgg

SEQ ID NO: 1265118 - DNA, 25 bp, Homo sapien
aaactctatttggtgcgtgcccacg

SEQ ID NO: 1265119 - DNA, 25 bp, Homo sapien
caagtgacaagcagaagagtccggc

SEQ ID NO: 1265120 - DNA, 25 bp, Homo sapien
gattccaatatgaacgtctcccagg

SEQ ID NO: 1265121 - DNA, 25 bp, Homo sapien
tatgtgccgcgtcacagcagtacca

SEQ ID NO: 1265122 - DNA, 25 bp, Homo sapien
gatgacggccagcttgaggctctcg

SEQ ID NO: 1265123 - DNA, 25 bp, Homo sapien
gctcggccagccacgcgttcttgat

SEQ ID NO: 1265124 - DNA, 25 bp, Homo sapien
tgacgctgaagagccggccgcccag

SEQ ID NO: 1265125 - DNA, 25 bp, Homo sapien
tcggctgggacctcgtacttgaaga

SEQ ID NO: 1265126 - DNA, 25 bp, Homo sapien
ggacagacagcaccacatacaattg

SEQ ID NO: 1265127 - DNA, 25 bp, Homo sapien
gcctggcatctatgtgggacacgga

SEQ ID NO: 1265128 - DNA, 25 bp, Homo sapien
gaaactctgccctagatctcctgtg

SEQ ID NO: 1265129 - DNA, 25 bp, Homo sapien
gcggcgaccaacgtgaaggctgaaa

SEQ ID NO: 1265130 - DNA, 25 bp, Homo sapien
ctgaggtcgaggcacggggagctgg

SEQ ID NO: 1265131 - DNA, 25 bp, Homo sapien
ggcctgagttgcacgccaggatgac

SEQ ID NO: 1265132 - DNA, 25 bp, Homo sapien
acgacagggtccatgcccgcaatac

SEQ ID NO: 1265133 - DNA, 25 bp, Homo sapien
tctgccacgatgagggactcgctgt

SEQ ID NO: 1265134 - DNA, 25 bp, Homo sapien
tgtgggtcacgtcgttcagggcggg

SEQ ID NO: 1265135 - DNA, 25 bp, Homo sapien
agggcccaggctctttaggaacctg

SEQ ID NO: 1265136 - DNA, 25 bp, Homo sapien
cagcatggagcctgcgtgcaccccg

SEQ ID NO: 1265137 - DNA, 25 bp, Homo sapien
caggctctttaggaacctgtgctgg

SEQ ID NO: 1265138 - DNA, 25 bp, Homo sapien
tctttaggaacctgtgctggcccag

SEQ ID NO: 1265139 - DNA, 25 bp, Homo sapien
gccaaccccaccgagagcagagaag

SEQ ID NO: 1265140 - DNA, 25 bp, Homo sapien
tgcacctacctgctgcgtccggagg

SEQ ID NO: 1265141 - DNA, 25 bp, Homo sapien
aggagcctggcgtcaaccctgggct

SEQ ID NO: 1265142 - DNA, 25 bp, Homo sapien
gagctgagtttagagcctgcccctg

SEQ ID NO: 1265143 - DNA, 25 bp, Homo sapien
taaggagtagctccctgacaaaggg

SEQ ID NO: 1265144 - DNA, 25 bp, Homo sapien
gaaaattaaggcacatttatgaggg

SEQ ID NO: 1265145 - DNA, 25 bp, Homo sapien
ggggaagactcccaaaatgatgtct

SEQ ID NO: 1265146 - DNA, 25 bp, Homo sapien
tccactgttatctgcgaaaattaag

SEQ ID NO: 1265147 - DNA, 25 bp, Homo sapien
ggccccgctgtgtccccagcagcag

SEQ ID NO: 1265148 - DNA, 25 bp, Homo sapien
tctgaagccactcgctgtaggaatc

SEQ ID NO: 1265149 - DNA, 25 bp, Homo sapien
taggaatccacgagccagggtcttt

SEQ ID NO: 1265150 - DNA, 25 bp, Homo sapien
gtaggaatccacgagccagggtctt

SEQ ID NO: 1265151 - DNA, 25 bp, Homo sapien
ctttaatctctgaagccactcgctg

SEQ ID NO: 1265152 - DNA, 25 bp, Homo sapien
tcctctttgcttcttcaaacccaaa

SEQ ID NO: 1265153 - DNA, 25 bp, Homo sapien
tctttgcttcttcaaacccaaagta

SEQ ID NO: 1265154 - DNA, 25 bp, Homo sapien
cttgtaacttcctctttgcttcttc

SEQ ID NO: 1265155 - DNA, 25 bp, Homo sapien
ctttgcttcttcaaacccaaagtag

SEQ ID NO: 1265156 - DNA, 25 bp, Homo sapien
gccacagtgctcaatgtgaagaccc

SEQ ID NO: 1265157 - DNA, 25 bp, Homo sapien
aaaaccttcagccacagtgctcaat

SEQ ID NO: 1265158 - DNA, 25 bp, Homo sapien
ttcagccacagtgctcaatgtgaag

SEQ ID NO: 1265159 - DNA, 25 bp, Homo sapien
cagtgctcaatgtgaagaccccaaa

SEQ ID NO: 1265160 - DNA, 25 bp, Homo sapien
taacatgctgcgatccgcagaaggc

SEQ ID NO: 1265161 - DNA, 25 bp, Homo sapien
acagaggcagctgctaagaccccaa

SEQ ID NO: 1265162 - DNA, 25 bp, Homo sapien
aggcagctgctaagaccccaaatcc

SEQ ID NO: 1265163 - DNA, 25 bp, Homo sapien
tcccaggcagaacagatacagcgtt

SEQ ID NO: 1265164 - DNA, 25 bp, Homo sapien
ttcattttcaagattcagagcccca

SEQ ID NO: 1265165 - DNA, 25 bp, Homo sapien
gcgtgtcctacaggccagtctaggg

SEQ ID NO: 1265166 - DNA, 25 bp, Homo sapien
gattttcaaatccacacccttaggc

SEQ ID NO: 1265167 - DNA, 25 bp, Homo sapien
ggcctctgcggcacccatgcttaag

SEQ ID NO: 1265168 - DNA, 25 bp, Homo sapien
gtcgaagacattccccgccaggagg

SEQ ID NO: 1265169 - DNA, 25 bp, Homo sapien
tttggccccccagtcgaagacattc

SEQ ID NO: 1265170 - DNA, 25 bp, Homo sapien
aggaggcctttcaccagcgccagct

SEQ ID NO: 1265171 - DNA, 25 bp, Homo sapien
acctcagcgccacgccattctcccg

SEQ ID NO: 1265172 - DNA, 25 bp, Homo sapien
gctgcgcacggtcagggtcccatag

SEQ ID NO: 1265173 - DNA, 25 bp, Homo sapien
aactcgttcagacagtgctccctgg

SEQ ID NO: 1265174 - DNA, 25 bp, Homo sapien
ggatccgggaagttgaactcgttca

SEQ ID NO: 1265175 - DNA, 25 bp, Homo sapien
aggctgcgcacggtcagggtcccat

SEQ ID NO: 1265176 - DNA, 25 bp, Homo sapien
tctgaagcttgttccagtacttctg

SEQ ID NO: 1265177 - DNA, 25 bp, Homo sapien
tgttccagtacttctgccggaactt

SEQ ID NO: 1265178 - DNA, 25 bp, Homo sapien
aagcttgttccagtacttctgccgg

SEQ ID NO: 1265179 - DNA, 25 bp, Homo sapien
aacttctccgccctctcggctgcat

SEQ ID NO: 1265180 - DNA, 25 bp, Homo sapien
gagccagtattttcgggccagagcg

SEQ ID NO: 1265181 - DNA, 25 bp, Homo sapien
gccggtccatttccagcaagtcaaa

SEQ ID NO: 1265182 - DNA, 25 bp, Homo sapien
agcggcaggtcaaccagtggcctct

SEQ ID NO: 1265183 - DNA, 25 bp, Homo sapien
gccagagcgtcatcggtgaggtcca

SEQ ID NO: 1265184 - DNA, 25 bp, Homo sapien
atggttcagaacgacccaagccaca

SEQ ID NO: 1265185 - DNA, 25 bp, Homo sapien
cggcctgagccggataccttgactt

SEQ ID NO: 1265186 - DNA, 25 bp, Homo sapien
ggtggaaacgtcaccatggttcaga

SEQ ID NO: 1265187 - DNA, 25 bp, Homo sapien
actctctctctaagaagggagatgt

SEQ ID NO: 1265188 - DNA, 25 bp, Homo sapien
tgttccactccgtgccgggcaggga

SEQ ID NO: 1265189 - DNA, 25 bp, Homo sapien
tccaggtggccgtgtctgcacacag

SEQ ID NO: 1265190 - DNA, 25 bp, Homo sapien
gcagtgttccactccgtgccgggca

SEQ ID NO: 1265191 - DNA, 25 bp, Homo sapien
caggtggccgtgtctgcacacagag

SEQ ID NO: 1265192 - DNA, 25 bp, Homo sapien
ccaccctccggtggctaccccacag

SEQ ID NO: 1265193 - DNA, 25 bp, Homo sapien
gaactgtgtagctgaccgcctcttc

SEQ ID NO: 1265194 - DNA, 25 bp, Homo sapien
actggggcacccctgctggcaaccc

SEQ ID NO: 1265195 - DNA, 25 bp, Homo sapien
aggggaactgtgtagctgaccgcct

SEQ ID NO: 1265196 - DNA, 25 bp, Homo sapien
gccgagctcgggtgatgcactcatc

SEQ ID NO: 1265197 - DNA, 25 bp, Homo sapien
ccggagctgcctgcatagttctctc

SEQ ID NO: 1265198 - DNA, 25 bp, Homo sapien
cgagctcgggtgatgcactcatcag

SEQ ID NO: 1265199 - DNA, 25 bp, Homo sapien
ggagctgcctgcatagttctctccc

SEQ ID NO: 1265200 - DNA, 25 bp, Homo sapien
tttcaggaacgctccgatggctccc

SEQ ID NO: 1265201 - DNA, 25 bp, Homo sapien
ccaggtagccttcgtgcctcagaaa

SEQ ID NO: 1265202 - DNA, 25 bp, Homo sapien
cttcgtgcctcagaaacagcgcctg

SEQ ID NO: 1265203 - DNA, 25 bp, Homo sapien
tcagctcctttcaggaacgctccga

SEQ ID NO: 1265204 - DNA, 25 bp, Homo sapien
ctataggtgatggtgcgcatggtca

SEQ ID NO: 1265205 - DNA, 25 bp, Homo sapien
ccaatgtcgttgctgatcatgtgca

SEQ ID NO: 1265206 - DNA, 25 bp, Homo sapien
aagtacacgcggtccaggctgtgca

SEQ ID NO: 1265207 - DNA, 25 bp, Homo sapien
gtggccccggataaagaagcctcca

SEQ ID NO: 1265208 - DNA, 25 bp, Homo sapien
cgcaccagcatgtccacattgctgt

SEQ ID NO: 1265209 - DNA, 25 bp, Homo sapien
cccgctcagcccgagagtctggtgg

SEQ ID NO: 1265210 - DNA, 25 bp, Homo sapien
cccgaagctgctggcgatgaggttc

SEQ ID NO: 1265211 - DNA, 25 bp, Homo sapien
tcggcggtggccgacttcccgaagc

SEQ ID NO: 1265212 - DNA, 25 bp, Homo sapien
gacccactcgaacctgtcctccgtc

SEQ ID NO: 1265213 - DNA, 25 bp, Homo sapien
cttcgttttggtgagcagagcgcca

SEQ ID NO: 1265214 - DNA, 25 bp, Homo sapien
ttttggtgagcagagcgccaagccc

SEQ ID NO: 1265215 - DNA, 25 bp, Homo sapien
gaaggtgccgcctccaatggagctg

SEQ ID NO: 1265216 - DNA, 25 bp, Homo sapien
gactccagagccgatattgacaaga

SEQ ID NO: 1265217 - DNA, 25 bp, Homo sapien
tgagcacgaagttgcaccccttaat

SEQ ID NO: 1265218 - DNA, 25 bp, Homo sapien
tctggaaccggaactcagggtcgga

SEQ ID NO: 1265219 - DNA, 25 bp, Homo sapien
ttctggtacacgaaggcctcatggg

SEQ ID NO: 1265220 - DNA, 25 bp, Homo sapien
caggcaggcttcgatgtaggtattc

SEQ ID NO: 1265221 - DNA, 25 bp, Homo sapien
caaacttaatgaagtgcagtcgagc

SEQ ID NO: 1265222 - DNA, 25 bp, Homo sapien
cagccgcagcttctcttcgatgagg

SEQ ID NO: 1265223 - DNA, 25 bp, Homo sapien
tgaaatctcatagggcggctcatgt

SEQ ID NO: 1265224 - DNA, 25 bp, Homo sapien
tttccggagtggtcgaaagaccgca

SEQ ID NO: 1265225 - DNA, 25 bp, Homo sapien
tgtgctgtaccgttgaatagtaggc

SEQ ID NO: 1265226 - DNA, 25 bp, Homo sapien
tgaatagtaggccagcttggttaac

SEQ ID NO: 1265227 - DNA, 25 bp, Homo sapien
gcaccttggcgactttgtgctgtac

SEQ ID NO: 1265228 - DNA, 25 bp, Homo sapien
ggagacacaaaccgggcaggattca

SEQ ID NO: 1265229 - DNA, 25 bp, Homo sapien
gggagacacaaaccgggcaggattc

SEQ ID NO: 1265230 - DNA, 25 bp, Homo sapien
aggggagacacaaaccgggcaggat

SEQ ID NO: 1265231 - DNA, 25 bp, Homo sapien
gagacacaaaccgggcaggattcag

SEQ ID NO: 1265232 - DNA, 25 bp, Homo sapien
cctgggggtccatgccccacactct

SEQ ID NO: 1265233 - DNA, 25 bp, Homo sapien
agtctctgtagatgaggggtttggg

SEQ ID NO: 1265234 - DNA, 25 bp, Homo sapien
ccacactctctgggtgtcctggaga

SEQ ID NO: 1265235 - DNA, 25 bp, Homo sapien
ctctgggtgtcctggagactaaagt

SEQ ID NO: 1265236 - DNA, 25 bp, Homo sapien
ctgtgctcttcacatctgagccatg

SEQ ID NO: 1265237 - DNA, 25 bp, Homo sapien
agccatggccttctagttctccctg

SEQ ID NO: 1265238 - DNA, 25 bp, Homo sapien
gctcttcacatctgagccatggcct

SEQ ID NO: 1265239 - DNA, 25 bp, Homo sapien
acatctgagccatggccttctagtt

SEQ ID NO: 1265240 - DNA, 25 bp, Homo sapien
ggcaggcccattcatcccagtattt

SEQ ID NO: 1265241 - DNA, 25 bp, Homo sapien
ccagtatttactgggcggcaaagac

SEQ ID NO: 1265242 - DNA, 25 bp, Homo sapien
ggaatggcctgggtctctctgagtc

SEQ ID NO: 1265243 - DNA, 25 bp, Homo sapien
caccgctgctcttgtgggattcaca

SEQ ID NO: 1265244 - DNA, 25 bp, Homo sapien
tatgtgaagccgcagcggctattca

SEQ ID NO: 1265245 - DNA, 25 bp, Homo sapien
tctagcccgatgaccctgggcaaat

SEQ ID NO: 1265246 - DNA, 25 bp, Homo sapien
gctaagagggagaggtatgtgaagc

SEQ ID NO: 1265247 - DNA, 25 bp, Homo sapien
aagccctcatgcctgaaacatgggc

SEQ ID NO: 1265248 - DNA, 25 bp, Homo sapien
tcaggagcgtgggaaaaaggtctag

SEQ ID NO: 1265249 - DNA, 25 bp, Homo sapien
tggtatcctcatctgcgaaaaggga

SEQ ID NO: 1265250 - DNA, 25 bp, Homo sapien
tggcccgccgtcattactgagagca

SEQ ID NO: 1265251 - DNA, 25 bp, Homo sapien
aattcgcgttcctcccctagaggtg

SEQ ID NO: 1265252 - DNA, 25 bp, Homo sapien
caggcaggagggtctgcagcggacc

SEQ ID NO: 1265253 - DNA, 25 bp, Homo sapien
tcaggcaggagggtctgcagcggac

SEQ ID NO: 1265254 - DNA, 25 bp, Homo sapien
tctcgaccagaactaaggaccccaa

SEQ ID NO: 1265255 - DNA, 25 bp, Homo sapien
cggcgtccactctccagagagcggg

SEQ ID NO: 1265256 - DNA, 25 bp, Homo sapien
tggccgaagacataaaattccgccg

SEQ ID NO: 1265257 - DNA, 25 bp, Homo sapien
gcccagatgccgatgtggccgaaga

SEQ ID NO: 1265258 - DNA, 25 bp, Homo sapien
gcagcgtgatgctcttgtccagact

SEQ ID NO: 1265259 - DNA, 25 bp, Homo sapien
ggcgttctccaggttgcggaagatc

SEQ ID NO: 1265260 - DNA, 25 bp, Homo sapien
tatgtcgatggcgaagcgcttggcg

SEQ ID NO: 1265261 - DNA, 25 bp, Homo sapien
tgtccagactgtccccgctgctccc

SEQ ID NO: 1265262 - DNA, 25 bp, Homo sapien
gccatggagatatatgcgcatatat

SEQ ID NO: 1265263 - DNA, 25 bp, Homo sapien
tgcgcatatatttgactgccaaacg

SEQ ID NO: 1265264 - DNA, 25 bp, Homo sapien
catatatttgactgccaaacgcccc

SEQ ID NO: 1265265 - DNA, 25 bp, Homo sapien
tatatgcgcatatatttgactgcca

SEQ ID NO: 1265266 - DNA, 25 bp, Homo sapien
tgctgtaatggcgatccgtggaaag

SEQ ID NO: 1265267 - DNA, 25 bp, Homo sapien
gaagatgtgtgctgtaatggcgatc

SEQ ID NO: 1265268 - DNA, 25 bp, Homo sapien
tgcacctgcgggtagggaagatgtg

SEQ ID NO: 1265269 - DNA, 25 bp, Homo sapien
taatggcgatccgtggaaagtgctg

SEQ ID NO: 1265270 - DNA, 25 bp, Homo sapien
tggagtagccagaaaggggctgaag

SEQ ID NO: 1265271 - DNA, 25 bp, Homo sapien
gactgcctgtggagtagccagaaag

SEQ ID NO: 1265272 - DNA, 25 bp, Homo sapien
ctagactgcctgtggagtagccaga

SEQ ID NO: 1265273 - DNA, 25 bp, Homo sapien
ggagtagccagaaaggggctgaagg

SEQ ID NO: 1265274 - DNA, 25 bp, Homo sapien
tttaaggatcatagtggaggcaccc

SEQ ID NO: 1265275 - DNA, 25 bp, Homo sapien
ggcttccacgtgactgagagttcaa

SEQ ID NO: 1265276 - DNA, 25 bp, Homo sapien
tgagtacaaagtcgtgcccacacgc

SEQ ID NO: 1265277 - DNA, 25 bp, Homo sapien
tattatggcggcttcggagcagtcc

SEQ ID NO: 1265278 - DNA, 25 bp, Homo sapien
cactgtttcctatgaggatacagct

SEQ ID NO: 1265279 - DNA, 25 bp, Homo sapien
aaaaggcaaatgtgcccgcggcaca

SEQ ID NO: 1265280 - DNA, 25 bp, Homo sapien
cagctacgggccctgaagaaagtcc

SEQ ID NO: 1265281 - DNA, 25 bp, Homo sapien
ctcgagttcggccttcacaaaaggc

SEQ ID NO: 1265282 - DNA, 25 bp, Homo sapien
gccccggcactacaaatatcataga

SEQ ID NO: 1265283 - DNA, 25 bp, Homo sapien
caaatatcatagaaccccgggcggc

SEQ ID NO: 1265284 - DNA, 25 bp, Homo sapien
aatatcatagaaccccgggcggccg

SEQ ID NO: 1265285 - DNA, 25 bp, Homo sapien
gcagtgtgcgagccccggcactaca

SEQ ID NO: 1265286 - DNA, 25 bp, Homo sapien
cctgattgtcctaaaacggcaggga

SEQ ID NO: 1265287 - DNA, 25 bp, Homo sapien
ggccctgattgtcctaaaacggcag

SEQ ID NO: 1265288 - DNA, 25 bp, Homo sapien
cctaaaacggcagggactctgcaca

SEQ ID NO: 1265289 - DNA, 25 bp, Homo sapien
attgtcctaaaacggcagggactct

SEQ ID NO: 1265290 - DNA, 25 bp, Homo sapien
ctctgagaatggggctcctgcgggc

SEQ ID NO: 1265291 - DNA, 25 bp, Homo sapien
tccggagaagggcgcgtccaagccc

SEQ ID NO: 1265292 - DNA, 25 bp, Homo sapien
gcgcgtccaagcccggggcggacga

SEQ ID NO: 1265293 - DNA, 25 bp, Homo sapien
gagaatggggctcctgcgggccggc

SEQ ID NO: 1265294 - DNA, 25 bp, Homo sapien
cgagaggagcaggctcgccctctgg

SEQ ID NO: 1265295 - DNA, 25 bp, Homo sapien
ccctctggtcgtcgggccgcgcgcc

SEQ ID NO: 1265296 - DNA, 25 bp, Homo sapien
ccgcgcgcccgcaggtcccgccggg

SEQ ID NO: 1265297 - DNA, 25 bp, Homo sapien
gctcgccctctggtcgtcgggccgc

SEQ ID NO: 1265298 - DNA, 25 bp, Homo sapien
cagggccgccagaggccgcaggcgg

SEQ ID NO: 1265299 - DNA, 25 bp, Homo sapien
agggccgccagaggccgcaggcggg

SEQ ID NO: 1265300 - DNA, 25 bp, Homo sapien
accagggccgccagaggccgcaggc

SEQ ID NO: 1265301 - DNA, 25 bp, Homo sapien
tcaccagggccgccagaggccgcag

SEQ ID NO: 1265302 - DNA, 25 bp, Homo sapien
gggccgctggaagtggtacagcagc

SEQ ID NO: 1265303 - DNA, 25 bp, Homo sapien
tcctgcaggcaccacgagtagcctt

SEQ ID NO: 1265304 - DNA, 25 bp, Homo sapien
cgtggagcgtcaggaactgcacggc

SEQ ID NO: 1265305 - DNA, 25 bp, Homo sapien
agcagcttcatctgcgtgtcgctgg

SEQ ID NO: 1265306 - DNA, 25 bp, Homo sapien
gcttcaggtagctgacagccatctc

SEQ ID NO: 1265307 - DNA, 25 bp, Homo sapien
ttgctgtgcttcaggtagctgacag

SEQ ID NO: 1265308 - DNA, 25 bp, Homo sapien
ggagttgggctggtgccgcgcgaac

SEQ ID NO: 1265309 - DNA, 25 bp, Homo sapien
tgtgcttcaggtagctgacagccat

SEQ ID NO: 1265310 - DNA, 25 bp, Homo sapien
ctgttgatgcggtcgcggcgcatct

SEQ ID NO: 1265311 - DNA, 25 bp, Homo sapien
agctgctcgatgctgctgttgatgc

SEQ ID NO: 1265312 - DNA, 25 bp, Homo sapien
tgctcgatgctgctgttgatgcggt

SEQ ID NO: 1265313 - DNA, 25 bp, Homo sapien
tgttgatgcggtcgcggcgcatctt

SEQ ID NO: 1265314 - DNA, 25 bp, Homo sapien
ttggggctgagcagctccacggcca

SEQ ID NO: 1265315 - DNA, 25 bp, Homo sapien
tcggtttttctctttggggctgagc

SEQ ID NO: 1265316 - DNA, 25 bp, Homo sapien
gggctgagcagctccacggccacag

SEQ ID NO: 1265317 - DNA, 25 bp, Homo sapien
gagcagctccacggccacagtgctg

SEQ ID NO: 1265318 - DNA, 25 bp, Homo sapien
ggaacaggcgacgaggcgacgcggg

SEQ ID NO: 1265319 - DNA, 25 bp, Homo sapien
ctggcgcggaacaggcgacgaggcg

SEQ ID NO: 1265320 - DNA, 25 bp, Homo sapien
cgcggaacaggcgacgaggcgacgc

SEQ ID NO: 1265321 - DNA, 25 bp, Homo sapien
tggcgcggaacaggcgacgaggcga

SEQ ID NO: 1265322 - DNA, 25 bp, Homo sapien
gctctgggcattgatggcggctggc

SEQ ID NO: 1265323 - DNA, 25 bp, Homo sapien
ctctgggcattgatggcggctggca

SEQ ID NO: 1265324 - DNA, 25 bp, Homo sapien
tctgggcattgatggcggctggcac

SEQ ID NO: 1265325 - DNA, 25 bp, Homo sapien
tggttgtgttcagtggagctatttc

SEQ ID NO: 1265326 - DNA, 25 bp, Homo sapien
gggatctggttgtgttcagtggagc

SEQ ID NO: 1265327 - DNA, 25 bp, Homo sapien
gatctggttgtgttcagtggagcta

SEQ ID NO: 1265328 - DNA, 25 bp, Homo sapien
tctggttgtgttcagtggagctatt

SEQ ID NO: 1265329 - DNA, 25 bp, Homo sapien
ggcagtcacattgtggcatgtccct

SEQ ID NO: 1265330 - DNA, 25 bp, Homo sapien
catgtcccttgcctgactatgggct

SEQ ID NO: 1265331 - DNA, 25 bp, Homo sapien
ggttcatgctggcggcagtcacatt

SEQ ID NO: 1265332 - DNA, 25 bp, Homo sapien
tgtcccttgcctgactatgggctcc

SEQ ID NO: 1265333 - DNA, 25 bp, Homo sapien
acatcaaggaggtgcttagccaggg

SEQ ID NO: 1265334 - DNA, 25 bp, Homo sapien
caggacgaggtagtcacccgtgtgc

SEQ ID NO: 1265335 - DNA, 25 bp, Homo sapien
gtgtgcccatgacctatacgctgct

SEQ ID NO: 1265336 - DNA, 25 bp, Homo sapien
atacgctgctggtccagcggccaca

SEQ ID NO: 1265337 - DNA, 25 bp, Homo sapien
ctcccggctcacaccatccacggtg

SEQ ID NO: 1265338 - DNA, 25 bp, Homo sapien
cccggctcacaccatccacggtggg

SEQ ID NO: 1265339 - DNA, 25 bp, Homo sapien
taggctcccggctcacaccatccac

SEQ ID NO: 1265340 - DNA, 25 bp, Homo sapien
ggctcccggctcacaccatccacgg

SEQ ID NO: 1265341 - DNA, 25 bp, Homo sapien
ccagctgtgaacagatgcagccgga

SEQ ID NO: 1265342 - DNA, 25 bp, Homo sapien
agccacccagcttgtctccccagct

SEQ ID NO: 1265343 - DNA, 25 bp, Homo sapien
tctccccagctgtgaacagatgcag

SEQ ID NO: 1265344 - DNA, 25 bp, Homo sapien
tgaacagatgcagccggaccaggtg

SEQ ID NO: 1265345 - DNA, 25 bp, Homo sapien
cgagggcagagcagcgcatcgatcc

SEQ ID NO: 1265346 - DNA, 25 bp, Homo sapien
cctccaccctctggcgagggcagag

SEQ ID NO: 1265347 - DNA, 25 bp, Homo sapien
gggcattggtgagggacggtgtggc

SEQ ID NO: 1265348 - DNA, 25 bp, Homo sapien
catcgatccgatcagtgctgggagc

SEQ ID NO: 1265349 - DNA, 25 bp, Homo sapien
ctgcacggacgtgtggacaaaggga

SEQ ID NO: 1265350 - DNA, 25 bp, Homo sapien
tgccctttgtcaccagggaaggccg

SEQ ID NO: 1265351 - DNA, 25 bp, Homo sapien
caaagggaggctgtagcatgaaggc

SEQ ID NO: 1265352 - DNA, 25 bp, Homo sapien
tgggaaccgccggctctcgtcttta

SEQ ID NO: 1265353 - DNA, 25 bp, Homo sapien
tgccttgagggtgtagactgggccc

SEQ ID NO: 1265354 - DNA, 25 bp, Homo sapien
agggtgtagactgggcccggcatgg

SEQ ID NO: 1265355 - DNA, 25 bp, Homo sapien
tgtgggagatgccttgagggtgtag

SEQ ID NO: 1265356 - DNA, 25 bp, Homo sapien
gagatgccttgagggtgtagactgg

SEQ ID NO: 1265357 - DNA, 25 bp, Homo sapien
gtgaagccaggtgcaacagctgagc

SEQ ID NO: 1265358 - DNA, 25 bp, Homo sapien
aggtgcaacagctgagctggagcct

SEQ ID NO: 1265359 - DNA, 25 bp, Homo sapien
ctgcggtgaagccaggtgcaacagc

SEQ ID NO: 1265360 - DNA, 25 bp, Homo sapien
ccaggtgcaacagctgagctggagc

SEQ ID NO: 1265361 - DNA, 25 bp, Homo sapien
gcagagtcccctcagtgtgcagagt

SEQ ID NO: 1265362 - DNA, 25 bp, Homo sapien
gcagagtcccctctgtgtgcagagc

SEQ ID NO: 1265363 - DNA, 25 bp, Homo sapien
tgcagagtcccctcagtgtgcagag

SEQ ID NO: 1265364 - DNA, 25 bp, Homo sapien
tgcagagtcccctctgtgtgcagag

SEQ ID NO: 1265365 - DNA, 25 bp, Homo sapien
ttcagtgttgcgctgaggtgcagag

SEQ ID NO: 1265366 - DNA, 25 bp, Homo sapien
ggcccatctcctgcggcatttcagt

SEQ ID NO: 1265367 - DNA, 25 bp, Homo sapien
ctgctcttcccgtgactgtggagac

SEQ ID NO: 1265368 - DNA, 25 bp, Homo sapien
gctcttcccgtgactgtggagacag

SEQ ID NO: 1265369 - DNA, 25 bp, Homo sapien
tggaatacggcttgtgggcccaaac

SEQ ID NO: 1265370 - DNA, 25 bp, Homo sapien
ggcttgtgggcccaaacaggtgtcc

SEQ ID NO: 1265371 - DNA, 25 bp, Homo sapien
aatacggcttgtgggcccaaacagg

SEQ ID NO: 1265372 - DNA, 25 bp, Homo sapien
tgggcccaaacaggtgtcccagtcc

SEQ ID NO: 1265373 - DNA, 25 bp, Homo sapien
gggtgaggctggcacccgagaggcc

SEQ ID NO: 1265374 - DNA, 25 bp, Homo sapien
tgatgccctttggtgccctggcttg

SEQ ID NO: 1265375 - DNA, 25 bp, Homo sapien
tgctgagacagtagcccacacccct

SEQ ID NO: 1265376 - DNA, 25 bp, Homo sapien
cagtagcccacacccctgcgcaggg

SEQ ID NO: 1265377 - DNA, 25 bp, Homo sapien
acttgagtgtggccacaccgtcctg

SEQ ID NO: 1265378 - DNA, 25 bp, Homo sapien
gccacaccgtcctgaggcttcgtca

SEQ ID NO: 1265379 - DNA, 25 bp, Homo sapien
ccacaccgtcctgaggcttcgtcat

SEQ ID NO: 1265380 - DNA, 25 bp, Homo sapien
tctgcggacattcatcctgcacaaa

SEQ ID NO: 1265381 - DNA, 25 bp, Homo sapien
ggctttgtgtgctgagctccggcct

SEQ ID NO: 1265382 - DNA, 25 bp, Homo sapien
agcagtcgtcccagcgggcggcagg

SEQ ID NO: 1265383 - DNA, 25 bp, Homo sapien
gcgcgtgcgcggcaacaaactcatt

SEQ ID NO: 1265384 - DNA, 25 bp, Homo sapien
catttctgagtctgggcggttggat

SEQ ID NO: 1265385 - DNA, 25 bp, Homo sapien
ccttcctggccaagcgacttctggg

SEQ ID NO: 1265386 - DNA, 25 bp, Homo sapien
cctggcctgtatgcagtaggtgctg

SEQ ID NO: 1265387 - DNA, 25 bp, Homo sapien
cctgcctggcgtggcgggcatttct

SEQ ID NO: 1265388 - DNA, 25 bp, Homo sapien
gaggctggcccgaggactttcccac

SEQ ID NO: 1265389 - DNA, 25 bp, Homo sapien
cacagaaagggccggcagccagctg

SEQ ID NO: 1265390 - DNA, 25 bp, Homo sapien
cccagagataatccgggctttgaga

SEQ ID NO: 1265391 - DNA, 25 bp, Homo sapien
ctgcagacccagagataatccgggc

SEQ ID NO: 1265392 - DNA, 25 bp, Homo sapien
gcttccaagtctggcctgcacggct

SEQ ID NO: 1265393 - DNA, 25 bp, Homo sapien
tctcacaccctttgcaaccatcttc

SEQ ID NO: 1265394 - DNA, 25 bp, Homo sapien
ctgcacggctctcacaccctttgca

SEQ ID NO: 1265395 - DNA, 25 bp, Homo sapien
tgcttccaagtctggcctgcacggc

SEQ ID NO: 1265396 - DNA, 25 bp, Homo sapien
tctccctgctgtccgagaagttcgt

SEQ ID NO: 1265397 - DNA, 25 bp, Homo sapien
cctgctgtccgagaagttcgtgcgg

SEQ ID NO: 1265398 - DNA, 25 bp, Homo sapien
tccgagaagttcgtgcggtgccagc

SEQ ID NO: 1265399 - DNA, 25 bp, Homo sapien
ctgtccgagaagttcgtgcggtgcc

SEQ ID NO: 1265400 - DNA, 25 bp, Homo sapien
ctttccgcaggatcctgggatgttg

SEQ ID NO: 1265401 - DNA, 25 bp, Homo sapien
ctgggtgggtctttccgcaggatcc

SEQ ID NO: 1265402 - DNA, 25 bp, Homo sapien
tgggtgggtctttccgcaggatcct

SEQ ID NO: 1265403 - DNA, 25 bp, Homo sapien
tgggtctttccgcaggatcctggga

SEQ ID NO: 1265404 - DNA, 25 bp, Homo sapien
tccgtgatgaccactgagtgagaga

SEQ ID NO: 1265405 - DNA, 25 bp, Homo sapien
tttcactttccgtgatgaccactga

SEQ ID NO: 1265406 - DNA, 25 bp, Homo sapien
actttccgtgatgaccactgagtga

SEQ ID NO: 1265407 - DNA, 25 bp, Homo sapien
tttccgtgatgaccactgagtgaga

SEQ ID NO: 1265408 - DNA, 25 bp, Homo sapien
cagggcccgtgctcgggcagtgagg

SEQ ID NO: 1265409 - DNA, 25 bp, Homo sapien
aggcagggcccgtgctcgggcagtg

SEQ ID NO: 1265410 - DNA, 25 bp, Homo sapien
cccgtgctcgggcagtgaggcctcg

SEQ ID NO: 1265411 - DNA, 25 bp, Homo sapien
gtgctcgggcagtgaggcctcggcc

SEQ ID NO: 1265412 - DNA, 25 bp, Homo sapien
tgagaaggcccggaccccacaggcc

SEQ ID NO: 1265413 - DNA, 25 bp, Homo sapien
ctgagaaggcccggaccccacaggc

SEQ ID NO: 1265414 - DNA, 25 bp, Homo sapien
tgtgtcgtcaggacgcagcgtctct

SEQ ID NO: 1265415 - DNA, 25 bp, Homo sapien
tgcgctctttggctgcgtgctttct

SEQ ID NO: 1265416 - DNA, 25 bp, Homo sapien
tctgagcctctttgcgctctttggc

SEQ ID NO: 1265417 - DNA, 25 bp, Homo sapien
atctgggaaatctccgctgcgggac

SEQ ID NO: 1265418 - DNA, 25 bp, Homo sapien
tgagaccggctgtccaatggcagag

SEQ ID NO: 1265419 - DNA, 25 bp, Homo sapien
caatggtggttcacgtgtctctcca

SEQ ID NO: 1265420 - DNA, 25 bp, Homo sapien
ttagtccattcgcaatgcagctgga

SEQ ID NO: 1265421 - DNA, 25 bp, Homo sapien
caagtgtgcaaatcagtggctttag

SEQ ID NO: 1265422 - DNA, 25 bp, Homo sapien
ccgtgcaaaagcgacacaggcgggt

SEQ ID NO: 1265423 - DNA, 25 bp, Homo sapien
gtgcaaaagcgacacaggcgggtac

SEQ ID NO: 1265424 - DNA, 25 bp, Homo sapien
ttcccgtgcaaaagcgacacaggcg

SEQ ID NO: 1265425 - DNA, 25 bp, Homo sapien
caaaagcgacacaggcgggtacaaa

SEQ ID NO: 1265426 - DNA, 25 bp, Homo sapien
gcctggcgttcttcagacacaagca

SEQ ID NO: 1265427 - DNA, 25 bp, Homo sapien
tctggggacaccagcctggcgttct

SEQ ID NO: 1265428 - DNA, 25 bp, Homo sapien
ggacaccagcctggcgttcttcaga

SEQ ID NO: 1265429 - DNA, 25 bp, Homo sapien
accagcctggcgttcttcagacaca

SEQ ID NO: 1265430 - DNA, 25 bp, Homo sapien
cagccgggtcttgggcgcagaggga

SEQ ID NO: 1265431 - DNA, 25 bp, Homo sapien
gggtcttgggcgcagagggaccacc

SEQ ID NO: 1265432 - DNA, 25 bp, Homo sapien
aggcagccgggtcttgggcgcagag

SEQ ID NO: 1265433 - DNA, 25 bp, Homo sapien
cgggtcttgggcgcagagggaccac

SEQ ID NO: 1265434 - DNA, 25 bp, Homo sapien
tgttaatccgttcacctgctggtgg

SEQ ID NO: 1265435 - DNA, 25 bp, Homo sapien
tgttgccacggagcatctcattgtg

SEQ ID NO: 1265436 - DNA, 25 bp, Homo sapien
tcatccgccgtgcagtgtgtgtcca

SEQ ID NO: 1265437 - DNA, 25 bp, Homo sapien
tgtgtggccctagcccagtgtgtta

SEQ ID NO: 1265438 - DNA, 25 bp, Homo sapien
ctttccctgcgtctggacgtagtag

SEQ ID NO: 1265439 - DNA, 25 bp, Homo sapien
gtctggacgtagtagcaatttctcg

SEQ ID NO: 1265440 - DNA, 25 bp, Homo sapien
tttccctgcgtctggacgtagtagc

SEQ ID NO: 1265441 - DNA, 25 bp, Homo sapien
ttcactttggtcttcgtgtggctgg

SEQ ID NO: 1265442 - DNA, 25 bp, Homo sapien
tcctttaaaggacgctgcgctgtgt

SEQ ID NO: 1265443 - DNA, 25 bp, Homo sapien
ctgtgttctgcgtggagttcagctc

SEQ ID NO: 1265444 - DNA, 25 bp, Homo sapien
tcttcgtgtggctggttctgaagcc

SEQ ID NO: 1265445 - DNA, 25 bp, Homo sapien
ctccccctggcggttggaactcctg

SEQ ID NO: 1265446 - DNA, 25 bp, Homo sapien
ctccaggactctccccctggcggtt

SEQ ID NO: 1265447 - DNA, 25 bp, Homo sapien
cctggcggttggaactcctgtctcc

SEQ ID NO: 1265448 - DNA, 25 bp, Homo sapien
caggactctccccctggcggttgga

SEQ ID NO: 1265449 - DNA, 25 bp, Homo sapien
tagggtcccatccatgctgaagagt

SEQ ID NO: 1265450 - DNA, 25 bp, Homo sapien
gggtcccatccatgctgaagagtcc

SEQ ID NO: 1265451 - DNA, 25 bp, Homo sapien
ccctagggtcccatccatgctgaag

SEQ ID NO: 1265452 - DNA, 25 bp, Homo sapien
atgctgaagagtccaccttccacat

SEQ ID NO: 1265453 - DNA, 25 bp, Homo sapien
tgaggtttcccagcaggcaattgat

SEQ ID NO: 1265454 - DNA, 25 bp, Homo sapien
tcctgatcatggacacagagcgtgg

SEQ ID NO: 1265455 - DNA, 25 bp, Homo sapien
cctttgctatgaaggctgccgggca

SEQ ID NO: 1265456 - DNA, 25 bp, Homo sapien
accagatcgtgaccaggagggcaat

SEQ ID NO: 1265457 - DNA, 25 bp, Homo sapien
tctctctccctgttggttctggtgg

SEQ ID NO: 1265458 - DNA, 25 bp, Homo sapien
tctctccctgttggttctggtgggc

SEQ ID NO: 1265459 - DNA, 25 bp, Homo sapien
gccctgggatgggggcggtgatatc

SEQ ID NO: 1265460 - DNA, 25 bp, Homo sapien
ctccctgttggttctggtgggccct

SEQ ID NO: 1265461 - DNA, 25 bp, Homo sapien
gcggtgccgctgaaatactctcagg

SEQ ID NO: 1265462 - DNA, 25 bp, Homo sapien
catagccgggcttggacaagtcaga

SEQ ID NO: 1265463 - DNA, 25 bp, Homo sapien
ctctgaggtctcatcccggagctgc

SEQ ID NO: 1265464 - DNA, 25 bp, Homo sapien
tcaacagctactgagtggacaagct

SEQ ID NO: 1265465 - DNA, 25 bp, Homo sapien
ctgccactcccatgtcctcggcccc

SEQ ID NO: 1265466 - DNA, 25 bp, Homo sapien
ccactcccgcggatgcagcaggtgg

SEQ ID NO: 1265467 - DNA, 25 bp, Homo sapien
tgtgatttctctcagggagcctcat

SEQ ID NO: 1265468 - DNA, 25 bp, Homo sapien
accgaggccagacctgggagcagca

SEQ ID NO: 1265469 - DNA, 25 bp, Homo sapien
tcagaatccacagcaatagcctcgg

SEQ ID NO: 1265470 - DNA, 25 bp, Homo sapien
cacagaggtcagaagagcccactga

SEQ ID NO: 1265471 - DNA, 25 bp, Homo sapien
gctgaggccacaagagtcagacgcg

SEQ ID NO: 1265472 - DNA, 25 bp, Homo sapien
cacagcaggcgtcactgatactggg

SEQ ID NO: 1265473 - DNA, 25 bp, Homo sapien
cgggctccggtggttccgccaggtg

SEQ ID NO: 1265474 - DNA, 25 bp, Homo sapien
ctccgggctccggtggttccgccag

SEQ ID NO: 1265475 - DNA, 25 bp, Homo sapien
agcctctttcagcagccgtcgctcc

SEQ ID NO: 1265476 - DNA, 25 bp, Homo sapien
ttcagcagccgtcgctccaggtatc

SEQ ID NO: 1265477 - DNA, 25 bp, Homo sapien
tggcgtcggggtgcagagtctgtgg

SEQ ID NO: 1265478 - DNA, 25 bp, Homo sapien
ggcgtcggggtgcagagtctgtggg

SEQ ID NO: 1265479 - DNA, 25 bp, Homo sapien
ctggcgtcggggtgcagagtctgtg

SEQ ID NO: 1265480 - DNA, 25 bp, Homo sapien
acggccaccgtggtgacgtccggag

SEQ ID NO: 1265481 - DNA, 25 bp, Homo sapien
tggtttgggctcctccccgtgaatg

SEQ ID NO: 1265482 - DNA, 25 bp, Homo sapien
ccgtgaatgagggtattgtctcctc

SEQ ID NO: 1265483 - DNA, 25 bp, Homo sapien
gggctcctccccgtgaatgagggta

SEQ ID NO: 1265484 - DNA, 25 bp, Homo sapien
aaagactcaggaccctcagagaact

SEQ ID NO: 1265485 - DNA, 25 bp, Homo sapien
gcacacgaatcgtggagaccctgcc

SEQ ID NO: 1265486 - DNA, 25 bp, Homo sapien
gctaccgtggctgtacttgaaagac

SEQ ID NO: 1265487 - DNA, 25 bp, Homo sapien
ctgggactccaggttctcgggttca

SEQ ID NO: 1265488 - DNA, 25 bp, Homo sapien
gacggagacgatcaccttgactaca

SEQ ID NO: 1265489 - DNA, 25 bp, Homo sapien
ggagacgatcaccttgactacatca

SEQ ID NO: 1265490 - DNA, 25 bp, Homo sapien
gagacgatcaccttgactacatcac

SEQ ID NO: 1265491 - DNA, 25 bp, Homo sapien
ctggacggagacgatcaccttgact

SEQ ID NO: 1265492 - DNA, 25 bp, Homo sapien
atggcaatggtctcacagcggtggc

SEQ ID NO: 1265493 - DNA, 25 bp, Homo sapien
agcggtggcggaggcacaactcctg

SEQ ID NO: 1265494 - DNA, 25 bp, Homo sapien
gaggggcagtgtctgatcaggggac

SEQ ID NO: 1265495 - DNA, 25 bp, Homo sapien
gggcagtgtctgatcaggggacaca

SEQ ID NO: 1265496 - DNA, 25 bp, Homo sapien
cagacctcaatgcttagaagctgcg

SEQ ID NO: 1265497 - DNA, 25 bp, Homo sapien
aatgcttagaagctgcgtccccggg

SEQ ID NO: 1265498 - DNA, 25 bp, Homo sapien
ctgactttcccttcagacctcaatg

SEQ ID NO: 1265499 - DNA, 25 bp, Homo sapien
cctcaatgcttagaagctgcgtccc

SEQ ID NO: 1265500 - DNA, 25 bp, Homo sapien
acagggtcatagagtgcgtgggcag

SEQ ID NO: 1265501 - DNA, 25 bp, Homo sapien
ccagcagggcggctgttgaccctca

SEQ ID NO: 1265502 - DNA, 25 bp, Homo sapien
tccccagcagggcggctgttgaccc

SEQ ID NO: 1265503 - DNA, 25 bp, Homo sapien
cagggtcatagagtgcgtgggcagg

SEQ ID NO: 1265504 - DNA, 25 bp, Homo sapien
cccagggaggccagctgacacctgg

SEQ ID NO: 1265505 - DNA, 25 bp, Homo sapien
agggaggccagctgacacctgggct

SEQ ID NO: 1265506 - DNA, 25 bp, Homo sapien
cttcccccagggaggccagctgaca

SEQ ID NO: 1265507 - DNA, 25 bp, Homo sapien
ccccagggaggccagctgacacctg

SEQ ID NO: 1265508 - DNA, 25 bp, Homo sapien
aggagccgcggatcctggaaaagct

SEQ ID NO: 1265509 - DNA, 25 bp, Homo sapien
acatgagccctgatggggccgccgt

SEQ ID NO: 1265510 - DNA, 25 bp, Homo sapien
ccgcggatcctggaaaagctctggg

SEQ ID NO: 1265511 - DNA, 25 bp, Homo sapien
tccaagaggtgacggctggggacat

SEQ ID NO: 1265512 - DNA, 25 bp, Homo sapien
tgtggagcaaacaatgacgatgacg

SEQ ID NO: 1265513 - DNA, 25 bp, Homo sapien
gatgacgaggctccctgagagaaac

SEQ ID NO: 1265514 - DNA, 25 bp, Homo sapien
tccggccttcgtcaccagccagctg

SEQ ID NO: 1265515 - DNA, 25 bp, Homo sapien
caaacaatgacgatgacgaggctcc

SEQ ID NO: 1265516 - DNA, 25 bp, Homo sapien
cagtgttcactcagcctcagggagc

SEQ ID NO: 1265517 - DNA, 25 bp, Homo sapien
agaggcaggtgcagcgcccagtgtt

SEQ ID NO: 1265518 - DNA, 25 bp, Homo sapien
ggtctgtctgacttttccaagctcg

SEQ ID NO: 1265519 - DNA, 25 bp, Homo sapien
gcagtgaagacaggtcccagggagg

SEQ ID NO: 1265520 - DNA, 25 bp, Homo sapien
tcccaagaagctctgaagtctcagg

SEQ ID NO: 1265521 - DNA, 25 bp, Homo sapien
ggagagccagtgtcgggacaaaaat

SEQ ID NO: 1265522 - DNA, 25 bp, Homo sapien
ggacaaaaatggttagagctggaga

SEQ ID NO: 1265523 - DNA, 25 bp, Homo sapien
agagaccccagagcacgggagacca

SEQ ID NO: 1265524 - DNA, 25 bp, Homo sapien
cattcctccagggtcccattgggag

SEQ ID NO: 1265525 - DNA, 25 bp, Homo sapien
ttggtctggtgctgacattcctcca

SEQ ID NO: 1265526 - DNA, 25 bp, Homo sapien
cagttctgacacagggtgtcctgac

SEQ ID NO: 1265527 - DNA, 25 bp, Homo sapien
cacagggtgtcctgactctcggtgc

SEQ ID NO: 1265528 - DNA, 25 bp, Homo sapien
tgcagccacacacggcgttctctgt

SEQ ID NO: 1265529 - DNA, 25 bp, Homo sapien
gctggaggtggcgtaagcgcggcac

SEQ ID NO: 1265530 - DNA, 25 bp, Homo sapien
ccgtcctggacgatgcagaagtggc

SEQ ID NO: 1265531 - DNA, 25 bp, Homo sapien
gagcagttccggctcgcgcgcaggc

SEQ ID NO: 1265532 - DNA, 25 bp, Homo sapien
gctgagaggggtacgtggaggccgg

SEQ ID NO: 1265533 - DNA, 25 bp, Homo sapien
gggctgagaggggtacgtggaggcc

SEQ ID NO: 1265534 - DNA, 25 bp, Homo sapien
tgagaggggtacgtggaggccggga

SEQ ID NO: 1265535 - DNA, 25 bp, Homo sapien
gaggggctgagaggggtacgtggag

SEQ ID NO: 1265536 - DNA, 25 bp, Homo sapien
agccaaacgaggtgcccagaggtac

SEQ ID NO: 1265537 - DNA, 25 bp, Homo sapien
aaccagccttctgcccagatgggca

SEQ ID NO: 1265538 - DNA, 25 bp, Homo sapien
ggtagggtgagagccccacttcttc

SEQ ID NO: 1265539 - DNA, 25 bp, Homo sapien
agggcttcgttgatgggagaaacca

SEQ ID NO: 1265540 - DNA, 25 bp, Homo sapien
tgctttcacaagaggggaggggcat

SEQ ID NO: 1265541 - DNA, 25 bp, Homo sapien
catgcaggttgaggtgtgagcccca

SEQ ID NO: 1265542 - DNA, 25 bp, Homo sapien
cttctgttcatggctagcccacctg

SEQ ID NO: 1265543 - DNA, 25 bp, Homo sapien
agtagacaggtgctttcacaagagg

SEQ ID NO: 1265544 - DNA, 25 bp, Homo sapien
agccgttggccgcatggacaggctc

SEQ ID NO: 1265545 - DNA, 25 bp, Homo sapien
caggctctgcgctcagtgactcaaa

SEQ ID NO: 1265546 - DNA, 25 bp, Homo sapien
gccatgctgagcctggcatgaggct

SEQ ID NO: 1265547 - DNA, 25 bp, Homo sapien
gtcagccctgtcccgcaggtgcagt

SEQ ID NO: 1265548 - DNA, 25 bp, Homo sapien
cactttgcagctagggacgtgggca

SEQ ID NO: 1265549 - DNA, 25 bp, Homo sapien
cagtcgccaagctcaggatggccca

SEQ ID NO: 1265550 - DNA, 25 bp, Homo sapien
agggataagggtcagtcgccaagct

SEQ ID NO: 1265551 - DNA, 25 bp, Homo sapien
agccaaggacgagggataagggtca

SEQ ID NO: 1265552 - DNA, 25 bp, Homo sapien
tgagacagaggtggacgggggccgg

SEQ ID NO: 1265553 - DNA, 25 bp, Homo sapien
gaggctgacctcaaggcgtcccctg

SEQ ID NO: 1265554 - DNA, 25 bp, Homo sapien
gagacagaggtggacgggggccgga

SEQ ID NO: 1265555 - DNA, 25 bp, Homo sapien
ggccggaggctgacctcaaggcgtc

SEQ ID NO: 1265556 - DNA, 25 bp, Homo sapien
gctgcccaagcggaggctgggccgg

SEQ ID NO: 1265557 - DNA, 25 bp, Homo sapien
ctgcccaagcggaggctgggccggc

SEQ ID NO: 1265558 - DNA, 25 bp, Homo sapien
tgcccaagcggaggctgggccggct

SEQ ID NO: 1265559 - DNA, 25 bp, Homo sapien
ggctgcccaagcggaggctgggccg

SEQ ID NO: 1265560 - DNA, 25 bp, Homo sapien
tgggcaatgtaggtgcctggagggc

SEQ ID NO: 1265561 - DNA, 25 bp, Homo sapien
tgcttaggccattgaggtgggcaat

SEQ ID NO: 1265562 - DNA, 25 bp, Homo sapien
ttcacacactgtgcccgtcagctcc

SEQ ID NO: 1265563 - DNA, 25 bp, Homo sapien
cagacacttgcttaggccattgagg

SEQ ID NO: 1265564 - DNA, 25 bp, Homo sapien
acttggggcagcactcggagcccac

SEQ ID NO: 1265565 - DNA, 25 bp, Homo sapien
tcctccttgcaggacggcagagctg

SEQ ID NO: 1265566 - DNA, 25 bp, Homo sapien
tgcacttggggcagcactcggagcc

SEQ ID NO: 1265567 - DNA, 25 bp, Homo sapien
actcgtcctccttgcaggacggcag

SEQ ID NO: 1265568 - DNA, 25 bp, Homo sapien
caggacaggcattgggagatgccct

SEQ ID NO: 1265569 - DNA, 25 bp, Homo sapien
aggacaggcattgggagatgccctg

SEQ ID NO: 1265570 - DNA, 25 bp, Homo sapien
tcaggacaggcattgggagatgccc

SEQ ID NO: 1265571 - DNA, 25 bp, Homo sapien
aggggcagccagggatgggccccag

SEQ ID NO: 1265572 - DNA, 25 bp, Homo sapien
ccctgaagagccagcaggggcagcc

SEQ ID NO: 1265573 - DNA, 25 bp, Homo sapien
gggcagccagggatgggccccagag

SEQ ID NO: 1265574 - DNA, 25 bp, Homo sapien
ccagggatgggccccagaggctcac

SEQ ID NO: 1265575 - DNA, 25 bp, Homo sapien
ggctctgccgtggcctcgttcctgg

SEQ ID NO: 1265576 - DNA, 25 bp, Homo sapien
ggtggctctgccgtggcctcgttcc

SEQ ID NO: 1265577 - DNA, 25 bp, Homo sapien
gtggctctgccgtggcctcgttcct

SEQ ID NO: 1265578 - DNA, 25 bp, Homo sapien
tggctctgccgtggcctcgttcctg

SEQ ID NO: 1265579 - DNA, 25 bp, Homo sapien
ggtctgggttgacccgagagcccca

SEQ ID NO: 1265580 - DNA, 25 bp, Homo sapien
acgccggagccagcaacggccagga

SEQ ID NO: 1265581 - DNA, 25 bp, Homo sapien
cactgtggtgagcccagtgctgggg

SEQ ID NO: 1265582 - DNA, 25 bp, Homo sapien
caggggacgggctggacgccggagc

SEQ ID NO: 1265583 - DNA, 25 bp, Homo sapien
cagcctcaagacgtcggttttgggg

SEQ ID NO: 1265584 - DNA, 25 bp, Homo sapien
ctcaggctcagaccggcagctcggg

SEQ ID NO: 1265585 - DNA, 25 bp, Homo sapien
cccagctagcaggatgaactccagc

SEQ ID NO: 1265586 - DNA, 25 bp, Homo sapien
agcagaggaactcagcgccattgct

SEQ ID NO: 1265587 - DNA, 25 bp, Homo sapien
cagaggaactcagcgccattgctgc

SEQ ID NO: 1265588 - DNA, 25 bp, Homo sapien
ctcagaacccgagcagcaggagagt

SEQ ID NO: 1265589 - DNA, 25 bp, Homo sapien
cctcggtgtgacaagctgtgcctca

SEQ ID NO: 1265590 - DNA, 25 bp, Homo sapien
tgtgcctcagaacccgagcagcagg

SEQ ID NO: 1265591 - DNA, 25 bp, Homo sapien
aaagagaaagagaatccgcctcggt

SEQ ID NO: 1265592 - DNA, 25 bp, Homo sapien
aggagctgtccaggcaaagccgagg

SEQ ID NO: 1265593 - DNA, 25 bp, Homo sapien
gaagggccggtatgaaggaggcgcc

SEQ ID NO: 1265594 - DNA, 25 bp, Homo sapien
attccagtccactccgggtttcctg

SEQ ID NO: 1265595 - DNA, 25 bp, Homo sapien
ggaggggcgagttctccccctgcac

SEQ ID NO: 1265596 - DNA, 25 bp, Homo sapien
ctgctgaacagggtaaacttccctt

SEQ ID NO: 1265597 - DNA, 25 bp, Homo sapien
agtcatagacccaccaggcctgtgt

SEQ ID NO: 1265598 - DNA, 25 bp, Homo sapien
taaaaccaccagaatgcggtctggc

SEQ ID NO: 1265599 - DNA, 25 bp, Homo sapien
ccccggggcgctgactgacattttt

SEQ ID NO: 1265600 - DNA, 25 bp, Homo sapien
aaggctgccagcctcgcccggtctc

SEQ ID NO: 1265601 - DNA, 25 bp, Homo sapien
tgcagagacgctgcgcggactggga

SEQ ID NO: 1265602 - DNA, 25 bp, Homo sapien
gtggaagggcagctcttgctccccc

SEQ ID NO: 1265603 - DNA, 25 bp, Homo sapien
ttgctccccctgcagagacgctgcg

SEQ ID NO: 1265604 - DNA, 25 bp, Homo sapien
acagcccacagtcccggagccccaa

SEQ ID NO: 1265605 - DNA, 25 bp, Homo sapien
ctccggatggagacagcccacagtc

SEQ ID NO: 1265606 - DNA, 25 bp, Homo sapien
gacagcccacagtcccggagcccca

SEQ ID NO: 1265607 - DNA, 25 bp, Homo sapien
gcccacagtcccggagccccaaggc

SEQ ID NO: 1265608 - DNA, 25 bp, Homo sapien
ggacctgcaccccaactagaaagtg

SEQ ID NO: 1265609 - DNA, 25 bp, Homo sapien
tccagagtcgtctcatccaccccac

SEQ ID NO: 1265610 - DNA, 25 bp, Homo sapien
ccagagtcgtctcatccaccccacc

SEQ ID NO: 1265611 - DNA, 25 bp, Homo sapien
ctctcagatacgtcctccagagtcg

SEQ ID NO: 1265612 - DNA, 25 bp, Homo sapien
ctccagagtcgtctcatccacccca

SEQ ID NO: 1265613 - DNA, 25 bp, Homo sapien
tgattgctgagtaagccctgtcccc

SEQ ID NO: 1265614 - DNA, 25 bp, Homo sapien
ccaaggccccaagcctgacataggg

SEQ ID NO: 1265615 - DNA, 25 bp, Homo sapien
aagcctgacatagggccccaggtgc

SEQ ID NO: 1265616 - DNA, 25 bp, Homo sapien
gagggcacagacagtgccaggtctt

SEQ ID NO: 1265617 - DNA, 25 bp, Homo sapien
cgagccccacgcctcctgtcgcggg

SEQ ID NO: 1265618 - DNA, 25 bp, Homo sapien
cagccatctgcattgacacggctgc

SEQ ID NO: 1265619 - DNA, 25 bp, Homo sapien
acggctgcccgcaggatatcactgc

SEQ ID NO: 1265620 - DNA, 25 bp, Homo sapien
gggaggcaggtgagcaccccgagcc

SEQ ID NO: 1265621 - DNA, 25 bp, Homo sapien
tcctgccacgaaagctcgagactga

SEQ ID NO: 1265622 - DNA, 25 bp, Homo sapien
ttccagccgccgtggagtaacacag

SEQ ID NO: 1265623 - DNA, 25 bp, Homo sapien
tctgaagggagctggtcccgtccgt

SEQ ID NO: 1265624 - DNA, 25 bp, Homo sapien
gagaattctagaaccaaccgaagtg

SEQ ID NO: 1265625 - DNA, 25 bp, Homo sapien
gaccccgagccggctgcccgcctcc

SEQ ID NO: 1265626 - DNA, 25 bp, Homo sapien
ggctccggtccaggtactgcactgg

SEQ ID NO: 1265627 - DNA, 25 bp, Homo sapien
caagtctgaagctgtagatactgga

SEQ ID NO: 1265628 - DNA, 25 bp, Homo sapien
ggacacagttgattgtctctacaga

SEQ ID NO: 1265629 - DNA, 25 bp, Homo sapien
gctagctgcaccttcgcacagatgc

SEQ ID NO: 1265630 - DNA, 25 bp, Homo sapien
tgccccgggcacagtggaacgtgtc

SEQ ID NO: 1265631 - DNA, 25 bp, Homo sapien
cgcggcatcgctccttggggtgcat

SEQ ID NO: 1265632 - DNA, 25 bp, Homo sapien
taccacacgcggcatcgctccttgg

SEQ ID NO: 1265633 - DNA, 25 bp, Homo sapien
cacagtggaacgtgtctgcgaaggc

SEQ ID NO: 1265634 - DNA, 25 bp, Homo sapien
acgtctgtcttgatggattggatgg

SEQ ID NO: 1265635 - DNA, 25 bp, Homo sapien
tcgggccggtaggacccgcaccaca

SEQ ID NO: 1265636 - DNA, 25 bp, Homo sapien
ggatggcgaactcgggccggtagga

SEQ ID NO: 1265637 - DNA, 25 bp, Homo sapien
ttcaggggactgtggacgtctgtct

SEQ ID NO: 1265638 - DNA, 25 bp, Homo sapien
gcattgaaatcctgtccagctcccg

SEQ ID NO: 1265639 - DNA, 25 bp, Homo sapien
tcagcattgaaatcctgtccagctc

SEQ ID NO: 1265640 - DNA, 25 bp, Homo sapien
tcccatcagcattgaaatcctgtcc

SEQ ID NO: 1265641 - DNA, 25 bp, Homo sapien
tcctcccatcagcattgaaatcctg

SEQ ID NO: 1265642 - DNA, 25 bp, Homo sapien
ctgctcatgggtgagatccaggccg

SEQ ID NO: 1265643 - DNA, 25 bp, Homo sapien
tgatgaagaagagctgctcatgggt

SEQ ID NO: 1265644 - DNA, 25 bp, Homo sapien
cagctgctggtccttgccaccctct

SEQ ID NO: 1265645 - DNA, 25 bp, Homo sapien
ctgggcatagttgatgaagaagagc

SEQ ID NO: 1265646 - DNA, 25 bp, Homo sapien
ccgcacccctccgttgtcagcaatg

SEQ ID NO: 1265647 - DNA, 25 bp, Homo sapien
cttataggcttgccgcacccctccg

SEQ ID NO: 1265648 - DNA, 25 bp, Homo sapien
tccccaagggtgttgaatccgttca

SEQ ID NO: 1265649 - DNA, 25 bp, Homo sapien
aggcttgccgcacccctccgttgtc

SEQ ID NO: 1265650 - DNA, 25 bp, Homo sapien
tgcgcacaggagacaggattggggc

SEQ ID NO: 1265651 - DNA, 25 bp, Homo sapien
acaggagacaggattggggcagccc

SEQ ID NO: 1265652 - DNA, 25 bp, Homo sapien
ggagacaggattggggcagccccgg

SEQ ID NO: 1265653 - DNA, 25 bp, Homo sapien
acaggattggggcagccccggccct

SEQ ID NO: 1265654 - DNA, 25 bp, Homo sapien
cctgggtgctggtggcagcgctcac

SEQ ID NO: 1265655 - DNA, 25 bp, Homo sapien
gcagcctgggtgctggtggcagcgc

SEQ ID NO: 1265656 - DNA, 25 bp, Homo sapien
cagcctgggtgctggtggcagcgct

SEQ ID NO: 1265657 - DNA, 25 bp, Homo sapien
ccccgcagcctgggtgctggtggca

SEQ ID NO: 1265658 - DNA, 25 bp, Homo sapien
gttctgttcgtctgccaggtcccag

SEQ ID NO: 1265659 - DNA, 25 bp, Homo sapien
caggtcccaggagtagttgccgtac

SEQ ID NO: 1265660 - DNA, 25 bp, Homo sapien
tgccgtactggtagatcatgcactc

SEQ ID NO: 1265661 - DNA, 25 bp, Homo sapien
gaagttactccaccaatccatcatg

SEQ ID NO: 1265662 - DNA, 25 bp, Homo sapien
ccgtgcgtgatctcgtgcccgatca

SEQ ID NO: 1265663 - DNA, 25 bp, Homo sapien
gcgtgatctcgtgcccgatcaccat

SEQ ID NO: 1265664 - DNA, 25 bp, Homo sapien
tcaaagccgtgcgtgatctcgtgcc

SEQ ID NO: 1265665 - DNA, 25 bp, Homo sapien
cattgtcgtcaaagccgtgcgtgat

SEQ ID NO: 1265666 - DNA, 25 bp, Homo sapien
caaagaataagctgtgagtggacac

SEQ ID NO: 1265667 - DNA, 25 bp, Homo sapien
gacaaagaataagctgtgagtggac

SEQ ID NO: 1265668 - DNA, 25 bp, Homo sapien
acttgatcccacagaccgggaggca

SEQ ID NO: 1265669 - DNA, 25 bp, Homo sapien
tctgacacttgatcccacagaccgg

SEQ ID NO: 1265670 - DNA, 25 bp, Homo sapien
gggagtagaacgcattgaccaccgc

SEQ ID NO: 1265671 - DNA, 25 bp, Homo sapien
tggggagtagaacgcattgaccacc

SEQ ID NO: 1265672 - DNA, 25 bp, Homo sapien
gtttggggagtagaacgcattgacc

SEQ ID NO: 1265673 - DNA, 25 bp, Homo sapien
agtagaacgcattgaccaccgccgc

SEQ ID NO: 1265674 - DNA, 25 bp, Homo sapien
aagccggtctctgggagccgcctct

SEQ ID NO: 1265675 - DNA, 25 bp, Homo sapien
agacaagccggtctctgggagccgc

SEQ ID NO: 1265676 - DNA, 25 bp, Homo sapien
atagacaagccggtctctgggagcc

SEQ ID NO: 1265677 - DNA, 25 bp, Homo sapien
tgtgatagacaagccggtctctggg

SEQ ID NO: 1265678 - DNA, 25 bp, Homo sapien
gcctatcccaagatctggttccttc

SEQ ID NO: 1265679 - DNA, 25 bp, Homo sapien
caggcctatcccaagatctggttcc

SEQ ID NO: 1265680 - DNA, 25 bp, Homo sapien
gggcccaggcctatcccaagatctg

SEQ ID NO: 1265681 - DNA, 25 bp, Homo sapien
gcccaggcctatcccaagatctggt

SEQ ID NO: 1265682 - DNA, 25 bp, Homo sapien
tctgcagactgttctcaaagtacag

SEQ ID NO: 1265683 - DNA, 25 bp, Homo sapien
gttctcaaagtacaggtcctctgag

SEQ ID NO: 1265684 - DNA, 25 bp, Homo sapien
cagactgttctcaaagtacaggtcc

SEQ ID NO: 1265685 - DNA, 25 bp, Homo sapien
ttgaggttctgcagactgttctcaa

SEQ ID NO: 1265686 - DNA, 25 bp, Homo sapien
cgatctgctcccggatgctcatggc

SEQ ID NO: 1265687 - DNA, 25 bp, Homo sapien
tcagggtgcccgatctgctcccgga

SEQ ID NO: 1265688 - DNA, 25 bp, Homo sapien
ggtgcccgatctgctcccggatgct

SEQ ID NO: 1265689 - DNA, 25 bp, Homo sapien
tcctccaggatgtagtcagggtgcc

SEQ ID NO: 1265690 - DNA, 25 bp, Homo sapien
caaacactgtccgcaccttgtcaat

SEQ ID NO: 1265691 - DNA, 25 bp, Homo sapien
gttgacgtagcccacacattcacgc

SEQ ID NO: 1265692 - DNA, 25 bp, Homo sapien
tgttgacgtagcccacacattcacg

SEQ ID NO: 1265693 - DNA, 25 bp, Homo sapien
ggaacgcctccctgacgtagaggga

SEQ ID NO: 1265694 - DNA, 25 bp, Homo sapien
tccagggaacgcctccctgacgtag

SEQ ID NO: 1265695 - DNA, 25 bp, Homo sapien
ggcttacggggtgagcagacccacc

SEQ ID NO: 1265696 - DNA, 25 bp, Homo sapien
gggccacccgatcatcccacgggcc

SEQ ID NO: 1265697 - DNA, 25 bp, Homo sapien
ggtgagcagacccacctatcctcag

SEQ ID NO: 1265698 - DNA, 25 bp, Homo sapien
tacggggtgagcagacccacctatc

SEQ ID NO: 1265699 - DNA, 25 bp, Homo sapien
cactcgtgtgtccttgaatctctgg

SEQ ID NO: 1265700 - DNA, 25 bp, Homo sapien
ccagaccaggtagttctgtatggtc

SEQ ID NO: 1265701 - DNA, 25 bp, Homo sapien
cttgcggtagttcactcgtgtgtcc

SEQ ID NO: 1265702 - DNA, 25 bp, Homo sapien
tggcttaggctaccaatgcggtcca

SEQ ID NO: 1265703 - DNA, 25 bp, Homo sapien
attttgacagaggatagcacagttt

SEQ ID NO: 1265704 - DNA, 25 bp, Homo sapien
tgagtaggtgtcgatgatgttttca

SEQ ID NO: 1265705 - DNA, 25 bp, Homo sapien
agaggatagcacagtttgtatgaac

SEQ ID NO: 1265706 - DNA, 25 bp, Homo sapien
gacagaggatagcacagtttgtatg

SEQ ID NO: 1265707 - DNA, 25 bp, Homo sapien
aaggcgatgacgtcgtgtctctcct

SEQ ID NO: 1265708 - DNA, 25 bp, Homo sapien
tccggtggtacaaggcgatgacgtc

SEQ ID NO: 1265709 - DNA, 25 bp, Homo sapien
ctccagtcccatccggtggtacaag

SEQ ID NO: 1265710 - DNA, 25 bp, Homo sapien
tacaaggcgatgacgtcgtgtctct

SEQ ID NO: 1265711 - DNA, 25 bp, Homo sapien
ccgcagcaacgtggccactgacacc

SEQ ID NO: 1265712 - DNA, 25 bp, Homo sapien
atgaactgcaggtaggcttcccgca

SEQ ID NO: 1265713 - DNA, 25 bp, Homo sapien
acaccatgaactgcaggtaggcttc

SEQ ID NO: 1265714 - DNA, 25 bp, Homo sapien
tgggcaggtttgcatcctcccgcag

SEQ ID NO: 1265715 - DNA, 25 bp, Homo sapien
agtgggagcgtctcagacgcgtgac

SEQ ID NO: 1265716 - DNA, 25 bp, Homo sapien
cagcaggctctcgggcacacagagt

SEQ ID NO: 1265717 - DNA, 25 bp, Homo sapien
tctcgggcacacagagtgccgagtg

SEQ ID NO: 1265718 - DNA, 25 bp, Homo sapien
agtgccgagtgggagcgtctcagac

SEQ ID NO: 1265719 - DNA, 25 bp, Homo sapien
gccgttgaagtagtactctcgggag

SEQ ID NO: 1265720 - DNA, 25 bp, Homo sapien
tgccgccgttgaagtagtactctcg

SEQ ID NO: 1265721 - DNA, 25 bp, Homo sapien
gttgctgccgccgttgaagtagtac

SEQ ID NO: 1265722 - DNA, 25 bp, Homo sapien
aagtagtactctcgggagggcatgc

SEQ ID NO: 1265723 - DNA, 25 bp, Homo sapien
ccaggaggcccaacagaaactccag

SEQ ID NO: 1265724 - DNA, 25 bp, Homo sapien
gagctccctgtcggcctggcccatc

SEQ ID NO: 1265725 - DNA, 25 bp, Homo sapien
ccgggcccacggacgtggacaggag

SEQ ID NO: 1265726 - DNA, 25 bp, Homo sapien
cccacggacgtggacaggagccagg

SEQ ID NO: 1265727 - DNA, 25 bp, Homo sapien
ttccagatgaagaggtcgatgagga

SEQ ID NO: 1265728 - DNA, 25 bp, Homo sapien
aggacgcgcctgttgaactgtgagt

SEQ ID NO: 1265729 - DNA, 25 bp, Homo sapien
tagatgatgtgccggctggagttct

SEQ ID NO: 1265730 - DNA, 25 bp, Homo sapien
ctggagttctggtcgtcgttccaga

SEQ ID NO: 1265731 - DNA, 25 bp, Homo sapien
gcactggagactggcgggccctggg

SEQ ID NO: 1265732 - DNA, 25 bp, Homo sapien
gccccttgtcggtgaatctggcctc

SEQ ID NO: 1265733 - DNA, 25 bp, Homo sapien
gtcggtgaatctggcctccggagcc

SEQ ID NO: 1265734 - DNA, 25 bp, Homo sapien
agcccggccccttgtcggtgaatct

SEQ ID NO: 1265735 - DNA, 25 bp, Homo sapien
tgagagcctcgcttctctatcacac

SEQ ID NO: 1265736 - DNA, 25 bp, Homo sapien
ggtctcgttccacctgtccatcgcc

SEQ ID NO: 1265737 - DNA, 25 bp, Homo sapien
gggctgagagcctcgcttctctatc

SEQ ID NO: 1265738 - DNA, 25 bp, Homo sapien
cctgtccatcgccaccggccagcct

SEQ ID NO: 1265739 - DNA, 25 bp, Homo sapien
ctggttcatgcaggagcggtacagc

SEQ ID NO: 1265740 - DNA, 25 bp, Homo sapien
agcggtacagcgtcctggccttctc

SEQ ID NO: 1265741 - DNA, 25 bp, Homo sapien
tccttggcagtcgaattctccagca

SEQ ID NO: 1265742 - DNA, 25 bp, Homo sapien
ccggccggtccttggcagtcgaatt

SEQ ID NO: 1265743 - DNA, 25 bp, Homo sapien
cccggtgctgtcctgttcggcgtca

SEQ ID NO: 1265744 - DNA, 25 bp, Homo sapien
cccctgaagtgctcggcgagaggcg

SEQ ID NO: 1265745 - DNA, 25 bp, Homo sapien
ggaagcacaaacaggggcgagacac

SEQ ID NO: 1265746 - DNA, 25 bp, Homo sapien
agctgctgggtctttattccctctc

SEQ ID NO: 1265747 - DNA, 25 bp, Homo sapien
tgcacccccggccgtgctctgccac

SEQ ID NO: 1265748 - DNA, 25 bp, Homo sapien
cccactgcacccccggccgtgctct

SEQ ID NO: 1265749 - DNA, 25 bp, Homo sapien
actgcacccccggccgtgctctgcc

SEQ ID NO: 1265750 - DNA, 25 bp, Homo sapien
ccactgcacccccggccgtgctctg

SEQ ID NO: 1265751 - DNA, 25 bp, Homo sapien
gcctccgcatgcaaactggtagaag

SEQ ID NO: 1265752 - DNA, 25 bp, Homo sapien
tcgcggaggacgtcaaagatgctgt

SEQ ID NO: 1265753 - DNA, 25 bp, Homo sapien
ttggtctcagggatcacgtggcgcc

SEQ ID NO: 1265754 - DNA, 25 bp, Homo sapien
tagaagtcgtcacacggttccgtgg

SEQ ID NO: 1265755 - DNA, 25 bp, Homo sapien
ggtggtgcagacctcgctcacctct

SEQ ID NO: 1265756 - DNA, 25 bp, Homo sapien
aggggtggtgcagacctcgctcacc

SEQ ID NO: 1265757 - DNA, 25 bp, Homo sapien
gggtggtgcagacctcgctcacctc

SEQ ID NO: 1265758 - DNA, 25 bp, Homo sapien
gtggtgcagacctcgctcacctctt

SEQ ID NO: 1265759 - DNA, 25 bp, Homo sapien
cacagccggctagcaaggcgtggca

SEQ ID NO: 1265760 - DNA, 25 bp, Homo sapien
gccggctagcaaggcgtggcagctg

SEQ ID NO: 1265761 - DNA, 25 bp, Homo sapien
gtaagaagcacagccggctagcaag

SEQ ID NO: 1265762 - DNA, 25 bp, Homo sapien
gaagcacagccggctagcaaggcgt

SEQ ID NO: 1265763 - DNA, 25 bp, Homo sapien
gccgaatttccccagcagtgaggta

SEQ ID NO: 1265764 - DNA, 25 bp, Homo sapien
tgtggccgaatttccccagcagtga

SEQ ID NO: 1265765 - DNA, 25 bp, Homo sapien
atttccccagcagtgaggtacacag

SEQ ID NO: 1265766 - DNA, 25 bp, Homo sapien
gcttgtggccgaatttccccagcag

SEQ ID NO: 1265767 - DNA, 25 bp, Homo sapien
ttaaatgggcgtgtccctggcagcc

SEQ ID NO: 1265768 - DNA, 25 bp, Homo sapien
taggcagtttccaaggatcccttgt

SEQ ID NO: 1265769 - DNA, 25 bp, Homo sapien
acatccagctgttaaatgggcgtgt

SEQ ID NO: 1265770 - DNA, 25 bp, Homo sapien
cttggaggaggttccggcacctgta

SEQ ID NO: 1265771 - DNA, 25 bp, Homo sapien
tgtagtgtgtaccaggaatcccttc

SEQ ID NO: 1265772 - DNA, 25 bp, Homo sapien
tctttatgtgtacggtgtggtggca

SEQ ID NO: 1265773 - DNA, 25 bp, Homo sapien
tccaagctcttgtgaacaatgatgc

SEQ ID NO: 1265774 - DNA, 25 bp, Homo sapien
gatcatgtttggcttatccacccat

SEQ ID NO: 1265775 - DNA, 25 bp, Homo sapien
ttaaattggagcagttcctgcagaa

SEQ ID NO: 1265776 - DNA, 25 bp, Homo sapien
catagataacgaacttaaagagcag

SEQ ID NO: 1265777 - DNA, 25 bp, Homo sapien
gaaagtcttaaatgcatagataacg

SEQ ID NO: 1265778 - DNA, 25 bp, Homo sapien
aatgaagctcagatcagggtccggg

SEQ ID NO: 1265779 - DNA, 25 bp, Homo sapien
cccgcagcactgtgttgaagtcgaa

SEQ ID NO: 1265780 - DNA, 25 bp, Homo sapien
tcgaacatggccgtcttcttctggc

SEQ ID NO: 1265781 - DNA, 25 bp, Homo sapien
gcaaggagggactcacttgcctggc

SEQ ID NO: 1265782 - DNA, 25 bp, Homo sapien
tggtctagggccaggtgcaccaacg

SEQ ID NO: 1265783 - DNA, 25 bp, Homo sapien
cctggccgtgcccgcaggatggcca

SEQ ID NO: 1265784 - DNA, 25 bp, Homo sapien
gccagagacaggtaggcgatggcct

SEQ ID NO: 1265785 - DNA, 25 bp, Homo sapien
tgccggtcctcgtggcagaagacgt

SEQ ID NO: 1265786 - DNA, 25 bp, Homo sapien
ggtcctcgtggcagaagacgtccag

SEQ ID NO: 1265787 - DNA, 25 bp, Homo sapien
gtgtcaccagactggaccagcttct

SEQ ID NO: 1265788 - DNA, 25 bp, Homo sapien
gcaggcggtgtcaccagactggacc

SEQ ID NO: 1265789 - DNA, 25 bp, Homo sapien
ggcggtgtcaccagactggaccagc

SEQ ID NO: 1265790 - DNA, 25 bp, Homo sapien
tggaggcaggcggtgtcaccagact

SEQ ID NO: 1265791 - DNA, 25 bp, Homo sapien
ggcctccgggatagggccaccagca

SEQ ID NO: 1265792 - DNA, 25 bp, Homo sapien
tggcgtcatagaagaagcccctcct

SEQ ID NO: 1265793 - DNA, 25 bp, Homo sapien
agcagggccagtcgtgccagcacag

SEQ ID NO: 1265794 - DNA, 25 bp, Homo sapien
cggcccaggcggtacagggcatcag

SEQ ID NO: 1265795 - DNA, 25 bp, Homo sapien
gagatcgctgcagcatcccacgggc

SEQ ID NO: 1265796 - DNA, 25 bp, Homo sapien
tgcgctctggacggcccggcgcgtg

SEQ ID NO: 1265797 - DNA, 25 bp, Homo sapien
gggccgcccgtctctgcggcctccc

SEQ ID NO: 1265798 - DNA, 25 bp, Homo sapien
ggcccggcgcgtggagatcgctgca

SEQ ID NO: 1265799 - DNA, 25 bp, Homo sapien
tgcaggttccaaaacacgtcctggg

SEQ ID NO: 1265800 - DNA, 25 bp, Homo sapien
cctgcaggcggtgacatagtccagc

SEQ ID NO: 1265801 - DNA, 25 bp, Homo sapien
tggacagagaacacggcctggaact

SEQ ID NO: 1265802 - DNA, 25 bp, Homo sapien
ggtggttccgcacggcttcctggaa

SEQ ID NO: 1265803 - DNA, 25 bp, Homo sapien
ggtaagggaagtgtagctgccccat

SEQ ID NO: 1265804 - DNA, 25 bp, Homo sapien
tgaatggggctttctgactggtaag

SEQ ID NO: 1265805 - DNA, 25 bp, Homo sapien
actggtaagggaagtgtagctgccc

SEQ ID NO: 1265806 - DNA, 25 bp, Homo sapien
tgtctgagcaaacgtgaatggggct

SEQ ID NO: 1265807 - DNA, 25 bp, Homo sapien
tcttctcttctcatcgtaagccatg

SEQ ID NO: 1265808 - DNA, 25 bp, Homo sapien
agtcccttgaccgaagtgacttggg

SEQ ID NO: 1265809 - DNA, 25 bp, Homo sapien
tggggagtcccttgaccgaagtgac

SEQ ID NO: 1265810 - DNA, 25 bp, Homo sapien
tcttctcatcgtaagccatgcttgt

SEQ ID NO: 1265811 - DNA, 25 bp, Homo sapien
ctccagatgtctgctggcctgggat

SEQ ID NO: 1265812 - DNA, 25 bp, Homo sapien
cagatgtctgctggcctgggatggg

SEQ ID NO: 1265813 - DNA, 25 bp, Homo sapien
gatgtctgctggcctgggatggggg

SEQ ID NO: 1265814 - DNA, 25 bp, Homo sapien
tccagatgtctgctggcctgggatg

SEQ ID NO: 1265815 - DNA, 25 bp, Homo sapien
tgcgaatgaaagctaccgtccggtc

SEQ ID NO: 1265816 - DNA, 25 bp, Homo sapien
gcagcgttgcaccacttcttcgtga

SEQ ID NO: 1265817 - DNA, 25 bp, Homo sapien
tcaaacctgccgctgtggagcagag

SEQ ID NO: 1265818 - DNA, 25 bp, Homo sapien
gtcagggagaccactgccatgccgt

SEQ ID NO: 1265819 - DNA, 25 bp, Homo sapien
gggctgacatcatgtctgggacccc

SEQ ID NO: 1265820 - DNA, 25 bp, Homo sapien
gacgggcccatgtctggtcctcaga

SEQ ID NO: 1265821 - DNA, 25 bp, Homo sapien
atcatgtctgggaccccgacgggcc

SEQ ID NO: 1265822 - DNA, 25 bp, Homo sapien
cgacgggcccatgtctggtcctcag

SEQ ID NO: 1265823 - DNA, 25 bp, Homo sapien
ggccctgtcacccggtcctggggca

SEQ ID NO: 1265824 - DNA, 25 bp, Homo sapien
gccctgtcacccggtcctggggcac

SEQ ID NO: 1265825 - DNA, 25 bp, Homo sapien
tccccacaggctgttccctgtgccg

SEQ ID NO: 1265826 - DNA, 25 bp, Homo sapien
cccacaggctgttccctgtgccggc

SEQ ID NO: 1265827 - DNA, 25 bp, Homo sapien
ctccccacaggctgttccctgtgcc

SEQ ID NO: 1265828 - DNA, 25 bp, Homo sapien
cacaggctgttccctgtgccggcag

SEQ ID NO: 1265829 - DNA, 25 bp, Homo sapien
atttcccttggccgtcctccctctg

SEQ ID NO: 1265830 - DNA, 25 bp, Homo sapien
agaggcttaggcagccctgtcctgc

SEQ ID NO: 1265831 - DNA, 25 bp, Homo sapien
cccttggccgtcctccctctgagag

SEQ ID NO: 1265832 - DNA, 25 bp, Homo sapien
cttggccgtcctccctctgagaggc

SEQ ID NO: 1265833 - DNA, 25 bp, Homo sapien
gcatagggactattttaggaaacat

SEQ ID NO: 1265834 - DNA, 25 bp, Homo sapien
gggtggcagcatagggactatttta

SEQ ID NO: 1265835 - DNA, 25 bp, Homo sapien
agggaccctgattgttgctgaggaa

SEQ ID NO: 1265836 - DNA, 25 bp, Homo sapien
tactgcccagggaccctgattgttg

SEQ ID NO: 1265837 - DNA, 25 bp, Homo sapien
cttcagcccgtggccaccgtcagcc

SEQ ID NO: 1265838 - DNA, 25 bp, Homo sapien
ccgtggccaccgtcagcccatgccg

SEQ ID NO: 1265839 - DNA, 25 bp, Homo sapien
tggccaccgtcagcccatgccgcag

SEQ ID NO: 1265840 - DNA, 25 bp, Homo sapien
agcccgtggccaccgtcagcccatg

SEQ ID NO: 1265841 - DNA, 25 bp, Homo sapien
aagtctcggagggtcccgagctatg

SEQ ID NO: 1265842 - DNA, 25 bp, Homo sapien
ccatcacagcagtgccgatgggccc

SEQ ID NO: 1265843 - DNA, 25 bp, Homo sapien
agatgagcctggaagtctcggaggg

SEQ ID NO: 1265844 - DNA, 25 bp, Homo sapien
gagggtcccgagctatgatcacagc

SEQ ID NO: 1265845 - DNA, 25 bp, Homo sapien
gccacctcccaatccgcactctcgt

SEQ ID NO: 1265846 - DNA, 25 bp, Homo sapien
ccaatccgcactctcgtctctgatt

SEQ ID NO: 1265847 - DNA, 25 bp, Homo sapien
ctcccaatccgcactctcgtctctg

SEQ ID NO: 1265848 - DNA, 25 bp, Homo sapien
cacgccacctcccaatccgcactct

SEQ ID NO: 1265849 - DNA, 25 bp, Homo sapien
gctgcccccgtttatgtggtcggac

SEQ ID NO: 1265850 - DNA, 25 bp, Homo sapien
agcccaggagctgcttccgacgccc

SEQ ID NO: 1265851 - DNA, 25 bp, Homo sapien
gagctgcttccgacgccctgggagc

SEQ ID NO: 1265852 - DNA, 25 bp, Homo sapien
tggctgcccccgtttatgtggtcgg

SEQ ID NO: 1265853 - DNA, 25 bp, Homo sapien
gtgcatgggctgctggggcaggcat

SEQ ID NO: 1265854 - DNA, 25 bp, Homo sapien
cgtgcatgggctgctggggcaggca

SEQ ID NO: 1265855 - DNA, 25 bp, Homo sapien
agggccgtgcatgggctgctggggc

SEQ ID NO: 1265856 - DNA, 25 bp, Homo sapien
gccgtgcatgggctgctggggcagg

SEQ ID NO: 1265857 - DNA, 25 bp, Homo sapien
ccctcttccccccgcaggcgctcac

SEQ ID NO: 1265858 - DNA, 25 bp, Homo sapien
gcccctcttccccccgcaggcgctc

SEQ ID NO: 1265859 - DNA, 25 bp, Homo sapien
ctgcccctcttccccccgcaggcgc

SEQ ID NO: 1265860 - DNA, 25 bp, Homo sapien
tgcctgcccctcttccccccgcagg

SEQ ID NO: 1265861 - DNA, 25 bp, Homo sapien
ctgtgttgcgatctcagttgcaggg

SEQ ID NO: 1265862 - DNA, 25 bp, Homo sapien
cggagggcccctttgcattctgggg

SEQ ID NO: 1265863 - DNA, 25 bp, Homo sapien
gctcccgctgtgttgcgatctcagt

SEQ ID NO: 1265864 - DNA, 25 bp, Homo sapien
ccgctgtgttgcgatctcagttgca

SEQ ID NO: 1265865 - DNA, 25 bp, Homo sapien
gggcgtgatggcttcttatctccca

SEQ ID NO: 1265866 - DNA, 25 bp, Homo sapien
ttatctcccactgctgcgaggctgc

SEQ ID NO: 1265867 - DNA, 25 bp, Homo sapien
gctttcccgccgaggcatatcctgg

SEQ ID NO: 1265868 - DNA, 25 bp, Homo sapien
cgccgaggcatatcctgggcgtgat

SEQ ID NO: 1265869 - DNA, 25 bp, Homo sapien
acacagcagggctgactcttgcctc

SEQ ID NO: 1265870 - DNA, 25 bp, Homo sapien
tgcagggcagtcaacacccgggggc

SEQ ID NO: 1265871 - DNA, 25 bp, Homo sapien
ccttctctttgtttgatgtgggctc

SEQ ID NO: 1265872 - DNA, 25 bp, Homo sapien
tcctgcccgggttcctgaggacgca

SEQ ID NO: 1265873 - DNA, 25 bp, Homo sapien
gcctgagggccacagggccctggtg

SEQ ID NO: 1265874 - DNA, 25 bp, Homo sapien
tggcctgagggccacagggccctgg

SEQ ID NO: 1265875 - DNA, 25 bp, Homo sapien
ggcctgagggccacagggccctggt

SEQ ID NO: 1265876 - DNA, 25 bp, Homo sapien
gagacaggaggagctcggtggggac

SEQ ID NO: 1265877 - DNA, 25 bp, Homo sapien
acaggaggagctcggtggggacgca

SEQ ID NO: 1265878 - DNA, 25 bp, Homo sapien
gccacggagacaggaggagctcggt

SEQ ID NO: 1265879 - DNA, 25 bp, Homo sapien
tgggccacggagacaggaggagctc

SEQ ID NO: 1265880 - DNA, 25 bp, Homo sapien
gccgcgtgtcgccacccacacagga

SEQ ID NO: 1265881 - DNA, 25 bp, Homo sapien
agccggcgccgcgtgtcgccaccca

SEQ ID NO: 1265882 - DNA, 25 bp, Homo sapien
ccacacaggaaaggcgagattggtg

SEQ ID NO: 1265883 - DNA, 25 bp, Homo sapien
cgtgtcgccacccacacaggaaagg

SEQ ID NO: 1265884 - DNA, 25 bp, Homo sapien
tcgagtgatgtatctgcccggcccc

SEQ ID NO: 1265885 - DNA, 25 bp, Homo sapien
cctcgagtgatgtatctgcccggcc

SEQ ID NO: 1265886 - DNA, 25 bp, Homo sapien
gagtgatgtatctgcccggccccat

SEQ ID NO: 1265887 - DNA, 25 bp, Homo sapien
gcctcgagtgatgtatctgcccggc

SEQ ID NO: 1265888 - DNA, 25 bp, Homo sapien
cttttattgttgatgaccacgttat

SEQ ID NO: 1265889 - DNA, 25 bp, Homo sapien
tgttgatgaccacgttatcttccta

SEQ ID NO: 1265890 - DNA, 25 bp, Homo sapien
accacgttatcttcctaattattag

SEQ ID NO: 1265891 - DNA, 25 bp, Homo sapien
gggaagttcttcatggtagaaggga

SEQ ID NO: 1265892 - DNA, 25 bp, Homo sapien
agccttggtgcccatgtgtgcccag

SEQ ID NO: 1265893 - DNA, 25 bp, Homo sapien
cttggtgcccatgtgtgcccagggt

SEQ ID NO: 1265894 - DNA, 25 bp, Homo sapien
gctccgtgcagctgatttggcccca

SEQ ID NO: 1265895 - DNA, 25 bp, Homo sapien
tgctggctcagctccgtgcagctga

SEQ ID NO: 1265896 - DNA, 25 bp, Homo sapien
ctgggctgtgataatgttcgaacgg

SEQ ID NO: 1265897 - DNA, 25 bp, Homo sapien
cctggcacctgaatattcacaaggg

SEQ ID NO: 1265898 - DNA, 25 bp, Homo sapien
gaagctgtggacatgtgacctcctg

SEQ ID NO: 1265899 - DNA, 25 bp, Homo sapien
gagggccctggcacctgaatattca

SEQ ID NO: 1265900 - DNA, 25 bp, Homo sapien
gcatctggtgatgaccatcgtggct

SEQ ID NO: 1265901 - DNA, 25 bp, Homo sapien
tggcttcgagcacggcacccagcat

SEQ ID NO: 1265902 - DNA, 25 bp, Homo sapien
tgatgcatgcaaaacatgcaacccc

SEQ ID NO: 1265903 - DNA, 25 bp, Homo sapien
tctggacataatggtgggaaagtga

SEQ ID NO: 1265904 - DNA, 25 bp, Homo sapien
gcactaagacgagtgaccagccctg

SEQ ID NO: 1265905 - DNA, 25 bp, Homo sapien
tggagccttgggcactaagacgagt

SEQ ID NO: 1265906 - DNA, 25 bp, Homo sapien
tgggcactaagacgagtgaccagcc

SEQ ID NO: 1265907 - DNA, 25 bp, Homo sapien
ccttgggcactaagacgagtgacca

SEQ ID NO: 1265908 - DNA, 25 bp, Homo sapien
gacaggcttgtctcggtaaatgcgc

SEQ ID NO: 1265909 - DNA, 25 bp, Homo sapien
cacacagcaccgagccggggacagg

SEQ ID NO: 1265910 - DNA, 25 bp, Homo sapien
ggcttgtctcggtaaatgcgcccaa

SEQ ID NO: 1265911 - DNA, 25 bp, Homo sapien
gccggggacaggcttgtctcggtaa

SEQ ID NO: 1265912 - DNA, 25 bp, Homo sapien
catcttcctgggccgcatctgcaga

SEQ ID NO: 1265913 - DNA, 25 bp, Homo sapien
gctggctccctgcccatgggaagct

SEQ ID NO: 1265914 - DNA, 25 bp, Homo sapien
aatgccggttcttcgccctgggagg

SEQ ID NO: 1265915 - DNA, 25 bp, Homo sapien
ctgggctgcggtaggaatgccggtt

SEQ ID NO: 1265916 - DNA, 25 bp, Homo sapien
gatattcggttccatccagctccat

SEQ ID NO: 1265917 - DNA, 25 bp, Homo sapien
tcctctggtcggtatgattttctgg

SEQ ID NO: 1265918 - DNA, 25 bp, Homo sapien
gtcgtcgtctgtgttaagctgggct

SEQ ID NO: 1265919 - DNA, 25 bp, Homo sapien
gctggatgtcctctggtcggtatga

SEQ ID NO: 1265920 - DNA, 25 bp, Homo sapien
ctggcaagttttgccggctgcctgc

SEQ ID NO: 1265921 - DNA, 25 bp, Homo sapien
ctgcctgctgaaccctggcatcttg

SEQ ID NO: 1265922 - DNA, 25 bp, Homo sapien
cagctacatcggctggcaagttttg

SEQ ID NO: 1265923 - DNA, 25 bp, Homo sapien
agaagtcagaacctccgagccaggc

SEQ ID NO: 1265924 - DNA, 25 bp, Homo sapien
ctggccggtgcccttggagctgggc

SEQ ID NO: 1265925 - DNA, 25 bp, Homo sapien
ccctggccggtgcccttggagctgg

SEQ ID NO: 1265926 - DNA, 25 bp, Homo sapien
cctggccggtgcccttggagctggg

SEQ ID NO: 1265927 - DNA, 25 bp, Homo sapien
cttctccagggcgtgaggaaacagg

SEQ ID NO: 1265928 - DNA, 25 bp, Homo sapien
cttggggggtgctcgaaagcacggc

SEQ ID NO: 1265929 - DNA, 25 bp, Homo sapien
gtgctcgaaagcacggccacccagg

SEQ ID NO: 1265930 - DNA, 25 bp, Homo sapien
caggaggtgcttgggcggcagggcc

SEQ ID NO: 1265931 - DNA, 25 bp, Homo sapien
caccagctccttctgactggatctt

SEQ ID NO: 1265932 - DNA, 25 bp, Homo sapien
gaggggtcctgctgttactcctgca

SEQ ID NO: 1265933 - DNA, 25 bp, Homo sapien
cttctgactggatcttcccctccac

SEQ ID NO: 1265934 - DNA, 25 bp, Homo sapien
gttactcctgcagaagtttccacca

SEQ ID NO: 1265935 - DNA, 25 bp, Homo sapien
accttggtgccggacgaggaccact

SEQ ID NO: 1265936 - DNA, 25 bp, Homo sapien
gctcacgagacccacacaacatggt

SEQ ID NO: 1265937 - DNA, 25 bp, Homo sapien
gcccttgcaagtggcgagttctcag

SEQ ID NO: 1265938 - DNA, 25 bp, Homo sapien
tgtgccgtgagcaggttgtgctctc

SEQ ID NO: 1265939 - DNA, 25 bp, Homo sapien
tgccttccttctttggatatttcgg

SEQ ID NO: 1265940 - DNA, 25 bp, Homo sapien
cttcaatttaggtcccctgttctgc

SEQ ID NO: 1265941 - DNA, 25 bp, Homo sapien
tgcttcaatttaggtcccctgttct

SEQ ID NO: 1265942 - DNA, 25 bp, Homo sapien
ccctgcttcaatttaggtcccctgt

SEQ ID NO: 1265943 - DNA, 25 bp, Homo sapien
caggcaggggcttaagctctgtggg

SEQ ID NO: 1265944 - DNA, 25 bp, Homo sapien
atggccgcgagggaacccagcctgg

SEQ ID NO: 1265945 - DNA, 25 bp, Homo sapien
ggtccacaccaactcgaggtaaatg

SEQ ID NO: 1265946 - DNA, 25 bp, Homo sapien
agcctggcagcaggctccggtccac

SEQ ID NO: 1265947 - DNA, 25 bp, Homo sapien
tccggtccacaccaactcgaggtaa

SEQ ID NO: 1265948 - DNA, 25 bp, Homo sapien
ggtgaaggcgtcagctgcagtagaa

SEQ ID NO: 1265949 - DNA, 25 bp, Homo sapien
agaaaccatcggctctgggaggaag

SEQ ID NO: 1265950 - DNA, 25 bp, Homo sapien
aaggggtgcaccgagtgcttctcag

SEQ ID NO: 1265951 - DNA, 25 bp, Homo sapien
ccctacctctgtgtgggagggtgaa

SEQ ID NO: 1265952 - DNA, 25 bp, Homo sapien
aatgggcctggagtccacgctgagt

SEQ ID NO: 1265953 - DNA, 25 bp, Homo sapien
tatccccatggcagatacgtcgcag

SEQ ID NO: 1265954 - DNA, 25 bp, Homo sapien
gggtggccccaagtacacagaatgg

SEQ ID NO: 1265955 - DNA, 25 bp, Homo sapien
acttctgggaagaccagggactgga

SEQ ID NO: 1265956 - DNA, 25 bp, Homo sapien
aagcactgagtctccgcctgaggat

SEQ ID NO: 1265957 - DNA, 25 bp, Homo sapien
ccttcgagtgttcgctgagctccca

SEQ ID NO: 1265958 - DNA, 25 bp, Homo sapien
gaggatccatcctgtccttcgagtg

SEQ ID NO: 1265959 - DNA, 25 bp, Homo sapien
gtgctatgaagacggccaagcactg

SEQ ID NO: 1265960 - DNA, 25 bp, Homo sapien
gagagggtggcccttgtccattgca

SEQ ID NO: 1265961 - DNA, 25 bp, Homo sapien
gccacggatgtacgctccaggctgg

SEQ ID NO: 1265962 - DNA, 25 bp, Homo sapien
ggtggcccttgtccattgcaggcat

SEQ ID NO: 1265963 - DNA, 25 bp, Homo sapien
aactgggggccacggatgtacgctc

SEQ ID NO: 1265964 - DNA, 25 bp, Homo sapien
cataaaatcaggggccagtgaaggg

SEQ ID NO: 1265965 - DNA, 25 bp, Homo sapien
tcaggggccagtgaagggggtcggc

SEQ ID NO: 1265966 - DNA, 25 bp, Homo sapien
aatcaggggccagtgaagggggtcg

SEQ ID NO: 1265967 - DNA, 25 bp, Homo sapien
gcataaaatcaggggccagtgaagg

SEQ ID NO: 1265968 - DNA, 25 bp, Homo sapien
gtggagagctcaccaagggtgtgat

SEQ ID NO: 1265969 - DNA, 25 bp, Homo sapien
gagagctcaccaagggtgtgatgga

SEQ ID NO: 1265970 - DNA, 25 bp, Homo sapien
cccgtggccaccgccagcagcgtgg

SEQ ID NO: 1265971 - DNA, 25 bp, Homo sapien
agagctcaccaagggtgtgatggat

SEQ ID NO: 1265972 - DNA, 25 bp, Homo sapien
tgtgaattagtgtctggccctgggt

SEQ ID NO: 1265973 - DNA, 25 bp, Homo sapien
agttggaggatcgatggcacctgcc

SEQ ID NO: 1265974 - DNA, 25 bp, Homo sapien
gctgcgtggctactgagaaggtcct

SEQ ID NO: 1265975 - DNA, 25 bp, Homo sapien
agaatgggcattcacgctgcgtggc

SEQ ID NO: 1265976 - DNA, 25 bp, Homo sapien
tggcttggattgtcagcccacaggc

SEQ ID NO: 1265977 - DNA, 25 bp, Homo sapien
caggatgtcggctggtctcgtgtcc

SEQ ID NO: 1265978 - DNA, 25 bp, Homo sapien
ctcgtgtcccggctgctttgctgct

SEQ ID NO: 1265979 - DNA, 25 bp, Homo sapien
ttgtcacgccaaccacggaatccgt

SEQ ID NO: 1265980 - DNA, 25 bp, Homo sapien
cctttgaccacgatctctgtggcct

SEQ ID NO: 1265981 - DNA, 25 bp, Homo sapien
tttctgcctttgaccacgatctctg

SEQ ID NO: 1265982 - DNA, 25 bp, Homo sapien
cagacatagcctgtgtagggcatct

SEQ ID NO: 1265983 - DNA, 25 bp, Homo sapien
tgtgcaacacgtatacactgtagag

SEQ ID NO: 1265984 - DNA, 25 bp, Homo sapien
ctccgtgatacagaagataaagcca

SEQ ID NO: 1265985 - DNA, 25 bp, Homo sapien
tacagctccgtgatacagaagataa

SEQ ID NO: 1265986 - DNA, 25 bp, Homo sapien
ccgtgatacagaagataaagccagg

SEQ ID NO: 1265987 - DNA, 25 bp, Homo sapien
gggagttacagctccgtgatacaga

SEQ ID NO: 1265988 - DNA, 25 bp, Homo sapien
aggtatgcatgaggtcgggacccca

SEQ ID NO: 1265989 - DNA, 25 bp, Homo sapien
acctttgaaattgctcggagtctgg

SEQ ID NO: 1265990 - DNA, 25 bp, Homo sapien
agggactgaggcagctcccggttca

SEQ ID NO: 1265991 - DNA, 25 bp, Homo sapien
tctcgggaaccaaggcccaggtatg

SEQ ID NO: 1265992 - DNA, 25 bp, Homo sapien
gagacatccccggatgccatctgag

SEQ ID NO: 1265993 - DNA, 25 bp, Homo sapien
acatccccggatgccatctgaggtc

SEQ ID NO: 1265994 - DNA, 25 bp, Homo sapien
tcagagacatccccggatgccatct

SEQ ID NO: 1265995 - DNA, 25 bp, Homo sapien
gacatccccggatgccatctgaggt

SEQ ID NO: 1265996 - DNA, 25 bp, Homo sapien
aacttgacgttctcgacagcctgga

SEQ ID NO: 1265997 - DNA, 25 bp, Homo sapien
acattggcggcagcgggattccagc

SEQ ID NO: 1265998 - DNA, 25 bp, Homo sapien
ttccagcccggagcacggaaacttg

SEQ ID NO: 1265999 - DNA, 25 bp, Homo sapien
ggcttgttgtaacactgagcccagc

SEQ ID NO: 1266000 - DNA, 25 bp, Homo sapien
agtttcaattagacgggctggaggc

SEQ ID NO: 1266001 - DNA, 25 bp, Homo sapien
caagaaggagaacgtttccgcggcg

SEQ ID NO: 1266002 - DNA, 25 bp, Homo sapien
gccggctcggcgaaagattaaaaca

SEQ ID NO: 1266003 - DNA, 25 bp, Homo sapien
tgtaattgggaccatgtgaacttcc

SEQ ID NO: 1266004 - DNA, 25 bp, Homo sapien
caggagctgccggatccttgggcct

SEQ ID NO: 1266005 - DNA, 25 bp, Homo sapien
agctgccggatccttgggcctcgaa

SEQ ID NO: 1266006 - DNA, 25 bp, Homo sapien
ccagctgcggccgatgctgcaggag

SEQ ID NO: 1266007 - DNA, 25 bp, Homo sapien
tcctcatctgtgacgtggaggtgga

SEQ ID NO: 1266008 - DNA, 25 bp, Homo sapien
tggcttggttgtggtaaggacggga

SEQ ID NO: 1266009 - DNA, 25 bp, Homo sapien
gggctggcttggttgtggtaaggac

SEQ ID NO: 1266010 - DNA, 25 bp, Homo sapien
gatgccgtcttggtgacatcgtggg

SEQ ID NO: 1266011 - DNA, 25 bp, Homo sapien
agccaagggcccctttgtatcaggg

SEQ ID NO: 1266012 - DNA, 25 bp, Homo sapien
ctctgctccgggcgctctctggaat

SEQ ID NO: 1266013 - DNA, 25 bp, Homo sapien
gctccgggcgctctctggaattcac

SEQ ID NO: 1266014 - DNA, 25 bp, Homo sapien
acaccctctgctccgggcgctctct

SEQ ID NO: 1266015 - DNA, 25 bp, Homo sapien
ctgctccgggcgctctctggaattc

SEQ ID NO: 1266016 - DNA, 25 bp, Homo sapien
ccaaaggggagaccatgccacacac

SEQ ID NO: 1266017 - DNA, 25 bp, Homo sapien
gggccaaaggggagaccatgccaca

SEQ ID NO: 1266018 - DNA, 25 bp, Homo sapien
ggccaaaggggagaccatgccacac

SEQ ID NO: 1266019 - DNA, 25 bp, Homo sapien
gggggccaaaggggagaccatgcca

SEQ ID NO: 1266020 - DNA, 25 bp, Homo sapien
cctctgctaaaaccgcctggttggc

SEQ ID NO: 1266021 - DNA, 25 bp, Homo sapien
taaaaccgcctggttggcgctctcc

SEQ ID NO: 1266022 - DNA, 25 bp, Homo sapien
tggttggcgctctcccggaattcct

SEQ ID NO: 1266023 - DNA, 25 bp, Homo sapien
tggcaggataccctctgctaaaacc

SEQ ID NO: 1266024 - DNA, 25 bp, Homo sapien
aagggctcttgccatcggcaaccat

SEQ ID NO: 1266025 - DNA, 25 bp, Homo sapien
cggtcaggccgggacagtcgggagg

SEQ ID NO: 1266026 - DNA, 25 bp, Homo sapien
caggccgggacagtcgggaggaggt

SEQ ID NO: 1266027 - DNA, 25 bp, Homo sapien
tcttgccatcggcaaccatttgttc

SEQ ID NO: 1266028 - DNA, 25 bp, Homo sapien
ctccttgggccaaacacatctggct

SEQ ID NO: 1266029 - DNA, 25 bp, Homo sapien
tgggcattgagaacgccccactctt

SEQ ID NO: 1266030 - DNA, 25 bp, Homo sapien
gccttgggcattgagaacgccccac

SEQ ID NO: 1266031 - DNA, 25 bp, Homo sapien
tgagaacgccccactcttctgggag

SEQ ID NO: 1266032 - DNA, 25 bp, Homo sapien
tggccctgggccattccagagccct

SEQ ID NO: 1266033 - DNA, 25 bp, Homo sapien
ggccattccagagcccttggcacag

SEQ ID NO: 1266034 - DNA, 25 bp, Homo sapien
ctgggccattccagagcccttggca

SEQ ID NO: 1266035 - DNA, 25 bp, Homo sapien
cattccagagcccttggcacagcct

SEQ ID NO: 1266036 - DNA, 25 bp, Homo sapien
tgtcagactcgggtccactgaacct

SEQ ID NO: 1266037 - DNA, 25 bp, Homo sapien
gaagtctctggaggtaaagccctca

SEQ ID NO: 1266038 - DNA, 25 bp, Homo sapien
tagggtgatagggatcggcctccat

SEQ ID NO: 1266039 - DNA, 25 bp, Homo sapien
ggtggttttatgtcagactcgggtc

SEQ ID NO: 1266040 - DNA, 25 bp, Homo sapien
acgccttgtcttagggctccctggg

SEQ ID NO: 1266041 - DNA, 25 bp, Homo sapien
tttcagagacggctgctgttgtgcg

SEQ ID NO: 1266042 - DNA, 25 bp, Homo sapien
tgacgtgcgcccagtcacgccttgt

SEQ ID NO: 1266043 - DNA, 25 bp, Homo sapien
tgtgaaccgctccaaccacttttca

SEQ ID NO: 1266044 - DNA, 25 bp, Homo sapien
tggcacccagagagatgggcttgcg

SEQ ID NO: 1266045 - DNA, 25 bp, Homo sapien
cacccagagagatgggcttgcggcc

SEQ ID NO: 1266046 - DNA, 25 bp, Homo sapien
tgcagcctggcacccagagagatgg

SEQ ID NO: 1266047 - DNA, 25 bp, Homo sapien
ctgcagcctggcacccagagagatg

SEQ ID NO: 1266048 - DNA, 25 bp, Homo sapien
gggctcgggcatcaagcaggactcc

SEQ ID NO: 1266049 - DNA, 25 bp, Homo sapien
gctcgggcatcaagcaggactccag

SEQ ID NO: 1266050 - DNA, 25 bp, Homo sapien
ggctcgggcatcaagcaggactcca

SEQ ID NO: 1266051 - DNA, 25 bp, Homo sapien
tgcagggctgccgtcggcaaaggcc

SEQ ID NO: 1266052 - DNA, 25 bp, Homo sapien
ttttgccgagcatggctggcgtgca

SEQ ID NO: 1266053 - DNA, 25 bp, Homo sapien
agcgtccctccatgggccggccctg

SEQ ID NO: 1266054 - DNA, 25 bp, Homo sapien
caggagcaggttccggcccccatgg

SEQ ID NO: 1266055 - DNA, 25 bp, Homo sapien
gaggcaggagggcgtggctgtgccc

SEQ ID NO: 1266056 - DNA, 25 bp, Homo sapien
aggaggcaggagggcgtggctgtgc

SEQ ID NO: 1266057 - DNA, 25 bp, Homo sapien
ggcaggagggcgtggctgtgcccac

SEQ ID NO: 1266058 - DNA, 25 bp, Homo sapien
aggcaggagggcgtggctgtgccca

SEQ ID NO: 1266059 - DNA, 25 bp, Homo sapien
tctttgtgcacaagatgggccgggc

SEQ ID NO: 1266060 - DNA, 25 bp, Homo sapien
gagagtccgttgctgctggcctctt

SEQ ID NO: 1266061 - DNA, 25 bp, Homo sapien
agatgggccgggcagtcacagtccc

SEQ ID NO: 1266062 - DNA, 25 bp, Homo sapien
acagtccctggagctgtccacgaag

SEQ ID NO: 1266063 - DNA, 25 bp, Homo sapien
ttttacagtcaggggctgcggcttc

SEQ ID NO: 1266064 - DNA, 25 bp, Homo sapien
gggttttacagtcaggggctgcggc

SEQ ID NO: 1266065 - DNA, 25 bp, Homo sapien
gttttacagtcaggggctgcggctt

SEQ ID NO: 1266066 - DNA, 25 bp, Homo sapien
tttacagtcaggggctgcggcttct

SEQ ID NO: 1266067 - DNA, 25 bp, Homo sapien
gtgtggacagagggcgtcggtgagc

SEQ ID NO: 1266068 - DNA, 25 bp, Homo sapien
gacagagggcgtcggtgagctcaga

SEQ ID NO: 1266069 - DNA, 25 bp, Homo sapien
tcttgtcctgagcccaagggagcca

SEQ ID NO: 1266070 - DNA, 25 bp, Homo sapien
tggacagagggcgtcggtgagctca

SEQ ID NO: 1266071 - DNA, 25 bp, Homo sapien
ggtgtcggttcagaactgtccagct

SEQ ID NO: 1266072 - DNA, 25 bp, Homo sapien
cggtgtcggttcagaactgtccagc

SEQ ID NO: 1266073 - DNA, 25 bp, Homo sapien
gtgtcggttcagaactgtccagctc

SEQ ID NO: 1266074 - DNA, 25 bp, Homo sapien
ggtgacggtgacaggaattgctccc

SEQ ID NO: 1266075 - DNA, 25 bp, Homo sapien
actgggcaaaaccacgacgatggca

SEQ ID NO: 1266076 - DNA, 25 bp, Homo sapien
ccctgtttaatcctgtagtggctgc

SEQ ID NO: 1266077 - DNA, 25 bp, Homo sapien
ggctgctggacatgggttctctctc

SEQ ID NO: 1266078 - DNA, 25 bp, Homo sapien
tgctggtcagcctttgccccacacc

SEQ ID NO: 1266079 - DNA, 25 bp, Homo sapien
caggcatcagctggccgacgtctgc

SEQ ID NO: 1266080 - DNA, 25 bp, Homo sapien
ggcatcagctggccgacgtctgcgt

SEQ ID NO: 1266081 - DNA, 25 bp, Homo sapien
gcatcagctggccgacgtctgcgtc

SEQ ID NO: 1266082 - DNA, 25 bp, Homo sapien
gcaggcatcagctggccgacgtctg

SEQ ID NO: 1266083 - DNA, 25 bp, Homo sapien
tcaggcctccatacacctcgagagt

SEQ ID NO: 1266084 - DNA, 25 bp, Homo sapien
tctatcgctaaatcgaaagttggcc

SEQ ID NO: 1266085 - DNA, 25 bp, Homo sapien
cctctgttgatagagccgggctcct

SEQ ID NO: 1266086 - DNA, 25 bp, Homo sapien
cacaggctttggaccaaatcccaaa

SEQ ID NO: 1266087 - DNA, 25 bp, Homo sapien
cataggatgatgtcacaaacccact

SEQ ID NO: 1266088 - DNA, 25 bp, Homo sapien
ggcttttgcaggacccaagaccctg

SEQ ID NO: 1266089 - DNA, 25 bp, Homo sapien
tctgtttgaatggagccgcctggtg

SEQ ID NO: 1266090 - DNA, 25 bp, Homo sapien
tggcatctgtctcgtagctgcagct

SEQ ID NO: 1266091 - DNA, 25 bp, Homo sapien
caggggtttcccgagctggtaccag

SEQ ID NO: 1266092 - DNA, 25 bp, Homo sapien
agtacccgttcctcagccgtggagc

SEQ ID NO: 1266093 - DNA, 25 bp, Homo sapien
tgttgagaagatggtcaggctgacc

SEQ ID NO: 1266094 - DNA, 25 bp, Homo sapien
gcagacgcaccctgtccggtgtgag

SEQ ID NO: 1266095 - DNA, 25 bp, Homo sapien
gcggcgttggggaccgtcaggagga

SEQ ID NO: 1266096 - DNA, 25 bp, Homo sapien
caggcggcgttggggaccgtcagga

SEQ ID NO: 1266097 - DNA, 25 bp, Homo sapien
gcaggcggcgttggggaccgtcagg

SEQ ID NO: 1266098 - DNA, 25 bp, Homo sapien
aggcggcgttggggaccgtcaggag

SEQ ID NO: 1266099 - DNA, 25 bp, Homo sapien
aggacagaggcggagtggacatgag

SEQ ID NO: 1266100 - DNA, 25 bp, Homo sapien
gagtggacatgagaggatagcatcc

SEQ ID NO: 1266101 - DNA, 25 bp, Homo sapien
tgagaggatagcatcccgggacacg

SEQ ID NO: 1266102 - DNA, 25 bp, Homo sapien
atagcatcccgggacacgggtgaag

SEQ ID NO: 1266103 - DNA, 25 bp, Homo sapien
aacggatgggtctcaggagaccagt

SEQ ID NO: 1266104 - DNA, 25 bp, Homo sapien
caggggtggccaacggatgggtctc

SEQ ID NO: 1266105 - DNA, 25 bp, Homo sapien
gccaggggtggccaacggatgggtc

SEQ ID NO: 1266106 - DNA, 25 bp, Homo sapien
atgggtctcaggagaccagtgaggg

SEQ ID NO: 1266107 - DNA, 25 bp, Homo sapien
aggaggtgggccgagcggacagaga

SEQ ID NO: 1266108 - DNA, 25 bp, Homo sapien
ggaggtgggccgagcggacagagag

SEQ ID NO: 1266109 - DNA, 25 bp, Homo sapien
gaggtgggccgagcggacagagagg

SEQ ID NO: 1266110 - DNA, 25 bp, Homo sapien
cctgggcctcttcagcgagggtgac

SEQ ID NO: 1266111 - DNA, 25 bp, Homo sapien
ttcagcgagggtgaccacaaggtca

SEQ ID NO: 1266112 - DNA, 25 bp, Homo sapien
gggtgaccacaaggtcacggcctcc

SEQ ID NO: 1266113 - DNA, 25 bp, Homo sapien
gcctcttcagcgagggtgaccacaa

SEQ ID NO: 1266114 - DNA, 25 bp, Homo sapien
cacaggtccagggagaacagggtgg

SEQ ID NO: 1266115 - DNA, 25 bp, Homo sapien
caggtccagggagaacagggtggtt

SEQ ID NO: 1266116 - DNA, 25 bp, Homo sapien
acaggtccagggagaacagggtggt

SEQ ID NO: 1266117 - DNA, 25 bp, Homo sapien
gccttggaaggacatacaggcgcct

SEQ ID NO: 1266118 - DNA, 25 bp, Homo sapien
ccttggaaggacatacaggcgcctc

SEQ ID NO: 1266119 - DNA, 25 bp, Homo sapien
gaaggacatacaggcgcctcccctt

SEQ ID NO: 1266120 - DNA, 25 bp, Homo sapien
ttggaaggacatacaggcgcctccc

SEQ ID NO: 1266121 - DNA, 25 bp, Homo sapien
gcagccgagagctccaggtgtccca

SEQ ID NO: 1266122 - DNA, 25 bp, Homo sapien
actgggcatgggtgaagcactcgca

SEQ ID NO: 1266123 - DNA, 25 bp, Homo sapien
gcatggagtcctccccggcacggag

SEQ ID NO: 1266124 - DNA, 25 bp, Homo sapien
ggccgagagagcatggagtcctccc

SEQ ID NO: 1266125 - DNA, 25 bp, Homo sapien
gcctctgtaccccagagctgcgtgc

SEQ ID NO: 1266126 - DNA, 25 bp, Homo sapien
tgatgggtagttcccacacttgcat

SEQ ID NO: 1266127 - DNA, 25 bp, Homo sapien
ccagctctctagagggacggccgtg

SEQ ID NO: 1266128 - DNA, 25 bp, Homo sapien
actctctcaagggatggccactctg

SEQ ID NO: 1266129 - DNA, 25 bp, Homo sapien
tctcggaggaccacatgatgggtag

SEQ ID NO: 1266130 - DNA, 25 bp, Homo sapien
ctcctgcatggtccagcttctccat

SEQ ID NO: 1266131 - DNA, 25 bp, Homo sapien
tctccatagcaccagggtccggtgg

SEQ ID NO: 1266132 - DNA, 25 bp, Homo sapien
ctgcatggtccagcttctccatagc

SEQ ID NO: 1266133 - DNA, 25 bp, Homo sapien
cctgcatggtccagcttctccatag

SEQ ID NO: 1266134 - DNA, 25 bp, Homo sapien
caggccggcccagatggtggagccc

SEQ ID NO: 1266135 - DNA, 25 bp, Homo sapien
aggccggcccagatggtggagcccc

SEQ ID NO: 1266136 - DNA, 25 bp, Homo sapien
ccagatggtggagccccctgcttga

SEQ ID NO: 1266137 - DNA, 25 bp, Homo sapien
ggcccagatggtggagccccctgct

SEQ ID NO: 1266138 - DNA, 25 bp, Homo sapien
aggaccaatactgggagcagcaggc

SEQ ID NO: 1266139 - DNA, 25 bp, Homo sapien
gagaccaggcgacatttagggagaa

SEQ ID NO: 1266140 - DNA, 25 bp, Homo sapien
agaaggctccggagaccaggcgaca

SEQ ID NO: 1266141 - DNA, 25 bp, Homo sapien
agaccaggcgacatttagggagaac

SEQ ID NO: 1266142 - DNA, 25 bp, Homo sapien
ctccggagaccaggcgacatttagg

SEQ ID NO: 1266143 - DNA, 25 bp, Homo sapien
gaagtcagacaagatgcttgctgct

SEQ ID NO: 1266144 - DNA, 25 bp, Homo sapien
actgaccatccagaccaactgatgt

SEQ ID NO: 1266145 - DNA, 25 bp, Homo sapien
caactgaccatccagaccaactgat

SEQ ID NO: 1266146 - DNA, 25 bp, Homo sapien
tgaccatccagaccaactgatgtca

SEQ ID NO: 1266147 - DNA, 25 bp, Homo sapien
ccatccagaccaactgatgtcatca

SEQ ID NO: 1266148 - DNA, 25 bp, Homo sapien
gaagccgctgagactccttgtggtg

SEQ ID NO: 1266149 - DNA, 25 bp, Homo sapien
tgtggtgacgccacaagtgaagctt

SEQ ID NO: 1266150 - DNA, 25 bp, Homo sapien
gatccctgctgtcgagcacagcctg

SEQ ID NO: 1266151 - DNA, 25 bp, Homo sapien
gaagcatccaagttcctcgttgtga

SEQ ID NO: 1266152 - DNA, 25 bp, Homo sapien
cgatcccgcacagtgacagttccgt

SEQ ID NO: 1266153 - DNA, 25 bp, Homo sapien
agctccgacagccagcgtccggttt

SEQ ID NO: 1266154 - DNA, 25 bp, Homo sapien
tgacagttccgttgactgcgatgtc

SEQ ID NO: 1266155 - DNA, 25 bp, Homo sapien
gctccgacagccagcgtccggtttt

SEQ ID NO: 1266156 - DNA, 25 bp, Homo sapien
accgtcccggaattcccgctgcaat

SEQ ID NO: 1266157 - DNA, 25 bp, Homo sapien
ccaccgtcccggaattcccgctgca

SEQ ID NO: 1266158 - DNA, 25 bp, Homo sapien
caccgtcccggaattcccgctgcaa

SEQ ID NO: 1266159 - DNA, 25 bp, Homo sapien
cttgggtgcttccaccgagggagcc

SEQ ID NO: 1266160 - DNA, 25 bp, Homo sapien
acccggaacggctgcctgggccttg

SEQ ID NO: 1266161 - DNA, 25 bp, Homo sapien
aggtgaggttgtcccggtccagagg

SEQ ID NO: 1266162 - DNA, 25 bp, Homo sapien
aggttgtcccggtccagaggctcag

SEQ ID NO: 1266163 - DNA, 25 bp, Homo sapien
gttgaggaccccatgacaggcaagg

SEQ ID NO: 1266164 - DNA, 25 bp, Homo sapien
tgttctgacaagtcagccacagccc

SEQ ID NO: 1266165 - DNA, 25 bp, Homo sapien
tcccactctgatggccgatgttgag

SEQ ID NO: 1266166 - DNA, 25 bp, Homo sapien
ggagatgggaatgcccgtctcccac

SEQ ID NO: 1266167 - DNA, 25 bp, Homo sapien
gccctttcctcccgatggcagctca

SEQ ID NO: 1266168 - DNA, 25 bp, Homo sapien
gtgccctttcctcccgatggcagct

SEQ ID NO: 1266169 - DNA, 25 bp, Homo sapien
gccagtgccctttcctcccgatggc

SEQ ID NO: 1266170 - DNA, 25 bp, Homo sapien
cagtgccctttcctcccgatggcag

SEQ ID NO: 1266171 - DNA, 25 bp, Homo sapien
tggcaaggtctggaggaggctgctc

SEQ ID NO: 1266172 - DNA, 25 bp, Homo sapien
ggcggggcagggcagtgccacctgc

SEQ ID NO: 1266173 - DNA, 25 bp, Homo sapien
agtgccacctgcctggcgccgggca

SEQ ID NO: 1266174 - DNA, 25 bp, Homo sapien
cagtgcccacagaggaccctcaatg

SEQ ID NO: 1266175 - DNA, 25 bp, Homo sapien
gcctgtgtgcagttcccgccagcat

SEQ ID NO: 1266176 - DNA, 25 bp, Homo sapien
gtttccgttcctgtcgcaccagggc

SEQ ID NO: 1266177 - DNA, 25 bp, Homo sapien
cagggtttccgttcctgtcgcacca

SEQ ID NO: 1266178 - DNA, 25 bp, Homo sapien
gggccgcctgtgtgcagttcccgcc

SEQ ID NO: 1266179 - DNA, 25 bp, Homo sapien
cctgtgctgttcctggactgtctga

SEQ ID NO: 1266180 - DNA, 25 bp, Homo sapien
cgtttgggagagacgctggccggca

SEQ ID NO: 1266181 - DNA, 25 bp, Homo sapien
acagcctatgtcctggatcccgtca

SEQ ID NO: 1266182 - DNA, 25 bp, Homo sapien
ccagcacagtatccccgggcgtttg

SEQ ID NO: 1266183 - DNA, 25 bp, Homo sapien
ggttctggcctgaaaatccgtctta

SEQ ID NO: 1266184 - DNA, 25 bp, Homo sapien
agcacgtggttctggcctgaaaatc

SEQ ID NO: 1266185 - DNA, 25 bp, Homo sapien
ttagcaagtcctggcgccaactggg

SEQ ID NO: 1266186 - DNA, 25 bp, Homo sapien
tgaaaatccgtcttagcaagtcctg

SEQ ID NO: 1266187 - DNA, 25 bp, Homo sapien
ctttgtccagaagagggttttgcca

SEQ ID NO: 1266188 - DNA, 25 bp, Homo sapien
ctccattaagctgggggtcccacgg

SEQ ID NO: 1266189 - DNA, 25 bp, Homo sapien
tctccattaagctgggggtcccacg

SEQ ID NO: 1266190 - DNA, 25 bp, Homo sapien
atctccattaagctgggggtcccac

SEQ ID NO: 1266191 - DNA, 25 bp, Homo sapien
tcaatggtttggtctgcgggcaaca

SEQ ID NO: 1266192 - DNA, 25 bp, Homo sapien
cctggatgtcccgtttggctgtgcg

SEQ ID NO: 1266193 - DNA, 25 bp, Homo sapien
ggaagccagctgtatccctggatgt

SEQ ID NO: 1266194 - DNA, 25 bp, Homo sapien
gaagagtcccatacggtgcaagcat

SEQ ID NO: 1266195 - DNA, 25 bp, Homo sapien
ggagcctctgacgtgggtctccaag

SEQ ID NO: 1266196 - DNA, 25 bp, Homo sapien
cctctgacgtgggtctccaagcatc

SEQ ID NO: 1266197 - DNA, 25 bp, Homo sapien
ctctgacgtgggtctccaagcatct

SEQ ID NO: 1266198 - DNA, 25 bp, Homo sapien
agcctctgacgtgggtctccaagca

SEQ ID NO: 1266199 - DNA, 25 bp, Homo sapien
tgtctctgctggcccgttaactgtg

SEQ ID NO: 1266200 - DNA, 25 bp, Homo sapien
cccgcgctgagtccctgcaccgcgg

SEQ ID NO: 1266201 - DNA, 25 bp, Homo sapien
gtggccccagatcccgcgctgagtc

SEQ ID NO: 1266202 - DNA, 25 bp, Homo sapien
tggcccgttaactgtgctggcagag

SEQ ID NO: 1266203 - DNA, 25 bp, Homo sapien
ctgcgatcaatgctgagcctggact

SEQ ID NO: 1266204 - DNA, 25 bp, Homo sapien
ctccgagggcctgcggcatttagag

SEQ ID NO: 1266205 - DNA, 25 bp, Homo sapien
tgctgctgcgatcaatgctgagcct

SEQ ID NO: 1266206 - DNA, 25 bp, Homo sapien
gagggactccgagggcctgcggcat

SEQ ID NO: 1266207 - DNA, 25 bp, Homo sapien
cccggagaagtgtcaggggatccat

SEQ ID NO: 1266208 - DNA, 25 bp, Homo sapien
tgctctcagcgagctcagtcaggaa

SEQ ID NO: 1266209 - DNA, 25 bp, Homo sapien
ctggaaggttcttgctctcagcgag

SEQ ID NO: 1266210 - DNA, 25 bp, Homo sapien
ggttcttgctctcagcgagctcagt

SEQ ID NO: 1266211 - DNA, 25 bp, Homo sapien
aaggttcttgctctcagcgagctca

SEQ ID NO: 1266212 - DNA, 25 bp, Homo sapien
gaagaggagggcgaggccaccccac

SEQ ID NO: 1266213 - DNA, 25 bp, Homo sapien
ggagggcgaggccaccccaccgcat

SEQ ID NO: 1266214 - DNA, 25 bp, Homo sapien
tgggaagaggagggcgaggccaccc

SEQ ID NO: 1266215 - DNA, 25 bp, Homo sapien
agaggagggcgaggccaccccaccg

SEQ ID NO: 1266216 - DNA, 25 bp, Homo sapien
tcacagctgagtgacccacatcccc

SEQ ID NO: 1266217 - DNA, 25 bp, Homo sapien
gcaattgcctctttcaatccatccg

SEQ ID NO: 1266218 - DNA, 25 bp, Homo sapien
tcccctcgcagctgagtgaccggtg

SEQ ID NO: 1266219 - DNA, 25 bp, Homo sapien
cccgctccttgcacatgtggagctc

SEQ ID NO: 1266220 - DNA, 25 bp, Homo sapien
ccaggaagtcgtggcgccgagcccc

SEQ ID NO: 1266221 - DNA, 25 bp, Homo sapien
ctttgcagaaggttggccgccccgt

SEQ ID NO: 1266222 - DNA, 25 bp, Homo sapien
agtcgtggcgccgagccccctggtg

SEQ ID NO: 1266223 - DNA, 25 bp, Homo sapien
tttgcagaaggttggccgccccgtc

SEQ ID NO: 1266224 - DNA, 25 bp, Homo sapien
cgctgggtccccaagtctttgagca

SEQ ID NO: 1266225 - DNA, 25 bp, Homo sapien
tctcgggcaaggcaacgctgggtcc

SEQ ID NO: 1266226 - DNA, 25 bp, Homo sapien
aacagtctcgggcaaggcaacgctg

SEQ ID NO: 1266227 - DNA, 25 bp, Homo sapien
aggcgtgggccagctgtctcatcat

SEQ ID NO: 1266228 - DNA, 25 bp, Homo sapien
caagggatgtcccacgatggcggcc

SEQ ID NO: 1266229 - DNA, 25 bp, Homo sapien
caccacgcaggaacgaacaagggat

SEQ ID NO: 1266230 - DNA, 25 bp, Homo sapien
gccgcctctgactccgatggtctgg

SEQ ID NO: 1266231 - DNA, 25 bp, Homo sapien
aggatgagacggacggaagccacca

SEQ ID NO: 1266232 - DNA, 25 bp, Homo sapien
tgcagcatgtgtgagcaccgccagt

SEQ ID NO: 1266233 - DNA, 25 bp, Homo sapien
gtgcggttgcccacttgctctcggg

SEQ ID NO: 1266234 - DNA, 25 bp, Homo sapien
agcatgtgtgagcaccgccagttcc

SEQ ID NO: 1266235 - DNA, 25 bp, Homo sapien
ctctggtgtggtatgtgcggttgcc

SEQ ID NO: 1266236 - DNA, 25 bp, Homo sapien
agtaattaatttcagcccagccgca

SEQ ID NO: 1266237 - DNA, 25 bp, Homo sapien
tggcctcgtgtgagataccccagag

SEQ ID NO: 1266238 - DNA, 25 bp, Homo sapien
cagagctgttgggatcgacttcaca

SEQ ID NO: 1266239 - DNA, 25 bp, Homo sapien
ggatcgtgacgtcctgaggcctctt

SEQ ID NO: 1266240 - DNA, 25 bp, Homo sapien
gggtggagatggttgaatcccttga

SEQ ID NO: 1266241 - DNA, 25 bp, Homo sapien
ggtggagatggttgaatcccttgat

SEQ ID NO: 1266242 - DNA, 25 bp, Homo sapien
ctctgggcgtggtgcagcctcactg

SEQ ID NO: 1266243 - DNA, 25 bp, Homo sapien
actgtgcggggagccctacagctca

SEQ ID NO: 1266244 - DNA, 25 bp, Homo sapien
catgcggctcgcagatgtgtttcct

SEQ ID NO: 1266245 - DNA, 25 bp, Homo sapien
tctgttcatcatctggacacatgcg

SEQ ID NO: 1266246 - DNA, 25 bp, Homo sapien
ctccatgcaagcaccgggggctacg

SEQ ID NO: 1266247 - DNA, 25 bp, Homo sapien
gtgtggccggacgtcccctcagaca

SEQ ID NO: 1266248 - DNA, 25 bp, Homo sapien
cagtgtggccggacgtcccctcaga

SEQ ID NO: 1266249 - DNA, 25 bp, Homo sapien
gtgaagtgagcacctccatgcaagc

SEQ ID NO: 1266250 - DNA, 25 bp, Homo sapien
ttgaagtcggaatctgcgatcgtaa

SEQ ID NO: 1266251 - DNA, 25 bp, Homo sapien
tgaagtcggaatctgcgatcgtaac

SEQ ID NO: 1266252 - DNA, 25 bp, Homo sapien
cgccaacgtgttttcggtattgtcg

SEQ ID NO: 1266253 - DNA, 25 bp, Homo sapien
tgtcgggataattgaaagtccagac

SEQ ID NO: 1266254 - DNA, 25 bp, Homo sapien
caggcagcggaatcccatggtggcc

SEQ ID NO: 1266255 - DNA, 25 bp, Homo sapien
atgagctcgccgaggccgtctcagg

SEQ ID NO: 1266256 - DNA, 25 bp, Homo sapien
cgggagcagctgtcggctttgcaaa

SEQ ID NO: 1266257 - DNA, 25 bp, Homo sapien
gacctcttgaaaggcagccggtcct

SEQ ID NO: 1266258 - DNA, 25 bp, Homo sapien
ggcttggctttgtcaccgggacctc

SEQ ID NO: 1266259 - DNA, 25 bp, Homo sapien
ccccaggactttccgggtggacatg

SEQ ID NO: 1266260 - DNA, 25 bp, Homo sapien
ggcccctcatgtgcttggcccctcc

SEQ ID NO: 1266261 - DNA, 25 bp, Homo sapien
tgccaccctagatgctggctactgt

SEQ ID NO: 1266262 - DNA, 25 bp, Homo sapien
tctcctgccaccctagatgctggct

SEQ ID NO: 1266263 - DNA, 25 bp, Homo sapien
ctagatgctggctactgtggcccct

SEQ ID NO: 1266264 - DNA, 25 bp, Homo sapien
gacagctgcacgctacatgtttgaa

SEQ ID NO: 1266265 - DNA, 25 bp, Homo sapien
tgcacgctacatgtttgaaagcagc

SEQ ID NO: 1266266 - DNA, 25 bp, Homo sapien
cagctgcacgctacatgtttgaaag

SEQ ID NO: 1266267 - DNA, 25 bp, Homo sapien
ggctgtctttgtacggcaggggtgg

SEQ ID NO: 1266268 - DNA, 25 bp, Homo sapien
tgggtacggcaggggtggtgctggc

SEQ ID NO: 1266269 - DNA, 25 bp, Homo sapien
ctgggtacggcaggggtggtgctgg

SEQ ID NO: 1266270 - DNA, 25 bp, Homo sapien
ggtacggcaggggtggtgctggcag

SEQ ID NO: 1266271 - DNA, 25 bp, Homo sapien
tacggcaggggtggtgctggcagct

SEQ ID NO: 1266272 - DNA, 25 bp, Homo sapien
gctggcctcagaagctgtcaccacg

SEQ ID NO: 1266273 - DNA, 25 bp, Homo sapien
cccggggctggcctcagaagctgtc

SEQ ID NO: 1266274 - DNA, 25 bp, Homo sapien
ctgtcaccacggctctgcttggctg

SEQ ID NO: 1266275 - DNA, 25 bp, Homo sapien
cattccagaatccccgtaggccccg

SEQ ID NO: 1266276 - DNA, 25 bp, Homo sapien
tggccagctccatgaagacgctcat

SEQ ID NO: 1266277 - DNA, 25 bp, Homo sapien
cctggccagctccatgaagacgctc

SEQ ID NO: 1266278 - DNA, 25 bp, Homo sapien
ctggccagctccatgaagacgctca

SEQ ID NO: 1266279 - DNA, 25 bp, Homo sapien
agccgagcggatgggcagacacact

SEQ ID NO: 1266280 - DNA, 25 bp, Homo sapien
cggtgcctggtcgtggctgggttca

SEQ ID NO: 1266281 - DNA, 25 bp, Homo sapien
tggagctcattggtcccacttctca

SEQ ID NO: 1266282 - DNA, 25 bp, Homo sapien
tcccaaccaaacacgttctgggtga

SEQ ID NO: 1266283 - DNA, 25 bp, Homo sapien
gccgttataatagacgcctctctgt

SEQ ID NO: 1266284 - DNA, 25 bp, Homo sapien
actgggatggcggactggcctgccg

SEQ ID NO: 1266285 - DNA, 25 bp, Homo sapien
gcagagacagccgttataatagacg

SEQ ID NO: 1266286 - DNA, 25 bp, Homo sapien
ataatagacgcctctctgtgcactg

SEQ ID NO: 1266287 - DNA, 25 bp, Homo sapien
ccgtgggttagacatgcgtctgtga

SEQ ID NO: 1266288 - DNA, 25 bp, Homo sapien
gatcggtggcttcataaaacgcctt

SEQ ID NO: 1266289 - DNA, 25 bp, Homo sapien
tgctgtggccgtgggttagacatgc

SEQ ID NO: 1266290 - DNA, 25 bp, Homo sapien
catgcgtctgtgatcggtggcttca

SEQ ID NO: 1266291 - DNA, 25 bp, Homo sapien
gatccgtcaggccttttgatgcctt

SEQ ID NO: 1266292 - DNA, 25 bp, Homo sapien
tggaccaggcggaagggatggtccc

SEQ ID NO: 1266293 - DNA, 25 bp, Homo sapien
cggctggccaacgagatccgtcagg

SEQ ID NO: 1266294 - DNA, 25 bp, Homo sapien
gatggtccctgtggttccccggctg

SEQ ID NO: 1266295 - DNA, 25 bp, Homo sapien
cttggagggtggcagccacctgcca

SEQ ID NO: 1266296 - DNA, 25 bp, Homo sapien
tggagggtggcagccacctgccagg

SEQ ID NO: 1266297 - DNA, 25 bp, Homo sapien
cctgccagggcccaggaaggtgctg

SEQ ID NO: 1266298 - DNA, 25 bp, Homo sapien
cagggcccaggaaggtgctgcccac

SEQ ID NO: 1266299 - DNA, 25 bp, Homo sapien
gggtctctggctactgaagtccttg

SEQ ID NO: 1266300 - DNA, 25 bp, Homo sapien
gggggtctctggctactgaagtcct

SEQ ID NO: 1266301 - DNA, 25 bp, Homo sapien
gttgggggtctctggctactgaagt

SEQ ID NO: 1266302 - DNA, 25 bp, Homo sapien
ggtctctggctactgaagtccttgt

SEQ ID NO: 1266303 - DNA, 25 bp, Homo sapien
tcccatcctcctgaatggacctggg

SEQ ID NO: 1266304 - DNA, 25 bp, Homo sapien
aggtggtggcttggccttgctccca

SEQ ID NO: 1266305 - DNA, 25 bp, Homo sapien
tgtgtggtggatcccccagcacagg

SEQ ID NO: 1266306 - DNA, 25 bp, Homo sapien
tccaggtggtggcttggccttgctc

SEQ ID NO: 1266307 - DNA, 25 bp, Homo sapien
ctctggtgacccccttcctacatgt

SEQ ID NO: 1266308 - DNA, 25 bp, Homo sapien
tggccatctctggtgacccccttcc

SEQ ID NO: 1266309 - DNA, 25 bp, Homo sapien
ccttcctacatgtgtcccccagacc

SEQ ID NO: 1266310 - DNA, 25 bp, Homo sapien
tggtgacccccttcctacatgtgtc

SEQ ID NO: 1266311 - DNA, 25 bp, Homo sapien
atgactggctctccgagggccaggt

SEQ ID NO: 1266312 - DNA, 25 bp, Homo sapien
gaatgactggctctccgagggccag

SEQ ID NO: 1266313 - DNA, 25 bp, Homo sapien
ctggaatgactggctctccgagggc

SEQ ID NO: 1266314 - DNA, 25 bp, Homo sapien
ggaatgactggctctccgagggcca

SEQ ID NO: 1266315 - DNA, 25 bp, Homo sapien
caaagctttgaccttggccagaaag

SEQ ID NO: 1266316 - DNA, 25 bp, Homo sapien
agcaaagctttgaccttggccagaa

SEQ ID NO: 1266317 - DNA, 25 bp, Homo sapien
gcaaagctttgaccttggccagaaa

SEQ ID NO: 1266318 - DNA, 25 bp, Homo sapien
cagcaaagctttgaccttggccaga

SEQ ID NO: 1266319 - DNA, 25 bp, Homo sapien
cacctgggggaagcgtcacactcac

SEQ ID NO: 1266320 - DNA, 25 bp, Homo sapien
ggacgcgtcacactcacctggggga

SEQ ID NO: 1266321 - DNA, 25 bp, Homo sapien
ctcacctgggggaagcgtcacactc

SEQ ID NO: 1266322 - DNA, 25 bp, Homo sapien
ctgggggacgcgtcacactcacctg

SEQ ID NO: 1266323 - DNA, 25 bp, Homo sapien
ccacctgggactggtgtctacctgg

SEQ ID NO: 1266324 - DNA, 25 bp, Homo sapien
tggggtctgctgtccacctggatcc

SEQ ID NO: 1266325 - DNA, 25 bp, Homo sapien
tgggccctggcgtccacctgggact

SEQ ID NO: 1266326 - DNA, 25 bp, Homo sapien
ggcctaatgtccacctgggccctgg

SEQ ID NO: 1266327 - DNA, 25 bp, Homo sapien
gagggcccagggccaccaagcaggg

SEQ ID NO: 1266328 - DNA, 25 bp, Homo sapien
gtgagggcccagggccaccaagcag

SEQ ID NO: 1266329 - DNA, 25 bp, Homo sapien
cagcggaagccactggcagtgaggg

SEQ ID NO: 1266330 - DNA, 25 bp, Homo sapien
agccactggcagtgagggcccaggg

SEQ ID NO: 1266331 - DNA, 25 bp, Homo sapien
ggggcaggaaagaccagcaggtgca

SEQ ID NO: 1266332 - DNA, 25 bp, Homo sapien
gggcaggaaagaccagcaggtgcag

SEQ ID NO: 1266333 - DNA, 25 bp, Homo sapien
ctggggcaggaaagaccagcaggtg

SEQ ID NO: 1266334 - DNA, 25 bp, Homo sapien
tggggcaggaaagaccagcaggtgc

SEQ ID NO: 1266335 - DNA, 25 bp, Homo sapien
gggcacaggctctgtcgcgtgggac

SEQ ID NO: 1266336 - DNA, 25 bp, Homo sapien
aagagggacccaagctggccgagaa

SEQ ID NO: 1266337 - DNA, 25 bp, Homo sapien
gggtgcagggtccaagctccaggat

SEQ ID NO: 1266338 - DNA, 25 bp, Homo sapien
gatccccgagattctcagtgggaag

SEQ ID NO: 1266339 - DNA, 25 bp, Homo sapien
gcccttcctgctatcgaagttgtcg

SEQ ID NO: 1266340 - DNA, 25 bp, Homo sapien
ctatcgaagttgtcgctcaggcact

SEQ ID NO: 1266341 - DNA, 25 bp, Homo sapien
tcgctcaggcacttgggagcagcct

SEQ ID NO: 1266342 - DNA, 25 bp, Homo sapien
tctgtcgcccttcctgctatcgaag

SEQ ID NO: 1266343 - DNA, 25 bp, Homo sapien
gccggtggctagcaggtccagggct

SEQ ID NO: 1266344 - DNA, 25 bp, Homo sapien
ctctaagggagccggtggctagcag

SEQ ID NO: 1266345 - DNA, 25 bp, Homo sapien
gggagccggtggctagcaggtccag

SEQ ID NO: 1266346 - DNA, 25 bp, Homo sapien
taagggagccggtggctagcaggtc

SEQ ID NO: 1266347 - DNA, 25 bp, Homo sapien
tggaaccctggcctgatcaggttga

SEQ ID NO: 1266348 - DNA, 25 bp, Homo sapien
gcctgatcaggttgatttagaccaa

SEQ ID NO: 1266349 - DNA, 25 bp, Homo sapien
ctctgctgtggcctcgctggggcaa

SEQ ID NO: 1266350 - DNA, 25 bp, Homo sapien
ggttgatttagaccaaagtctctgc

SEQ ID NO: 1266351 - DNA, 25 bp, Homo sapien
gaagcagaccctgacgagagggaca

SEQ ID NO: 1266352 - DNA, 25 bp, Homo sapien
agacctggcaggtgcggagcgggaa

SEQ ID NO: 1266353 - DNA, 25 bp, Homo sapien
agggacaccagtgcctgggtgccat

SEQ ID NO: 1266354 - DNA, 25 bp, Homo sapien
aacgcaggtgtcgtgagacctggca

SEQ ID NO: 1266355 - DNA, 25 bp, Homo sapien
agcttcctcgtcaggagcttcggga

SEQ ID NO: 1266356 - DNA, 25 bp, Homo sapien
agcttcgggagggtcaaccagcctg

SEQ ID NO: 1266357 - DNA, 25 bp, Homo sapien
cttcctcgtcaggagcttcgggagg

SEQ ID NO: 1266358 - DNA, 25 bp, Homo sapien
cgtcaggagcttcgggagggtcaac

SEQ ID NO: 1266359 - DNA, 25 bp, Homo sapien
tttcttcccagactttctggttgtg

SEQ ID NO: 1266360 - DNA, 25 bp, Homo sapien
tttctggttgtgagccccgaatggg

SEQ ID NO: 1266361 - DNA, 25 bp, Homo sapien
gagtgccaggccacgcgggcctgct

SEQ ID NO: 1266362 - DNA, 25 bp, Homo sapien
ctgcagaagagagtgccaggccacg

SEQ ID NO: 1266363 - DNA, 25 bp, Homo sapien
tgtgatccagcctcggatgacaaaa

SEQ ID NO: 1266364 - DNA, 25 bp, Homo sapien
agctgccattcctcccatgtccaca

SEQ ID NO: 1266365 - DNA, 25 bp, Homo sapien
cagcctcggatgacaaaatgacaga

SEQ ID NO: 1266366 - DNA, 25 bp, Homo sapien
tgcctgtgatccagcctcggatgac

SEQ ID NO: 1266367 - DNA, 25 bp, Homo sapien
acagatgccttgcacagcatccccc

SEQ ID NO: 1266368 - DNA, 25 bp, Homo sapien
gacccatcacccacagatgccttgc

SEQ ID NO: 1266369 - DNA, 25 bp, Homo sapien
caggcagtgagggttgagggttgag

SEQ ID NO: 1266370 - DNA, 25 bp, Homo sapien
ctgtgacagcaggccacccagggag

SEQ ID NO: 1266371 - DNA, 25 bp, Homo sapien
ggcaggcagtgagggttgagggttg

SEQ ID NO: 1266372 - DNA, 25 bp, Homo sapien
gacagcaggccacccagggagccag

SEQ ID NO: 1266373 - DNA, 25 bp, Homo sapien
caatgccgcccggtggaatgaagat

SEQ ID NO: 1266374 - DNA, 25 bp, Homo sapien
cccggtggaatgaagatgcggcccc

SEQ ID NO: 1266375 - DNA, 25 bp, Homo sapien
tattgcagtgccctggtagcgggcc

SEQ ID NO: 1266376 - DNA, 25 bp, Homo sapien
ggaccccgaccctgtgagttattgc

SEQ ID NO: 1266377 - DNA, 25 bp, Homo sapien
agctcattgatccattgatccttca

SEQ ID NO: 1266378 - DNA, 25 bp, Homo sapien
cagctcattgatccattgatccttc

SEQ ID NO: 1266379 - DNA, 25 bp, Homo sapien
gctcattgatccattgatccttcat

SEQ ID NO: 1266380 - DNA, 25 bp, Homo sapien
gcaaggcgacttgagtgagtgccat

SEQ ID NO: 1266381 - DNA, 25 bp, Homo sapien
gggcacagggcacagtagagcagca

SEQ ID NO: 1266382 - DNA, 25 bp, Homo sapien
ggcctcagctggtccgcagcgtgca

SEQ ID NO: 1266383 - DNA, 25 bp, Homo sapien
cagctggtccgcagcgtgcaaggct

SEQ ID NO: 1266384 - DNA, 25 bp, Homo sapien
agctcttcaggccatcagctctcca

SEQ ID NO: 1266385 - DNA, 25 bp, Homo sapien
cagctcttcaggccatcagctctcc

SEQ ID NO: 1266386 - DNA, 25 bp, Homo sapien
tcagctcttcaggccatcagctctc

SEQ ID NO: 1266387 - DNA, 25 bp, Homo sapien
gccagttgggttcatggcaatggat

SEQ ID NO: 1266388 - DNA, 25 bp, Homo sapien
aatggattccgcattgccctgtccc

SEQ ID NO: 1266389 - DNA, 25 bp, Homo sapien
ggttcatggcaatggattccgcatt

SEQ ID NO: 1266390 - DNA, 25 bp, Homo sapien
ggattccgcattgccctgtcccgtt

SEQ ID NO: 1266391 - DNA, 25 bp, Homo sapien
ttcagtaattcacaggcaggcctgg

SEQ ID NO: 1266392 - DNA, 25 bp, Homo sapien
tggagccctcccatgtagcgtttat

SEQ ID NO: 1266393 - DNA, 25 bp, Homo sapien
gcctggtggtcttccagtgcgtgtt

SEQ ID NO: 1266394 - DNA, 25 bp, Homo sapien
gtagcgtttatcaccctcgcaccgg

SEQ ID NO: 1266395 - DNA, 25 bp, Homo sapien
cactggaggtgtttagtgacacaag

SEQ ID NO: 1266396 - DNA, 25 bp, Homo sapien
ccggcctgccattcttaggcagtgg

SEQ ID NO: 1266397 - DNA, 25 bp, Homo sapien
gggaaagtggaagatccacatgtcc

SEQ ID NO: 1266398 - DNA, 25 bp, Homo sapien
ggtgacacttgcagaggtgccccct

SEQ ID NO: 1266399 - DNA, 25 bp, Homo sapien
gcttcccaaacactcaatgattcca

SEQ ID NO: 1266400 - DNA, 25 bp, Homo sapien
ctgcttcccaaacactcaatgattc

SEQ ID NO: 1266401 - DNA, 25 bp, Homo sapien
cgcgaccacagggtccgctttccct

SEQ ID NO: 1266402 - DNA, 25 bp, Homo sapien
ctgcgcgaccacagggtccgctttc

SEQ ID NO: 1266403 - DNA, 25 bp, Homo sapien
ctgggactgacctcccggagttggg

SEQ ID NO: 1266404 - DNA, 25 bp, Homo sapien
tctgcgaccccggtggaaatgtacc

SEQ ID NO: 1266405 - DNA, 25 bp, Homo sapien
ctagttctgcgaccccggtggaaat

SEQ ID NO: 1266406 - DNA, 25 bp, Homo sapien
gaactagttctgcgaccccggtgga

SEQ ID NO: 1266407 - DNA, 25 bp, Homo sapien
agttctgcgaccccggtggaaatgt

SEQ ID NO: 1266408 - DNA, 25 bp, Homo sapien
cccacagtaagccacgtggaacgac

SEQ ID NO: 1266409 - DNA, 25 bp, Homo sapien
tgagggcggcaaacccatgttccca

SEQ ID NO: 1266410 - DNA, 25 bp, Homo sapien
taagccacgtggaacgacgacgagg

SEQ ID NO: 1266411 - DNA, 25 bp, Homo sapien
gggtgagggcggcaaacccatgttc

SEQ ID NO: 1266412 - DNA, 25 bp, Homo sapien
tatgtgtccactccgtagctcccag

SEQ ID NO: 1266413 - DNA, 25 bp, Homo sapien
gtgtccactccgtagctcccagatc

SEQ ID NO: 1266414 - DNA, 25 bp, Homo sapien
ctatgtgtccactccgtagctccca

SEQ ID NO: 1266415 - DNA, 25 bp, Homo sapien
tgtgtccactccgtagctcccagat

SEQ ID NO: 1266416 - DNA, 25 bp, Homo sapien
ggacgtccacactcttggatgccca

SEQ ID NO: 1266417 - DNA, 25 bp, Homo sapien
tcggacgcccacattctcgggggcg

SEQ ID NO: 1266418 - DNA, 25 bp, Homo sapien
gcccacactcttggacgtccacatt

SEQ ID NO: 1266419 - DNA, 25 bp, Homo sapien
ctcttggacgtccacactcttggat

SEQ ID NO: 1266420 - DNA, 25 bp, Homo sapien
gtgccaagcacaggccgtgctgcct

SEQ ID NO: 1266421 - DNA, 25 bp, Homo sapien
cgggatgtcgtgattctttctcagt

SEQ ID NO: 1266422 - DNA, 25 bp, Homo sapien
gggcctcgggatgtcgtgattcttt

SEQ ID NO: 1266423 - DNA, 25 bp, Homo sapien
ctggatcagggtgccaagcacaggc

SEQ ID NO: 1266424 - DNA, 25 bp, Homo sapien
tccccagctccaactgcatgctggc

SEQ ID NO: 1266425 - DNA, 25 bp, Homo sapien
gctccagtgtatggggctgccgtcg

SEQ ID NO: 1266426 - DNA, 25 bp, Homo sapien
tccaactgcatgctggctccagtgt

SEQ ID NO: 1266427 - DNA, 25 bp, Homo sapien
catgctggctccagtgtatggggct

SEQ ID NO: 1266428 - DNA, 25 bp, Homo sapien
ttccagtcggccgtctcttgggagt

SEQ ID NO: 1266429 - DNA, 25 bp, Homo sapien
ggaactgggtgataaagctcgtgcc

SEQ ID NO: 1266430 - DNA, 25 bp, Homo sapien
gataaagctcgtgcctgagtaattt

SEQ ID NO: 1266431 - DNA, 25 bp, Homo sapien
tccaggttctgccaacacgttttcc

SEQ ID NO: 1266432 - DNA, 25 bp, Homo sapien
aggcccgaaggagccgcaattccag

SEQ ID NO: 1266433 - DNA, 25 bp, Homo sapien
gaaggagccgcaattccagtatttt

SEQ ID NO: 1266434 - DNA, 25 bp, Homo sapien
tcaaaactgaacgtggattcgcagg

SEQ ID NO: 1266435 - DNA, 25 bp, Homo sapien
aacgtggattcgcaggcccgaagga

SEQ ID NO: 1266436 - DNA, 25 bp, Homo sapien
gggcgtgttgggccggccatccagc

SEQ ID NO: 1266437 - DNA, 25 bp, Homo sapien
ggcgtgttgggccggccatccagcc

SEQ ID NO: 1266438 - DNA, 25 bp, Homo sapien
gtggggcgtgttgggccggccatcc

SEQ ID NO: 1266439 - DNA, 25 bp, Homo sapien
tggggcgtgttgggccggccatcca

SEQ ID NO: 1266440 - DNA, 25 bp, Homo sapien
cacgtgcacggtcatccaggacaca

SEQ ID NO: 1266441 - DNA, 25 bp, Homo sapien
ggccggcagcacgtgcacggtcatc

SEQ ID NO: 1266442 - DNA, 25 bp, Homo sapien
agggcctgcagcgggcaacggcttc

SEQ ID NO: 1266443 - DNA, 25 bp, Homo sapien
cggcagcacgtgcacggtcatccag

SEQ ID NO: 1266444 - DNA, 25 bp, Homo sapien
agaggcctggagagtaactcccaat

SEQ ID NO: 1266445 - DNA, 25 bp, Homo sapien
ggacagaactgcttacaacacccct

SEQ ID NO: 1266446 - DNA, 25 bp, Homo sapien
cattctaagtgcctgctgggacaga

SEQ ID NO: 1266447 - DNA, 25 bp, Homo sapien
cctgctgggacagaactgcttacaa

SEQ ID NO: 1266448 - DNA, 25 bp, Homo sapien
aaagcacattctaagtgcctgctgg

SEQ ID NO: 1266449 - DNA, 25 bp, Homo sapien
agggaagtgttgtcaccccagaagt

SEQ ID NO: 1266450 - DNA, 25 bp, Homo sapien
tggttttctagggtgcacgcaggct

SEQ ID NO: 1266451 - DNA, 25 bp, Homo sapien
gcttctctccactctaaagctaagt

SEQ ID NO: 1266452 - DNA, 25 bp, Homo sapien
tctaaagctaagtctctgcctcagc

SEQ ID NO: 1266453 - DNA, 25 bp, Homo sapien
tctccactctaaagctaagtctctg

SEQ ID NO: 1266454 - DNA, 25 bp, Homo sapien
cagtgattagacacaaaaactgcca

SEQ ID NO: 1266455 - DNA, 25 bp, Homo sapien
tggcttccattatggaccctcagga

SEQ ID NO: 1266456 - DNA, 25 bp, Homo sapien
ccagaagctccatctatggcagtga

SEQ ID NO: 1266457 - DNA, 25 bp, Homo sapien
accctcaggagcaggttccacgaga

SEQ ID NO: 1266458 - DNA, 25 bp, Homo sapien
ggtacaaacgctcctcccaggcagg

SEQ ID NO: 1266459 - DNA, 25 bp, Homo sapien
agggagctcggtacaaacgctcctc

SEQ ID NO: 1266460 - DNA, 25 bp, Homo sapien
gccctcgcaggtggggcaaagcttg

SEQ ID NO: 1266461 - DNA, 25 bp, Homo sapien
caaagcttggtaaagttccagcctc

SEQ ID NO: 1266462 - DNA, 25 bp, Homo sapien
agtgaaattatcagcaccccgcaag

SEQ ID NO: 1266463 - DNA, 25 bp, Homo sapien
aaagccctgtggttcgggcacgagc

SEQ ID NO: 1266464 - DNA, 25 bp, Homo sapien
taggaatgcctcgagggctgcacag

SEQ ID NO: 1266465 - DNA, 25 bp, Homo sapien
cgttgctcccagaaggtgaagtcca

SEQ ID NO: 1266466 - DNA, 25 bp, Homo sapien
tctgccagtacgtgctgatccctgt

SEQ ID NO: 1266467 - DNA, 25 bp, Homo sapien
gctttcggctttctggtaggtgtcc

SEQ ID NO: 1266468 - DNA, 25 bp, Homo sapien
gtgctgatccctgtgcgctgtggcc

SEQ ID NO: 1266469 - DNA, 25 bp, Homo sapien
gcctgtctgctagggcgcctgctat

SEQ ID NO: 1266470 - DNA, 25 bp, Homo sapien
cccagcaggcgactcctggattcac

SEQ ID NO: 1266471 - DNA, 25 bp, Homo sapien
acgtcttcctatctgggctgtctgg

SEQ ID NO: 1266472 - DNA, 25 bp, Homo sapien
gggagagagtgtccgggctggaacc

SEQ ID NO: 1266473 - DNA, 25 bp, Homo sapien
tggacctgaggcccgcagtgctctg

SEQ ID NO: 1266474 - DNA, 25 bp, Homo sapien
aggaagtggagcctggtggagacca

SEQ ID NO: 1266475 - DNA, 25 bp, Homo sapien
cctccacagcagtgaaggggcagca

SEQ ID NO: 1266476 - DNA, 25 bp, Homo sapien
agcagctgggcaggaagtggagcct

SEQ ID NO: 1266477 - DNA, 25 bp, Homo sapien
tgggcaggaagtggagcctggtgga

SEQ ID NO: 1266478 - DNA, 25 bp, Homo sapien
aatacatgaaatccttgatctgatc

SEQ ID NO: 1266479 - DNA, 25 bp, Homo sapien
tacatgaaatccttgatctgatcca

SEQ ID NO: 1266480 - DNA, 25 bp, Homo sapien
cttccagggatggtaaatacatgaa

SEQ ID NO: 1266481 - DNA, 25 bp, Homo sapien
cagggatggtaaatacatgaaatcc

SEQ ID NO: 1266482 - DNA, 25 bp, Homo sapien
gctgggcacggggggtgagggttgc

SEQ ID NO: 1266483 - DNA, 25 bp, Homo sapien
gggctatgtggctgggcacgggggg

SEQ ID NO: 1266484 - DNA, 25 bp, Homo sapien
cttgggggctatgtggctgggcacg

SEQ ID NO: 1266485 - DNA, 25 bp, Homo sapien
tgggggctatgtggctgggcacggg

SEQ ID NO: 1266486 - DNA, 25 bp, Homo sapien
cgcccttcgctgacagccacctgga

SEQ ID NO: 1266487 - DNA, 25 bp, Homo sapien
ttgtggaccacccagaaggccacgt

SEQ ID NO: 1266488 - DNA, 25 bp, Homo sapien
ccaggtggtgccgacaggggccttg

SEQ ID NO: 1266489 - DNA, 25 bp, Homo sapien
acagccgtgcttgggtccccagatc

SEQ ID NO: 1266490 - DNA, 25 bp, Homo sapien
gatattttcaaggatccgttctttc

SEQ ID NO: 1266491 - DNA, 25 bp, Homo sapien
ttcaaggatccgttctttcttggga

SEQ ID NO: 1266492 - DNA, 25 bp, Homo sapien
gatccgttctttcttgggagctctg

SEQ ID NO: 1266493 - DNA, 25 bp, Homo sapien
ttgcggatattttcaaggatccgtt

SEQ ID NO: 1266494 - DNA, 25 bp, Homo sapien
tcttcgaagaaggcacccagtgcac

SEQ ID NO: 1266495 - DNA, 25 bp, Homo sapien
ggatcttcgaagaaggcacccagtg

SEQ ID NO: 1266496 - DNA, 25 bp, Homo sapien
ttcgaagaaggcacccagtgcacat

SEQ ID NO: 1266497 - DNA, 25 bp, Homo sapien
gtggatcttcgaagaaggcacccag

SEQ ID NO: 1266498 - DNA, 25 bp, Homo sapien
acccgtgcttctcccgtccaaacat

SEQ ID NO: 1266499 - DNA, 25 bp, Homo sapien
gacacccgtgcttctcccgtccaaa

SEQ ID NO: 1266500 - DNA, 25 bp, Homo sapien
ctggggccagacacccgtgcttctc

SEQ ID NO: 1266501 - DNA, 25 bp, Homo sapien
gccagacacccgtgcttctcccgtc

SEQ ID NO: 1266502 - DNA, 25 bp, Homo sapien
gatcaaggatcactcccattcatgg

SEQ ID NO: 1266503 - DNA, 25 bp, Homo sapien
gatgcctcaggaaagacagattgaa

SEQ ID NO: 1266504 - DNA, 25 bp, Homo sapien
gttcctaaagatactgacatccaag

SEQ ID NO: 1266505 - DNA, 25 bp, Homo sapien
tcccagagctaatggacacaagttc

SEQ ID NO: 1266506 - DNA, 25 bp, Homo sapien
gaatggccatggacaagacgtagaa

SEQ ID NO: 1266507 - DNA, 25 bp, Homo sapien
gccagatgtgaggatggccatcacc

SEQ ID NO: 1266508 - DNA, 25 bp, Homo sapien
gatgggctcagattcttatcacccc

SEQ ID NO: 1266509 - DNA, 25 bp, Homo sapien
tagaaggcagtcagtccatactggc

SEQ ID NO: 1266510 - DNA, 25 bp, Homo sapien
ggccaaaccgagaaaagacagcagc

SEQ ID NO: 1266511 - DNA, 25 bp, Homo sapien
cagcaaggatgaccgaacgggtttt

SEQ ID NO: 1266512 - DNA, 25 bp, Homo sapien
gcagcaaggatgaccgaacgggttt

SEQ ID NO: 1266513 - DNA, 25 bp, Homo sapien
ctgggccaaaccgagaaaagacagc

SEQ ID NO: 1266514 - DNA, 25 bp, Homo sapien
taaaaaatccacacatgatgctggg

SEQ ID NO: 1266515 - DNA, 25 bp, Homo sapien
tcaatggctttgtttaagtgatagt

SEQ ID NO: 1266516 - DNA, 25 bp, Homo sapien
atgatgctggggtttcaatggcttt

SEQ ID NO: 1266517 - DNA, 25 bp, Homo sapien
caatggctttgtttaagtgatagtt

SEQ ID NO: 1266518 - DNA, 25 bp, Homo sapien
ttggagcgatgataaacagctccag

SEQ ID NO: 1266519 - DNA, 25 bp, Homo sapien
ttagtgaaagttggagcgatgataa

SEQ ID NO: 1266520 - DNA, 25 bp, Homo sapien
gtgaaagttggagcgatgataaaca

SEQ ID NO: 1266521 - DNA, 25 bp, Homo sapien
aagttggagcgatgataaacagctc

SEQ ID NO: 1266522 - DNA, 25 bp, Homo sapien
gacactcagcacgacttgcttggcg

SEQ ID NO: 1266523 - DNA, 25 bp, Homo sapien
tggtccaggcttagtgcacacttaa

SEQ ID NO: 1266524 - DNA, 25 bp, Homo sapien
acgtgccacgaacaattacctgctg

SEQ ID NO: 1266525 - DNA, 25 bp, Homo sapien
tattggaaccactatgtcccatgtg

SEQ ID NO: 1266526 - DNA, 25 bp, Homo sapien
gtgagaggcgactcaggaaatacag

SEQ ID NO: 1266527 - DNA, 25 bp, Homo sapien
agtgagaggcgactcaggaaataca

SEQ ID NO: 1266528 - DNA, 25 bp, Homo sapien
caaaaaagtgtattggtcattgcca

SEQ ID NO: 1266529 - DNA, 25 bp, Homo sapien
gagcgccatccctgcagtgtaagtc

SEQ ID NO: 1266530 - DNA, 25 bp, Homo sapien
gctttcgtggtgctcacactcccag

SEQ ID NO: 1266531 - DNA, 25 bp, Homo sapien
tagtggggctttcgtggtgctcaca

SEQ ID NO: 1266532 - DNA, 25 bp, Homo sapien
tggcctaggttgctcaagcctctga

SEQ ID NO: 1266533 - DNA, 25 bp, Homo sapien
ggttgctcaagcctctgagcatcag

SEQ ID NO: 1266534 - DNA, 25 bp, Homo sapien
tgcctctaaggacaggtcctggcct

SEQ ID NO: 1266535 - DNA, 25 bp, Homo sapien
gtcctggcctaggttgctcaagcct

SEQ ID NO: 1266536 - DNA, 25 bp, Homo sapien
tcgtcacatggtgctagcattggct

SEQ ID NO: 1266537 - DNA, 25 bp, Homo sapien
cggccctctgagacctgatggatta

SEQ ID NO: 1266538 - DNA, 25 bp, Homo sapien
tagaactctcgctctgccatggtcc

SEQ ID NO: 1266539 - DNA, 25 bp, Homo sapien
ttactgaacataggacggccctctg

SEQ ID NO: 1266540 - DNA, 25 bp, Homo sapien
ctggagcttcgggtaaaatgccttg

SEQ ID NO: 1266541 - DNA, 25 bp, Homo sapien
ccaggtgctggagcttcgggtaaaa

SEQ ID NO: 1266542 - DNA, 25 bp, Homo sapien
gtgctggagcttcgggtaaaatgcc

SEQ ID NO: 1266543 - DNA, 25 bp, Homo sapien
gagcttcgggtaaaatgccttggaa

SEQ ID NO: 1266544 - DNA, 25 bp, Homo sapien
aggagcacggagccttgcagcgcct

SEQ ID NO: 1266545 - DNA, 25 bp, Homo sapien
ggagcacggagccttgcagcgcctc

SEQ ID NO: 1266546 - DNA, 25 bp, Homo sapien
caggagcacggagccttgcagcgcc

SEQ ID NO: 1266547 - DNA, 25 bp, Homo sapien
ggcagggcttgactgggagctaggg

SEQ ID NO: 1266548 - DNA, 25 bp, Homo sapien
tggatgagtggagcaggtggctcct

SEQ ID NO: 1266549 - DNA, 25 bp, Homo sapien
gcccctgagccagttaaggcctttg

SEQ ID NO: 1266550 - DNA, 25 bp, Homo sapien
tctccacccgactggcagcaccagg

SEQ ID NO: 1266551 - DNA, 25 bp, Homo sapien
tgccgccaccgttctaccttgggaa

SEQ ID NO: 1266552 - DNA, 25 bp, Homo sapien
caagccactcatcggggtgcagctg

SEQ ID NO: 1266553 - DNA, 25 bp, Homo sapien
gggagtagtgctgggttctgggaga

SEQ ID NO: 1266554 - DNA, 25 bp, Homo sapien
gggaaattggactcccaggaagctg

SEQ ID NO: 1266555 - DNA, 25 bp, Homo sapien
tgagcttgagttcctcctgtctccc

SEQ ID NO: 1266556 - DNA, 25 bp, Homo sapien
cagctgtctatgggccctggggtcc

SEQ ID NO: 1266557 - DNA, 25 bp, Homo sapien
gggtcccagcactgaagggtggaga

SEQ ID NO: 1266558 - DNA, 25 bp, Homo sapien
gaagctgagcttgagttcctcctgt

SEQ ID NO: 1266559 - DNA, 25 bp, Homo sapien
gtttcacctcagtagaagccctccc

SEQ ID NO: 1266560 - DNA, 25 bp, Homo sapien
tcttcccttgtgcagcctacgggag

SEQ ID NO: 1266561 - DNA, 25 bp, Homo sapien
gcagggggcactattctgcacacag

SEQ ID NO: 1266562 - DNA, 25 bp, Homo sapien
cacctaggtcctcaaagaggtgacc

SEQ ID NO: 1266563 - DNA, 25 bp, Homo sapien
caaaagacctacgtcctcggaagtg

SEQ ID NO: 1266564 - DNA, 25 bp, Homo sapien
aatggtagtttgtgccggatcccga

SEQ ID NO: 1266565 - DNA, 25 bp, Homo sapien
tcatctcaggttcgagtctgcgcga

SEQ ID NO: 1266566 - DNA, 25 bp, Homo sapien
aagcaaagctcgcagggatagaccc

SEQ ID NO: 1266567 - DNA, 25 bp, Homo sapien
ttttgaagctaagagggccggcagt

SEQ ID NO: 1266568 - DNA, 25 bp, Homo sapien
gattccgggaactggcttggtgacc

SEQ ID NO: 1266569 - DNA, 25 bp, Homo sapien
tgcaagccgagtctggattccggcg

SEQ ID NO: 1266570 - DNA, 25 bp, Homo sapien
attccggcgcgagccgattccggga

SEQ ID NO: 1266571 - DNA, 25 bp, Homo sapien
cccggaaggctacgaggctcgccat

SEQ ID NO: 1266572 - DNA, 25 bp, Homo sapien
gggcccggaaggctacgaggctcgc

SEQ ID NO: 1266573 - DNA, 25 bp, Homo sapien
tggcgactcccggaatgtggccgcc

SEQ ID NO: 1266574 - DNA, 25 bp, Homo sapien
ctggcgactcccggaatgtggccgc

SEQ ID NO: 1266575 - DNA, 25 bp, Homo sapien
caggcaacagcattcgttggcggat

SEQ ID NO: 1266576 - DNA, 25 bp, Homo sapien
ctgaaggtcataggcagcgcatcca

SEQ ID NO: 1266577 - DNA, 25 bp, Homo sapien
tacgcaagcagcgttctggagcgtc

SEQ ID NO: 1266578 - DNA, 25 bp, Homo sapien
aacgaagttgctcccggtgtgcgca

SEQ ID NO: 1266579 - DNA, 25 bp, Homo sapien
gggagctccccgttgcagacaccca

SEQ ID NO: 1266580 - DNA, 25 bp, Homo sapien
gtaggagtcgttgggggcttcctgc

SEQ ID NO: 1266581 - DNA, 25 bp, Homo sapien
tatgggccgcacacgagtaggagtc

SEQ ID NO: 1266582 - DNA, 25 bp, Homo sapien
ccgttgcagacacccagcggctcgg

SEQ ID NO: 1266583 - DNA, 25 bp, Homo sapien
ttctcagtgagcccggttgggcctg

SEQ ID NO: 1266584 - DNA, 25 bp, Homo sapien
tcctgggcccaacgggaggagatca

SEQ ID NO: 1266585 - DNA, 25 bp, Homo sapien
ggagatcaagggagttcaggttcac

SEQ ID NO: 1266586 - DNA, 25 bp, Homo sapien
gcccggttgggcctggattcggctc

SEQ ID NO: 1266587 - DNA, 25 bp, Homo sapien
cagatactcccgacatctgcgcagg

SEQ ID NO: 1266588 - DNA, 25 bp, Homo sapien
gtgcccatggggcatccagatactc

SEQ ID NO: 1266589 - DNA, 25 bp, Homo sapien
ctcccgacatctgcgcaggagagct

SEQ ID NO: 1266590 - DNA, 25 bp, Homo sapien
gatactcccgacatctgcgcaggag

SEQ ID NO: 1266591 - DNA, 25 bp, Homo sapien
ctccactggggtggccacggcatcg

SEQ ID NO: 1266592 - DNA, 25 bp, Homo sapien
ggcatcgtgcaagccggtccccgga

SEQ ID NO: 1266593 - DNA, 25 bp, Homo sapien
gggacgccaggacacaaagccgggc

SEQ ID NO: 1266594 - DNA, 25 bp, Homo sapien
tcgtgcaagccggtccccggaagct

SEQ ID NO: 1266595 - DNA, 25 bp, Homo sapien
cacacatctggggtttgttcgaaat

SEQ ID NO: 1266596 - DNA, 25 bp, Homo sapien
ctgcaagggacaaggaccctcttgc

SEQ ID NO: 1266597 - DNA, 25 bp, Homo sapien
caaggaccctcttgcaatcaaaata

SEQ ID NO: 1266598 - DNA, 25 bp, Homo sapien
gcaatcaaaataagtcagtttccac

SEQ ID NO: 1266599 - DNA, 25 bp, Homo sapien
caggcctcgggtgagaagaaggttc

SEQ ID NO: 1266600 - DNA, 25 bp, Homo sapien
tgggccacaactgggacctgtgtcc

SEQ ID NO: 1266601 - DNA, 25 bp, Homo sapien
cccgaaatattgaccccagggtctg

SEQ ID NO: 1266602 - DNA, 25 bp, Homo sapien
cagtgcagggaatggaaccttgcca

SEQ ID NO: 1266603 - DNA, 25 bp, Homo sapien
gcttctttgctacccggaggaacaa

SEQ ID NO: 1266604 - DNA, 25 bp, Homo sapien
cttctttgctacccggaggaacaag

SEQ ID NO: 1266605 - DNA, 25 bp, Homo sapien
gtgcttctttgctacccggaggaac

SEQ ID NO: 1266606 - DNA, 25 bp, Homo sapien
gtgtgcttctttgctacccggagga

SEQ ID NO: 1266607 - DNA, 25 bp, Homo sapien
ctggtgaggtgagtccatcttgcca

SEQ ID NO: 1266608 - DNA, 25 bp, Homo sapien
gaggtgagtccatcttgccaggtgc

SEQ ID NO: 1266609 - DNA, 25 bp, Homo sapien
tggtgaggtgagtccatcttgccag

SEQ ID NO: 1266610 - DNA, 25 bp, Homo sapien
gtgaggtgagtccatcttgccaggt

SEQ ID NO: 1266611 - DNA, 25 bp, Homo sapien
tgtcctgcacacacggcccgaagca

SEQ ID NO: 1266612 - DNA, 25 bp, Homo sapien
gtcctgcacacacggcccgaagcag

SEQ ID NO: 1266613 - DNA, 25 bp, Homo sapien
ctgtcctgcacacacggcccgaagc

SEQ ID NO: 1266614 - DNA, 25 bp, Homo sapien
cctgcacacacggcccgaagcaggg

SEQ ID NO: 1266615 - DNA, 25 bp, Homo sapien
ggggtaggggcagctggggctgctc

SEQ ID NO: 1266616 - DNA, 25 bp, Homo sapien
gtaggggcagctggggctgctctga

SEQ ID NO: 1266617 - DNA, 25 bp, Homo sapien
ggtaggggcagctggggctgctctg

SEQ ID NO: 1266618 - DNA, 25 bp, Homo sapien
aggggcagctggggctgctctgacc

SEQ ID NO: 1266619 - DNA, 25 bp, Homo sapien
tagcggccagtgagcgcttcctcca

SEQ ID NO: 1266620 - DNA, 25 bp, Homo sapien
gggcggcgagctggctgcaagactg

SEQ ID NO: 1266621 - DNA, 25 bp, Homo sapien
agcggccagtgagcgcttcctccat

SEQ ID NO: 1266622 - DNA, 25 bp, Homo sapien
ggcgagctggctgcaagactgggca

SEQ ID NO: 1266623 - DNA, 25 bp, Homo sapien
cttgggagccgaatctgggttcgaa

SEQ ID NO: 1266624 - DNA, 25 bp, Homo sapien
ttgggagccgaatctgggttcgaat

SEQ ID NO: 1266625 - DNA, 25 bp, Homo sapien
ggaagcggtgccgaccgcggaggat

SEQ ID NO: 1266626 - DNA, 25 bp, Homo sapien
ctgagcagggaagcggtgccgaccg

SEQ ID NO: 1266627 - DNA, 25 bp, Homo sapien
cgaccgcggaggatccaaggcagaa

SEQ ID NO: 1266628 - DNA, 25 bp, Homo sapien
tgcccaacccggctccgctgggctt

SEQ ID NO: 1266629 - DNA, 25 bp, Homo sapien
gagccgccacaggtcttattacaca

SEQ ID NO: 1266630 - DNA, 25 bp, Homo sapien
gatactcagatgagaaatccgcact

SEQ ID NO: 1266631 - DNA, 25 bp, Homo sapien
ttgccgggcaggacttcggtgctcc

SEQ ID NO: 1266632 - DNA, 25 bp, Homo sapien
tcacctcctttaacgcggaggcgcg

SEQ ID NO: 1266633 - DNA, 25 bp, Homo sapien
ctgtccccccgtgcgaggcgtgttg

SEQ ID NO: 1266634 - DNA, 25 bp, Homo sapien
gtggcctcgcgagggaccgagggcg

SEQ ID NO: 1266635 - DNA, 25 bp, Homo sapien
agagcgcgggcggagaggtgcgggc

SEQ ID NO: 1266636 - DNA, 25 bp, Homo sapien
gaccagccgaggacgcctggtgttt

SEQ ID NO: 1266637 - DNA, 25 bp, Homo sapien
ggactcgcgtccgaactatcggcgc

SEQ ID NO: 1266638 - DNA, 25 bp, Homo sapien
gcagtaaaacggagcaaaaccagcc

SEQ ID NO: 1266639 - DNA, 25 bp, Homo sapien
caaggaagtcgtgtggaaaaccgca

SEQ ID NO: 1266640 - DNA, 25 bp, Homo sapien
tgtgccccgagatccaaggaagtcg

SEQ ID NO: 1266641 - DNA, 25 bp, Homo sapien
ggcgggagcgccgaacacggaatgt

SEQ ID NO: 1266642 - DNA, 25 bp, Homo sapien
gcgggagcgccgaacacggaatgtt

SEQ ID NO: 1266643 - DNA, 25 bp, Homo sapien
cgggagcgccgaacacggaatgttt

SEQ ID NO: 1266644 - DNA, 25 bp, Homo sapien
cgggcgggagcgccgaacacggaat

SEQ ID NO: 1266645 - DNA, 25 bp, Homo sapien
ttctgtgtgtgcaccgcgggcctgc

SEQ ID NO: 1266646 - DNA, 25 bp, Homo sapien
cgggcctgctcagagtcgggaccac

SEQ ID NO: 1266647 - DNA, 25 bp, Homo sapien
ttcgggttcggttctgtgtgtgcac

SEQ ID NO: 1266648 - DNA, 25 bp, Homo sapien
tggtgcgaacaagaccgggcgtttc

SEQ ID NO: 1266649 - DNA, 25 bp, Homo sapien
gaaacttccgagaggccccagctct

SEQ ID NO: 1266650 - DNA, 25 bp, Homo sapien
cgcgcggccctggaaacttccgaga

SEQ ID NO: 1266651 - DNA, 25 bp, Homo sapien
gcggccctggaaacttccgagaggc

SEQ ID NO: 1266652 - DNA, 25 bp, Homo sapien
ctggaaacttccgagaggccccagc

SEQ ID NO: 1266653 - DNA, 25 bp, Homo sapien
gagcgccgagcgctggcttcctttt

SEQ ID NO: 1266654 - DNA, 25 bp, Homo sapien
agcgccgagcgctggcttccttttc

SEQ ID NO: 1266655 - DNA, 25 bp, Homo sapien
ggagcgccgagcgctggcttccttt

SEQ ID NO: 1266656 - DNA, 25 bp, Homo sapien
cagcgccaggacgtccggcgggaat

SEQ ID NO: 1266657 - DNA, 25 bp, Homo sapien
tcttgccccgcttcggacgaaaaca

SEQ ID NO: 1266658 - DNA, 25 bp, Homo sapien
tccggcgggaatccagcgtcttgcc

SEQ ID NO: 1266659 - DNA, 25 bp, Homo sapien
cccgcttcggacgaaaacacagagg

SEQ ID NO: 1266660 - DNA, 25 bp, Homo sapien
gccaaccaccagacgcccactcggg

SEQ ID NO: 1266661 - DNA, 25 bp, Homo sapien
cactcggggggtcctccttgtcctg

SEQ ID NO: 1266662 - DNA, 25 bp, Homo sapien
tgcctggctcgccaaccaccagacg

SEQ ID NO: 1266663 - DNA, 25 bp, Homo sapien
agcggctcttccagagcaggtgcca

SEQ ID NO: 1266664 - DNA, 25 bp, Homo sapien
tggccccgaggcttcctcggctccc

SEQ ID NO: 1266665 - DNA, 25 bp, Homo sapien
ccccgaggcttcctcggctcccaag

SEQ ID NO: 1266666 - DNA, 25 bp, Homo sapien
tcctgtaggcagtgcgcagggcagg

SEQ ID NO: 1266667 - DNA, 25 bp, Homo sapien
cctgtaggcagtgcgcagggcaggg

SEQ ID NO: 1266668 - DNA, 25 bp, Homo sapien
tctgttccgaggaacatgttgggcg

SEQ ID NO: 1266669 - DNA, 25 bp, Homo sapien
gaggaacatgttgggcggtttcttc

SEQ ID NO: 1266670 - DNA, 25 bp, Homo sapien
tgctcctggatttctgttccgagga

SEQ ID NO: 1266671 - DNA, 25 bp, Homo sapien
tcttccgggccggggaaatctgagc

SEQ ID NO: 1266672 - DNA, 25 bp, Homo sapien
tgcttggcatcacctacagggatgg

SEQ ID NO: 1266673 - DNA, 25 bp, Homo sapien
tggcatcacctacagggatggcggc

SEQ ID NO: 1266674 - DNA, 25 bp, Homo sapien
actgcttggcatcacctacagggat

SEQ ID NO: 1266675 - DNA, 25 bp, Homo sapien
atcacctacagggatggcggcggcc

SEQ ID NO: 1266676 - DNA, 25 bp, Homo sapien
aggcaccctgttgccgcagcaagga

SEQ ID NO: 1266677 - DNA, 25 bp, Homo sapien
gaggcaccctgttgccgcagcaagg

SEQ ID NO: 1266678 - DNA, 25 bp, Homo sapien
gggctggaggcaccctgttgccgca

SEQ ID NO: 1266679 - DNA, 25 bp, Homo sapien
ggaggcaccctgttgccgcagcaag

SEQ ID NO: 1266680 - DNA, 25 bp, Homo sapien
gactttgaacttggctgcaccacgg

SEQ ID NO: 1266681 - DNA, 25 bp, Homo sapien
ccctgaagcccatgccaggcatctg

SEQ ID NO: 1266682 - DNA, 25 bp, Homo sapien
ctttgaacttggctgcaccacggcc

SEQ ID NO: 1266683 - DNA, 25 bp, Homo sapien
tgaacttggctgcaccacggcctga

SEQ ID NO: 1266684 - DNA, 25 bp, Homo sapien
aggcaggaccctcaggctccgagcc

SEQ ID NO: 1266685 - DNA, 25 bp, Homo sapien
aggcctggatgtccttgtgtgtgat

SEQ ID NO: 1266686 - DNA, 25 bp, Homo sapien
cctcaggctccgagccgaaagcaga

SEQ ID NO: 1266687 - DNA, 25 bp, Homo sapien
tccgagccgaaagcagaatctccag

SEQ ID NO: 1266688 - DNA, 25 bp, Homo sapien
ccttcactgagcacccatccttcca

SEQ ID NO: 1266689 - DNA, 25 bp, Homo sapien
gccttcactgagcacccatccttcc

SEQ ID NO: 1266690 - DNA, 25 bp, Homo sapien
ttcactgagcacccatccttccagc

SEQ ID NO: 1266691 - DNA, 25 bp, Homo sapien
cttcactgagcacccatccttccag

SEQ ID NO: 1266692 - DNA, 25 bp, Homo sapien
accaggctcagagagcaccacgact

SEQ ID NO: 1266693 - DNA, 25 bp, Homo sapien
tagacatggacaccaggctcagaga

SEQ ID NO: 1266694 - DNA, 25 bp, Homo sapien
caggtggtgggtgacgtggtatggc

SEQ ID NO: 1266695 - DNA, 25 bp, Homo sapien
agagcaccacgactgtgcctggggc

SEQ ID NO: 1266696 - DNA, 25 bp, Homo sapien
ccaaccgccagtccaaaccatgctg

SEQ ID NO: 1266697 - DNA, 25 bp, Homo sapien
gctcagtgcgtgaaaagccaggctg

SEQ ID NO: 1266698 - DNA, 25 bp, Homo sapien
tgtccagggaggtagccgagaagag

SEQ ID NO: 1266699 - DNA, 25 bp, Homo sapien
ctggcacttggtgaccaggcctcag

SEQ ID NO: 1266700 - DNA, 25 bp, Homo sapien
cccgttgagtggctgagcggcctca

SEQ ID NO: 1266701 - DNA, 25 bp, Homo sapien
gtgcccgttgagtggctgagcggcc

SEQ ID NO: 1266702 - DNA, 25 bp, Homo sapien
agtgcccgttgagtggctgagcggc

SEQ ID NO: 1266703 - DNA, 25 bp, Homo sapien
tgcccgttgagtggctgagcggcct

SEQ ID NO: 1266704 - DNA, 25 bp, Homo sapien
cgctgtaggctggggccacccacca

SEQ ID NO: 1266705 - DNA, 25 bp, Homo sapien
ctgtaggctggggccacccaccagg

SEQ ID NO: 1266706 - DNA, 25 bp, Homo sapien
ctggggccacccaccaggccgccat

SEQ ID NO: 1266707 - DNA, 25 bp, Homo sapien
ggctggggccacccaccaggccgcc

SEQ ID NO: 1266708 - DNA, 25 bp, Homo sapien
gagctcagccgtgtttgctgtcggt

SEQ ID NO: 1266709 - DNA, 25 bp, Homo sapien
cggccaagggtgcaggtccctgcac

SEQ ID NO: 1266710 - DNA, 25 bp, Homo sapien
catttgtaacgagtttggtctgcgc

SEQ ID NO: 1266711 - DNA, 25 bp, Homo sapien
gtcacggcaggttgggccatttgta

SEQ ID NO: 1266712 - DNA, 25 bp, Homo sapien
tgcagaggcccggcctgaatctctg

SEQ ID NO: 1266713 - DNA, 25 bp, Homo sapien
tgcccaggacagtaggacgagggtt

SEQ ID NO: 1266714 - DNA, 25 bp, Homo sapien
ccggtttgcctagggtgagtgtgaa

SEQ ID NO: 1266715 - DNA, 25 bp, Homo sapien
tctctgagcgagaggccggtttgcc

SEQ ID NO: 1266716 - DNA, 25 bp, Homo sapien
tgtgatgacagacccgtgatctctc

SEQ ID NO: 1266717 - DNA, 25 bp, Homo sapien
cattctgagtgttcggaaattgaag

SEQ ID NO: 1266718 - DNA, 25 bp, Homo sapien
gtctggttccgtacccatgccctgt

SEQ ID NO: 1266719 - DNA, 25 bp, Homo sapien
gaaattgaagactagatctgggtct

SEQ ID NO: 1266720 - DNA, 25 bp, Homo sapien
aacccagagggtgatcggccacggt

SEQ ID NO: 1266721 - DNA, 25 bp, Homo sapien
cgaggactctcactcgggaacccag

SEQ ID NO: 1266722 - DNA, 25 bp, Homo sapien
ctctcactcgggaacccagagggtg

SEQ ID NO: 1266723 - DNA, 25 bp, Homo sapien
catgagggccgaggactctcactcg

SEQ ID NO: 1266724 - DNA, 25 bp, Homo sapien
ccttactggaatccttgggcgtagc

SEQ ID NO: 1266725 - DNA, 25 bp, Homo sapien
caatggctctggttcccttactgga

SEQ ID NO: 1266726 - DNA, 25 bp, Homo sapien
gctgttttccggtggtggcaacgct

SEQ ID NO: 1266727 - DNA, 25 bp, Homo sapien
cggtggtggcaacgctccaatggct

SEQ ID NO: 1266728 - DNA, 25 bp, Homo sapien
gggtgcgcagccgtggccggcagcc

SEQ ID NO: 1266729 - DNA, 25 bp, Homo sapien
gcgcagccgtggccggcagccttgg

SEQ ID NO: 1266730 - DNA, 25 bp, Homo sapien
agccgtggccggcagccttggtttc

SEQ ID NO: 1266731 - DNA, 25 bp, Homo sapien
ccgtggccggcagccttggtttctt

SEQ ID NO: 1266732 - DNA, 25 bp, Homo sapien
cactggctgaaccacaggggtgtcg

SEQ ID NO: 1266733 - DNA, 25 bp, Homo sapien
aacactggctgaaccacaggggtgt

SEQ ID NO: 1266734 - DNA, 25 bp, Homo sapien
aaccacaggggtgtcgtccagggct

SEQ ID NO: 1266735 - DNA, 25 bp, Homo sapien
ggctgaaccacaggggtgtcgtcca

SEQ ID NO: 1266736 - DNA, 25 bp, Homo sapien
ccagaccctgtacggagcagaaatc

SEQ ID NO: 1266737 - DNA, 25 bp, Homo sapien
tgcccagaccctgtacggagcagaa

SEQ ID NO: 1266738 - DNA, 25 bp, Homo sapien
ccgcagttacgtgggagagcccaag

SEQ ID NO: 1266739 - DNA, 25 bp, Homo sapien
ccaggtcctccgcagttacgtggga

SEQ ID NO: 1266740 - DNA, 25 bp, Homo sapien
ccgactgccagaggggttcctagga

SEQ ID NO: 1266741 - DNA, 25 bp, Homo sapien
ccgggcaggcgatgtggaccgtggg

SEQ ID NO: 1266742 - DNA, 25 bp, Homo sapien
ccagccagacctggaggccgactgc

SEQ ID NO: 1266743 - DNA, 25 bp, Homo sapien
ccccgggcaggcgatgtggaccgtg

SEQ ID NO: 1266744 - DNA, 25 bp, Homo sapien
gggaggccaggataaggagcaaagg

SEQ ID NO: 1266745 - DNA, 25 bp, Homo sapien
aggccaggataaggagcaaaggcag

SEQ ID NO: 1266746 - DNA, 25 bp, Homo sapien
ctggggaggccaggataaggagcaa

SEQ ID NO: 1266747 - DNA, 25 bp, Homo sapien
gaggccaggataaggagcaaaggca

SEQ ID NO: 1266748 - DNA, 25 bp, Homo sapien
tgcgctttctgtaactcgccgcctt

SEQ ID NO: 1266749 - DNA, 25 bp, Homo sapien
ttcttaattttcaagagcccattac

SEQ ID NO: 1266750 - DNA, 25 bp, Homo sapien
agctctgcgctttctgtaactcgcc

SEQ ID NO: 1266751 - DNA, 25 bp, Homo sapien
cattacagacggatgtcacctccat

SEQ ID NO: 1266752 - DNA, 25 bp, Homo sapien
tgcatggtgataagctgaggcatcc

SEQ ID NO: 1266753 - DNA, 25 bp, Homo sapien
ggttcctatcaaaatggctttcgct

SEQ ID NO: 1266754 - DNA, 25 bp, Homo sapien
gacagttctagcaaccatgagcaaa

SEQ ID NO: 1266755 - DNA, 25 bp, Homo sapien
cattggaaaagcgagggttggtcac

SEQ ID NO: 1266756 - DNA, 25 bp, Homo sapien
gcagagggagctcttcaactgctcc

SEQ ID NO: 1266757 - DNA, 25 bp, Homo sapien
atgggcagttcctcaccctgagtcc

SEQ ID NO: 1266758 - DNA, 25 bp, Homo sapien
catgggcagttcctcaccctgagtc

SEQ ID NO: 1266759 - DNA, 25 bp, Homo sapien
cactgcaccacgttttgaagaagtt

SEQ ID NO: 1266760 - DNA, 25 bp, Homo sapien
actgccagactgagtggtccacacc

SEQ ID NO: 1266761 - DNA, 25 bp, Homo sapien
agaagttcaaacagcgtccgtgcag

SEQ ID NO: 1266762 - DNA, 25 bp, Homo sapien
ttctgccgtgcctctgactgggtgg

SEQ ID NO: 1266763 - DNA, 25 bp, Homo sapien
tggtcagatgcctgggagactcagg

SEQ ID NO: 1266764 - DNA, 25 bp, Homo sapien
cccatctgatttctacagaaagcca

SEQ ID NO: 1266765 - DNA, 25 bp, Homo sapien
tccactccgttttgcagaggttaat

SEQ ID NO: 1266766 - DNA, 25 bp, Homo sapien
ggccgtgccattgcttgcagtccca

SEQ ID NO: 1266767 - DNA, 25 bp, Homo sapien
cagaaagccacgtggaagttgtcca

SEQ ID NO: 1266768 - DNA, 25 bp, Homo sapien
tgaacccgagtcagcccagtcggcc

SEQ ID NO: 1266769 - DNA, 25 bp, Homo sapien
cttggcttcgggctggactggccat

SEQ ID NO: 1266770 - DNA, 25 bp, Homo sapien
ccttggcttcgggctggactggcca

SEQ ID NO: 1266771 - DNA, 25 bp, Homo sapien
cagtgaacccgagtcagcccagtcg

SEQ ID NO: 1266772 - DNA, 25 bp, Homo sapien
ccttggccccagattgatagcaggc

SEQ ID NO: 1266773 - DNA, 25 bp, Homo sapien
taataacgaatcacgtgccccttgg

SEQ ID NO: 1266774 - DNA, 25 bp, Homo sapien
caatatctgtgggttgccgtggttc

SEQ ID NO: 1266775 - DNA, 25 bp, Homo sapien
gaatgccatcgcgaataatgccaag

SEQ ID NO: 1266776 - DNA, 25 bp, Homo sapien
cacactgtgcttttgggtgttcccc

SEQ ID NO: 1266777 - DNA, 25 bp, Homo sapien
gtaaaccattgccatgggatacggg

SEQ ID NO: 1266778 - DNA, 25 bp, Homo sapien
taggaacgtccacgtgcagatggag

SEQ ID NO: 1266779 - DNA, 25 bp, Homo sapien
tgcggcacggtgtcagttcctcaaa

SEQ ID NO: 1266780 - DNA, 25 bp, Homo sapien
gccccgttagggacgcaatgaggac

SEQ ID NO: 1266781 - DNA, 25 bp, Homo sapien
tgggccccgttagggacgcaatgag

SEQ ID NO: 1266782 - DNA, 25 bp, Homo sapien
ccgttagggacgcaatgaggacccg

SEQ ID NO: 1266783 - DNA, 25 bp, Homo sapien
cgttagggacgcaatgaggacccgt

SEQ ID NO: 1266784 - DNA, 25 bp, Homo sapien
ccgctaaccaatgaacgttcgctga

SEQ ID NO: 1266785 - DNA, 25 bp, Homo sapien
aaccaatgaacgttcgctgacttca

SEQ ID NO: 1266786 - DNA, 25 bp, Homo sapien
ggcccgctaaccaatgaacgttcgc

SEQ ID NO: 1266787 - DNA, 25 bp, Homo sapien
gctaaccaatgaacgttcgctgact

SEQ ID NO: 1266788 - DNA, 25 bp, Homo sapien
cagctccccatagtggtggcccagc

SEQ ID NO: 1266789 - DNA, 25 bp, Homo sapien
agctccccatagtggtggcccagcc

SEQ ID NO: 1266790 - DNA, 25 bp, Homo sapien
ggtgctcccagctgacggaggccag

SEQ ID NO: 1266791 - DNA, 25 bp, Homo sapien
ctgtgtatccagactccgcctgggc

SEQ ID NO: 1266792 - DNA, 25 bp, Homo sapien
tgtgtatccagactccgcctgggcc

SEQ ID NO: 1266793 - DNA, 25 bp, Homo sapien
gggtgctcccagctgacggaggcca

SEQ ID NO: 1266794 - DNA, 25 bp, Homo sapien
aacaggctcactctaggtagttcca

SEQ ID NO: 1266795 - DNA, 25 bp, Homo sapien
tgggccaacaggctcactctaggta

SEQ ID NO: 1266796 - DNA, 25 bp, Homo sapien
caggccatgggccaacaggctcact

SEQ ID NO: 1266797 - DNA, 25 bp, Homo sapien
aggccatgggccaacaggctcactc

SEQ ID NO: 1266798 - DNA, 25 bp, Homo sapien
ccctgcgttacccttgtcttcctct

SEQ ID NO: 1266799 - DNA, 25 bp, Homo sapien
cttcagagctgctcggtgtaatgga

SEQ ID NO: 1266800 - DNA, 25 bp, Homo sapien
agcaggcacccctgcgttacccttg

SEQ ID NO: 1266801 - DNA, 25 bp, Homo sapien
cagagctgctcggtgtaatggattt

SEQ ID NO: 1266802 - DNA, 25 bp, Homo sapien
tcataatccaggaccatttgcaaat

SEQ ID NO: 1266803 - DNA, 25 bp, Homo sapien
accatttgcaaattcatcaccgata

SEQ ID NO: 1266804 - DNA, 25 bp, Homo sapien
ataatccaggaccatttgcaaattc

SEQ ID NO: 1266805 - DNA, 25 bp, Homo sapien
catttgcaaattcatcaccgatatt

SEQ ID NO: 1266806 - DNA, 25 bp, Homo sapien
tgagtgttaattgtgatcggtttga

SEQ ID NO: 1266807 - DNA, 25 bp, Homo sapien
acgcgtttgatggtggccactttga

SEQ ID NO: 1266808 - DNA, 25 bp, Homo sapien
ttgtgatcggtttgattttaggtga

SEQ ID NO: 1266809 - DNA, 25 bp, Homo sapien
tgagccgtgatagaatgagggtccc

SEQ ID NO: 1266810 - DNA, 25 bp, Homo sapien
tgcccggctcaagcagtggccacag

SEQ ID NO: 1266811 - DNA, 25 bp, Homo sapien
agcagtggccacagctcaaagccag

SEQ ID NO: 1266812 - DNA, 25 bp, Homo sapien
gtggccacagctcaaagccagagtc

SEQ ID NO: 1266813 - DNA, 25 bp, Homo sapien
agcccctgcccggctcaagcagtgg

SEQ ID NO: 1266814 - DNA, 25 bp, Homo sapien
ttgcttttagctcttcgagggggga

SEQ ID NO: 1266815 - DNA, 25 bp, Homo sapien
aagcagaggaagtggcttctgtctg

SEQ ID NO: 1266816 - DNA, 25 bp, Homo sapien
tgcttttagctcttcgaggggggaa

SEQ ID NO: 1266817 - DNA, 25 bp, Homo sapien
gggaagcagaggaagtggcttctgt

SEQ ID NO: 1266818 - DNA, 25 bp, Homo sapien
tgtttggccactagcggagatggcc

SEQ ID NO: 1266819 - DNA, 25 bp, Homo sapien
agagacaacacccagatggacagag

SEQ ID NO: 1266820 - DNA, 25 bp, Homo sapien
ggcgtctcagcaaatacccacagga

SEQ ID NO: 1266821 - DNA, 25 bp, Homo sapien
atgtgtccagggtcaccgaggccat

SEQ ID NO: 1266822 - DNA, 25 bp, Homo sapien
catttaggattgacagcggcgagcc

SEQ ID NO: 1266823 - DNA, 25 bp, Homo sapien
aaaacgcggagccaggctcggtcgg

SEQ ID NO: 1266824 - DNA, 25 bp, Homo sapien
cccgtgcgccgatggaggcgaatca

SEQ ID NO: 1266825 - DNA, 25 bp, Homo sapien
cagatgagtggtgtggaaaacgcgg

SEQ ID NO: 1266826 - DNA, 25 bp, Homo sapien
cgaaggcattgctgagcggacagaa

SEQ ID NO: 1266827 - DNA, 25 bp, Homo sapien
tcaatcccataagcaatccgaaggc

SEQ ID NO: 1266828 - DNA, 25 bp, Homo sapien
tctctggaaaccatggtcggaggtg

SEQ ID NO: 1266829 - DNA, 25 bp, Homo sapien
gagggattgctcactaaacgcggac

SEQ ID NO: 1266830 - DNA, 25 bp, Homo sapien
gacagggactcaccagggctcaggg

SEQ ID NO: 1266831 - DNA, 25 bp, Homo sapien
agggacagggactcaccagggctca

SEQ ID NO: 1266832 - DNA, 25 bp, Homo sapien
agggactcaccagggctcagggaca

SEQ ID NO: 1266833 - DNA, 25 bp, Homo sapien
cagggacagggactcaccagggctc

SEQ ID NO: 1266834 - DNA, 25 bp, Homo sapien
acagggactcaccagggctcaggca

SEQ ID NO: 1266835 - DNA, 25 bp, Homo sapien
ggcacagggactcacctgggctcag

SEQ ID NO: 1266836 - DNA, 25 bp, Homo sapien
agggactcaccagggctcagggaca

SEQ ID NO: 1266837 - DNA, 25 bp, Homo sapien
actcaccagggctcaggcacaggga

SEQ ID NO: 1266838 - DNA, 25 bp, Homo sapien
ttttttctcccagtgaccacaccat

SEQ ID NO: 1266839 - DNA, 25 bp, Homo sapien
caacaaggtgcatggtgagcaagtg

SEQ ID NO: 1266840 - DNA, 25 bp, Homo sapien
gtttggctgaaattcattaactgcc

SEQ ID NO: 1266841 - DNA, 25 bp, Homo sapien
gaaattcattaactgccaggaaatc

SEQ ID NO: 1266842 - DNA, 25 bp, Homo sapien
cttgctttccgtttggctgaaattc

SEQ ID NO: 1266843 - DNA, 25 bp, Homo sapien
tgctttccgtttggctgaaattcat

SEQ ID NO: 1266844 - DNA, 25 bp, Homo sapien
aactatgaacgtcttcatcagggca

SEQ ID NO: 1266845 - DNA, 25 bp, Homo sapien
gggtgcagagatcccccgctccagg

SEQ ID NO: 1266846 - DNA, 25 bp, Homo sapien
cttcatcagggcaagtgcggccagg

SEQ ID NO: 1266847 - DNA, 25 bp, Homo sapien
tcttgattccgtggttaaaactatg

SEQ ID NO: 1266848 - DNA, 25 bp, Homo sapien
ctgaaggggtgaggcttccagagag

SEQ ID NO: 1266849 - DNA, 25 bp, Homo sapien
ctgcagctgtcccaggctctctgga

SEQ ID NO: 1266850 - DNA, 25 bp, Homo sapien
tgcagctgtcccaggctctctggac

SEQ ID NO: 1266851 - DNA, 25 bp, Homo sapien
gtgaggcttccagagaggggctgca

SEQ ID NO: 1266852 - DNA, 25 bp, Homo sapien
ggcaacaaagctgtcctggccgctc

SEQ ID NO: 1266853 - DNA, 25 bp, Homo sapien
aacagaaatctccgagtgtgttttc

SEQ ID NO: 1266854 - DNA, 25 bp, Homo sapien
acagaaatctccgagtgtgttttct

SEQ ID NO: 1266855 - DNA, 25 bp, Homo sapien
tgcgaggacgctggccttgattgca

SEQ ID NO: 1266856 - DNA, 25 bp, Homo sapien
gccttgattgcaaccccctccaaac

SEQ ID NO: 1266857 - DNA, 25 bp, Homo sapien
ctcctgcgaggacgctggccttgat

SEQ ID NO: 1266858 - DNA, 25 bp, Homo sapien
cctgcgaggacgctggccttgattg

SEQ ID NO: 1266859 - DNA, 25 bp, Homo sapien
ggtatcccacttacagcctccgagt

SEQ ID NO: 1266860 - DNA, 25 bp, Homo sapien
cagaacctcttgtcgccctgcttgg

SEQ ID NO: 1266861 - DNA, 25 bp, Homo sapien
tgaggtactcaacggctccacgatg

SEQ ID NO: 1266862 - DNA, 25 bp, Homo sapien
gagaggtgaccctcgtctctgtggc

SEQ ID NO: 1266863 - DNA, 25 bp, Homo sapien
agtggcatcgcgagtcattcagcgc

SEQ ID NO: 1266864 - DNA, 25 bp, Homo sapien
atgcgggctctgaaatgggaacgct

SEQ ID NO: 1266865 - DNA, 25 bp, Homo sapien
taatgcatcggctttaggtagggcc

SEQ ID NO: 1266866 - DNA, 25 bp, Homo sapien
gagcattgcacggataaataatcgt

SEQ ID NO: 1266867 - DNA, 25 bp, Homo sapien
gcagtggcttcgtggaccccagtgg

SEQ ID NO: 1266868 - DNA, 25 bp, Homo sapien
tcgtggaccccagtgggactttgtg

SEQ ID NO: 1266869 - DNA, 25 bp, Homo sapien
tgtggtggtctgtgcagcgcagcca

SEQ ID NO: 1266870 - DNA, 25 bp, Homo sapien
gggaggggcgttcgtgggcagtggc

SEQ ID NO: 1266871 - DNA, 25 bp, Homo sapien
cttctctccgagcttcagggccggc

SEQ ID NO: 1266872 - DNA, 25 bp, Homo sapien
gcttctctccgagcttcagggccgg

SEQ ID NO: 1266873 - DNA, 25 bp, Homo sapien
ggtgaatggcagtcacacatcctcc

SEQ ID NO: 1266874 - DNA, 25 bp, Homo sapien
gtgaatggcagtcacacatcctcca

SEQ ID NO: 1266875 - DNA, 25 bp, Homo sapien
gggtgaatggcagtcacacatcctc

SEQ ID NO: 1266876 - DNA, 25 bp, Homo sapien
ggggtgaatggcagtcacacatcct

SEQ ID NO: 1266877 - DNA, 25 bp, Homo sapien
cccgagtgatctcgtacaagctttt

SEQ ID NO: 1266878 - DNA, 25 bp, Homo sapien
tggaagattccaaggtgatccggcc

SEQ ID NO: 1266879 - DNA, 25 bp, Homo sapien
cctccttggagggtgtggaagattc

SEQ ID NO: 1266880 - DNA, 25 bp, Homo sapien
tgatccggccccgagtgatctcgta

SEQ ID NO: 1266881 - DNA, 25 bp, Homo sapien
aggctgccaccggatttgtttgctc

SEQ ID NO: 1266882 - DNA, 25 bp, Homo sapien
tgagtgtgggtcacccctgctttcc

SEQ ID NO: 1266883 - DNA, 25 bp, Homo sapien
cctgttcctatcacggtggaccttc

SEQ ID NO: 1266884 - DNA, 25 bp, Homo sapien
ttagagagacggttcccaaagccca

SEQ ID NO: 1266885 - DNA, 25 bp, Homo sapien
gtcagccagtggcctaagagcagcc

SEQ ID NO: 1266886 - DNA, 25 bp, Homo sapien
ccgcctgccccggtcagccagtggc

SEQ ID NO: 1266887 - DNA, 25 bp, Homo sapien
cggctgccgtcttccccgcctgccc

SEQ ID NO: 1266888 - DNA, 25 bp, Homo sapien
agccagtggcctaagagcagcctca

SEQ ID NO: 1266889 - DNA, 25 bp, Homo sapien
ggtcccggtgcctgaagaaacgtgc

SEQ ID NO: 1266890 - DNA, 25 bp, Homo sapien
tgagtgtcagcttaaagccccccag

SEQ ID NO: 1266891 - DNA, 25 bp, Homo sapien
gaagctgcagctctacgggcagccc

SEQ ID NO: 1266892 - DNA, 25 bp, Homo sapien
tctgcggccgtcaagcagggtggaa

SEQ ID NO: 1266893 - DNA, 25 bp, Homo sapien
ttttccttgcgagttcgggcaccga

SEQ ID NO: 1266894 - DNA, 25 bp, Homo sapien
gcagccatgtgcgtcggtgccttcg

SEQ ID NO: 1266895 - DNA, 25 bp, Homo sapien
gccttcgggagctgacattggaact

SEQ ID NO: 1266896 - DNA, 25 bp, Homo sapien
tgttgcttctatcagatgggacggg

SEQ ID NO: 1266897 - DNA, 25 bp, Homo sapien
ttaagcagccttcccagaattttcc

SEQ ID NO: 1266898 - DNA, 25 bp, Homo sapien
cttaagcagccttcccagaattttc

SEQ ID NO: 1266899 - DNA, 25 bp, Homo sapien
ccttaagcagccttcccagaatttt

SEQ ID NO: 1266900 - DNA, 25 bp, Homo sapien
aagcagccttcccagaattttccac

SEQ ID NO: 1266901 - DNA, 25 bp, Homo sapien
cgaaagagctgattgctatttcccc

SEQ ID NO: 1266902 - DNA, 25 bp, Homo sapien
gacttgcgggtgactccttctctga

SEQ ID NO: 1266903 - DNA, 25 bp, Homo sapien
tgcctggcctgtcttccaagtgccg

SEQ ID NO: 1266904 - DNA, 25 bp, Homo sapien
tgtcttccaagtgccgtgaacaggg

SEQ ID NO: 1266905 - DNA, 25 bp, Homo sapien
tgggttcaaggtcgtggggcagcct

SEQ ID NO: 1266906 - DNA, 25 bp, Homo sapien
gttcaaggtcgtggggcagccttac

SEQ ID NO: 1266907 - DNA, 25 bp, Homo sapien
gctttgggttcaaggtcgtggggca

SEQ ID NO: 1266908 - DNA, 25 bp, Homo sapien
ttgggttcaaggtcgtggggcagcc

SEQ ID NO: 1266909 - DNA, 25 bp, Homo sapien
ggtcgtggggcagccttacttcaag

SEQ ID NO: 1266910 - DNA, 25 bp, Homo sapien
aatcacccgtgagcgcatttgctcg

SEQ ID NO: 1266911 - DNA, 25 bp, Homo sapien
ccgtgagcgcatttgctcgccgtgg

SEQ ID NO: 1266912 - DNA, 25 bp, Homo sapien
tggaggaaatcacccgtgagcgcat

SEQ ID NO: 1266913 - DNA, 25 bp, Homo sapien
ctgcctggaggaaatcacccgtgag

SEQ ID NO: 1266914 - DNA, 25 bp, Homo sapien
gctggggcgggatcccgcaggaccc

SEQ ID NO: 1266915 - DNA, 25 bp, Homo sapien
agctgtgtgtccagggtcctgcagc

SEQ ID NO: 1266916 - DNA, 25 bp, Homo sapien
ccccggctgggccttcagctgtgtg

SEQ ID NO: 1266917 - DNA, 25 bp, Homo sapien
ggctgggccttcagctgtgtgtcca

SEQ ID NO: 1266918 - DNA, 25 bp, Homo sapien
cccagaaaggctctcgaaggcatca

SEQ ID NO: 1266919 - DNA, 25 bp, Homo sapien
taatcagaacgctgatgagtaagtg

SEQ ID NO: 1266920 - DNA, 25 bp, Homo sapien
gctctcgaaggcatcagcggccctg

SEQ ID NO: 1266921 - DNA, 25 bp, Homo sapien
agcggccctgcctgtaatcagaacg

SEQ ID NO: 1266922 - DNA, 25 bp, Homo sapien
caattctctggcactgccatcatgg

SEQ ID NO: 1266923 - DNA, 25 bp, Homo sapien
cagggccaggacctgccagtctccc

SEQ ID NO: 1266924 - DNA, 25 bp, Homo sapien
gccatcatgggacccccaagccggt

SEQ ID NO: 1266925 - DNA, 25 bp, Homo sapien
cactgagagcctttggcagggccag

SEQ ID NO: 1266926 - DNA, 25 bp, Homo sapien
gacccggttcagtccgatggcagga

SEQ ID NO: 1266927 - DNA, 25 bp, Homo sapien
ctccagggtttttgcaatgtggcca

SEQ ID NO: 1266928 - DNA, 25 bp, Homo sapien
actggagggccccaagtgctgagac

SEQ ID NO: 1266929 - DNA, 25 bp, Homo sapien
gtagggtagggaatcacccaggcca

SEQ ID NO: 1266930 - DNA, 25 bp, Homo sapien
gacttgccgccgcccccggtggacg

SEQ ID NO: 1266931 - DNA, 25 bp, Homo sapien
cgtccaccgggggcggcggcaagtc

SEQ ID NO: 1266932 - DNA, 25 bp, Homo sapien
ccagcagacgcagcggcttaccagg

SEQ ID NO: 1266933 - DNA, 25 bp, Homo sapien
acagcggccagatggtgagtactga

SEQ ID NO: 1266934 - DNA, 25 bp, Homo sapien
gagtacccagcagacgcagcggctt

SEQ ID NO: 1266935 - DNA, 25 bp, Homo sapien
tgagcagacgcagcggccagacggc

SEQ ID NO: 1266936 - DNA, 25 bp, Homo sapien
ctctgaggagtgttcccgtggagcc

SEQ ID NO: 1266937 - DNA, 25 bp, Homo sapien
gctctgaggagtgttcccgtggagc

SEQ ID NO: 1266938 - DNA, 25 bp, Homo sapien
cacacagcgtcgggatttggagaga

SEQ ID NO: 1266939 - DNA, 25 bp, Homo sapien
gcagctcggcgaggcacacagcgtc

SEQ ID NO: 1266940 - DNA, 25 bp, Homo sapien
ttaaggggccaggtcggcgcagggc

SEQ ID NO: 1266941 - DNA, 25 bp, Homo sapien
caggtcggcgcagggcagcgtctct

SEQ ID NO: 1266942 - DNA, 25 bp, Homo sapien
taaggggccaggtcggcgcagggca

SEQ ID NO: 1266943 - DNA, 25 bp, Homo sapien
gggccaggtcggcgcagggcagcgt

SEQ ID NO: 1266944 - DNA, 25 bp, Homo sapien
ggcagcaccaccgtgctttccaggg

SEQ ID NO: 1266945 - DNA, 25 bp, Homo sapien
ggccttctgggacgcgtgggcagca

SEQ ID NO: 1266946 - DNA, 25 bp, Homo sapien
agcaccaccgtgctttccagggagc

SEQ ID NO: 1266947 - DNA, 25 bp, Homo sapien
tggccttctgggacgcgtgggcagc

SEQ ID NO: 1266948 - DNA, 25 bp, Homo sapien
atccactctggtcctccggtcccgg

SEQ ID NO: 1266949 - DNA, 25 bp, Homo sapien
cgtgcatccactctggtcctccggt

SEQ ID NO: 1266950 - DNA, 25 bp, Homo sapien
ccaggagctctcgtgcatccactct

SEQ ID NO: 1266951 - DNA, 25 bp, Homo sapien
agcagccgcccaggagctctcgtgc

SEQ ID NO: 1266952 - DNA, 25 bp, Homo sapien
ctgccaatggccatggggtgccgcc

SEQ ID NO: 1266953 - DNA, 25 bp, Homo sapien
tggccatggggtgccgccgaggagc

SEQ ID NO: 1266954 - DNA, 25 bp, Homo sapien
aatggccatggggtgccgccgagga

SEQ ID NO: 1266955 - DNA, 25 bp, Homo sapien
gaagctgccaatggccatggggtgc

SEQ ID NO: 1266956 - DNA, 25 bp, Homo sapien
gtagaggcaacaatccccgtgatga

SEQ ID NO: 1266957 - DNA, 25 bp, Homo sapien
cagtagaggcaacaatccccgtgat

SEQ ID NO: 1266958 - DNA, 25 bp, Homo sapien
agaggcaacaatccccgtgatgact

SEQ ID NO: 1266959 - DNA, 25 bp, Homo sapien
tccagtagaggcaacaatccccgtg

SEQ ID NO: 1266960 - DNA, 25 bp, Homo sapien
ctgaggggcagagactctcctcaca

SEQ ID NO: 1266961 - DNA, 25 bp, Homo sapien
tcctcacagccgctgagtcaagggc

SEQ ID NO: 1266962 - DNA, 25 bp, Homo sapien
ctcctcacagccgctgagtcaaggg

SEQ ID NO: 1266963 - DNA, 25 bp, Homo sapien
tctcctcacagccgctgagtcaagg

SEQ ID NO: 1266964 - DNA, 25 bp, Homo sapien
gagtgtctcctgcacctaatcccag

SEQ ID NO: 1266965 - DNA, 25 bp, Homo sapien
cttccgccaagtggacagggcttgg

SEQ ID NO: 1266966 - DNA, 25 bp, Homo sapien
cccgatgatgctgcctgtggactca

SEQ ID NO: 1266967 - DNA, 25 bp, Homo sapien
tgtggactcagcacagagcttcaga

SEQ ID NO: 1266968 - DNA, 25 bp, Homo sapien
cctggccccacaccagagctcccac

SEQ ID NO: 1266969 - DNA, 25 bp, Homo sapien
tggccccacaccagagctcccaccg

SEQ ID NO: 1266970 - DNA, 25 bp, Homo sapien
acaccagagctcccaccgcagggcc

SEQ ID NO: 1266971 - DNA, 25 bp, Homo sapien
ccagagctcccaccgcagggcccag

SEQ ID NO: 1266972 - DNA, 25 bp, Homo sapien
ttgcagtcatcaggaatgatgtcag

SEQ ID NO: 1266973 - DNA, 25 bp, Homo sapien
ggatattccctcatgagacctgggc

SEQ ID NO: 1266974 - DNA, 25 bp, Homo sapien
tgggatattccctcatgagacctgg

SEQ ID NO: 1266975 - DNA, 25 bp, Homo sapien
cttgcagtcatcaggaatgatgtca

SEQ ID NO: 1266976 - DNA, 25 bp, Homo sapien
tatgagcccgtattagggccgtagg

SEQ ID NO: 1266977 - DNA, 25 bp, Homo sapien
caggtgcttatgagcccgtattagg

SEQ ID NO: 1266978 - DNA, 25 bp, Homo sapien
gcgctgccgcaaggtgccatgtgct

SEQ ID NO: 1266979 - DNA, 25 bp, Homo sapien
agaggcaggtgcttatgagcccgta

SEQ ID NO: 1266980 - DNA, 25 bp, Homo sapien
accctgaagccggtgcagcggcatg

SEQ ID NO: 1266981 - DNA, 25 bp, Homo sapien
acacaattaaccctctcccagggat

SEQ ID NO: 1266982 - DNA, 25 bp, Homo sapien
catggactggatggaaccacctgaa

SEQ ID NO: 1266983 - DNA, 25 bp, Homo sapien
gaatctccggatcccacacaattaa

SEQ ID NO: 1266984 - DNA, 25 bp, Homo sapien
tggagatcctccctgtgaaccaccc

SEQ ID NO: 1266985 - DNA, 25 bp, Homo sapien
gagggccctttcccagagagaccac

SEQ ID NO: 1266986 - DNA, 25 bp, Homo sapien
gtatttgctgtgtgtgcaacacggg

SEQ ID NO: 1266987 - DNA, 25 bp, Homo sapien
gcccttggggatgagcaagctctcg

SEQ ID NO: 1266988 - DNA, 25 bp, Homo sapien
caggcattctgtgaaagtaacggtc

SEQ ID NO: 1266989 - DNA, 25 bp, Homo sapien
cccgtacttggcattcgctcttcaa

SEQ ID NO: 1266990 - DNA, 25 bp, Homo sapien
tcgctcttcaaacaggcattctgtg

SEQ ID NO: 1266991 - DNA, 25 bp, Homo sapien
gaaagtaacggtccctgcgtgctgg

SEQ ID NO: 1266992 - DNA, 25 bp, Homo sapien
ttgtcgagaccaattggccacaaat

SEQ ID NO: 1266993 - DNA, 25 bp, Homo sapien
gatcctttgtcgagaccaattggcc

SEQ ID NO: 1266994 - DNA, 25 bp, Homo sapien
ctttgtcgagaccaattggccacaa

SEQ ID NO: 1266995 - DNA, 25 bp, Homo sapien
ttcgggatcctttgtcgagaccaat

SEQ ID NO: 1266996 - DNA, 25 bp, Homo sapien
tgtagtttcctgagcacgacagcca

SEQ ID NO: 1266997 - DNA, 25 bp, Homo sapien
tccagcgttttccaaactggcagaa

SEQ ID NO: 1266998 - DNA, 25 bp, Homo sapien
gtttagttgtcaacggccaccagga

SEQ ID NO: 1266999 - DNA, 25 bp, Homo sapien
ggccaggaacttgtcttgtagtttc

SEQ ID NO: 1267000 - DNA, 25 bp, Homo sapien
gttcattcattcgttagatatcgct

SEQ ID NO: 1267001 - DNA, 25 bp, Homo sapien
cgttagatatcgctttgtccacgta

SEQ ID NO: 1267002 - DNA, 25 bp, Homo sapien
ttcactcattagagatatatctgtt

SEQ ID NO: 1267003 - DNA, 25 bp, Homo sapien
gtttattcactcattagagatatat

SEQ ID NO: 1267004 - DNA, 25 bp, Homo sapien
cattagatatcgatttgtccacgca

SEQ ID NO: 1267005 - DNA, 25 bp, Homo sapien
tacatttgctgatcaattcacccac

SEQ ID NO: 1267006 - DNA, 25 bp, Homo sapien
cacacgtgtatacatttgctgatca

SEQ ID NO: 1267007 - DNA, 25 bp, Homo sapien
ttcatagatatgcatttgtttgtcc

SEQ ID NO: 1267008 - DNA, 25 bp, Homo sapien
atttcttggtcatttgttcgatgct

SEQ ID NO: 1267009 - DNA, 25 bp, Homo sapien
tatttcttggtcatttgttcgatgc

SEQ ID NO: 1267010 - DNA, 25 bp, Homo sapien
ctatttcttggtcatttgttcgatg

SEQ ID NO: 1267011 - DNA, 25 bp, Homo sapien
ttgtacacaggtctgttgagagcct

SEQ ID NO: 1267012 - DNA, 25 bp, Homo sapien
ctgttgagagcctgcggtcagcagc

SEQ ID NO: 1267013 - DNA, 25 bp, Homo sapien
tgtacacaggtctgttgagagcctg

SEQ ID NO: 1267014 - DNA, 25 bp, Homo sapien
cacagcgtagccaatgccgattttc

SEQ ID NO: 1267015 - DNA, 25 bp, Homo sapien
tgtcttggtcacagcgtagccaatg

SEQ ID NO: 1267016 - DNA, 25 bp, Homo sapien
cttggtcacagcgtagccaatgccg

SEQ ID NO: 1267017 - DNA, 25 bp, Homo sapien
ggtcacagcgtagccaatgccgatt

SEQ ID NO: 1267018 - DNA, 25 bp, Homo sapien
tgtgcacggaacagcacacggtggc

SEQ ID NO: 1267019 - DNA, 25 bp, Homo sapien
tgcacagcccctaatgttggcactt

SEQ ID NO: 1267020 - DNA, 25 bp, Homo sapien
acttcacggacaagccggcctgggt

SEQ ID NO: 1267021 - DNA, 25 bp, Homo sapien
agaggagaataaatgtgcacggaac

SEQ ID NO: 1267022 - DNA, 25 bp, Homo sapien
cagccaatgggaccgtatccaaaca

SEQ ID NO: 1267023 - DNA, 25 bp, Homo sapien
tcagccaatgggaccgtatccaaac

SEQ ID NO: 1267024 - DNA, 25 bp, Homo sapien
atcgctgctgttggtcctgatgtca

SEQ ID NO: 1267025 - DNA, 25 bp, Homo sapien
gctgctgttggtcctgatgtcagtg

SEQ ID NO: 1267026 - DNA, 25 bp, Homo sapien
gtgccactgggaccatgtcaggaag

SEQ ID NO: 1267027 - DNA, 25 bp, Homo sapien
agaaacagccatgtcgtggaagtgc

SEQ ID NO: 1267028 - DNA, 25 bp, Homo sapien
tgggaccatgtcaggaagaaacagc

SEQ ID NO: 1267029 - DNA, 25 bp, Homo sapien
cagccatgtcgtggaagtgcagcca

SEQ ID NO: 1267030 - DNA, 25 bp, Homo sapien
tccaacccgcagaaagtacagtggg

SEQ ID NO: 1267031 - DNA, 25 bp, Homo sapien
tctttactgtaattcgggctggccg

SEQ ID NO: 1267032 - DNA, 25 bp, Homo sapien
ccagccatgttcaagaagcgtccaa

SEQ ID NO: 1267033 - DNA, 25 bp, Homo sapien
gatttgtgctgacgaggcagtgtcc

SEQ ID NO: 1267034 - DNA, 25 bp, Homo sapien
ttgatcggcagtgatttctcttccc

SEQ ID NO: 1267035 - DNA, 25 bp, Homo sapien
tttcaccgtgaaacgggcattcgcc

SEQ ID NO: 1267036 - DNA, 25 bp, Homo sapien
tcgcccgtgtgtgagttgatcggca

SEQ ID NO: 1267037 - DNA, 25 bp, Homo sapien
ggcattcgcccgtgtgtgagttgat

SEQ ID NO: 1267038 - DNA, 25 bp, Homo sapien
tcttcctggggccaggtccccgtgc

SEQ ID NO: 1267039 - DNA, 25 bp, Homo sapien
cctggggccaggtccccgtgccgtg

SEQ ID NO: 1267040 - DNA, 25 bp, Homo sapien
ggggccaggtccccgtgccgtgcat

SEQ ID NO: 1267041 - DNA, 25 bp, Homo sapien
tgctcttcctggggccaggtccccg

SEQ ID NO: 1267042 - DNA, 25 bp, Homo sapien
tgccgccgcccccggtggacggacc

SEQ ID NO: 1267043 - DNA, 25 bp, Homo sapien
ggtccgtccaccgggggcggcggca

SEQ ID NO: 1267044 - DNA, 25 bp, Homo sapien
tcttcctctctggttcgtacttctc

SEQ ID NO: 1267045 - DNA, 25 bp, Homo sapien
cagggagccgcagggctctttcttc

SEQ ID NO: 1267046 - DNA, 25 bp, Homo sapien
tgcagcctggcgtgacggccagagg

SEQ ID NO: 1267047 - DNA, 25 bp, Homo sapien
ctctgcagcctggcgtgacggccag

SEQ ID NO: 1267048 - DNA, 25 bp, Homo sapien
aaagcatcaataaccagagtggaca

SEQ ID NO: 1267049 - DNA, 25 bp, Homo sapien
tgaaagcatcaataaccagagtgga

SEQ ID NO: 1267050 - DNA, 25 bp, Homo sapien
ggcggccatacatcagccggctctg

SEQ ID NO: 1267051 - DNA, 25 bp, Homo sapien
tcaggtaaagaggcggccatacatc

SEQ ID NO: 1267052 - DNA, 25 bp, Homo sapien
tgccgtttggcaaaggcggccctaa

SEQ ID NO: 1267053 - DNA, 25 bp, Homo sapien
catttggtcctgaattcgggtgtgc

SEQ ID NO: 1267054 - DNA, 25 bp, Homo sapien
cattcagacaggacctgagtgccgc

SEQ ID NO: 1267055 - DNA, 25 bp, Homo sapien
ttcccccttatctagagcatctggc

SEQ ID NO: 1267056 - DNA, 25 bp, Homo sapien
gagccgtgggctcttcgcagtatcc

SEQ ID NO: 1267057 - DNA, 25 bp, Homo sapien
caagtaaatgttgttccgctccggg

SEQ ID NO: 1267058 - DNA, 25 bp, Homo sapien
gggtcgagtttgctcttcctccaag

SEQ ID NO: 1267059 - DNA, 25 bp, Homo sapien
cactatgacctacacccgagtgggt

SEQ ID NO: 1267060 - DNA, 25 bp, Homo sapien
ttggcagcactgattgagtgtgcgg

SEQ ID NO: 1267061 - DNA, 25 bp, Homo sapien
cagtggcgaggctgtccctgccagt

SEQ ID NO: 1267062 - DNA, 25 bp, Homo sapien
agacaaaacagaagcgccagtggcg

SEQ ID NO: 1267063 - DNA, 25 bp, Homo sapien
tgtgcgggggtcctccctcttctga

SEQ ID NO: 1267064 - DNA, 25 bp, Homo sapien
tcctgccatggggtctcctttctct

SEQ ID NO: 1267065 - DNA, 25 bp, Homo sapien
gcctcctgccatggggtctcctttc

SEQ ID NO: 1267066 - DNA, 25 bp, Homo sapien
ctcctgccatggggtctcctttctc

SEQ ID NO: 1267067 - DNA, 25 bp, Homo sapien
tctctctctctgaacgggacgcgct

SEQ ID NO: 1267068 - DNA, 25 bp, Homo sapien
ctctctctctgaacgggacgcgctg

SEQ ID NO: 1267069 - DNA, 25 bp, Homo sapien
tctctctgaacgggacgcgctgagc

SEQ ID NO: 1267070 - DNA, 25 bp, Homo sapien
tctctctctgaacgggacgcgctga

SEQ ID NO: 1267071 - DNA, 25 bp, Homo sapien
ccatgcccagattttgggtcttcaa

SEQ ID NO: 1267072 - DNA, 25 bp, Homo sapien
gcaggccatgcccagattttgggtc

SEQ ID NO: 1267073 - DNA, 25 bp, Homo sapien
caggccatgcccagattttgggtct

SEQ ID NO: 1267074 - DNA, 25 bp, Homo sapien
ggccatgcccagattttgggtcttc

SEQ ID NO: 1267075 - DNA, 25 bp, Homo sapien
gctgttccctgctcggggccctgga

SEQ ID NO: 1267076 - DNA, 25 bp, Homo sapien
agtgctgttccctgctcggggccct

SEQ ID NO: 1267077 - DNA, 25 bp, Homo sapien
caggtcagcggagatgctgcctgcc

SEQ ID NO: 1267078 - DNA, 25 bp, Homo sapien
ggttgggggcgaagatgctgcatcc

SEQ ID NO: 1267079 - DNA, 25 bp, Homo sapien
tactcccggttgagagcgcaagggt

SEQ ID NO: 1267080 - DNA, 25 bp, Homo sapien
ggtttgtgtcaacaccagtgcagtc

SEQ ID NO: 1267081 - DNA, 25 bp, Homo sapien
gggcctggcgtgtgtcttcttcctg

SEQ ID NO: 1267082 - DNA, 25 bp, Homo sapien
tttcacggttcttgcgggagctgcc

SEQ ID NO: 1267083 - DNA, 25 bp, Homo sapien
ttctctgttgccatcgggcgccggt

SEQ ID NO: 1267084 - DNA, 25 bp, Homo sapien
aataaagagggttttcagcggagcg

SEQ ID NO: 1267085 - DNA, 25 bp, Homo sapien
gccatttttccagccgaggtcagca

SEQ ID NO: 1267086 - DNA, 25 bp, Homo sapien
tgagggcccagctagcaaaataaag

SEQ ID NO: 1267087 - DNA, 25 bp, Homo sapien
ggagataatctagcgagttgtccat

SEQ ID NO: 1267088 - DNA, 25 bp, Homo sapien
gagagcaaacatctgcgggagataa

SEQ ID NO: 1267089 - DNA, 25 bp, Homo sapien
ctggagagcaaacatctgcgggaga

SEQ ID NO: 1267090 - DNA, 25 bp, Homo sapien
catctgcgggagataatctagcgag

SEQ ID NO: 1267091 - DNA, 25 bp, Homo sapien
ggagacagccccgagttgattttga

SEQ ID NO: 1267092 - DNA, 25 bp, Homo sapien
gaacatatagtaaagtcagtcccct

SEQ ID NO: 1267093 - DNA, 25 bp, Homo sapien
taagccgcggacaaaaggctggaca

SEQ ID NO: 1267094 - DNA, 25 bp, Homo sapien
gaatagacttgcttcgtcgcagtaa

SEQ ID NO: 1267095 - DNA, 25 bp, Homo sapien
tgcatccttgattttgctgaatcaa

SEQ ID NO: 1267096 - DNA, 25 bp, Homo sapien
taagaagtttgcatccttgattttg

SEQ ID NO: 1267097 - DNA, 25 bp, Homo sapien
ctaagaagtttgcatccttgatttt

SEQ ID NO: 1267098 - DNA, 25 bp, Homo sapien
atccttgattttgctgaatcaaagg

SEQ ID NO: 1267099 - DNA, 25 bp, Homo sapien
tgcgtgtctgaggtggcttcctttc

SEQ ID NO: 1267100 - DNA, 25 bp, Homo sapien
tctctaccaccctgcgtgtctgagg

SEQ ID NO: 1267101 - DNA, 25 bp, Homo sapien
caccctgcgtgtctgaggtggcttc

SEQ ID NO: 1267102 - DNA, 25 bp, Homo sapien
gtgccatggtctctaccaccctgcg

SEQ ID NO: 1267103 - DNA, 25 bp, Homo sapien
cccggggcagcgcggccctcagcct

SEQ ID NO: 1267104 - DNA, 25 bp, Homo sapien
gggcagcgcggccctcagccttgag

SEQ ID NO: 1267105 - DNA, 25 bp, Homo sapien
caggcctggccgtttggtttcctct

SEQ ID NO: 1267106 - DNA, 25 bp, Homo sapien
tctgggcacccggcgtgagaaccca

SEQ ID NO: 1267107 - DNA, 25 bp, Homo sapien
cacagctctgggtaccgagggtgag

SEQ ID NO: 1267108 - DNA, 25 bp, Homo sapien
gaggtggggtgagggcgcagccgtg

SEQ ID NO: 1267109 - DNA, 25 bp, Homo sapien
gggtgagggcgcagccgtgaggcac

SEQ ID NO: 1267110 - DNA, 25 bp, Homo sapien
aacgagggaccagtcagggtggtgg

SEQ ID NO: 1267111 - DNA, 25 bp, Homo sapien
ctaggtgtgggaacgagggaccagt

SEQ ID NO: 1267112 - DNA, 25 bp, Homo sapien
tgggaacgagggaccagtcagggtg

SEQ ID NO: 1267113 - DNA, 25 bp, Homo sapien
ggtgtgggaacgagggaccagtcag

SEQ ID NO: 1267114 - DNA, 25 bp, Homo sapien
ccagatggtggcgtcaataaaccct

SEQ ID NO: 1267115 - DNA, 25 bp, Homo sapien
cctgtccataatcttcaggtgggtg

SEQ ID NO: 1267116 - DNA, 25 bp, Homo sapien
ggcgtcaataaaccctgtccataat

SEQ ID NO: 1267117 - DNA, 25 bp, Homo sapien
tcaggtgggtgcaatattgagttaa

SEQ ID NO: 1267118 - DNA, 25 bp, Homo sapien
tctgcataacggtgtccaggccggg

SEQ ID NO: 1267119 - DNA, 25 bp, Homo sapien
aggtgggccctgaatccctcaaata

SEQ ID NO: 1267120 - DNA, 25 bp, Homo sapien
tgggccctgaatccctcaaatagag

SEQ ID NO: 1267121 - DNA, 25 bp, Homo sapien
tggtgcaggttgagtgctcccggct

SEQ ID NO: 1267122 - DNA, 25 bp, Homo sapien
ggctgcccccgacacttcaggagcc

SEQ ID NO: 1267123 - DNA, 25 bp, Homo sapien
ctggagacatgaggttggattccac

SEQ ID NO: 1267124 - DNA, 25 bp, Homo sapien
gagacatgaggttggattccaccaa

SEQ ID NO: 1267125 - DNA, 25 bp, Homo sapien
tgctggagacatgaggttggattcc

SEQ ID NO: 1267126 - DNA, 25 bp, Homo sapien
ggtgctggagacatgaggttggatt

SEQ ID NO: 1267127 - DNA, 25 bp, Homo sapien
ctcagttccctgcaacaaggacctc

SEQ ID NO: 1267128 - DNA, 25 bp, Homo sapien
attcttctgggacctcagttccctg

SEQ ID NO: 1267129 - DNA, 25 bp, Homo sapien
ctcctggagtctgaattcttctggg

SEQ ID NO: 1267130 - DNA, 25 bp, Homo sapien
ggagtctgaattcttctgggacctc

SEQ ID NO: 1267131 - DNA, 25 bp, Homo sapien
ttaggcctttgcttttggtgcccca

SEQ ID NO: 1267132 - DNA, 25 bp, Homo sapien
taggcctttgcttttggtgccccag

SEQ ID NO: 1267133 - DNA, 25 bp, Homo sapien
aggcctttgcttttggtgccccagt

SEQ ID NO: 1267134 - DNA, 25 bp, Homo sapien
gcctttgcttttggtgccccagttc

SEQ ID NO: 1267135 - DNA, 25 bp, Homo sapien
tgtgaggatccaaatcagatcatca

SEQ ID NO: 1267136 - DNA, 25 bp, Homo sapien
ctgtgaggatccaaatcagatcatc

SEQ ID NO: 1267137 - DNA, 25 bp, Homo sapien
gaggatccaaatcagatcatcacag

SEQ ID NO: 1267138 - DNA, 25 bp, Homo sapien
ggatccaaatcagatcatcacagac

SEQ ID NO: 1267139 - DNA, 25 bp, Homo sapien
ttatcggaagagaatctgaagcctg

SEQ ID NO: 1267140 - DNA, 25 bp, Homo sapien
gggagacatcgcctgggcctcgttc

SEQ ID NO: 1267141 - DNA, 25 bp, Homo sapien
gcaggcgccggaagcagaagatccc

SEQ ID NO: 1267142 - DNA, 25 bp, Homo sapien
gagacatcgcctgggcctcgttcac

SEQ ID NO: 1267143 - DNA, 25 bp, Homo sapien
aagatcccagggattccctccaggg

SEQ ID NO: 1267144 - DNA, 25 bp, Homo sapien
cgccctggcaggtaactttcatcag

SEQ ID NO: 1267145 - DNA, 25 bp, Homo sapien
tgggttaatcactaaagaggtgcca

SEQ ID NO: 1267146 - DNA, 25 bp, Homo sapien
tgaccatgatggctatccttgcttg

SEQ ID NO: 1267147 - DNA, 25 bp, Homo sapien
ggcctccattaatcttgggttaatc

SEQ ID NO: 1267148 - DNA, 25 bp, Homo sapien
tggcgaccagatttcataaagtaac

SEQ ID NO: 1267149 - DNA, 25 bp, Homo sapien
ctggcgaccagatttcataaagtaa

SEQ ID NO: 1267150 - DNA, 25 bp, Homo sapien
catgggctcttagccggctgcggaa

SEQ ID NO: 1267151 - DNA, 25 bp, Homo sapien
gattttgcgtttgattactgctggc

SEQ ID NO: 1267152 - DNA, 25 bp, Homo sapien
ccctgaaggtttatgcagattttgc

SEQ ID NO: 1267153 - DNA, 25 bp, Homo sapien
ggccccagcgtgcagttcataatat

SEQ ID NO: 1267154 - DNA, 25 bp, Homo sapien
agcgccagccgccttgtaaatcacc

SEQ ID NO: 1267155 - DNA, 25 bp, Homo sapien
atctcctgttgcctgggccgcctcg

SEQ ID NO: 1267156 - DNA, 25 bp, Homo sapien
gccagctcgaggtgccgtgaacaga

SEQ ID NO: 1267157 - DNA, 25 bp, Homo sapien
ccttggcagcatgttcagctcgtcg

SEQ ID NO: 1267158 - DNA, 25 bp, Homo sapien
atcaggagcctcgaagcgtcgctca

SEQ ID NO: 1267159 - DNA, 25 bp, Homo sapien
ggatgcagttggtcatcaggagcct

SEQ ID NO: 1267160 - DNA, 25 bp, Homo sapien
agaagctgccaccaatagccacgtg

SEQ ID NO: 1267161 - DNA, 25 bp, Homo sapien
accaatagccacgtgggcagctgtg

SEQ ID NO: 1267162 - DNA, 25 bp, Homo sapien
catgcctggaaagaccggcggcctc

SEQ ID NO: 1267163 - DNA, 25 bp, Homo sapien
atgcctggaaagaccggcggcctct

SEQ ID NO: 1267164 - DNA, 25 bp, Homo sapien
tgcctggaaagaccggcggcctctc

SEQ ID NO: 1267165 - DNA, 25 bp, Homo sapien
ctgcagaagctggagcaggaggcat

SEQ ID NO: 1267166 - DNA, 25 bp, Homo sapien
caggcgcaggccctcggctcagcag

SEQ ID NO: 1267167 - DNA, 25 bp, Homo sapien
tgcccaggcgcaggccctcggctca

SEQ ID NO: 1267168 - DNA, 25 bp, Homo sapien
cagaagccctgcagaagctggagca

SEQ ID NO: 1267169 - DNA, 25 bp, Homo sapien
acaggctgaggacgggcagccgtca

SEQ ID NO: 1267170 - DNA, 25 bp, Homo sapien
agacttgagcaagaggctctgagga

SEQ ID NO: 1267171 - DNA, 25 bp, Homo sapien
ggaaagacttgagcaagaggctctg

SEQ ID NO: 1267172 - DNA, 25 bp, Homo sapien
tgcctcggccggagaccccttgtga

SEQ ID NO: 1267173 - DNA, 25 bp, Homo sapien
ggggcaggtatatctgggagggtgc

SEQ ID NO: 1267174 - DNA, 25 bp, Homo sapien
ctggggcaggtatatctgggagggt

SEQ ID NO: 1267175 - DNA, 25 bp, Homo sapien
gggcaggtatatctgggagggtgca

SEQ ID NO: 1267176 - DNA, 25 bp, Homo sapien
cactggcaccaactaagaactaaga

SEQ ID NO: 1267177 - DNA, 25 bp, Homo sapien
cccagcaaggtctgtggcgttaagg

SEQ ID NO: 1267178 - DNA, 25 bp, Homo sapien
ggcgttaaggtcacactggcaccaa

SEQ ID NO: 1267179 - DNA, 25 bp, Homo sapien
tctgtggcgttaaggtcacactggc

SEQ ID NO: 1267180 - DNA, 25 bp, Homo sapien
catgaaaagcttccgaaccttgact

SEQ ID NO: 1267181 - DNA, 25 bp, Homo sapien
ttgcacatgaaaagcttccgaacct

SEQ ID NO: 1267182 - DNA, 25 bp, Homo sapien
tgaaaagcttccgaaccttgactcc

SEQ ID NO: 1267183 - DNA, 25 bp, Homo sapien
gcacatgaaaagcttccgaaccttg

SEQ ID NO: 1267184 - DNA, 25 bp, Homo sapien
tggcactgtcgccgtgaagccttcg

SEQ ID NO: 1267185 - DNA, 25 bp, Homo sapien
ctaggagtctgtccagagcaaagca

SEQ ID NO: 1267186 - DNA, 25 bp, Homo sapien
tccagagcaaagcaactgccaggtg

SEQ ID NO: 1267187 - DNA, 25 bp, Homo sapien
tgaagccttcgggagccaggacctg

SEQ ID NO: 1267188 - DNA, 25 bp, Homo sapien
ggtaggtttctctggccggtatagc

SEQ ID NO: 1267189 - DNA, 25 bp, Homo sapien
tctggccggtatagcccttgagcat

SEQ ID NO: 1267190 - DNA, 25 bp, Homo sapien
gaggcgaatgttggtaggtttctct

SEQ ID NO: 1267191 - DNA, 25 bp, Homo sapien
tagcccttgagcatggaacgcttca

SEQ ID NO: 1267192 - DNA, 25 bp, Homo sapien
tgctgcaaagcattcccaggccact

SEQ ID NO: 1267193 - DNA, 25 bp, Homo sapien
ccactcacaaatctcgggacggaca

SEQ ID NO: 1267194 - DNA, 25 bp, Homo sapien
cactcacaaatctcgggacggacat

SEQ ID NO: 1267195 - DNA, 25 bp, Homo sapien
tccctgtgatgctgcaaagcattcc

SEQ ID NO: 1267196 - DNA, 25 bp, Homo sapien
ctaaagatgcaaacctccaaggtgt

SEQ ID NO: 1267197 - DNA, 25 bp, Homo sapien
tctaaagatgcaaacctccaaggtg

SEQ ID NO: 1267198 - DNA, 25 bp, Homo sapien
agataagagagacccaagtcctgca

SEQ ID NO: 1267199 - DNA, 25 bp, Homo sapien
ggtgtagataagagagacccaagtc

SEQ ID NO: 1267200 - DNA, 25 bp, Homo sapien
acctcctcacagggcctaggggcag

SEQ ID NO: 1267201 - DNA, 25 bp, Homo sapien
tgagcccctggccgaagaccccaag

SEQ ID NO: 1267202 - DNA, 25 bp, Homo sapien
atgagcccctggccgaagaccccaa

SEQ ID NO: 1267203 - DNA, 25 bp, Homo sapien
gagcccctggccgaagaccccaagc

SEQ ID NO: 1267204 - DNA, 25 bp, Homo sapien
ctgcctgcagcgagttcccacctgc

SEQ ID NO: 1267205 - DNA, 25 bp, Homo sapien
tgcagcttccccacgctgtttttgt

SEQ ID NO: 1267206 - DNA, 25 bp, Homo sapien
atcctcctcacccacactggtgccc

SEQ ID NO: 1267207 - DNA, 25 bp, Homo sapien
ctgcagcgagttcccacctgcagct

SEQ ID NO: 1267208 - DNA, 25 bp, Homo sapien
atacttaggtcatgaggcagggcgt

SEQ ID NO: 1267209 - DNA, 25 bp, Homo sapien
gcttccggaatccttggagacacga

SEQ ID NO: 1267210 - DNA, 25 bp, Homo sapien
tggagacacgagtagcagtttcctg

SEQ ID NO: 1267211 - DNA, 25 bp, Homo sapien
tggaccaggacgatgcacagctgag

SEQ ID NO: 1267212 - DNA, 25 bp, Homo sapien
gcgcctctatctggggccgcagcgt

SEQ ID NO: 1267213 - DNA, 25 bp, Homo sapien
cccccgagtgctgaaaagagttctc

SEQ ID NO: 1267214 - DNA, 25 bp, Homo sapien
ttgagccgtcgctctccgcctggct

SEQ ID NO: 1267215 - DNA, 25 bp, Homo sapien
gtcgctctccgcctggctgcgcctc

SEQ ID NO: 1267216 - DNA, 25 bp, Homo sapien
cttcattcttgaccgcgctgtccgg

SEQ ID NO: 1267217 - DNA, 25 bp, Homo sapien
cttgtccagacgagagtggcttgtc

SEQ ID NO: 1267218 - DNA, 25 bp, Homo sapien
ctgtccggatgagagtggcttgtcc

SEQ ID NO: 1267219 - DNA, 25 bp, Homo sapien
gggaaaggacggtctgcctgctctc

SEQ ID NO: 1267220 - DNA, 25 bp, Homo sapien
caatgttgttccatcctttgtcggc

SEQ ID NO: 1267221 - DNA, 25 bp, Homo sapien
gaacgttgccccttggagaggcgat

SEQ ID NO: 1267222 - DNA, 25 bp, Homo sapien
tctccatctcctggtgaacgttgcc

SEQ ID NO: 1267223 - DNA, 25 bp, Homo sapien
cagcacactcgtgggtgccggcagt

SEQ ID NO: 1267224 - DNA, 25 bp, Homo sapien
tagcagcagacttgaccgccaggct

SEQ ID NO: 1267225 - DNA, 25 bp, Homo sapien
ggaagctccgttgacagggtttctg

SEQ ID NO: 1267226 - DNA, 25 bp, Homo sapien
cacagtgggctttgtttagtctggg

SEQ ID NO: 1267227 - DNA, 25 bp, Homo sapien
tttctgggcgatgggctcttttttc

SEQ ID NO: 1267228 - DNA, 25 bp, Homo sapien
gaggtgctcagagtcgttatggtcc

SEQ ID NO: 1267229 - DNA, 25 bp, Homo sapien
tgaggcacacgaccagtgccctctg

SEQ ID NO: 1267230 - DNA, 25 bp, Homo sapien
gctgtcggcttggttaatgggtccc

SEQ ID NO: 1267231 - DNA, 25 bp, Homo sapien
cgtacgggtcatggtggagcgtcct

SEQ ID NO: 1267232 - DNA, 25 bp, Homo sapien
ggacataaacccgtccattctcctg

SEQ ID NO: 1267233 - DNA, 25 bp, Homo sapien
aatggacataaacccgtccattctc

SEQ ID NO: 1267234 - DNA, 25 bp, Homo sapien
ctgcagaaatggacataaacccgtc

SEQ ID NO: 1267235 - DNA, 25 bp, Homo sapien
tgcagaaatggacataaacccgtcc

SEQ ID NO: 1267236 - DNA, 25 bp, Homo sapien
gatgtttccgatcccagtcgtggtg

SEQ ID NO: 1267237 - DNA, 25 bp, Homo sapien
gatgtttccaatcccagtcgtggtg

SEQ ID NO: 1267238 - DNA, 25 bp, Homo sapien
gccgtgatgtttccgatcccagtca

SEQ ID NO: 1267239 - DNA, 25 bp, Homo sapien
gaagatgctatgctgtggccgtgat

SEQ ID NO: 1267240 - DNA, 25 bp, Homo sapien
tgccggtgtctgactctaccaagat

SEQ ID NO: 1267241 - DNA, 25 bp, Homo sapien
cagcaattcttcgttccctggagcc

SEQ ID NO: 1267242 - DNA, 25 bp, Homo sapien
tgtgccagggaaaatggattctgcc

SEQ ID NO: 1267243 - DNA, 25 bp, Homo sapien
tccacgcatcattgttagcatttcc

SEQ ID NO: 1267244 - DNA, 25 bp, Homo sapien
ccaggacgagccaaggccagagttg

SEQ ID NO: 1267245 - DNA, 25 bp, Homo sapien
ccaaagtgcctggaaacctgcccgt

SEQ ID NO: 1267246 - DNA, 25 bp, Homo sapien
tcttgggtgggatcttatttcttcc

SEQ ID NO: 1267247 - DNA, 25 bp, Homo sapien
gcccgtgcattggtgcccgctctgt

SEQ ID NO: 1267248 - DNA, 25 bp, Homo sapien
tgacctaatcaacagggaaaccgag

SEQ ID NO: 1267249 - DNA, 25 bp, Homo sapien
gatagacccagaaggccagatgctc

SEQ ID NO: 1267250 - DNA, 25 bp, Homo sapien
gactgtagggttcacatcgcagccc

SEQ ID NO: 1267251 - DNA, 25 bp, Homo sapien
cacagtcgctctacagctttgcagg

SEQ ID NO: 1267252 - DNA, 25 bp, Homo sapien
gtggacatccatggcgccgtcagca

SEQ ID NO: 1267253 - DNA, 25 bp, Homo sapien
actgggttattcccacgctcatcct

SEQ ID NO: 1267254 - DNA, 25 bp, Homo sapien
catcctcgccccactgggttattcc

SEQ ID NO: 1267255 - DNA, 25 bp, Homo sapien
cagtggacatccatggcgccgtcag

SEQ ID NO: 1267256 - DNA, 25 bp, Homo sapien
gtctgacgttggcatcccctctgtg

SEQ ID NO: 1267257 - DNA, 25 bp, Homo sapien
tcaggagcccatccggatccggggc

SEQ ID NO: 1267258 - DNA, 25 bp, Homo sapien
tcccctctgtgggatacatcaggag

SEQ ID NO: 1267259 - DNA, 25 bp, Homo sapien
agcctgctggtgtctgacgttggca

SEQ ID NO: 1267260 - DNA, 25 bp, Homo sapien
gggcgagtacagctatcaacttgtg

SEQ ID NO: 1267261 - DNA, 25 bp, Homo sapien
cagttggcgttcacacgtggtgtac

SEQ ID NO: 1267262 - DNA, 25 bp, Homo sapien
gacagaggtccacacacggatacgt

SEQ ID NO: 1267263 - DNA, 25 bp, Homo sapien
agacactgggcagccttctccgaag

SEQ ID NO: 1267264 - DNA, 25 bp, Homo sapien
tggaaaggaatgtgaccgcgctgtc

SEQ ID NO: 1267265 - DNA, 25 bp, Homo sapien
cactcgccgtcacgatgagtcagcg

SEQ ID NO: 1267266 - DNA, 25 bp, Homo sapien
ctcccagaccggagggcggcactta

SEQ ID NO: 1267267 - DNA, 25 bp, Homo sapien
tgtctatgaaatgccgcggagctgg

SEQ ID NO: 1267268 - DNA, 25 bp, Homo sapien
aagcctgtgtgctgaccggcctggt

SEQ ID NO: 1267269 - DNA, 25 bp, Homo sapien
ggcagtgtccgaggctctgccgtcc

SEQ ID NO: 1267270 - DNA, 25 bp, Homo sapien
aaagtagcctgagagtgatccccgg

SEQ ID NO: 1267271 - DNA, 25 bp, Homo sapien
ttgacgtctcgagcagcttggcagg

SEQ ID NO: 1267272 - DNA, 25 bp, Homo sapien
tggaaacttgtatccaaaatttgaa

SEQ ID NO: 1267273 - DNA, 25 bp, Homo sapien
ctggaaagaggaattcagatgtgaa

SEQ ID NO: 1267274 - DNA, 25 bp, Homo sapien
tcagatgtgaatggaaacttgtatc

SEQ ID NO: 1267275 - DNA, 25 bp, Homo sapien
ttgaaatagtccctttgggcctgct

SEQ ID NO: 1267276 - DNA, 25 bp, Homo sapien
cccggcgggcctgggatttgcgaat

SEQ ID NO: 1267277 - DNA, 25 bp, Homo sapien
cccaggcaaacctcgccgcctcctg

SEQ ID NO: 1267278 - DNA, 25 bp, Homo sapien
cagtgccgcagttgctgaccccagg

SEQ ID NO: 1267279 - DNA, 25 bp, Homo sapien
gggcttccgccagtgccgcagttgc

SEQ ID NO: 1267280 - DNA, 25 bp, Homo sapien
gatttctttcttgccgcttggtacg

SEQ ID NO: 1267281 - DNA, 25 bp, Homo sapien
gacgcgcccatcatctgctgtggtt

SEQ ID NO: 1267282 - DNA, 25 bp, Homo sapien
tacgagggatgtttgcatctttgct

SEQ ID NO: 1267283 - DNA, 25 bp, Homo sapien
tacgtggtctcgaggttgtccacag

SEQ ID NO: 1267284 - DNA, 25 bp, Homo sapien
gatgagggcaaggacattcccagct

SEQ ID NO: 1267285 - DNA, 25 bp, Homo sapien
cggactaacgagtatgccttctgtc

SEQ ID NO: 1267286 - DNA, 25 bp, Homo sapien
cagcagccgctgcacgatgctggct

SEQ ID NO: 1267287 - DNA, 25 bp, Homo sapien
tgcagcgagccccagctgacaagga

SEQ ID NO: 1267288 - DNA, 25 bp, Homo sapien
cctcactaagcaggagtgcgggcgt

SEQ ID NO: 1267289 - DNA, 25 bp, Homo sapien
gtcggaagtctccaggtctggggat

SEQ ID NO: 1267290 - DNA, 25 bp, Homo sapien
gccgtcggaagtctccaggtctggg

SEQ ID NO: 1267291 - DNA, 25 bp, Homo sapien
gaggccgtcggaagtctccaggtct

SEQ ID NO: 1267292 - DNA, 25 bp, Homo sapien
tcggaagtctccaggtctggggatc

SEQ ID NO: 1267293 - DNA, 25 bp, Homo sapien
atggggaacatgccttgcctcctgg

SEQ ID NO: 1267294 - DNA, 25 bp, Homo sapien
tctccaccatgagcgggtcagtgtt

SEQ ID NO: 1267295 - DNA, 25 bp, Homo sapien
ctgttttattctgacgtccttgggt

SEQ ID NO: 1267296 - DNA, 25 bp, Homo sapien
ggccttctccaccatgagcgggtca

SEQ ID NO: 1267297 - DNA, 25 bp, Homo sapien
ggcctcttgaagagacttacttcct

SEQ ID NO: 1267298 - DNA, 25 bp, Homo sapien
tgggagctgcgtgggtgtgatttgt

SEQ ID NO: 1267299 - DNA, 25 bp, Homo sapien
gagctgcgtgggtgtgatttgtgca

SEQ ID NO: 1267300 - DNA, 25 bp, Homo sapien
agctgcgtgggtgtgatttgtgcaa

SEQ ID NO: 1267301 - DNA, 25 bp, Homo sapien
ggagctgcgtgggtgtgatttgtgc

SEQ ID NO: 1267302 - DNA, 25 bp, Homo sapien
taatcacgctctggtcactctctag

SEQ ID NO: 1267303 - DNA, 25 bp, Homo sapien
ccagcaggtcgatgtgggtcccttt

SEQ ID NO: 1267304 - DNA, 25 bp, Homo sapien
tgatccggcctcttctaatcacgct

SEQ ID NO: 1267305 - DNA, 25 bp, Homo sapien
gtgcttctgcgacacccgagcacag

SEQ ID NO: 1267306 - DNA, 25 bp, Homo sapien
tcacgcagctcatacgcagaatctg

SEQ ID NO: 1267307 - DNA, 25 bp, Homo sapien
ggatgcggctcccatcagagggtac

SEQ ID NO: 1267308 - DNA, 25 bp, Homo sapien
ctgaacagatgctttcgggccagga

SEQ ID NO: 1267309 - DNA, 25 bp, Homo sapien
tgtctcccctagaacagaggcctga

SEQ ID NO: 1267310 - DNA, 25 bp, Homo sapien
gattcagtgagaccgtgaagcccag

SEQ ID NO: 1267311 - DNA, 25 bp, Homo sapien
ccgttcagattcagtgagaccgtga

SEQ ID NO: 1267312 - DNA, 25 bp, Homo sapien
tcagattcagtgagaccgtgaagcc

SEQ ID NO: 1267313 - DNA, 25 bp, Homo sapien
agtgagaccgtgaagcccagcatcc

SEQ ID NO: 1267314 - DNA, 25 bp, Homo sapien
tgggccaggcacagctgcccagcgg

SEQ ID NO: 1267315 - DNA, 25 bp, Homo sapien
gggccaggcacagctgcccagcggg

SEQ ID NO: 1267316 - DNA, 25 bp, Homo sapien
cagcagccttgggccaggcacagct

SEQ ID NO: 1267317 - DNA, 25 bp, Homo sapien
ccaggcacagctgcccagcgggcat

SEQ ID NO: 1267318 - DNA, 25 bp, Homo sapien
gttcgtggtggcgttccagatggtg

SEQ ID NO: 1267319 - DNA, 25 bp, Homo sapien
ggtggtgttcgtggtggcgttccag

SEQ ID NO: 1267320 - DNA, 25 bp, Homo sapien
ggtgttcgtggtggcgttccagatg

SEQ ID NO: 1267321 - DNA, 25 bp, Homo sapien
tggtgttcgtggtggcgttccagat

SEQ ID NO: 1267322 - DNA, 25 bp, Homo sapien
cctggcccaatgagttgagtgtgat

SEQ ID NO: 1267323 - DNA, 25 bp, Homo sapien
gcctggcccaatgagttgagtgtga

SEQ ID NO: 1267324 - DNA, 25 bp, Homo sapien
tggcccaatgagttgagtgtgattc

SEQ ID NO: 1267325 - DNA, 25 bp, Homo sapien
cccaatgagttgagtgtgattctgg

SEQ ID NO: 1267326 - DNA, 25 bp, Homo sapien
tgttgggctgagccgagtcccgcca

SEQ ID NO: 1267327 - DNA, 25 bp, Homo sapien
gcttgtgttgggctgagccgagtcc

SEQ ID NO: 1267328 - DNA, 25 bp, Homo sapien
ccacaggtgcccatggctgagcttg

SEQ ID NO: 1267329 - DNA, 25 bp, Homo sapien
tgtgttgggctgagccgagtcccgc

SEQ ID NO: 1267330 - DNA, 25 bp, Homo sapien
tctggggcagaaatcggagccacct

SEQ ID NO: 1267331 - DNA, 25 bp, Homo sapien
ggcagaaatcggagccacctggagt

SEQ ID NO: 1267332 - DNA, 25 bp, Homo sapien
ctctggggcagaaatcggagccacc

SEQ ID NO: 1267333 - DNA, 25 bp, Homo sapien
tggggcagaaatcggagccacctgg

SEQ ID NO: 1267334 - DNA, 25 bp, Homo sapien
tcgttcttcaaggagccagatcccg

SEQ ID NO: 1267335 - DNA, 25 bp, Homo sapien
ctctaatttgctgcccagaggaatc

SEQ ID NO: 1267336 - DNA, 25 bp, Homo sapien
gaaacacattcgtccaaatcctcta

SEQ ID NO: 1267337 - DNA, 25 bp, Homo sapien
ccagatcccggaaaggaaacacatt

SEQ ID NO: 1267338 - DNA, 25 bp, Homo sapien
ttcctccgaaggcatctagaacctt

SEQ ID NO: 1267339 - DNA, 25 bp, Homo sapien
aaagatctgcccctttgatgagcac

SEQ ID NO: 1267340 - DNA, 25 bp, Homo sapien
tccaaaaagccttcctccgaaggca

SEQ ID NO: 1267341 - DNA, 25 bp, Homo sapien
gcacagacgtctctcctccaaaaag

SEQ ID NO: 1267342 - DNA, 25 bp, Homo sapien
ctctgaggttcctggctggccgcca

SEQ ID NO: 1267343 - DNA, 25 bp, Homo sapien
tctgaggttcctggctggccgccat

SEQ ID NO: 1267344 - DNA, 25 bp, Homo sapien
tgaggttcctggctggccgccatca

SEQ ID NO: 1267345 - DNA, 25 bp, Homo sapien
aggttcctggctggccgccatcaac

SEQ ID NO: 1267346 - DNA, 25 bp, Homo sapien
tccccgttctttctggcatcctggt

SEQ ID NO: 1267347 - DNA, 25 bp, Homo sapien
ttccccgttctttctggcatcctgg

SEQ ID NO: 1267348 - DNA, 25 bp, Homo sapien
tcttccccgttctttctggcatcct

SEQ ID NO: 1267349 - DNA, 25 bp, Homo sapien
ccttcttccccgttctttctggcat

SEQ ID NO: 1267350 - DNA, 25 bp, Homo sapien
aggaggctgtgacgtctcgacagcc

SEQ ID NO: 1267351 - DNA, 25 bp, Homo sapien
gaagtcagtcgtggatctgtcaggc

SEQ ID NO: 1267352 - DNA, 25 bp, Homo sapien
gtgaactccgctccctgaagtcagt

SEQ ID NO: 1267353 - DNA, 25 bp, Homo sapien
tgcccagagtatcgctgacgctgat

SEQ ID NO: 1267354 - DNA, 25 bp, Homo sapien
taaagctgggatcttgtgggttaga

SEQ ID NO: 1267355 - DNA, 25 bp, Homo sapien
catcaaggggaccatcatcagggac

SEQ ID NO: 1267356 - DNA, 25 bp, Homo sapien
acaggtttagcagggttcttaggag

SEQ ID NO: 1267357 - DNA, 25 bp, Homo sapien
ttcctccatcgaaggcacccaactg

SEQ ID NO: 1267358 - DNA, 25 bp, Homo sapien
tgctgtgcggttttccatttggtct

SEQ ID NO: 1267359 - DNA, 25 bp, Homo sapien
gacctggagcatgacactgagcatt

SEQ ID NO: 1267360 - DNA, 25 bp, Homo sapien
cacacgatagagttcctggctgacc

SEQ ID NO: 1267361 - DNA, 25 bp, Homo sapien
gctggctggctttcccttggtgtga

SEQ ID NO: 1267362 - DNA, 25 bp, Homo sapien
ataacccgggctccaccactcaggg

SEQ ID NO: 1267363 - DNA, 25 bp, Homo sapien
ctccacctccggcctgataacccgg

SEQ ID NO: 1267364 - DNA, 25 bp, Homo sapien
tccggcctgataacccgggctccac

SEQ ID NO: 1267365 - DNA, 25 bp, Homo sapien
tgataacccgggctccaccactcag

SEQ ID NO: 1267366 - DNA, 25 bp, Homo sapien
tggctggggaagctcctggaaccca

SEQ ID NO: 1267367 - DNA, 25 bp, Homo sapien
gaagctcctggaacccaggggcttg

SEQ ID NO: 1267368 - DNA, 25 bp, Homo sapien
ctggctggggaagctcctggaaccc

SEQ ID NO: 1267369 - DNA, 25 bp, Homo sapien
tcctggaacccaggggcttgtggct

SEQ ID NO: 1267370 - DNA, 25 bp, Homo sapien
tcgtgaaggtgacagtcctactgcg

SEQ ID NO: 1267371 - DNA, 25 bp, Homo sapien
gtgacagtcctactgcggacccctg

SEQ ID NO: 1267372 - DNA, 25 bp, Homo sapien
cttgctcgtgaaggtgacagtccta

SEQ ID NO: 1267373 - DNA, 25 bp, Homo sapien
tgaaggtgacagtcctactgcggac

SEQ ID NO: 1267374 - DNA, 25 bp, Homo sapien
cccataggaagatgcggttctgtgc

SEQ ID NO: 1267375 - DNA, 25 bp, Homo sapien
tcagtcccataggaagatgcggttc

SEQ ID NO: 1267376 - DNA, 25 bp, Homo sapien
cagtcccataggaagatgcggttct

SEQ ID NO: 1267377 - DNA, 25 bp, Homo sapien
gtcccataggaagatgcggttctgt

SEQ ID NO: 1267378 - DNA, 25 bp, Homo sapien
ctggcattgggggccgtgctgcagc

SEQ ID NO: 1267379 - DNA, 25 bp, Homo sapien
tggcattgggggccgtgctgcagca

SEQ ID NO: 1267380 - DNA, 25 bp, Homo sapien
ggcattgggggccgtgctgcagcag

SEQ ID NO: 1267381 - DNA, 25 bp, Homo sapien
gcattgggggccgtgctgcagcagg

SEQ ID NO: 1267382 - DNA, 25 bp, Homo sapien
ttggaggtgtttgtgcgtcgagttc

SEQ ID NO: 1267383 - DNA, 25 bp, Homo sapien
agcctgatggagctccatggtcaag

SEQ ID NO: 1267384 - DNA, 25 bp, Homo sapien
cttccccaggacgtcttggaggtgt

SEQ ID NO: 1267385 - DNA, 25 bp, Homo sapien
tcgagttctgtgtgacataggctgg

SEQ ID NO: 1267386 - DNA, 25 bp, Homo sapien
ctctcccctccaccgtccccagtct

SEQ ID NO: 1267387 - DNA, 25 bp, Homo sapien
cccctccacctgcgagcctctcgat

SEQ ID NO: 1267388 - DNA, 25 bp, Homo sapien
tccacctgcgagcctctcgatggcc

SEQ ID NO: 1267389 - DNA, 25 bp, Homo sapien
cctccacctgcgagcctctcgatgg

SEQ ID NO: 1267390 - DNA, 25 bp, Homo sapien
caggtgtccaggaaacccaggtgcc

SEQ ID NO: 1267391 - DNA, 25 bp, Homo sapien
gacacccatgaagtaacttgcagcg

SEQ ID NO: 1267392 - DNA, 25 bp, Homo sapien
cggcagcttgggacacccatgaagt

SEQ ID NO: 1267393 - DNA, 25 bp, Homo sapien
gtaacttgcagcgaccaccttgagg

SEQ ID NO: 1267394 - DNA, 25 bp, Homo sapien
caggctgtctgggcgcagcattcct

SEQ ID NO: 1267395 - DNA, 25 bp, Homo sapien
ccgtccgcatagtgcccatggccag

SEQ ID NO: 1267396 - DNA, 25 bp, Homo sapien
tccccgccccacgggagataagata

SEQ ID NO: 1267397 - DNA, 25 bp, Homo sapien
ccgccccacgggagataagatagag

SEQ ID NO: 1267398 - DNA, 25 bp, Homo sapien
ctgctgccccgataacctggaggtc

SEQ ID NO: 1267399 - DNA, 25 bp, Homo sapien
gtgctgacgtggcaccgtgcttaat

SEQ ID NO: 1267400 - DNA, 25 bp, Homo sapien
cccagtcggcgcagccactgggtgc

SEQ ID NO: 1267401 - DNA, 25 bp, Homo sapien
taatgaggtcatcgccgaagctgct

SEQ ID NO: 1267402 - DNA, 25 bp, Homo sapien
acgttttgggggcatgttcaccagc

SEQ ID NO: 1267403 - DNA, 25 bp, Homo sapien
gagagcgggaactgtctgcagagct

SEQ ID NO: 1267404 - DNA, 25 bp, Homo sapien
caggccaagagatccccgtgtcctg

SEQ ID NO: 1267405 - DNA, 25 bp, Homo sapien
tcctgggaatggccgctggctcgct

SEQ ID NO: 1267406 - DNA, 25 bp, Homo sapien
ggcagcatgaccagctcagacagcc

SEQ ID NO: 1267407 - DNA, 25 bp, Homo sapien
ctgggcagcatgaccagctcagaca

SEQ ID NO: 1267408 - DNA, 25 bp, Homo sapien
cgagggaatggggagcacagtgtga

SEQ ID NO: 1267409 - DNA, 25 bp, Homo sapien
agaggagacactcctgcgagggaat

SEQ ID NO: 1267410 - DNA, 25 bp, Homo sapien
tgccagctccaaggctacgacagag

SEQ ID NO: 1267411 - DNA, 25 bp, Homo sapien
gcactggccataggtggacaaggtc

SEQ ID NO: 1267412 - DNA, 25 bp, Homo sapien
ctttcctcttcgctgagtcagtgcc

SEQ ID NO: 1267413 - DNA, 25 bp, Homo sapien
ggccatgggagctcagaaccacctt

SEQ ID NO: 1267414 - DNA, 25 bp, Homo sapien
cacccagacctgaaggtgtgccggg

SEQ ID NO: 1267415 - DNA, 25 bp, Homo sapien
agaacacccagacctgaaggtgtgc

SEQ ID NO: 1267416 - DNA, 25 bp, Homo sapien
tcatagtgctgaggattggatcgtg

SEQ ID NO: 1267417 - DNA, 25 bp, Homo sapien
caggcctctcgccttgagaccaggc

SEQ ID NO: 1267418 - DNA, 25 bp, Homo sapien
tcacgaattaattgcgcctgctctt

SEQ ID NO: 1267419 - DNA, 25 bp, Homo sapien
tgacctcacgaattaattgcgcctg

SEQ ID NO: 1267420 - DNA, 25 bp, Homo sapien
aattgcgcctgctcttccaacacag

SEQ ID NO: 1267421 - DNA, 25 bp, Homo sapien
catctgacctcacgaattaattgcg

SEQ ID NO: 1267422 - DNA, 25 bp, Homo sapien
gcctcagaactatcagggtctccct

SEQ ID NO: 1267423 - DNA, 25 bp, Homo sapien
gaactatcagggtctcccttccgac

SEQ ID NO: 1267424 - DNA, 25 bp, Homo sapien
ctcccttccgaccagggcctgaggc

SEQ ID NO: 1267425 - DNA, 25 bp, Homo sapien
aaaacagcctcagaactatcagggt

SEQ ID NO: 1267426 - DNA, 25 bp, Homo sapien
gcagtgtctgcggaacagcgttcca

SEQ ID NO: 1267427 - DNA, 25 bp, Homo sapien
gcgttccattgagcgcaggaaaggc

SEQ ID NO: 1267428 - DNA, 25 bp, Homo sapien
ccacttgtgtgtgctggagcgagga

SEQ ID NO: 1267429 - DNA, 25 bp, Homo sapien
actgactaacaacggcggcagtgtc

SEQ ID NO: 1267430 - DNA, 25 bp, Homo sapien
tctctggggatgacgtgttgaagcc

SEQ ID NO: 1267431 - DNA, 25 bp, Homo sapien
cagcaggcagaacgacccctgaaag

SEQ ID NO: 1267432 - DNA, 25 bp, Homo sapien
gttgaagccgtccaggacccagagc

SEQ ID NO: 1267433 - DNA, 25 bp, Homo sapien
agttgtgtgtagcacaagataattg

SEQ ID NO: 1267434 - DNA, 25 bp, Homo sapien
tggggcataacaccggcccaactgt

SEQ ID NO: 1267435 - DNA, 25 bp, Homo sapien
ggaatcggaaggatggtgttgtggg

SEQ ID NO: 1267436 - DNA, 25 bp, Homo sapien
gggcttttggagaagaccccacatg

SEQ ID NO: 1267437 - DNA, 25 bp, Homo sapien
actgtgagctcctcggatcgggagc

SEQ ID NO: 1267438 - DNA, 25 bp, Homo sapien
taaagagtaggagtcatcagaactc

SEQ ID NO: 1267439 - DNA, 25 bp, Homo sapien
aggaagcagggtcgcctgggactgc

SEQ ID NO: 1267440 - DNA, 25 bp, Homo sapien
aaccagtggaagacggagaagagga

SEQ ID NO: 1267441 - DNA, 25 bp, Homo sapien
cctttctaaagagtaggagtcatca

SEQ ID NO: 1267442 - DNA, 25 bp, Homo sapien
cagctcagcgtggtctcgggatttg

SEQ ID NO: 1267443 - DNA, 25 bp, Homo sapien
ggatttgaagacaccacagcgtgca

SEQ ID NO: 1267444 - DNA, 25 bp, Homo sapien
tgtagcacactctcagctggcccca

SEQ ID NO: 1267445 - DNA, 25 bp, Homo sapien
caggaacgagccctctttccagctc

SEQ ID NO: 1267446 - DNA, 25 bp, Homo sapien
tggtccctggatgctcggggccgag

SEQ ID NO: 1267447 - DNA, 25 bp, Homo sapien
cattcgggcagtttgattttcttgg

SEQ ID NO: 1267448 - DNA, 25 bp, Homo sapien
gggccgagggatcccggtgagcacg

SEQ ID NO: 1267449 - DNA, 25 bp, Homo sapien
agatcctgcattcgggcagtttgat

SEQ ID NO: 1267450 - DNA, 25 bp, Homo sapien
acgtaaaagtaaagtcatcatctgc

SEQ ID NO: 1267451 - DNA, 25 bp, Homo sapien
ttaacgtaaaagtaaagtcatcatc

SEQ ID NO: 1267452 - DNA, 25 bp, Homo sapien
aagtaaagtcatcatctgcagagag

SEQ ID NO: 1267453 - DNA, 25 bp, Homo sapien
taaaagtaaagtcatcatctgcaga

SEQ ID NO: 1267454 - DNA, 25 bp, Homo sapien
tgtgtcatccagatatccggcattg

SEQ ID NO: 1267455 - DNA, 25 bp, Homo sapien
tccgttcttccacatccgctgggca

SEQ ID NO: 1267456 - DNA, 25 bp, Homo sapien
ccagatatccggcattgcagtttcc

SEQ ID NO: 1267457 - DNA, 25 bp, Homo sapien
cagcatctccgttcttccacatccg

SEQ ID NO: 1267458 - DNA, 25 bp, Homo sapien
ccagccggactgtggctgagctcca

SEQ ID NO: 1267459 - DNA, 25 bp, Homo sapien
attcgttccagttcacgggccctgg

SEQ ID NO: 1267460 - DNA, 25 bp, Homo sapien
cacaaccagccggactgtggctgag

SEQ ID NO: 1267461 - DNA, 25 bp, Homo sapien
gaaaggatgggctgattcgttccag

SEQ ID NO: 1267462 - DNA, 25 bp, Homo sapien
atatcggccagcacgaggcaaacct

SEQ ID NO: 1267463 - DNA, 25 bp, Homo sapien
cctggagggagtgtggtatatcggc

SEQ ID NO: 1267464 - DNA, 25 bp, Homo sapien
gagtgtggtatatcggccagcacga

SEQ ID NO: 1267465 - DNA, 25 bp, Homo sapien
cagcacgaggcaaacctctcaggag

SEQ ID NO: 1267466 - DNA, 25 bp, Homo sapien
gcttgtacttcttgactatccggaa

SEQ ID NO: 1267467 - DNA, 25 bp, Homo sapien
caggtacggccccattctaaagagc

SEQ ID NO: 1267468 - DNA, 25 bp, Homo sapien
gcagagaaccttcggtgtccgggca

SEQ ID NO: 1267469 - DNA, 25 bp, Homo sapien
cagtggcccgaagtggccgccacag

SEQ ID NO: 1267470 - DNA, 25 bp, Homo sapien
accccgcctgcatgtagccacagcc

SEQ ID NO: 1267471 - DNA, 25 bp, Homo sapien
gcccaccccgcctgcatgtagccac

SEQ ID NO: 1267472 - DNA, 25 bp, Homo sapien
cagttcctcagagcccaccccgcct

SEQ ID NO: 1267473 - DNA, 25 bp, Homo sapien
ccagttcctcagagcccaccccgcc

SEQ ID NO: 1267474 - DNA, 25 bp, Homo sapien
cacagcatcccggtgtcttggtgtt

SEQ ID NO: 1267475 - DNA, 25 bp, Homo sapien
gtgcaccccaggagcgccacagcat

SEQ ID NO: 1267476 - DNA, 25 bp, Homo sapien
gagggctgtgcgctccctcagagct

SEQ ID NO: 1267477 - DNA, 25 bp, Homo sapien
gcatcccggtgtcttggtgtttagg

SEQ ID NO: 1267478 - DNA, 25 bp, Homo sapien
gctgtcagaggtggactccatggcc

SEQ ID NO: 1267479 - DNA, 25 bp, Homo sapien
ccgccagctcctggctgtcagaggt

SEQ ID NO: 1267480 - DNA, 25 bp, Homo sapien
catggccatgggcttctggggagcc

SEQ ID NO: 1267481 - DNA, 25 bp, Homo sapien
atggccatgggcttctggggagcct

SEQ ID NO: 1267482 - DNA, 25 bp, Homo sapien
ggtgcacatggctgcgaccttggac

SEQ ID NO: 1267483 - DNA, 25 bp, Homo sapien
cagtgtttcttccaccgatccctga

SEQ ID NO: 1267484 - DNA, 25 bp, Homo sapien
acaccacctccctgagtgttcctgt

SEQ ID NO: 1267485 - DNA, 25 bp, Homo sapien
ggtacagtaaggagcctgtgttcag

SEQ ID NO: 1267486 - DNA, 25 bp, Homo sapien
tggattccagaggacgtgaaatctt

SEQ ID NO: 1267487 - DNA, 25 bp, Homo sapien
cctccctctggtccttgagtcggcc

SEQ ID NO: 1267488 - DNA, 25 bp, Homo sapien
gattccagaggacgtgaaatcttgt

SEQ ID NO: 1267489 - DNA, 25 bp, Homo sapien
ttccagaggacgtgaaatcttgtgg

SEQ ID NO: 1267490 - DNA, 25 bp, Homo sapien
cctttctggaatcagagacagtaca

SEQ ID NO: 1267491 - DNA, 25 bp, Homo sapien
acagtacaggcccaagaagccaggc

SEQ ID NO: 1267492 - DNA, 25 bp, Homo sapien
tgccctttctggaatcagagacagt

SEQ ID NO: 1267493 - DNA, 25 bp, Homo sapien
gagacagtacaggcccaagaagcca

SEQ ID NO: 1267494 - DNA, 25 bp, Homo sapien
accacggcccagggccacttcagga

SEQ ID NO: 1267495 - DNA, 25 bp, Homo sapien
aaccacggcccagggccacttcagg

SEQ ID NO: 1267496 - DNA, 25 bp, Homo sapien
gacctcttgagaggtgaccgggccc

SEQ ID NO: 1267497 - DNA, 25 bp, Homo sapien
ccatgaatttgttcctgggcccggc

SEQ ID NO: 1267498 - DNA, 25 bp, Homo sapien
cctccacgttctcatctggcaatga

SEQ ID NO: 1267499 - DNA, 25 bp, Homo sapien
gagccagaggccacattgggccatg

SEQ ID NO: 1267500 - DNA, 25 bp, Homo sapien
cttccgaggccaagggtcccgctgc

SEQ ID NO: 1267501 - DNA, 25 bp, Homo sapien
ccagatcacggccaagggcacactg

SEQ ID NO: 1267502 - DNA, 25 bp, Homo sapien
cagatcacggccaagggcacactgg

SEQ ID NO: 1267503 - DNA, 25 bp, Homo sapien
agatcacggccaagggcacactggc

SEQ ID NO: 1267504 - DNA, 25 bp, Homo sapien
acggaacggctgtagggctctcaaa

SEQ ID NO: 1267505 - DNA, 25 bp, Homo sapien
gccccaatctgcatagcgccctggg

SEQ ID NO: 1267506 - DNA, 25 bp, Homo sapien
acgacctgtagcacccctggattga

SEQ ID NO: 1267507 - DNA, 25 bp, Homo sapien
tccacagagtgttccgcgcaggcat

SEQ ID NO: 1267508 - DNA, 25 bp, Homo sapien
tccgactgtggctccaagtcccatg

SEQ ID NO: 1267509 - DNA, 25 bp, Homo sapien
catcccaggagatctggctcggtgt

SEQ ID NO: 1267510 - DNA, 25 bp, Homo sapien
tcagcagtaatagcgattaattccg

SEQ ID NO: 1267511 - DNA, 25 bp, Homo sapien
gcgccgcggatcagaggagggaggc

SEQ ID NO: 1267512 - DNA, 25 bp, Homo sapien
acacactactgacagaggccgtgca

SEQ ID NO: 1267513 - DNA, 25 bp, Homo sapien
tgacgccccataagggaacttcaca

SEQ ID NO: 1267514 - DNA, 25 bp, Homo sapien
taagggaacttcacacactactgac

SEQ ID NO: 1267515 - DNA, 25 bp, Homo sapien
gaacttcacacactactgacagagg

SEQ ID NO: 1267516 - DNA, 25 bp, Homo sapien
tcctccttcgtgcagttcctgtctg

SEQ ID NO: 1267517 - DNA, 25 bp, Homo sapien
tgtcctccttcgtgcagttcctgtc

SEQ ID NO: 1267518 - DNA, 25 bp, Homo sapien
tgcctgtcctccttcgtgcagttcc

SEQ ID NO: 1267519 - DNA, 25 bp, Homo sapien
cctgtcctccttcgtgcagttcctg

SEQ ID NO: 1267520 - DNA, 25 bp, Homo sapien
cttgggagtagcagacactgggcat

SEQ ID NO: 1267521 - DNA, 25 bp, Homo sapien
ctgccgccagacactcccggaccga

SEQ ID NO: 1267522 - DNA, 25 bp, Homo sapien
ccgccagacactcccggaccgaaga

SEQ ID NO: 1267523 - DNA, 25 bp, Homo sapien
cactcccggaccgaagacacagggt

SEQ ID NO: 1267524 - DNA, 25 bp, Homo sapien
cagacactcccggaccgaagacaca

SEQ ID NO: 1267525 - DNA, 25 bp, Homo sapien
caacaccaccacggggaccgacctg

SEQ ID NO: 1267526 - DNA, 25 bp, Homo sapien
gaggacgtcaacaccaccacgggga

SEQ ID NO: 1267527 - DNA, 25 bp, Homo sapien
aaagacagccaacggagctgcctcg

SEQ ID NO: 1267528 - DNA, 25 bp, Homo sapien
aggtggccgtccaaagacagccaac

SEQ ID NO: 1267529 - DNA, 25 bp, Homo sapien
caacggagctgcctcgcagaatcag

SEQ ID NO: 1267530 - DNA, 25 bp, Homo sapien
gcctcgcagaatcagccagtgggca

SEQ ID NO: 1267531 - DNA, 25 bp, Homo sapien
tggcgagacacagcttgagaacaga

SEQ ID NO: 1267532 - DNA, 25 bp, Homo sapien
gtcgtcacgtcgctcttcctgcggg

SEQ ID NO: 1267533 - DNA, 25 bp, Homo sapien
ggagcaatcccagcggatcgctccg

SEQ ID NO: 1267534 - DNA, 25 bp, Homo sapien
cacctgtgcctgagactccggatgg

SEQ ID NO: 1267535 - DNA, 25 bp, Homo sapien
gctcaggccttctcacgcgtttcca

SEQ ID NO: 1267536 - DNA, 25 bp, Homo sapien
tttccacaacatcccctgggtcaga

SEQ ID NO: 1267537 - DNA, 25 bp, Homo sapien
agaagagccagctggcgtgtcggga

SEQ ID NO: 1267538 - DNA, 25 bp, Homo sapien
cagctggcgtgtcgggaaggatcca

SEQ ID NO: 1267539 - DNA, 25 bp, Homo sapien
ttggtctccggatcccccagtccca

SEQ ID NO: 1267540 - DNA, 25 bp, Homo sapien
tggtctccggatcccccagtcccat

SEQ ID NO: 1267541 - DNA, 25 bp, Homo sapien
caatgctccaatgaatttatacatg

SEQ ID NO: 1267542 - DNA, 25 bp, Homo sapien
ttgatatgcaataaatctgtgtgct

SEQ ID NO: 1267543 - DNA, 25 bp, Homo sapien
gctgtagaataggactgtataccaa

SEQ ID NO: 1267544 - DNA, 25 bp, Homo sapien
ttttctaagcctcggtgcccgcgag

SEQ ID NO: 1267545 - DNA, 25 bp, Homo sapien
cctccccataatggcccttgcctgg

SEQ ID NO: 1267546 - DNA, 25 bp, Homo sapien
gcaatcgaatgacagtacccaacct

SEQ ID NO: 1267547 - DNA, 25 bp, Homo sapien
ggctccaggcgagtgaaaacccttc

SEQ ID NO: 1267548 - DNA, 25 bp, Homo sapien
cccatctttgttcagcctggcaaac

SEQ ID NO: 1267549 - DNA, 25 bp, Homo sapien
tcctcgcataaaagacggaggaaaa

SEQ ID NO: 1267550 - DNA, 25 bp, Homo sapien
tcctgcgccggttcctcgcataaaa

SEQ ID NO: 1267551 - DNA, 25 bp, Homo sapien
cggttcctcgcataaaagacggagg

SEQ ID NO: 1267552 - DNA, 25 bp, Homo sapien
gactttgtcttcctgcgccggttcc

SEQ ID NO: 1267553 - DNA, 25 bp, Homo sapien
atcccactcacagccgcgcccttgg

SEQ ID NO: 1267554 - DNA, 25 bp, Homo sapien
ttgctcctcaaacccaaccttcttc

SEQ ID NO: 1267555 - DNA, 25 bp, Homo sapien
ttcccagctgcctacgggctggaga

SEQ ID NO: 1267556 - DNA, 25 bp, Homo sapien
ccagcagaggcgtctctgtcctcca

SEQ ID NO: 1267557 - DNA, 25 bp, Homo sapien
gcaggaaaggagctctgctcccgca

SEQ ID NO: 1267558 - DNA, 25 bp, Homo sapien
cacactggtgctcggccagagcgct

SEQ ID NO: 1267559 - DNA, 25 bp, Homo sapien
gcacactggtgctcggccagagcgc

SEQ ID NO: 1267560 - DNA, 25 bp, Homo sapien
ctgctcccgcagatagaggtgtgct

SEQ ID NO: 1267561 - DNA, 25 bp, Homo sapien
gtgtctcctcaacccgcaacgggat

SEQ ID NO: 1267562 - DNA, 25 bp, Homo sapien
aaaatgccaagtgacagccccagag

SEQ ID NO: 1267563 - DNA, 25 bp, Homo sapien
tgtggtgtctcctcaacccgcaacg

SEQ ID NO: 1267564 - DNA, 25 bp, Homo sapien
gcaacgggatctcacggccgcccag

SEQ ID NO: 1267565 - DNA, 25 bp, Homo sapien
gcctggggtcagtgaggggacgctg

SEQ ID NO: 1267566 - DNA, 25 bp, Homo sapien
tgaggggacgctggtagaagctgac

SEQ ID NO: 1267567 - DNA, 25 bp, Homo sapien
ggcctggggtcagtgaggggacgct

SEQ ID NO: 1267568 - DNA, 25 bp, Homo sapien
cctggggtcagtgaggggacgctgg

SEQ ID NO: 1267569 - DNA, 25 bp, Homo sapien
agcccagtgtggatgttcacatgga

SEQ ID NO: 1267570 - DNA, 25 bp, Homo sapien
aaagcccagtgtggatgttcacatg

SEQ ID NO: 1267571 - DNA, 25 bp, Homo sapien
ggaggcctttggcaacaggcctttc

SEQ ID NO: 1267572 - DNA, 25 bp, Homo sapien
aagcccagtgtggatgttcacatgg

SEQ ID NO: 1267573 - DNA, 25 bp, Homo sapien
ggcttccaagaatccagagggccgg

SEQ ID NO: 1267574 - DNA, 25 bp, Homo sapien
tcttggctgtctttggccgcctggc

SEQ ID NO: 1267575 - DNA, 25 bp, Homo sapien
gagggccgggcctttctacagcaaa

SEQ ID NO: 1267576 - DNA, 25 bp, Homo sapien
ccagagtgctttgcgccctcttggc

SEQ ID NO: 1267577 - DNA, 25 bp, Homo sapien
gacaggacaggacccggcgctggaa

SEQ ID NO: 1267578 - DNA, 25 bp, Homo sapien
aggacaggacccggcgctggaagct

SEQ ID NO: 1267579 - DNA, 25 bp, Homo sapien
aggacaggacaggacccggcgctgg

SEQ ID NO: 1267580 - DNA, 25 bp, Homo sapien
gaagctgcaccgccagcgcgccgcc

SEQ ID NO: 1267581 - DNA, 25 bp, Homo sapien
tgaatcaaggcctgaatcttctctg

SEQ ID NO: 1267582 - DNA, 25 bp, Homo sapien
ccggcagagtcaggaagcgcaggcc

SEQ ID NO: 1267583 - DNA, 25 bp, Homo sapien
ggtggctgtcctgctatggcagtgg

SEQ ID NO: 1267584 - DNA, 25 bp, Homo sapien
ctgtcctgctatggcagtggccagg

SEQ ID NO: 1267585 - DNA, 25 bp, Homo sapien
ggctgccagtgaggtgtgggcccag

SEQ ID NO: 1267586 - DNA, 25 bp, Homo sapien
tggccgccccagctaggccgggaca

SEQ ID NO: 1267587 - DNA, 25 bp, Homo sapien
cagagtggacactgctgggtccaga

SEQ ID NO: 1267588 - DNA, 25 bp, Homo sapien
aggcaccacctaacctttcctgcgg

SEQ ID NO: 1267589 - DNA, 25 bp, Homo sapien
tgctgaggccttgcgcccaagccct

SEQ ID NO: 1267590 - DNA, 25 bp, Homo sapien
gggcctccgatgaccggactgccgc

SEQ ID NO: 1267591 - DNA, 25 bp, Homo sapien
gatgaccggactgccgccggctcca

SEQ ID NO: 1267592 - DNA, 25 bp, Homo sapien
tccgatgaccggactgccgccggct

SEQ ID NO: 1267593 - DNA, 25 bp, Homo sapien
cccggggcctccgatgaccggactg

SEQ ID NO: 1267594 - DNA, 25 bp, Homo sapien
gttttccgtggagataatcctgtcc

SEQ ID NO: 1267595 - DNA, 25 bp, Homo sapien
caaccttgctgaatccttatcatca

SEQ ID NO: 1267596 - DNA, 25 bp, Homo sapien
catcagctatagcaatgtctgttag

SEQ ID NO: 1267597 - DNA, 25 bp, Homo sapien
tggtgttgaagcactatcgatgtta

SEQ ID NO: 1267598 - DNA, 25 bp, Homo sapien
tgtaaagtgcacgttcaaatcaccc

SEQ ID NO: 1267599 - DNA, 25 bp, Homo sapien
tttttgtaaagtgcacgttcaaatc

SEQ ID NO: 1267600 - DNA, 25 bp, Homo sapien
taaagtgcacgttcaaatcacccat

SEQ ID NO: 1267601 - DNA, 25 bp, Homo sapien
tttgtaaagtgcacgttcaaatcac

SEQ ID NO: 1267602 - DNA, 25 bp, Homo sapien
catgggatgtctagtgatcaaatca

SEQ ID NO: 1267603 - DNA, 25 bp, Homo sapien
atgttttgatacatgggatgtctag

SEQ ID NO: 1267604 - DNA, 25 bp, Homo sapien
gatattcatcggatacacagtgatg

SEQ ID NO: 1267605 - DNA, 25 bp, Homo sapien
ttgtagatattcatcggatacacag

SEQ ID NO: 1267606 - DNA, 25 bp, Homo sapien
tcatctcaagcgtttattatgtgtg

SEQ ID NO: 1267607 - DNA, 25 bp, Homo sapien
tgtaaccgttaacattaggatctgt

SEQ ID NO: 1267608 - DNA, 25 bp, Homo sapien
caggagtttgtttttccgtcgtcat

SEQ ID NO: 1267609 - DNA, 25 bp, Homo sapien
tcctccttcttgctgcttgaaacta

SEQ ID NO: 1267610 - DNA, 25 bp, Homo sapien
tgtgtcttcactgagcgggatgagt

SEQ ID NO: 1267611 - DNA, 25 bp, Homo sapien
cctgaccgccgttggatagctgaga

SEQ ID NO: 1267612 - DNA, 25 bp, Homo sapien
tttcctccggatgggcagaagctcg

SEQ ID NO: 1267613 - DNA, 25 bp, Homo sapien
cagaagctcggcctgccttatggct

SEQ ID NO: 1267614 - DNA, 25 bp, Homo sapien
catttcaaggtatgcgttttccaca

SEQ ID NO: 1267615 - DNA, 25 bp, Homo sapien
tctgtagaaaaatggccgaggcctt

SEQ ID NO: 1267616 - DNA, 25 bp, Homo sapien
caaactctgaggatggaacatcaca

SEQ ID NO: 1267617 - DNA, 25 bp, Homo sapien
tcttctggctggagaacgtctctaa

SEQ ID NO: 1267618 - DNA, 25 bp, Homo sapien
tccaagagcgacaggttgctgggct

SEQ ID NO: 1267619 - DNA, 25 bp, Homo sapien
taaatacgggctgggcgacttccag

SEQ ID NO: 1267620 - DNA, 25 bp, Homo sapien
agctctgggcccgtgaagtgtcctt

SEQ ID NO: 1267621 - DNA, 25 bp, Homo sapien
ggtttacatggtaccggagccagca

SEQ ID NO: 1267622 - DNA, 25 bp, Homo sapien
tgggactggagaggcgggctccacg

SEQ ID NO: 1267623 - DNA, 25 bp, Homo sapien
gtcccctctggctgggactggagag

SEQ ID NO: 1267624 - DNA, 25 bp, Homo sapien
tcagtggtcaccaaaggccagggtc

SEQ ID NO: 1267625 - DNA, 25 bp, Homo sapien
ggcgggctccacgggactgcctcta

SEQ ID NO: 1267626 - DNA, 25 bp, Homo sapien
tgggtctgctggaggcgggcagtgt

SEQ ID NO: 1267627 - DNA, 25 bp, Homo sapien
caccgctccgggatgtgggtctgct

SEQ ID NO: 1267628 - DNA, 25 bp, Homo sapien
tcgctggtccaccgctccgggatgt

SEQ ID NO: 1267629 - DNA, 25 bp, Homo sapien
ctagtgcctcgctggtccaccgctc

SEQ ID NO: 1267630 - DNA, 25 bp, Homo sapien
aaggagaaaagagggccagtccagg

SEQ ID NO: 1267631 - DNA, 25 bp, Homo sapien
gagaaaagagggccagtccagggtg

SEQ ID NO: 1267632 - DNA, 25 bp, Homo sapien
agaaaagagggccagtccagggtgg

SEQ ID NO: 1267633 - DNA, 25 bp, Homo sapien
aggagaaaagagggccagtccaggg

SEQ ID NO: 1267634 - DNA, 25 bp, Homo sapien
ctgagccctgggctaaggacgggtt

SEQ ID NO: 1267635 - DNA, 25 bp, Homo sapien
tgagccctgggctaaggacgggttc

SEQ ID NO: 1267636 - DNA, 25 bp, Homo sapien
ggcacccagcgcaggtgccggcagc

SEQ ID NO: 1267637 - DNA, 25 bp, Homo sapien
cagtaccacagatgaccactagatg

SEQ ID NO: 1267638 - DNA, 25 bp, Homo sapien
ccggcacccagcgcaggtgccggca

SEQ ID NO: 1267639 - DNA, 25 bp, Homo sapien
gtaccacagatgaccactagatgcc

SEQ ID NO: 1267640 - DNA, 25 bp, Homo sapien
cccacccccgcagtcacagtgcagg

SEQ ID NO: 1267641 - DNA, 25 bp, Homo sapien
ggcccaaactggccccttctgcaat

SEQ ID NO: 1267642 - DNA, 25 bp, Homo sapien
ttcccggcacgtgggccccatgtag

SEQ ID NO: 1267643 - DNA, 25 bp, Homo sapien
tgcccactgacagggtcgcagtcag

SEQ ID NO: 1267644 - DNA, 25 bp, Homo sapien
tgcgggagctaagaccttgggcctc

SEQ ID NO: 1267645 - DNA, 25 bp, Homo sapien
aggagccagtgttcagggatgcccc

SEQ ID NO: 1267646 - DNA, 25 bp, Homo sapien
ttcctcagctacattctgcagccag

SEQ ID NO: 1267647 - DNA, 25 bp, Homo sapien
tgaggagtaaacagtccctgccctg

SEQ ID NO: 1267648 - DNA, 25 bp, Homo sapien
ccaggttacaggtggctcctgagcg

SEQ ID NO: 1267649 - DNA, 25 bp, Homo sapien
aggttacaggtggctcctgagcgcc

SEQ ID NO: 1267650 - DNA, 25 bp, Homo sapien
caggttacaggtggctcctgagcgc

SEQ ID NO: 1267651 - DNA, 25 bp, Homo sapien
gggtgcccccccgtcacagtcacag

SEQ ID NO: 1267652 - DNA, 25 bp, Homo sapien
cgtcacagtcacagcgctggtggca

SEQ ID NO: 1267653 - DNA, 25 bp, Homo sapien
caaaggcagagaccggtgacagggt

SEQ ID NO: 1267654 - DNA, 25 bp, Homo sapien
tggtggcagccctctccaaatgaac

SEQ ID NO: 1267655 - DNA, 25 bp, Homo sapien
acagaagtggccgtggaagccggca

SEQ ID NO: 1267656 - DNA, 25 bp, Homo sapien
ccctctcacagaagtggccgtggaa

SEQ ID NO: 1267657 - DNA, 25 bp, Homo sapien
tgttgacaccagcacaacccctggc

SEQ ID NO: 1267658 - DNA, 25 bp, Homo sapien
catcggccactgatggggtcgcagg

SEQ ID NO: 1267659 - DNA, 25 bp, Homo sapien
tgaaggacgccggttaccacgagac

SEQ ID NO: 1267660 - DNA, 25 bp, Homo sapien
gcagaaatgtccagtttgcccagag

SEQ ID NO: 1267661 - DNA, 25 bp, Homo sapien
ttaccacgagacaagggcacacggt

SEQ ID NO: 1267662 - DNA, 25 bp, Homo sapien
agagtgagtaaaacccgccaatcca

SEQ ID NO: 1267663 - DNA, 25 bp, Homo sapien
cggcaggtgcccgtggcaggctcac

SEQ ID NO: 1267664 - DNA, 25 bp, Homo sapien
cacacgtgctgttgttgtggcagga

SEQ ID NO: 1267665 - DNA, 25 bp, Homo sapien
gcaggctcacacgtgctgttgttgt

SEQ ID NO: 1267666 - DNA, 25 bp, Homo sapien
gcaggcggctccgtagcgcccaggg

SEQ ID NO: 1267667 - DNA, 25 bp, Homo sapien
gcccagccctatggcagcccagggc

SEQ ID NO: 1267668 - DNA, 25 bp, Homo sapien
gggcagtccttcggcaccagccttg

SEQ ID NO: 1267669 - DNA, 25 bp, Homo sapien
gcagtccttcggcaccagccttgcc

SEQ ID NO: 1267670 - DNA, 25 bp, Homo sapien
tgcccagccctatggcagcccaggg

SEQ ID NO: 1267671 - DNA, 25 bp, Homo sapien
ggagcagctgccgttgctggcgtgg

SEQ ID NO: 1267672 - DNA, 25 bp, Homo sapien
caggagcaggtgtgctcgcagccca

SEQ ID NO: 1267673 - DNA, 25 bp, Homo sapien
tggcgtggcacaggcccccatttct

SEQ ID NO: 1267674 - DNA, 25 bp, Homo sapien
cacgccaaaccggttctgggggcag

SEQ ID NO: 1267675 - DNA, 25 bp, Homo sapien
aggcaggtgccggtcacagggtcgc

SEQ ID NO: 1267676 - DNA, 25 bp, Homo sapien
acagcggacgccggctctccccggg

SEQ ID NO: 1267677 - DNA, 25 bp, Homo sapien
gtgccggtcacagggtcgcaggccg

SEQ ID NO: 1267678 - DNA, 25 bp, Homo sapien
cagaggcaggtgccggtcacagggt

SEQ ID NO: 1267679 - DNA, 25 bp, Homo sapien
cctggagacacaggaggcgccactc

SEQ ID NO: 1267680 - DNA, 25 bp, Homo sapien
ggagacacaggaggcgccactcagc

SEQ ID NO: 1267681 - DNA, 25 bp, Homo sapien
tggagacacaggaggcgccactcag

SEQ ID NO: 1267682 - DNA, 25 bp, Homo sapien
gacacaggaggcgccactcagcact

SEQ ID NO: 1267683 - DNA, 25 bp, Homo sapien
gcaggcccccgtggccgcatcacag

SEQ ID NO: 1267684 - DNA, 25 bp, Homo sapien
cgcatcacaggagcccccgttgaga

SEQ ID NO: 1267685 - DNA, 25 bp, Homo sapien
agcctggcccataccgcccgggcgg

SEQ ID NO: 1267686 - DNA, 25 bp, Homo sapien
gttgcagtccgtcccgaggaaccca

SEQ ID NO: 1267687 - DNA, 25 bp, Homo sapien
gacactggcacatctgcgcacagtc

SEQ ID NO: 1267688 - DNA, 25 bp, Homo sapien
gcaggccgggttctcaccgggacac

SEQ ID NO: 1267689 - DNA, 25 bp, Homo sapien
ctccccaaagctgccgggtgggcag

SEQ ID NO: 1267690 - DNA, 25 bp, Homo sapien
agcagcacatgagcaggtcccggtg

SEQ ID NO: 1267691 - DNA, 25 bp, Homo sapien
cacaggcctctccaaaccagccccg

SEQ ID NO: 1267692 - DNA, 25 bp, Homo sapien
gcacaggcctctccaaaccagcccc

SEQ ID NO: 1267693 - DNA, 25 bp, Homo sapien
tgagggctgcggaggcttctaggag

SEQ ID NO: 1267694 - DNA, 25 bp, Homo sapien
tgcagaaagatgagggctgcggagg

SEQ ID NO: 1267695 - DNA, 25 bp, Homo sapien
gaaagatgagggctgcggaggcttc

SEQ ID NO: 1267696 - DNA, 25 bp, Homo sapien
cggaggcttctaggaggggcccgtg

SEQ ID NO: 1267697 - DNA, 25 bp, Homo sapien
gacccacccaatgctggctgaactg

SEQ ID NO: 1267698 - DNA, 25 bp, Homo sapien
agcaggtgctgtgggtacgacccac

SEQ ID NO: 1267699 - DNA, 25 bp, Homo sapien
gtgctcaccattctcacacctggag

SEQ ID NO: 1267700 - DNA, 25 bp, Homo sapien
aggccccggtggcaaggtggcaggg

SEQ ID NO: 1267701 - DNA, 25 bp, Homo sapien
ggcccgaatgtgcccttggcacagg

SEQ ID NO: 1267702 - DNA, 25 bp, Homo sapien
gaggcccgaatgtgcccttggcaca

SEQ ID NO: 1267703 - DNA, 25 bp, Homo sapien
agtgaggcccgaatgtgcccttggc

SEQ ID NO: 1267704 - DNA, 25 bp, Homo sapien
tgaggcccgaatgtgcccttggcac

SEQ ID NO: 1267705 - DNA, 25 bp, Homo sapien
aaccgccgctgtgccggcagccagc

SEQ ID NO: 1267706 - DNA, 25 bp, Homo sapien
aggcagcggcccgtgtgcgggtcac

SEQ ID NO: 1267707 - DNA, 25 bp, Homo sapien
acacaggcccccgttgaggcaaccg

SEQ ID NO: 1267708 - DNA, 25 bp, Homo sapien
gcccgtgtgcgggtcacacaggccc

SEQ ID NO: 1267709 - DNA, 25 bp, Homo sapien
cagttgtcgccgtacaggccggcag

SEQ ID NO: 1267710 - DNA, 25 bp, Homo sapien
agaggcaggaatgccgacagttgtc

SEQ ID NO: 1267711 - DNA, 25 bp, Homo sapien
agggtcacaggtccctccgttctgg

SEQ ID NO: 1267712 - DNA, 25 bp, Homo sapien
gagacagggtcacaggtccctccgt

SEQ ID NO: 1267713 - DNA, 25 bp, Homo sapien
gcctggctgcaattgtgcccgtagg

SEQ ID NO: 1267714 - DNA, 25 bp, Homo sapien
gacagggtcacaggaggccccgtta

SEQ ID NO: 1267715 - DNA, 25 bp, Homo sapien
tggctgcaattgtgcccgtaggtgt

SEQ ID NO: 1267716 - DNA, 25 bp, Homo sapien
aggccccgttaaagcaggcacaggc

SEQ ID NO: 1267717 - DNA, 25 bp, Homo sapien
ctccggcggtgcagttgcaggcact

SEQ ID NO: 1267718 - DNA, 25 bp, Homo sapien
cagttgcaggcactgcgacagtcca

SEQ ID NO: 1267719 - DNA, 25 bp, Homo sapien
gaggcaggagccattcacggcatca

SEQ ID NO: 1267720 - DNA, 25 bp, Homo sapien
agtccaatccaaagaagccggccgg

SEQ ID NO: 1267721 - DNA, 25 bp, Homo sapien
acagccgggcccaaagtggccctgg

SEQ ID NO: 1267722 - DNA, 25 bp, Homo sapien
cccgctgacgtggtcacaggctgct

SEQ ID NO: 1267723 - DNA, 25 bp, Homo sapien
atgctcgcagaaggtgcccctccag

SEQ ID NO: 1267724 - DNA, 25 bp, Homo sapien
atgctgacactggcaccgctgctca

SEQ ID NO: 1267725 - DNA, 25 bp, Homo sapien
ctgagatatgcagccccggcccaca

SEQ ID NO: 1267726 - DNA, 25 bp, Homo sapien
agctcccgtggccagcgctgcagtt

SEQ ID NO: 1267727 - DNA, 25 bp, Homo sapien
tggctgcagtcaggtccccagtgcc

SEQ ID NO: 1267728 - DNA, 25 bp, Homo sapien
cacacagacacaggccgctgatggc

SEQ ID NO: 1267729 - DNA, 25 bp, Homo sapien
ccgtggccagcgctgcagttgcagg

SEQ ID NO: 1267730 - DNA, 25 bp, Homo sapien
ctctggcagctaaagccggtccacc

SEQ ID NO: 1267731 - DNA, 25 bp, Homo sapien
gcagtgcccatcattggcacaagag

SEQ ID NO: 1267732 - DNA, 25 bp, Homo sapien
tggcagtgcccatcattggcacaag

SEQ ID NO: 1267733 - DNA, 25 bp, Homo sapien
gtgcccatcattggcacaagagcac

SEQ ID NO: 1267734 - DNA, 25 bp, Homo sapien
ctacaggcaggcgagagagggtgag

SEQ ID NO: 1267735 - DNA, 25 bp, Homo sapien
agagagggtgagtggggcctggcca

SEQ ID NO: 1267736 - DNA, 25 bp, Homo sapien
gagagggtgagtggggcctggccac

SEQ ID NO: 1267737 - DNA, 25 bp, Homo sapien
caggcaggcgagagagggtgagtgg

SEQ ID NO: 1267738 - DNA, 25 bp, Homo sapien
tgccgacgaagccagggaggcacag

SEQ ID NO: 1267739 - DNA, 25 bp, Homo sapien
tctcagggtcgcagcgggcagcgtg

SEQ ID NO: 1267740 - DNA, 25 bp, Homo sapien
ctcagggtcgcagcgggcagcgtgc

SEQ ID NO: 1267741 - DNA, 25 bp, Homo sapien
cggctgccgacgaagccagggaggc

SEQ ID NO: 1267742 - DNA, 25 bp, Homo sapien
agctcgagcagttcacgccaaacgt

SEQ ID NO: 1267743 - DNA, 25 bp, Homo sapien
tcctccccggcggacaccggcactg

SEQ ID NO: 1267744 - DNA, 25 bp, Homo sapien
aggagcaggagctcgagcagttcac

SEQ ID NO: 1267745 - DNA, 25 bp, Homo sapien
actgccccgtgaccccgtggcaggg

SEQ ID NO: 1267746 - DNA, 25 bp, Homo sapien
ggcaggtcacaggaacaggcaaggg

SEQ ID NO: 1267747 - DNA, 25 bp, Homo sapien
aggaacaggcaagggaggagtgaaa

SEQ ID NO: 1267748 - DNA, 25 bp, Homo sapien
aggtcacaggaacaggcaagggagg

SEQ ID NO: 1267749 - DNA, 25 bp, Homo sapien
cccagagtggccaggcaggtcacag

SEQ ID NO: 1267750 - DNA, 25 bp, Homo sapien
tgctgcatgccaaagatccacagag

SEQ ID NO: 1267751 - DNA, 25 bp, Homo sapien
agttgacagagaccccgtgctgcat

SEQ ID NO: 1267752 - DNA, 25 bp, Homo sapien
gaaggcagttgacagagaccccgtg

SEQ ID NO: 1267753 - DNA, 25 bp, Homo sapien
acagagcccacgtgtcagaaggccc

SEQ ID NO: 1267754 - DNA, 25 bp, Homo sapien
aagccgatgacacactcgggtattt

SEQ ID NO: 1267755 - DNA, 25 bp, Homo sapien
gctccattactcatgccgagggcgt

SEQ ID NO: 1267756 - DNA, 25 bp, Homo sapien
cgatgacacactcgggtatttccta

SEQ ID NO: 1267757 - DNA, 25 bp, Homo sapien
tactcatgccgagggcgtcttcctt

SEQ ID NO: 1267758 - DNA, 25 bp, Homo sapien
actgaggagtgaccatcccgctgag

SEQ ID NO: 1267759 - DNA, 25 bp, Homo sapien
ctgaggagtgaccatcccgctgagc

SEQ ID NO: 1267760 - DNA, 25 bp, Homo sapien
tgaggagtgaccatcccgctgagcc

SEQ ID NO: 1267761 - DNA, 25 bp, Homo sapien
gactgaggagtgaccatcccgctga

SEQ ID NO: 1267762 - DNA, 25 bp, Homo sapien
tctgctgccggctcacatgtgagga

SEQ ID NO: 1267763 - DNA, 25 bp, Homo sapien
cagaccactctctgaaccgccacct

SEQ ID NO: 1267764 - DNA, 25 bp, Homo sapien
ccaaagcatccacgtgcaggggcct

SEQ ID NO: 1267765 - DNA, 25 bp, Homo sapien
tgcacccagaccactctctgaaccg

SEQ ID NO: 1267766 - DNA, 25 bp, Homo sapien
agcaggacaccgcttcccacactcg

SEQ ID NO: 1267767 - DNA, 25 bp, Homo sapien
cacactcgccgctcacggagtcaca

SEQ ID NO: 1267768 - DNA, 25 bp, Homo sapien
tgcctgccagcaccccggcccaaag

SEQ ID NO: 1267769 - DNA, 25 bp, Homo sapien
ggagtcacaggccacgcccactggg

SEQ ID NO: 1267770 - DNA, 25 bp, Homo sapien
tgcctgacagcgctcgccccggaag

SEQ ID NO: 1267771 - DNA, 25 bp, Homo sapien
cctcttgtcacaggactgcgtgtgg

SEQ ID NO: 1267772 - DNA, 25 bp, Homo sapien
cgtgtggggctgcacacactggcac

SEQ ID NO: 1267773 - DNA, 25 bp, Homo sapien
agcagcccggcccaaaggcccacgg

SEQ ID NO: 1267774 - DNA, 25 bp, Homo sapien
ggcaggccccgtagaggcggtggca

SEQ ID NO: 1267775 - DNA, 25 bp, Homo sapien
ttcttgcgacagtgcttgccatagt

SEQ ID NO: 1267776 - DNA, 25 bp, Homo sapien
gtagagccctgggtcgcagaggcag

SEQ ID NO: 1267777 - DNA, 25 bp, Homo sapien
ccccggttggcacagttgcatttct

SEQ ID NO: 1267778 - DNA, 25 bp, Homo sapien
ctgggggcagcggggctccatgtga

SEQ ID NO: 1267779 - DNA, 25 bp, Homo sapien
gggggcagcggggctccatgtgaac

SEQ ID NO: 1267780 - DNA, 25 bp, Homo sapien
tgggggcagcggggctccatgtgaa

SEQ ID NO: 1267781 - DNA, 25 bp, Homo sapien
tcttcccaaaggtgtccggaggaca

SEQ ID NO: 1267782 - DNA, 25 bp, Homo sapien
cacagttagttccactgacacccgg

SEQ ID NO: 1267783 - DNA, 25 bp, Homo sapien
tagttccactgacacccggggggca

SEQ ID NO: 1267784 - DNA, 25 bp, Homo sapien
atcctcacagttagttccactgaca

SEQ ID NO: 1267785 - DNA, 25 bp, Homo sapien
tccgttcctgcagtcatcacaggtc

SEQ ID NO: 1267786 - DNA, 25 bp, Homo sapien
tcggggcaatcacagccatccaggc

SEQ ID NO: 1267787 - DNA, 25 bp, Homo sapien
caggaggcaggtccctccgttcctg

SEQ ID NO: 1267788 - DNA, 25 bp, Homo sapien
cagtccagccctcggggcaatcaca

SEQ ID NO: 1267789 - DNA, 25 bp, Homo sapien
ggccgcacgaaaggcagctcgccgt

SEQ ID NO: 1267790 - DNA, 25 bp, Homo sapien
ctcgtcctggagcacggcaatgtgg

SEQ ID NO: 1267791 - DNA, 25 bp, Homo sapien
caaacttctctgtgagcgtgtgttc

SEQ ID NO: 1267792 - DNA, 25 bp, Homo sapien
cccgacgtcgtcatcctggaagagt

SEQ ID NO: 1267793 - DNA, 25 bp, Homo sapien
tagccggcctcgcaggagcactgga

SEQ ID NO: 1267794 - DNA, 25 bp, Homo sapien
acggctggaggcgcactcatccaca

SEQ ID NO: 1267795 - DNA, 25 bp, Homo sapien
gtggtgctcgcagccgccacggctg

SEQ ID NO: 1267796 - DNA, 25 bp, Homo sapien
gtgcagccggtagccggcctcgcag

SEQ ID NO: 1267797 - DNA, 25 bp, Homo sapien
gcagccatcggcactgagccggtag

SEQ ID NO: 1267798 - DNA, 25 bp, Homo sapien
cggtagccggcgtagcagccgcact

SEQ ID NO: 1267799 - DNA, 25 bp, Homo sapien
ccgccagggttgttggtgcacacct

SEQ ID NO: 1267800 - DNA, 25 bp, Homo sapien
ctcgtacccgccagggttgttggtg

SEQ ID NO: 1267801 - DNA, 25 bp, Homo sapien
cacgccacgggccccctggtaccag

SEQ ID NO: 1267802 - DNA, 25 bp, Homo sapien
cagctgttcacgatttccatctcaa

SEQ ID NO: 1267803 - DNA, 25 bp, Homo sapien
atctgtgtccagctcgtagccgcgg

SEQ ID NO: 1267804 - DNA, 25 bp, Homo sapien
ggcctcacagctgttcacgatttcc

SEQ ID NO: 1267805 - DNA, 25 bp, Homo sapien
tcctctgatctgtgtccagctcgta

SEQ ID NO: 1267806 - DNA, 25 bp, Homo sapien
tagcccgcgtgacacacgcacttga

SEQ ID NO: 1267807 - DNA, 25 bp, Homo sapien
cgcacttgaaggacccctgggtgtt

SEQ ID NO: 1267808 - DNA, 25 bp, Homo sapien
ggcgcccagctcatagcccgcgtga

SEQ ID NO: 1267809 - DNA, 25 bp, Homo sapien
tgggtgttgaggcagccatgggcac

SEQ ID NO: 1267810 - DNA, 25 bp, Homo sapien
gtggcactcacagcgggcgaggccc

SEQ ID NO: 1267811 - DNA, 25 bp, Homo sapien
ctgctagctgatagcccacgtggca

SEQ ID NO: 1267812 - DNA, 25 bp, Homo sapien
tgtgcatgcagctgccgttcctgtt

SEQ ID NO: 1267813 - DNA, 25 bp, Homo sapien
tgccgttcctgttggcacacgggct

SEQ ID NO: 1267814 - DNA, 25 bp, Homo sapien
gtgactccagccccttcatgcccac

SEQ ID NO: 1267815 - DNA, 25 bp, Homo sapien
aggcggcggccccccagctctgtga

SEQ ID NO: 1267816 - DNA, 25 bp, Homo sapien
acccttcttagcccaggtgctggcg

SEQ ID NO: 1267817 - DNA, 25 bp, Homo sapien
ccaggtgctggcgctgacaccaagg

SEQ ID NO: 1267818 - DNA, 25 bp, Homo sapien
cttgggggcctcctgaagacccact

SEQ ID NO: 1267819 - DNA, 25 bp, Homo sapien
tgaagacccacttccacccaacagc

SEQ ID NO: 1267820 - DNA, 25 bp, Homo sapien
aacagcccaggcgaggcagcttgtc

SEQ ID NO: 1267821 - DNA, 25 bp, Homo sapien
caggcgaggcagcttgtcctgcctc

SEQ ID NO: 1267822 - DNA, 25 bp, Homo sapien
ggacacaatgcctgccgtcctcctg

SEQ ID NO: 1267823 - DNA, 25 bp, Homo sapien
agccgccattgcccagggcgcagga

SEQ ID NO: 1267824 - DNA, 25 bp, Homo sapien
ggccggcactggcagcgatgccgag

SEQ ID NO: 1267825 - DNA, 25 bp, Homo sapien
cagcgatgccgagtgattgtgagct

SEQ ID NO: 1267826 - DNA, 25 bp, Homo sapien
cagcacagctcctacccaccccagg

SEQ ID NO: 1267827 - DNA, 25 bp, Homo sapien
catcgtggtccttaggccagggtgg

SEQ ID NO: 1267828 - DNA, 25 bp, Homo sapien
tgtggggatgccgtggacagctgcc

SEQ ID NO: 1267829 - DNA, 25 bp, Homo sapien
cccagttcccaagggaccagcacag

SEQ ID NO: 1267830 - DNA, 25 bp, Homo sapien
tgtcccacaggggagcaggcgctga

SEQ ID NO: 1267831 - DNA, 25 bp, Homo sapien
gggagcaggcgctgagggtcccctc

SEQ ID NO: 1267832 - DNA, 25 bp, Homo sapien
caggggagcaggcgctgagggtccc

SEQ ID NO: 1267833 - DNA, 25 bp, Homo sapien
cccacaggggagcaggcgctgaggg

SEQ ID NO: 1267834 - DNA, 25 bp, Homo sapien
gctgaagccactaccgtggctccag

SEQ ID NO: 1267835 - DNA, 25 bp, Homo sapien
tttattgtgttcaccgcagcaacag

SEQ ID NO: 1267836 - DNA, 25 bp, Homo sapien
ttattgtgttcaccgcagcaacagc

SEQ ID NO: 1267837 - DNA, 25 bp, Homo sapien
ctgagatggccctgctgaagccact

SEQ ID NO: 1267838 - DNA, 25 bp, Homo sapien
ctggaacacgtaataggaaacagac

SEQ ID NO: 1267839 - DNA, 25 bp, Homo sapien
tggaacacgtaataggaaacagacc

SEQ ID NO: 1267840 - DNA, 25 bp, Homo sapien
catgcaggtccactcgggctggggt

SEQ ID NO: 1267841 - DNA, 25 bp, Homo sapien
ccacatgcaggtccactcgggctgg

SEQ ID NO: 1267842 - DNA, 25 bp, Homo sapien
cacatgcaggtccactcgggctggg

SEQ ID NO: 1267843 - DNA, 25 bp, Homo sapien
atgcaggtccactcgggctggggtg

SEQ ID NO: 1267844 - DNA, 25 bp, Homo sapien
cttggtctctgctcgaggcgcagca

SEQ ID NO: 1267845 - DNA, 25 bp, Homo sapien
tggtctctgctcgaggcgcagcatc

SEQ ID NO: 1267846 - DNA, 25 bp, Homo sapien
gccaaatgtgagggtgaagctctgc

SEQ ID NO: 1267847 - DNA, 25 bp, Homo sapien
tgccaaatgtgagggtgaagctctg

SEQ ID NO: 1267848 - DNA, 25 bp, Homo sapien
tcgtccacacgccaaggggtctgag

SEQ ID NO: 1267849 - DNA, 25 bp, Homo sapien
gtccacacgccaaggggtctgagcc

SEQ ID NO: 1267850 - DNA, 25 bp, Homo sapien
gctgtcctcgtccacacgccaaggg

SEQ ID NO: 1267851 - DNA, 25 bp, Homo sapien
tcctcgtccacacgccaaggggtct

SEQ ID NO: 1267852 - DNA, 25 bp, Homo sapien
tgtggcgaaacagacacatcacagc

SEQ ID NO: 1267853 - DNA, 25 bp, Homo sapien
gtgaaagagaaggtgcgctccgagg

SEQ ID NO: 1267854 - DNA, 25 bp, Homo sapien
cctgaagcttcagcgtaaaggcctt

SEQ ID NO: 1267855 - DNA, 25 bp, Homo sapien
gctgggagcctcagtcaagtgaaag

SEQ ID NO: 1267856 - DNA, 25 bp, Homo sapien
tcactgctctgcatccagcagaccc

SEQ ID NO: 1267857 - DNA, 25 bp, Homo sapien
ggaggcaccgggagcccaccactca

SEQ ID NO: 1267858 - DNA, 25 bp, Homo sapien
aggcaccgggagcccaccactcaca

SEQ ID NO: 1267859 - DNA, 25 bp, Homo sapien
gaggcaccgggagcccaccactcac

SEQ ID NO: 1267860 - DNA, 25 bp, Homo sapien
tggaggcaccgggagcccaccactc

SEQ ID NO: 1267861 - DNA, 25 bp, Homo sapien
gggtgttcacgcaccggtgctggca

SEQ ID NO: 1267862 - DNA, 25 bp, Homo sapien
taggagcctggggtgttcacgcacc

SEQ ID NO: 1267863 - DNA, 25 bp, Homo sapien
tgtggagccggaagccgggcttgca

SEQ ID NO: 1267864 - DNA, 25 bp, Homo sapien
agccgggcttgcactcacagaggta

SEQ ID NO: 1267865 - DNA, 25 bp, Homo sapien
tcacccacatctgccggagacgcag

SEQ ID NO: 1267866 - DNA, 25 bp, Homo sapien
ttccaccttggacacctgctcgaga

SEQ ID NO: 1267867 - DNA, 25 bp, Homo sapien
cctgctcgagaaggaagagccaccg

SEQ ID NO: 1267868 - DNA, 25 bp, Homo sapien
gtgcctcgagggcaccacccatgag

SEQ ID NO: 1267869 - DNA, 25 bp, Homo sapien
tcaggctcgagatgagattgttccg

SEQ ID NO: 1267870 - DNA, 25 bp, Homo sapien
cttcaagagtgtccccgcagttcat

SEQ ID NO: 1267871 - DNA, 25 bp, Homo sapien
cagtgaggccttgtctggaaacagg

SEQ ID NO: 1267872 - DNA, 25 bp, Homo sapien
ttgttccggatgagggtgagcccta

SEQ ID NO: 1267873 - DNA, 25 bp, Homo sapien
cagaaggccaccatatcccaggaca

SEQ ID NO: 1267874 - DNA, 25 bp, Homo sapien
agggccagcttggtttagaaccacg

SEQ ID NO: 1267875 - DNA, 25 bp, Homo sapien
gacagaagccttcgctgtgccggca

SEQ ID NO: 1267876 - DNA, 25 bp, Homo sapien
tggtttagaaccacgtgtcctcagg

SEQ ID NO: 1267877 - DNA, 25 bp, Homo sapien
caggacccccgggatgcaccatgag

SEQ ID NO: 1267878 - DNA, 25 bp, Homo sapien
gacccccgggatgcaccatgagctg

SEQ ID NO: 1267879 - DNA, 25 bp, Homo sapien
ggacccccgggatgcaccatgagct

SEQ ID NO: 1267880 - DNA, 25 bp, Homo sapien
agcaggacccccgggatgcaccatg

SEQ ID NO: 1267881 - DNA, 25 bp, Homo sapien
ccttcccctgagaccctgccagggc

SEQ ID NO: 1267882 - DNA, 25 bp, Homo sapien
gctggagacccagggggctgcaccc

SEQ ID NO: 1267883 - DNA, 25 bp, Homo sapien
ctgagaccctgccagggctggagac

SEQ ID NO: 1267884 - DNA, 25 bp, Homo sapien
agaccctgccagggctggagaccca

SEQ ID NO: 1267885 - DNA, 25 bp, Homo sapien
ggggacagacggagctgtgcagcct

SEQ ID NO: 1267886 - DNA, 25 bp, Homo sapien
ccaccctgcagccgggttcacagat

SEQ ID NO: 1267887 - DNA, 25 bp, Homo sapien
acagcgagccagctcaagggtgaag

SEQ ID NO: 1267888 - DNA, 25 bp, Homo sapien
cttctggacacagcgagccagctca

SEQ ID NO: 1267889 - DNA, 25 bp, Homo sapien
gggcctcccacttggacgacagagg

SEQ ID NO: 1267890 - DNA, 25 bp, Homo sapien
gatcagcttctggacacagcgagcc

SEQ ID NO: 1267891 - DNA, 25 bp, Homo sapien
cctggaggcaaatccactgtccctg

SEQ ID NO: 1267892 - DNA, 25 bp, Homo sapien
ctggaggcaaatccactgtccctgt

SEQ ID NO: 1267893 - DNA, 25 bp, Homo sapien
tggaggcaaatccactgtccctgtc

SEQ ID NO: 1267894 - DNA, 25 bp, Homo sapien
ggaggcaaatccactgtccctgtcc

SEQ ID NO: 1267895 - DNA, 25 bp, Homo sapien
tgggagccgcaaaccccacactccc

SEQ ID NO: 1267896 - DNA, 25 bp, Homo sapien
gttcaaagcaaccacctggagggag

SEQ ID NO: 1267897 - DNA, 25 bp, Homo sapien
tcctccaattcccgagggtgcccag

SEQ ID NO: 1267898 - DNA, 25 bp, Homo sapien
tcccagggagttcaaagcaaccacc

SEQ ID NO: 1267899 - DNA, 25 bp, Homo sapien
ctggcctctggtcaccggcgctcac

SEQ ID NO: 1267900 - DNA, 25 bp, Homo sapien
gcccaaggcaccagagcgcggccag

SEQ ID NO: 1267901 - DNA, 25 bp, Homo sapien
ggtagtgcgtgcccgcgacgcgcgc

SEQ ID NO: 1267902 - DNA, 25 bp, Homo sapien
caggtgacatgggtagcagcccctc

SEQ ID NO: 1267903 - DNA, 25 bp, Homo sapien
gtgcgtgcccgcgacgcgcgccagg

SEQ ID NO: 1267904 - DNA, 25 bp, Homo sapien
gggggcgaggaccaaccgcgctgcg

SEQ ID NO: 1267905 - DNA, 25 bp, Homo sapien
gggcgaggaccaaccgcgctgcgcc

SEQ ID NO: 1267906 - DNA, 25 bp, Homo sapien
agggggcgaggaccaaccgcgctgc

SEQ ID NO: 1267907 - DNA, 25 bp, Homo sapien
gagggggcgaggaccaaccgcgctg

SEQ ID NO: 1267908 - DNA, 25 bp, Homo sapien
ctgggttccgggcgggcgcgcaatc

SEQ ID NO: 1267909 - DNA, 25 bp, Homo sapien
agccccgggatccgctccgctcggc

SEQ ID NO: 1267910 - DNA, 25 bp, Homo sapien
ggccgggcgacggggcaggcggctc

SEQ ID NO: 1267911 - DNA, 25 bp, Homo sapien
gcggctcgggctggttctgggttcc

SEQ ID NO: 1267912 - DNA, 25 bp, Homo sapien
gtggaaacgcagccggcgtctgtgc

SEQ ID NO: 1267913 - DNA, 25 bp, Homo sapien
accgagcacgtcccagccggagaat

SEQ ID NO: 1267914 - DNA, 25 bp, Homo sapien
gagcacgtcccagccggagaatgtg

SEQ ID NO: 1267915 - DNA, 25 bp, Homo sapien
actcagtgccgccaccgagcacgtc

SEQ ID NO: 1267916 - DNA, 25 bp, Homo sapien
cgagggctgacacagcacccgctgg

SEQ ID NO: 1267917 - DNA, 25 bp, Homo sapien
ccccggggcccagactcttgctggg

SEQ ID NO: 1267918 - DNA, 25 bp, Homo sapien
gccctcgagggctgacacagcaccc

SEQ ID NO: 1267919 - DNA, 25 bp, Homo sapien
gctgacacagcacccgctggggatg

SEQ ID NO: 1267920 - DNA, 25 bp, Homo sapien
gggtttcccgctgcactgggaagac

SEQ ID NO: 1267921 - DNA, 25 bp, Homo sapien
ttgcagccgggtttcccgctgcact

SEQ ID NO: 1267922 - DNA, 25 bp, Homo sapien
acagccagctgaagaatgttggcct

SEQ ID NO: 1267923 - DNA, 25 bp, Homo sapien
cagccagctgaagaatgttggcctg

SEQ ID NO: 1267924 - DNA, 25 bp, Homo sapien
tcaggcccccttgcccactcgtttc

SEQ ID NO: 1267925 - DNA, 25 bp, Homo sapien
ggggggcagccggtcagcgcccagg

SEQ ID NO: 1267926 - DNA, 25 bp, Homo sapien
agcgcccaggcttcctagcccgcag

SEQ ID NO: 1267927 - DNA, 25 bp, Homo sapien
tgcccactcgtttctcccgtgcctg

SEQ ID NO: 1267928 - DNA, 25 bp, Homo sapien
ctgcccaggggcctgggaggagggt

SEQ ID NO: 1267929 - DNA, 25 bp, Homo sapien
tgggaggagggtgggcacatgtcag

SEQ ID NO: 1267930 - DNA, 25 bp, Homo sapien
gagggtgggcacatgtcagaggccg

SEQ ID NO: 1267931 - DNA, 25 bp, Homo sapien
gaggagggtgggcacatgtcagagg

SEQ ID NO: 1267932 - DNA, 25 bp, Homo sapien
agatggcaaagaccttttctgtcca

SEQ ID NO: 1267933 - DNA, 25 bp, Homo sapien
gacccctggcagagagattccaaca

SEQ ID NO: 1267934 - DNA, 25 bp, Homo sapien
ggctggccccgggtcatccggtcca

SEQ ID NO: 1267935 - DNA, 25 bp, Homo sapien
ttttctgtccatagggacccctggc

SEQ ID NO: 1267936 - DNA, 25 bp, Homo sapien
tctatcgcgggagagcctctgcgcg

SEQ ID NO: 1267937 - DNA, 25 bp, Homo sapien
ccctggaggggcataaacacggccg

SEQ ID NO: 1267938 - DNA, 25 bp, Homo sapien
agagcacgaatcaggagacccccgg

SEQ ID NO: 1267939 - DNA, 25 bp, Homo sapien
acccggagccgctctatcgcgggag

SEQ ID NO: 1267940 - DNA, 25 bp, Homo sapien
accagccctggcctggtagacccag

SEQ ID NO: 1267941 - DNA, 25 bp, Homo sapien
ccctggcctggtagacccagggctt

SEQ ID NO: 1267942 - DNA, 25 bp, Homo sapien
ctggcctggtagacccagggcttcc

SEQ ID NO: 1267943 - DNA, 25 bp, Homo sapien
cagccctggcctggtagacccaggg

SEQ ID NO: 1267944 - DNA, 25 bp, Homo sapien
tggggtttcagaccccacgcagcaa

SEQ ID NO: 1267945 - DNA, 25 bp, Homo sapien
tttcagaccccacgcagcaactggg

SEQ ID NO: 1267946 - DNA, 25 bp, Homo sapien
gagtggggtttcagaccccacgcag

SEQ ID NO: 1267947 - DNA, 25 bp, Homo sapien
catcgagtggggtttcagaccccac

SEQ ID NO: 1267948 - DNA, 25 bp, Homo sapien
caacgtgtggaggtggccaagtcct

SEQ ID NO: 1267949 - DNA, 25 bp, Homo sapien
tcggtgggtcggaacctccagctcc

SEQ ID NO: 1267950 - DNA, 25 bp, Homo sapien
agctccaacgtgtggaggtggccaa

SEQ ID NO: 1267951 - DNA, 25 bp, Homo sapien
caggctcctcggtgggtcggaacct

SEQ ID NO: 1267952 - DNA, 25 bp, Homo sapien
gcgagttgggtgaggagtaccccga

SEQ ID NO: 1267953 - DNA, 25 bp, Homo sapien
cccacagaggcaatgtcaggagtgg

SEQ ID NO: 1267954 - DNA, 25 bp, Homo sapien
aggagtaccccgagtggagcccttg

SEQ ID NO: 1267955 - DNA, 25 bp, Homo sapien
accccgagtggagcccttggagcag

SEQ ID NO: 1267956 - DNA, 25 bp, Homo sapien
cttggcaagtctcgccatcaccctg

SEQ ID NO: 1267957 - DNA, 25 bp, Homo sapien
tgtcccggcaccgacccgcacagcc

SEQ ID NO: 1267958 - DNA, 25 bp, Homo sapien
ttggcgttggcacactcacccacat

SEQ ID NO: 1267959 - DNA, 25 bp, Homo sapien
gggccagcggcagtagaagcccccc

SEQ ID NO: 1267960 - DNA, 25 bp, Homo sapien
acaggggacattgtccaccagaaca

SEQ ID NO: 1267961 - DNA, 25 bp, Homo sapien
tccaccagaacaggccccgcaggag

SEQ ID NO: 1267962 - DNA, 25 bp, Homo sapien
acagcgcgggcctttccggacctga

SEQ ID NO: 1267963 - DNA, 25 bp, Homo sapien
tccccagtgccgggggcatttctct

SEQ ID NO: 1267964 - DNA, 25 bp, Homo sapien
ccagacagacggaacacagcgcggg

SEQ ID NO: 1267965 - DNA, 25 bp, Homo sapien
gctccccagtgccgggggcatttct

SEQ ID NO: 1267966 - DNA, 25 bp, Homo sapien
ccacagtcccatgagaacgggccaa

SEQ ID NO: 1267967 - DNA, 25 bp, Homo sapien
cagccgtctccggactgttggaatg

SEQ ID NO: 1267968 - DNA, 25 bp, Homo sapien
aagcggaatgcaggccagccgtctc

SEQ ID NO: 1267969 - DNA, 25 bp, Homo sapien
ccgtctccggactgttggaatgcag

SEQ ID NO: 1267970 - DNA, 25 bp, Homo sapien
tgaggctgcaatcgccccttgttcc

SEQ ID NO: 1267971 - DNA, 25 bp, Homo sapien
ctgcaatcgccccttgttcccccaa

SEQ ID NO: 1267972 - DNA, 25 bp, Homo sapien
gaggctgcaatcgccccttgttccc

SEQ ID NO: 1267973 - DNA, 25 bp, Homo sapien
ggctgcaatcgccccttgttccccc

SEQ ID NO: 1267974 - DNA, 25 bp, Homo sapien
agctgaagtgatcgtggatgccacc

SEQ ID NO: 1267975 - DNA, 25 bp, Homo sapien
gctgaagtgatcgtggatgccacct

SEQ ID NO: 1267976 - DNA, 25 bp, Homo sapien
gagctgaagtgatcgtggatgccac

SEQ ID NO: 1267977 - DNA, 25 bp, Homo sapien
tgaagtgatcgtggatgccacctgg

SEQ ID NO: 1267978 - DNA, 25 bp, Homo sapien
gtgactgcaatgtcacaagtgccca

SEQ ID NO: 1267979 - DNA, 25 bp, Homo sapien
agaagcggtcgtgcccaggcctccg

SEQ ID NO: 1267980 - DNA, 25 bp, Homo sapien
tgctccgtgccggatctggccccat

SEQ ID NO: 1267981 - DNA, 25 bp, Homo sapien
tgccaggggcctaactcagcagcag

SEQ ID NO: 1267982 - DNA, 25 bp, Homo sapien
tccaagcccagctgggtcttccagt

SEQ ID NO: 1267983 - DNA, 25 bp, Homo sapien
cccaccaggtaagcctgctgcttca

SEQ ID NO: 1267984 - DNA, 25 bp, Homo sapien
cccagaccccccacttttctctgca

SEQ ID NO: 1267985 - DNA, 25 bp, Homo sapien
tccagtcccccaccaggtaagcctg

SEQ ID NO: 1267986 - DNA, 25 bp, Homo sapien
ccagaaaccaggcagagctcctcaa

SEQ ID NO: 1267987 - DNA, 25 bp, Homo sapien
ggcagagctcctcaaagcctgggac

SEQ ID NO: 1267988 - DNA, 25 bp, Homo sapien
ttacccagaaaccaggcagagctcc

SEQ ID NO: 1267989 - DNA, 25 bp, Homo sapien
gaaaccaggcagagctcctcaaagc

SEQ ID NO: 1267990 - DNA, 25 bp, Homo sapien
ttgcctccaagaaagaccacatggg

SEQ ID NO: 1267991 - DNA, 25 bp, Homo sapien
tgcctccaagaaagaccacatgggc

SEQ ID NO: 1267992 - DNA, 25 bp, Homo sapien
cttgcctccaagaaagaccacatgg

SEQ ID NO: 1267993 - DNA, 25 bp, Homo sapien
gggaccccattaactgtgagcacag

SEQ ID NO: 1267994 - DNA, 25 bp, Homo sapien
ggctgacacctccatgttcctcggg

SEQ ID NO: 1267995 - DNA, 25 bp, Homo sapien
tctgagccggctcagcaccagcttg

SEQ ID NO: 1267996 - DNA, 25 bp, Homo sapien
tcttcatggctgacacctccatgtt

SEQ ID NO: 1267997 - DNA, 25 bp, Homo sapien
gtcctgtctggaaacttgtccggaa

SEQ ID NO: 1267998 - DNA, 25 bp, Homo sapien
acttgtccggaacaaattgcacctc

SEQ ID NO: 1267999 - DNA, 25 bp, Homo sapien
tgtctctgtcctgtctggaaacttg

SEQ ID NO: 1268000 - DNA, 25 bp, Homo sapien
tgtctggaaacttgtccggaacaaa

SEQ ID NO: 1268001 - DNA, 25 bp, Homo sapien
tgaccagcccgcagagggaccacag

SEQ ID NO: 1268002 - DNA, 25 bp, Homo sapien
cccacctgtcctcggaacagggatg

SEQ ID NO: 1268003 - DNA, 25 bp, Homo sapien
cagggatgggtcacctctgaccagc

SEQ ID NO: 1268004 - DNA, 25 bp, Homo sapien
tcccaagaagccaaacgtgacagtg

SEQ ID NO: 1268005 - DNA, 25 bp, Homo sapien
gaatgcccgttcactcggggtgtcc

SEQ ID NO: 1268006 - DNA, 25 bp, Homo sapien
gctgtgctggggacggccagtggcc

SEQ ID NO: 1268007 - DNA, 25 bp, Homo sapien
tcggggtgtcccctacacagctgtg

SEQ ID NO: 1268008 - DNA, 25 bp, Homo sapien
gtggccgacacatcctcgccccttg

SEQ ID NO: 1268009 - DNA, 25 bp, Homo sapien
catactgacagcggggtccctggaa

SEQ ID NO: 1268010 - DNA, 25 bp, Homo sapien
ggggacagtgacacggctgggctga

SEQ ID NO: 1268011 - DNA, 25 bp, Homo sapien
ctggcacacaacggccaccgtgaaa

SEQ ID NO: 1268012 - DNA, 25 bp, Homo sapien
aaaacagaggctggcgctgcattca

SEQ ID NO: 1268013 - DNA, 25 bp, Homo sapien
cacacaacggccaccgtgaaaacag

SEQ ID NO: 1268014 - DNA, 25 bp, Homo sapien
gaaaacagaggctggcgctgcattc

SEQ ID NO: 1268015 - DNA, 25 bp, Homo sapien
ctgggccctcacacacatctggcca

SEQ ID NO: 1268016 - DNA, 25 bp, Homo sapien
tcacacacatctggccacattcagg

SEQ ID NO: 1268017 - DNA, 25 bp, Homo sapien
gggccctcacacacatctggccaca

SEQ ID NO: 1268018 - DNA, 25 bp, Homo sapien
acatctggccacattcaggccctac

SEQ ID NO: 1268019 - DNA, 25 bp, Homo sapien
cagcctcttccctccagccaaacac

SEQ ID NO: 1268020 - DNA, 25 bp, Homo sapien
gcctgaggatgtgtccgaacgcgat

SEQ ID NO: 1268021 - DNA, 25 bp, Homo sapien
ctgaggatgtgtccgaacgcgatag

SEQ ID NO: 1268022 - DNA, 25 bp, Homo sapien
cagcctgaggatgtgtccgaacgcg

SEQ ID NO: 1268023 - DNA, 25 bp, Homo sapien
agggaagccggatggaagttgccat

SEQ ID NO: 1268024 - DNA, 25 bp, Homo sapien
tgcctgctgacttgtgcaactgcag

SEQ ID NO: 1268025 - DNA, 25 bp, Homo sapien
taacaggaaacatccgtgtcccaag

SEQ ID NO: 1268026 - DNA, 25 bp, Homo sapien
acatccgtgtcccaagtgttgaggc

SEQ ID NO: 1268027 - DNA, 25 bp, Homo sapien
gcaagccagctgtgtttagttccca

SEQ ID NO: 1268028 - DNA, 25 bp, Homo sapien
ccaggccatttgtgaagcccgtgct

SEQ ID NO: 1268029 - DNA, 25 bp, Homo sapien
ctgccaggccatttgtgaagcccgt

SEQ ID NO: 1268030 - DNA, 25 bp, Homo sapien
gccatttgtgaagcccgtgctgtgt

SEQ ID NO: 1268031 - DNA, 25 bp, Homo sapien
caggccatttgtgaagcccgtgctg

SEQ ID NO: 1268032 - DNA, 25 bp, Homo sapien
caaggtctcgtagctcacaagcgac

SEQ ID NO: 1268033 - DNA, 25 bp, Homo sapien
tcgtagctcacaagggacccgatgg

SEQ ID NO: 1268034 - DNA, 25 bp, Homo sapien
taccaaggtctcgtagctcacaagc

SEQ ID NO: 1268035 - DNA, 25 bp, Homo sapien
gtctcgtagctcacaagggacccga

SEQ ID NO: 1268036 - DNA, 25 bp, Homo sapien
ctggagggaactgagcccagtactg

SEQ ID NO: 1268037 - DNA, 25 bp, Homo sapien
tcttggctgcttggacgggcatcgg

SEQ ID NO: 1268038 - DNA, 25 bp, Homo sapien
ttggacgggcatcggcatccggccc

SEQ ID NO: 1268039 - DNA, 25 bp, Homo sapien
ggcccatcagcgaacacttgctcca

SEQ ID NO: 1268040 - DNA, 25 bp, Homo sapien
ctcactcctgcaggcctcgtcacac

SEQ ID NO: 1268041 - DNA, 25 bp, Homo sapien
ctctctgacgttccgggctcccagg

SEQ ID NO: 1268042 - DNA, 25 bp, Homo sapien
ccccagacactcccgcagtccccag

SEQ ID NO: 1268043 - DNA, 25 bp, Homo sapien
cccccaatggccctcatctgctcat

SEQ ID NO: 1268044 - DNA, 25 bp, Homo sapien
cagaccacccaattccagtcctggg

SEQ ID NO: 1268045 - DNA, 25 bp, Homo sapien
gaccacccaattccagtcctgggcc

SEQ ID NO: 1268046 - DNA, 25 bp, Homo sapien
tcagctcagaccacccaattccagt

SEQ ID NO: 1268047 - DNA, 25 bp, Homo sapien
tctctgagccccagcacatcagcac

SEQ ID NO: 1268048 - DNA, 25 bp, Homo sapien
cccgggtcaggtcgtatgcagcacg

SEQ ID NO: 1268049 - DNA, 25 bp, Homo sapien
ctgcccgggtcaggtcgtatgcagc

SEQ ID NO: 1268050 - DNA, 25 bp, Homo sapien
gcacgggcctctccaattgtgctgg

SEQ ID NO: 1268051 - DNA, 25 bp, Homo sapien
tgcagcacgggcctctccaattgtg

SEQ ID NO: 1268052 - DNA, 25 bp, Homo sapien
tcccttacacccactgaagctgagg

SEQ ID NO: 1268053 - DNA, 25 bp, Homo sapien
ctcccttacacccactgaagctgag

SEQ ID NO: 1268054 - DNA, 25 bp, Homo sapien
agcggctcccttacacccactgaag

SEQ ID NO: 1268055 - DNA, 25 bp, Homo sapien
gaaggagcggctcccttacacccac

SEQ ID NO: 1268056 - DNA, 25 bp, Homo sapien
gccagcctcgctgacgtcgcttttg

SEQ ID NO: 1268057 - DNA, 25 bp, Homo sapien
tccctgagtctctcgtgttgctggg

SEQ ID NO: 1268058 - DNA, 25 bp, Homo sapien
tgcagcctttggcaaacggcgttgc

SEQ ID NO: 1268059 - DNA, 25 bp, Homo sapien
gttgctgagcgagtgttccctgagt

SEQ ID NO: 1268060 - DNA, 25 bp, Homo sapien
gcccggggcagattcatggctctgc

SEQ ID NO: 1268061 - DNA, 25 bp, Homo sapien
aggcccggggcagattcatggctct

SEQ ID NO: 1268062 - DNA, 25 bp, Homo sapien
caggcccggggcagattcatggctc

SEQ ID NO: 1268063 - DNA, 25 bp, Homo sapien
cccggggcagattcatggctctgct

SEQ ID NO: 1268064 - DNA, 25 bp, Homo sapien
tccgggcctccgtggtatacacctg

SEQ ID NO: 1268065 - DNA, 25 bp, Homo sapien
cctgtagcccatgtagtagacggtt

SEQ ID NO: 1268066 - DNA, 25 bp, Homo sapien
ctgcctgtagcccatgtagtagacg

SEQ ID NO: 1268067 - DNA, 25 bp, Homo sapien
tcggcagcacctgagcacggtccgg

SEQ ID NO: 1268068 - DNA, 25 bp, Homo sapien
cgtcgcgggactggctgtattcggc

SEQ ID NO: 1268069 - DNA, 25 bp, Homo sapien
tcgcgggactggctgtattcggctc

SEQ ID NO: 1268070 - DNA, 25 bp, Homo sapien
gggactggctgtattcggctctcac

SEQ ID NO: 1268071 - DNA, 25 bp, Homo sapien
cgggactggctgtattcggctctca

SEQ ID NO: 1268072 - DNA, 25 bp, Homo sapien
gagactgactctgcgtcagccgggt

SEQ ID NO: 1268073 - DNA, 25 bp, Homo sapien
ctggggagactgactctgcgtcagc

SEQ ID NO: 1268074 - DNA, 25 bp, Homo sapien
actgactctgcgtcagccgggttcc

SEQ ID NO: 1268075 - DNA, 25 bp, Homo sapien
cgtcagccgggttcccggcggcaca

SEQ ID NO: 1268076 - DNA, 25 bp, Homo sapien
ctgaacgagggggcagcatggaggc

SEQ ID NO: 1268077 - DNA, 25 bp, Homo sapien
gcagcatggaggcagcaggggccat

SEQ ID NO: 1268078 - DNA, 25 bp, Homo sapien
tgaacgagggggcagcatggaggca

SEQ ID NO: 1268079 - DNA, 25 bp, Homo sapien
ggggcagcatggaggcagcaggggc

SEQ ID NO: 1268080 - DNA, 25 bp, Homo sapien
caccagcccacacgggctccaacgc

SEQ ID NO: 1268081 - DNA, 25 bp, Homo sapien
ccccaaaagggaatgacccttgcag

SEQ ID NO: 1268082 - DNA, 25 bp, Homo sapien
ccacacgggctccaacgctggggag

SEQ ID NO: 1268083 - DNA, 25 bp, Homo sapien
cccaaaagggaatgacccttgcagt

SEQ ID NO: 1268084 - DNA, 25 bp, Homo sapien
tccagggcaggagggtgaccctgca

SEQ ID NO: 1268085 - DNA, 25 bp, Homo sapien
gaggtgtctccttgtctgtccaggg

SEQ ID NO: 1268086 - DNA, 25 bp, Homo sapien
tcccccccagagctcaggagaggag

SEQ ID NO: 1268087 - DNA, 25 bp, Homo sapien
gcctgctggcctcccccccagagct

SEQ ID NO: 1268088 - DNA, 25 bp, Homo sapien
cctcggctctcagccaccctgcatc

SEQ ID NO: 1268089 - DNA, 25 bp, Homo sapien
ctcggctctcagccaccctgcatcc

SEQ ID NO: 1268090 - DNA, 25 bp, Homo sapien
gctgtgtggcagagctgtccctgtg

SEQ ID NO: 1268091 - DNA, 25 bp, Homo sapien
gtatctgctgtgtggcagagctgtc

SEQ ID NO: 1268092 - DNA, 25 bp, Homo sapien
gtccctgtgggcacaggaggagtgg

SEQ ID NO: 1268093 - DNA, 25 bp, Homo sapien
cctgtgggcacaggaggagtggcct

SEQ ID NO: 1268094 - DNA, 25 bp, Homo sapien
agtgagttgggaacctggtcataag

SEQ ID NO: 1268095 - DNA, 25 bp, Homo sapien
ctcgagggcaaatgggcaagggctc

SEQ ID NO: 1268096 - DNA, 25 bp, Homo sapien
gggctcgagggcaaatgggcaaggg

SEQ ID NO: 1268097 - DNA, 25 bp, Homo sapien
tgggaacctggtcataagcactggg

SEQ ID NO: 1268098 - DNA, 25 bp, Homo sapien
agtagagcacacaggacgcccatcc

SEQ ID NO: 1268099 - DNA, 25 bp, Homo sapien
gggctggttccagtagagcacacag

SEQ ID NO: 1268100 - DNA, 25 bp, Homo sapien
gttccagtagagcacacaggacgcc

SEQ ID NO: 1268101 - DNA, 25 bp, Homo sapien
tggttccagtagagcacacaggacg

SEQ ID NO: 1268102 - DNA, 25 bp, Homo sapien
gcacaacccgctttgcggcagggct

SEQ ID NO: 1268103 - DNA, 25 bp, Homo sapien
agctcccggcacaacccgctttgcg

SEQ ID NO: 1268104 - DNA, 25 bp, Homo sapien
acaacccgctttgcggcagggctgg

SEQ ID NO: 1268105 - DNA, 25 bp, Homo sapien
cggcacaacccgctttgcggcaggg

SEQ ID NO: 1268106 - DNA, 25 bp, Homo sapien
gcctcatgctcagatgagggcttca

SEQ ID NO: 1268107 - DNA, 25 bp, Homo sapien
catgctcagatgagggcttcaggca

SEQ ID NO: 1268108 - DNA, 25 bp, Homo sapien
gaggcctcatgctcagatgagggct

SEQ ID NO: 1268109 - DNA, 25 bp, Homo sapien
ctcatgctcagatgagggcttcagg

SEQ ID NO: 1268110 - DNA, 25 bp, Homo sapien
ctccgctcatgacccacgcaccacg

SEQ ID NO: 1268111 - DNA, 25 bp, Homo sapien
gtggcttaaggcctgcacgcacggc

SEQ ID NO: 1268112 - DNA, 25 bp, Homo sapien
tggcttaaggcctgcacgcacggct

SEQ ID NO: 1268113 - DNA, 25 bp, Homo sapien
ttaaggcctgcacgcacggctggcg

SEQ ID NO: 1268114 - DNA, 25 bp, Homo sapien
gcttaaggcctgcacgcacggctgg

SEQ ID NO: 1268115 - DNA, 25 bp, Homo sapien
cttaagccagccatccagaccccac

SEQ ID NO: 1268116 - DNA, 25 bp, Homo sapien
agcaggtggagaaaggactcaggcc

SEQ ID NO: 1268117 - DNA, 25 bp, Homo sapien
tcggagcaggtggagaaaggactca

SEQ ID NO: 1268118 - DNA, 25 bp, Homo sapien
cgggctcggagcaggtggagaaagg

SEQ ID NO: 1268119 - DNA, 25 bp, Homo sapien
gctcggagcaggtggagaaaggact

SEQ ID NO: 1268120 - DNA, 25 bp, Homo sapien
cgaaggctgggaccagagtccagct

SEQ ID NO: 1268121 - DNA, 25 bp, Homo sapien
ctggacatgtcctgcccatgacctc

SEQ ID NO: 1268122 - DNA, 25 bp, Homo sapien
agctgcccacccacgaaggggcaga

SEQ ID NO: 1268123 - DNA, 25 bp, Homo sapien
tctccagtcaagtccgagaggggct

SEQ ID NO: 1268124 - DNA, 25 bp, Homo sapien
acgcttttgccgtccctgtgccttg

SEQ ID NO: 1268125 - DNA, 25 bp, Homo sapien
tgctacaggcattgaacgcttttgc

SEQ ID NO: 1268126 - DNA, 25 bp, Homo sapien
gggccataggaactgctacaggcat

SEQ ID NO: 1268127 - DNA, 25 bp, Homo sapien
ttgcaacgcacttacccacggcgag

SEQ ID NO: 1268128 - DNA, 25 bp, Homo sapien
gggtgagtgtgggaacgactgtctc

SEQ ID NO: 1268129 - DNA, 25 bp, Homo sapien
gtgtgggaacgactgtctcctctgg

SEQ ID NO: 1268130 - DNA, 25 bp, Homo sapien
tcaatcaagccagccttcaaggagg

SEQ ID NO: 1268131 - DNA, 25 bp, Homo sapien
gagtgtgggaacgactgtctcctct

SEQ ID NO: 1268132 - DNA, 25 bp, Homo sapien
aactcagactctcgctggtggacga

SEQ ID NO: 1268133 - DNA, 25 bp, Homo sapien
tctcgctggtggacgatctgtgagc

SEQ ID NO: 1268134 - DNA, 25 bp, Homo sapien
gcctgccaccgtcacagaactcaga

SEQ ID NO: 1268135 - DNA, 25 bp, Homo sapien
tcacagaactcagactctcgctggt

SEQ ID NO: 1268136 - DNA, 25 bp, Homo sapien
ttccaagtacagtatctgcctgagc

SEQ ID NO: 1268137 - DNA, 25 bp, Homo sapien
cgcttccaagtacagtatctgcctg

SEQ ID NO: 1268138 - DNA, 25 bp, Homo sapien
gcttccaagtacagtatctgcctga

SEQ ID NO: 1268139 - DNA, 25 bp, Homo sapien
cttccaagtacagtatctgcctgag

SEQ ID NO: 1268140 - DNA, 25 bp, Homo sapien
ccctcgcctcttcaaggaacgacat

SEQ ID NO: 1268141 - DNA, 25 bp, Homo sapien
aacgccaggaccaccgcgcgccccg

SEQ ID NO: 1268142 - DNA, 25 bp, Homo sapien
tgccctcgcctcttcaaggaacgac

SEQ ID NO: 1268143 - DNA, 25 bp, Homo sapien
gctgccctcgcctcttcaaggaacg

SEQ ID NO: 1268144 - DNA, 25 bp, Homo sapien
tgctgggcgtgccaagaacacattg

SEQ ID NO: 1268145 - DNA, 25 bp, Homo sapien
gcacctgttggatccgcggccattt

SEQ ID NO: 1268146 - DNA, 25 bp, Homo sapien
caaggtccccgctggtaagatagct

SEQ ID NO: 1268147 - DNA, 25 bp, Homo sapien
taaccggactggatacttggacctc

SEQ ID NO: 1268148 - DNA, 25 bp, Homo sapien
gggcgcgcattccagcactttctac

SEQ ID NO: 1268149 - DNA, 25 bp, Homo sapien
taccctccggcttcagagtgcattg

SEQ ID NO: 1268150 - DNA, 25 bp, Homo sapien
ttgctgaaggctcgcgacagcctgg

SEQ ID NO: 1268151 - DNA, 25 bp, Homo sapien
tgttccacctcgaactgcgagcgct

SEQ ID NO: 1268152 - DNA, 25 bp, Homo sapien
cagaaggccgaagggggcatcccac

SEQ ID NO: 1268153 - DNA, 25 bp, Homo sapien
acttgcagggcgggtcacccgcttt

SEQ ID NO: 1268154 - DNA, 25 bp, Homo sapien
ttgcagggcgggtcacccgctttcc

SEQ ID NO: 1268155 - DNA, 25 bp, Homo sapien
tgcgctccagaaggccgaagggggc

SEQ ID NO: 1268156 - DNA, 25 bp, Homo sapien
agggaatcgggtactttgcttgttg

SEQ ID NO: 1268157 - DNA, 25 bp, Homo sapien
tcgggtactttgcttgttgaataat

SEQ ID NO: 1268158 - DNA, 25 bp, Homo sapien
tgtattcatagttaaagggaatcgg

SEQ ID NO: 1268159 - DNA, 25 bp, Homo sapien
tacacctctctggattcgaagtttg

SEQ ID NO: 1268160 - DNA, 25 bp, Homo sapien
atgcccgggcttcgatgtgcctgga

SEQ ID NO: 1268161 - DNA, 25 bp, Homo sapien
ctaaacatgcccgggcttcgatgtg

SEQ ID NO: 1268162 - DNA, 25 bp, Homo sapien
gcttcgatgtgcctggaggatttcc

SEQ ID NO: 1268163 - DNA, 25 bp, Homo sapien
cttcgatgtgcctggaggatttccc

SEQ ID NO: 1268164 - DNA, 25 bp, Homo sapien
tgtatctgcgcagcttgctcgtgtg

SEQ ID NO: 1268165 - DNA, 25 bp, Homo sapien
tgccagttcttcagctctaggactt

SEQ ID NO: 1268166 - DNA, 25 bp, Homo sapien
tgtcgataagcttcacgcactggct

SEQ ID NO: 1268167 - DNA, 25 bp, Homo sapien
gtagctttaagcaaacggtgtggca

SEQ ID NO: 1268168 - DNA, 25 bp, Homo sapien
tagaatcaatcactgaatccagacc

SEQ ID NO: 1268169 - DNA, 25 bp, Homo sapien
aaaaatagaatcaatcactgaatcc

SEQ ID NO: 1268170 - DNA, 25 bp, Homo sapien
gaaacacagagtagccctgtttctg

SEQ ID NO: 1268171 - DNA, 25 bp, Homo sapien
ttctgcacacgttagtgcaccgctg

SEQ ID NO: 1268172 - DNA, 25 bp, Homo sapien
ctgaggagggccatcgagtctccgc

SEQ ID NO: 1268173 - DNA, 25 bp, Homo sapien
tctccgcttaaatgccagcacagag

SEQ ID NO: 1268174 - DNA, 25 bp, Homo sapien
cagaggcagaagtgatccttgctga

SEQ ID NO: 1268175 - DNA, 25 bp, Homo sapien
aagcagaggcagaagtgatccttgc

SEQ ID NO: 1268176 - DNA, 25 bp, Homo sapien
cagtttccctggagtgctgccggag

SEQ ID NO: 1268177 - DNA, 25 bp, Homo sapien
acaggtggccagaggattacagcag

SEQ ID NO: 1268178 - DNA, 25 bp, Homo sapien
gagaggctgcttctagcccataaag

SEQ ID NO: 1268179 - DNA, 25 bp, Homo sapien
ccagagctgcctcaagtcagggaga

SEQ ID NO: 1268180 - DNA, 25 bp, Homo sapien
gcccgtgtgatgccagactgcacac

SEQ ID NO: 1268181 - DNA, 25 bp, Homo sapien
acagcaaggctgccacgtccgtggc

SEQ ID NO: 1268182 - DNA, 25 bp, Homo sapien
aaggctgccacgtccgtggcctcgg

SEQ ID NO: 1268183 - DNA, 25 bp, Homo sapien
ccgtgtgatgccagactgcacacag

SEQ ID NO: 1268184 - DNA, 25 bp, Homo sapien
acagctgctcgagcaccgcgaacag

SEQ ID NO: 1268185 - DNA, 25 bp, Homo sapien
atgtcccagacccagacggcattgg

SEQ ID NO: 1268186 - DNA, 25 bp, Homo sapien
tgctgcctcccgtgcagatggccag

SEQ ID NO: 1268187 - DNA, 25 bp, Homo sapien
ctgcgggtcccactgaaatgcgcgc

SEQ ID NO: 1268188 - DNA, 25 bp, Homo sapien
ctgcagaaacgtgaaaggaggtgac

SEQ ID NO: 1268189 - DNA, 25 bp, Homo sapien
caaggagcttctgtgagcacctcgg

SEQ ID NO: 1268190 - DNA, 25 bp, Homo sapien
cacaggacacagtaaagggtgagac

SEQ ID NO: 1268191 - DNA, 25 bp, Homo sapien
cccttaacaaaaggcgggctgcagt

SEQ ID NO: 1268192 - DNA, 25 bp, Homo sapien
gattttcgggtttgctctgtcggta

SEQ ID NO: 1268193 - DNA, 25 bp, Homo sapien
cagcattcctatgccgattttcggg

SEQ ID NO: 1268194 - DNA, 25 bp, Homo sapien
gttccttgtcgccaggaagtagctg

SEQ ID NO: 1268195 - DNA, 25 bp, Homo sapien
agtagctgtcaggactaaatgccag

SEQ ID NO: 1268196 - DNA, 25 bp, Homo sapien
ggtctccagggctcatattcagtaa

SEQ ID NO: 1268197 - DNA, 25 bp, Homo sapien
tactatgcccatttcagcgatgagg

SEQ ID NO: 1268198 - DNA, 25 bp, Homo sapien
gaaaaacatcattctcggagctccg

SEQ ID NO: 1268199 - DNA, 25 bp, Homo sapien
tattcagtaacagaagccgcacctt

SEQ ID NO: 1268200 - DNA, 25 bp, Homo sapien
tttactctctgagctcgggagaggg

SEQ ID NO: 1268201 - DNA, 25 bp, Homo sapien
ttactctctgagctcgggagagggc

SEQ ID NO: 1268202 - DNA, 25 bp, Homo sapien
atttactctctgagctcgggagagg

SEQ ID NO: 1268203 - DNA, 25 bp, Homo sapien
tctctgagctcgggagagggccggc

SEQ ID NO: 1268204 - DNA, 25 bp, Homo sapien
aggagcccaccctttgagacacagg

SEQ ID NO: 1268205 - DNA, 25 bp, Homo sapien
tgtgattacagacgggagaccactg

SEQ ID NO: 1268206 - DNA, 25 bp, Homo sapien
caaggatggacgtggcaaatgccca

SEQ ID NO: 1268207 - DNA, 25 bp, Homo sapien
gaacacttgcaccaacacagcagag

SEQ ID NO: 1268208 - DNA, 25 bp, Homo sapien
ttcatcgaatccaagccgcctttca

SEQ ID NO: 1268209 - DNA, 25 bp, Homo sapien
aatccaagccgcctttcactcagct

SEQ ID NO: 1268210 - DNA, 25 bp, Homo sapien
cctcttcatcgaatccaagccgcct

SEQ ID NO: 1268211 - DNA, 25 bp, Homo sapien
tggcctcttcatcgaatccaagccg

SEQ ID NO: 1268212 - DNA, 25 bp, Homo sapien
tgtcggttacaggtcaacaccagga

SEQ ID NO: 1268213 - DNA, 25 bp, Homo sapien
gctgcacacatggatgcgtggccca

SEQ ID NO: 1268214 - DNA, 25 bp, Homo sapien
caagtttacggtgatggaagtgccc

SEQ ID NO: 1268215 - DNA, 25 bp, Homo sapien
tccctgatcactggtgcagcatctg

SEQ ID NO: 1268216 - DNA, 25 bp, Homo sapien
gcagaaacacgtgttccagacttac

SEQ ID NO: 1268217 - DNA, 25 bp, Homo sapien
caagtcacgtgattaaggatgcgca

SEQ ID NO: 1268218 - DNA, 25 bp, Homo sapien
tgcaggatgcccaaactccgtgatc

SEQ ID NO: 1268219 - DNA, 25 bp, Homo sapien
cattttccaagtcacgtgattaagg

SEQ ID NO: 1268220 - DNA, 25 bp, Homo sapien
caaactccgtgatcattttccaagt

SEQ ID NO: 1268221 - DNA, 25 bp, Homo sapien
ttcctgagtgccctgcactggttcc

SEQ ID NO: 1268222 - DNA, 25 bp, Homo sapien
ggcggtcggacttcctgagtgccct

SEQ ID NO: 1268223 - DNA, 25 bp, Homo sapien
cggacttcctgagtgccctgcactg

SEQ ID NO: 1268224 - DNA, 25 bp, Homo sapien
cccgctgggcggtcggacttcctga

SEQ ID NO: 1268225 - DNA, 25 bp, Homo sapien
ctgtacgtggacaacaaccggccat

SEQ ID NO: 1268226 - DNA, 25 bp, Homo sapien
ccagggaccactcgtaagcgctgta

SEQ ID NO: 1268227 - DNA, 25 bp, Homo sapien
tccaatgagtacagcagaatcttgt

SEQ ID NO: 1268228 - DNA, 25 bp, Homo sapien
caaccggccatccaatgagtacagc

SEQ ID NO: 1268229 - DNA, 25 bp, Homo sapien
tcagaaagcatgaaattccgggaaa

SEQ ID NO: 1268230 - DNA, 25 bp, Homo sapien
tctcgaaagcaaacatgtcacctgg

SEQ ID NO: 1268231 - DNA, 25 bp, Homo sapien
tactgagatagtcacggagaggcag

SEQ ID NO: 1268232 - DNA, 25 bp, Homo sapien
ggaggtcaacctaatggctcgctga

SEQ ID NO: 1268233 - DNA, 25 bp, Homo sapien
tgccagcacacagccgtttggggcc

SEQ ID NO: 1268234 - DNA, 25 bp, Homo sapien
gtgagatcctgggtgtccgtatcaa

SEQ ID NO: 1268235 - DNA, 25 bp, Homo sapien
gagatcctgggtgtccgtatcaaaa

SEQ ID NO: 1268236 - DNA, 25 bp, Homo sapien
agcacacagccgtttggggcccact

SEQ ID NO: 1268237 - DNA, 25 bp, Homo sapien
aagtctcctgaacacacaaccgggt

SEQ ID NO: 1268238 - DNA, 25 bp, Homo sapien
cactggaagtgattcgcagcgcacc

SEQ ID NO: 1268239 - DNA, 25 bp, Homo sapien
gaaatccctgtagagctgctgctgg

SEQ ID NO: 1268240 - DNA, 25 bp, Homo sapien
tctgacagcattccagaggttgctc

SEQ ID NO: 1268241 - DNA, 25 bp, Homo sapien
ccacagtcagcaggacaactttatt

SEQ ID NO: 1268242 - DNA, 25 bp, Homo sapien
aatctggaaggatctacttcactcg

SEQ ID NO: 1268243 - DNA, 25 bp, Homo sapien
gcaggacaactttattccagtctgg

SEQ ID NO: 1268244 - DNA, 25 bp, Homo sapien
tatcctaccaaagatcccctggaat

SEQ ID NO: 1268245 - DNA, 25 bp, Homo sapien
tttgcagtcgcgccgttctgccagc

SEQ ID NO: 1268246 - DNA, 25 bp, Homo sapien
caatcactgcagacgaagatgctca

SEQ ID NO: 1268247 - DNA, 25 bp, Homo sapien
gccatgtagcggccgtccctggtga

SEQ ID NO: 1268248 - DNA, 25 bp, Homo sapien
ttctgccagcgccatgtagcggccg

SEQ ID NO: 1268249 - DNA, 25 bp, Homo sapien
ttcgggtatttgatgtaagacacgg

SEQ ID NO: 1268250 - DNA, 25 bp, Homo sapien
cctgcagacaagctttcgggtattt

SEQ ID NO: 1268251 - DNA, 25 bp, Homo sapien
acaaggaccagacggttatccgcag

SEQ ID NO: 1268252 - DNA, 25 bp, Homo sapien
tgtaagacacggattttgtgcacaa

SEQ ID NO: 1268253 - DNA, 25 bp, Homo sapien
ggggctgtgagcctgcatctgcagc

SEQ ID NO: 1268254 - DNA, 25 bp, Homo sapien
cagggggctgtgagcctgcatctgc

SEQ ID NO: 1268255 - DNA, 25 bp, Homo sapien
gggctgtgagcctgcatctgcagcc

SEQ ID NO: 1268256 - DNA, 25 bp, Homo sapien
agggggctgtgagcctgcatctgca

SEQ ID NO: 1268257 - DNA, 25 bp, Homo sapien
gaggtgcggggacacaaggtgcggg

SEQ ID NO: 1268258 - DNA, 25 bp, Homo sapien
taactgaaatatggccgaggtgcgg

SEQ ID NO: 1268259 - DNA, 25 bp, Homo sapien
atgaatctggtagttaactgaaata

SEQ ID NO: 1268260 - DNA, 25 bp, Homo sapien
ccgaggtgcggggacacaaggtgcg

SEQ ID NO: 1268261 - DNA, 25 bp, Homo sapien
ctgactgccagctccgtgtgtgtca

SEQ ID NO: 1268262 - DNA, 25 bp, Homo sapien
cacagggctgcgcagctccatgtgg

SEQ ID NO: 1268263 - DNA, 25 bp, Homo sapien
ccagctccgtgtgtgtcaggcaggg

SEQ ID NO: 1268264 - DNA, 25 bp, Homo sapien
cacagggctgcgcagctccatgcgg

SEQ ID NO: 1268265 - DNA, 25 bp, Homo sapien
catgcctcggaactccagctgcaca

SEQ ID NO: 1268266 - DNA, 25 bp, Homo sapien
tgtgctgatgctgaacccgaaacac

SEQ ID NO: 1268267 - DNA, 25 bp, Homo sapien
gatgctgaacccgaaacacactggc

SEQ ID NO: 1268268 - DNA, 25 bp, Homo sapien
ggaccatgcctcggaactccagctg

SEQ ID NO: 1268269 - DNA, 25 bp, Homo sapien
ctgatccacgctacgacccagtgtg

SEQ ID NO: 1268270 - DNA, 25 bp, Homo sapien
actggagaagccagcggaggagacc

SEQ ID NO: 1268271 - DNA, 25 bp, Homo sapien
ggagacccgtgggatgggctccaca

SEQ ID NO: 1268272 - DNA, 25 bp, Homo sapien
aggaaggggccgctgatccacgcta

SEQ ID NO: 1268273 - DNA, 25 bp, Homo sapien
accgatccacaccacaactcagcat

SEQ ID NO: 1268274 - DNA, 25 bp, Homo sapien
ggaaggaacgggccaccgatccaca

SEQ ID NO: 1268275 - DNA, 25 bp, Homo sapien
gaaggaacgggccaccgatccacac

SEQ ID NO: 1268276 - DNA, 25 bp, Homo sapien
ggccaccgatccacaccacaactca

SEQ ID NO: 1268277 - DNA, 25 bp, Homo sapien
caagccatgacccagtacactcaag

SEQ ID NO: 1268278 - DNA, 25 bp, Homo sapien
gtacactcaagacgggaggaacagg

SEQ ID NO: 1268279 - DNA, 25 bp, Homo sapien
agaggaatgggccacggatccaagc

SEQ ID NO: 1268280 - DNA, 25 bp, Homo sapien
aatgggccacggatccaagccatga

SEQ ID NO: 1268281 - DNA, 25 bp, Homo sapien
catagaacctcaataatgtagacag

SEQ ID NO: 1268282 - DNA, 25 bp, Homo sapien
atagaacctcaataatgtagacagt

SEQ ID NO: 1268283 - DNA, 25 bp, Homo sapien
ggcacataggtggaccaacagtgga

SEQ ID NO: 1268284 - DNA, 25 bp, Homo sapien
tggcacataggtggaccaacagtgg

SEQ ID NO: 1268285 - DNA, 25 bp, Homo sapien
gtggtgacgcacacgtccagcaggc

SEQ ID NO: 1268286 - DNA, 25 bp, Homo sapien
cagcgatgcctgtcaacacggagga

SEQ ID NO: 1268287 - DNA, 25 bp, Homo sapien
atggcgttcctcacgaggaagggaa

SEQ ID NO: 1268288 - DNA, 25 bp, Homo sapien
caggcgaggactgaatggcgttcct

SEQ ID NO: 1268289 - DNA, 25 bp, Homo sapien
gcaagcttgccttttcacgttaaaa

SEQ ID NO: 1268290 - DNA, 25 bp, Homo sapien
caagaggcagggacgtctcccatgc

SEQ ID NO: 1268291 - DNA, 25 bp, Homo sapien
ctaatgggcgcaagcttgccttttc

SEQ ID NO: 1268292 - DNA, 25 bp, Homo sapien
aggcagggacgtctcccatgctcca

SEQ ID NO: 1268293 - DNA, 25 bp, Homo sapien
gggtggcgccttcgcaagtggactc

SEQ ID NO: 1268294 - DNA, 25 bp, Homo sapien
ttcgcaagtggactcagcggcccca

SEQ ID NO: 1268295 - DNA, 25 bp, Homo sapien
ggcgccttcgcaagtggactcagcg

SEQ ID NO: 1268296 - DNA, 25 bp, Homo sapien
gccttcgcaagtggactcagcggcc

SEQ ID NO: 1268297 - DNA, 25 bp, Homo sapien
cccggacatggggtcgcgccttcgg

SEQ ID NO: 1268298 - DNA, 25 bp, Homo sapien
cggacatggggtcgcgccttcggaa

SEQ ID NO: 1268299 - DNA, 25 bp, Homo sapien
gctgagccccggacatggggtcgcg

SEQ ID NO: 1268300 - DNA, 25 bp, Homo sapien
ccggacatggggtcgcgccttcgga

SEQ ID NO: 1268301 - DNA, 25 bp, Homo sapien
tcaacattcccctccgcgctgagct

SEQ ID NO: 1268302 - DNA, 25 bp, Homo sapien
cgcgctgagctcagcacggaggctg

SEQ ID NO: 1268303 - DNA, 25 bp, Homo sapien
cagcacggaggctgttgtgcggtac

SEQ ID NO: 1268304 - DNA, 25 bp, Homo sapien
ttctcggatgtcaacattcccctcc

SEQ ID NO: 1268305 - DNA, 25 bp, Homo sapien
aattccgtggtgttgagaatgtggc

SEQ ID NO: 1268306 - DNA, 25 bp, Homo sapien
tctattttgcagtgccattcgggct

SEQ ID NO: 1268307 - DNA, 25 bp, Homo sapien
agaatgtggcgcccgtccgggctcc

SEQ ID NO: 1268308 - DNA, 25 bp, Homo sapien
cccggctgagccctcgtctattttg

SEQ ID NO: 1268309 - DNA, 25 bp, Homo sapien
catttagttaagctttggacacaga

SEQ ID NO: 1268310 - DNA, 25 bp, Homo sapien
catccgcgtggctagattgctgtca

SEQ ID NO: 1268311 - DNA, 25 bp, Homo sapien
ctggctttgagctgcacggactttt

SEQ ID NO: 1268312 - DNA, 25 bp, Homo sapien
tccagattctaagcgacacggcagc

SEQ ID NO: 1268313 - DNA, 25 bp, Homo sapien
cacaggatgaagagcgagtctgccg

SEQ ID NO: 1268314 - DNA, 25 bp, Homo sapien
tggatctggtctaggcacgtgtaca

SEQ ID NO: 1268315 - DNA, 25 bp, Homo sapien
gatctgaagggtgttcacatcccgg

SEQ ID NO: 1268316 - DNA, 25 bp, Homo sapien
cactaaccggtactggacacaggaa

SEQ ID NO: 1268317 - DNA, 25 bp, Homo sapien
ggatgtcctgcccgtggcccaggtc

SEQ ID NO: 1268318 - DNA, 25 bp, Homo sapien
gcaccgaggatgtcctgcccgtggc

SEQ ID NO: 1268319 - DNA, 25 bp, Homo sapien
tggcaccgaggatgtcctgcccgtg

SEQ ID NO: 1268320 - DNA, 25 bp, Homo sapien
gctggcaccgaggatgtcctgcccg

SEQ ID NO: 1268321 - DNA, 25 bp, Homo sapien
ttgccgtccggggagaacttgcaga

SEQ ID NO: 1268322 - DNA, 25 bp, Homo sapien
gcttgaatacctcggagaagttcat

SEQ ID NO: 1268323 - DNA, 25 bp, Homo sapien
cagagtaagctggagagcttgaata

SEQ ID NO: 1268324 - DNA, 25 bp, Homo sapien
tccggggagaacttgcagagtaagc

SEQ ID NO: 1268325 - DNA, 25 bp, Homo sapien
cgcgggcgccaccctgcgcccgaaa

SEQ ID NO: 1268326 - DNA, 25 bp, Homo sapien
gcgggcgccaccctgcgcccgaaaa

SEQ ID NO: 1268327 - DNA, 25 bp, Homo sapien
ctgagatcaaggagagaacgaattt

SEQ ID NO: 1268328 - DNA, 25 bp, Homo sapien
aatttgccgctgactgggcagagcg

SEQ ID NO: 1268329 - DNA, 25 bp, Homo sapien
agagcgagcgcgtggatcgcggcca

SEQ ID NO: 1268330 - DNA, 25 bp, Homo sapien
gagaacgaatttgccgctgactggg

SEQ ID NO: 1268331 - DNA, 25 bp, Homo sapien
gggctggcaccgggcgaagaatcgt

SEQ ID NO: 1268332 - DNA, 25 bp, Homo sapien
ccgggcgaagaatcgtgcgggtctg

SEQ ID NO: 1268333 - DNA, 25 bp, Homo sapien
tggcaccgggcgaagaatcgtgcgg

SEQ ID NO: 1268334 - DNA, 25 bp, Homo sapien
gcgaagaatcgtgcgggtctgggac

SEQ ID NO: 1268335 - DNA, 25 bp, Homo sapien
agaggacatcggttcggagccagat

SEQ ID NO: 1268336 - DNA, 25 bp, Homo sapien
ggagccagatcacgggccccataag

SEQ ID NO: 1268337 - DNA, 25 bp, Homo sapien
taagcatcagaccataagcagcgcc

SEQ ID NO: 1268338 - DNA, 25 bp, Homo sapien
tcggaactcgcccagcatgtcgggt

SEQ ID NO: 1268339 - DNA, 25 bp, Homo sapien
ggagtgttcgcgtcctgggtgaccc

SEQ ID NO: 1268340 - DNA, 25 bp, Homo sapien
gccgcccgggagtgttcgcgtcctg

SEQ ID NO: 1268341 - DNA, 25 bp, Homo sapien
gcgagctccttccaaacaccgaacg

SEQ ID NO: 1268342 - DNA, 25 bp, Homo sapien
gaacgggatccagagcccgagccca

SEQ ID NO: 1268343 - DNA, 25 bp, Homo sapien
cccccagaggctctccgcgggatcc

SEQ ID NO: 1268344 - DNA, 25 bp, Homo sapien
gcccccagaggctctccgcgggatc

SEQ ID NO: 1268345 - DNA, 25 bp, Homo sapien
ccccagaggctctccgcgggatcct

SEQ ID NO: 1268346 - DNA, 25 bp, Homo sapien
agcccccagaggctctccgcgggat

SEQ ID NO: 1268347 - DNA, 25 bp, Homo sapien
tccacaggagaagtgggtggcaagc

SEQ ID NO: 1268348 - DNA, 25 bp, Homo sapien
gggcgggaccgtggctccacaggag

SEQ ID NO: 1268349 - DNA, 25 bp, Homo sapien
ttggcggaaagcagccgttcccctc

SEQ ID NO: 1268350 - DNA, 25 bp, Homo sapien
tggcaagccctgcttggcggaaagc

SEQ ID NO: 1268351 - DNA, 25 bp, Homo sapien
ccagctctgccgaagatcgcggtcg

SEQ ID NO: 1268352 - DNA, 25 bp, Homo sapien
tctgccgaagatcgcggtcgggtct

SEQ ID NO: 1268353 - DNA, 25 bp, Homo sapien
cgcggtcgggtctggcccgcgggag

SEQ ID NO: 1268354 - DNA, 25 bp, Homo sapien
tgcttcggccctgcgtgggcggcct

SEQ ID NO: 1268355 - DNA, 25 bp, Homo sapien
gggctcgcagctccgaagctgggag

SEQ ID NO: 1268356 - DNA, 25 bp, Homo sapien
tgggctcgcagctccgaagctggga

SEQ ID NO: 1268357 - DNA, 25 bp, Homo sapien
gattgataacactgagcacgtgtga

SEQ ID NO: 1268358 - DNA, 25 bp, Homo sapien
cactgagcacgtgtgaaaggcacgg

SEQ ID NO: 1268359 - DNA, 25 bp, Homo sapien
aatggattgataacactgagcacgt

SEQ ID NO: 1268360 - DNA, 25 bp, Homo sapien
gataacactgagcacgtgtgaaagg

SEQ ID NO: 1268361 - DNA, 25 bp, Homo sapien
ggtgctacagaaggtcgggggacat

SEQ ID NO: 1268362 - DNA, 25 bp, Homo sapien
ttggacagagaggagacgccgtccc

SEQ ID NO: 1268363 - DNA, 25 bp, Homo sapien
ggacatcggtctgcgcggaagggtc

SEQ ID NO: 1268364 - DNA, 25 bp, Homo sapien
gccgtcccagtggtggcctccagtg

SEQ ID NO: 1268365 - DNA, 25 bp, Homo sapien
gtttgtagatgttgggctccgagca

SEQ ID NO: 1268366 - DNA, 25 bp, Homo sapien
gaagctccacggtacagaaactggg

SEQ ID NO: 1268367 - DNA, 25 bp, Homo sapien
tgagccccattgtttcctagtctga

SEQ ID NO: 1268368 - DNA, 25 bp, Homo sapien
catcttctgcggtttggtctctggc

SEQ ID NO: 1268369 - DNA, 25 bp, Homo sapien
ccaaattgccactctcctggagcag

SEQ ID NO: 1268370 - DNA, 25 bp, Homo sapien
cttctgttggggccccaggatcctg

SEQ ID NO: 1268371 - DNA, 25 bp, Homo sapien
ccggcttctgttggggccccaggat

SEQ ID NO: 1268372 - DNA, 25 bp, Homo sapien
ggcttctgttggggccccaggatcc

SEQ ID NO: 1268373 - DNA, 25 bp, Homo sapien
tcaccggcttctgttggggccccag

SEQ ID NO: 1268374 - DNA, 25 bp, Homo sapien
ggcatccacagggagtaaggccagc

SEQ ID NO: 1268375 - DNA, 25 bp, Homo sapien
acggaggtcctttcatgtcaccaag

SEQ ID NO: 1268376 - DNA, 25 bp, Homo sapien
gccacggaggtcctttcatgtcacc

SEQ ID NO: 1268377 - DNA, 25 bp, Homo sapien
ccagccacggaggtcctttcatgtc

SEQ ID NO: 1268378 - DNA, 25 bp, Homo sapien
ctctgaggtgtcaggcagggttggg

SEQ ID NO: 1268379 - DNA, 25 bp, Homo sapien
tgctgctctgaggtgtcaggcaggg

SEQ ID NO: 1268380 - DNA, 25 bp, Homo sapien
atacatgagccagacccgcagcttt

SEQ ID NO: 1268381 - DNA, 25 bp, Homo sapien
tttctccaccagtccgaatacatga

SEQ ID NO: 1268382 - DNA, 25 bp, Homo sapien
ccttgcttcagtgtgggtcattcct

SEQ ID NO: 1268383 - DNA, 25 bp, Homo sapien
tttcctgtgatcttagcaatgactt

SEQ ID NO: 1268384 - DNA, 25 bp, Homo sapien
ggacctgctggcaaatactgaagag

SEQ ID NO: 1268385 - DNA, 25 bp, Homo sapien
cacacagagggacctgctggcaaat

SEQ ID NO: 1268386 - DNA, 25 bp, Homo sapien
gagggacctgctggcaaatactgaa

SEQ ID NO: 1268387 - DNA, 25 bp, Homo sapien
cagagggacctgctggcaaatactg

SEQ ID NO: 1268388 - DNA, 25 bp, Homo sapien
tactggtgtattacggatgagacgg

SEQ ID NO: 1268389 - DNA, 25 bp, Homo sapien
gtgtattacggatgagacggtctca

SEQ ID NO: 1268390 - DNA, 25 bp, Homo sapien
gatgagacggtctcataggtggaat

SEQ ID NO: 1268391 - DNA, 25 bp, Homo sapien
agcatgtactggtgtattacggatg

SEQ ID NO: 1268392 - DNA, 25 bp, Homo sapien
gagctggggacgggtggatgggttc

SEQ ID NO: 1268393 - DNA, 25 bp, Homo sapien
aatgccccaggaaacaaaaagccag

SEQ ID NO: 1268394 - DNA, 25 bp, Homo sapien
agagctggggacgggtggatgggtt

SEQ ID NO: 1268395 - DNA, 25 bp, Homo sapien
atgccccaggaaacaaaaagccaga

SEQ ID NO: 1268396 - DNA, 25 bp, Homo sapien
gccgcctagtttcgcaactccaatg

SEQ ID NO: 1268397 - DNA, 25 bp, Homo sapien
tcagtcgccttgaggagggttgggg

SEQ ID NO: 1268398 - DNA, 25 bp, Homo sapien
cagggatgcagggtggcgcgtgcat

SEQ ID NO: 1268399 - DNA, 25 bp, Homo sapien
ggtggcgcgtgcatgccaggtggca

SEQ ID NO: 1268400 - DNA, 25 bp, Homo sapien
cagggacgctgctgccaccgcccgc

SEQ ID NO: 1268401 - DNA, 25 bp, Homo sapien
ctaggtgacagggacgctgctgcca

SEQ ID NO: 1268402 - DNA, 25 bp, Homo sapien
aggtgacagggacgctgctgccacc

SEQ ID NO: 1268403 - DNA, 25 bp, Homo sapien
gtgacagggacgctgctgccaccgc

SEQ ID NO: 1268404 - DNA, 25 bp, Homo sapien
tttccacttcctgccaaggaggcgc

SEQ ID NO: 1268405 - DNA, 25 bp, Homo sapien
caaggaggcgcagagtgactgcccc

SEQ ID NO: 1268406 - DNA, 25 bp, Homo sapien
cccagcctggcacgtccgggggctt

SEQ ID NO: 1268407 - DNA, 25 bp, Homo sapien
tcctgccaaggaggcgcagagtgac

SEQ ID NO: 1268408 - DNA, 25 bp, Homo sapien
agggttccagggctccagctggaac

SEQ ID NO: 1268409 - DNA, 25 bp, Homo sapien
ctgtccaggtttcagggttccaggg

SEQ ID NO: 1268410 - DNA, 25 bp, Homo sapien
agctggaactgcctcagggatggca

SEQ ID NO: 1268411 - DNA, 25 bp, Homo sapien
agggctccagctggaactgcctcag

SEQ ID NO: 1268412 - DNA, 25 bp, Homo sapien
gcgctggccgcacaaaggctagtga

SEQ ID NO: 1268413 - DNA, 25 bp, Homo sapien
aacatgggcgctggccgcacaaagg

SEQ ID NO: 1268414 - DNA, 25 bp, Homo sapien
caaaggctagtgacacccggtgtga

SEQ ID NO: 1268415 - DNA, 25 bp, Homo sapien
cattctctcttggttggaggagtgg

SEQ ID NO: 1268416 - DNA, 25 bp, Homo sapien
agggatgtgtctgtgcagaacgagg

SEQ ID NO: 1268417 - DNA, 25 bp, Homo sapien
ggctgcggccccatcagtcacctgc

SEQ ID NO: 1268418 - DNA, 25 bp, Homo sapien
cctgctgagggcagcgctgtactca

SEQ ID NO: 1268419 - DNA, 25 bp, Homo sapien
aggcggctgcggccccatcagtcac

SEQ ID NO: 1268420 - DNA, 25 bp, Homo sapien
gaaaagggcacaaggggattgagac

SEQ ID NO: 1268421 - DNA, 25 bp, Homo sapien
gcacaaggggattgagacggtctcc

SEQ ID NO: 1268422 - DNA, 25 bp, Homo sapien
aaaagggcacaaggggattgagacg

SEQ ID NO: 1268423 - DNA, 25 bp, Homo sapien
agggcacaaggggattgagacggtc

SEQ ID NO: 1268424 - DNA, 25 bp, Homo sapien
ttggaatcgttgatctgctgaaata

SEQ ID NO: 1268425 - DNA, 25 bp, Homo sapien
tctttgccacttcagattggaatcg

SEQ ID NO: 1268426 - DNA, 25 bp, Homo sapien
tcagattggaatcgttgatctgctg

SEQ ID NO: 1268427 - DNA, 25 bp, Homo sapien
ccacttcagattggaatcgttgatc

SEQ ID NO: 1268428 - DNA, 25 bp, Homo sapien
tctgccacaggaagagacgggcgtc

SEQ ID NO: 1268429 - DNA, 25 bp, Homo sapien
gggcacaacacctggaatcgtcctt

SEQ ID NO: 1268430 - DNA, 25 bp, Homo sapien
ggctgagatcctctgccacaggaag

SEQ ID NO: 1268431 - DNA, 25 bp, Homo sapien
tggaatcgtcctttcgtcctcagcc

SEQ ID NO: 1268432 - DNA, 25 bp, Homo sapien
gctctcggtggggacgacagggagg

SEQ ID NO: 1268433 - DNA, 25 bp, Homo sapien
ggtgtgacgcgccattcataggatc

SEQ ID NO: 1268434 - DNA, 25 bp, Homo sapien
ggtttaattatggagccggcgctga

SEQ ID NO: 1268435 - DNA, 25 bp, Homo sapien
tggaaattcagacggcccaacaggg

SEQ ID NO: 1268436 - DNA, 25 bp, Homo sapien
ggcctgccccggacttggatgaata

SEQ ID NO: 1268437 - DNA, 25 bp, Homo sapien
tcttctcggtgtgggtctgagctcc

SEQ ID NO: 1268438 - DNA, 25 bp, Homo sapien
agccccacgggctcttctcggtgtg

SEQ ID NO: 1268439 - DNA, 25 bp, Homo sapien
cagggaatttgctcatttgacagca

SEQ ID NO: 1268440 - DNA, 25 bp, Homo sapien
gcggcttggtccaggctcagagttt

SEQ ID NO: 1268441 - DNA, 25 bp, Homo sapien
agctgctggtgtccactcggctgct

SEQ ID NO: 1268442 - DNA, 25 bp, Homo sapien
tcggctgcggggcccaatgggagcc

SEQ ID NO: 1268443 - DNA, 25 bp, Homo sapien
gctgcggggcccaatgggagccact

SEQ ID NO: 1268444 - DNA, 25 bp, Homo sapien
agctgctcggctgcggggcccaatg

SEQ ID NO: 1268445 - DNA, 25 bp, Homo sapien
tgcggggcccaatgggagccactgg

SEQ ID NO: 1268446 - DNA, 25 bp, Homo sapien
cagcacggacggatctggagctttg

SEQ ID NO: 1268447 - DNA, 25 bp, Homo sapien
gctgaggagcagcacggacggatct

SEQ ID NO: 1268448 - DNA, 25 bp, Homo sapien
catccatgcgttgcgggaacgtggc

SEQ ID NO: 1268449 - DNA, 25 bp, Homo sapien
gtgcgccccatggagccagtgtcca

SEQ ID NO: 1268450 - DNA, 25 bp, Homo sapien
tgggcaggatgggcctccaggacag

SEQ ID NO: 1268451 - DNA, 25 bp, Homo sapien
agtgaaacctctgggcaggatgggc

SEQ ID NO: 1268452 - DNA, 25 bp, Homo sapien
tgcagaaagtgaaacctctgggcag

SEQ ID NO: 1268453 - DNA, 25 bp, Homo sapien
gaaagtgaaacctctgggcaggatg

SEQ ID NO: 1268454 - DNA, 25 bp, Homo sapien
actggcaggagcggccatgtggaca

SEQ ID NO: 1268455 - DNA, 25 bp, Homo sapien
tctggatgtgaggtgggtaaggagt

SEQ ID NO: 1268456 - DNA, 25 bp, Homo sapien
ggcaggaaaggccggcagggtctgg

SEQ ID NO: 1268457 - DNA, 25 bp, Homo sapien
ggtaaggagttggggccacactggc

SEQ ID NO: 1268458 - DNA, 25 bp, Homo sapien
actgggcactacgacatccgagaca

SEQ ID NO: 1268459 - DNA, 25 bp, Homo sapien
ggatctgcacggaggcagggagaga

SEQ ID NO: 1268460 - DNA, 25 bp, Homo sapien
ctgagcactgggcactacgacatcc

SEQ ID NO: 1268461 - DNA, 25 bp, Homo sapien
acgacatccgagacaccaagcagag

SEQ ID NO: 1268462 - DNA, 25 bp, Homo sapien
ccccatgtggcgctaagcacagagt

SEQ ID NO: 1268463 - DNA, 25 bp, Homo sapien
cgtgtggagggacatgcatctgcaa

SEQ ID NO: 1268464 - DNA, 25 bp, Homo sapien
tgtgaggtgtggaaagttccacatg

SEQ ID NO: 1268465 - DNA, 25 bp, Homo sapien
gcagtcctgcagacacacgtctggg

SEQ ID NO: 1268466 - DNA, 25 bp, Homo sapien
cgggattgggcaaggcctcgcctca

SEQ ID NO: 1268467 - DNA, 25 bp, Homo sapien
ctggcacgggattgggcaaggcctc

SEQ ID NO: 1268468 - DNA, 25 bp, Homo sapien
gcacgggattgggcaaggcctcgcc

SEQ ID NO: 1268469 - DNA, 25 bp, Homo sapien
acgggattgggcaaggcctcgcctc

SEQ ID NO: 1268470 - DNA, 25 bp, Homo sapien
gagtcagccaaaaccgtggcctttg

SEQ ID NO: 1268471 - DNA, 25 bp, Homo sapien
ctggaggagtcagccaaaaccgtgg

SEQ ID NO: 1268472 - DNA, 25 bp, Homo sapien
tcctccgctggaggagtcagccaaa

SEQ ID NO: 1268473 - DNA, 25 bp, Homo sapien
tccgctggaggagtcagccaaaacc

SEQ ID NO: 1268474 - DNA, 25 bp, Homo sapien
cgatgggcatcggatgctgtgacac

SEQ ID NO: 1268475 - DNA, 25 bp, Homo sapien
ggatgctgtgacaccccggctcagc

SEQ ID NO: 1268476 - DNA, 25 bp, Homo sapien
cagcccgacgcgatgggcatcggat

SEQ ID NO: 1268477 - DNA, 25 bp, Homo sapien
tcagaacagcccgacgcgatgggca

SEQ ID NO: 1268478 - DNA, 25 bp, Homo sapien
ccagaagcaattatatgtgcgtaaa

SEQ ID NO: 1268479 - DNA, 25 bp, Homo sapien
gaagcaattatatgtgcgtaaagct

SEQ ID NO: 1268480 - DNA, 25 bp, Homo sapien
gcaattatatgtgcgtaaagctgag

SEQ ID NO: 1268481 - DNA, 25 bp, Homo sapien
aattatatgtgcgtaaagctgaggg

SEQ ID NO: 1268482 - DNA, 25 bp, Homo sapien
tggagatgaaacgtggattattagg

SEQ ID NO: 1268483 - DNA, 25 bp, Homo sapien
gttctaacaatgtttattgtggaga

SEQ ID NO: 1268484 - DNA, 25 bp, Homo sapien
cgtggattattaggggaaacaagag

SEQ ID NO: 1268485 - DNA, 25 bp, Homo sapien
tctaacaatgtttattgtggagatg

SEQ ID NO: 1268486 - DNA, 25 bp, Homo sapien
ttagggcgaaattgcagcaattgct

SEQ ID NO: 1268487 - DNA, 25 bp, Homo sapien
tatcatgtggcgcagggatctgcag

SEQ ID NO: 1268488 - DNA, 25 bp, Homo sapien
ttgctgatatcatgtggcgcaggga

SEQ ID NO: 1268489 - DNA, 25 bp, Homo sapien
ggcgaaattgcagcaattgctgata

SEQ ID NO: 1268490 - DNA, 25 bp, Homo sapien
gattcccttccataggcatgagact

SEQ ID NO: 1268491 - DNA, 25 bp, Homo sapien
ggtcacagaacttagccttggaggc

SEQ ID NO: 1268492 - DNA, 25 bp, Homo sapien
gggagaggcatgatccaatttacgt

SEQ ID NO: 1268493 - DNA, 25 bp, Homo sapien
caatttacgttttaggaagaatcat

SEQ ID NO: 1268494 - DNA, 25 bp, Homo sapien
ccaccccaccatgtccacagcttac

SEQ ID NO: 1268495 - DNA, 25 bp, Homo sapien
taaaagctgaagagggaccacccca

SEQ ID NO: 1268496 - DNA, 25 bp, Homo sapien
gggaccaccccaccatgtccacagc

SEQ ID NO: 1268497 - DNA, 25 bp, Homo sapien
ggaccaccccaccatgtccacagct

SEQ ID NO: 1268498 - DNA, 25 bp, Homo sapien
ctgctgccaattccagcccccaagg

SEQ ID NO: 1268499 - DNA, 25 bp, Homo sapien
tgtggccagagactccgggactgtc

SEQ ID NO: 1268500 - DNA, 25 bp, Homo sapien
tcccaggaagctgtggccagagact

SEQ ID NO: 1268501 - DNA, 25 bp, Homo sapien
ccctccctccgctgtctccggccac

SEQ ID NO: 1268502 - DNA, 25 bp, Homo sapien
tgtggtctgggtgcactcagtgtct

SEQ ID NO: 1268503 - DNA, 25 bp, Homo sapien
gccgttgagagtcccccgtgtggct

SEQ ID NO: 1268504 - DNA, 25 bp, Homo sapien
gatggagatccctagaggcagccgt

SEQ ID NO: 1268505 - DNA, 25 bp, Homo sapien
gacgaggatcgagcaggctccagct

SEQ ID NO: 1268506 - DNA, 25 bp, Homo sapien
ccacccccgcaccagccctgccagg

SEQ ID NO: 1268507 - DNA, 25 bp, Homo sapien
gggctcccagccaggccgggcccat

SEQ ID NO: 1268508 - DNA, 25 bp, Homo sapien
agggctcccagccaggccgggccca

SEQ ID NO: 1268509 - DNA, 25 bp, Homo sapien
cccagggctcccagccaggccgggc

SEQ ID NO: 1268510 - DNA, 25 bp, Homo sapien
tggagttcaacctagcgcccatgag

SEQ ID NO: 1268511 - DNA, 25 bp, Homo sapien
gctttcctttctaggcggtggcagt

SEQ ID NO: 1268512 - DNA, 25 bp, Homo sapien
tgcaggaatgctctgccatgggagc

SEQ ID NO: 1268513 - DNA, 25 bp, Homo sapien
ctctagcactgcaaggtccacaggg

SEQ ID NO: 1268514 - DNA, 25 bp, Homo sapien
tccatccacgaggagcagcctgagc

SEQ ID NO: 1268515 - DNA, 25 bp, Homo sapien
gaaccttgaccgtcccggagcacag

SEQ ID NO: 1268516 - DNA, 25 bp, Homo sapien
ctgagccttggtggccgaaccttga

SEQ ID NO: 1268517 - DNA, 25 bp, Homo sapien
agcctgagccttggtggccgaacct

SEQ ID NO: 1268518 - DNA, 25 bp, Homo sapien
ctggtctacgaagacgcaggcatcc

SEQ ID NO: 1268519 - DNA, 25 bp, Homo sapien
ggggccgctgacagcacagtcgcct

SEQ ID NO: 1268520 - DNA, 25 bp, Homo sapien
tctacgaagacgcaggcatccctct

SEQ ID NO: 1268521 - DNA, 25 bp, Homo sapien
acagtcgcctgggtgcacgcttgtg

SEQ ID NO: 1268522 - DNA, 25 bp, Homo sapien
cagagttgagacttcgccgtggtca

SEQ ID NO: 1268523 - DNA, 25 bp, Homo sapien
cccaggaacaagaatcctttaagtg

SEQ ID NO: 1268524 - DNA, 25 bp, Homo sapien
gaagcagctgtgaaagtagacagag

SEQ ID NO: 1268525 - DNA, 25 bp, Homo sapien
tgaaggcggatggttttcccagcag

SEQ ID NO: 1268526 - DNA, 25 bp, Homo sapien
caggcagtggtcctgagtctgctca

SEQ ID NO: 1268527 - DNA, 25 bp, Homo sapien
tctggtcagaaacagcgactctccc

SEQ ID NO: 1268528 - DNA, 25 bp, Homo sapien
catctgtccaagtcgctctggtcag

SEQ ID NO: 1268529 - DNA, 25 bp, Homo sapien
cagagccacttgtcactcagaacag

SEQ ID NO: 1268530 - DNA, 25 bp, Homo sapien
tccgagcagtattaatggacgccct

SEQ ID NO: 1268531 - DNA, 25 bp, Homo sapien
ctccaaagggctcagacaaacaggg

SEQ ID NO: 1268532 - DNA, 25 bp, Homo sapien
taaagtgtatgttccaatgaccggt

SEQ ID NO: 1268533 - DNA, 25 bp, Homo sapien
tgtaagatcgtgcttctccgagcag

SEQ ID NO: 1268534 - DNA, 25 bp, Homo sapien
gtcgtgagtctgatgggtccctggg

SEQ ID NO: 1268535 - DNA, 25 bp, Homo sapien
tgtgtcgtgagtctgatgggtccct

SEQ ID NO: 1268536 - DNA, 25 bp, Homo sapien
tctgtgtcgtgagtctgatgggtcc

SEQ ID NO: 1268537 - DNA, 25 bp, Homo sapien
tttctctgtgtcgtgagtctgatgg

SEQ ID NO: 1268538 - DNA, 25 bp, Homo sapien
ccaagccgagtagcctcatgggact

SEQ ID NO: 1268539 - DNA, 25 bp, Homo sapien
agccgagtagcctcatgggactgac

SEQ ID NO: 1268540 - DNA, 25 bp, Homo sapien
gcgggccaagccgagtagcctcatg

SEQ ID NO: 1268541 - DNA, 25 bp, Homo sapien
ggccaagccgagtagcctcatggga

SEQ ID NO: 1268542 - DNA, 25 bp, Homo sapien
cccatgagccctcatccaagccctg

SEQ ID NO: 1268543 - DNA, 25 bp, Homo sapien
ggcccatgagccctcatccaagccc

SEQ ID NO: 1268544 - DNA, 25 bp, Homo sapien
atgagccctcatccaagccctgtgg

SEQ ID NO: 1268545 - DNA, 25 bp, Homo sapien
catgagccctcatccaagccctgtg

SEQ ID NO: 1268546 - DNA, 25 bp, Homo sapien
gtcacaaacaccgacacagaacgca

SEQ ID NO: 1268547 - DNA, 25 bp, Homo sapien
ggtctcagggcgtcacaaacaccga

SEQ ID NO: 1268548 - DNA, 25 bp, Homo sapien
gaacgcactcccgtttctcagcaaa

SEQ ID NO: 1268549 - DNA, 25 bp, Homo sapien
gccaagcagggtctcagggcgtcac

SEQ ID NO: 1268550 - DNA, 25 bp, Homo sapien
caggctgagaccaacgggcttcatt

SEQ ID NO: 1268551 - DNA, 25 bp, Homo sapien
tgtgaacagggactagggacttgtc

SEQ ID NO: 1268552 - DNA, 25 bp, Homo sapien
caaagatagaaaggaccaaggcaag

SEQ ID NO: 1268553 - DNA, 25 bp, Homo sapien
tcaaccttgaaggaggcctcagtct

SEQ ID NO: 1268554 - DNA, 25 bp, Homo sapien
ccacgtccaccaaggagggctgggc

SEQ ID NO: 1268555 - DNA, 25 bp, Homo sapien
cccacgtccaccaaggagggctggg

SEQ ID NO: 1268556 - DNA, 25 bp, Homo sapien
ctgtccccacgtccaccaaggaggg

SEQ ID NO: 1268557 - DNA, 25 bp, Homo sapien
tccccacgtccaccaaggagggctg

SEQ ID NO: 1268558 - DNA, 25 bp, Homo sapien
aagtggagggattctggatgttccc

SEQ ID NO: 1268559 - DNA, 25 bp, Homo sapien
gtgccacatagaacgtagaaacggg

SEQ ID NO: 1268560 - DNA, 25 bp, Homo sapien
tgttccctcggcaagagggtgccac

SEQ ID NO: 1268561 - DNA, 25 bp, Homo sapien
tcggcaagagggtgccacatagaac

SEQ ID NO: 1268562 - DNA, 25 bp, Homo sapien
attcccgcgttcacatccaaagagg

SEQ ID NO: 1268563 - DNA, 25 bp, Homo sapien
tatagcgtgagaaatacaggccatt

SEQ ID NO: 1268564 - DNA, 25 bp, Homo sapien
caggtgacaagaacagaatatgggc

SEQ ID NO: 1268565 - DNA, 25 bp, Homo sapien
caaggcactacccttcgaaggaagg

SEQ ID NO: 1268566 - DNA, 25 bp, Homo sapien
catgcatgcgacatttagccttaac

SEQ ID NO: 1268567 - DNA, 25 bp, Homo sapien
caagggaactctgaccggaagagca

SEQ ID NO: 1268568 - DNA, 25 bp, Homo sapien
tccagcctcgagttggttcacggag

SEQ ID NO: 1268569 - DNA, 25 bp, Homo sapien
tctccagtgaggacaagattgccat

SEQ ID NO: 1268570 - DNA, 25 bp, Homo sapien
tgagcatcaggacatcccaggttcc

SEQ ID NO: 1268571 - DNA, 25 bp, Homo sapien
tctgaacccggtatctggaatgcaa

SEQ ID NO: 1268572 - DNA, 25 bp, Homo sapien
ttcaggacaaaacccaacactgcgg

SEQ ID NO: 1268573 - DNA, 25 bp, Homo sapien
gtcaggcaacatggtacacgcacag

SEQ ID NO: 1268574 - DNA, 25 bp, Homo sapien
taagggttctgacaaagtgtctgaa

SEQ ID NO: 1268575 - DNA, 25 bp, Homo sapien
ataggagtcctggtagcggctagcc

SEQ ID NO: 1268576 - DNA, 25 bp, Homo sapien
gtctgaagagctctcgataggagtc

SEQ ID NO: 1268577 - DNA, 25 bp, Homo sapien
ctttaagggttctgacaaagtgtct

SEQ ID NO: 1268578 - DNA, 25 bp, Homo sapien
gggagcgaagggacagggacatgcc

SEQ ID NO: 1268579 - DNA, 25 bp, Homo sapien
ctccatctgcagcacgccttgggac

SEQ ID NO: 1268580 - DNA, 25 bp, Homo sapien
aacgacctctatctaacctgcggaa

SEQ ID NO: 1268581 - DNA, 25 bp, Homo sapien
ccgcccggtgatgcccaaggaattc

SEQ ID NO: 1268582 - DNA, 25 bp, Homo sapien
gatgatctctatctaacccacacaa

SEQ ID NO: 1268583 - DNA, 25 bp, Homo sapien
aatcaacccggctgacgacctctat

SEQ ID NO: 1268584 - DNA, 25 bp, Homo sapien
gatgacctctgtctaacccacacaa

SEQ ID NO: 1268585 - DNA, 25 bp, Homo sapien
ccacacaatcaacccagctgatgat

SEQ ID NO: 1268586 - DNA, 25 bp, Homo sapien
taacccgcacaatcaacccggctga

SEQ ID NO: 1268587 - DNA, 25 bp, Homo sapien
tatctaacccgcacaatcaacccgg

SEQ ID NO: 1268588 - DNA, 25 bp, Homo sapien
ctatctaacccgcacaatcaacccg

SEQ ID NO: 1268589 - DNA, 25 bp, Homo sapien
cccgcacaatcaacccggctgatga

SEQ ID NO: 1268590 - DNA, 25 bp, Homo sapien
gatgatctctatctaacccacacaa

SEQ ID NO: 1268591 - DNA, 25 bp, Homo sapien
taacctgtagaatcaacccggctga

SEQ ID NO: 1268592 - DNA, 25 bp, Homo sapien
ccgcacaatcaacccggctgatgat

SEQ ID NO: 1268593 - DNA, 25 bp, Homo sapien
caatcaacccggctgatgatctcta

SEQ ID NO: 1268594 - DNA, 25 bp, Homo sapien
cacaatcaacctggctgatgacctc

SEQ ID NO: 1268595 - DNA, 25 bp, Homo sapien
gatgatctctatctaacccgcacaa

SEQ ID NO: 1268596 - DNA, 25 bp, Homo sapien
gatgacctctgtctaacccacacaa

SEQ ID NO: 1268597 - DNA, 25 bp, Homo sapien
taacctgtagaatcaacccggctga

SEQ ID NO: 1268598 - DNA, 25 bp, Homo sapien
ttttcacagtggactggcgaagggt

SEQ ID NO: 1268599 - DNA, 25 bp, Homo sapien
ttcacagtggactggcgaagggtgg

SEQ ID NO: 1268600 - DNA, 25 bp, Homo sapien
cacagtggactggcgaagggtggaa

SEQ ID NO: 1268601 - DNA, 25 bp, Homo sapien
cagtggactggcgaagggtggaaaa

SEQ ID NO: 1268602 - DNA, 25 bp, Homo sapien
tgctggctgatgtccacgctaacca

SEQ ID NO: 1268603 - DNA, 25 bp, Homo sapien
ctaaccacggcctcacagggaaact

SEQ ID NO: 1268604 - DNA, 25 bp, Homo sapien
tggctgacgtcctggtcgcagctgt

SEQ ID NO: 1268605 - DNA, 25 bp, Homo sapien
cggcctcacagggaaacttcatgct

SEQ ID NO: 1268606 - DNA, 25 bp, Homo sapien
gcagtcaagaccctcgaccggtgac

SEQ ID NO: 1268607 - DNA, 25 bp, Homo sapien
tcaagaccctcgaccggtgacaggc

SEQ ID NO: 1268608 - DNA, 25 bp, Homo sapien
ggtctgcggagaccatggcctccac

SEQ ID NO: 1268609 - DNA, 25 bp, Homo sapien
agtcaagaccctcgaccggtgacag

SEQ ID NO: 1268610 - DNA, 25 bp, Homo sapien
tgtgggtgaactttgggcagacggg

SEQ ID NO: 1268611 - DNA, 25 bp, Homo sapien
agggtgtgtgggtgaactttgggca

SEQ ID NO: 1268612 - DNA, 25 bp, Homo sapien
ggtggccagcggagcagggtgtgtg

SEQ ID NO: 1268613 - DNA, 25 bp, Homo sapien
tggtggccagcggagcagggtgtgt

SEQ ID NO: 1268614 - DNA, 25 bp, Homo sapien
gacttgccccagtacacaaagtgtg

SEQ ID NO: 1268615 - DNA, 25 bp, Homo sapien
ggacttgccccagtacacaaagtgt

SEQ ID NO: 1268616 - DNA, 25 bp, Homo sapien
tccacgtcgtgcacagcagcgttgt

SEQ ID NO: 1268617 - DNA, 25 bp, Homo sapien
gaaaacacagtgtccggagtggctt

SEQ ID NO: 1268618 - DNA, 25 bp, Homo sapien
cagcaacatgcatacggcatccacg

SEQ ID NO: 1268619 - DNA, 25 bp, Homo sapien
cacagcagcgttgtagaaagtccca

SEQ ID NO: 1268620 - DNA, 25 bp, Homo sapien
ctggacacaagggagggtgagctct

SEQ ID NO: 1268621 - DNA, 25 bp, Homo sapien
gctctggcttctggtctcgagggaa

SEQ ID NO: 1268622 - DNA, 25 bp, Homo sapien
ctctggcttctggtctcgagggaag

SEQ ID NO: 1268623 - DNA, 25 bp, Homo sapien
gagctctggcttctggtctcgaggg

SEQ ID NO: 1268624 - DNA, 25 bp, Homo sapien
acagatgccacaacgctgtgcattc

SEQ ID NO: 1268625 - DNA, 25 bp, Homo sapien
acaacgctgtgcattcccccaaaaa

SEQ ID NO: 1268626 - DNA, 25 bp, Homo sapien
cagatgccacaacgctgtgcattcc

SEQ ID NO: 1268627 - DNA, 25 bp, Homo sapien
gtgcattcccccaaaaacgcagatg

SEQ ID NO: 1268628 - DNA, 25 bp, Homo sapien
tccccagggcgtggctgacacaaac

SEQ ID NO: 1268629 - DNA, 25 bp, Homo sapien
aaacttgcttgtgcaagaactggaa

SEQ ID NO: 1268630 - DNA, 25 bp, Homo sapien
tgacggcggtgatccagtggatcct

SEQ ID NO: 1268631 - DNA, 25 bp, Homo sapien
ggaacaggcagtgacggcggtgatc

SEQ ID NO: 1268632 - DNA, 25 bp, Homo sapien
caggtgcagacatcacctcagccag

SEQ ID NO: 1268633 - DNA, 25 bp, Homo sapien
gggcagcaaacaactactccagaga

SEQ ID NO: 1268634 - DNA, 25 bp, Homo sapien
ttcagaagctgcctccggcgggcag

SEQ ID NO: 1268635 - DNA, 25 bp, Homo sapien
cagcccatagctgctcggagagcat

SEQ ID NO: 1268636 - DNA, 25 bp, Homo sapien
ccgtcagggtaagactccgtcagag

SEQ ID NO: 1268637 - DNA, 25 bp, Homo sapien
aaagcattaacattcacgaacgttc

SEQ ID NO: 1268638 - DNA, 25 bp, Homo sapien
gactccgtcagggtaagactccgtc

SEQ ID NO: 1268639 - DNA, 25 bp, Homo sapien
gcattaacattcacgaacgttcttc

SEQ ID NO: 1268640 - DNA, 25 bp, Homo sapien
cctccacatgcgttaacaacctggg

SEQ ID NO: 1268641 - DNA, 25 bp, Homo sapien
tagtaagagcatgtccaaacctgga

SEQ ID NO: 1268642 - DNA, 25 bp, Homo sapien
aaactctccccttgctacactagta

SEQ ID NO: 1268643 - DNA, 25 bp, Homo sapien
gttcagagccctccacatgcgttaa

SEQ ID NO: 1268644 - DNA, 25 bp, Homo sapien
cacaccctgtggacagcaagtatag

SEQ ID NO: 1268645 - DNA, 25 bp, Homo sapien
cactctggtgttggcccaaatgctc

SEQ ID NO: 1268646 - DNA, 25 bp, Homo sapien
gctggtcgttgaggacaatgtctgc

SEQ ID NO: 1268647 - DNA, 25 bp, Homo sapien
gtcacgagagcatctcgggcctcct

SEQ ID NO: 1268648 - DNA, 25 bp, Homo sapien
atcctgttcccgaaccactctggtg

SEQ ID NO: 1268649 - DNA, 25 bp, Homo sapien
caggaaacactgaaaggtggccggt

SEQ ID NO: 1268650 - DNA, 25 bp, Homo sapien
ggtgttgcatcctcccgggcagaca

SEQ ID NO: 1268651 - DNA, 25 bp, Homo sapien
ctcccgggcagacaagtcgctggtg

SEQ ID NO: 1268652 - DNA, 25 bp, Homo sapien
ctgctggtatctttacttggaaagc

SEQ ID NO: 1268653 - DNA, 25 bp, Homo sapien
agggagcagagacgtgtggcccaca

SEQ ID NO: 1268654 - DNA, 25 bp, Homo sapien
cccacagcgggaggaggtaccgtgc

SEQ ID NO: 1268655 - DNA, 25 bp, Homo sapien
aggaggtaccgtgccaatgctggga

SEQ ID NO: 1268656 - DNA, 25 bp, Homo sapien
caggagggttgacagggagcagaga

SEQ ID NO: 1268657 - DNA, 25 bp, Homo sapien
aggctgacggggcaagggcgggtgg

SEQ ID NO: 1268658 - DNA, 25 bp, Homo sapien
ggtggcacgggtgtgcagtaaggct

SEQ ID NO: 1268659 - DNA, 25 bp, Homo sapien
ctgacggggcaagggcgggtggcac

SEQ ID NO: 1268660 - DNA, 25 bp, Homo sapien
ctgcctgagagaatgagctgaggct

SEQ ID NO: 1268661 - DNA, 25 bp, Homo sapien
acaatcatctcagaggatcaacagt

SEQ ID NO: 1268662 - DNA, 25 bp, Homo sapien
taaacaaagtggcaggactcacagc

SEQ ID NO: 1268663 - DNA, 25 bp, Homo sapien
tcacttaaacaaagtggcaggactc

SEQ ID NO: 1268664 - DNA, 25 bp, Homo sapien
atcatctcagaggatcaacagtggg

SEQ ID NO: 1268665 - DNA, 25 bp, Homo sapien
gaaacaccagcgttggcactgacat

SEQ ID NO: 1268666 - DNA, 25 bp, Homo sapien
gcaagccactagcagatcccgtaaa

SEQ ID NO: 1268667 - DNA, 25 bp, Homo sapien
taaacgtagtgtcatcaggcggcct

SEQ ID NO: 1268668 - DNA, 25 bp, Homo sapien
taaggcagcattcaggtggccacgc

SEQ ID NO: 1268669 - DNA, 25 bp, Homo sapien
taaagggtctccaccacagacgtgt

SEQ ID NO: 1268670 - DNA, 25 bp, Homo sapien
ccctgcgagcagaggcgttcgtgtc

SEQ ID NO: 1268671 - DNA, 25 bp, Homo sapien
tcgcaggccctgcagtaaagggtct

SEQ ID NO: 1268672 - DNA, 25 bp, Homo sapien
tccgccgcgtagtcgtgtaaagcct

SEQ ID NO: 1268673 - DNA, 25 bp, Homo sapien
gcagcatgcctggtaaaagtcaccg

SEQ ID NO: 1268674 - DNA, 25 bp, Homo sapien
taactttagccgaaaccctgtgtca

SEQ ID NO: 1268675 - DNA, 25 bp, Homo sapien
gcagggtatgccttgttaaccatcc

SEQ ID NO: 1268676 - DNA, 25 bp, Homo sapien
ttaaccatccgtttgcaggcagcat

SEQ ID NO: 1268677 - DNA, 25 bp, Homo sapien
ttagaagaacccagaccaacaatgt

SEQ ID NO: 1268678 - DNA, 25 bp, Homo sapien
cagcctgggtgtcgttaaatgatca

SEQ ID NO: 1268679 - DNA, 25 bp, Homo sapien
tagcatgccactcgacagatctctg

SEQ ID NO: 1268680 - DNA, 25 bp, Homo sapien
ggctcattgaaaaggacaaccagct

SEQ ID NO: 1268681 - DNA, 25 bp, Homo sapien
tggatgggtgccacacatactcagg

SEQ ID NO: 1268682 - DNA, 25 bp, Homo sapien
caccaagcgggactgtgtcatctca

SEQ ID NO: 1268683 - DNA, 25 bp, Homo sapien
catactcaggttgggcgaaatgacc

SEQ ID NO: 1268684 - DNA, 25 bp, Homo sapien
tggccgccggccatcttttaggaaa

SEQ ID NO: 1268685 - DNA, 25 bp, Homo sapien
gaaatattgtgaagctaagtccggg

SEQ ID NO: 1268686 - DNA, 25 bp, Homo sapien
taggtgtgtccatttgtgcgccagc

SEQ ID NO: 1268687 - DNA, 25 bp, Homo sapien
tgtcacttaaacctgtccgagcggc

SEQ ID NO: 1268688 - DNA, 25 bp, Homo sapien
gataaaacagtttgggatccagccg

SEQ ID NO: 1268689 - DNA, 25 bp, Homo sapien
caggcaaggttctccgggtaagtgt

SEQ ID NO: 1268690 - DNA, 25 bp, Homo sapien
aggcaaggttctccgggtaagtgtg

SEQ ID NO: 1268691 - DNA, 25 bp, Homo sapien
ggattctgcacaccaggcaagaggg

SEQ ID NO: 1268692 - DNA, 25 bp, Homo sapien
tgctgggaccagaatgggattctgc

SEQ ID NO: 1268693 - DNA, 25 bp, Homo sapien
cacatgctccgggaaaacagcaccc

SEQ ID NO: 1268694 - DNA, 25 bp, Homo sapien
gtgaacctcgggtaggcagctgacc

SEQ ID NO: 1268695 - DNA, 25 bp, Homo sapien
tcagatggcacaggcgcatgtcggg

SEQ ID NO: 1268696 - DNA, 25 bp, Homo sapien
acaggcgcatgtcgggtctgccctg

SEQ ID NO: 1268697 - DNA, 25 bp, Homo sapien
gctgcatctgggtccgccctggcag

SEQ ID NO: 1268698 - DNA, 25 bp, Homo sapien
ctgcatctgggtccgccctggcagg

SEQ ID NO: 1268699 - DNA, 25 bp, Homo sapien
aggaggatctgctgtggatgcgtct

SEQ ID NO: 1268700 - DNA, 25 bp, Homo sapien
tctgctgtggatgcgtctggggcct

SEQ ID NO: 1268701 - DNA, 25 bp, Homo sapien
aggcagcccgacacctctggtccac

SEQ ID NO: 1268702 - DNA, 25 bp, Homo sapien
acctggggtatccaggcagcccgac

SEQ ID NO: 1268703 - DNA, 25 bp, Homo sapien
cgcagtgacagatgtgttacagcat

SEQ ID NO: 1268704 - DNA, 25 bp, Homo sapien
cgcatcacaagctgcatcaggaaag

SEQ ID NO: 1268705 - DNA, 25 bp, Homo sapien
tgtgctgcgagttaaatacatttcc

SEQ ID NO: 1268706 - DNA, 25 bp, Homo sapien
gagctgtttttattagtgagtcggg

SEQ ID NO: 1268707 - DNA, 25 bp, Homo sapien
aagattatgatcactgccagctgga

SEQ ID NO: 1268708 - DNA, 25 bp, Homo sapien
gaaagtgaccgtgccgttcaaggaa

SEQ ID NO: 1268709 - DNA, 25 bp, Homo sapien
catgagaaacgtgtgcttagccgct

SEQ ID NO: 1268710 - DNA, 25 bp, Homo sapien
ttcaaggaaacgcacatcggttggc

SEQ ID NO: 1268711 - DNA, 25 bp, Homo sapien
taagtgtccgtcactgacccagacg

SEQ ID NO: 1268712 - DNA, 25 bp, Homo sapien
cgagaatattgtggatccgctgtca

SEQ ID NO: 1268713 - DNA, 25 bp, Homo sapien
gacccagacgctgttacgtggcaca

SEQ ID NO: 1268714 - DNA, 25 bp, Homo sapien
gatctacaaggccaacgacgagagc

SEQ ID NO: 1268715 - DNA, 25 bp, Homo sapien
ggacgggtacaccaccttcaggctc

SEQ ID NO: 1268716 - DNA, 25 bp, Homo sapien
gccttggacgggtacaccaccttca

SEQ ID NO: 1268717 - DNA, 25 bp, Homo sapien
ttccagatccaccacccggacctgc

SEQ ID NO: 1268718 - DNA, 25 bp, Homo sapien
tcagcgcacgacagtcacgtgggga

SEQ ID NO: 1268719 - DNA, 25 bp, Homo sapien
gcatcggcttcagtatctgagagtg

SEQ ID NO: 1268720 - DNA, 25 bp, Homo sapien
cagagactgcatcggcttcagtatc

SEQ ID NO: 1268721 - DNA, 25 bp, Homo sapien
gactgcatcggcttcagtatctgag

SEQ ID NO: 1268722 - DNA, 25 bp, Homo sapien
tgtccagagactgcatcggcttcag

SEQ ID NO: 1268723 - DNA, 25 bp, Homo sapien
tgcaatctgcagactggtggcactt

SEQ ID NO: 1268724 - DNA, 25 bp, Homo sapien
caatctgcagactggtggcacttgt

SEQ ID NO: 1268725 - DNA, 25 bp, Homo sapien
cttgcaatctgcagactggtggcac

SEQ ID NO: 1268726 - DNA, 25 bp, Homo sapien
atctgcagactggtggcacttgtta

SEQ ID NO: 1268727 - DNA, 25 bp, Homo sapien
cttccaaaaacaaatcagaagtcgt

SEQ ID NO: 1268728 - DNA, 25 bp, Homo sapien
gcaccgagcatgaacagtgagctgt

SEQ ID NO: 1268729 - DNA, 25 bp, Homo sapien
cctttgacccctctgggctgcgttt

SEQ ID NO: 1268730 - DNA, 25 bp, Homo sapien
gcagcaccgagcatgaacagtgagc

SEQ ID NO: 1268731 - DNA, 25 bp, Homo sapien
ctttgacccctctgggctgcgtttt

SEQ ID NO: 1268732 - DNA, 25 bp, Homo sapien
cacaagacacgggtaattttcattt

SEQ ID NO: 1268733 - DNA, 25 bp, Homo sapien
atttccatccagcaagtgaaggtat

SEQ ID NO: 1268734 - DNA, 25 bp, Homo sapien
ccacaagacacgggtaattttcatt

SEQ ID NO: 1268735 - DNA, 25 bp, Homo sapien
tcacgtcagggccatctagatgaca

SEQ ID NO: 1268736 - DNA, 25 bp, Homo sapien
gatgacagactggttccacaacgtc

SEQ ID NO: 1268737 - DNA, 25 bp, Homo sapien
catctagatgacagactggttccac

SEQ ID NO: 1268738 - DNA, 25 bp, Homo sapien
ttccacaacgtctcctttggaaaga

SEQ ID NO: 1268739 - DNA, 25 bp, Homo sapien
tgtgcaggcccgacacactctgccg

SEQ ID NO: 1268740 - DNA, 25 bp, Homo sapien
tgcaggcccgacacactctgccgct

SEQ ID NO: 1268741 - DNA, 25 bp, Homo sapien
ctgtgcaggcccgacacactctgcc

SEQ ID NO: 1268742 - DNA, 25 bp, Homo sapien
gcaggcccgacacactctgccgctt

SEQ ID NO: 1268743 - DNA, 25 bp, Homo sapien
aaactccactagggtcacagccaca

SEQ ID NO: 1268744 - DNA, 25 bp, Homo sapien
acccacaaactccactagggtcaca

SEQ ID NO: 1268745 - DNA, 25 bp, Homo sapien
cccacaaactccactagggtcacag

SEQ ID NO: 1268746 - DNA, 25 bp, Homo sapien
acaaactccactagggtcacagcca

SEQ ID NO: 1268747 - DNA, 25 bp, Homo sapien
agcaggggccctttgacggcacgga

SEQ ID NO: 1268748 - DNA, 25 bp, Homo sapien
gggccgggcgcagtacagcaggggc

SEQ ID NO: 1268749 - DNA, 25 bp, Homo sapien
tcttctcacagagatcttcgtggag

SEQ ID NO: 1268750 - DNA, 25 bp, Homo sapien
ccctttgacggcacggagctcgtgg

SEQ ID NO: 1268751 - DNA, 25 bp, Homo sapien
ggcgtctgtgaagaggccatctcca

SEQ ID NO: 1268752 - DNA, 25 bp, Homo sapien
ggataaaccgttaacaccatatgtg

SEQ ID NO: 1268753 - DNA, 25 bp, Homo sapien
ggagcaagggatacgaccagtgacc

SEQ ID NO: 1268754 - DNA, 25 bp, Homo sapien
gtgagattagactgcgccaccgtac

SEQ ID NO: 1268755 - DNA, 25 bp, Homo sapien
gcttgagtgcattccctggctgcag

SEQ ID NO: 1268756 - DNA, 25 bp, Homo sapien
atgtagggccgcacatcccggacct

SEQ ID NO: 1268757 - DNA, 25 bp, Homo sapien
gaggaagcgcttgagtgcattccct

SEQ ID NO: 1268758 - DNA, 25 bp, Homo sapien
ccccacaatgtagggccgcacatcc

SEQ ID NO: 1268759 - DNA, 25 bp, Homo sapien
tcagaggtacggggttttcagagac

SEQ ID NO: 1268760 - DNA, 25 bp, Homo sapien
ctgtcagaggtacggggttttcaga

SEQ ID NO: 1268761 - DNA, 25 bp, Homo sapien
ttttcagagacgtgcaggaccctga

SEQ ID NO: 1268762 - DNA, 25 bp, Homo sapien
ccgagccctcggcacggcccttgcc

SEQ ID NO: 1268763 - DNA, 25 bp, Homo sapien
cacggcctccgacgcgcaggtactc

SEQ ID NO: 1268764 - DNA, 25 bp, Homo sapien
ccaggatggatctggtctggcagcc

SEQ ID NO: 1268765 - DNA, 25 bp, Homo sapien
gtactccaggatggatctggtctgg

SEQ ID NO: 1268766 - DNA, 25 bp, Homo sapien
actccaggatggatctggtctggca

SEQ ID NO: 1268767 - DNA, 25 bp, Homo sapien
gctggttgttcgagaggtccaacgt

SEQ ID NO: 1268768 - DNA, 25 bp, Homo sapien
ctccaggcgcttgtccctcagcttg

SEQ ID NO: 1268769 - DNA, 25 bp, Homo sapien
tctgcagggatctcgctcagctggt

SEQ ID NO: 1268770 - DNA, 25 bp, Homo sapien
tgttcccacggaaattgatctcctt

SEQ ID NO: 1268771 - DNA, 25 bp, Homo sapien
aggacaggtgcatcgggcccaccac

SEQ ID NO: 1268772 - DNA, 25 bp, Homo sapien
tctatgaccgtgactgatcagactt

SEQ ID NO: 1268773 - DNA, 25 bp, Homo sapien
gcccacgggaaagcgttttctatga

SEQ ID NO: 1268774 - DNA, 25 bp, Homo sapien
ccaccaccgtgtgccacaaagatgc

SEQ ID NO: 1268775 - DNA, 25 bp, Homo sapien
agcctgcagtgagtccccgaaagga

SEQ ID NO: 1268776 - DNA, 25 bp, Homo sapien
agtgagtccccgaaaggatgatggc

SEQ ID NO: 1268777 - DNA, 25 bp, Homo sapien
cctgcagtgagtccccgaaaggatg

SEQ ID NO: 1268778 - DNA, 25 bp, Homo sapien
ctgcagcctgcagtgagtccccgaa

SEQ ID NO: 1268779 - DNA, 25 bp, Homo sapien
ccaggttgatgcctgaagaagggct

SEQ ID NO: 1268780 - DNA, 25 bp, Homo sapien
tgcttttgtactgaggagccctgag

SEQ ID NO: 1268781 - DNA, 25 bp, Homo sapien
ggcaggaagcatgttccaggttgat

SEQ ID NO: 1268782 - DNA, 25 bp, Homo sapien
gctgcttttgtactgaggagccctg

SEQ ID NO: 1268783 - DNA, 25 bp, Homo sapien
tgagcacagccacgcgagcgaccag

SEQ ID NO: 1268784 - DNA, 25 bp, Homo sapien
tgtccactgtctggcggagccagcc

SEQ ID NO: 1268785 - DNA, 25 bp, Homo sapien
ttcgtgtactgcgttaccctcccag

SEQ ID NO: 1268786 - DNA, 25 bp, Homo sapien
gctgctttaagcctcgtggtttcgg

SEQ ID NO: 1268787 - DNA, 25 bp, Homo sapien
gggataacaagcgtgggcctggccc

SEQ ID NO: 1268788 - DNA, 25 bp, Homo sapien
gaatactgaaagacatctatgaatt

SEQ ID NO: 1268789 - DNA, 25 bp, Homo sapien
atactgaaagacatctatgaatttg

SEQ ID NO: 1268790 - DNA, 25 bp, Homo sapien
gataacaagcgtgggcctggcccac

SEQ ID NO: 1268791 - DNA, 25 bp, Homo sapien
gatacatgcctagtacatcaacact

SEQ ID NO: 1268792 - DNA, 25 bp, Homo sapien
taagatacatgcctagtacatcaac

SEQ ID NO: 1268793 - DNA, 25 bp, Homo sapien
gttaagatacatgcctagtacatca

SEQ ID NO: 1268794 - DNA, 25 bp, Homo sapien
agatacatgcctagtacatcaacac

SEQ ID NO: 1268795 - DNA, 25 bp, Homo sapien
tgtaaagctaatgagggtccacgag

SEQ ID NO: 1268796 - DNA, 25 bp, Homo sapien
ggaggtcacaagatatgcgacttcc

SEQ ID NO: 1268797 - DNA, 25 bp, Homo sapien
gaggatggaggaacctgaattctgc

SEQ ID NO: 1268798 - DNA, 25 bp, Homo sapien
gggtagacataaacaactgccagct

SEQ ID NO: 1268799 - DNA, 25 bp, Homo sapien
gaagtgactcagtaagcaggaccgt

SEQ ID NO: 1268800 - DNA, 25 bp, Homo sapien
gattgcacctcaaccaatcagcagc

SEQ ID NO: 1268801 - DNA, 25 bp, Homo sapien
gcatgtctgatcaatggctctacct

SEQ ID NO: 1268802 - DNA, 25 bp, Homo sapien
gtttttgcatgtctgatcaatggct

SEQ ID NO: 1268803 - DNA, 25 bp, Homo sapien
tctcggaggcagttgtcagcagccg

SEQ ID NO: 1268804 - DNA, 25 bp, Homo sapien
agccgctcacttccaagtagtgcag

SEQ ID NO: 1268805 - DNA, 25 bp, Homo sapien
caattgccggtgaggttgaggctct

SEQ ID NO: 1268806 - DNA, 25 bp, Homo sapien
agcgcgttgcccgacaggtcgagca

SEQ ID NO: 1268807 - DNA, 25 bp, Homo sapien
ggcgcctcagctgctggcaggcacc

SEQ ID NO: 1268808 - DNA, 25 bp, Homo sapien
gcgcctcagctgctggcaggcaccc

SEQ ID NO: 1268809 - DNA, 25 bp, Homo sapien
gcctcagctgctggcaggcacccac

SEQ ID NO: 1268810 - DNA, 25 bp, Homo sapien
cgcctcagctgctggcaggcaccca

SEQ ID NO: 1268811 - DNA, 25 bp, Homo sapien
taaccctgtaaaactctcaatagcc

SEQ ID NO: 1268812 - DNA, 25 bp, Homo sapien
tcttggtcccttaacaatgtataac

SEQ ID NO: 1268813 - DNA, 25 bp, Homo sapien
gaacccgtttgcttgtcaatcacta

SEQ ID NO: 1268814 - DNA, 25 bp, Homo sapien
caatagccactaatcactggtagga

SEQ ID NO: 1268815 - DNA, 25 bp, Homo sapien
cgagaccagcctggccaacatggtg

SEQ ID NO: 1268816 - DNA, 25 bp, Homo sapien
tgggcagattatgaggtcacgagtt

SEQ ID NO: 1268817 - DNA, 25 bp, Homo sapien
tgaaaccccatctctactaaaaata

SEQ ID NO: 1268818 - DNA, 25 bp, Homo sapien
gaaaaaattagccgagcatggtggt

SEQ ID NO: 1268819 - DNA, 25 bp, Homo sapien
acatcagcgaggcaagcagaagccc

SEQ ID NO: 1268820 - DNA, 25 bp, Homo sapien
tgcccttcagtccatggtagcctag

SEQ ID NO: 1268821 - DNA, 25 bp, Homo sapien
gaagtctgcccatgcaacatcagcg

SEQ ID NO: 1268822 - DNA, 25 bp, Homo sapien
aaagtgaagcgcctctgagcaaagg

SEQ ID NO: 1268823 - DNA, 25 bp, Homo sapien
gcttaatgtacagtgcggccaggtc

SEQ ID NO: 1268824 - DNA, 25 bp, Homo sapien
tatcgtttgcacgagagctgacggc

SEQ ID NO: 1268825 - DNA, 25 bp, Homo sapien
ctgcggaaattctactgcgtgtggc

SEQ ID NO: 1268826 - DNA, 25 bp, Homo sapien
cacagacgcgtaagaggcgtgcacg

SEQ ID NO: 1268827 - DNA, 25 bp, Homo sapien
tagaatcaggagacccgctccatcc

SEQ ID NO: 1268828 - DNA, 25 bp, Homo sapien
agagatggtgtagaatcaggagacc

SEQ ID NO: 1268829 - DNA, 25 bp, Homo sapien
tggtgtagaatcaggagacccgctc

SEQ ID NO: 1268830 - DNA, 25 bp, Homo sapien
gatggtgtagaatcaggagacccgc

SEQ ID NO: 1268831 - DNA, 25 bp, Homo sapien
agagaccaaggagcccgagcgccgc

SEQ ID NO: 1268832 - DNA, 25 bp, Homo sapien
tggcgtacgtcctgctggagctctt

SEQ ID NO: 1268833 - DNA, 25 bp, Homo sapien
cgcttggcgtacgtcctgctggagc

SEQ ID NO: 1268834 - DNA, 25 bp, Homo sapien
tggagctcttgctcagtccgccctt

SEQ ID NO: 1268835 - DNA, 25 bp, Homo sapien
gcttggcgtacgtcctgctggagct

SEQ ID NO: 1268836 - DNA, 25 bp, Homo sapien
accccaaggggcctgatgcggccac

SEQ ID NO: 1268837 - DNA, 25 bp, Homo sapien
ccccaaggggcctgatgcggccaca

SEQ ID NO: 1268838 - DNA, 25 bp, Homo sapien
gcttttttgaataagtcaaaatgga

SEQ ID NO: 1268839 - DNA, 25 bp, Homo sapien
cttttttgaataagtcaaaatggag

SEQ ID NO: 1268840 - DNA, 25 bp, Homo sapien
tggagggatgcagactacacctgct

SEQ ID NO: 1268841 - DNA, 25 bp, Homo sapien
tgtgtcttgcgcaggttcatcgtgc

SEQ ID NO: 1268842 - DNA, 25 bp, Homo sapien
cagaatgtgtgtcttgcgcaggttc

SEQ ID NO: 1268843 - DNA, 25 bp, Homo sapien
gtcttgcgcaggttcatcgtgcagc

SEQ ID NO: 1268844 - DNA, 25 bp, Homo sapien
tctgcagaatgtgtgtcttgcgcag

SEQ ID NO: 1268845 - DNA, 25 bp, Homo sapien
agagtgttaatcaggcgagacggac

SEQ ID NO: 1268846 - DNA, 25 bp, Homo sapien
ttaatcaggcgagacggacctggca

SEQ ID NO: 1268847 - DNA, 25 bp, Homo sapien
acggacctggcacgctacctgagac

SEQ ID NO: 1268848 - DNA, 25 bp, Homo sapien
agacggacctggcacgctacctgag

SEQ ID NO: 1268849 - DNA, 25 bp, Homo sapien
gaagcaagaagtcctgtcaccaggc

SEQ ID NO: 1268850 - DNA, 25 bp, Homo sapien
gcagggtacaactcaggaagcaaga

SEQ ID NO: 1268851 - DNA, 25 bp, Homo sapien
gattacgttccaggccagaagacag

SEQ ID NO: 1268852 - DNA, 25 bp, Homo sapien
cacagggcccttggtgtcagtgact

SEQ ID NO: 1268853 - DNA, 25 bp, Homo sapien
ccagtgacccacagaagattgagca

SEQ ID NO: 1268854 - DNA, 25 bp, Homo sapien
tgaattcacttaacagaggactgga

SEQ ID NO: 1268855 - DNA, 25 bp, Homo sapien
tgaaaacccactatctgtccacggg

SEQ ID NO: 1268856 - DNA, 25 bp, Homo sapien
gactagatctccatgaagctgttaa

SEQ ID NO: 1268857 - DNA, 25 bp, Homo sapien
gaggctcctcgataaaccattcata

SEQ ID NO: 1268858 - DNA, 25 bp, Homo sapien
tcagacagggctcactagacgctgt

SEQ ID NO: 1268859 - DNA, 25 bp, Homo sapien
tgtactctgtggctatggtcccgca

SEQ ID NO: 1268860 - DNA, 25 bp, Homo sapien
taaacggaacgactgctcagacagg

SEQ ID NO: 1268861 - DNA, 25 bp, Homo sapien
aggggacaccggtttgccagcttct

SEQ ID NO: 1268862 - DNA, 25 bp, Homo sapien
caggggacaccggtttgccagcttc

SEQ ID NO: 1268863 - DNA, 25 bp, Homo sapien
acaggggacaccggtttgccagctt

SEQ ID NO: 1268864 - DNA, 25 bp, Homo sapien
tgattttaaaaagactcagtcgctc

SEQ ID NO: 1268865 - DNA, 25 bp, Homo sapien
aatgattttaaaaagactcagtcgc

SEQ ID NO: 1268866 - DNA, 25 bp, Homo sapien
gattttaaaaagactcagtcgctcc

SEQ ID NO: 1268867 - DNA, 25 bp, Homo sapien
gaaatgattttaaaaagactcagtc

SEQ ID NO: 1268868 - DNA, 25 bp, Homo sapien
gcctgcccgcaggtgccctttaatt

SEQ ID NO: 1268869 - DNA, 25 bp, Homo sapien
gcgacaagacatgctgctggcctgc

SEQ ID NO: 1268870 - DNA, 25 bp, Homo sapien
acaggctcaagagcagtggcacttc

SEQ ID NO: 1268871 - DNA, 25 bp, Homo sapien
tgaatgacaggcgacaagacatgct

SEQ ID NO: 1268872 - DNA, 25 bp, Homo sapien
ttttgtcacattccgtcagcaagtg

SEQ ID NO: 1268873 - DNA, 25 bp, Homo sapien
aaacagcctcactgcaacggtaaca

SEQ ID NO: 1268874 - DNA, 25 bp, Homo sapien
tccgtcagactggatatctcgacca

SEQ ID NO: 1268875 - DNA, 25 bp, Homo sapien
cttgtgttttatgtgtctgggcagc

SEQ ID NO: 1268876 - DNA, 25 bp, Homo sapien
acagcaggaagcatggccgcagtgc

SEQ ID NO: 1268877 - DNA, 25 bp, Homo sapien
agacagcaggaagcatggccgcagt

SEQ ID NO: 1268878 - DNA, 25 bp, Homo sapien
agcaggaagcatggccgcagtgcca

SEQ ID NO: 1268879 - DNA, 25 bp, Homo sapien
cagcaggaagcatggccgcagtgcc

SEQ ID NO: 1268880 - DNA, 25 bp, Homo sapien
ttccagtagtggagatccagacctt

SEQ ID NO: 1268881 - DNA, 25 bp, Homo sapien
cttcctctgtgaaggattcactcct

SEQ ID NO: 1268882 - DNA, 25 bp, Homo sapien
gacagtgcttccagtagtggagatc

SEQ ID NO: 1268883 - DNA, 25 bp, Homo sapien
catcttgtcagcatgagacagtgct

SEQ ID NO: 1268884 - DNA, 25 bp, Homo sapien
tatctagatagtgctcatccgggat

SEQ ID NO: 1268885 - DNA, 25 bp, Homo sapien
atctagatagtgctcatccgggatt

SEQ ID NO: 1268886 - DNA, 25 bp, Homo sapien
ttatctagatagtgctcatccggga

SEQ ID NO: 1268887 - DNA, 25 bp, Homo sapien
tgattctttggcttcacagcatcac

SEQ ID NO: 1268888 - DNA, 25 bp, Homo sapien
cctgattctttggcttcacagcatc

SEQ ID NO: 1268889 - DNA, 25 bp, Homo sapien
tctttggcttcacagcatcactttc

SEQ ID NO: 1268890 - DNA, 25 bp, Homo sapien
gattctttggcttcacagcatcact

SEQ ID NO: 1268891 - DNA, 25 bp, Homo sapien
gccctgtgtggggcgcaggtctgcg

SEQ ID NO: 1268892 - DNA, 25 bp, Homo sapien
ggccctgtgtggggcgcaggtctgc

SEQ ID NO: 1268893 - DNA, 25 bp, Homo sapien
ggtctgcgctggcctcgaggccccc

SEQ ID NO: 1268894 - DNA, 25 bp, Homo sapien
cgctcatttgcataatcccatgaaa

SEQ ID NO: 1268895 - DNA, 25 bp, Homo sapien
aataagtcaagtatgatgtggatct

SEQ ID NO: 1268896 - DNA, 25 bp, Homo sapien
gtggatctatacagcaaaatacatt

SEQ ID NO: 1268897 - DNA, 25 bp, Homo sapien
aaaaggaatcaagacgctcatttgc

SEQ ID NO: 1268898 - DNA, 25 bp, Homo sapien
cttctgtagccgcttttctccgtgc

SEQ ID NO: 1268899 - DNA, 25 bp, Homo sapien
cttcttctgtagccgcttttctccg

SEQ ID NO: 1268900 - DNA, 25 bp, Homo sapien
gcttcttctgtagccgcttttctcc

SEQ ID NO: 1268901 - DNA, 25 bp, Homo sapien
tcttctgtagccgcttttctccgtg

SEQ ID NO: 1268902 - DNA, 25 bp, Homo sapien
tgcagcctgggaacctaagggtctc

SEQ ID NO: 1268903 - DNA, 25 bp, Homo sapien
ggtctcactggcagaaagtggagca

SEQ ID NO: 1268904 - DNA, 25 bp, Homo sapien
cagccgggatctgaatgcgggaacc

SEQ ID NO: 1268905 - DNA, 25 bp, Homo sapien
tattgatagataaacccactgtgtc

SEQ ID NO: 1268906 - DNA, 25 bp, Homo sapien
cctgcgtgtgttgctgtcgtctgga

SEQ ID NO: 1268907 - DNA, 25 bp, Homo sapien
aaataattcgaaccgccgtctcgcg

SEQ ID NO: 1268908 - DNA, 25 bp, Homo sapien
catacactctatgctccagggcact

SEQ ID NO: 1268909 - DNA, 25 bp, Homo sapien
agcctggtgctgtctgtacatgtcc

SEQ ID NO: 1268910 - DNA, 25 bp, Homo sapien
ccaggtaggatggaataatttggag

SEQ ID NO: 1268911 - DNA, 25 bp, Homo sapien
cattgccaggtgaactgaagagttt

SEQ ID NO: 1268912 - DNA, 25 bp, Homo sapien
cacgttgtcaatggtgaagcccgag

SEQ ID NO: 1268913 - DNA, 25 bp, Homo sapien
ggaggcccatctgactcattgccag

SEQ ID NO: 1268914 - DNA, 25 bp, Homo sapien
agtgtattgtaaccaggagtgtatt

SEQ ID NO: 1268915 - DNA, 25 bp, Homo sapien
gagtgtattgtaaccaggagtgtat

SEQ ID NO: 1268916 - DNA, 25 bp, Homo sapien
ggagtgtagtgtagcacattaggtc

SEQ ID NO: 1268917 - DNA, 25 bp, Homo sapien
gtgtagtgtagcacattaggtcgta

SEQ ID NO: 1268918 - DNA, 25 bp, Homo sapien
gtagtgtagcacattaggtcgtaac

SEQ ID NO: 1268919 - DNA, 25 bp, Homo sapien
gagtgtagtgtagcacattaggtcg

SEQ ID NO: 1268920 - DNA, 25 bp, Homo sapien
caggagtgtagcgtaggtcgtgacc

SEQ ID NO: 1268921 - DNA, 25 bp, Homo sapien
gagtgtagcgtaggtcgtgaccagg

SEQ ID NO: 1268922 - DNA, 25 bp, Homo sapien
tgtagcgtaggtcgtgaccaggagt

SEQ ID NO: 1268923 - DNA, 25 bp, Homo sapien
gcgtaggtcgtgaccaggagtgtag

SEQ ID NO: 1268924 - DNA, 25 bp, Homo sapien
caggagtgtagcgtaggtcgtgacc

SEQ ID NO: 1268925 - DNA, 25 bp, Homo sapien
accaggagtgtagcgtaggtcgtga

SEQ ID NO: 1268926 - DNA, 25 bp, Homo sapien
taggtcgtgaccaggagtgtagtgt

SEQ ID NO: 1268927 - DNA, 25 bp, Homo sapien
aggtcgtgaccaggagtgtagtgta

SEQ ID NO: 1268928 - DNA, 25 bp, Homo sapien
ggagtgtagtgtagcacattagcat

SEQ ID NO: 1268929 - DNA, 25 bp, Homo sapien
tgtgtaaaacttaacgtaattcata

SEQ ID NO: 1268930 - DNA, 25 bp, Homo sapien
taagcttcttaagcccaaaggagga

SEQ ID NO: 1268931 - DNA, 25 bp, Homo sapien
aacttaacgtaattcataagcttct

SEQ ID NO: 1268932 - DNA, 25 bp, Homo sapien
cttttttaagaaggatctgcacatc

SEQ ID NO: 1268933 - DNA, 25 bp, Homo sapien
tggtgaatccctgagaataatgtta

SEQ ID NO: 1268934 - DNA, 25 bp, Homo sapien
ttatcatctacggtttcaaatgccg

SEQ ID NO: 1268935 - DNA, 25 bp, Homo sapien
aaaggtgttaagaaagccagagagc

SEQ ID NO: 1268936 - DNA, 25 bp, Homo sapien
aactgaccttttagagcataaggaa

SEQ ID NO: 1268937 - DNA, 25 bp, Homo sapien
gtgagctgtttcaagtttactcagt

SEQ ID NO: 1268938 - DNA, 25 bp, Homo sapien
aatttgcagctgtgacgcggaggcg

SEQ ID NO: 1268939 - DNA, 25 bp, Homo sapien
aaacgggaatggtcctctccacaca

SEQ ID NO: 1268940 - DNA, 25 bp, Homo sapien
gaagaatctccagttctggtgagca

SEQ ID NO: 1268941 - DNA, 25 bp, Homo sapien
cacagcaccttgcatatagaggaca

SEQ ID NO: 1268942 - DNA, 25 bp, Homo sapien
tctcgtctgaaaggctgaaaattgc

SEQ ID NO: 1268943 - DNA, 25 bp, Homo sapien
tatgctcttacttcactctgtcaga

SEQ ID NO: 1268944 - DNA, 25 bp, Homo sapien
gatgagttactacggtgcaattcca

SEQ ID NO: 1268945 - DNA, 25 bp, Homo sapien
tctggtcttctgtggtacggcgcat

SEQ ID NO: 1268946 - DNA, 25 bp, Homo sapien
ggtgaccacgtcaatgaccaactgg

SEQ ID NO: 1268947 - DNA, 25 bp, Homo sapien
tattgagttacagttggtgaccacg

SEQ ID NO: 1268948 - DNA, 25 bp, Homo sapien
tctcatccatgcacgctggagccag

SEQ ID NO: 1268949 - DNA, 25 bp, Homo sapien
gaaagacggatgctctcagtgtgtt

SEQ ID NO: 1268950 - DNA, 25 bp, Homo sapien
tatggctcttctaacgagaaagacg

SEQ ID NO: 1268951 - DNA, 25 bp, Homo sapien
tcctctcggtaggaccacgtcttac

SEQ ID NO: 1268952 - DNA, 25 bp, Homo sapien
ttagacaaggcaagcagtgcatcct

SEQ ID NO: 1268953 - DNA, 25 bp, Homo sapien
caacacatcgatggcagagctggct

SEQ ID NO: 1268954 - DNA, 25 bp, Homo sapien
tctcaaggccttctcggttaagggc

SEQ ID NO: 1268955 - DNA, 25 bp, Homo sapien
tctgcattactcatttccggctcca

SEQ ID NO: 1268956 - DNA, 25 bp, Homo sapien
ccgagcatcgctgatgtctgcatta

SEQ ID NO: 1268957 - DNA, 25 bp, Homo sapien
tggaagaggccgctcatcgtagggc

SEQ ID NO: 1268958 - DNA, 25 bp, Homo sapien
ggccgctcatcgtagggcagggact

SEQ ID NO: 1268959 - DNA, 25 bp, Homo sapien
gaagaggccgctcatcgtagggcag

SEQ ID NO: 1268960 - DNA, 25 bp, Homo sapien
gaggccgctcatcgtagggcaggga

SEQ ID NO: 1268961 - DNA, 25 bp, Homo sapien
ggcttactgcgcttacttacctgat

SEQ ID NO: 1268962 - DNA, 25 bp, Homo sapien
gagctccataggtcacattctccag

SEQ ID NO: 1268963 - DNA, 25 bp, Homo sapien
agtgcaactctcactggcaggctta

SEQ ID NO: 1268964 - DNA, 25 bp, Homo sapien
cattctccagtgcaactctcactgg

SEQ ID NO: 1268965 - DNA, 25 bp, Homo sapien
cctcaatgactgtttactggtagca

SEQ ID NO: 1268966 - DNA, 25 bp, Homo sapien
agcatcaagcctgattttaataaac

SEQ ID NO: 1268967 - DNA, 25 bp, Homo sapien
tcagttcaactgacatggagactac

SEQ ID NO: 1268968 - DNA, 25 bp, Homo sapien
catgctcacaaggtgtcattaggcc

SEQ ID NO: 1268969 - DNA, 25 bp, Homo sapien
tctgtggcagggagtaacgggtcta

SEQ ID NO: 1268970 - DNA, 25 bp, Homo sapien
agggagtaacgggtctactgcagaa

SEQ ID NO: 1268971 - DNA, 25 bp, Homo sapien
aggatctgtggcagggagtaacggg

SEQ ID NO: 1268972 - DNA, 25 bp, Homo sapien
ggagtaacgggtctactgcagaatg

SEQ ID NO: 1268973 - DNA, 25 bp, Homo sapien
cttccagttgtggtagtgagggcat

SEQ ID NO: 1268974 - DNA, 25 bp, Homo sapien
tttcctgaaggaaaggttctgcaaa

SEQ ID NO: 1268975 - DNA, 25 bp, Homo sapien
tgagggcattggcttttggtggcaa

SEQ ID NO: 1268976 - DNA, 25 bp, Homo sapien
ttggtggcaaggactgccagaacga

SEQ ID NO: 1268977 - DNA, 25 bp, Homo sapien
tggaggggcaaatcaaaaggtcttc

SEQ ID NO: 1268978 - DNA, 25 bp, Homo sapien
ggggcaaatcaaaaggtcttcgcat

SEQ ID NO: 1268979 - DNA, 25 bp, Homo sapien
gaggggcaaatcaaaaggtcttcgc

SEQ ID NO: 1268980 - DNA, 25 bp, Homo sapien
ctggaggggcaaatcaaaaggtctt

SEQ ID NO: 1268981 - DNA, 25 bp, Homo sapien
tctaaaatcagaggcagagcacctt

SEQ ID NO: 1268982 - DNA, 25 bp, Homo sapien
aatcactattccgtatctcagaacc

SEQ ID NO: 1268983 - DNA, 25 bp, Homo sapien
taatctgtaacgtgggctgagtgcc

SEQ ID NO: 1268984 - DNA, 25 bp, Homo sapien
gagtgccccatttgcatgagttcta

SEQ ID NO: 1268985 - DNA, 25 bp, Homo sapien
agctcggcatccaggaggctgtgca

SEQ ID NO: 1268986 - DNA, 25 bp, Homo sapien
aggctgtgcagctccagctgctcgt

SEQ ID NO: 1268987 - DNA, 25 bp, Homo sapien
ctgtgcagctccagctgctcgtaca

SEQ ID NO: 1268988 - DNA, 25 bp, Homo sapien
cagctcggcatccaggaggctgtgc

SEQ ID NO: 1268989 - DNA, 25 bp, Homo sapien
cttcttctccttggcgagatcgtag

SEQ ID NO: 1268990 - DNA, 25 bp, Homo sapien
acggcacagcgtttctctacctcat

SEQ ID NO: 1268991 - DNA, 25 bp, Homo sapien
tacctcatacctcccaaggcgttca

SEQ ID NO: 1268992 - DNA, 25 bp, Homo sapien
ttggcgagatcgtagtcttccttct

SEQ ID NO: 1268993 - DNA, 25 bp, Homo sapien
tttcttggcataatcatagcgttcc

SEQ ID NO: 1268994 - DNA, 25 bp, Homo sapien
tgtgcaacttctggatcttggtaca

SEQ ID NO: 1268995 - DNA, 25 bp, Homo sapien
catctagcggagagatatagtcaga

SEQ ID NO: 1268996 - DNA, 25 bp, Homo sapien
tatcaaaagctaagtcatctagcgg

SEQ ID NO: 1268997 - DNA, 25 bp, Homo sapien
ttgcttcagtaagggcagagcccca

SEQ ID NO: 1268998 - DNA, 25 bp, Homo sapien
cacagtgcttccatccaattgccag

SEQ ID NO: 1268999 - DNA, 25 bp, Homo sapien
gggaggtagccatccactctcagcg

SEQ ID NO: 1269000 - DNA, 25 bp, Homo sapien
gccccagctgcggtctttgtggaga

SEQ ID NO: 1269001 - DNA, 25 bp, Homo sapien
ctgcggcaactatggcagcccttcc

SEQ ID NO: 1269002 - DNA, 25 bp, Homo sapien
actgcggcaactatggcagcccttc

SEQ ID NO: 1269003 - DNA, 25 bp, Homo sapien
tctggaatggagtcccctcattgtc

SEQ ID NO: 1269004 - DNA, 25 bp, Homo sapien
gggaaccactgtcccaaagaggtgc

SEQ ID NO: 1269005 - DNA, 25 bp, Homo sapien
gacagagagggtgaccgaggatggc

SEQ ID NO: 1269006 - DNA, 25 bp, Homo sapien
tagctccccaaaagtggattcaccc

SEQ ID NO: 1269007 - DNA, 25 bp, Homo sapien
cacgacgaactttccccatacccat

SEQ ID NO: 1269008 - DNA, 25 bp, Homo sapien
cacccagcctacaattgttaacacg

SEQ ID NO: 1269009 - DNA, 25 bp, Homo sapien
cagcctacaattgttaacacgacga

SEQ ID NO: 1269010 - DNA, 25 bp, Homo sapien
cctacaattgttaacacgacgaact

SEQ ID NO: 1269011 - DNA, 25 bp, Homo sapien
tggcgtacgttccttctagagcagg

SEQ ID NO: 1269012 - DNA, 25 bp, Homo sapien
ggtcctcgctgttgtgcccaaggta

SEQ ID NO: 1269013 - DNA, 25 bp, Homo sapien
gcccaaggtagtggtcaatcaactt

SEQ ID NO: 1269014 - DNA, 25 bp, Homo sapien
ggtcaatcaacttctctcgagaggc

SEQ ID NO: 1269015 - DNA, 25 bp, Homo sapien
tgcagggtctccaatgatatttatg

SEQ ID NO: 1269016 - DNA, 25 bp, Homo sapien
gcagggtctccaatgatatttatgg

SEQ ID NO: 1269017 - DNA, 25 bp, Homo sapien
cagggtctccaatgatatttatggc

SEQ ID NO: 1269018 - DNA, 25 bp, Homo sapien
gggccaggcagcttaattggacctt

SEQ ID NO: 1269019 - DNA, 25 bp, Homo sapien
ggcttcctggcgtgttatgctgcaa

SEQ ID NO: 1269020 - DNA, 25 bp, Homo sapien
gatttgctgggtgctcacattcctc

SEQ ID NO: 1269021 - DNA, 25 bp, Homo sapien
cacccgcttggtctagagatttgat

SEQ ID NO: 1269022 - DNA, 25 bp, Homo sapien
tgaaaaatcagtttaagaaattgtc

SEQ ID NO: 1269023 - DNA, 25 bp, Homo sapien
gattatatatgttgtatttgttgac

SEQ ID NO: 1269024 - DNA, 25 bp, Homo sapien
catggttttggtgaaaaatcagttt

SEQ ID NO: 1269025 - DNA, 25 bp, Homo sapien
tatttgttgacatggttttggtgaa

SEQ ID NO: 1269026 - DNA, 25 bp, Homo sapien
agttcccgggctttgcaacctgtct

SEQ ID NO: 1269027 - DNA, 25 bp, Homo sapien
ctgattttagttcccgggctttgca

SEQ ID NO: 1269028 - DNA, 25 bp, Homo sapien
tgattttagttcccgggctttgcaa

SEQ ID NO: 1269029 - DNA, 25 bp, Homo sapien
tagttcccgggctttgcaacctgtc

SEQ ID NO: 1269030 - DNA, 25 bp, Homo sapien
gctccctactctgattgaactcaat

SEQ ID NO: 1269031 - DNA, 25 bp, Homo sapien
tactctgattgaactcaataggctc

SEQ ID NO: 1269032 - DNA, 25 bp, Homo sapien
gattgaactcaataggctcatttat

SEQ ID NO: 1269033 - DNA, 25 bp, Homo sapien
caataaaactgctccctactctgat

SEQ ID NO: 1269034 - DNA, 25 bp, Homo sapien
gcaaaatattcaggcaagctttcac

SEQ ID NO: 1269035 - DNA, 25 bp, Homo sapien
tatactggtgagcaagtaactgcag

SEQ ID NO: 1269036 - DNA, 25 bp, Homo sapien
aactgcagtttccttattcgacatc

SEQ ID NO: 1269037 - DNA, 25 bp, Homo sapien
ccgctctgcttgatagggtgcaaaa

SEQ ID NO: 1269038 - DNA, 25 bp, Homo sapien
agatgctagcatctcattcttgcag

SEQ ID NO: 1269039 - DNA, 25 bp, Homo sapien
taggtactgatggtacaaagatgcc

SEQ ID NO: 1269040 - DNA, 25 bp, Homo sapien
tcttgcaggtaagaagcattaacca

SEQ ID NO: 1269041 - DNA, 25 bp, Homo sapien
cacacccactttgaacagaacagtc

SEQ ID NO: 1269042 - DNA, 25 bp, Homo sapien
ggcagctggcacaaattgggaaacc

SEQ ID NO: 1269043 - DNA, 25 bp, Homo sapien
ccagcccaaaagtaacacaacgtat

SEQ ID NO: 1269044 - DNA, 25 bp, Homo sapien
gttgggtagagaatcacagcagtca

SEQ ID NO: 1269045 - DNA, 25 bp, Homo sapien
gggctgctttagatagttactgctt

SEQ ID NO: 1269046 - DNA, 25 bp, Homo sapien
atgcactgcatgagacagcggtccc

SEQ ID NO: 1269047 - DNA, 25 bp, Homo sapien
taccatctgggtttgagggcactct

SEQ ID NO: 1269048 - DNA, 25 bp, Homo sapien
caagacaaccggcaaagctttgaag

SEQ ID NO: 1269049 - DNA, 25 bp, Homo sapien
cactctaggtgttcgatgaaatcga

SEQ ID NO: 1269050 - DNA, 25 bp, Homo sapien
caggctggaccgtgttaatgctgcc

SEQ ID NO: 1269051 - DNA, 25 bp, Homo sapien
tgtgagcgtacaggacctctgcaga

SEQ ID NO: 1269052 - DNA, 25 bp, Homo sapien
taacacggaacatgtgctgtgagcg

SEQ ID NO: 1269053 - DNA, 25 bp, Homo sapien
tctgcgggtgacaaaggcgctgtct

SEQ ID NO: 1269054 - DNA, 25 bp, Homo sapien
gtccagatgagctgacgactacaaa

SEQ ID NO: 1269055 - DNA, 25 bp, Homo sapien
aggtgaccgccacccactgacagtt

SEQ ID NO: 1269056 - DNA, 25 bp, Homo sapien
ttggcgcgtggatcatgagctcccg

SEQ ID NO: 1269057 - DNA, 25 bp, Homo sapien
cactgaagccgtcttcgtgtccaga

SEQ ID NO: 1269058 - DNA, 25 bp, Homo sapien
ctgtttataagagcaggaaaaactt

SEQ ID NO: 1269059 - DNA, 25 bp, Homo sapien
tcttgaactcctcccaccttagtgt

SEQ ID NO: 1269060 - DNA, 25 bp, Homo sapien
aaccatgaactctcgggctcaaatg

SEQ ID NO: 1269061 - DNA, 25 bp, Homo sapien
gaactcctcccaccttagtgtccca

SEQ ID NO: 1269062 - DNA, 25 bp, Homo sapien
tcactgtaaccatgaactctcgggc

SEQ ID NO: 1269063 - DNA, 25 bp, Homo sapien
tacacttttcctagtgctggcatgg

SEQ ID NO: 1269064 - DNA, 25 bp, Homo sapien
tcgacatcccgacaaatgccagagt

SEQ ID NO: 1269065 - DNA, 25 bp, Homo sapien
catgagggatccctgttgtcccagg

SEQ ID NO: 1269066 - DNA, 25 bp, Homo sapien
cagcgatgactccatggcggtctca

SEQ ID NO: 1269067 - DNA, 25 bp, Homo sapien
atagggacagagcaattttcctcaa

SEQ ID NO: 1269068 - DNA, 25 bp, Homo sapien
tgcgggacccggctctcgtggactt

SEQ ID NO: 1269069 - DNA, 25 bp, Homo sapien
agggcggctgggtcggagcggtgcc

SEQ ID NO: 1269070 - DNA, 25 bp, Homo sapien
ctgcggcagtgacagggaagaagca

SEQ ID NO: 1269071 - DNA, 25 bp, Homo sapien
gccgcttcctcagacggaactcggg

SEQ ID NO: 1269072 - DNA, 25 bp, Homo sapien
cagcctgtccgaggaagacggcctg

SEQ ID NO: 1269073 - DNA, 25 bp, Homo sapien
ctggcccagagcccatgcggttcag

SEQ ID NO: 1269074 - DNA, 25 bp, Homo sapien
gcccagagcccatgcggttcagggg

SEQ ID NO: 1269075 - DNA, 25 bp, Homo sapien
tcagcctgtccgaggaagacggcct

SEQ ID NO: 1269076 - DNA, 25 bp, Homo sapien
cacccttttgtggtttggcgttcat

SEQ ID NO: 1269077 - DNA, 25 bp, Homo sapien
tggtacggtgatgtttatctgctct

SEQ ID NO: 1269078 - DNA, 25 bp, Homo sapien
cagagctaaagcaataccttagaat

SEQ ID NO: 1269079 - DNA, 25 bp, Homo sapien
tagaagtcccatctatggtacggtg

SEQ ID NO: 1269080 - DNA, 25 bp, Homo sapien
ttagaattaacccagtcctgtgtgg

SEQ ID NO: 1269081 - DNA, 25 bp, Homo sapien
gcttgctcctggttggtccactcag

SEQ ID NO: 1269082 - DNA, 25 bp, Homo sapien
tgccctgggcgagaacacacggtga

SEQ ID NO: 1269083 - DNA, 25 bp, Homo sapien
agctgcacacggacctctctatggc

SEQ ID NO: 1269084 - DNA, 25 bp, Homo sapien
aagaggccatggagagagcactccc

SEQ ID NO: 1269085 - DNA, 25 bp, Homo sapien
aagatccctctcattaagcccactg

SEQ ID NO: 1269086 - DNA, 25 bp, Homo sapien
catcctccacaggtattgggtgctt

SEQ ID NO: 1269087 - DNA, 25 bp, Homo sapien
ttgagttttagttcccatgagtaca

SEQ ID NO: 1269088 - DNA, 25 bp, Homo sapien
ggtaaacattagctccacatacaga

SEQ ID NO: 1269089 - DNA, 25 bp, Homo sapien
catttttctgaactctcgtctgctc

SEQ ID NO: 1269090 - DNA, 25 bp, Homo sapien
ctgaactctcgtctgctcattgaag

SEQ ID NO: 1269091 - DNA, 25 bp, Homo sapien
tttctgaactctcgtctgctcattg

SEQ ID NO: 1269092 - DNA, 25 bp, Homo sapien
aagatgaagacgcaggtgggaggtc

SEQ ID NO: 1269093 - DNA, 25 bp, Homo sapien
tgcatgagctcaacgtttccaaaga

SEQ ID NO: 1269094 - DNA, 25 bp, Homo sapien
gtcatctagaaagacgctgttgtcc

SEQ ID NO: 1269095 - DNA, 25 bp, Homo sapien
cacgggcattggctgattgctgtcg

SEQ ID NO: 1269096 - DNA, 25 bp, Homo sapien
ccaaagaaccggctcacgggcattg

SEQ ID NO: 1269097 - DNA, 25 bp, Homo sapien
tctttgctaagcgagagtcactcac

SEQ ID NO: 1269098 - DNA, 25 bp, Homo sapien
cttttggcaaagaagcgctgtcatt

SEQ ID NO: 1269099 - DNA, 25 bp, Homo sapien
ccggacccggcactgtgttttggca

SEQ ID NO: 1269100 - DNA, 25 bp, Homo sapien
tgttttggcacggacaggccatctc

SEQ ID NO: 1269101 - DNA, 25 bp, Homo sapien
tacaagcgagactgaatctagacac

SEQ ID NO: 1269102 - DNA, 25 bp, Homo sapien
gtggcgttacagctcctcaggtgaa

SEQ ID NO: 1269103 - DNA, 25 bp, Homo sapien
aaagctctgtgctacacgctggcat

SEQ ID NO: 1269104 - DNA, 25 bp, Homo sapien
actgtaggctccgtgaagcggctct

SEQ ID NO: 1269105 - DNA, 25 bp, Homo sapien
ctgggctagggtgaacggcagacgg

SEQ ID NO: 1269106 - DNA, 25 bp, Homo sapien
ggaactcgctcctcggaatcgatgg

SEQ ID NO: 1269107 - DNA, 25 bp, Homo sapien
ttcaccggtaagttcaggaactcgc

SEQ ID NO: 1269108 - DNA, 25 bp, Homo sapien
tcctcggaatcgatggctgggctag

SEQ ID NO: 1269109 - DNA, 25 bp, Homo sapien
tctcttcaagcctctggcggtgagg

SEQ ID NO: 1269110 - DNA, 25 bp, Homo sapien
aggctgcacggcaatgggccagcat

SEQ ID NO: 1269111 - DNA, 25 bp, Homo sapien
tcttcaagcctctggcggtgaggct

SEQ ID NO: 1269112 - DNA, 25 bp, Homo sapien
cggcaatgggccagcatgactccat

SEQ ID NO: 1269113 - DNA, 25 bp, Homo sapien
agcacgctaagagcagagcgatgag

SEQ ID NO: 1269114 - DNA, 25 bp, Homo sapien
taagagcagagcgatgagcacaagt

SEQ ID NO: 1269115 - DNA, 25 bp, Homo sapien
gcagagcgatgagcacaagtggcct

SEQ ID NO: 1269116 - DNA, 25 bp, Homo sapien
cgatgagcacaagtggcctcagagc

SEQ ID NO: 1269117 - DNA, 25 bp, Homo sapien
taaaaatggaccctcgagtcaggat

SEQ ID NO: 1269118 - DNA, 25 bp, Homo sapien
tctaaagcaacacatcttggagtgg

SEQ ID NO: 1269119 - DNA, 25 bp, Homo sapien
tgaaggcaattacagtgctgtcacc

SEQ ID NO: 1269120 - DNA, 25 bp, Homo sapien
gcgttctccacggtaacagggctca

SEQ ID NO: 1269121 - DNA, 25 bp, Homo sapien
tttcaagcgcgctgaagaccgcact

SEQ ID NO: 1269122 - DNA, 25 bp, Homo sapien
ggccaacctggctgccgaacaactt

SEQ ID NO: 1269123 - DNA, 25 bp, Homo sapien
cagacgtggaaccagcaacttcctg

SEQ ID NO: 1269124 - DNA, 25 bp, Homo sapien
gaacaacttcgtgctttcaagcgcg

SEQ ID NO: 1269125 - DNA, 25 bp, Homo sapien
tggaagcgctggctgttaacagaca

SEQ ID NO: 1269126 - DNA, 25 bp, Homo sapien
cgctctgtgttctacgcctgcacgt

SEQ ID NO: 1269127 - DNA, 25 bp, Homo sapien
tttcgcgtgcaacaggttcatcagg

SEQ ID NO: 1269128 - DNA, 25 bp, Homo sapien
tgcacgtcttttcccgcagcaggtg

SEQ ID NO: 1269129 - DNA, 25 bp, Homo sapien
aagggctggccgagactgacttcaa

SEQ ID NO: 1269130 - DNA, 25 bp, Homo sapien
tttggaaatggtcctatgggcaccc

SEQ ID NO: 1269131 - DNA, 25 bp, Homo sapien
taaggacacggagagtctgtggcac

SEQ ID NO: 1269132 - DNA, 25 bp, Homo sapien
gagtaatgagcagtcccaaaacagc

SEQ ID NO: 1269133 - DNA, 25 bp, Homo sapien
tccgcccagtgaacggagaagactg

SEQ ID NO: 1269134 - DNA, 25 bp, Homo sapien
tacggtttaagcctctgcaagaggc

SEQ ID NO: 1269135 - DNA, 25 bp, Homo sapien
gagcccattactgtcctcagctgca

SEQ ID NO: 1269136 - DNA, 25 bp, Homo sapien
tcaaccccgtcctagatatgaggtg

SEQ ID NO: 1269137 - DNA, 25 bp, Homo sapien
caccgcagccaagcaccgcgcgccc

SEQ ID NO: 1269138 - DNA, 25 bp, Homo sapien
gcaccgcagccaagcaccgcgcgcc

SEQ ID NO: 1269139 - DNA, 25 bp, Homo sapien
ccgcagccaagcaccgcgcgccccg

SEQ ID NO: 1269140 - DNA, 25 bp, Homo sapien
accgcagccaagcaccgcgcgcccc

SEQ ID NO: 1269141 - DNA, 25 bp, Homo sapien
gacccggagtctgcagagcgcgccg

SEQ ID NO: 1269142 - DNA, 25 bp, Homo sapien
gtttctccggtgctatcccagagca

SEQ ID NO: 1269143 - DNA, 25 bp, Homo sapien
caggaccgtttctccggtgctatcc

SEQ ID NO: 1269144 - DNA, 25 bp, Homo sapien
caggccaggaccgtttctccggtgc

SEQ ID NO: 1269145 - DNA, 25 bp, Homo sapien
accgtttctccggtgctatcccaga

SEQ ID NO: 1269146 - DNA, 25 bp, Homo sapien
agttggtggcatcagaatcaggtgt

SEQ ID NO: 1269147 - DNA, 25 bp, Homo sapien
ggcagttggaagatgcccagaaact

SEQ ID NO: 1269148 - DNA, 25 bp, Homo sapien
catcagaatcaggtgtagagtacat

SEQ ID NO: 1269149 - DNA, 25 bp, Homo sapien
gaatcaggtgtagagtacataggaa

SEQ ID NO: 1269150 - DNA, 25 bp, Homo sapien
tgatcagtagtctgtgacatgacga

SEQ ID NO: 1269151 - DNA, 25 bp, Homo sapien
tctgcttcatatatcctacaacgtg

SEQ ID NO: 1269152 - DNA, 25 bp, Homo sapien
actggaggctgagcatccactggac

SEQ ID NO: 1269153 - DNA, 25 bp, Homo sapien
gtagcccgctttgtagactgatcag

SEQ ID NO: 1269154 - DNA, 25 bp, Homo sapien
caggacttgtctcctggtggagtcc

SEQ ID NO: 1269155 - DNA, 25 bp, Homo sapien
tggtggagtccaccggtttcattca

SEQ ID NO: 1269156 - DNA, 25 bp, Homo sapien
taggagaactcgcttgcctctgctt

SEQ ID NO: 1269157 - DNA, 25 bp, Homo sapien
ttttcaccgacgcaggcccggtgga

SEQ ID NO: 1269158 - DNA, 25 bp, Homo sapien
tgggagctgtgggcgtggctcccgc

SEQ ID NO: 1269159 - DNA, 25 bp, Homo sapien
ctgcacacacgttgtaaagagcact

SEQ ID NO: 1269160 - DNA, 25 bp, Homo sapien
gccagggtggagctgcaccctccat

SEQ ID NO: 1269161 - DNA, 25 bp, Homo sapien
tgcacacacgttgtaaagagcactg

SEQ ID NO: 1269162 - DNA, 25 bp, Homo sapien
ttgatgggcagctgtttttccctct

SEQ ID NO: 1269163 - DNA, 25 bp, Homo sapien
tttccctctgtggccgtgtagccat

SEQ ID NO: 1269164 - DNA, 25 bp, Homo sapien
tagtcattgatgggcagctgttttt

SEQ ID NO: 1269165 - DNA, 25 bp, Homo sapien
tcattgatgggcagctgtttttccc

SEQ ID NO: 1269166 - DNA, 25 bp, Homo sapien
aagcatttgcgtgtgttctcaggga

SEQ ID NO: 1269167 - DNA, 25 bp, Homo sapien
agagagtactgaccttatgtgcggg

SEQ ID NO: 1269168 - DNA, 25 bp, Homo sapien
ttaaaggagccagtggaccacatgc

SEQ ID NO: 1269169 - DNA, 25 bp, Homo sapien
aactcagatctgatttgggccgtca

SEQ ID NO: 1269170 - DNA, 25 bp, Homo sapien
cgattccaggccaggacaccaatgc

SEQ ID NO: 1269171 - DNA, 25 bp, Homo sapien
ccttgaagcccagcgggaatgggcc

SEQ ID NO: 1269172 - DNA, 25 bp, Homo sapien
gacaccaatgctcccacagccttga

SEQ ID NO: 1269173 - DNA, 25 bp, Homo sapien
aatgggccggtccaggctcagcagc

SEQ ID NO: 1269174 - DNA, 25 bp, Homo sapien
cagcgtaattaaggcatccatcacc

SEQ ID NO: 1269175 - DNA, 25 bp, Homo sapien
ttggtgcataataggtgtacagact

SEQ ID NO: 1269176 - DNA, 25 bp, Homo sapien
tgtaaagatccaatcagcgtaatta

SEQ ID NO: 1269177 - DNA, 25 bp, Homo sapien
tgtacagactttctgcatacatgta

SEQ ID NO: 1269178 - DNA, 25 bp, Homo sapien
taaagccacacggatggagaaacca

SEQ ID NO: 1269179 - DNA, 25 bp, Homo sapien
accggtgtgagttcaggtaaagcca

SEQ ID NO: 1269180 - DNA, 25 bp, Homo sapien
taaagcgagacacaggtcctgcagt

SEQ ID NO: 1269181 - DNA, 25 bp, Homo sapien
tcagcgccgggaaattagggtcaga

SEQ ID NO: 1269182 - DNA, 25 bp, Homo sapien
acagccttcaaacgggtccttggca

SEQ ID NO: 1269183 - DNA, 25 bp, Homo sapien
tcacacaggctccttattagggatt

SEQ ID NO: 1269184 - DNA, 25 bp, Homo sapien
cagtgactggcgtgaacagccttca

SEQ ID NO: 1269185 - DNA, 25 bp, Homo sapien
gacaagctgcttaagccgcgtcaca

SEQ ID NO: 1269186 - DNA, 25 bp, Homo sapien
caggacaagatttgtgcccccacag

SEQ ID NO: 1269187 - DNA, 25 bp, Homo sapien
agtgacaggacaagatttgtgcccc

SEQ ID NO: 1269188 - DNA, 25 bp, Homo sapien
tgctttccttaggccggtggttgac

SEQ ID NO: 1269189 - DNA, 25 bp, Homo sapien
gacaagatttgtgcccccacaggaa

SEQ ID NO: 1269190 - DNA, 25 bp, Homo sapien
catggtcagggaccatattccccat

SEQ ID NO: 1269191 - DNA, 25 bp, Homo sapien
gaccatattccccacggtgtctatg

SEQ ID NO: 1269192 - DNA, 25 bp, Homo sapien
gaccatattccccacagtttctggg

SEQ ID NO: 1269193 - DNA, 25 bp, Homo sapien
cctacagtgtctagggcggctccag

SEQ ID NO: 1269194 - DNA, 25 bp, Homo sapien
ggatctgaggcccttgtatgatcag

SEQ ID NO: 1269195 - DNA, 25 bp, Homo sapien
ccttgtatgatcagggaacaccagt

SEQ ID NO: 1269196 - DNA, 25 bp, Homo sapien
ccacattgctgacctttaacttttg

SEQ ID NO: 1269197 - DNA, 25 bp, Homo sapien
agttccagagacgtccagaaggagc

SEQ ID NO: 1269198 - DNA, 25 bp, Homo sapien
tatcttctggggctttgcagaatgg

SEQ ID NO: 1269199 - DNA, 25 bp, Homo sapien
ttactgtatcttctggggctttgca

SEQ ID NO: 1269200 - DNA, 25 bp, Homo sapien
tcttctggggctttgcagaatggtc

SEQ ID NO: 1269201 - DNA, 25 bp, Homo sapien
tgtatcttctggggctttgcagaat

SEQ ID NO: 1269202 - DNA, 25 bp, Homo sapien
tggaggcgggatagtggtgacacct

SEQ ID NO: 1269203 - DNA, 25 bp, Homo sapien
tgatgttgttggtgaaggatatgtc

SEQ ID NO: 1269204 - DNA, 25 bp, Homo sapien
cactgaacgcctcatgactgtggga

SEQ ID NO: 1269205 - DNA, 25 bp, Homo sapien
tagtggtgacacctgtgtgcagcca

SEQ ID NO: 1269206 - DNA, 25 bp, Homo sapien
tcttcagggtccttccgatcctcgg

SEQ ID NO: 1269207 - DNA, 25 bp, Homo sapien
ttcagggtccttccgatcctcggac

SEQ ID NO: 1269208 - DNA, 25 bp, Homo sapien
ttccgatcctcggacctcatgtgtg

SEQ ID NO: 1269209 - DNA, 25 bp, Homo sapien
cgatcctcggacctcatgtgtgtgt

SEQ ID NO: 1269210 - DNA, 25 bp, Homo sapien
cactaggaagtgactcgaagacctt

SEQ ID NO: 1269211 - DNA, 25 bp, Homo sapien
gcagagttatcatccattccccatc

SEQ ID NO: 1269212 - DNA, 25 bp, Homo sapien
tcagttttataaagagacgcagagt

SEQ ID NO: 1269213 - DNA, 25 bp, Homo sapien
ttgtaactcctgcttccacccgagg

SEQ ID NO: 1269214 - DNA, 25 bp, Homo sapien
cccgtggccttcagtgacgagaggc

SEQ ID NO: 1269215 - DNA, 25 bp, Homo sapien
ctaagcaagcgctgggcacagagga

SEQ ID NO: 1269216 - DNA, 25 bp, Homo sapien
cttcagtgacgagaggccgtgtgaa

SEQ ID NO: 1269217 - DNA, 25 bp, Homo sapien
cactaagcaagcgctgggcacagag

SEQ ID NO: 1269218 - DNA, 25 bp, Homo sapien
ttggtggattccgtgggtcctggag

SEQ ID NO: 1269219 - DNA, 25 bp, Homo sapien
cattggtgtagttggtggattccgt

SEQ ID NO: 1269220 - DNA, 25 bp, Homo sapien
cttcattggtgtagttggtggattc

SEQ ID NO: 1269221 - DNA, 25 bp, Homo sapien
tgtagttggtggattccgtgggtcc

SEQ ID NO: 1269222 - DNA, 25 bp, Homo sapien
tcgtggctggcttgaagacctccag

SEQ ID NO: 1269223 - DNA, 25 bp, Homo sapien
cagcagtgactgcatactccacatg

SEQ ID NO: 1269224 - DNA, 25 bp, Homo sapien
gaggcagcgccttccgaaggtcacg

SEQ ID NO: 1269225 - DNA, 25 bp, Homo sapien
agagaaagctttcgatatccatgag

SEQ ID NO: 1269226 - DNA, 25 bp, Homo sapien
cagggcagctacattgcaaaagcgc

SEQ ID NO: 1269227 - DNA, 25 bp, Homo sapien
tccagggcagctacattgcaaaagc

SEQ ID NO: 1269228 - DNA, 25 bp, Homo sapien
ggcagctacattgcaaaagcgcttg

SEQ ID NO: 1269229 - DNA, 25 bp, Homo sapien
cagctacattgcaaaagcgcttgac

SEQ ID NO: 1269230 - DNA, 25 bp, Homo sapien
gttcaccgaagtgttacatgacccg

SEQ ID NO: 1269231 - DNA, 25 bp, Homo sapien
agtgttacatgacccgctcagcaga

SEQ ID NO: 1269232 - DNA, 25 bp, Homo sapien
tacatgacccgctcagcagaaagct

SEQ ID NO: 1269233 - DNA, 25 bp, Homo sapien
ccgaagtgttacatgacccgctcag

SEQ ID NO: 1269234 - DNA, 25 bp, Homo sapien
gggcctccttgtgcagtaggtagtt

SEQ ID NO: 1269235 - DNA, 25 bp, Homo sapien
taggtagttccaggttgtgctgcgt

SEQ ID NO: 1269236 - DNA, 25 bp, Homo sapien
gatgtcggggcctccttgtgcagta

SEQ ID NO: 1269237 - DNA, 25 bp, Homo sapien
ccttgtgcagtaggtagttccaggt

SEQ ID NO: 1269238 - DNA, 25 bp, Homo sapien
aggtgacacctgagaggcaactgct

SEQ ID NO: 1269239 - DNA, 25 bp, Homo sapien
ggcaactgctctgtggcctcgagct

SEQ ID NO: 1269240 - DNA, 25 bp, Homo sapien
cttggagcatggctagccctggcct

SEQ ID NO: 1269241 - DNA, 25 bp, Homo sapien
ggcacagcttccttttccatgacaa

SEQ ID NO: 1269242 - DNA, 25 bp, Homo sapien
gccactgctcatccgatccagcagg

SEQ ID NO: 1269243 - DNA, 25 bp, Homo sapien
ccagcagggtcactctgtgtgatcg

SEQ ID NO: 1269244 - DNA, 25 bp, Homo sapien
atccagcagggtcactctgtgtgat

SEQ ID NO: 1269245 - DNA, 25 bp, Homo sapien
cgtgccactgctcatccgatccagc

SEQ ID NO: 1269246 - DNA, 25 bp, Homo sapien
cctgggatgtcaatgagtgaccgct

SEQ ID NO: 1269247 - DNA, 25 bp, Homo sapien
tgggatgtcaatgagtgaccgctga

SEQ ID NO: 1269248 - DNA, 25 bp, Homo sapien
gatgtcaatgagtgaccgctgattc

SEQ ID NO: 1269249 - DNA, 25 bp, Homo sapien
tgtcaatgagtgaccgctgattctg

SEQ ID NO: 1269250 - DNA, 25 bp, Homo sapien
tgaaacgtggctgatcatgctggag

SEQ ID NO: 1269251 - DNA, 25 bp, Homo sapien
tatacaacccagaggcattccatgg

SEQ ID NO: 1269252 - DNA, 25 bp, Homo sapien
tatgatccagaggttacgctgctga

SEQ ID NO: 1269253 - DNA, 25 bp, Homo sapien
catgggaacctggatcaaatgtgcc

SEQ ID NO: 1269254 - DNA, 25 bp, Homo sapien
cagtgtgggaggtttggaccaggag

SEQ ID NO: 1269255 - DNA, 25 bp, Homo sapien
tgtcgcaggtcctgaaacgctgctc

SEQ ID NO: 1269256 - DNA, 25 bp, Homo sapien
ccatagatgtcgcaggtcctgaaac

SEQ ID NO: 1269257 - DNA, 25 bp, Homo sapien
tcctgaaacgctgctctttgtggaa

SEQ ID NO: 1269258 - DNA, 25 bp, Homo sapien
tgttcgacagtcagagtgcatccaa

SEQ ID NO: 1269259 - DNA, 25 bp, Homo sapien
cttctatcatttagggctattgttc

SEQ ID NO: 1269260 - DNA, 25 bp, Homo sapien
catttagggctattgttcgacagtc

SEQ ID NO: 1269261 - DNA, 25 bp, Homo sapien
gtcagagtgcatccaagtcagggct

SEQ ID NO: 1269262 - DNA, 25 bp, Homo sapien
tttgccctgagtcagcaggagccgg

SEQ ID NO: 1269263 - DNA, 25 bp, Homo sapien
atgacacccgcatgtttcagggatg

SEQ ID NO: 1269264 - DNA, 25 bp, Homo sapien
cagtggattcgtggcgactccttga

SEQ ID NO: 1269265 - DNA, 25 bp, Homo sapien
caacagcgtctgttccagtggattc

SEQ ID NO: 1269266 - DNA, 25 bp, Homo sapien
tgagaagaccggggcacatccacgt

SEQ ID NO: 1269267 - DNA, 25 bp, Homo sapien
agaagaccggggcacatccacgtcc

SEQ ID NO: 1269268 - DNA, 25 bp, Homo sapien
gcacatccacgtccacattccccat

SEQ ID NO: 1269269 - DNA, 25 bp, Homo sapien
ctgagaagaccggggcacatccacg

SEQ ID NO: 1269270 - DNA, 25 bp, Homo sapien
aatgtttgggtaccatggcttagcc

SEQ ID NO: 1269271 - DNA, 25 bp, Homo sapien
ggagaacgcctcctctttgcgggag

SEQ ID NO: 1269272 - DNA, 25 bp, Homo sapien
cccagggatgaattgatgagactgc

SEQ ID NO: 1269273 - DNA, 25 bp, Homo sapien
ggtacagtggcacataattccagcg

SEQ ID NO: 1269274 - DNA, 25 bp, Homo sapien
tgctggttccatggacagaaataaa

SEQ ID NO: 1269275 - DNA, 25 bp, Homo sapien
cggttgtgctgcgttgcaccctcct

SEQ ID NO: 1269276 - DNA, 25 bp, Homo sapien
ctcctcctttgcgagcggtgacctt

SEQ ID NO: 1269277 - DNA, 25 bp, Homo sapien
tttgcgagcggtgaccttgaaggct

SEQ ID NO: 1269278 - DNA, 25 bp, Homo sapien
atggagacccccatttccgtggcgg

SEQ ID NO: 1269279 - DNA, 25 bp, Homo sapien
ccaggctactattcctgatggagac

SEQ ID NO: 1269280 - DNA, 25 bp, Homo sapien
ccgtggctgccgttgcatttattta

SEQ ID NO: 1269281 - DNA, 25 bp, Homo sapien
aataatctggggtccgctggtgccg

SEQ ID NO: 1269282 - DNA, 25 bp, Homo sapien
gccccaacagcctgtcctggtgcag

SEQ ID NO: 1269283 - DNA, 25 bp, Homo sapien
cctgtcctggtgcagtccttccctc

SEQ ID NO: 1269284 - DNA, 25 bp, Homo sapien
caacagcctgtcctggtgcagtcct

SEQ ID NO: 1269285 - DNA, 25 bp, Homo sapien
acagcctgtcctggtgcagtccttc

SEQ ID NO: 1269286 - DNA, 25 bp, Homo sapien
ctggcttgaaatttctcccaggcca

SEQ ID NO: 1269287 - DNA, 25 bp, Homo sapien
cagtgagccatgatcccaattccat

SEQ ID NO: 1269288 - DNA, 25 bp, Homo sapien
ccaggccaaggcagtgagccatgat

SEQ ID NO: 1269289 - DNA, 25 bp, Homo sapien
ggcttgaaatttctcccaggccaag

SEQ ID NO: 1269290 - DNA, 25 bp, Homo sapien
agcaagcccttcctatcttcagagg

SEQ ID NO: 1269291 - DNA, 25 bp, Homo sapien
tgaattctgggttccgaggcctaac

SEQ ID NO: 1269292 - DNA, 25 bp, Homo sapien
gagatttgcttctgcggcatcccag

SEQ ID NO: 1269293 - DNA, 25 bp, Homo sapien
tatcggttctcctctagataggcca

SEQ ID NO: 1269294 - DNA, 25 bp, Homo sapien
tatagcagccaaaatgggctaaggc

SEQ ID NO: 1269295 - DNA, 25 bp, Homo sapien
agcacctgtttaagccttttgacca

SEQ ID NO: 1269296 - DNA, 25 bp, Homo sapien
gccccttgatgttagacactccagg

SEQ ID NO: 1269297 - DNA, 25 bp, Homo sapien
ccaattagtaatggtgttgaacttc

SEQ ID NO: 1269298 - DNA, 25 bp, Homo sapien
gctgcttgttagtggcagctgagca

SEQ ID NO: 1269299 - DNA, 25 bp, Homo sapien
gcttgttagtggcagctgagcacat

SEQ ID NO: 1269300 - DNA, 25 bp, Homo sapien
caagccctgctgcttgttagtggca

SEQ ID NO: 1269301 - DNA, 25 bp, Homo sapien
cctgctgcttgttagtggcagctga

SEQ ID NO: 1269302 - DNA, 25 bp, Homo sapien
tcagtgtggcttaataattaaggct

SEQ ID NO: 1269303 - DNA, 25 bp, Homo sapien
gaagatgaagtggtgttttcattgt

SEQ ID NO: 1269304 - DNA, 25 bp, Homo sapien
taataattaaggctataagctgtga

SEQ ID NO: 1269305 - DNA, 25 bp, Homo sapien
aaggctataagctgtgaagatgaag

SEQ ID NO: 1269306 - DNA, 25 bp, Homo sapien
tctgaaggcccagcaggagaaggtt

SEQ ID NO: 1269307 - DNA, 25 bp, Homo sapien
aggtggaagtggatgtctgaaggcc

SEQ ID NO: 1269308 - DNA, 25 bp, Homo sapien
ctgcatgaactgctgaaggtggaag

SEQ ID NO: 1269309 - DNA, 25 bp, Homo sapien
tgcatgaactgctgaaggtggaagt

SEQ ID NO: 1269310 - DNA, 25 bp, Homo sapien
cacagatacatgttggagaccagga

SEQ ID NO: 1269311 - DNA, 25 bp, Homo sapien
gatcaagccttttgtggctcccagg

SEQ ID NO: 1269312 - DNA, 25 bp, Homo sapien
aaccgaagcgttctgctcatgcagc

SEQ ID NO: 1269313 - DNA, 25 bp, Homo sapien
tgcagagtgactcagggatcaagcc

SEQ ID NO: 1269314 - DNA, 25 bp, Homo sapien
tccttggcgggcagggaatagaact

SEQ ID NO: 1269315 - DNA, 25 bp, Homo sapien
ccatgctgttctccttggcgggcag

SEQ ID NO: 1269316 - DNA, 25 bp, Homo sapien
gtcagctgtgcacccggcatctggg

SEQ ID NO: 1269317 - DNA, 25 bp, Homo sapien
gtggcatctgatttcctcgcgtcag

SEQ ID NO: 1269318 - DNA, 25 bp, Homo sapien
acatcatcatttcctattagaactg

SEQ ID NO: 1269319 - DNA, 25 bp, Homo sapien
atcatcatttcctattagaactgac

SEQ ID NO: 1269320 - DNA, 25 bp, Homo sapien
catcatcatttcctattagaactga

SEQ ID NO: 1269321 - DNA, 25 bp, Homo sapien
catctcgggcgatttttcatctcct

SEQ ID NO: 1269322 - DNA, 25 bp, Homo sapien
aagctgtcggtggtcacagccagtc

SEQ ID NO: 1269323 - DNA, 25 bp, Homo sapien
tgtgagggatggacacattccaggc

SEQ ID NO: 1269324 - DNA, 25 bp, Homo sapien
cttttctgaagaagacgaggctgtg

SEQ ID NO: 1269325 - DNA, 25 bp, Homo sapien
ctgtccagggcttctaagccgggga

SEQ ID NO: 1269326 - DNA, 25 bp, Homo sapien
tgtccagggcttctaagccggggag

SEQ ID NO: 1269327 - DNA, 25 bp, Homo sapien
tccagggcttctaagccggggagca

SEQ ID NO: 1269328 - DNA, 25 bp, Homo sapien
ccagggcttctaagccggggagcac

SEQ ID NO: 1269329 - DNA, 25 bp, Homo sapien
ggatccttcattcctccgggcagag

SEQ ID NO: 1269330 - DNA, 25 bp, Homo sapien
tggcgctggctctggtcactcgctg

SEQ ID NO: 1269331 - DNA, 25 bp, Homo sapien
cagtggctgtgcctccgactctggc

SEQ ID NO: 1269332 - DNA, 25 bp, Homo sapien
tggctgctccggcagtagctcagcg

SEQ ID NO: 1269333 - DNA, 25 bp, Homo sapien
tattcccgcagggacaaccgggtca

SEQ ID NO: 1269334 - DNA, 25 bp, Homo sapien
aggtgcccctaggtcgggctgggct

SEQ ID NO: 1269335 - DNA, 25 bp, Homo sapien
gggacaaccgggtcagtgacagttc

SEQ ID NO: 1269336 - DNA, 25 bp, Homo sapien
cctcagggcctggtattcccgcagg

SEQ ID NO: 1269337 - DNA, 25 bp, Homo sapien
gaacgctgatgttccaaccatctgg

SEQ ID NO: 1269338 - DNA, 25 bp, Homo sapien
catctggccgccatgaggacaatca

SEQ ID NO: 1269339 - DNA, 25 bp, Homo sapien
gaggcccctttgcttccagcgtgtg

SEQ ID NO: 1269340 - DNA, 25 bp, Homo sapien
ggcattaatctcacactgaacgctg

SEQ ID NO: 1269341 - DNA, 25 bp, Homo sapien
cccacccagattcgggccatgccag

SEQ ID NO: 1269342 - DNA, 25 bp, Homo sapien
acccagattcgggccatgccagctt

SEQ ID NO: 1269343 - DNA, 25 bp, Homo sapien
agcccacccagattcgggccatgcc

SEQ ID NO: 1269344 - DNA, 25 bp, Homo sapien
tgaaatgggcatgggagtcactttc

SEQ ID NO: 1269345 - DNA, 25 bp, Homo sapien
ctgtggactcaccatggtaacacct

SEQ ID NO: 1269346 - DNA, 25 bp, Homo sapien
ttctaattgttcttgccctgtggac

SEQ ID NO: 1269347 - DNA, 25 bp, Homo sapien
aacatcagccgagggaagagatgtg

SEQ ID NO: 1269348 - DNA, 25 bp, Homo sapien
tgaggtagcatccagaaggttccaa

SEQ ID NO: 1269349 - DNA, 25 bp, Homo sapien
acaggctggacgcagggttggccgg

SEQ ID NO: 1269350 - DNA, 25 bp, Homo sapien
ggctgggtgcggacggcctttcttc

SEQ ID NO: 1269351 - DNA, 25 bp, Homo sapien
atcgctcaggaaatggtggacacag

SEQ ID NO: 1269352 - DNA, 25 bp, Homo sapien
aaatggtggacacagtcctgccccg

SEQ ID NO: 1269353 - DNA, 25 bp, Homo sapien
tgccagggtcaacatcagagcccct

SEQ ID NO: 1269354 - DNA, 25 bp, Homo sapien
gggtcaacatcagagcccctggagg

SEQ ID NO: 1269355 - DNA, 25 bp, Homo sapien
ccagggtcaacatcagagcccctgg

SEQ ID NO: 1269356 - DNA, 25 bp, Homo sapien
ctgccagggtcaacatcagagcccc

SEQ ID NO: 1269357 - DNA, 25 bp, Homo sapien
tgcaatatcacagggatgagttcct

SEQ ID NO: 1269358 - DNA, 25 bp, Homo sapien
cagagaacgtcatcacccgtgaagc

SEQ ID NO: 1269359 - DNA, 25 bp, Homo sapien
gcgcaggtgcacagcgagttctcct

SEQ ID NO: 1269360 - DNA, 25 bp, Homo sapien
tgagttctcagggactgtcgctgca

SEQ ID NO: 1269361 - DNA, 25 bp, Homo sapien
ttttctctgttacgtacatgaggag

SEQ ID NO: 1269362 - DNA, 25 bp, Homo sapien
gaggagcacattgtaactgtgcaat

SEQ ID NO: 1269363 - DNA, 25 bp, Homo sapien
tctgttacgtacatgaggagcacat

SEQ ID NO: 1269364 - DNA, 25 bp, Homo sapien
tctttttctctgttacgtacatgag

SEQ ID NO: 1269365 - DNA, 25 bp, Homo sapien
tgtaactaaatgtcattccgcaccc

SEQ ID NO: 1269366 - DNA, 25 bp, Homo sapien
ggagaaaaggcacgcttgcaattta

SEQ ID NO: 1269367 - DNA, 25 bp, Homo sapien
tcatgagtcactcacagcgacccgg

SEQ ID NO: 1269368 - DNA, 25 bp, Homo sapien
tcgccgctcaatcgaaagcaacggg

SEQ ID NO: 1269369 - DNA, 25 bp, Homo sapien
gtgatgtatgtctttgatttaggag

SEQ ID NO: 1269370 - DNA, 25 bp, Homo sapien
aaacgtgttcatttgggcggcggtg

SEQ ID NO: 1269371 - DNA, 25 bp, Homo sapien
ctttgatttaggagctgacacttct

SEQ ID NO: 1269372 - DNA, 25 bp, Homo sapien
tttgggcggcggtgatgtatgtctt

SEQ ID NO: 1269373 - DNA, 25 bp, Homo sapien
cgtggaagtagaagtttgggcatcc

SEQ ID NO: 1269374 - DNA, 25 bp, Homo sapien
acaggacagggttatgcatggacga

SEQ ID NO: 1269375 - DNA, 25 bp, Homo sapien
catggacgagtctccaggaagaatg

SEQ ID NO: 1269376 - DNA, 25 bp, Homo sapien
aagaatggacgtggaagtagaagtt

SEQ ID NO: 1269377 - DNA, 25 bp, Homo sapien
tgggcacgggttgggtgtgcagggc

SEQ ID NO: 1269378 - DNA, 25 bp, Homo sapien
gacagtgtacgctgacagcctgggc

SEQ ID NO: 1269379 - DNA, 25 bp, Homo sapien
cacgcaggccaagggtcatgtctac

SEQ ID NO: 1269380 - DNA, 25 bp, Homo sapien
tgtggtgggcacgggttgggtgtgc

SEQ ID NO: 1269381 - DNA, 25 bp, Homo sapien
cacgttgctccagatgtgaagtctt

SEQ ID NO: 1269382 - DNA, 25 bp, Homo sapien
gcctcgccagcacatccttgtttag

SEQ ID NO: 1269383 - DNA, 25 bp, Homo sapien
tgtttagaacgtcaagaacccgcca

SEQ ID NO: 1269384 - DNA, 25 bp, Homo sapien
ccacgtttctgcaggtgccaacatt

SEQ ID NO: 1269385 - DNA, 25 bp, Homo sapien
tgttttcttgatgcacgtggtatcc

SEQ ID NO: 1269386 - DNA, 25 bp, Homo sapien
ggtatccgtgataatgtggcccaat

SEQ ID NO: 1269387 - DNA, 25 bp, Homo sapien
caatttttcgtcatttgccaacggg

SEQ ID NO: 1269388 - DNA, 25 bp, Homo sapien
gataatgtggcccaatttttcgtca

SEQ ID NO: 1269389 - DNA, 25 bp, Homo sapien
tcagccacacgctcatctgtgttct

SEQ ID NO: 1269390 - DNA, 25 bp, Homo sapien
gcttttctctgactctactctctcc

SEQ ID NO: 1269391 - DNA, 25 bp, Homo sapien
tcccaacgccttccggtccacgtgc

SEQ ID NO: 1269392 - DNA, 25 bp, Homo sapien
tcaccattgcccgtgtcggccctca

SEQ ID NO: 1269393 - DNA, 25 bp, Homo sapien
gcatttgttgcctagatggtgttga

SEQ ID NO: 1269394 - DNA, 25 bp, Homo sapien
agaagcctgcatttgttgcctagat

SEQ ID NO: 1269395 - DNA, 25 bp, Homo sapien
cctgcatttgttgcctagatggtgt

SEQ ID NO: 1269396 - DNA, 25 bp, Homo sapien
aagcctgcatttgttgcctagatgg

SEQ ID NO: 1269397 - DNA, 25 bp, Homo sapien
ctgatcttgttgaaagctgtgatgt

SEQ ID NO: 1269398 - DNA, 25 bp, Homo sapien
tcttgttgaaagctgtgatgttgac

SEQ ID NO: 1269399 - DNA, 25 bp, Homo sapien
tgaggcttctgatcttgttgaaagc

SEQ ID NO: 1269400 - DNA, 25 bp, Homo sapien
gatcttgttgaaagctgtgatgttg

SEQ ID NO: 1269401 - DNA, 25 bp, Homo sapien
aagtctgtccccaacttgtcgtcct

SEQ ID NO: 1269402 - DNA, 25 bp, Homo sapien
gcagcttctggataccgtagcccat

SEQ ID NO: 1269403 - DNA, 25 bp, Homo sapien
aggctgcacatgctcctcaaacttg

SEQ ID NO: 1269404 - DNA, 25 bp, Homo sapien
atcacacactgaatctgcagcttct

SEQ ID NO: 1269405 - DNA, 25 bp, Homo sapien
ggagcgtgcacaggcctccaactgg

SEQ ID NO: 1269406 - DNA, 25 bp, Homo sapien
gcgtgcacaggcctccaactgggcc

SEQ ID NO: 1269407 - DNA, 25 bp, Homo sapien
ctggatggagcgtgcacaggcctcc

SEQ ID NO: 1269408 - DNA, 25 bp, Homo sapien
atggagcgtgcacaggcctccaact

SEQ ID NO: 1269409 - DNA, 25 bp, Homo sapien
catcatcctctgctggtgtggctgg

SEQ ID NO: 1269410 - DNA, 25 bp, Homo sapien
cctcatcatcctctgctggtgtggc

SEQ ID NO: 1269411 - DNA, 25 bp, Homo sapien
ggcttcttggctgggggctccacat

SEQ ID NO: 1269412 - DNA, 25 bp, Homo sapien
gctgggggctccacatgactgaaat

SEQ ID NO: 1269413 - DNA, 25 bp, Homo sapien
aggaggagctgcgagctgacggtac

SEQ ID NO: 1269414 - DNA, 25 bp, Homo sapien
gcaggaggagctgcgagctgacggt

SEQ ID NO: 1269415 - DNA, 25 bp, Homo sapien
aggagctgcgagctgacggtaccct

SEQ ID NO: 1269416 - DNA, 25 bp, Homo sapien
gaggagctgcgagctgacggtaccc

SEQ ID NO: 1269417 - DNA, 25 bp, Homo sapien
tgtgggttaaggtggggagatataa

SEQ ID NO: 1269418 - DNA, 25 bp, Homo sapien
ttgtgggttaaggtggggagatata

SEQ ID NO: 1269419 - DNA, 25 bp, Homo sapien
cttgtgggttaaggtggggagatat

SEQ ID NO: 1269420 - DNA, 25 bp, Homo sapien
gacccagtggctaggtttctggcac

SEQ ID NO: 1269421 - DNA, 25 bp, Homo sapien
tgacagacttactttccactctgag

SEQ ID NO: 1269422 - DNA, 25 bp, Homo sapien
ttgacccagtggctaggtttctggc

SEQ ID NO: 1269423 - DNA, 25 bp, Homo sapien
gattaagaaggtgacagacttactt

SEQ ID NO: 1269424 - DNA, 25 bp, Homo sapien
taaaacttctttatggtggctccca

SEQ ID NO: 1269425 - DNA, 25 bp, Homo sapien
tgcaccatcaccttcgccacttcat

SEQ ID NO: 1269426 - DNA, 25 bp, Homo sapien
gggcttgctgcttccatgaggatga

SEQ ID NO: 1269427 - DNA, 25 bp, Homo sapien
ccataggatgcttttgggggcttgc

SEQ ID NO: 1269428 - DNA, 25 bp, Homo sapien
caaaagctaaagaatctggggtccg

SEQ ID NO: 1269429 - DNA, 25 bp, Homo sapien
ggcaccctcactctcggtgggtctg

SEQ ID NO: 1269430 - DNA, 25 bp, Homo sapien
tgctggcgctgattagattaggcac

SEQ ID NO: 1269431 - DNA, 25 bp, Homo sapien
ttagattaggcaccctcactctcgg

SEQ ID NO: 1269432 - DNA, 25 bp, Homo sapien
tcatgaaaccgtgcacagaaagcgt

SEQ ID NO: 1269433 - DNA, 25 bp, Homo sapien
tgctttttcatgaaaccgtgcacag

SEQ ID NO: 1269434 - DNA, 25 bp, Homo sapien
cacagaaagcgtttggatctccatt

SEQ ID NO: 1269435 - DNA, 25 bp, Homo sapien
accgtgcacagaaagcgtttggatc

SEQ ID NO: 1269436 - DNA, 25 bp, Homo sapien
gagaggctgtcaacatcctgggacc

SEQ ID NO: 1269437 - DNA, 25 bp, Homo sapien
ctcaggctgagttttggattggtga

SEQ ID NO: 1269438 - DNA, 25 bp, Homo sapien
gcagcggcgggatgtgctttttctc

SEQ ID NO: 1269439 - DNA, 25 bp, Homo sapien
agggccctggagtctgtcgctcatc

SEQ ID NO: 1269440 - DNA, 25 bp, Homo sapien
tgcacagtgagggtgtccgcatccc

SEQ ID NO: 1269441 - DNA, 25 bp, Homo sapien
ttcatggaacaaaaatgccacctgc

SEQ ID NO: 1269442 - DNA, 25 bp, Homo sapien
tctgggtgttcaccgctgcaatcat

SEQ ID NO: 1269443 - DNA, 25 bp, Homo sapien
gctgctgcagtcacgattttcatgg

SEQ ID NO: 1269444 - DNA, 25 bp, Homo sapien
aactgttgccagctccttcgcctga

SEQ ID NO: 1269445 - DNA, 25 bp, Homo sapien
ctgatgctgccggaaatagcctgaa

SEQ ID NO: 1269446 - DNA, 25 bp, Homo sapien
tgctgccggaaatagcctgaaagaa

SEQ ID NO: 1269447 - DNA, 25 bp, Homo sapien
gttgccagctccttcgcctgatgct

SEQ ID NO: 1269448 - DNA, 25 bp, Homo sapien
gtttcaatgcccctgagatgctcat

SEQ ID NO: 1269449 - DNA, 25 bp, Homo sapien
gcagggactccaaatatagcattgt

SEQ ID NO: 1269450 - DNA, 25 bp, Homo sapien
gatgctcattatgggggcctctgca

SEQ ID NO: 1269451 - DNA, 25 bp, Homo sapien
agtgcttttgttcaacctggtttca

SEQ ID NO: 1269452 - DNA, 25 bp, Homo sapien
gaatatctcgtctcctgtgtcggga

SEQ ID NO: 1269453 - DNA, 25 bp, Homo sapien
tcagcgagccatgggaggcgagggt

SEQ ID NO: 1269454 - DNA, 25 bp, Homo sapien
tgtaggtgcagaatatctcgtctcc

SEQ ID NO: 1269455 - DNA, 25 bp, Homo sapien
tcctgtgtcgggaagttctgctgct

SEQ ID NO: 1269456 - DNA, 25 bp, Homo sapien
acatgtgcagtcccgtgccctcccc

SEQ ID NO: 1269457 - DNA, 25 bp, Homo sapien
catgtgcagtcccgtgccctcccca

SEQ ID NO: 1269458 - DNA, 25 bp, Homo sapien
acagaaccagccgtgcggccaacat

SEQ ID NO: 1269459 - DNA, 25 bp, Homo sapien
gggacacagaaccagccgtgcggcc

SEQ ID NO: 1269460 - DNA, 25 bp, Homo sapien
ttcaaagcaactgaagtattcaact

SEQ ID NO: 1269461 - DNA, 25 bp, Homo sapien
tattcaacttttacaactgcaggga

SEQ ID NO: 1269462 - DNA, 25 bp, Homo sapien
tcaccctttgttgccactgttgatg

SEQ ID NO: 1269463 - DNA, 25 bp, Homo sapien
cactgttgatgtcttcaaagcaact

SEQ ID NO: 1269464 - DNA, 25 bp, Homo sapien
ctgagggtcgagcatctgaggatct

SEQ ID NO: 1269465 - DNA, 25 bp, Homo sapien
tccagactgagggtcgagcatctga

SEQ ID NO: 1269466 - DNA, 25 bp, Homo sapien
tcacagccgtccagactgagggtcg

SEQ ID NO: 1269467 - DNA, 25 bp, Homo sapien
gccgtccagactgagggtcgagcat

SEQ ID NO: 1269468 - DNA, 25 bp, Homo sapien
ctgtcctgtgatggcatctgtctgg

SEQ ID NO: 1269469 - DNA, 25 bp, Homo sapien
gtcctgtcctgtgatggcatctgtc

SEQ ID NO: 1269470 - DNA, 25 bp, Homo sapien
ttgacctcatagtcctgtcctgtga

SEQ ID NO: 1269471 - DNA, 25 bp, Homo sapien
tgttcacccacttgacctcatagtc

SEQ ID NO: 1269472 - DNA, 25 bp, Homo sapien
ttcccagtattctcaatggagctgc

SEQ ID NO: 1269473 - DNA, 25 bp, Homo sapien
ttacaagcatgacgaaggacgtgac

SEQ ID NO: 1269474 - DNA, 25 bp, Homo sapien
gaaaatggagacttggtatgactgg

SEQ ID NO: 1269475 - DNA, 25 bp, Homo sapien
tatccacgctacacttttccaagaa

SEQ ID NO: 1269476 - DNA, 25 bp, Homo sapien
tttagtgcaacagacttatccacgc

SEQ ID NO: 1269477 - DNA, 25 bp, Homo sapien
agaacatggatttttcacgaaagcc

SEQ ID NO: 1269478 - DNA, 25 bp, Homo sapien
ggaactgtgcaaattatctcgcgca

SEQ ID NO: 1269479 - DNA, 25 bp, Homo sapien
cacgaaagcctatcaagggtagagt

SEQ ID NO: 1269480 - DNA, 25 bp, Homo sapien
tgcatgccagagatcatcctcccag

SEQ ID NO: 1269481 - DNA, 25 bp, Homo sapien
gttccagattgtggggccacatgag

SEQ ID NO: 1269482 - DNA, 25 bp, Homo sapien
ccagattgtggggccacatgagcgt

SEQ ID NO: 1269483 - DNA, 25 bp, Homo sapien
gattgtggggccacatgagcgtggc

SEQ ID NO: 1269484 - DNA, 25 bp, Homo sapien
tccagattgtggggccacatgagcg

SEQ ID NO: 1269485 - DNA, 25 bp, Homo sapien
gaatgtcccatcgatgttaaatgca

SEQ ID NO: 1269486 - DNA, 25 bp, Homo sapien
gttttccagccgattgtcttttcag

SEQ ID NO: 1269487 - DNA, 25 bp, Homo sapien
tattttcacaacagatgctcccaga

SEQ ID NO: 1269488 - DNA, 25 bp, Homo sapien
tgctgggccaatgcgaatgtcccat

SEQ ID NO: 1269489 - DNA, 25 bp, Homo sapien
gacccatcaaaattcaggtgtcgag

SEQ ID NO: 1269490 - DNA, 25 bp, Homo sapien
gaaccacatgtaaaagtgacccatc

SEQ ID NO: 1269491 - DNA, 25 bp, Homo sapien
taaaagtgacccatcaaaattcagg

SEQ ID NO: 1269492 - DNA, 25 bp, Homo sapien
tcaaaattcaggtgtcgaggaggtg

SEQ ID NO: 1269493 - DNA, 25 bp, Homo sapien
tgtctgccccgatgacaggggcccg

SEQ ID NO: 1269494 - DNA, 25 bp, Homo sapien
tagccctgtctgccccgatgacagg

SEQ ID NO: 1269495 - DNA, 25 bp, Homo sapien
tgacaaatagccctgtctgccccga

SEQ ID NO: 1269496 - DNA, 25 bp, Homo sapien
tgagcttgacaaatagccctgtctg

SEQ ID NO: 1269497 - DNA, 25 bp, Homo sapien
actagggatgtcacggttgctctgg

SEQ ID NO: 1269498 - DNA, 25 bp, Homo sapien
aggaactagggatgtcacggttgct

SEQ ID NO: 1269499 - DNA, 25 bp, Homo sapien
tgtcacggttgctctgggtgtccag

SEQ ID NO: 1269500 - DNA, 25 bp, Homo sapien
gatgtcacggttgctctgggtgtcc

SEQ ID NO: 1269501 - DNA, 25 bp, Homo sapien
agtcaaaagaggatcttgctgacaa

SEQ ID NO: 1269502 - DNA, 25 bp, Homo sapien
caagtcaaaagaggatcttgctgac

SEQ ID NO: 1269503 - DNA, 25 bp, Homo sapien
ctccccttccaccaagtcaaaagag

SEQ ID NO: 1269504 - DNA, 25 bp, Homo sapien
ctctccccttccaccaagtcaaaag

SEQ ID NO: 1269505 - DNA, 25 bp, Homo sapien
tatcacactattggcttcttcaggg

SEQ ID NO: 1269506 - DNA, 25 bp, Homo sapien
tggacccagccttttcatcttgtga

SEQ ID NO: 1269507 - DNA, 25 bp, Homo sapien
tcctgcatggggttggttctccaaa

SEQ ID NO: 1269508 - DNA, 25 bp, Homo sapien
tgaccccaagatttttccctgtgtc

SEQ ID NO: 1269509 - DNA, 25 bp, Homo sapien
ggtcattagtgaagggctgtgtctc

SEQ ID NO: 1269510 - DNA, 25 bp, Homo sapien
gcctcagagtcaaaactcggcactg

SEQ ID NO: 1269511 - DNA, 25 bp, Homo sapien
aaaactcggcactgcagcgtgctgg

SEQ ID NO: 1269512 - DNA, 25 bp, Homo sapien
gtctggccccgcgaaagtggtgaga

SEQ ID NO: 1269513 - DNA, 25 bp, Homo sapien
gccacgcgggacctgagtactttct

SEQ ID NO: 1269514 - DNA, 25 bp, Homo sapien
ctcggctaagggacagcgtggacca

SEQ ID NO: 1269515 - DNA, 25 bp, Homo sapien
aaattcctgtaataatgctactgcc

SEQ ID NO: 1269516 - DNA, 25 bp, Homo sapien
taaaagatcatgtagggccgtgcaa

SEQ ID NO: 1269517 - DNA, 25 bp, Homo sapien
cacgctgccccgaggtgcttttggg

SEQ ID NO: 1269518 - DNA, 25 bp, Homo sapien
ctgccccgaggtgcttttgggatgt

SEQ ID NO: 1269519 - DNA, 25 bp, Homo sapien
cccactctcagcacgctgccccgag

SEQ ID NO: 1269520 - DNA, 25 bp, Homo sapien
gcttttgggatgtgggtgctaaacc

SEQ ID NO: 1269521 - DNA, 25 bp, Homo sapien
cacctggacggcctctggcgacctg

SEQ ID NO: 1269522 - DNA, 25 bp, Homo sapien
ccagcacctggacggcctctggcga

SEQ ID NO: 1269523 - DNA, 25 bp, Homo sapien
acctggacggcctctggcgacctgc

SEQ ID NO: 1269524 - DNA, 25 bp, Homo sapien
tggacggcctctggcgacctgcctt

SEQ ID NO: 1269525 - DNA, 25 bp, Homo sapien
tgccctgggttggtagtcggtcaca

SEQ ID NO: 1269526 - DNA, 25 bp, Homo sapien
ttttgtagcacacgctgttcacgcc

SEQ ID NO: 1269527 - DNA, 25 bp, Homo sapien
caccgaggctggacactgttgctga

SEQ ID NO: 1269528 - DNA, 25 bp, Homo sapien
gattccaagtaatgtccatgctcca

SEQ ID NO: 1269529 - DNA, 25 bp, Homo sapien
caccacaattacataatgatagtca

SEQ ID NO: 1269530 - DNA, 25 bp, Homo sapien
gtgacaccacaattacataatgata

SEQ ID NO: 1269531 - DNA, 25 bp, Homo sapien
gacaccacaattacataatgatagt

SEQ ID NO: 1269532 - DNA, 25 bp, Homo sapien
ccacaattacataatgatagtcatt

SEQ ID NO: 1269533 - DNA, 25 bp, Homo sapien
cagtggctgtttgatgcgctgagca

SEQ ID NO: 1269534 - DNA, 25 bp, Homo sapien
tgcagccagacgcagatgctggaac

SEQ ID NO: 1269535 - DNA, 25 bp, Homo sapien
ttggcgagggtctcggccctgcact

SEQ ID NO: 1269536 - DNA, 25 bp, Homo sapien
aacaatagccatgagcgaggagagg

SEQ ID NO: 1269537 - DNA, 25 bp, Homo sapien
atctcaccatcgagccaggtcttta

SEQ ID NO: 1269538 - DNA, 25 bp, Homo sapien
aggcagcatctcaccatcgagccag

SEQ ID NO: 1269539 - DNA, 25 bp, Homo sapien
tgagaccacctggaaaggcagggcc

SEQ ID NO: 1269540 - DNA, 25 bp, Homo sapien
gagccaggtctttactgggtcctgc

SEQ ID NO: 1269541 - DNA, 25 bp, Homo sapien
ggatttgggctcaaaccaagacaac

SEQ ID NO: 1269542 - DNA, 25 bp, Homo sapien
caagacaacccgtgggcctggtcct

SEQ ID NO: 1269543 - DNA, 25 bp, Homo sapien
actggcgtcaggctcgctcctgcat

SEQ ID NO: 1269544 - DNA, 25 bp, Homo sapien
cgtcaggctcgctcctgcatctgga

SEQ ID NO: 1269545 - DNA, 25 bp, Homo sapien
cttcagggtgagaaaagctgcagcc

SEQ ID NO: 1269546 - DNA, 25 bp, Homo sapien
gtgagaaaagctgcagcctggttga

SEQ ID NO: 1269547 - DNA, 25 bp, Homo sapien
ctgcgggcatggctcttcagggtga

SEQ ID NO: 1269548 - DNA, 25 bp, Homo sapien
tgcgggcatggctcttcagggtgag

SEQ ID NO: 1269549 - DNA, 25 bp, Homo sapien
aatggccagtagggatgtggcatcc

SEQ ID NO: 1269550 - DNA, 25 bp, Homo sapien
acttgcagacaccttagatactggc

SEQ ID NO: 1269551 - DNA, 25 bp, Homo sapien
tggagcagtgtcacttgcagacacc

SEQ ID NO: 1269552 - DNA, 25 bp, Homo sapien
caccttagatactggcagccctgaa

SEQ ID NO: 1269553 - DNA, 25 bp, Homo sapien
gcattacagagcctggtgtgggcag

SEQ ID NO: 1269554 - DNA, 25 bp, Homo sapien
caggtgggcattacagagcctggtg

SEQ ID NO: 1269555 - DNA, 25 bp, Homo sapien
gggcattacagagcctggtgtgggc

SEQ ID NO: 1269556 - DNA, 25 bp, Homo sapien
tgggcaggggctcatcgggtgtgac

SEQ ID NO: 1269557 - DNA, 25 bp, Homo sapien
ttcttgcagagtcaaaaggagcaac

SEQ ID NO: 1269558 - DNA, 25 bp, Homo sapien
cttcttgcagagtcaaaaggagcaa

SEQ ID NO: 1269559 - DNA, 25 bp, Homo sapien
gcagagtcaaaaggagcaacacggg

SEQ ID NO: 1269560 - DNA, 25 bp, Homo sapien
tcaaaaggagcaacacgggggtatc

SEQ ID NO: 1269561 - DNA, 25 bp, Homo sapien
gttatcgccccagtttatgagtccg

SEQ ID NO: 1269562 - DNA, 25 bp, Homo sapien
gactcacgatgggtgcgttttgcag

SEQ ID NO: 1269563 - DNA, 25 bp, Homo sapien
gcttttgaacatctccccagtggat

SEQ ID NO: 1269564 - DNA, 25 bp, Homo sapien
gaaaagcccgtctggctgttatcgc

SEQ ID NO: 1269565 - DNA, 25 bp, Homo sapien
gcggtcacctctgcggtcaccaagg

SEQ ID NO: 1269566 - DNA, 25 bp, Homo sapien
cactcagcagtgcacttcttctcag

SEQ ID NO: 1269567 - DNA, 25 bp, Homo sapien
aaggacaccgacctgcagggcaaac

SEQ ID NO: 1269568 - DNA, 25 bp, Homo sapien
gaagctcctggcacactccaggcat

SEQ ID NO: 1269569 - DNA, 25 bp, Homo sapien
gagaggtaggcactggcaatcaagc

SEQ ID NO: 1269570 - DNA, 25 bp, Homo sapien
tcactgcggcggctgttaacagatg

SEQ ID NO: 1269571 - DNA, 25 bp, Homo sapien
ttgtgtaaggcgacagggctgccaa

SEQ ID NO: 1269572 - DNA, 25 bp, Homo sapien
gcaatcaagcttcggtgctgaaagt

SEQ ID NO: 1269573 - DNA, 25 bp, Homo sapien
cttgacttggttctctctgacagga

SEQ ID NO: 1269574 - DNA, 25 bp, Homo sapien
attcattgctgcttcttgacttggt

SEQ ID NO: 1269575 - DNA, 25 bp, Homo sapien
ggttctctctgacaggacataagca

SEQ ID NO: 1269576 - DNA, 25 bp, Homo sapien
gacttggttctctctgacaggacat

SEQ ID NO: 1269577 - DNA, 25 bp, Homo sapien
acatcgccagggaaccacggtcttt

SEQ ID NO: 1269578 - DNA, 25 bp, Homo sapien
catcgccagggaaccacggtcttta

SEQ ID NO: 1269579 - DNA, 25 bp, Homo sapien
cagcaatgcctacacaggtctggca

SEQ ID NO: 1269580 - DNA, 25 bp, Homo sapien
gaactcagtgcgattggcaaggcga

SEQ ID NO: 1269581 - DNA, 25 bp, Homo sapien
tcaaagtggcccttgtcacagaact

SEQ ID NO: 1269582 - DNA, 25 bp, Homo sapien
gctgactgacttttgggatagggcc

SEQ ID NO: 1269583 - DNA, 25 bp, Homo sapien
tcccagcttgctgattggctatgtc

SEQ ID NO: 1269584 - DNA, 25 bp, Homo sapien
tgcatgtgccccaccatgacctttg

SEQ ID NO: 1269585 - DNA, 25 bp, Homo sapien
atgacctttgcactggactgatgac

SEQ ID NO: 1269586 - DNA, 25 bp, Homo sapien
cagagcagagggccaatgcatgtgc

SEQ ID NO: 1269587 - DNA, 25 bp, Homo sapien
tgcagctggctgcaaacattcacga

SEQ ID NO: 1269588 - DNA, 25 bp, Homo sapien
tacagtgttccttcagccaggcggg

SEQ ID NO: 1269589 - DNA, 25 bp, Homo sapien
ttcagccaggcgggatgcagctggc

SEQ ID NO: 1269590 - DNA, 25 bp, Homo sapien
gatgcagctggctgcaaacattcac

SEQ ID NO: 1269591 - DNA, 25 bp, Homo sapien
tgcagcatctcatccctgtccctgt

SEQ ID NO: 1269592 - DNA, 25 bp, Homo sapien
gctggacacaaattcatctacattt

SEQ ID NO: 1269593 - DNA, 25 bp, Homo sapien
cctgggcggagtcttcatctctggg

SEQ ID NO: 1269594 - DNA, 25 bp, Homo sapien
caaagcagccccaagttctaactag

SEQ ID NO: 1269595 - DNA, 25 bp, Homo sapien
caggggcctctaagcagaaccaggg

SEQ ID NO: 1269596 - DNA, 25 bp, Homo sapien
aggcaggggcctctaagcagaacca

SEQ ID NO: 1269597 - DNA, 25 bp, Homo sapien
ggggcctctaagcagaaccagggaa

SEQ ID NO: 1269598 - DNA, 25 bp, Homo sapien
caggcaggggcctctaagcagaacc

SEQ ID NO: 1269599 - DNA, 25 bp, Homo sapien
ccatacttgccgacattgtagaatg

SEQ ID NO: 1269600 - DNA, 25 bp, Homo sapien
gtattattccctgcgcagtcagtgg

SEQ ID NO: 1269601 - DNA, 25 bp, Homo sapien
aatgtctgggccgagcccagtgctc

SEQ ID NO: 1269602 - DNA, 25 bp, Homo sapien
agtgctccatccatacttgccgaca

SEQ ID NO: 1269603 - DNA, 25 bp, Homo sapien
cccgacggcagcgagtgaaatagca

SEQ ID NO: 1269604 - DNA, 25 bp, Homo sapien
tgggcccgacggcagcgagtgaaat

SEQ ID NO: 1269605 - DNA, 25 bp, Homo sapien
aggagggatcgtcctgggcccgacg

SEQ ID NO: 1269606 - DNA, 25 bp, Homo sapien
gacggcagcgagtgaaatagcagca

SEQ ID NO: 1269607 - DNA, 25 bp, Homo sapien
ctcctgggccgatgacatggctgac

SEQ ID NO: 1269608 - DNA, 25 bp, Homo sapien
tcagtctcctgggccgatgacatgg

SEQ ID NO: 1269609 - DNA, 25 bp, Homo sapien
agtctcctgggccgatgacatggct

SEQ ID NO: 1269610 - DNA, 25 bp, Homo sapien
tctcctgggccgatgacatggctga

SEQ ID NO: 1269611 - DNA, 25 bp, Homo sapien
cagtccccgtgggtgccaccacctt

SEQ ID NO: 1269612 - DNA, 25 bp, Homo sapien
ccagtccccgtgggtgccaccacct

SEQ ID NO: 1269613 - DNA, 25 bp, Homo sapien
gagacagcgtttgttcagcaacttc

SEQ ID NO: 1269614 - DNA, 25 bp, Homo sapien
ggctcccataagctagttccctgca

SEQ ID NO: 1269615 - DNA, 25 bp, Homo sapien
gatggacccatcctttgtagaaagg

SEQ ID NO: 1269616 - DNA, 25 bp, Homo sapien
ggttggcaaacctgagagacagcgt

SEQ ID NO: 1269617 - DNA, 25 bp, Homo sapien
gttagaagaactcatcactatgccg

SEQ ID NO: 1269618 - DNA, 25 bp, Homo sapien
gaagaactcatcactatgccgaccc

SEQ ID NO: 1269619 - DNA, 25 bp, Homo sapien
gggcagttagaagaactcatcacta

SEQ ID NO: 1269620 - DNA, 25 bp, Homo sapien
ttctcgggggcagttagaagaactc

SEQ ID NO: 1269621 - DNA, 25 bp, Homo sapien
acttaagagccctggatcccaacca

SEQ ID NO: 1269622 - DNA, 25 bp, Homo sapien
gcagtgtttctgaatttcccggtgg

SEQ ID NO: 1269623 - DNA, 25 bp, Homo sapien
tttccccagaactacacttaagagc

SEQ ID NO: 1269624 - DNA, 25 bp, Homo sapien
gaaatcctttgtccaagcagtgttt

SEQ ID NO: 1269625 - DNA, 25 bp, Homo sapien
attgctaccccttggtgagccgggc

SEQ ID NO: 1269626 - DNA, 25 bp, Homo sapien
ggaatacgacttcccacatcaggag

SEQ ID NO: 1269627 - DNA, 25 bp, Homo sapien
tgtgtgtggcgtgcccagaagccca

SEQ ID NO: 1269628 - DNA, 25 bp, Homo sapien
gtcacgagcagccactggagaacca

SEQ ID NO: 1269629 - DNA, 25 bp, Homo sapien
tttgacccagggtggtcgtggactc

SEQ ID NO: 1269630 - DNA, 25 bp, Homo sapien
cagggtggtcgtggactcgggtaca

SEQ ID NO: 1269631 - DNA, 25 bp, Homo sapien
acagaactgatttgacccagggtgg

SEQ ID NO: 1269632 - DNA, 25 bp, Homo sapien
gaactgatttgacccagggtggtcg

SEQ ID NO: 1269633 - DNA, 25 bp, Homo sapien
tcctagtctgctgaatacactcgcc

SEQ ID NO: 1269634 - DNA, 25 bp, Homo sapien
tagtctgctgaatacactcgccagc

SEQ ID NO: 1269635 - DNA, 25 bp, Homo sapien
tctgctgaatacactcgccagccat

SEQ ID NO: 1269636 - DNA, 25 bp, Homo sapien
gaggaagggaaaggccggcggctgc

SEQ ID NO: 1269637 - DNA, 25 bp, Homo sapien
gcactccccgaacgctgtcctgcgt

SEQ ID NO: 1269638 - DNA, 25 bp, Homo sapien
ccgggcctgcatgtccaggaccgcc

SEQ ID NO: 1269639 - DNA, 25 bp, Homo sapien
aggaccgcccacgagatgctcgctg

SEQ ID NO: 1269640 - DNA, 25 bp, Homo sapien
gtcctgcgtggccaccacgtgctcc

SEQ ID NO: 1269641 - DNA, 25 bp, Homo sapien
aagtgttcgatcgaggcccctggag

SEQ ID NO: 1269642 - DNA, 25 bp, Homo sapien
tgcaacacggcagtaggtctcctag

SEQ ID NO: 1269643 - DNA, 25 bp, Homo sapien
cctggagacccagtgcaacacggca

SEQ ID NO: 1269644 - DNA, 25 bp, Homo sapien
taaaacaggagcgaagtgttcgatc

SEQ ID NO: 1269645 - DNA, 25 bp, Homo sapien
ttcttggcaccagttaggcccattt

SEQ ID NO: 1269646 - DNA, 25 bp, Homo sapien
gtgttgattcctcatgcccttttcc

SEQ ID NO: 1269647 - DNA, 25 bp, Homo sapien
gagatcccttggaataagctcgttc

SEQ ID NO: 1269648 - DNA, 25 bp, Homo sapien
ttttcctactagttgggctgtggcc

SEQ ID NO: 1269649 - DNA, 25 bp, Homo sapien
catggccgtggtcccaccacaagct

SEQ ID NO: 1269650 - DNA, 25 bp, Homo sapien
cctgaaatcccaccaatgagcggcg

SEQ ID NO: 1269651 - DNA, 25 bp, Homo sapien
gccaaatgtagccattccctgaaat

SEQ ID NO: 1269652 - DNA, 25 bp, Homo sapien
gcggcgggtcatccacgtgacccat

SEQ ID NO: 1269653 - DNA, 25 bp, Homo sapien
caagaagtaccatggagcaggtgtt

SEQ ID NO: 1269654 - DNA, 25 bp, Homo sapien
ttcgttctgatttggaagttgttgc

SEQ ID NO: 1269655 - DNA, 25 bp, Homo sapien
gctctaatttttgcacccaggccca

SEQ ID NO: 1269656 - DNA, 25 bp, Homo sapien
tggtaatgacaagatgaattcgttc

SEQ ID NO: 1269657 - DNA, 25 bp, Homo sapien
agttgtcagcttgctgtaagggccc

SEQ ID NO: 1269658 - DNA, 25 bp, Homo sapien
agaaggtatcgtgccaggcactggc

SEQ ID NO: 1269659 - DNA, 25 bp, Homo sapien
tcagcttggactctggagaaggtat

SEQ ID NO: 1269660 - DNA, 25 bp, Homo sapien
actggccaggtgactgcctttggtg

SEQ ID NO: 1269661 - DNA, 25 bp, Homo sapien
tggactctggagaaggtatcgtgcc

SEQ ID NO: 1269662 - DNA, 25 bp, Homo sapien
gagcctccaatcctccagtgtgagg

SEQ ID NO: 1269663 - DNA, 25 bp, Homo sapien
gagggtgactctgcaatgggaatca

SEQ ID NO: 1269664 - DNA, 25 bp, Homo sapien
tggcatttgccacccaggcagggat

SEQ ID NO: 1269665 - DNA, 25 bp, Homo sapien
tctgcaatgggaatcactggcattt

SEQ ID NO: 1269666 - DNA, 25 bp, Homo sapien
ggcacccatgcaccgttctgtgaat

SEQ ID NO: 1269667 - DNA, 25 bp, Homo sapien
ggctcatgatttctgattaagacat

SEQ ID NO: 1269668 - DNA, 25 bp, Homo sapien
gatcttagtcaaacgcgcatggtca

SEQ ID NO: 1269669 - DNA, 25 bp, Homo sapien
tcatcagctgatgttcgtggacatt

SEQ ID NO: 1269670 - DNA, 25 bp, Homo sapien
tttctacaaacagaccttccacttc

SEQ ID NO: 1269671 - DNA, 25 bp, Homo sapien
acacacagaccctccaactccacca

SEQ ID NO: 1269672 - DNA, 25 bp, Homo sapien
cttacatgaccacaccatctccacc

SEQ ID NO: 1269673 - DNA, 25 bp, Homo sapien
cttccgcttccaccttacatgacca

SEQ ID NO: 1269674 - DNA, 25 bp, Homo sapien
ccacacagagcaccgagaaatgttg

SEQ ID NO: 1269675 - DNA, 25 bp, Homo sapien
cttcccgtctgggtggcgtcacact

SEQ ID NO: 1269676 - DNA, 25 bp, Homo sapien
ccccacacagagcaccgagaaatgt

SEQ ID NO: 1269677 - DNA, 25 bp, Homo sapien
acacagagcaccgagaaatgttggg

SEQ ID NO: 1269678 - DNA, 25 bp, Homo sapien
tccggttatgcaccagctctccttt

SEQ ID NO: 1269679 - DNA, 25 bp, Homo sapien
gcttggttttctccggttatgcacc

SEQ ID NO: 1269680 - DNA, 25 bp, Homo sapien
tggctgcccgtgcttggttttctcc

SEQ ID NO: 1269681 - DNA, 25 bp, Homo sapien
ctggctgcccgtgcttggttttctc

SEQ ID NO: 1269682 - DNA, 25 bp, Homo sapien
aaggcagaaagatcagacccacagg

SEQ ID NO: 1269683 - DNA, 25 bp, Homo sapien
aggcagaaagatcagacccacaggt

SEQ ID NO: 1269684 - DNA, 25 bp, Homo sapien
catgctctgtcaattctgggactgc

SEQ ID NO: 1269685 - DNA, 25 bp, Homo sapien
catcaagggtgcacagagtctcaat

SEQ ID NO: 1269686 - DNA, 25 bp, Homo sapien
cccaggtgctggtgactgaaattca

SEQ ID NO: 1269687 - DNA, 25 bp, Homo sapien
gcaagtccatgatcctcctcggatg

SEQ ID NO: 1269688 - DNA, 25 bp, Homo sapien
ttttcttaatcttacctgagtgcag

SEQ ID NO: 1269689 - DNA, 25 bp, Homo sapien
tttcttaatcttacctgagtgcagg

SEQ ID NO: 1269690 - DNA, 25 bp, Homo sapien
gacctatgattaaaggcaaggccat

SEQ ID NO: 1269691 - DNA, 25 bp, Homo sapien
tatgattaaaggcaaggccatccat

SEQ ID NO: 1269692 - DNA, 25 bp, Homo sapien
tgtgacctatgattaaaggcaaggc

SEQ ID NO: 1269693 - DNA, 25 bp, Homo sapien
taatcatgtgacctatgattaaagg

SEQ ID NO: 1269694 - DNA, 25 bp, Homo sapien
atggccaatcaagagaagtctgtgc

SEQ ID NO: 1269695 - DNA, 25 bp, Homo sapien
acattgaatgggtaatggccaatca

SEQ ID NO: 1269696 - DNA, 25 bp, Homo sapien
tgaatgggtaatggccaatcaagag

SEQ ID NO: 1269697 - DNA, 25 bp, Homo sapien
ggtaatggccaatcaagagaagtct

SEQ ID NO: 1269698 - DNA, 25 bp, Homo sapien
tccttcctccgacagtggttcacag

SEQ ID NO: 1269699 - DNA, 25 bp, Homo sapien
tggttcacagcacgggcaagcgtct

SEQ ID NO: 1269700 - DNA, 25 bp, Homo sapien
caatgccacgagaaaggaaatgcca

SEQ ID NO: 1269701 - DNA, 25 bp, Homo sapien
tctacagactgctgtgggtaccagc

SEQ ID NO: 1269702 - DNA, 25 bp, Homo sapien
cctgtgtttaatcgtggaggagcag

SEQ ID NO: 1269703 - DNA, 25 bp, Homo sapien
taccaatgagataggtcacacatct

SEQ ID NO: 1269704 - DNA, 25 bp, Homo sapien
tatcaccccaaatttaccaatgaga

SEQ ID NO: 1269705 - DNA, 25 bp, Homo sapien
cagagagcatgtgctcttccagaga

SEQ ID NO: 1269706 - DNA, 25 bp, Homo sapien
tgggccaagtcatgaccacgcaaga

SEQ ID NO: 1269707 - DNA, 25 bp, Homo sapien
tacagaggagactcagttggtcacg

SEQ ID NO: 1269708 - DNA, 25 bp, Homo sapien
tgtgtatctcataagtgctcaggaa

SEQ ID NO: 1269709 - DNA, 25 bp, Homo sapien
tttagaatggaagcacacacttgga

SEQ ID NO: 1269710 - DNA, 25 bp, Homo sapien
cagcctgatggatactccgcgtcaa

SEQ ID NO: 1269711 - DNA, 25 bp, Homo sapien
tgacagtgctgctctccggcagagg

SEQ ID NO: 1269712 - DNA, 25 bp, Homo sapien
gatgcttccgagtggctcattagag

SEQ ID NO: 1269713 - DNA, 25 bp, Homo sapien
ctgagagtagatgttgctgcaagca

SEQ ID NO: 1269714 - DNA, 25 bp, Homo sapien
agtcaccagggggtgccacagccct

SEQ ID NO: 1269715 - DNA, 25 bp, Homo sapien
ggtcatgccaaggtgaatcttcccc

SEQ ID NO: 1269716 - DNA, 25 bp, Homo sapien
ggacaaggtcatgccaaggtgaatc

SEQ ID NO: 1269717 - DNA, 25 bp, Homo sapien
agctggagggcatggacaaggtcat

SEQ ID NO: 1269718 - DNA, 25 bp, Homo sapien
gcttactcatgaccatattcctgca

SEQ ID NO: 1269719 - DNA, 25 bp, Homo sapien
actccaggggtttcatgagacaatg

SEQ ID NO: 1269720 - DNA, 25 bp, Homo sapien
agaggaaagcttactcatgaccata

SEQ ID NO: 1269721 - DNA, 25 bp, Homo sapien
accatattcctgcagatgagcaggc

SEQ ID NO: 1269722 - DNA, 25 bp, Homo sapien
aagttgacacccagcgtgcttgctg

SEQ ID NO: 1269723 - DNA, 25 bp, Homo sapien
gacacccagcgtgcttgctggaaca

SEQ ID NO: 1269724 - DNA, 25 bp, Homo sapien
gtctgaagttgacacccagcgtgct

SEQ ID NO: 1269725 - DNA, 25 bp, Homo sapien
tctgaagttgacacccagcgtgctt

SEQ ID NO: 1269726 - DNA, 25 bp, Homo sapien
ggaactgccttaccacaaaggccag

SEQ ID NO: 1269727 - DNA, 25 bp, Homo sapien
gaggcacggtctcatcccattgcag

SEQ ID NO: 1269728 - DNA, 25 bp, Homo sapien
ccattgcagtttcgggttcttctgg

SEQ ID NO: 1269729 - DNA, 25 bp, Homo sapien
tggtggcgcagctcggtactgcctc

SEQ ID NO: 1269730 - DNA, 25 bp, Homo sapien
gccacaagcacagccgcacccacat

SEQ ID NO: 1269731 - DNA, 25 bp, Homo sapien
ttgggattccgttgatgccgccctg

SEQ ID NO: 1269732 - DNA, 25 bp, Homo sapien
gaaacacgcatgctgtcttggttga

SEQ ID NO: 1269733 - DNA, 25 bp, Homo sapien
tggagatgcggcactagaaacacgc

SEQ ID NO: 1269734 - DNA, 25 bp, Homo sapien
caagtagccttgagtaaatcctccg

SEQ ID NO: 1269735 - DNA, 25 bp, Homo sapien
gaaagctgccctgacccctccctct

SEQ ID NO: 1269736 - DNA, 25 bp, Homo sapien
ctgcacggccctgcagaggggctgc

SEQ ID NO: 1269737 - DNA, 25 bp, Homo sapien
cagaggggctgctctctgaaagctg

SEQ ID NO: 1269738 - DNA, 25 bp, Homo sapien
tctctgaaagctgccctgacccctc

SEQ ID NO: 1269739 - DNA, 25 bp, Homo sapien
tttgctctgacaaggacagtttcag

SEQ ID NO: 1269740 - DNA, 25 bp, Homo sapien
tccagttttgctctgacaaggacag

SEQ ID NO: 1269741 - DNA, 25 bp, Homo sapien
gacagtttcagagccccaagcttca

SEQ ID NO: 1269742 - DNA, 25 bp, Homo sapien
tctgacaaggacagtttcagagccc

SEQ ID NO: 1269743 - DNA, 25 bp, Homo sapien
tgcggaatcctctccagacaagtca

SEQ ID NO: 1269744 - DNA, 25 bp, Homo sapien
agaggcggctcgtggcttgtggaac

SEQ ID NO: 1269745 - DNA, 25 bp, Homo sapien
ctccagcaccaacaaggccgggccc

SEQ ID NO: 1269746 - DNA, 25 bp, Homo sapien
gctcgtggcttgtggaacatcagaa

SEQ ID NO: 1269747 - DNA, 25 bp, Homo sapien
caggatctccaggagtgaccaggct

SEQ ID NO: 1269748 - DNA, 25 bp, Homo sapien
catgaagagacgatccaggtgcgac

SEQ ID NO: 1269749 - DNA, 25 bp, Homo sapien
gtttaaaacacatgctccgccgggc

SEQ ID NO: 1269750 - DNA, 25 bp, Homo sapien
gcgacatgcattcccgcgtttaaaa

SEQ ID NO: 1269751 - DNA, 25 bp, Homo sapien
taatatgggcggtaacgtgcaaagg

SEQ ID NO: 1269752 - DNA, 25 bp, Homo sapien
tttgtggaattgtcagctgctggag

SEQ ID NO: 1269753 - DNA, 25 bp, Homo sapien
tgccccacttccagcgcagatggat

SEQ ID NO: 1269754 - DNA, 25 bp, Homo sapien
ggatcactggaatcattaccccgaa

SEQ ID NO: 1269755 - DNA, 25 bp, Homo sapien
gggtctccctagaagtcactatgtt

SEQ ID NO: 1269756 - DNA, 25 bp, Homo sapien
tcactatgttttccgttaatttgtc

SEQ ID NO: 1269757 - DNA, 25 bp, Homo sapien
tgtcggagggttttatgatgacacg

SEQ ID NO: 1269758 - DNA, 25 bp, Homo sapien
gaatgagtttaccaggtgaccaggg

SEQ ID NO: 1269759 - DNA, 25 bp, Homo sapien
tgagtgaggtggacagaggacttcg

SEQ ID NO: 1269760 - DNA, 25 bp, Homo sapien
gcaagttggccaagggacatgagta

SEQ ID NO: 1269761 - DNA, 25 bp, Homo sapien
acgagcacacgaggcaatggcagcg

SEQ ID NO: 1269762 - DNA, 25 bp, Homo sapien
agatgaagtgctggccgacgcaggg

SEQ ID NO: 1269763 - DNA, 25 bp, Homo sapien
tagggcctcgggtaaagcagtgctc

SEQ ID NO: 1269764 - DNA, 25 bp, Homo sapien
caaaggtgttttagtccctggcagc

SEQ ID NO: 1269765 - DNA, 25 bp, Homo sapien
ggatgcctctcgctgaacaaatgaa

SEQ ID NO: 1269766 - DNA, 25 bp, Homo sapien
tttctcgtgcggaaatagggcctcg

SEQ ID NO: 1269767 - DNA, 25 bp, Homo sapien
cttggagcaggtcagtgagaacctc

SEQ ID NO: 1269768 - DNA, 25 bp, Homo sapien
gacactggtgtgtgcggagactcag

SEQ ID NO: 1269769 - DNA, 25 bp, Homo sapien
ccacactggcgtggaggaaaacgag

SEQ ID NO: 1269770 - DNA, 25 bp, Homo sapien
gagggaaatggatttctgtccccgc

SEQ ID NO: 1269771 - DNA, 25 bp, Homo sapien
ctgaaggtcatcttccacttcgtgc

SEQ ID NO: 1269772 - DNA, 25 bp, Homo sapien
tccttctaatccgcgctgcgctccc

SEQ ID NO: 1269773 - DNA, 25 bp, Homo sapien
gtccttctaatccgcgctgcgctcc

SEQ ID NO: 1269774 - DNA, 25 bp, Homo sapien
gcactgttgctgctcaggacgcaga

SEQ ID NO: 1269775 - DNA, 25 bp, Homo sapien
ctgctggccgaggcttatggggtca

SEQ ID NO: 1269776 - DNA, 25 bp, Homo sapien
gccgaggcttatggggtcagcactg

SEQ ID NO: 1269777 - DNA, 25 bp, Homo sapien
aggcttatggggtcagcactgttgc

SEQ ID NO: 1269778 - DNA, 25 bp, Homo sapien
tgaaggctcctctgacatatgcacc

SEQ ID NO: 1269779 - DNA, 25 bp, Homo sapien
tcaagtgtcctccatgggatgtact

SEQ ID NO: 1269780 - DNA, 25 bp, Homo sapien
actaaaggaggccttggcatcgggc

SEQ ID NO: 1269781 - DNA, 25 bp, Homo sapien
gaacagttgggtcatagcctggacc

SEQ ID NO: 1269782 - DNA, 25 bp, Homo sapien
gcagcacaagcctgacttctgtgga

SEQ ID NO: 1269783 - DNA, 25 bp, Homo sapien
agcacaagcctgacttctgtggagg

SEQ ID NO: 1269784 - DNA, 25 bp, Homo sapien
cacaagcctgacttctgtggaggtt

SEQ ID NO: 1269785 - DNA, 25 bp, Homo sapien
tgcagcacaagcctgacttctgtgg

SEQ ID NO: 1269786 - DNA, 25 bp, Homo sapien
ctgacttcgcctggagacttctgca

SEQ ID NO: 1269787 - DNA, 25 bp, Homo sapien
gcagctgtagtcttaaggctctgac

SEQ ID NO: 1269788 - DNA, 25 bp, Homo sapien
tcttaaggctctgacttcgcctgga

SEQ ID NO: 1269789 - DNA, 25 bp, Homo sapien
gggcagcagctgtagtcttaaggct

SEQ ID NO: 1269790 - DNA, 25 bp, Homo sapien
cacatggcctggggcgattccagag

SEQ ID NO: 1269791 - DNA, 25 bp, Homo sapien
acatggcctggggcgattccagagc

SEQ ID NO: 1269792 - DNA, 25 bp, Homo sapien
tcacatggcctggggcgattccaga

SEQ ID NO: 1269793 - DNA, 25 bp, Homo sapien
cggggttctcgggcttctctggctt

SEQ ID NO: 1269794 - DNA, 25 bp, Homo sapien
tcggcaaactttgccagcccgccgg

SEQ ID NO: 1269795 - DNA, 25 bp, Homo sapien
ccagaaagacccttctcggcaaact

SEQ ID NO: 1269796 - DNA, 25 bp, Homo sapien
gacccttctcggcaaactttgccag

SEQ ID NO: 1269797 - DNA, 25 bp, Homo sapien
gcacagctgtcgtttttgctgggca

SEQ ID NO: 1269798 - DNA, 25 bp, Homo sapien
cacagctgtcgtttttgctgggcag

SEQ ID NO: 1269799 - DNA, 25 bp, Homo sapien
agcacagctgtcgtttttgctgggc

SEQ ID NO: 1269800 - DNA, 25 bp, Homo sapien
agagcacagctgtcgtttttgctgg

SEQ ID NO: 1269801 - DNA, 25 bp, Homo sapien
caccgagctcgtgcatttgggtccc

SEQ ID NO: 1269802 - DNA, 25 bp, Homo sapien
tgcggttctcgagtttgtccactgg

SEQ ID NO: 1269803 - DNA, 25 bp, Homo sapien
agcagcgtgcggttctcgagtttgt

SEQ ID NO: 1269804 - DNA, 25 bp, Homo sapien
aaaggccagtagttgttagcccgct

SEQ ID NO: 1269805 - DNA, 25 bp, Homo sapien
ggttcgatggagaacaggcatttcc

SEQ ID NO: 1269806 - DNA, 25 bp, Homo sapien
cattagaagaagtcctatctggtca

SEQ ID NO: 1269807 - DNA, 25 bp, Homo sapien
catttattgagtgtcgagtgcattc

SEQ ID NO: 1269808 - DNA, 25 bp, Homo sapien
agtgtcgagtgcattctgccacggg

SEQ ID NO: 1269809 - DNA, 25 bp, Homo sapien
ttgttcggcaccaaccacagacttg

SEQ ID NO: 1269810 - DNA, 25 bp, Homo sapien
tccaggaattccatgatggggattg

SEQ ID NO: 1269811 - DNA, 25 bp, Homo sapien
agccctcaagcaggccatggattcc

SEQ ID NO: 1269812 - DNA, 25 bp, Homo sapien
cagccctcaagcaggccatggattc

SEQ ID NO: 1269813 - DNA, 25 bp, Homo sapien
agaaattaagagaacatttcccatc

SEQ ID NO: 1269814 - DNA, 25 bp, Homo sapien
gagaaattaagagaacatttcccat

SEQ ID NO: 1269815 - DNA, 25 bp, Homo sapien
cataagagggagaaattaagagaac

SEQ ID NO: 1269816 - DNA, 25 bp, Homo sapien
ctgcataagagggagaaattaagag

SEQ ID NO: 1269817 - DNA, 25 bp, Homo sapien
gggggccccggtcatgcccttctgc

SEQ ID NO: 1269818 - DNA, 25 bp, Homo sapien
tcatgcccttctgccggggtgtcat

SEQ ID NO: 1269819 - DNA, 25 bp, Homo sapien
cggtcatgcccttctgccggggtgt

SEQ ID NO: 1269820 - DNA, 25 bp, Homo sapien
ggccccggtcatgcccttctgccgg

SEQ ID NO: 1269821 - DNA, 25 bp, Homo sapien
ggcactggctgaaccgtcgtcctgc

SEQ ID NO: 1269822 - DNA, 25 bp, Homo sapien
gcactggctgaaccgtcgtcctgca

SEQ ID NO: 1269823 - DNA, 25 bp, Homo sapien
cactggctgaaccgtcgtcctgcag

SEQ ID NO: 1269824 - DNA, 25 bp, Homo sapien
actggctgaaccgtcgtcctgcagg

SEQ ID NO: 1269825 - DNA, 25 bp, Homo sapien
ttgataatggtgtagcccaggccag

SEQ ID NO: 1269826 - DNA, 25 bp, Homo sapien
tctacagttgataatggtgtagccc

SEQ ID NO: 1269827 - DNA, 25 bp, Homo sapien
gtagcccaggccagttaaacctgcc

SEQ ID NO: 1269828 - DNA, 25 bp, Homo sapien
cagttgataatggtgtagcccaggc

SEQ ID NO: 1269829 - DNA, 25 bp, Homo sapien
ccgtcagatggtgggtacagcagcc

SEQ ID NO: 1269830 - DNA, 25 bp, Homo sapien
gaggaggagtgcttgttatgttcat

SEQ ID NO: 1269831 - DNA, 25 bp, Homo sapien
tgttcatgagtagcacatttcctgg

SEQ ID NO: 1269832 - DNA, 25 bp, Homo sapien
tagaggatgtcgatcagccctggtg

SEQ ID NO: 1269833 - DNA, 25 bp, Homo sapien
ggacagtgtgcaaaattgccacaga

SEQ ID NO: 1269834 - DNA, 25 bp, Homo sapien
tgttttcagcagcacggacagtgtg

SEQ ID NO: 1269835 - DNA, 25 bp, Homo sapien
aatgccccactgttaacccgcagcc

SEQ ID NO: 1269836 - DNA, 25 bp, Homo sapien
cagcccgctaaatgcccgcagtgtt

SEQ ID NO: 1269837 - DNA, 25 bp, Homo sapien
cagggttctaggaaagggcccatag

SEQ ID NO: 1269838 - DNA, 25 bp, Homo sapien
catattccgggcatttctgcttacc

SEQ ID NO: 1269839 - DNA, 25 bp, Homo sapien
ttgtgtgcctttctcgggctctggg

SEQ ID NO: 1269840 - DNA, 25 bp, Homo sapien
cctgcagaagggctaggttctggcc

SEQ ID NO: 1269841 - DNA, 25 bp, Homo sapien
gccacaaggaaccagcagatctctt

SEQ ID NO: 1269842 - DNA, 25 bp, Homo sapien
cacaaccaaccccctgcaaggccat

SEQ ID NO: 1269843 - DNA, 25 bp, Homo sapien
agcacaaccaaccccctgcaaggcc

SEQ ID NO: 1269844 - DNA, 25 bp, Homo sapien
gagcacaaccaaccccctgcaaggc

SEQ ID NO: 1269845 - DNA, 25 bp, Homo sapien
agagcacaaccaaccccctgcaagg

SEQ ID NO: 1269846 - DNA, 25 bp, Homo sapien
tgcgtgccgtcctcttcagtttggt

SEQ ID NO: 1269847 - DNA, 25 bp, Homo sapien
acgattgcgtagagctctcccctga

SEQ ID NO: 1269848 - DNA, 25 bp, Homo sapien
tctttgctgttgaagagccctcatc

SEQ ID NO: 1269849 - DNA, 25 bp, Homo sapien
ccatgtcacgtggtgccagggcagc

SEQ ID NO: 1269850 - DNA, 25 bp, Homo sapien
gggacggtctcagcagcttcgactc

SEQ ID NO: 1269851 - DNA, 25 bp, Homo sapien
ttcaccgagtccttggatccccgga

SEQ ID NO: 1269852 - DNA, 25 bp, Homo sapien
gatccccggagaaggatcccaggtg

SEQ ID NO: 1269853 - DNA, 25 bp, Homo sapien
aacacggaagacaactgtggccgcc

SEQ ID NO: 1269854 - DNA, 25 bp, Homo sapien
caggagccgttgcaggtttcttgga

SEQ ID NO: 1269855 - DNA, 25 bp, Homo sapien
aaggaaacaggagccgttgcaggtt

SEQ ID NO: 1269856 - DNA, 25 bp, Homo sapien
cacagcttcatcaatcgcccaattg

SEQ ID NO: 1269857 - DNA, 25 bp, Homo sapien
ctggcaatacagattggaaggaaac

SEQ ID NO: 1269858 - DNA, 25 bp, Homo sapien
ggccactgatcaaagaagattcctg

SEQ ID NO: 1269859 - DNA, 25 bp, Homo sapien
ggtctgtgtgtaaaggccactgatc

SEQ ID NO: 1269860 - DNA, 25 bp, Homo sapien
tgaagcatcaggatgccctgagtgt

SEQ ID NO: 1269861 - DNA, 25 bp, Homo sapien
tgccctgagtgtgggttctagatcc

SEQ ID NO: 1269862 - DNA, 25 bp, Homo sapien
gaaatcccatgggtactgcaccgac

SEQ ID NO: 1269863 - DNA, 25 bp, Homo sapien
aatgaaatcccatgggtactgcacc

SEQ ID NO: 1269864 - DNA, 25 bp, Homo sapien
gagcctgtgatagttggaggaatga

SEQ ID NO: 1269865 - DNA, 25 bp, Homo sapien
aatcccatgggtactgcaccgacat

SEQ ID NO: 1269866 - DNA, 25 bp, Homo sapien
gctgcctctgccgaagctgttgcgt

SEQ ID NO: 1269867 - DNA, 25 bp, Homo sapien
cctctgccgaagctgttgcgtgtgt

SEQ ID NO: 1269868 - DNA, 25 bp, Homo sapien
aaagcaacaacacaagccgctgcct

SEQ ID NO: 1269869 - DNA, 25 bp, Homo sapien
tgcctctgccgaagctgttgcgtgt

SEQ ID NO: 1269870 - DNA, 25 bp, Homo sapien
acctgggtgagctccgcaccagcgg

SEQ ID NO: 1269871 - DNA, 25 bp, Homo sapien
gagggtgatagagggccgggtagag

SEQ ID NO: 1269872 - DNA, 25 bp, Homo sapien
ggagcacacccttacaaaagcctgc

SEQ ID NO: 1269873 - DNA, 25 bp, Homo sapien
tatgagctccgcgtgcttggcgacc

SEQ ID NO: 1269874 - DNA, 25 bp, Homo sapien
aaactggtggatgtcccactcaaac

SEQ ID NO: 1269875 - DNA, 25 bp, Homo sapien
tggagctaaatgacgcagaaaactg

SEQ ID NO: 1269876 - DNA, 25 bp, Homo sapien
tgcccttccacaaccccacagtaaa

SEQ ID NO: 1269877 - DNA, 25 bp, Homo sapien
cgcagaaaactggtggatgtcccac

SEQ ID NO: 1269878 - DNA, 25 bp, Homo sapien
aaggacacttcctgaatgttgtgca

SEQ ID NO: 1269879 - DNA, 25 bp, Homo sapien
cttcatcctcacgaagacttggggc

SEQ ID NO: 1269880 - DNA, 25 bp, Homo sapien
gacttggggccaaggacacttcctg

SEQ ID NO: 1269881 - DNA, 25 bp, Homo sapien
ttcctgaatgttgtgcagcagagga

SEQ ID NO: 1269882 - DNA, 25 bp, Homo sapien
tgagtcattttgtcaagggcagcaa

SEQ ID NO: 1269883 - DNA, 25 bp, Homo sapien
aggcccgagctggtgcagccacgca

SEQ ID NO: 1269884 - DNA, 25 bp, Homo sapien
tccagggacgtctgagtgtgtagat

SEQ ID NO: 1269885 - DNA, 25 bp, Homo sapien
tgtgtagatcaaacgggcctttgag

SEQ ID NO: 1269886 - DNA, 25 bp, Homo sapien
ctggaacctgcatgaaccagtggtg

SEQ ID NO: 1269887 - DNA, 25 bp, Homo sapien
gaacctgcatgaaccagtggtgaat

SEQ ID NO: 1269888 - DNA, 25 bp, Homo sapien
tgcatgaaccagtggtgaatgggca

SEQ ID NO: 1269889 - DNA, 25 bp, Homo sapien
cctgcatgaaccagtggtgaatggg

SEQ ID NO: 1269890 - DNA, 25 bp, Homo sapien
taccgaagatgtcaccgagcaagtg

SEQ ID NO: 1269891 - DNA, 25 bp, Homo sapien
tgcacatctgcccagataaagctcg

SEQ ID NO: 1269892 - DNA, 25 bp, Homo sapien
gatgcagatggtcccataccgaaga

SEQ ID NO: 1269893 - DNA, 25 bp, Homo sapien
cagataaagctcgatgcagatggtc

SEQ ID NO: 1269894 - DNA, 25 bp, Homo sapien
tcccacagtagctgagcggacactc

SEQ ID NO: 1269895 - DNA, 25 bp, Homo sapien
tagcctcatggagttgtccacacgg

SEQ ID NO: 1269896 - DNA, 25 bp, Homo sapien
aatgagtagactctggcacactgag

SEQ ID NO: 1269897 - DNA, 25 bp, Homo sapien
cacggatgtcatttggaggcagcaa

SEQ ID NO: 1269898 - DNA, 25 bp, Homo sapien
ttctttctactgttgagggtcctga

SEQ ID NO: 1269899 - DNA, 25 bp, Homo sapien
gatgaggatgcggtagcattttctt

SEQ ID NO: 1269900 - DNA, 25 bp, Homo sapien
cactttctgatatgtgtcatctgca

SEQ ID NO: 1269901 - DNA, 25 bp, Homo sapien
tgatatgtgtcatctgcacagatga

SEQ ID NO: 1269902 - DNA, 25 bp, Homo sapien
tttgccggtgggaaactcacagagc

SEQ ID NO: 1269903 - DNA, 25 bp, Homo sapien
tatgtgccatgtactgacccgaaag

SEQ ID NO: 1269904 - DNA, 25 bp, Homo sapien
gacgaggatacccagcgaaagggac

SEQ ID NO: 1269905 - DNA, 25 bp, Homo sapien
gcaggacgctctaggccaaatctat

SEQ ID NO: 1269906 - DNA, 25 bp, Homo sapien
ccgtcagcttccattggccgatgga

SEQ ID NO: 1269907 - DNA, 25 bp, Homo sapien
gcattgccttcccttgcgcaggtgg

SEQ ID NO: 1269908 - DNA, 25 bp, Homo sapien
tgttttgtcaccgagaatcctacta

SEQ ID NO: 1269909 - DNA, 25 bp, Homo sapien
tgtggcccgctttttctagggccca

SEQ ID NO: 1269910 - DNA, 25 bp, Homo sapien
cataagacatcgagccttggaagga

SEQ ID NO: 1269911 - DNA, 25 bp, Homo sapien
gaagcgtaatgcaacaaccctcttg

SEQ ID NO: 1269912 - DNA, 25 bp, Homo sapien
tgtccccgataagagccacagattc

SEQ ID NO: 1269913 - DNA, 25 bp, Homo sapien
ttcctgggtccataagacatcgagc

SEQ ID NO: 1269914 - DNA, 25 bp, Homo sapien
aaggatcgaccctgtcaccttggat

SEQ ID NO: 1269915 - DNA, 25 bp, Homo sapien
caccttggatggtctctattttgac

SEQ ID NO: 1269916 - DNA, 25 bp, Homo sapien
aaaggatcgaccctgtcaccttgga

SEQ ID NO: 1269917 - DNA, 25 bp, Homo sapien
ccctgttgcccatggagaggtattt

SEQ ID NO: 1269918 - DNA, 25 bp, Homo sapien
ccagggttgtctgtagcccaggaag

SEQ ID NO: 1269919 - DNA, 25 bp, Homo sapien
tgtagcccaggaagcggactgaccc

SEQ ID NO: 1269920 - DNA, 25 bp, Homo sapien
gtagcccaggaagcggactgaccct

SEQ ID NO: 1269921 - DNA, 25 bp, Homo sapien
gtggtccagggttgtctgtagccca

SEQ ID NO: 1269922 - DNA, 25 bp, Homo sapien
cttcttttgtccacctgttgacacc

SEQ ID NO: 1269923 - DNA, 25 bp, Homo sapien
catcaccctctttcatcaaggtgat

SEQ ID NO: 1269924 - DNA, 25 bp, Homo sapien
tgttgacaccatcaccctctttcat

SEQ ID NO: 1269925 - DNA, 25 bp, Homo sapien
tctttcatcaaggtgatctctttca

SEQ ID NO: 1269926 - DNA, 25 bp, Homo sapien
cttggggatgccattcttcttggtg

SEQ ID NO: 1269927 - DNA, 25 bp, Homo sapien
gggatgccattcttcttggtgccag

SEQ ID NO: 1269928 - DNA, 25 bp, Homo sapien
tgccattcttcttggtgccagaagg

SEQ ID NO: 1269929 - DNA, 25 bp, Homo sapien
tcttggtgccagaaggcagctgcat

SEQ ID NO: 1269930 - DNA, 25 bp, Homo sapien
cactctagtcttactgggttgggca

SEQ ID NO: 1269931 - DNA, 25 bp, Homo sapien
tgatgttgatagcttctgggttggc

SEQ ID NO: 1269932 - DNA, 25 bp, Homo sapien
gcaaactggcagttcactctagtct

SEQ ID NO: 1269933 - DNA, 25 bp, Homo sapien
cagatttcgtcgtttccgcagcaaa

SEQ ID NO: 1269934 - DNA, 25 bp, Homo sapien
gggcagaagggagaaagggctttgc

SEQ ID NO: 1269935 - DNA, 25 bp, Homo sapien
gcagaagggagaaagggctttgctg

SEQ ID NO: 1269936 - DNA, 25 bp, Homo sapien
cagaagggagaaagggctttgctga

SEQ ID NO: 1269937 - DNA, 25 bp, Homo sapien
ggcagaagggagaaagggctttgct

SEQ ID NO: 1269938 - DNA, 25 bp, Homo sapien
gcctcatccagcaccaggcgcaggg

SEQ ID NO: 1269939 - DNA, 25 bp, Homo sapien
agtgcctcatccagcaccaggcgca

SEQ ID NO: 1269940 - DNA, 25 bp, Homo sapien
ctcatccagcaccaggcgcagggca

SEQ ID NO: 1269941 - DNA, 25 bp, Homo sapien
ccagtgcctcatccagcaccaggcg

SEQ ID NO: 1269942 - DNA, 25 bp, Homo sapien
tacattccacgtgagggctggagag

SEQ ID NO: 1269943 - DNA, 25 bp, Homo sapien
tcagaccaccgctaaggtacattcc

SEQ ID NO: 1269944 - DNA, 25 bp, Homo sapien
ctttaccaacagtgttgatgcctca

SEQ ID NO: 1269945 - DNA, 25 bp, Homo sapien
ctggagagggccatcggtgccttta

SEQ ID NO: 1269946 - DNA, 25 bp, Homo sapien
caataggacaccgtattgatgtaca

SEQ ID NO: 1269947 - DNA, 25 bp, Homo sapien
gatgtacagttgcttgcggtggcca

SEQ ID NO: 1269948 - DNA, 25 bp, Homo sapien
tcgttcctgtagatgagctcttttg

SEQ ID NO: 1269949 - DNA, 25 bp, Homo sapien
cggtggccatgctcgttcctgtaga

SEQ ID NO: 1269950 - DNA, 25 bp, Homo sapien
ctccgtgctgcaggtagtgggccat

SEQ ID NO: 1269951 - DNA, 25 bp, Homo sapien
cttctccgtgctgcaggtagtgggc

SEQ ID NO: 1269952 - DNA, 25 bp, Homo sapien
tctccgtgctgcaggtagtgggcca

SEQ ID NO: 1269953 - DNA, 25 bp, Homo sapien
ttctccgtgctgcaggtagtgggcc

SEQ ID NO: 1269954 - DNA, 25 bp, Homo sapien
agcacgtgcttggctggaacagttg

SEQ ID NO: 1269955 - DNA, 25 bp, Homo sapien
gcccaggatctccagtgattctgcc

SEQ ID NO: 1269956 - DNA, 25 bp, Homo sapien
gagcacgtgcttggctggaacagtt

SEQ ID NO: 1269957 - DNA, 25 bp, Homo sapien
ggagcacgtgcttggctggaacagt

SEQ ID NO: 1269958 - DNA, 25 bp, Homo sapien
aggtccaagggccatcccctgatcg

SEQ ID NO: 1269959 - DNA, 25 bp, Homo sapien
tggaaggtccaagggccatcccctg

SEQ ID NO: 1269960 - DNA, 25 bp, Homo sapien
agggccatcccctgatcgcccaaag

SEQ ID NO: 1269961 - DNA, 25 bp, Homo sapien
cccctgatcgcccaaaggctgcaga

SEQ ID NO: 1269962 - DNA, 25 bp, Homo sapien
cgcagcccctgagataagcaaaggc

SEQ ID NO: 1269963 - DNA, 25 bp, Homo sapien
aaatctccacgtggaatggccgcag

SEQ ID NO: 1269964 - DNA, 25 bp, Homo sapien
aggccctcggctggttttatgtccg

SEQ ID NO: 1269965 - DNA, 25 bp, Homo sapien
tctgcagaatgcaaatctccacgtg

SEQ ID NO: 1269966 - DNA, 25 bp, Homo sapien
tggaaggccccggtggatttcagcc

SEQ ID NO: 1269967 - DNA, 25 bp, Homo sapien
gagctgtggatcacacctgcctggc

SEQ ID NO: 1269968 - DNA, 25 bp, Homo sapien
tcaaagaaccctgagcatgcaaagg

SEQ ID NO: 1269969 - DNA, 25 bp, Homo sapien
tgttgtccccatgcaggtcgagctg

SEQ ID NO: 1269970 - DNA, 25 bp, Homo sapien
ggctgctggtcccataaaagagaag

SEQ ID NO: 1269971 - DNA, 25 bp, Homo sapien
ccactcagggcagggatgaaggagc

SEQ ID NO: 1269972 - DNA, 25 bp, Homo sapien
gagaaggacaaaagtccaggccacc

SEQ ID NO: 1269973 - DNA, 25 bp, Homo sapien
ccaggccaccccagatcctggcagc

SEQ ID NO: 1269974 - DNA, 25 bp, Homo sapien
accagcggatcagaaggtccaagag

SEQ ID NO: 1269975 - DNA, 25 bp, Homo sapien
gaggctggggaaccagcggatcaga

SEQ ID NO: 1269976 - DNA, 25 bp, Homo sapien
gggaaccagcggatcagaaggtcca

SEQ ID NO: 1269977 - DNA, 25 bp, Homo sapien
gaaccagcggatcagaaggtccaag

SEQ ID NO: 1269978 - DNA, 25 bp, Homo sapien
gcttgaggttgtgttccaattgccc

SEQ ID NO: 1269979 - DNA, 25 bp, Homo sapien
ggtgtccagaaccaacacaagatga

SEQ ID NO: 1269980 - DNA, 25 bp, Homo sapien
gacgtttggcaacatgcatcaccca

SEQ ID NO: 1269981 - DNA, 25 bp, Homo sapien
tcaaaggccccatgacagagcgtgt

SEQ ID NO: 1269982 - DNA, 25 bp, Homo sapien
gagggacgctcattcaattcacaga

SEQ ID NO: 1269983 - DNA, 25 bp, Homo sapien
cactgtccctgtgttccacatgagc

SEQ ID NO: 1269984 - DNA, 25 bp, Homo sapien
caggcttgttcattgagggacgctc

SEQ ID NO: 1269985 - DNA, 25 bp, Homo sapien
ccacccattctgagcttgacaggca

SEQ ID NO: 1269986 - DNA, 25 bp, Homo sapien
tgggcacgttcatgttattccccag

SEQ ID NO: 1269987 - DNA, 25 bp, Homo sapien
ctgatgggcacgttcatgttattcc

SEQ ID NO: 1269988 - DNA, 25 bp, Homo sapien
tttgcactgatgggcacgttcatgt

SEQ ID NO: 1269989 - DNA, 25 bp, Homo sapien
tgcactgatgggcacgttcatgtta

SEQ ID NO: 1269990 - DNA, 25 bp, Homo sapien
ggcagtggctttgaggagtaacctc

SEQ ID NO: 1269991 - DNA, 25 bp, Homo sapien
atctccactgggcagaatgggctga

SEQ ID NO: 1269992 - DNA, 25 bp, Homo sapien
ggctctggagatccttcagtgatac

SEQ ID NO: 1269993 - DNA, 25 bp, Homo sapien
ggtcttcggctgtagcactgtgaca

SEQ ID NO: 1269994 - DNA, 25 bp, Homo sapien
tgacaggcgagtcaccaggtgtgcc

SEQ ID NO: 1269995 - DNA, 25 bp, Homo sapien
ttcaagctggaggattaagcccatg

SEQ ID NO: 1269996 - DNA, 25 bp, Homo sapien
gcccgagtctttgggtaccactgac

SEQ ID NO: 1269997 - DNA, 25 bp, Homo sapien
cactgtgtgcgtcggaagcttttgc

SEQ ID NO: 1269998 - DNA, 25 bp, Homo sapien
acacagctgcccttccttttattag

SEQ ID NO: 1269999 - DNA, 25 bp, Homo sapien
tccttttattagagttgaccttctc

SEQ ID NO: 1270000 - DNA, 25 bp, Homo sapien
cagcaatgcttacacagctgccctt

SEQ ID NO: 1270001 - DNA, 25 bp, Homo sapien
ttattagagttgaccttctcttctc

SEQ ID NO: 1270002 - DNA, 25 bp, Homo sapien
catcagcttgtttcaggcctttgca

SEQ ID NO: 1270003 - DNA, 25 bp, Homo sapien
tgaagacaggattggttctactcat

SEQ ID NO: 1270004 - DNA, 25 bp, Homo sapien
attgaagacaggattggttctactc

SEQ ID NO: 1270005 - DNA, 25 bp, Homo sapien
agaccagcacggcagcattgaagac

SEQ ID NO: 1270006 - DNA, 25 bp, Homo sapien
cccacaccgtgtccacaaatccctt

SEQ ID NO: 1270007 - DNA, 25 bp, Homo sapien
acccacaccgtgtccacaaatccct

SEQ ID NO: 1270008 - DNA, 25 bp, Homo sapien
ccacaccgtgtccacaaatcccttc

SEQ ID NO: 1270009 - DNA, 25 bp, Homo sapien
cacccacaccgtgtccacaaatccc

SEQ ID NO: 1270010 - DNA, 25 bp, Homo sapien
tctgagtgacaactggagagatgcc

SEQ ID NO: 1270011 - DNA, 25 bp, Homo sapien
caagcatgttttcaaggaagcacag

SEQ ID NO: 1270012 - DNA, 25 bp, Homo sapien
tctacagaggtggaaagtcttcatc

SEQ ID NO: 1270013 - DNA, 25 bp, Homo sapien
acttttcacccagcaccaagtggga

SEQ ID NO: 1270014 - DNA, 25 bp, Homo sapien
tttggttgtgaatcagacttgctct

SEQ ID NO: 1270015 - DNA, 25 bp, Homo sapien
tttttggttgtgaatcagacttgct

SEQ ID NO: 1270016 - DNA, 25 bp, Homo sapien
caaggctcgaaacttttctccgtgg

SEQ ID NO: 1270017 - DNA, 25 bp, Homo sapien
ggttgtgaatcagacttgctctttc

SEQ ID NO: 1270018 - DNA, 25 bp, Homo sapien
gccttccttgtgcatttcagaaagt

SEQ ID NO: 1270019 - DNA, 25 bp, Homo sapien
tccttgtgcatttcagaaagtgcat

SEQ ID NO: 1270020 - DNA, 25 bp, Homo sapien
cttccttgtgcatttcagaaagtgc

SEQ ID NO: 1270021 - DNA, 25 bp, Homo sapien
caggcagccttccttgtgcatttca

SEQ ID NO: 1270022 - DNA, 25 bp, Homo sapien
tatgctggttgtgtggaagatttaa

SEQ ID NO: 1270023 - DNA, 25 bp, Homo sapien
gtatgctggttgtgtggaagattta

SEQ ID NO: 1270024 - DNA, 25 bp, Homo sapien
tgggctaaaagcagtatgctggttg

SEQ ID NO: 1270025 - DNA, 25 bp, Homo sapien
cagagggacatagcggtcttcataa

SEQ ID NO: 1270026 - DNA, 25 bp, Homo sapien
gacatagcggtcttcataaagtgtc

SEQ ID NO: 1270027 - DNA, 25 bp, Homo sapien
ttcagagggacatagcggtcttcat

SEQ ID NO: 1270028 - DNA, 25 bp, Homo sapien
agggacatagcggtcttcataaagt

SEQ ID NO: 1270029 - DNA, 25 bp, Homo sapien
tccctgcaaagtgcttgcacattta

SEQ ID NO: 1270030 - DNA, 25 bp, Homo sapien
tgcaaagtgcttgcacatttattac

SEQ ID NO: 1270031 - DNA, 25 bp, Homo sapien
cttattttccctgcaaagtgcttgc

SEQ ID NO: 1270032 - DNA, 25 bp, Homo sapien
ttttccctgcaaagtgcttgcacat

SEQ ID NO: 1270033 - DNA, 25 bp, Homo sapien
ctcatggggagagcctgggtccaag

SEQ ID NO: 1270034 - DNA, 25 bp, Homo sapien
tggggagagcctgggtccaagcagc

SEQ ID NO: 1270035 - DNA, 25 bp, Homo sapien
ggagagcctgggtccaagcagccat

SEQ ID NO: 1270036 - DNA, 25 bp, Homo sapien
catggggagagcctgggtccaagca

SEQ ID NO: 1270037 - DNA, 25 bp, Homo sapien
ttgtggtgaactgagatcgcaccat

SEQ ID NO: 1270038 - DNA, 25 bp, Homo sapien
ctgggcaacaagagtgaagctctgt

SEQ ID NO: 1270039 - DNA, 25 bp, Homo sapien
ggttgtggtgaactgagatcgcacc

SEQ ID NO: 1270040 - DNA, 25 bp, Homo sapien
tgtactgcagcctgggcaacaagag

SEQ ID NO: 1270041 - DNA, 25 bp, Homo sapien
ctatcttcatcaaaacgtatttaac

SEQ ID NO: 1270042 - DNA, 25 bp, Homo sapien
aacgtatttaactcgccttctcact

SEQ ID NO: 1270043 - DNA, 25 bp, Homo sapien
taactcgccttctcactttgtctct

SEQ ID NO: 1270044 - DNA, 25 bp, Homo sapien
tcatcaaaacgtatttaactcgcct

SEQ ID NO: 1270045 - DNA, 25 bp, Homo sapien
cagtcattccaggtaatctgtgcgc

SEQ ID NO: 1270046 - DNA, 25 bp, Homo sapien
cctgtgatccaatgatgggttctgt

SEQ ID NO: 1270047 - DNA, 25 bp, Homo sapien
cagcatgggcctgtgatccaatgat

SEQ ID NO: 1270048 - DNA, 25 bp, Homo sapien
cattccaggtaatctgtgtgcatgg

SEQ ID NO: 1270049 - DNA, 25 bp, Homo sapien
tccctgggtgggtgatgatatcact

SEQ ID NO: 1270050 - DNA, 25 bp, Homo sapien
cactcactgggtggatgatgacgtc

SEQ ID NO: 1270051 - DNA, 25 bp, Homo sapien
tatgacgatgctgtttgctggagga

SEQ ID NO: 1270052 - DNA, 25 bp, Homo sapien
cactggatggatggtgatgccactc

SEQ ID NO: 1270053 - DNA, 25 bp, Homo sapien
gatgatgatgtcactcactgattta

SEQ ID NO: 1270054 - DNA, 25 bp, Homo sapien
gcaaggctgcaatctgatagctcag

SEQ ID NO: 1270055 - DNA, 25 bp, Homo sapien
tagctcagaggacatgggataggca

SEQ ID NO: 1270056 - DNA, 25 bp, Homo sapien
ggagataatgggcaaggctgcaatc

SEQ ID NO: 1270057 - DNA, 25 bp, Homo sapien
tctgatagctcagaggacatgggat

SEQ ID NO: 1270058 - DNA, 25 bp, Homo sapien
gagcccatggtgtgagcatttctac

SEQ ID NO: 1270059 - DNA, 25 bp, Homo sapien
tgccctgattcttttgagcccatgg

SEQ ID NO: 1270060 - DNA, 25 bp, Homo sapien
cgctccggcagagacgtggagccat

SEQ ID NO: 1270061 - DNA, 25 bp, Homo sapien
caaagcaggcttaactgtagcaaca

SEQ ID NO: 1270062 - DNA, 25 bp, Homo sapien
taagtagacaaggagcaatcaccat

SEQ ID NO: 1270063 - DNA, 25 bp, Homo sapien
gtaagtagacaaggagcaatcacca

SEQ ID NO: 1270064 - DNA, 25 bp, Homo sapien
tggtaagtagacaaggagcaatcac

SEQ ID NO: 1270065 - DNA, 25 bp, Homo sapien
ctggtaagtagacaaggagcaatca

SEQ ID NO: 1270066 - DNA, 25 bp, Homo sapien
caccctcctcattattcacctcctg

SEQ ID NO: 1270067 - DNA, 25 bp, Homo sapien
accctcctcattattcacctcctgc

SEQ ID NO: 1270068 - DNA, 25 bp, Homo sapien
atcgtgactgtgacgttcatcattg

SEQ ID NO: 1270069 - DNA, 25 bp, Homo sapien
gctgaacagagtgttctgacttatc

SEQ ID NO: 1270070 - DNA, 25 bp, Homo sapien
tgttctgacttatcgtgactgtgac

SEQ ID NO: 1270071 - DNA, 25 bp, Homo sapien
catcattgtagtaactctcatttcc

SEQ ID NO: 1270072 - DNA, 25 bp, Homo sapien
gcatttccactagctgcagcggctg

SEQ ID NO: 1270073 - DNA, 25 bp, Homo sapien
ccagatgcagggcaaccggttctgc

SEQ ID NO: 1270074 - DNA, 25 bp, Homo sapien
gggcaaccggttctgcatttcacat

SEQ ID NO: 1270075 - DNA, 25 bp, Homo sapien
cctgggtggcagtcgcccagatgca

SEQ ID NO: 1270076 - DNA, 25 bp, Homo sapien
cacacattggcatccgcatttctgc

SEQ ID NO: 1270077 - DNA, 25 bp, Homo sapien
cccaggtatccttgtggagttctgc

SEQ ID NO: 1270078 - DNA, 25 bp, Homo sapien
tctgctgttgcccatacactgatgg

SEQ ID NO: 1270079 - DNA, 25 bp, Homo sapien
ttctggccaacccataactcaagcc

SEQ ID NO: 1270080 - DNA, 25 bp, Homo sapien
ggaggtgacttcatcctgggaaatg

SEQ ID NO: 1270081 - DNA, 25 bp, Homo sapien
atttggaggtgacttcatcctggga

SEQ ID NO: 1270082 - DNA, 25 bp, Homo sapien
ggaaatgctgtaccgcatgataggg

SEQ ID NO: 1270083 - DNA, 25 bp, Homo sapien
ctggggagacatcgcatttggaggt

SEQ ID NO: 1270084 - DNA, 25 bp, Homo sapien
ttcagaatgatgagtggtctccctc

SEQ ID NO: 1270085 - DNA, 25 bp, Homo sapien
agctgacagcgcttcatggcattca

SEQ ID NO: 1270086 - DNA, 25 bp, Homo sapien
tccggccttctgtccaatgtactac

SEQ ID NO: 1270087 - DNA, 25 bp, Homo sapien
tacaactagcaacatgggttgaagc

SEQ ID NO: 1270088 - DNA, 25 bp, Homo sapien
ttaggaagagggctgcatgcaccca

SEQ ID NO: 1270089 - DNA, 25 bp, Homo sapien
gattgccccatgcagaaaggaagag

SEQ ID NO: 1270090 - DNA, 25 bp, Homo sapien
gacgctaccattcactgctagagga

SEQ ID NO: 1270091 - DNA, 25 bp, Homo sapien
cttatggaaagggagaatggcaccg

SEQ ID NO: 1270092 - DNA, 25 bp, Homo sapien
ccagctttcccctccataaaccaca

SEQ ID NO: 1270093 - DNA, 25 bp, Homo sapien
agctttcccctccataaaccacagt

SEQ ID NO: 1270094 - DNA, 25 bp, Homo sapien
cagctttcccctccataaaccacag

SEQ ID NO: 1270095 - DNA, 25 bp, Homo sapien
gctttcccctccataaaccacagtc

SEQ ID NO: 1270096 - DNA, 25 bp, Homo sapien
aagcatctgatagcctcaactcaca

SEQ ID NO: 1270097 - DNA, 25 bp, Homo sapien
tcaagcatctgatagcctcaactca

SEQ ID NO: 1270098 - DNA, 25 bp, Homo sapien
agcatctgatagcctcaactcacag

SEQ ID NO: 1270099 - DNA, 25 bp, Homo sapien
caagcatctgatagcctcaactcac

SEQ ID NO: 1270100 - DNA, 25 bp, Homo sapien
ctctcaggtgttccaggttcaaatc

SEQ ID NO: 1270101 - DNA, 25 bp, Homo sapien
tctcaggtgttccaggttcaaatct

SEQ ID NO: 1270102 - DNA, 25 bp, Homo sapien
caggttcaaatctcatcacctccat

SEQ ID NO: 1270103 - DNA, 25 bp, Homo sapien
tgattcaaagtaacatctgggtccc

SEQ ID NO: 1270104 - DNA, 25 bp, Homo sapien
cttgaaaagagtttaccaggaggca

SEQ ID NO: 1270105 - DNA, 25 bp, Homo sapien
tgcaagatgttgtgcgtcgtcaact

SEQ ID NO: 1270106 - DNA, 25 bp, Homo sapien
cacgttgccatagtgtcagggagca

SEQ ID NO: 1270107 - DNA, 25 bp, Homo sapien
caggagttacggagatgccgtgaag

SEQ ID NO: 1270108 - DNA, 25 bp, Homo sapien
catatgaagaattacggaggttaga

SEQ ID NO: 1270109 - DNA, 25 bp, Homo sapien
aggatgcaggagttacggagatgcc

SEQ ID NO: 1270110 - DNA, 25 bp, Homo sapien
gagaaatcttctgggattcccttgg

SEQ ID NO: 1270111 - DNA, 25 bp, Homo sapien
ctgcatccctctgagccatcctcag

SEQ ID NO: 1270112 - DNA, 25 bp, Homo sapien
actacaaggaccaatacccctgcag

SEQ ID NO: 1270113 - DNA, 25 bp, Homo sapien
ttctctcccactacaaggaccaata

SEQ ID NO: 1270114 - DNA, 25 bp, Homo sapien
ggaccaatacccctgcagctcagaa

SEQ ID NO: 1270115 - DNA, 25 bp, Homo sapien
ccaatacccctgcagctcagaatgg

SEQ ID NO: 1270116 - DNA, 25 bp, Homo sapien
accctgcacagagcaccgcagcctg

SEQ ID NO: 1270117 - DNA, 25 bp, Homo sapien
acagagcaccgcagcctggcatcca

SEQ ID NO: 1270118 - DNA, 25 bp, Homo sapien
gaagggacatagcagtgctgaaagc

SEQ ID NO: 1270119 - DNA, 25 bp, Homo sapien
ctccttcaatggtcaaaccagctga

SEQ ID NO: 1270120 - DNA, 25 bp, Homo sapien
gggagtgagctccataccaccttcc

SEQ ID NO: 1270121 - DNA, 25 bp, Homo sapien
cgaaggatatcgactcggggagtga

SEQ ID NO: 1270122 - DNA, 25 bp, Homo sapien
gatatcgactcggggagtgagctcc

SEQ ID NO: 1270123 - DNA, 25 bp, Homo sapien
aaggatatcgactcggggagtgagc

SEQ ID NO: 1270124 - DNA, 25 bp, Homo sapien
tccgtaggggctggaccactctctg

SEQ ID NO: 1270125 - DNA, 25 bp, Homo sapien
cttgcagcacccgagaggcctttga

SEQ ID NO: 1270126 - DNA, 25 bp, Homo sapien
tcagttgaagccacgtcctgggacc

SEQ ID NO: 1270127 - DNA, 25 bp, Homo sapien
cccgagaggcctttgaatagatatt

SEQ ID NO: 1270128 - DNA, 25 bp, Homo sapien
gtctgcggattaaatggaacaggca

SEQ ID NO: 1270129 - DNA, 25 bp, Homo sapien
tctgcggattaaatggaacaggcat

SEQ ID NO: 1270130 - DNA, 25 bp, Homo sapien
tgtctgcggattaaatggaacaggc

SEQ ID NO: 1270131 - DNA, 25 bp, Homo sapien
ctgtctgcggattaaatggaacagg

SEQ ID NO: 1270132 - DNA, 25 bp, Homo sapien
cgctgctttatcagagtcccagaca

SEQ ID NO: 1270133 - DNA, 25 bp, Homo sapien
aaatccgcttgacatctttgagctg

SEQ ID NO: 1270134 - DNA, 25 bp, Homo sapien
tgccgggaagataagcggctgccaa

SEQ ID NO: 1270135 - DNA, 25 bp, Homo sapien
tgatgtgcatccacaatgccgggaa

SEQ ID NO: 1270136 - DNA, 25 bp, Homo sapien
tcgggaggatgcacctatcagcaaa

SEQ ID NO: 1270137 - DNA, 25 bp, Homo sapien
gatgcacctatcagcaaaagcagct

SEQ ID NO: 1270138 - DNA, 25 bp, Homo sapien
cccatcgggaggatgcacctatcag

SEQ ID NO: 1270139 - DNA, 25 bp, Homo sapien
gaggatgcacctatcagcaaaagca

SEQ ID NO: 1270140 - DNA, 25 bp, Homo sapien
catacctgtgggaacgcttgaggaa

SEQ ID NO: 1270141 - DNA, 25 bp, Homo sapien
tggccgccatgttctgcaattgccc

SEQ ID NO: 1270142 - DNA, 25 bp, Homo sapien
ttcatggggatccttggtggccgcc

SEQ ID NO: 1270143 - DNA, 25 bp, Homo sapien
gccgccatgttctgcaattgcccat

SEQ ID NO: 1270144 - DNA, 25 bp, Homo sapien
gaatcttggagtcccttgatcttag

SEQ ID NO: 1270145 - DNA, 25 bp, Homo sapien
gatcatgctaggtggcctggttcct

SEQ ID NO: 1270146 - DNA, 25 bp, Homo sapien
tttctggtttatccaatgaaactgc

SEQ ID NO: 1270147 - DNA, 25 bp, Homo sapien
tcttagctcctgtatagatcatgct

SEQ ID NO: 1270148 - DNA, 25 bp, Homo sapien
cctagagtgaattcctgcccagagt

SEQ ID NO: 1270149 - DNA, 25 bp, Homo sapien
ctctgcctcagggtatatacgtgag

SEQ ID NO: 1270150 - DNA, 25 bp, Homo sapien
ctccaggtggactcgagcccctgat

SEQ ID NO: 1270151 - DNA, 25 bp, Homo sapien
tatacgtgagatacgcagtcctctg

SEQ ID NO: 1270152 - DNA, 25 bp, Homo sapien
gcccctgatgcacaggtctggctct

SEQ ID NO: 1270153 - DNA, 25 bp, Homo sapien
gaggagaggagttgctctctgcatc

SEQ ID NO: 1270154 - DNA, 25 bp, Homo sapien
aggagaggagttgctctctgcatcc

SEQ ID NO: 1270155 - DNA, 25 bp, Homo sapien
agagcaagaaatcttggtgaggaga

SEQ ID NO: 1270156 - DNA, 25 bp, Homo sapien
gagcaagaaatcttggtgaggagac

SEQ ID NO: 1270157 - DNA, 25 bp, Homo sapien
gagagcaagaaatcttggtgaggag

SEQ ID NO: 1270158 - DNA, 25 bp, Homo sapien
tcatatgacgagataagtagctgat

SEQ ID NO: 1270159 - DNA, 25 bp, Homo sapien
taagtcaggtcaatcatatgacgag

SEQ ID NO: 1270160 - DNA, 25 bp, Homo sapien
caggtcaatcatatgacgagataag

SEQ ID NO: 1270161 - DNA, 25 bp, Homo sapien
aaataagtcaggtcaatcatatgac

SEQ ID NO: 1270162 - DNA, 25 bp, Homo sapien
ttctgcgaggagtactcttgtgccc

SEQ ID NO: 1270163 - DNA, 25 bp, Homo sapien
cttgtgcccaggtacacctactgaa

SEQ ID NO: 1270164 - DNA, 25 bp, Homo sapien
gcatcattgtggttgcttgctctcc

SEQ ID NO: 1270165 - DNA, 25 bp, Homo sapien
cctactgaagcattgtggaccagga

SEQ ID NO: 1270166 - DNA, 25 bp, Homo sapien
ctgtgctttttgcaggatgctggtg

SEQ ID NO: 1270167 - DNA, 25 bp, Homo sapien
tggtgcctccagggcatgccaaata

SEQ ID NO: 1270168 - DNA, 25 bp, Homo sapien
cctccagggcatgccaaatacttgc

SEQ ID NO: 1270169 - DNA, 25 bp, Homo sapien
tgcggctgtgctttttgcaggatgc

SEQ ID NO: 1270170 - DNA, 25 bp, Homo sapien
gggcagatggtactgcttcccattt

SEQ ID NO: 1270171 - DNA, 25 bp, Homo sapien
cttgcacttgcagggaagtcttgat

SEQ ID NO: 1270172 - DNA, 25 bp, Homo sapien
gggaagtcttgatgcatatgtgtta

SEQ ID NO: 1270173 - DNA, 25 bp, Homo sapien
tgtgttatcgaggtgcatatggaag

SEQ ID NO: 1270174 - DNA, 25 bp, Homo sapien
tcccaatgacgtaagtgaacagtgt

SEQ ID NO: 1270175 - DNA, 25 bp, Homo sapien
tctcccaatgacgtaagtgaacagt

SEQ ID NO: 1270176 - DNA, 25 bp, Homo sapien
gacgtaagtgaacagtgtctctatt

SEQ ID NO: 1270177 - DNA, 25 bp, Homo sapien
caatgacgtaagtgaacagtgtctc

SEQ ID NO: 1270178 - DNA, 25 bp, Homo sapien
ccctttgcaaccacgacaggcctgt

SEQ ID NO: 1270179 - DNA, 25 bp, Homo sapien
gaaagccctttgcaaccacgacagg

SEQ ID NO: 1270180 - DNA, 25 bp, Homo sapien
ggagaaagccctttgcaaccacgac

SEQ ID NO: 1270181 - DNA, 25 bp, Homo sapien
cctttgcaaccacgacaggcctgtg

SEQ ID NO: 1270182 - DNA, 25 bp, Homo sapien
tcacttggcaacacccaaggaggcc

SEQ ID NO: 1270183 - DNA, 25 bp, Homo sapien
ttgtttaattctggcaacagcaagc

SEQ ID NO: 1270184 - DNA, 25 bp, Homo sapien
taattctggcaacagcaagcccagc

SEQ ID NO: 1270185 - DNA, 25 bp, Homo sapien
gtttaattctggcaacagcaagccc

SEQ ID NO: 1270186 - DNA, 25 bp, Homo sapien
cctttgtttaattctggcaacagca

SEQ ID NO: 1270187 - DNA, 25 bp, Homo sapien
gcgagcttctcagcaacacctttgc

SEQ ID NO: 1270188 - DNA, 25 bp, Homo sapien
cctagagcatctggggactgcgagc

SEQ ID NO: 1270189 - DNA, 25 bp, Homo sapien
ttgtgtttccctccaagggtgagga

SEQ ID NO: 1270190 - DNA, 25 bp, Homo sapien
ttccctccaagggtgaggaatggag

SEQ ID NO: 1270191 - DNA, 25 bp, Homo sapien
tgtttccctccaagggtgaggaatg

SEQ ID NO: 1270192 - DNA, 25 bp, Homo sapien
tgtgtttccctccaagggtgaggaa

SEQ ID NO: 1270193 - DNA, 25 bp, Homo sapien
aattgacaccacctttcacggccat

SEQ ID NO: 1270194 - DNA, 25 bp, Homo sapien
tcatggccacgatgcattgacttgc

SEQ ID NO: 1270195 - DNA, 25 bp, Homo sapien
ggcagtagctgcactttggatgcaa

SEQ ID NO: 1270196 - DNA, 25 bp, Homo sapien
tcccatgtccccgtgaaagtggcag

SEQ ID NO: 1270197 - DNA, 25 bp, Homo sapien
ccttgaccactgtagacaatgaagc

SEQ ID NO: 1270198 - DNA, 25 bp, Homo sapien
ctgttcccttgaccactgtagacaa

SEQ ID NO: 1270199 - DNA, 25 bp, Homo sapien
gtagacaatgaagcctccatcagac

SEQ ID NO: 1270200 - DNA, 25 bp, Homo sapien
agacaatgaagcctccatcagactg

SEQ ID NO: 1270201 - DNA, 25 bp, Homo sapien
ggtgtcagccagagccatgactgaa

SEQ ID NO: 1270202 - DNA, 25 bp, Homo sapien
gaagaatgcgccagcttaaaaggag

SEQ ID NO: 1270203 - DNA, 25 bp, Homo sapien
tgggaagtatctggtcagtgacaat

SEQ ID NO: 1270204 - DNA, 25 bp, Homo sapien
tgacaatgacagcatcccactgacc

SEQ ID NO: 1270205 - DNA, 25 bp, Homo sapien
gagagaggaaagacccatgcacaac

SEQ ID NO: 1270206 - DNA, 25 bp, Homo sapien
tccttgttacctgcatgagaggaaa

SEQ ID NO: 1270207 - DNA, 25 bp, Homo sapien
gaatggtgccaagtttgctcaggag

SEQ ID NO: 1270208 - DNA, 25 bp, Homo sapien
catgcacaacatgacgaggaccaag

SEQ ID NO: 1270209 - DNA, 25 bp, Homo sapien
tgttaggctccagacaagtcaccga

SEQ ID NO: 1270210 - DNA, 25 bp, Homo sapien
aagagcacccggcatctgttaggct

SEQ ID NO: 1270211 - DNA, 25 bp, Homo sapien
gagaagactccccaaagcaagtgaa

SEQ ID NO: 1270212 - DNA, 25 bp, Homo sapien
aaaaaagcccggcaagctctagctg

SEQ ID NO: 1270213 - DNA, 25 bp, Homo sapien
cttgataacgtgtctctgtccaggg

SEQ ID NO: 1270214 - DNA, 25 bp, Homo sapien
tgcagccgttccttgggacagctct

SEQ ID NO: 1270215 - DNA, 25 bp, Homo sapien
gctctcagggaaaaacgatattggc

SEQ ID NO: 1270216 - DNA, 25 bp, Homo sapien
cacagaagagcaactcatcctggcc

SEQ ID NO: 1270217 - DNA, 25 bp, Homo sapien
cttccaagacaaagagtcccaagga

SEQ ID NO: 1270218 - DNA, 25 bp, Homo sapien
ttccaagacaaagagtcccaaggaa

SEQ ID NO: 1270219 - DNA, 25 bp, Homo sapien
aagaggagcacgatgtgctgggagc

SEQ ID NO: 1270220 - DNA, 25 bp, Homo sapien
gaaaagcagccactgtgagaagagg

SEQ ID NO: 1270221 - DNA, 25 bp, Homo sapien
tgtgagaagaggagcacgatgtgct

SEQ ID NO: 1270222 - DNA, 25 bp, Homo sapien
agcacgatgtgctgggagcatgtcc

SEQ ID NO: 1270223 - DNA, 25 bp, Homo sapien
taggagttcactggaggaagccaca

SEQ ID NO: 1270224 - DNA, 25 bp, Homo sapien
taacagggatctacacctgcctggg

SEQ ID NO: 1270225 - DNA, 25 bp, Homo sapien
ttcaccggagccatacggaaagtgt

SEQ ID NO: 1270226 - DNA, 25 bp, Homo sapien
ttatcaagtcaaacaagcagatgtc

SEQ ID NO: 1270227 - DNA, 25 bp, Homo sapien
gttgcacgtgcttcttccaaggagc

SEQ ID NO: 1270228 - DNA, 25 bp, Homo sapien
tggatccatgtctgttctgtttgcc

SEQ ID NO: 1270229 - DNA, 25 bp, Homo sapien
tccaaggagctatgtgtggtccaaa

SEQ ID NO: 1270230 - DNA, 25 bp, Homo sapien
gtttgccttcatgccacattctccg

SEQ ID NO: 1270231 - DNA, 25 bp, Homo sapien
tgtttgtcatttggtcacactttcc

SEQ ID NO: 1270232 - DNA, 25 bp, Homo sapien
tttgtcatttggtcacactttcctc

SEQ ID NO: 1270233 - DNA, 25 bp, Homo sapien
gtttgtcatttggtcacactttcct

SEQ ID NO: 1270234 - DNA, 25 bp, Homo sapien
caggtgggtccttagaggcagatcc

SEQ ID NO: 1270235 - DNA, 25 bp, Homo sapien
acaggtccaggaacccaaaagtgtg

SEQ ID NO: 1270236 - DNA, 25 bp, Homo sapien
tcatggaggattcccagaggaaccc

SEQ ID NO: 1270237 - DNA, 25 bp, Homo sapien
caaaagtgtgaatagcgccctctct

SEQ ID NO: 1270238 - DNA, 25 bp, Homo sapien
ctatttcccacatccatagaaagcc

SEQ ID NO: 1270239 - DNA, 25 bp, Homo sapien
agaaaagacatccttgcatgacagg

SEQ ID NO: 1270240 - DNA, 25 bp, Homo sapien
tttcggcttgggatgttcagggtct

SEQ ID NO: 1270241 - DNA, 25 bp, Homo sapien
tcctttcggcttgggatgttcaggg

SEQ ID NO: 1270242 - DNA, 25 bp, Homo sapien
gatgctattgcctgggaccggcagt

SEQ ID NO: 1270243 - DNA, 25 bp, Homo sapien
cttgtctcctgccacttttcctggg

SEQ ID NO: 1270244 - DNA, 25 bp, Homo sapien
cttttcctggggtctagacgctctg

SEQ ID NO: 1270245 - DNA, 25 bp, Homo sapien
gccacttttcctggggtctagacgc

SEQ ID NO: 1270246 - DNA, 25 bp, Homo sapien
tcctggggtctagacgctctggcat

SEQ ID NO: 1270247 - DNA, 25 bp, Homo sapien
cccgcactggaatttaacacgagat

SEQ ID NO: 1270248 - DNA, 25 bp, Homo sapien
gcattgacagactgaatagcttcca

SEQ ID NO: 1270249 - DNA, 25 bp, Homo sapien
gattcggggccacaaaggattcaaa

SEQ ID NO: 1270250 - DNA, 25 bp, Homo sapien
caagcgtagatgtgaaaagcttcta

SEQ ID NO: 1270251 - DNA, 25 bp, Homo sapien
tgttctgaggttccaactgccttgt

SEQ ID NO: 1270252 - DNA, 25 bp, Homo sapien
gctgtgttctgaggttccaactgcc

SEQ ID NO: 1270253 - DNA, 25 bp, Homo sapien
gaggttccaactgccttgtgcaggg

SEQ ID NO: 1270254 - DNA, 25 bp, Homo sapien
tcctgctgtgttctgaggttccaac

SEQ ID NO: 1270255 - DNA, 25 bp, Homo sapien
ctggacctcccgagcgttttctgtg

SEQ ID NO: 1270256 - DNA, 25 bp, Homo sapien
gaagcagaacagttgattaaaacgt

SEQ ID NO: 1270257 - DNA, 25 bp, Homo sapien
caagaagcagaacagttgattaaaa

SEQ ID NO: 1270258 - DNA, 25 bp, Homo sapien
cctcccgagcgttttctgtggaagg

SEQ ID NO: 1270259 - DNA, 25 bp, Homo sapien
cagcaaagctaaggcaggccaccat

SEQ ID NO: 1270260 - DNA, 25 bp, Homo sapien
caaagctaaggcaggccaccattac

SEQ ID NO: 1270261 - DNA, 25 bp, Homo sapien
gcaaagctaaggcaggccaccatta

SEQ ID NO: 1270262 - DNA, 25 bp, Homo sapien
ctcagcaaagctaaggcaggccacc

SEQ ID NO: 1270263 - DNA, 25 bp, Homo sapien
ggacaggtgcgggattgcattatca

SEQ ID NO: 1270264 - DNA, 25 bp, Homo sapien
gggattgcattatcatgagtggtta

SEQ ID NO: 1270265 - DNA, 25 bp, Homo sapien
cctgtcacaaggtgcagaaaggaca

SEQ ID NO: 1270266 - DNA, 25 bp, Homo sapien
gaatgtaaaggcgagagctggcagc

SEQ ID NO: 1270267 - DNA, 25 bp, Homo sapien
taggtggtatgaacttgtactgcag

SEQ ID NO: 1270268 - DNA, 25 bp, Homo sapien
tgagaagcgggttattggttcattg

SEQ ID NO: 1270269 - DNA, 25 bp, Homo sapien
caatgtaggtggtatgaacttgtac

SEQ ID NO: 1270270 - DNA, 25 bp, Homo sapien
gtgagaagcgggttattggttcatt

SEQ ID NO: 1270271 - DNA, 25 bp, Homo sapien
tcagagtgcaagtagatgctcagca

SEQ ID NO: 1270272 - DNA, 25 bp, Homo sapien
tccaagattcctagtgtgaggtcag

SEQ ID NO: 1270273 - DNA, 25 bp, Homo sapien
gcaaacacttgttggaatatagagt

SEQ ID NO: 1270274 - DNA, 25 bp, Homo sapien
tatagagttttggattccatgcgag

SEQ ID NO: 1270275 - DNA, 25 bp, Homo sapien
tgtaaaactgccatcgctggtgttt

SEQ ID NO: 1270276 - DNA, 25 bp, Homo sapien
cttttgtaaaactgccatcgctggt

SEQ ID NO: 1270277 - DNA, 25 bp, Homo sapien
cccttttgtaaaactgccatcgctg

SEQ ID NO: 1270278 - DNA, 25 bp, Homo sapien
ttttgtaaaactgccatcgctggtg

SEQ ID NO: 1270279 - DNA, 25 bp, Homo sapien
actcaggtgggatgttccaaatgcc

SEQ ID NO: 1270280 - DNA, 25 bp, Homo sapien
cactcaggtgggatgttccaaatgc

SEQ ID NO: 1270281 - DNA, 25 bp, Homo sapien
tggatggcggtctcaggcagcatct

SEQ ID NO: 1270282 - DNA, 25 bp, Homo sapien
gggaggtggatggcggtctcaggca

SEQ ID NO: 1270283 - DNA, 25 bp, Homo sapien
cccattgcaggtggaagggccgcat

SEQ ID NO: 1270284 - DNA, 25 bp, Homo sapien
caaactcctgaaacttcctacctgt

SEQ ID NO: 1270285 - DNA, 25 bp, Homo sapien
gtgacatcaaagacccgagaaccat

SEQ ID NO: 1270286 - DNA, 25 bp, Homo sapien
cgagaaccatgtgccccaattgtgc

SEQ ID NO: 1270287 - DNA, 25 bp, Homo sapien
ctggcttgaacttgatttctgtctc

SEQ ID NO: 1270288 - DNA, 25 bp, Homo sapien
tgaccagcagggtcacgtcgggcca

SEQ ID NO: 1270289 - DNA, 25 bp, Homo sapien
gtcacgtcgggccactggcttgaac

SEQ ID NO: 1270290 - DNA, 25 bp, Homo sapien
gggtgaccagcagggtcacgtcggg

SEQ ID NO: 1270291 - DNA, 25 bp, Homo sapien
gatttacaactataaaagcgtctgg

SEQ ID NO: 1270292 - DNA, 25 bp, Homo sapien
cagtcagactggcaggcgagggagc

SEQ ID NO: 1270293 - DNA, 25 bp, Homo sapien
ggagccaggatttacaactataaaa

SEQ ID NO: 1270294 - DNA, 25 bp, Homo sapien
aggcgagggagccaggatttacaac

SEQ ID NO: 1270295 - DNA, 25 bp, Homo sapien
ccagggtctgatagggaaatttagg

SEQ ID NO: 1270296 - DNA, 25 bp, Homo sapien
gtaagtattggtgcagccagggtct

SEQ ID NO: 1270297 - DNA, 25 bp, Homo sapien
tctgatagggaaatttagggatggg

SEQ ID NO: 1270298 - DNA, 25 bp, Homo sapien
cgtaagtattggtgcagccagggtc

SEQ ID NO: 1270299 - DNA, 25 bp, Homo sapien
ctgcatctctttcagttggttccaa

SEQ ID NO: 1270300 - DNA, 25 bp, Homo sapien
gcatctctttcagttggttccaaac

SEQ ID NO: 1270301 - DNA, 25 bp, Homo sapien
tgcatctctttcagttggttccaaa

SEQ ID NO: 1270302 - DNA, 25 bp, Homo sapien
tgggtctttatgcagcaccctctgc

SEQ ID NO: 1270303 - DNA, 25 bp, Homo sapien
attcctgctcggaaggattttaaag

SEQ ID NO: 1270304 - DNA, 25 bp, Homo sapien
gggagtctttgtgataattcctgct

SEQ ID NO: 1270305 - DNA, 25 bp, Homo sapien
ttgaagttgggtctttatgcagcac

SEQ ID NO: 1270306 - DNA, 25 bp, Homo sapien
cagccgtctgcttcctatgcatata

SEQ ID NO: 1270307 - DNA, 25 bp, Homo sapien
aatgggttctccgatgggtgctgct

SEQ ID NO: 1270308 - DNA, 25 bp, Homo sapien
tatgcatatactgggcccttgttag

SEQ ID NO: 1270309 - DNA, 25 bp, Homo sapien
tgctggagcatactgaacctgaact

SEQ ID NO: 1270310 - DNA, 25 bp, Homo sapien
ctttagtatgtagcagaggctttgc

SEQ ID NO: 1270311 - DNA, 25 bp, Homo sapien
ctccctggctttagtatgtagcaga

SEQ ID NO: 1270312 - DNA, 25 bp, Homo sapien
cctggctttagtatgtagcagaggc

SEQ ID NO: 1270313 - DNA, 25 bp, Homo sapien
ggctttagtatgtagcagaggcttt

SEQ ID NO: 1270314 - DNA, 25 bp, Homo sapien
cctggtttccacgggcaatgttgca

SEQ ID NO: 1270315 - DNA, 25 bp, Homo sapien
gcctggtttccacgggcaatgttgc

SEQ ID NO: 1270316 - DNA, 25 bp, Homo sapien
ctgcctggtttccacgggcaatgtt

SEQ ID NO: 1270317 - DNA, 25 bp, Homo sapien
tggtttccacgggcaatgttgcaca

SEQ ID NO: 1270318 - DNA, 25 bp, Homo sapien
tgatctgaggcccttacggcagtgg

SEQ ID NO: 1270319 - DNA, 25 bp, Homo sapien
gcaggacatagctgcagagccctga

SEQ ID NO: 1270320 - DNA, 25 bp, Homo sapien
gctgcttagaactgcgtccccagca

SEQ ID NO: 1270321 - DNA, 25 bp, Homo sapien
ctaggttggtgcctttgtccacggc

SEQ ID NO: 1270322 - DNA, 25 bp, Homo sapien
caggcttaaattggcagctgttgac

SEQ ID NO: 1270323 - DNA, 25 bp, Homo sapien
ccaggcttaaattggcagctgttga

SEQ ID NO: 1270324 - DNA, 25 bp, Homo sapien
gttgacattacaagcctcaaagttg

SEQ ID NO: 1270325 - DNA, 25 bp, Homo sapien
ctgcagaggccttagaccaggtgat

SEQ ID NO: 1270326 - DNA, 25 bp, Homo sapien
accaggtgatggcaagaagcccact

SEQ ID NO: 1270327 - DNA, 25 bp, Homo sapien
cagaggccttagaccaggtgatggc

SEQ ID NO: 1270328 - DNA, 25 bp, Homo sapien
gtgatggcaagaagcccactctccg

SEQ ID NO: 1270329 - DNA, 25 bp, Homo sapien
gaggcagacgtctgaagaagctatt

SEQ ID NO: 1270330 - DNA, 25 bp, Homo sapien
gactttgcaggagccgtgcaaacag

SEQ ID NO: 1270331 - DNA, 25 bp, Homo sapien
caagcgcgcagagagtcagggcaat

SEQ ID NO: 1270332 - DNA, 25 bp, Homo sapien
tcagggcaatgccaatttgaggcag

SEQ ID NO: 1270333 - DNA, 25 bp, Homo sapien
tcactcctcttctccgaatgcccat

SEQ ID NO: 1270334 - DNA, 25 bp, Homo sapien
ctcactcctcttctccgaatgccca

SEQ ID NO: 1270335 - DNA, 25 bp, Homo sapien
gccctgtcgtgaatcagaggcagag

SEQ ID NO: 1270336 - DNA, 25 bp, Homo sapien
gcacagatggctgccctgtcgtgaa

SEQ ID NO: 1270337 - DNA, 25 bp, Homo sapien
aatttgagcagtgcccaaaagaagc

SEQ ID NO: 1270338 - DNA, 25 bp, Homo sapien
cgaagacgcagatttcttgttggca

SEQ ID NO: 1270339 - DNA, 25 bp, Homo sapien
tcccaggaatccacgtcttggctct

SEQ ID NO: 1270340 - DNA, 25 bp, Homo sapien
gcagctcagaaatgctcccaggaat

SEQ ID NO: 1270341 - DNA, 25 bp, Homo sapien
tctccggtggctacagctgacccag

SEQ ID NO: 1270342 - DNA, 25 bp, Homo sapien
tcccagtgacatagagaagcttctg

SEQ ID NO: 1270343 - DNA, 25 bp, Homo sapien
gagactttgccccatggctcggtgt

SEQ ID NO: 1270344 - DNA, 25 bp, Homo sapien
caaggatctggtaatgcacaaggaa

SEQ ID NO: 1270345 - DNA, 25 bp, Homo sapien
tgcgccagtggactcagattccagg

SEQ ID NO: 1270346 - DNA, 25 bp, Homo sapien
caggtccaggatgggagcatcagcc

SEQ ID NO: 1270347 - DNA, 25 bp, Homo sapien
cagctctggtgggagagtgttccga

SEQ ID NO: 1270348 - DNA, 25 bp, Homo sapien
tgacattgggcagcccatccactct

SEQ ID NO: 1270349 - DNA, 25 bp, Homo sapien
tccgagcctgacattgggcagccca

SEQ ID NO: 1270350 - DNA, 25 bp, Homo sapien
gtgggagagtgttccgagcctgaca

SEQ ID NO: 1270351 - DNA, 25 bp, Homo sapien
tcacacggcatccactggaagcttc

SEQ ID NO: 1270352 - DNA, 25 bp, Homo sapien
acacggcatccactggaagcttcca

SEQ ID NO: 1270353 - DNA, 25 bp, Homo sapien
ttccaggtgcttgtcctgccctgcc

SEQ ID NO: 1270354 - DNA, 25 bp, Homo sapien
gaagcttccaggtgcttgtcctgcc

SEQ ID NO: 1270355 - DNA, 25 bp, Homo sapien
tcaggacaacttctagacgtttctc

SEQ ID NO: 1270356 - DNA, 25 bp, Homo sapien
ctctgagaacgatggcagcagctgg

SEQ ID NO: 1270357 - DNA, 25 bp, Homo sapien
gcatagttcaggacaacttctagac

SEQ ID NO: 1270358 - DNA, 25 bp, Homo sapien
agctgggcacactggatgtttggca

SEQ ID NO: 1270359 - DNA, 25 bp, Homo sapien
agttcttgagacagtcctcaggcat

SEQ ID NO: 1270360 - DNA, 25 bp, Homo sapien
tgagagttcttgagacagtcctcag

SEQ ID NO: 1270361 - DNA, 25 bp, Homo sapien
gagttcttgagacagtcctcaggca

SEQ ID NO: 1270362 - DNA, 25 bp, Homo sapien
gagagttcttgagacagtcctcagg

SEQ ID NO: 1270363 - DNA, 25 bp, Homo sapien
aaattgccaaaggatcccacaagat

SEQ ID NO: 1270364 - DNA, 25 bp, Homo sapien
cacaagatctatgttcttggatcat

SEQ ID NO: 1270365 - DNA, 25 bp, Homo sapien
cccacaagatctatgttcttggatc

SEQ ID NO: 1270366 - DNA, 25 bp, Homo sapien
aaaggatcccacaagatctatgttc

SEQ ID NO: 1270367 - DNA, 25 bp, Homo sapien
gagaatagcacagaggagacggtcc

SEQ ID NO: 1270368 - DNA, 25 bp, Homo sapien
gaggtgtggaagtgccacatacttt

SEQ ID NO: 1270369 - DNA, 25 bp, Homo sapien
gagacggtcctaaagcattgatgag

SEQ ID NO: 1270370 - DNA, 25 bp, Homo sapien
tgatgagaatttcgccctcatgatc

SEQ ID NO: 1270371 - DNA, 25 bp, Homo sapien
aatataaatttcaggttctggtcat

SEQ ID NO: 1270372 - DNA, 25 bp, Homo sapien
caggttctggtcatttcttgaaccc

SEQ ID NO: 1270373 - DNA, 25 bp, Homo sapien
cacatgggtgggctgcaaatttttc

SEQ ID NO: 1270374 - DNA, 25 bp, Homo sapien
tttcttttccaccacatgggtgggc

SEQ ID NO: 1270375 - DNA, 25 bp, Homo sapien
tgtgcccatcagacactggtgctcc

SEQ ID NO: 1270376 - DNA, 25 bp, Homo sapien
aatccgaatgtgtaggcaagtgtgg

SEQ ID NO: 1270377 - DNA, 25 bp, Homo sapien
tcagttacgcgtggggccatcattt

SEQ ID NO: 1270378 - DNA, 25 bp, Homo sapien
tcagggatccctgatggaatccgaa

SEQ ID NO: 1270379 - DNA, 25 bp, Homo sapien
ctgctctggggagccaggaaggagc

SEQ ID NO: 1270380 - DNA, 25 bp, Homo sapien
cctgctctggggagccaggaaggag

SEQ ID NO: 1270381 - DNA, 25 bp, Homo sapien
gctctggggagccaggaaggagcct

SEQ ID NO: 1270382 - DNA, 25 bp, Homo sapien
tctggggagccaggaaggagcctgc

SEQ ID NO: 1270383 - DNA, 25 bp, Homo sapien
gtggtgagagattctggtaccactc

SEQ ID NO: 1270384 - DNA, 25 bp, Homo sapien
ggtggtgagagattctggtaccact

SEQ ID NO: 1270385 - DNA, 25 bp, Homo sapien
gaggtggtgagagattctggtacca

SEQ ID NO: 1270386 - DNA, 25 bp, Homo sapien
aggtggtgagagattctggtaccac

SEQ ID NO: 1270387 - DNA, 25 bp, Homo sapien
gcaccattgcagtttggggcctcca

SEQ ID NO: 1270388 - DNA, 25 bp, Homo sapien
gtgtcagctgtcacccgctttgtga

SEQ ID NO: 1270389 - DNA, 25 bp, Homo sapien
ctgtcacccgctttgtgatgtggcc

SEQ ID NO: 1270390 - DNA, 25 bp, Homo sapien
tttggggcctccactaaactcagcc

SEQ ID NO: 1270391 - DNA, 25 bp, Homo sapien
tgtggatgctgcttccgtacagaag

SEQ ID NO: 1270392 - DNA, 25 bp, Homo sapien
gctgcttccgtacagaagcaaagcc

SEQ ID NO: 1270393 - DNA, 25 bp, Homo sapien
acagaagcaaagccatgcaccagcc

SEQ ID NO: 1270394 - DNA, 25 bp, Homo sapien
gatgctgcttccgtacagaagcaaa

SEQ ID NO: 1270395 - DNA, 25 bp, Homo sapien
gcagttgtggggcctctgccaggca

SEQ ID NO: 1270396 - DNA, 25 bp, Homo sapien
cagttgtggggcctctgccaggcat

SEQ ID NO: 1270397 - DNA, 25 bp, Homo sapien
ctgcagttgtggggcctctgccagg

SEQ ID NO: 1270398 - DNA, 25 bp, Homo sapien
tgcagttgtggggcctctgccaggc

SEQ ID NO: 1270399 - DNA, 25 bp, Homo sapien
cccagattggaagaagatgcaccat

SEQ ID NO: 1270400 - DNA, 25 bp, Homo sapien
ttccccagattggaagaagatgcac

SEQ ID NO: 1270401 - DNA, 25 bp, Homo sapien
ctcttccccagattggaagaagatg

SEQ ID NO: 1270402 - DNA, 25 bp, Homo sapien
tccccagattggaagaagatgcacc

SEQ ID NO: 1270403 - DNA, 25 bp, Homo sapien
ctctcagaggtgaagctctttccat

SEQ ID NO: 1270404 - DNA, 25 bp, Homo sapien
catgctgctgactaagacatgcctg

SEQ ID NO: 1270405 - DNA, 25 bp, Homo sapien
atgctgctgactaagacatgcctga

SEQ ID NO: 1270406 - DNA, 25 bp, Homo sapien
gctgctgactaagacatgcctgaga

SEQ ID NO: 1270407 - DNA, 25 bp, Homo sapien
tgctgctgactaagacatgcctgag

SEQ ID NO: 1270408 - DNA, 25 bp, Homo sapien
ggatgtgacgagcatcaccttgatg

SEQ ID NO: 1270409 - DNA, 25 bp, Homo sapien
agttatggatggatgtgacgagcat

SEQ ID NO: 1270410 - DNA, 25 bp, Homo sapien
tggatggatgtgacgagcatcacct

SEQ ID NO: 1270411 - DNA, 25 bp, Homo sapien
ggtgggagttatggatggatgtgac

SEQ ID NO: 1270412 - DNA, 25 bp, Homo sapien
gcagcacaaatgagctgagacagtg

SEQ ID NO: 1270413 - DNA, 25 bp, Homo sapien
gacagtgttgtacagtccttctctt

SEQ ID NO: 1270414 - DNA, 25 bp, Homo sapien
tcctccaggtagtcagtcttgcaaa

SEQ ID NO: 1270415 - DNA, 25 bp, Homo sapien
gaagcaagtcccctacttccaggaa

SEQ ID NO: 1270416 - DNA, 25 bp, Homo sapien
ttagacgggctggtatgatgagcat

SEQ ID NO: 1270417 - DNA, 25 bp, Homo sapien
cagagcatcacatgcgtggagaggt

SEQ ID NO: 1270418 - DNA, 25 bp, Homo sapien
cataagccagagcatcacatgcgtg

SEQ ID NO: 1270419 - DNA, 25 bp, Homo sapien
tctttacatttcagtcggtttagac

SEQ ID NO: 1270420 - DNA, 25 bp, Homo sapien
ttctatcctttactttttacacaca

SEQ ID NO: 1270421 - DNA, 25 bp, Homo sapien
gaagtttactttgtcagattagtat

SEQ ID NO: 1270422 - DNA, 25 bp, Homo sapien
taagcagatttttcatacatagtat

SEQ ID NO: 1270423 - DNA, 25 bp, Homo sapien
gctgatttggtatatttagaccatt

SEQ ID NO: 1270424 - DNA, 25 bp, Homo sapien
ggcacaaaccacatgtccgcaccac

SEQ ID NO: 1270425 - DNA, 25 bp, Homo sapien
gtccgcaccacaggagctgcaggaa

SEQ ID NO: 1270426 - DNA, 25 bp, Homo sapien
aaaccacatgtccgcaccacaggag

SEQ ID NO: 1270427 - DNA, 25 bp, Homo sapien
acatgtccgcaccacaggagctgca

SEQ ID NO: 1270428 - DNA, 25 bp, Homo sapien
gccctgatccagtgtacccgaattg

SEQ ID NO: 1270429 - DNA, 25 bp, Homo sapien
ggatttctgcctgaccaatgacggc

SEQ ID NO: 1270430 - DNA, 25 bp, Homo sapien
aactctccggcactggctgttagga

SEQ ID NO: 1270431 - DNA, 25 bp, Homo sapien
tgttaggaccctcttcggagctgcc

SEQ ID NO: 1270432 - DNA, 25 bp, Homo sapien
cctttaacctccatgcgaacctcat

SEQ ID NO: 1270433 - DNA, 25 bp, Homo sapien
tcctttaacctccatgcgaacctca

SEQ ID NO: 1270434 - DNA, 25 bp, Homo sapien
ggtaacaatatccagcctaaaaatg

SEQ ID NO: 1270435 - DNA, 25 bp, Homo sapien
tatccagcctaaaaatgctcctatg

SEQ ID NO: 1270436 - DNA, 25 bp, Homo sapien
aatgctcctatgttttcgtccaact

SEQ ID NO: 1270437 - DNA, 25 bp, Homo sapien
cttaggtaacaatatccagcctaaa

SEQ ID NO: 1270438 - DNA, 25 bp, Homo sapien
ttcttggtgatgtacatgtgggcac

SEQ ID NO: 1270439 - DNA, 25 bp, Homo sapien
ctacaggttcttggtgatgtacatg

SEQ ID NO: 1270440 - DNA, 25 bp, Homo sapien
caggttcttggtgatgtacatgtgg

SEQ ID NO: 1270441 - DNA, 25 bp, Homo sapien
ttggtgatgtacatgtgggcacagg

SEQ ID NO: 1270442 - DNA, 25 bp, Homo sapien
gacaatgaatttcaaaccctgtctt

SEQ ID NO: 1270443 - DNA, 25 bp, Homo sapien
aaaccctgtcttcacgtccaggtct

SEQ ID NO: 1270444 - DNA, 25 bp, Homo sapien
tttcaaaccctgtcttcacgtccag

SEQ ID NO: 1270445 - DNA, 25 bp, Homo sapien
atgaatttcaaaccctgtcttcacg

SEQ ID NO: 1270446 - DNA, 25 bp, Homo sapien
gcatcatcgctgtccttgaggaatt

SEQ ID NO: 1270447 - DNA, 25 bp, Homo sapien
gttgcagaatgaggagctggcatca

SEQ ID NO: 1270448 - DNA, 25 bp, Homo sapien
tttcctgtttatacagccttgtgca

SEQ ID NO: 1270449 - DNA, 25 bp, Homo sapien
gtttatacagccttgtgcaacaggg

SEQ ID NO: 1270450 - DNA, 25 bp, Homo sapien
cactttgtggcgttgcgaggaactg

SEQ ID NO: 1270451 - DNA, 25 bp, Homo sapien
ggaactggatccaagatgcgctgtt

SEQ ID NO: 1270452 - DNA, 25 bp, Homo sapien
acactttgtggcgttgcgaggaact

SEQ ID NO: 1270453 - DNA, 25 bp, Homo sapien
tccaagatgcgctgtttgtgttaag

SEQ ID NO: 1270454 - DNA, 25 bp, Homo sapien
gaagttgtctgacccggtgaagatg

SEQ ID NO: 1270455 - DNA, 25 bp, Homo sapien
cctaagaagttgtctgacccggtga

SEQ ID NO: 1270456 - DNA, 25 bp, Homo sapien
gtgtctgatcccctaagaagttgtc

SEQ ID NO: 1270457 - DNA, 25 bp, Homo sapien
gatacagactcgctcccctcatggg

SEQ ID NO: 1270458 - DNA, 25 bp, Homo sapien
tgaacggcgttctgttgcatataga

SEQ ID NO: 1270459 - DNA, 25 bp, Homo sapien
acccttggagactgaacggcgttct

SEQ ID NO: 1270460 - DNA, 25 bp, Homo sapien
agaagacgaggatggtcagaactct

SEQ ID NO: 1270461 - DNA, 25 bp, Homo sapien
ctgttgcatatagaagacgaggatg

SEQ ID NO: 1270462 - DNA, 25 bp, Homo sapien
aacctccagtagcgcccactgggag

SEQ ID NO: 1270463 - DNA, 25 bp, Homo sapien
agtagcgcccactgggagccagaga

SEQ ID NO: 1270464 - DNA, 25 bp, Homo sapien
tccagtagcgcccactgggagccag

SEQ ID NO: 1270465 - DNA, 25 bp, Homo sapien
tcaacctccagtagcgcccactggg

SEQ ID NO: 1270466 - DNA, 25 bp, Homo sapien
cagtgcagctgagatgacttgcaaa

SEQ ID NO: 1270467 - DNA, 25 bp, Homo sapien
tgcaaaggctaaatgggccacagac

SEQ ID NO: 1270468 - DNA, 25 bp, Homo sapien
gacttgcaaaggctaaatgggccac

SEQ ID NO: 1270469 - DNA, 25 bp, Homo sapien
aatgcaggtgcccttggtctccagt

SEQ ID NO: 1270470 - DNA, 25 bp, Homo sapien
gcagcgacttccatttgggacatga

SEQ ID NO: 1270471 - DNA, 25 bp, Homo sapien
agcaaatacagtggcagcgacttcc

SEQ ID NO: 1270472 - DNA, 25 bp, Homo sapien
tgggacatgatgatgggtttgaaac

SEQ ID NO: 1270473 - DNA, 25 bp, Homo sapien
catgatgatgggtttgaaacacctg

SEQ ID NO: 1270474 - DNA, 25 bp, Homo sapien
ggccctgagggtgcaaaacgggatc

SEQ ID NO: 1270475 - DNA, 25 bp, Homo sapien
aaagagaacacaacacgtatgagag

SEQ ID NO: 1270476 - DNA, 25 bp, Homo sapien
acaacacgtatgagagcaggatggg

SEQ ID NO: 1270477 - DNA, 25 bp, Homo sapien
cgggccacctctggttgaaggtcaa

SEQ ID NO: 1270478 - DNA, 25 bp, Homo sapien
cagctcctcacagcttgtctgggtt

SEQ ID NO: 1270479 - DNA, 25 bp, Homo sapien
gaaccggcaagagctgacacgttgt

SEQ ID NO: 1270480 - DNA, 25 bp, Homo sapien
gggaaaatgattaatgcatccaagg

SEQ ID NO: 1270481 - DNA, 25 bp, Homo sapien
tgaataatgcactgtctgaacaccc

SEQ ID NO: 1270482 - DNA, 25 bp, Homo sapien
tgggaccacggggctcccagtgcat

SEQ ID NO: 1270483 - DNA, 25 bp, Homo sapien
tgctggaaagtgttgctaggagaca

SEQ ID NO: 1270484 - DNA, 25 bp, Homo sapien
ctgctggaaagtgttgctaggagac

SEQ ID NO: 1270485 - DNA, 25 bp, Homo sapien
caagggcattgggaccacggggctc

SEQ ID NO: 1270486 - DNA, 25 bp, Homo sapien
tgaaatctaattgctgagtgttttc

SEQ ID NO: 1270487 - DNA, 25 bp, Homo sapien
gctcaaggggtaatttgaaatctaa

SEQ ID NO: 1270488 - DNA, 25 bp, Homo sapien
aaatctaattgctgagtgttttcat

SEQ ID NO: 1270489 - DNA, 25 bp, Homo sapien
ctaacgttgacagagggctcaaggg

SEQ ID NO: 1270490 - DNA, 25 bp, Homo sapien
aagaaatacccgatgggccaaagat

SEQ ID NO: 1270491 - DNA, 25 bp, Homo sapien
agaaatacccgatgggccaaagatt

SEQ ID NO: 1270492 - DNA, 25 bp, Homo sapien
tctctccgctccggaggccagatgt

SEQ ID NO: 1270493 - DNA, 25 bp, Homo sapien
tgagagagaatctcttccacgtctc

SEQ ID NO: 1270494 - DNA, 25 bp, Homo sapien
cagtgttttgttggcaacccttgcc

SEQ ID NO: 1270495 - DNA, 25 bp, Homo sapien
tgtaagtatactggtcaaattgcat

SEQ ID NO: 1270496 - DNA, 25 bp, Homo sapien
tccagcgtctcacagccgtctccct

SEQ ID NO: 1270497 - DNA, 25 bp, Homo sapien
ctccagtgctgcctagtgcttacgc

SEQ ID NO: 1270498 - DNA, 25 bp, Homo sapien
gtgctgcctagtgcttacgcaaaag

SEQ ID NO: 1270499 - DNA, 25 bp, Homo sapien
cagtgctgcctagtgcttacgcaaa

SEQ ID NO: 1270500 - DNA, 25 bp, Homo sapien
tttagcctcttgtctggatacccac

SEQ ID NO: 1270501 - DNA, 25 bp, Homo sapien
gcctcttgtctggatacccacagaa

SEQ ID NO: 1270502 - DNA, 25 bp, Homo sapien
gtggcaggatcttcacacagaaggg

SEQ ID NO: 1270503 - DNA, 25 bp, Homo sapien
ctcttgtctggatacccacagaaaa

SEQ ID NO: 1270504 - DNA, 25 bp, Homo sapien
tcaaccatctttaagtttataattg

SEQ ID NO: 1270505 - DNA, 25 bp, Homo sapien
ccatctttaagtttataattgcata

SEQ ID NO: 1270506 - DNA, 25 bp, Homo sapien
catctttaagtttataattgcataa

SEQ ID NO: 1270507 - DNA, 25 bp, Homo sapien
aaccatctttaagtttataattgca

SEQ ID NO: 1270508 - DNA, 25 bp, Homo sapien
ccaagtgttgattgctactaagaaa

SEQ ID NO: 1270509 - DNA, 25 bp, Homo sapien
ctgcagctccaagtgttgattgcta

SEQ ID NO: 1270510 - DNA, 25 bp, Homo sapien
gggaccaccttcaatgagggaatca

SEQ ID NO: 1270511 - DNA, 25 bp, Homo sapien
gagggaatcatcaaagtcctctctg

SEQ ID NO: 1270512 - DNA, 25 bp, Homo sapien
ctctatgaccctcattgtaaaagga

SEQ ID NO: 1270513 - DNA, 25 bp, Homo sapien
tgggactgcagtacaagcaaataag

SEQ ID NO: 1270514 - DNA, 25 bp, Homo sapien
tggggatggcctcgtgaaacgcagc

SEQ ID NO: 1270515 - DNA, 25 bp, Homo sapien
ggtggggatggcctcgtgaaacgca

SEQ ID NO: 1270516 - DNA, 25 bp, Homo sapien
gggatggcctcgtgaaacgcagccc

SEQ ID NO: 1270517 - DNA, 25 bp, Homo sapien
ggatggcctcgtgaaacgcagcccc

SEQ ID NO: 1270518 - DNA, 25 bp, Homo sapien
gcagccggcagcatagcagatgtct

SEQ ID NO: 1270519 - DNA, 25 bp, Homo sapien
ttaatagagcccgagtgcccagggc

SEQ ID NO: 1270520 - DNA, 25 bp, Homo sapien
cagcagccggcagcatagcagatgt

SEQ ID NO: 1270521 - DNA, 25 bp, Homo sapien
ttaacaatttaatagagcccgagtg

SEQ ID NO: 1270522 - DNA, 25 bp, Homo sapien
gcatttccgctcaactttctttatg

SEQ ID NO: 1270523 - DNA, 25 bp, Homo sapien
ccagagttcgctgcatttccgctca

SEQ ID NO: 1270524 - DNA, 25 bp, Homo sapien
tttctttatgtcagagctgctgcgc

SEQ ID NO: 1270525 - DNA, 25 bp, Homo sapien
tctttatgtcagagctgctgcgcat

SEQ ID NO: 1270526 - DNA, 25 bp, Homo sapien
cgaagcactttaatctcccaggcct

SEQ ID NO: 1270527 - DNA, 25 bp, Homo sapien
gcgaagcactttaatctcccaggcc

SEQ ID NO: 1270528 - DNA, 25 bp, Homo sapien
cagcgaagcactttaatctcccagg

SEQ ID NO: 1270529 - DNA, 25 bp, Homo sapien
tcagcgaagcactttaatctcccag

SEQ ID NO: 1270530 - DNA, 25 bp, Homo sapien
tctcctgacaagagagggttcgcct

SEQ ID NO: 1270531 - DNA, 25 bp, Homo sapien
taactgtacccgtccctagtgcaga

SEQ ID NO: 1270532 - DNA, 25 bp, Homo sapien
aactggcattaggtggaactgtggc

SEQ ID NO: 1270533 - DNA, 25 bp, Homo sapien
gagtttcaatatggacctccgaagg

SEQ ID NO: 1270534 - DNA, 25 bp, Homo sapien
gaagccgtcagttaatcttctctcc

SEQ ID NO: 1270535 - DNA, 25 bp, Homo sapien
gcgctggttgccagcgcagcctcgg

SEQ ID NO: 1270536 - DNA, 25 bp, Homo sapien
gtcagttaatcttctctccgaagct

SEQ ID NO: 1270537 - DNA, 25 bp, Homo sapien
cggctgccagaagaagccgtcagtt

SEQ ID NO: 1270538 - DNA, 25 bp, Homo sapien
gtcacttagggccacgaaactacta

SEQ ID NO: 1270539 - DNA, 25 bp, Homo sapien
ttgtccttaacttgtgccaccggca

SEQ ID NO: 1270540 - DNA, 25 bp, Homo sapien
tagggccacgaaactactaggcaac

SEQ ID NO: 1270541 - DNA, 25 bp, Homo sapien
tctgcatgggcaatttgggtctatc

SEQ ID NO: 1270542 - DNA, 25 bp, Homo sapien
tcacagctcccgcacagccggtcac

SEQ ID NO: 1270543 - DNA, 25 bp, Homo sapien
accgtgtcacagctcccgcacagcc

SEQ ID NO: 1270544 - DNA, 25 bp, Homo sapien
agctcccgcacagccggtcaccgca

SEQ ID NO: 1270545 - DNA, 25 bp, Homo sapien
ccgtcacagctcccgcacagccggt

SEQ ID NO: 1270546 - DNA, 25 bp, Homo sapien
ggaagggactgtcacagctcctgca

SEQ ID NO: 1270547 - DNA, 25 bp, Homo sapien
tgtcctccgccaggaaaggcaccat

SEQ ID NO: 1270548 - DNA, 25 bp, Homo sapien
gcacagccggtcaccgcactgtcct

SEQ ID NO: 1270549 - DNA, 25 bp, Homo sapien
ctgcacagccggtcaccgcactgtc

SEQ ID NO: 1270550 - DNA, 25 bp, Homo sapien
cgtgtcacagctcccgcacagccgg

SEQ ID NO: 1270551 - DNA, 25 bp, Homo sapien
ccgtgtcacagctcccgcacagccg

SEQ ID NO: 1270552 - DNA, 25 bp, Homo sapien
accgtgtcacagctcccgcacagcc

SEQ ID NO: 1270553 - DNA, 25 bp, Homo sapien
tcggaagacccaggcgcaatggccc

SEQ ID NO: 1270554 - DNA, 25 bp, Homo sapien
caatggccctgactccaaagcttct

SEQ ID NO: 1270555 - DNA, 25 bp, Homo sapien
ttcctgcagccacgatgattcccaa

SEQ ID NO: 1270556 - DNA, 25 bp, Homo sapien
atgattcccaatgctggccccgggt

SEQ ID NO: 1270557 - DNA, 25 bp, Homo sapien
tgactgagttcccactgcaggggga

SEQ ID NO: 1270558 - DNA, 25 bp, Homo sapien
cagggggaccacaaagtcagtagga

SEQ ID NO: 1270559 - DNA, 25 bp, Homo sapien
ggaccacaaagtcagtaggaggcat

SEQ ID NO: 1270560 - DNA, 25 bp, Homo sapien
ctgcagggggaccacaaagtcagta

SEQ ID NO: 1270561 - DNA, 25 bp, Homo sapien
tgaggtcataggaggattgactggg

SEQ ID NO: 1270562 - DNA, 25 bp, Homo sapien
caggatcaacttcaactgctgctct

SEQ ID NO: 1270563 - DNA, 25 bp, Homo sapien
cagggcctgatgaggtcataggagg

SEQ ID NO: 1270564 - DNA, 25 bp, Homo sapien
tcaggtgggcttgcacaggtgccca

SEQ ID NO: 1270565 - DNA, 25 bp, Homo sapien
tgctgacacgggggtaggcctgatg

SEQ ID NO: 1270566 - DNA, 25 bp, Homo sapien
aaaaagtcccagccaatccccacat

SEQ ID NO: 1270567 - DNA, 25 bp, Homo sapien
tgaaaaaagtcccagccaatcccca

SEQ ID NO: 1270568 - DNA, 25 bp, Homo sapien
tgacacgggggtaggcctgatgctg

SEQ ID NO: 1270569 - DNA, 25 bp, Homo sapien
ggctgccctgtagttgctccctttt

SEQ ID NO: 1270570 - DNA, 25 bp, Homo sapien
aggctgccctgtagttgctcccttt

SEQ ID NO: 1270571 - DNA, 25 bp, Homo sapien
cctgagcggcagcccagacctgagc

SEQ ID NO: 1270572 - DNA, 25 bp, Homo sapien
gaggagctcggggtggatctgtgca

SEQ ID NO: 1270573 - DNA, 25 bp, Homo sapien
gagcggcagcccagacctgagccag

SEQ ID NO: 1270574 - DNA, 25 bp, Homo sapien
tcggggtggatctgtgcagggctca

SEQ ID NO: 1270575 - DNA, 25 bp, Homo sapien
ttccacagggttctaagaccacatg

SEQ ID NO: 1270576 - DNA, 25 bp, Homo sapien
ccacagggttctaagaccacatggg

SEQ ID NO: 1270577 - DNA, 25 bp, Homo sapien
cacatggggtaacatcagcagggaa

SEQ ID NO: 1270578 - DNA, 25 bp, Homo sapien
atcttccacagggttctaagaccac

SEQ ID NO: 1270579 - DNA, 25 bp, Homo sapien
gagacagcccttcactgtctggggt

SEQ ID NO: 1270580 - DNA, 25 bp, Homo sapien
agtgcatcccagctatcgtggcctc

SEQ ID NO: 1270581 - DNA, 25 bp, Homo sapien
cagctatcgtggcctctgcattcca

SEQ ID NO: 1270582 - DNA, 25 bp, Homo sapien
agcctgcggctgaccgctgctcagt

SEQ ID NO: 1270583 - DNA, 25 bp, Homo sapien
cacagagctgtttatctggaattat

SEQ ID NO: 1270584 - DNA, 25 bp, Homo sapien
cacgcggattccgtttgtgccactc

SEQ ID NO: 1270585 - DNA, 25 bp, Homo sapien
aataaaggctcacgtcggccacgcg

SEQ ID NO: 1270586 - DNA, 25 bp, Homo sapien
gaattattctaaataaaggctcacg

SEQ ID NO: 1270587 - DNA, 25 bp, Homo sapien
agggcagggtgcaaccctcgtagca

SEQ ID NO: 1270588 - DNA, 25 bp, Homo sapien
gtgcaaccctcgtagcaccgagcag

SEQ ID NO: 1270589 - DNA, 25 bp, Homo sapien
gcacagggcagggtgcaaccctcgt

SEQ ID NO: 1270590 - DNA, 25 bp, Homo sapien
ggtcagggggtccttggctacatct

SEQ ID NO: 1270591 - DNA, 25 bp, Homo sapien
acgtcctcagcttatgaaaatgacg

SEQ ID NO: 1270592 - DNA, 25 bp, Homo sapien
ttatgaaaatgacggaattaagagg

SEQ ID NO: 1270593 - DNA, 25 bp, Homo sapien
tcctcagcttatgaaaatgacggaa

SEQ ID NO: 1270594 - DNA, 25 bp, Homo sapien
cagcttatgaaaatgacggaattaa

SEQ ID NO: 1270595 - DNA, 25 bp, Homo sapien
catttcaaccccaataacgcagtac

SEQ ID NO: 1270596 - DNA, 25 bp, Homo sapien
gatcacgtcggcaaagactctgttt

SEQ ID NO: 1270597 - DNA, 25 bp, Homo sapien
gtcttaactcgatcacgtcggcaaa

SEQ ID NO: 1270598 - DNA, 25 bp, Homo sapien
ggacacatttcaaccccaataacgc

SEQ ID NO: 1270599 - DNA, 25 bp, Homo sapien
gatttactgcgtccaagcaggctca

SEQ ID NO: 1270600 - DNA, 25 bp, Homo sapien
gaacaagcgtttggcatcagctaca

SEQ ID NO: 1270601 - DNA, 25 bp, Homo sapien
gaaacaatgacccatggttgccggc

SEQ ID NO: 1270602 - DNA, 25 bp, Homo sapien
ccagttggagtggaccttggaccaa

SEQ ID NO: 1270603 - DNA, 25 bp, Homo sapien
caggtttcaaaaagcgtgtccggcg

SEQ ID NO: 1270604 - DNA, 25 bp, Homo sapien
tgtttaacaggattagcccagctca

SEQ ID NO: 1270605 - DNA, 25 bp, Homo sapien
ccggcgtcagatctgtgaattgttt

SEQ ID NO: 1270606 - DNA, 25 bp, Homo sapien
agctcaccagcagacggctgtcgct

SEQ ID NO: 1270607 - DNA, 25 bp, Homo sapien
agcctggactccacggaggcccgtc

SEQ ID NO: 1270608 - DNA, 25 bp, Homo sapien
cagcctggactccacggaggcccgt

SEQ ID NO: 1270609 - DNA, 25 bp, Homo sapien
gcagcctggactccacggaggcccg

SEQ ID NO: 1270610 - DNA, 25 bp, Homo sapien
ggactccacggaggcccgtctgcat

SEQ ID NO: 1270611 - DNA, 25 bp, Homo sapien
taaatccgaatctgctgaagagcct

SEQ ID NO: 1270612 - DNA, 25 bp, Homo sapien
catgagcggaagtcaatcgtgggct

SEQ ID NO: 1270613 - DNA, 25 bp, Homo sapien
tttgaagccacaagatccgcacatg

SEQ ID NO: 1270614 - DNA, 25 bp, Homo sapien
gaacctgccaaaggtctttgaagcc

SEQ ID NO: 1270615 - DNA, 25 bp, Homo sapien
gagcgacaaggggacggcaggaacc

SEQ ID NO: 1270616 - DNA, 25 bp, Homo sapien
gcgagcaagccctgcttccgaaggg

SEQ ID NO: 1270617 - DNA, 25 bp, Homo sapien
tggctgtggcgagcaagccctgctt

SEQ ID NO: 1270618 - DNA, 25 bp, Homo sapien
tcactggctgtggcgagcaagccct

SEQ ID NO: 1270619 - DNA, 25 bp, Homo sapien
agcacggggggccatcatgagcgag

SEQ ID NO: 1270620 - DNA, 25 bp, Homo sapien
gggggagcacggggggccatcatga

SEQ ID NO: 1270621 - DNA, 25 bp, Homo sapien
cacggggggccatcatgagcgaggt

SEQ ID NO: 1270622 - DNA, 25 bp, Homo sapien
ggggggccatcatgagcgaggtctc

SEQ ID NO: 1270623 - DNA, 25 bp, Homo sapien
gctccacgcccagcgctgcccacag

SEQ ID NO: 1270624 - DNA, 25 bp, Homo sapien
tccactgctaagccccagagtctgg

SEQ ID NO: 1270625 - DNA, 25 bp, Homo sapien
agagtctggtcgagccgctccacgc

SEQ ID NO: 1270626 - DNA, 25 bp, Homo sapien
taagccccagagtctggtcgagccg

SEQ ID NO: 1270627 - DNA, 25 bp, Homo sapien
tgagcacaacgtgtccagcaggaga

SEQ ID NO: 1270628 - DNA, 25 bp, Homo sapien
tatggctggcttgaatgaatctccc

SEQ ID NO: 1270629 - DNA, 25 bp, Homo sapien
caggagatgacgctctatggctggc

SEQ ID NO: 1270630 - DNA, 25 bp, Homo sapien
ggttggactctacctggcctcagca

SEQ ID NO: 1270631 - DNA, 25 bp, Homo sapien
gcgggagtccccgatttcagttctc

SEQ ID NO: 1270632 - DNA, 25 bp, Homo sapien
tctgctcggcttagaggttcaggcc

SEQ ID NO: 1270633 - DNA, 25 bp, Homo sapien
agttctcctggccaatgtcaaatgg

SEQ ID NO: 1270634 - DNA, 25 bp, Homo sapien
tgtcaaatggctcgagctgttcgct

SEQ ID NO: 1270635 - DNA, 25 bp, Homo sapien
agaaaagaccaagtgtaagcctcag

SEQ ID NO: 1270636 - DNA, 25 bp, Homo sapien
caaagggcagcggaaccttcaggaa

SEQ ID NO: 1270637 - DNA, 25 bp, Homo sapien
gcctaactctcgtgtgaaattgtaa

SEQ ID NO: 1270638 - DNA, 25 bp, Homo sapien
cattcaacttcacacctagtaagtg

SEQ ID NO: 1270639 - DNA, 25 bp, Homo sapien
gatgaatgggcaatcaaagctcctt

SEQ ID NO: 1270640 - DNA, 25 bp, Homo sapien
tgagtttagagcaatggaaggcagc

SEQ ID NO: 1270641 - DNA, 25 bp, Homo sapien
caaactccatgtgtggcaggcggac

SEQ ID NO: 1270642 - DNA, 25 bp, Homo sapien
gagccacgtggctacctaggagaag

SEQ ID NO: 1270643 - DNA, 25 bp, Homo sapien
aacagcgataacgagggtcccacat

SEQ ID NO: 1270644 - DNA, 25 bp, Homo sapien
tgcttcctcagccaagtgcacaggt

SEQ ID NO: 1270645 - DNA, 25 bp, Homo sapien
gtactacaaaatgaccagcgctcgg

SEQ ID NO: 1270646 - DNA, 25 bp, Homo sapien
ggtcccacatgcgtagatggcagca

SEQ ID NO: 1270647 - DNA, 25 bp, Homo sapien
aaatgcctcttcgtttttgtcctca

SEQ ID NO: 1270648 - DNA, 25 bp, Homo sapien
actctctgactaggcgcaaactgca

SEQ ID NO: 1270649 - DNA, 25 bp, Homo sapien
catggtcattgatgtagatcaggat

SEQ ID NO: 1270650 - DNA, 25 bp, Homo sapien
ggtagatgaccttcacgcaaaatgc

SEQ ID NO: 1270651 - DNA, 25 bp, Homo sapien
caactatgggatggtacctgtcacc

SEQ ID NO: 1270652 - DNA, 25 bp, Homo sapien
gactgctggtgatttgaggaactcg

SEQ ID NO: 1270653 - DNA, 25 bp, Homo sapien
cgcgttacttggactcgaaggcaca

SEQ ID NO: 1270654 - DNA, 25 bp, Homo sapien
gaaggcacacttatttccgagactg

SEQ ID NO: 1270655 - DNA, 25 bp, Homo sapien
agctccgggtggtcgctgtgcaggt

SEQ ID NO: 1270656 - DNA, 25 bp, Homo sapien
gcaggtggaatgtcctccgggaggg

SEQ ID NO: 1270657 - DNA, 25 bp, Homo sapien
gagtcctctctgaaccgcagcagct

SEQ ID NO: 1270658 - DNA, 25 bp, Homo sapien
tgacacccttcccttcgcccgcagc

SEQ ID NO: 1270659 - DNA, 25 bp, Homo sapien
ctgcagtgccctggtattgagcccc

SEQ ID NO: 1270660 - DNA, 25 bp, Homo sapien
gagataagacagacgctctctggag

SEQ ID NO: 1270661 - DNA, 25 bp, Homo sapien
tgagtctcctgtgcaccgtgcacgg

SEQ ID NO: 1270662 - DNA, 25 bp, Homo sapien
tgtatccagtggtccgagtcacagg

SEQ ID NO: 1270663 - DNA, 25 bp, Homo sapien
ggttgagatggacaaagcggctgcc

SEQ ID NO: 1270664 - DNA, 25 bp, Homo sapien
agatgagcggctggcggcagcagag

SEQ ID NO: 1270665 - DNA, 25 bp, Homo sapien
aggcggcagcacgaagacacctttg

SEQ ID NO: 1270666 - DNA, 25 bp, Homo sapien
gcaatccacgtccaccaggttgaga

SEQ ID NO: 1270667 - DNA, 25 bp, Homo sapien
cacaatggcacatctaacgaaaggc

SEQ ID NO: 1270668 - DNA, 25 bp, Homo sapien
caactgccgagaggcctctggtaac

SEQ ID NO: 1270669 - DNA, 25 bp, Homo sapien
tcacacggcgactattccctaagcg

SEQ ID NO: 1270670 - DNA, 25 bp, Homo sapien
caaccaaccctgacatgactgtggc

SEQ ID NO: 1270671 - DNA, 25 bp, Homo sapien
agacctgccacgtctgtgtgggtgt

SEQ ID NO: 1270672 - DNA, 25 bp, Homo sapien
ggacaagggacaggcgggtcagctg

SEQ ID NO: 1270673 - DNA, 25 bp, Homo sapien
ggatgagaggtgaaagctctcactt

SEQ ID NO: 1270674 - DNA, 25 bp, Homo sapien
cgcaggagacatccacgcgctgcag

SEQ ID NO: 1270675 - DNA, 25 bp, Homo sapien
gatgggcatttccaccacagtcctg

SEQ ID NO: 1270676 - DNA, 25 bp, Homo sapien
agaagcactgcaggaaatctccgag

SEQ ID NO: 1270677 - DNA, 25 bp, Homo sapien
tcacgaggaagccactctgagacgt

SEQ ID NO: 1270678 - DNA, 25 bp, Homo sapien
ggagggaccacagcttcattcatgc

SEQ ID NO: 1270679 - DNA, 25 bp, Homo sapien
ccttcagaaatatgtcccgtggttc

SEQ ID NO: 1270680 - DNA, 25 bp, Homo sapien
ttgatctccgggcttggaccactgg

SEQ ID NO: 1270681 - DNA, 25 bp, Homo sapien
tcagaaatatgtcccgtggttcccc

SEQ ID NO: 1270682 - DNA, 25 bp, Homo sapien
aaagaagtctttgatctccgggctt

SEQ ID NO: 1270683 - DNA, 25 bp, Homo sapien
ctgggtctcacagatgacgttcggg

SEQ ID NO: 1270684 - DNA, 25 bp, Homo sapien
tgggtctcacagatgacgttcgggt

SEQ ID NO: 1270685 - DNA, 25 bp, Homo sapien
gggtctcacagatgacgttcgggtc

SEQ ID NO: 1270686 - DNA, 25 bp, Homo sapien
ggtctcacagatgacgttcgggtcg

SEQ ID NO: 1270687 - DNA, 25 bp, Homo sapien
ggggggtcctcaccaagcattccca

SEQ ID NO: 1270688 - DNA, 25 bp, Homo sapien
tcaccaagcattcccaccggagcac

SEQ ID NO: 1270689 - DNA, 25 bp, Homo sapien
tcctcaccaagcattcccaccggag

SEQ ID NO: 1270690 - DNA, 25 bp, Homo sapien
gggtcctcaccaagcattcccaccg

SEQ ID NO: 1270691 - DNA, 25 bp, Homo sapien
tgtcaaaaagagtcttctccacagc

SEQ ID NO: 1270692 - DNA, 25 bp, Homo sapien
gaaatgtcaaaaagagtcttctcca

SEQ ID NO: 1270693 - DNA, 25 bp, Homo sapien
tcaaaaagagtcttctccacagccc

SEQ ID NO: 1270694 - DNA, 25 bp, Homo sapien
ctggagcaggggaaatgtcaaaaag

SEQ ID NO: 1270695 - DNA, 25 bp, Homo sapien
tataggacaggacaggctcgtcaca

SEQ ID NO: 1270696 - DNA, 25 bp, Homo sapien
ttttagaagggcagactcagccggc

SEQ ID NO: 1270697 - DNA, 25 bp, Homo sapien
ccgtttcaaaccataaaggcaggag

SEQ ID NO: 1270698 - DNA, 25 bp, Homo sapien
aaatgcgcacctagtcatctcagag

SEQ ID NO: 1270699 - DNA, 25 bp, Homo sapien
aacaggtgagcctgcaacatgtggg

SEQ ID NO: 1270700 - DNA, 25 bp, Homo sapien
tccaacaggtgagcctgcaacatgt

SEQ ID NO: 1270701 - DNA, 25 bp, Homo sapien
acaggtgagcctgcaacatgtgggc

SEQ ID NO: 1270702 - DNA, 25 bp, Homo sapien
caacaggtgagcctgcaacatgtgg

SEQ ID NO: 1270703 - DNA, 25 bp, Homo sapien
gaagacctggtccaccacgtggggc

SEQ ID NO: 1270704 - DNA, 25 bp, Homo sapien
agagcacggcgatgggcttgccacc

SEQ ID NO: 1270705 - DNA, 25 bp, Homo sapien
tccgggtgatagaagcggaagacct

SEQ ID NO: 1270706 - DNA, 25 bp, Homo sapien
ttcaggaaggagagctccgggtgat

SEQ ID NO: 1270707 - DNA, 25 bp, Homo sapien
tattcctcgcgagtacagcacactt

SEQ ID NO: 1270708 - DNA, 25 bp, Homo sapien
tcgggcatcgtcaaaggcagggact

SEQ ID NO: 1270709 - DNA, 25 bp, Homo sapien
ggtcaagcacgtcagcacaagctct

SEQ ID NO: 1270710 - DNA, 25 bp, Homo sapien
tgtgcatgtgcgcaagtcaggccag

SEQ ID NO: 1270711 - DNA, 25 bp, Homo sapien
tggcgtgtttagtgggcactgcgct

SEQ ID NO: 1270712 - DNA, 25 bp, Homo sapien
ggcgtgtttagtgggcactgcgctg

SEQ ID NO: 1270713 - DNA, 25 bp, Homo sapien
cgtgtttagtgggcactgcgctgga

SEQ ID NO: 1270714 - DNA, 25 bp, Homo sapien
cttggcgtgtttagtgggcactgcg

SEQ ID NO: 1270715 - DNA, 25 bp, Homo sapien
cttccaaggtgacacggcgtccatg

SEQ ID NO: 1270716 - DNA, 25 bp, Homo sapien
gcgtccatgcccttctcgttgctca

SEQ ID NO: 1270717 - DNA, 25 bp, Homo sapien
ttccaaggtgacacggcgtccatgc

SEQ ID NO: 1270718 - DNA, 25 bp, Homo sapien
tctcgttgctcaacccaggagaggc

SEQ ID NO: 1270719 - DNA, 25 bp, Homo sapien
aagcaacaccattaggcgaccagca

SEQ ID NO: 1270720 - DNA, 25 bp, Homo sapien
tgtgagtgagcctctagggacatct

SEQ ID NO: 1270721 - DNA, 25 bp, Homo sapien
cctgtgcttagagacaccactgcca

SEQ ID NO: 1270722 - DNA, 25 bp, Homo sapien
caggaaccgaacagcacaagcaggt

SEQ ID NO: 1270723 - DNA, 25 bp, Homo sapien
ccagctgccctgcagagaagctctg

SEQ ID NO: 1270724 - DNA, 25 bp, Homo sapien
ctgcaccatggccagctgccctgca

SEQ ID NO: 1270725 - DNA, 25 bp, Homo sapien
ctgccctgcagagaagctctggaac

SEQ ID NO: 1270726 - DNA, 25 bp, Homo sapien
gctgccctgcagagaagctctggaa

SEQ ID NO: 1270727 - DNA, 25 bp, Homo sapien
ccttgaagtccctccactcctgact

SEQ ID NO: 1270728 - DNA, 25 bp, Homo sapien
ctcgtgggggcgcaggtagagctgg

SEQ ID NO: 1270729 - DNA, 25 bp, Homo sapien
caggctgccacgcaggtggaacatg

SEQ ID NO: 1270730 - DNA, 25 bp, Homo sapien
tcctccaccggtgtgtgcaggccag

SEQ ID NO: 1270731 - DNA, 25 bp, Homo sapien
taggcggcgatgacctgtaggtccc

SEQ ID NO: 1270732 - DNA, 25 bp, Homo sapien
ctcggccttcgtgcgttcccggtag

SEQ ID NO: 1270733 - DNA, 25 bp, Homo sapien
tccacagtcaccgtgtgctgtgtgt

SEQ ID NO: 1270734 - DNA, 25 bp, Homo sapien
gctcagcaggctggcgatgctctcg

SEQ ID NO: 1270735 - DNA, 25 bp, Homo sapien
agcatccctgcctattcctgagaga

SEQ ID NO: 1270736 - DNA, 25 bp, Homo sapien
gaatggcctcaaaactatggtgaca

SEQ ID NO: 1270737 - DNA, 25 bp, Homo sapien
cccgcacggtggagaatcagaagtt

SEQ ID NO: 1270738 - DNA, 25 bp, Homo sapien
cgggcgctgggaaccttctgtctaa

SEQ ID NO: 1270739 - DNA, 25 bp, Homo sapien
aggagtggaacctctgacaggctgt

SEQ ID NO: 1270740 - DNA, 25 bp, Homo sapien
ttttcaggagtggaacctctgacag

SEQ ID NO: 1270741 - DNA, 25 bp, Homo sapien
tgttcctttgcagggggattggagc

SEQ ID NO: 1270742 - DNA, 25 bp, Homo sapien
tggggcctccatcagaatttcatcc

SEQ ID NO: 1270743 - DNA, 25 bp, Homo sapien
gccccatcagactgaactgagccta

SEQ ID NO: 1270744 - DNA, 25 bp, Homo sapien
gaggcgtctgcatccacctttgagc

SEQ ID NO: 1270745 - DNA, 25 bp, Homo sapien
actgaactgagcctagggagggacc

SEQ ID NO: 1270746 - DNA, 25 bp, Homo sapien
agcaccaacgccttgctggcaggga

SEQ ID NO: 1270747 - DNA, 25 bp, Homo sapien
tggctgaaaaagtccgattttctta

SEQ ID NO: 1270748 - DNA, 25 bp, Homo sapien
gaggcagggaaaggatgtgcacagt

SEQ ID NO: 1270749 - DNA, 25 bp, Homo sapien
ctccagataattctcacttaaagat

SEQ ID NO: 1270750 - DNA, 25 bp, Homo sapien
gagatcccaggacagtgacagctga

SEQ ID NO: 1270751 - DNA, 25 bp, Homo sapien
tccgactcgcggctgacgtcctggg

SEQ ID NO: 1270752 - DNA, 25 bp, Homo sapien
gccctgccgggcatgggtcagtagc

SEQ ID NO: 1270753 - DNA, 25 bp, Homo sapien
gcttctgtgcttgcaccacgtgttt

SEQ ID NO: 1270754 - DNA, 25 bp, Homo sapien
ccagcttacgcctgcgggtggcatc

SEQ ID NO: 1270755 - DNA, 25 bp, Homo sapien
gatgccccgcgtggctcttacaagt

SEQ ID NO: 1270756 - DNA, 25 bp, Homo sapien
ttttaacgccggcaaactgctctgc

SEQ ID NO: 1270757 - DNA, 25 bp, Homo sapien
catccaattttaacgccggcaaact

SEQ ID NO: 1270758 - DNA, 25 bp, Homo sapien
ggcacaggcctggtctgagctacct

SEQ ID NO: 1270759 - DNA, 25 bp, Homo sapien
tcttctgttcacaacatagggtact

SEQ ID NO: 1270760 - DNA, 25 bp, Homo sapien
ttcttctgttcacaacatagggtac

SEQ ID NO: 1270761 - DNA, 25 bp, Homo sapien
tcccaagctccataattggcttctt

SEQ ID NO: 1270762 - DNA, 25 bp, Homo sapien
ttctgttcacaacatagggtacttc

SEQ ID NO: 1270763 - DNA, 25 bp, Homo sapien
ttctccttcccttgcagatgagcag

SEQ ID NO: 1270764 - DNA, 25 bp, Homo sapien
tccttcccttgcagatgagcagcca

SEQ ID NO: 1270765 - DNA, 25 bp, Homo sapien
ccttcccttgcagatgagcagccaa

SEQ ID NO: 1270766 - DNA, 25 bp, Homo sapien
tctccttcccttgcagatgagcagc

SEQ ID NO: 1270767 - DNA, 25 bp, Homo sapien
ggtggcaatgtgctacaacctctca

SEQ ID NO: 1270768 - DNA, 25 bp, Homo sapien
tcgtttgagatgacccgagatctgg

SEQ ID NO: 1270769 - DNA, 25 bp, Homo sapien
aagcggctggctccatcgtttgaga

SEQ ID NO: 1270770 - DNA, 25 bp, Homo sapien
gcttccagtcgtgaggaggctgcct

SEQ ID NO: 1270771 - DNA, 25 bp, Homo sapien
taattccgacgaggcagtgttgagt

SEQ ID NO: 1270772 - DNA, 25 bp, Homo sapien
gccaacgaagctgtgtcccaaaatg

SEQ ID NO: 1270773 - DNA, 25 bp, Homo sapien
cgaatgaaagcgtgtggcactcaca

SEQ ID NO: 1270774 - DNA, 25 bp, Homo sapien
tttacacgtgcaaatgtctggctcc

SEQ ID NO: 1270775 - DNA, 25 bp, Homo sapien
acgcccacgtgcaggcacctgtgga

SEQ ID NO: 1270776 - DNA, 25 bp, Homo sapien
ggaggtgagccatatcctccgtcca

SEQ ID NO: 1270777 - DNA, 25 bp, Homo sapien
aggtgagccatatcctccgtccaac

SEQ ID NO: 1270778 - DNA, 25 bp, Homo sapien
cagtgctgggagcacgcccacgtgc

SEQ ID NO: 1270779 - DNA, 25 bp, Homo sapien
tactgtctgcgcacgagcacaaatg

SEQ ID NO: 1270780 - DNA, 25 bp, Homo sapien
aaatgcagaattccctggctcagcg

SEQ ID NO: 1270781 - DNA, 25 bp, Homo sapien
gctggcgacaccaaagacattggcg

SEQ ID NO: 1270782 - DNA, 25 bp, Homo sapien
gagcttcacttcacagacagatgga

SEQ ID NO: 1270783 - DNA, 25 bp, Homo sapien
ggccaggttctgacggccacgctca

SEQ ID NO: 1270784 - DNA, 25 bp, Homo sapien
acagccgtcactgcgaaggatggga

SEQ ID NO: 1270785 - DNA, 25 bp, Homo sapien
acgctcacagccgtcactgcgaagg

SEQ ID NO: 1270786 - DNA, 25 bp, Homo sapien
gtgctgagaattcggccctcaaggc

SEQ ID NO: 1270787 - DNA, 25 bp, Homo sapien
gaacaagggctatttcggtcctctc

SEQ ID NO: 1270788 - DNA, 25 bp, Homo sapien
tcctgggaacgagcacctagaacaa

SEQ ID NO: 1270789 - DNA, 25 bp, Homo sapien
tgctgtgcagcaggacagccgtgct

SEQ ID NO: 1270790 - DNA, 25 bp, Homo sapien
cgttcttgccaatgtcccagtagct

SEQ ID NO: 1270791 - DNA, 25 bp, Homo sapien
ccttccatgaaacaggttacacccg

SEQ ID NO: 1270792 - DNA, 25 bp, Homo sapien
aaacacacagggctcccgatgcagc

SEQ ID NO: 1270793 - DNA, 25 bp, Homo sapien
tacacccgcaccaacacgtttgctg

SEQ ID NO: 1270794 - DNA, 25 bp, Homo sapien
tggatgttaaattagtgcaggcttt

SEQ ID NO: 1270795 - DNA, 25 bp, Homo sapien
tgccagcgtcgggtggatgtggccc

SEQ ID NO: 1270796 - DNA, 25 bp, Homo sapien
ctctggggtttacaatcaggctggg

SEQ ID NO: 1270797 - DNA, 25 bp, Homo sapien
ggtttacaatcaggctgggttctaa

SEQ ID NO: 1270798 - DNA, 25 bp, Homo sapien
ctctgcgctgccagcgtcgggtgga

SEQ ID NO: 1270799 - DNA, 25 bp, Homo sapien
cagtcctggacgtggagtgaagtcc

SEQ ID NO: 1270800 - DNA, 25 bp, Homo sapien
aggccctctaacgagcaatcccggg

SEQ ID NO: 1270801 - DNA, 25 bp, Homo sapien
tatcccagcataggcctcagtcgaa

SEQ ID NO: 1270802 - DNA, 25 bp, Homo sapien
tgctgggccgagaagaaatgcgcct

SEQ ID NO: 1270803 - DNA, 25 bp, Homo sapien
tattcagttgccacgacctcaagct

SEQ ID NO: 1270804 - DNA, 25 bp, Homo sapien
accatgttgtcctgctcgtattcag

SEQ ID NO: 1270805 - DNA, 25 bp, Homo sapien
ttcaccaccgagtggacgccgatgg

SEQ ID NO: 1270806 - DNA, 25 bp, Homo sapien
acgccgatgggcttgacgcggccaa

SEQ ID NO: 1270807 - DNA, 25 bp, Homo sapien
gacatcgatgattccggaacctcag

SEQ ID NO: 1270808 - DNA, 25 bp, Homo sapien
tacactgcatacgatcactgcatag

SEQ ID NO: 1270809 - DNA, 25 bp, Homo sapien
tttgccacactcgtctacactgcat

SEQ ID NO: 1270810 - DNA, 25 bp, Homo sapien
ggtcgccgcagaccctggtcgcttt

SEQ ID NO: 1270811 - DNA, 25 bp, Homo sapien
gtagcgggcaaagcagcgccgctca

SEQ ID NO: 1270812 - DNA, 25 bp, Homo sapien
gggagtctccgtcccagacgtcaat

SEQ ID NO: 1270813 - DNA, 25 bp, Homo sapien
acggcagcagatccgatgagcagca

SEQ ID NO: 1270814 - DNA, 25 bp, Homo sapien
agacgtcaatctgcagggtctgcac

SEQ ID NO: 1270815 - DNA, 25 bp, Homo sapien
gctcttcctggtgaaaggttttgaa

SEQ ID NO: 1270816 - DNA, 25 bp, Homo sapien
agaatcaaagcaccccatatcctga

SEQ ID NO: 1270817 - DNA, 25 bp, Homo sapien
gttttgaagcaagaagacccagaat

SEQ ID NO: 1270818 - DNA, 25 bp, Homo sapien
gcaagaagacccagaatcaaagcac

SEQ ID NO: 1270819 - DNA, 25 bp, Homo sapien
cggaagcttcagttcagtaggacca

SEQ ID NO: 1270820 - DNA, 25 bp, Homo sapien
tgccgctctctgagtggatcttcct

SEQ ID NO: 1270821 - DNA, 25 bp, Homo sapien
gggcagacagccacgcctcagatgc

SEQ ID NO: 1270822 - DNA, 25 bp, Homo sapien
ctgatcgggacatggcaaaggcctg

SEQ ID NO: 1270823 - DNA, 25 bp, Homo sapien
ctcacaggcacgaggatgtgggtca

SEQ ID NO: 1270824 - DNA, 25 bp, Homo sapien
aactggaaggtgaaatacacagtct

SEQ ID NO: 1270825 - DNA, 25 bp, Homo sapien
ggctggccggcctcatccagctgga

SEQ ID NO: 1270826 - DNA, 25 bp, Homo sapien
catgatgttcctcggcagtcctggg

SEQ ID NO: 1270827 - DNA, 25 bp, Homo sapien
tgcaggagcaccatggaggctctcg

SEQ ID NO: 1270828 - DNA, 25 bp, Homo sapien
tttattggcatccagaatctcggga

SEQ ID NO: 1270829 - DNA, 25 bp, Homo sapien
aatctcgggaaagccggaggactgc

SEQ ID NO: 1270830 - DNA, 25 bp, Homo sapien
tccttctgagggttaaacgtcacag

SEQ ID NO: 1270831 - DNA, 25 bp, Homo sapien
cgtgaacggcagctcctgtaactgt

SEQ ID NO: 1270832 - DNA, 25 bp, Homo sapien
actgttcggcaatggatgtttccag

SEQ ID NO: 1270833 - DNA, 25 bp, Homo sapien
caacaataggggcatgcaaaggcgt

SEQ ID NO: 1270834 - DNA, 25 bp, Homo sapien
gtttccaggaccagggaggtctggc

SEQ ID NO: 1270835 - DNA, 25 bp, Homo sapien
catggggtagctgtgaagtaggcct

SEQ ID NO: 1270836 - DNA, 25 bp, Homo sapien
tgctgagtcggggaccgcggggagg

SEQ ID NO: 1270837 - DNA, 25 bp, Homo sapien
taggcctggccaagcagtgctgagt

SEQ ID NO: 1270838 - DNA, 25 bp, Homo sapien
gtaggcctggccaagcagtgctgag

SEQ ID NO: 1270839 - DNA, 25 bp, Homo sapien
ctatacggtatcgtgaccactcggg

SEQ ID NO: 1270840 - DNA, 25 bp, Homo sapien
gtccacagacttgcgcctttaggtg

SEQ ID NO: 1270841 - DNA, 25 bp, Homo sapien
aaaatgccaggttgggccagcaggg

SEQ ID NO: 1270842 - DNA, 25 bp, Homo sapien
cctttaggtgaatccagtattcttc

SEQ ID NO: 1270843 - DNA, 25 bp, Homo sapien
ccaggcaccgctactggtggagtta

SEQ ID NO: 1270844 - DNA, 25 bp, Homo sapien
accagcatcggctgcttggccgaca

SEQ ID NO: 1270845 - DNA, 25 bp, Homo sapien
gccagcagcttgtggttctcagcag

SEQ ID NO: 1270846 - DNA, 25 bp, Homo sapien
gatctgtgcggtcggacgtgcaact

SEQ ID NO: 1270847 - DNA, 25 bp, Homo sapien
gggtgaggaccacacctcgatgtct

SEQ ID NO: 1270848 - DNA, 25 bp, Homo sapien
gagagttgccaccatgagatgcagc

SEQ ID NO: 1270849 - DNA, 25 bp, Homo sapien
agacgccccatacagcagcataggg

SEQ ID NO: 1270850 - DNA, 25 bp, Homo sapien
gcaaaggccgtccagtcctgagagt

SEQ ID NO: 1270851 - DNA, 25 bp, Homo sapien
gggcagcgagaactcgaggtactgg

SEQ ID NO: 1270852 - DNA, 25 bp, Homo sapien
tcccacaggtgagttctgcggggca

SEQ ID NO: 1270853 - DNA, 25 bp, Homo sapien
actcgaggtactggcgctggcgggc

SEQ ID NO: 1270854 - DNA, 25 bp, Homo sapien
agcgagaactcgaggtactggcgct

SEQ ID NO: 1270855 - DNA, 25 bp, Homo sapien
agggagcacccgctgtactccaggc

SEQ ID NO: 1270856 - DNA, 25 bp, Homo sapien
acttccgccacataacaggacttgg

SEQ ID NO: 1270857 - DNA, 25 bp, Homo sapien
ctatactcatagtcctgcccagagg

SEQ ID NO: 1270858 - DNA, 25 bp, Homo sapien
taatgttcgatgtggttatgggtta

SEQ ID NO: 1270859 - DNA, 25 bp, Homo sapien
gaaccgggagcagcatgcgtgtgca

SEQ ID NO: 1270860 - DNA, 25 bp, Homo sapien
ctgggccagcaactgaaccgggagc

SEQ ID NO: 1270861 - DNA, 25 bp, Homo sapien
tgggccagcaactgaaccgggagca

SEQ ID NO: 1270862 - DNA, 25 bp, Homo sapien
ggccagcaactgaaccgggagcagc

SEQ ID NO: 1270863 - DNA, 25 bp, Homo sapien
cggtgagcagacagacgagcacaag

SEQ ID NO: 1270864 - DNA, 25 bp, Homo sapien
acagacgagcacaaggctgtctggg

SEQ ID NO: 1270865 - DNA, 25 bp, Homo sapien
tgagcagacagacgagcacaaggct

SEQ ID NO: 1270866 - DNA, 25 bp, Homo sapien
gcagacagacgagcacaaggctgtc

SEQ ID NO: 1270867 - DNA, 25 bp, Homo sapien
agacctccacggcaagcagcatgac

SEQ ID NO: 1270868 - DNA, 25 bp, Homo sapien
tgagacctccacggcaagcagcatg

SEQ ID NO: 1270869 - DNA, 25 bp, Homo sapien
gaagtagtaacacagtcagcacaga

SEQ ID NO: 1270870 - DNA, 25 bp, Homo sapien
gtaacacagtcagcacagaatggaa

SEQ ID NO: 1270871 - DNA, 25 bp, Homo sapien
tcactgccaacgtcttcacactgcc

SEQ ID NO: 1270872 - DNA, 25 bp, Homo sapien
ctggtcactgccaacgtcttcacac

SEQ ID NO: 1270873 - DNA, 25 bp, Homo sapien
actgccaacgtcttcacactgcctc

SEQ ID NO: 1270874 - DNA, 25 bp, Homo sapien
ggtcactgccaacgtcttcacactg

SEQ ID NO: 1270875 - DNA, 25 bp, Homo sapien
gtggtttcctggaaggccgccgctc

SEQ ID NO: 1270876 - DNA, 25 bp, Homo sapien
cctggaaggccgccgctccactttg

SEQ ID NO: 1270877 - DNA, 25 bp, Homo sapien
gaaggccgccgctccactttggggc

SEQ ID NO: 1270878 - DNA, 25 bp, Homo sapien
gtttcctggaaggccgccgctccac

SEQ ID NO: 1270879 - DNA, 25 bp, Homo sapien
tccgtgggtgcatccaggtgttctt

SEQ ID NO: 1270880 - DNA, 25 bp, Homo sapien
ctgagcccagcgagaactggaaccg

SEQ ID NO: 1270881 - DNA, 25 bp, Homo sapien
ggagtgtacccgactccacctgctt

SEQ ID NO: 1270882 - DNA, 25 bp, Homo sapien
ccagcgagaactggaaccggagtgt

SEQ ID NO: 1270883 - DNA, 25 bp, Homo sapien
ttccaaacagcccagcggaccatgt

SEQ ID NO: 1270884 - DNA, 25 bp, Homo sapien
gcagggtcacccttccagaatcagc

SEQ ID NO: 1270885 - DNA, 25 bp, Homo sapien
taccttgtagaccagacagtgcgag

SEQ ID NO: 1270886 - DNA, 25 bp, Homo sapien
catgtgcatgcatgccaggttggac

SEQ ID NO: 1270887 - DNA, 25 bp, Homo sapien
cagggacagggctgacccctcgcag

SEQ ID NO: 1270888 - DNA, 25 bp, Homo sapien
agggctgacccctcgcaggcaccat

SEQ ID NO: 1270889 - DNA, 25 bp, Homo sapien
cctcgcaggcaccatccaccctgtg

SEQ ID NO: 1270890 - DNA, 25 bp, Homo sapien
gctgacccctcgcaggcaccatcca

SEQ ID NO: 1270891 - DNA, 25 bp, Homo sapien
atgaagcggccaccatcgaaaccac

SEQ ID NO: 1270892 - DNA, 25 bp, Homo sapien
agacgcccatgaagcggccaccatc

SEQ ID NO: 1270893 - DNA, 25 bp, Homo sapien
acccgcaccccagacgcccatgaag

SEQ ID NO: 1270894 - DNA, 25 bp, Homo sapien
accccagacgcccatgaagcggcca

SEQ ID NO: 1270895 - DNA, 25 bp, Homo sapien
ccaccagaggaaaccgagtgcaaaa

SEQ ID NO: 1270896 - DNA, 25 bp, Homo sapien
aggaaaccgagtgcaaaagggctgt

SEQ ID NO: 1270897 - DNA, 25 bp, Homo sapien
cagaggaaaccgagtgcaaaagggc

SEQ ID NO: 1270898 - DNA, 25 bp, Homo sapien
gaaaccgagtgcaaaagggctgttc

SEQ ID NO: 1270899 - DNA, 25 bp, Homo sapien
ggctgctgaacacgtactccagctg

SEQ ID NO: 1270900 - DNA, 25 bp, Homo sapien
tgaacacgtactccagctggaagat

SEQ ID NO: 1270901 - DNA, 25 bp, Homo sapien
ggcggaggcggcttctcaaaaccag

SEQ ID NO: 1270902 - DNA, 25 bp, Homo sapien
aagatgaccgcaaatgcagggtggc

SEQ ID NO: 1270903 - DNA, 25 bp, Homo sapien
tcttggaagaggagaccactttcct

SEQ ID NO: 1270904 - DNA, 25 bp, Homo sapien
acgaagcccagaccattgtgcacgc

SEQ ID NO: 1270905 - DNA, 25 bp, Homo sapien
tccatctcaggcaccagtacaacga

SEQ ID NO: 1270906 - DNA, 25 bp, Homo sapien
tgaagctagctgagcgcgtcaaggc

SEQ ID NO: 1270907 - DNA, 25 bp, Homo sapien
cagcaagatgttacccacaccagtc

SEQ ID NO: 1270908 - DNA, 25 bp, Homo sapien
cgcttctgcgggactcatcacgaaa

SEQ ID NO: 1270909 - DNA, 25 bp, Homo sapien
tgacgtgaagaggactcgacgcaac

SEQ ID NO: 1270910 - DNA, 25 bp, Homo sapien
ctcatcacgaaaagggtgtgacgtg

SEQ ID NO: 1270911 - DNA, 25 bp, Homo sapien
catccaagtgccccgtgatgggctt

SEQ ID NO: 1270912 - DNA, 25 bp, Homo sapien
gcttctggaggcgaggctttcggag

SEQ ID NO: 1270913 - DNA, 25 bp, Homo sapien
gggtgaagaataagtcatccaagtg

SEQ ID NO: 1270914 - DNA, 25 bp, Homo sapien
aagtggtcctggacgtggagctcca

SEQ ID NO: 1270915 - DNA, 25 bp, Homo sapien
ggcaccacgagaaaagggtcccatc

SEQ ID NO: 1270916 - DNA, 25 bp, Homo sapien
aaaatacagcctgaacggcaccacg

SEQ ID NO: 1270917 - DNA, 25 bp, Homo sapien
acggtctcgtgcaaagcaggcccat

SEQ ID NO: 1270918 - DNA, 25 bp, Homo sapien
aaacacactgagcaggcatgagcct

SEQ ID NO: 1270919 - DNA, 25 bp, Homo sapien
tgaggtaacactccatgctgatgaa

SEQ ID NO: 1270920 - DNA, 25 bp, Homo sapien
aaagagcactctactatcctgctga

SEQ ID NO: 1270921 - DNA, 25 bp, Homo sapien
gatgaaactgccgtcaaaagagcac

SEQ ID NO: 1270922 - DNA, 25 bp, Homo sapien
ttatgagtcagtatcgcctttgcct

SEQ ID NO: 1270923 - DNA, 25 bp, Homo sapien
caggccaggtatctgctgcagacca

SEQ ID NO: 1270924 - DNA, 25 bp, Homo sapien
tccagggccgggtgtggcttcagcg

SEQ ID NO: 1270925 - DNA, 25 bp, Homo sapien
gaccagacaccagaaggttctcagg

SEQ ID NO: 1270926 - DNA, 25 bp, Homo sapien
ggattctccatgagctggaagcagg

SEQ ID NO: 1270927 - DNA, 25 bp, Homo sapien
tgatggctaagaccaaacacgtgga

SEQ ID NO: 1270928 - DNA, 25 bp, Homo sapien
cataacgcacgggagaactggatcc

SEQ ID NO: 1270929 - DNA, 25 bp, Homo sapien
tgcagtttccccaggtctcgctggt

SEQ ID NO: 1270930 - DNA, 25 bp, Homo sapien
tgtcctcagggaggagccactttcc

SEQ ID NO: 1270931 - DNA, 25 bp, Homo sapien
ctggagaagcgggtgcaggagggct

SEQ ID NO: 1270932 - DNA, 25 bp, Homo sapien
tctgggggtgccatggtacagccgc

SEQ ID NO: 1270933 - DNA, 25 bp, Homo sapien
gggggtgccatggtacagccgcaac

SEQ ID NO: 1270934 - DNA, 25 bp, Homo sapien
ctgggggtgccatggtacagccgca

SEQ ID NO: 1270935 - DNA, 25 bp, Homo sapien
gcagagataggagagtccggctggt

SEQ ID NO: 1270936 - DNA, 25 bp, Homo sapien
ggctggttgctgaagatccgaagaa

SEQ ID NO: 1270937 - DNA, 25 bp, Homo sapien
gttgctgaagatccgaagaattcca

SEQ ID NO: 1270938 - DNA, 25 bp, Homo sapien
gagataggagagtccggctggttgc

SEQ ID NO: 1270939 - DNA, 25 bp, Homo sapien
tttcttgccctcagcgaccacttcc

SEQ ID NO: 1270940 - DNA, 25 bp, Homo sapien
ttagggatgtgtgaaaatacaaggg

SEQ ID NO: 1270941 - DNA, 25 bp, Homo sapien
caccacagccacgatatgagggtgg

SEQ ID NO: 1270942 - DNA, 25 bp, Homo sapien
tggaggctcccatcccgtttcttgc

SEQ ID NO: 1270943 - DNA, 25 bp, Homo sapien
aactccccccactcgagttcagctg

SEQ ID NO: 1270944 - DNA, 25 bp, Homo sapien
tcaaactccccccactcgagttcag

SEQ ID NO: 1270945 - DNA, 25 bp, Homo sapien
ccctctcaaactccccccactcgag

SEQ ID NO: 1270946 - DNA, 25 bp, Homo sapien
ccccccactcgagttcagctgtgaa

SEQ ID NO: 1270947 - DNA, 25 bp, Homo sapien
gcttgtcacggagtcagtttctttc

SEQ ID NO: 1270948 - DNA, 25 bp, Homo sapien
tgtaagtcccagcttaatcagcagc

SEQ ID NO: 1270949 - DNA, 25 bp, Homo sapien
ctaagaagaccctgtaggacccagc

SEQ ID NO: 1270950 - DNA, 25 bp, Homo sapien
tgttaagagtcaaacgtcagcgtcc

SEQ ID NO: 1270951 - DNA, 25 bp, Homo sapien
cagcccctgccaccatcaccagggc

SEQ ID NO: 1270952 - DNA, 25 bp, Homo sapien
gcccctgccaccatcaccagggccc

SEQ ID NO: 1270953 - DNA, 25 bp, Homo sapien
ccctgccaccatcaccagggcccac

SEQ ID NO: 1270954 - DNA, 25 bp, Homo sapien
cctccgccttggagcagcccctgcc

SEQ ID NO: 1270955 - DNA, 25 bp, Homo sapien
ggcggtctcttcgtcggcttcactg

SEQ ID NO: 1270956 - DNA, 25 bp, Homo sapien
cctcccaaagaagtgccggtaggtg

SEQ ID NO: 1270957 - DNA, 25 bp, Homo sapien
tcattaaagacgatcctggacggcg

SEQ ID NO: 1270958 - DNA, 25 bp, Homo sapien
tcaaagaaagacactcgcagatggc

SEQ ID NO: 1270959 - DNA, 25 bp, Homo sapien
tgacatttcgatcagcaacagactg

SEQ ID NO: 1270960 - DNA, 25 bp, Homo sapien
gtttacgtaagtacatcctatgatg

SEQ ID NO: 1270961 - DNA, 25 bp, Homo sapien
caggctctaccctctaggtttacgt

SEQ ID NO: 1270962 - DNA, 25 bp, Homo sapien
tatgactggccccttaagattgtaa

SEQ ID NO: 1270963 - DNA, 25 bp, Homo sapien
cattgctggaggaatcaaacgcatc

SEQ ID NO: 1270964 - DNA, 25 bp, Homo sapien
cacctaactggtaagaggagctcac

SEQ ID NO: 1270965 - DNA, 25 bp, Homo sapien
taaacacgtgtttcccttctgagag

SEQ ID NO: 1270966 - DNA, 25 bp, Homo sapien
tctggaattttggacatgctacaca

SEQ ID NO: 1270967 - DNA, 25 bp, Homo sapien
tccccgccagctgaagggcacagat

SEQ ID NO: 1270968 - DNA, 25 bp, Homo sapien
gatggatgtgccgccatcagggcct

SEQ ID NO: 1270969 - DNA, 25 bp, Homo sapien
aatccaatcgtgtgggtgtcccgtg

SEQ ID NO: 1270970 - DNA, 25 bp, Homo sapien
gccactgggcctcacgaggacaatc

SEQ ID NO: 1270971 - DNA, 25 bp, Homo sapien
aattaccggtccgtccagccacttg

SEQ ID NO: 1270972 - DNA, 25 bp, Homo sapien
cactggaatgccgtggattccttcc

SEQ ID NO: 1270973 - DNA, 25 bp, Homo sapien
ttaccggtccgtccagccacttgag

SEQ ID NO: 1270974 - DNA, 25 bp, Homo sapien
aggacacactggaatgccgtggatt

SEQ ID NO: 1270975 - DNA, 25 bp, Homo sapien
cacgttttgggtgaagatcctgtgc

SEQ ID NO: 1270976 - DNA, 25 bp, Homo sapien
caagcacgttttgggtgaagatcct

SEQ ID NO: 1270977 - DNA, 25 bp, Homo sapien
ggagggacaagcacgttttgggtga

SEQ ID NO: 1270978 - DNA, 25 bp, Homo sapien
ttttgggtgaagatcctgtgccagt

SEQ ID NO: 1270979 - DNA, 25 bp, Homo sapien
cctgcccgcctgagggtcccgtggg

SEQ ID NO: 1270980 - DNA, 25 bp, Homo sapien
ctgcccgcctgagggtcccgtgggc

SEQ ID NO: 1270981 - DNA, 25 bp, Homo sapien
tgcccgcctgagggtcccgtgggct

SEQ ID NO: 1270982 - DNA, 25 bp, Homo sapien
gtagtcctgcgagactgtgagctcc

SEQ ID NO: 1270983 - DNA, 25 bp, Homo sapien
cttttaaggatgaaatacaaatgcc

SEQ ID NO: 1270984 - DNA, 25 bp, Homo sapien
agaagagccaccacgcttcaccagg

SEQ ID NO: 1270985 - DNA, 25 bp, Homo sapien
ggctgtgctgtagtcctgcgagact

SEQ ID NO: 1270986 - DNA, 25 bp, Homo sapien
gggagcagcctgcacgcgtggggaa

SEQ ID NO: 1270987 - DNA, 25 bp, Homo sapien
atctcgggcagcgaggtgcctgcaa

SEQ ID NO: 1270988 - DNA, 25 bp, Homo sapien
ggaagggcacgcgggagcgggtggc

SEQ ID NO: 1270989 - DNA, 25 bp, Homo sapien
agcctgcacgcgtggggaagggcac

SEQ ID NO: 1270990 - DNA, 25 bp, Homo sapien
ctcgcagggacgcccgaaggccgca

SEQ ID NO: 1270991 - DNA, 25 bp, Homo sapien
cgggtacaaagcctcgcagggacgc

SEQ ID NO: 1270992 - DNA, 25 bp, Homo sapien
tcgcagggacgcccgaaggccgcag

SEQ ID NO: 1270993 - DNA, 25 bp, Homo sapien
gggtacaaagcctcgcagggacgcc

SEQ ID NO: 1270994 - DNA, 25 bp, Homo sapien
ggcagaaaggaacccacgtagccaa

SEQ ID NO: 1270995 - DNA, 25 bp, Homo sapien
ggatgcgcgcggactagggcgcggg

SEQ ID NO: 1270996 - DNA, 25 bp, Homo sapien
cggactccggcctgggaaggatgcg

SEQ ID NO: 1270997 - DNA, 25 bp, Homo sapien
ggagccaaggcccagaacatcggta

SEQ ID NO: 1270998 - DNA, 25 bp, Homo sapien
gtgctcaacggagccacaagcctga

SEQ ID NO: 1270999 - DNA, 25 bp, Homo sapien
gagcccacgcttttcagagagtctc

SEQ ID NO: 1271000 - DNA, 25 bp, Homo sapien
agtctccactcgacggacccagagg

SEQ ID NO: 1271001 - DNA, 25 bp, Homo sapien
acaagcctgaggaccgaggactggc

SEQ ID NO: 1271002 - DNA, 25 bp, Homo sapien
ctgctgctcccaggatgcaaagacc

SEQ ID NO: 1271003 - DNA, 25 bp, Homo sapien
ctcccaggatgcaaagaccccactg

SEQ ID NO: 1271004 - DNA, 25 bp, Homo sapien
tgctgctcccaggatgcaaagaccc

SEQ ID NO: 1271005 - DNA, 25 bp, Homo sapien
ctgctcccaggatgcaaagacccca

SEQ ID NO: 1271006 - DNA, 25 bp, Homo sapien
cttgcttcctgtcgtgatagggacc

SEQ ID NO: 1271007 - DNA, 25 bp, Homo sapien
ttcttgcttcctgtcgtgataggga

SEQ ID NO: 1271008 - DNA, 25 bp, Homo sapien
gcttcctgtcgtgatagggacctgg

SEQ ID NO: 1271009 - DNA, 25 bp, Homo sapien
atagggacctggctacggagctgaa

SEQ ID NO: 1271010 - DNA, 25 bp, Homo sapien
caaatgctttgtaggtgctagtcaa

SEQ ID NO: 1271011 - DNA, 25 bp, Homo sapien
catccctcgagagcagcatggtagg

SEQ ID NO: 1271012 - DNA, 25 bp, Homo sapien
gggccctaagagtgcacttggtcct

SEQ ID NO: 1271013 - DNA, 25 bp, Homo sapien
gaaccgtcttgggtctggatttgga

SEQ ID NO: 1271014 - DNA, 25 bp, Homo sapien
cataggttggctgcgtagtgcttta

SEQ ID NO: 1271015 - DNA, 25 bp, Homo sapien
tggtgacctttggactttgccgcca

SEQ ID NO: 1271016 - DNA, 25 bp, Homo sapien
ctttagagacgatttcaacggcgca

SEQ ID NO: 1271017 - DNA, 25 bp, Homo sapien
gctctggagagatttgaccgtgaaa

SEQ ID NO: 1271018 - DNA, 25 bp, Homo sapien
gactctggacgacgctgacagcagt

SEQ ID NO: 1271019 - DNA, 25 bp, Homo sapien
actctggacgacgctgacagcagtg

SEQ ID NO: 1271020 - DNA, 25 bp, Homo sapien
ccgactctggacgacgctgacagca

SEQ ID NO: 1271021 - DNA, 25 bp, Homo sapien
tgtcaaggactctgccgtcactgtt

SEQ ID NO: 1271022 - DNA, 25 bp, Homo sapien
ccactcgctcgctcggctgccttca

SEQ ID NO: 1271023 - DNA, 25 bp, Homo sapien
gtcagaggcagggtccgtgtggtgt

SEQ ID NO: 1271024 - DNA, 25 bp, Homo sapien
tcgctcgctcggctgccttcagccc

SEQ ID NO: 1271025 - DNA, 25 bp, Homo sapien
agacacgcaggcaccgtccaccttc

SEQ ID NO: 1271026 - DNA, 25 bp, Homo sapien
tagactcaggcccacaaggatgggc

SEQ ID NO: 1271027 - DNA, 25 bp, Homo sapien
taccgtgaccaggagtatgcatgga

SEQ ID NO: 1271028 - DNA, 25 bp, Homo sapien
tacaggccgtctgacttcagtgaga

SEQ ID NO: 1271029 - DNA, 25 bp, Homo sapien
catggagacagtgccgagctccgta

SEQ ID NO: 1271030 - DNA, 25 bp, Homo sapien
ctcgtgagattcagcatctgcagct

SEQ ID NO: 1271031 - DNA, 25 bp, Homo sapien
tgcagctgtggtctgtgatagccgt

SEQ ID NO: 1271032 - DNA, 25 bp, Homo sapien
ctctgctcgtgagattcagcatctg

SEQ ID NO: 1271033 - DNA, 25 bp, Homo sapien
agctgtggtctgtgatagccgtgaa

SEQ ID NO: 1271034 - DNA, 25 bp, Homo sapien
ggcacacagccgatcccggcacact

SEQ ID NO: 1271035 - DNA, 25 bp, Homo sapien
cacacagccgatcccggcacactgc

SEQ ID NO: 1271036 - DNA, 25 bp, Homo sapien
cacactgctggcagcagtgagggga

SEQ ID NO: 1271037 - DNA, 25 bp, Homo sapien
ccggcacactgctggcagcagtgag

SEQ ID NO: 1271038 - DNA, 25 bp, Homo sapien
agcggccctgcacggcaccgtagtt

SEQ ID NO: 1271039 - DNA, 25 bp, Homo sapien
tgcacggcaccgtagtttccacctg

SEQ ID NO: 1271040 - DNA, 25 bp, Homo sapien
gcaccgtagtttccacctgtggtca

SEQ ID NO: 1271041 - DNA, 25 bp, Homo sapien
gtgagcggccctgcacggcaccgta

SEQ ID NO: 1271042 - DNA, 25 bp, Homo sapien
ggccactgtccccatcgtattagag

SEQ ID NO: 1271043 - DNA, 25 bp, Homo sapien
gagtccatcgttggtgttgctccac

SEQ ID NO: 1271044 - DNA, 25 bp, Homo sapien
cacagaaagcctaagcgccacaagt

SEQ ID NO: 1271045 - DNA, 25 bp, Homo sapien
gattcggaatttggatgcagccaca

SEQ ID NO: 1271046 - DNA, 25 bp, Homo sapien
ggagtcacacccagacctggggcca

SEQ ID NO: 1271047 - DNA, 25 bp, Homo sapien
tgccttcatgcagatggcacagatg

SEQ ID NO: 1271048 - DNA, 25 bp, Homo sapien
gggccagagccatccctgcacctct

SEQ ID NO: 1271049 - DNA, 25 bp, Homo sapien
caggaagcagctgtggtcagtgact

SEQ ID NO: 1271050 - DNA, 25 bp, Homo sapien
cagtcgctcctgattggacagtggt

SEQ ID NO: 1271051 - DNA, 25 bp, Homo sapien
tcccctttaggatgttggctccaca

SEQ ID NO: 1271052 - DNA, 25 bp, Homo sapien
gacagtggtgtctgcagctcgacaa

SEQ ID NO: 1271053 - DNA, 25 bp, Homo sapien
ctcgacaaggtggactctgggccag

SEQ ID NO: 1271054 - DNA, 25 bp, Homo sapien
tcttccgaggaagccggcttcctgg

SEQ ID NO: 1271055 - DNA, 25 bp, Homo sapien
ttcctggtgacgggaggtcactgtt

SEQ ID NO: 1271056 - DNA, 25 bp, Homo sapien
gatttcttccgaggaagccggcttc

SEQ ID NO: 1271057 - DNA, 25 bp, Homo sapien
ccggcttcctggtgacgggaggtca

SEQ ID NO: 1271058 - DNA, 25 bp, Homo sapien
cgcaagcatccgcagacagtgtgag

SEQ ID NO: 1271059 - DNA, 25 bp, Homo sapien
caagggcgcagccagtaggagagga

SEQ ID NO: 1271060 - DNA, 25 bp, Homo sapien
gagaggagccgcaagcgcaagcatc

SEQ ID NO: 1271061 - DNA, 25 bp, Homo sapien
tcatggcgctgagaagcactgcagc

SEQ ID NO: 1271062 - DNA, 25 bp, Homo sapien
gcaccataaacagcgctgaacatca

SEQ ID NO: 1271063 - DNA, 25 bp, Homo sapien
aacatcagcgacagctgcggagggc

SEQ ID NO: 1271064 - DNA, 25 bp, Homo sapien
cctgggtgtttctgtctgcaccata

SEQ ID NO: 1271065 - DNA, 25 bp, Homo sapien
gagggcgttcagtgagagctgagcc

SEQ ID NO: 1271066 - DNA, 25 bp, Homo sapien
ctttccggataatcactggggcctg

SEQ ID NO: 1271067 - DNA, 25 bp, Homo sapien
ccggataatcactggggcctgagcc

SEQ ID NO: 1271068 - DNA, 25 bp, Homo sapien
tccggataatcactggggcctgagc

SEQ ID NO: 1271069 - DNA, 25 bp, Homo sapien
tttccggataatcactggggcctga

SEQ ID NO: 1271070 - DNA, 25 bp, Homo sapien
gggagtcccaaaagacagctccagt

SEQ ID NO: 1271071 - DNA, 25 bp, Homo sapien
gaagtactcggtatgggagtcccaa

SEQ ID NO: 1271072 - DNA, 25 bp, Homo sapien
ttacaggtaatgagtcttcattctc

SEQ ID NO: 1271073 - DNA, 25 bp, Homo sapien
tctccattgctgtccgaagtactcg

SEQ ID NO: 1271074 - DNA, 25 bp, Homo sapien
gggtgtgcagtactgatacgacgtg

SEQ ID NO: 1271075 - DNA, 25 bp, Homo sapien
tactgatacgacgtggatcagtgac

SEQ ID NO: 1271076 - DNA, 25 bp, Homo sapien
ctgatacgacgtggatcagtgacat

SEQ ID NO: 1271077 - DNA, 25 bp, Homo sapien
tgcagtactgatacgacgtggatca

SEQ ID NO: 1271078 - DNA, 25 bp, Homo sapien
tgtgccaggacatacgggcatgccg

SEQ ID NO: 1271079 - DNA, 25 bp, Homo sapien
cctgcaggctcctaggcaacctgtg

SEQ ID NO: 1271080 - DNA, 25 bp, Homo sapien
taaggacagtcatgatggcccaagg

SEQ ID NO: 1271081 - DNA, 25 bp, Homo sapien
gcatgccggtcctcagcagagggct

SEQ ID NO: 1271082 - DNA, 25 bp, Homo sapien
aatgatctcccaagtcgctgccaga

SEQ ID NO: 1271083 - DNA, 25 bp, Homo sapien
ctgagaatccccacttggtgtaggg

SEQ ID NO: 1271084 - DNA, 25 bp, Homo sapien
agattcccaaagtcaaggcccaaag

SEQ ID NO: 1271085 - DNA, 25 bp, Homo sapien
taggaaggatgttcaaacggtccca

SEQ ID NO: 1271086 - DNA, 25 bp, Homo sapien
tcatgtgctcctagctgcacggtgg

SEQ ID NO: 1271087 - DNA, 25 bp, Homo sapien
atgcactcctctcggcccctgtaga

SEQ ID NO: 1271088 - DNA, 25 bp, Homo sapien
gccctgtgcacaaggatgcactcct

SEQ ID NO: 1271089 - DNA, 25 bp, Homo sapien
cacaccacggcaagtggcagcaggg

SEQ ID NO: 1271090 - DNA, 25 bp, Homo sapien
caaaggctgcgggtttgccaaacac

SEQ ID NO: 1271091 - DNA, 25 bp, Homo sapien
ccactgttggaagagggaccagcgc

SEQ ID NO: 1271092 - DNA, 25 bp, Homo sapien
taccgtggttcctcagctaactgca

SEQ ID NO: 1271093 - DNA, 25 bp, Homo sapien
cagctttgtgctcagatcccaggtc

SEQ ID NO: 1271094 - DNA, 25 bp, Homo sapien
tcccgtgggcgaagaccagacaagc

SEQ ID NO: 1271095 - DNA, 25 bp, Homo sapien
tgtgttggctacagcctctgtccag

SEQ ID NO: 1271096 - DNA, 25 bp, Homo sapien
gctgggactcctggcgcgccttgca

SEQ ID NO: 1271097 - DNA, 25 bp, Homo sapien
caaagtaaaggtgattgtgttggct

SEQ ID NO: 1271098 - DNA, 25 bp, Homo sapien
ggaaatttccaatcgcagactggca

SEQ ID NO: 1271099 - DNA, 25 bp, Homo sapien
gaaccataacatgtgagcccgctga

SEQ ID NO: 1271100 - DNA, 25 bp, Homo sapien
tcgggacctatctgctgtgggccaa

SEQ ID NO: 1271101 - DNA, 25 bp, Homo sapien
caaaaaacgcaggagcttcggaagg

SEQ ID NO: 1271102 - DNA, 25 bp, Homo sapien
ggcgctggctcctaaaaaggtggca

SEQ ID NO: 1271103 - DNA, 25 bp, Homo sapien
gagtccagggccttcaagatgcgct

SEQ ID NO: 1271104 - DNA, 25 bp, Homo sapien
gaacccatcggtaaagagacatcag

SEQ ID NO: 1271105 - DNA, 25 bp, Homo sapien
tgggatcatacgcttctgcctgctg

SEQ ID NO: 1271106 - DNA, 25 bp, Homo sapien
aatgagcgctgcaacacagggaagt

SEQ ID NO: 1271107 - DNA, 25 bp, Homo sapien
tggaaatgagcgctgcaacacaggg

SEQ ID NO: 1271108 - DNA, 25 bp, Homo sapien
agctggaaatgagcgctgcaacaca

SEQ ID NO: 1271109 - DNA, 25 bp, Homo sapien
tcagctggaaatgagcgctgcaaca

SEQ ID NO: 1271110 - DNA, 25 bp, Homo sapien
tgggcccaaagttgttgctgtacat

SEQ ID NO: 1271111 - DNA, 25 bp, Homo sapien
cccaggggcatctggttgtagttga

SEQ ID NO: 1271112 - DNA, 25 bp, Homo sapien
gtagttgacaatccctcccggtcca

SEQ ID NO: 1271113 - DNA, 25 bp, Homo sapien
gttgggcccaaagttgttgctgtac

SEQ ID NO: 1271114 - DNA, 25 bp, Homo sapien
gggatgcgggacagcatggatggca

SEQ ID NO: 1271115 - DNA, 25 bp, Homo sapien
tgctgcgctccgacatctgcagccg

SEQ ID NO: 1271116 - DNA, 25 bp, Homo sapien
atggcagccgggtcacgtcggcctt

SEQ ID NO: 1271117 - DNA, 25 bp, Homo sapien
cgcggttggtcaggcggctcaggat

SEQ ID NO: 1271118 - DNA, 25 bp, Homo sapien
gggtcctgcgtcatgttcaggtacg

SEQ ID NO: 1271119 - DNA, 25 bp, Homo sapien
agccaggcgggcgttgagggccatg

SEQ ID NO: 1271120 - DNA, 25 bp, Homo sapien
aggtacgcggccctccggagctgct

SEQ ID NO: 1271121 - DNA, 25 bp, Homo sapien
ggcaggcttgttcccagcaagggac

SEQ ID NO: 1271122 - DNA, 25 bp, Homo sapien
ctgccccgtgcagccctggcccttc

SEQ ID NO: 1271123 - DNA, 25 bp, Homo sapien
tccctgccccgtgcagccctggccc

SEQ ID NO: 1271124 - DNA, 25 bp, Homo sapien
gcagccctggcccttcagaagacag

SEQ ID NO: 1271125 - DNA, 25 bp, Homo sapien
agccctggcccttcagaagacagac

SEQ ID NO: 1271126 - DNA, 25 bp, Homo sapien
cttgaagggctcgttgaggatcatg

SEQ ID NO: 1271127 - DNA, 25 bp, Homo sapien
cttgtggacctcagacttgaagggc

SEQ ID NO: 1271128 - DNA, 25 bp, Homo sapien
gatcatgtaccgtgggtcattctgg

SEQ ID NO: 1271129 - DNA, 25 bp, Homo sapien
tcttcatctccaggtagttgccctt

SEQ ID NO: 1271130 - DNA, 25 bp, Homo sapien
ccagatgtcgtagattttcccagag

SEQ ID NO: 1271131 - DNA, 25 bp, Homo sapien
tcctcgttctgccacagcgtgtgca

SEQ ID NO: 1271132 - DNA, 25 bp, Homo sapien
gaggatacagcagcccgctcctcgt

SEQ ID NO: 1271133 - DNA, 25 bp, Homo sapien
cagccagtagtcatggcgccggtgc

SEQ ID NO: 1271134 - DNA, 25 bp, Homo sapien
tgaagcccccgtccgcgatgttgaa

SEQ ID NO: 1271135 - DNA, 25 bp, Homo sapien
gcgatgttgaacatgaacttgaatt

SEQ ID NO: 1271136 - DNA, 25 bp, Homo sapien
gatgttgaacatgaacttgaatttc

SEQ ID NO: 1271137 - DNA, 25 bp, Homo sapien
cgtgaagcccccgtccgcgatgttg

SEQ ID NO: 1271138 - DNA, 25 bp, Homo sapien
ctggcctgagttcggaactgtcccc

SEQ ID NO: 1271139 - DNA, 25 bp, Homo sapien
ctgagttcggaactgtcccctctgc

SEQ ID NO: 1271140 - DNA, 25 bp, Homo sapien
ggcctgagttcggaactgtcccctc

SEQ ID NO: 1271141 - DNA, 25 bp, Homo sapien
gcctgagttcggaactgtcccctct

SEQ ID NO: 1271142 - DNA, 25 bp, Homo sapien
gataaaggctcccatgagccgagat

SEQ ID NO: 1271143 - DNA, 25 bp, Homo sapien
ttgagccgaggagataaaggctccc

SEQ ID NO: 1271144 - DNA, 25 bp, Homo sapien
aaaggctcccatgagccgagatggc

SEQ ID NO: 1271145 - DNA, 25 bp, Homo sapien
tgagccgaggagataaaggctccca

SEQ ID NO: 1271146 - DNA, 25 bp, Homo sapien
gcccagccctaatgcatatagttag

SEQ ID NO: 1271147 - DNA, 25 bp, Homo sapien
ggccagagagcaggtttcaacaacc

SEQ ID NO: 1271148 - DNA, 25 bp, Homo sapien
tatagttagaaccttaaacccagca

SEQ ID NO: 1271149 - DNA, 25 bp, Homo sapien
aatctgaccgtatcaggccagagag

SEQ ID NO: 1271150 - DNA, 25 bp, Homo sapien
tctcggcagctgctccggggagggc

SEQ ID NO: 1271151 - DNA, 25 bp, Homo sapien
agctgctccggggagggcggggcct

SEQ ID NO: 1271152 - DNA, 25 bp, Homo sapien
ctctcggcagctgctccggggaggg

SEQ ID NO: 1271153 - DNA, 25 bp, Homo sapien
tctggccgctcctctcgggctctct

SEQ ID NO: 1271154 - DNA, 25 bp, Homo sapien
tggctgggctctcgtgcttgtcctc

SEQ ID NO: 1271155 - DNA, 25 bp, Homo sapien
gctgggctctcgtgcttgtcctcac

SEQ ID NO: 1271156 - DNA, 25 bp, Homo sapien
gctggctgggctctcgtgcttgtcc

SEQ ID NO: 1271157 - DNA, 25 bp, Homo sapien
tctccactctatccaaggcggctgg

SEQ ID NO: 1271158 - DNA, 25 bp, Homo sapien
cactctatccaaggcggctggaagg

SEQ ID NO: 1271159 - DNA, 25 bp, Homo sapien
ctctatccaaggcggctggaagggc

SEQ ID NO: 1271160 - DNA, 25 bp, Homo sapien
tccactctatccaaggcggctggaa

SEQ ID NO: 1271161 - DNA, 25 bp, Homo sapien
acaggcccagacgccagcaagttcc

SEQ ID NO: 1271162 - DNA, 25 bp, Homo sapien
gcccagacgccagcaagttccacac

SEQ ID NO: 1271163 - DNA, 25 bp, Homo sapien
cacaggcccagacgccagcaagttc

SEQ ID NO: 1271164 - DNA, 25 bp, Homo sapien
aggcccagacgccagcaagttccac

SEQ ID NO: 1271165 - DNA, 25 bp, Homo sapien
ccggggtctttctcatccatgtagc

SEQ ID NO: 1271166 - DNA, 25 bp, Homo sapien
cttggcttctgtgccccggggtctt

SEQ ID NO: 1271167 - DNA, 25 bp, Homo sapien
tctttctcatccatgtagcccagct

SEQ ID NO: 1271168 - DNA, 25 bp, Homo sapien
ggctgccttggcttctgtgccccgg

SEQ ID NO: 1271169 - DNA, 25 bp, Homo sapien
aggacggggccgcacacagccgtgg

SEQ ID NO: 1271170 - DNA, 25 bp, Homo sapien
acacccgctctggtcccagctttcg

SEQ ID NO: 1271171 - DNA, 25 bp, Homo sapien
ggcccagattgggagccacgacacc

SEQ ID NO: 1271172 - DNA, 25 bp, Homo sapien
gcctttgactcaggagtgcttggag

SEQ ID NO: 1271173 - DNA, 25 bp, Homo sapien
caagtctggggtgctgtacttcccg

SEQ ID NO: 1271174 - DNA, 25 bp, Homo sapien
cctcgggcccctcagggatcaagtc

SEQ ID NO: 1271175 - DNA, 25 bp, Homo sapien
ggtccgaggagatcacctcgcccga

SEQ ID NO: 1271176 - DNA, 25 bp, Homo sapien
tacttcccgttgacatgctcaaact

SEQ ID NO: 1271177 - DNA, 25 bp, Homo sapien
gcgggtcagcacgtgctgcctggag

SEQ ID NO: 1271178 - DNA, 25 bp, Homo sapien
cttcttcctaactagtgacatgacc

SEQ ID NO: 1271179 - DNA, 25 bp, Homo sapien
acacaggtgccgcatgaagagggac

SEQ ID NO: 1271180 - DNA, 25 bp, Homo sapien
ctagtgacatgaccccgatgcgggt

SEQ ID NO: 1271181 - DNA, 25 bp, Homo sapien
cgggatcttcctcgctgccataaca

SEQ ID NO: 1271182 - DNA, 25 bp, Homo sapien
catcctggcggaagcaaatgctgcc

SEQ ID NO: 1271183 - DNA, 25 bp, Homo sapien
tggtcagtgtttgcaaatcagccct

SEQ ID NO: 1271184 - DNA, 25 bp, Homo sapien
aagtccaagtggcagtgaactttcc

SEQ ID NO: 1271185 - DNA, 25 bp, Homo sapien
tcgctcttccctcgaaggtcccgca

SEQ ID NO: 1271186 - DNA, 25 bp, Homo sapien
cttctcgctcttccctcgaaggtcc

SEQ ID NO: 1271187 - DNA, 25 bp, Homo sapien
cgctcttccctcgaaggtcccgcac

SEQ ID NO: 1271188 - DNA, 25 bp, Homo sapien
tctcgctcttccctcgaaggtcccg

SEQ ID NO: 1271189 - DNA, 25 bp, Homo sapien
tcagaaaggccttccgctgtcgggc

SEQ ID NO: 1271190 - DNA, 25 bp, Homo sapien
gccttccgctgtcgggcattgaagc

SEQ ID NO: 1271191 - DNA, 25 bp, Homo sapien
atgccccagcgcatgatggcgttca

SEQ ID NO: 1271192 - DNA, 25 bp, Homo sapien
catgccccagcgcatgatggcgttc

SEQ ID NO: 1271193 - DNA, 25 bp, Homo sapien
agtggagcgtgggagtatgagccca

SEQ ID NO: 1271194 - DNA, 25 bp, Homo sapien
gtggagcgtgggagtatgagcccag

SEQ ID NO: 1271195 - DNA, 25 bp, Homo sapien
cgtgggagtatgagcccaggacaga

SEQ ID NO: 1271196 - DNA, 25 bp, Homo sapien
tggagcgtgggagtatgagcccagg

SEQ ID NO: 1271197 - DNA, 25 bp, Homo sapien
ctcgatgttgccaccaactcgggcg

SEQ ID NO: 1271198 - DNA, 25 bp, Homo sapien
ttgccaccaactcgggcgagaagcg

SEQ ID NO: 1271199 - DNA, 25 bp, Homo sapien
tgcctccgggattgtcgtcgtccac

SEQ ID NO: 1271200 - DNA, 25 bp, Homo sapien
cttcagctgcctccgggattgtcgt

SEQ ID NO: 1271201 - DNA, 25 bp, Homo sapien
aatattctgactggttatcagagag

SEQ ID NO: 1271202 - DNA, 25 bp, Homo sapien
atcctcagagccaatggaatattct

SEQ ID NO: 1271203 - DNA, 25 bp, Homo sapien
ggaatattctgactggttatcagag

SEQ ID NO: 1271204 - DNA, 25 bp, Homo sapien
tcctcagagccaatggaatattctg

SEQ ID NO: 1271205 - DNA, 25 bp, Homo sapien
ggaggcatcgttgtagttgacctgc

SEQ ID NO: 1271206 - DNA, 25 bp, Homo sapien
ttgcggatgcgcttgcccttgccca

SEQ ID NO: 1271207 - DNA, 25 bp, Homo sapien
cttgcccaggttgcgggccaggtcc

SEQ ID NO: 1271208 - DNA, 25 bp, Homo sapien
tgcttgatgatttcccgctccacct

SEQ ID NO: 1271209 - DNA, 25 bp, Homo sapien
gagagacccacaaggagctcttcgg

SEQ ID NO: 1271210 - DNA, 25 bp, Homo sapien
aggagagacccacaaggagctcttc

SEQ ID NO: 1271211 - DNA, 25 bp, Homo sapien
gacccacaaggagctcttcggggac

SEQ ID NO: 1271212 - DNA, 25 bp, Homo sapien
agagacccacaaggagctcttcggg

SEQ ID NO: 1271213 - DNA, 25 bp, Homo sapien
catctgtagcgtcctggttccggtc

SEQ ID NO: 1271214 - DNA, 25 bp, Homo sapien
gagatggccgcatcgtcatagtgga

SEQ ID NO: 1271215 - DNA, 25 bp, Homo sapien
cttgaaggagctcaggtactcgttc

SEQ ID NO: 1271216 - DNA, 25 bp, Homo sapien
tctgtagctccgtgtcatctgtagc

SEQ ID NO: 1271217 - DNA, 25 bp, Homo sapien
ggtgctaccgtgcttcttctttgca

SEQ ID NO: 1271218 - DNA, 25 bp, Homo sapien
cctttggaggactggacatcaggga

SEQ ID NO: 1271219 - DNA, 25 bp, Homo sapien
ctggcggggtgctaccgtgcttctt

SEQ ID NO: 1271220 - DNA, 25 bp, Homo sapien
ggatgggtgtgaccggcctctggcc

SEQ ID NO: 1271221 - DNA, 25 bp, Homo sapien
tgccgaacttgaggatgtcgtccag

SEQ ID NO: 1271222 - DNA, 25 bp, Homo sapien
gagcatcatcttgcgcttggccacc

SEQ ID NO: 1271223 - DNA, 25 bp, Homo sapien
tcacgaagcggtagatcatcacctt

SEQ ID NO: 1271224 - DNA, 25 bp, Homo sapien
gcttggtcatggaccccgacttgga

SEQ ID NO: 1271225 - DNA, 25 bp, Homo sapien
tggccgatgcggtgggcgcggctga

SEQ ID NO: 1271226 - DNA, 25 bp, Homo sapien
gccgatgcggtgggcgcggctgaag

SEQ ID NO: 1271227 - DNA, 25 bp, Homo sapien
ctggccgatgcggtgggcgcggctg

SEQ ID NO: 1271228 - DNA, 25 bp, Homo sapien
cgatgcggtgggcgcggctgaaggc

SEQ ID NO: 1271229 - DNA, 25 bp, Homo sapien
aggcccgggatgagaggccccctgg

SEQ ID NO: 1271230 - DNA, 25 bp, Homo sapien
atgagaggccccctgggagggtggt

SEQ ID NO: 1271231 - DNA, 25 bp, Homo sapien
gatgagaggccccctgggagggtgg

SEQ ID NO: 1271232 - DNA, 25 bp, Homo sapien
ctgaggcccgggatgagaggccccc

SEQ ID NO: 1271233 - DNA, 25 bp, Homo sapien
tccgagtcgtagatgatgacagtgt

SEQ ID NO: 1271234 - DNA, 25 bp, Homo sapien
tccgccgtggccaggttgatgccca

SEQ ID NO: 1271235 - DNA, 25 bp, Homo sapien
tcattgtgcgggttccagtccgagt

SEQ ID NO: 1271236 - DNA, 25 bp, Homo sapien
agaccacctgcccgggttgagagga

SEQ ID NO: 1271237 - DNA, 25 bp, Homo sapien
cattgaatctgtcgattgcctcctg

SEQ ID NO: 1271238 - DNA, 25 bp, Homo sapien
tgatgccaccatcaatccgctcata

SEQ ID NO: 1271239 - DNA, 25 bp, Homo sapien
aatctgtcgattgcctcctgccgga

SEQ ID NO: 1271240 - DNA, 25 bp, Homo sapien
ttgtagccttcgtactccaggaagt

SEQ ID NO: 1271241 - DNA, 25 bp, Homo sapien
ctgcaggggagacgggcacgtgagg

SEQ ID NO: 1271242 - DNA, 25 bp, Homo sapien
gcaggggagacgggcacgtgaggaa

SEQ ID NO: 1271243 - DNA, 25 bp, Homo sapien
tgcaggggagacgggcacgtgagga

SEQ ID NO: 1271244 - DNA, 25 bp, Homo sapien
tgtctctgtacattgcattctggga

SEQ ID NO: 1271245 - DNA, 25 bp, Homo sapien
tacctagaggttctaacgtgtctac

SEQ ID NO: 1271246 - DNA, 25 bp, Homo sapien
gaatgcactccagatctgagacctc

SEQ ID NO: 1271247 - DNA, 25 bp, Homo sapien
aagtctgagaacgatctggctgccc

SEQ ID NO: 1271248 - DNA, 25 bp, Homo sapien
cacagagcctgactatgacagacgc

SEQ ID NO: 1271249 - DNA, 25 bp, Homo sapien
tgtttgtgcacaaggagccatagcc

SEQ ID NO: 1271250 - DNA, 25 bp, Homo sapien
gaggagcatttttagccccatgacc

SEQ ID NO: 1271251 - DNA, 25 bp, Homo sapien
tgacagacgcaaacaaagggatgga

SEQ ID NO: 1271252 - DNA, 25 bp, Homo sapien
gcttccatcgtaggagccattgggc

SEQ ID NO: 1271253 - DNA, 25 bp, Homo sapien
aagatgagcacacggtgcccctcat

SEQ ID NO: 1271254 - DNA, 25 bp, Homo sapien
ccagggagcttccatcgtaggagcc

SEQ ID NO: 1271255 - DNA, 25 bp, Homo sapien
ggagaagatgagcacacggtgcccc

SEQ ID NO: 1271256 - DNA, 25 bp, Homo sapien
aagctgccatgatggccggggaaac

SEQ ID NO: 1271257 - DNA, 25 bp, Homo sapien
tggagaagctgccatgatggccggg

SEQ ID NO: 1271258 - DNA, 25 bp, Homo sapien
tgccatgatggccggggaaacctac

SEQ ID NO: 1271259 - DNA, 25 bp, Homo sapien
atggagaagctgccatgatggccgg

SEQ ID NO: 1271260 - DNA, 25 bp, Homo sapien
gagcagcgatacttggttcccgccc

SEQ ID NO: 1271261 - DNA, 25 bp, Homo sapien
cagtgcctcaaagttccgtgtgagg

SEQ ID NO: 1271262 - DNA, 25 bp, Homo sapien
catgatgttgagcagcgatacttgg

SEQ ID NO: 1271263 - DNA, 25 bp, Homo sapien
tccgtgtgaggatgaacttgtagta

SEQ ID NO: 1271264 - DNA, 25 bp, Homo sapien
ggtcttggccggcatgttcttgaac

SEQ ID NO: 1271265 - DNA, 25 bp, Homo sapien
cccggacaatgagctcggtcttggc

SEQ ID NO: 1271266 - DNA, 25 bp, Homo sapien
tcttgaacacgtcagccttgagccg

SEQ ID NO: 1271267 - DNA, 25 bp, Homo sapien
tcttccttggagatgtcagcaaact

SEQ ID NO: 1271268 - DNA, 25 bp, Homo sapien
taatcaatcttgtagctgtttaaga

SEQ ID NO: 1271269 - DNA, 25 bp, Homo sapien
agcagcttgtaatcaatcttgtagc

SEQ ID NO: 1271270 - DNA, 25 bp, Homo sapien
cagcagcttgtaatcaatcttgtag

SEQ ID NO: 1271271 - DNA, 25 bp, Homo sapien
tgtaatcaatcttgtagctgtttaa

SEQ ID NO: 1271272 - DNA, 25 bp, Homo sapien
caggcaggcccactcgatggagccc

SEQ ID NO: 1271273 - DNA, 25 bp, Homo sapien
gcaggcccactcgatggagcccagg

SEQ ID NO: 1271274 - DNA, 25 bp, Homo sapien
gaggtgagcagcacgtggaatttga

SEQ ID NO: 1271275 - DNA, 25 bp, Homo sapien
caggatggcctggtcaatggtgatg

SEQ ID NO: 1271276 - DNA, 25 bp, Homo sapien
aagaggggcattggggatgagacgg

SEQ ID NO: 1271277 - DNA, 25 bp, Homo sapien
aaagaggggcattggggatgagacg

SEQ ID NO: 1271278 - DNA, 25 bp, Homo sapien
tctcaaactcgcgttcccagttgat

SEQ ID NO: 1271279 - DNA, 25 bp, Homo sapien
tccgaatggcgttgtcctcaaagga

SEQ ID NO: 1271280 - DNA, 25 bp, Homo sapien
gtgaccacgtagaagtcgggcgccc

SEQ ID NO: 1271281 - DNA, 25 bp, Homo sapien
cgcgctaaccaggtagggccctttg

SEQ ID NO: 1271282 - DNA, 25 bp, Homo sapien
caagagaagcgcagccagttgaggc

SEQ ID NO: 1271283 - DNA, 25 bp, Homo sapien
tgtgccgcctgtggagtcgatgtac

SEQ ID NO: 1271284 - DNA, 25 bp, Homo sapien
taaaggaacacgatggtctgcaccg

SEQ ID NO: 1271285 - DNA, 25 bp, Homo sapien
accatggctgcttgtcgaacttgac

SEQ ID NO: 1271286 - DNA, 25 bp, Homo sapien
acaatgggcgtgtccggcggcttct

SEQ ID NO: 1271287 - DNA, 25 bp, Homo sapien
caatgggcgtgtccggcggcttctc

SEQ ID NO: 1271288 - DNA, 25 bp, Homo sapien
tccacaatgggcgtgtccggcggct

SEQ ID NO: 1271289 - DNA, 25 bp, Homo sapien
gcttctcctgcttgtcgtccctcag

SEQ ID NO: 1271290 - DNA, 25 bp, Homo sapien
ggcctgcttgaggttgtcgtagtag

SEQ ID NO: 1271291 - DNA, 25 bp, Homo sapien
caggtctttccacttgatcaggtag

SEQ ID NO: 1271292 - DNA, 25 bp, Homo sapien
gatgtcgatgtcatcgatctcccag

SEQ ID NO: 1271293 - DNA, 25 bp, Homo sapien
gcactggtcgtagggcaggtctttc

SEQ ID NO: 1271294 - DNA, 25 bp, Homo sapien
tctttggtagttgcgatacatcacc

SEQ ID NO: 1271295 - DNA, 25 bp, Homo sapien
ttcatccccagagccgtagtcaaag

SEQ ID NO: 1271296 - DNA, 25 bp, Homo sapien
gatgccatagcggtagaagcgctcc

SEQ ID NO: 1271297 - DNA, 25 bp, Homo sapien
tacatcaccgtgtggtacagctcca

SEQ ID NO: 1271298 - DNA, 25 bp, Homo sapien
cacagccaccctcccgggcactcac

SEQ ID NO: 1271299 - DNA, 25 bp, Homo sapien
tcccgggccttagcacagccaccct

SEQ ID NO: 1271300 - DNA, 25 bp, Homo sapien
caggtcccgggccttagcacagcca

SEQ ID NO: 1271301 - DNA, 25 bp, Homo sapien
ggtcccgggccttagcacagccacc

SEQ ID NO: 1271302 - DNA, 25 bp, Homo sapien
cggcagccccaccatgaagggggca

SEQ ID NO: 1271303 - DNA, 25 bp, Homo sapien
tgggctccacgtcaggccccggcag

SEQ ID NO: 1271304 - DNA, 25 bp, Homo sapien
tgtagaatccgctggactttgccct

SEQ ID NO: 1271305 - DNA, 25 bp, Homo sapien
gctccgtccacctccagtgtagaat

SEQ ID NO: 1271306 - DNA, 25 bp, Homo sapien
gaggcaatgcaggtggtaggaggag

SEQ ID NO: 1271307 - DNA, 25 bp, Homo sapien
ggcagcggcgggttgaggcaatgca

SEQ ID NO: 1271308 - DNA, 25 bp, Homo sapien
attcaccgtttgggatctcgggcag

SEQ ID NO: 1271309 - DNA, 25 bp, Homo sapien
cattcaccgtttgggatctcgggca

SEQ ID NO: 1271310 - DNA, 25 bp, Homo sapien
cgcggcagaactccatgtggtcgtc

SEQ ID NO: 1271311 - DNA, 25 bp, Homo sapien
cagaactccatgtggtcgtcctcct

SEQ ID NO: 1271312 - DNA, 25 bp, Homo sapien
gcacacgcggcagaactccatgtgg

SEQ ID NO: 1271313 - DNA, 25 bp, Homo sapien
atcgtcgtcgtccttcggctcccac

SEQ ID NO: 1271314 - DNA, 25 bp, Homo sapien
gggcagctccacttgccctcgggag

SEQ ID NO: 1271315 - DNA, 25 bp, Homo sapien
tgggggcagctccacttgccctcgg

SEQ ID NO: 1271316 - DNA, 25 bp, Homo sapien
acttgccctcgggagccttctccag

SEQ ID NO: 1271317 - DNA, 25 bp, Homo sapien
ctccacttgccctcgggagccttct

SEQ ID NO: 1271318 - DNA, 25 bp, Homo sapien
catacgagatggtaggccctcgggc

SEQ ID NO: 1271319 - DNA, 25 bp, Homo sapien
taggccctcgggcaggtgtcgcaca

SEQ ID NO: 1271320 - DNA, 25 bp, Homo sapien
aggtgtcgcacaggatgatctcccc

SEQ ID NO: 1271321 - DNA, 25 bp, Homo sapien
ctgggtccaggcatacgagatggta

SEQ ID NO: 1271322 - DNA, 25 bp, Homo sapien
gtggtctgtctcatagccgtcacca

SEQ ID NO: 1271323 - DNA, 25 bp, Homo sapien
gtctgtctcatagccgtcaccatca

SEQ ID NO: 1271324 - DNA, 25 bp, Homo sapien
tctgtctcatagccgtcaccatcat

SEQ ID NO: 1271325 - DNA, 25 bp, Homo sapien
ggtctgtctcatagccgtcaccatc

SEQ ID NO: 1271326 - DNA, 25 bp, Homo sapien
ggagaggcagtcatggaagtcctca

SEQ ID NO: 1271327 - DNA, 25 bp, Homo sapien
gaggcagtcatggaagtcctcatcc

SEQ ID NO: 1271328 - DNA, 25 bp, Homo sapien
aggcagtcatggaagtcctcatcca

SEQ ID NO: 1271329 - DNA, 25 bp, Homo sapien
taggggagaggcagtcatggaagtc

SEQ ID NO: 1271330 - DNA, 25 bp, Homo sapien
cattcggagcgcacggaggcactgt

SEQ ID NO: 1271331 - DNA, 25 bp, Homo sapien
tcttcttgcgcctcctcttgctctt

SEQ ID NO: 1271332 - DNA, 25 bp, Homo sapien
gatgctggcgctgtcgaagtccgac

SEQ ID NO: 1271333 - DNA, 25 bp, Homo sapien
ccagggctgcagagcattcggagcg

SEQ ID NO: 1271334 - DNA, 25 bp, Homo sapien
ggctggggtgaggtgagggaggcag

SEQ ID NO: 1271335 - DNA, 25 bp, Homo sapien
ctggggtgaggtgagggaggcagct

SEQ ID NO: 1271336 - DNA, 25 bp, Homo sapien
ggggtgaggtgagggaggcagctac

SEQ ID NO: 1271337 - DNA, 25 bp, Homo sapien
cgcagggctggggtgaggtgaggga

SEQ ID NO: 1271338 - DNA, 25 bp, Homo sapien
ctgagtaagacctgggcttagtgtc

SEQ ID NO: 1271339 - DNA, 25 bp, Homo sapien
caaggctgagtaagacctgggctta

SEQ ID NO: 1271340 - DNA, 25 bp, Homo sapien
gggcgaatgcccctcacactcacag

SEQ ID NO: 1271341 - DNA, 25 bp, Homo sapien
gaatgcccctcacactcacagagaa

SEQ ID NO: 1271342 - DNA, 25 bp, Homo sapien
caggacagatccctccacctcctgc

SEQ ID NO: 1271343 - DNA, 25 bp, Homo sapien
cgaagcggaacttgagcccggccgt

SEQ ID NO: 1271344 - DNA, 25 bp, Homo sapien
tcttgttgctgatccccccgaagcg

SEQ ID NO: 1271345 - DNA, 25 bp, Homo sapien
ccgaagcggaacttgagcccggccg

SEQ ID NO: 1271346 - DNA, 25 bp, Homo sapien
tgatccccccgaagcggaacttgag

SEQ ID NO: 1271347 - DNA, 25 bp, Homo sapien
tggtcttggccttgcggataggcac

SEQ ID NO: 1271348 - DNA, 25 bp, Homo sapien
cttggtcttggccttgcggataggc

SEQ ID NO: 1271349 - DNA, 25 bp, Homo sapien
ttggtcttggccttgcggataggca

SEQ ID NO: 1271350 - DNA, 25 bp, Homo sapien
gacggctagcggaggggagatggtg

SEQ ID NO: 1271351 - DNA, 25 bp, Homo sapien
ctgacggctagcggaggggagatgg

SEQ ID NO: 1271352 - DNA, 25 bp, Homo sapien
tgacggctagcggaggggagatggt

SEQ ID NO: 1271353 - DNA, 25 bp, Homo sapien
ggcgctgaactcccgccacttggca

SEQ ID NO: 1271354 - DNA, 25 bp, Homo sapien
tgctgccgcggagctgcccttgaag

SEQ ID NO: 1271355 - DNA, 25 bp, Homo sapien
ctgccgcggagctgcccttgaaggg

SEQ ID NO: 1271356 - DNA, 25 bp, Homo sapien
gcgctgaactcccgccacttggcac

SEQ ID NO: 1271357 - DNA, 25 bp, Homo sapien
cttcgggttcttcttggcaatgagt

SEQ ID NO: 1271358 - DNA, 25 bp, Homo sapien
ggatcttcgggttcttcttggcaat

SEQ ID NO: 1271359 - DNA, 25 bp, Homo sapien
tcatcattttggacatggggatctt

SEQ ID NO: 1271360 - DNA, 25 bp, Homo sapien
cattttggacatggggatcttcggg

SEQ ID NO: 1271361 - DNA, 25 bp, Homo sapien
gtggtaatcctcctccgagaacagg

SEQ ID NO: 1271362 - DNA, 25 bp, Homo sapien
taatcctcctccgagaacaggtagt

SEQ ID NO: 1271363 - DNA, 25 bp, Homo sapien
atgagctgccccgaggacttgggct

SEQ ID NO: 1271364 - DNA, 25 bp, Homo sapien
tccgagaacaggtagtccacgtcgt

SEQ ID NO: 1271365 - DNA, 25 bp, Homo sapien
tttttattcggggagtagtcactgc

SEQ ID NO: 1271366 - DNA, 25 bp, Homo sapien
ttcggggagtagtcactgccttcac

SEQ ID NO: 1271367 - DNA, 25 bp, Homo sapien
actgccttcactctccgacttctct

SEQ ID NO: 1271368 - DNA, 25 bp, Homo sapien
catccttcttttttcgcttggcttt

SEQ ID NO: 1271369 - DNA, 25 bp, Homo sapien
gcgagacgcggtacagagggagcag

SEQ ID NO: 1271370 - DNA, 25 bp, Homo sapien
agcatctgatggcaagcagtcccct

SEQ ID NO: 1271371 - DNA, 25 bp, Homo sapien
ccccacatttttgctgtcgggattg

SEQ ID NO: 1271372 - DNA, 25 bp, Homo sapien
gggattgggctccagccaactgcac

SEQ ID NO: 1271373 - DNA, 25 bp, Homo sapien
ccaagctcgccggcgcaggtgctgc

SEQ ID NO: 1271374 - DNA, 25 bp, Homo sapien
gaaggcttcaagaccaccatcttct

SEQ ID NO: 1271375 - DNA, 25 bp, Homo sapien
tcttcttaggaaggctcacgggctc

SEQ ID NO: 1271376 - DNA, 25 bp, Homo sapien
cacagggaaaaagtcatcgaaggct

SEQ ID NO: 1271377 - DNA, 25 bp, Homo sapien
gctcacgggctccacagggaaaaag

SEQ ID NO: 1271378 - DNA, 25 bp, Homo sapien
aggaagatgccaggataccccatgg

SEQ ID NO: 1271379 - DNA, 25 bp, Homo sapien
agagagagaattgtggagcacaggg

SEQ ID NO: 1271380 - DNA, 25 bp, Homo sapien
tttgcaggacaaactcagcaaggaa

SEQ ID NO: 1271381 - DNA, 25 bp, Homo sapien
ctgaggcgagcagataaccagaggc

SEQ ID NO: 1271382 - DNA, 25 bp, Homo sapien
ttggtgcctctctgcaccagggcct

SEQ ID NO: 1271383 - DNA, 25 bp, Homo sapien
tcccatggcccacactatgggtgca

SEQ ID NO: 1271384 - DNA, 25 bp, Homo sapien
tggaaggtgtttgcaccagtggaag

SEQ ID NO: 1271385 - DNA, 25 bp, Homo sapien
gggtgcagctttagccccactgtcc

SEQ ID NO: 1271386 - DNA, 25 bp, Homo sapien
cagcagtgcgacttgacaggaggcc

SEQ ID NO: 1271387 - DNA, 25 bp, Homo sapien
taagtccccacatagtcagagagag

SEQ ID NO: 1271388 - DNA, 25 bp, Homo sapien
tcataacattcgagctgggacctaa

SEQ ID NO: 1271389 - DNA, 25 bp, Homo sapien
gacctaaatgaccaggaggcagcgg

SEQ ID NO: 1271390 - DNA, 25 bp, Homo sapien
cctcggcgaacagccgcggcagctc

SEQ ID NO: 1271391 - DNA, 25 bp, Homo sapien
tgccagccttaacccgtgcgctgcc

SEQ ID NO: 1271392 - DNA, 25 bp, Homo sapien
cgccgggcgcggtgccagccttaac

SEQ ID NO: 1271393 - DNA, 25 bp, Homo sapien
ttaacccgtgcgctgccggaccggc

SEQ ID NO: 1271394 - DNA, 25 bp, Homo sapien
ccgccgggcgcggtgccagccttaa

SEQ ID NO: 1271395 - DNA, 25 bp, Homo sapien
gcaaggagaggtcggtccagccttc

SEQ ID NO: 1271396 - DNA, 25 bp, Homo sapien
gacacgcaggatcggcagcagtttc

SEQ ID NO: 1271397 - DNA, 25 bp, Homo sapien
cgctgtagatagagaagccgggtca

SEQ ID NO: 1271398 - DNA, 25 bp, Homo sapien
cagatccgctttaactacgctgtag

SEQ ID NO: 1271399 - DNA, 25 bp, Homo sapien
tagaaaatatgatcaaaactcgatt

SEQ ID NO: 1271400 - DNA, 25 bp, Homo sapien
tgatcaaaactcgattacaagagtt

SEQ ID NO: 1271401 - DNA, 25 bp, Homo sapien
aaatatgatcaaaactcgattacaa

SEQ ID NO: 1271402 - DNA, 25 bp, Homo sapien
caggtgttagccactttaatagaaa

SEQ ID NO: 1271403 - DNA, 25 bp, Homo sapien
taaatccagtcatggcctaagtggc

SEQ ID NO: 1271404 - DNA, 25 bp, Homo sapien
tagaacctgggacttttacaatcga

SEQ ID NO: 1271405 - DNA, 25 bp, Homo sapien
cctctgctggagacgaaagtgacag

SEQ ID NO: 1271406 - DNA, 25 bp, Homo sapien
gcatgaggcagctatttccagggca

SEQ ID NO: 1271407 - DNA, 25 bp, Homo sapien
tgagtggcgaaccaagggaagccct

SEQ ID NO: 1271408 - DNA, 25 bp, Homo sapien
gctgtcagttcggtaaagtcaccct

SEQ ID NO: 1271409 - DNA, 25 bp, Homo sapien
gaaacccgcattttattgacagtca

SEQ ID NO: 1271410 - DNA, 25 bp, Homo sapien
ctctggtattaccacgagaattgaa

SEQ ID NO: 1271411 - DNA, 25 bp, Homo sapien
agaactcatacaaaattttccagat

SEQ ID NO: 1271412 - DNA, 25 bp, Homo sapien
tattcaagaactcatacaaaatttt

SEQ ID NO: 1271413 - DNA, 25 bp, Homo sapien
gaactcatacaaaattttccagata

SEQ ID NO: 1271414 - DNA, 25 bp, Homo sapien
tcaagaactcatacaaaattttcca

SEQ ID NO: 1271415 - DNA, 25 bp, Homo sapien
tagcaactacgcgcaaccagtcacg

SEQ ID NO: 1271416 - DNA, 25 bp, Homo sapien
aactacgcgcaaccagtcacgtaga

SEQ ID NO: 1271417 - DNA, 25 bp, Homo sapien
ctacgcgcaaccagtcacgtagatt

SEQ ID NO: 1271418 - DNA, 25 bp, Homo sapien
gcaactacgcgcaaccagtcacgta

SEQ ID NO: 1271419 - DNA, 25 bp, Homo sapien
tcggatgtcacggtgatcttgctct

SEQ ID NO: 1271420 - DNA, 25 bp, Homo sapien
cggatgtcacggtgatcttgctctt

SEQ ID NO: 1271421 - DNA, 25 bp, Homo sapien
ctcctttcgatggtcaccacccctc

SEQ ID NO: 1271422 - DNA, 25 bp, Homo sapien
ctttcgatggtcaccacccctccac

SEQ ID NO: 1271423 - DNA, 25 bp, Homo sapien
catccatgattccatcttctacagg

SEQ ID NO: 1271424 - DNA, 25 bp, Homo sapien
agagtgaacttcagaacttgcttct

SEQ ID NO: 1271425 - DNA, 25 bp, Homo sapien
tcttctacagggtgggtgcaatcaa

SEQ ID NO: 1271426 - DNA, 25 bp, Homo sapien
gcaatcaagagtgaacttcagaact

SEQ ID NO: 1271427 - DNA, 25 bp, Homo sapien
tcagtcggaaaaacaagattaacag

SEQ ID NO: 1271428 - DNA, 25 bp, Homo sapien
taacggaagtgtgctccctttgcca

SEQ ID NO: 1271429 - DNA, 25 bp, Homo sapien
taacagaaccagaaacgtcataggt

SEQ ID NO: 1271430 - DNA, 25 bp, Homo sapien
agatgaagtttcagtcagtcggaaa

SEQ ID NO: 1271431 - DNA, 25 bp, Homo sapien
ccagcttggacaaggttaaggctaa

SEQ ID NO: 1271432 - DNA, 25 bp, Homo sapien
tagggtcctgatccgtcttagctca

SEQ ID NO: 1271433 - DNA, 25 bp, Homo sapien
tccccaatctctacaggcatgaagg

SEQ ID NO: 1271434 - DNA, 25 bp, Homo sapien
tccaaaattagagtgcaggcataca

SEQ ID NO: 1271435 - DNA, 25 bp, Homo sapien
tctaagaggggtactttaagatcta

SEQ ID NO: 1271436 - DNA, 25 bp, Homo sapien
tttaagatctattccgaacacacac

SEQ ID NO: 1271437 - DNA, 25 bp, Homo sapien
ttcgcagtaataatctaagaggggt

SEQ ID NO: 1271438 - DNA, 25 bp, Homo sapien
cacacacaatcaatcaagagaccta

SEQ ID NO: 1271439 - DNA, 25 bp, Homo sapien
caaaagcccaaccagacagaaagag

SEQ ID NO: 1271440 - DNA, 25 bp, Homo sapien
tcaaataacctaggaggagggcgcc

SEQ ID NO: 1271441 - DNA, 25 bp, Homo sapien
gcccagtcccagcatagctaaagga

SEQ ID NO: 1271442 - DNA, 25 bp, Homo sapien
cacccgtttgggtctgtacagtgcg

SEQ ID NO: 1271443 - DNA, 25 bp, Homo sapien
ggcctcctccgcctacaacgtgctg

SEQ ID NO: 1271444 - DNA, 25 bp, Homo sapien
cgcctacaacgtgctgggatcggca

SEQ ID NO: 1271445 - DNA, 25 bp, Homo sapien
cctacaacgtgctgggatcggcagg

SEQ ID NO: 1271446 - DNA, 25 bp, Homo sapien
tccgcctacaacgtgctgggatcgg

SEQ ID NO: 1271447 - DNA, 25 bp, Homo sapien
cgaggcccacgtgcctcccctggag

SEQ ID NO: 1271448 - DNA, 25 bp, Homo sapien
aggcccacgtgcctcccctggagcc

SEQ ID NO: 1271449 - DNA, 25 bp, Homo sapien
cccagcgagcctgggtagatgccgg

SEQ ID NO: 1271450 - DNA, 25 bp, Homo sapien
ccccagcgagcctgggtagatgccg

SEQ ID NO: 1271451 - DNA, 25 bp, Homo sapien
cggcagcggagttagaaagggaggt

SEQ ID NO: 1271452 - DNA, 25 bp, Homo sapien
gcagcggagttagaaagggaggtga

SEQ ID NO: 1271453 - DNA, 25 bp, Homo sapien
cagcggagttagaaagggaggtgag

SEQ ID NO: 1271454 - DNA, 25 bp, Homo sapien
ggcggcagcggagttagaaagggag

SEQ ID NO: 1271455 - DNA, 25 bp, Homo sapien
gctttcaactcaggcctcaagccgg

SEQ ID NO: 1271456 - DNA, 25 bp, Homo sapien
caccagaagagactgtgctgatggg

SEQ ID NO: 1271457 - DNA, 25 bp, Homo sapien
tctataatgatcaggctgggcctct

SEQ ID NO: 1271458 - DNA, 25 bp, Homo sapien
tagcaaaagtccaatcaccagaaga

SEQ ID NO: 1271459 - DNA, 25 bp, Homo sapien
cagcagtggaatccagtctgcactt

SEQ ID NO: 1271460 - DNA, 25 bp, Homo sapien
agtggaatccagtctgcacttattc

SEQ ID NO: 1271461 - DNA, 25 bp, Homo sapien
ggaagcagcagtggaatccagtctg

SEQ ID NO: 1271462 - DNA, 25 bp, Homo sapien
tggaagcagcagtggaatccagtct

SEQ ID NO: 1271463 - DNA, 25 bp, Homo sapien
gagaaagctcactgatcacgtcgac

SEQ ID NO: 1271464 - DNA, 25 bp, Homo sapien
gcttgactttgtaatcgcaagaggg

SEQ ID NO: 1271465 - DNA, 25 bp, Homo sapien
cacgggcggagaaagctcactgatc

SEQ ID NO: 1271466 - DNA, 25 bp, Homo sapien
aaacgggctgctctcaggacactca

SEQ ID NO: 1271467 - DNA, 25 bp, Homo sapien
gcactgctggaaaggccgggaacct

SEQ ID NO: 1271468 - DNA, 25 bp, Homo sapien
caagcgagcgcacgctggagaaaac

SEQ ID NO: 1271469 - DNA, 25 bp, Homo sapien
gccttaattaagtggacgcccagta

SEQ ID NO: 1271470 - DNA, 25 bp, Homo sapien
ggagaaaacgctgggatcaacacgc

SEQ ID NO: 1271471 - DNA, 25 bp, Homo sapien
tcccaagcgctggaaagtcggtgga

SEQ ID NO: 1271472 - DNA, 25 bp, Homo sapien
tctattttaacccagcgctgaggct

SEQ ID NO: 1271473 - DNA, 25 bp, Homo sapien
ggtcagtaacatggccaagagctca

SEQ ID NO: 1271474 - DNA, 25 bp, Homo sapien
ctcacaaccagcgaaaggcagggct

SEQ ID NO: 1271475 - DNA, 25 bp, Homo sapien
aagtgggtatatcagagcgccaagt

SEQ ID NO: 1271476 - DNA, 25 bp, Homo sapien
gtgggtatatcagagcgccaagtgc

SEQ ID NO: 1271477 - DNA, 25 bp, Homo sapien
taaagtgggtatatcagagcgccaa

SEQ ID NO: 1271478 - DNA, 25 bp, Homo sapien
ctgtaaagtgggtatatcagagcgc

SEQ ID NO: 1271479 - DNA, 25 bp, Homo sapien
tgttctccaccgacaagaagttgct

SEQ ID NO: 1271480 - DNA, 25 bp, Homo sapien
acactgcgtggacctggaatcggct

SEQ ID NO: 1271481 - DNA, 25 bp, Homo sapien
tccgcgacatgcagaagtgcgtaca

SEQ ID NO: 1271482 - DNA, 25 bp, Homo sapien
agaagttgctgttgtgcatccgctg

SEQ ID NO: 1271483 - DNA, 25 bp, Homo sapien
ccgagctgaattcgcgcgctgtctg

SEQ ID NO: 1271484 - DNA, 25 bp, Homo sapien
tggccagggcgagtccactaagtag

SEQ ID NO: 1271485 - DNA, 25 bp, Homo sapien
tgctaacacgtgagcagcaaccggg

SEQ ID NO: 1271486 - DNA, 25 bp, Homo sapien
agattgccagtgaccaccgagctga

SEQ ID NO: 1271487 - DNA, 25 bp, Homo sapien
caccaaggtacgctcagggaaatcg

SEQ ID NO: 1271488 - DNA, 25 bp, Homo sapien
agaacacgcccttcgcagagcactg

SEQ ID NO: 1271489 - DNA, 25 bp, Homo sapien
gggaaatcgagttctcccagctgct

SEQ ID NO: 1271490 - DNA, 25 bp, Homo sapien
cactatgaggactcctaccgggtga

SEQ ID NO: 1271491 - DNA, 25 bp, Homo sapien
ttgtcaagagtaaaacccagaagct

SEQ ID NO: 1271492 - DNA, 25 bp, Homo sapien
tcacagtagcttgggatgactccca

SEQ ID NO: 1271493 - DNA, 25 bp, Homo sapien
cataatttcagatcctttggcttgg

SEQ ID NO: 1271494 - DNA, 25 bp, Homo sapien
tgacaatccagcaagaaatccctcg

SEQ ID NO: 1271495 - DNA, 25 bp, Homo sapien
taattactccgttcagttcctctcc

SEQ ID NO: 1271496 - DNA, 25 bp, Homo sapien
aaagaagagtagaataattactccg

SEQ ID NO: 1271497 - DNA, 25 bp, Homo sapien
tcttccaaacccatgacaagtgcca

SEQ ID NO: 1271498 - DNA, 25 bp, Homo sapien
ctgcagatggctgggtcttccaaac

SEQ ID NO: 1271499 - DNA, 25 bp, Homo sapien
tgttggcgagatcttacaaagcctg

SEQ ID NO: 1271500 - DNA, 25 bp, Homo sapien
ggtactcctaagcagctagctgttg

SEQ ID NO: 1271501 - DNA, 25 bp, Homo sapien
caaaagcaaactagggtgggcaagc

SEQ ID NO: 1271502 - DNA, 25 bp, Homo sapien
tcattaacctgattctccacgggcc

SEQ ID NO: 1271503 - DNA, 25 bp, Homo sapien
ttcaccatgaaaccctaagacctgc

SEQ ID NO: 1271504 - DNA, 25 bp, Homo sapien
catggctcccaatgggaatggaggc

SEQ ID NO: 1271505 - DNA, 25 bp, Homo sapien
gcagagtacgtcaagttttccctgg

SEQ ID NO: 1271506 - DNA, 25 bp, Homo sapien
gtcagcttaccatccacaaggccag

SEQ ID NO: 1271507 - DNA, 25 bp, Homo sapien
aaattgtaatgatggctcggccacc

SEQ ID NO: 1271508 - DNA, 25 bp, Homo sapien
actgaagtgcaaaggcccgatctca

SEQ ID NO: 1271509 - DNA, 25 bp, Homo sapien
gaagtggaatttgctgccctaggcg

SEQ ID NO: 1271510 - DNA, 25 bp, Homo sapien
gaatctaactacatcctctcccggt

SEQ ID NO: 1271511 - DNA, 25 bp, Homo sapien
ccaaataaacggagagcagcacttc

SEQ ID NO: 1271512 - DNA, 25 bp, Homo sapien
tctcaatgtttaaggccacgcacag

SEQ ID NO: 1271513 - DNA, 25 bp, Homo sapien
tgaactagaacaccaagcattgagc

SEQ ID NO: 1271514 - DNA, 25 bp, Homo sapien
gattcggcataaggacagactgctc

SEQ ID NO: 1271515 - DNA, 25 bp, Homo sapien
cttcttcttctgttcgatcgcggaa

SEQ ID NO: 1271516 - DNA, 25 bp, Homo sapien
gatcgcggaagaatcgccacactgt

SEQ ID NO: 1271517 - DNA, 25 bp, Homo sapien
tcagggcatagctgacgccgcagat

SEQ ID NO: 1271518 - DNA, 25 bp, Homo sapien
gggcaccctcttcttatactccagg

SEQ ID NO: 1271519 - DNA, 25 bp, Homo sapien
ggatgccgaaaccaagcgtacactc

SEQ ID NO: 1271520 - DNA, 25 bp, Homo sapien
cactggtcaccagagtatgtgtatc

SEQ ID NO: 1271521 - DNA, 25 bp, Homo sapien
gaaattggagccagctgtaaacatg

SEQ ID NO: 1271522 - DNA, 25 bp, Homo sapien
cacccgacgtaagaaggatgccgaa

SEQ ID NO: 1271523 - DNA, 25 bp, Homo sapien
aagtattcagaatagtggaacaatg

SEQ ID NO: 1271524 - DNA, 25 bp, Homo sapien
gtcaccaagtattcagaatagtgga

SEQ ID NO: 1271525 - DNA, 25 bp, Homo sapien
aaagagcagctactgtatactccag

SEQ ID NO: 1271526 - DNA, 25 bp, Homo sapien
gctactgtatactccaggctgtgat

SEQ ID NO: 1271527 - DNA, 25 bp, Homo sapien
actggttcatatccaggtcagacta

SEQ ID NO: 1271528 - DNA, 25 bp, Homo sapien
tggttcatatccaggtcagactaga

SEQ ID NO: 1271529 - DNA, 25 bp, Homo sapien
ggttcatatccaggtcagactagaa

SEQ ID NO: 1271530 - DNA, 25 bp, Homo sapien
ctggttcatatccaggtcagactag

SEQ ID NO: 1271531 - DNA, 25 bp, Homo sapien
gaaatcatagtgtagggaaaaatcc

SEQ ID NO: 1271532 - DNA, 25 bp, Homo sapien
gggactgaaatcatagtgtagggaa

SEQ ID NO: 1271533 - DNA, 25 bp, Homo sapien
tcatagtgtagggaaaaatcctaca

SEQ ID NO: 1271534 - DNA, 25 bp, Homo sapien
gactgaaatcatagtgtagggaaaa

SEQ ID NO: 1271535 - DNA, 25 bp, Homo sapien
ggctaaaacttagcagcgtgccgca

SEQ ID NO: 1271536 - DNA, 25 bp, Homo sapien
ccaggaaacaagctcggatggctat

SEQ ID NO: 1271537 - DNA, 25 bp, Homo sapien
gcagccgaacacaaaccccaggaaa

SEQ ID NO: 1271538 - DNA, 25 bp, Homo sapien
gcagcgtgccgcagccgaacacaaa

SEQ ID NO: 1271539 - DNA, 25 bp, Homo sapien
ctggtagcgaggcggccgatagagc

SEQ ID NO: 1271540 - DNA, 25 bp, Homo sapien
tggtagcgaggcggccgatagagca

SEQ ID NO: 1271541 - DNA, 25 bp, Homo sapien
gtagcgaggcggccgatagagcagc

SEQ ID NO: 1271542 - DNA, 25 bp, Homo sapien
tagcgaggcggccgatagagcagca

SEQ ID NO: 1271543 - DNA, 25 bp, Homo sapien
gcggcagcgcgagcaccgaggcgcc

SEQ ID NO: 1271544 - DNA, 25 bp, Homo sapien
cggcagcgcgagcaccgaggcgccc

SEQ ID NO: 1271545 - DNA, 25 bp, Homo sapien
cagcggcagcgcgagcaccgaggcg

SEQ ID NO: 1271546 - DNA, 25 bp, Homo sapien
agcggcagcgcgagcaccgaggcgc

SEQ ID NO: 1271547 - DNA, 25 bp, Homo sapien
acgcgcctcagagcccggcggagcc

SEQ ID NO: 1271548 - DNA, 25 bp, Homo sapien
ctgagacgcgcctcagagcccggcg

SEQ ID NO: 1271549 - DNA, 25 bp, Homo sapien
agacgcgcctcagagcccggcggag

SEQ ID NO: 1271550 - DNA, 25 bp, Homo sapien
cggcggagcccgcgccgcgcagccc

SEQ ID NO: 1271551 - DNA, 25 bp, Homo sapien
cggctgtagcccggagaaacgcgcc

SEQ ID NO: 1271552 - DNA, 25 bp, Homo sapien
gcgccgggcggcggactagcgggcg

SEQ ID NO: 1271553 - DNA, 25 bp, Homo sapien
ggcgccgggcggcggactagcgggc

SEQ ID NO: 1271554 - DNA, 25 bp, Homo sapien
ctgtagcccggagaaacgcgccggc

SEQ ID NO: 1271555 - DNA, 25 bp, Homo sapien
gggttgtagagtaatatgtaaccag

SEQ ID NO: 1271556 - DNA, 25 bp, Homo sapien
gactgttgccactcggggttgtaga

SEQ ID NO: 1271557 - DNA, 25 bp, Homo sapien
gagtaatatgtaaccagactggaga

SEQ ID NO: 1271558 - DNA, 25 bp, Homo sapien
gactggagaaccacagcaatgctct

SEQ ID NO: 1271559 - DNA, 25 bp, Homo sapien
gccccaacacagctaaagagagtta

SEQ ID NO: 1271560 - DNA, 25 bp, Homo sapien
ctgaattcactctccccgagctggg

SEQ ID NO: 1271561 - DNA, 25 bp, Homo sapien
caaccgcatctggagacaattggct

SEQ ID NO: 1271562 - DNA, 25 bp, Homo sapien
gagttaaacaatcgcagcctctcca

SEQ ID NO: 1271563 - DNA, 25 bp, Homo sapien
tgggatgggccgcaggtagggctct

SEQ ID NO: 1271564 - DNA, 25 bp, Homo sapien
cagttagcactggttgaaacctctg

SEQ ID NO: 1271565 - DNA, 25 bp, Homo sapien
ccacacggctgtcctctgggatggg

SEQ ID NO: 1271566 - DNA, 25 bp, Homo sapien
tgggccgcaggtagggctcttgtcc

SEQ ID NO: 1271567 - DNA, 25 bp, Homo sapien
acgggccacaggacagggggcgcgg

SEQ ID NO: 1271568 - DNA, 25 bp, Homo sapien
gcgcggcgggcagtgtcggggttgg

SEQ ID NO: 1271569 - DNA, 25 bp, Homo sapien
aacgggccacaggacagggggcgcg

SEQ ID NO: 1271570 - DNA, 25 bp, Homo sapien
cagggggcgcggcgggcagtgtcgg

SEQ ID NO: 1271571 - DNA, 25 bp, Homo sapien
cctggctctgggtgtgctatgaaga

SEQ ID NO: 1271572 - DNA, 25 bp, Homo sapien
tattgccgttggatatgaaacacac

SEQ ID NO: 1271573 - DNA, 25 bp, Homo sapien
tgtttgtaaaaaccgcaggattgga

SEQ ID NO: 1271574 - DNA, 25 bp, Homo sapien
tacgtaacttgtcagtccttgaagg

SEQ ID NO: 1271575 - DNA, 25 bp, Homo sapien
gcacaggcaggctctatgctcacct

SEQ ID NO: 1271576 - DNA, 25 bp, Homo sapien
tggtcaaggtggctcaggtgccatt

SEQ ID NO: 1271577 - DNA, 25 bp, Homo sapien
ttctccttagcctgggaagacccag

SEQ ID NO: 1271578 - DNA, 25 bp, Homo sapien
ggacaggcaacgacggcagagtaat

SEQ ID NO: 1271579 - DNA, 25 bp, Homo sapien
taacgtggtcacctgctcatcacag

SEQ ID NO: 1271580 - DNA, 25 bp, Homo sapien
caaaggccgcagagggctctagact

SEQ ID NO: 1271581 - DNA, 25 bp, Homo sapien
gaaacctgatcaaagcttgttcggg

SEQ ID NO: 1271582 - DNA, 25 bp, Homo sapien
caaacagccctgagagttaacgtgg

SEQ ID NO: 1271583 - DNA, 25 bp, Homo sapien
agagagccggcgtgcgagtgcgcag

SEQ ID NO: 1271584 - DNA, 25 bp, Homo sapien
ggtcagggcgaaggcgtcgggcagc

SEQ ID NO: 1271585 - DNA, 25 bp, Homo sapien
agtccgagtgcagcgtggcgtagcc

SEQ ID NO: 1271586 - DNA, 25 bp, Homo sapien
ctgtggctcgcactcgaaggcggtc

SEQ ID NO: 1271587 - DNA, 25 bp, Homo sapien
ggccaggaggctggcgcggcgccgc

SEQ ID NO: 1271588 - DNA, 25 bp, Homo sapien
gccgctcgggcccggcaggcagcac

SEQ ID NO: 1271589 - DNA, 25 bp, Homo sapien
gctggcgcggcgccgctcgggcccg

SEQ ID NO: 1271590 - DNA, 25 bp, Homo sapien
ggtggtgcgtcctccgcgaaggcca

SEQ ID NO: 1271591 - DNA, 25 bp, Homo sapien
gggacggcggcccacacgtccgcat

SEQ ID NO: 1271592 - DNA, 25 bp, Homo sapien
acgtccgcatcgtcgtgggagaagc

SEQ ID NO: 1271593 - DNA, 25 bp, Homo sapien
ccacacgtccgcatcgtcgtgggag

SEQ ID NO: 1271594 - DNA, 25 bp, Homo sapien
ccagcgcggcaggaaggcgggcagc

SEQ ID NO: 1271595 - DNA, 25 bp, Homo sapien
tcaggacgcggctggcttttacccc

SEQ ID NO: 1271596 - DNA, 25 bp, Homo sapien
ctgtcaggacgcggctggcttttac

SEQ ID NO: 1271597 - DNA, 25 bp, Homo sapien
gcggctggcttttaccccgagctgc

SEQ ID NO: 1271598 - DNA, 25 bp, Homo sapien
gacgcggctggcttttaccccgagc

SEQ ID NO: 1271599 - DNA, 25 bp, Homo sapien
ctgcaggtattgcatcttgtcctcc

SEQ ID NO: 1271600 - DNA, 25 bp, Homo sapien
tgcaagggccgcagtgggtagagct

SEQ ID NO: 1271601 - DNA, 25 bp, Homo sapien
ccctccagggcggagatctcatact

SEQ ID NO: 1271602 - DNA, 25 bp, Homo sapien
tcatacttggccatcctatctaggg

SEQ ID NO: 1271603 - DNA, 25 bp, Homo sapien
cggtcgcaggcccagaggaacacag

SEQ ID NO: 1271604 - DNA, 25 bp, Homo sapien
cgcagagtgccatccagggcgctga

SEQ ID NO: 1271605 - DNA, 25 bp, Homo sapien
gacagctttgaggtcagcccggtag

SEQ ID NO: 1271606 - DNA, 25 bp, Homo sapien
cgtctgactcctcgtcgttggccat

SEQ ID NO: 1271607 - DNA, 25 bp, Homo sapien
atcacacaagctccccctgagtctc

SEQ ID NO: 1271608 - DNA, 25 bp, Homo sapien
catcacacaagctccccctgagtct

SEQ ID NO: 1271609 - DNA, 25 bp, Homo sapien
tgacaggtgggtatctgccaaggag

SEQ ID NO: 1271610 - DNA, 25 bp, Homo sapien
catgtgtacggcaggtctgacaggt

SEQ ID NO: 1271611 - DNA, 25 bp, Homo sapien
gcttggatgaaacccctcaggctgg

SEQ ID NO: 1271612 - DNA, 25 bp, Homo sapien
gagtcaccattctggagctcatgtc

SEQ ID NO: 1271613 - DNA, 25 bp, Homo sapien
tcttccccgtccgtaagagacgcag

SEQ ID NO: 1271614 - DNA, 25 bp, Homo sapien
actctgctcccgaggtgccttgtgg

SEQ ID NO: 1271615 - DNA, 25 bp, Homo sapien
gatctcagccacgatgaagcggcag

SEQ ID NO: 1271616 - DNA, 25 bp, Homo sapien
aagactatggtggtcacgaggcccg

SEQ ID NO: 1271617 - DNA, 25 bp, Homo sapien
cagccatgggtgtagaagcgctcgc

SEQ ID NO: 1271618 - DNA, 25 bp, Homo sapien
gaaggacaccatccagatacccatg

SEQ ID NO: 1271619 - DNA, 25 bp, Homo sapien
acatttagcatgtgggtggccgcga

SEQ ID NO: 1271620 - DNA, 25 bp, Homo sapien
gcagagaccctcattccactcgaag

SEQ ID NO: 1271621 - DNA, 25 bp, Homo sapien
cagaccatccacatgcggtggtagg

SEQ ID NO: 1271622 - DNA, 25 bp, Homo sapien
tggccgcgagtgtacacagcaggaa

SEQ ID NO: 1271623 - DNA, 25 bp, Homo sapien
ctcctggtggctcaaggatgctggg

SEQ ID NO: 1271624 - DNA, 25 bp, Homo sapien
ctcactcctggtggctcaaggatgc

SEQ ID NO: 1271625 - DNA, 25 bp, Homo sapien
cactcctggtggctcaaggatgctg

SEQ ID NO: 1271626 - DNA, 25 bp, Homo sapien
actcctggtggctcaaggatgctgg

SEQ ID NO: 1271627 - DNA, 25 bp, Homo sapien
gtggcaccacctcagctcctgcaac

SEQ ID NO: 1271628 - DNA, 25 bp, Homo sapien
cagtggcaccacctcagctcctgca

SEQ ID NO: 1271629 - DNA, 25 bp, Homo sapien
tcttgtgcctcagccccgagtggct

SEQ ID NO: 1271630 - DNA, 25 bp, Homo sapien
ctacatgcatacaccaccatgctcg

SEQ ID NO: 1271631 - DNA, 25 bp, Homo sapien
accgggttccaagtgcagagtgaca

SEQ ID NO: 1271632 - DNA, 25 bp, Homo sapien
gatccacggattgcaccctttctgt

SEQ ID NO: 1271633 - DNA, 25 bp, Homo sapien
gggtcagtgaccacagatccacgga

SEQ ID NO: 1271634 - DNA, 25 bp, Homo sapien
cattcttcatagaatggagcggcca

SEQ ID NO: 1271635 - DNA, 25 bp, Homo sapien
gctccggctgcggttcccgcgcccc

SEQ ID NO: 1271636 - DNA, 25 bp, Homo sapien
ctgcattcgagcgcccggggctccg

SEQ ID NO: 1271637 - DNA, 25 bp, Homo sapien
gggccgagcgcaggccgccgagggc

SEQ ID NO: 1271638 - DNA, 25 bp, Homo sapien
ggctccggctcgctgctcccgcctc

SEQ ID NO: 1271639 - DNA, 25 bp, Homo sapien
ttattagtggtgctgggttcttccc

SEQ ID NO: 1271640 - DNA, 25 bp, Homo sapien
taacactgtgatacgaaaacttcag

SEQ ID NO: 1271641 - DNA, 25 bp, Homo sapien
ccataccctacagcgtgctcggaag

SEQ ID NO: 1271642 - DNA, 25 bp, Homo sapien
cggcgctcgggacaacactgtgtag

SEQ ID NO: 1271643 - DNA, 25 bp, Homo sapien
tcaatgtgaattgggtttttggcca

SEQ ID NO: 1271644 - DNA, 25 bp, Homo sapien
tgggcccgttgccatggctactcga

SEQ ID NO: 1271645 - DNA, 25 bp, Homo sapien
tgccatggctactcgaggcaccagt

SEQ ID NO: 1271646 - DNA, 25 bp, Homo sapien
gctactcgaggcaccagtggcagga

SEQ ID NO: 1271647 - DNA, 25 bp, Homo sapien
tgaggctccgcgtggccctgtcgct

SEQ ID NO: 1271648 - DNA, 25 bp, Homo sapien
gcgtggccctgtcgcttcgccttca

SEQ ID NO: 1271649 - DNA, 25 bp, Homo sapien
tcctcaaagcgcttcttctcgtcct

SEQ ID NO: 1271650 - DNA, 25 bp, Homo sapien
tcatctgcaggtaccgccctttgcc

SEQ ID NO: 1271651 - DNA, 25 bp, Homo sapien
tgactgggctgggtatgttcagcca

SEQ ID NO: 1271652 - DNA, 25 bp, Homo sapien
gtatgttcagccaagatgctttgag

SEQ ID NO: 1271653 - DNA, 25 bp, Homo sapien
cgctgatgggcctattgactgggct

SEQ ID NO: 1271654 - DNA, 25 bp, Homo sapien
tcgctgatgggcctattgactgggc

SEQ ID NO: 1271655 - DNA, 25 bp, Homo sapien
tcggtggaaaatgcacttgataatg

SEQ ID NO: 1271656 - DNA, 25 bp, Homo sapien
ttcacagcaggtgacctccaagccc

SEQ ID NO: 1271657 - DNA, 25 bp, Homo sapien
tgtttgctactggacttcggtggaa

SEQ ID NO: 1271658 - DNA, 25 bp, Homo sapien
tactggacttcggtggaaaatgcac

SEQ ID NO: 1271659 - DNA, 25 bp, Homo sapien
tttattgaagaagtccctcccgctg

SEQ ID NO: 1271660 - DNA, 25 bp, Homo sapien
gcagaatgtgctagatcagggcttc

SEQ ID NO: 1271661 - DNA, 25 bp, Homo sapien
gaagagtcttcggtgtacacaggaa

SEQ ID NO: 1271662 - DNA, 25 bp, Homo sapien
tgcagatgacaagctcccctgaaga

SEQ ID NO: 1271663 - DNA, 25 bp, Homo sapien
actcaggcgcctcccagtctgaaag

SEQ ID NO: 1271664 - DNA, 25 bp, Homo sapien
tctagctggtggagtatctgccctc

SEQ ID NO: 1271665 - DNA, 25 bp, Homo sapien
ttggtactgggttctgctggctttg

SEQ ID NO: 1271666 - DNA, 25 bp, Homo sapien
ttcctgcctaccttgaagaccctgt

SEQ ID NO: 1271667 - DNA, 25 bp, Homo sapien
aggatgaggtggcaaagggcagctc

SEQ ID NO: 1271668 - DNA, 25 bp, Homo sapien
ggatgaggtggcaaagggcagctca

SEQ ID NO: 1271669 - DNA, 25 bp, Homo sapien
cagcacacctaggcttggccatccc

SEQ ID NO: 1271670 - DNA, 25 bp, Homo sapien
caggagcctgcaacagtgacaaaga

SEQ ID NO: 1271671 - DNA, 25 bp, Homo sapien
ggagcctgcaacagtgacaaagatg

SEQ ID NO: 1271672 - DNA, 25 bp, Homo sapien
gaacaggagcctgcaacagtgacaa

SEQ ID NO: 1271673 - DNA, 25 bp, Homo sapien
ggcccctgcactcatgcaggtgaac

SEQ ID NO: 1271674 - DNA, 25 bp, Homo sapien
cccctgcactcatgcaggtgaacca

SEQ ID NO: 1271675 - DNA, 25 bp, Homo sapien
ccggcccctgcactcatgcaggtga

SEQ ID NO: 1271676 - DNA, 25 bp, Homo sapien
cggcccctgcactcatgcaggtgaa

SEQ ID NO: 1271677 - DNA, 25 bp, Homo sapien
cgtgcatttcggtgggagagggagc

SEQ ID NO: 1271678 - DNA, 25 bp, Homo sapien
gagagggagcaactcggattttgat

SEQ ID NO: 1271679 - DNA, 25 bp, Homo sapien
gcaactcggattttgatgaccagtt

SEQ ID NO: 1271680 - DNA, 25 bp, Homo sapien
gggagcaactcggattttgatgacc

SEQ ID NO: 1271681 - DNA, 25 bp, Homo sapien
atggatctgaccaccccaggagaga

SEQ ID NO: 1271682 - DNA, 25 bp, Homo sapien
ggagtatccctacagacactacagg

SEQ ID NO: 1271683 - DNA, 25 bp, Homo sapien
atacaacacacaggcgatgctcgag

SEQ ID NO: 1271684 - DNA, 25 bp, Homo sapien
tgctcgaggcacagaccatggatct

SEQ ID NO: 1271685 - DNA, 25 bp, Homo sapien
ggtcggcgtccaccaacacctcgat

SEQ ID NO: 1271686 - DNA, 25 bp, Homo sapien
gaagaaggcactggcggcccggtag

SEQ ID NO: 1271687 - DNA, 25 bp, Homo sapien
ctcagcgacacgtaggtgaagaagg

SEQ ID NO: 1271688 - DNA, 25 bp, Homo sapien
gtccacaacagggtcggcgtccacc

SEQ ID NO: 1271689 - DNA, 25 bp, Homo sapien
catgcgtcccgagatggtgatgacg

SEQ ID NO: 1271690 - DNA, 25 bp, Homo sapien
cgtcccgagatggtgatgacgcagc

SEQ ID NO: 1271691 - DNA, 25 bp, Homo sapien
gtcatgcgtcccgagatggtgatga

SEQ ID NO: 1271692 - DNA, 25 bp, Homo sapien
tgcgtcccgagatggtgatgacgca

SEQ ID NO: 1271693 - DNA, 25 bp, Homo sapien
tcagcgccagcaggcattacgtgag

SEQ ID NO: 1271694 - DNA, 25 bp, Homo sapien
gtcagcgccagcaggcattacgtga

SEQ ID NO: 1271695 - DNA, 25 bp, Homo sapien
gcagtcacaagacgcaccccgggag

SEQ ID NO: 1271696 - DNA, 25 bp, Homo sapien
atgcaaagcgcccgcagtcacaaga

SEQ ID NO: 1271697 - DNA, 25 bp, Homo sapien
aaagcgcccgcagtcacaagacgca

SEQ ID NO: 1271698 - DNA, 25 bp, Homo sapien
gtcacaagacgcaccccgggaggag

SEQ ID NO: 1271699 - DNA, 25 bp, Homo sapien
tagctgttagcaagactgagaggtt

SEQ ID NO: 1271700 - DNA, 25 bp, Homo sapien
aagtagttgttgagcctgcctggag

SEQ ID NO: 1271701 - DNA, 25 bp, Homo sapien
cacagcccgtgagcgctggcaggta

SEQ ID NO: 1271702 - DNA, 25 bp, Homo sapien
gagctgtggctgttaactttcgtaa

SEQ ID NO: 1271703 - DNA, 25 bp, Homo sapien
ctgcctccctcgtctttgccagaag

SEQ ID NO: 1271704 - DNA, 25 bp, Homo sapien
ccactgcctccctcgtctttgccag

SEQ ID NO: 1271705 - DNA, 25 bp, Homo sapien
actgcctccctcgtctttgccagaa

SEQ ID NO: 1271706 - DNA, 25 bp, Homo sapien
cactgcctccctcgtctttgccaga

SEQ ID NO: 1271707 - DNA, 25 bp, Homo sapien
cggaagctgtgacgatgttggtctt

SEQ ID NO: 1271708 - DNA, 25 bp, Homo sapien
taatggcgtccacggaagctgtgac

SEQ ID NO: 1271709 - DNA, 25 bp, Homo sapien
atgaaaattaatggcgtccacggaa

SEQ ID NO: 1271710 - DNA, 25 bp, Homo sapien
cgatcccggcgacctcatccatgag

SEQ ID NO: 1271711 - DNA, 25 bp, Homo sapien
ggacatgcggcagatgagacacgga

SEQ ID NO: 1271712 - DNA, 25 bp, Homo sapien
gaaacaagttacaactcgagccctc

SEQ ID NO: 1271713 - DNA, 25 bp, Homo sapien
cacggaggcagaggagattatttca

SEQ ID NO: 1271714 - DNA, 25 bp, Homo sapien
tttcacaccctggaaacaagttaca

SEQ ID NO: 1271715 - DNA, 25 bp, Homo sapien
cacagagggaccgtataacctagca

SEQ ID NO: 1271716 - DNA, 25 bp, Homo sapien
ttcgcaagaggataaacacagaggg

SEQ ID NO: 1271717 - DNA, 25 bp, Homo sapien
tctacagatatctcaccctgctggg

SEQ ID NO: 1271718 - DNA, 25 bp, Homo sapien
aaaaaacgaccatggctgatatgcc

SEQ ID NO: 1271719 - DNA, 25 bp, Homo sapien
ctcgctctgtcaccaagattggagt

SEQ ID NO: 1271720 - DNA, 25 bp, Homo sapien
tacagatgtgtaccaccacacccaa

SEQ ID NO: 1271721 - DNA, 25 bp, Homo sapien
gcagtggcacaatctcagctccctg

SEQ ID NO: 1271722 - DNA, 25 bp, Homo sapien
ctcctgcctccgcctcctagtagct

SEQ ID NO: 1271723 - DNA, 25 bp, Homo sapien
gggcttgggatgctctacactctgc

SEQ ID NO: 1271724 - DNA, 25 bp, Homo sapien
gccaggttcacgctcgctgcacttt

SEQ ID NO: 1271725 - DNA, 25 bp, Homo sapien
tctgttcggctcaacctgtgctggg

SEQ ID NO: 1271726 - DNA, 25 bp, Homo sapien
tgctgctaaatgaggtaggacaggt

SEQ ID NO: 1271727 - DNA, 25 bp, Homo sapien
cacaaagccgtgcagggtgcagtct

SEQ ID NO: 1271728 - DNA, 25 bp, Homo sapien
cgtgcacaaagccgtgcagggtgca

SEQ ID NO: 1271729 - DNA, 25 bp, Homo sapien
gcacaaagccgtgcagggtgcagtc

SEQ ID NO: 1271730 - DNA, 25 bp, Homo sapien
ctccgtgcacaaagccgtgcagggt

SEQ ID NO: 1271731 - DNA, 25 bp, Homo sapien
atatctttaagaggccgcacttaag

SEQ ID NO: 1271732 - DNA, 25 bp, Homo sapien
ccagtctctagaaggtagacctttc

SEQ ID NO: 1271733 - DNA, 25 bp, Homo sapien
aaaaagccgatgacatataacgtcc

SEQ ID NO: 1271734 - DNA, 25 bp, Homo sapien
tgcaagagccccaaatatcttggag

SEQ ID NO: 1271735 - DNA, 25 bp, Homo sapien
gactggctggacgatgtccccgttc

SEQ ID NO: 1271736 - DNA, 25 bp, Homo sapien
gaggactggctggacgatgtccccg

SEQ ID NO: 1271737 - DNA, 25 bp, Homo sapien
tggctggacgatgtccccgttcctc

SEQ ID NO: 1271738 - DNA, 25 bp, Homo sapien
aggactggctggacgatgtccccgt

SEQ ID NO: 1271739 - DNA, 25 bp, Homo sapien
tggccttattggtcagctttttggc

SEQ ID NO: 1271740 - DNA, 25 bp, Homo sapien
ggtggccttattggtcagctttttg

SEQ ID NO: 1271741 - DNA, 25 bp, Homo sapien
gccttattggtcagctttttggcac

SEQ ID NO: 1271742 - DNA, 25 bp, Homo sapien
agggtggccttattggtcagctttt

SEQ ID NO: 1271743 - DNA, 25 bp, Homo sapien
gccaccaactcctgcaatgacaaag

SEQ ID NO: 1271744 - DNA, 25 bp, Homo sapien
tgggccctcacaagcaggaaggtcc

SEQ ID NO: 1271745 - DNA, 25 bp, Homo sapien
aatgacaaagggcactgctgactgg

SEQ ID NO: 1271746 - DNA, 25 bp, Homo sapien
gaagagctgcgatctcacaggagat

SEQ ID NO: 1271747 - DNA, 25 bp, Homo sapien
gtcaacactgtcgctcccagaagta

SEQ ID NO: 1271748 - DNA, 25 bp, Homo sapien
agtcaacactgtcgctcccagaagt

SEQ ID NO: 1271749 - DNA, 25 bp, Homo sapien
tcaacactgtcgctcccagaagtac

SEQ ID NO: 1271750 - DNA, 25 bp, Homo sapien
caggaagtcggtgcgctcgacacga

SEQ ID NO: 1271751 - DNA, 25 bp, Homo sapien
gagacaggaagtcggtgcgctcgac

SEQ ID NO: 1271752 - DNA, 25 bp, Homo sapien
agtcggtgcgctcgacacgagccag

SEQ ID NO: 1271753 - DNA, 25 bp, Homo sapien
aagtcggtgcgctcgacacgagcca

SEQ ID NO: 1271754 - DNA, 25 bp, Homo sapien
cacttggcctcttgatagagtggca

SEQ ID NO: 1271755 - DNA, 25 bp, Homo sapien
tagagtggcattatgcccgtgccca

SEQ ID NO: 1271756 - DNA, 25 bp, Homo sapien
gcattatgcccgtgcccatggtggg

SEQ ID NO: 1271757 - DNA, 25 bp, Homo sapien
tcccactctccaagctggggctgag

SEQ ID NO: 1271758 - DNA, 25 bp, Homo sapien
cagaggtatggggcccagaccctta

SEQ ID NO: 1271759 - DNA, 25 bp, Homo sapien
cagggcccagaggtatggggcccag

SEQ ID NO: 1271760 - DNA, 25 bp, Homo sapien
cccagaggtatggggcccagaccct

SEQ ID NO: 1271761 - DNA, 25 bp, Homo sapien
ggcccagaggtatggggcccagacc

SEQ ID NO: 1271762 - DNA, 25 bp, Homo sapien
cgttggcatcatctggccgcatgat

SEQ ID NO: 1271763 - DNA, 25 bp, Homo sapien
tgatgatggcgcctgcctcctcgat

SEQ ID NO: 1271764 - DNA, 25 bp, Homo sapien
cgttctggctgttgcaatgccgggt

SEQ ID NO: 1271765 - DNA, 25 bp, Homo sapien
cccgtggacattgccggccacgttg

SEQ ID NO: 1271766 - DNA, 25 bp, Homo sapien
gcagactgtccccagtcatagggct

SEQ ID NO: 1271767 - DNA, 25 bp, Homo sapien
gctgcagatgccactcatggctggg

SEQ ID NO: 1271768 - DNA, 25 bp, Homo sapien
cagtcatagggctgcagatgccact

SEQ ID NO: 1271769 - DNA, 25 bp, Homo sapien
tccccagtcatagggctgcagatgc

SEQ ID NO: 1271770 - DNA, 25 bp, Homo sapien
gctgccatgccaggagatcaggaag

SEQ ID NO: 1271771 - DNA, 25 bp, Homo sapien
cagaaaccggtcgtcatggaaacct

SEQ ID NO: 1271772 - DNA, 25 bp, Homo sapien
gacatcccaggatcagatgcagaga

SEQ ID NO: 1271773 - DNA, 25 bp, Homo sapien
gggtctcagccaaagccaggtctgg

SEQ ID NO: 1271774 - DNA, 25 bp, Homo sapien
tttagtgacaagcttctccgaagca

SEQ ID NO: 1271775 - DNA, 25 bp, Homo sapien
caaaacaggccctgtcgacttcctt

SEQ ID NO: 1271776 - DNA, 25 bp, Homo sapien
gccctgtcgacttcctttctgagga

SEQ ID NO: 1271777 - DNA, 25 bp, Homo sapien
tcctttctgaggacgtttagtgaca

SEQ ID NO: 1271778 - DNA, 25 bp, Homo sapien
tccccacgtctcctgtcggctccct

SEQ ID NO: 1271779 - DNA, 25 bp, Homo sapien
cgtctccccacgtctcctgtcggct

SEQ ID NO: 1271780 - DNA, 25 bp, Homo sapien
gtctcctgtcggctccctccagaag

SEQ ID NO: 1271781 - DNA, 25 bp, Homo sapien
cacgtctcctgtcggctccctccag

SEQ ID NO: 1271782 - DNA, 25 bp, Homo sapien
tgccacagaaaggcactcccaaaat

SEQ ID NO: 1271783 - DNA, 25 bp, Homo sapien
ttgccacagaaaggcactcccaaaa

SEQ ID NO: 1271784 - DNA, 25 bp, Homo sapien
tttgccacagaaaggcactcccaaa

SEQ ID NO: 1271785 - DNA, 25 bp, Homo sapien
ctttgccacagaaaggcactcccaa

SEQ ID NO: 1271786 - DNA, 25 bp, Homo sapien
aagtttcctggaattctgccaattt

SEQ ID NO: 1271787 - DNA, 25 bp, Homo sapien
gcaagtttcctggaattctgccaat

SEQ ID NO: 1271788 - DNA, 25 bp, Homo sapien
gggcaagtttcctggaattctgcca

SEQ ID NO: 1271789 - DNA, 25 bp, Homo sapien
ggcaagtttcctggaattctgccaa

SEQ ID NO: 1271790 - DNA, 25 bp, Homo sapien
ggtgcgatgaagtcacctgaggaca

SEQ ID NO: 1271791 - DNA, 25 bp, Homo sapien
aggtgcgatgaagtcacctgaggac

SEQ ID NO: 1271792 - DNA, 25 bp, Homo sapien
cccagggttgccaggtcacctcctc

SEQ ID NO: 1271793 - DNA, 25 bp, Homo sapien
tgctggcttgcaggagccttgatct

SEQ ID NO: 1271794 - DNA, 25 bp, Homo sapien
gacaaagcagggcacggatgccagc

SEQ ID NO: 1271795 - DNA, 25 bp, Homo sapien
cacctcctccaacaaagcccgggtg

SEQ ID NO: 1271796 - DNA, 25 bp, Homo sapien
ctgggcccaaccacctggacgggag

SEQ ID NO: 1271797 - DNA, 25 bp, Homo sapien
caaccacctggacgggagcgcagca

SEQ ID NO: 1271798 - DNA, 25 bp, Homo sapien
gcgcagcaccctcgccggggcccca

SEQ ID NO: 1271799 - DNA, 25 bp, Homo sapien
cttccagtaatgcaggctccacagg

SEQ ID NO: 1271800 - DNA, 25 bp, Homo sapien
cctgcggtaagtgggcaaactgttt

SEQ ID NO: 1271801 - DNA, 25 bp, Homo sapien
agcagtgagccggtgtgatccctcc

SEQ ID NO: 1271802 - DNA, 25 bp, Homo sapien
ccagtgacaagtatgatgcccagca

SEQ ID NO: 1271803 - DNA, 25 bp, Homo sapien
gctcagcagtgagccggtgtgatcc

SEQ ID NO: 1271804 - DNA, 25 bp, Homo sapien
gcagtgtccagtaaagcattgttaa

SEQ ID NO: 1271805 - DNA, 25 bp, Homo sapien
aagggctccccatcctagtacagtc

SEQ ID NO: 1271806 - DNA, 25 bp, Homo sapien
tctctgagtcaagccgatggaacca

SEQ ID NO: 1271807 - DNA, 25 bp, Homo sapien
caggaggctcctctttcaacttggg

SEQ ID NO: 1271808 - DNA, 25 bp, Homo sapien
ctttgcaaaccatggagcccaagtt

SEQ ID NO: 1271809 - DNA, 25 bp, Homo sapien
tcagcagagctgattcaggaacctg

SEQ ID NO: 1271810 - DNA, 25 bp, Homo sapien
gtaagggtggcactaccgaccatca

SEQ ID NO: 1271811 - DNA, 25 bp, Homo sapien
gagcaggatgaccttacacagttac

SEQ ID NO: 1271812 - DNA, 25 bp, Homo sapien
acggcgtctcgacgtctgggcccga

SEQ ID NO: 1271813 - DNA, 25 bp, Homo sapien
tggatggcggacggcgtctcgacgt

SEQ ID NO: 1271814 - DNA, 25 bp, Homo sapien
gcgtctcgacgtctgggcccgacat

SEQ ID NO: 1271815 - DNA, 25 bp, Homo sapien
tggcggacggcgtctcgacgtctgg

SEQ ID NO: 1271816 - DNA, 25 bp, Homo sapien
gctgcggcggcggatgcggcgggcg

SEQ ID NO: 1271817 - DNA, 25 bp, Homo sapien
gctgggggctgcggcggcggatgcg

SEQ ID NO: 1271818 - DNA, 25 bp, Homo sapien
gggctgcggcggcggatgcggcggg

SEQ ID NO: 1271819 - DNA, 25 bp, Homo sapien
tgggggctgcggcggcggatgcggc

SEQ ID NO: 1271820 - DNA, 25 bp, Homo sapien
aggcccggcgcggaatgaatgagcc

SEQ ID NO: 1271821 - DNA, 25 bp, Homo sapien
gcggaatgaatgagcccgggccgcg

SEQ ID NO: 1271822 - DNA, 25 bp, Homo sapien
ctgcagagagctcgcgcgggcgtac

SEQ ID NO: 1271823 - DNA, 25 bp, Homo sapien
gccgggggcaatcgaacgcggcctc

SEQ ID NO: 1271824 - DNA, 25 bp, Homo sapien
tggcggttgggccgcgccggtgcgg

SEQ ID NO: 1271825 - DNA, 25 bp, Homo sapien
cgccgcttccagaaggttcggtggc

SEQ ID NO: 1271826 - DNA, 25 bp, Homo sapien
cagccgccgcttccagaaggttcgg

SEQ ID NO: 1271827 - DNA, 25 bp, Homo sapien
attctggcggcgtgggggcccaggc

SEQ ID NO: 1271828 - DNA, 25 bp, Homo sapien
agccccgagggaagcgtctggggcg

SEQ ID NO: 1271829 - DNA, 25 bp, Homo sapien
cagccgcgcccgacccggtggcagc

SEQ ID NO: 1271830 - DNA, 25 bp, Homo sapien
ctagccgcggcagccgcgcccgacc

SEQ ID NO: 1271831 - DNA, 25 bp, Homo sapien
cgcccgacccggtggcagccccgag

SEQ ID NO: 1271832 - DNA, 25 bp, Homo sapien
ctccgcgcggcggtaaatatttgtg

SEQ ID NO: 1271833 - DNA, 25 bp, Homo sapien
cgcgcggcggtaaatatttgtgctg

SEQ ID NO: 1271834 - DNA, 25 bp, Homo sapien
ctcactctccgcgcggcggtaaata

SEQ ID NO: 1271835 - DNA, 25 bp, Homo sapien
agggcggacttgggccctcactctc

SEQ ID NO: 1271836 - DNA, 25 bp, Homo sapien
tcatgattattcctcttgtccatgg

SEQ ID NO: 1271837 - DNA, 25 bp, Homo sapien
gaattgaatagacaagaccctaagt

SEQ ID NO: 1271838 - DNA, 25 bp, Homo sapien
gaccctaagtctgttgccagcagga

SEQ ID NO: 1271839 - DNA, 25 bp, Homo sapien
tcctctgcagagatgatagacactt

SEQ ID NO: 1271840 - DNA, 25 bp, Homo sapien
gcaaggcgctccgtctctcggtctg

SEQ ID NO: 1271841 - DNA, 25 bp, Homo sapien
aaggcgctccgtctctcggtctgtg

SEQ ID NO: 1271842 - DNA, 25 bp, Homo sapien
tgcttcccgtaagccgcaaggcgct

SEQ ID NO: 1271843 - DNA, 25 bp, Homo sapien
ctgtgaaattctccgcgttgcttcc

SEQ ID NO: 1271844 - DNA, 25 bp, Homo sapien
aacacaaagaaacggcaggtatcaa

SEQ ID NO: 1271845 - DNA, 25 bp, Homo sapien
ccaacacaaagaaacggcaggtatc

SEQ ID NO: 1271846 - DNA, 25 bp, Homo sapien
caaagaaacggcaggtatcaaaata

SEQ ID NO: 1271847 - DNA, 25 bp, Homo sapien
ccttttatcattatgcttgtttgtt

SEQ ID NO: 1271848 - DNA, 25 bp, Homo sapien
ctctcaggtgtatggtctgcggcca

SEQ ID NO: 1271849 - DNA, 25 bp, Homo sapien
tcacattgcggtgtagccatcagca

SEQ ID NO: 1271850 - DNA, 25 bp, Homo sapien
gagatggatttaccctggagctgct

SEQ ID NO: 1271851 - DNA, 25 bp, Homo sapien
gcacaggcttcccagataggtacga

SEQ ID NO: 1271852 - DNA, 25 bp, Homo sapien
gagcctggatgtagagtaggaagca

SEQ ID NO: 1271853 - DNA, 25 bp, Homo sapien
gatgtagagtaggaagcagttctga

SEQ ID NO: 1271854 - DNA, 25 bp, Homo sapien
aggagcctggatgtagagtaggaag

SEQ ID NO: 1271855 - DNA, 25 bp, Homo sapien
agcctggatgtagagtaggaagcag

SEQ ID NO: 1271856 - DNA, 25 bp, Homo sapien
tccaaggctcattacagggtagtcc

SEQ ID NO: 1271857 - DNA, 25 bp, Homo sapien
tgcccaggtgtgaaattgatgctcg

SEQ ID NO: 1271858 - DNA, 25 bp, Homo sapien
tacagtctaaccctctgggcacagg

SEQ ID NO: 1271859 - DNA, 25 bp, Homo sapien
ccctgtagagccctggaagtgacca

SEQ ID NO: 1271860 - DNA, 25 bp, Homo sapien
accggagcggatgcgggctctgggg

SEQ ID NO: 1271861 - DNA, 25 bp, Homo sapien
ggagcggatgcgggctctggggcag

SEQ ID NO: 1271862 - DNA, 25 bp, Homo sapien
caccggagcggatgcgggctctggg

SEQ ID NO: 1271863 - DNA, 25 bp, Homo sapien
gggcaccggagcggatgcgggctct

SEQ ID NO: 1271864 - DNA, 25 bp, Homo sapien
gccactggaatccccagcgcgcccg

SEQ ID NO: 1271865 - DNA, 25 bp, Homo sapien
ccactggaatccccagcgcgcccgc

SEQ ID NO: 1271866 - DNA, 25 bp, Homo sapien
gggccactggaatccccagcgcgcc

SEQ ID NO: 1271867 - DNA, 25 bp, Homo sapien
ggccactggaatccccagcgcgccc

SEQ ID NO: 1271868 - DNA, 25 bp, Homo sapien
ggccaggcgcgccacacaggcgctg

SEQ ID NO: 1271869 - DNA, 25 bp, Homo sapien
gcgggccaggcgcgccacacaggcg

SEQ ID NO: 1271870 - DNA, 25 bp, Homo sapien
aggcgcgccacacaggcgctgtagc

SEQ ID NO: 1271871 - DNA, 25 bp, Homo sapien
ccaggcgcgccacacaggcgctgta

SEQ ID NO: 1271872 - DNA, 25 bp, Homo sapien
ctgcgggcggagagccgcgtgaggc

SEQ ID NO: 1271873 - DNA, 25 bp, Homo sapien
cgcgtgaggcgcggggtagggtgcc

SEQ ID NO: 1271874 - DNA, 25 bp, Homo sapien
tgcagagcgcgcggcagggcaggga

SEQ ID NO: 1271875 - DNA, 25 bp, Homo sapien
cgtgaggcgcggggtagggtgccgg

SEQ ID NO: 1271876 - DNA, 25 bp, Homo sapien
aggaagcgcacggtcatttccagga

SEQ ID NO: 1271877 - DNA, 25 bp, Homo sapien
gcgcacggtcatttccaggacgtct

SEQ ID NO: 1271878 - DNA, 25 bp, Homo sapien
ctgcaggaagcgcacggtcatttcc

SEQ ID NO: 1271879 - DNA, 25 bp, Homo sapien
gggcgctgccgtgggccatgaggac

SEQ ID NO: 1271880 - DNA, 25 bp, Homo sapien
gagccccttaagctggctcaggctc

SEQ ID NO: 1271881 - DNA, 25 bp, Homo sapien
ggcaggatgagccccttaagctggc

SEQ ID NO: 1271882 - DNA, 25 bp, Homo sapien
ggatgagccccttaagctggctcag

SEQ ID NO: 1271883 - DNA, 25 bp, Homo sapien
gctctggttgatgcgcgcgcgccgg

SEQ ID NO: 1271884 - DNA, 25 bp, Homo sapien
cttgcgcagctccgccgcgtcccct

SEQ ID NO: 1271885 - DNA, 25 bp, Homo sapien
ccgccgcgtcccctgcccggcgagg

SEQ ID NO: 1271886 - DNA, 25 bp, Homo sapien
ttgcgcagctccgccgcgtcccctg

SEQ ID NO: 1271887 - DNA, 25 bp, Homo sapien
cgtcccctgcccggcgaggcagccc

SEQ ID NO: 1271888 - DNA, 25 bp, Homo sapien
ctgcgagccccacgcaaagggaaac

SEQ ID NO: 1271889 - DNA, 25 bp, Homo sapien
tccgaaatgaggtcccgggcgcggc

SEQ ID NO: 1271890 - DNA, 25 bp, Homo sapien
tgcgagccccacgcaaagggaaacc

SEQ ID NO: 1271891 - DNA, 25 bp, Homo sapien
ccgcgtggccgttgctgcggcaaac

SEQ ID NO: 1271892 - DNA, 25 bp, Homo sapien
cgcgtggccgttgctgcggcaaact

SEQ ID NO: 1271893 - DNA, 25 bp, Homo sapien
ccaggaccgccttcgcgccgcgtgg

SEQ ID NO: 1271894 - DNA, 25 bp, Homo sapien
ccgccttcgcgccgcgtggccgttg

SEQ ID NO: 1271895 - DNA, 25 bp, Homo sapien
cctggaaccgcagttagcgggcact

SEQ ID NO: 1271896 - DNA, 25 bp, Homo sapien
caactgttacgtgaggcaaattagg

SEQ ID NO: 1271897 - DNA, 25 bp, Homo sapien
gatgaatgaatttgtctgtgcctgg

SEQ ID NO: 1271898 - DNA, 25 bp, Homo sapien
tgcctggacggctctccaattcgaa

SEQ ID NO: 1271899 - DNA, 25 bp, Homo sapien
tgcggctcctccttgcggcagtgtg

SEQ ID NO: 1271900 - DNA, 25 bp, Homo sapien
tgaagtgtgccgtgtacagacccgt

SEQ ID NO: 1271901 - DNA, 25 bp, Homo sapien
gaacagaccaggtgtccgcctctgg

SEQ ID NO: 1271902 - DNA, 25 bp, Homo sapien
ctctgaggtcccatcgtggcgggct

SEQ ID NO: 1271903 - DNA, 25 bp, Homo sapien
taaccgtacttagggcttctgcaag

SEQ ID NO: 1271904 - DNA, 25 bp, Homo sapien
tccggccgagaagttgagaaatgtc

SEQ ID NO: 1271905 - DNA, 25 bp, Homo sapien
taataccgcgatctcagccaaactc

SEQ ID NO: 1271906 - DNA, 25 bp, Homo sapien
ccgtgccagcggcttaataagtgac

SEQ ID NO: 1271907 - DNA, 25 bp, Homo sapien
tggcgccagcgcttgagcatctcgt

SEQ ID NO: 1271908 - DNA, 25 bp, Homo sapien
tcgtactgctggtctcggaagcggc

SEQ ID NO: 1271909 - DNA, 25 bp, Homo sapien
atcacgtcgtagagctgcgggcccg

SEQ ID NO: 1271910 - DNA, 25 bp, Homo sapien
aggcggctgcgcaagtcttccacgc

SEQ ID NO: 1271911 - DNA, 25 bp, Homo sapien
gagagtgtgggcgcagcagcggggc

SEQ ID NO: 1271912 - DNA, 25 bp, Homo sapien
ctggcgagagtgtgggcgcagcagc

SEQ ID NO: 1271913 - DNA, 25 bp, Homo sapien
tggcgagagtgtgggcgcagcagcg

SEQ ID NO: 1271914 - DNA, 25 bp, Homo sapien
gcgagagtgtgggcgcagcagcggg

SEQ ID NO: 1271915 - DNA, 25 bp, Homo sapien
gttacccaccaactggacggtgcag

SEQ ID NO: 1271916 - DNA, 25 bp, Homo sapien
gacggtgcagatcttctcactgctg

SEQ ID NO: 1271917 - DNA, 25 bp, Homo sapien
agccaggggtccagctgttacccac

SEQ ID NO: 1271918 - DNA, 25 bp, Homo sapien
aggaccatgtcacctgcgggcagag

SEQ ID NO: 1271919 - DNA, 25 bp, Homo sapien
ctagaagggtgtgggcgctgtccaa

SEQ ID NO: 1271920 - DNA, 25 bp, Homo sapien
tagaagggtgtgggcgctgtccaag

SEQ ID NO: 1271921 - DNA, 25 bp, Homo sapien
cctgtgtacgaatctgaactccagc

SEQ ID NO: 1271922 - DNA, 25 bp, Homo sapien
ccttccattgaactgttagctcctg

SEQ ID NO: 1271923 - DNA, 25 bp, Homo sapien
tgtgctggtctcatccactgatgac

SEQ ID NO: 1271924 - DNA, 25 bp, Homo sapien
gctgactgagcaccccttgagggca

SEQ ID NO: 1271925 - DNA, 25 bp, Homo sapien
gtggtggggtcagagcctccatccc

SEQ ID NO: 1271926 - DNA, 25 bp, Homo sapien
ggtggggtcagagcctccatcccag

SEQ ID NO: 1271927 - DNA, 25 bp, Homo sapien
tggtggggtcagagcctccatccca

SEQ ID NO: 1271928 - DNA, 25 bp, Homo sapien
gtggggtcagagcctccatcccagc

SEQ ID NO: 1271929 - DNA, 25 bp, Homo sapien
ggccagcagtggcggtatgtgtagg

SEQ ID NO: 1271930 - DNA, 25 bp, Homo sapien
aggccagcagtggcggtatgtgtag

SEQ ID NO: 1271931 - DNA, 25 bp, Homo sapien
gaggccagcagtggcggtatgtgta

SEQ ID NO: 1271932 - DNA, 25 bp, Homo sapien
tgaggccagcagtggcggtatgtgt

SEQ ID NO: 1271933 - DNA, 25 bp, Homo sapien
gccccaagcaggagggggaccacaa

SEQ ID NO: 1271934 - DNA, 25 bp, Homo sapien
gggggaccacaaggccagccaggag

SEQ ID NO: 1271935 - DNA, 25 bp, Homo sapien
tcagggtggccccaagcaggagggg

SEQ ID NO: 1271936 - DNA, 25 bp, Homo sapien
caagcaggagggggaccacaaggcc

SEQ ID NO: 1271937 - DNA, 25 bp, Homo sapien
tgttgggtggttgcccccctcctca

SEQ ID NO: 1271938 - DNA, 25 bp, Homo sapien
agttctcccactcgcattcccagca

SEQ ID NO: 1271939 - DNA, 25 bp, Homo sapien
ctcccctcggtccatcccagttctc

SEQ ID NO: 1271940 - DNA, 25 bp, Homo sapien
tctcccactcgcattcccagcacac

SEQ ID NO: 1271941 - DNA, 25 bp, Homo sapien
cagttctcccactcgcattcccagc

SEQ ID NO: 1271942 - DNA, 25 bp, Homo sapien
agcggcacagcgctctggacagctc

SEQ ID NO: 1271943 - DNA, 25 bp, Homo sapien
agacagcggcacagcgctctggaca

SEQ ID NO: 1271944 - DNA, 25 bp, Homo sapien
tccagccacagacagcggcacagcg

SEQ ID NO: 1271945 - DNA, 25 bp, Homo sapien
cacagacagcggcacagcgctctgg

SEQ ID NO: 1271946 - DNA, 25 bp, Homo sapien
ataaagacttgaatggaggccgggc

SEQ ID NO: 1271947 - DNA, 25 bp, Homo sapien
ggcctctcactctacccaagaatgt

SEQ ID NO: 1271948 - DNA, 25 bp, Homo sapien
tcctgtcattgtgtccctggtaaca

SEQ ID NO: 1271949 - DNA, 25 bp, Homo sapien
gagtcactagaatgtcaaccccaaa

SEQ ID NO: 1271950 - DNA, 25 bp, Homo sapien
gtaatatctggctaggatcgctggg

SEQ ID NO: 1271951 - DNA, 25 bp, Homo sapien
gctgaaagtgaaggcaaataccctt

SEQ ID NO: 1271952 - DNA, 25 bp, Homo sapien
gcggatccagattgctcttttgcca

SEQ ID NO: 1271953 - DNA, 25 bp, Homo sapien
tatgtatctggctaaggcggatcca

SEQ ID NO: 1271954 - DNA, 25 bp, Homo sapien
aggtcccacagtcagtatctctgcg

SEQ ID NO: 1271955 - DNA, 25 bp, Homo sapien
cagccatcgccatgttcatagaagc

SEQ ID NO: 1271956 - DNA, 25 bp, Homo sapien
ccacagtcagtatctctgcgggaac

SEQ ID NO: 1271957 - DNA, 25 bp, Homo sapien
gcaggacacgcagccatcgccatgt

SEQ ID NO: 1271958 - DNA, 25 bp, Homo sapien
ccgtgtgtggcggtgcagggccccg

SEQ ID NO: 1271959 - DNA, 25 bp, Homo sapien
ctaggcatggttggcagtagaaggg

SEQ ID NO: 1271960 - DNA, 25 bp, Homo sapien
gggtgaactgctgacacattggctg

SEQ ID NO: 1271961 - DNA, 25 bp, Homo sapien
gtgaactgctgacacattggctgac

SEQ ID NO: 1271962 - DNA, 25 bp, Homo sapien
catggttggcagtagaagggtgaac

SEQ ID NO: 1271963 - DNA, 25 bp, Homo sapien
ggtgtcggccactgctgaacagttc

SEQ ID NO: 1271964 - DNA, 25 bp, Homo sapien
cagccacagcgggtgtcggccactg

SEQ ID NO: 1271965 - DNA, 25 bp, Homo sapien
gcttacagccacagcgggtgtcggc

SEQ ID NO: 1271966 - DNA, 25 bp, Homo sapien
cacagcgggtgtcggccactgctga

SEQ ID NO: 1271967 - DNA, 25 bp, Homo sapien
cacattcagaattatggtggttctc

SEQ ID NO: 1271968 - DNA, 25 bp, Homo sapien
ttcagaattatggtggttctcccag

SEQ ID NO: 1271969 - DNA, 25 bp, Homo sapien
gcagcgggcacattcagaattatgg

SEQ ID NO: 1271970 - DNA, 25 bp, Homo sapien
caagaaggtgtcttggggacacaca

SEQ ID NO: 1271971 - DNA, 25 bp, Homo sapien
cttcttgtggaagtcaccggcacag

SEQ ID NO: 1271972 - DNA, 25 bp, Homo sapien
gtggaagtcaccggcacagtcacac

SEQ ID NO: 1271973 - DNA, 25 bp, Homo sapien
ccaatcttcttgtggaagtcaccgg

SEQ ID NO: 1271974 - DNA, 25 bp, Homo sapien
agaccaatcttcttgtggaagtcac

SEQ ID NO: 1271975 - DNA, 25 bp, Homo sapien
ctggggctacgagtgccgccctggg

SEQ ID NO: 1271976 - DNA, 25 bp, Homo sapien
ggggctacgagtgccgccctgggcc

SEQ ID NO: 1271977 - DNA, 25 bp, Homo sapien
tggggctacgagtgccgccctgggc

SEQ ID NO: 1271978 - DNA, 25 bp, Homo sapien
tgctgctgactctcagcgcagctgc

SEQ ID NO: 1271979 - DNA, 25 bp, Homo sapien
ctgcgtctcctccatttcagaggcc

SEQ ID NO: 1271980 - DNA, 25 bp, Homo sapien
atttgcccacagagcagcccacttc

SEQ ID NO: 1271981 - DNA, 25 bp, Homo sapien
tgcgtctcctccatttcagaggccc

SEQ ID NO: 1271982 - DNA, 25 bp, Homo sapien
cgccgccaccgccgcgcagccccgc

SEQ ID NO: 1271983 - DNA, 25 bp, Homo sapien
ccgccaccgccgcgcagccccgcgg

SEQ ID NO: 1271984 - DNA, 25 bp, Homo sapien
ccaccgccgcgcagccccgcggccg

SEQ ID NO: 1271985 - DNA, 25 bp, Homo sapien
gccaccgccgcgcagccccgcggcc

SEQ ID NO: 1271986 - DNA, 25 bp, Homo sapien
gtgctctctgcccgtcgtggttccg

SEQ ID NO: 1271987 - DNA, 25 bp, Homo sapien
tccgtgctctctgcccgtcgtggtt

SEQ ID NO: 1271988 - DNA, 25 bp, Homo sapien
cggctccgtgctctctgcccgtcgt

SEQ ID NO: 1271989 - DNA, 25 bp, Homo sapien
tgctctctgcccgtcgtggttccgc

SEQ ID NO: 1271990 - DNA, 25 bp, Homo sapien
agtagaacacgcgaagcgctgggct

SEQ ID NO: 1271991 - DNA, 25 bp, Homo sapien
tctgctcggcctagacctgagctca

SEQ ID NO: 1271992 - DNA, 25 bp, Homo sapien
ccctgagaaccacttcaaggtagag

SEQ ID NO: 1271993 - DNA, 25 bp, Homo sapien
caaggtagagccagggcaagtgact

SEQ ID NO: 1271994 - DNA, 25 bp, Homo sapien
actgggccccaaagcaaaggactct

SEQ ID NO: 1271995 - DNA, 25 bp, Homo sapien
tccagtccggcaaagcgcaaatcgg

SEQ ID NO: 1271996 - DNA, 25 bp, Homo sapien
tccggctcatgcatacaggaggcag

SEQ ID NO: 1271997 - DNA, 25 bp, Homo sapien
catccgtggcaagtggaggagcaca

SEQ ID NO: 1271998 - DNA, 25 bp, Homo sapien
ccacctgccctaccccagtccaggc

SEQ ID NO: 1271999 - DNA, 25 bp, Homo sapien
tgccagtgccctgagccacctgccc

SEQ ID NO: 1272000 - DNA, 25 bp, Homo sapien
atgccagtgccctgagccacctgcc

SEQ ID NO: 1272001 - DNA, 25 bp, Homo sapien
gagccacctgccctaccccagtcca

SEQ ID NO: 1272002 - DNA, 25 bp, Homo sapien
tcctgattcggtagagctgggccag

SEQ ID NO: 1272003 - DNA, 25 bp, Homo sapien
gtcctgattcggtagagctgggcca

SEQ ID NO: 1272004 - DNA, 25 bp, Homo sapien
gcagcagggtggtcctgattcggta

SEQ ID NO: 1272005 - DNA, 25 bp, Homo sapien
ctgattcggtagagctgggccaggg

SEQ ID NO: 1272006 - DNA, 25 bp, Homo sapien
gagacccctggtgggggctcaggct

SEQ ID NO: 1272007 - DNA, 25 bp, Homo sapien
ggcagagacccctggtgggggctca

SEQ ID NO: 1272008 - DNA, 25 bp, Homo sapien
agagacccctggtgggggctcaggc

SEQ ID NO: 1272009 - DNA, 25 bp, Homo sapien
ctgggcagagacccctggtgggggc

SEQ ID NO: 1272010 - DNA, 25 bp, Homo sapien
gccaggcagccgactagcccaggac

SEQ ID NO: 1272011 - DNA, 25 bp, Homo sapien
ggagcctgcaggttccccggccagg

SEQ ID NO: 1272012 - DNA, 25 bp, Homo sapien
cgactagcccaggaccgctgccagg

SEQ ID NO: 1272013 - DNA, 25 bp, Homo sapien
ggctaggggcccctcggcaatccca

SEQ ID NO: 1272014 - DNA, 25 bp, Homo sapien
ggctggcctcggacttagacttgag

SEQ ID NO: 1272015 - DNA, 25 bp, Homo sapien
gaggcactagctctgccattgggcc

SEQ ID NO: 1272016 - DNA, 25 bp, Homo sapien
tgaaaggaccgctgtcgaactcggg

SEQ ID NO: 1272017 - DNA, 25 bp, Homo sapien
ggtctccgtggagccatctgaggca

SEQ ID NO: 1272018 - DNA, 25 bp, Homo sapien
caggcagctaccacgaatggatcag

SEQ ID NO: 1272019 - DNA, 25 bp, Homo sapien
ccacagtgttcatgacaagaggcca

SEQ ID NO: 1272020 - DNA, 25 bp, Homo sapien
tgaaacctagatggcctgaggcagc

SEQ ID NO: 1272021 - DNA, 25 bp, Homo sapien
gagtcctgggctagagtacttgtcc

SEQ ID NO: 1272022 - DNA, 25 bp, Homo sapien
gctgaagtgccactgtcctcgcctt

SEQ ID NO: 1272023 - DNA, 25 bp, Homo sapien
gggggctcctgtgcacgcagctgtt

SEQ ID NO: 1272024 - DNA, 25 bp, Homo sapien
cagtgctgagagtcggggctgccgc

SEQ ID NO: 1272025 - DNA, 25 bp, Homo sapien
gctgcttttccgcatgatggtaggg

SEQ ID NO: 1272026 - DNA, 25 bp, Homo sapien
ccactggcctggaacgtgtaggccc

SEQ ID NO: 1272027 - DNA, 25 bp, Homo sapien
ctgggcattgtaaatggtgtccacc

SEQ ID NO: 1272028 - DNA, 25 bp, Homo sapien
aaatggtgtccacccagccacggca

SEQ ID NO: 1272029 - DNA, 25 bp, Homo sapien
tggccactggcctggaacgtgtagg

SEQ ID NO: 1272030 - DNA, 25 bp, Homo sapien
attcaggtagataaggaggaaggac

SEQ ID NO: 1272031 - DNA, 25 bp, Homo sapien
cattcaggtagataaggaggaagga

SEQ ID NO: 1272032 - DNA, 25 bp, Homo sapien
ttcaggtagataaggaggaaggacc

SEQ ID NO: 1272033 - DNA, 25 bp, Homo sapien
tcattcaggtagataaggaggaagg

SEQ ID NO: 1272034 - DNA, 25 bp, Homo sapien
tcaccaacagcagatccgtgaagag

SEQ ID NO: 1272035 - DNA, 25 bp, Homo sapien
cggcacacaatcttgtccacgagca

SEQ ID NO: 1272036 - DNA, 25 bp, Homo sapien
cacacaatcttgtccacgagcaggg

SEQ ID NO: 1272037 - DNA, 25 bp, Homo sapien
gtagctcccggcacacaatcttgtc

SEQ ID NO: 1272038 - DNA, 25 bp, Homo sapien
gtctcctccggggaggcgccaggga

SEQ ID NO: 1272039 - DNA, 25 bp, Homo sapien
tctcctccggggaggcgccagggat

SEQ ID NO: 1272040 - DNA, 25 bp, Homo sapien
gaggcgccagggatgggcgctgtca

SEQ ID NO: 1272041 - DNA, 25 bp, Homo sapien
catgcacgcgttcacgtggtggatg

SEQ ID NO: 1272042 - DNA, 25 bp, Homo sapien
gctgccgcatgcacgcgttcacgtg

SEQ ID NO: 1272043 - DNA, 25 bp, Homo sapien
gtaggcgtcgatgcggctcaccacg

SEQ ID NO: 1272044 - DNA, 25 bp, Homo sapien
tttccaccacctcgtaggcgtcgat

SEQ ID NO: 1272045 - DNA, 25 bp, Homo sapien
ggctcccgctggccatcagggttac

SEQ ID NO: 1272046 - DNA, 25 bp, Homo sapien
tggcactgtgggtgcttctccgccc

SEQ ID NO: 1272047 - DNA, 25 bp, Homo sapien
tttggccagcatgtcgctcagcttc

SEQ ID NO: 1272048 - DNA, 25 bp, Homo sapien
gggtttggccagcatgtcgctcagc

SEQ ID NO: 1272049 - DNA, 25 bp, Homo sapien
ctcagcaccgacttgagcagcagcg

SEQ ID NO: 1272050 - DNA, 25 bp, Homo sapien
ccccgcccacggcacgcgcgccctc

SEQ ID NO: 1272051 - DNA, 25 bp, Homo sapien
ccgcccacggcacgcgcgccctcac

SEQ ID NO: 1272052 - DNA, 25 bp, Homo sapien
cccccgcccacggcacgcgcgccct

SEQ ID NO: 1272053 - DNA, 25 bp, Homo sapien
cccgcccacggcacgcgcgccctca

SEQ ID NO: 1272054 - DNA, 25 bp, Homo sapien
caggccgcgcatgtactccatgcag

SEQ ID NO: 1272055 - DNA, 25 bp, Homo sapien
gcccggaagaggtcgttgtcgcgca

SEQ ID NO: 1272056 - DNA, 25 bp, Homo sapien
tcctcctccatgcagtagcggatgt

SEQ ID NO: 1272057 - DNA, 25 bp, Homo sapien
tgtagggcttgaagagcgagccgaa

SEQ ID NO: 1272058 - DNA, 25 bp, Homo sapien
tagatggtcaggtggaggctcaaac

SEQ ID NO: 1272059 - DNA, 25 bp, Homo sapien
gcttccttactgcacttgggcgacc

SEQ ID NO: 1272060 - DNA, 25 bp, Homo sapien
aactgagcctcagccaaagtgacca

SEQ ID NO: 1272061 - DNA, 25 bp, Homo sapien
gcaagcttatgatccctgtttcctg

SEQ ID NO: 1272062 - DNA, 25 bp, Homo sapien
cgggctgtagcagcgctcgcgtgcg

SEQ ID NO: 1272063 - DNA, 25 bp, Homo sapien
tagcccacagcctgcggtgcagctg

SEQ ID NO: 1272064 - DNA, 25 bp, Homo sapien
gctgcgcgatctccgggatgttgct

SEQ ID NO: 1272065 - DNA, 25 bp, Homo sapien
atgttgctgaacaggcgctccgcct

SEQ ID NO: 1272066 - DNA, 25 bp, Homo sapien
gccacgcccctccgccaggttagcc

SEQ ID NO: 1272067 - DNA, 25 bp, Homo sapien
gcggcgggaggtgcggttggccacg

SEQ ID NO: 1272068 - DNA, 25 bp, Homo sapien
gcgggaggtgcggttggccacgccc

SEQ ID NO: 1272069 - DNA, 25 bp, Homo sapien
ggcgcggcgggaggtgcggttggcc

SEQ ID NO: 1272070 - DNA, 25 bp, Homo sapien
gccgccgcccccgaatcccagcgca

SEQ ID NO: 1272071 - DNA, 25 bp, Homo sapien
ccgccgcccccgaatcccagcgcac

SEQ ID NO: 1272072 - DNA, 25 bp, Homo sapien
cacagcagccctgactcttgcaggt

SEQ ID NO: 1272073 - DNA, 25 bp, Homo sapien
gcagccctgactcttgcaggttcag

SEQ ID NO: 1272074 - DNA, 25 bp, Homo sapien
tcttgcaggttcaggaggcagcaca

SEQ ID NO: 1272075 - DNA, 25 bp, Homo sapien
ccctgactcttgcaggttcaggagg

SEQ ID NO: 1272076 - DNA, 25 bp, Homo sapien
tctgcaaaggctcagactcagctga

SEQ ID NO: 1272077 - DNA, 25 bp, Homo sapien
cagtttcctgatgtaggaggcctcc

SEQ ID NO: 1272078 - DNA, 25 bp, Homo sapien
ttgatgatcacccgcagtttcctga

SEQ ID NO: 1272079 - DNA, 25 bp, Homo sapien
agtttcctgatgtaggaggcctccg

SEQ ID NO: 1272080 - DNA, 25 bp, Homo sapien
cgcagtttcctgatgtaggaggcct

SEQ ID NO: 1272081 - DNA, 25 bp, Homo sapien
gcagcccgaagaggctgtaggtgtg

SEQ ID NO: 1272082 - DNA, 25 bp, Homo sapien
caggagtcatggtcgaagcgcagcc

SEQ ID NO: 1272083 - DNA, 25 bp, Homo sapien
catgcccatcaatgagctcccgcca

SEQ ID NO: 1272084 - DNA, 25 bp, Homo sapien
catcaatgagctcccgccagctgtc

SEQ ID NO: 1272085 - DNA, 25 bp, Homo sapien
gctgaagcgactggccgcccggttc

SEQ ID NO: 1272086 - DNA, 25 bp, Homo sapien
ggagctgaaaaagccgctgaagcga

SEQ ID NO: 1272087 - DNA, 25 bp, Homo sapien
ggccggagctgaaaaagccgctgaa

SEQ ID NO: 1272088 - DNA, 25 bp, Homo sapien
aaaaagccgctgaagcgactggccg

SEQ ID NO: 1272089 - DNA, 25 bp, Homo sapien
actccgacatgttcttgcggcggcg

SEQ ID NO: 1272090 - DNA, 25 bp, Homo sapien
cgacatgttcttgcggcggcggcca

SEQ ID NO: 1272091 - DNA, 25 bp, Homo sapien
cccaggaactccgacatgttcttgc

SEQ ID NO: 1272092 - DNA, 25 bp, Homo sapien
gaactccgacatgttcttgcggcgg

SEQ ID NO: 1272093 - DNA, 25 bp, Homo sapien
cccagctggccgcagaatcggcaaa

SEQ ID NO: 1272094 - DNA, 25 bp, Homo sapien
gctggccgcagaatcggcaaactca

SEQ ID NO: 1272095 - DNA, 25 bp, Homo sapien
ggcccggtcccagctggccgcagaa

SEQ ID NO: 1272096 - DNA, 25 bp, Homo sapien
cgtccacacgctccagggcgggggg

SEQ ID NO: 1272097 - DNA, 25 bp, Homo sapien
cacgagagatcctcagtaccctggt

SEQ ID NO: 1272098 - DNA, 25 bp, Homo sapien
gccacgagagatcctcagtaccctg

SEQ ID NO: 1272099 - DNA, 25 bp, Homo sapien
ggggccacgagagatcctcagtacc

SEQ ID NO: 1272100 - DNA, 25 bp, Homo sapien
ggccacgagagatcctcagtaccct

SEQ ID NO: 1272101 - DNA, 25 bp, Homo sapien
gatgtccactttgcccagcgcaatg

SEQ ID NO: 1272102 - DNA, 25 bp, Homo sapien
cccgaacctgtaggcctcgaaggtg

SEQ ID NO: 1272103 - DNA, 25 bp, Homo sapien
caggtagatgtccactttgcccagc

SEQ ID NO: 1272104 - DNA, 25 bp, Homo sapien
tgacacgaaggtagtgtcccccgaa

SEQ ID NO: 1272105 - DNA, 25 bp, Homo sapien
aggcgcatctgcataccacggcaga

SEQ ID NO: 1272106 - DNA, 25 bp, Homo sapien
catgtgtgttagaaccaggcggcca

SEQ ID NO: 1272107 - DNA, 25 bp, Homo sapien
aagggaagcccgcatgggatcacac

SEQ ID NO: 1272108 - DNA, 25 bp, Homo sapien
caggcggccagtcgcttcagcttgg

SEQ ID NO: 1272109 - DNA, 25 bp, Homo sapien
ggctgggacgatctctgtctcaatg

SEQ ID NO: 1272110 - DNA, 25 bp, Homo sapien
gagtgaagcattccttgcttgggtc

SEQ ID NO: 1272111 - DNA, 25 bp, Homo sapien
ttcagagtgaagcattccttgcttg

SEQ ID NO: 1272112 - DNA, 25 bp, Homo sapien
cattcaggtcaaatttcagagtgaa

SEQ ID NO: 1272113 - DNA, 25 bp, Homo sapien
aagggcgcaggctgtagggaacccg

SEQ ID NO: 1272114 - DNA, 25 bp, Homo sapien
ggaacccgcatctgccggctctggg

SEQ ID NO: 1272115 - DNA, 25 bp, Homo sapien
tagggaacccgcatctgccggctct

SEQ ID NO: 1272116 - DNA, 25 bp, Homo sapien
aggctgtagggaacccgcatctgcc

SEQ ID NO: 1272117 - DNA, 25 bp, Homo sapien
cttggagagtttcaggcctgtgctc

SEQ ID NO: 1272118 - DNA, 25 bp, Homo sapien
tcttcttggagagtttcaggcctgt

SEQ ID NO: 1272119 - DNA, 25 bp, Homo sapien
gctttcttcttggagagtttcaggc

SEQ ID NO: 1272120 - DNA, 25 bp, Homo sapien
ttcttggagagtttcaggcctgtgc

SEQ ID NO: 1272121 - DNA, 25 bp, Homo sapien
gtgcgcggcgggcatgaccgggtgg

SEQ ID NO: 1272122 - DNA, 25 bp, Homo sapien
cggcgggcatgaccgggtggacacg

SEQ ID NO: 1272123 - DNA, 25 bp, Homo sapien
gctggtgcgcggcgggcatgaccgg

SEQ ID NO: 1272124 - DNA, 25 bp, Homo sapien
cgcggcgggcatgaccgggtggaca

SEQ ID NO: 1272125 - DNA, 25 bp, Homo sapien
aaaggccctgggatgacacccatgg

SEQ ID NO: 1272126 - DNA, 25 bp, Homo sapien
tagtcattgctgtctatccccacag

SEQ ID NO: 1272127 - DNA, 25 bp, Homo sapien
taaggataaggaagccttgcctctg

SEQ ID NO: 1272128 - DNA, 25 bp, Homo sapien
ggaagggaccaaagtccatggctct

SEQ ID NO: 1272129 - DNA, 25 bp, Homo sapien
tacagtcgacttgtccttatgacgc

SEQ ID NO: 1272130 - DNA, 25 bp, Homo sapien
ttatgacgccctagcacgtttccga

SEQ ID NO: 1272131 - DNA, 25 bp, Homo sapien
gcacagcaccagatagagaaaggcc

SEQ ID NO: 1272132 - DNA, 25 bp, Homo sapien
gccctgaggataggcagaactagaa

SEQ ID NO: 1272133 - DNA, 25 bp, Homo sapien
gctgctggcagtcggcgtggtgaca

SEQ ID NO: 1272134 - DNA, 25 bp, Homo sapien
cacaggcctcgcagaggttgagggg

SEQ ID NO: 1272135 - DNA, 25 bp, Homo sapien
gctggcagtcggcgtggtgacatac

SEQ ID NO: 1272136 - DNA, 25 bp, Homo sapien
cagctgctggcagtcggcgtggtga

SEQ ID NO: 1272137 - DNA, 25 bp, Homo sapien
aaagcccgatgagagatttccgaga

SEQ ID NO: 1272138 - DNA, 25 bp, Homo sapien
gatattgaaatgcatggctccctgc

SEQ ID NO: 1272139 - DNA, 25 bp, Homo sapien
gccagtggatctaggacttgaagcc

SEQ ID NO: 1272140 - DNA, 25 bp, Homo sapien
tattgtccctgtttcacacaagagg

SEQ ID NO: 1272141 - DNA, 25 bp, Homo sapien
ggagaaccatgagcccaactgagaa

SEQ ID NO: 1272142 - DNA, 25 bp, Homo sapien
ccaggatctgaaccaggtggtttcc

SEQ ID NO: 1272143 - DNA, 25 bp, Homo sapien
cgacttcgtcgagcagatctggttg

SEQ ID NO: 1272144 - DNA, 25 bp, Homo sapien
gatctggttgacgatgaagttctgg

SEQ ID NO: 1272145 - DNA, 25 bp, Homo sapien
cgaggtccccgtcaccagggtgcag

SEQ ID NO: 1272146 - DNA, 25 bp, Homo sapien
ctcggccgccatgggccgcatcctt

SEQ ID NO: 1272147 - DNA, 25 bp, Homo sapien
aggtagggggctcggccgccatggg

SEQ ID NO: 1272148 - DNA, 25 bp, Homo sapien
cggagtccgaggtccccgtcaccag

SEQ ID NO: 1272149 - DNA, 25 bp, Homo sapien
tggctatcaccgtcgcgggcacgac

SEQ ID NO: 1272150 - DNA, 25 bp, Homo sapien
ctggaggctgctaggcgtccggaga

SEQ ID NO: 1272151 - DNA, 25 bp, Homo sapien
gctaggcgtccggagacaccgggtc

SEQ ID NO: 1272152 - DNA, 25 bp, Homo sapien
ctggctatcaccgtcgcgggcacga

SEQ ID NO: 1272153 - DNA, 25 bp, Homo sapien
gggctcagagggctcctcagaactt

SEQ ID NO: 1272154 - DNA, 25 bp, Homo sapien
ggctcctcagaacttgctctttctc

SEQ ID NO: 1272155 - DNA, 25 bp, Homo sapien
tcagagggctcctcagaacttgctc

SEQ ID NO: 1272156 - DNA, 25 bp, Homo sapien
gagggctcctcagaacttgctcttt

SEQ ID NO: 1272157 - DNA, 25 bp, Homo sapien
ctgccaaagcctcatggggcgcgcg

SEQ ID NO: 1272158 - DNA, 25 bp, Homo sapien
aaggctcgggccgagactgccaaag

SEQ ID NO: 1272159 - DNA, 25 bp, Homo sapien
ctaaggctctaaggctcgggccgag

SEQ ID NO: 1272160 - DNA, 25 bp, Homo sapien
cagggtctcctccccggtgtctaag

SEQ ID NO: 1272161 - DNA, 25 bp, Homo sapien
ttctccatgggggcctcaggtccac

SEQ ID NO: 1272162 - DNA, 25 bp, Homo sapien
caccctttcctctccctggtcttca

SEQ ID NO: 1272163 - DNA, 25 bp, Homo sapien
atcctgcccgtcccttctccatggg

SEQ ID NO: 1272164 - DNA, 25 bp, Homo sapien
catgggggcctcaggtccacccttt

SEQ ID NO: 1272165 - DNA, 25 bp, Homo sapien
ccgtgccagcagattgtatctgaca

SEQ ID NO: 1272166 - DNA, 25 bp, Homo sapien
tgcctggtgaccacggcaactggag

SEQ ID NO: 1272167 - DNA, 25 bp, Homo sapien
ggtcaggcaaaagcctcggggctcc

SEQ ID NO: 1272168 - DNA, 25 bp, Homo sapien
aaagaggcaaccagccaacaccaga

SEQ ID NO: 1272169 - DNA, 25 bp, Homo sapien
tctgacagcgcagtcccttcttttc

SEQ ID NO: 1272170 - DNA, 25 bp, Homo sapien
cccttcttttcagcggggctctggt

SEQ ID NO: 1272171 - DNA, 25 bp, Homo sapien
ttctgacagcgcagtcccttctttt

SEQ ID NO: 1272172 - DNA, 25 bp, Homo sapien
gttctgacagcgcagtcccttcttt

SEQ ID NO: 1272173 - DNA, 25 bp, Homo sapien
gggtggggtgatctcctcagtcctc

SEQ ID NO: 1272174 - DNA, 25 bp, Homo sapien
aggggtggggtgatctcctcagtcc

SEQ ID NO: 1272175 - DNA, 25 bp, Homo sapien
ggggtggggtgatctcctcagtcct

SEQ ID NO: 1272176 - DNA, 25 bp, Homo sapien
agcaggccccgtgccgcgcgggggg

SEQ ID NO: 1272177 - DNA, 25 bp, Homo sapien
ccatggagcaggccccgtgccgcgc

SEQ ID NO: 1272178 - DNA, 25 bp, Homo sapien
ggagcaggccccgtgccgcgcgggg

SEQ ID NO: 1272179 - DNA, 25 bp, Homo sapien
atggagcaggccccgtgccgcgcgg

SEQ ID NO: 1272180 - DNA, 25 bp, Homo sapien
taaagctgcaacttcctgcattgcg

SEQ ID NO: 1272181 - DNA, 25 bp, Homo sapien
tgcgtaggcgagctcctctctcctg

SEQ ID NO: 1272182 - DNA, 25 bp, Homo sapien
tcccctgggaggtagctccctctgg

SEQ ID NO: 1272183 - DNA, 25 bp, Homo sapien
catcaggaccctggtagctctcagg

SEQ ID NO: 1272184 - DNA, 25 bp, Homo sapien
gggtggagctccacgagaaacgctc

SEQ ID NO: 1272185 - DNA, 25 bp, Homo sapien
gtaggtgccccgcttcctccagtag

SEQ ID NO: 1272186 - DNA, 25 bp, Homo sapien
cccgcttcctccagtagagaaacat

SEQ ID NO: 1272187 - DNA, 25 bp, Homo sapien
tgtccagggtggagctccacgagaa

SEQ ID NO: 1272188 - DNA, 25 bp, Homo sapien
gcccgcgccctcggaggctgggtgg

SEQ ID NO: 1272189 - DNA, 25 bp, Homo sapien
cccgcgccctcggaggctgggtggc

SEQ ID NO: 1272190 - DNA, 25 bp, Homo sapien
tgtagcgcctctcgaagtcactgct

SEQ ID NO: 1272191 - DNA, 25 bp, Homo sapien
aagtcactgctgggtacagacaggg

SEQ ID NO: 1272192 - DNA, 25 bp, Homo sapien
agtcactgctgggtacagacaggga

SEQ ID NO: 1272193 - DNA, 25 bp, Homo sapien
ctgtagcgcctctcgaagtcactgc

SEQ ID NO: 1272194 - DNA, 25 bp, Homo sapien
gcaagcagtgggcccagtgtcagca

SEQ ID NO: 1272195 - DNA, 25 bp, Homo sapien
cagccagcaagcagtgggcccagtg

SEQ ID NO: 1272196 - DNA, 25 bp, Homo sapien
ccagcaagcagtgggcccagtgtca

SEQ ID NO: 1272197 - DNA, 25 bp, Homo sapien
caagcagtgggcccagtgtcagcac

SEQ ID NO: 1272198 - DNA, 25 bp, Homo sapien
actgtcactactgtcactgtggaca

SEQ ID NO: 1272199 - DNA, 25 bp, Homo sapien
tgtcgaaacactggtcctgttggtt

SEQ ID NO: 1272200 - DNA, 25 bp, Homo sapien
cctgttggttggaaactgtcactac

SEQ ID NO: 1272201 - DNA, 25 bp, Homo sapien
gaaacactggtcctgttggttggaa

SEQ ID NO: 1272202 - DNA, 25 bp, Homo sapien
aaaggctgagccagcttcgaggtgg

SEQ ID NO: 1272203 - DNA, 25 bp, Homo sapien
aaggctgagccagcttcgaggtgga

SEQ ID NO: 1272204 - DNA, 25 bp, Homo sapien
caaaggctgagccagcttcgaggtg

SEQ ID NO: 1272205 - DNA, 25 bp, Homo sapien
gagacccatgttttgtcaggactga

SEQ ID NO: 1272206 - DNA, 25 bp, Homo sapien
tcccctgggcgctgtatatttgaag

SEQ ID NO: 1272207 - DNA, 25 bp, Homo sapien
aatgccacaggcctctctaatcaga

SEQ ID NO: 1272208 - DNA, 25 bp, Homo sapien
tccattcctgagtgcccatttgcgc

SEQ ID NO: 1272209 - DNA, 25 bp, Homo sapien
tatttgaaggcacagacttcgcagc

SEQ ID NO: 1272210 - DNA, 25 bp, Homo sapien
tacatgccggagactgtgctacatc

SEQ ID NO: 1272211 - DNA, 25 bp, Homo sapien
gcatgaccgtgagtagcacagccgt

SEQ ID NO: 1272212 - DNA, 25 bp, Homo sapien
taaaacaggctcaggctaagcatct

SEQ ID NO: 1272213 - DNA, 25 bp, Homo sapien
tatggtggccgtggagcttgcttcc

SEQ ID NO: 1272214 - DNA, 25 bp, Homo sapien
ggagaactccttactacctaatctg

SEQ ID NO: 1272215 - DNA, 25 bp, Homo sapien
taatctgacccataacagactgtgg

SEQ ID NO: 1272216 - DNA, 25 bp, Homo sapien
ccttggcgacagagagtccgtcgca

SEQ ID NO: 1272217 - DNA, 25 bp, Homo sapien
aaaagaaattgcttcagcactttgg

SEQ ID NO: 1272218 - DNA, 25 bp, Homo sapien
gcaaatgcaattacagggcaccagt

SEQ ID NO: 1272219 - DNA, 25 bp, Homo sapien
gggcaactaagaagctagactcaat

SEQ ID NO: 1272220 - DNA, 25 bp, Homo sapien
ctgaaggcaaacctagattgaatgc

SEQ ID NO: 1272221 - DNA, 25 bp, Homo sapien
cttgctgcaaatgacctccagtgag

SEQ ID NO: 1272222 - DNA, 25 bp, Homo sapien
caaatttatatctatcaaacccgtt

SEQ ID NO: 1272223 - DNA, 25 bp, Homo sapien
ccaaatttatatctatcaaacccgt

SEQ ID NO: 1272224 - DNA, 25 bp, Homo sapien
tatccattatgcttgagatcctgca

SEQ ID NO: 1272225 - DNA, 25 bp, Homo sapien
gtaaccatccacactggctccaagg

SEQ ID NO: 1272226 - DNA, 25 bp, Homo sapien
ctgattctaataaccaggtccctga

SEQ ID NO: 1272227 - DNA, 25 bp, Homo sapien
tgcaccaaatggatgggctgtaacc

SEQ ID NO: 1272228 - DNA, 25 bp, Homo sapien
caagtatgagtatcacacagaagac

SEQ ID NO: 1272229 - DNA, 25 bp, Homo sapien
tgctaataagggcaccattcatggc

SEQ ID NO: 1272230 - DNA, 25 bp, Homo sapien
tgtggtcaggcttgagacaaagctt

SEQ ID NO: 1272231 - DNA, 25 bp, Homo sapien
tgaaactccatcatgtctcttgtgg

SEQ ID NO: 1272232 - DNA, 25 bp, Homo sapien
cttaggtcttcggtatggtttctct

SEQ ID NO: 1272233 - DNA, 25 bp, Homo sapien
aaggtactgtcccttcgatcccacg

SEQ ID NO: 1272234 - DNA, 25 bp, Homo sapien
tttaaaattgtaatccgttgtgaca

SEQ ID NO: 1272235 - DNA, 25 bp, Homo sapien
cgacagaacttaggtcttcggtatg

SEQ ID NO: 1272236 - DNA, 25 bp, Homo sapien
acttaaggacacaatgtggaatggc

SEQ ID NO: 1272237 - DNA, 25 bp, Homo sapien
gacaattcacggtccttagctcttc

SEQ ID NO: 1272238 - DNA, 25 bp, Homo sapien
ggtacagccgcttctccatgtcaat

SEQ ID NO: 1272239 - DNA, 25 bp, Homo sapien
cacaatgtggaatggcaatagctcc

SEQ ID NO: 1272240 - DNA, 25 bp, Homo sapien
tcacagattggagtctgggcaagca

SEQ ID NO: 1272241 - DNA, 25 bp, Homo sapien
gcaggatgggcccattcgtgtatcc

SEQ ID NO: 1272242 - DNA, 25 bp, Homo sapien
cgacatcagagtgggtaatccggag

SEQ ID NO: 1272243 - DNA, 25 bp, Homo sapien
tccggagtgcgactgcattgaaagg

SEQ ID NO: 1272244 - DNA, 25 bp, Homo sapien
cttcaacctaggtgaaagagagaga

SEQ ID NO: 1272245 - DNA, 25 bp, Homo sapien
tgaggtactagaattgagaatcact

SEQ ID NO: 1272246 - DNA, 25 bp, Homo sapien
gcacttcaacctaggtgaaagagag

SEQ ID NO: 1272247 - DNA, 25 bp, Homo sapien
ctgaggtactagaattgagaatcac

SEQ ID NO: 1272248 - DNA, 25 bp, Homo sapien
ggtgtcaggctatgtaaaggagaaa

SEQ ID NO: 1272249 - DNA, 25 bp, Homo sapien
ctgatagggtgtcaggctatgtaaa

SEQ ID NO: 1272250 - DNA, 25 bp, Homo sapien
gggctgcagctggctaaggtaactc

SEQ ID NO: 1272251 - DNA, 25 bp, Homo sapien
ctaaggtaactcaagatggacagat

SEQ ID NO: 1272252 - DNA, 25 bp, Homo sapien
tcgaagaattttgttatgtgactct

SEQ ID NO: 1272253 - DNA, 25 bp, Homo sapien
ctcgaagaattttgttatgtgactc

SEQ ID NO: 1272254 - DNA, 25 bp, Homo sapien
cagggacctgaagatcttagaggac

SEQ ID NO: 1272255 - DNA, 25 bp, Homo sapien
aactggttcgtctttgtgcatgcac

SEQ ID NO: 1272256 - DNA, 25 bp, Homo sapien
gaatggcaggtctttttcgacggaa

SEQ ID NO: 1272257 - DNA, 25 bp, Homo sapien
cttcagccaaatgagggttagttac

SEQ ID NO: 1272258 - DNA, 25 bp, Homo sapien
tcagagcggaactgaaccacgtggc

SEQ ID NO: 1272259 - DNA, 25 bp, Homo sapien
gcaaatgctgcgagtctgaaacgtc

SEQ ID NO: 1272260 - DNA, 25 bp, Homo sapien
gatcagatcaatgagaagcaggagc

SEQ ID NO: 1272261 - DNA, 25 bp, Homo sapien
tgggagacagcaatcggatcagatc

SEQ ID NO: 1272262 - DNA, 25 bp, Homo sapien
cccataatataccatcttctgtgga

SEQ ID NO: 1272263 - DNA, 25 bp, Homo sapien
tgaaacccatcccatagtgttgacg

SEQ ID NO: 1272264 - DNA, 25 bp, Homo sapien
gactctctcttgtaagcgctgaaca

SEQ ID NO: 1272265 - DNA, 25 bp, Homo sapien
tgtggagtcctcaggtgagtgaaag

SEQ ID NO: 1272266 - DNA, 25 bp, Homo sapien
gatcacattccaaatagtcaacgca

SEQ ID NO: 1272267 - DNA, 25 bp, Homo sapien
ttccaaatagtcaacgcagggaaga

SEQ ID NO: 1272268 - DNA, 25 bp, Homo sapien
cacattccaaatagtcaacgcaggg

SEQ ID NO: 1272269 - DNA, 25 bp, Homo sapien
tctgtctgtcccagatcacattcca

SEQ ID NO: 1272270 - DNA, 25 bp, Homo sapien
ttaacaaatggttaatcaggtatct

SEQ ID NO: 1272271 - DNA, 25 bp, Homo sapien
aatcaggtatctattaaatgttgac

SEQ ID NO: 1272272 - DNA, 25 bp, Homo sapien
aaatgttgactttccaacatcctgg

SEQ ID NO: 1272273 - DNA, 25 bp, Homo sapien
catcctgggatccacaaactagaat

SEQ ID NO: 1272274 - DNA, 25 bp, Homo sapien
cgtcttccttggactcgaattatga

SEQ ID NO: 1272275 - DNA, 25 bp, Homo sapien
gaaacaaacattgatcgctagaatt

SEQ ID NO: 1272276 - DNA, 25 bp, Homo sapien
gaattagccgtcttccttggactcg

SEQ ID NO: 1272277 - DNA, 25 bp, Homo sapien
tgatcgctagaattagccgtcttcc

SEQ ID NO: 1272278 - DNA, 25 bp, Homo sapien
aaacattgactaactcttccagggc

SEQ ID NO: 1272279 - DNA, 25 bp, Homo sapien
gatgccaacagacctcaaggctaaa

SEQ ID NO: 1272280 - DNA, 25 bp, Homo sapien
ttccagggctgaaagggtactctca

SEQ ID NO: 1272281 - DNA, 25 bp, Homo sapien
tgaaagggtactctcagttaactga

SEQ ID NO: 1272282 - DNA, 25 bp, Homo sapien
tgctttccttctcgaggaggagaac

SEQ ID NO: 1272283 - DNA, 25 bp, Homo sapien
ccttctcgaggaggagaacatcatt

SEQ ID NO: 1272284 - DNA, 25 bp, Homo sapien
tctcgaggaggagaacatcattgta

SEQ ID NO: 1272285 - DNA, 25 bp, Homo sapien
tttccttctcgaggaggagaacatc

SEQ ID NO: 1272286 - DNA, 25 bp, Homo sapien
caaaaagcacttaaccaactacgat

SEQ ID NO: 1272287 - DNA, 25 bp, Homo sapien
gaaatcactgttttggtgcaagtaa

SEQ ID NO: 1272288 - DNA, 25 bp, Homo sapien
tggtggctcaggtatgaaactaagg

SEQ ID NO: 1272289 - DNA, 25 bp, Homo sapien
tgagagcactagatagaccaactgt

SEQ ID NO: 1272290 - DNA, 25 bp, Homo sapien
gaaaaattctgcatcgaccaacgcc

SEQ ID NO: 1272291 - DNA, 25 bp, Homo sapien
cccggatagctggttatgaagttta

SEQ ID NO: 1272292 - DNA, 25 bp, Homo sapien
aaaatgtaggatgaacccggatagc

SEQ ID NO: 1272293 - DNA, 25 bp, Homo sapien
gcagttttcagatgttctagcaaca

SEQ ID NO: 1272294 - DNA, 25 bp, Homo sapien
tactcaagcaagagtgggtatacac

SEQ ID NO: 1272295 - DNA, 25 bp, Homo sapien
tagaggcaagtcacacgacagatcc

SEQ ID NO: 1272296 - DNA, 25 bp, Homo sapien
gatttgagcaaattccgggcttccc

SEQ ID NO: 1272297 - DNA, 25 bp, Homo sapien
tagtgaagtgcatggatactcaagc

SEQ ID NO: 1272298 - DNA, 25 bp, Homo sapien
gaaagcatggtgaccgtgaactcgg

SEQ ID NO: 1272299 - DNA, 25 bp, Homo sapien
tttaaactaagatcataccccatgg

SEQ ID NO: 1272300 - DNA, 25 bp, Homo sapien
tgctcctggttcagacagactctac

SEQ ID NO: 1272301 - DNA, 25 bp, Homo sapien
tgaccgtgaactcggctctgtgctc

SEQ ID NO: 1272302 - DNA, 25 bp, Homo sapien
cgaggcggattcgagttcgggttcg

SEQ ID NO: 1272303 - DNA, 25 bp, Homo sapien
caactcgaggcggattcgagttcgg

SEQ ID NO: 1272304 - DNA, 25 bp, Homo sapien
cggtggcaactcgaggcggattcga

SEQ ID NO: 1272305 - DNA, 25 bp, Homo sapien
gaggagaggccggtggcaactcgag

SEQ ID NO: 1272306 - DNA, 25 bp, Homo sapien
gcagccaagtggaacggcaggaacc

SEQ ID NO: 1272307 - DNA, 25 bp, Homo sapien
agtccacgccggacgcctgggcttg

SEQ ID NO: 1272308 - DNA, 25 bp, Homo sapien
acgcctgggcttgcagtaaccgcca

SEQ ID NO: 1272309 - DNA, 25 bp, Homo sapien
aggaaccccgctttagcagcagtcc

SEQ ID NO: 1272310 - DNA, 25 bp, Homo sapien
tctgccggcaacctccggaagcaca

SEQ ID NO: 1272311 - DNA, 25 bp, Homo sapien
cgcgcgagaatctcgcgagatcccg

SEQ ID NO: 1272312 - DNA, 25 bp, Homo sapien
tgccctcccagctgccgaaaagagg

SEQ ID NO: 1272313 - DNA, 25 bp, Homo sapien
aatctcgcgagatcccgtcggtccg

SEQ ID NO: 1272314 - DNA, 25 bp, Homo sapien
cgaggggctccacggaggactccat

SEQ ID NO: 1272315 - DNA, 25 bp, Homo sapien
ccagccgatctggtcgaggggctcc

SEQ ID NO: 1272316 - DNA, 25 bp, Homo sapien
agccgatctggtcgaggggctccac

SEQ ID NO: 1272317 - DNA, 25 bp, Homo sapien
ggtcgaggggctccacggaggactc

SEQ ID NO: 1272318 - DNA, 25 bp, Homo sapien
tctgggtagagccacatcctggttg

SEQ ID NO: 1272319 - DNA, 25 bp, Homo sapien
gggttgggtccctaacacatctcaa

SEQ ID NO: 1272320 - DNA, 25 bp, Homo sapien
ttctttatagaatgtccagcctgct

SEQ ID NO: 1272321 - DNA, 25 bp, Homo sapien
tccagaccgccttaggactgaagag

SEQ ID NO: 1272322 - DNA, 25 bp, Homo sapien
gttgggcggcacactagtaatcacc

SEQ ID NO: 1272323 - DNA, 25 bp, Homo sapien
tttggagtccctgcaaggcctgtgg

SEQ ID NO: 1272324 - DNA, 25 bp, Homo sapien
taatcacctagaatgggagccaggg

SEQ ID NO: 1272325 - DNA, 25 bp, Homo sapien
tcatcgtggagaatccccttgggcg

SEQ ID NO: 1272326 - DNA, 25 bp, Homo sapien
catgtaacatgtggccatgcccagg

SEQ ID NO: 1272327 - DNA, 25 bp, Homo sapien
tattacatacgcgtctctgaagtca

SEQ ID NO: 1272328 - DNA, 25 bp, Homo sapien
taaatatgtcaacctgcccgaccct

SEQ ID NO: 1272329 - DNA, 25 bp, Homo sapien
gagggagggcgtcctttattacata

SEQ ID NO: 1272330 - DNA, 25 bp, Homo sapien
aagatgaccatgacccaagcgagaa

SEQ ID NO: 1272331 - DNA, 25 bp, Homo sapien
gaagagccgccatgaactgtggtca

SEQ ID NO: 1272332 - DNA, 25 bp, Homo sapien
gcagcccctaggaagttaagcgaga

SEQ ID NO: 1272333 - DNA, 25 bp, Homo sapien
tgtggtcataccagccagggcgttc

SEQ ID NO: 1272334 - DNA, 25 bp, Homo sapien
tctggccagcacaagggacttaagt

SEQ ID NO: 1272335 - DNA, 25 bp, Homo sapien
tgttttgatgtaagcccctggcagg

SEQ ID NO: 1272336 - DNA, 25 bp, Homo sapien
cccaaggtgggaacaagtaggtgca

SEQ ID NO: 1272337 - DNA, 25 bp, Homo sapien
caatgggacttcttagactggacaa

SEQ ID NO: 1272338 - DNA, 25 bp, Homo sapien
tccacgcgcgagtctctgggtcata

SEQ ID NO: 1272339 - DNA, 25 bp, Homo sapien
taggcctctaccacgtccgagagtt

SEQ ID NO: 1272340 - DNA, 25 bp, Homo sapien
aactggcggaagatgctgacactgc

SEQ ID NO: 1272341 - DNA, 25 bp, Homo sapien
actgccatgccagaaggtgggttct

SEQ ID NO: 1272342 - DNA, 25 bp, Homo sapien
tggaacaggtgtccccagatgactg

SEQ ID NO: 1272343 - DNA, 25 bp, Homo sapien
tgaaccgcgaggctggatgattcct

SEQ ID NO: 1272344 - DNA, 25 bp, Homo sapien
agaacgctgggtctcttaaatgcca

SEQ ID NO: 1272345 - DNA, 25 bp, Homo sapien
tccctatggtgatgagggtgcccgc

SEQ ID NO: 1272346 - DNA, 25 bp, Homo sapien
tggatcccaaacactcatcacgatg

SEQ ID NO: 1272347 - DNA, 25 bp, Homo sapien
tgggttgcaaaatcaggaccagcct

SEQ ID NO: 1272348 - DNA, 25 bp, Homo sapien
caatgctggcccgcctgaaaattta

SEQ ID NO: 1272349 - DNA, 25 bp, Homo sapien
catcacgatgacacttgggttgcaa

SEQ ID NO: 1272350 - DNA, 25 bp, Homo sapien
ctgattcatggacgggatcttgtcc

SEQ ID NO: 1272351 - DNA, 25 bp, Homo sapien
cattcgttcctcgtcgggttgtaca

SEQ ID NO: 1272352 - DNA, 25 bp, Homo sapien
gacgggatcttgtcccattcgttcc

SEQ ID NO: 1272353 - DNA, 25 bp, Homo sapien
cacgtccacctcagcggagtcatcc

SEQ ID NO: 1272354 - DNA, 25 bp, Homo sapien
tcgtagcactgcatcaccatggtct

SEQ ID NO: 1272355 - DNA, 25 bp, Homo sapien
tacatgagtccgtttagagtcgcag

SEQ ID NO: 1272356 - DNA, 25 bp, Homo sapien
acgcagtcatagagccgggagccat

SEQ ID NO: 1272357 - DNA, 25 bp, Homo sapien
gagttgtacctccacacgcagtcat

SEQ ID NO: 1272358 - DNA, 25 bp, Homo sapien
tgggccttgggacagttctcctggg

SEQ ID NO: 1272359 - DNA, 25 bp, Homo sapien
tagcagtcgacagtgaccagctcgt

SEQ ID NO: 1272360 - DNA, 25 bp, Homo sapien
cgacgtgcgccaacaggtagaagcg

SEQ ID NO: 1272361 - DNA, 25 bp, Homo sapien
ccacgtggcgcagaatgaaccgctg

SEQ ID NO: 1272362 - DNA, 25 bp, Homo sapien
ccgtcacgtagatgtcattgcccag

SEQ ID NO: 1272363 - DNA, 25 bp, Homo sapien
ccttcgataggttgtcgaggacgcc

SEQ ID NO: 1272364 - DNA, 25 bp, Homo sapien
gccttcgataggttgtcgaggacgc

SEQ ID NO: 1272365 - DNA, 25 bp, Homo sapien
gcgccttcgataggttgtcgaggac

SEQ ID NO: 1272366 - DNA, 25 bp, Homo sapien
ttcgataggttgtcgaggacgccgc

SEQ ID NO: 1272367 - DNA, 25 bp, Homo sapien
gcgcgctaggcaccgctgctataaa

SEQ ID NO: 1272368 - DNA, 25 bp, Homo sapien
taacccctctgtgccgggcgccacc

SEQ ID NO: 1272369 - DNA, 25 bp, Homo sapien
gatgggcggggagacgtctgcaccg

SEQ ID NO: 1272370 - DNA, 25 bp, Homo sapien
ctgctataaatagggcggggcgccg

SEQ ID NO: 1272371 - DNA, 25 bp, Homo sapien
tcacgggacacactcaaaggatagg

SEQ ID NO: 1272372 - DNA, 25 bp, Homo sapien
cacacaggcgttaactttagtcggc

SEQ ID NO: 1272373 - DNA, 25 bp, Homo sapien
tgtagtttccgagtctgcgtcgcag

SEQ ID NO: 1272374 - DNA, 25 bp, Homo sapien
tagtcggcttcacgcgcagttgtag

SEQ ID NO: 1272375 - DNA, 25 bp, Homo sapien
caggcactacgctaaaatttaacag

SEQ ID NO: 1272376 - DNA, 25 bp, Homo sapien
ccaggcactacgctaaaatttaaca

SEQ ID NO: 1272377 - DNA, 25 bp, Homo sapien
gcactacgctaaaatttaacagctt

SEQ ID NO: 1272378 - DNA, 25 bp, Homo sapien
aacagtaagctaccatttatttagc

SEQ ID NO: 1272379 - DNA, 25 bp, Homo sapien
gtcggctcccgaggcccccggctgc

SEQ ID NO: 1272380 - DNA, 25 bp, Homo sapien
cgcccctggctccggttgctctcga

SEQ ID NO: 1272381 - DNA, 25 bp, Homo sapien
ttgctctcgaggagttttaggcccc

SEQ ID NO: 1272382 - DNA, 25 bp, Homo sapien
cctggctccggttgctctcgaggag

SEQ ID NO: 1272383 - DNA, 25 bp, Homo sapien
accctgtctttttgcacgatacagc

SEQ ID NO: 1272384 - DNA, 25 bp, Homo sapien
ttttgcacgatgtaaaaaccctgtc

SEQ ID NO: 1272385 - DNA, 25 bp, Homo sapien
atggcccgtgttcataactcagttt

SEQ ID NO: 1272386 - DNA, 25 bp, Homo sapien
cacgatacagccaaaagtattggct

SEQ ID NO: 1272387 - DNA, 25 bp, Homo sapien
tgccggttccacagggtacagttag

SEQ ID NO: 1272388 - DNA, 25 bp, Homo sapien
aggatgaccccttggaactgtgccg

SEQ ID NO: 1272389 - DNA, 25 bp, Homo sapien
tgtgtgccctttagacaggctggcc

SEQ ID NO: 1272390 - DNA, 25 bp, Homo sapien
ggttaggcaatcactgggacccgca

SEQ ID NO: 1272391 - DNA, 25 bp, Homo sapien
tagaaactgacgagggcaaacagcc

SEQ ID NO: 1272392 - DNA, 25 bp, Homo sapien
caaattaggcacgacccatctgtgg

SEQ ID NO: 1272393 - DNA, 25 bp, Homo sapien
cgtgaataaccagcgctccaaagtg

SEQ ID NO: 1272394 - DNA, 25 bp, Homo sapien
gaatttgccaaagatctaccctgag

SEQ ID NO: 1272395 - DNA, 25 bp, Homo sapien
ggcagtgctgcaaccgctacagcag

SEQ ID NO: 1272396 - DNA, 25 bp, Homo sapien
gcagccgcaggaagcagctcacctt

SEQ ID NO: 1272397 - DNA, 25 bp, Homo sapien
gcagtgctgcaaccgctacagcagc

SEQ ID NO: 1272398 - DNA, 25 bp, Homo sapien
aaggaatgggtgctgaacatcggcc

SEQ ID NO: 1272399 - DNA, 25 bp, Homo sapien
tgcttcagcgcctttggaaaccgca

SEQ ID NO: 1272400 - DNA, 25 bp, Homo sapien
gctccgagcacttccggccagagtg

SEQ ID NO: 1272401 - DNA, 25 bp, Homo sapien
ctaaagcacaatgccgtgcccacgg

SEQ ID NO: 1272402 - DNA, 25 bp, Homo sapien
gagacaggcctcacgtaactttact

SEQ ID NO: 1272403 - DNA, 25 bp, Homo sapien
gctgcattctgcatcccaagtgggc

SEQ ID NO: 1272404 - DNA, 25 bp, Homo sapien
taactttactgcagccgaggtccag

SEQ ID NO: 1272405 - DNA, 25 bp, Homo sapien
tggtgagtgccttctgtacagtcga

SEQ ID NO: 1272406 - DNA, 25 bp, Homo sapien
gccggtggaatgacttgagcagctc

SEQ ID NO: 1272407 - DNA, 25 bp, Homo sapien
tgtgtctgatgtcttgccaagcgcc

SEQ ID NO: 1272408 - DNA, 25 bp, Homo sapien
ttcccatgttcagcgtggactgcag

SEQ ID NO: 1272409 - DNA, 25 bp, Homo sapien
taggccctgggatcgggagttacac

SEQ ID NO: 1272410 - DNA, 25 bp, Homo sapien
tatccatctgtatcgatcctgtggg

SEQ ID NO: 1272411 - DNA, 25 bp, Homo sapien
ttatccatctgtatcgatcctgtgg

SEQ ID NO: 1272412 - DNA, 25 bp, Homo sapien
ccccggaactgatagagcactttca

SEQ ID NO: 1272413 - DNA, 25 bp, Homo sapien
tcacctgatgcaggacgccccggaa

SEQ ID NO: 1272414 - DNA, 25 bp, Homo sapien
cccacacacgggtcataaaagccag

SEQ ID NO: 1272415 - DNA, 25 bp, Homo sapien
actgctttggtatccggagggcctc

SEQ ID NO: 1272416 - DNA, 25 bp, Homo sapien
gatgagcttcgagtccttcaccagg

SEQ ID NO: 1272417 - DNA, 25 bp, Homo sapien
taccaggcattgacgatgatgaggc

SEQ ID NO: 1272418 - DNA, 25 bp, Homo sapien
gggcacagtcacgtcaatcaccttc

SEQ ID NO: 1272419 - DNA, 25 bp, Homo sapien
attgacaaacttcccgtaccaggca

SEQ ID NO: 1272420 - DNA, 25 bp, Homo sapien
tatccttcggacagattcctgcatc

SEQ ID NO: 1272421 - DNA, 25 bp, Homo sapien
tcaattatccttcggacagattcct

SEQ ID NO: 1272422 - DNA, 25 bp, Homo sapien
attatccttcggacagattcctgca

SEQ ID NO: 1272423 - DNA, 25 bp, Homo sapien
ctgcctcaattatccttcggacaga

SEQ ID NO: 1272424 - DNA, 25 bp, Homo sapien
caggcctgttccacctctggtgaga

SEQ ID NO: 1272425 - DNA, 25 bp, Homo sapien
tgacagctctgctacccgagtggct

SEQ ID NO: 1272426 - DNA, 25 bp, Homo sapien
gagaagcacctgaaacggcatgacc

SEQ ID NO: 1272427 - DNA, 25 bp, Homo sapien
gcaggcagtcttgtccacgtcaaca

SEQ ID NO: 1272428 - DNA, 25 bp, Homo sapien
gttggagaagagaagtctgacctct

SEQ ID NO: 1272429 - DNA, 25 bp, Homo sapien
ctctaaggccctgagaccaacatgt

SEQ ID NO: 1272430 - DNA, 25 bp, Homo sapien
atcccacaataaagactaagtggag

SEQ ID NO: 1272431 - DNA, 25 bp, Homo sapien
tacagccctcgcttgggaacggtgg

SEQ ID NO: 1272432 - DNA, 25 bp, Homo sapien
catcggtggcggcgctttccctctg

SEQ ID NO: 1272433 - DNA, 25 bp, Homo sapien
tctgcagcacatcggtggcggcgct

SEQ ID NO: 1272434 - DNA, 25 bp, Homo sapien
ggtggcggcgctttccctctgcttc

SEQ ID NO: 1272435 - DNA, 25 bp, Homo sapien
tcggtggcggcgctttccctctgct

SEQ ID NO: 1272436 - DNA, 25 bp, Homo sapien
ttaccaatcgtgacccagacatcag

SEQ ID NO: 1272437 - DNA, 25 bp, Homo sapien
caaacgaagagataacagcagtcca

SEQ ID NO: 1272438 - DNA, 25 bp, Homo sapien
cacccgacgcaggaggctctgttat

SEQ ID NO: 1272439 - DNA, 25 bp, Homo sapien
ccaactacggacaatgaggagaaat

SEQ ID NO: 1272440 - DNA, 25 bp, Homo sapien
ggcaaagtagaccactagaggcccc

SEQ ID NO: 1272441 - DNA, 25 bp, Homo sapien
gaagaagtatgtctgactggccctg

SEQ ID NO: 1272442 - DNA, 25 bp, Homo sapien
gaagctggtccgtcaagtgaatagg

SEQ ID NO: 1272443 - DNA, 25 bp, Homo sapien
gatcagacggtgcatggcaaagtag

SEQ ID NO: 1272444 - DNA, 25 bp, Homo sapien
gcagacagcagatacttacagggag

SEQ ID NO: 1272445 - DNA, 25 bp, Homo sapien
gagttcctctcaagtaccacgatgg

SEQ ID NO: 1272446 - DNA, 25 bp, Homo sapien
tggctgacgccagctctaatctagg

SEQ ID NO: 1272447 - DNA, 25 bp, Homo sapien
gctcgttggagattgaacatggcaa

SEQ ID NO: 1272448 - DNA, 25 bp, Homo sapien
aagacaaagatgctggccgcagtga

SEQ ID NO: 1272449 - DNA, 25 bp, Homo sapien
gagatcgaggctgactccaaggttt

SEQ ID NO: 1272450 - DNA, 25 bp, Homo sapien
tgagatatgtatgatttggagtgtg

SEQ ID NO: 1272451 - DNA, 25 bp, Homo sapien
aaagacttcgggcagagcaggttct

SEQ ID NO: 1272452 - DNA, 25 bp, Homo sapien
cctgtggaactccaacgctgacagc

SEQ ID NO: 1272453 - DNA, 25 bp, Homo sapien
tgactttgagagaaacaccctgtgg

SEQ ID NO: 1272454 - DNA, 25 bp, Homo sapien
caccaccgtcccaaagaagcctgct

SEQ ID NO: 1272455 - DNA, 25 bp, Homo sapien
ttcctctcagctccgtactccacca

SEQ ID NO: 1272456 - DNA, 25 bp, Homo sapien
tcctttcacacgagtctgatcgtca

SEQ ID NO: 1272457 - DNA, 25 bp, Homo sapien
cgagtctgatcgtcatcttggaatt

SEQ ID NO: 1272458 - DNA, 25 bp, Homo sapien
ttgagggatcctttcacacgagtct

SEQ ID NO: 1272459 - DNA, 25 bp, Homo sapien
cacacgagtctgatcgtcatcttgg

SEQ ID NO: 1272460 - DNA, 25 bp, Homo sapien
tggctgactggataccccatcgcca

SEQ ID NO: 1272461 - DNA, 25 bp, Homo sapien
tggttttagtgtctcggacgatgct

SEQ ID NO: 1272462 - DNA, 25 bp, Homo sapien
gctagtgttcatggctgactggata

SEQ ID NO: 1272463 - DNA, 25 bp, Homo sapien
cacagtgaagtggctggttttagtg

SEQ ID NO: 1272464 - DNA, 25 bp, Homo sapien
taggttccgagctaggacagtggtc

SEQ ID NO: 1272465 - DNA, 25 bp, Homo sapien
tgcaggtagcccacggtgttcttgt

SEQ ID NO: 1272466 - DNA, 25 bp, Homo sapien
ggtgttcttgtctaggttccgagct

SEQ ID NO: 1272467 - DNA, 25 bp, Homo sapien
gccgggtcggattccacgggatgaa

SEQ ID NO: 1272468 - DNA, 25 bp, Homo sapien
ctgcagagcacagtttgttgtcaca

SEQ ID NO: 1272469 - DNA, 25 bp, Homo sapien
cagagcacagtttgttgtcacaaag

SEQ ID NO: 1272470 - DNA, 25 bp, Homo sapien
gcagagcacagtttgttgtcacaaa

SEQ ID NO: 1272471 - DNA, 25 bp, Homo sapien
tgcagagcacagtttgttgtcacaa

SEQ ID NO: 1272472 - DNA, 25 bp, Homo sapien
aagcaggaggtcaggcctctatcca

SEQ ID NO: 1272473 - DNA, 25 bp, Homo sapien
agggtcctagccagaatcttcctag

SEQ ID NO: 1272474 - DNA, 25 bp, Homo sapien
acgtctatgcatccctgggccagct

SEQ ID NO: 1272475 - DNA, 25 bp, Homo sapien
gcctggctaagacctcacttactgt

SEQ ID NO: 1272476 - DNA, 25 bp, Homo sapien
cggttcccgaaaagagcctctgcag

SEQ ID NO: 1272477 - DNA, 25 bp, Homo sapien
tggctcatccacaaatcacggctgg

SEQ ID NO: 1272478 - DNA, 25 bp, Homo sapien
aaactacaggcaaagcgagcacagg

SEQ ID NO: 1272479 - DNA, 25 bp, Homo sapien
cagtttctttccaagggagtccagc

SEQ ID NO: 1272480 - DNA, 25 bp, Homo sapien
accgcacctgaccagcatttctttt

SEQ ID NO: 1272481 - DNA, 25 bp, Homo sapien
gccaccgcacctgaccagcatttct

SEQ ID NO: 1272482 - DNA, 25 bp, Homo sapien
cgcacctgaccagcatttctttttt

SEQ ID NO: 1272483 - DNA, 25 bp, Homo sapien
caccgcacctgaccagcatttcttt

SEQ ID NO: 1272484 - DNA, 25 bp, Homo sapien
aaacgaccagactagtgggcaggga

SEQ ID NO: 1272485 - DNA, 25 bp, Homo sapien
cccacagacaaacgaccagactagt

SEQ ID NO: 1272486 - DNA, 25 bp, Homo sapien
cagggattaggtcaacccctgcaga

SEQ ID NO: 1272487 - DNA, 25 bp, Homo sapien
tgctttggtgcctaagcggcctccg

SEQ ID NO: 1272488 - DNA, 25 bp, Homo sapien
cttggatcattgcaacctccgcctc

SEQ ID NO: 1272489 - DNA, 25 bp, Homo sapien
agtggtgtgatcttggatcattgca

SEQ ID NO: 1272490 - DNA, 25 bp, Homo sapien
tgctctgctgcttaggctggagtac

SEQ ID NO: 1272491 - DNA, 25 bp, Homo sapien
ctgggttcaagagatcctcccacct

SEQ ID NO: 1272492 - DNA, 25 bp, Homo sapien
gacactgctgtcgttctagaaggga

SEQ ID NO: 1272493 - DNA, 25 bp, Homo sapien
aacccgatgatgaggcagtctgtca

SEQ ID NO: 1272494 - DNA, 25 bp, Homo sapien
tataggaaatgaagacactgctgtc

SEQ ID NO: 1272495 - DNA, 25 bp, Homo sapien
ggactacatctctggcatatgtcaa

SEQ ID NO: 1272496 - DNA, 25 bp, Homo sapien
tggtgtgagattacggaacagcttg

SEQ ID NO: 1272497 - DNA, 25 bp, Homo sapien
catcttggtgtgagattacggaaca

SEQ ID NO: 1272498 - DNA, 25 bp, Homo sapien
ttgagaccgaacaaaggcccctgta

SEQ ID NO: 1272499 - DNA, 25 bp, Homo sapien
cggaacagcttgagaccgaacaaag

SEQ ID NO: 1272500 - DNA, 25 bp, Homo sapien
ggaccagtcaacttatggaagcttg

SEQ ID NO: 1272501 - DNA, 25 bp, Homo sapien
gaaataaggctttgcacagacaaca

SEQ ID NO: 1272502 - DNA, 25 bp, Homo sapien
tggccaggctcatgagacctatttt

SEQ ID NO: 1272503 - DNA, 25 bp, Homo sapien
gaagcttgacacttggtaccgttct

SEQ ID NO: 1272504 - DNA, 25 bp, Homo sapien
ctcgtctgagcgcaaagttaatgga

SEQ ID NO: 1272505 - DNA, 25 bp, Homo sapien
catccctttgccgaagttactcgtc

SEQ ID NO: 1272506 - DNA, 25 bp, Homo sapien
tgagcgcaaagttaatggaacctcc

SEQ ID NO: 1272507 - DNA, 25 bp, Homo sapien
ctgtgtctgtcgctgtcaagggtgc

SEQ ID NO: 1272508 - DNA, 25 bp, Homo sapien
tctgcatgtgaccacgagggtaata

SEQ ID NO: 1272509 - DNA, 25 bp, Homo sapien
taaagaacgcactgtgagcccaagg

SEQ ID NO: 1272510 - DNA, 25 bp, Homo sapien
ccaaggccaaaggtgcagacgattc

SEQ ID NO: 1272511 - DNA, 25 bp, Homo sapien
tggatgcagaactgccgcaacagct

SEQ ID NO: 1272512 - DNA, 25 bp, Homo sapien
aagatgagaaaaaccctgggcagac

SEQ ID NO: 1272513 - DNA, 25 bp, Homo sapien
gtaacacacggctgggaatgaagcg

SEQ ID NO: 1272514 - DNA, 25 bp, Homo sapien
tcgagcccttgctgtactcggagag

SEQ ID NO: 1272515 - DNA, 25 bp, Homo sapien
tgtgctgtgcctcattaactcgagc

SEQ ID NO: 1272516 - DNA, 25 bp, Homo sapien
ggcatctactccaacgctgatcgtt

SEQ ID NO: 1272517 - DNA, 25 bp, Homo sapien
tcaatctgcggaaagctactgccgg

SEQ ID NO: 1272518 - DNA, 25 bp, Homo sapien
tcatcatagcgatcaaaaaggtcgg

SEQ ID NO: 1272519 - DNA, 25 bp, Homo sapien
tcaatggactgggatatgtgcattt

SEQ ID NO: 1272520 - DNA, 25 bp, Homo sapien
gacaaatagagactgcacacgtgcc

SEQ ID NO: 1272521 - DNA, 25 bp, Homo sapien
tgaaaacagccctccgacggatact

SEQ ID NO: 1272522 - DNA, 25 bp, Homo sapien
tttgatccacgcagacactgtgtag

SEQ ID NO: 1272523 - DNA, 25 bp, Homo sapien
tataactggtgaacccagcatggca

SEQ ID NO: 1272524 - DNA, 25 bp, Homo sapien
ggagcagaggtgttaccattttcaa

SEQ ID NO: 1272525 - DNA, 25 bp, Homo sapien
gaggtttatcttactgtgcatccca

SEQ ID NO: 1272526 - DNA, 25 bp, Homo sapien
aaatgtgggattcaaagagatggac

SEQ ID NO: 1272527 - DNA, 25 bp, Homo sapien
gctgtatgggtcttaaataaactgc

SEQ ID NO: 1272528 - DNA, 25 bp, Homo sapien
ctcgaatttcagcaggggttctcct

SEQ ID NO: 1272529 - DNA, 25 bp, Homo sapien
aaactcctctcgaatttcagcaggg

SEQ ID NO: 1272530 - DNA, 25 bp, Homo sapien
tcaaactcctctcgaatttcagcag

SEQ ID NO: 1272531 - DNA, 25 bp, Homo sapien
ctctcgaatttcagcaggggttctc

SEQ ID NO: 1272532 - DNA, 25 bp, Homo sapien
agctgaagtgccgtgcattatctca

SEQ ID NO: 1272533 - DNA, 25 bp, Homo sapien
gaagtgccgtgcattatctcagctc

SEQ ID NO: 1272534 - DNA, 25 bp, Homo sapien
cccaagctgaagtgccgtgcattat

SEQ ID NO: 1272535 - DNA, 25 bp, Homo sapien
tgaagtgccgtgcattatctcagct

SEQ ID NO: 1272536 - DNA, 25 bp, Homo sapien
ctcgcaagggcattctgggttctat

SEQ ID NO: 1272537 - DNA, 25 bp, Homo sapien
tgattgctctgtgacctcgcaaggg

SEQ ID NO: 1272538 - DNA, 25 bp, Homo sapien
ttaaaatcatcgagggtgcgtcacc

SEQ ID NO: 1272539 - DNA, 25 bp, Homo sapien
tatttcgtgaacaagatgcgttccc

SEQ ID NO: 1272540 - DNA, 25 bp, Homo sapien
tatatcatagatggccctggtttgg

SEQ ID NO: 1272541 - DNA, 25 bp, Homo sapien
atatatatcatagatggccctggtt

SEQ ID NO: 1272542 - DNA, 25 bp, Homo sapien
gtcctctcttcccatatatatcata

SEQ ID NO: 1272543 - DNA, 25 bp, Homo sapien
tcttcccatatatatcatagatggc

SEQ ID NO: 1272544 - DNA, 25 bp, Homo sapien
tgtttctacaaagtccggccctcca

SEQ ID NO: 1272545 - DNA, 25 bp, Homo sapien
ctaaaaatcgaatatctgttaccag

SEQ ID NO: 1272546 - DNA, 25 bp, Homo sapien
gatgtttctacaaagtccggccctc

SEQ ID NO: 1272547 - DNA, 25 bp, Homo sapien
tcctaaaaatcgaatatctgttacc

SEQ ID NO: 1272548 - DNA, 25 bp, Homo sapien
gttccgcctgtgacttgagctctgg

SEQ ID NO: 1272549 - DNA, 25 bp, Homo sapien
tggatggtagagcatacagagcctc

SEQ ID NO: 1272550 - DNA, 25 bp, Homo sapien
cagagcctccggtaggcagctttca

SEQ ID NO: 1272551 - DNA, 25 bp, Homo sapien
caaggttaaacagtcgttccgcctg

SEQ ID NO: 1272552 - DNA, 25 bp, Homo sapien
tctctgcttggctcacaactatcct

SEQ ID NO: 1272553 - DNA, 25 bp, Homo sapien
gaagtggtggggcatcctcaacagc

SEQ ID NO: 1272554 - DNA, 25 bp, Homo sapien
aaaatgttatccttgagcctgcacc

SEQ ID NO: 1272555 - DNA, 25 bp, Homo sapien
tgaaatgtaacctcacgtttgccaa

SEQ ID NO: 1272556 - DNA, 25 bp, Homo sapien
taatgcttagcatacattctagcac

SEQ ID NO: 1272557 - DNA, 25 bp, Homo sapien
caaagcgttgggactgtaaggcgtg

SEQ ID NO: 1272558 - DNA, 25 bp, Homo sapien
aactaatgcttagcatacattctag

SEQ ID NO: 1272559 - DNA, 25 bp, Homo sapien
ggaatttcataaactaatgcttagc

SEQ ID NO: 1272560 - DNA, 25 bp, Homo sapien
tcagccttatgagtagctgggatta

SEQ ID NO: 1272561 - DNA, 25 bp, Homo sapien
gcccgccatcaagtctggctaagtt

SEQ ID NO: 1272562 - DNA, 25 bp, Homo sapien
tcccagcagagattctcctgcttca

SEQ ID NO: 1272563 - DNA, 25 bp, Homo sapien
gcgcccgccatcaagtctggctaag

SEQ ID NO: 1272564 - DNA, 25 bp, Homo sapien
gtttgctgacgaagacaacagaaag

SEQ ID NO: 1272565 - DNA, 25 bp, Homo sapien
ctgagtatgacatttaacaccgagt

SEQ ID NO: 1272566 - DNA, 25 bp, Homo sapien
catttaacaccgagtttgctgacga

SEQ ID NO: 1272567 - DNA, 25 bp, Homo sapien
taacaccgagtttgctgacgaagac

SEQ ID NO: 1272568 - DNA, 25 bp, Homo sapien
tccctgcgcacgttcagcaacgagt

SEQ ID NO: 1272569 - DNA, 25 bp, Homo sapien
cgttcagcaacgagtaatagtcttc

SEQ ID NO: 1272570 - DNA, 25 bp, Homo sapien
gctcctcctcgctcaaggccgtcgc

SEQ ID NO: 1272571 - DNA, 25 bp, Homo sapien
gcaacgagtaatagtcttcattgtc

SEQ ID NO: 1272572 - DNA, 25 bp, Homo sapien
cagtgatccgcgtcagggacagcgc

SEQ ID NO: 1272573 - DNA, 25 bp, Homo sapien
ctcaagaggggccagtgatccgcgt

SEQ ID NO: 1272574 - DNA, 25 bp, Homo sapien
ccgccaaaccggcaaggccgtgctc

SEQ ID NO: 1272575 - DNA, 25 bp, Homo sapien
ccaaaccggcaaggccgtgctcaag

SEQ ID NO: 1272576 - DNA, 25 bp, Homo sapien
ttaaaggtcttcgaaatgacgccat

SEQ ID NO: 1272577 - DNA, 25 bp, Homo sapien
gatgtcttggttacaacaatctaaa

SEQ ID NO: 1272578 - DNA, 25 bp, Homo sapien
tcttggttacaacaatctaaataat

SEQ ID NO: 1272579 - DNA, 25 bp, Homo sapien
aagatgtcttggttacaacaatcta

SEQ ID NO: 1272580 - DNA, 25 bp, Homo sapien
tgcctctttggagatagccgcccag

SEQ ID NO: 1272581 - DNA, 25 bp, Homo sapien
actgactagtctttagccaagatga

SEQ ID NO: 1272582 - DNA, 25 bp, Homo sapien
tctgagtattcactgactagtcttt

SEQ ID NO: 1272583 - DNA, 25 bp, Homo sapien
tttgtcactgagtccagactgggat

SEQ ID NO: 1272584 - DNA, 25 bp, Homo sapien
gaattctttgctcatcccatcattt

SEQ ID NO: 1272585 - DNA, 25 bp, Homo sapien
tgaattctttgctcatcccatcatt

SEQ ID NO: 1272586 - DNA, 25 bp, Homo sapien
tgcatgtaaatgtcaacaggtgagg

SEQ ID NO: 1272587 - DNA, 25 bp, Homo sapien
cgttcattctgaacatgtcaccggg

SEQ ID NO: 1272588 - DNA, 25 bp, Homo sapien
gcctgactcatgaagcgtggagcga

SEQ ID NO: 1272589 - DNA, 25 bp, Homo sapien
gaatgtgtatccataactccctgat

SEQ ID NO: 1272590 - DNA, 25 bp, Homo sapien
catgttggcctggtacgttccgagc

SEQ ID NO: 1272591 - DNA, 25 bp, Homo sapien
gcagagtggccgataagtattttta

SEQ ID NO: 1272592 - DNA, 25 bp, Homo sapien
cgttccgagcactgtggagttttgg

SEQ ID NO: 1272593 - DNA, 25 bp, Homo sapien
ttggtgtttaggcagatccctctca

SEQ ID NO: 1272594 - DNA, 25 bp, Homo sapien
taatgccagaacacttgaacgagga

SEQ ID NO: 1272595 - DNA, 25 bp, Homo sapien
cacatgttgttaggattggcacaga

SEQ ID NO: 1272596 - DNA, 25 bp, Homo sapien
cagaattcagtgtgacagtcaatct

SEQ ID NO: 1272597 - DNA, 25 bp, Homo sapien
tgtgacagtcaatcttaatgccaga

SEQ ID NO: 1272598 - DNA, 25 bp, Homo sapien
gttgtcaccaacagtagcaaaagga

SEQ ID NO: 1272599 - DNA, 25 bp, Homo sapien
aaaccgtacaagatcacattgaggg

SEQ ID NO: 1272600 - DNA, 25 bp, Homo sapien
actgcaaaccgtacaagatcacatt

SEQ ID NO: 1272601 - DNA, 25 bp, Homo sapien
taaaatgcggaagaatgaaatgttc

SEQ ID NO: 1272602 - DNA, 25 bp, Homo sapien
ttttaaacaatttgcgattgcagcc

SEQ ID NO: 1272603 - DNA, 25 bp, Homo sapien
aggcaaccatgagtcatccgctccg

SEQ ID NO: 1272604 - DNA, 25 bp, Homo sapien
tactttctccggagagaggccggtc

SEQ ID NO: 1272605 - DNA, 25 bp, Homo sapien
gcctcatcctgggacaggcaaccat

SEQ ID NO: 1272606 - DNA, 25 bp, Homo sapien
tggcgcttctctgctttcggccggc

SEQ ID NO: 1272607 - DNA, 25 bp, Homo sapien
agcgacgcccggactcctaggcagt

SEQ ID NO: 1272608 - DNA, 25 bp, Homo sapien
gaaaagccccagcgtgccaatgagg

SEQ ID NO: 1272609 - DNA, 25 bp, Homo sapien
gggatcccggagatcccggcgcgtc

SEQ ID NO: 1272610 - DNA, 25 bp, Homo sapien
ggactcctaggcagtcggactccag

SEQ ID NO: 1272611 - DNA, 25 bp, Homo sapien
tcacaaagctttgatgaaagtttct

SEQ ID NO: 1272612 - DNA, 25 bp, Homo sapien
ggttttcttgatagaggctgttgtg

SEQ ID NO: 1272613 - DNA, 25 bp, Homo sapien
ttttctgcccgcatttttgcattgc

SEQ ID NO: 1272614 - DNA, 25 bp, Homo sapien
tttctgcccgcatttttgcattgct

SEQ ID NO: 1272615 - DNA, 25 bp, Homo sapien
agctgccctctttggtttaggtgtt

SEQ ID NO: 1272616 - DNA, 25 bp, Homo sapien
aaagtgctccaacagctgccctctt

SEQ ID NO: 1272617 - DNA, 25 bp, Homo sapien
acagctgccctctttggtttaggtg

SEQ ID NO: 1272618 - DNA, 25 bp, Homo sapien
caacagctgccctctttggtttagg

SEQ ID NO: 1272619 - DNA, 25 bp, Homo sapien
aggccttcacgccacagcggtggca

SEQ ID NO: 1272620 - DNA, 25 bp, Homo sapien
cactccagttatacgtcctcctgca

SEQ ID NO: 1272621 - DNA, 25 bp, Homo sapien
ccagttatacgtcctcctgcacttg

SEQ ID NO: 1272622 - DNA, 25 bp, Homo sapien
aaggtggtaggccttcacgccacag

SEQ ID NO: 1272623 - DNA, 25 bp, Homo sapien
caaacggtcatctcacttctgtggc

SEQ ID NO: 1272624 - DNA, 25 bp, Homo sapien
ctttccaaacggtcatctcacttct

SEQ ID NO: 1272625 - DNA, 25 bp, Homo sapien
aaacggtcatctcacttctgtggct

SEQ ID NO: 1272626 - DNA, 25 bp, Homo sapien
tccaaacggtcatctcacttctgtg

SEQ ID NO: 1272627 - DNA, 25 bp, Homo sapien
tggatgtagatttgggacctagaga

SEQ ID NO: 1272628 - DNA, 25 bp, Homo sapien
catctagagatcctagaaagcagtt

SEQ ID NO: 1272629 - DNA, 25 bp, Homo sapien
gctgagagtacggataaaattttcc

SEQ ID NO: 1272630 - DNA, 25 bp, Homo sapien
gaaagagcttccagaaatgaactga

SEQ ID NO: 1272631 - DNA, 25 bp, Homo sapien
tagagatacccctttgagtgataaa

SEQ ID NO: 1272632 - DNA, 25 bp, Homo sapien
ttttaataatgtgtgacccttcacc

SEQ ID NO: 1272633 - DNA, 25 bp, Homo sapien
caaagtgtaacacgctgatttcctc

SEQ ID NO: 1272634 - DNA, 25 bp, Homo sapien
taattttggtgtacaagctgtaaca

SEQ ID NO: 1272635 - DNA, 25 bp, Homo sapien
tatcataggcgaagaagtcagacat

SEQ ID NO: 1272636 - DNA, 25 bp, Homo sapien
gaccattgtatgagacccagttttg

SEQ ID NO: 1272637 - DNA, 25 bp, Homo sapien
gccatgagggctgacacattggaat

SEQ ID NO: 1272638 - DNA, 25 bp, Homo sapien
tgttcatgggcgcagcaaagaagag

SEQ ID NO: 1272639 - DNA, 25 bp, Homo sapien
cttttgttgtgattgaagtaactgg

SEQ ID NO: 1272640 - DNA, 25 bp, Homo sapien
acttgcgtcgcatcctttctgaatg

SEQ ID NO: 1272641 - DNA, 25 bp, Homo sapien
actggaagcctagttcagggtgctg

SEQ ID NO: 1272642 - DNA, 25 bp, Homo sapien
gataaagcagtgaaagtttggaaag

SEQ ID NO: 1272643 - DNA, 25 bp, Homo sapien
catgtctctggaatactgtaatatc

SEQ ID NO: 1272644 - DNA, 25 bp, Homo sapien
agtagaagacagagatgcatagaaa

SEQ ID NO: 1272645 - DNA, 25 bp, Homo sapien
tgtaatatcgacatctagtgagagt

SEQ ID NO: 1272646 - DNA, 25 bp, Homo sapien
gaagacagagatgcatagaaacatg

SEQ ID NO: 1272647 - DNA, 25 bp, Homo sapien
tcttggcagtaaatacggtgaagct

SEQ ID NO: 1272648 - DNA, 25 bp, Homo sapien
gctgtgctgatttgacggcttcttt

SEQ ID NO: 1272649 - DNA, 25 bp, Homo sapien
cagtaaatacggtgaagctgccgct

SEQ ID NO: 1272650 - DNA, 25 bp, Homo sapien
tctcaagcgtcagcccttcttggca

SEQ ID NO: 1272651 - DNA, 25 bp, Homo sapien
ggtttgctgccattgatagccctgc

SEQ ID NO: 1272652 - DNA, 25 bp, Homo sapien
caagctcgcctgtggatctgtagga

SEQ ID NO: 1272653 - DNA, 25 bp, Homo sapien
catcatggaagcgtgcccagtctgt

SEQ ID NO: 1272654 - DNA, 25 bp, Homo sapien
tctgtgaggtcatcggtaccgtgga

SEQ ID NO: 1272655 - DNA, 25 bp, Homo sapien
ccaaatatatgcctttgcacaactc

SEQ ID NO: 1272656 - DNA, 25 bp, Homo sapien
tgtctcacgtgaacaggctttctaa

SEQ ID NO: 1272657 - DNA, 25 bp, Homo sapien
tattgtctcacgtgaacaggctttc

SEQ ID NO: 1272658 - DNA, 25 bp, Homo sapien
ttgttgccgtggtttgaaagcttgc

SEQ ID NO: 1272659 - DNA, 25 bp, Homo sapien
gccaggagcgactgctgttttatct

SEQ ID NO: 1272660 - DNA, 25 bp, Homo sapien
cgtgtcatgtcaaatggtactccca

SEQ ID NO: 1272661 - DNA, 25 bp, Homo sapien
gggattccctctttcgtgtcatgtc

SEQ ID NO: 1272662 - DNA, 25 bp, Homo sapien
caggagcgactgctgttttatctgg

SEQ ID NO: 1272663 - DNA, 25 bp, Homo sapien
tccccctcattttcgagtgcagcag

SEQ ID NO: 1272664 - DNA, 25 bp, Homo sapien
cattttcgagtgcagcagtcttttc

SEQ ID NO: 1272665 - DNA, 25 bp, Homo sapien
ctctggctgttgttcgaatatattt

SEQ ID NO: 1272666 - DNA, 25 bp, Homo sapien
ggctgttgttcgaatatatttttcc

SEQ ID NO: 1272667 - DNA, 25 bp, Homo sapien
gcaggcggtagagctgtgcctcaca

SEQ ID NO: 1272668 - DNA, 25 bp, Homo sapien
tgcctcacaggggtttggctgtatg

SEQ ID NO: 1272669 - DNA, 25 bp, Homo sapien
tctggtctcctaaggggcctctgcc

SEQ ID NO: 1272670 - DNA, 25 bp, Homo sapien
ctgtatgggattggcgcagcccatg

SEQ ID NO: 1272671 - DNA, 25 bp, Homo sapien
cttttctgtttatagagcgcagcaa

SEQ ID NO: 1272672 - DNA, 25 bp, Homo sapien
caacatgtcactatctgggaaggtc

SEQ ID NO: 1272673 - DNA, 25 bp, Homo sapien
tatagagcgcagcaaacagggtcag

SEQ ID NO: 1272674 - DNA, 25 bp, Homo sapien
ctatctgggaaggtcattgtgtcct

SEQ ID NO: 1272675 - DNA, 25 bp, Homo sapien
tgggaacccaaggttgctggatccg

SEQ ID NO: 1272676 - DNA, 25 bp, Homo sapien
aggccctgggctgctagaaccctgt

SEQ ID NO: 1272677 - DNA, 25 bp, Homo sapien
cctgggctgctagaaccctgtggct

SEQ ID NO: 1272678 - DNA, 25 bp, Homo sapien
tgctggatccgtggagctttggacc

SEQ ID NO: 1272679 - DNA, 25 bp, Homo sapien
taggaggtgctgcatttgccctcgg

SEQ ID NO: 1272680 - DNA, 25 bp, Homo sapien
ggtatttgtcccctacaccaggctg

SEQ ID NO: 1272681 - DNA, 25 bp, Homo sapien
gaccgtgctctcgtggtatttgtcc

SEQ ID NO: 1272682 - DNA, 25 bp, Homo sapien
ggaacttagtaacccattcaatgtg

SEQ ID NO: 1272683 - DNA, 25 bp, Homo sapien
tcgcctgcctgctgggatccaagtc

SEQ ID NO: 1272684 - DNA, 25 bp, Homo sapien
tggtaatcactgtcgactcgcctgc

SEQ ID NO: 1272685 - DNA, 25 bp, Homo sapien
tggcgtaccatgttcccaccattgt

SEQ ID NO: 1272686 - DNA, 25 bp, Homo sapien
ttttggaccagggtgctggcgtacc

SEQ ID NO: 1272687 - DNA, 25 bp, Homo sapien
cagctgacaaaagaggcgagtccag

SEQ ID NO: 1272688 - DNA, 25 bp, Homo sapien
taattatcattccatgccacatctc

SEQ ID NO: 1272689 - DNA, 25 bp, Homo sapien
caatgtgcttatctggagagaaggc

SEQ ID NO: 1272690 - DNA, 25 bp, Homo sapien
agatttattaccctggcacctgcag

SEQ ID NO: 1272691 - DNA, 25 bp, Homo sapien
accagagctcttttgccaccaagct

SEQ ID NO: 1272692 - DNA, 25 bp, Homo sapien
agctttttgatgtattgaccagaag

SEQ ID NO: 1272693 - DNA, 25 bp, Homo sapien
agagctctggcttatggatttgggc

SEQ ID NO: 1272694 - DNA, 25 bp, Homo sapien
gattcaagattgtatctgctgagcc

SEQ ID NO: 1272695 - DNA, 25 bp, Homo sapien
agacgtgtcacattctcctcgctgc

SEQ ID NO: 1272696 - DNA, 25 bp, Homo sapien
cagacacatgacagggctgtggcca

SEQ ID NO: 1272697 - DNA, 25 bp, Homo sapien
ccagaagatggagacgtgtcacatt

SEQ ID NO: 1272698 - DNA, 25 bp, Homo sapien
tgcggccccactgtttacatcagtt

SEQ ID NO: 1272699 - DNA, 25 bp, Homo sapien
agctctccagcttttccgaatccga

SEQ ID NO: 1272700 - DNA, 25 bp, Homo sapien
ttccgaatccgagtccctcagaggc

SEQ ID NO: 1272701 - DNA, 25 bp, Homo sapien
gcactggggtgttcattgagcagca

SEQ ID NO: 1272702 - DNA, 25 bp, Homo sapien
caaggaagccgtgaccgggagagtg

SEQ ID NO: 1272703 - DNA, 25 bp, Homo sapien
cagaaaatctgttgacggaaccgtt

SEQ ID NO: 1272704 - DNA, 25 bp, Homo sapien
tctccctgaactgcaagcaaattgg

SEQ ID NO: 1272705 - DNA, 25 bp, Homo sapien
tggactctcctctcggacaggttct

SEQ ID NO: 1272706 - DNA, 25 bp, Homo sapien
caacagatttctggagcgcatcccc

SEQ ID NO: 1272707 - DNA, 25 bp, Homo sapien
tttcagtgagggctaaaccagatgc

SEQ ID NO: 1272708 - DNA, 25 bp, Homo sapien
cagatgccttgtctaccgcaaaggg

SEQ ID NO: 1272709 - DNA, 25 bp, Homo sapien
acttgttggatcagcccgagccatg

SEQ ID NO: 1272710 - DNA, 25 bp, Homo sapien
tccttgcttggcctccgtgggcatt

SEQ ID NO: 1272711 - DNA, 25 bp, Homo sapien
tccgctgccattggcgtcagcaagg

SEQ ID NO: 1272712 - DNA, 25 bp, Homo sapien
attggcgtcagcaaggcccgtcagc

SEQ ID NO: 1272713 - DNA, 25 bp, Homo sapien
ccaggtgtgacttggctccgctgcc

SEQ ID NO: 1272714 - DNA, 25 bp, Homo sapien
gacttggctccgctgccattggcgt

SEQ ID NO: 1272715 - DNA, 25 bp, Homo sapien
ctggaccgtggcattcttggtccca

SEQ ID NO: 1272716 - DNA, 25 bp, Homo sapien
tggtcccatggctgttcatgtggcc

SEQ ID NO: 1272717 - DNA, 25 bp, Homo sapien
gaccgtggcattcttggtcccatgg

SEQ ID NO: 1272718 - DNA, 25 bp, Homo sapien
ttggtcccatggctgttcatgtggc

SEQ ID NO: 1272719 - DNA, 25 bp, Homo sapien
gaatctcagcgccaaaaggaacttc

SEQ ID NO: 1272720 - DNA, 25 bp, Homo sapien
tgaagctgcggttgaatttttgtgg

SEQ ID NO: 1272721 - DNA, 25 bp, Homo sapien
ccacttttgtggaagcctgtgtgaa

SEQ ID NO: 1272722 - DNA, 25 bp, Homo sapien
cattatttaacgtttggcccagaat

SEQ ID NO: 1272723 - DNA, 25 bp, Homo sapien
ctgaagacagacagacaggctggag

SEQ ID NO: 1272724 - DNA, 25 bp, Homo sapien
agacagacagacaggctggagctta

SEQ ID NO: 1272725 - DNA, 25 bp, Homo sapien
gaagacagacagacaggctggagct

SEQ ID NO: 1272726 - DNA, 25 bp, Homo sapien
gacagacagacaggctggagcttac

SEQ ID NO: 1272727 - DNA, 25 bp, Homo sapien
gctgctctggtttgtaatatattgt

SEQ ID NO: 1272728 - DNA, 25 bp, Homo sapien
acagtgtgtggagctcggtctgggc

SEQ ID NO: 1272729 - DNA, 25 bp, Homo sapien
tgctctggtttgtaatatattgttc

SEQ ID NO: 1272730 - DNA, 25 bp, Homo sapien
gtgtgtggagctcggtctgggctgc

SEQ ID NO: 1272731 - DNA, 25 bp, Homo sapien
ggcaaagacgcattgcattttgcag

SEQ ID NO: 1272732 - DNA, 25 bp, Homo sapien
cacggacgtcctggaagacagtctg

SEQ ID NO: 1272733 - DNA, 25 bp, Homo sapien
ctgccgcacggacgtcctggaagac

SEQ ID NO: 1272734 - DNA, 25 bp, Homo sapien
gtttggcaaagacgcattgcatttt

SEQ ID NO: 1272735 - DNA, 25 bp, Homo sapien
cattctggaaatactggctttgcac

SEQ ID NO: 1272736 - DNA, 25 bp, Homo sapien
tgctccctgccgtctttctgtgcct

SEQ ID NO: 1272737 - DNA, 25 bp, Homo sapien
ttcaggcacggaagaacattctgga

SEQ ID NO: 1272738 - DNA, 25 bp, Homo sapien
ttacaaggtggttcctcgggacagc

SEQ ID NO: 1272739 - DNA, 25 bp, Homo sapien
gaggagtgaagtggtcttctgtccc

SEQ ID NO: 1272740 - DNA, 25 bp, Homo sapien
tattagatctcctattagcaagagg

SEQ ID NO: 1272741 - DNA, 25 bp, Homo sapien
gaagcagaatctgatccctgctcag

SEQ ID NO: 1272742 - DNA, 25 bp, Homo sapien
aaggatggttgtttgacacaattat

SEQ ID NO: 1272743 - DNA, 25 bp, Homo sapien
ttgccgtcaggatccaggtgaactg

SEQ ID NO: 1272744 - DNA, 25 bp, Homo sapien
gctttgccgtcaggatccaggtgaa

SEQ ID NO: 1272745 - DNA, 25 bp, Homo sapien
gactttccaggtgcagagccttgtc

SEQ ID NO: 1272746 - DNA, 25 bp, Homo sapien
tgactttccaggtgcagagccttgt

SEQ ID NO: 1272747 - DNA, 25 bp, Homo sapien
gagcatcattctgtgaagagtactt

SEQ ID NO: 1272748 - DNA, 25 bp, Homo sapien
cgccacggcagttggctttctccat

SEQ ID NO: 1272749 - DNA, 25 bp, Homo sapien
ccttcaggttgctttgtcggaaatg

SEQ ID NO: 1272750 - DNA, 25 bp, Homo sapien
cccgtccaacgggttgggccgcatg

SEQ ID NO: 1272751 - DNA, 25 bp, Homo sapien
tgcaccctcacttgtgctctttctg

SEQ ID NO: 1272752 - DNA, 25 bp, Homo sapien
cctgtgagccatagctgccttggag

SEQ ID NO: 1272753 - DNA, 25 bp, Homo sapien
ttggagggtcatacaggtctaggcc

SEQ ID NO: 1272754 - DNA, 25 bp, Homo sapien
tcttagagcggttgtactccttgga

SEQ ID NO: 1272755 - DNA, 25 bp, Homo sapien
gagagctgccagcctctattgcaag

SEQ ID NO: 1272756 - DNA, 25 bp, Homo sapien
tgccaggttccactgtgatagactg

SEQ ID NO: 1272757 - DNA, 25 bp, Homo sapien
aaagagaatcgagtgttcaggggcc

SEQ ID NO: 1272758 - DNA, 25 bp, Homo sapien
actgtctgcgttgtctgggccctgg

SEQ ID NO: 1272759 - DNA, 25 bp, Homo sapien
ggtgacttctaatgggcaccttatg

SEQ ID NO: 1272760 - DNA, 25 bp, Homo sapien
gcttctggtgacttctaatgggcac

SEQ ID NO: 1272761 - DNA, 25 bp, Homo sapien
cttctaatgggcaccttatgtttta

SEQ ID NO: 1272762 - DNA, 25 bp, Homo sapien
taatgagcttctggtgacttctaat

SEQ ID NO: 1272763 - DNA, 25 bp, Homo sapien
caggaagtagttcagacccttggga

SEQ ID NO: 1272764 - DNA, 25 bp, Homo sapien
cctggtgcttgacccagactgccga

SEQ ID NO: 1272765 - DNA, 25 bp, Homo sapien
accccgaggaagtgacccctatgag

SEQ ID NO: 1272766 - DNA, 25 bp, Homo sapien
ccttgggatacctggcgtggtcctc

SEQ ID NO: 1272767 - DNA, 25 bp, Homo sapien
gaatagaactttcacaggttagtgg

SEQ ID NO: 1272768 - DNA, 25 bp, Homo sapien
tgtaacctggctgtctacactagat

SEQ ID NO: 1272769 - DNA, 25 bp, Homo sapien
tggtcttagcggaaggtccccagag

SEQ ID NO: 1272770 - DNA, 25 bp, Homo sapien
gattccaggtaggagaatccaggca

SEQ ID NO: 1272771 - DNA, 25 bp, Homo sapien
ggaaacctgagttgaagccgagcct

SEQ ID NO: 1272772 - DNA, 25 bp, Homo sapien
tggggtgtgaggctataaacagccc

SEQ ID NO: 1272773 - DNA, 25 bp, Homo sapien
tgaagccgagccttgggttaggccc

SEQ ID NO: 1272774 - DNA, 25 bp, Homo sapien
tgtctgcacatagggaaacctgagt

SEQ ID NO: 1272775 - DNA, 25 bp, Homo sapien
ggctatttctccaaaatgcgttggt

SEQ ID NO: 1272776 - DNA, 25 bp, Homo sapien
caaaatgcgttggttggtgtggaat

SEQ ID NO: 1272777 - DNA, 25 bp, Homo sapien
tctgtgagtgttgagggcctgctcc

SEQ ID NO: 1272778 - DNA, 25 bp, Homo sapien
attgggtacaacctggtactttctg

SEQ ID NO: 1272779 - DNA, 25 bp, Homo sapien
tgaaggctgggatatttcccacttt

SEQ ID NO: 1272780 - DNA, 25 bp, Homo sapien
tggggctgcttcagtattcatggct

SEQ ID NO: 1272781 - DNA, 25 bp, Homo sapien
tctgaaggctgggatatttcccact

SEQ ID NO: 1272782 - DNA, 25 bp, Homo sapien
gggctgcttcagtattcatggcttg

SEQ ID NO: 1272783 - DNA, 25 bp, Homo sapien
acgccctggctggtagtgtttgaac

SEQ ID NO: 1272784 - DNA, 25 bp, Homo sapien
tgtttttggtggcagatgcggtgac

SEQ ID NO: 1272785 - DNA, 25 bp, Homo sapien
ttggtggcagatgcggtgacgccct

SEQ ID NO: 1272786 - DNA, 25 bp, Homo sapien
cacttgggtccacattttcagggta

SEQ ID NO: 1272787 - DNA, 25 bp, Homo sapien
gggctgagaaactcttacgaaatta

SEQ ID NO: 1272788 - DNA, 25 bp, Homo sapien
taatgcgaaaacatgctgaaaagac

SEQ ID NO: 1272789 - DNA, 25 bp, Homo sapien
tcctgttgagagtctcttaagctag

SEQ ID NO: 1272790 - DNA, 25 bp, Homo sapien
tgaaaagacagttctgtagaaatgt

SEQ ID NO: 1272791 - DNA, 25 bp, Homo sapien
tctacatccgttttgaattccaaag

SEQ ID NO: 1272792 - DNA, 25 bp, Homo sapien
tatcaggagagcgaaccagtctgtc

SEQ ID NO: 1272793 - DNA, 25 bp, Homo sapien
gaaaggtttgctgacgtctcctcgt

SEQ ID NO: 1272794 - DNA, 25 bp, Homo sapien
gatccttgtacaatccttggcagaa

SEQ ID NO: 1272795 - DNA, 25 bp, Homo sapien
tctaaatccccgagttgccggaaca

SEQ ID NO: 1272796 - DNA, 25 bp, Homo sapien
aatccccgagttgccggaacacaga

SEQ ID NO: 1272797 - DNA, 25 bp, Homo sapien
cagctctaaatccccgagttgccgg

SEQ ID NO: 1272798 - DNA, 25 bp, Homo sapien
cgagttgccggaacacagagaaatt

SEQ ID NO: 1272799 - DNA, 25 bp, Homo sapien
atctacgggagatgctgccgccatc

SEQ ID NO: 1272800 - DNA, 25 bp, Homo sapien
agagggccattagggctgccagcgg

SEQ ID NO: 1272801 - DNA, 25 bp, Homo sapien
gctgccagcggaggtcaggagcagt

SEQ ID NO: 1272802 - DNA, 25 bp, Homo sapien
agcagtgatctacgggagatgctgc

SEQ ID NO: 1272803 - DNA, 25 bp, Homo sapien
gcacgtgggtgtcacatatgcacac

SEQ ID NO: 1272804 - DNA, 25 bp, Homo sapien
cacgtgggtgtcacatatgcacaca

SEQ ID NO: 1272805 - DNA, 25 bp, Homo sapien
cagagagacgcagagcagtgccgct

SEQ ID NO: 1272806 - DNA, 25 bp, Homo sapien
tggggactcacagcagtactgctgg

SEQ ID NO: 1272807 - DNA, 25 bp, Homo sapien
acgccgaggacgcagagccgtgcca

SEQ ID NO: 1272808 - DNA, 25 bp, Homo sapien
accccggggactcagagcagtgccg

SEQ ID NO: 1272809 - DNA, 25 bp, Homo sapien
ttgacaacctcccacatttttctgg

SEQ ID NO: 1272810 - DNA, 25 bp, Homo sapien
agtagccaatgtagttaagcccaca

SEQ ID NO: 1272811 - DNA, 25 bp, Homo sapien
tagccaatgtagttaagcccacact

SEQ ID NO: 1272812 - DNA, 25 bp, Homo sapien
ccaatgtagttaagcccacactgat

SEQ ID NO: 1272813 - DNA, 25 bp, Homo sapien
gagtgtttgaaggtcagccgggaga

SEQ ID NO: 1272814 - DNA, 25 bp, Homo sapien
taggatgtggtggttaaagcagccc

SEQ ID NO: 1272815 - DNA, 25 bp, Homo sapien
tggacactaggatgtggtggttaaa

SEQ ID NO: 1272816 - DNA, 25 bp, Homo sapien
gaggagtaaatgtcacgagcccagt

SEQ ID NO: 1272817 - DNA, 25 bp, Homo sapien
gccggggaagtgaccggcagggcca

SEQ ID NO: 1272818 - DNA, 25 bp, Homo sapien
gagagaggacgtggaaggaggtgag

SEQ ID NO: 1272819 - DNA, 25 bp, Homo sapien
ggtgaggccggggaagtgaccggca

SEQ ID NO: 1272820 - DNA, 25 bp, Homo sapien
ctggtggagagaggacgtggaagga

SEQ ID NO: 1272821 - DNA, 25 bp, Homo sapien
ggttgatacagcacctcgggtctga

SEQ ID NO: 1272822 - DNA, 25 bp, Homo sapien
gtatttatgggagccgtgcacagga

SEQ ID NO: 1272823 - DNA, 25 bp, Homo sapien
tatgttgccaggagtgcttagcgga

SEQ ID NO: 1272824 - DNA, 25 bp, Homo sapien
tgagtttgcatgtggaacgaggccc

SEQ ID NO: 1272825 - DNA, 25 bp, Homo sapien
gatagactgtcccttctgaggaaac

SEQ ID NO: 1272826 - DNA, 25 bp, Homo sapien
tcattcgaataggtggtcccgttaa

SEQ ID NO: 1272827 - DNA, 25 bp, Homo sapien
gcacggacggagacctctggttcct

SEQ ID NO: 1272828 - DNA, 25 bp, Homo sapien
cctgattgccaggtcttgagctgct

SEQ ID NO: 1272829 - DNA, 25 bp, Homo sapien
agagttttcagaagggatgcctcct

SEQ ID NO: 1272830 - DNA, 25 bp, Homo sapien
agttgcttgaacaactggacaagcc

SEQ ID NO: 1272831 - DNA, 25 bp, Homo sapien
ttttcagaagggatgcctcctggca

SEQ ID NO: 1272832 - DNA, 25 bp, Homo sapien
gttgcttgaacaactggacaagccc

SEQ ID NO: 1272833 - DNA, 25 bp, Homo sapien
tggagacacatgtgcgcggcgagct

SEQ ID NO: 1272834 - DNA, 25 bp, Homo sapien
gcagccctgggatggatctttcgaa

SEQ ID NO: 1272835 - DNA, 25 bp, Homo sapien
tgtttggaagatgaatcctatctcc

SEQ ID NO: 1272836 - DNA, 25 bp, Homo sapien
ccctgggatggatctttcgaagcac

SEQ ID NO: 1272837 - DNA, 25 bp, Homo sapien
gcgcacagttgctaatccgttgaaa

SEQ ID NO: 1272838 - DNA, 25 bp, Homo sapien
gggtgccctgtacaactccacaaat

SEQ ID NO: 1272839 - DNA, 25 bp, Homo sapien
aaatacgtgtccaccgtcctgctgg

SEQ ID NO: 1272840 - DNA, 25 bp, Homo sapien
tccgttgaaatacctctgtggctgc

SEQ ID NO: 1272841 - DNA, 25 bp, Homo sapien
taatgagagctctgcgcctgctact

SEQ ID NO: 1272842 - DNA, 25 bp, Homo sapien
tataaagcccggcaccagcgtgagg

SEQ ID NO: 1272843 - DNA, 25 bp, Homo sapien
tctctggagcaggacgggcttttct

SEQ ID NO: 1272844 - DNA, 25 bp, Homo sapien
gaaggatgcaccctttgctctctgg

SEQ ID NO: 1272845 - DNA, 25 bp, Homo sapien
tggtggtcgctgttgtcttcccgca

SEQ ID NO: 1272846 - DNA, 25 bp, Homo sapien
tccaaagtcgaaagctcctctggct

SEQ ID NO: 1272847 - DNA, 25 bp, Homo sapien
tcccgcagcgatagaatgaggctct

SEQ ID NO: 1272848 - DNA, 25 bp, Homo sapien
aaaaatgggcgtgatactggtggtc

SEQ ID NO: 1272849 - DNA, 25 bp, Homo sapien
cctcctggggttggaagtcaatcac

SEQ ID NO: 1272850 - DNA, 25 bp, Homo sapien
ttggaagtcaatcacaagtttgggt

SEQ ID NO: 1272851 - DNA, 25 bp, Homo sapien
gggttggaagtcaatcacaagtttg

SEQ ID NO: 1272852 - DNA, 25 bp, Homo sapien
gaagtcaatcacaagtttgggtaaa

SEQ ID NO: 1272853 - DNA, 25 bp, Homo sapien
tcagatcagcaagtctgcatcttca

SEQ ID NO: 1272854 - DNA, 25 bp, Homo sapien
cagatcagcaagtctgcatcttcat

SEQ ID NO: 1272855 - DNA, 25 bp, Homo sapien
caccacccacatagagctagcaaga

SEQ ID NO: 1272856 - DNA, 25 bp, Homo sapien
cacccacatagagctagcaagagaa

SEQ ID NO: 1272857 - DNA, 25 bp, Homo sapien
catagagctagcaagagaaagtctg

SEQ ID NO: 1272858 - DNA, 25 bp, Homo sapien
agccattgctgagaacgttccagaa

SEQ ID NO: 1272859 - DNA, 25 bp, Homo sapien
tttctacttgaacgtccaaaggaca

SEQ ID NO: 1272860 - DNA, 25 bp, Homo sapien
tcgatgtggtatttaggatccggga

SEQ ID NO: 1272861 - DNA, 25 bp, Homo sapien
attcttctcagcatcgatgtggtat

SEQ ID NO: 1272862 - DNA, 25 bp, Homo sapien
ttcatcttgacagtcgagtcattct

SEQ ID NO: 1272863 - DNA, 25 bp, Homo sapien
gtgtcctggattgggagaagcaaaa

SEQ ID NO: 1272864 - DNA, 25 bp, Homo sapien
tgagcacaacagagatgggagcctg

SEQ ID NO: 1272865 - DNA, 25 bp, Homo sapien
ctggattgggagaagcaaaatttac

SEQ ID NO: 1272866 - DNA, 25 bp, Homo sapien
catcagcttcctcggaaaggcttct

SEQ ID NO: 1272867 - DNA, 25 bp, Homo sapien
ctctggtcactggtgtcaactccat

SEQ ID NO: 1272868 - DNA, 25 bp, Homo sapien
ctcaaggccaagtttagcatctctg

SEQ ID NO: 1272869 - DNA, 25 bp, Homo sapien
ttctcaaggccaagtttagcatctc

SEQ ID NO: 1272870 - DNA, 25 bp, Homo sapien
ccttctcaaggccaagtttagcatc

SEQ ID NO: 1272871 - DNA, 25 bp, Homo sapien
cgtcgggtctgtccatgcacaggtg

SEQ ID NO: 1272872 - DNA, 25 bp, Homo sapien
gattctgcttcccatgccgtcgggt

SEQ ID NO: 1272873 - DNA, 25 bp, Homo sapien
aacctgctggatgctttgacttcga

SEQ ID NO: 1272874 - DNA, 25 bp, Homo sapien
ttgacttcgacaggcgtctgccagg

SEQ ID NO: 1272875 - DNA, 25 bp, Homo sapien
gccaggagtgcaagttcccggtgtc

SEQ ID NO: 1272876 - DNA, 25 bp, Homo sapien
tggggccaggagtgcaagttcccgg

SEQ ID NO: 1272877 - DNA, 25 bp, Homo sapien
gggccaggagtgcaagttcccggtg

SEQ ID NO: 1272878 - DNA, 25 bp, Homo sapien
cttggggccaggagtgcaagttccc

SEQ ID NO: 1272879 - DNA, 25 bp, Homo sapien
caggccccgcagtttattcttagca

SEQ ID NO: 1272880 - DNA, 25 bp, Homo sapien
gacacctggcagtgaatacttccga

SEQ ID NO: 1272881 - DNA, 25 bp, Homo sapien
taaattgttactcgctgcccatgga

SEQ ID NO: 1272882 - DNA, 25 bp, Homo sapien
ttgttttgtttctggcgccccgcag

SEQ ID NO: 1272883 - DNA, 25 bp, Homo sapien
ttaagctgtttagtttgaggtgact

SEQ ID NO: 1272884 - DNA, 25 bp, Homo sapien
ttggtggctggcgttgtgacttccc

SEQ ID NO: 1272885 - DNA, 25 bp, Homo sapien
tcactctctccaccgggatgatctg

SEQ ID NO: 1272886 - DNA, 25 bp, Homo sapien
caccgggatgatctgtaggaattca

SEQ ID NO: 1272887 - DNA, 25 bp, Homo sapien
gcctttacctgcgatggaattgaat

SEQ ID NO: 1272888 - DNA, 25 bp, Homo sapien
cattggtggaaacctttcccggcag

SEQ ID NO: 1272889 - DNA, 25 bp, Homo sapien
gctgccctgttgaatgcgttgatgc

SEQ ID NO: 1272890 - DNA, 25 bp, Homo sapien
cagcctcacgtctgcttttcaggta

SEQ ID NO: 1272891 - DNA, 25 bp, Homo sapien
aatgcgttgatgcattttctcatgc

SEQ ID NO: 1272892 - DNA, 25 bp, Homo sapien
ggctgtttccgggaaaggccatgga

SEQ ID NO: 1272893 - DNA, 25 bp, Homo sapien
cctcatccctcagggcataggaaag

SEQ ID NO: 1272894 - DNA, 25 bp, Homo sapien
ataggaaaggcccttgggaatgccg

SEQ ID NO: 1272895 - DNA, 25 bp, Homo sapien
tccgggaaaggccatggagtgttct

SEQ ID NO: 1272896 - DNA, 25 bp, Homo sapien
cctgaacccggtgcctgctcatgag

SEQ ID NO: 1272897 - DNA, 25 bp, Homo sapien
cttatgtagatcaaccagagccttg

SEQ ID NO: 1272898 - DNA, 25 bp, Homo sapien
tgctcatgagccagtctccctcttg

SEQ ID NO: 1272899 - DNA, 25 bp, Homo sapien
gggatatgagaagttaatttccaca

SEQ ID NO: 1272900 - DNA, 25 bp, Homo sapien
ggcgagactctcacgcaagggactt

SEQ ID NO: 1272901 - DNA, 25 bp, Homo sapien
tctggtttcgtaacggccgtgtggc

SEQ ID NO: 1272902 - DNA, 25 bp, Homo sapien
tgggataatcatgccacctcctggg

SEQ ID NO: 1272903 - DNA, 25 bp, Homo sapien
gagtttttagctagtccccgacaca

SEQ ID NO: 1272904 - DNA, 25 bp, Homo sapien
ggtccagccatgttcccggaataac

SEQ ID NO: 1272905 - DNA, 25 bp, Homo sapien
gaggtgccgacggtgcccagggtaa

SEQ ID NO: 1272906 - DNA, 25 bp, Homo sapien
aagcacggccgtccctgagtgctgg

SEQ ID NO: 1272907 - DNA, 25 bp, Homo sapien
atgttcccggaataactccggcctg

SEQ ID NO: 1272908 - DNA, 25 bp, Homo sapien
gggcgaaaattaatgccacagatgt

SEQ ID NO: 1272909 - DNA, 25 bp, Homo sapien
cctgcatttgtttacagggcgaaaa

SEQ ID NO: 1272910 - DNA, 25 bp, Homo sapien
cactttgcataaaggaggatttggt

SEQ ID NO: 1272911 - DNA, 25 bp, Homo sapien
ggagcacccgttgaaaccattgggc

SEQ ID NO: 1272912 - DNA, 25 bp, Homo sapien
gacattttgataagaaccgttttgc

SEQ ID NO: 1272913 - DNA, 25 bp, Homo sapien
gctgttctgaaaaccagctgtgaag

SEQ ID NO: 1272914 - DNA, 25 bp, Homo sapien
tccaggccgaggttttctggcaaaa

SEQ ID NO: 1272915 - DNA, 25 bp, Homo sapien
gaatctttgactctaagctgttctg

SEQ ID NO: 1272916 - DNA, 25 bp, Homo sapien
ttcctgcttcactgtcggagacctc

SEQ ID NO: 1272917 - DNA, 25 bp, Homo sapien
gaaggaggctctgtttcctgcttca

SEQ ID NO: 1272918 - DNA, 25 bp, Homo sapien
tgcactcagaaggaggctctgtttc

SEQ ID NO: 1272919 - DNA, 25 bp, Homo sapien
ctgtttcctgcttcactgtcggaga

SEQ ID NO: 1272920 - DNA, 25 bp, Homo sapien
tatggggcatctcttctagagctag

SEQ ID NO: 1272921 - DNA, 25 bp, Homo sapien
ccaacatggagacatgtttaataga

SEQ ID NO: 1272922 - DNA, 25 bp, Homo sapien
cctgcgtttgctgtgcacgtgcctg

SEQ ID NO: 1272923 - DNA, 25 bp, Homo sapien
tgtgggtgatgctgatttctaatgc

SEQ ID NO: 1272924 - DNA, 25 bp, Homo sapien
aggccccagtatgtggtagtcccct

SEQ ID NO: 1272925 - DNA, 25 bp, Homo sapien
cccagtatgtggtagtcccctccct

SEQ ID NO: 1272926 - DNA, 25 bp, Homo sapien
ggccccagtatgtggtagtcccctc

SEQ ID NO: 1272927 - DNA, 25 bp, Homo sapien
ccagtatgtggtagtcccctccctg

SEQ ID NO: 1272928 - DNA, 25 bp, Homo sapien
cacagcaggttgcttggcagtggcc

SEQ ID NO: 1272929 - DNA, 25 bp, Homo sapien
ggaagcatccattctcagccacagc

SEQ ID NO: 1272930 - DNA, 25 bp, Homo sapien
tcttttcaaaacacgattggattgg

SEQ ID NO: 1272931 - DNA, 25 bp, Homo sapien
agccacagcaggttgcttggcagtg

SEQ ID NO: 1272932 - DNA, 25 bp, Homo sapien
tttggtcattaagtttcagggaaca

SEQ ID NO: 1272933 - DNA, 25 bp, Homo sapien
cattaagtttcagggaacatgtaat

SEQ ID NO: 1272934 - DNA, 25 bp, Homo sapien
ggaacatgtaattttctccacatct

SEQ ID NO: 1272935 - DNA, 25 bp, Homo sapien
ttcagggaacatgtaattttctcca

SEQ ID NO: 1272936 - DNA, 25 bp, Homo sapien
gccatgacgcttggcctttggttgg

SEQ ID NO: 1272937 - DNA, 25 bp, Homo sapien
gcaccacttgattcatcactggcag

SEQ ID NO: 1272938 - DNA, 25 bp, Homo sapien
ggttgggatagcaccacttgattca

SEQ ID NO: 1272939 - DNA, 25 bp, Homo sapien
cctttggttgggatagcaccacttg

SEQ ID NO: 1272940 - DNA, 25 bp, Homo sapien
aagagatgggttctagataccttaa

SEQ ID NO: 1272941 - DNA, 25 bp, Homo sapien
gaaccagaaataaatgagggcaaaa

SEQ ID NO: 1272942 - DNA, 25 bp, Homo sapien
tccaataaatcagacaggattccct

SEQ ID NO: 1272943 - DNA, 25 bp, Homo sapien
tctctcatgtctaggagtaagattg

SEQ ID NO: 1272944 - DNA, 25 bp, Homo sapien
ccagggaacccagccgtgtgcgcag

SEQ ID NO: 1272945 - DNA, 25 bp, Homo sapien
tatccaaggacgcatgggaactggc

SEQ ID NO: 1272946 - DNA, 25 bp, Homo sapien
acgcatgggaactggccgcccagtg

SEQ ID NO: 1272947 - DNA, 25 bp, Homo sapien
gtggctgaaatgtatccaaggacgc

SEQ ID NO: 1272948 - DNA, 25 bp, Homo sapien
gagaagaggcgcttaaattgcccag

SEQ ID NO: 1272949 - DNA, 25 bp, Homo sapien
gtttgtctacccctgtgctaggtga

SEQ ID NO: 1272950 - DNA, 25 bp, Homo sapien
ggtgtaaatcaagccagcccacagg

SEQ ID NO: 1272951 - DNA, 25 bp, Homo sapien
tgatgtgaaagctacatagggcagg

SEQ ID NO: 1272952 - DNA, 25 bp, Homo sapien
taattgctttagtttccttgatgcg

SEQ ID NO: 1272953 - DNA, 25 bp, Homo sapien
ttgctttagtttccttgatgcgcag
